United States Patent Application Publication US 2005/0255487 A1 - sequence listing, part 93

SEQ ID NO: 2558023 - RNA, 19 nt, Homo sapiens
  misc_RNA (1)...(19): siRNA sense strand
gcugagaaagauagggaau

SEQ ID NO: 2558024 - RNA, 19 nt, Homo sapiens
  misc_RNA (1)...(19): siRNA sense strand
aagagaaagacgagaucua

SEQ ID NO: 2558025 - RNA, 19 nt, Homo sapiens
  misc_RNA (1)...(19): siRNA sense strand
gaagcaaaggagagagaga

SEQ ID NO: 2558026 - RNA, 19 nt, Homo sapiens
  misc_RNA (1)...(19): siRNA sense strand
ccgagaaagagaaggugaa

SEQ ID NO: 2558027 - RNA, 19 nt, Homo sapiens
  misc_RNA (1)...(19): siRNA sense strand
cauucaaagcuguggaaga

SEQ ID NO: 2558028 - RNA, 19 nt, Homo sapiens
  misc_RNA (1)...(19): siRNA sense strand
agagagagaaggagcguau

SEQ ID NO: 2558029 - RNA, 19 nt, Homo sapiens
  misc_RNA (1)...(19): siRNA sense strand
agguggauggagagagaaa

SEQ ID NO: 2558030 - RNA, 19 nt, Homo sapiens
  misc_RNA (1)...(19): siRNA sense strand
agaaagaagaacagcauca

SEQ ID NO: 2558031 - RNA, 19 nt, Homo sapiens
  misc_RNA (1)...(19): siRNA sense strand
agaccgagaccgagaaaga

SEQ ID NO: 2558032 - RNA, 19 nt, Homo sapiens
  misc_RNA (1)...(19): siRNA sense strand
gggagcaacaagaggaaga

SEQ ID NO: 2558033 - RNA, 19 nt, Homo sapiens
  misc_RNA (1)...(19): siRNA sense strand
agaacggcguagagaggaa

SEQ ID NO: 2558034 - RNA, 19 nt, Homo sapiens
  misc_RNA (1)...(19): siRNA sense strand
acaaggacccugagagaga

SEQ ID NO: 2558035 - RNA, 19 nt, Homo sapiens
  misc_RNA (1)...(19): siRNA sense strand
agaaagagaccgagaccga

SEQ ID NO: 2558036 - RNA, 19 nt, Homo sapiens
  misc_RNA (1)...(19): siRNA sense strand
ugacaaggacccugagaga

SEQ ID NO: 2558037 - RNA, 19 nt, Homo sapiens
  misc_RNA (1)...(19): siRNA sense strand
acacaagacgagaugcaaa

SEQ ID NO: 2558038 - RNA, 19 nt, Homo sapiens
  misc_RNA (1)...(19): siRNA sense strand
ccguaaacugugugacaau

SEQ ID NO: 2558039 - RNA, 19 nt, Homo sapiens
  misc_RNA (1)...(19): siRNA sense strand
ggcuaaacagguugaacaa

SEQ ID NO: 2558040 - RNA, 19 nt, Homo sapiens
  misc_RNA (1)...(19): siRNA sense strand
ucaagaacgccuaaagaau

SEQ ID NO: 2558041 - RNA, 19 nt, Homo sapiens
  misc_RNA (1)...(19): siRNA sense strand
guagagaggaagagagaag

SEQ ID NO: 2558042 - RNA, 19 nt, Homo sapiens
  misc_RNA (1)...(19): siRNA sense strand
cuuacgaggaacagagaau

SEQ ID NO: 2558043 - RNA, 19 nt, Homo sapiens
  misc_RNA (1)...(19): siRNA sense strand
ugaaaaggcucuugaacau

SEQ ID NO: 2558044 - RNA, 19 nt, Homo sapiens
  misc_RNA (1)...(19): siRNA sense strand
agagaagggcagaagaaca

SEQ ID NO: 2558045 - RNA, 19 nt, Homo sapiens
  misc_RNA (1)...(19): siRNA sense strand
ggaguggagacguggagaa

SEQ ID NO: 2558046 - RNA, 19 nt, Homo sapiens
  misc_RNA (1)...(19): siRNA sense strand
agauguggaucgagaggau

SEQ ID NO: 2558047 - RNA, 19 nt, Homo sapiens
  misc_RNA (1)...(19): siRNA sense strand
ucuucaagcuggagagacu

SEQ ID NO: 2558048 - RNA, 19 nt, Homo sapiens
  misc_RNA (1)...(19): siRNA sense strand
cggcaaucaaucuuaauaa

SEQ ID NO: 2558049 - RNA, 19 nt, Homo sapiens
  misc_RNA (1)...(19): siRNA sense strand
gggugaagaaauuagaaga

SEQ ID NO: 2558050 - RNA, 19 nt, Homo sapiens
  misc_RNA (1)...(19): siRNA sense strand
uauugaagaccuugaggaa

SEQ ID NO: 2558051 - RNA, 19 nt, Homo sapiens
  misc_RNA (1)...(19): siRNA sense strand
aacaagaggaagaaagaau

SEQ ID NO: 2558052 - RNA, 19 nt, Homo sapiens
  misc_RNA (1)...(19): siRNA sense strand
gggaugaugaagauagaga

SEQ ID NO: 2558053 - RNA, 19 nt, Homo sapiens
  misc_RNA (1)...(19): siRNA sense strand
ggauaacauacuauagaga

SEQ ID NO: 2558054 - RNA, 19 nt, Homo sapiens
  misc_RNA (1)...(19): siRNA sense strand
ggguccaccucgagaauca

SEQ ID NO: 2558055 - RNA, 19 nt, Homo sapiens
  misc_RNA (1)...(19): siRNA sense strand
cgagaaagagaaggugaaa

SEQ ID NO: 2558056 - RNA, 19 nt, Homo sapiens
  misc_RNA (1)...(19): siRNA sense strand
aagacgagaugcaaagaau

SEQ ID NO: 2558057 - RNA, 19 nt, Homo sapiens
  misc_RNA (1)...(19): siRNA sense strand
ggcuugaaguagaauuuaa

SEQ ID NO: 2558058 - RNA, 19 nt, Homo sapiens
  misc_RNA (1)...(19): siRNA sense strand
aggaagcaaaggagagaga

SEQ ID NO: 2558059 - RNA, 19 nt, Homo sapiens
  misc_RNA (1)...(19): siRNA sense strand
ccugagagagaaagggaca

SEQ ID NO: 2558060 - RNA, 19 nt, Homo sapiens
  misc_RNA (1)...(19): siRNA sense strand
ggaguuggaaauugaagaa

SEQ ID NO: 2558061 - RNA, 19 nt, Homo sapiens
  misc_RNA (1)...(19): siRNA sense strand
uggcauggaugaugacaga

SEQ ID NO: 2558062 - RNA, 19 nt, Homo sapiens
  misc_RNA (1)...(19): siRNA sense strand
ggacagaggaagcuggcga

SEQ ID NO: 2558063 - RNA, 19 nt, Homo sapiens
  misc_RNA (1)...(19): siRNA sense strand
agagagauguggaucgaga

SEQ ID NO: 2558064 - RNA, 19 nt, Homo sapiens
  misc_RNA (1)...(19): siRNA sense strand
gguuaaccaaguaccgaaa

SEQ ID NO: 2558065 - RNA, 19 nt, Homo sapiens
  misc_RNA (1)...(19): siRNA sense strand
cagugaaauacgcguacua

SEQ ID NO: 2558066 - RNA, 19 nt, Homo sapiens
  misc_RNA (1)...(19): siRNA sense strand
gcaugagcaucaaagccua

SEQ ID NO: 2558067 - RNA, 19 nt, Homo sapiens
  misc_RNA (1)...(19): siRNA sense strand
cuggaaaggugucagcuga

SEQ ID NO: 2558068 - RNA, 19 nt, Homo sapiens
  misc_RNA (1)...(19): siRNA sense strand
cagaagaugaaguggcugu

SEQ ID NO: 2558069 - RNA, 19 nt, Homo sapiens
  misc_RNA (1)...(19): siRNA sense strand
ggaccaugggagugauguu

SEQ ID NO: 2558070 - RNA, 19 nt, Homo sapiens
  misc_RNA (1)...(19): siRNA sense strand
cgaaaauaguucccgauga

SEQ ID NO: 2558071 - RNA, 19 nt, Homo sapiens
  misc_RNA (1)...(19): siRNA sense strand
cgccucugacagugaaaua

SEQ ID NO: 2558072 - RNA, 19 nt, Homo sapiens
  misc_RNA (1)...(19): siRNA sense strand
acucaguggaggucaccaa

SEQ ID NO: 2558073 - RNA, 19 nt, Homo sapiens
  misc_RNA (1)...(19): siRNA sense strand
ggaucaucuacgaccgaaa

SEQ ID NO: 2558074 - RNA, 19 nt, Homo sapiens
  misc_RNA (1)...(19): siRNA sense strand
uggaggagcugaaggagca

SEQ ID NO: 2558075 - RNA, 19 nt, Homo sapiens
  misc_RNA (1)...(19): siRNA sense strand
agcaggagacagaggaaga

SEQ ID NO: 2558076 - RNA, 19 nt, Homo sapiens
  misc_RNA (1)...(19): siRNA sense strand
gagcugaaggagcaggaga

SEQ ID NO: 2558077 - RNA, 19 nt, Homo sapiens
  misc_RNA (1)...(19): siRNA sense strand
agacagaggaagagauacc

SEQ ID NO: 2558078 - RNA, 19 nt, Homo sapiens
  misc_RNA (1)...(19): siRNA sense strand
aguuccugcuggagugcaa

SEQ ID NO: 2558079 - RNA, 19 nt, Homo sapiens
  misc_RNA (1)...(19): siRNA sense strand
gguaaaggaaggagacaca

SEQ ID NO: 2558080 - RNA, 19 nt, Homo sapiens
  misc_RNA (1)...(19): siRNA sense strand
ccaugaagcagcagcuaaa

SEQ ID NO: 2558081 - RNA, 19 nt, Homo sapiens
  misc_RNA (1)...(19): siRNA sense strand
aggaagugucugaggagaa

SEQ ID NO: 2558082 - RNA, 19 nt, Homo sapiens
  misc_RNA (1)...(19): siRNA sense strand
ugugaauuguagagacuua

SEQ ID NO: 2558083 - RNA, 19 nt, Homo sapiens
  misc_RNA (1)...(19): siRNA sense strand
uggaauuggaggaggaaca

SEQ ID NO: 2558084 - RNA, 19 nt, Homo sapiens
  misc_RNA (1)...(19): siRNA sense strand
ucggaacacugaugggaaa

SEQ ID NO: 2558085 - RNA, 19 nt, Homo sapiens
  misc_RNA (1)...(19): siRNA sense strand
cagaaaggaaggaaggaga

SEQ ID NO: 2558086 - RNA, 19 nt, Homo sapiens
  misc_RNA (1)...(19): siRNA sense strand
uagagugacccuugggaaa

SEQ ID NO: 2558087 - RNA, 19 nt, Homo sapiens
  misc_RNA (1)...(19): siRNA sense strand
gcaaaagugcuguggauau

SEQ ID NO: 2558088 - RNA, 19 nt, Homo sapiens
  misc_RNA (1)...(19): siRNA sense strand
ggagcaaauguuaaugaaa

SEQ ID NO: 2558089 - RNA, 19 nt, Homo sapiens
  misc_RNA (1)...(19): siRNA sense strand
guguaaaugcaacagauaa

SEQ ID NO: 2558090 - RNA, 19 nt, Homo sapiens
  misc_RNA (1)...(19): siRNA sense strand
ccaugaagcagcccagaaa

SEQ ID NO: 2558091 - RNA, 19 nt, Homo sapiens
  misc_RNA (1)...(19): siRNA sense strand
agaaaggaaggaaggagaa

SEQ ID NO: 2558092 - RNA, 19 nt, Homo sapiens
  misc_RNA (1)...(19): siRNA sense strand
acguaaaugcaaaggacau

SEQ ID NO: 2558093 - RNA, 19 nt, Homo sapiens
  misc_RNA (1)...(19): siRNA sense strand
cuccagaagauaaagaaua

SEQ ID NO: 2558094 - RNA, 19 nt, Homo sapiens
  misc_RNA (1)...(19): siRNA sense strand
ccgaaagagcccauaauga

SEQ ID NO: 2558095 - RNA, 19 nt, Homo sapiens
  misc_RNA (1)...(19): siRNA sense strand
ucaaaggaguagaaagacu

SEQ ID NO: 2558096 - RNA, 19 nt, Homo sapiens
  misc_RNA (1)...(19): siRNA sense strand
acagaggagaacaggcaua

SEQ ID NO: 2558097 - RNA, 19 nt, Homo sapiens
  misc_RNA (1)...(19): siRNA sense strand
cggcaguggcaguaacaau

SEQ ID NO: 2558098 - RNA, 19 nt, Homo sapiens
  misc_RNA (1)...(19): siRNA sense strand
ugaauaucuucuagagcau

SEQ ID NO: 2558099 - RNA, 19 nt, Homo sapiens
  misc_RNA (1)...(19): siRNA sense strand
uaggagugguaaugaagaa

SEQ ID NO: 2558100 - RNA, 19 nt, Homo sapiens
  misc_RNA (1)...(19): siRNA sense strand
agaagcagacuuagcuaaa

SEQ ID NO: 2558101 - RNA, 19 nt, Homo sapiens
  misc_RNA (1)...(19): siRNA sense strand
cguaaacaagugacagaau

SEQ ID NO: 2558102 - RNA, 19 nt, Homo sapiens
  misc_RNA (1)...(19): siRNA sense strand
gggauaucuuugaaacaga

SEQ ID NO: 2558103 - RNA, 19 nt, Homo sapiens
  misc_RNA (1)...(19): siRNA sense strand
agccagagaagcagacuua

SEQ ID NO: 2558104 - RNA, 19 nt, Homo sapiens
  misc_RNA (1)...(19): siRNA sense strand
gcaaugaagcagugcagca

SEQ ID NO: 2558105 - RNA, 19 nt, Homo sapiens
  misc_RNA (1)...(19): siRNA sense strand
aagcagcagcuaaaggaaa

SEQ ID NO: 2558106 - RNA, 19 nt, Homo sapiens
  misc_RNA (1)...(19): siRNA sense strand
cagcagcacagaugggcaa

SEQ ID NO: 2558107 - RNA, 19 nt, Homo sapiens
  misc_RNA (1)...(19): siRNA sense strand
aauaucaacugcagagaca

SEQ ID NO: 2558108 - RNA, 19 nt, Homo sapiens
  misc_RNA (1)...(19): siRNA sense strand
aggagaaguugcuggucuu

SEQ ID NO: 2558109 - RNA, 19 nt, Homo sapiens
  misc_RNA (1)...(19): siRNA sense strand
gcgucaaugggcuggcaua

SEQ ID NO: 2558110 - RNA, 19 nt, Homo sapiens
  misc_RNA (1)...(19): siRNA sense strand
cuugaacaccuucgggaua

SEQ ID NO: 2558111 - RNA, 19 nt, Homo sapiens
  misc_RNA (1)...(19): siRNA sense strand
ggguaaagaggcuggugga

SEQ ID NO: 2558112 - RNA, 19 nt, Homo sapiens
  misc_RNA (1)...(19): siRNA sense strand
cagcuaaaggaaaguauga

SEQ ID NO: 2558113 - RNA, 19 nt, Homo sapiens
  misc_RNA (1)...(19): siRNA sense strand
gaaaaggagcaaauguuaa

SEQ ID NO: 2558114 - RNA, 19 nt, Homo sapiens
  misc_RNA (1)...(19): siRNA sense strand
ccuggaaguagcugaauau

SEQ ID NO: 2558115 - RNA, 19 nt, Homo sapiens
  misc_RNA (1)...(19): siRNA sense strand
guggaagaagagaugcaaa

SEQ ID NO: 2558116 - RNA, 19 nt, Homo sapiens
  misc_RNA (1)...(19): siRNA sense strand
caacagccgcagagcagaa

SEQ ID NO: 2558117 - RNA, 19 nt, Homo sapiens
  misc_RNA (1)...(19): siRNA sense strand
ggaagaucgaugugugcau

SEQ ID NO: 2558118 - RNA, 19 nt, Homo sapiens
  misc_RNA (1)...(19): siRNA sense strand
auguuaaugcccaggacaa

SEQ ID NO: 2558119 - RNA, 19 nt, Homo sapiens
  misc_RNA (1)...(19): siRNA sense strand
cuuugaaacagaacagauu

SEQ ID NO: 2558120 - RNA, 19 nt, Homo sapiens
  misc_RNA (1)...(19): siRNA sense strand
caggugaauacaagaaaga

SEQ ID NO: 2558121 - RNA, 19 nt, Homo sapiens
  misc_RNA (1)...(19): siRNA sense strand
ugaaagaaauaggcaucaa

SEQ ID NO: 2558122 - RNA, 19 nt, Homo sapiens
  misc_RNA (1)...(19): siRNA sense strand
augcugagguugugagucu

SEQ ID NO: 2558123 - RNA, 19 nt, Homo sapiens
  misc_RNA (1)...(19): siRNA sense strand
uggcaacagcugacgauau

SEQ ID NO: 2558124 - RNA, 19 nt, Homo sapiens
  misc_RNA (1)...(19): siRNA sense strand
gccaaggagcugauccaaa

SEQ ID NO: 2558125 - RNA, 19 nt, Homo sapiens
  misc_RNA (1)...(19): siRNA sense strand
aaagaacagagauggaaau

SEQ ID NO: 2558126 - RNA, 19 nt, Homo sapiens
  misc_RNA (1)...(19): siRNA sense strand
uggcagauccuucagcaaa

SEQ ID NO: 2558127 - RNA, 19 nt, Homo sapiens
  misc_RNA (1)...(19): siRNA sense strand
ucauaaugccuguucauau

SEQ ID NO: 2558128 - RNA, 19 nt, Homo sapiens
  misc_RNA (1)...(19): siRNA sense strand
guggcggacuuauggaaau

SEQ ID NO: 2558129 - RNA, 19 nt, Homo sapiens
  misc_RNA (1)...(19): siRNA sense strand
aaggaaggagacacagaua

SEQ ID NO: 2558130 - RNA, 19 nt, Homo sapiens
  misc_RNA (1)...(19): siRNA sense strand
uguguaaaugcaacagaua

SEQ ID NO: 2558131 - RNA, 19 nt, Homo sapiens
  misc_RNA (1)...(19): siRNA sense strand
aaggaaggaaggagaaguu

SEQ ID NO: 2558132 - RNA, 19 nt, Homo sapiens
  misc_RNA (1)...(19): siRNA sense strand
ggaucgagcuuggcggaga

SEQ ID NO: 2558133 - RNA, 19 nt, Homo sapiens
  misc_RNA (1)...(19): siRNA sense strand
uggcaaaagugcuguggau

SEQ ID NO: 2558134 - RNA, 19 nt, Homo sapiens
  misc_RNA (1)...(19): siRNA sense strand
uggcaauggaaauggaaua

SEQ ID NO: 2558135 - RNA, 19 nt, Homo sapiens
  misc_RNA (1)...(19): siRNA sense strand
ugguaaacgagguguaaau

SEQ ID NO: 2558136 - RNA, 19 nt, Homo sapiens
  misc_RNA (1)...(19): siRNA sense strand
agauuugugugaugggcaa

SEQ ID NO: 2558137 - RNA, 19 nt, Homo sapiens
  misc_RNA (1)...(19): siRNA sense strand
cuggaaaugauucgagauu

SEQ ID NO: 2558138 - RNA, 19 nt, Homo sapiens
  misc_RNA (1)...(19): siRNA sense strand
guguaaaugcagacaaagu

SEQ ID NO: 2558139 - RNA, 19 nt, Homo sapiens
  misc_RNA (1)...(19): siRNA sense strand
agaaauaaccuuuacacca

SEQ ID NO: 2558140 - RNA, 19 nt, Homo sapiens
  misc_RNA (1)...(19): siRNA sense strand
guuaaacaauugaacccua

SEQ ID NO: 2558141 - RNA, 19 nt, Homo sapiens
  misc_RNA (1)...(19): siRNA sense strand
agguggaacuaaugcugaa

SEQ ID NO: 2558142 - RNA, 19 nt, Homo sapiens
  misc_RNA (1)...(19): siRNA sense strand
augaagaagacgccgcuaa

SEQ ID NO: 2558143 - RNA, 19 nt, Homo sapiens
  misc_RNA (1)...(19): siRNA sense strand
gacuaagauauauggaaga

SEQ ID NO: 2558144 - RNA, 19 nt, Homo sapiens
  misc_RNA (1)...(19): siRNA sense strand
gcuugguaaacgaggugua

SEQ ID NO: 2558145 - RNA, 19 nt, Homo sapiens
  misc_RNA (1)...(19): siRNA sense strand
ugacuaagauauauggaag

SEQ ID NO: 2558146 - RNA, 19 nt, Homo sapiens
  misc_RNA (1)...(19): siRNA sense strand
caguuagaugcaucagaaa

SEQ ID NO: 2558147 - RNA, 19 nt, Homo sapiens
  misc_RNA (1)...(19): siRNA sense strand
augcagacaaaguuggaau

SEQ ID NO: 2558148 - RNA, 19 nt, Homo sapiens
  misc_RNA (1)...(19): siRNA sense strand
agugauuguucgaauguca

SEQ ID NO: 2558149 - RNA, 19 nt, Homo sapiens
  misc_RNA (1)...(19): siRNA sense strand
aaggaauugggaugacaaa

SEQ ID NO: 2558150 - RNA, 19 nt, Homo sapiens
  misc_RNA (1)...(19): siRNA sense strand
cauuaaaacaaggggauau

SEQ ID NO: 2558151 - RNA, 19 nt, Homo sapiens
  misc_RNA (1)...(19): siRNA sense strand
ucuuagacauggugguacu

SEQ ID NO: 2558152 - RNA, 19 nt, Homo sapiens
  misc_RNA (1)...(19): siRNA sense strand
ccuuuacaccagagaagau

SEQ ID NO: 2558153 - RNA, 19 nt, Homo sapiens
  misc_RNA (1)...(19): siRNA sense strand
ggcuaaauuuauugugaag

SEQ ID NO: 2558154 - RNA, 19 nt, Homo sapiens
  misc_RNA (1)...(19): siRNA sense strand
uggaugaguaucugcaaga

SEQ ID NO: 2558155 - RNA, 19 nt, Homo sapiens
  misc_RNA (1)...(19): siRNA sense strand
ugugaagaaaucagaagau

SEQ ID NO: 2558156 - RNA, 19 nt, Homo sapiens
  misc_RNA (1)...(19): siRNA sense strand
gcauagaggagcugugcca

SEQ ID NO: 2558157 - RNA, 19 nt, Homo sapiens
  misc_RNA (1)...(19): siRNA sense strand
aggaggaggaggacgagaa

SEQ ID NO: 2558158 - RNA, 19 nt, Homo sapiens
  misc_RNA (1)...(19): siRNA sense strand
aggaggaggacgagaagca

SEQ ID NO: 2558159 - RNA, 19 nt, Homo sapiens
  misc_RNA (1)...(19): siRNA sense strand
acaacaacgagcuggucaa

SEQ ID NO: 2558160 - RNA, 19 nt, Homo sapiens
  misc_RNA (1)...(19): siRNA sense strand
acgagaaccuggcacgcaa

SEQ ID NO: 2558161 - RNA, 19 nt, Homo sapiens
  misc_RNA (1)...(19): siRNA sense strand
ggucaagugcauagaggag

SEQ ID NO: 2558162 - RNA, 19 nt, Homo sapiens
  misc_RNA (1)...(19): siRNA sense strand
ggaaguugguugugcuaaa

SEQ ID NO: 2558163 - RNA, 19 nt, Homo sapiens
  misc_RNA (1)...(19): siRNA sense strand
acgaagaggaggaggagga

SEQ ID NO: 2558164 - RNA, 19 nt, Homo sapiens
  misc_RNA (1)...(19): siRNA sense strand
gcuaaacucuggaaugaau

SEQ ID NO: 2558165 - RNA, 19 nt, Homo sapiens
  misc_RNA (1)...(19): siRNA sense strand
ggacugaggacgaagagga

SEQ ID NO: 2558166 - RNA, 19 nt, Homo sapiens
  misc_RNA (1)...(19): siRNA sense strand
gugcuaaacucuggaauga

SEQ ID NO: 2558167 - RNA, 19 nt, Homo sapiens
  misc_RNA (1)...(19): siRNA sense strand
agaccuaaucacaguggaa

SEQ ID NO: 2558168 - RNA, 19 nt, Homo sapiens
  misc_RNA (1)...(19): siRNA sense strand
aggaaauaaugcaguagca

SEQ ID NO: 2558169 - RNA, 19 nt, Homo sapiens
  misc_RNA (1)...(19): siRNA sense strand
aggacgaagaggaggagga

SEQ ID NO: 2558170 - RNA, 19 nt, Homo sapiens
  misc_RNA (1)...(19): siRNA sense strand
gagcugggacugaggacga

SEQ ID NO: 2558171 - RNA, 19 nt, Homo sapiens
  misc_RNA (1)...(19): siRNA sense strand
accagaagcuugaaggguu

SEQ ID NO: 2558172 - RNA, 19 nt, Homo sapiens
  misc_RNA (1)...(19): siRNA sense strand
ugugaugaaauuagaccua

SEQ ID NO: 2558173 - RNA, 19 nt, Homo sapiens
  misc_RNA (1)...(19): siRNA sense strand
cacugagauacuaaagaaa

SEQ ID NO: 2558174 - RNA, 19 nt, Homo sapiens
  misc_RNA (1)...(19): siRNA sense strand
ccaaggaagaacaugcaga

SEQ ID NO: 2558175 - RNA, 19 nt, Homo sapiens
  misc_RNA (1)...(19): siRNA sense strand
gaggaaguugguugugcua

SEQ ID NO: 2558176 - RNA, 19 nt, Homo sapiens
  misc_RNA (1)...(19): siRNA sense strand
cugaggacgaagaggagga

SEQ ID NO: 2558177 - RNA, 19 nt, Homo sapiens
  misc_RNA (1)...(19): siRNA sense strand
aaugagauucagaguaaca

SEQ ID NO: 2558178 - RNA, 19 nt, Homo sapiens
  misc_RNA (1)...(19): siRNA sense strand
ggaaguugguugugcuaaa

SEQ ID NO: 2558179 - RNA, 19 nt, Homo sapiens
  misc_RNA (1)...(19): siRNA sense strand
acgaagaggaggaggagga

SEQ ID NO: 2558180 - RNA, 19 nt, Homo sapiens
  misc_RNA (1)...(19): siRNA sense strand
gcuaaacucuggaaugaau

SEQ ID NO: 2558181 - RNA, 19 nt, Homo sapiens
  misc_RNA (1)...(19): siRNA sense strand
ggacugaggacgaagagga

SEQ ID NO: 2558182 - RNA, 19 nt, Homo sapiens
  misc_RNA (1)...(19): siRNA sense strand
gugcuaaacucuggaauga

SEQ ID NO: 2558183 - RNA, 19 nt, Homo sapiens
  misc_RNA (1)...(19): siRNA sense strand
agaccuaaucacaguggaa

SEQ ID NO: 2558184 - RNA, 19 nt, Homo sapiens
  misc_RNA (1)...(19): siRNA sense strand
aggaaauaaugcaguagca

SEQ ID NO: 2558185 - RNA, 19 nt, Homo sapiens
  misc_RNA (1)...(19): siRNA sense strand
aggacgaagaggaggagga

SEQ ID NO: 2558186 - RNA, 19 nt, Homo sapiens
  misc_RNA (1)...(19): siRNA sense strand
gagcugggacugaggacga

SEQ ID NO: 2558187 - RNA, 19 nt, Homo sapiens
  misc_RNA (1)...(19): siRNA sense strand
accagaagcuugaaggguu

SEQ ID NO: 2558188 - RNA, 19 nt, Homo sapiens
  misc_RNA (1)...(19): siRNA sense strand
ugugaugaaauuagaccua

SEQ ID NO: 2558189 - RNA, 19 nt, Homo sapiens
  misc_RNA (1)...(19): siRNA sense strand
cacugagauacuaaagaaa

SEQ ID NO: 2558190 - RNA, 19 nt, Homo sapiens
  misc_RNA (1)...(19): siRNA sense strand
ccaaggaagaacaugcaga

SEQ ID NO: 2558191 - RNA, 19 nt, Homo sapiens
  misc_RNA (1)...(19): siRNA sense strand
gaggaaguugguugugcua

SEQ ID NO: 2558192 - RNA, 19 nt, Homo sapiens
  misc_RNA (1)...(19): siRNA sense strand
cugaggacgaagaggagga

SEQ ID NO: 2558193 - RNA, 19 nt, Homo sapiens
  misc_RNA (1)...(19): siRNA sense strand
aaugagauucagaguaaca

SEQ ID NO: 2558194 - RNA, 19 nt, Homo sapiens
  misc_RNA (1)...(19): siRNA sense strand
aagaagaaugucagggaaa

SEQ ID NO: 2558195 - RNA, 19 nt, Homo sapiens
  misc_RNA (1)...(19): siRNA sense strand
ccugaaagguuuauggaga

SEQ ID NO: 2558196 - RNA, 19 nt, Homo sapiens
  misc_RNA (1)...(19): siRNA sense strand
caagaagaaugucagggaa

SEQ ID NO: 2558197 - RNA, 19 nt, Homo sapiens
  misc_RNA (1)...(19): siRNA sense strand
gggaaaacaagaagaagau

SEQ ID NO: 2558198 - RNA, 19 nt, Homo sapiens
  misc_RNA (1)...(19): siRNA sense strand
aggagugggacuuggcuaa

SEQ ID NO: 2558199 - RNA, 19 nt, Homo sapiens
  misc_RNA (1)...(19): siRNA sense strand
acugaagucauuagggaau

SEQ ID NO: 2558200 - RNA, 19 nt, Homo sapiens
  misc_RNA (1)...(19): siRNA sense strand
guacaaacacgguggcauc

SEQ ID NO: 2558201 - RNA, 19 nt, Homo sapiens
  misc_RNA (1)...(19): siRNA sense strand
gggacaagauaaugagcag

SEQ ID NO: 2558202 - RNA, 19 nt, Homo sapiens
  misc_RNA (1)...(19): siRNA sense strand
ggcuguugcuaaugcuaaa

SEQ ID NO: 2558203 - RNA, 19 nt, Homo sapiens
  misc_RNA (1)...(19): siRNA sense strand
ccaagaagaaugucaggga

SEQ ID NO: 2558204 - RNA, 19 nt, Homo sapiens
  misc_RNA (1)...(19): siRNA sense strand
gcaaauucaagaagggaag

SEQ ID NO: 2558205 - RNA, 19 nt, Homo sapiens
  misc_RNA (1)...(19): siRNA sense strand
gaaaggagaaacuggacca

SEQ ID NO: 2558206 - RNA, 19 nt, Homo sapiens
  misc_RNA (1)...(19): siRNA sense strand
agaagaaugucagggaaaa

SEQ ID NO: 2558207 - RNA, 19 nt, Homo sapiens
  misc_RNA (1)...(19): siRNA sense strand
agggaaaacaagaagaaga

SEQ ID NO: 2558208 - RNA, 19 nt, Homo sapiens
  misc_RNA (1)...(19): siRNA sense strand
cgaaguugcugcuuggcau

SEQ ID NO: 2558209 - RNA, 19 nt, Homo sapiens
  misc_RNA (1)...(19): siRNA sense strand
uagaagaggcugagcugga

SEQ ID NO: 2558210 - RNA, 19 nt, Homo sapiens
  misc_RNA (1)...(19): siRNA sense strand
uggaagcucucgaggcuga

SEQ ID NO: 2558211 - RNA, 19 nt, Homo sapiens
  misc_RNA (1)...(19): siRNA sense strand
agaaaguucacaaggggaa

SEQ ID NO: 2558212 - RNA, 19 nt, Homo sapiens
  misc_RNA (1)...(19): siRNA sense strand
agcaaauucaagaagggaa

SEQ ID NO: 2558213 - RNA, 19 nt, Homo sapiens
  misc_RNA (1)...(19): siRNA sense strand
cugagagguuuauggggaa

SEQ ID NO: 2558214 - RNA, 19 nt, Homo sapiens
  misc_RNA (1)...(19): siRNA sense strand
ugauggauuuugugaagaa

SEQ ID NO: 2558215 - RNA, 19 nt, Homo sapiens
  misc_RNA (1)...(19): siRNA sense strand
cccaaguagaagaggcuga

SEQ ID NO: 2558216 - RNA, 19 nt, Homo sapiens
  misc_RNA (1)...(19): siRNA sense strand
ugcugaaagcucugaagaa

SEQ ID NO: 2558217 - RNA, 19 nt, Homo sapiens
  misc_RNA (1)...(19): siRNA sense strand
acacugaagucauuaggga

SEQ ID NO: 2558218 - RNA, 19 nt, Homo sapiens
  misc_RNA (1)...(19): siRNA sense strand
gcugcaagaaaguucacaa

SEQ ID NO: 2558219 - RNA, 19 nt, Homo sapiens
  misc_RNA (1)...(19): siRNA sense strand
gcaggaggcaagagcacca

SEQ ID NO: 2558220 - RNA, 19 nt, Homo sapiens
  misc_RNA (1)...(19): siRNA sense strand
gggcaauaucuucucucua

SEQ ID NO: 2558221 - RNA, 19 nt, Homo sapiens
  misc_RNA (1)...(19): siRNA sense strand
caacauagaugccugugga

SEQ ID NO: 2558222 - RNA, 19 nt, Homo sapiens
  misc_RNA (1)...(19): siRNA sense strand
cucuacuacccgaaggaua

SEQ ID NO: 2558223 - RNA, 19 nt, Homo sapiens
  misc_RNA (1)...(19): siRNA sense strand
agaugaaagaacagggccu

SEQ ID NO: 2558224 - RNA, 19 nt, Homo sapiens
  misc_RNA (1)...(19): siRNA sense strand
cugagagagaccugacuuu

SEQ ID NO: 2558225 - RNA, 19 nt, Homo sapiens
  misc_RNA (1)...(19): siRNA sense strand
cguugaaacugguggccaa

SEQ ID NO: 2558226 - RNA, 19 nt, Homo sapiens
  misc_RNA (1)...(19): siRNA sense strand
gcgaugagcucacgaggca

SEQ ID NO: 2558227 - RNA, 19 nt, Homo sapiens
  misc_RNA (1)...(19): siRNA sense strand
guauauuccaggagcuaca

SEQ ID NO: 2558228 - RNA, 19 nt, Homo sapiens
  misc_RNA (1)...(19): siRNA sense strand
gccuugaauuggaacgcua

SEQ ID NO: 2558229 - RNA, 19 nt, Homo sapiens
  misc_RNA (1)...(19): siRNA sense strand
gaggagaccuggcagcaga

SEQ ID NO: 2558230 - RNA, 19 nt, Homo sapiens
  misc_RNA (1)...(19): siRNA sense strand
guuuaacgggugccggaaa

SEQ ID NO: 2558231 - RNA, 19 nt, Homo sapiens
  misc_RNA (1)...(19): siRNA sense strand
cuccacaugaagagacaua

SEQ ID NO: 2558232 - RNA, 19 nt, Homo sapiens
  misc_RNA (1)...(19): siRNA sense strand
aagaguggacagagcgaca

SEQ ID NO: 2558233 - RNA, 19 nt, Homo sapiens
  misc_RNA (1)...(19): siRNA sense strand
cguuaagaguggacagagc

SEQ ID NO: 2558234 - RNA, 19 nt, Homo sapiens
  misc_RNA (1)...(19): siRNA sense strand
gaaaacaagaagaggguuc

SEQ ID NO: 2558235 - RNA, 19 nt, Homo sapiens
  misc_RNA (1)...(19): siRNA sense strand
cagugaccaaggagggcua

SEQ ID NO: 2558236 - RNA, 19 nt, Homo sapiens
  misc_RNA (1)...(19): siRNA sense strand
auagaaaggcugaaggaca

SEQ ID NO: 2558237 - RNA, 19 nt, Homo sapiens
  misc_RNA (1)...(19): siRNA sense strand
cuguggaaugagauagaaa

SEQ ID NO: 2558238 - RNA, 19 nt, Homo sapiens
  misc_RNA (1)...(19): siRNA sense strand
ggaaugagauagaaaggcu

SEQ ID NO: 2558239 - RNA, 19 nt, Homo sapiens
  misc_RNA (1)...(19): siRNA sense strand
ggcugaaggacaaaggcaa

SEQ ID NO: 2558240 - RNA, 19 nt, Homo sapiens
  misc_RNA (1)...(19): siRNA sense strand
gguuaugcccacagagacu

SEQ ID NO: 2558241 - RNA, 19 nt, Homo sapiens
  misc_RNA (1)...(19): siRNA sense strand
cuauguggaccuaguggaa

SEQ ID NO: 2558242 - RNA, 19 nt, Homo sapiens
  misc_RNA (1)...(19): siRNA sense strand
gcuuacugucugagggaac

SEQ ID NO: 2558243 - RNA, 19 nt, Homo sapiens
  misc_RNA (1)...(19): siRNA sense strand
agaaaagagaggagagaaa

SEQ ID NO: 2558244 - RNA, 19 nt, Homo sapiens
  misc_RNA (1)...(19): siRNA sense strand
cagagagggaaguggaaua

SEQ ID NO: 2558245 - RNA, 19 nt, Homo sapiens
  misc_RNA (1)...(19): siRNA sense strand
ccaaggaggugaaugggaa

SEQ ID NO: 2558246 - RNA, 19 nt, Homo sapiens
  misc_RNA (1)...(19): siRNA sense strand
aagaagaaggagaggccaa

SEQ ID NO: 2558247 - RNA, 19 nt, Homo sapiens
  misc_RNA (1)...(19): siRNA sense strand
aagcagaagcugaggcaga

SEQ ID NO: 2558248 - RNA, 19 nt, Homo sapiens
  misc_RNA (1)...(19): siRNA sense strand
aggaggaggaugaggaaga

SEQ ID NO: 2558249 - RNA, 19 nt, Homo sapiens
  misc_RNA (1)...(19): siRNA sense strand
cgagcaaggcauaagcaaa

SEQ ID NO: 2558250 - RNA, 19 nt, Homo sapiens
  misc_RNA (1)...(19): siRNA sense strand
gcuccaaacacuugugaau

SEQ ID NO: 2558251 - RNA, 19 nt, Homo sapiens
  misc_RNA (1)...(19): siRNA sense strand
agccaaagggcaagaacaa

SEQ ID NO: 2558252 - RNA, 19 nt, Homo sapiens
  misc_RNA (1)...(19): siRNA sense strand
gcaccauaaagaaggaaau

SEQ ID NO: 2558253 - RNA, 19 nt, Homo sapiens
  misc_RNA (1)...(19): siRNA sense strand
ccaaccagaaggagggcaa

SEQ ID NO: 2558254 - RNA, 19 nt, Homo sapiens
  misc_RNA (1)...(19): siRNA sense strand
accuaaagauauugaccua

SEQ ID NO: 2558255 - RNA, 19 nt, Homo sapiens
  misc_RNA (1)...(19): siRNA sense strand
auaccgaggugguggccaa

SEQ ID NO: 2558256 - RNA, 19 nt, Homo sapiens
  misc_RNA (1)...(19): siRNA sense strand
gggaaagcgucguugacca

SEQ ID NO: 2558257 - RNA, 19 nt, Homo sapiens
  misc_RNA (1)...(19): siRNA sense strand
aagaagaggaggaucguuu

SEQ ID NO: 2558258 - RNA, 19 nt, Homo sapiens
  misc_RNA (1)...(19): siRNA sense strand
auaaagaaggaaauggcaa

SEQ ID NO: 2558259 - RNA, 19 nt, Homo sapiens
  misc_RNA (1)...(19): siRNA sense strand
gagugaaauauuagggcca

SEQ ID NO: 2558260 - RNA, 19 nt, Homo sapiens
  misc_RNA (1)...(19): siRNA sense strand
agagcaaacugaagaacca

SEQ ID NO: 2558261 - RNA, 19 nt, Homo sapiens
  misc_RNA (1)...(19): siRNA sense strand
cucggauaguaaagagaaa

SEQ ID NO: 2558262 - RNA, 19 nt, Homo sapiens
  misc_RNA (1)...(19): siRNA sense strand
agaagaggaucgacgccua

SEQ ID NO: 2558263 - RNA, 19 nt, Homo sapiens
  misc_RNA (1)...(19): siRNA sense strand
gagcagaugacaaugaaaa

SEQ ID NO: 2558264 - RNA, 19 nt, Homo sapiens
  misc_RNA (1)...(19): siRNA sense strand
cugcagucucggauaguaa

SEQ ID NO: 2558265 - RNA, 19 nt, Homo sapiens
  misc_RNA (1)...(19): siRNA sense strand
ccaggacagaggagagcaa

SEQ ID NO: 2558266 - RNA, 19 nt, Homo sapiens
  misc_RNA (1)...(19): siRNA sense strand
uaugcagaaaugagggaaa

SEQ ID NO: 2558267 - RNA, 19 nt, Homo sapiens
  misc_RNA (1)...(19): siRNA sense strand
aagaaaggagacagaguca

SEQ ID NO: 2558268 - RNA, 19 nt, Homo sapiens
  misc_RNA (1)...(19): siRNA sense strand
agauacaauuucugggagu

SEQ ID NO: 2558269 - RNA, 19 nt, Homo sapiens
  misc_RNA (1)...(19): siRNA sense strand
uggauauggaugagacaga

SEQ ID NO: 2558270 - RNA, 19 nt, Homo sapiens
  misc_RNA (1)...(19): siRNA sense strand
gggaaguggaauauuucaa

SEQ ID NO: 2558271 - RNA, 19 nt, Homo sapiens
  misc_RNA (1)...(19): siRNA sense strand
ccacagugcaguccagcaa

SEQ ID NO: 2558272 - RNA, 19 nt, Homo sapiens
  misc_RNA (1)...(19): siRNA sense strand
ccaagaggaaagaggagca

SEQ ID NO: 2558273 - RNA, 19 nt, Homo sapiens
  misc_RNA (1)...(19): siRNA sense strand
uggaugagacagagaggga

SEQ ID NO: 2558274 - RNA, 19 nt, Homo sapiens
  misc_RNA (1)...(19): siRNA sense strand
ugacgugggaacugcauaa

SEQ ID NO: 2558275 - RNA, 19 nt, Homo sapiens
  misc_RNA (1)...(19): siRNA sense strand
uggccaacaugaauggaau

SEQ ID NO: 2558276 - RNA, 19 nt, Homo sapiens
  misc_RNA (1)...(19): siRNA sense strand
ccagaguggaauaguucua

SEQ ID NO: 2558277 - RNA, 19 nt, Homo sapiens
  misc_RNA (1)...(19): siRNA sense strand
auaagaagaagaaaggaga

SEQ ID NO: 2558278 - RNA, 19 nt, Homo sapiens
  misc_RNA (1)...(19): siRNA sense strand
ugaugaagauguugcacca

SEQ ID NO: 2558279 - RNA, 19 nt, Homo sapiens
  misc_RNA (1)...(19): siRNA sense strand
augaagaagcggacggcga

SEQ ID NO: 2558280 - RNA, 19 nt, Homo sapiens
  misc_RNA (1)...(19): siRNA sense strand
agaagaaaggagacagagu

SEQ ID NO: 2558281 - RNA, 19 nt, Homo sapiens
  misc_RNA (1)...(19): siRNA sense strand
uugaagaacaguuaaccaa

SEQ ID NO: 2558282 - RNA, 19 nt, Homo sapiens
  misc_RNA (1)...(19): siRNA sense strand
aaggaaauggcaagcagaa

SEQ ID NO: 2558283 - RNA, 19 nt, Homo sapiens
  misc_RNA (1)...(19): siRNA sense strand
ccggugagcaucagcagaa

SEQ ID NO: 2558284 - RNA, 19 nt, Homo sapiens
  misc_RNA (1)...(19): siRNA sense strand
guuuauaaauagcuccgaa

SEQ ID NO: 2558285 - RNA, 19 nt, Homo sapiens
  misc_RNA (1)...(19): siRNA sense strand
agucaaaggcuaagguggu

SEQ ID NO: 2558286 - RNA, 19 nt, Homo sapiens
  misc_RNA (1)...(19): siRNA sense strand
ggaaaaugaacacuugaaa

SEQ ID NO: 2558287 - RNA, 19 nt, Homo sapiens
  misc_RNA (1)...(19): siRNA sense strand
aggaggaugaggaagaaga

SEQ ID NO: 2558288 - RNA, 19 nt, Homo sapiens
  misc_RNA (1)...(19): siRNA sense strand
gggaacugcauaauaaaca

SEQ ID NO: 2558289 - RNA, 19 nt, Homo sapiens
  misc_RNA (1)...(19): siRNA sense strand
agauauugaccuagacagu

SEQ ID NO: 2558290 - RNA, 19 nt, Homo sapiens
  misc_RNA (1)...(19): siRNA sense strand
gagaagaugugcuugcgau

SEQ ID NO: 2558291 - RNA, 19 nt, Homo sapiens
  misc_RNA (1)...(19): siRNA sense strand
augucauguuuguaagcaa

SEQ ID NO: 2558292 - RNA, 19 nt, Homo sapiens
  misc_RNA (1)...(19): siRNA sense strand
cagccaaagggcaagaaca

SEQ ID NO: 2558293 - RNA, 19 nt, Homo sapiens
  misc_RNA (1)...(19): siRNA sense strand
aagaagaagaaaggagaca

SEQ ID NO: 2558294 - RNA, 19 nt, Homo sapiens
  misc_RNA (1)...(19): siRNA sense strand
gcuagacagacccgacaaa

SEQ ID NO: 2558295 - RNA, 19 nt, Homo sapiens
  misc_RNA (1)...(19): siRNA sense strand
augcagaaaugagggaaaa

SEQ ID NO: 2558296 - RNA, 19 nt, Homo sapiens
  misc_RNA (1)...(19): siRNA sense strand
cggcugaccaagaggaaag

SEQ ID NO: 2558297 - RNA, 19 nt, Homo sapiens
  misc_RNA (1)...(19): siRNA sense strand
ucacagagcagaaaagaga

SEQ ID NO: 2558298 - RNA, 19 nt, Homo sapiens
  misc_RNA (1)...(19): siRNA sense strand
aggauuuguugcaguuuau

SEQ ID NO: 2558299 - RNA, 19 nt, Homo sapiens
  misc_RNA (1)...(19): siRNA sense strand
gcaagcuggugcuggcaga

SEQ ID NO: 2558300 - RNA, 19 nt, Homo sapiens
  misc_RNA (1)...(19): siRNA sense strand
aguuggaauuacagaugau

SEQ ID NO: 2558301 - RNA, 19 nt, Homo sapiens
  misc_RNA (1)...(19): siRNA sense strand
ucgacgagcagaugacaau

SEQ ID NO: 2558302 - RNA, 19 nt, Homo sapiens
  misc_RNA (1)...(19): siRNA sense strand
ucacagacaccaugaggca

SEQ ID NO: 2558303 - RNA, 19 nt, Homo sapiens
  misc_RNA (1)...(19): siRNA sense strand
gaaggaagauggagugcug

SEQ ID NO: 2558304 - RNA, 19 nt, Homo sapiens
  misc_RNA (1)...(19): siRNA sense strand
cgauguaucaacagagaaa

SEQ ID NO: 2558305 - RNA, 19 nt, Homo sapiens
  misc_RNA (1)...(19): siRNA sense strand
caacagagaaacugggcaa

SEQ ID NO: 2558306 - RNA, 19 nt, Homo sapiens
  misc_RNA (1)...(19): siRNA sense strand
cgaagaaaauggaaagaau

SEQ ID NO: 2558307 - RNA, 19 nt, Homo sapiens
  misc_RNA (1)...(19): siRNA sense strand
caguagagcagcugaggaa

SEQ ID NO: 2558308 - RNA, 19 nt, Homo sapiens
  misc_RNA (1)...(19): siRNA sense strand
uguuaaacuuggaggcuuu

SEQ ID NO: 2558309 - RNA, 19 nt, Homo sapiens
  misc_RNA (1)...(19): siRNA sense strand
ggugaugaaauucgagaaa

SEQ ID NO: 2558310 - RNA, 19 nt, Homo sapiens
  misc_RNA (1)...(19): siRNA sense strand
cuuacagacugcagugaaa

SEQ ID NO: 2558311 - RNA, 19 nt, Homo sapiens
  misc_RNA (1)...(19): siRNA sense strand
gaugaagcauugaggguca

SEQ ID NO: 2558312 - RNA, 19 nt, Homo sapiens
  misc_RNA (1)...(19): siRNA sense strand
cagaugaaccaaugggaau

SEQ ID NO: 2558313 - RNA, 19 nt, Homo sapiens
  misc_RNA (1)...(19): siRNA sense strand
uagaguuauuggagacaua

SEQ ID NO: 2558314 - RNA, 19 nt, Homo sapiens
  misc_RNA (1)...(19): siRNA sense strand
cauaauugguggcagggua

SEQ ID NO: 2558315 - RNA, 19 nt, Homo sapiens
  misc_RNA (1)...(19): siRNA sense strand
gggcaugauucacaggcaa

SEQ ID NO: 2558316 - RNA, 19 nt, Homo sapiens
  misc_RNA (1)...(19): siRNA sense strand
ugaugaaauucgagaaauc

SEQ ID NO: 2558317 - RNA, 19 nt, Homo sapiens
  misc_RNA (1)...(19): siRNA sense strand
guuaaguacagaagaucua

SEQ ID NO: 2558318 - RNA, 19 nt, Homo sapiens
  misc_RNA (1)...(19): siRNA sense strand
ugaaagugccaaagaccua

SEQ ID NO: 2558319 - RNA, 19 nt, Homo sapiens
  misc_RNA (1)...(19): siRNA sense strand
ccauuauaugagacagaua

SEQ ID NO: 2558320 - RNA, 19 nt, Homo sapiens
  misc_RNA (1)...(19): siRNA sense strand
ggaagagauucaugcgcuu

SEQ ID NO: 2558321 - RNA, 19 nt, Homo sapiens
  misc_RNA (1)...(19): siRNA sense strand
cagaagaucuaaagcggga

SEQ ID NO: 2558322 - RNA, 19 nt, Homo sapiens
  misc_RNA (1)...(19): siRNA sense strand
guagagcagcugaggaaau

SEQ ID NO: 2558323 - RNA, 19 nt, Homo sapiens
  misc_RNA (1)...(19): siRNA sense strand
gaucuauguaagagcacaa

SEQ ID NO: 2558324 - RNA, 19 nt, Homo sapiens
  misc_RNA (1)...(19): siRNA sense strand
cuguaaagaagcuggcauu

SEQ ID NO: 2558325 - RNA, 19 nt, Homo sapiens
  misc_RNA (1)...(19): siRNA sense strand
caaagagagacgaagaaaa

SEQ ID NO: 2558326 - RNA, 19 nt, Homo sapiens
  misc_RNA (1)...(19): siRNA sense strand
aacuauuacuccagguuua

SEQ ID NO: 2558327 - RNA, 19 nt, Homo sapiens
  misc_RNA (1)...(19): siRNA sense strand
gcaaaggaacuaaagcgua

SEQ ID NO: 2558328 - RNA, 19 nt, Homo sapiens
  misc_RNA (1)...(19): siRNA sense strand
ccaaagagagacgaagaaa

SEQ ID NO: 2558329 - RNA, 19 nt, Homo sapiens
  misc_RNA (1)...(19): siRNA sense strand
ccagauuauuaguaaggau

SEQ ID NO: 2558330 - RNA, 19 nt, Homo sapiens
  misc_RNA (1)...(19): siRNA sense strand
aggguuaaguacagaagau

SEQ ID NO: 2558331 - RNA, 19 nt, Homo sapiens
  misc_RNA (1)...(19): siRNA sense strand
cgcacaugguguugggaga

SEQ ID NO: 2558332 - RNA, 19 nt, Homo sapiens
  misc_RNA (1)...(19): siRNA sense strand
aaagauuguuugaaggcau

SEQ ID NO: 2558333 - RNA, 19 nt, Homo sapiens
  misc_RNA (1)...(19): siRNA sense strand
cugagaauaacgacgcaaa

SEQ ID NO: 2558334 - RNA, 19 nt, Homo sapiens
  misc_RNA (1)...(19): siRNA sense strand
uggcaaagcacaaugcaga

SEQ ID NO: 2558335 - RNA, 19 nt, Homo sapiens
  misc_RNA (1)...(19): siRNA sense strand
ugugcgaggugaucggaaa

SEQ ID NO: 2558336 - RNA, 19 nt, Homo sapiens
  misc_RNA (1)...(19): siRNA sense strand
cagaaguggucaaaagaga

SEQ ID NO: 2558337 - RNA, 19 nt, Homo sapiens
  misc_RNA (1)...(19): siRNA sense strand
cugaggaaauucaaugcaa

SEQ ID NO: 2558338 - RNA, 19 nt, Homo sapiens
  misc_RNA (1)...(19): siRNA sense strand
aagagguauuggaagaaau

SEQ ID NO: 2558339 - RNA, 19 nt, Homo sapiens
  misc_RNA (1)...(19): siRNA sense strand
auaauugguggcaggguaa

SEQ ID NO: 2558340 - RNA, 19 nt, Homo sapiens
  misc_RNA (1)...(19): siRNA sense strand
gugaaaaggaccuagauuu

SEQ ID NO: 2558341 - RNA, 19 nt, Homo sapiens
  misc_RNA (1)...(19): siRNA sense strand
agaagcaguacaaagauaa

SEQ ID NO: 2558342 - RNA, 19 nt, Homo sapiens
  misc_RNA (1)...(19): siRNA sense strand
gauucaucuuccagaaaca

SEQ ID NO: 2558343 - RNA, 19 nt, Homo sapiens
  misc_RNA (1)...(19): siRNA sense strand
gagacgaagaaaauggaaa

SEQ ID NO: 2558344 - RNA, 19 nt, Homo sapiens
  misc_RNA (1)...(19): siRNA sense strand
cuuuguaucucaugaccaa

SEQ ID NO: 2558345 - RNA, 19 nt, Homo sapiens
  misc_RNA (1)...(19): siRNA sense strand
aaagagagacgaagaaaau

SEQ ID NO: 2558346 - RNA, 19 nt, Homo sapiens
  misc_RNA (1)...(19): siRNA sense strand
aaugcaaggaggaaacuaa

SEQ ID NO: 2558347 - RNA, 19 nt, Homo sapiens
  misc_RNA (1)...(19): siRNA sense strand
uaacauaauucacagggau

SEQ ID NO: 2558348 - RNA, 19 nt, Homo sapiens
  misc_RNA (1)...(19): siRNA sense strand
gugacaucauccagauuau

SEQ ID NO: 2558349 - RNA, 19 nt, Homo sapiens
  misc_RNA (1)...(19): siRNA sense strand
agaccaaacaggagcagca

SEQ ID NO: 2558350 - RNA, 19 nt, Homo sapiens
  misc_RNA (1)...(19): siRNA sense strand
cugccaugauaauaacaua

SEQ ID NO: 2558351 - RNA, 19 nt, Homo sapiens
  misc_RNA (1)...(19): siRNA sense strand
auuuauggauggagcagau

SEQ ID NO: 2558352 - RNA, 19 nt, Homo sapiens
  misc_RNA (1)...(19): siRNA sense strand
acuuguagcuggaggacgu

SEQ ID NO: 2558353 - RNA, 19 nt, Homo sapiens
  misc_RNA (1)...(19): siRNA sense strand
ggaggaaacuaaagggugc

SEQ ID NO: 2558354 - RNA, 19 nt, Homo sapiens
  misc_RNA (1)...(19): siRNA sense strand
cuauguaagagcacaauuu

SEQ ID NO: 2558355 - RNA, 19 nt, Homo sapiens
  misc_RNA (1)...(19): siRNA sense strand
gcacaugguguugggagaa

SEQ ID NO: 2558356 - RNA, 19 nt, Homo sapiens
  misc_RNA (1)...(19): siRNA sense strand
gaguuauuggagacauaua

SEQ ID NO: 2558357 - RNA, 19 nt, Homo sapiens
  misc_RNA (1)...(19): siRNA sense strand
cauauagcucagauggaau

SEQ ID NO: 2558358 - RNA, 19 nt, Homo sapiens
  misc_RNA (1)...(19): siRNA sense strand
gaucauaauugguggcagg

SEQ ID NO: 2558359 - RNA, 19 nt, Homo sapiens
  misc_RNA (1)...(19): siRNA sense strand
cuaaccaaacaguggaaca

SEQ ID NO: 2558360 - RNA, 19 nt, Homo sapiens
  misc_RNA (1)...(19): siRNA sense strand
auucagaguuggugacauc

SEQ ID NO: 2558361 - RNA, 19 nt, Homo sapiens
  misc_RNA (1)...(19): siRNA sense strand
ccagcauucaagaggaaaa

SEQ ID NO: 2558362 - RNA, 19 nt, Homo sapiens
  misc_RNA (1)...(19): siRNA sense strand
aaccagaccuccaaagaga

SEQ ID NO: 2558363 - RNA, 19 nt, Homo sapiens
  misc_RNA (1)...(19): siRNA sense strand
augcaagacaucucuaaua

SEQ ID NO: 2558364 - RNA, 19 nt, Homo sapiens
  misc_RNA (1)...(19): siRNA sense strand
auucaaugcaaggaggaaa

SEQ ID NO: 2558365 - RNA, 19 nt, Homo sapiens
  misc_RNA (1)...(19): siRNA sense strand
acaaagucuucaccacaaa

SEQ ID NO: 2558366 - RNA, 19 nt, Homo sapiens
  misc_RNA (1)...(19): siRNA sense strand
uccacacauuguagaguua

SEQ ID NO: 2558367 - RNA, 19 nt, Homo sapiens
  misc_RNA (1)...(19): siRNA sense strand
cagaaacaguagagcagcu

SEQ ID NO: 2558368 - RNA, 19 nt, Homo sapiens
  misc_RNA (1)...(19): siRNA sense strand
aguacaaguaugaggacaa

SEQ ID NO: 2558369 - RNA, 19 nt, Homo sapiens
  misc_RNA (1)...(19): siRNA sense strand
caacuaugcuagcugggaa

SEQ ID NO: 2558370 - RNA, 19 nt, Homo sapiens
  misc_RNA (1)...(19): siRNA sense strand
uggcgacugcagagugaaa

SEQ ID NO: 2558371 - RNA, 19 nt, Homo sapiens
  misc_RNA (1)...(19): siRNA sense strand
aggacaaggacgggaaaca

SEQ ID NO: 2558372 - RNA, 19 nt, Homo sapiens
  misc_RNA (1)...(19): siRNA sense strand
gaaaaucacuaaagccuga

SEQ ID NO: 2558373 - RNA, 19 nt, Homo sapiens
  misc_RNA (1)...(19): siRNA sense strand
acaucagcauccuggagaa

SEQ ID NO: 2558374 - RNA, 19 nt, Homo sapiens
  misc_RNA (1)...(19): siRNA sense strand
gcaauuuggacaagggaga

SEQ ID NO: 2558375 - RNA, 19 nt, Homo sapiens
  misc_RNA (1)...(19): siRNA sense strand
agaaagcauuuguaggcaa

SEQ ID NO: 2558376 - RNA, 19 nt, Homo sapiens
  misc_RNA (1)...(19): siRNA sense strand
cagacuaugccuuuggaaa

SEQ ID NO: 2558377 - RNA, 19 nt, Homo sapiens
  misc_RNA (1)...(19): siRNA sense strand
aguuacgucuugcgggaaa

SEQ ID NO: 2558378 - RNA, 19 nt, Homo sapiens
  misc_RNA (1)...(19): siRNA sense strand
gggacugcucuaugguaaa

SEQ ID NO: 2558379 - RNA, 19 nt, Homo sapiens
  misc_RNA (1)...(19): siRNA sense strand
ggaguuacgucuugcggga

SEQ ID NO: 2558380 - RNA, 19 nt, Homo sapiens
  misc_RNA (1)...(19): siRNA sense strand
gcuggaugacaaugcguua

SEQ ID NO: 2558381 - RNA, 19 nt, Homo sapiens
  misc_RNA (1)...(19): siRNA sense strand
guggguucucugugaaaua

SEQ ID NO: 2558382 - RNA, 19 nt, Homo sapiens
  misc_RNA (1)...(19): siRNA sense strand
cgaaauuaaaguugacacu

SEQ ID NO: 2558383 - RNA, 19 nt, Homo sapiens
  misc_RNA (1)...(19): siRNA sense strand
ugaccuuggcccugaacaa

SEQ ID NO: 2558384 - RNA, 19 nt, Homo sapiens
  misc_RNA (1)...(19): siRNA sense strand
cugcagaauaaucagcuaa

SEQ ID NO: 2558385 - RNA, 19 nt, Homo sapiens
  misc_RNA (1)...(19): siRNA sense strand
auaagaaagaugcuggaau

SEQ ID NO: 2558386 - RNA, 19 nt, Homo sapiens
  misc_RNA (1)...(19): siRNA sense strand
cuggaauguuucaggcuca

SEQ ID NO: 2558387 - RNA, 19 nt, Homo sapiens
  misc_RNA (1)...(19): siRNA sense strand
cauggugccuggugggaga

SEQ ID NO: 2558388 - RNA, 19 nt, Homo sapiens
  misc_RNA (1)...(19): siRNA sense strand
agaauaaucagcuaagaca

SEQ ID NO: 2558389 - RNA, 19 nt, Homo sapiens
  misc_RNA (1)...(19): siRNA sense strand
cugaauuuggcuuggaaca

SEQ ID NO: 2558390 - RNA, 19 nt, Homo sapiens
  misc_RNA (1)...(19): siRNA sense strand
acaagggagaccuggagaa

SEQ ID NO: 2558391 - RNA, 19 nt, Homo sapiens
  misc_RNA (1)...(19): siRNA sense strand
gcauuuggagugugugaga

SEQ ID NO: 2558392 - RNA, 19 nt, Homo sapiens
  misc_RNA (1)...(19): siRNA sense strand
ccuaauaaagcuggaccua

SEQ ID NO: 2558393 - RNA, 19 nt, Homo sapiens
  misc_RNA (1)...(19): siRNA sense strand
gaucagaauuggagugugg

SEQ ID NO: 2558394 - RNA, 19 nt, Homo sapiens
  misc_RNA (1)...(19): siRNA sense strand
auuuggagugugugagaau

SEQ ID NO: 2558395 - RNA, 19 nt, Homo sapiens
  misc_RNA (1)...(19): siRNA sense strand
cugaauggugccucacaaa

SEQ ID NO: 2558396 - RNA, 19 nt, Homo sapiens
  misc_RNA (1)...(19): siRNA sense strand
gugagaaugccuauaagau

SEQ ID NO: 2558397 - RNA, 19 nt, Homo sapiens
  misc_RNA (1)...(19): siRNA sense strand
cuggagaauauuugggacu

SEQ ID NO: 2558398 - RNA, 19 nt, Homo sapiens
  misc_RNA (1)...(19): siRNA sense strand
agacuaugccuuuggaaac

SEQ ID NO: 2558399 - RNA, 19 nt, Homo sapiens
  misc_RNA (1)...(19): siRNA sense strand
agguuauagaaaugccuua

SEQ ID NO: 2558400 - RNA, 19 nt, Homo sapiens
  misc_RNA (1)...(19): siRNA sense strand
ugcuugacuuugaggaaga

SEQ ID NO: 2558401 - RNA, 19 nt, Homo sapiens
  misc_RNA (1)...(19): siRNA sense strand
gcguggguucucugugaaa

SEQ ID NO: 2558402 - RNA, 19 nt, Homo sapiens
  misc_RNA (1)...(19): siRNA sense strand
cuccaaccuuaaagaacua

SEQ ID NO: 2558403 - RNA, 19 nt, Homo sapiens
  misc_RNA (1)...(19): siRNA sense strand
gugcauuuggaguguguga

SEQ ID NO: 2558404 - RNA, 19 nt, Homo sapiens
  misc_RNA (1)...(19): siRNA sense strand
ccugcuugacuuugaggaa

SEQ ID NO: 2558405 - RNA, 19 nt, Homo sapiens
  misc_RNA (1)...(19): siRNA sense strand
gcuaagacacguacccaca

SEQ ID NO: 2558406 - RNA, 19 nt, Homo sapiens
  misc_RNA (1)...(19): siRNA sense strand
ugaacaugcucacgggagu

SEQ ID NO: 2558407 - RNA, 19 nt, Homo sapiens
  misc_RNA (1)...(19): siRNA sense strand
aggaggaucuggugagccu

SEQ ID NO: 2558408 - RNA, 19 nt, Homo sapiens
  misc_RNA (1)...(19): siRNA sense strand
ugccaaaagcuucagaaaa

SEQ ID NO: 2558409 - RNA, 19 nt, Homo sapiens
  misc_RNA (1)...(19): siRNA sense strand
cuacaagaagcaagcgcaa

SEQ ID NO: 2558410 - RNA, 19 nt, Homo sapiens
  misc_RNA (1)...(19): siRNA sense strand
ccgccagauugcagccaaa

SEQ ID NO: 2558411 - RNA, 19 nt, Homo sapiens
  misc_RNA (1)...(19): siRNA sense strand
aggccugggaagaguauua

SEQ ID NO: 2558412 - RNA, 19 nt, Homo sapiens
  misc_RNA (1)...(19): siRNA sense strand
caagcaagaugacgggaca

SEQ ID NO: 2558413 - RNA, 19 nt, Homo sapiens
  misc_RNA (1)...(19): siRNA sense strand
gaggaagaggccaaggcaa

SEQ ID NO: 2558414 - RNA, 19 nt, Homo sapiens
  misc_RNA (1)...(19): siRNA sense strand
gggcggaauauuacagaca

SEQ ID NO: 2558415 - RNA, 19 nt, Homo sapiens
  misc_RNA (1)...(19): siRNA sense strand
cugccacgacagugaauaa

SEQ ID NO: 2558416 - RNA, 19 nt, Homo sapiens
  misc_RNA (1)...(19): siRNA sense strand
agaugaugcuggaugacau

SEQ ID NO: 2558417 - RNA, 19 nt, Homo sapiens
  misc_RNA (1)...(19): siRNA sense strand
gaucauuggcagaggaggu

SEQ ID NO: 2558418 - RNA, 19 nt, Homo sapiens
  misc_RNA (1)...(19): siRNA sense strand
gcgagaaugugaaagccau

SEQ ID NO: 2558419 - RNA, 19 nt, Homo sapiens
  misc_RNA (1)...(19): siRNA sense strand
aggcuugggaggaguacua

SEQ ID NO: 2558420 - RNA, 19 nt, Homo sapiens
  misc_RNA (1)...(19): siRNA sense strand
ggacaaaccucuccgcauc

SEQ ID NO: 2558421 - RNA, 19 nt, Homo sapiens
  misc_RNA (1)...(19): siRNA sense strand
ugggaagaguauuacaaaa

SEQ ID NO: 2558422 - RNA, 19 nt, Homo sapiens
  misc_RNA (1)...(19): siRNA sense strand
ccauuaagcagcugcagga

SEQ ID NO: 2558423 - RNA, 19 nt, Homo sapiens
  misc_RNA (1)...(19): siRNA sense strand
gggccugaucauuggcaga

SEQ ID NO: 2558424 - RNA, 19 nt, Homo sapiens
  misc_RNA (1)...(19): siRNA sense strand
aggaaaagaucgagggucc

SEQ ID NO: 2558425 - RNA, 19 nt, Homo sapiens
  misc_RNA (1)...(19): siRNA sense strand
ccuccgggaacgugaccaa

SEQ ID NO: 2558426 - RNA, 19 nt, Homo sapiens
  misc_RNA (1)...(19): siRNA sense strand
aaauauaacacgugggaac

SEQ ID NO: 2558427 - RNA, 19 nt, Homo sapiens
  misc_RNA (1)...(19): siRNA sense strand
uagucaagaacaagaacaa

SEQ ID NO: 2558428 - RNA, 19 nt, Homo sapiens
  misc_RNA (1)...(19): siRNA sense strand
ucgugaucgugaugagcaa

SEQ ID NO: 2558429 - RNA, 19 nt, Homo sapiens
  misc_RNA (1)...(19): siRNA sense strand
gcaaauacauggagaacgg

SEQ ID NO: 2558430 - RNA, 19 nt, Homo sapiens
  misc_RNA (1)...(19): siRNA sense strand
gggaaccggaggagaacau

SEQ ID NO: 2558431 - RNA, 19 nt, Homo sapiens
  misc_RNA (1)...(19): siRNA sense strand
aggcaaaggcuccgagaag

SEQ ID NO: 2558432 - RNA, 19 nt, Homo sapiens
  misc_RNA (1)...(19): siRNA sense strand
ugagcaaauacauggagaa

SEQ ID NO: 2558433 - RNA, 19 nt, Homo sapiens
  misc_RNA (1)...(19): siRNA sense strand
gaguggaguaucuggugaa

SEQ ID NO: 2558434 - RNA, 19 nt, Homo sapiens
  misc_RNA (1)...(19): siRNA sense strand
ccaagaggagggaggagga

SEQ ID NO: 2558435 - RNA, 19 nt, Homo sapiens
  misc_RNA (1)...(19): siRNA sense strand
gcaucgagaagaagcggau

SEQ ID NO: 2558436 - RNA, 19 nt, Homo sapiens
  misc_RNA (1)...(19): siRNA sense strand
ggacgaaccugcagagucg

SEQ ID NO: 2558437 - RNA, 19 nt, Homo sapiens
  misc_RNA (1)...(19): siRNA sense strand
gaacaagaacggacgcauc

SEQ ID NO: 2558438 - RNA, 19 nt, Homo sapiens
  misc_RNA (1)...(19): siRNA sense strand
ggaauauaauuaucaccga

SEQ ID NO: 2558439 - RNA, 19 nt, Homo sapiens
  misc_RNA (1)...(19): siRNA sense strand
cuuccaagguccaccguga

SEQ ID NO: 2558440 - RNA, 19 nt, Homo sapiens
  misc_RNA (1)...(19): siRNA sense strand
ccgccaagugccugaacau

SEQ ID NO: 2558441 - RNA, 19 nt, Homo sapiens
  misc_RNA (1)...(19): siRNA sense strand
aagucuagggacaggaaga

SEQ ID NO: 2558442 - RNA, 19 nt, Homo sapiens
  misc_RNA (1)...(19): siRNA sense strand
acaggaagaugguuggcga

SEQ ID NO: 2558443 - RNA, 19 nt, Homo sapiens
  misc_RNA (1)...(19): siRNA sense strand
guuacagauaauacaggaa

SEQ ID NO: 2558444 - RNA, 19 nt, Homo sapiens
  misc_RNA (1)...(19): siRNA sense strand
uccgugaagucuagggaca

SEQ ID NO: 2558445 - RNA, 19 nt, Homo sapiens
  misc_RNA (1)...(19): siRNA sense strand
aagaagaagaagagggcau

SEQ ID NO: 2558446 - RNA, 19 nt, Homo sapiens
  misc_RNA (1)...(19): siRNA sense strand
gcaaggagauuguggccau

SEQ ID NO: 2558447 - RNA, 19 nt, Homo sapiens
  misc_RNA (1)...(19): siRNA sense strand
aggccaacccagagaaauu

SEQ ID NO: 2558448 - RNA, 19 nt, Homo sapiens
  misc_RNA (1)...(19): siRNA sense strand
gcaaggaugugguccgcua

SEQ ID NO: 2558449 - RNA, 19 nt, Homo sapiens
  misc_RNA (1)...(19): siRNA sense strand
gcuccaaggaccuggccaa

SEQ ID NO: 2558450 - RNA, 19 nt, Homo sapiens
  misc_RNA (1)...(19): siRNA sense strand
agacagaccagcagggcga

SEQ ID NO: 2558451 - RNA, 19 nt, Homo sapiens
  misc_RNA (1)...(19): siRNA sense strand
gagcacaucugguucgaga

SEQ ID NO: 2558452 - RNA, 19 nt, Homo sapiens
  misc_RNA (1)...(19): siRNA sense strand
ccauggugcagaaggccaa

SEQ ID NO: 2558453 - RNA, 19 nt, Homo sapiens
  misc_RNA (1)...(19): siRNA sense strand
cgacauauggggagcacau

SEQ ID NO: 2558454 - RNA, 19 nt, Homo sapiens
  misc_RNA (1)...(19): siRNA sense strand
cugaaagcaagcaagaaga

SEQ ID NO: 2558455 - RNA, 19 nt, Homo sapiens
  misc_RNA (1)...(19): siRNA sense strand
gccugaggaccgagaugaa

SEQ ID NO: 2558456 - RNA, 19 nt, Homo sapiens
  misc_RNA (1)...(19): siRNA sense strand
cccaggagacagugaccua

SEQ ID NO: 2558457 - RNA, 19 nt, Homo sapiens
  misc_RNA (1)...(19): siRNA sense strand
gcgucagcaugcacgacua

SEQ ID NO: 2558458 - RNA, 19 nt, Homo sapiens
  misc_RNA (1)...(19): siRNA sense strand
uugaugcgguggaggaaaa

SEQ ID NO: 2558459 - RNA, 19 nt, Homo sapiens
  misc_RNA (1)...(19): siRNA sense strand
cugagaucgcacaggauga

SEQ ID NO: 2558460 - RNA, 19 nt, Homo sapiens
  misc_RNA (1)...(19): siRNA sense strand
caggaauguccgcgagcca

SEQ ID NO: 2558461 - RNA, 19 nt, Homo sapiens
  misc_RNA (1)...(19): siRNA sense strand
ggaacgugguacagcugga

SEQ ID NO: 2558462 - RNA, 19 nt, Homo sapiens
  misc_RNA (1)...(19): siRNA sense strand
cgcuggagauguaccgcaa

SEQ ID NO: 2558463 - RNA, 19 nt, Homo sapiens
  misc_RNA (1)...(19): siRNA sense strand
aagaagaagaagagggcau

SEQ ID NO: 2558464 - RNA, 19 nt, Homo sapiens
  misc_RNA (1)...(19): siRNA sense strand
gcaaggagauuguggccau

SEQ ID NO: 2558465 - RNA, 19 nt, Homo sapiens
  misc_RNA (1)...(19): siRNA sense strand
aggccaacccagagaaauu

SEQ ID NO: 2558466 - RNA, 19 nt, Homo sapiens
  misc_RNA (1)...(19): siRNA sense strand
gcaaggaugugguccgcua

SEQ ID NO: 2558467 - RNA, 19 nt, Homo sapiens
  misc_RNA (1)...(19): siRNA sense strand
gcuccaaggaccuggccaa

SEQ ID NO: 2558468 - RNA, 19 nt, Homo sapiens
  misc_RNA (1)...(19): siRNA sense strand
agacagaccagcagggcga

SEQ ID NO: 2558469 - RNA, 19 nt, Homo sapiens
  misc_RNA (1)...(19): siRNA sense strand
gagcacaucugguucgaga

SEQ ID NO: 2558470 - RNA, 19 nt, Homo sapiens
  misc_RNA (1)...(19): siRNA sense strand
ccauggugcagaaggccaa

SEQ ID NO: 2558471 - RNA, 19 nt, Homo sapiens
  misc_RNA (1)...(19): siRNA sense strand
cgacauauggggagcacau

SEQ ID NO: 2558472 - RNA, 19 nt, Homo sapiens
  misc_RNA (1)...(19): siRNA sense strand
cugaaagcaagcaagaaga

SEQ ID NO: 2558473 - RNA, 19 nt, Homo sapiens
  misc_RNA (1)...(19): siRNA sense strand
gccugaggaccgagaugaa

SEQ ID NO: 2558474 - RNA, 19 nt, Homo sapiens
  misc_RNA (1)...(19): siRNA sense strand
cccaggagacagugaccua

SEQ ID NO: 2558475 - RNA, 19 nt, Homo sapiens
  misc_RNA (1)...(19): siRNA sense strand
gcgucagcaugcacgacua

SEQ ID NO: 2558476 - RNA, 19 nt, Homo sapiens
  misc_RNA (1)...(19): siRNA sense strand
uugaugcgguggaggaaaa

SEQ ID NO: 2558477 - RNA, 19 nt, Homo sapiens
  misc_RNA (1)...(19): siRNA sense strand
cugagaucgcacaggauga

SEQ ID NO: 2558478 - RNA, 19 nt, Homo sapiens
  misc_RNA (1)...(19): siRNA sense strand
caggaauguccgcgagcca

SEQ ID NO: 2558479 - RNA, 19 nt, Homo sapiens
  misc_RNA (1)...(19): siRNA sense strand
ggaacgugguacagcugga

SEQ ID NO: 2558480 - RNA, 19 nt, Homo sapiens
  misc_RNA (1)...(19): siRNA sense strand
cgcuggagauguaccgcaa

SEQ ID NO: 2558481 - RNA, 19 nt, Homo sapiens
  misc_RNA (1)...(19): siRNA sense strand
aagaagaagaagagggcau

SEQ ID NO: 2558482 - RNA, 19 nt, Homo sapiens
  misc_RNA (1)...(19): siRNA sense strand
gcaaggagauuguggccau

SEQ ID NO: 2558483 - RNA, 19 nt, Homo sapiens
  misc_RNA (1)...(19): siRNA sense strand
aggccaacccagagaaauu

SEQ ID NO: 2558484 - RNA, 19 nt, Homo sapiens
  misc_RNA (1)...(19): siRNA sense strand
gcaaggaugugguccgcua

SEQ ID NO: 2558485 - RNA, 19 nt, Homo sapiens
  misc_RNA (1)...(19): siRNA sense strand
gcuccaaggaccuggccaa

SEQ ID NO: 2558486 - RNA, 19 nt, Homo sapiens
  misc_RNA (1)...(19): siRNA sense strand
agacagaccagcagggcga

SEQ ID NO: 2558487 - RNA, 19 nt, Homo sapiens
  misc_RNA (1)...(19): siRNA sense strand
gagcacaucugguucgaga

SEQ ID NO: 2558488 - RNA, 19 nt, Homo sapiens
  misc_RNA (1)...(19): siRNA sense strand
ccauggugcagaaggccaa

SEQ ID NO: 2558489 - RNA, 19 nt, Homo sapiens
  misc_RNA (1)...(19): siRNA sense strand
cgacauauggggagcacau

SEQ ID NO: 2558490 - RNA, 19 nt, Homo sapiens
  misc_RNA (1)...(19): siRNA sense strand
cugaaagcaagcaagaaga

SEQ ID NO: 2558491 - RNA, 19 nt, Homo sapiens
  misc_RNA (1)...(19): siRNA sense strand
gccugaggaccgagaugaa

SEQ ID NO: 2558492 - RNA, 19 nt, Homo sapiens
  misc_RNA (1)...(19): siRNA sense strand
cccaggagacagugaccua

SEQ ID NO: 2558493 - RNA, 19 nt, Homo sapiens
  misc_RNA (1)...(19): siRNA sense strand
gcgucagcaugcacgacua

SEQ ID NO: 2558494 - RNA, 19 nt, Homo sapiens
  misc_RNA (1)...(19): siRNA sense strand
uugaugcgguggaggaaaa

SEQ ID NO: 2558495 - RNA, 19 nt, Homo sapiens
  misc_RNA (1)...(19): siRNA sense strand
cugagaucgcacaggauga

SEQ ID NO: 2558496 - RNA, 19 nt, Homo sapiens
  misc_RNA (1)...(19): siRNA sense strand
caggaauguccgcgagcca

SEQ ID NO: 2558497 - RNA, 19 nt, Homo sapiens
  misc_RNA (1)...(19): siRNA sense strand
ggaacgugguacagcugga

SEQ ID NO: 2558498 - RNA, 19 nt, Homo sapiens
  misc_RNA (1)...(19): siRNA sense strand
cgcuggagauguaccgcaa

SEQ ID NO: 2558499 - RNA, 19 nt, Homo sapiens
  misc_RNA (1)...(19): siRNA sense strand
cagaagaaaaucagagaaa

SEQ ID NO: 2558500 - RNA, 19 nt, Homo sapiens
  misc_RNA (1)...(19): siRNA sense strand
gagaaauacaggaaaggga

SEQ ID NO: 2558501 - RNA, 19 nt, Homo sapiens
  misc_RNA (1)...(19): siRNA sense strand
gaguauauauucuggggaa

SEQ ID NO: 2558502 - RNA, 19 nt, Homo sapiens
  misc_RNA (1)...(19): siRNA sense strand
ccuucaaacaagcuagaaa

SEQ ID NO: 2558503 - RNA, 19 nt, Homo sapiens
  misc_RNA (1)...(19): siRNA sense strand
acuagagacauguuggaaa

SEQ ID NO: 2558504 - RNA, 19 nt, Homo sapiens
  misc_RNA (1)...(19): siRNA sense strand
cuucaaacaagcuagaaau

SEQ ID NO: 2558505 - RNA, 19 nt, Homo sapiens
  misc_RNA (1)...(19): siRNA sense strand
guucaggaucuguugacaa

SEQ ID NO: 2558506 - RNA, 19 nt, Homo sapiens
  misc_RNA (1)...(19): siRNA sense strand
ugacaauggagcaagugaa

SEQ ID NO: 2558507 - RNA, 19 nt, Homo sapiens
  misc_RNA (1)...(19): siRNA sense strand
aagucuucuucuuggauua

SEQ ID NO: 2558508 - RNA, 19 nt, Homo sapiens
  misc_RNA (1)...(19): siRNA sense strand
cucaaugaaacuagagaca

SEQ ID NO: 2558509 - RNA, 19 nt, Homo sapiens
  misc_RNA (1)...(19): siRNA sense strand
gggaaauauggacagaaga

SEQ ID NO: 2558510 - RNA, 19 nt, Homo sapiens
  misc_RNA (1)...(19): siRNA sense strand
gaucacugucauuaaacaa

SEQ ID NO: 2558511 - RNA, 19 nt, Homo sapiens
  misc_RNA (1)...(19): siRNA sense strand
gcuagaaauaugggaggau

SEQ ID NO: 2558512 - RNA, 19 nt, Homo sapiens
  misc_RNA (1)...(19): siRNA sense strand
ucagaaaucucguugagca

SEQ ID NO: 2558513 - RNA, 19 nt, Homo sapiens
  misc_RNA (1)...(19): siRNA sense strand
ccuuggaggaguauauauu

SEQ ID NO: 2558514 - RNA, 19 nt, Homo sapiens
  misc_RNA (1)...(19): siRNA sense strand
uagaaauaugggaggaucu

SEQ ID NO: 2558515 - RNA, 19 nt, Homo sapiens
  misc_RNA (1)...(19): siRNA sense strand
acaauauggcugaguucuu

SEQ ID NO: 2558516 - RNA, 19 nt, Homo sapiens
  misc_RNA (1)...(19): siRNA sense strand
aaauaugggaggaucugaa

SEQ ID NO: 2558517 - RNA, 19 nt, Homo sapiens
  misc_RNA (1)...(19): siRNA sense strand
ggguccaguuaaacauaau

SEQ ID NO: 2558518 - RNA, 19 nt, Homo sapiens
  misc_RNA (1)...(19): siRNA sense strand
ggauuaauaaagauggauc

SEQ ID NO: 2558519 - RNA, 19 nt, Homo sapiens
  misc_RNA (1)...(19): siRNA sense strand
auacauugcccaagcacga

SEQ ID NO: 2558520 - RNA, 19 nt, Homo sapiens
  misc_RNA (1)...(19): siRNA sense strand
gugcagaagguuuuaggaa

SEQ ID NO: 2558521 - RNA, 19 nt, Homo sapiens
  misc_RNA (1)...(19): siRNA sense strand
aguauauauucuggggaaa

SEQ ID NO: 2558522 - RNA, 19 nt, Homo sapiens
  misc_RNA (1)...(19): siRNA sense strand
ccucgagacauuaccacua

SEQ ID NO: 2558523 - RNA, 19 nt, Homo sapiens
  misc_RNA (1)...(19): siRNA sense strand
ugcccaagcacgacgacaa

SEQ ID NO: 2558524 - RNA, 19 nt, Homo sapiens
  misc_RNA (1)...(19): siRNA sense strand
ccaaagaaaucauucccaa

SEQ ID NO: 2558525 - RNA, 19 nt, Homo sapiens
  misc_RNA (1)...(19): siRNA sense strand
guuuagugcaugugcgauu

SEQ ID NO: 2558526 - RNA, 19 nt, Homo sapiens
  misc_RNA (1)...(19): siRNA sense strand
agaaaagaguuuagugcau

SEQ ID NO: 2558527 - RNA, 19 nt, Homo sapiens
  misc_RNA (1)...(19): siRNA sense strand
ucgaaagaugucuggguuu

SEQ ID NO: 2558528 - RNA, 19 nt, Homo sapiens
  misc_RNA (1)...(19): siRNA sense strand
uguuacgaucagugugaaa

SEQ ID NO: 2558529 - RNA, 19 nt, Homo sapiens
  misc_RNA (1)...(19): siRNA sense strand
aauucaacagugagacuua

SEQ ID NO: 2558530 - RNA, 19 nt, Homo sapiens
  misc_RNA (1)...(19): siRNA sense strand
acauuagacguguggaaca

SEQ ID NO: 2558531 - RNA, 19 nt, Homo sapiens
  misc_RNA (1)...(19): siRNA sense strand
agacagaggaugaaaggcu

SEQ ID NO: 2558532 - RNA, 19 nt, Homo sapiens
  misc_RNA (1)...(19): siRNA sense strand
cgcaguagugagugccaaa

SEQ ID NO: 2558533 - RNA, 19 nt, Homo sapiens
  misc_RNA (1)...(19): siRNA sense strand
gagacuuaccaguggacca

SEQ ID NO: 2558534 - RNA, 19 nt, Homo sapiens
  misc_RNA (1)...(19): siRNA sense strand
gcaauuaacuggaucagcu

SEQ ID NO: 2558535 - RNA, 19 nt, Homo sapiens
  misc_RNA (1)...(19): siRNA sense strand
ggaugaaaggcuuguguac

SEQ ID NO: 2558536 - RNA, 19 nt, Homo sapiens
  misc_RNA (1)...(19): siRNA sense strand
aggacaugguagugcaacu

SEQ ID NO: 2558537 - RNA, 19 nt, Homo sapiens
  misc_RNA (1)...(19): siRNA sense strand
accagaaggccaaagaaau

SEQ ID NO: 2558538 - RNA, 19 nt, Homo sapiens
  misc_RNA (1)...(19): siRNA sense strand
gaaacaaacucuacguggu

SEQ ID NO: 2558539 - RNA, 19 nt, Homo sapiens
  misc_RNA (1)...(19): siRNA sense strand
cugaaagagagccaggaca

SEQ ID NO: 2558540 - RNA, 19 nt, Homo sapiens
  misc_RNA (1)...(19): siRNA sense strand
guacgaacuaucuuggaga

SEQ ID NO: 2558541 - RNA, 19 nt, Homo sapiens
  misc_RNA (1)...(19): siRNA sense strand
caaugaagaaaaugcagaa

SEQ ID NO: 2558542 - RNA, 19 nt, Homo sapiens
  misc_RNA (1)...(19): siRNA sense strand
caucaggaagaaugaagau

SEQ ID NO: 2558543 - RNA, 19 nt, Homo sapiens
  misc_RNA (1)...(19): siRNA sense strand
ucaucaccaagcagagaaa

SEQ ID NO: 2558544 - RNA, 19 nt, Homo sapiens
  misc_RNA (1)...(19): siRNA sense strand
gcaaagaugaugagagggu

SEQ ID NO: 2558545 - RNA, 19 nt, Homo sapiens
  misc_RNA (1)...(19): siRNA sense strand
gaguaauugguuuggagaa

SEQ ID NO: 2558546 - RNA, 19 nt, Homo sapiens
  misc_RNA (1)...(19): siRNA sense strand
ugauuuagcugaugagcca

SEQ ID NO: 2558547 - RNA, 19 nt, Homo sapiens
  misc_RNA (1)...(19): siRNA sense strand
ucuuggaauaucugaguaa

SEQ ID NO: 2558548 - RNA, 19 nt, Homo sapiens
  misc_RNA (1)...(19): siRNA sense strand
gaacaaacauagaagucac

SEQ ID NO: 2558549 - RNA, 19 nt, Homo sapiens
  misc_RNA (1)...(19): siRNA sense strand
gcuuaguauuguuagcaga

SEQ ID NO: 2558550 - RNA, 19 nt, Homo sapiens
  misc_RNA (1)...(19): siRNA sense strand
ggcucuuaguggauagcaa

SEQ ID NO: 2558551 - RNA, 19 nt, Homo sapiens
  misc_RNA (1)...(19): siRNA sense strand
ccgcaguggaagaguugau

SEQ ID NO: 2558552 - RNA, 19 nt, Homo sapiens
  misc_RNA (1)...(19): siRNA sense strand
augaaucaggcaacaguaa

SEQ ID NO: 2558553 - RNA, 19 nt, Homo sapiens
  misc_RNA (1)...(19): siRNA sense strand
uagcaaagaugaugagagg

SEQ ID NO: 2558554 - RNA, 19 nt, Homo sapiens
  misc_RNA (1)...(19): siRNA sense strand
guuggauaguaaugugaca

SEQ ID NO: 2558555 - RNA, 19 nt, Homo sapiens
  misc_RNA (1)...(19): siRNA sense strand
aaggaagcaaagugugaau

SEQ ID NO: 2558556 - RNA, 19 nt, Homo sapiens
  misc_RNA (1)...(19): siRNA sense strand
augaagaaggcuggaagaa

SEQ ID NO: 2558557 - RNA, 19 nt, Homo sapiens
  misc_RNA (1)...(19): siRNA sense strand
agaauugggaagauggcuu

SEQ ID NO: 2558558 - RNA, 19 nt, Homo sapiens
  misc_RNA (1)...(19): siRNA sense strand
cccaacacuucaauggcaa

SEQ ID NO: 2558559 - RNA, 19 nt, Homo sapiens
  misc_RNA (1)...(19): siRNA sense strand
ccaacgugauuuagcugau

SEQ ID NO: 2558560 - RNA, 19 nt, Homo sapiens
  misc_RNA (1)...(19): siRNA sense strand
gacccaaagaaguugaaaa

SEQ ID NO: 2558561 - RNA, 19 nt, Homo sapiens
  misc_RNA (1)...(19): siRNA sense strand
cuuaguauuguuagcagaa

SEQ ID NO: 2558562 - RNA, 19 nt, Homo sapiens
  misc_RNA (1)...(19): siRNA sense strand
gcagaaugaaucaggcaac

SEQ ID NO: 2558563 - RNA, 19 nt, Homo sapiens
  misc_RNA (1)...(19): siRNA sense strand
uuucaagggaggagguaaa

SEQ ID NO: 2558564 - RNA, 19 nt, Homo sapiens
  misc_RNA (1)...(19): siRNA sense strand
ccaaauggaaugaaggaca

SEQ ID NO: 2558565 - RNA, 19 nt, Homo sapiens
  misc_RNA (1)...(19): siRNA sense strand
caaagaauauauugagcga

SEQ ID NO: 2558566 - RNA, 19 nt, Homo sapiens
  misc_RNA (1)...(19): siRNA sense strand
gaguacaagcagaggacuu

SEQ ID NO: 2558567 - RNA, 19 nt, Homo sapiens
  misc_RNA (1)...(19): siRNA sense strand
aguaucaggagaagaguaa

SEQ ID NO: 2558568 - RNA, 19 nt, Homo sapiens
  misc_RNA (1)...(19): siRNA sense strand
ucgugagaguagcaagaaa

SEQ ID NO: 2558569 - RNA, 19 nt, Homo sapiens
  misc_RNA (1)...(19): siRNA sense strand
gggaauuaagaaugaggau

SEQ ID NO: 2558570 - RNA, 19 nt, Homo sapiens
  misc_RNA (1)...(19): siRNA sense strand
cauccuugguucagcacaa

SEQ ID NO: 2558571 - RNA, 19 nt, Homo sapiens
  misc_RNA (1)...(19): siRNA sense strand
uauugaugcaguagguaaa

SEQ ID NO: 2558572 - RNA, 19 nt, Homo sapiens
  misc_RNA (1)...(19): siRNA sense strand
cagaugaagaggacugcaa

SEQ ID NO: 2558573 - RNA, 19 nt, Homo sapiens
  misc_RNA (1)...(19): siRNA sense strand
gcuuuggacaaccgagaaa

SEQ ID NO: 2558574 - RNA, 19 nt, Homo sapiens
  misc_RNA (1)...(19): siRNA sense strand
cacaagaacaacauagcaa

SEQ ID NO: 2558575 - RNA, 19 nt, Homo sapiens
  misc_RNA (1)...(19): siRNA sense strand
ccugguuuguugaggauau

SEQ ID NO: 2558576 - RNA, 19 nt, Homo sapiens
  misc_RNA (1)...(19): siRNA sense strand
aggacuugcuuuaugggaa

SEQ ID NO: 2558577 - RNA, 19 nt, Homo sapiens
  misc_RNA (1)...(19): siRNA sense strand
auucuuaauucgugagagu

SEQ ID NO: 2558578 - RNA, 19 nt, Homo sapiens
  misc_RNA (1)...(19): siRNA sense strand
ucaaugaggaagaugaaaa

SEQ ID NO: 2558579 - RNA, 19 nt, Homo sapiens
  misc_RNA (1)...(19): siRNA sense strand
auauugaugcaguagguaa

SEQ ID NO: 2558580 - RNA, 19 nt, Homo sapiens
  misc_RNA (1)...(19): siRNA sense strand
cuagaacaucccaggaaau

SEQ ID NO: 2558581 - RNA, 19 nt, Homo sapiens
  misc_RNA (1)...(19): siRNA sense strand
cccaggaaauacagaugaa

SEQ ID NO: 2558582 - RNA, 19 nt, Homo sapiens
  misc_RNA (1)...(19): siRNA sense strand
gggaggugaugaugcccua

SEQ ID NO: 2558583 - RNA, 19 nt, Homo sapiens
  misc_RNA (1)...(19): siRNA sense strand
cugaaugucuggcugggaa

SEQ ID NO: 2558584 - RNA, 19 nt, Homo sapiens
  misc_RNA (1)...(19): siRNA sense strand
caggagaagaguaaagagu

SEQ ID NO: 2558585 - RNA, 19 nt, Homo sapiens
  misc_RNA (1)...(19): siRNA sense strand
gugagauucaugauagcaa

SEQ ID NO: 2558586 - RNA, 19 nt, Homo sapiens
  misc_RNA (1)...(19): siRNA sense strand
gcggaagggaggcaauaau

SEQ ID NO: 2558587 - RNA, 19 nt, Homo sapiens
  misc_RNA (1)...(19): siRNA sense strand
uaucaaugaggaagaugaa

SEQ ID NO: 2558588 - RNA, 19 nt, Homo sapiens
  misc_RNA (1)...(19): siRNA sense strand
cacaaaggagugagacaga

SEQ ID NO: 2558589 - RNA, 19 nt, Homo sapiens
  misc_RNA (1)...(19): siRNA sense strand
ccaccuaagccaaugacuu

SEQ ID NO: 2558590 - RNA, 19 nt, Homo sapiens
  misc_RNA (1)...(19): siRNA sense strand
ggaggcaauaauaaguuaa

SEQ ID NO: 2558591 - RNA, 19 nt, Homo sapiens
  misc_RNA (1)...(19): siRNA sense strand
caguaucaggagaagagua

SEQ ID NO: 2558592 - RNA, 19 nt, Homo sapiens
  misc_RNA (1)...(19): siRNA sense strand
guaaagaguaugauaggcu

SEQ ID NO: 2558593 - RNA, 19 nt, Homo sapiens
  misc_RNA (1)...(19): siRNA sense strand
ugggaaaccugauggugca

SEQ ID NO: 2558594 - RNA, 19 nt, Homo sapiens
  misc_RNA (1)...(19): siRNA sense strand
ggagauuauacuuugacuu

SEQ ID NO: 2558595 - RNA, 19 nt, Homo sapiens
  misc_RNA (1)...(19): siRNA sense strand
gaauuaagaaugaggaugc

SEQ ID NO: 2558596 - RNA, 19 nt, Homo sapiens
  misc_RNA (1)...(19): siRNA sense strand
ggaugguaaauauggcuuu

SEQ ID NO: 2558597 - RNA, 19 nt, Homo sapiens
  misc_RNA (1)...(19): siRNA sense strand
aggaugcugcugagaacua

SEQ ID NO: 2558598 - RNA, 19 nt, Homo sapiens
  misc_RNA (1)...(19): siRNA sense strand
aggagguaaaugacaaauu

SEQ ID NO: 2558599 - RNA, 19 nt, Homo sapiens
  misc_RNA (1)...(19): siRNA sense strand
agaagaguaaagaguauga

SEQ ID NO: 2558600 - RNA, 19 nt, Homo sapiens
  misc_RNA (1)...(19): siRNA sense strand
ugauaggcuguaugaagaa

SEQ ID NO: 2558601 - RNA, 19 nt, Homo sapiens
  misc_RNA (1)...(19): siRNA sense strand
uuuggacaaccgagaaaua

SEQ ID NO: 2558602 - RNA, 19 nt, Homo sapiens
  misc_RNA (1)...(19): siRNA sense strand
ccgagaugccucaacaaaa

SEQ ID NO: 2558603 - RNA, 19 nt, Homo sapiens
  misc_RNA (1)...(19): siRNA sense strand
ugucauucgaagagaguua

SEQ ID NO: 2558604 - RNA, 19 nt, Homo sapiens
  misc_RNA (1)...(19): siRNA sense strand
guuuauuuggcaagagaaa

SEQ ID NO: 2558605 - RNA, 19 nt, Homo sapiens
  misc_RNA (1)...(19): siRNA sense strand
gguaauguuuauuuggcaa

SEQ ID NO: 2558606 - RNA, 19 nt, Homo sapiens
  misc_RNA (1)...(19): siRNA sense strand
acaaagaaucagcuagcaa

SEQ ID NO: 2558607 - RNA, 19 nt, Homo sapiens
  misc_RNA (1)...(19): siRNA sense strand
aaucagaagcagaagcaau

SEQ ID NO: 2558608 - RNA, 19 nt, Homo sapiens
  misc_RNA (1)...(19): siRNA sense strand
guucagaaucagaagcaga

SEQ ID NO: 2558609 - RNA, 19 nt, Homo sapiens
  misc_RNA (1)...(19): siRNA sense strand
ggagaaagccggaguggag

SEQ ID NO: 2558610 - RNA, 19 nt, Homo sapiens
  misc_RNA (1)...(19): siRNA sense strand
ucagaagagaaguagaaau

SEQ ID NO: 2558611 - RNA, 19 nt, Homo sapiens
  misc_RNA (1)...(19): siRNA sense strand
aagcauaaucccagccaga

SEQ ID NO: 2558612 - RNA, 19 nt, Homo sapiens
  misc_RNA (1)...(19): siRNA sense strand
aggcaaacacauaccaaga

SEQ ID NO: 2558613 - RNA, 19 nt, Homo sapiens
  misc_RNA (1)...(19): siRNA sense strand
agaguuauucauagagaca

SEQ ID NO: 2558614 - RNA, 19 nt, Homo sapiens
  misc_RNA (1)...(19): siRNA sense strand
gcaucagcucagaagagaa

SEQ ID NO: 2558615 - RNA, 19 nt, Homo sapiens
  misc_RNA (1)...(19): siRNA sense strand
ccacugaauaacacccaaa

SEQ ID NO: 2558616 - RNA, 19 nt, Homo sapiens
  misc_RNA (1)...(19): siRNA sense strand
caagagaaaagcaaagcaa

SEQ ID NO: 2558617 - RNA, 19 nt, Homo sapiens
  misc_RNA (1)...(19): siRNA sense strand
aagccggaguggagcauca

SEQ ID NO: 2558618 - RNA, 19 nt, Homo sapiens
  misc_RNA (1)...(19): siRNA sense strand
ucauagagacauuaagcca

SEQ ID NO: 2558619 - RNA, 19 nt, Homo sapiens
  misc_RNA (1)...(19): siRNA sense strand
agacauuaagccagagaac

SEQ ID NO: 2558620 - RNA, 19 nt, Homo sapiens
  misc_RNA (1)...(19): siRNA sense strand
uguuaaggcuacagcucca

SEQ ID NO: 2558621 - RNA, 19 nt, Homo sapiens
  misc_RNA (1)...(19): siRNA sense strand
auagagacauuaagccaga

SEQ ID NO: 2558622 - RNA, 19 nt, Homo sapiens
  misc_RNA (1)...(19): siRNA sense strand
cuuuggaagacuuugaaau

SEQ ID NO: 2558623 - RNA, 19 nt, Homo sapiens
  misc_RNA (1)...(19): siRNA sense strand
aaguagaaauacaguccca

SEQ ID NO: 2558624 - RNA, 19 nt, Homo sapiens
  misc_RNA (1)...(19): siRNA sense strand
aaucccagccagaggccaa

SEQ ID NO: 2558625 - RNA, 19 nt, Homo sapiens
  misc_RNA (1)...(19): siRNA sense strand
ugucauucgaagagaguua

SEQ ID NO: 2558626 - RNA, 19 nt, Homo sapiens
  misc_RNA (1)...(19): siRNA sense strand
guuuauuuggcaagagaaa

SEQ ID NO: 2558627 - RNA, 19 nt, Homo sapiens
  misc_RNA (1)...(19): siRNA sense strand
gguaauguuuauuuggcaa

SEQ ID NO: 2558628 - RNA, 19 nt, Homo sapiens
  misc_RNA (1)...(19): siRNA sense strand
acaaagaaucagcuagcaa

SEQ ID NO: 2558629 - RNA, 19 nt, Homo sapiens
  misc_RNA (1)...(19): siRNA sense strand
aaucagaagcagaagcaau

SEQ ID NO: 2558630 - RNA, 19 nt, Homo sapiens
  misc_RNA (1)...(19): siRNA sense strand
guucagaaucagaagcaga

SEQ ID NO: 2558631 - RNA, 19 nt, Homo sapiens
  misc_RNA (1)...(19): siRNA sense strand
ggagaaagccggaguggag

SEQ ID NO: 2558632 - RNA, 19 nt, Homo sapiens
  misc_RNA (1)...(19): siRNA sense strand
ucagaagagaaguagaaau

SEQ ID NO: 2558633 - RNA, 19 nt, Homo sapiens
  misc_RNA (1)...(19): siRNA sense strand
aagcauaaucccagccaga

SEQ ID NO: 2558634 - RNA, 19 nt, Homo sapiens
  misc_RNA (1)...(19): siRNA sense strand
aggcaaacacauaccaaga

SEQ ID NO: 2558635 - RNA, 19 nt, Homo sapiens
  misc_RNA (1)...(19): siRNA sense strand
agaguuauucauagagaca

SEQ ID NO: 2558636 - RNA, 19 nt, Homo sapiens
  misc_RNA (1)...(19): siRNA sense strand
gcaucagcucagaagagaa

SEQ ID NO: 2558637 - RNA, 19 nt, Homo sapiens
  misc_RNA (1)...(19): siRNA sense strand
ccacugaauaacacccaaa

SEQ ID NO: 2558638 - RNA, 19 nt, Homo sapiens
  misc_RNA (1)...(19): siRNA sense strand
caagagaaaagcaaagcaa

SEQ ID NO: 2558639 - RNA, 19 nt, Homo sapiens
  misc_RNA (1)...(19): siRNA sense strand
aagccggaguggagcauca

SEQ ID NO: 2558640 - RNA, 19 nt, Homo sapiens
  misc_RNA (1)...(19): siRNA sense strand
ucauagagacauuaagcca

SEQ ID NO: 2558641 - RNA, 19 nt, Homo sapiens
  misc_RNA (1)...(19): siRNA sense strand
agacauuaagccagagaac

SEQ ID NO: 2558642 - RNA, 19 nt, Homo sapiens
  misc_RNA (1)...(19): siRNA sense strand
uguuaaggcuacagcucca

SEQ ID NO: 2558643 - RNA, 19 nt, Homo sapiens
  misc_RNA (1)...(19): siRNA sense strand
auagagacauuaagccaga

SEQ ID NO: 2558644 - RNA, 19 nt, Homo sapiens
  misc_RNA (1)...(19): siRNA sense strand
cuuuggaagacuuugaaau

SEQ ID NO: 2558645 - RNA, 19 nt, Homo sapiens
  misc_RNA (1)...(19): siRNA sense strand
aaguagaaauacaguccca

SEQ ID NO: 2558646 - RNA, 19 nt, Homo sapiens
  misc_RNA (1)...(19): siRNA sense strand
aaucccagccagaggccaa

SEQ ID NO: 2558647 - RNA, 19 nt, Homo sapiens
  misc_RNA (1)...(19): siRNA sense strand
ugucauucgaagagaguua

SEQ ID NO: 2558648 - RNA, 19 nt, Homo sapiens
  misc_RNA (1)...(19): siRNA sense strand
guuuauuuggcaagagaaa

SEQ ID NO: 2558649 - RNA, 19 nt, Homo sapiens
  misc_RNA (1)...(19): siRNA sense strand
gguaauguuuauuuggcaa

SEQ ID NO: 2558650 - RNA, 19 nt, Homo sapiens
  misc_RNA (1)...(19): siRNA sense strand
acaaagaaucagcuagcaa

SEQ ID NO: 2558651 - RNA, 19 nt, Homo sapiens
  misc_RNA (1)...(19): siRNA sense strand
aaucagaagcagaagcaau

SEQ ID NO: 2558652 - RNA, 19 nt, Homo sapiens
  misc_RNA (1)...(19): siRNA sense strand
guucagaaucagaagcaga

SEQ ID NO: 2558653 - RNA, 19 nt, Homo sapiens
  misc_RNA (1)...(19): siRNA sense strand
ggagaaagccggaguggag

SEQ ID NO: 2558654 - RNA, 19 nt, Homo sapiens
  misc_RNA (1)...(19): siRNA sense strand
ucagaagagaaguagaaau

SEQ ID NO: 2558655 - RNA, 19 nt, Homo sapiens
  misc_RNA (1)...(19): siRNA sense strand
aagcauaaucccagccaga

SEQ ID NO: 2558656 - RNA, 19 nt, Homo sapiens
  misc_RNA (1)...(19): siRNA sense strand
aggcaaacacauaccaaga

SEQ ID NO: 2558657 - RNA, 19 nt, Homo sapiens
  misc_RNA (1)...(19): siRNA sense strand
agaguuauucauagagaca

SEQ ID NO: 2558658 - RNA, 19 nt, Homo sapiens
  misc_RNA (1)...(19): siRNA sense strand
gcaucagcucagaagagaa

SEQ ID NO: 2558659 - RNA, 19 nt, Homo sapiens
  misc_RNA (1)...(19): siRNA sense strand
ccacugaauaacacccaaa

SEQ ID NO: 2558660 - RNA, 19 nt, Homo sapiens
  misc_RNA (1)...(19): siRNA sense strand
caagagaaaagcaaagcaa

SEQ ID NO: 2558661 - RNA, 19 nt, Homo sapiens
  misc_RNA (1)...(19): siRNA sense strand
aagccggaguggagcauca

SEQ ID NO: 2558662 - RNA, 19 nt, Homo sapiens
  misc_RNA (1)...(19): siRNA sense strand
ucauagagacauuaagcca

SEQ ID NO: 2558663 - RNA, 19 nt, Homo sapiens
  misc_RNA (1)...(19): siRNA sense strand
agacauuaagccagagaac

SEQ ID NO: 2558664 - RNA, 19 nt, Homo sapiens
  misc_RNA (1)...(19): siRNA sense strand
uguuaaggcuacagcucca

SEQ ID NO: 2558665 - RNA, 19 nt, Homo sapiens
  misc_RNA (1)...(19): siRNA sense strand
auagagacauuaagccaga

SEQ ID NO: 2558666 - RNA, 19 nt, Homo sapiens
  misc_RNA (1)...(19): siRNA sense strand
cuuuggaagacuuugaaau

SEQ ID NO: 2558667 - RNA, 19 nt, Homo sapiens
  misc_RNA (1)...(19): siRNA sense strand
aaguagaaauacaguccca

SEQ ID NO: 2558668 - RNA, 19 nt, Homo sapiens
  misc_RNA (1)...(19): siRNA sense strand
aaucccagccagaggccaa

SEQ ID NO: 2558669 - RNA, 19 nt, Homo sapiens
  misc_RNA (1)...(19): siRNA sense strand
ugucauucgaagagaguua

SEQ ID NO: 2558670 - RNA, 19 nt, Homo sapiens
  misc_RNA (1)...(19): siRNA sense strand
guuuauuuggcaagagaaa

SEQ ID NO: 2558671 - RNA, 19 nt, Homo sapiens
  misc_RNA (1)...(19): siRNA sense strand
gguaauguuuauuuggcaa

SEQ ID NO: 2558672 - RNA, 19 nt, Homo sapiens
  misc_RNA (1)...(19): siRNA sense strand
acaaagaaucagcuagcaa

SEQ ID NO: 2558673 - RNA, 19 nt, Homo sapiens
  misc_RNA (1)...(19): siRNA sense strand
aaucagaagcagaagcaau

SEQ ID NO: 2558674 - RNA, 19 nt, Homo sapiens
  misc_RNA (1)...(19): siRNA sense strand
guucagaaucagaagcaga

SEQ ID NO: 2558675 - RNA, 19 nt, Homo sapiens
  misc_RNA (1)...(19): siRNA sense strand
ggagaaagccggaguggag

SEQ ID NO: 2558676 - RNA, 19 nt, Homo sapiens
  misc_RNA (1)...(19): siRNA sense strand
ucagaagagaaguagaaau

SEQ ID NO: 2558677 - RNA, 19 nt, Homo sapiens
  misc_RNA (1)...(19): siRNA sense strand
aagcauaaucccagccaga

SEQ ID NO: 2558678 - RNA, 19 nt, Homo sapiens
  misc_RNA (1)...(19): siRNA sense strand
aggcaaacacauaccaaga

SEQ ID NO: 2558679 - RNA, 19 nt, Homo sapiens
  misc_RNA (1)...(19): siRNA sense strand
agaguuauucauagagaca

SEQ ID NO: 2558680 - RNA, 19 nt, Homo sapiens
  misc_RNA (1)...(19): siRNA sense strand
gcaucagcucagaagagaa

SEQ ID NO: 2558681 - RNA, 19 nt, Homo sapiens
  misc_RNA (1)...(19): siRNA sense strand
ccacugaauaacacccaaa

SEQ ID NO: 2558682 - RNA, 19 nt, Homo sapiens
  misc_RNA (1)...(19): siRNA sense strand
caagagaaaagcaaagcaa

SEQ ID NO: 2558683 - RNA, 19 nt, Homo sapiens
  misc_RNA (1)...(19): siRNA sense strand
aagccggaguggagcauca

SEQ ID NO: 2558684 - RNA, 19 nt, Homo sapiens
  misc_RNA (1)...(19): siRNA sense strand
ucauagagacauuaagcca

SEQ ID NO: 2558685 - RNA, 19 nt, Homo sapiens
  misc_RNA (1)...(19): siRNA sense strand
agacauuaagccagagaac

SEQ ID NO: 2558686 - RNA, 19 nt, Homo sapiens
  misc_RNA (1)...(19): siRNA sense strand
uguuaaggcuacagcucca

SEQ ID NO: 2558687 - RNA, 19 nt, Homo sapiens
  misc_RNA (1)...(19): siRNA sense strand
auagagacauuaagccaga

SEQ ID NO: 2558688 - RNA, 19 nt, Homo sapiens
  misc_RNA (1)...(19): siRNA sense strand
cuuuggaagacuuugaaau

SEQ ID NO: 2558689 - RNA, 19 nt, Homo sapiens
  misc_RNA (1)...(19): siRNA sense strand
aaguagaaauacaguccca

SEQ ID NO: 2558690 - RNA, 19 nt, Homo sapiens
  misc_RNA (1)...(19): siRNA sense strand
aaucccagccagaggccaa

SEQ ID NO: 2558691 - RNA, 19 nt, Homo sapiens
  misc_RNA (1)...(19): siRNA sense strand
ugucauucgaagagaguua

SEQ ID NO: 2558692 - RNA, 19 nt, Homo sapiens
  misc_RNA (1)...(19): siRNA sense strand
guuuauuuggcaagagaaa

SEQ ID NO: 2558693 - RNA, 19 nt, Homo sapiens
  misc_RNA (1)...(19): siRNA sense strand
gguaauguuuauuuggcaa

SEQ ID NO: 2558694 - RNA, 19 nt, Homo sapiens
  misc_RNA (1)...(19): siRNA sense strand
acaaagaaucagcuagcaa

SEQ ID NO: 2558695 - RNA, 19 nt, Homo sapiens
  misc_RNA (1)...(19): siRNA sense strand
aaucagaagcagaagcaau

SEQ ID NO: 2558696 - RNA, 19 nt, Homo sapiens
  misc_RNA (1)...(19): siRNA sense strand
guucagaaucagaagcaga

SEQ ID NO: 2558697 - RNA, 19 nt, Homo sapiens
  misc_RNA (1)...(19): siRNA sense strand
ggagaaagccggaguggag

SEQ ID NO: 2558698 - RNA, 19 nt, Homo sapiens
  misc_RNA (1)...(19): siRNA sense strand
ucagaagagaaguagaaau

SEQ ID NO: 2558699 - RNA, 19 nt, Homo sapiens
  misc_RNA (1)...(19): siRNA sense strand
aagcauaaucccagccaga

SEQ ID NO: 2558700 - RNA, 19 nt, Homo sapiens
  misc_RNA (1)...(19): siRNA sense strand
aggcaaacacauaccaaga

SEQ ID NO: 2558701 - RNA, 19 nt, Homo sapiens
  misc_RNA (1)...(19): siRNA sense strand
agaguuauucauagagaca

SEQ ID NO: 2558702 - RNA, 19 nt, Homo sapiens
  misc_RNA (1)...(19): siRNA sense strand
gcaucagcucagaagagaa

SEQ ID NO: 2558703 - RNA, 19 nt, Homo sapiens
  misc_RNA (1)...(19): siRNA sense strand
ccacugaauaacacccaaa

SEQ ID NO: 2558704 - RNA, 19 nt, Homo sapiens
  misc_RNA (1)...(19): siRNA sense strand
caagagaaaagcaaagcaa

SEQ ID NO: 2558705 - RNA, 19 nt, Homo sapiens
  misc_RNA (1)...(19): siRNA sense strand
aagccggaguggagcauca

SEQ ID NO: 2558706 - RNA, 19 nt, Homo sapiens
  misc_RNA (1)...(19): siRNA sense strand
ucauagagacauuaagcca

SEQ ID NO: 2558707 - RNA, 19 nt, Homo sapiens
  misc_RNA (1)...(19): siRNA sense strand
agacauuaagccagagaac

SEQ ID NO: 2558708 - RNA, 19 nt, Homo sapiens
  misc_RNA (1)...(19): siRNA sense strand
uguuaaggcuacagcucca

SEQ ID NO: 2558709 - RNA, 19 nt, Homo sapiens
  misc_RNA (1)...(19): siRNA sense strand
auagagacauuaagccaga

SEQ ID NO: 2558710 - RNA, 19 nt, Homo sapiens
  misc_RNA (1)...(19): siRNA sense strand
cuuuggaagacuuugaaau

SEQ ID NO: 2558711 - RNA, 19 nt, Homo sapiens
  misc_RNA (1)...(19): siRNA sense strand
aaguagaaauacaguccca

SEQ ID NO: 2558712 - RNA, 19 nt, Homo sapiens
  misc_RNA (1)...(19): siRNA sense strand
aaucccagccagaggccaa

SEQ ID NO: 2558713 - RNA, 19 nt, Homo sapiens
  misc_RNA (1)...(19): siRNA sense strand
ugucauucgaagagaguua

SEQ ID NO: 2558714 - RNA, 19 nt, Homo sapiens
  misc_RNA (1)...(19): siRNA sense strand
guuuauuuggcaagagaaa

SEQ ID NO: 2558715 - RNA, 19 nt, Homo sapiens
  misc_RNA (1)...(19): siRNA sense strand
gguaauguuuauuuggcaa

SEQ ID NO: 2558716 - RNA, 19 nt, Homo sapiens
  misc_RNA (1)...(19): siRNA sense strand
acaaagaaucagcuagcaa

SEQ ID NO: 2558717 - RNA, 19 nt, Homo sapiens
  misc_RNA (1)...(19): siRNA sense strand
aaucagaagcagaagcaau

SEQ ID NO: 2558718 - RNA, 19 nt, Homo sapiens
  misc_RNA (1)...(19): siRNA sense strand
guucagaaucagaagcaga

SEQ ID NO: 2558719 - RNA, 19 nt, Homo sapiens
  misc_RNA (1)...(19): siRNA sense strand
ggagaaagccggaguggag

SEQ ID NO: 2558720 - RNA, 19 nt, Homo sapiens
  misc_RNA (1)...(19): siRNA sense strand
ucagaagagaaguagaaau

SEQ ID NO: 2558721 - RNA, 19 nt, Homo sapiens
  misc_RNA (1)...(19): siRNA sense strand
aagcauaaucccagccaga

SEQ ID NO: 2558722 - RNA, 19 nt, Homo sapiens
  misc_RNA (1)...(19): siRNA sense strand
aggcaaacacauaccaaga

SEQ ID NO: 2558723 - RNA, 19 nt, Homo sapiens
  misc_RNA (1)...(19): siRNA sense strand
agaguuauucauagagaca

SEQ ID NO: 2558724 - RNA, 19 nt, Homo sapiens
  misc_RNA (1)...(19): siRNA sense strand
gcaucagcucagaagagaa

SEQ ID NO: 2558725 - RNA, 19 nt, Homo sapiens
  misc_RNA (1)...(19): siRNA sense strand
ccacugaauaacacccaaa

SEQ ID NO: 2558726 - RNA, 19 nt, Homo sapiens
  misc_RNA (1)...(19): siRNA sense strand
caagagaaaagcaaagcaa

SEQ ID NO: 2558727 - RNA, 19 nt, Homo sapiens
  misc_RNA (1)...(19): siRNA sense strand
aagccggaguggagcauca

SEQ ID NO: 2558728 - RNA, 19 nt, Homo sapiens
  misc_RNA (1)...(19): siRNA sense strand
ucauagagacauuaagcca

SEQ ID NO: 2558729 - RNA, 19 nt, Homo sapiens
  misc_RNA (1)...(19): siRNA sense strand
agacauuaagccagagaac

SEQ ID NO: 2558730 - RNA, 19 nt, Homo sapiens
  misc_RNA (1)...(19): siRNA sense strand
uguuaaggcuacagcucca

SEQ ID NO: 2558731 - RNA, 19 nt, Homo sapiens
  misc_RNA (1)...(19): siRNA sense strand
auagagacauuaagccaga

SEQ ID NO: 2558732 - RNA, 19 nt, Homo sapiens
  misc_RNA (1)...(19): siRNA sense strand
cuuuggaagacuuugaaau

SEQ ID NO: 2558733 - RNA, 19 nt, Homo sapiens
  misc_RNA (1)...(19): siRNA sense strand
aaguagaaauacaguccca

SEQ ID NO: 2558734 - RNA, 19 nt, Homo sapiens
  misc_RNA (1)...(19): siRNA sense strand
aaucccagccagaggccaa

SEQ ID NO: 2558735 - RNA, 19 nt, Homo sapiens
  misc_RNA (1)...(19): siRNA sense strand
gagagaaauagaagagcaa

SEQ ID NO: 2558736 - RNA, 19 nt, Homo sapiens
  misc_RNA (1)...(19): siRNA sense strand
guuaaagagaugagugauu

SEQ ID NO: 2558737 - RNA, 19 nt, Homo sapiens
  misc_RNA (1)...(19): siRNA sense strand
gcuaagaggaagagaagca

SEQ ID NO: 2558738 - RNA, 19 nt, Homo sapiens
  misc_RNA (1)...(19): siRNA sense strand
aagaaagaaggcagaguaa

SEQ ID NO: 2558739 - RNA, 19 nt, Homo sapiens
  misc_RNA (1)...(19): siRNA sense strand
cuauagugguugagcauga

SEQ ID NO: 2558740 - RNA, 19 nt, Homo sapiens
  misc_RNA (1)...(19): siRNA sense strand
cuguaaaucgugugaaaga

SEQ ID NO: 2558741 - RNA, 19 nt, Homo sapiens
  misc_RNA (1)...(19): siRNA sense strand
gagcaugaggaguucgaaa

SEQ ID NO: 2558742 - RNA, 19 nt, Homo sapiens
  misc_RNA (1)...(19): siRNA sense strand
agaaagggaacgaagagaa

SEQ ID NO: 2558743 - RNA, 19 nt, Homo sapiens
  misc_RNA (1)...(19): siRNA sense strand
gagaaauagaagagcaacu

SEQ ID NO: 2558744 - RNA, 19 nt, Homo sapiens
  misc_RNA (1)...(19): siRNA sense strand
gagaguuguaauauggaaa

SEQ ID NO: 2558745 - RNA, 19 nt, Homo sapiens
  misc_RNA (1)...(19): siRNA sense strand
ccagaaagugguuuggcaa

SEQ ID NO: 2558746 - RNA, 19 nt, Homo sapiens
  misc_RNA (1)...(19): siRNA sense strand
gugaaagaacgaaggcaga

SEQ ID NO: 2558747 - RNA, 19 nt, Homo sapiens
  misc_RNA (1)...(19): siRNA sense strand
ucaucaagcuaaagagagu

SEQ ID NO: 2558748 - RNA, 19 nt, Homo sapiens
  misc_RNA (1)...(19): siRNA sense strand
ugauugaagaugaaaggaa

SEQ ID NO: 2558749 - RNA, 19 nt, Homo sapiens
  misc_RNA (1)...(19): siRNA sense strand
gaagcagagcugaagcaaa

SEQ ID NO: 2558750 - RNA, 19 nt, Homo sapiens
  misc_RNA (1)...(19): siRNA sense strand
accagaagcuccaggaaga

SEQ ID NO: 2558751 - RNA, 19 nt, Homo sapiens
  misc_RNA (1)...(19): siRNA sense strand
agguuaaagagaugaguga

SEQ ID NO: 2558752 - RNA, 19 nt, Homo sapiens
  misc_RNA (1)...(19): siRNA sense strand
cugcauggguggaggguag

SEQ ID NO: 2558753 - RNA, 19 nt, Homo sapiens
  misc_RNA (1)...(19): siRNA sense strand
agaacuugagcuugaauua

SEQ ID NO: 2558754 - RNA, 19 nt, Homo sapiens
  misc_RNA (1)...(19): siRNA sense strand
cuuacaaagauguggcuau

SEQ ID NO: 2558755 - RNA, 19 nt, Homo sapiens
  misc_RNA (1)...(19): siRNA sense strand
ggauuugcuaagaggaaga

SEQ ID NO: 2558756 - RNA, 19 nt, Homo sapiens
  misc_RNA (1)...(19): siRNA sense strand
guucgaaagcugcaggcaa

SEQ ID NO: 2558757 - RNA, 19 nt, Homo sapiens
  misc_RNA (1)...(19): siRNA sense strand
gcuaaaugaguauaagaga

SEQ ID NO: 2558758 - RNA, 19 nt, Homo sapiens
  misc_RNA (1)...(19): siRNA sense strand
ugugaaagaacuugagcuu

SEQ ID NO: 2558759 - RNA, 19 nt, Homo sapiens
  misc_RNA (1)...(19): siRNA sense strand
agagagaaauagaagagca

SEQ ID NO: 2558760 - RNA, 19 nt, Homo sapiens
  misc_RNA (1)...(19): siRNA sense strand
aagggaacgaagagaacua

SEQ ID NO: 2558761 - RNA, 19 nt, Homo sapiens
  misc_RNA (1)...(19): siRNA sense strand
uggcaaaagaaaagguauu

SEQ ID NO: 2558762 - RNA, 19 nt, Homo sapiens
  misc_RNA (1)...(19): siRNA sense strand
aauuuaugcucaaaggcaa

SEQ ID NO: 2558763 - RNA, 19 nt, Homo sapiens
  misc_RNA (1)...(19): siRNA sense strand
gcagaauaucaucaagcua

SEQ ID NO: 2558764 - RNA, 19 nt, Homo sapiens
  misc_RNA (1)...(19): siRNA sense strand
aaagauaccgagauagcaa

SEQ ID NO: 2558765 - RNA, 19 nt, Homo sapiens
  misc_RNA (1)...(19): siRNA sense strand
uggcugauguguugaguca

SEQ ID NO: 2558766 - RNA, 19 nt, Homo sapiens
  misc_RNA (1)...(19): siRNA sense strand
aucuguaaaucgugugaaa

SEQ ID NO: 2558767 - RNA, 19 nt, Homo sapiens
  misc_RNA (1)...(19): siRNA sense strand
aaccauaugcugaaugaaa

SEQ ID NO: 2558768 - RNA, 19 nt, Homo sapiens
  misc_RNA (1)...(19): siRNA sense strand
aggaaaggaagaugauuga

SEQ ID NO: 2558769 - RNA, 19 nt, Homo sapiens
  misc_RNA (1)...(19): siRNA sense strand
ccaagagauugaaacaaaa

SEQ ID NO: 2558770 - RNA, 19 nt, Homo sapiens
  misc_RNA (1)...(19): siRNA sense strand
gccuugcaauggugagaua

SEQ ID NO: 2558771 - RNA, 19 nt, Homo sapiens
  misc_RNA (1)...(19): siRNA sense strand
acgaaggcagagagaagaa

SEQ ID NO: 2558772 - RNA, 19 nt, Homo sapiens
  misc_RNA (1)...(19): siRNA sense strand
ggcuauagugguugagcau

SEQ ID NO: 2558773 - RNA, 19 nt, Homo sapiens
  misc_RNA (1)...(19): siRNA sense strand
gauaaugaggaguuugaau

SEQ ID NO: 2558774 - RNA, 19 nt, Homo sapiens
  misc_RNA (1)...(19): siRNA sense strand
gaacaaaaggaagaagaaa

SEQ ID NO: 2558775 - RNA, 19 nt, Homo sapiens
  misc_RNA (1)...(19): siRNA sense strand
acaaacaacugcaagacga

SEQ ID NO: 2558776 - RNA, 19 nt, Homo sapiens
  misc_RNA (1)...(19): siRNA sense strand
gcacacuugaagaaaggaa

SEQ ID NO: 2558777 - RNA, 19 nt, Homo sapiens
  misc_RNA (1)...(19): siRNA sense strand
gugaaaauccuuuagagaa

SEQ ID NO: 2558778 - RNA, 19 nt, Homo sapiens
  misc_RNA (1)...(19): siRNA sense strand
caaacaacugcaagacgaa

SEQ ID NO: 2558779 - RNA, 19 nt, Homo sapiens
  misc_RNA (1)...(19): siRNA sense strand
aagcuauaccagacguuua

SEQ ID NO: 2558780 - RNA, 19 nt, Homo sapiens
  misc_RNA (1)...(19): siRNA sense strand
ggaaugacgucguggaagc

SEQ ID NO: 2558781 - RNA, 19 nt, Homo sapiens
  misc_RNA (1)...(19): siRNA sense strand
agagaagaaagaaggcaga

SEQ ID NO: 2558782 - RNA, 19 nt, Homo sapiens
  misc_RNA (1)...(19): siRNA sense strand
ugguugagcaugaggaguu

SEQ ID NO: 2558783 - RNA, 19 nt, Homo sapiens
  misc_RNA (1)...(19): siRNA sense strand
gcgcaguccaacauguuua

SEQ ID NO: 2558784 - RNA, 19 nt, Homo sapiens
  misc_RNA (1)...(19): siRNA sense strand
gauugaagaugaaaggaag

SEQ ID NO: 2558785 - RNA, 19 nt, Homo sapiens
  misc_RNA (1)...(19): siRNA sense strand
uuaaacaacaacuggaaga

SEQ ID NO: 2558786 - RNA, 19 nt, Homo sapiens
  misc_RNA (1)...(19): siRNA sense strand
ggcaagggucaaagagcuu

SEQ ID NO: 2558787 - RNA, 19 nt, Homo sapiens
  misc_RNA (1)...(19): siRNA sense strand
guguagaucagaaacaaau

SEQ ID NO: 2558788 - RNA, 19 nt, Homo sapiens
  misc_RNA (1)...(19): siRNA sense strand
aaggaagaugauugaagaa

SEQ ID NO: 2558789 - RNA, 19 nt, Homo sapiens
  misc_RNA (1)...(19): siRNA sense strand
gcaagacgaaauugagcau

SEQ ID NO: 2558790 - RNA, 19 nt, Homo sapiens
  misc_RNA (1)...(19): siRNA sense strand
aggcccagauucuagguua

SEQ ID NO: 2558791 - RNA, 19 nt, Homo sapiens
  misc_RNA (1)...(19): siRNA sense strand
ccagauucuagguuacaaa

SEQ ID NO: 2558792 - RNA, 19 nt, Homo sapiens
  misc_RNA (1)...(19): siRNA sense strand
aauacuaaggcaaggguca

SEQ ID NO: 2558793 - RNA, 19 nt, Homo sapiens
  misc_RNA (1)...(19): siRNA sense strand
ccaacuacguggagcggaa

SEQ ID NO: 2558794 - RNA, 19 nt, Homo sapiens
  misc_RNA (1)...(19): siRNA sense strand
gugaagaaccugaaggaca

SEQ ID NO: 2558795 - RNA, 19 nt, Homo sapiens
  misc_RNA (1)...(19): siRNA sense strand
aggugcagcucguggacaa

SEQ ID NO: 2558796 - RNA, 19 nt, Homo sapiens
  misc_RNA (1)...(19): siRNA sense strand
ccuuaaagcgucagggaag

SEQ ID NO: 2558797 - RNA, 19 nt, Homo sapiens
  misc_RNA (1)...(19): siRNA sense strand
ucaccgaggaggagcucaa

SEQ ID NO: 2558798 - RNA, 19 nt, Homo sapiens
  misc_RNA (1)...(19): siRNA sense strand
acaucaagaaggugaacga

SEQ ID NO: 2558799 - RNA, 19 nt, Homo sapiens
  misc_RNA (1)...(19): siRNA sense strand
gcucagucaccgaggagga

SEQ ID NO: 2558800 - RNA, 19 nt, Homo sapiens
  misc_RNA (1)...(19): siRNA sense strand
gagagugguacuacgggaa

SEQ ID NO: 2558801 - RNA, 19 nt, Homo sapiens
  misc_RNA (1)...(19): siRNA sense strand
agaccauggaggugauuga

SEQ ID NO: 2558802 - RNA, 19 nt, Homo sapiens
  misc_RNA (1)...(19): siRNA sense strand
ugaagaaccugaaggacac

SEQ ID NO: 2558803 - RNA, 19 nt, Homo sapiens
  misc_RNA (1)...(19): siRNA sense strand
aagacgugguggcggguga

SEQ ID NO: 2558804 - RNA, 19 nt, Homo sapiens
  misc_RNA (1)...(19): siRNA sense strand
gagcggaagaacagccuga

SEQ ID NO: 2558805 - RNA, 19 nt, Homo sapiens
  misc_RNA (1)...(19): siRNA sense strand
gggagaagcucuaccucgu

SEQ ID NO: 2558806 - RNA, 19 nt, Homo sapiens
  misc_RNA (1)...(19): siRNA sense strand
acaaacacuucaaggugca

SEQ ID NO: 2558807 - RNA, 19 nt, Homo sapiens
  misc_RNA (1)...(19): siRNA sense strand
ugguagaagaugugguaca

SEQ ID NO: 2558808 - RNA, 19 nt, Homo sapiens
  misc_RNA (1)...(19): siRNA sense strand
aagaauggagagagcagaa

SEQ ID NO: 2558809 - RNA, 19 nt, Homo sapiens
  misc_RNA (1)...(19): siRNA sense strand
gaagacaaauugaguggca

SEQ ID NO: 2558810 - RNA, 19 nt, Homo sapiens
  misc_RNA (1)...(19): siRNA sense strand
uggaaggaguacagggaag

SEQ ID NO: 2558811 - RNA, 19 nt, Homo sapiens
  misc_RNA (1)...(19): siRNA sense strand
aaacaagaaagaauggaga

SEQ ID NO: 2558812 - RNA, 19 nt, Homo sapiens
  misc_RNA (1)...(19): siRNA sense strand
gucuauaagcuuugcaaca

SEQ ID NO: 2558813 - RNA, 19 nt, Homo sapiens
  misc_RNA (1)...(19): siRNA sense strand
ugaccagacaggagaacuu

SEQ ID NO: 2558814 - RNA, 19 nt, Homo sapiens
  misc_RNA (1)...(19): siRNA sense strand
uggagagagcagaaagaca

SEQ ID NO: 2558815 - RNA, 19 nt, Homo sapiens
  misc_RNA (1)...(19): siRNA sense strand
caaagauugucaaaggcau

SEQ ID NO: 2558816 - RNA, 19 nt, Homo sapiens
  misc_RNA (1)...(19): siRNA sense strand
aagaaagaauggagagagc

SEQ ID NO: 2558817 - RNA, 19 nt, Homo sapiens
  misc_RNA (1)...(19): siRNA sense strand
uguuugaagaugacgaaau

SEQ ID NO: 2558818 - RNA, 19 nt, Homo sapiens
  misc_RNA (1)...(19): siRNA sense strand
acaagaaagaauggagaga

SEQ ID NO: 2558819 - RNA, 19 nt, Homo sapiens
  misc_RNA (1)...(19): siRNA sense strand
uggcacaguuaguggaucu

SEQ ID NO: 2558820 - RNA, 19 nt, Homo sapiens
  misc_RNA (1)...(19): siRNA sense strand
aguacagggaagucuauaa

SEQ ID NO: 2558821 - RNA, 19 nt, Homo sapiens
  misc_RNA (1)...(19): siRNA sense strand
gaaagaauggagagagcag

SEQ ID NO: 2558822 - RNA, 19 nt, Homo sapiens
  misc_RNA (1)...(19): siRNA sense strand
agcaauaaugcgaacaaaa

SEQ ID NO: 2558823 - RNA, 19 nt, Homo sapiens
  misc_RNA (1)...(19): siRNA sense strand
ugguagaagaugugguaca

SEQ ID NO: 2558824 - RNA, 19 nt, Homo sapiens
  misc_RNA (1)...(19): siRNA sense strand
aagaauggagagagcagaa

SEQ ID NO: 2558825 - RNA, 19 nt, Homo sapiens
  misc_RNA (1)...(19): siRNA sense strand
gaagacaaauugaguggca

SEQ ID NO: 2558826 - RNA, 19 nt, Homo sapiens
  misc_RNA (1)...(19): siRNA sense strand
aaacaagaaagaauggaga

SEQ ID NO: 2558827 - RNA, 19 nt, Homo sapiens
  misc_RNA (1)...(19): siRNA sense strand
ugaccagacaggagaacuu

SEQ ID NO: 2558828 - RNA, 19 nt, Homo sapiens
  misc_RNA (1)...(19): siRNA sense strand
uggagagagcagaaagaca

SEQ ID NO: 2558829 - RNA, 19 nt, Homo sapiens
  misc_RNA (1)...(19): siRNA sense strand
caaagauugucaaaggcau

SEQ ID NO: 2558830 - RNA, 19 nt, Homo sapiens
  misc_RNA (1)...(19): siRNA sense strand
aagaaagaauggagagagc

SEQ ID NO: 2558831 - RNA, 19 nt, Homo sapiens
  misc_RNA (1)...(19): siRNA sense strand
uguuugaagaugacgaaau

SEQ ID NO: 2558832 - RNA, 19 nt, Homo sapiens
  misc_RNA (1)...(19): siRNA sense strand
acaagaaagaauggagaga

SEQ ID NO: 2558833 - RNA, 19 nt, Homo sapiens
  misc_RNA (1)...(19): siRNA sense strand
uggcacaguuaguggaucu

SEQ ID NO: 2558834 - RNA, 19 nt, Homo sapiens
  misc_RNA (1)...(19): siRNA sense strand
gaaagaauggagagagcag

SEQ ID NO: 2558835 - RNA, 19 nt, Homo sapiens
  misc_RNA (1)...(19): siRNA sense strand
agcaauaaugcgaacaaaa

SEQ ID NO: 2558836 - RNA, 19 nt, Homo sapiens
  misc_RNA (1)...(19): siRNA sense strand
aggagaaggagaaggccaa

SEQ ID NO: 2558837 - RNA, 19 nt, Homo sapiens
  misc_RNA (1)...(19): siRNA sense strand
aggagauggccuugaagaa

SEQ ID NO: 2558838 - RNA, 19 nt, Homo sapiens
  misc_RNA (1)...(19): siRNA sense strand
agguggaggagaaggagaa

SEQ ID NO: 2558839 - RNA, 19 nt, Homo sapiens
  misc_RNA (1)...(19): siRNA sense strand
gcuugaaggaggaagagau

SEQ ID NO: 2558840 - RNA, 19 nt, Homo sapiens
  misc_RNA (1)...(19): siRNA sense strand
aggacuugcaggagaucaa

SEQ ID NO: 2558841 - RNA, 19 nt, Homo sapiens
  misc_RNA (1)...(19): siRNA sense strand
ccaacaacuuccugcgcuu

SEQ ID NO: 2558842 - RNA, 19 nt, Homo sapiens
  misc_RNA (1)...(19): siRNA sense strand
agggcgagcagguggacaa

SEQ ID NO: 2558843 - RNA, 19 nt, Homo sapiens
  misc_RNA (1)...(19): siRNA sense strand
aggccaaagagaaggcaga

SEQ ID NO: 2558844 - RNA, 19 nt, Homo sapiens
  misc_RNA (1)...(19): siRNA sense strand
acaagaagcuggaggaagg

SEQ ID NO: 2558845 - RNA, 19 nt, Homo sapiens
  misc_RNA (1)...(19): siRNA sense strand
ugaaaguggccgaggugga

SEQ ID NO: 2558846 - RNA, 19 nt, Homo sapiens
  misc_RNA (1)...(19): siRNA sense strand
guggaagaaucuaaagcca

SEQ ID NO: 2558847 - RNA, 19 nt, Homo sapiens
  misc_RNA (1)...(19): siRNA sense strand
cagagaaggaggucgcaga

SEQ ID NO: 2558848 - RNA, 19 nt, Homo sapiens
  misc_RNA (1)...(19): siRNA sense strand
aggaggagaggcugaagaa

SEQ ID NO: 2558849 - RNA, 19 nt, Homo sapiens
  misc_RNA (1)...(19): siRNA sense strand
gaggagaaggagaaggcca

SEQ ID NO: 2558850 - RNA, 19 nt, Homo sapiens
  misc_RNA (1)...(19): siRNA sense strand
agaucacgaaggaggaaau

SEQ ID NO: 2558851 - RNA, 19 nt, Homo sapiens
  misc_RNA (1)...(19): siRNA sense strand
agaagaagucacucaccaa

SEQ ID NO: 2558852 - RNA, 19 nt, Homo sapiens
  misc_RNA (1)...(19): siRNA sense strand
cgaaggaggaaaucgacau

SEQ ID NO: 2558853 - RNA, 19 nt, Homo sapiens
  misc_RNA (1)...(19): siRNA sense strand
ucaccaaggagaaggagga

SEQ ID NO: 2558854 - RNA, 19 nt, Homo sapiens
  misc_RNA (1)...(19): siRNA sense strand
agaacaagaagcuggagga

SEQ ID NO: 2558855 - RNA, 19 nt, Homo sapiens
  misc_RNA (1)...(19): siRNA sense strand
acaaggauggcaaggucaa

SEQ ID NO: 2558856 - RNA, 19 nt, Homo sapiens
  misc_RNA (1)...(19): siRNA sense strand
ggcugagauuguagcaaca

SEQ ID NO: 2558857 - RNA, 19 nt, Homo sapiens
  misc_RNA (1)...(19): siRNA sense strand
agaagguggaggagaagga

SEQ ID NO: 2558858 - RNA, 19 nt, Homo sapiens
  misc_RNA (1)...(19): siRNA sense strand
ccagaagauccgggaaaca

SEQ ID NO: 2558859 - RNA, 19 nt, Homo sapiens
  misc_RNA (1)...(19): siRNA sense strand
aggagaaggaggagcugga

SEQ ID NO: 2558860 - RNA, 19 nt, Homo sapiens
  misc_RNA (1)...(19): siRNA sense strand
aaggagaaggccaaagaga

SEQ ID NO: 2558861 - RNA, 19 nt, Homo sapiens
  misc_RNA (1)...(19): siRNA sense strand
ggcccagcaaugaggaaau

SEQ ID NO: 2558862 - RNA, 19 nt, Homo sapiens
  misc_RNA (1)...(19): siRNA sense strand
ccaaggagaaggaggagcu

SEQ ID NO: 2558863 - RNA, 19 nt, Homo sapiens
  misc_RNA (1)...(19): siRNA sense strand
aggaggucgcagaggugaa

SEQ ID NO: 2558864 - RNA, 19 nt, Homo sapiens
  misc_RNA (1)...(19): siRNA sense strand
acgacaagcugauugcuga

SEQ ID NO: 2558865 - RNA, 19 nt, Homo sapiens
  misc_RNA (1)...(19): siRNA sense strand
ugaaggaggaugugcagga

SEQ ID NO: 2558866 - RNA, 19 nt, Homo sapiens
  misc_RNA (1)...(19): siRNA sense strand
augaaaacaaggauggcaa

SEQ ID NO: 2558867 - RNA, 19 nt, Homo sapiens
  misc_RNA (1)...(19): siRNA sense strand
agagauuguggcaaaggaa

SEQ ID NO: 2558868 - RNA, 19 nt, Homo sapiens
  misc_RNA (1)...(19): siRNA sense strand
aggaagcacaggugaaagu

SEQ ID NO: 2558869 - RNA, 19 nt, Homo sapiens
  misc_RNA (1)...(19): siRNA sense strand
aggacuacagcgaggacuu

SEQ ID NO: 2558870 - RNA, 19 nt, Homo sapiens
  misc_RNA (1)...(19): siRNA sense strand
uggacaaagaagauguuca

SEQ ID NO: 2558871 - RNA, 19 nt, Homo sapiens
  misc_RNA (1)...(19): siRNA sense strand
agauggccuugaagaacaa

SEQ ID NO: 2558872 - RNA, 19 nt, Homo sapiens
  misc_RNA (1)...(19): siRNA sense strand
cagcaggagcaccgugaga

SEQ ID NO: 2558873 - RNA, 19 nt, Homo sapiens
  misc_RNA (1)...(19): siRNA sense strand
cagaagaagucacucacca

SEQ ID NO: 2558874 - RNA, 19 nt, Homo sapiens
  misc_RNA (1)...(19): siRNA sense strand
ggguugaggaacugccuga

SEQ ID NO: 2558875 - RNA, 19 nt, Homo sapiens
  misc_RNA (1)...(19): siRNA sense strand
gcaaaggaagcacagguga

SEQ ID NO: 2558876 - RNA, 19 nt, Homo sapiens
  misc_RNA (1)...(19): siRNA sense strand
aagaggagaagguggagga

SEQ ID NO: 2558877 - RNA, 19 nt, Homo sapiens
  misc_RNA (1)...(19): siRNA sense strand
gguggaauuauguggccaa

SEQ ID NO: 2558878 - RNA, 19 nt, Homo sapiens
  misc_RNA (1)...(19): siRNA sense strand
agguuagguuccugaugaa

SEQ ID NO: 2558879 - RNA, 19 nt, Homo sapiens
  misc_RNA (1)...(19): siRNA sense strand
acacucaucuacagggaga

SEQ ID NO: 2558880 - RNA, 19 nt, Homo sapiens
  misc_RNA (1)...(19): siRNA sense strand
cggcauggaacgugcugau

SEQ ID NO: 2558881 - RNA, 19 nt, Homo sapiens
  misc_RNA (1)...(19): siRNA sense strand
cccuaugucagguggaauu

SEQ ID NO: 2558882 - RNA, 19 nt, Homo sapiens
  misc_RNA (1)...(19): siRNA sense strand
uggagcaagcgcagggaca

SEQ ID NO: 2558883 - RNA, 19 nt, Homo sapiens
  misc_RNA (1)...(19): siRNA sense strand
cgggacugguggaacucaa

SEQ ID NO: 2558884 - RNA, 19 nt, Homo sapiens
  misc_RNA (1)...(19): siRNA sense strand
ggaaacacugagacgcaca

SEQ ID NO: 2558885 - RNA, 19 nt, Homo sapiens
  misc_RNA (1)...(19): siRNA sense strand
cagcagauuaucagcgcaa

SEQ ID NO: 2558886 - RNA, 19 nt, Homo sapiens
  misc_RNA (1)...(19): siRNA sense strand
aagaaauuacagaggauga

SEQ ID NO: 2558887 - RNA, 19 nt, Homo sapiens
  misc_RNA (1)...(19): siRNA sense strand
ugucauuggaguugcgauu

SEQ ID NO: 2558888 - RNA, 19 nt, Homo sapiens
  misc_RNA (1)...(19): siRNA sense strand
ccgucuuauucaugagaga

SEQ ID NO: 2558889 - RNA, 19 nt, Homo sapiens
  misc_RNA (1)...(19): siRNA sense strand
gcauagaagccaaugugga

SEQ ID NO: 2558890 - RNA, 19 nt, Homo sapiens
  misc_RNA (1)...(19): siRNA sense strand
ccagcuugccaaagaaaca

SEQ ID NO: 2558891 - RNA, 19 nt, Homo sapiens
  misc_RNA (1)...(19): siRNA sense strand
aguaagagccaguuccaga

SEQ ID NO: 2558892 - RNA, 19 nt, Homo sapiens
  misc_RNA (1)...(19): siRNA sense strand
cgucaaaggaaaauacaga

SEQ ID NO: 2558893 - RNA, 19 nt, Homo sapiens
  misc_RNA (1)...(19): siRNA sense strand
aggugcaggaugaagaaau

SEQ ID NO: 2558894 - RNA, 19 nt, Homo sapiens
  misc_RNA (1)...(19): siRNA sense strand
uccagaagguccagaggca

SEQ ID NO: 2558895 - RNA, 19 nt, Homo sapiens
  misc_RNA (1)...(19): siRNA sense strand
ggcugcugagcgagagaaa

SEQ ID NO: 2558896 - RNA, 19 nt, Homo sapiens
  misc_RNA (1)...(19): siRNA sense strand
uagauagcauagaagccaa

SEQ ID NO: 2558897 - RNA, 19 nt, Homo sapiens
  misc_RNA (1)...(19): siRNA sense strand
gauucaugaacaaggagau

SEQ ID NO: 2558898 - RNA, 19 nt, Homo sapiens
  misc_RNA (1)...(19): siRNA sense strand
ggccagacguuuaggagga

SEQ ID NO: 2558899 - RNA, 19 nt, Homo sapiens
  misc_RNA (1)...(19): siRNA sense strand
cggcuggagugcaucgaua

SEQ ID NO: 2558900 - RNA, 19 nt, Homo sapiens
  misc_RNA (1)...(19): siRNA sense strand
gcgaagauguggaugaaug

SEQ ID NO: 2558901 - RNA, 19 nt, Homo sapiens
  misc_RNA (1)...(19): siRNA sense strand
gugcgaagauguggaugaa

SEQ ID NO: 2558902 - RNA, 19 nt, Homo sapiens
  misc_RNA (1)...(19): siRNA sense strand
guuaauggguccugcgaag

SEQ ID NO: 2558903 - RNA, 19 nt, Homo sapiens
  misc_RNA (1)...(19): siRNA sense strand
ccugcgaagauguggauga

SEQ ID NO: 2558904 - RNA, 19 nt, Homo sapiens
  misc_RNA (1)...(19): siRNA sense strand
cggaaugccuggaugugga

SEQ ID NO: 2558905 - RNA, 19 nt, Homo sapiens
  misc_RNA (1)...(19): siRNA sense strand
ugccagacuuugaggacga

SEQ ID NO: 2558906 - RNA, 19 nt, Homo sapiens
  misc_RNA (1)...(19): siRNA sense strand
ggaugagugugcccaggaa

SEQ ID NO: 2558907 - RNA, 19 nt, Homo sapiens
  misc_RNA (1)...(19): siRNA sense strand
agugcgaagauguggauga

SEQ ID NO: 2558908 - RNA, 19 nt, Homo sapiens
  misc_RNA (1)...(19): siRNA sense strand
ccugugacgauguggauga

SEQ ID NO: 2558909 - RNA, 19 nt, Homo sapiens
  misc_RNA (1)...(19): siRNA sense strand
gcgaagauguggaugagug

SEQ ID NO: 2558910 - RNA, 19 nt, Homo sapiens
  misc_RNA (1)...(19): siRNA sense strand
ucagaggguuuccgggaga

SEQ ID NO: 2558911 - RNA, 19 nt, Homo sapiens
  misc_RNA (1)...(19): siRNA sense strand
acucagaugccucgggcuu

SEQ ID NO: 2558912 - RNA, 19 nt, Homo sapiens
  misc_RNA (1)...(19): siRNA sense strand
ugaaagaguuaaugggucc

SEQ ID NO: 2558913 - RNA, 19 nt, Homo sapiens
  misc_RNA (1)...(19): siRNA sense strand
gaggaggaccuuugccaga

SEQ ID NO: 2558914 - RNA, 19 nt, Homo sapiens
  misc_RNA (1)...(19): siRNA sense strand
acuucgaggcccugugcaa

SEQ ID NO: 2558915 - RNA, 19 nt, Homo sapiens
  misc_RNA (1)...(19): siRNA sense strand
cggaagaguuugaccccau

SEQ ID NO: 2558916 - RNA, 19 nt, Homo sapiens
  misc_RNA (1)...(19): siRNA sense strand
gcacagagaccgugggcaa

SEQ ID NO: 2558917 - RNA, 19 nt, Homo sapiens
  misc_RNA (1)...(19): siRNA sense strand
gagcaagagcacacggaga

SEQ ID NO: 2558918 - RNA, 19 nt, Homo sapiens
  misc_RNA (1)...(19): siRNA sense strand
caggagaagcccauggaga

SEQ ID NO: 2558919 - RNA, 19 nt, Homo sapiens
  misc_RNA (1)...(19): siRNA sense strand
gcaaggaccugaucggcca

SEQ ID NO: 2558920 - RNA, 19 nt, Homo sapiens
  misc_RNA (1)...(19): siRNA sense strand
acggagagccugcaggaga

SEQ ID NO: 2558921 - RNA, 19 nt, Homo sapiens
  misc_RNA (1)...(19): siRNA sense strand
ccgucaagugcauuaacaa

SEQ ID NO: 2558922 - RNA, 19 nt, Homo sapiens
  misc_RNA (1)...(19): siRNA sense strand
acgagaagaacaagacguu

SEQ ID NO: 2558923 - RNA, 19 nt, Homo sapiens
  misc_RNA (1)...(19): siRNA sense strand
ccugaagguggccgagcua

SEQ ID NO: 2558924 - RNA, 19 nt, Homo sapiens
  misc_RNA (1)...(19): siRNA sense strand
acaagaagaaccucgccaa

SEQ ID NO: 2558925 - RNA, 19 nt, Homo sapiens
  misc_RNA (1)...(19): siRNA sense strand
gugaaaaguugauggauaa

SEQ ID NO: 2558926 - RNA, 19 nt, Homo sapiens
  misc_RNA (1)...(19): siRNA sense strand
augaagaaucugugaguaa

SEQ ID NO: 2558927 - RNA, 19 nt, Homo sapiens
  misc_RNA (1)...(19): siRNA sense strand
ccgaagagcuagaagguca

SEQ ID NO: 2558928 - RNA, 19 nt, Homo sapiens
  misc_RNA (1)...(19): siRNA sense strand
gugaagaaucagucagaaa

SEQ ID NO: 2558929 - RNA, 19 nt, Homo sapiens
  misc_RNA (1)...(19): siRNA sense strand
ggaacuugcagcagagaaa

SEQ ID NO: 2558930 - RNA, 19 nt, Homo sapiens
  misc_RNA (1)...(19): siRNA sense strand
cuguauggccugugggaaa

SEQ ID NO: 2558931 - RNA, 19 nt, Homo sapiens
  misc_RNA (1)...(19): siRNA sense strand
cugcaaaguuacaagacaa

SEQ ID NO: 2558932 - RNA, 19 nt, Homo sapiens
  misc_RNA (1)...(19): siRNA sense strand
uggcagagauagaagaaau

SEQ ID NO: 2558933 - RNA, 19 nt, Homo sapiens
  misc_RNA (1)...(19): siRNA sense strand
cggaagaauuaaagaagga

SEQ ID NO: 2558934 - RNA, 19 nt, Homo sapiens
  misc_RNA (1)...(19): siRNA sense strand
cagcaaagcaccacggcaa

SEQ ID NO: 2558935 - RNA, 19 nt, Homo sapiens
  misc_RNA (1)...(19): siRNA sense strand
ggaacauaaaugagcuaaa

SEQ ID NO: 2558936 - RNA, 19 nt, Homo sapiens
  misc_RNA (1)...(19): siRNA sense strand
agugaaaaguugauggaua

SEQ ID NO: 2558937 - RNA, 19 nt, Homo sapiens
  misc_RNA (1)...(19): siRNA sense strand
gcuucaaaccaaaguauua

SEQ ID NO: 2558938 - RNA, 19 nt, Homo sapiens
  misc_RNA (1)...(19): siRNA sense strand
ccacaaacuagaaagcaua

SEQ ID NO: 2558939 - RNA, 19 nt, Homo sapiens
  misc_RNA (1)...(19): siRNA sense strand
cuaaauuggcagagauaga

SEQ ID NO: 2558940 - RNA, 19 nt, Homo sapiens
  misc_RNA (1)...(19): siRNA sense strand
guugauggauaaagaacaa

SEQ ID NO: 2558941 - RNA, 19 nt, Homo sapiens
  misc_RNA (1)...(19): siRNA sense strand
caaagaaagaacagcaauu

SEQ ID NO: 2558942 - RNA, 19 nt, Homo sapiens
  misc_RNA (1)...(19): siRNA sense strand
ggagaaggugaaauagaaa

SEQ ID NO: 2558943 - RNA, 19 nt, Homo sapiens
  misc_RNA (1)...(19): siRNA sense strand
uugaacaggagaagagaaa

SEQ ID NO: 2558944 - RNA, 19 nt, Homo sapiens
  misc_RNA (1)...(19): siRNA sense strand
aggaagaagaggagcugaa

SEQ ID NO: 2558945 - RNA, 19 nt, Homo sapiens
  misc_RNA (1)...(19): siRNA sense strand
aagaagaggagcugaagaa

SEQ ID NO: 2558946 - RNA, 19 nt, Homo sapiens
  misc_RNA (1)...(19): siRNA sense strand
gugaagaaggaguggcaau

SEQ ID NO: 2558947 - RNA, 19 nt, Homo sapiens
  misc_RNA (1)...(19): siRNA sense strand
gcauagaauacauguagaa

SEQ ID NO: 2558948 - RNA, 19 nt, Homo sapiens
  misc_RNA (1)...(19): siRNA sense strand
cuacagaauugcagcauca

SEQ ID NO: 2558949 - RNA, 19 nt, Homo sapiens
  misc_RNA (1)...(19): siRNA sense strand
agucaaaguaugaugaaga

SEQ ID NO: 2558950 - RNA, 19 nt, Homo sapiens
  misc_RNA (1)...(19): siRNA sense strand
agaaaggagucuucgagaa

SEQ ID NO: 2558951 - RNA, 19 nt, Homo sapiens
  misc_RNA (1)...(19): siRNA sense strand
cuugaaauggagaaggaaa

SEQ ID NO: 2558952 - RNA, 19 nt, Homo sapiens
  misc_RNA (1)...(19): siRNA sense strand
cuucaagugcagauggaaa

SEQ ID NO: 2558953 - RNA, 19 nt, Homo sapiens
  misc_RNA (1)...(19): siRNA sense strand
aaacaaagcaacagcauca

SEQ ID NO: 2558954 - RNA, 19 nt, Homo sapiens
  misc_RNA (1)...(19): siRNA sense strand
cagcagagaaagagaaaau

SEQ ID NO: 2558955 - RNA, 19 nt, Homo sapiens
  misc_RNA (1)...(19): siRNA sense strand
uaucugagguagagaccaa

SEQ ID NO: 2558956 - RNA, 19 nt, Homo sapiens
  misc_RNA (1)...(19): siRNA sense strand
aggagaaucagaaaggaaa

SEQ ID NO: 2558957 - RNA, 19 nt, Homo sapiens
  misc_RNA (1)...(19): siRNA sense strand
aguuagugagcuugagaaa

SEQ ID NO: 2558958 - RNA, 19 nt, Homo sapiens
  misc_RNA (1)...(19): siRNA sense strand
ucuuaaaggagaaggugaa

SEQ ID NO: 2558959 - RNA, 19 nt, Homo sapiens
  misc_RNA (1)...(19): siRNA sense strand
acacaguggacgucaauaa

SEQ ID NO: 2558960 - RNA, 19 nt, Homo sapiens
  misc_RNA (1)...(19): siRNA sense strand
ugaagaagcaugaagaaaa

SEQ ID NO: 2558961 - RNA, 19 nt, Homo sapiens
  misc_RNA (1)...(19): siRNA sense strand
gguuagaagagcaguugaa

SEQ ID NO: 2558962 - RNA, 19 nt, Homo sapiens
  misc_RNA (1)...(19): siRNA sense strand
cuagaaagcauaaaggaga

SEQ ID NO: 2558963 - RNA, 19 nt, Homo sapiens
  misc_RNA (1)...(19): siRNA sense strand
agaugaaaggagagcacua

SEQ ID NO: 2558964 - RNA, 19 nt, Homo sapiens
  misc_RNA (1)...(19): siRNA sense strand
ggaacagcaauuagaagaa

SEQ ID NO: 2558965 - RNA, 19 nt, Homo sapiens
  misc_RNA (1)...(19): siRNA sense strand
aguuagaggagaaacauaa

SEQ ID NO: 2558966 - RNA, 19 nt, Homo sapiens
  misc_RNA (1)...(19): siRNA sense strand
cauaaaugagcuaaagcaa

SEQ ID NO: 2558967 - RNA, 19 nt, Homo sapiens
  misc_RNA (1)...(19): siRNA sense strand
acggagaguuagugagcuu

SEQ ID NO: 2558968 - RNA, 19 nt, Homo sapiens
  misc_RNA (1)...(19): siRNA sense strand
acagaaaacuugcugaaaa

SEQ ID NO: 2558969 - RNA, 19 nt, Homo sapiens
  misc_RNA (1)...(19): siRNA sense strand
acagaaaaccgaagagcua

SEQ ID NO: 2558970 - RNA, 19 nt, Homo sapiens
  misc_RNA (1)...(19): siRNA sense strand
uugaaauggagaaggaaau

SEQ ID NO: 2558971 - RNA, 19 nt, Homo sapiens
  misc_RNA (1)...(19): siRNA sense strand
acuacaagacauucagaaa

SEQ ID NO: 2558972 - RNA, 19 nt, Homo sapiens
  misc_RNA (1)...(19): siRNA sense strand
gaaaagucacugaaagaaa

SEQ ID NO: 2558973 - RNA, 19 nt, Homo sapiens
  misc_RNA (1)...(19): siRNA sense strand
aggagaaggugaaauagaa

SEQ ID NO: 2558974 - RNA, 19 nt, Homo sapiens
  misc_RNA (1)...(19): siRNA sense strand
gcaauuagaagaagcccaa

SEQ ID NO: 2558975 - RNA, 19 nt, Homo sapiens
  misc_RNA (1)...(19): siRNA sense strand
cauacagauuaaagccaaa

SEQ ID NO: 2558976 - RNA, 19 nt, Homo sapiens
  misc_RNA (1)...(19): siRNA sense strand
ggacgaaguaacucaacua

SEQ ID NO: 2558977 - RNA, 19 nt, Homo sapiens
  misc_RNA (1)...(19): siRNA sense strand
caagacauucagaaagaaa

SEQ ID NO: 2558978 - RNA, 19 nt, Homo sapiens
  misc_RNA (1)...(19): siRNA sense strand
gaacaggagaagagaaauc

SEQ ID NO: 2558979 - RNA, 19 nt, Homo sapiens
  misc_RNA (1)...(19): siRNA sense strand
auaaacaagcccaggagaa

SEQ ID NO: 2558980 - RNA, 19 nt, Homo sapiens
  misc_RNA (1)...(19): siRNA sense strand
gagccacagaauugaguaa

SEQ ID NO: 2558981 - RNA, 19 nt, Homo sapiens
  misc_RNA (1)...(19): siRNA sense strand
uuaccaagcaagaggaaga

SEQ ID NO: 2558982 - RNA, 19 nt, Homo sapiens
  misc_RNA (1)...(19): siRNA sense strand
cugauagucuugaaguuaa

SEQ ID NO: 2558983 - RNA, 19 nt, Homo sapiens
  misc_RNA (1)...(19): siRNA sense strand
ugguaaaugagaagucuaa

SEQ ID NO: 2558984 - RNA, 19 nt, Homo sapiens
  misc_RNA (1)...(19): siRNA sense strand
gucuaaauuggcagagaua

SEQ ID NO: 2558985 - RNA, 19 nt, Homo sapiens
  misc_RNA (1)...(19): siRNA sense strand
aagaauuaucugagguaga

SEQ ID NO: 2558986 - RNA, 19 nt, Homo sapiens
  misc_RNA (1)...(19): siRNA sense strand
acaacaacagagagaagaa

SEQ ID NO: 2558987 - RNA, 19 nt, Homo sapiens
  misc_RNA (1)...(19): siRNA sense strand
agaauaaacuacagcagca

SEQ ID NO: 2558988 - RNA, 19 nt, Homo sapiens
  misc_RNA (1)...(19): siRNA sense strand
ggagcgauguaaagcacua

SEQ ID NO: 2558989 - RNA, 19 nt, Homo sapiens
  misc_RNA (1)...(19): siRNA sense strand
guaccaaaccagagcguga

SEQ ID NO: 2558990 - RNA, 19 nt, Homo sapiens
  misc_RNA (1)...(19): siRNA sense strand
caacaaaggcagaagugga

SEQ ID NO: 2558991 - RNA, 19 nt, Homo sapiens
  misc_RNA (1)...(19): siRNA sense strand
ucuacgugguugagaguau

SEQ ID NO: 2558992 - RNA, 19 nt, Homo sapiens
  misc_RNA (1)...(19): siRNA sense strand
ccggaauaguaaaggggaa

SEQ ID NO: 2558993 - RNA, 19 nt, Homo sapiens
  misc_RNA (1)...(19): siRNA sense strand
gcccuuaagcagugaaaca

SEQ ID NO: 2558994 - RNA, 19 nt, Homo sapiens
  misc_RNA (1)...(19): siRNA sense strand
cggaauaguaaaggggaaa

SEQ ID NO: 2558995 - RNA, 19 nt, Homo sapiens
  misc_RNA (1)...(19): siRNA sense strand
uggcaagaacauucggauu

SEQ ID NO: 2558996 - RNA, 19 nt, Homo sapiens
  misc_RNA (1)...(19): siRNA sense strand
aggagagacaacauauaaa

SEQ ID NO: 2558997 - RNA, 19 nt, Homo sapiens
  misc_RNA (1)...(19): siRNA sense strand
caacauaaagaggcggaau

SEQ ID NO: 2558998 - RNA, 19 nt, Homo sapiens
  misc_RNA (1)...(19): siRNA sense strand
uuggagagacuuugcaaau

SEQ ID NO: 2558999 - RNA, 19 nt, Homo sapiens
  misc_RNA (1)...(19): siRNA sense strand
aacauaaagaggcggaauu

SEQ ID NO: 2559000 - RNA, 19 nt, Homo sapiens
  misc_RNA (1)...(19): siRNA sense strand
gguacaugacggagacacu

SEQ ID NO: 2559001 - RNA, 19 nt, Homo sapiens
  misc_RNA (1)...(19): siRNA sense strand
guaagacccugcagcguga

SEQ ID NO: 2559002 - RNA, 19 nt, Homo sapiens
  misc_RNA (1)...(19): siRNA sense strand
cauuuaaagaccuagacuu

SEQ ID NO: 2559003 - RNA, 19 nt, Homo sapiens
  misc_RNA (1)...(19): siRNA sense strand
augcuaacuacaaguacaa

SEQ ID NO: 2559004 - RNA, 19 nt, Homo sapiens
  misc_RNA (1)...(19): siRNA sense strand
agacaguccaacauaaaga

SEQ ID NO: 2559005 - RNA, 19 nt, Homo sapiens
  misc_RNA (1)...(19): siRNA sense strand
ccauggagacugaugacca

SEQ ID NO: 2559006 - RNA, 19 nt, Homo sapiens
  misc_RNA (1)...(19): siRNA sense strand
cuuggaaagcccugguaca

SEQ ID NO: 2559007 - RNA, 19 nt, Homo sapiens
  misc_RNA (1)...(19): siRNA sense strand
gcggaccggcagagaacaa

SEQ ID NO: 2559008 - RNA, 19 nt, Homo sapiens
  misc_RNA (1)...(19): siRNA sense strand
gcaagaaguuagugaaaau

SEQ ID NO: 2559009 - RNA, 19 nt, Homo sapiens
  misc_RNA (1)...(19): siRNA sense strand
cuuauaugguggagagaau

SEQ ID NO: 2559010 - RNA, 19 nt, Homo sapiens
  misc_RNA (1)...(19): siRNA sense strand
ccagaagauucgacagcaa

SEQ ID NO: 2559011 - RNA, 19 nt, Homo sapiens
  misc_RNA (1)...(19): siRNA sense strand
cagauuaagccgaagcaaa

SEQ ID NO: 2559012 - RNA, 19 nt, Homo sapiens
  misc_RNA (1)...(19): siRNA sense strand
gagaaaaggacaaggaaga

SEQ ID NO: 2559013 - RNA, 19 nt, Homo sapiens
  misc_RNA (1)...(19): siRNA sense strand
gcgacuaccuggagaacau

SEQ ID NO: 2559014 - RNA, 19 nt, Homo sapiens
  misc_RNA (1)...(19): siRNA sense strand
ggauauacugccagagaga

SEQ ID NO: 2559015 - RNA, 19 nt, Homo sapiens
  misc_RNA (1)...(19): siRNA sense strand
caucagaacgagagcaaau

SEQ ID NO: 2559016 - RNA, 19 nt, Homo sapiens
  misc_RNA (1)...(19): siRNA sense strand
ggagaaaccagcacagcaa

SEQ ID NO: 2559017 - RNA, 19 nt, Homo sapiens
  misc_RNA (1)...(19): siRNA sense strand
cggcaaacagccuggacaa

SEQ ID NO: 2559018 - RNA, 19 nt, Homo sapiens
  misc_RNA (1)...(19): siRNA sense strand
ccaaagaggaggauguaga

SEQ ID NO: 2559019 - RNA, 19 nt, Homo sapiens
  misc_RNA (1)...(19): siRNA sense strand
cagaaaaggacauuggaaa

SEQ ID NO: 2559020 - RNA, 19 nt, Homo sapiens
  misc_RNA (1)...(19): siRNA sense strand
ggcaauggauaaagccaaa

SEQ ID NO: 2559021 - RNA, 19 nt, Homo sapiens
  misc_RNA (1)...(19): siRNA sense strand
gaaugaaagaggagaagga

SEQ ID NO: 2559022 - RNA, 19 nt, Homo sapiens
  misc_RNA (1)...(19): siRNA sense strand
gggcagucgcuauggcaaa

SEQ ID NO: 2559023 - RNA, 19 nt, Homo sapiens
  misc_RNA (1)...(19): siRNA sense strand
ggauggaagugguggugau

SEQ ID NO: 2559024 - RNA, 19 nt, Homo sapiens
  misc_RNA (1)...(19): siRNA sense strand
ggauauauuaagucggauu

SEQ ID NO: 2559025 - RNA, 19 nt, Homo sapiens
  misc_RNA (1)...(19): siRNA sense strand
augaaaaggcaauggauaa

SEQ ID NO: 2559026 - RNA, 19 nt, Homo sapiens
  misc_RNA (1)...(19): siRNA sense strand
ugaugagccuggaggacaa

SEQ ID NO: 2559027 - RNA, 19 nt, Homo sapiens
  misc_RNA (1)...(19): siRNA sense strand
ugagaaugaaagaggagaa

SEQ ID NO: 2559028 - RNA, 19 nt, Homo sapiens
  misc_RNA (1)...(19): siRNA sense strand
ggagaguggcaaugggaga

SEQ ID NO: 2559029 - RNA, 19 nt, Homo sapiens
  misc_RNA (1)...(19): siRNA sense strand
caggaaauggacagacaua

SEQ ID NO: 2559030 - RNA, 19 nt, Homo sapiens
  misc_RNA (1)...(19): siRNA sense strand
aagaguauauggaggaaga

SEQ ID NO: 2559031 - RNA, 19 nt, Homo sapiens
  misc_RNA (1)...(19): siRNA sense strand
ggaaauggacagacauaca

SEQ ID NO: 2559032 - RNA, 19 nt, Homo sapiens
  misc_RNA (1)...(19): siRNA sense strand
guauauggaggaagagauu

SEQ ID NO: 2559033 - RNA, 19 nt, Homo sapiens
  misc_RNA (1)...(19): siRNA sense strand
ggaaacaaggacuggucaa

SEQ ID NO: 2559034 - RNA, 19 nt, Homo sapiens
  misc_RNA (1)...(19): siRNA sense strand
acuaauuggcucaggauau

SEQ ID NO: 2559035 - RNA, 19 nt, Homo sapiens
  misc_RNA (1)...(19): siRNA sense strand
agagauagacaucgaacua

SEQ ID NO: 2559036 - RNA, 19 nt, Homo sapiens
  misc_RNA (1)...(19): siRNA sense strand
cggaauucguccugcauuu

SEQ ID NO: 2559037 - RNA, 19 nt, Homo sapiens
  misc_RNA (1)...(19): siRNA sense strand
aggaggauguagagauaga

SEQ ID NO: 2559038 - RNA, 19 nt, Homo sapiens
  misc_RNA (1)...(19): siRNA sense strand
uggcaggcgucaugggcaa

SEQ ID NO: 2559039 - RNA, 19 nt, Homo sapiens
  misc_RNA (1)...(19): siRNA sense strand
ccuguuuggagaagagaaa

SEQ ID NO: 2559040 - RNA, 19 nt, Homo sapiens
  misc_RNA (1)...(19): siRNA sense strand
cagcagauggugaaaggaa

SEQ ID NO: 2559041 - RNA, 19 nt, Homo sapiens
  misc_RNA (1)...(19): siRNA sense strand
cccuuaacguucaaagaaa

SEQ ID NO: 2559042 - RNA, 19 nt, Homo sapiens
  misc_RNA (1)...(19): siRNA sense strand
uuaacgugguggagcauaa

SEQ ID NO: 2559043 - RNA, 19 nt, Homo sapiens
  misc_RNA (1)...(19): siRNA sense strand
agccaaaccaagugaacua

SEQ ID NO: 2559044 - RNA, 19 nt, Homo sapiens
  misc_RNA (1)...(19): siRNA sense strand
augcaagaaguuagugaaa

SEQ ID NO: 2559045 - RNA, 19 nt, Homo sapiens
  misc_RNA (1)...(19): siRNA sense strand
ggacaagcuguuugaugaa

SEQ ID NO: 2559046 - RNA, 19 nt, Homo sapiens
  misc_RNA (1)...(19): siRNA sense strand
ggagaaggccauugaaacu

SEQ ID NO: 2559047 - RNA, 19 nt, Homo sapiens
  misc_RNA (1)...(19): siRNA sense strand
cggagaagccuguaugaga

SEQ ID NO: 2559048 - RNA, 19 nt, Homo sapiens
  misc_RNA (1)...(19): siRNA sense strand
gagauaacccagaaagcau

SEQ ID NO: 2559049 - RNA, 19 nt, Homo sapiens
  misc_RNA (1)...(19): siRNA sense strand
gccuagaagugcugagcuu

SEQ ID NO: 2559050 - RNA, 19 nt, Homo sapiens
  misc_RNA (1)...(19): siRNA sense strand
ggagauuaccggagcuuga

SEQ ID NO: 2559051 - RNA, 19 nt, Homo sapiens
  misc_RNA (1)...(19): siRNA sense strand
ccaagugaacuaugggaau

SEQ ID NO: 2559052 - RNA, 19 nt, Homo sapiens
  misc_RNA (1)...(19): siRNA sense strand
acaugaagacgguggugaa

SEQ ID NO: 2559053 - RNA, 19 nt, Homo sapiens
  misc_RNA (1)...(19): siRNA sense strand
gggaguuucugaugccaaa

SEQ ID NO: 2559054 - RNA, 19 nt, Homo sapiens
  misc_RNA (1)...(19): siRNA sense strand
guuacaacccaaagagaca

SEQ ID NO: 2559055 - RNA, 19 nt, Homo sapiens
  misc_RNA (1)...(19): siRNA sense strand
aaggaauuacggagauaua

SEQ ID NO: 2559056 - RNA, 19 nt, Homo sapiens
  misc_RNA (1)...(19): siRNA sense strand
ggaagaucauuguggagga

SEQ ID NO: 2559057 - RNA, 19 nt, Homo sapiens
  misc_RNA (1)...(19): siRNA sense strand
cuacauuccuagaacauau

SEQ ID NO: 2559058 - RNA, 19 nt, Homo sapiens
  misc_RNA (1)...(19): siRNA sense strand
agaaggagguauuggagca

SEQ ID NO: 2559059 - RNA, 19 nt, Homo sapiens
  misc_RNA (1)...(19): siRNA sense strand
uugugaagaugaugacuua

SEQ ID NO: 2559060 - RNA, 19 nt, Homo sapiens
  misc_RNA (1)...(19): siRNA sense strand
caauguuguugcugaguuu

SEQ ID NO: 2559061 - RNA, 19 nt, Homo sapiens
  misc_RNA (1)...(19): siRNA sense strand
ccuuaacguucaaagaaau

SEQ ID NO: 2559062 - RNA, 19 nt, Homo sapiens
  misc_RNA (1)...(19): siRNA sense strand
gguccagauagcaggaaau

SEQ ID NO: 2559063 - RNA, 19 nt, Homo sapiens
  misc_RNA (1)...(19): siRNA sense strand
ugaaaguguuggcagaauu

SEQ ID NO: 2559064 - RNA, 19 nt, Homo sapiens
  misc_RNA (1)...(19): siRNA sense strand
cuucauugcugcucagauu

SEQ ID NO: 2559065 - RNA, 19 nt, Homo sapiens
  misc_RNA (1)...(19): siRNA sense strand
ccaucaagaucauaagcau

SEQ ID NO: 2559066 - RNA, 19 nt, Homo sapiens
  misc_RNA (1)...(19): siRNA sense strand
ccgagaagcaggcggacau

SEQ ID NO: 2559067 - RNA, 19 nt, Homo sapiens
  misc_RNA (1)...(19): siRNA sense strand
acuuuaagguggauggcau

SEQ ID NO: 2559068 - RNA, 19 nt, Homo sapiens
  misc_RNA (1)...(19): siRNA sense strand
gagaagccuguaugagaaa

SEQ ID NO: 2559069 - RNA, 19 nt, Homo sapiens
  misc_RNA (1)...(19): siRNA sense strand
ggagaugaauuaaaagcua

SEQ ID NO: 2559070 - RNA, 19 nt, Homo sapiens
  misc_RNA (1)...(19): siRNA sense strand
aggaagacaagcagacauu

SEQ ID NO: 2559071 - RNA, 19 nt, Homo sapiens
  misc_RNA (1)...(19): siRNA sense strand
acaaaucaacgcaggcuua

SEQ ID NO: 2559072 - RNA, 19 nt, Homo sapiens
  misc_RNA (1)...(19): siRNA sense strand
aagaggagaaggagguauu

SEQ ID NO: 2559073 - RNA, 19 nt, Homo sapiens
  misc_RNA (1)...(19): siRNA sense strand
gggaagugaucaaaugcuu

SEQ ID NO: 2559074 - RNA, 19 nt, Homo sapiens
  misc_RNA (1)...(19): siRNA sense strand
gggagaacagcgaguccaa

SEQ ID NO: 2559075 - RNA, 19 nt, Homo sapiens
  misc_RNA (1)...(19): siRNA sense strand
ccuugaaguuauugaaucu

SEQ ID NO: 2559076 - RNA, 19 nt, Homo sapiens
  misc_RNA (1)...(19): siRNA sense strand
uggaguacgaggagaagaa

SEQ ID NO: 2559077 - RNA, 19 nt, Homo sapiens
  misc_RNA (1)...(19): siRNA sense strand
agagagaaccuguggcuca

SEQ ID NO: 2559078 - RNA, 19 nt, Homo sapiens
  misc_RNA (1)...(19): siRNA sense strand
caucaagaaagaaggcaga

SEQ ID NO: 2559079 - RNA, 19 nt, Homo sapiens
  misc_RNA (1)...(19): siRNA sense strand
gccucaagcaguuggacaa

SEQ ID NO: 2559080 - RNA, 19 nt, Homo sapiens
  misc_RNA (1)...(19): siRNA sense strand
aaagaaggcagauggguga

SEQ ID NO: 2559081 - RNA, 19 nt, Homo sapiens
  misc_RNA (1)...(19): siRNA sense strand
aagugugacaugagagaga

SEQ ID NO: 2559082 - RNA, 19 nt, Homo sapiens
  misc_RNA (1)...(19): siRNA sense strand
aguuggagauagacaugaa

SEQ ID NO: 2559083 - RNA, 19 nt, Homo sapiens
  misc_RNA (1)...(19): siRNA sense strand
gcuucuugguggaggaaag

SEQ ID NO: 2559084 - RNA, 19 nt, Homo sapiens
  misc_RNA (1)...(19): siRNA sense strand
aagccgaagaggagaagau

SEQ ID NO: 2559085 - RNA, 19 nt, Homo sapiens
  misc_RNA (1)...(19): siRNA sense strand
gaacaauaguuuagaacgg

SEQ ID NO: 2559086 - RNA, 19 nt, Homo sapiens
  misc_RNA (1)...(19): siRNA sense strand
acagagaaggugaaguaca

SEQ ID NO: 2559087 - RNA, 19 nt, Homo sapiens
  misc_RNA (1)...(19): siRNA sense strand
ggcaagccgaagaggagaa

SEQ ID NO: 2559088 - RNA, 19 nt, Homo sapiens
  misc_RNA (1)...(19): siRNA sense strand
gggaaacaguauguggaga

SEQ ID NO: 2559089 - RNA, 19 nt, Homo sapiens
  misc_RNA (1)...(19): siRNA sense strand
uugaauuagacgaggaugu

SEQ ID NO: 2559090 - RNA, 19 nt, Homo sapiens
  misc_RNA (1)...(19): siRNA sense strand
gcauccggaaccuggguaa

SEQ ID NO: 2559091 - RNA, 19 nt, Homo sapiens
  misc_RNA (1)...(19): siRNA sense strand
cuaaugaaguguuccgcuu

SEQ ID NO: 2559092 - RNA, 19 nt, Homo sapiens
  misc_RNA (1)...(19): siRNA sense strand
gggcuuugggaaacaguau

SEQ ID NO: 2559093 - RNA, 19 nt, Homo sapiens
  misc_RNA (1)...(19): siRNA sense strand
uagacgaggaugugaagau

SEQ ID NO: 2559094 - RNA, 19 nt, Homo sapiens
  misc_RNA (1)...(19): siRNA sense strand
aggaaaggaucaagugccu

SEQ ID NO: 2559095 - RNA, 19 nt, Homo sapiens
  misc_RNA (1)...(19): siRNA sense strand
aauuagacgaggaugugaa

SEQ ID NO: 2559096 - RNA, 19 nt, Homo sapiens
  misc_RNA (1)...(19): siRNA sense strand
gagaggaggagcugccaga

SEQ ID NO: 2559097 - RNA, 19 nt, Homo sapiens
  misc_RNA (1)...(19): siRNA sense strand
caauaagaccggccagcga

SEQ ID NO: 2559098 - RNA, 19 nt, Homo sapiens
  misc_RNA (1)...(19): siRNA sense strand
ggaaacaguauguggagag

SEQ ID NO: 2559099 - RNA, 19 nt, Homo sapiens
  misc_RNA (1)...(19): siRNA sense strand
gugaaugggagcugaucca

SEQ ID NO: 2559100 - RNA, 19 nt, Homo sapiens
  misc_RNA (1)...(19): siRNA sense strand
ggagcacuaccgagagaca

SEQ ID NO: 2559101 - RNA, 19 nt, Homo sapiens
  misc_RNA (1)...(19): siRNA sense strand
cugagcaggucgaugacuu

SEQ ID NO: 2559102 - RNA, 19 nt, Homo sapiens
  misc_RNA (1)...(19): siRNA sense strand
ccaagaaacuggauguguc

SEQ ID NO: 2559103 - RNA, 19 nt, Homo sapiens
  misc_RNA (1)...(19): siRNA sense strand
guggauaagcuggagaaga

SEQ ID NO: 2559104 - RNA, 19 nt, Homo sapiens
  misc_RNA (1)...(19): siRNA sense strand
gaaagaaggcagaugggug

SEQ ID NO: 2559105 - RNA, 19 nt, Homo sapiens
  misc_RNA (1)...(19): siRNA sense strand
aguuugaauuagacgagga

SEQ ID NO: 2559106 - RNA, 19 nt, Homo sapiens
  misc_RNA (1)...(19): siRNA sense strand
cuggaaaguaucagcucuu

SEQ ID NO: 2559107 - RNA, 19 nt, Homo sapiens
  misc_RNA (1)...(19): siRNA sense strand
ggacaaauuugcugcagaa

SEQ ID NO: 2559108 - RNA, 19 nt, Homo sapiens
  misc_RNA (1)...(19): siRNA sense strand
ggagcaaacuggagggcau

SEQ ID NO: 2559109 - RNA, 19 nt, Homo sapiens
  misc_RNA (1)...(19): siRNA sense strand
agaaggagcugcagaagaa

SEQ ID NO: 2559110 - RNA, 19 nt, Homo sapiens
  misc_RNA (1)...(19): siRNA sense strand
cggagugguuugagaacua

SEQ ID NO: 2559111 - RNA, 19 nt, Homo sapiens
  misc_RNA (1)...(19): siRNA sense strand
gggacgaggugaagcaaau

SEQ ID NO: 2559112 - RNA, 19 nt, Homo sapiens
  misc_RNA (1)...(19): siRNA sense strand
agccaaaccacuagggaaa

SEQ ID NO: 2559113 - RNA, 19 nt, Homo sapiens
  misc_RNA (1)...(19): siRNA sense strand
aaacagagcuggagaagca

SEQ ID NO: 2559114 - RNA, 19 nt, Homo sapiens
  misc_RNA (1)...(19): siRNA sense strand
gggagaaggaugaggaguu

SEQ ID NO: 2559115 - RNA, 19 nt, Homo sapiens
  misc_RNA (1)...(19): siRNA sense strand
ccaagaauaaccugaguaa

SEQ ID NO: 2559116 - RNA, 19 nt, Homo sapiens
  misc_RNA (1)...(19): siRNA sense strand
ccacaaggcccuagaggau

SEQ ID NO: 2559117 - RNA, 19 nt, Homo sapiens
  misc_RNA (1)...(19): siRNA sense strand
gaaagggcacugagggaua

SEQ ID NO: 2559118 - RNA, 19 nt, Homo sapiens
  misc_RNA (1)...(19): siRNA sense strand
guaaggaggaggaggaaga

SEQ ID NO: 2559119 - RNA, 19 nt, Homo sapiens
  misc_RNA (1)...(19): siRNA sense strand
gcaugaagccgcagcaauu

SEQ ID NO: 2559120 - RNA, 19 nt, Homo sapiens
  misc_RNA (1)...(19): siRNA sense strand
cgagauggagacugagaaa

SEQ ID NO: 2559121 - RNA, 19 nt, Homo sapiens
  misc_RNA (1)...(19): siRNA sense strand
uuacagagcagcagagcaa

SEQ ID NO: 2559122 - RNA, 19 nt, Homo sapiens
  misc_RNA (1)...(19): siRNA sense strand
ccgaauaaacaaugaacau

SEQ ID NO: 2559123 - RNA, 19 nt, Homo sapiens
  misc_RNA (1)...(19): siRNA sense strand
ucaugaagcucuggagaaa

SEQ ID NO: 2559124 - RNA, 19 nt, Homo sapiens
  misc_RNA (1)...(19): siRNA sense strand
gugaauggcagaauaguua

SEQ ID NO: 2559125 - RNA, 19 nt, Homo sapiens
  misc_RNA (1)...(19): siRNA sense strand
cgacauagcccguaagacu

SEQ ID NO: 2559126 - RNA, 19 nt, Homo sapiens
  misc_RNA (1)...(19): siRNA sense strand
ggaacaagcagcagcaaca

SEQ ID NO: 2559127 - RNA, 19 nt, Homo sapiens
  misc_RNA (1)...(19): siRNA sense strand
gggaugagcuagacaagau

SEQ ID NO: 2559128 - RNA, 19 nt, Homo sapiens
  misc_RNA (1)...(19): siRNA sense strand
auacagaccuggacaaauu

SEQ ID NO: 2559129 - RNA, 19 nt, Homo sapiens
  misc_RNA (1)...(19): siRNA sense strand
gggcaaagaaugugcaacu

SEQ ID NO: 2559130 - RNA, 19 nt, Homo sapiens
  misc_RNA (1)...(19): siRNA sense strand
gggaaguggcagaguuuau

SEQ ID NO: 2559131 - RNA, 19 nt, Homo sapiens
  misc_RNA (1)...(19): siRNA sense strand
gugccaagccugcaggaaa

SEQ ID NO: 2559132 - RNA, 19 nt, Homo sapiens
  misc_RNA (1)...(19): siRNA sense strand
gggaaugacucuaagaugu

SEQ ID NO: 2559133 - RNA, 19 nt, Homo sapiens
  misc_RNA (1)...(19): siRNA sense strand
ggccaagggugaugaugaa

SEQ ID NO: 2559134 - RNA, 19 nt, Homo sapiens
  misc_RNA (1)...(19): siRNA sense strand
aaagagaccuucacaauua

SEQ ID NO: 2559135 - RNA, 19 nt, Homo sapiens
  misc_RNA (1)...(19): siRNA sense strand
ggacagagcaugaugggca

SEQ ID NO: 2559136 - RNA, 19 nt, Homo sapiens
  misc_RNA (1)...(19): siRNA sense strand
guacagaaggcaagcgaca

SEQ ID NO: 2559137 - RNA, 19 nt, Homo sapiens
  misc_RNA (1)...(19): siRNA sense strand
agauauugcagaugaagaa

SEQ ID NO: 2559138 - RNA, 19 nt, Homo sapiens
  misc_RNA (1)...(19): siRNA sense strand
uagaaaaccuggagaccaa

SEQ ID NO: 2559139 - RNA, 19 nt, Homo sapiens
  misc_RNA (1)...(19): siRNA sense strand
gaaccuggcuggugaggau

SEQ ID NO: 2559140 - RNA, 19 nt, Homo sapiens
  misc_RNA (1)...(19): siRNA sense strand
acacaaugguuaucgagua

SEQ ID NO: 2559141 - RNA, 19 nt, Homo sapiens
  misc_RNA (1)...(19): siRNA sense strand
agagcaagauccagaaaca

SEQ ID NO: 2559142 - RNA, 19 nt, Homo sapiens
  misc_RNA (1)...(19): siRNA sense strand
gcauguucuucaaggacaa

SEQ ID NO: 2559143 - RNA, 19 nt, Homo sapiens
  misc_RNA (1)...(19): siRNA sense strand
gcaccgaauggaagaacaa

SEQ ID NO: 2559144 - RNA, 19 nt, Homo sapiens
  misc_RNA (1)...(19): siRNA sense strand
gcucaauggagacgaguuu

SEQ ID NO: 2559145 - RNA, 19 nt, Homo sapiens
  misc_RNA (1)...(19): siRNA sense strand
ccaaagagaccuucacaau

SEQ ID NO: 2559146 - RNA, 19 nt, Homo sapiens
  misc_RNA (1)...(19): siRNA sense strand
agaugaugguccagauauu

SEQ ID NO: 2559147 - RNA, 19 nt, Homo sapiens
  misc_RNA (1)...(19): siRNA sense strand
ccacagaagaacugcccaa

SEQ ID NO: 2559148 - RNA, 19 nt, Homo sapiens
  misc_RNA (1)...(19): siRNA sense strand
caaauuugcugcagaagau

SEQ ID NO: 2559149 - RNA, 19 nt, Homo sapiens
  misc_RNA (1)...(19): siRNA sense strand
gaacuuggcaccuuagaaa

SEQ ID NO: 2559150 - RNA, 19 nt, Homo sapiens
  misc_RNA (1)...(19): siRNA sense strand
uguuggagcaugagaagaa

SEQ ID NO: 2559151 - RNA, 19 nt, Homo sapiens
  misc_RNA (1)...(19): siRNA sense strand
ggaaacagcagaaggagca

SEQ ID NO: 2559152 - RNA, 19 nt, Homo sapiens
  misc_RNA (1)...(19): siRNA sense strand
cagcagaacugaaucccaa

SEQ ID NO: 2559153 - RNA, 19 nt, Homo sapiens
  misc_RNA (1)...(19): siRNA sense strand
cugcaaaaggccaaagaua

SEQ ID NO: 2559154 - RNA, 19 nt, Homo sapiens
  misc_RNA (1)...(19): siRNA sense strand
gcagcuaggcaguggauca

SEQ ID NO: 2559155 - RNA, 19 nt, Homo sapiens
  misc_RNA (1)...(19): siRNA sense strand
gggcaaaggaagugaggug

SEQ ID NO: 2559156 - RNA, 19 nt, Homo sapiens
  misc_RNA (1)...(19): siRNA sense strand
uggccgaagucgugacauu

SEQ ID NO: 2559157 - RNA, 19 nt, Homo sapiens
  misc_RNA (1)...(19): siRNA sense strand
ggagauggaggcucagaaa

SEQ ID NO: 2559158 - RNA, 19 nt, Homo sapiens
  misc_RNA (1)...(19): siRNA sense strand
gggcaagccucaaagcaca

SEQ ID NO: 2559159 - RNA, 19 nt, Homo sapiens
  misc_RNA (1)...(19): siRNA sense strand
ggaccugauucaaggcuuu

SEQ ID NO: 2559160 - RNA, 19 nt, Homo sapiens
  misc_RNA (1)...(19): siRNA sense strand
gcgagaagacccagggacu

SEQ ID NO: 2559161 - RNA, 19 nt, Homo sapiens
  misc_RNA (1)...(19): siRNA sense strand
ucaagaaagugauggcuca

SEQ ID NO: 2559162 - RNA, 19 nt, Homo sapiens
  misc_RNA (1)...(19): siRNA sense strand
gcaaaauaauacagggcca

SEQ ID NO: 2559163 - RNA, 19 nt, Homo sapiens
  misc_RNA (1)...(19): siRNA sense strand
cagugaagagggaggccaa

SEQ ID NO: 2559164 - RNA, 19 nt, Homo sapiens
  misc_RNA (1)...(19): siRNA sense strand
ucaacaaggugcagaagca

SEQ ID NO: 2559165 - RNA, 19 nt, Homo sapiens
  misc_RNA (1)...(19): siRNA sense strand
aguuugaccugcuggcaua

SEQ ID NO: 2559166 - RNA, 19 nt, Homo sapiens
  misc_RNA (1)...(19): siRNA sense strand
gggagaaaaucuacgaaga

SEQ ID NO: 2559167 - RNA, 19 nt, Homo sapiens
  misc_RNA (1)...(19): siRNA sense strand
ccugcaaugugaagccaaa

SEQ ID NO: 2559168 - RNA, 19 nt, Homo sapiens
  misc_RNA (1)...(19): siRNA sense strand
ccaguaaggaggaggagga

SEQ ID NO: 2559169 - RNA, 19 nt, Homo sapiens
  misc_RNA (1)...(19): siRNA sense strand
gcaucaacaaggugcagaa

SEQ ID NO: 2559170 - RNA, 19 nt, Homo sapiens
  misc_RNA (1)...(19): siRNA sense strand
ggaaggcccuagaggugaa

SEQ ID NO: 2559171 - RNA, 19 nt, Homo sapiens
  misc_RNA (1)...(19): siRNA sense strand
cggcuaaugaggaggcuga

SEQ ID NO: 2559172 - RNA, 19 nt, Homo sapiens
  misc_RNA (1)...(19): siRNA sense strand
aaucaagggcauaugcuaa

SEQ ID NO: 2559173 - RNA, 19 nt, Homo sapiens
  misc_RNA (1)...(19): siRNA sense strand
ggaaaagggcaaaggaagu

SEQ ID NO: 2559174 - RNA, 19 nt, Homo sapiens
  misc_RNA (1)...(19): siRNA sense strand
caagggagauggaggcuca

SEQ ID NO: 2559175 - RNA, 19 nt, Homo sapiens
  misc_RNA (1)...(19): siRNA sense strand
acacuaaucucauggcaga

SEQ ID NO: 2559176 - RNA, 19 nt, Homo sapiens
  misc_RNA (1)...(19): siRNA sense strand
aaaccagagucgaacuuua

SEQ ID NO: 2559177 - RNA, 19 nt, Homo sapiens
  misc_RNA (1)...(19): siRNA sense strand
gggagggccguuagcaaua

SEQ ID NO: 2559178 - RNA, 19 nt, Homo sapiens
  misc_RNA (1)...(19): siRNA sense strand
gagcagaaacuacagggua

SEQ ID NO: 2559179 - RNA, 19 nt, Homo sapiens
  misc_RNA (1)...(19): siRNA sense strand
uggcagaguuuauggagca

SEQ ID NO: 2559180 - RNA, 19 nt, Homo sapiens
  misc_RNA (1)...(19): siRNA sense strand
gggcaaagccgauacacca

SEQ ID NO: 2559181 - RNA, 19 nt, Homo sapiens
  misc_RNA (1)...(19): siRNA sense strand
uggcugggcuggagcagaa

SEQ ID NO: 2559182 - RNA, 19 nt, Homo sapiens
  misc_RNA (1)...(19): siRNA sense strand
gugaaagggcacugaggga

SEQ ID NO: 2559183 - RNA, 19 nt, Homo sapiens
  misc_RNA (1)...(19): siRNA sense strand
ggagcuaaccuaugacuau

SEQ ID NO: 2559184 - RNA, 19 nt, Homo sapiens
  misc_RNA (1)...(19): siRNA sense strand
aggaggaggaggaagaaga

SEQ ID NO: 2559185 - RNA, 19 nt, Homo sapiens
  misc_RNA (1)...(19): siRNA sense strand
ggaaggagcugcuggaccu

SEQ ID NO: 2559186 - RNA, 19 nt, Homo sapiens
  misc_RNA (1)...(19): siRNA sense strand
gcucagaaaggaaggaacu

SEQ ID NO: 2559187 - RNA, 19 nt, Homo sapiens
  misc_RNA (1)...(19): siRNA sense strand
gaaaggagaugauggucca

SEQ ID NO: 2559188 - RNA, 19 nt, Homo sapiens
  misc_RNA (1)...(19): siRNA sense strand
cccuagaggugaagaagga

SEQ ID NO: 2559189 - RNA, 19 nt, Homo sapiens
  misc_RNA (1)...(19): siRNA sense strand
ccucaaagcacaaacuaca

SEQ ID NO: 2559190 - RNA, 19 nt, Homo sapiens
  misc_RNA (1)...(19): siRNA sense strand
ugguaugaacagacagcaa

SEQ ID NO: 2559191 - RNA, 19 nt, Homo sapiens
  misc_RNA (1)...(19): siRNA sense strand
cagcaaagccucuucaaca

SEQ ID NO: 2559192 - RNA, 19 nt, Homo sapiens
  misc_RNA (1)...(19): siRNA sense strand
gcgggaaguggcagaguuu

SEQ ID NO: 2559193 - RNA, 19 nt, Homo sapiens
  misc_RNA (1)...(19): siRNA sense strand
cggcuaaagucaacugcuu

SEQ ID NO: 2559194 - RNA, 19 nt, Homo sapiens
  misc_RNA (1)...(19): siRNA sense strand
gcugagagccagaucaaca

SEQ ID NO: 2559195 - RNA, 19 nt, Homo sapiens
  misc_RNA (1)...(19): siRNA sense strand
gagcuagacaagauggaga

SEQ ID NO: 2559196 - RNA, 19 nt, Homo sapiens
  misc_RNA (1)...(19): siRNA sense strand
ccauggagggcgugguaga

SEQ ID NO: 2559197 - RNA, 19 nt, Homo sapiens
  misc_RNA (1)...(19): siRNA sense strand
aggcaggauuggaggguuc

SEQ ID NO: 2559198 - RNA, 19 nt, Homo sapiens
  misc_RNA (1)...(19): siRNA sense strand
cugaaggggaugagaagaa

SEQ ID NO: 2559199 - RNA, 19 nt, Homo sapiens
  misc_RNA (1)...(19): siRNA sense strand
gggaugagaagaagaagca

SEQ ID NO: 2559200 - RNA, 19 nt, Homo sapiens
  misc_RNA (1)...(19): siRNA sense strand
ggagaugaugguccagaua

SEQ ID NO: 2559201 - RNA, 19 nt, Homo sapiens
  misc_RNA (1)...(19): siRNA sense strand
gcggcacaauguacagaaa

SEQ ID NO: 2559202 - RNA, 19 nt, Homo sapiens
  misc_RNA (1)...(19): siRNA sense strand
ccagcaugucuaaggcaua

SEQ ID NO: 2559203 - RNA, 19 nt, Homo sapiens
  misc_RNA (1)...(19): siRNA sense strand
agauggagacugagaaagu

SEQ ID NO: 2559204 - RNA, 19 nt, Homo sapiens
  misc_RNA (1)...(19): siRNA sense strand
ggugaagaaggaagagcuu

SEQ ID NO: 2559205 - RNA, 19 nt, Homo sapiens
  misc_RNA (1)...(19): siRNA sense strand
cuacaauggaagaaggaaa

SEQ ID NO: 2559206 - RNA, 19 nt, Homo sapiens
  misc_RNA (1)...(19): siRNA sense strand
cugaggaugaagagggaaa

SEQ ID NO: 2559207 - RNA, 19 nt, Homo sapiens
  misc_RNA (1)...(19): siRNA sense strand
gggugaucccauuaagaua

SEQ ID NO: 2559208 - RNA, 19 nt, Homo sapiens
  misc_RNA (1)...(19): siRNA sense strand
aguagaagaaggagaagau

SEQ ID NO: 2559209 - RNA, 19 nt, Homo sapiens
  misc_RNA (1)...(19): siRNA sense strand
cuguaaaggcucuaucaaa

SEQ ID NO: 2559210 - RNA, 19 nt, Homo sapiens
  misc_RNA (1)...(19): siRNA sense strand
agaaagcaagagauggaaa

SEQ ID NO: 2559211 - RNA, 19 nt, Homo sapiens
  misc_RNA (1)...(19): siRNA sense strand
ugauaguagaagaaggaga

SEQ ID NO: 2559212 - RNA, 19 nt, Homo sapiens
  misc_RNA (1)...(19): siRNA sense strand
aguugaaacaaacgggcaa

SEQ ID NO: 2559213 - RNA, 19 nt, Homo sapiens
  misc_RNA (1)...(19): siRNA sense strand
gagucauugccaagagauu

SEQ ID NO: 2559214 - RNA, 19 nt, Homo sapiens
  misc_RNA (1)...(19): siRNA sense strand
ccaaaaucgugguugaaga

SEQ ID NO: 2559215 - RNA, 19 nt, Homo sapiens
  misc_RNA (1)...(19): siRNA sense strand
ugaagagggaaaugccaaa

SEQ ID NO: 2559216 - RNA, 19 nt, Homo sapiens
  misc_RNA (1)...(19): siRNA sense strand
aaauauacggcuagguuca

SEQ ID NO: 2559217 - RNA, 19 nt, Homo sapiens
  misc_RNA (1)...(19): siRNA sense strand
caauauucgaagagucauu

SEQ ID NO: 2559218 - RNA, 19 nt, Homo sapiens
  misc_RNA (1)...(19): siRNA sense strand
gcucuaucaaagaaagcaa

SEQ ID NO: 2559219 - RNA, 19 nt, Homo sapiens
  misc_RNA (1)...(19): siRNA sense strand
uggagagggcccaaagcaa

SEQ ID NO: 2559220 - RNA, 19 nt, Homo sapiens
  misc_RNA (1)...(19): siRNA sense strand
ugcuaaagguauccaggaa

SEQ ID NO: 2559221 - RNA, 19 nt, Homo sapiens
  misc_RNA (1)...(19): siRNA sense strand
augcaagugaugauggaau

SEQ ID NO: 2559222 - RNA, 19 nt, Homo sapiens
  misc_RNA (1)...(19): siRNA sense strand
agcaauauucgaagaguca

SEQ ID NO: 2559223 - RNA, 19 nt, Homo sapiens
  misc_RNA (1)...(19): siRNA sense strand
ccgcggacguaauuggaga

SEQ ID NO: 2559224 - RNA, 19 nt, Homo sapiens
  misc_RNA (1)...(19): siRNA sense strand
ugguuugauaguagaagaa

SEQ ID NO: 2559225 - RNA, 19 nt, Homo sapiens
  misc_RNA (1)...(19): siRNA sense strand
aagaaggagaagauuggaa

SEQ ID NO: 2559226 - RNA, 19 nt, Homo sapiens
  misc_RNA (1)...(19): siRNA sense strand
gucauugccaagagauuaa

SEQ ID NO: 2559227 - RNA, 19 nt, Homo sapiens
  misc_RNA (1)...(19): siRNA sense strand
ugaagaauaccaaggagga

SEQ ID NO: 2559228 - RNA, 19 nt, Homo sapiens
  misc_RNA (1)...(19): siRNA sense strand
augauggaaucuuggccaa

SEQ ID NO: 2559229 - RNA, 19 nt, Homo sapiens
  misc_RNA (1)...(19): siRNA sense strand
cagcaauauucgaagaguc

SEQ ID NO: 2559230 - RNA, 19 nt, Homo sapiens
  misc_RNA (1)...(19): siRNA sense strand
agauaaaggcuuacuuacu

SEQ ID NO: 2559231 - RNA, 19 nt, Homo sapiens
  misc_RNA (1)...(19): siRNA sense strand
uggccaaaaucgugguuga

SEQ ID NO: 2559232 - RNA, 19 nt, Homo sapiens
  misc_RNA (1)...(19): siRNA sense strand
ggauauucacuaaagagga

SEQ ID NO: 2559233 - RNA, 19 nt, Homo sapiens
  misc_RNA (1)...(19): siRNA sense strand
augaagagggaaaugccaa

SEQ ID NO: 2559234 - RNA, 19 nt, Homo sapiens
  misc_RNA (1)...(19): siRNA sense strand
guugaagaaggaaguaaaa

SEQ ID NO: 2559235 - RNA, 19 nt, Homo sapiens
  misc_RNA (1)...(19): siRNA sense strand
acguaauuggagaugguuu

SEQ ID NO: 2559236 - RNA, 19 nt, Homo sapiens
  misc_RNA (1)...(19): siRNA sense strand
gugaaauugagacugacaa

SEQ ID NO: 2559237 - RNA, 19 nt, Homo sapiens
  misc_RNA (1)...(19): siRNA sense strand
aggagaagauuggaaacau

SEQ ID NO: 2559238 - RNA, 19 nt, Homo sapiens
  misc_RNA (1)...(19): siRNA sense strand
cuucaaauuuauagggaca

SEQ ID NO: 2559239 - RNA, 19 nt, Homo sapiens
  misc_RNA (1)...(19): siRNA sense strand
cguauaaagcaguuguuaa

SEQ ID NO: 2559240 - RNA, 19 nt, Homo sapiens
  misc_RNA (1)...(19): siRNA sense strand
ugauaaaggcccagcaaaa

SEQ ID NO: 2559241 - RNA, 19 nt, Homo sapiens
  misc_RNA (1)...(19): siRNA sense strand
aagaagagaaugaaggaau

SEQ ID NO: 2559242 - RNA, 19 nt, Homo sapiens
  misc_RNA (1)...(19): siRNA sense strand
ugagagaagaagagaauga

SEQ ID NO: 2559243 - RNA, 19 nt, Homo sapiens
  misc_RNA (1)...(19): siRNA sense strand
cgauagugaaauugaagaa

SEQ ID NO: 2559244 - RNA, 19 nt, Homo sapiens
  misc_RNA (1)...(19): siRNA sense strand
agaaaggaugagagaagaa

SEQ ID NO: 2559245 - RNA, 19 nt, Homo sapiens
  misc_RNA (1)...(19): siRNA sense strand
gguuauuggaguaagagaa

SEQ ID NO: 2559246 - RNA, 19 nt, Homo sapiens
  misc_RNA (1)...(19): siRNA sense strand
aaggcaugaucaagagaaa

SEQ ID NO: 2559247 - RNA, 19 nt, Homo sapiens
  misc_RNA (1)...(19): siRNA sense strand
gugacauguugcuaagaaa

SEQ ID NO: 2559248 - RNA, 19 nt, Homo sapiens
  misc_RNA (1)...(19): siRNA sense strand
ggaugagagaagaagagaa

SEQ ID NO: 2559249 - RNA, 19 nt, Homo sapiens
  misc_RNA (1)...(19): siRNA sense strand
cuacagaaaggaugagaga

SEQ ID NO: 2559250 - RNA, 19 nt, Homo sapiens
  misc_RNA (1)...(19): siRNA sense strand
acagaaaggaugagagaag

SEQ ID NO: 2559251 - RNA, 19 nt, Homo sapiens
  misc_RNA (1)...(19): siRNA sense strand
caguauuguucgaaagcuu

SEQ ID NO: 2559252 - RNA, 19 nt, Homo sapiens
  misc_RNA (1)...(19): siRNA sense strand
acaaaaugguguacagaau

SEQ ID NO: 2559253 - RNA, 19 nt, Homo sapiens
  misc_RNA (1)...(19): siRNA sense strand
ggcuaauagagcacaaaua

SEQ ID NO: 2559254 - RNA, 19 nt, Homo sapiens
  misc_RNA (1)...(19): siRNA sense strand
agaaacaagacgagaaugu

SEQ ID NO: 2559255 - RNA, 19 nt, Homo sapiens
  misc_RNA (1)...(19): siRNA sense strand
ugguacaugcugagagauu

SEQ ID NO: 2559256 - RNA, 19 nt, Homo sapiens
  misc_RNA (1)...(19): siRNA sense strand
aaccaaagacccagagaga

SEQ ID NO: 2559257 - RNA, 19 nt, Homo sapiens
  misc_RNA (1)...(19): siRNA sense strand
cugcaagagauaaggcgua

SEQ ID NO: 2559258 - RNA, 19 nt, Homo sapiens
  misc_RNA (1)...(19): siRNA sense strand
gaucaagagaaaugaaacu

SEQ ID NO: 2559259 - RNA, 19 nt, Homo sapiens
  misc_RNA (1)...(19): siRNA sense strand
gagccaauguugaaagacu

SEQ ID NO: 2559260 - RNA, 19 nt, Homo sapiens
  misc_RNA (1)...(19): siRNA sense strand
gcuagaauguuucaggaca

SEQ ID NO: 2559261 - RNA, 19 nt, Homo sapiens
  misc_RNA (1)...(19): siRNA sense strand
ggaagcuaucauacaaaua

SEQ ID NO: 2559262 - RNA, 19 nt, Homo sapiens
  misc_RNA (1)...(19): siRNA sense strand
caaauguggaagacaguau

SEQ ID NO: 2559263 - RNA, 19 nt, Homo sapiens
  misc_RNA (1)...(19): siRNA sense strand
guugaaagacuuggaggaa

SEQ ID NO: 2559264 - RNA, 19 nt, Homo sapiens
  misc_RNA (1)...(19): siRNA sense strand
guuauuggaguaagagaau

SEQ ID NO: 2559265 - RNA, 19 nt, Homo sapiens
  misc_RNA (1)...(19): siRNA sense strand
gcugguuauuggaguaaga

SEQ ID NO: 2559266 - RNA, 19 nt, Homo sapiens
  misc_RNA (1)...(19): siRNA sense strand
cagaaaagggguaaaauca

SEQ ID NO: 2559267 - RNA, 19 nt, Homo sapiens
  misc_RNA (1)...(19): siRNA sense strand
gugcaaugaagcugguaca

SEQ ID NO: 2559268 - RNA, 19 nt, Homo sapiens
  misc_RNA (1)...(19): siRNA sense strand
uguuaaugaugcuaccaua

SEQ ID NO: 2559269 - RNA, 19 nt, Homo sapiens
  misc_RNA (1)...(19): siRNA sense strand
ggcuaagagaaguugguau

SEQ ID NO: 2559270 - RNA, 19 nt, Homo sapiens
  misc_RNA (1)...(19): siRNA sense strand
uuuagaaacaagacgagaa

SEQ ID NO: 2559271 - RNA, 19 nt, Homo sapiens
  misc_RNA (1)...(19): siRNA sense strand
gugacaucauuuaaagaga

SEQ ID NO: 2559272 - RNA, 19 nt, Homo sapiens
  misc_RNA (1)...(19): siRNA sense strand
uaagaaugaaguuggucaa

SEQ ID NO: 2559273 - RNA, 19 nt, Homo sapiens
  misc_RNA (1)...(19): siRNA sense strand
cauggaaugcuguguaaau

SEQ ID NO: 2559274 - RNA, 19 nt, Homo sapiens
  misc_RNA (1)...(19): siRNA sense strand
ggguaaacagggcagcaau

SEQ ID NO: 2559275 - RNA, 19 nt, Homo sapiens
  misc_RNA (1)...(19): siRNA sense strand
auacauggaaugagucaau

SEQ ID NO: 2559276 - RNA, 19 nt, Homo sapiens
  misc_RNA (1)...(19): siRNA sense strand
uggauucaacagagagauu

SEQ ID NO: 2559277 - RNA, 19 nt, Homo sapiens
  misc_RNA (1)...(19): siRNA sense strand
gcauggaaccaaagaccca

SEQ ID NO: 2559278 - RNA, 19 nt, Homo sapiens
  misc_RNA (1)...(19): siRNA sense strand
aagacaguauuguucgaaa

SEQ ID NO: 2559279 - RNA, 19 nt, Homo sapiens
  misc_RNA (1)...(19): siRNA sense strand
gccaggaaucuguuacaaa

SEQ ID NO: 2559280 - RNA, 19 nt, Homo sapiens
  misc_RNA (1)...(19): siRNA sense strand
ggacauaaaaguaucugaa

SEQ ID NO: 2559281 - RNA, 19 nt, Homo sapiens
  misc_RNA (1)...(19): siRNA sense strand
gguagaguggcuaagagaa

SEQ ID NO: 2559282 - RNA, 19 nt, Homo sapiens
  misc_RNA (1)...(19): siRNA sense strand
agaagaagagaaugaagga

SEQ ID NO: 2559283 - RNA, 19 nt, Homo sapiens
  misc_RNA (1)...(19): siRNA sense strand
uaaacagggcagcaauaaa

SEQ ID NO: 2559284 - RNA, 19 nt, Homo sapiens
  misc_RNA (1)...(19): siRNA sense strand
acaaaguuccuaaugguau

SEQ ID NO: 2559285 - RNA, 19 nt, Homo sapiens
  misc_RNA (1)...(19): siRNA sense strand
uccuaaugguauagagcca

SEQ ID NO: 2559286 - RNA, 19 nt, Homo sapiens
  misc_RNA (1)...(19): siRNA sense strand
cagcggauuauguaaacaa

SEQ ID NO: 2559287 - RNA, 19 nt, Homo sapiens
  misc_RNA (1)...(19): siRNA sense strand
ucucaugucaaauggaauu

SEQ ID NO: 2559288 - RNA, 19 nt, Homo sapiens
  misc_RNA (1)...(19): siRNA sense strand
augcaaagguucagaaaag

SEQ ID NO: 2559289 - RNA, 19 nt, Homo sapiens
  misc_RNA (1)...(19): siRNA sense strand
uuagaaacaagacgagaau

SEQ ID NO: 2559290 - RNA, 19 nt, Homo sapiens
  misc_RNA (1)...(19): siRNA sense strand
uaccggaaguagaagaauu

SEQ ID NO: 2559291 - RNA, 19 nt, Homo sapiens
  misc_RNA (1)...(19): siRNA sense strand
uguaugaaccucaagucaa

SEQ ID NO: 2559292 - RNA, 19 nt, Homo sapiens
  misc_RNA (1)...(19): siRNA sense strand
aaacagacuccaagauagu

SEQ ID NO: 2559293 - RNA, 19 nt, Homo sapiens
  misc_RNA (1)...(19): siRNA sense strand
cgaauuuaacagagagaau

SEQ ID NO: 2559294 - RNA, 19 nt, Homo sapiens
  misc_RNA (1)...(19): siRNA sense strand
gguucauaguggagauaau

SEQ ID NO: 2559295 - RNA, 19 nt, Homo sapiens
  misc_RNA (1)...(19): siRNA sense strand
guguaaagaaguagacuau

SEQ ID NO: 2559296 - RNA, 19 nt, Homo sapiens
  misc_RNA (1)...(19): siRNA sense strand
ggaacauggcuuacaggaa

SEQ ID NO: 2559297 - RNA, 19 nt, Homo sapiens
  misc_RNA (1)...(19): siRNA sense strand
agauaaucaugguggacau

SEQ ID NO: 2559298 - RNA, 19 nt, Homo sapiens
  misc_RNA (1)...(19): siRNA sense strand
acauagacaaagagaauga

SEQ ID NO: 2559299 - RNA, 19 nt, Homo sapiens
  misc_RNA (1)...(19): siRNA sense strand
aggaggacauggaggauga

SEQ ID NO: 2559300 - RNA, 19 nt, Homo sapiens
  misc_RNA (1)...(19): siRNA sense strand
cuuacaggaagcagagaaa

SEQ ID NO: 2559301 - RNA, 19 nt, Homo sapiens
  misc_RNA (1)...(19): siRNA sense strand
gggagaaagcaucagggaa

SEQ ID NO: 2559302 - RNA, 19 nt, Homo sapiens
  misc_RNA (1)...(19): siRNA sense strand
acauaaaugaagacgagua

SEQ ID NO: 2559303 - RNA, 19 nt, Homo sapiens
  misc_RNA (1)...(19): siRNA sense strand
ccaauuuagggaagaggaa

SEQ ID NO: 2559304 - RNA, 19 nt, Homo sapiens
  misc_RNA (1)...(19): siRNA sense strand
cauaaaugaagacgaguau

SEQ ID NO: 2559305 - RNA, 19 nt, Homo sapiens
  misc_RNA (1)...(19): siRNA sense strand
cagcuaaguaucaaaggaa

SEQ ID NO: 2559306 - RNA, 19 nt, Homo sapiens
  misc_RNA (1)...(19): siRNA sense strand
agaaaaggaucgaggcuca

SEQ ID NO: 2559307 - RNA, 19 nt, Homo sapiens
  misc_RNA (1)...(19): siRNA sense strand
ccagguggacauagacaaa

SEQ ID NO: 2559308 - RNA, 19 nt, Homo sapiens
  misc_RNA (1)...(19): siRNA sense strand
caaagaagcacacaggcua

SEQ ID NO: 2559309 - RNA, 19 nt, Homo sapiens
  misc_RNA (1)...(19): siRNA sense strand
ugcuagaaauuguaagcua

SEQ ID NO: 2559310 - RNA, 19 nt, Homo sapiens
  misc_RNA (1)...(19): siRNA sense strand
cgaccagcaauguuagaua

SEQ ID NO: 2559311 - RNA, 19 nt, Homo sapiens
  misc_RNA (1)...(19): siRNA sense strand
ccaaagaggagucgcuaca

SEQ ID NO: 2559312 - RNA, 19 nt, Homo sapiens
  misc_RNA (1)...(19): siRNA sense strand
gaaaauaagaugaaaggca

SEQ ID NO: 2559313 - RNA, 19 nt, Homo sapiens
  misc_RNA (1)...(19): siRNA sense strand
gguguaaauuugaugacga

SEQ ID NO: 2559314 - RNA, 19 nt, Homo sapiens
  misc_RNA (1)...(19): siRNA sense strand
gauggaagcgggagauaca

SEQ ID NO: 2559315 - RNA, 19 nt, Homo sapiens
  misc_RNA (1)...(19): siRNA sense strand
aagacgaguaugaaguaaa

SEQ ID NO: 2559316 - RNA, 19 nt, Homo sapiens
  misc_RNA (1)...(19): siRNA sense strand
agcuaaguaucaaaggaaa

SEQ ID NO: 2559317 - RNA, 19 nt, Homo sapiens
  misc_RNA (1)...(19): siRNA sense strand
gggauuuccacaagaucaa

SEQ ID NO: 2559318 - RNA, 19 nt, Homo sapiens
  misc_RNA (1)...(19): siRNA sense strand
aggagaaggaguuugagaa

SEQ ID NO: 2559319 - RNA, 19 nt, Homo sapiens
  misc_RNA (1)...(19): siRNA sense strand
gggaaacuuuagauagcuu

SEQ ID NO: 2559320 - RNA, 19 nt, Homo sapiens
  misc_RNA (1)...(19): siRNA sense strand
cugauagaagagaagauua

SEQ ID NO: 2559321 - RNA, 19 nt, Homo sapiens
  misc_RNA (1)...(19): siRNA sense strand
aaugaaaacccuuggacaa

SEQ ID NO: 2559322 - RNA, 19 nt, Homo sapiens
  misc_RNA (1)...(19): siRNA sense strand
aaucauugguguucaucaa

SEQ ID NO: 2559323 - RNA, 19 nt, Homo sapiens
  misc_RNA (1)...(19): siRNA sense strand
gggugggaaacuuuagaua

SEQ ID NO: 2559324 - RNA, 19 nt, Homo sapiens
  misc_RNA (1)...(19): siRNA sense strand
agacaaagagaaugagaug

SEQ ID NO: 2559325 - RNA, 19 nt, Homo sapiens
  misc_RNA (1)...(19): siRNA sense strand
gccuagacaaccuaagaaa

SEQ ID NO: 2559326 - RNA, 19 nt, Homo sapiens
  misc_RNA (1)...(19): siRNA sense strand
ggggaugauucgucuaaaa

SEQ ID NO: 2559327 - RNA, 19 nt, Homo sapiens
  misc_RNA (1)...(19): siRNA sense strand
gcaaggaguaauggaacaa

SEQ ID NO: 2559328 - RNA, 19 nt, Homo sapiens
  misc_RNA (1)...(19): siRNA sense strand
augauugagcucagugaua

SEQ ID NO: 2559329 - RNA, 19 nt, Homo sapiens
  misc_RNA (1)...(19): siRNA sense strand
auucaagauacuagccuua

SEQ ID NO: 2559330 - RNA, 19 nt, Homo sapiens
  misc_RNA (1)...(19): siRNA sense strand
aguguaaagaaguagacua

SEQ ID NO: 2559331 - RNA, 19 nt, Homo sapiens
  misc_RNA (1)...(19): siRNA sense strand
gugugaaauuccuaacauu

SEQ ID NO: 2559332 - RNA, 19 nt, Homo sapiens
  misc_RNA (1)...(19): siRNA sense strand
agcaaggaguaauggaaca

SEQ ID NO: 2559333 - RNA, 19 nt, Homo sapiens
  misc_RNA (1)...(19): siRNA sense strand
uuucaagucucaagguuau

SEQ ID NO: 2559334 - RNA, 19 nt, Homo sapiens
  misc_RNA (1)...(19): siRNA sense strand
ucucaagguuauagggaug

SEQ ID NO: 2559335 - RNA, 19 nt, Homo sapiens
  misc_RNA (1)...(19): siRNA sense strand
aagguguacuaaagaggaa

SEQ ID NO: 2559336 - RNA, 19 nt, Homo sapiens
  misc_RNA (1)...(19): siRNA sense strand
gugaauuacccaccgcaaa

SEQ ID NO: 2559337 - RNA, 19 nt, Homo sapiens
  misc_RNA (1)...(19): siRNA sense strand
cgagaagugaugaagcgaa

SEQ ID NO: 2559338 - RNA, 19 nt, Homo sapiens
  misc_RNA (1)...(19): siRNA sense strand
ccgaggacauggagaugga

SEQ ID NO: 2559339 - RNA, 19 nt, Homo sapiens
  misc_RNA (1)...(19): siRNA sense strand
gugauaaaccuguaggaac

SEQ ID NO: 2559340 - RNA, 19 nt, Homo sapiens
  misc_RNA (1)...(19): siRNA sense strand
ggauuauguggcaguagaa

SEQ ID NO: 2559341 - RNA, 19 nt, Homo sapiens
  misc_RNA (1)...(19): siRNA sense strand
agcaguugguggagcgauu

SEQ ID NO: 2559342 - RNA, 19 nt, Homo sapiens
  misc_RNA (1)...(19): siRNA sense strand
agguaauccucuuagacau

SEQ ID NO: 2559343 - RNA, 19 nt, Homo sapiens
  misc_RNA (1)...(19): siRNA sense strand
guauaugguuaaacagcca

SEQ ID NO: 2559344 - RNA, 19 nt, Homo sapiens
  misc_RNA (1)...(19): siRNA sense strand
cggaggaggacauggagga

SEQ ID NO: 2559345 - RNA, 19 nt, Homo sapiens
  misc_RNA (1)...(19): siRNA sense strand
uugaauuacugugggcaua

SEQ ID NO: 2559346 - RNA, 19 nt, Homo sapiens
  misc_RNA (1)...(19): siRNA sense strand
ugaggaaguuaaaccgaau

SEQ ID NO: 2559347 - RNA, 19 nt, Homo sapiens
  misc_RNA (1)...(19): siRNA sense strand
ucauaguauuucagaagga

SEQ ID NO: 2559348 - RNA, 19 nt, Homo sapiens
  misc_RNA (1)...(19): siRNA sense strand
aggaaaucccuuuggacca

SEQ ID NO: 2559349 - RNA, 19 nt, Homo sapiens
  misc_RNA (1)...(19): siRNA sense strand
guacauaaaugaagacgag

SEQ ID NO: 2559350 - RNA, 19 nt, Homo sapiens
  misc_RNA (1)...(19): siRNA sense strand
ugagcgagcccgaggacau

SEQ ID NO: 2559351 - RNA, 19 nt, Homo sapiens
  misc_RNA (1)...(19): siRNA sense strand
caagcaaggaguaauggaa

SEQ ID NO: 2559352 - RNA, 19 nt, Homo sapiens
  misc_RNA (1)...(19): siRNA sense strand
gggaagaggaaauaacacu

SEQ ID NO: 2559353 - RNA, 19 nt, Homo sapiens
  misc_RNA (1)...(19): siRNA sense strand
gauucuuucuccagugcaa

SEQ ID NO: 2559354 - RNA, 19 nt, Homo sapiens
  misc_RNA (1)...(19): siRNA sense strand
ucacgaaucagcuacgaaa

SEQ ID NO: 2559355 - RNA, 19 nt, Homo sapiens
  misc_RNA (1)...(19): siRNA sense strand
gcuaaguaucaaaggaaag

SEQ ID NO: 2559356 - RNA, 19 nt, Homo sapiens
  misc_RNA (1)...(19): siRNA sense strand
ggucaucgcacuagcccaa

SEQ ID NO: 2559357 - RNA, 19 nt, Homo sapiens
  misc_RNA (1)...(19): siRNA sense strand
uggaggagcugaaccgaga

SEQ ID NO: 2559358 - RNA, 19 nt, Homo sapiens
  misc_RNA (1)...(19): siRNA sense strand
agguguggguggauggcau

SEQ ID NO: 2559359 - RNA, 19 nt, Homo sapiens
  misc_RNA (1)...(19): siRNA sense strand
augaagagugauaaggaaa

SEQ ID NO: 2559360 - RNA, 19 nt, Homo sapiens
  misc_RNA (1)...(19): siRNA sense strand
aggaagaaggauuacuaaa

SEQ ID NO: 2559361 - RNA, 19 nt, Homo sapiens
  misc_RNA (1)...(19): siRNA sense strand
accagaaggaagaaggauu

SEQ ID NO: 2559362 - RNA, 19 nt, Homo sapiens
  misc_RNA (1)...(19): siRNA sense strand
ugguacucuucuaggauuu

SEQ ID NO: 2559363 - RNA, 19 nt, Homo sapiens
  misc_RNA (1)...(19): siRNA sense strand
guuugaaaucacaccagaa

SEQ ID NO: 2559364 - RNA, 19 nt, Homo sapiens
  misc_RNA (1)...(19): siRNA sense strand
aagcaaagcagcagcgcaa

SEQ ID NO: 2559365 - RNA, 19 nt, Homo sapiens
  misc_RNA (1)...(19): siRNA sense strand
gagcagaagcagcggcaga

SEQ ID NO: 2559366 - RNA, 19 nt, Homo sapiens
  misc_RNA (1)...(19): siRNA sense strand
ggaugaggccugagagcca

SEQ ID NO: 2559367 - RNA, 19 nt, Homo sapiens
  misc_RNA (1)...(19): siRNA sense strand
gcgggaugccugugagcua

SEQ ID NO: 2559368 - RNA, 19 nt, Homo sapiens
  misc_RNA (1)...(19): siRNA sense strand
cugcuaugccagaggagaa

SEQ ID NO: 2559369 - RNA, 19 nt, Homo sapiens
  misc_RNA (1)...(19): siRNA sense strand
aggcagagcuggaugagga

SEQ ID NO: 2559370 - RNA, 19 nt, Homo sapiens
  misc_RNA (1)...(19): siRNA sense strand
agaaggagauugacgccaa

SEQ ID NO: 2559371 - RNA, 19 nt, Homo sapiens
  misc_RNA (1)...(19): siRNA sense strand
acaaauggcucuaaaggga

SEQ ID NO: 2559372 - RNA, 19 nt, Homo sapiens
  misc_RNA (1)...(19): siRNA sense strand
ccacuaaagcugagcccau

SEQ ID NO: 2559373 - RNA, 19 nt, Homo sapiens
  misc_RNA (1)...(19): siRNA sense strand
acacagugguggugcagau

SEQ ID NO: 2559374 - RNA, 19 nt, Homo sapiens
  misc_RNA (1)...(19): siRNA sense strand
cgagaugagcgccgaggaa

SEQ ID NO: 2559375 - RNA, 19 nt, Homo sapiens
  misc_RNA (1)...(19): siRNA sense strand
ugccagaggagaagaggaa

SEQ ID NO: 2559376 - RNA, 19 nt, Homo sapiens
  misc_RNA (1)...(19): siRNA sense strand
aagacaaccuggaggagga

SEQ ID NO: 2559377 - RNA, 19 nt, Homo sapiens
  misc_RNA (1)...(19): siRNA sense strand
ccgaagagucugccaaaga

SEQ ID NO: 2559378 - RNA, 19 nt, Homo sapiens
  misc_RNA (1)...(19): siRNA sense strand
ggacgagcugcuagagaga

SEQ ID NO: 2559379 - RNA, 19 nt, Homo sapiens
  misc_RNA (1)...(19): siRNA sense strand
agguggagaucgucaggua

SEQ ID NO: 2559380 - RNA, 19 nt, Homo sapiens
  misc_RNA (1)...(19): siRNA sense strand
acguaaugauugaugacau

SEQ ID NO: 2559381 - RNA, 19 nt, Homo sapiens
  misc_RNA (1)...(19): siRNA sense strand
gggcauggagcaaaagaua

SEQ ID NO: 2559382 - RNA, 19 nt, Homo sapiens
  misc_RNA (1)...(19): siRNA sense strand
agaugagcgccgaggaaga

SEQ ID NO: 2559383 - RNA, 19 nt, Homo sapiens
  misc_RNA (1)...(19): siRNA sense strand
caggcagcgucuagaagaa

SEQ ID NO: 2559384 - RNA, 19 nt, Homo sapiens
  misc_RNA (1)...(19): siRNA sense strand
ggguaucacacaacgcaaa

SEQ ID NO: 2559385 - RNA, 19 nt, Homo sapiens
  misc_RNA (1)...(19): siRNA sense strand
ucaccaucauccaggcaaa

SEQ ID NO: 2559386 - RNA, 19 nt, Homo sapiens
  misc_RNA (1)...(19): siRNA sense strand
augaggagaugaugcgcaa

SEQ ID NO: 2559387 - RNA, 19 nt, Homo sapiens
  misc_RNA (1)...(19): siRNA sense strand
caucacaggaggagaggca

SEQ ID NO: 2559388 - RNA, 19 nt, Homo sapiens
  misc_RNA (1)...(19): siRNA sense strand
aagaggagcuagagcggga

SEQ ID NO: 2559389 - RNA, 19 nt, Homo sapiens
  misc_RNA (1)...(19): siRNA sense strand
gggaacagcuagcgcagca

SEQ ID NO: 2559390 - RNA, 19 nt, Homo sapiens
  misc_RNA (1)...(19): siRNA sense strand
aggaggagaaggagauuga

SEQ ID NO: 2559391 - RNA, 19 nt, Homo sapiens
  misc_RNA (1)...(19): siRNA sense strand
agaacugacugaugaggau

SEQ ID NO: 2559392 - RNA, 19 nt, Homo sapiens
  misc_RNA (1)...(19): siRNA sense strand
guguggagcugcagaggca

SEQ ID NO: 2559393 - RNA, 19 nt, Homo sapiens
  misc_RNA (1)...(19): siRNA sense strand
ggguggaguuggagaagcu

SEQ ID NO: 2559394 - RNA, 19 nt, Homo sapiens
  misc_RNA (1)...(19): siRNA sense strand
caaacauggcacccagaaa

SEQ ID NO: 2559395 - RNA, 19 nt, Homo sapiens
  misc_RNA (1)...(19): siRNA sense strand
ggucaaacaaguagagcag

SEQ ID NO: 2559396 - RNA, 19 nt, Homo sapiens
  misc_RNA (1)...(19): siRNA sense strand
gcggcuaugagcagggcaa

SEQ ID NO: 2559397 - RNA, 19 nt, Homo sapiens
  misc_RNA (1)...(19): siRNA sense strand
ccaacagccugguccgcaa

SEQ ID NO: 2559398 - RNA, 19 nt, Homo sapiens
  misc_RNA (1)...(19): siRNA sense strand
uggaugaggaggagaagga

SEQ ID NO: 2559399 - RNA, 19 nt, Homo sapiens
  misc_RNA (1)...(19): siRNA sense strand
cucuaaagggacagccaaa

SEQ ID NO: 2559400 - RNA, 19 nt, Homo sapiens
  misc_RNA (1)...(19): siRNA sense strand
ccucagugacacaggcuau

SEQ ID NO: 2559401 - RNA, 19 nt, Homo sapiens
  misc_RNA (1)...(19): siRNA sense strand
cuggagauggagagccuaa

SEQ ID NO: 2559402 - RNA, 19 nt, Homo sapiens
  misc_RNA (1)...(19): siRNA sense strand
gagaagcccuugagugcga

SEQ ID NO: 2559403 - RNA, 19 nt, Homo sapiens
  misc_RNA (1)...(19): siRNA sense strand
ccagugagaggcugaacaa

SEQ ID NO: 2559404 - RNA, 19 nt, Homo sapiens
  misc_RNA (1)...(19): siRNA sense strand
caagcaguguccaggaaaa

SEQ ID NO: 2559405 - RNA, 19 nt, Homo sapiens
  misc_RNA (1)...(19): siRNA sense strand
ucacaggagucgugcagca

SEQ ID NO: 2559406 - RNA, 19 nt, Homo sapiens
  misc_RNA (1)...(19): siRNA sense strand
ccgagauggaggagcuaca

SEQ ID NO: 2559407 - RNA, 19 nt, Homo sapiens
  misc_RNA (1)...(19): siRNA sense strand
ggagagagcagcaggacac

SEQ ID NO: 2559408 - RNA, 19 nt, Homo sapiens
  misc_RNA (1)...(19): siRNA sense strand
cccuagaggaggacaguga

SEQ ID NO: 2559409 - RNA, 19 nt, Homo sapiens
  misc_RNA (1)...(19): siRNA sense strand
cacuacagaccgugaguau

SEQ ID NO: 2559410 - RNA, 19 nt, Homo sapiens
  misc_RNA (1)...(19): siRNA sense strand
guuucuaaaugcugagagu

SEQ ID NO: 2559411 - RNA, 19 nt, Homo sapiens
  misc_RNA (1)...(19): siRNA sense strand
gaugaggaggagaaggaga

SEQ ID NO: 2559412 - RNA, 19 nt, Homo sapiens
  misc_RNA (1)...(19): siRNA sense strand
uagccgacuuggagcagaa

SEQ ID NO: 2559413 - RNA, 19 nt, Homo sapiens
  misc_RNA (1)...(19): siRNA sense strand
agaagaacguguaugagca

SEQ ID NO: 2559414 - RNA, 19 nt, Homo sapiens
  misc_RNA (1)...(19): siRNA sense strand
gcucagugucgaacaucua

SEQ ID NO: 2559415 - RNA, 19 nt, Homo sapiens
  misc_RNA (1)...(19): siRNA sense strand
ccagaggagaagaggaauc

SEQ ID NO: 2559416 - RNA, 19 nt, Homo sapiens
  misc_RNA (1)...(19): siRNA sense strand
aagaccaugccgaaggaaa

SEQ ID NO: 2559417 - RNA, 19 nt, Homo sapiens
  misc_RNA (1)...(19): siRNA sense strand
ccugcgacuccuaaaguaa

SEQ ID NO: 2559418 - RNA, 19 nt, Homo sapiens
  misc_RNA (1)...(19): siRNA sense strand
agggaaggagccuggagaa

SEQ ID NO: 2559419 - RNA, 19 nt, Homo sapiens
  misc_RNA (1)...(19): siRNA sense strand
aagaggaaucugaggagga

SEQ ID NO: 2559420 - RNA, 19 nt, Homo sapiens
  misc_RNA (1)...(19): siRNA sense strand
gcaaauacccucuggggca

SEQ ID NO: 2559421 - RNA, 19 nt, Homo sapiens
  misc_RNA (1)...(19): siRNA sense strand
cugccaagccaaagaccau

SEQ ID NO: 2559422 - RNA, 19 nt, Homo sapiens
  misc_RNA (1)...(19): siRNA sense strand
guacuggcgaggagcagaa

SEQ ID NO: 2559423 - RNA, 19 nt, Homo sapiens
  misc_RNA (1)...(19): siRNA sense strand
gaugaggagcuggaggaua

SEQ ID NO: 2559424 - RNA, 19 nt, Homo sapiens
  misc_RNA (1)...(19): siRNA sense strand
uagaagaagcaaagcagca

SEQ ID NO: 2559425 - RNA, 19 nt, Homo sapiens
  misc_RNA (1)...(19): siRNA sense strand
cggagagagcagcaggaca

SEQ ID NO: 2559426 - RNA, 19 nt, Homo sapiens
  misc_RNA (1)...(19): siRNA sense strand
cuacagaccuuuuggcuca

SEQ ID NO: 2559427 - RNA, 19 nt, Homo sapiens
  misc_RNA (1)...(19): siRNA sense strand
aggaggagaggcagcggaa

SEQ ID NO: 2559428 - RNA, 19 nt, Homo sapiens
  misc_RNA (1)...(19): siRNA sense strand
gcucaagaagaacguguau

SEQ ID NO: 2559429 - RNA, 19 nt, Homo sapiens
  misc_RNA (1)...(19): siRNA sense strand
caagaagggcucccggcaa

SEQ ID NO: 2559430 - RNA, 19 nt, Homo sapiens
  misc_RNA (1)...(19): siRNA sense strand
aaagcauggcagagcagaa

SEQ ID NO: 2559431 - RNA, 19 nt, Homo sapiens
  misc_RNA (1)...(19): siRNA sense strand
agucaggcagugaguacaa

SEQ ID NO: 2559432 - RNA, 19 nt, Homo sapiens
  misc_RNA (1)...(19): siRNA sense strand
caaggaagcuguuggcuga

SEQ ID NO: 2559433 - RNA, 19 nt, Homo sapiens
  misc_RNA (1)...(19): siRNA sense strand
auaacuacaccgaggaaau

SEQ ID NO: 2559434 - RNA, 19 nt, Homo sapiens
  misc_RNA (1)...(19): siRNA sense strand
cugagaagcaugacggaca

SEQ ID NO: 2559435 - RNA, 19 nt, Homo sapiens
  misc_RNA (1)...(19): siRNA sense strand
aggaaagcgagguggacau

SEQ ID NO: 2559436 - RNA, 19 nt, Homo sapiens
  misc_RNA (1)...(19): siRNA sense strand
uaacuggcauugugggcaa

SEQ ID NO: 2559437 - RNA, 19 nt, Homo sapiens
  misc_RNA (1)...(19): siRNA sense strand
ccuucauccuccuggaaau

SEQ ID NO: 2559438 - RNA, 19 nt, Homo sapiens
  misc_RNA (1)...(19): siRNA sense strand
gaggcagaugacagauaua

SEQ ID NO: 2559439 - RNA, 19 nt, Homo sapiens
  misc_RNA (1)...(19): siRNA sense strand
uugagaacacugugcacaa

SEQ ID NO: 2559440 - RNA, 19 nt, Homo sapiens
  misc_RNA (1)...(19): siRNA sense strand
caaaggaaagcgaggugga

SEQ ID NO: 2559441 - RNA, 19 nt, Homo sapiens
  misc_RNA (1)...(19): siRNA sense strand
ccucaagauccucuccaaa

SEQ ID NO: 2559442 - RNA, 19 nt, Homo sapiens
  misc_RNA (1)...(19): siRNA sense strand
ccuggaaaucaucaagcaa

SEQ ID NO: 2559443 - RNA, 19 nt, Homo sapiens
  misc_RNA (1)...(19): siRNA sense strand
accaacagucagaggccaa

SEQ ID NO: 2559444 - RNA, 19 nt, Homo sapiens
  misc_RNA (1)...(19): siRNA sense strand
cagugaggcagaugacaga

SEQ ID NO: 2559445 - RNA, 19 nt, Homo sapiens
  misc_RNA (1)...(19): siRNA sense strand
cuguccugcuauugcauua

SEQ ID NO: 2559446 - RNA, 19 nt, Homo sapiens
  misc_RNA (1)...(19): siRNA sense strand
ggcaagagcuucagccaca

SEQ ID NO: 2559447 - RNA, 19 nt, Homo sapiens
  misc_RNA (1)...(19): siRNA sense strand
aggcaggagaugagaagga

SEQ ID NO: 2559448 - RNA, 19 nt, Homo sapiens
  misc_RNA (1)...(19): siRNA sense strand
agucacggcucuaaggaga

SEQ ID NO: 2559449 - RNA, 19 nt, Homo sapiens
  misc_RNA (1)...(19): siRNA sense strand
cggagaagcccaacgagga

SEQ ID NO: 2559450 - RNA, 19 nt, Homo sapiens
  misc_RNA (1)...(19): siRNA sense strand
cguggcagcccuugggaau

SEQ ID NO: 2559451 - RNA, 19 nt, Homo sapiens
  misc_RNA (1)...(19): siRNA sense strand
agcccaacgaggaggagaa

SEQ ID NO: 2559452 - RNA, 19 nt, Homo sapiens
  misc_RNA (1)...(19): siRNA sense strand
ggagagaagcccuacgugu

SEQ ID NO: 2559453 - RNA, 19 nt, Homo sapiens
  misc_RNA (1)...(19): siRNA sense strand
gccaagugcuucacgcaga

SEQ ID NO: 2559454 - RNA, 19 nt, Homo sapiens
  misc_RNA (1)...(19): siRNA sense strand
cagacauagaguuggaaau

SEQ ID NO: 2559455 - RNA, 19 nt, Homo sapiens
  misc_RNA (1)...(19): siRNA sense strand
gcuucaacaacuaguacaa

SEQ ID NO: 2559456 - RNA, 19 nt, Homo sapiens
  misc_RNA (1)...(19): siRNA sense strand
agacauggaugaaagacga

SEQ ID NO: 2559457 - RNA, 19 nt, Homo sapiens
  misc_RNA (1)...(19): siRNA sense strand
augcagguacauaaagaaa

SEQ ID NO: 2559458 - RNA, 19 nt, Homo sapiens
  misc_RNA (1)...(19): siRNA sense strand
cuuacaacaacuagugcaa

SEQ ID NO: 2559459 - RNA, 19 nt, Homo sapiens
  misc_RNA (1)...(19): siRNA sense strand
gcuucauccaauucagaaa

SEQ ID NO: 2559460 - RNA, 19 nt, Homo sapiens
  misc_RNA (1)...(19): siRNA sense strand
ucaacaacuaguacaacaa

SEQ ID NO: 2559461 - RNA, 19 nt, Homo sapiens
  misc_RNA (1)...(19): siRNA sense strand
cugaugaauaugaugauga

SEQ ID NO: 2559462 - RNA, 19 nt, Homo sapiens
  misc_RNA (1)...(19): siRNA sense strand
acagaaaacacaagaaagu

SEQ ID NO: 2559463 - RNA, 19 nt, Homo sapiens
  misc_RNA (1)...(19): siRNA sense strand
agaaacaauagaugccgua

SEQ ID NO: 2559464 - RNA, 19 nt, Homo sapiens
  misc_RNA (1)...(19): siRNA sense strand
guacagauuucaaacccuu

SEQ ID NO: 2559465 - RNA, 19 nt, Homo sapiens
  misc_RNA (1)...(19): siRNA sense strand
accuggaagaacagacaua

SEQ ID NO: 2559466 - RNA, 19 nt, Homo sapiens
  misc_RNA (1)...(19): siRNA sense strand
cuggaagaacagacauaga

SEQ ID NO: 2559467 - RNA, 19 nt, Homo sapiens
  misc_RNA (1)...(19): siRNA sense strand
gcaagaagaagaagcagcu

SEQ ID NO: 2559468 - RNA, 19 nt, Homo sapiens
  misc_RNA (1)...(19): siRNA sense strand
augaauaugaugaugacga

SEQ ID NO: 2559469 - RNA, 19 nt, Homo sapiens
  misc_RNA (1)...(19): siRNA sense strand
aagaagaagaagcagcuga

SEQ ID NO: 2559470 - RNA, 19 nt, Homo sapiens
  misc_RNA (1)...(19): siRNA sense strand
aagccguggugcugguauu

SEQ ID NO: 2559471 - RNA, 19 nt, Homo sapiens
  misc_RNA (1)...(19): siRNA sense strand
ccuccaagcaagagagaca

SEQ ID NO: 2559472 - RNA, 19 nt, Homo sapiens
  misc_RNA (1)...(19): siRNA sense strand
agccaaacuagaagagaaa

SEQ ID NO: 2559473 - RNA, 19 nt, Homo sapiens
  misc_RNA (1)...(19): siRNA sense strand
augugaugacugugggaaa

SEQ ID NO: 2559474 - RNA, 19 nt, Homo sapiens
  misc_RNA (1)...(19): siRNA sense strand
ccaaugagcagcaaggaga

SEQ ID NO: 2559475 - RNA, 19 nt, Homo sapiens
  misc_RNA (1)...(19): siRNA sense strand
gggaaaagcuucacgugga

SEQ ID NO: 2559476 - RNA, 19 nt, Homo sapiens
  misc_RNA (1)...(19): siRNA sense strand
gcucaaaccuucaccagca

SEQ ID NO: 2559477 - RNA, 19 nt, Homo sapiens
  misc_RNA (1)...(19): siRNA sense strand
gcaaggagauugugacccu

SEQ ID NO: 2559478 - RNA, 19 nt, Homo sapiens
  misc_RNA (1)...(19): siRNA sense strand
gagauaacuuuaagcucca

SEQ ID NO: 2559479 - RNA, 19 nt, Homo sapiens
  misc_RNA (1)...(19): siRNA sense strand
gagacacauaauagccaaa

SEQ ID NO: 2559480 - RNA, 19 nt, Homo sapiens
  misc_RNA (1)...(19): siRNA sense strand
cagaaugagaagugacaac

SEQ ID NO: 2559481 - RNA, 19 nt, Homo sapiens
  misc_RNA (1)...(19): siRNA sense strand
gagaacaggaacugccaga

SEQ ID NO: 2559482 - RNA, 19 nt, Homo sapiens
  misc_RNA (1)...(19): siRNA sense strand
aguccacacaggagagaga

SEQ ID NO: 2559483 - RNA, 19 nt, Homo sapiens
  misc_RNA (1)...(19): siRNA sense strand
ccacccacugagagagcua

SEQ ID NO: 2559484 - RNA, 19 nt, Homo sapiens
  misc_RNA (1)...(19): siRNA sense strand
cugagagagcuaaagaaaa

SEQ ID NO: 2559485 - RNA, 19 nt, Homo sapiens
  misc_RNA (1)...(19): siRNA sense strand
cagcuaaaauggagauaac

SEQ ID NO: 2559486 - RNA, 19 nt, Homo sapiens
  misc_RNA (1)...(19): siRNA sense strand
acauaauagccaaacuaga

SEQ ID NO: 2559487 - RNA, 19 nt, Homo sapiens
  misc_RNA (1)...(19): siRNA sense strand
gcuaaaauggagauaacuu

SEQ ID NO: 2559488 - RNA, 19 nt, Homo sapiens
  misc_RNA (1)...(19): siRNA sense strand
ggucaggcaucgaugucca

SEQ ID NO: 2559489 - RNA, 19 nt, Homo sapiens
  misc_RNA (1)...(19): siRNA sense strand
ggaaggggcuaaaggagca

SEQ ID NO: 2559490 - RNA, 19 nt, Homo sapiens
  misc_RNA (1)...(19): siRNA sense strand
gcuaaaggagcaaagccau

SEQ ID NO: 2559491 - RNA, 19 nt, Homo sapiens
  misc_RNA (1)...(19): siRNA sense strand
agggaauggucugcagaau

SEQ ID NO: 2559492 - RNA, 19 nt, Homo sapiens
  misc_RNA (1)...(19): siRNA sense strand
aauucauacaggagagaaa

SEQ ID NO: 2559493 - RNA, 19 nt, Homo sapiens
  misc_RNA (1)...(19): siRNA sense strand
aacucauacuggagagaaa

SEQ ID NO: 2559494 - RNA, 19 nt, Homo sapiens
  misc_RNA (1)...(19): siRNA sense strand
ucauuagacaucagagaau

SEQ ID NO: 2559495 - RNA, 19 nt, Homo sapiens
  misc_RNA (1)...(19): siRNA sense strand
ccucauuagacaucagaga

SEQ ID NO: 2559496 - RNA, 19 nt, Homo sapiens
  misc_RNA (1)...(19): siRNA sense strand
augcagaacaucagaaaau

SEQ ID NO: 2559497 - RNA, 19 nt, Homo sapiens
  misc_RNA (1)...(19): siRNA sense strand
ggcaaagccuuaaguggga

SEQ ID NO: 2559498 - RNA, 19 nt, Homo sapiens
  misc_RNA (1)...(19): siRNA sense strand
uugcaaaucacuggagaau

SEQ ID NO: 2559499 - RNA, 19 nt, Homo sapiens
  misc_RNA (1)...(19): siRNA sense strand
ggagaauucauacaggaga

SEQ ID NO: 2559500 - RNA, 19 nt, Homo sapiens
  misc_RNA (1)...(19): siRNA sense strand
gggaaguucuuuagccaaa

SEQ ID NO: 2559501 - RNA, 19 nt, Homo sapiens
  misc_RNA (1)...(19): siRNA sense strand
gggaaauucuuuagccgaa

SEQ ID NO: 2559502 - RNA, 19 nt, Homo sapiens
  misc_RNA (1)...(19): siRNA sense strand
ccuuaugagugcagcgaau

SEQ ID NO: 2559503 - RNA, 19 nt, Homo sapiens
  misc_RNA (1)...(19): siRNA sense strand
guguagugagugugggaaa

SEQ ID NO: 2559504 - RNA, 19 nt, Homo sapiens
  misc_RNA (1)...(19): siRNA sense strand
gugugaugaaugugggaaa

SEQ ID NO: 2559505 - RNA, 19 nt, Homo sapiens
  misc_RNA (1)...(19): siRNA sense strand
gguaaauccuucagccgaa

SEQ ID NO: 2559506 - RNA, 19 nt, Homo sapiens
  misc_RNA (1)...(19): siRNA sense strand
ccguaugaaugcagugaau

SEQ ID NO: 2559507 - RNA, 19 nt, Homo sapiens
  misc_RNA (1)...(19): siRNA sense strand
augcagugaaugugggaaa

SEQ ID NO: 2559508 - RNA, 19 nt, Homo sapiens
  misc_RNA (1)...(19): siRNA sense strand
gagaauucacucaggagaa

SEQ ID NO: 2559509 - RNA, 19 nt, Homo sapiens
  misc_RNA (1)...(19): siRNA sense strand
gugcagucaaugugguaaa

SEQ ID NO: 2559510 - RNA, 19 nt, Homo sapiens
  misc_RNA (1)...(19): siRNA sense strand
gugcagugaauguggaaga

SEQ ID NO: 2559511 - RNA, 19 nt, Homo sapiens
  misc_RNA (1)...(19): siRNA sense strand
ggcauggaguagaggguga

SEQ ID NO: 2559512 - RNA, 19 nt, Homo sapiens
  misc_RNA (1)...(19): siRNA sense strand
ggaaauaucccaugugugu

SEQ ID NO: 2559513 - RNA, 19 nt, Homo sapiens
  misc_RNA (1)...(19): siRNA sense strand
augcugugauugugguaaa

SEQ ID NO: 2559514 - RNA, 19 nt, Homo sapiens
  misc_RNA (1)...(19): siRNA sense strand
gugcagcgaauguaggaaa

SEQ ID NO: 2559515 - RNA, 19 nt, Homo sapiens
  misc_RNA (1)...(19): siRNA sense strand
acauugaagagcaugguaa

SEQ ID NO: 2559516 - RNA, 19 nt, Homo sapiens
  misc_RNA (1)...(19): siRNA sense strand
aguucacacuggagaaaga

SEQ ID NO: 2559517 - RNA, 19 nt, Homo sapiens
  misc_RNA (1)...(19): siRNA sense strand
uugaagauguggcuguaua

SEQ ID NO: 2559518 - RNA, 19 nt, Homo sapiens
  misc_RNA (1)...(19): siRNA sense strand
ugguaaagccuucaguaau

SEQ ID NO: 2559519 - RNA, 19 nt, Homo sapiens
  misc_RNA (1)...(19): siRNA sense strand
guguagccagugugggaaa

SEQ ID NO: 2559520 - RNA, 19 nt, Homo sapiens
  misc_RNA (1)...(19): siRNA sense strand
aaauaucccauguguguaa

SEQ ID NO: 2559521 - RNA, 19 nt, Homo sapiens
  misc_RNA (1)...(19): siRNA sense strand
agaauucacucaggagaaa

SEQ ID NO: 2559522 - RNA, 19 nt, Homo sapiens
  misc_RNA (1)...(19): siRNA sense strand
aguaauagcuccacccuca

SEQ ID NO: 2559523 - RNA, 19 nt, Homo sapiens
  misc_RNA (1)...(19): siRNA sense strand
gugcagcaacuguggaaaa

SEQ ID NO: 2559524 - RNA, 19 nt, Homo sapiens
  misc_RNA (1)...(19): siRNA sense strand
gugcaaugaaugugggaag

SEQ ID NO: 2559525 - RNA, 19 nt, Homo sapiens
  misc_RNA (1)...(19): siRNA sense strand
augcagugaaugugggaga

SEQ ID NO: 2559526 - RNA, 19 nt, Homo sapiens
  misc_RNA (1)...(19): siRNA sense strand
ccuuacgaaugcagugaau

SEQ ID NO: 2559527 - RNA, 19 nt, Homo sapiens
  misc_RNA (1)...(19): siRNA sense strand
auguggagcaugugggaga

SEQ ID NO: 2559528 - RNA, 19 nt, Homo sapiens
  misc_RNA (1)...(19): siRNA sense strand
augcagugaauguggaaga

SEQ ID NO: 2559529 - RNA, 19 nt, Homo sapiens
  misc_RNA (1)...(19): siRNA sense strand
ggaaauuucuuagaggaga

SEQ ID NO: 2559530 - RNA, 19 nt, Homo sapiens
  misc_RNA (1)...(19): siRNA sense strand
gggaaaaccuucaaccaca

SEQ ID NO: 2559531 - RNA, 19 nt, Homo sapiens
  misc_RNA (1)...(19): siRNA sense strand
ucucauuaagcaucagaaa

SEQ ID NO: 2559532 - RNA, 19 nt, Homo sapiens
  misc_RNA (1)...(19): siRNA sense strand
gaguguagccaguguggga

SEQ ID NO: 2559533 - RNA, 19 nt, Homo sapiens
  misc_RNA (1)...(19): siRNA sense strand
aaagcuaacuccugugaca

SEQ ID NO: 2559534 - RNA, 19 nt, Homo sapiens
  misc_RNA (1)...(19): siRNA sense strand
caugguaaccuuugaagau

SEQ ID NO: 2559535 - RNA, 19 nt, Homo sapiens
  misc_RNA (1)...(19): siRNA sense strand
gugccugaaauguggaaga

SEQ ID NO: 2559536 - RNA, 19 nt, Homo sapiens
  misc_RNA (1)...(19): siRNA sense strand
ccagaaaguucacaccaga

SEQ ID NO: 2559537 - RNA, 19 nt, Homo sapiens
  misc_RNA (1)...(19): siRNA sense strand
ggagcacaguggagggaag

SEQ ID NO: 2559538 - RNA, 19 nt, Homo sapiens
  misc_RNA (1)...(19): siRNA sense strand
guggaaauuucuuagagga

SEQ ID NO: 2559539 - RNA, 19 nt, Homo sapiens
  misc_RNA (1)...(19): siRNA sense strand
gggaaggugggaaggucau

SEQ ID NO: 2559540 - RNA, 19 nt, Homo sapiens
  misc_RNA (1)...(19): siRNA sense strand
acuggagaguucacacaaa

SEQ ID NO: 2559541 - RNA, 19 nt, Homo sapiens
  misc_RNA (1)...(19): siRNA sense strand
agagaaaggacuuaugagu

SEQ ID NO: 2559542 - RNA, 19 nt, Homo sapiens
  misc_RNA (1)...(19): siRNA sense strand
gugggaaacucuucagcca

SEQ ID NO: 2559543 - RNA, 19 nt, Homo sapiens
  misc_RNA (1)...(19): siRNA sense strand
guguaaggagugugggaag

SEQ ID NO: 2559544 - RNA, 19 nt, Homo sapiens
  misc_RNA (1)...(19): siRNA sense strand
uggaaaaccuugagcuugu

SEQ ID NO: 2559545 - RNA, 19 nt, Homo sapiens
  misc_RNA (1)...(19): siRNA sense strand
cagcauacuucuuggcccu

SEQ ID NO: 2559546 - RNA, 19 nt, Homo sapiens
  misc_RNA (1)...(19): siRNA sense strand
ggagcaugugggagagacu

SEQ ID NO: 2559547 - RNA, 19 nt, Homo sapiens
  misc_RNA (1)...(19): siRNA sense strand
agugaauguggaagagcuu

SEQ ID NO: 2559548 - RNA, 19 nt, Homo sapiens
  misc_RNA (1)...(19): siRNA sense strand
ccuuacgaguguagugagu

SEQ ID NO: 2559549 - RNA, 19 nt, Homo sapiens
  misc_RNA (1)...(19): siRNA sense strand
acuuaugaguguagccagu

SEQ ID NO: 2559550 - RNA, 19 nt, Homo sapiens
  misc_RNA (1)...(19): siRNA sense strand
uuuagaugguacaaggaca

SEQ ID NO: 2559551 - RNA, 19 nt, Homo sapiens
  misc_RNA (1)...(19): siRNA sense strand
agggaaggugggaagguca

SEQ ID NO: 2559552 - RNA, 19 nt, Homo sapiens
  misc_RNA (1)...(19): siRNA sense strand
gggcagaagccauauucca

SEQ ID NO: 2559553 - RNA, 19 nt, Homo sapiens
  misc_RNA (1)...(19): siRNA sense strand
gcugaggaagcaccagaaa

SEQ ID NO: 2559554 - RNA, 19 nt, Homo sapiens
  misc_RNA (1)...(19): siRNA sense strand
gcaaaggccuuaugagugc

SEQ ID NO: 2559555 - RNA, 19 nt, Homo sapiens
  misc_RNA (1)...(19): siRNA sense strand
gugcaguaaaugugggaaa

SEQ ID NO: 2559556 - RNA, 19 nt, Homo sapiens
  misc_RNA (1)...(19): siRNA sense strand
ccuuaugagugcagcgaau

SEQ ID NO: 2559557 - RNA, 19 nt, Homo sapiens
  misc_RNA (1)...(19): siRNA sense strand
ccuuaugaaugcagcgaau

SEQ ID NO: 2559558 - RNA, 19 nt, Homo sapiens
  misc_RNA (1)...(19): siRNA sense strand
guguuacaguauagagcaa

SEQ ID NO: 2559559 - RNA, 19 nt, Homo sapiens
  misc_RNA (1)...(19): siRNA sense strand
cguguaaggaggagcagaa

SEQ ID NO: 2559560 - RNA, 19 nt, Homo sapiens
  misc_RNA (1)...(19): siRNA sense strand
ucauuaaacaucagcgaau

SEQ ID NO: 2559561 - RNA, 19 nt, Homo sapiens
  misc_RNA (1)...(19): siRNA sense strand
aguaagaggaagacacaca

SEQ ID NO: 2559562 - RNA, 19 nt, Homo sapiens
  misc_RNA (1)...(19): siRNA sense strand
gcgaauucacacugaguca

SEQ ID NO: 2559563 - RNA, 19 nt, Homo sapiens
  misc_RNA (1)...(19): siRNA sense strand
gaguauucacacuggagaa

SEQ ID NO: 2559564 - RNA, 19 nt, Homo sapiens
  misc_RNA (1)...(19): siRNA sense strand
caaagaaccucauccguca

SEQ ID NO: 2559565 - RNA, 19 nt, Homo sapiens
  misc_RNA (1)...(19): siRNA sense strand
gggaaagccuucagccgca

SEQ ID NO: 2559566 - RNA, 19 nt, Homo sapiens
  misc_RNA (1)...(19): siRNA sense strand
ccucaaucggcaccagaaa

SEQ ID NO: 2559567 - RNA, 19 nt, Homo sapiens
  misc_RNA (1)...(19): siRNA sense strand
gugaaugugggaaggccua

SEQ ID NO: 2559568 - RNA, 19 nt, Homo sapiens
  misc_RNA (1)...(19): siRNA sense strand
aggaagacacacaggagca

SEQ ID NO: 2559569 - RNA, 19 nt, Homo sapiens
  misc_RNA (1)...(19): siRNA sense strand
acacaggagcacugagagu

SEQ ID NO: 2559570 - RNA, 19 nt, Homo sapiens
  misc_RNA (1)...(19): siRNA sense strand
ccagagaauucauagugga

SEQ ID NO: 2559571 - RNA, 19 nt, Homo sapiens
  misc_RNA (1)...(19): siRNA sense strand
aauucauaguggagagaag

SEQ ID NO: 2559572 - RNA, 19 nt, Homo sapiens
  misc_RNA (1)...(19): siRNA sense strand
ccguuugagugcauugaau

SEQ ID NO: 2559573 - RNA, 19 nt, Homo sapiens
  misc_RNA (1)...(19): siRNA sense strand
gggaaauccuuuggccaca

SEQ ID NO: 2559574 - RNA, 19 nt, Homo sapiens
  misc_RNA (1)...(19): siRNA sense strand
aguaaaugugggaaagacu

SEQ ID NO: 2559575 - RNA, 19 nt, Homo sapiens
  misc_RNA (1)...(19): siRNA sense strand
gugcagugaaugugggaag

SEQ ID NO: 2559576 - RNA, 19 nt, Homo sapiens
  misc_RNA (1)...(19): siRNA sense strand
gugggaaggccuacagcuu

SEQ ID NO: 2559577 - RNA, 19 nt, Homo sapiens
  misc_RNA (1)...(19): siRNA sense strand
gagaauucauaguggagag

SEQ ID NO: 2559578 - RNA, 19 nt, Homo sapiens
  misc_RNA (1)...(19): siRNA sense strand
uuguucagcaugagaguau

SEQ ID NO: 2559579 - RNA, 19 nt, Homo sapiens
  misc_RNA (1)...(19): siRNA sense strand
auggugaacaaaugcauua

SEQ ID NO: 2559580 - RNA, 19 nt, Homo sapiens
  misc_RNA (1)...(19): siRNA sense strand
caucaguaccagaaguguu

SEQ ID NO: 2559581 - RNA, 19 nt, Homo sapiens
  misc_RNA (1)...(19): siRNA sense strand
gaaguaaggaugauggcaa

SEQ ID NO: 2559582 - RNA, 19 nt, Homo sapiens
  misc_RNA (1)...(19): siRNA sense strand
cugcaaaaccagagcaaau

SEQ ID NO: 2559583 - RNA, 19 nt, Homo sapiens
  misc_RNA (1)...(19): siRNA sense strand
auuugcaguuggagagaua

SEQ ID NO: 2559584 - RNA, 19 nt, Homo sapiens
  misc_RNA (1)...(19): siRNA sense strand
auacauggaaacagugaaa

SEQ ID NO: 2559585 - RNA, 19 nt, Homo sapiens
  misc_RNA (1)...(19): siRNA sense strand
acuaaaagcuauaggaagu

SEQ ID NO: 2559586 - RNA, 19 nt, Homo sapiens
  misc_RNA (1)...(19): siRNA sense strand
acauggaaacagugaaauu

SEQ ID NO: 2559587 - RNA, 19 nt, Homo sapiens
  misc_RNA (1)...(19): siRNA sense strand
aagaagcgaaagaaagaaa

SEQ ID NO: 2559588 - RNA, 19 nt, Homo sapiens
  misc_RNA (1)...(19): siRNA sense strand
aggaauggaaaguaggauu

SEQ ID NO: 2559589 - RNA, 19 nt, Homo sapiens
  misc_RNA (1)...(19): siRNA sense strand
aacaaagaagcgaaagaaa

SEQ ID NO: 2559590 - RNA, 19 nt, Homo sapiens
  misc_RNA (1)...(19): siRNA sense strand
gaguaugugcauggagaua

SEQ ID NO: 2559591 - RNA, 19 nt, Homo sapiens
  misc_RNA (1)...(19): siRNA sense strand
uugcaaguuugauggacaa

SEQ ID NO: 2559592 - RNA, 19 nt, Homo sapiens
  misc_RNA (1)...(19): siRNA sense strand
auaacaaagaagcgaaaga

SEQ ID NO: 2559593 - RNA, 19 nt, Homo sapiens
  misc_RNA (1)...(19): siRNA sense strand
auaugaagcaaaugccaaa

SEQ ID NO: 2559594 - RNA, 19 nt, Homo sapiens
  misc_RNA (1)...(19): siRNA sense strand
ccucaguguuguggagaau

SEQ ID NO: 2559595 - RNA, 19 nt, Homo sapiens
  misc_RNA (1)...(19): siRNA sense strand
aggauuacccauuggccaa

SEQ ID NO: 2559596 - RNA, 19 nt, Homo sapiens
  misc_RNA (1)...(19): siRNA sense strand
cccagaaggaguucauaaa

SEQ ID NO: 2559597 - RNA, 19 nt, Homo sapiens
  misc_RNA (1)...(19): siRNA sense strand
ugggagugaccuucagaaa

SEQ ID NO: 2559598 - RNA, 19 nt, Homo sapiens
  misc_RNA (1)...(19): siRNA sense strand
aauggagguuugaaagcaa

SEQ ID NO: 2559599 - RNA, 19 nt, Homo sapiens
  misc_RNA (1)...(19): siRNA sense strand
cuauugaauucacgagcau

SEQ ID NO: 2559600 - RNA, 19 nt, Homo sapiens
  misc_RNA (1)...(19): siRNA sense strand
cuauaggaaguaaggauga

SEQ ID NO: 2559601 - RNA, 19 nt, Homo sapiens
  misc_RNA (1)...(19): siRNA sense strand
gauaauaacugacauggca

SEQ ID NO: 2559602 - RNA, 19 nt, Homo sapiens
  misc_RNA (1)...(19): siRNA sense strand
acaauaacaaagaagcgaa

SEQ ID NO: 2559603 - RNA, 19 nt, Homo sapiens
  misc_RNA (1)...(19): siRNA sense strand
gcucaagcuggaagacaga

SEQ ID NO: 2559604 - RNA, 19 nt, Homo sapiens
  misc_RNA (1)...(19): siRNA sense strand
aguggaacccagugacaau

SEQ ID NO: 2559605 - RNA, 19 nt, Homo sapiens
  misc_RNA (1)...(19): siRNA sense strand
agacguggugauuuggaaa

SEQ ID NO: 2559606 - RNA, 19 nt, Homo sapiens
  misc_RNA (1)...(19): siRNA sense strand
cggaauggucaaacacaca

SEQ ID NO: 2559607 - RNA, 19 nt, Homo sapiens
  misc_RNA (1)...(19): siRNA sense strand
uucaagaaccagaaagaga

SEQ ID NO: 2559608 - RNA, 19 nt, Homo sapiens
  misc_RNA (1)...(19): siRNA sense strand
cuguauauaucuugcugau

SEQ ID NO: 2559609 - RNA, 19 nt, Homo sapiens
  misc_RNA (1)...(19): siRNA sense strand
agauuauggccuugcuuau

SEQ ID NO: 2559610 - RNA, 19 nt, Homo sapiens
  misc_RNA (1)...(19): siRNA sense strand
gcaaggacuaaaagcuaua

SEQ ID NO: 2559611 - RNA, 19 nt, Homo sapiens
  misc_RNA (1)...(19): siRNA sense strand
gggagugaccuucagaaaa

SEQ ID NO: 2559612 - RNA, 19 nt, Homo sapiens
  misc_RNA (1)...(19): siRNA sense strand
auugcaaguuugauggaca

SEQ ID NO: 2559613 - RNA, 19 nt, Homo sapiens
  misc_RNA (1)...(19): siRNA sense strand
cuaccaacgagcugcaaaa

SEQ ID NO: 2559614 - RNA, 19 nt, Homo sapiens
  misc_RNA (1)...(19): siRNA sense strand
augaguaugugcauggaga

SEQ ID NO: 2559615 - RNA, 19 nt, Homo sapiens
  misc_RNA (1)...(19): siRNA sense strand
ggugaaauugccaaauaca

SEQ ID NO: 2559616 - RNA, 19 nt, Homo sapiens
  misc_RNA (1)...(19): siRNA sense strand
aauugaagaaagcaaggaa

SEQ ID NO: 2559617 - RNA, 19 nt, Homo sapiens
  misc_RNA (1)...(19): siRNA sense strand
agcuauaggaaguaaggau

SEQ ID NO: 2559618 - RNA, 19 nt, Homo sapiens
  misc_RNA (1)...(19): siRNA sense strand
cagagaaaauauugcaagu

SEQ ID NO: 2559619 - RNA, 19 nt, Homo sapiens
  misc_RNA (1)...(19): siRNA sense strand
aauucauacgggagagaaa

SEQ ID NO: 2559620 - RNA, 19 nt, Homo sapiens
  misc_RNA (1)...(19): siRNA sense strand
augugaagaaugugguaaa

SEQ ID NO: 2559621 - RNA, 19 nt, Homo sapiens
  misc_RNA (1)...(19): siRNA sense strand
aagucauacagaagagaaa

SEQ ID NO: 2559622 - RNA, 19 nt, Homo sapiens
  misc_RNA (1)...(19): siRNA sense strand
augugaagaaugugacaaa

SEQ ID NO: 2559623 - RNA, 19 nt, Homo sapiens
  misc_RNA (1)...(19): siRNA sense strand
augugauguuagagaacua

SEQ ID NO: 2559624 - RNA, 19 nt, Homo sapiens
  misc_RNA (1)...(19): siRNA sense strand
augugaagaauguggcaaa

SEQ ID NO: 2559625 - RNA, 19 nt, Homo sapiens
  misc_RNA (1)...(19): siRNA sense strand
augugaagaauguggcaaa

SEQ ID NO: 2559626 - RNA, 19 nt, Homo sapiens
  misc_RNA (1)...(19): siRNA sense strand
augugaagaauguggcaaa

SEQ ID NO: 2559627 - RNA, 19 nt, Homo sapiens
  misc_RNA (1)...(19): siRNA sense strand
augugaagaauguggcaaa

SEQ ID NO: 2559628 - RNA, 19 nt, Homo sapiens
  misc_RNA (1)...(19): siRNA sense strand
augugaagaauguggcaaa

SEQ ID NO: 2559629 - RNA, 19 nt, Homo sapiens
  misc_RNA (1)...(19): siRNA sense strand
aaaguauggaugaguguaa

SEQ ID NO: 2559630 - RNA, 19 nt, Homo sapiens
  misc_RNA (1)...(19): siRNA sense strand
aagaaaaggcugugaaagu

SEQ ID NO: 2559631 - RNA, 19 nt, Homo sapiens
  misc_RNA (1)...(19): siRNA sense strand
augugaagaauguggaaaa

SEQ ID NO: 2559632 - RNA, 19 nt, Homo sapiens
  misc_RNA (1)...(19): siRNA sense strand
gggagagaaaccuuacaaa

SEQ ID NO: 2559633 - RNA, 19 nt, Homo sapiens
  misc_RNA (1)...(19): siRNA sense strand
uguaaaagucgcucauaaa

SEQ ID NO: 2559634 - RNA, 19 nt, Homo sapiens
  misc_RNA (1)...(19): siRNA sense strand
ccauugacauuuagggaug

SEQ ID NO: 2559635 - RNA, 19 nt, Homo sapiens
  misc_RNA (1)...(19): siRNA sense strand
ccucaaaacuuaccaaaca

SEQ ID NO: 2559636 - RNA, 19 nt, Homo sapiens
  misc_RNA (1)...(19): siRNA sense strand
cagcggaauuuauauagaa

SEQ ID NO: 2559637 - RNA, 19 nt, Homo sapiens
  misc_RNA (1)...(19): siRNA sense strand
auguaaaagucgcucauaa

SEQ ID NO: 2559638 - RNA, 19 nt, Homo sapiens
  misc_RNA (1)...(19): siRNA sense strand
cuaacugaacauagcagaa

SEQ ID NO: 2559639 - RNA, 19 nt, Homo sapiens
  misc_RNA (1)...(19): siRNA sense strand
ccauacaaaugugaagaau

SEQ ID NO: 2559640 - RNA, 19 nt, Homo sapiens
  misc_RNA (1)...(19): siRNA sense strand
ccuggaguaugaagagaca

SEQ ID NO: 2559641 - RNA, 19 nt, Homo sapiens
  misc_RNA (1)...(19): siRNA sense strand
agaagagaaaccuuacaaa

SEQ ID NO: 2559642 - RNA, 19 nt, Homo sapiens
  misc_RNA (1)...(19): siRNA sense strand
uucaaacagacaugagaua

SEQ ID NO: 2559643 - RNA, 19 nt, Homo sapiens
  misc_RNA (1)...(19): siRNA sense strand
aauucauacuggagagaag

SEQ ID NO: 2559644 - RNA, 19 nt, Homo sapiens
  misc_RNA (1)...(19): siRNA sense strand
ucucugaaggaguggcaau

SEQ ID NO: 2559645 - RNA, 19 nt, Homo sapiens
  misc_RNA (1)...(19): siRNA sense strand
caaacagacaugagauaag

SEQ ID NO: 2559646 - RNA, 19 nt, Homo sapiens
  misc_RNA (1)...(19): siRNA sense strand
gaagaaugugacaaagcuu

SEQ ID NO: 2559647 - RNA, 19 nt, Homo sapiens
  misc_RNA (1)...(19): siRNA sense strand
ucacagcuacccagagcaa

SEQ ID NO: 2559648 - RNA, 19 nt, Homo sapiens
  misc_RNA (1)...(19): siRNA sense strand
acagcuacccagagcaaaa

SEQ ID NO: 2559649 - RNA, 19 nt, Homo sapiens
  misc_RNA (1)...(19): siRNA sense strand
uggagagaaaccauacaaa

SEQ ID NO: 2559650 - RNA, 19 nt, Homo sapiens
  misc_RNA (1)...(19): siRNA sense strand
uggccggagcagaauauaa

SEQ ID NO: 2559651 - RNA, 19 nt, Homo sapiens
  misc_RNA (1)...(19): siRNA sense strand
gccuuuaacugguccucaa

SEQ ID NO: 2559652 - RNA, 19 nt, Homo sapiens
  misc_RNA (1)...(19): siRNA sense strand
agagaauucauacgggaga

SEQ ID NO: 2559653 - RNA, 19 nt, Homo sapiens
  misc_RNA (1)...(19): siRNA sense strand
cagaagagaaaccuuacaa

SEQ ID NO: 2559654 - RNA, 19 nt, Homo sapiens
  misc_RNA (1)...(19): siRNA sense strand
gcugugaaaguauggauga

SEQ ID NO: 2559655 - RNA, 19 nt, Homo sapiens
  misc_RNA (1)...(19): siRNA sense strand
ccuuacaaaugugaagaau

SEQ ID NO: 2559656 - RNA, 19 nt, Homo sapiens
  misc_RNA (1)...(19): siRNA sense strand
cuaucuaaguggaggcaaa

SEQ ID NO: 2559657 - RNA, 19 nt, Homo sapiens
  misc_RNA (1)...(19): siRNA sense strand
agaagaaggaggaggaaau

SEQ ID NO: 2559658 - RNA, 19 nt, Homo sapiens
  misc_RNA (1)...(19): siRNA sense strand
agauugaaguggaggaaga

SEQ ID NO: 2559659 - RNA, 19 nt, Homo sapiens
  misc_RNA (1)...(19): siRNA sense strand
ucaaagaaguacuggaaaa

SEQ ID NO: 2559660 - RNA, 19 nt, Homo sapiens
  misc_RNA (1)...(19): siRNA sense strand
cagaggaagaggaaggaaa

SEQ ID NO: 2559661 - RNA, 19 nt, Homo sapiens
  misc_RNA (1)...(19): siRNA sense strand
ucuugaagcuauacagaaa

SEQ ID NO: 2559662 - RNA, 19 nt, Homo sapiens
  misc_RNA (1)...(19): siRNA sense strand
aggcagaaaugcugauaau

SEQ ID NO: 2559663 - RNA, 19 nt, Homo sapiens
  misc_RNA (1)...(19): siRNA sense strand
caacaaauguaaaggccuu

SEQ ID NO: 2559664 - RNA, 19 nt, Homo sapiens
  misc_RNA (1)...(19): siRNA sense strand
ugaaauuuaccgaaggaaa

SEQ ID NO: 2559665 - RNA, 19 nt, Homo sapiens
  misc_RNA (1)...(19): siRNA sense strand
aggaagaagaggaagaaga

SEQ ID NO: 2559666 - RNA, 19 nt, Homo sapiens
  misc_RNA (1)...(19): siRNA sense strand
gugaagaagaagaggagga

SEQ ID NO: 2559667 - RNA, 19 nt, Homo sapiens
  misc_RNA (1)...(19): siRNA sense strand
gcauauuggaagagcguca

SEQ ID NO: 2559668 - RNA, 19 nt, Homo sapiens
  misc_RNA (1)...(19): siRNA sense strand
ggaagaggaugaagagcca

SEQ ID NO: 2559669 - RNA, 19 nt, Homo sapiens
  misc_RNA (1)...(19): siRNA sense strand
aggaugaagaggaggaaga

SEQ ID NO: 2559670 - RNA, 19 nt, Homo sapiens
  misc_RNA (1)...(19): siRNA sense strand
cagaguucaaagagggaaa

SEQ ID NO: 2559671 - RNA, 19 nt, Homo sapiens
  misc_RNA (1)...(19): siRNA sense strand
gggagaaggaggaacaaga

SEQ ID NO: 2559672 - RNA, 19 nt, Homo sapiens
  misc_RNA (1)...(19): siRNA sense strand
aaacagaagggaagaaaca

SEQ ID NO: 2559673 - RNA, 19 nt, Homo sapiens
  misc_RNA (1)...(19): siRNA sense strand
ucaucaaaccugaggaaga

SEQ ID NO: 2559674 - RNA, 19 nt, Homo sapiens
  misc_RNA (1)...(19): siRNA sense strand
aggaagaggaagaggagga

SEQ ID NO: 2559675 - RNA, 19 nt, Homo sapiens
  misc_RNA (1)...(19): siRNA sense strand
aggaagaggaggaggagga

SEQ ID NO: 2559676 - RNA, 19 nt, Homo sapiens
  misc_RNA (1)...(19): siRNA sense strand
aggaggaagaagaggaaga

SEQ ID NO: 2559677 - RNA, 19 nt, Homo sapiens
  misc_RNA (1)...(19): siRNA sense strand
cguaaacgcaggaggauca

SEQ ID NO: 2559678 - RNA, 19 nt, Homo sapiens
  misc_RNA (1)...(19): siRNA sense strand
aggaggaggaggaggaaga

SEQ ID NO: 2559679 - RNA, 19 nt, Homo sapiens
  misc_RNA (1)...(19): siRNA sense strand
aggaggaggaagaggaaga

SEQ ID NO: 2559680 - RNA, 19 nt, Homo sapiens
  misc_RNA (1)...(19): siRNA sense strand
ccgaaguggagaaggaaga

SEQ ID NO: 2559681 - RNA, 19 nt, Homo sapiens
  misc_RNA (1)...(19): siRNA sense strand
ggaagaagaagaaggagga

SEQ ID NO: 2559682 - RNA, 19 nt, Homo sapiens
  misc_RNA (1)...(19): siRNA sense strand
gggagaaaauagaguguga

SEQ ID NO: 2559683 - RNA, 19 nt, Homo sapiens
  misc_RNA (1)...(19): siRNA sense strand
cgacaagagagauggcaga

SEQ ID NO: 2559684 - RNA, 19 nt, Homo sapiens
  misc_RNA (1)...(19): siRNA sense strand
ccaaaagggauguggauuu

SEQ ID NO: 2559685 - RNA, 19 nt, Homo sapiens
  misc_RNA (1)...(19): siRNA sense strand
caagcuagcugcugggaga

SEQ ID NO: 2559686 - RNA, 19 nt, Homo sapiens
  misc_RNA (1)...(19): siRNA sense strand
aagaagaagaggaggagga

SEQ ID NO: 2559687 - RNA, 19 nt, Homo sapiens
  misc_RNA (1)...(19): siRNA sense strand
aagaagaggaggaggagga

SEQ ID NO: 2559688 - RNA, 19 nt, Homo sapiens
  misc_RNA (1)...(19): siRNA sense strand
aggaggaggaagaggauga

SEQ ID NO: 2559689 - RNA, 19 nt, Homo sapiens
  misc_RNA (1)...(19): siRNA sense strand
ccaaaucagcccagaucaa

SEQ ID NO: 2559690 - RNA, 19 nt, Homo sapiens
  misc_RNA (1)...(19): siRNA sense strand
aagaggaagaagaggaaga

SEQ ID NO: 2559691 - RNA, 19 nt, Homo sapiens
  misc_RNA (1)...(19): siRNA sense strand
gggaaggacucaagcagca

SEQ ID NO: 2559692 - RNA, 19 nt, Homo sapiens
  misc_RNA (1)...(19): siRNA sense strand
uaaagagagcagugaagaa

SEQ ID NO: 2559693 - RNA, 19 nt, Homo sapiens
  misc_RNA (1)...(19): siRNA sense strand
augaagaggaggaagaaga

SEQ ID NO: 2559694 - RNA, 19 nt, Homo sapiens
  misc_RNA (1)...(19): siRNA sense strand
aagaaagugcagauguaaa

SEQ ID NO: 2559695 - RNA, 19 nt, Homo sapiens
  misc_RNA (1)...(19): siRNA sense strand
gaaaagacaaacagaggaa

SEQ ID NO: 2559696 - RNA, 19 nt, Homo sapiens
  misc_RNA (1)...(19): siRNA sense strand
ggaagaagaggaaggggaa

SEQ ID NO: 2559697 - RNA, 19 nt, Homo sapiens
  misc_RNA (1)...(19): siRNA sense strand
agaagaagaaggaggagga

SEQ ID NO: 2559698 - RNA, 19 nt, Homo sapiens
  misc_RNA (1)...(19): siRNA sense strand
agucguagacaguggauuu

SEQ ID NO: 2559699 - RNA, 19 nt, Homo sapiens
  misc_RNA (1)...(19): siRNA sense strand
cgaaugggucagagugauu

SEQ ID NO: 2559700 - RNA, 19 nt, Homo sapiens
  misc_RNA (1)...(19): siRNA sense strand
cgccuuacccacaggaaua

SEQ ID NO: 2559701 - RNA, 19 nt, Homo sapiens
  misc_RNA (1)...(19): siRNA sense strand
agagcgagaagcugagaaa

SEQ ID NO: 2559702 - RNA, 19 nt, Homo sapiens
  misc_RNA (1)...(19): siRNA sense strand
gagaaggaggaacaagaaa

SEQ ID NO: 2559703 - RNA, 19 nt, Homo sapiens
  misc_RNA (1)...(19): siRNA sense strand
acaaacagaggaagaggaa

SEQ ID NO: 2559704 - RNA, 19 nt, Homo sapiens
  misc_RNA (1)...(19): siRNA sense strand
ggcaaaacaaagagaggaa

SEQ ID NO: 2559705 - RNA, 19 nt, Homo sapiens
  misc_RNA (1)...(19): siRNA sense strand
agguaacaguggaagaaca

SEQ ID NO: 2559706 - RNA, 19 nt, Homo sapiens
  misc_RNA (1)...(19): siRNA sense strand
gaggaggaggucaaggaaa

SEQ ID NO: 2559707 - RNA, 19 nt, Homo sapiens
  misc_RNA (1)...(19): siRNA sense strand
ggccaaacgcgcugugaau

SEQ ID NO: 2559708 - RNA, 19 nt, Homo sapiens
  misc_RNA (1)...(19): siRNA sense strand
agaaagugcagauguaaau

SEQ ID NO: 2559709 - RNA, 19 nt, Homo sapiens
  misc_RNA (1)...(19): siRNA sense strand
gaagaaaaggggucguaaa

SEQ ID NO: 2559710 - RNA, 19 nt, Homo sapiens
  misc_RNA (1)...(19): siRNA sense strand
ccaaugaacuugauccaga

SEQ ID NO: 2559711 - RNA, 19 nt, Homo sapiens
  misc_RNA (1)...(19): siRNA sense strand
cugccgaaguggagaagga

SEQ ID NO: 2559712 - RNA, 19 nt, Homo sapiens
  misc_RNA (1)...(19): siRNA sense strand
gcacaggaugcuaggcaga

SEQ ID NO: 2559713 - RNA, 19 nt, Homo sapiens
  misc_RNA (1)...(19): siRNA sense strand
cugaagaggauuuggaugu

SEQ ID NO: 2559714 - RNA, 19 nt, Homo sapiens
  misc_RNA (1)...(19): siRNA sense strand
gaaaauagagugugagagu

SEQ ID NO: 2559715 - RNA, 19 nt, Homo sapiens
  misc_RNA (1)...(19): siRNA sense strand
uauuugagguugaugggaa

SEQ ID NO: 2559716 - RNA, 19 nt, Homo sapiens
  misc_RNA (1)...(19): siRNA sense strand
guggauucuugaagcuaua

SEQ ID NO: 2559717 - RNA, 19 nt, Homo sapiens
  misc_RNA (1)...(19): siRNA sense strand
agaaggaggaacaagaaau

SEQ ID NO: 2559718 - RNA, 19 nt, Homo sapiens
  misc_RNA (1)...(19): siRNA sense strand
ggaacaaauacaugagcaa

SEQ ID NO: 2559719 - RNA, 19 nt, Homo sapiens
  misc_RNA (1)...(19): siRNA sense strand
ggaagaaguaugugggcuu

SEQ ID NO: 2559720 - RNA, 19 nt, Homo sapiens
  misc_RNA (1)...(19): siRNA sense strand
cugcauaugcgaagaacaa

SEQ ID NO: 2559721 - RNA, 19 nt, Homo sapiens
  misc_RNA (1)...(19): siRNA sense strand
ccucagaagaagaagaaga

SEQ ID NO: 2559722 - RNA, 19 nt, Homo sapiens
  misc_RNA (1)...(19): siRNA sense strand
aacagauacuggagggaua

SEQ ID NO: 2559723 - RNA, 19 nt, Homo sapiens
  misc_RNA (1)...(19): siRNA sense strand
ccuacgagcaguugagcaa

SEQ ID NO: 2559724 - RNA, 19 nt, Homo sapiens
  misc_RNA (1)...(19): siRNA sense strand
aaggagaagaugaggaaga

SEQ ID NO: 2559725 - RNA, 19 nt, Homo sapiens
  misc_RNA (1)...(19): siRNA sense strand
ggaagaugagccaggaaau

SEQ ID NO: 2559726 - RNA, 19 nt, Homo sapiens
  misc_RNA (1)...(19): siRNA sense strand
gggaaauugcagaagccua

SEQ ID NO: 2559727 - RNA, 19 nt, Homo sapiens
  misc_RNA (1)...(19): siRNA sense strand
gcaucaggaagaaggcaaa

SEQ ID NO: 2559728 - RNA, 19 nt, Homo sapiens
  misc_RNA (1)...(19): siRNA sense strand
acgagaagcaugugagcau

SEQ ID NO: 2559729 - RNA, 19 nt, Homo sapiens
  misc_RNA (1)...(19): siRNA sense strand
acugcaaagucgaggugua

SEQ ID NO: 2559730 - RNA, 19 nt, Homo sapiens
  misc_RNA (1)...(19): siRNA sense strand
gcaaaggaagccugggaga

SEQ ID NO: 2559731 - RNA, 19 nt, Homo sapiens
  misc_RNA (1)...(19): siRNA sense strand
gagaggaaguccaggccau

SEQ ID NO: 2559732 - RNA, 19 nt, Homo sapiens
  misc_RNA (1)...(19): siRNA sense strand
cagaagaagaagaagacca

SEQ ID NO: 2559733 - RNA, 19 nt, Homo sapiens
  misc_RNA (1)...(19): siRNA sense strand
uugaagaaagaucgaguua

SEQ ID NO: 2559734 - RNA, 19 nt, Homo sapiens
  misc_RNA (1)...(19): siRNA sense strand
uggcauugcugcagaaaau

SEQ ID NO: 2559735 - RNA, 19 nt, Homo sapiens
  misc_RNA (1)...(19): siRNA sense strand
aguaugaagccgaaaucaa

SEQ ID NO: 2559736 - RNA, 19 nt, Homo sapiens
  misc_RNA (1)...(19): siRNA sense strand
agugaaacucggagacuuu

SEQ ID NO: 2559737 - RNA, 19 nt, Homo sapiens
  misc_RNA (1)...(19): siRNA sense strand
agcaagaaucugaggccua

SEQ ID NO: 2559738 - RNA, 19 nt, Homo sapiens
  misc_RNA (1)...(19): siRNA sense strand
ggaagaaggcaaagagcag

SEQ ID NO: 2559739 - RNA, 19 nt, Homo sapiens
  misc_RNA (1)...(19): siRNA sense strand
cauugcaaccaucgagaaa

SEQ ID NO: 2559740 - RNA, 19 nt, Homo sapiens
  misc_RNA (1)...(19): siRNA sense strand
acugaaugguaaaugguau

SEQ ID NO: 2559741 - RNA, 19 nt, Homo sapiens
  misc_RNA (1)...(19): siRNA sense strand
ucgagaaagagaugcggaa

SEQ ID NO: 2559742 - RNA, 19 nt, Homo sapiens
  misc_RNA (1)...(19): siRNA sense strand
ggagaagaugaggaagaaa

SEQ ID NO: 2559743 - RNA, 19 nt, Homo sapiens
  misc_RNA (1)...(19): siRNA sense strand
ggacagugaaacucggaga

SEQ ID NO: 2559744 - RNA, 19 nt, Homo sapiens
  misc_RNA (1)...(19): siRNA sense strand
uugcaaccaucgagaaaga

SEQ ID NO: 2559745 - RNA, 19 nt, Homo sapiens
  misc_RNA (1)...(19): siRNA sense strand
ccagaaugugcuaagguuu

SEQ ID NO: 2559746 - RNA, 19 nt, Homo sapiens
  misc_RNA (1)...(19): siRNA sense strand
cugaaugguaaaugguauu

SEQ ID NO: 2559747 - RNA, 19 nt, Homo sapiens
  misc_RNA (1)...(19): siRNA sense strand
gccgaaaucaacagagaca

SEQ ID NO: 2559748 - RNA, 19 nt, Homo sapiens
  misc_RNA (1)...(19): siRNA sense strand
gguucaagcaguggaagaa

SEQ ID NO: 2559749 - RNA, 19 nt, Homo sapiens
  misc_RNA (1)...(19): siRNA sense strand
ucagaaaaguuguggagca

SEQ ID NO: 2559750 - RNA, 19 nt, Homo sapiens
  misc_RNA (1)...(19): siRNA sense strand
uuaccaacgucgagaugau

SEQ ID NO: 2559751 - RNA, 19 nt, Homo sapiens
  misc_RNA (1)...(19): siRNA sense strand
agaaauggagcaucaggaa

SEQ ID NO: 2559752 - RNA, 19 nt, Homo sapiens
  misc_RNA (1)...(19): siRNA sense strand
ccaagauccugguggucca

SEQ ID NO: 2559753 - RNA, 19 nt, Homo sapiens
  misc_RNA (1)...(19): siRNA sense strand
ccuaccgaggcguggaaua

SEQ ID NO: 2559754 - RNA, 19 nt, Homo sapiens
  misc_RNA (1)...(19): siRNA sense strand
cagaaaaguuguggagcau

SEQ ID NO: 2559755 - RNA, 19 nt, Homo sapiens
  misc_RNA (1)...(19): siRNA sense strand
ggaacagcugugaaggaga

SEQ ID NO: 2559756 - RNA, 19 nt, Homo sapiens
  misc_RNA (1)...(19): siRNA sense strand
aacaaauacaugagcaaca

SEQ ID NO: 2559757 - RNA, 19 nt, Homo sapiens
  misc_RNA (1)...(19): siRNA sense strand
aagccgaaaucaacagaga

SEQ ID NO: 2559758 - RNA, 19 nt, Homo sapiens
  misc_RNA (1)...(19): siRNA sense strand
auggauugggacagugaaa

SEQ ID NO: 2559759 - RNA, 19 nt, Homo sapiens
  misc_RNA (1)...(19): siRNA sense strand
aaucugaggccuacgagaa

SEQ ID NO: 2559760 - RNA, 19 nt, Homo sapiens
  misc_RNA (1)...(19): siRNA sense strand
gggucaggugcuaguaauu

SEQ ID NO: 2559761 - RNA, 19 nt, Homo sapiens
  misc_RNA (1)...(19): siRNA sense strand
aaaggaagccugggagaau

SEQ ID NO: 2559762 - RNA, 19 nt, Homo sapiens
  misc_RNA (1)...(19): siRNA sense strand
ggauugggacagugaaacu

SEQ ID NO: 2559763 - RNA, 19 nt, Homo sapiens
  misc_RNA (1)...(19): siRNA sense strand
cgaaaucaacagagacaac

SEQ ID NO: 2559764 - RNA, 19 nt, Homo sapiens
  misc_RNA (1)...(19): siRNA sense strand
ugggagaaucacagguuga

SEQ ID NO: 2559765 - RNA, 19 nt, Homo sapiens
  misc_RNA (1)...(19): siRNA sense strand
ccagucuacuucagggaga

SEQ ID NO: 2559766 - RNA, 19 nt, Homo sapiens
  misc_RNA (1)...(19): siRNA sense strand
acuugcagcugauggaaaa

SEQ ID NO: 2559767 - RNA, 19 nt, Homo sapiens
  misc_RNA (1)...(19): siRNA sense strand
gacuuggaaaccugggaaa

SEQ ID NO: 2559768 - RNA, 19 nt, Homo sapiens
  misc_RNA (1)...(19): siRNA sense strand
ugguucaagcaguggaaga

SEQ ID NO: 2559769 - RNA, 19 nt, Homo sapiens
  misc_RNA (1)...(19): siRNA sense strand
cagcugugaaggagaagau

SEQ ID NO: 2559770 - RNA, 19 nt, Homo sapiens
  misc_RNA (1)...(19): siRNA sense strand
gcugugaaggagaagauga

SEQ ID NO: 2559771 - RNA, 19 nt, Homo sapiens
  misc_RNA (1)...(19): siRNA sense strand
auggaacagcugacauaaa

SEQ ID NO: 2559772 - RNA, 19 nt, Homo sapiens
  misc_RNA (1)...(19): siRNA sense strand
cugcaaagucgagguguau

SEQ ID NO: 2559773 - RNA, 19 nt, Homo sapiens
  misc_RNA (1)...(19): siRNA sense strand
aggaagaaggcaaagagca

SEQ ID NO: 2559774 - RNA, 19 nt, Homo sapiens
  misc_RNA (1)...(19): siRNA sense strand
ggaacaaauacaugagcaa

SEQ ID NO: 2559775 - RNA, 19 nt, Homo sapiens
  misc_RNA (1)...(19): siRNA sense strand
ggaagaaguaugugggcuu

SEQ ID NO: 2559776 - RNA, 19 nt, Homo sapiens
  misc_RNA (1)...(19): siRNA sense strand
cugcauaugcgaagaacaa

SEQ ID NO: 2559777 - RNA, 19 nt, Homo sapiens
  misc_RNA (1)...(19): siRNA sense strand
ccucagaagaagaagaaga

SEQ ID NO: 2559778 - RNA, 19 nt, Homo sapiens
  misc_RNA (1)...(19): siRNA sense strand
aacagauacuggagggaua

SEQ ID NO: 2559779 - RNA, 19 nt, Homo sapiens
  misc_RNA (1)...(19): siRNA sense strand
ccuacgagcaguugagcaa

SEQ ID NO: 2559780 - RNA, 19 nt, Homo sapiens
  misc_RNA (1)...(19): siRNA sense strand
aaggagaagaugaggaaga

SEQ ID NO: 2559781 - RNA, 19 nt, Homo sapiens
  misc_RNA (1)...(19): siRNA sense strand
ggaagaugagccaggaaau

SEQ ID NO: 2559782 - RNA, 19 nt, Homo sapiens
  misc_RNA (1)...(19): siRNA sense strand
gggaaauugcagaagccua

SEQ ID NO: 2559783 - RNA, 19 nt, Homo sapiens
  misc_RNA (1)...(19): siRNA sense strand
gcaucaggaagaaggcaaa

SEQ ID NO: 2559784 - RNA, 19 nt, Homo sapiens
  misc_RNA (1)...(19): siRNA sense strand
acgagaagcaugugagcau

SEQ ID NO: 2559785 - RNA, 19 nt, Homo sapiens
  misc_RNA (1)...(19): siRNA sense strand
acugcaaagucgaggugua

SEQ ID NO: 2559786 - RNA, 19 nt, Homo sapiens
  misc_RNA (1)...(19): siRNA sense strand
gcaaaggaagccugggaga

SEQ ID NO: 2559787 - RNA, 19 nt, Homo sapiens
  misc_RNA (1)...(19): siRNA sense strand
gagaggaaguccaggccau

SEQ ID NO: 2559788 - RNA, 19 nt, Homo sapiens
  misc_RNA (1)...(19): siRNA sense strand
cagaagaagaagaagacca

SEQ ID NO: 2559789 - RNA, 19 nt, Homo sapiens
  misc_RNA (1)...(19): siRNA sense strand
uugaagaaagaucgaguua

SEQ ID NO: 2559790 - RNA, 19 nt, Homo sapiens
  misc_RNA (1)...(19): siRNA sense strand
uggcauugcugcagaaaau

SEQ ID NO: 2559791 - RNA, 19 nt, Homo sapiens
  misc_RNA (1)...(19): siRNA sense strand
aguaugaagccgaaaucaa

SEQ ID NO: 2559792 - RNA, 19 nt, Homo sapiens
  misc_RNA (1)...(19): siRNA sense strand
agugaaacucggagacuuu

SEQ ID NO: 2559793 - RNA, 19 nt, Homo sapiens
  misc_RNA (1)...(19): siRNA sense strand
agcaagaaucugaggccua

SEQ ID NO: 2559794 - RNA, 19 nt, Homo sapiens
  misc_RNA (1)...(19): siRNA sense strand
ggaagaaggcaaagagcag

SEQ ID NO: 2559795 - RNA, 19 nt, Homo sapiens
  misc_RNA (1)...(19): siRNA sense strand
cauugcaaccaucgagaaa

SEQ ID NO: 2559796 - RNA, 19 nt, Homo sapiens
  misc_RNA (1)...(19): siRNA sense strand
acugaaugguaaaugguau

SEQ ID NO: 2559797 - RNA, 19 nt, Homo sapiens
  misc_RNA (1)...(19): siRNA sense strand
ucgagaaagagaugcggaa

SEQ ID NO: 2559798 - RNA, 19 nt, Homo sapiens
  misc_RNA (1)...(19): siRNA sense strand
ggagaagaugaggaagaaa

SEQ ID NO: 2559799 - RNA, 19 nt, Homo sapiens
  misc_RNA (1)...(19): siRNA sense strand
ggacagugaaacucggaga

SEQ ID NO: 2559800 - RNA, 19 nt, Homo sapiens
  misc_RNA (1)...(19): siRNA sense strand
uugcaaccaucgagaaaga

SEQ ID NO: 2559801 - RNA, 19 nt, Homo sapiens
  misc_RNA (1)...(19): siRNA sense strand
ccagaaugugcuaagguuu

SEQ ID NO: 2559802 - RNA, 19 nt, Homo sapiens
  misc_RNA (1)...(19): siRNA sense strand
cugaaugguaaaugguauu

SEQ ID NO: 2559803 - RNA, 19 nt, Homo sapiens
  misc_RNA (1)...(19): siRNA sense strand
gccgaaaucaacagagaca

SEQ ID NO: 2559804 - RNA, 19 nt, Homo sapiens
  misc_RNA (1)...(19): siRNA sense strand
gguucaagcaguggaagaa

SEQ ID NO: 2559805 - RNA, 19 nt, Homo sapiens
  misc_RNA (1)...(19): siRNA sense strand
ucagaaaaguuguggagca

SEQ ID NO: 2559806 - RNA, 19 nt, Homo sapiens
  misc_RNA (1)...(19): siRNA sense strand
uuaccaacgucgagaugau

SEQ ID NO: 2559807 - RNA, 19 nt, Homo sapiens
  misc_RNA (1)...(19): siRNA sense strand
agaaauggagcaucaggaa

SEQ ID NO: 2559808 - RNA, 19 nt, Homo sapiens
  misc_RNA (1)...(19): siRNA sense strand
ccaagauccugguggucca

SEQ ID NO: 2559809 - RNA, 19 nt, Homo sapiens
  misc_RNA (1)...(19): siRNA sense strand
ccuaccgaggcguggaaua

SEQ ID NO: 2559810 - RNA, 19 nt, Homo sapiens
  misc_RNA (1)...(19): siRNA sense strand
cagaaaaguuguggagcau

SEQ ID NO: 2559811 - RNA, 19 nt, Homo sapiens
  misc_RNA (1)...(19): siRNA sense strand
ggaacagcugugaaggaga

SEQ ID NO: 2559812 - RNA, 19 nt, Homo sapiens
  misc_RNA (1)...(19): siRNA sense strand
aacaaauacaugagcaaca

SEQ ID NO: 2559813 - RNA, 19 nt, Homo sapiens
  misc_RNA (1)...(19): siRNA sense strand
aagccgaaaucaacagaga

SEQ ID NO: 2559814 - RNA, 19 nt, Homo sapiens
  misc_RNA (1)...(19): siRNA sense strand
auggauugggacagugaaa

SEQ ID NO: 2559815 - RNA, 19 nt, Homo sapiens
  misc_RNA (1)...(19): siRNA sense strand
aaucugaggccuacgagaa

SEQ ID NO: 2559816 - RNA, 19 nt, Homo sapiens
  misc_RNA (1)...(19): siRNA sense strand
gggucaggugcuaguaauu

SEQ ID NO: 2559817 - RNA, 19 nt, Homo sapiens
  misc_RNA (1)...(19): siRNA sense strand
aaaggaagccugggagaau

SEQ ID NO: 2559818 - RNA, 19 nt, Homo sapiens
  misc_RNA (1)...(19): siRNA sense strand
ggauugggacagugaaacu

SEQ ID NO: 2559819 - RNA, 19 nt, Homo sapiens
  misc_RNA (1)...(19): siRNA sense strand
cgaaaucaacagagacaac

SEQ ID NO: 2559820 - RNA, 19 nt, Homo sapiens
  misc_RNA (1)...(19): siRNA sense strand
ugggagaaucacagguuga

SEQ ID NO: 2559821 - RNA, 19 nt, Homo sapiens
  misc_RNA (1)...(19): siRNA sense strand
ccagucuacuucagggaga

SEQ ID NO: 2559822 - RNA, 19 nt, Homo sapiens
  misc_RNA (1)...(19): siRNA sense strand
acuugcagcugauggaaaa

SEQ ID NO: 2559823 - RNA, 19 nt, Homo sapiens
  misc_RNA (1)...(19): siRNA sense strand
gacuuggaaaccugggaaa

SEQ ID NO: 2559824 - RNA, 19 nt, Homo sapiens
  misc_RNA (1)...(19): siRNA sense strand
ugguucaagcaguggaaga

SEQ ID NO: 2559825 - RNA, 19 nt, Homo sapiens
  misc_RNA (1)...(19): siRNA sense strand
cagcugugaaggagaagau

SEQ ID NO: 2559826 - RNA, 19 nt, Homo sapiens
  misc_RNA (1)...(19): siRNA sense strand
gcugugaaggagaagauga

SEQ ID NO: 2559827 - RNA, 19 nt, Homo sapiens
  misc_RNA (1)...(19): siRNA sense strand
auggaacagcugacauaaa

SEQ ID NO: 2559828 - RNA, 19 nt, Homo sapiens
  misc_RNA (1)...(19): siRNA sense strand
cugcaaagucgagguguau

SEQ ID NO: 2559829 - RNA, 19 nt, Homo sapiens
  misc_RNA (1)...(19): siRNA sense strand
aggaagaaggcaaagagca

SEQ ID NO: 2559830 - RNA, 19 nt, Homo sapiens
  misc_RNA (1)...(19): siRNA sense strand
agaucgaggagcugaagaa

SEQ ID NO: 2559831 - RNA, 19 nt, Homo sapiens
  misc_RNA (1)...(19): siRNA sense strand
cagcaagacgggagcgagu

SEQ ID NO: 2559832 - RNA, 19 nt, Homo sapiens
  misc_RNA (1)...(19): siRNA sense strand
gggaguugcgccagaccaa

SEQ ID NO: 2559833 - RNA, 19 nt, Homo sapiens
  misc_RNA (1)...(19): siRNA sense strand
auggaggacaggugacaua

SEQ ID NO: 2559834 - RNA, 19 nt, Homo sapiens
  misc_RNA (1)...(19): siRNA sense strand
acaacgagcuccugaggca

SEQ ID NO: 2559835 - RNA, 19 nt, Homo sapiens
  misc_RNA (1)...(19): siRNA sense strand
acaggaacacagaggacga

SEQ ID NO: 2559836 - RNA, 19 nt, Homo sapiens
  misc_RNA (1)...(19): siRNA sense strand
cgagaugagaggagaagag

SEQ ID NO: 2559837 - RNA, 19 nt, Homo sapiens
  misc_RNA (1)...(19): siRNA sense strand
acaaagaaauauggggaaa

SEQ ID NO: 2559838 - RNA, 19 nt, Homo sapiens
  misc_RNA (1)...(19): siRNA sense strand
ccuucagaaucgaaaucaa

SEQ ID NO: 2559839 - RNA, 19 nt, Homo sapiens
  misc_RNA (1)...(19): siRNA sense strand
acccaaacaucgacgaaaa

SEQ ID NO: 2559840 - RNA, 19 nt, Homo sapiens
  misc_RNA (1)...(19): siRNA sense strand
caaagaaauauggggaaaa

SEQ ID NO: 2559841 - RNA, 19 nt, Homo sapiens
  misc_RNA (1)...(19): siRNA sense strand
gccaguaauuagugccgaa

SEQ ID NO: 2559842 - RNA, 19 nt, Homo sapiens
  misc_RNA (1)...(19): siRNA sense strand
acaaagaucuaucacccaa

SEQ ID NO: 2559843 - RNA, 19 nt, Homo sapiens
  misc_RNA (1)...(19): siRNA sense strand
cugaccuagcugaagaaua

SEQ ID NO: 2559844 - RNA, 19 nt, Homo sapiens
  misc_RNA (1)...(19): siRNA sense strand
cgcaaaugugggaugaaaa

SEQ ID NO: 2559845 - RNA, 19 nt, Homo sapiens
  misc_RNA (1)...(19): siRNA sense strand
augcugaagaguuuacaaa

SEQ ID NO: 2559846 - RNA, 19 nt, Homo sapiens
  misc_RNA (1)...(19): siRNA sense strand
augaaggagcuugaagaaa

SEQ ID NO: 2559847 - RNA, 19 nt, Homo sapiens
  misc_RNA (1)...(19): siRNA sense strand
gaagaauacucuaaggacc

SEQ ID NO: 2559848 - RNA, 19 nt, Homo sapiens
  misc_RNA (1)...(19): siRNA sense strand
ccuucagaaucgaaaucaa

SEQ ID NO: 2559849 - RNA, 19 nt, Homo sapiens
  misc_RNA (1)...(19): siRNA sense strand
acccaaacaucgacgaaaa

SEQ ID NO: 2559850 - RNA, 19 nt, Homo sapiens
  misc_RNA (1)...(19): siRNA sense strand
gccaguaauuagugccgaa

SEQ ID NO: 2559851 - RNA, 19 nt, Homo sapiens
  misc_RNA (1)...(19): siRNA sense strand
acaaagaucuaucacccaa

SEQ ID NO: 2559852 - RNA, 19 nt, Homo sapiens
  misc_RNA (1)...(19): siRNA sense strand
cgcaaaugugggaugaaaa

SEQ ID NO: 2559853 - RNA, 19 nt, Homo sapiens
  misc_RNA (1)...(19): siRNA sense strand
augaaggagcuugaagaaa

SEQ ID NO: 2559854 - RNA, 19 nt, Homo sapiens
  misc_RNA (1)...(19): siRNA sense strand
ccuaaagaacccagacaga

SEQ ID NO: 2559855 - RNA, 19 nt, Homo sapiens
  misc_RNA (1)...(19): siRNA sense strand
acugauaagaagauagcua

SEQ ID NO: 2559856 - RNA, 19 nt, Homo sapiens
  misc_RNA (1)...(19): siRNA sense strand
caaaauugugacugagaaa

SEQ ID NO: 2559857 - RNA, 19 nt, Homo sapiens
  misc_RNA (1)...(19): siRNA sense strand
agaaaguauccgucgcaua

SEQ ID NO: 2559858 - RNA, 19 nt, Homo sapiens
  misc_RNA (1)...(19): siRNA sense strand
ccaucaaggaccuaaagaa

SEQ ID NO: 2559859 - RNA, 19 nt, Homo sapiens
  misc_RNA (1)...(19): siRNA sense strand
acaagaaaccuaaagugua

SEQ ID NO: 2559860 - RNA, 19 nt, Homo sapiens
  misc_RNA (1)...(19): siRNA sense strand
caagaaaccuaaaguguag

SEQ ID NO: 2559861 - RNA, 19 nt, Homo sapiens
  misc_RNA (1)...(19): siRNA sense strand
uuggaauggaccagagaau

SEQ ID NO: 2559862 - RNA, 19 nt, Homo sapiens
  misc_RNA (1)...(19): siRNA sense strand
agagguagcaacagcgauu

SEQ ID NO: 2559863 - RNA, 19 nt, Homo sapiens
  misc_RNA (1)...(19): siRNA sense strand
agaaucaaugcguggaauu

SEQ ID NO: 2559864 - RNA, 19 nt, Homo sapiens
  misc_RNA (1)...(19): siRNA sense strand
uguagaagagguagcaaca

SEQ ID NO: 2559865 - RNA, 19 nt, Homo sapiens
  misc_RNA (1)...(19): siRNA sense strand
ugggacauguuuaaggaau

SEQ ID NO: 2559866 - RNA, 19 nt, Homo sapiens
  misc_RNA (1)...(19): siRNA sense strand
ggaccagagaauuggaaac

SEQ ID NO: 2559867 - RNA, 19 nt, Homo sapiens
  misc_RNA (1)...(19): siRNA sense strand
cguuauuggcagcagguca

SEQ ID NO: 2559868 - RNA, 19 nt, Homo sapiens
  misc_RNA (1)...(19): siRNA sense strand
caucaaggaccuaaagaac

SEQ ID NO: 2559869 - RNA, 19 nt, Homo sapiens
  misc_RNA (1)...(19): siRNA sense strand
gacuaaaagaagugguaga

SEQ ID NO: 2559870 - RNA, 19 nt, Homo sapiens
  misc_RNA (1)...(19): siRNA sense strand
ugugaauacuccaacaaaa

SEQ ID NO: 2559871 - RNA, 19 nt, Homo sapiens
  misc_RNA (1)...(19): siRNA sense strand
guauaugagcacuggguuc

SEQ ID NO: 2559872 - RNA, 19 nt, Homo sapiens
  misc_RNA (1)...(19): siRNA sense strand
ccagagaauaagcagcauu

SEQ ID NO: 2559873 - RNA, 19 nt, Homo sapiens
  misc_RNA (1)...(19): siRNA sense strand
cugagugggacauguuuaa

SEQ ID NO: 2559874 - RNA, 19 nt, Homo sapiens
  misc_RNA (1)...(19): siRNA sense strand
caagaaucaaugcguggaa

SEQ ID NO: 2559875 - RNA, 19 nt, Homo sapiens
  misc_RNA (1)...(19): siRNA sense strand
ggaugaaacuccagagggc

SEQ ID NO: 2559876 - RNA, 19 nt, Homo sapiens
  misc_RNA (1)...(19): siRNA sense strand
agauccaccuaacaagaaa

SEQ ID NO: 2559877 - RNA, 19 nt, Homo sapiens
  misc_RNA (1)...(19): siRNA sense strand
cugauaagaagauagcuau

SEQ ID NO: 2559878 - RNA, 19 nt, Homo sapiens
  misc_RNA (1)...(19): siRNA sense strand
aggugcacaucuacauaua

SEQ ID NO: 2559879 - RNA, 19 nt, Homo sapiens
  misc_RNA (1)...(19): siRNA sense strand
gcacuagacuaaaggagga

SEQ ID NO: 2559880 - RNA, 19 nt, Homo sapiens
  misc_RNA (1)...(19): siRNA sense strand
agaagagauguuagguaaa

SEQ ID NO: 2559881 - RNA, 19 nt, Homo sapiens
  misc_RNA (1)...(19): siRNA sense strand
agggagaagaggaguguuu

SEQ ID NO: 2559882 - RNA, 19 nt, Homo sapiens
  misc_RNA (1)...(19): siRNA sense strand
cugaacuagaugaagaaua

SEQ ID NO: 2559883 - RNA, 19 nt, Homo sapiens
  misc_RNA (1)...(19): siRNA sense strand
agggaaaugaacaguuuaa

SEQ ID NO: 2559884 - RNA, 19 nt, Homo sapiens
  misc_RNA (1)...(19): siRNA sense strand
gagauuauauagaagcuga

SEQ ID NO: 2559885 - RNA, 19 nt, Homo sapiens
  misc_RNA (1)...(19): siRNA sense strand
agaagagaagagagcacua

SEQ ID NO: 2559886 - RNA, 19 nt, Homo sapiens
  misc_RNA (1)...(19): siRNA sense strand
cggaugaagagaaacagaa

SEQ ID NO: 2559887 - RNA, 19 nt, Homo sapiens
  misc_RNA (1)...(19): siRNA sense strand
gggagaagucagagaacug

SEQ ID NO: 2559888 - RNA, 19 nt, Homo sapiens
  misc_RNA (1)...(19): siRNA sense strand
caaggaugaaacaggacaa

SEQ ID NO: 2559889 - RNA, 19 nt, Homo sapiens
  misc_RNA (1)...(19): siRNA sense strand
ugucggaugaagagaaaca

SEQ ID NO: 2559890 - RNA, 19 nt, Homo sapiens
  misc_RNA (1)...(19): siRNA sense strand
agaagagagcacuagacua

SEQ ID NO: 2559891 - RNA, 19 nt, Homo sapiens
  misc_RNA (1)...(19): siRNA sense strand
acaagaaagaaauggccau

SEQ ID NO: 2559892 - RNA, 19 nt, Homo sapiens
  misc_RNA (1)...(19): siRNA sense strand
auuaaaagaucuugggaac

SEQ ID NO: 2559893 - RNA, 19 nt, Homo sapiens
  misc_RNA (1)...(19): siRNA sense strand
ccaucaauuucguucaaaa

SEQ ID NO: 2559894 - RNA, 19 nt, Homo sapiens
  misc_RNA (1)...(19): siRNA sense strand
cagcaaggaugaaacagga

SEQ ID NO: 2559895 - RNA, 19 nt, Homo sapiens
  misc_RNA (1)...(19): siRNA sense strand
auauagaagcugaaaguuc

SEQ ID NO: 2559896 - RNA, 19 nt, Homo sapiens
  misc_RNA (1)...(19): siRNA sense strand
uguaugagaagacggacaa

SEQ ID NO: 2559897 - RNA, 19 nt, Homo sapiens
  misc_RNA (1)...(19): siRNA sense strand
cagcuauaucagggcaaua

SEQ ID NO: 2559898 - RNA, 19 nt, Homo sapiens
  misc_RNA (1)...(19): siRNA sense strand
ccaucaauacaucaagcaa

SEQ ID NO: 2559899 - RNA, 19 nt, Homo sapiens
  misc_RNA (1)...(19): siRNA sense strand
caguuuaagaaaggagauu

SEQ ID NO: 2559900 - RNA, 19 nt, Homo sapiens
  misc_RNA (1)...(19): siRNA sense strand
gaaacagaaaagaagagaa

SEQ ID NO: 2559901 - RNA, 19 nt, Homo sapiens
  misc_RNA (1)...(19): siRNA sense strand
cggacaagcuagaugaagc

SEQ ID NO: 2559902 - RNA, 19 nt, Homo sapiens
  misc_RNA (1)...(19): siRNA sense strand
agaguaagcugcucaggga

SEQ ID NO: 2559903 - RNA, 19 nt, Homo sapiens
  misc_RNA (1)...(19): siRNA sense strand
uuguaugagaagacggaca

SEQ ID NO: 2559904 - RNA, 19 nt, Homo sapiens
  misc_RNA (1)...(19): siRNA sense strand
acaucaagcaagagaagcu

SEQ ID NO: 2559905 - RNA, 19 nt, Homo sapiens
  misc_RNA (1)...(19): siRNA sense strand
gacuaaaagaagagauguu

SEQ ID NO: 2559906 - RNA, 19 nt, Homo sapiens
  misc_RNA (1)...(19): siRNA sense strand
caaagaaagaagaugggaa

SEQ ID NO: 2559907 - RNA, 19 nt, Homo sapiens
  misc_RNA (1)...(19): siRNA sense strand
gagaagaaguucaaggaag

SEQ ID NO: 2559908 - RNA, 19 nt, Homo sapiens
  misc_RNA (1)...(19): siRNA sense strand
aagaguaagaggaaagauu

SEQ ID NO: 2559909 - RNA, 19 nt, Homo sapiens
  misc_RNA (1)...(19): siRNA sense strand
aagcauuuaaggaaggaaa

SEQ ID NO: 2559910 - RNA, 19 nt, Homo sapiens
  misc_RNA (1)...(19): siRNA sense strand
uggaacugaagaagaguaa

SEQ ID NO: 2559911 - RNA, 19 nt, Homo sapiens
  misc_RNA (1)...(19): siRNA sense strand
gcucaguguuacauggaca

SEQ ID NO: 2559912 - RNA, 19 nt, Homo sapiens
  misc_RNA (1)...(19): siRNA sense strand
aggcacaacaagaguucaa

SEQ ID NO: 2559913 - RNA, 19 nt, Homo sapiens
  misc_RNA (1)...(19): siRNA sense strand
aagaagaguaagaggaaag

SEQ ID NO: 2559914 - RNA, 19 nt, Homo sapiens
  misc_RNA (1)...(19): siRNA sense strand
ucaagaaagcuuaucggaa

SEQ ID NO: 2559915 - RNA, 19 nt, Homo sapiens
  misc_RNA (1)...(19): siRNA sense strand
agagggaagcagagacuuu

SEQ ID NO: 2559916 - RNA, 19 nt, Homo sapiens
  misc_RNA (1)...(19): siRNA sense strand
ggaaacuagaugaugcaau

SEQ ID NO: 2559917 - RNA, 19 nt, Homo sapiens
  misc_RNA (1)...(19): siRNA sense strand
aggaaagauuacuacaaga

SEQ ID NO: 2559918 - RNA, 19 nt, Homo sapiens
  misc_RNA (1)...(19): siRNA sense strand
augaagaagcaguacgaga

SEQ ID NO: 2559919 - RNA, 19 nt, Homo sapiens
  misc_RNA (1)...(19): siRNA sense strand
gcaauagaagacugcacaa

SEQ ID NO: 2559920 - RNA, 19 nt, Homo sapiens
  misc_RNA (1)...(19): siRNA sense strand
acaauaucuucaaggcauu

SEQ ID NO: 2559921 - RNA, 19 nt, Homo sapiens
  misc_RNA (1)...(19): siRNA sense strand
cgaagauuguauugagaag

SEQ ID NO: 2559922 - RNA, 19 nt, Homo sapiens
  misc_RNA (1)...(19): siRNA sense strand
cugaagaagaguaagagga

SEQ ID NO: 2559923 - RNA, 19 nt, Homo sapiens
  misc_RNA (1)...(19): siRNA sense strand
aagaaagaagaugggaaua

SEQ ID NO: 2559924 - RNA, 19 nt, Homo sapiens
  misc_RNA (1)...(19): siRNA sense strand
aggaggaggagaagaaguu

SEQ ID NO: 2559925 - RNA, 19 nt, Homo sapiens
  misc_RNA (1)...(19): siRNA sense strand
cugcauggaccgugcccua

SEQ ID NO: 2559926 - RNA, 19 nt, Homo sapiens
  misc_RNA (1)...(19): siRNA sense strand
cacucaaagcaaagaaaga

SEQ ID NO: 2559927 - RNA, 19 nt, Homo sapiens
  misc_RNA (1)...(19): siRNA sense strand
gcuuaggaaacuagaugau

SEQ ID NO: 2559928 - RNA, 19 nt, Homo sapiens
  misc_RNA (1)...(19): siRNA sense strand
aggaacaaggaaaugcaua

SEQ ID NO: 2559929 - RNA, 19 nt, Homo sapiens
  misc_RNA (1)...(19): siRNA sense strand
uucagaaggaggaggagaa

SEQ ID NO: 2559930 - RNA, 19 nt, Homo sapiens
  misc_RNA (1)...(19): siRNA sense strand
ugagaaaauagcagaaaca

SEQ ID NO: 2559931 - RNA, 19 nt, Homo sapiens
  misc_RNA (1)...(19): siRNA sense strand
agaagcaguacgagacuau

SEQ ID NO: 2559932 - RNA, 19 nt, Homo sapiens
  misc_RNA (1)...(19): siRNA sense strand
gcagagacuuucaaggaac

SEQ ID NO: 2559933 - RNA, 19 nt, Homo sapiens
  misc_RNA (1)...(19): siRNA sense strand
gccaaagcacucaaagcaa

SEQ ID NO: 2559934 - RNA, 19 nt, Homo sapiens
  misc_RNA (1)...(19): siRNA sense strand
aguucaaggaaguuggaga

SEQ ID NO: 2559935 - RNA, 19 nt, Homo sapiens
  misc_RNA (1)...(19): siRNA sense strand
cuacaagauucuaggagug

SEQ ID NO: 2559936 - RNA, 19 nt, Homo sapiens
  misc_RNA (1)...(19): siRNA sense strand
gcuaaugcagucauggaau

SEQ ID NO: 2559937 - RNA, 19 nt, Homo sapiens
  misc_RNA (1)...(19): siRNA sense strand
agaaaauagcagaaacaga

SEQ ID NO: 2559938 - RNA, 19 nt, Homo sapiens
  misc_RNA (1)...(19): siRNA sense strand
aggcagaauguuuagcaau

SEQ ID NO: 2559939 - RNA, 19 nt, Homo sapiens
  misc_RNA (1)...(19): siRNA sense strand
agaggaaagauuacuacaa

SEQ ID NO: 2559940 - RNA, 19 nt, Homo sapiens
  misc_RNA (1)...(19): siRNA sense strand
ccuagaacuggaucauaaa

SEQ ID NO: 2559941 - RNA, 19 nt, Homo sapiens
  misc_RNA (1)...(19): siRNA sense strand
ucaaaauccucaaggcaga

SEQ ID NO: 2559942 - RNA, 19 nt, Homo sapiens
  misc_RNA (1)...(19): siRNA sense strand
aggaggagaagaaguucaa

SEQ ID NO: 2559943 - RNA, 19 nt, Homo sapiens
  misc_RNA (1)...(19): siRNA sense strand
agucagugagguuggauga

SEQ ID NO: 2559944 - RNA, 19 nt, Homo sapiens
  misc_RNA (1)...(19): siRNA sense strand
accaagaggcgaagaggga

SEQ ID NO: 2559945 - RNA, 19 nt, Homo sapiens
  misc_RNA (1)...(19): siRNA sense strand
augaggagggcaugaauau

SEQ ID NO: 2559946 - RNA, 19 nt, Homo sapiens
  misc_RNA (1)...(19): siRNA sense strand
aguauaccagacagagaaa

SEQ ID NO: 2559947 - RNA, 19 nt, Homo sapiens
  misc_RNA (1)...(19): siRNA sense strand
gagccagugcugagguuca

SEQ ID NO: 2559948 - RNA, 19 nt, Homo sapiens
  misc_RNA (1)...(19): siRNA sense strand
acaacaagaguucaagaau

SEQ ID NO: 2559949 - RNA, 19 nt, Homo sapiens
  misc_RNA (1)...(19): siRNA sense strand
acacagaagcccuggggau

SEQ ID NO: 2559950 - RNA, 19 nt, Homo sapiens
  misc_RNA (1)...(19): siRNA sense strand
cagcuggaacugaagaaga

SEQ ID NO: 2559951 - RNA, 19 nt, Homo sapiens
  misc_RNA (1)...(19): siRNA sense strand
guaugaagaagcaguacga

SEQ ID NO: 2559952 - RNA, 19 nt, Homo sapiens
  misc_RNA (1)...(19): siRNA sense strand
acucaaagcaaagaaagaa

SEQ ID NO: 2559953 - RNA, 19 nt, Homo sapiens
  misc_RNA (1)...(19): siRNA sense strand
ucgacgaccaagaggcgaa

SEQ ID NO: 2559954 - RNA, 19 nt, Homo sapiens
  misc_RNA (1)...(19): siRNA sense strand
gcuugaugacacuuacaua

SEQ ID NO: 2559955 - RNA, 19 nt, Homo sapiens
  misc_RNA (1)...(19): siRNA sense strand
gggcaugaauaugggugau

SEQ ID NO: 2559956 - RNA, 19 nt, Homo sapiens
  misc_RNA (1)...(19): siRNA sense strand
aacaauaucuucaaggcau

SEQ ID NO: 2559957 - RNA, 19 nt, Homo sapiens
  misc_RNA (1)...(19): siRNA sense strand
gcagaaaugccaaagcacu

SEQ ID NO: 2559958 - RNA, 19 nt, Homo sapiens
  misc_RNA (1)...(19): siRNA sense strand
cagugaagcuugaugacac

SEQ ID NO: 2559959 - RNA, 19 nt, Homo sapiens
  misc_RNA (1)...(19): siRNA sense strand
aaaguauaccagacagaga

SEQ ID NO: 2559960 - RNA, 19 nt, Homo sapiens
  misc_RNA (1)...(19): siRNA sense strand
aggcgaagagggaagcaga

SEQ ID NO: 2559961 - RNA, 19 nt, Homo sapiens
  misc_RNA (1)...(19): siRNA sense strand
gaggaggagaagaaguuca

SEQ ID NO: 2559962 - RNA, 19 nt, Homo sapiens
  misc_RNA (1)...(19): siRNA sense strand
cgagauaaguugcgggaga

SEQ ID NO: 2559963 - RNA, 19 nt, Homo sapiens
  misc_RNA (1)...(19): siRNA sense strand
aggcaauggaagaaaggaa

SEQ ID NO: 2559964 - RNA, 19 nt, Homo sapiens
  misc_RNA (1)...(19): siRNA sense strand
cugaaagcccagaggaaga

SEQ ID NO: 2559965 - RNA, 19 nt, Homo sapiens
  misc_RNA (1)...(19): siRNA sense strand
gccugaauuacgagagaaa

SEQ ID NO: 2559966 - RNA, 19 nt, Homo sapiens
  misc_RNA (1)...(19): siRNA sense strand
cuucauaguuucuuggcua

SEQ ID NO: 2559967 - RNA, 19 nt, Homo sapiens
  misc_RNA (1)...(19): siRNA sense strand
uggcaggauucuugaggau

SEQ ID NO: 2559968 - RNA, 19 nt, Homo sapiens
  misc_RNA (1)...(19): siRNA sense strand
cccugaaagcccagaggaa

SEQ ID NO: 2559969 - RNA, 19 nt, Homo sapiens
  misc_RNA (1)...(19): siRNA sense strand
ccuaggagaaugaaggaca

SEQ ID NO: 2559970 - RNA, 19 nt, Homo sapiens
  misc_RNA (1)...(19): siRNA sense strand
gggaagacauccauggaag

SEQ ID NO: 2559971 - RNA, 19 nt, Homo sapiens
  misc_RNA (1)...(19): siRNA sense strand
augugaaggcaauggaaga

SEQ ID NO: 2559972 - RNA, 19 nt, Homo sapiens
  misc_RNA (1)...(19): siRNA sense strand
agauaaguugcgggagaua

SEQ ID NO: 2559973 - RNA, 19 nt, Homo sapiens
  misc_RNA (1)...(19): siRNA sense strand
uggaagugaagaugcaaau

SEQ ID NO: 2559974 - RNA, 19 nt, Homo sapiens
  misc_RNA (1)...(19): siRNA sense strand
ccucuaaugcaguguggau

SEQ ID NO: 2559975 - RNA, 19 nt, Homo sapiens
  misc_RNA (1)...(19): siRNA sense strand
cauccauggaagugaagau

SEQ ID NO: 2559976 - RNA, 19 nt, Homo sapiens
  misc_RNA (1)...(19): siRNA sense strand
gcucuuuagacaaggggaa

SEQ ID NO: 2559977 - RNA, 19 nt, Homo sapiens
  misc_RNA (1)...(19): siRNA sense strand
gugaaggcaauggaagaaa

SEQ ID NO: 2559978 - RNA, 19 nt, Homo sapiens
  misc_RNA (1)...(19): siRNA sense strand
aagaagagcuugagcccag

SEQ ID NO: 2559979 - RNA, 19 nt, Homo sapiens
  misc_RNA (1)...(19): siRNA sense strand
caauggaagaaaggaaauu

SEQ ID NO: 2559980 - RNA, 19 nt, Homo sapiens
  misc_RNA (1)...(19): siRNA sense strand
gcccagaggaagaggagcu

SEQ ID NO: 2559981 - RNA, 19 nt, Homo sapiens
  misc_RNA (1)...(19): siRNA sense strand
cauuaaguucaguggccau

SEQ ID NO: 2559982 - RNA, 19 nt, Homo sapiens
  misc_RNA (1)...(19): siRNA sense strand
gacaaggggaauugaacaa

SEQ ID NO: 2559983 - RNA, 19 nt, Homo sapiens
  misc_RNA (1)...(19): siRNA sense strand
aaacagaucuucaggguga

SEQ ID NO: 2559984 - RNA, 19 nt, Homo sapiens
  misc_RNA (1)...(19): siRNA sense strand
cagaagagguagaagccau

SEQ ID NO: 2559985 - RNA, 19 nt, Homo sapiens
  misc_RNA (1)...(19): siRNA sense strand
uagaaaugggaauggguaa

SEQ ID NO: 2559986 - RNA, 19 nt, Homo sapiens
  misc_RNA (1)...(19): siRNA sense strand
cuggaaggaccuagggaau

SEQ ID NO: 2559987 - RNA, 19 nt, Homo sapiens
  misc_RNA (1)...(19): siRNA sense strand
gauuauaucugaaggccuu

SEQ ID NO: 2559988 - RNA, 19 nt, Homo sapiens
  misc_RNA (1)...(19): siRNA sense strand
acauagagaaggaguucaa

SEQ ID NO: 2559989 - RNA, 19 nt, Homo sapiens
  misc_RNA (1)...(19): siRNA sense strand
ccauuaaguaugaagucaa

SEQ ID NO: 2559990 - RNA, 19 nt, Homo sapiens
  misc_RNA (1)...(19): siRNA sense strand
cccaaaugcagaaggagaa

SEQ ID NO: 2559991 - RNA, 19 nt, Homo sapiens
  misc_RNA (1)...(19): siRNA sense strand
aggauauagaaaugggaau

SEQ ID NO: 2559992 - RNA, 19 nt, Homo sapiens
  misc_RNA (1)...(19): siRNA sense strand
aacucaaaguccagguuaa

SEQ ID NO: 2559993 - RNA, 19 nt, Homo sapiens
  misc_RNA (1)...(19): siRNA sense strand
gcaagaugcuggaggaguc

SEQ ID NO: 2559994 - RNA, 19 nt, Homo sapiens
  misc_RNA (1)...(19): siRNA sense strand
agaaauacgaaguggugca

SEQ ID NO: 2559995 - RNA, 19 nt, Homo sapiens
  misc_RNA (1)...(19): siRNA sense strand
cagacagguucgaaggcau

SEQ ID NO: 2559996 - RNA, 19 nt, Homo sapiens
  misc_RNA (1)...(19): siRNA sense strand
ccacuguagaagaaaguuu

SEQ ID NO: 2559997 - RNA, 19 nt, Homo sapiens
  misc_RNA (1)...(19): siRNA sense strand
uggccaacauagagaagga

SEQ ID NO: 2559998 - RNA, 19 nt, Homo sapiens
  misc_RNA (1)...(19): siRNA sense strand
agacaagagccaagcaacu

SEQ ID NO: 2559999 - RNA, 19 nt, Homo sapiens
  misc_RNA (1)...(19): siRNA sense strand
aauacgaaguggugcacau

SEQ ID NO: 2560000 - RNA, 19 nt, Homo sapiens
  misc_RNA (1)...(19): siRNA sense strand
uggaaggaccuagggaaua

SEQ ID NO: 2560001 - RNA, 19 nt, Homo sapiens
  misc_RNA (1)...(19): siRNA sense strand
gggacugcauggagaagca

SEQ ID NO: 2560002 - RNA, 19 nt, Homo sapiens
  misc_RNA (1)...(19): siRNA sense strand
gcuggaaggaccuagggaa

SEQ ID NO: 2560003 - RNA, 19 nt, Homo sapiens
  misc_RNA (1)...(19): siRNA sense strand
ccaacauagagaaggaguu

SEQ ID NO: 2560004 - RNA, 19 nt, Homo sapiens
  misc_RNA (1)...(19): siRNA sense strand
cuguaaaggacauauucaa

SEQ ID NO: 2560005 - RNA, 19 nt, Homo sapiens
  misc_RNA (1)...(19): siRNA sense strand
ugaaagcacaaguagacaa

SEQ ID NO: 2560006 - RNA, 19 nt, Homo sapiens
  misc_RNA (1)...(19): siRNA sense strand
cggcgcacugccagaaaua

SEQ ID NO: 2560007 - RNA, 19 nt, Homo sapiens
  misc_RNA (1)...(19): siRNA sense strand
gcauggagaagcagaggca

SEQ ID NO: 2560008 - RNA, 19 nt, Homo sapiens
  misc_RNA (1)...(19): siRNA sense strand
gcucgaggaucaaugccua

SEQ ID NO: 2560009 - RNA, 19 nt, Homo sapiens
  misc_RNA (1)...(19): siRNA sense strand
acucaaaguccagguuaaa

SEQ ID NO: 2560010 - RNA, 19 nt, Homo sapiens
  misc_RNA (1)...(19): siRNA sense strand
ugauguggucugaauguaa

SEQ ID NO: 2560011 - RNA, 19 nt, Homo sapiens
  misc_RNA (1)...(19): siRNA sense strand
ggaaggacuguaaaggaca

SEQ ID NO: 2560012 - RNA, 19 nt, Homo sapiens
  misc_RNA (1)...(19): siRNA sense strand
ucccaaaugcagaaggaga

SEQ ID NO: 2560013 - RNA, 19 nt, Homo sapiens
  misc_RNA (1)...(19): siRNA sense strand
augcagaaggagaaggcuu

SEQ ID NO: 2560014 - RNA, 19 nt, Homo sapiens
  misc_RNA (1)...(19): siRNA sense strand
acgucaacugcguggacua

SEQ ID NO: 2560015 - RNA, 19 nt, Homo sapiens
  misc_RNA (1)...(19): siRNA sense strand
gagacucagaagagguaga

SEQ ID NO: 2560016 - RNA, 19 nt, Homo sapiens
  misc_RNA (1)...(19): siRNA sense strand
uuaugaaguuuguagcaca

SEQ ID NO: 2560017 - RNA, 19 nt, Homo sapiens
  misc_RNA (1)...(19): siRNA sense strand
aggcacaaagcuucauuaa

SEQ ID NO: 2560018 - RNA, 19 nt, Homo sapiens
  misc_RNA (1)...(19): siRNA sense strand
ucaagaaugacuaucggaa

SEQ ID NO: 2560019 - RNA, 19 nt, Homo sapiens
  misc_RNA (1)...(19): siRNA sense strand
ccgagacucagaagaggua

SEQ ID NO: 2560020 - RNA, 19 nt, Homo sapiens
  misc_RNA (1)...(19): siRNA sense strand
guggaaugugcuugacuuu

SEQ ID NO: 2560021 - RNA, 19 nt, Homo sapiens
  misc_RNA (1)...(19): siRNA sense strand
agaagagguagaagccauu

SEQ ID NO: 2560022 - RNA, 19 nt, Homo sapiens
  misc_RNA (1)...(19): siRNA sense strand
guaaagagcucuggcugga

SEQ ID NO: 2560023 - RNA, 19 nt, Homo sapiens
  misc_RNA (1)...(19): siRNA sense strand
ugaugaaguuaaugaaggu

SEQ ID NO: 2560024 - RNA, 19 nt, Homo sapiens
  misc_RNA (1)...(19): siRNA sense strand
ugaggaugacagugaugua

SEQ ID NO: 2560025 - RNA, 19 nt, Homo sapiens
  misc_RNA (1)...(19): siRNA sense strand
cagccuucguuaugaacuu

SEQ ID NO: 2560026 - RNA, 19 nt, Homo sapiens
  misc_RNA (1)...(19): siRNA sense strand
agagaaggaguucaagaau

SEQ ID NO: 2560027 - RNA, 19 nt, Homo sapiens
  misc_RNA (1)...(19): siRNA sense strand
cguacauccucccugcaaa

SEQ ID NO: 2560028 - RNA, 19 nt, Homo sapiens
  misc_RNA (1)...(19): siRNA sense strand
auagaaaugggaaugggua

SEQ ID NO: 2560029 - RNA, 19 nt, Homo sapiens
  misc_RNA (1)...(19): siRNA sense strand
gcaauaagguugacgccau

SEQ ID NO: 2560030 - RNA, 19 nt, Homo sapiens
  misc_RNA (1)...(19): siRNA sense strand
cugaaaacaucaagaagaa

SEQ ID NO: 2560031 - RNA, 19 nt, Homo sapiens
  misc_RNA (1)...(19): siRNA sense strand
ccggaaggacgaagagaga

SEQ ID NO: 2560032 - RNA, 19 nt, Homo sapiens
  misc_RNA (1)...(19): siRNA sense strand
agcagaagaucgaggacau

SEQ ID NO: 2560033 - RNA, 19 nt, Homo sapiens
  misc_RNA (1)...(19): siRNA sense strand
cagcagaaacugagcgugu

SEQ ID NO: 2560034 - RNA, 19 nt, Homo sapiens
  misc_RNA (1)...(19): siRNA sense strand
gagaaggugcccugggaga

SEQ ID NO: 2560035 - RNA, 19 nt, Homo sapiens
  misc_RNA (1)...(19): siRNA sense strand
gaguaugagcacagagcca

SEQ ID NO: 2560036 - RNA, 19 nt, Homo sapiens
  misc_RNA (1)...(19): siRNA sense strand
aggagauguuugagaccuu

SEQ ID NO: 2560037 - RNA, 19 nt, Homo sapiens
  misc_RNA (1)...(19): siRNA sense strand
auggaugacccgaggaaca

SEQ ID NO: 2560038 - RNA, 19 nt, Homo sapiens
  misc_RNA (1)...(19): siRNA sense strand
ugaccugccuagacagcaa

SEQ ID NO: 2560039 - RNA, 19 nt, Homo sapiens
  misc_RNA (1)...(19): siRNA sense strand
gggaaggcaaggaugguca

SEQ ID NO: 2560040 - RNA, 19 nt, Homo sapiens
  misc_RNA (1)...(19): siRNA sense strand
uguccaaggaggaggagga

SEQ ID NO: 2560041 - RNA, 19 nt, Homo sapiens
  misc_RNA (1)...(19): siRNA sense strand
ccaacauccugcugcucaa

SEQ ID NO: 2560042 - RNA, 19 nt, Homo sapiens
  misc_RNA (1)...(19): siRNA sense strand
ggccugagccagaagguga

SEQ ID NO: 2560043 - RNA, 19 nt, Homo sapiens
  misc_RNA (1)...(19): siRNA sense strand
gggccaagaacuucaacau

SEQ ID NO: 2560044 - RNA, 19 nt, Homo sapiens
  misc_RNA (1)...(19): siRNA sense strand
aggccaaggacaugaaguu

SEQ ID NO: 2560045 - RNA, 19 nt, Homo sapiens
  misc_RNA (1)...(19): siRNA sense strand
aacaaugacaagcaagaaa

SEQ ID NO: 2560046 - RNA, 19 nt, Homo sapiens
  misc_RNA (1)...(19): siRNA sense strand
gggucuucaccgagugcua

SEQ ID NO: 2560047 - RNA, 19 nt, Homo sapiens
  misc_RNA (1)...(19): siRNA sense strand
gcggcauggagguguacaa

SEQ ID NO: 2560048 - RNA, 19 nt, Homo sapiens
  misc_RNA (1)...(19): siRNA sense strand
cugaacaggcugaacucua

SEQ ID NO: 2560049 - RNA, 19 nt, Homo sapiens
  misc_RNA (1)...(19): siRNA sense strand
ccaaggaggaggaggacac

SEQ ID NO: 2560050 - RNA, 19 nt, Homo sapiens
  misc_RNA (1)...(19): siRNA sense strand
agaucgaggacaucagcaa

SEQ ID NO: 2560051 - RNA, 19 nt, Homo sapiens
  misc_RNA (1)...(19): siRNA sense strand
gacaaugccuggaucgaga

SEQ ID NO: 2560052 - RNA, 19 nt, Homo sapiens
  misc_RNA (1)...(19): siRNA sense strand
cggacagcucggaggagau

SEQ ID NO: 2560053 - RNA, 19 nt, Homo sapiens
  misc_RNA (1)...(19): siRNA sense strand
gggagaugcuaccucggaa

SEQ ID NO: 2560054 - RNA, 19 nt, Homo sapiens
  misc_RNA (1)...(19): siRNA sense strand
acaaaggcuacauggauga

SEQ ID NO: 2560055 - RNA, 19 nt, Homo sapiens
  misc_RNA (1)...(19): siRNA sense strand
ccugaaaacaucaagaaga

SEQ ID NO: 2560056 - RNA, 19 nt, Homo sapiens
  misc_RNA (1)...(19): siRNA sense strand
ucauaucggagcagaccaa

SEQ ID NO: 2560057 - RNA, 19 nt, Homo sapiens
  misc_RNA (1)...(19): siRNA sense strand
agugcgggcugaugaagaa

SEQ ID NO: 2560058 - RNA, 19 nt, Homo sapiens
  misc_RNA (1)...(19): siRNA sense strand
ccgggaggcaggaagaaga

SEQ ID NO: 2560059 - RNA, 19 nt, Homo sapiens
  misc_RNA (1)...(19): siRNA sense strand
caaagaaacauguccagga

SEQ ID NO: 2560060 - RNA, 19 nt, Homo sapiens
  misc_RNA (1)...(19): siRNA sense strand
gcguguucuuccaggagau

SEQ ID NO: 2560061 - RNA, 19 nt, Homo sapiens
  misc_RNA (1)...(19): siRNA sense strand
ggaaggacgaagagagagc

SEQ ID NO: 2560062 - RNA, 19 nt, Homo sapiens
  misc_RNA (1)...(19): siRNA sense strand
gagaucuaccugaaggaga

SEQ ID NO: 2560063 - RNA, 19 nt, Homo sapiens
  misc_RNA (1)...(19): siRNA sense strand
ucaugaagcagguaggcga

SEQ ID NO: 2560064 - RNA, 19 nt, Homo sapiens
  misc_RNA (1)...(19): siRNA sense strand
uggaugaguggcaguggaa

SEQ ID NO: 2560065 - RNA, 19 nt, Homo sapiens
  misc_RNA (1)...(19): siRNA sense strand
gggagaagaggcugcagga

SEQ ID NO: 2560066 - RNA, 19 nt, Homo sapiens
  misc_RNA (1)...(19): siRNA sense strand
acaaggaaggcgagcucau

SEQ ID NO: 2560067 - RNA, 19 nt, Homo sapiens
  misc_RNA (1)...(19): siRNA sense strand
cuucaagagcuggaggcua

SEQ ID NO: 2560068 - RNA, 19 nt, Homo sapiens
  misc_RNA (1)...(19): siRNA sense strand
uuuacacggcagagaggaa

SEQ ID NO: 2560069 - RNA, 19 nt, Homo sapiens
  misc_RNA (1)...(19): siRNA sense strand
gagcagaagaucgaggaca

SEQ ID NO: 2560070 - RNA, 19 nt, Homo sapiens
  misc_RNA (1)...(19): siRNA sense strand
ccucaggccaugugaccuu

SEQ ID NO: 2560071 - RNA, 19 nt, Homo sapiens
  misc_RNA (1)...(19): siRNA sense strand
ugaaaucaaucaaagggaa

SEQ ID NO: 2560072 - RNA, 19 nt, Homo sapiens
  misc_RNA (1)...(19): siRNA sense strand
agaacagagaccagaaaga

SEQ ID NO: 2560073 - RNA, 19 nt, Homo sapiens
  misc_RNA (1)...(19): siRNA sense strand
gaagauggucaguaggaca

SEQ ID NO: 2560074 - RNA, 19 nt, Homo sapiens
  misc_RNA (1)...(19): siRNA sense strand
ccuacaagaaguacaucaa

SEQ ID NO: 2560075 - RNA, 19 nt, Homo sapiens
  misc_RNA (1)...(19): siRNA sense strand
cuuuaaggaugguuuagaa

SEQ ID NO: 2560076 - RNA, 19 nt, Homo sapiens
  misc_RNA (1)...(19): siRNA sense strand
gagaccagaaagaguaaaa

SEQ ID NO: 2560077 - RNA, 19 nt, Homo sapiens
  misc_RNA (1)...(19): siRNA sense strand
gguugugccuggaggugga

SEQ ID NO: 2560078 - RNA, 19 nt, Homo sapiens
  misc_RNA (1)...(19): siRNA sense strand
acaugaauccagauggcau

SEQ ID NO: 2560079 - RNA, 19 nt, Homo sapiens
  misc_RNA (1)...(19): siRNA sense strand
uggaaaugccuccgcugaa

SEQ ID NO: 2560080 - RNA, 19 nt, Homo sapiens
  misc_RNA (1)...(19): siRNA sense strand
agggaaacuugaagaacag

SEQ ID NO: 2560081 - RNA, 19 nt, Homo sapiens
  misc_RNA (1)...(19): siRNA sense strand
agauaauucuccagaccaa

SEQ ID NO: 2560082 - RNA, 19 nt, Homo sapiens
  misc_RNA (1)...(19): siRNA sense strand
uggaacugauagagaaauu

SEQ ID NO: 2560083 - RNA, 19 nt, Homo sapiens
  misc_RNA (1)...(19): siRNA sense strand
agugaaaguacaaggucaa

SEQ ID NO: 2560084 - RNA, 19 nt, Homo sapiens
  misc_RNA (1)...(19): siRNA sense strand
cauggaacugauagagaaa

SEQ ID NO: 2560085 - RNA, 19 nt, Homo sapiens
  misc_RNA (1)...(19): siRNA sense strand
agacaaagcaucaggacgu

SEQ ID NO: 2560086 - RNA, 19 nt, Homo sapiens
  misc_RNA (1)...(19): siRNA sense strand
gguuacaucauuagcgaau

SEQ ID NO: 2560087 - RNA, 19 nt, Homo sapiens
  misc_RNA (1)...(19): siRNA sense strand
uuuccaggcucuagggcaa

SEQ ID NO: 2560088 - RNA, 19 nt, Homo sapiens
  misc_RNA (1)...(19): siRNA sense strand
ggugauguuucaagggcau

SEQ ID NO: 2560089 - RNA, 19 nt, Homo sapiens
  misc_RNA (1)...(19): siRNA sense strand
acaacagaugggagagauu

SEQ ID NO: 2560090 - RNA, 19 nt, Homo sapiens
  misc_RNA (1)...(19): siRNA sense strand
aagaaaacccauugaagua

SEQ ID NO: 2560091 - RNA, 19 nt, Homo sapiens
  misc_RNA (1)...(19): siRNA sense strand
acauggaacugauagagaa

SEQ ID NO: 2560092 - RNA, 19 nt, Homo sapiens
  misc_RNA (1)...(19): siRNA sense strand
aauuauugauggagcacau

SEQ ID NO: 2560093 - RNA, 19 nt, Homo sapiens
  misc_RNA (1)...(19): siRNA sense strand
acagauagugaaaguacaa

SEQ ID NO: 2560094 - RNA, 19 nt, Homo sapiens
  misc_RNA (1)...(19): siRNA sense strand
agcauaaauuacaccgaaa

SEQ ID NO: 2560095 - RNA, 19 nt, Homo sapiens
  misc_RNA (1)...(19): siRNA sense strand
acuggagauucaagcauaa

SEQ ID NO: 2560096 - RNA, 19 nt, Homo sapiens
  misc_RNA (1)...(19): siRNA sense strand
auugaaguaucacgagaaa

SEQ ID NO: 2560097 - RNA, 19 nt, Homo sapiens
  misc_RNA (1)...(19): siRNA sense strand
ucaaaggucucauuggcaa

SEQ ID NO: 2560098 - RNA, 19 nt, Homo sapiens
  misc_RNA (1)...(19): siRNA sense strand
uagugaaaguacaagguca

SEQ ID NO: 2560099 - RNA, 19 nt, Homo sapiens
  misc_RNA (1)...(19): siRNA sense strand
cauagaagaaauugcacau

SEQ ID NO: 2560100 - RNA, 19 nt, Homo sapiens
  misc_RNA (1)...(19): siRNA sense strand
guauauucaugucgaggau

SEQ ID NO: 2560101 - RNA, 19 nt, Homo sapiens
  misc_RNA (1)...(19): siRNA sense strand
cguuuggaaugaagcaaga

SEQ ID NO: 2560102 - RNA, 19 nt, Homo sapiens
  misc_RNA (1)...(19): siRNA sense strand
uucaagaaaugcagaccaa

SEQ ID NO: 2560103 - RNA, 19 nt, Homo sapiens
  misc_RNA (1)...(19): siRNA sense strand
uaaaagaagcauccgaaaa

SEQ ID NO: 2560104 - RNA, 19 nt, Homo sapiens
  misc_RNA (1)...(19): siRNA sense strand
gggcaagaaaacagcauau

SEQ ID NO: 2560105 - RNA, 19 nt, Homo sapiens
  misc_RNA (1)...(19): siRNA sense strand
uguccaaugugaaagaaaa

SEQ ID NO: 2560106 - RNA, 19 nt, Homo sapiens
  misc_RNA (1)...(19): siRNA sense strand
ccauugaaguaucacgaga

SEQ ID NO: 2560107 - RNA, 19 nt, Homo sapiens
  misc_RNA (1)...(19): siRNA sense strand
gcauaaauuacaccgaaaa

SEQ ID NO: 2560108 - RNA, 19 nt, Homo sapiens
  misc_RNA (1)...(19): siRNA sense strand
ccauagaagaaauugcaca

SEQ ID NO: 2560109 - RNA, 19 nt, Homo sapiens
  misc_RNA (1)...(19): siRNA sense strand
ccuuacaacuccagaugca

SEQ ID NO: 2560110 - RNA, 19 nt, Homo sapiens
  misc_RNA (1)...(19): siRNA sense strand
cauugaaguaucacgagaa

SEQ ID NO: 2560111 - RNA, 19 nt, Homo sapiens
  misc_RNA (1)...(19): siRNA sense strand
ugucuaugauugaaagcuu

SEQ ID NO: 2560112 - RNA, 19 nt, Homo sapiens
  misc_RNA (1)...(19): siRNA sense strand
gaaaauuauugauggagca

SEQ ID NO: 2560113 - RNA, 19 nt, Homo sapiens
  misc_RNA (1)...(19): siRNA sense strand
cggcucuacuccaagcaaa

SEQ ID NO: 2560114 - RNA, 19 nt, Homo sapiens
  misc_RNA (1)...(19): siRNA sense strand
uugaacaacagaugggaga

SEQ ID NO: 2560115 - RNA, 19 nt, Homo sapiens
  misc_RNA (1)...(19): siRNA sense strand
cagcaaacugggcagaaaa

SEQ ID NO: 2560116 - RNA, 19 nt, Homo sapiens
  misc_RNA (1)...(19): siRNA sense strand
ugucaauacugcagguuac

SEQ ID NO: 2560117 - RNA, 19 nt, Homo sapiens
  misc_RNA (1)...(19): siRNA sense strand
gcauugaauccuggagaga

SEQ ID NO: 2560118 - RNA, 19 nt, Homo sapiens
  misc_RNA (1)...(19): siRNA sense strand
uggugaaagcuuacuggaa

SEQ ID NO: 2560119 - RNA, 19 nt, Homo sapiens
  misc_RNA (1)...(19): siRNA sense strand
acucagauugccagcuuua

SEQ ID NO: 2560120 - RNA, 19 nt, Homo sapiens
  misc_RNA (1)...(19): siRNA sense strand
ugauugaaagcuuaagcaa

SEQ ID NO: 2560121 - RNA, 19 nt, Homo sapiens
  misc_RNA (1)...(19): siRNA sense strand
acgaauaugccuaccugaa

SEQ ID NO: 2560122 - RNA, 19 nt, Homo sapiens
  misc_RNA (1)...(19): siRNA sense strand
auacgaauugacaguguua

SEQ ID NO: 2560123 - RNA, 19 nt, Homo sapiens
  misc_RNA (1)...(19): siRNA sense strand
acgucauuauggagcagua

SEQ ID NO: 2560124 - RNA, 19 nt, Homo sapiens
  misc_RNA (1)...(19): siRNA sense strand
auauucaugucgaggauca

SEQ ID NO: 2560125 - RNA, 19 nt, Homo sapiens
  misc_RNA (1)...(19): siRNA sense strand
cugucaauacugcagguua

SEQ ID NO: 2560126 - RNA, 19 nt, Homo sapiens
  misc_RNA (1)...(19): siRNA sense strand
cuguccaaugugaaagaaa

SEQ ID NO: 2560127 - RNA, 19 nt, Homo sapiens
  misc_RNA (1)...(19): siRNA sense strand
cauuagcgaaucuuggaaa

SEQ ID NO: 2560128 - RNA, 19 nt, Homo sapiens
  misc_RNA (1)...(19): siRNA sense strand
aagcauaaauuacaccgaa

SEQ ID NO: 2560129 - RNA, 19 nt, Homo sapiens
  misc_RNA (1)...(19): siRNA sense strand
agugaugaauguagcaacu

SEQ ID NO: 2560130 - RNA, 19 nt, Homo sapiens
  misc_RNA (1)...(19): siRNA sense strand
cauugauggauacgaauau

SEQ ID NO: 2560131 - RNA, 19 nt, Homo sapiens
  misc_RNA (1)...(19): siRNA sense strand
cuaccaucacugaagaauu

SEQ ID NO: 2560132 - RNA, 19 nt, Homo sapiens
  misc_RNA (1)...(19): siRNA sense strand
gugaaggcugcaaaggauu

SEQ ID NO: 2560133 - RNA, 19 nt, Homo sapiens
  misc_RNA (1)...(19): siRNA sense strand
acaccuaaucacuggagau

SEQ ID NO: 2560134 - RNA, 19 nt, Homo sapiens
  misc_RNA (1)...(19): siRNA sense strand
gcagauuauaacucucaaa

SEQ ID NO: 2560135 - RNA, 19 nt, Homo sapiens
  misc_RNA (1)...(19): siRNA sense strand
aagcuuaagcaaugaugau

SEQ ID NO: 2560136 - RNA, 19 nt, Homo sapiens
  misc_RNA (1)...(19): siRNA sense strand
aggaaaaggaagaguuaaa

SEQ ID NO: 2560137 - RNA, 19 nt, Homo sapiens
  misc_RNA (1)...(19): siRNA sense strand
ggaccaaggaggaggagcu

SEQ ID NO: 2560138 - RNA, 19 nt, Homo sapiens
  misc_RNA (1)...(19): siRNA sense strand
aguucggagacaugaguua

SEQ ID NO: 2560139 - RNA, 19 nt, Homo sapiens
  misc_RNA (1)...(19): siRNA sense strand
guugcaaggaacagacgaa

SEQ ID NO: 2560140 - RNA, 19 nt, Homo sapiens
  misc_RNA (1)...(19): siRNA sense strand
gaacagacgaagaugcagu

SEQ ID NO: 2560141 - RNA, 19 nt, Homo sapiens
  misc_RNA (1)...(19): siRNA sense strand
aauuacaacacuacgacaa

SEQ ID NO: 2560142 - RNA, 19 nt, Homo sapiens
  misc_RNA (1)...(19): siRNA sense strand
gaaaguaggcgguacgaac

SEQ ID NO: 2560143 - RNA, 19 nt, Homo sapiens
  misc_RNA (1)...(19): siRNA sense strand
aggaagaguuaaaagcaga

SEQ ID NO: 2560144 - RNA, 19 nt, Homo sapiens
  misc_RNA (1)...(19): siRNA sense strand
ccaaggaggaggagcugca

SEQ ID NO: 2560145 - RNA, 19 nt, Homo sapiens
  misc_RNA (1)...(19): siRNA sense strand
agcaagaaguucggagaca

SEQ ID NO: 2560146 - RNA, 19 nt, Homo sapiens
  misc_RNA (1)...(19): siRNA sense strand
cgaagaugcaguagccagu

SEQ ID NO: 2560147 - RNA, 19 nt, Homo sapiens
  misc_RNA (1)...(19): siRNA sense strand
cugaggaggaaaaggaaga

SEQ ID NO: 2560148 - RNA, 19 nt, Homo sapiens
  misc_RNA (1)...(19): siRNA sense strand
agucuaagguuguggguga

SEQ ID NO: 2560149 - RNA, 19 nt, Homo sapiens
  misc_RNA (1)...(19): siRNA sense strand
ugacagaggcugaggagga

SEQ ID NO: 2560150 - RNA, 19 nt, Homo sapiens
  misc_RNA (1)...(19): siRNA sense strand
ccaagguggaagaggaaau

SEQ ID NO: 2560151 - RNA, 19 nt, Homo sapiens
  misc_RNA (1)...(19): siRNA sense strand
uuaccaagguggaagagga

SEQ ID NO: 2560152 - RNA, 19 nt, Homo sapiens
  misc_RNA (1)...(19): siRNA sense strand
guggagagcucaagaggag

SEQ ID NO: 2560153 - RNA, 19 nt, Homo sapiens
  misc_RNA (1)...(19): siRNA sense strand
agucuaagguuguggguga

SEQ ID NO: 2560154 - RNA, 19 nt, Homo sapiens
  misc_RNA (1)...(19): siRNA sense strand
ugacagaggcugaggagga

SEQ ID NO: 2560155 - RNA, 19 nt, Homo sapiens
  misc_RNA (1)...(19): siRNA sense strand
ccaagguggaagaggaaau

SEQ ID NO: 2560156 - RNA, 19 nt, Homo sapiens
  misc_RNA (1)...(19): siRNA sense strand
uuaccaagguggaagagga

SEQ ID NO: 2560157 - RNA, 19 nt, Homo sapiens
  misc_RNA (1)...(19): siRNA sense strand
guggagagcucaagaggag

SEQ ID NO: 2560158 - RNA, 19 nt, Homo sapiens
  misc_RNA (1)...(19): siRNA sense strand
agucuaagguuguggguga

SEQ ID NO: 2560159 - RNA, 19 nt, Homo sapiens
  misc_RNA (1)...(19): siRNA sense strand
ugacagaggcugaggagga

SEQ ID NO: 2560160 - RNA, 19 nt, Homo sapiens
  misc_RNA (1)...(19): siRNA sense strand
ccaagguggaagaggaaau

SEQ ID NO: 2560161 - RNA, 19 nt, Homo sapiens
  misc_RNA (1)...(19): siRNA sense strand
uuaccaagguggaagagga

SEQ ID NO: 2560162 - RNA, 19 nt, Homo sapiens
  misc_RNA (1)...(19): siRNA sense strand
guggagagcucaagaggag

SEQ ID NO: 2560163 - RNA, 19 nt, Homo sapiens
  misc_RNA (1)...(19): siRNA sense strand
agucuaagguuguggguga

SEQ ID NO: 2560164 - RNA, 19 nt, Homo sapiens
  misc_RNA (1)...(19): siRNA sense strand
ugacagaggcugaggagga

SEQ ID NO: 2560165 - RNA, 19 nt, Homo sapiens
  misc_RNA (1)...(19): siRNA sense strand
ccaagguggaagaggaaau

SEQ ID NO: 2560166 - RNA, 19 nt, Homo sapiens
  misc_RNA (1)...(19): siRNA sense strand
uuaccaagguggaagagga

SEQ ID NO: 2560167 - RNA, 19 nt, Homo sapiens
  misc_RNA (1)...(19): siRNA sense strand
guggagagcucaagaggag

SEQ ID NO: 2560168 - RNA, 19 nt, Homo sapiens
  misc_RNA (1)...(19): siRNA sense strand
agucuaagguuguggguga

SEQ ID NO: 2560169 - RNA, 19 nt, Homo sapiens
  misc_RNA (1)...(19): siRNA sense strand
ugacagaggcugaggagga

SEQ ID NO: 2560170 - RNA, 19 nt, Homo sapiens
  misc_RNA (1)...(19): siRNA sense strand
ccaagguggaagaggaaau

SEQ ID NO: 2560171 - RNA, 19 nt, Homo sapiens
  misc_RNA (1)...(19): siRNA sense strand
uuaccaagguggaagagga

SEQ ID NO: 2560172 - RNA, 19 nt, Homo sapiens
  misc_RNA (1)...(19): siRNA sense strand
guggagagcucaagaggag

SEQ ID NO: 2560173 - RNA, 19 nt, Homo sapiens
  misc_RNA (1)...(19): siRNA sense strand
agucuaagguuguggguga

SEQ ID NO: 2560174 - RNA, 19 nt, Homo sapiens
  misc_RNA (1)...(19): siRNA sense strand
ugacagaggcugaggagga

SEQ ID NO: 2560175 - RNA, 19 nt, Homo sapiens
  misc_RNA (1)...(19): siRNA sense strand
ccaagguggaagaggaaau

SEQ ID NO: 2560176 - RNA, 19 nt, Homo sapiens
  misc_RNA (1)...(19): siRNA sense strand
uuaccaagguggaagagga

SEQ ID NO: 2560177 - RNA, 19 nt, Homo sapiens
  misc_RNA (1)...(19): siRNA sense strand
guggagagcucaagaggag

SEQ ID NO: 2560178 - RNA, 19 nt, Homo sapiens
  misc_RNA (1)...(19): siRNA sense strand
cgggaaauugggagaggaa

SEQ ID NO: 2560179 - RNA, 19 nt, Homo sapiens
  misc_RNA (1)...(19): siRNA sense strand
ugaagaaucagcugggaga

SEQ ID NO: 2560180 - RNA, 19 nt, Homo sapiens
  misc_RNA (1)...(19): siRNA sense strand
gguguuauuuguuugggaa

SEQ ID NO: 2560181 - RNA, 19 nt, Homo sapiens
  misc_RNA (1)...(19): siRNA sense strand
aauugggagaggaagguua

SEQ ID NO: 2560182 - RNA, 19 nt, Homo sapiens
  misc_RNA (1)...(19): siRNA sense strand
ggaaauugggagaggaagg

SEQ ID NO: 2560183 - RNA, 19 nt, Homo sapiens
  misc_RNA (1)...(19): siRNA sense strand
cguccauuccuuugauuau

SEQ ID NO: 2560184 - RNA, 19 nt, Homo sapiens
  misc_RNA (1)...(19): siRNA sense strand
cugguaaagacgggaaauu

SEQ ID NO: 2560185 - RNA, 19 nt, Homo sapiens
  misc_RNA (1)...(19): siRNA sense strand
gggcaggaauugaaggaca

SEQ ID NO: 2560186 - RNA, 19 nt, Homo sapiens
  misc_RNA (1)...(19): siRNA sense strand
cggaaaugcuccugcccuu

SEQ ID NO: 2560187 - RNA, 19 nt, Homo sapiens
  misc_RNA (1)...(19): siRNA sense strand
gugucugggugguggggua

SEQ ID NO: 2560188 - RNA, 19 nt, Homo sapiens
  misc_RNA (1)...(19): siRNA sense strand
ggacuaagauggacgccug

SEQ ID NO: 2560189 - RNA, 19 nt, Homo sapiens
  misc_RNA (1)...(19): siRNA sense strand
ggucaaagacagcgcucaa

SEQ ID NO: 2560190 - RNA, 19 nt, Homo sapiens
  misc_RNA (1)...(19): siRNA sense strand
cagaaaagcuguuugggaa

SEQ ID NO: 2560191 - RNA, 19 nt, Homo sapiens
  misc_RNA (1)...(19): siRNA sense strand
guauacgcuuauugagaaa

SEQ ID NO: 2560192 - RNA, 19 nt, Homo sapiens
  misc_RNA (1)...(19): siRNA sense strand
aagagaaaguugucggaga

SEQ ID NO: 2560193 - RNA, 19 nt, Homo sapiens
  misc_RNA (1)...(19): siRNA sense strand
aggaaaugggccugaguuu

SEQ ID NO: 2560194 - RNA, 19 nt, Homo sapiens
  misc_RNA (1)...(19): siRNA sense strand
cgugcuacuuccagacuaa

SEQ ID NO: 2560195 - RNA, 19 nt, Homo sapiens
  misc_RNA (1)...(19): siRNA sense strand
gauugucagagcagggaaa

SEQ ID NO: 2560196 - RNA, 19 nt, Homo sapiens
  misc_RNA (1)...(19): siRNA sense strand
ggccagcaaaguugagaaa

SEQ ID NO: 2560197 - RNA, 19 nt, Homo sapiens
  misc_RNA (1)...(19): siRNA sense strand
aggaacugauugagaggau

SEQ ID NO: 2560198 - RNA, 19 nt, Homo sapiens
  misc_RNA (1)...(19): siRNA sense strand
cugcagaggucgcugguca

SEQ ID NO: 2560199 - RNA, 19 nt, Homo sapiens
  misc_RNA (1)...(19): siRNA sense strand
uuguuaagauucaggucaa

SEQ ID NO: 2560200 - RNA, 19 nt, Homo sapiens
  misc_RNA (1)...(19): siRNA sense strand
guuauguggcguauaguaa

SEQ ID NO: 2560201 - RNA, 19 nt, Homo sapiens
  misc_RNA (1)...(19): siRNA sense strand
ccuauaaggaacugauuga

SEQ ID NO: 2560202 - RNA, 19 nt, Homo sapiens
  misc_RNA (1)...(19): siRNA sense strand
acaauaacacaaaggccaa

SEQ ID NO: 2560203 - RNA, 19 nt, Homo sapiens
  misc_RNA (1)...(19): siRNA sense strand
uuguuuaccugguggagaa

SEQ ID NO: 2560204 - RNA, 19 nt, Homo sapiens
  misc_RNA (1)...(19): siRNA sense strand
caaugugcugaaagagaua

SEQ ID NO: 2560205 - RNA, 19 nt, Homo sapiens
  misc_RNA (1)...(19): siRNA sense strand
cuguagaugaagaagaaaa

SEQ ID NO: 2560206 - RNA, 19 nt, Homo sapiens
  misc_RNA (1)...(19): siRNA sense strand
agaagaaaaugcugacaau

SEQ ID NO: 2560207 - RNA, 19 nt, Homo sapiens
  misc_RNA (1)...(19): siRNA sense strand
cuggucaguucgugauuaa

SEQ ID NO: 2560208 - RNA, 19 nt, Homo sapiens
  misc_RNA (1)...(19): siRNA sense strand
agagcagacauaaaggaaa

SEQ ID NO: 2560209 - RNA, 19 nt, Homo sapiens
  misc_RNA (1)...(19): siRNA sense strand
ucaugagaguggaguauca

SEQ ID NO: 2560210 - RNA, 19 nt, Homo sapiens
  misc_RNA (1)...(19): siRNA sense strand
cggagaaacuggacagcac

SEQ ID NO: 2560211 - RNA, 19 nt, Homo sapiens
  misc_RNA (1)...(19): siRNA sense strand
aauacagagcagacauaaa

SEQ ID NO: 2560212 - RNA, 19 nt, Homo sapiens
  misc_RNA (1)...(19): siRNA sense strand
gggcuauuguaaaggggua

SEQ ID NO: 2560213 - RNA, 19 nt, Homo sapiens
  misc_RNA (1)...(19): siRNA sense strand
ugggaugaccugaagagaa

SEQ ID NO: 2560214 - RNA, 19 nt, Homo sapiens
  misc_RNA (1)...(19): siRNA sense strand
ggucaucaggauugccuaa

SEQ ID NO: 2560215 - RNA, 19 nt, Homo sapiens
  misc_RNA (1)...(19): siRNA sense strand
ccucagaaagcaagaaugu

SEQ ID NO: 2560216 - RNA, 19 nt, Homo sapiens
  misc_RNA (1)...(19): siRNA sense strand
gcucuagcuacuuggacua

SEQ ID NO: 2560217 - RNA, 19 nt, Homo sapiens
  misc_RNA (1)...(19): siRNA sense strand
ugcuguagaugaagaagaa

SEQ ID NO: 2560218 - RNA, 19 nt, Homo sapiens
  misc_RNA (1)...(19): siRNA sense strand
gagaaaguugucggagaaa

SEQ ID NO: 2560219 - RNA, 19 nt, Homo sapiens
  misc_RNA (1)...(19): siRNA sense strand
agaacuugaaacugcguaa

SEQ ID NO: 2560220 - RNA, 19 nt, Homo sapiens
  misc_RNA (1)...(19): siRNA sense strand
uugcaaaugcugaaagcuu

SEQ ID NO: 2560221 - RNA, 19 nt, Homo sapiens
  misc_RNA (1)...(19): siRNA sense strand
gaacaaaguggcacgagca

SEQ ID NO: 2560222 - RNA, 19 nt, Homo sapiens
  misc_RNA (1)...(19): siRNA sense strand
acauaaaggaaaugggccu

SEQ ID NO: 2560223 - RNA, 19 nt, Homo sapiens
  misc_RNA (1)...(19): siRNA sense strand
uauacauggaccagacuaa

SEQ ID NO: 2560224 - RNA, 19 nt, Homo sapiens
  misc_RNA (1)...(19): siRNA sense strand
uugaauugaaccuggacua

SEQ ID NO: 2560225 - RNA, 19 nt, Homo sapiens
  misc_RNA (1)...(19): siRNA sense strand
cugaaagcuuaaaugcaau

SEQ ID NO: 2560226 - RNA, 19 nt, Homo sapiens
  misc_RNA (1)...(19): siRNA sense strand
cuugaaacugcguaaacaa

SEQ ID NO: 2560227 - RNA, 19 nt, Homo sapiens
  misc_RNA (1)...(19): siRNA sense strand
ugauaagaacgguagacuu

SEQ ID NO: 2560228 - RNA, 19 nt, Homo sapiens
  misc_RNA (1)...(19): siRNA sense strand
uuguagaaccagaucacua

SEQ ID NO: 2560229 - RNA, 19 nt, Homo sapiens
  misc_RNA (1)...(19): siRNA sense strand
gcauccgguuacugggcaa

SEQ ID NO: 2560230 - RNA, 19 nt, Homo sapiens
  misc_RNA (1)...(19): siRNA sense strand
gacaauaacacaaaggcca

SEQ ID NO: 2560231 - RNA, 19 nt, Homo sapiens
  misc_RNA (1)...(19): siRNA sense strand
cuacuugggcuauuguaaa

SEQ ID NO: 2560232 - RNA, 19 nt, Homo sapiens
  misc_RNA (1)...(19): siRNA sense strand
cagagcagacauaaaggaa

SEQ ID NO: 2560233 - RNA, 19 nt, Homo sapiens
  misc_RNA (1)...(19): siRNA sense strand
gcuacuugggcuauuguaa

SEQ ID NO: 2560234 - RNA, 19 nt, Homo sapiens
  misc_RNA (1)...(19): siRNA sense strand
aacaacagauuucgggaau

SEQ ID NO: 2560235 - RNA, 19 nt, Homo sapiens
  misc_RNA (1)...(19): siRNA sense strand
aaacugagugugagagacu

SEQ ID NO: 2560236 - RNA, 19 nt, Homo sapiens
  misc_RNA (1)...(19): siRNA sense strand
aguaaggcugcaacaguua

SEQ ID NO: 2560237 - RNA, 19 nt, Homo sapiens
  misc_RNA (1)...(19): siRNA sense strand
agaaaagcuguuugggaau

SEQ ID NO: 2560238 - RNA, 19 nt, Homo sapiens
  misc_RNA (1)...(19): siRNA sense strand
cugagaaaacagacagauu

SEQ ID NO: 2560239 - RNA, 19 nt, Homo sapiens
  misc_RNA (1)...(19): siRNA sense strand
gugucaugagaguggagua

SEQ ID NO: 2560240 - RNA, 19 nt, Homo sapiens
  misc_RNA (1)...(19): siRNA sense strand
gcuuaaaugcaauuggugu

SEQ ID NO: 2560241 - RNA, 19 nt, Homo sapiens
  misc_RNA (1)...(19): siRNA sense strand
ggaaguaucugcuauggga

SEQ ID NO: 2560242 - RNA, 19 nt, Homo sapiens
  misc_RNA (1)...(19): siRNA sense strand
ugguaaccucagaaagcaa

SEQ ID NO: 2560243 - RNA, 19 nt, Homo sapiens
  misc_RNA (1)...(19): siRNA sense strand
cagaaagcaagaaugugaa

SEQ ID NO: 2560244 - RNA, 19 nt, Homo sapiens
  misc_RNA (1)...(19): siRNA sense strand
uaacaacagauuucgggaa

SEQ ID NO: 2560245 - RNA, 19 nt, Homo sapiens
  misc_RNA (1)...(19): siRNA sense strand
gugaauuuaaacucagcaa

SEQ ID NO: 2560246 - RNA, 19 nt, Homo sapiens
  misc_RNA (1)...(19): siRNA sense strand
gcucaaaacucggugauca

SEQ ID NO: 2560247 - RNA, 19 nt, Homo sapiens
  misc_RNA (1)...(19): siRNA sense strand
ggguuucagcccagcagaa

SEQ ID NO: 2560248 - RNA, 19 nt, Homo sapiens
  misc_RNA (1)...(19): siRNA sense strand
cagaggaagucgaggacga

SEQ ID NO: 2560249 - RNA, 19 nt, Homo sapiens
  misc_RNA (1)...(19): siRNA sense strand
agacagaggaagucgagga

SEQ ID NO: 2560250 - RNA, 19 nt, Homo sapiens
  misc_RNA (1)...(19): siRNA sense strand
caggaggugacaaggaaau

SEQ ID NO: 2560251 - RNA, 19 nt, Homo sapiens
  misc_RNA (1)...(19): siRNA sense strand
ccaggaggugacaaggaaa

SEQ ID NO: 2560252 - RNA, 19 nt, Homo sapiens
  misc_RNA (1)...(19): siRNA sense strand
ccgagaaagcccaggaggu

SEQ ID NO: 2560253 - RNA, 19 nt, Homo sapiens
  misc_RNA (1)...(19): siRNA sense strand
ucaccaugcucaaggccau

SEQ ID NO: 2560254 - RNA, 19 nt, Homo sapiens
  misc_RNA (1)...(19): siRNA sense strand
acauggagcagguggugau

SEQ ID NO: 2560255 - RNA, 19 nt, Homo sapiens
  misc_RNA (1)...(19): siRNA sense strand
aggccaagcuaaaggacca

SEQ ID NO: 2560256 - RNA, 19 nt, Homo sapiens
  misc_RNA (1)...(19): siRNA sense strand
cggauauugagcagaguuu

SEQ ID NO: 2560257 - RNA, 19 nt, Homo sapiens
  misc_RNA (1)...(19): siRNA sense strand
cugagaaguacaugaugaa

SEQ ID NO: 2560258 - RNA, 19 nt, Homo sapiens
  misc_RNA (1)...(19): siRNA sense strand
augacaaauucccggagaa

SEQ ID NO: 2560259 - RNA, 19 nt, Homo sapiens
  misc_RNA (1)...(19): siRNA sense strand
gguggagaaaguugagaca

SEQ ID NO: 2560260 - RNA, 19 nt, Homo sapiens
  misc_RNA (1)...(19): siRNA sense strand
agacagaguaugcucgcua

SEQ ID NO: 2560261 - RNA, 19 nt, Homo sapiens
  misc_RNA (1)...(19): siRNA sense strand
agauccaggccaagcuaaa

SEQ ID NO: 2560262 - RNA, 19 nt, Homo sapiens
  misc_RNA (1)...(19): siRNA sense strand
gggcaagauguauggucga

SEQ ID NO: 2560263 - RNA, 19 nt, Homo sapiens
  misc_RNA (1)...(19): siRNA sense strand
gcaagauguauggucgaaa

SEQ ID NO: 2560264 - RNA, 19 nt, Homo sapiens
  misc_RNA (1)...(19): siRNA sense strand
gagaaaguugagacagagu

SEQ ID NO: 2560265 - RNA, 19 nt, Homo sapiens
  misc_RNA (1)...(19): siRNA sense strand
cgguguacgccgagaccaa

SEQ ID NO: 2560266 - RNA, 19 nt, Homo sapiens
  misc_RNA (1)...(19): siRNA sense strand
cgaagaacgugcuggccuu

SEQ ID NO: 2560267 - RNA, 19 nt, Homo sapiens
  misc_RNA (1)...(19): siRNA sense strand
acggcgacauggagaacaa

SEQ ID NO: 2560268 - RNA, 19 nt, Homo sapiens
  misc_RNA (1)...(19): siRNA sense strand
gcuucaaggcugggaggaa

SEQ ID NO: 2560269 - RNA, 19 nt, Homo sapiens
  misc_RNA (1)...(19): siRNA sense strand
cgauugugaacauggacua

SEQ ID NO: 2560270 - RNA, 19 nt, Homo sapiens
  misc_RNA (1)...(19): siRNA sense strand
cggaagagugucuggagca

SEQ ID NO: 2560271 - RNA, 19 nt, Homo sapiens
  misc_RNA (1)...(19): siRNA sense strand
gaugauuucuuguugguga

SEQ ID NO: 2560272 - RNA, 19 nt, Homo sapiens
  misc_RNA (1)...(19): siRNA sense strand
ggaagaugagcgugcggga

SEQ ID NO: 2560273 - RNA, 19 nt, Homo sapiens
  misc_RNA (1)...(19): siRNA sense strand
ccucgagggugaaggcacu

SEQ ID NO: 2560274 - RNA, 19 nt, Homo sapiens
  misc_RNA (1)...(19): siRNA sense strand
gcuacggcgacauggagaa

SEQ ID NO: 2560275 - RNA, 19 nt, Homo sapiens
  misc_RNA (1)...(19): siRNA sense strand
cgguguacgccgagaccaa

SEQ ID NO: 2560276 - RNA, 19 nt, Homo sapiens
  misc_RNA (1)...(19): siRNA sense strand
cgaagaacgugcuggccuu

SEQ ID NO: 2560277 - RNA, 19 nt, Homo sapiens
  misc_RNA (1)...(19): siRNA sense strand
acggcgacauggagaacaa

SEQ ID NO: 2560278 - RNA, 19 nt, Homo sapiens
  misc_RNA (1)...(19): siRNA sense strand
cgauugugaacauggacua

SEQ ID NO: 2560279 - RNA, 19 nt, Homo sapiens
  misc_RNA (1)...(19): siRNA sense strand
cggaagagugucuggagca

SEQ ID NO: 2560280 - RNA, 19 nt, Homo sapiens
  misc_RNA (1)...(19): siRNA sense strand
ggaagaugagcgugcggga

SEQ ID NO: 2560281 - RNA, 19 nt, Homo sapiens
  misc_RNA (1)...(19): siRNA sense strand
ccucgagggugaaggcacu

SEQ ID NO: 2560282 - RNA, 19 nt, Homo sapiens
  misc_RNA (1)...(19): siRNA sense strand
gcuacggcgacauggagaa

SEQ ID NO: 2560283 - RNA, 19 nt, Homo sapiens
  misc_RNA (1)...(19): siRNA sense strand
cgguguacgccgagaccaa

SEQ ID NO: 2560284 - RNA, 19 nt, Homo sapiens
  misc_RNA (1)...(19): siRNA sense strand
cgaagaacgugcuggccuu

SEQ ID NO: 2560285 - RNA, 19 nt, Homo sapiens
  misc_RNA (1)...(19): siRNA sense strand
acggcgacauggagaacaa

SEQ ID NO: 2560286 - RNA, 19 nt, Homo sapiens
  misc_RNA (1)...(19): siRNA sense strand
cgauugugaacauggacua

SEQ ID NO: 2560287 - RNA, 19 nt, Homo sapiens
  misc_RNA (1)...(19): siRNA sense strand
cggaagagugucuggagca

SEQ ID NO: 2560288 - RNA, 19 nt, Homo sapiens
  misc_RNA (1)...(19): siRNA sense strand
ggaagaugagcgugcggga

SEQ ID NO: 2560289 - RNA, 19 nt, Homo sapiens
  misc_RNA (1)...(19): siRNA sense strand
ccucgagggugaaggcacu

SEQ ID NO: 2560290 - RNA, 19 nt, Homo sapiens
  misc_RNA (1)...(19): siRNA sense strand
gcuacggcgacauggagaa

SEQ ID NO: 2560291 - RNA, 19 nt, Homo sapiens
  misc_RNA (1)...(19): siRNA sense strand
cgguguacgccgagaccaa

SEQ ID NO: 2560292 - RNA, 19 nt, Homo sapiens
  misc_RNA (1)...(19): siRNA sense strand
cgaagaacgugcuggccuu

SEQ ID NO: 2560293 - RNA, 19 nt, Homo sapiens
  misc_RNA (1)...(19): siRNA sense strand
acggcgacauggagaacaa

SEQ ID NO: 2560294 - RNA, 19 nt, Homo sapiens
  misc_RNA (1)...(19): siRNA sense strand
gcuucaaggcugggaggaa

SEQ ID NO: 2560295 - RNA, 19 nt, Homo sapiens
  misc_RNA (1)...(19): siRNA sense strand
cgauugugaacauggacua

SEQ ID NO: 2560296 - RNA, 19 nt, Homo sapiens
  misc_RNA (1)...(19): siRNA sense strand
cggaagagugucuggagca

SEQ ID NO: 2560297 - RNA, 19 nt, Homo sapiens
  misc_RNA (1)...(19): siRNA sense strand
gaugauuucuuguugguga

SEQ ID NO: 2560298 - RNA, 19 nt, Homo sapiens
  misc_RNA (1)...(19): siRNA sense strand
ggaagaugagcgugcggga

SEQ ID NO: 2560299 - RNA, 19 nt, Homo sapiens
  misc_RNA (1)...(19): siRNA sense strand
ccucgagggugaaggcacu

SEQ ID NO: 2560300 - RNA, 19 nt, Homo sapiens
  misc_RNA (1)...(19): siRNA sense strand
gcuacggcgacauggagaa

SEQ ID NO: 2560301 - RNA, 19 nt, Homo sapiens
  misc_RNA (1)...(19): siRNA sense strand
agaaauaacaugauccaga

SEQ ID NO: 2560302 - RNA, 19 nt, Homo sapiens
  misc_RNA (1)...(19): siRNA sense strand
uguggaagguguagggagu

SEQ ID NO: 2560303 - RNA, 19 nt, Homo sapiens
  misc_RNA (1)...(19): siRNA sense strand
auaacaugauccagaccaa

SEQ ID NO: 2560304 - RNA, 19 nt, Homo sapiens
  misc_RNA (1)...(19): siRNA sense strand
cauaggaggaccuguguga

SEQ ID NO: 2560305 - RNA, 19 nt, Homo sapiens
  misc_RNA (1)...(19): siRNA sense strand
ccuaaaagucugugcugau

SEQ ID NO: 2560306 - RNA, 19 nt, Homo sapiens
  misc_RNA (1)...(19): siRNA sense strand
aggaaauccaacaccagaa

SEQ ID NO: 2560307 - RNA, 19 nt, Homo sapiens
  misc_RNA (1)...(19): siRNA sense strand
cagaccaagccaacaggaa

SEQ ID NO: 2560308 - RNA, 19 nt, Homo sapiens
  misc_RNA (1)...(19): siRNA sense strand
cugcauacauuguggaagg

SEQ ID NO: 2560309 - RNA, 19 nt, Homo sapiens
  misc_RNA (1)...(19): siRNA sense strand
ggccagaguuacauagaca

SEQ ID NO: 2560310 - RNA, 19 nt, Homo sapiens
  misc_RNA (1)...(19): siRNA sense strand
ggacguaggaggacuguca

SEQ ID NO: 2560311 - RNA, 19 nt, Homo sapiens
  misc_RNA (1)...(19): siRNA sense strand
gaagauggacguaggagga

SEQ ID NO: 2560312 - RNA, 19 nt, Homo sapiens
  misc_RNA (1)...(19): siRNA sense strand
ucaucguccuggaggcuaa

SEQ ID NO: 2560313 - RNA, 19 nt, Homo sapiens
  misc_RNA (1)...(19): siRNA sense strand
ggacaggcaagaagagcca

SEQ ID NO: 2560314 - RNA, 19 nt, Homo sapiens
  misc_RNA (1)...(19): siRNA sense strand
uagacaaggugcagccaga

SEQ ID NO: 2560315 - RNA, 19 nt, Homo sapiens
  misc_RNA (1)...(19): siRNA sense strand
gggaggagcaggagaagcu

SEQ ID NO: 2560316 - RNA, 19 nt, Homo sapiens
  misc_RNA (1)...(19): siRNA sense strand
gcaagaagagccaggccca

SEQ ID NO: 2560317 - RNA, 19 nt, Homo sapiens
  misc_RNA (1)...(19): siRNA sense strand
ugucagauccauacgucaa

SEQ ID NO: 2560318 - RNA, 19 nt, Homo sapiens
  misc_RNA (1)...(19): siRNA sense strand
agccagaaguagaggagcu

SEQ ID NO: 2560319 - RNA, 19 nt, Homo sapiens
  misc_RNA (1)...(19): siRNA sense strand
aaacggaggcgguacgaga

SEQ ID NO: 2560320 - RNA, 19 nt, Homo sapiens
  misc_RNA (1)...(19): siRNA sense strand
cgaggugcccugugaccaa

SEQ ID NO: 2560321 - RNA, 19 nt, Homo sapiens
  misc_RNA (1)...(19): siRNA sense strand
aaaccaccaucaagaagaa

SEQ ID NO: 2560322 - RNA, 19 nt, Homo sapiens
  misc_RNA (1)...(19): siRNA sense strand
acgacaagcugggcaagaa

SEQ ID NO: 2560323 - RNA, 19 nt, Homo sapiens
  misc_RNA (1)...(19): siRNA sense strand
cagaaguagaggagcugga

SEQ ID NO: 2560324 - RNA, 19 nt, Homo sapiens
  misc_RNA (1)...(19): siRNA sense strand
ccuauuacaacgaagcuuu

SEQ ID NO: 2560325 - RNA, 19 nt, Homo sapiens
  misc_RNA (1)...(19): siRNA sense strand
gguacgagaccaaggugca

SEQ ID NO: 2560326 - RNA, 19 nt, Homo sapiens
  misc_RNA (1)...(19): siRNA sense strand
acuacgacaagcugggcaa

SEQ ID NO: 2560327 - RNA, 19 nt, Homo sapiens
  misc_RNA (1)...(19): siRNA sense strand
ugcaguacucccuggauua

SEQ ID NO: 2560328 - RNA, 19 nt, Homo sapiens
  misc_RNA (1)...(19): siRNA sense strand
gcacagaugcugagggaga

SEQ ID NO: 2560329 - RNA, 19 nt, Homo sapiens
  misc_RNA (1)...(19): siRNA sense strand
aggacaagcucgaugccua

SEQ ID NO: 2560330 - RNA, 19 nt, Homo sapiens
  misc_RNA (1)...(19): siRNA sense strand
cguaugaaucccaggucua

SEQ ID NO: 2560331 - RNA, 19 nt, Homo sapiens
  misc_RNA (1)...(19): siRNA sense strand
gggcacagaugcugaggga

SEQ ID NO: 2560332 - RNA, 19 nt, Homo sapiens
  misc_RNA (1)...(19): siRNA sense strand
ccucaaagcuguugucgga

SEQ ID NO: 2560333 - RNA, 19 nt, Homo sapiens
  misc_RNA (1)...(19): siRNA sense strand
agggaguccucuaggguau

SEQ ID NO: 2560334 - RNA, 19 nt, Homo sapiens
  misc_RNA (1)...(19): siRNA sense strand
ggaaggugcugguggugga

SEQ ID NO: 2560335 - RNA, 19 nt, Homo sapiens
  misc_RNA (1)...(19): siRNA sense strand
cagaaagagcucagcaagu

SEQ ID NO: 2560336 - RNA, 19 nt, Homo sapiens
  misc_RNA (1)...(19): siRNA sense strand
aggacacuauugaggacaa

SEQ ID NO: 2560337 - RNA, 19 nt, Homo sapiens
  misc_RNA (1)...(19): siRNA sense strand
ugacagacaucaugaccga

SEQ ID NO: 2560338 - RNA, 19 nt, Homo sapiens
  misc_RNA (1)...(19): siRNA sense strand
cccacaaggcucagaugaa

SEQ ID NO: 2560339 - RNA, 19 nt, Homo sapiens
  misc_RNA (1)...(19): siRNA sense strand
gggcacuggcauaagaaca

SEQ ID NO: 2560340 - RNA, 19 nt, Homo sapiens
  misc_RNA (1)...(19): siRNA sense strand
ggcacuggcauaagaacaa

SEQ ID NO: 2560341 - RNA, 19 nt, Homo sapiens
  misc_RNA (1)...(19): siRNA sense strand
ugacccaggccaacggaaa

SEQ ID NO: 2560342 - RNA, 19 nt, Homo sapiens
  misc_RNA (1)...(19): siRNA sense strand
acaucaugaccgagggcau

SEQ ID NO: 2560343 - RNA, 19 nt, Homo sapiens
  misc_RNA (1)...(19): siRNA sense strand
ccaaauuucucauggaccu

SEQ ID NO: 2560344 - RNA, 19 nt, Homo sapiens
  misc_RNA (1)...(19): siRNA sense strand
cgauuguggaagauaucaa

SEQ ID NO: 2560345 - RNA, 19 nt, Homo sapiens
  misc_RNA (1)...(19): siRNA sense strand
cggaggaaaaccugaacaa

SEQ ID NO: 2560346 - RNA, 19 nt, Homo sapiens
  misc_RNA (1)...(19): siRNA sense strand
gcaucagcgagcagaccua

SEQ ID NO: 2560347 - RNA, 19 nt, Homo sapiens
  misc_RNA (1)...(19): siRNA sense strand
cugagggagagaagaucaa

SEQ ID NO: 2560348 - RNA, 19 nt, Homo sapiens
  misc_RNA (1)...(19): siRNA sense strand
ggaaggaacgcaucagcga

SEQ ID NO: 2560349 - RNA, 19 nt, Homo sapiens
  misc_RNA (1)...(19): siRNA sense strand
ggguaucuuuugaggauca

SEQ ID NO: 2560350 - RNA, 19 nt, Homo sapiens
  misc_RNA (1)...(19): siRNA sense strand
gagaaugaauacuggagag

SEQ ID NO: 2560351 - RNA, 19 nt, Homo sapiens
  misc_RNA (1)...(19): siRNA sense strand
cggaggauagugagaucau

SEQ ID NO: 2560352 - RNA, 19 nt, Homo sapiens
  misc_RNA (1)...(19): siRNA sense strand
ucaaagcuguugucggaga

SEQ ID NO: 2560353 - RNA, 19 nt, Homo sapiens
  misc_RNA (1)...(19): siRNA sense strand
augcugagggagagaagau

SEQ ID NO: 2560354 - RNA, 19 nt, Homo sapiens
  misc_RNA (1)...(19): siRNA sense strand
cggaaaucaauauugcauu

SEQ ID NO: 2560355 - RNA, 19 nt, Homo sapiens
  misc_RNA (1)...(19): siRNA sense strand
agaaugaauacuggagaga

SEQ ID NO: 2560356 - RNA, 19 nt, Homo sapiens
  misc_RNA (1)...(19): siRNA sense strand
aggaaaaccugaacaaacu

SEQ ID NO: 2560357 - RNA, 19 nt, Homo sapiens
  misc_RNA (1)...(19): siRNA sense strand
ucaaggacaucauggagga

SEQ ID NO: 2560358 - RNA, 19 nt, Homo sapiens
  misc_RNA (1)...(19): siRNA sense strand
aggaauauuaccuggugaa

SEQ ID NO: 2560359 - RNA, 19 nt, Homo sapiens
  misc_RNA (1)...(19): siRNA sense strand
ucauggaguacgugggaga

SEQ ID NO: 2560360 - RNA, 19 nt, Homo sapiens
  misc_RNA (1)...(19): siRNA sense strand
cuguagagaaugaggugga

SEQ ID NO: 2560361 - RNA, 19 nt, Homo sapiens
  misc_RNA (1)...(19): siRNA sense strand
ggaaucagcugcaggaccu

SEQ ID NO: 2560362 - RNA, 19 nt, Homo sapiens
  misc_RNA (1)...(19): siRNA sense strand
gugcagaaggccaagcaga

SEQ ID NO: 2560363 - RNA, 19 nt, Homo sapiens
  misc_RNA (1)...(19): siRNA sense strand
gugugguacagaaggguau

SEQ ID NO: 2560364 - RNA, 19 nt, Homo sapiens
  misc_RNA (1)...(19): siRNA sense strand
acaaggacuuagaaaggga

SEQ ID NO: 2560365 - RNA, 19 nt, Homo sapiens
  misc_RNA (1)...(19): siRNA sense strand
ccuacaaugaccagggcca

SEQ ID NO: 2560366 - RNA, 19 nt, Homo sapiens
  misc_RNA (1)...(19): siRNA sense strand
cuggagaagauucgcaaga

SEQ ID NO: 2560367 - RNA, 19 nt, Homo sapiens
  misc_RNA (1)...(19): siRNA sense strand
cuugaaagugugaaagaaa

SEQ ID NO: 2560368 - RNA, 19 nt, Homo sapiens
  misc_RNA (1)...(19): siRNA sense strand
aguuagaaagagagggaau

SEQ ID NO: 2560369 - RNA, 19 nt, Homo sapiens
  misc_RNA (1)...(19): siRNA sense strand
aggagcaaauacugggaaa

SEQ ID NO: 2560370 - RNA, 19 nt, Homo sapiens
  misc_RNA (1)...(19): siRNA sense strand
guggaauacccaauggaaa

SEQ ID NO: 2560371 - RNA, 19 nt, Homo sapiens
  misc_RNA (1)...(19): siRNA sense strand
gcagaaaucuccauggcuu

SEQ ID NO: 2560372 - RNA, 19 nt, Homo sapiens
  misc_RNA (1)...(19): siRNA sense strand
cugaagaggauguaaguca

SEQ ID NO: 2560373 - RNA, 19 nt, Homo sapiens
  misc_RNA (1)...(19): siRNA sense strand
agggaauauuuauggaaga

SEQ ID NO: 2560374 - RNA, 19 nt, Homo sapiens
  misc_RNA (1)...(19): siRNA sense strand
aauggaaacaaguggcaua

SEQ ID NO: 2560375 - RNA, 19 nt, Homo sapiens
  misc_RNA (1)...(19): siRNA sense strand
ggggagaauagaaagaaaa

SEQ ID NO: 2560376 - RNA, 19 nt, Homo sapiens
  misc_RNA (1)...(19): siRNA sense strand
gcaguuagaaagagaggga

SEQ ID NO: 2560377 - RNA, 19 nt, Homo sapiens
  misc_RNA (1)...(19): siRNA sense strand
accugaagccggagaauau

SEQ ID NO: 2560378 - RNA, 19 nt, Homo sapiens
  misc_RNA (1)...(19): siRNA sense strand
ggcaaugauaguaagaaau

SEQ ID NO: 2560379 - RNA, 19 nt, Homo sapiens
  misc_RNA (1)...(19): siRNA sense strand
uggaacauugugagaaauu

SEQ ID NO: 2560380 - RNA, 19 nt, Homo sapiens
  misc_RNA (1)...(19): siRNA sense strand
auacaaaagcagaacggaa

SEQ ID NO: 2560381 - RNA, 19 nt, Homo sapiens
  misc_RNA (1)...(19): siRNA sense strand
acagggaagcugaggacau

SEQ ID NO: 2560382 - RNA, 19 nt, Homo sapiens
  misc_RNA (1)...(19): siRNA sense strand
uggagaaguucaagcucau

SEQ ID NO: 2560383 - RNA, 19 nt, Homo sapiens
  misc_RNA (1)...(19): siRNA sense strand
aaaaguaacaggagcaaau

SEQ ID NO: 2560384 - RNA, 19 nt, Homo sapiens
  misc_RNA (1)...(19): siRNA sense strand
cagaaaucuccauggcuuu

SEQ ID NO: 2560385 - RNA, 19 nt, Homo sapiens
  misc_RNA (1)...(19): siRNA sense strand
gcuuaaucaccaaggucau

SEQ ID NO: 2560386 - RNA, 19 nt, Homo sapiens
  misc_RNA (1)...(19): siRNA sense strand
acacauuaacugggaagaa

SEQ ID NO: 2560387 - RNA, 19 nt, Homo sapiens
  misc_RNA (1)...(19): siRNA sense strand
gacucaacucucagugaaa

SEQ ID NO: 2560388 - RNA, 19 nt, Homo sapiens
  misc_RNA (1)...(19): siRNA sense strand
uggaauacccaauggaaac

SEQ ID NO: 2560389 - RNA, 19 nt, Homo sapiens
  misc_RNA (1)...(19): siRNA sense strand
cugaaaucuugaugagaag

SEQ ID NO: 2560390 - RNA, 19 nt, Homo sapiens
  misc_RNA (1)...(19): siRNA sense strand
cuggagaaguucaagcuca

SEQ ID NO: 2560391 - RNA, 19 nt, Homo sapiens
  misc_RNA (1)...(19): siRNA sense strand
uggggagaauagaaagaaa

SEQ ID NO: 2560392 - RNA, 19 nt, Homo sapiens
  misc_RNA (1)...(19): siRNA sense strand
cucagacaccuguggaaua

SEQ ID NO: 2560393 - RNA, 19 nt, Homo sapiens
  misc_RNA (1)...(19): siRNA sense strand
uggcaggaguguuugacau

SEQ ID NO: 2560394 - RNA, 19 nt, Homo sapiens
  misc_RNA (1)...(19): siRNA sense strand
acggaauauucuggaggaa

SEQ ID NO: 2560395 - RNA, 19 nt, Homo sapiens
  misc_RNA (1)...(19): siRNA sense strand
guggaguuugggagcauua

SEQ ID NO: 2560396 - RNA, 19 nt, Homo sapiens
  misc_RNA (1)...(19): siRNA sense strand
gagcaaauacugggaaaau

SEQ ID NO: 2560397 - RNA, 19 nt, Homo sapiens
  misc_RNA (1)...(19): siRNA sense strand
ugugaaacuaacagacuuu

SEQ ID NO: 2560398 - RNA, 19 nt, Homo sapiens
  misc_RNA (1)...(19): siRNA sense strand
gggaguuggaccauaugaa

SEQ ID NO: 2560399 - RNA, 19 nt, Homo sapiens
  misc_RNA (1)...(19): siRNA sense strand
cgaucaccucgaagauuua

SEQ ID NO: 2560400 - RNA, 19 nt, Homo sapiens
  misc_RNA (1)...(19): siRNA sense strand
acacaagaagccagagauc

SEQ ID NO: 2560401 - RNA, 19 nt, Homo sapiens
  misc_RNA (1)...(19): siRNA sense strand
ugcuaaagauacagcucau

SEQ ID NO: 2560402 - RNA, 19 nt, Homo sapiens
  misc_RNA (1)...(19): siRNA sense strand
ggagcaaauacugggaaaa

SEQ ID NO: 2560403 - RNA, 19 nt, Homo sapiens
  misc_RNA (1)...(19): siRNA sense strand
ccucgaagauuuauuggca

SEQ ID NO: 2560404 - RNA, 19 nt, Homo sapiens
  misc_RNA (1)...(19): siRNA sense strand
acuucggguacuugguaaa

SEQ ID NO: 2560405 - RNA, 19 nt, Homo sapiens
  misc_RNA (1)...(19): siRNA sense strand
uuaugcaguuagaaagaga

SEQ ID NO: 2560406 - RNA, 19 nt, Homo sapiens
  misc_RNA (1)...(19): siRNA sense strand
cggugaagaucgagauaca

SEQ ID NO: 2560407 - RNA, 19 nt, Homo sapiens
  misc_RNA (1)...(19): siRNA sense strand
uguugauggaagagagaaa

SEQ ID NO: 2560408 - RNA, 19 nt, Homo sapiens
  misc_RNA (1)...(19): siRNA sense strand
ugauaacaauacaggcaaa

SEQ ID NO: 2560409 - RNA, 19 nt, Homo sapiens
  misc_RNA (1)...(19): siRNA sense strand
auaaagaugcauugaggaa

SEQ ID NO: 2560410 - RNA, 19 nt, Homo sapiens
  misc_RNA (1)...(19): siRNA sense strand
ggaucaaaauguuggagua

SEQ ID NO: 2560411 - RNA, 19 nt, Homo sapiens
  misc_RNA (1)...(19): siRNA sense strand
cagaauugaaucagggaga

SEQ ID NO: 2560412 - RNA, 19 nt, Homo sapiens
  misc_RNA (1)...(19): siRNA sense strand
caucauucagcaagggaua

SEQ ID NO: 2560413 - RNA, 19 nt, Homo sapiens
  misc_RNA (1)...(19): siRNA sense strand
ggcugaaguuaaagagaca

SEQ ID NO: 2560414 - RNA, 19 nt, Homo sapiens
  misc_RNA (1)...(19): siRNA sense strand
aaacagaagugcagccaca

SEQ ID NO: 2560415 - RNA, 19 nt, Homo sapiens
  misc_RNA (1)...(19): siRNA sense strand
gauggaacagacugggaaa

SEQ ID NO: 2560416 - RNA, 19 nt, Homo sapiens
  misc_RNA (1)...(19): siRNA sense strand
aggaagacauggaacccua

SEQ ID NO: 2560417 - RNA, 19 nt, Homo sapiens
  misc_RNA (1)...(19): siRNA sense strand
cggacagggaagaugacaa

SEQ ID NO: 2560418 - RNA, 19 nt, Homo sapiens
  misc_RNA (1)...(19): siRNA sense strand
gugaugaagaugaagauga

SEQ ID NO: 2560419 - RNA, 19 nt, Homo sapiens
  misc_RNA (1)...(19): siRNA sense strand
agaugaagcccuugaaagu

SEQ ID NO: 2560420 - RNA, 19 nt, Homo sapiens
  misc_RNA (1)...(19): siRNA sense strand
cuagaaaguaagacgugua

SEQ ID NO: 2560421 - RNA, 19 nt, Homo sapiens
  misc_RNA (1)...(19): siRNA sense strand
ugaugauguugauggaaga

SEQ ID NO: 2560422 - RNA, 19 nt, Homo sapiens
  misc_RNA (1)...(19): siRNA sense strand
guggaaacaaggucgacaa

SEQ ID NO: 2560423 - RNA, 19 nt, Homo sapiens
  misc_RNA (1)...(19): siRNA sense strand
acucaaggaacaauacaaa

SEQ ID NO: 2560424 - RNA, 19 nt, Homo sapiens
  misc_RNA (1)...(19): siRNA sense strand
uaaacaggaaagagccaaa

SEQ ID NO: 2560425 - RNA, 19 nt, Homo sapiens
  misc_RNA (1)...(19): siRNA sense strand
uugaaauacgggacagaau

SEQ ID NO: 2560426 - RNA, 19 nt, Homo sapiens
  misc_RNA (1)...(19): siRNA sense strand
ggaauguggaccagggagu

SEQ ID NO: 2560427 - RNA, 19 nt, Homo sapiens
  misc_RNA (1)...(19): siRNA sense strand
cguuuauggaaucuagaaa

SEQ ID NO: 2560428 - RNA, 19 nt, Homo sapiens
  misc_RNA (1)...(19): siRNA sense strand
ccaaacucaaggaacaaua

SEQ ID NO: 2560429 - RNA, 19 nt, Homo sapiens
  misc_RNA (1)...(19): siRNA sense strand
aagcuaugauucugaugaa

SEQ ID NO: 2560430 - RNA, 19 nt, Homo sapiens
  misc_RNA (1)...(19): siRNA sense strand
aauuaauagggcagaugaa

SEQ ID NO: 2560431 - RNA, 19 nt, Homo sapiens
  misc_RNA (1)...(19): siRNA sense strand
caucagaggaaggagacaa

SEQ ID NO: 2560432 - RNA, 19 nt, Homo sapiens
  misc_RNA (1)...(19): siRNA sense strand
uguuacaaguuuagcaguu

SEQ ID NO: 2560433 - RNA, 19 nt, Homo sapiens
  misc_RNA (1)...(19): siRNA sense strand
gccaagaaaauuugaagaa

SEQ ID NO: 2560434 - RNA, 19 nt, Homo sapiens
  misc_RNA (1)...(19): siRNA sense strand
cagaggaaggagacaauga

SEQ ID NO: 2560435 - RNA, 19 nt, Homo sapiens
  misc_RNA (1)...(19): siRNA sense strand
gcucaugaagacaggcaca

SEQ ID NO: 2560436 - RNA, 19 nt, Homo sapiens
  misc_RNA (1)...(19): siRNA sense strand
aucuacaggagguggguua

SEQ ID NO: 2560437 - RNA, 19 nt, Homo sapiens
  misc_RNA (1)...(19): siRNA sense strand
ugaacugggaccuggagaa

SEQ ID NO: 2560438 - RNA, 19 nt, Homo sapiens
  misc_RNA (1)...(19): siRNA sense strand
ugccaaauaaauagaguca

SEQ ID NO: 2560439 - RNA, 19 nt, Homo sapiens
  misc_RNA (1)...(19): siRNA sense strand
aaguggaagcauugacauu

SEQ ID NO: 2560440 - RNA, 19 nt, Homo sapiens
  misc_RNA (1)...(19): siRNA sense strand
guucaauacguuuauggaa

SEQ ID NO: 2560441 - RNA, 19 nt, Homo sapiens
  misc_RNA (1)...(19): siRNA sense strand
augaagaugaagaugauga

SEQ ID NO: 2560442 - RNA, 19 nt, Homo sapiens
  misc_RNA (1)...(19): siRNA sense strand
caaugaaucuagaagugca

SEQ ID NO: 2560443 - RNA, 19 nt, Homo sapiens
  misc_RNA (1)...(19): siRNA sense strand
gcuucgagguggagagagc

SEQ ID NO: 2560444 - RNA, 19 nt, Homo sapiens
  misc_RNA (1)...(19): siRNA sense strand
uaacagcaucagaggauca

SEQ ID NO: 2560445 - RNA, 19 nt, Homo sapiens
  misc_RNA (1)...(19): siRNA sense strand
aaggaagggccaagaaaau

SEQ ID NO: 2560446 - RNA, 19 nt, Homo sapiens
  misc_RNA (1)...(19): siRNA sense strand
cugccuccgugcuggauaa

SEQ ID NO: 2560447 - RNA, 19 nt, Homo sapiens
  misc_RNA (1)...(19): siRNA sense strand
gggagaaaggaagggccaa

SEQ ID NO: 2560448 - RNA, 19 nt, Homo sapiens
  misc_RNA (1)...(19): siRNA sense strand
ggccaaugaagcagacuca

SEQ ID NO: 2560449 - RNA, 19 nt, Homo sapiens
  misc_RNA (1)...(19): siRNA sense strand
cuuuagaauccaauguaga

SEQ ID NO: 2560450 - RNA, 19 nt, Homo sapiens
  misc_RNA (1)...(19): siRNA sense strand
cgauggaacagacugggaa

SEQ ID NO: 2560451 - RNA, 19 nt, Homo sapiens
  misc_RNA (1)...(19): siRNA sense strand
cuugcuaauuugagagaug

SEQ ID NO: 2560452 - RNA, 19 nt, Homo sapiens
  misc_RNA (1)...(19): siRNA sense strand
ggaagagagaaaagcguca

SEQ ID NO: 2560453 - RNA, 19 nt, Homo sapiens
  misc_RNA (1)...(19): siRNA sense strand
acaugaaauuaauagggca

SEQ ID NO: 2560454 - RNA, 19 nt, Homo sapiens
  misc_RNA (1)...(19): siRNA sense strand
gggcagaugaaguggaagc

SEQ ID NO: 2560455 - RNA, 19 nt, Homo sapiens
  misc_RNA (1)...(19): siRNA sense strand
agcagugacccgagccaua

SEQ ID NO: 2560456 - RNA, 19 nt, Homo sapiens
  misc_RNA (1)...(19): siRNA sense strand
auucacagcucaucgaaaa

SEQ ID NO: 2560457 - RNA, 19 nt, Homo sapiens
  misc_RNA (1)...(19): siRNA sense strand
ggaaagagccaaauaccac

SEQ ID NO: 2560458 - RNA, 19 nt, Homo sapiens
  misc_RNA (1)...(19): siRNA sense strand
agggagaaaggaagggcca

SEQ ID NO: 2560459 - RNA, 19 nt, Homo sapiens
  misc_RNA (1)...(19): siRNA sense strand
cgacagaacaacaaggaga

SEQ ID NO: 2560460 - RNA, 19 nt, Homo sapiens
  misc_RNA (1)...(19): siRNA sense strand
acuccaagucugugagcaa

SEQ ID NO: 2560461 - RNA, 19 nt, Homo sapiens
  misc_RNA (1)...(19): siRNA sense strand
guuaaggacgacagaacaa

SEQ ID NO: 2560462 - RNA, 19 nt, Homo sapiens
  misc_RNA (1)...(19): siRNA sense strand
cagagcaacucaaggaaaa

SEQ ID NO: 2560463 - RNA, 19 nt, Homo sapiens
  misc_RNA (1)...(19): siRNA sense strand
cgacuuuacgagagcuuaa

SEQ ID NO: 2560464 - RNA, 19 nt, Homo sapiens
  misc_RNA (1)...(19): siRNA sense strand
agaaagugaaauugaccaa

SEQ ID NO: 2560465 - RNA, 19 nt, Homo sapiens
  misc_RNA (1)...(19): siRNA sense strand
gagcauagggcaagggaug

SEQ ID NO: 2560466 - RNA, 19 nt, Homo sapiens
  misc_RNA (1)...(19): siRNA sense strand
aggaaaacauuguggaguu

SEQ ID NO: 2560467 - RNA, 19 nt, Homo sapiens
  misc_RNA (1)...(19): siRNA sense strand
aagcuugagcauagggcaa

SEQ ID NO: 2560468 - RNA, 19 nt, Homo sapiens
  misc_RNA (1)...(19): siRNA sense strand
auggaaaaguccugaaaau

SEQ ID NO: 2560469 - RNA, 19 nt, Homo sapiens
  misc_RNA (1)...(19): siRNA sense strand
augaaauuguggcgaucaa

SEQ ID NO: 2560470 - RNA, 19 nt, Homo sapiens
  misc_RNA (1)...(19): siRNA sense strand
uauuagucauucagagcaa

SEQ ID NO: 2560471 - RNA, 19 nt, Homo sapiens
  misc_RNA (1)...(19): siRNA sense strand
acuccaagcagcagaccaa

SEQ ID NO: 2560472 - RNA, 19 nt, Homo sapiens
  misc_RNA (1)...(19): siRNA sense strand
acaaaguaccucaagucaa

SEQ ID NO: 2560473 - RNA, 19 nt, Homo sapiens
  misc_RNA (1)...(19): siRNA sense strand
uggaaagcucucaaagcaa

SEQ ID NO: 2560474 - RNA, 19 nt, Homo sapiens
  misc_RNA (1)...(19): siRNA sense strand
cauuaaaaucacugcgcaa

SEQ ID NO: 2560475 - RNA, 19 nt, Homo sapiens
  misc_RNA (1)...(19): siRNA sense strand
gggcaagggauggcagcua

SEQ ID NO: 2560476 - RNA, 19 nt, Homo sapiens
  misc_RNA (1)...(19): siRNA sense strand
augaagaagucaaagaaac

SEQ ID NO: 2560477 - RNA, 19 nt, Homo sapiens
  misc_RNA (1)...(19): siRNA sense strand
cagaacaacaaggagaaua

SEQ ID NO: 2560478 - RNA, 19 nt, Homo sapiens
  misc_RNA (1)...(19): siRNA sense strand
agaaauucaaggacaguga

SEQ ID NO: 2560479 - RNA, 19 nt, Homo sapiens
  misc_RNA (1)...(19): siRNA sense strand
cgguggaugugauggcaga

SEQ ID NO: 2560480 - RNA, 19 nt, Homo sapiens
  misc_RNA (1)...(19): siRNA sense strand
gacagaacaacaaggagaa

SEQ ID NO: 2560481 - RNA, 19 nt, Homo sapiens
  misc_RNA (1)...(19): siRNA sense strand
ccuacaggaccaaggccaa

SEQ ID NO: 2560482 - RNA, 19 nt, Homo sapiens
  misc_RNA (1)...(19): siRNA sense strand
cuggaagaaauaaccgaaa

SEQ ID NO: 2560483 - RNA, 19 nt, Homo sapiens
  misc_RNA (1)...(19): siRNA sense strand
uggcaagaucuucggucaa

SEQ ID NO: 2560484 - RNA, 19 nt, Homo sapiens
  misc_RNA (1)...(19): siRNA sense strand
cagagucggcauagcuaua

SEQ ID NO: 2560485 - RNA, 19 nt, Homo sapiens
  misc_RNA (1)...(19): siRNA sense strand
acaaggaaacacaugaaau

SEQ ID NO: 2560486 - RNA, 19 nt, Homo sapiens
  misc_RNA (1)...(19): siRNA sense strand
gaucuaacagcaaggacau

SEQ ID NO: 2560487 - RNA, 19 nt, Homo sapiens
  misc_RNA (1)...(19): siRNA sense strand
cagaaggcccagggacaaa

SEQ ID NO: 2560488 - RNA, 19 nt, Homo sapiens
  misc_RNA (1)...(19): siRNA sense strand
acccaaagccagccauuaa

SEQ ID NO: 2560489 - RNA, 19 nt, Homo sapiens
  misc_RNA (1)...(19): siRNA sense strand
gucugaggguggaguguau

SEQ ID NO: 2560490 - RNA, 19 nt, Homo sapiens
  misc_RNA (1)...(19): siRNA sense strand
gccuuuauuuccuggagaa

SEQ ID NO: 2560491 - RNA, 19 nt, Homo sapiens
  misc_RNA (1)...(19): siRNA sense strand
cauccucaguccuuggaaa

SEQ ID NO: 2560492 - RNA, 19 nt, Homo sapiens
  misc_RNA (1)...(19): siRNA sense strand
agaucuaacagcaaggaca

SEQ ID NO: 2560493 - RNA, 19 nt, Homo sapiens
  misc_RNA (1)...(19): siRNA sense strand
aaaugcagacacaaggaaa

SEQ ID NO: 2560494 - RNA, 19 nt, Homo sapiens
  misc_RNA (1)...(19): siRNA sense strand
acacaaggaaacacaugaa

SEQ ID NO: 2560495 - RNA, 19 nt, Homo sapiens
  misc_RNA (1)...(19): siRNA sense strand
agaacaacaaggagaauac

SEQ ID NO: 2560496 - RNA, 19 nt, Homo sapiens
  misc_RNA (1)...(19): siRNA sense strand
aucaagaaauucaaggaca

SEQ ID NO: 2560497 - RNA, 19 nt, Homo sapiens
  misc_RNA (1)...(19): siRNA sense strand
ccuaaaacugugugacuuu

SEQ ID NO: 2560498 - RNA, 19 nt, Homo sapiens
  misc_RNA (1)...(19): siRNA sense strand
guggcaagaucuucgguca

SEQ ID NO: 2560499 - RNA, 19 nt, Homo sapiens
  misc_RNA (1)...(19): siRNA sense strand
ccaugaaaauaauguguca

SEQ ID NO: 2560500 - RNA, 19 nt, Homo sapiens
  misc_RNA (1)...(19): siRNA sense strand
ccugacauaccaugagaau

SEQ ID NO: 2560501 - RNA, 19 nt, Homo sapiens
  misc_RNA (1)...(19): siRNA sense strand
cagugaagaaaaugaagaa

SEQ ID NO: 2560502 - RNA, 19 nt, Homo sapiens
  misc_RNA (1)...(19): siRNA sense strand
auacaaugauccugugcca

SEQ ID NO: 2560503 - RNA, 19 nt, Homo sapiens
  misc_RNA (1)...(19): siRNA sense strand
gugaaggagccuauggagu

SEQ ID NO: 2560504 - RNA, 19 nt, Homo sapiens
  misc_RNA (1)...(19): siRNA sense strand
ucaagaaauucaaggacag

SEQ ID NO: 2560505 - RNA, 19 nt, Homo sapiens
  misc_RNA (1)...(19): siRNA sense strand
auagaaaccaagccggcaa

SEQ ID NO: 2560506 - RNA, 19 nt, Homo sapiens
  misc_RNA (1)...(19): siRNA sense strand
uggaaaaguccugaaaaua

SEQ ID NO: 2560507 - RNA, 19 nt, Homo sapiens
  misc_RNA (1)...(19): siRNA sense strand
ucucagaucugcagaccca

SEQ ID NO: 2560508 - RNA, 19 nt, Homo sapiens
  misc_RNA (1)...(19): siRNA sense strand
cgugacaaagugagagcca

SEQ ID NO: 2560509 - RNA, 19 nt, Homo sapiens
  misc_RNA (1)...(19): siRNA sense strand
ucagagcaacucaaggaaa

SEQ ID NO: 2560510 - RNA, 19 nt, Homo sapiens
  misc_RNA (1)...(19): siRNA sense strand
ggacucacgucgaaccaca

SEQ ID NO: 2560511 - RNA, 19 nt, Homo sapiens
  misc_RNA (1)...(19): siRNA sense strand
ugacaaagugagagccaag

SEQ ID NO: 2560512 - RNA, 19 nt, Homo sapiens
  misc_RNA (1)...(19): siRNA sense strand
aaagaagauaccuuggaau

SEQ ID NO: 2560513 - RNA, 19 nt, Homo sapiens
  misc_RNA (1)...(19): siRNA sense strand
ugugauggcagaagacaga

SEQ ID NO: 2560514 - RNA, 19 nt, Homo sapiens
  misc_RNA (1)...(19): siRNA sense strand
agaagauaccuuggaauuu

SEQ ID NO: 2560515 - RNA, 19 nt, Homo sapiens
  misc_RNA (1)...(19): siRNA sense strand
agacacagugacacgagaa

SEQ ID NO: 2560516 - RNA, 19 nt, Homo sapiens
  misc_RNA (1)...(19): siRNA sense strand
aggaaggacuggagcacca

SEQ ID NO: 2560517 - RNA, 19 nt, Homo sapiens
  misc_RNA (1)...(19): siRNA sense strand
ucacagagauauuaagcca

SEQ ID NO: 2560518 - RNA, 19 nt, Homo sapiens
  misc_RNA (1)...(19): siRNA sense strand
gaagacaaugugugggaca

SEQ ID NO: 2560519 - RNA, 19 nt, Homo sapiens
  misc_RNA (1)...(19): siRNA sense strand
agauagagaaggaaggacu

SEQ ID NO: 2560520 - RNA, 19 nt, Homo sapiens
  misc_RNA (1)...(19): siRNA sense strand
ggggagaacauaugaugaa

SEQ ID NO: 2560521 - RNA, 19 nt, Homo sapiens
  misc_RNA (1)...(19): siRNA sense strand
ucuacaaggagcugcagaa

SEQ ID NO: 2560522 - RNA, 19 nt, Homo sapiens
  misc_RNA (1)...(19): siRNA sense strand
acagagauauuaagccaga

SEQ ID NO: 2560523 - RNA, 19 nt, Homo sapiens
  misc_RNA (1)...(19): siRNA sense strand
uaauagaggaaguugcaga

SEQ ID NO: 2560524 - RNA, 19 nt, Homo sapiens
  misc_RNA (1)...(19): siRNA sense strand
aagcgagaaauuagaugaa

SEQ ID NO: 2560525 - RNA, 19 nt, Homo sapiens
  misc_RNA (1)...(19): siRNA sense strand
augacaagaaagugauuca

SEQ ID NO: 2560526 - RNA, 19 nt, Homo sapiens
  misc_RNA (1)...(19): siRNA sense strand
aggaagacaauguguggga

SEQ ID NO: 2560527 - RNA, 19 nt, Homo sapiens
  misc_RNA (1)...(19): siRNA sense strand
auauuaagccagagaaccu

SEQ ID NO: 2560528 - RNA, 19 nt, Homo sapiens
  misc_RNA (1)...(19): siRNA sense strand
ucuucaagucgcagauaga

SEQ ID NO: 2560529 - RNA, 19 nt, Homo sapiens
  misc_RNA (1)...(19): siRNA sense strand
agauauuaagccagagaac

SEQ ID NO: 2560530 - RNA, 19 nt, Homo sapiens
  misc_RNA (1)...(19): siRNA sense strand
ucaagguagaugugagguu

SEQ ID NO: 2560531 - RNA, 19 nt, Homo sapiens
  misc_RNA (1)...(19): siRNA sense strand
ggacuugauuuccaggcuu

SEQ ID NO: 2560532 - RNA, 19 nt, Homo sapiens
  misc_RNA (1)...(19): siRNA sense strand
cgggaugacuggaagggaa

SEQ ID NO: 2560533 - RNA, 19 nt, Homo sapiens
  misc_RNA (1)...(19): siRNA sense strand
agguugaagcagaagaaua

SEQ ID NO: 2560534 - RNA, 19 nt, Homo sapiens
  misc_RNA (1)...(19): siRNA sense strand
aagcagaagaauaaggaga

SEQ ID NO: 2560535 - RNA, 19 nt, Homo sapiens
  misc_RNA (1)...(19): siRNA sense strand
ggaagacgcugcuggccaa

SEQ ID NO: 2560536 - RNA, 19 nt, Homo sapiens
  misc_RNA (1)...(19): siRNA sense strand
agaucgacgcggugggcaa

SEQ ID NO: 2560537 - RNA, 19 nt, Homo sapiens
  misc_RNA (1)...(19): siRNA sense strand
aggaaugcacgaagccaaa

SEQ ID NO: 2560538 - RNA, 19 nt, Homo sapiens
  misc_RNA (1)...(19): siRNA sense strand
cugaagaggacgaagagga

SEQ ID NO: 2560539 - RNA, 19 nt, Homo sapiens
  misc_RNA (1)...(19): siRNA sense strand
caggaaugcacgaagccaa

SEQ ID NO: 2560540 - RNA, 19 nt, Homo sapiens
  misc_RNA (1)...(19): siRNA sense strand
aggagaaggauaagucgaa

SEQ ID NO: 2560541 - RNA, 19 nt, Homo sapiens
  misc_RNA (1)...(19): siRNA sense strand
aggauaagucgaaggggaa

SEQ ID NO: 2560542 - RNA, 19 nt, Homo sapiens
  misc_RNA (1)...(19): siRNA sense strand
agcagaagaauaaggagaa

SEQ ID NO: 2560543 - RNA, 19 nt, Homo sapiens
  misc_RNA (1)...(19): siRNA sense strand
cagaguucguggaggucau

SEQ ID NO: 2560544 - RNA, 19 nt, Homo sapiens
  misc_RNA (1)...(19): siRNA sense strand
agcugaauaucgaggccaa

SEQ ID NO: 2560545 - RNA, 19 nt, Homo sapiens
  misc_RNA (1)...(19): siRNA sense strand
gcccagaguucguggaggu

SEQ ID NO: 2560546 - RNA, 19 nt, Homo sapiens
  misc_RNA (1)...(19): siRNA sense strand
acuggaaguccgcgaguuu

SEQ ID NO: 2560547 - RNA, 19 nt, Homo sapiens
  misc_RNA (1)...(19): siRNA sense strand
agagcgacgugguggaagu

SEQ ID NO: 2560548 - RNA, 19 nt, Homo sapiens
  misc_RNA (1)...(19): siRNA sense strand
ccuacaagcgaacaggauu

SEQ ID NO: 2560549 - RNA, 19 nt, Homo sapiens
  misc_RNA (1)...(19): siRNA sense strand
ggaacgacuuuguccacga

SEQ ID NO: 2560550 - RNA, 19 nt, Homo sapiens
  misc_RNA (1)...(19): siRNA sense strand
agguggugccugagagcga

SEQ ID NO: 2560551 - RNA, 19 nt, Homo sapiens
  misc_RNA (1)...(19): siRNA sense strand
cgccugaagaggacgaaga

SEQ ID NO: 2560552 - RNA, 19 nt, Homo sapiens
  misc_RNA (1)...(19): siRNA sense strand
aaggauaagucgaagggga

SEQ ID NO: 2560553 - RNA, 19 nt, Homo sapiens
  misc_RNA (1)...(19): siRNA sense strand
ccaacacggaggaggagca

SEQ ID NO: 2560554 - RNA, 19 nt, Homo sapiens
  misc_RNA (1)...(19): siRNA sense strand
cgggaugacuggaagggaa

SEQ ID NO: 2560555 - RNA, 19 nt, Homo sapiens
  misc_RNA (1)...(19): siRNA sense strand
agguugaagcagaagaaua

SEQ ID NO: 2560556 - RNA, 19 nt, Homo sapiens
  misc_RNA (1)...(19): siRNA sense strand
aagcagaagaauaaggaga

SEQ ID NO: 2560557 - RNA, 19 nt, Homo sapiens
  misc_RNA (1)...(19): siRNA sense strand
ggaagacgcugcuggccaa

SEQ ID NO: 2560558 - RNA, 19 nt, Homo sapiens
  misc_RNA (1)...(19): siRNA sense strand
agaucgacgcggugggcaa

SEQ ID NO: 2560559 - RNA, 19 nt, Homo sapiens
  misc_RNA (1)...(19): siRNA sense strand
aggaaugcacgaagccaaa

SEQ ID NO: 2560560 - RNA, 19 nt, Homo sapiens
  misc_RNA (1)...(19): siRNA sense strand
cugaagaggacgaagagga

SEQ ID NO: 2560561 - RNA, 19 nt, Homo sapiens
  misc_RNA (1)...(19): siRNA sense strand
caggaaugcacgaagccaa

SEQ ID NO: 2560562 - RNA, 19 nt, Homo sapiens
  misc_RNA (1)...(19): siRNA sense strand
aggagaaggauaagucgaa

SEQ ID NO: 2560563 - RNA, 19 nt, Homo sapiens
  misc_RNA (1)...(19): siRNA sense strand
aggauaagucgaaggggaa

SEQ ID NO: 2560564 - RNA, 19 nt, Homo sapiens
  misc_RNA (1)...(19): siRNA sense strand
agcagaagaauaaggagaa

SEQ ID NO: 2560565 - RNA, 19 nt, Homo sapiens
  misc_RNA (1)...(19): siRNA sense strand
cagaguucguggaggucau

SEQ ID NO: 2560566 - RNA, 19 nt, Homo sapiens
  misc_RNA (1)...(19): siRNA sense strand
agcugaauaucgaggccaa

SEQ ID NO: 2560567 - RNA, 19 nt, Homo sapiens
  misc_RNA (1)...(19): siRNA sense strand
gcccagaguucguggaggu

SEQ ID NO: 2560568 - RNA, 19 nt, Homo sapiens
  misc_RNA (1)...(19): siRNA sense strand
acuggaaguccgcgaguuu

SEQ ID NO: 2560569 - RNA, 19 nt, Homo sapiens
  misc_RNA (1)...(19): siRNA sense strand
agagcgacgugguggaagu

SEQ ID NO: 2560570 - RNA, 19 nt, Homo sapiens
  misc_RNA (1)...(19): siRNA sense strand
ccuacaagcgaacaggauu

SEQ ID NO: 2560571 - RNA, 19 nt, Homo sapiens
  misc_RNA (1)...(19): siRNA sense strand
ggaacgacuuuguccacga

SEQ ID NO: 2560572 - RNA, 19 nt, Homo sapiens
  misc_RNA (1)...(19): siRNA sense strand
agguggugccugagagcga

SEQ ID NO: 2560573 - RNA, 19 nt, Homo sapiens
  misc_RNA (1)...(19): siRNA sense strand
cgccugaagaggacgaaga

SEQ ID NO: 2560574 - RNA, 19 nt, Homo sapiens
  misc_RNA (1)...(19): siRNA sense strand
aaggauaagucgaagggga

SEQ ID NO: 2560575 - RNA, 19 nt, Homo sapiens
  misc_RNA (1)...(19): siRNA sense strand
ccaacacggaggaggagca

SEQ ID NO: 2560576 - RNA, 19 nt, Homo sapiens
  misc_RNA (1)...(19): siRNA sense strand
aauuugacacucagggaaa

SEQ ID NO: 2560577 - RNA, 19 nt, Homo sapiens
  misc_RNA (1)...(19): siRNA sense strand
agagacagccugauggaga

SEQ ID NO: 2560578 - RNA, 19 nt, Homo sapiens
  misc_RNA (1)...(19): siRNA sense strand
cgucaaagagagcuuaaaa

SEQ ID NO: 2560579 - RNA, 19 nt, Homo sapiens
  misc_RNA (1)...(19): siRNA sense strand
aggugcaggaagagugcua

SEQ ID NO: 2560580 - RNA, 19 nt, Homo sapiens
  misc_RNA (1)...(19): siRNA sense strand
gcagcaucgccaagcggaa

SEQ ID NO: 2560581 - RNA, 19 nt, Homo sapiens
  misc_RNA (1)...(19): siRNA sense strand
ggaugauugcugaggugca

SEQ ID NO: 2560582 - RNA, 19 nt, Homo sapiens
  misc_RNA (1)...(19): siRNA sense strand
aaggaaacacaaagagaau

SEQ ID NO: 2560583 - RNA, 19 nt, Homo sapiens
  misc_RNA (1)...(19): siRNA sense strand
agaaauggauggaagagca

SEQ ID NO: 2560584 - RNA, 19 nt, Homo sapiens
  misc_RNA (1)...(19): siRNA sense strand
caguggaaggaaacacaaa

SEQ ID NO: 2560585 - RNA, 19 nt, Homo sapiens
  misc_RNA (1)...(19): siRNA sense strand
agagaaugugaaagacuau

SEQ ID NO: 2560586 - RNA, 19 nt, Homo sapiens
  misc_RNA (1)...(19): siRNA sense strand
uaucagaaauggauggaag

SEQ ID NO: 2560587 - RNA, 19 nt, Homo sapiens
  misc_RNA (1)...(19): siRNA sense strand
gaauggaguacaagggcua

SEQ ID NO: 2560588 - RNA, 19 nt, Homo sapiens
  misc_RNA (1)...(19): siRNA sense strand
guguggaagaagaggaaga

SEQ ID NO: 2560589 - RNA, 19 nt, Homo sapiens
  misc_RNA (1)...(19): siRNA sense strand
agguguggaagaagaggaa

SEQ ID NO: 2560590 - RNA, 19 nt, Homo sapiens
  misc_RNA (1)...(19): siRNA sense strand
aggaagaagauggggaaau

SEQ ID NO: 2560591 - RNA, 19 nt, Homo sapiens
  misc_RNA (1)...(19): siRNA sense strand
uggacuaacaggaaagcca

SEQ ID NO: 2560592 - RNA, 19 nt, Homo sapiens
  misc_RNA (1)...(19): siRNA sense strand
ccucaauggacuaacagga

SEQ ID NO: 2560593 - RNA, 19 nt, Homo sapiens
  misc_RNA (1)...(19): siRNA sense strand
ggaaagccagugaugguga

SEQ ID NO: 2560594 - RNA, 19 nt, Homo sapiens
  misc_RNA (1)...(19): siRNA sense strand
agccagugauggugaaacu

SEQ ID NO: 2560595 - RNA, 19 nt, Homo sapiens
  misc_RNA (1)...(19): siRNA sense strand
auaucagagguguggaaga

SEQ ID NO: 2560596 - RNA, 19 nt, Homo sapiens
  misc_RNA (1)...(19): siRNA sense strand
ggcaaguacuggacgcuga

SEQ ID NO: 2560597 - RNA, 19 nt, Homo sapiens
  misc_RNA (1)...(19): siRNA sense strand
ucaaagacuccacaggcaa

SEQ ID NO: 2560598 - RNA, 19 nt, Homo sapiens
  misc_RNA (1)...(19): siRNA sense strand
ccaugcacccucaggucaa

SEQ ID NO: 2560599 - RNA, 19 nt, Homo sapiens
  misc_RNA (1)...(19): siRNA sense strand
agaccgaccaggagaccuu

SEQ ID NO: 2560600 - RNA, 19 nt, Homo sapiens
  misc_RNA (1)...(19): siRNA sense strand
agaaaauguucaagggcaa

SEQ ID NO: 2560601 - RNA, 19 nt, Homo sapiens
  misc_RNA (1)...(19): siRNA sense strand
gcgucaggaagcagagaaa

SEQ ID NO: 2560602 - RNA, 19 nt, Homo sapiens
  misc_RNA (1)...(19): siRNA sense strand
ccuaaguauccuaagaaau

SEQ ID NO: 2560603 - RNA, 19 nt, Homo sapiens
  misc_RNA (1)...(19): siRNA sense strand
aagucagaguacuggauuu

SEQ ID NO: 2560604 - RNA, 19 nt, Homo sapiens
  misc_RNA (1)...(19): siRNA sense strand
gagaaaauguucaagggca

SEQ ID NO: 2560605 - RNA, 19 nt, Homo sapiens
  misc_RNA (1)...(19): siRNA sense strand
auguagaagcaaucaagaa

SEQ ID NO: 2560606 - RNA, 19 nt, Homo sapiens
  misc_RNA (1)...(19): siRNA sense strand
uggcugaaguggagaggcu

SEQ ID NO: 2560607 - RNA, 19 nt, Homo sapiens
  misc_RNA (1)...(19): siRNA sense strand
acuaaaagagcgucaggaa

SEQ ID NO: 2560608 - RNA, 19 nt, Homo sapiens
  misc_RNA (1)...(19): siRNA sense strand
aaggauauugccaggagaa

SEQ ID NO: 2560609 - RNA, 19 nt, Homo sapiens
  misc_RNA (1)...(19): siRNA sense strand
gcugaaguggagaggcuga

SEQ ID NO: 2560610 - RNA, 19 nt, Homo sapiens
  misc_RNA (1)...(19): siRNA sense strand
gaauaugccguauagguga

SEQ ID NO: 2560611 - RNA, 19 nt, Homo sapiens
  misc_RNA (1)...(19): siRNA sense strand
gucaggaagcagagaaaau

SEQ ID NO: 2560612 - RNA, 19 nt, Homo sapiens
  misc_RNA (1)...(19): siRNA sense strand
gggauguagaagcaaucaa

SEQ ID NO: 2560613 - RNA, 19 nt, Homo sapiens
  misc_RNA (1)...(19): siRNA sense strand
cugaugauggugaagaaga

SEQ ID NO: 2560614 - RNA, 19 nt, Homo sapiens
  misc_RNA (1)...(19): siRNA sense strand
gcgcggaagaagauggaaa

SEQ ID NO: 2560615 - RNA, 19 nt, Homo sapiens
  misc_RNA (1)...(19): siRNA sense strand
gagagaauccggagggaga

SEQ ID NO: 2560616 - RNA, 19 nt, Homo sapiens
  misc_RNA (1)...(19): siRNA sense strand
aggcugagcaggagagaau

SEQ ID NO: 2560617 - RNA, 19 nt, Homo sapiens
  misc_RNA (1)...(19): siRNA sense strand
aagcagaguuugaggcuga

SEQ ID NO: 2560618 - RNA, 19 nt, Homo sapiens
  misc_RNA (1)...(19): siRNA sense strand
gggagaaagagaaggagau

SEQ ID NO: 2560619 - RNA, 19 nt, Homo sapiens
  misc_RNA (1)...(19): siRNA sense strand
ggaaagaauuagaggaagg

SEQ ID NO: 2560620 - RNA, 19 nt, Homo sapiens
  misc_RNA (1)...(19): siRNA sense strand
agaugcaagcugagauuaa

SEQ ID NO: 2560621 - RNA, 19 nt, Homo sapiens
  misc_RNA (1)...(19): siRNA sense strand
ggauggagcaggaggagga

SEQ ID NO: 2560622 - RNA, 19 nt, Homo sapiens
  misc_RNA (1)...(19): siRNA sense strand
aggaagaggagggaggaaa

SEQ ID NO: 2560623 - RNA, 19 nt, Homo sapiens
  misc_RNA (1)...(19): siRNA sense strand
acacagaagagaagcgguu

SEQ ID NO: 2560624 - RNA, 19 nt, Homo sapiens
  misc_RNA (1)...(19): siRNA sense strand
aggagggaggaaagaauua

SEQ ID NO: 2560625 - RNA, 19 nt, Homo sapiens
  misc_RNA (1)...(19): siRNA sense strand
cccaaauccuggagaagca

SEQ ID NO: 2560626 - RNA, 19 nt, Homo sapiens
  misc_RNA (1)...(19): siRNA sense strand
gaggaagaucuaaaggaca

SEQ ID NO: 2560627 - RNA, 19 nt, Homo sapiens
  misc_RNA (1)...(19): siRNA sense strand
agaagaagauggcucgaga

SEQ ID NO: 2560628 - RNA, 19 nt, Homo sapiens
  misc_RNA (1)...(19): siRNA sense strand
ugauggaaguggagcggca

SEQ ID NO: 2560629 - RNA, 19 nt, Homo sapiens
  misc_RNA (1)...(19): siRNA sense strand
ucaugaaacagaaggagau

SEQ ID NO: 2560630 - RNA, 19 nt, Homo sapiens
  misc_RNA (1)...(19): siRNA sense strand
agauggaaacagaggcuga

SEQ ID NO: 2560631 - RNA, 19 nt, Homo sapiens
  misc_RNA (1)...(19): siRNA sense strand
agaggagggaggaaagaau

SEQ ID NO: 2560632 - RNA, 19 nt, Homo sapiens
  misc_RNA (1)...(19): siRNA sense strand
agggagaaagagaaggaga

SEQ ID NO: 2560633 - RNA, 19 nt, Homo sapiens
  misc_RNA (1)...(19): siRNA sense strand
aggagaugguguggaacaa

SEQ ID NO: 2560634 - RNA, 19 nt, Homo sapiens
  misc_RNA (1)...(19): siRNA sense strand
aagcugagauuaagcgcau

SEQ ID NO: 2560635 - RNA, 19 nt, Homo sapiens
  misc_RNA (1)...(19): siRNA sense strand
gaagagaagcgguuggauc

SEQ ID NO: 2560636 - RNA, 19 nt, Homo sapiens
  misc_RNA (1)...(19): siRNA sense strand
gagaauccggagggagaaa

SEQ ID NO: 2560637 - RNA, 19 nt, Homo sapiens
  misc_RNA (1)...(19): siRNA sense strand
agcagaaggaagugcagaa

SEQ ID NO: 2560638 - RNA, 19 nt, Homo sapiens
  misc_RNA (1)...(19): siRNA sense strand
aggagaagcuggcagacca

SEQ ID NO: 2560639 - RNA, 19 nt, Homo sapiens
  misc_RNA (1)...(19): siRNA sense strand
gcgcagaaaggaaaaggaa

SEQ ID NO: 2560640 - RNA, 19 nt, Homo sapiens
  misc_RNA (1)...(19): siRNA sense strand
gaggaggagcucaaggaca

SEQ ID NO: 2560641 - RNA, 19 nt, Homo sapiens
  misc_RNA (1)...(19): siRNA sense strand
uccaagaggaagaucuaaa

SEQ ID NO: 2560642 - RNA, 19 nt, Homo sapiens
  misc_RNA (1)...(19): siRNA sense strand
gugcagaaccggauugcca

SEQ ID NO: 2560643 - RNA, 19 nt, Homo sapiens
  misc_RNA (1)...(19): siRNA sense strand
gaggaacuggagaggaaga

SEQ ID NO: 2560644 - RNA, 19 nt, Homo sapiens
  misc_RNA (1)...(19): siRNA sense strand
gaggaagaggagggaggaa

SEQ ID NO: 2560645 - RNA, 19 nt, Homo sapiens
  misc_RNA (1)...(19): siRNA sense strand
acgaaagaagaucaugaaa

SEQ ID NO: 2560646 - RNA, 19 nt, Homo sapiens
  misc_RNA (1)...(19): siRNA sense strand
ggaggaaagaauuagagga

SEQ ID NO: 2560647 - RNA, 19 nt, Homo sapiens
  misc_RNA (1)...(19): siRNA sense strand
aaggagaugguguggaaca

SEQ ID NO: 2560648 - RNA, 19 nt, Homo sapiens
  misc_RNA (1)...(19): siRNA sense strand
aaacagaaggagauggugu

SEQ ID NO: 2560649 - RNA, 19 nt, Homo sapiens
  misc_RNA (1)...(19): siRNA sense strand
augcagugaugacacgaaa

SEQ ID NO: 2560650 - RNA, 19 nt, Homo sapiens
  misc_RNA (1)...(19): siRNA sense strand
ggcucgagaagcagaguuu

SEQ ID NO: 2560651 - RNA, 19 nt, Homo sapiens
  misc_RNA (1)...(19): siRNA sense strand
uggaaaagaaccaggagga

SEQ ID NO: 2560652 - RNA, 19 nt, Homo sapiens
  misc_RNA (1)...(19): siRNA sense strand
cgcagaaaggaaaaggaaa

SEQ ID NO: 2560653 - RNA, 19 nt, Homo sapiens
  misc_RNA (1)...(19): siRNA sense strand
auuagaggaaggcggcaaa

SEQ ID NO: 2560654 - RNA, 19 nt, Homo sapiens
  misc_RNA (1)...(19): siRNA sense strand
gggagcaggagaaggagca

SEQ ID NO: 2560655 - RNA, 19 nt, Homo sapiens
  misc_RNA (1)...(19): siRNA sense strand
ggacauggaacgaaggcag

SEQ ID NO: 2560656 - RNA, 19 nt, Homo sapiens
  misc_RNA (1)...(19): siRNA sense strand
uggaguuuaccaagaagaa

SEQ ID NO: 2560657 - RNA, 19 nt, Homo sapiens
  misc_RNA (1)...(19): siRNA sense strand
aguuugaggcugagcagga

SEQ ID NO: 2560658 - RNA, 19 nt, Homo sapiens
  misc_RNA (1)...(19): siRNA sense strand
cagagagaacagauugaga

SEQ ID NO: 2560659 - RNA, 19 nt, Homo sapiens
  misc_RNA (1)...(19): siRNA sense strand
agaaggagaucgcacgcuu

SEQ ID NO: 2560660 - RNA, 19 nt, Homo sapiens
  misc_RNA (1)...(19): siRNA sense strand
cuguggacuuugagaagau

SEQ ID NO: 2560661 - RNA, 19 nt, Homo sapiens
  misc_RNA (1)...(19): siRNA sense strand
uggaagaagcccuggcagu

SEQ ID NO: 2560662 - RNA, 19 nt, Homo sapiens
  misc_RNA (1)...(19): siRNA sense strand
ccauagaggucuggacgga

SEQ ID NO: 2560663 - RNA, 19 nt, Homo sapiens
  misc_RNA (1)...(19): siRNA sense strand
ugagaagauaacagggcca

SEQ ID NO: 2560664 - RNA, 19 nt, Homo sapiens
  misc_RNA (1)...(19): siRNA sense strand
agauaacacaggagaucaa

SEQ ID NO: 2560665 - RNA, 19 nt, Homo sapiens
  misc_RNA (1)...(19): siRNA sense strand
agaaagagcagcugaggca

SEQ ID NO: 2560666 - RNA, 19 nt, Homo sapiens
  misc_RNA (1)...(19): siRNA sense strand
agaaauuccagcagcacaa

SEQ ID NO: 2560667 - RNA, 19 nt, Homo sapiens
  misc_RNA (1)...(19): siRNA sense strand
aggaggaacucaugaggga

SEQ ID NO: 2560668 - RNA, 19 nt, Homo sapiens
  misc_RNA (1)...(19): siRNA sense strand
ugucugagcaaguggaaga

SEQ ID NO: 2560669 - RNA, 19 nt, Homo sapiens
  misc_RNA (1)...(19): siRNA sense strand
gcuuggaggucguccgaga

SEQ ID NO: 2560670 - RNA, 19 nt, Homo sapiens
  misc_RNA (1)...(19): siRNA sense strand
ccuugugaccaaauggaaa

SEQ ID NO: 2560671 - RNA, 19 nt, Homo sapiens
  misc_RNA (1)...(19): siRNA sense strand
cagccaaggacaagagacu

SEQ ID NO: 2560672 - RNA, 19 nt, Homo sapiens
  misc_RNA (1)...(19): siRNA sense strand
ggaagaucaugauggggaa

SEQ ID NO: 2560673 - RNA, 19 nt, Homo sapiens
  misc_RNA (1)...(19): siRNA sense strand
gugcagaggagauccggaa

SEQ ID NO: 2560674 - RNA, 19 nt, Homo sapiens
  misc_RNA (1)...(19): siRNA sense strand
ccaaggugaaagacggcaa

SEQ ID NO: 2560675 - RNA, 19 nt, Homo sapiens
  misc_RNA (1)...(19): siRNA sense strand
auguagaugcugaaagaga

SEQ ID NO: 2560676 - RNA, 19 nt, Homo sapiens
  misc_RNA (1)...(19): siRNA sense strand
gggaagaggugccagguag

SEQ ID NO: 2560677 - RNA, 19 nt, Homo sapiens
  misc_RNA (1)...(19): siRNA sense strand
gggagcagcaggaggaacu

SEQ ID NO: 2560678 - RNA, 19 nt, Homo sapiens
  misc_RNA (1)...(19): siRNA sense strand
gaagaggccuugcugggaa

SEQ ID NO: 2560679 - RNA, 19 nt, Homo sapiens
  misc_RNA (1)...(19): siRNA sense strand
acaagaaggcccuggagca

SEQ ID NO: 2560680 - RNA, 19 nt, Homo sapiens
  misc_RNA (1)...(19): siRNA sense strand
aggaggucauccaggagaa

SEQ ID NO: 2560681 - RNA, 19 nt, Homo sapiens
  misc_RNA (1)...(19): siRNA sense strand
agccguauuucaaggacaa

SEQ ID NO: 2560682 - RNA, 19 nt, Homo sapiens
  misc_RNA (1)...(19): siRNA sense strand
ggaucaaggcuuucgagga

SEQ ID NO: 2560683 - RNA, 19 nt, Homo sapiens
  misc_RNA (1)...(19): siRNA sense strand
cuacuauauggaagggaga

SEQ ID NO: 2560684 - RNA, 19 nt, Homo sapiens
  misc_RNA (1)...(19): siRNA sense strand
ccagcaaugacgaggacga

SEQ ID NO: 2560685 - RNA, 19 nt, Homo sapiens
  misc_RNA (1)...(19): siRNA sense strand
gagaucaaggagcuggaaa

SEQ ID NO: 2560686 - RNA, 19 nt, Homo sapiens
  misc_RNA (1)...(19): siRNA sense strand
agaagauaacacaggagau

SEQ ID NO: 2560687 - RNA, 19 nt, Homo sapiens
  misc_RNA (1)...(19): siRNA sense strand
gagaagauaacacaggaga

SEQ ID NO: 2560688 - RNA, 19 nt, Homo sapiens
  misc_RNA (1)...(19): siRNA sense strand
gcagaagauugcagaggag

SEQ ID NO: 2560689 - RNA, 19 nt, Homo sapiens
  misc_RNA (1)...(19): siRNA sense strand
cugaaagagagaagauaac

SEQ ID NO: 2560690 - RNA, 19 nt, Homo sapiens
  misc_RNA (1)...(19): siRNA sense strand
guagaugcugaaagagaga

SEQ ID NO: 2560691 - RNA, 19 nt, Homo sapiens
  misc_RNA (1)...(19): siRNA sense strand
ccaaguuacugaagcucga

SEQ ID NO: 2560692 - RNA, 19 nt, Homo sapiens
  misc_RNA (1)...(19): siRNA sense strand
cucccaaaguccugcagaa

SEQ ID NO: 2560693 - RNA, 19 nt, Homo sapiens
  misc_RNA (1)...(19): siRNA sense strand
gaucaaggcuuucgaggag

SEQ ID NO: 2560694 - RNA, 19 nt, Homo sapiens
  misc_RNA (1)...(19): siRNA sense strand
gggaagccgagaaggagau

SEQ ID NO: 2560695 - RNA, 19 nt, Homo sapiens
  misc_RNA (1)...(19): siRNA sense strand
aagaggccuugcugggaaa

SEQ ID NO: 2560696 - RNA, 19 nt, Homo sapiens
  misc_RNA (1)...(19): siRNA sense strand
gagaaggagauccaggaca

SEQ ID NO: 2560697 - RNA, 19 nt, Homo sapiens
  misc_RNA (1)...(19): siRNA sense strand
ucaaagagugccagccaca

SEQ ID NO: 2560698 - RNA, 19 nt, Homo sapiens
  misc_RNA (1)...(19): siRNA sense strand
ggagaagcagggcagggaa

SEQ ID NO: 2560699 - RNA, 19 nt, Homo sapiens
  misc_RNA (1)...(19): siRNA sense strand
acaaagcucugaaacgcaa

SEQ ID NO: 2560700 - RNA, 19 nt, Homo sapiens
  misc_RNA (1)...(19): siRNA sense strand
cgggaagaggugccaggua

SEQ ID NO: 2560701 - RNA, 19 nt, Homo sapiens
  misc_RNA (1)...(19): siRNA sense strand
gccaauaugaacagggaac

SEQ ID NO: 2560702 - RNA, 19 nt, Homo sapiens
  misc_RNA (1)...(19): siRNA sense strand
ccgccguagugcagacuca

SEQ ID NO: 2560703 - RNA, 19 nt, Homo sapiens
  misc_RNA (1)...(19): siRNA sense strand
cguggagaucucagaauca

SEQ ID NO: 2560704 - RNA, 19 nt, Homo sapiens
  misc_RNA (1)...(19): siRNA sense strand
cagaggaggaggaccgcau

SEQ ID NO: 2560705 - RNA, 19 nt, Homo sapiens
  misc_RNA (1)...(19): siRNA sense strand
ggacuuggauccugccgau

SEQ ID NO: 2560706 - RNA, 19 nt, Homo sapiens
  misc_RNA (1)...(19): siRNA sense strand
agggaagccgagaaggaga

SEQ ID NO: 2560707 - RNA, 19 nt, Homo sapiens
  misc_RNA (1)...(19): siRNA sense strand
aggaguggacagaggagga

SEQ ID NO: 2560708 - RNA, 19 nt, Homo sapiens
  misc_RNA (1)...(19): siRNA sense strand
ccucaaagagugccagcca

SEQ ID NO: 2560709 - RNA, 19 nt, Homo sapiens
  misc_RNA (1)...(19): siRNA sense strand
aggacaaggucacgggcgu

SEQ ID NO: 2560710 - RNA, 19 nt, Homo sapiens
  misc_RNA (1)...(19): siRNA sense strand
caccagaagcagagcaaag

SEQ ID NO: 2560711 - RNA, 19 nt, Homo sapiens
  misc_RNA (1)...(19): siRNA sense strand
ccaaauacggggagcagga

SEQ ID NO: 2560712 - RNA, 19 nt, Homo sapiens
  misc_RNA (1)...(19): siRNA sense strand
gggaauuggcccaguucau

SEQ ID NO: 2560713 - RNA, 19 nt, Homo sapiens
  misc_RNA (1)...(19): siRNA sense strand
cguugaugugugugcuaaa

SEQ ID NO: 2560714 - RNA, 19 nt, Homo sapiens
  misc_RNA (1)...(19): siRNA sense strand
gggacagaacuaaagaaca

SEQ ID NO: 2560715 - RNA, 19 nt, Homo sapiens
  misc_RNA (1)...(19): siRNA sense strand
gcauggugcucaacgccua

SEQ ID NO: 2560716 - RNA, 19 nt, Homo sapiens
  misc_RNA (1)...(19): siRNA sense strand
cagcagaaccccagcucua

SEQ ID NO: 2560717 - RNA, 19 nt, Homo sapiens
  misc_RNA (1)...(19): siRNA sense strand
gcaacacaaugguacccaa

SEQ ID NO: 2560718 - RNA, 19 nt, Homo sapiens
  misc_RNA (1)...(19): siRNA sense strand
ugggagacuuucugaacca

SEQ ID NO: 2560719 - RNA, 19 nt, Homo sapiens
  misc_RNA (1)...(19): siRNA sense strand
gagaaagaccugaaggaga

SEQ ID NO: 2560720 - RNA, 19 nt, Homo sapiens
  misc_RNA (1)...(19): siRNA sense strand
agaagaagcggcagggcaa

SEQ ID NO: 2560721 - RNA, 19 nt, Homo sapiens
  misc_RNA (1)...(19): siRNA sense strand
acuucaaagagauggagaa

SEQ ID NO: 2560722 - RNA, 19 nt, Homo sapiens
  misc_RNA (1)...(19): siRNA sense strand
aguccaaggagguggcaga

SEQ ID NO: 2560723 - RNA, 19 nt, Homo sapiens
  misc_RNA (1)...(19): siRNA sense strand
acaucgagcaggugaguca

SEQ ID NO: 2560724 - RNA, 19 nt, Homo sapiens
  misc_RNA (1)...(19): siRNA sense strand
cuccagaaccugugcgaga

SEQ ID NO: 2560725 - RNA, 19 nt, Homo sapiens
  misc_RNA (1)...(19): siRNA sense strand
ccaugaagcgccuggcaga

SEQ ID NO: 2560726 - RNA, 19 nt, Homo sapiens
  misc_RNA (1)...(19): siRNA sense strand
uggcagaggugaaggacuc

SEQ ID NO: 2560727 - RNA, 19 nt, Homo sapiens
  misc_RNA (1)...(19): siRNA sense strand
cggagaagcucaagcgcag

SEQ ID NO: 2560728 - RNA, 19 nt, Homo sapiens
  misc_RNA (1)...(19): siRNA sense strand
agaacugguacgagggcau

SEQ ID NO: 2560729 - RNA, 19 nt, Homo sapiens
  misc_RNA (1)...(19): siRNA sense strand
uggagaagaagguggaugu

SEQ ID NO: 2560730 - RNA, 19 nt, Homo sapiens
  misc_RNA (1)...(19): siRNA sense strand
gcagaaaccagcaugcaca

SEQ ID NO: 2560731 - RNA, 19 nt, Homo sapiens
  misc_RNA (1)...(19): siRNA sense strand
ucgaguaccugcagcccaa

SEQ ID NO: 2560732 - RNA, 19 nt, Homo sapiens
  misc_RNA (1)...(19): siRNA sense strand
cccuggacaucgaggucaa

SEQ ID NO: 2560733 - RNA, 19 nt, Homo sapiens
  misc_RNA (1)...(19): siRNA sense strand
ugaaggagauccagcacca

SEQ ID NO: 2560734 - RNA, 19 nt, Homo sapiens
  misc_RNA (1)...(19): siRNA sense strand
uggagaaguucgaggaguc

SEQ ID NO: 2560735 - RNA, 19 nt, Homo sapiens
  misc_RNA (1)...(19): siRNA sense strand
gugaaggacucccuggaca

SEQ ID NO: 2560736 - RNA, 19 nt, Homo sapiens
  misc_RNA (1)...(19): siRNA sense strand
acuucgagcccgagaacga

SEQ ID NO: 2560737 - RNA, 19 nt, Homo sapiens
  misc_RNA (1)...(19): siRNA sense strand
acuuugacuacaagaagaa

SEQ ID NO: 2560738 - RNA, 19 nt, Homo sapiens
  misc_RNA (1)...(19): siRNA sense strand
agaagaagguggaugucac

SEQ ID NO: 2560739 - RNA, 19 nt, Homo sapiens
  misc_RNA (1)...(19): siRNA sense strand
agaaguucgaggaguccaa

SEQ ID NO: 2560740 - RNA, 19 nt, Homo sapiens
  misc_RNA (1)...(19): siRNA sense strand
aagaagaagcggcagggca

SEQ ID NO: 2560741 - RNA, 19 nt, Homo sapiens
  misc_RNA (1)...(19): siRNA sense strand
ggaaggaggaugagggaug

SEQ ID NO: 2560742 - RNA, 19 nt, Homo sapiens
  misc_RNA (1)...(19): siRNA sense strand
ccuuaugacccuggagaaa

SEQ ID NO: 2560743 - RNA, 19 nt, Homo sapiens
  misc_RNA (1)...(19): siRNA sense strand
aggauaaauaagagcauga

SEQ ID NO: 2560744 - RNA, 19 nt, Homo sapiens
  misc_RNA (1)...(19): siRNA sense strand
agucuaugcuagugugaca

SEQ ID NO: 2560745 - RNA, 19 nt, Homo sapiens
  misc_RNA (1)...(19): siRNA sense strand
cugacauaugaaaggauaa

SEQ ID NO: 2560746 - RNA, 19 nt, Homo sapiens
  misc_RNA (1)...(19): siRNA sense strand
uggcaaaaucacuggagaa

SEQ ID NO: 2560747 - RNA, 19 nt, Homo sapiens
  misc_RNA (1)...(19): siRNA sense strand
gggaaagcaggaaggagga

SEQ ID NO: 2560748 - RNA, 19 nt, Homo sapiens
  misc_RNA (1)...(19): siRNA sense strand
gcucaggacccuugcacca

SEQ ID NO: 2560749 - RNA, 19 nt, Homo sapiens
  misc_RNA (1)...(19): siRNA sense strand
acaucugcaccgugagcaa

SEQ ID NO: 2560750 - RNA, 19 nt, Homo sapiens
  misc_RNA (1)...(19): siRNA sense strand
cauauauguugcugccaca

SEQ ID NO: 2560751 - RNA, 19 nt, Homo sapiens
  misc_RNA (1)...(19): siRNA sense strand
agucuguccaggaaacaaa

SEQ ID NO: 2560752 - RNA, 19 nt, Homo sapiens
  misc_RNA (1)...(19): siRNA sense strand
ccaaugaagagaaucggaa

SEQ ID NO: 2560753 - RNA, 19 nt, Homo sapiens
  misc_RNA (1)...(19): siRNA sense strand
gaagagaaucggaagugga

SEQ ID NO: 2560754 - RNA, 19 nt, Homo sapiens
  misc_RNA (1)...(19): siRNA sense strand
gcgauuaagaagaaacaac

SEQ ID NO: 2560755 - RNA, 19 nt, Homo sapiens
  misc_RNA (1)...(19): siRNA sense strand
caaaggaagcagaagugca

SEQ ID NO: 2560756 - RNA, 19 nt, Homo sapiens
  misc_RNA (1)...(19): siRNA sense strand
cagcgauuaagaagaaaca

SEQ ID NO: 2560757 - RNA, 19 nt, Homo sapiens
  misc_RNA (1)...(19): siRNA sense strand
caagcaaagcagcaagcau

SEQ ID NO: 2560758 - RNA, 19 nt, Homo sapiens
  misc_RNA (1)...(19): siRNA sense strand
agaaagaacaagaacgaaa

SEQ ID NO: 2560759 - RNA, 19 nt, Homo sapiens
  misc_RNA (1)...(19): siRNA sense strand
gcugcaagcacgugggaaa

SEQ ID NO: 2560760 - RNA, 19 nt, Homo sapiens
  misc_RNA (1)...(19): siRNA sense strand
cugaaggaacuaagagaaa

SEQ ID NO: 2560761 - RNA, 19 nt, Homo sapiens
  misc_RNA (1)...(19): siRNA sense strand
gcaucaacuagaagggaaa

SEQ ID NO: 2560762 - RNA, 19 nt, Homo sapiens
  misc_RNA (1)...(19): siRNA sense strand
gagaaagaaacuagaucaa

SEQ ID NO: 2560763 - RNA, 19 nt, Homo sapiens
  misc_RNA (1)...(19): siRNA sense strand
acaaagaacaagaggacau

SEQ ID NO: 2560764 - RNA, 19 nt, Homo sapiens
  misc_RNA (1)...(19): siRNA sense strand
uuacauagagacugagaaa

SEQ ID NO: 2560765 - RNA, 19 nt, Homo sapiens
  misc_RNA (1)...(19): siRNA sense strand
ggaacggaaucgaaggcaa

SEQ ID NO: 2560766 - RNA, 19 nt, Homo sapiens
  misc_RNA (1)...(19): siRNA sense strand
gcuacaagcucaagcccua

SEQ ID NO: 2560767 - RNA, 19 nt, Homo sapiens
  misc_RNA (1)...(19): siRNA sense strand
cuguaacguuugaagauaa

SEQ ID NO: 2560768 - RNA, 19 nt, Homo sapiens
  misc_RNA (1)...(19): siRNA sense strand
gaucaaaacuacaggagau

SEQ ID NO: 2560769 - RNA, 19 nt, Homo sapiens
  misc_RNA (1)...(19): siRNA sense strand
gaggagaauuaaaaggaaa

SEQ ID NO: 2560770 - RNA, 19 nt, Homo sapiens
  misc_RNA (1)...(19): siRNA sense strand
auucauuacuggugaucaa

SEQ ID NO: 2560771 - RNA, 19 nt, Homo sapiens
  misc_RNA (1)...(19): siRNA sense strand
aggagaagucaauggacaa

SEQ ID NO: 2560772 - RNA, 19 nt, Homo sapiens
  misc_RNA (1)...(19): siRNA sense strand
ucuacaaggccaagaacaa

SEQ ID NO: 2560773 - RNA, 19 nt, Homo sapiens
  misc_RNA (1)...(19): siRNA sense strand
gaugaaguggagaaagaaa

SEQ ID NO: 2560774 - RNA, 19 nt, Homo sapiens
  misc_RNA (1)...(19): siRNA sense strand
ggacaggaacagugggcga

SEQ ID NO: 2560775 - RNA, 19 nt, Homo sapiens
  misc_RNA (1)...(19): siRNA sense strand
caugaauaaugauggaaga

SEQ ID NO: 2560776 - RNA, 19 nt, Homo sapiens
  misc_RNA (1)...(19): siRNA sense strand
gaaucgaaggcaagaacua

SEQ ID NO: 2560777 - RNA, 19 nt, Homo sapiens
  misc_RNA (1)...(19): siRNA sense strand
caagaaauugagagcacaa

SEQ ID NO: 2560778 - RNA, 19 nt, Homo sapiens
  misc_RNA (1)...(19): siRNA sense strand
ccaaagggcaacaggcauu

SEQ ID NO: 2560779 - RNA, 19 nt, Homo sapiens
  misc_RNA (1)...(19): siRNA sense strand
cggcuggcuuggaggagaa

SEQ ID NO: 2560780 - RNA, 19 nt, Homo sapiens
  misc_RNA (1)...(19): siRNA sense strand
ggucacauggaaagagcaa

SEQ ID NO: 2560781 - RNA, 19 nt, Homo sapiens
  misc_RNA (1)...(19): siRNA sense strand
aggaaagagcgaagcauga

SEQ ID NO: 2560782 - RNA, 19 nt, Homo sapiens
  misc_RNA (1)...(19): siRNA sense strand
gcuacaaggauaucagcua

SEQ ID NO: 2560783 - RNA, 19 nt, Homo sapiens
  misc_RNA (1)...(19): siRNA sense strand
gcaagaacuacuaaaucaa

SEQ ID NO: 2560784 - RNA, 19 nt, Homo sapiens
  misc_RNA (1)...(19): siRNA sense strand
ccaaagacgagcucaggaa

SEQ ID NO: 2560785 - RNA, 19 nt, Homo sapiens
  misc_RNA (1)...(19): siRNA sense strand
cucuggaacugcugggaaa

SEQ ID NO: 2560786 - RNA, 19 nt, Homo sapiens
  misc_RNA (1)...(19): siRNA sense strand
aggcugaaauacaggcaau

SEQ ID NO: 2560787 - RNA, 19 nt, Homo sapiens
  misc_RNA (1)...(19): siRNA sense strand
aggcaaacaggaagcacaa

SEQ ID NO: 2560788 - RNA, 19 nt, Homo sapiens
  misc_RNA (1)...(19): siRNA sense strand
agagaaaaucccagaaaau

SEQ ID NO: 2560789 - RNA, 19 nt, Homo sapiens
  misc_RNA (1)...(19): siRNA sense strand
ccaccuaagucaacagcau

SEQ ID NO: 2560790 - RNA, 19 nt, Homo sapiens
  misc_RNA (1)...(19): siRNA sense strand
uuacgagaguucugagcaa

SEQ ID NO: 2560791 - RNA, 19 nt, Homo sapiens
  misc_RNA (1)...(19): siRNA sense strand
guggaaaggagaagucaau

SEQ ID NO: 2560792 - RNA, 19 nt, Homo sapiens
  misc_RNA (1)...(19): siRNA sense strand
aacugaagcuacaaggaua

SEQ ID NO: 2560793 - RNA, 19 nt, Homo sapiens
  misc_RNA (1)...(19): siRNA sense strand
acauugaucaagauggaaa

SEQ ID NO: 2560794 - RNA, 19 nt, Homo sapiens
  misc_RNA (1)...(19): siRNA sense strand
ggcaagaaauugagagcac

SEQ ID NO: 2560795 - RNA, 19 nt, Homo sapiens
  misc_RNA (1)...(19): siRNA sense strand
acagaaagaacaagaacga

SEQ ID NO: 2560796 - RNA, 19 nt, Homo sapiens
  misc_RNA (1)...(19): siRNA sense strand
agauuuaaccuuucagcaa

SEQ ID NO: 2560797 - RNA, 19 nt, Homo sapiens
  misc_RNA (1)...(19): siRNA sense strand
uggagaagcaacuggaaaa

SEQ ID NO: 2560798 - RNA, 19 nt, Homo sapiens
  misc_RNA (1)...(19): siRNA sense strand
gugaaaagguggaggggcu

SEQ ID NO: 2560799 - RNA, 19 nt, Homo sapiens
  misc_RNA (1)...(19): siRNA sense strand
gcugaaggaacuaagagaa

SEQ ID NO: 2560800 - RNA, 19 nt, Homo sapiens
  misc_RNA (1)...(19): siRNA sense strand
gccaggagcaagagcgcaa

SEQ ID NO: 2560801 - RNA, 19 nt, Homo sapiens
  misc_RNA (1)...(19): siRNA sense strand
ggugacugguggacaggaa

SEQ ID NO: 2560802 - RNA, 19 nt, Homo sapiens
  misc_RNA (1)...(19): siRNA sense strand
aaggagaagucaauggaca

SEQ ID NO: 2560803 - RNA, 19 nt, Homo sapiens
  misc_RNA (1)...(19): siRNA sense strand
ggaaagaaauugagaggcg

SEQ ID NO: 2560804 - RNA, 19 nt, Homo sapiens
  misc_RNA (1)...(19): siRNA sense strand
cagcaguuccauaguuuaa

SEQ ID NO: 2560805 - RNA, 19 nt, Homo sapiens
  misc_RNA (1)...(19): siRNA sense strand
agaaggauggcgaggaaaa

SEQ ID NO: 2560806 - RNA, 19 nt, Homo sapiens
  misc_RNA (1)...(19): siRNA sense strand
ccagaagccaugaugaaau

SEQ ID NO: 2560807 - RNA, 19 nt, Homo sapiens
  misc_RNA (1)...(19): siRNA sense strand
aggagaacuaugugaauga

SEQ ID NO: 2560808 - RNA, 19 nt, Homo sapiens
  misc_RNA (1)...(19): siRNA sense strand
agaagaugccugugaagau

SEQ ID NO: 2560809 - RNA, 19 nt, Homo sapiens
  misc_RNA (1)...(19): siRNA sense strand
ggaaauggauccucggugu

SEQ ID NO: 2560810 - RNA, 19 nt, Homo sapiens
  misc_RNA (1)...(19): siRNA sense strand
aagcauaaaugaaaggacu

SEQ ID NO: 2560811 - RNA, 19 nt, Homo sapiens
  misc_RNA (1)...(19): siRNA sense strand
acugaaacagaaagaacaa

SEQ ID NO: 2560812 - RNA, 19 nt, Homo sapiens
  misc_RNA (1)...(19): siRNA sense strand
agacauagucaugguuaaa

SEQ ID NO: 2560813 - RNA, 19 nt, Homo sapiens
  misc_RNA (1)...(19): siRNA sense strand
agucaugguuaaaggggaa

SEQ ID NO: 2560814 - RNA, 19 nt, Homo sapiens
  misc_RNA (1)...(19): siRNA sense strand
caaacuaugcagagaaaau

SEQ ID NO: 2560815 - RNA, 19 nt, Homo sapiens
  misc_RNA (1)...(19): siRNA sense strand
gagaagaauuuauugccau

SEQ ID NO: 2560816 - RNA, 19 nt, Homo sapiens
  misc_RNA (1)...(19): siRNA sense strand
acuuacaucucuuggauau

SEQ ID NO: 2560817 - RNA, 19 nt, Homo sapiens
  misc_RNA (1)...(19): siRNA sense strand
uggcggacaucaagaaaga

SEQ ID NO: 2560818 - RNA, 19 nt, Homo sapiens
  misc_RNA (1)...(19): siRNA sense strand
ccacauugccaaagaguuc

SEQ ID NO: 2560819 - RNA, 19 nt, Homo sapiens
  misc_RNA (1)...(19): siRNA sense strand
cuggcuuggaggagaauua

SEQ ID NO: 2560820 - RNA, 19 nt, Homo sapiens
  misc_RNA (1)...(19): siRNA sense strand
cagcaaugguguucagacu

SEQ ID NO: 2560821 - RNA, 19 nt, Homo sapiens
  misc_RNA (1)...(19): siRNA sense strand
acaaggagcuguauggcuu

SEQ ID NO: 2560822 - RNA, 19 nt, Homo sapiens
  misc_RNA (1)...(19): siRNA sense strand
aaucuagagaguugagaau

SEQ ID NO: 2560823 - RNA, 19 nt, Homo sapiens
  misc_RNA (1)...(19): siRNA sense strand
acgaaugagaaaccagaaa

SEQ ID NO: 2560824 - RNA, 19 nt, Homo sapiens
  misc_RNA (1)...(19): siRNA sense strand
gguggaaaggagaagucaa

SEQ ID NO: 2560825 - RNA, 19 nt, Homo sapiens
  misc_RNA (1)...(19): siRNA sense strand
ggucguuucgggagaagaa

SEQ ID NO: 2560826 - RNA, 19 nt, Homo sapiens
  misc_RNA (1)...(19): siRNA sense strand
cugaaauugcccagguuau

SEQ ID NO: 2560827 - RNA, 19 nt, Homo sapiens
  misc_RNA (1)...(19): siRNA sense strand
aaaucaaaccugcaguaua

SEQ ID NO: 2560828 - RNA, 19 nt, Homo sapiens
  misc_RNA (1)...(19): siRNA sense strand
agaagaaaggcgauggcua

SEQ ID NO: 2560829 - RNA, 19 nt, Homo sapiens
  misc_RNA (1)...(19): siRNA sense strand
gaagaaaggcgauggcuac

SEQ ID NO: 2560830 - RNA, 19 nt, Homo sapiens
  misc_RNA (1)...(19): siRNA sense strand
acguggacacagaaagcaa

SEQ ID NO: 2560831 - RNA, 19 nt, Homo sapiens
  misc_RNA (1)...(19): siRNA sense strand
aagugaugguagccgggaa

SEQ ID NO: 2560832 - RNA, 19 nt, Homo sapiens
  misc_RNA (1)...(19): siRNA sense strand
aggaaggauuagaagauau

SEQ ID NO: 2560833 - RNA, 19 nt, Homo sapiens
  misc_RNA (1)...(19): siRNA sense strand
ggucagaauugaucgccaa

SEQ ID NO: 2560834 - RNA, 19 nt, Homo sapiens
  misc_RNA (1)...(19): siRNA sense strand
gggaugaggaugaagguga

SEQ ID NO: 2560835 - RNA, 19 nt, Homo sapiens
  misc_RNA (1)...(19): siRNA sense strand
ggaggaagaugaagaggca

SEQ ID NO: 2560836 - RNA, 19 nt, Homo sapiens
  misc_RNA (1)...(19): siRNA sense strand
augaagaggaggaaggauu

SEQ ID NO: 2560837 - RNA, 19 nt, Homo sapiens
  misc_RNA (1)...(19): siRNA sense strand
aggaaggagaggaggauga

SEQ ID NO: 2560838 - RNA, 19 nt, Homo sapiens
  misc_RNA (1)...(19): siRNA sense strand
ggaugaugaagaaggagaa

SEQ ID NO: 2560839 - RNA, 19 nt, Homo sapiens
  misc_RNA (1)...(19): siRNA sense strand
gagaggaggaugaaggaga

SEQ ID NO: 2560840 - RNA, 19 nt, Homo sapiens
  misc_RNA (1)...(19): siRNA sense strand
cuggaaaggauuugacgaa

SEQ ID NO: 2560841 - RNA, 19 nt, Homo sapiens
  misc_RNA (1)...(19): siRNA sense strand
aggagaaggagaagaagau

SEQ ID NO: 2560842 - RNA, 19 nt, Homo sapiens
  misc_RNA (1)...(19): siRNA sense strand
gggaggaaggagaggagga

SEQ ID NO: 2560843 - RNA, 19 nt, Homo sapiens
  misc_RNA (1)...(19): siRNA sense strand
augaagaaggagaaggaga

SEQ ID NO: 2560844 - RNA, 19 nt, Homo sapiens
  misc_RNA (1)...(19): siRNA sense strand
gaauaaagccagcaggaag

SEQ ID NO: 2560845 - RNA, 19 nt, Homo sapiens
  misc_RNA (1)...(19): siRNA sense strand
uuucagaagaggucagaau

SEQ ID NO: 2560846 - RNA, 19 nt, Homo sapiens
  misc_RNA (1)...(19): siRNA sense strand
ugaugaagaaggagaagga

SEQ ID NO: 2560847 - RNA, 19 nt, Homo sapiens
  misc_RNA (1)...(19): siRNA sense strand
caccgaaaucaaauggaaa

SEQ ID NO: 2560848 - RNA, 19 nt, Homo sapiens
  misc_RNA (1)...(19): siRNA sense strand
augaggaaccagagagcuu

SEQ ID NO: 2560849 - RNA, 19 nt, Homo sapiens
  misc_RNA (1)...(19): siRNA sense strand
ccgauauggaugaugaaga

SEQ ID NO: 2560850 - RNA, 19 nt, Homo sapiens
  misc_RNA (1)...(19): siRNA sense strand
aggaugaaggugaagaaga

SEQ ID NO: 2560851 - RNA, 19 nt, Homo sapiens
  misc_RNA (1)...(19): siRNA sense strand
aguugaagugacagaauuu

SEQ ID NO: 2560852 - RNA, 19 nt, Homo sapiens
  misc_RNA (1)...(19): siRNA sense strand
cagaauaaagccagcagga

SEQ ID NO: 2560853 - RNA, 19 nt, Homo sapiens
  misc_RNA (1)...(19): siRNA sense strand
aaggagaaggagaagaaga

SEQ ID NO: 2560854 - RNA, 19 nt, Homo sapiens
  misc_RNA (1)...(19): siRNA sense strand
augaaggagaagaugacua

SEQ ID NO: 2560855 - RNA, 19 nt, Homo sapiens
  misc_RNA (1)...(19): siRNA sense strand
aaggagaagaagaugauga

SEQ ID NO: 2560856 - RNA, 19 nt, Homo sapiens
  misc_RNA (1)...(19): siRNA sense strand
aggaugaaggagaagauga

SEQ ID NO: 2560857 - RNA, 19 nt, Homo sapiens
  misc_RNA (1)...(19): siRNA sense strand
aggaagaugaagaggcacu

SEQ ID NO: 2560858 - RNA, 19 nt, Homo sapiens
  misc_RNA (1)...(19): siRNA sense strand
ugaggaugaaggugaagaa

SEQ ID NO: 2560859 - RNA, 19 nt, Homo sapiens
  misc_RNA (1)...(19): siRNA sense strand
aaagaugauauuuggccaa

SEQ ID NO: 2560860 - RNA, 19 nt, Homo sapiens
  misc_RNA (1)...(19): siRNA sense strand
gauuagaagauauugacga

SEQ ID NO: 2560861 - RNA, 19 nt, Homo sapiens
  misc_RNA (1)...(19): siRNA sense strand
aggugaagaagaugaagau

SEQ ID NO: 2560862 - RNA, 19 nt, Homo sapiens
  misc_RNA (1)...(19): siRNA sense strand
uggaugaugaagaaggaga

SEQ ID NO: 2560863 - RNA, 19 nt, Homo sapiens
  misc_RNA (1)...(19): siRNA sense strand
cgaagaaggggaugaggau

SEQ ID NO: 2560864 - RNA, 19 nt, Homo sapiens
  misc_RNA (1)...(19): siRNA sense strand
aagaaggggaugaggauga

SEQ ID NO: 2560865 - RNA, 19 nt, Homo sapiens
  misc_RNA (1)...(19): siRNA sense strand
aggagaagaagaugaugau

SEQ ID NO: 2560866 - RNA, 19 nt, Homo sapiens
  misc_RNA (1)...(19): siRNA sense strand
ccagaguugaagugacaga

SEQ ID NO: 2560867 - RNA, 19 nt, Homo sapiens
  misc_RNA (1)...(19): siRNA sense strand
aggaggaaggauuagaaga

SEQ ID NO: 2560868 - RNA, 19 nt, Homo sapiens
  misc_RNA (1)...(19): siRNA sense strand
ugaaggugaagaagaugaa

SEQ ID NO: 2560869 - RNA, 19 nt, Homo sapiens
  misc_RNA (1)...(19): siRNA sense strand
accgaaaucaaauggaaau

SEQ ID NO: 2560870 - RNA, 19 nt, Homo sapiens
  misc_RNA (1)...(19): siRNA sense strand
agaacagcaagaagcgauu

SEQ ID NO: 2560871 - RNA, 19 nt, Homo sapiens
  misc_RNA (1)...(19): siRNA sense strand
ggaugaaggagaagaugac

SEQ ID NO: 2560872 - RNA, 19 nt, Homo sapiens
  misc_RNA (1)...(19): siRNA sense strand
agaauaaagccagcaggaa

SEQ ID NO: 2560873 - RNA, 19 nt, Homo sapiens
  misc_RNA (1)...(19): siRNA sense strand
ggaagaggcagcaugagga

SEQ ID NO: 2560874 - RNA, 19 nt, Homo sapiens
  misc_RNA (1)...(19): siRNA sense strand
aggcagaggaagagauaua

SEQ ID NO: 2560875 - RNA, 19 nt, Homo sapiens
  misc_RNA (1)...(19): siRNA sense strand
gggaaagacagcaaggaaa

SEQ ID NO: 2560876 - RNA, 19 nt, Homo sapiens
  misc_RNA (1)...(19): siRNA sense strand
gugaagaagacuuuagaaa

SEQ ID NO: 2560877 - RNA, 19 nt, Homo sapiens
  misc_RNA (1)...(19): siRNA sense strand
ccaaagauuuccagggaga

SEQ ID NO: 2560878 - RNA, 19 nt, Homo sapiens
  misc_RNA (1)...(19): siRNA sense strand
cugaauacuaagaaggaaa

SEQ ID NO: 2560879 - RNA, 19 nt, Homo sapiens
  misc_RNA (1)...(19): siRNA sense strand
gagaagaagcagaggcuga

SEQ ID NO: 2560880 - RNA, 19 nt, Homo sapiens
  misc_RNA (1)...(19): siRNA sense strand
ugacagaagaacagaagaa

SEQ ID NO: 2560881 - RNA, 19 nt, Homo sapiens
  misc_RNA (1)...(19): siRNA sense strand
aagaagaagcugaggcaau

SEQ ID NO: 2560882 - RNA, 19 nt, Homo sapiens
  misc_RNA (1)...(19): siRNA sense strand
uuucaaaggcagaggaaga

SEQ ID NO: 2560883 - RNA, 19 nt, Homo sapiens
  misc_RNA (1)...(19): siRNA sense strand
cuugaagaguccagacaaa

SEQ ID NO: 2560884 - RNA, 19 nt, Homo sapiens
  misc_RNA (1)...(19): siRNA sense strand
agaagaaacagaagaaaga

SEQ ID NO: 2560885 - RNA, 19 nt, Homo sapiens
  misc_RNA (1)...(19): siRNA sense strand
cauaaaagauggagacaga

SEQ ID NO: 2560886 - RNA, 19 nt, Homo sapiens
  misc_RNA (1)...(19): siRNA sense strand
aaaggaagacaaagggaaa

SEQ ID NO: 2560887 - RNA, 19 nt, Homo sapiens
  misc_RNA (1)...(19): siRNA sense strand
gcuaaagaaagaagaaaca

SEQ ID NO: 2560888 - RNA, 19 nt, Homo sapiens
  misc_RNA (1)...(19): siRNA sense strand
aggcgaagcagcagaacaa

SEQ ID NO: 2560889 - RNA, 19 nt, Homo sapiens
  misc_RNA (1)...(19): siRNA sense strand
aaauaugaaugcugaggaa

SEQ ID NO: 2560890 - RNA, 19 nt, Homo sapiens
  misc_RNA (1)...(19): siRNA sense strand
aguauugaacaaagggaaa

SEQ ID NO: 2560891 - RNA, 19 nt, Homo sapiens
  misc_RNA (1)...(19): siRNA sense strand
ccaaagaagaaaagaaaga

SEQ ID NO: 2560892 - RNA, 19 nt, Homo sapiens
  misc_RNA (1)...(19): siRNA sense strand
agggagaugcugagaaauu

SEQ ID NO: 2560893 - RNA, 19 nt, Homo sapiens
  misc_RNA (1)...(19): siRNA sense strand
agccagacaaagagaaaua

SEQ ID NO: 2560894 - RNA, 19 nt, Homo sapiens
  misc_RNA (1)...(19): siRNA sense strand
agacaaucuuacagcaauu

SEQ ID NO: 2560895 - RNA, 19 nt, Homo sapiens
  misc_RNA (1)...(19): siRNA sense strand
aagaagacccugaugcaaa

SEQ ID NO: 2560896 - RNA, 19 nt, Homo sapiens
  misc_RNA (1)...(19): siRNA sense strand
cuucgaacuuucagaguau

SEQ ID NO: 2560897 - RNA, 19 nt, Homo sapiens
  misc_RNA (1)...(19): siRNA sense strand
gaacagaaaaggaagacaa

SEQ ID NO: 2560898 - RNA, 19 nt, Homo sapiens
  misc_RNA (1)...(19): siRNA sense strand
uguacuugcuauaggaaau

SEQ ID NO: 2560899 - RNA, 19 nt, Homo sapiens
  misc_RNA (1)...(19): siRNA sense strand
ggucaagcuaugugccuua

SEQ ID NO: 2560900 - RNA, 19 nt, Homo sapiens
  misc_RNA (1)...(19): siRNA sense strand
aaagaagcuuggaggucaa

SEQ ID NO: 2560901 - RNA, 19 nt, Homo sapiens
  misc_RNA (1)...(19): siRNA sense strand
agaaagaugaugaugaaga

SEQ ID NO: 2560902 - RNA, 19 nt, Homo sapiens
  misc_RNA (1)...(19): siRNA sense strand
gaagcuaaacagaaagaau

SEQ ID NO: 2560903 - RNA, 19 nt, Homo sapiens
  misc_RNA (1)...(19): siRNA sense strand
ccaacaaaguccagcucau

SEQ ID NO: 2560904 - RNA, 19 nt, Homo sapiens
  misc_RNA (1)...(19): siRNA sense strand
caaaaugugcgauggaaaa

SEQ ID NO: 2560905 - RNA, 19 nt, Homo sapiens
  misc_RNA (1)...(19): siRNA sense strand
aagaacagaaccaggcaaa

SEQ ID NO: 2560906 - RNA, 19 nt, Homo sapiens
  misc_RNA (1)...(19): siRNA sense strand
acgcauugcugaaagaaaa

SEQ ID NO: 2560907 - RNA, 19 nt, Homo sapiens
  misc_RNA (1)...(19): siRNA sense strand
acaaagggaaagacagcaa

SEQ ID NO: 2560908 - RNA, 19 nt, Homo sapiens
  misc_RNA (1)...(19): siRNA sense strand
gggaaaaccuuuaccaaca

SEQ ID NO: 2560909 - RNA, 19 nt, Homo sapiens
  misc_RNA (1)...(19): siRNA sense strand
gauaagacaagcagaagau

SEQ ID NO: 2560910 - RNA, 19 nt, Homo sapiens
  misc_RNA (1)...(19): siRNA sense strand
aguauuaggagaagcagaa

SEQ ID NO: 2560911 - RNA, 19 nt, Homo sapiens
  misc_RNA (1)...(19): siRNA sense strand
auuaggagaagcagaauua

SEQ ID NO: 2560912 - RNA, 19 nt, Homo sapiens
  misc_RNA (1)...(19): siRNA sense strand
agagcaaugaguagagcaa

SEQ ID NO: 2560913 - RNA, 19 nt, Homo sapiens
  misc_RNA (1)...(19): siRNA sense strand
acaaacacuugauggaaga

SEQ ID NO: 2560914 - RNA, 19 nt, Homo sapiens
  misc_RNA (1)...(19): siRNA sense strand
ccaaguuaacauagaguca

SEQ ID NO: 2560915 - RNA, 19 nt, Homo sapiens
  misc_RNA (1)...(19): siRNA sense strand
acagaagaacagaagaaau

SEQ ID NO: 2560916 - RNA, 19 nt, Homo sapiens
  misc_RNA (1)...(19): siRNA sense strand
aauccuacgucuagucaaa

SEQ ID NO: 2560917 - RNA, 19 nt, Homo sapiens
  misc_RNA (1)...(19): siRNA sense strand
cguuaccgcuuaaggcaaa

SEQ ID NO: 2560918 - RNA, 19 nt, Homo sapiens
  misc_RNA (1)...(19): siRNA sense strand
ggagacaaugagagcagaa

SEQ ID NO: 2560919 - RNA, 19 nt, Homo sapiens
  misc_RNA (1)...(19): siRNA sense strand
gggcacgaccaaucaaaua

SEQ ID NO: 2560920 - RNA, 19 nt, Homo sapiens
  misc_RNA (1)...(19): siRNA sense strand
gagaguggauagagaccau

SEQ ID NO: 2560921 - RNA, 19 nt, Homo sapiens
  misc_RNA (1)...(19): siRNA sense strand
ggauagagaccauguggga

SEQ ID NO: 2560922 - RNA, 19 nt, Homo sapiens
  misc_RNA (1)...(19): siRNA sense strand
ccuuaugaauguuagucaa

SEQ ID NO: 2560923 - RNA, 19 nt, Homo sapiens
  misc_RNA (1)...(19): siRNA sense strand
uggcagaaacccugauuau

SEQ ID NO: 2560924 - RNA, 19 nt, Homo sapiens
  misc_RNA (1)...(19): siRNA sense strand
gcaagaagaagcugaggca

SEQ ID NO: 2560925 - RNA, 19 nt, Homo sapiens
  misc_RNA (1)...(19): siRNA sense strand
ggacagcaucagaagaaaa

SEQ ID NO: 2560926 - RNA, 19 nt, Homo sapiens
  misc_RNA (1)...(19): siRNA sense strand
cuggagaaugugugcuaaa

SEQ ID NO: 2560927 - RNA, 19 nt, Homo sapiens
  misc_RNA (1)...(19): siRNA sense strand
acccaaugacugaggaauu

SEQ ID NO: 2560928 - RNA, 19 nt, Homo sapiens
  misc_RNA (1)...(19): siRNA sense strand
uggucauggucauuggaaa

SEQ ID NO: 2560929 - RNA, 19 nt, Homo sapiens
  misc_RNA (1)...(19): siRNA sense strand
gagaaggagaagaagcaga

SEQ ID NO: 2560930 - RNA, 19 nt, Homo sapiens
  misc_RNA (1)...(19): siRNA sense strand
cauuaaaucccuucggaca

SEQ ID NO: 2560931 - RNA, 19 nt, Homo sapiens
  misc_RNA (1)...(19): siRNA sense strand
uguaacaaagccagacaaa

SEQ ID NO: 2560932 - RNA, 19 nt, Homo sapiens
  misc_RNA (1)...(19): siRNA sense strand
agggaaagacagcaaggaa

SEQ ID NO: 2560933 - RNA, 19 nt, Homo sapiens
  misc_RNA (1)...(19): siRNA sense strand
ugaacaagacagaacagaa

SEQ ID NO: 2560934 - RNA, 19 nt, Homo sapiens
  misc_RNA (1)...(19): siRNA sense strand
agaaagaagaaacagaaga

SEQ ID NO: 2560935 - RNA, 19 nt, Homo sapiens
  misc_RNA (1)...(19): siRNA sense strand
ggaaagacagcaaggaaag

SEQ ID NO: 2560936 - RNA, 19 nt, Homo sapiens
  misc_RNA (1)...(19): siRNA sense strand
aaaggaacccaaagaagaa

SEQ ID NO: 2560937 - RNA, 19 nt, Homo sapiens
  misc_RNA (1)...(19): siRNA sense strand
ccgaaggagcaauggguca

SEQ ID NO: 2560938 - RNA, 19 nt, Homo sapiens
  misc_RNA (1)...(19): siRNA sense strand
cgaaggagcaaugggucaa

SEQ ID NO: 2560939 - RNA, 19 nt, Homo sapiens
  misc_RNA (1)...(19): siRNA sense strand
gcgcaaucaucuuggagac

SEQ ID NO: 2560940 - RNA, 19 nt, Homo sapiens
  misc_RNA (1)...(19): siRNA sense strand
gaggugaagcccaggacca

SEQ ID NO: 2560941 - RNA, 19 nt, Homo sapiens
  misc_RNA (1)...(19): siRNA sense strand
cucgaaagauggcaggaga

SEQ ID NO: 2560942 - RNA, 19 nt, Homo sapiens
  misc_RNA (1)...(19): siRNA sense strand
agacagaggucaacggcuu

SEQ ID NO: 2560943 - RNA, 19 nt, Homo sapiens
  misc_RNA (1)...(19): siRNA sense strand
cugcaacacauguggcaaa

SEQ ID NO: 2560944 - RNA, 19 nt, Homo sapiens
  misc_RNA (1)...(19): siRNA sense strand
cgggaaaccuggagaggcu

SEQ ID NO: 2560945 - RNA, 19 nt, Homo sapiens
  misc_RNA (1)...(19): siRNA sense strand
ucaucaagacagaggucaa

SEQ ID NO: 2560946 - RNA, 19 nt, Homo sapiens
  misc_RNA (1)...(19): siRNA sense strand
cgagauggagacacagaaa

SEQ ID NO: 2560947 - RNA, 19 nt, Homo sapiens
  misc_RNA (1)...(19): siRNA sense strand
cguccaagcuucagcaacu

SEQ ID NO: 2560948 - RNA, 19 nt, Homo sapiens
  misc_RNA (1)...(19): siRNA sense strand
ccgagcaguucaaggccaa

SEQ ID NO: 2560949 - RNA, 19 nt, Homo sapiens
  misc_RNA (1)...(19): siRNA sense strand
ccggcgagauggagacaca

SEQ ID NO: 2560950 - RNA, 19 nt, Homo sapiens
  misc_RNA (1)...(19): siRNA sense strand
ccucaggacaguaaggaca

SEQ ID NO: 2560951 - RNA, 19 nt, Homo sapiens
  misc_RNA (1)...(19): siRNA sense strand
cugaugaacaaaugaauga

SEQ ID NO: 2560952 - RNA, 19 nt, Homo sapiens
  misc_RNA (1)...(19): siRNA sense strand
gggaagaguccauggaggu

SEQ ID NO: 2560953 - RNA, 19 nt, Homo sapiens
  misc_RNA (1)...(19): siRNA sense strand
aacucacacuggagagaaa

SEQ ID NO: 2560954 - RNA, 19 nt, Homo sapiens
  misc_RNA (1)...(19): siRNA sense strand
caucaagacggaagagcca

SEQ ID NO: 2560955 - RNA, 19 nt, Homo sapiens
  misc_RNA (1)...(19): siRNA sense strand
cgaugaaggccaacgagau

SEQ ID NO: 2560956 - RNA, 19 nt, Homo sapiens
  misc_RNA (1)...(19): siRNA sense strand
gcauuaguggugugaaaca

SEQ ID NO: 2560957 - RNA, 19 nt, Homo sapiens
  misc_RNA (1)...(19): siRNA sense strand
cacaagaagaacuguacua

SEQ ID NO: 2560958 - RNA, 19 nt, Homo sapiens
  misc_RNA (1)...(19): siRNA sense strand
cugauaauccugaugaaca

SEQ ID NO: 2560959 - RNA, 19 nt, Homo sapiens
  misc_RNA (1)...(19): siRNA sense strand
uggcaaaagcgaagagagu

SEQ ID NO: 2560960 - RNA, 19 nt, Homo sapiens
  misc_RNA (1)...(19): siRNA sense strand
ggcacucacauguggaaua

SEQ ID NO: 2560961 - RNA, 19 nt, Homo sapiens
  misc_RNA (1)...(19): siRNA sense strand
ccgucaaguucccagaaau

SEQ ID NO: 2560962 - RNA, 19 nt, Homo sapiens
  misc_RNA (1)...(19): siRNA sense strand
aggcauucuucaaacacaa

SEQ ID NO: 2560963 - RNA, 19 nt, Homo sapiens
  misc_RNA (1)...(19): siRNA sense strand
gcuuuggauuugacaucua

SEQ ID NO: 2560964 - RNA, 19 nt, Homo sapiens
  misc_RNA (1)...(19): siRNA sense strand
ugaaugacacaguuaacaa

SEQ ID NO: 2560965 - RNA, 19 nt, Homo sapiens
  misc_RNA (1)...(19): siRNA sense strand
aagucauaccaaagagaga

SEQ ID NO: 2560966 - RNA, 19 nt, Homo sapiens
  misc_RNA (1)...(19): siRNA sense strand
cagaaggauuuggcggcaa

SEQ ID NO: 2560967 - RNA, 19 nt, Homo sapiens
  misc_RNA (1)...(19): siRNA sense strand
ccagcuggcuagacaccaa

SEQ ID NO: 2560968 - RNA, 19 nt, Homo sapiens
  misc_RNA (1)...(19): siRNA sense strand
gaagagaguggcaugguca

SEQ ID NO: 2560969 - RNA, 19 nt, Homo sapiens
  misc_RNA (1)...(19): siRNA sense strand
cacccagcauugaggagaa

SEQ ID NO: 2560970 - RNA, 19 nt, Homo sapiens
  misc_RNA (1)...(19): siRNA sense strand
gcuucguggaggacagcaa

SEQ ID NO: 2560971 - RNA, 19 nt, Homo sapiens
  misc_RNA (1)...(19): siRNA sense strand
gcgaugaaggccaacgaga

SEQ ID NO: 2560972 - RNA, 19 nt, Homo sapiens
  misc_RNA (1)...(19): siRNA sense strand
ggugacauggaaagccaaa

SEQ ID NO: 2560973 - RNA, 19 nt, Homo sapiens
  misc_RNA (1)...(19): siRNA sense strand
uugcacuauuuguggaaga

SEQ ID NO: 2560974 - RNA, 19 nt, Homo sapiens
  misc_RNA (1)...(19): siRNA sense strand
caacggacuugacagggaa

SEQ ID NO: 2560975 - RNA, 19 nt, Homo sapiens
  misc_RNA (1)...(19): siRNA sense strand
gaacauauuggcagcggca

SEQ ID NO: 2560976 - RNA, 19 nt, Homo sapiens
  misc_RNA (1)...(19): siRNA sense strand
gggcagcaucccugauaca

SEQ ID NO: 2560977 - RNA, 19 nt, Homo sapiens
  misc_RNA (1)...(19): siRNA sense strand
ugccugagcauuuggacaa

SEQ ID NO: 2560978 - RNA, 19 nt, Homo sapiens
  misc_RNA (1)...(19): siRNA sense strand
aaggcaaucuuaagguaca

SEQ ID NO: 2560979 - RNA, 19 nt, Homo sapiens
  misc_RNA (1)...(19): siRNA sense strand
ugacauuucuaggaggcaa

SEQ ID NO: 2560980 - RNA, 19 nt, Homo sapiens
  misc_RNA (1)...(19): siRNA sense strand
ugaacaaaugaaugacaca

SEQ ID NO: 2560981 - RNA, 19 nt, Homo sapiens
  misc_RNA (1)...(19): siRNA sense strand
ggucaacggcuucgugcau

SEQ ID NO: 2560982 - RNA, 19 nt, Homo sapiens
  misc_RNA (1)...(19): siRNA sense strand
ggaagcaagcgaagccuca

SEQ ID NO: 2560983 - RNA, 19 nt, Homo sapiens
  misc_RNA (1)...(19): siRNA sense strand
gcaagcagugagaacggaa

SEQ ID NO: 2560984 - RNA, 19 nt, Homo sapiens
  misc_RNA (1)...(19): siRNA sense strand
gcaacuucuccguaaucaa

SEQ ID NO: 2560985 - RNA, 19 nt, Homo sapiens
  misc_RNA (1)...(19): siRNA sense strand
aaauauugcuguuggcuuc

SEQ ID NO: 2560986 - RNA, 19 nt, Homo sapiens
  misc_RNA (1)...(19): siRNA sense strand
uggaagagcuuucacgacu

SEQ ID NO: 2560987 - RNA, 19 nt, Homo sapiens
  misc_RNA (1)...(19): siRNA sense strand
agaaauacccucauaucca

SEQ ID NO: 2560988 - RNA, 19 nt, Homo sapiens
  misc_RNA (1)...(19): siRNA sense strand
guggaggacagcaaggaga

SEQ ID NO: 2560989 - RNA, 19 nt, Homo sapiens
  misc_RNA (1)...(19): siRNA sense strand
ccgaugaggcauucuucaa

SEQ ID NO: 2560990 - RNA, 19 nt, Homo sapiens
  misc_RNA (1)...(19): siRNA sense strand
cgucaaguucccagaaaug

SEQ ID NO: 2560991 - RNA, 19 nt, Homo sapiens
  misc_RNA (1)...(19): siRNA sense strand
agacaacuucucugaugaa

SEQ ID NO: 2560992 - RNA, 19 nt, Homo sapiens
  misc_RNA (1)...(19): siRNA sense strand
gaucaaugcuggccuggca

SEQ ID NO: 2560993 - RNA, 19 nt, Homo sapiens
  misc_RNA (1)...(19): siRNA sense strand
ccugcagauucacgagaga

SEQ ID NO: 2560994 - RNA, 19 nt, Homo sapiens
  misc_RNA (1)...(19): siRNA sense strand
uuucacgacuaaaggcaau

SEQ ID NO: 2560995 - RNA, 19 nt, Homo sapiens
  misc_RNA (1)...(19): siRNA sense strand
aguauuaaacagagggaaa

SEQ ID NO: 2560996 - RNA, 19 nt, Homo sapiens
  misc_RNA (1)...(19): siRNA sense strand
agaaagaagaggaagcaaa

SEQ ID NO: 2560997 - RNA, 19 nt, Homo sapiens
  misc_RNA (1)...(19): siRNA sense strand
gaggaaggaagaagggaaa

SEQ ID NO: 2560998 - RNA, 19 nt, Homo sapiens
  misc_RNA (1)...(19): siRNA sense strand
agacguaacaggagaaaga

SEQ ID NO: 2560999 - RNA, 19 nt, Homo sapiens
  misc_RNA (1)...(19): siRNA sense strand
ccauagaggaagaagguga

SEQ ID NO: 2561000 - RNA, 19 nt, Homo sapiens
  misc_RNA (1)...(19): siRNA sense strand
ucaaagagugcaaaggaaa

SEQ ID NO: 2561001 - RNA, 19 nt, Homo sapiens
  misc_RNA (1)...(19): siRNA sense strand
ggaaagacguaacaggaga

SEQ ID NO: 2561002 - RNA, 19 nt, Homo sapiens
  misc_RNA (1)...(19): siRNA sense strand
gggaagaguauaucaacaa

SEQ ID NO: 2561003 - RNA, 19 nt, Homo sapiens
  misc_RNA (1)...(19): siRNA sense strand
agaagaugccauagaggaa

SEQ ID NO: 2561004 - RNA, 19 nt, Homo sapiens
  misc_RNA (1)...(19): siRNA sense strand
ggaaagagccaaaagacaa

SEQ ID NO: 2561005 - RNA, 19 nt, Homo sapiens
  misc_RNA (1)...(19): siRNA sense strand
caaugaugguggagacaga

SEQ ID NO: 2561006 - RNA, 19 nt, Homo sapiens
  misc_RNA (1)...(19): siRNA sense strand
agguggaaauuaagaagaa

SEQ ID NO: 2561007 - RNA, 19 nt, Homo sapiens
  misc_RNA (1)...(19): siRNA sense strand
ccugaaggcagcaaagaua

SEQ ID NO: 2561008 - RNA, 19 nt, Homo sapiens
  misc_RNA (1)...(19): siRNA sense strand
caguguagccacagaggaa

SEQ ID NO: 2561009 - RNA, 19 nt, Homo sapiens
  misc_RNA (1)...(19): siRNA sense strand
ggaagaagggaaagagcca

SEQ ID NO: 2561010 - RNA, 19 nt, Homo sapiens
  misc_RNA (1)...(19): siRNA sense strand
ggaccaaacuaaaggugca

SEQ ID NO: 2561011 - RNA, 19 nt, Homo sapiens
  misc_RNA (1)...(19): siRNA sense strand
cuggaugaguuguaugaaa

SEQ ID NO: 2561012 - RNA, 19 nt, Homo sapiens
  misc_RNA (1)...(19): siRNA sense strand
caacagaauagggaggaaa

SEQ ID NO: 2561013 - RNA, 19 nt, Homo sapiens
  misc_RNA (1)...(19): siRNA sense strand
ggcagauauaauugagaaa

SEQ ID NO: 2561014 - RNA, 19 nt, Homo sapiens
  misc_RNA (1)...(19): siRNA sense strand
agaggaagaaggugaagaa

SEQ ID NO: 2561015 - RNA, 19 nt, Homo sapiens
  misc_RNA (1)...(19): siRNA sense strand
gcaacuugguggugcugaa

SEQ ID NO: 2561016 - RNA, 19 nt, Homo sapiens
  misc_RNA (1)...(19): siRNA sense strand
aggcaauguuucagcucua

SEQ ID NO: 2561017 - RNA, 19 nt, Homo sapiens
  misc_RNA (1)...(19): siRNA sense strand
gggaguggauugagaccau

SEQ ID NO: 2561018 - RNA, 19 nt, Homo sapiens
  misc_RNA (1)...(19): siRNA sense strand
agacagacacucaaagcaa

SEQ ID NO: 2561019 - RNA, 19 nt, Homo sapiens
  misc_RNA (1)...(19): siRNA sense strand
aagaagggaaagagccaaa

SEQ ID NO: 2561020 - RNA, 19 nt, Homo sapiens
  misc_RNA (1)...(19): siRNA sense strand
caacuugacuguacgggua

SEQ ID NO: 2561021 - RNA, 19 nt, Homo sapiens
  misc_RNA (1)...(19): siRNA sense strand
uuaacuuguuugcgggaaa

SEQ ID NO: 2561022 - RNA, 19 nt, Homo sapiens
  misc_RNA (1)...(19): siRNA sense strand
agaggaaggaagaagggaa

SEQ ID NO: 2561023 - RNA, 19 nt, Homo sapiens
  misc_RNA (1)...(19): siRNA sense strand
gggaaaacuuguaucaauu

SEQ ID NO: 2561024 - RNA, 19 nt, Homo sapiens
  misc_RNA (1)...(19): siRNA sense strand
uuaagaagcaacaggaaga

SEQ ID NO: 2561025 - RNA, 19 nt, Homo sapiens
  misc_RNA (1)...(19): siRNA sense strand
ccaucauccuggagaacuu

SEQ ID NO: 2561026 - RNA, 19 nt, Homo sapiens
  misc_RNA (1)...(19): siRNA sense strand
uggaagaacgugaagauca

SEQ ID NO: 2561027 - RNA, 19 nt, Homo sapiens
  misc_RNA (1)...(19): siRNA sense strand
ugaccgaagaacagaagaa

SEQ ID NO: 2561028 - RNA, 19 nt, Homo sapiens
  misc_RNA (1)...(19): siRNA sense strand
gggcggaaggacagaauca

SEQ ID NO: 2561029 - RNA, 19 nt, Homo sapiens
  misc_RNA (1)...(19): siRNA sense strand
agccuaaguaugaggacaa

SEQ ID NO: 2561030 - RNA, 19 nt, Homo sapiens
  misc_RNA (1)...(19): siRNA sense strand
ggaaggaagaagggaaaga

SEQ ID NO: 2561031 - RNA, 19 nt, Homo sapiens
  misc_RNA (1)...(19): siRNA sense strand
acagcaagcccaagccaaa

SEQ ID NO: 2561032 - RNA, 19 nt, Homo sapiens
  misc_RNA (1)...(19): siRNA sense strand
cguaacaggagaaagaaga

SEQ ID NO: 2561033 - RNA, 19 nt, Homo sapiens
  misc_RNA (1)...(19): siRNA sense strand
uaguagaagaacuggaaga

SEQ ID NO: 2561034 - RNA, 19 nt, Homo sapiens
  misc_RNA (1)...(19): siRNA sense strand
gaagaauggcaauggcaca

SEQ ID NO: 2561035 - RNA, 19 nt, Homo sapiens
  misc_RNA (1)...(19): siRNA sense strand
cucaaagagugcaaaggaa

SEQ ID NO: 2561036 - RNA, 19 nt, Homo sapiens
  misc_RNA (1)...(19): siRNA sense strand
cuacaacugagguggaaau

SEQ ID NO: 2561037 - RNA, 19 nt, Homo sapiens
  misc_RNA (1)...(19): siRNA sense strand
gguggaaauuaagaagaaa

SEQ ID NO: 2561038 - RNA, 19 nt, Homo sapiens
  misc_RNA (1)...(19): siRNA sense strand
caacaucgaggaagggcua

SEQ ID NO: 2561039 - RNA, 19 nt, Homo sapiens
  misc_RNA (1)...(19): siRNA sense strand
cugauaagaagaauagcua

SEQ ID NO: 2561040 - RNA, 19 nt, Homo sapiens
  misc_RNA (1)...(19): siRNA sense strand
aggugaagccucuggauga

SEQ ID NO: 2561041 - RNA, 19 nt, Homo sapiens
  misc_RNA (1)...(19): siRNA sense strand
cugacaaagucuucaccua

SEQ ID NO: 2561042 - RNA, 19 nt, Homo sapiens
  misc_RNA (1)...(19): siRNA sense strand
gggaaagagccaaaagaca

SEQ ID NO: 2561043 - RNA, 19 nt, Homo sapiens
  misc_RNA (1)...(19): siRNA sense strand
gugcagacauccaccggaa

SEQ ID NO: 2561044 - RNA, 19 nt, Homo sapiens
  misc_RNA (1)...(19): siRNA sense strand
gaacaaaauccaaggaauc

SEQ ID NO: 2561045 - RNA, 19 nt, Homo sapiens
  misc_RNA (1)...(19): siRNA sense strand
uggaugaguuguaugaaaa

SEQ ID NO: 2561046 - RNA, 19 nt, Homo sapiens
  misc_RNA (1)...(19): siRNA sense strand
gccuuaacauggugacaau

SEQ ID NO: 2561047 - RNA, 19 nt, Homo sapiens
  misc_RNA (1)...(19): siRNA sense strand
ggaguggcuuuaagggaga

SEQ ID NO: 2561048 - RNA, 19 nt, Homo sapiens
  misc_RNA (1)...(19): siRNA sense strand
gcuggagaauggaggcaca

SEQ ID NO: 2561049 - RNA, 19 nt, Homo sapiens
  misc_RNA (1)...(19): siRNA sense strand
gaaagacguaacaggagaa

SEQ ID NO: 2561050 - RNA, 19 nt, Homo sapiens
  misc_RNA (1)...(19): siRNA sense strand
acaaagagugugucugcaa

SEQ ID NO: 2561051 - RNA, 19 nt, Homo sapiens
  misc_RNA (1)...(19): siRNA sense strand
ucuacauugagcagagaaa

SEQ ID NO: 2561052 - RNA, 19 nt, Homo sapiens
  misc_RNA (1)...(19): siRNA sense strand
gauggaagaacgugaagau

SEQ ID NO: 2561053 - RNA, 19 nt, Homo sapiens
  misc_RNA (1)...(19): siRNA sense strand
cuuaugaagaacagaauca

SEQ ID NO: 2561054 - RNA, 19 nt, Homo sapiens
  misc_RNA (1)...(19): siRNA sense strand
gaggcugaauuuaaagcaa

SEQ ID NO: 2561055 - RNA, 19 nt, Homo sapiens
  misc_RNA (1)...(19): siRNA sense strand
gugcaaaggaaagacguaa

SEQ ID NO: 2561056 - RNA, 19 nt, Homo sapiens
  misc_RNA (1)...(19): siRNA sense strand
ccgccaugcugguauaaau

SEQ ID NO: 2561057 - RNA, 19 nt, Homo sapiens
  misc_RNA (1)...(19): siRNA sense strand
aggaauacuuggauccaga

SEQ ID NO: 2561058 - RNA, 19 nt, Homo sapiens
  misc_RNA (1)...(19): siRNA sense strand
aaagcaagcagauggagaa

SEQ ID NO: 2561059 - RNA, 19 nt, Homo sapiens
  misc_RNA (1)...(19): siRNA sense strand
cuaaguaugaggacaauau

SEQ ID NO: 2561060 - RNA, 19 nt, Homo sapiens
  misc_RNA (1)...(19): siRNA sense strand
gcgcaagagcacagauuaa

SEQ ID NO: 2561061 - RNA, 19 nt, Homo sapiens
  misc_RNA (1)...(19): siRNA sense strand
ccgaaaagcaagaaggaaa

SEQ ID NO: 2561062 - RNA, 19 nt, Homo sapiens
  misc_RNA (1)...(19): siRNA sense strand
gagaauaguaagaaagaga

SEQ ID NO: 2561063 - RNA, 19 nt, Homo sapiens
  misc_RNA (1)...(19): siRNA sense strand
ggacuuaagcugauagcaa

SEQ ID NO: 2561064 - RNA, 19 nt, Homo sapiens
  misc_RNA (1)...(19): siRNA sense strand
ccaauuaauacuagggcaa

SEQ ID NO: 2561065 - RNA, 19 nt, Homo sapiens
  misc_RNA (1)...(19): siRNA sense strand
ggagauggaacguuagaaa

SEQ ID NO: 2561066 - RNA, 19 nt, Homo sapiens
  misc_RNA (1)...(19): siRNA sense strand
gagccaaacgcaagguaaa

SEQ ID NO: 2561067 - RNA, 19 nt, Homo sapiens
  misc_RNA (1)...(19): siRNA sense strand
gcgaagaaacagaaaugaa

SEQ ID NO: 2561068 - RNA, 19 nt, Homo sapiens
  misc_RNA (1)...(19): siRNA sense strand
ucacaaagacaaagaguca

SEQ ID NO: 2561069 - RNA, 19 nt, Homo sapiens
  misc_RNA (1)...(19): siRNA sense strand
uaauagauuuagagggaga

SEQ ID NO: 2561070 - RNA, 19 nt, Homo sapiens
  misc_RNA (1)...(19): siRNA sense strand
cagcaauauugaagaacau

SEQ ID NO: 2561071 - RNA, 19 nt, Homo sapiens
  misc_RNA (1)...(19): siRNA sense strand
gguaaacaacaaaggacaa

SEQ ID NO: 2561072 - RNA, 19 nt, Homo sapiens
  misc_RNA (1)...(19): siRNA sense strand
ccucauaaucaaagugcua

SEQ ID NO: 2561073 - RNA, 19 nt, Homo sapiens
  misc_RNA (1)...(19): siRNA sense strand
cagucaaagcacagugaaa

SEQ ID NO: 2561074 - RNA, 19 nt, Homo sapiens
  misc_RNA (1)...(19): siRNA sense strand
caccaaucauacagagaaa

SEQ ID NO: 2561075 - RNA, 19 nt, Homo sapiens
  misc_RNA (1)...(19): siRNA sense strand
cuauuugaaacgagagaua

SEQ ID NO: 2561076 - RNA, 19 nt, Homo sapiens
  misc_RNA (1)...(19): siRNA sense strand
agacaaagagucaagcaaa

SEQ ID NO: 2561077 - RNA, 19 nt, Homo sapiens
  misc_RNA (1)...(19): siRNA sense strand
gguuaaguuuguacugaaa

SEQ ID NO: 2561078 - RNA, 19 nt, Homo sapiens
  misc_RNA (1)...(19): siRNA sense strand
uggcugaguuugagggaga

SEQ ID NO: 2561079 - RNA, 19 nt, Homo sapiens
  misc_RNA (1)...(19): siRNA sense strand
agucaaacugcaagugaaa

SEQ ID NO: 2561080 - RNA, 19 nt, Homo sapiens
  misc_RNA (1)...(19): siRNA sense strand
gcaagaaggaaaaguaaua

SEQ ID NO: 2561081 - RNA, 19 nt, Homo sapiens
  misc_RNA (1)...(19): siRNA sense strand
ggugaaugauaccaagaaa

SEQ ID NO: 2561082 - RNA, 19 nt, Homo sapiens
  misc_RNA (1)...(19): siRNA sense strand
cgaaaagcaagaaggaaaa

SEQ ID NO: 2561083 - RNA, 19 nt, Homo sapiens
  misc_RNA (1)...(19): siRNA sense strand
cggaaaguuaagugaauau

SEQ ID NO: 2561084 - RNA, 19 nt, Homo sapiens
  misc_RNA (1)...(19): siRNA sense strand
acacuaaaucuuuggagaa

SEQ ID NO: 2561085 - RNA, 19 nt, Homo sapiens
  misc_RNA (1)...(19): siRNA sense strand
agauggaacugcagaugaa

SEQ ID NO: 2561086 - RNA, 19 nt, Homo sapiens
  misc_RNA (1)...(19): siRNA sense strand
gaacaaacgaaaucagaca

SEQ ID NO: 2561087 - RNA, 19 nt, Homo sapiens
  misc_RNA (1)...(19): siRNA sense strand
ccaauaaacaucaaccaaa

SEQ ID NO: 2561088 - RNA, 19 nt, Homo sapiens
  misc_RNA (1)...(19): siRNA sense strand
caauaaagggucaaguaau

SEQ ID NO: 2561089 - RNA, 19 nt, Homo sapiens
  misc_RNA (1)...(19): siRNA sense strand
gccaaggaauacagaggaa

SEQ ID NO: 2561090 - RNA, 19 nt, Homo sapiens
  misc_RNA (1)...(19): siRNA sense strand
agaaauacccacagaaguu

SEQ ID NO: 2561091 - RNA, 19 nt, Homo sapiens
  misc_RNA (1)...(19): siRNA sense strand
ccuuuggacuauauggaaa

SEQ ID NO: 2561092 - RNA, 19 nt, Homo sapiens
  misc_RNA (1)...(19): siRNA sense strand
gggaagaaauuauggcaac

SEQ ID NO: 2561093 - RNA, 19 nt, Homo sapiens
  misc_RNA (1)...(19): siRNA sense strand
gguuaucaugagaaggaaa

SEQ ID NO: 2561094 - RNA, 19 nt, Homo sapiens
  misc_RNA (1)...(19): siRNA sense strand
ugguagaaguucacaaaga

SEQ ID NO: 2561095 - RNA, 19 nt, Homo sapiens
  misc_RNA (1)...(19): siRNA sense strand
ugaugaaaguggacuaaau

SEQ ID NO: 2561096 - RNA, 19 nt, Homo sapiens
  misc_RNA (1)...(19): siRNA sense strand
ccagaaaagcccagggaga

SEQ ID NO: 2561097 - RNA, 19 nt, Homo sapiens
  misc_RNA (1)...(19): siRNA sense strand
guauguaagaagacuguua

SEQ ID NO: 2561098 - RNA, 19 nt, Homo sapiens
  misc_RNA (1)...(19): siRNA sense strand
acuaguagaugauggaaaa

SEQ ID NO: 2561099 - RNA, 19 nt, Homo sapiens
  misc_RNA (1)...(19): siRNA sense strand
agaaaugugaugaagacaa

SEQ ID NO: 2561100 - RNA, 19 nt, Homo sapiens
  misc_RNA (1)...(19): siRNA sense strand
cuuuggagauggaacguua

SEQ ID NO: 2561101 - RNA, 19 nt, Homo sapiens
  misc_RNA (1)...(19): siRNA sense strand
cauagauagcaaugagaau

SEQ ID NO: 2561102 - RNA, 19 nt, Homo sapiens
  misc_RNA (1)...(19): siRNA sense strand
caguaauccuucugaugua

SEQ ID NO: 2561103 - RNA, 19 nt, Homo sapiens
  misc_RNA (1)...(19): siRNA sense strand
aaagaaaccaagagcaaaa

SEQ ID NO: 2561104 - RNA, 19 nt, Homo sapiens
  misc_RNA (1)...(19): siRNA sense strand
ggucauuaucagaagcaau

SEQ ID NO: 2561105 - RNA, 19 nt, Homo sapiens
  misc_RNA (1)...(19): siRNA sense strand
gauaaauauuguuggccga

SEQ ID NO: 2561106 - RNA, 19 nt, Homo sapiens
  misc_RNA (1)...(19): siRNA sense strand
ccauaugggaagaugaaaa

SEQ ID NO: 2561107 - RNA, 19 nt, Homo sapiens
  misc_RNA (1)...(19): siRNA sense strand
ccaauaugguagaaguuca

SEQ ID NO: 2561108 - RNA, 19 nt, Homo sapiens
  misc_RNA (1)...(19): siRNA sense strand
aagaaaagucacagaagaa

SEQ ID NO: 2561109 - RNA, 19 nt, Homo sapiens
  misc_RNA (1)...(19): siRNA sense strand
gagaagucaaccauagaua

SEQ ID NO: 2561110 - RNA, 19 nt, Homo sapiens
  misc_RNA (1)...(19): siRNA sense strand
auacacacuuagagccaaa

SEQ ID NO: 2561111 - RNA, 19 nt, Homo sapiens
  misc_RNA (1)...(19): siRNA sense strand
gaggaaagccaaaugccua

SEQ ID NO: 2561112 - RNA, 19 nt, Homo sapiens
  misc_RNA (1)...(19): siRNA sense strand
ccgaguaaauagagaauug

SEQ ID NO: 2561113 - RNA, 19 nt, Homo sapiens
  misc_RNA (1)...(19): siRNA sense strand
cagagaugggacagcaaua

SEQ ID NO: 2561114 - RNA, 19 nt, Homo sapiens
  misc_RNA (1)...(19): siRNA sense strand
ccuaauguauguaagaaga

SEQ ID NO: 2561115 - RNA, 19 nt, Homo sapiens
  misc_RNA (1)...(19): siRNA sense strand
gcauauaacuacugcuuuu

SEQ ID NO: 2561116 - RNA, 19 nt, Homo sapiens
  misc_RNA (1)...(19): siRNA sense strand
auguggagaacuugggaaa

SEQ ID NO: 2561117 - RNA, 19 nt, Homo sapiens
  misc_RNA (1)...(19): siRNA sense strand
ccaaggauccauaaagcua

SEQ ID NO: 2561118 - RNA, 19 nt, Homo sapiens
  misc_RNA (1)...(19): siRNA sense strand
gugggaacaagaugaaaua

SEQ ID NO: 2561119 - RNA, 19 nt, Homo sapiens
  misc_RNA (1)...(19): siRNA sense strand
agguaaauuaugagacuga

SEQ ID NO: 2561120 - RNA, 19 nt, Homo sapiens
  misc_RNA (1)...(19): siRNA sense strand
acgagaauacauugggcaa

SEQ ID NO: 2561121 - RNA, 19 nt, Homo sapiens
  misc_RNA (1)...(19): siRNA sense strand
gagaauacauugggcaaaa

SEQ ID NO: 2561122 - RNA, 19 nt, Homo sapiens
  misc_RNA (1)...(19): siRNA sense strand
gcacagaauacacagauau

SEQ ID NO: 2561123 - RNA, 19 nt, Homo sapiens
  misc_RNA (1)...(19): siRNA sense strand
ccucgaacucccagaagua

SEQ ID NO: 2561124 - RNA, 19 nt, Homo sapiens
  misc_RNA (1)...(19): siRNA sense strand
cuaaaucuuuggagaauca

SEQ ID NO: 2561125 - RNA, 19 nt, Homo sapiens
  misc_RNA (1)...(19): siRNA sense strand
acacagaguuucaaggcaa

SEQ ID NO: 2561126 - RNA, 19 nt, Homo sapiens
  misc_RNA (1)...(19): siRNA sense strand
agcaagaauaagagcaaaa

SEQ ID NO: 2561127 - RNA, 19 nt, Homo sapiens
  misc_RNA (1)...(19): siRNA sense strand
ccuugauaacacagaguuu

SEQ ID NO: 2561128 - RNA, 19 nt, Homo sapiens
  misc_RNA (1)...(19): siRNA sense strand
ccacuguuggagagggcua

SEQ ID NO: 2561129 - RNA, 19 nt, Homo sapiens
  misc_RNA (1)...(19): siRNA sense strand
cugcuaucggugcgggaaa

SEQ ID NO: 2561130 - RNA, 19 nt, Homo sapiens
  misc_RNA (1)...(19): siRNA sense strand
gggcuacgguuacgggcau

SEQ ID NO: 2561131 - RNA, 19 nt, Homo sapiens
  misc_RNA (1)...(19): siRNA sense strand
cggaauucucuguacgaca

SEQ ID NO: 2561132 - RNA, 19 nt, Homo sapiens
  misc_RNA (1)...(19): siRNA sense strand
gggcagaggaugcagugga

SEQ ID NO: 2561133 - RNA, 19 nt, Homo sapiens
  misc_RNA (1)...(19): siRNA sense strand
cgugaaagauuaugccuuc

SEQ ID NO: 2561134 - RNA, 19 nt, Homo sapiens
  misc_RNA (1)...(19): siRNA sense strand
ucauuaagaauuacggcuu

SEQ ID NO: 2561135 - RNA, 19 nt, Homo sapiens
  misc_RNA (1)...(19): siRNA sense strand
gaauaaugcugguguggcu

SEQ ID NO: 2561136 - RNA, 19 nt, Homo sapiens
  misc_RNA (1)...(19): siRNA sense strand
cagccaaguggguggagau

SEQ ID NO: 2561137 - RNA, 19 nt, Homo sapiens
  misc_RNA (1)...(19): siRNA sense strand
cggcugugacucaggcuuu

SEQ ID NO: 2561138 - RNA, 19 nt, Homo sapiens
  misc_RNA (1)...(19): siRNA sense strand
aagagaagccuaagcggaa

SEQ ID NO: 2561139 - RNA, 19 nt, Homo sapiens
  misc_RNA (1)...(19): siRNA sense strand
gugaaaaggacuaccacaa

SEQ ID NO: 2561140 - RNA, 19 nt, Homo sapiens
  misc_RNA (1)...(19): siRNA sense strand
ggaacuucuucgagcggga

SEQ ID NO: 2561141 - RNA, 19 nt, Homo sapiens
  misc_RNA (1)...(19): siRNA sense strand
uggaugaacuggagagcuc

SEQ ID NO: 2561142 - RNA, 19 nt, Homo sapiens
  misc_RNA (1)...(19): siRNA sense strand
agaaggacggcaaggccua

SEQ ID NO: 2561143 - RNA, 19 nt, Homo sapiens
  misc_RNA (1)...(19): siRNA sense strand
ccgccauggccaagaaguu

SEQ ID NO: 2561144 - RNA, 19 nt, Homo sapiens
  misc_RNA (1)...(19): siRNA sense strand
cgggaaugcuucacgccau

SEQ ID NO: 2561145 - RNA, 19 nt, Homo sapiens
  misc_RNA (1)...(19): siRNA sense strand
gcagaaaucagcugagccu

SEQ ID NO: 2561146 - RNA, 19 nt, Homo sapiens
  misc_RNA (1)...(19): siRNA sense strand
gagcagaacgacaagccuu

SEQ ID NO: 2561147 - RNA, 19 nt, Homo sapiens
  misc_RNA (1)...(19): siRNA sense strand
ccuacugucgcaaggacua

SEQ ID NO: 2561148 - RNA, 19 nt, Homo sapiens
  misc_RNA (1)...(19): siRNA sense strand
ccacagucgccaaaggagu

SEQ ID NO: 2561149 - RNA, 19 nt, Homo sapiens
  misc_RNA (1)...(19): siRNA sense strand
ccuacugugaggugcacua

SEQ ID NO: 2561150 - RNA, 19 nt, Homo sapiens
  misc_RNA (1)...(19): siRNA sense strand
cacuagagacccuggacaa

SEQ ID NO: 2561151 - RNA, 19 nt, Homo sapiens
  misc_RNA (1)...(19): siRNA sense strand
uggaguaugaggcgcgaaa

SEQ ID NO: 2561152 - RNA, 19 nt, Homo sapiens
  misc_RNA (1)...(19): siRNA sense strand
acucaggaggagagauaca

SEQ ID NO: 2561153 - RNA, 19 nt, Homo sapiens
  misc_RNA (1)...(19): siRNA sense strand
aggagaucgccaagcacaa

SEQ ID NO: 2561154 - RNA, 19 nt, Homo sapiens
  misc_RNA (1)...(19): siRNA sense strand
ccacagaccucaucgucca

SEQ ID NO: 2561155 - RNA, 19 nt, Homo sapiens
  misc_RNA (1)...(19): siRNA sense strand
auguggacuuccuggagaa

SEQ ID NO: 2561156 - RNA, 19 nt, Homo sapiens
  misc_RNA (1)...(19): siRNA sense strand
acuacaaggggaagaacua

SEQ ID NO: 2561157 - RNA, 19 nt, Homo sapiens
  misc_RNA (1)...(19): siRNA sense strand
ucaaauggguggacgaggu

SEQ ID NO: 2561158 - RNA, 19 nt, Homo sapiens
  misc_RNA (1)...(19): siRNA sense strand
acccauaccaggagcccaa

SEQ ID NO: 2561159 - RNA, 19 nt, Homo sapiens
  misc_RNA (1)...(19): siRNA sense strand
ccuaugaggaaguaaagca

SEQ ID NO: 2561160 - RNA, 19 nt, Homo sapiens
  misc_RNA (1)...(19): siRNA sense strand
cugcaaugucccaagauaa

SEQ ID NO: 2561161 - RNA, 19 nt, Homo sapiens
  misc_RNA (1)...(19): siRNA sense strand
agaauuuguucguggccaa

SEQ ID NO: 2561162 - RNA, 19 nt, Homo sapiens
  misc_RNA (1)...(19): siRNA sense strand
cagagcaagaugaggaaga

SEQ ID NO: 2561163 - RNA, 19 nt, Homo sapiens
  misc_RNA (1)...(19): siRNA sense strand
ggacaaccuuagagccuca

SEQ ID NO: 2561164 - RNA, 19 nt, Homo sapiens
  misc_RNA (1)...(19): siRNA sense strand
uuguauaucaagagaccaa

SEQ ID NO: 2561165 - RNA, 19 nt, Homo sapiens
  misc_RNA (1)...(19): siRNA sense strand
gcugcaaugucccaagaua

SEQ ID NO: 2561166 - RNA, 19 nt, Homo sapiens
  misc_RNA (1)...(19): siRNA sense strand
acgaggugguggugacgaa

SEQ ID NO: 2561167 - RNA, 19 nt, Homo sapiens
  misc_RNA (1)...(19): siRNA sense strand
ugcaaugucccaagauaaa

SEQ ID NO: 2561168 - RNA, 19 nt, Homo sapiens
  misc_RNA (1)...(19): siRNA sense strand
ccuacagcaagcagagcaa

SEQ ID NO: 2561169 - RNA, 19 nt, Homo sapiens
  misc_RNA (1)...(19): siRNA sense strand
aguauauccaggaagaaau

SEQ ID NO: 2561170 - RNA, 19 nt, Homo sapiens
  misc_RNA (1)...(19): siRNA sense strand
aagcagagcaagaugagga

SEQ ID NO: 2561171 - RNA, 19 nt, Homo sapiens
  misc_RNA (1)...(19): siRNA sense strand
ugaugauggccaaagagaa

SEQ ID NO: 2561172 - RNA, 19 nt, Homo sapiens
  misc_RNA (1)...(19): siRNA sense strand
cggaacuggacauggacga

SEQ ID NO: 2561173 - RNA, 19 nt, Homo sapiens
  misc_RNA (1)...(19): siRNA sense strand
aggaggaggaagagggaaa

SEQ ID NO: 2561174 - RNA, 19 nt, Homo sapiens
  misc_RNA (1)...(19): siRNA sense strand
aagcaaugcaacagggaaa

SEQ ID NO: 2561175 - RNA, 19 nt, Homo sapiens
  misc_RNA (1)...(19): siRNA sense strand
cagcauugccugauggaaa

SEQ ID NO: 2561176 - RNA, 19 nt, Homo sapiens
  misc_RNA (1)...(19): siRNA sense strand
guuuaaagcaagcaagaua

SEQ ID NO: 2561177 - RNA, 19 nt, Homo sapiens
  misc_RNA (1)...(19): siRNA sense strand
gggaaaagacauugaagaa

SEQ ID NO: 2561178 - RNA, 19 nt, Homo sapiens
  misc_RNA (1)...(19): siRNA sense strand
ccaauuauguugauggcua

SEQ ID NO: 2561179 - RNA, 19 nt, Homo sapiens
  misc_RNA (1)...(19): siRNA sense strand
gguuggaauccgagaagaa

SEQ ID NO: 2561180 - RNA, 19 nt, Homo sapiens
  misc_RNA (1)...(19): siRNA sense strand
gggcaagguaccucagaua

SEQ ID NO: 2561181 - RNA, 19 nt, Homo sapiens
  misc_RNA (1)...(19): siRNA sense strand
aggcugacccagagaauua

SEQ ID NO: 2561182 - RNA, 19 nt, Homo sapiens
  misc_RNA (1)...(19): siRNA sense strand
agaaaguggaucagggcaa

SEQ ID NO: 2561183 - RNA, 19 nt, Homo sapiens
  misc_RNA (1)...(19): siRNA sense strand
aggaagcagucaaaggaaa

SEQ ID NO: 2561184 - RNA, 19 nt, Homo sapiens
  misc_RNA (1)...(19): siRNA sense strand
acaaugaagccaagacuaa

SEQ ID NO: 2561185 - RNA, 19 nt, Homo sapiens
  misc_RNA (1)...(19): siRNA sense strand
cgaaauacaaugaagccaa

SEQ ID NO: 2561186 - RNA, 19 nt, Homo sapiens
  misc_RNA (1)...(19): siRNA sense strand
aggaaaagguaaugaauga

SEQ ID NO: 2561187 - RNA, 19 nt, Homo sapiens
  misc_RNA (1)...(19): siRNA sense strand
ccuaagucuucguuaauaa

SEQ ID NO: 2561188 - RNA, 19 nt, Homo sapiens
  misc_RNA (1)...(19): siRNA sense strand
gagaaaggaaggagaaaau

SEQ ID NO: 2561189 - RNA, 19 nt, Homo sapiens
  misc_RNA (1)...(19): siRNA sense strand
caaauaaagaugagccuau

SEQ ID NO: 2561190 - RNA, 19 nt, Homo sapiens
  misc_RNA (1)...(19): siRNA sense strand
gguacaaacugaggagcaa

SEQ ID NO: 2561191 - RNA, 19 nt, Homo sapiens
  misc_RNA (1)...(19): siRNA sense strand
gaagaagauaauagaguca

SEQ ID NO: 2561192 - RNA, 19 nt, Homo sapiens
  misc_RNA (1)...(19): siRNA sense strand
gauuauugauggagucgaa

SEQ ID NO: 2561193 - RNA, 19 nt, Homo sapiens
  misc_RNA (1)...(19): siRNA sense strand
gguauacaauggugagaca

SEQ ID NO: 2561194 - RNA, 19 nt, Homo sapiens
  misc_RNA (1)...(19): siRNA sense strand
caaaacaaagcuagagaaa

SEQ ID NO: 2561195 - RNA, 19 nt, Homo sapiens
  misc_RNA (1)...(19): siRNA sense strand
acuacagacaacagagaaa

SEQ ID NO: 2561196 - RNA, 19 nt, Homo sapiens
  misc_RNA (1)...(19): siRNA sense strand
aauaugaggaggagaguuu

SEQ ID NO: 2561197 - RNA, 19 nt, Homo sapiens
  misc_RNA (1)...(19): siRNA sense strand
ccgaaaacccagagacaau

SEQ ID NO: 2561198 - RNA, 19 nt, Homo sapiens
  misc_RNA (1)...(19): siRNA sense strand
cugaagaauuugagacacu

SEQ ID NO: 2561199 - RNA, 19 nt, Homo sapiens
  misc_RNA (1)...(19): siRNA sense strand
cuggaaaggaagagauuca

SEQ ID NO: 2561200 - RNA, 19 nt, Homo sapiens
  misc_RNA (1)...(19): siRNA sense strand
cuucagagacgcuggaauu

SEQ ID NO: 2561201 - RNA, 19 nt, Homo sapiens
  misc_RNA (1)...(19): siRNA sense strand
ccuauuauacugugaggaa

SEQ ID NO: 2561202 - RNA, 19 nt, Homo sapiens
  misc_RNA (1)...(19): siRNA sense strand
uaaucaaggaggaggaaga

SEQ ID NO: 2561203 - RNA, 19 nt, Homo sapiens
  misc_RNA (1)...(19): siRNA sense strand
aaacaauuuucgagagcaa

SEQ ID NO: 2561204 - RNA, 19 nt, Homo sapiens
  misc_RNA (1)...(19): siRNA sense strand
gcuugauacuggagcugaa

SEQ ID NO: 2561205 - RNA, 19 nt, Homo sapiens
  misc_RNA (1)...(19): siRNA sense strand
caaauauacagcagaguga

SEQ ID NO: 2561206 - RNA, 19 nt, Homo sapiens
  misc_RNA (1)...(19): siRNA sense strand
cuauaaauugugagagcuu

SEQ ID NO: 2561207 - RNA, 19 nt, Homo sapiens
  misc_RNA (1)...(19): siRNA sense strand
ggacaguaauggugcagca

SEQ ID NO: 2561208 - RNA, 19 nt, Homo sapiens
  misc_RNA (1)...(19): siRNA sense strand
gcauaguuuagaaggacaa

SEQ ID NO: 2561209 - RNA, 19 nt, Homo sapiens
  misc_RNA (1)...(19): siRNA sense strand
ccaacaagaggaagugaau

SEQ ID NO: 2561210 - RNA, 19 nt, Homo sapiens
  misc_RNA (1)...(19): siRNA sense strand
guaaauaaguugaaugcgu

SEQ ID NO: 2561211 - RNA, 19 nt, Homo sapiens
  misc_RNA (1)...(19): siRNA sense strand
aagaaauaaucaaggagga

SEQ ID NO: 2561212 - RNA, 19 nt, Homo sapiens
  misc_RNA (1)...(19): siRNA sense strand
cuacaaaccaaaucaggaa

SEQ ID NO: 2561213 - RNA, 19 nt, Homo sapiens
  misc_RNA (1)...(19): siRNA sense strand
acauaaauaucguugccua

SEQ ID NO: 2561214 - RNA, 19 nt, Homo sapiens
  misc_RNA (1)...(19): siRNA sense strand
ccuccuauaucaugggcua

SEQ ID NO: 2561215 - RNA, 19 nt, Homo sapiens
  misc_RNA (1)...(19): siRNA sense strand
agacagugcuacaaaccaa

SEQ ID NO: 2561216 - RNA, 19 nt, Homo sapiens
  misc_RNA (1)...(19): siRNA sense strand
cauucauaacacugggaaa

SEQ ID NO: 2561217 - RNA, 19 nt, Homo sapiens
  misc_RNA (1)...(19): siRNA sense strand
ggaagcagucaaaggaaaa

SEQ ID NO: 2561218 - RNA, 19 nt, Homo sapiens
  misc_RNA (1)...(19): siRNA sense strand
gcugagucauagugccaaa

SEQ ID NO: 2561219 - RNA, 19 nt, Homo sapiens
  misc_RNA (1)...(19): siRNA sense strand
gguaaaucaccaucagcaa

SEQ ID NO: 2561220 - RNA, 19 nt, Homo sapiens
  misc_RNA (1)...(19): siRNA sense strand
guggaaagaucaaggguug

SEQ ID NO: 2561221 - RNA, 19 nt, Homo sapiens
  misc_RNA (1)...(19): siRNA sense strand
ugugagagcuuuaagguca

SEQ ID NO: 2561222 - RNA, 19 nt, Homo sapiens
  misc_RNA (1)...(19): siRNA sense strand
cgagaagaaggcaguuaua

SEQ ID NO: 2561223 - RNA, 19 nt, Homo sapiens
  misc_RNA (1)...(19): siRNA sense strand
acaugcaaguaguggguuu

SEQ ID NO: 2561224 - RNA, 19 nt, Homo sapiens
  misc_RNA (1)...(19): siRNA sense strand
guggagaaaggaaggagaa

SEQ ID NO: 2561225 - RNA, 19 nt, Homo sapiens
  misc_RNA (1)...(19): siRNA sense strand
ugaugaagaucuuacacaa

SEQ ID NO: 2561226 - RNA, 19 nt, Homo sapiens
  misc_RNA (1)...(19): siRNA sense strand
uaacagaauaugaggagga

SEQ ID NO: 2561227 - RNA, 19 nt, Homo sapiens
  misc_RNA (1)...(19): siRNA sense strand
cuauagagaaucacaggaa

SEQ ID NO: 2561228 - RNA, 19 nt, Homo sapiens
  misc_RNA (1)...(19): siRNA sense strand
cuaauggcuuauauggaaa

SEQ ID NO: 2561229 - RNA, 19 nt, Homo sapiens
  misc_RNA (1)...(19): siRNA sense strand
ggagugaggaguacgggaa

SEQ ID NO: 2561230 - RNA, 19 nt, Homo sapiens
  misc_RNA (1)...(19): siRNA sense strand
agagaaaacuuguugaaga

SEQ ID NO: 2561231 - RNA, 19 nt, Homo sapiens
  misc_RNA (1)...(19): siRNA sense strand
auaccuaagucuucguuaa

SEQ ID NO: 2561232 - RNA, 19 nt, Homo sapiens
  misc_RNA (1)...(19): siRNA sense strand
ggagaaugauaugggaaca

SEQ ID NO: 2561233 - RNA, 19 nt, Homo sapiens
  misc_RNA (1)...(19): siRNA sense strand
gacuaauuacacugagaua

SEQ ID NO: 2561234 - RNA, 19 nt, Homo sapiens
  misc_RNA (1)...(19): siRNA sense strand
cuucauaccaucaaggauu

SEQ ID NO: 2561235 - RNA, 19 nt, Homo sapiens
  misc_RNA (1)...(19): siRNA sense strand
uguugaaccuucugccaaa

SEQ ID NO: 2561236 - RNA, 19 nt, Homo sapiens
  misc_RNA (1)...(19): siRNA sense strand
aaggauuucuggaggauga

SEQ ID NO: 2561237 - RNA, 19 nt, Homo sapiens
  misc_RNA (1)...(19): siRNA sense strand
aaagggaaguuaagagcuu

SEQ ID NO: 2561238 - RNA, 19 nt, Homo sapiens
  misc_RNA (1)...(19): siRNA sense strand
ccuaugcaagugagaaaua

SEQ ID NO: 2561239 - RNA, 19 nt, Homo sapiens
  misc_RNA (1)...(19): siRNA sense strand
ggagaaaggaaggagaaaa

SEQ ID NO: 2561240 - RNA, 19 nt, Homo sapiens
  misc_RNA (1)...(19): siRNA sense strand
ggauaaaacaucauuggaa

SEQ ID NO: 2561241 - RNA, 19 nt, Homo sapiens
  misc_RNA (1)...(19): siRNA sense strand
uggauugggcuaauggaua

SEQ ID NO: 2561242 - RNA, 19 nt, Homo sapiens
  misc_RNA (1)...(19): siRNA sense strand
agaagauaauagagucaca

SEQ ID NO: 2561243 - RNA, 19 nt, Homo sapiens
  misc_RNA (1)...(19): siRNA sense strand
ucugacaagugaugaagaa

SEQ ID NO: 2561244 - RNA, 19 nt, Homo sapiens
  misc_RNA (1)...(19): siRNA sense strand
ugggauaguaagaagcaaa

SEQ ID NO: 2561245 - RNA, 19 nt, Homo sapiens
  misc_RNA (1)...(19): siRNA sense strand
augauguggucaagggaau

SEQ ID NO: 2561246 - RNA, 19 nt, Homo sapiens
  misc_RNA (1)...(19): siRNA sense strand
aguuauugacccagaauca

SEQ ID NO: 2561247 - RNA, 19 nt, Homo sapiens
  misc_RNA (1)...(19): siRNA sense strand
agauagaaacuuggagaga

SEQ ID NO: 2561248 - RNA, 19 nt, Homo sapiens
  misc_RNA (1)...(19): siRNA sense strand
uuguagugguggaugaaaa

SEQ ID NO: 2561249 - RNA, 19 nt, Homo sapiens
  misc_RNA (1)...(19): siRNA sense strand
cuucauuaauucggaacaa

SEQ ID NO: 2561250 - RNA, 19 nt, Homo sapiens
  misc_RNA (1)...(19): siRNA sense strand
ggaacaagauccacaggcu

SEQ ID NO: 2561251 - RNA, 19 nt, Homo sapiens
  misc_RNA (1)...(19): siRNA sense strand
augaaaaugauguggucaa

SEQ ID NO: 2561252 - RNA, 19 nt, Homo sapiens
  misc_RNA (1)...(19): siRNA sense strand
uaguggaagcagagguuca

SEQ ID NO: 2561253 - RNA, 19 nt, Homo sapiens
  misc_RNA (1)...(19): siRNA sense strand
cacauuacuuugagggugu

SEQ ID NO: 2561254 - RNA, 19 nt, Homo sapiens
  misc_RNA (1)...(19): siRNA sense strand
aagcagagguucaccgacu

SEQ ID NO: 2561255 - RNA, 19 nt, Homo sapiens
  misc_RNA (1)...(19): siRNA sense strand
ccuuuaugggauaguaaga

SEQ ID NO: 2561256 - RNA, 19 nt, Homo sapiens
  misc_RNA (1)...(19): siRNA sense strand
auaaaucagccuugguaca

SEQ ID NO: 2561257 - RNA, 19 nt, Homo sapiens
  misc_RNA (1)...(19): siRNA sense strand
cgucccugcaggugaagaa

SEQ ID NO: 2561258 - RNA, 19 nt, Homo sapiens
  misc_RNA (1)...(19): siRNA sense strand
ucaauauccugcaccgcua

SEQ ID NO: 2561259 - RNA, 19 nt, Homo sapiens
  misc_RNA (1)...(19): siRNA sense strand
gcagaaaagaccuacaaca

SEQ ID NO: 2561260 - RNA, 19 nt, Homo sapiens
  misc_RNA (1)...(19): siRNA sense strand
augcagaagaugugaagaa

SEQ ID NO: 2561261 - RNA, 19 nt, Homo sapiens
  misc_RNA (1)...(19): siRNA sense strand
gcaaggaggguaugggcua

SEQ ID NO: 2561262 - RNA, 19 nt, Homo sapiens
  misc_RNA (1)...(19): siRNA sense strand
cagaagagcucgcgggauc

SEQ ID NO: 2561263 - RNA, 19 nt, Homo sapiens
  misc_RNA (1)...(19): siRNA sense strand
cagcagauguugcaggaca

SEQ ID NO: 2561264 - RNA, 19 nt, Homo sapiens
  misc_RNA (1)...(19): siRNA sense strand
gagacgagguggagagccu

SEQ ID NO: 2561265 - RNA, 19 nt, Homo sapiens
  misc_RNA (1)...(19): siRNA sense strand
gugacauaucgguggagaa

SEQ ID NO: 2561266 - RNA, 19 nt, Homo sapiens
  misc_RNA (1)...(19): siRNA sense strand
gggcagacgucuuggaagc

SEQ ID NO: 2561267 - RNA, 19 nt, Homo sapiens
  misc_RNA (1)...(19): siRNA sense strand
cuuuacagccgaagcggaa

SEQ ID NO: 2561268 - RNA, 19 nt, Homo sapiens
  misc_RNA (1)...(19): siRNA sense strand
aggcugggaucuagcgaga

SEQ ID NO: 2561269 - RNA, 19 nt, Homo sapiens
  misc_RNA (1)...(19): siRNA sense strand
aagcagaagccgagaacac

SEQ ID NO: 2561270 - RNA, 19 nt, Homo sapiens
  misc_RNA (1)...(19): siRNA sense strand
aguaagaccaagauugaca

SEQ ID NO: 2561271 - RNA, 19 nt, Homo sapiens
  misc_RNA (1)...(19): siRNA sense strand
uggagaagcaguuggccau

SEQ ID NO: 2561272 - RNA, 19 nt, Homo sapiens
  misc_RNA (1)...(19): siRNA sense strand
gcggagaacaugauccaga

SEQ ID NO: 2561273 - RNA, 19 nt, Homo sapiens
  misc_RNA (1)...(19): siRNA sense strand
cgugcuaggcagaugaaca

SEQ ID NO: 2561274 - RNA, 19 nt, Homo sapiens
  misc_RNA (1)...(19): siRNA sense strand
ucuccaagcagcaagggaa

SEQ ID NO: 2561275 - RNA, 19 nt, Homo sapiens
  misc_RNA (1)...(19): siRNA sense strand
ggaugacacccaagggagu

SEQ ID NO: 2561276 - RNA, 19 nt, Homo sapiens
  misc_RNA (1)...(19): siRNA sense strand
gcuggaaagggcacgggaa

SEQ ID NO: 2561277 - RNA, 19 nt, Homo sapiens
  misc_RNA (1)...(19): siRNA sense strand
gggaccugaaguuggacaa

SEQ ID NO: 2561278 - RNA, 19 nt, Homo sapiens
  misc_RNA (1)...(19): siRNA sense strand
augaugaggaggaggucuu

SEQ ID NO: 2561279 - RNA, 19 nt, Homo sapiens
  misc_RNA (1)...(19): siRNA sense strand
gggaugaugaggaggaggu

SEQ ID NO: 2561280 - RNA, 19 nt, Homo sapiens
  misc_RNA (1)...(19): siRNA sense strand
gggcggagaacaugaucca

SEQ ID NO: 2561281 - RNA, 19 nt, Homo sapiens
  misc_RNA (1)...(19): siRNA sense strand
ccaagaacguacugcgccu

SEQ ID NO: 2561282 - RNA, 19 nt, Homo sapiens
  misc_RNA (1)...(19): siRNA sense strand
acgagaugcugguuggcga

SEQ ID NO: 2561283 - RNA, 19 nt, Homo sapiens
  misc_RNA (1)...(19): siRNA sense strand
ggagcagccucaaagcaga

SEQ ID NO: 2561284 - RNA, 19 nt, Homo sapiens
  misc_RNA (1)...(19): siRNA sense strand
gccauugagcugaagguga

SEQ ID NO: 2561285 - RNA, 19 nt, Homo sapiens
  misc_RNA (1)...(19): siRNA sense strand
gaaacuuggcgaaaggcaa

SEQ ID NO: 2561286 - RNA, 19 nt, Homo sapiens
  misc_RNA (1)...(19): siRNA sense strand
cugaaggaugggaggaaaa

SEQ ID NO: 2561287 - RNA, 19 nt, Homo sapiens
  misc_RNA (1)...(19): siRNA sense strand
guuuggaagugaucgggaa

SEQ ID NO: 2561288 - RNA, 19 nt, Homo sapiens
  misc_RNA (1)...(19): siRNA sense strand
cgaaaggcaaagaggaaag

SEQ ID NO: 2561289 - RNA, 19 nt, Homo sapiens
  misc_RNA (1)...(19): siRNA sense strand
cuaagagaaacuuggcgaa

SEQ ID NO: 2561290 - RNA, 19 nt, Homo sapiens
  misc_RNA (1)...(19): siRNA sense strand
uuuggaagugaucgggaaa

SEQ ID NO: 2561291 - RNA, 19 nt, Homo sapiens
  misc_RNA (1)...(19): siRNA sense strand
caguguaccuggagcggaa

SEQ ID NO: 2561292 - RNA, 19 nt, Homo sapiens
  misc_RNA (1)...(19): siRNA sense strand
gaacagagccugaaggaug

SEQ ID NO: 2561293 - RNA, 19 nt, Homo sapiens
  misc_RNA (1)...(19): siRNA sense strand
cuuuuaaucugcugagaaa

SEQ ID NO: 2561294 - RNA, 19 nt, Homo sapiens
  misc_RNA (1)...(19): siRNA sense strand
cagcaacagucgcaggaga

SEQ ID NO: 2561295 - RNA, 19 nt, Homo sapiens
  misc_RNA (1)...(19): siRNA sense strand
gcgaugaagaagggaagaa

SEQ ID NO: 2561296 - RNA, 19 nt, Homo sapiens
  misc_RNA (1)...(19): siRNA sense strand
gcauugagaaucuggagga

SEQ ID NO: 2561297 - RNA, 19 nt, Homo sapiens
  misc_RNA (1)...(19): siRNA sense strand
uugaaggauuugagguacu

SEQ ID NO: 2561298 - RNA, 19 nt, Homo sapiens
  misc_RNA (1)...(19): siRNA sense strand
acaauggcaucgaggucau

SEQ ID NO: 2561299 - RNA, 19 nt, Homo sapiens
  misc_RNA (1)...(19): siRNA sense strand
ucaucgagggccuggagaa

SEQ ID NO: 2561300 - RNA, 19 nt, Homo sapiens
  misc_RNA (1)...(19): siRNA sense strand
agaucgagggucugcagaa

SEQ ID NO: 2561301 - RNA, 19 nt, Homo sapiens
  misc_RNA (1)...(19): siRNA sense strand
uuuaaucugcugagaaaca

SEQ ID NO: 2561302 - RNA, 19 nt, Homo sapiens
  misc_RNA (1)...(19): siRNA sense strand
caguggaggacgugagaua

SEQ ID NO: 2561303 - RNA, 19 nt, Homo sapiens
  misc_RNA (1)...(19): siRNA sense strand
agaagaugcagcugggcua

SEQ ID NO: 2561304 - RNA, 19 nt, Homo sapiens
  misc_RNA (1)...(19): siRNA sense strand
aggagaagaugcuggacca

SEQ ID NO: 2561305 - RNA, 19 nt, Homo sapiens
  misc_RNA (1)...(19): siRNA sense strand
cgucagagguagcagcagu

SEQ ID NO: 2561306 - RNA, 19 nt, Homo sapiens
  misc_RNA (1)...(19): siRNA sense strand
ugauggagcuggagggccu

SEQ ID NO: 2561307 - RNA, 19 nt, Homo sapiens
  misc_RNA (1)...(19): siRNA sense strand
gggaagaggacgugguguc

SEQ ID NO: 2561308 - RNA, 19 nt, Homo sapiens
  misc_RNA (1)...(19): siRNA sense strand
agguguaugcggagaggau

SEQ ID NO: 2561309 - RNA, 19 nt, Homo sapiens
  misc_RNA (1)...(19): siRNA sense strand
gcaugggaagcuugaguau

SEQ ID NO: 2561310 - RNA, 19 nt, Homo sapiens
  misc_RNA (1)...(19): siRNA sense strand
cuucugagguccagggucu

SEQ ID NO: 2561311 - RNA, 19 nt, Homo sapiens
  misc_RNA (1)...(19): siRNA sense strand
aaauacaccuugaacgaca

SEQ ID NO: 2561312 - RNA, 19 nt, Homo sapiens
  misc_RNA (1)...(19): siRNA sense strand
ccagcgaccaagagaugaa

SEQ ID NO: 2561313 - RNA, 19 nt, Homo sapiens
  misc_RNA (1)...(19): siRNA sense strand
ggagacaaugaguguguga

SEQ ID NO: 2561314 - RNA, 19 nt, Homo sapiens
  misc_RNA (1)...(19): siRNA sense strand
uuaagcaccaaguggauaa

SEQ ID NO: 2561315 - RNA, 19 nt, Homo sapiens
  misc_RNA (1)...(19): siRNA sense strand
aggccaucccugagaucua

SEQ ID NO: 2561316 - RNA, 19 nt, Homo sapiens
  misc_RNA (1)...(19): siRNA sense strand
gccucgagguggugguuga

SEQ ID NO: 2561317 - RNA, 19 nt, Homo sapiens
  misc_RNA (1)...(19): siRNA sense strand
uggaauuuauccuugacaa

SEQ ID NO: 2561318 - RNA, 19 nt, Homo sapiens
  misc_RNA (1)...(19): siRNA sense strand
ggucuuugacuuugcaaca

SEQ ID NO: 2561319 - RNA, 19 nt, Homo sapiens
  misc_RNA (1)...(19): siRNA sense strand
uguacaggaggaagagcaa

SEQ ID NO: 2561320 - RNA, 19 nt, Homo sapiens
  misc_RNA (1)...(19): siRNA sense strand
gggacuauaagaagguuca

SEQ ID NO: 2561321 - RNA, 19 nt, Homo sapiens
  misc_RNA (1)...(19): siRNA sense strand
acaccaucucccaggcaaa

SEQ ID NO: 2561322 - RNA, 19 nt, Homo sapiens
  misc_RNA (1)...(19): siRNA sense strand
ggauuaagcaccaagugga

SEQ ID NO: 2561323 - RNA, 19 nt, Homo sapiens
  misc_RNA (1)...(19): siRNA sense strand
cuguggaugcccaggagua

SEQ ID NO: 2561324 - RNA, 19 nt, Homo sapiens
  misc_RNA (1)...(19): siRNA sense strand
uggagaaucuggagagcag

SEQ ID NO: 2561325 - RNA, 19 nt, Homo sapiens
  misc_RNA (1)...(19): siRNA sense strand
aggcaaaggagaagaugcu

SEQ ID NO: 2561326 - RNA, 19 nt, Homo sapiens
  misc_RNA (1)...(19): siRNA sense strand
ggagcagcagucagaacaa

SEQ ID NO: 2561327 - RNA, 19 nt, Homo sapiens
  misc_RNA (1)...(19): siRNA sense strand
gauuaagcaccaaguggau

SEQ ID NO: 2561328 - RNA, 19 nt, Homo sapiens
  misc_RNA (1)...(19): siRNA sense strand
gggugauagucaagggcag

SEQ ID NO: 2561329 - RNA, 19 nt, Homo sapiens
  misc_RNA (1)...(19): siRNA sense strand
ggucccagauggagcaacu

SEQ ID NO: 2561330 - RNA, 19 nt, Homo sapiens
  misc_RNA (1)...(19): siRNA sense strand
gguacaagcggauggugga

SEQ ID NO: 2561331 - RNA, 19 nt, Homo sapiens
  misc_RNA (1)...(19): siRNA sense strand
uggcagucaccauggaaga

SEQ ID NO: 2561332 - RNA, 19 nt, Homo sapiens
  misc_RNA (1)...(19): siRNA sense strand
uggaaagguacuaugcaga

SEQ ID NO: 2561333 - RNA, 19 nt, Homo sapiens
  misc_RNA (1)...(19): siRNA sense strand
ggagggucgugcugaggau

SEQ ID NO: 2561334 - RNA, 19 nt, Homo sapiens
  misc_RNA (1)...(19): siRNA sense strand
cuucagacccucagccaca

SEQ ID NO: 2561335 - RNA, 19 nt, Homo sapiens
  misc_RNA (1)...(19): siRNA sense strand
ucuacaaguacaucaacaa

SEQ ID NO: 2561336 - RNA, 19 nt, Homo sapiens
  misc_RNA (1)...(19): siRNA sense strand
ggauggcccaggagacaau

SEQ ID NO: 2561337 - RNA, 19 nt, Homo sapiens
  misc_RNA (1)...(19): siRNA sense strand
agacugugguggagaagcu

SEQ ID NO: 2561338 - RNA, 19 nt, Homo sapiens
  misc_RNA (1)...(19): siRNA sense strand
cgugaagguccuagacugu

SEQ ID NO: 2561339 - RNA, 19 nt, Homo sapiens
  misc_RNA (1)...(19): siRNA sense strand
ccagcagccucgugugcau

SEQ ID NO: 2561340 - RNA, 19 nt, Homo sapiens
  misc_RNA (1)...(19): siRNA sense strand
ggcccagagcaguggcuau

SEQ ID NO: 2561341 - RNA, 19 nt, Homo sapiens
  misc_RNA (1)...(19): siRNA sense strand
ggaauuuauccuugacaac

SEQ ID NO: 2561342 - RNA, 19 nt, Homo sapiens
  misc_RNA (1)...(19): siRNA sense strand
gcacguaucugcagcaccu

SEQ ID NO: 2561343 - RNA, 19 nt, Homo sapiens
  misc_RNA (1)...(19): siRNA sense strand
gggaagguauucagccaaa

SEQ ID NO: 2561344 - RNA, 19 nt, Homo sapiens
  misc_RNA (1)...(19): siRNA sense strand
acaucaaagcucugcagaa

SEQ ID NO: 2561345 - RNA, 19 nt, Homo sapiens
  misc_RNA (1)...(19): siRNA sense strand
augcacaacgagaggauuu

SEQ ID NO: 2561346 - RNA, 19 nt, Homo sapiens
  misc_RNA (1)...(19): siRNA sense strand
cugaagcagaagaggauca

SEQ ID NO: 2561347 - RNA, 19 nt, Homo sapiens
  misc_RNA (1)...(19): siRNA sense strand
agaggaucacccugggaua

SEQ ID NO: 2561348 - RNA, 19 nt, Homo sapiens
  misc_RNA (1)...(19): siRNA sense strand
ggguggaggaagcugacaa

SEQ ID NO: 2561349 - RNA, 19 nt, Homo sapiens
  misc_RNA (1)...(19): siRNA sense strand
gugcaggcccgaaagagaa

SEQ ID NO: 2561350 - RNA, 19 nt, Homo sapiens
  misc_RNA (1)...(19): siRNA sense strand
cgugcaggcccgaaagaga

SEQ ID NO: 2561351 - RNA, 19 nt, Homo sapiens
  misc_RNA (1)...(19): siRNA sense strand
uaucgagaaccgagugaga

SEQ ID NO: 2561352 - RNA, 19 nt, Homo sapiens
  misc_RNA (1)...(19): siRNA sense strand
gcgacuaugcacaacgaga

SEQ ID NO: 2561353 - RNA, 19 nt, Homo sapiens
  misc_RNA (1)...(19): siRNA sense strand
agaaguggguggaggaagc

SEQ ID NO: 2561354 - RNA, 19 nt, Homo sapiens
  misc_RNA (1)...(19): siRNA sense strand
gggaagguauucagccaaa

SEQ ID NO: 2561355 - RNA, 19 nt, Homo sapiens
  misc_RNA (1)...(19): siRNA sense strand
acaucaaagcucugcagaa

SEQ ID NO: 2561356 - RNA, 19 nt, Homo sapiens
  misc_RNA (1)...(19): siRNA sense strand
augcacaacgagaggauuu

SEQ ID NO: 2561357 - RNA, 19 nt, Homo sapiens
  misc_RNA (1)...(19): siRNA sense strand
cugaagcagaagaggauca

SEQ ID NO: 2561358 - RNA, 19 nt, Homo sapiens
  misc_RNA (1)...(19): siRNA sense strand
agaggaucacccugggaua

SEQ ID NO: 2561359 - RNA, 19 nt, Homo sapiens
  misc_RNA (1)...(19): siRNA sense strand
ggguggaggaagcugacaa

SEQ ID NO: 2561360 - RNA, 19 nt, Homo sapiens
  misc_RNA (1)...(19): siRNA sense strand
gugcaggcccgaaagagaa

SEQ ID NO: 2561361 - RNA, 19 nt, Homo sapiens
  misc_RNA (1)...(19): siRNA sense strand
cgugcaggcccgaaagaga

SEQ ID NO: 2561362 - RNA, 19 nt, Homo sapiens
  misc_RNA (1)...(19): siRNA sense strand
uaucgagaaccgagugaga

SEQ ID NO: 2561363 - RNA, 19 nt, Homo sapiens
  misc_RNA (1)...(19): siRNA sense strand
gcgacuaugcacaacgaga

SEQ ID NO: 2561364 - RNA, 19 nt, Homo sapiens
  misc_RNA (1)...(19): siRNA sense strand
agaaguggguggaggaagc

SEQ ID NO: 2561365 - RNA, 19 nt, Homo sapiens
  misc_RNA (1)...(19): siRNA sense strand
cuacgugccucuuuggcua

SEQ ID NO: 2561366 - RNA, 19 nt, Homo sapiens
  misc_RNA (1)...(19): siRNA sense strand
caaaaucgucgcaggggua

SEQ ID NO: 2561367 - RNA, 19 nt, Homo sapiens
  misc_RNA (1)...(19): siRNA sense strand
agaccaaggcugaugcaaa

SEQ ID NO: 2561368 - RNA, 19 nt, Homo sapiens
  misc_RNA (1)...(19): siRNA sense strand
ugacacagccacagaagaa

SEQ ID NO: 2561369 - RNA, 19 nt, Homo sapiens
  misc_RNA (1)...(19): siRNA sense strand
cuuuagaugaagagaguca

SEQ ID NO: 2561370 - RNA, 19 nt, Homo sapiens
  misc_RNA (1)...(19): siRNA sense strand
aacauaaagcaguggaaau

SEQ ID NO: 2561371 - RNA, 19 nt, Homo sapiens
  misc_RNA (1)...(19): siRNA sense strand
ccucagaaugcaacggauu

SEQ ID NO: 2561372 - RNA, 19 nt, Homo sapiens
  misc_RNA (1)...(19): siRNA sense strand
aaguauacagagaggauga

SEQ ID NO: 2561373 - RNA, 19 nt, Homo sapiens
  misc_RNA (1)...(19): siRNA sense strand
agaugaagagagucacaaa

SEQ ID NO: 2561374 - RNA, 19 nt, Homo sapiens
  misc_RNA (1)...(19): siRNA sense strand
agaagacaaacaagugaaa

SEQ ID NO: 2561375 - RNA, 19 nt, Homo sapiens
  misc_RNA (1)...(19): siRNA sense strand
cugcagaaccacaaauuau

SEQ ID NO: 2561376 - RNA, 19 nt, Homo sapiens
  misc_RNA (1)...(19): siRNA sense strand
cgguaaauucugauggagu

SEQ ID NO: 2561377 - RNA, 19 nt, Homo sapiens
  misc_RNA (1)...(19): siRNA sense strand
ggauuugggaugugagaac

SEQ ID NO: 2561378 - RNA, 19 nt, Homo sapiens
  misc_RNA (1)...(19): siRNA sense strand
aaggacaagaaguugaaua

SEQ ID NO: 2561379 - RNA, 19 nt, Homo sapiens
  misc_RNA (1)...(19): siRNA sense strand
caaccugggucuuuggaca

SEQ ID NO: 2561380 - RNA, 19 nt, Homo sapiens
  misc_RNA (1)...(19): siRNA sense strand
caagcuucguaaugaguau

SEQ ID NO: 2561381 - RNA, 19 nt, Homo sapiens
  misc_RNA (1)...(19): siRNA sense strand
caguguaugguuuggauuu

SEQ ID NO: 2561382 - RNA, 19 nt, Homo sapiens
  misc_RNA (1)...(19): siRNA sense strand
ccagagaaugccaagugaa

SEQ ID NO: 2561383 - RNA, 19 nt, Homo sapiens
  misc_RNA (1)...(19): siRNA sense strand
acuauaaagaucugggacu

SEQ ID NO: 2561384 - RNA, 19 nt, Homo sapiens
  misc_RNA (1)...(19): siRNA sense strand
cucgaauacaauaagguua

SEQ ID NO: 2561385 - RNA, 19 nt, Homo sapiens
  misc_RNA (1)...(19): siRNA sense strand
cagcagauacuaagaucca

SEQ ID NO: 2561386 - RNA, 19 nt, Homo sapiens
  misc_RNA (1)...(19): siRNA sense strand
aagacaaacaagugaaaug

SEQ ID NO: 2561387 - RNA, 19 nt, Homo sapiens
  misc_RNA (1)...(19): siRNA sense strand
auacagagaggaugacaca

SEQ ID NO: 2561388 - RNA, 19 nt, Homo sapiens
  misc_RNA (1)...(19): siRNA sense strand
gguaaauucugauggagug

SEQ ID NO: 2561389 - RNA, 19 nt, Homo sapiens
  misc_RNA (1)...(19): siRNA sense strand
caagugaaaugcugggauc

SEQ ID NO: 2561390 - RNA, 19 nt, Homo sapiens
  misc_RNA (1)...(19): siRNA sense strand
ccagauaacauaaagcagu

SEQ ID NO: 2561391 - RNA, 19 nt, Homo sapiens
  misc_RNA (1)...(19): siRNA sense strand
caucuuugggacuggagaa

SEQ ID NO: 2561392 - RNA, 19 nt, Homo sapiens
  misc_RNA (1)...(19): siRNA sense strand
aagagagucacaaacgaaa

SEQ ID NO: 2561393 - RNA, 19 nt, Homo sapiens
  misc_RNA (1)...(19): siRNA sense strand
gggaucucgaauacaauaa

SEQ ID NO: 2561394 - RNA, 19 nt, Homo sapiens
  misc_RNA (1)...(19): siRNA sense strand
ggaucugguggcuggaaaa

SEQ ID NO: 2561395 - RNA, 19 nt, Homo sapiens
  misc_RNA (1)...(19): siRNA sense strand
acauguuuguagcugauaa

SEQ ID NO: 2561396 - RNA, 19 nt, Homo sapiens
  misc_RNA (1)...(19): siRNA sense strand
gcagauacuaagauccaga

SEQ ID NO: 2561397 - RNA, 19 nt, Homo sapiens
  misc_RNA (1)...(19): siRNA sense strand
aguccuuagcgguggcauu

SEQ ID NO: 2561398 - RNA, 19 nt, Homo sapiens
  misc_RNA (1)...(19): siRNA sense strand
aggacaagaaguugaauac

SEQ ID NO: 2561399 - RNA, 19 nt, Homo sapiens
  misc_RNA (1)...(19): siRNA sense strand
ugugagaacuaaagccagu

SEQ ID NO: 2561400 - RNA, 19 nt, Homo sapiens
  misc_RNA (1)...(19): siRNA sense strand
gcuacaauuuucagagagu

SEQ ID NO: 2561401 - RNA, 19 nt, Homo sapiens
  misc_RNA (1)...(19): siRNA sense strand
cagccuacagcgaugaauu

SEQ ID NO: 2561402 - RNA, 19 nt, Homo sapiens
  misc_RNA (1)...(19): siRNA sense strand
cgaccaaacagcaggacca

SEQ ID NO: 2561403 - RNA, 19 nt, Homo sapiens
  misc_RNA (1)...(19): siRNA sense strand
uggcaggaagagugaggaa

SEQ ID NO: 2561404 - RNA, 19 nt, Homo sapiens
  misc_RNA (1)...(19): siRNA sense strand
ggguuguauuguuagaaga

SEQ ID NO: 2561405 - RNA, 19 nt, Homo sapiens
  misc_RNA (1)...(19): siRNA sense strand
uugaaggaggccagaaauu

SEQ ID NO: 2561406 - RNA, 19 nt, Homo sapiens
  misc_RNA (1)...(19): siRNA sense strand
ggagagagaugccuggguu

SEQ ID NO: 2561407 - RNA, 19 nt, Homo sapiens
  misc_RNA (1)...(19): siRNA sense strand
cuagagaaggacaagaaga

SEQ ID NO: 2561408 - RNA, 19 nt, Homo sapiens
  misc_RNA (1)...(19): siRNA sense strand
gcaauucacuugagaggcu

SEQ ID NO: 2561409 - RNA, 19 nt, Homo sapiens
  misc_RNA (1)...(19): siRNA sense strand
uguuaggaaucgccaggaa

SEQ ID NO: 2561410 - RNA, 19 nt, Homo sapiens
  misc_RNA (1)...(19): siRNA sense strand
gcaggggcauagaaggaaa

SEQ ID NO: 2561411 - RNA, 19 nt, Homo sapiens
  misc_RNA (1)...(19): siRNA sense strand
gguuguauuguuagaagau

SEQ ID NO: 2561412 - RNA, 19 nt, Homo sapiens
  misc_RNA (1)...(19): siRNA sense strand
ccaugaaagacacugaaaa

SEQ ID NO: 2561413 - RNA, 19 nt, Homo sapiens
  misc_RNA (1)...(19): siRNA sense strand
ugaaucuagagaaggacaa

SEQ ID NO: 2561414 - RNA, 19 nt, Homo sapiens
  misc_RNA (1)...(19): siRNA sense strand
agagaauuccagugaugau

SEQ ID NO: 2561415 - RNA, 19 nt, Homo sapiens
  misc_RNA (1)...(19): siRNA sense strand
uggaaagugaggaaguuca

SEQ ID NO: 2561416 - RNA, 19 nt, Homo sapiens
  misc_RNA (1)...(19): siRNA sense strand
agacagacacggagggaga

SEQ ID NO: 2561417 - RNA, 19 nt, Homo sapiens
  misc_RNA (1)...(19): siRNA sense strand
aauuggagacugaggagaa

SEQ ID NO: 2561418 - RNA, 19 nt, Homo sapiens
  misc_RNA (1)...(19): siRNA sense strand
ggccagagacacugcggaa

SEQ ID NO: 2561419 - RNA, 19 nt, Homo sapiens
  misc_RNA (1)...(19): siRNA sense strand
aagccaaagcgcaggguca

SEQ ID NO: 2561420 - RNA, 19 nt, Homo sapiens
  misc_RNA (1)...(19): siRNA sense strand
uggaccaccuggaggaaaa

SEQ ID NO: 2561421 - RNA, 19 nt, Homo sapiens
  misc_RNA (1)...(19): siRNA sense strand
gagaggacacggaggagga

SEQ ID NO: 2561422 - RNA, 19 nt, Homo sapiens
  misc_RNA (1)...(19): siRNA sense strand
ucaccuugcuggauggaga

SEQ ID NO: 2561423 - RNA, 19 nt, Homo sapiens
  misc_RNA (1)...(19): siRNA sense strand
caugaggaccagacagaca

SEQ ID NO: 2561424 - RNA, 19 nt, Homo sapiens
  misc_RNA (1)...(19): siRNA sense strand
gugaguggcaccugcgaau

SEQ ID NO: 2561425 - RNA, 19 nt, Homo sapiens
  misc_RNA (1)...(19): siRNA sense strand
gcauugagaagguggugga

SEQ ID NO: 2561426 - RNA, 19 nt, Homo sapiens
  misc_RNA (1)...(19): siRNA sense strand
uggagacugaggagaacaa

SEQ ID NO: 2561427 - RNA, 19 nt, Homo sapiens
  misc_RNA (1)...(19): siRNA sense strand
aggaggaucaugaggacca

SEQ ID NO: 2561428 - RNA, 19 nt, Homo sapiens
  misc_RNA (1)...(19): siRNA sense strand
cagaagaccuacaccagca

SEQ ID NO: 2561429 - RNA, 19 nt, Homo sapiens
  misc_RNA (1)...(19): siRNA sense strand
cugacaacgugguggacac

SEQ ID NO: 2561430 - RNA, 19 nt, Homo sapiens
  misc_RNA (1)...(19): siRNA sense strand
gcgagaagccaaagcgcag

SEQ ID NO: 2561431 - RNA, 19 nt, Homo sapiens
  misc_RNA (1)...(19): siRNA sense strand
cggcagaacaacucagcua

SEQ ID NO: 2561432 - RNA, 19 nt, Homo sapiens
  misc_RNA (1)...(19): siRNA sense strand
uggaugaggacguggguga

SEQ ID NO: 2561433 - RNA, 19 nt, Homo sapiens
  misc_RNA (1)...(19): siRNA sense strand
uggacaagguggugcagau

SEQ ID NO: 2561434 - RNA, 19 nt, Homo sapiens
  misc_RNA (1)...(19): siRNA sense strand
agaucagggaggaggaaga

SEQ ID NO: 2561435 - RNA, 19 nt, Homo sapiens
  misc_RNA (1)...(19): siRNA sense strand
ggcaagagcuucuggccuu

SEQ ID NO: 2561436 - RNA, 19 nt, Homo sapiens
  misc_RNA (1)...(19): siRNA sense strand
gggaggaggaagaugagau

SEQ ID NO: 2561437 - RNA, 19 nt, Homo sapiens
  misc_RNA (1)...(19): siRNA sense strand
ucaccagccaggagagcaa

SEQ ID NO: 2561438 - RNA, 19 nt, Homo sapiens
  misc_RNA (1)...(19): siRNA sense strand
ccuccagcaccgagaguau

SEQ ID NO: 2561439 - RNA, 19 nt, Homo sapiens
  misc_RNA (1)...(19): siRNA sense strand
gcaaaguugugcuggguac

SEQ ID NO: 2561440 - RNA, 19 nt, Homo sapiens
  misc_RNA (1)...(19): siRNA sense strand
agucaaggacagacacaau

SEQ ID NO: 2561441 - RNA, 19 nt, Homo sapiens
  misc_RNA (1)...(19): siRNA sense strand
cagaaaacacagaggcuga

SEQ ID NO: 2561442 - RNA, 19 nt, Homo sapiens
  misc_RNA (1)...(19): siRNA sense strand
aaguggagaaugaggauga

SEQ ID NO: 2561443 - RNA, 19 nt, Homo sapiens
  misc_RNA (1)...(19): siRNA sense strand
aggagguguuggagaaagu

SEQ ID NO: 2561444 - RNA, 19 nt, Homo sapiens
  misc_RNA (1)...(19): siRNA sense strand
agccaaaggagcaagaaga

SEQ ID NO: 2561445 - RNA, 19 nt, Homo sapiens
  misc_RNA (1)...(19): siRNA sense strand
caccgagaguauugauaau

SEQ ID NO: 2561446 - RNA, 19 nt, Homo sapiens
  misc_RNA (1)...(19): siRNA sense strand
auucgaaaccucaaagaga

SEQ ID NO: 2561447 - RNA, 19 nt, Homo sapiens
  misc_RNA (1)...(19): siRNA sense strand
gcucggaaacacauggaca

SEQ ID NO: 2561448 - RNA, 19 nt, Homo sapiens
  misc_RNA (1)...(19): siRNA sense strand
aggcacagccaaaggagca

SEQ ID NO: 2561449 - RNA, 19 nt, Homo sapiens
  misc_RNA (1)...(19): siRNA sense strand
agaaugaggaugaggagcu

SEQ ID NO: 2561450 - RNA, 19 nt, Homo sapiens
  misc_RNA (1)...(19): siRNA sense strand
ccauccaucaggugaagaa

SEQ ID NO: 2561451 - RNA, 19 nt, Homo sapiens
  misc_RNA (1)...(19): siRNA sense strand
cgacagccuucaaacgaga

SEQ ID NO: 2561452 - RNA, 19 nt, Homo sapiens
  misc_RNA (1)...(19): siRNA sense strand
aggacagacacaaugggaa

SEQ ID NO: 2561453 - RNA, 19 nt, Homo sapiens
  misc_RNA (1)...(19): siRNA sense strand
aggccuggucgguggauga

SEQ ID NO: 2561454 - RNA, 19 nt, Homo sapiens
  misc_RNA (1)...(19): siRNA sense strand
cccuuuggaucaagccaua

SEQ ID NO: 2561455 - RNA, 19 nt, Homo sapiens
  misc_RNA (1)...(19): siRNA sense strand
uggugcagaucguggagau

SEQ ID NO: 2561456 - RNA, 19 nt, Homo sapiens
  misc_RNA (1)...(19): siRNA sense strand
gggaagaaggagacagaaa

SEQ ID NO: 2561457 - RNA, 19 nt, Homo sapiens
  misc_RNA (1)...(19): siRNA sense strand
gcccagugguugagggaaa

SEQ ID NO: 2561458 - RNA, 19 nt, Homo sapiens
  misc_RNA (1)...(19): siRNA sense strand
caugauaagagaagaacaa

SEQ ID NO: 2561459 - RNA, 19 nt, Homo sapiens
  misc_RNA (1)...(19): siRNA sense strand
cuucaguaauggauggaaa

SEQ ID NO: 2561460 - RNA, 19 nt, Homo sapiens
  misc_RNA (1)...(19): siRNA sense strand
cugaaagcucacagggaaa

SEQ ID NO: 2561461 - RNA, 19 nt, Homo sapiens
  misc_RNA (1)...(19): siRNA sense strand
augcaauggaagaggcaaa

SEQ ID NO: 2561462 - RNA, 19 nt, Homo sapiens
  misc_RNA (1)...(19): siRNA sense strand
ccguauuagcuaaggaaga

SEQ ID NO: 2561463 - RNA, 19 nt, Homo sapiens
  misc_RNA (1)...(19): siRNA sense strand
uggaagauuacuugacaaa

SEQ ID NO: 2561464 - RNA, 19 nt, Homo sapiens
  misc_RNA (1)...(19): siRNA sense strand
uggcaaaugcaauggaaga

SEQ ID NO: 2561465 - RNA, 19 nt, Homo sapiens
  misc_RNA (1)...(19): siRNA sense strand
guauaaaguaccaugaaga

SEQ ID NO: 2561466 - RNA, 19 nt, Homo sapiens
  misc_RNA (1)...(19): siRNA sense strand
uguuaaugccaaaggauau

SEQ ID NO: 2561467 - RNA, 19 nt, Homo sapiens
  misc_RNA (1)...(19): siRNA sense strand
cuugguaaucaguggauaa

SEQ ID NO: 2561468 - RNA, 19 nt, Homo sapiens
  misc_RNA (1)...(19): siRNA sense strand
ccagaagaguauugaugau

SEQ ID NO: 2561469 - RNA, 19 nt, Homo sapiens
  misc_RNA (1)...(19): siRNA sense strand
uggcaaguuaagaggaaau

SEQ ID NO: 2561470 - RNA, 19 nt, Homo sapiens
  misc_RNA (1)...(19): siRNA sense strand
aagaauucauccagaaaca

SEQ ID NO: 2561471 - RNA, 19 nt, Homo sapiens
  misc_RNA (1)...(19): siRNA sense strand
gggaggggcuauagaagaa

SEQ ID NO: 2561472 - RNA, 19 nt, Homo sapiens
  misc_RNA (1)...(19): siRNA sense strand
gaagaaaacaacuggaaga

SEQ ID NO: 2561473 - RNA, 19 nt, Homo sapiens
  misc_RNA (1)...(19): siRNA sense strand
uggaagaggcaaaugaaga

SEQ ID NO: 2561474 - RNA, 19 nt, Homo sapiens
  misc_RNA (1)...(19): siRNA sense strand
agggagaggagguagacua

SEQ ID NO: 2561475 - RNA, 19 nt, Homo sapiens
  misc_RNA (1)...(19): siRNA sense strand
gaauacaccaagaggacuu

SEQ ID NO: 2561476 - RNA, 19 nt, Homo sapiens
  misc_RNA (1)...(19): siRNA sense strand
aggaaaugcucuacaggca

SEQ ID NO: 2561477 - RNA, 19 nt, Homo sapiens
  misc_RNA (1)...(19): siRNA sense strand
gcugcugacaugaguaaua

SEQ ID NO: 2561478 - RNA, 19 nt, Homo sapiens
  misc_RNA (1)...(19): siRNA sense strand
caacaaggagugaggaucu

SEQ ID NO: 2561479 - RNA, 19 nt, Homo sapiens
  misc_RNA (1)...(19): siRNA sense strand
cuuccaaagucucaaacaa

SEQ ID NO: 2561480 - RNA, 19 nt, Homo sapiens
  misc_RNA (1)...(19): siRNA sense strand
ggauccagugagugacaaa

SEQ ID NO: 2561481 - RNA, 19 nt, Homo sapiens
  misc_RNA (1)...(19): siRNA sense strand
cugaggaggaacugaagaa

SEQ ID NO: 2561482 - RNA, 19 nt, Homo sapiens
  misc_RNA (1)...(19): siRNA sense strand
cuacagugcuuuaggguug

SEQ ID NO: 2561483 - RNA, 19 nt, Homo sapiens
  misc_RNA (1)...(19): siRNA sense strand
gguuaauagugaaagauuc

SEQ ID NO: 2561484 - RNA, 19 nt, Homo sapiens
  misc_RNA (1)...(19): siRNA sense strand
cgaaauauggaauccgaau

SEQ ID NO: 2561485 - RNA, 19 nt, Homo sapiens
  misc_RNA (1)...(19): siRNA sense strand
agaagaauucauccagaaa

SEQ ID NO: 2561486 - RNA, 19 nt, Homo sapiens
  misc_RNA (1)...(19): siRNA sense strand
gaguauugaugauguggau

SEQ ID NO: 2561487 - RNA, 19 nt, Homo sapiens
  misc_RNA (1)...(19): siRNA sense strand
gcagauagcaucagcagca

SEQ ID NO: 2561488 - RNA, 19 nt, Homo sapiens
  misc_RNA (1)...(19): siRNA sense strand
ugggaaagcgugacaguga

SEQ ID NO: 2561489 - RNA, 19 nt, Homo sapiens
  misc_RNA (1)...(19): siRNA sense strand
auguuaaugccaaaggaua

SEQ ID NO: 2561490 - RNA, 19 nt, Homo sapiens
  misc_RNA (1)...(19): siRNA sense strand
ggaaaugcucuacaggcaa

SEQ ID NO: 2561491 - RNA, 19 nt, Homo sapiens
  misc_RNA (1)...(19): siRNA sense strand
agaaggagacagaaacgaa

SEQ ID NO: 2561492 - RNA, 19 nt, Homo sapiens
  misc_RNA (1)...(19): siRNA sense strand
cagaaacgaaauauggaau

SEQ ID NO: 2561493 - RNA, 19 nt, Homo sapiens
  misc_RNA (1)...(19): siRNA sense strand
ugauaaucuuucaaggaca

SEQ ID NO: 2561494 - RNA, 19 nt, Homo sapiens
  misc_RNA (1)...(19): siRNA sense strand
gaaaggaauaggaaagcca

SEQ ID NO: 2561495 - RNA, 19 nt, Homo sapiens
  misc_RNA (1)...(19): siRNA sense strand
gaggaggaacugaagaaga

SEQ ID NO: 2561496 - RNA, 19 nt, Homo sapiens
  misc_RNA (1)...(19): siRNA sense strand
cagcccaugaguugagaua

SEQ ID NO: 2561497 - RNA, 19 nt, Homo sapiens
  misc_RNA (1)...(19): siRNA sense strand
acuagaagacacacguuua

SEQ ID NO: 2561498 - RNA, 19 nt, Homo sapiens
  misc_RNA (1)...(19): siRNA sense strand
cugaaaacaugauaagaga

SEQ ID NO: 2561499 - RNA, 19 nt, Homo sapiens
  misc_RNA (1)...(19): siRNA sense strand
acugaaaggaauaggaaag

SEQ ID NO: 2561500 - RNA, 19 nt, Homo sapiens
  misc_RNA (1)...(19): siRNA sense strand
cgaaggaaaccuaguaacu

SEQ ID NO: 2561501 - RNA, 19 nt, Homo sapiens
  misc_RNA (1)...(19): siRNA sense strand
agaacaauuccuugguaga

SEQ ID NO: 2561502 - RNA, 19 nt, Homo sapiens
  misc_RNA (1)...(19): siRNA sense strand
gaaaagaucuggaggacac

SEQ ID NO: 2561503 - RNA, 19 nt, Homo sapiens
  misc_RNA (1)...(19): siRNA sense strand
aagagaaugcuuuagcuaa

SEQ ID NO: 2561504 - RNA, 19 nt, Homo sapiens
  misc_RNA (1)...(19): siRNA sense strand
gcccaugaguugagauauc

SEQ ID NO: 2561505 - RNA, 19 nt, Homo sapiens
  misc_RNA (1)...(19): siRNA sense strand
ccaaugaugaaguacacaa

SEQ ID NO: 2561506 - RNA, 19 nt, Homo sapiens
  misc_RNA (1)...(19): siRNA sense strand
gagcugaggaggaacugaa

SEQ ID NO: 2561507 - RNA, 19 nt, Homo sapiens
  misc_RNA (1)...(19): siRNA sense strand
aagcacaaguucuggaagu

SEQ ID NO: 2561508 - RNA, 19 nt, Homo sapiens
  misc_RNA (1)...(19): siRNA sense strand
ugaauuaacacauggggaa

SEQ ID NO: 2561509 - RNA, 19 nt, Homo sapiens
  misc_RNA (1)...(19): siRNA sense strand
cuggaagauuacuugacaa

SEQ ID NO: 2561510 - RNA, 19 nt, Homo sapiens
  misc_RNA (1)...(19): siRNA sense strand
cggcggaggaaaugcucua

SEQ ID NO: 2561511 - RNA, 19 nt, Homo sapiens
  misc_RNA (1)...(19): siRNA sense strand
auggaaaggacuacugcaa

SEQ ID NO: 2561512 - RNA, 19 nt, Homo sapiens
  misc_RNA (1)...(19): siRNA sense strand
aauggcaaguuaagaggaa

SEQ ID NO: 2561513 - RNA, 19 nt, Homo sapiens
  misc_RNA (1)...(19): siRNA sense strand
aggagacagaaacgaaaua

SEQ ID NO: 2561514 - RNA, 19 nt, Homo sapiens
  misc_RNA (1)...(19): siRNA sense strand
ccugaaacgcccagugguu

SEQ ID NO: 2561515 - RNA, 19 nt, Homo sapiens
  misc_RNA (1)...(19): siRNA sense strand
gcugaagaauggaaggaaa

SEQ ID NO: 2561516 - RNA, 19 nt, Homo sapiens
  misc_RNA (1)...(19): siRNA sense strand
cugaagaauggaaggaaaa

SEQ ID NO: 2561517 - RNA, 19 nt, Homo sapiens
  misc_RNA (1)...(19): siRNA sense strand
ccgcuguacaagaaaauaa

SEQ ID NO: 2561518 - RNA, 19 nt, Homo sapiens
  misc_RNA (1)...(19): siRNA sense strand
cugaagaaugggaggaaaa

SEQ ID NO: 2561519 - RNA, 19 nt, Homo sapiens
  misc_RNA (1)...(19): siRNA sense strand
cugucugaccugugauaaa

SEQ ID NO: 2561520 - RNA, 19 nt, Homo sapiens
  misc_RNA (1)...(19): siRNA sense strand
cagcaugaugguagcagaa

SEQ ID NO: 2561521 - RNA, 19 nt, Homo sapiens
  misc_RNA (1)...(19): siRNA sense strand
aguuagacuuggaaugcau

SEQ ID NO: 2561522 - RNA, 19 nt, Homo sapiens
  misc_RNA (1)...(19): siRNA sense strand
aagccaaacaggcccgaaa

SEQ ID NO: 2561523 - RNA, 19 nt, Homo sapiens
  misc_RNA (1)...(19): siRNA sense strand
cuguguagccacugguuau

SEQ ID NO: 2561524 - RNA, 19 nt, Homo sapiens
  misc_RNA (1)...(19): siRNA sense strand
cuugcaagcacgacagaca

SEQ ID NO: 2561525 - RNA, 19 nt, Homo sapiens
  misc_RNA (1)...(19): siRNA sense strand
aggacaaggaaacagguau

SEQ ID NO: 2561526 - RNA, 19 nt, Homo sapiens
  misc_RNA (1)...(19): siRNA sense strand
gggcacgggaagcuggaau

SEQ ID NO: 2561527 - RNA, 19 nt, Homo sapiens
  misc_RNA (1)...(19): siRNA sense strand
auuugaaaguggacaggua

SEQ ID NO: 2561528 - RNA, 19 nt, Homo sapiens
  misc_RNA (1)...(19): siRNA sense strand
accgagaaguccagagaga

SEQ ID NO: 2561529 - RNA, 19 nt, Homo sapiens
  misc_RNA (1)...(19): siRNA sense strand
gacuaaaagugguggagau

SEQ ID NO: 2561530 - RNA, 19 nt, Homo sapiens
  misc_RNA (1)...(19): siRNA sense strand
ucgccgagccugagugcaa

SEQ ID NO: 2561531 - RNA, 19 nt, Homo sapiens
  misc_RNA (1)...(19): siRNA sense strand
gcguggaauuggaaggacu

SEQ ID NO: 2561532 - RNA, 19 nt, Homo sapiens
  misc_RNA (1)...(19): siRNA sense strand
acgaggagcugaagcggau

SEQ ID NO: 2561533 - RNA, 19 nt, Homo sapiens
  misc_RNA (1)...(19): siRNA sense strand
uggcaagacaugcagaaau

SEQ ID NO: 2561534 - RNA, 19 nt, Homo sapiens
  misc_RNA (1)...(19): siRNA sense strand
ucaaagagaaaauggagaa

SEQ ID NO: 2561535 - RNA, 19 nt, Homo sapiens
  misc_RNA (1)...(19): siRNA sense strand
ccggagggaaggagcauuu

SEQ ID NO: 2561536 - RNA, 19 nt, Homo sapiens
  misc_RNA (1)...(19): siRNA sense strand
ucaaugaacugaaagcuga

SEQ ID NO: 2561537 - RNA, 19 nt, Homo sapiens
  misc_RNA (1)...(19): siRNA sense strand
gagagaccacugagggaca

SEQ ID NO: 2561538 - RNA, 19 nt, Homo sapiens
  misc_RNA (1)...(19): siRNA sense strand
aagaauuaauccagagcgu

SEQ ID NO: 2561539 - RNA, 19 nt, Homo sapiens
  misc_RNA (1)...(19): siRNA sense strand
agugguggagauugagaaa

SEQ ID NO: 2561540 - RNA, 19 nt, Homo sapiens
  misc_RNA (1)...(19): siRNA sense strand
ccugauggguucaagcaga

SEQ ID NO: 2561541 - RNA, 19 nt, Homo sapiens
  misc_RNA (1)...(19): siRNA sense strand
uuacagaagaagacugaca

SEQ ID NO: 2561542 - RNA, 19 nt, Homo sapiens
  misc_RNA (1)...(19): siRNA sense strand
cguggaauuggaaggacua

SEQ ID NO: 2561543 - RNA, 19 nt, Homo sapiens
  misc_RNA (1)...(19): siRNA sense strand
uugagaaaugcaagaguga

SEQ ID NO: 2561544 - RNA, 19 nt, Homo sapiens
  misc_RNA (1)...(19): siRNA sense strand
acauuaagaagaugaggga

SEQ ID NO: 2561545 - RNA, 19 nt, Homo sapiens
  misc_RNA (1)...(19): siRNA sense strand
cuccagagagagaagaauu

SEQ ID NO: 2561546 - RNA, 19 nt, Homo sapiens
  misc_RNA (1)...(19): siRNA sense strand
gccagaagcagcaggacca

SEQ ID NO: 2561547 - RNA, 19 nt, Homo sapiens
  misc_RNA (1)...(19): siRNA sense strand
cagagagagaagaauuaau

SEQ ID NO: 2561548 - RNA, 19 nt, Homo sapiens
  misc_RNA (1)...(19): siRNA sense strand
ccuagagaaacgcguggaa

SEQ ID NO: 2561549 - RNA, 19 nt, Homo sapiens
  misc_RNA (1)...(19): siRNA sense strand
ccaaugagaugcugagcug

SEQ ID NO: 2561550 - RNA, 19 nt, Homo sapiens
  misc_RNA (1)...(19): siRNA sense strand
gguucaagcagauccgaca

SEQ ID NO: 2561551 - RNA, 19 nt, Homo sapiens
  misc_RNA (1)...(19): siRNA sense strand
ugaaggagacugugccuga

SEQ ID NO: 2561552 - RNA, 19 nt, Homo sapiens
  misc_RNA (1)...(19): siRNA sense strand
cugcagccacuuugggaau

SEQ ID NO: 2561553 - RNA, 19 nt, Homo sapiens
  misc_RNA (1)...(19): siRNA sense strand
agggaaggagcauuugaaa

SEQ ID NO: 2561554 - RNA, 19 nt, Homo sapiens
  misc_RNA (1)...(19): siRNA sense strand
gggaaggagcauuugaaag

SEQ ID NO: 2561555 - RNA, 19 nt, Homo sapiens
  misc_RNA (1)...(19): siRNA sense strand
caaugaacugaaagcugaa

SEQ ID NO: 2561556 - RNA, 19 nt, Homo sapiens
  misc_RNA (1)...(19): siRNA sense strand
agagaagaauuaauccaga

SEQ ID NO: 2561557 - RNA, 19 nt, Homo sapiens
  misc_RNA (1)...(19): siRNA sense strand
cuuggcuguccuagagaaa

SEQ ID NO: 2561558 - RNA, 19 nt, Homo sapiens
  misc_RNA (1)...(19): siRNA sense strand
aagagugacauuaagaaga

SEQ ID NO: 2561559 - RNA, 19 nt, Homo sapiens
  misc_RNA (1)...(19): siRNA sense strand
aagcagauccgacagggaa

SEQ ID NO: 2561560 - RNA, 19 nt, Homo sapiens
  misc_RNA (1)...(19): siRNA sense strand
aguuacagaagaagacuga

SEQ ID NO: 2561561 - RNA, 19 nt, Homo sapiens
  misc_RNA (1)...(19): siRNA sense strand
gguuaggcugugaggaaau

SEQ ID NO: 2561562 - RNA, 19 nt, Homo sapiens
  misc_RNA (1)...(19): siRNA sense strand
cggccuuaguuaugccaaa

SEQ ID NO: 2561563 - RNA, 19 nt, Homo sapiens
  misc_RNA (1)...(19): siRNA sense strand
cuguaagaguucagaccuu

SEQ ID NO: 2561564 - RNA, 19 nt, Homo sapiens
  misc_RNA (1)...(19): siRNA sense strand
agaugggcccaguggauaa

SEQ ID NO: 2561565 - RNA, 19 nt, Homo sapiens
  misc_RNA (1)...(19): siRNA sense strand
guggauaagcggaaggguu

SEQ ID NO: 2561566 - RNA, 19 nt, Homo sapiens
  misc_RNA (1)...(19): siRNA sense strand
gguuguuguuggagaagca

SEQ ID NO: 2561567 - RNA, 19 nt, Homo sapiens
  misc_RNA (1)...(19): siRNA sense strand
cgguuaggcugugaggaaa

SEQ ID NO: 2561568 - RNA, 19 nt, Homo sapiens
  misc_RNA (1)...(19): siRNA sense strand
acaaaguucugaaagguga

SEQ ID NO: 2561569 - RNA, 19 nt, Homo sapiens
  misc_RNA (1)...(19): siRNA sense strand
ugggaaaauccuuggggaa

SEQ ID NO: 2561570 - RNA, 19 nt, Homo sapiens
  misc_RNA (1)...(19): siRNA sense strand
gcaggaagauccaggaggu

SEQ ID NO: 2561571 - RNA, 19 nt, Homo sapiens
  misc_RNA (1)...(19): siRNA sense strand
cggaagacgacgaggacug

SEQ ID NO: 2561572 - RNA, 19 nt, Homo sapiens
  misc_RNA (1)...(19): siRNA sense strand
ggaaauggaaggauacgga

SEQ ID NO: 2561573 - RNA, 19 nt, Homo sapiens
  misc_RNA (1)...(19): siRNA sense strand
gcccaguggauaagcggaa

SEQ ID NO: 2561574 - RNA, 19 nt, Homo sapiens
  misc_RNA (1)...(19): siRNA sense strand
gcaacauagagcaguacau

SEQ ID NO: 2561575 - RNA, 19 nt, Homo sapiens
  misc_RNA (1)...(19): siRNA sense strand
cgaccagaggccaagaauu

SEQ ID NO: 2561576 - RNA, 19 nt, Homo sapiens
  misc_RNA (1)...(19): siRNA sense strand
ccuucuuuguuaagcuuua

SEQ ID NO: 2561577 - RNA, 19 nt, Homo sapiens
  misc_RNA (1)...(19): siRNA sense strand
gcaaacaagccagggccaa

SEQ ID NO: 2561578 - RNA, 19 nt, Homo sapiens
  misc_RNA (1)...(19): siRNA sense strand
aggugaaauuccuugguca

SEQ ID NO: 2561579 - RNA, 19 nt, Homo sapiens
  misc_RNA (1)...(19): siRNA sense strand
agguuuggaggcagcgaua

SEQ ID NO: 2561580 - RNA, 19 nt, Homo sapiens
  misc_RNA (1)...(19): siRNA sense strand
aguucugaaaggugaaauu

SEQ ID NO: 2561581 - RNA, 19 nt, Homo sapiens
  misc_RNA (1)...(19): siRNA sense strand
ggguuuauuugcaagacga

SEQ ID NO: 2561582 - RNA, 19 nt, Homo sapiens
  misc_RNA (1)...(19): siRNA sense strand
cuccagagaauaugcgauu

SEQ ID NO: 2561583 - RNA, 19 nt, Homo sapiens
  misc_RNA (1)...(19): siRNA sense strand
acgccuaacaggacguauu

SEQ ID NO: 2561584 - RNA, 19 nt, Homo sapiens
  misc_RNA (1)...(19): siRNA sense strand
gggagaaccugcaccagca

SEQ ID NO: 2561585 - RNA, 19 nt, Homo sapiens
  misc_RNA (1)...(19): siRNA sense strand
gcauaauauaccagcuugu

SEQ ID NO: 2561586 - RNA, 19 nt, Homo sapiens
  misc_RNA (1)...(19): siRNA sense strand
cggcuaugucggaagacga

SEQ ID NO: 2561587 - RNA, 19 nt, Homo sapiens
  misc_RNA (1)...(19): siRNA sense strand
augacaaucuccugagcca

SEQ ID NO: 2561588 - RNA, 19 nt, Homo sapiens
  misc_RNA (1)...(19): siRNA sense strand
cauuucaggacgacgagaa

SEQ ID NO: 2561589 - RNA, 19 nt, Homo sapiens
  misc_RNA (1)...(19): siRNA sense strand
ccaacucauucgugggaac

SEQ ID NO: 2561590 - RNA, 19 nt, Homo sapiens
  misc_RNA (1)...(19): siRNA sense strand
ccacaaagcgguuaggcug

SEQ ID NO: 2561591 - RNA, 19 nt, Homo sapiens
  misc_RNA (1)...(19): siRNA sense strand
cagccaaggaggagcgcaa

SEQ ID NO: 2561592 - RNA, 19 nt, Homo sapiens
  misc_RNA (1)...(19): siRNA sense strand
aggaugaggccgagaccaa

SEQ ID NO: 2561593 - RNA, 19 nt, Homo sapiens
  misc_RNA (1)...(19): siRNA sense strand
gcaucaaagucuacgagga

SEQ ID NO: 2561594 - RNA, 19 nt, Homo sapiens
  misc_RNA (1)...(19): siRNA sense strand
ccaagaaggugcugggccu

SEQ ID NO: 2561595 - RNA, 19 nt, Homo sapiens
  misc_RNA (1)...(19): siRNA sense strand
ccuccagggaagagaauca

SEQ ID NO: 2561596 - RNA, 19 nt, Homo sapiens
  misc_RNA (1)...(19): siRNA sense strand
ucuacgaggacgagaccaa

SEQ ID NO: 2561597 - RNA, 19 nt, Homo sapiens
  misc_RNA (1)...(19): siRNA sense strand
ccagguuggagaaggaaau

SEQ ID NO: 2561598 - RNA, 19 nt, Homo sapiens
  misc_RNA (1)...(19): siRNA sense strand
ucacuguggagaaggacaa

SEQ ID NO: 2561599 - RNA, 19 nt, Homo sapiens
  misc_RNA (1)...(19): siRNA sense strand
ggaggcagaugcaggacga

SEQ ID NO: 2561600 - RNA, 19 nt, Homo sapiens
  misc_RNA (1)...(19): siRNA sense strand
guggagaaggacaagguga

SEQ ID NO: 2561601 - RNA, 19 nt, Homo sapiens
  misc_RNA (1)...(19): siRNA sense strand
agaaggaaauugaggugcu

SEQ ID NO: 2561602 - RNA, 19 nt, Homo sapiens
  misc_RNA (1)...(19): siRNA sense strand
ucaaagucuacgaggacga

SEQ ID NO: 2561603 - RNA, 19 nt, Homo sapiens
  misc_RNA (1)...(19): siRNA sense strand
cagagaagcggaagcggca

SEQ ID NO: 2561604 - RNA, 19 nt, Homo sapiens
  misc_RNA (1)...(19): siRNA sense strand
agacacggcugcuggagga

SEQ ID NO: 2561605 - RNA, 19 nt, Homo sapiens
  misc_RNA (1)...(19): siRNA sense strand
ccaaagugguccaugcugu

SEQ ID NO: 2561606 - RNA, 19 nt, Homo sapiens
  misc_RNA (1)...(19): siRNA sense strand
agaaugagcugguggccaa

SEQ ID NO: 2561607 - RNA, 19 nt, Homo sapiens
  misc_RNA (1)...(19): siRNA sense strand
ucaacaagcuagaaggaga

SEQ ID NO: 2561608 - RNA, 19 nt, Homo sapiens
  misc_RNA (1)...(19): siRNA sense strand
uggagaaggccaugggcaa

SEQ ID NO: 2561609 - RNA, 19 nt, Homo sapiens
  misc_RNA (1)...(19): siRNA sense strand
uggaagacuacgagaaaga

SEQ ID NO: 2561610 - RNA, 19 nt, Homo sapiens
  misc_RNA (1)...(19): siRNA sense strand
gaacaagaucaaugggcca

SEQ ID NO: 2561611 - RNA, 19 nt, Homo sapiens
  misc_RNA (1)...(19): siRNA sense strand
ccaucaagaacgagaacca

SEQ ID NO: 2561612 - RNA, 19 nt, Homo sapiens
  misc_RNA (1)...(19): siRNA sense strand
ugguggaugaugagagcua

SEQ ID NO: 2561613 - RNA, 19 nt, Homo sapiens
  misc_RNA (1)...(19): siRNA sense strand
cgagaaagaucgcggagcu

SEQ ID NO: 2561614 - RNA, 19 nt, Homo sapiens
  misc_RNA (1)...(19): siRNA sense strand
ggcaacaggccgauggaga

SEQ ID NO: 2561615 - RNA, 19 nt, Homo sapiens
  misc_RNA (1)...(19): siRNA sense strand
agacaaagugcucggggaa

SEQ ID NO: 2561616 - RNA, 19 nt, Homo sapiens
  misc_RNA (1)...(19): siRNA sense strand
gggccaugguucagcaagu

SEQ ID NO: 2561617 - RNA, 19 nt, Homo sapiens
  misc_RNA (1)...(19): siRNA sense strand
gcugugagcugcaggccau

SEQ ID NO: 2561618 - RNA, 19 nt, Homo sapiens
  misc_RNA (1)...(19): siRNA sense strand
gggaaaguccgggaggcua

SEQ ID NO: 2561619 - RNA, 19 nt, Homo sapiens
  misc_RNA (1)...(19): siRNA sense strand
acgagaaccaggaggucau

SEQ ID NO: 2561620 - RNA, 19 nt, Homo sapiens
  misc_RNA (1)...(19): siRNA sense strand
ggaaggacuaucagcgcau

SEQ ID NO: 2561621 - RNA, 19 nt, Homo sapiens
  misc_RNA (1)...(19): siRNA sense strand
guaacaacucgcuggacuu

SEQ ID NO: 2561622 - RNA, 19 nt, Homo sapiens
  misc_RNA (1)...(19): siRNA sense strand
ucuacaagcuguugcagga

SEQ ID NO: 2561623 - RNA, 19 nt, Homo sapiens
  misc_RNA (1)...(19): siRNA sense strand
ugauggugaagaagggcua

SEQ ID NO: 2561624 - RNA, 19 nt, Homo sapiens
  misc_RNA (1)...(19): siRNA sense strand
cuugcaaggucaucggaga

SEQ ID NO: 2561625 - RNA, 19 nt, Homo sapiens
  misc_RNA (1)...(19): siRNA sense strand
ccgacgaggacgagcaugu

SEQ ID NO: 2561626 - RNA, 19 nt, Homo sapiens
  misc_RNA (1)...(19): siRNA sense strand
ugagcaugcugcaggacau

SEQ ID NO: 2561627 - RNA, 19 nt, Homo sapiens
  misc_RNA (1)...(19): siRNA sense strand
ugggccaggugguggaaga

SEQ ID NO: 2561628 - RNA, 19 nt, Homo sapiens
  misc_RNA (1)...(19): siRNA sense strand
agcucaaagugcuccaaua

SEQ ID NO: 2561629 - RNA, 19 nt, Homo sapiens
  misc_RNA (1)...(19): siRNA sense strand
gguucuguuugauggugaa

SEQ ID NO: 2561630 - RNA, 19 nt, Homo sapiens
  misc_RNA (1)...(19): siRNA sense strand
gaaacaacaagcagcacca

SEQ ID NO: 2561631 - RNA, 19 nt, Homo sapiens
  misc_RNA (1)...(19): siRNA sense strand
ggcuggaagacuacgagaa

SEQ ID NO: 2561632 - RNA, 19 nt, Homo sapiens
  misc_RNA (1)...(19): siRNA sense strand
cgacauuucaggccugcaa

SEQ ID NO: 2561633 - RNA, 19 nt, Homo sapiens
  misc_RNA (1)...(19): siRNA sense strand
aggacgagcaugugaucca

SEQ ID NO: 2561634 - RNA, 19 nt, Homo sapiens
  misc_RNA (1)...(19): siRNA sense strand
agacggaacuuaagcgcaa

SEQ ID NO: 2561635 - RNA, 19 nt, Homo sapiens
  misc_RNA (1)...(19): siRNA sense strand
gguacaaucacuagugcaa

SEQ ID NO: 2561636 - RNA, 19 nt, Homo sapiens
  misc_RNA (1)...(19): siRNA sense strand
ccaaauugcucaacuaaga

SEQ ID NO: 2561637 - RNA, 19 nt, Homo sapiens
  misc_RNA (1)...(19): siRNA sense strand
gaacuuggagcuagggcaa

SEQ ID NO: 2561638 - RNA, 19 nt, Homo sapiens
  misc_RNA (1)...(19): siRNA sense strand
guaaagaacgagaagcuga

SEQ ID NO: 2561639 - RNA, 19 nt, Homo sapiens
  misc_RNA (1)...(19): siRNA sense strand
gccuuaagugugaaaguaa

SEQ ID NO: 2561640 - RNA, 19 nt, Homo sapiens
  misc_RNA (1)...(19): siRNA sense strand
acuaaagcaguuacagaaa

SEQ ID NO: 2561641 - RNA, 19 nt, Homo sapiens
  misc_RNA (1)...(19): siRNA sense strand
ccuuaagugugaaaguaau

SEQ ID NO: 2561642 - RNA, 19 nt, Homo sapiens
  misc_RNA (1)...(19): siRNA sense strand
aggcgaugcucuacgagaa

SEQ ID NO: 2561643 - RNA, 19 nt, Homo sapiens
  misc_RNA (1)...(19): siRNA sense strand
ccaccaagcuaaagaggcu

SEQ ID NO: 2561644 - RNA, 19 nt, Homo sapiens
  misc_RNA (1)...(19): siRNA sense strand
guauaaauaugcugcagga

SEQ ID NO: 2561645 - RNA, 19 nt, Homo sapiens
  misc_RNA (1)...(19): siRNA sense strand
gggcaaaagaauucaccaa

SEQ ID NO: 2561646 - RNA, 19 nt, Homo sapiens
  misc_RNA (1)...(19): siRNA sense strand
agaugaaacaagauaggau

SEQ ID NO: 2561647 - RNA, 19 nt, Homo sapiens
  misc_RNA (1)...(19): siRNA sense strand
aagauaggaucaccagaua

SEQ ID NO: 2561648 - RNA, 19 nt, Homo sapiens
  misc_RNA (1)...(19): siRNA sense strand
cugaaagagcuauugaaaa

SEQ ID NO: 2561649 - RNA, 19 nt, Homo sapiens
  misc_RNA (1)...(19): siRNA sense strand
ccucaagagcaaaagcaaa

SEQ ID NO: 2561650 - RNA, 19 nt, Homo sapiens
  misc_RNA (1)...(19): siRNA sense strand
guggaugagaugaacggaa

SEQ ID NO: 2561651 - RNA, 19 nt, Homo sapiens
  misc_RNA (1)...(19): siRNA sense strand
gccacaaguuacaaugcaa

SEQ ID NO: 2561652 - RNA, 19 nt, Homo sapiens
  misc_RNA (1)...(19): siRNA sense strand
gcaaaaguggaguaggcaa

SEQ ID NO: 2561653 - RNA, 19 nt, Homo sapiens
  misc_RNA (1)...(19): siRNA sense strand
accaguauaugcagagaau

SEQ ID NO: 2561654 - RNA, 19 nt, Homo sapiens
  misc_RNA (1)...(19): siRNA sense strand
uagccaaauugcucaacua

SEQ ID NO: 2561655 - RNA, 19 nt, Homo sapiens
  misc_RNA (1)...(19): siRNA sense strand
uuaaggaucucuuuggcaa

SEQ ID NO: 2561656 - RNA, 19 nt, Homo sapiens
  misc_RNA (1)...(19): siRNA sense strand
gcucaauggaaaacaaauu

SEQ ID NO: 2561657 - RNA, 19 nt, Homo sapiens
  misc_RNA (1)...(19): siRNA sense strand
ugaugaugguauugaugau

SEQ ID NO: 2561658 - RNA, 19 nt, Homo sapiens
  misc_RNA (1)...(19): siRNA sense strand
aagcuguggaugagaugaa

SEQ ID NO: 2561659 - RNA, 19 nt, Homo sapiens
  misc_RNA (1)...(19): siRNA sense strand
acaaauuuauguuggucga

SEQ ID NO: 2561660 - RNA, 19 nt, Homo sapiens
  misc_RNA (1)...(19): siRNA sense strand
acacaucaacacagacaau

SEQ ID NO: 2561661 - RNA, 19 nt, Homo sapiens
  misc_RNA (1)...(19): siRNA sense strand
agaacgagaagcugaacuu

SEQ ID NO: 2561662 - RNA, 19 nt, Homo sapiens
  misc_RNA (1)...(19): siRNA sense strand
uuggagaagacauggauga

SEQ ID NO: 2561663 - RNA, 19 nt, Homo sapiens
  misc_RNA (1)...(19): siRNA sense strand
ugaugguauugaugaugaa

SEQ ID NO: 2561664 - RNA, 19 nt, Homo sapiens
  misc_RNA (1)...(19): siRNA sense strand
cagaaaugaacgguagaau

SEQ ID NO: 2561665 - RNA, 19 nt, Homo sapiens
  misc_RNA (1)...(19): siRNA sense strand
ugaccgaggcgaugcucua

SEQ ID NO: 2561666 - RNA, 19 nt, Homo sapiens
  misc_RNA (1)...(19): siRNA sense strand
uugauguuauaaagggcaa

SEQ ID NO: 2561667 - RNA, 19 nt, Homo sapiens
  misc_RNA (1)...(19): siRNA sense strand
caagauaggaucaccagau

SEQ ID NO: 2561668 - RNA, 19 nt, Homo sapiens
  misc_RNA (1)...(19): siRNA sense strand
guuacagaaaugaacggua

SEQ ID NO: 2561669 - RNA, 19 nt, Homo sapiens
  misc_RNA (1)...(19): siRNA sense strand
ccagauaccaggguguuaa

SEQ ID NO: 2561670 - RNA, 19 nt, Homo sapiens
  misc_RNA (1)...(19): siRNA sense strand
cagaagauauucaaggaga

SEQ ID NO: 2561671 - RNA, 19 nt, Homo sapiens
  misc_RNA (1)...(19): siRNA sense strand
cgaaaauacagcagaagaa

SEQ ID NO: 2561672 - RNA, 19 nt, Homo sapiens
  misc_RNA (1)...(19): siRNA sense strand
ggucauuguugucugggua

SEQ ID NO: 2561673 - RNA, 19 nt, Homo sapiens
  misc_RNA (1)...(19): siRNA sense strand
guaaagacaaagagccuga

SEQ ID NO: 2561674 - RNA, 19 nt, Homo sapiens
  misc_RNA (1)...(19): siRNA sense strand
agaaguagcaggugggauc

SEQ ID NO: 2561675 - RNA, 19 nt, Homo sapiens
  misc_RNA (1)...(19): siRNA sense strand
aauauuaagccuaagguca

SEQ ID NO: 2561676 - RNA, 19 nt, Homo sapiens
  misc_RNA (1)...(19): siRNA sense strand
agaauggagaacuggagaa

SEQ ID NO: 2561677 - RNA, 19 nt, Homo sapiens
  misc_RNA (1)...(19): siRNA sense strand
cuguaaagacaaagagccu

SEQ ID NO: 2561678 - RNA, 19 nt, Homo sapiens
  misc_RNA (1)...(19): siRNA sense strand
auauuaagccuaaggucau

SEQ ID NO: 2561679 - RNA, 19 nt, Homo sapiens
  misc_RNA (1)...(19): siRNA sense strand
auguacuguucgugggaga

SEQ ID NO: 2561680 - RNA, 19 nt, Homo sapiens
  misc_RNA (1)...(19): siRNA sense strand
gggagauacaacaagacau

SEQ ID NO: 2561681 - RNA, 19 nt, Homo sapiens
  misc_RNA (1)...(19): siRNA sense strand
caaaagaacgccaagguga

SEQ ID NO: 2561682 - RNA, 19 nt, Homo sapiens
  misc_RNA (1)...(19): siRNA sense strand
acaccugaggagaaacaaa

SEQ ID NO: 2561683 - RNA, 19 nt, Homo sapiens
  misc_RNA (1)...(19): siRNA sense strand
cuggagaauauuaagccua

SEQ ID NO: 2561684 - RNA, 19 nt, Homo sapiens
  misc_RNA (1)...(19): siRNA sense strand
gauggaugucucagcacaa

SEQ ID NO: 2561685 - RNA, 19 nt, Homo sapiens
  misc_RNA (1)...(19): siRNA sense strand
acuccauggugcaguuaau

SEQ ID NO: 2561686 - RNA, 19 nt, Homo sapiens
  misc_RNA (1)...(19): siRNA sense strand
augcaguuguuggaggaaa

SEQ ID NO: 2561687 - RNA, 19 nt, Homo sapiens
  misc_RNA (1)...(19): siRNA sense strand
aaaagaacgccaaggugaa

SEQ ID NO: 2561688 - RNA, 19 nt, Homo sapiens
  misc_RNA (1)...(19): siRNA sense strand
gguauaagaaagacaacaa

SEQ ID NO: 2561689 - RNA, 19 nt, Homo sapiens
  misc_RNA (1)...(19): siRNA sense strand
cggaugaaucugaggaaga

SEQ ID NO: 2561690 - RNA, 19 nt, Homo sapiens
  misc_RNA (1)...(19): siRNA sense strand
gguuggacaugaaggcaaa

SEQ ID NO: 2561691 - RNA, 19 nt, Homo sapiens
  misc_RNA (1)...(19): siRNA sense strand
aggaagaagaagaagauga

SEQ ID NO: 2561692 - RNA, 19 nt, Homo sapiens
  misc_RNA (1)...(19): siRNA sense strand
gaugcaaacagaaaggaaa

SEQ ID NO: 2561693 - RNA, 19 nt, Homo sapiens
  misc_RNA (1)...(19): siRNA sense strand
ccaucuaugcaaagugaaa

SEQ ID NO: 2561694 - RNA, 19 nt, Homo sapiens
  misc_RNA (1)...(19): siRNA sense strand
ggccaaagauguacggcuu

SEQ ID NO: 2561695 - RNA, 19 nt, Homo sapiens
  misc_RNA (1)...(19): siRNA sense strand
ggaaguaugaacuggaaga

SEQ ID NO: 2561696 - RNA, 19 nt, Homo sapiens
  misc_RNA (1)...(19): siRNA sense strand
cagcaacauuacaggguga

SEQ ID NO: 2561697 - RNA, 19 nt, Homo sapiens
  misc_RNA (1)...(19): siRNA sense strand
aagcaugagccaagaaaga

SEQ ID NO: 2561698 - RNA, 19 nt, Homo sapiens
  misc_RNA (1)...(19): siRNA sense strand
ugguggaaauggugagaca

SEQ ID NO: 2561699 - RNA, 19 nt, Homo sapiens
  misc_RNA (1)...(19): siRNA sense strand
cguucauguuguuggguau

SEQ ID NO: 2561700 - RNA, 19 nt, Homo sapiens
  misc_RNA (1)...(19): siRNA sense strand
aagugaaagcucugaacaa

SEQ ID NO: 2561701 - RNA, 19 nt, Homo sapiens
  misc_RNA (1)...(19): siRNA sense strand
aguuugauguccagaggaa

SEQ ID NO: 2561702 - RNA, 19 nt, Homo sapiens
  misc_RNA (1)...(19): siRNA sense strand
gguucaauccaaagaaaca

SEQ ID NO: 2561703 - RNA, 19 nt, Homo sapiens
  misc_RNA (1)...(19): siRNA sense strand
aaauagaagaugacgauga

SEQ ID NO: 2561704 - RNA, 19 nt, Homo sapiens
  misc_RNA (1)...(19): siRNA sense strand
cugaaguuguugauaagaa

SEQ ID NO: 2561705 - RNA, 19 nt, Homo sapiens
  misc_RNA (1)...(19): siRNA sense strand
aagaagaggagguggagga

SEQ ID NO: 2561706 - RNA, 19 nt, Homo sapiens
  misc_RNA (1)...(19): siRNA sense strand
ucaucaagccugagacuuu

SEQ ID NO: 2561707 - RNA, 19 nt, Homo sapiens
  misc_RNA (1)...(19): siRNA sense strand
ggauaaugaauuggaagaa

SEQ ID NO: 2561708 - RNA, 19 nt, Homo sapiens
  misc_RNA (1)...(19): siRNA sense strand
gcauuuggcaggauggcaa

SEQ ID NO: 2561709 - RNA, 19 nt, Homo sapiens
  misc_RNA (1)...(19): siRNA sense strand
gauaccaaacaauggguua

SEQ ID NO: 2561710 - RNA, 19 nt, Homo sapiens
  misc_RNA (1)...(19): siRNA sense strand
ugagacaggauuugagcaa

SEQ ID NO: 2561711 - RNA, 19 nt, Homo sapiens
  misc_RNA (1)...(19): siRNA sense strand
gggccugguacaagggaau

SEQ ID NO: 2561712 - RNA, 19 nt, Homo sapiens
  misc_RNA (1)...(19): siRNA sense strand
aggauaaugaauuggaaga

SEQ ID NO: 2561713 - RNA, 19 nt, Homo sapiens
  misc_RNA (1)...(19): siRNA sense strand
augcaaacagaaaggaaau

SEQ ID NO: 2561714 - RNA, 19 nt, Homo sapiens
  misc_RNA (1)...(19): siRNA sense strand
gagaauucuggaugcguua

SEQ ID NO: 2561715 - RNA, 19 nt, Homo sapiens
  misc_RNA (1)...(19): siRNA sense strand
aggagaagauugagaaccu

SEQ ID NO: 2561716 - RNA, 19 nt, Homo sapiens
  misc_RNA (1)...(19): siRNA sense strand
gcaugagccaagaaagaau

SEQ ID NO: 2561717 - RNA, 19 nt, Homo sapiens
  misc_RNA (1)...(19): siRNA sense strand
ggaaauggugagacaggau

SEQ ID NO: 2561718 - RNA, 19 nt, Homo sapiens
  misc_RNA (1)...(19): siRNA sense strand
caguugaguauguggaaaa

SEQ ID NO: 2561719 - RNA, 19 nt, Homo sapiens
  misc_RNA (1)...(19): siRNA sense strand
ggagaaaugguuuggaacu

SEQ ID NO: 2561720 - RNA, 19 nt, Homo sapiens
  misc_RNA (1)...(19): siRNA sense strand
aagaagaagaggaggugga

SEQ ID NO: 2561721 - RNA, 19 nt, Homo sapiens
  misc_RNA (1)...(19): siRNA sense strand
ccaaagaaacacuggauac

SEQ ID NO: 2561722 - RNA, 19 nt, Homo sapiens
  misc_RNA (1)...(19): siRNA sense strand
agaagaugaugaugaagau

SEQ ID NO: 2561723 - RNA, 19 nt, Homo sapiens
  misc_RNA (1)...(19): siRNA sense strand
cugaaggagugugaggaua

SEQ ID NO: 2561724 - RNA, 19 nt, Homo sapiens
  misc_RNA (1)...(19): siRNA sense strand
agaccuaaguaauauggaa

SEQ ID NO: 2561725 - RNA, 19 nt, Homo sapiens
  misc_RNA (1)...(19): siRNA sense strand
aagaagaugaugaugaaga

SEQ ID NO: 2561726 - RNA, 19 nt, Homo sapiens
  misc_RNA (1)...(19): siRNA sense strand
ugaaauagaagaugacgau

SEQ ID NO: 2561727 - RNA, 19 nt, Homo sapiens
  misc_RNA (1)...(19): siRNA sense strand
gugaaaggauuuaaccaca

SEQ ID NO: 2561728 - RNA, 19 nt, Homo sapiens
  misc_RNA (1)...(19): siRNA sense strand
gguggaggaagaagaagaa

SEQ ID NO: 2561729 - RNA, 19 nt, Homo sapiens
  misc_RNA (1)...(19): siRNA sense strand
ugaagauucuggagcugaa

SEQ ID NO: 2561730 - RNA, 19 nt, Homo sapiens
  misc_RNA (1)...(19): siRNA sense strand
gaaaagugggugacugaaa

SEQ ID NO: 2561731 - RNA, 19 nt, Homo sapiens
  misc_RNA (1)...(19): siRNA sense strand
ugaugaggguuaugaacau

SEQ ID NO: 2561732 - RNA, 19 nt, Homo sapiens
  misc_RNA (1)...(19): siRNA sense strand
gcuuugaggagaagauuga

SEQ ID NO: 2561733 - RNA, 19 nt, Homo sapiens
  misc_RNA (1)...(19): siRNA sense strand
aguugaagcuguugauagu

SEQ ID NO: 2561734 - RNA, 19 nt, Homo sapiens
  misc_RNA (1)...(19): siRNA sense strand
gaacaagggugaugccaac

SEQ ID NO: 2561735 - RNA, 19 nt, Homo sapiens
  misc_RNA (1)...(19): siRNA sense strand
aguaugaacuggaagagga

SEQ ID NO: 2561736 - RNA, 19 nt, Homo sapiens
  misc_RNA (1)...(19): siRNA sense strand
aggaaauacaacagaugau

SEQ ID NO: 2561737 - RNA, 19 nt, Homo sapiens
  misc_RNA (1)...(19): siRNA sense strand
uggaggaagaagaagaaga

SEQ ID NO: 2561738 - RNA, 19 nt, Homo sapiens
  misc_RNA (1)...(19): siRNA sense strand
agagagagcagaagcuaga

SEQ ID NO: 2561739 - RNA, 19 nt, Homo sapiens
  misc_RNA (1)...(19): siRNA sense strand
cauugacugaugaggguua

SEQ ID NO: 2561740 - RNA, 19 nt, Homo sapiens
  misc_RNA (1)...(19): siRNA sense strand
gcugaaggagugugaggau

SEQ ID NO: 2561741 - RNA, 19 nt, Homo sapiens
  misc_RNA (1)...(19): siRNA sense strand
uagaagaugacgaugaaga

SEQ ID NO: 2561742 - RNA, 19 nt, Homo sapiens
  misc_RNA (1)...(19): siRNA sense strand
gccagaagucauuggugaa

SEQ ID NO: 2561743 - RNA, 19 nt, Homo sapiens
  misc_RNA (1)...(19): siRNA sense strand
cagaauacccaguuaaaau

SEQ ID NO: 2561744 - RNA, 19 nt, Homo sapiens
  misc_RNA (1)...(19): siRNA sense strand
cagaugaugaagaagaaga

SEQ ID NO: 2561745 - RNA, 19 nt, Homo sapiens
  misc_RNA (1)...(19): siRNA sense strand
aggauaaagcuguuggaau

SEQ ID NO: 2561746 - RNA, 19 nt, Homo sapiens
  misc_RNA (1)...(19): siRNA sense strand
uguagagggcaggaagaaa

SEQ ID NO: 2561747 - RNA, 19 nt, Homo sapiens
  misc_RNA (1)...(19): siRNA sense strand
ucaucuacagcuucagaaa

SEQ ID NO: 2561748 - RNA, 19 nt, Homo sapiens
  misc_RNA (1)...(19): siRNA sense strand
cuguagagggcaggaagaa

SEQ ID NO: 2561749 - RNA, 19 nt, Homo sapiens
  misc_RNA (1)...(19): siRNA sense strand
cagaaauguuacaggauau

SEQ ID NO: 2561750 - RNA, 19 nt, Homo sapiens
  misc_RNA (1)...(19): siRNA sense strand
cgauguagaaagacagaaa

SEQ ID NO: 2561751 - RNA, 19 nt, Homo sapiens
  misc_RNA (1)...(19): siRNA sense strand
ccauaaagcaacagcuaau

SEQ ID NO: 2561752 - RNA, 19 nt, Homo sapiens
  misc_RNA (1)...(19): siRNA sense strand
aaaucaaacggcagagaaa

SEQ ID NO: 2561753 - RNA, 19 nt, Homo sapiens
  misc_RNA (1)...(19): siRNA sense strand
gcuaauaaggagaaugaau

SEQ ID NO: 2561754 - RNA, 19 nt, Homo sapiens
  misc_RNA (1)...(19): siRNA sense strand
aagaaaagcuagcagaaaa

SEQ ID NO: 2561755 - RNA, 19 nt, Homo sapiens
  misc_RNA (1)...(19): siRNA sense strand
ggguuugcgaagugagaaa

SEQ ID NO: 2561756 - RNA, 19 nt, Homo sapiens
  misc_RNA (1)...(19): siRNA sense strand
aaauaaugucccagcaaua

SEQ ID NO: 2561757 - RNA, 19 nt, Homo sapiens
  misc_RNA (1)...(19): siRNA sense strand
acacaacaguuuagagcau

SEQ ID NO: 2561758 - RNA, 19 nt, Homo sapiens
  misc_RNA (1)...(19): siRNA sense strand
uagaugaacgugagcgaaa

SEQ ID NO: 2561759 - RNA, 19 nt, Homo sapiens
  misc_RNA (1)...(19): siRNA sense strand
agagaaacucaaucagaaa

SEQ ID NO: 2561760 - RNA, 19 nt, Homo sapiens
  misc_RNA (1)...(19): siRNA sense strand
ugccacagaucuugggaaa

SEQ ID NO: 2561761 - RNA, 19 nt, Homo sapiens
  misc_RNA (1)...(19): siRNA sense strand
gcucagggacuaagaaaca

SEQ ID NO: 2561762 - RNA, 19 nt, Homo sapiens
  misc_RNA (1)...(19): siRNA sense strand
gacaagaagaccaggaaaa

SEQ ID NO: 2561763 - RNA, 19 nt, Homo sapiens
  misc_RNA (1)...(19): siRNA sense strand
cuucaaauguaccgaguga

SEQ ID NO: 2561764 - RNA, 19 nt, Homo sapiens
  misc_RNA (1)...(19): siRNA sense strand
agugaaacaggaagugaaa

SEQ ID NO: 2561765 - RNA, 19 nt, Homo sapiens
  misc_RNA (1)...(19): siRNA sense strand
cagcuaauaaggagaauga

SEQ ID NO: 2561766 - RNA, 19 nt, Homo sapiens
  misc_RNA (1)...(19): siRNA sense strand
caguauagucuuagcagau

SEQ ID NO: 2561767 - RNA, 19 nt, Homo sapiens
  misc_RNA (1)...(19): siRNA sense strand
caggaauggauguagacaa

SEQ ID NO: 2561768 - RNA, 19 nt, Homo sapiens
  misc_RNA (1)...(19): siRNA sense strand
ggacauauuggaacagaca

SEQ ID NO: 2561769 - RNA, 19 nt, Homo sapiens
  misc_RNA (1)...(19): siRNA sense strand
cauaccaccauaagagaaa

SEQ ID NO: 2561770 - RNA, 19 nt, Homo sapiens
  misc_RNA (1)...(19): siRNA sense strand
ucaaauguaccgagugaau

SEQ ID NO: 2561771 - RNA, 19 nt, Homo sapiens
  misc_RNA (1)...(19): siRNA sense strand
cagugaaacaggaagugaa

SEQ ID NO: 2561772 - RNA, 19 nt, Homo sapiens
  misc_RNA (1)...(19): siRNA sense strand
gcagcgauguagaaagaca

SEQ ID NO: 2561773 - RNA, 19 nt, Homo sapiens
  misc_RNA (1)...(19): siRNA sense strand
ggaucuaaaacaagaacaa

SEQ ID NO: 2561774 - RNA, 19 nt, Homo sapiens
  misc_RNA (1)...(19): siRNA sense strand
ccuuugaguccgugccuaa

SEQ ID NO: 2561775 - RNA, 19 nt, Homo sapiens
  misc_RNA (1)...(19): siRNA sense strand
cagcaggaauggauguaga

SEQ ID NO: 2561776 - RNA, 19 nt, Homo sapiens
  misc_RNA (1)...(19): siRNA sense strand
ggaaaugcuaacugugaga

SEQ ID NO: 2561777 - RNA, 19 nt, Homo sapiens
  misc_RNA (1)...(19): siRNA sense strand
agacaagaagaccaggaaa

SEQ ID NO: 2561778 - RNA, 19 nt, Homo sapiens
  misc_RNA (1)...(19): siRNA sense strand
cugaagacucugcaguaaa

SEQ ID NO: 2561779 - RNA, 19 nt, Homo sapiens
  misc_RNA (1)...(19): siRNA sense strand
caauagaaguaucccucaa

SEQ ID NO: 2561780 - RNA, 19 nt, Homo sapiens
  misc_RNA (1)...(19): siRNA sense strand
ugacaaaaguauugccaca

SEQ ID NO: 2561781 - RNA, 19 nt, Homo sapiens
  misc_RNA (1)...(19): siRNA sense strand
ccacagaaauguuacagga

SEQ ID NO: 2561782 - RNA, 19 nt, Homo sapiens
  misc_RNA (1)...(19): siRNA sense strand
agaacauuguacagaugaa

SEQ ID NO: 2561783 - RNA, 19 nt, Homo sapiens
  misc_RNA (1)...(19): siRNA sense strand
uuguacagaugaaggguuu

SEQ ID NO: 2561784 - RNA, 19 nt, Homo sapiens
  misc_RNA (1)...(19): siRNA sense strand
caaggauggaggauauaua

SEQ ID NO: 2561785 - RNA, 19 nt, Homo sapiens
  misc_RNA (1)...(19): siRNA sense strand
caggauauacagaggcaca

SEQ ID NO: 2561786 - RNA, 19 nt, Homo sapiens
  misc_RNA (1)...(19): siRNA sense strand
ucagagagcccgaacgaga

SEQ ID NO: 2561787 - RNA, 19 nt, Homo sapiens
  misc_RNA (1)...(19): siRNA sense strand
agaacuaguuaaaugccua

SEQ ID NO: 2561788 - RNA, 19 nt, Homo sapiens
  misc_RNA (1)...(19): siRNA sense strand
ccucaauggaacagagucu

SEQ ID NO: 2561789 - RNA, 19 nt, Homo sapiens
  misc_RNA (1)...(19): siRNA sense strand
ccuguaugcaauagaagua

SEQ ID NO: 2561790 - RNA, 19 nt, Homo sapiens
  misc_RNA (1)...(19): siRNA sense strand
agugagaaaucuauagcuu

SEQ ID NO: 2561791 - RNA, 19 nt, Homo sapiens
  misc_RNA (1)...(19): siRNA sense strand
aggaauuagaugaacguga

SEQ ID NO: 2561792 - RNA, 19 nt, Homo sapiens
  misc_RNA (1)...(19): siRNA sense strand
acauauuggaacagacaga

SEQ ID NO: 2561793 - RNA, 19 nt, Homo sapiens
  misc_RNA (1)...(19): siRNA sense strand
agaagaaacuguaggugcu

SEQ ID NO: 2561794 - RNA, 19 nt, Homo sapiens
  misc_RNA (1)...(19): siRNA sense strand
agucuaauguagugguguu

SEQ ID NO: 2561795 - RNA, 19 nt, Homo sapiens
  misc_RNA (1)...(19): siRNA sense strand
augcagcgauguagaaaga

SEQ ID NO: 2561796 - RNA, 19 nt, Homo sapiens
  misc_RNA (1)...(19): siRNA sense strand
ugcugauaguagugauuua

SEQ ID NO: 2561797 - RNA, 19 nt, Homo sapiens
  misc_RNA (1)...(19): siRNA sense strand
agacaguaguacaucaaaa

SEQ ID NO: 2561798 - RNA, 19 nt, Homo sapiens
  misc_RNA (1)...(19): siRNA sense strand
ccgaacgagaacuggaauu

SEQ ID NO: 2561799 - RNA, 19 nt, Homo sapiens
  misc_RNA (1)...(19): siRNA sense strand
gagaacuggaauugcagaa

SEQ ID NO: 2561800 - RNA, 19 nt, Homo sapiens
  misc_RNA (1)...(19): siRNA sense strand
uggaauugcagaaaucaaa

SEQ ID NO: 2561801 - RNA, 19 nt, Homo sapiens
  misc_RNA (1)...(19): siRNA sense strand
gcagaaaucaaacggcaga

SEQ ID NO: 2561802 - RNA, 19 nt, Homo sapiens
  misc_RNA (1)...(19): siRNA sense strand
gugcugaauuaaacaccaa

SEQ ID NO: 2561803 - RNA, 19 nt, Homo sapiens
  misc_RNA (1)...(19): siRNA sense strand
aaaugcuaacugugagaaa

SEQ ID NO: 2561804 - RNA, 19 nt, Homo sapiens
  misc_RNA (1)...(19): siRNA sense strand
cauaagauggugucccaaa

SEQ ID NO: 2561805 - RNA, 19 nt, Homo sapiens
  misc_RNA (1)...(19): siRNA sense strand
gcagccauuucuaggacua

SEQ ID NO: 2561806 - RNA, 19 nt, Homo sapiens
  misc_RNA (1)...(19): siRNA sense strand
ugauaacaauauugcccaa

SEQ ID NO: 2561807 - RNA, 19 nt, Homo sapiens
  misc_RNA (1)...(19): siRNA sense strand
ggaagugaaaacaguguaa

SEQ ID NO: 2561808 - RNA, 19 nt, Homo sapiens
  misc_RNA (1)...(19): siRNA sense strand
ccaaagagggaauucuaau

SEQ ID NO: 2561809 - RNA, 19 nt, Homo sapiens
  misc_RNA (1)...(19): siRNA sense strand
aguuggaugucaugcacaa

SEQ ID NO: 2561810 - RNA, 19 nt, Homo sapiens
  misc_RNA (1)...(19): siRNA sense strand
cauaagagaaacucaauca

SEQ ID NO: 2561811 - RNA, 19 nt, Homo sapiens
  misc_RNA (1)...(19): siRNA sense strand
cauccaagucugagaauuc

SEQ ID NO: 2561812 - RNA, 19 nt, Homo sapiens
  misc_RNA (1)...(19): siRNA sense strand
gguuccaagucaucagauu

SEQ ID NO: 2561813 - RNA, 19 nt, Homo sapiens
  misc_RNA (1)...(19): siRNA sense strand
cagcagagauagaugcauc

SEQ ID NO: 2561814 - RNA, 19 nt, Homo sapiens
  misc_RNA (1)...(19): siRNA sense strand
gcgaagugagaaaucuaua

SEQ ID NO: 2561815 - RNA, 19 nt, Homo sapiens
  misc_RNA (1)...(19): siRNA sense strand
gcccaaguaccuaagcaaa

SEQ ID NO: 2561816 - RNA, 19 nt, Homo sapiens
  misc_RNA (1)...(19): siRNA sense strand
cccaaaauacugaugauaa

SEQ ID NO: 2561817 - RNA, 19 nt, Homo sapiens
  misc_RNA (1)...(19): siRNA sense strand
gguuggacagaauggaaau

SEQ ID NO: 2561818 - RNA, 19 nt, Homo sapiens
  misc_RNA (1)...(19): siRNA sense strand
ggacuaagaaacaagccuu

SEQ ID NO: 2561819 - RNA, 19 nt, Homo sapiens
  misc_RNA (1)...(19): siRNA sense strand
gcucaggggcaggggaaaa

SEQ ID NO: 2561820 - RNA, 19 nt, Homo sapiens
  misc_RNA (1)...(19): siRNA sense strand
ugaugaauuccuaggacuu

SEQ ID NO: 2561821 - RNA, 19 nt, Homo sapiens
  misc_RNA (1)...(19): siRNA sense strand
ugaauuaugcagcgaugua

SEQ ID NO: 2561822 - RNA, 19 nt, Homo sapiens
  misc_RNA (1)...(19): siRNA sense strand
ccgccaacauccaggcuga

SEQ ID NO: 2561823 - RNA, 19 nt, Homo sapiens
  misc_RNA (1)...(19): siRNA sense strand
uguacaacaaggagaaguu

SEQ ID NO: 2561824 - RNA, 19 nt, Homo sapiens
  misc_RNA (1)...(19): siRNA sense strand
agaaagaacucgcugggaa

SEQ ID NO: 2561825 - RNA, 19 nt, Homo sapiens
  misc_RNA (1)...(19): siRNA sense strand
caucaugaggagugagaau

SEQ ID NO: 2561826 - RNA, 19 nt, Homo sapiens
  misc_RNA (1)...(19): siRNA sense strand
gggaaaguaaagagaacau

SEQ ID NO: 2561827 - RNA, 19 nt, Homo sapiens
  misc_RNA (1)...(19): siRNA sense strand
aagcaagagaagaaagauu

SEQ ID NO: 2561828 - RNA, 19 nt, Homo sapiens
  misc_RNA (1)...(19): siRNA sense strand
gcuuggagacuuugggcua

SEQ ID NO: 2561829 - RNA, 19 nt, Homo sapiens
  misc_RNA (1)...(19): siRNA sense strand
gcuuuguguucgugagaga

SEQ ID NO: 2561830 - RNA, 19 nt, Homo sapiens
  misc_RNA (1)...(19): siRNA sense strand
gugagaauucugagaguca

SEQ ID NO: 2561831 - RNA, 19 nt, Homo sapiens
  misc_RNA (1)...(19): siRNA sense strand
ggaggaagagugauggcaa

SEQ ID NO: 2561832 - RNA, 19 nt, Homo sapiens
  misc_RNA (1)...(19): siRNA sense strand
agcugaaacugaaggaaau

SEQ ID NO: 2561833 - RNA, 19 nt, Homo sapiens
  misc_RNA (1)...(19): siRNA sense strand
gcagacagauccugggcau

SEQ ID NO: 2561834 - RNA, 19 nt, Homo sapiens
  misc_RNA (1)...(19): siRNA sense strand
gagaagaaagauuggagca

SEQ ID NO: 2561835 - RNA, 19 nt, Homo sapiens
  misc_RNA (1)...(19): siRNA sense strand
acgaagugaugguggucau

SEQ ID NO: 2561836 - RNA, 19 nt, Homo sapiens
  misc_RNA (1)...(19): siRNA sense strand
agagacuagcagaggacaa

SEQ ID NO: 2561837 - RNA, 19 nt, Homo sapiens
  misc_RNA (1)...(19): siRNA sense strand
gcgacaauuaggagagcca

SEQ ID NO: 2561838 - RNA, 19 nt, Homo sapiens
  misc_RNA (1)...(19): siRNA sense strand
ggaaaaucagagaaggcaa

SEQ ID NO: 2561839 - RNA, 19 nt, Homo sapiens
  misc_RNA (1)...(19): siRNA sense strand
cuguaugaguuaugugcau

SEQ ID NO: 2561840 - RNA, 19 nt, Homo sapiens
  misc_RNA (1)...(19): siRNA sense strand
gaagaaagauuggagcaga

SEQ ID NO: 2561841 - RNA, 19 nt, Homo sapiens
  misc_RNA (1)...(19): siRNA sense strand
agugcaaggaccugaagaa

SEQ ID NO: 2561842 - RNA, 19 nt, Homo sapiens
  misc_RNA (1)...(19): siRNA sense strand
ggaaccaaggaaaggcaau

SEQ ID NO: 2561843 - RNA, 19 nt, Homo sapiens
  misc_RNA (1)...(19): siRNA sense strand
agaacuacagcuugcuaaa

SEQ ID NO: 2561844 - RNA, 19 nt, Homo sapiens
  misc_RNA (1)...(19): siRNA sense strand
aaggaaugccacagacgaa

SEQ ID NO: 2561845 - RNA, 19 nt, Homo sapiens
  misc_RNA (1)...(19): siRNA sense strand
caauuaggagagccagaaa

SEQ ID NO: 2561846 - RNA, 19 nt, Homo sapiens
  misc_RNA (1)...(19): siRNA sense strand
gaaggcaaauucaggcgaa

SEQ ID NO: 2561847 - RNA, 19 nt, Homo sapiens
  misc_RNA (1)...(19): siRNA sense strand
uuggaaagaacuugacuau

SEQ ID NO: 2561848 - RNA, 19 nt, Homo sapiens
  misc_RNA (1)...(19): siRNA sense strand
agacgagcaaagaagaaau

SEQ ID NO: 2561849 - RNA, 19 nt, Homo sapiens
  misc_RNA (1)...(19): siRNA sense strand
cuguauugagugagcugaa

SEQ ID NO: 2561850 - RNA, 19 nt, Homo sapiens
  misc_RNA (1)...(19): siRNA sense strand
ggacaaacuggcuagagca

SEQ ID NO: 2561851 - RNA, 19 nt, Homo sapiens
  misc_RNA (1)...(19): siRNA sense strand
gaggaagagugauggcaag

SEQ ID NO: 2561852 - RNA, 19 nt, Homo sapiens
  misc_RNA (1)...(19): siRNA sense strand
cagacgagcaaagaagaaa

SEQ ID NO: 2561853 - RNA, 19 nt, Homo sapiens
  misc_RNA (1)...(19): siRNA sense strand
cguuacuaugaucggauua

SEQ ID NO: 2561854 - RNA, 19 nt, Homo sapiens
  misc_RNA (1)...(19): siRNA sense strand
aggaaaggcaauacuuaga

SEQ ID NO: 2561855 - RNA, 19 nt, Homo sapiens
  misc_RNA (1)...(19): siRNA sense strand
ccacagacgaagugauggu

SEQ ID NO: 2561856 - RNA, 19 nt, Homo sapiens
  misc_RNA (1)...(19): siRNA sense strand
uagcagauuugguugcaga

SEQ ID NO: 2561857 - RNA, 19 nt, Homo sapiens
  misc_RNA (1)...(19): siRNA sense strand
guuacaggagcgagagcga

SEQ ID NO: 2561858 - RNA, 19 nt, Homo sapiens
  misc_RNA (1)...(19): siRNA sense strand
aguaaagagaacaucauga

SEQ ID NO: 2561859 - RNA, 19 nt, Homo sapiens
  misc_RNA (1)...(19): siRNA sense strand
cugcuugcuguaugaguua

SEQ ID NO: 2561860 - RNA, 19 nt, Homo sapiens
  misc_RNA (1)...(19): siRNA sense strand
acucugaugaauugaauga

SEQ ID NO: 2561861 - RNA, 19 nt, Homo sapiens
  misc_RNA (1)...(19): siRNA sense strand
gacaauuaggagagccaga

SEQ ID NO: 2561862 - RNA, 19 nt, Homo sapiens
  misc_RNA (1)...(19): siRNA sense strand
gcagaggacaaacuggcua

SEQ ID NO: 2561863 - RNA, 19 nt, Homo sapiens
  misc_RNA (1)...(19): siRNA sense strand
cugaacaaaugaaucgcau

SEQ ID NO: 2561864 - RNA, 19 nt, Homo sapiens
  misc_RNA (1)...(19): siRNA sense strand
ugcaaggaccugaagaaaa

SEQ ID NO: 2561865 - RNA, 19 nt, Homo sapiens
  misc_RNA (1)...(19): siRNA sense strand
agaagaaaugggcuggaau

SEQ ID NO: 2561866 - RNA, 19 nt, Homo sapiens
  misc_RNA (1)...(19): siRNA sense strand
caaaguucuacgugcgaga

SEQ ID NO: 2561867 - RNA, 19 nt, Homo sapiens
  misc_RNA (1)...(19): siRNA sense strand
ggagauuggcacaggacca

SEQ ID NO: 2561868 - RNA, 19 nt, Homo sapiens
  misc_RNA (1)...(19): siRNA sense strand
aggcagacguuguggcgga

SEQ ID NO: 2561869 - RNA, 19 nt, Homo sapiens
  misc_RNA (1)...(19): siRNA sense strand
ggagaagggcaguggcugu

SEQ ID NO: 2561870 - RNA, 19 nt, Homo sapiens
  misc_RNA (1)...(19): siRNA sense strand
ccacauggagauuggcaca

SEQ ID NO: 2561871 - RNA, 19 nt, Homo sapiens
  misc_RNA (1)...(19): siRNA sense strand
aagaaauggaagauggagu

SEQ ID NO: 2561872 - RNA, 19 nt, Homo sapiens
  misc_RNA (1)...(19): siRNA sense strand
cagacguuguggcggagaa

SEQ ID NO: 2561873 - RNA, 19 nt, Homo sapiens
  misc_RNA (1)...(19): siRNA sense strand
augacauugaagagaggaa

SEQ ID NO: 2561874 - RNA, 19 nt, Homo sapiens
  misc_RNA (1)...(19): siRNA sense strand
accagggagcgaugggaaa

SEQ ID NO: 2561875 - RNA, 19 nt, Homo sapiens
  misc_RNA (1)...(19): siRNA sense strand
guacuaaagaagaugcagu

SEQ ID NO: 2561876 - RNA, 19 nt, Homo sapiens
  misc_RNA (1)...(19): siRNA sense strand
uggcacaggaccagacuca

SEQ ID NO: 2561877 - RNA, 19 nt, Homo sapiens
  misc_RNA (1)...(19): siRNA sense strand
acaaagaaauggaagaugg

SEQ ID NO: 2561878 - RNA, 19 nt, Homo sapiens
  misc_RNA (1)...(19): siRNA sense strand
cuggaguaaacaacacaaa

SEQ ID NO: 2561879 - RNA, 19 nt, Homo sapiens
  misc_RNA (1)...(19): siRNA sense strand
aacacaaagaaauggaaga

SEQ ID NO: 2561880 - RNA, 19 nt, Homo sapiens
  misc_RNA (1)...(19): siRNA sense strand
gcaaacuuuucuuggaaca

SEQ ID NO: 2561881 - RNA, 19 nt, Homo sapiens
  misc_RNA (1)...(19): siRNA sense strand
ccuaagugcaagaaagaau

SEQ ID NO: 2561882 - RNA, 19 nt, Homo sapiens
  misc_RNA (1)...(19): siRNA sense strand
ggaaaggcgguguugggaa

SEQ ID NO: 2561883 - RNA, 19 nt, Homo sapiens
  misc_RNA (1)...(19): siRNA sense strand
cggcuauagaggaaaucaa

SEQ ID NO: 2561884 - RNA, 19 nt, Homo sapiens
  misc_RNA (1)...(19): siRNA sense strand
gggugaugucagugggcuu

SEQ ID NO: 2561885 - RNA, 19 nt, Homo sapiens
  misc_RNA (1)...(19): siRNA sense strand
ggaugaaaacacacagauu

SEQ ID NO: 2561886 - RNA, 19 nt, Homo sapiens
  misc_RNA (1)...(19): siRNA sense strand
cagaaguauaauucagaga

SEQ ID NO: 2561887 - RNA, 19 nt, Homo sapiens
  misc_RNA (1)...(19): siRNA sense strand
ccaccuugcccauggccua

SEQ ID NO: 2561888 - RNA, 19 nt, Homo sapiens
  misc_RNA (1)...(19): siRNA sense strand
uggaaggagagcagguuca

SEQ ID NO: 2561889 - RNA, 19 nt, Homo sapiens
  misc_RNA (1)...(19): siRNA sense strand
uaaugggauuggaaggaga

SEQ ID NO: 2561890 - RNA, 19 nt, Homo sapiens
  misc_RNA (1)...(19): siRNA sense strand
cuugguauugucugggaaa

SEQ ID NO: 2561891 - RNA, 19 nt, Homo sapiens
  misc_RNA (1)...(19): siRNA sense strand
agucaaaagaagagaaccu

SEQ ID NO: 2561892 - RNA, 19 nt, Homo sapiens
  misc_RNA (1)...(19): siRNA sense strand
caucgauauaugugggcca

SEQ ID NO: 2561893 - RNA, 19 nt, Homo sapiens
  misc_RNA (1)...(19): siRNA sense strand
gcaaaagggcuaagggauc

SEQ ID NO: 2561894 - RNA, 19 nt, Homo sapiens
  misc_RNA (1)...(19): siRNA sense strand
ccgcaaugaagcuuggaga

SEQ ID NO: 2561895 - RNA, 19 nt, Homo sapiens
  misc_RNA (1)...(19): siRNA sense strand
agacaauggaagauagaag

SEQ ID NO: 2561896 - RNA, 19 nt, Homo sapiens
  misc_RNA (1)...(19): siRNA sense strand
auggaagauagaagggaca

SEQ ID NO: 2561897 - RNA, 19 nt, Homo sapiens
  misc_RNA (1)...(19): siRNA sense strand
accuggagucccugaauaa

SEQ ID NO: 2561898 - RNA, 19 nt, Homo sapiens
  misc_RNA (1)...(19): siRNA sense strand
ggagauacauggguggcuu

SEQ ID NO: 2561899 - RNA, 19 nt, Homo sapiens
  misc_RNA (1)...(19): siRNA sense strand
ggucagagagugagccaga

SEQ ID NO: 2561900 - RNA, 19 nt, Homo sapiens
  misc_RNA (1)...(19): siRNA sense strand
caacaacacaauauggcaa

SEQ ID NO: 2561901 - RNA, 19 nt, Homo sapiens
  misc_RNA (1)...(19): siRNA sense strand
agucaagauguuaaagcaa

SEQ ID NO: 2561902 - RNA, 19 nt, Homo sapiens
  misc_RNA (1)...(19): siRNA sense strand
gaucagaaguccuggcaag

SEQ ID NO: 2561903 - RNA, 19 nt, Homo sapiens
  misc_RNA (1)...(19): siRNA sense strand
cacgaaaguaugaugcaaa

SEQ ID NO: 2561904 - RNA, 19 nt, Homo sapiens
  misc_RNA (1)...(19): siRNA sense strand
agggaagaaagaaggaaaa

SEQ ID NO: 2561905 - RNA, 19 nt, Homo sapiens
  misc_RNA (1)...(19): siRNA sense strand
acgaaaguaugaugcaaaa

SEQ ID NO: 2561906 - RNA, 19 nt, Homo sapiens
  misc_RNA (1)...(19): siRNA sense strand
agucugauaaggaggagaa

SEQ ID NO: 2561907 - RNA, 19 nt, Homo sapiens
  misc_RNA (1)...(19): siRNA sense strand
ccaucaagacugaagcaga

SEQ ID NO: 2561908 - RNA, 19 nt, Homo sapiens
  misc_RNA (1)...(19): siRNA sense strand
ggaagugacaccagcccua

SEQ ID NO: 2561909 - RNA, 19 nt, Homo sapiens
  misc_RNA (1)...(19): siRNA sense strand
agugagaaccgaaagaaaa

SEQ ID NO: 2561910 - RNA, 19 nt, Homo sapiens
  misc_RNA (1)...(19): siRNA sense strand
gccaauauugaaaggaaga

SEQ ID NO: 2561911 - RNA, 19 nt, Homo sapiens
  misc_RNA (1)...(19): siRNA sense strand
uggcagucuuucaggguca

SEQ ID NO: 2561912 - RNA, 19 nt, Homo sapiens
  misc_RNA (1)...(19): siRNA sense strand
uguuaaagcaacuguuaga

SEQ ID NO: 2561913 - RNA, 19 nt, Homo sapiens
  misc_RNA (1)...(19): siRNA sense strand
aagaagaucaaguuagaca

SEQ ID NO: 2561914 - RNA, 19 nt, Homo sapiens
  misc_RNA (1)...(19): siRNA sense strand
uuucagggucagagaguga

SEQ ID NO: 2561915 - RNA, 19 nt, Homo sapiens
  misc_RNA (1)...(19): siRNA sense strand
agagagugagccagaagaa

SEQ ID NO: 2561916 - RNA, 19 nt, Homo sapiens
  misc_RNA (1)...(19): siRNA sense strand
acauucgacaugaaagaaa

SEQ ID NO: 2561917 - RNA, 19 nt, Homo sapiens
  misc_RNA (1)...(19): siRNA sense strand
ucagaagccaagagugaga

SEQ ID NO: 2561918 - RNA, 19 nt, Homo sapiens
  misc_RNA (1)...(19): siRNA sense strand
ccuucaacccugcaguuaa

SEQ ID NO: 2561919 - RNA, 19 nt, Homo sapiens
  misc_RNA (1)...(19): siRNA sense strand
uugaaaggaagaagaaguu

SEQ ID NO: 2561920 - RNA, 19 nt, Homo sapiens
  misc_RNA (1)...(19): siRNA sense strand
auugaaaggaagaagaagu

SEQ ID NO: 2561921 - RNA, 19 nt, Homo sapiens
  misc_RNA (1)...(19): siRNA sense strand
acacaauauggcaagauga

SEQ ID NO: 2561922 - RNA, 19 nt, Homo sapiens
  misc_RNA (1)...(19): siRNA sense strand
aagcagacguuuuggcaga

SEQ ID NO: 2561923 - RNA, 19 nt, Homo sapiens
  misc_RNA (1)...(19): siRNA sense strand
caucaagacugaagcagac

SEQ ID NO: 2561924 - RNA, 19 nt, Homo sapiens
  misc_RNA (1)...(19): siRNA sense strand
ggccaauauugaaaggaag

SEQ ID NO: 2561925 - RNA, 19 nt, Homo sapiens
  misc_RNA (1)...(19): siRNA sense strand
ugcgaaaaguaaagaugua

SEQ ID NO: 2561926 - RNA, 19 nt, Homo sapiens
  misc_RNA (1)...(19): siRNA sense strand
uccuaagaguccaagucaa

SEQ ID NO: 2561927 - RNA, 19 nt, Homo sapiens
  misc_RNA (1)...(19): siRNA sense strand
ugguguaauaugaagagua

SEQ ID NO: 2561928 - RNA, 19 nt, Homo sapiens
  misc_RNA (1)...(19): siRNA sense strand
acaacauagacgaggauau

SEQ ID NO: 2561929 - RNA, 19 nt, Homo sapiens
  misc_RNA (1)...(19): siRNA sense strand
gcuuggagcaggagcgaga

SEQ ID NO: 2561930 - RNA, 19 nt, Homo sapiens
  misc_RNA (1)...(19): siRNA sense strand
uggcagagcucaagcacga

SEQ ID NO: 2561931 - RNA, 19 nt, Homo sapiens
  misc_RNA (1)...(19): siRNA sense strand
aggaacagaagaaggccaa

SEQ ID NO: 2561932 - RNA, 19 nt, Homo sapiens
  misc_RNA (1)...(19): siRNA sense strand
aagaggaaggagaaggaau

SEQ ID NO: 2561933 - RNA, 19 nt, Homo sapiens
  misc_RNA (1)...(19): siRNA sense strand
acgaggauauggaggagga

SEQ ID NO: 2561934 - RNA, 19 nt, Homo sapiens
  misc_RNA (1)...(19): siRNA sense strand
cccugaagaggaaggagaa

SEQ ID NO: 2561935 - RNA, 19 nt, Homo sapiens
  misc_RNA (1)...(19): siRNA sense strand
agucaaauccagugaacag

SEQ ID NO: 2561936 - RNA, 19 nt, Homo sapiens
  misc_RNA (1)...(19): siRNA sense strand
gagaagaacaggagggccc

SEQ ID NO: 2561937 - RNA, 19 nt, Homo sapiens
  misc_RNA (1)...(19): siRNA sense strand
aggacaacauagacgagga

SEQ ID NO: 2561938 - RNA, 19 nt, Homo sapiens
  misc_RNA (1)...(19): siRNA sense strand
aggagaaggaauaugagca

SEQ ID NO: 2561939 - RNA, 19 nt, Homo sapiens
  misc_RNA (1)...(19): siRNA sense strand
ccaccuaagcugagccauc

SEQ ID NO: 2561940 - RNA, 19 nt, Homo sapiens
  misc_RNA (1)...(19): siRNA sense strand
gagaauggcaccagccuga

SEQ ID NO: 2561941 - RNA, 19 nt, Homo sapiens
  misc_RNA (1)...(19): siRNA sense strand
uaguaaaguccaagacgga

SEQ ID NO: 2561942 - RNA, 19 nt, Homo sapiens
  misc_RNA (1)...(19): siRNA sense strand
aggagaucguccagcugaa

SEQ ID NO: 2561943 - RNA, 19 nt, Homo sapiens
  misc_RNA (1)...(19): siRNA sense strand
ccucagagaacgccagcau

SEQ ID NO: 2561944 - RNA, 19 nt, Homo sapiens
  misc_RNA (1)...(19): siRNA sense strand
uggagaagcagaaggcgga

SEQ ID NO: 2561945 - RNA, 19 nt, Homo sapiens
  misc_RNA (1)...(19): siRNA sense strand
cagaaggaggagcuggaga

SEQ ID NO: 2561946 - RNA, 19 nt, Homo sapiens
  misc_RNA (1)...(19): siRNA sense strand
gcgucaucacaauaguaaa

SEQ ID NO: 2561947 - RNA, 19 nt, Homo sapiens
  misc_RNA (1)...(19): siRNA sense strand
uggagaagcuggcgcguga

SEQ ID NO: 2561948 - RNA, 19 nt, Homo sapiens
  misc_RNA (1)...(19): siRNA sense strand
aggcauuaaaggucaagaa

SEQ ID NO: 2561949 - RNA, 19 nt, Homo sapiens
  misc_RNA (1)...(19): siRNA sense strand
cgacuaaucccaaaccgaa

SEQ ID NO: 2561950 - RNA, 19 nt, Homo sapiens
  misc_RNA (1)...(19): siRNA sense strand
gcaucaagcgggugacgca

SEQ ID NO: 2561951 - RNA, 19 nt, Homo sapiens
  misc_RNA (1)...(19): siRNA sense strand
aauaaggcauuaaagguca

SEQ ID NO: 2561952 - RNA, 19 nt, Homo sapiens
  misc_RNA (1)...(19): siRNA sense strand
gaauaaggcauuaaagguc

SEQ ID NO: 2561953 - RNA, 19 nt, Homo sapiens
  misc_RNA (1)...(19): siRNA sense strand
ggauaaggcacaugcgaaa

SEQ ID NO: 2561954 - RNA, 19 nt, Homo sapiens
  misc_RNA (1)...(19): siRNA sense strand
gggaagaagcugaacgauu

SEQ ID NO: 2561955 - RNA, 19 nt, Homo sapiens
  misc_RNA (1)...(19): siRNA sense strand
cgguaaaugagcugagaau

SEQ ID NO: 2561956 - RNA, 19 nt, Homo sapiens
  misc_RNA (1)...(19): siRNA sense strand
gggaugagaaugagccaaa

SEQ ID NO: 2561957 - RNA, 19 nt, Homo sapiens
  misc_RNA (1)...(19): siRNA sense strand
gugaugaaacugaggacaa

SEQ ID NO: 2561958 - RNA, 19 nt, Homo sapiens
  misc_RNA (1)...(19): siRNA sense strand
cuggaaagucuguuggaaa

SEQ ID NO: 2561959 - RNA, 19 nt, Homo sapiens
  misc_RNA (1)...(19): siRNA sense strand
aagaauaggcauauggcaa

SEQ ID NO: 2561960 - RNA, 19 nt, Homo sapiens
  misc_RNA (1)...(19): siRNA sense strand
ggcugaaacuaaugggcaa

SEQ ID NO: 2561961 - RNA, 19 nt, Homo sapiens
  misc_RNA (1)...(19): siRNA sense strand
gagaugaaaaggagaauaa

SEQ ID NO: 2561962 - RNA, 19 nt, Homo sapiens
  misc_RNA (1)...(19): siRNA sense strand
gcuuaucgacuuagguaaa

SEQ ID NO: 2561963 - RNA, 19 nt, Homo sapiens
  misc_RNA (1)...(19): siRNA sense strand
ugugaagauaauugggaaa

SEQ ID NO: 2561964 - RNA, 19 nt, Homo sapiens
  misc_RNA (1)...(19): siRNA sense strand
uggaagagacauggagaaa

SEQ ID NO: 2561965 - RNA, 19 nt, Homo sapiens
  misc_RNA (1)...(19): siRNA sense strand
ggagaguauaacugggcaa

SEQ ID NO: 2561966 - RNA, 19 nt, Homo sapiens
  misc_RNA (1)...(19): siRNA sense strand
agaauuagcgaguggccaa

SEQ ID NO: 2561967 - RNA, 19 nt, Homo sapiens
  misc_RNA (1)...(19): siRNA sense strand
cuucagaaacuguaaagua

SEQ ID NO: 2561968 - RNA, 19 nt, Homo sapiens
  misc_RNA (1)...(19): siRNA sense strand
uaacuuuguucuugagcaa

SEQ ID NO: 2561969 - RNA, 19 nt, Homo sapiens
  misc_RNA (1)...(19): siRNA sense strand
uggaagaguugucugcaaa

SEQ ID NO: 2561970 - RNA, 19 nt, Homo sapiens
  misc_RNA (1)...(19): siRNA sense strand
ccauaaaagaugaagauga

SEQ ID NO: 2561971 - RNA, 19 nt, Homo sapiens
  misc_RNA (1)...(19): siRNA sense strand
gggaaaagaacgagcaguu

SEQ ID NO: 2561972 - RNA, 19 nt, Homo sapiens
  misc_RNA (1)...(19): siRNA sense strand
uguaaaacgugauggauuu

SEQ ID NO: 2561973 - RNA, 19 nt, Homo sapiens
  misc_RNA (1)...(19): siRNA sense strand
uguuaaggauggugcuauu

SEQ ID NO: 2561974 - RNA, 19 nt, Homo sapiens
  misc_RNA (1)...(19): siRNA sense strand
gggauaaggcacaugcgaa

SEQ ID NO: 2561975 - RNA, 19 nt, Homo sapiens
  misc_RNA (1)...(19): siRNA sense strand
ggaaaacaguugauugcaa

SEQ ID NO: 2561976 - RNA, 19 nt, Homo sapiens
  misc_RNA (1)...(19): siRNA sense strand
uugaaaugguugacuacaa

SEQ ID NO: 2561977 - RNA, 19 nt, Homo sapiens
  misc_RNA (1)...(19): siRNA sense strand
ucaaagaagaaguguggau

SEQ ID NO: 2561978 - RNA, 19 nt, Homo sapiens
  misc_RNA (1)...(19): siRNA sense strand
uuacaaggauccuggcaau

SEQ ID NO: 2561979 - RNA, 19 nt, Homo sapiens
  misc_RNA (1)...(19): siRNA sense strand
gugcaagaauggaugcuga

SEQ ID NO: 2561980 - RNA, 19 nt, Homo sapiens
  misc_RNA (1)...(19): siRNA sense strand
acugacggcuucugggaua

SEQ ID NO: 2561981 - RNA, 19 nt, Homo sapiens
  misc_RNA (1)...(19): siRNA sense strand
agugcaauguucugagcaa

SEQ ID NO: 2561982 - RNA, 19 nt, Homo sapiens
  misc_RNA (1)...(19): siRNA sense strand
gagaguuuggcuuggauua

SEQ ID NO: 2561983 - RNA, 19 nt, Homo sapiens
  misc_RNA (1)...(19): siRNA sense strand
cuggaagagacauggagaa

SEQ ID NO: 2561984 - RNA, 19 nt, Homo sapiens
  misc_RNA (1)...(19): siRNA sense strand
agaaagaggaacugggaag

SEQ ID NO: 2561985 - RNA, 19 nt, Homo sapiens
  misc_RNA (1)...(19): siRNA sense strand
ugugacauuuggagaggaa

SEQ ID NO: 2561986 - RNA, 19 nt, Homo sapiens
  misc_RNA (1)...(19): siRNA sense strand
ugacuauaucccauggaaa

SEQ ID NO: 2561987 - RNA, 19 nt, Homo sapiens
  misc_RNA (1)...(19): siRNA sense strand
agaauaaauuugugagcag

SEQ ID NO: 2561988 - RNA, 19 nt, Homo sapiens
  misc_RNA (1)...(19): siRNA sense strand
ucaccuaaacuaugaagaa

SEQ ID NO: 2561989 - RNA, 19 nt, Homo sapiens
  misc_RNA (1)...(19): siRNA sense strand
uugcagaaugcuucagaaa

SEQ ID NO: 2561990 - RNA, 19 nt, Homo sapiens
  misc_RNA (1)...(19): siRNA sense strand
ucugaguauucgagaugaa

SEQ ID NO: 2561991 - RNA, 19 nt, Homo sapiens
  misc_RNA (1)...(19): siRNA sense strand
gguaugaagcauuaaacau

SEQ ID NO: 2561992 - RNA, 19 nt, Homo sapiens
  misc_RNA (1)...(19): siRNA sense strand
agugaaugaagaugagauu

SEQ ID NO: 2561993 - RNA, 19 nt, Homo sapiens
  misc_RNA (1)...(19): siRNA sense strand
acucgaagacuguguagua

SEQ ID NO: 2561994 - RNA, 19 nt, Homo sapiens
  misc_RNA (1)...(19): siRNA sense strand
gcugguaaaugaaaguaau

SEQ ID NO: 2561995 - RNA, 19 nt, Homo sapiens
  misc_RNA (1)...(19): siRNA sense strand
ccugagagauguagauucu

SEQ ID NO: 2561996 - RNA, 19 nt, Homo sapiens
  misc_RNA (1)...(19): siRNA sense strand
caaaugaguuucagcagga

SEQ ID NO: 2561997 - RNA, 19 nt, Homo sapiens
  misc_RNA (1)...(19): siRNA sense strand
gauuaugacaucagagacu

SEQ ID NO: 2561998 - RNA, 19 nt, Homo sapiens
  misc_RNA (1)...(19): siRNA sense strand
uuucauaggccauggcgaa

SEQ ID NO: 2561999 - RNA, 19 nt, Homo sapiens
  misc_RNA (1)...(19): siRNA sense strand
gagaaauacagcccagauu

SEQ ID NO: 2562000 - RNA, 19 nt, Homo sapiens
  misc_RNA (1)...(19): siRNA sense strand
cuaaauacuccguggauac

SEQ ID NO: 2562001 - RNA, 19 nt, Homo sapiens
  misc_RNA (1)...(19): siRNA sense strand
gaggacaaguuauggaagu

SEQ ID NO: 2562002 - RNA, 19 nt, Homo sapiens
  misc_RNA (1)...(19): siRNA sense strand
gagcugauuuacugagcau

SEQ ID NO: 2562003 - RNA, 19 nt, Homo sapiens
  misc_RNA (1)...(19): siRNA sense strand
aagugguggauaagaauua

SEQ ID NO: 2562004 - RNA, 19 nt, Homo sapiens
  misc_RNA (1)...(19): siRNA sense strand
ccaaucaugugaggagaaa

SEQ ID NO: 2562005 - RNA, 19 nt, Homo sapiens
  misc_RNA (1)...(19): siRNA sense strand
cuugaaugggugugccaaa

SEQ ID NO: 2562006 - RNA, 19 nt, Homo sapiens
  misc_RNA (1)...(19): siRNA sense strand
gcugagaauaccagaaaau

SEQ ID NO: 2562007 - RNA, 19 nt, Homo sapiens
  misc_RNA (1)...(19): siRNA sense strand
gggagugucugaaaaguaa

SEQ ID NO: 2562008 - RNA, 19 nt, Homo sapiens
  misc_RNA (1)...(19): siRNA sense strand
uuucagaacuguugcuaca

SEQ ID NO: 2562009 - RNA, 19 nt, Homo sapiens
  misc_RNA (1)...(19): siRNA sense strand
caucaacagugcugcugaa

SEQ ID NO: 2562010 - RNA, 19 nt, Homo sapiens
  misc_RNA (1)...(19): siRNA sense strand
gaauuguaagaaagaggaa

SEQ ID NO: 2562011 - RNA, 19 nt, Homo sapiens
  misc_RNA (1)...(19): siRNA sense strand
ccagauugaacaagacuuu

SEQ ID NO: 2562012 - RNA, 19 nt, Homo sapiens
  misc_RNA (1)...(19): siRNA sense strand
acugauggauucuggaaaa

SEQ ID NO: 2562013 - RNA, 19 nt, Homo sapiens
  misc_RNA (1)...(19): siRNA sense strand
acuaaaugccagaaacuga

SEQ ID NO: 2562014 - RNA, 19 nt, Homo sapiens
  misc_RNA (1)...(19): siRNA sense strand
ugcaagagaaagggagaaa

SEQ ID NO: 2562015 - RNA, 19 nt, Homo sapiens
  misc_RNA (1)...(19): siRNA sense strand
uuggaaagugggaggugaa

SEQ ID NO: 2562016 - RNA, 19 nt, Homo sapiens
  misc_RNA (1)...(19): siRNA sense strand
cuacuauuaucaugccaaa

SEQ ID NO: 2562017 - RNA, 19 nt, Homo sapiens
  misc_RNA (1)...(19): siRNA sense strand
ggcaaaaucagcagggaaa

SEQ ID NO: 2562018 - RNA, 19 nt, Homo sapiens
  misc_RNA (1)...(19): siRNA sense strand
acgcaguggcuguguauca

SEQ ID NO: 2562019 - RNA, 19 nt, Homo sapiens
  misc_RNA (1)...(19): siRNA sense strand
uuguaauaccucugcagua

SEQ ID NO: 2562020 - RNA, 19 nt, Homo sapiens
  misc_RNA (1)...(19): siRNA sense strand
uggcaaaaucagcagggaa

SEQ ID NO: 2562021 - RNA, 19 nt, Homo sapiens
  misc_RNA (1)...(19): siRNA sense strand
agcuauuugcugagggaca

SEQ ID NO: 2562022 - RNA, 19 nt, Homo sapiens
  misc_RNA (1)...(19): siRNA sense strand
acacaagguacuacaggga

SEQ ID NO: 2562023 - RNA, 19 nt, Homo sapiens
  misc_RNA (1)...(19): siRNA sense strand
aggaaugucucgagguaaa

SEQ ID NO: 2562024 - RNA, 19 nt, Homo sapiens
  misc_RNA (1)...(19): siRNA sense strand
cggccuaacuauugauuau

SEQ ID NO: 2562025 - RNA, 19 nt, Homo sapiens
  misc_RNA (1)...(19): siRNA sense strand
caacaaaaccaguggccaa

SEQ ID NO: 2562026 - RNA, 19 nt, Homo sapiens
  misc_RNA (1)...(19): siRNA sense strand
cugcaaagauggugccaca

SEQ ID NO: 2562027 - RNA, 19 nt, Homo sapiens
  misc_RNA (1)...(19): siRNA sense strand
ggguagaaccaaaguccaa

SEQ ID NO: 2562028 - RNA, 19 nt, Homo sapiens
  misc_RNA (1)...(19): siRNA sense strand
acaaaucagaugagaagaa

SEQ ID NO: 2562029 - RNA, 19 nt, Homo sapiens
  misc_RNA (1)...(19): siRNA sense strand
ccgaaaggcacaagaagau

SEQ ID NO: 2562030 - RNA, 19 nt, Homo sapiens
  misc_RNA (1)...(19): siRNA sense strand
gagaagugccaaagauaga

SEQ ID NO: 2562031 - RNA, 19 nt, Homo sapiens
  misc_RNA (1)...(19): siRNA sense strand
gaguacuaguggaagacaa

SEQ ID NO: 2562032 - RNA, 19 nt, Homo sapiens
  misc_RNA (1)...(19): siRNA sense strand
ggaucaacccagagcuauu

SEQ ID NO: 2562033 - RNA, 19 nt, Homo sapiens
  misc_RNA (1)...(19): siRNA sense strand
ugugguaaacccagagaaa

SEQ ID NO: 2562034 - RNA, 19 nt, Homo sapiens
  misc_RNA (1)...(19): siRNA sense strand
agacaaaauuccucacaua

SEQ ID NO: 2562035 - RNA, 19 nt, Homo sapiens
  misc_RNA (1)...(19): siRNA sense strand
ggugagggucugcgugaaa

SEQ ID NO: 2562036 - RNA, 19 nt, Homo sapiens
  misc_RNA (1)...(19): siRNA sense strand
agauggugccacagaauua

SEQ ID NO: 2562037 - RNA, 19 nt, Homo sapiens
  misc_RNA (1)...(19): siRNA sense strand
cuacaaauggcaaagagaa

SEQ ID NO: 2562038 - RNA, 19 nt, Homo sapiens
  misc_RNA (1)...(19): siRNA sense strand
ugucaaaguuggaugggca

SEQ ID NO: 2562039 - RNA, 19 nt, Homo sapiens
  misc_RNA (1)...(19): siRNA sense strand
ccgugaaguuauagcagau

SEQ ID NO: 2562040 - RNA, 19 nt, Homo sapiens
  misc_RNA (1)...(19): siRNA sense strand
gagacgaguacuaguggaa

SEQ ID NO: 2562041 - RNA, 19 nt, Homo sapiens
  misc_RNA (1)...(19): siRNA sense strand
ggauaaugguggcuguuca

SEQ ID NO: 2562042 - RNA, 19 nt, Homo sapiens
  misc_RNA (1)...(19): siRNA sense strand
acaagaagugugaucauaa

SEQ ID NO: 2562043 - RNA, 19 nt, Homo sapiens
  misc_RNA (1)...(19): siRNA sense strand
aguacuaguggaagacaaa

SEQ ID NO: 2562044 - RNA, 19 nt, Homo sapiens
  misc_RNA (1)...(19): siRNA sense strand
agugaaauuuacuggccaa

SEQ ID NO: 2562045 - RNA, 19 nt, Homo sapiens
  misc_RNA (1)...(19): siRNA sense strand
ugacguuauuugaggacau

SEQ ID NO: 2562046 - RNA, 19 nt, Homo sapiens
  misc_RNA (1)...(19): siRNA sense strand
aggacaaaucagaugagaa

SEQ ID NO: 2562047 - RNA, 19 nt, Homo sapiens
  misc_RNA (1)...(19): siRNA sense strand
uguuguuguuucuggauua

SEQ ID NO: 2562048 - RNA, 19 nt, Homo sapiens
  misc_RNA (1)...(19): siRNA sense strand
ggugcuaaccggauaguau

SEQ ID NO: 2562049 - RNA, 19 nt, Homo sapiens
  misc_RNA (1)...(19): siRNA sense strand
ucgagaggguagaaccaaa

SEQ ID NO: 2562050 - RNA, 19 nt, Homo sapiens
  misc_RNA (1)...(19): siRNA sense strand
augcaaacugccaggacaa

SEQ ID NO: 2562051 - RNA, 19 nt, Homo sapiens
  misc_RNA (1)...(19): siRNA sense strand
ucacauuacacuauggaau

SEQ ID NO: 2562052 - RNA, 19 nt, Homo sapiens
  misc_RNA (1)...(19): siRNA sense strand
acacuauggaauuuggaua

SEQ ID NO: 2562053 - RNA, 19 nt, Homo sapiens
  misc_RNA (1)...(19): siRNA sense strand
gcuuuuagcucgaaggaca

SEQ ID NO: 2562054 - RNA, 19 nt, Homo sapiens
  misc_RNA (1)...(19): siRNA sense strand
guggaaagaccuagauagu

SEQ ID NO: 2562055 - RNA, 19 nt, Homo sapiens
  misc_RNA (1)...(19): siRNA sense strand
gcagaggagaacuaugaaa

SEQ ID NO: 2562056 - RNA, 19 nt, Homo sapiens
  misc_RNA (1)...(19): siRNA sense strand
uacaaauggcaaagagaau

SEQ ID NO: 2562057 - RNA, 19 nt, Homo sapiens
  misc_RNA (1)...(19): siRNA sense strand
ggggagaaauuccgaaaau

SEQ ID NO: 2562058 - RNA, 19 nt, Homo sapiens
  misc_RNA (1)...(19): siRNA sense strand
gacgaguacuaguggaaga

SEQ ID NO: 2562059 - RNA, 19 nt, Homo sapiens
  misc_RNA (1)...(19): siRNA sense strand
gcucuauuggauugauaaa

SEQ ID NO: 2562060 - RNA, 19 nt, Homo sapiens
  misc_RNA (1)...(19): siRNA sense strand
ugucagcagaggagaacua

SEQ ID NO: 2562061 - RNA, 19 nt, Homo sapiens
  misc_RNA (1)...(19): siRNA sense strand
ccacagaauuauugcuuuu

SEQ ID NO: 2562062 - RNA, 19 nt, Homo sapiens
  misc_RNA (1)...(19): siRNA sense strand
uggauuaugaugaaggcaa

SEQ ID NO: 2562063 - RNA, 19 nt, Homo sapiens
  misc_RNA (1)...(19): siRNA sense strand
cagucaggguggaaugaau

SEQ ID NO: 2562064 - RNA, 19 nt, Homo sapiens
  misc_RNA (1)...(19): siRNA sense strand
aaauuguacuggacagauu

SEQ ID NO: 2562065 - RNA, 19 nt, Homo sapiens
  misc_RNA (1)...(19): siRNA sense strand
gggcaaacggccuaacuau

SEQ ID NO: 2562066 - RNA, 19 nt, Homo sapiens
  misc_RNA (1)...(19): siRNA sense strand
gcauggugauugaugaaca

SEQ ID NO: 2562067 - RNA, 19 nt, Homo sapiens
  misc_RNA (1)...(19): siRNA sense strand
ccauauagcuaccggcacu

SEQ ID NO: 2562068 - RNA, 19 nt, Homo sapiens
  misc_RNA (1)...(19): siRNA sense strand
agauagaacgugcuggaau

SEQ ID NO: 2562069 - RNA, 19 nt, Homo sapiens
  misc_RNA (1)...(19): siRNA sense strand
aaucaaaucuggauggaac

SEQ ID NO: 2562070 - RNA, 19 nt, Homo sapiens
  misc_RNA (1)...(19): siRNA sense strand
gaacaaaucggcaggcagu

SEQ ID NO: 2562071 - RNA, 19 nt, Homo sapiens
  misc_RNA (1)...(19): siRNA sense strand
ccgcauggugauugaugaa

SEQ ID NO: 2562072 - RNA, 19 nt, Homo sapiens
  misc_RNA (1)...(19): siRNA sense strand
gagugaugucagcgaagaa

SEQ ID NO: 2562073 - RNA, 19 nt, Homo sapiens
  misc_RNA (1)...(19): siRNA sense strand
gguucaagucgcuucauua

SEQ ID NO: 2562074 - RNA, 19 nt, Homo sapiens
  misc_RNA (1)...(19): siRNA sense strand
gcuacaaauggcaaagaga

SEQ ID NO: 2562075 - RNA, 19 nt, Homo sapiens
  misc_RNA (1)...(19): siRNA sense strand
cgacaaaacaugauccgaa

SEQ ID NO: 2562076 - RNA, 19 nt, Homo sapiens
  misc_RNA (1)...(19): siRNA sense strand
uggcuuaaguaaaccaauu

SEQ ID NO: 2562077 - RNA, 19 nt, Homo sapiens
  misc_RNA (1)...(19): siRNA sense strand
uugauaaacagcagcaaau

SEQ ID NO: 2562078 - RNA, 19 nt, Homo sapiens
  misc_RNA (1)...(19): siRNA sense strand
guggaaaaccuaagauaga

SEQ ID NO: 2562079 - RNA, 19 nt, Homo sapiens
  misc_RNA (1)...(19): siRNA sense strand
cauggugauugaugaacaa

SEQ ID NO: 2562080 - RNA, 19 nt, Homo sapiens
  misc_RNA (1)...(19): siRNA sense strand
cuauguaguucauggacca

SEQ ID NO: 2562081 - RNA, 19 nt, Homo sapiens
  misc_RNA (1)...(19): siRNA sense strand
uuucaguggcuuaaguaaa

SEQ ID NO: 2562082 - RNA, 19 nt, Homo sapiens
  misc_RNA (1)...(19): siRNA sense strand
ccgucaugccauugccaua

SEQ ID NO: 2562083 - RNA, 19 nt, Homo sapiens
  misc_RNA (1)...(19): siRNA sense strand
uggacuggguugcacgaaa

SEQ ID NO: 2562084 - RNA, 19 nt, Homo sapiens
  misc_RNA (1)...(19): siRNA sense strand
agauugagguuaugaauac

SEQ ID NO: 2562085 - RNA, 19 nt, Homo sapiens
  misc_RNA (1)...(19): siRNA sense strand
cuacaaauguucaucgagu

SEQ ID NO: 2562086 - RNA, 19 nt, Homo sapiens
  misc_RNA (1)...(19): siRNA sense strand
ggaaagaccuagauagucc

SEQ ID NO: 2562087 - RNA, 19 nt, Homo sapiens
  misc_RNA (1)...(19): siRNA sense strand
cagagaaaggguauaugua

SEQ ID NO: 2562088 - RNA, 19 nt, Homo sapiens
  misc_RNA (1)...(19): siRNA sense strand
cagcagcaaaugauugaaa

SEQ ID NO: 2562089 - RNA, 19 nt, Homo sapiens
  misc_RNA (1)...(19): siRNA sense strand
gagaaugaccucaguggca

SEQ ID NO: 2562090 - RNA, 19 nt, Homo sapiens
  misc_RNA (1)...(19): siRNA sense strand
aaauguucaucgagugauu

SEQ ID NO: 2562091 - RNA, 19 nt, Homo sapiens
  misc_RNA (1)...(19): siRNA sense strand
acuaugacccacuggacaa

SEQ ID NO: 2562092 - RNA, 19 nt, Homo sapiens
  misc_RNA (1)...(19): siRNA sense strand
agagaaaggguauauguau

SEQ ID NO: 2562093 - RNA, 19 nt, Homo sapiens
  misc_RNA (1)...(19): siRNA sense strand
ucuuaaaggucgacgugga

SEQ ID NO: 2562094 - RNA, 19 nt, Homo sapiens
  misc_RNA (1)...(19): siRNA sense strand
gugacuucguuaagcgaca

SEQ ID NO: 2562095 - RNA, 19 nt, Homo sapiens
  misc_RNA (1)...(19): siRNA sense strand
ccuaccaggugaagggcua

SEQ ID NO: 2562096 - RNA, 19 nt, Homo sapiens
  misc_RNA (1)...(19): siRNA sense strand
ccguggacaaggacagaaa

SEQ ID NO: 2562097 - RNA, 19 nt, Homo sapiens
  misc_RNA (1)...(19): siRNA sense strand
agugcaggcccguggacaa

SEQ ID NO: 2562098 - RNA, 19 nt, Homo sapiens
  misc_RNA (1)...(19): siRNA sense strand
ggacaaggacagaaagguc

SEQ ID NO: 2562099 - RNA, 19 nt, Homo sapiens
  misc_RNA (1)...(19): siRNA sense strand
gcaacuuugacguggagga

SEQ ID NO: 2562100 - RNA, 19 nt, Homo sapiens
  misc_RNA (1)...(19): siRNA sense strand
uggaacugcggcugggcua

SEQ ID NO: 2562101 - RNA, 19 nt, Homo sapiens
  misc_RNA (1)...(19): siRNA sense strand
cguccaacaugcuggguca

SEQ ID NO: 2562102 - RNA, 19 nt, Homo sapiens
  misc_RNA (1)...(19): siRNA sense strand
ccaucgaccuggaggagca

SEQ ID NO: 2562103 - RNA, 19 nt, Homo sapiens
  misc_RNA (1)...(19): siRNA sense strand
ugccaagggugaugggaca

SEQ ID NO: 2562104 - RNA, 19 nt, Homo sapiens
  misc_RNA (1)...(19): siRNA sense strand
ugaucgagcguguggagaa

SEQ ID NO: 2562105 - RNA, 19 nt, Homo sapiens
  misc_RNA (1)...(19): siRNA sense strand
uggucaacaccgagaucaa

SEQ ID NO: 2562106 - RNA, 19 nt, Homo sapiens
  misc_RNA (1)...(19): siRNA sense strand
acuaugacccacuggacaa

SEQ ID NO: 2562107 - RNA, 19 nt, Homo sapiens
  misc_RNA (1)...(19): siRNA sense strand
cggaggaucucgcuggaca

SEQ ID NO: 2562108 - RNA, 19 nt, Homo sapiens
  misc_RNA (1)...(19): siRNA sense strand
aggacaagcucccgcacau

SEQ ID NO: 2562109 - RNA, 19 nt, Homo sapiens
  misc_RNA (1)...(19): siRNA sense strand
gauuauaucuacuggacag

SEQ ID NO: 2562110 - RNA, 19 nt, Homo sapiens
  misc_RNA (1)...(19): siRNA sense strand
ggaagaucauuguggacuc

SEQ ID NO: 2562111 - RNA, 19 nt, Homo sapiens
  misc_RNA (1)...(19): siRNA sense strand
ggcucaaagcugugaaugu

SEQ ID NO: 2562112 - RNA, 19 nt, Homo sapiens
  misc_RNA (1)...(19): siRNA sense strand
ccguugacuggaugggcaa

SEQ ID NO: 2562113 - RNA, 19 nt, Homo sapiens
  misc_RNA (1)...(19): siRNA sense strand
acgucaaagccaucgacua

SEQ ID NO: 2562114 - RNA, 19 nt, Homo sapiens
  misc_RNA (1)...(19): siRNA sense strand
uggccaaggucgucggaac

SEQ ID NO: 2562115 - RNA, 19 nt, Homo sapiens
  misc_RNA (1)...(19): siRNA sense strand
uguggagggacuuggacaa

SEQ ID NO: 2562116 - RNA, 19 nt, Homo sapiens
  misc_RNA (1)...(19): siRNA sense strand
acgcggaccugaagcgcau

SEQ ID NO: 2562117 - RNA, 19 nt, Homo sapiens
  misc_RNA (1)...(19): siRNA sense strand
ucgacuggguggcccgaaa

SEQ ID NO: 2562118 - RNA, 19 nt, Homo sapiens
  misc_RNA (1)...(19): siRNA sense strand
gcaagaagcuguacuggac

SEQ ID NO: 2562119 - RNA, 19 nt, Homo sapiens
  misc_RNA (1)...(19): siRNA sense strand
aagucagccuggaggaguu

SEQ ID NO: 2562120 - RNA, 19 nt, Homo sapiens
  misc_RNA (1)...(19): siRNA sense strand
ggggagacgccaagacaga

SEQ ID NO: 2562121 - RNA, 19 nt, Homo sapiens
  misc_RNA (1)...(19): siRNA sense strand
agaaggugguggagggcag

SEQ ID NO: 2562122 - RNA, 19 nt, Homo sapiens
  misc_RNA (1)...(19): siRNA sense strand
acgacccgcuagagggcua

SEQ ID NO: 2562123 - RNA, 19 nt, Homo sapiens
  misc_RNA (1)...(19): siRNA sense strand
acgccaagacagacaagau

SEQ ID NO: 2562124 - RNA, 19 nt, Homo sapiens
  misc_RNA (1)...(19): siRNA sense strand
ggauugagcgggcagggau

SEQ ID NO: 2562125 - RNA, 19 nt, Homo sapiens
  misc_RNA (1)...(19): siRNA sense strand
ucauuaaggccgagggcaa

SEQ ID NO: 2562126 - RNA, 19 nt, Homo sapiens
  misc_RNA (1)...(19): siRNA sense strand
acaucaagcuggagcacaa

SEQ ID NO: 2562127 - RNA, 19 nt, Homo sapiens
  misc_RNA (1)...(19): siRNA sense strand
cggccuugcuggagaagaa

SEQ ID NO: 2562128 - RNA, 19 nt, Homo sapiens
  misc_RNA (1)...(19): siRNA sense strand
ccaacgaggagaagaacaa

SEQ ID NO: 2562129 - RNA, 19 nt, Homo sapiens
  misc_RNA (1)...(19): siRNA sense strand
aggaggaggccgaggguau

SEQ ID NO: 2562130 - RNA, 19 nt, Homo sapiens
  misc_RNA (1)...(19): siRNA sense strand
ccgccaaggacaagaaaga

SEQ ID NO: 2562131 - RNA, 19 nt, Homo sapiens
  misc_RNA (1)...(19): siRNA sense strand
cgcaggacguggagaacua

SEQ ID NO: 2562132 - RNA, 19 nt, Homo sapiens
  misc_RNA (1)...(19): siRNA sense strand
gugaaaaugcugagcgaau

SEQ ID NO: 2562133 - RNA, 19 nt, Homo sapiens
  misc_RNA (1)...(19): siRNA sense strand
gcaagaaccaggagcacau

SEQ ID NO: 2562134 - RNA, 19 nt, Homo sapiens
  misc_RNA (1)...(19): siRNA sense strand
guggagaacuacaagguga

SEQ ID NO: 2562135 - RNA, 19 nt, Homo sapiens
  misc_RNA (1)...(19): siRNA sense strand
gugacgaguacaagggcaa

SEQ ID NO: 2562136 - RNA, 19 nt, Homo sapiens
  misc_RNA (1)...(19): siRNA sense strand
uggaguucguggaggacua

SEQ ID NO: 2562137 - RNA, 19 nt, Homo sapiens
  misc_RNA (1)...(19): siRNA sense strand
cggcgcagauggagcagaa

SEQ ID NO: 2562138 - RNA, 19 nt, Homo sapiens
  misc_RNA (1)...(19): siRNA sense strand
caucaugagaagaguguga

SEQ ID NO: 2562139 - RNA, 19 nt, Homo sapiens
  misc_RNA (1)...(19): siRNA sense strand
ucauggagucggaggagaa

SEQ ID NO: 2562140 - RNA, 19 nt, Homo sapiens
  misc_RNA (1)...(19): siRNA sense strand
cgagaugacaagaagaaca

SEQ ID NO: 2562141 - RNA, 19 nt, Homo sapiens
  misc_RNA (1)...(19): siRNA sense strand
ccauggaguucguggagga

SEQ ID NO: 2562142 - RNA, 19 nt, Homo sapiens
  misc_RNA (1)...(19): siRNA sense strand
gcuauaaggccauggucau

SEQ ID NO: 2562143 - RNA, 19 nt, Homo sapiens
  misc_RNA (1)...(19): siRNA sense strand
cuggaaaggcugaacaaga

SEQ ID NO: 2562144 - RNA, 19 nt, Homo sapiens
  misc_RNA (1)...(19): siRNA sense strand
ugacaagaauaacgagcau

SEQ ID NO: 2562145 - RNA, 19 nt, Homo sapiens
  misc_RNA (1)...(19): siRNA sense strand
ggagaaaagcagugagaac

SEQ ID NO: 2562146 - RNA, 19 nt, Homo sapiens
  misc_RNA (1)...(19): siRNA sense strand
uugagaagcugcaggacau

SEQ ID NO: 2562147 - RNA, 19 nt, Homo sapiens
  misc_RNA (1)...(19): siRNA sense strand
acaagaagucagagcgcuu

SEQ ID NO: 2562148 - RNA, 19 nt, Homo sapiens
  misc_RNA (1)...(19): siRNA sense strand
uuacaaaggugaugccuca

SEQ ID NO: 2562149 - RNA, 19 nt, Homo sapiens
  misc_RNA (1)...(19): siRNA sense strand
ggcagaagcugaugaggga

SEQ ID NO: 2562150 - RNA, 19 nt, Homo sapiens
  misc_RNA (1)...(19): siRNA sense strand
cccagaugaucaagaacaa

SEQ ID NO: 2562151 - RNA, 19 nt, Homo sapiens
  misc_RNA (1)...(19): siRNA sense strand
cagauggagcagaagcaaa

SEQ ID NO: 2562152 - RNA, 19 nt, Homo sapiens
  misc_RNA (1)...(19): siRNA sense strand
ccauugacaucgaggagga

SEQ ID NO: 2562153 - RNA, 19 nt, Homo sapiens
  misc_RNA (1)...(19): siRNA sense strand
ugauggagauccugcgcua

SEQ ID NO: 2562154 - RNA, 19 nt, Homo sapiens
  misc_RNA (1)...(19): siRNA sense strand
uggugagcuucgugggcaa

SEQ ID NO: 2562155 - RNA, 19 nt, Homo sapiens
  misc_RNA (1)...(19): siRNA sense strand
agaacuacaaggugaucaa

SEQ ID NO: 2562156 - RNA, 19 nt, Homo sapiens
  misc_RNA (1)...(19): siRNA sense strand
gugagaagcgcguggcuga

SEQ ID NO: 2562157 - RNA, 19 nt, Homo sapiens
  misc_RNA (1)...(19): siRNA sense strand
cagcacaggaggaggagga

SEQ ID NO: 2562158 - RNA, 19 nt, Homo sapiens
  misc_RNA (1)...(19): siRNA sense strand
cuaagcaggacaaggagaa

SEQ ID NO: 2562159 - RNA, 19 nt, Homo sapiens
  misc_RNA (1)...(19): siRNA sense strand
gguauucccaggaggacua

SEQ ID NO: 2562160 - RNA, 19 nt, Homo sapiens
  misc_RNA (1)...(19): siRNA sense strand
acgagaaugugcucagcua

SEQ ID NO: 2562161 - RNA, 19 nt, Homo sapiens
  misc_RNA (1)...(19): siRNA sense strand
agcugaagauccuggaaau

SEQ ID NO: 2562162 - RNA, 19 nt, Homo sapiens
  misc_RNA (1)...(19): siRNA sense strand
cagcgcaggacguggagaa

SEQ ID NO: 2562163 - RNA, 19 nt, Homo sapiens
  misc_RNA (1)...(19): siRNA sense strand
agguggagaugaaggagau

SEQ ID NO: 2562164 - RNA, 19 nt, Homo sapiens
  misc_RNA (1)...(19): siRNA sense strand
ccaugaagcugguguccca

SEQ ID NO: 2562165 - RNA, 19 nt, Homo sapiens
  misc_RNA (1)...(19): siRNA sense strand
ccuaagaaguuccgugacu

SEQ ID NO: 2562166 - RNA, 19 nt, Homo sapiens
  misc_RNA (1)...(19): siRNA sense strand
ggccagugccguggagaaa

SEQ ID NO: 2562167 - RNA, 19 nt, Homo sapiens
  misc_RNA (1)...(19): siRNA sense strand
uugccaacgaggagaagaa

SEQ ID NO: 2562168 - RNA, 19 nt, Homo sapiens
  misc_RNA (1)...(19): siRNA sense strand
agaaaagcagugagaacua

SEQ ID NO: 2562169 - RNA, 19 nt, Homo sapiens
  misc_RNA (1)...(19): siRNA sense strand
ggaggaagagcgugagaac

SEQ ID NO: 2562170 - RNA, 19 nt, Homo sapiens
  misc_RNA (1)...(19): siRNA sense strand
aagcaguacuggaaggcca

SEQ ID NO: 2562171 - RNA, 19 nt, Homo sapiens
  misc_RNA (1)...(19): siRNA sense strand
agauggagcagaagcaaaa

SEQ ID NO: 2562172 - RNA, 19 nt, Homo sapiens
  misc_RNA (1)...(19): siRNA sense strand
acaagaauaacgagcauca

SEQ ID NO: 2562173 - RNA, 19 nt, Homo sapiens
  misc_RNA (1)...(19): siRNA sense strand
cagugucauuugaggaaca

SEQ ID NO: 2562174 - RNA, 19 nt, Homo sapiens
  misc_RNA (1)...(19): siRNA sense strand
ccaccaaggaggacaagga

SEQ ID NO: 2562175 - RNA, 19 nt, Homo sapiens
  misc_RNA (1)...(19): siRNA sense strand
ccagaaugaccgcagguuu

SEQ ID NO: 2562176 - RNA, 19 nt, Homo sapiens
  misc_RNA (1)...(19): siRNA sense strand
acaacgagauggaguggca

SEQ ID NO: 2562177 - RNA, 19 nt, Homo sapiens
  misc_RNA (1)...(19): siRNA sense strand
gcgaggagacgcuguucaa

SEQ ID NO: 2562178 - RNA, 19 nt, Homo sapiens
  misc_RNA (1)...(19): siRNA sense strand
ccaucaccaucaaggacua

SEQ ID NO: 2562179 - RNA, 19 nt, Homo sapiens
  misc_RNA (1)...(19): siRNA sense strand
cgugagaacucggagguga

SEQ ID NO: 2562180 - RNA, 19 nt, Homo sapiens
  misc_RNA (1)...(19): siRNA sense strand
agaaggaguuuguggaggu

SEQ ID NO: 2562181 - RNA, 19 nt, Homo sapiens
  misc_RNA (1)...(19): siRNA sense strand
ucaagaagugccaggacau

SEQ ID NO: 2562182 - RNA, 19 nt, Homo sapiens
  misc_RNA (1)...(19): siRNA sense strand
acgucuacacugagaucaa

SEQ ID NO: 2562183 - RNA, 19 nt, Homo sapiens
  misc_RNA (1)...(19): siRNA sense strand
gugaagaacaagaccgacu

SEQ ID NO: 2562184 - RNA, 19 nt, Homo sapiens
  misc_RNA (1)...(19): siRNA sense strand
aggaagagcgugagaacuc

SEQ ID NO: 2562185 - RNA, 19 nt, Homo sapiens
  misc_RNA (1)...(19): siRNA sense strand
aaaaugacacggagaacaa

SEQ ID NO: 2562186 - RNA, 19 nt, Homo sapiens
  misc_RNA (1)...(19): siRNA sense strand
gcaacaaguaccugacagu

SEQ ID NO: 2562187 - RNA, 19 nt, Homo sapiens
  misc_RNA (1)...(19): siRNA sense strand
augccaagaugauggagau

SEQ ID NO: 2562188 - RNA, 19 nt, Homo sapiens
  misc_RNA (1)...(19): siRNA sense strand
gcgugaagaacaagaccga

SEQ ID NO: 2562189 - RNA, 19 nt, Homo sapiens
  misc_RNA (1)...(19): siRNA sense strand
ccaagaugauggagauccu

SEQ ID NO: 2562190 - RNA, 19 nt, Homo sapiens
  misc_RNA (1)...(19): siRNA sense strand
ggacgcucuuugagaacuu

SEQ ID NO: 2562191 - RNA, 19 nt, Homo sapiens
  misc_RNA (1)...(19): siRNA sense strand
ggcuacagcagcagcacaa

SEQ ID NO: 2562192 - RNA, 19 nt, Homo sapiens
  misc_RNA (1)...(19): siRNA sense strand
agauggaguggcagcgcaa

SEQ ID NO: 2562193 - RNA, 19 nt, Homo sapiens
  misc_RNA (1)...(19): siRNA sense strand
ucgucagccuugugcgcaa

SEQ ID NO: 2562194 - RNA, 19 nt, Homo sapiens
  misc_RNA (1)...(19): siRNA sense strand
agaccaagcugaagauccu

SEQ ID NO: 2562195 - RNA, 19 nt, Homo sapiens
  misc_RNA (1)...(19): siRNA sense strand
uggaaauccuucaguucau

SEQ ID NO: 2562196 - RNA, 19 nt, Homo sapiens
  misc_RNA (1)...(19): siRNA sense strand
acaugaaccuggaucgcau

SEQ ID NO: 2562197 - RNA, 19 nt, Homo sapiens
  misc_RNA (1)...(19): siRNA sense strand
ggacaaggugauccugaau

SEQ ID NO: 2562198 - RNA, 19 nt, Homo sapiens
  misc_RNA (1)...(19): siRNA sense strand
cccgagaugacaagaagaa

SEQ ID NO: 2562199 - RNA, 19 nt, Homo sapiens
  misc_RNA (1)...(19): siRNA sense strand
gucaagaagugccaggaca

SEQ ID NO: 2562200 - RNA, 19 nt, Homo sapiens
  misc_RNA (1)...(19): siRNA sense strand
gggcagaagaggaagcaca

SEQ ID NO: 2562201 - RNA, 19 nt, Homo sapiens
  misc_RNA (1)...(19): siRNA sense strand
aggugcugguggagagaaa

SEQ ID NO: 2562202 - RNA, 19 nt, Homo sapiens
  misc_RNA (1)...(19): siRNA sense strand
ggagugaagugcucgggaa

SEQ ID NO: 2562203 - RNA, 19 nt, Homo sapiens
  misc_RNA (1)...(19): siRNA sense strand
ggcaagaccuggaagcaga

SEQ ID NO: 2562204 - RNA, 19 nt, Homo sapiens
  misc_RNA (1)...(19): siRNA sense strand
agggcuacguggaggugaa

SEQ ID NO: 2562205 - RNA, 19 nt, Homo sapiens
  misc_RNA (1)...(19): siRNA sense strand
uggaggugaaggagggcaa

SEQ ID NO: 2562206 - RNA, 19 nt, Homo sapiens
  misc_RNA (1)...(19): siRNA sense strand
cagaagaagcugcgccuga

SEQ ID NO: 2562207 - RNA, 19 nt, Homo sapiens
  misc_RNA (1)...(19): siRNA sense strand
ccccagugauggagggcua

SEQ ID NO: 2562208 - RNA, 19 nt, Homo sapiens
  misc_RNA (1)...(19): siRNA sense strand
uggcugggcagaagaggaa

SEQ ID NO: 2562209 - RNA, 19 nt, Homo sapiens
  misc_RNA (1)...(19): siRNA sense strand
gaguggaggugcuggugga

SEQ ID NO: 2562210 - RNA, 19 nt, Homo sapiens
  misc_RNA (1)...(19): siRNA sense strand
ccaacguggccaagauuca

SEQ ID NO: 2562211 - RNA, 19 nt, Homo sapiens
  misc_RNA (1)...(19): siRNA sense strand
gcugcaaccacgaggagga

SEQ ID NO: 2562212 - RNA, 19 nt, Homo sapiens
  misc_RNA (1)...(19): siRNA sense strand
gugcacaggcaaugagaag

SEQ ID NO: 2562213 - RNA, 19 nt, Homo sapiens
  misc_RNA (1)...(19): siRNA sense strand
gauccagugcacaggcaau

SEQ ID NO: 2562214 - RNA, 19 nt, Homo sapiens
  misc_RNA (1)...(19): siRNA sense strand
gcuacguggaggugaagga

SEQ ID NO: 2562215 - RNA, 19 nt, Homo sapiens
  misc_RNA (1)...(19): siRNA sense strand
aagaaugucaccugcgaga

SEQ ID NO: 2562216 - RNA, 19 nt, Homo sapiens
  misc_RNA (1)...(19): siRNA sense strand
cugacggacccucgagauu

SEQ ID NO: 2562217 - RNA, 19 nt, Homo sapiens
  misc_RNA (1)...(19): siRNA sense strand
agagcaaaguggugaacaa

SEQ ID NO: 2562218 - RNA, 19 nt, Homo sapiens
  misc_RNA (1)...(19): siRNA sense strand
ccaccaugauccagagcaa

SEQ ID NO: 2562219 - RNA, 19 nt, Homo sapiens
  misc_RNA (1)...(19): siRNA sense strand
cagauagccaagagguaua

SEQ ID NO: 2562220 - RNA, 19 nt, Homo sapiens
  misc_RNA (1)...(19): siRNA sense strand
caggagaaucggaagaaau

SEQ ID NO: 2562221 - RNA, 19 nt, Homo sapiens
  misc_RNA (1)...(19): siRNA sense strand
aggagaacauccaagacaa

SEQ ID NO: 2562222 - RNA, 19 nt, Homo sapiens
  misc_RNA (1)...(19): siRNA sense strand
cugcuaaauuggaucaaau

SEQ ID NO: 2562223 - RNA, 19 nt, Homo sapiens
  misc_RNA (1)...(19): siRNA sense strand
agauugugguggcaggaaa

SEQ ID NO: 2562224 - RNA, 19 nt, Homo sapiens
  misc_RNA (1)...(19): siRNA sense strand
gagguagauguguggguua

SEQ ID NO: 2562225 - RNA, 19 nt, Homo sapiens
  misc_RNA (1)...(19): siRNA sense strand
ccucagagcagaagaccau

SEQ ID NO: 2562226 - RNA, 19 nt, Homo sapiens
  misc_RNA (1)...(19): siRNA sense strand
cgguagcacagcagagaau

SEQ ID NO: 2562227 - RNA, 19 nt, Homo sapiens
  misc_RNA (1)...(19): siRNA sense strand
cuuuggaggcucagagauu

SEQ ID NO: 2562228 - RNA, 19 nt, Homo sapiens
  misc_RNA (1)...(19): siRNA sense strand
uggaauugcacaaaggauu

SEQ ID NO: 2562229 - RNA, 19 nt, Homo sapiens
  misc_RNA (1)...(19): siRNA sense strand
augaagaucuuguggaacu

SEQ ID NO: 2562230 - RNA, 19 nt, Homo sapiens
  misc_RNA (1)...(19): siRNA sense strand
uggcagagaaccggagaua

SEQ ID NO: 2562231 - RNA, 19 nt, Homo sapiens
  misc_RNA (1)...(19): siRNA sense strand
gagaagagaaggcugguga

SEQ ID NO: 2562232 - RNA, 19 nt, Homo sapiens
  misc_RNA (1)...(19): siRNA sense strand
uggagguguuuaauggaua

SEQ ID NO: 2562233 - RNA, 19 nt, Homo sapiens
  misc_RNA (1)...(19): siRNA sense strand
cagcagagaauaugcccua

SEQ ID NO: 2562234 - RNA, 19 nt, Homo sapiens
  misc_RNA (1)...(19): siRNA sense strand
aaucaggaauuguagucaa

SEQ ID NO: 2562235 - RNA, 19 nt, Homo sapiens
  misc_RNA (1)...(19): siRNA sense strand
agaaaugauggaagagguu

SEQ ID NO: 2562236 - RNA, 19 nt, Homo sapiens
  misc_RNA (1)...(19): siRNA sense strand
cgacacauuugaaggccau

SEQ ID NO: 2562237 - RNA, 19 nt, Homo sapiens
  misc_RNA (1)...(19): siRNA sense strand
gugaacuggagguguuuaa

SEQ ID NO: 2562238 - RNA, 19 nt, Homo sapiens
  misc_RNA (1)...(19): siRNA sense strand
uggacgacuugcaggauuu

SEQ ID NO: 2562239 - RNA, 19 nt, Homo sapiens
  misc_RNA (1)...(19): siRNA sense strand
acaaaggauuuauggaaac

SEQ ID NO: 2562240 - RNA, 19 nt, Homo sapiens
  misc_RNA (1)...(19): siRNA sense strand
caaugaaaaccauggaauu

SEQ ID NO: 2562241 - RNA, 19 nt, Homo sapiens
  misc_RNA (1)...(19): siRNA sense strand
ccaggagaaucggaagaaa

SEQ ID NO: 2562242 - RNA, 19 nt, Homo sapiens
  misc_RNA (1)...(19): siRNA sense strand
gaauuguagucaacgguca

SEQ ID NO: 2562243 - RNA, 19 nt, Homo sapiens
  misc_RNA (1)...(19): siRNA sense strand
accuaaagcccacggacua

SEQ ID NO: 2562244 - RNA, 19 nt, Homo sapiens
  misc_RNA (1)...(19): siRNA sense strand
cgaaagacaagcaugcaga

SEQ ID NO: 2562245 - RNA, 19 nt, Homo sapiens
  misc_RNA (1)...(19): siRNA sense strand
agaucucagugaagaaaga

SEQ ID NO: 2562246 - RNA, 19 nt, Homo sapiens
  misc_RNA (1)...(19): siRNA sense strand
ccaugacuguggacggcaa

SEQ ID NO: 2562247 - RNA, 19 nt, Homo sapiens
  misc_RNA (1)...(19): siRNA sense strand
ugggauuugauguggacua

SEQ ID NO: 2562248 - RNA, 19 nt, Homo sapiens
  misc_RNA (1)...(19): siRNA sense strand
gcagcaaagugguuccaga

SEQ ID NO: 2562249 - RNA, 19 nt, Homo sapiens
  misc_RNA (1)...(19): siRNA sense strand
cuggugaacuggagguguu

SEQ ID NO: 2562250 - RNA, 19 nt, Homo sapiens
  misc_RNA (1)...(19): siRNA sense strand
gaacauucgaacuuggaga

SEQ ID NO: 2562251 - RNA, 19 nt, Homo sapiens
  misc_RNA (1)...(19): siRNA sense strand
ccaggaaacugugggccua

SEQ ID NO: 2562252 - RNA, 19 nt, Homo sapiens
  misc_RNA (1)...(19): siRNA sense strand
aaaugauggaagagguuga

SEQ ID NO: 2562253 - RNA, 19 nt, Homo sapiens
  misc_RNA (1)...(19): siRNA sense strand
guagcacagcagagaauau

SEQ ID NO: 2562254 - RNA, 19 nt, Homo sapiens
  misc_RNA (1)...(19): siRNA sense strand
cggcucaagucacgaauca

SEQ ID NO: 2562255 - RNA, 19 nt, Homo sapiens
  misc_RNA (1)...(19): siRNA sense strand
cugaauuuguagacuauga

SEQ ID NO: 2562256 - RNA, 19 nt, Homo sapiens
  misc_RNA (1)...(19): siRNA sense strand
aaaccauggaauugcacaa

SEQ ID NO: 2562257 - RNA, 19 nt, Homo sapiens
  misc_RNA (1)...(19): siRNA sense strand
auguugacuuucugggaau

SEQ ID NO: 2562258 - RNA, 19 nt, Homo sapiens
  misc_RNA (1)...(19): siRNA sense strand
gcauggaagugaaggggca

SEQ ID NO: 2562259 - RNA, 19 nt, Homo sapiens
  misc_RNA (1)...(19): siRNA sense strand
cugacaaccuggacccaau

SEQ ID NO: 2562260 - RNA, 19 nt, Homo sapiens
  misc_RNA (1)...(19): siRNA sense strand
aggaaaggacccugagaag

SEQ ID NO: 2562261 - RNA, 19 nt, Homo sapiens
  misc_RNA (1)...(19): siRNA sense strand
cauaaauggacuuucugaa

SEQ ID NO: 2562262 - RNA, 19 nt, Homo sapiens
  misc_RNA (1)...(19): siRNA sense strand
ggaugaccucagagcagaa

SEQ ID NO: 2562263 - RNA, 19 nt, Homo sapiens
  misc_RNA (1)...(19): siRNA sense strand
caugcaggaaccaaagaua

SEQ ID NO: 2562264 - RNA, 19 nt, Homo sapiens
  misc_RNA (1)...(19): siRNA sense strand
cgaacuuggagaaaugauu

SEQ ID NO: 2562265 - RNA, 19 nt, Homo sapiens
  misc_RNA (1)...(19): siRNA sense strand
ccaagagguauauugagaa

SEQ ID NO: 2562266 - RNA, 19 nt, Homo sapiens
  misc_RNA (1)...(19): siRNA sense strand
gcacaaacaucaacgaagc

SEQ ID NO: 2562267 - RNA, 19 nt, Homo sapiens
  misc_RNA (1)...(19): siRNA sense strand
aggauuacuucgugccuca

SEQ ID NO: 2562268 - RNA, 19 nt, Homo sapiens
  misc_RNA (1)...(19): siRNA sense strand
ggcaagacauuuaggagcu

SEQ ID NO: 2562269 - RNA, 19 nt, Homo sapiens
  misc_RNA (1)...(19): siRNA sense strand
ccuaaagcccacggacuaa

SEQ ID NO: 2562270 - RNA, 19 nt, Homo sapiens
  misc_RNA (1)...(19): siRNA sense strand
aagaaaugauggaagaggu

SEQ ID NO: 2562271 - RNA, 19 nt, Homo sapiens
  misc_RNA (1)...(19): siRNA sense strand
agaacauccaagacaauau

SEQ ID NO: 2562272 - RNA, 19 nt, Homo sapiens
  misc_RNA (1)...(19): siRNA sense strand
caaccaacugcuagcugaa

SEQ ID NO: 2562273 - RNA, 19 nt, Homo sapiens
  misc_RNA (1)...(19): siRNA sense strand
agguagauguguggguuau

SEQ ID NO: 2562274 - RNA, 19 nt, Homo sapiens
  misc_RNA (1)...(19): siRNA sense strand
aaugaaacaaacuguggaa

SEQ ID NO: 2562275 - RNA, 19 nt, Homo sapiens
  misc_RNA (1)...(19): siRNA sense strand
cuaugagaauggagaaaua

SEQ ID NO: 2562276 - RNA, 19 nt, Homo sapiens
  misc_RNA (1)...(19): siRNA sense strand
ggauaaagaaggugcauca

SEQ ID NO: 2562277 - RNA, 19 nt, Homo sapiens
  misc_RNA (1)...(19): siRNA sense strand
cagaaaacuacuagagaaa

SEQ ID NO: 2562278 - RNA, 19 nt, Homo sapiens
  misc_RNA (1)...(19): siRNA sense strand
caacgaaauuagcgagaga

SEQ ID NO: 2562279 - RNA, 19 nt, Homo sapiens
  misc_RNA (1)...(19): siRNA sense strand
auaagaaacuguugggaga

SEQ ID NO: 2562280 - RNA, 19 nt, Homo sapiens
  misc_RNA (1)...(19): siRNA sense strand
cuucagacauuacgagaaa

SEQ ID NO: 2562281 - RNA, 19 nt, Homo sapiens
  misc_RNA (1)...(19): siRNA sense strand
aagcaauauuggaaagcaa

SEQ ID NO: 2562282 - RNA, 19 nt, Homo sapiens
  misc_RNA (1)...(19): siRNA sense strand
gcuugggauuacagaaaua

SEQ ID NO: 2562283 - RNA, 19 nt, Homo sapiens
  misc_RNA (1)...(19): siRNA sense strand
gcuuuguggaagaggguaa

SEQ ID NO: 2562284 - RNA, 19 nt, Homo sapiens
  misc_RNA (1)...(19): siRNA sense strand
ggaugaacaaggaaguaaa

SEQ ID NO: 2562285 - RNA, 19 nt, Homo sapiens
  misc_RNA (1)...(19): siRNA sense strand
gggaaauagaggugguuca

SEQ ID NO: 2562286 - RNA, 19 nt, Homo sapiens
  misc_RNA (1)...(19): siRNA sense strand
cagaagaaaaucaggaaua

SEQ ID NO: 2562287 - RNA, 19 nt, Homo sapiens
  misc_RNA (1)...(19): siRNA sense strand
gggaagagacuuugcugaa

SEQ ID NO: 2562288 - RNA, 19 nt, Homo sapiens
  misc_RNA (1)...(19): siRNA sense strand
gcuaagaaggccaucgaaa

SEQ ID NO: 2562289 - RNA, 19 nt, Homo sapiens
  misc_RNA (1)...(19): siRNA sense strand
cagaacaaaggaagaauaa

SEQ ID NO: 2562290 - RNA, 19 nt, Homo sapiens
  misc_RNA (1)...(19): siRNA sense strand
acaaggaaguaaagugaau

SEQ ID NO: 2562291 - RNA, 19 nt, Homo sapiens
  misc_RNA (1)...(19): siRNA sense strand
cugcuuuacuggagaagaa

SEQ ID NO: 2562292 - RNA, 19 nt, Homo sapiens
  misc_RNA (1)...(19): siRNA sense strand
caauauuguuguaggagau

SEQ ID NO: 2562293 - RNA, 19 nt, Homo sapiens
  misc_RNA (1)...(19): siRNA sense strand
agaaacuaauggagaaaga

SEQ ID NO: 2562294 - RNA, 19 nt, Homo sapiens
  misc_RNA (1)...(19): siRNA sense strand
cugcagaacuggaacaaaa

SEQ ID NO: 2562295 - RNA, 19 nt, Homo sapiens
  misc_RNA (1)...(19): siRNA sense strand
gguccacgaaugagaguaa

SEQ ID NO: 2562296 - RNA, 19 nt, Homo sapiens
  misc_RNA (1)...(19): siRNA sense strand
acauaaacccucuugguaa

SEQ ID NO: 2562297 - RNA, 19 nt, Homo sapiens
  misc_RNA (1)...(19): siRNA sense strand
gcugaagaucauugagauu

SEQ ID NO: 2562298 - RNA, 19 nt, Homo sapiens
  misc_RNA (1)...(19): siRNA sense strand
ggagaaggcucgaugcuga

SEQ ID NO: 2562299 - RNA, 19 nt, Homo sapiens
  misc_RNA (1)...(19): siRNA sense strand
uguaaaagcagaugguaaa

SEQ ID NO: 2562300 - RNA, 19 nt, Homo sapiens
  misc_RNA (1)...(19): siRNA sense strand
ggugaaaguuaaagaccca

SEQ ID NO: 2562301 - RNA, 19 nt, Homo sapiens
  misc_RNA (1)...(19): siRNA sense strand
guuaaagacccaacagaau

SEQ ID NO: 2562302 - RNA, 19 nt, Homo sapiens
  misc_RNA (1)...(19): siRNA sense strand
ucuaaagcacucugggaaa

SEQ ID NO: 2562303 - RNA, 19 nt, Homo sapiens
  misc_RNA (1)...(19): siRNA sense strand
agaugaagccuuaaaguau

SEQ ID NO: 2562304 - RNA, 19 nt, Homo sapiens
  misc_RNA (1)...(19): siRNA sense strand
cucaaaugauuguggagaa

SEQ ID NO: 2562305 - RNA, 19 nt, Homo sapiens
  misc_RNA (1)...(19): siRNA sense strand
ggaaauuugcccugacaau

SEQ ID NO: 2562306 - RNA, 19 nt, Homo sapiens
  misc_RNA (1)...(19): siRNA sense strand
gugagaaugcagaaagaau

SEQ ID NO: 2562307 - RNA, 19 nt, Homo sapiens
  misc_RNA (1)...(19): siRNA sense strand
ggaaacaaugugaugagaa

SEQ ID NO: 2562308 - RNA, 19 nt, Homo sapiens
  misc_RNA (1)...(19): siRNA sense strand
cauuuaagcaggugcaauu

SEQ ID NO: 2562309 - RNA, 19 nt, Homo sapiens
  misc_RNA (1)...(19): siRNA sense strand
ccgcagaggaaguaacaau

SEQ ID NO: 2562310 - RNA, 19 nt, Homo sapiens
  misc_RNA (1)...(19): siRNA sense strand
aaaugauuguggagaagaa

SEQ ID NO: 2562311 - RNA, 19 nt, Homo sapiens
  misc_RNA (1)...(19): siRNA sense strand
gcaggauggaacaaagaaa

SEQ ID NO: 2562312 - RNA, 19 nt, Homo sapiens
  misc_RNA (1)...(19): siRNA sense strand
cagacaugacagugagaau

SEQ ID NO: 2562313 - RNA, 19 nt, Homo sapiens
  misc_RNA (1)...(19): siRNA sense strand
acaccaagcugaagaucau

SEQ ID NO: 2562314 - RNA, 19 nt, Homo sapiens
  misc_RNA (1)...(19): siRNA sense strand
acaaagaaacuaauggaga

SEQ ID NO: 2562315 - RNA, 19 nt, Homo sapiens
  misc_RNA (1)...(19): siRNA sense strand
ucuccaagccuguggguau

SEQ ID NO: 2562316 - RNA, 19 nt, Homo sapiens
  misc_RNA (1)...(19): siRNA sense strand
gaaaacuacuagagaaaca

SEQ ID NO: 2562317 - RNA, 19 nt, Homo sapiens
  misc_RNA (1)...(19): siRNA sense strand
gaaguggaaaugaaagaaa

SEQ ID NO: 2562318 - RNA, 19 nt, Homo sapiens
  misc_RNA (1)...(19): siRNA sense strand
cccaagaaguucagagacu

SEQ ID NO: 2562319 - RNA, 19 nt, Homo sapiens
  misc_RNA (1)...(19): siRNA sense strand
gccuaauaauggacaagaa

SEQ ID NO: 2562320 - RNA, 19 nt, Homo sapiens
  misc_RNA (1)...(19): siRNA sense strand
cagugagaaugcagaaaga

SEQ ID NO: 2562321 - RNA, 19 nt, Homo sapiens
  misc_RNA (1)...(19): siRNA sense strand
ccuuaaaguauuaugccaa

SEQ ID NO: 2562322 - RNA, 19 nt, Homo sapiens
  misc_RNA (1)...(19): siRNA sense strand
gcaaugaaggcgacaguga

SEQ ID NO: 2562323 - RNA, 19 nt, Homo sapiens
  misc_RNA (1)...(19): siRNA sense strand
ccauagacacagaugaaga

SEQ ID NO: 2562324 - RNA, 19 nt, Homo sapiens
  misc_RNA (1)...(19): siRNA sense strand
aaugaaaggagguuuguaa

SEQ ID NO: 2562325 - RNA, 19 nt, Homo sapiens
  misc_RNA (1)...(19): siRNA sense strand
gaaagguggugaagagcca

SEQ ID NO: 2562326 - RNA, 19 nt, Homo sapiens
  misc_RNA (1)...(19): siRNA sense strand
ugaagaaaugccaggauau

SEQ ID NO: 2562327 - RNA, 19 nt, Homo sapiens
  misc_RNA (1)...(19): siRNA sense strand
aggggaaagucaagugaaa

SEQ ID NO: 2562328 - RNA, 19 nt, Homo sapiens
  misc_RNA (1)...(19): siRNA sense strand
uguguauacagaagagaaa

SEQ ID NO: 2562329 - RNA, 19 nt, Homo sapiens
  misc_RNA (1)...(19): siRNA sense strand
caauggaauuuguugaaga

SEQ ID NO: 2562330 - RNA, 19 nt, Homo sapiens
  misc_RNA (1)...(19): siRNA sense strand
gagagagacaaguuugaua

SEQ ID NO: 2562331 - RNA, 19 nt, Homo sapiens
  misc_RNA (1)...(19): siRNA sense strand
ccagauuggcuaugauauu

SEQ ID NO: 2562332 - RNA, 19 nt, Homo sapiens
  misc_RNA (1)...(19): siRNA sense strand
gaagagaaauggauccaga

SEQ ID NO: 2562333 - RNA, 19 nt, Homo sapiens
  misc_RNA (1)...(19): siRNA sense strand
gggaugaacaaggaaguaa

SEQ ID NO: 2562334 - RNA, 19 nt, Homo sapiens
  misc_RNA (1)...(19): siRNA sense strand
ggucuugggccuacauuaa

SEQ ID NO: 2562335 - RNA, 19 nt, Homo sapiens
  misc_RNA (1)...(19): siRNA sense strand
aagaaacuguugggagaaa

SEQ ID NO: 2562336 - RNA, 19 nt, Homo sapiens
  misc_RNA (1)...(19): siRNA sense strand
uggcacagguauuuggaau

SEQ ID NO: 2562337 - RNA, 19 nt, Homo sapiens
  misc_RNA (1)...(19): siRNA sense strand
aauaaguaccggauuguaa

SEQ ID NO: 2562338 - RNA, 19 nt, Homo sapiens
  misc_RNA (1)...(19): siRNA sense strand
gcauuaacauguuggcaga

SEQ ID NO: 2562339 - RNA, 19 nt, Homo sapiens
  misc_RNA (1)...(19): siRNA sense strand
ccacaauaucuuaaugcaa

SEQ ID NO: 2562340 - RNA, 19 nt, Homo sapiens
  misc_RNA (1)...(19): siRNA sense strand
augcaagacuggaugccaa

SEQ ID NO: 2562341 - RNA, 19 nt, Homo sapiens
  misc_RNA (1)...(19): siRNA sense strand
cagcagagaacauggcuca

SEQ ID NO: 2562342 - RNA, 19 nt, Homo sapiens
  misc_RNA (1)...(19): siRNA sense strand
aggcagaaacagaaccaau

SEQ ID NO: 2562343 - RNA, 19 nt, Homo sapiens
  misc_RNA (1)...(19): siRNA sense strand
ccccaaaggucgcgauaau

SEQ ID NO: 2562344 - RNA, 19 nt, Homo sapiens
  misc_RNA (1)...(19): siRNA sense strand
agauguuggccaugaauau

SEQ ID NO: 2562345 - RNA, 19 nt, Homo sapiens
  misc_RNA (1)...(19): siRNA sense strand
uccagaaacuacaaggcaa

SEQ ID NO: 2562346 - RNA, 19 nt, Homo sapiens
  misc_RNA (1)...(19): siRNA sense strand
uugacuaccuggcggacaa

SEQ ID NO: 2562347 - RNA, 19 nt, Homo sapiens
  misc_RNA (1)...(19): siRNA sense strand
cugaaagguggauuguaaa

SEQ ID NO: 2562348 - RNA, 19 nt, Homo sapiens
  misc_RNA (1)...(19): siRNA sense strand
ggucaugugguuaugggua

SEQ ID NO: 2562349 - RNA, 19 nt, Homo sapiens
  misc_RNA (1)...(19): siRNA sense strand
uggcagauaaauugaacau

SEQ ID NO: 2562350 - RNA, 19 nt, Homo sapiens
  misc_RNA (1)...(19): siRNA sense strand
ggguaacaaugcagucuca

SEQ ID NO: 2562351 - RNA, 19 nt, Homo sapiens
  misc_RNA (1)...(19): siRNA sense strand
aggcaaaugcagucaacca

SEQ ID NO: 2562352 - RNA, 19 nt, Homo sapiens
  misc_RNA (1)...(19): siRNA sense strand
ccaguacgaaugugggaau

SEQ ID NO: 2562353 - RNA, 19 nt, Homo sapiens
  misc_RNA (1)...(19): siRNA sense strand
ugcuauggauguauacaaa

SEQ ID NO: 2562354 - RNA, 19 nt, Homo sapiens
  misc_RNA (1)...(19): siRNA sense strand
gggaugcagccauggaaga

SEQ ID NO: 2562355 - RNA, 19 nt, Homo sapiens
  misc_RNA (1)...(19): siRNA sense strand
caccaguguaucagcauua

SEQ ID NO: 2562356 - RNA, 19 nt, Homo sapiens
  misc_RNA (1)...(19): siRNA sense strand
acauguuggcagauaaauu

SEQ ID NO: 2562357 - RNA, 19 nt, Homo sapiens
  misc_RNA (1)...(19): siRNA sense strand
cagaagaagcugaaaggug

SEQ ID NO: 2562358 - RNA, 19 nt, Homo sapiens
  misc_RNA (1)...(19): siRNA sense strand
acacauauaaagacccaau

SEQ ID NO: 2562359 - RNA, 19 nt, Homo sapiens
  misc_RNA (1)...(19): siRNA sense strand
ugaaagguggauuguaaau

SEQ ID NO: 2562360 - RNA, 19 nt, Homo sapiens
  misc_RNA (1)...(19): siRNA sense strand
uugugaagauguuugaaga

SEQ ID NO: 2562361 - RNA, 19 nt, Homo sapiens
  misc_RNA (1)...(19): siRNA sense strand
ucuuaaugcaauucagaca

SEQ ID NO: 2562362 - RNA, 19 nt, Homo sapiens
  misc_RNA (1)...(19): siRNA sense strand
agucauaacaaacaaggau

SEQ ID NO: 2562363 - RNA, 19 nt, Homo sapiens
  misc_RNA (1)...(19): siRNA sense strand
aagcugagggaaugugaau

SEQ ID NO: 2562364 - RNA, 19 nt, Homo sapiens
  misc_RNA (1)...(19): siRNA sense strand
aguacgaaugugggaauua

SEQ ID NO: 2562365 - RNA, 19 nt, Homo sapiens
  misc_RNA (1)...(19): siRNA sense strand
gguuccagcaacagauaga

SEQ ID NO: 2562366 - RNA, 19 nt, Homo sapiens
  misc_RNA (1)...(19): siRNA sense strand
aauuaggucaugugguuau

SEQ ID NO: 2562367 - RNA, 19 nt, Homo sapiens
  misc_RNA (1)...(19): siRNA sense strand
ggaugaagguggacaggga

SEQ ID NO: 2562368 - RNA, 19 nt, Homo sapiens
  misc_RNA (1)...(19): siRNA sense strand
uggaugaggaggagaugaa

SEQ ID NO: 2562369 - RNA, 19 nt, Homo sapiens
  misc_RNA (1)...(19): siRNA sense strand
ccaucaacaagaagaggaa

SEQ ID NO: 2562370 - RNA, 19 nt, Homo sapiens
  misc_RNA (1)...(19): siRNA sense strand
ucaucaaagucaagcccaa

SEQ ID NO: 2562371 - RNA, 19 nt, Homo sapiens
  misc_RNA (1)...(19): siRNA sense strand
agaaagugaagcagaccaa

SEQ ID NO: 2562372 - RNA, 19 nt, Homo sapiens
  misc_RNA (1)...(19): siRNA sense strand
ccguuacagcagauggaaa

SEQ ID NO: 2562373 - RNA, 19 nt, Homo sapiens
  misc_RNA (1)...(19): siRNA sense strand
cgcauuuaucggagacaua

SEQ ID NO: 2562374 - RNA, 19 nt, Homo sapiens
  misc_RNA (1)...(19): siRNA sense strand
ugaagaaacugcuccgaga

SEQ ID NO: 2562375 - RNA, 19 nt, Homo sapiens
  misc_RNA (1)...(19): siRNA sense strand
ggggagaacuauggagcaa

SEQ ID NO: 2562376 - RNA, 19 nt, Homo sapiens
  misc_RNA (1)...(19): siRNA sense strand
cugacaaacaugaacaaga

SEQ ID NO: 2562377 - RNA, 19 nt, Homo sapiens
  misc_RNA (1)...(19): siRNA sense strand
augaggaggagaugaagaa

SEQ ID NO: 2562378 - RNA, 19 nt, Homo sapiens
  misc_RNA (1)...(19): siRNA sense strand
gccacaugcuggagaacca

SEQ ID NO: 2562379 - RNA, 19 nt, Homo sapiens
  misc_RNA (1)...(19): siRNA sense strand
cuuaugaggaagugcugaa

SEQ ID NO: 2562380 - RNA, 19 nt, Homo sapiens
  misc_RNA (1)...(19): siRNA sense strand
guacaaucguggaagggcu

SEQ ID NO: 2562381 - RNA, 19 nt, Homo sapiens
  misc_RNA (1)...(19): siRNA sense strand
ccgucaauccccagagcaa

SEQ ID NO: 2562382 - RNA, 19 nt, Homo sapiens
  misc_RNA (1)...(19): siRNA sense strand
ggccagaaagugaagcaga

SEQ ID NO: 2562383 - RNA, 19 nt, Homo sapiens
  misc_RNA (1)...(19): siRNA sense strand
ccacaaagccagaugccac

SEQ ID NO: 2562384 - RNA, 19 nt, Homo sapiens
  misc_RNA (1)...(19): siRNA sense strand
agagaaucuacgaggacca

SEQ ID NO: 2562385 - RNA, 19 nt, Homo sapiens
  misc_RNA (1)...(19): siRNA sense strand
gaugaggaggagaugaaga

SEQ ID NO: 2562386 - RNA, 19 nt, Homo sapiens
  misc_RNA (1)...(19): siRNA sense strand
cauggaagcaguaccggaa

SEQ ID NO: 2562387 - RNA, 19 nt, Homo sapiens
  misc_RNA (1)...(19): siRNA sense strand
ccccaaaaccugacaaaca

SEQ ID NO: 2562388 - RNA, 19 nt, Homo sapiens
  misc_RNA (1)...(19): siRNA sense strand
augagaggccagaaaguga

SEQ ID NO: 2562389 - RNA, 19 nt, Homo sapiens
  misc_RNA (1)...(19): siRNA sense strand
cgaaggaacuggcagccca

SEQ ID NO: 2562390 - RNA, 19 nt, Homo sapiens
  misc_RNA (1)...(19): siRNA sense strand
cuccaugagaggccagaaa

SEQ ID NO: 2562391 - RNA, 19 nt, Homo sapiens
  misc_RNA (1)...(19): siRNA sense strand
caaccuacaagcagcucaa

SEQ ID NO: 2562392 - RNA, 19 nt, Homo sapiens
  misc_RNA (1)...(19): siRNA sense strand
ccacaaaccugaauggagg

SEQ ID NO: 2562393 - RNA, 19 nt, Homo sapiens
  misc_RNA (1)...(19): siRNA sense strand
cguuacagcagauggaaac

SEQ ID NO: 2562394 - RNA, 19 nt, Homo sapiens
  misc_RNA (1)...(19): siRNA sense strand
acauaaaggacaaggugac

SEQ ID NO: 2562395 - RNA, 19 nt, Homo sapiens
  misc_RNA (1)...(19): siRNA sense strand
ugaacaagaacgugguuuu

SEQ ID NO: 2562396 - RNA, 19 nt, Homo sapiens
  misc_RNA (1)...(19): siRNA sense strand
gccuaguggaugaggagga

SEQ ID NO: 2562397 - RNA, 19 nt, Homo sapiens
  misc_RNA (1)...(19): siRNA sense strand
auggacagcucauuggcaa

SEQ ID NO: 2562398 - RNA, 19 nt, Homo sapiens
  misc_RNA (1)...(19): siRNA sense strand
ccaugagaggccagaaagu

SEQ ID NO: 2562399 - RNA, 19 nt, Homo sapiens
  misc_RNA (1)...(19): siRNA sense strand
gacauaaaggacaagguga

SEQ ID NO: 2562400 - RNA, 19 nt, Homo sapiens
  misc_RNA (1)...(19): siRNA sense strand
ugguauucaugcuguuuaa

SEQ ID NO: 2562401 - RNA, 19 nt, Homo sapiens
  misc_RNA (1)...(19): siRNA sense strand
cgauagugauggacccuca

SEQ ID NO: 2562402 - RNA, 19 nt, Homo sapiens
  misc_RNA (1)...(19): siRNA sense strand
ccauauucuccauugacaa

SEQ ID NO: 2562403 - RNA, 19 nt, Homo sapiens
  misc_RNA (1)...(19): siRNA sense strand
uuaaagagggauaugcaga

SEQ ID NO: 2562404 - RNA, 19 nt, Homo sapiens
  misc_RNA (1)...(19): siRNA sense strand
caaccugacaccugaggau

SEQ ID NO: 2562405 - RNA, 19 nt, Homo sapiens
  misc_RNA (1)...(19): siRNA sense strand
cugaaggauaagacacaga

SEQ ID NO: 2562406 - RNA, 19 nt, Homo sapiens
  misc_RNA (1)...(19): siRNA sense strand
ugguauucaugcuguuuaa

SEQ ID NO: 2562407 - RNA, 19 nt, Homo sapiens
  misc_RNA (1)...(19): siRNA sense strand
cgauagugauggacccuca

SEQ ID NO: 2562408 - RNA, 19 nt, Homo sapiens
  misc_RNA (1)...(19): siRNA sense strand
ccauauucuccauugacaa

SEQ ID NO: 2562409 - RNA, 19 nt, Homo sapiens
  misc_RNA (1)...(19): siRNA sense strand
uuaaagagggauaugcaga

SEQ ID NO: 2562410 - RNA, 19 nt, Homo sapiens
  misc_RNA (1)...(19): siRNA sense strand
caaccugacaccugaggau

SEQ ID NO: 2562411 - RNA, 19 nt, Homo sapiens
  misc_RNA (1)...(19): siRNA sense strand
cugaaggauaagacacaga

SEQ ID NO: 2562412 - RNA, 19 nt, Homo sapiens
  misc_RNA (1)...(19): siRNA sense strand
gaaccauggaggaggacaa

SEQ ID NO: 2562413 - RNA, 19 nt, Homo sapiens
  misc_RNA (1)...(19): siRNA sense strand
ccuacaacagaaagagaaa

SEQ ID NO: 2562414 - RNA, 19 nt, Homo sapiens
  misc_RNA (1)...(19): siRNA sense strand
cagagaagacauugggaga

SEQ ID NO: 2562415 - RNA, 19 nt, Homo sapiens
  misc_RNA (1)...(19): siRNA sense strand
ccguagaauaugaagaauu

SEQ ID NO: 2562416 - RNA, 19 nt, Homo sapiens
  misc_RNA (1)...(19): siRNA sense strand
guguuaggauuuagaccaa

SEQ ID NO: 2562417 - RNA, 19 nt, Homo sapiens
  misc_RNA (1)...(19): siRNA sense strand
caaaauugaaagugaggaa

SEQ ID NO: 2562418 - RNA, 19 nt, Homo sapiens
  misc_RNA (1)...(19): siRNA sense strand
ggaaacuagaagagcuauu

SEQ ID NO: 2562419 - RNA, 19 nt, Homo sapiens
  misc_RNA (1)...(19): siRNA sense strand
aggauuuagaccaaagaaa

SEQ ID NO: 2562420 - RNA, 19 nt, Homo sapiens
  misc_RNA (1)...(19): siRNA sense strand
acagaaagagaaacagaau

SEQ ID NO: 2562421 - RNA, 19 nt, Homo sapiens
  misc_RNA (1)...(19): siRNA sense strand
guaccagagcucagcgaau

SEQ ID NO: 2562422 - RNA, 19 nt, Homo sapiens
  misc_RNA (1)...(19): siRNA sense strand
cagaaacgggagugugauu

SEQ ID NO: 2562423 - RNA, 19 nt, Homo sapiens
  misc_RNA (1)...(19): siRNA sense strand
gauaauacacucaacgaca

SEQ ID NO: 2562424 - RNA, 19 nt, Homo sapiens
  misc_RNA (1)...(19): siRNA sense strand
ggcaaagcaucgaacaaaa

SEQ ID NO: 2562425 - RNA, 19 nt, Homo sapiens
  misc_RNA (1)...(19): siRNA sense strand
uuggaaacuagaagagcua

SEQ ID NO: 2562426 - RNA, 19 nt, Homo sapiens
  misc_RNA (1)...(19): siRNA sense strand
cagaaagagaaacagaauu

SEQ ID NO: 2562427 - RNA, 19 nt, Homo sapiens
  misc_RNA (1)...(19): siRNA sense strand
accaggagcuagcaggaaa

SEQ ID NO: 2562428 - RNA, 19 nt, Homo sapiens
  misc_RNA (1)...(19): siRNA sense strand
acacagugcagaagcaaaa

SEQ ID NO: 2562429 - RNA, 19 nt, Homo sapiens
  misc_RNA (1)...(19): siRNA sense strand
ccucuuugacauuggaaaa

SEQ ID NO: 2562430 - RNA, 19 nt, Homo sapiens
  misc_RNA (1)...(19): siRNA sense strand
agauugggaaggaaauuaa

SEQ ID NO: 2562431 - RNA, 19 nt, Homo sapiens
  misc_RNA (1)...(19): siRNA sense strand
gugugauugugaauagcaa

SEQ ID NO: 2562432 - RNA, 19 nt, Homo sapiens
  misc_RNA (1)...(19): siRNA sense strand
ucaggaagcaguaugggaa

SEQ ID NO: 2562433 - RNA, 19 nt, Homo sapiens
  misc_RNA (1)...(19): siRNA sense strand
gaauaucaggacuggguca

SEQ ID NO: 2562434 - RNA, 19 nt, Homo sapiens
  misc_RNA (1)...(19): siRNA sense strand
accagaaguucaaggcaga

SEQ ID NO: 2562435 - RNA, 19 nt, Homo sapiens
  misc_RNA (1)...(19): siRNA sense strand
aauuacugaccguagaaua

SEQ ID NO: 2562436 - RNA, 19 nt, Homo sapiens
  misc_RNA (1)...(19): siRNA sense strand
auuacugaccguagaauau

SEQ ID NO: 2562437 - RNA, 19 nt, Homo sapiens
  misc_RNA (1)...(19): siRNA sense strand
gugcagguggcgaagauau

SEQ ID NO: 2562438 - RNA, 19 nt, Homo sapiens
  misc_RNA (1)...(19): siRNA sense strand
cccaauguguaaagaacga

SEQ ID NO: 2562439 - RNA, 19 nt, Homo sapiens
  misc_RNA (1)...(19): siRNA sense strand
gagaaguuucccugacaga

SEQ ID NO: 2562440 - RNA, 19 nt, Homo sapiens
  misc_RNA (1)...(19): siRNA sense strand
augaaauaucugcagagaa

SEQ ID NO: 2562441 - RNA, 19 nt, Homo sapiens
  misc_RNA (1)...(19): siRNA sense strand
acaagcaaccagaaaucua

SEQ ID NO: 2562442 - RNA, 19 nt, Homo sapiens
  misc_RNA (1)...(19): siRNA sense strand
acaacugaaaguacugaaa

SEQ ID NO: 2562443 - RNA, 19 nt, Homo sapiens
  misc_RNA (1)...(19): siRNA sense strand
ccaucaagauugggaagga

SEQ ID NO: 2562444 - RNA, 19 nt, Homo sapiens
  misc_RNA (1)...(19): siRNA sense strand
aucaagauugggaaggaaa

SEQ ID NO: 2562445 - RNA, 19 nt, Homo sapiens
  misc_RNA (1)...(19): siRNA sense strand
cgggagugugauugugaau

SEQ ID NO: 2562446 - RNA, 19 nt, Homo sapiens
  misc_RNA (1)...(19): siRNA sense strand
ucaagauugggaaggaaau

SEQ ID NO: 2562447 - RNA, 19 nt, Homo sapiens
  misc_RNA (1)...(19): siRNA sense strand
aggacaagcaaccagaaau

SEQ ID NO: 2562448 - RNA, 19 nt, Homo sapiens
  misc_RNA (1)...(19): siRNA sense strand
aaauugaaagugaggaagu

SEQ ID NO: 2562449 - RNA, 19 nt, Homo sapiens
  misc_RNA (1)...(19): siRNA sense strand
gcagagaauaaaacagaga

SEQ ID NO: 2562450 - RNA, 19 nt, Homo sapiens
  misc_RNA (1)...(19): siRNA sense strand
caacauugaaccagcugau

SEQ ID NO: 2562451 - RNA, 19 nt, Homo sapiens
  misc_RNA (1)...(19): siRNA sense strand
uugaaagugaggaagucua

SEQ ID NO: 2562452 - RNA, 19 nt, Homo sapiens
  misc_RNA (1)...(19): siRNA sense strand
agcacuagaggaagaacaa

SEQ ID NO: 2562453 - RNA, 19 nt, Homo sapiens
  misc_RNA (1)...(19): siRNA sense strand
caggaauccaugaaacaga

SEQ ID NO: 2562454 - RNA, 19 nt, Homo sapiens
  misc_RNA (1)...(19): siRNA sense strand
uacaacagaaagagaaaca

SEQ ID NO: 2562455 - RNA, 19 nt, Homo sapiens
  misc_RNA (1)...(19): siRNA sense strand
ccauggaggaggacaagca

SEQ ID NO: 2562456 - RNA, 19 nt, Homo sapiens
  misc_RNA (1)...(19): siRNA sense strand
cugaauuacugaccguaga

SEQ ID NO: 2562457 - RNA, 19 nt, Homo sapiens
  misc_RNA (1)...(19): siRNA sense strand
gccuacaacagaaagagaa

SEQ ID NO: 2562458 - RNA, 19 nt, Homo sapiens
  misc_RNA (1)...(19): siRNA sense strand
cacaggaauccaugaaaca

SEQ ID NO: 2562459 - RNA, 19 nt, Homo sapiens
  misc_RNA (1)...(19): siRNA sense strand
ugagaaauaaagaggucaa

SEQ ID NO: 2562460 - RNA, 19 nt, Homo sapiens
  misc_RNA (1)...(19): siRNA sense strand
agagaacaccagagaacau

SEQ ID NO: 2562461 - RNA, 19 nt, Homo sapiens
  misc_RNA (1)...(19): siRNA sense strand
agcaauaacgcaagugaca

SEQ ID NO: 2562462 - RNA, 19 nt, Homo sapiens
  misc_RNA (1)...(19): siRNA sense strand
ccugagaaauaaagagguc

SEQ ID NO: 2562463 - RNA, 19 nt, Homo sapiens
  misc_RNA (1)...(19): siRNA sense strand
ccaugaaaagagagaacuu

SEQ ID NO: 2562464 - RNA, 19 nt, Homo sapiens
  misc_RNA (1)...(19): siRNA sense strand
agguaagagugaugagcaa

SEQ ID NO: 2562465 - RNA, 19 nt, Homo sapiens
  misc_RNA (1)...(19): siRNA sense strand
accuagaguacaagagaaa

SEQ ID NO: 2562466 - RNA, 19 nt, Homo sapiens
  misc_RNA (1)...(19): siRNA sense strand
caaucaaugaagugaagaa

SEQ ID NO: 2562467 - RNA, 19 nt, Homo sapiens
  misc_RNA (1)...(19): siRNA sense strand
aggaauagagagugacuuu

SEQ ID NO: 2562468 - RNA, 19 nt, Homo sapiens
  misc_RNA (1)...(19): siRNA sense strand
cgaagaacaagaagcggaa

SEQ ID NO: 2562469 - RNA, 19 nt, Homo sapiens
  misc_RNA (1)...(19): siRNA sense strand
aguacaagagaaagggauu

SEQ ID NO: 2562470 - RNA, 19 nt, Homo sapiens
  misc_RNA (1)...(19): siRNA sense strand
ggccagaggaauagagagu

SEQ ID NO: 2562471 - RNA, 19 nt, Homo sapiens
  misc_RNA (1)...(19): siRNA sense strand
guauauugauugcugggua

SEQ ID NO: 2562472 - RNA, 19 nt, Homo sapiens
  misc_RNA (1)...(19): siRNA sense strand
acucuggaauguuuggaaa

SEQ ID NO: 2562473 - RNA, 19 nt, Homo sapiens
  misc_RNA (1)...(19): siRNA sense strand
uggaccaauccuaaagaaa

SEQ ID NO: 2562474 - RNA, 19 nt, Homo sapiens
  misc_RNA (1)...(19): siRNA sense strand
ccgaagaacaagaagcgga

SEQ ID NO: 2562475 - RNA, 19 nt, Homo sapiens
  misc_RNA (1)...(19): siRNA sense strand
agauaagagagcagauguu

SEQ ID NO: 2562476 - RNA, 19 nt, Homo sapiens
  misc_RNA (1)...(19): siRNA sense strand
agaugacauuacugaacua

SEQ ID NO: 2562477 - RNA, 19 nt, Homo sapiens
  misc_RNA (1)...(19): siRNA sense strand
gaccaauccuaaagaaaau

SEQ ID NO: 2562478 - RNA, 19 nt, Homo sapiens
  misc_RNA (1)...(19): siRNA sense strand
aagaacaagaagcggaaca

SEQ ID NO: 2562479 - RNA, 19 nt, Homo sapiens
  misc_RNA (1)...(19): siRNA sense strand
aggaaggaacucaagaaga

SEQ ID NO: 2562480 - RNA, 19 nt, Homo sapiens
  misc_RNA (1)...(19): siRNA sense strand
cauugaacgcugccugaaa

SEQ ID NO: 2562481 - RNA, 19 nt, Homo sapiens
  misc_RNA (1)...(19): siRNA sense strand
gagccauugcagugguuau

SEQ ID NO: 2562482 - RNA, 19 nt, Homo sapiens
  misc_RNA (1)...(19): siRNA sense strand
cuggaaaggagaaugacuu

SEQ ID NO: 2562483 - RNA, 19 nt, Homo sapiens
  misc_RNA (1)...(19): siRNA sense strand
gguccugaacgcauguaua

SEQ ID NO: 2562484 - RNA, 19 nt, Homo sapiens
  misc_RNA (1)...(19): siRNA sense strand
augaagacauggaguccuu

SEQ ID NO: 2562485 - RNA, 19 nt, Homo sapiens
  misc_RNA (1)...(19): siRNA sense strand
gaguacaagagaaagggau

SEQ ID NO: 2562486 - RNA, 19 nt, Homo sapiens
  misc_RNA (1)...(19): siRNA sense strand
aaauggaauuccucgaaaa

SEQ ID NO: 2562487 - RNA, 19 nt, Homo sapiens
  misc_RNA (1)...(19): siRNA sense strand
ccuuggcaacagauggaaa

SEQ ID NO: 2562488 - RNA, 19 nt, Homo sapiens
  misc_RNA (1)...(19): siRNA sense strand
ggccaaaguggacaagaga

SEQ ID NO: 2562489 - RNA, 19 nt, Homo sapiens
  misc_RNA (1)...(19): siRNA sense strand
cucaagaagaccuagagua

SEQ ID NO: 2562490 - RNA, 19 nt, Homo sapiens
  misc_RNA (1)...(19): siRNA sense strand
aguaugcaggcuaggcaaa

SEQ ID NO: 2562491 - RNA, 19 nt, Homo sapiens
  misc_RNA (1)...(19): siRNA sense strand
ucacuaaauccuaucucaa

SEQ ID NO: 2562492 - RNA, 19 nt, Homo sapiens
  misc_RNA (1)...(19): siRNA sense strand
acaugaaauaccagugaaa

SEQ ID NO: 2562493 - RNA, 19 nt, Homo sapiens
  misc_RNA (1)...(19): siRNA sense strand
cuauggaguucaaaggaca

SEQ ID NO: 2562494 - RNA, 19 nt, Homo sapiens
  misc_RNA (1)...(19): siRNA sense strand
ucaucuggaacaagguaaa

SEQ ID NO: 2562495 - RNA, 19 nt, Homo sapiens
  misc_RNA (1)...(19): siRNA sense strand
ccagaaaagcaugaaguaa

SEQ ID NO: 2562496 - RNA, 19 nt, Homo sapiens
  misc_RNA (1)...(19): siRNA sense strand
gggucacuauggaguucaa

SEQ ID NO: 2562497 - RNA, 19 nt, Homo sapiens
  misc_RNA (1)...(19): siRNA sense strand
gggagaaggccaucaccca

SEQ ID NO: 2562498 - RNA, 19 nt, Homo sapiens
  misc_RNA (1)...(19): siRNA sense strand
cagaaaagcaugaaguaac

SEQ ID NO: 2562499 - RNA, 19 nt, Homo sapiens
  misc_RNA (1)...(19): siRNA sense strand
gcaugaagguggaggacgu

SEQ ID NO: 2562500 - RNA, 19 nt, Homo sapiens
  misc_RNA (1)...(19): siRNA sense strand
cugccaaagugauggacau

SEQ ID NO: 2562501 - RNA, 19 nt, Homo sapiens
  misc_RNA (1)...(19): siRNA sense strand
gcuacauccugguggacau

SEQ ID NO: 2562502 - RNA, 19 nt, Homo sapiens
  misc_RNA (1)...(19): siRNA sense strand
aaaccaagugucugggcaa

SEQ ID NO: 2562503 - RNA, 19 nt, Homo sapiens
  misc_RNA (1)...(19): siRNA sense strand
augacaucuucgugggcaa

SEQ ID NO: 2562504 - RNA, 19 nt, Homo sapiens
  misc_RNA (1)...(19): siRNA sense strand
gugcgcagcucaagggcuu

SEQ ID NO: 2562505 - RNA, 19 nt, Homo sapiens
  misc_RNA (1)...(19): siRNA sense strand
cuucaaggccaaugagaac

SEQ ID NO: 2562506 - RNA, 19 nt, Homo sapiens
  misc_RNA (1)...(19): siRNA sense strand
agcagauggccuugaacaa

SEQ ID NO: 2562507 - RNA, 19 nt, Homo sapiens
  misc_RNA (1)...(19): siRNA sense strand
acaucugguccaaggagaa

SEQ ID NO: 2562508 - RNA, 19 nt, Homo sapiens
  misc_RNA (1)...(19): siRNA sense strand
acaaguacuguguggccua

SEQ ID NO: 2562509 - RNA, 19 nt, Homo sapiens
  misc_RNA (1)...(19): siRNA sense strand
aggacaaacgucacaaaga

SEQ ID NO: 2562510 - RNA, 19 nt, Homo sapiens
  misc_RNA (1)...(19): siRNA sense strand
ucgcacagaaccugccaaa

SEQ ID NO: 2562511 - RNA, 19 nt, Homo sapiens
  misc_RNA (1)...(19): siRNA sense strand
ucuucaaggccaaugagaa

SEQ ID NO: 2562512 - RNA, 19 nt, Homo sapiens
  misc_RNA (1)...(19): siRNA sense strand
cagcagcccucuugcccaa

SEQ ID NO: 2562513 - RNA, 19 nt, Homo sapiens
  misc_RNA (1)...(19): siRNA sense strand
ccaacugcuugaaggagga

SEQ ID NO: 2562514 - RNA, 19 nt, Homo sapiens
  misc_RNA (1)...(19): siRNA sense strand
ccguguuggccgagcagau

SEQ ID NO: 2562515 - RNA, 19 nt, Homo sapiens
  misc_RNA (1)...(19): siRNA sense strand
guauaagaugggccagaca

SEQ ID NO: 2562516 - RNA, 19 nt, Homo sapiens
  misc_RNA (1)...(19): siRNA sense strand
uggacaagguggagaacau

SEQ ID NO: 2562517 - RNA, 19 nt, Homo sapiens
  misc_RNA (1)...(19): siRNA sense strand
gcaucauuaacaagggaua

SEQ ID NO: 2562518 - RNA, 19 nt, Homo sapiens
  misc_RNA (1)...(19): siRNA sense strand
cagagaaaagcuagacaaa

SEQ ID NO: 2562519 - RNA, 19 nt, Homo sapiens
  misc_RNA (1)...(19): siRNA sense strand
acagaaaagcugaagagaa

SEQ ID NO: 2562520 - RNA, 19 nt, Homo sapiens
  misc_RNA (1)...(19): siRNA sense strand
aggaagaacaugacaacca

SEQ ID NO: 2562521 - RNA, 19 nt, Homo sapiens
  misc_RNA (1)...(19): siRNA sense strand
acuuaaugcaggaagaaca

SEQ ID NO: 2562522 - RNA, 19 nt, Homo sapiens
  misc_RNA (1)...(19): siRNA sense strand
ccauugaugacgaugaaau

SEQ ID NO: 2562523 - RNA, 19 nt, Homo sapiens
  misc_RNA (1)...(19): siRNA sense strand
aaacaaugcaagacauaca

SEQ ID NO: 2562524 - RNA, 19 nt, Homo sapiens
  misc_RNA (1)...(19): siRNA sense strand
caucauuaacaagggauaa

SEQ ID NO: 2562525 - RNA, 19 nt, Homo sapiens
  misc_RNA (1)...(19): siRNA sense strand
ugaagaagcucuagccaac

SEQ ID NO: 2562526 - RNA, 19 nt, Homo sapiens
  misc_RNA (1)...(19): siRNA sense strand
gacaggaagcugaaggaga

SEQ ID NO: 2562527 - RNA, 19 nt, Homo sapiens
  misc_RNA (1)...(19): siRNA sense strand
gagaaaaguacauugaaga

SEQ ID NO: 2562528 - RNA, 19 nt, Homo sapiens
  misc_RNA (1)...(19): siRNA sense strand
caaggauagucuggagcaa

SEQ ID NO: 2562529 - RNA, 19 nt, Homo sapiens
  misc_RNA (1)...(19): siRNA sense strand
uugagaacucugugagaca

SEQ ID NO: 2562530 - RNA, 19 nt, Homo sapiens
  misc_RNA (1)...(19): siRNA sense strand
aaaucaaggaggcuacaaa

SEQ ID NO: 2562531 - RNA, 19 nt, Homo sapiens
  misc_RNA (1)...(19): siRNA sense strand
aagcaggcaaucacagaaa

SEQ ID NO: 2562532 - RNA, 19 nt, Homo sapiens
  misc_RNA (1)...(19): siRNA sense strand
uugaauuccuagacaccaa

SEQ ID NO: 2562533 - RNA, 19 nt, Homo sapiens
  misc_RNA (1)...(19): siRNA sense strand
agagggcagaacagagaaa

SEQ ID NO: 2562534 - RNA, 19 nt, Homo sapiens
  misc_RNA (1)...(19): siRNA sense strand
gcuacaaggcacaaaugau

SEQ ID NO: 2562535 - RNA, 19 nt, Homo sapiens
  misc_RNA (1)...(19): siRNA sense strand
uugaagaagcucuagccaa

SEQ ID NO: 2562536 - RNA, 19 nt, Homo sapiens
  misc_RNA (1)...(19): siRNA sense strand
cagauagggcuuugcuaca

SEQ ID NO: 2562537 - RNA, 19 nt, Homo sapiens
  misc_RNA (1)...(19): siRNA sense strand
ugaaacaccugaaaggcca

SEQ ID NO: 2562538 - RNA, 19 nt, Homo sapiens
  misc_RNA (1)...(19): siRNA sense strand
gucuauaaauuggaaggaa

SEQ ID NO: 2562539 - RNA, 19 nt, Homo sapiens
  misc_RNA (1)...(19): siRNA sense strand
ccugaagagcuuaaaagaa

SEQ ID NO: 2562540 - RNA, 19 nt, Homo sapiens
  misc_RNA (1)...(19): siRNA sense strand
ccacaugggcagacuggca

SEQ ID NO: 2562541 - RNA, 19 nt, Homo sapiens
  misc_RNA (1)...(19): siRNA sense strand
aaaacagagucuuggauca

SEQ ID NO: 2562542 - RNA, 19 nt, Homo sapiens
  misc_RNA (1)...(19): siRNA sense strand
uuucaaaucccuuccgcua

SEQ ID NO: 2562543 - RNA, 19 nt, Homo sapiens
  misc_RNA (1)...(19): siRNA sense strand
uguauauagaagcaggcaa

SEQ ID NO: 2562544 - RNA, 19 nt, Homo sapiens
  misc_RNA (1)...(19): siRNA sense strand
cugaagagcuuaaaagaag

SEQ ID NO: 2562545 - RNA, 19 nt, Homo sapiens
  misc_RNA (1)...(19): siRNA sense strand
gagucuuggaucagauuga

SEQ ID NO: 2562546 - RNA, 19 nt, Homo sapiens
  misc_RNA (1)...(19): siRNA sense strand
uugcugaaguguggaggaa

SEQ ID NO: 2562547 - RNA, 19 nt, Homo sapiens
  misc_RNA (1)...(19): siRNA sense strand
aagaaaaggcucuguggau

SEQ ID NO: 2562548 - RNA, 19 nt, Homo sapiens
  misc_RNA (1)...(19): siRNA sense strand
agguagaggagguaagaaa

SEQ ID NO: 2562549 - RNA, 19 nt, Homo sapiens
  misc_RNA (1)...(19): siRNA sense strand
cagagagaaaggagaggua

SEQ ID NO: 2562550 - RNA, 19 nt, Homo sapiens
  misc_RNA (1)...(19): siRNA sense strand
cuggaaugguucagcaaau

SEQ ID NO: 2562551 - RNA, 19 nt, Homo sapiens
  misc_RNA (1)...(19): siRNA sense strand
cuacaauggagaagcauau

SEQ ID NO: 2562552 - RNA, 19 nt, Homo sapiens
  misc_RNA (1)...(19): siRNA sense strand
agaggaaggaaguggaaga

SEQ ID NO: 2562553 - RNA, 19 nt, Homo sapiens
  misc_RNA (1)...(19): siRNA sense strand
agguaagaaaggagcagua

SEQ ID NO: 2562554 - RNA, 19 nt, Homo sapiens
  misc_RNA (1)...(19): siRNA sense strand
ugacaaaggaggagaacag

SEQ ID NO: 2562555 - RNA, 19 nt, Homo sapiens
  misc_RNA (1)...(19): siRNA sense strand
gaaggaagauaguucgaga

SEQ ID NO: 2562556 - RNA, 19 nt, Homo sapiens
  misc_RNA (1)...(19): siRNA sense strand
agauaguucgagagaagaa

SEQ ID NO: 2562557 - RNA, 19 nt, Homo sapiens
  misc_RNA (1)...(19): siRNA sense strand
aggaaguggaagagacuga

SEQ ID NO: 2562558 - RNA, 19 nt, Homo sapiens
  misc_RNA (1)...(19): siRNA sense strand
ccgagguacuggaaugcaa

SEQ ID NO: 2562559 - RNA, 19 nt, Homo sapiens
  misc_RNA (1)...(19): siRNA sense strand
uguaaaagcugcaacggaa

SEQ ID NO: 2562560 - RNA, 19 nt, Homo sapiens
  misc_RNA (1)...(19): siRNA sense strand
cuuauauaauggugcaaca

SEQ ID NO: 2562561 - RNA, 19 nt, Homo sapiens
  misc_RNA (1)...(19): siRNA sense strand
uggagaagcauaugaggau

SEQ ID NO: 2562562 - RNA, 19 nt, Homo sapiens
  misc_RNA (1)...(19): siRNA sense strand
uggaagagacugaugagau

SEQ ID NO: 2562563 - RNA, 19 nt, Homo sapiens
  misc_RNA (1)...(19): siRNA sense strand
ggaaggaaguggaagagac

SEQ ID NO: 2562564 - RNA, 19 nt, Homo sapiens
  misc_RNA (1)...(19): siRNA sense strand
auauaauggugcaacaaga

SEQ ID NO: 2562565 - RNA, 19 nt, Homo sapiens
  misc_RNA (1)...(19): siRNA sense strand
augaaggagagaaguuuaa

SEQ ID NO: 2562566 - RNA, 19 nt, Homo sapiens
  misc_RNA (1)...(19): siRNA sense strand
cccuagaagacuuauauaa

SEQ ID NO: 2562567 - RNA, 19 nt, Homo sapiens
  misc_RNA (1)...(19): siRNA sense strand
agguaaacuuuccugagaa

SEQ ID NO: 2562568 - RNA, 19 nt, Homo sapiens
  misc_RNA (1)...(19): siRNA sense strand
ugauaagaacccaaaugaa

SEQ ID NO: 2562569 - RNA, 19 nt, Homo sapiens
  misc_RNA (1)...(19): siRNA sense strand
aauuaaagaggguggagca

SEQ ID NO: 2562570 - RNA, 19 nt, Homo sapiens
  misc_RNA (1)...(19): siRNA sense strand
ggucaaacccaaugcuacu

SEQ ID NO: 2562571 - RNA, 19 nt, Homo sapiens
  misc_RNA (1)...(19): siRNA sense strand
cuggaaugcaaauaagaau

SEQ ID NO: 2562572 - RNA, 19 nt, Homo sapiens
  misc_RNA (1)...(19): siRNA sense strand
aggaagauaguucgagaga

SEQ ID NO: 2562573 - RNA, 19 nt, Homo sapiens
  misc_RNA (1)...(19): siRNA sense strand
agauaacauuccaugguga

SEQ ID NO: 2562574 - RNA, 19 nt, Homo sapiens
  misc_RNA (1)...(19): siRNA sense strand
cgagaggaaggaaguggaa

SEQ ID NO: 2562575 - RNA, 19 nt, Homo sapiens
  misc_RNA (1)...(19): siRNA sense strand
caguaacccuagaagacuu

SEQ ID NO: 2562576 - RNA, 19 nt, Homo sapiens
  misc_RNA (1)...(19): siRNA sense strand
acuacaauggagaagcaua

SEQ ID NO: 2562577 - RNA, 19 nt, Homo sapiens
  misc_RNA (1)...(19): siRNA sense strand
gaugcaaagaaaagggaau

SEQ ID NO: 2562578 - RNA, 19 nt, Homo sapiens
  misc_RNA (1)...(19): siRNA sense strand
aaugaaggagagaaguuua

SEQ ID NO: 2562579 - RNA, 19 nt, Homo sapiens
  misc_RNA (1)...(19): siRNA sense strand
aguccuaaagauagaugua

SEQ ID NO: 2562580 - RNA, 19 nt, Homo sapiens
  misc_RNA (1)...(19): siRNA sense strand
ccaauuuaucguagaccau

SEQ ID NO: 2562581 - RNA, 19 nt, Homo sapiens
  misc_RNA (1)...(19): siRNA sense strand
augugaagguagaggaggu

SEQ ID NO: 2562582 - RNA, 19 nt, Homo sapiens
  misc_RNA (1)...(19): siRNA sense strand
uugacaaaggcaugaaaga

SEQ ID NO: 2562583 - RNA, 19 nt, Homo sapiens
  misc_RNA (1)...(19): siRNA sense strand
acccaaugcuacucaggaa

SEQ ID NO: 2562584 - RNA, 19 nt, Homo sapiens
  misc_RNA (1)...(19): siRNA sense strand
guaagaaaggagcaguaga

SEQ ID NO: 2562585 - RNA, 19 nt, Homo sapiens
  misc_RNA (1)...(19): siRNA sense strand
cccaaaugaaggagagaag

SEQ ID NO: 2562586 - RNA, 19 nt, Homo sapiens
  misc_RNA (1)...(19): siRNA sense strand
auaugaggaugaugaacau

SEQ ID NO: 2562587 - RNA, 19 nt, Homo sapiens
  misc_RNA (1)...(19): siRNA sense strand
agauaucaaguguguacua

SEQ ID NO: 2562588 - RNA, 19 nt, Homo sapiens
  misc_RNA (1)...(19): siRNA sense strand
aagaaugugauuugugaca

SEQ ID NO: 2562589 - RNA, 19 nt, Homo sapiens
  misc_RNA (1)...(19): siRNA sense strand
cugcaacggaaggaagaua

SEQ ID NO: 2562590 - RNA, 19 nt, Homo sapiens
  misc_RNA (1)...(19): siRNA sense strand
uguuagaucagaaggacca

SEQ ID NO: 2562591 - RNA, 19 nt, Homo sapiens
  misc_RNA (1)...(19): siRNA sense strand
ucucucugaugcaaagaaa

SEQ ID NO: 2562592 - RNA, 19 nt, Homo sapiens
  misc_RNA (1)...(19): siRNA sense strand
gaaaggagcaguagagugc

SEQ ID NO: 2562593 - RNA, 19 nt, Homo sapiens
  misc_RNA (1)...(19): siRNA sense strand
auaugacaaaggaggagaa

SEQ ID NO: 2562594 - RNA, 19 nt, Homo sapiens
  misc_RNA (1)...(19): siRNA sense strand
caaaggaggagaacaggca

SEQ ID NO: 2562595 - RNA, 19 nt, Homo sapiens
  misc_RNA (1)...(19): siRNA sense strand
aaggaggagaacaggcaau

SEQ ID NO: 2562596 - RNA, 19 nt, Homo sapiens
  misc_RNA (1)...(19): siRNA sense strand
ucgccuaaucaucgaauuu

SEQ ID NO: 2562597 - RNA, 19 nt, Homo sapiens
  misc_RNA (1)...(19): siRNA sense strand
gcaagaacucugaugggaa

SEQ ID NO: 2562598 - RNA, 19 nt, Homo sapiens
  misc_RNA (1)...(19): siRNA sense strand
ggugacugagcgagagaaa

SEQ ID NO: 2562599 - RNA, 19 nt, Homo sapiens
  misc_RNA (1)...(19): siRNA sense strand
ugguauucccugaggacua

SEQ ID NO: 2562600 - RNA, 19 nt, Homo sapiens
  misc_RNA (1)...(19): siRNA sense strand
aggaaagggaggaggagga

SEQ ID NO: 2562601 - RNA, 19 nt, Homo sapiens
  misc_RNA (1)...(19): siRNA sense strand
uagaaagaguccaggggaa

SEQ ID NO: 2562602 - RNA, 19 nt, Homo sapiens
  misc_RNA (1)...(19): siRNA sense strand
agaugaaccuaguggugau

SEQ ID NO: 2562603 - RNA, 19 nt, Homo sapiens
  misc_RNA (1)...(19): siRNA sense strand
ucauugauaaggagagcaa

SEQ ID NO: 2562604 - RNA, 19 nt, Homo sapiens
  misc_RNA (1)...(19): siRNA sense strand
gcgucauccuugagggcga

SEQ ID NO: 2562605 - RNA, 19 nt, Homo sapiens
  misc_RNA (1)...(19): siRNA sense strand
guacuuacgccgaggagga

SEQ ID NO: 2562606 - RNA, 19 nt, Homo sapiens
  misc_RNA (1)...(19): siRNA sense strand
gguacaagcuggcagagga

SEQ ID NO: 2562607 - RNA, 19 nt, Homo sapiens
  misc_RNA (1)...(19): siRNA sense strand
aggaggaggaggaggacga

SEQ ID NO: 2562608 - RNA, 19 nt, Homo sapiens
  misc_RNA (1)...(19): siRNA sense strand
uggcagagcuguggcggaa

SEQ ID NO: 2562609 - RNA, 19 nt, Homo sapiens
  misc_RNA (1)...(19): siRNA sense strand
cgaauuugcucaccgggaa

SEQ ID NO: 2562610 - RNA, 19 nt, Homo sapiens
  misc_RNA (1)...(19): siRNA sense strand
caaagcugcaggugagcaa

SEQ ID NO: 2562611 - RNA, 19 nt, Homo sapiens
  misc_RNA (1)...(19): siRNA sense strand
aaauacaacugccggguga

SEQ ID NO: 2562612 - RNA, 19 nt, Homo sapiens
  misc_RNA (1)...(19): siRNA sense strand
aggaggaggaggaggagga

SEQ ID NO: 2562613 - RNA, 19 nt, Homo sapiens
  misc_RNA (1)...(19): siRNA sense strand
aggaggaggaggaggagga

SEQ ID NO: 2562614 - RNA, 19 nt, Homo sapiens
  misc_RNA (1)...(19): siRNA sense strand
aggaggaggaggaggagga

SEQ ID NO: 2562615 - RNA, 19 nt, Homo sapiens
  misc_RNA (1)...(19): siRNA sense strand
ccgaaagcguuccgaggga

SEQ ID NO: 2562616 - RNA, 19 nt, Homo sapiens
  misc_RNA (1)...(19): siRNA sense strand
ugacaaagcugcaggugag

SEQ ID NO: 2562617 - RNA, 19 nt, Homo sapiens
  misc_RNA (1)...(19): siRNA sense strand
cguccagccaacugacaaa

SEQ ID NO: 2562618 - RNA, 19 nt, Homo sapiens
  misc_RNA (1)...(19): siRNA sense strand
gugacaaagcugcagguga

SEQ ID NO: 2562619 - RNA, 19 nt, Homo sapiens
  misc_RNA (1)...(19): siRNA sense strand
cauccguguucuagauaca

SEQ ID NO: 2562620 - RNA, 19 nt, Homo sapiens
  misc_RNA (1)...(19): siRNA sense strand
ccucacagauaacugggua

SEQ ID NO: 2562621 - RNA, 19 nt, Homo sapiens
  misc_RNA (1)...(19): siRNA sense strand
guggauggcgaguggcaga

SEQ ID NO: 2562622 - RNA, 19 nt, Homo sapiens
  misc_RNA (1)...(19): siRNA sense strand
cagaauuuccaguggucca

SEQ ID NO: 2562623 - RNA, 19 nt, Homo sapiens
  misc_RNA (1)...(19): siRNA sense strand
guuacagugcaaagaugaa

SEQ ID NO: 2562624 - RNA, 19 nt, Homo sapiens
  misc_RNA (1)...(19): siRNA sense strand
gaugcauccuggaggcuca

SEQ ID NO: 2562625 - RNA, 19 nt, Homo sapiens
  misc_RNA (1)...(19): siRNA sense strand
cagccaacugacaaagaau

SEQ ID NO: 2562626 - RNA, 19 nt, Homo sapiens
  misc_RNA (1)...(19): siRNA sense strand
uggagcaggugcagcccaa

SEQ ID NO: 2562627 - RNA, 19 nt, Homo sapiens
  misc_RNA (1)...(19): siRNA sense strand
aaagggaggaggaggagga

SEQ ID NO: 2562628 - RNA, 19 nt, Homo sapiens
  misc_RNA (1)...(19): siRNA sense strand
cggcagaaaguuggcgaga

SEQ ID NO: 2562629 - RNA, 19 nt, Homo sapiens
  misc_RNA (1)...(19): siRNA sense strand
aggaggaggacgacgacga

SEQ ID NO: 2562630 - RNA, 19 nt, Homo sapiens
  misc_RNA (1)...(19): siRNA sense strand
augaaugccaugugacuga

SEQ ID NO: 2562631 - RNA, 19 nt, Homo sapiens
  misc_RNA (1)...(19): siRNA sense strand
aggaggaggaggacgacga

SEQ ID NO: 2562632 - RNA, 19 nt, Homo sapiens
  misc_RNA (1)...(19): siRNA sense strand
cggcaaaccauguggggaa

SEQ ID NO: 2562633 - RNA, 19 nt, Homo sapiens
  misc_RNA (1)...(19): siRNA sense strand
gaagugaaucgcagggaga

SEQ ID NO: 2562634 - RNA, 19 nt, Homo sapiens
  misc_RNA (1)...(19): siRNA sense strand
cagaggaguuuguggccau

SEQ ID NO: 2562635 - RNA, 19 nt, Homo sapiens
  misc_RNA (1)...(19): siRNA sense strand
cuauauugcaguuggacau

SEQ ID NO: 2562636 - RNA, 19 nt, Homo sapiens
  misc_RNA (1)...(19): siRNA sense strand
acuaaauaccacaguguca

SEQ ID NO: 2562637 - RNA, 19 nt, Homo sapiens
  misc_RNA (1)...(19): siRNA sense strand
acaugagaaccgugcaaau

SEQ ID NO: 2562638 - RNA, 19 nt, Homo sapiens
  misc_RNA (1)...(19): siRNA sense strand
acuuggagauguuggcaga

SEQ ID NO: 2562639 - RNA, 19 nt, Homo sapiens
  misc_RNA (1)...(19): siRNA sense strand
cugcagugcugauaaggau

SEQ ID NO: 2562640 - RNA, 19 nt, Homo sapiens
  misc_RNA (1)...(19): siRNA sense strand
cagcuauggaacucugaaa

SEQ ID NO: 2562641 - RNA, 19 nt, Homo sapiens
  misc_RNA (1)...(19): siRNA sense strand
gcagugcugauaaggauua

SEQ ID NO: 2562642 - RNA, 19 nt, Homo sapiens
  misc_RNA (1)...(19): siRNA sense strand
aggagggaguacagccaga

SEQ ID NO: 2562643 - RNA, 19 nt, Homo sapiens
  misc_RNA (1)...(19): siRNA sense strand
auaaagaaucccugacgga

SEQ ID NO: 2562644 - RNA, 19 nt, Homo sapiens
  misc_RNA (1)...(19): siRNA sense strand
ccgagaagguggacgugcu

SEQ ID NO: 2562645 - RNA, 19 nt, Homo sapiens
  misc_RNA (1)...(19): siRNA sense strand
ucauaaaggagguggacau

SEQ ID NO: 2562646 - RNA, 19 nt, Homo sapiens
  misc_RNA (1)...(19): siRNA sense strand
gggagaacguguauggcuu

SEQ ID NO: 2562647 - RNA, 19 nt, Homo sapiens
  misc_RNA (1)...(19): siRNA sense strand
ggcccaacgccaagaacaa

SEQ ID NO: 2562648 - RNA, 19 nt, Homo sapiens
  misc_RNA (1)...(19): siRNA sense strand
aggagaugcugaaggacga

SEQ ID NO: 2562649 - RNA, 19 nt, Homo sapiens
  misc_RNA (1)...(19): siRNA sense strand
caguggagaagguggacau

SEQ ID NO: 2562650 - RNA, 19 nt, Homo sapiens
  misc_RNA (1)...(19): siRNA sense strand
cugauuaugcggugaagau

SEQ ID NO: 2562651 - RNA, 19 nt, Homo sapiens
  misc_RNA (1)...(19): siRNA sense strand
ggaagguggaggaggugga

SEQ ID NO: 2562652 - RNA, 19 nt, Homo sapiens
  misc_RNA (1)...(19): siRNA sense strand
ugaagaucgucaaagccaa

SEQ ID NO: 2562653 - RNA, 19 nt, Homo sapiens
  misc_RNA (1)...(19): siRNA sense strand
gugagaagcccaacgcuga

SEQ ID NO: 2562654 - RNA, 19 nt, Homo sapiens
  misc_RNA (1)...(19): siRNA sense strand
acaaagacuacaagaucca

SEQ ID NO: 2562655 - RNA, 19 nt, Homo sapiens
  misc_RNA (1)...(19): siRNA sense strand
aguacaaagacuacaagau

SEQ ID NO: 2562656 - RNA, 19 nt, Homo sapiens
  misc_RNA (1)...(19): siRNA sense strand
ccgcaaggucaucgggauc

SEQ ID NO: 2562657 - RNA, 19 nt, Homo sapiens
  misc_RNA (1)...(19): siRNA sense strand
ccaacaaguuagaccacgu

SEQ ID NO: 2562658 - RNA, 19 nt, Homo sapiens
  misc_RNA (1)...(19): siRNA sense strand
gccugcaagugaagcggaa

SEQ ID NO: 2562659 - RNA, 19 nt, Homo sapiens
  misc_RNA (1)...(19): siRNA sense strand
ucauaaaggagguggacau

SEQ ID NO: 2562660 - RNA, 19 nt, Homo sapiens
  misc_RNA (1)...(19): siRNA sense strand
gggagaacguguauggcuu

SEQ ID NO: 2562661 - RNA, 19 nt, Homo sapiens
  misc_RNA (1)...(19): siRNA sense strand
ggcccaacgccaagaacaa

SEQ ID NO: 2562662 - RNA, 19 nt, Homo sapiens
  misc_RNA (1)...(19): siRNA sense strand
aggagaugcugaaggacga

SEQ ID NO: 2562663 - RNA, 19 nt, Homo sapiens
  misc_RNA (1)...(19): siRNA sense strand
caguggagaagguggacau

SEQ ID NO: 2562664 - RNA, 19 nt, Homo sapiens
  misc_RNA (1)...(19): siRNA sense strand
cugauuaugcggugaagau

SEQ ID NO: 2562665 - RNA, 19 nt, Homo sapiens
  misc_RNA (1)...(19): siRNA sense strand
ggaagguggaggaggugga

SEQ ID NO: 2562666 - RNA, 19 nt, Homo sapiens
  misc_RNA (1)...(19): siRNA sense strand
ugaagaucgucaaagccaa

SEQ ID NO: 2562667 - RNA, 19 nt, Homo sapiens
  misc_RNA (1)...(19): siRNA sense strand
gugagaagcccaacgcuga

SEQ ID NO: 2562668 - RNA, 19 nt, Homo sapiens
  misc_RNA (1)...(19): siRNA sense strand
acaaagacuacaagaucca

SEQ ID NO: 2562669 - RNA, 19 nt, Homo sapiens
  misc_RNA (1)...(19): siRNA sense strand
aguacaaagacuacaagau

SEQ ID NO: 2562670 - RNA, 19 nt, Homo sapiens
  misc_RNA (1)...(19): siRNA sense strand
ccgcaaggucaucgggauc

SEQ ID NO: 2562671 - RNA, 19 nt, Homo sapiens
  misc_RNA (1)...(19): siRNA sense strand
ccaacaaguuagaccacgu

SEQ ID NO: 2562672 - RNA, 19 nt, Homo sapiens
  misc_RNA (1)...(19): siRNA sense strand
gccugcaagugaagcggaa

SEQ ID NO: 2562673 - RNA, 19 nt, Homo sapiens
  misc_RNA (1)...(19): siRNA sense strand
ucauaaaggagguggacau

SEQ ID NO: 2562674 - RNA, 19 nt, Homo sapiens
  misc_RNA (1)...(19): siRNA sense strand
gggagaacguguauggcuu

SEQ ID NO: 2562675 - RNA, 19 nt, Homo sapiens
  misc_RNA (1)...(19): siRNA sense strand
ggcccaacgccaagaacaa

SEQ ID NO: 2562676 - RNA, 19 nt, Homo sapiens
  misc_RNA (1)...(19): siRNA sense strand
aggagaugcugaaggacga

SEQ ID NO: 2562677 - RNA, 19 nt, Homo sapiens
  misc_RNA (1)...(19): siRNA sense strand
caguggagaagguggacau

SEQ ID NO: 2562678 - RNA, 19 nt, Homo sapiens
  misc_RNA (1)...(19): siRNA sense strand
cugauuaugcggugaagau

SEQ ID NO: 2562679 - RNA, 19 nt, Homo sapiens
  misc_RNA (1)...(19): siRNA sense strand
ggaagguggaggaggugga

SEQ ID NO: 2562680 - RNA, 19 nt, Homo sapiens
  misc_RNA (1)...(19): siRNA sense strand
ugaagaucgucaaagccaa

SEQ ID NO: 2562681 - RNA, 19 nt, Homo sapiens
  misc_RNA (1)...(19): siRNA sense strand
gugagaagcccaacgcuga

SEQ ID NO: 2562682 - RNA, 19 nt, Homo sapiens
  misc_RNA (1)...(19): siRNA sense strand
acaaagacuacaagaucca

SEQ ID NO: 2562683 - RNA, 19 nt, Homo sapiens
  misc_RNA (1)...(19): siRNA sense strand
aguacaaagacuacaagau

SEQ ID NO: 2562684 - RNA, 19 nt, Homo sapiens
  misc_RNA (1)...(19): siRNA sense strand
ccgcaaggucaucgggauc

SEQ ID NO: 2562685 - RNA, 19 nt, Homo sapiens
  misc_RNA (1)...(19): siRNA sense strand
ccaacaaguuagaccacgu

SEQ ID NO: 2562686 - RNA, 19 nt, Homo sapiens
  misc_RNA (1)...(19): siRNA sense strand
gccugcaagugaagcggaa

SEQ ID NO: 2562687 - RNA, 19 nt, Homo sapiens
  misc_RNA (1)...(19): siRNA sense strand
gaacagagcucaagggcaa

SEQ ID NO: 2562688 - RNA, 19 nt, Homo sapiens
  misc_RNA (1)...(19): siRNA sense strand
gcagaaaggcaguugguga

SEQ ID NO: 2562689 - RNA, 19 nt, Homo sapiens
  misc_RNA (1)...(19): siRNA sense strand
gcucaagggcaaaggcaca

SEQ ID NO: 2562690 - RNA, 19 nt, Homo sapiens
  misc_RNA (1)...(19): siRNA sense strand
gcgauuagccauugagcga

SEQ ID NO: 2562691 - RNA, 19 nt, Homo sapiens
  misc_RNA (1)...(19): siRNA sense strand
ucgaaaugaugaaggacuu

SEQ ID NO: 2562692 - RNA, 19 nt, Homo sapiens
  misc_RNA (1)...(19): siRNA sense strand
gagcaauauucuagcaacu

SEQ ID NO: 2562693 - RNA, 19 nt, Homo sapiens
  misc_RNA (1)...(19): siRNA sense strand
gaggaaaccuucuggcuga

SEQ ID NO: 2562694 - RNA, 19 nt, Homo sapiens
  misc_RNA (1)...(19): siRNA sense strand
gauuauggcuuuaacgaca

SEQ ID NO: 2562695 - RNA, 19 nt, Homo sapiens
  misc_RNA (1)...(19): siRNA sense strand
ccauugaggucguggaucu

SEQ ID NO: 2562696 - RNA, 19 nt, Homo sapiens
  misc_RNA (1)...(19): siRNA sense strand
gggaaacagcugggacaaa

SEQ ID NO: 2562697 - RNA, 19 nt, Homo sapiens
  misc_RNA (1)...(19): siRNA sense strand
ggcugaggcugcagaacaa

SEQ ID NO: 2562698 - RNA, 19 nt, Homo sapiens
  misc_RNA (1)...(19): siRNA sense strand
caguugaaccugagggcuu

SEQ ID NO: 2562699 - RNA, 19 nt, Homo sapiens
  misc_RNA (1)...(19): siRNA sense strand
gaggaagaacagagcucaa

SEQ ID NO: 2562700 - RNA, 19 nt, Homo sapiens
  misc_RNA (1)...(19): siRNA sense strand
ccaaagaagaaaagcagaa

SEQ ID NO: 2562701 - RNA, 19 nt, Homo sapiens
  misc_RNA (1)...(19): siRNA sense strand
ucaggaaacugcugggaca

SEQ ID NO: 2562702 - RNA, 19 nt, Homo sapiens
  misc_RNA (1)...(19): siRNA sense strand
caucaaaucaagagcaagu

SEQ ID NO: 2562703 - RNA, 19 nt, Homo sapiens
  misc_RNA (1)...(19): siRNA sense strand
cggaaaagcuucuaacaca

SEQ ID NO: 2562704 - RNA, 19 nt, Homo sapiens
  misc_RNA (1)...(19): siRNA sense strand
cugagaagcuggaguucga

SEQ ID NO: 2562705 - RNA, 19 nt, Homo sapiens
  misc_RNA (1)...(19): siRNA sense strand
gcaccuacacuguggacau

SEQ ID NO: 2562706 - RNA, 19 nt, Homo sapiens
  misc_RNA (1)...(19): siRNA sense strand
gguagagaccauuggagau

SEQ ID NO: 2562707 - RNA, 19 nt, Homo sapiens
  misc_RNA (1)...(19): siRNA sense strand
gcaaaggcacagaggaaac

SEQ ID NO: 2562708 - RNA, 19 nt, Homo sapiens
  misc_RNA (1)...(19): siRNA sense strand
gacaaaucaagaugugaaa

SEQ ID NO: 2562709 - RNA, 19 nt, Homo sapiens
  misc_RNA (1)...(19): siRNA sense strand
aggcuaaagucucgaaacu

SEQ ID NO: 2562710 - RNA, 19 nt, Homo sapiens
  misc_RNA (1)...(19): siRNA sense strand
gcucaagaaaucauaaaca

SEQ ID NO: 2562711 - RNA, 19 nt, Homo sapiens
  misc_RNA (1)...(19): siRNA sense strand
ccaaagaggaauggcagua

SEQ ID NO: 2562712 - RNA, 19 nt, Homo sapiens
  misc_RNA (1)...(19): siRNA sense strand
ccacuuuggcaguaagaga

SEQ ID NO: 2562713 - RNA, 19 nt, Homo sapiens
  misc_RNA (1)...(19): siRNA sense strand
gcaagugauguguucgaaa

SEQ ID NO: 2562714 - RNA, 19 nt, Homo sapiens
  misc_RNA (1)...(19): siRNA sense strand
cagaagugccgguccgaau

SEQ ID NO: 2562715 - RNA, 19 nt, Homo sapiens
  misc_RNA (1)...(19): siRNA sense strand
gaggaauggcaguaggcau

SEQ ID NO: 2562716 - RNA, 19 nt, Homo sapiens
  misc_RNA (1)...(19): siRNA sense strand
gagaggaagucgugccagu

SEQ ID NO: 2562717 - RNA, 19 nt, Homo sapiens
  misc_RNA (1)...(19): siRNA sense strand
ucuuagaaaugcugagacu

SEQ ID NO: 2562718 - RNA, 19 nt, Homo sapiens
  misc_RNA (1)...(19): siRNA sense strand
ugaugaaggacuugcguca

SEQ ID NO: 2562719 - RNA, 19 nt, Homo sapiens
  misc_RNA (1)...(19): siRNA sense strand
gggcugaggcugcagaaca

SEQ ID NO: 2562720 - RNA, 19 nt, Homo sapiens
  misc_RNA (1)...(19): siRNA sense strand
auaaagggaagaagaccaa

SEQ ID NO: 2562721 - RNA, 19 nt, Homo sapiens
  misc_RNA (1)...(19): siRNA sense strand
cagcugggacaaaggaauu

SEQ ID NO: 2562722 - RNA, 19 nt, Homo sapiens
  misc_RNA (1)...(19): siRNA sense strand
agguagagaccauuggaga

SEQ ID NO: 2562723 - RNA, 19 nt, Homo sapiens
  misc_RNA (1)...(19): siRNA sense strand
aggcaguuggugagaaaca

SEQ ID NO: 2562724 - RNA, 19 nt, Homo sapiens
  misc_RNA (1)...(19): siRNA sense strand
uccaagaggcagcagguua

SEQ ID NO: 2562725 - RNA, 19 nt, Homo sapiens
  misc_RNA (1)...(19): siRNA sense strand
aaagggaagaagaccaaua

SEQ ID NO: 2562726 - RNA, 19 nt, Homo sapiens
  misc_RNA (1)...(19): siRNA sense strand
ccacaggacaagacagcca

SEQ ID NO: 2562727 - RNA, 19 nt, Homo sapiens
  misc_RNA (1)...(19): siRNA sense strand
ggugauuggguguggcuga

SEQ ID NO: 2562728 - RNA, 19 nt, Homo sapiens
  misc_RNA (1)...(19): siRNA sense strand
agacauacugacaaaucaa

SEQ ID NO: 2562729 - RNA, 19 nt, Homo sapiens
  misc_RNA (1)...(19): siRNA sense strand
gaagaaaagcagaaaggca

SEQ ID NO: 2562730 - RNA, 19 nt, Homo sapiens
  misc_RNA (1)...(19): siRNA sense strand
auguaauccuggacaccaa

SEQ ID NO: 2562731 - RNA, 19 nt, Homo sapiens
  misc_RNA (1)...(19): siRNA sense strand
acacuguggacauggaaau

SEQ ID NO: 2562732 - RNA, 19 nt, Homo sapiens
  misc_RNA (1)...(19): siRNA sense strand
caaacauguccuuagauau

SEQ ID NO: 2562733 - RNA, 19 nt, Homo sapiens
  misc_RNA (1)...(19): siRNA sense strand
cagccaaagcaugcggaaa

SEQ ID NO: 2562734 - RNA, 19 nt, Homo sapiens
  misc_RNA (1)...(19): siRNA sense strand
aggugaaauuccugagaag

SEQ ID NO: 2562735 - RNA, 19 nt, Homo sapiens
  misc_RNA (1)...(19): siRNA sense strand
caguugaugaggacagauu

SEQ ID NO: 2562736 - RNA, 19 nt, Homo sapiens
  misc_RNA (1)...(19): siRNA sense strand
ccuagaagacauacugaca

SEQ ID NO: 2562737 - RNA, 19 nt, Homo sapiens
  misc_RNA (1)...(19): siRNA sense strand
ccacagagaguuuguucau

SEQ ID NO: 2562738 - RNA, 19 nt, Homo sapiens
  misc_RNA (1)...(19): siRNA sense strand
cugggaaacagcugggaca

SEQ ID NO: 2562739 - RNA, 19 nt, Homo sapiens
  misc_RNA (1)...(19): siRNA sense strand
aauaaagggaagaagacca

SEQ ID NO: 2562740 - RNA, 19 nt, Homo sapiens
  misc_RNA (1)...(19): siRNA sense strand
ggcaaaggcacagaggaaa

SEQ ID NO: 2562741 - RNA, 19 nt, Homo sapiens
  misc_RNA (1)...(19): siRNA sense strand
caaaucaagaugugaaacu

SEQ ID NO: 2562742 - RNA, 19 nt, Homo sapiens
  misc_RNA (1)...(19): siRNA sense strand
ggaauuuucucuugggcuu

SEQ ID NO: 2562743 - RNA, 19 nt, Homo sapiens
  misc_RNA (1)...(19): siRNA sense strand
ggcucaugcuggagucauu

SEQ ID NO: 2562744 - RNA, 19 nt, Homo sapiens
  misc_RNA (1)...(19): siRNA sense strand
aggacagauucaaauggaa

SEQ ID NO: 2562745 - RNA, 19 nt, Homo sapiens
  misc_RNA (1)...(19): siRNA sense strand
caguguaagcuuccagauu

SEQ ID NO: 2562746 - RNA, 19 nt, Homo sapiens
  misc_RNA (1)...(19): siRNA sense strand
guacuaaaagugacagauu

SEQ ID NO: 2562747 - RNA, 19 nt, Homo sapiens
  misc_RNA (1)...(19): siRNA sense strand
acaguggagucccaagaaa

SEQ ID NO: 2562748 - RNA, 19 nt, Homo sapiens
  misc_RNA (1)...(19): siRNA sense strand
gugaaauuccugagaagcu

SEQ ID NO: 2562749 - RNA, 19 nt, Homo sapiens
  misc_RNA (1)...(19): siRNA sense strand
cccuagagcagaugcaaaa

SEQ ID NO: 2562750 - RNA, 19 nt, Homo sapiens
  misc_RNA (1)...(19): siRNA sense strand
aguaaaucgcaaagaaacu

SEQ ID NO: 2562751 - RNA, 19 nt, Homo sapiens
  misc_RNA (1)...(19): siRNA sense strand
gcugugagcugcuggagga

SEQ ID NO: 2562752 - RNA, 19 nt, Homo sapiens
  misc_RNA (1)...(19): siRNA sense strand
cuaaagagauuccuggagu

SEQ ID NO: 2562753 - RNA, 19 nt, Homo sapiens
  misc_RNA (1)...(19): siRNA sense strand
gaucacugggagagguaca

SEQ ID NO: 2562754 - RNA, 19 nt, Homo sapiens
  misc_RNA (1)...(19): siRNA sense strand
agaaauugauuauggagac

SEQ ID NO: 2562755 - RNA, 19 nt, Homo sapiens
  misc_RNA (1)...(19): siRNA sense strand
cuguagauaauguggcuca

SEQ ID NO: 2562756 - RNA, 19 nt, Homo sapiens
  misc_RNA (1)...(19): siRNA sense strand
cuacaaucacucagggucu

SEQ ID NO: 2562757 - RNA, 19 nt, Homo sapiens
  misc_RNA (1)...(19): siRNA sense strand
cacacuuaccagagaauga

SEQ ID NO: 2562758 - RNA, 19 nt, Homo sapiens
  misc_RNA (1)...(19): siRNA sense strand
uggucagaguaaaucgcaa

SEQ ID NO: 2562759 - RNA, 19 nt, Homo sapiens
  misc_RNA (1)...(19): siRNA sense strand
ugaggaaguccgagagcga

SEQ ID NO: 2562760 - RNA, 19 nt, Homo sapiens
  misc_RNA (1)...(19): siRNA sense strand
cggccaaacccaagcacga

SEQ ID NO: 2562761 - RNA, 19 nt, Homo sapiens
  misc_RNA (1)...(19): siRNA sense strand
gaagagagcaggaccgcca

SEQ ID NO: 2562762 - RNA, 19 nt, Homo sapiens
  misc_RNA (1)...(19): siRNA sense strand
aggagaacugagaagauuu

SEQ ID NO: 2562763 - RNA, 19 nt, Homo sapiens
  misc_RNA (1)...(19): siRNA sense strand
aagaaaggauacuugcaga

SEQ ID NO: 2562764 - RNA, 19 nt, Homo sapiens
  misc_RNA (1)...(19): siRNA sense strand
cagcugaggaaguccgaga

SEQ ID NO: 2562765 - RNA, 19 nt, Homo sapiens
  misc_RNA (1)...(19): siRNA sense strand
ugcagaaggaggugacaga

SEQ ID NO: 2562766 - RNA, 19 nt, Homo sapiens
  misc_RNA (1)...(19): siRNA sense strand
aaccagauucggaggauca

SEQ ID NO: 2562767 - RNA, 19 nt, Homo sapiens
  misc_RNA (1)...(19): siRNA sense strand
ucgagucacuagagcccaa

SEQ ID NO: 2562768 - RNA, 19 nt, Homo sapiens
  misc_RNA (1)...(19): siRNA sense strand
gaagagaggugguaggaca

SEQ ID NO: 2562769 - RNA, 19 nt, Homo sapiens
  misc_RNA (1)...(19): siRNA sense strand
uguacaacgugaagggcua

SEQ ID NO: 2562770 - RNA, 19 nt, Homo sapiens
  misc_RNA (1)...(19): siRNA sense strand
ggacaauagcugcaggaga

SEQ ID NO: 2562771 - RNA, 19 nt, Homo sapiens
  misc_RNA (1)...(19): siRNA sense strand
aggaucuacuucagggaaa

SEQ ID NO: 2562772 - RNA, 19 nt, Homo sapiens
  misc_RNA (1)...(19): siRNA sense strand
aggcugaagauguggaaga

SEQ ID NO: 2562773 - RNA, 19 nt, Homo sapiens
  misc_RNA (1)...(19): siRNA sense strand
ccacuuugucuaugggauu

SEQ ID NO: 2562774 - RNA, 19 nt, Homo sapiens
  misc_RNA (1)...(19): siRNA sense strand
cuggacaagaggugcuaaa

SEQ ID NO: 2562775 - RNA, 19 nt, Homo sapiens
  misc_RNA (1)...(19): siRNA sense strand
gugcaaagcuaacagccau

SEQ ID NO: 2562776 - RNA, 19 nt, Homo sapiens
  misc_RNA (1)...(19): siRNA sense strand
gagaagagguggauggugc

SEQ ID NO: 2562777 - RNA, 19 nt, Homo sapiens
  misc_RNA (1)...(19): siRNA sense strand
ucacuguggcucaggacaa

SEQ ID NO: 2562778 - RNA, 19 nt, Homo sapiens
  misc_RNA (1)...(19): siRNA sense strand
caagcgaccuguagagcga

SEQ ID NO: 2562779 - RNA, 19 nt, Homo sapiens
  misc_RNA (1)...(19): siRNA sense strand
gaguguggucagugccuua

SEQ ID NO: 2562780 - RNA, 19 nt, Homo sapiens
  misc_RNA (1)...(19): siRNA sense strand
ggaacuggcugaagagcuc

SEQ ID NO: 2562781 - RNA, 19 nt, Homo sapiens
  misc_RNA (1)...(19): siRNA sense strand
ucaaaggucucaaagccua

SEQ ID NO: 2562782 - RNA, 19 nt, Homo sapiens
  misc_RNA (1)...(19): siRNA sense strand
ccucaaagccuggccggaa

SEQ ID NO: 2562783 - RNA, 19 nt, Homo sapiens
  misc_RNA (1)...(19): siRNA sense strand
acgggaaaguacugcuauu

SEQ ID NO: 2562784 - RNA, 19 nt, Homo sapiens
  misc_RNA (1)...(19): siRNA sense strand
aaacauucauacugggagu

SEQ ID NO: 2562785 - RNA, 19 nt, Homo sapiens
  misc_RNA (1)...(19): siRNA sense strand
ggauggugcuccacgggau

SEQ ID NO: 2562786 - RNA, 19 nt, Homo sapiens
  misc_RNA (1)...(19): siRNA sense strand
ggaagaaagugagggccca

SEQ ID NO: 2562787 - RNA, 19 nt, Homo sapiens
  misc_RNA (1)...(19): siRNA sense strand
aauagcugcaggagauaua

SEQ ID NO: 2562788 - RNA, 19 nt, Homo sapiens
  misc_RNA (1)...(19): siRNA sense strand
caauaaaugucaagcgacc

SEQ ID NO: 2562789 - RNA, 19 nt, Homo sapiens
  misc_RNA (1)...(19): siRNA sense strand
gcugaagauguggaagaaa

SEQ ID NO: 2562790 - RNA, 19 nt, Homo sapiens
  misc_RNA (1)...(19): siRNA sense strand
ggucgaaaguccaaggcag

SEQ ID NO: 2562791 - RNA, 19 nt, Homo sapiens
  misc_RNA (1)...(19): siRNA sense strand
gucgaaaguccaaggcaga

SEQ ID NO: 2562792 - RNA, 19 nt, Homo sapiens
  misc_RNA (1)...(19): siRNA sense strand
gggaguuugcugaguggau

SEQ ID NO: 2562793 - RNA, 19 nt, Homo sapiens
  misc_RNA (1)...(19): siRNA sense strand
uuauggacucugugggauu

SEQ ID NO: 2562794 - RNA, 19 nt, Homo sapiens
  misc_RNA (1)...(19): siRNA sense strand
agugagggcccaagugaga

SEQ ID NO: 2562795 - RNA, 19 nt, Homo sapiens
  misc_RNA (1)...(19): siRNA sense strand
cugacaugaaugagacaca

SEQ ID NO: 2562796 - RNA, 19 nt, Homo sapiens
  misc_RNA (1)...(19): siRNA sense strand
cuaagaaacgaggucgaaa

SEQ ID NO: 2562797 - RNA, 19 nt, Homo sapiens
  misc_RNA (1)...(19): siRNA sense strand
gaagaaagugagggcccaa

SEQ ID NO: 2562798 - RNA, 19 nt, Homo sapiens
  misc_RNA (1)...(19): siRNA sense strand
caagaaagcuguccuggca

SEQ ID NO: 2562799 - RNA, 19 nt, Homo sapiens
  misc_RNA (1)...(19): siRNA sense strand
gaaacgaggucgaaagucc

SEQ ID NO: 2562800 - RNA, 19 nt, Homo sapiens
  misc_RNA (1)...(19): siRNA sense strand
ccgacuggcuugggacaau

SEQ ID NO: 2562801 - RNA, 19 nt, Homo sapiens
  misc_RNA (1)...(19): siRNA sense strand
gccuaagaaacgaggucga

SEQ ID NO: 2562802 - RNA, 19 nt, Homo sapiens
  misc_RNA (1)...(19): siRNA sense strand
aagauguggaagaaaguga

SEQ ID NO: 2562803 - RNA, 19 nt, Homo sapiens
  misc_RNA (1)...(19): siRNA sense strand
aagcagaucugauaccgua

SEQ ID NO: 2562804 - RNA, 19 nt, Homo sapiens
  misc_RNA (1)...(19): siRNA sense strand
cgggugaugcucaaggaaa

SEQ ID NO: 2562805 - RNA, 19 nt, Homo sapiens
  misc_RNA (1)...(19): siRNA sense strand
ucgucggagugcugggcaa

SEQ ID NO: 2562806 - RNA, 19 nt, Homo sapiens
  misc_RNA (1)...(19): siRNA sense strand
cguucaacucugacaauga

SEQ ID NO: 2562807 - RNA, 19 nt, Homo sapiens
  misc_RNA (1)...(19): siRNA sense strand
cguuuggagaggaggaguu

SEQ ID NO: 2562808 - RNA, 19 nt, Homo sapiens
  misc_RNA (1)...(19): siRNA sense strand
ccuuuguguuccucagcua

SEQ ID NO: 2562809 - RNA, 19 nt, Homo sapiens
  misc_RNA (1)...(19): siRNA sense strand
cugaaauuccggacaacca

SEQ ID NO: 2562810 - RNA, 19 nt, Homo sapiens
  misc_RNA (1)...(19): siRNA sense strand
acgugaagacgaugggaua

SEQ ID NO: 2562811 - RNA, 19 nt, Homo sapiens
  misc_RNA (1)...(19): siRNA sense strand
gaggagacacggugggcua

SEQ ID NO: 2562812 - RNA, 19 nt, Homo sapiens
  misc_RNA (1)...(19): siRNA sense strand
gcaaggaaguccaggccga

SEQ ID NO: 2562813 - RNA, 19 nt, Homo sapiens
  misc_RNA (1)...(19): siRNA sense strand
gagacaagcgcuaacguga

SEQ ID NO: 2562814 - RNA, 19 nt, Homo sapiens
  misc_RNA (1)...(19): siRNA sense strand
cgugaagacgaugggauaa

SEQ ID NO: 2562815 - RNA, 19 nt, Homo sapiens
  misc_RNA (1)...(19): siRNA sense strand
ccacagaagcagggacacu

SEQ ID NO: 2562816 - RNA, 19 nt, Homo sapiens
  misc_RNA (1)...(19): siRNA sense strand
ggaagaaguuuuaagggaa

SEQ ID NO: 2562817 - RNA, 19 nt, Homo sapiens
  misc_RNA (1)...(19): siRNA sense strand
ggaacaagcuggaggugac

SEQ ID NO: 2562818 - RNA, 19 nt, Homo sapiens
  misc_RNA (1)...(19): siRNA sense strand
ccaaauuucuggaagagca

SEQ ID NO: 2562819 - RNA, 19 nt, Homo sapiens
  misc_RNA (1)...(19): siRNA sense strand
gggaagaaguuuuaaggga

SEQ ID NO: 2562820 - RNA, 19 nt, Homo sapiens
  misc_RNA (1)...(19): siRNA sense strand
ucuacagaugccagggaaa

SEQ ID NO: 2562821 - RNA, 19 nt, Homo sapiens
  misc_RNA (1)...(19): siRNA sense strand
agguguacgauuugaccaa

SEQ ID NO: 2562822 - RNA, 19 nt, Homo sapiens
  misc_RNA (1)...(19): siRNA sense strand
augacagaccaaaguuaaa

SEQ ID NO: 2562823 - RNA, 19 nt, Homo sapiens
  misc_RNA (1)...(19): siRNA sense strand
gaggagauucagaagcaca

SEQ ID NO: 2562824 - RNA, 19 nt, Homo sapiens
  misc_RNA (1)...(19): siRNA sense strand
gggaacaagcuggagguga

SEQ ID NO: 2562825 - RNA, 19 nt, Homo sapiens
  misc_RNA (1)...(19): siRNA sense strand
aggagauucagaagcacaa

SEQ ID NO: 2562826 - RNA, 19 nt, Homo sapiens
  misc_RNA (1)...(19): siRNA sense strand
agcaagagcaccuggcuga

SEQ ID NO: 2562827 - RNA, 19 nt, Homo sapiens
  misc_RNA (1)...(19): siRNA sense strand
ggaagaaguuuuaagggaa

SEQ ID NO: 2562828 - RNA, 19 nt, Homo sapiens
  misc_RNA (1)...(19): siRNA sense strand
ggaacaagcuggaggugac

SEQ ID NO: 2562829 - RNA, 19 nt, Homo sapiens
  misc_RNA (1)...(19): siRNA sense strand
ccaaauuucuggaagagca

SEQ ID NO: 2562830 - RNA, 19 nt, Homo sapiens
  misc_RNA (1)...(19): siRNA sense strand
gggaagaaguuuuaaggga

SEQ ID NO: 2562831 - RNA, 19 nt, Homo sapiens
  misc_RNA (1)...(19): siRNA sense strand
ucuacagaugccagggaaa

SEQ ID NO: 2562832 - RNA, 19 nt, Homo sapiens
  misc_RNA (1)...(19): siRNA sense strand
agguguacgauuugaccaa

SEQ ID NO: 2562833 - RNA, 19 nt, Homo sapiens
  misc_RNA (1)...(19): siRNA sense strand
augacagaccaaaguuaaa

SEQ ID NO: 2562834 - RNA, 19 nt, Homo sapiens
  misc_RNA (1)...(19): siRNA sense strand
gaggagauucagaagcaca

SEQ ID NO: 2562835 - RNA, 19 nt, Homo sapiens
  misc_RNA (1)...(19): siRNA sense strand
gggaacaagcuggagguga

SEQ ID NO: 2562836 - RNA, 19 nt, Homo sapiens
  misc_RNA (1)...(19): siRNA sense strand
aggagauucagaagcacaa

SEQ ID NO: 2562837 - RNA, 19 nt, Homo sapiens
  misc_RNA (1)...(19): siRNA sense strand
agcaagagcaccuggcuga

SEQ ID NO: 2562838 - RNA, 19 nt, Homo sapiens
  misc_RNA (1)...(19): siRNA sense strand
gguuaagcuccgagaagaa

SEQ ID NO: 2562839 - RNA, 19 nt, Homo sapiens
  misc_RNA (1)...(19): siRNA sense strand
agacauuggagaagggauu

SEQ ID NO: 2562840 - RNA, 19 nt, Homo sapiens
  misc_RNA (1)...(19): siRNA sense strand
auacacaccaagagauaaa

SEQ ID NO: 2562841 - RNA, 19 nt, Homo sapiens
  misc_RNA (1)...(19): siRNA sense strand
gagugaaguuguuggcuca

SEQ ID NO: 2562842 - RNA, 19 nt, Homo sapiens
  misc_RNA (1)...(19): siRNA sense strand
auucacaggcaaagacaaa

SEQ ID NO: 2562843 - RNA, 19 nt, Homo sapiens
  misc_RNA (1)...(19): siRNA sense strand
guucaaagugauaaagcuu

SEQ ID NO: 2562844 - RNA, 19 nt, Homo sapiens
  misc_RNA (1)...(19): siRNA sense strand
uggcagaauacuuaaagaa

SEQ ID NO: 2562845 - RNA, 19 nt, Homo sapiens
  misc_RNA (1)...(19): siRNA sense strand
gagaaguauauaaggcaca

SEQ ID NO: 2562846 - RNA, 19 nt, Homo sapiens
  misc_RNA (1)...(19): siRNA sense strand
agaagauguuguugaaacu

SEQ ID NO: 2562847 - RNA, 19 nt, Homo sapiens
  misc_RNA (1)...(19): siRNA sense strand
aguuauugauggugcuaca

SEQ ID NO: 2562848 - RNA, 19 nt, Homo sapiens
  misc_RNA (1)...(19): siRNA sense strand
uugccaaaccagugauaau

SEQ ID NO: 2562849 - RNA, 19 nt, Homo sapiens
  misc_RNA (1)...(19): siRNA sense strand
ugguuauugugaugagauu

SEQ ID NO: 2562850 - RNA, 19 nt, Homo sapiens
  misc_RNA (1)...(19): siRNA sense strand
gauuuaaccagaaaggaga

SEQ ID NO: 2562851 - RNA, 19 nt, Homo sapiens
  misc_RNA (1)...(19): siRNA sense strand
guucaagcucucagacauu

SEQ ID NO: 2562852 - RNA, 19 nt, Homo sapiens
  misc_RNA (1)...(19): siRNA sense strand
agacaaaacagaacccaua

SEQ ID NO: 2562853 - RNA, 19 nt, Homo sapiens
  misc_RNA (1)...(19): siRNA sense strand
uggagaagggauuagagaa

SEQ ID NO: 2562854 - RNA, 19 nt, Homo sapiens
  misc_RNA (1)...(19): siRNA sense strand
aaagcagacaggagcuaua

SEQ ID NO: 2562855 - RNA, 19 nt, Homo sapiens
  misc_RNA (1)...(19): siRNA sense strand
ugaucuuacaggaggaaca

SEQ ID NO: 2562856 - RNA, 19 nt, Homo sapiens
  misc_RNA (1)...(19): siRNA sense strand
aguauauaaggcacagaua

SEQ ID NO: 2562857 - RNA, 19 nt, Homo sapiens
  misc_RNA (1)...(19): siRNA sense strand
accagaaaggagaaguaua

SEQ ID NO: 2562858 - RNA, 19 nt, Homo sapiens
  misc_RNA (1)...(19): siRNA sense strand
ucagcugaucacagaguua

SEQ ID NO: 2562859 - RNA, 19 nt, Homo sapiens
  misc_RNA (1)...(19): siRNA sense strand
agccaaauuauguguguuu

SEQ ID NO: 2562860 - RNA, 19 nt, Homo sapiens
  misc_RNA (1)...(19): siRNA sense strand
ccauuaguagacauagaaa

SEQ ID NO: 2562861 - RNA, 19 nt, Homo sapiens
  misc_RNA (1)...(19): siRNA sense strand
ugaugaacauacacaccaa

SEQ ID NO: 2562862 - RNA, 19 nt, Homo sapiens
  misc_RNA (1)...(19): siRNA sense strand
ccaccaaagccaaaagaca

SEQ ID NO: 2562863 - RNA, 19 nt, Homo sapiens
  misc_RNA (1)...(19): siRNA sense strand
ggaugaaaacugccagaau

SEQ ID NO: 2562864 - RNA, 19 nt, Homo sapiens
  misc_RNA (1)...(19): siRNA sense strand
cauaacauugggauagcaa

SEQ ID NO: 2562865 - RNA, 19 nt, Homo sapiens
  misc_RNA (1)...(19): siRNA sense strand
agccauuaguagacauaga

SEQ ID NO: 2562866 - RNA, 19 nt, Homo sapiens
  misc_RNA (1)...(19): siRNA sense strand
aguuguuggcucaggaaaa

SEQ ID NO: 2562867 - RNA, 19 nt, Homo sapiens
  misc_RNA (1)...(19): siRNA sense strand
aggcaaagacaaaacagaa

SEQ ID NO: 2562868 - RNA, 19 nt, Homo sapiens
  misc_RNA (1)...(19): siRNA sense strand
aguucaagcucucagacau

SEQ ID NO: 2562869 - RNA, 19 nt, Homo sapiens
  misc_RNA (1)...(19): siRNA sense strand
aauauuaagcugagugaag

SEQ ID NO: 2562870 - RNA, 19 nt, Homo sapiens
  misc_RNA (1)...(19): siRNA sense strand
guuauugugaugagauuga

SEQ ID NO: 2562871 - RNA, 19 nt, Homo sapiens
  misc_RNA (1)...(19): siRNA sense strand
agagauaaagggccgaaaa

SEQ ID NO: 2562872 - RNA, 19 nt, Homo sapiens
  misc_RNA (1)...(19): siRNA sense strand
uggagaaugacaagagcuu

SEQ ID NO: 2562873 - RNA, 19 nt, Homo sapiens
  misc_RNA (1)...(19): siRNA sense strand
agagaggcucaaagaagaa

SEQ ID NO: 2562874 - RNA, 19 nt, Homo sapiens
  misc_RNA (1)...(19): siRNA sense strand
agauguacuuagagaggcu

SEQ ID NO: 2562875 - RNA, 19 nt, Homo sapiens
  misc_RNA (1)...(19): siRNA sense strand
gcagagaauaagcuggaca

SEQ ID NO: 2562876 - RNA, 19 nt, Homo sapiens
  misc_RNA (1)...(19): siRNA sense strand
cgggacgacuauuuggaau

SEQ ID NO: 2562877 - RNA, 19 nt, Homo sapiens
  misc_RNA (1)...(19): siRNA sense strand
acagagaagcaaagaucca

SEQ ID NO: 2562878 - RNA, 19 nt, Homo sapiens
  misc_RNA (1)...(19): siRNA sense strand
ggguacaaugggaugccaa

SEQ ID NO: 2562879 - RNA, 19 nt, Homo sapiens
  misc_RNA (1)...(19): siRNA sense strand
ccuuguaaugaaugcgcua

SEQ ID NO: 2562880 - RNA, 19 nt, Homo sapiens
  misc_RNA (1)...(19): siRNA sense strand
agagaagcaaagauccaaa

SEQ ID NO: 2562881 - RNA, 19 nt, Homo sapiens
  misc_RNA (1)...(19): siRNA sense strand
ccaugauagugacgaggca

SEQ ID NO: 2562882 - RNA, 19 nt, Homo sapiens
  misc_RNA (1)...(19): siRNA sense strand
ucaauuaacagcagaccga

SEQ ID NO: 2562883 - RNA, 19 nt, Homo sapiens
  misc_RNA (1)...(19): siRNA sense strand
uugcaguguuugugggaaa

SEQ ID NO: 2562884 - RNA, 19 nt, Homo sapiens
  misc_RNA (1)...(19): siRNA sense strand
acucaugggcagagccaaa

SEQ ID NO: 2562885 - RNA, 19 nt, Homo sapiens
  misc_RNA (1)...(19): siRNA sense strand
aguaaagcuuucagggaca

SEQ ID NO: 2562886 - RNA, 19 nt, Homo sapiens
  misc_RNA (1)...(19): siRNA sense strand
uguuaaagcaaggaagaaa

SEQ ID NO: 2562887 - RNA, 19 nt, Homo sapiens
  misc_RNA (1)...(19): siRNA sense strand
gcaacaacaacaacaacaa

SEQ ID NO: 2562888 - RNA, 19 nt, Homo sapiens
  misc_RNA (1)...(19): siRNA sense strand
ggacacacauggugcgcca

SEQ ID NO: 2562889 - RNA, 19 nt, Homo sapiens
  misc_RNA (1)...(19): siRNA sense strand
ccagaaacauuaaaggaug

SEQ ID NO: 2562890 - RNA, 19 nt, Homo sapiens
  misc_RNA (1)...(19): siRNA sense strand
aaaggaugccauugggauu

SEQ ID NO: 2562891 - RNA, 19 nt, Homo sapiens
  misc_RNA (1)...(19): siRNA sense strand
agggaagcaaguagaaaca

SEQ ID NO: 2562892 - RNA, 19 nt, Homo sapiens
  misc_RNA (1)...(19): siRNA sense strand
cccaaugaacauagggcau

SEQ ID NO: 2562893 - RNA, 19 nt, Homo sapiens
  misc_RNA (1)...(19): siRNA sense strand
aggaaggaccggaugacuu

SEQ ID NO: 2562894 - RNA, 19 nt, Homo sapiens
  misc_RNA (1)...(19): siRNA sense strand
ugaagagaccaguaaccaa

SEQ ID NO: 2562895 - RNA, 19 nt, Homo sapiens
  misc_RNA (1)...(19): siRNA sense strand
cuuaaagacucaugggcag

SEQ ID NO: 2562896 - RNA, 19 nt, Homo sapiens
  misc_RNA (1)...(19): siRNA sense strand
gugacaagcuggccaggga

SEQ ID NO: 2562897 - RNA, 19 nt, Homo sapiens
  misc_RNA (1)...(19): siRNA sense strand
ccucagggugcaccagaaa

SEQ ID NO: 2562898 - RNA, 19 nt, Homo sapiens
  misc_RNA (1)...(19): siRNA sense strand
gcaguaaagcuuucaggga

SEQ ID NO: 2562899 - RNA, 19 nt, Homo sapiens
  misc_RNA (1)...(19): siRNA sense strand
guagaaacacucagacugu

SEQ ID NO: 2562900 - RNA, 19 nt, Homo sapiens
  misc_RNA (1)...(19): siRNA sense strand
caguaaagcuuucagggac

SEQ ID NO: 2562901 - RNA, 19 nt, Homo sapiens
  misc_RNA (1)...(19): siRNA sense strand
acaacaacaacaugugaca

SEQ ID NO: 2562902 - RNA, 19 nt, Homo sapiens
  misc_RNA (1)...(19): siRNA sense strand
cuguuaaagcaaggaagaa

SEQ ID NO: 2562903 - RNA, 19 nt, Homo sapiens
  misc_RNA (1)...(19): siRNA sense strand
aguaaauguuucaagugca

SEQ ID NO: 2562904 - RNA, 19 nt, Homo sapiens
  misc_RNA (1)...(19): siRNA sense strand
cugucaagaaacccaguaa

SEQ ID NO: 2562905 - RNA, 19 nt, Homo sapiens
  misc_RNA (1)...(19): siRNA sense strand
acuuaaagacucaugggca

SEQ ID NO: 2562906 - RNA, 19 nt, Homo sapiens
  misc_RNA (1)...(19): siRNA sense strand
caagaaacccaguaagccu

SEQ ID NO: 2562907 - RNA, 19 nt, Homo sapiens
  misc_RNA (1)...(19): siRNA sense strand
gcgccaugaaggcaaggua

SEQ ID NO: 2562908 - RNA, 19 nt, Homo sapiens
  misc_RNA (1)...(19): siRNA sense strand
cagcauacaucaccagcca

SEQ ID NO: 2562909 - RNA, 19 nt, Homo sapiens
  misc_RNA (1)...(19): siRNA sense strand
ccauaggagaggagguuau

SEQ ID NO: 2562910 - RNA, 19 nt, Homo sapiens
  misc_RNA (1)...(19): siRNA sense strand
gcaaauaugugaaggagcu

SEQ ID NO: 2562911 - RNA, 19 nt, Homo sapiens
  misc_RNA (1)...(19): siRNA sense strand
aaagaaagaagaaaggcaa

SEQ ID NO: 2562912 - RNA, 19 nt, Homo sapiens
  misc_RNA (1)...(19): siRNA sense strand
uguggaaaaugaagagaaa

SEQ ID NO: 2562913 - RNA, 19 nt, Homo sapiens
  misc_RNA (1)...(19): siRNA sense strand
agaaagugaaguugggcau

SEQ ID NO: 2562914 - RNA, 19 nt, Homo sapiens
  misc_RNA (1)...(19): siRNA sense strand
augaagagaaagugaaguu

SEQ ID NO: 2562915 - RNA, 19 nt, Homo sapiens
  misc_RNA (1)...(19): siRNA sense strand
gagguuaugauguggaaaa

SEQ ID NO: 2562916 - RNA, 19 nt, Homo sapiens
  misc_RNA (1)...(19): siRNA sense strand
gggaaaagaaagaagaaag

SEQ ID NO: 2562917 - RNA, 19 nt, Homo sapiens
  misc_RNA (1)...(19): siRNA sense strand
gugacuugcaagaggcaga

SEQ ID NO: 2562918 - RNA, 19 nt, Homo sapiens
  misc_RNA (1)...(19): siRNA sense strand
uggaaaaugaagagaaagu

SEQ ID NO: 2562919 - RNA, 19 nt, Homo sapiens
  misc_RNA (1)...(19): siRNA sense strand
gaagaaaggcaaggggcua

SEQ ID NO: 2562920 - RNA, 19 nt, Homo sapiens
  misc_RNA (1)...(19): siRNA sense strand
caccaaacaaggaggagca

SEQ ID NO: 2562921 - RNA, 19 nt, Homo sapiens
  misc_RNA (1)...(19): siRNA sense strand
cauccauggagaaugcaaa

SEQ ID NO: 2562922 - RNA, 19 nt, Homo sapiens
  misc_RNA (1)...(19): siRNA sense strand
gcuuauauaccuaugacca

SEQ ID NO: 2562923 - RNA, 19 nt, Homo sapiens
  misc_RNA (1)...(19): siRNA sense strand
guggaaaaucgcuuauaua

SEQ ID NO: 2562924 - RNA, 19 nt, Homo sapiens
  misc_RNA (1)...(19): siRNA sense strand
gagaaagugaaguugggca

SEQ ID NO: 2562925 - RNA, 19 nt, Homo sapiens
  misc_RNA (1)...(19): siRNA sense strand
agaacaaauguaugaggaa

SEQ ID NO: 2562926 - RNA, 19 nt, Homo sapiens
  misc_RNA (1)...(19): siRNA sense strand
cagugauaauccugagaga

SEQ ID NO: 2562927 - RNA, 19 nt, Homo sapiens
  misc_RNA (1)...(19): siRNA sense strand
guaaaggacugguggcucu

SEQ ID NO: 2562928 - RNA, 19 nt, Homo sapiens
  misc_RNA (1)...(19): siRNA sense strand
ucacaaugacuuuggcgua

SEQ ID NO: 2562929 - RNA, 19 nt, Homo sapiens
  misc_RNA (1)...(19): siRNA sense strand
ggaucauuuaccagaacaa

SEQ ID NO: 2562930 - RNA, 19 nt, Homo sapiens
  misc_RNA (1)...(19): siRNA sense strand
gcucaaugccacaucaaaa

SEQ ID NO: 2562931 - RNA, 19 nt, Homo sapiens
  misc_RNA (1)...(19): siRNA sense strand
cagaacaaauguaugagga

SEQ ID NO: 2562932 - RNA, 19 nt, Homo sapiens
  misc_RNA (1)...(19): siRNA sense strand
aguucuaccaagauguaaa

SEQ ID NO: 2562933 - RNA, 19 nt, Homo sapiens
  misc_RNA (1)...(19): siRNA sense strand
cggagcagccauaaggaca

SEQ ID NO: 2562934 - RNA, 19 nt, Homo sapiens
  misc_RNA (1)...(19): siRNA sense strand
uguucagggaauugggauu

SEQ ID NO: 2562935 - RNA, 19 nt, Homo sapiens
  misc_RNA (1)...(19): siRNA sense strand
gauaauccugagagauaca

SEQ ID NO: 2562936 - RNA, 19 nt, Homo sapiens
  misc_RNA (1)...(19): siRNA sense strand
cuauuuucaucgugggaau

SEQ ID NO: 2562937 - RNA, 19 nt, Homo sapiens
  misc_RNA (1)...(19): siRNA sense strand
agccauaaggacagcauga

SEQ ID NO: 2562938 - RNA, 19 nt, Homo sapiens
  misc_RNA (1)...(19): siRNA sense strand
uuguaaugaaugugggaaa

SEQ ID NO: 2562939 - RNA, 19 nt, Homo sapiens
  misc_RNA (1)...(19): siRNA sense strand
augcaauguuuguggaaaa

SEQ ID NO: 2562940 - RNA, 19 nt, Homo sapiens
  misc_RNA (1)...(19): siRNA sense strand
cuguaagguauguggaaaa

SEQ ID NO: 2562941 - RNA, 19 nt, Homo sapiens
  misc_RNA (1)...(19): siRNA sense strand
guauguaaggaguguggaa

SEQ ID NO: 2562942 - RNA, 19 nt, Homo sapiens
  misc_RNA (1)...(19): siRNA sense strand
gauucauucaggugauaaa

SEQ ID NO: 2562943 - RNA, 19 nt, Homo sapiens
  misc_RNA (1)...(19): siRNA sense strand
ccuuacugagcaugagaaa

SEQ ID NO: 2562944 - RNA, 19 nt, Homo sapiens
  misc_RNA (1)...(19): siRNA sense strand
ggaaaagucuucagccaca

SEQ ID NO: 2562945 - RNA, 19 nt, Homo sapiens
  misc_RNA (1)...(19): siRNA sense strand
auguaaggaguguggaaaa

SEQ ID NO: 2562946 - RNA, 19 nt, Homo sapiens
  misc_RNA (1)...(19): siRNA sense strand
gggagaagcccuaugguug

SEQ ID NO: 2562947 - RNA, 19 nt, Homo sapiens
  misc_RNA (1)...(19): siRNA sense strand
cccuaugaauguaacgaau

SEQ ID NO: 2562948 - RNA, 19 nt, Homo sapiens
  misc_RNA (1)...(19): siRNA sense strand
auguagugaauguggaaca

SEQ ID NO: 2562949 - RNA, 19 nt, Homo sapiens
  misc_RNA (1)...(19): siRNA sense strand
cccuaugguuguaaugaau

SEQ ID NO: 2562950 - RNA, 19 nt, Homo sapiens
  misc_RNA (1)...(19): siRNA sense strand
cauuuagccagaaggaaaa

SEQ ID NO: 2562951 - RNA, 19 nt, Homo sapiens
  misc_RNA (1)...(19): siRNA sense strand
auguaacgaauguggaaaa

SEQ ID NO: 2562952 - RNA, 19 nt, Homo sapiens
  misc_RNA (1)...(19): siRNA sense strand
auucagaagucaaaccuca

SEQ ID NO: 2562953 - RNA, 19 nt, Homo sapiens
  misc_RNA (1)...(19): siRNA sense strand
guggaaaagucuucagcca

SEQ ID NO: 2562954 - RNA, 19 nt, Homo sapiens
  misc_RNA (1)...(19): siRNA sense strand
aaauguagugaauguggaa

SEQ ID NO: 2562955 - RNA, 19 nt, Homo sapiens
  misc_RNA (1)...(19): siRNA sense strand
ccuuuggccagaagaagua

SEQ ID NO: 2562956 - RNA, 19 nt, Homo sapiens
  misc_RNA (1)...(19): siRNA sense strand
ggccucagcuacagcggua

SEQ ID NO: 2562957 - RNA, 19 nt, Homo sapiens
  misc_RNA (1)...(19): siRNA sense strand
ggacaucccuggaagcagu

SEQ ID NO: 2562958 - RNA, 19 nt, Homo sapiens
  misc_RNA (1)...(19): siRNA sense strand
gaugagaagaaacggcaca

SEQ ID NO: 2562959 - RNA, 19 nt, Homo sapiens
  misc_RNA (1)...(19): siRNA sense strand
cagaaauauuacaggcaga

SEQ ID NO: 2562960 - RNA, 19 nt, Homo sapiens
  misc_RNA (1)...(19): siRNA sense strand
cuuaauuaccucaggaaga

SEQ ID NO: 2562961 - RNA, 19 nt, Homo sapiens
  misc_RNA (1)...(19): siRNA sense strand
gcaucaagaaggaggagga

SEQ ID NO: 2562962 - RNA, 19 nt, Homo sapiens
  misc_RNA (1)...(19): siRNA sense strand
aaaagaaggacuacagaaa

SEQ ID NO: 2562963 - RNA, 19 nt, Homo sapiens
  misc_RNA (1)...(19): siRNA sense strand
aggaaaugagccugaagaa

SEQ ID NO: 2562964 - RNA, 19 nt, Homo sapiens
  misc_RNA (1)...(19): siRNA sense strand
gggacauguaguagaugaa

SEQ ID NO: 2562965 - RNA, 19 nt, Homo sapiens
  misc_RNA (1)...(19): siRNA sense strand
ccuggauguugaugagauu

SEQ ID NO: 2562966 - RNA, 19 nt, Homo sapiens
  misc_RNA (1)...(19): siRNA sense strand
acugcaaacaagaugauaa

SEQ ID NO: 2562967 - RNA, 19 nt, Homo sapiens
  misc_RNA (1)...(19): siRNA sense strand
gacuuuacuccgugauaua

SEQ ID NO: 2562968 - RNA, 19 nt, Homo sapiens
  misc_RNA (1)...(19): siRNA sense strand
cuucagugcuccuaggaca

SEQ ID NO: 2562969 - RNA, 19 nt, Homo sapiens
  misc_RNA (1)...(19): siRNA sense strand
cuuacuacaaucaggcaua

SEQ ID NO: 2562970 - RNA, 19 nt, Homo sapiens
  misc_RNA (1)...(19): siRNA sense strand
agauuugcucagagaguuu

SEQ ID NO: 2562971 - RNA, 19 nt, Homo sapiens
  misc_RNA (1)...(19): siRNA sense strand
aaagcaaauaaguggucaa

SEQ ID NO: 2562972 - RNA, 19 nt, Homo sapiens
  misc_RNA (1)...(19): siRNA sense strand
ugaagcaguauuugaggaa

SEQ ID NO: 2562973 - RNA, 19 nt, Homo sapiens
  misc_RNA (1)...(19): siRNA sense strand
aauaggagguacugcccaa

SEQ ID NO: 2562974 - RNA, 19 nt, Homo sapiens
  misc_RNA (1)...(19): siRNA sense strand
ccacauuccuaucacggua

SEQ ID NO: 2562975 - RNA, 19 nt, Homo sapiens
  misc_RNA (1)...(19): siRNA sense strand
ugaaagaauggcaaagcuu

SEQ ID NO: 2562976 - RNA, 19 nt, Homo sapiens
  misc_RNA (1)...(19): siRNA sense strand
agucauugaagcaguauuu

SEQ ID NO: 2562977 - RNA, 19 nt, Homo sapiens
  misc_RNA (1)...(19): siRNA sense strand
gcagcaaaccagaggaggu

SEQ ID NO: 2562978 - RNA, 19 nt, Homo sapiens
  misc_RNA (1)...(19): siRNA sense strand
agaaggaggaggagcuguu

SEQ ID NO: 2562979 - RNA, 19 nt, Homo sapiens
  misc_RNA (1)...(19): siRNA sense strand
agauuuagucauugaagca

SEQ ID NO: 2562980 - RNA, 19 nt, Homo sapiens
  misc_RNA (1)...(19): siRNA sense strand
ucaagaaggaggaggagcu

SEQ ID NO: 2562981 - RNA, 19 nt, Homo sapiens
  misc_RNA (1)...(19): siRNA sense strand
agaagaaggcagcaaacca

SEQ ID NO: 2562982 - RNA, 19 nt, Homo sapiens
  misc_RNA (1)...(19): siRNA sense strand
cagaagacagguaaggguu

SEQ ID NO: 2562983 - RNA, 19 nt, Homo sapiens
  misc_RNA (1)...(19): siRNA sense strand
cauugugauuuguggagca

SEQ ID NO: 2562984 - RNA, 19 nt, Homo sapiens
  misc_RNA (1)...(19): siRNA sense strand
gcaaacaagaugauaaccu

SEQ ID NO: 2562985 - RNA, 19 nt, Homo sapiens
  misc_RNA (1)...(19): siRNA sense strand
agguaaggguugguaucaa

SEQ ID NO: 2562986 - RNA, 19 nt, Homo sapiens
  misc_RNA (1)...(19): siRNA sense strand
aguagaugaaauacagaga

SEQ ID NO: 2562987 - RNA, 19 nt, Homo sapiens
  misc_RNA (1)...(19): siRNA sense strand
gaguauacgcggcugcaca

SEQ ID NO: 2562988 - RNA, 19 nt, Homo sapiens
  misc_RNA (1)...(19): siRNA sense strand
ccuaugaagugggcaucaa

SEQ ID NO: 2562989 - RNA, 19 nt, Homo sapiens
  misc_RNA (1)...(19): siRNA sense strand
guuuuggauuuguggggaa

SEQ ID NO: 2562990 - RNA, 19 nt, Homo sapiens
  misc_RNA (1)...(19): siRNA sense strand
uuggagucguuguaggcaa

SEQ ID NO: 2562991 - RNA, 19 nt, Homo sapiens
  misc_RNA (1)...(19): siRNA sense strand
ccugaugugcucugugaau

SEQ ID NO: 2562992 - RNA, 19 nt, Homo sapiens
  misc_RNA (1)...(19): siRNA sense strand
gcucugugaauuaggacga

SEQ ID NO: 2562993 - RNA, 19 nt, Homo sapiens
  misc_RNA (1)...(19): siRNA sense strand
ugugcaaaccagaagcauu

SEQ ID NO: 2562994 - RNA, 19 nt, Homo sapiens
  misc_RNA (1)...(19): siRNA sense strand
aggcaacuguuuuggauuu

SEQ ID NO: 2562995 - RNA, 19 nt, Homo sapiens
  misc_RNA (1)...(19): siRNA sense strand
cugaagaacugcagggacu

SEQ ID NO: 2562996 - RNA, 19 nt, Homo sapiens
  misc_RNA (1)...(19): siRNA sense strand
ccagaguaaaggugggauu

SEQ ID NO: 2562997 - RNA, 19 nt, Homo sapiens
  misc_RNA (1)...(19): siRNA sense strand
gaaaacagcugaaacggaa

SEQ ID NO: 2562998 - RNA, 19 nt, Homo sapiens
  misc_RNA (1)...(19): siRNA sense strand
caggugauguacaggguga

SEQ ID NO: 2562999 - RNA, 19 nt, Homo sapiens
  misc_RNA (1)...(19): siRNA sense strand
ccagacugcucuauggaga

SEQ ID NO: 2563000 - RNA, 19 nt, Homo sapiens
  misc_RNA (1)...(19): siRNA sense strand
cgacuacagaagaggagaa

SEQ ID NO: 2563001 - RNA, 19 nt, Homo sapiens
  misc_RNA (1)...(19): siRNA sense strand
ggcuaauuacauugaacaa

SEQ ID NO: 2563002 - RNA, 19 nt, Homo sapiens
  misc_RNA (1)...(19): siRNA sense strand
aggugauaagauagcaaua

SEQ ID NO: 2563003 - RNA, 19 nt, Homo sapiens
  misc_RNA (1)...(19): siRNA sense strand
cuacagaagaggagaaaac

SEQ ID NO: 2563004 - RNA, 19 nt, Homo sapiens
  misc_RNA (1)...(19): siRNA sense strand
gugccuuauuggagaaucu

SEQ ID NO: 2563005 - RNA, 19 nt, Homo sapiens
  misc_RNA (1)...(19): siRNA sense strand
uggacuacugaaugugaaa

SEQ ID NO: 2563006 - RNA, 19 nt, Homo sapiens
  misc_RNA (1)...(19): siRNA sense strand
caagcaaaccugcggcuga

SEQ ID NO: 2563007 - RNA, 19 nt, Homo sapiens
  misc_RNA (1)...(19): siRNA sense strand
cuaugugggaagaugagaa

SEQ ID NO: 2563008 - RNA, 19 nt, Homo sapiens
  misc_RNA (1)...(19): siRNA sense strand
aaacaaacggggaggacga

SEQ ID NO: 2563009 - RNA, 19 nt, Homo sapiens
  misc_RNA (1)...(19): siRNA sense strand
cuacagaacagaugggcac

SEQ ID NO: 2563010 - RNA, 19 nt, Homo sapiens
  misc_RNA (1)...(19): siRNA sense strand
gaagugaccucgaucgcuu

SEQ ID NO: 2563011 - RNA, 19 nt, Homo sapiens
  misc_RNA (1)...(19): siRNA sense strand
aacaaacagcagagacgaa

SEQ ID NO: 2563012 - RNA, 19 nt, Homo sapiens
  misc_RNA (1)...(19): siRNA sense strand
aagauagcaauauggacua

SEQ ID NO: 2563013 - RNA, 19 nt, Homo sapiens
  misc_RNA (1)...(19): siRNA sense strand
uaagauagcaauauggacu

SEQ ID NO: 2563014 - RNA, 19 nt, Homo sapiens
  misc_RNA (1)...(19): siRNA sense strand
cgggcuaauccacggaauu

SEQ ID NO: 2563015 - RNA, 19 nt, Homo sapiens
  misc_RNA (1)...(19): siRNA sense strand
cgguuguguuagaggaaau

SEQ ID NO: 2563016 - RNA, 19 nt, Homo sapiens
  misc_RNA (1)...(19): siRNA sense strand
ccagaaacccagagcuaau

SEQ ID NO: 2563017 - RNA, 19 nt, Homo sapiens
  misc_RNA (1)...(19): siRNA sense strand
agaaagcaacagaaggaaa

SEQ ID NO: 2563018 - RNA, 19 nt, Homo sapiens
  misc_RNA (1)...(19): siRNA sense strand
cugguaaugcaaagggaaa

SEQ ID NO: 2563019 - RNA, 19 nt, Homo sapiens
  misc_RNA (1)...(19): siRNA sense strand
aaacagaugggaaaggaaa

SEQ ID NO: 2563020 - RNA, 19 nt, Homo sapiens
  misc_RNA (1)...(19): siRNA sense strand
cgccagaaacccagagcua

SEQ ID NO: 2563021 - RNA, 19 nt, Homo sapiens
  misc_RNA (1)...(19): siRNA sense strand
ggaaaggaaaggaggccau

SEQ ID NO: 2563022 - RNA, 19 nt, Homo sapiens
  misc_RNA (1)...(19): siRNA sense strand
agauaggaaaugagaguga

SEQ ID NO: 2563023 - RNA, 19 nt, Homo sapiens
  misc_RNA (1)...(19): siRNA sense strand
aaggcaaaccguuaagaaa

SEQ ID NO: 2563024 - RNA, 19 nt, Homo sapiens
  misc_RNA (1)...(19): siRNA sense strand
gaacugaugcagaaggaca

SEQ ID NO: 2563025 - RNA, 19 nt, Homo sapiens
  misc_RNA (1)...(19): siRNA sense strand
gggucaaagcugauuguuu

SEQ ID NO: 2563026 - RNA, 19 nt, Homo sapiens
  misc_RNA (1)...(19): siRNA sense strand
agauaaugccaguaagcuu

SEQ ID NO: 2563027 - RNA, 19 nt, Homo sapiens
  misc_RNA (1)...(19): siRNA sense strand
cugcaagaaagaaggcgaa

SEQ ID NO: 2563028 - RNA, 19 nt, Homo sapiens
  misc_RNA (1)...(19): siRNA sense strand
gaacaaguauaaagcagca

SEQ ID NO: 2563029 - RNA, 19 nt, Homo sapiens
  misc_RNA (1)...(19): siRNA sense strand
auagaaaagcucugcaaaa

SEQ ID NO: 2563030 - RNA, 19 nt, Homo sapiens
  misc_RNA (1)...(19): siRNA sense strand
ucaaagauauuauggagga

SEQ ID NO: 2563031 - RNA, 19 nt, Homo sapiens
  misc_RNA (1)...(19): siRNA sense strand
cagaauguaaagauaggaa

SEQ ID NO: 2563032 - RNA, 19 nt, Homo sapiens
  misc_RNA (1)...(19): siRNA sense strand
acuuggaacugaugcagaa

SEQ ID NO: 2563033 - RNA, 19 nt, Homo sapiens
  misc_RNA (1)...(19): siRNA sense strand
aaagauaggaaaugagagu

SEQ ID NO: 2563034 - RNA, 19 nt, Homo sapiens
  misc_RNA (1)...(19): siRNA sense strand
guuugaugacugcaagaaa

SEQ ID NO: 2563035 - RNA, 19 nt, Homo sapiens
  misc_RNA (1)...(19): siRNA sense strand
ucguguggcagaagauaaa

SEQ ID NO: 2563036 - RNA, 19 nt, Homo sapiens
  misc_RNA (1)...(19): siRNA sense strand
ucuacuaccaauugagaau

SEQ ID NO: 2563037 - RNA, 19 nt, Homo sapiens
  misc_RNA (1)...(19): siRNA sense strand
agguugauccagaauguaa

SEQ ID NO: 2563038 - RNA, 19 nt, Homo sapiens
  misc_RNA (1)...(19): siRNA sense strand
aaagaaggcgaauggaaga

SEQ ID NO: 2563039 - RNA, 19 nt, Homo sapiens
  misc_RNA (1)...(19): siRNA sense strand
ccuuucaggcaauggcaua

SEQ ID NO: 2563040 - RNA, 19 nt, Homo sapiens
  misc_RNA (1)...(19): siRNA sense strand
cuaccaauugagaaugaua

SEQ ID NO: 2563041 - RNA, 19 nt, Homo sapiens
  misc_RNA (1)...(19): siRNA sense strand
ucaucaacaaagaaagcaa

SEQ ID NO: 2563042 - RNA, 19 nt, Homo sapiens
  misc_RNA (1)...(19): siRNA sense strand
gaaagaaggcgaauggaag

SEQ ID NO: 2563043 - RNA, 19 nt, Homo sapiens
  misc_RNA (1)...(19): siRNA sense strand
aggccauccuugaagaaga

SEQ ID NO: 2563044 - RNA, 19 nt, Homo sapiens
  misc_RNA (1)...(19): siRNA sense strand
ccaucuuaacuuagcagaa

SEQ ID NO: 2563045 - RNA, 19 nt, Homo sapiens
  misc_RNA (1)...(19): siRNA sense strand
uggcagaagauaaaagcaa

SEQ ID NO: 2563046 - RNA, 19 nt, Homo sapiens
  misc_RNA (1)...(19): siRNA sense strand
agagccuaauaaaggguaa

SEQ ID NO: 2563047 - RNA, 19 nt, Homo sapiens
  misc_RNA (1)...(19): siRNA sense strand
gguugauccagaauguaaa

SEQ ID NO: 2563048 - RNA, 19 nt, Homo sapiens
  misc_RNA (1)...(19): siRNA sense strand
uugcacagcuuguugaaaa

SEQ ID NO: 2563049 - RNA, 19 nt, Homo sapiens
  misc_RNA (1)...(19): siRNA sense strand
gaugaaaaucccggaguaa

SEQ ID NO: 2563050 - RNA, 19 nt, Homo sapiens
  misc_RNA (1)...(19): siRNA sense strand
aaacaauggcugaccagau

SEQ ID NO: 2563051 - RNA, 19 nt, Homo sapiens
  misc_RNA (1)...(19): siRNA sense strand
cuucaguauuaauggaacu

SEQ ID NO: 2563052 - RNA, 19 nt, Homo sapiens
  misc_RNA (1)...(19): siRNA sense strand
gagaacaaguauaaagcag

SEQ ID NO: 2563053 - RNA, 19 nt, Homo sapiens
  misc_RNA (1)...(19): siRNA sense strand
ccacaugaaucucaggugu

SEQ ID NO: 2563054 - RNA, 19 nt, Homo sapiens
  misc_RNA (1)...(19): siRNA sense strand
ugaaaaucccggaguaaga

SEQ ID NO: 2563055 - RNA, 19 nt, Homo sapiens
  misc_RNA (1)...(19): siRNA sense strand
gagccuaauaaaggguaaa

SEQ ID NO: 2563056 - RNA, 19 nt, Homo sapiens
  misc_RNA (1)...(19): siRNA sense strand
guaaagauaggaaaugaga

SEQ ID NO: 2563057 - RNA, 19 nt, Homo sapiens
  misc_RNA (1)...(19): siRNA sense strand
aagaaaauuuggacagguu

SEQ ID NO: 2563058 - RNA, 19 nt, Homo sapiens
  misc_RNA (1)...(19): siRNA sense strand
acaucaaagucuguagauu

SEQ ID NO: 2563059 - RNA, 19 nt, Homo sapiens
  misc_RNA (1)...(19): siRNA sense strand
gaaaugagagugacaugau

SEQ ID NO: 2563060 - RNA, 19 nt, Homo sapiens
  misc_RNA (1)...(19): siRNA sense strand
caaguauaaagcagcauau

SEQ ID NO: 2563061 - RNA, 19 nt, Homo sapiens
  misc_RNA (1)...(19): siRNA sense strand
acaaguauaaagcagcaua

SEQ ID NO: 2563062 - RNA, 19 nt, Homo sapiens
  misc_RNA (1)...(19): siRNA sense strand
gcauaugaucuacuaccaa

SEQ ID NO: 2563063 - RNA, 19 nt, Homo sapiens
  misc_RNA (1)...(19): siRNA sense strand
cccaagcuuaugaaagaaa

SEQ ID NO: 2563064 - RNA, 19 nt, Homo sapiens
  misc_RNA (1)...(19): siRNA sense strand
ccacuaagcuuuuggcauc

SEQ ID NO: 2563065 - RNA, 19 nt, Homo sapiens
  misc_RNA (1)...(19): siRNA sense strand
ccaaucucaacaaggcaaa

SEQ ID NO: 2563066 - RNA, 19 nt, Homo sapiens
  misc_RNA (1)...(19): siRNA sense strand
caaagauauuauggaggau

SEQ ID NO: 2563067 - RNA, 19 nt, Homo sapiens
  misc_RNA (1)...(19): siRNA sense strand
aggcaauggcauaugaucu

SEQ ID NO: 2563068 - RNA, 19 nt, Homo sapiens
  misc_RNA (1)...(19): siRNA sense strand
gagcagaggaagaggagga

SEQ ID NO: 2563069 - RNA, 19 nt, Homo sapiens
  misc_RNA (1)...(19): siRNA sense strand
aggaagaggaggaggagga

SEQ ID NO: 2563070 - RNA, 19 nt, Homo sapiens
  misc_RNA (1)...(19): siRNA sense strand
acaaucaggugcugggcua

SEQ ID NO: 2563071 - RNA, 19 nt, Homo sapiens
  misc_RNA (1)...(19): siRNA sense strand
uugaaagaagagauggaaa

SEQ ID NO: 2563072 - RNA, 19 nt, Homo sapiens
  misc_RNA (1)...(19): siRNA sense strand
cagaauggaggaagcggaa

SEQ ID NO: 2563073 - RNA, 19 nt, Homo sapiens
  misc_RNA (1)...(19): siRNA sense strand
cagaggaagaggaggagga

SEQ ID NO: 2563074 - RNA, 19 nt, Homo sapiens
  misc_RNA (1)...(19): siRNA sense strand
ccaucuauaagcagagaga

SEQ ID NO: 2563075 - RNA, 19 nt, Homo sapiens
  misc_RNA (1)...(19): siRNA sense strand
ccuccagcaucguggccaa

SEQ ID NO: 2563076 - RNA, 19 nt, Homo sapiens
  misc_RNA (1)...(19): siRNA sense strand
ggaugcggcuugagaggca

SEQ ID NO: 2563077 - RNA, 19 nt, Homo sapiens
  misc_RNA (1)...(19): siRNA sense strand
aucuauaagcagagagagu

SEQ ID NO: 2563078 - RNA, 19 nt, Homo sapiens
  misc_RNA (1)...(19): siRNA sense strand
ggagcgucagagagaggaa

SEQ ID NO: 2563079 - RNA, 19 nt, Homo sapiens
  misc_RNA (1)...(19): siRNA sense strand
ggaggggagcagaggaaga

SEQ ID NO: 2563080 - RNA, 19 nt, Homo sapiens
  misc_RNA (1)...(19): siRNA sense strand
gagugagacuggaagccca

SEQ ID NO: 2563081 - RNA, 19 nt, Homo sapiens
  misc_RNA (1)...(19): siRNA sense strand
gagacagaauggaggaagc

SEQ ID NO: 2563082 - RNA, 19 nt, Homo sapiens
  misc_RNA (1)...(19): siRNA sense strand
aggaggaggaagaugacga

SEQ ID NO: 2563083 - RNA, 19 nt, Homo sapiens
  misc_RNA (1)...(19): siRNA sense strand
ggaaagugagagagaggaa

SEQ ID NO: 2563084 - RNA, 19 nt, Homo sapiens
  misc_RNA (1)...(19): siRNA sense strand
gcacauugucaaaggucaa

SEQ ID NO: 2563085 - RNA, 19 nt, Homo sapiens
  misc_RNA (1)...(19): siRNA sense strand
gaaugggccaagagggaaa

SEQ ID NO: 2563086 - RNA, 19 nt, Homo sapiens
  misc_RNA (1)...(19): siRNA sense strand
guuugggaguugagugaua

SEQ ID NO: 2563087 - RNA, 19 nt, Homo sapiens
  misc_RNA (1)...(19): siRNA sense strand
acuauuaaacagaggacaa

SEQ ID NO: 2563088 - RNA, 19 nt, Homo sapiens
  misc_RNA (1)...(19): siRNA sense strand
cuguaaaaccugaagauaa

SEQ ID NO: 2563089 - RNA, 19 nt, Homo sapiens
  misc_RNA (1)...(19): siRNA sense strand
gaacaggaccuuaaggaga

SEQ ID NO: 2563090 - RNA, 19 nt, Homo sapiens
  misc_RNA (1)...(19): siRNA sense strand
guagaaacguugaagcaca

SEQ ID NO: 2563091 - RNA, 19 nt, Homo sapiens
  misc_RNA (1)...(19): siRNA sense strand
ggucauuaugcgacacaaa

SEQ ID NO: 2563092 - RNA, 19 nt, Homo sapiens
  misc_RNA (1)...(19): siRNA sense strand
cuugauacuuggaaagauu

SEQ ID NO: 2563093 - RNA, 19 nt, Homo sapiens
  misc_RNA (1)...(19): siRNA sense strand
cagaauuggaggagagugu

SEQ ID NO: 2563094 - RNA, 19 nt, Homo sapiens
  misc_RNA (1)...(19): siRNA sense strand
caaugaaauaguugaccua

SEQ ID NO: 2563095 - RNA, 19 nt, Homo sapiens
  misc_RNA (1)...(19): siRNA sense strand
cuaaguuaccuguggauau

SEQ ID NO: 2563096 - RNA, 19 nt, Homo sapiens
  misc_RNA (1)...(19): siRNA sense strand
caagagggaaagugagaga

SEQ ID NO: 2563097 - RNA, 19 nt, Homo sapiens
  misc_RNA (1)...(19): siRNA sense strand
gggccaagagggaaaguga

SEQ ID NO: 2563098 - RNA, 19 nt, Homo sapiens
  misc_RNA (1)...(19): siRNA sense strand
agaaguuaaucaagggcau

SEQ ID NO: 2563099 - RNA, 19 nt, Homo sapiens
  misc_RNA (1)...(19): siRNA sense strand
cgguagaaacguugaagca

SEQ ID NO: 2563100 - RNA, 19 nt, Homo sapiens
  misc_RNA (1)...(19): siRNA sense strand
cagacuugauacuuggaaa

SEQ ID NO: 2563101 - RNA, 19 nt, Homo sapiens
  misc_RNA (1)...(19): siRNA sense strand
uuucaaagguucagaucca

SEQ ID NO: 2563102 - RNA, 19 nt, Homo sapiens
  misc_RNA (1)...(19): siRNA sense strand
gaagaagauaugaucgaau

SEQ ID NO: 2563103 - RNA, 19 nt, Homo sapiens
  misc_RNA (1)...(19): siRNA sense strand
cuuggaaagauuugggauu

SEQ ID NO: 2563104 - RNA, 19 nt, Homo sapiens
  misc_RNA (1)...(19): siRNA sense strand
cuacagagggaaaagaaua

SEQ ID NO: 2563105 - RNA, 19 nt, Homo sapiens
  misc_RNA (1)...(19): siRNA sense strand
auggaaugcuugacagaga

SEQ ID NO: 2563106 - RNA, 19 nt, Homo sapiens
  misc_RNA (1)...(19): siRNA sense strand
ggagaaagaaccugugcca

SEQ ID NO: 2563107 - RNA, 19 nt, Homo sapiens
  misc_RNA (1)...(19): siRNA sense strand
gagaauacuaaucugcaaa

SEQ ID NO: 2563108 - RNA, 19 nt, Homo sapiens
  misc_RNA (1)...(19): siRNA sense strand
cagcagaauuggaggagag

SEQ ID NO: 2563109 - RNA, 19 nt, Homo sapiens
  misc_RNA (1)...(19): siRNA sense strand
gacuaaaucagcaggaaca

SEQ ID NO: 2563110 - RNA, 19 nt, Homo sapiens
  misc_RNA (1)...(19): siRNA sense strand
ggaaaagauccaucaacaa

SEQ ID NO: 2563111 - RNA, 19 nt, Homo sapiens
  misc_RNA (1)...(19): siRNA sense strand
acaguuaucaagugggaau

SEQ ID NO: 2563112 - RNA, 19 nt, Homo sapiens
  misc_RNA (1)...(19): siRNA sense strand
aggagaaggaagauacuau

SEQ ID NO: 2563113 - RNA, 19 nt, Homo sapiens
  misc_RNA (1)...(19): siRNA sense strand
gccaagagggaaagugaga

SEQ ID NO: 2563114 - RNA, 19 nt, Homo sapiens
  misc_RNA (1)...(19): siRNA sense strand
agagggaaagugagagaga

SEQ ID NO: 2563115 - RNA, 19 nt, Homo sapiens
  misc_RNA (1)...(19): siRNA sense strand
gaguuugggaguugaguga

SEQ ID NO: 2563116 - RNA, 19 nt, Homo sapiens
  misc_RNA (1)...(19): siRNA sense strand
cugaagaagauaugaucga

SEQ ID NO: 2563117 - RNA, 19 nt, Homo sapiens
  misc_RNA (1)...(19): siRNA sense strand
auuggagguccgugaaaua

SEQ ID NO: 2563118 - RNA, 19 nt, Homo sapiens
  misc_RNA (1)...(19): siRNA sense strand
caauaaagaggcugaucca

SEQ ID NO: 2563119 - RNA, 19 nt, Homo sapiens
  misc_RNA (1)...(19): siRNA sense strand
uaguuuaagcccagugaau

SEQ ID NO: 2563120 - RNA, 19 nt, Homo sapiens
  misc_RNA (1)...(19): siRNA sense strand
agacagggccaguuuacaa

SEQ ID NO: 2563121 - RNA, 19 nt, Homo sapiens
  misc_RNA (1)...(19): siRNA sense strand
ucgaaugggccaagaggga

SEQ ID NO: 2563122 - RNA, 19 nt, Homo sapiens
  misc_RNA (1)...(19): siRNA sense strand
agaauaauguggaacagga

SEQ ID NO: 2563123 - RNA, 19 nt, Homo sapiens
  misc_RNA (1)...(19): siRNA sense strand
aguauuacaucgguagaaa

SEQ ID NO: 2563124 - RNA, 19 nt, Homo sapiens
  misc_RNA (1)...(19): siRNA sense strand
augaaauaguugaccuaca

SEQ ID NO: 2563125 - RNA, 19 nt, Homo sapiens
  misc_RNA (1)...(19): siRNA sense strand
auuucugucuggugauaaa

SEQ ID NO: 2563126 - RNA, 19 nt, Homo sapiens
  misc_RNA (1)...(19): siRNA sense strand
ggauuggagguccgugaaa

SEQ ID NO: 2563127 - RNA, 19 nt, Homo sapiens
  misc_RNA (1)...(19): siRNA sense strand
gugaaacagccaaccuuaa

SEQ ID NO: 2563128 - RNA, 19 nt, Homo sapiens
  misc_RNA (1)...(19): siRNA sense strand
gaauuaacuagucaggaau

SEQ ID NO: 2563129 - RNA, 19 nt, Homo sapiens
  misc_RNA (1)...(19): siRNA sense strand
auguugaaggccagagcaa

SEQ ID NO: 2563130 - RNA, 19 nt, Homo sapiens
  misc_RNA (1)...(19): siRNA sense strand
aaagugagagagaggaaga

SEQ ID NO: 2563131 - RNA, 19 nt, Homo sapiens
  misc_RNA (1)...(19): siRNA sense strand
ccgugaaauauucuugaaa

SEQ ID NO: 2563132 - RNA, 19 nt, Homo sapiens
  misc_RNA (1)...(19): siRNA sense strand
cuuaaggagaaggaagaua

SEQ ID NO: 2563133 - RNA, 19 nt, Homo sapiens
  misc_RNA (1)...(19): siRNA sense strand
ccuuaaugaacauguugaa

SEQ ID NO: 2563134 - RNA, 19 nt, Homo sapiens
  misc_RNA (1)...(19): siRNA sense strand
cccucuaccaccugggaaa

SEQ ID NO: 2563135 - RNA, 19 nt, Homo sapiens
  misc_RNA (1)...(19): siRNA sense strand
ugaugaaaucuuccugaaa

SEQ ID NO: 2563136 - RNA, 19 nt, Homo sapiens
  misc_RNA (1)...(19): siRNA sense strand
aggagcaacucaaggaagu

SEQ ID NO: 2563137 - RNA, 19 nt, Homo sapiens
  misc_RNA (1)...(19): siRNA sense strand
aacucaaggaagucagaaa

SEQ ID NO: 2563138 - RNA, 19 nt, Homo sapiens
  misc_RNA (1)...(19): siRNA sense strand
acagaggacaagugagguu

SEQ ID NO: 2563139 - RNA, 19 nt, Homo sapiens
  misc_RNA (1)...(19): siRNA sense strand
caagauucacaacaggaaa

SEQ ID NO: 2563140 - RNA, 19 nt, Homo sapiens
  misc_RNA (1)...(19): siRNA sense strand
gagaagaaagcuauggcaa

SEQ ID NO: 2563141 - RNA, 19 nt, Homo sapiens
  misc_RNA (1)...(19): siRNA sense strand
cggaaaugcuuggggaaaa

SEQ ID NO: 2563142 - RNA, 19 nt, Homo sapiens
  misc_RNA (1)...(19): siRNA sense strand
gcuuauggcuaccggaaau

SEQ ID NO: 2563143 - RNA, 19 nt, Homo sapiens
  misc_RNA (1)...(19): siRNA sense strand
ccauggacccagaaggaau

SEQ ID NO: 2563144 - RNA, 19 nt, Homo sapiens
  misc_RNA (1)...(19): siRNA sense strand
cugcaaagggucaagaaca

SEQ ID NO: 2563145 - RNA, 19 nt, Homo sapiens
  misc_RNA (1)...(19): siRNA sense strand
gggucaagaacaugcucua

SEQ ID NO: 2563146 - RNA, 19 nt, Homo sapiens
  misc_RNA (1)...(19): siRNA sense strand
gacaaaaguuacaaggaga

SEQ ID NO: 2563147 - RNA, 19 nt, Homo sapiens
  misc_RNA (1)...(19): siRNA sense strand
gggcaaaaucccucagaca

SEQ ID NO: 2563148 - RNA, 19 nt, Homo sapiens
  misc_RNA (1)...(19): siRNA sense strand
cccugaauguucuggaaau

SEQ ID NO: 2563149 - RNA, 19 nt, Homo sapiens
  misc_RNA (1)...(19): siRNA sense strand
guggaaagguguugguggu

SEQ ID NO: 2563150 - RNA, 19 nt, Homo sapiens
  misc_RNA (1)...(19): siRNA sense strand
gggcuacacucaaggguuc

SEQ ID NO: 2563151 - RNA, 19 nt, Homo sapiens
  misc_RNA (1)...(19): siRNA sense strand
ccggaaaugcuuggggaaa

SEQ ID NO: 2563152 - RNA, 19 nt, Homo sapiens
  misc_RNA (1)...(19): siRNA sense strand
aggugaauaugcacaucaa

SEQ ID NO: 2563153 - RNA, 19 nt, Homo sapiens
  misc_RNA (1)...(19): siRNA sense strand
acaaaaguuacaaggagaa

SEQ ID NO: 2563154 - RNA, 19 nt, Homo sapiens
  misc_RNA (1)...(19): siRNA sense strand
aucaauggucucagaaauu

SEQ ID NO: 2563155 - RNA, 19 nt, Homo sapiens
  misc_RNA (1)...(19): siRNA sense strand
auuccagagaagaaagcua

SEQ ID NO: 2563156 - RNA, 19 nt, Homo sapiens
  misc_RNA (1)...(19): siRNA sense strand
cucaggaauuugaagccua

SEQ ID NO: 2563157 - RNA, 19 nt, Homo sapiens
  misc_RNA (1)...(19): siRNA sense strand
uggcaauugcugaugcuuu

SEQ ID NO: 2563158 - RNA, 19 nt, Homo sapiens
  misc_RNA (1)...(19): siRNA sense strand
gcaccaagauccugggcaa

SEQ ID NO: 2563159 - RNA, 19 nt, Homo sapiens
  misc_RNA (1)...(19): siRNA sense strand
agauaguggugaaggacaa

SEQ ID NO: 2563160 - RNA, 19 nt, Homo sapiens
  misc_RNA (1)...(19): siRNA sense strand
ggucauaaagagagagagu

SEQ ID NO: 2563161 - RNA, 19 nt, Homo sapiens
  misc_RNA (1)...(19): siRNA sense strand
guguaaaggaccagagcuu

SEQ ID NO: 2563162 - RNA, 19 nt, Homo sapiens
  misc_RNA (1)...(19): siRNA sense strand
cuucaaagagacagagcua

SEQ ID NO: 2563163 - RNA, 19 nt, Homo sapiens
  misc_RNA (1)...(19): siRNA sense strand
acaauugacuggagggaca

SEQ ID NO: 2563164 - RNA, 19 nt, Homo sapiens
  misc_RNA (1)...(19): siRNA sense strand
gguuagaggaagaggaugu

SEQ ID NO: 2563165 - RNA, 19 nt, Homo sapiens
  misc_RNA (1)...(19): siRNA sense strand
uuaaagucauugaggacaa

SEQ ID NO: 2563166 - RNA, 19 nt, Homo sapiens
  misc_RNA (1)...(19): siRNA sense strand
aagaugaagaugaggagua

SEQ ID NO: 2563167 - RNA, 19 nt, Homo sapiens
  misc_RNA (1)...(19): siRNA sense strand
uguacuaccuugaggaaca

SEQ ID NO: 2563168 - RNA, 19 nt, Homo sapiens
  misc_RNA (1)...(19): siRNA sense strand
cugaagaagaagaugaaga

SEQ ID NO: 2563169 - RNA, 19 nt, Homo sapiens
  misc_RNA (1)...(19): siRNA sense strand
ggaaauuagugcugggcgu

SEQ ID NO: 2563170 - RNA, 19 nt, Homo sapiens
  misc_RNA (1)...(19): siRNA sense strand
gaguauccacuuugggaaa

SEQ ID NO: 2563171 - RNA, 19 nt, Homo sapiens
  misc_RNA (1)...(19): siRNA sense strand
acaagauggaaguagauaa

SEQ ID NO: 2563172 - RNA, 19 nt, Homo sapiens
  misc_RNA (1)...(19): siRNA sense strand
gggcaaagugugugaccca

SEQ ID NO: 2563173 - RNA, 19 nt, Homo sapiens
  misc_RNA (1)...(19): siRNA sense strand
augaagaacuugaauguca

SEQ ID NO: 2563174 - RNA, 19 nt, Homo sapiens
  misc_RNA (1)...(19): siRNA sense strand
cuuuaaagaacuagccaau

SEQ ID NO: 2563175 - RNA, 19 nt, Homo sapiens
  misc_RNA (1)...(19): siRNA sense strand
agagagugggccuggaaua

SEQ ID NO: 2563176 - RNA, 19 nt, Homo sapiens
  misc_RNA (1)...(19): siRNA sense strand
cugacaagauggaaguaga

SEQ ID NO: 2563177 - RNA, 19 nt, Homo sapiens
  misc_RNA (1)...(19): siRNA sense strand
guacaaauugccaagggaa

SEQ ID NO: 2563178 - RNA, 19 nt, Homo sapiens
  misc_RNA (1)...(19): siRNA sense strand
uggaagcagaggaggacaa

SEQ ID NO: 2563179 - RNA, 19 nt, Homo sapiens
  misc_RNA (1)...(19): siRNA sense strand
gggacuaugcccaggguca

SEQ ID NO: 2563180 - RNA, 19 nt, Homo sapiens
  misc_RNA (1)...(19): siRNA sense strand
ggacaagaguggacggcag

SEQ ID NO: 2563181 - RNA, 19 nt, Homo sapiens
  misc_RNA (1)...(19): siRNA sense strand
ggaugauugaugagaacau

SEQ ID NO: 2563182 - RNA, 19 nt, Homo sapiens
  misc_RNA (1)...(19): siRNA sense strand
gcauuaaagucauugagga

SEQ ID NO: 2563183 - RNA, 19 nt, Homo sapiens
  misc_RNA (1)...(19): siRNA sense strand
augcugagauaguggugaa

SEQ ID NO: 2563184 - RNA, 19 nt, Homo sapiens
  misc_RNA (1)...(19): siRNA sense strand
ggacaauggcagaagcugu

SEQ ID NO: 2563185 - RNA, 19 nt, Homo sapiens
  misc_RNA (1)...(19): siRNA sense strand
ggagggacaucgugaggga

SEQ ID NO: 2563186 - RNA, 19 nt, Homo sapiens
  misc_RNA (1)...(19): siRNA sense strand
cugagauaguggugaagga

SEQ ID NO: 2563187 - RNA, 19 nt, Homo sapiens
  misc_RNA (1)...(19): siRNA sense strand
cagaagacugccagacauu

SEQ ID NO: 2563188 - RNA, 19 nt, Homo sapiens
  misc_RNA (1)...(19): siRNA sense strand
ccuggguacugaagaagaa

SEQ ID NO: 2563189 - RNA, 19 nt, Homo sapiens
  misc_RNA (1)...(19): siRNA sense strand
ggugaaggacaauggcaga

SEQ ID NO: 2563190 - RNA, 19 nt, Homo sapiens
  misc_RNA (1)...(19): siRNA sense strand
cggaagagcgacuagacau

SEQ ID NO: 2563191 - RNA, 19 nt, Homo sapiens
  misc_RNA (1)...(19): siRNA sense strand
cccuugaggagcuggguua

SEQ ID NO: 2563192 - RNA, 19 nt, Homo sapiens
  misc_RNA (1)...(19): siRNA sense strand
uaugaagagaugagagcuu

SEQ ID NO: 2563193 - RNA, 19 nt, Homo sapiens
  misc_RNA (1)...(19): siRNA sense strand
agacauugaccaagaccau

SEQ ID NO: 2563194 - RNA, 19 nt, Homo sapiens
  misc_RNA (1)...(19): siRNA sense strand
ucuacauggugauggucaa

SEQ ID NO: 2563195 - RNA, 19 nt, Homo sapiens
  misc_RNA (1)...(19): siRNA sense strand
uguccuggguacugaagaa

SEQ ID NO: 2563196 - RNA, 19 nt, Homo sapiens
  misc_RNA (1)...(19): siRNA sense strand
augaagaugaggaguauga

SEQ ID NO: 2563197 - RNA, 19 nt, Homo sapiens
  misc_RNA (1)...(19): siRNA sense strand
cagccuaccaguuggaaca

SEQ ID NO: 2563198 - RNA, 19 nt, Homo sapiens
  misc_RNA (1)...(19): siRNA sense strand
uguagaagccggagcagga

SEQ ID NO: 2563199 - RNA, 19 nt, Homo sapiens
  misc_RNA (1)...(19): siRNA sense strand
gcuaaugcccagagaacgu

SEQ ID NO: 2563200 - RNA, 19 nt, Homo sapiens
  misc_RNA (1)...(19): siRNA sense strand
ugacaauggcuuugacagu

SEQ ID NO: 2563201 - RNA, 19 nt, Homo sapiens
  misc_RNA (1)...(19): siRNA sense strand
acaaagucuuggccagaau

SEQ ID NO: 2563202 - RNA, 19 nt, Homo sapiens
  misc_RNA (1)...(19): siRNA sense strand
uacaugaaccggaggagaa

SEQ ID NO: 2563203 - RNA, 19 nt, Homo sapiens
  misc_RNA (1)...(19): siRNA sense strand
guaucaguauggaggaguu

SEQ ID NO: 2563204 - RNA, 19 nt, Homo sapiens
  misc_RNA (1)...(19): siRNA sense strand
caggauugguagugauuuu

SEQ ID NO: 2563205 - RNA, 19 nt, Homo sapiens
  misc_RNA (1)...(19): siRNA sense strand
guuggaugauugaugagaa

SEQ ID NO: 2563206 - RNA, 19 nt, Homo sapiens
  misc_RNA (1)...(19): siRNA sense strand
agacuguggacucgagcaa

SEQ ID NO: 2563207 - RNA, 19 nt, Homo sapiens
  misc_RNA (1)...(19): siRNA sense strand
cauuaaagucauugaggac

SEQ ID NO: 2563208 - RNA, 19 nt, Homo sapiens
  misc_RNA (1)...(19): siRNA sense strand
guggauggcccuugagagu

SEQ ID NO: 2563209 - RNA, 19 nt, Homo sapiens
  misc_RNA (1)...(19): siRNA sense strand
gaugagaacauucgcccaa

SEQ ID NO: 2563210 - RNA, 19 nt, Homo sapiens
  misc_RNA (1)...(19): siRNA sense strand
gguuaugaguacauggaug

SEQ ID NO: 2563211 - RNA, 19 nt, Homo sapiens
  misc_RNA (1)...(19): siRNA sense strand
agauugugcucacgggaca

SEQ ID NO: 2563212 - RNA, 19 nt, Homo sapiens
  misc_RNA (1)...(19): siRNA sense strand
gcuauguccucguggccau

SEQ ID NO: 2563213 - RNA, 19 nt, Homo sapiens
  misc_RNA (1)...(19): siRNA sense strand
uuguaaggcugcugggacu

SEQ ID NO: 2563214 - RNA, 19 nt, Homo sapiens
  misc_RNA (1)...(19): siRNA sense strand
uacaaauugccaagggaau

SEQ ID NO: 2563215 - RNA, 19 nt, Homo sapiens
  misc_RNA (1)...(19): siRNA sense strand
ccuuuaaagaacuagccaa

SEQ ID NO: 2563216 - RNA, 19 nt, Homo sapiens
  misc_RNA (1)...(19): siRNA sense strand
cgugggagccagagccuuu

SEQ ID NO: 2563217 - RNA, 19 nt, Homo sapiens
  misc_RNA (1)...(19): siRNA sense strand
gagauaguggugaaggaca

SEQ ID NO: 2563218 - RNA, 19 nt, Homo sapiens
  misc_RNA (1)...(19): siRNA sense strand
ucaaagagacagagcuaag

SEQ ID NO: 2563219 - RNA, 19 nt, Homo sapiens
  misc_RNA (1)...(19): siRNA sense strand
acuuggaagcagaggagga

SEQ ID NO: 2563220 - RNA, 19 nt, Homo sapiens
  misc_RNA (1)...(19): siRNA sense strand
uggagaagcuagagcagga

SEQ ID NO: 2563221 - RNA, 19 nt, Homo sapiens
  misc_RNA (1)...(19): siRNA sense strand
ccgugaagucagucaacaa

SEQ ID NO: 2563222 - RNA, 19 nt, Homo sapiens
  misc_RNA (1)...(19): siRNA sense strand
gggaauuuggcgacguaau

SEQ ID NO: 2563223 - RNA, 19 nt, Homo sapiens
  misc_RNA (1)...(19): siRNA sense strand
gggcaaaauccaacagcau

SEQ ID NO: 2563224 - RNA, 19 nt, Homo sapiens
  misc_RNA (1)...(19): siRNA sense strand
cgcaaugugcccugggaau

SEQ ID NO: 2563225 - RNA, 19 nt, Homo sapiens
  misc_RNA (1)...(19): siRNA sense strand
uacugaaguucgugcgcaa

SEQ ID NO: 2563226 - RNA, 19 nt, Homo sapiens
  misc_RNA (1)...(19): siRNA sense strand
ccgacuaugugcugggcca

SEQ ID NO: 2563227 - RNA, 19 nt, Homo sapiens
  misc_RNA (1)...(19): siRNA sense strand
caagagaagaucuggccuu

SEQ ID NO: 2563228 - RNA, 19 nt, Homo sapiens
  misc_RNA (1)...(19): siRNA sense strand
cccucaaggagcuggcuaa

SEQ ID NO: 2563229 - RNA, 19 nt, Homo sapiens
  misc_RNA (1)...(19): siRNA sense strand
gcaaugugcccugggaauu

SEQ ID NO: 2563230 - RNA, 19 nt, Homo sapiens
  misc_RNA (1)...(19): siRNA sense strand
gcaaaauccaacagcauca

SEQ ID NO: 2563231 - RNA, 19 nt, Homo sapiens
  misc_RNA (1)...(19): siRNA sense strand
ccuacaaggccuaugagca

SEQ ID NO: 2563232 - RNA, 19 nt, Homo sapiens
  misc_RNA (1)...(19): siRNA sense strand
ccgccagcaaggaagaaau

SEQ ID NO: 2563233 - RNA, 19 nt, Homo sapiens
  misc_RNA (1)...(19): siRNA sense strand
gcgcaaugugcccugggaa

SEQ ID NO: 2563234 - RNA, 19 nt, Homo sapiens
  misc_RNA (1)...(19): siRNA sense strand
uggagaagcuagagcagga

SEQ ID NO: 2563235 - RNA, 19 nt, Homo sapiens
  misc_RNA (1)...(19): siRNA sense strand
ccgugaagucagucaacaa

SEQ ID NO: 2563236 - RNA, 19 nt, Homo sapiens
  misc_RNA (1)...(19): siRNA sense strand
gggaauuuggcgacguaau

SEQ ID NO: 2563237 - RNA, 19 nt, Homo sapiens
  misc_RNA (1)...(19): siRNA sense strand
gggcaaaauccaacagcau

SEQ ID NO: 2563238 - RNA, 19 nt, Homo sapiens
  misc_RNA (1)...(19): siRNA sense strand
cgcaaugugcccugggaau

SEQ ID NO: 2563239 - RNA, 19 nt, Homo sapiens
  misc_RNA (1)...(19): siRNA sense strand
uacugaaguucgugcgcaa

SEQ ID NO: 2563240 - RNA, 19 nt, Homo sapiens
  misc_RNA (1)...(19): siRNA sense strand
ccgacuaugugcugggcca

SEQ ID NO: 2563241 - RNA, 19 nt, Homo sapiens
  misc_RNA (1)...(19): siRNA sense strand
caagagaagaucuggccuu

SEQ ID NO: 2563242 - RNA, 19 nt, Homo sapiens
  misc_RNA (1)...(19): siRNA sense strand
cccucaaggagcuggcuaa

SEQ ID NO: 2563243 - RNA, 19 nt, Homo sapiens
  misc_RNA (1)...(19): siRNA sense strand
gcaaugugcccugggaauu

SEQ ID NO: 2563244 - RNA, 19 nt, Homo sapiens
  misc_RNA (1)...(19): siRNA sense strand
gcaaaauccaacagcauca

SEQ ID NO: 2563245 - RNA, 19 nt, Homo sapiens
  misc_RNA (1)...(19): siRNA sense strand
ccuacaaggccuaugagca

SEQ ID NO: 2563246 - RNA, 19 nt, Homo sapiens
  misc_RNA (1)...(19): siRNA sense strand
ccgccagcaaggaagaaau

SEQ ID NO: 2563247 - RNA, 19 nt, Homo sapiens
  misc_RNA (1)...(19): siRNA sense strand
gcgcaaugugcccugggaa

SEQ ID NO: 2563248 - RNA, 19 nt, Homo sapiens
  misc_RNA (1)...(19): siRNA sense strand
gcuaugugguugagggcua

SEQ ID NO: 2563249 - RNA, 19 nt, Homo sapiens
  misc_RNA (1)...(19): siRNA sense strand
uggcagaaacagaggacua

SEQ ID NO: 2563250 - RNA, 19 nt, Homo sapiens
  misc_RNA (1)...(19): siRNA sense strand
aaggaaagggagagauuaa

SEQ ID NO: 2563251 - RNA, 19 nt, Homo sapiens
  misc_RNA (1)...(19): siRNA sense strand
gcauggaaauggagggcau

SEQ ID NO: 2563252 - RNA, 19 nt, Homo sapiens
  misc_RNA (1)...(19): siRNA sense strand
gauacguaccugugggaaa

SEQ ID NO: 2563253 - RNA, 19 nt, Homo sapiens
  misc_RNA (1)...(19): siRNA sense strand
cagcgaaccacuugauaaa

SEQ ID NO: 2563254 - RNA, 19 nt, Homo sapiens
  misc_RNA (1)...(19): siRNA sense strand
ccagcaugccauugagaaa

SEQ ID NO: 2563255 - RNA, 19 nt, Homo sapiens
  misc_RNA (1)...(19): siRNA sense strand
cgucagugcaauugaggaa

SEQ ID NO: 2563256 - RNA, 19 nt, Homo sapiens
  misc_RNA (1)...(19): siRNA sense strand
accuaaagccugagaauau

SEQ ID NO: 2563257 - RNA, 19 nt, Homo sapiens
  misc_RNA (1)...(19): siRNA sense strand
ccgaaaaguauaugagcaa

SEQ ID NO: 2563258 - RNA, 19 nt, Homo sapiens
  misc_RNA (1)...(19): siRNA sense strand
ugaaggaggaugagaucaa

SEQ ID NO: 2563259 - RNA, 19 nt, Homo sapiens
  misc_RNA (1)...(19): siRNA sense strand
gugcagucaucguggagaa

SEQ ID NO: 2563260 - RNA, 19 nt, Homo sapiens
  misc_RNA (1)...(19): siRNA sense strand
cugaugacaugaaaggaaa

SEQ ID NO: 2563261 - RNA, 19 nt, Homo sapiens
  misc_RNA (1)...(19): siRNA sense strand
cggcagugaaggaggauga

SEQ ID NO: 2563262 - RNA, 19 nt, Homo sapiens
  misc_RNA (1)...(19): siRNA sense strand
ggaccuaaagccugagaau

SEQ ID NO: 2563263 - RNA, 19 nt, Homo sapiens
  misc_RNA (1)...(19): siRNA sense strand
gcaaggauucgacgggaaa

SEQ ID NO: 2563264 - RNA, 19 nt, Homo sapiens
  misc_RNA (1)...(19): siRNA sense strand
cagaacauguugaaggaga

SEQ ID NO: 2563265 - RNA, 19 nt, Homo sapiens
  misc_RNA (1)...(19): siRNA sense strand
agaccaagaugcaggacuu

SEQ ID NO: 2563266 - RNA, 19 nt, Homo sapiens
  misc_RNA (1)...(19): siRNA sense strand
gcugauggcuuuugugaaa

SEQ ID NO: 2563267 - RNA, 19 nt, Homo sapiens
  misc_RNA (1)...(19): siRNA sense strand
caugaaaggaaaagacaaa

SEQ ID NO: 2563268 - RNA, 19 nt, Homo sapiens
  misc_RNA (1)...(19): siRNA sense strand
gcaaguuagagaacgguua

SEQ ID NO: 2563269 - RNA, 19 nt, Homo sapiens
  misc_RNA (1)...(19): siRNA sense strand
gaaagauuccagugggaga

SEQ ID NO: 2563270 - RNA, 19 nt, Homo sapiens
  misc_RNA (1)...(19): siRNA sense strand
agugaaagcagcagcagua

SEQ ID NO: 2563271 - RNA, 19 nt, Homo sapiens
  misc_RNA (1)...(19): siRNA sense strand
gaguaaaagucuccagcua

SEQ ID NO: 2563272 - RNA, 19 nt, Homo sapiens
  misc_RNA (1)...(19): siRNA sense strand
aggaaaauguggaaaauga

SEQ ID NO: 2563273 - RNA, 19 nt, Homo sapiens
  misc_RNA (1)...(19): siRNA sense strand
cagagcaacgggagugaaa

SEQ ID NO: 2563274 - RNA, 19 nt, Homo sapiens
  misc_RNA (1)...(19): siRNA sense strand
uggaggaacuucaggacau

SEQ ID NO: 2563275 - RNA, 19 nt, Homo sapiens
  misc_RNA (1)...(19): siRNA sense strand
ccuucaacccuucggauaa

SEQ ID NO: 2563276 - RNA, 19 nt, Homo sapiens
  misc_RNA (1)...(19): siRNA sense strand
ugagauggaagaaaggaaa

SEQ ID NO: 2563277 - RNA, 19 nt, Homo sapiens
  misc_RNA (1)...(19): siRNA sense strand
caaucgaguaccagaggaa

SEQ ID NO: 2563278 - RNA, 19 nt, Homo sapiens
  misc_RNA (1)...(19): siRNA sense strand
cagacgucuuccugaaaua

SEQ ID NO: 2563279 - RNA, 19 nt, Homo sapiens
  misc_RNA (1)...(19): siRNA sense strand
uggaaggguuugaugaaaa

SEQ ID NO: 2563280 - RNA, 19 nt, Homo sapiens
  misc_RNA (1)...(19): siRNA sense strand
cuuccagcauagagaacaa

SEQ ID NO: 2563281 - RNA, 19 nt, Homo sapiens
  misc_RNA (1)...(19): siRNA sense strand
cuuucaggugggagagaua

SEQ ID NO: 2563282 - RNA, 19 nt, Homo sapiens
  misc_RNA (1)...(19): siRNA sense strand
ccuggauacaucagaauua

SEQ ID NO: 2563283 - RNA, 19 nt, Homo sapiens
  misc_RNA (1)...(19): siRNA sense strand
gguccuagguccagggaug

SEQ ID NO: 2563284 - RNA, 19 nt, Homo sapiens
  misc_RNA (1)...(19): siRNA sense strand
agauguggcaugugaggaa

SEQ ID NO: 2563285 - RNA, 19 nt, Homo sapiens
  misc_RNA (1)...(19): siRNA sense strand
ccucagagcugcaggaccu

SEQ ID NO: 2563286 - RNA, 19 nt, Homo sapiens
  misc_RNA (1)...(19): siRNA sense strand
agaaggagcugcuggacga

SEQ ID NO: 2563287 - RNA, 19 nt, Homo sapiens
  misc_RNA (1)...(19): siRNA sense strand
gaaacaugcaagaaaucua

SEQ ID NO: 2563288 - RNA, 19 nt, Homo sapiens
  misc_RNA (1)...(19): siRNA sense strand
gagcuguggagaagaggaa

SEQ ID NO: 2563289 - RNA, 19 nt, Homo sapiens
  misc_RNA (1)...(19): siRNA sense strand
ccugaugacaugaaaggaa

SEQ ID NO: 2563290 - RNA, 19 nt, Homo sapiens
  misc_RNA (1)...(19): siRNA sense strand
ugaacaagaaguugaugaa

SEQ ID NO: 2563291 - RNA, 19 nt, Homo sapiens
  misc_RNA (1)...(19): siRNA sense strand
gaaagauccuacuggacau

SEQ ID NO: 2563292 - RNA, 19 nt, Homo sapiens
  misc_RNA (1)...(19): siRNA sense strand
aaagcaaaccaaagagaga

SEQ ID NO: 2563293 - RNA, 19 nt, Homo sapiens
  misc_RNA (1)...(19): siRNA sense strand
gugaggaaggaaagggaga

SEQ ID NO: 2563294 - RNA, 19 nt, Homo sapiens
  misc_RNA (1)...(19): siRNA sense strand
ccacaagacagaagggaag

SEQ ID NO: 2563295 - RNA, 19 nt, Homo sapiens
  misc_RNA (1)...(19): siRNA sense strand
gcauagagaacaagcagga

SEQ ID NO: 2563296 - RNA, 19 nt, Homo sapiens
  misc_RNA (1)...(19): siRNA sense strand
ggaaaaugaucccuguaaa

SEQ ID NO: 2563297 - RNA, 19 nt, Homo sapiens
  misc_RNA (1)...(19): siRNA sense strand
aggcagaggcagacaagau

SEQ ID NO: 2563298 - RNA, 19 nt, Homo sapiens
  misc_RNA (1)...(19): siRNA sense strand
ucggaaacaugcaagaaau

SEQ ID NO: 2563299 - RNA, 19 nt, Homo sapiens
  misc_RNA (1)...(19): siRNA sense strand
gugaaagauuccaguggga

SEQ ID NO: 2563300 - RNA, 19 nt, Homo sapiens
  misc_RNA (1)...(19): siRNA sense strand
caucagaauuagagagagc

SEQ ID NO: 2563301 - RNA, 19 nt, Homo sapiens
  misc_RNA (1)...(19): siRNA sense strand
aaggagaggucguucaaau

SEQ ID NO: 2563302 - RNA, 19 nt, Homo sapiens
  misc_RNA (1)...(19): siRNA sense strand
gggccagagcauugcagaa

SEQ ID NO: 2563303 - RNA, 19 nt, Homo sapiens
  misc_RNA (1)...(19): siRNA sense strand
ccgcagagcagcaucggaa

SEQ ID NO: 2563304 - RNA, 19 nt, Homo sapiens
  misc_RNA (1)...(19): siRNA sense strand
ugcaagaaaucuacgaauu

SEQ ID NO: 2563305 - RNA, 19 nt, Homo sapiens
  misc_RNA (1)...(19): siRNA sense strand
gcgcacaagcacaagaaga

SEQ ID NO: 2563306 - RNA, 19 nt, Homo sapiens
  misc_RNA (1)...(19): siRNA sense strand
cagcugaagaagaagguga

SEQ ID NO: 2563307 - RNA, 19 nt, Homo sapiens
  misc_RNA (1)...(19): siRNA sense strand
ccaucgaggaccuggauuu

SEQ ID NO: 2563308 - RNA, 19 nt, Homo sapiens
  misc_RNA (1)...(19): siRNA sense strand
gcaucaugucgguggccaa

SEQ ID NO: 2563309 - RNA, 19 nt, Homo sapiens
  misc_RNA (1)...(19): siRNA sense strand
ccgacgggcacgugaagaa

SEQ ID NO: 2563310 - RNA, 19 nt, Homo sapiens
  misc_RNA (1)...(19): siRNA sense strand
aagaacuaguggagacaga

SEQ ID NO: 2563311 - RNA, 19 nt, Homo sapiens
  misc_RNA (1)...(19): siRNA sense strand
uggaggaaaauguggaaaa

SEQ ID NO: 2563312 - RNA, 19 nt, Homo sapiens
  misc_RNA (1)...(19): siRNA sense strand
cacgaagaauggauugaaa

SEQ ID NO: 2563313 - RNA, 19 nt, Homo sapiens
  misc_RNA (1)...(19): siRNA sense strand
acggagaguccauguuaaa

SEQ ID NO: 2563314 - RNA, 19 nt, Homo sapiens
  misc_RNA (1)...(19): siRNA sense strand
ggcaacagcucaugcucaa

SEQ ID NO: 2563315 - RNA, 19 nt, Homo sapiens
  misc_RNA (1)...(19): siRNA sense strand
guaagagaccuccgggaau

SEQ ID NO: 2563316 - RNA, 19 nt, Homo sapiens
  misc_RNA (1)...(19): siRNA sense strand
cgucauccaccaagggcaa

SEQ ID NO: 2563317 - RNA, 19 nt, Homo sapiens
  misc_RNA (1)...(19): siRNA sense strand
gcugugugauagagaugua

SEQ ID NO: 2563318 - RNA, 19 nt, Homo sapiens
  misc_RNA (1)...(19): siRNA sense strand
gccacaagacagaagggaa

SEQ ID NO: 2563319 - RNA, 19 nt, Homo sapiens
  misc_RNA (1)...(19): siRNA sense strand
cuggaaagcaagaggaaga

SEQ ID NO: 2563320 - RNA, 19 nt, Homo sapiens
  misc_RNA (1)...(19): siRNA sense strand
agaccaagacggugagcaa

SEQ ID NO: 2563321 - RNA, 19 nt, Homo sapiens
  misc_RNA (1)...(19): siRNA sense strand
gggagaagguggugcagga

SEQ ID NO: 2563322 - RNA, 19 nt, Homo sapiens
  misc_RNA (1)...(19): siRNA sense strand
uggagaaggagguggagaa

SEQ ID NO: 2563323 - RNA, 19 nt, Homo sapiens
  misc_RNA (1)...(19): siRNA sense strand
agguggaggaggagggcaa

SEQ ID NO: 2563324 - RNA, 19 nt, Homo sapiens
  misc_RNA (1)...(19): siRNA sense strand
cgguauaagcugguagaua

SEQ ID NO: 2563325 - RNA, 19 nt, Homo sapiens
  misc_RNA (1)...(19): siRNA sense strand
ugaagaagguggagcagga

SEQ ID NO: 2563326 - RNA, 19 nt, Homo sapiens
  misc_RNA (1)...(19): siRNA sense strand
aggagaaggaagugguaga

SEQ ID NO: 2563327 - RNA, 19 nt, Homo sapiens
  misc_RNA (1)...(19): siRNA sense strand
ucgugaaggaggugaagaa

SEQ ID NO: 2563328 - RNA, 19 nt, Homo sapiens
  misc_RNA (1)...(19): siRNA sense strand
agguggacgugaaggagaa

SEQ ID NO: 2563329 - RNA, 19 nt, Homo sapiens
  misc_RNA (1)...(19): siRNA sense strand
agaaggagaucgacgccua

SEQ ID NO: 2563330 - RNA, 19 nt, Homo sapiens
  misc_RNA (1)...(19): siRNA sense strand
uggagaagaaucuggaaau

SEQ ID NO: 2563331 - RNA, 19 nt, Homo sapiens
  misc_RNA (1)...(19): siRNA sense strand
aguacagcgugguggagaa

SEQ ID NO: 2563332 - RNA, 19 nt, Homo sapiens
  misc_RNA (1)...(19): siRNA sense strand
guggagaagaaucuggaaa

SEQ ID NO: 2563333 - RNA, 19 nt, Homo sapiens
  misc_RNA (1)...(19): siRNA sense strand
aggagaaggugguggugca

SEQ ID NO: 2563334 - RNA, 19 nt, Homo sapiens
  misc_RNA (1)...(19): siRNA sense strand
acuaugagcuccaggcaga

SEQ ID NO: 2563335 - RNA, 19 nt, Homo sapiens
  misc_RNA (1)...(19): siRNA sense strand
aagccaaaucgcaggagaa

SEQ ID NO: 2563336 - RNA, 19 nt, Homo sapiens
  misc_RNA (1)...(19): siRNA sense strand
acgagaaggauuugacaga

SEQ ID NO: 2563337 - RNA, 19 nt, Homo sapiens
  misc_RNA (1)...(19): siRNA sense strand
gcauccaagcccaggagaa

SEQ ID NO: 2563338 - RNA, 19 nt, Homo sapiens
  misc_RNA (1)...(19): siRNA sense strand
ccaagcagggagagaguca

SEQ ID NO: 2563339 - RNA, 19 nt, Homo sapiens
  misc_RNA (1)...(19): siRNA sense strand
gccagaagacggagagcga

SEQ ID NO: 2563340 - RNA, 19 nt, Homo sapiens
  misc_RNA (1)...(19): siRNA sense strand
ucauggaggaaguggucaa

SEQ ID NO: 2563341 - RNA, 19 nt, Homo sapiens
  misc_RNA (1)...(19): siRNA sense strand
ggucguggugaaagaggua

SEQ ID NO: 2563342 - RNA, 19 nt, Homo sapiens
  misc_RNA (1)...(19): siRNA sense strand
agaaagaagcagagcggcu

SEQ ID NO: 2563343 - RNA, 19 nt, Homo sapiens
  misc_RNA (1)...(19): siRNA sense strand
gggagaugcucaacaggga

SEQ ID NO: 2563344 - RNA, 19 nt, Homo sapiens
  misc_RNA (1)...(19): siRNA sense strand
ugaaccagcuggaggacga

SEQ ID NO: 2563345 - RNA, 19 nt, Homo sapiens
  misc_RNA (1)...(19): siRNA sense strand
ccuacaagcugcaggcgca

SEQ ID NO: 2563346 - RNA, 19 nt, Homo sapiens
  misc_RNA (1)...(19): siRNA sense strand
aggagaagaaccuugcaaa

SEQ ID NO: 2563347 - RNA, 19 nt, Homo sapiens
  misc_RNA (1)...(19): siRNA sense strand
ccacggugcaggagaagau

SEQ ID NO: 2563348 - RNA, 19 nt, Homo sapiens
  misc_RNA (1)...(19): siRNA sense strand
agacggagagcgagcgaca

SEQ ID NO: 2563349 - RNA, 19 nt, Homo sapiens
  misc_RNA (1)...(19): siRNA sense strand
cugaagauggaguggcaga

SEQ ID NO: 2563350 - RNA, 19 nt, Homo sapiens
  misc_RNA (1)...(19): siRNA sense strand
ugcaacagcuggaggcaga

SEQ ID NO: 2563351 - RNA, 19 nt, Homo sapiens
  misc_RNA (1)...(19): siRNA sense strand
ucgugcagcuggaaagcaa

SEQ ID NO: 2563352 - RNA, 19 nt, Homo sapiens
  misc_RNA (1)...(19): siRNA sense strand
agguagucaagguggagaa

SEQ ID NO: 2563353 - RNA, 19 nt, Homo sapiens
  misc_RNA (1)...(19): siRNA sense strand
guggagaagcagaggccca

SEQ ID NO: 2563354 - RNA, 19 nt, Homo sapiens
  misc_RNA (1)...(19): siRNA sense strand
agcuggaagaggagaggaa

SEQ ID NO: 2563355 - RNA, 19 nt, Homo sapiens
  misc_RNA (1)...(19): siRNA sense strand
cgguggagcccaaggucau

SEQ ID NO: 2563356 - RNA, 19 nt, Homo sapiens
  misc_RNA (1)...(19): siRNA sense strand
gcaagaagcuggccgugga

SEQ ID NO: 2563357 - RNA, 19 nt, Homo sapiens
  misc_RNA (1)...(19): siRNA sense strand
gugcacaaggcgauggaga

SEQ ID NO: 2563358 - RNA, 19 nt, Homo sapiens
  misc_RNA (1)...(19): siRNA sense strand
gggacauccuggagacgca

SEQ ID NO: 2563359 - RNA, 19 nt, Homo sapiens
  misc_RNA (1)...(19): siRNA sense strand
uggugaaagagguagucaa

SEQ ID NO: 2563360 - RNA, 19 nt, Homo sapiens
  misc_RNA (1)...(19): siRNA sense strand
gggagguggacgugaagga

SEQ ID NO: 2563361 - RNA, 19 nt, Homo sapiens
  misc_RNA (1)...(19): siRNA sense strand
agacagagcaggagaucac

SEQ ID NO: 2563362 - RNA, 19 nt, Homo sapiens
  misc_RNA (1)...(19): siRNA sense strand
ugggacagauagagaggca

SEQ ID NO: 2563363 - RNA, 19 nt, Homo sapiens
  misc_RNA (1)...(19): siRNA sense strand
ggagagagucagaggcccu

SEQ ID NO: 2563364 - RNA, 19 nt, Homo sapiens
  misc_RNA (1)...(19): siRNA sense strand
guggagaccaagacgguga

SEQ ID NO: 2563365 - RNA, 19 nt, Homo sapiens
  misc_RNA (1)...(19): siRNA sense strand
gaggagauugagaaggaca

SEQ ID NO: 2563366 - RNA, 19 nt, Homo sapiens
  misc_RNA (1)...(19): siRNA sense strand
aggcagaagcagcagcaga

SEQ ID NO: 2563367 - RNA, 19 nt, Homo sapiens
  misc_RNA (1)...(19): siRNA sense strand
acacaaccacagacaacaa

SEQ ID NO: 2563368 - RNA, 19 nt, Homo sapiens
  misc_RNA (1)...(19): siRNA sense strand
agcuggaggcagaggaaaa

SEQ ID NO: 2563369 - RNA, 19 nt, Homo sapiens
  misc_RNA (1)...(19): siRNA sense strand
agaucaucauggaggaagu

SEQ ID NO: 2563370 - RNA, 19 nt, Homo sapiens
  misc_RNA (1)...(19): siRNA sense strand
aggaaguggucaagcugga

SEQ ID NO: 2563371 - RNA, 19 nt, Homo sapiens
  misc_RNA (1)...(19): siRNA sense strand
aggugaagaagguggagca

SEQ ID NO: 2563372 - RNA, 19 nt, Homo sapiens
  misc_RNA (1)...(19): siRNA sense strand
agguggauccggagacaga

SEQ ID NO: 2563373 - RNA, 19 nt, Homo sapiens
  misc_RNA (1)...(19): siRNA sense strand
agcuggaguuugcuagaaa

SEQ ID NO: 2563374 - RNA, 19 nt, Homo sapiens
  misc_RNA (1)...(19): siRNA sense strand
gaguacagcuugauggaga

SEQ ID NO: 2563375 - RNA, 19 nt, Homo sapiens
  misc_RNA (1)...(19): siRNA sense strand
ugaccaaagugcacggcaa

SEQ ID NO: 2563376 - RNA, 19 nt, Homo sapiens
  misc_RNA (1)...(19): siRNA sense strand
augaauggauccagggagu

SEQ ID NO: 2563377 - RNA, 19 nt, Homo sapiens
  misc_RNA (1)...(19): siRNA sense strand
ccaacaugaauuacgacaa

SEQ ID NO: 2563378 - RNA, 19 nt, Homo sapiens
  misc_RNA (1)...(19): siRNA sense strand
ccaugaacuacaacagcua

SEQ ID NO: 2563379 - RNA, 19 nt, Homo sapiens
  misc_RNA (1)...(19): siRNA sense strand
cucaguuaccucagggaaa

SEQ ID NO: 2563380 - RNA, 19 nt, Homo sapiens
  misc_RNA (1)...(19): siRNA sense strand
aaaugaacaaggaggacuu

SEQ ID NO: 2563381 - RNA, 19 nt, Homo sapiens
  misc_RNA (1)...(19): siRNA sense strand
ggcaaggaacuguguaaaa

SEQ ID NO: 2563382 - RNA, 19 nt, Homo sapiens
  misc_RNA (1)...(19): siRNA sense strand
acaaacgaucaguaagaau

SEQ ID NO: 2563383 - RNA, 19 nt, Homo sapiens
  misc_RNA (1)...(19): siRNA sense strand
auggcaaggaacuguguaa

SEQ ID NO: 2563384 - RNA, 19 nt, Homo sapiens
  misc_RNA (1)...(19): siRNA sense strand
guaaaaugaacaaggagga

SEQ ID NO: 2563385 - RNA, 19 nt, Homo sapiens
  misc_RNA (1)...(19): siRNA sense strand
ggaccaacggggaguucaa

SEQ ID NO: 2563386 - RNA, 19 nt, Homo sapiens
  misc_RNA (1)...(19): siRNA sense strand
cggaaaagcaagcccaaca

SEQ ID NO: 2563387 - RNA, 19 nt, Homo sapiens
  misc_RNA (1)...(19): siRNA sense strand
gggaagaagaggaggagga

SEQ ID NO: 2563388 - RNA, 19 nt, Homo sapiens
  misc_RNA (1)...(19): siRNA sense strand
aggaagagagagaggaaga

SEQ ID NO: 2563389 - RNA, 19 nt, Homo sapiens
  misc_RNA (1)...(19): siRNA sense strand
gaguugaagaagaggaaga

SEQ ID NO: 2563390 - RNA, 19 nt, Homo sapiens
  misc_RNA (1)...(19): siRNA sense strand
aggaggaggaagagagaga

SEQ ID NO: 2563391 - RNA, 19 nt, Homo sapiens
  misc_RNA (1)...(19): siRNA sense strand
aagaagaggaggaggagga

SEQ ID NO: 2563392 - RNA, 19 nt, Homo sapiens
  misc_RNA (1)...(19): siRNA sense strand
gcaaaagagaggaggagga

SEQ ID NO: 2563393 - RNA, 19 nt, Homo sapiens
  misc_RNA (1)...(19): siRNA sense strand
aggaagagggaguugaaga

SEQ ID NO: 2563394 - RNA, 19 nt, Homo sapiens
  misc_RNA (1)...(19): siRNA sense strand
aaagagaggaggaggagga

SEQ ID NO: 2563395 - RNA, 19 nt, Homo sapiens
  misc_RNA (1)...(19): siRNA sense strand
aggaggaggaagagggagu

SEQ ID NO: 2563396 - RNA, 19 nt, Homo sapiens
  misc_RNA (1)...(19): siRNA sense strand
aggaagaccugaugccuga

SEQ ID NO: 2563397 - RNA, 19 nt, Homo sapiens
  misc_RNA (1)...(19): siRNA sense strand
acgucagcauccaggcaaa

SEQ ID NO: 2563398 - RNA, 19 nt, Homo sapiens
  misc_RNA (1)...(19): siRNA sense strand
uggcagaucccaaggcuca

SEQ ID NO: 2563399 - RNA, 19 nt, Homo sapiens
  misc_RNA (1)...(19): siRNA sense strand
gcugggaagaagaggagga

SEQ ID NO: 2563400 - RNA, 19 nt, Homo sapiens
  misc_RNA (1)...(19): siRNA sense strand
gccagggagcugaggaaaa

SEQ ID NO: 2563401 - RNA, 19 nt, Homo sapiens
  misc_RNA (1)...(19): siRNA sense strand
uugaagaagaggaagagga

SEQ ID NO: 2563402 - RNA, 19 nt, Homo sapiens
  misc_RNA (1)...(19): siRNA sense strand
uggcaauaauagaaggaaa

SEQ ID NO: 2563403 - RNA, 19 nt, Homo sapiens
  misc_RNA (1)...(19): siRNA sense strand
ggaaagaauaagauggcua

SEQ ID NO: 2563404 - RNA, 19 nt, Homo sapiens
  misc_RNA (1)...(19): siRNA sense strand
guacaaagaaauagggcuu

SEQ ID NO: 2563405 - RNA, 19 nt, Homo sapiens
  misc_RNA (1)...(19): siRNA sense strand
ggaguauugcugugggaaa

SEQ ID NO: 2563406 - RNA, 19 nt, Homo sapiens
  misc_RNA (1)...(19): siRNA sense strand
uugcagaacuuguggaaaa

SEQ ID NO: 2563407 - RNA, 19 nt, Homo sapiens
  misc_RNA (1)...(19): siRNA sense strand
gugaguaaggaaagcgaaa

SEQ ID NO: 2563408 - RNA, 19 nt, Homo sapiens
  misc_RNA (1)...(19): siRNA sense strand
cuaugaaagugaaggcauu

SEQ ID NO: 2563409 - RNA, 19 nt, Homo sapiens
  misc_RNA (1)...(19): siRNA sense strand
agcgaaaggcugagcauaa

SEQ ID NO: 2563410 - RNA, 19 nt, Homo sapiens
  misc_RNA (1)...(19): siRNA sense strand
ugaagaggaugcagggaau

SEQ ID NO: 2563411 - RNA, 19 nt, Homo sapiens
  misc_RNA (1)...(19): siRNA sense strand
agaacaacguggugaagau

SEQ ID NO: 2563412 - RNA, 19 nt, Homo sapiens
  misc_RNA (1)...(19): siRNA sense strand
ugccugaaauggugaguaa

SEQ ID NO: 2563413 - RNA, 19 nt, Homo sapiens
  misc_RNA (1)...(19): siRNA sense strand
cuuuauacuugucguguaa

SEQ ID NO: 2563414 - RNA, 19 nt, Homo sapiens
  misc_RNA (1)...(19): siRNA sense strand
gguaaagacuacaucccaa

SEQ ID NO: 2563415 - RNA, 19 nt, Homo sapiens
  misc_RNA (1)...(19): siRNA sense strand
caaauuacuuagaggccau

SEQ ID NO: 2563416 - RNA, 19 nt, Homo sapiens
  misc_RNA (1)...(19): siRNA sense strand
agggaaggcaugaggauga

SEQ ID NO: 2563417 - RNA, 19 nt, Homo sapiens
  misc_RNA (1)...(19): siRNA sense strand
ccacugggcagcagacaaa

SEQ ID NO: 2563418 - RNA, 19 nt, Homo sapiens
  misc_RNA (1)...(19): siRNA sense strand
gaguauugcugugggaaau

SEQ ID NO: 2563419 - RNA, 19 nt, Homo sapiens
  misc_RNA (1)...(19): siRNA sense strand
gguucaagcaucagcauuu

SEQ ID NO: 2563420 - RNA, 19 nt, Homo sapiens
  misc_RNA (1)...(19): siRNA sense strand
gcaccuugguuguggcuga

SEQ ID NO: 2563421 - RNA, 19 nt, Homo sapiens
  misc_RNA (1)...(19): siRNA sense strand
cagaagaggaugaaggugu

SEQ ID NO: 2563422 - RNA, 19 nt, Homo sapiens
  misc_RNA (1)...(19): siRNA sense strand
ucguagagauguacaguga

SEQ ID NO: 2563423 - RNA, 19 nt, Homo sapiens
  misc_RNA (1)...(19): siRNA sense strand
cugaagaggaugcagggaa

SEQ ID NO: 2563424 - RNA, 19 nt, Homo sapiens
  misc_RNA (1)...(19): siRNA sense strand
cuacaguauuagcaagcaa

SEQ ID NO: 2563425 - RNA, 19 nt, Homo sapiens
  misc_RNA (1)...(19): siRNA sense strand
acauggagccuaagaaaga

SEQ ID NO: 2563426 - RNA, 19 nt, Homo sapiens
  misc_RNA (1)...(19): siRNA sense strand
acacauggagccuaagaaa

SEQ ID NO: 2563427 - RNA, 19 nt, Homo sapiens
  misc_RNA (1)...(19): siRNA sense strand
aagaagaaggaaacagaau

SEQ ID NO: 2563428 - RNA, 19 nt, Homo sapiens
  misc_RNA (1)...(19): siRNA sense strand
aaugcaacguacaaagaaa

SEQ ID NO: 2563429 - RNA, 19 nt, Homo sapiens
  misc_RNA (1)...(19): siRNA sense strand
ggaagaaauggcaaacaau

SEQ ID NO: 2563430 - RNA, 19 nt, Homo sapiens
  misc_RNA (1)...(19): siRNA sense strand
gggaccuggcagcgagaaa

SEQ ID NO: 2563431 - RNA, 19 nt, Homo sapiens
  misc_RNA (1)...(19): siRNA sense strand
ccuccauguuugaugacua

SEQ ID NO: 2563432 - RNA, 19 nt, Homo sapiens
  misc_RNA (1)...(19): siRNA sense strand
cuguggaagaaauggcaaa

SEQ ID NO: 2563433 - RNA, 19 nt, Homo sapiens
  misc_RNA (1)...(19): siRNA sense strand
acaacaagagccuggaauu

SEQ ID NO: 2563434 - RNA, 19 nt, Homo sapiens
  misc_RNA (1)...(19): siRNA sense strand
aggcaagaaaccaagacua

SEQ ID NO: 2563435 - RNA, 19 nt, Homo sapiens
  misc_RNA (1)...(19): siRNA sense strand
ucugagugauguugaggaa

SEQ ID NO: 2563436 - RNA, 19 nt, Homo sapiens
  misc_RNA (1)...(19): siRNA sense strand
ggugaagauuugugauuuu

SEQ ID NO: 2563437 - RNA, 19 nt, Homo sapiens
  misc_RNA (1)...(19): siRNA sense strand
ugaaauggugaguaaggaa

SEQ ID NO: 2563438 - RNA, 19 nt, Homo sapiens
  misc_RNA (1)...(19): siRNA sense strand
guucaaaugaccuggaguu

SEQ ID NO: 2563439 - RNA, 19 nt, Homo sapiens
  misc_RNA (1)...(19): siRNA sense strand
auguacaacaggaugguaa

SEQ ID NO: 2563440 - RNA, 19 nt, Homo sapiens
  misc_RNA (1)...(19): siRNA sense strand
ucaugagccuggaaagaau

SEQ ID NO: 2563441 - RNA, 19 nt, Homo sapiens
  misc_RNA (1)...(19): siRNA sense strand
ggaguuacccugaugaaaa

SEQ ID NO: 2563442 - RNA, 19 nt, Homo sapiens
  misc_RNA (1)...(19): siRNA sense strand
ggacuguggcugugaaaau

SEQ ID NO: 2563443 - RNA, 19 nt, Homo sapiens
  misc_RNA (1)...(19): siRNA sense strand
aauaagagagcuuccguaa

SEQ ID NO: 2563444 - RNA, 19 nt, Homo sapiens
  misc_RNA (1)...(19): siRNA sense strand
cugacagcaacaugggaaa

SEQ ID NO: 2563445 - RNA, 19 nt, Homo sapiens
  misc_RNA (1)...(19): siRNA sense strand
gcaacaugggaaacagaau

SEQ ID NO: 2563446 - RNA, 19 nt, Homo sapiens
  misc_RNA (1)...(19): siRNA sense strand
cugagaacaacguggugaa

SEQ ID NO: 2563447 - RNA, 19 nt, Homo sapiens
  misc_RNA (1)...(19): siRNA sense strand
ggaagaaacauaagcuuuu

SEQ ID NO: 2563448 - RNA, 19 nt, Homo sapiens
  misc_RNA (1)...(19): siRNA sense strand
cuucugaaauaaagacuga

SEQ ID NO: 2563449 - RNA, 19 nt, Homo sapiens
  misc_RNA (1)...(19): siRNA sense strand
uauaauggacccagaugaa

SEQ ID NO: 2563450 - RNA, 19 nt, Homo sapiens
  misc_RNA (1)...(19): siRNA sense strand
cuuugaucccugauggaaa

SEQ ID NO: 2563451 - RNA, 19 nt, Homo sapiens
  misc_RNA (1)...(19): siRNA sense strand
gaagaggggcuuuuggaaa

SEQ ID NO: 2563452 - RNA, 19 nt, Homo sapiens
  misc_RNA (1)...(19): siRNA sense strand
cggcuuucaggaagauaaa

SEQ ID NO: 2563453 - RNA, 19 nt, Homo sapiens
  misc_RNA (1)...(19): siRNA sense strand
gaguacaaauggaugagga

SEQ ID NO: 2563454 - RNA, 19 nt, Homo sapiens
  misc_RNA (1)...(19): siRNA sense strand
uguaaggaguggaccauca

SEQ ID NO: 2563455 - RNA, 19 nt, Homo sapiens
  misc_RNA (1)...(19): siRNA sense strand
cggaaguuguaugguuaaa

SEQ ID NO: 2563456 - RNA, 19 nt, Homo sapiens
  misc_RNA (1)...(19): siRNA sense strand
ggcaauaauagaaggaaag

SEQ ID NO: 2563457 - RNA, 19 nt, Homo sapiens
  misc_RNA (1)...(19): siRNA sense strand
ggaagaagaugaagccaga

SEQ ID NO: 2563458 - RNA, 19 nt, Homo sapiens
  misc_RNA (1)...(19): siRNA sense strand
cugugagcuuggagggaaa

SEQ ID NO: 2563459 - RNA, 19 nt, Homo sapiens
  misc_RNA (1)...(19): siRNA sense strand
gcucagaauuggauccgaa

SEQ ID NO: 2563460 - RNA, 19 nt, Homo sapiens
  misc_RNA (1)...(19): siRNA sense strand
cagccauguaugagaagua

SEQ ID NO: 2563461 - RNA, 19 nt, Homo sapiens
  misc_RNA (1)...(19): siRNA sense strand
ggugaaaaccuaugggcau

SEQ ID NO: 2563462 - RNA, 19 nt, Homo sapiens
  misc_RNA (1)...(19): siRNA sense strand
cuugagaagaagaagaaaa

SEQ ID NO: 2563463 - RNA, 19 nt, Homo sapiens
  misc_RNA (1)...(19): siRNA sense strand
acgaacacuuccaggccaa

SEQ ID NO: 2563464 - RNA, 19 nt, Homo sapiens
  misc_RNA (1)...(19): siRNA sense strand
ggaaagaacuaccuccuga

SEQ ID NO: 2563465 - RNA, 19 nt, Homo sapiens
  misc_RNA (1)...(19): siRNA sense strand
agaugaagccagagguucu

SEQ ID NO: 2563466 - RNA, 19 nt, Homo sapiens
  misc_RNA (1)...(19): siRNA sense strand
cugagacggugaagggcau

SEQ ID NO: 2563467 - RNA, 19 nt, Homo sapiens
  misc_RNA (1)...(19): siRNA sense strand
acagcaaagauguggaguu

SEQ ID NO: 2563468 - RNA, 19 nt, Homo sapiens
  misc_RNA (1)...(19): siRNA sense strand
cugcaucagcucuggaaga

SEQ ID NO: 2563469 - RNA, 19 nt, Homo sapiens
  misc_RNA (1)...(19): siRNA sense strand
cggcauccgaacaagcaaa

SEQ ID NO: 2563470 - RNA, 19 nt, Homo sapiens
  misc_RNA (1)...(19): siRNA sense strand
gggcccaggaaguggcuuu

SEQ ID NO: 2563471 - RNA, 19 nt, Homo sapiens
  misc_RNA (1)...(19): siRNA sense strand
agggcaugcugcagaacuu

SEQ ID NO: 2563472 - RNA, 19 nt, Homo sapiens
  misc_RNA (1)...(19): siRNA sense strand
caagcaaacuggugccugu

SEQ ID NO: 2563473 - RNA, 19 nt, Homo sapiens
  misc_RNA (1)...(19): siRNA sense strand
gggaagaagaugaagccag

SEQ ID NO: 2563474 - RNA, 19 nt, Homo sapiens
  misc_RNA (1)...(19): siRNA sense strand
gcagaggagcugaugagca

SEQ ID NO: 2563475 - RNA, 19 nt, Homo sapiens
  misc_RNA (1)...(19): siRNA sense strand
cagaauuggauccgaacca

SEQ ID NO: 2563476 - RNA, 19 nt, Homo sapiens
  misc_RNA (1)...(19): siRNA sense strand
gggauuuggcugggacgaa

SEQ ID NO: 2563477 - RNA, 19 nt, Homo sapiens
  misc_RNA (1)...(19): siRNA sense strand
aggcaaaguaauaggaaaa

SEQ ID NO: 2563478 - RNA, 19 nt, Homo sapiens
  misc_RNA (1)...(19): siRNA sense strand
caacagaggaagagaggga

SEQ ID NO: 2563479 - RNA, 19 nt, Homo sapiens
  misc_RNA (1)...(19): siRNA sense strand
aggaagagagggagagcuu

SEQ ID NO: 2563480 - RNA, 19 nt, Homo sapiens
  misc_RNA (1)...(19): siRNA sense strand
aggaaugggucgagguagu

SEQ ID NO: 2563481 - RNA, 19 nt, Homo sapiens
  misc_RNA (1)...(19): siRNA sense strand
gagaagaucugaugggucu

SEQ ID NO: 2563482 - RNA, 19 nt, Homo sapiens
  misc_RNA (1)...(19): siRNA sense strand
gggugaggauugaggcuga

SEQ ID NO: 2563483 - RNA, 19 nt, Homo sapiens
  misc_RNA (1)...(19): siRNA sense strand
cuaaagugaggaugauaaa

SEQ ID NO: 2563484 - RNA, 19 nt, Homo sapiens
  misc_RNA (1)...(19): siRNA sense strand
aggaagaggacguggagga

SEQ ID NO: 2563485 - RNA, 19 nt, Homo sapiens
  misc_RNA (1)...(19): siRNA sense strand
caaggaacuuaguaggcaa

SEQ ID NO: 2563486 - RNA, 19 nt, Homo sapiens
  misc_RNA (1)...(19): siRNA sense strand
uaggcaaaguaauaggaaa

SEQ ID NO: 2563487 - RNA, 19 nt, Homo sapiens
  misc_RNA (1)...(19): siRNA sense strand
aggaagaggacaaggagga

SEQ ID NO: 2563488 - RNA, 19 nt, Homo sapiens
  misc_RNA (1)...(19): siRNA sense strand
gagguguauuccagagcaa

SEQ ID NO: 2563489 - RNA, 19 nt, Homo sapiens
  misc_RNA (1)...(19): siRNA sense strand
ggcuaaaggaagaacaaca

SEQ ID NO: 2563490 - RNA, 19 nt, Homo sapiens
  misc_RNA (1)...(19): siRNA sense strand
aguagaccuuacagaaaua

SEQ ID NO: 2563491 - RNA, 19 nt, Homo sapiens
  misc_RNA (1)...(19): siRNA sense strand
ccaagagaggcuaaaggaa

SEQ ID NO: 2563492 - RNA, 19 nt, Homo sapiens
  misc_RNA (1)...(19): siRNA sense strand
gggucuagcuauugguacu

SEQ ID NO: 2563493 - RNA, 19 nt, Homo sapiens
  misc_RNA (1)...(19): siRNA sense strand
guacaaaaguccagagggu

SEQ ID NO: 2563494 - RNA, 19 nt, Homo sapiens
  misc_RNA (1)...(19): siRNA sense strand
agauaaucguccacguaau

SEQ ID NO: 2563495 - RNA, 19 nt, Homo sapiens
  misc_RNA (1)...(19): siRNA sense strand
agaagaaagagaagccaga

SEQ ID NO: 2563496 - RNA, 19 nt, Homo sapiens
  misc_RNA (1)...(19): siRNA sense strand
ggaaauuaugccaccaaau

SEQ ID NO: 2563497 - RNA, 19 nt, Homo sapiens
  misc_RNA (1)...(19): siRNA sense strand
gaggcuaaaggaagaacaa

SEQ ID NO: 2563498 - RNA, 19 nt, Homo sapiens
  misc_RNA (1)...(19): siRNA sense strand
agaucagaguugacugcaa

SEQ ID NO: 2563499 - RNA, 19 nt, Homo sapiens
  misc_RNA (1)...(19): siRNA sense strand
cacaagaagaggaaauuau

SEQ ID NO: 2563500 - RNA, 19 nt, Homo sapiens
  misc_RNA (1)...(19): siRNA sense strand
aggaagaacaacagaugga

SEQ ID NO: 2563501 - RNA, 19 nt, Homo sapiens
  misc_RNA (1)...(19): siRNA sense strand
gguaaagaucguaaccaga

SEQ ID NO: 2563502 - RNA, 19 nt, Homo sapiens
  misc_RNA (1)...(19): siRNA sense strand
gcuaguaagcagcuggaga

SEQ ID NO: 2563503 - RNA, 19 nt, Homo sapiens
  misc_RNA (1)...(19): siRNA sense strand
ugaggaugauaaaggguga

SEQ ID NO: 2563504 - RNA, 19 nt, Homo sapiens
  misc_RNA (1)...(19): siRNA sense strand
cugcaauaaugaaaggagu

SEQ ID NO: 2563505 - RNA, 19 nt, Homo sapiens
  misc_RNA (1)...(19): siRNA sense strand
acagaggaagagagggaga

SEQ ID NO: 2563506 - RNA, 19 nt, Homo sapiens
  misc_RNA (1)...(19): siRNA sense strand
aagaggacaaggaggaaga

SEQ ID NO: 2563507 - RNA, 19 nt, Homo sapiens
  misc_RNA (1)...(19): siRNA sense strand
gguguauuccagagcaaau

SEQ ID NO: 2563508 - RNA, 19 nt, Homo sapiens
  misc_RNA (1)...(19): siRNA sense strand
aaguagaccaguugcguuu

SEQ ID NO: 2563509 - RNA, 19 nt, Homo sapiens
  misc_RNA (1)...(19): siRNA sense strand
aucaaaugcuucugaaaca

SEQ ID NO: 2563510 - RNA, 19 nt, Homo sapiens
  misc_RNA (1)...(19): siRNA sense strand
aggcauuuguaaaggaugu

SEQ ID NO: 2563511 - RNA, 19 nt, Homo sapiens
  misc_RNA (1)...(19): siRNA sense strand
ugcuauugaucuagaugaa

SEQ ID NO: 2563512 - RNA, 19 nt, Homo sapiens
  misc_RNA (1)...(19): siRNA sense strand
uggauauacuucaggaacu

SEQ ID NO: 2563513 - RNA, 19 nt, Homo sapiens
  misc_RNA (1)...(19): siRNA sense strand
ggguaaagaucguaaccag

SEQ ID NO: 2563514 - RNA, 19 nt, Homo sapiens
  misc_RNA (1)...(19): siRNA sense strand
cgugaauggaguacccuaa

SEQ ID NO: 2563515 - RNA, 19 nt, Homo sapiens
  misc_RNA (1)...(19): siRNA sense strand
aaucguacagauaaggaaa

SEQ ID NO: 2563516 - RNA, 19 nt, Homo sapiens
  misc_RNA (1)...(19): siRNA sense strand
agucaggaguugugagggu

SEQ ID NO: 2563517 - RNA, 19 nt, Homo sapiens
  misc_RNA (1)...(19): siRNA sense strand
ggaagaggacaaggaggaa

SEQ ID NO: 2563518 - RNA, 19 nt, Homo sapiens
  misc_RNA (1)...(19): siRNA sense strand
gauuacaaauugaugagca

SEQ ID NO: 2563519 - RNA, 19 nt, Homo sapiens
  misc_RNA (1)...(19): siRNA sense strand
cagacagcguggaugguca

SEQ ID NO: 2563520 - RNA, 19 nt, Homo sapiens
  misc_RNA (1)...(19): siRNA sense strand
gcgacagauuggagcuagu

SEQ ID NO: 2563521 - RNA, 19 nt, Homo sapiens
  misc_RNA (1)...(19): siRNA sense strand
gagaaaugaagaagcuagu

SEQ ID NO: 2563522 - RNA, 19 nt, Homo sapiens
  misc_RNA (1)...(19): siRNA sense strand
gggugaguuuuaugugaua

SEQ ID NO: 2563523 - RNA, 19 nt, Homo sapiens
  misc_RNA (1)...(19): siRNA sense strand
ggaacuaauucugaagcau

SEQ ID NO: 2563524 - RNA, 19 nt, Homo sapiens
  misc_RNA (1)...(19): siRNA sense strand
aggacaaggaggaagagga

SEQ ID NO: 2563525 - RNA, 19 nt, Homo sapiens
  misc_RNA (1)...(19): siRNA sense strand
ccucgagauuucaugaaca

SEQ ID NO: 2563526 - RNA, 19 nt, Homo sapiens
  misc_RNA (1)...(19): siRNA sense strand
ggacaaggaggaagaggac

SEQ ID NO: 2563527 - RNA, 19 nt, Homo sapiens
  misc_RNA (1)...(19): siRNA sense strand
ucaaaggaaacgacgauca

SEQ ID NO: 2563528 - RNA, 19 nt, Homo sapiens
  misc_RNA (1)...(19): siRNA sense strand
aagaaagagaagccagaca

SEQ ID NO: 2563529 - RNA, 19 nt, Homo sapiens
  misc_RNA (1)...(19): siRNA sense strand
ugucacaauugaacgucua

SEQ ID NO: 2563530 - RNA, 19 nt, Homo sapiens
  misc_RNA (1)...(19): siRNA sense strand
cuaaguugucucugauaau

SEQ ID NO: 2563531 - RNA, 19 nt, Homo sapiens
  misc_RNA (1)...(19): siRNA sense strand
auuuaaaggaaguagacca

SEQ ID NO: 2563532 - RNA, 19 nt, Homo sapiens
  misc_RNA (1)...(19): siRNA sense strand
cuucaaaggaaacgacgau

SEQ ID NO: 2563533 - RNA, 19 nt, Homo sapiens
  misc_RNA (1)...(19): siRNA sense strand
caagagaggcuaaaggaag

SEQ ID NO: 2563534 - RNA, 19 nt, Homo sapiens
  misc_RNA (1)...(19): siRNA sense strand
cugcaaaggaagacaguaa

SEQ ID NO: 2563535 - RNA, 19 nt, Homo sapiens
  misc_RNA (1)...(19): siRNA sense strand
ucaaaggacaauugggaaa

SEQ ID NO: 2563536 - RNA, 19 nt, Homo sapiens
  misc_RNA (1)...(19): siRNA sense strand
agaugaaagugaagacgaa

SEQ ID NO: 2563537 - RNA, 19 nt, Homo sapiens
  misc_RNA (1)...(19): siRNA sense strand
gugccaaagucucgggaau

SEQ ID NO: 2563538 - RNA, 19 nt, Homo sapiens
  misc_RNA (1)...(19): siRNA sense strand
uggagaaguugaagaguca

SEQ ID NO: 2563539 - RNA, 19 nt, Homo sapiens
  misc_RNA (1)...(19): siRNA sense strand
ccuccaaacaagugaagua

SEQ ID NO: 2563540 - RNA, 19 nt, Homo sapiens
  misc_RNA (1)...(19): siRNA sense strand
cagaaaugucaguggcaau

SEQ ID NO: 2563541 - RNA, 19 nt, Homo sapiens
  misc_RNA (1)...(19): siRNA sense strand
gcuaagaagcugaagcaca

SEQ ID NO: 2563542 - RNA, 19 nt, Homo sapiens
  misc_RNA (1)...(19): siRNA sense strand
ccucccaacacuagagaaa

SEQ ID NO: 2563543 - RNA, 19 nt, Homo sapiens
  misc_RNA (1)...(19): siRNA sense strand
agaaucaccuagugggaau

SEQ ID NO: 2563544 - RNA, 19 nt, Homo sapiens
  misc_RNA (1)...(19): siRNA sense strand
aggaaagaaccaagaccua

SEQ ID NO: 2563545 - RNA, 19 nt, Homo sapiens
  misc_RNA (1)...(19): siRNA sense strand
aggaagagacccugcaaau

SEQ ID NO: 2563546 - RNA, 19 nt, Homo sapiens
  misc_RNA (1)...(19): siRNA sense strand
agaagaucccugagaagaa

SEQ ID NO: 2563547 - RNA, 19 nt, Homo sapiens
  misc_RNA (1)...(19): siRNA sense strand
ggcuaugaacacugggaua

SEQ ID NO: 2563548 - RNA, 19 nt, Homo sapiens
  misc_RNA (1)...(19): siRNA sense strand
cgacaaacugacaagagaa

SEQ ID NO: 2563549 - RNA, 19 nt, Homo sapiens
  misc_RNA (1)...(19): siRNA sense strand
cugccaaauccaaggaaau

SEQ ID NO: 2563550 - RNA, 19 nt, Homo sapiens
  misc_RNA (1)...(19): siRNA sense strand
gucaacaacuagugagaca

SEQ ID NO: 2563551 - RNA, 19 nt, Homo sapiens
  misc_RNA (1)...(19): siRNA sense strand
ccacaaaacccaagcguca

SEQ ID NO: 2563552 - RNA, 19 nt, Homo sapiens
  misc_RNA (1)...(19): siRNA sense strand
acaaguggcaacuggauaa

SEQ ID NO: 2563553 - RNA, 19 nt, Homo sapiens
  misc_RNA (1)...(19): siRNA sense strand
gcacaaagcugaugcacug

SEQ ID NO: 2563554 - RNA, 19 nt, Homo sapiens
  misc_RNA (1)...(19): siRNA sense strand
gacaaacugacaagagaaa

SEQ ID NO: 2563555 - RNA, 19 nt, Homo sapiens
  misc_RNA (1)...(19): siRNA sense strand
uuggcaaagcugugaauua

SEQ ID NO: 2563556 - RNA, 19 nt, Homo sapiens
  misc_RNA (1)...(19): siRNA sense strand
gcaaauagaagaaaggaag

SEQ ID NO: 2563557 - RNA, 19 nt, Homo sapiens
  misc_RNA (1)...(19): siRNA sense strand
cuaagagaacugaaggcaa

SEQ ID NO: 2563558 - RNA, 19 nt, Homo sapiens
  misc_RNA (1)...(19): siRNA sense strand
caucaguaaugaagagcca

SEQ ID NO: 2563559 - RNA, 19 nt, Homo sapiens
  misc_RNA (1)...(19): siRNA sense strand
aagccaaacuggaagacuu

SEQ ID NO: 2563560 - RNA, 19 nt, Homo sapiens
  misc_RNA (1)...(19): siRNA sense strand
ucagaaaauuccagaaaca

SEQ ID NO: 2563561 - RNA, 19 nt, Homo sapiens
  misc_RNA (1)...(19): siRNA sense strand
augcacuguucgagaaauu

SEQ ID NO: 2563562 - RNA, 19 nt, Homo sapiens
  misc_RNA (1)...(19): siRNA sense strand
ugagaauguuuaagcugaa

SEQ ID NO: 2563563 - RNA, 19 nt, Homo sapiens
  misc_RNA (1)...(19): siRNA sense strand
auacaagguagcugaauau

SEQ ID NO: 2563564 - RNA, 19 nt, Homo sapiens
  misc_RNA (1)...(19): siRNA sense strand
ugagaacagcuuugggaau

SEQ ID NO: 2563565 - RNA, 19 nt, Homo sapiens
  misc_RNA (1)...(19): siRNA sense strand
aagaaaguguggagcuuca

SEQ ID NO: 2563566 - RNA, 19 nt, Homo sapiens
  misc_RNA (1)...(19): siRNA sense strand
caaauagaagaaaggaaga

SEQ ID NO: 2563567 - RNA, 19 nt, Homo sapiens
  misc_RNA (1)...(19): siRNA sense strand
gguaaaugagggagacacu

SEQ ID NO: 2563568 - RNA, 19 nt, Homo sapiens
  misc_RNA (1)...(19): siRNA sense strand
agucaaacccaucugcaaa

SEQ ID NO: 2563569 - RNA, 19 nt, Homo sapiens
  misc_RNA (1)...(19): siRNA sense strand
agcaaauagaagaaaggaa

SEQ ID NO: 2563570 - RNA, 19 nt, Homo sapiens
  misc_RNA (1)...(19): siRNA sense strand
gggaaugggagcggaggaa

SEQ ID NO: 2563571 - RNA, 19 nt, Homo sapiens
  misc_RNA (1)...(19): siRNA sense strand
gcuuggaaacuaugaugaa

SEQ ID NO: 2563572 - RNA, 19 nt, Homo sapiens
  misc_RNA (1)...(19): siRNA sense strand
aggcaaaaccuaggaauaa

SEQ ID NO: 2563573 - RNA, 19 nt, Homo sapiens
  misc_RNA (1)...(19): siRNA sense strand
cagcgaaucuaaugaggca

SEQ ID NO: 2563574 - RNA, 19 nt, Homo sapiens
  misc_RNA (1)...(19): siRNA sense strand
gcagaaaugucaguggcaa

SEQ ID NO: 2563575 - RNA, 19 nt, Homo sapiens
  misc_RNA (1)...(19): siRNA sense strand
cuaccaaaccuaagagaac

SEQ ID NO: 2563576 - RNA, 19 nt, Homo sapiens
  misc_RNA (1)...(19): siRNA sense strand
aucaagaaguccagcaaga

SEQ ID NO: 2563577 - RNA, 19 nt, Homo sapiens
  misc_RNA (1)...(19): siRNA sense strand
aauagaaguugcagagaag

SEQ ID NO: 2563578 - RNA, 19 nt, Homo sapiens
  misc_RNA (1)...(19): siRNA sense strand
ugaccaaucuuguccgcua

SEQ ID NO: 2563579 - RNA, 19 nt, Homo sapiens
  misc_RNA (1)...(19): siRNA sense strand
cugccaagccagaccacaa

SEQ ID NO: 2563580 - RNA, 19 nt, Homo sapiens
  misc_RNA (1)...(19): siRNA sense strand
caggagagcaaauagaaga

SEQ ID NO: 2563581 - RNA, 19 nt, Homo sapiens
  misc_RNA (1)...(19): siRNA sense strand
caucacuagcaauguguua

SEQ ID NO: 2563582 - RNA, 19 nt, Homo sapiens
  misc_RNA (1)...(19): siRNA sense strand
ccagcugaacccaaagaaa

SEQ ID NO: 2563583 - RNA, 19 nt, Homo sapiens
  misc_RNA (1)...(19): siRNA sense strand
gaaucaagaaguccagcaa

SEQ ID NO: 2563584 - RNA, 19 nt, Homo sapiens
  misc_RNA (1)...(19): siRNA sense strand
aggagagcaaauagaagaa

SEQ ID NO: 2563585 - RNA, 19 nt, Homo sapiens
  misc_RNA (1)...(19): siRNA sense strand
ccagauuggagaaguugaa

SEQ ID NO: 2563586 - RNA, 19 nt, Homo sapiens
  misc_RNA (1)...(19): siRNA sense strand
gaagcugagcagugaugaa

SEQ ID NO: 2563587 - RNA, 19 nt, Homo sapiens
  misc_RNA (1)...(19): siRNA sense strand
cgugauagucauaacccua

SEQ ID NO: 2563588 - RNA, 19 nt, Homo sapiens
  misc_RNA (1)...(19): siRNA sense strand
aaggcaaaaccuaggaaua

SEQ ID NO: 2563589 - RNA, 19 nt, Homo sapiens
  misc_RNA (1)...(19): siRNA sense strand
caacuggauaaauggcuua

SEQ ID NO: 2563590 - RNA, 19 nt, Homo sapiens
  misc_RNA (1)...(19): siRNA sense strand
cuguggagcuccucaggua

SEQ ID NO: 2563591 - RNA, 19 nt, Homo sapiens
  misc_RNA (1)...(19): siRNA sense strand
gggauauggccgacaaacu

SEQ ID NO: 2563592 - RNA, 19 nt, Homo sapiens
  misc_RNA (1)...(19): siRNA sense strand
gagucaaacccaucugcaa

SEQ ID NO: 2563593 - RNA, 19 nt, Homo sapiens
  misc_RNA (1)...(19): siRNA sense strand
gggcuuuacugcaaaacaa

SEQ ID NO: 2563594 - RNA, 19 nt, Homo sapiens
  misc_RNA (1)...(19): siRNA sense strand
ccaaauauuaccagcagca

SEQ ID NO: 2563595 - RNA, 19 nt, Homo sapiens
  misc_RNA (1)...(19): siRNA sense strand
accaagaggccgcaacaaa

SEQ ID NO: 2563596 - RNA, 19 nt, Homo sapiens
  misc_RNA (1)...(19): siRNA sense strand
ccaacacagaucaggaaga

SEQ ID NO: 2563597 - RNA, 19 nt, Homo sapiens
  misc_RNA (1)...(19): siRNA sense strand
cagccaaacaagaugcaga

SEQ ID NO: 2563598 - RNA, 19 nt, Homo sapiens
  misc_RNA (1)...(19): siRNA sense strand
gaacaagaccguagugcac

SEQ ID NO: 2563599 - RNA, 19 nt, Homo sapiens
  misc_RNA (1)...(19): siRNA sense strand
gcaacuggauaaauggcuu

SEQ ID NO: 2563600 - RNA, 19 nt, Homo sapiens
  misc_RNA (1)...(19): siRNA sense strand
aauucauccaggagagcaa

SEQ ID NO: 2563601 - RNA, 19 nt, Homo sapiens
  misc_RNA (1)...(19): siRNA sense strand
gaggaugaccugaagcuga

SEQ ID NO: 2563602 - RNA, 19 nt, Homo sapiens
  misc_RNA (1)...(19): siRNA sense strand
acuacuggccucauggaua

SEQ ID NO: 2563603 - RNA, 19 nt, Homo sapiens
  misc_RNA (1)...(19): siRNA sense strand
augcaggaagcgaugguua

SEQ ID NO: 2563604 - RNA, 19 nt, Homo sapiens
  misc_RNA (1)...(19): siRNA sense strand
ugcaggaagcgaugguuaa

SEQ ID NO: 2563605 - RNA, 19 nt, Homo sapiens
  misc_RNA (1)...(19): siRNA sense strand
gugcuguauuggagagaga

SEQ ID NO: 2563606 - RNA, 19 nt, Homo sapiens
  misc_RNA (1)...(19): siRNA sense strand
aaggaauauuggagauaca

SEQ ID NO: 2563607 - RNA, 19 nt, Homo sapiens
  misc_RNA (1)...(19): siRNA sense strand
ccacauaaugaaagugcau

SEQ ID NO: 2563608 - RNA, 19 nt, Homo sapiens
  misc_RNA (1)...(19): siRNA sense strand
ggacacuauaagaaaggaa

SEQ ID NO: 2563609 - RNA, 19 nt, Homo sapiens
  misc_RNA (1)...(19): siRNA sense strand
augugaaauccuagcuaaa

SEQ ID NO: 2563610 - RNA, 19 nt, Homo sapiens
  misc_RNA (1)...(19): siRNA sense strand
ugaugaaagaagugaacga

SEQ ID NO: 2563611 - RNA, 19 nt, Homo sapiens
  misc_RNA (1)...(19): siRNA sense strand
ggaacuauuugaaagggau

SEQ ID NO: 2563612 - RNA, 19 nt, Homo sapiens
  misc_RNA (1)...(19): siRNA sense strand
ugauuaaacuaguaccaca

SEQ ID NO: 2563613 - RNA, 19 nt, Homo sapiens
  misc_RNA (1)...(19): siRNA sense strand
augaagacaugcuagaaaa

SEQ ID NO: 2563614 - RNA, 19 nt, Homo sapiens
  misc_RNA (1)...(19): siRNA sense strand
aauuauacaguguggcauu

SEQ ID NO: 2563615 - RNA, 19 nt, Homo sapiens
  misc_RNA (1)...(19): siRNA sense strand
aggaucuacaugaggaaau

SEQ ID NO: 2563616 - RNA, 19 nt, Homo sapiens
  misc_RNA (1)...(19): siRNA sense strand
guggaauggcuaagagauc

SEQ ID NO: 2563617 - RNA, 19 nt, Homo sapiens
  misc_RNA (1)...(19): siRNA sense strand
accaacaaauguacagcaa

SEQ ID NO: 2563618 - RNA, 19 nt, Homo sapiens
  misc_RNA (1)...(19): siRNA sense strand
ggacagagcagaaugggcu

SEQ ID NO: 2563619 - RNA, 19 nt, Homo sapiens
  misc_RNA (1)...(19): siRNA sense strand
gcgugaugaaagaagugaa

SEQ ID NO: 2563620 - RNA, 19 nt, Homo sapiens
  misc_RNA (1)...(19): siRNA sense strand
cuagaaaaucagugugaca

SEQ ID NO: 2563621 - RNA, 19 nt, Homo sapiens
  misc_RNA (1)...(19): siRNA sense strand
aagaaaggaauauuggaga

SEQ ID NO: 2563622 - RNA, 19 nt, Homo sapiens
  misc_RNA (1)...(19): siRNA sense strand
ugaaagaagugaacgagcu

SEQ ID NO: 2563623 - RNA, 19 nt, Homo sapiens
  misc_RNA (1)...(19): siRNA sense strand
agcaaacacagcacagaaa

SEQ ID NO: 2563624 - RNA, 19 nt, Homo sapiens
  misc_RNA (1)...(19): siRNA sense strand
gaaggaucuacaugaggaa

SEQ ID NO: 2563625 - RNA, 19 nt, Homo sapiens
  misc_RNA (1)...(19): siRNA sense strand
aguauuaguggaauggcua

SEQ ID NO: 2563626 - RNA, 19 nt, Homo sapiens
  misc_RNA (1)...(19): siRNA sense strand
gauuaaacuaguaccacau

SEQ ID NO: 2563627 - RNA, 19 nt, Homo sapiens
  misc_RNA (1)...(19): siRNA sense strand
ccugcagcgugaugaaaga

SEQ ID NO: 2563628 - RNA, 19 nt, Homo sapiens
  misc_RNA (1)...(19): siRNA sense strand
cugucuggaaccaaagaua

SEQ ID NO: 2563629 - RNA, 19 nt, Homo sapiens
  misc_RNA (1)...(19): siRNA sense strand
cagaucauuuauagugaca

SEQ ID NO: 2563630 - RNA, 19 nt, Homo sapiens
  misc_RNA (1)...(19): siRNA sense strand
aagcaaacacagcacagaa

SEQ ID NO: 2563631 - RNA, 19 nt, Homo sapiens
  misc_RNA (1)...(19): siRNA sense strand
ucugaaagaggaugugaga

SEQ ID NO: 2563632 - RNA, 19 nt, Homo sapiens
  misc_RNA (1)...(19): siRNA sense strand
gugacaauaaggaagacau

SEQ ID NO: 2563633 - RNA, 19 nt, Homo sapiens
  misc_RNA (1)...(19): siRNA sense strand
gcuugaauuuauugcugau

SEQ ID NO: 2563634 - RNA, 19 nt, Homo sapiens
  misc_RNA (1)...(19): siRNA sense strand
cuaaagaaaaggacacuau

SEQ ID NO: 2563635 - RNA, 19 nt, Homo sapiens
  misc_RNA (1)...(19): siRNA sense strand
uggcaucauaggcgaguau

SEQ ID NO: 2563636 - RNA, 19 nt, Homo sapiens
  misc_RNA (1)...(19): siRNA sense strand
ggaauuuaaacuuugggau

SEQ ID NO: 2563637 - RNA, 19 nt, Homo sapiens
  misc_RNA (1)...(19): siRNA sense strand
ccaauuauacaguguggca

SEQ ID NO: 2563638 - RNA, 19 nt, Homo sapiens
  misc_RNA (1)...(19): siRNA sense strand
aucaggaugcaaagaauua

SEQ ID NO: 2563639 - RNA, 19 nt, Homo sapiens
  misc_RNA (1)...(19): siRNA sense strand
uaaugaaagugcauggaac

SEQ ID NO: 2563640 - RNA, 19 nt, Homo sapiens
  misc_RNA (1)...(19): siRNA sense strand
uggcauuuccggagaguuc

SEQ ID NO: 2563641 - RNA, 19 nt, Homo sapiens
  misc_RNA (1)...(19): siRNA sense strand
uaauugaggagcagcccaa

SEQ ID NO: 2563642 - RNA, 19 nt, Homo sapiens
  misc_RNA (1)...(19): siRNA sense strand
gcaaagaauuaucaugccu

SEQ ID NO: 2563643 - RNA, 19 nt, Homo sapiens
  misc_RNA (1)...(19): siRNA sense strand
agcagaaugggcugauaua

SEQ ID NO: 2563644 - RNA, 19 nt, Homo sapiens
  misc_RNA (1)...(19): siRNA sense strand
uugccuuucuuguggauau

SEQ ID NO: 2563645 - RNA, 19 nt, Homo sapiens
  misc_RNA (1)...(19): siRNA sense strand
cggaauaucucuuugacaa

SEQ ID NO: 2563646 - RNA, 19 nt, Homo sapiens
  misc_RNA (1)...(19): siRNA sense strand
ccaucaaagaauuggguga

SEQ ID NO: 2563647 - RNA, 19 nt, Homo sapiens
  misc_RNA (1)...(19): siRNA sense strand
gugcauuacauuuggaaaa

SEQ ID NO: 2563648 - RNA, 19 nt, Homo sapiens
  misc_RNA (1)...(19): siRNA sense strand
caaacuggccacugacaaa

SEQ ID NO: 2563649 - RNA, 19 nt, Homo sapiens
  misc_RNA (1)...(19): siRNA sense strand
ccaucaaccgccagaucaa

SEQ ID NO: 2563650 - RNA, 19 nt, Homo sapiens
  misc_RNA (1)...(19): siRNA sense strand
ccugggagacagugauaau

SEQ ID NO: 2563651 - RNA, 19 nt, Homo sapiens
  misc_RNA (1)...(19): siRNA sense strand
aaucuggcuuggcggaaua

SEQ ID NO: 2563652 - RNA, 19 nt, Homo sapiens
  misc_RNA (1)...(19): siRNA sense strand
gugacuucauugagacaca

SEQ ID NO: 2563653 - RNA, 19 nt, Homo sapiens
  misc_RNA (1)...(19): siRNA sense strand
aggugaaagccaucaaaga

SEQ ID NO: 2563654 - RNA, 19 nt, Homo sapiens
  misc_RNA (1)...(19): siRNA sense strand
gaaccaacgagguggccga

SEQ ID NO: 2563655 - RNA, 19 nt, Homo sapiens
  misc_RNA (1)...(19): siRNA sense strand
ccaaauacuuucuucacca

SEQ ID NO: 2563656 - RNA, 19 nt, Homo sapiens
  misc_RNA (1)...(19): siRNA sense strand
augauguggcuuugaagaa

SEQ ID NO: 2563657 - RNA, 19 nt, Homo sapiens
  misc_RNA (1)...(19): siRNA sense strand
gagcuaaagacaaggagaa

SEQ ID NO: 2563658 - RNA, 19 nt, Homo sapiens
  misc_RNA (1)...(19): siRNA sense strand
ccagcuagaaucagagaaa

SEQ ID NO: 2563659 - RNA, 19 nt, Homo sapiens
  misc_RNA (1)...(19): siRNA sense strand
gguuaauggaagaaggaga

SEQ ID NO: 2563660 - RNA, 19 nt, Homo sapiens
  misc_RNA (1)...(19): siRNA sense strand
cugcagauguauggagaaa

SEQ ID NO: 2563661 - RNA, 19 nt, Homo sapiens
  misc_RNA (1)...(19): siRNA sense strand
gaagagaaggugaaggaga

SEQ ID NO: 2563662 - RNA, 19 nt, Homo sapiens
  misc_RNA (1)...(19): siRNA sense strand
agacaagagacuacagauu

SEQ ID NO: 2563663 - RNA, 19 nt, Homo sapiens
  misc_RNA (1)...(19): siRNA sense strand
cagcagaaacaaaggacau

SEQ ID NO: 2563664 - RNA, 19 nt, Homo sapiens
  misc_RNA (1)...(19): siRNA sense strand
guuaauggaagaaggagaa

SEQ ID NO: 2563665 - RNA, 19 nt, Homo sapiens
  misc_RNA (1)...(19): siRNA sense strand
aagagaaggugaaggagau

SEQ ID NO: 2563666 - RNA, 19 nt, Homo sapiens
  misc_RNA (1)...(19): siRNA sense strand
uggaugaacuugaagaaaa

SEQ ID NO: 2563667 - RNA, 19 nt, Homo sapiens
  misc_RNA (1)...(19): siRNA sense strand
aguuauacccacugaggaa

SEQ ID NO: 2563668 - RNA, 19 nt, Homo sapiens
  misc_RNA (1)...(19): siRNA sense strand
cugccagaaaggaggauua

SEQ ID NO: 2563669 - RNA, 19 nt, Homo sapiens
  misc_RNA (1)...(19): siRNA sense strand
cagacaucgucgugggaga

SEQ ID NO: 2563670 - RNA, 19 nt, Homo sapiens
  misc_RNA (1)...(19): siRNA sense strand
caagaaaggaagaaagcca

SEQ ID NO: 2563671 - RNA, 19 nt, Homo sapiens
  misc_RNA (1)...(19): siRNA sense strand
augaugaacuugaagagaa

SEQ ID NO: 2563672 - RNA, 19 nt, Homo sapiens
  misc_RNA (1)...(19): siRNA sense strand
gugaaaacaacuauggaaa

SEQ ID NO: 2563673 - RNA, 19 nt, Homo sapiens
  misc_RNA (1)...(19): siRNA sense strand
caacugaaucacaaguaaa

SEQ ID NO: 2563674 - RNA, 19 nt, Homo sapiens
  misc_RNA (1)...(19): siRNA sense strand
aggcaagggauaugcuuua

SEQ ID NO: 2563675 - RNA, 19 nt, Homo sapiens
  misc_RNA (1)...(19): siRNA sense strand
cagaagaggcagaagaacu

SEQ ID NO: 2563676 - RNA, 19 nt, Homo sapiens
  misc_RNA (1)...(19): siRNA sense strand
ugagcagauccgaggguua

SEQ ID NO: 2563677 - RNA, 19 nt, Homo sapiens
  misc_RNA (1)...(19): siRNA sense strand
uuaaagagcuagaagagga

SEQ ID NO: 2563678 - RNA, 19 nt, Homo sapiens
  misc_RNA (1)...(19): siRNA sense strand
agaagaaagcaguagcauu

SEQ ID NO: 2563679 - RNA, 19 nt, Homo sapiens
  misc_RNA (1)...(19): siRNA sense strand
ccgugaaaugaaagcuaaa

SEQ ID NO: 2563680 - RNA, 19 nt, Homo sapiens
  misc_RNA (1)...(19): siRNA sense strand
agacauuguugaauaguca

SEQ ID NO: 2563681 - RNA, 19 nt, Homo sapiens
  misc_RNA (1)...(19): siRNA sense strand
ggcugaagaacuaguuaaa

SEQ ID NO: 2563682 - RNA, 19 nt, Homo sapiens
  misc_RNA (1)...(19): siRNA sense strand
gugaaagaagaaagcagua

SEQ ID NO: 2563683 - RNA, 19 nt, Homo sapiens
  misc_RNA (1)...(19): siRNA sense strand
aagaauugcagaagcagaa

SEQ ID NO: 2563684 - RNA, 19 nt, Homo sapiens
  misc_RNA (1)...(19): siRNA sense strand
caauaauggcugaagaacu

SEQ ID NO: 2563685 - RNA, 19 nt, Homo sapiens
  misc_RNA (1)...(19): siRNA sense strand
acaagagacuacagauuca

SEQ ID NO: 2563686 - RNA, 19 nt, Homo sapiens
  misc_RNA (1)...(19): siRNA sense strand
uugcaagacaguugaauuu

SEQ ID NO: 2563687 - RNA, 19 nt, Homo sapiens
  misc_RNA (1)...(19): siRNA sense strand
acaacgaccagaagaagaa

SEQ ID NO: 2563688 - RNA, 19 nt, Homo sapiens
  misc_RNA (1)...(19): siRNA sense strand
gaccagaagaagaagugaa

SEQ ID NO: 2563689 - RNA, 19 nt, Homo sapiens
  misc_RNA (1)...(19): siRNA sense strand
augaagacaggcagagcaa

SEQ ID NO: 2563690 - RNA, 19 nt, Homo sapiens
  misc_RNA (1)...(19): siRNA sense strand
aggaagaggagccgagcau

SEQ ID NO: 2563691 - RNA, 19 nt, Homo sapiens
  misc_RNA (1)...(19): siRNA sense strand
accagaagaagaagugaaa

SEQ ID NO: 2563692 - RNA, 19 nt, Homo sapiens
  misc_RNA (1)...(19): siRNA sense strand
cugaagaaguaaaugaaac

SEQ ID NO: 2563693 - RNA, 19 nt, Homo sapiens
  misc_RNA (1)...(19): siRNA sense strand
ccacugaggaagcagaaau

SEQ ID NO: 2563694 - RNA, 19 nt, Homo sapiens
  misc_RNA (1)...(19): siRNA sense strand
aagagaaagaugagcagau

SEQ ID NO: 2563695 - RNA, 19 nt, Homo sapiens
  misc_RNA (1)...(19): siRNA sense strand
aagcagaaauggaagaaag

SEQ ID NO: 2563696 - RNA, 19 nt, Homo sapiens
  misc_RNA (1)...(19): siRNA sense strand
ggauagugaggcacaggaa

SEQ ID NO: 2563697 - RNA, 19 nt, Homo sapiens
  misc_RNA (1)...(19): siRNA sense strand
agucaaaguguuucaucaa

SEQ ID NO: 2563698 - RNA, 19 nt, Homo sapiens
  misc_RNA (1)...(19): siRNA sense strand
aaguugaacaagaaaggaa

SEQ ID NO: 2563699 - RNA, 19 nt, Homo sapiens
  misc_RNA (1)...(19): siRNA sense strand
ugaaugaaaagcuggaaaa

SEQ ID NO: 2563700 - RNA, 19 nt, Homo sapiens
  misc_RNA (1)...(19): siRNA sense strand
gaagaaaagaaccgaagua

SEQ ID NO: 2563701 - RNA, 19 nt, Homo sapiens
  misc_RNA (1)...(19): siRNA sense strand
acgugcagcuacagaagaa

SEQ ID NO: 2563702 - RNA, 19 nt, Homo sapiens
  misc_RNA (1)...(19): siRNA sense strand
gggagcaggaucaagcaua

SEQ ID NO: 2563703 - RNA, 19 nt, Homo sapiens
  misc_RNA (1)...(19): siRNA sense strand
agaagaggcagaagaacuu

SEQ ID NO: 2563704 - RNA, 19 nt, Homo sapiens
  misc_RNA (1)...(19): siRNA sense strand
cuuuggaaccuaaggaaca

SEQ ID NO: 2563705 - RNA, 19 nt, Homo sapiens
  misc_RNA (1)...(19): siRNA sense strand
ugguagaacgccaagagaa

SEQ ID NO: 2563706 - RNA, 19 nt, Homo sapiens
  misc_RNA (1)...(19): siRNA sense strand
ugaacaagaaaggaagaaa

SEQ ID NO: 2563707 - RNA, 19 nt, Homo sapiens
  misc_RNA (1)...(19): siRNA sense strand
ccaugagaucggugaacuu

SEQ ID NO: 2563708 - RNA, 19 nt, Homo sapiens
  misc_RNA (1)...(19): siRNA sense strand
guaaacuggaggaugagaa

SEQ ID NO: 2563709 - RNA, 19 nt, Homo sapiens
  misc_RNA (1)...(19): siRNA sense strand
ccgagaagcucuggcgcaa

SEQ ID NO: 2563710 - RNA, 19 nt, Homo sapiens
  misc_RNA (1)...(19): siRNA sense strand
gcgcaguggaagaaaggga

SEQ ID NO: 2563711 - RNA, 19 nt, Homo sapiens
  misc_RNA (1)...(19): siRNA sense strand
gugccaacuacgagcgcuu

SEQ ID NO: 2563712 - RNA, 19 nt, Homo sapiens
  misc_RNA (1)...(19): siRNA sense strand
cguccuacggagaggcuca

SEQ ID NO: 2563713 - RNA, 19 nt, Homo sapiens
  misc_RNA (1)...(19): siRNA sense strand
gggcacuggcuuucugcaa

SEQ ID NO: 2563714 - RNA, 19 nt, Homo sapiens
  misc_RNA (1)...(19): siRNA sense strand
ggaagaagaaccugggcaa

SEQ ID NO: 2563715 - RNA, 19 nt, Homo sapiens
  misc_RNA (1)...(19): siRNA sense strand
gccaggaacaagagagaaa

SEQ ID NO: 2563716 - RNA, 19 nt, Homo sapiens
  misc_RNA (1)...(19): siRNA sense strand
gcgaggagguggagagacu

SEQ ID NO: 2563717 - RNA, 19 nt, Homo sapiens
  misc_RNA (1)...(19): siRNA sense strand
gccaagaacaggagagaca

SEQ ID NO: 2563718 - RNA, 19 nt, Homo sapiens
  misc_RNA (1)...(19): siRNA sense strand
gucaggaaccagagagaaa

SEQ ID NO: 2563719 - RNA, 19 nt, Homo sapiens
  misc_RNA (1)...(19): siRNA sense strand
gugaacagcaagagagaga

SEQ ID NO: 2563720 - RNA, 19 nt, Homo sapiens
  misc_RNA (1)...(19): siRNA sense strand
ggaacaagaacuauggcaa

SEQ ID NO: 2563721 - RNA, 19 nt, Homo sapiens
  misc_RNA (1)...(19): siRNA sense strand
aggaggagcuacagagaga

SEQ ID NO: 2563722 - RNA, 19 nt, Homo sapiens
  misc_RNA (1)...(19): siRNA sense strand
gccaggaacgagagagaaa

SEQ ID NO: 2563723 - RNA, 19 nt, Homo sapiens
  misc_RNA (1)...(19): siRNA sense strand
cgcaagagcaggaggaaaa

SEQ ID NO: 2563724 - RNA, 19 nt, Homo sapiens
  misc_RNA (1)...(19): siRNA sense strand
ggcaagaagaggagcagaa

SEQ ID NO: 2563725 - RNA, 19 nt, Homo sapiens
  misc_RNA (1)...(19): siRNA sense strand
gucaagagacagacagaaa

SEQ ID NO: 2563726 - RNA, 19 nt, Homo sapiens
  misc_RNA (1)...(19): siRNA sense strand
ggaaauuacgggaagaaca

SEQ ID NO: 2563727 - RNA, 19 nt, Homo sapiens
  misc_RNA (1)...(19): siRNA sense strand
aagagaaguugcaggaaga

SEQ ID NO: 2563728 - RNA, 19 nt, Homo sapiens
  misc_RNA (1)...(19): siRNA sense strand
aagaacagcuggagcgaga

SEQ ID NO: 2563729 - RNA, 19 nt, Homo sapiens
  misc_RNA (1)...(19): siRNA sense strand
cuaagaaagaccugaagaa

SEQ ID NO: 2563730 - RNA, 19 nt, Homo sapiens
  misc_RNA (1)...(19): siRNA sense strand
cuaagaaagaccugaagaa

SEQ ID NO: 2563731 - RNA, 19 nt, Homo sapiens
  misc_RNA (1)...(19): siRNA sense strand
ggaaaggaaauuacgggaa

SEQ ID NO: 2563732 - RNA, 19 nt, Homo sapiens
  misc_RNA (1)...(19): siRNA sense strand
aggaggaagaagagaaaga

SEQ ID NO: 2563733 - RNA, 19 nt, Homo sapiens
  misc_RNA (1)...(19): siRNA sense strand
cagcauuaacuaagaaaga

SEQ ID NO: 2563734 - RNA, 19 nt, Homo sapiens
  misc_RNA (1)...(19): siRNA sense strand
cagcauuaacuaagaaaga

SEQ ID NO: 2563735 - RNA, 19 nt, Homo sapiens
  misc_RNA (1)...(19): siRNA sense strand
guuacaagaucgacggaca

SEQ ID NO: 2563736 - RNA, 19 nt, Homo sapiens
  misc_RNA (1)...(19): siRNA sense strand
gggaaaggcaauaucggaa

SEQ ID NO: 2563737 - RNA, 19 nt, Homo sapiens
  misc_RNA (1)...(19): siRNA sense strand
gucaggaacgagagagaaa

SEQ ID NO: 2563738 - RNA, 19 nt, Homo sapiens
  misc_RNA (1)...(19): siRNA sense strand
ggcaauaucgggaggaaga

SEQ ID NO: 2563739 - RNA, 19 nt, Homo sapiens
  misc_RNA (1)...(19): siRNA sense strand
gccaagaaacggagcaaga

SEQ ID NO: 2563740 - RNA, 19 nt, Homo sapiens
  misc_RNA (1)...(19): siRNA sense strand
gagaaagaguggaggaagc

SEQ ID NO: 2563741 - RNA, 19 nt, Homo sapiens
  misc_RNA (1)...(19): siRNA sense strand
ugaacuugaaggaaagaaa

SEQ ID NO: 2563742 - RNA, 19 nt, Homo sapiens
  misc_RNA (1)...(19): siRNA sense strand
agaagaagaccaaaggaga

SEQ ID NO: 2563743 - RNA, 19 nt, Homo sapiens
  misc_RNA (1)...(19): siRNA sense strand
ggcugaagcucgaggagga

SEQ ID NO: 2563744 - RNA, 19 nt, Homo sapiens
  misc_RNA (1)...(19): siRNA sense strand
ccgcaagagcaggaggaaa

SEQ ID NO: 2563745 - RNA, 19 nt, Homo sapiens
  misc_RNA (1)...(19): siRNA sense strand
agaaaaggaaacagcgaua

SEQ ID NO: 2563746 - RNA, 19 nt, Homo sapiens
  misc_RNA (1)...(19): siRNA sense strand
ucagaaguaacaagaguaa

SEQ ID NO: 2563747 - RNA, 19 nt, Homo sapiens
  misc_RNA (1)...(19): siRNA sense strand
ggagaggagcaaagugaga

SEQ ID NO: 2563748 - RNA, 19 nt, Homo sapiens
  misc_RNA (1)...(19): siRNA sense strand
cggaggaggaggagaagga

SEQ ID NO: 2563749 - RNA, 19 nt, Homo sapiens
  misc_RNA (1)...(19): siRNA sense strand
gcucagaaucccauaaaca

SEQ ID NO: 2563750 - RNA, 19 nt, Homo sapiens
  misc_RNA (1)...(19): siRNA sense strand
gagacaauaccgcgaggaa

SEQ ID NO: 2563751 - RNA, 19 nt, Homo sapiens
  misc_RNA (1)...(19): siRNA sense strand
gagagaggaacgggagaaa

SEQ ID NO: 2563752 - RNA, 19 nt, Homo sapiens
  misc_RNA (1)...(19): siRNA sense strand
gagagaggaacgggagaaa

SEQ ID NO: 2563753 - RNA, 19 nt, Homo sapiens
  misc_RNA (1)...(19): siRNA sense strand
caggaagucccaagaggaa

SEQ ID NO: 2563754 - RNA, 19 nt, Homo sapiens
  misc_RNA (1)...(19): siRNA sense strand
ccguuuagaggaacagaaa

SEQ ID NO: 2563755 - RNA, 19 nt, Homo sapiens
  misc_RNA (1)...(19): siRNA sense strand
uacuugaacuugaaggaaa

SEQ ID NO: 2563756 - RNA, 19 nt, Homo sapiens
  misc_RNA (1)...(19): siRNA sense strand
auaacaagguuuacugcaa

SEQ ID NO: 2563757 - RNA, 19 nt, Homo sapiens
  misc_RNA (1)...(19): siRNA sense strand
gggugaacagcaagagaga

SEQ ID NO: 2563758 - RNA, 19 nt, Homo sapiens
  misc_RNA (1)...(19): siRNA sense strand
ccgccaggaacgagagaga

SEQ ID NO: 2563759 - RNA, 19 nt, Homo sapiens
  misc_RNA (1)...(19): siRNA sense strand
cggaaaguaucgcugggaa

SEQ ID NO: 2563760 - RNA, 19 nt, Homo sapiens
  misc_RNA (1)...(19): siRNA sense strand
uggcauaguuagcacaaau

SEQ ID NO: 2563761 - RNA, 19 nt, Homo sapiens
  misc_RNA (1)...(19): siRNA sense strand
acacauaaucucaugaaga

SEQ ID NO: 2563762 - RNA, 19 nt, Homo sapiens
  misc_RNA (1)...(19): siRNA sense strand
gaggagaaacagcagcaaa

SEQ ID NO: 2563763 - RNA, 19 nt, Homo sapiens
  misc_RNA (1)...(19): siRNA sense strand
gccaggagcgcgacagaaa

SEQ ID NO: 2563764 - RNA, 19 nt, Homo sapiens
  misc_RNA (1)...(19): siRNA sense strand
ccaggaacgggaaaggaaa

SEQ ID NO: 2563765 - RNA, 19 nt, Homo sapiens
  misc_RNA (1)...(19): siRNA sense strand
agaggagcaaagugagaaa

SEQ ID NO: 2563766 - RNA, 19 nt, Homo sapiens
  misc_RNA (1)...(19): siRNA sense strand
ggcaauaucggaaggaaga

SEQ ID NO: 2563767 - RNA, 19 nt, Homo sapiens
  misc_RNA (1)...(19): siRNA sense strand
gggacagacaacuggaaga

SEQ ID NO: 2563768 - RNA, 19 nt, Homo sapiens
  misc_RNA (1)...(19): siRNA sense strand
aggagaggcacgagcagaa

SEQ ID NO: 2563769 - RNA, 19 nt, Homo sapiens
  misc_RNA (1)...(19): siRNA sense strand
gagaggaaagagaagagaa

SEQ ID NO: 2563770 - RNA, 19 nt, Homo sapiens
  misc_RNA (1)...(19): siRNA sense strand
guuuagaggaacagaaagu

SEQ ID NO: 2563771 - RNA, 19 nt, Homo sapiens
  misc_RNA (1)...(19): siRNA sense strand
gggaaaacucucugauauu

SEQ ID NO: 2563772 - RNA, 19 nt, Homo sapiens
  misc_RNA (1)...(19): siRNA sense strand
gcaacuaaggcgggagcaa

SEQ ID NO: 2563773 - RNA, 19 nt, Homo sapiens
  misc_RNA (1)...(19): siRNA sense strand
agaagaggcucgagcagga

SEQ ID NO: 2563774 - RNA, 19 nt, Homo sapiens
  misc_RNA (1)...(19): siRNA sense strand
cugaaauggcagugggaac

SEQ ID NO: 2563775 - RNA, 19 nt, Homo sapiens
  misc_RNA (1)...(19): siRNA sense strand
ccgucaggaacgagagaga

SEQ ID NO: 2563776 - RNA, 19 nt, Homo sapiens
  misc_RNA (1)...(19): siRNA sense strand
acaaauuccagguaacuaa

SEQ ID NO: 2563777 - RNA, 19 nt, Homo sapiens
  misc_RNA (1)...(19): siRNA sense strand
uggcaguggcagcuagaaa

SEQ ID NO: 2563778 - RNA, 19 nt, Homo sapiens
  misc_RNA (1)...(19): siRNA sense strand
gggagcuagcugagggaga

SEQ ID NO: 2563779 - RNA, 19 nt, Homo sapiens
  misc_RNA (1)...(19): siRNA sense strand
gugagaaacaagagcgacu

SEQ ID NO: 2563780 - RNA, 19 nt, Homo sapiens
  misc_RNA (1)...(19): siRNA sense strand
gcaaaggcaagaauggcaa

SEQ ID NO: 2563781 - RNA, 19 nt, Homo sapiens
  misc_RNA (1)...(19): siRNA sense strand
cagcaacggcagagaaaau

SEQ ID NO: 2563782 - RNA, 19 nt, Homo sapiens
  misc_RNA (1)...(19): siRNA sense strand
gaaaauucauggaggacga

SEQ ID NO: 2563783 - RNA, 19 nt, Homo sapiens
  misc_RNA (1)...(19): siRNA sense strand
cccaacagcgugacggaaa

SEQ ID NO: 2563784 - RNA, 19 nt, Homo sapiens
  misc_RNA (1)...(19): siRNA sense strand
cuaugaagaaggaaggcau

SEQ ID NO: 2563785 - RNA, 19 nt, Homo sapiens
  misc_RNA (1)...(19): siRNA sense strand
cggcaggacgagaaagagu

SEQ ID NO: 2563786 - RNA, 19 nt, Homo sapiens
  misc_RNA (1)...(19): siRNA sense strand
ggaugcaaguccaggccca

SEQ ID NO: 2563787 - RNA, 19 nt, Homo sapiens
  misc_RNA (1)...(19): siRNA sense strand
gcaugaagcuggagucguc

SEQ ID NO: 2563788 - RNA, 19 nt, Homo sapiens
  misc_RNA (1)...(19): siRNA sense strand
cugcaaugccugugggcuc

SEQ ID NO: 2563789 - RNA, 19 nt, Homo sapiens
  misc_RNA (1)...(19): siRNA sense strand
ugaaagaagagaaggaacu

SEQ ID NO: 2563790 - RNA, 19 nt, Homo sapiens
  misc_RNA (1)...(19): siRNA sense strand
uggaauacgcagcggugaa

SEQ ID NO: 2563791 - RNA, 19 nt, Homo sapiens
  misc_RNA (1)...(19): siRNA sense strand
gaagaagacagaagaggca

SEQ ID NO: 2563792 - RNA, 19 nt, Homo sapiens
  misc_RNA (1)...(19): siRNA sense strand
aagugaugguccagugcaa

SEQ ID NO: 2563793 - RNA, 19 nt, Homo sapiens
  misc_RNA (1)...(19): siRNA sense strand
uggaacgccaaaugggaua

SEQ ID NO: 2563794 - RNA, 19 nt, Homo sapiens
  misc_RNA (1)...(19): siRNA sense strand
gaugcaagaaucaggccaa

SEQ ID NO: 2563795 - RNA, 19 nt, Homo sapiens
  misc_RNA (1)...(19): siRNA sense strand
aguucaggcuccagggcau

SEQ ID NO: 2563796 - RNA, 19 nt, Homo sapiens
  misc_RNA (1)...(19): siRNA sense strand
ccaagugaaagauggaaca

SEQ ID NO: 2563797 - RNA, 19 nt, Homo sapiens
  misc_RNA (1)...(19): siRNA sense strand
ugggaaggacaucaggaua

SEQ ID NO: 2563798 - RNA, 19 nt, Homo sapiens
  misc_RNA (1)...(19): siRNA sense strand
uggacuaccgagugaauau

SEQ ID NO: 2563799 - RNA, 19 nt, Homo sapiens
  misc_RNA (1)...(19): siRNA sense strand
aagagaaggaacuuggcua

SEQ ID NO: 2563800 - RNA, 19 nt, Homo sapiens
  misc_RNA (1)...(19): siRNA sense strand
uggacaaguuaaugggaag

SEQ ID NO: 2563801 - RNA, 19 nt, Homo sapiens
  misc_RNA (1)...(19): siRNA sense strand
caaguuaaugggaaggaca

SEQ ID NO: 2563802 - RNA, 19 nt, Homo sapiens
  misc_RNA (1)...(19): siRNA sense strand
agaagacagaagaggcaga

SEQ ID NO: 2563803 - RNA, 19 nt, Homo sapiens
  misc_RNA (1)...(19): siRNA sense strand
cugauauuugagugguuaa

SEQ ID NO: 2563804 - RNA, 19 nt, Homo sapiens
  misc_RNA (1)...(19): siRNA sense strand
agaauaaggaagaagacgu

SEQ ID NO: 2563805 - RNA, 19 nt, Homo sapiens
  misc_RNA (1)...(19): siRNA sense strand
cagauuuguucuuugccaa

SEQ ID NO: 2563806 - RNA, 19 nt, Homo sapiens
  misc_RNA (1)...(19): siRNA sense strand
gugguuaagugauggucca

SEQ ID NO: 2563807 - RNA, 19 nt, Homo sapiens
  misc_RNA (1)...(19): siRNA sense strand
ggcaugaagauguccacaa

SEQ ID NO: 2563808 - RNA, 19 nt, Homo sapiens
  misc_RNA (1)...(19): siRNA sense strand
acaacaaauugcuacggau

SEQ ID NO: 2563809 - RNA, 19 nt, Homo sapiens
  misc_RNA (1)...(19): siRNA sense strand
cguuuuaauuuuagcgguu

SEQ ID NO: 2563810 - RNA, 19 nt, Homo sapiens
  misc_RNA (1)...(19): siRNA sense strand
augcaagaaucaggccaaa

SEQ ID NO: 2563811 - RNA, 19 nt, Homo sapiens
  misc_RNA (1)...(19): siRNA sense strand
ggauaaauauggaugcagc

SEQ ID NO: 2563812 - RNA, 19 nt, Homo sapiens
  misc_RNA (1)...(19): siRNA sense strand
uuggacaaguuaaugggaa

SEQ ID NO: 2563813 - RNA, 19 nt, Homo sapiens
  misc_RNA (1)...(19): siRNA sense strand
cagaugacucccuggacuu

SEQ ID NO: 2563814 - RNA, 19 nt, Homo sapiens
  misc_RNA (1)...(19): siRNA sense strand
gcuacuguacaaagcacua

SEQ ID NO: 2563815 - RNA, 19 nt, Homo sapiens
  misc_RNA (1)...(19): siRNA sense strand
acacagacaucgauggcua

SEQ ID NO: 2563816 - RNA, 19 nt, Homo sapiens
  misc_RNA (1)...(19): siRNA sense strand
ccaacaaagaccagcagaa

SEQ ID NO: 2563817 - RNA, 19 nt, Homo sapiens
  misc_RNA (1)...(19): siRNA sense strand
ggguaggagcccugaguga

SEQ ID NO: 2563818 - RNA, 19 nt, Homo sapiens
  misc_RNA (1)...(19): siRNA sense strand
acacagugccugaggacuu

SEQ ID NO: 2563819 - RNA, 19 nt, Homo sapiens
  misc_RNA (1)...(19): siRNA sense strand
cugcaaacugggugaccaa

SEQ ID NO: 2563820 - RNA, 19 nt, Homo sapiens
  misc_RNA (1)...(19): siRNA sense strand
agucaggaucugcagguaa

SEQ ID NO: 2563821 - RNA, 19 nt, Homo sapiens
  misc_RNA (1)...(19): siRNA sense strand
ggacuggacagaaggcgua

SEQ ID NO: 2563822 - RNA, 19 nt, Homo sapiens
  misc_RNA (1)...(19): siRNA sense strand
uccugaaagugcagaggua

SEQ ID NO: 2563823 - RNA, 19 nt, Homo sapiens
  misc_RNA (1)...(19): siRNA sense strand
uggaaaucguucagaccau

SEQ ID NO: 2563824 - RNA, 19 nt, Homo sapiens
  misc_RNA (1)...(19): siRNA sense strand
agaaggacacagauggcaa

SEQ ID NO: 2563825 - RNA, 19 nt, Homo sapiens
  misc_RNA (1)...(19): siRNA sense strand
agaaggacucagauggcaa

SEQ ID NO: 2563826 - RNA, 19 nt, Homo sapiens
  misc_RNA (1)...(19): siRNA sense strand
agacagaugcagacagcga

SEQ ID NO: 2563827 - RNA, 19 nt, Homo sapiens
  misc_RNA (1)...(19): siRNA sense strand
cugaggacuuugagccauu

SEQ ID NO: 2563828 - RNA, 19 nt, Homo sapiens
  misc_RNA (1)...(19): siRNA sense strand
cugcaaugacaucgaugaa

SEQ ID NO: 2563829 - RNA, 19 nt, Homo sapiens
  misc_RNA (1)...(19): siRNA sense strand
ccaacaaugaccagaagga

SEQ ID NO: 2563830 - RNA, 19 nt, Homo sapiens
  misc_RNA (1)...(19): siRNA sense strand
caucaggacaccaaggaca

SEQ ID NO: 2563831 - RNA, 19 nt, Homo sapiens
  misc_RNA (1)...(19): siRNA sense strand
uggugaugccugugacaau

SEQ ID NO: 2563832 - RNA, 19 nt, Homo sapiens
  misc_RNA (1)...(19): siRNA sense strand
uggcaauggcguuggugau

SEQ ID NO: 2563833 - RNA, 19 nt, Homo sapiens
  misc_RNA (1)...(19): siRNA sense strand
cgagaccaggugaaggaaa

SEQ ID NO: 2563834 - RNA, 19 nt, Homo sapiens
  misc_RNA (1)...(19): siRNA sense strand
ccagcaaacaggucugcaa

SEQ ID NO: 2563835 - RNA, 19 nt, Homo sapiens
  misc_RNA (1)...(19): siRNA sense strand
gcaaugacacagugccuga

SEQ ID NO: 2563836 - RNA, 19 nt, Homo sapiens
  misc_RNA (1)...(19): siRNA sense strand
gugaugugugugaggauga

SEQ ID NO: 2563837 - RNA, 19 nt, Homo sapiens
  misc_RNA (1)...(19): siRNA sense strand
augaaugcaacgauggcaa

SEQ ID NO: 2563838 - RNA, 19 nt, Homo sapiens
  misc_RNA (1)...(19): siRNA sense strand
ugaccaacaugcaggccuu

SEQ ID NO: 2563839 - RNA, 19 nt, Homo sapiens
  misc_RNA (1)...(19): siRNA sense strand
cugcauggacaacaacaaa

SEQ ID NO: 2563840 - RNA, 19 nt, Homo sapiens
  misc_RNA (1)...(19): siRNA sense strand
gagaagauccggacagccu

SEQ ID NO: 2563841 - RNA, 19 nt, Homo sapiens
  misc_RNA (1)...(19): siRNA sense strand
aggcaagaucaacaaagua

SEQ ID NO: 2563842 - RNA, 19 nt, Homo sapiens
  misc_RNA (1)...(19): siRNA sense strand
gaugcagggcuuuguggaa

SEQ ID NO: 2563843 - RNA, 19 nt, Homo sapiens
  misc_RNA (1)...(19): siRNA sense strand
gugaggaugacuuugacaa

SEQ ID NO: 2563844 - RNA, 19 nt, Homo sapiens
  misc_RNA (1)...(19): siRNA sense strand
ccugaaagugcagagguaa

SEQ ID NO: 2563845 - RNA, 19 nt, Homo sapiens
  misc_RNA (1)...(19): siRNA sense strand
cugaaagugcagagguaac

SEQ ID NO: 2563846 - RNA, 19 nt, Homo sapiens
  misc_RNA (1)...(19): siRNA sense strand
aacaaugaccagaaggaca

SEQ ID NO: 2563847 - RNA, 19 nt, Homo sapiens
  misc_RNA (1)...(19): siRNA sense strand
agaugguagcuguggcaga

SEQ ID NO: 2563848 - RNA, 19 nt, Homo sapiens
  misc_RNA (1)...(19): siRNA sense strand
ccuucaaugguguggacuu

SEQ ID NO: 2563849 - RNA, 19 nt, Homo sapiens
  misc_RNA (1)...(19): siRNA sense strand
ggugaagcucuaugaggga

SEQ ID NO: 2563850 - RNA, 19 nt, Homo sapiens
  misc_RNA (1)...(19): siRNA sense strand
caacaaaguacuggugcga

SEQ ID NO: 2563851 - RNA, 19 nt, Homo sapiens
  misc_RNA (1)...(19): siRNA sense strand
cuggcuuggcaguuggaua

SEQ ID NO: 2563852 - RNA, 19 nt, Homo sapiens
  misc_RNA (1)...(19): siRNA sense strand
gggaugucugugauacuaa

SEQ ID NO: 2563853 - RNA, 19 nt, Homo sapiens
  misc_RNA (1)...(19): siRNA sense strand
ucuacguagucauguggaa

SEQ ID NO: 2563854 - RNA, 19 nt, Homo sapiens
  misc_RNA (1)...(19): siRNA sense strand
gcaaacugggugaccaaca

SEQ ID NO: 2563855 - RNA, 19 nt, Homo sapiens
  misc_RNA (1)...(19): siRNA sense strand
ggucgaugggcuggagauu

SEQ ID NO: 2563856 - RNA, 19 nt, Homo sapiens
  misc_RNA (1)...(19): siRNA sense strand
uaacgauggacuuggagau

SEQ ID NO: 2563857 - RNA, 19 nt, Homo sapiens
  misc_RNA (1)...(19): siRNA sense strand
ugucccaacauuagaguau

SEQ ID NO: 2563858 - RNA, 19 nt, Homo sapiens
  misc_RNA (1)...(19): siRNA sense strand
augaaguaacugaggagga

SEQ ID NO: 2563859 - RNA, 19 nt, Homo sapiens
  misc_RNA (1)...(19): siRNA sense strand
cagaaggaacugugaggcu

SEQ ID NO: 2563860 - RNA, 19 nt, Homo sapiens
  misc_RNA (1)...(19): siRNA sense strand
gggagguggacguggagaa

SEQ ID NO: 2563861 - RNA, 19 nt, Homo sapiens
  misc_RNA (1)...(19): siRNA sense strand
gcuacucggaggaggacaa

SEQ ID NO: 2563862 - RNA, 19 nt, Homo sapiens
  misc_RNA (1)...(19): siRNA sense strand
ucuacaaguacgagcagaa

SEQ ID NO: 2563863 - RNA, 19 nt, Homo sapiens
  misc_RNA (1)...(19): siRNA sense strand
aggaccugcuggaggacaa

SEQ ID NO: 2563864 - RNA, 19 nt, Homo sapiens
  misc_RNA (1)...(19): siRNA sense strand
cuuucgaccuggagaacau

SEQ ID NO: 2563865 - RNA, 19 nt, Homo sapiens
  misc_RNA (1)...(19): siRNA sense strand
gcgaugaggugaaggaguc

SEQ ID NO: 2563866 - RNA, 19 nt, Homo sapiens
  misc_RNA (1)...(19): siRNA sense strand
agcucaaccucaaggagua

SEQ ID NO: 2563867 - RNA, 19 nt, Homo sapiens
  misc_RNA (1)...(19): siRNA sense strand
agaaggaccugcuggagga

SEQ ID NO: 2563868 - RNA, 19 nt, Homo sapiens
  misc_RNA (1)...(19): siRNA sense strand
ugaaggaguccaagcggau

SEQ ID NO: 2563869 - RNA, 19 nt, Homo sapiens
  misc_RNA (1)...(19): siRNA sense strand
acaccauccugcagcucaa

SEQ ID NO: 2563870 - RNA, 19 nt, Homo sapiens
  misc_RNA (1)...(19): siRNA sense strand
ugaagauguucguggaccu

SEQ ID NO: 2563871 - RNA, 19 nt, Homo sapiens
  misc_RNA (1)...(19): siRNA sense strand
gugaaggaguccaagcgga

SEQ ID NO: 2563872 - RNA, 19 nt, Homo sapiens
  misc_RNA (1)...(19): siRNA sense strand
gaacaaggccaaugcgcuc

SEQ ID NO: 2563873 - RNA, 19 nt, Homo sapiens
  misc_RNA (1)...(19): siRNA sense strand
uguuaagucuccugggcau

SEQ ID NO: 2563874 - RNA, 19 nt, Homo sapiens
  misc_RNA (1)...(19): siRNA sense strand
cucaaaacccacagagaau

SEQ ID NO: 2563875 - RNA, 19 nt, Homo sapiens
  misc_RNA (1)...(19): siRNA sense strand
gcagcgaguucuugcggga

SEQ ID NO: 2563876 - RNA, 19 nt, Homo sapiens
  misc_RNA (1)...(19): siRNA sense strand
ggguggaccaggagaucaa

SEQ ID NO: 2563877 - RNA, 19 nt, Homo sapiens
  misc_RNA (1)...(19): siRNA sense strand
acucggaggaggagcgcaa

SEQ ID NO: 2563878 - RNA, 19 nt, Homo sapiens
  misc_RNA (1)...(19): siRNA sense strand
aggagaacaaccaggagaa

SEQ ID NO: 2563879 - RNA, 19 nt, Homo sapiens
  misc_RNA (1)...(19): siRNA sense strand
ucagcaggcccgagagcaa

SEQ ID NO: 2563880 - RNA, 19 nt, Homo sapiens
  misc_RNA (1)...(19): siRNA sense strand
gcaucaccgaggagggcua

SEQ ID NO: 2563881 - RNA, 19 nt, Homo sapiens
  misc_RNA (1)...(19): siRNA sense strand
aggaggagcgcaagggcuu

SEQ ID NO: 2563882 - RNA, 19 nt, Homo sapiens
  misc_RNA (1)...(19): siRNA sense strand
gaggagaacaaccaggaga

SEQ ID NO: 2563883 - RNA, 19 nt, Homo sapiens
  misc_RNA (1)...(19): siRNA sense strand
ccacguuugagaagcgcua

SEQ ID NO: 2563884 - RNA, 19 nt, Homo sapiens
  misc_RNA (1)...(19): siRNA sense strand
gcuaccuggacgagaucaa

SEQ ID NO: 2563885 - RNA, 19 nt, Homo sapiens
  misc_RNA (1)...(19): siRNA sense strand
ggauccucuuggagcagaa

SEQ ID NO: 2563886 - RNA, 19 nt, Homo sapiens
  misc_RNA (1)...(19): siRNA sense strand
gagaaccgcaugaaggaga

SEQ ID NO: 2563887 - RNA, 19 nt, Homo sapiens
  misc_RNA (1)...(19): siRNA sense strand
aagucagagcguaagaaau

SEQ ID NO: 2563888 - RNA, 19 nt, Homo sapiens
  misc_RNA (1)...(19): siRNA sense strand
caacaaauaugaugaggca

SEQ ID NO: 2563889 - RNA, 19 nt, Homo sapiens
  misc_RNA (1)...(19): siRNA sense strand
gggaagagcaccaucguca

SEQ ID NO: 2563890 - RNA, 19 nt, Homo sapiens
  misc_RNA (1)...(19): siRNA sense strand
cugaggacgaggagaugaa

SEQ ID NO: 2563891 - RNA, 19 nt, Homo sapiens
  misc_RNA (1)...(19): siRNA sense strand
agaguaaguuugaggaccu

SEQ ID NO: 2563892 - RNA, 19 nt, Homo sapiens
  misc_RNA (1)...(19): siRNA sense strand
cgcaaagacaccaaggaga

SEQ ID NO: 2563893 - RNA, 19 nt, Homo sapiens
  misc_RNA (1)...(19): siRNA sense strand
uagcugaggacgaggagau

SEQ ID NO: 2563894 - RNA, 19 nt, Homo sapiens
  misc_RNA (1)...(19): siRNA sense strand
aggaccuguuugaggagaa

SEQ ID NO: 2563895 - RNA, 19 nt, Homo sapiens
  misc_RNA (1)...(19): siRNA sense strand
augucaucaucaagaacaa

SEQ ID NO: 2563896 - RNA, 19 nt, Homo sapiens
  misc_RNA (1)...(19): siRNA sense strand
gcguaaagaccacggggau

SEQ ID NO: 2563897 - RNA, 19 nt, Homo sapiens
  misc_RNA (1)...(19): siRNA sense strand
aagaacaaccugaaggacu

SEQ ID NO: 2563898 - RNA, 19 nt, Homo sapiens
  misc_RNA (1)...(19): siRNA sense strand
ccaaggagaucuacacgca

SEQ ID NO: 2563899 - RNA, 19 nt, Homo sapiens
  misc_RNA (1)...(19): siRNA sense strand
caagggaauaccagcucaa

SEQ ID NO: 2563900 - RNA, 19 nt, Homo sapiens
  misc_RNA (1)...(19): siRNA sense strand
ucgucaagcagaugaagau

SEQ ID NO: 2563901 - RNA, 19 nt, Homo sapiens
  misc_RNA (1)...(19): siRNA sense strand
agaacaaccugaaggacug

SEQ ID NO: 2563902 - RNA, 19 nt, Homo sapiens
  misc_RNA (1)...(19): siRNA sense strand
uggaauugagugauggaga

SEQ ID NO: 2563903 - RNA, 19 nt, Homo sapiens
  misc_RNA (1)...(19): siRNA sense strand
cuuauggagcccaggaaga

SEQ ID NO: 2563904 - RNA, 19 nt, Homo sapiens
  misc_RNA (1)...(19): siRNA sense strand
ggaauugagugauggagac

SEQ ID NO: 2563905 - RNA, 19 nt, Homo sapiens
  misc_RNA (1)...(19): siRNA sense strand
gaggaaaucuguucaccga

SEQ ID NO: 2563906 - RNA, 19 nt, Homo sapiens
  misc_RNA (1)...(19): siRNA sense strand
gcaccuaucgcuugggcca

SEQ ID NO: 2563907 - RNA, 19 nt, Homo sapiens
  misc_RNA (1)...(19): siRNA sense strand
gggccaaaggucagagaga

SEQ ID NO: 2563908 - RNA, 19 nt, Homo sapiens
  misc_RNA (1)...(19): siRNA sense strand
gcuuagugaauaugaucaa

SEQ ID NO: 2563909 - RNA, 19 nt, Homo sapiens
  misc_RNA (1)...(19): siRNA sense strand
uuaucaagcagaugagaau

SEQ ID NO: 2563910 - RNA, 19 nt, Homo sapiens
  misc_RNA (1)...(19): siRNA sense strand
gagaaucauccauggguca

SEQ ID NO: 2563911 - RNA, 19 nt, Homo sapiens
  misc_RNA (1)...(19): siRNA sense strand
agagagaagaaaauggaua

SEQ ID NO: 2563912 - RNA, 19 nt, Homo sapiens
  misc_RNA (1)...(19): siRNA sense strand
gccaaaggucagagagaag

SEQ ID NO: 2563913 - RNA, 19 nt, Homo sapiens
  misc_RNA (1)...(19): siRNA sense strand
gcucgggacaggagagagu

SEQ ID NO: 2563914 - RNA, 19 nt, Homo sapiens
  misc_RNA (1)...(19): siRNA sense strand
acgacgagaucgagcggca

SEQ ID NO: 2563915 - RNA, 19 nt, Homo sapiens
  misc_RNA (1)...(19): siRNA sense strand
acaauaaggcucaugcaca

SEQ ID NO: 2563916 - RNA, 19 nt, Homo sapiens
  misc_RNA (1)...(19): siRNA sense strand
aggaguacaaucuggucua

SEQ ID NO: 2563917 - RNA, 19 nt, Homo sapiens
  misc_RNA (1)...(19): siRNA sense strand
cagacaaugagaaccgaau

SEQ ID NO: 2563918 - RNA, 19 nt, Homo sapiens
  misc_RNA (1)...(19): siRNA sense strand
accgaauggaggaaagcaa

SEQ ID NO: 2563919 - RNA, 19 nt, Homo sapiens
  misc_RNA (1)...(19): siRNA sense strand
ggacaggagagaguggcaa

SEQ ID NO: 2563920 - RNA, 19 nt, Homo sapiens
  misc_RNA (1)...(19): siRNA sense strand
cuaguagcgcuuagugaau

SEQ ID NO: 2563921 - RNA, 19 nt, Homo sapiens
  misc_RNA (1)...(19): siRNA sense strand
ugaagauguucguggaccu

SEQ ID NO: 2563922 - RNA, 19 nt, Homo sapiens
  misc_RNA (1)...(19): siRNA sense strand
ucugagggaaugugggaaa

SEQ ID NO: 2563923 - RNA, 19 nt, Homo sapiens
  misc_RNA (1)...(19): siRNA sense strand
cggcuuugguugugggcca

SEQ ID NO: 2563924 - RNA, 19 nt, Homo sapiens
  misc_RNA (1)...(19): siRNA sense strand
gugcaagauaacuggaaaa

SEQ ID NO: 2563925 - RNA, 19 nt, Homo sapiens
  misc_RNA (1)...(19): siRNA sense strand
agcagaaggcgcagaaaga

SEQ ID NO: 2563926 - RNA, 19 nt, Homo sapiens
  misc_RNA (1)...(19): siRNA sense strand
cagccagucuuaaaggcaa

SEQ ID NO: 2563927 - RNA, 19 nt, Homo sapiens
  misc_RNA (1)...(19): siRNA sense strand
ugggugaagaagaaagcaa

SEQ ID NO: 2563928 - RNA, 19 nt, Homo sapiens
  misc_RNA (1)...(19): siRNA sense strand
gaagaaagcaaguggaacc

SEQ ID NO: 2563929 - RNA, 19 nt, Homo sapiens
  misc_RNA (1)...(19): siRNA sense strand
cagaaggcgcagaaagacu

SEQ ID NO: 2563930 - RNA, 19 nt, Homo sapiens
  misc_RNA (1)...(19): siRNA sense strand
cuuuaggcugggugaagaa

SEQ ID NO: 2563931 - RNA, 19 nt, Homo sapiens
  misc_RNA (1)...(19): siRNA sense strand
aaugacaggacgugaacau

SEQ ID NO: 2563932 - RNA, 19 nt, Homo sapiens
  misc_RNA (1)...(19): siRNA sense strand
aaggaagggcuuuggcuca

SEQ ID NO: 2563933 - RNA, 19 nt, Homo sapiens
  misc_RNA (1)...(19): siRNA sense strand
augagaggauccaggcuga

SEQ ID NO: 2563934 - RNA, 19 nt, Homo sapiens
  misc_RNA (1)...(19): siRNA sense strand
cugcaagaagcuagagaaa

SEQ ID NO: 2563935 - RNA, 19 nt, Homo sapiens
  misc_RNA (1)...(19): siRNA sense strand
ggaagguggcgguggaaau

SEQ ID NO: 2563936 - RNA, 19 nt, Homo sapiens
  misc_RNA (1)...(19): siRNA sense strand
uggaaaucgcaaaggcaaa

SEQ ID NO: 2563937 - RNA, 19 nt, Homo sapiens
  misc_RNA (1)...(19): siRNA sense strand
ggaaguggcuggaaaggca

SEQ ID NO: 2563938 - RNA, 19 nt, Homo sapiens
  misc_RNA (1)...(19): siRNA sense strand
agaagaagaucaagcggga

SEQ ID NO: 2563939 - RNA, 19 nt, Homo sapiens
  misc_RNA (1)...(19): siRNA sense strand
guggaaaucgcaaaggcaa

SEQ ID NO: 2563940 - RNA, 19 nt, Homo sapiens
  misc_RNA (1)...(19): siRNA sense strand
uguggaaacugcagcgaca

SEQ ID NO: 2563941 - RNA, 19 nt, Homo sapiens
  misc_RNA (1)...(19): siRNA sense strand
gugugggcaccguggguua

SEQ ID NO: 2563942 - RNA, 19 nt, Homo sapiens
  misc_RNA (1)...(19): siRNA sense strand
acgagaugguggagaccga

SEQ ID NO: 2563943 - RNA, 19 nt, Homo sapiens
  misc_RNA (1)...(19): siRNA sense strand
agcaagaaauggcggcaga

SEQ ID NO: 2563944 - RNA, 19 nt, Homo sapiens
  misc_RNA (1)...(19): siRNA sense strand
gaugacaagcggaaggcau

SEQ ID NO: 2563945 - RNA, 19 nt, Homo sapiens
  misc_RNA (1)...(19): siRNA sense strand
ucgagaacaucguagcgaa

SEQ ID NO: 2563946 - RNA, 19 nt, Homo sapiens
  misc_RNA (1)...(19): siRNA sense strand
gcgcugaacgagaagcaga

SEQ ID NO: 2563947 - RNA, 19 nt, Homo sapiens
  misc_RNA (1)...(19): siRNA sense strand
accugaagcccgagaacau

SEQ ID NO: 2563948 - RNA, 19 nt, Homo sapiens
  misc_RNA (1)...(19): siRNA sense strand
gggaagguggcgguggaaa

SEQ ID NO: 2563949 - RNA, 19 nt, Homo sapiens
  misc_RNA (1)...(19): siRNA sense strand
aggaguauuccgagcgcuu

SEQ ID NO: 2563950 - RNA, 19 nt, Homo sapiens
  misc_RNA (1)...(19): siRNA sense strand
cugcaaggacccugccgaa

SEQ ID NO: 2563951 - RNA, 19 nt, Homo sapiens
  misc_RNA (1)...(19): siRNA sense strand
ccaagauugcuguggaaac

SEQ ID NO: 2563952 - RNA, 19 nt, Homo sapiens
  misc_RNA (1)...(19): siRNA sense strand
cugcagcgacagcgaggaa

SEQ ID NO: 2563953 - RNA, 19 nt, Homo sapiens
  misc_RNA (1)...(19): siRNA sense strand
ccgagaacaucuugcugga

SEQ ID NO: 2563954 - RNA, 19 nt, Homo sapiens
  misc_RNA (1)...(19): siRNA sense strand
agaacgagaugguggagac

SEQ ID NO: 2563955 - RNA, 19 nt, Homo sapiens
  misc_RNA (1)...(19): siRNA sense strand
ugguggagaccgagugcuu

SEQ ID NO: 2563956 - RNA, 19 nt, Homo sapiens
  misc_RNA (1)...(19): siRNA sense strand
aagaaugggcagaaagcuu

SEQ ID NO: 2563957 - RNA, 19 nt, Homo sapiens
  misc_RNA (1)...(19): siRNA sense strand
cgcccaugguuaagaaaau

SEQ ID NO: 2563958 - RNA, 19 nt, Homo sapiens
  misc_RNA (1)...(19): siRNA sense strand
gcuuagugcccgagaugaa

SEQ ID NO: 2563959 - RNA, 19 nt, Homo sapiens
  misc_RNA (1)...(19): siRNA sense strand
cgucugaauaugagaaaga

SEQ ID NO: 2563960 - RNA, 19 nt, Homo sapiens
  misc_RNA (1)...(19): siRNA sense strand
aggcaaagcaagaaauaca

SEQ ID NO: 2563961 - RNA, 19 nt, Homo sapiens
  misc_RNA (1)...(19): siRNA sense strand
cuuuacaagaagagcuuaa

SEQ ID NO: 2563962 - RNA, 19 nt, Homo sapiens
  misc_RNA (1)...(19): siRNA sense strand
ggaccagcagagagaagaa

SEQ ID NO: 2563963 - RNA, 19 nt, Homo sapiens
  misc_RNA (1)...(19): siRNA sense strand
gaaaaucagacaagagcaa

SEQ ID NO: 2563964 - RNA, 19 nt, Homo sapiens
  misc_RNA (1)...(19): siRNA sense strand
cccaaauggaugagcaaga

SEQ ID NO: 2563965 - RNA, 19 nt, Homo sapiens
  misc_RNA (1)...(19): siRNA sense strand
agaaauugaggcaaagcaa

SEQ ID NO: 2563966 - RNA, 19 nt, Homo sapiens
  misc_RNA (1)...(19): siRNA sense strand
gcuccgagagaaaggaaau

SEQ ID NO: 2563967 - RNA, 19 nt, Homo sapiens
  misc_RNA (1)...(19): siRNA sense strand
aaagaaaagccuaucgaaa

SEQ ID NO: 2563968 - RNA, 19 nt, Homo sapiens
  misc_RNA (1)...(19): siRNA sense strand
gagaaguugagaaaggaau

SEQ ID NO: 2563969 - RNA, 19 nt, Homo sapiens
  misc_RNA (1)...(19): siRNA sense strand
ccuucaaaugucuaggaaa

SEQ ID NO: 2563970 - RNA, 19 nt, Homo sapiens
  misc_RNA (1)...(19): siRNA sense strand
gaacaggagcuccaggcaa

SEQ ID NO: 2563971 - RNA, 19 nt, Homo sapiens
  misc_RNA (1)...(19): siRNA sense strand
gugaggaccagcagagaga

SEQ ID NO: 2563972 - RNA, 19 nt, Homo sapiens
  misc_RNA (1)...(19): siRNA sense strand
cauuguggagagaaagaaa

SEQ ID NO: 2563973 - RNA, 19 nt, Homo sapiens
  misc_RNA (1)...(19): siRNA sense strand
uggaugagcaagaccuaaa

SEQ ID NO: 2563974 - RNA, 19 nt, Homo sapiens
  misc_RNA (1)...(19): siRNA sense strand
aaauugaggcaaagcaaga

SEQ ID NO: 2563975 - RNA, 19 nt, Homo sapiens
  misc_RNA (1)...(19): siRNA sense strand
agcuagaacaaguaaacaa

SEQ ID NO: 2563976 - RNA, 19 nt, Homo sapiens
  misc_RNA (1)...(19): siRNA sense strand
caucagaacugcaacggca

SEQ ID NO: 2563977 - RNA, 19 nt, Homo sapiens
  misc_RNA (1)...(19): siRNA sense strand
ccgagagaaaggaaauaau

SEQ ID NO: 2563978 - RNA, 19 nt, Homo sapiens
  misc_RNA (1)...(19): siRNA sense strand
cgaaaggaauugaucgaag

SEQ ID NO: 2563979 - RNA, 19 nt, Homo sapiens
  misc_RNA (1)...(19): siRNA sense strand
aagaaaagccuaucgaaau

SEQ ID NO: 2563980 - RNA, 19 nt, Homo sapiens
  misc_RNA (1)...(19): siRNA sense strand
ggaugugcagaaagaguau

SEQ ID NO: 2563981 - RNA, 19 nt, Homo sapiens
  misc_RNA (1)...(19): siRNA sense strand
cugaaguugaaguuugaaa

SEQ ID NO: 2563982 - RNA, 19 nt, Homo sapiens
  misc_RNA (1)...(19): siRNA sense strand
aggaauugaucgaagccca

SEQ ID NO: 2563983 - RNA, 19 nt, Homo sapiens
  misc_RNA (1)...(19): siRNA sense strand
guugagaaaggaauggaau

SEQ ID NO: 2563984 - RNA, 19 nt, Homo sapiens
  misc_RNA (1)...(19): siRNA sense strand
aaaucagacaagagcaaaa

SEQ ID NO: 2563985 - RNA, 19 nt, Homo sapiens
  misc_RNA (1)...(19): siRNA sense strand
aggcagaaaaccaagcaaa

SEQ ID NO: 2563986 - RNA, 19 nt, Homo sapiens
  misc_RNA (1)...(19): siRNA sense strand
cggaaagcagcgucugaau

SEQ ID NO: 2563987 - RNA, 19 nt, Homo sapiens
  misc_RNA (1)...(19): siRNA sense strand
agaaaucacaagucugcaa

SEQ ID NO: 2563988 - RNA, 19 nt, Homo sapiens
  misc_RNA (1)...(19): siRNA sense strand
agagaaguugagaaaggaa

SEQ ID NO: 2563989 - RNA, 19 nt, Homo sapiens
  misc_RNA (1)...(19): siRNA sense strand
cuuaagaaggugagagcug

SEQ ID NO: 2563990 - RNA, 19 nt, Homo sapiens
  misc_RNA (1)...(19): siRNA sense strand
gcaaggugaacuagagaag

SEQ ID NO: 2563991 - RNA, 19 nt, Homo sapiens
  misc_RNA (1)...(19): siRNA sense strand
agcaaaggaugugcagaaa

SEQ ID NO: 2563992 - RNA, 19 nt, Homo sapiens
  misc_RNA (1)...(19): siRNA sense strand
gagcucaaacaguguaaaa

SEQ ID NO: 2563993 - RNA, 19 nt, Homo sapiens
  misc_RNA (1)...(19): siRNA sense strand
acagcaucuucgaaaggaa

SEQ ID NO: 2563994 - RNA, 19 nt, Homo sapiens
  misc_RNA (1)...(19): siRNA sense strand
caggaaaagcagucaauca

SEQ ID NO: 2563995 - RNA, 19 nt, Homo sapiens
  misc_RNA (1)...(19): siRNA sense strand
cgacacuacagaugcccaa

SEQ ID NO: 2563996 - RNA, 19 nt, Homo sapiens
  misc_RNA (1)...(19): siRNA sense strand
cuaggaaagaacuugagaa

SEQ ID NO: 2563997 - RNA, 19 nt, Homo sapiens
  misc_RNA (1)...(19): siRNA sense strand
uugaaaugacugagcagga

SEQ ID NO: 2563998 - RNA, 19 nt, Homo sapiens
  misc_RNA (1)...(19): siRNA sense strand
caaucacagaugagcucaa

SEQ ID NO: 2563999 - RNA, 19 nt, Homo sapiens
  misc_RNA (1)...(19): siRNA sense strand
cagggugcacagucagaaa

SEQ ID NO: 2564000 - RNA, 19 nt, Homo sapiens
  misc_RNA (1)...(19): siRNA sense strand
aagaaugggaagaaagcuu

SEQ ID NO: 2564001 - RNA, 19 nt, Homo sapiens
  misc_RNA (1)...(19): siRNA sense strand
auccaaagugugaauguaa

SEQ ID NO: 2564002 - RNA, 19 nt, Homo sapiens
  misc_RNA (1)...(19): siRNA sense strand
guucagaaaaucaucgaaa

SEQ ID NO: 2564003 - RNA, 19 nt, Homo sapiens
  misc_RNA (1)...(19): siRNA sense strand
ccuuaagagaugaggguaa

SEQ ID NO: 2564004 - RNA, 19 nt, Homo sapiens
  misc_RNA (1)...(19): siRNA sense strand
guaugaaagagaagcuaaa

SEQ ID NO: 2564005 - RNA, 19 nt, Homo sapiens
  misc_RNA (1)...(19): siRNA sense strand
guauugaggagguggaaau

SEQ ID NO: 2564006 - RNA, 19 nt, Homo sapiens
  misc_RNA (1)...(19): siRNA sense strand
acugaaaggaauugaagaa

SEQ ID NO: 2564007 - RNA, 19 nt, Homo sapiens
  misc_RNA (1)...(19): siRNA sense strand
uggaggaggaagaggaaau

SEQ ID NO: 2564008 - RNA, 19 nt, Homo sapiens
  misc_RNA (1)...(19): siRNA sense strand
gaauugaagaagaggagau

SEQ ID NO: 2564009 - RNA, 19 nt, Homo sapiens
  misc_RNA (1)...(19): siRNA sense strand
uggauaaguacaaggauau

SEQ ID NO: 2564010 - RNA, 19 nt, Homo sapiens
  misc_RNA (1)...(19): siRNA sense strand
aggacuuacuggagcaaau

SEQ ID NO: 2564011 - RNA, 19 nt, Homo sapiens
  misc_RNA (1)...(19): siRNA sense strand
gagcaaaucucaaagagca

SEQ ID NO: 2564012 - RNA, 19 nt, Homo sapiens
  misc_RNA (1)...(19): siRNA sense strand
augaaaugauggaggagga

SEQ ID NO: 2564013 - RNA, 19 nt, Homo sapiens
  misc_RNA (1)...(19): siRNA sense strand
aagaacgagacaaggguaa

SEQ ID NO: 2564014 - RNA, 19 nt, Homo sapiens
  misc_RNA (1)...(19): siRNA sense strand
uguagaaaauggagagaca

SEQ ID NO: 2564015 - RNA, 19 nt, Homo sapiens
  misc_RNA (1)...(19): siRNA sense strand
augaagaauguaaggagaa

SEQ ID NO: 2564016 - RNA, 19 nt, Homo sapiens
  misc_RNA (1)...(19): siRNA sense strand
aggaaaggagaguuugaaa

SEQ ID NO: 2564017 - RNA, 19 nt, Homo sapiens
  misc_RNA (1)...(19): siRNA sense strand
caaugagagauaugaagaa

SEQ ID NO: 2564018 - RNA, 19 nt, Homo sapiens
  misc_RNA (1)...(19): siRNA sense strand
aaaugauggaggaggaaga

SEQ ID NO: 2564019 - RNA, 19 nt, Homo sapiens
  misc_RNA (1)...(19): siRNA sense strand
aggaagaggaaaucccaaa

SEQ ID NO: 2564020 - RNA, 19 nt, Homo sapiens
  misc_RNA (1)...(19): siRNA sense strand
agaagaaauaagugaagca

SEQ ID NO: 2564021 - RNA, 19 nt, Homo sapiens
  misc_RNA (1)...(19): siRNA sense strand
gguggaaauaacagccuua

SEQ ID NO: 2564022 - RNA, 19 nt, Homo sapiens
  misc_RNA (1)...(19): siRNA sense strand
agaaauaagugaagcagag

SEQ ID NO: 2564023 - RNA, 19 nt, Homo sapiens
  misc_RNA (1)...(19): siRNA sense strand
aggacagacaagagaacau

SEQ ID NO: 2564024 - RNA, 19 nt, Homo sapiens
  misc_RNA (1)...(19): siRNA sense strand
aaccauuggaggacaaaua

SEQ ID NO: 2564025 - RNA, 19 nt, Homo sapiens
  misc_RNA (1)...(19): siRNA sense strand
uaugaagaauguaaggaga

SEQ ID NO: 2564026 - RNA, 19 nt, Homo sapiens
  misc_RNA (1)...(19): siRNA sense strand
gaccauugcaauuggaaaa

SEQ ID NO: 2564027 - RNA, 19 nt, Homo sapiens
  misc_RNA (1)...(19): siRNA sense strand
aggaaagugcccaugaaau

SEQ ID NO: 2564028 - RNA, 19 nt, Homo sapiens
  misc_RNA (1)...(19): siRNA sense strand
aguaugaaagagaagcuaa

SEQ ID NO: 2564029 - RNA, 19 nt, Homo sapiens
  misc_RNA (1)...(19): siRNA sense strand
agacaagagaacaugcaau

SEQ ID NO: 2564030 - RNA, 19 nt, Homo sapiens
  misc_RNA (1)...(19): siRNA sense strand
acguggaaguucuuggaau

SEQ ID NO: 2564031 - RNA, 19 nt, Homo sapiens
  misc_RNA (1)...(19): siRNA sense strand
acaaaaggacgcuugaaaa

SEQ ID NO: 2564032 - RNA, 19 nt, Homo sapiens
  misc_RNA (1)...(19): siRNA sense strand
caacaguaaauuggagcaa

SEQ ID NO: 2564033 - RNA, 19 nt, Homo sapiens
  misc_RNA (1)...(19): siRNA sense strand
agccaggaaaggagaguuu

SEQ ID NO: 2564034 - RNA, 19 nt, Homo sapiens
  misc_RNA (1)...(19): siRNA sense strand
gcacguagaugcuggcaag

SEQ ID NO: 2564035 - RNA, 19 nt, Homo sapiens
  misc_RNA (1)...(19): siRNA sense strand
gggagcacaaagaagaaau

SEQ ID NO: 2564036 - RNA, 19 nt, Homo sapiens
  misc_RNA (1)...(19): siRNA sense strand
ccaggaaaggagaguuuga

SEQ ID NO: 2564037 - RNA, 19 nt, Homo sapiens
  misc_RNA (1)...(19): siRNA sense strand
gauggaggaggaagaggaa

SEQ ID NO: 2564038 - RNA, 19 nt, Homo sapiens
  misc_RNA (1)...(19): siRNA sense strand
cucaaagagcagucggauu

SEQ ID NO: 2564039 - RNA, 19 nt, Homo sapiens
  misc_RNA (1)...(19): siRNA sense strand
uagugauuauagagcacaa

SEQ ID NO: 2564040 - RNA, 19 nt, Homo sapiens
  misc_RNA (1)...(19): siRNA sense strand
agaccauugcaauuggaaa

SEQ ID NO: 2564041 - RNA, 19 nt, Homo sapiens
  misc_RNA (1)...(19): siRNA sense strand
caaaucaggaagaacgaga

SEQ ID NO: 2564042 - RNA, 19 nt, Homo sapiens
  misc_RNA (1)...(19): siRNA sense strand
aagaaucaugggagcacaa

SEQ ID NO: 2564043 - RNA, 19 nt, Homo sapiens
  misc_RNA (1)...(19): siRNA sense strand
cagaaaugucuccagaaga

SEQ ID NO: 2564044 - RNA, 19 nt, Homo sapiens
  misc_RNA (1)...(19): siRNA sense strand
ccaucugccuugagaccuu

SEQ ID NO: 2564045 - RNA, 19 nt, Homo sapiens
  misc_RNA (1)...(19): siRNA sense strand
gguuccagagaaagacuaa

SEQ ID NO: 2564046 - RNA, 19 nt, Homo sapiens
  misc_RNA (1)...(19): siRNA sense strand
gacaaaaggacgcuugaaa

SEQ ID NO: 2564047 - RNA, 19 nt, Homo sapiens
  misc_RNA (1)...(19): siRNA sense strand
aagaaauaagugaagcaga

SEQ ID NO: 2564048 - RNA, 19 nt, Homo sapiens
  misc_RNA (1)...(19): siRNA sense strand
guuuauacuuugugauccu

SEQ ID NO: 2564049 - RNA, 19 nt, Homo sapiens
  misc_RNA (1)...(19): siRNA sense strand
gacuggaaugguugacaaa

SEQ ID NO: 2564050 - RNA, 19 nt, Homo sapiens
  misc_RNA (1)...(19): siRNA sense strand
agaacgagacaaggguaaa

SEQ ID NO: 2564051 - RNA, 19 nt, Homo sapiens
  misc_RNA (1)...(19): siRNA sense strand
aaagacagcagguguaaaa

SEQ ID NO: 2564052 - RNA, 19 nt, Homo sapiens
  misc_RNA (1)...(19): siRNA sense strand
gucaaccauuggaggacaa

SEQ ID NO: 2564053 - RNA, 19 nt, Homo sapiens
  misc_RNA (1)...(19): siRNA sense strand
aaucaugggagcacaaaga

SEQ ID NO: 2564054 - RNA, 19 nt, Homo sapiens
  misc_RNA (1)...(19): siRNA sense strand
uggcaaagacagcaggugu

SEQ ID NO: 2564055 - RNA, 19 nt, Homo sapiens
  misc_RNA (1)...(19): siRNA sense strand
aagaauguaaggagaaacu

SEQ ID NO: 2564056 - RNA, 19 nt, Homo sapiens
  misc_RNA (1)...(19): siRNA sense strand
ggaccaaucaggcugccaa

SEQ ID NO: 2564057 - RNA, 19 nt, Homo sapiens
  misc_RNA (1)...(19): siRNA sense strand
gauagugauuauagagcac

SEQ ID NO: 2564058 - RNA, 19 nt, Homo sapiens
  misc_RNA (1)...(19): siRNA sense strand
gcucacaggccuuuggcaa

SEQ ID NO: 2564059 - RNA, 19 nt, Homo sapiens
  misc_RNA (1)...(19): siRNA sense strand
aguugagaggugaggacaa

SEQ ID NO: 2564060 - RNA, 19 nt, Homo sapiens
  misc_RNA (1)...(19): siRNA sense strand
aggcaagcccugaagaaca

SEQ ID NO: 2564061 - RNA, 19 nt, Homo sapiens
  misc_RNA (1)...(19): siRNA sense strand
ccuucaacauggcgggaca

SEQ ID NO: 2564062 - RNA, 19 nt, Homo sapiens
  misc_RNA (1)...(19): siRNA sense strand
cugucagugcggagugaaa

SEQ ID NO: 2564063 - RNA, 19 nt, Homo sapiens
  misc_RNA (1)...(19): siRNA sense strand
gguggauggcugaggcuga

SEQ ID NO: 2564064 - RNA, 19 nt, Homo sapiens
  misc_RNA (1)...(19): siRNA sense strand
ugaucaacacccagggcau

SEQ ID NO: 2564065 - RNA, 19 nt, Homo sapiens
  misc_RNA (1)...(19): siRNA sense strand
augcccacuuugagaagaa

SEQ ID NO: 2564066 - RNA, 19 nt, Homo sapiens
  misc_RNA (1)...(19): siRNA sense strand
cagcaauccucaaacggca

SEQ ID NO: 2564067 - RNA, 19 nt, Homo sapiens
  misc_RNA (1)...(19): siRNA sense strand
cuggaggagauccgagaau

SEQ ID NO: 2564068 - RNA, 19 nt, Homo sapiens
  misc_RNA (1)...(19): siRNA sense strand
cugcaaaaucuacaagcua

SEQ ID NO: 2564069 - RNA, 19 nt, Homo sapiens
  misc_RNA (1)...(19): siRNA sense strand
gcaggaaguucaagggcau

SEQ ID NO: 2564070 - RNA, 19 nt, Homo sapiens
  misc_RNA (1)...(19): siRNA sense strand
aggaggaggaggaggagaa

SEQ ID NO: 2564071 - RNA, 19 nt, Homo sapiens
  misc_RNA (1)...(19): siRNA sense strand
gagcaagggaagcggguga

SEQ ID NO: 2564072 - RNA, 19 nt, Homo sapiens
  misc_RNA (1)...(19): siRNA sense strand
caucaagaagggaggcgua

SEQ ID NO: 2564073 - RNA, 19 nt, Homo sapiens
  misc_RNA (1)...(19): siRNA sense strand
aagaagaagaagaaggguu

SEQ ID NO: 2564074 - RNA, 19 nt, Homo sapiens
  misc_RNA (1)...(19): siRNA sense strand
acgaggaugaggaggagaa

SEQ ID NO: 2564075 - RNA, 19 nt, Homo sapiens
  misc_RNA (1)...(19): siRNA sense strand
aggacaaggaggaggagga

SEQ ID NO: 2564076 - RNA, 19 nt, Homo sapiens
  misc_RNA (1)...(19): siRNA sense strand
cguucgaguuccuaagaau

SEQ ID NO: 2564077 - RNA, 19 nt, Homo sapiens
  misc_RNA (1)...(19): siRNA sense strand
gcagugaguucaaccgcaa

SEQ ID NO: 2564078 - RNA, 19 nt, Homo sapiens
  misc_RNA (1)...(19): siRNA sense strand
aggagagugaggaggagaa

SEQ ID NO: 2564079 - RNA, 19 nt, Homo sapiens
  misc_RNA (1)...(19): siRNA sense strand
gagugggagaggaggaaca

SEQ ID NO: 2564080 - RNA, 19 nt, Homo sapiens
  misc_RNA (1)...(19): siRNA sense strand
aggaugaggaggagaagga

SEQ ID NO: 2564081 - RNA, 19 nt, Homo sapiens
  misc_RNA (1)...(19): siRNA sense strand
augaggaggagaaggagaa

SEQ ID NO: 2564082 - RNA, 19 nt, Homo sapiens
  misc_RNA (1)...(19): siRNA sense strand
guucagacgacgaggccuu

SEQ ID NO: 2564083 - RNA, 19 nt, Homo sapiens
  misc_RNA (1)...(19): siRNA sense strand
acaaggaggaggaggagga

SEQ ID NO: 2564084 - RNA, 19 nt, Homo sapiens
  misc_RNA (1)...(19): siRNA sense strand
ccuaagaauacaaccaaaa

SEQ ID NO: 2564085 - RNA, 19 nt, Homo sapiens
  misc_RNA (1)...(19): siRNA sense strand
ggaggaagaaguacggcau

SEQ ID NO: 2564086 - RNA, 19 nt, Homo sapiens
  misc_RNA (1)...(19): siRNA sense strand
cugaauacgucguucgagu

SEQ ID NO: 2564087 - RNA, 19 nt, Homo sapiens
  misc_RNA (1)...(19): siRNA sense strand
aggacgaggaugaggagga

SEQ ID NO: 2564088 - RNA, 19 nt, Homo sapiens
  misc_RNA (1)...(19): siRNA sense strand
agaagaagaagaaggguuc

SEQ ID NO: 2564089 - RNA, 19 nt, Homo sapiens
  misc_RNA (1)...(19): siRNA sense strand
gaugaggaggagaaggaga

SEQ ID NO: 2564090 - RNA, 19 nt, Homo sapiens
  misc_RNA (1)...(19): siRNA sense strand
aggaccaggacgaggauga

SEQ ID NO: 2564091 - RNA, 19 nt, Homo sapiens
  misc_RNA (1)...(19): siRNA sense strand
gugaggagagugaggagga

SEQ ID NO: 2564092 - RNA, 19 nt, Homo sapiens
  misc_RNA (1)...(19): siRNA sense strand
gcaaacucgagcaagggaa

SEQ ID NO: 2564093 - RNA, 19 nt, Homo sapiens
  misc_RNA (1)...(19): siRNA sense strand
gaggagugggagaggagga

SEQ ID NO: 2564094 - RNA, 19 nt, Homo sapiens
  misc_RNA (1)...(19): siRNA sense strand
cagugaacguguuggccca

SEQ ID NO: 2564095 - RNA, 19 nt, Homo sapiens
  misc_RNA (1)...(19): siRNA sense strand
cugaggaggacaaggagga

SEQ ID NO: 2564096 - RNA, 19 nt, Homo sapiens
  misc_RNA (1)...(19): siRNA sense strand
gcgagaugccugcagccaa

SEQ ID NO: 2564097 - RNA, 19 nt, Homo sapiens
  misc_RNA (1)...(19): siRNA sense strand
acaguagugaggagaguga

SEQ ID NO: 2564098 - RNA, 19 nt, Homo sapiens
  misc_RNA (1)...(19): siRNA sense strand
cacccaagagagagcggaa

SEQ ID NO: 2564099 - RNA, 19 nt, Homo sapiens
  misc_RNA (1)...(19): siRNA sense strand
gaagaaggguucagacgac

SEQ ID NO: 2564100 - RNA, 19 nt, Homo sapiens
  misc_RNA (1)...(19): siRNA sense strand
cggcaaaucaggcaggaag

SEQ ID NO: 2564101 - RNA, 19 nt, Homo sapiens
  misc_RNA (1)...(19): siRNA sense strand
aaaucuaccaagaggagga

SEQ ID NO: 2564102 - RNA, 19 nt, Homo sapiens
  misc_RNA (1)...(19): siRNA sense strand
gcuccgggucaacggcaaa

SEQ ID NO: 2564103 - RNA, 19 nt, Homo sapiens
  misc_RNA (1)...(19): siRNA sense strand
ccagaaugucacugaauac

SEQ ID NO: 2564104 - RNA, 19 nt, Homo sapiens
  misc_RNA (1)...(19): siRNA sense strand
aggaggacaaggaggagga

SEQ ID NO: 2564105 - RNA, 19 nt, Homo sapiens
  misc_RNA (1)...(19): siRNA sense strand
guacagagagagagggaga

SEQ ID NO: 2564106 - RNA, 19 nt, Homo sapiens
  misc_RNA (1)...(19): siRNA sense strand
gggucaaggacaaguacaa

SEQ ID NO: 2564107 - RNA, 19 nt, Homo sapiens
  misc_RNA (1)...(19): siRNA sense strand
agaacaaaauccuggaaau

SEQ ID NO: 2564108 - RNA, 19 nt, Homo sapiens
  misc_RNA (1)...(19): siRNA sense strand
gugcagacuaagaagaaga

SEQ ID NO: 2564109 - RNA, 19 nt, Homo sapiens
  misc_RNA (1)...(19): siRNA sense strand
ccaucaacugcuugggauu

SEQ ID NO: 2564110 - RNA, 19 nt, Homo sapiens
  misc_RNA (1)...(19): siRNA sense strand
gcagcaaggaagaacaaaa

SEQ ID NO: 2564111 - RNA, 19 nt, Homo sapiens
  misc_RNA (1)...(19): siRNA sense strand
guguuaaaggaaauagcua

SEQ ID NO: 2564112 - RNA, 19 nt, Homo sapiens
  misc_RNA (1)...(19): siRNA sense strand
gaguacagagagagaggga

SEQ ID NO: 2564113 - RNA, 19 nt, Homo sapiens
  misc_RNA (1)...(19): siRNA sense strand
cggccacuauccaggacaa

SEQ ID NO: 2564114 - RNA, 19 nt, Homo sapiens
  misc_RNA (1)...(19): siRNA sense strand
uguacuggguucuggguca

SEQ ID NO: 2564115 - RNA, 19 nt, Homo sapiens
  misc_RNA (1)...(19): siRNA sense strand
cgucugagcccgaugcuga

SEQ ID NO: 2564116 - RNA, 19 nt, Homo sapiens
  misc_RNA (1)...(19): siRNA sense strand
cgucuuugucugugcaaca

SEQ ID NO: 2564117 - RNA, 19 nt, Homo sapiens
  misc_RNA (1)...(19): siRNA sense strand
uggcagcaaggaagaacaa

SEQ ID NO: 2564118 - RNA, 19 nt, Homo sapiens
  misc_RNA (1)...(19): siRNA sense strand
ugaggaguacagagagaga

SEQ ID NO: 2564119 - RNA, 19 nt, Homo sapiens
  misc_RNA (1)...(19): siRNA sense strand
cugugcagacuaagaagaa

SEQ ID NO: 2564120 - RNA, 19 nt, Homo sapiens
  misc_RNA (1)...(19): siRNA sense strand
ucauggacugguuggcaaa

SEQ ID NO: 2564121 - RNA, 19 nt, Homo sapiens
  misc_RNA (1)...(19): siRNA sense strand
aggccaucgaggaagacaa

SEQ ID NO: 2564122 - RNA, 19 nt, Homo sapiens
  misc_RNA (1)...(19): siRNA sense strand
aagaaaagugccuucaaaa

SEQ ID NO: 2564123 - RNA, 19 nt, Homo sapiens
  misc_RNA (1)...(19): siRNA sense strand
gucauggacugguuggcaa

SEQ ID NO: 2564124 - RNA, 19 nt, Homo sapiens
  misc_RNA (1)...(19): siRNA sense strand
cagcaaggaagaacaaaau

SEQ ID NO: 2564125 - RNA, 19 nt, Homo sapiens
  misc_RNA (1)...(19): siRNA sense strand
ccaaguggaugauggugca

SEQ ID NO: 2564126 - RNA, 19 nt, Homo sapiens
  misc_RNA (1)...(19): siRNA sense strand
guuaaacucugguucguga

SEQ ID NO: 2564127 - RNA, 19 nt, Homo sapiens
  misc_RNA (1)...(19): siRNA sense strand
augaugaugcugaagaaaa

SEQ ID NO: 2564128 - RNA, 19 nt, Homo sapiens
  misc_RNA (1)...(19): siRNA sense strand
agauagaacugcagagaca

SEQ ID NO: 2564129 - RNA, 19 nt, Homo sapiens
  misc_RNA (1)...(19): siRNA sense strand
cgucaauauuguaggccua

SEQ ID NO: 2564130 - RNA, 19 nt, Homo sapiens
  misc_RNA (1)...(19): siRNA sense strand
cagaaaucuaagagacaaa

SEQ ID NO: 2564131 - RNA, 19 nt, Homo sapiens
  misc_RNA (1)...(19): siRNA sense strand
cauccaaguuccagagauu

SEQ ID NO: 2564132 - RNA, 19 nt, Homo sapiens
  misc_RNA (1)...(19): siRNA sense strand
aggaaaagcuguugcuaua

SEQ ID NO: 2564133 - RNA, 19 nt, Homo sapiens
  misc_RNA (1)...(19): siRNA sense strand
ugaaauuaacagugagcaa

SEQ ID NO: 2564134 - RNA, 19 nt, Homo sapiens
  misc_RNA (1)...(19): siRNA sense strand
uggagaaacaccuggaaua

SEQ ID NO: 2564135 - RNA, 19 nt, Homo sapiens
  misc_RNA (1)...(19): siRNA sense strand
gcaagagagcauuagguaa

SEQ ID NO: 2564136 - RNA, 19 nt, Homo sapiens
  misc_RNA (1)...(19): siRNA sense strand
cuacaaaggcagcaggcua

SEQ ID NO: 2564137 - RNA, 19 nt, Homo sapiens
  misc_RNA (1)...(19): siRNA sense strand
gcguagagcaaaugugcaa

SEQ ID NO: 2564138 - RNA, 19 nt, Homo sapiens
  misc_RNA (1)...(19): siRNA sense strand
ccaaauuaauugacagcau

SEQ ID NO: 2564139 - RNA, 19 nt, Homo sapiens
  misc_RNA (1)...(19): siRNA sense strand
uaaucaaagcguagagcaa

SEQ ID NO: 2564140 - RNA, 19 nt, Homo sapiens
  misc_RNA (1)...(19): siRNA sense strand
aagcaaagcaugcgagaca

SEQ ID NO: 2564141 - RNA, 19 nt, Homo sapiens
  misc_RNA (1)...(19): siRNA sense strand
caaacaaaauggagaaaca

SEQ ID NO: 2564142 - RNA, 19 nt, Homo sapiens
  misc_RNA (1)...(19): siRNA sense strand
cagaaagaguccaagugaa

SEQ ID NO: 2564143 - RNA, 19 nt, Homo sapiens
  misc_RNA (1)...(19): siRNA sense strand
cccaagagcagcaaggaaa

SEQ ID NO: 2564144 - RNA, 19 nt, Homo sapiens
  misc_RNA (1)...(19): siRNA sense strand
ugugaaacuuguagaaaca

SEQ ID NO: 2564145 - RNA, 19 nt, Homo sapiens
  misc_RNA (1)...(19): siRNA sense strand
cagaagaaucagaugaaaa

SEQ ID NO: 2564146 - RNA, 19 nt, Homo sapiens
  misc_RNA (1)...(19): siRNA sense strand
aggcagaagucguugcauu

SEQ ID NO: 2564147 - RNA, 19 nt, Homo sapiens
  misc_RNA (1)...(19): siRNA sense strand
cugcuuugccacagggaaa

SEQ ID NO: 2564148 - RNA, 19 nt, Homo sapiens
  misc_RNA (1)...(19): siRNA sense strand
cagaagaaccagaucgaga

SEQ ID NO: 2564149 - RNA, 19 nt, Homo sapiens
  misc_RNA (1)...(19): siRNA sense strand
uugugaagaauguggaaua

SEQ ID NO: 2564150 - RNA, 19 nt, Homo sapiens
  misc_RNA (1)...(19): siRNA sense strand
cuguauaagcacaagaaau

SEQ ID NO: 2564151 - RNA, 19 nt, Homo sapiens
  misc_RNA (1)...(19): siRNA sense strand
aggcaggggaagaggaaaa

SEQ ID NO: 2564152 - RNA, 19 nt, Homo sapiens
  misc_RNA (1)...(19): siRNA sense strand
cuaaaggaaaucugacaaa

SEQ ID NO: 2564153 - RNA, 19 nt, Homo sapiens
  misc_RNA (1)...(19): siRNA sense strand
cuuacaggcugguguuaaa

SEQ ID NO: 2564154 - RNA, 19 nt, Homo sapiens
  misc_RNA (1)...(19): siRNA sense strand
agaaacagguauaggaaac

SEQ ID NO: 2564155 - RNA, 19 nt, Homo sapiens
  misc_RNA (1)...(19): siRNA sense strand
gccaaucagugaagaacaa

SEQ ID NO: 2564156 - RNA, 19 nt, Homo sapiens
  misc_RNA (1)...(19): siRNA sense strand
ugaacaggauacagaagaa

SEQ ID NO: 2564157 - RNA, 19 nt, Homo sapiens
  misc_RNA (1)...(19): siRNA sense strand
gugcaaucuucuucugaaa

SEQ ID NO: 2564158 - RNA, 19 nt, Homo sapiens
  misc_RNA (1)...(19): siRNA sense strand
agguauaggaaacuggaaa

SEQ ID NO: 2564159 - RNA, 19 nt, Homo sapiens
  misc_RNA (1)...(19): siRNA sense strand
acaauaaccaagaaaggaa

SEQ ID NO: 2564160 - RNA, 19 nt, Homo sapiens
  misc_RNA (1)...(19): siRNA sense strand
gcaaaaugaaaguggaaca

SEQ ID NO: 2564161 - RNA, 19 nt, Homo sapiens
  misc_RNA (1)...(19): siRNA sense strand
ggacaguaagcgccaguaa

SEQ ID NO: 2564162 - RNA, 19 nt, Homo sapiens
  misc_RNA (1)...(19): siRNA sense strand
acaucaaacuccagcucua

SEQ ID NO: 2564163 - RNA, 19 nt, Homo sapiens
  misc_RNA (1)...(19): siRNA sense strand
uaacagugagcaagauaaa

SEQ ID NO: 2564164 - RNA, 19 nt, Homo sapiens
  misc_RNA (1)...(19): siRNA sense strand
agacaaaauugaagaagca

SEQ ID NO: 2564165 - RNA, 19 nt, Homo sapiens
  misc_RNA (1)...(19): siRNA sense strand
cugugugacuuguggauuu

SEQ ID NO: 2564166 - RNA, 19 nt, Homo sapiens
  misc_RNA (1)...(19): siRNA sense strand
guuggagacuaaugagaau

SEQ ID NO: 2564167 - RNA, 19 nt, Homo sapiens
  misc_RNA (1)...(19): siRNA sense strand
ccugaguccucgaaguuua

SEQ ID NO: 2564168 - RNA, 19 nt, Homo sapiens
  misc_RNA (1)...(19): siRNA sense strand
ucaucaagggcgagggaca

SEQ ID NO: 2564169 - RNA, 19 nt, Homo sapiens
  misc_RNA (1)...(19): siRNA sense strand
ucacaggaucacugacaaa

SEQ ID NO: 2564170 - RNA, 19 nt, Homo sapiens
  misc_RNA (1)...(19): siRNA sense strand
guuaaaggaacuucggaau

SEQ ID NO: 2564171 - RNA, 19 nt, Homo sapiens
  misc_RNA (1)...(19): siRNA sense strand
ccuacaguccagcgggaaa

SEQ ID NO: 2564172 - RNA, 19 nt, Homo sapiens
  misc_RNA (1)...(19): siRNA sense strand
gugugaaugcagugccaua

SEQ ID NO: 2564173 - RNA, 19 nt, Homo sapiens
  misc_RNA (1)...(19): siRNA sense strand
ggguagcaagccagauaaa

SEQ ID NO: 2564174 - RNA, 19 nt, Homo sapiens
  misc_RNA (1)...(19): siRNA sense strand
acuuguagaaacagguaua

SEQ ID NO: 2564175 - RNA, 19 nt, Homo sapiens
  misc_RNA (1)...(19): siRNA sense strand
agaaagaaggagaggccca

SEQ ID NO: 2564176 - RNA, 19 nt, Homo sapiens
  misc_RNA (1)...(19): siRNA sense strand
acaaugaagcuuugguaga

SEQ ID NO: 2564177 - RNA, 19 nt, Homo sapiens
  misc_RNA (1)...(19): siRNA sense strand
ccagugggacggagaacaa

SEQ ID NO: 2564178 - RNA, 19 nt, Homo sapiens
  misc_RNA (1)...(19): siRNA sense strand
gaguuaaugaagcuaguaa

SEQ ID NO: 2564179 - RNA, 19 nt, Homo sapiens
  misc_RNA (1)...(19): siRNA sense strand
ccagaaaacuucagccuau

SEQ ID NO: 2564180 - RNA, 19 nt, Homo sapiens
  misc_RNA (1)...(19): siRNA sense strand
ugucaaaugcugaaacuuu

SEQ ID NO: 2564181 - RNA, 19 nt, Homo sapiens
  misc_RNA (1)...(19): siRNA sense strand
acuaagaggaagucaguca

SEQ ID NO: 2564182 - RNA, 19 nt, Homo sapiens
  misc_RNA (1)...(19): siRNA sense strand
gguauaggaaacuggaaaa

SEQ ID NO: 2564183 - RNA, 19 nt, Homo sapiens
  misc_RNA (1)...(19): siRNA sense strand
caaagguagccaugagaga

SEQ ID NO: 2564184 - RNA, 19 nt, Homo sapiens
  misc_RNA (1)...(19): siRNA sense strand
cugcaucagaacagauuaa

SEQ ID NO: 2564185 - RNA, 19 nt, Homo sapiens
  misc_RNA (1)...(19): siRNA sense strand
ccuuugaaauguacagaca

SEQ ID NO: 2564186 - RNA, 19 nt, Homo sapiens
  misc_RNA (1)...(19): siRNA sense strand
ggcacaaggcccacauaua

SEQ ID NO: 2564187 - RNA, 19 nt, Homo sapiens
  misc_RNA (1)...(19): siRNA sense strand
aagaaaagucagagaaguu

SEQ ID NO: 2564188 - RNA, 19 nt, Homo sapiens
  misc_RNA (1)...(19): siRNA sense strand
cagaugaggaugacaauga

SEQ ID NO: 2564189 - RNA, 19 nt, Homo sapiens
  misc_RNA (1)...(19): siRNA sense strand
cucacaagaaacagaauua

SEQ ID NO: 2564190 - RNA, 19 nt, Homo sapiens
  misc_RNA (1)...(19): siRNA sense strand
aagcuuugguagaugacaa

SEQ ID NO: 2564191 - RNA, 19 nt, Homo sapiens
  misc_RNA (1)...(19): siRNA sense strand
guucagcagcccaggacaa

SEQ ID NO: 2564192 - RNA, 19 nt, Homo sapiens
  misc_RNA (1)...(19): siRNA sense strand
gaaaauaucuguuggucga

SEQ ID NO: 2564193 - RNA, 19 nt, Homo sapiens
  misc_RNA (1)...(19): siRNA sense strand
ugacagaguuaccgaaagu

SEQ ID NO: 2564194 - RNA, 19 nt, Homo sapiens
  misc_RNA (1)...(19): siRNA sense strand
guagaaacagguauaggaa

SEQ ID NO: 2564195 - RNA, 19 nt, Homo sapiens
  misc_RNA (1)...(19): siRNA sense strand
cccagaaaucuaagagaca

SEQ ID NO: 2564196 - RNA, 19 nt, Homo sapiens
  misc_RNA (1)...(19): siRNA sense strand
caauagagcaugugcaaag

SEQ ID NO: 2564197 - RNA, 19 nt, Homo sapiens
  misc_RNA (1)...(19): siRNA sense strand
cagaaaaugugauagguga

SEQ ID NO: 2564198 - RNA, 19 nt, Homo sapiens
  misc_RNA (1)...(19): siRNA sense strand
ccagaaaggcgacaugaau

SEQ ID NO: 2564199 - RNA, 19 nt, Homo sapiens
  misc_RNA (1)...(19): siRNA sense strand
gggcaaagccugagagagg

SEQ ID NO: 2564200 - RNA, 19 nt, Homo sapiens
  misc_RNA (1)...(19): siRNA sense strand
ggaacaaagagaugggcga

SEQ ID NO: 2564201 - RNA, 19 nt, Homo sapiens
  misc_RNA (1)...(19): siRNA sense strand
gauccauugugguggccaa

SEQ ID NO: 2564202 - RNA, 19 nt, Homo sapiens
  misc_RNA (1)...(19): siRNA sense strand
gaauauagcucucugcgau

SEQ ID NO: 2564203 - RNA, 19 nt, Homo sapiens
  misc_RNA (1)...(19): siRNA sense strand
gugacggagugaaggacau

SEQ ID NO: 2564204 - RNA, 19 nt, Homo sapiens
  misc_RNA (1)...(19): siRNA sense strand
ggugaaacacggugacgga

SEQ ID NO: 2564205 - RNA, 19 nt, Homo sapiens
  misc_RNA (1)...(19): siRNA sense strand
cuuucgaggaggagcagaa

SEQ ID NO: 2564206 - RNA, 19 nt, Homo sapiens
  misc_RNA (1)...(19): siRNA sense strand
ugguggagaagaugaacua

SEQ ID NO: 2564207 - RNA, 19 nt, Homo sapiens
  misc_RNA (1)...(19): siRNA sense strand
agaagaagucccagaucca

SEQ ID NO: 2564208 - RNA, 19 nt, Homo sapiens
  misc_RNA (1)...(19): siRNA sense strand
agacaucaucacagcgauu

SEQ ID NO: 2564209 - RNA, 19 nt, Homo sapiens
  misc_RNA (1)...(19): siRNA sense strand
gcuucugguccguggauga

SEQ ID NO: 2564210 - RNA, 19 nt, Homo sapiens
  misc_RNA (1)...(19): siRNA sense strand
guggagaagaugaacuaca

SEQ ID NO: 2564211 - RNA, 19 nt, Homo sapiens
  misc_RNA (1)...(19): siRNA sense strand
gcuuugaaccucuagccua

SEQ ID NO: 2564212 - RNA, 19 nt, Homo sapiens
  misc_RNA (1)...(19): siRNA sense strand
ucaaggugaaggagaacau

SEQ ID NO: 2564213 - RNA, 19 nt, Homo sapiens
  misc_RNA (1)...(19): siRNA sense strand
cugaagacggccaagauca

SEQ ID NO: 2564214 - RNA, 19 nt, Homo sapiens
  misc_RNA (1)...(19): siRNA sense strand
ccaagaucaaggugaagga

SEQ ID NO: 2564215 - RNA, 19 nt, Homo sapiens
  misc_RNA (1)...(19): siRNA sense strand
gaacaaagagaugggcgau

SEQ ID NO: 2564216 - RNA, 19 nt, Homo sapiens
  misc_RNA (1)...(19): siRNA sense strand
gagcaagacaaguuuggga

SEQ ID NO: 2564217 - RNA, 19 nt, Homo sapiens
  misc_RNA (1)...(19): siRNA sense strand
cgcaggugcacacggaaua

SEQ ID NO: 2564218 - RNA, 19 nt, Homo sapiens
  misc_RNA (1)...(19): siRNA sense strand
ccaacuaugaagaguccau

SEQ ID NO: 2564219 - RNA, 19 nt, Homo sapiens
  misc_RNA (1)...(19): siRNA sense strand
ggcaagaagaagucccaga

SEQ ID NO: 2564220 - RNA, 19 nt, Homo sapiens
  misc_RNA (1)...(19): siRNA sense strand
aaguaguucuagaugacaa

SEQ ID NO: 2564221 - RNA, 19 nt, Homo sapiens
  misc_RNA (1)...(19): siRNA sense strand
gaguauugguugaaaggag

SEQ ID NO: 2564222 - RNA, 19 nt, Homo sapiens
  misc_RNA (1)...(19): siRNA sense strand
uucuagaugacaaggauua

SEQ ID NO: 2564223 - RNA, 19 nt, Homo sapiens
  misc_RNA (1)...(19): siRNA sense strand
cugcugaaacuguaaccaa

SEQ ID NO: 2564224 - RNA, 19 nt, Homo sapiens
  misc_RNA (1)...(19): siRNA sense strand
agaauauggaggcaccaaa

SEQ ID NO: 2564225 - RNA, 19 nt, Homo sapiens
  misc_RNA (1)...(19): siRNA sense strand
auaaagaagaugagggaga

SEQ ID NO: 2564226 - RNA, 19 nt, Homo sapiens
  misc_RNA (1)...(19): siRNA sense strand
aggaagacaaggagagcaa

SEQ ID NO: 2564227 - RNA, 19 nt, Homo sapiens
  misc_RNA (1)...(19): siRNA sense strand
cggaauacacacugagaau

SEQ ID NO: 2564228 - RNA, 19 nt, Homo sapiens
  misc_RNA (1)...(19): siRNA sense strand
aggugaagacugcgggaaa

SEQ ID NO: 2564229 - RNA, 19 nt, Homo sapiens
  misc_RNA (1)...(19): siRNA sense strand
gaauaaagaagaugaggga

SEQ ID NO: 2564230 - RNA, 19 nt, Homo sapiens
  misc_RNA (1)...(19): siRNA sense strand
caugaagggcuuugaggaa

SEQ ID NO: 2564231 - RNA, 19 nt, Homo sapiens
  misc_RNA (1)...(19): siRNA sense strand
uggucuagcuccugggcaa

SEQ ID NO: 2564232 - RNA, 19 nt, Homo sapiens
  misc_RNA (1)...(19): siRNA sense strand
ucacagaggacgagaacca

SEQ ID NO: 2564233 - RNA, 19 nt, Homo sapiens
  misc_RNA (1)...(19): siRNA sense strand
augaaggauuuaugggcaa

SEQ ID NO: 2564234 - RNA, 19 nt, Homo sapiens
  misc_RNA (1)...(19): siRNA sense strand
cugcgaaccuggcuggaaa

SEQ ID NO: 2564235 - RNA, 19 nt, Homo sapiens
  misc_RNA (1)...(19): siRNA sense strand
gcacauguguagauggcuu

SEQ ID NO: 2564236 - RNA, 19 nt, Homo sapiens
  misc_RNA (1)...(19): siRNA sense strand
caaauguguaugugagcaa

SEQ ID NO: 2564237 - RNA, 19 nt, Homo sapiens
  misc_RNA (1)...(19): siRNA sense strand
acucaggacuucagcacaa

SEQ ID NO: 2564238 - RNA, 19 nt, Homo sapiens
  misc_RNA (1)...(19): siRNA sense strand
gcuacaagcugaaggugga

SEQ ID NO: 2564239 - RNA, 19 nt, Homo sapiens
  misc_RNA (1)...(19): siRNA sense strand
ccuucagagcccagcgaaa

SEQ ID NO: 2564240 - RNA, 19 nt, Homo sapiens
  misc_RNA (1)...(19): siRNA sense strand
ccagacagucagugcuaua

SEQ ID NO: 2564241 - RNA, 19 nt, Homo sapiens
  misc_RNA (1)...(19): siRNA sense strand
agccaaagaaccugaaauu

SEQ ID NO: 2564242 - RNA, 19 nt, Homo sapiens
  misc_RNA (1)...(19): siRNA sense strand
gggcaagaguaugagauau

SEQ ID NO: 2564243 - RNA, 19 nt, Homo sapiens
  misc_RNA (1)...(19): siRNA sense strand
gggaacugaauaugggauu

SEQ ID NO: 2564244 - RNA, 19 nt, Homo sapiens
  misc_RNA (1)...(19): siRNA sense strand
agucugagccacuggaaau

SEQ ID NO: 2564245 - RNA, 19 nt, Homo sapiens
  misc_RNA (1)...(19): siRNA sense strand
uggccaaauuugaccgcua

SEQ ID NO: 2564246 - RNA, 19 nt, Homo sapiens
  misc_RNA (1)...(19): siRNA sense strand
gcaucugcaacgagggcua

SEQ ID NO: 2564247 - RNA, 19 nt, Homo sapiens
  misc_RNA (1)...(19): siRNA sense strand
ggaagacaccguuggccaa

SEQ ID NO: 2564248 - RNA, 19 nt, Homo sapiens
  misc_RNA (1)...(19): siRNA sense strand
gcaauguacugcaggagca

SEQ ID NO: 2564249 - RNA, 19 nt, Homo sapiens
  misc_RNA (1)...(19): siRNA sense strand
gcaucuguuucgaaggcua

SEQ ID NO: 2564250 - RNA, 19 nt, Homo sapiens
  misc_RNA (1)...(19): siRNA sense strand
ggcuaugacugcagugaca

SEQ ID NO: 2564251 - RNA, 19 nt, Homo sapiens
  misc_RNA (1)...(19): siRNA sense strand
ugggcaagaguaugagaua

SEQ ID NO: 2564252 - RNA, 19 nt, Homo sapiens
  misc_RNA (1)...(19): siRNA sense strand
gcaaagacugcaaggagca

SEQ ID NO: 2564253 - RNA, 19 nt, Homo sapiens
  misc_RNA (1)...(19): siRNA sense strand
ugacaaggacacagauuca

SEQ ID NO: 2564254 - RNA, 19 nt, Homo sapiens
  misc_RNA (1)...(19): siRNA sense strand
uugccauccuggagaacaa

SEQ ID NO: 2564255 - RNA, 19 nt, Homo sapiens
  misc_RNA (1)...(19): siRNA sense strand
ccgggaacacaguggagua

SEQ ID NO: 2564256 - RNA, 19 nt, Homo sapiens
  misc_RNA (1)...(19): siRNA sense strand
gcgugugugaugaggguuu

SEQ ID NO: 2564257 - RNA, 19 nt, Homo sapiens
  misc_RNA (1)...(19): siRNA sense strand
guguaugugaugagggcuu

SEQ ID NO: 2564258 - RNA, 19 nt, Homo sapiens
  misc_RNA (1)...(19): siRNA sense strand
ccagccagaucgaggugaa

SEQ ID NO: 2564259 - RNA, 19 nt, Homo sapiens
  misc_RNA (1)...(19): siRNA sense strand
ucaaagacgugccaggaga

SEQ ID NO: 2564260 - RNA, 19 nt, Homo sapiens
  misc_RNA (1)...(19): siRNA sense strand
aggcugaccagguggaaga

SEQ ID NO: 2564261 - RNA, 19 nt, Homo sapiens
  misc_RNA (1)...(19): siRNA sense strand
ugcuggagacuguggaaua

SEQ ID NO: 2564262 - RNA, 19 nt, Homo sapiens
  misc_RNA (1)...(19): siRNA sense strand
gcccauuacaggagguaca

SEQ ID NO: 2564263 - RNA, 19 nt, Homo sapiens
  misc_RNA (1)...(19): siRNA sense strand
cggaauaugaauaaagaag

SEQ ID NO: 2564264 - RNA, 19 nt, Homo sapiens
  misc_RNA (1)...(19): siRNA sense strand
ccgguuaccugcuggucua

SEQ ID NO: 2564265 - RNA, 19 nt, Homo sapiens
  misc_RNA (1)...(19): siRNA sense strand
aggcauaugcugcuggauu

SEQ ID NO: 2564266 - RNA, 19 nt, Homo sapiens
  misc_RNA (1)...(19): siRNA sense strand
gugugugugaugagggcua

SEQ ID NO: 2564267 - RNA, 19 nt, Homo sapiens
  misc_RNA (1)...(19): siRNA sense strand
agcaaggcuucaagggcua

SEQ ID NO: 2564268 - RNA, 19 nt, Homo sapiens
  misc_RNA (1)...(19): siRNA sense strand
accugaaauuggaaacuua

SEQ ID NO: 2564269 - RNA, 19 nt, Homo sapiens
  misc_RNA (1)...(19): siRNA sense strand
gaccaagcaacuucagaaa

SEQ ID NO: 2564270 - RNA, 19 nt, Homo sapiens
  misc_RNA (1)...(19): siRNA sense strand
uggaggagcuggagaaccu

SEQ ID NO: 2564271 - RNA, 19 nt, Homo sapiens
  misc_RNA (1)...(19): siRNA sense strand
gugaaugggcagugcgugu

SEQ ID NO: 2564272 - RNA, 19 nt, Homo sapiens
  misc_RNA (1)...(19): siRNA sense strand
uggcugagaucgauggcau

SEQ ID NO: 2564273 - RNA, 19 nt, Homo sapiens
  misc_RNA (1)...(19): siRNA sense strand
cguguuucccagacagaua

SEQ ID NO: 2564274 - RNA, 19 nt, Homo sapiens
  misc_RNA (1)...(19): siRNA sense strand
augaagggcuuugaggaaa

SEQ ID NO: 2564275 - RNA, 19 nt, Homo sapiens
  misc_RNA (1)...(19): siRNA sense strand
gcacacaguagauggggaa

SEQ ID NO: 2564276 - RNA, 19 nt, Homo sapiens
  misc_RNA (1)...(19): siRNA sense strand
ccaaagagccaacaagcca

SEQ ID NO: 2564277 - RNA, 19 nt, Homo sapiens
  misc_RNA (1)...(19): siRNA sense strand
uggcauuggcuaugagguu

SEQ ID NO: 2564278 - RNA, 19 nt, Homo sapiens
  misc_RNA (1)...(19): siRNA sense strand
cuguggaaguggaguggga

SEQ ID NO: 2564279 - RNA, 19 nt, Homo sapiens
  misc_RNA (1)...(19): siRNA sense strand
acucuauggaauaagcaaa

SEQ ID NO: 2564280 - RNA, 19 nt, Homo sapiens
  misc_RNA (1)...(19): siRNA sense strand
agcugaagguggaggggua

SEQ ID NO: 2564281 - RNA, 19 nt, Homo sapiens
  misc_RNA (1)...(19): siRNA sense strand
agaaugagugcguguguga

SEQ ID NO: 2564282 - RNA, 19 nt, Homo sapiens
  misc_RNA (1)...(19): siRNA sense strand
ggcaagaguaugagauauc

SEQ ID NO: 2564283 - RNA, 19 nt, Homo sapiens
  misc_RNA (1)...(19): siRNA sense strand
ccaacaagguggaggcagc

SEQ ID NO: 2564284 - RNA, 19 nt, Homo sapiens
  misc_RNA (1)...(19): siRNA sense strand
caguagaggcagcccagaa

SEQ ID NO: 2564285 - RNA, 19 nt, Homo sapiens
  misc_RNA (1)...(19): siRNA sense strand
acauaacucccgagagcuu

SEQ ID NO: 2564286 - RNA, 19 nt, Homo sapiens
  misc_RNA (1)...(19): siRNA sense strand
uuucaggaacccagaggaa

SEQ ID NO: 2564287 - RNA, 19 nt, Homo sapiens
  misc_RNA (1)...(19): siRNA sense strand
cagccaagauccaggcacu

SEQ ID NO: 2564288 - RNA, 19 nt, Homo sapiens
  misc_RNA (1)...(19): siRNA sense strand
uggagaacaagaagagcau

SEQ ID NO: 2564289 - RNA, 19 nt, Homo sapiens
  misc_RNA (1)...(19): siRNA sense strand
gugggauccucuagacauu

SEQ ID NO: 2564290 - RNA, 19 nt, Homo sapiens
  misc_RNA (1)...(19): siRNA sense strand
uggaguaccuugucagcau

SEQ ID NO: 2564291 - RNA, 19 nt, Homo sapiens
  misc_RNA (1)...(19): siRNA sense strand
gagcaaggcuucaagggcu

SEQ ID NO: 2564292 - RNA, 19 nt, Homo sapiens
  misc_RNA (1)...(19): siRNA sense strand
gcaucugccacgagggcuu

SEQ ID NO: 2564293 - RNA, 19 nt, Homo sapiens
  misc_RNA (1)...(19): siRNA sense strand
gagaacaagaagagcauuc

SEQ ID NO: 2564294 - RNA, 19 nt, Homo sapiens
  misc_RNA (1)...(19): siRNA sense strand
ccucgaugcucccaggaau

SEQ ID NO: 2564295 - RNA, 19 nt, Homo sapiens
  misc_RNA (1)...(19): siRNA sense strand
ggcgagaaagugccagaaa

SEQ ID NO: 2564296 - RNA, 19 nt, Homo sapiens
  misc_RNA (1)...(19): siRNA sense strand
gcgugugccaugaaggauu

SEQ ID NO: 2564297 - RNA, 19 nt, Homo sapiens
  misc_RNA (1)...(19): siRNA sense strand
gacaaugagaugcggguca

SEQ ID NO: 2564298 - RNA, 19 nt, Homo sapiens
  misc_RNA (1)...(19): siRNA sense strand
ucucaaauccagagcuaaa

SEQ ID NO: 2564299 - RNA, 19 nt, Homo sapiens
  misc_RNA (1)...(19): siRNA sense strand
cauaaauccuagagaucau

SEQ ID NO: 2564300 - RNA, 19 nt, Homo sapiens
  misc_RNA (1)...(19): siRNA sense strand
ucuaauaaacuguuggcaa

SEQ ID NO: 2564301 - RNA, 19 nt, Homo sapiens
  misc_RNA (1)...(19): siRNA sense strand
acgaauaagucaaggaccu

SEQ ID NO: 2564302 - RNA, 19 nt, Homo sapiens
  misc_RNA (1)...(19): siRNA sense strand
ucuggaaaaucuagggaaa

SEQ ID NO: 2564303 - RNA, 19 nt, Homo sapiens
  misc_RNA (1)...(19): siRNA sense strand
uggaagaauugaaaguaca

SEQ ID NO: 2564304 - RNA, 19 nt, Homo sapiens
  misc_RNA (1)...(19): siRNA sense strand
agaaauuagggacaggaaa

SEQ ID NO: 2564305 - RNA, 19 nt, Homo sapiens
  misc_RNA (1)...(19): siRNA sense strand
ccuaccaaguggaagaauu

SEQ ID NO: 2564306 - RNA, 19 nt, Homo sapiens
  misc_RNA (1)...(19): siRNA sense strand
gagaagaccugacccgcua

SEQ ID NO: 2564307 - RNA, 19 nt, Homo sapiens
  misc_RNA (1)...(19): siRNA sense strand
ucuuacaugucuagccaaa

SEQ ID NO: 2564308 - RNA, 19 nt, Homo sapiens
  misc_RNA (1)...(19): siRNA sense strand
ucccaaagacaaagaaaca

SEQ ID NO: 2564309 - RNA, 19 nt, Homo sapiens
  misc_RNA (1)...(19): siRNA sense strand
cagaaauuagggacaggaa

SEQ ID NO: 2564310 - RNA, 19 nt, Homo sapiens
  misc_RNA (1)...(19): siRNA sense strand
ccuuaaagcacuaaauacu

SEQ ID NO: 2564311 - RNA, 19 nt, Homo sapiens
  misc_RNA (1)...(19): siRNA sense strand
agggaaaggaagugugagu

SEQ ID NO: 2564312 - RNA, 19 nt, Homo sapiens
  misc_RNA (1)...(19): siRNA sense strand
gagacuuggauuugaugaa

SEQ ID NO: 2564313 - RNA, 19 nt, Homo sapiens
  misc_RNA (1)...(19): siRNA sense strand
aguacaagaacuagggagu

SEQ ID NO: 2564314 - RNA, 19 nt, Homo sapiens
  misc_RNA (1)...(19): siRNA sense strand
ugucagagaugcaaaagaa

SEQ ID NO: 2564315 - RNA, 19 nt, Homo sapiens
  misc_RNA (1)...(19): siRNA sense strand
gcuacagagaaaugucuua

SEQ ID NO: 2564316 - RNA, 19 nt, Homo sapiens
  misc_RNA (1)...(19): siRNA sense strand
cugcaaccuuaaagcacua

SEQ ID NO: 2564317 - RNA, 19 nt, Homo sapiens
  misc_RNA (1)...(19): siRNA sense strand
ucauuuauccaguagcaaa

SEQ ID NO: 2564318 - RNA, 19 nt, Homo sapiens
  misc_RNA (1)...(19): siRNA sense strand
aaagaaacaaaccgggauu

SEQ ID NO: 2564319 - RNA, 19 nt, Homo sapiens
  misc_RNA (1)...(19): siRNA sense strand
agucauaguacauguggau

SEQ ID NO: 2564320 - RNA, 19 nt, Homo sapiens
  misc_RNA (1)...(19): siRNA sense strand
agaugaacgaauaagucaa

SEQ ID NO: 2564321 - RNA, 19 nt, Homo sapiens
  misc_RNA (1)...(19): siRNA sense strand
cugacccgcuacagagaaa

SEQ ID NO: 2564322 - RNA, 19 nt, Homo sapiens
  misc_RNA (1)...(19): siRNA sense strand
guggaagaauugaaaguac

SEQ ID NO: 2564323 - RNA, 19 nt, Homo sapiens
  misc_RNA (1)...(19): siRNA sense strand
cugaagguguugaccaaga

SEQ ID NO: 2564324 - RNA, 19 nt, Homo sapiens
  misc_RNA (1)...(19): siRNA sense strand
cgaauaagucaaggaccua

SEQ ID NO: 2564325 - RNA, 19 nt, Homo sapiens
  misc_RNA (1)...(19): siRNA sense strand
uuccaaacuugcagaguga

SEQ ID NO: 2564326 - RNA, 19 nt, Homo sapiens
  misc_RNA (1)...(19): siRNA sense strand
gguuacagaauuacuggaa

SEQ ID NO: 2564327 - RNA, 19 nt, Homo sapiens
  misc_RNA (1)...(19): siRNA sense strand
ccacuagauaccacaaauu

SEQ ID NO: 2564328 - RNA, 19 nt, Homo sapiens
  misc_RNA (1)...(19): siRNA sense strand
uccugaagguguugaccaa

SEQ ID NO: 2564329 - RNA, 19 nt, Homo sapiens
  misc_RNA (1)...(19): siRNA sense strand
ugaaggacuuacagaaaau

SEQ ID NO: 2564330 - RNA, 19 nt, Homo sapiens
  misc_RNA (1)...(19): siRNA sense strand
ggauaacuccccugugaua

SEQ ID NO: 2564331 - RNA, 19 nt, Homo sapiens
  misc_RNA (1)...(19): siRNA sense strand
aucugaaguugaagcuaaa

SEQ ID NO: 2564332 - RNA, 19 nt, Homo sapiens
  misc_RNA (1)...(19): siRNA sense strand
gcucaguuuuggagaggau

SEQ ID NO: 2564333 - RNA, 19 nt, Homo sapiens
  misc_RNA (1)...(19): siRNA sense strand
uguugagagacuuggauuu

SEQ ID NO: 2564334 - RNA, 19 nt, Homo sapiens
  misc_RNA (1)...(19): siRNA sense strand
cacaguugguauuaguuaa

SEQ ID NO: 2564335 - RNA, 19 nt, Homo sapiens
  misc_RNA (1)...(19): siRNA sense strand
cagacuacuuguuggaucu

SEQ ID NO: 2564336 - RNA, 19 nt, Homo sapiens
  misc_RNA (1)...(19): siRNA sense strand
ucaugaaggacuuacagaa

SEQ ID NO: 2564337 - RNA, 19 nt, Homo sapiens
  misc_RNA (1)...(19): siRNA sense strand
uaagcaaacaguagcaaca

SEQ ID NO: 2564338 - RNA, 19 nt, Homo sapiens
  misc_RNA (1)...(19): siRNA sense strand
aagucaaggaccuaaagaa

SEQ ID NO: 2564339 - RNA, 19 nt, Homo sapiens
  misc_RNA (1)...(19): siRNA sense strand
gccaaaaggauuauucaua

SEQ ID NO: 2564340 - RNA, 19 nt, Homo sapiens
  misc_RNA (1)...(19): siRNA sense strand
ccuaaagaaccucaaggau

SEQ ID NO: 2564341 - RNA, 19 nt, Homo sapiens
  misc_RNA (1)...(19): siRNA sense strand
ucagagaugcaaaagaaaa

SEQ ID NO: 2564342 - RNA, 19 nt, Homo sapiens
  misc_RNA (1)...(19): siRNA sense strand
guccaguuguugagagacu

SEQ ID NO: 2564343 - RNA, 19 nt, Homo sapiens
  misc_RNA (1)...(19): siRNA sense strand
ccucaguccuuuagugaag

SEQ ID NO: 2564344 - RNA, 19 nt, Homo sapiens
  misc_RNA (1)...(19): siRNA sense strand
agucaaggaccuaaagaac

SEQ ID NO: 2564345 - RNA, 19 nt, Homo sapiens
  misc_RNA (1)...(19): siRNA sense strand
cccauaaauccuagagauc

SEQ ID NO: 2564346 - RNA, 19 nt, Homo sapiens
  misc_RNA (1)...(19): siRNA sense strand
augcacaaguagaaaugau

SEQ ID NO: 2564347 - RNA, 19 nt, Homo sapiens
  misc_RNA (1)...(19): siRNA sense strand
cuggaguggcuucuaauaa

SEQ ID NO: 2564348 - RNA, 19 nt, Homo sapiens
  misc_RNA (1)...(19): siRNA sense strand
guaucaauagugugcguga

SEQ ID NO: 2564349 - RNA, 19 nt, Homo sapiens
  misc_RNA (1)...(19): siRNA sense strand
gcagcuuccaguagauauu

SEQ ID NO: 2564350 - RNA, 19 nt, Homo sapiens
  misc_RNA (1)...(19): siRNA sense strand
ucauaguacauguggaucu

SEQ ID NO: 2564351 - RNA, 19 nt, Homo sapiens
  misc_RNA (1)...(19): siRNA sense strand
agaauuuaguccaguuguu

SEQ ID NO: 2564352 - RNA, 19 nt, Homo sapiens
  misc_RNA (1)...(19): siRNA sense strand
uaguccaguuguugagaga

SEQ ID NO: 2564353 - RNA, 19 nt, Homo sapiens
  misc_RNA (1)...(19): siRNA sense strand
augaaggacuuacagaaaa

SEQ ID NO: 2564354 - RNA, 19 nt, Homo sapiens
  misc_RNA (1)...(19): siRNA sense strand
cauccagagucauaguaca

SEQ ID NO: 2564355 - RNA, 19 nt, Homo sapiens
  misc_RNA (1)...(19): siRNA sense strand
cuggaaaaucuagggaaaa

SEQ ID NO: 2564356 - RNA, 19 nt, Homo sapiens
  misc_RNA (1)...(19): siRNA sense strand
aauaagucaaggaccuaaa

SEQ ID NO: 2564357 - RNA, 19 nt, Homo sapiens
  misc_RNA (1)...(19): siRNA sense strand
gagaggaaauacagcccuu

SEQ ID NO: 2564358 - RNA, 19 nt, Homo sapiens
  misc_RNA (1)...(19): siRNA sense strand
ccacugaacuuuaccagca

SEQ ID NO: 2564359 - RNA, 19 nt, Homo sapiens
  misc_RNA (1)...(19): siRNA sense strand
gagaagaaauacagcccuu

SEQ ID NO: 2564360 - RNA, 19 nt, Homo sapiens
  misc_RNA (1)...(19): siRNA sense strand
ccagaaagcucaagccauc

SEQ ID NO: 2564361 - RNA, 19 nt, Homo sapiens
  misc_RNA (1)...(19): siRNA sense strand
ucucaaacccacagccuga

SEQ ID NO: 2564362 - RNA, 19 nt, Homo sapiens
  misc_RNA (1)...(19): siRNA sense strand
cuuugaugcucauggcaca

SEQ ID NO: 2564363 - RNA, 19 nt, Homo sapiens
  misc_RNA (1)...(19): siRNA sense strand
aucugauggagaagaaaua

SEQ ID NO: 2564364 - RNA, 19 nt, Homo sapiens
  misc_RNA (1)...(19): siRNA sense strand
gggaagaaauacagcccuu

SEQ ID NO: 2564365 - RNA, 19 nt, Homo sapiens
  misc_RNA (1)...(19): siRNA sense strand
aggagguguuugauggcaa

SEQ ID NO: 2564366 - RNA, 19 nt, Homo sapiens
  misc_RNA (1)...(19): siRNA sense strand
ccuugauacuccuggcaca

SEQ ID NO: 2564367 - RNA, 19 nt, Homo sapiens
  misc_RNA (1)...(19): siRNA sense strand
caagaaagauuaaggagga

SEQ ID NO: 2564368 - RNA, 19 nt, Homo sapiens
  misc_RNA (1)...(19): siRNA sense strand
agauuaaggaggaaggaau

SEQ ID NO: 2564369 - RNA, 19 nt, Homo sapiens
  misc_RNA (1)...(19): siRNA sense strand
gagaagaaauacagcccuu

SEQ ID NO: 2564370 - RNA, 19 nt, Homo sapiens
  misc_RNA (1)...(19): siRNA sense strand
aagaaagauuaaggaggaa

SEQ ID NO: 2564371 - RNA, 19 nt, Homo sapiens
  misc_RNA (1)...(19): siRNA sense strand
ccacugaacuuaaccagca

SEQ ID NO: 2564372 - RNA, 19 nt, Homo sapiens
  misc_RNA (1)...(19): siRNA sense strand
aggaggaguuugaugauaa

SEQ ID NO: 2564373 - RNA, 19 nt, Homo sapiens
  misc_RNA (1)...(19): siRNA sense strand
ggaggaguuugaugauaaa

SEQ ID NO: 2564374 - RNA, 19 nt, Homo sapiens
  misc_RNA (1)...(19): siRNA sense strand
agauugaagaguaaggaau

SEQ ID NO: 2564375 - RNA, 19 nt, Homo sapiens
  misc_RNA (1)...(19): siRNA sense strand
ccuugauacuccuggcaca

SEQ ID NO: 2564376 - RNA, 19 nt, Homo sapiens
  misc_RNA (1)...(19): siRNA sense strand
cccuaguggugcucagcua

SEQ ID NO: 2564377 - RNA, 19 nt, Homo sapiens
  misc_RNA (1)...(19): siRNA sense strand
gaugauaaacaguuccaga

SEQ ID NO: 2564378 - RNA, 19 nt, Homo sapiens
  misc_RNA (1)...(19): siRNA sense strand
caggaggaguuugaugaua

SEQ ID NO: 2564379 - RNA, 19 nt, Homo sapiens
  misc_RNA (1)...(19): siRNA sense strand
ccauagucagaguggaaau

SEQ ID NO: 2564380 - RNA, 19 nt, Homo sapiens
  misc_RNA (1)...(19): siRNA sense strand
augagaugcuccagaacau

SEQ ID NO: 2564381 - RNA, 19 nt, Homo sapiens
  misc_RNA (1)...(19): siRNA sense strand
aggccaaggaguacaguca

SEQ ID NO: 2564382 - RNA, 19 nt, Homo sapiens
  misc_RNA (1)...(19): siRNA sense strand
cugcauuaccugaaggcca

SEQ ID NO: 2564383 - RNA, 19 nt, Homo sapiens
  misc_RNA (1)...(19): siRNA sense strand
accugaaggccaaggagua

SEQ ID NO: 2564384 - RNA, 19 nt, Homo sapiens
  misc_RNA (1)...(19): siRNA sense strand
ccuacaaagaagcagcaau

SEQ ID NO: 2564385 - RNA, 19 nt, Homo sapiens
  misc_RNA (1)...(19): siRNA sense strand
ugcauuaccugaaggccaa

SEQ ID NO: 2564386 - RNA, 19 nt, Homo sapiens
  misc_RNA (1)...(19): siRNA sense strand
ggggaaaacucaugagcag

SEQ ID NO: 2564387 - RNA, 19 nt, Homo sapiens
  misc_RNA (1)...(19): siRNA sense strand
agacuauuguugagaaccu

SEQ ID NO: 2564388 - RNA, 19 nt, Homo sapiens
  misc_RNA (1)...(19): siRNA sense strand
guugagaaccuccuggcua

SEQ ID NO: 2564389 - RNA, 19 nt, Homo sapiens
  misc_RNA (1)...(19): siRNA sense strand
agauauuaugggaggauuc

SEQ ID NO: 2564390 - RNA, 19 nt, Homo sapiens
  misc_RNA (1)...(19): siRNA sense strand
gguuaaagguuauggucca

SEQ ID NO: 2564391 - RNA, 19 nt, Homo sapiens
  misc_RNA (1)...(19): siRNA sense strand
ccagcggagaagagaguaa

SEQ ID NO: 2564392 - RNA, 19 nt, Homo sapiens
  misc_RNA (1)...(19): siRNA sense strand
cauaggaagcuuugggcau

SEQ ID NO: 2564393 - RNA, 19 nt, Homo sapiens
  misc_RNA (1)...(19): siRNA sense strand
cugugaaguuggcagacaa

SEQ ID NO: 2564394 - RNA, 19 nt, Homo sapiens
  misc_RNA (1)...(19): siRNA sense strand
acauggugaucgaggccua

SEQ ID NO: 2564395 - RNA, 19 nt, Homo sapiens
  misc_RNA (1)...(19): siRNA sense strand
cgggaggagcuguguaaaa

SEQ ID NO: 2564396 - RNA, 19 nt, Homo sapiens
  misc_RNA (1)...(19): siRNA sense strand
cggagaagagaguaaacau

SEQ ID NO: 2564397 - RNA, 19 nt, Homo sapiens
  misc_RNA (1)...(19): siRNA sense strand
ggcuaguggcggucagcaa

SEQ ID NO: 2564398 - RNA, 19 nt, Homo sapiens
  misc_RNA (1)...(19): siRNA sense strand
ugaucgaggccuauggaca

SEQ ID NO: 2564399 - RNA, 19 nt, Homo sapiens
  misc_RNA (1)...(19): siRNA sense strand
ccaucguggagcacauaaa

SEQ ID NO: 2564400 - RNA, 19 nt, Homo sapiens
  misc_RNA (1)...(19): siRNA sense strand
ugaucuuagucaaggacca

SEQ ID NO: 2564401 - RNA, 19 nt, Homo sapiens
  misc_RNA (1)...(19): siRNA sense strand
gcacuuuuggcgagaacua

SEQ ID NO: 2564402 - RNA, 19 nt, Homo sapiens
  misc_RNA (1)...(19): siRNA sense strand
ugugaaguuggcagacaaa

SEQ ID NO: 2564403 - RNA, 19 nt, Homo sapiens
  misc_RNA (1)...(19): siRNA sense strand
cuuuguguccugagaucaa

SEQ ID NO: 2564404 - RNA, 19 nt, Homo sapiens
  misc_RNA (1)...(19): siRNA sense strand
ccauagccaucguggagca

SEQ ID NO: 2564405 - RNA, 19 nt, Homo sapiens
  misc_RNA (1)...(19): siRNA sense strand
ccaggauaagagagagaaa

SEQ ID NO: 2564406 - RNA, 19 nt, Homo sapiens
  misc_RNA (1)...(19): siRNA sense strand
ggaagaagccggcugggaa

SEQ ID NO: 2564407 - RNA, 19 nt, Homo sapiens
  misc_RNA (1)...(19): siRNA sense strand
gcagauaucaggaaggaca

SEQ ID NO: 2564408 - RNA, 19 nt, Homo sapiens
  misc_RNA (1)...(19): siRNA sense strand
ccaacaucgccguggacaa

SEQ ID NO: 2564409 - RNA, 19 nt, Homo sapiens
  misc_RNA (1)...(19): siRNA sense strand
cagagggaguggagagcca

SEQ ID NO: 2564410 - RNA, 19 nt, Homo sapiens
  misc_RNA (1)...(19): siRNA sense strand
gcagagaaucagccgggaa

SEQ ID NO: 2564411 - RNA, 19 nt, Homo sapiens
  misc_RNA (1)...(19): siRNA sense strand
uguuugagcuggaggagga

SEQ ID NO: 2564412 - RNA, 19 nt, Homo sapiens
  misc_RNA (1)...(19): siRNA sense strand
gaacugaaggagagggaag

SEQ ID NO: 2564413 - RNA, 19 nt, Homo sapiens
  misc_RNA (1)...(19): siRNA sense strand
agaaaagaacugaaggaga

SEQ ID NO: 2564414 - RNA, 19 nt, Homo sapiens
  misc_RNA (1)...(19): siRNA sense strand
ccacagaagagacgggugu

SEQ ID NO: 2564415 - RNA, 19 nt, Homo sapiens
  misc_RNA (1)...(19): siRNA sense strand
uggagagcuucgugaccaa

SEQ ID NO: 2564416 - RNA, 19 nt, Homo sapiens
  misc_RNA (1)...(19): siRNA sense strand
caguccugccagugaaaua

SEQ ID NO: 2564417 - RNA, 19 nt, Homo sapiens
  misc_RNA (1)...(19): siRNA sense strand
gcuuaaagguucugugcug

SEQ ID NO: 2564418 - RNA, 19 nt, Homo sapiens
  misc_RNA (1)...(19): siRNA sense strand
aaacaaggcuuaaagguuc

SEQ ID NO: 2564419 - RNA, 19 nt, Homo sapiens
  misc_RNA (1)...(19): siRNA sense strand
acgaacagucgaaagggaa

SEQ ID NO: 2564420 - RNA, 19 nt, Homo sapiens
  misc_RNA (1)...(19): siRNA sense strand
agaaggaggccgugauacu

SEQ ID NO: 2564421 - RNA, 19 nt, Homo sapiens
  misc_RNA (1)...(19): siRNA sense strand
agacccaggauaagagaga

SEQ ID NO: 2564422 - RNA, 19 nt, Homo sapiens
  misc_RNA (1)...(19): siRNA sense strand
gauaagaagcugagugagc

SEQ ID NO: 2564423 - RNA, 19 nt, Homo sapiens
  misc_RNA (1)...(19): siRNA sense strand
gaaaagaacugaaggagag

SEQ ID NO: 2564424 - RNA, 19 nt, Homo sapiens
  misc_RNA (1)...(19): siRNA sense strand
uggaggaggaggacgaaca

SEQ ID NO: 2564425 - RNA, 19 nt, Homo sapiens
  misc_RNA (1)...(19): siRNA sense strand
ccucagggcagcagaaacu

SEQ ID NO: 2564426 - RNA, 19 nt, Homo sapiens
  misc_RNA (1)...(19): siRNA sense strand
gagagacugcagaggguca

SEQ ID NO: 2564427 - RNA, 19 nt, Homo sapiens
  misc_RNA (1)...(19): siRNA sense strand
agagagacgcggaggugga

SEQ ID NO: 2564428 - RNA, 19 nt, Homo sapiens
  misc_RNA (1)...(19): siRNA sense strand
ccuuugagcccaggcgaua

SEQ ID NO: 2564429 - RNA, 19 nt, Homo sapiens
  misc_RNA (1)...(19): siRNA sense strand
acccaggauaagagagaga

SEQ ID NO: 2564430 - RNA, 19 nt, Homo sapiens
  misc_RNA (1)...(19): siRNA sense strand
aguugcugcccgagagcua

SEQ ID NO: 2564431 - RNA, 19 nt, Homo sapiens
  misc_RNA (1)...(19): siRNA sense strand
accaaauagccgaggagca

SEQ ID NO: 2564432 - RNA, 19 nt, Homo sapiens
  misc_RNA (1)...(19): siRNA sense strand
cgaaaugaaauuaagcugu

SEQ ID NO: 2564433 - RNA, 19 nt, Homo sapiens
  misc_RNA (1)...(19): siRNA sense strand
caugagaacucccaggguu

SEQ ID NO: 2564434 - RNA, 19 nt, Homo sapiens
  misc_RNA (1)...(19): siRNA sense strand
agaacaucucucugaaaga

SEQ ID NO: 2564435 - RNA, 19 nt, Homo sapiens
  misc_RNA (1)...(19): siRNA sense strand
aagaagaugcaguuggagu

SEQ ID NO: 2564436 - RNA, 19 nt, Homo sapiens
  misc_RNA (1)...(19): siRNA sense strand
aguuuguguuugugggaaa

SEQ ID NO: 2564437 - RNA, 19 nt, Homo sapiens
  misc_RNA (1)...(19): siRNA sense strand
uggaaaaguguauggaaaa

SEQ ID NO: 2564438 - RNA, 19 nt, Homo sapiens
  misc_RNA (1)...(19): siRNA sense strand
uuggaaaaguguauggaaa

SEQ ID NO: 2564439 - RNA, 19 nt, Homo sapiens
  misc_RNA (1)...(19): siRNA sense strand
caucacugaguuugagaaa

SEQ ID NO: 2564440 - RNA, 19 nt, Homo sapiens
  misc_RNA (1)...(19): siRNA sense strand
uagcaaauuggcaggcaua

SEQ ID NO: 2564441 - RNA, 19 nt, Homo sapiens
  misc_RNA (1)...(19): siRNA sense strand
cgugagaagccugaagaaa

SEQ ID NO: 2564442 - RNA, 19 nt, Homo sapiens
  misc_RNA (1)...(19): siRNA sense strand
ggugauacuacaauggaau

SEQ ID NO: 2564443 - RNA, 19 nt, Homo sapiens
  misc_RNA (1)...(19): siRNA sense strand
uugcaguggucgaggaguu

SEQ ID NO: 2564444 - RNA, 19 nt, Homo sapiens
  misc_RNA (1)...(19): siRNA sense strand
ccaagugugcaguggaaga

SEQ ID NO: 2564445 - RNA, 19 nt, Homo sapiens
  misc_RNA (1)...(19): siRNA sense strand
guucauagacagaagaucu

SEQ ID NO: 2564446 - RNA, 19 nt, Homo sapiens
  misc_RNA (1)...(19): siRNA sense strand
caauaauuugguaguggaa

SEQ ID NO: 2564447 - RNA, 19 nt, Homo sapiens
  misc_RNA (1)...(19): siRNA sense strand
cuggugaaauagaaucaaa

SEQ ID NO: 2564448 - RNA, 19 nt, Homo sapiens
  misc_RNA (1)...(19): siRNA sense strand
agucauaucggauggcgaa

SEQ ID NO: 2564449 - RNA, 19 nt, Homo sapiens
  misc_RNA (1)...(19): siRNA sense strand
gcgaaaagaggcuaaaaga

SEQ ID NO: 2564450 - RNA, 19 nt, Homo sapiens
  misc_RNA (1)...(19): siRNA sense strand
gaauguuucuccagcccaa

SEQ ID NO: 2564451 - RNA, 19 nt, Homo sapiens
  misc_RNA (1)...(19): siRNA sense strand
aaggaaaguguguagauga

SEQ ID NO: 2564452 - RNA, 19 nt, Homo sapiens
  misc_RNA (1)...(19): siRNA sense strand
gcauggagagugugaagca

SEQ ID NO: 2564453 - RNA, 19 nt, Homo sapiens
  misc_RNA (1)...(19): siRNA sense strand
agagaacaucacugaguuu

SEQ ID NO: 2564454 - RNA, 19 nt, Homo sapiens
  misc_RNA (1)...(19): siRNA sense strand
cuuugcaguucaaggaaaa

SEQ ID NO: 2564455 - RNA, 19 nt, Homo sapiens
  misc_RNA (1)...(19): siRNA sense strand
gaaauuaauacccagguga

SEQ ID NO: 2564456 - RNA, 19 nt, Homo sapiens
  misc_RNA (1)...(19): siRNA sense strand
gcucauacguugauaaaac

SEQ ID NO: 2564457 - RNA, 19 nt, Homo sapiens
  misc_RNA (1)...(19): siRNA sense strand
gguguguucaagaggauuu

SEQ ID NO: 2564458 - RNA, 19 nt, Homo sapiens
  misc_RNA (1)...(19): siRNA sense strand
aggugauacuacaauggaa

SEQ ID NO: 2564459 - RNA, 19 nt, Homo sapiens
  misc_RNA (1)...(19): siRNA sense strand
ggauaaguugauucugcaa

SEQ ID NO: 2564460 - RNA, 19 nt, Homo sapiens
  misc_RNA (1)...(19): siRNA sense strand
cauagauacaccagaagga

SEQ ID NO: 2564461 - RNA, 19 nt, Homo sapiens
  misc_RNA (1)...(19): siRNA sense strand
uggacugggccaaggugaa

SEQ ID NO: 2564462 - RNA, 19 nt, Homo sapiens
  misc_RNA (1)...(19): siRNA sense strand
cgaaaagaggcuaaaagau

SEQ ID NO: 2564463 - RNA, 19 nt, Homo sapiens
  misc_RNA (1)...(19): siRNA sense strand
ucuuugcaguucaaggaaa

SEQ ID NO: 2564464 - RNA, 19 nt, Homo sapiens
  misc_RNA (1)...(19): siRNA sense strand
cagaaagccaggcauggaa

SEQ ID NO: 2564465 - RNA, 19 nt, Homo sapiens
  misc_RNA (1)...(19): siRNA sense strand
ugaugucacaggaggaaaa

SEQ ID NO: 2564466 - RNA, 19 nt, Homo sapiens
  misc_RNA (1)...(19): siRNA sense strand
ccuaaaggaaaguguguag

SEQ ID NO: 2564467 - RNA, 19 nt, Homo sapiens
  misc_RNA (1)...(19): siRNA sense strand
uuuccagugugaugagaau

SEQ ID NO: 2564468 - RNA, 19 nt, Homo sapiens
  misc_RNA (1)...(19): siRNA sense strand
uccagugugaugagaauaa

SEQ ID NO: 2564469 - RNA, 19 nt, Homo sapiens
  misc_RNA (1)...(19): siRNA sense strand
uggcucauacguugauaaa

SEQ ID NO: 2564470 - RNA, 19 nt, Homo sapiens
  misc_RNA (1)...(19): siRNA sense strand
gggcauggagagugugaag

SEQ ID NO: 2564471 - RNA, 19 nt, Homo sapiens
  misc_RNA (1)...(19): siRNA sense strand
guucaagaggauuucauuu

SEQ ID NO: 2564472 - RNA, 19 nt, Homo sapiens
  misc_RNA (1)...(19): siRNA sense strand
aguaugaggaugagaucaa

SEQ ID NO: 2564473 - RNA, 19 nt, Homo sapiens
  misc_RNA (1)...(19): siRNA sense strand
aggagaaggagcagaucaa

SEQ ID NO: 2564474 - RNA, 19 nt, Homo sapiens
  misc_RNA (1)...(19): siRNA sense strand
aggcacaguacgaggauau

SEQ ID NO: 2564475 - RNA, 19 nt, Homo sapiens
  misc_RNA (1)...(19): siRNA sense strand
gcaucauugcugaggucaa

SEQ ID NO: 2564476 - RNA, 19 nt, Homo sapiens
  misc_RNA (1)...(19): siRNA sense strand
ugaacaagguagagcugga

SEQ ID NO: 2564477 - RNA, 19 nt, Homo sapiens
  misc_RNA (1)...(19): siRNA sense strand
gcucgaagcaacauggaca

SEQ ID NO: 2564478 - RNA, 19 nt, Homo sapiens
  misc_RNA (1)...(19): siRNA sense strand
cucaaaggccagagggcuu

SEQ ID NO: 2564479 - RNA, 19 nt, Homo sapiens
  misc_RNA (1)...(19): siRNA sense strand
agaucaagacccucaacaa

SEQ ID NO: 2564480 - RNA, 19 nt, Homo sapiens
  misc_RNA (1)...(19): siRNA sense strand
aggauguggaugaagcuua

SEQ ID NO: 2564481 - RNA, 19 nt, Homo sapiens
  misc_RNA (1)...(19): siRNA sense strand
uugcugaggucaaggcaca

SEQ ID NO: 2564482 - RNA, 19 nt, Homo sapiens
  misc_RNA (1)...(19): siRNA sense strand
ccucugacguccugcccaa

SEQ ID NO: 2564483 - RNA, 19 nt, Homo sapiens
  misc_RNA (1)...(19): siRNA sense strand
cagaacaagaugcuggaga

SEQ ID NO: 2564484 - RNA, 19 nt, Homo sapiens
  misc_RNA (1)...(19): siRNA sense strand
aucaauaagcguacagaga

SEQ ID NO: 2564485 - RNA, 19 nt, Homo sapiens
  misc_RNA (1)...(19): siRNA sense strand
gaugagaucaauaagcgua

SEQ ID NO: 2564486 - RNA, 19 nt, Homo sapiens
  misc_RNA (1)...(19): siRNA sense strand
acagagauggagaacgaau

SEQ ID NO: 2564487 - RNA, 19 nt, Homo sapiens
  misc_RNA (1)...(19): siRNA sense strand
cgagacacgugaugggaag

SEQ ID NO: 2564488 - RNA, 19 nt, Homo sapiens
  misc_RNA (1)...(19): siRNA sense strand
cagaaguccuacaaggugu

SEQ ID NO: 2564489 - RNA, 19 nt, Homo sapiens
  misc_RNA (1)...(19): siRNA sense strand
agaacaagaugcuggagac

SEQ ID NO: 2564490 - RNA, 19 nt, Homo sapiens
  misc_RNA (1)...(19): siRNA sense strand
ugguggaggacuucaagaa

SEQ ID NO: 2564491 - RNA, 19 nt, Homo sapiens
  misc_RNA (1)...(19): siRNA sense strand
gagcagaucaagacccuca

SEQ ID NO: 2564492 - RNA, 19 nt, Homo sapiens
  misc_RNA (1)...(19): siRNA sense strand
ccgugguugugaagaagau

SEQ ID NO: 2564493 - RNA, 19 nt, Homo sapiens
  misc_RNA (1)...(19): siRNA sense strand
ggucagaagaugugggaaa

SEQ ID NO: 2564494 - RNA, 19 nt, Homo sapiens
  misc_RNA (1)...(19): siRNA sense strand
ucuaauagcucaugggaga

SEQ ID NO: 2564495 - RNA, 19 nt, Homo sapiens
  misc_RNA (1)...(19): siRNA sense strand
acucauaagaucauggaaa

SEQ ID NO: 2564496 - RNA, 19 nt, Homo sapiens
  misc_RNA (1)...(19): siRNA sense strand
ggagaauaauuaauggaga

SEQ ID NO: 2564497 - RNA, 19 nt, Homo sapiens
  misc_RNA (1)...(19): siRNA sense strand
agauagaggcccaggcauu

SEQ ID NO: 2564498 - RNA, 19 nt, Homo sapiens
  misc_RNA (1)...(19): siRNA sense strand
gaugaauuuagcugagaaa

SEQ ID NO: 2564499 - RNA, 19 nt, Homo sapiens
  misc_RNA (1)...(19): siRNA sense strand
uuuugaaauuggagggaaa

SEQ ID NO: 2564500 - RNA, 19 nt, Homo sapiens
  misc_RNA (1)...(19): siRNA sense strand
ccugaauuuuggagaauaa

SEQ ID NO: 2564501 - RNA, 19 nt, Homo sapiens
  misc_RNA (1)...(19): siRNA sense strand
uuauggaaggagugggaaa

SEQ ID NO: 2564502 - RNA, 19 nt, Homo sapiens
  misc_RNA (1)...(19): siRNA sense strand
acacaguugucauggauau

SEQ ID NO: 2564503 - RNA, 19 nt, Homo sapiens
  misc_RNA (1)...(19): siRNA sense strand
cagucuuuccagagaauaa

SEQ ID NO: 2564504 - RNA, 19 nt, Homo sapiens
  misc_RNA (1)...(19): siRNA sense strand
ggcuagauggacugggaua

SEQ ID NO: 2564505 - RNA, 19 nt, Homo sapiens
  misc_RNA (1)...(19): siRNA sense strand
ccagauucgcuaugguuua

SEQ ID NO: 2564506 - RNA, 19 nt, Homo sapiens
  misc_RNA (1)...(19): siRNA sense strand
gcauacagcaucagugaca

SEQ ID NO: 2564507 - RNA, 19 nt, Homo sapiens
  misc_RNA (1)...(19): siRNA sense strand
aaacaagaugugugaccua

SEQ ID NO: 2564508 - RNA, 19 nt, Homo sapiens
  misc_RNA (1)...(19): siRNA sense strand
gcucacacuuuguagaaaa

SEQ ID NO: 2564509 - RNA, 19 nt, Homo sapiens
  misc_RNA (1)...(19): siRNA sense strand
ugugcaguguucagagaua

SEQ ID NO: 2564510 - RNA, 19 nt, Homo sapiens
  misc_RNA (1)...(19): siRNA sense strand
gaacauacagugcuggcua

SEQ ID NO: 2564511 - RNA, 19 nt, Homo sapiens
  misc_RNA (1)...(19): siRNA sense strand
ucucagaaggauuggauga

SEQ ID NO: 2564512 - RNA, 19 nt, Homo sapiens
  misc_RNA (1)...(19): siRNA sense strand
cuguugaaccuaaguuuaa

SEQ ID NO: 2564513 - RNA, 19 nt, Homo sapiens
  misc_RNA (1)...(19): siRNA sense strand
caguauacuuccugggucu

SEQ ID NO: 2564514 - RNA, 19 nt, Homo sapiens
  misc_RNA (1)...(19): siRNA sense strand
gcaucuauaagaaggaaaa

SEQ ID NO: 2564515 - RNA, 19 nt, Homo sapiens
  misc_RNA (1)...(19): siRNA sense strand
cgcuaugguuuaaguggaa

SEQ ID NO: 2564516 - RNA, 19 nt, Homo sapiens
  misc_RNA (1)...(19): siRNA sense strand
ggcugaggguacugaggua

SEQ ID NO: 2564517 - RNA, 19 nt, Homo sapiens
  misc_RNA (1)...(19): siRNA sense strand
cucauaagaucauggaaaa

SEQ ID NO: 2564518 - RNA, 19 nt, Homo sapiens
  misc_RNA (1)...(19): siRNA sense strand
ggaccugaauuuuggagaa

SEQ ID NO: 2564519 - RNA, 19 nt, Homo sapiens
  misc_RNA (1)...(19): siRNA sense strand
gagugaucauguuagcaaa

SEQ ID NO: 2564520 - RNA, 19 nt, Homo sapiens
  misc_RNA (1)...(19): siRNA sense strand
guaagaggcuagauggacu

SEQ ID NO: 2564521 - RNA, 19 nt, Homo sapiens
  misc_RNA (1)...(19): siRNA sense strand
gcuaaaaggagacuuaaaa

SEQ ID NO: 2564522 - RNA, 19 nt, Homo sapiens
  misc_RNA (1)...(19): siRNA sense strand
caauauuuauggaaggagu

SEQ ID NO: 2564523 - RNA, 19 nt, Homo sapiens
  misc_RNA (1)...(19): siRNA sense strand
cagaaacguuugagcaucu

SEQ ID NO: 2564524 - RNA, 19 nt, Homo sapiens
  misc_RNA (1)...(19): siRNA sense strand
ggacgaaagccagagacaa

SEQ ID NO: 2564525 - RNA, 19 nt, Homo sapiens
  misc_RNA (1)...(19): siRNA sense strand
cagaaggauuggaugaacu

SEQ ID NO: 2564526 - RNA, 19 nt, Homo sapiens
  misc_RNA (1)...(19): siRNA sense strand
aaccaaaccucgaggaaag

SEQ ID NO: 2564527 - RNA, 19 nt, Homo sapiens
  misc_RNA (1)...(19): siRNA sense strand
ugguuuaaguggaaaagaa

SEQ ID NO: 2564528 - RNA, 19 nt, Homo sapiens
  misc_RNA (1)...(19): siRNA sense strand
cugggauauuggaguaauu

SEQ ID NO: 2564529 - RNA, 19 nt, Homo sapiens
  misc_RNA (1)...(19): siRNA sense strand
caguugucauggauauaaa

SEQ ID NO: 2564530 - RNA, 19 nt, Homo sapiens
  misc_RNA (1)...(19): siRNA sense strand
ugggaaaaccaaagauaau

SEQ ID NO: 2564531 - RNA, 19 nt, Homo sapiens
  misc_RNA (1)...(19): siRNA sense strand
cuucaaauucgaauggaca

SEQ ID NO: 2564532 - RNA, 19 nt, Homo sapiens
  misc_RNA (1)...(19): siRNA sense strand
ugggaaaucacacgaaauu

SEQ ID NO: 2564533 - RNA, 19 nt, Homo sapiens
  misc_RNA (1)...(19): siRNA sense strand
gccuaugagcaaaguaaau

SEQ ID NO: 2564534 - RNA, 19 nt, Homo sapiens
  misc_RNA (1)...(19): siRNA sense strand
gcaaugaacaugaaugcca

SEQ ID NO: 2564535 - RNA, 19 nt, Homo sapiens
  misc_RNA (1)...(19): siRNA sense strand
uaucauaggagcagccuuu

SEQ ID NO: 2564536 - RNA, 19 nt, Homo sapiens
  misc_RNA (1)...(19): siRNA sense strand
acaauguggauuaggauca

SEQ ID NO: 2564537 - RNA, 19 nt, Homo sapiens
  misc_RNA (1)...(19): siRNA sense strand
uggccuaugagcaaaguaa

SEQ ID NO: 2564538 - RNA, 19 nt, Homo sapiens
  misc_RNA (1)...(19): siRNA sense strand
ggugaaauaaaauggcuua

SEQ ID NO: 2564539 - RNA, 19 nt, Homo sapiens
  misc_RNA (1)...(19): siRNA sense strand
ccuaugaggacgaaagcca

SEQ ID NO: 2564540 - RNA, 19 nt, Homo sapiens
  misc_RNA (1)...(19): siRNA sense strand
uggugaagaacaagggcuu

SEQ ID NO: 2564541 - RNA, 19 nt, Homo sapiens
  misc_RNA (1)...(19): siRNA sense strand
caaucugaaugaaaccaaa

SEQ ID NO: 2564542 - RNA, 19 nt, Homo sapiens
  misc_RNA (1)...(19): siRNA sense strand
cagugugaaagcagaaauu

SEQ ID NO: 2564543 - RNA, 19 nt, Homo sapiens
  misc_RNA (1)...(19): siRNA sense strand
gccagaaacguuugagcau

SEQ ID NO: 2564544 - RNA, 19 nt, Homo sapiens
  misc_RNA (1)...(19): siRNA sense strand
agaacaagggcuuauaaau

SEQ ID NO: 2564545 - RNA, 19 nt, Homo sapiens
  misc_RNA (1)...(19): siRNA sense strand
ccucaaagccaguaugaug

SEQ ID NO: 2564546 - RNA, 19 nt, Homo sapiens
  misc_RNA (1)...(19): siRNA sense strand
agauagaaacugcuccuua

SEQ ID NO: 2564547 - RNA, 19 nt, Homo sapiens
  misc_RNA (1)...(19): siRNA sense strand
uguucugccugaaguguua

SEQ ID NO: 2564548 - RNA, 19 nt, Homo sapiens
  misc_RNA (1)...(19): siRNA sense strand
uguucagagauaugugaua

SEQ ID NO: 2564549 - RNA, 19 nt, Homo sapiens
  misc_RNA (1)...(19): siRNA sense strand
aggacgaaagccagagaca

SEQ ID NO: 2564550 - RNA, 19 nt, Homo sapiens
  misc_RNA (1)...(19): siRNA sense strand
acugauggguacuuaacua

SEQ ID NO: 2564551 - RNA, 19 nt, Homo sapiens
  misc_RNA (1)...(19): siRNA sense strand
uaaauauggugaagccuga

SEQ ID NO: 2564552 - RNA, 19 nt, Homo sapiens
  misc_RNA (1)...(19): siRNA sense strand
agagauaugugauaaacca

SEQ ID NO: 2564553 - RNA, 19 nt, Homo sapiens
  misc_RNA (1)...(19): siRNA sense strand
gggcacaaggacuuaauuu

SEQ ID NO: 2564554 - RNA, 19 nt, Homo sapiens
  misc_RNA (1)...(19): siRNA sense strand
caugugaaacugaugggua

SEQ ID NO: 2564555 - RNA, 19 nt, Homo sapiens
  misc_RNA (1)...(19): siRNA sense strand
cugcaauggaacaugguca

SEQ ID NO: 2564556 - RNA, 19 nt, Homo sapiens
  misc_RNA (1)...(19): siRNA sense strand
aagacaaagagcugaguaa

SEQ ID NO: 2564557 - RNA, 19 nt, Homo sapiens
  misc_RNA (1)...(19): siRNA sense strand
ccacauuggaacuaagaca

SEQ ID NO: 2564558 - RNA, 19 nt, Homo sapiens
  misc_RNA (1)...(19): siRNA sense strand
uggccugguuauuuggaaa

SEQ ID NO: 2564559 - RNA, 19 nt, Homo sapiens
  misc_RNA (1)...(19): siRNA sense strand
ccacaaugaaggaaaugau

SEQ ID NO: 2564560 - RNA, 19 nt, Homo sapiens
  misc_RNA (1)...(19): siRNA sense strand
ccucauuggaacaacuuua

SEQ ID NO: 2564561 - RNA, 19 nt, Homo sapiens
  misc_RNA (1)...(19): siRNA sense strand
ccaucuaacuucagcagca

SEQ ID NO: 2564562 - RNA, 19 nt, Homo sapiens
  misc_RNA (1)...(19): siRNA sense strand
uggccgagauggacgaaaa

SEQ ID NO: 2564563 - RNA, 19 nt, Homo sapiens
  misc_RNA (1)...(19): siRNA sense strand
ggaccuagaccgaggcaug

SEQ ID NO: 2564564 - RNA, 19 nt, Homo sapiens
  misc_RNA (1)...(19): siRNA sense strand
acagguuugucaagggcua

SEQ ID NO: 2564565 - RNA, 19 nt, Homo sapiens
  misc_RNA (1)...(19): siRNA sense strand
gauuaauacaucugagaag

SEQ ID NO: 2564566 - RNA, 19 nt, Homo sapiens
  misc_RNA (1)...(19): siRNA sense strand
augaaggaaaugaugcaua

SEQ ID NO: 2564567 - RNA, 19 nt, Homo sapiens
  misc_RNA (1)...(19): siRNA sense strand
auagaaacccuguggaacu

SEQ ID NO: 2564568 - RNA, 19 nt, Homo sapiens
  misc_RNA (1)...(19): siRNA sense strand
cugaaacuacuuuggagaa

SEQ ID NO: 2564569 - RNA, 19 nt, Homo sapiens
  misc_RNA (1)...(19): siRNA sense strand
acugaagcuucguuaguau

SEQ ID NO: 2564570 - RNA, 19 nt, Homo sapiens
  misc_RNA (1)...(19): siRNA sense strand
ggggaaaggaguuaauaga

SEQ ID NO: 2564571 - RNA, 19 nt, Homo sapiens
  misc_RNA (1)...(19): siRNA sense strand
caaugaaggaaaugaugca

SEQ ID NO: 2564572 - RNA, 19 nt, Homo sapiens
  misc_RNA (1)...(19): siRNA sense strand
ugcagaaacucuacgcgaa

SEQ ID NO: 2564573 - RNA, 19 nt, Homo sapiens
  misc_RNA (1)...(19): siRNA sense strand
caaagagcugaguaaggaa

SEQ ID NO: 2564574 - RNA, 19 nt, Homo sapiens
  misc_RNA (1)...(19): siRNA sense strand
cuacuuuggagaauggauu

SEQ ID NO: 2564575 - RNA, 19 nt, Homo sapiens
  misc_RNA (1)...(19): siRNA sense strand
ggaaacuacgggagaaccu

SEQ ID NO: 2564576 - RNA, 19 nt, Homo sapiens
  misc_RNA (1)...(19): siRNA sense strand
cugggaaacuacgggagaa

SEQ ID NO: 2564577 - RNA, 19 nt, Homo sapiens
  misc_RNA (1)...(19): siRNA sense strand
guuacuagaaaaugggauu

SEQ ID NO: 2564578 - RNA, 19 nt, Homo sapiens
  misc_RNA (1)...(19): siRNA sense strand
gacacuaagcagauacgaa

SEQ ID NO: 2564579 - RNA, 19 nt, Homo sapiens
  misc_RNA (1)...(19): siRNA sense strand
acugaaacuacuuuggaga

SEQ ID NO: 2564580 - RNA, 19 nt, Homo sapiens
  misc_RNA (1)...(19): siRNA sense strand
gggaauuucuggugacaua

SEQ ID NO: 2564581 - RNA, 19 nt, Homo sapiens
  misc_RNA (1)...(19): siRNA sense strand
caguacaaucaucggguua

SEQ ID NO: 2564582 - RNA, 19 nt, Homo sapiens
  misc_RNA (1)...(19): siRNA sense strand
aaauacaaguacugguuga

SEQ ID NO: 2564583 - RNA, 19 nt, Homo sapiens
  misc_RNA (1)...(19): siRNA sense strand
acucaaugaaaucagcaaa

SEQ ID NO: 2564584 - RNA, 19 nt, Homo sapiens
  misc_RNA (1)...(19): siRNA sense strand
ugcaauacaaagcuggaua

SEQ ID NO: 2564585 - RNA, 19 nt, Homo sapiens
  misc_RNA (1)...(19): siRNA sense strand
cuggauaauaacuggggaa

SEQ ID NO: 2564586 - RNA, 19 nt, Homo sapiens
  misc_RNA (1)...(19): siRNA sense strand
agacuuuaaucgagggcaa

SEQ ID NO: 2564587 - RNA, 19 nt, Homo sapiens
  misc_RNA (1)...(19): siRNA sense strand
cgacaaugacugugaggau

SEQ ID NO: 2564588 - RNA, 19 nt, Homo sapiens
  misc_RNA (1)...(19): siRNA sense strand
ccgacgugguggaggacaa

SEQ ID NO: 2564589 - RNA, 19 nt, Homo sapiens
  misc_RNA (1)...(19): siRNA sense strand
cagcagaagacgaguguga

SEQ ID NO: 2564590 - RNA, 19 nt, Homo sapiens
  misc_RNA (1)...(19): siRNA sense strand
ccaauaagaagcagaucaa

SEQ ID NO: 2564591 - RNA, 19 nt, Homo sapiens
  misc_RNA (1)...(19): siRNA sense strand
cggaugagcccaaggaaga

SEQ ID NO: 2564592 - RNA, 19 nt, Homo sapiens
  misc_RNA (1)...(19): siRNA sense strand
auauugaagugguggacua

SEQ ID NO: 2564593 - RNA, 19 nt, Homo sapiens
  misc_RNA (1)...(19): siRNA sense strand
gauucaagugcgagaacaa

SEQ ID NO: 2564594 - RNA, 19 nt, Homo sapiens
  misc_RNA (1)...(19): siRNA sense strand
ggacaaugacugugggaac

SEQ ID NO: 2564595 - RNA, 19 nt, Homo sapiens
  misc_RNA (1)...(19): siRNA sense strand
gagcauaacugccugggua

SEQ ID NO: 2564596 - RNA, 19 nt, Homo sapiens
  misc_RNA (1)...(19): siRNA sense strand
ggacaaugacuguguggau

SEQ ID NO: 2564597 - RNA, 19 nt, Homo sapiens
  misc_RNA (1)...(19): siRNA sense strand
acaaugacugugaggauaa

SEQ ID NO: 2564598 - RNA, 19 nt, Homo sapiens
  misc_RNA (1)...(19): siRNA sense strand
agacacuggugcaggacaa

SEQ ID NO: 2564599 - RNA, 19 nt, Homo sapiens
  misc_RNA (1)...(19): siRNA sense strand
acaaaugccgggugaacaa

SEQ ID NO: 2564600 - RNA, 19 nt, Homo sapiens
  misc_RNA (1)...(19): siRNA sense strand
ggacagacugggaggagga

SEQ ID NO: 2564601 - RNA, 19 nt, Homo sapiens
  misc_RNA (1)...(19): siRNA sense strand
gagcaaagacaaugccaca

SEQ ID NO: 2564602 - RNA, 19 nt, Homo sapiens
  misc_RNA (1)...(19): siRNA sense strand
gcucugugacggugacaaa

SEQ ID NO: 2564603 - RNA, 19 nt, Homo sapiens
  misc_RNA (1)...(19): siRNA sense strand
gccgagagcuccaaggcaa

SEQ ID NO: 2564604 - RNA, 19 nt, Homo sapiens
  misc_RNA (1)...(19): siRNA sense strand
ggacaagcuaugacaccaa

SEQ ID NO: 2564605 - RNA, 19 nt, Homo sapiens
  misc_RNA (1)...(19): siRNA sense strand
cgacaacgucacagugcua

SEQ ID NO: 2564606 - RNA, 19 nt, Homo sapiens
  misc_RNA (1)...(19): siRNA sense strand
gagcuggacgugugacaaa

SEQ ID NO: 2564607 - RNA, 19 nt, Homo sapiens
  misc_RNA (1)...(19): siRNA sense strand
gcaccagcccagagcacaa

SEQ ID NO: 2564608 - RNA, 19 nt, Homo sapiens
  misc_RNA (1)...(19): siRNA sense strand
agauuuguccacagaguaa

SEQ ID NO: 2564609 - RNA, 19 nt, Homo sapiens
  misc_RNA (1)...(19): siRNA sense strand
ugacaaagacugugcugau

SEQ ID NO: 2564610 - RNA, 19 nt, Homo sapiens
  misc_RNA (1)...(19): siRNA sense strand
gcaagaacgacaagugcau

SEQ ID NO: 2564611 - RNA, 19 nt, Homo sapiens
  misc_RNA (1)...(19): siRNA sense strand
ucgacgucuuugaggauua

SEQ ID NO: 2564612 - RNA, 19 nt, Homo sapiens
  misc_RNA (1)...(19): siRNA sense strand
ggaacauccaacagaucaa

SEQ ID NO: 2564613 - RNA, 19 nt, Homo sapiens
  misc_RNA (1)...(19): siRNA sense strand
gagaugaacugcagugcca

SEQ ID NO: 2564614 - RNA, 19 nt, Homo sapiens
  misc_RNA (1)...(19): siRNA sense strand
gcacugagcgggagaccau

SEQ ID NO: 2564615 - RNA, 19 nt, Homo sapiens
  misc_RNA (1)...(19): siRNA sense strand
cagacaagauugaacggau

SEQ ID NO: 2564616 - RNA, 19 nt, Homo sapiens
  misc_RNA (1)...(19): siRNA sense strand
ugucuguguuugaggauuu

SEQ ID NO: 2564617 - RNA, 19 nt, Homo sapiens
  misc_RNA (1)...(19): siRNA sense strand
ggaccgacugggaaacaaa

SEQ ID NO: 2564618 - RNA, 19 nt, Homo sapiens
  misc_RNA (1)...(19): siRNA sense strand
guuucgagguggugauuca

SEQ ID NO: 2564619 - RNA, 19 nt, Homo sapiens
  misc_RNA (1)...(19): siRNA sense strand
uggacugacuggcgaacaa

SEQ ID NO: 2564620 - RNA, 19 nt, Homo sapiens
  misc_RNA (1)...(19): siRNA sense strand
ggacuggaugggagacaau

SEQ ID NO: 2564621 - RNA, 19 nt, Homo sapiens
  misc_RNA (1)...(19): siRNA sense strand
agacuacagugaugagaca

SEQ ID NO: 2564622 - RNA, 19 nt, Homo sapiens
  misc_RNA (1)...(19): siRNA sense strand
gcacggacgagaagcgaga

SEQ ID NO: 2564623 - RNA, 19 nt, Homo sapiens
  misc_RNA (1)...(19): siRNA sense strand
guggcuguguugaaggaua

SEQ ID NO: 2564624 - RNA, 19 nt, Homo sapiens
  misc_RNA (1)...(19): siRNA sense strand
cgaacaaacacacuggcua

SEQ ID NO: 2564625 - RNA, 19 nt, Homo sapiens
  misc_RNA (1)...(19): siRNA sense strand
acucugugcaugagggaau

SEQ ID NO: 2564626 - RNA, 19 nt, Homo sapiens
  misc_RNA (1)...(19): siRNA sense strand
gaccagugcucucugaaua

SEQ ID NO: 2564627 - RNA, 19 nt, Homo sapiens
  misc_RNA (1)...(19): siRNA sense strand
gcaucggcguccagcuuaa

SEQ ID NO: 2564628 - RNA, 19 nt, Homo sapiens
  misc_RNA (1)...(19): siRNA sense strand
ggaucaccauuguggaaaa

SEQ ID NO: 2564629 - RNA, 19 nt, Homo sapiens
  misc_RNA (1)...(19): siRNA sense strand
ggagaugcgacaaugacaa

SEQ ID NO: 2564630 - RNA, 19 nt, Homo sapiens
  misc_RNA (1)...(19): siRNA sense strand
acaugaaggucuaugacga

SEQ ID NO: 2564631 - RNA, 19 nt, Homo sapiens
  misc_RNA (1)...(19): siRNA sense strand
gcugcaaggcugugacuga

SEQ ID NO: 2564632 - RNA, 19 nt, Homo sapiens
  misc_RNA (1)...(19): siRNA sense strand
gggccuguguggucaacaa

SEQ ID NO: 2564633 - RNA, 19 nt, Homo sapiens
  misc_RNA (1)...(19): siRNA sense strand
ugguggacuaugagggcaa

SEQ ID NO: 2564634 - RNA, 19 nt, Homo sapiens
  misc_RNA (1)...(19): siRNA sense strand
ugagaagagcugugaggga

SEQ ID NO: 2564635 - RNA, 19 nt, Homo sapiens
  misc_RNA (1)...(19): siRNA sense strand
cggcuuacgagcaggcauu

SEQ ID NO: 2564636 - RNA, 19 nt, Homo sapiens
  misc_RNA (1)...(19): siRNA sense strand
gcacugucaaccagggcaa

SEQ ID NO: 2564637 - RNA, 19 nt, Homo sapiens
  misc_RNA (1)...(19): siRNA sense strand
gaucgaggugugaggugaa

SEQ ID NO: 2564638 - RNA, 19 nt, Homo sapiens
  misc_RNA (1)...(19): siRNA sense strand
guauaagcggcgaguccaa

SEQ ID NO: 2564639 - RNA, 19 nt, Homo sapiens
  misc_RNA (1)...(19): siRNA sense strand
gcugaucaggugucggaaa

SEQ ID NO: 2564640 - RNA, 19 nt, Homo sapiens
  misc_RNA (1)...(19): siRNA sense strand
gcuuucagcuucaggcaga

SEQ ID NO: 2564641 - RNA, 19 nt, Homo sapiens
  misc_RNA (1)...(19): siRNA sense strand
gggaugggacugaugaaga

SEQ ID NO: 2564642 - RNA, 19 nt, Homo sapiens
  misc_RNA (1)...(19): siRNA sense strand
gcaccgagaaagcggccua

SEQ ID NO: 2564643 - RNA, 19 nt, Homo sapiens
  misc_RNA (1)...(19): siRNA sense strand
ucgacuggguggccggaaa

SEQ ID NO: 2564644 - RNA, 19 nt, Homo sapiens
  misc_RNA (1)...(19): siRNA sense strand
acuucuacuuuguggauga

SEQ ID NO: 2564645 - RNA, 19 nt, Homo sapiens
  misc_RNA (1)...(19): siRNA sense strand
ugguggaggacaagaucua

SEQ ID NO: 2564646 - RNA, 19 nt, Homo sapiens
  misc_RNA (1)...(19): siRNA sense strand
uggacaagcuacacgacau

SEQ ID NO: 2564647 - RNA, 19 nt, Homo sapiens
  misc_RNA (1)...(19): siRNA sense strand
cuucaagauccauaaguuu

SEQ ID NO: 2564648 - RNA, 19 nt, Homo sapiens
  misc_RNA (1)...(19): siRNA sense strand
cgaggugugaggugaacaa

SEQ ID NO: 2564649 - RNA, 19 nt, Homo sapiens
  misc_RNA (1)...(19): siRNA sense strand
gggccaugaacguggagau

SEQ ID NO: 2564650 - RNA, 19 nt, Homo sapiens
  misc_RNA (1)...(19): siRNA sense strand
cgacugcccaggugugaaa

SEQ ID NO: 2564651 - RNA, 19 nt, Homo sapiens
  misc_RNA (1)...(19): siRNA sense strand
cgacaaugacaaugacugu

SEQ ID NO: 2564652 - RNA, 19 nt, Homo sapiens
  misc_RNA (1)...(19): siRNA sense strand
ugacccuguuugaggacua

SEQ ID NO: 2564653 - RNA, 19 nt, Homo sapiens
  misc_RNA (1)...(19): siRNA sense strand
ugggaaacaaaguccauua

SEQ ID NO: 2564654 - RNA, 19 nt, Homo sapiens
  misc_RNA (1)...(19): siRNA sense strand
acaaugacugccaggacaa

SEQ ID NO: 2564655 - RNA, 19 nt, Homo sapiens
  misc_RNA (1)...(19): siRNA sense strand
gugacaacuccgaugaaga

SEQ ID NO: 2564656 - RNA, 19 nt, Homo sapiens
  misc_RNA (1)...(19): siRNA sense strand
ggaccaaggagcugggcua

SEQ ID NO: 2564657 - RNA, 19 nt, Homo sapiens
  misc_RNA (1)...(19): siRNA sense strand
ggcaaguacucgcgggaga

SEQ ID NO: 2564658 - RNA, 19 nt, Homo sapiens
  misc_RNA (1)...(19): siRNA sense strand
gggagaagaaccagcccaa

SEQ ID NO: 2564659 - RNA, 19 nt, Homo sapiens
  misc_RNA (1)...(19): siRNA sense strand
gggagaaggaagcgagacu

SEQ ID NO: 2564660 - RNA, 19 nt, Homo sapiens
  misc_RNA (1)...(19): siRNA sense strand
acaaggagcuggaggcguu

SEQ ID NO: 2564661 - RNA, 19 nt, Homo sapiens
  misc_RNA (1)...(19): siRNA sense strand
ccugcaucacaaagagaaa

SEQ ID NO: 2564662 - RNA, 19 nt, Homo sapiens
  misc_RNA (1)...(19): siRNA sense strand
aggaagacgggcuggauga

SEQ ID NO: 2564663 - RNA, 19 nt, Homo sapiens
  misc_RNA (1)...(19): siRNA sense strand
ugaagauacaggagaggga

SEQ ID NO: 2564664 - RNA, 19 nt, Homo sapiens
  misc_RNA (1)...(19): siRNA sense strand
ccaaaaucgagaagcacaa

SEQ ID NO: 2564665 - RNA, 19 nt, Homo sapiens
  misc_RNA (1)...(19): siRNA sense strand
ccggcgaagaacuggacaa

SEQ ID NO: 2564666 - RNA, 19 nt, Homo sapiens
  misc_RNA (1)...(19): siRNA sense strand
gagcugggcuacacgguga

SEQ ID NO: 2564667 - RNA, 19 nt, Homo sapiens
  misc_RNA (1)...(19): siRNA sense strand
aagcgagacucauacgcaa

SEQ ID NO: 2564668 - RNA, 19 nt, Homo sapiens
  misc_RNA (1)...(19): siRNA sense strand
ucaaugucaucuuggccaa

SEQ ID NO: 2564669 - RNA, 19 nt, Homo sapiens
  misc_RNA (1)...(19): siRNA sense strand
aggcgaagaccucugggaa

SEQ ID NO: 2564670 - RNA, 19 nt, Homo sapiens
  misc_RNA (1)...(19): siRNA sense strand
aagaaauccacgagaacgu

SEQ ID NO: 2564671 - RNA, 19 nt, Homo sapiens
  misc_RNA (1)...(19): siRNA sense strand
ugggcuacacggugaagaa

SEQ ID NO: 2564672 - RNA, 19 nt, Homo sapiens
  misc_RNA (1)...(19): siRNA sense strand
ugaagaagcaucugcagga

SEQ ID NO: 2564673 - RNA, 19 nt, Homo sapiens
  misc_RNA (1)...(19): siRNA sense strand
acaaagagaaaguucacga

SEQ ID NO: 2564674 - RNA, 19 nt, Homo sapiens
  misc_RNA (1)...(19): siRNA sense strand
ugagcaggaccgaagaaau

SEQ ID NO: 2564675 - RNA, 19 nt, Homo sapiens
  misc_RNA (1)...(19): siRNA sense strand
aguacucgcgggagaagaa

SEQ ID NO: 2564676 - RNA, 19 nt, Homo sapiens
  misc_RNA (1)...(19): siRNA sense strand
aagccaaaaucgagaagca

SEQ ID NO: 2564677 - RNA, 19 nt, Homo sapiens
  misc_RNA (1)...(19): siRNA sense strand
auccagaacuugaggaaaa

SEQ ID NO: 2564678 - RNA, 19 nt, Homo sapiens
  misc_RNA (1)...(19): siRNA sense strand
gcacaguguuugaggaccu

SEQ ID NO: 2564679 - RNA, 19 nt, Homo sapiens
  misc_RNA (1)...(19): siRNA sense strand
cgacgagcagggugagaau

SEQ ID NO: 2564680 - RNA, 19 nt, Homo sapiens
  misc_RNA (1)...(19): siRNA sense strand
ggucugaaguccugccaca

SEQ ID NO: 2564681 - RNA, 19 nt, Homo sapiens
  misc_RNA (1)...(19): siRNA sense strand
agaauaagugcgugcccaa

SEQ ID NO: 2564682 - RNA, 19 nt, Homo sapiens
  misc_RNA (1)...(19): siRNA sense strand
ggaaauaacaaugaggcau

SEQ ID NO: 2564683 - RNA, 19 nt, Homo sapiens
  misc_RNA (1)...(19): siRNA sense strand
ggaaaagugaggaggaagu

SEQ ID NO: 2564684 - RNA, 19 nt, Homo sapiens
  misc_RNA (1)...(19): siRNA sense strand
aggacaagucaccgaaauu

SEQ ID NO: 2564685 - RNA, 19 nt, Homo sapiens
  misc_RNA (1)...(19): siRNA sense strand
gggcuggagacguggcuuu

SEQ ID NO: 2564686 - RNA, 19 nt, Homo sapiens
  misc_RNA (1)...(19): siRNA sense strand
ggaacucugugaaaggcaa

SEQ ID NO: 2564687 - RNA, 19 nt, Homo sapiens
  misc_RNA (1)...(19): siRNA sense strand
ccuucaagugucugagaga

SEQ ID NO: 2564688 - RNA, 19 nt, Homo sapiens
  misc_RNA (1)...(19): siRNA sense strand
ugcagaacacugauggaaa

SEQ ID NO: 2564689 - RNA, 19 nt, Homo sapiens
  misc_RNA (1)...(19): siRNA sense strand
ccauccagaacuugaggaa

SEQ ID NO: 2564690 - RNA, 19 nt, Homo sapiens
  misc_RNA (1)...(19): siRNA sense strand
uggaaauaacaaugaggca

SEQ ID NO: 2564691 - RNA, 19 nt, Homo sapiens
  misc_RNA (1)...(19): siRNA sense strand
cagacgaggcugaaaggga

SEQ ID NO: 2564692 - RNA, 19 nt, Homo sapiens
  misc_RNA (1)...(19): siRNA sense strand
cucggaagccaguggacaa

SEQ ID NO: 2564693 - RNA, 19 nt, Homo sapiens
  misc_RNA (1)...(19): siRNA sense strand
gaaauaacaaugaggcaug

SEQ ID NO: 2564694 - RNA, 19 nt, Homo sapiens
  misc_RNA (1)...(19): siRNA sense strand
ggaaaggacaagucaccga

SEQ ID NO: 2564695 - RNA, 19 nt, Homo sapiens
  misc_RNA (1)...(19): siRNA sense strand
gaggauagauucugggcug

SEQ ID NO: 2564696 - RNA, 19 nt, Homo sapiens
  misc_RNA (1)...(19): siRNA sense strand
ccguggcuguggugaagaa

SEQ ID NO: 2564697 - RNA, 19 nt, Homo sapiens
  misc_RNA (1)...(19): siRNA sense strand
aggcugaaagggacgagua

SEQ ID NO: 2564698 - RNA, 19 nt, Homo sapiens
  misc_RNA (1)...(19): siRNA sense strand
ccaacaaagcagugacccu

SEQ ID NO: 2564699 - RNA, 19 nt, Homo sapiens
  misc_RNA (1)...(19): siRNA sense strand
agguggaacgccugaaaca

SEQ ID NO: 2564700 - RNA, 19 nt, Homo sapiens
  misc_RNA (1)...(19): siRNA sense strand
acgagagauacuacggcua

SEQ ID NO: 2564701 - RNA, 19 nt, Homo sapiens
  misc_RNA (1)...(19): siRNA sense strand
ggcaaaacaacauaugaaa

SEQ ID NO: 2564702 - RNA, 19 nt, Homo sapiens
  misc_RNA (1)...(19): siRNA sense strand
ugaacgaacugcaaggucu

SEQ ID NO: 2564703 - RNA, 19 nt, Homo sapiens
  misc_RNA (1)...(19): siRNA sense strand
ggcugaaagggacgaguau

SEQ ID NO: 2564704 - RNA, 19 nt, Homo sapiens
  misc_RNA (1)...(19): siRNA sense strand
cuggcuggccguaggagaa

SEQ ID NO: 2564705 - RNA, 19 nt, Homo sapiens
  misc_RNA (1)...(19): siRNA sense strand
aacaaugaggcaugggcua

SEQ ID NO: 2564706 - RNA, 19 nt, Homo sapiens
  misc_RNA (1)...(19): siRNA sense strand
uggaguggcuugagcgaag

SEQ ID NO: 2564707 - RNA, 19 nt, Homo sapiens
  misc_RNA (1)...(19): siRNA sense strand
cagaacacugauggaaaua

SEQ ID NO: 2564708 - RNA, 19 nt, Homo sapiens
  misc_RNA (1)...(19): siRNA sense strand
gcacgaagugugaauggca

SEQ ID NO: 2564709 - RNA, 19 nt, Homo sapiens
  misc_RNA (1)...(19): siRNA sense strand
aggacugcaggcuggaaua

SEQ ID NO: 2564710 - RNA, 19 nt, Homo sapiens
  misc_RNA (1)...(19): siRNA sense strand
acguugcauuugugaaaga

SEQ ID NO: 2564711 - RNA, 19 nt, Homo sapiens
  misc_RNA (1)...(19): siRNA sense strand
uggauaagguggaacgccu

SEQ ID NO: 2564712 - RNA, 19 nt, Homo sapiens
  misc_RNA (1)...(19): siRNA sense strand
gaggcaugggcuaaggauu

SEQ ID NO: 2564713 - RNA, 19 nt, Homo sapiens
  misc_RNA (1)...(19): siRNA sense strand
ggaucugacugcccggaca

SEQ ID NO: 2564714 - RNA, 19 nt, Homo sapiens
  misc_RNA (1)...(19): siRNA sense strand
gggaacagaucuuuggagu

SEQ ID NO: 2564715 - RNA, 19 nt, Homo sapiens
  misc_RNA (1)...(19): siRNA sense strand
uggagcuagcuguggauaa

SEQ ID NO: 2564716 - RNA, 19 nt, Homo sapiens
  misc_RNA (1)...(19): siRNA sense strand
aggccuuccuggagggcau

SEQ ID NO: 2564717 - RNA, 19 nt, Homo sapiens
  misc_RNA (1)...(19): siRNA sense strand
gggagguguaugagggacu

SEQ ID NO: 2564718 - RNA, 19 nt, Homo sapiens
  misc_RNA (1)...(19): siRNA sense strand
guguaugagggacugguaa

SEQ ID NO: 2564719 - RNA, 19 nt, Homo sapiens
  misc_RNA (1)...(19): siRNA sense strand
uguaugagggacugguaau

SEQ ID NO: 2564720 - RNA, 19 nt, Homo sapiens
  misc_RNA (1)...(19): siRNA sense strand
ccucugggcugauggggaa

SEQ ID NO: 2564721 - RNA, 19 nt, Homo sapiens
  misc_RNA (1)...(19): siRNA sense strand
ccgagaaacuggagaaccg

SEQ ID NO: 2564722 - RNA, 19 nt, Homo sapiens
  misc_RNA (1)...(19): siRNA sense strand
uggcagucaccgagaacca

SEQ ID NO: 2564723 - RNA, 19 nt, Homo sapiens
  misc_RNA (1)...(19): siRNA sense strand
cccagaaggcauggagcua

SEQ ID NO: 2564724 - RNA, 19 nt, Homo sapiens
  misc_RNA (1)...(19): siRNA sense strand
cguaauacugaaagaacua

SEQ ID NO: 2564725 - RNA, 19 nt, Homo sapiens
  misc_RNA (1)...(19): siRNA sense strand
gagcgaugaagguggcaaa

SEQ ID NO: 2564726 - RNA, 19 nt, Homo sapiens
  misc_RNA (1)...(19): siRNA sense strand
gggaagucuggauggguua

SEQ ID NO: 2564727 - RNA, 19 nt, Homo sapiens
  misc_RNA (1)...(19): siRNA sense strand
agaaaggagagaagaugaa

SEQ ID NO: 2564728 - RNA, 19 nt, Homo sapiens
  misc_RNA (1)...(19): siRNA sense strand
gauaaagaugccugggaga

SEQ ID NO: 2564729 - RNA, 19 nt, Homo sapiens
  misc_RNA (1)...(19): siRNA sense strand
ucaagaaaggagagaagau

SEQ ID NO: 2564730 - RNA, 19 nt, Homo sapiens
  misc_RNA (1)...(19): siRNA sense strand
agaaaaggcagaagagaga

SEQ ID NO: 2564731 - RNA, 19 nt, Homo sapiens
  misc_RNA (1)...(19): siRNA sense strand
uugcagagggaauggcaua

SEQ ID NO: 2564732 - RNA, 19 nt, Homo sapiens
  misc_RNA (1)...(19): siRNA sense strand
acucaacaccuuagaaaca

SEQ ID NO: 2564733 - RNA, 19 nt, Homo sapiens
  misc_RNA (1)...(19): siRNA sense strand
ggaaggacgcagaaaggca

SEQ ID NO: 2564734 - RNA, 19 nt, Homo sapiens
  misc_RNA (1)...(19): siRNA sense strand
agaggaacaaggagacauu

SEQ ID NO: 2564735 - RNA, 19 nt, Homo sapiens
  misc_RNA (1)...(19): siRNA sense strand
aagaaaggagagaagauga

SEQ ID NO: 2564736 - RNA, 19 nt, Homo sapiens
  misc_RNA (1)...(19): siRNA sense strand
gcauggagaaugguggaaa

SEQ ID NO: 2564737 - RNA, 19 nt, Homo sapiens
  misc_RNA (1)...(19): siRNA sense strand
acguaauacugaaagaacu

SEQ ID NO: 2564738 - RNA, 19 nt, Homo sapiens
  misc_RNA (1)...(19): siRNA sense strand
ccuuauuagagaaagugaa

SEQ ID NO: 2564739 - RNA, 19 nt, Homo sapiens
  misc_RNA (1)...(19): siRNA sense strand
ccagcaacuauguggccaa

SEQ ID NO: 2564740 - RNA, 19 nt, Homo sapiens
  misc_RNA (1)...(19): siRNA sense strand
aauugucaccuaugggaaa

SEQ ID NO: 2564741 - RNA, 19 nt, Homo sapiens
  misc_RNA (1)...(19): siRNA sense strand
caauaaacagcaaaggcca

SEQ ID NO: 2564742 - RNA, 19 nt, Homo sapiens
  misc_RNA (1)...(19): siRNA sense strand
augacaagcucgugaggcu

SEQ ID NO: 2564743 - RNA, 19 nt, Homo sapiens
  misc_RNA (1)...(19): siRNA sense strand
cuugagugacgauggagua

SEQ ID NO: 2564744 - RNA, 19 nt, Homo sapiens
  misc_RNA (1)...(19): siRNA sense strand
uggauuuccugaagagcga

SEQ ID NO: 2564745 - RNA, 19 nt, Homo sapiens
  misc_RNA (1)...(19): siRNA sense strand
ccuauuaaguggacggcuc

SEQ ID NO: 2564746 - RNA, 19 nt, Homo sapiens
  misc_RNA (1)...(19): siRNA sense strand
ccaucaaguuggugaaaag

SEQ ID NO: 2564747 - RNA, 19 nt, Homo sapiens
  misc_RNA (1)...(19): siRNA sense strand
agaagagagaccaacguuu

SEQ ID NO: 2564748 - RNA, 19 nt, Homo sapiens
  misc_RNA (1)...(19): siRNA sense strand
cucagauugcagagggaau

SEQ ID NO: 2564749 - RNA, 19 nt, Homo sapiens
  misc_RNA (1)...(19): siRNA sense strand
ucaccgaguacauggccaa

SEQ ID NO: 2564750 - RNA, 19 nt, Homo sapiens
  misc_RNA (1)...(19): siRNA sense strand
aaggagagaagaugaaagu

SEQ ID NO: 2564751 - RNA, 19 nt, Homo sapiens
  misc_RNA (1)...(19): siRNA sense strand
uagaaacagaagagugguu

SEQ ID NO: 2564752 - RNA, 19 nt, Homo sapiens
  misc_RNA (1)...(19): siRNA sense strand
acaucaaagaggaggggaa

SEQ ID NO: 2564753 - RNA, 19 nt, Homo sapiens
  misc_RNA (1)...(19): siRNA sense strand
caucuauccgggaggaaau

SEQ ID NO: 2564754 - RNA, 19 nt, Homo sapiens
  misc_RNA (1)...(19): siRNA sense strand
aggaaaucucugacaucaa

SEQ ID NO: 2564755 - RNA, 19 nt, Homo sapiens
  misc_RNA (1)...(19): siRNA sense strand
aaauuguggaagaaggcaa

SEQ ID NO: 2564756 - RNA, 19 nt, Homo sapiens
  misc_RNA (1)...(19): siRNA sense strand
cuugaaugccuuggauaaa

SEQ ID NO: 2564757 - RNA, 19 nt, Homo sapiens
  misc_RNA (1)...(19): siRNA sense strand
aauuguggaagaaggcaaa

SEQ ID NO: 2564758 - RNA, 19 nt, Homo sapiens
  misc_RNA (1)...(19): siRNA sense strand
aggccagagaccaggauuu

SEQ ID NO: 2564759 - RNA, 19 nt, Homo sapiens
  misc_RNA (1)...(19): siRNA sense strand
acaagggauucaagggagu

SEQ ID NO: 2564760 - RNA, 19 nt, Homo sapiens
  misc_RNA (1)...(19): siRNA sense strand
agauagucgcucuggauca

SEQ ID NO: 2564761 - RNA, 19 nt, Homo sapiens
  misc_RNA (1)...(19): siRNA sense strand
cucccaaggcacagagaca

SEQ ID NO: 2564762 - RNA, 19 nt, Homo sapiens
  misc_RNA (1)...(19): siRNA sense strand
gcugggaggaagagauagu

SEQ ID NO: 2564763 - RNA, 19 nt, Homo sapiens
  misc_RNA (1)...(19): siRNA sense strand
cagcaaguaccauggacca

SEQ ID NO: 2564764 - RNA, 19 nt, Homo sapiens
  misc_RNA (1)...(19): siRNA sense strand
aaauaaagcuccugggcaa

SEQ ID NO: 2564765 - RNA, 19 nt, Homo sapiens
  misc_RNA (1)...(19): siRNA sense strand
cagcaagagucguucacca

SEQ ID NO: 2564766 - RNA, 19 nt, Homo sapiens
  misc_RNA (1)...(19): siRNA sense strand
gguugugaaauucggagaa

SEQ ID NO: 2564767 - RNA, 19 nt, Homo sapiens
  misc_RNA (1)...(19): siRNA sense strand
gcugcugaagguugugaaa

SEQ ID NO: 2564768 - RNA, 19 nt, Homo sapiens
  misc_RNA (1)...(19): siRNA sense strand
ggaggagcaaugagaggca

SEQ ID NO: 2564769 - RNA, 19 nt, Homo sapiens
  misc_RNA (1)...(19): siRNA sense strand
cgggcaaaugcgaggacaa

SEQ ID NO: 2564770 - RNA, 19 nt, Homo sapiens
  misc_RNA (1)...(19): siRNA sense strand
aggacaagagcguggagaa

SEQ ID NO: 2564771 - RNA, 19 nt, Homo sapiens
  misc_RNA (1)...(19): siRNA sense strand
gggacaagaccucgggcuu

SEQ ID NO: 2564772 - RNA, 19 nt, Homo sapiens
  misc_RNA (1)...(19): siRNA sense strand
gggcgaagggcuaucggaa

SEQ ID NO: 2564773 - RNA, 19 nt, Homo sapiens
  misc_RNA (1)...(19): siRNA sense strand
ccacaggugccaugcgcaa

SEQ ID NO: 2564774 - RNA, 19 nt, Homo sapiens
  misc_RNA (1)...(19): siRNA sense strand
acgacaacgcugacaacaa

SEQ ID NO: 2564775 - RNA, 19 nt, Homo sapiens
  misc_RNA (1)...(19): siRNA sense strand
acaacaagcuccaccguga

SEQ ID NO: 2564776 - RNA, 19 nt, Homo sapiens
  misc_RNA (1)...(19): siRNA sense strand
uggcccugguggaggagaa

SEQ ID NO: 2564777 - RNA, 19 nt, Homo sapiens
  misc_RNA (1)...(19): siRNA sense strand
ucucggaacgcuaggaaca

SEQ ID NO: 2564778 - RNA, 19 nt, Homo sapiens
  misc_RNA (1)...(19): siRNA sense strand
cgccagaagaugcgggagu

SEQ ID NO: 2564779 - RNA, 19 nt, Homo sapiens
  misc_RNA (1)...(19): siRNA sense strand
acaucauagcugugcucaa

SEQ ID NO: 2564780 - RNA, 19 nt, Homo sapiens
  misc_RNA (1)...(19): siRNA sense strand
gaucugagcugcagucgga

SEQ ID NO: 2564781 - RNA, 19 nt, Homo sapiens
  misc_RNA (1)...(19): siRNA sense strand
aucaagaagaagcgggaca

SEQ ID NO: 2564782 - RNA, 19 nt, Homo sapiens
  misc_RNA (1)...(19): siRNA sense strand
ucguggagaccgaggcaua

SEQ ID NO: 2564783 - RNA, 19 nt, Homo sapiens
  misc_RNA (1)...(19): siRNA sense strand
ggaugaagcuguauggcug

SEQ ID NO: 2564784 - RNA, 19 nt, Homo sapiens
  misc_RNA (1)...(19): siRNA sense strand
gcgacuuccuaauggcaca

SEQ ID NO: 2564785 - RNA, 19 nt, Homo sapiens
  misc_RNA (1)...(19): siRNA sense strand
uugcagaugaagaaaccaa

SEQ ID NO: 2564786 - RNA, 19 nt, Homo sapiens
  misc_RNA (1)...(19): siRNA sense strand
ggucaguguggucgacaga

SEQ ID NO: 2564787 - RNA, 19 nt, Homo sapiens
  misc_RNA (1)...(19): siRNA sense strand
gguaaagguuggaagcaca

SEQ ID NO: 2564788 - RNA, 19 nt, Homo sapiens
  misc_RNA (1)...(19): siRNA sense strand
aagaagagaccauuggaaa

SEQ ID NO: 2564789 - RNA, 19 nt, Homo sapiens
  misc_RNA (1)...(19): siRNA sense strand
cuguacaagaagaaagaaa

SEQ ID NO: 2564790 - RNA, 19 nt, Homo sapiens
  misc_RNA (1)...(19): siRNA sense strand
ggaaaauguuagggacaaa

SEQ ID NO: 2564791 - RNA, 19 nt, Homo sapiens
  misc_RNA (1)...(19): siRNA sense strand
uggaaauccuacagaauca

SEQ ID NO: 2564792 - RNA, 19 nt, Homo sapiens
  misc_RNA (1)...(19): siRNA sense strand
cagagagaguaaugauaau

SEQ ID NO: 2564793 - RNA, 19 nt, Homo sapiens
  misc_RNA (1)...(19): siRNA sense strand
agauguuccuggagaaauu

SEQ ID NO: 2564794 - RNA, 19 nt, Homo sapiens
  misc_RNA (1)...(19): siRNA sense strand
cauuaaaggccauuggaga

SEQ ID NO: 2564795 - RNA, 19 nt, Homo sapiens
  misc_RNA (1)...(19): siRNA sense strand
ggaaguuugcuguggguuu

SEQ ID NO: 2564796 - RNA, 19 nt, Homo sapiens
  misc_RNA (1)...(19): siRNA sense strand
agaagaaagaagagaccau

SEQ ID NO: 2564797 - RNA, 19 nt, Homo sapiens
  misc_RNA (1)...(19): siRNA sense strand
cauuaaggaaucuggaaau

SEQ ID NO: 2564798 - RNA, 19 nt, Homo sapiens
  misc_RNA (1)...(19): siRNA sense strand
agucagaauuucaagcaau

SEQ ID NO: 2564799 - RNA, 19 nt, Homo sapiens
  misc_RNA (1)...(19): siRNA sense strand
cuguaaauguugaugagau

SEQ ID NO: 2564800 - RNA, 19 nt, Homo sapiens
  misc_RNA (1)...(19): siRNA sense strand
gagucgaaaggauggauaa

SEQ ID NO: 2564801 - RNA, 19 nt, Homo sapiens
  misc_RNA (1)...(19): siRNA sense strand
aaguuaaagaaguggguga

SEQ ID NO: 2564802 - RNA, 19 nt, Homo sapiens
  misc_RNA (1)...(19): siRNA sense strand
ugggagaacaggaucaaua

SEQ ID NO: 2564803 - RNA, 19 nt, Homo sapiens
  misc_RNA (1)...(19): siRNA sense strand
agaagagaccauuggaaaa

SEQ ID NO: 2564804 - RNA, 19 nt, Homo sapiens
  misc_RNA (1)...(19): siRNA sense strand
aaaugaagcagcagcacaa

SEQ ID NO: 2564805 - RNA, 19 nt, Homo sapiens
  misc_RNA (1)...(19): siRNA sense strand
cugcagaagaagcgacaau

SEQ ID NO: 2564806 - RNA, 19 nt, Homo sapiens
  misc_RNA (1)...(19): siRNA sense strand
ucgaaaggauggauaacau

SEQ ID NO: 2564807 - RNA, 19 nt, Homo sapiens
  misc_RNA (1)...(19): siRNA sense strand
acauuaaggaaucuggaaa

SEQ ID NO: 2564808 - RNA, 19 nt, Homo sapiens
  misc_RNA (1)...(19): siRNA sense strand
guguuuggucagauagaaa

SEQ ID NO: 2564809 - RNA, 19 nt, Homo sapiens
  misc_RNA (1)...(19): siRNA sense strand
cagugaggaugaaagcaaa

SEQ ID NO: 2564810 - RNA, 19 nt, Homo sapiens
  misc_RNA (1)...(19): siRNA sense strand
aagaaaugucugaggacca

SEQ ID NO: 2564811 - RNA, 19 nt, Homo sapiens
  misc_RNA (1)...(19): siRNA sense strand
cuagaaacccggaugucaa

SEQ ID NO: 2564812 - RNA, 19 nt, Homo sapiens
  misc_RNA (1)...(19): siRNA sense strand
uggaacaacauuaaggaau

SEQ ID NO: 2564813 - RNA, 19 nt, Homo sapiens
  misc_RNA (1)...(19): siRNA sense strand
gaggaagugaucugggaau

SEQ ID NO: 2564814 - RNA, 19 nt, Homo sapiens
  misc_RNA (1)...(19): siRNA sense strand
ggagcauuacuuaaagaua

SEQ ID NO: 2564815 - RNA, 19 nt, Homo sapiens
  misc_RNA (1)...(19): siRNA sense strand
acagaaauugacagaagaa

SEQ ID NO: 2564816 - RNA, 19 nt, Homo sapiens
  misc_RNA (1)...(19): siRNA sense strand
acauagaaaugaagcagca

SEQ ID NO: 2564817 - RNA, 19 nt, Homo sapiens
  misc_RNA (1)...(19): siRNA sense strand
cagcaaggaguuauggauu

SEQ ID NO: 2564818 - RNA, 19 nt, Homo sapiens
  misc_RNA (1)...(19): siRNA sense strand
cuggagaaauuuugaagaa

SEQ ID NO: 2564819 - RNA, 19 nt, Homo sapiens
  misc_RNA (1)...(19): siRNA sense strand
cuauguuccugcagaagaa

SEQ ID NO: 2564820 - RNA, 19 nt, Homo sapiens
  misc_RNA (1)...(19): siRNA sense strand
gggaauuaccacaugggau

SEQ ID NO: 2564821 - RNA, 19 nt, Homo sapiens
  misc_RNA (1)...(19): siRNA sense strand
cuuuaugacagcaaguaua

SEQ ID NO: 2564822 - RNA, 19 nt, Homo sapiens
  misc_RNA (1)...(19): siRNA sense strand
gcuugaugcuguaucggaa

SEQ ID NO: 2564823 - RNA, 19 nt, Homo sapiens
  misc_RNA (1)...(19): siRNA sense strand
ggaccaaacauggguggaa

SEQ ID NO: 2564824 - RNA, 19 nt, Homo sapiens
  misc_RNA (1)...(19): siRNA sense strand
ggaguacauuuauggaaga

SEQ ID NO: 2564825 - RNA, 19 nt, Homo sapiens
  misc_RNA (1)...(19): siRNA sense strand
ccaaagaaaugucugagga

SEQ ID NO: 2564826 - RNA, 19 nt, Homo sapiens
  misc_RNA (1)...(19): siRNA sense strand
caaugaacaagcugccaaa

SEQ ID NO: 2564827 - RNA, 19 nt, Homo sapiens
  misc_RNA (1)...(19): siRNA sense strand
caggaguuuaugauagaaa

SEQ ID NO: 2564828 - RNA, 19 nt, Homo sapiens
  misc_RNA (1)...(19): siRNA sense strand
caucacaguccuugguuau

SEQ ID NO: 2564829 - RNA, 19 nt, Homo sapiens
  misc_RNA (1)...(19): siRNA sense strand
cugcagaccaacuguacaa

SEQ ID NO: 2564830 - RNA, 19 nt, Homo sapiens
  misc_RNA (1)...(19): siRNA sense strand
ucagugaggaugaaagcaa

SEQ ID NO: 2564831 - RNA, 19 nt, Homo sapiens
  misc_RNA (1)...(19): siRNA sense strand
uaccaaauaacuagaggaa

SEQ ID NO: 2564832 - RNA, 19 nt, Homo sapiens
  misc_RNA (1)...(19): siRNA sense strand
gcagauguuccuggagaaa

SEQ ID NO: 2564833 - RNA, 19 nt, Homo sapiens
  misc_RNA (1)...(19): siRNA sense strand
gacaauuaauggaacaaca

SEQ ID NO: 2564834 - RNA, 19 nt, Homo sapiens
  misc_RNA (1)...(19): siRNA sense strand
gcuggaaggauuaauaaau

SEQ ID NO: 2564835 - RNA, 19 nt, Homo sapiens
  misc_RNA (1)...(19): siRNA sense strand
acgaaaagaaagagacuca

SEQ ID NO: 2564836 - RNA, 19 nt, Homo sapiens
  misc_RNA (1)...(19): siRNA sense strand
cuauacgccgcuagaauua

SEQ ID NO: 2564837 - RNA, 19 nt, Homo sapiens
  misc_RNA (1)...(19): siRNA sense strand
agacggaaguuaaagaagu

SEQ ID NO: 2564838 - RNA, 19 nt, Homo sapiens
  misc_RNA (1)...(19): siRNA sense strand
uauaaaggacggaguacau

SEQ ID NO: 2564839 - RNA, 19 nt, Homo sapiens
  misc_RNA (1)...(19): siRNA sense strand
guauagauucuuuggggaa

SEQ ID NO: 2564840 - RNA, 19 nt, Homo sapiens
  misc_RNA (1)...(19): siRNA sense strand
ggccaaggucgcuaagcaa

SEQ ID NO: 2564841 - RNA, 19 nt, Homo sapiens
  misc_RNA (1)...(19): siRNA sense strand
guacauuuauggaagaacu

SEQ ID NO: 2564842 - RNA, 19 nt, Homo sapiens
  misc_RNA (1)...(19): siRNA sense strand
ggaagaacugacugacaca

SEQ ID NO: 2564843 - RNA, 19 nt, Homo sapiens
  misc_RNA (1)...(19): siRNA sense strand
ggauccaggcgcagcagaa

SEQ ID NO: 2564844 - RNA, 19 nt, Homo sapiens
  misc_RNA (1)...(19): siRNA sense strand
aagaaagagacucaaguau

SEQ ID NO: 2564845 - RNA, 19 nt, Homo sapiens
  misc_RNA (1)...(19): siRNA sense strand
agaaguggacagaggaguu

SEQ ID NO: 2564846 - RNA, 19 nt, Homo sapiens
  misc_RNA (1)...(19): siRNA sense strand
ggaccaggaauguuucaaa

SEQ ID NO: 2564847 - RNA, 19 nt, Homo sapiens
  misc_RNA (1)...(19): siRNA sense strand
ugaccaagauggaggacga

SEQ ID NO: 2564848 - RNA, 19 nt, Homo sapiens
  misc_RNA (1)...(19): siRNA sense strand
caaauuauguggaggcgau

SEQ ID NO: 2564849 - RNA, 19 nt, Homo sapiens
  misc_RNA (1)...(19): siRNA sense strand
agguagaagcagcaaagaa

SEQ ID NO: 2564850 - RNA, 19 nt, Homo sapiens
  misc_RNA (1)...(19): siRNA sense strand
aggaggacauuaaggccaa

SEQ ID NO: 2564851 - RNA, 19 nt, Homo sapiens
  misc_RNA (1)...(19): siRNA sense strand
aggcagagagggugagcga

SEQ ID NO: 2564852 - RNA, 19 nt, Homo sapiens
  misc_RNA (1)...(19): siRNA sense strand
gaguagaaguguccagcga

SEQ ID NO: 2564853 - RNA, 19 nt, Homo sapiens
  misc_RNA (1)...(19): siRNA sense strand
ccaagaagcugaaagaggu

SEQ ID NO: 2564854 - RNA, 19 nt, Homo sapiens
  misc_RNA (1)...(19): siRNA sense strand
agagagaagaagaaggcca

SEQ ID NO: 2564855 - RNA, 19 nt, Homo sapiens
  misc_RNA (1)...(19): siRNA sense strand
gagcagagcaucagagcag

SEQ ID NO: 2564856 - RNA, 19 nt, Homo sapiens
  misc_RNA (1)...(19): siRNA sense strand
ccuucgaggaugaggacga

SEQ ID NO: 2564857 - RNA, 19 nt, Homo sapiens
  misc_RNA (1)...(19): siRNA sense strand
cagcgugcaaagaggagaa

SEQ ID NO: 2564858 - RNA, 19 nt, Homo sapiens
  misc_RNA (1)...(19): siRNA sense strand
cccuuaaugucccgagcaa

SEQ ID NO: 2564859 - RNA, 19 nt, Homo sapiens
  misc_RNA (1)...(19): siRNA sense strand
cacgagaagccaacagcaa

SEQ ID NO: 2564860 - RNA, 19 nt, Homo sapiens
  misc_RNA (1)...(19): siRNA sense strand
ccuucauguccgaggcaga

SEQ ID NO: 2564861 - RNA, 19 nt, Homo sapiens
  misc_RNA (1)...(19): siRNA sense strand
ccugaacagcucaagaaau

SEQ ID NO: 2564862 - RNA, 19 nt, Homo sapiens
  misc_RNA (1)...(19): siRNA sense strand
ccgaguaagcccagcagca

SEQ ID NO: 2564863 - RNA, 19 nt, Homo sapiens
  misc_RNA (1)...(19): siRNA sense strand
ucagugagaaggaggacau

SEQ ID NO: 2564864 - RNA, 19 nt, Homo sapiens
  misc_RNA (1)...(19): siRNA sense strand
cagcugaugcaguggagga

SEQ ID NO: 2564865 - RNA, 19 nt, Homo sapiens
  misc_RNA (1)...(19): siRNA sense strand
gcuucugggaggucgggaa

SEQ ID NO: 2564866 - RNA, 19 nt, Homo sapiens
  misc_RNA (1)...(19): siRNA sense strand
ccaagauggaggacgagga

SEQ ID NO: 2564867 - RNA, 19 nt, Homo sapiens
  misc_RNA (1)...(19): siRNA sense strand
uagaaaagugcaagcaaga

SEQ ID NO: 2564868 - RNA, 19 nt, Homo sapiens
  misc_RNA (1)...(19): siRNA sense strand
ugaaagagguagaagcagc

SEQ ID NO: 2564869 - RNA, 19 nt, Homo sapiens
  misc_RNA (1)...(19): siRNA sense strand
ccuacgagggcgacagaaa

SEQ ID NO: 2564870 - RNA, 19 nt, Homo sapiens
  misc_RNA (1)...(19): siRNA sense strand
cugaauaugugguccgaga

SEQ ID NO: 2564871 - RNA, 19 nt, Homo sapiens
  misc_RNA (1)...(19): siRNA sense strand
gcacaauggaugggcguau

SEQ ID NO: 2564872 - RNA, 19 nt, Homo sapiens
  misc_RNA (1)...(19): siRNA sense strand
gggauggguggcagggaau

SEQ ID NO: 2564873 - RNA, 19 nt, Homo sapiens
  misc_RNA (1)...(19): siRNA sense strand
ggucaaugggacugagugu

SEQ ID NO: 2564874 - RNA, 19 nt, Homo sapiens
  misc_RNA (1)...(19): siRNA sense strand
agggauggguggcagggaa

SEQ ID NO: 2564875 - RNA, 19 nt, Homo sapiens
  misc_RNA (1)...(19): siRNA sense strand
acacaaaggugcuggugcu

SEQ ID NO: 2564876 - RNA, 19 nt, Homo sapiens
  misc_RNA (1)...(19): siRNA sense strand
gcauggaguaccuggcaga

SEQ ID NO: 2564877 - RNA, 19 nt, Homo sapiens
  misc_RNA (1)...(19): siRNA sense strand
cugcacuggucuucagcua

SEQ ID NO: 2564878 - RNA, 19 nt, Homo sapiens
  misc_RNA (1)...(19): siRNA sense strand
gggcaagcacuuccgggua

SEQ ID NO: 2564879 - RNA, 19 nt, Homo sapiens
  misc_RNA (1)...(19): siRNA sense strand
gcguagauggugaauguca

SEQ ID NO: 2564880 - RNA, 19 nt, Homo sapiens
  misc_RNA (1)...(19): siRNA sense strand
gggcuuagggcaguggaaa

SEQ ID NO: 2564881 - RNA, 19 nt, Homo sapiens
  misc_RNA (1)...(19): siRNA sense strand
ggaacugcaugcuggacga

SEQ ID NO: 2564882 - RNA, 19 nt, Homo sapiens
  misc_RNA (1)...(19): siRNA sense strand
guuuguagccauacgcaau

SEQ ID NO: 2564883 - RNA, 19 nt, Homo sapiens
  misc_RNA (1)...(19): siRNA sense strand
ccggugacacagacacaaa

SEQ ID NO: 2564884 - RNA, 19 nt, Homo sapiens
  misc_RNA (1)...(19): siRNA sense strand
cguagauggugaaugucau

SEQ ID NO: 2564885 - RNA, 19 nt, Homo sapiens
  misc_RNA (1)...(19): siRNA sense strand
uggcugacuguguggguau

SEQ ID NO: 2564886 - RNA, 19 nt, Homo sapiens
  misc_RNA (1)...(19): siRNA sense strand
gagcagaaguuugugcaca

SEQ ID NO: 2564887 - RNA, 19 nt, Homo sapiens
  misc_RNA (1)...(19): siRNA sense strand
aagacuuuguagaggaguu

SEQ ID NO: 2564888 - RNA, 19 nt, Homo sapiens
  misc_RNA (1)...(19): siRNA sense strand
cuccgauagugaagaugaa

SEQ ID NO: 2564889 - RNA, 19 nt, Homo sapiens
  misc_RNA (1)...(19): siRNA sense strand
ucacagagaugcagcaggu

SEQ ID NO: 2564890 - RNA, 19 nt, Homo sapiens
  misc_RNA (1)...(19): siRNA sense strand
uguaacugugguugagcaa

SEQ ID NO: 2564891 - RNA, 19 nt, Homo sapiens
  misc_RNA (1)...(19): siRNA sense strand
cacugaagccugaggagca

SEQ ID NO: 2564892 - RNA, 19 nt, Homo sapiens
  misc_RNA (1)...(19): siRNA sense strand
caaaggugcuggugcugga

SEQ ID NO: 2564893 - RNA, 19 nt, Homo sapiens
  misc_RNA (1)...(19): siRNA sense strand
agugugaacuggagcccuu

SEQ ID NO: 2564894 - RNA, 19 nt, Homo sapiens
  misc_RNA (1)...(19): siRNA sense strand
agaugaauccugugugcca

SEQ ID NO: 2564895 - RNA, 19 nt, Homo sapiens
  misc_RNA (1)...(19): siRNA sense strand
ccucuaaggggcaguacaa

SEQ ID NO: 2564896 - RNA, 19 nt, Homo sapiens
  misc_RNA (1)...(19): siRNA sense strand
cgcucuuggcugaggucaa

SEQ ID NO: 2564897 - RNA, 19 nt, Homo sapiens
  misc_RNA (1)...(19): siRNA sense strand
agaaggagcuguaccgaga

SEQ ID NO: 2564898 - RNA, 19 nt, Homo sapiens
  misc_RNA (1)...(19): siRNA sense strand
ccaagaacuacguggaagu

SEQ ID NO: 2564899 - RNA, 19 nt, Homo sapiens
  misc_RNA (1)...(19): siRNA sense strand
gcccagagacugaggagga

SEQ ID NO: 2564900 - RNA, 19 nt, Homo sapiens
  misc_RNA (1)...(19): siRNA sense strand
acgaggaagagcuggagaa

SEQ ID NO: 2564901 - RNA, 19 nt, Homo sapiens
  misc_RNA (1)...(19): siRNA sense strand
gugggaagcugcaggucca

SEQ ID NO: 2564902 - RNA, 19 nt, Homo sapiens
  misc_RNA (1)...(19): siRNA sense strand
cagauuuacuggugcucca

SEQ ID NO: 2564903 - RNA, 19 nt, Homo sapiens
  misc_RNA (1)...(19): siRNA sense strand
agugguaugcagaggcuau

SEQ ID NO: 2564904 - RNA, 19 nt, Homo sapiens
  misc_RNA (1)...(19): siRNA sense strand
cugaggaggaugaagagga

SEQ ID NO: 2564905 - RNA, 19 nt, Homo sapiens
  misc_RNA (1)...(19): siRNA sense strand
agaaggagcuguaccgaga

SEQ ID NO: 2564906 - RNA, 19 nt, Homo sapiens
  misc_RNA (1)...(19): siRNA sense strand
ccaagaacuacguggaagu

SEQ ID NO: 2564907 - RNA, 19 nt, Homo sapiens
  misc_RNA (1)...(19): siRNA sense strand
gcccagagacugaggagga

SEQ ID NO: 2564908 - RNA, 19 nt, Homo sapiens
  misc_RNA (1)...(19): siRNA sense strand
acgaggaagagcuggagaa

SEQ ID NO: 2564909 - RNA, 19 nt, Homo sapiens
  misc_RNA (1)...(19): siRNA sense strand
gugggaagcugcaggucca

SEQ ID NO: 2564910 - RNA, 19 nt, Homo sapiens
  misc_RNA (1)...(19): siRNA sense strand
cagauuuacuggugcucca

SEQ ID NO: 2564911 - RNA, 19 nt, Homo sapiens
  misc_RNA (1)...(19): siRNA sense strand
agugguaugcagaggcuau

SEQ ID NO: 2564912 - RNA, 19 nt, Homo sapiens
  misc_RNA (1)...(19): siRNA sense strand
cugaggaggaugaagagga

SEQ ID NO: 2564913 - RNA, 19 nt, Homo sapiens
  misc_RNA (1)...(19): siRNA sense strand
gggaagugcuccagggacu

SEQ ID NO: 2564914 - RNA, 19 nt, Homo sapiens
  misc_RNA (1)...(19): siRNA sense strand
aagaagauacacagggaca

SEQ ID NO: 2564915 - RNA, 19 nt, Homo sapiens
  misc_RNA (1)...(19): siRNA sense strand
ccaagaaggaaaagaugaa

SEQ ID NO: 2564916 - RNA, 19 nt, Homo sapiens
  misc_RNA (1)...(19): siRNA sense strand
uggugaagauggagccuga

SEQ ID NO: 2564917 - RNA, 19 nt, Homo sapiens
  misc_RNA (1)...(19): siRNA sense strand
ccuggaucuucuugacaaa

SEQ ID NO: 2564918 - RNA, 19 nt, Homo sapiens
  misc_RNA (1)...(19): siRNA sense strand
gaaagagaccagagcagga

SEQ ID NO: 2564919 - RNA, 19 nt, Homo sapiens
  misc_RNA (1)...(19): siRNA sense strand
agaagaagauacacaggga

SEQ ID NO: 2564920 - RNA, 19 nt, Homo sapiens
  misc_RNA (1)...(19): siRNA sense strand
ccugaagggaggauacaau

SEQ ID NO: 2564921 - RNA, 19 nt, Homo sapiens
  misc_RNA (1)...(19): siRNA sense strand
ccaccaagauccaggacac

SEQ ID NO: 2564922 - RNA, 19 nt, Homo sapiens
  misc_RNA (1)...(19): siRNA sense strand
aaggaaaagaugaagagaa

SEQ ID NO: 2564923 - RNA, 19 nt, Homo sapiens
  misc_RNA (1)...(19): siRNA sense strand
ggguguacuccaucaacaa

SEQ ID NO: 2564924 - RNA, 19 nt, Homo sapiens
  misc_RNA (1)...(19): siRNA sense strand
cggaaagagaccagagcag

SEQ ID NO: 2564925 - RNA, 19 nt, Homo sapiens
  misc_RNA (1)...(19): siRNA sense strand
ccaagauccaggacaccaa

SEQ ID NO: 2564926 - RNA, 19 nt, Homo sapiens
  misc_RNA (1)...(19): siRNA sense strand
acuaugacgacguggacau

SEQ ID NO: 2564927 - RNA, 19 nt, Homo sapiens
  misc_RNA (1)...(19): siRNA sense strand
acucacagaagaagauaca

SEQ ID NO: 2564928 - RNA, 19 nt, Homo sapiens
  misc_RNA (1)...(19): siRNA sense strand
caggaggccacgcuggaaa

SEQ ID NO: 2564929 - RNA, 19 nt, Homo sapiens
  misc_RNA (1)...(19): siRNA sense strand
uggccuaccaugggaguua

SEQ ID NO: 2564930 - RNA, 19 nt, Homo sapiens
  misc_RNA (1)...(19): siRNA sense strand
gaagauauggugauggugu

SEQ ID NO: 2564931 - RNA, 19 nt, Homo sapiens
  misc_RNA (1)...(19): siRNA sense strand
caucgaacuggccgagcua

SEQ ID NO: 2564932 - RNA, 19 nt, Homo sapiens
  misc_RNA (1)...(19): siRNA sense strand
cugcuggaacggaaagaga

SEQ ID NO: 2564933 - RNA, 19 nt, Homo sapiens
  misc_RNA (1)...(19): siRNA sense strand
gcgcuuugaacaagagcaa

SEQ ID NO: 2564934 - RNA, 19 nt, Homo sapiens
  misc_RNA (1)...(19): siRNA sense strand
gaccgaagcuggagggacu

SEQ ID NO: 2564935 - RNA, 19 nt, Homo sapiens
  misc_RNA (1)...(19): siRNA sense strand
agaacgaggagaagagcau

SEQ ID NO: 2564936 - RNA, 19 nt, Homo sapiens
  misc_RNA (1)...(19): siRNA sense strand
gcgaaaagacugugccaga

SEQ ID NO: 2564937 - RNA, 19 nt, Homo sapiens
  misc_RNA (1)...(19): siRNA sense strand
ugugggagaacgaggagaa

SEQ ID NO: 2564938 - RNA, 19 nt, Homo sapiens
  misc_RNA (1)...(19): siRNA sense strand
cgggcaagcaggacuacaa

SEQ ID NO: 2564939 - RNA, 19 nt, Homo sapiens
  misc_RNA (1)...(19): siRNA sense strand
cccacagagccaagcauaa

SEQ ID NO: 2564940 - RNA, 19 nt, Homo sapiens
  misc_RNA (1)...(19): siRNA sense strand
aagcauaaggucugccgaa

SEQ ID NO: 2564941 - RNA, 19 nt, Homo sapiens
  misc_RNA (1)...(19): siRNA sense strand
ugucagagcugcaagcguu

SEQ ID NO: 2564942 - RNA, 19 nt, Homo sapiens
  misc_RNA (1)...(19): siRNA sense strand
gggagaacgaggagaagag

SEQ ID NO: 2564943 - RNA, 19 nt, Homo sapiens
  misc_RNA (1)...(19): siRNA sense strand
aggcccagcuugugaaaau

SEQ ID NO: 2564944 - RNA, 19 nt, Homo sapiens
  misc_RNA (1)...(19): siRNA sense strand
cugcaagcucuuugacaca

SEQ ID NO: 2564945 - RNA, 19 nt, Homo sapiens
  misc_RNA (1)...(19): siRNA sense strand
aggcuugggcacuguuuaa

SEQ ID NO: 2564946 - RNA, 19 nt, Homo sapiens
  misc_RNA (1)...(19): siRNA sense strand
ccgacgggcucuaugcgaa

SEQ ID NO: 2564947 - RNA, 19 nt, Homo sapiens
  misc_RNA (1)...(19): siRNA sense strand
aggcaaagaaagcucauca

SEQ ID NO: 2564948 - RNA, 19 nt, Homo sapiens
  misc_RNA (1)...(19): siRNA sense strand
ccacagaucuauccgccau

SEQ ID NO: 2564949 - RNA, 19 nt, Homo sapiens
  misc_RNA (1)...(19): siRNA sense strand
ugccuguacuaccgggaaa

SEQ ID NO: 2564950 - RNA, 19 nt, Homo sapiens
  misc_RNA (1)...(19): siRNA sense strand
cugccaagauuccagguga

SEQ ID NO: 2564951 - RNA, 19 nt, Homo sapiens
  misc_RNA (1)...(19): siRNA sense strand
gaaaaugguugccagguga

SEQ ID NO: 2564952 - RNA, 19 nt, Homo sapiens
  misc_RNA (1)...(19): siRNA sense strand
caccaaaggaugauggaaa

SEQ ID NO: 2564953 - RNA, 19 nt, Homo sapiens
  misc_RNA (1)...(19): siRNA sense strand
ccacuaagaaagaggaaaa

SEQ ID NO: 2564954 - RNA, 19 nt, Homo sapiens
  misc_RNA (1)...(19): siRNA sense strand
ggucauugauauagcugaa

SEQ ID NO: 2564955 - RNA, 19 nt, Homo sapiens
  misc_RNA (1)...(19): siRNA sense strand
gagaggaagaagaaacaaa

SEQ ID NO: 2564956 - RNA, 19 nt, Homo sapiens
  misc_RNA (1)...(19): siRNA sense strand
agugaaaguuggugaagau

SEQ ID NO: 2564957 - RNA, 19 nt, Homo sapiens
  misc_RNA (1)...(19): siRNA sense strand
aaacgaagcuggagaggca

SEQ ID NO: 2564958 - RNA, 19 nt, Homo sapiens
  misc_RNA (1)...(19): siRNA sense strand
uggagaaggucaagaggau

SEQ ID NO: 2564959 - RNA, 19 nt, Homo sapiens
  misc_RNA (1)...(19): siRNA sense strand
gagaaguggagaaggucaa

SEQ ID NO: 2564960 - RNA, 19 nt, Homo sapiens
  misc_RNA (1)...(19): siRNA sense strand
ucaaggaggaacagugaaa

SEQ ID NO: 2564961 - RNA, 19 nt, Homo sapiens
  misc_RNA (1)...(19): siRNA sense strand
aagauaacuuugcaggaaa

SEQ ID NO: 2564962 - RNA, 19 nt, Homo sapiens
  misc_RNA (1)...(19): siRNA sense strand
cugaauuggucauagggaa

SEQ ID NO: 2564963 - RNA, 19 nt, Homo sapiens
  misc_RNA (1)...(19): siRNA sense strand
aagucaaaguggacaaauu

SEQ ID NO: 2564964 - RNA, 19 nt, Homo sapiens
  misc_RNA (1)...(19): siRNA sense strand
ucaucaaggccaaagauaa

SEQ ID NO: 2564965 - RNA, 19 nt, Homo sapiens
  misc_RNA (1)...(19): siRNA sense strand
agucaaggcugaagaucuu

SEQ ID NO: 2564966 - RNA, 19 nt, Homo sapiens
  misc_RNA (1)...(19): siRNA sense strand
acacaaaggaugccagaga

SEQ ID NO: 2564967 - RNA, 19 nt, Homo sapiens
  misc_RNA (1)...(19): siRNA sense strand
ccgcagaguuggagaagcu

SEQ ID NO: 2564968 - RNA, 19 nt, Homo sapiens
  misc_RNA (1)...(19): siRNA sense strand
aaugcaaacuggaggugaa

SEQ ID NO: 2564969 - RNA, 19 nt, Homo sapiens
  misc_RNA (1)...(19): siRNA sense strand
gcacgaaucuacugggacu

SEQ ID NO: 2564970 - RNA, 19 nt, Homo sapiens
  misc_RNA (1)...(19): siRNA sense strand
acaaaggaugccagagaau

SEQ ID NO: 2564971 - RNA, 19 nt, Homo sapiens
  misc_RNA (1)...(19): siRNA sense strand
gucuaaaggugguucacaa

SEQ ID NO: 2564972 - RNA, 19 nt, Homo sapiens
  misc_RNA (1)...(19): siRNA sense strand
ugaauuggucauagggaau

SEQ ID NO: 2564973 - RNA, 19 nt, Homo sapiens
  misc_RNA (1)...(19): siRNA sense strand
caguggagauugaaugcaa

SEQ ID NO: 2564974 - RNA, 19 nt, Homo sapiens
  misc_RNA (1)...(19): siRNA sense strand
aggaacaagccaagcagaa

SEQ ID NO: 2564975 - RNA, 19 nt, Homo sapiens
  misc_RNA (1)...(19): siRNA sense strand
agauaacuuugcaggaaau

SEQ ID NO: 2564976 - RNA, 19 nt, Homo sapiens
  misc_RNA (1)...(19): siRNA sense strand
uuucaagagaaguggagaa

SEQ ID NO: 2564977 - RNA, 19 nt, Homo sapiens
  misc_RNA (1)...(19): siRNA sense strand
accaaaggaugauggaaau

SEQ ID NO: 2564978 - RNA, 19 nt, Homo sapiens
  misc_RNA (1)...(19): siRNA sense strand
cugcagugugagaggaaau

SEQ ID NO: 2564979 - RNA, 19 nt, Homo sapiens
  misc_RNA (1)...(19): siRNA sense strand
cagcagguuuagauggcua

SEQ ID NO: 2564980 - RNA, 19 nt, Homo sapiens
  misc_RNA (1)...(19): siRNA sense strand
ccaagacaccugaagcaaa

SEQ ID NO: 2564981 - RNA, 19 nt, Homo sapiens
  misc_RNA (1)...(19): siRNA sense strand
cugcauaucagguugacaa

SEQ ID NO: 2564982 - RNA, 19 nt, Homo sapiens
  misc_RNA (1)...(19): siRNA sense strand
ugaccaaacagcuggaaga

SEQ ID NO: 2564983 - RNA, 19 nt, Homo sapiens
  misc_RNA (1)...(19): siRNA sense strand
ggcugaugcugcagaauau

SEQ ID NO: 2564984 - RNA, 19 nt, Homo sapiens
  misc_RNA (1)...(19): siRNA sense strand
gcugcagaauauucaguaa

SEQ ID NO: 2564985 - RNA, 19 nt, Homo sapiens
  misc_RNA (1)...(19): siRNA sense strand
aaugacaacaggaggacaa

SEQ ID NO: 2564986 - RNA, 19 nt, Homo sapiens
  misc_RNA (1)...(19): siRNA sense strand
aauuagaguugaggguaaa

SEQ ID NO: 2564987 - RNA, 19 nt, Homo sapiens
  misc_RNA (1)...(19): siRNA sense strand
gacuguaaaucuuggaaaa

SEQ ID NO: 2564988 - RNA, 19 nt, Homo sapiens
  misc_RNA (1)...(19): siRNA sense strand
gccagaacccacuaagaaa

SEQ ID NO: 2564989 - RNA, 19 nt, Homo sapiens
  misc_RNA (1)...(19): siRNA sense strand
ccaggaaaauggacuaaaa

SEQ ID NO: 2564990 - RNA, 19 nt, Homo sapiens
  misc_RNA (1)...(19): siRNA sense strand
gacaagaagagcauggaau

SEQ ID NO: 2564991 - RNA, 19 nt, Homo sapiens
  misc_RNA (1)...(19): siRNA sense strand
ugaagcagcaggaggaaga

SEQ ID NO: 2564992 - RNA, 19 nt, Homo sapiens
  misc_RNA (1)...(19): siRNA sense strand
gaguggaauuagaauguga

SEQ ID NO: 2564993 - RNA, 19 nt, Homo sapiens
  misc_RNA (1)...(19): siRNA sense strand
cugaaaacauaccaggaaa

SEQ ID NO: 2564994 - RNA, 19 nt, Homo sapiens
  misc_RNA (1)...(19): siRNA sense strand
gggaaaaccaagaccagaa

SEQ ID NO: 2564995 - RNA, 19 nt, Homo sapiens
  misc_RNA (1)...(19): siRNA sense strand
gaacagugaaaguugguga

SEQ ID NO: 2564996 - RNA, 19 nt, Homo sapiens
  misc_RNA (1)...(19): siRNA sense strand
ugaaaacauaccaggaaaa

SEQ ID NO: 2564997 - RNA, 19 nt, Homo sapiens
  misc_RNA (1)...(19): siRNA sense strand
ucauagagggagcaacaaa

SEQ ID NO: 2564998 - RNA, 19 nt, Homo sapiens
  misc_RNA (1)...(19): siRNA sense strand
gaauauuacuuccgggucu

SEQ ID NO: 2564999 - RNA, 19 nt, Homo sapiens
  misc_RNA (1)...(19): siRNA sense strand
ccuauaaggauaaguuuga

SEQ ID NO: 2565000 - RNA, 19 nt, Homo sapiens
  misc_RNA (1)...(19): siRNA sense strand
ccagaauuaacuuggaaga

SEQ ID NO: 2565001 - RNA, 19 nt, Homo sapiens
  misc_RNA (1)...(19): siRNA sense strand
gcaaacuggaggugaaagu

SEQ ID NO: 2565002 - RNA, 19 nt, Homo sapiens
  misc_RNA (1)...(19): siRNA sense strand
ccagugaguacgagaagau

SEQ ID NO: 2565003 - RNA, 19 nt, Homo sapiens
  misc_RNA (1)...(19): siRNA sense strand
ccggauaagaacagaaucu

SEQ ID NO: 2565004 - RNA, 19 nt, Homo sapiens
  misc_RNA (1)...(19): siRNA sense strand
ggaagauacaacugcuuau

SEQ ID NO: 2565005 - RNA, 19 nt, Homo sapiens
  misc_RNA (1)...(19): siRNA sense strand
aggacaaucaucugcuaaa

SEQ ID NO: 2565006 - RNA, 19 nt, Homo sapiens
  misc_RNA (1)...(19): siRNA sense strand
aggacuggauaguugcaaa

SEQ ID NO: 2565007 - RNA, 19 nt, Homo sapiens
  misc_RNA (1)...(19): siRNA sense strand
ggauaguugcaaacaaaga

SEQ ID NO: 2565008 - RNA, 19 nt, Homo sapiens
  misc_RNA (1)...(19): siRNA sense strand
aggaaaccuuugagaggca

SEQ ID NO: 2565009 - RNA, 19 nt, Homo sapiens
  misc_RNA (1)...(19): siRNA sense strand
cauuugagaugcagaucau

SEQ ID NO: 2565010 - RNA, 19 nt, Homo sapiens
  misc_RNA (1)...(19): siRNA sense strand
ugaagaugaaggugauuau

SEQ ID NO: 2565011 - RNA, 19 nt, Homo sapiens
  misc_RNA (1)...(19): siRNA sense strand
caacacagugacagugauu

SEQ ID NO: 2565012 - RNA, 19 nt, Homo sapiens
  misc_RNA (1)...(19): siRNA sense strand
caccaugacuaaagagagu

SEQ ID NO: 2565013 - RNA, 19 nt, Homo sapiens
  misc_RNA (1)...(19): siRNA sense strand
cuuuaguggucuccugaaa

SEQ ID NO: 2565014 - RNA, 19 nt, Homo sapiens
  misc_RNA (1)...(19): siRNA sense strand
cugccaaaguucauguuau

SEQ ID NO: 2565015 - RNA, 19 nt, Homo sapiens
  misc_RNA (1)...(19): siRNA sense strand
caccaaaggaugauggaaa

SEQ ID NO: 2565016 - RNA, 19 nt, Homo sapiens
  misc_RNA (1)...(19): siRNA sense strand
ccacuaagaaagaggaaaa

SEQ ID NO: 2565017 - RNA, 19 nt, Homo sapiens
  misc_RNA (1)...(19): siRNA sense strand
ggucauugauauagcugaa

SEQ ID NO: 2565018 - RNA, 19 nt, Homo sapiens
  misc_RNA (1)...(19): siRNA sense strand
gagaggaagaagaaacaaa

SEQ ID NO: 2565019 - RNA, 19 nt, Homo sapiens
  misc_RNA (1)...(19): siRNA sense strand
agugaaaguuggugaagau

SEQ ID NO: 2565020 - RNA, 19 nt, Homo sapiens
  misc_RNA (1)...(19): siRNA sense strand
aaacgaagcuggagaggca

SEQ ID NO: 2565021 - RNA, 19 nt, Homo sapiens
  misc_RNA (1)...(19): siRNA sense strand
uggagaaggucaagaggau

SEQ ID NO: 2565022 - RNA, 19 nt, Homo sapiens
  misc_RNA (1)...(19): siRNA sense strand
gagaaguggagaaggucaa

SEQ ID NO: 2565023 - RNA, 19 nt, Homo sapiens
  misc_RNA (1)...(19): siRNA sense strand
ucaaggaggaacagugaaa

SEQ ID NO: 2565024 - RNA, 19 nt, Homo sapiens
  misc_RNA (1)...(19): siRNA sense strand
aagauaacuuugcaggaaa

SEQ ID NO: 2565025 - RNA, 19 nt, Homo sapiens
  misc_RNA (1)...(19): siRNA sense strand
cugaauuggucauagggaa

SEQ ID NO: 2565026 - RNA, 19 nt, Homo sapiens
  misc_RNA (1)...(19): siRNA sense strand
aagucaaaguggacaaauu

SEQ ID NO: 2565027 - RNA, 19 nt, Homo sapiens
  misc_RNA (1)...(19): siRNA sense strand
ucaucaaggccaaagauaa

SEQ ID NO: 2565028 - RNA, 19 nt, Homo sapiens
  misc_RNA (1)...(19): siRNA sense strand
agucaaggcugaagaucuu

SEQ ID NO: 2565029 - RNA, 19 nt, Homo sapiens
  misc_RNA (1)...(19): siRNA sense strand
acacaaaggaugccagaga

SEQ ID NO: 2565030 - RNA, 19 nt, Homo sapiens
  misc_RNA (1)...(19): siRNA sense strand
ccgcagaguuggagaagcu

SEQ ID NO: 2565031 - RNA, 19 nt, Homo sapiens
  misc_RNA (1)...(19): siRNA sense strand
aaugcaaacuggaggugaa

SEQ ID NO: 2565032 - RNA, 19 nt, Homo sapiens
  misc_RNA (1)...(19): siRNA sense strand
gcacgaaucuacugggacu

SEQ ID NO: 2565033 - RNA, 19 nt, Homo sapiens
  misc_RNA (1)...(19): siRNA sense strand
acaaaggaugccagagaau

SEQ ID NO: 2565034 - RNA, 19 nt, Homo sapiens
  misc_RNA (1)...(19): siRNA sense strand
gucuaaaggugguucacaa

SEQ ID NO: 2565035 - RNA, 19 nt, Homo sapiens
  misc_RNA (1)...(19): siRNA sense strand
ugaauuggucauagggaau

SEQ ID NO: 2565036 - RNA, 19 nt, Homo sapiens
  misc_RNA (1)...(19): siRNA sense strand
caguggagauugaaugcaa

SEQ ID NO: 2565037 - RNA, 19 nt, Homo sapiens
  misc_RNA (1)...(19): siRNA sense strand
aggaacaagccaagcagaa

SEQ ID NO: 2565038 - RNA, 19 nt, Homo sapiens
  misc_RNA (1)...(19): siRNA sense strand
agauaacuuugcaggaaau

SEQ ID NO: 2565039 - RNA, 19 nt, Homo sapiens
  misc_RNA (1)...(19): siRNA sense strand
uuucaagagaaguggagaa

SEQ ID NO: 2565040 - RNA, 19 nt, Homo sapiens
  misc_RNA (1)...(19): siRNA sense strand
accaaaggaugauggaaau

SEQ ID NO: 2565041 - RNA, 19 nt, Homo sapiens
  misc_RNA (1)...(19): siRNA sense strand
cugcagugugagaggaaau

SEQ ID NO: 2565042 - RNA, 19 nt, Homo sapiens
  misc_RNA (1)...(19): siRNA sense strand
cagcagguuuagauggcua

SEQ ID NO: 2565043 - RNA, 19 nt, Homo sapiens
  misc_RNA (1)...(19): siRNA sense strand
ccaagacaccugaagcaaa

SEQ ID NO: 2565044 - RNA, 19 nt, Homo sapiens
  misc_RNA (1)...(19): siRNA sense strand
cugcauaucagguugacaa

SEQ ID NO: 2565045 - RNA, 19 nt, Homo sapiens
  misc_RNA (1)...(19): siRNA sense strand
ugaccaaacagcuggaaga

SEQ ID NO: 2565046 - RNA, 19 nt, Homo sapiens
  misc_RNA (1)...(19): siRNA sense strand
ggcugaugcugcagaauau

SEQ ID NO: 2565047 - RNA, 19 nt, Homo sapiens
  misc_RNA (1)...(19): siRNA sense strand
gcugcagaauauucaguaa

SEQ ID NO: 2565048 - RNA, 19 nt, Homo sapiens
  misc_RNA (1)...(19): siRNA sense strand
aaugacaacaggaggacaa

SEQ ID NO: 2565049 - RNA, 19 nt, Homo sapiens
  misc_RNA (1)...(19): siRNA sense strand
aauuagaguugaggguaaa

SEQ ID NO: 2565050 - RNA, 19 nt, Homo sapiens
  misc_RNA (1)...(19): siRNA sense strand
gacuguaaaucuuggaaaa

SEQ ID NO: 2565051 - RNA, 19 nt, Homo sapiens
  misc_RNA (1)...(19): siRNA sense strand
gccagaacccacuaagaaa

SEQ ID NO: 2565052 - RNA, 19 nt, Homo sapiens
  misc_RNA (1)...(19): siRNA sense strand
ccaggaaaauggacuaaaa

SEQ ID NO: 2565053 - RNA, 19 nt, Homo sapiens
  misc_RNA (1)...(19): siRNA sense strand
gacaagaagagcauggaau

SEQ ID NO: 2565054 - RNA, 19 nt, Homo sapiens
  misc_RNA (1)...(19): siRNA sense strand
ugaagcagcaggaggaaga

SEQ ID NO: 2565055 - RNA, 19 nt, Homo sapiens
  misc_RNA (1)...(19): siRNA sense strand
gaguggaauuagaauguga

SEQ ID NO: 2565056 - RNA, 19 nt, Homo sapiens
  misc_RNA (1)...(19): siRNA sense strand
cugaaaacauaccaggaaa

SEQ ID NO: 2565057 - RNA, 19 nt, Homo sapiens
  misc_RNA (1)...(19): siRNA sense strand
gggaaaaccaagaccagaa

SEQ ID NO: 2565058 - RNA, 19 nt, Homo sapiens
  misc_RNA (1)...(19): siRNA sense strand
gaacagugaaaguugguga

SEQ ID NO: 2565059 - RNA, 19 nt, Homo sapiens
  misc_RNA (1)...(19): siRNA sense strand
ugaaaacauaccaggaaaa

SEQ ID NO: 2565060 - RNA, 19 nt, Homo sapiens
  misc_RNA (1)...(19): siRNA sense strand
ucauagagggagcaacaaa

SEQ ID NO: 2565061 - RNA, 19 nt, Homo sapiens
  misc_RNA (1)...(19): siRNA sense strand
gaauauuacuuccgggucu

SEQ ID NO: 2565062 - RNA, 19 nt, Homo sapiens
  misc_RNA (1)...(19): siRNA sense strand
ccuauaaggauaaguuuga

SEQ ID NO: 2565063 - RNA, 19 nt, Homo sapiens
  misc_RNA (1)...(19): siRNA sense strand
ccagaauuaacuuggaaga

SEQ ID NO: 2565064 - RNA, 19 nt, Homo sapiens
  misc_RNA (1)...(19): siRNA sense strand
gcaaacuggaggugaaagu

SEQ ID NO: 2565065 - RNA, 19 nt, Homo sapiens
  misc_RNA (1)...(19): siRNA sense strand
ccagugaguacgagaagau

SEQ ID NO: 2565066 - RNA, 19 nt, Homo sapiens
  misc_RNA (1)...(19): siRNA sense strand
ccggauaagaacagaaucu

SEQ ID NO: 2565067 - RNA, 19 nt, Homo sapiens
  misc_RNA (1)...(19): siRNA sense strand
ggaagauacaacugcuuau

SEQ ID NO: 2565068 - RNA, 19 nt, Homo sapiens
  misc_RNA (1)...(19): siRNA sense strand
aggacaaucaucugcuaaa

SEQ ID NO: 2565069 - RNA, 19 nt, Homo sapiens
  misc_RNA (1)...(19): siRNA sense strand
aggacuggauaguugcaaa

SEQ ID NO: 2565070 - RNA, 19 nt, Homo sapiens
  misc_RNA (1)...(19): siRNA sense strand
ggauaguugcaaacaaaga

SEQ ID NO: 2565071 - RNA, 19 nt, Homo sapiens
  misc_RNA (1)...(19): siRNA sense strand
aggaaaccuuugagaggca

SEQ ID NO: 2565072 - RNA, 19 nt, Homo sapiens
  misc_RNA (1)...(19): siRNA sense strand
cauuugagaugcagaucau

SEQ ID NO: 2565073 - RNA, 19 nt, Homo sapiens
  misc_RNA (1)...(19): siRNA sense strand
ugaagaugaaggugauuau

SEQ ID NO: 2565074 - RNA, 19 nt, Homo sapiens
  misc_RNA (1)...(19): siRNA sense strand
caacacagugacagugauu

SEQ ID NO: 2565075 - RNA, 19 nt, Homo sapiens
  misc_RNA (1)...(19): siRNA sense strand
caccaugacuaaagagagu

SEQ ID NO: 2565076 - RNA, 19 nt, Homo sapiens
  misc_RNA (1)...(19): siRNA sense strand
cuuuaguggucuccugaaa

SEQ ID NO: 2565077 - RNA, 19 nt, Homo sapiens
  misc_RNA (1)...(19): siRNA sense strand
cugccaaaguucauguuau

SEQ ID NO: 2565078 - RNA, 19 nt, Homo sapiens
  misc_RNA (1)...(19): siRNA sense strand
caccaaaggaugauggaaa

SEQ ID NO: 2565079 - RNA, 19 nt, Homo sapiens
  misc_RNA (1)...(19): siRNA sense strand
ccacuaagaaagaggaaaa

SEQ ID NO: 2565080 - RNA, 19 nt, Homo sapiens
  misc_RNA (1)...(19): siRNA sense strand
ggucauugauauagcugaa

SEQ ID NO: 2565081 - RNA, 19 nt, Homo sapiens
  misc_RNA (1)...(19): siRNA sense strand
gagaggaagaagaaacaaa

SEQ ID NO: 2565082 - RNA, 19 nt, Homo sapiens
  misc_RNA (1)...(19): siRNA sense strand
agugaaaguuggugaagau

SEQ ID NO: 2565083 - RNA, 19 nt, Homo sapiens
  misc_RNA (1)...(19): siRNA sense strand
aaacgaagcuggagaggca

SEQ ID NO: 2565084 - RNA, 19 nt, Homo sapiens
  misc_RNA (1)...(19): siRNA sense strand
uggagaaggucaagaggau

SEQ ID NO: 2565085 - RNA, 19 nt, Homo sapiens
  misc_RNA (1)...(19): siRNA sense strand
gagaaguggagaaggucaa

SEQ ID NO: 2565086 - RNA, 19 nt, Homo sapiens
  misc_RNA (1)...(19): siRNA sense strand
ucaaggaggaacagugaaa

SEQ ID NO: 2565087 - RNA, 19 nt, Homo sapiens
  misc_RNA (1)...(19): siRNA sense strand
aagauaacuuugcaggaaa

SEQ ID NO: 2565088 - RNA, 19 nt, Homo sapiens
  misc_RNA (1)...(19): siRNA sense strand
cugaauuggucauagggaa

SEQ ID NO: 2565089 - RNA, 19 nt, Homo sapiens
  misc_RNA (1)...(19): siRNA sense strand
aagucaaaguggacaaauu

SEQ ID NO: 2565090 - RNA, 19 nt, Homo sapiens
  misc_RNA (1)...(19): siRNA sense strand
ucaucaaggccaaagauaa

SEQ ID NO: 2565091 - RNA, 19 nt, Homo sapiens
  misc_RNA (1)...(19): siRNA sense strand
agucaaggcugaagaucuu

SEQ ID NO: 2565092 - RNA, 19 nt, Homo sapiens
  misc_RNA (1)...(19): siRNA sense strand
acacaaaggaugccagaga

SEQ ID NO: 2565093 - RNA, 19 nt, Homo sapiens
  misc_RNA (1)...(19): siRNA sense strand
ccgcagaguuggagaagcu

SEQ ID NO: 2565094 - RNA, 19 nt, Homo sapiens
  misc_RNA (1)...(19): siRNA sense strand
aaugcaaacuggaggugaa

SEQ ID NO: 2565095 - RNA, 19 nt, Homo sapiens
  misc_RNA (1)...(19): siRNA sense strand
gcacgaaucuacugggacu

SEQ ID NO: 2565096 - RNA, 19 nt, Homo sapiens
  misc_RNA (1)...(19): siRNA sense strand
acaaaggaugccagagaau

SEQ ID NO: 2565097 - RNA, 19 nt, Homo sapiens
  misc_RNA (1)...(19): siRNA sense strand
gucuaaaggugguucacaa

SEQ ID NO: 2565098 - RNA, 19 nt, Homo sapiens
  misc_RNA (1)...(19): siRNA sense strand
ugaauuggucauagggaau

SEQ ID NO: 2565099 - RNA, 19 nt, Homo sapiens
  misc_RNA (1)...(19): siRNA sense strand
caguggagauugaaugcaa

SEQ ID NO: 2565100 - RNA, 19 nt, Homo sapiens
  misc_RNA (1)...(19): siRNA sense strand
aggaacaagccaagcagaa

SEQ ID NO: 2565101 - RNA, 19 nt, Homo sapiens
  misc_RNA (1)...(19): siRNA sense strand
agauaacuuugcaggaaau

SEQ ID NO: 2565102 - RNA, 19 nt, Homo sapiens
  misc_RNA (1)...(19): siRNA sense strand
uuucaagagaaguggagaa

SEQ ID NO: 2565103 - RNA, 19 nt, Homo sapiens
  misc_RNA (1)...(19): siRNA sense strand
accaaaggaugauggaaau

SEQ ID NO: 2565104 - RNA, 19 nt, Homo sapiens
  misc_RNA (1)...(19): siRNA sense strand
cugcagugugagaggaaau

SEQ ID NO: 2565105 - RNA, 19 nt, Homo sapiens
  misc_RNA (1)...(19): siRNA sense strand
cagcagguuuagauggcua

SEQ ID NO: 2565106 - RNA, 19 nt, Homo sapiens
  misc_RNA (1)...(19): siRNA sense strand
ccaagacaccugaagcaaa

SEQ ID NO: 2565107 - RNA, 19 nt, Homo sapiens
  misc_RNA (1)...(19): siRNA sense strand
cugcauaucagguugacaa

SEQ ID NO: 2565108 - RNA, 19 nt, Homo sapiens
  misc_RNA (1)...(19): siRNA sense strand
ugaccaaacagcuggaaga

SEQ ID NO: 2565109 - RNA, 19 nt, Homo sapiens
  misc_RNA (1)...(19): siRNA sense strand
ggcugaugcugcagaauau

SEQ ID NO: 2565110 - RNA, 19 nt, Homo sapiens
  misc_RNA (1)...(19): siRNA sense strand
gcugcagaauauucaguaa

SEQ ID NO: 2565111 - RNA, 19 nt, Homo sapiens
  misc_RNA (1)...(19): siRNA sense strand
aaugacaacaggaggacaa

SEQ ID NO: 2565112 - RNA, 19 nt, Homo sapiens
  misc_RNA (1)...(19): siRNA sense strand
aauuagaguugaggguaaa

SEQ ID NO: 2565113 - RNA, 19 nt, Homo sapiens
  misc_RNA (1)...(19): siRNA sense strand
gacuguaaaucuuggaaaa

SEQ ID NO: 2565114 - RNA, 19 nt, Homo sapiens
  misc_RNA (1)...(19): siRNA sense strand
gccagaacccacuaagaaa

SEQ ID NO: 2565115 - RNA, 19 nt, Homo sapiens
  misc_RNA (1)...(19): siRNA sense strand
ccaggaaaauggacuaaaa

SEQ ID NO: 2565116 - RNA, 19 nt, Homo sapiens
  misc_RNA (1)...(19): siRNA sense strand
gacaagaagagcauggaau

SEQ ID NO: 2565117 - RNA, 19 nt, Homo sapiens
  misc_RNA (1)...(19): siRNA sense strand
ugaagcagcaggaggaaga

SEQ ID NO: 2565118 - RNA, 19 nt, Homo sapiens
  misc_RNA (1)...(19): siRNA sense strand
gaguggaauuagaauguga

SEQ ID NO: 2565119 - RNA, 19 nt, Homo sapiens
  misc_RNA (1)...(19): siRNA sense strand
cugaaaacauaccaggaaa

SEQ ID NO: 2565120 - RNA, 19 nt, Homo sapiens
  misc_RNA (1)...(19): siRNA sense strand
gggaaaaccaagaccagaa

SEQ ID NO: 2565121 - RNA, 19 nt, Homo sapiens
  misc_RNA (1)...(19): siRNA sense strand
gaacagugaaaguugguga

SEQ ID NO: 2565122 - RNA, 19 nt, Homo sapiens
  misc_RNA (1)...(19): siRNA sense strand
ugaaaacauaccaggaaaa

SEQ ID NO: 2565123 - RNA, 19 nt, Homo sapiens
  misc_RNA (1)...(19): siRNA sense strand
ucauagagggagcaacaaa

SEQ ID NO: 2565124 - RNA, 19 nt, Homo sapiens
  misc_RNA (1)...(19): siRNA sense strand
gaauauuacuuccgggucu

SEQ ID NO: 2565125 - RNA, 19 nt, Homo sapiens
  misc_RNA (1)...(19): siRNA sense strand
ccuauaaggauaaguuuga

SEQ ID NO: 2565126 - RNA, 19 nt, Homo sapiens
  misc_RNA (1)...(19): siRNA sense strand
ccagaauuaacuuggaaga

SEQ ID NO: 2565127 - RNA, 19 nt, Homo sapiens
  misc_RNA (1)...(19): siRNA sense strand
gcaaacuggaggugaaagu

SEQ ID NO: 2565128 - RNA, 19 nt, Homo sapiens
  misc_RNA (1)...(19): siRNA sense strand
ccagugaguacgagaagau

SEQ ID NO: 2565129 - RNA, 19 nt, Homo sapiens
  misc_RNA (1)...(19): siRNA sense strand
ccggauaagaacagaaucu

SEQ ID NO: 2565130 - RNA, 19 nt, Homo sapiens
  misc_RNA (1)...(19): siRNA sense strand
ggaagauacaacugcuuau

SEQ ID NO: 2565131 - RNA, 19 nt, Homo sapiens
  misc_RNA (1)...(19): siRNA sense strand
aggacaaucaucugcuaaa

SEQ ID NO: 2565132 - RNA, 19 nt, Homo sapiens
  misc_RNA (1)...(19): siRNA sense strand
aggacuggauaguugcaaa

SEQ ID NO: 2565133 - RNA, 19 nt, Homo sapiens
  misc_RNA (1)...(19): siRNA sense strand
ggauaguugcaaacaaaga

SEQ ID NO: 2565134 - RNA, 19 nt, Homo sapiens
  misc_RNA (1)...(19): siRNA sense strand
aggaaaccuuugagaggca

SEQ ID NO: 2565135 - RNA, 19 nt, Homo sapiens
  misc_RNA (1)...(19): siRNA sense strand
cauuugagaugcagaucau

SEQ ID NO: 2565136 - RNA, 19 nt, Homo sapiens
  misc_RNA (1)...(19): siRNA sense strand
ugaagaugaaggugauuau

SEQ ID NO: 2565137 - RNA, 19 nt, Homo sapiens
  misc_RNA (1)...(19): siRNA sense strand
caacacagugacagugauu

SEQ ID NO: 2565138 - RNA, 19 nt, Homo sapiens
  misc_RNA (1)...(19): siRNA sense strand
caccaugacuaaagagagu

SEQ ID NO: 2565139 - RNA, 19 nt, Homo sapiens
  misc_RNA (1)...(19): siRNA sense strand
cuuuaguggucuccugaaa

SEQ ID NO: 2565140 - RNA, 19 nt, Homo sapiens
  misc_RNA (1)...(19): siRNA sense strand
cugccaaaguucauguuau

SEQ ID NO: 2565141 - RNA, 19 nt, Homo sapiens
  misc_RNA (1)...(19): siRNA sense strand
caccaaaggaugauggaaa

SEQ ID NO: 2565142 - RNA, 19 nt, Homo sapiens
  misc_RNA (1)...(19): siRNA sense strand
ccacuaagaaagaggaaaa

SEQ ID NO: 2565143 - RNA, 19 nt, Homo sapiens
  misc_RNA (1)...(19): siRNA sense strand
ggucauugauauagcugaa

SEQ ID NO: 2565144 - RNA, 19 nt, Homo sapiens
  misc_RNA (1)...(19): siRNA sense strand
gagaggaagaagaaacaaa

SEQ ID NO: 2565145 - RNA, 19 nt, Homo sapiens
  misc_RNA (1)...(19): siRNA sense strand
agugaaaguuggugaagau

SEQ ID NO: 2565146 - RNA, 19 nt, Homo sapiens
  misc_RNA (1)...(19): siRNA sense strand
aaacgaagcuggagaggca

SEQ ID NO: 2565147 - RNA, 19 nt, Homo sapiens
  misc_RNA (1)...(19): siRNA sense strand
uggagaaggucaagaggau

SEQ ID NO: 2565148 - RNA, 19 nt, Homo sapiens
  misc_RNA (1)...(19): siRNA sense strand
gagaaguggagaaggucaa

SEQ ID NO: 2565149 - RNA, 19 nt, Homo sapiens
  misc_RNA (1)...(19): siRNA sense strand
ucaaggaggaacagugaaa

SEQ ID NO: 2565150 - RNA, 19 nt, Homo sapiens
  misc_RNA (1)...(19): siRNA sense strand
aagauaacuuugcaggaaa

SEQ ID NO: 2565151 - RNA, 19 nt, Homo sapiens
  misc_RNA (1)...(19): siRNA sense strand
cugaauuggucauagggaa

SEQ ID NO: 2565152 - RNA, 19 nt, Homo sapiens
  misc_RNA (1)...(19): siRNA sense strand
aagucaaaguggacaaauu

SEQ ID NO: 2565153 - RNA, 19 nt, Homo sapiens
  misc_RNA (1)...(19): siRNA sense strand
ucaucaaggccaaagauaa

SEQ ID NO: 2565154 - RNA, 19 nt, Homo sapiens
  misc_RNA (1)...(19): siRNA sense strand
agucaaggcugaagaucuu

SEQ ID NO: 2565155 - RNA, 19 nt, Homo sapiens
  misc_RNA (1)...(19): siRNA sense strand
acacaaaggaugccagaga

SEQ ID NO: 2565156 - RNA, 19 nt, Homo sapiens
  misc_RNA (1)...(19): siRNA sense strand
ccgcagaguuggagaagcu

SEQ ID NO: 2565157 - RNA, 19 nt, Homo sapiens
  misc_RNA (1)...(19): siRNA sense strand
aaugcaaacuggaggugaa

SEQ ID NO: 2565158 - RNA, 19 nt, Homo sapiens
  misc_RNA (1)...(19): siRNA sense strand
gcacgaaucuacugggacu

SEQ ID NO: 2565159 - RNA, 19 nt, Homo sapiens
  misc_RNA (1)...(19): siRNA sense strand
acaaaggaugccagagaau

SEQ ID NO: 2565160 - RNA, 19 nt, Homo sapiens
  misc_RNA (1)...(19): siRNA sense strand
gucuaaaggugguucacaa

SEQ ID NO: 2565161 - RNA, 19 nt, Homo sapiens
  misc_RNA (1)...(19): siRNA sense strand
ugaauuggucauagggaau

SEQ ID NO: 2565162 - RNA, 19 nt, Homo sapiens
  misc_RNA (1)...(19): siRNA sense strand
caguggagauugaaugcaa

SEQ ID NO: 2565163 - RNA, 19 nt, Homo sapiens
  misc_RNA (1)...(19): siRNA sense strand
aggaacaagccaagcagaa

SEQ ID NO: 2565164 - RNA, 19 nt, Homo sapiens
  misc_RNA (1)...(19): siRNA sense strand
agauaacuuugcaggaaau

SEQ ID NO: 2565165 - RNA, 19 nt, Homo sapiens
  misc_RNA (1)...(19): siRNA sense strand
uuucaagagaaguggagaa

SEQ ID NO: 2565166 - RNA, 19 nt, Homo sapiens
  misc_RNA (1)...(19): siRNA sense strand
accaaaggaugauggaaau

SEQ ID NO: 2565167 - RNA, 19 nt, Homo sapiens
  misc_RNA (1)...(19): siRNA sense strand
cugcagugugagaggaaau

SEQ ID NO: 2565168 - RNA, 19 nt, Homo sapiens
  misc_RNA (1)...(19): siRNA sense strand
cagcagguuuagauggcua

SEQ ID NO: 2565169 - RNA, 19 nt, Homo sapiens
  misc_RNA (1)...(19): siRNA sense strand
ccaagacaccugaagcaaa

SEQ ID NO: 2565170 - RNA, 19 nt, Homo sapiens
  misc_RNA (1)...(19): siRNA sense strand
cugcauaucagguugacaa

SEQ ID NO: 2565171 - RNA, 19 nt, Homo sapiens
  misc_RNA (1)...(19): siRNA sense strand
ugaccaaacagcuggaaga

SEQ ID NO: 2565172 - RNA, 19 nt, Homo sapiens
  misc_RNA (1)...(19): siRNA sense strand
ggcugaugcugcagaauau

SEQ ID NO: 2565173 - RNA, 19 nt, Homo sapiens
  misc_RNA (1)...(19): siRNA sense strand
gcugcagaauauucaguaa

SEQ ID NO: 2565174 - RNA, 19 nt, Homo sapiens
  misc_RNA (1)...(19): siRNA sense strand
aaugacaacaggaggacaa

SEQ ID NO: 2565175 - RNA, 19 nt, Homo sapiens
  misc_RNA (1)...(19): siRNA sense strand
aauuagaguugaggguaaa

SEQ ID NO: 2565176 - RNA, 19 nt, Homo sapiens
  misc_RNA (1)...(19): siRNA sense strand
gacuguaaaucuuggaaaa

SEQ ID NO: 2565177 - RNA, 19 nt, Homo sapiens
  misc_RNA (1)...(19): siRNA sense strand
gccagaacccacuaagaaa

SEQ ID NO: 2565178 - RNA, 19 nt, Homo sapiens
  misc_RNA (1)...(19): siRNA sense strand
ccaggaaaauggacuaaaa

SEQ ID NO: 2565179 - RNA, 19 nt, Homo sapiens
  misc_RNA (1)...(19): siRNA sense strand
gacaagaagagcauggaau

SEQ ID NO: 2565180 - RNA, 19 nt, Homo sapiens
  misc_RNA (1)...(19): siRNA sense strand
ugaagcagcaggaggaaga

SEQ ID NO: 2565181 - RNA, 19 nt, Homo sapiens
  misc_RNA (1)...(19): siRNA sense strand
gaguggaauuagaauguga

SEQ ID NO: 2565182 - RNA, 19 nt, Homo sapiens
  misc_RNA (1)...(19): siRNA sense strand
cugaaaacauaccaggaaa

SEQ ID NO: 2565183 - RNA, 19 nt, Homo sapiens
  misc_RNA (1)...(19): siRNA sense strand
gggaaaaccaagaccagaa

SEQ ID NO: 2565184 - RNA, 19 nt, Homo sapiens
  misc_RNA (1)...(19): siRNA sense strand
gaacagugaaaguugguga

SEQ ID NO: 2565185 - RNA, 19 nt, Homo sapiens
  misc_RNA (1)...(19): siRNA sense strand
ugaaaacauaccaggaaaa

SEQ ID NO: 2565186 - RNA, 19 nt, Homo sapiens
  misc_RNA (1)...(19): siRNA sense strand
ucauagagggagcaacaaa

SEQ ID NO: 2565187 - RNA, 19 nt, Homo sapiens
  misc_RNA (1)...(19): siRNA sense strand
gaauauuacuuccgggucu

SEQ ID NO: 2565188 - RNA, 19 nt, Homo sapiens
  misc_RNA (1)...(19): siRNA sense strand
ccuauaaggauaaguuuga

SEQ ID NO: 2565189 - RNA, 19 nt, Homo sapiens
  misc_RNA (1)...(19): siRNA sense strand
ccagaauuaacuuggaaga

SEQ ID NO: 2565190 - RNA, 19 nt, Homo sapiens
  misc_RNA (1)...(19): siRNA sense strand
gcaaacuggaggugaaagu

SEQ ID NO: 2565191 - RNA, 19 nt, Homo sapiens
  misc_RNA (1)...(19): siRNA sense strand
ccagugaguacgagaagau

SEQ ID NO: 2565192 - RNA, 19 nt, Homo sapiens
  misc_RNA (1)...(19): siRNA sense strand
ccggauaagaacagaaucu

SEQ ID NO: 2565193 - RNA, 19 nt, Homo sapiens
  misc_RNA (1)...(19): siRNA sense strand
ggaagauacaacugcuuau

SEQ ID NO: 2565194 - RNA, 19 nt, Homo sapiens
  misc_RNA (1)...(19): siRNA sense strand
aggacaaucaucugcuaaa

SEQ ID NO: 2565195 - RNA, 19 nt, Homo sapiens
  misc_RNA (1)...(19): siRNA sense strand
aggacuggauaguugcaaa

SEQ ID NO: 2565196 - RNA, 19 nt, Homo sapiens
  misc_RNA (1)...(19): siRNA sense strand
ggauaguugcaaacaaaga

SEQ ID NO: 2565197 - RNA, 19 nt, Homo sapiens
  misc_RNA (1)...(19): siRNA sense strand
aggaaaccuuugagaggca

SEQ ID NO: 2565198 - RNA, 19 nt, Homo sapiens
  misc_RNA (1)...(19): siRNA sense strand
cauuugagaugcagaucau

SEQ ID NO: 2565199 - RNA, 19 nt, Homo sapiens
  misc_RNA (1)...(19): siRNA sense strand
ugaagaugaaggugauuau

SEQ ID NO: 2565200 - RNA, 19 nt, Homo sapiens
  misc_RNA (1)...(19): siRNA sense strand
caacacagugacagugauu

SEQ ID NO: 2565201 - RNA, 19 nt, Homo sapiens
  misc_RNA (1)...(19): siRNA sense strand
caccaugacuaaagagagu

SEQ ID NO: 2565202 - RNA, 19 nt, Homo sapiens
  misc_RNA (1)...(19): siRNA sense strand
cuuuaguggucuccugaaa

SEQ ID NO: 2565203 - RNA, 19 nt, Homo sapiens
  misc_RNA (1)...(19): siRNA sense strand
cugccaaaguucauguuau

SEQ ID NO: 2565204 - RNA, 19 nt, Homo sapiens
  misc_RNA (1)...(19): siRNA sense strand
ggaaagaauuugaggaagc

SEQ ID NO: 2565205 - RNA, 19 nt, Homo sapiens
  misc_RNA (1)...(19): siRNA sense strand
ggcuagaggaagagcagaa

SEQ ID NO: 2565206 - RNA, 19 nt, Homo sapiens
  misc_RNA (1)...(19): siRNA sense strand
cuuucaggcuagaggaaga

SEQ ID NO: 2565207 - RNA, 19 nt, Homo sapiens
  misc_RNA (1)...(19): siRNA sense strand
cugcagagcuucagccgau

SEQ ID NO: 2565208 - RNA, 19 nt, Homo sapiens
  misc_RNA (1)...(19): siRNA sense strand
ggaucuugggucugaggaa

SEQ ID NO: 2565209 - RNA, 19 nt, Homo sapiens
  misc_RNA (1)...(19): siRNA sense strand
cgcucgugcuggaggaaau

SEQ ID NO: 2565210 - RNA, 19 nt, Homo sapiens
  misc_RNA (1)...(19): siRNA sense strand
ugucgagauugcagcggaa

SEQ ID NO: 2565211 - RNA, 19 nt, Homo sapiens
  misc_RNA (1)...(19): siRNA sense strand
ucgagauugcagcggaaua

SEQ ID NO: 2565212 - RNA, 19 nt, Homo sapiens
  misc_RNA (1)...(19): siRNA sense strand
gggucugaggaaagaauuu

SEQ ID NO: 2565213 - RNA, 19 nt, Homo sapiens
  misc_RNA (1)...(19): siRNA sense strand
gagcggugaucgagccuga

SEQ ID NO: 2565214 - RNA, 19 nt, Homo sapiens
  misc_RNA (1)...(19): siRNA sense strand
caguggagaaggugacaca

SEQ ID NO: 2565215 - RNA, 19 nt, Homo sapiens
  misc_RNA (1)...(19): siRNA sense strand
gagcagaagaugaggccag

SEQ ID NO: 2565216 - RNA, 19 nt, Homo sapiens
  misc_RNA (1)...(19): siRNA sense strand
ccauguggaucuugggucu

SEQ ID NO: 2565217 - RNA, 19 nt, Homo sapiens
  misc_RNA (1)...(19): siRNA sense strand
aggaagugggugucgaaga

SEQ ID NO: 2565218 - RNA, 19 nt, Homo sapiens
  misc_RNA (1)...(19): siRNA sense strand
ccuagggacaagauggaga

SEQ ID NO: 2565219 - RNA, 19 nt, Homo sapiens
  misc_RNA (1)...(19): siRNA sense strand
gucgggacguggaggucaa

SEQ ID NO: 2565220 - RNA, 19 nt, Homo sapiens
  misc_RNA (1)...(19): siRNA sense strand
uggaagccaucgagggugu

SEQ ID NO: 2565221 - RNA, 19 nt, Homo sapiens
  misc_RNA (1)...(19): siRNA sense strand
cauggaaaggauaccgcaa

SEQ ID NO: 2565222 - RNA, 19 nt, Homo sapiens
  misc_RNA (1)...(19): siRNA sense strand
aagcugaggauuuuggaaa

SEQ ID NO: 2565223 - RNA, 19 nt, Homo sapiens
  misc_RNA (1)...(19): siRNA sense strand
ggaggaaauggaagcaacu

SEQ ID NO: 2565224 - RNA, 19 nt, Homo sapiens
  misc_RNA (1)...(19): siRNA sense strand
ggaaagaauuugaggaagc

SEQ ID NO: 2565225 - RNA, 19 nt, Homo sapiens
  misc_RNA (1)...(19): siRNA sense strand
ggcuagaggaagagcagaa

SEQ ID NO: 2565226 - RNA, 19 nt, Homo sapiens
  misc_RNA (1)...(19): siRNA sense strand
cuuucaggcuagaggaaga

SEQ ID NO: 2565227 - RNA, 19 nt, Homo sapiens
  misc_RNA (1)...(19): siRNA sense strand
cugcagagcuucagccgau

SEQ ID NO: 2565228 - RNA, 19 nt, Homo sapiens
  misc_RNA (1)...(19): siRNA sense strand
ggaucuugggucugaggaa

SEQ ID NO: 2565229 - RNA, 19 nt, Homo sapiens
  misc_RNA (1)...(19): siRNA sense strand
cgcucgugcuggaggaaau

SEQ ID NO: 2565230 - RNA, 19 nt, Homo sapiens
  misc_RNA (1)...(19): siRNA sense strand
ugucgagauugcagcggaa

SEQ ID NO: 2565231 - RNA, 19 nt, Homo sapiens
  misc_RNA (1)...(19): siRNA sense strand
ucgagauugcagcggaaua

SEQ ID NO: 2565232 - RNA, 19 nt, Homo sapiens
  misc_RNA (1)...(19): siRNA sense strand
gggucugaggaaagaauuu

SEQ ID NO: 2565233 - RNA, 19 nt, Homo sapiens
  misc_RNA (1)...(19): siRNA sense strand
gagcggugaucgagccuga

SEQ ID NO: 2565234 - RNA, 19 nt, Homo sapiens
  misc_RNA (1)...(19): siRNA sense strand
caguggagaaggugacaca

SEQ ID NO: 2565235 - RNA, 19 nt, Homo sapiens
  misc_RNA (1)...(19): siRNA sense strand
gagcagaagaugaggccag

SEQ ID NO: 2565236 - RNA, 19 nt, Homo sapiens
  misc_RNA (1)...(19): siRNA sense strand
ccauguggaucuugggucu

SEQ ID NO: 2565237 - RNA, 19 nt, Homo sapiens
  misc_RNA (1)...(19): siRNA sense strand
aggaagugggugucgaaga

SEQ ID NO: 2565238 - RNA, 19 nt, Homo sapiens
  misc_RNA (1)...(19): siRNA sense strand
ccuagggacaagauggaga

SEQ ID NO: 2565239 - RNA, 19 nt, Homo sapiens
  misc_RNA (1)...(19): siRNA sense strand
gucgggacguggaggucaa

SEQ ID NO: 2565240 - RNA, 19 nt, Homo sapiens
  misc_RNA (1)...(19): siRNA sense strand
uggaagccaucgagggugu

SEQ ID NO: 2565241 - RNA, 19 nt, Homo sapiens
  misc_RNA (1)...(19): siRNA sense strand
ggaggaaauggaagcaacu

SEQ ID NO: 2565242 - RNA, 19 nt, Homo sapiens
  misc_RNA (1)...(19): siRNA sense strand
cauggaaaggauaccgcaa

SEQ ID NO: 2565243 - RNA, 19 nt, Homo sapiens
  misc_RNA (1)...(19): siRNA sense strand
aagcugaggauuuuggaaa

SEQ ID NO: 2565244 - RNA, 19 nt, Homo sapiens
  misc_RNA (1)...(19): siRNA sense strand
caguauagcccaagagauu

SEQ ID NO: 2565245 - RNA, 19 nt, Homo sapiens
  misc_RNA (1)...(19): siRNA sense strand
guaucaaggcaaagaggaa

SEQ ID NO: 2565246 - RNA, 19 nt, Homo sapiens
  misc_RNA (1)...(19): siRNA sense strand
acugcaaagcccagagaaa

SEQ ID NO: 2565247 - RNA, 19 nt, Homo sapiens
  misc_RNA (1)...(19): siRNA sense strand
cuaagaaguaucaaggcaa

SEQ ID NO: 2565248 - RNA, 19 nt, Homo sapiens
  misc_RNA (1)...(19): siRNA sense strand
gcuaagaaguaucaaggca

SEQ ID NO: 2565249 - RNA, 19 nt, Homo sapiens
  misc_RNA (1)...(19): siRNA sense strand
ggacaaagaaacagagacc

SEQ ID NO: 2565250 - RNA, 19 nt, Homo sapiens
  misc_RNA (1)...(19): siRNA sense strand
ucaaauacaucgacgagga

SEQ ID NO: 2565251 - RNA, 19 nt, Homo sapiens
  misc_RNA (1)...(19): siRNA sense strand
gcauagaggaacugugacu

SEQ ID NO: 2565252 - RNA, 19 nt, Homo sapiens
  misc_RNA (1)...(19): siRNA sense strand
aggcaaaaguuuccaguau

SEQ ID NO: 2565253 - RNA, 19 nt, Homo sapiens
  misc_RNA (1)...(19): siRNA sense strand
acgaggaggaugaggacga

SEQ ID NO: 2565254 - RNA, 19 nt, Homo sapiens
  misc_RNA (1)...(19): siRNA sense strand
cggagaagauuuuggagca

SEQ ID NO: 2565255 - RNA, 19 nt, Homo sapiens
  misc_RNA (1)...(19): siRNA sense strand
gcuccagcauagaggaacu

SEQ ID NO: 2565256 - RNA, 19 nt, Homo sapiens
  misc_RNA (1)...(19): siRNA sense strand
aauucagucuuaaggagaa

SEQ ID NO: 2565257 - RNA, 19 nt, Homo sapiens
  misc_RNA (1)...(19): siRNA sense strand
augucagugugaaggcaaa

SEQ ID NO: 2565258 - RNA, 19 nt, Homo sapiens
  misc_RNA (1)...(19): siRNA sense strand
cauuuggagaggaaagauu

SEQ ID NO: 2565259 - RNA, 19 nt, Homo sapiens
  misc_RNA (1)...(19): siRNA sense strand
acaaagaaacagagacccu

SEQ ID NO: 2565260 - RNA, 19 nt, Homo sapiens
  misc_RNA (1)...(19): siRNA sense strand
gcauaugaucgcagacacu

SEQ ID NO: 2565261 - RNA, 19 nt, Homo sapiens
  misc_RNA (1)...(19): siRNA sense strand
agaggaacugugacugaaa

SEQ ID NO: 2565262 - RNA, 19 nt, Homo sapiens
  misc_RNA (1)...(19): siRNA sense strand
caauucagucuuaaggaga

SEQ ID NO: 2565263 - RNA, 19 nt, Homo sapiens
  misc_RNA (1)...(19): siRNA sense strand
aucaagaguuaaaguccua

SEQ ID NO: 2565264 - RNA, 19 nt, Homo sapiens
  misc_RNA (1)...(19): siRNA sense strand
cguaggaaacguaaagucu

SEQ ID NO: 2565265 - RNA, 19 nt, Homo sapiens
  misc_RNA (1)...(19): siRNA sense strand
ucgucacacuguagaugaa

SEQ ID NO: 2565266 - RNA, 19 nt, Homo sapiens
  misc_RNA (1)...(19): siRNA sense strand
aagagcaucaagaguuaaa

SEQ ID NO: 2565267 - RNA, 19 nt, Homo sapiens
  misc_RNA (1)...(19): siRNA sense strand
uaucaaggcaaagaggaaa

SEQ ID NO: 2565268 - RNA, 19 nt, Homo sapiens
  misc_RNA (1)...(19): siRNA sense strand
aaggaggaggcuaaagaaa

SEQ ID NO: 2565269 - RNA, 19 nt, Homo sapiens
  misc_RNA (1)...(19): siRNA sense strand
aggaggaggcuaaagaaaa

SEQ ID NO: 2565270 - RNA, 19 nt, Homo sapiens
  misc_RNA (1)...(19): siRNA sense strand
ggcuaaggaaggaggagca

SEQ ID NO: 2565271 - RNA, 19 nt, Homo sapiens
  misc_RNA (1)...(19): siRNA sense strand
aggagaagaugcaggagcu

SEQ ID NO: 2565272 - RNA, 19 nt, Homo sapiens
  misc_RNA (1)...(19): siRNA sense strand
gcguggaggaaguggugga

SEQ ID NO: 2565273 - RNA, 19 nt, Homo sapiens
  misc_RNA (1)...(19): siRNA sense strand
uggaucagcaggagaagau

SEQ ID NO: 2565274 - RNA, 19 nt, Homo sapiens
  misc_RNA (1)...(19): siRNA sense strand
aggaaggaggagcaaguau

SEQ ID NO: 2565275 - RNA, 19 nt, Homo sapiens
  misc_RNA (1)...(19): siRNA sense strand
gcgcgaaaggaggaggcua

SEQ ID NO: 2565276 - RNA, 19 nt, Homo sapiens
  misc_RNA (1)...(19): siRNA sense strand
gcuaaggaaggaggagcaa

SEQ ID NO: 2565277 - RNA, 19 nt, Homo sapiens
  misc_RNA (1)...(19): siRNA sense strand
acgaagagguagauggcaa

SEQ ID NO: 2565278 - RNA, 19 nt, Homo sapiens
  misc_RNA (1)...(19): siRNA sense strand
ucacagaagaggaggagaa

SEQ ID NO: 2565279 - RNA, 19 nt, Homo sapiens
  misc_RNA (1)...(19): siRNA sense strand
uggaagagcuggaggacga

SEQ ID NO: 2565280 - RNA, 19 nt, Homo sapiens
  misc_RNA (1)...(19): siRNA sense strand
aggcagagcuggaggacga

SEQ ID NO: 2565281 - RNA, 19 nt, Homo sapiens
  misc_RNA (1)...(19): siRNA sense strand
gggaagaaggugaagguga

SEQ ID NO: 2565282 - RNA, 19 nt, Homo sapiens
  misc_RNA (1)...(19): siRNA sense strand
gcaagaaaguggaggcgca

SEQ ID NO: 2565283 - RNA, 19 nt, Homo sapiens
  misc_RNA (1)...(19): siRNA sense strand
agaacaagcaugaggcaau

SEQ ID NO: 2565284 - RNA, 19 nt, Homo sapiens
  misc_RNA (1)...(19): siRNA sense strand
uggaaauguacaagggcaa

SEQ ID NO: 2565285 - RNA, 19 nt, Homo sapiens
  misc_RNA (1)...(19): siRNA sense strand
gcaagaaggaccagggcga

SEQ ID NO: 2565286 - RNA, 19 nt, Homo sapiens
  misc_RNA (1)...(19): siRNA sense strand
ccaaggaugaugugggcaa

SEQ ID NO: 2565287 - RNA, 19 nt, Homo sapiens
  misc_RNA (1)...(19): siRNA sense strand
gagaaugggaagaagguga

SEQ ID NO: 2565288 - RNA, 19 nt, Homo sapiens
  misc_RNA (1)...(19): siRNA sense strand
cggcagaagcugagccuga

SEQ ID NO: 2565289 - RNA, 19 nt, Homo sapiens
  misc_RNA (1)...(19): siRNA sense strand
cgaagagguagauggcaaa

SEQ ID NO: 2565290 - RNA, 19 nt, Homo sapiens
  misc_RNA (1)...(19): siRNA sense strand
ucguggagcugguggagaa

SEQ ID NO: 2565291 - RNA, 19 nt, Homo sapiens
  misc_RNA (1)...(19): siRNA sense strand
agguggaggacgagaagaa

SEQ ID NO: 2565292 - RNA, 19 nt, Homo sapiens
  misc_RNA (1)...(19): siRNA sense strand
ucaacaaggcucuggacaa

SEQ ID NO: 2565293 - RNA, 19 nt, Homo sapiens
  misc_RNA (1)...(19): siRNA sense strand
gagaagaagcugaagagca

SEQ ID NO: 2565294 - RNA, 19 nt, Homo sapiens
  misc_RNA (1)...(19): siRNA sense strand
acgccaagaccgugaagaa

SEQ ID NO: 2565295 - RNA, 19 nt, Homo sapiens
  misc_RNA (1)...(19): siRNA sense strand
ccgccaagaagcaggaauu

SEQ ID NO: 2565296 - RNA, 19 nt, Homo sapiens
  misc_RNA (1)...(19): siRNA sense strand
aggaggagcuggaggagga

SEQ ID NO: 2565297 - RNA, 19 nt, Homo sapiens
  misc_RNA (1)...(19): siRNA sense strand
uggagaagaagcagaagaa

SEQ ID NO: 2565298 - RNA, 19 nt, Homo sapiens
  misc_RNA (1)...(19): siRNA sense strand
acaagagcuucguggagaa

SEQ ID NO: 2565299 - RNA, 19 nt, Homo sapiens
  misc_RNA (1)...(19): siRNA sense strand
ggccagaguggaagaggaa

SEQ ID NO: 2565300 - RNA, 19 nt, Homo sapiens
  misc_RNA (1)...(19): siRNA sense strand
gagcagacgaagcggguga

SEQ ID NO: 2565301 - RNA, 19 nt, Homo sapiens
  misc_RNA (1)...(19): siRNA sense strand
aggaggaggaggaggccaa

SEQ ID NO: 2565302 - RNA, 19 nt, Homo sapiens
  misc_RNA (1)...(19): siRNA sense strand
cagcaggagcucaggucaa

SEQ ID NO: 2565303 - RNA, 19 nt, Homo sapiens
  misc_RNA (1)...(19): siRNA sense strand
uggaggaggagcagggcaa

SEQ ID NO: 2565304 - RNA, 19 nt, Homo sapiens
  misc_RNA (1)...(19): siRNA sense strand
gagaagaagcugaaggaug

SEQ ID NO: 2565305 - RNA, 19 nt, Homo sapiens
  misc_RNA (1)...(19): siRNA sense strand
aggugaacauccugaagaa

SEQ ID NO: 2565306 - RNA, 19 nt, Homo sapiens
  misc_RNA (1)...(19): siRNA sense strand
gcauggaggccgagaugau

SEQ ID NO: 2565307 - RNA, 19 nt, Homo sapiens
  misc_RNA (1)...(19): siRNA sense strand
aggaggagaugauggccaa

SEQ ID NO: 2565308 - RNA, 19 nt, Homo sapiens
  misc_RNA (1)...(19): siRNA sense strand
aggaggaggccaagcacaa

SEQ ID NO: 2565309 - RNA, 19 nt, Homo sapiens
  misc_RNA (1)...(19): siRNA sense strand
aggucaagcugcaggagau

SEQ ID NO: 2565310 - RNA, 19 nt, Homo sapiens
  misc_RNA (1)...(19): siRNA sense strand
aaacagaguuggaggacac

SEQ ID NO: 2565311 - RNA, 19 nt, Homo sapiens
  misc_RNA (1)...(19): siRNA sense strand
gcacggagauggaggaccu

SEQ ID NO: 2565312 - RNA, 19 nt, Homo sapiens
  misc_RNA (1)...(19): siRNA sense strand
ccaucaaacagcugcggaa

SEQ ID NO: 2565313 - RNA, 19 nt, Homo sapiens
  misc_RNA (1)...(19): siRNA sense strand
aggccaaaccugccgaaua

SEQ ID NO: 2565314 - RNA, 19 nt, Homo sapiens
  misc_RNA (1)...(19): siRNA sense strand
cgugcgugcucaugauaaa

SEQ ID NO: 2565315 - RNA, 19 nt, Homo sapiens
  misc_RNA (1)...(19): siRNA sense strand
agaaggugaaggugaacaa

SEQ ID NO: 2565316 - RNA, 19 nt, Homo sapiens
  misc_RNA (1)...(19): siRNA sense strand
ccggcaagguggauuacaa

SEQ ID NO: 2565317 - RNA, 19 nt, Homo sapiens
  misc_RNA (1)...(19): siRNA sense strand
gggaggagaagcagcgaca

SEQ ID NO: 2565318 - RNA, 19 nt, Homo sapiens
  misc_RNA (1)...(19): siRNA sense strand
ggaaggauguggaccgcau

SEQ ID NO: 2565319 - RNA, 19 nt, Homo sapiens
  misc_RNA (1)...(19): siRNA sense strand
gagaacaggcucacggaga

SEQ ID NO: 2565320 - RNA, 19 nt, Homo sapiens
  misc_RNA (1)...(19): siRNA sense strand
gaugcaagaccgagaagau

SEQ ID NO: 2565321 - RNA, 19 nt, Homo sapiens
  misc_RNA (1)...(19): siRNA sense strand
agacuaaagagcaggcuga

SEQ ID NO: 2565322 - RNA, 19 nt, Homo sapiens
  misc_RNA (1)...(19): siRNA sense strand
uggaggagcagcuggacaa

SEQ ID NO: 2565323 - RNA, 19 nt, Homo sapiens
  misc_RNA (1)...(19): siRNA sense strand
ggugaaggucagagagaag

SEQ ID NO: 2565324 - RNA, 19 nt, Homo sapiens
  misc_RNA (1)...(19): siRNA sense strand
cggcaagguggauuacaaa

SEQ ID NO: 2565325 - RNA, 19 nt, Homo sapiens
  misc_RNA (1)...(19): siRNA sense strand
cccuggagcucgacagcaa

SEQ ID NO: 2565326 - RNA, 19 nt, Homo sapiens
  misc_RNA (1)...(19): siRNA sense strand
ccaagaaagaggaggagcu

SEQ ID NO: 2565327 - RNA, 19 nt, Homo sapiens
  misc_RNA (1)...(19): siRNA sense strand
agagcgaggagaagaagaa

SEQ ID NO: 2565328 - RNA, 19 nt, Homo sapiens
  misc_RNA (1)...(19): siRNA sense strand
gagaacaccaagaagguca

SEQ ID NO: 2565329 - RNA, 19 nt, Homo sapiens
  misc_RNA (1)...(19): siRNA sense strand
gccagaacaaggagcuuaa

SEQ ID NO: 2565330 - RNA, 19 nt, Homo sapiens
  misc_RNA (1)...(19): siRNA sense strand
ucccagaagaggagcaaau

SEQ ID NO: 2565331 - RNA, 19 nt, Homo sapiens
  misc_RNA (1)...(19): siRNA sense strand
aggaguuucggcagagaua

SEQ ID NO: 2565332 - RNA, 19 nt, Homo sapiens
  misc_RNA (1)...(19): siRNA sense strand
ccaccgaggcgaagcugaa

SEQ ID NO: 2565333 - RNA, 19 nt, Homo sapiens
  misc_RNA (1)...(19): siRNA sense strand
gcaccaagcucaagcaggu

SEQ ID NO: 2565334 - RNA, 19 nt, Homo sapiens
  misc_RNA (1)...(19): siRNA sense strand
aggaagccauggagcagaa

SEQ ID NO: 2565335 - RNA, 19 nt, Homo sapiens
  misc_RNA (1)...(19): siRNA sense strand
agaagaugcagcagaacau

SEQ ID NO: 2565336 - RNA, 19 nt, Homo sapiens
  misc_RNA (1)...(19): siRNA sense strand
acucggagcacaagcgcaa

SEQ ID NO: 2565337 - RNA, 19 nt, Homo sapiens
  misc_RNA (1)...(19): siRNA sense strand
ucaagcagguggaggacga

SEQ ID NO: 2565338 - RNA, 19 nt, Homo sapiens
  misc_RNA (1)...(19): siRNA sense strand
cugucaaguccaaguacaa

SEQ ID NO: 2565339 - RNA, 19 nt, Homo sapiens
  misc_RNA (1)...(19): siRNA sense strand
gcuccgacgaagagguaga

SEQ ID NO: 2565340 - RNA, 19 nt, Homo sapiens
  misc_RNA (1)...(19): siRNA sense strand
acaaggagcagcuggccaa

SEQ ID NO: 2565341 - RNA, 19 nt, Homo sapiens
  misc_RNA (1)...(19): siRNA sense strand
ggucucaagcggacgccaa

SEQ ID NO: 2565342 - RNA, 19 nt, Homo sapiens
  misc_RNA (1)...(19): siRNA sense strand
uacuagaggcacugggaca

SEQ ID NO: 2565343 - RNA, 19 nt, Homo sapiens
  misc_RNA (1)...(19): siRNA sense strand
cugcacaguuagugagcua

SEQ ID NO: 2565344 - RNA, 19 nt, Homo sapiens
  misc_RNA (1)...(19): siRNA sense strand
cugaaagugaugaaggaaa

SEQ ID NO: 2565345 - RNA, 19 nt, Homo sapiens
  misc_RNA (1)...(19): siRNA sense strand
uggaagaagcuaaagagaa

SEQ ID NO: 2565346 - RNA, 19 nt, Homo sapiens
  misc_RNA (1)...(19): siRNA sense strand
uugcuguacuaguggauaa

SEQ ID NO: 2565347 - RNA, 19 nt, Homo sapiens
  misc_RNA (1)...(19): siRNA sense strand
gagcaagaucuuaaggcuu

SEQ ID NO: 2565348 - RNA, 19 nt, Homo sapiens
  misc_RNA (1)...(19): siRNA sense strand
agaaagaugcagagaugga

SEQ ID NO: 2565349 - RNA, 19 nt, Homo sapiens
  misc_RNA (1)...(19): siRNA sense strand
ugggaagauuggucagauu

SEQ ID NO: 2565350 - RNA, 19 nt, Homo sapiens
  misc_RNA (1)...(19): siRNA sense strand
gagaauuuguagaagccau

SEQ ID NO: 2565351 - RNA, 19 nt, Homo sapiens
  misc_RNA (1)...(19): siRNA sense strand
cuacugaaugccaggaauu

SEQ ID NO: 2565352 - RNA, 19 nt, Homo sapiens
  misc_RNA (1)...(19): siRNA sense strand
aagugaugaaggaaaguua

SEQ ID NO: 2565353 - RNA, 19 nt, Homo sapiens
  misc_RNA (1)...(19): siRNA sense strand
ggaacaaauagaacgacuu

SEQ ID NO: 2565354 - RNA, 19 nt, Homo sapiens
  misc_RNA (1)...(19): siRNA sense strand
agaaagagcuggaagaagc

SEQ ID NO: 2565355 - RNA, 19 nt, Homo sapiens
  misc_RNA (1)...(19): siRNA sense strand
cuacaauucguaagaugaa

SEQ ID NO: 2565356 - RNA, 19 nt, Homo sapiens
  misc_RNA (1)...(19): siRNA sense strand
uagaacgacuucaggaaaa

SEQ ID NO: 2565357 - RNA, 19 nt, Homo sapiens
  misc_RNA (1)...(19): siRNA sense strand
gcaccuaguacgaugcgaa

SEQ ID NO: 2565358 - RNA, 19 nt, Homo sapiens
  misc_RNA (1)...(19): siRNA sense strand
agguauggacugcugauaa

SEQ ID NO: 2565359 - RNA, 19 nt, Homo sapiens
  misc_RNA (1)...(19): siRNA sense strand
accaaauaauccagcagua

SEQ ID NO: 2565360 - RNA, 19 nt, Homo sapiens
  misc_RNA (1)...(19): siRNA sense strand
ccuaacuacaagagcaaga

SEQ ID NO: 2565361 - RNA, 19 nt, Homo sapiens
  misc_RNA (1)...(19): siRNA sense strand
ugauaaaccacauccacaa

SEQ ID NO: 2565362 - RNA, 19 nt, Homo sapiens
  misc_RNA (1)...(19): siRNA sense strand
gcauuuacaaguauggaga

SEQ ID NO: 2565363 - RNA, 19 nt, Homo sapiens
  misc_RNA (1)...(19): siRNA sense strand
agagcaaccuagaaggcuu

SEQ ID NO: 2565364 - RNA, 19 nt, Homo sapiens
  misc_RNA (1)...(19): siRNA sense strand
ucgucaacuuaaagaauca

SEQ ID NO: 2565365 - RNA, 19 nt, Homo sapiens
  misc_RNA (1)...(19): siRNA sense strand
aggaaaguuacaugugcua

SEQ ID NO: 2565366 - RNA, 19 nt, Homo sapiens
  misc_RNA (1)...(19): siRNA sense strand
ugugaauugucaugugauu

SEQ ID NO: 2565367 - RNA, 19 nt, Homo sapiens
  misc_RNA (1)...(19): siRNA sense strand
gcguaacucaggaagaaga

SEQ ID NO: 2565368 - RNA, 19 nt, Homo sapiens
  misc_RNA (1)...(19): siRNA sense strand
ccucacaaaaggagaaaga

SEQ ID NO: 2565369 - RNA, 19 nt, Homo sapiens
  misc_RNA (1)...(19): siRNA sense strand
cguuggagcugggaagauu

SEQ ID NO: 2565370 - RNA, 19 nt, Homo sapiens
  misc_RNA (1)...(19): siRNA sense strand
uccugaagauccagaaaga

SEQ ID NO: 2565371 - RNA, 19 nt, Homo sapiens
  misc_RNA (1)...(19): siRNA sense strand
uguauuaacaccaugguau

SEQ ID NO: 2565372 - RNA, 19 nt, Homo sapiens
  misc_RNA (1)...(19): siRNA sense strand
guguagacagguuuauuaa

SEQ ID NO: 2565373 - RNA, 19 nt, Homo sapiens
  misc_RNA (1)...(19): siRNA sense strand
ggaugaugacgacgaugaa

SEQ ID NO: 2565374 - RNA, 19 nt, Homo sapiens
  misc_RNA (1)...(19): siRNA sense strand
uugcaaaguuucacgaagu

SEQ ID NO: 2565375 - RNA, 19 nt, Homo sapiens
  misc_RNA (1)...(19): siRNA sense strand
acacaaacggcgaagugau

SEQ ID NO: 2565376 - RNA, 19 nt, Homo sapiens
  misc_RNA (1)...(19): siRNA sense strand
ccucaggugcgacgagauu

SEQ ID NO: 2565377 - RNA, 19 nt, Homo sapiens
  misc_RNA (1)...(19): siRNA sense strand
aaccgaaguuuguaagaga

SEQ ID NO: 2565378 - RNA, 19 nt, Homo sapiens
  misc_RNA (1)...(19): siRNA sense strand
ggauaagaugauucguaca

SEQ ID NO: 2565379 - RNA, 19 nt, Homo sapiens
  misc_RNA (1)...(19): siRNA sense strand
agauuguuuguuugggaaa

SEQ ID NO: 2565380 - RNA, 19 nt, Homo sapiens
  misc_RNA (1)...(19): siRNA sense strand
uguuugaggucuggaggaa

SEQ ID NO: 2565381 - RNA, 19 nt, Homo sapiens
  misc_RNA (1)...(19): siRNA sense strand
cuucagaacuaucucguga

SEQ ID NO: 2565382 - RNA, 19 nt, Homo sapiens
  misc_RNA (1)...(19): siRNA sense strand
uuacaauuuugguggagaa

SEQ ID NO: 2565383 - RNA, 19 nt, Homo sapiens
  misc_RNA (1)...(19): siRNA sense strand
gaaguuuguaagagaaguu

SEQ ID NO: 2565384 - RNA, 19 nt, Homo sapiens
  misc_RNA (1)...(19): siRNA sense strand
gcuaaagagaaacuugcua

SEQ ID NO: 2565385 - RNA, 19 nt, Homo sapiens
  misc_RNA (1)...(19): siRNA sense strand
aggaagaagauguaccuca

SEQ ID NO: 2565386 - RNA, 19 nt, Homo sapiens
  misc_RNA (1)...(19): siRNA sense strand
cugaagaucauuuggaauc

SEQ ID NO: 2565387 - RNA, 19 nt, Homo sapiens
  misc_RNA (1)...(19): siRNA sense strand
aggaacaaauagaacgacu

SEQ ID NO: 2565388 - RNA, 19 nt, Homo sapiens
  misc_RNA (1)...(19): siRNA sense strand
aauagaacgacuucaggaa

SEQ ID NO: 2565389 - RNA, 19 nt, Homo sapiens
  misc_RNA (1)...(19): siRNA sense strand
agggagucauucaguggaa

SEQ ID NO: 2565390 - RNA, 19 nt, Homo sapiens
  misc_RNA (1)...(19): siRNA sense strand
uagucaagauccugaaagu

SEQ ID NO: 2565391 - RNA, 19 nt, Homo sapiens
  misc_RNA (1)...(19): siRNA sense strand
cagcauucugaaagaugua

SEQ ID NO: 2565392 - RNA, 19 nt, Homo sapiens
  misc_RNA (1)...(19): siRNA sense strand
guuauauuucagcgguuua

SEQ ID NO: 2565393 - RNA, 19 nt, Homo sapiens
  misc_RNA (1)...(19): siRNA sense strand
agacgggguucuugaggaa

SEQ ID NO: 2565394 - RNA, 19 nt, Homo sapiens
  misc_RNA (1)...(19): siRNA sense strand
ggguuggaaaggaguugua

SEQ ID NO: 2565395 - RNA, 19 nt, Homo sapiens
  misc_RNA (1)...(19): siRNA sense strand
uggaaggaaaggaagacuu

SEQ ID NO: 2565396 - RNA, 19 nt, Homo sapiens
  misc_RNA (1)...(19): siRNA sense strand
aggcaacugaaaugcuaua

SEQ ID NO: 2565397 - RNA, 19 nt, Homo sapiens
  misc_RNA (1)...(19): siRNA sense strand
ugucuuaccaucagcguau

SEQ ID NO: 2565398 - RNA, 19 nt, Homo sapiens
  misc_RNA (1)...(19): siRNA sense strand
aagaugauucguacacaaa

SEQ ID NO: 2565399 - RNA, 19 nt, Homo sapiens
  misc_RNA (1)...(19): siRNA sense strand
ugaacaaacauguccugaa

SEQ ID NO: 2565400 - RNA, 19 nt, Homo sapiens
  misc_RNA (1)...(19): siRNA sense strand
ccguguauuugguccguuu

SEQ ID NO: 2565401 - RNA, 19 nt, Homo sapiens
  misc_RNA (1)...(19): siRNA sense strand
uugccaacacugaaagcua

SEQ ID NO: 2565402 - RNA, 19 nt, Homo sapiens
  misc_RNA (1)...(19): siRNA sense strand
caaccaaugaugaaaucuu

SEQ ID NO: 2565403 - RNA, 19 nt, Homo sapiens
  misc_RNA (1)...(19): siRNA sense strand
cagauuguuuguuugggaa

SEQ ID NO: 2565404 - RNA, 19 nt, Homo sapiens
  misc_RNA (1)...(19): siRNA sense strand
cuggaagaagcuaaagaga

SEQ ID NO: 2565405 - RNA, 19 nt, Homo sapiens
  misc_RNA (1)...(19): siRNA sense strand
cggcacauccuaagaccuu

SEQ ID NO: 2565406 - RNA, 19 nt, Homo sapiens
  misc_RNA (1)...(19): siRNA sense strand
acugaagaucauuuggaau

SEQ ID NO: 2565407 - RNA, 19 nt, Homo sapiens
  misc_RNA (1)...(19): siRNA sense strand
ggaaaaggggacugauaaa

SEQ ID NO: 2565408 - RNA, 19 nt, Homo sapiens
  misc_RNA (1)...(19): siRNA sense strand
ugauaauggaaaugagaca

SEQ ID NO: 2565409 - RNA, 19 nt, Homo sapiens
  misc_RNA (1)...(19): siRNA sense strand
uguccuuggaagugagaaa

SEQ ID NO: 2565410 - RNA, 19 nt, Homo sapiens
  misc_RNA (1)...(19): siRNA sense strand
ugaaagugaccuagaugaa

SEQ ID NO: 2565411 - RNA, 19 nt, Homo sapiens
  misc_RNA (1)...(19): siRNA sense strand
gcucauaguagcaggucuu

SEQ ID NO: 2565412 - RNA, 19 nt, Homo sapiens
  misc_RNA (1)...(19): siRNA sense strand
cugaaaaugauguuggaaa

SEQ ID NO: 2565413 - RNA, 19 nt, Homo sapiens
  misc_RNA (1)...(19): siRNA sense strand
ucaccagauacaagaguua

SEQ ID NO: 2565414 - RNA, 19 nt, Homo sapiens
  misc_RNA (1)...(19): siRNA sense strand
ggaagggauugcuagggaa

SEQ ID NO: 2565415 - RNA, 19 nt, Homo sapiens
  misc_RNA (1)...(19): siRNA sense strand
agaucaaguacauggagua

SEQ ID NO: 2565416 - RNA, 19 nt, Homo sapiens
  misc_RNA (1)...(19): siRNA sense strand
ucauaaguacaaagggaau

SEQ ID NO: 2565417 - RNA, 19 nt, Homo sapiens
  misc_RNA (1)...(19): siRNA sense strand
guacagaugugaaugcaga

SEQ ID NO: 2565418 - RNA, 19 nt, Homo sapiens
  misc_RNA (1)...(19): siRNA sense strand
acacaauaaaccugaugaa

SEQ ID NO: 2565419 - RNA, 19 nt, Homo sapiens
  misc_RNA (1)...(19): siRNA sense strand
gcacggaacucaaagggca

SEQ ID NO: 2565420 - RNA, 19 nt, Homo sapiens
  misc_RNA (1)...(19): siRNA sense strand
aguggaaaguggugggcca

SEQ ID NO: 2565421 - RNA, 19 nt, Homo sapiens
  misc_RNA (1)...(19): siRNA sense strand
gagugguggccuacaauaa

SEQ ID NO: 2565422 - RNA, 19 nt, Homo sapiens
  misc_RNA (1)...(19): siRNA sense strand
gggaaaccuaagaccauaa

SEQ ID NO: 2565423 - RNA, 19 nt, Homo sapiens
  misc_RNA (1)...(19): siRNA sense strand
cucagggucuggagggaaa

SEQ ID NO: 2565424 - RNA, 19 nt, Homo sapiens
  misc_RNA (1)...(19): siRNA sense strand
auacagagggcaugaguca

SEQ ID NO: 2565425 - RNA, 19 nt, Homo sapiens
  misc_RNA (1)...(19): siRNA sense strand
ucucauaaguacaaaggga

SEQ ID NO: 2565426 - RNA, 19 nt, Homo sapiens
  misc_RNA (1)...(19): siRNA sense strand
cauuuaauaacguggguga

SEQ ID NO: 2565427 - RNA, 19 nt, Homo sapiens
  misc_RNA (1)...(19): siRNA sense strand
ccaaguacaagaaugcaaa

SEQ ID NO: 2565428 - RNA, 19 nt, Homo sapiens
  misc_RNA (1)...(19): siRNA sense strand
uggaaggacuaaugaagga

SEQ ID NO: 2565429 - RNA, 19 nt, Homo sapiens
  misc_RNA (1)...(19): siRNA sense strand
acugauaauccuugaacau

SEQ ID NO: 2565430 - RNA, 19 nt, Homo sapiens
  misc_RNA (1)...(19): siRNA sense strand
ccgaauacacucuaugaau

SEQ ID NO: 2565431 - RNA, 19 nt, Homo sapiens
  misc_RNA (1)...(19): siRNA sense strand
acagaauccguucgaaaua

SEQ ID NO: 2565432 - RNA, 19 nt, Homo sapiens
  misc_RNA (1)...(19): siRNA sense strand
augagagacuggagcugaa

SEQ ID NO: 2565433 - RNA, 19 nt, Homo sapiens
  misc_RNA (1)...(19): siRNA sense strand
aggcgaggaaugagaccaa

SEQ ID NO: 2565434 - RNA, 19 nt, Homo sapiens
  misc_RNA (1)...(19): siRNA sense strand
caucagauccucacggaga

SEQ ID NO: 2565435 - RNA, 19 nt, Homo sapiens
  misc_RNA (1)...(19): siRNA sense strand
gugauuacccugaaagcau

SEQ ID NO: 2565436 - RNA, 19 nt, Homo sapiens
  misc_RNA (1)...(19): siRNA sense strand
cuucuggaugauagaguua

SEQ ID NO: 2565437 - RNA, 19 nt, Homo sapiens
  misc_RNA (1)...(19): siRNA sense strand
cagcaaugcaacugaagga

SEQ ID NO: 2565438 - RNA, 19 nt, Homo sapiens
  misc_RNA (1)...(19): siRNA sense strand
gcucugaaagauugguauu

SEQ ID NO: 2565439 - RNA, 19 nt, Homo sapiens
  misc_RNA (1)...(19): siRNA sense strand
ugcacaagcuggagcccaa

SEQ ID NO: 2565440 - RNA, 19 nt, Homo sapiens
  misc_RNA (1)...(19): siRNA sense strand
ccaggagagaugcaaguaa

SEQ ID NO: 2565441 - RNA, 19 nt, Homo sapiens
  misc_RNA (1)...(19): siRNA sense strand
cccugaaagcauuuaauaa

SEQ ID NO: 2565442 - RNA, 19 nt, Homo sapiens
  misc_RNA (1)...(19): siRNA sense strand
augcaaccacuuugaguua

SEQ ID NO: 2565443 - RNA, 19 nt, Homo sapiens
  misc_RNA (1)...(19): siRNA sense strand
augugacuguugugaguaa

SEQ ID NO: 2565444 - RNA, 19 nt, Homo sapiens
  misc_RNA (1)...(19): siRNA sense strand
gagauacaugacuggguua

SEQ ID NO: 2565445 - RNA, 19 nt, Homo sapiens
  misc_RNA (1)...(19): siRNA sense strand
cugauaaagaacaggaugu

SEQ ID NO: 2565446 - RNA, 19 nt, Homo sapiens
  misc_RNA (1)...(19): siRNA sense strand
ucaaaguggacuauaaaca

SEQ ID NO: 2565447 - RNA, 19 nt, Homo sapiens
  misc_RNA (1)...(19): siRNA sense strand
caucaaaggcgaaauucau

SEQ ID NO: 2565448 - RNA, 19 nt, Homo sapiens
  misc_RNA (1)...(19): siRNA sense strand
gguuaucccaagugauuau

SEQ ID NO: 2565449 - RNA, 19 nt, Homo sapiens
  misc_RNA (1)...(19): siRNA sense strand
gaaaucagaugaaggguuc

SEQ ID NO: 2565450 - RNA, 19 nt, Homo sapiens
  misc_RNA (1)...(19): siRNA sense strand
acacaaaaugggcagauua

SEQ ID NO: 2565451 - RNA, 19 nt, Homo sapiens
  misc_RNA (1)...(19): siRNA sense strand
cccaagcaccagaagauua

SEQ ID NO: 2565452 - RNA, 19 nt, Homo sapiens
  misc_RNA (1)...(19): siRNA sense strand
gggcaugagucagaggaca

SEQ ID NO: 2565453 - RNA, 19 nt, Homo sapiens
  misc_RNA (1)...(19): siRNA sense strand
accaaaguauagugaugaa

SEQ ID NO: 2565454 - RNA, 19 nt, Homo sapiens
  misc_RNA (1)...(19): siRNA sense strand
agaccaucaaaguggacua

SEQ ID NO: 2565455 - RNA, 19 nt, Homo sapiens
  misc_RNA (1)...(19): siRNA sense strand
ccaucaaaggcgaaauuca

SEQ ID NO: 2565456 - RNA, 19 nt, Homo sapiens
  misc_RNA (1)...(19): siRNA sense strand
guauagcugauaauggaaa

SEQ ID NO: 2565457 - RNA, 19 nt, Homo sapiens
  misc_RNA (1)...(19): siRNA sense strand
aagcauggcucaggagaga

SEQ ID NO: 2565458 - RNA, 19 nt, Homo sapiens
  misc_RNA (1)...(19): siRNA sense strand
agugagaaauucaaagagu

SEQ ID NO: 2565459 - RNA, 19 nt, Homo sapiens
  misc_RNA (1)...(19): siRNA sense strand
cgagaguagcuaugaacca

SEQ ID NO: 2565460 - RNA, 19 nt, Homo sapiens
  misc_RNA (1)...(19): siRNA sense strand
cugaagcagccuacuaaua

SEQ ID NO: 2565461 - RNA, 19 nt, Homo sapiens
  misc_RNA (1)...(19): siRNA sense strand
accaaaggucgaagaucaa

SEQ ID NO: 2565462 - RNA, 19 nt, Homo sapiens
  misc_RNA (1)...(19): siRNA sense strand
ugauaucagacuugguauu

SEQ ID NO: 2565463 - RNA, 19 nt, Homo sapiens
  misc_RNA (1)...(19): siRNA sense strand
aaugugaagugacuggaaa

SEQ ID NO: 2565464 - RNA, 19 nt, Homo sapiens
  misc_RNA (1)...(19): siRNA sense strand
ucguggugguugugauuau

SEQ ID NO: 2565465 - RNA, 19 nt, Homo sapiens
  misc_RNA (1)...(19): siRNA sense strand
gacuaaugaaggaccuaaa

SEQ ID NO: 2565466 - RNA, 19 nt, Homo sapiens
  misc_RNA (1)...(19): siRNA sense strand
gcaaugcaacugaaggaga

SEQ ID NO: 2565467 - RNA, 19 nt, Homo sapiens
  misc_RNA (1)...(19): siRNA sense strand
ccaacugugaaguggguca

SEQ ID NO: 2565468 - RNA, 19 nt, Homo sapiens
  misc_RNA (1)...(19): siRNA sense strand
gagcaagagaaaugaggaa

SEQ ID NO: 2565469 - RNA, 19 nt, Homo sapiens
  misc_RNA (1)...(19): siRNA sense strand
uguaagaagcauuggaaga

SEQ ID NO: 2565470 - RNA, 19 nt, Homo sapiens
  misc_RNA (1)...(19): siRNA sense strand
agacagaaugacucagaaa

SEQ ID NO: 2565471 - RNA, 19 nt, Homo sapiens
  misc_RNA (1)...(19): siRNA sense strand
agccagagagcaagagaaa

SEQ ID NO: 2565472 - RNA, 19 nt, Homo sapiens
  misc_RNA (1)...(19): siRNA sense strand
gggacaucgucgagcuauu

SEQ ID NO: 2565473 - RNA, 19 nt, Homo sapiens
  misc_RNA (1)...(19): siRNA sense strand
gguacaugccagaagagua

SEQ ID NO: 2565474 - RNA, 19 nt, Homo sapiens
  misc_RNA (1)...(19): siRNA sense strand
agguaaaaguggaacaaga

SEQ ID NO: 2565475 - RNA, 19 nt, Homo sapiens
  misc_RNA (1)...(19): siRNA sense strand
aauuggagaaggagagauu

SEQ ID NO: 2565476 - RNA, 19 nt, Homo sapiens
  misc_RNA (1)...(19): siRNA sense strand
cauagaaggaacuagaaau

SEQ ID NO: 2565477 - RNA, 19 nt, Homo sapiens
  misc_RNA (1)...(19): siRNA sense strand
augaugaaagccagaauaa

SEQ ID NO: 2565478 - RNA, 19 nt, Homo sapiens
  misc_RNA (1)...(19): siRNA sense strand
aggaauauccaaagccauu

SEQ ID NO: 2565479 - RNA, 19 nt, Homo sapiens
  misc_RNA (1)...(19): siRNA sense strand
cagaagaguacaucagaca

SEQ ID NO: 2565480 - RNA, 19 nt, Homo sapiens
  misc_RNA (1)...(19): siRNA sense strand
aggauguagaguaguguua

SEQ ID NO: 2565481 - RNA, 19 nt, Homo sapiens
  misc_RNA (1)...(19): siRNA sense strand
cgggcaaaguuaagaccau

SEQ ID NO: 2565482 - RNA, 19 nt, Homo sapiens
  misc_RNA (1)...(19): siRNA sense strand
gggcauucuugcaggagca

SEQ ID NO: 2565483 - RNA, 19 nt, Homo sapiens
  misc_RNA (1)...(19): siRNA sense strand
ucauagaaggaacuagaaa

SEQ ID NO: 2565484 - RNA, 19 nt, Homo sapiens
  misc_RNA (1)...(19): siRNA sense strand
cuuagagaauugauggaga

SEQ ID NO: 2565485 - RNA, 19 nt, Homo sapiens
  misc_RNA (1)...(19): siRNA sense strand
ugaaaaguauguagaccaa

SEQ ID NO: 2565486 - RNA, 19 nt, Homo sapiens
  misc_RNA (1)...(19): siRNA sense strand
auacaugagaaauggaaca

SEQ ID NO: 2565487 - RNA, 19 nt, Homo sapiens
  misc_RNA (1)...(19): siRNA sense strand
uauacagaguggagauuca

SEQ ID NO: 2565488 - RNA, 19 nt, Homo sapiens
  misc_RNA (1)...(19): siRNA sense strand
acaucagaguuguaccaua

SEQ ID NO: 2565489 - RNA, 19 nt, Homo sapiens
  misc_RNA (1)...(19): siRNA sense strand
aguauguagaccaagguaa

SEQ ID NO: 2565490 - RNA, 19 nt, Homo sapiens
  misc_RNA (1)...(19): siRNA sense strand
gagaagaguuaucaggaag

SEQ ID NO: 2565491 - RNA, 19 nt, Homo sapiens
  misc_RNA (1)...(19): siRNA sense strand
ugaugaaggccugaggaua

SEQ ID NO: 2565492 - RNA, 19 nt, Homo sapiens
  misc_RNA (1)...(19): siRNA sense strand
aguaaacaucugugguaca

SEQ ID NO: 2565493 - RNA, 19 nt, Homo sapiens
  misc_RNA (1)...(19): siRNA sense strand
gccugaggauagacagaau

SEQ ID NO: 2565494 - RNA, 19 nt, Homo sapiens
  misc_RNA (1)...(19): siRNA sense strand
agguauacagaguggagau

SEQ ID NO: 2565495 - RNA, 19 nt, Homo sapiens
  misc_RNA (1)...(19): siRNA sense strand
uggaagaugaugaaagcca

SEQ ID NO: 2565496 - RNA, 19 nt, Homo sapiens
  misc_RNA (1)...(19): siRNA sense strand
agguuauguuucugagcuu

SEQ ID NO: 2565497 - RNA, 19 nt, Homo sapiens
  misc_RNA (1)...(19): siRNA sense strand
gaggauagacagaaugacu

SEQ ID NO: 2565498 - RNA, 19 nt, Homo sapiens
  misc_RNA (1)...(19): siRNA sense strand
caguauaucaagugcaaac

SEQ ID NO: 2565499 - RNA, 19 nt, Homo sapiens
  misc_RNA (1)...(19): siRNA sense strand
augaaagccagaauaacaa

SEQ ID NO: 2565500 - RNA, 19 nt, Homo sapiens
  misc_RNA (1)...(19): siRNA sense strand
gcagccagucugagguuau

SEQ ID NO: 2565501 - RNA, 19 nt, Homo sapiens
  misc_RNA (1)...(19): siRNA sense strand
uucagaagcuccagggcau

SEQ ID NO: 2565502 - RNA, 19 nt, Homo sapiens
  misc_RNA (1)...(19): siRNA sense strand
guguugaguccuucagaga

SEQ ID NO: 2565503 - RNA, 19 nt, Homo sapiens
  misc_RNA (1)...(19): siRNA sense strand
ugucuacagcuuuggaauu

SEQ ID NO: 2565504 - RNA, 19 nt, Homo sapiens
  misc_RNA (1)...(19): siRNA sense strand
ccauuaaaacagaugucua

SEQ ID NO: 2565505 - RNA, 19 nt, Homo sapiens
  misc_RNA (1)...(19): siRNA sense strand
aagcauuggaagagguuuu

SEQ ID NO: 2565506 - RNA, 19 nt, Homo sapiens
  misc_RNA (1)...(19): siRNA sense strand
cugaugaaggccugaggau

SEQ ID NO: 2565507 - RNA, 19 nt, Homo sapiens
  misc_RNA (1)...(19): siRNA sense strand
aggaggaagaagaggaaga

SEQ ID NO: 2565508 - RNA, 19 nt, Homo sapiens
  misc_RNA (1)...(19): siRNA sense strand
aagaagaggaagaggagga

SEQ ID NO: 2565509 - RNA, 19 nt, Homo sapiens
  misc_RNA (1)...(19): siRNA sense strand
gcacuauccugcagcgaca

SEQ ID NO: 2565510 - RNA, 19 nt, Homo sapiens
  misc_RNA (1)...(19): siRNA sense strand
cagacaagaaggaggacga

SEQ ID NO: 2565511 - RNA, 19 nt, Homo sapiens
  misc_RNA (1)...(19): siRNA sense strand
ccaugaacgcagaggagga

SEQ ID NO: 2565512 - RNA, 19 nt, Homo sapiens
  misc_RNA (1)...(19): siRNA sense strand
aggaagaagaggaagagga

SEQ ID NO: 2565513 - RNA, 19 nt, Homo sapiens
  misc_RNA (1)...(19): siRNA sense strand
aggaagaggaggaugacga

SEQ ID NO: 2565514 - RNA, 19 nt, Homo sapiens
  misc_RNA (1)...(19): siRNA sense strand
acgaggagcacgaggcaga

SEQ ID NO: 2565515 - RNA, 19 nt, Homo sapiens
  misc_RNA (1)...(19): siRNA sense strand
acgcagaagcuguccaaaa

SEQ ID NO: 2565516 - RNA, 19 nt, Homo sapiens
  misc_RNA (1)...(19): siRNA sense strand
agaggaggaagaagaggaa

SEQ ID NO: 2565517 - RNA, 19 nt, Homo sapiens
  misc_RNA (1)...(19): siRNA sense strand
aggcagacaagaaggagga

SEQ ID NO: 2565518 - RNA, 19 nt, Homo sapiens
  misc_RNA (1)...(19): siRNA sense strand
accaaaucguacagcgaga

SEQ ID NO: 2565519 - RNA, 19 nt, Homo sapiens
  misc_RNA (1)...(19): siRNA sense strand
ggaucaaucuucucaggca

SEQ ID NO: 2565520 - RNA, 19 nt, Homo sapiens
  misc_RNA (1)...(19): siRNA sense strand
ggaagaagaggaagaggag

SEQ ID NO: 2565521 - RNA, 19 nt, Homo sapiens
  misc_RNA (1)...(19): siRNA sense strand
accuggaagaggaggaaga

SEQ ID NO: 2565522 - RNA, 19 nt, Homo sapiens
  misc_RNA (1)...(19): siRNA sense strand
cgcuagacaaccugcgcaa

SEQ ID NO: 2565523 - RNA, 19 nt, Homo sapiens
  misc_RNA (1)...(19): siRNA sense strand
ggcccaaagccacggauca

SEQ ID NO: 2565524 - RNA, 19 nt, Homo sapiens
  misc_RNA (1)...(19): siRNA sense strand
guucaaaccagcaaggaga

SEQ ID NO: 2565525 - RNA, 19 nt, Homo sapiens
  misc_RNA (1)...(19): siRNA sense strand
ccgaguuccgcgaggacua

SEQ ID NO: 2565526 - RNA, 19 nt, Homo sapiens
  misc_RNA (1)...(19): siRNA sense strand
ucucuaaagaagucaggaa

SEQ ID NO: 2565527 - RNA, 19 nt, Homo sapiens
  misc_RNA (1)...(19): siRNA sense strand
cucuaaagaagucaggaaa

SEQ ID NO: 2565528 - RNA, 19 nt, Homo sapiens
  misc_RNA (1)...(19): siRNA sense strand
acaucaaaccacugcccaa

SEQ ID NO: 2565529 - RNA, 19 nt, Homo sapiens
  misc_RNA (1)...(19): siRNA sense strand
caaucaaagaacuggaucu

SEQ ID NO: 2565530 - RNA, 19 nt, Homo sapiens
  misc_RNA (1)...(19): siRNA sense strand
aggacuacgugcugaccau

SEQ ID NO: 2565531 - RNA, 19 nt, Homo sapiens
  misc_RNA (1)...(19): siRNA sense strand
ccacagacaucaagggcaa

SEQ ID NO: 2565532 - RNA, 19 nt, Homo sapiens
  misc_RNA (1)...(19): siRNA sense strand
aggugaugguguugggaga

SEQ ID NO: 2565533 - RNA, 19 nt, Homo sapiens
  misc_RNA (1)...(19): siRNA sense strand
ggauaagaccaccgccaca

SEQ ID NO: 2565534 - RNA, 19 nt, Homo sapiens
  misc_RNA (1)...(19): siRNA sense strand
gagcaaugucccugcagga

SEQ ID NO: 2565535 - RNA, 19 nt, Homo sapiens
  misc_RNA (1)...(19): siRNA sense strand
gcguguggguuggggauaa

SEQ ID NO: 2565536 - RNA, 19 nt, Homo sapiens
  misc_RNA (1)...(19): siRNA sense strand
aaccacacucagagagcaa

SEQ ID NO: 2565537 - RNA, 19 nt, Homo sapiens
  misc_RNA (1)...(19): siRNA sense strand
cugcagacacucaggaucu

SEQ ID NO: 2565538 - RNA, 19 nt, Homo sapiens
  misc_RNA (1)...(19): siRNA sense strand
gcgaguguguggagggcua

SEQ ID NO: 2565539 - RNA, 19 nt, Homo sapiens
  misc_RNA (1)...(19): siRNA sense strand
aggagaagaucuugcgcua

SEQ ID NO: 2565540 - RNA, 19 nt, Homo sapiens
  misc_RNA (1)...(19): siRNA sense strand
accagaaaggcaagagaaa

SEQ ID NO: 2565541 - RNA, 19 nt, Homo sapiens
  misc_RNA (1)...(19): siRNA sense strand
ugacugagcccgagcgaga

SEQ ID NO: 2565542 - RNA, 19 nt, Homo sapiens
  misc_RNA (1)...(19): siRNA sense strand
ggugaaucccagaggcauu

SEQ ID NO: 2565543 - RNA, 19 nt, Homo sapiens
  misc_RNA (1)...(19): siRNA sense strand
uguacaaccaggaggagaa

SEQ ID NO: 2565544 - RNA, 19 nt, Homo sapiens
  misc_RNA (1)...(19): siRNA sense strand
agggaaauaccaugaggaa

SEQ ID NO: 2565545 - RNA, 19 nt, Homo sapiens
  misc_RNA (1)...(19): siRNA sense strand
uggaugaaguugaggaaac

SEQ ID NO: 2565546 - RNA, 19 nt, Homo sapiens
  misc_RNA (1)...(19): siRNA sense strand
agacagaagcaaaggcguu

SEQ ID NO: 2565547 - RNA, 19 nt, Homo sapiens
  misc_RNA (1)...(19): siRNA sense strand
cugcuaugauauugaugaa

SEQ ID NO: 2565548 - RNA, 19 nt, Homo sapiens
  misc_RNA (1)...(19): siRNA sense strand
acagacuggaacagagaua

SEQ ID NO: 2565549 - RNA, 19 nt, Homo sapiens
  misc_RNA (1)...(19): siRNA sense strand
caguggagcaggacggauu

SEQ ID NO: 2565550 - RNA, 19 nt, Homo sapiens
  misc_RNA (1)...(19): siRNA sense strand
aguaugaugaugaggauga

SEQ ID NO: 2565551 - RNA, 19 nt, Homo sapiens
  misc_RNA (1)...(19): siRNA sense strand
ucucaaagaaggaaaacaa

SEQ ID NO: 2565552 - RNA, 19 nt, Homo sapiens
  misc_RNA (1)...(19): siRNA sense strand
ccggagagguggagaaaac

SEQ ID NO: 2565553 - RNA, 19 nt, Homo sapiens
  misc_RNA (1)...(19): siRNA sense strand
ucuacaugguggagagcca

SEQ ID NO: 2565554 - RNA, 19 nt, Homo sapiens
  misc_RNA (1)...(19): siRNA sense strand
cagucaagguucaguggga

SEQ ID NO: 2565555 - RNA, 19 nt, Homo sapiens
  misc_RNA (1)...(19): siRNA sense strand
caucauuagacaagaucuu

SEQ ID NO: 2565556 - RNA, 19 nt, Homo sapiens
  misc_RNA (1)...(19): siRNA sense strand
ccuucauaacugcgacaua

SEQ ID NO: 2565557 - RNA, 19 nt, Homo sapiens
  misc_RNA (1)...(19): siRNA sense strand
ccuuugacugcguggacaa

SEQ ID NO: 2565558 - RNA, 19 nt, Homo sapiens
  misc_RNA (1)...(19): siRNA sense strand
ugacuguaucgaacggaaa

SEQ ID NO: 2565559 - RNA, 19 nt, Homo sapiens
  misc_RNA (1)...(19): siRNA sense strand
gcguguucguccuguacaa

SEQ ID NO: 2565560 - RNA, 19 nt, Homo sapiens
  misc_RNA (1)...(19): siRNA sense strand
ccuacaaggcucugagaag

SEQ ID NO: 2565561 - RNA, 19 nt, Homo sapiens
  misc_RNA (1)...(19): siRNA sense strand
agaguaugaugaugaggau

SEQ ID NO: 2565562 - RNA, 19 nt, Homo sapiens
  misc_RNA (1)...(19): siRNA sense strand
ccauugggccugugaggga

SEQ ID NO: 2565563 - RNA, 19 nt, Homo sapiens
  misc_RNA (1)...(19): siRNA sense strand
acagagagaaccaggucuu

SEQ ID NO: 2565564 - RNA, 19 nt, Homo sapiens
  misc_RNA (1)...(19): siRNA sense strand
cuucagaaucccugcuaca

SEQ ID NO: 2565565 - RNA, 19 nt, Homo sapiens
  misc_RNA (1)...(19): siRNA sense strand
acaaccaggaggagaagau

SEQ ID NO: 2565566 - RNA, 19 nt, Homo sapiens
  misc_RNA (1)...(19): siRNA sense strand
ccuugggaguugacuguau

SEQ ID NO: 2565567 - RNA, 19 nt, Homo sapiens
  misc_RNA (1)...(19): siRNA sense strand
gucaagguucagugggauu

SEQ ID NO: 2565568 - RNA, 19 nt, Homo sapiens
  misc_RNA (1)...(19): siRNA sense strand
gugacgagcuacgggaaga

SEQ ID NO: 2565569 - RNA, 19 nt, Homo sapiens
  misc_RNA (1)...(19): siRNA sense strand
ggaugaagauuaugaccug

SEQ ID NO: 2565570 - RNA, 19 nt, Homo sapiens
  misc_RNA (1)...(19): siRNA sense strand
cuacaacacuccaggcucu

SEQ ID NO: 2565571 - RNA, 19 nt, Homo sapiens
  misc_RNA (1)...(19): siRNA sense strand
gcuaaugacagggaaucaa

SEQ ID NO: 2565572 - RNA, 19 nt, Homo sapiens
  misc_RNA (1)...(19): siRNA sense strand
cugacaacaccuugggagu

SEQ ID NO: 2565573 - RNA, 19 nt, Homo sapiens
  misc_RNA (1)...(19): siRNA sense strand
aguuggcaguggagacuuu

SEQ ID NO: 2565574 - RNA, 19 nt, Homo sapiens
  misc_RNA (1)...(19): siRNA sense strand
ggauguuugcaguggagca

SEQ ID NO: 2565575 - RNA, 19 nt, Homo sapiens
  misc_RNA (1)...(19): siRNA sense strand
cggagaaggucgaagccua

SEQ ID NO: 2565576 - RNA, 19 nt, Homo sapiens
  misc_RNA (1)...(19): siRNA sense strand
aagaaaacgcagaggauau

SEQ ID NO: 2565577 - RNA, 19 nt, Homo sapiens
  misc_RNA (1)...(19): siRNA sense strand
gggaagaggcacaaaccca

SEQ ID NO: 2565578 - RNA, 19 nt, Homo sapiens
  misc_RNA (1)...(19): siRNA sense strand
caaagaaaacgcagaggau

SEQ ID NO: 2565579 - RNA, 19 nt, Homo sapiens
  misc_RNA (1)...(19): siRNA sense strand
caguaaacaguugggaaau

SEQ ID NO: 2565580 - RNA, 19 nt, Homo sapiens
  misc_RNA (1)...(19): siRNA sense strand
agguacuuggugaaagaaa

SEQ ID NO: 2565581 - RNA, 19 nt, Homo sapiens
  misc_RNA (1)...(19): siRNA sense strand
gcaucauccccaaagaaaa

SEQ ID NO: 2565582 - RNA, 19 nt, Homo sapiens
  misc_RNA (1)...(19): siRNA sense strand
cggcagguacuuggugaaa

SEQ ID NO: 2565583 - RNA, 19 nt, Homo sapiens
  misc_RNA (1)...(19): siRNA sense strand
uugcacaggccucggagaa

SEQ ID NO: 2565584 - RNA, 19 nt, Homo sapiens
  misc_RNA (1)...(19): siRNA sense strand
caaaagaagaacuuagcau

SEQ ID NO: 2565585 - RNA, 19 nt, Homo sapiens
  misc_RNA (1)...(19): siRNA sense strand
ggaggaagauggaccggau

SEQ ID NO: 2565586 - RNA, 19 nt, Homo sapiens
  misc_RNA (1)...(19): siRNA sense strand
ugucggagcugcaggugga

SEQ ID NO: 2565587 - RNA, 19 nt, Homo sapiens
  misc_RNA (1)...(19): siRNA sense strand
ggaccaaggugcuggcuca

SEQ ID NO: 2565588 - RNA, 19 nt, Homo sapiens
  misc_RNA (1)...(19): siRNA sense strand
aggaugaggaggaggaaga

SEQ ID NO: 2565589 - RNA, 19 nt, Homo sapiens
  misc_RNA (1)...(19): siRNA sense strand
gggaggaagaggaggagga

SEQ ID NO: 2565590 - RNA, 19 nt, Homo sapiens
  misc_RNA (1)...(19): siRNA sense strand
aggaggaagaggaggauga

SEQ ID NO: 2565591 - RNA, 19 nt, Homo sapiens
  misc_RNA (1)...(19): siRNA sense strand
gaacaagaccacagggaag

SEQ ID NO: 2565592 - RNA, 19 nt, Homo sapiens
  misc_RNA (1)...(19): siRNA sense strand
augaagaggccgaggagga

SEQ ID NO: 2565593 - RNA, 19 nt, Homo sapiens
  misc_RNA (1)...(19): siRNA sense strand
ggaacaagaccacagggaa

SEQ ID NO: 2565594 - RNA, 19 nt, Homo sapiens
  misc_RNA (1)...(19): siRNA sense strand
ccuuaagguuucuggcaca

SEQ ID NO: 2565595 - RNA, 19 nt, Homo sapiens
  misc_RNA (1)...(19): siRNA sense strand
aggaagaagaggaggacgu

SEQ ID NO: 2565596 - RNA, 19 nt, Homo sapiens
  misc_RNA (1)...(19): siRNA sense strand
gagaagagggagaaggauc

SEQ ID NO: 2565597 - RNA, 19 nt, Homo sapiens
  misc_RNA (1)...(19): siRNA sense strand
ccacagagaaggagcugga

SEQ ID NO: 2565598 - RNA, 19 nt, Homo sapiens
  misc_RNA (1)...(19): siRNA sense strand
ggacaguaaagcaccgcua

SEQ ID NO: 2565599 - RNA, 19 nt, Homo sapiens
  misc_RNA (1)...(19): siRNA sense strand
aggaggaggaugaggagga

SEQ ID NO: 2565600 - RNA, 19 nt, Homo sapiens
  misc_RNA (1)...(19): siRNA sense strand
agagaagaaggguggugaa

SEQ ID NO: 2565601 - RNA, 19 nt, Homo sapiens
  misc_RNA (1)...(19): siRNA sense strand
aggaggaagaagaggagga

SEQ ID NO: 2565602 - RNA, 19 nt, Homo sapiens
  misc_RNA (1)...(19): siRNA sense strand
aggaggaggaagaggagga

SEQ ID NO: 2565603 - RNA, 19 nt, Homo sapiens
  misc_RNA (1)...(19): siRNA sense strand
gugaacagggcgaggagga

SEQ ID NO: 2565604 - RNA, 19 nt, Homo sapiens
  misc_RNA (1)...(19): siRNA sense strand
ugaacaacccucugagcau

SEQ ID NO: 2565605 - RNA, 19 nt, Homo sapiens
  misc_RNA (1)...(19): siRNA sense strand
uggagaagagggagaagga

SEQ ID NO: 2565606 - RNA, 19 nt, Homo sapiens
  misc_RNA (1)...(19): siRNA sense strand
ggaucgaacagauggagga

SEQ ID NO: 2565607 - RNA, 19 nt, Homo sapiens
  misc_RNA (1)...(19): siRNA sense strand
agaaagccaaggaggucaa

SEQ ID NO: 2565608 - RNA, 19 nt, Homo sapiens
  misc_RNA (1)...(19): siRNA sense strand
agggcgaggaggaggauga

SEQ ID NO: 2565609 - RNA, 19 nt, Homo sapiens
  misc_RNA (1)...(19): siRNA sense strand
augaaaagcucguugcaga

SEQ ID NO: 2565610 - RNA, 19 nt, Homo sapiens
  misc_RNA (1)...(19): siRNA sense strand
gggagaaggaucuggaggu

SEQ ID NO: 2565611 - RNA, 19 nt, Homo sapiens
  misc_RNA (1)...(19): siRNA sense strand
augaggaggaggaagaaga

SEQ ID NO: 2565612 - RNA, 19 nt, Homo sapiens
  misc_RNA (1)...(19): siRNA sense strand
aagaggaggacguggcuga

SEQ ID NO: 2565613 - RNA, 19 nt, Homo sapiens
  misc_RNA (1)...(19): siRNA sense strand
gcgaggaggaggaugagga

SEQ ID NO: 2565614 - RNA, 19 nt, Homo sapiens
  misc_RNA (1)...(19): siRNA sense strand
gggaacaagaccacaggga

SEQ ID NO: 2565615 - RNA, 19 nt, Homo sapiens
  misc_RNA (1)...(19): siRNA sense strand
cagaauuugaugaguggga

SEQ ID NO: 2565616 - RNA, 19 nt, Homo sapiens
  misc_RNA (1)...(19): siRNA sense strand
ccuagaaggcccugugacu

SEQ ID NO: 2565617 - RNA, 19 nt, Homo sapiens
  misc_RNA (1)...(19): siRNA sense strand
ccagcaacauucaggagca

SEQ ID NO: 2565618 - RNA, 19 nt, Homo sapiens
  misc_RNA (1)...(19): siRNA sense strand
accgagugcucaugggcua

SEQ ID NO: 2565619 - RNA, 19 nt, Homo sapiens
  misc_RNA (1)...(19): siRNA sense strand
ucgaacagauggaggaggu

SEQ ID NO: 2565620 - RNA, 19 nt, Homo sapiens
  misc_RNA (1)...(19): siRNA sense strand
cccagugcuucgugcuaaa

SEQ ID NO: 2565621 - RNA, 19 nt, Homo sapiens
  misc_RNA (1)...(19): siRNA sense strand
cgccggagccuguugacaa

SEQ ID NO: 2565622 - RNA, 19 nt, Homo sapiens
  misc_RNA (1)...(19): siRNA sense strand
agaagagggagaaggaucu

SEQ ID NO: 2565623 - RNA, 19 nt, Homo sapiens
  misc_RNA (1)...(19): siRNA sense strand
cggcgaggucuuugccauu

SEQ ID NO: 2565624 - RNA, 19 nt, Homo sapiens
  misc_RNA (1)...(19): siRNA sense strand
aggaggaugaggaggagga

SEQ ID NO: 2565625 - RNA, 19 nt, Homo sapiens
  misc_RNA (1)...(19): siRNA sense strand
agaucuuccuccuggauga

SEQ ID NO: 2565626 - RNA, 19 nt, Homo sapiens
  misc_RNA (1)...(19): siRNA sense strand
uugcagagagaaagauuga

SEQ ID NO: 2565627 - RNA, 19 nt, Homo sapiens
  misc_RNA (1)...(19): siRNA sense strand
ucuaugagauaaauggcau

SEQ ID NO: 2565628 - RNA, 19 nt, Homo sapiens
  misc_RNA (1)...(19): siRNA sense strand
ucaucaaggccgacuucaa

SEQ ID NO: 2565629 - RNA, 19 nt, Homo sapiens
  misc_RNA (1)...(19): siRNA sense strand
aggaggaggaagaagagga

SEQ ID NO: 2565630 - RNA, 19 nt, Homo sapiens
  misc_RNA (1)...(19): siRNA sense strand
gcgccaucaucgagcucuu

SEQ ID NO: 2565631 - RNA, 19 nt, Homo sapiens
  misc_RNA (1)...(19): siRNA sense strand
agcucguugcagagagaaa

SEQ ID NO: 2565632 - RNA, 19 nt, Homo sapiens
  misc_RNA (1)...(19): siRNA sense strand
cguugcagagagaaagauu

SEQ ID NO: 2565633 - RNA, 19 nt, Homo sapiens
  misc_RNA (1)...(19): siRNA sense strand
cagacguggaggaggagga

SEQ ID NO: 2565634 - RNA, 19 nt, Homo sapiens
  misc_RNA (1)...(19): siRNA sense strand
agacuguggucaucgccaa

SEQ ID NO: 2565635 - RNA, 19 nt, Homo sapiens
  misc_RNA (1)...(19): siRNA sense strand
ucaaaauggacgagguaua

SEQ ID NO: 2565636 - RNA, 19 nt, Homo sapiens
  misc_RNA (1)...(19): siRNA sense strand
ccugaagauccaagcauaa

SEQ ID NO: 2565637 - RNA, 19 nt, Homo sapiens
  misc_RNA (1)...(19): siRNA sense strand
gagaaugcaacaugggcaa

SEQ ID NO: 2565638 - RNA, 19 nt, Homo sapiens
  misc_RNA (1)...(19): siRNA sense strand
agaugaaaucacugcauua

SEQ ID NO: 2565639 - RNA, 19 nt, Homo sapiens
  misc_RNA (1)...(19): siRNA sense strand
uggcaaauaccuaggcuau

SEQ ID NO: 2565640 - RNA, 19 nt, Homo sapiens
  misc_RNA (1)...(19): siRNA sense strand
gcggaauccauguggugua

SEQ ID NO: 2565641 - RNA, 19 nt, Homo sapiens
  misc_RNA (1)...(19): siRNA sense strand
ucucaaauccagggacaaa

SEQ ID NO: 2565642 - RNA, 19 nt, Homo sapiens
  misc_RNA (1)...(19): siRNA sense strand
agugcaaacauuaaagcaa

SEQ ID NO: 2565643 - RNA, 19 nt, Homo sapiens
  misc_RNA (1)...(19): siRNA sense strand
ggaggauaaaauuggauaa

SEQ ID NO: 2565644 - RNA, 19 nt, Homo sapiens
  misc_RNA (1)...(19): siRNA sense strand
gaguuugaugaaagaggaa

SEQ ID NO: 2565645 - RNA, 19 nt, Homo sapiens
  misc_RNA (1)...(19): siRNA sense strand
cagcauuccugaagaucca

SEQ ID NO: 2565646 - RNA, 19 nt, Homo sapiens
  misc_RNA (1)...(19): siRNA sense strand
cauuacaaccugaaguaga

SEQ ID NO: 2565647 - RNA, 19 nt, Homo sapiens
  misc_RNA (1)...(19): siRNA sense strand
ucaugaacgcccugcgcua

SEQ ID NO: 2565648 - RNA, 19 nt, Homo sapiens
  misc_RNA (1)...(19): siRNA sense strand
ucccaaacuuccuggccaa

SEQ ID NO: 2565649 - RNA, 19 nt, Homo sapiens
  misc_RNA (1)...(19): siRNA sense strand
gaugaaagaggaaacguca

SEQ ID NO: 2565650 - RNA, 19 nt, Homo sapiens
  misc_RNA (1)...(19): siRNA sense strand
auuugauaaugguguggaa

SEQ ID NO: 2565651 - RNA, 19 nt, Homo sapiens
  misc_RNA (1)...(19): siRNA sense strand
uggauaaacucaucgcuca

SEQ ID NO: 2565652 - RNA, 19 nt, Homo sapiens
  misc_RNA (1)...(19): siRNA sense strand
uugugggaaucguuggaua

SEQ ID NO: 2565653 - RNA, 19 nt, Homo sapiens
  misc_RNA (1)...(19): siRNA sense strand
ucucucaaauccagggaca

SEQ ID NO: 2565654 - RNA, 19 nt, Homo sapiens
  misc_RNA (1)...(19): siRNA sense strand
uacccaggaauuagggaaa

SEQ ID NO: 2565655 - RNA, 19 nt, Homo sapiens
  misc_RNA (1)...(19): siRNA sense strand
aagcauaaaagcagacauu

SEQ ID NO: 2565656 - RNA, 19 nt, Homo sapiens
  misc_RNA (1)...(19): siRNA sense strand
aguaauuuauccagcaguu

SEQ ID NO: 2565657 - RNA, 19 nt, Homo sapiens
  misc_RNA (1)...(19): siRNA sense strand
uggagacagaguagucaaa

SEQ ID NO: 2565658 - RNA, 19 nt, Homo sapiens
  misc_RNA (1)...(19): siRNA sense strand
ugauaaugguguggaagga

SEQ ID NO: 2565659 - RNA, 19 nt, Homo sapiens
  misc_RNA (1)...(19): siRNA sense strand
ccugaaguagauaaguuaa

SEQ ID NO: 2565660 - RNA, 19 nt, Homo sapiens
  misc_RNA (1)...(19): siRNA sense strand
gaaaguaauuuauccagca

SEQ ID NO: 2565661 - RNA, 19 nt, Homo sapiens
  misc_RNA (1)...(19): siRNA sense strand
uuuccaauucugagugcaa

SEQ ID NO: 2565662 - RNA, 19 nt, Homo sapiens
  misc_RNA (1)...(19): siRNA sense strand
ggacauucggguuuugaaa

SEQ ID NO: 2565663 - RNA, 19 nt, Homo sapiens
  misc_RNA (1)...(19): siRNA sense strand
ggcacaauuaccugggaga

SEQ ID NO: 2565664 - RNA, 19 nt, Homo sapiens
  misc_RNA (1)...(19): siRNA sense strand
gaacaaaauuauugcacug

SEQ ID NO: 2565665 - RNA, 19 nt, Homo sapiens
  misc_RNA (1)...(19): siRNA sense strand
uuaacaacaaccugagaca

SEQ ID NO: 2565666 - RNA, 19 nt, Homo sapiens
  misc_RNA (1)...(19): siRNA sense strand
aacaacaaccugagacaca

SEQ ID NO: 2565667 - RNA, 19 nt, Homo sapiens
  misc_RNA (1)...(19): siRNA sense strand
ugaagaaggccuuugagca

SEQ ID NO: 2565668 - RNA, 19 nt, Homo sapiens
  misc_RNA (1)...(19): siRNA sense strand
cagagaacguggugggcau

SEQ ID NO: 2565669 - RNA, 19 nt, Homo sapiens
  misc_RNA (1)...(19): siRNA sense strand
gggaauugcaguuggagca

SEQ ID NO: 2565670 - RNA, 19 nt, Homo sapiens
  misc_RNA (1)...(19): siRNA sense strand
cacauuaagaggagagaca

SEQ ID NO: 2565671 - RNA, 19 nt, Homo sapiens
  misc_RNA (1)...(19): siRNA sense strand
cugccugguuggagcgaau

SEQ ID NO: 2565672 - RNA, 19 nt, Homo sapiens
  misc_RNA (1)...(19): siRNA sense strand
aauacuaccaagagggaga

SEQ ID NO: 2565673 - RNA, 19 nt, Homo sapiens
  misc_RNA (1)...(19): siRNA sense strand
gugagggagccuuuggaaa

SEQ ID NO: 2565674 - RNA, 19 nt, Homo sapiens
  misc_RNA (1)...(19): siRNA sense strand
ccguggacauggagcucua

SEQ ID NO: 2565675 - RNA, 19 nt, Homo sapiens
  misc_RNA (1)...(19): siRNA sense strand
ucucaaacacggaggucau

SEQ ID NO: 2565676 - RNA, 19 nt, Homo sapiens
  misc_RNA (1)...(19): siRNA sense strand
cggaaguucacuacagaga

SEQ ID NO: 2565677 - RNA, 19 nt, Homo sapiens
  misc_RNA (1)...(19): siRNA sense strand
gggcaggauucagggaaca

SEQ ID NO: 2565678 - RNA, 19 nt, Homo sapiens
  misc_RNA (1)...(19): siRNA sense strand
cccacaaaccagaagaaga

SEQ ID NO: 2565679 - RNA, 19 nt, Homo sapiens
  misc_RNA (1)...(19): siRNA sense strand
acgcugagucuucgggaau

SEQ ID NO: 2565680 - RNA, 19 nt, Homo sapiens
  misc_RNA (1)...(19): siRNA sense strand
aggccaagcucaacagcca

SEQ ID NO: 2565681 - RNA, 19 nt, Homo sapiens
  misc_RNA (1)...(19): siRNA sense strand
gcgagaacugggugaggga

SEQ ID NO: 2565682 - RNA, 19 nt, Homo sapiens
  misc_RNA (1)...(19): siRNA sense strand
ggaccaauguucaugccau

SEQ ID NO: 2565683 - RNA, 19 nt, Homo sapiens
  misc_RNA (1)...(19): siRNA sense strand
uugcaauggcucuggauca

SEQ ID NO: 2565684 - RNA, 19 nt, Homo sapiens
  misc_RNA (1)...(19): siRNA sense strand
cggaggucauugagugcau

SEQ ID NO: 2565685 - RNA, 19 nt, Homo sapiens
  misc_RNA (1)...(19): siRNA sense strand
ugaacaucaaggagaucua

SEQ ID NO: 2565686 - RNA, 19 nt, Homo sapiens
  misc_RNA (1)...(19): siRNA sense strand
aauugcaguuggagcagaa

SEQ ID NO: 2565687 - RNA, 19 nt, Homo sapiens
  misc_RNA (1)...(19): siRNA sense strand
acaucgugcugaagcgaga

SEQ ID NO: 2565688 - RNA, 19 nt, Homo sapiens
  misc_RNA (1)...(19): siRNA sense strand
agaagacacuuuuggggua

SEQ ID NO: 2565689 - RNA, 19 nt, Homo sapiens
  misc_RNA (1)...(19): siRNA sense strand
cgucaugaucaacaaauau

SEQ ID NO: 2565690 - RNA, 19 nt, Homo sapiens
  misc_RNA (1)...(19): siRNA sense strand
agaucuucaccuauggaaa

SEQ ID NO: 2565691 - RNA, 19 nt, Homo sapiens
  misc_RNA (1)...(19): siRNA sense strand
cugugaaggcccugaagga

SEQ ID NO: 2565692 - RNA, 19 nt, Homo sapiens
  misc_RNA (1)...(19): siRNA sense strand
ugaccguacgagaggguga

SEQ ID NO: 2565693 - RNA, 19 nt, Homo sapiens
  misc_RNA (1)...(19): siRNA sense strand
cauuaagaggagagacauc

SEQ ID NO: 2565694 - RNA, 19 nt, Homo sapiens
  misc_RNA (1)...(19): siRNA sense strand
agcauggagaccugaauaa

SEQ ID NO: 2565695 - RNA, 19 nt, Homo sapiens
  misc_RNA (1)...(19): siRNA sense strand
cuucaaaagcugaccauca

SEQ ID NO: 2565696 - RNA, 19 nt, Homo sapiens
  misc_RNA (1)...(19): siRNA sense strand
gcaaauugugucugcagca

SEQ ID NO: 2565697 - RNA, 19 nt, Homo sapiens
  misc_RNA (1)...(19): siRNA sense strand
cgagugaggacaauggcuu

SEQ ID NO: 2565698 - RNA, 19 nt, Homo sapiens
  misc_RNA (1)...(19): siRNA sense strand
aggagaaggagcagaacua

SEQ ID NO: 2565699 - RNA, 19 nt, Homo sapiens
  misc_RNA (1)...(19): siRNA sense strand
gcuagaaauggcagagaau

SEQ ID NO: 2565700 - RNA, 19 nt, Homo sapiens
  misc_RNA (1)...(19): siRNA sense strand
gaauauaaucacagcacau

SEQ ID NO: 2565701 - RNA, 19 nt, Homo sapiens
  misc_RNA (1)...(19): siRNA sense strand
uggaagacacaguggagua

SEQ ID NO: 2565702 - RNA, 19 nt, Homo sapiens
  misc_RNA (1)...(19): siRNA sense strand
gcauuguggcagugcuaaa

SEQ ID NO: 2565703 - RNA, 19 nt, Homo sapiens
  misc_RNA (1)...(19): siRNA sense strand
aggaggagaaggagcagaa

SEQ ID NO: 2565704 - RNA, 19 nt, Homo sapiens
  misc_RNA (1)...(19): siRNA sense strand
caguagauguagaccugaa

SEQ ID NO: 2565705 - RNA, 19 nt, Homo sapiens
  misc_RNA (1)...(19): siRNA sense strand
ccugauaccagaugaguca

SEQ ID NO: 2565706 - RNA, 19 nt, Homo sapiens
  misc_RNA (1)...(19): siRNA sense strand
aagcagaucacaaaggaau

SEQ ID NO: 2565707 - RNA, 19 nt, Homo sapiens
  misc_RNA (1)...(19): siRNA sense strand
ccaacaaguaagccaacaa

SEQ ID NO: 2565708 - RNA, 19 nt, Homo sapiens
  misc_RNA (1)...(19): siRNA sense strand
gcucauauguuuggcguga

SEQ ID NO: 2565709 - RNA, 19 nt, Homo sapiens
  misc_RNA (1)...(19): siRNA sense strand
cuaaauggcuggauccuga

SEQ ID NO: 2565710 - RNA, 19 nt, Homo sapiens
  misc_RNA (1)...(19): siRNA sense strand
ccaaggaggagaaggagca

SEQ ID NO: 2565711 - RNA, 19 nt, Homo sapiens
  misc_RNA (1)...(19): siRNA sense strand
acaauucagaugaggaaga

SEQ ID NO: 2565712 - RNA, 19 nt, Homo sapiens
  misc_RNA (1)...(19): siRNA sense strand
cuaaaugucuauaugcaca

SEQ ID NO: 2565713 - RNA, 19 nt, Homo sapiens
  misc_RNA (1)...(19): siRNA sense strand
uuaagaaagaagcagcuaa

SEQ ID NO: 2565714 - RNA, 19 nt, Homo sapiens
  misc_RNA (1)...(19): siRNA sense strand
ugauaagauuuuagggcca

SEQ ID NO: 2565715 - RNA, 19 nt, Homo sapiens
  misc_RNA (1)...(19): siRNA sense strand
ucagaaguacauugagaga

SEQ ID NO: 2565716 - RNA, 19 nt, Homo sapiens
  misc_RNA (1)...(19): siRNA sense strand
agaguuaguagcaaggauu

SEQ ID NO: 2565717 - RNA, 19 nt, Homo sapiens
  misc_RNA (1)...(19): siRNA sense strand
gggagaaucuguuauggca

SEQ ID NO: 2565718 - RNA, 19 nt, Homo sapiens
  misc_RNA (1)...(19): siRNA sense strand
uggcauuguggcagugcua

SEQ ID NO: 2565719 - RNA, 19 nt, Homo sapiens
  misc_RNA (1)...(19): siRNA sense strand
gugaugaugacuuggacuu

SEQ ID NO: 2565720 - RNA, 19 nt, Homo sapiens
  misc_RNA (1)...(19): siRNA sense strand
gggacucagauaaacauaa

SEQ ID NO: 2565721 - RNA, 19 nt, Homo sapiens
  misc_RNA (1)...(19): siRNA sense strand
ccuauugaccugcgagcuu

SEQ ID NO: 2565722 - RNA, 19 nt, Homo sapiens
  misc_RNA (1)...(19): siRNA sense strand
ccacaagggagcagagcug

SEQ ID NO: 2565723 - RNA, 19 nt, Homo sapiens
  misc_RNA (1)...(19): siRNA sense strand
ggaagauucugguacggga

SEQ ID NO: 2565724 - RNA, 19 nt, Homo sapiens
  misc_RNA (1)...(19): siRNA sense strand
ccugaaaauagcaccaaua

SEQ ID NO: 2565725 - RNA, 19 nt, Homo sapiens
  misc_RNA (1)...(19): siRNA sense strand
agaaagaagcagcuaaucu

SEQ ID NO: 2565726 - RNA, 19 nt, Homo sapiens
  misc_RNA (1)...(19): siRNA sense strand
gguuagaucucucaccaga

SEQ ID NO: 2565727 - RNA, 19 nt, Homo sapiens
  misc_RNA (1)...(19): siRNA sense strand
augauuacuuuaagggacu

SEQ ID NO: 2565728 - RNA, 19 nt, Homo sapiens
  misc_RNA (1)...(19): siRNA sense strand
agaccaacaaguaagccaa

SEQ ID NO: 2565729 - RNA, 19 nt, Homo sapiens
  misc_RNA (1)...(19): siRNA sense strand
uugaagacaaugaugguga

SEQ ID NO: 2565730 - RNA, 19 nt, Homo sapiens
  misc_RNA (1)...(19): siRNA sense strand
acuuuaagggacugauaga

SEQ ID NO: 2565731 - RNA, 19 nt, Homo sapiens
  misc_RNA (1)...(19): siRNA sense strand
uuuccaaggaggagaagga

SEQ ID NO: 2565732 - RNA, 19 nt, Homo sapiens
  misc_RNA (1)...(19): siRNA sense strand
aggccuaaugagucagauu

SEQ ID NO: 2565733 - RNA, 19 nt, Homo sapiens
  misc_RNA (1)...(19): siRNA sense strand
guuuagauagugaugauga

SEQ ID NO: 2565734 - RNA, 19 nt, Homo sapiens
  misc_RNA (1)...(19): siRNA sense strand
cagaguuaguagcaaggau

SEQ ID NO: 2565735 - RNA, 19 nt, Homo sapiens
  misc_RNA (1)...(19): siRNA sense strand
ucauauguuuggcgugaca

SEQ ID NO: 2565736 - RNA, 19 nt, Homo sapiens
  misc_RNA (1)...(19): siRNA sense strand
ggacuuugaaacacacgaa

SEQ ID NO: 2565737 - RNA, 19 nt, Homo sapiens
  misc_RNA (1)...(19): siRNA sense strand
aggaagggccugagccuaa

SEQ ID NO: 2565738 - RNA, 19 nt, Homo sapiens
  misc_RNA (1)...(19): siRNA sense strand
cagaagcugccgugggaaa

SEQ ID NO: 2565739 - RNA, 19 nt, Homo sapiens
  misc_RNA (1)...(19): siRNA sense strand
ggaccaucccugaggaaga

SEQ ID NO: 2565740 - RNA, 19 nt, Homo sapiens
  misc_RNA (1)...(19): siRNA sense strand
cugguaacuuggaggaauu

SEQ ID NO: 2565741 - RNA, 19 nt, Homo sapiens
  misc_RNA (1)...(19): siRNA sense strand
cuaaagacucugcgagaca

SEQ ID NO: 2565742 - RNA, 19 nt, Homo sapiens
  misc_RNA (1)...(19): siRNA sense strand
aaguagagaguuugaagaa

SEQ ID NO: 2565743 - RNA, 19 nt, Homo sapiens
  misc_RNA (1)...(19): siRNA sense strand
gcugaugggcagugacauu

SEQ ID NO: 2565744 - RNA, 19 nt, Homo sapiens
  misc_RNA (1)...(19): siRNA sense strand
guuuguagcagcacggaua

SEQ ID NO: 2565745 - RNA, 19 nt, Homo sapiens
  misc_RNA (1)...(19): siRNA sense strand
ccagaagcaccgaggauca

SEQ ID NO: 2565746 - RNA, 19 nt, Homo sapiens
  misc_RNA (1)...(19): siRNA sense strand
gcccagacaaggagaguga

SEQ ID NO: 2565747 - RNA, 19 nt, Homo sapiens
  misc_RNA (1)...(19): siRNA sense strand
cagugaagcuggcuggaga

SEQ ID NO: 2565748 - RNA, 19 nt, Homo sapiens
  misc_RNA (1)...(19): siRNA sense strand
ccaucagcgcaguggagaa

SEQ ID NO: 2565749 - RNA, 19 nt, Homo sapiens
  misc_RNA (1)...(19): siRNA sense strand
cagaaggcacagaaagaga

SEQ ID NO: 2565750 - RNA, 19 nt, Homo sapiens
  misc_RNA (1)...(19): siRNA sense strand
gcgcaguggagaaggcuca

SEQ ID NO: 2565751 - RNA, 19 nt, Homo sapiens
  misc_RNA (1)...(19): siRNA sense strand
ccucuaagacucagggcca

SEQ ID NO: 2565752 - RNA, 19 nt, Homo sapiens
  misc_RNA (1)...(19): siRNA sense strand
ggcugaaggccuugagcuu

SEQ ID NO: 2565753 - RNA, 19 nt, Homo sapiens
  misc_RNA (1)...(19): siRNA sense strand
aguagagaguuugaagaaa

SEQ ID NO: 2565754 - RNA, 19 nt, Homo sapiens
  misc_RNA (1)...(19): siRNA sense strand
gcuauagacuugaugccau

SEQ ID NO: 2565755 - RNA, 19 nt, Homo sapiens
  misc_RNA (1)...(19): siRNA sense strand
cugagagacugaaggacca

SEQ ID NO: 2565756 - RNA, 19 nt, Homo sapiens
  misc_RNA (1)...(19): siRNA sense strand
cuggcagacaccugagaua

SEQ ID NO: 2565757 - RNA, 19 nt, Homo sapiens
  misc_RNA (1)...(19): siRNA sense strand
ugcccaaggcugucagaua

SEQ ID NO: 2565758 - RNA, 19 nt, Homo sapiens
  misc_RNA (1)...(19): siRNA sense strand
gccaagagcugacggacca

SEQ ID NO: 2565759 - RNA, 19 nt, Homo sapiens
  misc_RNA (1)...(19): siRNA sense strand
gagaucagcuucuggacga

SEQ ID NO: 2565760 - RNA, 19 nt, Homo sapiens
  misc_RNA (1)...(19): siRNA sense strand
cagaaguccuccaaggcuu

SEQ ID NO: 2565761 - RNA, 19 nt, Homo sapiens
  misc_RNA (1)...(19): siRNA sense strand
ccagacaaggagagugaca

SEQ ID NO: 2565762 - RNA, 19 nt, Homo sapiens
  misc_RNA (1)...(19): siRNA sense strand
gggcuggcaucgugcucaa

SEQ ID NO: 2565763 - RNA, 19 nt, Homo sapiens
  misc_RNA (1)...(19): siRNA sense strand
gagcaagaguauggaggca

SEQ ID NO: 2565764 - RNA, 19 nt, Homo sapiens
  misc_RNA (1)...(19): siRNA sense strand
ccugagaucaugaggacca

SEQ ID NO: 2565765 - RNA, 19 nt, Homo sapiens
  misc_RNA (1)...(19): siRNA sense strand
gcaucgugcucaaguacau

SEQ ID NO: 2565766 - RNA, 19 nt, Homo sapiens
  misc_RNA (1)...(19): siRNA sense strand
uggccauggucuaaaugaa

SEQ ID NO: 2565767 - RNA, 19 nt, Homo sapiens
  misc_RNA (1)...(19): siRNA sense strand
agauguacuuucagggacu

SEQ ID NO: 2565768 - RNA, 19 nt, Homo sapiens
  misc_RNA (1)...(19): siRNA sense strand
acgauaaagcacaggccuu

SEQ ID NO: 2565769 - RNA, 19 nt, Homo sapiens
  misc_RNA (1)...(19): siRNA sense strand
gcacagaaagagaacagca

SEQ ID NO: 2565770 - RNA, 19 nt, Homo sapiens
  misc_RNA (1)...(19): siRNA sense strand
cugacaguaccaagcaaua

SEQ ID NO: 2565771 - RNA, 19 nt, Homo sapiens
  misc_RNA (1)...(19): siRNA sense strand
gggcauuguaugagagcug

SEQ ID NO: 2565772 - RNA, 19 nt, Homo sapiens
  misc_RNA (1)...(19): siRNA sense strand
gcugcaagauggugauuuu

SEQ ID NO: 2565773 - RNA, 19 nt, Homo sapiens
  misc_RNA (1)...(19): siRNA sense strand
aggaagguaucgagcggga

SEQ ID NO: 2565774 - RNA, 19 nt, Homo sapiens
  misc_RNA (1)...(19): siRNA sense strand
gaggaagaacugacugaca

SEQ ID NO: 2565775 - RNA, 19 nt, Homo sapiens
  misc_RNA (1)...(19): siRNA sense strand
gguuuaugacuuugcccaa

SEQ ID NO: 2565776 - RNA, 19 nt, Homo sapiens
  misc_RNA (1)...(19): siRNA sense strand
agcuaaagacucugcgaga

SEQ ID NO: 2565777 - RNA, 19 nt, Homo sapiens
  misc_RNA (1)...(19): siRNA sense strand
cugcugacccggcuggaaa

SEQ ID NO: 2565778 - RNA, 19 nt, Homo sapiens
  misc_RNA (1)...(19): siRNA sense strand
ugaaugaguuugaugccau

SEQ ID NO: 2565779 - RNA, 19 nt, Homo sapiens
  misc_RNA (1)...(19): siRNA sense strand
acgaauucucuuugucuua

SEQ ID NO: 2565780 - RNA, 19 nt, Homo sapiens
  misc_RNA (1)...(19): siRNA sense strand
cuacagagagcaagccuga

SEQ ID NO: 2565781 - RNA, 19 nt, Homo sapiens
  misc_RNA (1)...(19): siRNA sense strand
cauccagaaggcacagaaa

SEQ ID NO: 2565782 - RNA, 19 nt, Homo sapiens
  misc_RNA (1)...(19): siRNA sense strand
uccagaaggcacagaaaga

SEQ ID NO: 2565783 - RNA, 19 nt, Homo sapiens
  misc_RNA (1)...(19): siRNA sense strand
ucacgguguuugaggaagu

SEQ ID NO: 2565784 - RNA, 19 nt, Homo sapiens
  misc_RNA (1)...(19): siRNA sense strand
ugacugacaacuggagaaa

SEQ ID NO: 2565785 - RNA, 19 nt, Homo sapiens
  misc_RNA (1)...(19): siRNA sense strand
ucuacacuguggugguuua

SEQ ID NO: 2565786 - RNA, 19 nt, Homo sapiens
  misc_RNA (1)...(19): siRNA sense strand
guaauuuggccuacagcuu

SEQ ID NO: 2565787 - RNA, 19 nt, Homo sapiens
  misc_RNA (1)...(19): siRNA sense strand
agaaaggucuggaagguag

SEQ ID NO: 2565788 - RNA, 19 nt, Homo sapiens
  misc_RNA (1)...(19): siRNA sense strand
ggaaauauccugaccgcac

SEQ ID NO: 2565789 - RNA, 19 nt, Homo sapiens
  misc_RNA (1)...(19): siRNA sense strand
cccuaaaacuuacaacaaa

SEQ ID NO: 2565790 - RNA, 19 nt, Homo sapiens
  misc_RNA (1)...(19): siRNA sense strand
gcugaagggcuguccugaa

SEQ ID NO: 2565791 - RNA, 19 nt, Homo sapiens
  misc_RNA (1)...(19): siRNA sense strand
uguacugacaagcgagaau

SEQ ID NO: 2565792 - RNA, 19 nt, Homo sapiens
  misc_RNA (1)...(19): siRNA sense strand
uggucuaaaugaagcagau

SEQ ID NO: 2565793 - RNA, 19 nt, Homo sapiens
  misc_RNA (1)...(19): siRNA sense strand
acuaguggacaguuguaaa

SEQ ID NO: 2565794 - RNA, 19 nt, Homo sapiens
  misc_RNA (1)...(19): siRNA sense strand
ccgccuggguagugugagu

SEQ ID NO: 2565795 - RNA, 19 nt, Homo sapiens
  misc_RNA (1)...(19): siRNA sense strand
cugacugacaacuggagaa

SEQ ID NO: 2565796 - RNA, 19 nt, Homo sapiens
  misc_RNA (1)...(19): siRNA sense strand
ugucaagcacagaggagca

SEQ ID NO: 2565797 - RNA, 19 nt, Homo sapiens
  misc_RNA (1)...(19): siRNA sense strand
ccugguaacuuggaggaau

SEQ ID NO: 2565798 - RNA, 19 nt, Homo sapiens
  misc_RNA (1)...(19): siRNA sense strand
gcccagaagcaccgaggau

SEQ ID NO: 2565799 - RNA, 19 nt, Homo sapiens
  misc_RNA (1)...(19): siRNA sense strand
ccuacagcuucuauaguca

SEQ ID NO: 2565800 - RNA, 19 nt, Homo sapiens
  misc_RNA (1)...(19): siRNA sense strand
aggaaggaccucaggcagu

SEQ ID NO: 2565801 - RNA, 19 nt, Homo sapiens
  misc_RNA (1)...(19): siRNA sense strand
accugaacuaugaagauaa

SEQ ID NO: 2565802 - RNA, 19 nt, Homo sapiens
  misc_RNA (1)...(19): siRNA sense strand
cugaggaagaacugacuga

SEQ ID NO: 2565803 - RNA, 19 nt, Homo sapiens
  misc_RNA (1)...(19): siRNA sense strand
gaaugaggcaguaggacgu

SEQ ID NO: 2565804 - RNA, 19 nt, Homo sapiens
  misc_RNA (1)...(19): siRNA sense strand
cccucuaccuggaacgaau

SEQ ID NO: 2565805 - RNA, 19 nt, Homo sapiens
  misc_RNA (1)...(19): siRNA sense strand
uaguacucuuggaggauga

SEQ ID NO: 2565806 - RNA, 19 nt, Homo sapiens
  misc_RNA (1)...(19): siRNA sense strand
cugcaggguucguggauaa

SEQ ID NO: 2565807 - RNA, 19 nt, Homo sapiens
  misc_RNA (1)...(19): siRNA sense strand
guguaaagaaagacaguuu

SEQ ID NO: 2565808 - RNA, 19 nt, Homo sapiens
  misc_RNA (1)...(19): siRNA sense strand
acgaagaauuguagcccaa

SEQ ID NO: 2565809 - RNA, 19 nt, Homo sapiens
  misc_RNA (1)...(19): siRNA sense strand
gagagaacuauuugagcaa

SEQ ID NO: 2565810 - RNA, 19 nt, Homo sapiens
  misc_RNA (1)...(19): siRNA sense strand
agacuauggucgaagaaaa

SEQ ID NO: 2565811 - RNA, 19 nt, Homo sapiens
  misc_RNA (1)...(19): siRNA sense strand
cauaauuaguagugagaag

SEQ ID NO: 2565812 - RNA, 19 nt, Homo sapiens
  misc_RNA (1)...(19): siRNA sense strand
aagacaaggugaagaggau

SEQ ID NO: 2565813 - RNA, 19 nt, Homo sapiens
  misc_RNA (1)...(19): siRNA sense strand
gugaagaggauaaugagua

SEQ ID NO: 2565814 - RNA, 19 nt, Homo sapiens
  misc_RNA (1)...(19): siRNA sense strand
ugaagaggauaaugaguau

SEQ ID NO: 2565815 - RNA, 19 nt, Homo sapiens
  misc_RNA (1)...(19): siRNA sense strand
gcagaagcugagagaacua

SEQ ID NO: 2565816 - RNA, 19 nt, Homo sapiens
  misc_RNA (1)...(19): siRNA sense strand
gagaaggaacuuaagaauu

SEQ ID NO: 2565817 - RNA, 19 nt, Homo sapiens
  misc_RNA (1)...(19): siRNA sense strand
gacaaggugaagaggauaa

SEQ ID NO: 2565818 - RNA, 19 nt, Homo sapiens
  misc_RNA (1)...(19): siRNA sense strand
agauauggaacgaagaauu

SEQ ID NO: 2565819 - RNA, 19 nt, Homo sapiens
  misc_RNA (1)...(19): siRNA sense strand
cuaaaggaguccaggagga

SEQ ID NO: 2565820 - RNA, 19 nt, Homo sapiens
  misc_RNA (1)...(19): siRNA sense strand
cagaauuagaagaugaaca

SEQ ID NO: 2565821 - RNA, 19 nt, Homo sapiens
  misc_RNA (1)...(19): siRNA sense strand
uggcgaaggcuguugcaaa

SEQ ID NO: 2565822 - RNA, 19 nt, Homo sapiens
  misc_RNA (1)...(19): siRNA sense strand
cgggaagguucgaccgaga

SEQ ID NO: 2565823 - RNA, 19 nt, Homo sapiens
  misc_RNA (1)...(19): siRNA sense strand
gcaagacagaagaguggaa

SEQ ID NO: 2565824 - RNA, 19 nt, Homo sapiens
  misc_RNA (1)...(19): siRNA sense strand
cggaaaggcaagcuaaaga

SEQ ID NO: 2565825 - RNA, 19 nt, Homo sapiens
  misc_RNA (1)...(19): siRNA sense strand
gaagaugaacauuuggcaa

SEQ ID NO: 2565826 - RNA, 19 nt, Homo sapiens
  misc_RNA (1)...(19): siRNA sense strand
auucaaguauggaagacua

SEQ ID NO: 2565827 - RNA, 19 nt, Homo sapiens
  misc_RNA (1)...(19): siRNA sense strand
gagaaauaugccuagguau

SEQ ID NO: 2565828 - RNA, 19 nt, Homo sapiens
  misc_RNA (1)...(19): siRNA sense strand
aggaugguuuauugacaaa

SEQ ID NO: 2565829 - RNA, 19 nt, Homo sapiens
  misc_RNA (1)...(19): siRNA sense strand
gugagaaggaacuuaagaa

SEQ ID NO: 2565830 - RNA, 19 nt, Homo sapiens
  misc_RNA (1)...(19): siRNA sense strand
agaaauaugccuagguauc

SEQ ID NO: 2565831 - RNA, 19 nt, Homo sapiens
  misc_RNA (1)...(19): siRNA sense strand
caggguucguggauaauaa

SEQ ID NO: 2565832 - RNA, 19 nt, Homo sapiens
  misc_RNA (1)...(19): siRNA sense strand
gaagccaauaacugagaua

SEQ ID NO: 2565833 - RNA, 19 nt, Homo sapiens
  misc_RNA (1)...(19): siRNA sense strand
ggaagguucgaccgagaaa

SEQ ID NO: 2565834 - RNA, 19 nt, Homo sapiens
  misc_RNA (1)...(19): siRNA sense strand
cugaaacacaggaugaauu

SEQ ID NO: 2565835 - RNA, 19 nt, Homo sapiens
  misc_RNA (1)...(19): siRNA sense strand
ugagaaggaacuuaagaau

SEQ ID NO: 2565836 - RNA, 19 nt, Homo sapiens
  misc_RNA (1)...(19): siRNA sense strand
gagugauaugaaacggaaa

SEQ ID NO: 2565837 - RNA, 19 nt, Homo sapiens
  misc_RNA (1)...(19): siRNA sense strand
gaguauacugaaagcuauu

SEQ ID NO: 2565838 - RNA, 19 nt, Homo sapiens
  misc_RNA (1)...(19): siRNA sense strand
caaagauucugaaggagga

SEQ ID NO: 2565839 - RNA, 19 nt, Homo sapiens
  misc_RNA (1)...(19): siRNA sense strand
gcuaaagaauaaaggaagc

SEQ ID NO: 2565840 - RNA, 19 nt, Homo sapiens
  misc_RNA (1)...(19): siRNA sense strand
caggaaauggcaagacaga

SEQ ID NO: 2565841 - RNA, 19 nt, Homo sapiens
  misc_RNA (1)...(19): siRNA sense strand
gcaaaaggaagaaagaaga

SEQ ID NO: 2565842 - RNA, 19 nt, Homo sapiens
  misc_RNA (1)...(19): siRNA sense strand
gguuagaauuccagaucuc

SEQ ID NO: 2565843 - RNA, 19 nt, Homo sapiens
  misc_RNA (1)...(19): siRNA sense strand
aagaucagaccgagagaca

SEQ ID NO: 2565844 - RNA, 19 nt, Homo sapiens
  misc_RNA (1)...(19): siRNA sense strand
ggaagacucugcuggcgaa

SEQ ID NO: 2565845 - RNA, 19 nt, Homo sapiens
  misc_RNA (1)...(19): siRNA sense strand
ucaggaaguagauggagaa

SEQ ID NO: 2565846 - RNA, 19 nt, Homo sapiens
  misc_RNA (1)...(19): siRNA sense strand
ugaagaugugggaggcaau

SEQ ID NO: 2565847 - RNA, 19 nt, Homo sapiens
  misc_RNA (1)...(19): siRNA sense strand
uuacagagauggauggucu

SEQ ID NO: 2565848 - RNA, 19 nt, Homo sapiens
  misc_RNA (1)...(19): siRNA sense strand
auaugaaacggaaaggcaa

SEQ ID NO: 2565849 - RNA, 19 nt, Homo sapiens
  misc_RNA (1)...(19): siRNA sense strand
cuuaaugaagcuacaggaa

SEQ ID NO: 2565850 - RNA, 19 nt, Homo sapiens
  misc_RNA (1)...(19): siRNA sense strand
cuucugaaacacaggauga

SEQ ID NO: 2565851 - RNA, 19 nt, Homo sapiens
  misc_RNA (1)...(19): siRNA sense strand
aguccaacccucugccaaa

SEQ ID NO: 2565852 - RNA, 19 nt, Homo sapiens
  misc_RNA (1)...(19): siRNA sense strand
ugaugaaguggaugcuuua

SEQ ID NO: 2565853 - RNA, 19 nt, Homo sapiens
  misc_RNA (1)...(19): siRNA sense strand
ugacaaaaccccaagugua

SEQ ID NO: 2565854 - RNA, 19 nt, Homo sapiens
  misc_RNA (1)...(19): siRNA sense strand
agccaauaacugagauaca

SEQ ID NO: 2565855 - RNA, 19 nt, Homo sapiens
  misc_RNA (1)...(19): siRNA sense strand
gauaugaaacggaaaggca

SEQ ID NO: 2565856 - RNA, 19 nt, Homo sapiens
  misc_RNA (1)...(19): siRNA sense strand
guagugagaaggaacuuaa

SEQ ID NO: 2565857 - RNA, 19 nt, Homo sapiens
  misc_RNA (1)...(19): siRNA sense strand
acgugaaguuugaagaugu

SEQ ID NO: 2565858 - RNA, 19 nt, Homo sapiens
  misc_RNA (1)...(19): siRNA sense strand
gagugaacgugcugugcga

SEQ ID NO: 2565859 - RNA, 19 nt, Homo sapiens
  misc_RNA (1)...(19): siRNA sense strand
cuaacaggccagauauaau

SEQ ID NO: 2565860 - RNA, 19 nt, Homo sapiens
  misc_RNA (1)...(19): siRNA sense strand
cauuaaaagaggucugcaa

SEQ ID NO: 2565861 - RNA, 19 nt, Homo sapiens
  misc_RNA (1)...(19): siRNA sense strand
caggaacagcagaagaaaa

SEQ ID NO: 2565862 - RNA, 19 nt, Homo sapiens
  misc_RNA (1)...(19): siRNA sense strand
aauccuaagaagccaauaa

SEQ ID NO: 2565863 - RNA, 19 nt, Homo sapiens
  misc_RNA (1)...(19): siRNA sense strand
cauguauguuggugagagu

SEQ ID NO: 2565864 - RNA, 19 nt, Homo sapiens
  misc_RNA (1)...(19): siRNA sense strand
aagacagaagaguggaaau

SEQ ID NO: 2565865 - RNA, 19 nt, Homo sapiens
  misc_RNA (1)...(19): siRNA sense strand
augaguauacugaaagcua

SEQ ID NO: 2565866 - RNA, 19 nt, Homo sapiens
  misc_RNA (1)...(19): siRNA sense strand
ggauaaugaguauacugaa

SEQ ID NO: 2565867 - RNA, 19 nt, Homo sapiens
  misc_RNA (1)...(19): siRNA sense strand
agagauugugucuggagua

SEQ ID NO: 2565868 - RNA, 19 nt, Homo sapiens
  misc_RNA (1)...(19): siRNA sense strand
gguccuaguuauuggagcu

SEQ ID NO: 2565869 - RNA, 19 nt, Homo sapiens
  misc_RNA (1)...(19): siRNA sense strand
cgaccgagaaauaugccua

SEQ ID NO: 2565870 - RNA, 19 nt, Homo sapiens
  misc_RNA (1)...(19): siRNA sense strand
ugagagaacuauuugagca

SEQ ID NO: 2565871 - RNA, 19 nt, Homo sapiens
  misc_RNA (1)...(19): siRNA sense strand
gaauaauguggcugcuaca

SEQ ID NO: 2565872 - RNA, 19 nt, Homo sapiens
  misc_RNA (1)...(19): siRNA sense strand
aguucaaagcucuuggauu

SEQ ID NO: 2565873 - RNA, 19 nt, Homo sapiens
  misc_RNA (1)...(19): siRNA sense strand
guguaaagaaagacaguuu

SEQ ID NO: 2565874 - RNA, 19 nt, Homo sapiens
  misc_RNA (1)...(19): siRNA sense strand
acgaagaauuguagcccaa

SEQ ID NO: 2565875 - RNA, 19 nt, Homo sapiens
  misc_RNA (1)...(19): siRNA sense strand
gagagaacuauuugagcaa

SEQ ID NO: 2565876 - RNA, 19 nt, Homo sapiens
  misc_RNA (1)...(19): siRNA sense strand
gcagaagcugagagaacua

SEQ ID NO: 2565877 - RNA, 19 nt, Homo sapiens
  misc_RNA (1)...(19): siRNA sense strand
agauauggaacgaagaauu

SEQ ID NO: 2565878 - RNA, 19 nt, Homo sapiens
  misc_RNA (1)...(19): siRNA sense strand
cuaaaggaguccaggagga

SEQ ID NO: 2565879 - RNA, 19 nt, Homo sapiens
  misc_RNA (1)...(19): siRNA sense strand
uggcgaaggcuguugcaaa

SEQ ID NO: 2565880 - RNA, 19 nt, Homo sapiens
  misc_RNA (1)...(19): siRNA sense strand
cgggaagguucgaccgaga

SEQ ID NO: 2565881 - RNA, 19 nt, Homo sapiens
  misc_RNA (1)...(19): siRNA sense strand
gcaagacagaagaguggaa

SEQ ID NO: 2565882 - RNA, 19 nt, Homo sapiens
  misc_RNA (1)...(19): siRNA sense strand
cggaaaggcaagcuaaaga

SEQ ID NO: 2565883 - RNA, 19 nt, Homo sapiens
  misc_RNA (1)...(19): siRNA sense strand
gagaaauaugccuagguau

SEQ ID NO: 2565884 - RNA, 19 nt, Homo sapiens
  misc_RNA (1)...(19): siRNA sense strand
aggaugguuuauugacaaa

SEQ ID NO: 2565885 - RNA, 19 nt, Homo sapiens
  misc_RNA (1)...(19): siRNA sense strand
agaaauaugccuagguauc

SEQ ID NO: 2565886 - RNA, 19 nt, Homo sapiens
  misc_RNA (1)...(19): siRNA sense strand
gaagccaauaacugagaua

SEQ ID NO: 2565887 - RNA, 19 nt, Homo sapiens
  misc_RNA (1)...(19): siRNA sense strand
ggaagguucgaccgagaaa

SEQ ID NO: 2565888 - RNA, 19 nt, Homo sapiens
  misc_RNA (1)...(19): siRNA sense strand
cugaaacacaggaugaauu

SEQ ID NO: 2565889 - RNA, 19 nt, Homo sapiens
  misc_RNA (1)...(19): siRNA sense strand
gagugauaugaaacggaaa

SEQ ID NO: 2565890 - RNA, 19 nt, Homo sapiens
  misc_RNA (1)...(19): siRNA sense strand
caaagauucugaaggagga

SEQ ID NO: 2565891 - RNA, 19 nt, Homo sapiens
  misc_RNA (1)...(19): siRNA sense strand
gcuaaagaauaaaggaagc

SEQ ID NO: 2565892 - RNA, 19 nt, Homo sapiens
  misc_RNA (1)...(19): siRNA sense strand
caggaaauggcaagacaga

SEQ ID NO: 2565893 - RNA, 19 nt, Homo sapiens
  misc_RNA (1)...(19): siRNA sense strand
gcaaaaggaagaaagaaga

SEQ ID NO: 2565894 - RNA, 19 nt, Homo sapiens
  misc_RNA (1)...(19): siRNA sense strand
gguuagaauuccagaucuc

SEQ ID NO: 2565895 - RNA, 19 nt, Homo sapiens
  misc_RNA (1)...(19): siRNA sense strand
aagaucagaccgagagaca

SEQ ID NO: 2565896 - RNA, 19 nt, Homo sapiens
  misc_RNA (1)...(19): siRNA sense strand
ggaagacucugcuggcgaa

SEQ ID NO: 2565897 - RNA, 19 nt, Homo sapiens
  misc_RNA (1)...(19): siRNA sense strand
ucaggaaguagauggagaa

SEQ ID NO: 2565898 - RNA, 19 nt, Homo sapiens
  misc_RNA (1)...(19): siRNA sense strand
ugaagaugugggaggcaau

SEQ ID NO: 2565899 - RNA, 19 nt, Homo sapiens
  misc_RNA (1)...(19): siRNA sense strand
uuacagagauggauggucu

SEQ ID NO: 2565900 - RNA, 19 nt, Homo sapiens
  misc_RNA (1)...(19): siRNA sense strand
auaugaaacggaaaggcaa

SEQ ID NO: 2565901 - RNA, 19 nt, Homo sapiens
  misc_RNA (1)...(19): siRNA sense strand
cuuaaugaagcuacaggaa

SEQ ID NO: 2565902 - RNA, 19 nt, Homo sapiens
  misc_RNA (1)...(19): siRNA sense strand
cuucugaaacacaggauga

SEQ ID NO: 2565903 - RNA, 19 nt, Homo sapiens
  misc_RNA (1)...(19): siRNA sense strand
aguccaacccucugccaaa

SEQ ID NO: 2565904 - RNA, 19 nt, Homo sapiens
  misc_RNA (1)...(19): siRNA sense strand
ugaugaaguggaugcuuua

SEQ ID NO: 2565905 - RNA, 19 nt, Homo sapiens
  misc_RNA (1)...(19): siRNA sense strand
ugacaaaaccccaagugua

SEQ ID NO: 2565906 - RNA, 19 nt, Homo sapiens
  misc_RNA (1)...(19): siRNA sense strand
agccaauaacugagauaca

SEQ ID NO: 2565907 - RNA, 19 nt, Homo sapiens
  misc_RNA (1)...(19): siRNA sense strand
gauaugaaacggaaaggca

SEQ ID NO: 2565908 - RNA, 19 nt, Homo sapiens
  misc_RNA (1)...(19): siRNA sense strand
acgugaaguuugaagaugu

SEQ ID NO: 2565909 - RNA, 19 nt, Homo sapiens
  misc_RNA (1)...(19): siRNA sense strand
gagugaacgugcugugcga

SEQ ID NO: 2565910 - RNA, 19 nt, Homo sapiens
  misc_RNA (1)...(19): siRNA sense strand
cuaacaggccagauauaau

SEQ ID NO: 2565911 - RNA, 19 nt, Homo sapiens
  misc_RNA (1)...(19): siRNA sense strand
cauuaaaagaggucugcaa

SEQ ID NO: 2565912 - RNA, 19 nt, Homo sapiens
  misc_RNA (1)...(19): siRNA sense strand
caggaacagcagaagaaaa

SEQ ID NO: 2565913 - RNA, 19 nt, Homo sapiens
  misc_RNA (1)...(19): siRNA sense strand
aauccuaagaagccaauaa

SEQ ID NO: 2565914 - RNA, 19 nt, Homo sapiens
  misc_RNA (1)...(19): siRNA sense strand
cauguauguuggugagagu

SEQ ID NO: 2565915 - RNA, 19 nt, Homo sapiens
  misc_RNA (1)...(19): siRNA sense strand
aagacagaagaguggaaau

SEQ ID NO: 2565916 - RNA, 19 nt, Homo sapiens
  misc_RNA (1)...(19): siRNA sense strand
agagauugugucuggagua

SEQ ID NO: 2565917 - RNA, 19 nt, Homo sapiens
  misc_RNA (1)...(19): siRNA sense strand
gguccuaguuauuggagcu

SEQ ID NO: 2565918 - RNA, 19 nt, Homo sapiens
  misc_RNA (1)...(19): siRNA sense strand
cgaccgagaaauaugccua

SEQ ID NO: 2565919 - RNA, 19 nt, Homo sapiens
  misc_RNA (1)...(19): siRNA sense strand
ugagagaacuauuugagca

SEQ ID NO: 2565920 - RNA, 19 nt, Homo sapiens
  misc_RNA (1)...(19): siRNA sense strand
gaauaauguggcugcuaca

SEQ ID NO: 2565921 - RNA, 19 nt, Homo sapiens
  misc_RNA (1)...(19): siRNA sense strand
aguucaaagcucuuggauu

SEQ ID NO: 2565922 - RNA, 19 nt, Homo sapiens
  misc_RNA (1)...(19): siRNA sense strand
cugagauacaggauucaaa

SEQ ID NO: 2565923 - RNA, 19 nt, Homo sapiens
  misc_RNA (1)...(19): siRNA sense strand
uggaguauccggagagucu

SEQ ID NO: 2565924 - RNA, 19 nt, Homo sapiens
  misc_RNA (1)...(19): siRNA sense strand
ucugaaggaggaugguuua

SEQ ID NO: 2565925 - RNA, 19 nt, Homo sapiens
  misc_RNA (1)...(19): siRNA sense strand
ccuagguaucccagaugaa

SEQ ID NO: 2565926 - RNA, 19 nt, Homo sapiens
  misc_RNA (1)...(19): siRNA sense strand
gggaagacucugcuggcga

SEQ ID NO: 2565927 - RNA, 19 nt, Homo sapiens
  misc_RNA (1)...(19): siRNA sense strand
cacuaacaggccagauaua

SEQ ID NO: 2565928 - RNA, 19 nt, Homo sapiens
  misc_RNA (1)...(19): siRNA sense strand
ccaaguguaaagaaagaca

SEQ ID NO: 2565929 - RNA, 19 nt, Homo sapiens
  misc_RNA (1)...(19): siRNA sense strand
cugagauggagcaaagaga

SEQ ID NO: 2565930 - RNA, 19 nt, Homo sapiens
  misc_RNA (1)...(19): siRNA sense strand
ucuucaacaccacggauaa

SEQ ID NO: 2565931 - RNA, 19 nt, Homo sapiens
  misc_RNA (1)...(19): siRNA sense strand
ggaagacauuagagaggag

SEQ ID NO: 2565932 - RNA, 19 nt, Homo sapiens
  misc_RNA (1)...(19): siRNA sense strand
cuacaggaacagcagaaga

SEQ ID NO: 2565933 - RNA, 19 nt, Homo sapiens
  misc_RNA (1)...(19): siRNA sense strand
agauauuggugcccuggaa

SEQ ID NO: 2565934 - RNA, 19 nt, Homo sapiens
  misc_RNA (1)...(19): siRNA sense strand
guacauaagucaugggaca

SEQ ID NO: 2565935 - RNA, 19 nt, Homo sapiens
  misc_RNA (1)...(19): siRNA sense strand
ugauaagaucugugaggaa

SEQ ID NO: 2565936 - RNA, 19 nt, Homo sapiens
  misc_RNA (1)...(19): siRNA sense strand
gggcaagaccaaagccgaa

SEQ ID NO: 2565937 - RNA, 19 nt, Homo sapiens
  misc_RNA (1)...(19): siRNA sense strand
cugaguaugaggaggaaau

SEQ ID NO: 2565938 - RNA, 19 nt, Homo sapiens
  misc_RNA (1)...(19): siRNA sense strand
uggacaagcucguggagga

SEQ ID NO: 2565939 - RNA, 19 nt, Homo sapiens
  misc_RNA (1)...(19): siRNA sense strand
gugagaauggcguggacua

SEQ ID NO: 2565940 - RNA, 19 nt, Homo sapiens
  misc_RNA (1)...(19): siRNA sense strand
gcugcuaaguugaggccau

SEQ ID NO: 2565941 - RNA, 19 nt, Homo sapiens
  misc_RNA (1)...(19): siRNA sense strand
cuugaagacucguggggaa

SEQ ID NO: 2565942 - RNA, 19 nt, Homo sapiens
  misc_RNA (1)...(19): siRNA sense strand
ugguagaagcacagcccaa

SEQ ID NO: 2565943 - RNA, 19 nt, Homo sapiens
  misc_RNA (1)...(19): siRNA sense strand
gcuccggagaugugaagua

SEQ ID NO: 2565944 - RNA, 19 nt, Homo sapiens
  misc_RNA (1)...(19): siRNA sense strand
augagaagaucuugcacau

SEQ ID NO: 2565945 - RNA, 19 nt, Homo sapiens
  misc_RNA (1)...(19): siRNA sense strand
guucugugccuguggaaaa

SEQ ID NO: 2565946 - RNA, 19 nt, Homo sapiens
  misc_RNA (1)...(19): siRNA sense strand
ugagaagcgcuuuggucua

SEQ ID NO: 2565947 - RNA, 19 nt, Homo sapiens
  misc_RNA (1)...(19): siRNA sense strand
aagccaacuucgacaucaa

SEQ ID NO: 2565948 - RNA, 19 nt, Homo sapiens
  misc_RNA (1)...(19): siRNA sense strand
gcacaagaaccaaggcuac

SEQ ID NO: 2565949 - RNA, 19 nt, Homo sapiens
  misc_RNA (1)...(19): siRNA sense strand
aggaggagcacaagaacca

SEQ ID NO: 2565950 - RNA, 19 nt, Homo sapiens
  misc_RNA (1)...(19): siRNA sense strand
auugacaagucuagugaga

SEQ ID NO: 2565951 - RNA, 19 nt, Homo sapiens
  misc_RNA (1)...(19): siRNA sense strand
guggggaaauggugaagaa

SEQ ID NO: 2565952 - RNA, 19 nt, Homo sapiens
  misc_RNA (1)...(19): siRNA sense strand
acuauguggaggagaugua

SEQ ID NO: 2565953 - RNA, 19 nt, Homo sapiens
  misc_RNA (1)...(19): siRNA sense strand
ggguggaguucauguucau

SEQ ID NO: 2565954 - RNA, 19 nt, Homo sapiens
  misc_RNA (1)...(19): siRNA sense strand
ucaggaaggagcuggaaca

SEQ ID NO: 2565955 - RNA, 19 nt, Homo sapiens
  misc_RNA (1)...(19): siRNA sense strand
ccggagaugugaaguacca

SEQ ID NO: 2565956 - RNA, 19 nt, Homo sapiens
  misc_RNA (1)...(19): siRNA sense strand
agaccaaagccgaacaguu

SEQ ID NO: 2565957 - RNA, 19 nt, Homo sapiens
  misc_RNA (1)...(19): siRNA sense strand
ugaaguaccaccugggcau

SEQ ID NO: 2565958 - RNA, 19 nt, Homo sapiens
  misc_RNA (1)...(19): siRNA sense strand
aggacgugguugucgauuu

SEQ ID NO: 2565959 - RNA, 19 nt, Homo sapiens
  misc_RNA (1)...(19): siRNA sense strand
uugucgauuugguguguua

SEQ ID NO: 2565960 - RNA, 19 nt, Homo sapiens
  misc_RNA (1)...(19): siRNA sense strand
ccaaaucccuguugcgcca

SEQ ID NO: 2565961 - RNA, 19 nt, Homo sapiens
  misc_RNA (1)...(19): siRNA sense strand
cagaauguggacaagagaa

SEQ ID NO: 2565962 - RNA, 19 nt, Homo sapiens
  misc_RNA (1)...(19): siRNA sense strand
ucacaaggauugagcagcu

SEQ ID NO: 2565963 - RNA, 19 nt, Homo sapiens
  misc_RNA (1)...(19): siRNA sense strand
gggaaauggugaagaaccg

SEQ ID NO: 2565964 - RNA, 19 nt, Homo sapiens
  misc_RNA (1)...(19): siRNA sense strand
gcuacuaugacuacgugaa

SEQ ID NO: 2565965 - RNA, 19 nt, Homo sapiens
  misc_RNA (1)...(19): siRNA sense strand
gggacaggaaucagcacuu

SEQ ID NO: 2565966 - RNA, 19 nt, Homo sapiens
  misc_RNA (1)...(19): siRNA sense strand
gcauuguguacgagaccuu

SEQ ID NO: 2565967 - RNA, 19 nt, Homo sapiens
  misc_RNA (1)...(19): siRNA sense strand
gguucuauggccuggauga

SEQ ID NO: 2565968 - RNA, 19 nt, Homo sapiens
  misc_RNA (1)...(19): siRNA sense strand
cugucauguacgugugcaa

SEQ ID NO: 2565969 - RNA, 19 nt, Homo sapiens
  misc_RNA (1)...(19): siRNA sense strand
ggacaagccaagugggugc

SEQ ID NO: 2565970 - RNA, 19 nt, Homo sapiens
  misc_RNA (1)...(19): siRNA sense strand
aguucacaaaugaggagaa

SEQ ID NO: 2565971 - RNA, 19 nt, Homo sapiens
  misc_RNA (1)...(19): siRNA sense strand
gcugaacgugcuugcaaau

SEQ ID NO: 2565972 - RNA, 19 nt, Homo sapiens
  misc_RNA (1)...(19): siRNA sense strand
gccacaacgagauggauga

SEQ ID NO: 2565973 - RNA, 19 nt, Homo sapiens
  misc_RNA (1)...(19): siRNA sense strand
uguacaagcagauccgcaa

SEQ ID NO: 2565974 - RNA, 19 nt, Homo sapiens
  misc_RNA (1)...(19): siRNA sense strand
gcguggacuacgugaucau

SEQ ID NO: 2565975 - RNA, 19 nt, Homo sapiens
  misc_RNA (1)...(19): siRNA sense strand
ugcugaaggaggugcagaa

SEQ ID NO: 2565976 - RNA, 19 nt, Homo sapiens
  misc_RNA (1)...(19): siRNA sense strand
aggaagagagugaggccaa

SEQ ID NO: 2565977 - RNA, 19 nt, Homo sapiens
  misc_RNA (1)...(19): siRNA sense strand
aggaugaggaagagaguga

SEQ ID NO: 2565978 - RNA, 19 nt, Homo sapiens
  misc_RNA (1)...(19): siRNA sense strand
ggacauaacgggagcugga

SEQ ID NO: 2565979 - RNA, 19 nt, Homo sapiens
  misc_RNA (1)...(19): siRNA sense strand
cagcugacuuccaggccaa

SEQ ID NO: 2565980 - RNA, 19 nt, Homo sapiens
  misc_RNA (1)...(19): siRNA sense strand
ggaaaauaucugaugccaa

SEQ ID NO: 2565981 - RNA, 19 nt, Homo sapiens
  misc_RNA (1)...(19): siRNA sense strand
uaggcaggguggagcggaa

SEQ ID NO: 2565982 - RNA, 19 nt, Homo sapiens
  misc_RNA (1)...(19): siRNA sense strand
gugccagccagaagaagaa

SEQ ID NO: 2565983 - RNA, 19 nt, Homo sapiens
  misc_RNA (1)...(19): siRNA sense strand
agccagaagaagaagguca

SEQ ID NO: 2565984 - RNA, 19 nt, Homo sapiens
  misc_RNA (1)...(19): siRNA sense strand
cagcagaucuuuaagccca

SEQ ID NO: 2565985 - RNA, 19 nt, Homo sapiens
  misc_RNA (1)...(19): siRNA sense strand
cuuuaagcccacagaggau

SEQ ID NO: 2565986 - RNA, 19 nt, Homo sapiens
  misc_RNA (1)...(19): siRNA sense strand
ccagaagagcugauccaga

SEQ ID NO: 2565987 - RNA, 19 nt, Homo sapiens
  misc_RNA (1)...(19): siRNA sense strand
agcagaaacaauaaaguga

SEQ ID NO: 2565988 - RNA, 19 nt, Homo sapiens
  misc_RNA (1)...(19): siRNA sense strand
acggaagucuggagcaacu

SEQ ID NO: 2565989 - RNA, 19 nt, Homo sapiens
  misc_RNA (1)...(19): siRNA sense strand
gccagaagaagaaggucau

SEQ ID NO: 2565990 - RNA, 19 nt, Homo sapiens
  misc_RNA (1)...(19): siRNA sense strand
cuuccaggccaaggagaua

SEQ ID NO: 2565991 - RNA, 19 nt, Homo sapiens
  misc_RNA (1)...(19): siRNA sense strand
gcagacaacuccucgauga

SEQ ID NO: 2565992 - RNA, 19 nt, Homo sapiens
  misc_RNA (1)...(19): siRNA sense strand
gaacaucacugcagacaac

SEQ ID NO: 2565993 - RNA, 19 nt, Homo sapiens
  misc_RNA (1)...(19): siRNA sense strand
ggaacaucacugcagacaa

SEQ ID NO: 2565994 - RNA, 19 nt, Homo sapiens
  misc_RNA (1)...(19): siRNA sense strand
gugaggagcccgagcuguu

SEQ ID NO: 2565995 - RNA, 19 nt, Homo sapiens
  misc_RNA (1)...(19): siRNA sense strand
ucaucgaggacgagaacca

SEQ ID NO: 2565996 - RNA, 19 nt, Homo sapiens
  misc_RNA (1)...(19): siRNA sense strand
agcccgagcuguugaccaa

SEQ ID NO: 2565997 - RNA, 19 nt, Homo sapiens
  misc_RNA (1)...(19): siRNA sense strand
ucggcuaccugcagaucaa

SEQ ID NO: 2565998 - RNA, 19 nt, Homo sapiens
  misc_RNA (1)...(19): siRNA sense strand
aggaggucaucgaggacga

SEQ ID NO: 2565999 - RNA, 19 nt, Homo sapiens
  misc_RNA (1)...(19): siRNA sense strand
acuugaaacagauggaaga

SEQ ID NO: 2566000 - RNA, 19 nt, Homo sapiens
  misc_RNA (1)...(19): siRNA sense strand
aggacaaccuggagaucgu

SEQ ID NO: 2566001 - RNA, 19 nt, Homo sapiens
  misc_RNA (1)...(19): siRNA sense strand
ucaacuauacgguggcgaa

SEQ ID NO: 2566002 - RNA, 19 nt, Homo sapiens
  misc_RNA (1)...(19): siRNA sense strand
uggagagaagacugggaau

SEQ ID NO: 2566003 - RNA, 19 nt, Homo sapiens
  misc_RNA (1)...(19): siRNA sense strand
cagcagauccagaagggua

SEQ ID NO: 2566004 - RNA, 19 nt, Homo sapiens
  misc_RNA (1)...(19): siRNA sense strand
gugaaauaaccuaugacaa

SEQ ID NO: 2566005 - RNA, 19 nt, Homo sapiens
  misc_RNA (1)...(19): siRNA sense strand
ccgaagaccagauggccaa

SEQ ID NO: 2566006 - RNA, 19 nt, Homo sapiens
  misc_RNA (1)...(19): siRNA sense strand
ucaauaagcuguuugguga

SEQ ID NO: 2566007 - RNA, 19 nt, Homo sapiens
  misc_RNA (1)...(19): siRNA sense strand
guucaaauuagaagagcau

SEQ ID NO: 2566008 - RNA, 19 nt, Homo sapiens
  misc_RNA (1)...(19): siRNA sense strand
cugucuacuucaaaggaaa

SEQ ID NO: 2566009 - RNA, 19 nt, Homo sapiens
  misc_RNA (1)...(19): siRNA sense strand
gacucaaaccaaaggcaaa

SEQ ID NO: 2566010 - RNA, 19 nt, Homo sapiens
  misc_RNA (1)...(19): siRNA sense strand
gaagaaacuaaaugggcuu

SEQ ID NO: 2566011 - RNA, 19 nt, Homo sapiens
  misc_RNA (1)...(19): siRNA sense strand
uagaagaccuaaaggcuca

SEQ ID NO: 2566012 - RNA, 19 nt, Homo sapiens
  misc_RNA (1)...(19): siRNA sense strand
cagggaugucggagaggaa

SEQ ID NO: 2566013 - RNA, 19 nt, Homo sapiens
  misc_RNA (1)...(19): siRNA sense strand
cuucaaaggaaaguggaaa

SEQ ID NO: 2566014 - RNA, 19 nt, Homo sapiens
  misc_RNA (1)...(19): siRNA sense strand
uauucaagcaucuggcaaa

SEQ ID NO: 2566015 - RNA, 19 nt, Homo sapiens
  misc_RNA (1)...(19): siRNA sense strand
gauacauagaagaccuaaa

SEQ ID NO: 2566016 - RNA, 19 nt, Homo sapiens
  misc_RNA (1)...(19): siRNA sense strand
ccaugguggaugugaauga

SEQ ID NO: 2566017 - RNA, 19 nt, Homo sapiens
  misc_RNA (1)...(19): siRNA sense strand
acaaaauggcugaagauga

SEQ ID NO: 2566018 - RNA, 19 nt, Homo sapiens
  misc_RNA (1)...(19): siRNA sense strand
aguucaaauuagaagagca

SEQ ID NO: 2566019 - RNA, 19 nt, Homo sapiens
  misc_RNA (1)...(19): siRNA sense strand
aagccaugguggaugugaa

SEQ ID NO: 2566020 - RNA, 19 nt, Homo sapiens
  misc_RNA (1)...(19): siRNA sense strand
uaaugaagugggagccaau

SEQ ID NO: 2566021 - RNA, 19 nt, Homo sapiens
  misc_RNA (1)...(19): siRNA sense strand
agacucaaaccaaaggcaa

SEQ ID NO: 2566022 - RNA, 19 nt, Homo sapiens
  misc_RNA (1)...(19): siRNA sense strand
aagauaaccaacugcauuu

SEQ ID NO: 2566023 - RNA, 19 nt, Homo sapiens
  misc_RNA (1)...(19): siRNA sense strand
agaagaaacuaaaugggcu

SEQ ID NO: 2566024 - RNA, 19 nt, Homo sapiens
  misc_RNA (1)...(19): siRNA sense strand
agacaaaauggcugaagau

SEQ ID NO: 2566025 - RNA, 19 nt, Homo sapiens
  misc_RNA (1)...(19): siRNA sense strand
uggaggacgccuucaacaa

SEQ ID NO: 2566026 - RNA, 19 nt, Homo sapiens
  misc_RNA (1)...(19): siRNA sense strand
gggccaauuucucagggau

SEQ ID NO: 2566027 - RNA, 19 nt, Homo sapiens
  misc_RNA (1)...(19): siRNA sense strand
gcaaagacaaaauggcuga

SEQ ID NO: 2566028 - RNA, 19 nt, Homo sapiens
  misc_RNA (1)...(19): siRNA sense strand
uggcugaagaugaaguuga

SEQ ID NO: 2566029 - RNA, 19 nt, Homo sapiens
  misc_RNA (1)...(19): siRNA sense strand
agaugauguacuugcguga

SEQ ID NO: 2566030 - RNA, 19 nt, Homo sapiens
  misc_RNA (1)...(19): siRNA sense strand
cauuaugaacucagaucca

SEQ ID NO: 2566031 - RNA, 19 nt, Homo sapiens
  misc_RNA (1)...(19): siRNA sense strand
uggucaacaugaagggcaa

SEQ ID NO: 2566032 - RNA, 19 nt, Homo sapiens
  misc_RNA (1)...(19): siRNA sense strand
ugacaucagcaguggcaca

SEQ ID NO: 2566033 - RNA, 19 nt, Homo sapiens
  misc_RNA (1)...(19): siRNA sense strand
ugcaagaaguggacgagca

SEQ ID NO: 2566034 - RNA, 19 nt, Homo sapiens
  misc_RNA (1)...(19): siRNA sense strand
ccaaauacagagaauggca

SEQ ID NO: 2566035 - RNA, 19 nt, Homo sapiens
  misc_RNA (1)...(19): siRNA sense strand
aggccgagugggaugacua

SEQ ID NO: 2566036 - RNA, 19 nt, Homo sapiens
  misc_RNA (1)...(19): siRNA sense strand
aggaaggaucccaaauaca

SEQ ID NO: 2566037 - RNA, 19 nt, Homo sapiens
  misc_RNA (1)...(19): siRNA sense strand
caaaggagauugagcggau

SEQ ID NO: 2566038 - RNA, 19 nt, Homo sapiens
  misc_RNA (1)...(19): siRNA sense strand
ccaaagaggaguuagccaa

SEQ ID NO: 2566039 - RNA, 19 nt, Homo sapiens
  misc_RNA (1)...(19): siRNA sense strand
cggcggaagagacggaauu

SEQ ID NO: 2566040 - RNA, 19 nt, Homo sapiens
  misc_RNA (1)...(19): siRNA sense strand
gaaauaagcgaauccggua

SEQ ID NO: 2566041 - RNA, 19 nt, Homo sapiens
  misc_RNA (1)...(19): siRNA sense strand
gagauugagcggaugguca

SEQ ID NO: 2566042 - RNA, 19 nt, Homo sapiens
  misc_RNA (1)...(19): siRNA sense strand
gguuuggaaauaagcgaau

SEQ ID NO: 2566043 - RNA, 19 nt, Homo sapiens
  misc_RNA (1)...(19): siRNA sense strand
cuuuaaacugccacagaau

SEQ ID NO: 2566044 - RNA, 19 nt, Homo sapiens
  misc_RNA (1)...(19): siRNA sense strand
ccaucacagaccagaguuu

SEQ ID NO: 2566045 - RNA, 19 nt, Homo sapiens
  misc_RNA (1)...(19): siRNA sense strand
ggaagcaggacauuggaga

SEQ ID NO: 2566046 - RNA, 19 nt, Homo sapiens
  misc_RNA (1)...(19): siRNA sense strand
augucaaacucuggagauu

SEQ ID NO: 2566047 - RNA, 19 nt, Homo sapiens
  misc_RNA (1)...(19): siRNA sense strand
cagacaacucaguggagca

SEQ ID NO: 2566048 - RNA, 19 nt, Homo sapiens
  misc_RNA (1)...(19): siRNA sense strand
cauucagauuacagagcca

SEQ ID NO: 2566049 - RNA, 19 nt, Homo sapiens
  misc_RNA (1)...(19): siRNA sense strand
gugcaaucacagguggaua

SEQ ID NO: 2566050 - RNA, 19 nt, Homo sapiens
  misc_RNA (1)...(19): siRNA sense strand
caucagugcuaauggaggu

SEQ ID NO: 2566051 - RNA, 19 nt, Homo sapiens
  misc_RNA (1)...(19): siRNA sense strand
gagauuuguucaugagcgu

SEQ ID NO: 2566052 - RNA, 19 nt, Homo sapiens
  misc_RNA (1)...(19): siRNA sense strand
ccauacggagcuggagaaa

SEQ ID NO: 2566053 - RNA, 19 nt, Homo sapiens
  misc_RNA (1)...(19): siRNA sense strand
gaacaugguuacaaggugu

SEQ ID NO: 2566054 - RNA, 19 nt, Homo sapiens
  misc_RNA (1)...(19): siRNA sense strand
cagugauaauggagcuaga

SEQ ID NO: 2566055 - RNA, 19 nt, Homo sapiens
  misc_RNA (1)...(19): siRNA sense strand
uuguaaugacccuggcaua

SEQ ID NO: 2566056 - RNA, 19 nt, Homo sapiens
  misc_RNA (1)...(19): siRNA sense strand
uaauggagcuagaacgaca

SEQ ID NO: 2566057 - RNA, 19 nt, Homo sapiens
  misc_RNA (1)...(19): siRNA sense strand
cgacauggcgagagugaac

SEQ ID NO: 2566058 - RNA, 19 nt, Homo sapiens
  misc_RNA (1)...(19): siRNA sense strand
uggugaucaugguggguuu

SEQ ID NO: 2566059 - RNA, 19 nt, Homo sapiens
  misc_RNA (1)...(19): siRNA sense strand
acugcgagaccaagauaaa

SEQ ID NO: 2566060 - RNA, 19 nt, Homo sapiens
  misc_RNA (1)...(19): siRNA sense strand
acauggaagcccugcaaau

SEQ ID NO: 2566061 - RNA, 19 nt, Homo sapiens
  misc_RNA (1)...(19): siRNA sense strand
agcuagaacgacaggagaa

SEQ ID NO: 2566062 - RNA, 19 nt, Homo sapiens
  misc_RNA (1)...(19): siRNA sense strand
uugcaaaagaacaugguua

SEQ ID NO: 2566063 - RNA, 19 nt, Homo sapiens
  misc_RNA (1)...(19): siRNA sense strand
gcuagaacgacaggagaau

SEQ ID NO: 2566064 - RNA, 19 nt, Homo sapiens
  misc_RNA (1)...(19): siRNA sense strand
aggagaauguacuggugau

SEQ ID NO: 2566065 - RNA, 19 nt, Homo sapiens
  misc_RNA (1)...(19): siRNA sense strand
cagugagcuacaagaacua

SEQ ID NO: 2566066 - RNA, 19 nt, Homo sapiens
  misc_RNA (1)...(19): siRNA sense strand
ccuaugaggaucugguuca

SEQ ID NO: 2566067 - RNA, 19 nt, Homo sapiens
  misc_RNA (1)...(19): siRNA sense strand
auaaauaucgcuaccgcua

SEQ ID NO: 2566068 - RNA, 19 nt, Homo sapiens
  misc_RNA (1)...(19): siRNA sense strand
ggaaggucauguugcgguu

SEQ ID NO: 2566069 - RNA, 19 nt, Homo sapiens
  misc_RNA (1)...(19): siRNA sense strand
uggcauaauugcagaaaac

SEQ ID NO: 2566070 - RNA, 19 nt, Homo sapiens
  misc_RNA (1)...(19): siRNA sense strand
aggcagugagcuacaagaa

SEQ ID NO: 2566071 - RNA, 19 nt, Homo sapiens
  misc_RNA (1)...(19): siRNA sense strand
augaggaacuggacagcca

SEQ ID NO: 2566072 - RNA, 19 nt, Homo sapiens
  misc_RNA (1)...(19): siRNA sense strand
aggagaugaccuaugaaga

SEQ ID NO: 2566073 - RNA, 19 nt, Homo sapiens
  misc_RNA (1)...(19): siRNA sense strand
gcauaauugcagaaaacau

SEQ ID NO: 2566074 - RNA, 19 nt, Homo sapiens
  misc_RNA (1)...(19): siRNA sense strand
cuaugaagaaauccaggaa

SEQ ID NO: 2566075 - RNA, 19 nt, Homo sapiens
  misc_RNA (1)...(19): siRNA sense strand
aagaauuugcacugcgaga

SEQ ID NO: 2566076 - RNA, 19 nt, Homo sapiens
  misc_RNA (1)...(19): siRNA sense strand
ccgggagaagccugagaau

SEQ ID NO: 2566077 - RNA, 19 nt, Homo sapiens
  misc_RNA (1)...(19): siRNA sense strand
cagcauaccaugaaggaau

SEQ ID NO: 2566078 - RNA, 19 nt, Homo sapiens
  misc_RNA (1)...(19): siRNA sense strand
uagccaaccuugugggcaa

SEQ ID NO: 2566079 - RNA, 19 nt, Homo sapiens
  misc_RNA (1)...(19): siRNA sense strand
agaacaaugaacacagaaa

SEQ ID NO: 2566080 - RNA, 19 nt, Homo sapiens
  misc_RNA (1)...(19): siRNA sense strand
aggcagcauuagaggaaga

SEQ ID NO: 2566081 - RNA, 19 nt, Homo sapiens
  misc_RNA (1)...(19): siRNA sense strand
caaaguggaugaaagggaa

SEQ ID NO: 2566082 - RNA, 19 nt, Homo sapiens
  misc_RNA (1)...(19): siRNA sense strand
cuaacuaggaugacaagaa

SEQ ID NO: 2566083 - RNA, 19 nt, Homo sapiens
  misc_RNA (1)...(19): siRNA sense strand
cagcauuagaggaagaaca

SEQ ID NO: 2566084 - RNA, 19 nt, Homo sapiens
  misc_RNA (1)...(19): siRNA sense strand
auuugaugguguauggaaa

SEQ ID NO: 2566085 - RNA, 19 nt, Homo sapiens
  misc_RNA (1)...(19): siRNA sense strand
ccaaaguggaugaaaggga

SEQ ID NO: 2566086 - RNA, 19 nt, Homo sapiens
  misc_RNA (1)...(19): siRNA sense strand
agaacaggcacguuugaaa

SEQ ID NO: 2566087 - RNA, 19 nt, Homo sapiens
  misc_RNA (1)...(19): siRNA sense strand
gcaaguuggaauugacaga

SEQ ID NO: 2566088 - RNA, 19 nt, Homo sapiens
  misc_RNA (1)...(19): siRNA sense strand
acaaaugagaugaauguga

SEQ ID NO: 2566089 - RNA, 19 nt, Homo sapiens
  misc_RNA (1)...(19): siRNA sense strand
gguaauaaaugcugccuuc

SEQ ID NO: 2566090 - RNA, 19 nt, Homo sapiens
  misc_RNA (1)...(19): siRNA sense strand
gggaaaagcaggcagcauu

SEQ ID NO: 2566091 - RNA, 19 nt, Homo sapiens
  misc_RNA (1)...(19): siRNA sense strand
gcaugauaggauauggaau

SEQ ID NO: 2566092 - RNA, 19 nt, Homo sapiens
  misc_RNA (1)...(19): siRNA sense strand
aguauuuggcuucaagaaa

SEQ ID NO: 2566093 - RNA, 19 nt, Homo sapiens
  misc_RNA (1)...(19): siRNA sense strand
uggaauugacagaggugau

SEQ ID NO: 2566094 - RNA, 19 nt, Homo sapiens
  misc_RNA (1)...(19): siRNA sense strand
aggaagaacaggcacguuu

SEQ ID NO: 2566095 - RNA, 19 nt, Homo sapiens
  misc_RNA (1)...(19): siRNA sense strand
gaucuaacugcgaaccaaa

SEQ ID NO: 2566096 - RNA, 19 nt, Homo sapiens
  misc_RNA (1)...(19): siRNA sense strand
gauggaguuaugagaacaa

SEQ ID NO: 2566097 - RNA, 19 nt, Homo sapiens
  misc_RNA (1)...(19): siRNA sense strand
acauuuauuaggcgguaua

SEQ ID NO: 2566098 - RNA, 19 nt, Homo sapiens
  misc_RNA (1)...(19): siRNA sense strand
ugaaagcuuuaaaggaaca

SEQ ID NO: 2566099 - RNA, 19 nt, Homo sapiens
  misc_RNA (1)...(19): siRNA sense strand
uugaaucuguguuuggaaa

SEQ ID NO: 2566100 - RNA, 19 nt, Homo sapiens
  misc_RNA (1)...(19): siRNA sense strand
aaauggaaccacuaagaau

SEQ ID NO: 2566101 - RNA, 19 nt, Homo sapiens
  misc_RNA (1)...(19): siRNA sense strand
aaaguggaugaaagggaaa

SEQ ID NO: 2566102 - RNA, 19 nt, Homo sapiens
  misc_RNA (1)...(19): siRNA sense strand
caaucuuggcaucggaaau

SEQ ID NO: 2566103 - RNA, 19 nt, Homo sapiens
  misc_RNA (1)...(19): siRNA sense strand
ccaacaggcaugauaggau

SEQ ID NO: 2566104 - RNA, 19 nt, Homo sapiens
  misc_RNA (1)...(19): siRNA sense strand
aauugacagaggugauaua

SEQ ID NO: 2566105 - RNA, 19 nt, Homo sapiens
  misc_RNA (1)...(19): siRNA sense strand
uguagaugcuguugaugau

SEQ ID NO: 2566106 - RNA, 19 nt, Homo sapiens
  misc_RNA (1)...(19): siRNA sense strand
ccuucaugcuccuguucaa

SEQ ID NO: 2566107 - RNA, 19 nt, Homo sapiens
  misc_RNA (1)...(19): siRNA sense strand
cuguagaugcuguugauga

SEQ ID NO: 2566108 - RNA, 19 nt, Homo sapiens
  misc_RNA (1)...(19): siRNA sense strand
ugaugaacuagguggacuu

SEQ ID NO: 2566109 - RNA, 19 nt, Homo sapiens
  misc_RNA (1)...(19): siRNA sense strand
gcugauggaguuaugagaa

SEQ ID NO: 2566110 - RNA, 19 nt, Homo sapiens
  misc_RNA (1)...(19): siRNA sense strand
guuaugagaacaaugaaca

SEQ ID NO: 2566111 - RNA, 19 nt, Homo sapiens
  misc_RNA (1)...(19): siRNA sense strand
uuaaaggaacagcgccuaa

SEQ ID NO: 2566112 - RNA, 19 nt, Homo sapiens
  misc_RNA (1)...(19): siRNA sense strand
gcacaucaaagcugcccaa

SEQ ID NO: 2566113 - RNA, 19 nt, Homo sapiens
  misc_RNA (1)...(19): siRNA sense strand
uguauggaaaugagcguuu

SEQ ID NO: 2566114 - RNA, 19 nt, Homo sapiens
  misc_RNA (1)...(19): siRNA sense strand
gaaucaaauggaugcacuu

SEQ ID NO: 2566115 - RNA, 19 nt, Homo sapiens
  misc_RNA (1)...(19): siRNA sense strand
uauccaagacaguaugcaa

SEQ ID NO: 2566116 - RNA, 19 nt, Homo sapiens
  misc_RNA (1)...(19): siRNA sense strand
uggccuuaauguugacuuu

SEQ ID NO: 2566117 - RNA, 19 nt, Homo sapiens
  misc_RNA (1)...(19): siRNA sense strand
ggaucuaacugcgaaccaa

SEQ ID NO: 2566118 - RNA, 19 nt, Homo sapiens
  misc_RNA (1)...(19): siRNA sense strand
aggcgguauaguagauauu

SEQ ID NO: 2566119 - RNA, 19 nt, Homo sapiens
  misc_RNA (1)...(19): siRNA sense strand
cugauggaguuaugagaac

SEQ ID NO: 2566120 - RNA, 19 nt, Homo sapiens
  misc_RNA (1)...(19): siRNA sense strand
guuugaaagcuuuaaagga

SEQ ID NO: 2566121 - RNA, 19 nt, Homo sapiens
  misc_RNA (1)...(19): siRNA sense strand
ggaacagcgccuaaaagaa

SEQ ID NO: 2566122 - RNA, 19 nt, Homo sapiens
  misc_RNA (1)...(19): siRNA sense strand
ccaugaaggagaagggcuu

SEQ ID NO: 2566123 - RNA, 19 nt, Homo sapiens
  misc_RNA (1)...(19): siRNA sense strand
cgugagaccaugaaggaga

SEQ ID NO: 2566124 - RNA, 19 nt, Homo sapiens
  misc_RNA (1)...(19): siRNA sense strand
ccgucuacgacuugggcaa

SEQ ID NO: 2566125 - RNA, 19 nt, Homo sapiens
  misc_RNA (1)...(19): siRNA sense strand
ccuacgagcccauggccua

SEQ ID NO: 2566126 - RNA, 19 nt, Homo sapiens
  misc_RNA (1)...(19): siRNA sense strand
ggaaguaccgcuuugguga

SEQ ID NO: 2566127 - RNA, 19 nt, Homo sapiens
  misc_RNA (1)...(19): siRNA sense strand
gcaacaacagaguaggcuu

SEQ ID NO: 2566128 - RNA, 19 nt, Homo sapiens
  misc_RNA (1)...(19): siRNA sense strand
aguggauggugguggucuu

SEQ ID NO: 2566129 - RNA, 19 nt, Homo sapiens
  misc_RNA (1)...(19): siRNA sense strand
uggcaaagugggagaaauu

SEQ ID NO: 2566130 - RNA, 19 nt, Homo sapiens
  misc_RNA (1)...(19): siRNA sense strand
agucagaguacuaaggaua

SEQ ID NO: 2566131 - RNA, 19 nt, Homo sapiens
  misc_RNA (1)...(19): siRNA sense strand
acaagaugauaguggaaau

SEQ ID NO: 2566132 - RNA, 19 nt, Homo sapiens
  misc_RNA (1)...(19): siRNA sense strand
gcuugauggcagagggauu

SEQ ID NO: 2566133 - RNA, 19 nt, Homo sapiens
  misc_RNA (1)...(19): siRNA sense strand
ggaucuguuuggugugaaa

SEQ ID NO: 2566134 - RNA, 19 nt, Homo sapiens
  misc_RNA (1)...(19): siRNA sense strand
ccucaagcuuacaggaaca

SEQ ID NO: 2566135 - RNA, 19 nt, Homo sapiens
  misc_RNA (1)...(19): siRNA sense strand
ugaucagacagguggauaa

SEQ ID NO: 2566136 - RNA, 19 nt, Homo sapiens
  misc_RNA (1)...(19): siRNA sense strand
caacaagaugauaguggaa

SEQ ID NO: 2566137 - RNA, 19 nt, Homo sapiens
  misc_RNA (1)...(19): siRNA sense strand
agauagucgucaaggucaa

SEQ ID NO: 2566138 - RNA, 19 nt, Homo sapiens
  misc_RNA (1)...(19): siRNA sense strand
agaccauugcugagguaua

SEQ ID NO: 2566139 - RNA, 19 nt, Homo sapiens
  misc_RNA (1)...(19): siRNA sense strand
gugaagauuaugaugacaa

SEQ ID NO: 2566140 - RNA, 19 nt, Homo sapiens
  misc_RNA (1)...(19): siRNA sense strand
cgaugaagaauaucagaau

SEQ ID NO: 2566141 - RNA, 19 nt, Homo sapiens
  misc_RNA (1)...(19): siRNA sense strand
agguaaauugucagaguuu

SEQ ID NO: 2566142 - RNA, 19 nt, Homo sapiens
  misc_RNA (1)...(19): siRNA sense strand
ccuccagaaccucgagaaa

SEQ ID NO: 2566143 - RNA, 19 nt, Homo sapiens
  misc_RNA (1)...(19): siRNA sense strand
gaugauaccauguuggcaa

SEQ ID NO: 2566144 - RNA, 19 nt, Homo sapiens
  misc_RNA (1)...(19): siRNA sense strand
ccuggaagcauuagaugaa

SEQ ID NO: 2566145 - RNA, 19 nt, Homo sapiens
  misc_RNA (1)...(19): siRNA sense strand
uauaaugaacggagugcua

SEQ ID NO: 2566146 - RNA, 19 nt, Homo sapiens
  misc_RNA (1)...(19): siRNA sense strand
ucgucaaggucaauggcaa

SEQ ID NO: 2566147 - RNA, 19 nt, Homo sapiens
  misc_RNA (1)...(19): siRNA sense strand
cagaccgggaugaggauaa

SEQ ID NO: 2566148 - RNA, 19 nt, Homo sapiens
  misc_RNA (1)...(19): siRNA sense strand
cugacagggucgaugaaga

SEQ ID NO: 2566149 - RNA, 19 nt, Homo sapiens
  misc_RNA (1)...(19): siRNA sense strand
cgggaugaggauaaggcaa

SEQ ID NO: 2566150 - RNA, 19 nt, Homo sapiens
  misc_RNA (1)...(19): siRNA sense strand
gcaucauugcuguggaaaa

SEQ ID NO: 2566151 - RNA, 19 nt, Homo sapiens
  misc_RNA (1)...(19): siRNA sense strand
uuaccgagcuguauggcaa

SEQ ID NO: 2566152 - RNA, 19 nt, Homo sapiens
  misc_RNA (1)...(19): siRNA sense strand
cuucaaauauagucagagu

SEQ ID NO: 2566153 - RNA, 19 nt, Homo sapiens
  misc_RNA (1)...(19): siRNA sense strand
cagcaugcuugaugaagau

SEQ ID NO: 2566154 - RNA, 19 nt, Homo sapiens
  misc_RNA (1)...(19): siRNA sense strand
cuucaaaacucuaugacau

SEQ ID NO: 2566155 - RNA, 19 nt, Homo sapiens
  misc_RNA (1)...(19): siRNA sense strand
aggauagccuccaugcaaa

SEQ ID NO: 2566156 - RNA, 19 nt, Homo sapiens
  misc_RNA (1)...(19): siRNA sense strand
cugaaacagaagaaaucaa

SEQ ID NO: 2566157 - RNA, 19 nt, Homo sapiens
  misc_RNA (1)...(19): siRNA sense strand
gcugauagaugaagccagu

SEQ ID NO: 2566158 - RNA, 19 nt, Homo sapiens
  misc_RNA (1)...(19): siRNA sense strand
ugaccaaggccaaggaacu

SEQ ID NO: 2566159 - RNA, 19 nt, Homo sapiens
  misc_RNA (1)...(19): siRNA sense strand
gcaaaguacaacaccaaaa

SEQ ID NO: 2566160 - RNA, 19 nt, Homo sapiens
  misc_RNA (1)...(19): siRNA sense strand
cucuguucguguagaaaua

SEQ ID NO: 2566161 - RNA, 19 nt, Homo sapiens
  misc_RNA (1)...(19): siRNA sense strand
ggucaauggcaacgccgaa

SEQ ID NO: 2566162 - RNA, 19 nt, Homo sapiens
  misc_RNA (1)...(19): siRNA sense strand
ggccauuguucuggacaua

SEQ ID NO: 2566163 - RNA, 19 nt, Homo sapiens
  misc_RNA (1)...(19): siRNA sense strand
uagcugaaacagaagaaau

SEQ ID NO: 2566164 - RNA, 19 nt, Homo sapiens
  misc_RNA (1)...(19): siRNA sense strand
acucuaugacauucggaaa

SEQ ID NO: 2566165 - RNA, 19 nt, Homo sapiens
  misc_RNA (1)...(19): siRNA sense strand
gagauaaagcagguggaau

SEQ ID NO: 2566166 - RNA, 19 nt, Homo sapiens
  misc_RNA (1)...(19): siRNA sense strand
gaagcugaugagaggacua

SEQ ID NO: 2566167 - RNA, 19 nt, Homo sapiens
  misc_RNA (1)...(19): siRNA sense strand
augcaaaguacaacaccaa

SEQ ID NO: 2566168 - RNA, 19 nt, Homo sapiens
  misc_RNA (1)...(19): siRNA sense strand
acggagugcuacagugaga

SEQ ID NO: 2566169 - RNA, 19 nt, Homo sapiens
  misc_RNA (1)...(19): siRNA sense strand
guucaguuggaauggcaaa

SEQ ID NO: 2566170 - RNA, 19 nt, Homo sapiens
  misc_RNA (1)...(19): siRNA sense strand
uugaaaacauugaguguga

SEQ ID NO: 2566171 - RNA, 19 nt, Homo sapiens
  misc_RNA (1)...(19): siRNA sense strand
cuucaguggcaaugcagaa

SEQ ID NO: 2566172 - RNA, 19 nt, Homo sapiens
  misc_RNA (1)...(19): siRNA sense strand
ccagcuaugaucagaaaga

SEQ ID NO: 2566173 - RNA, 19 nt, Homo sapiens
  misc_RNA (1)...(19): siRNA sense strand
ggaagaaugcagaccggga

SEQ ID NO: 2566174 - RNA, 19 nt, Homo sapiens
  misc_RNA (1)...(19): siRNA sense strand
acauugaagcugcauauaa

SEQ ID NO: 2566175 - RNA, 19 nt, Homo sapiens
  misc_RNA (1)...(19): siRNA sense strand
gcuugaugaagauggaaca

SEQ ID NO: 2566176 - RNA, 19 nt, Homo sapiens
  misc_RNA (1)...(19): siRNA sense strand
acagcaugcuugaugaaga

SEQ ID NO: 2566177 - RNA, 19 nt, Homo sapiens
  misc_RNA (1)...(19): siRNA sense strand
acacaggaaauaaugguau

SEQ ID NO: 2566178 - RNA, 19 nt, Homo sapiens
  misc_RNA (1)...(19): siRNA sense strand
gaaucuggcaacuggauga

SEQ ID NO: 2566179 - RNA, 19 nt, Homo sapiens
  misc_RNA (1)...(19): siRNA sense strand
ugaugaaguugcucguuau

SEQ ID NO: 2566180 - RNA, 19 nt, Homo sapiens
  misc_RNA (1)...(19): siRNA sense strand
ccucaggacuccauaucau

SEQ ID NO: 2566181 - RNA, 19 nt, Homo sapiens
  misc_RNA (1)...(19): siRNA sense strand
aaugaaacucaguggacga

SEQ ID NO: 2566182 - RNA, 19 nt, Homo sapiens
  misc_RNA (1)...(19): siRNA sense strand
cuuaaggaagaaaguggaa

SEQ ID NO: 2566183 - RNA, 19 nt, Homo sapiens
  misc_RNA (1)...(19): siRNA sense strand
ccacgagauuggugcuguu

SEQ ID NO: 2566184 - RNA, 19 nt, Homo sapiens
  misc_RNA (1)...(19): siRNA sense strand
cauacagaaccuuguguuu

SEQ ID NO: 2566185 - RNA, 19 nt, Homo sapiens
  misc_RNA (1)...(19): siRNA sense strand
agacagaagaagagaaacu

SEQ ID NO: 2566186 - RNA, 19 nt, Homo sapiens
  misc_RNA (1)...(19): siRNA sense strand
cuggaaugucagagaccaa

SEQ ID NO: 2566187 - RNA, 19 nt, Homo sapiens
  misc_RNA (1)...(19): siRNA sense strand
uggaagaaacgaaagguca

SEQ ID NO: 2566188 - RNA, 19 nt, Homo sapiens
  misc_RNA (1)...(19): siRNA sense strand
ugucagagaccaagggagu

SEQ ID NO: 2566189 - RNA, 19 nt, Homo sapiens
  misc_RNA (1)...(19): siRNA sense strand
ccacguucuguaugggaaa

SEQ ID NO: 2566190 - RNA, 19 nt, Homo sapiens
  misc_RNA (1)...(19): siRNA sense strand
augcaaaggaauuggaaac

SEQ ID NO: 2566191 - RNA, 19 nt, Homo sapiens
  misc_RNA (1)...(19): siRNA sense strand
gugugaacgaccagaccaa

SEQ ID NO: 2566192 - RNA, 19 nt, Homo sapiens
  misc_RNA (1)...(19): siRNA sense strand
caacaaaacucgaaacauc

SEQ ID NO: 2566193 - RNA, 19 nt, Homo sapiens
  misc_RNA (1)...(19): siRNA sense strand
acaccaaaccagugcagau

SEQ ID NO: 2566194 - RNA, 19 nt, Homo sapiens
  misc_RNA (1)...(19): siRNA sense strand
gcuaaaggugacacugcaa

SEQ ID NO: 2566195 - RNA, 19 nt, Homo sapiens
  misc_RNA (1)...(19): siRNA sense strand
cugcaaaugaaauuggaca

SEQ ID NO: 2566196 - RNA, 19 nt, Homo sapiens
  misc_RNA (1)...(19): siRNA sense strand
acaaagugugcuuagaaau

SEQ ID NO: 2566197 - RNA, 19 nt, Homo sapiens
  misc_RNA (1)...(19): siRNA sense strand
acgaaaggucagaucaaca

SEQ ID NO: 2566198 - RNA, 19 nt, Homo sapiens
  misc_RNA (1)...(19): siRNA sense strand
uuguaagaucauagagcuu

SEQ ID NO: 2566199 - RNA, 19 nt, Homo sapiens
  misc_RNA (1)...(19): siRNA sense strand
aaaaggagccacugggcaa

SEQ ID NO: 2566200 - RNA, 19 nt, Homo sapiens
  misc_RNA (1)...(19): siRNA sense strand
aagauauacccuuuggauu

SEQ ID NO: 2566201 - RNA, 19 nt, Homo sapiens
  misc_RNA (1)...(19): siRNA sense strand
aggaugaauugaaugcuga

SEQ ID NO: 2566202 - RNA, 19 nt, Homo sapiens
  misc_RNA (1)...(19): siRNA sense strand
ggaagaaacgaaaggucag

SEQ ID NO: 2566203 - RNA, 19 nt, Homo sapiens
  misc_RNA (1)...(19): siRNA sense strand
cugucuaaauggaggaaca

SEQ ID NO: 2566204 - RNA, 19 nt, Homo sapiens
  misc_RNA (1)...(19): siRNA sense strand
agaugaaguuugaggugga

SEQ ID NO: 2566205 - RNA, 19 nt, Homo sapiens
  misc_RNA (1)...(19): siRNA sense strand
aaacauaauuacugcagga

SEQ ID NO: 2566206 - RNA, 19 nt, Homo sapiens
  misc_RNA (1)...(19): siRNA sense strand
gaucacuggcuuuggaaaa

SEQ ID NO: 2566207 - RNA, 19 nt, Homo sapiens
  misc_RNA (1)...(19): siRNA sense strand
ggaugugcccugaaggaca

SEQ ID NO: 2566208 - RNA, 19 nt, Homo sapiens
  misc_RNA (1)...(19): siRNA sense strand
agggcagcacugugaaaua

SEQ ID NO: 2566209 - RNA, 19 nt, Homo sapiens
  misc_RNA (1)...(19): siRNA sense strand
ugaaguuugagguggaaaa

SEQ ID NO: 2566210 - RNA, 19 nt, Homo sapiens
  misc_RNA (1)...(19): siRNA sense strand
cagcacugugaaauagaua

SEQ ID NO: 2566211 - RNA, 19 nt, Homo sapiens
  misc_RNA (1)...(19): siRNA sense strand
augacugcgcagauggaaa

SEQ ID NO: 2566212 - RNA, 19 nt, Homo sapiens
  misc_RNA (1)...(19): siRNA sense strand
cauaauuacugcaggaacc

SEQ ID NO: 2566213 - RNA, 19 nt, Homo sapiens
  misc_RNA (1)...(19): siRNA sense strand
cuccaaaggcagcaaugaa

SEQ ID NO: 2566214 - RNA, 19 nt, Homo sapiens
  misc_RNA (1)...(19): siRNA sense strand
aaagagaauucuaccgacu

SEQ ID NO: 2566215 - RNA, 19 nt, Homo sapiens
  misc_RNA (1)...(19): siRNA sense strand
ccaacuacgucgaggacau

SEQ ID NO: 2566216 - RNA, 19 nt, Homo sapiens
  misc_RNA (1)...(19): siRNA sense strand
gcggagaggcagaggacau

SEQ ID NO: 2566217 - RNA, 19 nt, Homo sapiens
  misc_RNA (1)...(19): siRNA sense strand
ggcaagaagaacugaacaa

SEQ ID NO: 2566218 - RNA, 19 nt, Homo sapiens
  misc_RNA (1)...(19): siRNA sense strand
gcagauaaguacaugcaga

SEQ ID NO: 2566219 - RNA, 19 nt, Homo sapiens
  misc_RNA (1)...(19): siRNA sense strand
cggaauaugagaagagcca

SEQ ID NO: 2566220 - RNA, 19 nt, Homo sapiens
  misc_RNA (1)...(19): siRNA sense strand
agauauauucuguggauca

SEQ ID NO: 2566221 - RNA, 19 nt, Homo sapiens
  misc_RNA (1)...(19): siRNA sense strand
acaagaaggacgaacacaa

SEQ ID NO: 2566222 - RNA, 19 nt, Homo sapiens
  misc_RNA (1)...(19): siRNA sense strand
gaauaugagaagagccaga

SEQ ID NO: 2566223 - RNA, 19 nt, Homo sapiens
  misc_RNA (1)...(19): siRNA sense strand
gagcuguacaugugggauu

SEQ ID NO: 2566224 - RNA, 19 nt, Homo sapiens
  misc_RNA (1)...(19): siRNA sense strand
uacaauacggaaagagaua

SEQ ID NO: 2566225 - RNA, 19 nt, Homo sapiens
  misc_RNA (1)...(19): siRNA sense strand
gauaauggccucagcccua

SEQ ID NO: 2566226 - RNA, 19 nt, Homo sapiens
  misc_RNA (1)...(19): siRNA sense strand
agaucaucaucaagcauaa

SEQ ID NO: 2566227 - RNA, 19 nt, Homo sapiens
  misc_RNA (1)...(19): siRNA sense strand
caggaauacugcauggaga

SEQ ID NO: 2566228 - RNA, 19 nt, Homo sapiens
  misc_RNA (1)...(19): siRNA sense strand
ugaaguacugggagaagaa

SEQ ID NO: 2566229 - RNA, 19 nt, Homo sapiens
  misc_RNA (1)...(19): siRNA sense strand
cugagaaagcagauauauu

SEQ ID NO: 2566230 - RNA, 19 nt, Homo sapiens
  misc_RNA (1)...(19): siRNA sense strand
ggaucaaaccagaagaaac

SEQ ID NO: 2566231 - RNA, 19 nt, Homo sapiens
  misc_RNA (1)...(19): siRNA sense strand
gcgucuacccaaagggaca

SEQ ID NO: 2566232 - RNA, 19 nt, Homo sapiens
  misc_RNA (1)...(19): siRNA sense strand
aaaugcaacaagagguuaa

SEQ ID NO: 2566233 - RNA, 19 nt, Homo sapiens
  misc_RNA (1)...(19): siRNA sense strand
gaagauauguucagcgauc

SEQ ID NO: 2566234 - RNA, 19 nt, Homo sapiens
  misc_RNA (1)...(19): siRNA sense strand
aggagaacaacaugaagua

SEQ ID NO: 2566235 - RNA, 19 nt, Homo sapiens
  misc_RNA (1)...(19): siRNA sense strand
ccuggagagcgaagaggaa

SEQ ID NO: 2566236 - RNA, 19 nt, Homo sapiens
  misc_RNA (1)...(19): siRNA sense strand
gcgugaaacugcugagccu

SEQ ID NO: 2566237 - RNA, 19 nt, Homo sapiens
  misc_RNA (1)...(19): siRNA sense strand
cgguggacaugcaggacau

SEQ ID NO: 2566238 - RNA, 19 nt, Homo sapiens
  misc_RNA (1)...(19): siRNA sense strand
aggacaugcugaugaggau

SEQ ID NO: 2566239 - RNA, 19 nt, Homo sapiens
  misc_RNA (1)...(19): siRNA sense strand
agacuauggaggaggaagu

SEQ ID NO: 2566240 - RNA, 19 nt, Homo sapiens
  misc_RNA (1)...(19): siRNA sense strand
gggcuaggggcaagguaaa

SEQ ID NO: 2566241 - RNA, 19 nt, Homo sapiens
  misc_RNA (1)...(19): siRNA sense strand
ggaaaggagacuauggaac

SEQ ID NO: 2566242 - RNA, 19 nt, Homo sapiens
  misc_RNA (1)...(19): siRNA sense strand
aggacaagaaggacgaaca

SEQ ID NO: 2566243 - RNA, 19 nt, Homo sapiens
  misc_RNA (1)...(19): siRNA sense strand
gggagaaaugguuccacaa

SEQ ID NO: 2566244 - RNA, 19 nt, Homo sapiens
  misc_RNA (1)...(19): siRNA sense strand
ccgagaaguugcugcagga

SEQ ID NO: 2566245 - RNA, 19 nt, Homo sapiens
  misc_RNA (1)...(19): siRNA sense strand
gagaaguugcugcaggaau

SEQ ID NO: 2566246 - RNA, 19 nt, Homo sapiens
  misc_RNA (1)...(19): siRNA sense strand
ccgugaaagcucuguauga

SEQ ID NO: 2566247 - RNA, 19 nt, Homo sapiens
  misc_RNA (1)...(19): siRNA sense strand
cugcaaaccaaccagcaaa

SEQ ID NO: 2566248 - RNA, 19 nt, Homo sapiens
  misc_RNA (1)...(19): siRNA sense strand
cuuugugguuuaugaagaa

SEQ ID NO: 2566249 - RNA, 19 nt, Homo sapiens
  misc_RNA (1)...(19): siRNA sense strand
agaaaugcaacaagagguu

SEQ ID NO: 2566250 - RNA, 19 nt, Homo sapiens
  misc_RNA (1)...(19): siRNA sense strand
gaaagaugagacugcgcua

SEQ ID NO: 2566251 - RNA, 19 nt, Homo sapiens
  misc_RNA (1)...(19): siRNA sense strand
cuccaaagauuucgagcga

SEQ ID NO: 2566252 - RNA, 19 nt, Homo sapiens
  misc_RNA (1)...(19): siRNA sense strand
gcguggagcaacagcguca

SEQ ID NO: 2566253 - RNA, 19 nt, Homo sapiens
  misc_RNA (1)...(19): siRNA sense strand
ggcugagaaagcagauaua

SEQ ID NO: 2566254 - RNA, 19 nt, Homo sapiens
  misc_RNA (1)...(19): siRNA sense strand
gaggaggcggcaagaagaa

SEQ ID NO: 2566255 - RNA, 19 nt, Homo sapiens
  misc_RNA (1)...(19): siRNA sense strand
ccaaagauuucgagcgagc

SEQ ID NO: 2566256 - RNA, 19 nt, Homo sapiens
  misc_RNA (1)...(19): siRNA sense strand
aguaugacgcgguggacau

SEQ ID NO: 2566257 - RNA, 19 nt, Homo sapiens
  misc_RNA (1)...(19): siRNA sense strand
gggagaagaaccaguccau

SEQ ID NO: 2566258 - RNA, 19 nt, Homo sapiens
  misc_RNA (1)...(19): siRNA sense strand
augagaagagccagaucaa

SEQ ID NO: 2566259 - RNA, 19 nt, Homo sapiens
  misc_RNA (1)...(19): siRNA sense strand
aggacgaacacaagcaaca

SEQ ID NO: 2566260 - RNA, 19 nt, Homo sapiens
  misc_RNA (1)...(19): siRNA sense strand
cugcagacuucgaggagcu

SEQ ID NO: 2566261 - RNA, 19 nt, Homo sapiens
  misc_RNA (1)...(19): siRNA sense strand
aacaugaaguacugggaga

SEQ ID NO: 2566262 - RNA, 19 nt, Homo sapiens
  misc_RNA (1)...(19): siRNA sense strand
ccagcaaaaccaaggacaa

SEQ ID NO: 2566263 - RNA, 19 nt, Homo sapiens
  misc_RNA (1)...(19): siRNA sense strand
ucuuggauaucauggaaau

SEQ ID NO: 2566264 - RNA, 19 nt, Homo sapiens
  misc_RNA (1)...(19): siRNA sense strand
cuuucuuguuuguggauga

SEQ ID NO: 2566265 - RNA, 19 nt, Homo sapiens
  misc_RNA (1)...(19): siRNA sense strand
ucaacauggaggacaagaa

SEQ ID NO: 2566266 - RNA, 19 nt, Homo sapiens
  misc_RNA (1)...(19): siRNA sense strand
gccaucaccuucagggcua

SEQ ID NO: 2566267 - RNA, 19 nt, Homo sapiens
  misc_RNA (1)...(19): siRNA sense strand
cagauaaguacaugcagau

SEQ ID NO: 2566268 - RNA, 19 nt, Homo sapiens
  misc_RNA (1)...(19): siRNA sense strand
aggaagugccccaggauau

SEQ ID NO: 2566269 - RNA, 19 nt, Homo sapiens
  misc_RNA (1)...(19): siRNA sense strand
agauugacagcaaggagaa

SEQ ID NO: 2566270 - RNA, 19 nt, Homo sapiens
  misc_RNA (1)...(19): siRNA sense strand
gagcgcuacaauacggaaa

SEQ ID NO: 2566271 - RNA, 19 nt, Homo sapiens
  misc_RNA (1)...(19): siRNA sense strand
uuucagagcauccgagaga

SEQ ID NO: 2566272 - RNA, 19 nt, Homo sapiens
  misc_RNA (1)...(19): siRNA sense strand
gaggcgauguggaugucaa

SEQ ID NO: 2566273 - RNA, 19 nt, Homo sapiens
  misc_RNA (1)...(19): siRNA sense strand
ccuauaacgucgugaaagc

SEQ ID NO: 2566274 - RNA, 19 nt, Homo sapiens
  misc_RNA (1)...(19): siRNA sense strand
cagacaggguggaggagcu

SEQ ID NO: 2566275 - RNA, 19 nt, Homo sapiens
  misc_RNA (1)...(19): siRNA sense strand
ccauuaaagcagucaaauc

SEQ ID NO: 2566276 - RNA, 19 nt, Homo sapiens
  misc_RNA (1)...(19): siRNA sense strand
acacaagaaaagagagaaa

SEQ ID NO: 2566277 - RNA, 19 nt, Homo sapiens
  misc_RNA (1)...(19): siRNA sense strand
ucaugaacgaagaggaaaa

SEQ ID NO: 2566278 - RNA, 19 nt, Homo sapiens
  misc_RNA (1)...(19): siRNA sense strand
uuucaugaacgaagaggaa

SEQ ID NO: 2566279 - RNA, 19 nt, Homo sapiens
  misc_RNA (1)...(19): siRNA sense strand
caacacaagaaaagagaga

SEQ ID NO: 2566280 - RNA, 19 nt, Homo sapiens
  misc_RNA (1)...(19): siRNA sense strand
ugaagaaaacucagcuaaa

SEQ ID NO: 2566281 - RNA, 19 nt, Homo sapiens
  misc_RNA (1)...(19): siRNA sense strand
agaaauuggggaugaagaa

SEQ ID NO: 2566282 - RNA, 19 nt, Homo sapiens
  misc_RNA (1)...(19): siRNA sense strand
aggaagacacugcagaaaa

SEQ ID NO: 2566283 - RNA, 19 nt, Homo sapiens
  misc_RNA (1)...(19): siRNA sense strand
cuaccgacccuguuggcaa

SEQ ID NO: 2566284 - RNA, 19 nt, Homo sapiens
  misc_RNA (1)...(19): siRNA sense strand
aaauuggggaugaagaaaa

SEQ ID NO: 2566285 - RNA, 19 nt, Homo sapiens
  misc_RNA (1)...(19): siRNA sense strand
ccugcauugcugagaacaa

SEQ ID NO: 2566286 - RNA, 19 nt, Homo sapiens
  misc_RNA (1)...(19): siRNA sense strand
ggcagagacaagagaggca

SEQ ID NO: 2566287 - RNA, 19 nt, Homo sapiens
  misc_RNA (1)...(19): siRNA sense strand
ggauccaagagcugacuau

SEQ ID NO: 2566288 - RNA, 19 nt, Homo sapiens
  misc_RNA (1)...(19): siRNA sense strand
ccugcauugcugagaacaa

SEQ ID NO: 2566289 - RNA, 19 nt, Homo sapiens
  misc_RNA (1)...(19): siRNA sense strand
ggcagagacaagagaggca

SEQ ID NO: 2566290 - RNA, 19 nt, Homo sapiens
  misc_RNA (1)...(19): siRNA sense strand
ggauccaagagcugacuau

SEQ ID NO: 2566291 - RNA, 19 nt, Homo sapiens
  misc_RNA (1)...(19): siRNA sense strand
ccugcauugcugagaacaa

SEQ ID NO: 2566292 - RNA, 19 nt, Homo sapiens
  misc_RNA (1)...(19): siRNA sense strand
ggcagagacaagagaggca

SEQ ID NO: 2566293 - RNA, 19 nt, Homo sapiens
  misc_RNA (1)...(19): siRNA sense strand
ggauccaagagcugacuau

SEQ ID NO: 2566294 - RNA, 19 nt, Homo sapiens
  misc_RNA (1)...(19): siRNA sense strand
ccugcauugcugagaacaa

SEQ ID NO: 2566295 - RNA, 19 nt, Homo sapiens
  misc_RNA (1)...(19): siRNA sense strand
ggcagagacaagagaggca

SEQ ID NO: 2566296 - RNA, 19 nt, Homo sapiens
  misc_RNA (1)...(19): siRNA sense strand
ggauccaagagcugacuau

SEQ ID NO: 2566297 - RNA, 19 nt, Homo sapiens
  misc_RNA (1)...(19): siRNA sense strand
ccugcauugcugagaacaa

SEQ ID NO: 2566298 - RNA, 19 nt, Homo sapiens
  misc_RNA (1)...(19): siRNA sense strand
ggcagagacaagagaggca

SEQ ID NO: 2566299 - RNA, 19 nt, Homo sapiens
  misc_RNA (1)...(19): siRNA sense strand
ggauccaagagcugacuau

SEQ ID NO: 2566300 - RNA, 19 nt, Homo sapiens
  misc_RNA (1)...(19): siRNA sense strand
agacaaaguucaugggugu

SEQ ID NO: 2566301 - RNA, 19 nt, Homo sapiens
  misc_RNA (1)...(19): siRNA sense strand
ggaaauaccgggaacccaa

SEQ ID NO: 2566302 - RNA, 19 nt, Homo sapiens
  misc_RNA (1)...(19): siRNA sense strand
cccaaggaccggagcgaau

SEQ ID NO: 2566303 - RNA, 19 nt, Homo sapiens
  misc_RNA (1)...(19): siRNA sense strand
cagaagaggugcagagucc

SEQ ID NO: 2566304 - RNA, 19 nt, Homo sapiens
  misc_RNA (1)...(19): siRNA sense strand
gaagauaaauugaaccauc

SEQ ID NO: 2566305 - RNA, 19 nt, Homo sapiens
  misc_RNA (1)...(19): siRNA sense strand
gagaagaacgugagccaag

SEQ ID NO: 2566306 - RNA, 19 nt, Homo sapiens
  misc_RNA (1)...(19): siRNA sense strand
cugccaguggauagugaaa

SEQ ID NO: 2566307 - RNA, 19 nt, Homo sapiens
  misc_RNA (1)...(19): siRNA sense strand
aguuuguagaugaaggaau

SEQ ID NO: 2566308 - RNA, 19 nt, Homo sapiens
  misc_RNA (1)...(19): siRNA sense strand
aauaagaauaugagggcuc

SEQ ID NO: 2566309 - RNA, 19 nt, Homo sapiens
  misc_RNA (1)...(19): siRNA sense strand
uugagaagaacgugagcca

SEQ ID NO: 2566310 - RNA, 19 nt, Homo sapiens
  misc_RNA (1)...(19): siRNA sense strand
agaauugauaucagguuga

SEQ ID NO: 2566311 - RNA, 19 nt, Homo sapiens
  misc_RNA (1)...(19): siRNA sense strand
ucacuggaguugcaggaga

SEQ ID NO: 2566312 - RNA, 19 nt, Homo sapiens
  misc_RNA (1)...(19): siRNA sense strand
uggaggagauggaggcaga

SEQ ID NO: 2566313 - RNA, 19 nt, Homo sapiens
  misc_RNA (1)...(19): siRNA sense strand
gagaauggcuacagcacca

SEQ ID NO: 2566314 - RNA, 19 nt, Homo sapiens
  misc_RNA (1)...(19): siRNA sense strand
ggaaauacgcccugaggcu

SEQ ID NO: 2566315 - RNA, 19 nt, Homo sapiens
  misc_RNA (1)...(19): siRNA sense strand
ccaaggugguguaugguga

SEQ ID NO: 2566316 - RNA, 19 nt, Homo sapiens
  misc_RNA (1)...(19): siRNA sense strand
aggcugaaggagaaggcua

SEQ ID NO: 2566317 - RNA, 19 nt, Homo sapiens
  misc_RNA (1)...(19): siRNA sense strand
guggagauggcgaggguca

SEQ ID NO: 2566318 - RNA, 19 nt, Homo sapiens
  misc_RNA (1)...(19): siRNA sense strand
gcuacgagaaggaggagga

SEQ ID NO: 2566319 - RNA, 19 nt, Homo sapiens
  misc_RNA (1)...(19): siRNA sense strand
acacaguggagaauggcua

SEQ ID NO: 2566320 - RNA, 19 nt, Homo sapiens
  misc_RNA (1)...(19): siRNA sense strand
gagagagcauguuugggua

SEQ ID NO: 2566321 - RNA, 19 nt, Homo sapiens
  misc_RNA (1)...(19): siRNA sense strand
gcccugaggcugaaggaga

SEQ ID NO: 2566322 - RNA, 19 nt, Homo sapiens
  misc_RNA (1)...(19): siRNA sense strand
uggcacugauggaggagau

SEQ ID NO: 2566323 - RNA, 19 nt, Homo sapiens
  misc_RNA (1)...(19): siRNA sense strand
uggugaacgccguggagau

SEQ ID NO: 2566324 - RNA, 19 nt, Homo sapiens
  misc_RNA (1)...(19): siRNA sense strand
aguacuaccuggagcagca

SEQ ID NO: 2566325 - RNA, 19 nt, Homo sapiens
  misc_RNA (1)...(19): siRNA sense strand
acgagaaggaggaggaccu

SEQ ID NO: 2566326 - RNA, 19 nt, Homo sapiens
  misc_RNA (1)...(19): siRNA sense strand
caucccaauucgaggagga

SEQ ID NO: 2566327 - RNA, 19 nt, Homo sapiens
  misc_RNA (1)...(19): siRNA sense strand
agaaggaggacgugcagca

SEQ ID NO: 2566328 - RNA, 19 nt, Homo sapiens
  misc_RNA (1)...(19): siRNA sense strand
gcacagaaacugggccuga

SEQ ID NO: 2566329 - RNA, 19 nt, Homo sapiens
  misc_RNA (1)...(19): siRNA sense strand
ggcucauggugcuggugaa

SEQ ID NO: 2566330 - RNA, 19 nt, Homo sapiens
  misc_RNA (1)...(19): siRNA sense strand
acgucagaugaucgagaaa

SEQ ID NO: 2566331 - RNA, 19 nt, Homo sapiens
  misc_RNA (1)...(19): siRNA sense strand
uggccgagaggaugaggaa

SEQ ID NO: 2566332 - RNA, 19 nt, Homo sapiens
  misc_RNA (1)...(19): siRNA sense strand
cggacugggugucagguca

SEQ ID NO: 2566333 - RNA, 19 nt, Homo sapiens
  misc_RNA (1)...(19): siRNA sense strand
cccucaagguacaaacauu

SEQ ID NO: 2566334 - RNA, 19 nt, Homo sapiens
  misc_RNA (1)...(19): siRNA sense strand
gcaaaggcaucuucccuga

SEQ ID NO: 2566335 - RNA, 19 nt, Homo sapiens
  misc_RNA (1)...(19): siRNA sense strand
gggcagaagaggagaggag

SEQ ID NO: 2566336 - RNA, 19 nt, Homo sapiens
  misc_RNA (1)...(19): siRNA sense strand
gcagaagaggagaggagga

SEQ ID NO: 2566337 - RNA, 19 nt, Homo sapiens
  misc_RNA (1)...(19): siRNA sense strand
uagcagcagaagagaagaa

SEQ ID NO: 2566338 - RNA, 19 nt, Homo sapiens
  misc_RNA (1)...(19): siRNA sense strand
aggaugaacugaaacggau

SEQ ID NO: 2566339 - RNA, 19 nt, Homo sapiens
  misc_RNA (1)...(19): siRNA sense strand
gagaagaagaagcaggaug

SEQ ID NO: 2566340 - RNA, 19 nt, Homo sapiens
  misc_RNA (1)...(19): siRNA sense strand
cagaagaggagaggaggau

SEQ ID NO: 2566341 - RNA, 19 nt, Homo sapiens
  misc_RNA (1)...(19): siRNA sense strand
ggagaggaggauagcagca

SEQ ID NO: 2566342 - RNA, 19 nt, Homo sapiens
  misc_RNA (1)...(19): siRNA sense strand
gcagcagaagagaagaaga

SEQ ID NO: 2566343 - RNA, 19 nt, Homo sapiens
  misc_RNA (1)...(19): siRNA sense strand
ggacuaaacccaagccuga

SEQ ID NO: 2566344 - RNA, 19 nt, Homo sapiens
  misc_RNA (1)...(19): siRNA sense strand
gcuuuaagaacaugugcaa

SEQ ID NO: 2566345 - RNA, 19 nt, Homo sapiens
  misc_RNA (1)...(19): siRNA sense strand
gcaaaaucuucuaacgcaa

SEQ ID NO: 2566346 - RNA, 19 nt, Homo sapiens
  misc_RNA (1)...(19): siRNA sense strand
agucaacaccaaagcgaau

SEQ ID NO: 2566347 - RNA, 19 nt, Homo sapiens
  misc_RNA (1)...(19): siRNA sense strand
uggggaaacuauauggaaa

SEQ ID NO: 2566348 - RNA, 19 nt, Homo sapiens
  misc_RNA (1)...(19): siRNA sense strand
ggggaaacuauauggaaau

SEQ ID NO: 2566349 - RNA, 19 nt, Homo sapiens
  misc_RNA (1)...(19): siRNA sense strand
gcuagcuggaggacagaua

SEQ ID NO: 2566350 - RNA, 19 nt, Homo sapiens
  misc_RNA (1)...(19): siRNA sense strand
cuccaggaauugagggcuu

SEQ ID NO: 2566351 - RNA, 19 nt, Homo sapiens
  misc_RNA (1)...(19): siRNA sense strand
ggcuaaaugaugcagagaa

SEQ ID NO: 2566352 - RNA, 19 nt, Homo sapiens
  misc_RNA (1)...(19): siRNA sense strand
aggcacaggcacaggcaca

SEQ ID NO: 2566353 - RNA, 19 nt, Homo sapiens
  misc_RNA (1)...(19): siRNA sense strand
uggccuuagagaagaguuu

SEQ ID NO: 2566354 - RNA, 19 nt, Homo sapiens
  misc_RNA (1)...(19): siRNA sense strand
uuuaagaacaugugcaagu

SEQ ID NO: 2566355 - RNA, 19 nt, Homo sapiens
  misc_RNA (1)...(19): siRNA sense strand
cgcacaggaucuucaacaa

SEQ ID NO: 2566356 - RNA, 19 nt, Homo sapiens
  misc_RNA (1)...(19): siRNA sense strand
ccagugaccuugaggagcu

SEQ ID NO: 2566357 - RNA, 19 nt, Homo sapiens
  misc_RNA (1)...(19): siRNA sense strand
uggaaaugacuucagccaa

SEQ ID NO: 2566358 - RNA, 19 nt, Homo sapiens
  misc_RNA (1)...(19): siRNA sense strand
ggagauggcaacacaggca

SEQ ID NO: 2566359 - RNA, 19 nt, Homo sapiens
  misc_RNA (1)...(19): siRNA sense strand
guacaaagaucaaggcuga

SEQ ID NO: 2566360 - RNA, 19 nt, Homo sapiens
  misc_RNA (1)...(19): siRNA sense strand
ugggcaagcucuacggcaa

SEQ ID NO: 2566361 - RNA, 19 nt, Homo sapiens
  misc_RNA (1)...(19): siRNA sense strand
gcuucaagaacaugugcaa

SEQ ID NO: 2566362 - RNA, 19 nt, Homo sapiens
  misc_RNA (1)...(19): siRNA sense strand
cgaaagaaauggaccagac

SEQ ID NO: 2566363 - RNA, 19 nt, Homo sapiens
  misc_RNA (1)...(19): siRNA sense strand
aagaaauggaccagacacu

SEQ ID NO: 2566364 - RNA, 19 nt, Homo sapiens
  misc_RNA (1)...(19): siRNA sense strand
ccaucagagcacacagaca

SEQ ID NO: 2566365 - RNA, 19 nt, Homo sapiens
  misc_RNA (1)...(19): siRNA sense strand
ucgccuuagagaagaguuu

SEQ ID NO: 2566366 - RNA, 19 nt, Homo sapiens
  misc_RNA (1)...(19): siRNA sense strand
agacgcaagaagaggacca

SEQ ID NO: 2566367 - RNA, 19 nt, Homo sapiens
  misc_RNA (1)...(19): siRNA sense strand
cuagcgaaccagaagccua

SEQ ID NO: 2566368 - RNA, 19 nt, Homo sapiens
  misc_RNA (1)...(19): siRNA sense strand
cggagaauuaugagaccua

SEQ ID NO: 2566369 - RNA, 19 nt, Homo sapiens
  misc_RNA (1)...(19): siRNA sense strand
uggagauauucauggacaa

SEQ ID NO: 2566370 - RNA, 19 nt, Homo sapiens
  misc_RNA (1)...(19): siRNA sense strand
gcugaaaauuuguggagau

SEQ ID NO: 2566371 - RNA, 19 nt, Homo sapiens
  misc_RNA (1)...(19): siRNA sense strand
cugaaaauuuguggagaua

SEQ ID NO: 2566372 - RNA, 19 nt, Homo sapiens
  misc_RNA (1)...(19): siRNA sense strand
gauuauguggacagaggaa

SEQ ID NO: 2566373 - RNA, 19 nt, Homo sapiens
  misc_RNA (1)...(19): siRNA sense strand
aggugguggaagauggaua

SEQ ID NO: 2566374 - RNA, 19 nt, Homo sapiens
  misc_RNA (1)...(19): siRNA sense strand
ccauuguggaugagaagau

SEQ ID NO: 2566375 - RNA, 19 nt, Homo sapiens
  misc_RNA (1)...(19): siRNA sense strand
gcuaauccgccgaagaaaa

SEQ ID NO: 2566376 - RNA, 19 nt, Homo sapiens
  misc_RNA (1)...(19): siRNA sense strand
agaaaaugaucgugguguu

SEQ ID NO: 2566377 - RNA, 19 nt, Homo sapiens
  misc_RNA (1)...(19): siRNA sense strand
guaaauuucugaaucguca

SEQ ID NO: 2566378 - RNA, 19 nt, Homo sapiens
  misc_RNA (1)...(19): siRNA sense strand
guggagauauucauggaca

SEQ ID NO: 2566379 - RNA, 19 nt, Homo sapiens
  misc_RNA (1)...(19): siRNA sense strand
ccaaauuacuguggcgagu

SEQ ID NO: 2566380 - RNA, 19 nt, Homo sapiens
  misc_RNA (1)...(19): siRNA sense strand
ggagauauucauggacaau

SEQ ID NO: 2566381 - RNA, 19 nt, Homo sapiens
  misc_RNA (1)...(19): siRNA sense strand
ugaugaaugcaaacgaaga

SEQ ID NO: 2566382 - RNA, 19 nt, Homo sapiens
  misc_RNA (1)...(19): siRNA sense strand
gcaaagaggcaguugguca

SEQ ID NO: 2566383 - RNA, 19 nt, Homo sapiens
  misc_RNA (1)...(19): siRNA sense strand
ggguaugaucacaaagcaa

SEQ ID NO: 2566384 - RNA, 19 nt, Homo sapiens
  misc_RNA (1)...(19): siRNA sense strand
ggaaagcagucauuggaga

SEQ ID NO: 2566385 - RNA, 19 nt, Homo sapiens
  misc_RNA (1)...(19): siRNA sense strand
ucuuauauguagagcccau

SEQ ID NO: 2566386 - RNA, 19 nt, Homo sapiens
  misc_RNA (1)...(19): siRNA sense strand
ccaugaugaguguggauga

SEQ ID NO: 2566387 - RNA, 19 nt, Homo sapiens
  misc_RNA (1)...(19): siRNA sense strand
cggcgaauuaugcgaccaa

SEQ ID NO: 2566388 - RNA, 19 nt, Homo sapiens
  misc_RNA (1)...(19): siRNA sense strand
gaaugaaaucagaggacug

SEQ ID NO: 2566389 - RNA, 19 nt, Homo sapiens
  misc_RNA (1)...(19): siRNA sense strand
ccuacuagaacuugaagca

SEQ ID NO: 2566390 - RNA, 19 nt, Homo sapiens
  misc_RNA (1)...(19): siRNA sense strand
aggugguugaagauggaua

SEQ ID NO: 2566391 - RNA, 19 nt, Homo sapiens
  misc_RNA (1)...(19): siRNA sense strand
acuagaacuugaagcacca

SEQ ID NO: 2566392 - RNA, 19 nt, Homo sapiens
  misc_RNA (1)...(19): siRNA sense strand
gagaaugaaaucagaggac

SEQ ID NO: 2566393 - RNA, 19 nt, Homo sapiens
  misc_RNA (1)...(19): siRNA sense strand
aggccuagguaugggaaaa

SEQ ID NO: 2566394 - RNA, 19 nt, Homo sapiens
  misc_RNA (1)...(19): siRNA sense strand
ggaaaagacacaaagagga

SEQ ID NO: 2566395 - RNA, 19 nt, Homo sapiens
  misc_RNA (1)...(19): siRNA sense strand
ggaacaacaucguggggaa

SEQ ID NO: 2566396 - RNA, 19 nt, Homo sapiens
  misc_RNA (1)...(19): siRNA sense strand
ggggaaagauauaaagaca

SEQ ID NO: 2566397 - RNA, 19 nt, Homo sapiens
  misc_RNA (1)...(19): siRNA sense strand
uggcuaugguggagagcuu

SEQ ID NO: 2566398 - RNA, 19 nt, Homo sapiens
  misc_RNA (1)...(19): siRNA sense strand
ggaauaaaguggcgcucca

SEQ ID NO: 2566399 - RNA, 19 nt, Homo sapiens
  misc_RNA (1)...(19): siRNA sense strand
gggaaagauauaaagacau

SEQ ID NO: 2566400 - RNA, 19 nt, Homo sapiens
  misc_RNA (1)...(19): siRNA sense strand
guacagugaauaaaggaau

SEQ ID NO: 2566401 - RNA, 19 nt, Homo sapiens
  misc_RNA (1)...(19): siRNA sense strand
acgcagugggauuaggaaa

SEQ ID NO: 2566402 - RNA, 19 nt, Homo sapiens
  misc_RNA (1)...(19): siRNA sense strand
ccuuauaaguugcugcaga

SEQ ID NO: 2566403 - RNA, 19 nt, Homo sapiens
  misc_RNA (1)...(19): siRNA sense strand
gugcaauuucauagaccua

SEQ ID NO: 2566404 - RNA, 19 nt, Homo sapiens
  misc_RNA (1)...(19): siRNA sense strand
uuggauacgcagugggauu

SEQ ID NO: 2566405 - RNA, 19 nt, Homo sapiens
  misc_RNA (1)...(19): siRNA sense strand
acuuaaggaagcugaggua

SEQ ID NO: 2566406 - RNA, 19 nt, Homo sapiens
  misc_RNA (1)...(19): siRNA sense strand
cagcacuauuuaaaggaau

SEQ ID NO: 2566407 - RNA, 19 nt, Homo sapiens
  misc_RNA (1)...(19): siRNA sense strand
uggugaaaaugaugagaau

SEQ ID NO: 2566408 - RNA, 19 nt, Homo sapiens
  misc_RNA (1)...(19): siRNA sense strand
guuucaaggugugggaauu

SEQ ID NO: 2566409 - RNA, 19 nt, Homo sapiens
  misc_RNA (1)...(19): siRNA sense strand
caguuugcuucgauugaaa

SEQ ID NO: 2566410 - RNA, 19 nt, Homo sapiens
  misc_RNA (1)...(19): siRNA sense strand
gcagcuucccagugaacaa

SEQ ID NO: 2566411 - RNA, 19 nt, Homo sapiens
  misc_RNA (1)...(19): siRNA sense strand
cggcuucaucagagaauuu

SEQ ID NO: 2566412 - RNA, 19 nt, Homo sapiens
  misc_RNA (1)...(19): siRNA sense strand
uaaugugaguacagugaau

SEQ ID NO: 2566413 - RNA, 19 nt, Homo sapiens
  misc_RNA (1)...(19): siRNA sense strand
augaaugagacuggaguaa

SEQ ID NO: 2566414 - RNA, 19 nt, Homo sapiens
  misc_RNA (1)...(19): siRNA sense strand
gaaucaaaucgucuggcaa

SEQ ID NO: 2566415 - RNA, 19 nt, Homo sapiens
  misc_RNA (1)...(19): siRNA sense strand
cgucuggcaaggugguaua

SEQ ID NO: 2566416 - RNA, 19 nt, Homo sapiens
  misc_RNA (1)...(19): siRNA sense strand
cgcagugggauuaggaaau

SEQ ID NO: 2566417 - RNA, 19 nt, Homo sapiens
  misc_RNA (1)...(19): siRNA sense strand
aagacaugguagauccuaa

SEQ ID NO: 2566418 - RNA, 19 nt, Homo sapiens
  misc_RNA (1)...(19): siRNA sense strand
cgugguaacugguccaaaa

SEQ ID NO: 2566419 - RNA, 19 nt, Homo sapiens
  misc_RNA (1)...(19): siRNA sense strand
aagugaacuaccauggaaa

SEQ ID NO: 2566420 - RNA, 19 nt, Homo sapiens
  misc_RNA (1)...(19): siRNA sense strand
uguucuucguggucagaua

SEQ ID NO: 2566421 - RNA, 19 nt, Homo sapiens
  misc_RNA (1)...(19): siRNA sense strand
ggaagcugagguauggaaa

SEQ ID NO: 2566422 - RNA, 19 nt, Homo sapiens
  misc_RNA (1)...(19): siRNA sense strand
aaggaauacaagagaucau

SEQ ID NO: 2566423 - RNA, 19 nt, Homo sapiens
  misc_RNA (1)...(19): siRNA sense strand
augugaguacagugaauaa

SEQ ID NO: 2566424 - RNA, 19 nt, Homo sapiens
  misc_RNA (1)...(19): siRNA sense strand
auacaagagaucauccaaa

SEQ ID NO: 2566425 - RNA, 19 nt, Homo sapiens
  misc_RNA (1)...(19): siRNA sense strand
agacaugguagauccuaaa

SEQ ID NO: 2566426 - RNA, 19 nt, Homo sapiens
  misc_RNA (1)...(19): siRNA sense strand
gugcagggagaaggagaaa

SEQ ID NO: 2566427 - RNA, 19 nt, Homo sapiens
  misc_RNA (1)...(19): siRNA sense strand
agaccuaauuauggcgcaa

SEQ ID NO: 2566428 - RNA, 19 nt, Homo sapiens
  misc_RNA (1)...(19): siRNA sense strand
uucccaaagugaugaagaa

SEQ ID NO: 2566429 - RNA, 19 nt, Homo sapiens
  misc_RNA (1)...(19): siRNA sense strand
cagugaaauuuaucagcca

SEQ ID NO: 2566430 - RNA, 19 nt, Homo sapiens
  misc_RNA (1)...(19): siRNA sense strand
cccaaagugaugaagaaaa

SEQ ID NO: 2566431 - RNA, 19 nt, Homo sapiens
  misc_RNA (1)...(19): siRNA sense strand
ggaacagauucauugagga

SEQ ID NO: 2566432 - RNA, 19 nt, Homo sapiens
  misc_RNA (1)...(19): siRNA sense strand
agaaaugaugauuggagca

SEQ ID NO: 2566433 - RNA, 19 nt, Homo sapiens
  misc_RNA (1)...(19): siRNA sense strand
auugaaacgaucacaacaa

SEQ ID NO: 2566434 - RNA, 19 nt, Homo sapiens
  misc_RNA (1)...(19): siRNA sense strand
acagauucauugaggauac

SEQ ID NO: 2566435 - RNA, 19 nt, Homo sapiens
  misc_RNA (1)...(19): siRNA sense strand
gaacaacaucguggggaaa

SEQ ID NO: 2566436 - RNA, 19 nt, Homo sapiens
  misc_RNA (1)...(19): siRNA sense strand
uguuucaaggugugggaau

SEQ ID NO: 2566437 - RNA, 19 nt, Homo sapiens
  misc_RNA (1)...(19): siRNA sense strand
cagugaacaauauuggaau

SEQ ID NO: 2566438 - RNA, 19 nt, Homo sapiens
  misc_RNA (1)...(19): siRNA sense strand
cuggauuuauggagggaac

SEQ ID NO: 2566439 - RNA, 19 nt, Homo sapiens
  misc_RNA (1)...(19): siRNA sense strand
agugcagggagaaggagaa

SEQ ID NO: 2566440 - RNA, 19 nt, Homo sapiens
  misc_RNA (1)...(19): siRNA sense strand
aaagcuggguagacaucaa

SEQ ID NO: 2566441 - RNA, 19 nt, Homo sapiens
  misc_RNA (1)...(19): siRNA sense strand
aaugaaugagacuggagua

SEQ ID NO: 2566442 - RNA, 19 nt, Homo sapiens
  misc_RNA (1)...(19): siRNA sense strand
agggagaaggagaaagugu

SEQ ID NO: 2566443 - RNA, 19 nt, Homo sapiens
  misc_RNA (1)...(19): siRNA sense strand
agguggauauucuggcuau

SEQ ID NO: 2566444 - RNA, 19 nt, Homo sapiens
  misc_RNA (1)...(19): siRNA sense strand
auggauuagaagaggauuu

SEQ ID NO: 2566445 - RNA, 19 nt, Homo sapiens
  misc_RNA (1)...(19): siRNA sense strand
acucaaaugcagucggcuu

SEQ ID NO: 2566446 - RNA, 19 nt, Homo sapiens
  misc_RNA (1)...(19): siRNA sense strand
ccucagacagccaggacuu

SEQ ID NO: 2566447 - RNA, 19 nt, Homo sapiens
  misc_RNA (1)...(19): siRNA sense strand
cugcaaacugccuugaaga

SEQ ID NO: 2566448 - RNA, 19 nt, Homo sapiens
  misc_RNA (1)...(19): siRNA sense strand
acuucaauccgguggagaa

SEQ ID NO: 2566449 - RNA, 19 nt, Homo sapiens
  misc_RNA (1)...(19): siRNA sense strand
cccagaaucuuuauggcua

SEQ ID NO: 2566450 - RNA, 19 nt, Homo sapiens
  misc_RNA (1)...(19): siRNA sense strand
ggguaaacaaucagagccu

SEQ ID NO: 2566451 - RNA, 19 nt, Homo sapiens
  misc_RNA (1)...(19): siRNA sense strand
acccuaugaaugugaaaua

SEQ ID NO: 2566452 - RNA, 19 nt, Homo sapiens
  misc_RNA (1)...(19): siRNA sense strand
cgguggagaacaaagauau

SEQ ID NO: 2566453 - RNA, 19 nt, Homo sapiens
  misc_RNA (1)...(19): siRNA sense strand
cugggauggcucugauaua

SEQ ID NO: 2566454 - RNA, 19 nt, Homo sapiens
  misc_RNA (1)...(19): siRNA sense strand
ccgguggagaacaaagaua

SEQ ID NO: 2566455 - RNA, 19 nt, Homo sapiens
  misc_RNA (1)...(19): siRNA sense strand
gaaugaagaaguaaccaga

SEQ ID NO: 2566456 - RNA, 19 nt, Homo sapiens
  misc_RNA (1)...(19): siRNA sense strand
cgccacaaagaaugacaua

SEQ ID NO: 2566457 - RNA, 19 nt, Homo sapiens
  misc_RNA (1)...(19): siRNA sense strand
ccgcuaugagucaguacaa

SEQ ID NO: 2566458 - RNA, 19 nt, Homo sapiens
  misc_RNA (1)...(19): siRNA sense strand
ccuaugaaugugaaauaca

SEQ ID NO: 2566459 - RNA, 19 nt, Homo sapiens
  misc_RNA (1)...(19): siRNA sense strand
ccauaaugagucccagaau

SEQ ID NO: 2566460 - RNA, 19 nt, Homo sapiens
  misc_RNA (1)...(19): siRNA sense strand
ucaaugucgcagaagggaa

SEQ ID NO: 2566461 - RNA, 19 nt, Homo sapiens
  misc_RNA (1)...(19): siRNA sense strand
ggacccuaugaaugugaaa

SEQ ID NO: 2566462 - RNA, 19 nt, Homo sapiens
  misc_RNA (1)...(19): siRNA sense strand
cugcagaagaagagaacuu

SEQ ID NO: 2566463 - RNA, 19 nt, Homo sapiens
  misc_RNA (1)...(19): siRNA sense strand
uugcauuauuguugggcua

SEQ ID NO: 2566464 - RNA, 19 nt, Homo sapiens
  misc_RNA (1)...(19): siRNA sense strand
cuucaggauccgugaggaa

SEQ ID NO: 2566465 - RNA, 19 nt, Homo sapiens
  misc_RNA (1)...(19): siRNA sense strand
cugaaauccucuuggcuca

SEQ ID NO: 2566466 - RNA, 19 nt, Homo sapiens
  misc_RNA (1)...(19): siRNA sense strand
cuccaaugucccagguuua

SEQ ID NO: 2566467 - RNA, 19 nt, Homo sapiens
  misc_RNA (1)...(19): siRNA sense strand
ugcaagaaaucgcagggaa

SEQ ID NO: 2566468 - RNA, 19 nt, Homo sapiens
  misc_RNA (1)...(19): siRNA sense strand
agcaacaugcagagaagua

SEQ ID NO: 2566469 - RNA, 19 nt, Homo sapiens
  misc_RNA (1)...(19): siRNA sense strand
aaacggagaugguggcagu

SEQ ID NO: 2566470 - RNA, 19 nt, Homo sapiens
  misc_RNA (1)...(19): siRNA sense strand
gguuaaugaaguuguggca

SEQ ID NO: 2566471 - RNA, 19 nt, Homo sapiens
  misc_RNA (1)...(19): siRNA sense strand
augaaguuguggcaggaau

SEQ ID NO: 2566472 - RNA, 19 nt, Homo sapiens
  misc_RNA (1)...(19): siRNA sense strand
ccgugaggaagaccagaaa

SEQ ID NO: 2566473 - RNA, 19 nt, Homo sapiens
  misc_RNA (1)...(19): siRNA sense strand
aaaccaacuagaagcaaca

SEQ ID NO: 2566474 - RNA, 19 nt, Homo sapiens
  misc_RNA (1)...(19): siRNA sense strand
caggagaauaauugugaaa

SEQ ID NO: 2566475 - RNA, 19 nt, Homo sapiens
  misc_RNA (1)...(19): siRNA sense strand
uguaauugauagaggcaca

SEQ ID NO: 2566476 - RNA, 19 nt, Homo sapiens
  misc_RNA (1)...(19): siRNA sense strand
ggucaaagauggggagcau

SEQ ID NO: 2566477 - RNA, 19 nt, Homo sapiens
  misc_RNA (1)...(19): siRNA sense strand
aagaagaagaugaugcaga

SEQ ID NO: 2566478 - RNA, 19 nt, Homo sapiens
  misc_RNA (1)...(19): siRNA sense strand
cauuguagaaucuggagaa

SEQ ID NO: 2566479 - RNA, 19 nt, Homo sapiens
  misc_RNA (1)...(19): siRNA sense strand
cuaugaaaagaaaggguaa

SEQ ID NO: 2566480 - RNA, 19 nt, Homo sapiens
  misc_RNA (1)...(19): siRNA sense strand
cuaugauaaucgugggagu

SEQ ID NO: 2566481 - RNA, 19 nt, Homo sapiens
  misc_RNA (1)...(19): siRNA sense strand
cugaugaagaagaagauga

SEQ ID NO: 2566482 - RNA, 19 nt, Homo sapiens
  misc_RNA (1)...(19): siRNA sense strand
uaacaaaccucgagcagcu

SEQ ID NO: 2566483 - RNA, 19 nt, Homo sapiens
  misc_RNA (1)...(19): siRNA sense strand
augugaugguguuggaaga

SEQ ID NO: 2566484 - RNA, 19 nt, Homo sapiens
  misc_RNA (1)...(19): siRNA sense strand
ugaaaguaguagaugugau

SEQ ID NO: 2566485 - RNA, 19 nt, Homo sapiens
  misc_RNA (1)...(19): siRNA sense strand
aaguauacaacgauggaga

SEQ ID NO: 2566486 - RNA, 19 nt, Homo sapiens
  misc_RNA (1)...(19): siRNA sense strand
ggagcauguaauugaucaa

SEQ ID NO: 2566487 - RNA, 19 nt, Homo sapiens
  misc_RNA (1)...(19): siRNA sense strand
agaaucuggagaagugaaa

SEQ ID NO: 2566488 - RNA, 19 nt, Homo sapiens
  misc_RNA (1)...(19): siRNA sense strand
aguaauaaaccgauucaca

SEQ ID NO: 2566489 - RNA, 19 nt, Homo sapiens
  misc_RNA (1)...(19): siRNA sense strand
gaacgaacauggauauugu

SEQ ID NO: 2566490 - RNA, 19 nt, Homo sapiens
  misc_RNA (1)...(19): siRNA sense strand
agcaggagaacgagcgcaa

SEQ ID NO: 2566491 - RNA, 19 nt, Homo sapiens
  misc_RNA (1)...(19): siRNA sense strand
ggguaaccuucaggagaau

SEQ ID NO: 2566492 - RNA, 19 nt, Homo sapiens
  misc_RNA (1)...(19): siRNA sense strand
gagaacaaaucauugcuca

SEQ ID NO: 2566493 - RNA, 19 nt, Homo sapiens
  misc_RNA (1)...(19): siRNA sense strand
ugaugaagaagaagaugau

SEQ ID NO: 2566494 - RNA, 19 nt, Homo sapiens
  misc_RNA (1)...(19): siRNA sense strand
agaaauagguugcaagagg

SEQ ID NO: 2566495 - RNA, 19 nt, Homo sapiens
  misc_RNA (1)...(19): siRNA sense strand
gccugaaaguaguagaugu

SEQ ID NO: 2566496 - RNA, 19 nt, Homo sapiens
  misc_RNA (1)...(19): siRNA sense strand
agaauggugcaguagaaau

SEQ ID NO: 2566497 - RNA, 19 nt, Homo sapiens
  misc_RNA (1)...(19): siRNA sense strand
gaucaaagaaauagguugc

SEQ ID NO: 2566498 - RNA, 19 nt, Homo sapiens
  misc_RNA (1)...(19): siRNA sense strand
uuggaagauguguugguaa

SEQ ID NO: 2566499 - RNA, 19 nt, Homo sapiens
  misc_RNA (1)...(19): siRNA sense strand
aguauacaacgauggagaa

SEQ ID NO: 2566500 - RNA, 19 nt, Homo sapiens
  misc_RNA (1)...(19): siRNA sense strand
cgccauugggacugucaaa

SEQ ID NO: 2566501 - RNA, 19 nt, Homo sapiens
  misc_RNA (1)...(19): siRNA sense strand
aaaucauugcucagggaga

SEQ ID NO: 2566502 - RNA, 19 nt, Homo sapiens
  misc_RNA (1)...(19): siRNA sense strand
gggagagggacgugagaga

SEQ ID NO: 2566503 - RNA, 19 nt, Homo sapiens
  misc_RNA (1)...(19): siRNA sense strand
caggaagggcacagaagaa

SEQ ID NO: 2566504 - RNA, 19 nt, Homo sapiens
  misc_RNA (1)...(19): siRNA sense strand
cggaggaucgacugggaaa

SEQ ID NO: 2566505 - RNA, 19 nt, Homo sapiens
  misc_RNA (1)...(19): siRNA sense strand
ggaucgaacaacaaggaau

SEQ ID NO: 2566506 - RNA, 19 nt, Homo sapiens
  misc_RNA (1)...(19): siRNA sense strand
uggcaaaggagcagagaac

SEQ ID NO: 2566507 - RNA, 19 nt, Homo sapiens
  misc_RNA (1)...(19): siRNA sense strand
agucuaucauggagcacaa

SEQ ID NO: 2566508 - RNA, 19 nt, Homo sapiens
  misc_RNA (1)...(19): siRNA sense strand
ugaagaaggauguggugau

SEQ ID NO: 2566509 - RNA, 19 nt, Homo sapiens
  misc_RNA (1)...(19): siRNA sense strand
acauucagcaaguaggaaa

SEQ ID NO: 2566510 - RNA, 19 nt, Homo sapiens
  misc_RNA (1)...(19): siRNA sense strand
aagaaugaaagcaagcaaa

SEQ ID NO: 2566511 - RNA, 19 nt, Homo sapiens
  misc_RNA (1)...(19): siRNA sense strand
uccucaugguguugggaaa

SEQ ID NO: 2566512 - RNA, 19 nt, Homo sapiens
  misc_RNA (1)...(19): siRNA sense strand
aagaugaagacgagcuauu

SEQ ID NO: 2566513 - RNA, 19 nt, Homo sapiens
  misc_RNA (1)...(19): siRNA sense strand
ucacaguacgagaugcaaa

SEQ ID NO: 2566514 - RNA, 19 nt, Homo sapiens
  misc_RNA (1)...(19): siRNA sense strand
caagaaugaaagcaagcaa

SEQ ID NO: 2566515 - RNA, 19 nt, Homo sapiens
  misc_RNA (1)...(19): siRNA sense strand
agaacgugcacgaggugaa

SEQ ID NO: 2566516 - RNA, 19 nt, Homo sapiens
  misc_RNA (1)...(19): siRNA sense strand
aggugaaggaccacaaauu

SEQ ID NO: 2566517 - RNA, 19 nt, Homo sapiens
  misc_RNA (1)...(19): siRNA sense strand
aaaugugacaccugcgaua

SEQ ID NO: 2566518 - RNA, 19 nt, Homo sapiens
  misc_RNA (1)...(19): siRNA sense strand
ccaacaaccuugaccgagu

SEQ ID NO: 2566519 - RNA, 19 nt, Homo sapiens
  misc_RNA (1)...(19): siRNA sense strand
ggaugguacaaguugcuua

SEQ ID NO: 2566520 - RNA, 19 nt, Homo sapiens
  misc_RNA (1)...(19): siRNA sense strand
gguacaaguugcuuaacca

SEQ ID NO: 2566521 - RNA, 19 nt, Homo sapiens
  misc_RNA (1)...(19): siRNA sense strand
caggcagaaauucgagaaa

SEQ ID NO: 2566522 - RNA, 19 nt, Homo sapiens
  misc_RNA (1)...(19): siRNA sense strand
agaaugaaagcaagcaaaa

SEQ ID NO: 2566523 - RNA, 19 nt, Homo sapiens
  misc_RNA (1)...(19): siRNA sense strand
ggaaucauuuauagggauc

SEQ ID NO: 2566524 - RNA, 19 nt, Homo sapiens
  misc_RNA (1)...(19): siRNA sense strand
auuugauggugaagaugaa

SEQ ID NO: 2566525 - RNA, 19 nt, Homo sapiens
  misc_RNA (1)...(19): siRNA sense strand
agaaauucgagaaagccaa

SEQ ID NO: 2566526 - RNA, 19 nt, Homo sapiens
  misc_RNA (1)...(19): siRNA sense strand
cugugggacuccagauuau

SEQ ID NO: 2566527 - RNA, 19 nt, Homo sapiens
  misc_RNA (1)...(19): siRNA sense strand
guucacaagcaaugcguca

SEQ ID NO: 2566528 - RNA, 19 nt, Homo sapiens
  misc_RNA (1)...(19): siRNA sense strand
ugaagaugaagacgagcua

SEQ ID NO: 2566529 - RNA, 19 nt, Homo sapiens
  misc_RNA (1)...(19): siRNA sense strand
aaacuggagaacagggaga

SEQ ID NO: 2566530 - RNA, 19 nt, Homo sapiens
  misc_RNA (1)...(19): siRNA sense strand
gcuuaucagccguauggaa

SEQ ID NO: 2566531 - RNA, 19 nt, Homo sapiens
  misc_RNA (1)...(19): siRNA sense strand
ggucacugcucuauggacu

SEQ ID NO: 2566532 - RNA, 19 nt, Homo sapiens
  misc_RNA (1)...(19): siRNA sense strand
gaugguacaaguugcuuaa

SEQ ID NO: 2566533 - RNA, 19 nt, Homo sapiens
  misc_RNA (1)...(19): siRNA sense strand
ggcagaaauucgagaaagc

SEQ ID NO: 2566534 - RNA, 19 nt, Homo sapiens
  misc_RNA (1)...(19): siRNA sense strand
ccaccugaucagcugguua

SEQ ID NO: 2566535 - RNA, 19 nt, Homo sapiens
  misc_RNA (1)...(19): siRNA sense strand
ggauaagggacccgacacu

SEQ ID NO: 2566536 - RNA, 19 nt, Homo sapiens
  misc_RNA (1)...(19): siRNA sense strand
ggcugagguugcugaugaa

SEQ ID NO: 2566537 - RNA, 19 nt, Homo sapiens
  misc_RNA (1)...(19): siRNA sense strand
agacaaagaccgacgacug

SEQ ID NO: 2566538 - RNA, 19 nt, Homo sapiens
  misc_RNA (1)...(19): siRNA sense strand
acaaguugcuuaaccaaga

SEQ ID NO: 2566539 - RNA, 19 nt, Homo sapiens
  misc_RNA (1)...(19): siRNA sense strand
caacguacccauuccggaa

SEQ ID NO: 2566540 - RNA, 19 nt, Homo sapiens
  misc_RNA (1)...(19): siRNA sense strand
cagaaauucgagaaagcca

SEQ ID NO: 2566541 - RNA, 19 nt, Homo sapiens
  misc_RNA (1)...(19): siRNA sense strand
gaggaaucauuuauaggga

SEQ ID NO: 2566542 - RNA, 19 nt, Homo sapiens
  misc_RNA (1)...(19): siRNA sense strand
ccugaucccaagaaugaaa

SEQ ID NO: 2566543 - RNA, 19 nt, Homo sapiens
  misc_RNA (1)...(19): siRNA sense strand
gcagagauuuccaucggau

SEQ ID NO: 2566544 - RNA, 19 nt, Homo sapiens
  misc_RNA (1)...(19): siRNA sense strand
ggcagaagaacgugcacga

SEQ ID NO: 2566545 - RNA, 19 nt, Homo sapiens
  misc_RNA (1)...(19): siRNA sense strand
auucuaugcggcagagauu

SEQ ID NO: 2566546 - RNA, 19 nt, Homo sapiens
  misc_RNA (1)...(19): siRNA sense strand
augugaagcugaaacuuau

SEQ ID NO: 2566547 - RNA, 19 nt, Homo sapiens
  misc_RNA (1)...(19): siRNA sense strand
guacaaguugcuuaaccaa

SEQ ID NO: 2566548 - RNA, 19 nt, Homo sapiens
  misc_RNA (1)...(19): siRNA sense strand
aggaaggaaacauggaacu

SEQ ID NO: 2566549 - RNA, 19 nt, Homo sapiens
  misc_RNA (1)...(19): siRNA sense strand
guugcuuaaccaagaagaa

SEQ ID NO: 2566550 - RNA, 19 nt, Homo sapiens
  misc_RNA (1)...(19): siRNA sense strand
ggaaaggggaguuuuggaa

SEQ ID NO: 2566551 - RNA, 19 nt, Homo sapiens
  misc_RNA (1)...(19): siRNA sense strand
ccauaagagaugugcauuu

SEQ ID NO: 2566552 - RNA, 19 nt, Homo sapiens
  misc_RNA (1)...(19): siRNA sense strand
ggucgagagaagaggucaa

SEQ ID NO: 2566553 - RNA, 19 nt, Homo sapiens
  misc_RNA (1)...(19): siRNA sense strand
gugaaagcggccagugaua

SEQ ID NO: 2566554 - RNA, 19 nt, Homo sapiens
  misc_RNA (1)...(19): siRNA sense strand
guuuauuggucgagagaag

SEQ ID NO: 2566555 - RNA, 19 nt, Homo sapiens
  misc_RNA (1)...(19): siRNA sense strand
cugaagaaacagaaaugaa

SEQ ID NO: 2566556 - RNA, 19 nt, Homo sapiens
  misc_RNA (1)...(19): siRNA sense strand
gaugacaaugauagugaaa

SEQ ID NO: 2566557 - RNA, 19 nt, Homo sapiens
  misc_RNA (1)...(19): siRNA sense strand
ucuuaaaugugaagggugu

SEQ ID NO: 2566558 - RNA, 19 nt, Homo sapiens
  misc_RNA (1)...(19): siRNA sense strand
ggucauggaagaagggagu

SEQ ID NO: 2566559 - RNA, 19 nt, Homo sapiens
  misc_RNA (1)...(19): siRNA sense strand
aaacacacgaagaggaaaa

SEQ ID NO: 2566560 - RNA, 19 nt, Homo sapiens
  misc_RNA (1)...(19): siRNA sense strand
gcagguacuacaaggaaau

SEQ ID NO: 2566561 - RNA, 19 nt, Homo sapiens
  misc_RNA (1)...(19): siRNA sense strand
aggaaaacaucguaaaaca

SEQ ID NO: 2566562 - RNA, 19 nt, Homo sapiens
  misc_RNA (1)...(19): siRNA sense strand
gcaaaaucggggagcgcua

SEQ ID NO: 2566563 - RNA, 19 nt, Homo sapiens
  misc_RNA (1)...(19): siRNA sense strand
cugauguggucauggaaga

SEQ ID NO: 2566564 - RNA, 19 nt, Homo sapiens
  misc_RNA (1)...(19): siRNA sense strand
caacaaaacaagaaagcca

SEQ ID NO: 2566565 - RNA, 19 nt, Homo sapiens
  misc_RNA (1)...(19): siRNA sense strand
guguauuaugugggagaaa

SEQ ID NO: 2566566 - RNA, 19 nt, Homo sapiens
  misc_RNA (1)...(19): siRNA sense strand
gcaaggacacgcugcggaa

SEQ ID NO: 2566567 - RNA, 19 nt, Homo sapiens
  misc_RNA (1)...(19): siRNA sense strand
gcagagugccagaacgaca

SEQ ID NO: 2566568 - RNA, 19 nt, Homo sapiens
  misc_RNA (1)...(19): siRNA sense strand
uggaauuguuuauggagga

SEQ ID NO: 2566569 - RNA, 19 nt, Homo sapiens
  misc_RNA (1)...(19): siRNA sense strand
auggagacaugcuggaaau

SEQ ID NO: 2566570 - RNA, 19 nt, Homo sapiens
  misc_RNA (1)...(19): siRNA sense strand
ccaucaacaagcaacaaua

SEQ ID NO: 2566571 - RNA, 19 nt, Homo sapiens
  misc_RNA (1)...(19): siRNA sense strand
uggauaagaccuugagcca

SEQ ID NO: 2566572 - RNA, 19 nt, Homo sapiens
  misc_RNA (1)...(19): siRNA sense strand
gagacugaagaaacagaaa

SEQ ID NO: 2566573 - RNA, 19 nt, Homo sapiens
  misc_RNA (1)...(19): siRNA sense strand
aaugauagugaaaggaaca

SEQ ID NO: 2566574 - RNA, 19 nt, Homo sapiens
  misc_RNA (1)...(19): siRNA sense strand
ggaggaaaacaucguaaaa

SEQ ID NO: 2566575 - RNA, 19 nt, Homo sapiens
  misc_RNA (1)...(19): siRNA sense strand
cugaauuaccauaagagau

SEQ ID NO: 2566576 - RNA, 19 nt, Homo sapiens
  misc_RNA (1)...(19): siRNA sense strand
gggagugaugacaaugaua

SEQ ID NO: 2566577 - RNA, 19 nt, Homo sapiens
  misc_RNA (1)...(19): siRNA sense strand
agcagguacuacaaggaaa

SEQ ID NO: 2566578 - RNA, 19 nt, Homo sapiens
  misc_RNA (1)...(19): siRNA sense strand
ucgaaaucacuacggcaaa

SEQ ID NO: 2566579 - RNA, 19 nt, Homo sapiens
  misc_RNA (1)...(19): siRNA sense strand
aagaagggagugaugacaa

SEQ ID NO: 2566580 - RNA, 19 nt, Homo sapiens
  misc_RNA (1)...(19): siRNA sense strand
gcugguacgucaaggucuu

SEQ ID NO: 2566581 - RNA, 19 nt, Homo sapiens
  misc_RNA (1)...(19): siRNA sense strand
ucaugaagccauugaucuu

SEQ ID NO: 2566582 - RNA, 19 nt, Homo sapiens
  misc_RNA (1)...(19): siRNA sense strand
ugugaucacuguggagaaa

SEQ ID NO: 2566583 - RNA, 19 nt, Homo sapiens
  misc_RNA (1)...(19): siRNA sense strand
gcuccauugucgaccagaa

SEQ ID NO: 2566584 - RNA, 19 nt, Homo sapiens
  misc_RNA (1)...(19): siRNA sense strand
cagagauggcaauggcaga

SEQ ID NO: 2566585 - RNA, 19 nt, Homo sapiens
  misc_RNA (1)...(19): siRNA sense strand
gggagaaguaugcaggcga

SEQ ID NO: 2566586 - RNA, 19 nt, Homo sapiens
  misc_RNA (1)...(19): siRNA sense strand
gaaugugguuucuacggaa

SEQ ID NO: 2566587 - RNA, 19 nt, Homo sapiens
  misc_RNA (1)...(19): siRNA sense strand
acaaugauagugaaaggaa

SEQ ID NO: 2566588 - RNA, 19 nt, Homo sapiens
  misc_RNA (1)...(19): siRNA sense strand
aggaaaagcagcacaguca

SEQ ID NO: 2566589 - RNA, 19 nt, Homo sapiens
  misc_RNA (1)...(19): siRNA sense strand
cacuauuggagauuggaua

SEQ ID NO: 2566590 - RNA, 19 nt, Homo sapiens
  misc_RNA (1)...(19): siRNA sense strand
caggaagagauguagcuau

SEQ ID NO: 2566591 - RNA, 19 nt, Homo sapiens
  misc_RNA (1)...(19): siRNA sense strand
cugaugaaguacuggguuc

SEQ ID NO: 2566592 - RNA, 19 nt, Homo sapiens
  misc_RNA (1)...(19): siRNA sense strand
gcagguugccagagcacau

SEQ ID NO: 2566593 - RNA, 19 nt, Homo sapiens
  misc_RNA (1)...(19): siRNA sense strand
gaugcaagauccagaccca

SEQ ID NO: 2566594 - RNA, 19 nt, Homo sapiens
  misc_RNA (1)...(19): siRNA sense strand
uaaaacaggaagagaugua

SEQ ID NO: 2566595 - RNA, 19 nt, Homo sapiens
  misc_RNA (1)...(19): siRNA sense strand
ucguaaugagguugcaauu

SEQ ID NO: 2566596 - RNA, 19 nt, Homo sapiens
  misc_RNA (1)...(19): siRNA sense strand
ccggaucauuggagagaag

SEQ ID NO: 2566597 - RNA, 19 nt, Homo sapiens
  misc_RNA (1)...(19): siRNA sense strand
ggagagaagucuuuccgga

SEQ ID NO: 2566598 - RNA, 19 nt, Homo sapiens
  misc_RNA (1)...(19): siRNA sense strand
ggaaauaucucaugaagcc

SEQ ID NO: 2566599 - RNA, 19 nt, Homo sapiens
  misc_RNA (1)...(19): siRNA sense strand
cugugaucacuguggagaa

SEQ ID NO: 2566600 - RNA, 19 nt, Homo sapiens
  misc_RNA (1)...(19): siRNA sense strand
ggaagaagggagugaugac

SEQ ID NO: 2566601 - RNA, 19 nt, Homo sapiens
  misc_RNA (1)...(19): siRNA sense strand
gugaugacaaugauaguga

SEQ ID NO: 2566602 - RNA, 19 nt, Homo sapiens
  misc_RNA (1)...(19): siRNA sense strand
caaugauagugaaaggaac

SEQ ID NO: 2566603 - RNA, 19 nt, Homo sapiens
  misc_RNA (1)...(19): siRNA sense strand
caagaugcagagauggcaa

SEQ ID NO: 2566604 - RNA, 19 nt, Homo sapiens
  misc_RNA (1)...(19): siRNA sense strand
ggccaggaugugggagaua

SEQ ID NO: 2566605 - RNA, 19 nt, Homo sapiens
  misc_RNA (1)...(19): siRNA sense strand
gcacaguauaucagauuuu

SEQ ID NO: 2566606 - RNA, 19 nt, Homo sapiens
  misc_RNA (1)...(19): siRNA sense strand
acccuuggcuacaggacua

SEQ ID NO: 2566607 - RNA, 19 nt, Homo sapiens
  misc_RNA (1)...(19): siRNA sense strand
aaaugaaagcccucgguga

SEQ ID NO: 2566608 - RNA, 19 nt, Homo sapiens
  misc_RNA (1)...(19): siRNA sense strand
guauuaugugggagaaaau

SEQ ID NO: 2566609 - RNA, 19 nt, Homo sapiens
  misc_RNA (1)...(19): siRNA sense strand
agacugaagaaacagaaau

SEQ ID NO: 2566610 - RNA, 19 nt, Homo sapiens
  misc_RNA (1)...(19): siRNA sense strand
ggccagugauauccaggaa

SEQ ID NO: 2566611 - RNA, 19 nt, Homo sapiens
  misc_RNA (1)...(19): siRNA sense strand
acgucaaggucuuaaaugu

SEQ ID NO: 2566612 - RNA, 19 nt, Homo sapiens
  misc_RNA (1)...(19): siRNA sense strand
caugaaagaaggauggaug

SEQ ID NO: 2566613 - RNA, 19 nt, Homo sapiens
  misc_RNA (1)...(19): siRNA sense strand
cucagauacucguggcuuu

SEQ ID NO: 2566614 - RNA, 19 nt, Homo sapiens
  misc_RNA (1)...(19): siRNA sense strand
aaacaacugccuuggcgaa

SEQ ID NO: 2566615 - RNA, 19 nt, Homo sapiens
  misc_RNA (1)...(19): siRNA sense strand
uaguguauuaugugggaga

SEQ ID NO: 2566616 - RNA, 19 nt, Homo sapiens
  misc_RNA (1)...(19): siRNA sense strand
cugaaagaguguuuguugu

SEQ ID NO: 2566617 - RNA, 19 nt, Homo sapiens
  misc_RNA (1)...(19): siRNA sense strand
ggaugauauggaagaagca

SEQ ID NO: 2566618 - RNA, 19 nt, Homo sapiens
  misc_RNA (1)...(19): siRNA sense strand
ggguagugcagucugucaa

SEQ ID NO: 2566619 - RNA, 19 nt, Homo sapiens
  misc_RNA (1)...(19): siRNA sense strand
guuugagacgccugaaaga

SEQ ID NO: 2566620 - RNA, 19 nt, Homo sapiens
  misc_RNA (1)...(19): siRNA sense strand
ccacagaggaggaggagga

SEQ ID NO: 2566621 - RNA, 19 nt, Homo sapiens
  misc_RNA (1)...(19): siRNA sense strand
aggaggaggaggaggaaga

SEQ ID NO: 2566622 - RNA, 19 nt, Homo sapiens
  misc_RNA (1)...(19): siRNA sense strand
gagaagggccguaaggaga

SEQ ID NO: 2566623 - RNA, 19 nt, Homo sapiens
  misc_RNA (1)...(19): siRNA sense strand
cugaagaagaggaggagga

SEQ ID NO: 2566624 - RNA, 19 nt, Homo sapiens
  misc_RNA (1)...(19): siRNA sense strand
gggaaagagaccaugguga

SEQ ID NO: 2566625 - RNA, 19 nt, Homo sapiens
  misc_RNA (1)...(19): siRNA sense strand
aagaagaggaggaggagga

SEQ ID NO: 2566626 - RNA, 19 nt, Homo sapiens
  misc_RNA (1)...(19): siRNA sense strand
uggaagaccagguggagau

SEQ ID NO: 2566627 - RNA, 19 nt, Homo sapiens
  misc_RNA (1)...(19): siRNA sense strand
gggaagaagucucuggaag

SEQ ID NO: 2566628 - RNA, 19 nt, Homo sapiens
  misc_RNA (1)...(19): siRNA sense strand
cagaggaggaggaggagga

SEQ ID NO: 2566629 - RNA, 19 nt, Homo sapiens
  misc_RNA (1)...(19): siRNA sense strand
aggaggaggaggaagaaga

SEQ ID NO: 2566630 - RNA, 19 nt, Homo sapiens
  misc_RNA (1)...(19): siRNA sense strand
aggaggaagaagaggcuga

SEQ ID NO: 2566631 - RNA, 19 nt, Homo sapiens
  misc_RNA (1)...(19): siRNA sense strand
aggaagaagaggcugaaga

SEQ ID NO: 2566632 - RNA, 19 nt, Homo sapiens
  misc_RNA (1)...(19): siRNA sense strand
aggaggaggaggaggagga

SEQ ID NO: 2566633 - RNA, 19 nt, Homo sapiens
  misc_RNA (1)...(19): siRNA sense strand
aggaggaggaggaggagga

SEQ ID NO: 2566634 - RNA, 19 nt, Homo sapiens
  misc_RNA (1)...(19): siRNA sense strand
aggaggaggaggaggagga

SEQ ID NO: 2566635 - RNA, 19 nt, Homo sapiens
  misc_RNA (1)...(19): siRNA sense strand
aggaggaggaggaggagga

SEQ ID NO: 2566636 - RNA, 19 nt, Homo sapiens
  misc_RNA (1)...(19): siRNA sense strand
ugucagaagcggaagcuca

SEQ ID NO: 2566637 - RNA, 19 nt, Homo sapiens
  misc_RNA (1)...(19): siRNA sense strand
aggcugaagaagaggagga

SEQ ID NO: 2566638 - RNA, 19 nt, Homo sapiens
  misc_RNA (1)...(19): siRNA sense strand
cagugaaggaggaagcuga

SEQ ID NO: 2566639 - RNA, 19 nt, Homo sapiens
  misc_RNA (1)...(19): siRNA sense strand
agccagagagagaggccaa

SEQ ID NO: 2566640 - RNA, 19 nt, Homo sapiens
  misc_RNA (1)...(19): siRNA sense strand
aagaggaggaggaggagga

SEQ ID NO: 2566641 - RNA, 19 nt, Homo sapiens
  misc_RNA (1)...(19): siRNA sense strand
ccaccaacgaauacgucua

SEQ ID NO: 2566642 - RNA, 19 nt, Homo sapiens
  misc_RNA (1)...(19): siRNA sense strand
ggaaagagaccauggugac

SEQ ID NO: 2566643 - RNA, 19 nt, Homo sapiens
  misc_RNA (1)...(19): siRNA sense strand
ugacggagcccaaggagga

SEQ ID NO: 2566644 - RNA, 19 nt, Homo sapiens
  misc_RNA (1)...(19): siRNA sense strand
ggccguaaggagagagagu

SEQ ID NO: 2566645 - RNA, 19 nt, Homo sapiens
  misc_RNA (1)...(19): siRNA sense strand
caccagaagcugugggaag

SEQ ID NO: 2566646 - RNA, 19 nt, Homo sapiens
  misc_RNA (1)...(19): siRNA sense strand
aggaggaggaggaggauuc

SEQ ID NO: 2566647 - RNA, 19 nt, Homo sapiens
  misc_RNA (1)...(19): siRNA sense strand
ccaccgaagacgaccauga

SEQ ID NO: 2566648 - RNA, 19 nt, Homo sapiens
  misc_RNA (1)...(19): siRNA sense strand
ggacagugaaggaggaagc

SEQ ID NO: 2566649 - RNA, 19 nt, Homo sapiens
  misc_RNA (1)...(19): siRNA sense strand
gcaacaaguucgaggaggc

SEQ ID NO: 2566650 - RNA, 19 nt, Homo sapiens
  misc_RNA (1)...(19): siRNA sense strand
ggaagaaggcacgggagga

SEQ ID NO: 2566651 - RNA, 19 nt, Homo sapiens
  misc_RNA (1)...(19): siRNA sense strand
agagagaggccaaagagca

SEQ ID NO: 2566652 - RNA, 19 nt, Homo sapiens
  misc_RNA (1)...(19): siRNA sense strand
gcgaguaccucauggagcu

SEQ ID NO: 2566653 - RNA, 19 nt, Homo sapiens
  misc_RNA (1)...(19): siRNA sense strand
ccgaagacgaccaugacga

SEQ ID NO: 2566654 - RNA, 19 nt, Homo sapiens
  misc_RNA (1)...(19): siRNA sense strand
auggaacagacgaguacaa

SEQ ID NO: 2566655 - RNA, 19 nt, Homo sapiens
  misc_RNA (1)...(19): siRNA sense strand
ggagggagaugcacggcaa

SEQ ID NO: 2566656 - RNA, 19 nt, Homo sapiens
  misc_RNA (1)...(19): siRNA sense strand
gcguggaucugguggacga

SEQ ID NO: 2566657 - RNA, 19 nt, Homo sapiens
  misc_RNA (1)...(19): siRNA sense strand
ucagcaagaucaaagggaa

SEQ ID NO: 2566658 - RNA, 19 nt, Homo sapiens
  misc_RNA (1)...(19): siRNA sense strand
cuggcaagggcaagggcaa

SEQ ID NO: 2566659 - RNA, 19 nt, Homo sapiens
  misc_RNA (1)...(19): siRNA sense strand
cagcaagaucaaagggaag

SEQ ID NO: 2566660 - RNA, 19 nt, Homo sapiens
  misc_RNA (1)...(19): siRNA sense strand
uggacaucgucuucagcaa

SEQ ID NO: 2566661 - RNA, 19 nt, Homo sapiens
  misc_RNA (1)...(19): siRNA sense strand
gggaagucuugccggacca

SEQ ID NO: 2566662 - RNA, 19 nt, Homo sapiens
  misc_RNA (1)...(19): siRNA sense strand
cgccaagaagcgauucaaa

SEQ ID NO: 2566663 - RNA, 19 nt, Homo sapiens
  misc_RNA (1)...(19): siRNA sense strand
acaaagaagucgcagacga

SEQ ID NO: 2566664 - RNA, 19 nt, Homo sapiens
  misc_RNA (1)...(19): siRNA sense strand
gagacaaagaagucgcaga

SEQ ID NO: 2566665 - RNA, 19 nt, Homo sapiens
  misc_RNA (1)...(19): siRNA sense strand
agccagagccggagcagau

SEQ ID NO: 2566666 - RNA, 19 nt, Homo sapiens
  misc_RNA (1)...(19): siRNA sense strand
caguauaggcgcagacacu

SEQ ID NO: 2566667 - RNA, 19 nt, Homo sapiens
  misc_RNA (1)...(19): siRNA sense strand
agaaccaggaagagaacau

SEQ ID NO: 2566668 - RNA, 19 nt, Homo sapiens
  misc_RNA (1)...(19): siRNA sense strand
gugaggagccugagcgaac

SEQ ID NO: 2566669 - RNA, 19 nt, Homo sapiens
  misc_RNA (1)...(19): siRNA sense strand
gcaaggacaccacggccaa

SEQ ID NO: 2566670 - RNA, 19 nt, Homo sapiens
  misc_RNA (1)...(19): siRNA sense strand
cugcagaaccaggaagaga

SEQ ID NO: 2566671 - RNA, 19 nt, Homo sapiens
  misc_RNA (1)...(19): siRNA sense strand
ccucaaauuuauauggcau

SEQ ID NO: 2566672 - RNA, 19 nt, Homo sapiens
  misc_RNA (1)...(19): siRNA sense strand
augcauuggcccagagauu

SEQ ID NO: 2566673 - RNA, 19 nt, Homo sapiens
  misc_RNA (1)...(19): siRNA sense strand
ccguaguaaccuaaggcaa

SEQ ID NO: 2566674 - RNA, 19 nt, Homo sapiens
  misc_RNA (1)...(19): siRNA sense strand
aaguaaugaccuuggugaa

SEQ ID NO: 2566675 - RNA, 19 nt, Homo sapiens
  misc_RNA (1)...(19): siRNA sense strand
cugaacaugcagcgagaau

SEQ ID NO: 2566676 - RNA, 19 nt, Homo sapiens
  misc_RNA (1)...(19): siRNA sense strand
ccaaagacacagagccagu

SEQ ID NO: 2566677 - RNA, 19 nt, Homo sapiens
  misc_RNA (1)...(19): siRNA sense strand
cuucauuguuaaggagaau

SEQ ID NO: 2566678 - RNA, 19 nt, Homo sapiens
  misc_RNA (1)...(19): siRNA sense strand
gcacaguugcaauuggaga

SEQ ID NO: 2566679 - RNA, 19 nt, Homo sapiens
  misc_RNA (1)...(19): siRNA sense strand
gggaaagggccaaaacaga

SEQ ID NO: 2566680 - RNA, 19 nt, Homo sapiens
  misc_RNA (1)...(19): siRNA sense strand
agaaugaacagcagccaga

SEQ ID NO: 2566681 - RNA, 19 nt, Homo sapiens
  misc_RNA (1)...(19): siRNA sense strand
cagauauaaccgaugccaa

SEQ ID NO: 2566682 - RNA, 19 nt, Homo sapiens
  misc_RNA (1)...(19): siRNA sense strand
cuccaaagacacagagcca

SEQ ID NO: 2566683 - RNA, 19 nt, Homo sapiens
  misc_RNA (1)...(19): siRNA sense strand
cguaguaaccuaaggcaac

SEQ ID NO: 2566684 - RNA, 19 nt, Homo sapiens
  misc_RNA (1)...(19): siRNA sense strand
auguauacacacaaaggua

SEQ ID NO: 2566685 - RNA, 19 nt, Homo sapiens
  misc_RNA (1)...(19): siRNA sense strand
ugaccuuggugaagugcau

SEQ ID NO: 2566686 - RNA, 19 nt, Homo sapiens
  misc_RNA (1)...(19): siRNA sense strand
ucauagucguuuggaggaa

SEQ ID NO: 2566687 - RNA, 19 nt, Homo sapiens
  misc_RNA (1)...(19): siRNA sense strand
gagcugcuguccaggguga

SEQ ID NO: 2566688 - RNA, 19 nt, Homo sapiens
  misc_RNA (1)...(19): siRNA sense strand
cuugaaugccgcaggcuca

SEQ ID NO: 2566689 - RNA, 19 nt, Homo sapiens
  misc_RNA (1)...(19): siRNA sense strand
cugaaaacagugucaaaau

SEQ ID NO: 2566690 - RNA, 19 nt, Homo sapiens
  misc_RNA (1)...(19): siRNA sense strand
gcaagaagaacgaaggugu

SEQ ID NO: 2566691 - RNA, 19 nt, Homo sapiens
  misc_RNA (1)...(19): siRNA sense strand
uggccaagaaggcggagaa

SEQ ID NO: 2566692 - RNA, 19 nt, Homo sapiens
  misc_RNA (1)...(19): siRNA sense strand
ccgagaacgccauccgcaa

SEQ ID NO: 2566693 - RNA, 19 nt, Homo sapiens
  misc_RNA (1)...(19): siRNA sense strand
cggagcaggccaaagugaa

SEQ ID NO: 2566694 - RNA, 19 nt, Homo sapiens
  misc_RNA (1)...(19): siRNA sense strand
uggacagguucgagcagca

SEQ ID NO: 2566695 - RNA, 19 nt, Homo sapiens
  misc_RNA (1)...(19): siRNA sense strand
ccauggagacugugaucuu

SEQ ID NO: 2566696 - RNA, 19 nt, Homo sapiens
  misc_RNA (1)...(19): siRNA sense strand
acccuaugaaugugaaaua

SEQ ID NO: 2566697 - RNA, 19 nt, Homo sapiens
  misc_RNA (1)...(19): siRNA sense strand
ggacccuaugaaugugaaa

SEQ ID NO: 2566698 - RNA, 19 nt, Homo sapiens
  misc_RNA (1)...(19): siRNA sense strand
ccauggagacugugaucuu

SEQ ID NO: 2566699 - RNA, 19 nt, Homo sapiens
  misc_RNA (1)...(19): siRNA sense strand
acccuaugaaugugaaaua

SEQ ID NO: 2566700 - RNA, 19 nt, Homo sapiens
  misc_RNA (1)...(19): siRNA sense strand
ggacccuaugaaugugaaa

SEQ ID NO: 2566701 - RNA, 19 nt, Homo sapiens
  misc_RNA (1)...(19): siRNA sense strand
ccaaauaacuacaaagcau

SEQ ID NO: 2566702 - RNA, 19 nt, Homo sapiens
  misc_RNA (1)...(19): siRNA sense strand
ugacauaccucuaccauua

SEQ ID NO: 2566703 - RNA, 19 nt, Homo sapiens
  misc_RNA (1)...(19): siRNA sense strand
ccugugaaccuaagaguaa

SEQ ID NO: 2566704 - RNA, 19 nt, Homo sapiens
  misc_RNA (1)...(19): siRNA sense strand
gugaaauacgggaccgaua

SEQ ID NO: 2566705 - RNA, 19 nt, Homo sapiens
  misc_RNA (1)...(19): siRNA sense strand
ggaccuuaucaaugugaaa

SEQ ID NO: 2566706 - RNA, 19 nt, Homo sapiens
  misc_RNA (1)...(19): siRNA sense strand
auacaguggaagagaaaga

SEQ ID NO: 2566707 - RNA, 19 nt, Homo sapiens
  misc_RNA (1)...(19): siRNA sense strand
ccagagagaauaaggaugu

SEQ ID NO: 2566708 - RNA, 19 nt, Homo sapiens
  misc_RNA (1)...(19): siRNA sense strand
ccaaaguuucugaggggaa

SEQ ID NO: 2566709 - RNA, 19 nt, Homo sapiens
  misc_RNA (1)...(19): siRNA sense strand
ccuaagaguaagaacuaca

SEQ ID NO: 2566710 - RNA, 19 nt, Homo sapiens
  misc_RNA (1)...(19): siRNA sense strand
aguaagaacuacaccuaca

SEQ ID NO: 2566711 - RNA, 19 nt, Homo sapiens
  misc_RNA (1)...(19): siRNA sense strand
cauauguaguagacgguca

SEQ ID NO: 2566712 - RNA, 19 nt, Homo sapiens
  misc_RNA (1)...(19): siRNA sense strand
cuuuauauuuggugucaca

SEQ ID NO: 2566713 - RNA, 19 nt, Homo sapiens
  misc_RNA (1)...(19): siRNA sense strand
acccuaugaaugugaaaua

SEQ ID NO: 2566714 - RNA, 19 nt, Homo sapiens
  misc_RNA (1)...(19): siRNA sense strand
guaaagcgacccauugaaa

SEQ ID NO: 2566715 - RNA, 19 nt, Homo sapiens
  misc_RNA (1)...(19): siRNA sense strand
aguggaagagaaagaguau

SEQ ID NO: 2566716 - RNA, 19 nt, Homo sapiens
  misc_RNA (1)...(19): siRNA sense strand
caguggaagagaaagagua

SEQ ID NO: 2566717 - RNA, 19 nt, Homo sapiens
  misc_RNA (1)...(19): siRNA sense strand
gaaccuaagaguaagaacu

SEQ ID NO: 2566718 - RNA, 19 nt, Homo sapiens
  misc_RNA (1)...(19): siRNA sense strand
uacccaaugucacgagaaa

SEQ ID NO: 2566719 - RNA, 19 nt, Homo sapiens
  misc_RNA (1)...(19): siRNA sense strand
gagaaaugaaacaggaccu

SEQ ID NO: 2566720 - RNA, 19 nt, Homo sapiens
  misc_RNA (1)...(19): siRNA sense strand
cuuaaaccccagagagaau

SEQ ID NO: 2566721 - RNA, 19 nt, Homo sapiens
  misc_RNA (1)...(19): siRNA sense strand
uaguagacggucaaagaau

SEQ ID NO: 2566722 - RNA, 19 nt, Homo sapiens
  misc_RNA (1)...(19): siRNA sense strand
guauauugcaggacccuau

SEQ ID NO: 2566723 - RNA, 19 nt, Homo sapiens
  misc_RNA (1)...(19): siRNA sense strand
ggaccgauaugguggcauc

SEQ ID NO: 2566724 - RNA, 19 nt, Homo sapiens
  misc_RNA (1)...(19): siRNA sense strand
agaguaagaacuacaccua

SEQ ID NO: 2566725 - RNA, 19 nt, Homo sapiens
  misc_RNA (1)...(19): siRNA sense strand
ugaaacaggaccuuaucaa

SEQ ID NO: 2566726 - RNA, 19 nt, Homo sapiens
  misc_RNA (1)...(19): siRNA sense strand
caucauaaagcgacgcgau

SEQ ID NO: 2566727 - RNA, 19 nt, Homo sapiens
  misc_RNA (1)...(19): siRNA sense strand
aaccuaagaguaagaacua

SEQ ID NO: 2566728 - RNA, 19 nt, Homo sapiens
  misc_RNA (1)...(19): siRNA sense strand
aaaugaaacaggaccuuau

SEQ ID NO: 2566729 - RNA, 19 nt, Homo sapiens
  misc_RNA (1)...(19): siRNA sense strand
accuacauuugguggcuaa

SEQ ID NO: 2566730 - RNA, 19 nt, Homo sapiens
  misc_RNA (1)...(19): siRNA sense strand
ggucagagccucccuguca

SEQ ID NO: 2566731 - RNA, 19 nt, Homo sapiens
  misc_RNA (1)...(19): siRNA sense strand
ggcaaaugacauaccucua

SEQ ID NO: 2566732 - RNA, 19 nt, Homo sapiens
  misc_RNA (1)...(19): siRNA sense strand
acaccuuacacaucauaaa

SEQ ID NO: 2566733 - RNA, 19 nt, Homo sapiens
  misc_RNA (1)...(19): siRNA sense strand
ggacccuaugaaugugaaa

SEQ ID NO: 2566734 - RNA, 19 nt, Homo sapiens
  misc_RNA (1)...(19): siRNA sense strand
ugaaauacgggaccgauau

SEQ ID NO: 2566735 - RNA, 19 nt, Homo sapiens
  misc_RNA (1)...(19): siRNA sense strand
gugaaauacgggaccgaua

SEQ ID NO: 2566736 - RNA, 19 nt, Homo sapiens
  misc_RNA (1)...(19): siRNA sense strand
gcauacaguggacgagaaa

SEQ ID NO: 2566737 - RNA, 19 nt, Homo sapiens
  misc_RNA (1)...(19): siRNA sense strand
auacaguggacgagaaaca

SEQ ID NO: 2566738 - RNA, 19 nt, Homo sapiens
  misc_RNA (1)...(19): siRNA sense strand
ccagauuacuacaaagcau

SEQ ID NO: 2566739 - RNA, 19 nt, Homo sapiens
  misc_RNA (1)...(19): siRNA sense strand
ccugugaaccuaagaguga

SEQ ID NO: 2566740 - RNA, 19 nt, Homo sapiens
  misc_RNA (1)...(19): siRNA sense strand
caaaaguuucugaggggaa

SEQ ID NO: 2566741 - RNA, 19 nt, Homo sapiens
  misc_RNA (1)...(19): siRNA sense strand
ccggucagucccaggguaa

SEQ ID NO: 2566742 - RNA, 19 nt, Homo sapiens
  misc_RNA (1)...(19): siRNA sense strand
cagauuacuacaaagcaua

SEQ ID NO: 2566743 - RNA, 19 nt, Homo sapiens
  misc_RNA (1)...(19): siRNA sense strand
cauauguaguagacgguca

SEQ ID NO: 2566744 - RNA, 19 nt, Homo sapiens
  misc_RNA (1)...(19): siRNA sense strand
acccuaugaaugugaaaua

SEQ ID NO: 2566745 - RNA, 19 nt, Homo sapiens
  misc_RNA (1)...(19): siRNA sense strand
guaaagcgacgcauugaaa

SEQ ID NO: 2566746 - RNA, 19 nt, Homo sapiens
  misc_RNA (1)...(19): siRNA sense strand
aaccuaagagugagaacua

SEQ ID NO: 2566747 - RNA, 19 nt, Homo sapiens
  misc_RNA (1)...(19): siRNA sense strand
gcuccaaauccgugacagu

SEQ ID NO: 2566748 - RNA, 19 nt, Homo sapiens
  misc_RNA (1)...(19): siRNA sense strand
ccuaagagugagaacuaca

SEQ ID NO: 2566749 - RNA, 19 nt, Homo sapiens
  misc_RNA (1)...(19): siRNA sense strand
ggacccuaucaaugugaaa

SEQ ID NO: 2566750 - RNA, 19 nt, Homo sapiens
  misc_RNA (1)...(19): siRNA sense strand
cuauuaccauucaggacaa

SEQ ID NO: 2566751 - RNA, 19 nt, Homo sapiens
  misc_RNA (1)...(19): siRNA sense strand
ggaccgauaugguggcauc

SEQ ID NO: 2566752 - RNA, 19 nt, Homo sapiens
  misc_RNA (1)...(19): siRNA sense strand
caucugguacaaaggacaa

SEQ ID NO: 2566753 - RNA, 19 nt, Homo sapiens
  misc_RNA (1)...(19): siRNA sense strand
agaaugucacccaggaaga

SEQ ID NO: 2566754 - RNA, 19 nt, Homo sapiens
  misc_RNA (1)...(19): siRNA sense strand
accuacauuugguggcuaa

SEQ ID NO: 2566755 - RNA, 19 nt, Homo sapiens
  misc_RNA (1)...(19): siRNA sense strand
acccuaucaaugugaaaua

SEQ ID NO: 2566756 - RNA, 19 nt, Homo sapiens
  misc_RNA (1)...(19): siRNA sense strand
ggaaagggcuccugcucac

SEQ ID NO: 2566757 - RNA, 19 nt, Homo sapiens
  misc_RNA (1)...(19): siRNA sense strand
uggacgagaaacaguauau

SEQ ID NO: 2566758 - RNA, 19 nt, Homo sapiens
  misc_RNA (1)...(19): siRNA sense strand
gguaaagcgacgcauugaa

SEQ ID NO: 2566759 - RNA, 19 nt, Homo sapiens
  misc_RNA (1)...(19): siRNA sense strand
aaagcgaggugaugggacu

SEQ ID NO: 2566760 - RNA, 19 nt, Homo sapiens
  misc_RNA (1)...(19): siRNA sense strand
cuaccuauuuggugucaca

SEQ ID NO: 2566761 - RNA, 19 nt, Homo sapiens
  misc_RNA (1)...(19): siRNA sense strand
agugagaacuacaccuaca

SEQ ID NO: 2566762 - RNA, 19 nt, Homo sapiens
  misc_RNA (1)...(19): siRNA sense strand
ccagaaugucacccaggaa

SEQ ID NO: 2566763 - RNA, 19 nt, Homo sapiens
  misc_RNA (1)...(19): siRNA sense strand
ggacccuaugaaugugaaa

SEQ ID NO: 2566764 - RNA, 19 nt, Homo sapiens
  misc_RNA (1)...(19): siRNA sense strand
ugaaauacgggaccgauau

SEQ ID NO: 2566765 - RNA, 19 nt, Homo sapiens
  misc_RNA (1)...(19): siRNA sense strand
gagugaaguuggaggagga

SEQ ID NO: 2566766 - RNA, 19 nt, Homo sapiens
  misc_RNA (1)...(19): siRNA sense strand
gggaaagcauucagccgaa

SEQ ID NO: 2566767 - RNA, 19 nt, Homo sapiens
  misc_RNA (1)...(19): siRNA sense strand
agggcagguuugaaagaaa

SEQ ID NO: 2566768 - RNA, 19 nt, Homo sapiens
  misc_RNA (1)...(19): siRNA sense strand
agaucaucauccagagaau

SEQ ID NO: 2566769 - RNA, 19 nt, Homo sapiens
  misc_RNA (1)...(19): siRNA sense strand
cugcacagucaguggaaga

SEQ ID NO: 2566770 - RNA, 19 nt, Homo sapiens
  misc_RNA (1)...(19): siRNA sense strand
ucguauagucaaagcucaa

SEQ ID NO: 2566771 - RNA, 19 nt, Homo sapiens
  misc_RNA (1)...(19): siRNA sense strand
ggaggauccugauggcgaa

SEQ ID NO: 2566772 - RNA, 19 nt, Homo sapiens
  misc_RNA (1)...(19): siRNA sense strand
augucuugaaugugggaaa

SEQ ID NO: 2566773 - RNA, 19 nt, Homo sapiens
  misc_RNA (1)...(19): siRNA sense strand
gggagaaaccuuauggaug

SEQ ID NO: 2566774 - RNA, 19 nt, Homo sapiens
  misc_RNA (1)...(19): siRNA sense strand
cuccagaugaagaggaaaa

SEQ ID NO: 2566775 - RNA, 19 nt, Homo sapiens
  misc_RNA (1)...(19): siRNA sense strand
ccaugaaguuccuggcacu

SEQ ID NO: 2566776 - RNA, 19 nt, Homo sapiens
  misc_RNA (1)...(19): siRNA sense strand
auguguugagugugggaaa

SEQ ID NO: 2566777 - RNA, 19 nt, Homo sapiens
  misc_RNA (1)...(19): siRNA sense strand
acgggaaguacuaguagaa

SEQ ID NO: 2566778 - RNA, 19 nt, Homo sapiens
  misc_RNA (1)...(19): siRNA sense strand
agacaucagagaagacaca

SEQ ID NO: 2566779 - RNA, 19 nt, Homo sapiens
  misc_RNA (1)...(19): siRNA sense strand
cgacagcgauucaggcagu

SEQ ID NO: 2566780 - RNA, 19 nt, Homo sapiens
  misc_RNA (1)...(19): siRNA sense strand
acuugaugacccuggacaa

SEQ ID NO: 2566781 - RNA, 19 nt, Homo sapiens
  misc_RNA (1)...(19): siRNA sense strand
acgaaaacgggaaguacua

SEQ ID NO: 2566782 - RNA, 19 nt, Homo sapiens
  misc_RNA (1)...(19): siRNA sense strand
augcguucagugugggaaa

SEQ ID NO: 2566783 - RNA, 19 nt, Homo sapiens
  misc_RNA (1)...(19): siRNA sense strand
ccuaaggcacugugaugau

SEQ ID NO: 2566784 - RNA, 19 nt, Homo sapiens
  misc_RNA (1)...(19): siRNA sense strand
gugggaaaucguauaguca

SEQ ID NO: 2566785 - RNA, 19 nt, Homo sapiens
  misc_RNA (1)...(19): siRNA sense strand
cauuagaaucccaugaagu

SEQ ID NO: 2566786 - RNA, 19 nt, Homo sapiens
  misc_RNA (1)...(19): siRNA sense strand
aaguacuaguagaagacau

SEQ ID NO: 2566787 - RNA, 19 nt, Homo sapiens
  misc_RNA (1)...(19): siRNA sense strand
acuucugaauguuguggaa

SEQ ID NO: 2566788 - RNA, 19 nt, Homo sapiens
  misc_RNA (1)...(19): siRNA sense strand
ggggagaaaccuuaugaau

SEQ ID NO: 2566789 - RNA, 19 nt, Homo sapiens
  misc_RNA (1)...(19): siRNA sense strand
cgguguuccugcugagcua

SEQ ID NO: 2566790 - RNA, 19 nt, Homo sapiens
  misc_RNA (1)...(19): siRNA sense strand
cauccaagauuuacggcga

SEQ ID NO: 2566791 - RNA, 19 nt, Homo sapiens
  misc_RNA (1)...(19): siRNA sense strand
gcucaagacaccugggaag

SEQ ID NO: 2566792 - RNA, 19 nt, Homo sapiens
  misc_RNA (1)...(19): siRNA sense strand
agguggagacguacaaaga

SEQ ID NO: 2566793 - RNA, 19 nt, Homo sapiens
  misc_RNA (1)...(19): siRNA sense strand
ugaugagggcagauaccua

SEQ ID NO: 2566794 - RNA, 19 nt, Homo sapiens
  misc_RNA (1)...(19): siRNA sense strand
gaaacuaacaagguggaga

SEQ ID NO: 2566795 - RNA, 19 nt, Homo sapiens
  misc_RNA (1)...(19): siRNA sense strand
aaacgcaaggagcaggaaa

SEQ ID NO: 2566796 - RNA, 19 nt, Homo sapiens
  misc_RNA (1)...(19): siRNA sense strand
cgguguuccugcugagcua

SEQ ID NO: 2566797 - RNA, 19 nt, Homo sapiens
  misc_RNA (1)...(19): siRNA sense strand
cauccaagauuuacggcga

SEQ ID NO: 2566798 - RNA, 19 nt, Homo sapiens
  misc_RNA (1)...(19): siRNA sense strand
gcucaagacaccugggaag

SEQ ID NO: 2566799 - RNA, 19 nt, Homo sapiens
  misc_RNA (1)...(19): siRNA sense strand
agguggagacguacaaaga

SEQ ID NO: 2566800 - RNA, 19 nt, Homo sapiens
  misc_RNA (1)...(19): siRNA sense strand
ugaugagggcagauaccua

SEQ ID NO: 2566801 - RNA, 19 nt, Homo sapiens
  misc_RNA (1)...(19): siRNA sense strand
gaaacuaacaagguggaga

SEQ ID NO: 2566802 - RNA, 19 nt, Homo sapiens
  misc_RNA (1)...(19): siRNA sense strand
aaacgcaaggagcaggaaa

SEQ ID NO: 2566803 - RNA, 19 nt, Homo sapiens
  misc_RNA (1)...(19): siRNA sense strand
cgguguuccugcugagcua

SEQ ID NO: 2566804 - RNA, 19 nt, Homo sapiens
  misc_RNA (1)...(19): siRNA sense strand
cauccaagauuuacggcga

SEQ ID NO: 2566805 - RNA, 19 nt, Homo sapiens
  misc_RNA (1)...(19): siRNA sense strand
gcucaagacaccugggaag

SEQ ID NO: 2566806 - RNA, 19 nt, Homo sapiens
  misc_RNA (1)...(19): siRNA sense strand
agguggagacguacaaaga

SEQ ID NO: 2566807 - RNA, 19 nt, Homo sapiens
  misc_RNA (1)...(19): siRNA sense strand
ugaugagggcagauaccua

SEQ ID NO: 2566808 - RNA, 19 nt, Homo sapiens
  misc_RNA (1)...(19): siRNA sense strand
gaaacuaacaagguggaga

SEQ ID NO: 2566809 - RNA, 19 nt, Homo sapiens
  misc_RNA (1)...(19): siRNA sense strand
aaacgcaaggagcaggaaa

SEQ ID NO: 2566810 - RNA, 19 nt, Homo sapiens
  misc_RNA (1)...(19): siRNA sense strand
cgguguuccugcugagcua

SEQ ID NO: 2566811 - RNA, 19 nt, Homo sapiens
  misc_RNA (1)...(19): siRNA sense strand
cauccaagauuuacggcga

SEQ ID NO: 2566812 - RNA, 19 nt, Homo sapiens
  misc_RNA (1)...(19): siRNA sense strand
gcucaagacaccugggaag

SEQ ID NO: 2566813 - RNA, 19 nt, Homo sapiens
  misc_RNA (1)...(19): siRNA sense strand
agguggagacguacaaaga

SEQ ID NO: 2566814 - RNA, 19 nt, Homo sapiens
  misc_RNA (1)...(19): siRNA sense strand
ugaugagggcagauaccua

SEQ ID NO: 2566815 - RNA, 19 nt, Homo sapiens
  misc_RNA (1)...(19): siRNA sense strand
gaaacuaacaagguggaga

SEQ ID NO: 2566816 - RNA, 19 nt, Homo sapiens
  misc_RNA (1)...(19): siRNA sense strand
aaacgcaaggagcaggaaa

SEQ ID NO: 2566817 - RNA, 19 nt, Homo sapiens
  misc_RNA (1)...(19): siRNA sense strand
gugggagccuuuagcgcua

SEQ ID NO: 2566818 - RNA, 19 nt, Homo sapiens
  misc_RNA (1)...(19): siRNA sense strand
aggaggaugagcugggauu

SEQ ID NO: 2566819 - RNA, 19 nt, Homo sapiens
  misc_RNA (1)...(19): siRNA sense strand
caaaauugggguugacgaa

SEQ ID NO: 2566820 - RNA, 19 nt, Homo sapiens
  misc_RNA (1)...(19): siRNA sense strand
aaagaaaccaagaugcuga

SEQ ID NO: 2566821 - RNA, 19 nt, Homo sapiens
  misc_RNA (1)...(19): siRNA sense strand
gcgaagaggaagaggaaaa

SEQ ID NO: 2566822 - RNA, 19 nt, Homo sapiens
  misc_RNA (1)...(19): siRNA sense strand
agaaauacaugaagcccaa

SEQ ID NO: 2566823 - RNA, 19 nt, Homo sapiens
  misc_RNA (1)...(19): siRNA sense strand
aggcauuauuucugcgaga

SEQ ID NO: 2566824 - RNA, 19 nt, Homo sapiens
  misc_RNA (1)...(19): siRNA sense strand
acacagagaaagagcgcga

SEQ ID NO: 2566825 - RNA, 19 nt, Homo sapiens
  misc_RNA (1)...(19): siRNA sense strand
ccgugggaccagaggauau

SEQ ID NO: 2566826 - RNA, 19 nt, Homo sapiens
  misc_RNA (1)...(19): siRNA sense strand
agaaagagcgcgaugcaca

SEQ ID NO: 2566827 - RNA, 19 nt, Homo sapiens
  misc_RNA (1)...(19): siRNA sense strand
ugagcuggacacagagaaa

SEQ ID NO: 2566828 - RNA, 19 nt, Homo sapiens
  misc_RNA (1)...(19): siRNA sense strand
gccagaagauccaggagga

SEQ ID NO: 2566829 - RNA, 19 nt, Homo sapiens
  misc_RNA (1)...(19): siRNA sense strand
aggaggaugacaagaucua

SEQ ID NO: 2566830 - RNA, 19 nt, Homo sapiens
  misc_RNA (1)...(19): siRNA sense strand
ccggaaaagaagcggguga

SEQ ID NO: 2566831 - RNA, 19 nt, Homo sapiens
  misc_RNA (1)...(19): siRNA sense strand
cagaaauacaugaagccca

SEQ ID NO: 2566832 - RNA, 19 nt, Homo sapiens
  misc_RNA (1)...(19): siRNA sense strand
aggauacgucuaugggcaa

SEQ ID NO: 2566833 - RNA, 19 nt, Homo sapiens
  misc_RNA (1)...(19): siRNA sense strand
ggggcaaggaggaugacaa

SEQ ID NO: 2566834 - RNA, 19 nt, Homo sapiens
  misc_RNA (1)...(19): siRNA sense strand
gacaagaucuaucggggaa

SEQ ID NO: 2566835 - RNA, 19 nt, Homo sapiens
  misc_RNA (1)...(19): siRNA sense strand
auacagaagacccgugaca

SEQ ID NO: 2566836 - RNA, 19 nt, Homo sapiens
  misc_RNA (1)...(19): siRNA sense strand
gacccgugacagugguaaa

SEQ ID NO: 2566837 - RNA, 19 nt, Homo sapiens
  misc_RNA (1)...(19): siRNA sense strand
cuugagcagcgaagaggaa

SEQ ID NO: 2566838 - RNA, 19 nt, Homo sapiens
  misc_RNA (1)...(19): siRNA sense strand
ccgacaucuguaaggacua

SEQ ID NO: 2566839 - RNA, 19 nt, Homo sapiens
  misc_RNA (1)...(19): siRNA sense strand
gcaucgagcuacaggagag

SEQ ID NO: 2566840 - RNA, 19 nt, Homo sapiens
  misc_RNA (1)...(19): siRNA sense strand
aaggauacgucuaugggca

SEQ ID NO: 2566841 - RNA, 19 nt, Homo sapiens
  misc_RNA (1)...(19): siRNA sense strand
ugagcagcgaagaggaaga

SEQ ID NO: 2566842 - RNA, 19 nt, Homo sapiens
  misc_RNA (1)...(19): siRNA sense strand
gguggcagaucgaacguga

SEQ ID NO: 2566843 - RNA, 19 nt, Homo sapiens
  misc_RNA (1)...(19): siRNA sense strand
agaucgaacgugagcuuga

SEQ ID NO: 2566844 - RNA, 19 nt, Homo sapiens
  misc_RNA (1)...(19): siRNA sense strand
ggcugaagguauugagcaa

SEQ ID NO: 2566845 - RNA, 19 nt, Homo sapiens
  misc_RNA (1)...(19): siRNA sense strand
acgcaagauuucaggaaga

SEQ ID NO: 2566846 - RNA, 19 nt, Homo sapiens
  misc_RNA (1)...(19): siRNA sense strand
gagaauacacuuaugggaa

SEQ ID NO: 2566847 - RNA, 19 nt, Homo sapiens
  misc_RNA (1)...(19): siRNA sense strand
guauaaaccaggacagaca

SEQ ID NO: 2566848 - RNA, 19 nt, Homo sapiens
  misc_RNA (1)...(19): siRNA sense strand
cauaaagggagguguagaa

SEQ ID NO: 2566849 - RNA, 19 nt, Homo sapiens
  misc_RNA (1)...(19): siRNA sense strand
gagcaguaggucaaggaua

SEQ ID NO: 2566850 - RNA, 19 nt, Homo sapiens
  misc_RNA (1)...(19): siRNA sense strand
ugauaaggaagcugugaaa

SEQ ID NO: 2566851 - RNA, 19 nt, Homo sapiens
  misc_RNA (1)...(19): siRNA sense strand
ccuuagaacucuguggaaa

SEQ ID NO: 2566852 - RNA, 19 nt, Homo sapiens
  misc_RNA (1)...(19): siRNA sense strand
gcacaauggcagagucuca

SEQ ID NO: 2566853 - RNA, 19 nt, Homo sapiens
  misc_RNA (1)...(19): siRNA sense strand
cagcacagauacagagcau

SEQ ID NO: 2566854 - RNA, 19 nt, Homo sapiens
  misc_RNA (1)...(19): siRNA sense strand
gcaggaggucugugaggaa

SEQ ID NO: 2566855 - RNA, 19 nt, Homo sapiens
  misc_RNA (1)...(19): siRNA sense strand
cuuagaacucuguggaaau

SEQ ID NO: 2566856 - RNA, 19 nt, Homo sapiens
  misc_RNA (1)...(19): siRNA sense strand
auaaggaagcugugaaaga

SEQ ID NO: 2566857 - RNA, 19 nt, Homo sapiens
  misc_RNA (1)...(19): siRNA sense strand
gugacaaaucagacgcuaa

SEQ ID NO: 2566858 - RNA, 19 nt, Homo sapiens
  misc_RNA (1)...(19): siRNA sense strand
ccuacaggguggugguaca

SEQ ID NO: 2566859 - RNA, 19 nt, Homo sapiens
  misc_RNA (1)...(19): siRNA sense strand
aaauacaaagggagaagaa

SEQ ID NO: 2566860 - RNA, 19 nt, Homo sapiens
  misc_RNA (1)...(19): siRNA sense strand
cugaagguauugagcaaga

SEQ ID NO: 2566861 - RNA, 19 nt, Homo sapiens
  misc_RNA (1)...(19): siRNA sense strand
aaaccaggacagacaguaa

SEQ ID NO: 2566862 - RNA, 19 nt, Homo sapiens
  misc_RNA (1)...(19): siRNA sense strand
uguggaagugagagacaaa

SEQ ID NO: 2566863 - RNA, 19 nt, Homo sapiens
  misc_RNA (1)...(19): siRNA sense strand
caacaaugccauaaaggga

SEQ ID NO: 2566864 - RNA, 19 nt, Homo sapiens
  misc_RNA (1)...(19): siRNA sense strand
auguggaacaggugacaaa

SEQ ID NO: 2566865 - RNA, 19 nt, Homo sapiens
  misc_RNA (1)...(19): siRNA sense strand
auggagaaguuguuggaga

SEQ ID NO: 2566866 - RNA, 19 nt, Homo sapiens
  misc_RNA (1)...(19): siRNA sense strand
ggguggugguacagacaga

SEQ ID NO: 2566867 - RNA, 19 nt, Homo sapiens
  misc_RNA (1)...(19): siRNA sense strand
cgcaggagaucaaggccaa

SEQ ID NO: 2566868 - RNA, 19 nt, Homo sapiens
  misc_RNA (1)...(19): siRNA sense strand
aagaaaucgaauugcacaa

SEQ ID NO: 2566869 - RNA, 19 nt, Homo sapiens
  misc_RNA (1)...(19): siRNA sense strand
aaugaagcuuagaguggaa

SEQ ID NO: 2566870 - RNA, 19 nt, Homo sapiens
  misc_RNA (1)...(19): siRNA sense strand
gauuucaggaagaggaaca

SEQ ID NO: 2566871 - RNA, 19 nt, Homo sapiens
  misc_RNA (1)...(19): siRNA sense strand
ucaaaguucaggugccaaa

SEQ ID NO: 2566872 - RNA, 19 nt, Homo sapiens
  misc_RNA (1)...(19): siRNA sense strand
ccugaaaccaacaguaaaa

SEQ ID NO: 2566873 - RNA, 19 nt, Homo sapiens
  misc_RNA (1)...(19): siRNA sense strand
agauacagagcauggaaau

SEQ ID NO: 2566874 - RNA, 19 nt, Homo sapiens
  misc_RNA (1)...(19): siRNA sense strand
ugguggaggcugaagguau

SEQ ID NO: 2566875 - RNA, 19 nt, Homo sapiens
  misc_RNA (1)...(19): siRNA sense strand
ggaucaugaagcagcagaa

SEQ ID NO: 2566876 - RNA, 19 nt, Homo sapiens
  misc_RNA (1)...(19): siRNA sense strand
ccuucaccguggaggaauu

SEQ ID NO: 2566877 - RNA, 19 nt, Homo sapiens
  misc_RNA (1)...(19): siRNA sense strand
gggaguugguggcagugaa

SEQ ID NO: 2566878 - RNA, 19 nt, Homo sapiens
  misc_RNA (1)...(19): siRNA sense strand
uggugauuguugauguaaa

SEQ ID NO: 2566879 - RNA, 19 nt, Homo sapiens
  misc_RNA (1)...(19): siRNA sense strand
agacaaacccauguauaaa

SEQ ID NO: 2566880 - RNA, 19 nt, Homo sapiens
  misc_RNA (1)...(19): siRNA sense strand
ggacagaccuggaagucac

SEQ ID NO: 2566881 - RNA, 19 nt, Homo sapiens
  misc_RNA (1)...(19): siRNA sense strand
gggagguguagaagaugaa

SEQ ID NO: 2566882 - RNA, 19 nt, Homo sapiens
  misc_RNA (1)...(19): siRNA sense strand
cagauacagagcauggaaa

SEQ ID NO: 2566883 - RNA, 19 nt, Homo sapiens
  misc_RNA (1)...(19): siRNA sense strand
ggucaaaguucaggugcca

SEQ ID NO: 2566884 - RNA, 19 nt, Homo sapiens
  misc_RNA (1)...(19): siRNA sense strand
gggaugggauugaaggugu

SEQ ID NO: 2566885 - RNA, 19 nt, Homo sapiens
  misc_RNA (1)...(19): siRNA sense strand
caggacagacaguaagauu

SEQ ID NO: 2566886 - RNA, 19 nt, Homo sapiens
  misc_RNA (1)...(19): siRNA sense strand
caaauuuccaaguagacaa

SEQ ID NO: 2566887 - RNA, 19 nt, Homo sapiens
  misc_RNA (1)...(19): siRNA sense strand
ccuucaugguucugcaaga

SEQ ID NO: 2566888 - RNA, 19 nt, Homo sapiens
  misc_RNA (1)...(19): siRNA sense strand
cuaccaguaucucgguuaa

SEQ ID NO: 2566889 - RNA, 19 nt, Homo sapiens
  misc_RNA (1)...(19): siRNA sense strand
ggaugggauugaagguguu

SEQ ID NO: 2566890 - RNA, 19 nt, Homo sapiens
  misc_RNA (1)...(19): siRNA sense strand
auacaaagggagaagaauc

SEQ ID NO: 2566891 - RNA, 19 nt, Homo sapiens
  misc_RNA (1)...(19): siRNA sense strand
cccagaugcagaaggacaa

SEQ ID NO: 2566892 - RNA, 19 nt, Homo sapiens
  misc_RNA (1)...(19): siRNA sense strand
ugccauaaagggaggugua

SEQ ID NO: 2566893 - RNA, 19 nt, Homo sapiens
  misc_RNA (1)...(19): siRNA sense strand
cggacagaagugagcaaca

SEQ ID NO: 2566894 - RNA, 19 nt, Homo sapiens
  misc_RNA (1)...(19): siRNA sense strand
cccaagaagaaaucgaauu

SEQ ID NO: 2566895 - RNA, 19 nt, Homo sapiens
  misc_RNA (1)...(19): siRNA sense strand
gagccuguguagaaaauua

SEQ ID NO: 2566896 - RNA, 19 nt, Homo sapiens
  misc_RNA (1)...(19): siRNA sense strand
uggaccagcaggaggaaga

SEQ ID NO: 2566897 - RNA, 19 nt, Homo sapiens
  misc_RNA (1)...(19): siRNA sense strand
cagugagugcagaggcaau

SEQ ID NO: 2566898 - RNA, 19 nt, Homo sapiens
  misc_RNA (1)...(19): siRNA sense strand
gaaaugagguuguugaggu

SEQ ID NO: 2566899 - RNA, 19 nt, Homo sapiens
  misc_RNA (1)...(19): siRNA sense strand
auucauggguagcagaaga

SEQ ID NO: 2566900 - RNA, 19 nt, Homo sapiens
  misc_RNA (1)...(19): siRNA sense strand
ccagcaggaggaagaacaa

SEQ ID NO: 2566901 - RNA, 19 nt, Homo sapiens
  misc_RNA (1)...(19): siRNA sense strand
aggaggaagaacaaggaca

SEQ ID NO: 2566902 - RNA, 19 nt, Homo sapiens
  misc_RNA (1)...(19): siRNA sense strand
gaaaagacacagucaucaa

SEQ ID NO: 2566903 - RNA, 19 nt, Homo sapiens
  misc_RNA (1)...(19): siRNA sense strand
ccaaaaugcuccagauuac

SEQ ID NO: 2566904 - RNA, 19 nt, Homo sapiens
  misc_RNA (1)...(19): siRNA sense strand
ccaguaucucgguuaauaa

SEQ ID NO: 2566905 - RNA, 19 nt, Homo sapiens
  misc_RNA (1)...(19): siRNA sense strand
ccaacaaguacacaccaaa

SEQ ID NO: 2566906 - RNA, 19 nt, Homo sapiens
  misc_RNA (1)...(19): siRNA sense strand
ccucaauuaggcacauaua

SEQ ID NO: 2566907 - RNA, 19 nt, Homo sapiens
  misc_RNA (1)...(19): siRNA sense strand
agggagguguagaagauga

SEQ ID NO: 2566908 - RNA, 19 nt, Homo sapiens
  misc_RNA (1)...(19): siRNA sense strand
auagacaggccaugggaga

SEQ ID NO: 2566909 - RNA, 19 nt, Homo sapiens
  misc_RNA (1)...(19): siRNA sense strand
ucaaauguggucaaagaau

SEQ ID NO: 2566910 - RNA, 19 nt, Homo sapiens
  misc_RNA (1)...(19): siRNA sense strand
cagccuggaauguagcaaa

SEQ ID NO: 2566911 - RNA, 19 nt, Homo sapiens
  misc_RNA (1)...(19): siRNA sense strand
gugccaaagauaaucagua

SEQ ID NO: 2566912 - RNA, 19 nt, Homo sapiens
  misc_RNA (1)...(19): siRNA sense strand
cugugaaugacgccaauua

SEQ ID NO: 2566913 - RNA, 19 nt, Homo sapiens
  misc_RNA (1)...(19): siRNA sense strand
uuacagaggugcagcagga

SEQ ID NO: 2566914 - RNA, 19 nt, Homo sapiens
  misc_RNA (1)...(19): siRNA sense strand
ugauaacuauugaugggaa

SEQ ID NO: 2566915 - RNA, 19 nt, Homo sapiens
  misc_RNA (1)...(19): siRNA sense strand
agaaucuagaagagaagua

SEQ ID NO: 2566916 - RNA, 19 nt, Homo sapiens
  misc_RNA (1)...(19): siRNA sense strand
aggugcagcaggagcuuua

SEQ ID NO: 2566917 - RNA, 19 nt, Homo sapiens
  misc_RNA (1)...(19): siRNA sense strand
guugguaaaucaugcuuau

SEQ ID NO: 2566918 - RNA, 19 nt, Homo sapiens
  misc_RNA (1)...(19): siRNA sense strand
uugaugggaaacagauaaa

SEQ ID NO: 2566919 - RNA, 19 nt, Homo sapiens
  misc_RNA (1)...(19): siRNA sense strand
uauugaugggaaacagaua

SEQ ID NO: 2566920 - RNA, 19 nt, Homo sapiens
  misc_RNA (1)...(19): siRNA sense strand
agacaagagguuucagcca

SEQ ID NO: 2566921 - RNA, 19 nt, Homo sapiens
  misc_RNA (1)...(19): siRNA sense strand
ccgaggagauagaacgaga

SEQ ID NO: 2566922 - RNA, 19 nt, Homo sapiens
  misc_RNA (1)...(19): siRNA sense strand
cugcgaaggcugcuggaua

SEQ ID NO: 2566923 - RNA, 19 nt, Homo sapiens
  misc_RNA (1)...(19): siRNA sense strand
agaaacagcugaagcagau

SEQ ID NO: 2566924 - RNA, 19 nt, Homo sapiens
  misc_RNA (1)...(19): siRNA sense strand
aaaaugagccagagagaau

SEQ ID NO: 2566925 - RNA, 19 nt, Homo sapiens
  misc_RNA (1)...(19): siRNA sense strand
gcacagagaagauucggaa

SEQ ID NO: 2566926 - RNA, 19 nt, Homo sapiens
  misc_RNA (1)...(19): siRNA sense strand
uagcgaggagagugagaaa

SEQ ID NO: 2566927 - RNA, 19 nt, Homo sapiens
  misc_RNA (1)...(19): siRNA sense strand
cguuacaagcacaggauca

SEQ ID NO: 2566928 - RNA, 19 nt, Homo sapiens
  misc_RNA (1)...(19): siRNA sense strand
ccgggauuccuaugagaaa

SEQ ID NO: 2566929 - RNA, 19 nt, Homo sapiens
  misc_RNA (1)...(19): siRNA sense strand
acgacuuauucaagagaga

SEQ ID NO: 2566930 - RNA, 19 nt, Homo sapiens
  misc_RNA (1)...(19): siRNA sense strand
uguccagagaacagauaaa

SEQ ID NO: 2566931 - RNA, 19 nt, Homo sapiens
  misc_RNA (1)...(19): siRNA sense strand
cugaagaccuagaggagcu

SEQ ID NO: 2566932 - RNA, 19 nt, Homo sapiens
  misc_RNA (1)...(19): siRNA sense strand
ccaaaaugagccagagaga

SEQ ID NO: 2566933 - RNA, 19 nt, Homo sapiens
  misc_RNA (1)...(19): siRNA sense strand
augaagauccagaagaaaa

SEQ ID NO: 2566934 - RNA, 19 nt, Homo sapiens
  misc_RNA (1)...(19): siRNA sense strand
cugagaaagaauugcccaa

SEQ ID NO: 2566935 - RNA, 19 nt, Homo sapiens
  misc_RNA (1)...(19): siRNA sense strand
cagaaacagcugaagcaga

SEQ ID NO: 2566936 - RNA, 19 nt, Homo sapiens
  misc_RNA (1)...(19): siRNA sense strand
agcugaagcagaugauuaa

SEQ ID NO: 2566937 - RNA, 19 nt, Homo sapiens
  misc_RNA (1)...(19): siRNA sense strand
ugauuaaggauuuagccaa

SEQ ID NO: 2566938 - RNA, 19 nt, Homo sapiens
  misc_RNA (1)...(19): siRNA sense strand
ccugguaaccgaggagaua

SEQ ID NO: 2566939 - RNA, 19 nt, Homo sapiens
  misc_RNA (1)...(19): siRNA sense strand
ucgagaagauggaggacac

SEQ ID NO: 2566940 - RNA, 19 nt, Homo sapiens
  misc_RNA (1)...(19): siRNA sense strand
gaaaggacguucaggcucu

SEQ ID NO: 2566941 - RNA, 19 nt, Homo sapiens
  misc_RNA (1)...(19): siRNA sense strand
ccaagaucaaucaguacaa

SEQ ID NO: 2566942 - RNA, 19 nt, Homo sapiens
  misc_RNA (1)...(19): siRNA sense strand
ggagagucuugacggccua

SEQ ID NO: 2566943 - RNA, 19 nt, Homo sapiens
  misc_RNA (1)...(19): siRNA sense strand
gcagcaaggaugauggcca

SEQ ID NO: 2566944 - RNA, 19 nt, Homo sapiens
  misc_RNA (1)...(19): siRNA sense strand
ccuaugagaaauuuggaga

SEQ ID NO: 2566945 - RNA, 19 nt, Homo sapiens
  misc_RNA (1)...(19): siRNA sense strand
uggugagcaucgagaagau

SEQ ID NO: 2566946 - RNA, 19 nt, Homo sapiens
  misc_RNA (1)...(19): siRNA sense strand
ggagauagaacgagaccug

SEQ ID NO: 2566947 - RNA, 19 nt, Homo sapiens
  misc_RNA (1)...(19): siRNA sense strand
cugaacuuaagcugaguaa

SEQ ID NO: 2566948 - RNA, 19 nt, Homo sapiens
  misc_RNA (1)...(19): siRNA sense strand
aagccagagcacagaauga

SEQ ID NO: 2566949 - RNA, 19 nt, Homo sapiens
  misc_RNA (1)...(19): siRNA sense strand
cugaacagucauuagucaa

SEQ ID NO: 2566950 - RNA, 19 nt, Homo sapiens
  misc_RNA (1)...(19): siRNA sense strand
acgggaaucugguggagga

SEQ ID NO: 2566951 - RNA, 19 nt, Homo sapiens
  misc_RNA (1)...(19): siRNA sense strand
aggauuuagccaaagaaaa

SEQ ID NO: 2566952 - RNA, 19 nt, Homo sapiens
  misc_RNA (1)...(19): siRNA sense strand
ugguaaccgaggagauaga

SEQ ID NO: 2566953 - RNA, 19 nt, Homo sapiens
  misc_RNA (1)...(19): siRNA sense strand
ccugaaucuuugcgaggga

SEQ ID NO: 2566954 - RNA, 19 nt, Homo sapiens
  misc_RNA (1)...(19): siRNA sense strand
uggugaugcaguugauuau

SEQ ID NO: 2566955 - RNA, 19 nt, Homo sapiens
  misc_RNA (1)...(19): siRNA sense strand
caugaagauccagaagaaa

SEQ ID NO: 2566956 - RNA, 19 nt, Homo sapiens
  misc_RNA (1)...(19): siRNA sense strand
uugaaaagccacuggacau

SEQ ID NO: 2566957 - RNA, 19 nt, Homo sapiens
  misc_RNA (1)...(19): siRNA sense strand
ugaagcagguccacgccaa

SEQ ID NO: 2566958 - RNA, 19 nt, Homo sapiens
  misc_RNA (1)...(19): siRNA sense strand
ggagagugagaaagagaag

SEQ ID NO: 2566959 - RNA, 19 nt, Homo sapiens
  misc_RNA (1)...(19): siRNA sense strand
caguauguuccaugaagau

SEQ ID NO: 2566960 - RNA, 19 nt, Homo sapiens
  misc_RNA (1)...(19): siRNA sense strand
gcagaaagggacuggacug

SEQ ID NO: 2566961 - RNA, 19 nt, Homo sapiens
  misc_RNA (1)...(19): siRNA sense strand
aggucaaacugcaggacuu

SEQ ID NO: 2566962 - RNA, 19 nt, Homo sapiens
  misc_RNA (1)...(19): siRNA sense strand
caaccaaggugaagcucga

SEQ ID NO: 2566963 - RNA, 19 nt, Homo sapiens
  misc_RNA (1)...(19): siRNA sense strand
ucaaaacagaggaggacua

SEQ ID NO: 2566964 - RNA, 19 nt, Homo sapiens
  misc_RNA (1)...(19): siRNA sense strand
ggaagcacuuucucggcaa

SEQ ID NO: 2566965 - RNA, 19 nt, Homo sapiens
  misc_RNA (1)...(19): siRNA sense strand
acacaggccuggagagcgu

SEQ ID NO: 2566966 - RNA, 19 nt, Homo sapiens
  misc_RNA (1)...(19): siRNA sense strand
aagcaggauggaugaacaa

SEQ ID NO: 2566967 - RNA, 19 nt, Homo sapiens
  misc_RNA (1)...(19): siRNA sense strand
cuucagcaccaaugaggaa

SEQ ID NO: 2566968 - RNA, 19 nt, Homo sapiens
  misc_RNA (1)...(19): siRNA sense strand
uggaggagacggagggugu

SEQ ID NO: 2566969 - RNA, 19 nt, Homo sapiens
  misc_RNA (1)...(19): siRNA sense strand
gugaagacgucaaugugga

SEQ ID NO: 2566970 - RNA, 19 nt, Homo sapiens
  misc_RNA (1)...(19): siRNA sense strand
ccgacaugaucgcguccaa

SEQ ID NO: 2566971 - RNA, 19 nt, Homo sapiens
  misc_RNA (1)...(19): siRNA sense strand
uggccaaggcggcuggaau

SEQ ID NO: 2566972 - RNA, 19 nt, Homo sapiens
  misc_RNA (1)...(19): siRNA sense strand
cugcgugucccgagaucaa

SEQ ID NO: 2566973 - RNA, 19 nt, Homo sapiens
  misc_RNA (1)...(19): siRNA sense strand
uugagaagaugcagggaag

SEQ ID NO: 2566974 - RNA, 19 nt, Homo sapiens
  misc_RNA (1)...(19): siRNA sense strand
acgaggacaagauggagaa

SEQ ID NO: 2566975 - RNA, 19 nt, Homo sapiens
  misc_RNA (1)...(19): siRNA sense strand
gcuacuggauugagggcac

SEQ ID NO: 2566976 - RNA, 19 nt, Homo sapiens
  misc_RNA (1)...(19): siRNA sense strand
agaacauacaggaggugca

SEQ ID NO: 2566977 - RNA, 19 nt, Homo sapiens
  misc_RNA (1)...(19): siRNA sense strand
cggcaauaaagcaaagaaa

SEQ ID NO: 2566978 - RNA, 19 nt, Homo sapiens
  misc_RNA (1)...(19): siRNA sense strand
ugucagaggaggagaugaa

SEQ ID NO: 2566979 - RNA, 19 nt, Homo sapiens
  misc_RNA (1)...(19): siRNA sense strand
auacaaaugugaagggcga

SEQ ID NO: 2566980 - RNA, 19 nt, Homo sapiens
  misc_RNA (1)...(19): siRNA sense strand
gaaaaggaaaagugagaau

SEQ ID NO: 2566981 - RNA, 19 nt, Homo sapiens
  misc_RNA (1)...(19): siRNA sense strand
gcaaagaaacaaaagacaa

SEQ ID NO: 2566982 - RNA, 19 nt, Homo sapiens
  misc_RNA (1)...(19): siRNA sense strand
ccaccauauugcaaagcua

SEQ ID NO: 2566983 - RNA, 19 nt, Homo sapiens
  misc_RNA (1)...(19): siRNA sense strand
uguucaagauagucaguau

SEQ ID NO: 2566984 - RNA, 19 nt, Homo sapiens
  misc_RNA (1)...(19): siRNA sense strand
gaugcaguugugagagaaa

SEQ ID NO: 2566985 - RNA, 19 nt, Homo sapiens
  misc_RNA (1)...(19): siRNA sense strand
ugagaauaccuguugggaa

SEQ ID NO: 2566986 - RNA, 19 nt, Homo sapiens
  misc_RNA (1)...(19): siRNA sense strand
uggaaaaggaaaagugaga

SEQ ID NO: 2566987 - RNA, 19 nt, Homo sapiens
  misc_RNA (1)...(19): siRNA sense strand
gugaauaugaugacaacca

SEQ ID NO: 2566988 - RNA, 19 nt, Homo sapiens
  misc_RNA (1)...(19): siRNA sense strand
agguauuggcaguaugcaa

SEQ ID NO: 2566989 - RNA, 19 nt, Homo sapiens
  misc_RNA (1)...(19): siRNA sense strand
caagaauaaaggcaggaau

SEQ ID NO: 2566990 - RNA, 19 nt, Homo sapiens
  misc_RNA (1)...(19): siRNA sense strand
cgguucaauuggagaagga

SEQ ID NO: 2566991 - RNA, 19 nt, Homo sapiens
  misc_RNA (1)...(19): siRNA sense strand
ggggaaugcguuuuagaua

SEQ ID NO: 2566992 - RNA, 19 nt, Homo sapiens
  misc_RNA (1)...(19): siRNA sense strand
ugaagcagaauuuggacaa

SEQ ID NO: 2566993 - RNA, 19 nt, Homo sapiens
  misc_RNA (1)...(19): siRNA sense strand
uggaagugucagaggagga

SEQ ID NO: 2566994 - RNA, 19 nt, Homo sapiens
  misc_RNA (1)...(19): siRNA sense strand
cucaugauuuaguuggaaa

SEQ ID NO: 2566995 - RNA, 19 nt, Homo sapiens
  misc_RNA (1)...(19): siRNA sense strand
ggaccaucaaacaguacua

SEQ ID NO: 2566996 - RNA, 19 nt, Homo sapiens
  misc_RNA (1)...(19): siRNA sense strand
aagaauaaaggcaggaauc

SEQ ID NO: 2566997 - RNA, 19 nt, Homo sapiens
  misc_RNA (1)...(19): siRNA sense strand
agcagaauuuggacaagaa

SEQ ID NO: 2566998 - RNA, 19 nt, Homo sapiens
  misc_RNA (1)...(19): siRNA sense strand
acugcagaauuaaggauuu

SEQ ID NO: 2566999 - RNA, 19 nt, Homo sapiens
  misc_RNA (1)...(19): siRNA sense strand
aguucagaaagaugacaua

SEQ ID NO: 2567000 - RNA, 19 nt, Homo sapiens
  misc_RNA (1)...(19): siRNA sense strand
augaugcaguugugagaga

SEQ ID NO: 2567001 - RNA, 19 nt, Homo sapiens
  misc_RNA (1)...(19): siRNA sense strand
acccguauauagagauaau

SEQ ID NO: 2567002 - RNA, 19 nt, Homo sapiens
  misc_RNA (1)...(19): siRNA sense strand
agaaaugccuacagggguu

SEQ ID NO: 2567003 - RNA, 19 nt, Homo sapiens
  misc_RNA (1)...(19): siRNA sense strand
gagcaugaaucuugaaaac

SEQ ID NO: 2567004 - RNA, 19 nt, Homo sapiens
  misc_RNA (1)...(19): siRNA sense strand
ccaggaucacguagaaaca

SEQ ID NO: 2567005 - RNA, 19 nt, Homo sapiens
  misc_RNA (1)...(19): siRNA sense strand
acaacaaugccgaugacau

SEQ ID NO: 2567006 - RNA, 19 nt, Homo sapiens
  misc_RNA (1)...(19): siRNA sense strand
gucuaauuguucugugaau

SEQ ID NO: 2567007 - RNA, 19 nt, Homo sapiens
  misc_RNA (1)...(19): siRNA sense strand
gcuacuaugaagcagaauu

SEQ ID NO: 2567008 - RNA, 19 nt, Homo sapiens
  misc_RNA (1)...(19): siRNA sense strand
gaacaugguaauuugacga

SEQ ID NO: 2567009 - RNA, 19 nt, Homo sapiens
  misc_RNA (1)...(19): siRNA sense strand
caacccaggcagaggggaa

SEQ ID NO: 2567010 - RNA, 19 nt, Homo sapiens
  misc_RNA (1)...(19): siRNA sense strand
guguuagacccaagagacu

SEQ ID NO: 2567011 - RNA, 19 nt, Homo sapiens
  misc_RNA (1)...(19): siRNA sense strand
auuaaggauuugucgugua

SEQ ID NO: 2567012 - RNA, 19 nt, Homo sapiens
  misc_RNA (1)...(19): siRNA sense strand
agaaagaugacauagaagu

SEQ ID NO: 2567013 - RNA, 19 nt, Homo sapiens
  misc_RNA (1)...(19): siRNA sense strand
ugaacgauugggaagcaaa

SEQ ID NO: 2567014 - RNA, 19 nt, Homo sapiens
  misc_RNA (1)...(19): siRNA sense strand
auacaaacccacugaguag

SEQ ID NO: 2567015 - RNA, 19 nt, Homo sapiens
  misc_RNA (1)...(19): siRNA sense strand
auccaagacuucugagcau

SEQ ID NO: 2567016 - RNA, 19 nt, Homo sapiens
  misc_RNA (1)...(19): siRNA sense strand
ggaaaagacugcagagacg

SEQ ID NO: 2567017 - RNA, 19 nt, Homo sapiens
  misc_RNA (1)...(19): siRNA sense strand
gcagugacagcaugggaga

SEQ ID NO: 2567018 - RNA, 19 nt, Homo sapiens
  misc_RNA (1)...(19): siRNA sense strand
aaaaugagcaauugaguga

SEQ ID NO: 2567019 - RNA, 19 nt, Homo sapiens
  misc_RNA (1)...(19): siRNA sense strand
gaccaggaaguuagugaau

SEQ ID NO: 2567020 - RNA, 19 nt, Homo sapiens
  misc_RNA (1)...(19): siRNA sense strand
gaacgauugggaagcaaaa

SEQ ID NO: 2567021 - RNA, 19 nt, Homo sapiens
  misc_RNA (1)...(19): siRNA sense strand
cuucuaauucgcaagguau

SEQ ID NO: 2567022 - RNA, 19 nt, Homo sapiens
  misc_RNA (1)...(19): siRNA sense strand
ucagaggaggagaugaaau

SEQ ID NO: 2567023 - RNA, 19 nt, Homo sapiens
  misc_RNA (1)...(19): siRNA sense strand
aguuaauuuuccugagaga

SEQ ID NO: 2567024 - RNA, 19 nt, Homo sapiens
  misc_RNA (1)...(19): siRNA sense strand
cugcagagacggcuacuau

SEQ ID NO: 2567025 - RNA, 19 nt, Homo sapiens
  misc_RNA (1)...(19): siRNA sense strand
aggcaggaaucaauccauu

SEQ ID NO: 2567026 - RNA, 19 nt, Homo sapiens
  misc_RNA (1)...(19): siRNA sense strand
aagaauuguggaaguguca

SEQ ID NO: 2567027 - RNA, 19 nt, Homo sapiens
  misc_RNA (1)...(19): siRNA sense strand
ggagagacugauaauccaa

SEQ ID NO: 2567028 - RNA, 19 nt, Homo sapiens
  misc_RNA (1)...(19): siRNA sense strand
ugaagaagaggaagggcua

SEQ ID NO: 2567029 - RNA, 19 nt, Homo sapiens
  misc_RNA (1)...(19): siRNA sense strand
agagcaagaccaagggcua

SEQ ID NO: 2567030 - RNA, 19 nt, Homo sapiens
  misc_RNA (1)...(19): siRNA sense strand
cggacgacaugaagggcau

SEQ ID NO: 2567031 - RNA, 19 nt, Homo sapiens
  misc_RNA (1)...(19): siRNA sense strand
acaagaaguaccuggccaa

SEQ ID NO: 2567032 - RNA, 19 nt, Homo sapiens
  misc_RNA (1)...(19): siRNA sense strand
ccugcaagaagcugaacaa

SEQ ID NO: 2567033 - RNA, 19 nt, Homo sapiens
  misc_RNA (1)...(19): siRNA sense strand
acaacgugaaugaggagaa

SEQ ID NO: 2567034 - RNA, 19 nt, Homo sapiens
  misc_RNA (1)...(19): siRNA sense strand
uggagaaggacccggagaa

SEQ ID NO: 2567035 - RNA, 19 nt, Homo sapiens
  misc_RNA (1)...(19): siRNA sense strand
agaacaaggagcugaagca

SEQ ID NO: 2567036 - RNA, 19 nt, Homo sapiens
  misc_RNA (1)...(19): siRNA sense strand
cugucuacgcaaaggauau

SEQ ID NO: 2567037 - RNA, 19 nt, Homo sapiens
  misc_RNA (1)...(19): siRNA sense strand
agaugaaggcgaccggcaa

SEQ ID NO: 2567038 - RNA, 19 nt, Homo sapiens
  misc_RNA (1)...(19): siRNA sense strand
uggagaacaaggagcugaa

SEQ ID NO: 2567039 - RNA, 19 nt, Homo sapiens
  misc_RNA (1)...(19): siRNA sense strand
ccgugaaguacccugauaa

SEQ ID NO: 2567040 - RNA, 19 nt, Homo sapiens
  misc_RNA (1)...(19): siRNA sense strand
acaaugaccuccagccaca

SEQ ID NO: 2567041 - RNA, 19 nt, Homo sapiens
  misc_RNA (1)...(19): siRNA sense strand
acaucuacaacgugaauga

SEQ ID NO: 2567042 - RNA, 19 nt, Homo sapiens
  misc_RNA (1)...(19): siRNA sense strand
agagaugagaccugcgaca

SEQ ID NO: 2567043 - RNA, 19 nt, Homo sapiens
  misc_RNA (1)...(19): siRNA sense strand
acacagaauucuuucagga

SEQ ID NO: 2567044 - RNA, 19 nt, Homo sapiens
  misc_RNA (1)...(19): siRNA sense strand
uggagaccgugguggccaa

SEQ ID NO: 2567045 - RNA, 19 nt, Homo sapiens
  misc_RNA (1)...(19): siRNA sense strand
cugaagaagaggaagggcu

SEQ ID NO: 2567046 - RNA, 19 nt, Homo sapiens
  misc_RNA (1)...(19): siRNA sense strand
acgacuucuccguggacua

SEQ ID NO: 2567047 - RNA, 19 nt, Homo sapiens
  misc_RNA (1)...(19): siRNA sense strand
caaaggauauucaggacgu

SEQ ID NO: 2567048 - RNA, 19 nt, Homo sapiens
  misc_RNA (1)...(19): siRNA sense strand
cugaacaagaagcggcuga

SEQ ID NO: 2567049 - RNA, 19 nt, Homo sapiens
  misc_RNA (1)...(19): siRNA sense strand
ccgagaacgugcugcugga

SEQ ID NO: 2567050 - RNA, 19 nt, Homo sapiens
  misc_RNA (1)...(19): siRNA sense strand
caggaggagaugaucgaga

SEQ ID NO: 2567051 - RNA, 19 nt, Homo sapiens
  misc_RNA (1)...(19): siRNA sense strand
uugaagaagaagagagaaa

SEQ ID NO: 2567052 - RNA, 19 nt, Homo sapiens
  misc_RNA (1)...(19): siRNA sense strand
cccuggugcugguggguaa

SEQ ID NO: 2567053 - RNA, 19 nt, Homo sapiens
  misc_RNA (1)...(19): siRNA sense strand
cuuugaagaagaagagaga

SEQ ID NO: 2567054 - RNA, 19 nt, Homo sapiens
  misc_RNA (1)...(19): siRNA sense strand
guacaugcgagguggggaa

SEQ ID NO: 2567055 - RNA, 19 nt, Homo sapiens
  misc_RNA (1)...(19): siRNA sense strand
aggcuugagucuugcccaa

SEQ ID NO: 2567056 - RNA, 19 nt, Homo sapiens
  misc_RNA (1)...(19): siRNA sense strand
cagccaugcgggagcagua

SEQ ID NO: 2567057 - RNA, 19 nt, Homo sapiens
  misc_RNA (1)...(19): siRNA sense strand
guaaaagcgcaaugacaau

SEQ ID NO: 2567058 - RNA, 19 nt, Homo sapiens
  misc_RNA (1)...(19): siRNA sense strand
ccuacaaagcuguggccuu

SEQ ID NO: 2567059 - RNA, 19 nt, Homo sapiens
  misc_RNA (1)...(19): siRNA sense strand
uggacagggcugaggugua

SEQ ID NO: 2567060 - RNA, 19 nt, Homo sapiens
  misc_RNA (1)...(19): siRNA sense strand
ggggaguucugauggggaa

SEQ ID NO: 2567061 - RNA, 19 nt, Homo sapiens
  misc_RNA (1)...(19): siRNA sense strand
ucugcauguuugacagcaa

SEQ ID NO: 2567062 - RNA, 19 nt, Homo sapiens
  misc_RNA (1)...(19): siRNA sense strand
gagagaaagaugagagaga

SEQ ID NO: 2567063 - RNA, 19 nt, Homo sapiens
  misc_RNA (1)...(19): siRNA sense strand
ggcaaaauuuagagagaaa

SEQ ID NO: 2567064 - RNA, 19 nt, Homo sapiens
  misc_RNA (1)...(19): siRNA sense strand
ugauaaaggcaaaggaaaa

SEQ ID NO: 2567065 - RNA, 19 nt, Homo sapiens
  misc_RNA (1)...(19): siRNA sense strand
uuggagaagcugagagaaa

SEQ ID NO: 2567066 - RNA, 19 nt, Homo sapiens
  misc_RNA (1)...(19): siRNA sense strand
cagcaaagggcuuggaaca

SEQ ID NO: 2567067 - RNA, 19 nt, Homo sapiens
  misc_RNA (1)...(19): siRNA sense strand
gcuugaggcagcugagaaa

SEQ ID NO: 2567068 - RNA, 19 nt, Homo sapiens
  misc_RNA (1)...(19): siRNA sense strand
cugauaaaggcaaaggaaa

SEQ ID NO: 2567069 - RNA, 19 nt, Homo sapiens
  misc_RNA (1)...(19): siRNA sense strand
agaugaagguggagaugau

SEQ ID NO: 2567070 - RNA, 19 nt, Homo sapiens
  misc_RNA (1)...(19): siRNA sense strand
aagcagaagaugaagcuaa

SEQ ID NO: 2567071 - RNA, 19 nt, Homo sapiens
  misc_RNA (1)...(19): siRNA sense strand
cagagaaguaugcaagaaa

SEQ ID NO: 2567072 - RNA, 19 nt, Homo sapiens
  misc_RNA (1)...(19): siRNA sense strand
guauaauggaacuggagaa

SEQ ID NO: 2567073 - RNA, 19 nt, Homo sapiens
  misc_RNA (1)...(19): siRNA sense strand
agaaacaguccaagaagaa

SEQ ID NO: 2567074 - RNA, 19 nt, Homo sapiens
  misc_RNA (1)...(19): siRNA sense strand
aggaggaauuuguggauga

SEQ ID NO: 2567075 - RNA, 19 nt, Homo sapiens
  misc_RNA (1)...(19): siRNA sense strand
aaucaagaaaggagaaaga

SEQ ID NO: 2567076 - RNA, 19 nt, Homo sapiens
  misc_RNA (1)...(19): siRNA sense strand
cuucaaaguuaacaaggaa

SEQ ID NO: 2567077 - RNA, 19 nt, Homo sapiens
  misc_RNA (1)...(19): siRNA sense strand
gcucaaaaucggagacaga

SEQ ID NO: 2567078 - RNA, 19 nt, Homo sapiens
  misc_RNA (1)...(19): siRNA sense strand
cagcugagaaacagauuaa

SEQ ID NO: 2567079 - RNA, 19 nt, Homo sapiens
  misc_RNA (1)...(19): siRNA sense strand
cuaaagagauggaagccuu

SEQ ID NO: 2567080 - RNA, 19 nt, Homo sapiens
  misc_RNA (1)...(19): siRNA sense strand
aaaccaagcaugaagaaau

SEQ ID NO: 2567081 - RNA, 19 nt, Homo sapiens
  misc_RNA (1)...(19): siRNA sense strand
cagccaaagccaaggccaa

SEQ ID NO: 2567082 - RNA, 19 nt, Homo sapiens
  misc_RNA (1)...(19): siRNA sense strand
acuccugacuguagagaau

SEQ ID NO: 2567083 - RNA, 19 nt, Homo sapiens
  misc_RNA (1)...(19): siRNA sense strand
ucugaaagaaagagaugua

SEQ ID NO: 2567084 - RNA, 19 nt, Homo sapiens
  misc_RNA (1)...(19): siRNA sense strand
acacagaggacaagcugaa

SEQ ID NO: 2567085 - RNA, 19 nt, Homo sapiens
  misc_RNA (1)...(19): siRNA sense strand
aaauaaagguaaaggagcu

SEQ ID NO: 2567086 - RNA, 19 nt, Homo sapiens
  misc_RNA (1)...(19): siRNA sense strand
augaagaugucaggagaua

SEQ ID NO: 2567087 - RNA, 19 nt, Homo sapiens
  misc_RNA (1)...(19): siRNA sense strand
augcaaaacuacagaauga

SEQ ID NO: 2567088 - RNA, 19 nt, Homo sapiens
  misc_RNA (1)...(19): siRNA sense strand
cuguauaccgccacggaaa

SEQ ID NO: 2567089 - RNA, 19 nt, Homo sapiens
  misc_RNA (1)...(19): siRNA sense strand
cagaauuugcugaacuaaa

SEQ ID NO: 2567090 - RNA, 19 nt, Homo sapiens
  misc_RNA (1)...(19): siRNA sense strand
uuacuaaccuucaggaaaa

SEQ ID NO: 2567091 - RNA, 19 nt, Homo sapiens
  misc_RNA (1)...(19): siRNA sense strand
ggaaagaaauagaaacccu

SEQ ID NO: 2567092 - RNA, 19 nt, Homo sapiens
  misc_RNA (1)...(19): siRNA sense strand
cauaaaagacgcagaugaa

SEQ ID NO: 2567093 - RNA, 19 nt, Homo sapiens
  misc_RNA (1)...(19): siRNA sense strand
ggugcaagcagaagaugaa

SEQ ID NO: 2567094 - RNA, 19 nt, Homo sapiens
  misc_RNA (1)...(19): siRNA sense strand
ucaagaaaggagaaagaga

SEQ ID NO: 2567095 - RNA, 19 nt, Homo sapiens
  misc_RNA (1)...(19): siRNA sense strand
uggaagaacugaagguauc

SEQ ID NO: 2567096 - RNA, 19 nt, Homo sapiens
  misc_RNA (1)...(19): siRNA sense strand
cgaugaauuacgucugaaa

SEQ ID NO: 2567097 - RNA, 19 nt, Homo sapiens
  misc_RNA (1)...(19): siRNA sense strand
aagaaagagauguagaaga

SEQ ID NO: 2567098 - RNA, 19 nt, Homo sapiens
  misc_RNA (1)...(19): siRNA sense strand
cuuacaaaggcuaaugaaa

SEQ ID NO: 2567099 - RNA, 19 nt, Homo sapiens
  misc_RNA (1)...(19): siRNA sense strand
ccagcaagaagcagcuaaa

SEQ ID NO: 2567100 - RNA, 19 nt, Homo sapiens
  misc_RNA (1)...(19): siRNA sense strand
gagaaagaugagagagaag

SEQ ID NO: 2567101 - RNA, 19 nt, Homo sapiens
  misc_RNA (1)...(19): siRNA sense strand
agccaaaugcaaugaacaa

SEQ ID NO: 2567102 - RNA, 19 nt, Homo sapiens
  misc_RNA (1)...(19): siRNA sense strand
agagaagagcagcugauaa

SEQ ID NO: 2567103 - RNA, 19 nt, Homo sapiens
  misc_RNA (1)...(19): siRNA sense strand
gcugauaaaggcaaaggaa

SEQ ID NO: 2567104 - RNA, 19 nt, Homo sapiens
  misc_RNA (1)...(19): siRNA sense strand
aagaaagaucugugcucaa

SEQ ID NO: 2567105 - RNA, 19 nt, Homo sapiens
  misc_RNA (1)...(19): siRNA sense strand
cuuacuaaccuucaggaaa

SEQ ID NO: 2567106 - RNA, 19 nt, Homo sapiens
  misc_RNA (1)...(19): siRNA sense strand
gaggcaaaauuuagagaga

SEQ ID NO: 2567107 - RNA, 19 nt, Homo sapiens
  misc_RNA (1)...(19): siRNA sense strand
ggaagaaucaagaccucaa

SEQ ID NO: 2567108 - RNA, 19 nt, Homo sapiens
  misc_RNA (1)...(19): siRNA sense strand
ggacaaagcagaagaccag

SEQ ID NO: 2567109 - RNA, 19 nt, Homo sapiens
  misc_RNA (1)...(19): siRNA sense strand
uggaagacacguuaaacaa

SEQ ID NO: 2567110 - RNA, 19 nt, Homo sapiens
  misc_RNA (1)...(19): siRNA sense strand
ucggaaaugaagaaacuua

SEQ ID NO: 2567111 - RNA, 19 nt, Homo sapiens
  misc_RNA (1)...(19): siRNA sense strand
gagaaaacuuagcagauau

SEQ ID NO: 2567112 - RNA, 19 nt, Homo sapiens
  misc_RNA (1)...(19): siRNA sense strand
aaagaauuggagaggaaau

SEQ ID NO: 2567113 - RNA, 19 nt, Homo sapiens
  misc_RNA (1)...(19): siRNA sense strand
guggaagagcugaacaaau

SEQ ID NO: 2567114 - RNA, 19 nt, Homo sapiens
  misc_RNA (1)...(19): siRNA sense strand
cuggaaaagaaaauggaaa

SEQ ID NO: 2567115 - RNA, 19 nt, Homo sapiens
  misc_RNA (1)...(19): siRNA sense strand
uggaagaauuuaggaaaga

SEQ ID NO: 2567116 - RNA, 19 nt, Homo sapiens
  misc_RNA (1)...(19): siRNA sense strand
ggagauagagcaggagcua

SEQ ID NO: 2567117 - RNA, 19 nt, Homo sapiens
  misc_RNA (1)...(19): siRNA sense strand
guuccggguugaagaagaa

SEQ ID NO: 2567118 - RNA, 19 nt, Homo sapiens
  misc_RNA (1)...(19): siRNA sense strand
caaggaaggugcaagcaga

SEQ ID NO: 2567119 - RNA, 19 nt, Homo sapiens
  misc_RNA (1)...(19): siRNA sense strand
gagagaaagaugagagaga

SEQ ID NO: 2567120 - RNA, 19 nt, Homo sapiens
  misc_RNA (1)...(19): siRNA sense strand
ggcaaaauuuagagagaaa

SEQ ID NO: 2567121 - RNA, 19 nt, Homo sapiens
  misc_RNA (1)...(19): siRNA sense strand
ugauaaaggcaaaggaaaa

SEQ ID NO: 2567122 - RNA, 19 nt, Homo sapiens
  misc_RNA (1)...(19): siRNA sense strand
uuggagaagcugagagaaa

SEQ ID NO: 2567123 - RNA, 19 nt, Homo sapiens
  misc_RNA (1)...(19): siRNA sense strand
cagcaaagggcuuggaaca

SEQ ID NO: 2567124 - RNA, 19 nt, Homo sapiens
  misc_RNA (1)...(19): siRNA sense strand
gcuugaggcagcugagaaa

SEQ ID NO: 2567125 - RNA, 19 nt, Homo sapiens
  misc_RNA (1)...(19): siRNA sense strand
cugauaaaggcaaaggaaa

SEQ ID NO: 2567126 - RNA, 19 nt, Homo sapiens
  misc_RNA (1)...(19): siRNA sense strand
agaugaagguggagaugau

SEQ ID NO: 2567127 - RNA, 19 nt, Homo sapiens
  misc_RNA (1)...(19): siRNA sense strand
aagcagaagaugaagcuaa

SEQ ID NO: 2567128 - RNA, 19 nt, Homo sapiens
  misc_RNA (1)...(19): siRNA sense strand
cagagaaguaugcaagaaa

SEQ ID NO: 2567129 - RNA, 19 nt, Homo sapiens
  misc_RNA (1)...(19): siRNA sense strand
guauaauggaacuggagaa

SEQ ID NO: 2567130 - RNA, 19 nt, Homo sapiens
  misc_RNA (1)...(19): siRNA sense strand
agaaacaguccaagaagaa

SEQ ID NO: 2567131 - RNA, 19 nt, Homo sapiens
  misc_RNA (1)...(19): siRNA sense strand
aggaggaauuuguggauga

SEQ ID NO: 2567132 - RNA, 19 nt, Homo sapiens
  misc_RNA (1)...(19): siRNA sense strand
aaucaagaaaggagaaaga

SEQ ID NO: 2567133 - RNA, 19 nt, Homo sapiens
  misc_RNA (1)...(19): siRNA sense strand
cuucaaaguuaacaaggaa

SEQ ID NO: 2567134 - RNA, 19 nt, Homo sapiens
  misc_RNA (1)...(19): siRNA sense strand
gcucaaaaucggagacaga

SEQ ID NO: 2567135 - RNA, 19 nt, Homo sapiens
  misc_RNA (1)...(19): siRNA sense strand
cagcugagaaacagauuaa

SEQ ID NO: 2567136 - RNA, 19 nt, Homo sapiens
  misc_RNA (1)...(19): siRNA sense strand
cuaaagagauggaagccuu

SEQ ID NO: 2567137 - RNA, 19 nt, Homo sapiens
  misc_RNA (1)...(19): siRNA sense strand
aaaccaagcaugaagaaau

SEQ ID NO: 2567138 - RNA, 19 nt, Homo sapiens
  misc_RNA (1)...(19): siRNA sense strand
cagccaaagccaaggccaa

SEQ ID NO: 2567139 - RNA, 19 nt, Homo sapiens
  misc_RNA (1)...(19): siRNA sense strand
acuccugacuguagagaau

SEQ ID NO: 2567140 - RNA, 19 nt, Homo sapiens
  misc_RNA (1)...(19): siRNA sense strand
ucugaaagaaagagaugua

SEQ ID NO: 2567141 - RNA, 19 nt, Homo sapiens
  misc_RNA (1)...(19): siRNA sense strand
acacagaggacaagcugaa

SEQ ID NO: 2567142 - RNA, 19 nt, Homo sapiens
  misc_RNA (1)...(19): siRNA sense strand
aaauaaagguaaaggagcu

SEQ ID NO: 2567143 - RNA, 19 nt, Homo sapiens
  misc_RNA (1)...(19): siRNA sense strand
augaagaugucaggagaua

SEQ ID NO: 2567144 - RNA, 19 nt, Homo sapiens
  misc_RNA (1)...(19): siRNA sense strand
augcaaaacuacagaauga

SEQ ID NO: 2567145 - RNA, 19 nt, Homo sapiens
  misc_RNA (1)...(19): siRNA sense strand
cuguauaccgccacggaaa

SEQ ID NO: 2567146 - RNA, 19 nt, Homo sapiens
  misc_RNA (1)...(19): siRNA sense strand
cagaauuugcugaacuaaa

SEQ ID NO: 2567147 - RNA, 19 nt, Homo sapiens
  misc_RNA (1)...(19): siRNA sense strand
uuacuaaccuucaggaaaa

SEQ ID NO: 2567148 - RNA, 19 nt, Homo sapiens
  misc_RNA (1)...(19): siRNA sense strand
ggaaagaaauagaaacccu

SEQ ID NO: 2567149 - RNA, 19 nt, Homo sapiens
  misc_RNA (1)...(19): siRNA sense strand
cauaaaagacgcagaugaa

SEQ ID NO: 2567150 - RNA, 19 nt, Homo sapiens
  misc_RNA (1)...(19): siRNA sense strand
ggugcaagcagaagaugaa

SEQ ID NO: 2567151 - RNA, 19 nt, Homo sapiens
  misc_RNA (1)...(19): siRNA sense strand
ucaagaaaggagaaagaga

SEQ ID NO: 2567152 - RNA, 19 nt, Homo sapiens
  misc_RNA (1)...(19): siRNA sense strand
uggaagaacugaagguauc

SEQ ID NO: 2567153 - RNA, 19 nt, Homo sapiens
  misc_RNA (1)...(19): siRNA sense strand
cgaugaauuacgucugaaa

SEQ ID NO: 2567154 - RNA, 19 nt, Homo sapiens
  misc_RNA (1)...(19): siRNA sense strand
aagaaagagauguagaaga

SEQ ID NO: 2567155 - RNA, 19 nt, Homo sapiens
  misc_RNA (1)...(19): siRNA sense strand
cuuacaaaggcuaaugaaa

SEQ ID NO: 2567156 - RNA, 19 nt, Homo sapiens
  misc_RNA (1)...(19): siRNA sense strand
ccagcaagaagcagcuaaa

SEQ ID NO: 2567157 - RNA, 19 nt, Homo sapiens
  misc_RNA (1)...(19): siRNA sense strand
gagaaagaugagagagaag

SEQ ID NO: 2567158 - RNA, 19 nt, Homo sapiens
  misc_RNA (1)...(19): siRNA sense strand
agccaaaugcaaugaacaa

SEQ ID NO: 2567159 - RNA, 19 nt, Homo sapiens
  misc_RNA (1)...(19): siRNA sense strand
agagaagagcagcugauaa

SEQ ID NO: 2567160 - RNA, 19 nt, Homo sapiens
  misc_RNA (1)...(19): siRNA sense strand
gcugauaaaggcaaaggaa

SEQ ID NO: 2567161 - RNA, 19 nt, Homo sapiens
  misc_RNA (1)...(19): siRNA sense strand
aagaaagaucugugcucaa

SEQ ID NO: 2567162 - RNA, 19 nt, Homo sapiens
  misc_RNA (1)...(19): siRNA sense strand
cuuacuaaccuucaggaaa

SEQ ID NO: 2567163 - RNA, 19 nt, Homo sapiens
  misc_RNA (1)...(19): siRNA sense strand
gaggcaaaauuuagagaga

SEQ ID NO: 2567164 - RNA, 19 nt, Homo sapiens
  misc_RNA (1)...(19): siRNA sense strand
ggaagaaucaagaccucaa

SEQ ID NO: 2567165 - RNA, 19 nt, Homo sapiens
  misc_RNA (1)...(19): siRNA sense strand
ggacaaagcagaagaccag

SEQ ID NO: 2567166 - RNA, 19 nt, Homo sapiens
  misc_RNA (1)...(19): siRNA sense strand
uggaagacacguuaaacaa

SEQ ID NO: 2567167 - RNA, 19 nt, Homo sapiens
  misc_RNA (1)...(19): siRNA sense strand
ucggaaaugaagaaacuua

SEQ ID NO: 2567168 - RNA, 19 nt, Homo sapiens
  misc_RNA (1)...(19): siRNA sense strand
gagaaaacuuagcagauau

SEQ ID NO: 2567169 - RNA, 19 nt, Homo sapiens
  misc_RNA (1)...(19): siRNA sense strand
aaagaauuggagaggaaau

SEQ ID NO: 2567170 - RNA, 19 nt, Homo sapiens
  misc_RNA (1)...(19): siRNA sense strand
guggaagagcugaacaaau

SEQ ID NO: 2567171 - RNA, 19 nt, Homo sapiens
  misc_RNA (1)...(19): siRNA sense strand
cuggaaaagaaaauggaaa

SEQ ID NO: 2567172 - RNA, 19 nt, Homo sapiens
  misc_RNA (1)...(19): siRNA sense strand
uggaagaauuuaggaaaga

SEQ ID NO: 2567173 - RNA, 19 nt, Homo sapiens
  misc_RNA (1)...(19): siRNA sense strand
ggagauagagcaggagcua

SEQ ID NO: 2567174 - RNA, 19 nt, Homo sapiens
  misc_RNA (1)...(19): siRNA sense strand
guuccggguugaagaagaa

SEQ ID NO: 2567175 - RNA, 19 nt, Homo sapiens
  misc_RNA (1)...(19): siRNA sense strand
caaggaaggugcaagcaga

SEQ ID NO: 2567176 - RNA, 19 nt, Homo sapiens
  misc_RNA (1)...(19): siRNA sense strand
aauaagagucggugugaaa

SEQ ID NO: 2567177 - RNA, 19 nt, Homo sapiens
  misc_RNA (1)...(19): siRNA sense strand
aagcaguggcacagagaaa

SEQ ID NO: 2567178 - RNA, 19 nt, Homo sapiens
  misc_RNA (1)...(19): siRNA sense strand
uggcauaaauccugaucaa

SEQ ID NO: 2567179 - RNA, 19 nt, Homo sapiens
  misc_RNA (1)...(19): siRNA sense strand
aagaagacuuaaagccaaa

SEQ ID NO: 2567180 - RNA, 19 nt, Homo sapiens
  misc_RNA (1)...(19): siRNA sense strand
cugcaagaacuuugagaau

SEQ ID NO: 2567181 - RNA, 19 nt, Homo sapiens
  misc_RNA (1)...(19): siRNA sense strand
ugucagagcccuuggaaga

SEQ ID NO: 2567182 - RNA, 19 nt, Homo sapiens
  misc_RNA (1)...(19): siRNA sense strand
gaagaagacuuaaagccaa

SEQ ID NO: 2567183 - RNA, 19 nt, Homo sapiens
  misc_RNA (1)...(19): siRNA sense strand
caaagagaguuauggguca

SEQ ID NO: 2567184 - RNA, 19 nt, Homo sapiens
  misc_RNA (1)...(19): siRNA sense strand
uggcagaacaucaggaaaa

SEQ ID NO: 2567185 - RNA, 19 nt, Homo sapiens
  misc_RNA (1)...(19): siRNA sense strand
caacagaacuggaaaccca

SEQ ID NO: 2567186 - RNA, 19 nt, Homo sapiens
  misc_RNA (1)...(19): siRNA sense strand
ggagaaucugauauagaaa

SEQ ID NO: 2567187 - RNA, 19 nt, Homo sapiens
  misc_RNA (1)...(19): siRNA sense strand
guagagaccuugugggacu

SEQ ID NO: 2567188 - RNA, 19 nt, Homo sapiens
  misc_RNA (1)...(19): siRNA sense strand
ccucagaguucuaucucaa

SEQ ID NO: 2567189 - RNA, 19 nt, Homo sapiens
  misc_RNA (1)...(19): siRNA sense strand
ucaagaaggaaaugaaaca

SEQ ID NO: 2567190 - RNA, 19 nt, Homo sapiens
  misc_RNA (1)...(19): siRNA sense strand
cugcaagauuguagagaac

SEQ ID NO: 2567191 - RNA, 19 nt, Homo sapiens
  misc_RNA (1)...(19): siRNA sense strand
ggaccauguaaaugaggua

SEQ ID NO: 2567192 - RNA, 19 nt, Homo sapiens
  misc_RNA (1)...(19): siRNA sense strand
gagaguggguagagaccuu

SEQ ID NO: 2567193 - RNA, 19 nt, Homo sapiens
  misc_RNA (1)...(19): siRNA sense strand
accaauugcuucaggagaa

SEQ ID NO: 2567194 - RNA, 19 nt, Homo sapiens
  misc_RNA (1)...(19): siRNA sense strand
ggaaaguauuggccaacau

SEQ ID NO: 2567195 - RNA, 19 nt, Homo sapiens
  misc_RNA (1)...(19): siRNA sense strand
augcaguacuguugauauu

SEQ ID NO: 2567196 - RNA, 19 nt, Homo sapiens
  misc_RNA (1)...(19): siRNA sense strand
aggcaaaacucgggaagaa

SEQ ID NO: 2567197 - RNA, 19 nt, Homo sapiens
  misc_RNA (1)...(19): siRNA sense strand
gagaccaguauuagagaau

SEQ ID NO: 2567198 - RNA, 19 nt, Homo sapiens
  misc_RNA (1)...(19): siRNA sense strand
cauuggauguguuggaaga

SEQ ID NO: 2567199 - RNA, 19 nt, Homo sapiens
  misc_RNA (1)...(19): siRNA sense strand
guucuauggaggugaaaga

SEQ ID NO: 2567200 - RNA, 19 nt, Homo sapiens
  misc_RNA (1)...(19): siRNA sense strand
aggaauaaacuaugugcuu

SEQ ID NO: 2567201 - RNA, 19 nt, Homo sapiens
  misc_RNA (1)...(19): siRNA sense strand
ggguagagaccuuguggga

SEQ ID NO: 2567202 - RNA, 19 nt, Homo sapiens
  misc_RNA (1)...(19): siRNA sense strand
cauucaacgugcuuauaaa

SEQ ID NO: 2567203 - RNA, 19 nt, Homo sapiens
  misc_RNA (1)...(19): siRNA sense strand
gaaggauauguguguguaa

SEQ ID NO: 2567204 - RNA, 19 nt, Homo sapiens
  misc_RNA (1)...(19): siRNA sense strand
gagcauccaagaaaggaaa

SEQ ID NO: 2567205 - RNA, 19 nt, Homo sapiens
  misc_RNA (1)...(19): siRNA sense strand
gacucaaguuagaggagau

SEQ ID NO: 2567206 - RNA, 19 nt, Homo sapiens
  misc_RNA (1)...(19): siRNA sense strand
uggaggcagcaaagagaaa

SEQ ID NO: 2567207 - RNA, 19 nt, Homo sapiens
  misc_RNA (1)...(19): siRNA sense strand
aggaaaaccugcugcaaga

SEQ ID NO: 2567208 - RNA, 19 nt, Homo sapiens
  misc_RNA (1)...(19): siRNA sense strand
uugacaaagcuaaggaaaa

SEQ ID NO: 2567209 - RNA, 19 nt, Homo sapiens
  misc_RNA (1)...(19): siRNA sense strand
cuauggaggugaaagauca

SEQ ID NO: 2567210 - RNA, 19 nt, Homo sapiens
  misc_RNA (1)...(19): siRNA sense strand
augaagaccaugaagaaga

SEQ ID NO: 2567211 - RNA, 19 nt, Homo sapiens
  misc_RNA (1)...(19): siRNA sense strand
auuuggaaggagaaagaua

SEQ ID NO: 2567212 - RNA, 19 nt, Homo sapiens
  misc_RNA (1)...(19): siRNA sense strand
gauaauaaggagauucaga

SEQ ID NO: 2567213 - RNA, 19 nt, Homo sapiens
  misc_RNA (1)...(19): siRNA sense strand
gaagaaaagcagagaguug

SEQ ID NO: 2567214 - RNA, 19 nt, Homo sapiens
  misc_RNA (1)...(19): siRNA sense strand
augaaacagaugaggccaa

SEQ ID NO: 2567215 - RNA, 19 nt, Homo sapiens
  misc_RNA (1)...(19): siRNA sense strand
ugauaguguuccaugguuu

SEQ ID NO: 2567216 - RNA, 19 nt, Homo sapiens
  misc_RNA (1)...(19): siRNA sense strand
cgauuauucaggauguuaa

SEQ ID NO: 2567217 - RNA, 19 nt, Homo sapiens
  misc_RNA (1)...(19): siRNA sense strand
cuucaaacugcaagaacuu

SEQ ID NO: 2567218 - RNA, 19 nt, Homo sapiens
  misc_RNA (1)...(19): siRNA sense strand
agaagaagacuuaaagcca

SEQ ID NO: 2567219 - RNA, 19 nt, Homo sapiens
  misc_RNA (1)...(19): siRNA sense strand
cugaagaagaagaaauguu

SEQ ID NO: 2567220 - RNA, 19 nt, Homo sapiens
  misc_RNA (1)...(19): siRNA sense strand
ggucaaaucaguggagcau

SEQ ID NO: 2567221 - RNA, 19 nt, Homo sapiens
  misc_RNA (1)...(19): siRNA sense strand
gcuucaaacugcaagaacu

SEQ ID NO: 2567222 - RNA, 19 nt, Homo sapiens
  misc_RNA (1)...(19): siRNA sense strand
cagaugaggccaagaccau

SEQ ID NO: 2567223 - RNA, 19 nt, Homo sapiens
  misc_RNA (1)...(19): siRNA sense strand
ucucugaagaagaagaaau

SEQ ID NO: 2567224 - RNA, 19 nt, Homo sapiens
  misc_RNA (1)...(19): siRNA sense strand
ggugaaagaucaaagcauc

SEQ ID NO: 2567225 - RNA, 19 nt, Homo sapiens
  misc_RNA (1)...(19): siRNA sense strand
gaauaagagucggugugaa

SEQ ID NO: 2567226 - RNA, 19 nt, Homo sapiens
  misc_RNA (1)...(19): siRNA sense strand
ugauagauggugacagaga

SEQ ID NO: 2567227 - RNA, 19 nt, Homo sapiens
  misc_RNA (1)...(19): siRNA sense strand
gaugcuacucucagacaua

SEQ ID NO: 2567228 - RNA, 19 nt, Homo sapiens
  misc_RNA (1)...(19): siRNA sense strand
caggagaaucugauauaga

SEQ ID NO: 2567229 - RNA, 19 nt, Homo sapiens
  misc_RNA (1)...(19): siRNA sense strand
ccguauuuggaauguauaa

SEQ ID NO: 2567230 - RNA, 19 nt, Homo sapiens
  misc_RNA (1)...(19): siRNA sense strand
uguaaaagcuggcauaaau

SEQ ID NO: 2567231 - RNA, 19 nt, Homo sapiens
  misc_RNA (1)...(19): siRNA sense strand
uuuaauggauggaucacua

SEQ ID NO: 2567232 - RNA, 19 nt, Homo sapiens
  misc_RNA (1)...(19): siRNA sense strand
guuccaugguuuaauagaa

SEQ ID NO: 2567233 - RNA, 19 nt, Homo sapiens
  misc_RNA (1)...(19): siRNA sense strand
ggagcauccaagaaaggaa

SEQ ID NO: 2567234 - RNA, 19 nt, Homo sapiens
  misc_RNA (1)...(19): siRNA sense strand
agacuuauuugcuggcaga

SEQ ID NO: 2567235 - RNA, 19 nt, Homo sapiens
  misc_RNA (1)...(19): siRNA sense strand
ccucugaguaugcugauua

SEQ ID NO: 2567236 - RNA, 19 nt, Homo sapiens
  misc_RNA (1)...(19): siRNA sense strand
uagaggagauugugggaac

SEQ ID NO: 2567237 - RNA, 19 nt, Homo sapiens
  misc_RNA (1)...(19): siRNA sense strand
ggaucgaaacuguggugaa

SEQ ID NO: 2567238 - RNA, 19 nt, Homo sapiens
  misc_RNA (1)...(19): siRNA sense strand
ugagaagagagguggugaa

SEQ ID NO: 2567239 - RNA, 19 nt, Homo sapiens
  misc_RNA (1)...(19): siRNA sense strand
guggugaaacggaucgaaa

SEQ ID NO: 2567240 - RNA, 19 nt, Homo sapiens
  misc_RNA (1)...(19): siRNA sense strand
cgguauuagaaucaaagaa

SEQ ID NO: 2567241 - RNA, 19 nt, Homo sapiens
  misc_RNA (1)...(19): siRNA sense strand
ucgccaaagaggagaucau

SEQ ID NO: 2567242 - RNA, 19 nt, Homo sapiens
  misc_RNA (1)...(19): siRNA sense strand
ccugguggucuucgggaaa

SEQ ID NO: 2567243 - RNA, 19 nt, Homo sapiens
  misc_RNA (1)...(19): siRNA sense strand
cagcuuuaguacaggucuu

SEQ ID NO: 2567244 - RNA, 19 nt, Homo sapiens
  misc_RNA (1)...(19): siRNA sense strand
ucaagaucaaagagcgaau

SEQ ID NO: 2567245 - RNA, 19 nt, Homo sapiens
  misc_RNA (1)...(19): siRNA sense strand
gaggagaucaugaaagcca

SEQ ID NO: 2567246 - RNA, 19 nt, Homo sapiens
  misc_RNA (1)...(19): siRNA sense strand
gcgccaugcaggugaagca

SEQ ID NO: 2567247 - RNA, 19 nt, Homo sapiens
  misc_RNA (1)...(19): siRNA sense strand
cggagguggaucaaagaga

SEQ ID NO: 2567248 - RNA, 19 nt, Homo sapiens
  misc_RNA (1)...(19): siRNA sense strand
ucuuccaacuagcgacaua

SEQ ID NO: 2567249 - RNA, 19 nt, Homo sapiens
  misc_RNA (1)...(19): siRNA sense strand
ggugaaacggaucgaaacu

SEQ ID NO: 2567250 - RNA, 19 nt, Homo sapiens
  misc_RNA (1)...(19): siRNA sense strand
aagaauugaugcccggaga

SEQ ID NO: 2567251 - RNA, 19 nt, Homo sapiens
  misc_RNA (1)...(19): siRNA sense strand
ggaagcacaacguggcuga

SEQ ID NO: 2567252 - RNA, 19 nt, Homo sapiens
  misc_RNA (1)...(19): siRNA sense strand
ccggagagcugaugaaaac

SEQ ID NO: 2567253 - RNA, 19 nt, Homo sapiens
  misc_RNA (1)...(19): siRNA sense strand
caauaauaaagcucacaga

SEQ ID NO: 2567254 - RNA, 19 nt, Homo sapiens
  misc_RNA (1)...(19): siRNA sense strand
gagagguggugaaacggau

SEQ ID NO: 2567255 - RNA, 19 nt, Homo sapiens
  misc_RNA (1)...(19): siRNA sense strand
gaaauaugucagcgaccua

SEQ ID NO: 2567256 - RNA, 19 nt, Homo sapiens
  misc_RNA (1)...(19): siRNA sense strand
ccacagaauuucauagcug

SEQ ID NO: 2567257 - RNA, 19 nt, Homo sapiens
  misc_RNA (1)...(19): siRNA sense strand
cguugaagagagugaggau

SEQ ID NO: 2567258 - RNA, 19 nt, Homo sapiens
  misc_RNA (1)...(19): siRNA sense strand
gcagcuaugaccugggcaa

SEQ ID NO: 2567259 - RNA, 19 nt, Homo sapiens
  misc_RNA (1)...(19): siRNA sense strand
cguaugaagaagaaggaug

SEQ ID NO: 2567260 - RNA, 19 nt, Homo sapiens
  misc_RNA (1)...(19): siRNA sense strand
agguaaaacaggagauaaa

SEQ ID NO: 2567261 - RNA, 19 nt, Homo sapiens
  misc_RNA (1)...(19): siRNA sense strand
gcgggaaggcagauggaaa

SEQ ID NO: 2567262 - RNA, 19 nt, Homo sapiens
  misc_RNA (1)...(19): siRNA sense strand
ccaaggauauucugggcaa

SEQ ID NO: 2567263 - RNA, 19 nt, Homo sapiens
  misc_RNA (1)...(19): siRNA sense strand
caaucaagucuuagaaaca

SEQ ID NO: 2567264 - RNA, 19 nt, Homo sapiens
  misc_RNA (1)...(19): siRNA sense strand
gcauugugguggagggcuu

SEQ ID NO: 2567265 - RNA, 19 nt, Homo sapiens
  misc_RNA (1)...(19): siRNA sense strand
caugaagagaauagaagaa

SEQ ID NO: 2567266 - RNA, 19 nt, Homo sapiens
  misc_RNA (1)...(19): siRNA sense strand
ccucguaaacccaaggaua

SEQ ID NO: 2567267 - RNA, 19 nt, Homo sapiens
  misc_RNA (1)...(19): siRNA sense strand
gcgcugaugagaagagcaa

SEQ ID NO: 2567268 - RNA, 19 nt, Homo sapiens
  misc_RNA (1)...(19): siRNA sense strand
cugugaaauuuguuagcaa

SEQ ID NO: 2567269 - RNA, 19 nt, Homo sapiens
  misc_RNA (1)...(19): siRNA sense strand
gcucauugaccuacggauu

SEQ ID NO: 2567270 - RNA, 19 nt, Homo sapiens
  misc_RNA (1)...(19): siRNA sense strand
uggaggagaauguggacaa

SEQ ID NO: 2567271 - RNA, 19 nt, Homo sapiens
  misc_RNA (1)...(19): siRNA sense strand
ccuuaucaguucagaguca

SEQ ID NO: 2567272 - RNA, 19 nt, Homo sapiens
  misc_RNA (1)...(19): siRNA sense strand
gcugaaugaaauuggaaga

SEQ ID NO: 2567273 - RNA, 19 nt, Homo sapiens
  misc_RNA (1)...(19): siRNA sense strand
ccuucuuggaugagagcaa

SEQ ID NO: 2567274 - RNA, 19 nt, Homo sapiens
  misc_RNA (1)...(19): siRNA sense strand
gcugaugagaagagcaaga

SEQ ID NO: 2567275 - RNA, 19 nt, Homo sapiens
  misc_RNA (1)...(19): siRNA sense strand
uuauuaagcacgagcggaa

SEQ ID NO: 2567276 - RNA, 19 nt, Homo sapiens
  misc_RNA (1)...(19): siRNA sense strand
gcugguacagacagagaaa

SEQ ID NO: 2567277 - RNA, 19 nt, Homo sapiens
  misc_RNA (1)...(19): siRNA sense strand
ugguacagacagagaaaga

SEQ ID NO: 2567278 - RNA, 19 nt, Homo sapiens
  misc_RNA (1)...(19): siRNA sense strand
cguccauggccgugaucaa

SEQ ID NO: 2567279 - RNA, 19 nt, Homo sapiens
  misc_RNA (1)...(19): siRNA sense strand
gggcggaaguggagaacac

SEQ ID NO: 2567280 - RNA, 19 nt, Homo sapiens
  misc_RNA (1)...(19): siRNA sense strand
cagagaaagacuaugucaa

SEQ ID NO: 2567281 - RNA, 19 nt, Homo sapiens
  misc_RNA (1)...(19): siRNA sense strand
ccuacuuugaggagguaaa

SEQ ID NO: 2567282 - RNA, 19 nt, Homo sapiens
  misc_RNA (1)...(19): siRNA sense strand
auuuauaccugcauagcaa

SEQ ID NO: 2567283 - RNA, 19 nt, Homo sapiens
  misc_RNA (1)...(19): siRNA sense strand
ccgaggaaucagaguguga

SEQ ID NO: 2567284 - RNA, 19 nt, Homo sapiens
  misc_RNA (1)...(19): siRNA sense strand
caaagauguggcugugaaa

SEQ ID NO: 2567285 - RNA, 19 nt, Homo sapiens
  misc_RNA (1)...(19): siRNA sense strand
aagaagaacagaaagccaa

SEQ ID NO: 2567286 - RNA, 19 nt, Homo sapiens
  misc_RNA (1)...(19): siRNA sense strand
aagauguggcugugaaauu

SEQ ID NO: 2567287 - RNA, 19 nt, Homo sapiens
  misc_RNA (1)...(19): siRNA sense strand
augaacugauggaggaaaa

SEQ ID NO: 2567288 - RNA, 19 nt, Homo sapiens
  misc_RNA (1)...(19): siRNA sense strand
gagaaaucacccugaagau

SEQ ID NO: 2567289 - RNA, 19 nt, Homo sapiens
  misc_RNA (1)...(19): siRNA sense strand
caauagaaaaguuggucaa

SEQ ID NO: 2567290 - RNA, 19 nt, Homo sapiens
  misc_RNA (1)...(19): siRNA sense strand
gaagaagaacagaaagcca

SEQ ID NO: 2567291 - RNA, 19 nt, Homo sapiens
  misc_RNA (1)...(19): siRNA sense strand
ucuuagaaacacagcgaga

SEQ ID NO: 2567292 - RNA, 19 nt, Homo sapiens
  misc_RNA (1)...(19): siRNA sense strand
agaccuugucaaugcaaua

SEQ ID NO: 2567293 - RNA, 19 nt, Homo sapiens
  misc_RNA (1)...(19): siRNA sense strand
acucaugaacagagagacu

SEQ ID NO: 2567294 - RNA, 19 nt, Homo sapiens
  misc_RNA (1)...(19): siRNA sense strand
agucaaagugcaagguguu

SEQ ID NO: 2567295 - RNA, 19 nt, Homo sapiens
  misc_RNA (1)...(19): siRNA sense strand
cuuaagaaguggcugacga

SEQ ID NO: 2567296 - RNA, 19 nt, Homo sapiens
  misc_RNA (1)...(19): siRNA sense strand
cagaauuccuugugcccuu

SEQ ID NO: 2567297 - RNA, 19 nt, Homo sapiens
  misc_RNA (1)...(19): siRNA sense strand
caagaaagguuggggugaa

SEQ ID NO: 2567298 - RNA, 19 nt, Homo sapiens
  misc_RNA (1)...(19): siRNA sense strand
gaauagaagaaaagggugu

SEQ ID NO: 2567299 - RNA, 19 nt, Homo sapiens
  misc_RNA (1)...(19): siRNA sense strand
caucaagcccauucagaga

SEQ ID NO: 2567300 - RNA, 19 nt, Homo sapiens
  misc_RNA (1)...(19): siRNA sense strand
aaguggagaacacggguaa

SEQ ID NO: 2567301 - RNA, 19 nt, Homo sapiens
  misc_RNA (1)...(19): siRNA sense strand
ggauauucugggcaacaaa

SEQ ID NO: 2567302 - RNA, 19 nt, Homo sapiens
  misc_RNA (1)...(19): siRNA sense strand
ccucggaguuugugcgacu

SEQ ID NO: 2567303 - RNA, 19 nt, Homo sapiens
  misc_RNA (1)...(19): siRNA sense strand
gagacagcgcugaugagaa

SEQ ID NO: 2567304 - RNA, 19 nt, Homo sapiens
  misc_RNA (1)...(19): siRNA sense strand
gcacucaugaacagagaga

SEQ ID NO: 2567305 - RNA, 19 nt, Homo sapiens
  misc_RNA (1)...(19): siRNA sense strand
guuaaagagacgaacaguu

SEQ ID NO: 2567306 - RNA, 19 nt, Homo sapiens
  misc_RNA (1)...(19): siRNA sense strand
agaaacacagcgagacuuu

SEQ ID NO: 2567307 - RNA, 19 nt, Homo sapiens
  misc_RNA (1)...(19): siRNA sense strand
uugcacauuuggacauaaa

SEQ ID NO: 2567308 - RNA, 19 nt, Homo sapiens
  misc_RNA (1)...(19): siRNA sense strand
gcaucgggguucugacaua

SEQ ID NO: 2567309 - RNA, 19 nt, Homo sapiens
  misc_RNA (1)...(19): siRNA sense strand
ccugaggauaugcgaggaa

SEQ ID NO: 2567310 - RNA, 19 nt, Homo sapiens
  misc_RNA (1)...(19): siRNA sense strand
acuaugcacugaaggagaa

SEQ ID NO: 2567311 - RNA, 19 nt, Homo sapiens
  misc_RNA (1)...(19): siRNA sense strand
cagucaaagugcaaggugu

SEQ ID NO: 2567312 - RNA, 19 nt, Homo sapiens
  misc_RNA (1)...(19): siRNA sense strand
cagaagucauucaaggcau

SEQ ID NO: 2567313 - RNA, 19 nt, Homo sapiens
  misc_RNA (1)...(19): siRNA sense strand
cagaaugaugugcggccua

SEQ ID NO: 2567314 - RNA, 19 nt, Homo sapiens
  misc_RNA (1)...(19): siRNA sense strand
acucuuaagaaguggcuga

SEQ ID NO: 2567315 - RNA, 19 nt, Homo sapiens
  misc_RNA (1)...(19): siRNA sense strand
ccgucaaccagcagaacau

SEQ ID NO: 2567316 - RNA, 19 nt, Homo sapiens
  misc_RNA (1)...(19): siRNA sense strand
caaugugaucuuacaggaa

SEQ ID NO: 2567317 - RNA, 19 nt, Homo sapiens
  misc_RNA (1)...(19): siRNA sense strand
guacagacagagaaagacu

SEQ ID NO: 2567318 - RNA, 19 nt, Homo sapiens
  misc_RNA (1)...(19): siRNA sense strand
cugguuacacuguggagua

SEQ ID NO: 2567319 - RNA, 19 nt, Homo sapiens
  misc_RNA (1)...(19): siRNA sense strand
augaugaacugauggagga

SEQ ID NO: 2567320 - RNA, 19 nt, Homo sapiens
  misc_RNA (1)...(19): siRNA sense strand
cgggaaggcagauggaaac

SEQ ID NO: 2567321 - RNA, 19 nt, Homo sapiens
  misc_RNA (1)...(19): siRNA sense strand
ugaugagaagagcaagaaa

SEQ ID NO: 2567322 - RNA, 19 nt, Homo sapiens
  misc_RNA (1)...(19): siRNA sense strand
cagaagaagaacagaaagc

SEQ ID NO: 2567323 - RNA, 19 nt, Homo sapiens
  misc_RNA (1)...(19): siRNA sense strand
gcugcaaugacaugaugaa

SEQ ID NO: 2567324 - RNA, 19 nt, Homo sapiens
  misc_RNA (1)...(19): siRNA sense strand
caugaugaaucuaggacgu

SEQ ID NO: 2567325 - RNA, 19 nt, Homo sapiens
  misc_RNA (1)...(19): siRNA sense strand
gguugaagugagagaggaa

SEQ ID NO: 2567326 - RNA, 19 nt, Homo sapiens
  misc_RNA (1)...(19): siRNA sense strand
aagagaaagcacagggcaa

SEQ ID NO: 2567327 - RNA, 19 nt, Homo sapiens
  misc_RNA (1)...(19): siRNA sense strand
gcagaaagauguaucccaa

SEQ ID NO: 2567328 - RNA, 19 nt, Homo sapiens
  misc_RNA (1)...(19): siRNA sense strand
gcagaaagauguaucccaa

SEQ ID NO: 2567329 - RNA, 19 nt, Homo sapiens
  misc_RNA (1)...(19): siRNA sense strand
gaagaaaggcuguggguuc

SEQ ID NO: 2567330 - RNA, 19 nt, Homo sapiens
  misc_RNA (1)...(19): siRNA sense strand
acaucuagguggaagucaa

SEQ ID NO: 2567331 - RNA, 19 nt, Homo sapiens
  misc_RNA (1)...(19): siRNA sense strand
acaagaaggcagagaccau

SEQ ID NO: 2567332 - RNA, 19 nt, Homo sapiens
  misc_RNA (1)...(19): siRNA sense strand
acaccauaaaggaggcaaa

SEQ ID NO: 2567333 - RNA, 19 nt, Homo sapiens
  misc_RNA (1)...(19): siRNA sense strand
gguucauggacuaaguaaa

SEQ ID NO: 2567334 - RNA, 19 nt, Homo sapiens
  misc_RNA (1)...(19): siRNA sense strand
cuacauaagacgacaaaau

SEQ ID NO: 2567335 - RNA, 19 nt, Homo sapiens
  misc_RNA (1)...(19): siRNA sense strand
gagaaaauggugugcagaa

SEQ ID NO: 2567336 - RNA, 19 nt, Homo sapiens
  misc_RNA (1)...(19): siRNA sense strand
gagaaaauggugugcagaa

SEQ ID NO: 2567337 - RNA, 19 nt, Homo sapiens
  misc_RNA (1)...(19): siRNA sense strand
uaauaaacaagaaggcaga

SEQ ID NO: 2567338 - RNA, 19 nt, Homo sapiens
  misc_RNA (1)...(19): siRNA sense strand
caaacaacaacgugagacu

SEQ ID NO: 2567339 - RNA, 19 nt, Homo sapiens
  misc_RNA (1)...(19): siRNA sense strand
agaaaauggugugcagaaa

SEQ ID NO: 2567340 - RNA, 19 nt, Homo sapiens
  misc_RNA (1)...(19): siRNA sense strand
agaaaauggugugcagaaa

SEQ ID NO: 2567341 - RNA, 19 nt, Homo sapiens
  misc_RNA (1)...(19): siRNA sense strand
cgacaaaaucacaacgaca

SEQ ID NO: 2567342 - RNA, 19 nt, Homo sapiens
  misc_RNA (1)...(19): siRNA sense strand
uaauuauagagcaggaaga

SEQ ID NO: 2567343 - RNA, 19 nt, Homo sapiens
  misc_RNA (1)...(19): siRNA sense strand
uugaagugagagaggaaca

SEQ ID NO: 2567344 - RNA, 19 nt, Homo sapiens
  misc_RNA (1)...(19): siRNA sense strand
gacaaaagggccagcacua

SEQ ID NO: 2567345 - RNA, 19 nt, Homo sapiens
  misc_RNA (1)...(19): siRNA sense strand
cuaacaaacaacaacguga

SEQ ID NO: 2567346 - RNA, 19 nt, Homo sapiens
  misc_RNA (1)...(19): siRNA sense strand
ccaauuuccacacggacaa

SEQ ID NO: 2567347 - RNA, 19 nt, Homo sapiens
  misc_RNA (1)...(19): siRNA sense strand
caaagcucaucgugggaca

SEQ ID NO: 2567348 - RNA, 19 nt, Homo sapiens
  misc_RNA (1)...(19): siRNA sense strand
cagcacuauucuggacaaa

SEQ ID NO: 2567349 - RNA, 19 nt, Homo sapiens
  misc_RNA (1)...(19): siRNA sense strand
acauggauccaaagacauu

SEQ ID NO: 2567350 - RNA, 19 nt, Homo sapiens
  misc_RNA (1)...(19): siRNA sense strand
ucaucaaaauaaagggcau

SEQ ID NO: 2567351 - RNA, 19 nt, Homo sapiens
  misc_RNA (1)...(19): siRNA sense strand
uggcacaacaucuuaacaa

SEQ ID NO: 2567352 - RNA, 19 nt, Homo sapiens
  misc_RNA (1)...(19): siRNA sense strand
aagcagcugugaugggaca

SEQ ID NO: 2567353 - RNA, 19 nt, Homo sapiens
  misc_RNA (1)...(19): siRNA sense strand
ggaagaugacagugaucgu

SEQ ID NO: 2567354 - RNA, 19 nt, Homo sapiens
  misc_RNA (1)...(19): siRNA sense strand
cauaucauguagaugccaa

SEQ ID NO: 2567355 - RNA, 19 nt, Homo sapiens
  misc_RNA (1)...(19): siRNA sense strand
acaacgacaucuaggugga

SEQ ID NO: 2567356 - RNA, 19 nt, Homo sapiens
  misc_RNA (1)...(19): siRNA sense strand
ccauaaaggaggcaaagcu

SEQ ID NO: 2567357 - RNA, 19 nt, Homo sapiens
  misc_RNA (1)...(19): siRNA sense strand
agaugagcuccuaguauau

SEQ ID NO: 2567358 - RNA, 19 nt, Homo sapiens
  misc_RNA (1)...(19): siRNA sense strand
gguugaagugagagaggaa

SEQ ID NO: 2567359 - RNA, 19 nt, Homo sapiens
  misc_RNA (1)...(19): siRNA sense strand
aagagaaagcacagggcaa

SEQ ID NO: 2567360 - RNA, 19 nt, Homo sapiens
  misc_RNA (1)...(19): siRNA sense strand
gcagaaagauguaucccaa

SEQ ID NO: 2567361 - RNA, 19 nt, Homo sapiens
  misc_RNA (1)...(19): siRNA sense strand
gaagaaaggcuguggguuc

SEQ ID NO: 2567362 - RNA, 19 nt, Homo sapiens
  misc_RNA (1)...(19): siRNA sense strand
acaucuagguggaagucaa

SEQ ID NO: 2567363 - RNA, 19 nt, Homo sapiens
  misc_RNA (1)...(19): siRNA sense strand
acaagaaggcagagaccau

SEQ ID NO: 2567364 - RNA, 19 nt, Homo sapiens
  misc_RNA (1)...(19): siRNA sense strand
acaccauaaaggaggcaaa

SEQ ID NO: 2567365 - RNA, 19 nt, Homo sapiens
  misc_RNA (1)...(19): siRNA sense strand
gguucauggacuaaguaaa

SEQ ID NO: 2567366 - RNA, 19 nt, Homo sapiens
  misc_RNA (1)...(19): siRNA sense strand
cuacauaagacgacaaaau

SEQ ID NO: 2567367 - RNA, 19 nt, Homo sapiens
  misc_RNA (1)...(19): siRNA sense strand
gagaaaauggugugcagaa

SEQ ID NO: 2567368 - RNA, 19 nt, Homo sapiens
  misc_RNA (1)...(19): siRNA sense strand
uaauaaacaagaaggcaga

SEQ ID NO: 2567369 - RNA, 19 nt, Homo sapiens
  misc_RNA (1)...(19): siRNA sense strand
caaacaacaacgugagacu

SEQ ID NO: 2567370 - RNA, 19 nt, Homo sapiens
  misc_RNA (1)...(19): siRNA sense strand
agaaaauggugugcagaaa

SEQ ID NO: 2567371 - RNA, 19 nt, Homo sapiens
  misc_RNA (1)...(19): siRNA sense strand
cgacaaaaucacaacgaca

SEQ ID NO: 2567372 - RNA, 19 nt, Homo sapiens
  misc_RNA (1)...(19): siRNA sense strand
gugaaaaugcaaaaggaga

SEQ ID NO: 2567373 - RNA, 19 nt, Homo sapiens
  misc_RNA (1)...(19): siRNA sense strand
uaauuauagagcaggaaga

SEQ ID NO: 2567374 - RNA, 19 nt, Homo sapiens
  misc_RNA (1)...(19): siRNA sense strand
uugaagugagagaggaaca

SEQ ID NO: 2567375 - RNA, 19 nt, Homo sapiens
  misc_RNA (1)...(19): siRNA sense strand
gacaaaagggccagcacua

SEQ ID NO: 2567376 - RNA, 19 nt, Homo sapiens
  misc_RNA (1)...(19): siRNA sense strand
cuaacaaacaacaacguga

SEQ ID NO: 2567377 - RNA, 19 nt, Homo sapiens
  misc_RNA (1)...(19): siRNA sense strand
ccaauuuccacacggacaa

SEQ ID NO: 2567378 - RNA, 19 nt, Homo sapiens
  misc_RNA (1)...(19): siRNA sense strand
caaagcucaucgugggaca

SEQ ID NO: 2567379 - RNA, 19 nt, Homo sapiens
  misc_RNA (1)...(19): siRNA sense strand
cagcacuauucuggacaaa

SEQ ID NO: 2567380 - RNA, 19 nt, Homo sapiens
  misc_RNA (1)...(19): siRNA sense strand
acauggauccaaagacauu

SEQ ID NO: 2567381 - RNA, 19 nt, Homo sapiens
  misc_RNA (1)...(19): siRNA sense strand
ucaucaaaauaaagggcau

SEQ ID NO: 2567382 - RNA, 19 nt, Homo sapiens
  misc_RNA (1)...(19): siRNA sense strand
uggcacaacaucuuaacaa

SEQ ID NO: 2567383 - RNA, 19 nt, Homo sapiens
  misc_RNA (1)...(19): siRNA sense strand
aagcagcugugaugggaca

SEQ ID NO: 2567384 - RNA, 19 nt, Homo sapiens
  misc_RNA (1)...(19): siRNA sense strand
ggaagaugacagugaucgu

SEQ ID NO: 2567385 - RNA, 19 nt, Homo sapiens
  misc_RNA (1)...(19): siRNA sense strand
cauaucauguagaugccaa

SEQ ID NO: 2567386 - RNA, 19 nt, Homo sapiens
  misc_RNA (1)...(19): siRNA sense strand
acaacgacaucuaggugga

SEQ ID NO: 2567387 - RNA, 19 nt, Homo sapiens
  misc_RNA (1)...(19): siRNA sense strand
ccauaaaggaggcaaagcu

SEQ ID NO: 2567388 - RNA, 19 nt, Homo sapiens
  misc_RNA (1)...(19): siRNA sense strand
agaugagcuccuaguauau

SEQ ID NO: 2567389 - RNA, 19 nt, Homo sapiens
  misc_RNA (1)...(19): siRNA sense strand
agaaaagaguguacagaaa

SEQ ID NO: 2567390 - RNA, 19 nt, Homo sapiens
  misc_RNA (1)...(19): siRNA sense strand
gcagaaagauguaucccaa

SEQ ID NO: 2567391 - RNA, 19 nt, Homo sapiens
  misc_RNA (1)...(19): siRNA sense strand
acaagaaggcagagaccau

SEQ ID NO: 2567392 - RNA, 19 nt, Homo sapiens
  misc_RNA (1)...(19): siRNA sense strand
gguucauggacuaaguaaa

SEQ ID NO: 2567393 - RNA, 19 nt, Homo sapiens
  misc_RNA (1)...(19): siRNA sense strand
gagaaaaggauguacagaa

SEQ ID NO: 2567394 - RNA, 19 nt, Homo sapiens
  misc_RNA (1)...(19): siRNA sense strand
gaucaugacuggacccgaa

SEQ ID NO: 2567395 - RNA, 19 nt, Homo sapiens
  misc_RNA (1)...(19): siRNA sense strand
uagucaagaucaagagcau

SEQ ID NO: 2567396 - RNA, 19 nt, Homo sapiens
  misc_RNA (1)...(19): siRNA sense strand
uagucaagaucaagagcau

SEQ ID NO: 2567397 - RNA, 19 nt, Homo sapiens
  misc_RNA (1)...(19): siRNA sense strand
gccaaaaugcaaaaggaaa

SEQ ID NO: 2567398 - RNA, 19 nt, Homo sapiens
  misc_RNA (1)...(19): siRNA sense strand
cuacauaaggcgacaaaau

SEQ ID NO: 2567399 - RNA, 19 nt, Homo sapiens
  misc_RNA (1)...(19): siRNA sense strand
ucucaaauccagacaccaa

SEQ ID NO: 2567400 - RNA, 19 nt, Homo sapiens
  misc_RNA (1)...(19): siRNA sense strand
agaaaagggcauccagaaa

SEQ ID NO: 2567401 - RNA, 19 nt, Homo sapiens
  misc_RNA (1)...(19): siRNA sense strand
caaacaacaacgugagacu

SEQ ID NO: 2567402 - RNA, 19 nt, Homo sapiens
  misc_RNA (1)...(19): siRNA sense strand
aggcagauacaaacaggaa

SEQ ID NO: 2567403 - RNA, 19 nt, Homo sapiens
  misc_RNA (1)...(19): siRNA sense strand
cgacaaaaucaaaacaaca

SEQ ID NO: 2567404 - RNA, 19 nt, Homo sapiens
  misc_RNA (1)...(19): siRNA sense strand
gagaaaagaguguacagaa

SEQ ID NO: 2567405 - RNA, 19 nt, Homo sapiens
  misc_RNA (1)...(19): siRNA sense strand
gaucaagagcauggccaua

SEQ ID NO: 2567406 - RNA, 19 nt, Homo sapiens
  misc_RNA (1)...(19): siRNA sense strand
gaucaagagcauggccaua

SEQ ID NO: 2567407 - RNA, 19 nt, Homo sapiens
  misc_RNA (1)...(19): siRNA sense strand
gcucaucaugggacacaaa

SEQ ID NO: 2567408 - RNA, 19 nt, Homo sapiens
  misc_RNA (1)...(19): siRNA sense strand
acaggaauccagugaguca

SEQ ID NO: 2567409 - RNA, 19 nt, Homo sapiens
  misc_RNA (1)...(19): siRNA sense strand
aggaaagagcacgcagaaa

SEQ ID NO: 2567410 - RNA, 19 nt, Homo sapiens
  misc_RNA (1)...(19): siRNA sense strand
uuauaaacaagaaggcaga

SEQ ID NO: 2567411 - RNA, 19 nt, Homo sapiens
  misc_RNA (1)...(19): siRNA sense strand
agguagaacacaaggugga

SEQ ID NO: 2567412 - RNA, 19 nt, Homo sapiens
  misc_RNA (1)...(19): siRNA sense strand
acaucauaaaggaggccaa

SEQ ID NO: 2567413 - RNA, 19 nt, Homo sapiens
  misc_RNA (1)...(19): siRNA sense strand
ccggaaggcacauaaaaua

SEQ ID NO: 2567414 - RNA, 19 nt, Homo sapiens
  misc_RNA (1)...(19): siRNA sense strand
aagaaagacgacucaacua

SEQ ID NO: 2567415 - RNA, 19 nt, Homo sapiens
  misc_RNA (1)...(19): siRNA sense strand
ggaggaaagagcacgcaga

SEQ ID NO: 2567416 - RNA, 19 nt, Homo sapiens
  misc_RNA (1)...(19): siRNA sense strand
cagaaagauguaucccaaa

SEQ ID NO: 2567417 - RNA, 19 nt, Homo sapiens
  misc_RNA (1)...(19): siRNA sense strand
auacauggcaagucucaaa

SEQ ID NO: 2567418 - RNA, 19 nt, Homo sapiens
  misc_RNA (1)...(19): siRNA sense strand
auacauggcaagucucaaa

SEQ ID NO: 2567419 - RNA, 19 nt, Homo sapiens
  misc_RNA (1)...(19): siRNA sense strand
auacauggcaagucucaaa

SEQ ID NO: 2567420 - RNA, 19 nt, Homo sapiens
  misc_RNA (1)...(19): siRNA sense strand
ccuagguggaagucaacaa

SEQ ID NO: 2567421 - RNA, 19 nt, Homo sapiens
  misc_RNA (1)...(19): siRNA sense strand
acauggacccaaagacauu

SEQ ID NO: 2567422 - RNA, 19 nt, Homo sapiens
  misc_RNA (1)...(19): siRNA sense strand
aagagaaaauacauggcaa

SEQ ID NO: 2567423 - RNA, 19 nt, Homo sapiens
  misc_RNA (1)...(19): siRNA sense strand
aagagaaaauacauggcaa

SEQ ID NO: 2567424 - RNA, 19 nt, Homo sapiens
  misc_RNA (1)...(19): siRNA sense strand
acguacagaagaaagacaa

SEQ ID NO: 2567425 - RNA, 19 nt, Homo sapiens
  misc_RNA (1)...(19): siRNA sense strand
ggccauaaggaaaauaaaa

SEQ ID NO: 2567426 - RNA, 19 nt, Homo sapiens
  misc_RNA (1)...(19): siRNA sense strand
gagaaaagggcauccagaa

SEQ ID NO: 2567427 - RNA, 19 nt, Homo sapiens
  misc_RNA (1)...(19): siRNA sense strand
ggccauaaggaaaauaaaa

SEQ ID NO: 2567428 - RNA, 19 nt, Homo sapiens
  misc_RNA (1)...(19): siRNA sense strand
ggccauaaggaaaauaaaa

SEQ ID NO: 2567429 - RNA, 19 nt, Homo sapiens
  misc_RNA (1)...(19): siRNA sense strand
agguaacaauucauaguca

SEQ ID NO: 2567430 - RNA, 19 nt, Homo sapiens
  misc_RNA (1)...(19): siRNA sense strand
cagaagaaagacaucucaa

SEQ ID NO: 2567431 - RNA, 19 nt, Homo sapiens
  misc_RNA (1)...(19): siRNA sense strand
agauagcaaacaagaccua

SEQ ID NO: 2567432 - RNA, 19 nt, Homo sapiens
  misc_RNA (1)...(19): siRNA sense strand
ucaucaaaauaaagggcau

SEQ ID NO: 2567433 - RNA, 19 nt, Homo sapiens
  misc_RNA (1)...(19): siRNA sense strand
aagcagcugugaugggaca

SEQ ID NO: 2567434 - RNA, 19 nt, Homo sapiens
  misc_RNA (1)...(19): siRNA sense strand
aagagcaaauacauggcaa

SEQ ID NO: 2567435 - RNA, 19 nt, Homo sapiens
  misc_RNA (1)...(19): siRNA sense strand
ggccaaaaugcaaaaggaa

SEQ ID NO: 2567436 - RNA, 19 nt, Homo sapiens
  misc_RNA (1)...(19): siRNA sense strand
ccaaaaugcaaaaggaaag

SEQ ID NO: 2567437 - RNA, 19 nt, Homo sapiens
  misc_RNA (1)...(19): siRNA sense strand
agguaagaauuccuaguca

SEQ ID NO: 2567438 - RNA, 19 nt, Homo sapiens
  misc_RNA (1)...(19): siRNA sense strand
acacaagguggaucccaaa

SEQ ID NO: 2567439 - RNA, 19 nt, Homo sapiens
  misc_RNA (1)...(19): siRNA sense strand
agaugagcuccuaguauau

SEQ ID NO: 2567440 - RNA, 19 nt, Homo sapiens
  misc_RNA (1)...(19): siRNA sense strand
aaaagaguguacagaaaga

SEQ ID NO: 2567441 - RNA, 19 nt, Homo sapiens
  misc_RNA (1)...(19): siRNA sense strand
cggagagaguuucgggaga

SEQ ID NO: 2567442 - RNA, 19 nt, Homo sapiens
  misc_RNA (1)...(19): siRNA sense strand
cagaaaagccagaggagga

SEQ ID NO: 2567443 - RNA, 19 nt, Homo sapiens
  misc_RNA (1)...(19): siRNA sense strand
cgagagaaggagagagaag

SEQ ID NO: 2567444 - RNA, 19 nt, Homo sapiens
  misc_RNA (1)...(19): siRNA sense strand
aagacaaggaggaggcaga

SEQ ID NO: 2567445 - RNA, 19 nt, Homo sapiens
  misc_RNA (1)...(19): siRNA sense strand
aguucaaggcggauaagaa

SEQ ID NO: 2567446 - RNA, 19 nt, Homo sapiens
  misc_RNA (1)...(19): siRNA sense strand
cggauaagaaggcggcaca

SEQ ID NO: 2567447 - RNA, 19 nt, Homo sapiens
  misc_RNA (1)...(19): siRNA sense strand
agaagaagaagcuggcaga

SEQ ID NO: 2567448 - RNA, 19 nt, Homo sapiens
  misc_RNA (1)...(19): siRNA sense strand
agaagcuggcagagaagaa

SEQ ID NO: 2567449 - RNA, 19 nt, Homo sapiens
  misc_RNA (1)...(19): siRNA sense strand
aggaggaggcagaggccau

SEQ ID NO: 2567450 - RNA, 19 nt, Homo sapiens
  misc_RNA (1)...(19): siRNA sense strand
cgucaggaugcuccggaaa

SEQ ID NO: 2567451 - RNA, 19 nt, Homo sapiens
  misc_RNA (1)...(19): siRNA sense strand
agguagagaaggcggcaga

SEQ ID NO: 2567452 - RNA, 19 nt, Homo sapiens
  misc_RNA (1)...(19): siRNA sense strand
cgaaccugccgcugguaaa

SEQ ID NO: 2567453 - RNA, 19 nt, Homo sapiens
  misc_RNA (1)...(19): siRNA sense strand
gagaagagugggaacgcca

SEQ ID NO: 2567454 - RNA, 19 nt, Homo sapiens
  misc_RNA (1)...(19): siRNA sense strand
aguguaacuacgagcgcua

SEQ ID NO: 2567455 - RNA, 19 nt, Homo sapiens
  misc_RNA (1)...(19): siRNA sense strand
gguuauaccuacgaggaca

SEQ ID NO: 2567456 - RNA, 19 nt, Homo sapiens
  misc_RNA (1)...(19): siRNA sense strand
uagagaaggcggcagaaaa

SEQ ID NO: 2567457 - RNA, 19 nt, Homo sapiens
  misc_RNA (1)...(19): siRNA sense strand
uggagguggacguggauga

SEQ ID NO: 2567458 - RNA, 19 nt, Homo sapiens
  misc_RNA (1)...(19): siRNA sense strand
gagcagugccuguaccaga

SEQ ID NO: 2567459 - RNA, 19 nt, Homo sapiens
  misc_RNA (1)...(19): siRNA sense strand
cagaacaggagucggacga

SEQ ID NO: 2567460 - RNA, 19 nt, Homo sapiens
  misc_RNA (1)...(19): siRNA sense strand
aagaagaagcuggcagaga

SEQ ID NO: 2567461 - RNA, 19 nt, Homo sapiens
  misc_RNA (1)...(19): siRNA sense strand
acaucgacguggaggugga

SEQ ID NO: 2567462 - RNA, 19 nt, Homo sapiens
  misc_RNA (1)...(19): siRNA sense strand
acgccagcggagagaguuu

SEQ ID NO: 2567463 - RNA, 19 nt, Homo sapiens
  misc_RNA (1)...(19): siRNA sense strand
ggauaagaaggcggcacaa

SEQ ID NO: 2567464 - RNA, 19 nt, Homo sapiens
  misc_RNA (1)...(19): siRNA sense strand
aggcagaggccaucaagca

SEQ ID NO: 2567465 - RNA, 19 nt, Homo sapiens
  misc_RNA (1)...(19): siRNA sense strand
ggcaguucaaggcggauaa

SEQ ID NO: 2567466 - RNA, 19 nt, Homo sapiens
  misc_RNA (1)...(19): siRNA sense strand
gagagagaagagugggaac

SEQ ID NO: 2567467 - RNA, 19 nt, Homo sapiens
  misc_RNA (1)...(19): siRNA sense strand
gggaacgccgagagaagga

SEQ ID NO: 2567468 - RNA, 19 nt, Homo sapiens
  misc_RNA (1)...(19): siRNA sense strand
gcacgaagguccaagucca

SEQ ID NO: 2567469 - RNA, 19 nt, Homo sapiens
  misc_RNA (1)...(19): siRNA sense strand
ccaguguccaagagggaau

SEQ ID NO: 2567470 - RNA, 19 nt, Homo sapiens
  misc_RNA (1)...(19): siRNA sense strand
gugaagacguugaaggaga

SEQ ID NO: 2567471 - RNA, 19 nt, Homo sapiens
  misc_RNA (1)...(19): siRNA sense strand
cggacaaggcgaacaucaa

SEQ ID NO: 2567472 - RNA, 19 nt, Homo sapiens
  misc_RNA (1)...(19): siRNA sense strand
ggaccuucugugagagcaa

SEQ ID NO: 2567473 - RNA, 19 nt, Homo sapiens
  misc_RNA (1)...(19): siRNA sense strand
gggagaagaucaaggacuc

SEQ ID NO: 2567474 - RNA, 19 nt, Homo sapiens
  misc_RNA (1)...(19): siRNA sense strand
ugugagagcaagaggcuga

SEQ ID NO: 2567475 - RNA, 19 nt, Homo sapiens
  misc_RNA (1)...(19): siRNA sense strand
gugaggagaaccuggccaa

SEQ ID NO: 2567476 - RNA, 19 nt, Homo sapiens
  misc_RNA (1)...(19): siRNA sense strand
ccaagaaggucacggagcu

SEQ ID NO: 2567477 - RNA, 19 nt, Homo sapiens
  misc_RNA (1)...(19): siRNA sense strand
gagcggaguuauucggagu

SEQ ID NO: 2567478 - RNA, 19 nt, Homo sapiens
  misc_RNA (1)...(19): siRNA sense strand
gcguaugaucugcuggaca

SEQ ID NO: 2567479 - RNA, 19 nt, Homo sapiens
  misc_RNA (1)...(19): siRNA sense strand
ggucacuggcacaagaaca

SEQ ID NO: 2567480 - RNA, 19 nt, Homo sapiens
  misc_RNA (1)...(19): siRNA sense strand
accugaaggcacuggacaa

SEQ ID NO: 2567481 - RNA, 19 nt, Homo sapiens
  misc_RNA (1)...(19): siRNA sense strand
uggugaagacguugaagga

SEQ ID NO: 2567482 - RNA, 19 nt, Homo sapiens
  misc_RNA (1)...(19): siRNA sense strand
ccuacgaggcccagguguu

SEQ ID NO: 2567483 - RNA, 19 nt, Homo sapiens
  misc_RNA (1)...(19): siRNA sense strand
ucaaggauguaauggagga

SEQ ID NO: 2567484 - RNA, 19 nt, Homo sapiens
  misc_RNA (1)...(19): siRNA sense strand
ucaagggcucgguggagaa

SEQ ID NO: 2567485 - RNA, 19 nt, Homo sapiens
  misc_RNA (1)...(19): siRNA sense strand
aggaccggcuggacaggaa

SEQ ID NO: 2567486 - RNA, 19 nt, Homo sapiens
  misc_RNA (1)...(19): siRNA sense strand
gucacuggcacaagaacaa

SEQ ID NO: 2567487 - RNA, 19 nt, Homo sapiens
  misc_RNA (1)...(19): siRNA sense strand
uggcagaguugacuggaga

SEQ ID NO: 2567488 - RNA, 19 nt, Homo sapiens
  misc_RNA (1)...(19): siRNA sense strand
agacgaaagcggaggagug

SEQ ID NO: 2567489 - RNA, 19 nt, Homo sapiens
  misc_RNA (1)...(19): siRNA sense strand
ggagagagacgaaagcgga

SEQ ID NO: 2567490 - RNA, 19 nt, Homo sapiens
  misc_RNA (1)...(19): siRNA sense strand
gagcauugaagguggagcu

SEQ ID NO: 2567491 - RNA, 19 nt, Homo sapiens
  misc_RNA (1)...(19): siRNA sense strand
uuauggagcaauugggcau

SEQ ID NO: 2567492 - RNA, 19 nt, Homo sapiens
  misc_RNA (1)...(19): siRNA sense strand
ugacagaauuucagaggca

SEQ ID NO: 2567493 - RNA, 19 nt, Homo sapiens
  misc_RNA (1)...(19): siRNA sense strand
cagcacaguuuaauggcaa

SEQ ID NO: 2567494 - RNA, 19 nt, Homo sapiens
  misc_RNA (1)...(19): siRNA sense strand
ccuaugaggcacagaggau

SEQ ID NO: 2567495 - RNA, 19 nt, Homo sapiens
  misc_RNA (1)...(19): siRNA sense strand
uuacgaaccugaaggccaa

SEQ ID NO: 2567496 - RNA, 19 nt, Homo sapiens
  misc_RNA (1)...(19): siRNA sense strand
ggcaagaaggacaagguga

SEQ ID NO: 2567497 - RNA, 19 nt, Homo sapiens
  misc_RNA (1)...(19): siRNA sense strand
ugaccauagccgaugacua

SEQ ID NO: 2567498 - RNA, 19 nt, Homo sapiens
  misc_RNA (1)...(19): siRNA sense strand
ccgagaaccugcugcgacu

SEQ ID NO: 2567499 - RNA, 19 nt, Homo sapiens
  misc_RNA (1)...(19): siRNA sense strand
cugcgggauccuaggagaa

SEQ ID NO: 2567500 - RNA, 19 nt, Homo sapiens
  misc_RNA (1)...(19): siRNA sense strand
gaggagacgccgagaaccu

SEQ ID NO: 2567501 - RNA, 19 nt, Homo sapiens
  misc_RNA (1)...(19): siRNA sense strand
guagcuaccuuguccggaa

SEQ ID NO: 2567502 - RNA, 19 nt, Homo sapiens
  misc_RNA (1)...(19): siRNA sense strand
gcaagaaggacaaggugac

SEQ ID NO: 2567503 - RNA, 19 nt, Homo sapiens
  misc_RNA (1)...(19): siRNA sense strand
ucaagagcaaagcaggaaa

SEQ ID NO: 2567504 - RNA, 19 nt, Homo sapiens
  misc_RNA (1)...(19): siRNA sense strand
gaggcaagaaacugcucaa

SEQ ID NO: 2567505 - RNA, 19 nt, Homo sapiens
  misc_RNA (1)...(19): siRNA sense strand
acuuguagauccagagaaa

SEQ ID NO: 2567506 - RNA, 19 nt, Homo sapiens
  misc_RNA (1)...(19): siRNA sense strand
gaaauuaaccaaugcggaa

SEQ ID NO: 2567507 - RNA, 19 nt, Homo sapiens
  misc_RNA (1)...(19): siRNA sense strand
gcuuuauggacaaguguua

SEQ ID NO: 2567508 - RNA, 19 nt, Homo sapiens
  misc_RNA (1)...(19): siRNA sense strand
ggggaagaaagaaggguaa

SEQ ID NO: 2567509 - RNA, 19 nt, Homo sapiens
  misc_RNA (1)...(19): siRNA sense strand
ugaaggagcuuuauggaca

SEQ ID NO: 2567510 - RNA, 19 nt, Homo sapiens
  misc_RNA (1)...(19): siRNA sense strand
agauauugauagugccauu

SEQ ID NO: 2567511 - RNA, 19 nt, Homo sapiens
  misc_RNA (1)...(19): siRNA sense strand
gggaagaaagaaggguaaa

SEQ ID NO: 2567512 - RNA, 19 nt, Homo sapiens
  misc_RNA (1)...(19): siRNA sense strand
gaagcauagaggaguuaaa

SEQ ID NO: 2567513 - RNA, 19 nt, Homo sapiens
  misc_RNA (1)...(19): siRNA sense strand
gcugaacagaauugagaau

SEQ ID NO: 2567514 - RNA, 19 nt, Homo sapiens
  misc_RNA (1)...(19): siRNA sense strand
gugaaaagcagcacacaaa

SEQ ID NO: 2567515 - RNA, 19 nt, Homo sapiens
  misc_RNA (1)...(19): siRNA sense strand
aggcaugguaucugcauua

SEQ ID NO: 2567516 - RNA, 19 nt, Homo sapiens
  misc_RNA (1)...(19): siRNA sense strand
ggagugaagugaaccggua

SEQ ID NO: 2567517 - RNA, 19 nt, Homo sapiens
  misc_RNA (1)...(19): siRNA sense strand
cugcaaacuucaaacucaa

SEQ ID NO: 2567518 - RNA, 19 nt, Homo sapiens
  misc_RNA (1)...(19): siRNA sense strand
aaagaagaaagguggaaaa

SEQ ID NO: 2567519 - RNA, 19 nt, Homo sapiens
  misc_RNA (1)...(19): siRNA sense strand
aggaagacccacaggcaga

SEQ ID NO: 2567520 - RNA, 19 nt, Homo sapiens
  misc_RNA (1)...(19): siRNA sense strand
cggaagaaggaggcaauua

SEQ ID NO: 2567521 - RNA, 19 nt, Homo sapiens
  misc_RNA (1)...(19): siRNA sense strand
aagccaaagcucuuaguaa

SEQ ID NO: 2567522 - RNA, 19 nt, Homo sapiens
  misc_RNA (1)...(19): siRNA sense strand
cugaaguggaugccaguaa

SEQ ID NO: 2567523 - RNA, 19 nt, Homo sapiens
  misc_RNA (1)...(19): siRNA sense strand
aguacaggcugaacagaau

SEQ ID NO: 2567524 - RNA, 19 nt, Homo sapiens
  misc_RNA (1)...(19): siRNA sense strand
agaaaaugcagcugaaauu

SEQ ID NO: 2567525 - RNA, 19 nt, Homo sapiens
  misc_RNA (1)...(19): siRNA sense strand
aggaacaaggacagggaga

SEQ ID NO: 2567526 - RNA, 19 nt, Homo sapiens
  misc_RNA (1)...(19): siRNA sense strand
ggaagaaagaaggguaaaa

SEQ ID NO: 2567527 - RNA, 19 nt, Homo sapiens
  misc_RNA (1)...(19): siRNA sense strand
uggaaaaguuacuggagau

SEQ ID NO: 2567528 - RNA, 19 nt, Homo sapiens
  misc_RNA (1)...(19): siRNA sense strand
gccuugaagacaauagaaa

SEQ ID NO: 2567529 - RNA, 19 nt, Homo sapiens
  misc_RNA (1)...(19): siRNA sense strand
auuaugaugaggagaggaa

SEQ ID NO: 2567530 - RNA, 19 nt, Homo sapiens
  misc_RNA (1)...(19): siRNA sense strand
ugauaagagaagcugcaaa

SEQ ID NO: 2567531 - RNA, 19 nt, Homo sapiens
  misc_RNA (1)...(19): siRNA sense strand
acaaacugaaggagcuuua

SEQ ID NO: 2567532 - RNA, 19 nt, Homo sapiens
  misc_RNA (1)...(19): siRNA sense strand
cugaugggacugaggaaga

SEQ ID NO: 2567533 - RNA, 19 nt, Homo sapiens
  misc_RNA (1)...(19): siRNA sense strand
cagacaaacugaaggagcu

SEQ ID NO: 2567534 - RNA, 19 nt, Homo sapiens
  misc_RNA (1)...(19): siRNA sense strand
ggaaaaguuacuggagaua

SEQ ID NO: 2567535 - RNA, 19 nt, Homo sapiens
  misc_RNA (1)...(19): siRNA sense strand
ggacagggagauuugaaaa

SEQ ID NO: 2567536 - RNA, 19 nt, Homo sapiens
  misc_RNA (1)...(19): siRNA sense strand
uggaaaagguggcugguga

SEQ ID NO: 2567537 - RNA, 19 nt, Homo sapiens
  misc_RNA (1)...(19): siRNA sense strand
ggaacucccaagaugauua

SEQ ID NO: 2567538 - RNA, 19 nt, Homo sapiens
  misc_RNA (1)...(19): siRNA sense strand
ccuacaagaagcugaagau

SEQ ID NO: 2567539 - RNA, 19 nt, Homo sapiens
  misc_RNA (1)...(19): siRNA sense strand
acacaaaccaggcugaaca

SEQ ID NO: 2567540 - RNA, 19 nt, Homo sapiens
  misc_RNA (1)...(19): siRNA sense strand
cuaagaauuaugacccaaa

SEQ ID NO: 2567541 - RNA, 19 nt, Homo sapiens
  misc_RNA (1)...(19): siRNA sense strand
aggcagaacuggccaucau

SEQ ID NO: 2567542 - RNA, 19 nt, Homo sapiens
  misc_RNA (1)...(19): siRNA sense strand
cuccaagaagaaagugaaa

SEQ ID NO: 2567543 - RNA, 19 nt, Homo sapiens
  misc_RNA (1)...(19): siRNA sense strand
gcuacauacauucggaaga

SEQ ID NO: 2567544 - RNA, 19 nt, Homo sapiens
  misc_RNA (1)...(19): siRNA sense strand
ggcggaagaaggaggcaau

SEQ ID NO: 2567545 - RNA, 19 nt, Homo sapiens
  misc_RNA (1)...(19): siRNA sense strand
aaguagauguugaggcucu

SEQ ID NO: 2567546 - RNA, 19 nt, Homo sapiens
  misc_RNA (1)...(19): siRNA sense strand
caccaaaguguuagccaau

SEQ ID NO: 2567547 - RNA, 19 nt, Homo sapiens
  misc_RNA (1)...(19): siRNA sense strand
gggaaaauugccuaagaau

SEQ ID NO: 2567548 - RNA, 19 nt, Homo sapiens
  misc_RNA (1)...(19): siRNA sense strand
caaccagcagacagacaaa

SEQ ID NO: 2567549 - RNA, 19 nt, Homo sapiens
  misc_RNA (1)...(19): siRNA sense strand
ggacugaggaagacccaca

SEQ ID NO: 2567550 - RNA, 19 nt, Homo sapiens
  misc_RNA (1)...(19): siRNA sense strand
caauagagcugcuucagga

SEQ ID NO: 2567551 - RNA, 19 nt, Homo sapiens
  misc_RNA (1)...(19): siRNA sense strand
cuugaagacaauagaaagu

SEQ ID NO: 2567552 - RNA, 19 nt, Homo sapiens
  misc_RNA (1)...(19): siRNA sense strand
uaugaugaggagaggaaaa

SEQ ID NO: 2567553 - RNA, 19 nt, Homo sapiens
  misc_RNA (1)...(19): siRNA sense strand
cuacaacagcuguggaaac

SEQ ID NO: 2567554 - RNA, 19 nt, Homo sapiens
  misc_RNA (1)...(19): siRNA sense strand
auagagaucucguccggaa

SEQ ID NO: 2567555 - RNA, 19 nt, Homo sapiens
  misc_RNA (1)...(19): siRNA sense strand
caugaaaauccuacaagaa

SEQ ID NO: 2567556 - RNA, 19 nt, Homo sapiens
  misc_RNA (1)...(19): siRNA sense strand
aaccaaaggaacaaggaca

SEQ ID NO: 2567557 - RNA, 19 nt, Homo sapiens
  misc_RNA (1)...(19): siRNA sense strand
gugccaaccagcagacaga

SEQ ID NO: 2567558 - RNA, 19 nt, Homo sapiens
  misc_RNA (1)...(19): siRNA sense strand
agacagacaaacugaagga

SEQ ID NO: 2567559 - RNA, 19 nt, Homo sapiens
  misc_RNA (1)...(19): siRNA sense strand
ggaacaaggacagggagau

SEQ ID NO: 2567560 - RNA, 19 nt, Homo sapiens
  misc_RNA (1)...(19): siRNA sense strand
gcaaaauaucugccaguuu

SEQ ID NO: 2567561 - RNA, 19 nt, Homo sapiens
  misc_RNA (1)...(19): siRNA sense strand
uguugaggcucuugaaaau

SEQ ID NO: 2567562 - RNA, 19 nt, Homo sapiens
  misc_RNA (1)...(19): siRNA sense strand
ucggaagaaggguggaaaa

SEQ ID NO: 2567563 - RNA, 19 nt, Homo sapiens
  misc_RNA (1)...(19): siRNA sense strand
gcagauagcaagagugaau

SEQ ID NO: 2567564 - RNA, 19 nt, Homo sapiens
  misc_RNA (1)...(19): siRNA sense strand
auucaagacugguggacaa

SEQ ID NO: 2567565 - RNA, 19 nt, Homo sapiens
  misc_RNA (1)...(19): siRNA sense strand
acuaagaagccuuggagua

SEQ ID NO: 2567566 - RNA, 19 nt, Homo sapiens
  misc_RNA (1)...(19): siRNA sense strand
acgcuaaagcagaugaaua

SEQ ID NO: 2567567 - RNA, 19 nt, Homo sapiens
  misc_RNA (1)...(19): siRNA sense strand
uagugaagaugaagaggaa

SEQ ID NO: 2567568 - RNA, 19 nt, Homo sapiens
  misc_RNA (1)...(19): siRNA sense strand
ccuacaaagcagugacaau

SEQ ID NO: 2567569 - RNA, 19 nt, Homo sapiens
  misc_RNA (1)...(19): siRNA sense strand
ccauauuaauacagacaga

SEQ ID NO: 2567570 - RNA, 19 nt, Homo sapiens
  misc_RNA (1)...(19): siRNA sense strand
aggaauaccaaaucaguua

SEQ ID NO: 2567571 - RNA, 19 nt, Homo sapiens
  misc_RNA (1)...(19): siRNA sense strand
agaacaagacagacagcua

SEQ ID NO: 2567572 - RNA, 19 nt, Homo sapiens
  misc_RNA (1)...(19): siRNA sense strand
uguugaaccuccugacaaa

SEQ ID NO: 2567573 - RNA, 19 nt, Homo sapiens
  misc_RNA (1)...(19): siRNA sense strand
agugcaagcuggaagacaa

SEQ ID NO: 2567574 - RNA, 19 nt, Homo sapiens
  misc_RNA (1)...(19): siRNA sense strand
ucacagaacaagacagaca

SEQ ID NO: 2567575 - RNA, 19 nt, Homo sapiens
  misc_RNA (1)...(19): siRNA sense strand
ccgacaaugcagauagcaa

SEQ ID NO: 2567576 - RNA, 19 nt, Homo sapiens
  misc_RNA (1)...(19): siRNA sense strand
acauaaggaaccugaguuu

SEQ ID NO: 2567577 - RNA, 19 nt, Homo sapiens
  misc_RNA (1)...(19): siRNA sense strand
gugcaagcuggaagacaaa

SEQ ID NO: 2567578 - RNA, 19 nt, Homo sapiens
  misc_RNA (1)...(19): siRNA sense strand
aggcacagauucagcguuu

SEQ ID NO: 2567579 - RNA, 19 nt, Homo sapiens
  misc_RNA (1)...(19): siRNA sense strand
gcaccuucuuagauguaaa

SEQ ID NO: 2567580 - RNA, 19 nt, Homo sapiens
  misc_RNA (1)...(19): siRNA sense strand
cagcagacgaagaugaaga

SEQ ID NO: 2567581 - RNA, 19 nt, Homo sapiens
  misc_RNA (1)...(19): siRNA sense strand
agcaguaacucuagcaaau

SEQ ID NO: 2567582 - RNA, 19 nt, Homo sapiens
  misc_RNA (1)...(19): siRNA sense strand
ccagcuuuaugaugagaaa

SEQ ID NO: 2567583 - RNA, 19 nt, Homo sapiens
  misc_RNA (1)...(19): siRNA sense strand
agacaaauggaguugguuu

SEQ ID NO: 2567584 - RNA, 19 nt, Homo sapiens
  misc_RNA (1)...(19): siRNA sense strand
gagaaaagaaccugaugua

SEQ ID NO: 2567585 - RNA, 19 nt, Homo sapiens
  misc_RNA (1)...(19): siRNA sense strand
caguaacaauucugaaaca

SEQ ID NO: 2567586 - RNA, 19 nt, Homo sapiens
  misc_RNA (1)...(19): siRNA sense strand
cgaagaugaagaaggugua

SEQ ID NO: 2567587 - RNA, 19 nt, Homo sapiens
  misc_RNA (1)...(19): siRNA sense strand
augcuauagcucugaaaua

SEQ ID NO: 2567588 - RNA, 19 nt, Homo sapiens
  misc_RNA (1)...(19): siRNA sense strand
acagcuugguggucagaaa

SEQ ID NO: 2567589 - RNA, 19 nt, Homo sapiens
  misc_RNA (1)...(19): siRNA sense strand
caacauccugagaaagaaa

SEQ ID NO: 2567590 - RNA, 19 nt, Homo sapiens
  misc_RNA (1)...(19): siRNA sense strand
uugcuaaccaguaaggaaa

SEQ ID NO: 2567591 - RNA, 19 nt, Homo sapiens
  misc_RNA (1)...(19): siRNA sense strand
agacagacagcuaagacua

SEQ ID NO: 2567592 - RNA, 19 nt, Homo sapiens
  misc_RNA (1)...(19): siRNA sense strand
accugaaugccuagaaaua

SEQ ID NO: 2567593 - RNA, 19 nt, Homo sapiens
  misc_RNA (1)...(19): siRNA sense strand
aguugaagcuggagagccu

SEQ ID NO: 2567594 - RNA, 19 nt, Homo sapiens
  misc_RNA (1)...(19): siRNA sense strand
agaugaagaagguguaaca

SEQ ID NO: 2567595 - RNA, 19 nt, Homo sapiens
  misc_RNA (1)...(19): siRNA sense strand
guguugaagaugaagauuu

SEQ ID NO: 2567596 - RNA, 19 nt, Homo sapiens
  misc_RNA (1)...(19): siRNA sense strand
augcaaaguucauacucaa

SEQ ID NO: 2567597 - RNA, 19 nt, Homo sapiens
  misc_RNA (1)...(19): siRNA sense strand
ugauuaaccacuuggaaca

SEQ ID NO: 2567598 - RNA, 19 nt, Homo sapiens
  misc_RNA (1)...(19): siRNA sense strand
cugcaaaguaagacagcca

SEQ ID NO: 2567599 - RNA, 19 nt, Homo sapiens
  misc_RNA (1)...(19): siRNA sense strand
cuaccaaagcaguaauuau

SEQ ID NO: 2567600 - RNA, 19 nt, Homo sapiens
  misc_RNA (1)...(19): siRNA sense strand
cagcaguaacucuagcaaa

SEQ ID NO: 2567601 - RNA, 19 nt, Homo sapiens
  misc_RNA (1)...(19): siRNA sense strand
guucaagggacuuauaaau

SEQ ID NO: 2567602 - RNA, 19 nt, Homo sapiens
  misc_RNA (1)...(19): siRNA sense strand
acacuuaauucuaggcagu

SEQ ID NO: 2567603 - RNA, 19 nt, Homo sapiens
  misc_RNA (1)...(19): siRNA sense strand
gcacaugagaaaaggugua

SEQ ID NO: 2567604 - RNA, 19 nt, Homo sapiens
  misc_RNA (1)...(19): siRNA sense strand
cguuuaccauacaaagaaa

SEQ ID NO: 2567605 - RNA, 19 nt, Homo sapiens
  misc_RNA (1)...(19): siRNA sense strand
agaaguaccugaaugccua

SEQ ID NO: 2567606 - RNA, 19 nt, Homo sapiens
  misc_RNA (1)...(19): siRNA sense strand
aguaaggcuuccaagaauu

SEQ ID NO: 2567607 - RNA, 19 nt, Homo sapiens
  misc_RNA (1)...(19): siRNA sense strand
ccagugagucagaagauuu

SEQ ID NO: 2567608 - RNA, 19 nt, Homo sapiens
  misc_RNA (1)...(19): siRNA sense strand
uguugaagacacagugcaa

SEQ ID NO: 2567609 - RNA, 19 nt, Homo sapiens
  misc_RNA (1)...(19): siRNA sense strand
gaaccuucgaaccgggaaa

SEQ ID NO: 2567610 - RNA, 19 nt, Homo sapiens
  misc_RNA (1)...(19): siRNA sense strand
gggcuugcuguuugcgaua

SEQ ID NO: 2567611 - RNA, 19 nt, Homo sapiens
  misc_RNA (1)...(19): siRNA sense strand
uggcaauuucauagaauca

SEQ ID NO: 2567612 - RNA, 19 nt, Homo sapiens
  misc_RNA (1)...(19): siRNA sense strand
ccacagcaauauugaacca

SEQ ID NO: 2567613 - RNA, 19 nt, Homo sapiens
  misc_RNA (1)...(19): siRNA sense strand
cugaaacgcuaaagcagau

SEQ ID NO: 2567614 - RNA, 19 nt, Homo sapiens
  misc_RNA (1)...(19): siRNA sense strand
aagcagaugaauagcauga

SEQ ID NO: 2567615 - RNA, 19 nt, Homo sapiens
  misc_RNA (1)...(19): siRNA sense strand
gaguuuggacaguguggaa

SEQ ID NO: 2567616 - RNA, 19 nt, Homo sapiens
  misc_RNA (1)...(19): siRNA sense strand
ccucacagaacaagacaga

SEQ ID NO: 2567617 - RNA, 19 nt, Homo sapiens
  misc_RNA (1)...(19): siRNA sense strand
cuggcuugcacaugagaaa

SEQ ID NO: 2567618 - RNA, 19 nt, Homo sapiens
  misc_RNA (1)...(19): siRNA sense strand
ccaaaauaauugugaccca

SEQ ID NO: 2567619 - RNA, 19 nt, Homo sapiens
  misc_RNA (1)...(19): siRNA sense strand
cuaagaaugaccaugaaau

SEQ ID NO: 2567620 - RNA, 19 nt, Homo sapiens
  misc_RNA (1)...(19): siRNA sense strand
ugauccuggucgagaagua

SEQ ID NO: 2567621 - RNA, 19 nt, Homo sapiens
  misc_RNA (1)...(19): siRNA sense strand
cauaucacuuccagggaga

SEQ ID NO: 2567622 - RNA, 19 nt, Homo sapiens
  misc_RNA (1)...(19): siRNA sense strand
gaaugcagcaggugaggau

SEQ ID NO: 2567623 - RNA, 19 nt, Homo sapiens
  misc_RNA (1)...(19): siRNA sense strand
gccaguaacaauucugaaa

SEQ ID NO: 2567624 - RNA, 19 nt, Homo sapiens
  misc_RNA (1)...(19): siRNA sense strand
agucaugaaugcaccagaa

SEQ ID NO: 2567625 - RNA, 19 nt, Homo sapiens
  misc_RNA (1)...(19): siRNA sense strand
guugcuaaccaguaaggaa

SEQ ID NO: 2567626 - RNA, 19 nt, Homo sapiens
  misc_RNA (1)...(19): siRNA sense strand
gagcaaacacaguuggauc

SEQ ID NO: 2567627 - RNA, 19 nt, Homo sapiens
  misc_RNA (1)...(19): siRNA sense strand
aaacaucagaggaaccaaa

SEQ ID NO: 2567628 - RNA, 19 nt, Homo sapiens
  misc_RNA (1)...(19): siRNA sense strand
augaagaagguguaacauu

SEQ ID NO: 2567629 - RNA, 19 nt, Homo sapiens
  misc_RNA (1)...(19): siRNA sense strand
ggaaggagaucgagcgucu

SEQ ID NO: 2567630 - RNA, 19 nt, Homo sapiens
  misc_RNA (1)...(19): siRNA sense strand
agaagaugaaagaggccaa

SEQ ID NO: 2567631 - RNA, 19 nt, Homo sapiens
  misc_RNA (1)...(19): siRNA sense strand
agaaauucgacuauggcaa

SEQ ID NO: 2567632 - RNA, 19 nt, Homo sapiens
  misc_RNA (1)...(19): siRNA sense strand
ccgagaacgagaagaagau

SEQ ID NO: 2567633 - RNA, 19 nt, Homo sapiens
  misc_RNA (1)...(19): siRNA sense strand
cgcacaaggcccuggagaa

SEQ ID NO: 2567634 - RNA, 19 nt, Homo sapiens
  misc_RNA (1)...(19): siRNA sense strand
ccgcagugucagcgaguga

SEQ ID NO: 2567635 - RNA, 19 nt, Homo sapiens
  misc_RNA (1)...(19): siRNA sense strand
agugucagcgagugagaaa

SEQ ID NO: 2567636 - RNA, 19 nt, Homo sapiens
  misc_RNA (1)...(19): siRNA sense strand
uugaaagcagggaggaauu

SEQ ID NO: 2567637 - RNA, 19 nt, Homo sapiens
  misc_RNA (1)...(19): siRNA sense strand
acgacgugaaggagaaauu

SEQ ID NO: 2567638 - RNA, 19 nt, Homo sapiens
  misc_RNA (1)...(19): siRNA sense strand
aguugaaagcagggaggaa

SEQ ID NO: 2567639 - RNA, 19 nt, Homo sapiens
  misc_RNA (1)...(19): siRNA sense strand
ccucggaagcggaagcuga

SEQ ID NO: 2567640 - RNA, 19 nt, Homo sapiens
  misc_RNA (1)...(19): siRNA sense strand
gagaagaagaugaaagagg

SEQ ID NO: 2567641 - RNA, 19 nt, Homo sapiens
  misc_RNA (1)...(19): siRNA sense strand
agaccguacuggaaggcga

SEQ ID NO: 2567642 - RNA, 19 nt, Homo sapiens
  misc_RNA (1)...(19): siRNA sense strand
ccuacauccugcugagcca

SEQ ID NO: 2567643 - RNA, 19 nt, Homo sapiens
  misc_RNA (1)...(19): siRNA sense strand
agaucaacgcggugugcga

SEQ ID NO: 2567644 - RNA, 19 nt, Homo sapiens
  misc_RNA (1)...(19): siRNA sense strand
gccaaauugcccagagcca

SEQ ID NO: 2567645 - RNA, 19 nt, Homo sapiens
  misc_RNA (1)...(19): siRNA sense strand
ugaagaacauugaggcacu

SEQ ID NO: 2567646 - RNA, 19 nt, Homo sapiens
  misc_RNA (1)...(19): siRNA sense strand
gcugaagaacauugaggca

SEQ ID NO: 2567647 - RNA, 19 nt, Homo sapiens
  misc_RNA (1)...(19): siRNA sense strand
ccucaaauccaaacggcca

SEQ ID NO: 2567648 - RNA, 19 nt, Homo sapiens
  misc_RNA (1)...(19): siRNA sense strand
ucagcaagaucaaggcuca

SEQ ID NO: 2567649 - RNA, 19 nt, Homo sapiens
  misc_RNA (1)...(19): siRNA sense strand
cauggagacuggaugccaa

SEQ ID NO: 2567650 - RNA, 19 nt, Homo sapiens
  misc_RNA (1)...(19): siRNA sense strand
agaaacaauuccaggagcu

SEQ ID NO: 2567651 - RNA, 19 nt, Homo sapiens
  misc_RNA (1)...(19): siRNA sense strand
ggccacaauacaugcgcua

SEQ ID NO: 2567652 - RNA, 19 nt, Homo sapiens
  misc_RNA (1)...(19): siRNA sense strand
gcucacuuauggaagccua

SEQ ID NO: 2567653 - RNA, 19 nt, Homo sapiens
  misc_RNA (1)...(19): siRNA sense strand
uucaagacucccaaggaua

SEQ ID NO: 2567654 - RNA, 19 nt, Homo sapiens
  misc_RNA (1)...(19): siRNA sense strand
cggcaaaggaagagaagcu

SEQ ID NO: 2567655 - RNA, 19 nt, Homo sapiens
  misc_RNA (1)...(19): siRNA sense strand
gcacagguuucuuggagga

SEQ ID NO: 2567656 - RNA, 19 nt, Homo sapiens
  misc_RNA (1)...(19): siRNA sense strand
gggcuuugcuauaggucca

SEQ ID NO: 2567657 - RNA, 19 nt, Homo sapiens
  misc_RNA (1)...(19): siRNA sense strand
uguacgaguuuguugggaa

SEQ ID NO: 2567658 - RNA, 19 nt, Homo sapiens
  misc_RNA (1)...(19): siRNA sense strand
agccugaccaugaggagua

SEQ ID NO: 2567659 - RNA, 19 nt, Homo sapiens
  misc_RNA (1)...(19): siRNA sense strand
gggugcagccagagaguca

SEQ ID NO: 2567660 - RNA, 19 nt, Homo sapiens
  misc_RNA (1)...(19): siRNA sense strand
cgacuauggucaccgggaa

SEQ ID NO: 2567661 - RNA, 19 nt, Homo sapiens
  misc_RNA (1)...(19): siRNA sense strand
cgauaggugaagaugaaga

SEQ ID NO: 2567662 - RNA, 19 nt, Homo sapiens
  misc_RNA (1)...(19): siRNA sense strand
ucuaugaguuuguggggaa

SEQ ID NO: 2567663 - RNA, 19 nt, Homo sapiens
  misc_RNA (1)...(19): siRNA sense strand
cagacagcuuccagagcau

SEQ ID NO: 2567664 - RNA, 19 nt, Homo sapiens
  misc_RNA (1)...(19): siRNA sense strand
gaaugauaauuguuggagu

SEQ ID NO: 2567665 - RNA, 19 nt, Homo sapiens
  misc_RNA (1)...(19): siRNA sense strand
acagaaauccagacggcca

SEQ ID NO: 2567666 - RNA, 19 nt, Homo sapiens
  misc_RNA (1)...(19): siRNA sense strand
gaugaugaagagagaggca

SEQ ID NO: 2567667 - RNA, 19 nt, Homo sapiens
  misc_RNA (1)...(19): siRNA sense strand
gaagagagaggcaacguca

SEQ ID NO: 2567668 - RNA, 19 nt, Homo sapiens
  misc_RNA (1)...(19): siRNA sense strand
ucgaaguccaccugccaaa

SEQ ID NO: 2567669 - RNA, 19 nt, Homo sapiens
  misc_RNA (1)...(19): siRNA sense strand
gggaaugauaauuguugga

SEQ ID NO: 2567670 - RNA, 19 nt, Homo sapiens
  misc_RNA (1)...(19): siRNA sense strand
ccgagugggagaugggcau

SEQ ID NO: 2567671 - RNA, 19 nt, Homo sapiens
  misc_RNA (1)...(19): siRNA sense strand
agagcgaagacgugaagau

SEQ ID NO: 2567672 - RNA, 19 nt, Homo sapiens
  misc_RNA (1)...(19): siRNA sense strand
ucgccuucgccgaggacua

SEQ ID NO: 2567673 - RNA, 19 nt, Homo sapiens
  misc_RNA (1)...(19): siRNA sense strand
cggagagcgaagacgugaa

SEQ ID NO: 2567674 - RNA, 19 nt, Homo sapiens
  misc_RNA (1)...(19): siRNA sense strand
gaucagagcaugaaggaag

SEQ ID NO: 2567675 - RNA, 19 nt, Homo sapiens
  misc_RNA (1)...(19): siRNA sense strand
cggaaaaggaggaacugaa

SEQ ID NO: 2567676 - RNA, 19 nt, Homo sapiens
  misc_RNA (1)...(19): siRNA sense strand
ggugaauaaauuuggcaga

SEQ ID NO: 2567677 - RNA, 19 nt, Homo sapiens
  misc_RNA (1)...(19): siRNA sense strand
ggcaggaggaugaggcaga

SEQ ID NO: 2567678 - RNA, 19 nt, Homo sapiens
  misc_RNA (1)...(19): siRNA sense strand
ccaacuucaccgugggcuu

SEQ ID NO: 2567679 - RNA, 19 nt, Homo sapiens
  misc_RNA (1)...(19): siRNA sense strand
ugauugucccggagaccaa

SEQ ID NO: 2567680 - RNA, 19 nt, Homo sapiens
  misc_RNA (1)...(19): siRNA sense strand
cugaaguguacccggaaaa

SEQ ID NO: 2567681 - RNA, 19 nt, Homo sapiens
  misc_RNA (1)...(19): siRNA sense strand
gggaagagccugacccaca

SEQ ID NO: 2567682 - RNA, 19 nt, Homo sapiens
  misc_RNA (1)...(19): siRNA sense strand
gggaggaccuggaugcuga

SEQ ID NO: 2567683 - RNA, 19 nt, Homo sapiens
  misc_RNA (1)...(19): siRNA sense strand
ucgugaagcucaugcccaa

SEQ ID NO: 2567684 - RNA, 19 nt, Homo sapiens
  misc_RNA (1)...(19): siRNA sense strand
gcgcugauguacacggaca

SEQ ID NO: 2567685 - RNA, 19 nt, Homo sapiens
  misc_RNA (1)...(19): siRNA sense strand
ccaagaucucaguggacau

SEQ ID NO: 2567686 - RNA, 19 nt, Homo sapiens
  misc_RNA (1)...(19): siRNA sense strand
ccagagagugccauggaga

SEQ ID NO: 2567687 - RNA, 19 nt, Homo sapiens
  misc_RNA (1)...(19): siRNA sense strand
aggauccagccgugggaaa

SEQ ID NO: 2567688 - RNA, 19 nt, Homo sapiens
  misc_RNA (1)...(19): siRNA sense strand
gugccauggagaugaauga

SEQ ID NO: 2567689 - RNA, 19 nt, Homo sapiens
  misc_RNA (1)...(19): siRNA sense strand
uugcuggauucgaguggaa

SEQ ID NO: 2567690 - RNA, 19 nt, Homo sapiens
  misc_RNA (1)...(19): siRNA sense strand
gcauauuuccugcugguca

SEQ ID NO: 2567691 - RNA, 19 nt, Homo sapiens
  misc_RNA (1)...(19): siRNA sense strand
cggacacgguacagaccuu

SEQ ID NO: 2567692 - RNA, 19 nt, Homo sapiens
  misc_RNA (1)...(19): siRNA sense strand
cgacaaauaccugggagca

SEQ ID NO: 2567693 - RNA, 19 nt, Homo sapiens
  misc_RNA (1)...(19): siRNA sense strand
ggucauuggcguuggcuug

SEQ ID NO: 2567694 - RNA, 19 nt, Homo sapiens
  misc_RNA (1)...(19): siRNA sense strand
ccguggaaacagugcgaca

SEQ ID NO: 2567695 - RNA, 19 nt, Homo sapiens
  misc_RNA (1)...(19): siRNA sense strand
caucguucgcccagagaau

SEQ ID NO: 2567696 - RNA, 19 nt, Homo sapiens
  misc_RNA (1)...(19): siRNA sense strand
ccaccagcaaggaggccua

SEQ ID NO: 2567697 - RNA, 19 nt, Homo sapiens
  misc_RNA (1)...(19): siRNA sense strand
ccauuuacuaccuguacaa

SEQ ID NO: 2567698 - RNA, 19 nt, Homo sapiens
  misc_RNA (1)...(19): siRNA sense strand
ccaacuacagcauggucaa

SEQ ID NO: 2567699 - RNA, 19 nt, Homo sapiens
  misc_RNA (1)...(19): siRNA sense strand
acaacaaugucuacaggga

SEQ ID NO: 2567700 - RNA, 19 nt, Homo sapiens
  misc_RNA (1)...(19): siRNA sense strand
cgcaacucaccaugggaaa

SEQ ID NO: 2567701 - RNA, 19 nt, Homo sapiens
  misc_RNA (1)...(19): siRNA sense strand
agagaaugguccugagcag

SEQ ID NO: 2567702 - RNA, 19 nt, Homo sapiens
  misc_RNA (1)...(19): siRNA sense strand
aggacgaggcugagggaaa

SEQ ID NO: 2567703 - RNA, 19 nt, Homo sapiens
  misc_RNA (1)...(19): siRNA sense strand
cugcagugucugaaagauu

SEQ ID NO: 2567704 - RNA, 19 nt, Homo sapiens
  misc_RNA (1)...(19): siRNA sense strand
cuacaagaaugguggaggu

SEQ ID NO: 2567705 - RNA, 19 nt, Homo sapiens
  misc_RNA (1)...(19): siRNA sense strand
acaccaugcgcaagaacaa

SEQ ID NO: 2567706 - RNA, 19 nt, Homo sapiens
  misc_RNA (1)...(19): siRNA sense strand
uuguugaaguugaaggaca

SEQ ID NO: 2567707 - RNA, 19 nt, Homo sapiens
  misc_RNA (1)...(19): siRNA sense strand
cagagggagaaguggucua

SEQ ID NO: 2567708 - RNA, 19 nt, Homo sapiens
  misc_RNA (1)...(19): siRNA sense strand
gaacaagagugucuggauc

SEQ ID NO: 2567709 - RNA, 19 nt, Homo sapiens
  misc_RNA (1)...(19): siRNA sense strand
gggcaucaccugcugggaa

SEQ ID NO: 2567710 - RNA, 19 nt, Homo sapiens
  misc_RNA (1)...(19): siRNA sense strand
gcuucgugggcuugggcaa

SEQ ID NO: 2567711 - RNA, 19 nt, Homo sapiens
  misc_RNA (1)...(19): siRNA sense strand
cgcaagaacaagagugucu

SEQ ID NO: 2567712 - RNA, 19 nt, Homo sapiens
  misc_RNA (1)...(19): siRNA sense strand
augaaguacagcuggguga

SEQ ID NO: 2567713 - RNA, 19 nt, Homo sapiens
  misc_RNA (1)...(19): siRNA sense strand
gggaaaucuucaucgccuu

SEQ ID NO: 2567714 - RNA, 19 nt, Homo sapiens
  misc_RNA (1)...(19): siRNA sense strand
acccaaaagcugugacaau

SEQ ID NO: 2567715 - RNA, 19 nt, Homo sapiens
  misc_RNA (1)...(19): siRNA sense strand
gauauauggaggugauaac

SEQ ID NO: 2567716 - RNA, 19 nt, Homo sapiens
  misc_RNA (1)...(19): siRNA sense strand
uggaggacaccaugcgcaa

SEQ ID NO: 2567717 - RNA, 19 nt, Homo sapiens
  misc_RNA (1)...(19): siRNA sense strand
acaucauuguggagaccau

SEQ ID NO: 2567718 - RNA, 19 nt, Homo sapiens
  misc_RNA (1)...(19): siRNA sense strand
aaggguuaucgucgggaaa

SEQ ID NO: 2567719 - RNA, 19 nt, Homo sapiens
  misc_RNA (1)...(19): siRNA sense strand
ccacaggugaagaggugaa

SEQ ID NO: 2567720 - RNA, 19 nt, Homo sapiens
  misc_RNA (1)...(19): siRNA sense strand
gcaacuuggaccagugcaa

SEQ ID NO: 2567721 - RNA, 19 nt, Homo sapiens
  misc_RNA (1)...(19): siRNA sense strand
uuuaacucuuggugugaaa

SEQ ID NO: 2567722 - RNA, 19 nt, Homo sapiens
  misc_RNA (1)...(19): siRNA sense strand
cugaaaaccccgacauauu

SEQ ID NO: 2567723 - RNA, 19 nt, Homo sapiens
  misc_RNA (1)...(19): siRNA sense strand
acauauucgcagugaucau

SEQ ID NO: 2567724 - RNA, 19 nt, Homo sapiens
  misc_RNA (1)...(19): siRNA sense strand
guguguuggucuuacggua

SEQ ID NO: 2567725 - RNA, 19 nt, Homo sapiens
  misc_RNA (1)...(19): siRNA sense strand
guuagauccagcagaccaa

SEQ ID NO: 2567726 - RNA, 19 nt, Homo sapiens
  misc_RNA (1)...(19): siRNA sense strand
cggccauggucaacaaaau

SEQ ID NO: 2567727 - RNA, 19 nt, Homo sapiens
  misc_RNA (1)...(19): siRNA sense strand
gugaagaggugaagaaccc

SEQ ID NO: 2567728 - RNA, 19 nt, Homo sapiens
  misc_RNA (1)...(19): siRNA sense strand
uugugaaaggaucgguuaa

SEQ ID NO: 2567729 - RNA, 19 nt, Homo sapiens
  misc_RNA (1)...(19): siRNA sense strand
agcuguggcccgugagaau

SEQ ID NO: 2567730 - RNA, 19 nt, Homo sapiens
  misc_RNA (1)...(19): siRNA sense strand
ugugaaaggaucgguuaaa

SEQ ID NO: 2567731 - RNA, 19 nt, Homo sapiens
  misc_RNA (1)...(19): siRNA sense strand
ccuuauggcuuuacgggaa

SEQ ID NO: 2567732 - RNA, 19 nt, Homo sapiens
  misc_RNA (1)...(19): siRNA sense strand
ggaucgucucccaggguaa

SEQ ID NO: 2567733 - RNA, 19 nt, Homo sapiens
  misc_RNA (1)...(19): siRNA sense strand
gcaagagccuggaguggca

SEQ ID NO: 2567734 - RNA, 19 nt, Homo sapiens
  misc_RNA (1)...(19): siRNA sense strand
ggguaaccucgaagaguga

SEQ ID NO: 2567735 - RNA, 19 nt, Homo sapiens
  misc_RNA (1)...(19): siRNA sense strand
caugaaaagacaagugaau

SEQ ID NO: 2567736 - RNA, 19 nt, Homo sapiens
  misc_RNA (1)...(19): siRNA sense strand
guuuagauuucuugccaga

SEQ ID NO: 2567737 - RNA, 19 nt, Homo sapiens
  misc_RNA (1)...(19): siRNA sense strand
gacacagccuggaggguca

SEQ ID NO: 2567738 - RNA, 19 nt, Homo sapiens
  misc_RNA (1)...(19): siRNA sense strand
gggaugggguccugccaaa

SEQ ID NO: 2567739 - RNA, 19 nt, Homo sapiens
  misc_RNA (1)...(19): siRNA sense strand
cuggguuugugaaaggaaa

SEQ ID NO: 2567740 - RNA, 19 nt, Homo sapiens
  misc_RNA (1)...(19): siRNA sense strand
gcaaaugaccaucacccaa

SEQ ID NO: 2567741 - RNA, 19 nt, Homo sapiens
  misc_RNA (1)...(19): siRNA sense strand
ugagaaagauggucuggga

SEQ ID NO: 2567742 - RNA, 19 nt, Homo sapiens
  misc_RNA (1)...(19): siRNA sense strand
ucuuauggcauuagacaca

SEQ ID NO: 2567743 - RNA, 19 nt, Homo sapiens
  misc_RNA (1)...(19): siRNA sense strand
uggugaagaaguucggaau

SEQ ID NO: 2567744 - RNA, 19 nt, Homo sapiens
  misc_RNA (1)...(19): siRNA sense strand
cguucaugcagcagcagaa

SEQ ID NO: 2567745 - RNA, 19 nt, Homo sapiens
  misc_RNA (1)...(19): siRNA sense strand
caacaagucuucugggcuc

SEQ ID NO: 2567746 - RNA, 19 nt, Homo sapiens
  misc_RNA (1)...(19): siRNA sense strand
gguugcuggguuugugaaa

SEQ ID NO: 2567747 - RNA, 19 nt, Homo sapiens
  misc_RNA (1)...(19): siRNA sense strand
agcaagugccagagagcca

SEQ ID NO: 2567748 - RNA, 19 nt, Homo sapiens
  misc_RNA (1)...(19): siRNA sense strand
agaaagauggucugggauc

SEQ ID NO: 2567749 - RNA, 19 nt, Homo sapiens
  misc_RNA (1)...(19): siRNA sense strand
ucaugcagcagcagaagaa

SEQ ID NO: 2567750 - RNA, 19 nt, Homo sapiens
  misc_RNA (1)...(19): siRNA sense strand
gcuuuaugccuuauggcuu

SEQ ID NO: 2567751 - RNA, 19 nt, Homo sapiens
  misc_RNA (1)...(19): siRNA sense strand
cguuugaauaugugggaug

SEQ ID NO: 2567752 - RNA, 19 nt, Homo sapiens
  misc_RNA (1)...(19): siRNA sense strand
agacaacguucaugcagca

SEQ ID NO: 2567753 - RNA, 19 nt, Homo sapiens
  misc_RNA (1)...(19): siRNA sense strand
agaugaugcagaagagauu

SEQ ID NO: 2567754 - RNA, 19 nt, Homo sapiens
  misc_RNA (1)...(19): siRNA sense strand
ggaucaugcuaaaaggaga

SEQ ID NO: 2567755 - RNA, 19 nt, Homo sapiens
  misc_RNA (1)...(19): siRNA sense strand
uggaagaaacuguggcaga

SEQ ID NO: 2567756 - RNA, 19 nt, Homo sapiens
  misc_RNA (1)...(19): siRNA sense strand
augagagggaugaggacaa

SEQ ID NO: 2567757 - RNA, 19 nt, Homo sapiens
  misc_RNA (1)...(19): siRNA sense strand
gcgagcuggaugagaacaa

SEQ ID NO: 2567758 - RNA, 19 nt, Homo sapiens
  misc_RNA (1)...(19): siRNA sense strand
aggaggugguggcggaaaa

SEQ ID NO: 2567759 - RNA, 19 nt, Homo sapiens
  misc_RNA (1)...(19): siRNA sense strand
aagaggaggugguggcgga

SEQ ID NO: 2567760 - RNA, 19 nt, Homo sapiens
  misc_RNA (1)...(19): siRNA sense strand
cagaggaaaccgaagagga

SEQ ID NO: 2567761 - RNA, 19 nt, Homo sapiens
  misc_RNA (1)...(19): siRNA sense strand
aagcagaaggauaucgaca

SEQ ID NO: 2567762 - RNA, 19 nt, Homo sapiens
  misc_RNA (1)...(19): siRNA sense strand
agagggaugaggacaacaa

SEQ ID NO: 2567763 - RNA, 19 nt, Homo sapiens
  misc_RNA (1)...(19): siRNA sense strand
agaagcugcgggugaagaa

SEQ ID NO: 2567764 - RNA, 19 nt, Homo sapiens
  misc_RNA (1)...(19): siRNA sense strand
agaccugugaccuggacaa

SEQ ID NO: 2567765 - RNA, 19 nt, Homo sapiens
  misc_RNA (1)...(19): siRNA sense strand
acaacaugcaggaaggauu

SEQ ID NO: 2567766 - RNA, 19 nt, Homo sapiens
  misc_RNA (1)...(19): siRNA sense strand
ggaaacagaagguacccaa

SEQ ID NO: 2567767 - RNA, 19 nt, Homo sapiens
  misc_RNA (1)...(19): siRNA sense strand
acgaugaugaugaagauau

SEQ ID NO: 2567768 - RNA, 19 nt, Homo sapiens
  misc_RNA (1)...(19): siRNA sense strand
gaugagaacaacuugguca

SEQ ID NO: 2567769 - RNA, 19 nt, Homo sapiens
  misc_RNA (1)...(19): siRNA sense strand
gcaggaaggauucuggaga

SEQ ID NO: 2567770 - RNA, 19 nt, Homo sapiens
  misc_RNA (1)...(19): siRNA sense strand
auggagaagaugacgauga

SEQ ID NO: 2567771 - RNA, 19 nt, Homo sapiens
  misc_RNA (1)...(19): siRNA sense strand
cagaagaccuggugcccua

SEQ ID NO: 2567772 - RNA, 19 nt, Homo sapiens
  misc_RNA (1)...(19): siRNA sense strand
aggucaagaaggugaagaa

SEQ ID NO: 2567773 - RNA, 19 nt, Homo sapiens
  misc_RNA (1)...(19): siRNA sense strand
cagaugaggaggagggcga

SEQ ID NO: 2567774 - RNA, 19 nt, Homo sapiens
  misc_RNA (1)...(19): siRNA sense strand
gcaucugguggguggacaa

SEQ ID NO: 2567775 - RNA, 19 nt, Homo sapiens
  misc_RNA (1)...(19): siRNA sense strand
gguggguggacaaggacaa

SEQ ID NO: 2567776 - RNA, 19 nt, Homo sapiens
  misc_RNA (1)...(19): siRNA sense strand
agagcuucgccgagaacaa

SEQ ID NO: 2567777 - RNA, 19 nt, Homo sapiens
  misc_RNA (1)...(19): siRNA sense strand
acgccaaacgcacgaguau

SEQ ID NO: 2567778 - RNA, 19 nt, Homo sapiens
  misc_RNA (1)...(19): siRNA sense strand
gcgacaugaaggacagcau

SEQ ID NO: 2567779 - RNA, 19 nt, Homo sapiens
  misc_RNA (1)...(19): siRNA sense strand
ggaucuauaccaacgccaa

SEQ ID NO: 2567780 - RNA, 19 nt, Homo sapiens
  misc_RNA (1)...(19): siRNA sense strand
ggaagggauccgagggacu

SEQ ID NO: 2567781 - RNA, 19 nt, Homo sapiens
  misc_RNA (1)...(19): siRNA sense strand
cggagaacuucgcuagcca

SEQ ID NO: 2567782 - RNA, 19 nt, Homo sapiens
  misc_RNA (1)...(19): siRNA sense strand
ugguaugggccuaaaggaa

SEQ ID NO: 2567783 - RNA, 19 nt, Homo sapiens
  misc_RNA (1)...(19): siRNA sense strand
cuauauaugcuuaucguga

SEQ ID NO: 2567784 - RNA, 19 nt, Homo sapiens
  misc_RNA (1)...(19): siRNA sense strand
cagugaaaauagugggauc

SEQ ID NO: 2567785 - RNA, 19 nt, Homo sapiens
  misc_RNA (1)...(19): siRNA sense strand
cagugaaagcguaugucau

SEQ ID NO: 2567786 - RNA, 19 nt, Homo sapiens
  misc_RNA (1)...(19): siRNA sense strand
cuguggaagaaauuguuaa

SEQ ID NO: 2567787 - RNA, 19 nt, Homo sapiens
  misc_RNA (1)...(19): siRNA sense strand
gugcagaacaauuaccuca

SEQ ID NO: 2567788 - RNA, 19 nt, Homo sapiens
  misc_RNA (1)...(19): siRNA sense strand
cugugggacugauggaaau

SEQ ID NO: 2567789 - RNA, 19 nt, Homo sapiens
  misc_RNA (1)...(19): siRNA sense strand
auggaugcaccaagauaua

SEQ ID NO: 2567790 - RNA, 19 nt, Homo sapiens
  misc_RNA (1)...(19): siRNA sense strand
acaaugaacuuaauggaug

SEQ ID NO: 2567791 - RNA, 19 nt, Homo sapiens
  misc_RNA (1)...(19): siRNA sense strand
acaacgaacucuccagaaa

SEQ ID NO: 2567792 - RNA, 19 nt, Homo sapiens
  misc_RNA (1)...(19): siRNA sense strand
cgugacagguggaaccaua

SEQ ID NO: 2567793 - RNA, 19 nt, Homo sapiens
  misc_RNA (1)...(19): siRNA sense strand
ccagaaaccuccaguagga

SEQ ID NO: 2567794 - RNA, 19 nt, Homo sapiens
  misc_RNA (1)...(19): siRNA sense strand
cgacaagggcucuggguuc

SEQ ID NO: 2567795 - RNA, 19 nt, Homo sapiens
  misc_RNA (1)...(19): siRNA sense strand
ggaccagaccucagcccua

SEQ ID NO: 2567796 - RNA, 19 nt, Homo sapiens
  misc_RNA (1)...(19): siRNA sense strand
gcucaaagauguacaccac

SEQ ID NO: 2567797 - RNA, 19 nt, Homo sapiens
  misc_RNA (1)...(19): siRNA sense strand
ucaaagauguacaccacuu

SEQ ID NO: 2567798 - RNA, 19 nt, Homo sapiens
  misc_RNA (1)...(19): siRNA sense strand
uggcgauggaggagcugaa

SEQ ID NO: 2567799 - RNA, 19 nt, Homo sapiens
  misc_RNA (1)...(19): siRNA sense strand
caauaacaagugacccuaa

SEQ ID NO: 2567800 - RNA, 19 nt, Homo sapiens
  misc_RNA (1)...(19): siRNA sense strand
cagcagaagaccaagcaga

SEQ ID NO: 2567801 - RNA, 19 nt, Homo sapiens
  misc_RNA (1)...(19): siRNA sense strand
gcccaagcuuccagagcca

SEQ ID NO: 2567802 - RNA, 19 nt, Homo sapiens
  misc_RNA (1)...(19): siRNA sense strand
agcagaagaccaagcagaa

SEQ ID NO: 2567803 - RNA, 19 nt, Homo sapiens
  misc_RNA (1)...(19): siRNA sense strand
cagcccagcagaagaccaa

SEQ ID NO: 2567804 - RNA, 19 nt, Homo sapiens
  misc_RNA (1)...(19): siRNA sense strand
gugaaaagauggaagaaaa

SEQ ID NO: 2567805 - RNA, 19 nt, Homo sapiens
  misc_RNA (1)...(19): siRNA sense strand
cuacagagacagugagcaa

SEQ ID NO: 2567806 - RNA, 19 nt, Homo sapiens
  misc_RNA (1)...(19): siRNA sense strand
cugaauaggcauagaguca

SEQ ID NO: 2567807 - RNA, 19 nt, Homo sapiens
  misc_RNA (1)...(19): siRNA sense strand
uggaaauacuugacaacaa

SEQ ID NO: 2567808 - RNA, 19 nt, Homo sapiens
  misc_RNA (1)...(19): siRNA sense strand
gcaugaagacuuugaggaa

SEQ ID NO: 2567809 - RNA, 19 nt, Homo sapiens
  misc_RNA (1)...(19): siRNA sense strand
cugucaagcuagagagaga

SEQ ID NO: 2567810 - RNA, 19 nt, Homo sapiens
  misc_RNA (1)...(19): siRNA sense strand
ggauauaagggcaaggcaa

SEQ ID NO: 2567811 - RNA, 19 nt, Homo sapiens
  misc_RNA (1)...(19): siRNA sense strand
gaacaaaugacaaagggaa

SEQ ID NO: 2567812 - RNA, 19 nt, Homo sapiens
  misc_RNA (1)...(19): siRNA sense strand
gcagagaagcugaaagaca

SEQ ID NO: 2567813 - RNA, 19 nt, Homo sapiens
  misc_RNA (1)...(19): siRNA sense strand
uugaacaacuggugugaaa

SEQ ID NO: 2567814 - RNA, 19 nt, Homo sapiens
  misc_RNA (1)...(19): siRNA sense strand
agaaagaccaugaggacuu

SEQ ID NO: 2567815 - RNA, 19 nt, Homo sapiens
  misc_RNA (1)...(19): siRNA sense strand
gugaaggaguuaugugcua

SEQ ID NO: 2567816 - RNA, 19 nt, Homo sapiens
  misc_RNA (1)...(19): siRNA sense strand
ugagagaacaaaugacaaa

SEQ ID NO: 2567817 - RNA, 19 nt, Homo sapiens
  misc_RNA (1)...(19): siRNA sense strand
uggaagaaucccuagaaua

SEQ ID NO: 2567818 - RNA, 19 nt, Homo sapiens
  misc_RNA (1)...(19): siRNA sense strand
uggcagaugaugaagauua

SEQ ID NO: 2567819 - RNA, 19 nt, Homo sapiens
  misc_RNA (1)...(19): siRNA sense strand
uggaacagcugaaggaaca

SEQ ID NO: 2567820 - RNA, 19 nt, Homo sapiens
  misc_RNA (1)...(19): siRNA sense strand
gugacaaggugaaggaguu

SEQ ID NO: 2567821 - RNA, 19 nt, Homo sapiens
  misc_RNA (1)...(19): siRNA sense strand
agauguggcugguggagaa

SEQ ID NO: 2567822 - RNA, 19 nt, Homo sapiens
  misc_RNA (1)...(19): siRNA sense strand
gcucaaauccggcaggaau

SEQ ID NO: 2567823 - RNA, 19 nt, Homo sapiens
  misc_RNA (1)...(19): siRNA sense strand
gcucaaagaaacaggaacu

SEQ ID NO: 2567824 - RNA, 19 nt, Homo sapiens
  misc_RNA (1)...(19): siRNA sense strand
aggagcagauugagaagaa

SEQ ID NO: 2567825 - RNA, 19 nt, Homo sapiens
  misc_RNA (1)...(19): siRNA sense strand
agaucuugcuggagagaca

SEQ ID NO: 2567826 - RNA, 19 nt, Homo sapiens
  misc_RNA (1)...(19): siRNA sense strand
gaaacauggaucagagaga

SEQ ID NO: 2567827 - RNA, 19 nt, Homo sapiens
  misc_RNA (1)...(19): siRNA sense strand
ggaaauaccugaaacacca

SEQ ID NO: 2567828 - RNA, 19 nt, Homo sapiens
  misc_RNA (1)...(19): siRNA sense strand
ccgaggagauuguggagau

SEQ ID NO: 2567829 - RNA, 19 nt, Homo sapiens
  misc_RNA (1)...(19): siRNA sense strand
ggaaguugcaauuggaaga

SEQ ID NO: 2567830 - RNA, 19 nt, Homo sapiens
  misc_RNA (1)...(19): siRNA sense strand
ccuaaagaccaauggcaau

SEQ ID NO: 2567831 - RNA, 19 nt, Homo sapiens
  misc_RNA (1)...(19): siRNA sense strand
gaucguaaggagagccuaa

SEQ ID NO: 2567832 - RNA, 19 nt, Homo sapiens
  misc_RNA (1)...(19): siRNA sense strand
agacagaaauugcuggaga

SEQ ID NO: 2567833 - RNA, 19 nt, Homo sapiens
  misc_RNA (1)...(19): siRNA sense strand
ccaaagaagacaugaagca

SEQ ID NO: 2567834 - RNA, 19 nt, Homo sapiens
  misc_RNA (1)...(19): siRNA sense strand
cagagaacaucaaggcuau

SEQ ID NO: 2567835 - RNA, 19 nt, Homo sapiens
  misc_RNA (1)...(19): siRNA sense strand
gaacaaagggucauggcuu

SEQ ID NO: 2567836 - RNA, 19 nt, Homo sapiens
  misc_RNA (1)...(19): siRNA sense strand
ccaugagacccgaguacaa

SEQ ID NO: 2567837 - RNA, 19 nt, Homo sapiens
  misc_RNA (1)...(19): siRNA sense strand
cagcugauuuguagagaca

SEQ ID NO: 2567838 - RNA, 19 nt, Homo sapiens
  misc_RNA (1)...(19): siRNA sense strand
guagagacacagaggauga

SEQ ID NO: 2567839 - RNA, 19 nt, Homo sapiens
  misc_RNA (1)...(19): siRNA sense strand
uuggagaaggcuugggaaa

SEQ ID NO: 2567840 - RNA, 19 nt, Homo sapiens
  misc_RNA (1)...(19): siRNA sense strand
gacagaaauugcuggagaa

SEQ ID NO: 2567841 - RNA, 19 nt, Homo sapiens
  misc_RNA (1)...(19): siRNA sense strand
gauaaggaaacaagccuaa

SEQ ID NO: 2567842 - RNA, 19 nt, Homo sapiens
  misc_RNA (1)...(19): siRNA sense strand
ggaucauugcucaaagaaa

SEQ ID NO: 2567843 - RNA, 19 nt, Homo sapiens
  misc_RNA (1)...(19): siRNA sense strand
guaugaaagcucugcggaa

SEQ ID NO: 2567844 - RNA, 19 nt, Homo sapiens
  misc_RNA (1)...(19): siRNA sense strand
gcacauaaggcuucagcuu

SEQ ID NO: 2567845 - RNA, 19 nt, Homo sapiens
  misc_RNA (1)...(19): siRNA sense strand
cugcaaacuuacaacgauu

SEQ ID NO: 2567846 - RNA, 19 nt, Homo sapiens
  misc_RNA (1)...(19): siRNA sense strand
aaacaaaaugguagaggaa

SEQ ID NO: 2567847 - RNA, 19 nt, Homo sapiens
  misc_RNA (1)...(19): siRNA sense strand
gaagaauggaucagugaga

SEQ ID NO: 2567848 - RNA, 19 nt, Homo sapiens
  misc_RNA (1)...(19): siRNA sense strand
uggcagagggcaagucaua

SEQ ID NO: 2567849 - RNA, 19 nt, Homo sapiens
  misc_RNA (1)...(19): siRNA sense strand
aaacaagggaagaacgauu

SEQ ID NO: 2567850 - RNA, 19 nt, Homo sapiens
  misc_RNA (1)...(19): siRNA sense strand
ggagaguuguugaagugaa

SEQ ID NO: 2567851 - RNA, 19 nt, Homo sapiens
  misc_RNA (1)...(19): siRNA sense strand
gagcagauugagaagaaau

SEQ ID NO: 2567852 - RNA, 19 nt, Homo sapiens
  misc_RNA (1)...(19): siRNA sense strand
gcauagagaucuugcugga

SEQ ID NO: 2567853 - RNA, 19 nt, Homo sapiens
  misc_RNA (1)...(19): siRNA sense strand
caggaagagaagaucauaa

SEQ ID NO: 2567854 - RNA, 19 nt, Homo sapiens
  misc_RNA (1)...(19): siRNA sense strand
aauaagacccagcuggaaa

SEQ ID NO: 2567855 - RNA, 19 nt, Homo sapiens
  misc_RNA (1)...(19): siRNA sense strand
gagaagucaccaugaagaa

SEQ ID NO: 2567856 - RNA, 19 nt, Homo sapiens
  misc_RNA (1)...(19): siRNA sense strand
cugaggaccugcagagaca

SEQ ID NO: 2567857 - RNA, 19 nt, Homo sapiens
  misc_RNA (1)...(19): siRNA sense strand
agagagaugauuuggagaa

SEQ ID NO: 2567858 - RNA, 19 nt, Homo sapiens
  misc_RNA (1)...(19): siRNA sense strand
gacaaagcuuggagacuau

SEQ ID NO: 2567859 - RNA, 19 nt, Homo sapiens
  misc_RNA (1)...(19): siRNA sense strand
gggaaaagauggaaauacu

SEQ ID NO: 2567860 - RNA, 19 nt, Homo sapiens
  misc_RNA (1)...(19): siRNA sense strand
auacagaacuugaagagca

SEQ ID NO: 2567861 - RNA, 19 nt, Homo sapiens
  misc_RNA (1)...(19): siRNA sense strand
gauuugaagcucugaaaga

SEQ ID NO: 2567862 - RNA, 19 nt, Homo sapiens
  misc_RNA (1)...(19): siRNA sense strand
gcugauuuguagagacaca

SEQ ID NO: 2567863 - RNA, 19 nt, Homo sapiens
  misc_RNA (1)...(19): siRNA sense strand
ggauagaggagaaguugau

SEQ ID NO: 2567864 - RNA, 19 nt, Homo sapiens
  misc_RNA (1)...(19): siRNA sense strand
gccuaaagaccaauggcaa

SEQ ID NO: 2567865 - RNA, 19 nt, Homo sapiens
  misc_RNA (1)...(19): siRNA sense strand
cagugaugaaauagagaau

SEQ ID NO: 2567866 - RNA, 19 nt, Homo sapiens
  misc_RNA (1)...(19): siRNA sense strand
gggaaguggaucauggaga

SEQ ID NO: 2567867 - RNA, 19 nt, Homo sapiens
  misc_RNA (1)...(19): siRNA sense strand
gaugaagauuacaaggaca

SEQ ID NO: 2567868 - RNA, 19 nt, Homo sapiens
  misc_RNA (1)...(19): siRNA sense strand
gcaagaagauccuagacca

SEQ ID NO: 2567869 - RNA, 19 nt, Homo sapiens
  misc_RNA (1)...(19): siRNA sense strand
aggcaagacaggucaagaa

SEQ ID NO: 2567870 - RNA, 19 nt, Homo sapiens
  misc_RNA (1)...(19): siRNA sense strand
uggaagaguccuuggaaua

SEQ ID NO: 2567871 - RNA, 19 nt, Homo sapiens
  misc_RNA (1)...(19): siRNA sense strand
gugcagaaccugaggaaga

SEQ ID NO: 2567872 - RNA, 19 nt, Homo sapiens
  misc_RNA (1)...(19): siRNA sense strand
cgauuaacguccaggaaga

SEQ ID NO: 2567873 - RNA, 19 nt, Homo sapiens
  misc_RNA (1)...(19): siRNA sense strand
ccaccaacauccagagcaa

SEQ ID NO: 2567874 - RNA, 19 nt, Homo sapiens
  misc_RNA (1)...(19): siRNA sense strand
agaaauggauacaggaaaa

SEQ ID NO: 2567875 - RNA, 19 nt, Homo sapiens
  misc_RNA (1)...(19): siRNA sense strand
guaaaggacaagagggaca

SEQ ID NO: 2567876 - RNA, 19 nt, Homo sapiens
  misc_RNA (1)...(19): siRNA sense strand
ggaaaagugcacagaguua

SEQ ID NO: 2567877 - RNA, 19 nt, Homo sapiens
  misc_RNA (1)...(19): siRNA sense strand
gggaauuacuuuuggagaa

SEQ ID NO: 2567878 - RNA, 19 nt, Homo sapiens
  misc_RNA (1)...(19): siRNA sense strand
cauccaaccuacaaggaaa

SEQ ID NO: 2567879 - RNA, 19 nt, Homo sapiens
  misc_RNA (1)...(19): siRNA sense strand
cagaaaacaucaagaagaa

SEQ ID NO: 2567880 - RNA, 19 nt, Homo sapiens
  misc_RNA (1)...(19): siRNA sense strand
aggcauugcuggagcgaca

SEQ ID NO: 2567881 - RNA, 19 nt, Homo sapiens
  misc_RNA (1)...(19): siRNA sense strand
gagaaauggauacaggaaa

SEQ ID NO: 2567882 - RNA, 19 nt, Homo sapiens
  misc_RNA (1)...(19): siRNA sense strand
guaugaagcagguggaaga

SEQ ID NO: 2567883 - RNA, 19 nt, Homo sapiens
  misc_RNA (1)...(19): siRNA sense strand
cagcagaaguucagcgcuu

SEQ ID NO: 2567884 - RNA, 19 nt, Homo sapiens
  misc_RNA (1)...(19): siRNA sense strand
ggaaaguggaagugaacga

SEQ ID NO: 2567885 - RNA, 19 nt, Homo sapiens
  misc_RNA (1)...(19): siRNA sense strand
gguggaaaguggaagugaa

SEQ ID NO: 2567886 - RNA, 19 nt, Homo sapiens
  misc_RNA (1)...(19): siRNA sense strand
gugcaguacuuacgagaau

SEQ ID NO: 2567887 - RNA, 19 nt, Homo sapiens
  misc_RNA (1)...(19): siRNA sense strand
acacugagcagguggacaa

SEQ ID NO: 2567888 - RNA, 19 nt, Homo sapiens
  misc_RNA (1)...(19): siRNA sense strand
cugcguacgugaagaaauu

SEQ ID NO: 2567889 - RNA, 19 nt, Homo sapiens
  misc_RNA (1)...(19): siRNA sense strand
ugacaacaccaucgggaaa

SEQ ID NO: 2567890 - RNA, 19 nt, Homo sapiens
  misc_RNA (1)...(19): siRNA sense strand
ggagaaauggauacaggaa

SEQ ID NO: 2567891 - RNA, 19 nt, Homo sapiens
  misc_RNA (1)...(19): siRNA sense strand
cguaaaggcauguuggaga

SEQ ID NO: 2567892 - RNA, 19 nt, Homo sapiens
  misc_RNA (1)...(19): siRNA sense strand
cuugaauaccgaagacaaa

SEQ ID NO: 2567893 - RNA, 19 nt, Homo sapiens
  misc_RNA (1)...(19): siRNA sense strand
ccaacaagcagcagaacuu

SEQ ID NO: 2567894 - RNA, 19 nt, Homo sapiens
  misc_RNA (1)...(19): siRNA sense strand
uuggagaagaugcgagaaa

SEQ ID NO: 2567895 - RNA, 19 nt, Homo sapiens
  misc_RNA (1)...(19): siRNA sense strand
aggaacugaucaagacuaa

SEQ ID NO: 2567896 - RNA, 19 nt, Homo sapiens
  misc_RNA (1)...(19): siRNA sense strand
gcucaagaguugggugaau

SEQ ID NO: 2567897 - RNA, 19 nt, Homo sapiens
  misc_RNA (1)...(19): siRNA sense strand
agaaggaccugaaggccaa

SEQ ID NO: 2567898 - RNA, 19 nt, Homo sapiens
  misc_RNA (1)...(19): siRNA sense strand
caggaacaccggacagaaa

SEQ ID NO: 2567899 - RNA, 19 nt, Homo sapiens
  misc_RNA (1)...(19): siRNA sense strand
ccaauguggaagaggaaga

SEQ ID NO: 2567900 - RNA, 19 nt, Homo sapiens
  misc_RNA (1)...(19): siRNA sense strand
ugaaugaagacuugggaga

SEQ ID NO: 2567901 - RNA, 19 nt, Homo sapiens
  misc_RNA (1)...(19): siRNA sense strand
gauuacagcauuagaugaa

SEQ ID NO: 2567902 - RNA, 19 nt, Homo sapiens
  misc_RNA (1)...(19): siRNA sense strand
aggcgaacguggaugagaa

SEQ ID NO: 2567903 - RNA, 19 nt, Homo sapiens
  misc_RNA (1)...(19): siRNA sense strand
acacagggaucaaggacau

SEQ ID NO: 2567904 - RNA, 19 nt, Homo sapiens
  misc_RNA (1)...(19): siRNA sense strand
gacguggauucgagagaaa

SEQ ID NO: 2567905 - RNA, 19 nt, Homo sapiens
  misc_RNA (1)...(19): siRNA sense strand
aaguaaaggacaagaggga

SEQ ID NO: 2567906 - RNA, 19 nt, Homo sapiens
  misc_RNA (1)...(19): siRNA sense strand
acgaagacuuugagaaauc

SEQ ID NO: 2567907 - RNA, 19 nt, Homo sapiens
  misc_RNA (1)...(19): siRNA sense strand
cagaggaugugaaggccaa

SEQ ID NO: 2567908 - RNA, 19 nt, Homo sapiens
  misc_RNA (1)...(19): siRNA sense strand
ggaggaaccuacagaaaau

SEQ ID NO: 2567909 - RNA, 19 nt, Homo sapiens
  misc_RNA (1)...(19): siRNA sense strand
gggugaaugagaagaugaa

SEQ ID NO: 2567910 - RNA, 19 nt, Homo sapiens
  misc_RNA (1)...(19): siRNA sense strand
gugaucaguuuguggaaga

SEQ ID NO: 2567911 - RNA, 19 nt, Homo sapiens
  misc_RNA (1)...(19): siRNA sense strand
gguugaaggacauuaacaa

SEQ ID NO: 2567912 - RNA, 19 nt, Homo sapiens
  misc_RNA (1)...(19): siRNA sense strand
ccucccaaguaaaggacaa

SEQ ID NO: 2567913 - RNA, 19 nt, Homo sapiens
  misc_RNA (1)...(19): siRNA sense strand
aagcugaagugcaggccaa

SEQ ID NO: 2567914 - RNA, 19 nt, Homo sapiens
  misc_RNA (1)...(19): siRNA sense strand
gggauguggaugagacuau

SEQ ID NO: 2567915 - RNA, 19 nt, Homo sapiens
  misc_RNA (1)...(19): siRNA sense strand
ccaucaaggagcugaauga

SEQ ID NO: 2567916 - RNA, 19 nt, Homo sapiens
  misc_RNA (1)...(19): siRNA sense strand
gugaaugagaagaugaaaa

SEQ ID NO: 2567917 - RNA, 19 nt, Homo sapiens
  misc_RNA (1)...(19): siRNA sense strand
gggucaaagugcuggaaac

SEQ ID NO: 2567918 - RNA, 19 nt, Homo sapiens
  misc_RNA (1)...(19): siRNA sense strand
ugaccaaggaggagcucua

SEQ ID NO: 2567919 - RNA, 19 nt, Homo sapiens
  misc_RNA (1)...(19): siRNA sense strand
gggauguggaugagauuga

SEQ ID NO: 2567920 - RNA, 19 nt, Homo sapiens
  misc_RNA (1)...(19): siRNA sense strand
acaugaagcuuuugagaca

SEQ ID NO: 2567921 - RNA, 19 nt, Homo sapiens
  misc_RNA (1)...(19): siRNA sense strand
uauaugaaguagaagguca

SEQ ID NO: 2567922 - RNA, 19 nt, Homo sapiens
  misc_RNA (1)...(19): siRNA sense strand
ccaagcuaauucagaacaa

SEQ ID NO: 2567923 - RNA, 19 nt, Homo sapiens
  misc_RNA (1)...(19): siRNA sense strand
ccaacagagguaaggauuu

SEQ ID NO: 2567924 - RNA, 19 nt, Homo sapiens
  misc_RNA (1)...(19): siRNA sense strand
ccaucgggacugugagcaa

SEQ ID NO: 2567925 - RNA, 19 nt, Homo sapiens
  misc_RNA (1)...(19): siRNA sense strand
ggucaaagugcuggaaaca

SEQ ID NO: 2567926 - RNA, 19 nt, Homo sapiens
  misc_RNA (1)...(19): siRNA sense strand
ggguuaucgacaugggcaa

SEQ ID NO: 2567927 - RNA, 19 nt, Homo sapiens
  misc_RNA (1)...(19): siRNA sense strand
uggaaacagcagaggacau

SEQ ID NO: 2567928 - RNA, 19 nt, Homo sapiens
  misc_RNA (1)...(19): siRNA sense strand
ccugaaggccaaugaguca

SEQ ID NO: 2567929 - RNA, 19 nt, Homo sapiens
  misc_RNA (1)...(19): siRNA sense strand
gguaaacucccuuggugaa

SEQ ID NO: 2567930 - RNA, 19 nt, Homo sapiens
  misc_RNA (1)...(19): siRNA sense strand
gguccuguaugguggaaga

SEQ ID NO: 2567931 - RNA, 19 nt, Homo sapiens
  misc_RNA (1)...(19): siRNA sense strand
aagcggagccugagcgaga

SEQ ID NO: 2567932 - RNA, 19 nt, Homo sapiens
  misc_RNA (1)...(19): siRNA sense strand
gcaucaugaagaaggccua

SEQ ID NO: 2567933 - RNA, 19 nt, Homo sapiens
  misc_RNA (1)...(19): siRNA sense strand
gugaagaucaagauggagu

SEQ ID NO: 2567934 - RNA, 19 nt, Homo sapiens
  misc_RNA (1)...(19): siRNA sense strand
gcgagauggagaucgguau

SEQ ID NO: 2567935 - RNA, 19 nt, Homo sapiens
  misc_RNA (1)...(19): siRNA sense strand
cagcagugccaaugggacu

SEQ ID NO: 2567936 - RNA, 19 nt, Homo sapiens
  misc_RNA (1)...(19): siRNA sense strand
cgaccuucagcaagaggaa

SEQ ID NO: 2567937 - RNA, 19 nt, Homo sapiens
  misc_RNA (1)...(19): siRNA sense strand
gcaagaggaagacgggcau

SEQ ID NO: 2567938 - RNA, 19 nt, Homo sapiens
  misc_RNA (1)...(19): siRNA sense strand
gaccagagaaugagugcca

SEQ ID NO: 2567939 - RNA, 19 nt, Homo sapiens
  misc_RNA (1)...(19): siRNA sense strand
ccggcaaggcacugauuca

SEQ ID NO: 2567940 - RNA, 19 nt, Homo sapiens
  misc_RNA (1)...(19): siRNA sense strand
gaguggaacaguagaccca

SEQ ID NO: 2567941 - RNA, 19 nt, Homo sapiens
  misc_RNA (1)...(19): siRNA sense strand
gaguggaacaguagaccca

SEQ ID NO: 2567942 - RNA, 19 nt, Homo sapiens
  misc_RNA (1)...(19): siRNA sense strand
cguucaucgacgaggccaa

SEQ ID NO: 2567943 - RNA, 19 nt, Homo sapiens
  misc_RNA (1)...(19): siRNA sense strand
gcaguaagaccuauggcaa

SEQ ID NO: 2567944 - RNA, 19 nt, Homo sapiens
  misc_RNA (1)...(19): siRNA sense strand
agcaagaacccgagcacga

SEQ ID NO: 2567945 - RNA, 19 nt, Homo sapiens
  misc_RNA (1)...(19): siRNA sense strand
gugagaucgacgaggaugu

SEQ ID NO: 2567946 - RNA, 19 nt, Homo sapiens
  misc_RNA (1)...(19): siRNA sense strand
caguaagaccuauggcaac

SEQ ID NO: 2567947 - RNA, 19 nt, Homo sapiens
  misc_RNA (1)...(19): siRNA sense strand
aguccgugguccaguguga

SEQ ID NO: 2567948 - RNA, 19 nt, Homo sapiens
  misc_RNA (1)...(19): siRNA sense strand
guugaaaauccuacagcua

SEQ ID NO: 2567949 - RNA, 19 nt, Homo sapiens
  misc_RNA (1)...(19): siRNA sense strand
ccaucacguaagucaguaa

SEQ ID NO: 2567950 - RNA, 19 nt, Homo sapiens
  misc_RNA (1)...(19): siRNA sense strand
uguccaauacagaggcaga

SEQ ID NO: 2567951 - RNA, 19 nt, Homo sapiens
  misc_RNA (1)...(19): siRNA sense strand
aaaagggaaaggaaagaaa

SEQ ID NO: 2567952 - RNA, 19 nt, Homo sapiens
  misc_RNA (1)...(19): siRNA sense strand
gggugugaagacagagaau

SEQ ID NO: 2567953 - RNA, 19 nt, Homo sapiens
  misc_RNA (1)...(19): siRNA sense strand
aguucaagaucaagaggca

SEQ ID NO: 2567954 - RNA, 19 nt, Homo sapiens
  misc_RNA (1)...(19): siRNA sense strand
gcaagcugaugaaggccua

SEQ ID NO: 2567955 - RNA, 19 nt, Homo sapiens
  misc_RNA (1)...(19): siRNA sense strand
uggugcaguucaagaucaa

SEQ ID NO: 2567956 - RNA, 19 nt, Homo sapiens
  misc_RNA (1)...(19): siRNA sense strand
gaauggaggacgaggacac

SEQ ID NO: 2567957 - RNA, 19 nt, Homo sapiens
  misc_RNA (1)...(19): siRNA sense strand
augaaggccuacugcgaga

SEQ ID NO: 2567958 - RNA, 19 nt, Homo sapiens
  misc_RNA (1)...(19): siRNA sense strand
cgcaauguuaccauggaaa

SEQ ID NO: 2567959 - RNA, 19 nt, Homo sapiens
  misc_RNA (1)...(19): siRNA sense strand
cggguaugaccuaaggaaa

SEQ ID NO: 2567960 - RNA, 19 nt, Homo sapiens
  misc_RNA (1)...(19): siRNA sense strand
cuuucaagaccaagaguuu

SEQ ID NO: 2567961 - RNA, 19 nt, Homo sapiens
  misc_RNA (1)...(19): siRNA sense strand
ggguaugaccuaaggaaac

SEQ ID NO: 2567962 - RNA, 19 nt, Homo sapiens
  misc_RNA (1)...(19): siRNA sense strand
agacugguggaaagggaaa

SEQ ID NO: 2567963 - RNA, 19 nt, Homo sapiens
  misc_RNA (1)...(19): siRNA sense strand
gcaauaagguggacccugu

SEQ ID NO: 2567964 - RNA, 19 nt, Homo sapiens
  misc_RNA (1)...(19): siRNA sense strand
acauaaaccaccagggauc

SEQ ID NO: 2567965 - RNA, 19 nt, Homo sapiens
  misc_RNA (1)...(19): siRNA sense strand
agggaaaauucaagacaga

SEQ ID NO: 2567966 - RNA, 19 nt, Homo sapiens
  misc_RNA (1)...(19): siRNA sense strand
cuucauuggguguaaggaa

SEQ ID NO: 2567967 - RNA, 19 nt, Homo sapiens
  misc_RNA (1)...(19): siRNA sense strand
uuaaagaaguuaugcccau

SEQ ID NO: 2567968 - RNA, 19 nt, Homo sapiens
  misc_RNA (1)...(19): siRNA sense strand
cggcaguggcucugacuca

SEQ ID NO: 2567969 - RNA, 19 nt, Homo sapiens
  misc_RNA (1)...(19): siRNA sense strand
cuucagaucuuguggaggu

SEQ ID NO: 2567970 - RNA, 19 nt, Homo sapiens
  misc_RNA (1)...(19): siRNA sense strand
gagaaucagaucugcguga

SEQ ID NO: 2567971 - RNA, 19 nt, Homo sapiens
  misc_RNA (1)...(19): siRNA sense strand
gaacauaaaccaccaggga

SEQ ID NO: 2567972 - RNA, 19 nt, Homo sapiens
  misc_RNA (1)...(19): siRNA sense strand
ccaacuuuguucagagacu

SEQ ID NO: 2567973 - RNA, 19 nt, Homo sapiens
  misc_RNA (1)...(19): siRNA sense strand
gaagacugguggaaaggga

SEQ ID NO: 2567974 - RNA, 19 nt, Homo sapiens
  misc_RNA (1)...(19): siRNA sense strand
ggaaaugaggccaggagac

SEQ ID NO: 2567975 - RNA, 19 nt, Homo sapiens
  misc_RNA (1)...(19): siRNA sense strand
cgaagaacauaaaccacca

SEQ ID NO: 2567976 - RNA, 19 nt, Homo sapiens
  misc_RNA (1)...(19): siRNA sense strand
ggcagauaacacugaaaga

SEQ ID NO: 2567977 - RNA, 19 nt, Homo sapiens
  misc_RNA (1)...(19): siRNA sense strand
ugaggaagccaaugggcca

SEQ ID NO: 2567978 - RNA, 19 nt, Homo sapiens
  misc_RNA (1)...(19): siRNA sense strand
ccaagaguuuacggagcaa

SEQ ID NO: 2567979 - RNA, 19 nt, Homo sapiens
  misc_RNA (1)...(19): siRNA sense strand
ccaacagcgaagacaugaa

SEQ ID NO: 2567980 - RNA, 19 nt, Homo sapiens
  misc_RNA (1)...(19): siRNA sense strand
acaugauagugggaacaaa

SEQ ID NO: 2567981 - RNA, 19 nt, Homo sapiens
  misc_RNA (1)...(19): siRNA sense strand
gcgaagacaugaaacugca

SEQ ID NO: 2567982 - RNA, 19 nt, Homo sapiens
  misc_RNA (1)...(19): siRNA sense strand
aauuuguaccacaggagaa

SEQ ID NO: 2567983 - RNA, 19 nt, Homo sapiens
  misc_RNA (1)...(19): siRNA sense strand
uuucagagauccagcgaag

SEQ ID NO: 2567984 - RNA, 19 nt, Homo sapiens
  misc_RNA (1)...(19): siRNA sense strand
acaagauccuggaggccaa

SEQ ID NO: 2567985 - RNA, 19 nt, Homo sapiens
  misc_RNA (1)...(19): siRNA sense strand
uguucaaaggagugggcua

SEQ ID NO: 2567986 - RNA, 19 nt, Homo sapiens
  misc_RNA (1)...(19): siRNA sense strand
gaggaguacuggaggcugu

SEQ ID NO: 2567987 - RNA, 19 nt, Homo sapiens
  misc_RNA (1)...(19): siRNA sense strand
gggucaagucuucagggaa

SEQ ID NO: 2567988 - RNA, 19 nt, Homo sapiens
  misc_RNA (1)...(19): siRNA sense strand
cuucagggaaaguggugua

SEQ ID NO: 2567989 - RNA, 19 nt, Homo sapiens
  misc_RNA (1)...(19): siRNA sense strand
agacauauauaauggguga

SEQ ID NO: 2567990 - RNA, 19 nt, Homo sapiens
  misc_RNA (1)...(19): siRNA sense strand
aggagaugcugcaggacaa

SEQ ID NO: 2567991 - RNA, 19 nt, Homo sapiens
  misc_RNA (1)...(19): siRNA sense strand
auucaaacuucaucggaaa

SEQ ID NO: 2567992 - RNA, 19 nt, Homo sapiens
  misc_RNA (1)...(19): siRNA sense strand
aggaugaauuugauagaga

SEQ ID NO: 2567993 - RNA, 19 nt, Homo sapiens
  misc_RNA (1)...(19): siRNA sense strand
ccuuauauaaagcggcaaa

SEQ ID NO: 2567994 - RNA, 19 nt, Homo sapiens
  misc_RNA (1)...(19): siRNA sense strand
gagcaaaaggccugaagaa

SEQ ID NO: 2567995 - RNA, 19 nt, Homo sapiens
  misc_RNA (1)...(19): siRNA sense strand
cggcaaaagaggagagaac

SEQ ID NO: 2567996 - RNA, 19 nt, Homo sapiens
  misc_RNA (1)...(19): siRNA sense strand
auauaaugggugaaggcaa

SEQ ID NO: 2567997 - RNA, 19 nt, Homo sapiens
  misc_RNA (1)...(19): siRNA sense strand
cuggagaggcagaaucaaa

SEQ ID NO: 2567998 - RNA, 19 nt, Homo sapiens
  misc_RNA (1)...(19): siRNA sense strand
gccacaaucaguagcguaa

SEQ ID NO: 2567999 - RNA, 19 nt, Homo sapiens
  misc_RNA (1)...(19): siRNA sense strand
caggaaaaccccaggaaga

SEQ ID NO: 2568000 - RNA, 19 nt, Homo sapiens
  misc_RNA (1)...(19): siRNA sense strand
caucggaaauaucgggaca

SEQ ID NO: 2568001 - RNA, 19 nt, Homo sapiens
  misc_RNA (1)...(19): siRNA sense strand
ucaaagaacaaaagccaaa

SEQ ID NO: 2568002 - RNA, 19 nt, Homo sapiens
  misc_RNA (1)...(19): siRNA sense strand
aagggaaaggucagacaaa

SEQ ID NO: 2568003 - RNA, 19 nt, Homo sapiens
  misc_RNA (1)...(19): siRNA sense strand
ggagggauucagugaguga

SEQ ID NO: 2568004 - RNA, 19 nt, Homo sapiens
  misc_RNA (1)...(19): siRNA sense strand
aggaaaggaaacagauuca

SEQ ID NO: 2568005 - RNA, 19 nt, Homo sapiens
  misc_RNA (1)...(19): siRNA sense strand
gcacagaggggaaaagaga

SEQ ID NO: 2568006 - RNA, 19 nt, Homo sapiens
  misc_RNA (1)...(19): siRNA sense strand
uggaggaggaggaugaauu

SEQ ID NO: 2568007 - RNA, 19 nt, Homo sapiens
  misc_RNA (1)...(19): siRNA sense strand
gggaaaggucagacaaaug

SEQ ID NO: 2568008 - RNA, 19 nt, Homo sapiens
  misc_RNA (1)...(19): siRNA sense strand
cuacagugguuucuggaga

SEQ ID NO: 2568009 - RNA, 19 nt, Homo sapiens
  misc_RNA (1)...(19): siRNA sense strand
ggauuacggggaagggaaa

SEQ ID NO: 2568010 - RNA, 19 nt, Homo sapiens
  misc_RNA (1)...(19): siRNA sense strand
aggagaaucagccaagaua

SEQ ID NO: 2568011 - RNA, 19 nt, Homo sapiens
  misc_RNA (1)...(19): siRNA sense strand
cuacaaggagucaugggaa

SEQ ID NO: 2568012 - RNA, 19 nt, Homo sapiens
  misc_RNA (1)...(19): siRNA sense strand
uaaugaguuaggagguaua

SEQ ID NO: 2568013 - RNA, 19 nt, Homo sapiens
  misc_RNA (1)...(19): siRNA sense strand
uaaagagagcugugaagau

SEQ ID NO: 2568014 - RNA, 19 nt, Homo sapiens
  misc_RNA (1)...(19): siRNA sense strand
ggaggaugaauuugauaga

SEQ ID NO: 2568015 - RNA, 19 nt, Homo sapiens
  misc_RNA (1)...(19): siRNA sense strand
aguucaaggagcagugaga

SEQ ID NO: 2568016 - RNA, 19 nt, Homo sapiens
  misc_RNA (1)...(19): siRNA sense strand
ggaagggaaaggucagaca

SEQ ID NO: 2568017 - RNA, 19 nt, Homo sapiens
  misc_RNA (1)...(19): siRNA sense strand
aggaagaagaccagcccuu

SEQ ID NO: 2568018 - RNA, 19 nt, Homo sapiens
  misc_RNA (1)...(19): siRNA sense strand
gcagaagaggcagaggaaa

SEQ ID NO: 2568019 - RNA, 19 nt, Homo sapiens
  misc_RNA (1)...(19): siRNA sense strand
aggucagacaaaugaaauu

SEQ ID NO: 2568020 - RNA, 19 nt, Homo sapiens
  misc_RNA (1)...(19): siRNA sense strand
aaauuaaugccuugguaca

SEQ ID NO: 2568021 - RNA, 19 nt, Homo sapiens
  misc_RNA (1)...(19): siRNA sense strand
aauucaaacuucaucggaa

SEQ ID NO: 2568022 - RNA, 19 nt, Homo sapiens
  misc_RNA (1)...(19): siRNA sense strand
ggagaaucagccaagauau

SEQ ID NO: 2568023 - RNA, 19 nt, Homo sapiens
  misc_RNA (1)...(19): siRNA sense strand
agccaaaggaccagagucu

SEQ ID NO: 2568024 - RNA, 19 nt, Homo sapiens
  misc_RNA (1)...(19): siRNA sense strand
uaguugaagucuugagaac

SEQ ID NO: 2568025 - RNA, 19 nt, Homo sapiens
  misc_RNA (1)...(19): siRNA sense strand
gaggagaugcugcaggaca

SEQ ID NO: 2568026 - RNA, 19 nt, Homo sapiens
  misc_RNA (1)...(19): siRNA sense strand
caaucuuggcucacagcaa

SEQ ID NO: 2568027 - RNA, 19 nt, Homo sapiens
  misc_RNA (1)...(19): siRNA sense strand
gggaaggaggagauggucu

SEQ ID NO: 2568028 - RNA, 19 nt, Homo sapiens
  misc_RNA (1)...(19): siRNA sense strand
gcaaaaggccugaagaaag

SEQ ID NO: 2568029 - RNA, 19 nt, Homo sapiens
  misc_RNA (1)...(19): siRNA sense strand
aggcagaaucaaaucauga

SEQ ID NO: 2568030 - RNA, 19 nt, Homo sapiens
  misc_RNA (1)...(19): siRNA sense strand
gggauuacggggaagggaa

SEQ ID NO: 2568031 - RNA, 19 nt, Homo sapiens
  misc_RNA (1)...(19): siRNA sense strand
aggaauugcccgaguguug

SEQ ID NO: 2568032 - RNA, 19 nt, Homo sapiens
  misc_RNA (1)...(19): siRNA sense strand
gcuuuguucaggagaauca

SEQ ID NO: 2568033 - RNA, 19 nt, Homo sapiens
  misc_RNA (1)...(19): siRNA sense strand
ccauuaucagccagagaga

SEQ ID NO: 2568034 - RNA, 19 nt, Homo sapiens
  misc_RNA (1)...(19): siRNA sense strand
gcaagcaguaugucaucaa

SEQ ID NO: 2568035 - RNA, 19 nt, Homo sapiens
  misc_RNA (1)...(19): siRNA sense strand
ugguacaauugaugacuca

SEQ ID NO: 2568036 - RNA, 19 nt, Homo sapiens
  misc_RNA (1)...(19): siRNA sense strand
uauacaacuuacaguguga

SEQ ID NO: 2568037 - RNA, 19 nt, Homo sapiens
  misc_RNA (1)...(19): siRNA sense strand
ggaccuaggaauugcccga

SEQ ID NO: 2568038 - RNA, 19 nt, Homo sapiens
  misc_RNA (1)...(19): siRNA sense strand
agggaaaggucagacaaau

SEQ ID NO: 2568039 - RNA, 19 nt, Homo sapiens
  misc_RNA (1)...(19): siRNA sense strand
cgucacucaggaaaggaaa

SEQ ID NO: 2568040 - RNA, 19 nt, Homo sapiens
  misc_RNA (1)...(19): siRNA sense strand
ugcagaagaggcagaggaa

SEQ ID NO: 2568041 - RNA, 19 nt, Homo sapiens
  misc_RNA (1)...(19): siRNA sense strand
guacagaucgccauggcuu

SEQ ID NO: 2568042 - RNA, 19 nt, Homo sapiens
  misc_RNA (1)...(19): siRNA sense strand
cuaacaagaacaaacauca

SEQ ID NO: 2568043 - RNA, 19 nt, Homo sapiens
  misc_RNA (1)...(19): siRNA sense strand
cugagggcucccagacaua

SEQ ID NO: 2568044 - RNA, 19 nt, Homo sapiens
  misc_RNA (1)...(19): siRNA sense strand
gugagcaguucaaggagca

SEQ ID NO: 2568045 - RNA, 19 nt, Homo sapiens
  misc_RNA (1)...(19): siRNA sense strand
gguagcaaacccaguguca

SEQ ID NO: 2568046 - RNA, 19 nt, Homo sapiens
  misc_RNA (1)...(19): siRNA sense strand
augggaagguugcagaaga

SEQ ID NO: 2568047 - RNA, 19 nt, Homo sapiens
  misc_RNA (1)...(19): siRNA sense strand
ggaggugauuuguaccgaa

SEQ ID NO: 2568048 - RNA, 19 nt, Homo sapiens
  misc_RNA (1)...(19): siRNA sense strand
cucaaguggaagaggagau

SEQ ID NO: 2568049 - RNA, 19 nt, Homo sapiens
  misc_RNA (1)...(19): siRNA sense strand
cggacaagaagcucagcaa

SEQ ID NO: 2568050 - RNA, 19 nt, Homo sapiens
  misc_RNA (1)...(19): siRNA sense strand
auaucaacuucuuggccaa

SEQ ID NO: 2568051 - RNA, 19 nt, Homo sapiens
  misc_RNA (1)...(19): siRNA sense strand
ucaaugaccaggaggagga

SEQ ID NO: 2568052 - RNA, 19 nt, Homo sapiens
  misc_RNA (1)...(19): siRNA sense strand
ugggugagaaagagagaaa

SEQ ID NO: 2568053 - RNA, 19 nt, Homo sapiens
  misc_RNA (1)...(19): siRNA sense strand
agaaagaagcccugaaaau

SEQ ID NO: 2568054 - RNA, 19 nt, Homo sapiens
  misc_RNA (1)...(19): siRNA sense strand
ucugagaugcagugagaau

SEQ ID NO: 2568055 - RNA, 19 nt, Homo sapiens
  misc_RNA (1)...(19): siRNA sense strand
ccugcagagaggagggcaa

SEQ ID NO: 2568056 - RNA, 19 nt, Homo sapiens
  misc_RNA (1)...(19): siRNA sense strand
ccucucuguuugugagcaa

SEQ ID NO: 2568057 - RNA, 19 nt, Homo sapiens
  misc_RNA (1)...(19): siRNA sense strand
gcggaauccaacagaugaa

SEQ ID NO: 2568058 - RNA, 19 nt, Homo sapiens
  misc_RNA (1)...(19): siRNA sense strand
uguacaaacuuauccgcaa

SEQ ID NO: 2568059 - RNA, 19 nt, Homo sapiens
  misc_RNA (1)...(19): siRNA sense strand
cuuccaucuuauugacaua

SEQ ID NO: 2568060 - RNA, 19 nt, Homo sapiens
  misc_RNA (1)...(19): siRNA sense strand
gcuagaagagacucggcaa

SEQ ID NO: 2568061 - RNA, 19 nt, Homo sapiens
  misc_RNA (1)...(19): siRNA sense strand
uggaaauguaauagaagca

SEQ ID NO: 2568062 - RNA, 19 nt, Homo sapiens
  misc_RNA (1)...(19): siRNA sense strand
gugagaauaaugagaccau

SEQ ID NO: 2568063 - RNA, 19 nt, Homo sapiens
  misc_RNA (1)...(19): siRNA sense strand
ggaaaucugaagacagcau

SEQ ID NO: 2568064 - RNA, 19 nt, Homo sapiens
  misc_RNA (1)...(19): siRNA sense strand
gagaaagaaagaaacggau

SEQ ID NO: 2568065 - RNA, 19 nt, Homo sapiens
  misc_RNA (1)...(19): siRNA sense strand
ccauacaaaaugcaagaaa

SEQ ID NO: 2568066 - RNA, 19 nt, Homo sapiens
  misc_RNA (1)...(19): siRNA sense strand
uguaauagaagcaccguga

SEQ ID NO: 2568067 - RNA, 19 nt, Homo sapiens
  misc_RNA (1)...(19): siRNA sense strand
agagaaagaaagaaacgga

SEQ ID NO: 2568068 - RNA, 19 nt, Homo sapiens
  misc_RNA (1)...(19): siRNA sense strand
uggcauuuaugguggugau

SEQ ID NO: 2568069 - RNA, 19 nt, Homo sapiens
  misc_RNA (1)...(19): siRNA sense strand
uugaggaaguuaagagaag

SEQ ID NO: 2568070 - RNA, 19 nt, Homo sapiens
  misc_RNA (1)...(19): siRNA sense strand
ccccaaaagaggaaccaua

SEQ ID NO: 2568071 - RNA, 19 nt, Homo sapiens
  misc_RNA (1)...(19): siRNA sense strand
gccauguggaaauguaaua

SEQ ID NO: 2568072 - RNA, 19 nt, Homo sapiens
  misc_RNA (1)...(19): siRNA sense strand
ccuuguuccugcuggcaau

SEQ ID NO: 2568073 - RNA, 19 nt, Homo sapiens
  misc_RNA (1)...(19): siRNA sense strand
ggucauucagaggcagaaa

SEQ ID NO: 2568074 - RNA, 19 nt, Homo sapiens
  misc_RNA (1)...(19): siRNA sense strand
aagcagcucucauggguga

SEQ ID NO: 2568075 - RNA, 19 nt, Homo sapiens
  misc_RNA (1)...(19): siRNA sense strand
aauggagauuggcggguuu

SEQ ID NO: 2568076 - RNA, 19 nt, Homo sapiens
  misc_RNA (1)...(19): siRNA sense strand
gcggguuugaggaaguuaa

SEQ ID NO: 2568077 - RNA, 19 nt, Homo sapiens
  misc_RNA (1)...(19): siRNA sense strand
ugccaaucaucguggagau

SEQ ID NO: 2568078 - RNA, 19 nt, Homo sapiens
  misc_RNA (1)...(19): siRNA sense strand
gaagaaauacuuaacggaa

SEQ ID NO: 2568079 - RNA, 19 nt, Homo sapiens
  misc_RNA (1)...(19): siRNA sense strand
ggaauaccuuggauggcua

SEQ ID NO: 2568080 - RNA, 19 nt, Homo sapiens
  misc_RNA (1)...(19): siRNA sense strand
cggcaggagaggaagccaa

SEQ ID NO: 2568081 - RNA, 19 nt, Homo sapiens
  misc_RNA (1)...(19): siRNA sense strand
aggcugacuuccuggacaa

SEQ ID NO: 2568082 - RNA, 19 nt, Homo sapiens
  misc_RNA (1)...(19): siRNA sense strand
ggaccugcagcgugacaaa

SEQ ID NO: 2568083 - RNA, 19 nt, Homo sapiens
  misc_RNA (1)...(19): siRNA sense strand
aagaaaggcagcaaggaga

SEQ ID NO: 2568084 - RNA, 19 nt, Homo sapiens
  misc_RNA (1)...(19): siRNA sense strand
gcaaggagaagcaggcuga

SEQ ID NO: 2568085 - RNA, 19 nt, Homo sapiens
  misc_RNA (1)...(19): siRNA sense strand
agccaaaggaccggagaaa

SEQ ID NO: 2568086 - RNA, 19 nt, Homo sapiens
  misc_RNA (1)...(19): siRNA sense strand
aggagcaggauguggagaa

SEQ ID NO: 2568087 - RNA, 19 nt, Homo sapiens
  misc_RNA (1)...(19): siRNA sense strand
uggagaaggagcugcgaga

SEQ ID NO: 2568088 - RNA, 19 nt, Homo sapiens
  misc_RNA (1)...(19): siRNA sense strand
uggaggaccugcagcguga

SEQ ID NO: 2568089 - RNA, 19 nt, Homo sapiens
  misc_RNA (1)...(19): siRNA sense strand
cggugaagauuuggaggau

SEQ ID NO: 2568090 - RNA, 19 nt, Homo sapiens
  misc_RNA (1)...(19): siRNA sense strand
aggaaggugcgguuggcua

SEQ ID NO: 2568091 - RNA, 19 nt, Homo sapiens
  misc_RNA (1)...(19): siRNA sense strand
aagaaauacuuaacggaag

SEQ ID NO: 2568092 - RNA, 19 nt, Homo sapiens
  misc_RNA (1)...(19): siRNA sense strand
uccuuagacucgagccaua

SEQ ID NO: 2568093 - RNA, 19 nt, Homo sapiens
  misc_RNA (1)...(19): siRNA sense strand
agaugaagcagaaggucca

SEQ ID NO: 2568094 - RNA, 19 nt, Homo sapiens
  misc_RNA (1)...(19): siRNA sense strand
agagcauagaccuggacaa

SEQ ID NO: 2568095 - RNA, 19 nt, Homo sapiens
  misc_RNA (1)...(19): siRNA sense strand
auacuuaacggaaggacuu

SEQ ID NO: 2568096 - RNA, 19 nt, Homo sapiens
  misc_RNA (1)...(19): siRNA sense strand
ugccaaccacugagguaaa

SEQ ID NO: 2568097 - RNA, 19 nt, Homo sapiens
  misc_RNA (1)...(19): siRNA sense strand
ggugccaaccacugaggua

SEQ ID NO: 2568098 - RNA, 19 nt, Homo sapiens
  misc_RNA (1)...(19): siRNA sense strand
ggagcagggauucggugaa

SEQ ID NO: 2568099 - RNA, 19 nt, Homo sapiens
  misc_RNA (1)...(19): siRNA sense strand
gccagaaggagcaggaugu

SEQ ID NO: 2568100 - RNA, 19 nt, Homo sapiens
  misc_RNA (1)...(19): siRNA sense strand
aagcuauguuggaugagau

SEQ ID NO: 2568101 - RNA, 19 nt, Homo sapiens
  misc_RNA (1)...(19): siRNA sense strand
acccagugcccucaagaaa

SEQ ID NO: 2568102 - RNA, 19 nt, Homo sapiens
  misc_RNA (1)...(19): siRNA sense strand
aagccaaaggaccggagaa

SEQ ID NO: 2568103 - RNA, 19 nt, Homo sapiens
  misc_RNA (1)...(19): siRNA sense strand
aggcagagaaggaggccaa

SEQ ID NO: 2568104 - RNA, 19 nt, Homo sapiens
  misc_RNA (1)...(19): siRNA sense strand
agacacaagcagaguccaa

SEQ ID NO: 2568105 - RNA, 19 nt, Homo sapiens
  misc_RNA (1)...(19): siRNA sense strand
aagcagaguccaaggcaga

SEQ ID NO: 2568106 - RNA, 19 nt, Homo sapiens
  misc_RNA (1)...(19): siRNA sense strand
gggaagaagaagaggcggu

SEQ ID NO: 2568107 - RNA, 19 nt, Homo sapiens
  misc_RNA (1)...(19): siRNA sense strand
aguccaaggcagagaagga

SEQ ID NO: 2568108 - RNA, 19 nt, Homo sapiens
  misc_RNA (1)...(19): siRNA sense strand
gagccaaggucauugcaga

SEQ ID NO: 2568109 - RNA, 19 nt, Homo sapiens
  misc_RNA (1)...(19): siRNA sense strand
augaaggagaugagagcca

SEQ ID NO: 2568110 - RNA, 19 nt, Homo sapiens
  misc_RNA (1)...(19): siRNA sense strand
gggacaacuacgggaagaa

SEQ ID NO: 2568111 - RNA, 19 nt, Homo sapiens
  misc_RNA (1)...(19): siRNA sense strand
cgcgagaagagcaggccaa

SEQ ID NO: 2568112 - RNA, 19 nt, Homo sapiens
  misc_RNA (1)...(19): siRNA sense strand
aagaagaagaggcggucga

SEQ ID NO: 2568113 - RNA, 19 nt, Homo sapiens
  misc_RNA (1)...(19): siRNA sense strand
gagaugagagccaagguca

SEQ ID NO: 2568114 - RNA, 19 nt, Homo sapiens
  misc_RNA (1)...(19): siRNA sense strand
gcaccagcggcauguacaa

SEQ ID NO: 2568115 - RNA, 19 nt, Homo sapiens
  misc_RNA (1)...(19): siRNA sense strand
aggcagagaaggaggccaa

SEQ ID NO: 2568116 - RNA, 19 nt, Homo sapiens
  misc_RNA (1)...(19): siRNA sense strand
agacacaagcagaguccaa

SEQ ID NO: 2568117 - RNA, 19 nt, Homo sapiens
  misc_RNA (1)...(19): siRNA sense strand
aagcagaguccaaggcaga

SEQ ID NO: 2568118 - RNA, 19 nt, Homo sapiens
  misc_RNA (1)...(19): siRNA sense strand
gggaagaagaagaggcggu

SEQ ID NO: 2568119 - RNA, 19 nt, Homo sapiens
  misc_RNA (1)...(19): siRNA sense strand
aguccaaggcagagaagga

SEQ ID NO: 2568120 - RNA, 19 nt, Homo sapiens
  misc_RNA (1)...(19): siRNA sense strand
gagccaaggucauugcaga

SEQ ID NO: 2568121 - RNA, 19 nt, Homo sapiens
  misc_RNA (1)...(19): siRNA sense strand
augaaggagaugagagcca

SEQ ID NO: 2568122 - RNA, 19 nt, Homo sapiens
  misc_RNA (1)...(19): siRNA sense strand
gggacaacuacgggaagaa

SEQ ID NO: 2568123 - RNA, 19 nt, Homo sapiens
  misc_RNA (1)...(19): siRNA sense strand
cgcgagaagagcaggccaa

SEQ ID NO: 2568124 - RNA, 19 nt, Homo sapiens
  misc_RNA (1)...(19): siRNA sense strand
aagaagaagaggcggucga

SEQ ID NO: 2568125 - RNA, 19 nt, Homo sapiens
  misc_RNA (1)...(19): siRNA sense strand
gagaugagagccaagguca

SEQ ID NO: 2568126 - RNA, 19 nt, Homo sapiens
  misc_RNA (1)...(19): siRNA sense strand
aggcagagaaggaggccaa

SEQ ID NO: 2568127 - RNA, 19 nt, Homo sapiens
  misc_RNA (1)...(19): siRNA sense strand
agacacaagcagaguccaa

SEQ ID NO: 2568128 - RNA, 19 nt, Homo sapiens
  misc_RNA (1)...(19): siRNA sense strand
aagcagaguccaaggcaga

SEQ ID NO: 2568129 - RNA, 19 nt, Homo sapiens
  misc_RNA (1)...(19): siRNA sense strand
gggaagaagaagaggcggu

SEQ ID NO: 2568130 - RNA, 19 nt, Homo sapiens
  misc_RNA (1)...(19): siRNA sense strand
aguccaaggcagagaagga

SEQ ID NO: 2568131 - RNA, 19 nt, Homo sapiens
  misc_RNA (1)...(19): siRNA sense strand
gagccaaggucauugcaga

SEQ ID NO: 2568132 - RNA, 19 nt, Homo sapiens
  misc_RNA (1)...(19): siRNA sense strand
augaaggagaugagagcca

SEQ ID NO: 2568133 - RNA, 19 nt, Homo sapiens
  misc_RNA (1)...(19): siRNA sense strand
gggacaacuacgggaagaa

SEQ ID NO: 2568134 - RNA, 19 nt, Homo sapiens
  misc_RNA (1)...(19): siRNA sense strand
cgcgagaagagcaggccaa

SEQ ID NO: 2568135 - RNA, 19 nt, Homo sapiens
  misc_RNA (1)...(19): siRNA sense strand
aagaagaagaggcggucga

SEQ ID NO: 2568136 - RNA, 19 nt, Homo sapiens
  misc_RNA (1)...(19): siRNA sense strand
gagaugagagccaagguca

SEQ ID NO: 2568137 - RNA, 19 nt, Homo sapiens
  misc_RNA (1)...(19): siRNA sense strand
aggcagagaaggaggccaa

SEQ ID NO: 2568138 - RNA, 19 nt, Homo sapiens
  misc_RNA (1)...(19): siRNA sense strand
agacacaagcagaguccaa

SEQ ID NO: 2568139 - RNA, 19 nt, Homo sapiens
  misc_RNA (1)...(19): siRNA sense strand
aagcagaguccaaggcaga

SEQ ID NO: 2568140 - RNA, 19 nt, Homo sapiens
  misc_RNA (1)...(19): siRNA sense strand
gggaagaagaagaggcggu

SEQ ID NO: 2568141 - RNA, 19 nt, Homo sapiens
  misc_RNA (1)...(19): siRNA sense strand
aguccaaggcagagaagga

SEQ ID NO: 2568142 - RNA, 19 nt, Homo sapiens
  misc_RNA (1)...(19): siRNA sense strand
gagccaaggucauugcaga

SEQ ID NO: 2568143 - RNA, 19 nt, Homo sapiens
  misc_RNA (1)...(19): siRNA sense strand
augaaggagaugagagcca

SEQ ID NO: 2568144 - RNA, 19 nt, Homo sapiens
  misc_RNA (1)...(19): siRNA sense strand
gggacaacuacgggaagaa

SEQ ID NO: 2568145 - RNA, 19 nt, Homo sapiens
  misc_RNA (1)...(19): siRNA sense strand
cgcgagaagagcaggccaa

SEQ ID NO: 2568146 - RNA, 19 nt, Homo sapiens
  misc_RNA (1)...(19): siRNA sense strand
aagaagaagaggcggucga

SEQ ID NO: 2568147 - RNA, 19 nt, Homo sapiens
  misc_RNA (1)...(19): siRNA sense strand
gagaugagagccaagguca

SEQ ID NO: 2568148 - RNA, 19 nt, Homo sapiens
  misc_RNA (1)...(19): siRNA sense strand
caaagagaacugugggucu

SEQ ID NO: 2568149 - RNA, 19 nt, Homo sapiens
  misc_RNA (1)...(19): siRNA sense strand
ccauaaugacaguaggaga

SEQ ID NO: 2568150 - RNA, 19 nt, Homo sapiens
  misc_RNA (1)...(19): siRNA sense strand
gagauggugucaaaggaga

SEQ ID NO: 2568151 - RNA, 19 nt, Homo sapiens
  misc_RNA (1)...(19): siRNA sense strand
ggguccgccuggagaaaca

SEQ ID NO: 2568152 - RNA, 19 nt, Homo sapiens
  misc_RNA (1)...(19): siRNA sense strand
uggagagcguggagagaag

SEQ ID NO: 2568153 - RNA, 19 nt, Homo sapiens
  misc_RNA (1)...(19): siRNA sense strand
caguaggagagaaggucuu

SEQ ID NO: 2568154 - RNA, 19 nt, Homo sapiens
  misc_RNA (1)...(19): siRNA sense strand
aaggauaagaagaaagaga

SEQ ID NO: 2568155 - RNA, 19 nt, Homo sapiens
  misc_RNA (1)...(19): siRNA sense strand
ccaugaaugaaaaggauaa

SEQ ID NO: 2568156 - RNA, 19 nt, Homo sapiens
  misc_RNA (1)...(19): siRNA sense strand
cugaagaaggucuaugcaa

SEQ ID NO: 2568157 - RNA, 19 nt, Homo sapiens
  misc_RNA (1)...(19): siRNA sense strand
augauuuggcugauggcaa

SEQ ID NO: 2568158 - RNA, 19 nt, Homo sapiens
  misc_RNA (1)...(19): siRNA sense strand
ugaagaaggucuaugcaag

SEQ ID NO: 2568159 - RNA, 19 nt, Homo sapiens
  misc_RNA (1)...(19): siRNA sense strand
caucacuaguagagggaga

SEQ ID NO: 2568160 - RNA, 19 nt, Homo sapiens
  misc_RNA (1)...(19): siRNA sense strand
gugacaaagaggagaagca

SEQ ID NO: 2568161 - RNA, 19 nt, Homo sapiens
  misc_RNA (1)...(19): siRNA sense strand
cccucaaggccauggacaa

SEQ ID NO: 2568162 - RNA, 19 nt, Homo sapiens
  misc_RNA (1)...(19): siRNA sense strand
uguccaaguccaacagcaa

SEQ ID NO: 2568163 - RNA, 19 nt, Homo sapiens
  misc_RNA (1)...(19): siRNA sense strand
auguagaagacccggguau

SEQ ID NO: 2568164 - RNA, 19 nt, Homo sapiens
  misc_RNA (1)...(19): siRNA sense strand
cuacaaaacagauaugcaa

SEQ ID NO: 2568165 - RNA, 19 nt, Homo sapiens
  misc_RNA (1)...(19): siRNA sense strand
gcaaagaguucaccgaccu

SEQ ID NO: 2568166 - RNA, 19 nt, Homo sapiens
  misc_RNA (1)...(19): siRNA sense strand
uauuaacaucccagaucaa

SEQ ID NO: 2568167 - RNA, 19 nt, Homo sapiens
  misc_RNA (1)...(19): siRNA sense strand
gacaaagaggagaagcaca

SEQ ID NO: 2568168 - RNA, 19 nt, Homo sapiens
  misc_RNA (1)...(19): siRNA sense strand
acagaaaagaagaggagaa

SEQ ID NO: 2568169 - RNA, 19 nt, Homo sapiens
  misc_RNA (1)...(19): siRNA sense strand
augaaagaugagagugcaa

SEQ ID NO: 2568170 - RNA, 19 nt, Homo sapiens
  misc_RNA (1)...(19): siRNA sense strand
ugagaagaucauaaaggaa

SEQ ID NO: 2568171 - RNA, 19 nt, Homo sapiens
  misc_RNA (1)...(19): siRNA sense strand
cuuugacggacaagggaaa

SEQ ID NO: 2568172 - RNA, 19 nt, Homo sapiens
  misc_RNA (1)...(19): siRNA sense strand
gcuuuaugggacuguguaa

SEQ ID NO: 2568173 - RNA, 19 nt, Homo sapiens
  misc_RNA (1)...(19): siRNA sense strand
ccuacaaagugcagcccuu

SEQ ID NO: 2568174 - RNA, 19 nt, Homo sapiens
  misc_RNA (1)...(19): siRNA sense strand
aauaaaacuuugacggaca

SEQ ID NO: 2568175 - RNA, 19 nt, Homo sapiens
  misc_RNA (1)...(19): siRNA sense strand
gcuccugagaagaucauaa

SEQ ID NO: 2568176 - RNA, 19 nt, Homo sapiens
  misc_RNA (1)...(19): siRNA sense strand
gcucauuaacagaaaagaa

SEQ ID NO: 2568177 - RNA, 19 nt, Homo sapiens
  misc_RNA (1)...(19): siRNA sense strand
ccugaaagucccagauuuu

SEQ ID NO: 2568178 - RNA, 19 nt, Homo sapiens
  misc_RNA (1)...(19): siRNA sense strand
aaagaagaggagaaugcua

SEQ ID NO: 2568179 - RNA, 19 nt, Homo sapiens
  misc_RNA (1)...(19): siRNA sense strand
cagaaaagaagaggagaau

SEQ ID NO: 2568180 - RNA, 19 nt, Homo sapiens
  misc_RNA (1)...(19): siRNA sense strand
aaggauaacuauaauggga

SEQ ID NO: 2568181 - RNA, 19 nt, Homo sapiens
  misc_RNA (1)...(19): siRNA sense strand
ggauaacuauaaugggaug

SEQ ID NO: 2568182 - RNA, 19 nt, Homo sapiens
  misc_RNA (1)...(19): siRNA sense strand
uggcaggacuuuugaggau

SEQ ID NO: 2568183 - RNA, 19 nt, Homo sapiens
  misc_RNA (1)...(19): siRNA sense strand
ccaagaucuuugaggccua

SEQ ID NO: 2568184 - RNA, 19 nt, Homo sapiens
  misc_RNA (1)...(19): siRNA sense strand
caagagacaccaauggaga

SEQ ID NO: 2568185 - RNA, 19 nt, Homo sapiens
  misc_RNA (1)...(19): siRNA sense strand
uacucaacgugguggacaa

SEQ ID NO: 2568186 - RNA, 19 nt, Homo sapiens
  misc_RNA (1)...(19): siRNA sense strand
ccgcuacaaccaagagaca

SEQ ID NO: 2568187 - RNA, 19 nt, Homo sapiens
  misc_RNA (1)...(19): siRNA sense strand
cacaacaaguacaugguga

SEQ ID NO: 2568188 - RNA, 19 nt, Homo sapiens
  misc_RNA (1)...(19): siRNA sense strand
ggcaacuacuucacggaga

SEQ ID NO: 2568189 - RNA, 19 nt, Homo sapiens
  misc_RNA (1)...(19): siRNA sense strand
caccaaagggcgugaacgu

SEQ ID NO: 2568190 - RNA, 19 nt, Homo sapiens
  misc_RNA (1)...(19): siRNA sense strand
ccuacugguuccugggcca

SEQ ID NO: 2568191 - RNA, 19 nt, Homo sapiens
  misc_RNA (1)...(19): siRNA sense strand
cugacuaggaagacagaau

SEQ ID NO: 2568192 - RNA, 19 nt, Homo sapiens
  misc_RNA (1)...(19): siRNA sense strand
cgugccaggccuuggagaa

SEQ ID NO: 2568193 - RNA, 19 nt, Homo sapiens
  misc_RNA (1)...(19): siRNA sense strand
gagaagaccuugucagcca

SEQ ID NO: 2568194 - RNA, 19 nt, Homo sapiens
  misc_RNA (1)...(19): siRNA sense strand
auuucaagauuguggaguu

SEQ ID NO: 2568195 - RNA, 19 nt, Homo sapiens
  misc_RNA (1)...(19): siRNA sense strand
ccuaugaagagaagaccuu

SEQ ID NO: 2568196 - RNA, 19 nt, Homo sapiens
  misc_RNA (1)...(19): siRNA sense strand
ccgccuuaccuuuggacau

SEQ ID NO: 2568197 - RNA, 19 nt, Homo sapiens
  misc_RNA (1)...(19): siRNA sense strand
gucaaauuguggagcucuu

SEQ ID NO: 2568198 - RNA, 19 nt, Homo sapiens
  misc_RNA (1)...(19): siRNA sense strand
ugaacaacggauugagcua

SEQ ID NO: 2568199 - RNA, 19 nt, Homo sapiens
  misc_RNA (1)...(19): siRNA sense strand
gugaagaacuagaagcaag

SEQ ID NO: 2568200 - RNA, 19 nt, Homo sapiens
  misc_RNA (1)...(19): siRNA sense strand
aaacaagagcagaaggcga

SEQ ID NO: 2568201 - RNA, 19 nt, Homo sapiens
  misc_RNA (1)...(19): siRNA sense strand
acgaagaguacuacgccaa

SEQ ID NO: 2568202 - RNA, 19 nt, Homo sapiens
  misc_RNA (1)...(19): siRNA sense strand
auaaaguccacuaggaaaa

SEQ ID NO: 2568203 - RNA, 19 nt, Homo sapiens
  misc_RNA (1)...(19): siRNA sense strand
ugugaaaacaagagcagaa

SEQ ID NO: 2568204 - RNA, 19 nt, Homo sapiens
  misc_RNA (1)...(19): siRNA sense strand
cggccuauugcuuuagaaa

SEQ ID NO: 2568205 - RNA, 19 nt, Homo sapiens
  misc_RNA (1)...(19): siRNA sense strand
ccaaaggguacaaugccaa

SEQ ID NO: 2568206 - RNA, 19 nt, Homo sapiens
  misc_RNA (1)...(19): siRNA sense strand
aacaagagcagaaggcgaa

SEQ ID NO: 2568207 - RNA, 19 nt, Homo sapiens
  misc_RNA (1)...(19): siRNA sense strand
agccagagugccugaacaa

SEQ ID NO: 2568208 - RNA, 19 nt, Homo sapiens
  misc_RNA (1)...(19): siRNA sense strand
ccauaaauccagaagcauc

SEQ ID NO: 2568209 - RNA, 19 nt, Homo sapiens
  misc_RNA (1)...(19): siRNA sense strand
uuuagaaaugugcaggaua

SEQ ID NO: 2568210 - RNA, 19 nt, Homo sapiens
  misc_RNA (1)...(19): siRNA sense strand
uggaccaguucaugcgcaa

SEQ ID NO: 2568211 - RNA, 19 nt, Homo sapiens
  misc_RNA (1)...(19): siRNA sense strand
aagugaagaacuagaagca

SEQ ID NO: 2568212 - RNA, 19 nt, Homo sapiens
  misc_RNA (1)...(19): siRNA sense strand
acgccaaggagguuuacaa

SEQ ID NO: 2568213 - RNA, 19 nt, Homo sapiens
  misc_RNA (1)...(19): siRNA sense strand
cccaaauaaaagugaagaa

SEQ ID NO: 2568214 - RNA, 19 nt, Homo sapiens
  misc_RNA (1)...(19): siRNA sense strand
cgauuugacgucucagcaa

SEQ ID NO: 2568215 - RNA, 19 nt, Homo sapiens
  misc_RNA (1)...(19): siRNA sense strand
guggaaauggauacacgaa

SEQ ID NO: 2568216 - RNA, 19 nt, Homo sapiens
  misc_RNA (1)...(19): siRNA sense strand
gggcagauccugagcaagc

SEQ ID NO: 2568217 - RNA, 19 nt, Homo sapiens
  misc_RNA (1)...(19): siRNA sense strand
aauucaaaggcguggacaa

SEQ ID NO: 2568218 - RNA, 19 nt, Homo sapiens
  misc_RNA (1)...(19): siRNA sense strand
agaagaggguggaagccau

SEQ ID NO: 2568219 - RNA, 19 nt, Homo sapiens
  misc_RNA (1)...(19): siRNA sense strand
cgugaguggcuguugagaa

SEQ ID NO: 2568220 - RNA, 19 nt, Homo sapiens
  misc_RNA (1)...(19): siRNA sense strand
auggagauauccuggaaaa

SEQ ID NO: 2568221 - RNA, 19 nt, Homo sapiens
  misc_RNA (1)...(19): siRNA sense strand
ugaccauggccguggagau

SEQ ID NO: 2568222 - RNA, 19 nt, Homo sapiens
  misc_RNA (1)...(19): siRNA sense strand
uccaugaaccuaagggcua

SEQ ID NO: 2568223 - RNA, 19 nt, Homo sapiens
  misc_RNA (1)...(19): siRNA sense strand
auucaaaggcguggacaau

SEQ ID NO: 2568224 - RNA, 19 nt, Homo sapiens
  misc_RNA (1)...(19): siRNA sense strand
agaugagcacauugccaaa

SEQ ID NO: 2568225 - RNA, 19 nt, Homo sapiens
  misc_RNA (1)...(19): siRNA sense strand
cagaugagcacauugccaa

SEQ ID NO: 2568226 - RNA, 19 nt, Homo sapiens
  misc_RNA (1)...(19): siRNA sense strand
augccaaagaaauccauaa

SEQ ID NO: 2568227 - RNA, 19 nt, Homo sapiens
  misc_RNA (1)...(19): siRNA sense strand
cggaaugagcagaggaucg

SEQ ID NO: 2568228 - RNA, 19 nt, Homo sapiens
  misc_RNA (1)...(19): siRNA sense strand
ccaacuuaggucuagaaau

SEQ ID NO: 2568229 - RNA, 19 nt, Homo sapiens
  misc_RNA (1)...(19): siRNA sense strand
caagaaaaccagagauaaa

SEQ ID NO: 2568230 - RNA, 19 nt, Homo sapiens
  misc_RNA (1)...(19): siRNA sense strand
augugaaaccugugggaaa

SEQ ID NO: 2568231 - RNA, 19 nt, Homo sapiens
  misc_RNA (1)...(19): siRNA sense strand
ggucaggauccaagaacaa

SEQ ID NO: 2568232 - RNA, 19 nt, Homo sapiens
  misc_RNA (1)...(19): siRNA sense strand
acgcugagacagugagaua

SEQ ID NO: 2568233 - RNA, 19 nt, Homo sapiens
  misc_RNA (1)...(19): siRNA sense strand
acauccaaguugugaguaa

SEQ ID NO: 2568234 - RNA, 19 nt, Homo sapiens
  misc_RNA (1)...(19): siRNA sense strand
cuucaauacugguuggcaa

SEQ ID NO: 2568235 - RNA, 19 nt, Homo sapiens
  misc_RNA (1)...(19): siRNA sense strand
cugcagcuauggagggaaa

SEQ ID NO: 2568236 - RNA, 19 nt, Homo sapiens
  misc_RNA (1)...(19): siRNA sense strand
guggaaaggagaaguacaa

SEQ ID NO: 2568237 - RNA, 19 nt, Homo sapiens
  misc_RNA (1)...(19): siRNA sense strand
cuggagaccuguagggaca

SEQ ID NO: 2568238 - RNA, 19 nt, Homo sapiens
  misc_RNA (1)...(19): siRNA sense strand
agacauacgcagaugaaaa

SEQ ID NO: 2568239 - RNA, 19 nt, Homo sapiens
  misc_RNA (1)...(19): siRNA sense strand
gugacaucguagagagaca

SEQ ID NO: 2568240 - RNA, 19 nt, Homo sapiens
  misc_RNA (1)...(19): siRNA sense strand
gagaaauacaagaccaaca

SEQ ID NO: 2568241 - RNA, 19 nt, Homo sapiens
  misc_RNA (1)...(19): siRNA sense strand
cagaagaagcuaaagcaga

SEQ ID NO: 2568242 - RNA, 19 nt, Homo sapiens
  misc_RNA (1)...(19): siRNA sense strand
ggauuaaagagaucaucaa

SEQ ID NO: 2568243 - RNA, 19 nt, Homo sapiens
  misc_RNA (1)...(19): siRNA sense strand
gagcagaguggaaaggaga

SEQ ID NO: 2568244 - RNA, 19 nt, Homo sapiens
  misc_RNA (1)...(19): siRNA sense strand
guucauuuauggaggagau

SEQ ID NO: 2568245 - RNA, 19 nt, Homo sapiens
  misc_RNA (1)...(19): siRNA sense strand
ggaagugaacgcugagaca

SEQ ID NO: 2568246 - RNA, 19 nt, Homo sapiens
  misc_RNA (1)...(19): siRNA sense strand
aggaugacgacgcggauua

SEQ ID NO: 2568247 - RNA, 19 nt, Homo sapiens
  misc_RNA (1)...(19): siRNA sense strand
ugaaacagccauugaacau

SEQ ID NO: 2568248 - RNA, 19 nt, Homo sapiens
  misc_RNA (1)...(19): siRNA sense strand
uuaaaaggguucuggacaa

SEQ ID NO: 2568249 - RNA, 19 nt, Homo sapiens
  misc_RNA (1)...(19): siRNA sense strand
guaagaaccuguacagcca

SEQ ID NO: 2568250 - RNA, 19 nt, Homo sapiens
  misc_RNA (1)...(19): siRNA sense strand
auaaagaaguggagccucu

SEQ ID NO: 2568251 - RNA, 19 nt, Homo sapiens
  misc_RNA (1)...(19): siRNA sense strand
ugggaagggcacaggaaaa

SEQ ID NO: 2568252 - RNA, 19 nt, Homo sapiens
  misc_RNA (1)...(19): siRNA sense strand
acaagaaaugugaugagua

SEQ ID NO: 2568253 - RNA, 19 nt, Homo sapiens
  misc_RNA (1)...(19): siRNA sense strand
gggagcuggacaagagcaa

SEQ ID NO: 2568254 - RNA, 19 nt, Homo sapiens
  misc_RNA (1)...(19): siRNA sense strand
gggagacggauguggccaa

SEQ ID NO: 2568255 - RNA, 19 nt, Homo sapiens
  misc_RNA (1)...(19): siRNA sense strand
ccaagaugaaggagagugu

SEQ ID NO: 2568256 - RNA, 19 nt, Homo sapiens
  misc_RNA (1)...(19): siRNA sense strand
cagcagagacauacgcaga

SEQ ID NO: 2568257 - RNA, 19 nt, Homo sapiens
  misc_RNA (1)...(19): siRNA sense strand
gggucaggauccaagaaca

SEQ ID NO: 2568258 - RNA, 19 nt, Homo sapiens
  misc_RNA (1)...(19): siRNA sense strand
augagaaauacaagaccaa

SEQ ID NO: 2568259 - RNA, 19 nt, Homo sapiens
  misc_RNA (1)...(19): siRNA sense strand
gagaagguaaacaaagcaa

SEQ ID NO: 2568260 - RNA, 19 nt, Homo sapiens
  misc_RNA (1)...(19): siRNA sense strand
ccaucaugaagaagaguga

SEQ ID NO: 2568261 - RNA, 19 nt, Homo sapiens
  misc_RNA (1)...(19): siRNA sense strand
ugacaagugccggaagaaa

SEQ ID NO: 2568262 - RNA, 19 nt, Homo sapiens
  misc_RNA (1)...(19): siRNA sense strand
ugacaaugaaacugacaga

SEQ ID NO: 2568263 - RNA, 19 nt, Homo sapiens
  misc_RNA (1)...(19): siRNA sense strand
gagccaagacccagaugau

SEQ ID NO: 2568264 - RNA, 19 nt, Homo sapiens
  misc_RNA (1)...(19): siRNA sense strand
ggaagaucucugugccaau

SEQ ID NO: 2568265 - RNA, 19 nt, Homo sapiens
  misc_RNA (1)...(19): siRNA sense strand
gcagcgaaggcuugucaaa

SEQ ID NO: 2568266 - RNA, 19 nt, Homo sapiens
  misc_RNA (1)...(19): siRNA sense strand
gagagauuuccgaguauau

SEQ ID NO: 2568267 - RNA, 19 nt, Homo sapiens
  misc_RNA (1)...(19): siRNA sense strand
gacaagugccggaagaaaa

SEQ ID NO: 2568268 - RNA, 19 nt, Homo sapiens
  misc_RNA (1)...(19): siRNA sense strand
aaauacggaaaucgagaaa

SEQ ID NO: 2568269 - RNA, 19 nt, Homo sapiens
  misc_RNA (1)...(19): siRNA sense strand
gagcuggacaagagcaaca

SEQ ID NO: 2568270 - RNA, 19 nt, Homo sapiens
  misc_RNA (1)...(19): siRNA sense strand
gugaaagggagaauugaga

SEQ ID NO: 2568271 - RNA, 19 nt, Homo sapiens
  misc_RNA (1)...(19): siRNA sense strand
agaaauacaagaccaacaa

SEQ ID NO: 2568272 - RNA, 19 nt, Homo sapiens
  misc_RNA (1)...(19): siRNA sense strand
cuucagauuuaaugagugu

SEQ ID NO: 2568273 - RNA, 19 nt, Homo sapiens
  misc_RNA (1)...(19): siRNA sense strand
ccaaguaugaguugcugaa

SEQ ID NO: 2568274 - RNA, 19 nt, Homo sapiens
  misc_RNA (1)...(19): siRNA sense strand
agaaaacccucuugggaga

SEQ ID NO: 2568275 - RNA, 19 nt, Homo sapiens
  misc_RNA (1)...(19): siRNA sense strand
agggugaaguccugggcau

SEQ ID NO: 2568276 - RNA, 19 nt, Homo sapiens
  misc_RNA (1)...(19): siRNA sense strand
ccuaugagguggagaaaac

SEQ ID NO: 2568277 - RNA, 19 nt, Homo sapiens
  misc_RNA (1)...(19): siRNA sense strand
uccaacgccugaagggaaa

SEQ ID NO: 2568278 - RNA, 19 nt, Homo sapiens
  misc_RNA (1)...(19): siRNA sense strand
aguacaagcuucuggugga

SEQ ID NO: 2568279 - RNA, 19 nt, Homo sapiens
  misc_RNA (1)...(19): siRNA sense strand
caagcaguacuguggcaaa

SEQ ID NO: 2568280 - RNA, 19 nt, Homo sapiens
  misc_RNA (1)...(19): siRNA sense strand
aagaugaaccuuuggaguu

SEQ ID NO: 2568281 - RNA, 19 nt, Homo sapiens
  misc_RNA (1)...(19): siRNA sense strand
ugucccaagaggagaagaa

SEQ ID NO: 2568282 - RNA, 19 nt, Homo sapiens
  misc_RNA (1)...(19): siRNA sense strand
cccaagaggagaagaagca

SEQ ID NO: 2568283 - RNA, 19 nt, Homo sapiens
  misc_RNA (1)...(19): siRNA sense strand
caugagaaauacaagacca

SEQ ID NO: 2568284 - RNA, 19 nt, Homo sapiens
  misc_RNA (1)...(19): siRNA sense strand
gccaagacccagaugauca

SEQ ID NO: 2568285 - RNA, 19 nt, Homo sapiens
  misc_RNA (1)...(19): siRNA sense strand
gggaaaacagggucgauuu

SEQ ID NO: 2568286 - RNA, 19 nt, Homo sapiens
  misc_RNA (1)...(19): siRNA sense strand
gguuggcaaggaugagaaa

SEQ ID NO: 2568287 - RNA, 19 nt, Homo sapiens
  misc_RNA (1)...(19): siRNA sense strand
gggaagaucucugugccaa

SEQ ID NO: 2568288 - RNA, 19 nt, Homo sapiens
  misc_RNA (1)...(19): siRNA sense strand
gagaacagcaagagcucca

SEQ ID NO: 2568289 - RNA, 19 nt, Homo sapiens
  misc_RNA (1)...(19): siRNA sense strand
agaguggaaaggagaagua

SEQ ID NO: 2568290 - RNA, 19 nt, Homo sapiens
  misc_RNA (1)...(19): siRNA sense strand
acagugagcucucgggcau

SEQ ID NO: 2568291 - RNA, 19 nt, Homo sapiens
  misc_RNA (1)...(19): siRNA sense strand
agacagcugaaacgggaua

SEQ ID NO: 2568292 - RNA, 19 nt, Homo sapiens
  misc_RNA (1)...(19): siRNA sense strand
uuauggaggagauggcuua

SEQ ID NO: 2568293 - RNA, 19 nt, Homo sapiens
  misc_RNA (1)...(19): siRNA sense strand
ccagagcauuggugagcca

SEQ ID NO: 2568294 - RNA, 19 nt, Homo sapiens
  misc_RNA (1)...(19): siRNA sense strand
ugugaaaccugugggaaaa

SEQ ID NO: 2568295 - RNA, 19 nt, Homo sapiens
  misc_RNA (1)...(19): siRNA sense strand
ccuucaacauggagcuaua

SEQ ID NO: 2568296 - RNA, 19 nt, Homo sapiens
  misc_RNA (1)...(19): siRNA sense strand
caguauuggcuuuggaaaa

SEQ ID NO: 2568297 - RNA, 19 nt, Homo sapiens
  misc_RNA (1)...(19): siRNA sense strand
cagaaacagaagaaaggaa

SEQ ID NO: 2568298 - RNA, 19 nt, Homo sapiens
  misc_RNA (1)...(19): siRNA sense strand
gugaaagaucuaugacaau

SEQ ID NO: 2568299 - RNA, 19 nt, Homo sapiens
  misc_RNA (1)...(19): siRNA sense strand
ggacaguagugguuggcca

SEQ ID NO: 2568300 - RNA, 19 nt, Homo sapiens
  misc_RNA (1)...(19): siRNA sense strand
cagaauaagaagacguuca

SEQ ID NO: 2568301 - RNA, 19 nt, Homo sapiens
  misc_RNA (1)...(19): siRNA sense strand
gagauauggaugaaggaga

SEQ ID NO: 2568302 - RNA, 19 nt, Homo sapiens
  misc_RNA (1)...(19): siRNA sense strand
ugaagugggcuuuggacaa

SEQ ID NO: 2568303 - RNA, 19 nt, Homo sapiens
  misc_RNA (1)...(19): siRNA sense strand
cugaacaagaacugggauu

SEQ ID NO: 2568304 - RNA, 19 nt, Homo sapiens
  misc_RNA (1)...(19): siRNA sense strand
uggaaaagagagugaaaga

SEQ ID NO: 2568305 - RNA, 19 nt, Homo sapiens
  misc_RNA (1)...(19): siRNA sense strand
ccugcaaggccaagaugaa

SEQ ID NO: 2568306 - RNA, 19 nt, Homo sapiens
  misc_RNA (1)...(19): siRNA sense strand
ccgcaagcugacauggaua

SEQ ID NO: 2568307 - RNA, 19 nt, Homo sapiens
  misc_RNA (1)...(19): siRNA sense strand
cgugaugggcauugcguuu

SEQ ID NO: 2568308 - RNA, 19 nt, Homo sapiens
  misc_RNA (1)...(19): siRNA sense strand
aggccuugauggagagcuu

SEQ ID NO: 2568309 - RNA, 19 nt, Homo sapiens
  misc_RNA (1)...(19): siRNA sense strand
auaaugaggagaugggaga

SEQ ID NO: 2568310 - RNA, 19 nt, Homo sapiens
  misc_RNA (1)...(19): siRNA sense strand
aaagagagugaaagaucua

SEQ ID NO: 2568311 - RNA, 19 nt, Homo sapiens
  misc_RNA (1)...(19): siRNA sense strand
gguccaagcaugaaggaac

SEQ ID NO: 2568312 - RNA, 19 nt, Homo sapiens
  misc_RNA (1)...(19): siRNA sense strand
gggcuuuggacaauggcua

SEQ ID NO: 2568313 - RNA, 19 nt, Homo sapiens
  misc_RNA (1)...(19): siRNA sense strand
cacuauuccuccugagcua

SEQ ID NO: 2568314 - RNA, 19 nt, Homo sapiens
  misc_RNA (1)...(19): siRNA sense strand
acacguuuauguugaggua

SEQ ID NO: 2568315 - RNA, 19 nt, Homo sapiens
  misc_RNA (1)...(19): siRNA sense strand
gaucuaugacaaugaccaa

SEQ ID NO: 2568316 - RNA, 19 nt, Homo sapiens
  misc_RNA (1)...(19): siRNA sense strand
cagcagaaacagaagaaag

SEQ ID NO: 2568317 - RNA, 19 nt, Homo sapiens
  misc_RNA (1)...(19): siRNA sense strand
aacucaagauagcaagaaa

SEQ ID NO: 2568318 - RNA, 19 nt, Homo sapiens
  misc_RNA (1)...(19): siRNA sense strand
uguuaagggaagccugaaa

SEQ ID NO: 2568319 - RNA, 19 nt, Homo sapiens
  misc_RNA (1)...(19): siRNA sense strand
ugaccaaaucaauaagaga

SEQ ID NO: 2568320 - RNA, 19 nt, Homo sapiens
  misc_RNA (1)...(19): siRNA sense strand
aggaacagccccacggaaa

SEQ ID NO: 2568321 - RNA, 19 nt, Homo sapiens
  misc_RNA (1)...(19): siRNA sense strand
ccaugaugcagaauaagaa

SEQ ID NO: 2568322 - RNA, 19 nt, Homo sapiens
  misc_RNA (1)...(19): siRNA sense strand
ucuggaaugaagagggaga

SEQ ID NO: 2568323 - RNA, 19 nt, Homo sapiens
  misc_RNA (1)...(19): siRNA sense strand
agaagaugaucguggcugu

SEQ ID NO: 2568324 - RNA, 19 nt, Homo sapiens
  misc_RNA (1)...(19): siRNA sense strand
ugauauaagaccuucucaa

SEQ ID NO: 2568325 - RNA, 19 nt, Homo sapiens
  misc_RNA (1)...(19): siRNA sense strand
cagaagaggugcaagggag

SEQ ID NO: 2568326 - RNA, 19 nt, Homo sapiens
  misc_RNA (1)...(19): siRNA sense strand
gagugaaagaucuaugaca

SEQ ID NO: 2568327 - RNA, 19 nt, Homo sapiens
  misc_RNA (1)...(19): siRNA sense strand
ugacauuccuucaacccaa

SEQ ID NO: 2568328 - RNA, 19 nt, Homo sapiens
  misc_RNA (1)...(19): siRNA sense strand
ggcuauaguccaauaacuu

SEQ ID NO: 2568329 - RNA, 19 nt, Homo sapiens
  misc_RNA (1)...(19): siRNA sense strand
gugcaagggagcguggaua

SEQ ID NO: 2568330 - RNA, 19 nt, Homo sapiens
  misc_RNA (1)...(19): siRNA sense strand
gugaagugggcuuuggaca

SEQ ID NO: 2568331 - RNA, 19 nt, Homo sapiens
  misc_RNA (1)...(19): siRNA sense strand
ccaaagugcaacauaggga

SEQ ID NO: 2568332 - RNA, 19 nt, Homo sapiens
  misc_RNA (1)...(19): siRNA sense strand
auaagaagacguucaccaa

SEQ ID NO: 2568333 - RNA, 19 nt, Homo sapiens
  misc_RNA (1)...(19): siRNA sense strand
cuggccagcuacagagaga

SEQ ID NO: 2568334 - RNA, 19 nt, Homo sapiens
  misc_RNA (1)...(19): siRNA sense strand
agaaugaggaaguacacau

SEQ ID NO: 2568335 - RNA, 19 nt, Homo sapiens
  misc_RNA (1)...(19): siRNA sense strand
gauccuaccugcaaggcca

SEQ ID NO: 2568336 - RNA, 19 nt, Homo sapiens
  misc_RNA (1)...(19): siRNA sense strand
cgcaagcugacauggauaa

SEQ ID NO: 2568337 - RNA, 19 nt, Homo sapiens
  misc_RNA (1)...(19): siRNA sense strand
gauauuuccaggagagucu

SEQ ID NO: 2568338 - RNA, 19 nt, Homo sapiens
  misc_RNA (1)...(19): siRNA sense strand
gugacaaugagaagaugau

SEQ ID NO: 2568339 - RNA, 19 nt, Homo sapiens
  misc_RNA (1)...(19): siRNA sense strand
gccuucagcaggugaggaa

SEQ ID NO: 2568340 - RNA, 19 nt, Homo sapiens
  misc_RNA (1)...(19): siRNA sense strand
gaaacagaagaaaggaacu

SEQ ID NO: 2568341 - RNA, 19 nt, Homo sapiens
  misc_RNA (1)...(19): siRNA sense strand
cugaguaccuucaacccaa

SEQ ID NO: 2568342 - RNA, 19 nt, Homo sapiens
  misc_RNA (1)...(19): siRNA sense strand
cugucaacugggugaucaa

SEQ ID NO: 2568343 - RNA, 19 nt, Homo sapiens
  misc_RNA (1)...(19): siRNA sense strand
agaugggagaugaggaagu

SEQ ID NO: 2568344 - RNA, 19 nt, Homo sapiens
  misc_RNA (1)...(19): siRNA sense strand
cuguguacgaagauggaga

SEQ ID NO: 2568345 - RNA, 19 nt, Homo sapiens
  misc_RNA (1)...(19): siRNA sense strand
caaagcagcagaagggugu

SEQ ID NO: 2568346 - RNA, 19 nt, Homo sapiens
  misc_RNA (1)...(19): siRNA sense strand
augaggaaguccacacuau

SEQ ID NO: 2568347 - RNA, 19 nt, Homo sapiens
  misc_RNA (1)...(19): siRNA sense strand
agucuggaaugaagaggga

SEQ ID NO: 2568348 - RNA, 19 nt, Homo sapiens
  misc_RNA (1)...(19): siRNA sense strand
ccucugaauggcugcggua

SEQ ID NO: 2568349 - RNA, 19 nt, Homo sapiens
  misc_RNA (1)...(19): siRNA sense strand
ggccagaugguuaugaaga

SEQ ID NO: 2568350 - RNA, 19 nt, Homo sapiens
  misc_RNA (1)...(19): siRNA sense strand
acguuuauguugagguauc

SEQ ID NO: 2568351 - RNA, 19 nt, Homo sapiens
  misc_RNA (1)...(19): siRNA sense strand
ugaacaagaacugggauuu

SEQ ID NO: 2568352 - RNA, 19 nt, Homo sapiens
  misc_RNA (1)...(19): siRNA sense strand
gugaaauucuacaguccca

SEQ ID NO: 2568353 - RNA, 19 nt, Homo sapiens
  misc_RNA (1)...(19): siRNA sense strand
gugugugccuccugacgaa

SEQ ID NO: 2568354 - RNA, 19 nt, Homo sapiens
  misc_RNA (1)...(19): siRNA sense strand
caagcaugaaggaaccaaa

SEQ ID NO: 2568355 - RNA, 19 nt, Homo sapiens
  misc_RNA (1)...(19): siRNA sense strand
ccgaaaagaguauggagca

SEQ ID NO: 2568356 - RNA, 19 nt, Homo sapiens
  misc_RNA (1)...(19): siRNA sense strand
ggucagcccuugauggugu

SEQ ID NO: 2568357 - RNA, 19 nt, Homo sapiens
  misc_RNA (1)...(19): siRNA sense strand
gaacaaaggccuuggcucu

SEQ ID NO: 2568358 - RNA, 19 nt, Homo sapiens
  misc_RNA (1)...(19): siRNA sense strand
gggacaucauccuggacaa

SEQ ID NO: 2568359 - RNA, 19 nt, Homo sapiens
  misc_RNA (1)...(19): siRNA sense strand
acgaaagacuggaguucau

SEQ ID NO: 2568360 - RNA, 19 nt, Homo sapiens
  misc_RNA (1)...(19): siRNA sense strand
agacagugacagugaacau

SEQ ID NO: 2568361 - RNA, 19 nt, Homo sapiens
  misc_RNA (1)...(19): siRNA sense strand
gcacaaaccgaauuggcau

SEQ ID NO: 2568362 - RNA, 19 nt, Homo sapiens
  misc_RNA (1)...(19): siRNA sense strand
guaaccacgcugagagaga

SEQ ID NO: 2568363 - RNA, 19 nt, Homo sapiens
  misc_RNA (1)...(19): siRNA sense strand
gugccaugaucaauagcaa

SEQ ID NO: 2568364 - RNA, 19 nt, Homo sapiens
  misc_RNA (1)...(19): siRNA sense strand
cuggacaaggguagugaua

SEQ ID NO: 2568365 - RNA, 19 nt, Homo sapiens
  misc_RNA (1)...(19): siRNA sense strand
ggguaaccacgcugagaga

SEQ ID NO: 2568366 - RNA, 19 nt, Homo sapiens
  misc_RNA (1)...(19): siRNA sense strand
uggaugagccggugaggga

SEQ ID NO: 2568367 - RNA, 19 nt, Homo sapiens
  misc_RNA (1)...(19): siRNA sense strand
gaucaugaacaaaggccuu

SEQ ID NO: 2568368 - RNA, 19 nt, Homo sapiens
  misc_RNA (1)...(19): siRNA sense strand
agggauacgaagacaguga

SEQ ID NO: 2568369 - RNA, 19 nt, Homo sapiens
  misc_RNA (1)...(19): siRNA sense strand
agucugaggugguggugga

SEQ ID NO: 2568370 - RNA, 19 nt, Homo sapiens
  misc_RNA (1)...(19): siRNA sense strand
caugcuggcaguaggcaaa

SEQ ID NO: 2568371 - RNA, 19 nt, Homo sapiens
  misc_RNA (1)...(19): siRNA sense strand
ccgaaaucucaguguggau

SEQ ID NO: 2568372 - RNA, 19 nt, Homo sapiens
  misc_RNA (1)...(19): siRNA sense strand
gcugggaauuggagcggca

SEQ ID NO: 2568373 - RNA, 19 nt, Homo sapiens
  misc_RNA (1)...(19): siRNA sense strand
acgaagacagugacaguga

SEQ ID NO: 2568374 - RNA, 19 nt, Homo sapiens
  misc_RNA (1)...(19): siRNA sense strand
ccauaggacgguacacaau

SEQ ID NO: 2568375 - RNA, 19 nt, Homo sapiens
  misc_RNA (1)...(19): siRNA sense strand
caugaaguguggaaggacu

SEQ ID NO: 2568376 - RNA, 19 nt, Homo sapiens
  misc_RNA (1)...(19): siRNA sense strand
gagaagaguauguucagga

SEQ ID NO: 2568377 - RNA, 19 nt, Homo sapiens
  misc_RNA (1)...(19): siRNA sense strand
gcuucagcccaguccgaua

SEQ ID NO: 2568378 - RNA, 19 nt, Homo sapiens
  misc_RNA (1)...(19): siRNA sense strand
cgcugagagagaagaguau

SEQ ID NO: 2568379 - RNA, 19 nt, Homo sapiens
  misc_RNA (1)...(19): siRNA sense strand
agagagaagaguauguuca

SEQ ID NO: 2568380 - RNA, 19 nt, Homo sapiens
  misc_RNA (1)...(19): siRNA sense strand
gcaaagaagucaaccuggu

SEQ ID NO: 2568381 - RNA, 19 nt, Homo sapiens
  misc_RNA (1)...(19): siRNA sense strand
acgcugagagagaagagua

SEQ ID NO: 2568382 - RNA, 19 nt, Homo sapiens
  misc_RNA (1)...(19): siRNA sense strand
acuacgaccccaugggaaa

SEQ ID NO: 2568383 - RNA, 19 nt, Homo sapiens
  misc_RNA (1)...(19): siRNA sense strand
uuaucuucgcggagguuaa

SEQ ID NO: 2568384 - RNA, 19 nt, Homo sapiens
  misc_RNA (1)...(19): siRNA sense strand
caguaggcaaagaagucaa

SEQ ID NO: 2568385 - RNA, 19 nt, Homo sapiens
  misc_RNA (1)...(19): siRNA sense strand
cccuggacccugaggaaga

SEQ ID NO: 2568386 - RNA, 19 nt, Homo sapiens
  misc_RNA (1)...(19): siRNA sense strand
uuggacaguuugaagaaga

SEQ ID NO: 2568387 - RNA, 19 nt, Homo sapiens
  misc_RNA (1)...(19): siRNA sense strand
cugagugccaugaucaaua

SEQ ID NO: 2568388 - RNA, 19 nt, Homo sapiens
  misc_RNA (1)...(19): siRNA sense strand
uggugugcuugcugggaau

SEQ ID NO: 2568389 - RNA, 19 nt, Homo sapiens
  misc_RNA (1)...(19): siRNA sense strand
ggaaagaagccaaggggug

SEQ ID NO: 2568390 - RNA, 19 nt, Homo sapiens
  misc_RNA (1)...(19): siRNA sense strand
cagaguaucaacuggcaga

SEQ ID NO: 2568391 - RNA, 19 nt, Homo sapiens
  misc_RNA (1)...(19): siRNA sense strand
gcaugcuggcaguaggcaa

SEQ ID NO: 2568392 - RNA, 19 nt, Homo sapiens
  misc_RNA (1)...(19): siRNA sense strand
ucaauagcaaugaugacaa

SEQ ID NO: 2568393 - RNA, 19 nt, Homo sapiens
  misc_RNA (1)...(19): siRNA sense strand
ugaggaagaggcagaacau

SEQ ID NO: 2568394 - RNA, 19 nt, Homo sapiens
  misc_RNA (1)...(19): siRNA sense strand
caucuugcggagaggccaa

SEQ ID NO: 2568395 - RNA, 19 nt, Homo sapiens
  misc_RNA (1)...(19): siRNA sense strand
auacgaagacagugacagu

SEQ ID NO: 2568396 - RNA, 19 nt, Homo sapiens
  misc_RNA (1)...(19): siRNA sense strand
guuccaaacaagugaaaga

SEQ ID NO: 2568397 - RNA, 19 nt, Homo sapiens
  misc_RNA (1)...(19): siRNA sense strand
cugaugaggacgagcgcaa

SEQ ID NO: 2568398 - RNA, 19 nt, Homo sapiens
  misc_RNA (1)...(19): siRNA sense strand
augaugugcugcugggaaa

SEQ ID NO: 2568399 - RNA, 19 nt, Homo sapiens
  misc_RNA (1)...(19): siRNA sense strand
ucucagaagugaaugguga

SEQ ID NO: 2568400 - RNA, 19 nt, Homo sapiens
  misc_RNA (1)...(19): siRNA sense strand
gaccacaagcaucgggaaa

SEQ ID NO: 2568401 - RNA, 19 nt, Homo sapiens
  misc_RNA (1)...(19): siRNA sense strand
cagaaguaucaaaugcaaa

SEQ ID NO: 2568402 - RNA, 19 nt, Homo sapiens
  misc_RNA (1)...(19): siRNA sense strand
ugaaagagauuaaugcuca

SEQ ID NO: 2568403 - RNA, 19 nt, Homo sapiens
  misc_RNA (1)...(19): siRNA sense strand
gggcgugcucauugggaau

SEQ ID NO: 2568404 - RNA, 19 nt, Homo sapiens
  misc_RNA (1)...(19): siRNA sense strand
guaccaacuaaacgugaaa

SEQ ID NO: 2568405 - RNA, 19 nt, Homo sapiens
  misc_RNA (1)...(19): siRNA sense strand
cuggcaagaagauggcaaa

SEQ ID NO: 2568406 - RNA, 19 nt, Homo sapiens
  misc_RNA (1)...(19): siRNA sense strand
agauuaaugcucagaagau

SEQ ID NO: 2568407 - RNA, 19 nt, Homo sapiens
  misc_RNA (1)...(19): siRNA sense strand
uauauuagaugaugagcca

SEQ ID NO: 2568408 - RNA, 19 nt, Homo sapiens
  misc_RNA (1)...(19): siRNA sense strand
auuguggagucuaaggaaa

SEQ ID NO: 2568409 - RNA, 19 nt, Homo sapiens
  misc_RNA (1)...(19): siRNA sense strand
cccaagaaauuuaucguca

SEQ ID NO: 2568410 - RNA, 19 nt, Homo sapiens
  misc_RNA (1)...(19): siRNA sense strand
uggcuauauuagaugauga

SEQ ID NO: 2568411 - RNA, 19 nt, Homo sapiens
  misc_RNA (1)...(19): siRNA sense strand
cgucaaguuaaguuccaaa

SEQ ID NO: 2568412 - RNA, 19 nt, Homo sapiens
  misc_RNA (1)...(19): siRNA sense strand
uguaaagaggacaugguuu

SEQ ID NO: 2568413 - RNA, 19 nt, Homo sapiens
  misc_RNA (1)...(19): siRNA sense strand
uuguggagucuaaggaaau

SEQ ID NO: 2568414 - RNA, 19 nt, Homo sapiens
  misc_RNA (1)...(19): siRNA sense strand
ucaaaaugagucuggcaaa

SEQ ID NO: 2568415 - RNA, 19 nt, Homo sapiens
  misc_RNA (1)...(19): siRNA sense strand
ggacgagcgcaaagaguac

SEQ ID NO: 2568416 - RNA, 19 nt, Homo sapiens
  misc_RNA (1)...(19): siRNA sense strand
acuccaagaccuacaucaa

SEQ ID NO: 2568417 - RNA, 19 nt, Homo sapiens
  misc_RNA (1)...(19): siRNA sense strand
ccauccaaucccaaauaaa

SEQ ID NO: 2568418 - RNA, 19 nt, Homo sapiens
  misc_RNA (1)...(19): siRNA sense strand
cacuacaacuggcaggcaa

SEQ ID NO: 2568419 - RNA, 19 nt, Homo sapiens
  misc_RNA (1)...(19): siRNA sense strand
aggacgagcgcaaagagua

SEQ ID NO: 2568420 - RNA, 19 nt, Homo sapiens
  misc_RNA (1)...(19): siRNA sense strand
cagcaguacuacaacacga

SEQ ID NO: 2568421 - RNA, 19 nt, Homo sapiens
  misc_RNA (1)...(19): siRNA sense strand
gugaauggugacaggcuca

SEQ ID NO: 2568422 - RNA, 19 nt, Homo sapiens
  misc_RNA (1)...(19): siRNA sense strand
cuggaaaccacauccuuaa

SEQ ID NO: 2568423 - RNA, 19 nt, Homo sapiens
  misc_RNA (1)...(19): siRNA sense strand
cuuuggucaguuugagaaa

SEQ ID NO: 2568424 - RNA, 19 nt, Homo sapiens
  misc_RNA (1)...(19): siRNA sense strand
ggaugaagcgaccggaucu

SEQ ID NO: 2568425 - RNA, 19 nt, Homo sapiens
  misc_RNA (1)...(19): siRNA sense strand
gguuggugaagauggugaa

SEQ ID NO: 2568426 - RNA, 19 nt, Homo sapiens
  misc_RNA (1)...(19): siRNA sense strand
ccaacaaacaggugugcaa

SEQ ID NO: 2568427 - RNA, 19 nt, Homo sapiens
  misc_RNA (1)...(19): siRNA sense strand
ccgaaagggacgaugacua

SEQ ID NO: 2568428 - RNA, 19 nt, Homo sapiens
  misc_RNA (1)...(19): siRNA sense strand
agaacaaagaguuggccaa

SEQ ID NO: 2568429 - RNA, 19 nt, Homo sapiens
  misc_RNA (1)...(19): siRNA sense strand
cugcagacauugauggaga

SEQ ID NO: 2568430 - RNA, 19 nt, Homo sapiens
  misc_RNA (1)...(19): siRNA sense strand
acaaagauggcaagggaga

SEQ ID NO: 2568431 - RNA, 19 nt, Homo sapiens
  misc_RNA (1)...(19): siRNA sense strand
cggcgauggucgaggugau

SEQ ID NO: 2568432 - RNA, 19 nt, Homo sapiens
  misc_RNA (1)...(19): siRNA sense strand
acaagaacgccaagugcaa

SEQ ID NO: 2568433 - RNA, 19 nt, Homo sapiens
  misc_RNA (1)...(19): siRNA sense strand
aggcagacacagacaacaa

SEQ ID NO: 2568434 - RNA, 19 nt, Homo sapiens
  misc_RNA (1)...(19): siRNA sense strand
ugacaaagauggcaaggga

SEQ ID NO: 2568435 - RNA, 19 nt, Homo sapiens
  misc_RNA (1)...(19): siRNA sense strand
ugacgaugacaaugauaaa

SEQ ID NO: 2568436 - RNA, 19 nt, Homo sapiens
  misc_RNA (1)...(19): siRNA sense strand
acagagaugaugugggaga

SEQ ID NO: 2568437 - RNA, 19 nt, Homo sapiens
  misc_RNA (1)...(19): siRNA sense strand
ggaagaaaaucauggcuga

SEQ ID NO: 2568438 - RNA, 19 nt, Homo sapiens
  misc_RNA (1)...(19): siRNA sense strand
ccugauggcagcuggaaau

SEQ ID NO: 2568439 - RNA, 19 nt, Homo sapiens
  misc_RNA (1)...(19): siRNA sense strand
ugacagagaugauguggga

SEQ ID NO: 2568440 - RNA, 19 nt, Homo sapiens
  misc_RNA (1)...(19): siRNA sense strand
gugacaacaaucaggauau

SEQ ID NO: 2568441 - RNA, 19 nt, Homo sapiens
  misc_RNA (1)...(19): siRNA sense strand
acucagggcaggaagacua

SEQ ID NO: 2568442 - RNA, 19 nt, Homo sapiens
  misc_RNA (1)...(19): siRNA sense strand
ccacaguuccugauggaga

SEQ ID NO: 2568443 - RNA, 19 nt, Homo sapiens
  misc_RNA (1)...(19): siRNA sense strand
gagcuguggcaauggaauu

SEQ ID NO: 2568444 - RNA, 19 nt, Homo sapiens
  misc_RNA (1)...(19): siRNA sense strand
gugaugaugacgaugacaa

SEQ ID NO: 2568445 - RNA, 19 nt, Homo sapiens
  misc_RNA (1)...(19): siRNA sense strand
cggccagggugucgaacau

SEQ ID NO: 2568446 - RNA, 19 nt, Homo sapiens
  misc_RNA (1)...(19): siRNA sense strand
acaauguggaccagagaga

SEQ ID NO: 2568447 - RNA, 19 nt, Homo sapiens
  misc_RNA (1)...(19): siRNA sense strand
ggcaggaagacuaugacaa

SEQ ID NO: 2568448 - RNA, 19 nt, Homo sapiens
  misc_RNA (1)...(19): siRNA sense strand
aguuuaaugcuguggacuu

SEQ ID NO: 2568449 - RNA, 19 nt, Homo sapiens
  misc_RNA (1)...(19): siRNA sense strand
gcaaccggccaguggaaga

SEQ ID NO: 2568450 - RNA, 19 nt, Homo sapiens
  misc_RNA (1)...(19): siRNA sense strand
cugaagagaacaaagaguu

SEQ ID NO: 2568451 - RNA, 19 nt, Homo sapiens
  misc_RNA (1)...(19): siRNA sense strand
ggccaguggaagagcauca

SEQ ID NO: 2568452 - RNA, 19 nt, Homo sapiens
  misc_RNA (1)...(19): siRNA sense strand
aggagugugacaagagauu

SEQ ID NO: 2568453 - RNA, 19 nt, Homo sapiens
  misc_RNA (1)...(19): siRNA sense strand
ggaagaagcucuccuggca

SEQ ID NO: 2568454 - RNA, 19 nt, Homo sapiens
  misc_RNA (1)...(19): siRNA sense strand
acaaaggacuugcaagcca

SEQ ID NO: 2568455 - RNA, 19 nt, Homo sapiens
  misc_RNA (1)...(19): siRNA sense strand
cagauguugaugagugcaa

SEQ ID NO: 2568456 - RNA, 19 nt, Homo sapiens
  misc_RNA (1)...(19): siRNA sense strand
agacauugauggagacggu

SEQ ID NO: 2568457 - RNA, 19 nt, Homo sapiens
  misc_RNA (1)...(19): siRNA sense strand
cgucucagccacaggccaa

SEQ ID NO: 2568458 - RNA, 19 nt, Homo sapiens
  misc_RNA (1)...(19): siRNA sense strand
gugaaaagauggagaaugc

SEQ ID NO: 2568459 - RNA, 19 nt, Homo sapiens
  misc_RNA (1)...(19): siRNA sense strand
acauuggccacaagacaaa

SEQ ID NO: 2568460 - RNA, 19 nt, Homo sapiens
  misc_RNA (1)...(19): siRNA sense strand
gccacaagacaaaggacuu

SEQ ID NO: 2568461 - RNA, 19 nt, Homo sapiens
  misc_RNA (1)...(19): siRNA sense strand
acggaguucaguacagaaa

SEQ ID NO: 2568462 - RNA, 19 nt, Homo sapiens
  misc_RNA (1)...(19): siRNA sense strand
acagaaauaacgaggaaug

SEQ ID NO: 2568463 - RNA, 19 nt, Homo sapiens
  misc_RNA (1)...(19): siRNA sense strand
ggaaagaccacucuggcca

SEQ ID NO: 2568464 - RNA, 19 nt, Homo sapiens
  misc_RNA (1)...(19): siRNA sense strand
gcacagauguugaugagug

SEQ ID NO: 2568465 - RNA, 19 nt, Homo sapiens
  misc_RNA (1)...(19): siRNA sense strand
gcuucaaccacaauggaga

SEQ ID NO: 2568466 - RNA, 19 nt, Homo sapiens
  misc_RNA (1)...(19): siRNA sense strand
cuggauuugucuuuggcua

SEQ ID NO: 2568467 - RNA, 19 nt, Homo sapiens
  misc_RNA (1)...(19): siRNA sense strand
ggugauguaugaagggaag

SEQ ID NO: 2568468 - RNA, 19 nt, Homo sapiens
  misc_RNA (1)...(19): siRNA sense strand
cuacauuggccacaagaca

SEQ ID NO: 2568469 - RNA, 19 nt, Homo sapiens
  misc_RNA (1)...(19): siRNA sense strand
ugacuaugacagagaugau

SEQ ID NO: 2568470 - RNA, 19 nt, Homo sapiens
  misc_RNA (1)...(19): siRNA sense strand
ccaaagccugcaagaaaga

SEQ ID NO: 2568471 - RNA, 19 nt, Homo sapiens
  misc_RNA (1)...(19): siRNA sense strand
cguuggugauguaacagaa

SEQ ID NO: 2568472 - RNA, 19 nt, Homo sapiens
  misc_RNA (1)...(19): siRNA sense strand
gcgacuuaccacugcaaaa

SEQ ID NO: 2568473 - RNA, 19 nt, Homo sapiens
  misc_RNA (1)...(19): siRNA sense strand
aggcugaccaugacaaaga

SEQ ID NO: 2568474 - RNA, 19 nt, Homo sapiens
  misc_RNA (1)...(19): siRNA sense strand
guaaagaacucguccagac

SEQ ID NO: 2568475 - RNA, 19 nt, Homo sapiens
  misc_RNA (1)...(19): siRNA sense strand
cuguacaucgacugugaaa

SEQ ID NO: 2568476 - RNA, 19 nt, Homo sapiens
  misc_RNA (1)...(19): siRNA sense strand
cugcguuggugauguaaca

SEQ ID NO: 2568477 - RNA, 19 nt, Homo sapiens
  misc_RNA (1)...(19): siRNA sense strand
cuggaaauguggugcuugu

SEQ ID NO: 2568478 - RNA, 19 nt, Homo sapiens
  misc_RNA (1)...(19): siRNA sense strand
acuaugacaaggauggaau

SEQ ID NO: 2568479 - RNA, 19 nt, Homo sapiens
  misc_RNA (1)...(19): siRNA sense strand
uggugauguaugaagggaa

SEQ ID NO: 2568480 - RNA, 19 nt, Homo sapiens
  misc_RNA (1)...(19): siRNA sense strand
aguaugacuaugacagaga

SEQ ID NO: 2568481 - RNA, 19 nt, Homo sapiens
  misc_RNA (1)...(19): siRNA sense strand
ggguuggagaucaguguga

SEQ ID NO: 2568482 - RNA, 19 nt, Homo sapiens
  misc_RNA (1)...(19): siRNA sense strand
agacaaaggacuugcaagc

SEQ ID NO: 2568483 - RNA, 19 nt, Homo sapiens
  misc_RNA (1)...(19): siRNA sense strand
gugacaagagauuuaaaca

SEQ ID NO: 2568484 - RNA, 19 nt, Homo sapiens
  misc_RNA (1)...(19): siRNA sense strand
uggaggagggguacagaaa

SEQ ID NO: 2568485 - RNA, 19 nt, Homo sapiens
  misc_RNA (1)...(19): siRNA sense strand
gcaaggacugcguugguga

SEQ ID NO: 2568486 - RNA, 19 nt, Homo sapiens
  misc_RNA (1)...(19): siRNA sense strand
aggaagacuaugacaagga

SEQ ID NO: 2568487 - RNA, 19 nt, Homo sapiens
  misc_RNA (1)...(19): siRNA sense strand
ugaugaugacgaugacaau

SEQ ID NO: 2568488 - RNA, 19 nt, Homo sapiens
  misc_RNA (1)...(19): siRNA sense strand
aagauggccaccagaacaa

SEQ ID NO: 2568489 - RNA, 19 nt, Homo sapiens
  misc_RNA (1)...(19): siRNA sense strand
ugugacaacaaucaggaua

SEQ ID NO: 2568490 - RNA, 19 nt, Homo sapiens
  misc_RNA (1)...(19): siRNA sense strand
gcgugguguccaauggcaa

SEQ ID NO: 2568491 - RNA, 19 nt, Homo sapiens
  misc_RNA (1)...(19): siRNA sense strand
gaaccacaccagaagacau

SEQ ID NO: 2568492 - RNA, 19 nt, Homo sapiens
  misc_RNA (1)...(19): siRNA sense strand
aauguggaccagagagaca

SEQ ID NO: 2568493 - RNA, 19 nt, Homo sapiens
  misc_RNA (1)...(19): siRNA sense strand
ccugaaauacgaauguaga

SEQ ID NO: 2568494 - RNA, 19 nt, Homo sapiens
  misc_RNA (1)...(19): siRNA sense strand
aaauacgaauguagagauc

SEQ ID NO: 2568495 - RNA, 19 nt, Homo sapiens
  misc_RNA (1)...(19): siRNA sense strand
gccugaccguccaaggaaa

SEQ ID NO: 2568496 - RNA, 19 nt, Homo sapiens
  misc_RNA (1)...(19): siRNA sense strand
gcgugaaguguacuagcua

SEQ ID NO: 2568497 - RNA, 19 nt, Homo sapiens
  misc_RNA (1)...(19): siRNA sense strand
aaccuaugcuggugguaga

SEQ ID NO: 2568498 - RNA, 19 nt, Homo sapiens
  misc_RNA (1)...(19): siRNA sense strand
agaagaaggugguggcagu

SEQ ID NO: 2568499 - RNA, 19 nt, Homo sapiens
  misc_RNA (1)...(19): siRNA sense strand
acuguaauucugugggaua

SEQ ID NO: 2568500 - RNA, 19 nt, Homo sapiens
  misc_RNA (1)...(19): siRNA sense strand
acaagguagagcugaguaa

SEQ ID NO: 2568501 - RNA, 19 nt, Homo sapiens
  misc_RNA (1)...(19): siRNA sense strand
cugccgaaguccagaugaa

SEQ ID NO: 2568502 - RNA, 19 nt, Homo sapiens
  misc_RNA (1)...(19): siRNA sense strand
cggcguggccaaagagaca

SEQ ID NO: 2568503 - RNA, 19 nt, Homo sapiens
  misc_RNA (1)...(19): siRNA sense strand
agagcugaguaaagaagaa

SEQ ID NO: 2568504 - RNA, 19 nt, Homo sapiens
  misc_RNA (1)...(19): siRNA sense strand
cugaguacgacuuagauaa

SEQ ID NO: 2568505 - RNA, 19 nt, Homo sapiens
  misc_RNA (1)...(19): siRNA sense strand
cugaacaggaccagugcaa

SEQ ID NO: 2568506 - RNA, 19 nt, Homo sapiens
  misc_RNA (1)...(19): siRNA sense strand
agaugauucuacuggaaau

SEQ ID NO: 2568507 - RNA, 19 nt, Homo sapiens
  misc_RNA (1)...(19): siRNA sense strand
cagcaggagcucagauaca

SEQ ID NO: 2568508 - RNA, 19 nt, Homo sapiens
  misc_RNA (1)...(19): siRNA sense strand
ucuuauaguuuguggccga

SEQ ID NO: 2568509 - RNA, 19 nt, Homo sapiens
  misc_RNA (1)...(19): siRNA sense strand
cuacgggaguaaugaucaa

SEQ ID NO: 2568510 - RNA, 19 nt, Homo sapiens
  misc_RNA (1)...(19): siRNA sense strand
cugacaaauacgugaagau

SEQ ID NO: 2568511 - RNA, 19 nt, Homo sapiens
  misc_RNA (1)...(19): siRNA sense strand
augauaagucaguggcuuu

SEQ ID NO: 2568512 - RNA, 19 nt, Homo sapiens
  misc_RNA (1)...(19): siRNA sense strand
acaauaugaacgugaagau

SEQ ID NO: 2568513 - RNA, 19 nt, Homo sapiens
  misc_RNA (1)...(19): siRNA sense strand
ggauggugacccagaggau

SEQ ID NO: 2568514 - RNA, 19 nt, Homo sapiens
  misc_RNA (1)...(19): siRNA sense strand
cagaacaauaugaacguga

SEQ ID NO: 2568515 - RNA, 19 nt, Homo sapiens
  misc_RNA (1)...(19): siRNA sense strand
aagaaaggaaagaagaguu

SEQ ID NO: 2568516 - RNA, 19 nt, Homo sapiens
  misc_RNA (1)...(19): siRNA sense strand
agucaguggcuuuguauga

SEQ ID NO: 2568517 - RNA, 19 nt, Homo sapiens
  misc_RNA (1)...(19): siRNA sense strand
cagaaauguuuuagcaagu

SEQ ID NO: 2568518 - RNA, 19 nt, Homo sapiens
  misc_RNA (1)...(19): siRNA sense strand
agaaaggaaagaagaguuc

SEQ ID NO: 2568519 - RNA, 19 nt, Homo sapiens
  misc_RNA (1)...(19): siRNA sense strand
ggucugggauauaagcaca

SEQ ID NO: 2568520 - RNA, 19 nt, Homo sapiens
  misc_RNA (1)...(19): siRNA sense strand
gcaauuuagaggugcaugu

SEQ ID NO: 2568521 - RNA, 19 nt, Homo sapiens
  misc_RNA (1)...(19): siRNA sense strand
cuguaauucugugggauau

SEQ ID NO: 2568522 - RNA, 19 nt, Homo sapiens
  misc_RNA (1)...(19): siRNA sense strand
agagagagugacuuggaau

SEQ ID NO: 2568523 - RNA, 19 nt, Homo sapiens
  misc_RNA (1)...(19): siRNA sense strand
aggugguggcagugaugaa

SEQ ID NO: 2568524 - RNA, 19 nt, Homo sapiens
  misc_RNA (1)...(19): siRNA sense strand
ggugcauguuuauaaucaa

SEQ ID NO: 2568525 - RNA, 19 nt, Homo sapiens
  misc_RNA (1)...(19): siRNA sense strand
guguggaauggcugaauuu

SEQ ID NO: 2568526 - RNA, 19 nt, Homo sapiens
  misc_RNA (1)...(19): siRNA sense strand
agugugggaccuugauaua

SEQ ID NO: 2568527 - RNA, 19 nt, Homo sapiens
  misc_RNA (1)...(19): siRNA sense strand
gguagagcugaguaaagaa

SEQ ID NO: 2568528 - RNA, 19 nt, Homo sapiens
  misc_RNA (1)...(19): siRNA sense strand
gugaaucucucuugggucu

SEQ ID NO: 2568529 - RNA, 19 nt, Homo sapiens
  misc_RNA (1)...(19): siRNA sense strand
gugggcagauagagagagu

SEQ ID NO: 2568530 - RNA, 19 nt, Homo sapiens
  misc_RNA (1)...(19): siRNA sense strand
cugaggcaaaggagaaauu

SEQ ID NO: 2568531 - RNA, 19 nt, Homo sapiens
  misc_RNA (1)...(19): siRNA sense strand
aauaugaugaggaagguga

SEQ ID NO: 2568532 - RNA, 19 nt, Homo sapiens
  misc_RNA (1)...(19): siRNA sense strand
cuuucauggaauaagcuaa

SEQ ID NO: 2568533 - RNA, 19 nt, Homo sapiens
  misc_RNA (1)...(19): siRNA sense strand
ugaugaaaucucuggucuu

SEQ ID NO: 2568534 - RNA, 19 nt, Homo sapiens
  misc_RNA (1)...(19): siRNA sense strand
ucuuagugcaugaaggaaa

SEQ ID NO: 2568535 - RNA, 19 nt, Homo sapiens
  misc_RNA (1)...(19): siRNA sense strand
cgugcgaggagcugggaaa

SEQ ID NO: 2568536 - RNA, 19 nt, Homo sapiens
  misc_RNA (1)...(19): siRNA sense strand
cggaaaagcaaguguguga

SEQ ID NO: 2568537 - RNA, 19 nt, Homo sapiens
  misc_RNA (1)...(19): siRNA sense strand
acaacaauggagaggguga

SEQ ID NO: 2568538 - RNA, 19 nt, Homo sapiens
  misc_RNA (1)...(19): siRNA sense strand
gggaugugcaggagcguca

SEQ ID NO: 2568539 - RNA, 19 nt, Homo sapiens
  misc_RNA (1)...(19): siRNA sense strand
gugacaacaacgaggacau

SEQ ID NO: 2568540 - RNA, 19 nt, Homo sapiens
  misc_RNA (1)...(19): siRNA sense strand
gaaaacaggucauggcaga

SEQ ID NO: 2568541 - RNA, 19 nt, Homo sapiens
  misc_RNA (1)...(19): siRNA sense strand
gggugauauuuguaaagau

SEQ ID NO: 2568542 - RNA, 19 nt, Homo sapiens
  misc_RNA (1)...(19): siRNA sense strand
gugaugaugacgaugacaa

SEQ ID NO: 2568543 - RNA, 19 nt, Homo sapiens
  misc_RNA (1)...(19): siRNA sense strand
ugaccgaugagaaggacaa

SEQ ID NO: 2568544 - RNA, 19 nt, Homo sapiens
  misc_RNA (1)...(19): siRNA sense strand
agacaacaauggagagggu

SEQ ID NO: 2568545 - RNA, 19 nt, Homo sapiens
  misc_RNA (1)...(19): siRNA sense strand
agucugagcaagugugaca

SEQ ID NO: 2568546 - RNA, 19 nt, Homo sapiens
  misc_RNA (1)...(19): siRNA sense strand
aggaggacuuggacgguga

SEQ ID NO: 2568547 - RNA, 19 nt, Homo sapiens
  misc_RNA (1)...(19): siRNA sense strand
acacagacaacaauggaga

SEQ ID NO: 2568548 - RNA, 19 nt, Homo sapiens
  misc_RNA (1)...(19): siRNA sense strand
acgcagaugaccucagcaa

SEQ ID NO: 2568549 - RNA, 19 nt, Homo sapiens
  misc_RNA (1)...(19): siRNA sense strand
gccagggagcugagaucaa

SEQ ID NO: 2568550 - RNA, 19 nt, Homo sapiens
  misc_RNA (1)...(19): siRNA sense strand
caagaauugcaaagggagu

SEQ ID NO: 2568551 - RNA, 19 nt, Homo sapiens
  misc_RNA (1)...(19): siRNA sense strand
cuuagugcaugaaggaaaa

SEQ ID NO: 2568552 - RNA, 19 nt, Homo sapiens
  misc_RNA (1)...(19): siRNA sense strand
gaaacaugguccaggagcu

SEQ ID NO: 2568553 - RNA, 19 nt, Homo sapiens
  misc_RNA (1)...(19): siRNA sense strand
cugacuaugacaaggauga

SEQ ID NO: 2568554 - RNA, 19 nt, Homo sapiens
  misc_RNA (1)...(19): siRNA sense strand
cugugggcuucuugggcaa

SEQ ID NO: 2568555 - RNA, 19 nt, Homo sapiens
  misc_RNA (1)...(19): siRNA sense strand
caugcaaggacaagacaca

SEQ ID NO: 2568556 - RNA, 19 nt, Homo sapiens
  misc_RNA (1)...(19): siRNA sense strand
uugaaaacucuguggaaga

SEQ ID NO: 2568557 - RNA, 19 nt, Homo sapiens
  misc_RNA (1)...(19): siRNA sense strand
ggcaggaagacuuugacaa

SEQ ID NO: 2568558 - RNA, 19 nt, Homo sapiens
  misc_RNA (1)...(19): siRNA sense strand
agaucgacacagacaacaa

SEQ ID NO: 2568559 - RNA, 19 nt, Homo sapiens
  misc_RNA (1)...(19): siRNA sense strand
gggaccagugugacaacaa

SEQ ID NO: 2568560 - RNA, 19 nt, Homo sapiens
  misc_RNA (1)...(19): siRNA sense strand
aggcugaccaugacagaga

SEQ ID NO: 2568561 - RNA, 19 nt, Homo sapiens
  misc_RNA (1)...(19): siRNA sense strand
ggaaggacuacacggccua

SEQ ID NO: 2568562 - RNA, 19 nt, Homo sapiens
  misc_RNA (1)...(19): siRNA sense strand
acaacaacgaggacauaga

SEQ ID NO: 2568563 - RNA, 19 nt, Homo sapiens
  misc_RNA (1)...(19): siRNA sense strand
gagcugagaucaacgccau

SEQ ID NO: 2568564 - RNA, 19 nt, Homo sapiens
  misc_RNA (1)...(19): siRNA sense strand
ggaagauauucuaagcaag

SEQ ID NO: 2568565 - RNA, 19 nt, Homo sapiens
  misc_RNA (1)...(19): siRNA sense strand
accacugcaucaaggauaa

SEQ ID NO: 2568566 - RNA, 19 nt, Homo sapiens
  misc_RNA (1)...(19): siRNA sense strand
ucaccaagaucaugcggca

SEQ ID NO: 2568567 - RNA, 19 nt, Homo sapiens
  misc_RNA (1)...(19): siRNA sense strand
ugaugaugacgaugacaau

SEQ ID NO: 2568568 - RNA, 19 nt, Homo sapiens
  misc_RNA (1)...(19): siRNA sense strand
acauagaugacgacggcca

SEQ ID NO: 2568569 - RNA, 19 nt, Homo sapiens
  misc_RNA (1)...(19): siRNA sense strand
acccagaccaggaggacuu

SEQ ID NO: 2568570 - RNA, 19 nt, Homo sapiens
  misc_RNA (1)...(19): siRNA sense strand
cccaaagggaccacccaaa

SEQ ID NO: 2568571 - RNA, 19 nt, Homo sapiens
  misc_RNA (1)...(19): siRNA sense strand
agcucaagcaggacggcaa

SEQ ID NO: 2568572 - RNA, 19 nt, Homo sapiens
  misc_RNA (1)...(19): siRNA sense strand
gcugacucgcaguggaaga

SEQ ID NO: 2568573 - RNA, 19 nt, Homo sapiens
  misc_RNA (1)...(19): siRNA sense strand
accagaacaaccaggacaa

SEQ ID NO: 2568574 - RNA, 19 nt, Homo sapiens
  misc_RNA (1)...(19): siRNA sense strand
gugaauagugugaaggaaa

SEQ ID NO: 2568575 - RNA, 19 nt, Homo sapiens
  misc_RNA (1)...(19): siRNA sense strand
ccagauggcaagagggaga

SEQ ID NO: 2568576 - RNA, 19 nt, Homo sapiens
  misc_RNA (1)...(19): siRNA sense strand
uggugaaacuggagugaga

SEQ ID NO: 2568577 - RNA, 19 nt, Homo sapiens
  misc_RNA (1)...(19): siRNA sense strand
agaaaucuuuagagggaau

SEQ ID NO: 2568578 - RNA, 19 nt, Homo sapiens
  misc_RNA (1)...(19): siRNA sense strand
ccuuaaaacucuagaagau

SEQ ID NO: 2568579 - RNA, 19 nt, Homo sapiens
  misc_RNA (1)...(19): siRNA sense strand
ccaucaagaccaugaacaa

SEQ ID NO: 2568580 - RNA, 19 nt, Homo sapiens
  misc_RNA (1)...(19): siRNA sense strand
guuccaaacagaagaagaa

SEQ ID NO: 2568581 - RNA, 19 nt, Homo sapiens
  misc_RNA (1)...(19): siRNA sense strand
augcaaggcagaagagcua

SEQ ID NO: 2568582 - RNA, 19 nt, Homo sapiens
  misc_RNA (1)...(19): siRNA sense strand
cggcgagcuuuaagaagaa

SEQ ID NO: 2568583 - RNA, 19 nt, Homo sapiens
  misc_RNA (1)...(19): siRNA sense strand
gcgggaaagaggccggaaa

SEQ ID NO: 2568584 - RNA, 19 nt, Homo sapiens
  misc_RNA (1)...(19): siRNA sense strand
agaagaaacuuguaggauc

SEQ ID NO: 2568585 - RNA, 19 nt, Homo sapiens
  misc_RNA (1)...(19): siRNA sense strand
ggguagaggagcaguuuga

SEQ ID NO: 2568586 - RNA, 19 nt, Homo sapiens
  misc_RNA (1)...(19): siRNA sense strand
aggcgagggcagugaguuu

SEQ ID NO: 2568587 - RNA, 19 nt, Homo sapiens
  misc_RNA (1)...(19): siRNA sense strand
ggauagaccacaacagcau

SEQ ID NO: 2568588 - RNA, 19 nt, Homo sapiens
  misc_RNA (1)...(19): siRNA sense strand
gcaaggcagaagagcuaaa

SEQ ID NO: 2568589 - RNA, 19 nt, Homo sapiens
  misc_RNA (1)...(19): siRNA sense strand
gggaaacgcagaaagucaa

SEQ ID NO: 2568590 - RNA, 19 nt, Homo sapiens
  misc_RNA (1)...(19): siRNA sense strand
gugaaagccaagacagaca

SEQ ID NO: 2568591 - RNA, 19 nt, Homo sapiens
  misc_RNA (1)...(19): siRNA sense strand
cggagagcgaggagcacua

SEQ ID NO: 2568592 - RNA, 19 nt, Homo sapiens
  misc_RNA (1)...(19): siRNA sense strand
agaacuuccuggugcacaa

SEQ ID NO: 2568593 - RNA, 19 nt, Homo sapiens
  misc_RNA (1)...(19): siRNA sense strand
ggacacugaccgaugggua

SEQ ID NO: 2568594 - RNA, 19 nt, Homo sapiens
  misc_RNA (1)...(19): siRNA sense strand
cauucaauccugcgugaua

SEQ ID NO: 2568595 - RNA, 19 nt, Homo sapiens
  misc_RNA (1)...(19): siRNA sense strand
cggaauuuggugucugaua

SEQ ID NO: 2568596 - RNA, 19 nt, Homo sapiens
  misc_RNA (1)...(19): siRNA sense strand
ugguagaguuucaaguaga

SEQ ID NO: 2568597 - RNA, 19 nt, Homo sapiens
  misc_RNA (1)...(19): siRNA sense strand
uggaaaagcuugagaaggu

SEQ ID NO: 2568598 - RNA, 19 nt, Homo sapiens
  misc_RNA (1)...(19): siRNA sense strand
uaacaagcaacgaagaaau

SEQ ID NO: 2568599 - RNA, 19 nt, Homo sapiens
  misc_RNA (1)...(19): siRNA sense strand
gugcagagcaugccagaca

SEQ ID NO: 2568600 - RNA, 19 nt, Homo sapiens
  misc_RNA (1)...(19): siRNA sense strand
ccugaaaggaugcacgcua

SEQ ID NO: 2568601 - RNA, 19 nt, Homo sapiens
  misc_RNA (1)...(19): siRNA sense strand
ccaaacagaagaagaaacu

SEQ ID NO: 2568602 - RNA, 19 nt, Homo sapiens
  misc_RNA (1)...(19): siRNA sense strand
uggugaaagccaagacaga

SEQ ID NO: 2568603 - RNA, 19 nt, Homo sapiens
  misc_RNA (1)...(19): siRNA sense strand
cugaaaggaugcacgcuau

SEQ ID NO: 2568604 - RNA, 19 nt, Homo sapiens
  misc_RNA (1)...(19): siRNA sense strand
cgggaaagaggccggaaaa

SEQ ID NO: 2568605 - RNA, 19 nt, Homo sapiens
  misc_RNA (1)...(19): siRNA sense strand
gggaggacagccuggaauu

SEQ ID NO: 2568606 - RNA, 19 nt, Homo sapiens
  misc_RNA (1)...(19): siRNA sense strand
agauugacauggaugaaaa

SEQ ID NO: 2568607 - RNA, 19 nt, Homo sapiens
  misc_RNA (1)...(19): siRNA sense strand
ggaguggagcugcuggaaa

SEQ ID NO: 2568608 - RNA, 19 nt, Homo sapiens
  misc_RNA (1)...(19): siRNA sense strand
cugugguccuuguguauaa

SEQ ID NO: 2568609 - RNA, 19 nt, Homo sapiens
  misc_RNA (1)...(19): siRNA sense strand
cgacggcaggucugggaua

SEQ ID NO: 2568610 - RNA, 19 nt, Homo sapiens
  misc_RNA (1)...(19): siRNA sense strand
agggaauauuugaugacau

SEQ ID NO: 2568611 - RNA, 19 nt, Homo sapiens
  misc_RNA (1)...(19): siRNA sense strand
augcagauaacgugcgcaa

SEQ ID NO: 2568612 - RNA, 19 nt, Homo sapiens
  misc_RNA (1)...(19): siRNA sense strand
cagcaagaguacagaacag

SEQ ID NO: 2568613 - RNA, 19 nt, Homo sapiens
  misc_RNA (1)...(19): siRNA sense strand
caagcagcccggagaaaga

SEQ ID NO: 2568614 - RNA, 19 nt, Homo sapiens
  misc_RNA (1)...(19): siRNA sense strand
gugcacaagaagaacaaga

SEQ ID NO: 2568615 - RNA, 19 nt, Homo sapiens
  misc_RNA (1)...(19): siRNA sense strand
gcgcaagcgaggaagucau

SEQ ID NO: 2568616 - RNA, 19 nt, Homo sapiens
  misc_RNA (1)...(19): siRNA sense strand
ccgaagagaaggacugcga

SEQ ID NO: 2568617 - RNA, 19 nt, Homo sapiens
  misc_RNA (1)...(19): siRNA sense strand
guuugcagacagugggauu

SEQ ID NO: 2568618 - RNA, 19 nt, Homo sapiens
  misc_RNA (1)...(19): siRNA sense strand
cuguggaagaagaugguau

SEQ ID NO: 2568619 - RNA, 19 nt, Homo sapiens
  misc_RNA (1)...(19): siRNA sense strand
cacaagacgcggaggacca

SEQ ID NO: 2568620 - RNA, 19 nt, Homo sapiens
  misc_RNA (1)...(19): siRNA sense strand
ggguggaccgaguggacau

SEQ ID NO: 2568621 - RNA, 19 nt, Homo sapiens
  misc_RNA (1)...(19): siRNA sense strand
cgugaauagugugaaggaa

SEQ ID NO: 2568622 - RNA, 19 nt, Homo sapiens
  misc_RNA (1)...(19): siRNA sense strand
acggcgagcuuuaagaaga

SEQ ID NO: 2568623 - RNA, 19 nt, Homo sapiens
  misc_RNA (1)...(19): siRNA sense strand
auguagagcacgaguuuua

SEQ ID NO: 2568624 - RNA, 19 nt, Homo sapiens
  misc_RNA (1)...(19): siRNA sense strand
acauuuggguccacgagua

SEQ ID NO: 2568625 - RNA, 19 nt, Homo sapiens
  misc_RNA (1)...(19): siRNA sense strand
gcugauugcugaacagacu

SEQ ID NO: 2568626 - RNA, 19 nt, Homo sapiens
  misc_RNA (1)...(19): siRNA sense strand
aagaagaaacgcuccaaau

SEQ ID NO: 2568627 - RNA, 19 nt, Homo sapiens
  misc_RNA (1)...(19): siRNA sense strand
agaugagauucuugagauc

SEQ ID NO: 2568628 - RNA, 19 nt, Homo sapiens
  misc_RNA (1)...(19): siRNA sense strand
auggagacggcgagcuuua

SEQ ID NO: 2568629 - RNA, 19 nt, Homo sapiens
  misc_RNA (1)...(19): siRNA sense strand
cacauugagaagucagaua

SEQ ID NO: 2568630 - RNA, 19 nt, Homo sapiens
  misc_RNA (1)...(19): siRNA sense strand
cagagagccgaaaggauuu

SEQ ID NO: 2568631 - RNA, 19 nt, Homo sapiens
  misc_RNA (1)...(19): siRNA sense strand
gaacaagaagguggaguca

SEQ ID NO: 2568632 - RNA, 19 nt, Homo sapiens
  misc_RNA (1)...(19): siRNA sense strand
ugucagaggcagaggaaaa

SEQ ID NO: 2568633 - RNA, 19 nt, Homo sapiens
  misc_RNA (1)...(19): siRNA sense strand
ggaaagaggaagaccgcca

SEQ ID NO: 2568634 - RNA, 19 nt, Homo sapiens
  misc_RNA (1)...(19): siRNA sense strand
ccguagacaggaaggaauu

SEQ ID NO: 2568635 - RNA, 19 nt, Homo sapiens
  misc_RNA (1)...(19): siRNA sense strand
caacaaaagucaaccguca

SEQ ID NO: 2568636 - RNA, 19 nt, Homo sapiens
  misc_RNA (1)...(19): siRNA sense strand
caucuuuacuuuauggaga

SEQ ID NO: 2568637 - RNA, 19 nt, Homo sapiens
  misc_RNA (1)...(19): siRNA sense strand
aaaucaauggaaagaggaa

SEQ ID NO: 2568638 - RNA, 19 nt, Homo sapiens
  misc_RNA (1)...(19): siRNA sense strand
caugaaagaacgugagcac

SEQ ID NO: 2568639 - RNA, 19 nt, Homo sapiens
  misc_RNA (1)...(19): siRNA sense strand
aucaauggaaagaggaaga

SEQ ID NO: 2568640 - RNA, 19 nt, Homo sapiens
  misc_RNA (1)...(19): siRNA sense strand
cguaagaugaaggugacaa

SEQ ID NO: 2568641 - RNA, 19 nt, Homo sapiens
  misc_RNA (1)...(19): siRNA sense strand
uuaaaauuguccuggaaga

SEQ ID NO: 2568642 - RNA, 19 nt, Homo sapiens
  misc_RNA (1)...(19): siRNA sense strand
gcacagagaaggaggucga

SEQ ID NO: 2568643 - RNA, 19 nt, Homo sapiens
  misc_RNA (1)...(19): siRNA sense strand
gcacagaguugaugagacg

SEQ ID NO: 2568644 - RNA, 19 nt, Homo sapiens
  misc_RNA (1)...(19): siRNA sense strand
cggugugcauggagugcuu

SEQ ID NO: 2568645 - RNA, 19 nt, Homo sapiens
  misc_RNA (1)...(19): siRNA sense strand
acacaugaccggaacacca

SEQ ID NO: 2568646 - RNA, 19 nt, Homo sapiens
  misc_RNA (1)...(19): siRNA sense strand
uggccgagagcguggugaa

SEQ ID NO: 2568647 - RNA, 19 nt, Homo sapiens
  misc_RNA (1)...(19): siRNA sense strand
caguacaagugccugguga

SEQ ID NO: 2568648 - RNA, 19 nt, Homo sapiens
  misc_RNA (1)...(19): siRNA sense strand
aggaaacgcuggaacggau

SEQ ID NO: 2568649 - RNA, 19 nt, Homo sapiens
  misc_RNA (1)...(19): siRNA sense strand
acaaaguggaaauggagau

SEQ ID NO: 2568650 - RNA, 19 nt, Homo sapiens
  misc_RNA (1)...(19): siRNA sense strand
ggcucaacagcgugauuaa

SEQ ID NO: 2568651 - RNA, 19 nt, Homo sapiens
  misc_RNA (1)...(19): siRNA sense strand
auugugagcauguuggaaa

SEQ ID NO: 2568652 - RNA, 19 nt, Homo sapiens
  misc_RNA (1)...(19): siRNA sense strand
gcaaaggaguuuaaggacc

SEQ ID NO: 2568653 - RNA, 19 nt, Homo sapiens
  misc_RNA (1)...(19): siRNA sense strand
ugggcaacaaaguggaaau

SEQ ID NO: 2568654 - RNA, 19 nt, Homo sapiens
  misc_RNA (1)...(19): siRNA sense strand
uggaaaaugagcuggauga

SEQ ID NO: 2568655 - RNA, 19 nt, Homo sapiens
  misc_RNA (1)...(19): siRNA sense strand
uggaugagcuggacccuga

SEQ ID NO: 2568656 - RNA, 19 nt, Homo sapiens
  misc_RNA (1)...(19): siRNA sense strand
gagaagaucugguccccua

SEQ ID NO: 2568657 - RNA, 19 nt, Homo sapiens
  misc_RNA (1)...(19): siRNA sense strand
gagcccuaacagaggaaga

SEQ ID NO: 2568658 - RNA, 19 nt, Homo sapiens
  misc_RNA (1)...(19): siRNA sense strand
caucauugcaacagauaau

SEQ ID NO: 2568659 - RNA, 19 nt, Homo sapiens
  misc_RNA (1)...(19): siRNA sense strand
auucacacccagagauaaa

SEQ ID NO: 2568660 - RNA, 19 nt, Homo sapiens
  misc_RNA (1)...(19): siRNA sense strand
gauauggagguuugggaau

SEQ ID NO: 2568661 - RNA, 19 nt, Homo sapiens
  misc_RNA (1)...(19): siRNA sense strand
uggaauacaacuagccaga

SEQ ID NO: 2568662 - RNA, 19 nt, Homo sapiens
  misc_RNA (1)...(19): siRNA sense strand
auguaaaggauggaguaaa

SEQ ID NO: 2568663 - RNA, 19 nt, Homo sapiens
  misc_RNA (1)...(19): siRNA sense strand
cagcaauaacuuacagagu

SEQ ID NO: 2568664 - RNA, 19 nt, Homo sapiens
  misc_RNA (1)...(19): siRNA sense strand
aguagaagaacuggaacaa

SEQ ID NO: 2568665 - RNA, 19 nt, Homo sapiens
  misc_RNA (1)...(19): siRNA sense strand
uggaguaaaucaagcagca

SEQ ID NO: 2568666 - RNA, 19 nt, Homo sapiens
  misc_RNA (1)...(19): siRNA sense strand
agauauggagguuugggaa

SEQ ID NO: 2568667 - RNA, 19 nt, Homo sapiens
  misc_RNA (1)...(19): siRNA sense strand
agguaauaauagacgugga

SEQ ID NO: 2568668 - RNA, 19 nt, Homo sapiens
  misc_RNA (1)...(19): siRNA sense strand
cguggauggaauacaacua

SEQ ID NO: 2568669 - RNA, 19 nt, Homo sapiens
  misc_RNA (1)...(19): siRNA sense strand
uggaaggaauuguaaaaga

SEQ ID NO: 2568670 - RNA, 19 nt, Homo sapiens
  misc_RNA (1)...(19): siRNA sense strand
uuauucacacccagagaua

SEQ ID NO: 2568671 - RNA, 19 nt, Homo sapiens
  misc_RNA (1)...(19): siRNA sense strand
gcaucauugcaacagauaa

SEQ ID NO: 2568672 - RNA, 19 nt, Homo sapiens
  misc_RNA (1)...(19): siRNA sense strand
cagagauaaacuaacagua

SEQ ID NO: 2568673 - RNA, 19 nt, Homo sapiens
  misc_RNA (1)...(19): siRNA sense strand
gcagcagagaucaagaaaa

SEQ ID NO: 2568674 - RNA, 19 nt, Homo sapiens
  misc_RNA (1)...(19): siRNA sense strand
cuaacaggaaggaaggcuu

SEQ ID NO: 2568675 - RNA, 19 nt, Homo sapiens
  misc_RNA (1)...(19): siRNA sense strand
cuuuaaagguggaacauua

SEQ ID NO: 2568676 - RNA, 19 nt, Homo sapiens
  misc_RNA (1)...(19): siRNA sense strand
ugauagguguuuagagaaa

SEQ ID NO: 2568677 - RNA, 19 nt, Homo sapiens
  misc_RNA (1)...(19): siRNA sense strand
uggaucagcuugugaaaua

SEQ ID NO: 2568678 - RNA, 19 nt, Homo sapiens
  misc_RNA (1)...(19): siRNA sense strand
gugaaguccacuagggaua

SEQ ID NO: 2568679 - RNA, 19 nt, Homo sapiens
  misc_RNA (1)...(19): siRNA sense strand
ggagaaguaugcaaaguaa

SEQ ID NO: 2568680 - RNA, 19 nt, Homo sapiens
  misc_RNA (1)...(19): siRNA sense strand
ggaacaaggaacagaauca

SEQ ID NO: 2568681 - RNA, 19 nt, Homo sapiens
  misc_RNA (1)...(19): siRNA sense strand
gaagaaagaacacaagaaa

SEQ ID NO: 2568682 - RNA, 19 nt, Homo sapiens
  misc_RNA (1)...(19): siRNA sense strand
gugacaaugaagaaggaaa

SEQ ID NO: 2568683 - RNA, 19 nt, Homo sapiens
  misc_RNA (1)...(19): siRNA sense strand
gaaagaagaaagaacacaa

SEQ ID NO: 2568684 - RNA, 19 nt, Homo sapiens
  misc_RNA (1)...(19): siRNA sense strand
gaacauaccuggauccgaa

SEQ ID NO: 2568685 - RNA, 19 nt, Homo sapiens
  misc_RNA (1)...(19): siRNA sense strand
ugauaaacccagacaagaa

SEQ ID NO: 2568686 - RNA, 19 nt, Homo sapiens
  misc_RNA (1)...(19): siRNA sense strand
agaaagaacacaagaaagu

SEQ ID NO: 2568687 - RNA, 19 nt, Homo sapiens
  misc_RNA (1)...(19): siRNA sense strand
aagacaaguugaagaguga

SEQ ID NO: 2568688 - RNA, 19 nt, Homo sapiens
  misc_RNA (1)...(19): siRNA sense strand
ccaggaagcuauaugagaa

SEQ ID NO: 2568689 - RNA, 19 nt, Homo sapiens
  misc_RNA (1)...(19): siRNA sense strand
caugauagguguuuagaga

SEQ ID NO: 2568690 - RNA, 19 nt, Homo sapiens
  misc_RNA (1)...(19): siRNA sense strand
ugaugaaauccuaggguuu

SEQ ID NO: 2568691 - RNA, 19 nt, Homo sapiens
  misc_RNA (1)...(19): siRNA sense strand
caggaagcuauaugagaaa

SEQ ID NO: 2568692 - RNA, 19 nt, Homo sapiens
  misc_RNA (1)...(19): siRNA sense strand
augaagaaggaaagaagaa

SEQ ID NO: 2568693 - RNA, 19 nt, Homo sapiens
  misc_RNA (1)...(19): siRNA sense strand
ggaacagaaucaagaucuu

SEQ ID NO: 2568694 - RNA, 19 nt, Homo sapiens
  misc_RNA (1)...(19): siRNA sense strand
uauuugcgguagagagaaa

SEQ ID NO: 2568695 - RNA, 19 nt, Homo sapiens
  misc_RNA (1)...(19): siRNA sense strand
ugacagauacagugacaau

SEQ ID NO: 2568696 - RNA, 19 nt, Homo sapiens
  misc_RNA (1)...(19): siRNA sense strand
ggaacaaccaggaagcuau

SEQ ID NO: 2568697 - RNA, 19 nt, Homo sapiens
  misc_RNA (1)...(19): siRNA sense strand
agaagaaagaacacaagaa

SEQ ID NO: 2568698 - RNA, 19 nt, Homo sapiens
  misc_RNA (1)...(19): siRNA sense strand
ugugaaauacggagugaau

SEQ ID NO: 2568699 - RNA, 19 nt, Homo sapiens
  misc_RNA (1)...(19): siRNA sense strand
aagaaggaaagaagaaaga

SEQ ID NO: 2568700 - RNA, 19 nt, Homo sapiens
  misc_RNA (1)...(19): siRNA sense strand
aauagaugccucagaacua

SEQ ID NO: 2568701 - RNA, 19 nt, Homo sapiens
  misc_RNA (1)...(19): siRNA sense strand
gugagaagucaguggagga

SEQ ID NO: 2568702 - RNA, 19 nt, Homo sapiens
  misc_RNA (1)...(19): siRNA sense strand
auaugaagcugcagcauca

SEQ ID NO: 2568703 - RNA, 19 nt, Homo sapiens
  misc_RNA (1)...(19): siRNA sense strand
agagaaaaguggaauucaa

SEQ ID NO: 2568704 - RNA, 19 nt, Homo sapiens
  misc_RNA (1)...(19): siRNA sense strand
uagucaagcugcacagauu

SEQ ID NO: 2568705 - RNA, 19 nt, Homo sapiens
  misc_RNA (1)...(19): siRNA sense strand
gaacauuauuuggaggaga

SEQ ID NO: 2568706 - RNA, 19 nt, Homo sapiens
  misc_RNA (1)...(19): siRNA sense strand
cagaauggaaguaaugauu

SEQ ID NO: 2568707 - RNA, 19 nt, Homo sapiens
  misc_RNA (1)...(19): siRNA sense strand
caguaaaaggaaagcacua

SEQ ID NO: 2568708 - RNA, 19 nt, Homo sapiens
  misc_RNA (1)...(19): siRNA sense strand
auacagugacaaugaagaa

SEQ ID NO: 2568709 - RNA, 19 nt, Homo sapiens
  misc_RNA (1)...(19): siRNA sense strand
gacaagaagauaaagauga

SEQ ID NO: 2568710 - RNA, 19 nt, Homo sapiens
  misc_RNA (1)...(19): siRNA sense strand
uaacagagcucacuaauga

SEQ ID NO: 2568711 - RNA, 19 nt, Homo sapiens
  misc_RNA (1)...(19): siRNA sense strand
gcagaaaauacaaggcaga

SEQ ID NO: 2568712 - RNA, 19 nt, Homo sapiens
  misc_RNA (1)...(19): siRNA sense strand
aauacaaggcagaauggaa

SEQ ID NO: 2568713 - RNA, 19 nt, Homo sapiens
  misc_RNA (1)...(19): siRNA sense strand
ccagacaagaagauaaaga

SEQ ID NO: 2568714 - RNA, 19 nt, Homo sapiens
  misc_RNA (1)...(19): siRNA sense strand
gaacaaccaggaagcuaua

SEQ ID NO: 2568715 - RNA, 19 nt, Homo sapiens
  misc_RNA (1)...(19): siRNA sense strand
ugaagaaggaaagaagaaa

SEQ ID NO: 2568716 - RNA, 19 nt, Homo sapiens
  misc_RNA (1)...(19): siRNA sense strand
cugaaggauugcaaaauua

SEQ ID NO: 2568717 - RNA, 19 nt, Homo sapiens
  misc_RNA (1)...(19): siRNA sense strand
aacauuauuuggaggagaa

SEQ ID NO: 2568718 - RNA, 19 nt, Homo sapiens
  misc_RNA (1)...(19): siRNA sense strand
acccagacaagaagauaaa

SEQ ID NO: 2568719 - RNA, 19 nt, Homo sapiens
  misc_RNA (1)...(19): siRNA sense strand
gcaaucagcaguuggacuu

SEQ ID NO: 2568720 - RNA, 19 nt, Homo sapiens
  misc_RNA (1)...(19): siRNA sense strand
auuauuuggaggagaagua

SEQ ID NO: 2568721 - RNA, 19 nt, Homo sapiens
  misc_RNA (1)...(19): siRNA sense strand
gggaacaaccaggaagcua

SEQ ID NO: 2568722 - RNA, 19 nt, Homo sapiens
  misc_RNA (1)...(19): siRNA sense strand
ugacaaaagacaaguugaa

SEQ ID NO: 2568723 - RNA, 19 nt, Homo sapiens
  misc_RNA (1)...(19): siRNA sense strand
aaggaaagaagaaagaaca

SEQ ID NO: 2568724 - RNA, 19 nt, Homo sapiens
  misc_RNA (1)...(19): siRNA sense strand
acuacaggcagcuaagaaa

SEQ ID NO: 2568725 - RNA, 19 nt, Homo sapiens
  misc_RNA (1)...(19): siRNA sense strand
agaaaauauuugcgguaga

SEQ ID NO: 2568726 - RNA, 19 nt, Homo sapiens
  misc_RNA (1)...(19): siRNA sense strand
guagaaaauauuugcggua

SEQ ID NO: 2568727 - RNA, 19 nt, Homo sapiens
  misc_RNA (1)...(19): siRNA sense strand
aaguggaauucaaccauua

SEQ ID NO: 2568728 - RNA, 19 nt, Homo sapiens
  misc_RNA (1)...(19): siRNA sense strand
gaaggaaagaagaaagaac

SEQ ID NO: 2568729 - RNA, 19 nt, Homo sapiens
  misc_RNA (1)...(19): siRNA sense strand
gaagagaauugaucagucu

SEQ ID NO: 2568730 - RNA, 19 nt, Homo sapiens
  misc_RNA (1)...(19): siRNA sense strand
gaugaaauccuaggguuua

SEQ ID NO: 2568731 - RNA, 19 nt, Homo sapiens
  misc_RNA (1)...(19): siRNA sense strand
uggaggagaaguaugcaaa

SEQ ID NO: 2568732 - RNA, 19 nt, Homo sapiens
  misc_RNA (1)...(19): siRNA sense strand
gaggaaagggauucagguu

SEQ ID NO: 2568733 - RNA, 19 nt, Homo sapiens
  misc_RNA (1)...(19): siRNA sense strand
cagggaggcaacacagaua

SEQ ID NO: 2568734 - RNA, 19 nt, Homo sapiens
  misc_RNA (1)...(19): siRNA sense strand
agacauuagucaagcugca

SEQ ID NO: 2568735 - RNA, 19 nt, Homo sapiens
  misc_RNA (1)...(19): siRNA sense strand
aggagaaguaugcaaagua

SEQ ID NO: 2568736 - RNA, 19 nt, Homo sapiens
  misc_RNA (1)...(19): siRNA sense strand
gagaaguaugcaaaguaau

SEQ ID NO: 2568737 - RNA, 19 nt, Homo sapiens
  misc_RNA (1)...(19): siRNA sense strand
gcucacuaaugaagaucuu

SEQ ID NO: 2568738 - RNA, 19 nt, Homo sapiens
  misc_RNA (1)...(19): siRNA sense strand
gcagaauggaaguaaugau

SEQ ID NO: 2568739 - RNA, 19 nt, Homo sapiens
  misc_RNA (1)...(19): siRNA sense strand
aauauuugcgguagagaga

SEQ ID NO: 2568740 - RNA, 19 nt, Homo sapiens
  misc_RNA (1)...(19): siRNA sense strand
ugacaaugaagaaggaaag

SEQ ID NO: 2568741 - RNA, 19 nt, Homo sapiens
  misc_RNA (1)...(19): siRNA sense strand
caaugaagaaggaaagaag

SEQ ID NO: 2568742 - RNA, 19 nt, Homo sapiens
  misc_RNA (1)...(19): siRNA sense strand
ggacuuagcacucuguaga

SEQ ID NO: 2568743 - RNA, 19 nt, Homo sapiens
  misc_RNA (1)...(19): siRNA sense strand
uagaagagucugagagcuc

SEQ ID NO: 2568744 - RNA, 19 nt, Homo sapiens
  misc_RNA (1)...(19): siRNA sense strand
ggaaguaaugauucugaca

SEQ ID NO: 2568745 - RNA, 19 nt, Homo sapiens
  misc_RNA (1)...(19): siRNA sense strand
cgcuugggauucugagcaa

SEQ ID NO: 2568746 - RNA, 19 nt, Homo sapiens
  misc_RNA (1)...(19): siRNA sense strand
gaagaaggaaagaagaaag

SEQ ID NO: 2568747 - RNA, 19 nt, Homo sapiens
  misc_RNA (1)...(19): siRNA sense strand
ggaaagaagaaagaacaca

SEQ ID NO: 2568748 - RNA, 19 nt, Homo sapiens
  misc_RNA (1)...(19): siRNA sense strand
ccugagaggucccauauuu

SEQ ID NO: 2568749 - RNA, 19 nt, Homo sapiens
  misc_RNA (1)...(19): siRNA sense strand
gaaaacauacagaagagaa

SEQ ID NO: 2568750 - RNA, 19 nt, Homo sapiens
  misc_RNA (1)...(19): siRNA sense strand
agaagucaguggaggaaag

SEQ ID NO: 2568751 - RNA, 19 nt, Homo sapiens
  misc_RNA (1)...(19): siRNA sense strand
gagcaaaacauaugaugca

SEQ ID NO: 2568752 - RNA, 19 nt, Homo sapiens
  misc_RNA (1)...(19): siRNA sense strand
cugcauuugaugaagugaa

SEQ ID NO: 2568753 - RNA, 19 nt, Homo sapiens
  misc_RNA (1)...(19): siRNA sense strand
ggacuucuccagugacgaa

SEQ ID NO: 2568754 - RNA, 19 nt, Homo sapiens
  misc_RNA (1)...(19): siRNA sense strand
aaagaacacaagaaaguga

SEQ ID NO: 2568755 - RNA, 19 nt, Homo sapiens
  misc_RNA (1)...(19): siRNA sense strand
gcugaaggauugcaaaauu

SEQ ID NO: 2568756 - RNA, 19 nt, Homo sapiens
  misc_RNA (1)...(19): siRNA sense strand
gagggaacaaggaacagaa

SEQ ID NO: 2568757 - RNA, 19 nt, Homo sapiens
  misc_RNA (1)...(19): siRNA sense strand
guacauacuucuaagggag

SEQ ID NO: 2568758 - RNA, 19 nt, Homo sapiens
  misc_RNA (1)...(19): siRNA sense strand
gguagagagaaaaguggaa

SEQ ID NO: 2568759 - RNA, 19 nt, Homo sapiens
  misc_RNA (1)...(19): siRNA sense strand
ggaaagcacuagaagaguc

SEQ ID NO: 2568760 - RNA, 19 nt, Homo sapiens
  misc_RNA (1)...(19): siRNA sense strand
cauuugaugaagugaagau

SEQ ID NO: 2568761 - RNA, 19 nt, Homo sapiens
  misc_RNA (1)...(19): siRNA sense strand
acagauacagugacaauga

SEQ ID NO: 2568762 - RNA, 19 nt, Homo sapiens
  misc_RNA (1)...(19): siRNA sense strand
aaaggaaagcacuagaaga

SEQ ID NO: 2568763 - RNA, 19 nt, Homo sapiens
  misc_RNA (1)...(19): siRNA sense strand
agucaguggaggaaaggga

SEQ ID NO: 2568764 - RNA, 19 nt, Homo sapiens
  misc_RNA (1)...(19): siRNA sense strand
ucuagaaguggcuaagcaa

SEQ ID NO: 2568765 - RNA, 19 nt, Homo sapiens
  misc_RNA (1)...(19): siRNA sense strand
acaaaagacaaguugaaga

SEQ ID NO: 2568766 - RNA, 19 nt, Homo sapiens
  misc_RNA (1)...(19): siRNA sense strand
cgucgauaccucuggcuga

SEQ ID NO: 2568767 - RNA, 19 nt, Homo sapiens
  misc_RNA (1)...(19): siRNA sense strand
cagacaagaagauaaagau

SEQ ID NO: 2568768 - RNA, 19 nt, Homo sapiens
  misc_RNA (1)...(19): siRNA sense strand
acugagggaacaaggaaca

SEQ ID NO: 2568769 - RNA, 19 nt, Homo sapiens
  misc_RNA (1)...(19): siRNA sense strand
ccuucacugauuaaagaaa

SEQ ID NO: 2568770 - RNA, 19 nt, Homo sapiens
  misc_RNA (1)...(19): siRNA sense strand
gagaagucaguggaggaaa

SEQ ID NO: 2568771 - RNA, 19 nt, Homo sapiens
  misc_RNA (1)...(19): siRNA sense strand
gggaggcaacacagauauu

SEQ ID NO: 2568772 - RNA, 19 nt, Homo sapiens
  misc_RNA (1)...(19): siRNA sense strand
gggaaaugccacuguaggu

SEQ ID NO: 2568773 - RNA, 19 nt, Homo sapiens
  misc_RNA (1)...(19): siRNA sense strand
gucccauauuucagaucaa

SEQ ID NO: 2568774 - RNA, 19 nt, Homo sapiens
  misc_RNA (1)...(19): siRNA sense strand
guagguaguuugccuggaa

SEQ ID NO: 2568775 - RNA, 19 nt, Homo sapiens
  misc_RNA (1)...(19): siRNA sense strand
uuguaaaugccaagaaaga

SEQ ID NO: 2568776 - RNA, 19 nt, Homo sapiens
  misc_RNA (1)...(19): siRNA sense strand
agaagauuguaaaugccaa

SEQ ID NO: 2568777 - RNA, 19 nt, Homo sapiens
  misc_RNA (1)...(19): siRNA sense strand
gccuacaagaacugggaga

SEQ ID NO: 2568778 - RNA, 19 nt, Homo sapiens
  misc_RNA (1)...(19): siRNA sense strand
acccagaagcccaagaaga

SEQ ID NO: 2568779 - RNA, 19 nt, Homo sapiens
  misc_RNA (1)...(19): siRNA sense strand
uggaaagccuacagggaaa

SEQ ID NO: 2568780 - RNA, 19 nt, Homo sapiens
  misc_RNA (1)...(19): siRNA sense strand
guguaaaucuagaugacua

SEQ ID NO: 2568781 - RNA, 19 nt, Homo sapiens
  misc_RNA (1)...(19): siRNA sense strand
cauacaagcaagauggaaa

SEQ ID NO: 2568782 - RNA, 19 nt, Homo sapiens
  misc_RNA (1)...(19): siRNA sense strand
uggaauuugcugagaauaa

SEQ ID NO: 2568783 - RNA, 19 nt, Homo sapiens
  misc_RNA (1)...(19): siRNA sense strand
uauaaaugauggaggaaga

SEQ ID NO: 2568784 - RNA, 19 nt, Homo sapiens
  misc_RNA (1)...(19): siRNA sense strand
uggugaauauuaagggaua

SEQ ID NO: 2568785 - RNA, 19 nt, Homo sapiens
  misc_RNA (1)...(19): siRNA sense strand
agagaaaguaggagaauga

SEQ ID NO: 2568786 - RNA, 19 nt, Homo sapiens
  misc_RNA (1)...(19): siRNA sense strand
gaauauaaaugauggagga

SEQ ID NO: 2568787 - RNA, 19 nt, Homo sapiens
  misc_RNA (1)...(19): siRNA sense strand
gcuuggaacuucugagcua

SEQ ID NO: 2568788 - RNA, 19 nt, Homo sapiens
  misc_RNA (1)...(19): siRNA sense strand
guaccaagaacaaaggaaa

SEQ ID NO: 2568789 - RNA, 19 nt, Homo sapiens
  misc_RNA (1)...(19): siRNA sense strand
gggaagacucaaagcacaa

SEQ ID NO: 2568790 - RNA, 19 nt, Homo sapiens
  misc_RNA (1)...(19): siRNA sense strand
aauuggaacaagaggaaua

SEQ ID NO: 2568791 - RNA, 19 nt, Homo sapiens
  misc_RNA (1)...(19): siRNA sense strand
gugcuuaagaaguuagaaa

SEQ ID NO: 2568792 - RNA, 19 nt, Homo sapiens
  misc_RNA (1)...(19): siRNA sense strand
gcaucaacaugaagauaau

SEQ ID NO: 2568793 - RNA, 19 nt, Homo sapiens
  misc_RNA (1)...(19): siRNA sense strand
ggcgauggaugaugggaaa

SEQ ID NO: 2568794 - RNA, 19 nt, Homo sapiens
  misc_RNA (1)...(19): siRNA sense strand
ccagaggagcuuagagauu

SEQ ID NO: 2568795 - RNA, 19 nt, Homo sapiens
  misc_RNA (1)...(19): siRNA sense strand
guaaugaggcccugggaau

SEQ ID NO: 2568796 - RNA, 19 nt, Homo sapiens
  misc_RNA (1)...(19): siRNA sense strand
aauaaaagccauagaggaa

SEQ ID NO: 2568797 - RNA, 19 nt, Homo sapiens
  misc_RNA (1)...(19): siRNA sense strand
cagggaaacuagaagguau

SEQ ID NO: 2568798 - RNA, 19 nt, Homo sapiens
  misc_RNA (1)...(19): siRNA sense strand
gaugcaaggaagagaagua

SEQ ID NO: 2568799 - RNA, 19 nt, Homo sapiens
  misc_RNA (1)...(19): siRNA sense strand
gagaaggaagaaaggcaaa

SEQ ID NO: 2568800 - RNA, 19 nt, Homo sapiens
  misc_RNA (1)...(19): siRNA sense strand
ggugaaugaccuagauaau

SEQ ID NO: 2568801 - RNA, 19 nt, Homo sapiens
  misc_RNA (1)...(19): siRNA sense strand
cggaaggaauucaaagaga

SEQ ID NO: 2568802 - RNA, 19 nt, Homo sapiens
  misc_RNA (1)...(19): siRNA sense strand
ccauacuacauuuggguaa

SEQ ID NO: 2568803 - RNA, 19 nt, Homo sapiens
  misc_RNA (1)...(19): siRNA sense strand
gaagacuaccagagugaaa

SEQ ID NO: 2568804 - RNA, 19 nt, Homo sapiens
  misc_RNA (1)...(19): siRNA sense strand
gcuuagaauugcugaaagu

SEQ ID NO: 2568805 - RNA, 19 nt, Homo sapiens
  misc_RNA (1)...(19): siRNA sense strand
aggaauucaaagagaacaa

SEQ ID NO: 2568806 - RNA, 19 nt, Homo sapiens
  misc_RNA (1)...(19): siRNA sense strand
uguagaggauucagagcaa

SEQ ID NO: 2568807 - RNA, 19 nt, Homo sapiens
  misc_RNA (1)...(19): siRNA sense strand
aaugagagaacuagagcaa

SEQ ID NO: 2568808 - RNA, 19 nt, Homo sapiens
  misc_RNA (1)...(19): siRNA sense strand
ccaacaagacccacugaaa

SEQ ID NO: 2568809 - RNA, 19 nt, Homo sapiens
  misc_RNA (1)...(19): siRNA sense strand
ccauaaagaagaugaacca

SEQ ID NO: 2568810 - RNA, 19 nt, Homo sapiens
  misc_RNA (1)...(19): siRNA sense strand
aaacaauggcuucgagauu

SEQ ID NO: 2568811 - RNA, 19 nt, Homo sapiens
  misc_RNA (1)...(19): siRNA sense strand
ggaacugauuguuguggaa

SEQ ID NO: 2568812 - RNA, 19 nt, Homo sapiens
  misc_RNA (1)...(19): siRNA sense strand
cggaaaagggcaaacaaaa

SEQ ID NO: 2568813 - RNA, 19 nt, Homo sapiens
  misc_RNA (1)...(19): siRNA sense strand
gcuugauaaagauggaaua

SEQ ID NO: 2568814 - RNA, 19 nt, Homo sapiens
  misc_RNA (1)...(19): siRNA sense strand
ggaaacaaggggagaagaa

SEQ ID NO: 2568815 - RNA, 19 nt, Homo sapiens
  misc_RNA (1)...(19): siRNA sense strand
caaacuucaucuugacaaa

SEQ ID NO: 2568816 - RNA, 19 nt, Homo sapiens
  misc_RNA (1)...(19): siRNA sense strand
cuacagaauuggugccuga

SEQ ID NO: 2568817 - RNA, 19 nt, Homo sapiens
  misc_RNA (1)...(19): siRNA sense strand
gauggaacuaugaaggaaa

SEQ ID NO: 2568818 - RNA, 19 nt, Homo sapiens
  misc_RNA (1)...(19): siRNA sense strand
uggaaaagcucauaaacua

SEQ ID NO: 2568819 - RNA, 19 nt, Homo sapiens
  misc_RNA (1)...(19): siRNA sense strand
uuaagcaaccagaggaaua

SEQ ID NO: 2568820 - RNA, 19 nt, Homo sapiens
  misc_RNA (1)...(19): siRNA sense strand
gugaggaacuccauggcua

SEQ ID NO: 2568821 - RNA, 19 nt, Homo sapiens
  misc_RNA (1)...(19): siRNA sense strand
aggaagagaaguacaguau

SEQ ID NO: 2568822 - RNA, 19 nt, Homo sapiens
  misc_RNA (1)...(19): siRNA sense strand
caaucaacauguagaggau

SEQ ID NO: 2568823 - RNA, 19 nt, Homo sapiens
  misc_RNA (1)...(19): siRNA sense strand
gccuauugucucagaauua

SEQ ID NO: 2568824 - RNA, 19 nt, Homo sapiens
  misc_RNA (1)...(19): siRNA sense strand
agagcaagacaaagauuua

SEQ ID NO: 2568825 - RNA, 19 nt, Homo sapiens
  misc_RNA (1)...(19): siRNA sense strand
ggaacagauucgccagcaa

SEQ ID NO: 2568826 - RNA, 19 nt, Homo sapiens
  misc_RNA (1)...(19): siRNA sense strand
agagaacacuuuaggccaa

SEQ ID NO: 2568827 - RNA, 19 nt, Homo sapiens
  misc_RNA (1)...(19): siRNA sense strand
gcguauucgucgaggaaac

SEQ ID NO: 2568828 - RNA, 19 nt, Homo sapiens
  misc_RNA (1)...(19): siRNA sense strand
cuccaaaggcuaagcgcaa

SEQ ID NO: 2568829 - RNA, 19 nt, Homo sapiens
  misc_RNA (1)...(19): siRNA sense strand
uuggauaucaacagggaaa

SEQ ID NO: 2568830 - RNA, 19 nt, Homo sapiens
  misc_RNA (1)...(19): siRNA sense strand
agaugaaccagcauggaaa

SEQ ID NO: 2568831 - RNA, 19 nt, Homo sapiens
  misc_RNA (1)...(19): siRNA sense strand
aagcgaagugugaagauua

SEQ ID NO: 2568832 - RNA, 19 nt, Homo sapiens
  misc_RNA (1)...(19): siRNA sense strand
ggagacaauccguggugua

SEQ ID NO: 2568833 - RNA, 19 nt, Homo sapiens
  misc_RNA (1)...(19): siRNA sense strand
aaaggaauuugguggagaa

SEQ ID NO: 2568834 - RNA, 19 nt, Homo sapiens
  misc_RNA (1)...(19): siRNA sense strand
gugcagagcauuugaagga

SEQ ID NO: 2568835 - RNA, 19 nt, Homo sapiens
  misc_RNA (1)...(19): siRNA sense strand
agauauaagaccucagaga

SEQ ID NO: 2568836 - RNA, 19 nt, Homo sapiens
  misc_RNA (1)...(19): siRNA sense strand
gauucuaugcauuggcaaa

SEQ ID NO: 2568837 - RNA, 19 nt, Homo sapiens
  misc_RNA (1)...(19): siRNA sense strand
ugaacauacauuacggaua

SEQ ID NO: 2568838 - RNA, 19 nt, Homo sapiens
  misc_RNA (1)...(19): siRNA sense strand
gagcauaauaccaagacau

SEQ ID NO: 2568839 - RNA, 19 nt, Homo sapiens
  misc_RNA (1)...(19): siRNA sense strand
agaacaaaggcuaagagaa

SEQ ID NO: 2568840 - RNA, 19 nt, Homo sapiens
  misc_RNA (1)...(19): siRNA sense strand
aaacugauuugguggaaga

SEQ ID NO: 2568841 - RNA, 19 nt, Homo sapiens
  misc_RNA (1)...(19): siRNA sense strand
aaggagaagauuugagaca

SEQ ID NO: 2568842 - RNA, 19 nt, Homo sapiens
  misc_RNA (1)...(19): siRNA sense strand
ggauucagagcaagacaaa

SEQ ID NO: 2568843 - RNA, 19 nt, Homo sapiens
  misc_RNA (1)...(19): siRNA sense strand
agaaagaagcuuagcccuu

SEQ ID NO: 2568844 - RNA, 19 nt, Homo sapiens
  misc_RNA (1)...(19): siRNA sense strand
uaggagaaugagagaacua

SEQ ID NO: 2568845 - RNA, 19 nt, Homo sapiens
  misc_RNA (1)...(19): siRNA sense strand
guguauacucugugauuga

SEQ ID NO: 2568846 - RNA, 19 nt, Homo sapiens
  misc_RNA (1)...(19): siRNA sense strand
aggauuugccaguggagua

SEQ ID NO: 2568847 - RNA, 19 nt, Homo sapiens
  misc_RNA (1)...(19): siRNA sense strand
agaacuagagcaagcuaua

SEQ ID NO: 2568848 - RNA, 19 nt, Homo sapiens
  misc_RNA (1)...(19): siRNA sense strand
acaaaggcuaagagaaaca

SEQ ID NO: 2568849 - RNA, 19 nt, Homo sapiens
  misc_RNA (1)...(19): siRNA sense strand
cuucuaauccugugcuuaa

SEQ ID NO: 2568850 - RNA, 19 nt, Homo sapiens
  misc_RNA (1)...(19): siRNA sense strand
cgcaaagccuucaagacaa

SEQ ID NO: 2568851 - RNA, 19 nt, Homo sapiens
  misc_RNA (1)...(19): siRNA sense strand
ccacaauucugaugaccuu

SEQ ID NO: 2568852 - RNA, 19 nt, Homo sapiens
  misc_RNA (1)...(19): siRNA sense strand
ccaaaggauaauaugagua

SEQ ID NO: 2568853 - RNA, 19 nt, Homo sapiens
  misc_RNA (1)...(19): siRNA sense strand
agaugaaagaggacgcgaa

SEQ ID NO: 2568854 - RNA, 19 nt, Homo sapiens
  misc_RNA (1)...(19): siRNA sense strand
ugaagaugauggagggcgu

SEQ ID NO: 2568855 - RNA, 19 nt, Homo sapiens
  misc_RNA (1)...(19): siRNA sense strand
ccaccaaggaggagcugga

SEQ ID NO: 2568856 - RNA, 19 nt, Homo sapiens
  misc_RNA (1)...(19): siRNA sense strand
aggaggagcuggacgccau

SEQ ID NO: 2568857 - RNA, 19 nt, Homo sapiens
  misc_RNA (1)...(19): siRNA sense strand
acaggaaugcagacggcua

SEQ ID NO: 2568858 - RNA, 19 nt, Homo sapiens
  misc_RNA (1)...(19): siRNA sense strand
ucgaggaguucuuggucau

SEQ ID NO: 2568859 - RNA, 19 nt, Homo sapiens
  misc_RNA (1)...(19): siRNA sense strand
acgcgaaagggaagagcga

SEQ ID NO: 2568860 - RNA, 19 nt, Homo sapiens
  misc_RNA (1)...(19): siRNA sense strand
agaugaucgcugaguucaa

SEQ ID NO: 2568861 - RNA, 19 nt, Homo sapiens
  misc_RNA (1)...(19): siRNA sense strand
ucgaggagguggaugagga

SEQ ID NO: 2568862 - RNA, 19 nt, Homo sapiens
  misc_RNA (1)...(19): siRNA sense strand
aagaggacgcgaaagggaa

SEQ ID NO: 2568863 - RNA, 19 nt, Homo sapiens
  misc_RNA (1)...(19): siRNA sense strand
gcgaaagggaagagcgagg

SEQ ID NO: 2568864 - RNA, 19 nt, Homo sapiens
  misc_RNA (1)...(19): siRNA sense strand
ugaugaggaugcugggcca

SEQ ID NO: 2568865 - RNA, 19 nt, Homo sapiens
  misc_RNA (1)...(19): siRNA sense strand
ggaagagcgaggaggagcu

SEQ ID NO: 2568866 - RNA, 19 nt, Homo sapiens
  misc_RNA (1)...(19): siRNA sense strand
gcaaacagcugcacgccaa

SEQ ID NO: 2568867 - RNA, 19 nt, Homo sapiens
  misc_RNA (1)...(19): siRNA sense strand
gagaugaggagaagcggaa

SEQ ID NO: 2568868 - RNA, 19 nt, Homo sapiens
  misc_RNA (1)...(19): siRNA sense strand
acacagagaaggagcggga

SEQ ID NO: 2568869 - RNA, 19 nt, Homo sapiens
  misc_RNA (1)...(19): siRNA sense strand
gaugaggagaagcggaaca

SEQ ID NO: 2568870 - RNA, 19 nt, Homo sapiens
  misc_RNA (1)...(19): siRNA sense strand
gaagaggagaaguacgaca

SEQ ID NO: 2568871 - RNA, 19 nt, Homo sapiens
  misc_RNA (1)...(19): siRNA sense strand
agaacuaccuggcggagca

SEQ ID NO: 2568872 - RNA, 19 nt, Homo sapiens
  misc_RNA (1)...(19): siRNA sense strand
gagaagcggaacagggcca

SEQ ID NO: 2568873 - RNA, 19 nt, Homo sapiens
  misc_RNA (1)...(19): siRNA sense strand
ggaagaagauguuugaguc

SEQ ID NO: 2568874 - RNA, 19 nt, Homo sapiens
  misc_RNA (1)...(19): siRNA sense strand
agaagauguuugaguccga

SEQ ID NO: 2568875 - RNA, 19 nt, Homo sapiens
  misc_RNA (1)...(19): siRNA sense strand
aggaggacacagagaagga

SEQ ID NO: 2568876 - RNA, 19 nt, Homo sapiens
  misc_RNA (1)...(19): siRNA sense strand
uguuugaguccgaguccua

SEQ ID NO: 2568877 - RNA, 19 nt, Homo sapiens
  misc_RNA (1)...(19): siRNA sense strand
ggugacuggaggaagaaca

SEQ ID NO: 2568878 - RNA, 19 nt, Homo sapiens
  misc_RNA (1)...(19): siRNA sense strand
gcauggaccugagggccaa

SEQ ID NO: 2568879 - RNA, 19 nt, Homo sapiens
  misc_RNA (1)...(19): siRNA sense strand
cggccgaugccaugcucaa

SEQ ID NO: 2568880 - RNA, 19 nt, Homo sapiens
  misc_RNA (1)...(19): siRNA sense strand
ggaugauuuccgagggaga

SEQ ID NO: 2568881 - RNA, 19 nt, Homo sapiens
  misc_RNA (1)...(19): siRNA sense strand
gggagacauaggaggcauu

SEQ ID NO: 2568882 - RNA, 19 nt, Homo sapiens
  misc_RNA (1)...(19): siRNA sense strand
ugauagacuacgagcgcca

SEQ ID NO: 2568883 - RNA, 19 nt, Homo sapiens
  misc_RNA (1)...(19): siRNA sense strand
gaggcauacaacuggguga

SEQ ID NO: 2568884 - RNA, 19 nt, Homo sapiens
  misc_RNA (1)...(19): siRNA sense strand
acuguugguuggaggacaa

SEQ ID NO: 2568885 - RNA, 19 nt, Homo sapiens
  misc_RNA (1)...(19): siRNA sense strand
gcuggaacccucagagcga

SEQ ID NO: 2568886 - RNA, 19 nt, Homo sapiens
  misc_RNA (1)...(19): siRNA sense strand
cggccuuggaugagcagau

SEQ ID NO: 2568887 - RNA, 19 nt, Homo sapiens
  misc_RNA (1)...(19): siRNA sense strand
ggaccaaccucaaugggaa

SEQ ID NO: 2568888 - RNA, 19 nt, Homo sapiens
  misc_RNA (1)...(19): siRNA sense strand
ggauaacagugaagccgaa

SEQ ID NO: 2568889 - RNA, 19 nt, Homo sapiens
  misc_RNA (1)...(19): siRNA sense strand
guuuaugcgaggagggcua

SEQ ID NO: 2568890 - RNA, 19 nt, Homo sapiens
  misc_RNA (1)...(19): siRNA sense strand
cugcagugggcgaggacaa

SEQ ID NO: 2568891 - RNA, 19 nt, Homo sapiens
  misc_RNA (1)...(19): siRNA sense strand
ccaagaaagugcugccaca

SEQ ID NO: 2568892 - RNA, 19 nt, Homo sapiens
  misc_RNA (1)...(19): siRNA sense strand
ccucagaccacgagagcca

SEQ ID NO: 2568893 - RNA, 19 nt, Homo sapiens
  misc_RNA (1)...(19): siRNA sense strand
ugaguauggaguuggaaua

SEQ ID NO: 2568894 - RNA, 19 nt, Homo sapiens
  misc_RNA (1)...(19): siRNA sense strand
ccgaaguucaggaguacaa

SEQ ID NO: 2568895 - RNA, 19 nt, Homo sapiens
  misc_RNA (1)...(19): siRNA sense strand
cgucaugaacucacagcaa

SEQ ID NO: 2568896 - RNA, 19 nt, Homo sapiens
  misc_RNA (1)...(19): siRNA sense strand
gggaugaggaggaagagau

SEQ ID NO: 2568897 - RNA, 19 nt, Homo sapiens
  misc_RNA (1)...(19): siRNA sense strand
ucgggaacguggaggauga

SEQ ID NO: 2568898 - RNA, 19 nt, Homo sapiens
  misc_RNA (1)...(19): siRNA sense strand
gugcagaagacgagacucu

SEQ ID NO: 2568899 - RNA, 19 nt, Homo sapiens
  misc_RNA (1)...(19): siRNA sense strand
ucgagaugcuggagaggga

SEQ ID NO: 2568900 - RNA, 19 nt, Homo sapiens
  misc_RNA (1)...(19): siRNA sense strand
gggaggaaagcgagcgcau

SEQ ID NO: 2568901 - RNA, 19 nt, Homo sapiens
  misc_RNA (1)...(19): siRNA sense strand
ccagggaugaggaggaaga

SEQ ID NO: 2568902 - RNA, 19 nt, Homo sapiens
  misc_RNA (1)...(19): siRNA sense strand
gcgucugugaagagggcua

SEQ ID NO: 2568903 - RNA, 19 nt, Homo sapiens
  misc_RNA (1)...(19): siRNA sense strand
gggaccaacgagagcgauu

SEQ ID NO: 2568904 - RNA, 19 nt, Homo sapiens
  misc_RNA (1)...(19): siRNA sense strand
cacagaggauagagacaau

SEQ ID NO: 2568905 - RNA, 19 nt, Homo sapiens
  misc_RNA (1)...(19): siRNA sense strand
gcuucauuccaaagaacaa

SEQ ID NO: 2568906 - RNA, 19 nt, Homo sapiens
  misc_RNA (1)...(19): siRNA sense strand
aggaagagaugauggaggu

SEQ ID NO: 2568907 - RNA, 19 nt, Homo sapiens
  misc_RNA (1)...(19): siRNA sense strand
ggaggaggagggaggcauu

SEQ ID NO: 2568908 - RNA, 19 nt, Homo sapiens
  misc_RNA (1)...(19): siRNA sense strand
aagggagcauggugguaua

SEQ ID NO: 2568909 - RNA, 19 nt, Homo sapiens
  misc_RNA (1)...(19): siRNA sense strand
ccacagaggauagagacaa

SEQ ID NO: 2568910 - RNA, 19 nt, Homo sapiens
  misc_RNA (1)...(19): siRNA sense strand
gggaggaauacauugucaa

SEQ ID NO: 2568911 - RNA, 19 nt, Homo sapiens
  misc_RNA (1)...(19): siRNA sense strand
caauuagcaaugugaccaa

SEQ ID NO: 2568912 - RNA, 19 nt, Homo sapiens
  misc_RNA (1)...(19): siRNA sense strand
cagcaaagcgugccagcca

SEQ ID NO: 2568913 - RNA, 19 nt, Homo sapiens
  misc_RNA (1)...(19): siRNA sense strand
acuaacagaucuagagccu

SEQ ID NO: 2568914 - RNA, 19 nt, Homo sapiens
  misc_RNA (1)...(19): siRNA sense strand
caacagaagcccugcugca

SEQ ID NO: 2568915 - RNA, 19 nt, Homo sapiens
  misc_RNA (1)...(19): siRNA sense strand
gcaaggagcugauugugga

SEQ ID NO: 2568916 - RNA, 19 nt, Homo sapiens
  misc_RNA (1)...(19): siRNA sense strand
gcauggugguauaagaacu

SEQ ID NO: 2568917 - RNA, 19 nt, Homo sapiens
  misc_RNA (1)...(19): siRNA sense strand
gcaggaggugagugcagaa

SEQ ID NO: 2568918 - RNA, 19 nt, Homo sapiens
  misc_RNA (1)...(19): siRNA sense strand
cugcugagccggaucgaga

SEQ ID NO: 2568919 - RNA, 19 nt, Homo sapiens
  misc_RNA (1)...(19): siRNA sense strand
cuacaauuuaagacgauca

SEQ ID NO: 2568920 - RNA, 19 nt, Homo sapiens
  misc_RNA (1)...(19): siRNA sense strand
ccauugaccacuaccgaau

SEQ ID NO: 2568921 - RNA, 19 nt, Homo sapiens
  misc_RNA (1)...(19): siRNA sense strand
cagaguauauugugaaccu

SEQ ID NO: 2568922 - RNA, 19 nt, Homo sapiens
  misc_RNA (1)...(19): siRNA sense strand
ucuucaaccacguguacaa

SEQ ID NO: 2568923 - RNA, 19 nt, Homo sapiens
  misc_RNA (1)...(19): siRNA sense strand
cuggaggucaccacagaaa

SEQ ID NO: 2568924 - RNA, 19 nt, Homo sapiens
  misc_RNA (1)...(19): siRNA sense strand
ccucauacacacuaacaga

SEQ ID NO: 2568925 - RNA, 19 nt, Homo sapiens
  misc_RNA (1)...(19): siRNA sense strand
gggcuacaauuuaagacga

SEQ ID NO: 2568926 - RNA, 19 nt, Homo sapiens
  misc_RNA (1)...(19): siRNA sense strand
gcugauuguggaugcagaa

SEQ ID NO: 2568927 - RNA, 19 nt, Homo sapiens
  misc_RNA (1)...(19): siRNA sense strand
augaggaggaagagaugau

SEQ ID NO: 2568928 - RNA, 19 nt, Homo sapiens
  misc_RNA (1)...(19): siRNA sense strand
ggaacguggaggaugaguu

SEQ ID NO: 2568929 - RNA, 19 nt, Homo sapiens
  misc_RNA (1)...(19): siRNA sense strand
caaugauguugcagugacu

SEQ ID NO: 2568930 - RNA, 19 nt, Homo sapiens
  misc_RNA (1)...(19): siRNA sense strand
ggcuacaauuuaagacgau

SEQ ID NO: 2568931 - RNA, 19 nt, Homo sapiens
  misc_RNA (1)...(19): siRNA sense strand
gguaccuggcacugaguau

SEQ ID NO: 2568932 - RNA, 19 nt, Homo sapiens
  misc_RNA (1)...(19): siRNA sense strand
cagugggugagguggagaa

SEQ ID NO: 2568933 - RNA, 19 nt, Homo sapiens
  misc_RNA (1)...(19): siRNA sense strand
cugaguauggaguuggaau

SEQ ID NO: 2568934 - RNA, 19 nt, Homo sapiens
  misc_RNA (1)...(19): siRNA sense strand
gaggaaagcgagcgcaucu

SEQ ID NO: 2568935 - RNA, 19 nt, Homo sapiens
  misc_RNA (1)...(19): siRNA sense strand
uggacaacccuguggaucu

SEQ ID NO: 2568936 - RNA, 19 nt, Homo sapiens
  misc_RNA (1)...(19): siRNA sense strand
acggagucagugaggaauu

SEQ ID NO: 2568937 - RNA, 19 nt, Homo sapiens
  misc_RNA (1)...(19): siRNA sense strand
agagacagucaguggagga

SEQ ID NO: 2568938 - RNA, 19 nt, Homo sapiens
  misc_RNA (1)...(19): siRNA sense strand
gggagaugugccaacggua

SEQ ID NO: 2568939 - RNA, 19 nt, Homo sapiens
  misc_RNA (1)...(19): siRNA sense strand
uuuaagacgaucacagaga

SEQ ID NO: 2568940 - RNA, 19 nt, Homo sapiens
  misc_RNA (1)...(19): siRNA sense strand
ccggcaaaccugacagcca

SEQ ID NO: 2568941 - RNA, 19 nt, Homo sapiens
  misc_RNA (1)...(19): siRNA sense strand
cuggagggccuguuggaga

SEQ ID NO: 2568942 - RNA, 19 nt, Homo sapiens
  misc_RNA (1)...(19): siRNA sense strand
gggagcugagccagaaauu

SEQ ID NO: 2568943 - RNA, 19 nt, Homo sapiens
  misc_RNA (1)...(19): siRNA sense strand
augauguugcagugacuaa

SEQ ID NO: 2568944 - RNA, 19 nt, Homo sapiens
  misc_RNA (1)...(19): siRNA sense strand
cggaagaggcugaccgcaa

SEQ ID NO: 2568945 - RNA, 19 nt, Homo sapiens
  misc_RNA (1)...(19): siRNA sense strand
gcgagaaagcugaagguga

SEQ ID NO: 2568946 - RNA, 19 nt, Homo sapiens
  misc_RNA (1)...(19): siRNA sense strand
aagaagagaacgugggcuu

SEQ ID NO: 2568947 - RNA, 19 nt, Homo sapiens
  misc_RNA (1)...(19): siRNA sense strand
aggacaaauaugaagaaga

SEQ ID NO: 2568948 - RNA, 19 nt, Homo sapiens
  misc_RNA (1)...(19): siRNA sense strand
gagagaggaaugaagguga

SEQ ID NO: 2568949 - RNA, 19 nt, Homo sapiens
  misc_RNA (1)...(19): siRNA sense strand
agagagaacgguugcaaaa

SEQ ID NO: 2568950 - RNA, 19 nt, Homo sapiens
  misc_RNA (1)...(19): siRNA sense strand
uggucauccuggaggguga

SEQ ID NO: 2568951 - RNA, 19 nt, Homo sapiens
  misc_RNA (1)...(19): siRNA sense strand
cggaggugucugaacuaaa

SEQ ID NO: 2568952 - RNA, 19 nt, Homo sapiens
  misc_RNA (1)...(19): siRNA sense strand
gaugaggagaagauggaga

SEQ ID NO: 2568953 - RNA, 19 nt, Homo sapiens
  misc_RNA (1)...(19): siRNA sense strand
gcaaauacgaggagguagc

SEQ ID NO: 2568954 - RNA, 19 nt, Homo sapiens
  misc_RNA (1)...(19): siRNA sense strand
cugaauuugcagagagaac

SEQ ID NO: 2568955 - RNA, 19 nt, Homo sapiens
  misc_RNA (1)...(19): siRNA sense strand
cggugaaacgcaagaucca

SEQ ID NO: 2568956 - RNA, 19 nt, Homo sapiens
  misc_RNA (1)...(19): siRNA sense strand
aggccaaagaagagaacgu

SEQ ID NO: 2568957 - RNA, 19 nt, Homo sapiens
  misc_RNA (1)...(19): siRNA sense strand
agacacuaaacgaacuuaa

SEQ ID NO: 2568958 - RNA, 19 nt, Homo sapiens
  misc_RNA (1)...(19): siRNA sense strand
ugaugaccuggaagagaaa

SEQ ID NO: 2568959 - RNA, 19 nt, Homo sapiens
  misc_RNA (1)...(19): siRNA sense strand
acaaacugaaagaggcuga

SEQ ID NO: 2568960 - RNA, 19 nt, Homo sapiens
  misc_RNA (1)...(19): siRNA sense strand
ugcugaauuugcagagaga

SEQ ID NO: 2568961 - RNA, 19 nt, Homo sapiens
  misc_RNA (1)...(19): siRNA sense strand
aggaugaggagaagaugga

SEQ ID NO: 2568962 - RNA, 19 nt, Homo sapiens
  misc_RNA (1)...(19): siRNA sense strand
agaaacuugcccaggccaa

SEQ ID NO: 2568963 - RNA, 19 nt, Homo sapiens
  misc_RNA (1)...(19): siRNA sense strand
uggcuugccuggauggcua

SEQ ID NO: 2568964 - RNA, 19 nt, Homo sapiens
  misc_RNA (1)...(19): siRNA sense strand
gugacuucuuaaagcaaau

SEQ ID NO: 2568965 - RNA, 19 nt, Homo sapiens
  misc_RNA (1)...(19): siRNA sense strand
gcaaaucaucggacgacca

SEQ ID NO: 2568966 - RNA, 19 nt, Homo sapiens
  misc_RNA (1)...(19): siRNA sense strand
cagaaagaacggaaggaaa

SEQ ID NO: 2568967 - RNA, 19 nt, Homo sapiens
  misc_RNA (1)...(19): siRNA sense strand
aggaaaggauacagaaaga

SEQ ID NO: 2568968 - RNA, 19 nt, Homo sapiens
  misc_RNA (1)...(19): siRNA sense strand
gguuacaacugauggaaaa

SEQ ID NO: 2568969 - RNA, 19 nt, Homo sapiens
  misc_RNA (1)...(19): siRNA sense strand
ggacaaaucccucaggcaa

SEQ ID NO: 2568970 - RNA, 19 nt, Homo sapiens
  misc_RNA (1)...(19): siRNA sense strand
agaaagaacggaaggaaaa

SEQ ID NO: 2568971 - RNA, 19 nt, Homo sapiens
  misc_RNA (1)...(19): siRNA sense strand
ccacugaugcagaaggaaa

SEQ ID NO: 2568972 - RNA, 19 nt, Homo sapiens
  misc_RNA (1)...(19): siRNA sense strand
cagaagaaccugaacggaa

SEQ ID NO: 2568973 - RNA, 19 nt, Homo sapiens
  misc_RNA (1)...(19): siRNA sense strand
gaaaggaggaggaaggaga

SEQ ID NO: 2568974 - RNA, 19 nt, Homo sapiens
  misc_RNA (1)...(19): siRNA sense strand
gauacaagacuaagcacaa

SEQ ID NO: 2568975 - RNA, 19 nt, Homo sapiens
  misc_RNA (1)...(19): siRNA sense strand
gaguauucacugagagaga

SEQ ID NO: 2568976 - RNA, 19 nt, Homo sapiens
  misc_RNA (1)...(19): siRNA sense strand
caaggaaaggauacagaaa

SEQ ID NO: 2568977 - RNA, 19 nt, Homo sapiens
  misc_RNA (1)...(19): siRNA sense strand
gcagcaaagauaaggaaaa

SEQ ID NO: 2568978 - RNA, 19 nt, Homo sapiens
  misc_RNA (1)...(19): siRNA sense strand
gagaagaaauacagcgauc

SEQ ID NO: 2568979 - RNA, 19 nt, Homo sapiens
  misc_RNA (1)...(19): siRNA sense strand
uggaggagcucaugggaca

SEQ ID NO: 2568980 - RNA, 19 nt, Homo sapiens
  misc_RNA (1)...(19): siRNA sense strand
cagugaaggcugacaauau

SEQ ID NO: 2568981 - RNA, 19 nt, Homo sapiens
  misc_RNA (1)...(19): siRNA sense strand
ccuaaggcacucaaggaaa

SEQ ID NO: 2568982 - RNA, 19 nt, Homo sapiens
  misc_RNA (1)...(19): siRNA sense strand
gacaaaucccucaggcaaa

SEQ ID NO: 2568983 - RNA, 19 nt, Homo sapiens
  misc_RNA (1)...(19): siRNA sense strand
ggauacagaaagaacggaa

SEQ ID NO: 2568984 - RNA, 19 nt, Homo sapiens
  misc_RNA (1)...(19): siRNA sense strand
cagaagagcucuagaaaac

SEQ ID NO: 2568985 - RNA, 19 nt, Homo sapiens
  misc_RNA (1)...(19): siRNA sense strand
augagaugguccugacaua

SEQ ID NO: 2568986 - RNA, 19 nt, Homo sapiens
  misc_RNA (1)...(19): siRNA sense strand
aggaagagugcuuaagauu

SEQ ID NO: 2568987 - RNA, 19 nt, Homo sapiens
  misc_RNA (1)...(19): siRNA sense strand
guagaaaacaggaagaauu

SEQ ID NO: 2568988 - RNA, 19 nt, Homo sapiens
  misc_RNA (1)...(19): siRNA sense strand
aaucuaccguguugagaaa

SEQ ID NO: 2568989 - RNA, 19 nt, Homo sapiens
  misc_RNA (1)...(19): siRNA sense strand
guauucacugagagagaaa

SEQ ID NO: 2568990 - RNA, 19 nt, Homo sapiens
  misc_RNA (1)...(19): siRNA sense strand
aggaaguggcgaugugaau

SEQ ID NO: 2568991 - RNA, 19 nt, Homo sapiens
  misc_RNA (1)...(19): siRNA sense strand
aguauuugcucaaggacau

SEQ ID NO: 2568992 - RNA, 19 nt, Homo sapiens
  misc_RNA (1)...(19): siRNA sense strand
ccuuaaagaccuuccauuu

SEQ ID NO: 2568993 - RNA, 19 nt, Homo sapiens
  misc_RNA (1)...(19): siRNA sense strand
gacugaacuaggaaagaaa

SEQ ID NO: 2568994 - RNA, 19 nt, Homo sapiens
  misc_RNA (1)...(19): siRNA sense strand
aggaaagaaagcugaugua

SEQ ID NO: 2568995 - RNA, 19 nt, Homo sapiens
  misc_RNA (1)...(19): siRNA sense strand
ugaaaaggaacgaaugaaa

SEQ ID NO: 2568996 - RNA, 19 nt, Homo sapiens
  misc_RNA (1)...(19): siRNA sense strand
cccacuacuuugugaacua

SEQ ID NO: 2568997 - RNA, 19 nt, Homo sapiens
  misc_RNA (1)...(19): siRNA sense strand
cagaaggaaaggaggagga

SEQ ID NO: 2568998 - RNA, 19 nt, Homo sapiens
  misc_RNA (1)...(19): siRNA sense strand
gacuaagaauggcagcaaa

SEQ ID NO: 2568999 - RNA, 19 nt, Homo sapiens
  misc_RNA (1)...(19): siRNA sense strand
agagaaauuaccugcaaau

SEQ ID NO: 2569000 - RNA, 19 nt, Homo sapiens
  misc_RNA (1)...(19): siRNA sense strand
gagaaaggagauuauacaa

SEQ ID NO: 2569001 - RNA, 19 nt, Homo sapiens
  misc_RNA (1)...(19): siRNA sense strand
acagauucgccaugagcaa

SEQ ID NO: 2569002 - RNA, 19 nt, Homo sapiens
  misc_RNA (1)...(19): siRNA sense strand
gggaagaagaaaucaagca

SEQ ID NO: 2569003 - RNA, 19 nt, Homo sapiens
  misc_RNA (1)...(19): siRNA sense strand
ccguuaauauauacgauga

SEQ ID NO: 2569004 - RNA, 19 nt, Homo sapiens
  misc_RNA (1)...(19): siRNA sense strand
uaugaugguugcugaguau

SEQ ID NO: 2569005 - RNA, 19 nt, Homo sapiens
  misc_RNA (1)...(19): siRNA sense strand
uugauaaagccuaugacua

SEQ ID NO: 2569006 - RNA, 19 nt, Homo sapiens
  misc_RNA (1)...(19): siRNA sense strand
agaaauuaccugcaaauca

SEQ ID NO: 2569007 - RNA, 19 nt, Homo sapiens
  misc_RNA (1)...(19): siRNA sense strand
gccuuaaauuugcaacuaa

SEQ ID NO: 2569008 - RNA, 19 nt, Homo sapiens
  misc_RNA (1)...(19): siRNA sense strand
cagaguggcccuugcagaa

SEQ ID NO: 2569009 - RNA, 19 nt, Homo sapiens
  misc_RNA (1)...(19): siRNA sense strand
gauagguguuggugcuuau

SEQ ID NO: 2569010 - RNA, 19 nt, Homo sapiens
  misc_RNA (1)...(19): siRNA sense strand
cuuccuuaccugaugauaa

SEQ ID NO: 2569011 - RNA, 19 nt, Homo sapiens
  misc_RNA (1)...(19): siRNA sense strand
ggaggaggaaggagaaagu

SEQ ID NO: 2569012 - RNA, 19 nt, Homo sapiens
  misc_RNA (1)...(19): siRNA sense strand
caacaaaagaaaacuggaa

SEQ ID NO: 2569013 - RNA, 19 nt, Homo sapiens
  misc_RNA (1)...(19): siRNA sense strand
gaagaagaaaucaagcaau

SEQ ID NO: 2569014 - RNA, 19 nt, Homo sapiens
  misc_RNA (1)...(19): siRNA sense strand
gcuggauucuagugacauu

SEQ ID NO: 2569015 - RNA, 19 nt, Homo sapiens
  misc_RNA (1)...(19): siRNA sense strand
gggcuuaagagaaggauug

SEQ ID NO: 2569016 - RNA, 19 nt, Homo sapiens
  misc_RNA (1)...(19): siRNA sense strand
ggaaacuacuaaauggacu

SEQ ID NO: 2569017 - RNA, 19 nt, Homo sapiens
  misc_RNA (1)...(19): siRNA sense strand
cuaaacuuguggaagaaaa

SEQ ID NO: 2569018 - RNA, 19 nt, Homo sapiens
  misc_RNA (1)...(19): siRNA sense strand
gucaaguggaauugcuaaa

SEQ ID NO: 2569019 - RNA, 19 nt, Homo sapiens
  misc_RNA (1)...(19): siRNA sense strand
ggagaauuugugaaguaau

SEQ ID NO: 2569020 - RNA, 19 nt, Homo sapiens
  misc_RNA (1)...(19): siRNA sense strand
uggagaaacuagagaacaa

SEQ ID NO: 2569021 - RNA, 19 nt, Homo sapiens
  misc_RNA (1)...(19): siRNA sense strand
aggaauaaacagaggaaau

SEQ ID NO: 2569022 - RNA, 19 nt, Homo sapiens
  misc_RNA (1)...(19): siRNA sense strand
aggauaucgucgagaaaua

SEQ ID NO: 2569023 - RNA, 19 nt, Homo sapiens
  misc_RNA (1)...(19): siRNA sense strand
cuaaagaagaaguuggaaa

SEQ ID NO: 2569024 - RNA, 19 nt, Homo sapiens
  misc_RNA (1)...(19): siRNA sense strand
ugacagaagaagugcguaa

SEQ ID NO: 2569025 - RNA, 19 nt, Homo sapiens
  misc_RNA (1)...(19): siRNA sense strand
ggagaaggaauuagagaau

SEQ ID NO: 2569026 - RNA, 19 nt, Homo sapiens
  misc_RNA (1)...(19): siRNA sense strand
gggagggagaggaggaaua

SEQ ID NO: 2569027 - RNA, 19 nt, Homo sapiens
  misc_RNA (1)...(19): siRNA sense strand
ugaaagaaguggaagccaa

SEQ ID NO: 2569028 - RNA, 19 nt, Homo sapiens
  misc_RNA (1)...(19): siRNA sense strand
agaauuagaagcugagaaa

SEQ ID NO: 2569029 - RNA, 19 nt, Homo sapiens
  misc_RNA (1)...(19): siRNA sense strand
ugagaaacuucaagaacaa

SEQ ID NO: 2569030 - RNA, 19 nt, Homo sapiens
  misc_RNA (1)...(19): siRNA sense strand
agaauaaguaugagagaga

SEQ ID NO: 2569031 - RNA, 19 nt, Homo sapiens
  misc_RNA (1)...(19): siRNA sense strand
cagagaaagagaagaacaa

SEQ ID NO: 2569032 - RNA, 19 nt, Homo sapiens
  misc_RNA (1)...(19): siRNA sense strand
augaagaacugaugaagaa

SEQ ID NO: 2569033 - RNA, 19 nt, Homo sapiens
  misc_RNA (1)...(19): siRNA sense strand
acucagaagcaaagagcaa

SEQ ID NO: 2569034 - RNA, 19 nt, Homo sapiens
  misc_RNA (1)...(19): siRNA sense strand
aaacaguggugaaggaaau

SEQ ID NO: 2569035 - RNA, 19 nt, Homo sapiens
  misc_RNA (1)...(19): siRNA sense strand
cguaauucgugaugaggaa

SEQ ID NO: 2569036 - RNA, 19 nt, Homo sapiens
  misc_RNA (1)...(19): siRNA sense strand
acaaagaagauguggauga

SEQ ID NO: 2569037 - RNA, 19 nt, Homo sapiens
  misc_RNA (1)...(19): siRNA sense strand
gggaggaaagagagagaau

SEQ ID NO: 2569038 - RNA, 19 nt, Homo sapiens
  misc_RNA (1)...(19): siRNA sense strand
cagaaauauugaagagcuu

SEQ ID NO: 2569039 - RNA, 19 nt, Homo sapiens
  misc_RNA (1)...(19): siRNA sense strand
agguagagacucagguaua

SEQ ID NO: 2569040 - RNA, 19 nt, Homo sapiens
  misc_RNA (1)...(19): siRNA sense strand
acaaauagaucuugggcca

SEQ ID NO: 2569041 - RNA, 19 nt, Homo sapiens
  misc_RNA (1)...(19): siRNA sense strand
ggguggaggugaagguaau

SEQ ID NO: 2569042 - RNA, 19 nt, Homo sapiens
  misc_RNA (1)...(19): siRNA sense strand
augaaaugcugcaagauaa

SEQ ID NO: 2569043 - RNA, 19 nt, Homo sapiens
  misc_RNA (1)...(19): siRNA sense strand
cuuaguagccagauagaaa

SEQ ID NO: 2569044 - RNA, 19 nt, Homo sapiens
  misc_RNA (1)...(19): siRNA sense strand
aggaaaaucucaagaacaa

SEQ ID NO: 2569045 - RNA, 19 nt, Homo sapiens
  misc_RNA (1)...(19): siRNA sense strand
ucuaguaagucaacagaaa

SEQ ID NO: 2569046 - RNA, 19 nt, Homo sapiens
  misc_RNA (1)...(19): siRNA sense strand
ggagauuggagaaggaauu

SEQ ID NO: 2569047 - RNA, 19 nt, Homo sapiens
  misc_RNA (1)...(19): siRNA sense strand
gguuacuaguuuagaagaa

SEQ ID NO: 2569048 - RNA, 19 nt, Homo sapiens
  misc_RNA (1)...(19): siRNA sense strand
gagaagagaaggagagacu

SEQ ID NO: 2569049 - RNA, 19 nt, Homo sapiens
  misc_RNA (1)...(19): siRNA sense strand
gcguacacgugaagaggaa

SEQ ID NO: 2569050 - RNA, 19 nt, Homo sapiens
  misc_RNA (1)...(19): siRNA sense strand
aggaagaaguuauggcaga

SEQ ID NO: 2569051 - RNA, 19 nt, Homo sapiens
  misc_RNA (1)...(19): siRNA sense strand
cgaauuagucgcuuggaaa

SEQ ID NO: 2569052 - RNA, 19 nt, Homo sapiens
  misc_RNA (1)...(19): siRNA sense strand
ccaggauggucaaggcaaa

SEQ ID NO: 2569053 - RNA, 19 nt, Homo sapiens
  misc_RNA (1)...(19): siRNA sense strand
acagaaagauccagauaca

SEQ ID NO: 2569054 - RNA, 19 nt, Homo sapiens
  misc_RNA (1)...(19): siRNA sense strand
gugaaugacuuaaaggaga

SEQ ID NO: 2569055 - RNA, 19 nt, Homo sapiens
  misc_RNA (1)...(19): siRNA sense strand
aaguauggguggaggugaa

SEQ ID NO: 2569056 - RNA, 19 nt, Homo sapiens
  misc_RNA (1)...(19): siRNA sense strand
agacagaagagcaggugaa

SEQ ID NO: 2569057 - RNA, 19 nt, Homo sapiens
  misc_RNA (1)...(19): siRNA sense strand
gcguaagaauauugaaguu

SEQ ID NO: 2569058 - RNA, 19 nt, Homo sapiens
  misc_RNA (1)...(19): siRNA sense strand
ggaaauaagucaacaccca

SEQ ID NO: 2569059 - RNA, 19 nt, Homo sapiens
  misc_RNA (1)...(19): siRNA sense strand
gggugaagauaguaaugaa

SEQ ID NO: 2569060 - RNA, 19 nt, Homo sapiens
  misc_RNA (1)...(19): siRNA sense strand
aggaauagguggcaugcaa

SEQ ID NO: 2569061 - RNA, 19 nt, Homo sapiens
  misc_RNA (1)...(19): siRNA sense strand
ccaaagaucaaauggaaaa

SEQ ID NO: 2569062 - RNA, 19 nt, Homo sapiens
  misc_RNA (1)...(19): siRNA sense strand
caucuguacuugagagaga

SEQ ID NO: 2569063 - RNA, 19 nt, Homo sapiens
  misc_RNA (1)...(19): siRNA sense strand
cuuaaacaguugcaggaaa

SEQ ID NO: 2569064 - RNA, 19 nt, Homo sapiens
  misc_RNA (1)...(19): siRNA sense strand
cuguggaagcucagaauaa

SEQ ID NO: 2569065 - RNA, 19 nt, Homo sapiens
  misc_RNA (1)...(19): siRNA sense strand
cagaagggccuguggaaca

SEQ ID NO: 2569066 - RNA, 19 nt, Homo sapiens
  misc_RNA (1)...(19): siRNA sense strand
aggagagacuugugaauga

SEQ ID NO: 2569067 - RNA, 19 nt, Homo sapiens
  misc_RNA (1)...(19): siRNA sense strand
aauuuaagguggagagcga

SEQ ID NO: 2569068 - RNA, 19 nt, Homo sapiens
  misc_RNA (1)...(19): siRNA sense strand
agagaauguuaaaggauga

SEQ ID NO: 2569069 - RNA, 19 nt, Homo sapiens
  misc_RNA (1)...(19): siRNA sense strand
ccuagaugaaauagugaaa

SEQ ID NO: 2569070 - RNA, 19 nt, Homo sapiens
  misc_RNA (1)...(19): siRNA sense strand
ucuguuaaguaucgagaaa

SEQ ID NO: 2569071 - RNA, 19 nt, Homo sapiens
  misc_RNA (1)...(19): siRNA sense strand
ugauaaaagaagagccaua

SEQ ID NO: 2569072 - RNA, 19 nt, Homo sapiens
  misc_RNA (1)...(19): siRNA sense strand
ugaagaacuuaaagcacaa

SEQ ID NO: 2569073 - RNA, 19 nt, Homo sapiens
  misc_RNA (1)...(19): siRNA sense strand
aggaagaauuagaagcuga

SEQ ID NO: 2569074 - RNA, 19 nt, Homo sapiens
  misc_RNA (1)...(19): siRNA sense strand
gagaaagagaagaacaaga

SEQ ID NO: 2569075 - RNA, 19 nt, Homo sapiens
  misc_RNA (1)...(19): siRNA sense strand
agaaagagaagaacaagaa

SEQ ID NO: 2569076 - RNA, 19 nt, Homo sapiens
  misc_RNA (1)...(19): siRNA sense strand
caucacuucaugagagaaa

SEQ ID NO: 2569077 - RNA, 19 nt, Homo sapiens
  misc_RNA (1)...(19): siRNA sense strand
agaaauugccacauugaaa

SEQ ID NO: 2569078 - RNA, 19 nt, Homo sapiens
  misc_RNA (1)...(19): siRNA sense strand
cugugaagaucuggagaaa

SEQ ID NO: 2569079 - RNA, 19 nt, Homo sapiens
  misc_RNA (1)...(19): siRNA sense strand
gggagaaaguccagguaac

SEQ ID NO: 2569080 - RNA, 19 nt, Homo sapiens
  misc_RNA (1)...(19): siRNA sense strand
cauagaagcaucagaccaa

SEQ ID NO: 2569081 - RNA, 19 nt, Homo sapiens
  misc_RNA (1)...(19): siRNA sense strand
auaugaacgugcacagaaa

SEQ ID NO: 2569082 - RNA, 19 nt, Homo sapiens
  misc_RNA (1)...(19): siRNA sense strand
uuaaacaguugcaggaaau

SEQ ID NO: 2569083 - RNA, 19 nt, Homo sapiens
  misc_RNA (1)...(19): siRNA sense strand
aauuagaaccaaugagaga

SEQ ID NO: 2569084 - RNA, 19 nt, Homo sapiens
  misc_RNA (1)...(19): siRNA sense strand
ccaguauggaagagaaauu

SEQ ID NO: 2569085 - RNA, 19 nt, Homo sapiens
  misc_RNA (1)...(19): siRNA sense strand
ggaauuagagaaugcaaau

SEQ ID NO: 2569086 - RNA, 19 nt, Homo sapiens
  misc_RNA (1)...(19): siRNA sense strand
gaacaagcuaugaaggaga

SEQ ID NO: 2569087 - RNA, 19 nt, Homo sapiens
  misc_RNA (1)...(19): siRNA sense strand
ggccaguauggaagagaaa

SEQ ID NO: 2569088 - RNA, 19 nt, Homo sapiens
  misc_RNA (1)...(19): siRNA sense strand
ugauaaagccaacaagcaa

SEQ ID NO: 2569089 - RNA, 19 nt, Homo sapiens
  misc_RNA (1)...(19): siRNA sense strand
acaaagagacaacuggaua

SEQ ID NO: 2569090 - RNA, 19 nt, Homo sapiens
  misc_RNA (1)...(19): siRNA sense strand
guuaaacgucugaaugaaa

SEQ ID NO: 2569091 - RNA, 19 nt, Homo sapiens
  misc_RNA (1)...(19): siRNA sense strand
ccauauugucugaagaaga

SEQ ID NO: 2569092 - RNA, 19 nt, Homo sapiens
  misc_RNA (1)...(19): siRNA sense strand
agaagaaauugguagacuu

SEQ ID NO: 2569093 - RNA, 19 nt, Homo sapiens
  misc_RNA (1)...(19): siRNA sense strand
cgacaacagauaacugaaa

SEQ ID NO: 2569094 - RNA, 19 nt, Homo sapiens
  misc_RNA (1)...(19): siRNA sense strand
ggaugggagaugaggguga

SEQ ID NO: 2569095 - RNA, 19 nt, Homo sapiens
  misc_RNA (1)...(19): siRNA sense strand
aggaacagcccguggaaaa

SEQ ID NO: 2569096 - RNA, 19 nt, Homo sapiens
  misc_RNA (1)...(19): siRNA sense strand
cagcagugguguaucggga

SEQ ID NO: 2569097 - RNA, 19 nt, Homo sapiens
  misc_RNA (1)...(19): siRNA sense strand
ugcaucaguuugaggaaca

SEQ ID NO: 2569098 - RNA, 19 nt, Homo sapiens
  misc_RNA (1)...(19): siRNA sense strand
gccaaggagaccaaggaca

SEQ ID NO: 2569099 - RNA, 19 nt, Homo sapiens
  misc_RNA (1)...(19): siRNA sense strand
acaaggagaacgagggccu

SEQ ID NO: 2569100 - RNA, 19 nt, Homo sapiens
  misc_RNA (1)...(19): siRNA sense strand
aaggaaaagugcaaggcua

SEQ ID NO: 2569101 - RNA, 19 nt, Homo sapiens
  misc_RNA (1)...(19): siRNA sense strand
ccgcaaaaccaguacaaga

SEQ ID NO: 2569102 - RNA, 19 nt, Homo sapiens
  misc_RNA (1)...(19): siRNA sense strand
gguaacaacgaaugcccaa

SEQ ID NO: 2569103 - RNA, 19 nt, Homo sapiens
  misc_RNA (1)...(19): siRNA sense strand
cccugaugacugugacaaa

SEQ ID NO: 2569104 - RNA, 19 nt, Homo sapiens
  misc_RNA (1)...(19): siRNA sense strand
cuaaagauggaauggagca

SEQ ID NO: 2569105 - RNA, 19 nt, Homo sapiens
  misc_RNA (1)...(19): siRNA sense strand
cagagagguaacaacgaau

SEQ ID NO: 2569106 - RNA, 19 nt, Homo sapiens
  misc_RNA (1)...(19): siRNA sense strand
guggaaagaaugaaggaaa

SEQ ID NO: 2569107 - RNA, 19 nt, Homo sapiens
  misc_RNA (1)...(19): siRNA sense strand
cugaauuggaugaaagaua

SEQ ID NO: 2569108 - RNA, 19 nt, Homo sapiens
  misc_RNA (1)...(19): siRNA sense strand
ggguaaaaguagagaagga

SEQ ID NO: 2569109 - RNA, 19 nt, Homo sapiens
  misc_RNA (1)...(19): siRNA sense strand
uggaaagaaugaaggaaaa

SEQ ID NO: 2569110 - RNA, 19 nt, Homo sapiens
  misc_RNA (1)...(19): siRNA sense strand
ucgugaagcaguugagaaa

SEQ ID NO: 2569111 - RNA, 19 nt, Homo sapiens
  misc_RNA (1)...(19): siRNA sense strand
cagccaaagaagagaaaga

SEQ ID NO: 2569112 - RNA, 19 nt, Homo sapiens
  misc_RNA (1)...(19): siRNA sense strand
guucgaugaaagugagaaa

SEQ ID NO: 2569113 - RNA, 19 nt, Homo sapiens
  misc_RNA (1)...(19): siRNA sense strand
aggaagaugaagaugauaa

SEQ ID NO: 2569114 - RNA, 19 nt, Homo sapiens
  misc_RNA (1)...(19): siRNA sense strand
aggaagaagaagaagaaaa

SEQ ID NO: 2569115 - RNA, 19 nt, Homo sapiens
  misc_RNA (1)...(19): siRNA sense strand
caguagaggaagaagaaga

SEQ ID NO: 2569116 - RNA, 19 nt, Homo sapiens
  misc_RNA (1)...(19): siRNA sense strand
cagaagacacagagcaaga

SEQ ID NO: 2569117 - RNA, 19 nt, Homo sapiens
  misc_RNA (1)...(19): siRNA sense strand
augaaguaguacagagaga

SEQ ID NO: 2569118 - RNA, 19 nt, Homo sapiens
  misc_RNA (1)...(19): siRNA sense strand
cuggcaacauggagagaau

SEQ ID NO: 2569119 - RNA, 19 nt, Homo sapiens
  misc_RNA (1)...(19): siRNA sense strand
agaugaagaagaagaaaca

SEQ ID NO: 2569120 - RNA, 19 nt, Homo sapiens
  misc_RNA (1)...(19): siRNA sense strand
gauaaagcccuuaaggaca

SEQ ID NO: 2569121 - RNA, 19 nt, Homo sapiens
  misc_RNA (1)...(19): siRNA sense strand
gaaaagaaaccaaagacua

SEQ ID NO: 2569122 - RNA, 19 nt, Homo sapiens
  misc_RNA (1)...(19): siRNA sense strand
agaaguagaagaagaugaa

SEQ ID NO: 2569123 - RNA, 19 nt, Homo sapiens
  misc_RNA (1)...(19): siRNA sense strand
ccgcgagacucuucagcaa

SEQ ID NO: 2569124 - RNA, 19 nt, Homo sapiens
  misc_RNA (1)...(19): siRNA sense strand
ucgaacacgucuugcuaaa

SEQ ID NO: 2569125 - RNA, 19 nt, Homo sapiens
  misc_RNA (1)...(19): siRNA sense strand
cuuaaggacaagauugaaa

SEQ ID NO: 2569126 - RNA, 19 nt, Homo sapiens
  misc_RNA (1)...(19): siRNA sense strand
acuaaagcauauggagaua

SEQ ID NO: 2569127 - RNA, 19 nt, Homo sapiens
  misc_RNA (1)...(19): siRNA sense strand
cgaugaaguugauguggau

SEQ ID NO: 2569128 - RNA, 19 nt, Homo sapiens
  misc_RNA (1)...(19): siRNA sense strand
ugacugaagcacaggaaga

SEQ ID NO: 2569129 - RNA, 19 nt, Homo sapiens
  misc_RNA (1)...(19): siRNA sense strand
agaaagaauuugagccucu

SEQ ID NO: 2569130 - RNA, 19 nt, Homo sapiens
  misc_RNA (1)...(19): siRNA sense strand
gaugaaagauaaagcccuu

SEQ ID NO: 2569131 - RNA, 19 nt, Homo sapiens
  misc_RNA (1)...(19): siRNA sense strand
agaagauugcugaugauaa

SEQ ID NO: 2569132 - RNA, 19 nt, Homo sapiens
  misc_RNA (1)...(19): siRNA sense strand
acacuaaagcauauggaga

SEQ ID NO: 2569133 - RNA, 19 nt, Homo sapiens
  misc_RNA (1)...(19): siRNA sense strand
aagaagaaucugaugauga

SEQ ID NO: 2569134 - RNA, 19 nt, Homo sapiens
  misc_RNA (1)...(19): siRNA sense strand
aguaguacagagagaggaa

SEQ ID NO: 2569135 - RNA, 19 nt, Homo sapiens
  misc_RNA (1)...(19): siRNA sense strand
ggaugugggaacagaugaa

SEQ ID NO: 2569136 - RNA, 19 nt, Homo sapiens
  misc_RNA (1)...(19): siRNA sense strand
ccaaggaaggagugaaguu

SEQ ID NO: 2569137 - RNA, 19 nt, Homo sapiens
  misc_RNA (1)...(19): siRNA sense strand
aagcauauggagauagaau

SEQ ID NO: 2569138 - RNA, 19 nt, Homo sapiens
  misc_RNA (1)...(19): siRNA sense strand
uggagauagaauagaaaga

SEQ ID NO: 2569139 - RNA, 19 nt, Homo sapiens
  misc_RNA (1)...(19): siRNA sense strand
agagagaggaagaagcuau

SEQ ID NO: 2569140 - RNA, 19 nt, Homo sapiens
  misc_RNA (1)...(19): siRNA sense strand
aagccgaaguuaacagaau

SEQ ID NO: 2569141 - RNA, 19 nt, Homo sapiens
  misc_RNA (1)...(19): siRNA sense strand
agaagaggaucuggguaaa

SEQ ID NO: 2569142 - RNA, 19 nt, Homo sapiens
  misc_RNA (1)...(19): siRNA sense strand
guacaguagaagaggaucu

SEQ ID NO: 2569143 - RNA, 19 nt, Homo sapiens
  misc_RNA (1)...(19): siRNA sense strand
caucaaaagaaguagaaga

SEQ ID NO: 2569144 - RNA, 19 nt, Homo sapiens
  misc_RNA (1)...(19): siRNA sense strand
gaagaagaagaaacagcaa

SEQ ID NO: 2569145 - RNA, 19 nt, Homo sapiens
  misc_RNA (1)...(19): siRNA sense strand
aguagaggaagaagaagaa

SEQ ID NO: 2569146 - RNA, 19 nt, Homo sapiens
  misc_RNA (1)...(19): siRNA sense strand
aagacgaagaugaagaaau

SEQ ID NO: 2569147 - RNA, 19 nt, Homo sapiens
  misc_RNA (1)...(19): siRNA sense strand
aagaagaagaaacagcaaa

SEQ ID NO: 2569148 - RNA, 19 nt, Homo sapiens
  misc_RNA (1)...(19): siRNA sense strand
aagaaauggaugugggaac

SEQ ID NO: 2569149 - RNA, 19 nt, Homo sapiens
  misc_RNA (1)...(19): siRNA sense strand
agaaauggaugugggaaca

SEQ ID NO: 2569150 - RNA, 19 nt, Homo sapiens
  misc_RNA (1)...(19): siRNA sense strand
aagagaacuuagagagaag

SEQ ID NO: 2569151 - RNA, 19 nt, Homo sapiens
  misc_RNA (1)...(19): siRNA sense strand
cugcaguagaggaagaaga

SEQ ID NO: 2569152 - RNA, 19 nt, Homo sapiens
  misc_RNA (1)...(19): siRNA sense strand
cuuaaggugauuaggaaga

SEQ ID NO: 2569153 - RNA, 19 nt, Homo sapiens
  misc_RNA (1)...(19): siRNA sense strand
cugaagagacagcagaaga

SEQ ID NO: 2569154 - RNA, 19 nt, Homo sapiens
  misc_RNA (1)...(19): siRNA sense strand
agacacaacagaagacaca

SEQ ID NO: 2569155 - RNA, 19 nt, Homo sapiens
  misc_RNA (1)...(19): siRNA sense strand
aggaagaagaagcagccaa

SEQ ID NO: 2569156 - RNA, 19 nt, Homo sapiens
  misc_RNA (1)...(19): siRNA sense strand
aagaagaagcagccaaaga

SEQ ID NO: 2569157 - RNA, 19 nt, Homo sapiens
  misc_RNA (1)...(19): siRNA sense strand
agagcaagacgaagaugaa

SEQ ID NO: 2569158 - RNA, 19 nt, Homo sapiens
  misc_RNA (1)...(19): siRNA sense strand
agaaagaagaaucugauga

SEQ ID NO: 2569159 - RNA, 19 nt, Homo sapiens
  misc_RNA (1)...(19): siRNA sense strand
aagaaguagaagaagauga

SEQ ID NO: 2569160 - RNA, 19 nt, Homo sapiens
  misc_RNA (1)...(19): siRNA sense strand
caaauuacuaugcgaguca

SEQ ID NO: 2569161 - RNA, 19 nt, Homo sapiens
  misc_RNA (1)...(19): siRNA sense strand
acauugacccugaugcaaa

SEQ ID NO: 2569162 - RNA, 19 nt, Homo sapiens
  misc_RNA (1)...(19): siRNA sense strand
aacagaagacacagagcaa

SEQ ID NO: 2569163 - RNA, 19 nt, Homo sapiens
  misc_RNA (1)...(19): siRNA sense strand
ugaugaaguaguacagaga

SEQ ID NO: 2569164 - RNA, 19 nt, Homo sapiens
  misc_RNA (1)...(19): siRNA sense strand
gaugaaagugagaaaacua

SEQ ID NO: 2569165 - RNA, 19 nt, Homo sapiens
  misc_RNA (1)...(19): siRNA sense strand
acgaauuaaggaagaugaa

SEQ ID NO: 2569166 - RNA, 19 nt, Homo sapiens
  misc_RNA (1)...(19): siRNA sense strand
ccuucagauccuaaagaaa

SEQ ID NO: 2569167 - RNA, 19 nt, Homo sapiens
  misc_RNA (1)...(19): siRNA sense strand
auugagagguacauagcaa

SEQ ID NO: 2569168 - RNA, 19 nt, Homo sapiens
  misc_RNA (1)...(19): siRNA sense strand
ccaacauaacagacaguau

SEQ ID NO: 2569169 - RNA, 19 nt, Homo sapiens
  misc_RNA (1)...(19): siRNA sense strand
guuccugggucuauggcua

SEQ ID NO: 2569170 - RNA, 19 nt, Homo sapiens
  misc_RNA (1)...(19): siRNA sense strand
cagugguggccuuagaaua

SEQ ID NO: 2569171 - RNA, 19 nt, Homo sapiens
  misc_RNA (1)...(19): siRNA sense strand
gcccuaaauuacagcguca

SEQ ID NO: 2569172 - RNA, 19 nt, Homo sapiens
  misc_RNA (1)...(19): siRNA sense strand
cuucagauccuaaagaaaa

SEQ ID NO: 2569173 - RNA, 19 nt, Homo sapiens
  misc_RNA (1)...(19): siRNA sense strand
cuacaagaucuccaggaau

SEQ ID NO: 2569174 - RNA, 19 nt, Homo sapiens
  misc_RNA (1)...(19): siRNA sense strand
caucaaggagucagaccau

SEQ ID NO: 2569175 - RNA, 19 nt, Homo sapiens
  misc_RNA (1)...(19): siRNA sense strand
gaaccaagcacaugaggac

SEQ ID NO: 2569176 - RNA, 19 nt, Homo sapiens
  misc_RNA (1)...(19): siRNA sense strand
ucaccaagaugcuggcagu

SEQ ID NO: 2569177 - RNA, 19 nt, Homo sapiens
  misc_RNA (1)...(19): siRNA sense strand
aggccaaagugaugaugaa

SEQ ID NO: 2569178 - RNA, 19 nt, Homo sapiens
  misc_RNA (1)...(19): siRNA sense strand
accugauacuggagaaaua

SEQ ID NO: 2569179 - RNA, 19 nt, Homo sapiens
  misc_RNA (1)...(19): siRNA sense strand
ccucacugguggaaggcaa

SEQ ID NO: 2569180 - RNA, 19 nt, Homo sapiens
  misc_RNA (1)...(19): siRNA sense strand
aggaaaugcuacugagugu

SEQ ID NO: 2569181 - RNA, 19 nt, Homo sapiens
  misc_RNA (1)...(19): siRNA sense strand
cuuaaggagagcagaagaa

SEQ ID NO: 2569182 - RNA, 19 nt, Homo sapiens
  misc_RNA (1)...(19): siRNA sense strand
auucaaagcuagugcaacu

SEQ ID NO: 2569183 - RNA, 19 nt, Homo sapiens
  misc_RNA (1)...(19): siRNA sense strand
gcaaggaauuguuugguca

SEQ ID NO: 2569184 - RNA, 19 nt, Homo sapiens
  misc_RNA (1)...(19): siRNA sense strand
ggagaauaaaggaaagcuu

SEQ ID NO: 2569185 - RNA, 19 nt, Homo sapiens
  misc_RNA (1)...(19): siRNA sense strand
aguucaacaugcauaguaa

SEQ ID NO: 2569186 - RNA, 19 nt, Homo sapiens
  misc_RNA (1)...(19): siRNA sense strand
gguauguggcugaaagaca

SEQ ID NO: 2569187 - RNA, 19 nt, Homo sapiens
  misc_RNA (1)...(19): siRNA sense strand
gucuaaagaaggugcauuu

SEQ ID NO: 2569188 - RNA, 19 nt, Homo sapiens
  misc_RNA (1)...(19): siRNA sense strand
gagugguaccauagaaaca

SEQ ID NO: 2569189 - RNA, 19 nt, Homo sapiens
  misc_RNA (1)...(19): siRNA sense strand
uaauuuagccuuaaggaga

SEQ ID NO: 2569190 - RNA, 19 nt, Homo sapiens
  misc_RNA (1)...(19): siRNA sense strand
acgaaaagugggagauaga

SEQ ID NO: 2569191 - RNA, 19 nt, Homo sapiens
  misc_RNA (1)...(19): siRNA sense strand
gggauuuggcggcaaggaa

SEQ ID NO: 2569192 - RNA, 19 nt, Homo sapiens
  misc_RNA (1)...(19): siRNA sense strand
guucagugcagaagcgaca

SEQ ID NO: 2569193 - RNA, 19 nt, Homo sapiens
  misc_RNA (1)...(19): siRNA sense strand
aaucaaucccugaguuaau

SEQ ID NO: 2569194 - RNA, 19 nt, Homo sapiens
  misc_RNA (1)...(19): siRNA sense strand
ggauuuggcggcaaggaau

SEQ ID NO: 2569195 - RNA, 19 nt, Homo sapiens
  misc_RNA (1)...(19): siRNA sense strand
gccaaagugaugaugaaau

SEQ ID NO: 2569196 - RNA, 19 nt, Homo sapiens
  misc_RNA (1)...(19): siRNA sense strand
aggauauaugugaaggaau

SEQ ID NO: 2569197 - RNA, 19 nt, Homo sapiens
  misc_RNA (1)...(19): siRNA sense strand
ggaauggaauaucuggaga

SEQ ID NO: 2569198 - RNA, 19 nt, Homo sapiens
  misc_RNA (1)...(19): siRNA sense strand
cagaagaauaccugauacu

SEQ ID NO: 2569199 - RNA, 19 nt, Homo sapiens
  misc_RNA (1)...(19): siRNA sense strand
cagaaaucaggcagaacau

SEQ ID NO: 2569200 - RNA, 19 nt, Homo sapiens
  misc_RNA (1)...(19): siRNA sense strand
uaugugaaggaauggaaua

SEQ ID NO: 2569201 - RNA, 19 nt, Homo sapiens
  misc_RNA (1)...(19): siRNA sense strand
ccauagaaacauuaccaga

SEQ ID NO: 2569202 - RNA, 19 nt, Homo sapiens
  misc_RNA (1)...(19): siRNA sense strand
gccaauugucaaauaagaa

SEQ ID NO: 2569203 - RNA, 19 nt, Homo sapiens
  misc_RNA (1)...(19): siRNA sense strand
cuaucaaggccaucaauga

SEQ ID NO: 2569204 - RNA, 19 nt, Homo sapiens
  misc_RNA (1)...(19): siRNA sense strand
aggaaagcuuaggaaggaa

SEQ ID NO: 2569205 - RNA, 19 nt, Homo sapiens
  misc_RNA (1)...(19): siRNA sense strand
aauaagaagcaauccaaca

SEQ ID NO: 2569206 - RNA, 19 nt, Homo sapiens
  misc_RNA (1)...(19): siRNA sense strand
gagcagaagaauaccugau

SEQ ID NO: 2569207 - RNA, 19 nt, Homo sapiens
  misc_RNA (1)...(19): siRNA sense strand
caagagaccguuuggggaa

SEQ ID NO: 2569208 - RNA, 19 nt, Homo sapiens
  misc_RNA (1)...(19): siRNA sense strand
guucaacaugcauaguaaa

SEQ ID NO: 2569209 - RNA, 19 nt, Homo sapiens
  misc_RNA (1)...(19): siRNA sense strand
cguuuuggaugaugaguau

SEQ ID NO: 2569210 - RNA, 19 nt, Homo sapiens
  misc_RNA (1)...(19): siRNA sense strand
cagauaagccugagcacag

SEQ ID NO: 2569211 - RNA, 19 nt, Homo sapiens
  misc_RNA (1)...(19): siRNA sense strand
augagugguaccauagaaa

SEQ ID NO: 2569212 - RNA, 19 nt, Homo sapiens
  misc_RNA (1)...(19): siRNA sense strand
agccuuaaggagagcagaa

SEQ ID NO: 2569213 - RNA, 19 nt, Homo sapiens
  misc_RNA (1)...(19): siRNA sense strand
gauucaagacauuuaggau

SEQ ID NO: 2569214 - RNA, 19 nt, Homo sapiens
  misc_RNA (1)...(19): siRNA sense strand
cccuuuacauugugacaga

SEQ ID NO: 2569215 - RNA, 19 nt, Homo sapiens
  misc_RNA (1)...(19): siRNA sense strand
ccuuaaggagagcagaaga

SEQ ID NO: 2569216 - RNA, 19 nt, Homo sapiens
  misc_RNA (1)...(19): siRNA sense strand
aaggagagcagaagaauac

SEQ ID NO: 2569217 - RNA, 19 nt, Homo sapiens
  misc_RNA (1)...(19): siRNA sense strand
cuaugugacugaaaacaaa

SEQ ID NO: 2569218 - RNA, 19 nt, Homo sapiens
  misc_RNA (1)...(19): siRNA sense strand
ccaugucugaagaggauuu

SEQ ID NO: 2569219 - RNA, 19 nt, Homo sapiens
  misc_RNA (1)...(19): siRNA sense strand
gcuuaggaaggaaaugcua

SEQ ID NO: 2569220 - RNA, 19 nt, Homo sapiens
  misc_RNA (1)...(19): siRNA sense strand
ugucacagagauugcggaa

SEQ ID NO: 2569221 - RNA, 19 nt, Homo sapiens
  misc_RNA (1)...(19): siRNA sense strand
caagcaacuaugugacuga

SEQ ID NO: 2569222 - RNA, 19 nt, Homo sapiens
  misc_RNA (1)...(19): siRNA sense strand
cguauuuaugggagcuaga

SEQ ID NO: 2569223 - RNA, 19 nt, Homo sapiens
  misc_RNA (1)...(19): siRNA sense strand
cuacgaaaagugggagaua

SEQ ID NO: 2569224 - RNA, 19 nt, Homo sapiens
  misc_RNA (1)...(19): siRNA sense strand
ggccaaagugaugaugaaa

SEQ ID NO: 2569225 - RNA, 19 nt, Homo sapiens
  misc_RNA (1)...(19): siRNA sense strand
gauuuggcggcaaggaauu

SEQ ID NO: 2569226 - RNA, 19 nt, Homo sapiens
  misc_RNA (1)...(19): siRNA sense strand
aggagaaacugguggagcu

SEQ ID NO: 2569227 - RNA, 19 nt, Homo sapiens
  misc_RNA (1)...(19): siRNA sense strand
aggagaagcuggugcugga

SEQ ID NO: 2569228 - RNA, 19 nt, Homo sapiens
  misc_RNA (1)...(19): siRNA sense strand
gcuccaaccuucuggccuu

SEQ ID NO: 2569229 - RNA, 19 nt, Homo sapiens
  misc_RNA (1)...(19): siRNA sense strand
ucgugaucgugcugaagaa

SEQ ID NO: 2569230 - RNA, 19 nt, Homo sapiens
  misc_RNA (1)...(19): siRNA sense strand
ucuacaacguggagcccuu

SEQ ID NO: 2569231 - RNA, 19 nt, Homo sapiens
  misc_RNA (1)...(19): siRNA sense strand
uugaaguagauguggauga

SEQ ID NO: 2569232 - RNA, 19 nt, Homo sapiens
  misc_RNA (1)...(19): siRNA sense strand
ggacaaaaggugggugaau

SEQ ID NO: 2569233 - RNA, 19 nt, Homo sapiens
  misc_RNA (1)...(19): siRNA sense strand
acaaaaggugggugaauuu

SEQ ID NO: 2569234 - RNA, 19 nt, Homo sapiens
  misc_RNA (1)...(19): siRNA sense strand
gaaaaguauuccaacguga

SEQ ID NO: 2569235 - RNA, 19 nt, Homo sapiens
  misc_RNA (1)...(19): siRNA sense strand
ccaauaaggaaaagcuuga

SEQ ID NO: 2569236 - RNA, 19 nt, Homo sapiens
  misc_RNA (1)...(19): siRNA sense strand
cugcaaagcuggaggagca

SEQ ID NO: 2569237 - RNA, 19 nt, Homo sapiens
  misc_RNA (1)...(19): siRNA sense strand
cagcacggguugaggguga

SEQ ID NO: 2569238 - RNA, 19 nt, Homo sapiens
  misc_RNA (1)...(19): siRNA sense strand
ggacagaggaagagccacu

SEQ ID NO: 2569239 - RNA, 19 nt, Homo sapiens
  misc_RNA (1)...(19): siRNA sense strand
cccaagacugugagacaua

SEQ ID NO: 2569240 - RNA, 19 nt, Homo sapiens
  misc_RNA (1)...(19): siRNA sense strand
ucucgggaauugagggaau

SEQ ID NO: 2569241 - RNA, 19 nt, Homo sapiens
  misc_RNA (1)...(19): siRNA sense strand
caggaagugcugaaggcaa

SEQ ID NO: 2569242 - RNA, 19 nt, Homo sapiens
  misc_RNA (1)...(19): siRNA sense strand
agaaggaugaugacagcaa

SEQ ID NO: 2569243 - RNA, 19 nt, Homo sapiens
  misc_RNA (1)...(19): siRNA sense strand
ugucauaagcauggaguuu

SEQ ID NO: 2569244 - RNA, 19 nt, Homo sapiens
  misc_RNA (1)...(19): siRNA sense strand
agcagaaggaacugaacaa

SEQ ID NO: 2569245 - RNA, 19 nt, Homo sapiens
  misc_RNA (1)...(19): siRNA sense strand
ccuggagauuggagacaca

SEQ ID NO: 2569246 - RNA, 19 nt, Homo sapiens
  misc_RNA (1)...(19): siRNA sense strand
ugaacaaagcccuggaagu

SEQ ID NO: 2569247 - RNA, 19 nt, Homo sapiens
  misc_RNA (1)...(19): siRNA sense strand
gggcuaucacugaagucaa

SEQ ID NO: 2569248 - RNA, 19 nt, Homo sapiens
  misc_RNA (1)...(19): siRNA sense strand
cuaauaaagugcuugagga

SEQ ID NO: 2569249 - RNA, 19 nt, Homo sapiens
  misc_RNA (1)...(19): siRNA sense strand
gcgaauugugggccagauu

SEQ ID NO: 2569250 - RNA, 19 nt, Homo sapiens
  misc_RNA (1)...(19): siRNA sense strand
gcaggugucuugagcccua

SEQ ID NO: 2569251 - RNA, 19 nt, Homo sapiens
  misc_RNA (1)...(19): siRNA sense strand
cuacaguauucaugccaca

SEQ ID NO: 2569252 - RNA, 19 nt, Homo sapiens
  misc_RNA (1)...(19): siRNA sense strand
ccgagguggccaagaacuu

SEQ ID NO: 2569253 - RNA, 19 nt, Homo sapiens
  misc_RNA (1)...(19): siRNA sense strand
gcaagcgaauugugggcca

SEQ ID NO: 2569254 - RNA, 19 nt, Homo sapiens
  misc_RNA (1)...(19): siRNA sense strand
gggcaguuguucugugacu

SEQ ID NO: 2569255 - RNA, 19 nt, Homo sapiens
  misc_RNA (1)...(19): siRNA sense strand
gaggaugggucccuggaga

SEQ ID NO: 2569256 - RNA, 19 nt, Homo sapiens
  misc_RNA (1)...(19): siRNA sense strand
ccagauuaucccagccauu

SEQ ID NO: 2569257 - RNA, 19 nt, Homo sapiens
  misc_RNA (1)...(19): siRNA sense strand
acugaagcggacagaggaa

SEQ ID NO: 2569258 - RNA, 19 nt, Homo sapiens
  misc_RNA (1)...(19): siRNA sense strand
cagacauggaugagccaca

SEQ ID NO: 2569259 - RNA, 19 nt, Homo sapiens
  misc_RNA (1)...(19): siRNA sense strand
uguauaagguggugagugg

SEQ ID NO: 2569260 - RNA, 19 nt, Homo sapiens
  misc_RNA (1)...(19): siRNA sense strand
ugaagcggacagaggaaga

SEQ ID NO: 2569261 - RNA, 19 nt, Homo sapiens
  misc_RNA (1)...(19): siRNA sense strand
cagcagaaggaacugaaca

SEQ ID NO: 2569262 - RNA, 19 nt, Homo sapiens
  misc_RNA (1)...(19): siRNA sense strand
ucucaagaaacaagcgaca

SEQ ID NO: 2569263 - RNA, 19 nt, Homo sapiens
  misc_RNA (1)...(19): siRNA sense strand
cuauguuggcgauggauau

SEQ ID NO: 2569264 - RNA, 19 nt, Homo sapiens
  misc_RNA (1)...(19): siRNA sense strand
ccaucgugaagaaggaauu

SEQ ID NO: 2569265 - RNA, 19 nt, Homo sapiens
  misc_RNA (1)...(19): siRNA sense strand
gcgauggauaugugguuca

SEQ ID NO: 2569266 - RNA, 19 nt, Homo sapiens
  misc_RNA (1)...(19): siRNA sense strand
gugagaacugcgagcacuu

SEQ ID NO: 2569267 - RNA, 19 nt, Homo sapiens
  misc_RNA (1)...(19): siRNA sense strand
cugacaaggccaucgugaa

SEQ ID NO: 2569268 - RNA, 19 nt, Homo sapiens
  misc_RNA (1)...(19): siRNA sense strand
ugaccagaguacaggcaaa

SEQ ID NO: 2569269 - RNA, 19 nt, Homo sapiens
  misc_RNA (1)...(19): siRNA sense strand
cggaaauucacaaggauca

SEQ ID NO: 2569270 - RNA, 19 nt, Homo sapiens
  misc_RNA (1)...(19): siRNA sense strand
cccaaauaugaaaggauaa

SEQ ID NO: 2569271 - RNA, 19 nt, Homo sapiens
  misc_RNA (1)...(19): siRNA sense strand
augaaaggauaaugcagaa

SEQ ID NO: 2569272 - RNA, 19 nt, Homo sapiens
  misc_RNA (1)...(19): siRNA sense strand
aaccaaagaaucuaggaaa

SEQ ID NO: 2569273 - RNA, 19 nt, Homo sapiens
  misc_RNA (1)...(19): siRNA sense strand
ggcaaaaggcauggggaua

SEQ ID NO: 2569274 - RNA, 19 nt, Homo sapiens
  misc_RNA (1)...(19): siRNA sense strand
caauuauguuugaaagcca

SEQ ID NO: 2569275 - RNA, 19 nt, Homo sapiens
  misc_RNA (1)...(19): siRNA sense strand
caguccaagaugcggaaua

SEQ ID NO: 2569276 - RNA, 19 nt, Homo sapiens
  misc_RNA (1)...(19): siRNA sense strand
ccgccaauuauguuugaaa

SEQ ID NO: 2569277 - RNA, 19 nt, Homo sapiens
  misc_RNA (1)...(19): siRNA sense strand
ccuaaugauauguguggau

SEQ ID NO: 2569278 - RNA, 19 nt, Homo sapiens
  misc_RNA (1)...(19): siRNA sense strand
aagcacuagugaagguuau

SEQ ID NO: 2569279 - RNA, 19 nt, Homo sapiens
  misc_RNA (1)...(19): siRNA sense strand
agaaauaagcauagcacag

SEQ ID NO: 2569280 - RNA, 19 nt, Homo sapiens
  misc_RNA (1)...(19): siRNA sense strand
uagcacaguuaauggacau

SEQ ID NO: 2569281 - RNA, 19 nt, Homo sapiens
  misc_RNA (1)...(19): siRNA sense strand
aggauaaugcagaaguaca

SEQ ID NO: 2569282 - RNA, 19 nt, Homo sapiens
  misc_RNA (1)...(19): siRNA sense strand
gcaaaaggcauggggauau

SEQ ID NO: 2569283 - RNA, 19 nt, Homo sapiens
  misc_RNA (1)...(19): siRNA sense strand
guacaaaagaaauggccau

SEQ ID NO: 2569284 - RNA, 19 nt, Homo sapiens
  misc_RNA (1)...(19): siRNA sense strand
uggucuagaaauaagcaua

SEQ ID NO: 2569285 - RNA, 19 nt, Homo sapiens
  misc_RNA (1)...(19): siRNA sense strand
accaaagaaucuaggaaac

SEQ ID NO: 2569286 - RNA, 19 nt, Homo sapiens
  misc_RNA (1)...(19): siRNA sense strand
auggaauccucaauggcaa

SEQ ID NO: 2569287 - RNA, 19 nt, Homo sapiens
  misc_RNA (1)...(19): siRNA sense strand
cauacgucccagaguuuaa

SEQ ID NO: 2569288 - RNA, 19 nt, Homo sapiens
  misc_RNA (1)...(19): siRNA sense strand
ccauguaugauuugguuca

SEQ ID NO: 2569289 - RNA, 19 nt, Homo sapiens
  misc_RNA (1)...(19): siRNA sense strand
aaauggugcuaaugaacau

SEQ ID NO: 2569290 - RNA, 19 nt, Homo sapiens
  misc_RNA (1)...(19): siRNA sense strand
ggaaauucacaaggaucaa

SEQ ID NO: 2569291 - RNA, 19 nt, Homo sapiens
  misc_RNA (1)...(19): siRNA sense strand
aggcaaaaggcauggggau

SEQ ID NO: 2569292 - RNA, 19 nt, Homo sapiens
  misc_RNA (1)...(19): siRNA sense strand
aguccaagaugcggaauau

SEQ ID NO: 2569293 - RNA, 19 nt, Homo sapiens
  misc_RNA (1)...(19): siRNA sense strand
auggguaaauggugcuaau

SEQ ID NO: 2569294 - RNA, 19 nt, Homo sapiens
  misc_RNA (1)...(19): siRNA sense strand
aaaccaaagaaucuaggaa

SEQ ID NO: 2569295 - RNA, 19 nt, Homo sapiens
  misc_RNA (1)...(19): siRNA sense strand
auuacagccuccagcgcua

SEQ ID NO: 2569296 - RNA, 19 nt, Homo sapiens
  misc_RNA (1)...(19): siRNA sense strand
guucauggguccagccugu

SEQ ID NO: 2569297 - RNA, 19 nt, Homo sapiens
  misc_RNA (1)...(19): siRNA sense strand
cugacguagcacuggaauu

SEQ ID NO: 2569298 - RNA, 19 nt, Homo sapiens
  misc_RNA (1)...(19): siRNA sense strand
cuaugaagcacuagugaag

SEQ ID NO: 2569299 - RNA, 19 nt, Homo sapiens
  misc_RNA (1)...(19): siRNA sense strand
ggccauauuaaacaugaaa

SEQ ID NO: 2569300 - RNA, 19 nt, Homo sapiens
  misc_RNA (1)...(19): siRNA sense strand
uguuugacauacuggauca

SEQ ID NO: 2569301 - RNA, 19 nt, Homo sapiens
  misc_RNA (1)...(19): siRNA sense strand
uugacauacuggaucacua

SEQ ID NO: 2569302 - RNA, 19 nt, Homo sapiens
  misc_RNA (1)...(19): siRNA sense strand
ccucaauggcaaguacaaa

SEQ ID NO: 2569303 - RNA, 19 nt, Homo sapiens
  misc_RNA (1)...(19): siRNA sense strand
guguugacgaggaaugaaa

SEQ ID NO: 2569304 - RNA, 19 nt, Homo sapiens
  misc_RNA (1)...(19): siRNA sense strand
ugaaggugucgcugggcaa

SEQ ID NO: 2569305 - RNA, 19 nt, Homo sapiens
  misc_RNA (1)...(19): siRNA sense strand
ugggagugucauagaucaa

SEQ ID NO: 2569306 - RNA, 19 nt, Homo sapiens
  misc_RNA (1)...(19): siRNA sense strand
gccaauggucagugcucua

SEQ ID NO: 2569307 - RNA, 19 nt, Homo sapiens
  misc_RNA (1)...(19): siRNA sense strand
gcacagacguggaugagug

SEQ ID NO: 2569308 - RNA, 19 nt, Homo sapiens
  misc_RNA (1)...(19): siRNA sense strand
gggacaguguugacgagga

SEQ ID NO: 2569309 - RNA, 19 nt, Homo sapiens
  misc_RNA (1)...(19): siRNA sense strand
gaauaauggcagauggcac

SEQ ID NO: 2569310 - RNA, 19 nt, Homo sapiens
  misc_RNA (1)...(19): siRNA sense strand
cuucaaugacagagacaac

SEQ ID NO: 2569311 - RNA, 19 nt, Homo sapiens
  misc_RNA (1)...(19): siRNA sense strand
aaugaaaagugcaagccua

SEQ ID NO: 2569312 - RNA, 19 nt, Homo sapiens
  misc_RNA (1)...(19): siRNA sense strand
gaaugaaacccaugccacu

SEQ ID NO: 2569313 - RNA, 19 nt, Homo sapiens
  misc_RNA (1)...(19): siRNA sense strand
ccaugaaugaaaagugcaa

SEQ ID NO: 2569314 - RNA, 19 nt, Homo sapiens
  misc_RNA (1)...(19): siRNA sense strand
ggaaagguguccaggccac

SEQ ID NO: 2569315 - RNA, 19 nt, Homo sapiens
  misc_RNA (1)...(19): siRNA sense strand
aggacugcaaaucgaauaa

SEQ ID NO: 2569316 - RNA, 19 nt, Homo sapiens
  misc_RNA (1)...(19): siRNA sense strand
ccgcagaggaaugcagaau

SEQ ID NO: 2569317 - RNA, 19 nt, Homo sapiens
  misc_RNA (1)...(19): siRNA sense strand
cuguggagcuccuggguga

SEQ ID NO: 2569318 - RNA, 19 nt, Homo sapiens
  misc_RNA (1)...(19): siRNA sense strand
agguuagccugcuggacaa

SEQ ID NO: 2569319 - RNA, 19 nt, Homo sapiens
  misc_RNA (1)...(19): siRNA sense strand
guuuugagacugagaagaa

SEQ ID NO: 2569320 - RNA, 19 nt, Homo sapiens
  misc_RNA (1)...(19): siRNA sense strand
uuucaagggaacaaagaau

SEQ ID NO: 2569321 - RNA, 19 nt, Homo sapiens
  misc_RNA (1)...(19): siRNA sense strand
ccaaguacaucuaugacca

SEQ ID NO: 2569322 - RNA, 19 nt, Homo sapiens
  misc_RNA (1)...(19): siRNA sense strand
cuucaggugcuguggccaa

SEQ ID NO: 2569323 - RNA, 19 nt, Homo sapiens
  misc_RNA (1)...(19): siRNA sense strand
cuggaggaguggagcacca

SEQ ID NO: 2569324 - RNA, 19 nt, Homo sapiens
  misc_RNA (1)...(19): siRNA sense strand
ugucugugaccgaaugaaa

SEQ ID NO: 2569325 - RNA, 19 nt, Homo sapiens
  misc_RNA (1)...(19): siRNA sense strand
ggacauaugcagaggacgc

SEQ ID NO: 2569326 - RNA, 19 nt, Homo sapiens
  misc_RNA (1)...(19): siRNA sense strand
uuugagacugagaagaaua

SEQ ID NO: 2569327 - RNA, 19 nt, Homo sapiens
  misc_RNA (1)...(19): siRNA sense strand
acaucaaggcgcuguccaa

SEQ ID NO: 2569328 - RNA, 19 nt, Homo sapiens
  misc_RNA (1)...(19): siRNA sense strand
agauugagaaggaacguga

SEQ ID NO: 2569329 - RNA, 19 nt, Homo sapiens
  misc_RNA (1)...(19): siRNA sense strand
gaugugauccugcgggaga

SEQ ID NO: 2569330 - RNA, 19 nt, Homo sapiens
  misc_RNA (1)...(19): siRNA sense strand
gugccggagacgcagguua

SEQ ID NO: 2569331 - RNA, 19 nt, Homo sapiens
  misc_RNA (1)...(19): siRNA sense strand
cgggaagugcagaggcaaa

SEQ ID NO: 2569332 - RNA, 19 nt, Homo sapiens
  misc_RNA (1)...(19): siRNA sense strand
ucauaaaugcggcaaagaa

SEQ ID NO: 2569333 - RNA, 19 nt, Homo sapiens
  misc_RNA (1)...(19): siRNA sense strand
gcaguagauaugaggacuu

SEQ ID NO: 2569334 - RNA, 19 nt, Homo sapiens
  misc_RNA (1)...(19): siRNA sense strand
gugaaauccgagaacagaa

SEQ ID NO: 2569335 - RNA, 19 nt, Homo sapiens
  misc_RNA (1)...(19): siRNA sense strand
ccguggaauugaagcaguu

SEQ ID NO: 2569336 - RNA, 19 nt, Homo sapiens
  misc_RNA (1)...(19): siRNA sense strand
ugacuauaggauuggaaaa

SEQ ID NO: 2569337 - RNA, 19 nt, Homo sapiens
  misc_RNA (1)...(19): siRNA sense strand
agaaagugcugucgcggga

SEQ ID NO: 2569338 - RNA, 19 nt, Homo sapiens
  misc_RNA (1)...(19): siRNA sense strand
aaauuaagugugaccgcaa

SEQ ID NO: 2569339 - RNA, 19 nt, Homo sapiens
  misc_RNA (1)...(19): siRNA sense strand
ucagcuaaagauugacaaa

SEQ ID NO: 2569340 - RNA, 19 nt, Homo sapiens
  misc_RNA (1)...(19): siRNA sense strand
cugccaagaacaagcugaa

SEQ ID NO: 2569341 - RNA, 19 nt, Homo sapiens
  misc_RNA (1)...(19): siRNA sense strand
gggaagugcagaggcaaau

SEQ ID NO: 2569342 - RNA, 19 nt, Homo sapiens
  misc_RNA (1)...(19): siRNA sense strand
caacaugaggggugggcuu

SEQ ID NO: 2569343 - RNA, 19 nt, Homo sapiens
  misc_RNA (1)...(19): siRNA sense strand
ugacaucagaggaguuaca

SEQ ID NO: 2569344 - RNA, 19 nt, Homo sapiens
  misc_RNA (1)...(19): siRNA sense strand
gugaccgcaacaagggaaa

SEQ ID NO: 2569345 - RNA, 19 nt, Homo sapiens
  misc_RNA (1)...(19): siRNA sense strand
cugccuauaaucaaguaaa

SEQ ID NO: 2569346 - RNA, 19 nt, Homo sapiens
  misc_RNA (1)...(19): siRNA sense strand
ccaaguuaccaaauggcuu

SEQ ID NO: 2569347 - RNA, 19 nt, Homo sapiens
  misc_RNA (1)...(19): siRNA sense strand
cugacuauaggauuggaaa

SEQ ID NO: 2569348 - RNA, 19 nt, Homo sapiens
  misc_RNA (1)...(19): siRNA sense strand
auaucauaaaugcggcaaa

SEQ ID NO: 2569349 - RNA, 19 nt, Homo sapiens
  misc_RNA (1)...(19): siRNA sense strand
caaguggaaauuugggaca

SEQ ID NO: 2569350 - RNA, 19 nt, Homo sapiens
  misc_RNA (1)...(19): siRNA sense strand
agaaagugaaagaggaaau

SEQ ID NO: 2569351 - RNA, 19 nt, Homo sapiens
  misc_RNA (1)...(19): siRNA sense strand
agcuauugcuggagccaaa

SEQ ID NO: 2569352 - RNA, 19 nt, Homo sapiens
  misc_RNA (1)...(19): siRNA sense strand
ugggagaagaacagcacaa

SEQ ID NO: 2569353 - RNA, 19 nt, Homo sapiens
  misc_RNA (1)...(19): siRNA sense strand
aggaauugcagaaagugaa

SEQ ID NO: 2569354 - RNA, 19 nt, Homo sapiens
  misc_RNA (1)...(19): siRNA sense strand
uggaagagaugaacgccau

SEQ ID NO: 2569355 - RNA, 19 nt, Homo sapiens
  misc_RNA (1)...(19): siRNA sense strand
aggaaaucauugaagccuu

SEQ ID NO: 2569356 - RNA, 19 nt, Homo sapiens
  misc_RNA (1)...(19): siRNA sense strand
gggugaaacaggagcuucu

SEQ ID NO: 2569357 - RNA, 19 nt, Homo sapiens
  misc_RNA (1)...(19): siRNA sense strand
ccaaucaggaggagccaga

SEQ ID NO: 2569358 - RNA, 19 nt, Homo sapiens
  misc_RNA (1)...(19): siRNA sense strand
cagaaagugaaagaggaaa

SEQ ID NO: 2569359 - RNA, 19 nt, Homo sapiens
  misc_RNA (1)...(19): siRNA sense strand
aagaggugaagaaggaauu

SEQ ID NO: 2569360 - RNA, 19 nt, Homo sapiens
  misc_RNA (1)...(19): siRNA sense strand
gugaagaaggaauugcaga

SEQ ID NO: 2569361 - RNA, 19 nt, Homo sapiens
  misc_RNA (1)...(19): siRNA sense strand
aaggaauugcagaaaguga

SEQ ID NO: 2569362 - RNA, 19 nt, Homo sapiens
  misc_RNA (1)...(19): siRNA sense strand
aagugaaagaggaaaucau

SEQ ID NO: 2569363 - RNA, 19 nt, Homo sapiens
  misc_RNA (1)...(19): siRNA sense strand
aggagguggagcagcagaa

SEQ ID NO: 2569364 - RNA, 19 nt, Homo sapiens
  misc_RNA (1)...(19): siRNA sense strand
gagaaauggaauaccgaca

SEQ ID NO: 2569365 - RNA, 19 nt, Homo sapiens
  misc_RNA (1)...(19): siRNA sense strand
ccugacguuuacagagaaa

SEQ ID NO: 2569366 - RNA, 19 nt, Homo sapiens
  misc_RNA (1)...(19): siRNA sense strand
gugaacaacuccagccuga

SEQ ID NO: 2569367 - RNA, 19 nt, Homo sapiens
  misc_RNA (1)...(19): siRNA sense strand
cugagaauggauuggaauu

SEQ ID NO: 2569368 - RNA, 19 nt, Homo sapiens
  misc_RNA (1)...(19): siRNA sense strand
gugaacaagaaguuggaga

SEQ ID NO: 2569369 - RNA, 19 nt, Homo sapiens
  misc_RNA (1)...(19): siRNA sense strand
ccgagauuacuguggaaga

SEQ ID NO: 2569370 - RNA, 19 nt, Homo sapiens
  misc_RNA (1)...(19): siRNA sense strand
cgucaaugcugguggccac

SEQ ID NO: 2569371 - RNA, 19 nt, Homo sapiens
  misc_RNA (1)...(19): siRNA sense strand
gcacguggacugaagcuga

SEQ ID NO: 2569372 - RNA, 19 nt, Homo sapiens
  misc_RNA (1)...(19): siRNA sense strand
cgggcagucuggaaaccaa

SEQ ID NO: 2569373 - RNA, 19 nt, Homo sapiens
  misc_RNA (1)...(19): siRNA sense strand
cccgagugacccagagcaa

SEQ ID NO: 2569374 - RNA, 19 nt, Homo sapiens
  misc_RNA (1)...(19): siRNA sense strand
gccugauagguuuaggaua

SEQ ID NO: 2569375 - RNA, 19 nt, Homo sapiens
  misc_RNA (1)...(19): siRNA sense strand
ccagaugaauuuugagacu

SEQ ID NO: 2569376 - RNA, 19 nt, Homo sapiens
  misc_RNA (1)...(19): siRNA sense strand
gugacgggcagucuggaaa

SEQ ID NO: 2569377 - RNA, 19 nt, Homo sapiens
  misc_RNA (1)...(19): siRNA sense strand
guuuacagagaaauggaau

SEQ ID NO: 2569378 - RNA, 19 nt, Homo sapiens
  misc_RNA (1)...(19): siRNA sense strand
uggcggaguccaagaggaa

SEQ ID NO: 2569379 - RNA, 19 nt, Homo sapiens
  misc_RNA (1)...(19): siRNA sense strand
agaauaagccgguggccga

SEQ ID NO: 2569380 - RNA, 19 nt, Homo sapiens
  misc_RNA (1)...(19): siRNA sense strand
gguuggaucuguuggagga

SEQ ID NO: 2569381 - RNA, 19 nt, Homo sapiens
  misc_RNA (1)...(19): siRNA sense strand
acgagaaaguggaggccgu

SEQ ID NO: 2569382 - RNA, 19 nt, Homo sapiens
  misc_RNA (1)...(19): siRNA sense strand
ccuacaagacagugaccga

SEQ ID NO: 2569383 - RNA, 19 nt, Homo sapiens
  misc_RNA (1)...(19): siRNA sense strand
aggaacaggugcagagccu

SEQ ID NO: 2569384 - RNA, 19 nt, Homo sapiens
  misc_RNA (1)...(19): siRNA sense strand
agucagagaaggugcagca

SEQ ID NO: 2569385 - RNA, 19 nt, Homo sapiens
  misc_RNA (1)...(19): siRNA sense strand
ucaaugagauccagcacca

SEQ ID NO: 2569386 - RNA, 19 nt, Homo sapiens
  misc_RNA (1)...(19): siRNA sense strand
cagagaaggugcagcagcu

SEQ ID NO: 2569387 - RNA, 19 nt, Homo sapiens
  misc_RNA (1)...(19): siRNA sense strand
guguggaugcccaggauga

SEQ ID NO: 2569388 - RNA, 19 nt, Homo sapiens
  misc_RNA (1)...(19): siRNA sense strand
agagcaugcuacagagagu

SEQ ID NO: 2569389 - RNA, 19 nt, Homo sapiens
  misc_RNA (1)...(19): siRNA sense strand
ccaaggagcugcaaggccu

SEQ ID NO: 2569390 - RNA, 19 nt, Homo sapiens
  misc_RNA (1)...(19): siRNA sense strand
ucgacagaguccugcucaa

SEQ ID NO: 2569391 - RNA, 19 nt, Homo sapiens
  misc_RNA (1)...(19): siRNA sense strand
gcggaguccaagaggaacu

SEQ ID NO: 2569392 - RNA, 19 nt, Homo sapiens
  misc_RNA (1)...(19): siRNA sense strand
cagagagugaagagcgcuu

SEQ ID NO: 2569393 - RNA, 19 nt, Homo sapiens
  misc_RNA (1)...(19): siRNA sense strand
aggaaagaaaagugguaaa

SEQ ID NO: 2569394 - RNA, 19 nt, Homo sapiens
  misc_RNA (1)...(19): siRNA sense strand
cuuaauuggaguaggcuau

SEQ ID NO: 2569395 - RNA, 19 nt, Homo sapiens
  misc_RNA (1)...(19): siRNA sense strand
caacgaugggacagaauuu

SEQ ID NO: 2569396 - RNA, 19 nt, Homo sapiens
  misc_RNA (1)...(19): siRNA sense strand
accaaacacaggaaagaaa

SEQ ID NO: 2569397 - RNA, 19 nt, Homo sapiens
  misc_RNA (1)...(19): siRNA sense strand
gcuuaauuggaguaggcua

SEQ ID NO: 2569398 - RNA, 19 nt, Homo sapiens
  misc_RNA (1)...(19): siRNA sense strand
ggacagaauuuggaggauc

SEQ ID NO: 2569399 - RNA, 19 nt, Homo sapiens
  misc_RNA (1)...(19): siRNA sense strand
caaagcugccagagauauu

SEQ ID NO: 2569400 - RNA, 19 nt, Homo sapiens
  misc_RNA (1)...(19): siRNA sense strand
cagaaaucgcaauugaaga

SEQ ID NO: 2569401 - RNA, 19 nt, Homo sapiens
  misc_RNA (1)...(19): siRNA sense strand
cauuaaugcuggaggccac

SEQ ID NO: 2569402 - RNA, 19 nt, Homo sapiens
  misc_RNA (1)...(19): siRNA sense strand
ugguagaugggaagagcau

SEQ ID NO: 2569403 - RNA, 19 nt, Homo sapiens
  misc_RNA (1)...(19): siRNA sense strand
gcuaaauaucaguuggauc

SEQ ID NO: 2569404 - RNA, 19 nt, Homo sapiens
  misc_RNA (1)...(19): siRNA sense strand
auaacuuugcagugggcua

SEQ ID NO: 2569405 - RNA, 19 nt, Homo sapiens
  misc_RNA (1)...(19): siRNA sense strand
acugauaacacucugggaa

SEQ ID NO: 2569406 - RNA, 19 nt, Homo sapiens
  misc_RNA (1)...(19): siRNA sense strand
ccaaacacaggaaagaaaa

SEQ ID NO: 2569407 - RNA, 19 nt, Homo sapiens
  misc_RNA (1)...(19): siRNA sense strand
aaaucaaagcugacaagga

SEQ ID NO: 2569408 - RNA, 19 nt, Homo sapiens
  misc_RNA (1)...(19): siRNA sense strand
gggacagaauuuggaggau

SEQ ID NO: 2569409 - RNA, 19 nt, Homo sapiens
  misc_RNA (1)...(19): siRNA sense strand
gugcaaggcaguaggcaaa

SEQ ID NO: 2569410 - RNA, 19 nt, Homo sapiens
  misc_RNA (1)...(19): siRNA sense strand
gugaagaagacauggagaa

SEQ ID NO: 2569411 - RNA, 19 nt, Homo sapiens
  misc_RNA (1)...(19): siRNA sense strand
ggguuugaacugauagaua

SEQ ID NO: 2569412 - RNA, 19 nt, Homo sapiens
  misc_RNA (1)...(19): siRNA sense strand
cgaagagacaucaggaaga

SEQ ID NO: 2569413 - RNA, 19 nt, Homo sapiens
  misc_RNA (1)...(19): siRNA sense strand
gcggauauccaguggccua

SEQ ID NO: 2569414 - RNA, 19 nt, Homo sapiens
  misc_RNA (1)...(19): siRNA sense strand
aggaaaaccuguggagaua

SEQ ID NO: 2569415 - RNA, 19 nt, Homo sapiens
  misc_RNA (1)...(19): siRNA sense strand
caauaaauucacuggauca

SEQ ID NO: 2569416 - RNA, 19 nt, Homo sapiens
  misc_RNA (1)...(19): siRNA sense strand
ggagaauggaggaugugaa

SEQ ID NO: 2569417 - RNA, 19 nt, Homo sapiens
  misc_RNA (1)...(19): siRNA sense strand
guggagaagaugaagaaaa

SEQ ID NO: 2569418 - RNA, 19 nt, Homo sapiens
  misc_RNA (1)...(19): siRNA sense strand
gaugaaaagaacuguguaa

SEQ ID NO: 2569419 - RNA, 19 nt, Homo sapiens
  misc_RNA (1)...(19): siRNA sense strand
agauuggcuuagagaggaa

SEQ ID NO: 2569420 - RNA, 19 nt, Homo sapiens
  misc_RNA (1)...(19): siRNA sense strand
ugacaguggagaagaugaa

SEQ ID NO: 2569421 - RNA, 19 nt, Homo sapiens
  misc_RNA (1)...(19): siRNA sense strand
cagaaguggagaaugcaua

SEQ ID NO: 2569422 - RNA, 19 nt, Homo sapiens
  misc_RNA (1)...(19): siRNA sense strand
cuguggagauauugaugaa

SEQ ID NO: 2569423 - RNA, 19 nt, Homo sapiens
  misc_RNA (1)...(19): siRNA sense strand
ggaaaauucaagugcagaa

SEQ ID NO: 2569424 - RNA, 19 nt, Homo sapiens
  misc_RNA (1)...(19): siRNA sense strand
cuauaauccugcagccauu

SEQ ID NO: 2569425 - RNA, 19 nt, Homo sapiens
  misc_RNA (1)...(19): siRNA sense strand
cuggagaugugauggugaa

SEQ ID NO: 2569426 - RNA, 19 nt, Homo sapiens
  misc_RNA (1)...(19): siRNA sense strand
gagaugugauggugaaaau

SEQ ID NO: 2569427 - RNA, 19 nt, Homo sapiens
  misc_RNA (1)...(19): siRNA sense strand
uaaacgaaugcuugguaaa

SEQ ID NO: 2569428 - RNA, 19 nt, Homo sapiens
  misc_RNA (1)...(19): siRNA sense strand
agauauugaugaaugccaa

SEQ ID NO: 2569429 - RNA, 19 nt, Homo sapiens
  misc_RNA (1)...(19): siRNA sense strand
caucaggaagauuggcuua

SEQ ID NO: 2569430 - RNA, 19 nt, Homo sapiens
  misc_RNA (1)...(19): siRNA sense strand
caguggagaagaugaagaa

SEQ ID NO: 2569431 - RNA, 19 nt, Homo sapiens
  misc_RNA (1)...(19): siRNA sense strand
gaacugauagauaggaaaa

SEQ ID NO: 2569432 - RNA, 19 nt, Homo sapiens
  misc_RNA (1)...(19): siRNA sense strand
aaucugacuucgugugcaa

SEQ ID NO: 2569433 - RNA, 19 nt, Homo sapiens
  misc_RNA (1)...(19): siRNA sense strand
ccaauuugaaugugaggau

SEQ ID NO: 2569434 - RNA, 19 nt, Homo sapiens
  misc_RNA (1)...(19): siRNA sense strand
ggaaaauggccgagacugu

SEQ ID NO: 2569435 - RNA, 19 nt, Homo sapiens
  misc_RNA (1)...(19): siRNA sense strand
aagcaugaacuuugacaau

SEQ ID NO: 2569436 - RNA, 19 nt, Homo sapiens
  misc_RNA (1)...(19): siRNA sense strand
aguggagaaugcauagaua

SEQ ID NO: 2569437 - RNA, 19 nt, Homo sapiens
  misc_RNA (1)...(19): siRNA sense strand
uaguugaacagcuaagaaa

SEQ ID NO: 2569438 - RNA, 19 nt, Homo sapiens
  misc_RNA (1)...(19): siRNA sense strand
cgaugaagucaacugcaaa

SEQ ID NO: 2569439 - RNA, 19 nt, Homo sapiens
  misc_RNA (1)...(19): siRNA sense strand
ugaagaagacauggagaau

SEQ ID NO: 2569440 - RNA, 19 nt, Homo sapiens
  misc_RNA (1)...(19): siRNA sense strand
agacauugguagacacagu

SEQ ID NO: 2569441 - RNA, 19 nt, Homo sapiens
  misc_RNA (1)...(19): siRNA sense strand
caacacaagaacaugaaaa

SEQ ID NO: 2569442 - RNA, 19 nt, Homo sapiens
  misc_RNA (1)...(19): siRNA sense strand
ugaauguagucgugccuau

SEQ ID NO: 2569443 - RNA, 19 nt, Homo sapiens
  misc_RNA (1)...(19): siRNA sense strand
cuuagagaggaaagaauau

SEQ ID NO: 2569444 - RNA, 19 nt, Homo sapiens
  misc_RNA (1)...(19): siRNA sense strand
guugaacagcuaagaaaca

SEQ ID NO: 2569445 - RNA, 19 nt, Homo sapiens
  misc_RNA (1)...(19): siRNA sense strand
gguugguagacauguuaaa

SEQ ID NO: 2569446 - RNA, 19 nt, Homo sapiens
  misc_RNA (1)...(19): siRNA sense strand
ugaacugauagauaggaaa

SEQ ID NO: 2569447 - RNA, 19 nt, Homo sapiens
  misc_RNA (1)...(19): siRNA sense strand
guacuaaagucucuggagu

SEQ ID NO: 2569448 - RNA, 19 nt, Homo sapiens
  misc_RNA (1)...(19): siRNA sense strand
agucuauggugccaauaaa

SEQ ID NO: 2569449 - RNA, 19 nt, Homo sapiens
  misc_RNA (1)...(19): siRNA sense strand
ugauugugacaguggagaa

SEQ ID NO: 2569450 - RNA, 19 nt, Homo sapiens
  misc_RNA (1)...(19): siRNA sense strand
ugugcaaggcaguaggcaa

SEQ ID NO: 2569451 - RNA, 19 nt, Homo sapiens
  misc_RNA (1)...(19): siRNA sense strand
ggcaguaggcaaagagcca

SEQ ID NO: 2569452 - RNA, 19 nt, Homo sapiens
  misc_RNA (1)...(19): siRNA sense strand
ggcuuagagaggaaagaau

SEQ ID NO: 2569453 - RNA, 19 nt, Homo sapiens
  misc_RNA (1)...(19): siRNA sense strand
uguacagccaucagguaaa

SEQ ID NO: 2569454 - RNA, 19 nt, Homo sapiens
  misc_RNA (1)...(19): siRNA sense strand
ugaagaaaacuguggcaau

SEQ ID NO: 2569455 - RNA, 19 nt, Homo sapiens
  misc_RNA (1)...(19): siRNA sense strand
gauggaaccaagaggaagu

SEQ ID NO: 2569456 - RNA, 19 nt, Homo sapiens
  misc_RNA (1)...(19): siRNA sense strand
gggugaaccagcuaaaaua

SEQ ID NO: 2569457 - RNA, 19 nt, Homo sapiens
  misc_RNA (1)...(19): siRNA sense strand
gugcuugggcccuggaaaa

SEQ ID NO: 2569458 - RNA, 19 nt, Homo sapiens
  misc_RNA (1)...(19): siRNA sense strand
gauggaagugugauggaga

SEQ ID NO: 2569459 - RNA, 19 nt, Homo sapiens
  misc_RNA (1)...(19): siRNA sense strand
ggauagauggggaaaauga

SEQ ID NO: 2569460 - RNA, 19 nt, Homo sapiens
  misc_RNA (1)...(19): siRNA sense strand
cuccauagacauugguaga

SEQ ID NO: 2569461 - RNA, 19 nt, Homo sapiens
  misc_RNA (1)...(19): siRNA sense strand
uagauggaaccaagaggaa

SEQ ID NO: 2569462 - RNA, 19 nt, Homo sapiens
  misc_RNA (1)...(19): siRNA sense strand
ggaaaaugaagcagucuau

SEQ ID NO: 2569463 - RNA, 19 nt, Homo sapiens
  misc_RNA (1)...(19): siRNA sense strand
aaauaaugguggauguucu

SEQ ID NO: 2569464 - RNA, 19 nt, Homo sapiens
  misc_RNA (1)...(19): siRNA sense strand
ggcaaagagccaagucuga

SEQ ID NO: 2569465 - RNA, 19 nt, Homo sapiens
  misc_RNA (1)...(19): siRNA sense strand
gggaaaaugaagcagucua

SEQ ID NO: 2569466 - RNA, 19 nt, Homo sapiens
  misc_RNA (1)...(19): siRNA sense strand
caaccugaaugaugcccaa

SEQ ID NO: 2569467 - RNA, 19 nt, Homo sapiens
  misc_RNA (1)...(19): siRNA sense strand
ccauagacauugguagaca

SEQ ID NO: 2569468 - RNA, 19 nt, Homo sapiens
  misc_RNA (1)...(19): siRNA sense strand
guaaagaagacgugugcug

SEQ ID NO: 2569469 - RNA, 19 nt, Homo sapiens
  misc_RNA (1)...(19): siRNA sense strand
aaagaagacgugugcugaa

SEQ ID NO: 2569470 - RNA, 19 nt, Homo sapiens
  misc_RNA (1)...(19): siRNA sense strand
gauauugaugaaugccaaa

SEQ ID NO: 2569471 - RNA, 19 nt, Homo sapiens
  misc_RNA (1)...(19): siRNA sense strand
guggaaaugugauggggau

SEQ ID NO: 2569472 - RNA, 19 nt, Homo sapiens
  misc_RNA (1)...(19): siRNA sense strand
cauggagaauggaggaugu

SEQ ID NO: 2569473 - RNA, 19 nt, Homo sapiens
  misc_RNA (1)...(19): siRNA sense strand
ggaaauagacgcugggaac

SEQ ID NO: 2569474 - RNA, 19 nt, Homo sapiens
  misc_RNA (1)...(19): siRNA sense strand
caugaguaucaaugggaaa

SEQ ID NO: 2569475 - RNA, 19 nt, Homo sapiens
  misc_RNA (1)...(19): siRNA sense strand
caaaagaaauccagaggga

SEQ ID NO: 2569476 - RNA, 19 nt, Homo sapiens
  misc_RNA (1)...(19): siRNA sense strand
gaaacuacaagauggguca

SEQ ID NO: 2569477 - RNA, 19 nt, Homo sapiens
  misc_RNA (1)...(19): siRNA sense strand
aaauagacgcugggaacaa

SEQ ID NO: 2569478 - RNA, 19 nt, Homo sapiens
  misc_RNA (1)...(19): siRNA sense strand
gugcuacauuaaagcgcaa

SEQ ID NO: 2569479 - RNA, 19 nt, Homo sapiens
  misc_RNA (1)...(19): siRNA sense strand
uggaaauagacgcugggaa

SEQ ID NO: 2569480 - RNA, 19 nt, Homo sapiens
  misc_RNA (1)...(19): siRNA sense strand
acauuaaagcgcaagugaa

SEQ ID NO: 2569481 - RNA, 19 nt, Homo sapiens
  misc_RNA (1)...(19): siRNA sense strand
aagagaagugguaagaaaa

SEQ ID NO: 2569482 - RNA, 19 nt, Homo sapiens
  misc_RNA (1)...(19): siRNA sense strand
cuggaggagagaagugcua

SEQ ID NO: 2569483 - RNA, 19 nt, Homo sapiens
  misc_RNA (1)...(19): siRNA sense strand
ggaggagagaagugcuaca

SEQ ID NO: 2569484 - RNA, 19 nt, Homo sapiens
  misc_RNA (1)...(19): siRNA sense strand
cguucggccugcagaguca

SEQ ID NO: 2569485 - RNA, 19 nt, Homo sapiens
  misc_RNA (1)...(19): siRNA sense strand
aagaugggucaauggaaau

SEQ ID NO: 2569486 - RNA, 19 nt, Homo sapiens
  misc_RNA (1)...(19): siRNA sense strand
ccauguagcuggugggugg

SEQ ID NO: 2569487 - RNA, 19 nt, Homo sapiens
  misc_RNA (1)...(19): siRNA sense strand
aagcaauugcaguuaauga

SEQ ID NO: 2569488 - RNA, 19 nt, Homo sapiens
  misc_RNA (1)...(19): siRNA sense strand
guguaaugaaugugggaaa

SEQ ID NO: 2569489 - RNA, 19 nt, Homo sapiens
  misc_RNA (1)...(19): siRNA sense strand
aguucauacuggagagaaa

SEQ ID NO: 2569490 - RNA, 19 nt, Homo sapiens
  misc_RNA (1)...(19): siRNA sense strand
uggaaagaaacaugagaaa

SEQ ID NO: 2569491 - RNA, 19 nt, Homo sapiens
  misc_RNA (1)...(19): siRNA sense strand
auguaaugaaugugggaaa

SEQ ID NO: 2569492 - RNA, 19 nt, Homo sapiens
  misc_RNA (1)...(19): siRNA sense strand
auguaaugaaugugggaaa

SEQ ID NO: 2569493 - RNA, 19 nt, Homo sapiens
  misc_RNA (1)...(19): siRNA sense strand
auguaaugaaugugggaua

SEQ ID NO: 2569494 - RNA, 19 nt, Homo sapiens
  misc_RNA (1)...(19): siRNA sense strand
gggaagucuuuuagguaua

SEQ ID NO: 2569495 - RNA, 19 nt, Homo sapiens
  misc_RNA (1)...(19): siRNA sense strand
ccguaugaguguaaugaau

SEQ ID NO: 2569496 - RNA, 19 nt, Homo sapiens
  misc_RNA (1)...(19): siRNA sense strand
auguaaucaaugugggaaa

SEQ ID NO: 2569497 - RNA, 19 nt, Homo sapiens
  misc_RNA (1)...(19): siRNA sense strand
augugaugcuggagaacua

SEQ ID NO: 2569498 - RNA, 19 nt, Homo sapiens
  misc_RNA (1)...(19): siRNA sense strand
uggagagaaacaugagaaa

SEQ ID NO: 2569499 - RNA, 19 nt, Homo sapiens
  misc_RNA (1)...(19): siRNA sense strand
accucaagcuugugugaaa

SEQ ID NO: 2569500 - RNA, 19 nt, Homo sapiens
  misc_RNA (1)...(19): siRNA sense strand
aauucauacaggugagaaa

SEQ ID NO: 2569501 - RNA, 19 nt, Homo sapiens
  misc_RNA (1)...(19): siRNA sense strand
ccuuaugaauguaacgaau

SEQ ID NO: 2569502 - RNA, 19 nt, Homo sapiens
  misc_RNA (1)...(19): siRNA sense strand
ugauacaaggaaaggcaaa

SEQ ID NO: 2569503 - RNA, 19 nt, Homo sapiens
  misc_RNA (1)...(19): siRNA sense strand
uggcaaagcccauggucau

SEQ ID NO: 2569504 - RNA, 19 nt, Homo sapiens
  misc_RNA (1)...(19): siRNA sense strand
acauguuccuucaaagaaa

SEQ ID NO: 2569505 - RNA, 19 nt, Homo sapiens
  misc_RNA (1)...(19): siRNA sense strand
gggaaguugcagucaagaa

SEQ ID NO: 2569506 - RNA, 19 nt, Homo sapiens
  misc_RNA (1)...(19): siRNA sense strand
cagcuaaagaacacaagaa

SEQ ID NO: 2569507 - RNA, 19 nt, Homo sapiens
  misc_RNA (1)...(19): siRNA sense strand
augcaaugaauguggaaaa

SEQ ID NO: 2569508 - RNA, 19 nt, Homo sapiens
  misc_RNA (1)...(19): siRNA sense strand
ugacaaagccagagaccgu

SEQ ID NO: 2569509 - RNA, 19 nt, Homo sapiens
  misc_RNA (1)...(19): siRNA sense strand
uagcaagacccaagcaaaa

SEQ ID NO: 2569510 - RNA, 19 nt, Homo sapiens
  misc_RNA (1)...(19): siRNA sense strand
gcuugaaaauauccagaaa

SEQ ID NO: 2569511 - RNA, 19 nt, Homo sapiens
  misc_RNA (1)...(19): siRNA sense strand
guggaaagguucucagcca

SEQ ID NO: 2569512 - RNA, 19 nt, Homo sapiens
  misc_RNA (1)...(19): siRNA sense strand
aaacaaacuccucagggaa

SEQ ID NO: 2569513 - RNA, 19 nt, Homo sapiens
  misc_RNA (1)...(19): siRNA sense strand
ccggaggagaagugcggaa

SEQ ID NO: 2569514 - RNA, 19 nt, Homo sapiens
  misc_RNA (1)...(19): siRNA sense strand
uaaacaaauugaaggccuu

SEQ ID NO: 2569515 - RNA, 19 nt, Homo sapiens
  misc_RNA (1)...(19): siRNA sense strand
cuggaaagaaacaugagaa

SEQ ID NO: 2569516 - RNA, 19 nt, Homo sapiens
  misc_RNA (1)...(19): siRNA sense strand
agaaaccguaugaguguaa

SEQ ID NO: 2569517 - RNA, 19 nt, Homo sapiens
  misc_RNA (1)...(19): siRNA sense strand
ccauaaacaaggacucauu

SEQ ID NO: 2569518 - RNA, 19 nt, Homo sapiens
  misc_RNA (1)...(19): siRNA sense strand
aacacauacaggugaaaua

SEQ ID NO: 2569519 - RNA, 19 nt, Homo sapiens
  misc_RNA (1)...(19): siRNA sense strand
gagaacucauacaggugaa

SEQ ID NO: 2569520 - RNA, 19 nt, Homo sapiens
  misc_RNA (1)...(19): siRNA sense strand
gcuaaagaacacaagaagu

SEQ ID NO: 2569521 - RNA, 19 nt, Homo sapiens
  misc_RNA (1)...(19): siRNA sense strand
acacaggugagaagccaua

SEQ ID NO: 2569522 - RNA, 19 nt, Homo sapiens
  misc_RNA (1)...(19): siRNA sense strand
ugggauagccuuuagccaa

SEQ ID NO: 2569523 - RNA, 19 nt, Homo sapiens
  misc_RNA (1)...(19): siRNA sense strand
ccauauuaaacaggacaaa

SEQ ID NO: 2569524 - RNA, 19 nt, Homo sapiens
  misc_RNA (1)...(19): siRNA sense strand
auguaaugaguguggaaaa

SEQ ID NO: 2569525 - RNA, 19 nt, Homo sapiens
  misc_RNA (1)...(19): siRNA sense strand
cucaagaaacuguguaaaa

SEQ ID NO: 2569526 - RNA, 19 nt, Homo sapiens
  misc_RNA (1)...(19): siRNA sense strand
ggagagaaacaugagaaau

SEQ ID NO: 2569527 - RNA, 19 nt, Homo sapiens
  misc_RNA (1)...(19): siRNA sense strand
aaauguaaugaguguggaa

SEQ ID NO: 2569528 - RNA, 19 nt, Homo sapiens
  misc_RNA (1)...(19): siRNA sense strand
ggacaaaauucaaacugga

SEQ ID NO: 2569529 - RNA, 19 nt, Homo sapiens
  misc_RNA (1)...(19): siRNA sense strand
ccucauuguacaucagaga

SEQ ID NO: 2569530 - RNA, 19 nt, Homo sapiens
  misc_RNA (1)...(19): siRNA sense strand
uguaaugaaugugggaaaa

SEQ ID NO: 2569531 - RNA, 19 nt, Homo sapiens
  misc_RNA (1)...(19): siRNA sense strand
agaagaaaacucaagcuaa

SEQ ID NO: 2569532 - RNA, 19 nt, Homo sapiens
  misc_RNA (1)...(19): siRNA sense strand
aaguugcagucaagaagaa

SEQ ID NO: 2569533 - RNA, 19 nt, Homo sapiens
  misc_RNA (1)...(19): siRNA sense strand
ccugaucacucaagaaacu

SEQ ID NO: 2569534 - RNA, 19 nt, Homo sapiens
  misc_RNA (1)...(19): siRNA sense strand
auguauucaguguggcaaa

SEQ ID NO: 2569535 - RNA, 19 nt, Homo sapiens
  misc_RNA (1)...(19): siRNA sense strand
cggccagaacagugagaua

SEQ ID NO: 2569536 - RNA, 19 nt, Homo sapiens
  misc_RNA (1)...(19): siRNA sense strand
guacagaacaggagaaaau

SEQ ID NO: 2569537 - RNA, 19 nt, Homo sapiens
  misc_RNA (1)...(19): siRNA sense strand
cuacugaggaggagaagaa

SEQ ID NO: 2569538 - RNA, 19 nt, Homo sapiens
  misc_RNA (1)...(19): siRNA sense strand
ccucacaugauaagagaua

SEQ ID NO: 2569539 - RNA, 19 nt, Homo sapiens
  misc_RNA (1)...(19): siRNA sense strand
gcuccaaagauuuagcaua

SEQ ID NO: 2569540 - RNA, 19 nt, Homo sapiens
  misc_RNA (1)...(19): siRNA sense strand
acuuaaagaacaugaccaa

SEQ ID NO: 2569541 - RNA, 19 nt, Homo sapiens
  misc_RNA (1)...(19): siRNA sense strand
ccuuaugguguuauggaaa

SEQ ID NO: 2569542 - RNA, 19 nt, Homo sapiens
  misc_RNA (1)...(19): siRNA sense strand
aggcacuaugggagaaaua

SEQ ID NO: 2569543 - RNA, 19 nt, Homo sapiens
  misc_RNA (1)...(19): siRNA sense strand
gcaccauuuccaagacaaa

SEQ ID NO: 2569544 - RNA, 19 nt, Homo sapiens
  misc_RNA (1)...(19): siRNA sense strand
aggagaagaaggaguguga

SEQ ID NO: 2569545 - RNA, 19 nt, Homo sapiens
  misc_RNA (1)...(19): siRNA sense strand
agaagauugucaagcaaau

SEQ ID NO: 2569546 - RNA, 19 nt, Homo sapiens
  misc_RNA (1)...(19): siRNA sense strand
ccagcgaagauguggauau

SEQ ID NO: 2569547 - RNA, 19 nt, Homo sapiens
  misc_RNA (1)...(19): siRNA sense strand
gaugaguuccggaggagaa

SEQ ID NO: 2569548 - RNA, 19 nt, Homo sapiens
  misc_RNA (1)...(19): siRNA sense strand
ucacaugauaagagauaga

SEQ ID NO: 2569549 - RNA, 19 nt, Homo sapiens
  misc_RNA (1)...(19): siRNA sense strand
ugccagaguuggagaagau

SEQ ID NO: 2569550 - RNA, 19 nt, Homo sapiens
  misc_RNA (1)...(19): siRNA sense strand
cacagugaaacgagaguua

SEQ ID NO: 2569551 - RNA, 19 nt, Homo sapiens
  misc_RNA (1)...(19): siRNA sense strand
aguuagcacuagugaauga

SEQ ID NO: 2569552 - RNA, 19 nt, Homo sapiens
  misc_RNA (1)...(19): siRNA sense strand
gcaucgagcagaaggacuu

SEQ ID NO: 2569553 - RNA, 19 nt, Homo sapiens
  misc_RNA (1)...(19): siRNA sense strand
cagcaaaaguauacuguga

SEQ ID NO: 2569554 - RNA, 19 nt, Homo sapiens
  misc_RNA (1)...(19): siRNA sense strand
ccuaaagacauacagacaa

SEQ ID NO: 2569555 - RNA, 19 nt, Homo sapiens
  misc_RNA (1)...(19): siRNA sense strand
ucuaaaaggaucagugaau

SEQ ID NO: 2569556 - RNA, 19 nt, Homo sapiens
  misc_RNA (1)...(19): siRNA sense strand
gaacugaacugguggacug

SEQ ID NO: 2569557 - RNA, 19 nt, Homo sapiens
  misc_RNA (1)...(19): siRNA sense strand
uagcauaccagaugacaau

SEQ ID NO: 2569558 - RNA, 19 nt, Homo sapiens
  misc_RNA (1)...(19): siRNA sense strand
caauacgggcgaugagaga

SEQ ID NO: 2569559 - RNA, 19 nt, Homo sapiens
  misc_RNA (1)...(19): siRNA sense strand
gagaagaaggagugugaug

SEQ ID NO: 2569560 - RNA, 19 nt, Homo sapiens
  misc_RNA (1)...(19): siRNA sense strand
agacaaugcugugugggaa

SEQ ID NO: 2569561 - RNA, 19 nt, Homo sapiens
  misc_RNA (1)...(19): siRNA sense strand
ggcacuaacgugggagaaa

SEQ ID NO: 2569562 - RNA, 19 nt, Homo sapiens
  misc_RNA (1)...(19): siRNA sense strand
ccagggugauauuggaaca

SEQ ID NO: 2569563 - RNA, 19 nt, Homo sapiens
  misc_RNA (1)...(19): siRNA sense strand
uaagggacguggaggcgaa

SEQ ID NO: 2569564 - RNA, 19 nt, Homo sapiens
  misc_RNA (1)...(19): siRNA sense strand
ucuuaagaguagacaagga

SEQ ID NO: 2569565 - RNA, 19 nt, Homo sapiens
  misc_RNA (1)...(19): siRNA sense strand
aacaauaagaggcgaguca

SEQ ID NO: 2569566 - RNA, 19 nt, Homo sapiens
  misc_RNA (1)...(19): siRNA sense strand
ccuaaugauguuucaguau

SEQ ID NO: 2569567 - RNA, 19 nt, Homo sapiens
  misc_RNA (1)...(19): siRNA sense strand
ccggaguuauguacggcaa

SEQ ID NO: 2569568 - RNA, 19 nt, Homo sapiens
  misc_RNA (1)...(19): siRNA sense strand
uugagaaauuucacccaaa

SEQ ID NO: 2569569 - RNA, 19 nt, Homo sapiens
  misc_RNA (1)...(19): siRNA sense strand
gcucuaacaaugacaggau

SEQ ID NO: 2569570 - RNA, 19 nt, Homo sapiens
  misc_RNA (1)...(19): siRNA sense strand
uguggaugaccuagagauu

SEQ ID NO: 2569571 - RNA, 19 nt, Homo sapiens
  misc_RNA (1)...(19): siRNA sense strand
acucacagccucagcaaaa

SEQ ID NO: 2569572 - RNA, 19 nt, Homo sapiens
  misc_RNA (1)...(19): siRNA sense strand
agguacagaacaggagaaa

SEQ ID NO: 2569573 - RNA, 19 nt, Homo sapiens
  misc_RNA (1)...(19): siRNA sense strand
gcaaauacggccagaacag

SEQ ID NO: 2569574 - RNA, 19 nt, Homo sapiens
  misc_RNA (1)...(19): siRNA sense strand
cugaaagaaguuaaagcuu

SEQ ID NO: 2569575 - RNA, 19 nt, Homo sapiens
  misc_RNA (1)...(19): siRNA sense strand
cgagaagauaacugccauu

SEQ ID NO: 2569576 - RNA, 19 nt, Homo sapiens
  misc_RNA (1)...(19): siRNA sense strand
ggacucaagcuguuggcau

SEQ ID NO: 2569577 - RNA, 19 nt, Homo sapiens
  misc_RNA (1)...(19): siRNA sense strand
uguuuaaggucuauugcau

SEQ ID NO: 2569578 - RNA, 19 nt, Homo sapiens
  misc_RNA (1)...(19): siRNA sense strand
cuccaaagauuuagcauac

SEQ ID NO: 2569579 - RNA, 19 nt, Homo sapiens
  misc_RNA (1)...(19): siRNA sense strand
ucacacauuuggaaggcau

SEQ ID NO: 2569580 - RNA, 19 nt, Homo sapiens
  misc_RNA (1)...(19): siRNA sense strand
cauuauuucgccaggguga

SEQ ID NO: 2569581 - RNA, 19 nt, Homo sapiens
  misc_RNA (1)...(19): siRNA sense strand
accuaaagacauacagaca

SEQ ID NO: 2569582 - RNA, 19 nt, Homo sapiens
  misc_RNA (1)...(19): siRNA sense strand
cugaggaggagaagaagga

SEQ ID NO: 2569583 - RNA, 19 nt, Homo sapiens
  misc_RNA (1)...(19): siRNA sense strand
gccagaggacuguggauga

SEQ ID NO: 2569584 - RNA, 19 nt, Homo sapiens
  misc_RNA (1)...(19): siRNA sense strand
gcaaguuagcacuagugaa

SEQ ID NO: 2569585 - RNA, 19 nt, Homo sapiens
  misc_RNA (1)...(19): siRNA sense strand
caagaugaguuccggagga

SEQ ID NO: 2569586 - RNA, 19 nt, Homo sapiens
  misc_RNA (1)...(19): siRNA sense strand
ggaacaaacugguaugcug

SEQ ID NO: 2569587 - RNA, 19 nt, Homo sapiens
  misc_RNA (1)...(19): siRNA sense strand
gaacaggagaaaauggauu

SEQ ID NO: 2569588 - RNA, 19 nt, Homo sapiens
  misc_RNA (1)...(19): siRNA sense strand
ggauuaugcccucaacaau

SEQ ID NO: 2569589 - RNA, 19 nt, Homo sapiens
  misc_RNA (1)...(19): siRNA sense strand
gagaagauccucagagcug

SEQ ID NO: 2569590 - RNA, 19 nt, Homo sapiens
  misc_RNA (1)...(19): siRNA sense strand
auguagucauuuacggcaa

SEQ ID NO: 2569591 - RNA, 19 nt, Homo sapiens
  misc_RNA (1)...(19): siRNA sense strand
agauagcagcccacuguaa

SEQ ID NO: 2569592 - RNA, 19 nt, Homo sapiens
  misc_RNA (1)...(19): siRNA sense strand
gaggaggagaagaaggagu

SEQ ID NO: 2569593 - RNA, 19 nt, Homo sapiens
  misc_RNA (1)...(19): siRNA sense strand
augucuuggugcuggagaa

SEQ ID NO: 2569594 - RNA, 19 nt, Homo sapiens
  misc_RNA (1)...(19): siRNA sense strand
cagacaaugcuguguggga

SEQ ID NO: 2569595 - RNA, 19 nt, Homo sapiens
  misc_RNA (1)...(19): siRNA sense strand
aaggagaugacuucggcaa

SEQ ID NO: 2569596 - RNA, 19 nt, Homo sapiens
  misc_RNA (1)...(19): siRNA sense strand
ccagcagggaacagagcuu

SEQ ID NO: 2569597 - RNA, 19 nt, Homo sapiens
  misc_RNA (1)...(19): siRNA sense strand
ccaucuguacccugggaau

SEQ ID NO: 2569598 - RNA, 19 nt, Homo sapiens
  misc_RNA (1)...(19): siRNA sense strand
aguauaagcacaugggcua

SEQ ID NO: 2569599 - RNA, 19 nt, Homo sapiens
  misc_RNA (1)...(19): siRNA sense strand
cagaacaagaaguggaaaa

SEQ ID NO: 2569600 - RNA, 19 nt, Homo sapiens
  misc_RNA (1)...(19): siRNA sense strand
cgacgugucucauggcaga

SEQ ID NO: 2569601 - RNA, 19 nt, Homo sapiens
  misc_RNA (1)...(19): siRNA sense strand
gaggcgacuuggaggcuga

SEQ ID NO: 2569602 - RNA, 19 nt, Homo sapiens
  misc_RNA (1)...(19): siRNA sense strand
ccuuaugaugugugggcca

SEQ ID NO: 2569603 - RNA, 19 nt, Homo sapiens
  misc_RNA (1)...(19): siRNA sense strand
gcgcauaugcacucaaaau

SEQ ID NO: 2569604 - RNA, 19 nt, Homo sapiens
  misc_RNA (1)...(19): siRNA sense strand
uggcagaacaagaagugga

SEQ ID NO: 2569605 - RNA, 19 nt, Homo sapiens
  misc_RNA (1)...(19): siRNA sense strand
auauauuuguggugcggga

SEQ ID NO: 2569606 - RNA, 19 nt, Homo sapiens
  misc_RNA (1)...(19): siRNA sense strand
gggaagaaguuuaagucga

SEQ ID NO: 2569607 - RNA, 19 nt, Homo sapiens
  misc_RNA (1)...(19): siRNA sense strand
agguggaacuguagacauu

SEQ ID NO: 2569608 - RNA, 19 nt, Homo sapiens
  misc_RNA (1)...(19): siRNA sense strand
cagacauaacugugcauaa

SEQ ID NO: 2569609 - RNA, 19 nt, Homo sapiens
  misc_RNA (1)...(19): siRNA sense strand
ugaucaaauuguuguggaa

SEQ ID NO: 2569610 - RNA, 19 nt, Homo sapiens
  misc_RNA (1)...(19): siRNA sense strand
uggaagugaucguaggaga

SEQ ID NO: 2569611 - RNA, 19 nt, Homo sapiens
  misc_RNA (1)...(19): siRNA sense strand
acaaaaugcacaaguguaa

SEQ ID NO: 2569612 - RNA, 19 nt, Homo sapiens
  misc_RNA (1)...(19): siRNA sense strand
ggagagugagccugagaau

SEQ ID NO: 2569613 - RNA, 19 nt, Homo sapiens
  misc_RNA (1)...(19): siRNA sense strand
ucaugauaguguaguggaa

SEQ ID NO: 2569614 - RNA, 19 nt, Homo sapiens
  misc_RNA (1)...(19): siRNA sense strand
uagaaagggauuuaggcaa

SEQ ID NO: 2569615 - RNA, 19 nt, Homo sapiens
  misc_RNA (1)...(19): siRNA sense strand
gcacauaaugcgacaucau

SEQ ID NO: 2569616 - RNA, 19 nt, Homo sapiens
  misc_RNA (1)...(19): siRNA sense strand
aauuacaacaagagccaaa

SEQ ID NO: 2569617 - RNA, 19 nt, Homo sapiens
  misc_RNA (1)...(19): siRNA sense strand
caagagauguagaaaggga

SEQ ID NO: 2569618 - RNA, 19 nt, Homo sapiens
  misc_RNA (1)...(19): siRNA sense strand
guacacacauggaugguga

SEQ ID NO: 2569619 - RNA, 19 nt, Homo sapiens
  misc_RNA (1)...(19): siRNA sense strand
uugaaaaggcacaugaaaa

SEQ ID NO: 2569620 - RNA, 19 nt, Homo sapiens
  misc_RNA (1)...(19): siRNA sense strand
gauuuaggcaacagaguga

SEQ ID NO: 2569621 - RNA, 19 nt, Homo sapiens
  misc_RNA (1)...(19): siRNA sense strand
aggcaguaccaaacagcaa

SEQ ID NO: 2569622 - RNA, 19 nt, Homo sapiens
  misc_RNA (1)...(19): siRNA sense strand
uagacauuguggagaguga

SEQ ID NO: 2569623 - RNA, 19 nt, Homo sapiens
  misc_RNA (1)...(19): siRNA sense strand
ggcaacagagugagcuuaa

SEQ ID NO: 2569624 - RNA, 19 nt, Homo sapiens
  misc_RNA (1)...(19): siRNA sense strand
ugacauuacuucagccuca

SEQ ID NO: 2569625 - RNA, 19 nt, Homo sapiens
  misc_RNA (1)...(19): siRNA sense strand
aagugugacaugugugaua

SEQ ID NO: 2569626 - RNA, 19 nt, Homo sapiens
  misc_RNA (1)...(19): siRNA sense strand
cauaaugcgacaucauaaa

SEQ ID NO: 2569627 - RNA, 19 nt, Homo sapiens
  misc_RNA (1)...(19): siRNA sense strand
agaaagggauuuaggcaac

SEQ ID NO: 2569628 - RNA, 19 nt, Homo sapiens
  misc_RNA (1)...(19): siRNA sense strand
agccagaagaugaagauuu

SEQ ID NO: 2569629 - RNA, 19 nt, Homo sapiens
  misc_RNA (1)...(19): siRNA sense strand
cuucugacuuucucggaua

SEQ ID NO: 2569630 - RNA, 19 nt, Homo sapiens
  misc_RNA (1)...(19): siRNA sense strand
acauaaugcgacaucauaa

SEQ ID NO: 2569631 - RNA, 19 nt, Homo sapiens
  misc_RNA (1)...(19): siRNA sense strand
cggcagacuggcuaaacaa

SEQ ID NO: 2569632 - RNA, 19 nt, Homo sapiens
  misc_RNA (1)...(19): siRNA sense strand
cggugugaguacugcaaga

SEQ ID NO: 2569633 - RNA, 19 nt, Homo sapiens
  misc_RNA (1)...(19): siRNA sense strand
gcgacaucauaaagaaguu

SEQ ID NO: 2569634 - RNA, 19 nt, Homo sapiens
  misc_RNA (1)...(19): siRNA sense strand
cguaguuucagaagaagua

SEQ ID NO: 2569635 - RNA, 19 nt, Homo sapiens
  misc_RNA (1)...(19): siRNA sense strand
cuuggaugaugcuggcaaa

SEQ ID NO: 2569636 - RNA, 19 nt, Homo sapiens
  misc_RNA (1)...(19): siRNA sense strand
acuaccaacaagaagauaa

SEQ ID NO: 2569637 - RNA, 19 nt, Homo sapiens
  misc_RNA (1)...(19): siRNA sense strand
aagaaguauugguagcaga

SEQ ID NO: 2569638 - RNA, 19 nt, Homo sapiens
  misc_RNA (1)...(19): siRNA sense strand
gcacuugcccugaggucau

SEQ ID NO: 2569639 - RNA, 19 nt, Homo sapiens
  misc_RNA (1)...(19): siRNA sense strand
gcagcaaauggaugacaau

SEQ ID NO: 2569640 - RNA, 19 nt, Homo sapiens
  misc_RNA (1)...(19): siRNA sense strand
auacgagacagcugaacaa

SEQ ID NO: 2569641 - RNA, 19 nt, Homo sapiens
  misc_RNA (1)...(19): siRNA sense strand
cagaaaagaaccagcacau

SEQ ID NO: 2569642 - RNA, 19 nt, Homo sapiens
  misc_RNA (1)...(19): siRNA sense strand
cagaagaaguauugguagc

SEQ ID NO: 2569643 - RNA, 19 nt, Homo sapiens
  misc_RNA (1)...(19): siRNA sense strand
aggaugaugacaaaggcaa

SEQ ID NO: 2569644 - RNA, 19 nt, Homo sapiens
  misc_RNA (1)...(19): siRNA sense strand
aaaccaaagaaaaggagaa

SEQ ID NO: 2569645 - RNA, 19 nt, Homo sapiens
  misc_RNA (1)...(19): siRNA sense strand
cuuuaagauugcagaucca

SEQ ID NO: 2569646 - RNA, 19 nt, Homo sapiens
  misc_RNA (1)...(19): siRNA sense strand
ugaacaaggguuauugaau

SEQ ID NO: 2569647 - RNA, 19 nt, Homo sapiens
  misc_RNA (1)...(19): siRNA sense strand
ccucaaugucuaugccaga

SEQ ID NO: 2569648 - RNA, 19 nt, Homo sapiens
  misc_RNA (1)...(19): siRNA sense strand
agauguagaaagggauuua

SEQ ID NO: 2569649 - RNA, 19 nt, Homo sapiens
  misc_RNA (1)...(19): siRNA sense strand
guguaguggaagcagaaau

SEQ ID NO: 2569650 - RNA, 19 nt, Homo sapiens
  misc_RNA (1)...(19): siRNA sense strand
uguaguggaagcagaaauu

SEQ ID NO: 2569651 - RNA, 19 nt, Homo sapiens
  misc_RNA (1)...(19): siRNA sense strand
cucacaaaauggugcauaa

SEQ ID NO: 2569652 - RNA, 19 nt, Homo sapiens
  misc_RNA (1)...(19): siRNA sense strand
ugauuugaaacgacacaua

SEQ ID NO: 2569653 - RNA, 19 nt, Homo sapiens
  misc_RNA (1)...(19): siRNA sense strand
gugugacaugugugauaaa

SEQ ID NO: 2569654 - RNA, 19 nt, Homo sapiens
  misc_RNA (1)...(19): siRNA sense strand
ccucugaagcagucauaga

SEQ ID NO: 2569655 - RNA, 19 nt, Homo sapiens
  misc_RNA (1)...(19): siRNA sense strand
cggaaauugauccuuguaa

SEQ ID NO: 2569656 - RNA, 19 nt, Homo sapiens
  misc_RNA (1)...(19): siRNA sense strand
caacaagagccaaacucau

SEQ ID NO: 2569657 - RNA, 19 nt, Homo sapiens
  misc_RNA (1)...(19): siRNA sense strand
agagauguagaaagggauu

SEQ ID NO: 2569658 - RNA, 19 nt, Homo sapiens
  misc_RNA (1)...(19): siRNA sense strand
agcaaauggaugacaauga

SEQ ID NO: 2569659 - RNA, 19 nt, Homo sapiens
  misc_RNA (1)...(19): siRNA sense strand
caaauggaugacaaugaaa

SEQ ID NO: 2569660 - RNA, 19 nt, Homo sapiens
  misc_RNA (1)...(19): siRNA sense strand
ugguaauaauucugaugga

SEQ ID NO: 2569661 - RNA, 19 nt, Homo sapiens
  misc_RNA (1)...(19): siRNA sense strand
auguauggaaugugggaaa

SEQ ID NO: 2569662 - RNA, 19 nt, Homo sapiens
  misc_RNA (1)...(19): siRNA sense strand
auguaagcacugugggaaa

SEQ ID NO: 2569663 - RNA, 19 nt, Homo sapiens
  misc_RNA (1)...(19): siRNA sense strand
auguaagcaaugugggaaa

SEQ ID NO: 2569664 - RNA, 19 nt, Homo sapiens
  misc_RNA (1)...(19): siRNA sense strand
auguaagcaaugugggaaa

SEQ ID NO: 2569665 - RNA, 19 nt, Homo sapiens
  misc_RNA (1)...(19): siRNA sense strand
aacucauacuggagagaaa

SEQ ID NO: 2569666 - RNA, 19 nt, Homo sapiens
  misc_RNA (1)...(19): siRNA sense strand
gcauugaagaucaguacaa

SEQ ID NO: 2569667 - RNA, 19 nt, Homo sapiens
  misc_RNA (1)...(19): siRNA sense strand
caggaaaccuucaggaauc

SEQ ID NO: 2569668 - RNA, 19 nt, Homo sapiens
  misc_RNA (1)...(19): siRNA sense strand
gcaggaaaccuucaggaau

SEQ ID NO: 2569669 - RNA, 19 nt, Homo sapiens
  misc_RNA (1)...(19): siRNA sense strand
ccuuaugugugcauggaau

SEQ ID NO: 2569670 - RNA, 19 nt, Homo sapiens
  misc_RNA (1)...(19): siRNA sense strand
aacucacacuggagagaaa

SEQ ID NO: 2569671 - RNA, 19 nt, Homo sapiens
  misc_RNA (1)...(19): siRNA sense strand
ccuucagaaacacgagaaa

SEQ ID NO: 2569672 - RNA, 19 nt, Homo sapiens
  misc_RNA (1)...(19): siRNA sense strand
cccuaugaauguauggaau

SEQ ID NO: 2569673 - RNA, 19 nt, Homo sapiens
  misc_RNA (1)...(19): siRNA sense strand
ugggaaagccuuagguuuu

SEQ ID NO: 2569674 - RNA, 19 nt, Homo sapiens
  misc_RNA (1)...(19): siRNA sense strand
cauaggaaacaaaggggaa

SEQ ID NO: 2569675 - RNA, 19 nt, Homo sapiens
  misc_RNA (1)...(19): siRNA sense strand
acgcuaugaauguaagcaa

SEQ ID NO: 2569676 - RNA, 19 nt, Homo sapiens
  misc_RNA (1)...(19): siRNA sense strand
cgcuaugaauguaagcaau

SEQ ID NO: 2569677 - RNA, 19 nt, Homo sapiens
  misc_RNA (1)...(19): siRNA sense strand
cgccaguucccuucagaaa

SEQ ID NO: 2569678 - RNA, 19 nt, Homo sapiens
  misc_RNA (1)...(19): siRNA sense strand
aggauguggcugugaacuu

SEQ ID NO: 2569679 - RNA, 19 nt, Homo sapiens
  misc_RNA (1)...(19): siRNA sense strand
agaccagagcauugaagau

SEQ ID NO: 2569680 - RNA, 19 nt, Homo sapiens
  misc_RNA (1)...(19): siRNA sense strand
gaauguaagcaauguggga

SEQ ID NO: 2569681 - RNA, 19 nt, Homo sapiens
  misc_RNA (1)...(19): siRNA sense strand
ccagaagaaucucuauaga

SEQ ID NO: 2569682 - RNA, 19 nt, Homo sapiens
  misc_RNA (1)...(19): siRNA sense strand
uucagauacaucagagaaa

SEQ ID NO: 2569683 - RNA, 19 nt, Homo sapiens
  misc_RNA (1)...(19): siRNA sense strand
ugaaagaacucauacugga

SEQ ID NO: 2569684 - RNA, 19 nt, Homo sapiens
  misc_RNA (1)...(19): siRNA sense strand
augucagaaauguggcaaa

SEQ ID NO: 2569685 - RNA, 19 nt, Homo sapiens
  misc_RNA (1)...(19): siRNA sense strand
gaauguaagcacuguggga

SEQ ID NO: 2569686 - RNA, 19 nt, Homo sapiens
  misc_RNA (1)...(19): siRNA sense strand
ccauguaagcaauguggga

SEQ ID NO: 2569687 - RNA, 19 nt, Homo sapiens
  misc_RNA (1)...(19): siRNA sense strand
gagacgugaugcaggaaac

SEQ ID NO: 2569688 - RNA, 19 nt, Homo sapiens
  misc_RNA (1)...(19): siRNA sense strand
cauugaagaucaguacaaa

SEQ ID NO: 2569689 - RNA, 19 nt, Homo sapiens
  misc_RNA (1)...(19): siRNA sense strand
auaagaaagaagaggcuga

SEQ ID NO: 2569690 - RNA, 19 nt, Homo sapiens
  misc_RNA (1)...(19): siRNA sense strand
ggauagaugguguugguga

SEQ ID NO: 2569691 - RNA, 19 nt, Homo sapiens
  misc_RNA (1)...(19): siRNA sense strand
aagaagaggcugagggguu

SEQ ID NO: 2569692 - RNA, 19 nt, Homo sapiens
  misc_RNA (1)...(19): siRNA sense strand
gcauaagaaagaagaggcu

SEQ ID NO: 2569693 - RNA, 19 nt, Homo sapiens
  misc_RNA (1)...(19): siRNA sense strand
aagaaaaggucuggguaau

SEQ ID NO: 2569694 - RNA, 19 nt, Homo sapiens
  misc_RNA (1)...(19): siRNA sense strand
cgggauugaaacaaagaca

SEQ ID NO: 2569695 - RNA, 19 nt, Homo sapiens
  misc_RNA (1)...(19): siRNA sense strand
cauucuauucacagagaca

SEQ ID NO: 2569696 - RNA, 19 nt, Homo sapiens
  misc_RNA (1)...(19): siRNA sense strand
cuaccaguguugugccaga

SEQ ID NO: 2569697 - RNA, 19 nt, Homo sapiens
  misc_RNA (1)...(19): siRNA sense strand
gguaagugaaggagcaaau

SEQ ID NO: 2569698 - RNA, 19 nt, Homo sapiens
  misc_RNA (1)...(19): siRNA sense strand
uguacaaacaccagaagaa

SEQ ID NO: 2569699 - RNA, 19 nt, Homo sapiens
  misc_RNA (1)...(19): siRNA sense strand
ucaagaaauugguggagca

SEQ ID NO: 2569700 - RNA, 19 nt, Homo sapiens
  misc_RNA (1)...(19): siRNA sense strand
cgggaugaggaaugagcaa

SEQ ID NO: 2569701 - RNA, 19 nt, Homo sapiens
  misc_RNA (1)...(19): siRNA sense strand
gugcagaagaauuggggaa

SEQ ID NO: 2569702 - RNA, 19 nt, Homo sapiens
  misc_RNA (1)...(19): siRNA sense strand
ucugaaagaaaccaagaaa

SEQ ID NO: 2569703 - RNA, 19 nt, Homo sapiens
  misc_RNA (1)...(19): siRNA sense strand
cgugguaagugaaggagca

SEQ ID NO: 2569704 - RNA, 19 nt, Homo sapiens
  misc_RNA (1)...(19): siRNA sense strand
ggagcaaauacuauggaca

SEQ ID NO: 2569705 - RNA, 19 nt, Homo sapiens
  misc_RNA (1)...(19): siRNA sense strand
ccagagagcaaguggugga

SEQ ID NO: 2569706 - RNA, 19 nt, Homo sapiens
  misc_RNA (1)...(19): siRNA sense strand
uacuguugguagugaauaa

SEQ ID NO: 2569707 - RNA, 19 nt, Homo sapiens
  misc_RNA (1)...(19): siRNA sense strand
uggcaaaugcaaacaugaa

SEQ ID NO: 2569708 - RNA, 19 nt, Homo sapiens
  misc_RNA (1)...(19): siRNA sense strand
ccuucuuaucaucgggaaa

SEQ ID NO: 2569709 - RNA, 19 nt, Homo sapiens
  misc_RNA (1)...(19): siRNA sense strand
cgggaaaggugcugcuuac

SEQ ID NO: 2569710 - RNA, 19 nt, Homo sapiens
  misc_RNA (1)...(19): siRNA sense strand
cuguguaggugcagccaga

SEQ ID NO: 2569711 - RNA, 19 nt, Homo sapiens
  misc_RNA (1)...(19): siRNA sense strand
gcgguauggcaaaugcaaa

SEQ ID NO: 2569712 - RNA, 19 nt, Homo sapiens
  misc_RNA (1)...(19): siRNA sense strand
gugcuaaagucaucgcuca

SEQ ID NO: 2569713 - RNA, 19 nt, Homo sapiens
  misc_RNA (1)...(19): siRNA sense strand
uguuauuaggaaugccaaa

SEQ ID NO: 2569714 - RNA, 19 nt, Homo sapiens
  misc_RNA (1)...(19): siRNA sense strand
caaucauacuguugguagu

SEQ ID NO: 2569715 - RNA, 19 nt, Homo sapiens
  misc_RNA (1)...(19): siRNA sense strand
cagccagaugugaaguuua

SEQ ID NO: 2569716 - RNA, 19 nt, Homo sapiens
  misc_RNA (1)...(19): siRNA sense strand
gugaaggagcaaauacuau

SEQ ID NO: 2569717 - RNA, 19 nt, Homo sapiens
  misc_RNA (1)...(19): siRNA sense strand
acauacaugcugucacuaa

SEQ ID NO: 2569718 - RNA, 19 nt, Homo sapiens
  misc_RNA (1)...(19): siRNA sense strand
acaucaugauugagccaca

SEQ ID NO: 2569719 - RNA, 19 nt, Homo sapiens
  misc_RNA (1)...(19): siRNA sense strand
caagaaauugguggagcaa

SEQ ID NO: 2569720 - RNA, 19 nt, Homo sapiens
  misc_RNA (1)...(19): siRNA sense strand
agguacaacuugccaauca

SEQ ID NO: 2569721 - RNA, 19 nt, Homo sapiens
  misc_RNA (1)...(19): siRNA sense strand
gcaucaaguacaucgggau

SEQ ID NO: 2569722 - RNA, 19 nt, Homo sapiens
  misc_RNA (1)...(19): siRNA sense strand
caagaaacaaugggagcuu

SEQ ID NO: 2569723 - RNA, 19 nt, Homo sapiens
  misc_RNA (1)...(19): siRNA sense strand
ucuauaaaguacauggaac

SEQ ID NO: 2569724 - RNA, 19 nt, Homo sapiens
  misc_RNA (1)...(19): siRNA sense strand
ucaucuguguggaaggaga

SEQ ID NO: 2569725 - RNA, 19 nt, Homo sapiens
  misc_RNA (1)...(19): siRNA sense strand
uugaaaaggcagugagaag

SEQ ID NO: 2569726 - RNA, 19 nt, Homo sapiens
  misc_RNA (1)...(19): siRNA sense strand
guaucaagaaauuggugga

SEQ ID NO: 2569727 - RNA, 19 nt, Homo sapiens
  misc_RNA (1)...(19): siRNA sense strand
uuaccaagguuuugauaca

SEQ ID NO: 2569728 - RNA, 19 nt, Homo sapiens
  misc_RNA (1)...(19): siRNA sense strand
ccaauguguuugcugccaa

SEQ ID NO: 2569729 - RNA, 19 nt, Homo sapiens
  misc_RNA (1)...(19): siRNA sense strand
aagacauacuggagagaaa

SEQ ID NO: 2569730 - RNA, 19 nt, Homo sapiens
  misc_RNA (1)...(19): siRNA sense strand
cuuuaaagaauguggcaaa

SEQ ID NO: 2569731 - RNA, 19 nt, Homo sapiens
  misc_RNA (1)...(19): siRNA sense strand
acugagaagauaugagaaa

SEQ ID NO: 2569732 - RNA, 19 nt, Homo sapiens
  misc_RNA (1)...(19): siRNA sense strand
ugugaagaauguaggaaaa

SEQ ID NO: 2569733 - RNA, 19 nt, Homo sapiens
  misc_RNA (1)...(19): siRNA sense strand
ccuacaaugugaagauaca

SEQ ID NO: 2569734 - RNA, 19 nt, Homo sapiens
  misc_RNA (1)...(19): siRNA sense strand
augugauguuggagaacua

SEQ ID NO: 2569735 - RNA, 19 nt, Homo sapiens
  misc_RNA (1)...(19): siRNA sense strand
augugaagaauguggcaaa

SEQ ID NO: 2569736 - RNA, 19 nt, Homo sapiens
  misc_RNA (1)...(19): siRNA sense strand
augugaagaauguaggaaa

SEQ ID NO: 2569737 - RNA, 19 nt, Homo sapiens
  misc_RNA (1)...(19): siRNA sense strand
augugaagaauguggcaaa

SEQ ID NO: 2569738 - RNA, 19 nt, Homo sapiens
  misc_RNA (1)...(19): siRNA sense strand
augugaagaauguggcaaa

SEQ ID NO: 2569739 - RNA, 19 nt, Homo sapiens
  misc_RNA (1)...(19): siRNA sense strand
augugaagaauguggcaaa

SEQ ID NO: 2569740 - RNA, 19 nt, Homo sapiens
  misc_RNA (1)...(19): siRNA sense strand
uugugaagaauguggcaaa

SEQ ID NO: 2569741 - RNA, 19 nt, Homo sapiens
  misc_RNA (1)...(19): siRNA sense strand
ggaaaugccuggacccuga

SEQ ID NO: 2569742 - RNA, 19 nt, Homo sapiens
  misc_RNA (1)...(19): siRNA sense strand
gguucucacaccugaauaa

SEQ ID NO: 2569743 - RNA, 19 nt, Homo sapiens
  misc_RNA (1)...(19): siRNA sense strand
ucaacuacccagagcaaaa

SEQ ID NO: 2569744 - RNA, 19 nt, Homo sapiens
  misc_RNA (1)...(19): siRNA sense strand
acauaagaucguagccaga

SEQ ID NO: 2569745 - RNA, 19 nt, Homo sapiens
  misc_RNA (1)...(19): siRNA sense strand
uugccaaacauaagcgaau

SEQ ID NO: 2569746 - RNA, 19 nt, Homo sapiens
  misc_RNA (1)...(19): siRNA sense strand
augugaugaauguggcaaa

SEQ ID NO: 2569747 - RNA, 19 nt, Homo sapiens
  misc_RNA (1)...(19): siRNA sense strand
ugucaacuacccagagcaa

SEQ ID NO: 2569748 - RNA, 19 nt, Homo sapiens
  misc_RNA (1)...(19): siRNA sense strand
ccugagucaacauaagaaa

SEQ ID NO: 2569749 - RNA, 19 nt, Homo sapiens
  misc_RNA (1)...(19): siRNA sense strand
auacuucaguguaaagcaa

SEQ ID NO: 2569750 - RNA, 19 nt, Homo sapiens
  misc_RNA (1)...(19): siRNA sense strand
agacaagacauacuggaga

SEQ ID NO: 2569751 - RNA, 19 nt, Homo sapiens
  misc_RNA (1)...(19): siRNA sense strand
cuaacucaacauaagguaa

SEQ ID NO: 2569752 - RNA, 19 nt, Homo sapiens
  misc_RNA (1)...(19): siRNA sense strand
gaaaauucauagugcagau

SEQ ID NO: 2569753 - RNA, 19 nt, Homo sapiens
  misc_RNA (1)...(19): siRNA sense strand
cugagaagauaugagaaau

SEQ ID NO: 2569754 - RNA, 19 nt, Homo sapiens
  misc_RNA (1)...(19): siRNA sense strand
ugagaagauaugagaaaug

SEQ ID NO: 2569755 - RNA, 19 nt, Homo sapiens
  misc_RNA (1)...(19): siRNA sense strand
aagaaaaggcuguaaaagu

SEQ ID NO: 2569756 - RNA, 19 nt, Homo sapiens
  misc_RNA (1)...(19): siRNA sense strand
cccuauaaaugugaagaau

SEQ ID NO: 2569757 - RNA, 19 nt, Homo sapiens
  misc_RNA (1)...(19): siRNA sense strand
gaguguaaguugcagaaag

SEQ ID NO: 2569758 - RNA, 19 nt, Homo sapiens
  misc_RNA (1)...(19): siRNA sense strand
uguuggagaacuacaggaa

SEQ ID NO: 2569759 - RNA, 19 nt, Homo sapiens
  misc_RNA (1)...(19): siRNA sense strand
caguguaaagcaaguguca

SEQ ID NO: 2569760 - RNA, 19 nt, Homo sapiens
  misc_RNA (1)...(19): siRNA sense strand
ggagucaacauaagaaaau

SEQ ID NO: 2569761 - RNA, 19 nt, Homo sapiens
  misc_RNA (1)...(19): siRNA sense strand
agcagaauuuguauagaga

SEQ ID NO: 2569762 - RNA, 19 nt, Homo sapiens
  misc_RNA (1)...(19): siRNA sense strand
guguaaagaaugugggaag

SEQ ID NO: 2569763 - RNA, 19 nt, Homo sapiens
  misc_RNA (1)...(19): siRNA sense strand
ggaaaauccuuuagccaga

SEQ ID NO: 2569764 - RNA, 19 nt, Homo sapiens
  misc_RNA (1)...(19): siRNA sense strand
cccuaugacuguaaggaau

SEQ ID NO: 2569765 - RNA, 19 nt, Homo sapiens
  misc_RNA (1)...(19): siRNA sense strand
uuauaaugcacaagcgaau

SEQ ID NO: 2569766 - RNA, 19 nt, Homo sapiens
  misc_RNA (1)...(19): siRNA sense strand
aacucacacuggagagaaa

SEQ ID NO: 2569767 - RNA, 19 nt, Homo sapiens
  misc_RNA (1)...(19): siRNA sense strand
augugaugcuggagaacuu

SEQ ID NO: 2569768 - RNA, 19 nt, Homo sapiens
  misc_RNA (1)...(19): siRNA sense strand
accuaugaguguaaagaau

SEQ ID NO: 2569769 - RNA, 19 nt, Homo sapiens
  misc_RNA (1)...(19): siRNA sense strand
ugggaaggccuuuaggaau

SEQ ID NO: 2569770 - RNA, 19 nt, Homo sapiens
  misc_RNA (1)...(19): siRNA sense strand
auacaauugcuaugcagaa

SEQ ID NO: 2569771 - RNA, 19 nt, Homo sapiens
  misc_RNA (1)...(19): siRNA sense strand
agaaaaccuaugaguguaa

SEQ ID NO: 2569772 - RNA, 19 nt, Homo sapiens
  misc_RNA (1)...(19): siRNA sense strand
acaaagaugugaugcugga

SEQ ID NO: 2569773 - RNA, 19 nt, Homo sapiens
  misc_RNA (1)...(19): siRNA sense strand
gaagacagaugaaagagga

SEQ ID NO: 2569774 - RNA, 19 nt, Homo sapiens
  misc_RNA (1)...(19): siRNA sense strand
aagacagaugaaagaggaa

SEQ ID NO: 2569775 - RNA, 19 nt, Homo sapiens
  misc_RNA (1)...(19): siRNA sense strand
cuuaagaaacacaugagau

SEQ ID NO: 2569776 - RNA, 19 nt, Homo sapiens
  misc_RNA (1)...(19): siRNA sense strand
gugugaucacuguggaaaa

SEQ ID NO: 2569777 - RNA, 19 nt, Homo sapiens
  misc_RNA (1)...(19): siRNA sense strand
cuguaaggaaugugggaag

SEQ ID NO: 2569778 - RNA, 19 nt, Homo sapiens
  misc_RNA (1)...(19): siRNA sense strand
ccaagguggaucaagaaca

SEQ ID NO: 2569779 - RNA, 19 nt, Homo sapiens
  misc_RNA (1)...(19): siRNA sense strand
aggaaugugggaaggcuuu

SEQ ID NO: 2569780 - RNA, 19 nt, Homo sapiens
  misc_RNA (1)...(19): siRNA sense strand
ggaaaguccuucagcacag

SEQ ID NO: 2569781 - RNA, 19 nt, Homo sapiens
  misc_RNA (1)...(19): siRNA sense strand
cuggagaacuuuaggaacc

SEQ ID NO: 2569782 - RNA, 19 nt, Homo sapiens
  misc_RNA (1)...(19): siRNA sense strand
augcaaagaauguggcaaa

SEQ ID NO: 2569783 - RNA, 19 nt, Homo sapiens
  misc_RNA (1)...(19): siRNA sense strand
auguaaagaauguggcaaa

SEQ ID NO: 2569784 - RNA, 19 nt, Homo sapiens
  misc_RNA (1)...(19): siRNA sense strand
aauccauacugcagagaaa

SEQ ID NO: 2569785 - RNA, 19 nt, Homo sapiens
  misc_RNA (1)...(19): siRNA sense strand
aauucauccuggagagaaa

SEQ ID NO: 2569786 - RNA, 19 nt, Homo sapiens
  misc_RNA (1)...(19): siRNA sense strand
gugugaagaauguggcaaa

SEQ ID NO: 2569787 - RNA, 19 nt, Homo sapiens
  misc_RNA (1)...(19): siRNA sense strand
aauucauacuggagagcaa

SEQ ID NO: 2569788 - RNA, 19 nt, Homo sapiens
  misc_RNA (1)...(19): siRNA sense strand
auguaaagaaugugccaaa

SEQ ID NO: 2569789 - RNA, 19 nt, Homo sapiens
  misc_RNA (1)...(19): siRNA sense strand
aagauaagccauacugaaa

SEQ ID NO: 2569790 - RNA, 19 nt, Homo sapiens
  misc_RNA (1)...(19): siRNA sense strand
aacucauacuggagagaaa

SEQ ID NO: 2569791 - RNA, 19 nt, Homo sapiens
  misc_RNA (1)...(19): siRNA sense strand
aacucauacuggagagaaa

SEQ ID NO: 2569792 - RNA, 19 nt, Homo sapiens
  misc_RNA (1)...(19): siRNA sense strand
aauucgcacuggagagaaa

SEQ ID NO: 2569793 - RNA, 19 nt, Homo sapiens
  misc_RNA (1)...(19): siRNA sense strand
augugauguuagagaacua

SEQ ID NO: 2569794 - RNA, 19 nt, Homo sapiens
  misc_RNA (1)...(19): siRNA sense strand
augugaagaauguggcaaa

SEQ ID NO: 2569795 - RNA, 19 nt, Homo sapiens
  misc_RNA (1)...(19): siRNA sense strand
augugaagaauguggcaaa

SEQ ID NO: 2569796 - RNA, 19 nt, Homo sapiens
  misc_RNA (1)...(19): siRNA sense strand
augugaagaauguggcaaa

SEQ ID NO: 2569797 - RNA, 19 nt, Homo sapiens
  misc_RNA (1)...(19): siRNA sense strand
augugaagaauguggcaaa

SEQ ID NO: 2569798 - RNA, 19 nt, Homo sapiens
  misc_RNA (1)...(19): siRNA sense strand
augugaagaauguggcaaa

SEQ ID NO: 2569799 - RNA, 19 nt, Homo sapiens
  misc_RNA (1)...(19): siRNA sense strand
augugaagaauguggcaaa

SEQ ID NO: 2569800 - RNA, 19 nt, Homo sapiens
  misc_RNA (1)...(19): siRNA sense strand
augugaagaauguggcaaa

SEQ ID NO: 2569801 - RNA, 19 nt, Homo sapiens
  misc_RNA (1)...(19): siRNA sense strand
augugaagaauguggcaaa

SEQ ID NO: 2569802 - RNA, 19 nt, Homo sapiens
  misc_RNA (1)...(19): siRNA sense strand
augugaagaauguggcaaa

SEQ ID NO: 2569803 - RNA, 19 nt, Homo sapiens
  misc_RNA (1)...(19): siRNA sense strand
augugaagaauguggcaaa

SEQ ID NO: 2569804 - RNA, 19 nt, Homo sapiens
  misc_RNA (1)...(19): siRNA sense strand
augugaagaauguggcaaa

SEQ ID NO: 2569805 - RNA, 19 nt, Homo sapiens
  misc_RNA (1)...(19): siRNA sense strand
augugaagaauguggcaaa

SEQ ID NO: 2569806 - RNA, 19 nt, Homo sapiens
  misc_RNA (1)...(19): siRNA sense strand
augugaagaauguggcaaa

SEQ ID NO: 2569807 - RNA, 19 nt, Homo sapiens
  misc_RNA (1)...(19): siRNA sense strand
augugaagaauguggcaaa

SEQ ID NO: 2569808 - RNA, 19 nt, Homo sapiens
  misc_RNA (1)...(19): siRNA sense strand
augugaaguauguggcaaa

SEQ ID NO: 2569809 - RNA, 19 nt, Homo sapiens
  misc_RNA (1)...(19): siRNA sense strand
aauucauacuggaggaaaa

SEQ ID NO: 2569810 - RNA, 19 nt, Homo sapiens
  misc_RNA (1)...(19): siRNA sense strand
acaugaaaugguagccaaa

SEQ ID NO: 2569811 - RNA, 19 nt, Homo sapiens
  misc_RNA (1)...(19): siRNA sense strand
gcgacacugagaagauaua

SEQ ID NO: 2569812 - RNA, 19 nt, Homo sapiens
  misc_RNA (1)...(19): siRNA sense strand
gaggagaaacccuacaaau

SEQ ID NO: 2569813 - RNA, 19 nt, Homo sapiens
  misc_RNA (1)...(19): siRNA sense strand
ccuaugaggagacaugaaa

SEQ ID NO: 2569814 - RNA, 19 nt, Homo sapiens
  misc_RNA (1)...(19): siRNA sense strand
ccagcuacccagagcaaaa

SEQ ID NO: 2569815 - RNA, 19 nt, Homo sapiens
  misc_RNA (1)...(19): siRNA sense strand
acgccuuacuacacauaaa

SEQ ID NO: 2569816 - RNA, 19 nt, Homo sapiens
  misc_RNA (1)...(19): siRNA sense strand
gacaugaaaugguagccaa

SEQ ID NO: 2569817 - RNA, 19 nt, Homo sapiens
  misc_RNA (1)...(19): siRNA sense strand
uuaccaaacauaagaggau

SEQ ID NO: 2569818 - RNA, 19 nt, Homo sapiens
  misc_RNA (1)...(19): siRNA sense strand
aggaaugugauguuagaga

SEQ ID NO: 2569819 - RNA, 19 nt, Homo sapiens
  misc_RNA (1)...(19): siRNA sense strand
uggcaaagcuuuuacccaa

SEQ ID NO: 2569820 - RNA, 19 nt, Homo sapiens
  misc_RNA (1)...(19): siRNA sense strand
uggcaaagcuuuuacccaa

SEQ ID NO: 2569821 - RNA, 19 nt, Homo sapiens
  misc_RNA (1)...(19): siRNA sense strand
guggcaaagcauuuaacua

SEQ ID NO: 2569822 - RNA, 19 nt, Homo sapiens
  misc_RNA (1)...(19): siRNA sense strand
auguaaugaaugugggaaa

SEQ ID NO: 2569823 - RNA, 19 nt, Homo sapiens
  misc_RNA (1)...(19): siRNA sense strand
ggucagagcucaagccuca

SEQ ID NO: 2569824 - RNA, 19 nt, Homo sapiens
  misc_RNA (1)...(19): siRNA sense strand
guguaaugacuguggaaaa

SEQ ID NO: 2569825 - RNA, 19 nt, Homo sapiens
  misc_RNA (1)...(19): siRNA sense strand
augcaaugacuguggcaaa

SEQ ID NO: 2569826 - RNA, 19 nt, Homo sapiens
  misc_RNA (1)...(19): siRNA sense strand
gugugaugagugugggaaa

SEQ ID NO: 2569827 - RNA, 19 nt, Homo sapiens
  misc_RNA (1)...(19): siRNA sense strand
cuauaaagaaacugcauca

SEQ ID NO: 2569828 - RNA, 19 nt, Homo sapiens
  misc_RNA (1)...(19): siRNA sense strand
gugaagacugugagaagau

SEQ ID NO: 2569829 - RNA, 19 nt, Homo sapiens
  misc_RNA (1)...(19): siRNA sense strand
gggaaagucuucaggcucu

SEQ ID NO: 2569830 - RNA, 19 nt, Homo sapiens
  misc_RNA (1)...(19): siRNA sense strand
gugcagugaguguggaaaa

SEQ ID NO: 2569831 - RNA, 19 nt, Homo sapiens
  misc_RNA (1)...(19): siRNA sense strand
uuauugaacaccagagaau

SEQ ID NO: 2569832 - RNA, 19 nt, Homo sapiens
  misc_RNA (1)...(19): siRNA sense strand
aauccacacgggagagaaa

SEQ ID NO: 2569833 - RNA, 19 nt, Homo sapiens
  misc_RNA (1)...(19): siRNA sense strand
gaaaauuagcagaugucaa

SEQ ID NO: 2569834 - RNA, 19 nt, Homo sapiens
  misc_RNA (1)...(19): siRNA sense strand
aagugaugcuggagaacca

SEQ ID NO: 2569835 - RNA, 19 nt, Homo sapiens
  misc_RNA (1)...(19): siRNA sense strand
ggcaaaggcaucagagcca

SEQ ID NO: 2569836 - RNA, 19 nt, Homo sapiens
  misc_RNA (1)...(19): siRNA sense strand
gcggaaaagccuucaguau

SEQ ID NO: 2569837 - RNA, 19 nt, Homo sapiens
  misc_RNA (1)...(19): siRNA sense strand
ggauguaaggagcugggaa

SEQ ID NO: 2569838 - RNA, 19 nt, Homo sapiens
  misc_RNA (1)...(19): siRNA sense strand
ccuuauaaaugcaaugacu

SEQ ID NO: 2569839 - RNA, 19 nt, Homo sapiens
  misc_RNA (1)...(19): siRNA sense strand
gugugaagacugugagaag

SEQ ID NO: 2569840 - RNA, 19 nt, Homo sapiens
  misc_RNA (1)...(19): siRNA sense strand
cugcauugggaaauuaaua

SEQ ID NO: 2569841 - RNA, 19 nt, Homo sapiens
  misc_RNA (1)...(19): siRNA sense strand
ugggaaagccuucagucaa

SEQ ID NO: 2569842 - RNA, 19 nt, Homo sapiens
  misc_RNA (1)...(19): siRNA sense strand
gcgauguggcugugcacuu

SEQ ID NO: 2569843 - RNA, 19 nt, Homo sapiens
  misc_RNA (1)...(19): siRNA sense strand
gcuuauucgccaucagaga

SEQ ID NO: 2569844 - RNA, 19 nt, Homo sapiens
  misc_RNA (1)...(19): siRNA sense strand
agagaauccauaaaggaga

SEQ ID NO: 2569845 - RNA, 19 nt, Homo sapiens
  misc_RNA (1)...(19): siRNA sense strand
ggagcagggagaagagcca

SEQ ID NO: 2569846 - RNA, 19 nt, Homo sapiens
  misc_RNA (1)...(19): siRNA sense strand
augcgaggaguguggcaaa

SEQ ID NO: 2569847 - RNA, 19 nt, Homo sapiens
  misc_RNA (1)...(19): siRNA sense strand
caaauaacugccauggaga

SEQ ID NO: 2569848 - RNA, 19 nt, Homo sapiens
  misc_RNA (1)...(19): siRNA sense strand
augugcagagugugggaaa

SEQ ID NO: 2569849 - RNA, 19 nt, Homo sapiens
  misc_RNA (1)...(19): siRNA sense strand
gggaaagcuuuuaggugga

SEQ ID NO: 2569850 - RNA, 19 nt, Homo sapiens
  misc_RNA (1)...(19): siRNA sense strand
auaaaggagagaagcccua

SEQ ID NO: 2569851 - RNA, 19 nt, Homo sapiens
  misc_RNA (1)...(19): siRNA sense strand
gagaacucacacuggagaa

SEQ ID NO: 2569852 - RNA, 19 nt, Homo sapiens
  misc_RNA (1)...(19): siRNA sense strand
caguaugagcacacagcuu

SEQ ID NO: 2569853 - RNA, 19 nt, Homo sapiens
  misc_RNA (1)...(19): siRNA sense strand
gagagagugcggaagggau

SEQ ID NO: 2569854 - RNA, 19 nt, Homo sapiens
  misc_RNA (1)...(19): siRNA sense strand
agagaauccacacgggaga

SEQ ID NO: 2569855 - RNA, 19 nt, Homo sapiens
  misc_RNA (1)...(19): siRNA sense strand
augugaugaguguggcaaa

SEQ ID NO: 2569856 - RNA, 19 nt, Homo sapiens
  misc_RNA (1)...(19): siRNA sense strand
gugggaaagccuucaguca

SEQ ID NO: 2569857 - RNA, 19 nt, Homo sapiens
  misc_RNA (1)...(19): siRNA sense strand
ggggagaagccuuauaaau

SEQ ID NO: 2569858 - RNA, 19 nt, Homo sapiens
  misc_RNA (1)...(19): siRNA sense strand
gcccuacagaugugaggaa

SEQ ID NO: 2569859 - RNA, 19 nt, Homo sapiens
  misc_RNA (1)...(19): siRNA sense strand
ggugguaacauuuggcgau

SEQ ID NO: 2569860 - RNA, 19 nt, Homo sapiens
  misc_RNA (1)...(19): siRNA sense strand
ccaucagagaauccauaaa

SEQ ID NO: 2569861 - RNA, 19 nt, Homo sapiens
  misc_RNA (1)...(19): siRNA sense strand
ccugugaggacauggacau

SEQ ID NO: 2569862 - RNA, 19 nt, Homo sapiens
  misc_RNA (1)...(19): siRNA sense strand
aaaugcaacaaguguacaa

SEQ ID NO: 2569863 - RNA, 19 nt, Homo sapiens
  misc_RNA (1)...(19): siRNA sense strand
uggcuggacuagcaggauu

SEQ ID NO: 2569864 - RNA, 19 nt, Homo sapiens
  misc_RNA (1)...(19): siRNA sense strand
gaugcauacuggggagaaa

SEQ ID NO: 2569865 - RNA, 19 nt, Homo sapiens
  misc_RNA (1)...(19): siRNA sense strand
guguguaaugacuguggaa

SEQ ID NO: 2569866 - RNA, 19 nt, Homo sapiens
  misc_RNA (1)...(19): siRNA sense strand
gcaccaaccuucuggagca

SEQ ID NO: 2569867 - RNA, 19 nt, Homo sapiens
  misc_RNA (1)...(19): siRNA sense strand
uggcaaagcucuugugcgu

SEQ ID NO: 2569868 - RNA, 19 nt, Homo sapiens
  misc_RNA (1)...(19): siRNA sense strand
cguuuaagugugagaaaug

SEQ ID NO: 2569869 - RNA, 19 nt, Homo sapiens
  misc_RNA (1)...(19): siRNA sense strand
gcaagaacguccaggccac

SEQ ID NO: 2569870 - RNA, 19 nt, Homo sapiens
  misc_RNA (1)...(19): siRNA sense strand
guccagaaugggagcugaa

SEQ ID NO: 2569871 - RNA, 19 nt, Homo sapiens
  misc_RNA (1)...(19): siRNA sense strand
gagacugugugcaggggaa

SEQ ID NO: 2569872 - RNA, 19 nt, Homo sapiens
  misc_RNA (1)...(19): siRNA sense strand
gcgaggagccauggagcau

SEQ ID NO: 2569873 - RNA, 19 nt, Homo sapiens
  misc_RNA (1)...(19): siRNA sense strand
ccucucaacagcagggcau

SEQ ID NO: 2569874 - RNA, 19 nt, Homo sapiens
  misc_RNA (1)...(19): siRNA sense strand
aggaaagcauuuagagaga

SEQ ID NO: 2569875 - RNA, 19 nt, Homo sapiens
  misc_RNA (1)...(19): siRNA sense strand
gacacauacaggagagaaa

SEQ ID NO: 2569876 - RNA, 19 nt, Homo sapiens
  misc_RNA (1)...(19): siRNA sense strand
ucuggaaaguagaugguaa

SEQ ID NO: 2569877 - RNA, 19 nt, Homo sapiens
  misc_RNA (1)...(19): siRNA sense strand
augcagggaaugugggaaa

SEQ ID NO: 2569878 - RNA, 19 nt, Homo sapiens
  misc_RNA (1)...(19): siRNA sense strand
augcaguaaaugugggaaa

SEQ ID NO: 2569879 - RNA, 19 nt, Homo sapiens
  misc_RNA (1)...(19): siRNA sense strand
augcagugaaugugggaaa

SEQ ID NO: 2569880 - RNA, 19 nt, Homo sapiens
  misc_RNA (1)...(19): siRNA sense strand
cagacauauaagagacaua

SEQ ID NO: 2569881 - RNA, 19 nt, Homo sapiens
  misc_RNA (1)...(19): siRNA sense strand
cagagaacucauacaguaa

SEQ ID NO: 2569882 - RNA, 19 nt, Homo sapiens
  misc_RNA (1)...(19): siRNA sense strand
aagaauucauacaggagaa

SEQ ID NO: 2569883 - RNA, 19 nt, Homo sapiens
  misc_RNA (1)...(19): siRNA sense strand
augcagugagugugggaaa

SEQ ID NO: 2569884 - RNA, 19 nt, Homo sapiens
  misc_RNA (1)...(19): siRNA sense strand
guguggugaaugugggaaa

SEQ ID NO: 2569885 - RNA, 19 nt, Homo sapiens
  misc_RNA (1)...(19): siRNA sense strand
ucaaauuggaggaaggaga

SEQ ID NO: 2569886 - RNA, 19 nt, Homo sapiens
  misc_RNA (1)...(19): siRNA sense strand
gggaaagccuucagcagga

SEQ ID NO: 2569887 - RNA, 19 nt, Homo sapiens
  misc_RNA (1)...(19): siRNA sense strand
gggaaagccuucagcagga

SEQ ID NO: 2569888 - RNA, 19 nt, Homo sapiens
  misc_RNA (1)...(19): siRNA sense strand
augugauguuggagaacua

SEQ ID NO: 2569889 - RNA, 19 nt, Homo sapiens
  misc_RNA (1)...(19): siRNA sense strand
ugauguggcaccaggauaa

SEQ ID NO: 2569890 - RNA, 19 nt, Homo sapiens
  misc_RNA (1)...(19): siRNA sense strand
caaaaggagauuauggaaa

SEQ ID NO: 2569891 - RNA, 19 nt, Homo sapiens
  misc_RNA (1)...(19): siRNA sense strand
augcagucuuuguaggaaa

SEQ ID NO: 2569892 - RNA, 19 nt, Homo sapiens
  misc_RNA (1)...(19): siRNA sense strand
agaaaagccuucagggaga

SEQ ID NO: 2569893 - RNA, 19 nt, Homo sapiens
  misc_RNA (1)...(19): siRNA sense strand
ucauuaaccaucagagaau

SEQ ID NO: 2569894 - RNA, 19 nt, Homo sapiens
  misc_RNA (1)...(19): siRNA sense strand
gacacauacgggugagaaa

SEQ ID NO: 2569895 - RNA, 19 nt, Homo sapiens
  misc_RNA (1)...(19): siRNA sense strand
cugugguaauuguggcaaa

SEQ ID NO: 2569896 - RNA, 19 nt, Homo sapiens
  misc_RNA (1)...(19): siRNA sense strand
aggaugugauguuggagaa

SEQ ID NO: 2569897 - RNA, 19 nt, Homo sapiens
  misc_RNA (1)...(19): siRNA sense strand
ggagaagagccguggguag

SEQ ID NO: 2569898 - RNA, 19 nt, Homo sapiens
  misc_RNA (1)...(19): siRNA sense strand
aacacauacaggagagaaa

SEQ ID NO: 2569899 - RNA, 19 nt, Homo sapiens
  misc_RNA (1)...(19): siRNA sense strand
ccguaugaaugcagggacu

SEQ ID NO: 2569900 - RNA, 19 nt, Homo sapiens
  misc_RNA (1)...(19): siRNA sense strand
ggauguagugauuguagaa

SEQ ID NO: 2569901 - RNA, 19 nt, Homo sapiens
  misc_RNA (1)...(19): siRNA sense strand
ccuuauaauuguagccagu

SEQ ID NO: 2569902 - RNA, 19 nt, Homo sapiens
  misc_RNA (1)...(19): siRNA sense strand
ugguuaaucaucagagaau

SEQ ID NO: 2569903 - RNA, 19 nt, Homo sapiens
  misc_RNA (1)...(19): siRNA sense strand
ucaucaaucaucagagaau

SEQ ID NO: 2569904 - RNA, 19 nt, Homo sapiens
  misc_RNA (1)...(19): siRNA sense strand
cagaacucauacaggagaa

SEQ ID NO: 2569905 - RNA, 19 nt, Homo sapiens
  misc_RNA (1)...(19): siRNA sense strand
cccagaaaucacagcuaaa

SEQ ID NO: 2569906 - RNA, 19 nt, Homo sapiens
  misc_RNA (1)...(19): siRNA sense strand
guggguaggagauggagaa

SEQ ID NO: 2569907 - RNA, 19 nt, Homo sapiens
  misc_RNA (1)...(19): siRNA sense strand
acaucagagcagacauaua

SEQ ID NO: 2569908 - RNA, 19 nt, Homo sapiens
  misc_RNA (1)...(19): siRNA sense strand
aaucaaacagugaagguga

SEQ ID NO: 2569909 - RNA, 19 nt, Homo sapiens
  misc_RNA (1)...(19): siRNA sense strand
gauacugauaccugguuaa

SEQ ID NO: 2569910 - RNA, 19 nt, Homo sapiens
  misc_RNA (1)...(19): siRNA sense strand
gaaugcagggacugugaaa

SEQ ID NO: 2569911 - RNA, 19 nt, Homo sapiens
  misc_RNA (1)...(19): siRNA sense strand
augcagugaguguggcaaa

SEQ ID NO: 2569912 - RNA, 19 nt, Homo sapiens
  misc_RNA (1)...(19): siRNA sense strand
guaggaaagcauuuagaga

SEQ ID NO: 2569913 - RNA, 19 nt, Homo sapiens
  misc_RNA (1)...(19): siRNA sense strand
cccuaugaaugcagugaau

SEQ ID NO: 2569914 - RNA, 19 nt, Homo sapiens
  misc_RNA (1)...(19): siRNA sense strand
cccuauggaugcagugaau

SEQ ID NO: 2569915 - RNA, 19 nt, Homo sapiens
  misc_RNA (1)...(19): siRNA sense strand
gcauuuagagagaggucga

SEQ ID NO: 2569916 - RNA, 19 nt, Homo sapiens
  misc_RNA (1)...(19): siRNA sense strand
ccguaugaaugcagugagu

SEQ ID NO: 2569917 - RNA, 19 nt, Homo sapiens
  misc_RNA (1)...(19): siRNA sense strand
guaugaaugcagugagugu

SEQ ID NO: 2569918 - RNA, 19 nt, Homo sapiens
  misc_RNA (1)...(19): siRNA sense strand
gagaauacauacaggagag

SEQ ID NO: 2569919 - RNA, 19 nt, Homo sapiens
  misc_RNA (1)...(19): siRNA sense strand
gcuuauuagacaucagaca

SEQ ID NO: 2569920 - RNA, 19 nt, Homo sapiens
  misc_RNA (1)...(19): siRNA sense strand
aagcagaaucagaugacuu

SEQ ID NO: 2569921 - RNA, 19 nt, Homo sapiens
  misc_RNA (1)...(19): siRNA sense strand
uugagaagucggagcuaau

SEQ ID NO: 2569922 - RNA, 19 nt, Homo sapiens
  misc_RNA (1)...(19): siRNA sense strand
agucggagcuaauuagaca

SEQ ID NO: 2569923 - RNA, 19 nt, Homo sapiens
  misc_RNA (1)...(19): siRNA sense strand
aguaagaaaccaagucuca

SEQ ID NO: 2569924 - RNA, 19 nt, Homo sapiens
  misc_RNA (1)...(19): siRNA sense strand
ccuuaugaguguggugaau

SEQ ID NO: 2569925 - RNA, 19 nt, Homo sapiens
  misc_RNA (1)...(19): siRNA sense strand
cagaagucacagcugguua

SEQ ID NO: 2569926 - RNA, 19 nt, Homo sapiens
  misc_RNA (1)...(19): siRNA sense strand
agucacaacucguuacaca

SEQ ID NO: 2569927 - RNA, 19 nt, Homo sapiens
  misc_RNA (1)...(19): siRNA sense strand
cagaagucucaguuuauua

SEQ ID NO: 2569928 - RNA, 19 nt, Homo sapiens
  misc_RNA (1)...(19): siRNA sense strand
gagagaaacccuauggaug

SEQ ID NO: 2569929 - RNA, 19 nt, Homo sapiens
  misc_RNA (1)...(19): siRNA sense strand
gaugacacacacaggagaa

SEQ ID NO: 2569930 - RNA, 19 nt, Homo sapiens
  misc_RNA (1)...(19): siRNA sense strand
gcuaauuagacaucugaga

SEQ ID NO: 2569931 - RNA, 19 nt, Homo sapiens
  misc_RNA (1)...(19): siRNA sense strand
aacacacacaggagagaaa

SEQ ID NO: 2569932 - RNA, 19 nt, Homo sapiens
  misc_RNA (1)...(19): siRNA sense strand
uugagaagucagagcuuau

SEQ ID NO: 2569933 - RNA, 19 nt, Homo sapiens
  misc_RNA (1)...(19): siRNA sense strand
ucacagaacucauacagga

SEQ ID NO: 2569934 - RNA, 19 nt, Homo sapiens
  misc_RNA (1)...(19): siRNA sense strand
ccauguuacaggagucauu

SEQ ID NO: 2569935 - RNA, 19 nt, Homo sapiens
  misc_RNA (1)...(19): siRNA sense strand
aaugagaagccguggcaga

SEQ ID NO: 2569936 - RNA, 19 nt, Homo sapiens
  misc_RNA (1)...(19): siRNA sense strand
cugcuacaacuguggcaaa

SEQ ID NO: 2569937 - RNA, 19 nt, Homo sapiens
  misc_RNA (1)...(19): siRNA sense strand
gugcuauagguguggugaa

SEQ ID NO: 2569938 - RNA, 19 nt, Homo sapiens
  misc_RNA (1)...(19): siRNA sense strand
accaaagugaagugcuaua

SEQ ID NO: 2569939 - RNA, 19 nt, Homo sapiens
  misc_RNA (1)...(19): siRNA sense strand
ggaauguccuacuggugga

SEQ ID NO: 2569940 - RNA, 19 nt, Homo sapiens
  misc_RNA (1)...(19): siRNA sense strand
aauacaugcuggagagaaa

SEQ ID NO: 2569941 - RNA, 19 nt, Homo sapiens
  misc_RNA (1)...(19): siRNA sense strand
aauacaugcuggagagaaa

SEQ ID NO: 2569942 - RNA, 19 nt, Homo sapiens
  misc_RNA (1)...(19): siRNA sense strand
aauacaugcuggagagaaa

SEQ ID NO: 2569943 - RNA, 19 nt, Homo sapiens
  misc_RNA (1)...(19): siRNA sense strand
ggaugaacccacagguaua

SEQ ID NO: 2569944 - RNA, 19 nt, Homo sapiens
  misc_RNA (1)...(19): siRNA sense strand
gagugaagaaugugacaaa

SEQ ID NO: 2569945 - RNA, 19 nt, Homo sapiens
  misc_RNA (1)...(19): siRNA sense strand
uggcaaagcuuuuaggaaa

SEQ ID NO: 2569946 - RNA, 19 nt, Homo sapiens
  misc_RNA (1)...(19): siRNA sense strand
uauucauacuggagagaaa

SEQ ID NO: 2569947 - RNA, 19 nt, Homo sapiens
  misc_RNA (1)...(19): siRNA sense strand
uauucauacuggagagaaa

SEQ ID NO: 2569948 - RNA, 19 nt, Homo sapiens
  misc_RNA (1)...(19): siRNA sense strand
auguaaagaauguggcaaa

SEQ ID NO: 2569949 - RNA, 19 nt, Homo sapiens
  misc_RNA (1)...(19): siRNA sense strand
auguaaagaauguggcaaa

SEQ ID NO: 2569950 - RNA, 19 nt, Homo sapiens
  misc_RNA (1)...(19): siRNA sense strand
auguaaagaauguggcaaa

SEQ ID NO: 2569951 - RNA, 19 nt, Homo sapiens
  misc_RNA (1)...(19): siRNA sense strand
auguaaagaauguggcaaa

SEQ ID NO: 2569952 - RNA, 19 nt, Homo sapiens
  misc_RNA (1)...(19): siRNA sense strand
auguaaagaauguggcaaa

SEQ ID NO: 2569953 - RNA, 19 nt, Homo sapiens
  misc_RNA (1)...(19): siRNA sense strand
auguaaagaauguggcaaa

SEQ ID NO: 2569954 - RNA, 19 nt, Homo sapiens
  misc_RNA (1)...(19): siRNA sense strand
gugugaagaauguggcaaa

SEQ ID NO: 2569955 - RNA, 19 nt, Homo sapiens
  misc_RNA (1)...(19): siRNA sense strand
gugugaagaauguggcaaa

SEQ ID NO: 2569956 - RNA, 19 nt, Homo sapiens
  misc_RNA (1)...(19): siRNA sense strand
gugugaagaauguggcaaa

SEQ ID NO: 2569957 - RNA, 19 nt, Homo sapiens
  misc_RNA (1)...(19): siRNA sense strand
gugugaagaauguggcaaa

SEQ ID NO: 2569958 - RNA, 19 nt, Homo sapiens
  misc_RNA (1)...(19): siRNA sense strand
gugugaagaauguggcaaa

SEQ ID NO: 2569959 - RNA, 19 nt, Homo sapiens
  misc_RNA (1)...(19): siRNA sense strand
gggaaauauuugaaagucu

SEQ ID NO: 2569960 - RNA, 19 nt, Homo sapiens
  misc_RNA (1)...(19): siRNA sense strand
aauucauaccagagagaaa

SEQ ID NO: 2569961 - RNA, 19 nt, Homo sapiens
  misc_RNA (1)...(19): siRNA sense strand
aauucaugcuggaaagaaa

SEQ ID NO: 2569962 - RNA, 19 nt, Homo sapiens
  misc_RNA (1)...(19): siRNA sense strand
uggcaaagcuuuuaggcaa

SEQ ID NO: 2569963 - RNA, 19 nt, Homo sapiens
  misc_RNA (1)...(19): siRNA sense strand
uggcaaagcuuuuagacaa

SEQ ID NO: 2569964 - RNA, 19 nt, Homo sapiens
  misc_RNA (1)...(19): siRNA sense strand
acacaaaacccaacauaaa

SEQ ID NO: 2569965 - RNA, 19 nt, Homo sapiens
  misc_RNA (1)...(19): siRNA sense strand
agacauaagaggauacaca

SEQ ID NO: 2569966 - RNA, 19 nt, Homo sapiens
  misc_RNA (1)...(19): siRNA sense strand
agacauaagaggauacaca

SEQ ID NO: 2569967 - RNA, 19 nt, Homo sapiens
  misc_RNA (1)...(19): siRNA sense strand
agacauaagaggauacaca

SEQ ID NO: 2569968 - RNA, 19 nt, Homo sapiens
  misc_RNA (1)...(19): siRNA sense strand
agacauaagaggauacaca

SEQ ID NO: 2569969 - RNA, 19 nt, Homo sapiens
  misc_RNA (1)...(19): siRNA sense strand
cuaaauggacauaagagaa

SEQ ID NO: 2569970 - RNA, 19 nt, Homo sapiens
  misc_RNA (1)...(19): siRNA sense strand
ccuaaauggacauaagaga

SEQ ID NO: 2569971 - RNA, 19 nt, Homo sapiens
  misc_RNA (1)...(19): siRNA sense strand
augugaagaauguggcaaa

SEQ ID NO: 2569972 - RNA, 19 nt, Homo sapiens
  misc_RNA (1)...(19): siRNA sense strand
augugaagaauguggcaaa

SEQ ID NO: 2569973 - RNA, 19 nt, Homo sapiens
  misc_RNA (1)...(19): siRNA sense strand
augugaagaauguggcaaa

SEQ ID NO: 2569974 - RNA, 19 nt, Homo sapiens
  misc_RNA (1)...(19): siRNA sense strand
augugaagaauguggcaaa

SEQ ID NO: 2569975 - RNA, 19 nt, Homo sapiens
  misc_RNA (1)...(19): siRNA sense strand
augugaagaauguggcaaa

SEQ ID NO: 2569976 - RNA, 19 nt, Homo sapiens
  misc_RNA (1)...(19): siRNA sense strand
augugaagaauguggcaaa

SEQ ID NO: 2569977 - RNA, 19 nt, Homo sapiens
  misc_RNA (1)...(19): siRNA sense strand
augugaagaauguggcaaa

SEQ ID NO: 2569978 - RNA, 19 nt, Homo sapiens
  misc_RNA (1)...(19): siRNA sense strand
augugaagaauguggcaaa

SEQ ID NO: 2569979 - RNA, 19 nt, Homo sapiens
  misc_RNA (1)...(19): siRNA sense strand
augugauguuagagaacua

SEQ ID NO: 2569980 - RNA, 19 nt, Homo sapiens
  misc_RNA (1)...(19): siRNA sense strand
augugaagaauguggcaaa

SEQ ID NO: 2569981 - RNA, 19 nt, Homo sapiens
  misc_RNA (1)...(19): siRNA sense strand
augugaagaauguggcaaa

SEQ ID NO: 2569982 - RNA, 19 nt, Homo sapiens
  misc_RNA (1)...(19): siRNA sense strand
augugaagaauguggcaaa

SEQ ID NO: 2569983 - RNA, 19 nt, Homo sapiens
  misc_RNA (1)...(19): siRNA sense strand
augugaagaauguggcaaa

SEQ ID NO: 2569984 - RNA, 19 nt, Homo sapiens
  misc_RNA (1)...(19): siRNA sense strand
uggcaaagcuuuuaaucaa

SEQ ID NO: 2569985 - RNA, 19 nt, Homo sapiens
  misc_RNA (1)...(19): siRNA sense strand
aacucauacugaagagaaa

SEQ ID NO: 2569986 - RNA, 19 nt, Homo sapiens
  misc_RNA (1)...(19): siRNA sense strand
aacucauacugaagagaaa

SEQ ID NO: 2569987 - RNA, 19 nt, Homo sapiens
  misc_RNA (1)...(19): siRNA sense strand
gaaagaaaggugugggcua

SEQ ID NO: 2569988 - RNA, 19 nt, Homo sapiens
  misc_RNA (1)...(19): siRNA sense strand
ggaaggaaaucuagggcuu

SEQ ID NO: 2569989 - RNA, 19 nt, Homo sapiens
  misc_RNA (1)...(19): siRNA sense strand
cagaaaaccaggaagaaaa

SEQ ID NO: 2569990 - RNA, 19 nt, Homo sapiens
  misc_RNA (1)...(19): siRNA sense strand
ucagauugcaacagagaaa

SEQ ID NO: 2569991 - RNA, 19 nt, Homo sapiens
  misc_RNA (1)...(19): siRNA sense strand
aggaagaagaagaagaaga

SEQ ID NO: 2569992 - RNA, 19 nt, Homo sapiens
  misc_RNA (1)...(19): siRNA sense strand
ggaaauuaauacuggcuca

SEQ ID NO: 2569993 - RNA, 19 nt, Homo sapiens
  misc_RNA (1)...(19): siRNA sense strand
cagccaaggacgaguaaau

SEQ ID NO: 2569994 - RNA, 19 nt, Homo sapiens
  misc_RNA (1)...(19): siRNA sense strand
gaauaugaagagagcacua

SEQ ID NO: 2569995 - RNA, 19 nt, Homo sapiens
  misc_RNA (1)...(19): siRNA sense strand
gugaaggaacugaagcaaa

SEQ ID NO: 2569996 - RNA, 19 nt, Homo sapiens
  misc_RNA (1)...(19): siRNA sense strand
gcuauaaugaugagcaaga

SEQ ID NO: 2569997 - RNA, 19 nt, Homo sapiens
  misc_RNA (1)...(19): siRNA sense strand
cuuguaaacuggagcgaga

SEQ ID NO: 2569998 - RNA, 19 nt, Homo sapiens
  misc_RNA (1)...(19): siRNA sense strand
accaaagacugcauggaaa

SEQ ID NO: 2569999 - RNA, 19 nt, Homo sapiens
  misc_RNA (1)...(19): siRNA sense strand
gacaaauggaggagcaauu

SEQ ID NO: 2570000 - RNA, 19 nt, Homo sapiens
  misc_RNA (1)...(19): siRNA sense strand
aaacugaggaagugaaaga

SEQ ID NO: 2570001 - RNA, 19 nt, Homo sapiens
  misc_RNA (1)...(19): siRNA sense strand
cugaugaacuagcaagcaa

SEQ ID NO: 2570002 - RNA, 19 nt, Homo sapiens
  misc_RNA (1)...(19): siRNA sense strand
gguggaagaggaagaagaa

SEQ ID NO: 2570003 - RNA, 19 nt, Homo sapiens
  misc_RNA (1)...(19): siRNA sense strand
gcauggaaagggugaaaca

SEQ ID NO: 2570004 - RNA, 19 nt, Homo sapiens
  misc_RNA (1)...(19): siRNA sense strand
auacugaugcggaaggaaa

SEQ ID NO: 2570005 - RNA, 19 nt, Homo sapiens
  misc_RNA (1)...(19): siRNA sense strand
cuaacaaagccaaaggaga

SEQ ID NO: 2570006 - RNA, 19 nt, Homo sapiens
  misc_RNA (1)...(19): siRNA sense strand
uuguaaagguucucgguuu

SEQ ID NO: 2570007 - RNA, 19 nt, Homo sapiens
  misc_RNA (1)...(19): siRNA sense strand
cugaggaagugaaagaaga

SEQ ID NO: 2570008 - RNA, 19 nt, Homo sapiens
  misc_RNA (1)...(19): siRNA sense strand
gcagaguggaaaaggauua

SEQ ID NO: 2570009 - RNA, 19 nt, Homo sapiens
  misc_RNA (1)...(19): siRNA sense strand
cacggaagccaaugagaua

SEQ ID NO: 2570010 - RNA, 19 nt, Homo sapiens
  misc_RNA (1)...(19): siRNA sense strand
cacuuuaguucuugggauu

SEQ ID NO: 2570011 - RNA, 19 nt, Homo sapiens
  misc_RNA (1)...(19): siRNA sense strand
ggauaauagacuugccuca

SEQ ID NO: 2570012 - RNA, 19 nt, Homo sapiens
  misc_RNA (1)...(19): siRNA sense strand
agguaguauuaauggucua

SEQ ID NO: 2570013 - RNA, 19 nt, Homo sapiens
  misc_RNA (1)...(19): siRNA sense strand
auggagaugauaugaguaa

SEQ ID NO: 2570014 - RNA, 19 nt, Homo sapiens
  misc_RNA (1)...(19): siRNA sense strand
ggcaaaucauccaagaaau

SEQ ID NO: 2570015 - RNA, 19 nt, Homo sapiens
  misc_RNA (1)...(19): siRNA sense strand
cagaugaagcagacauaau

SEQ ID NO: 2570016 - RNA, 19 nt, Homo sapiens
  misc_RNA (1)...(19): siRNA sense strand
ugucaacugaagaaagaaa

SEQ ID NO: 2570017 - RNA, 19 nt, Homo sapiens
  misc_RNA (1)...(19): siRNA sense strand
guggagaagcugaugauga

SEQ ID NO: 2570018 - RNA, 19 nt, Homo sapiens
  misc_RNA (1)...(19): siRNA sense strand
acaucaagcaguaagguau

SEQ ID NO: 2570019 - RNA, 19 nt, Homo sapiens
  misc_RNA (1)...(19): siRNA sense strand
cugaagcaaagaagcgaaa

SEQ ID NO: 2570020 - RNA, 19 nt, Homo sapiens
  misc_RNA (1)...(19): siRNA sense strand
ccagaugugguuagaagaa

SEQ ID NO: 2570021 - RNA, 19 nt, Homo sapiens
  misc_RNA (1)...(19): siRNA sense strand
gguugaugaaagugaugaa

SEQ ID NO: 2570022 - RNA, 19 nt, Homo sapiens
  misc_RNA (1)...(19): siRNA sense strand
gugggaaguuacuggcaau

SEQ ID NO: 2570023 - RNA, 19 nt, Homo sapiens
  misc_RNA (1)...(19): siRNA sense strand
aaugcaacgaugugauaaa

SEQ ID NO: 2570024 - RNA, 19 nt, Homo sapiens
  misc_RNA (1)...(19): siRNA sense strand
gcuauauagaagagaaucu

SEQ ID NO: 2570025 - RNA, 19 nt, Homo sapiens
  misc_RNA (1)...(19): siRNA sense strand
aggaauuguucgaaugcuu

SEQ ID NO: 2570026 - RNA, 19 nt, Homo sapiens
  misc_RNA (1)...(19): siRNA sense strand
aggaagugaaagaagaaaa

SEQ ID NO: 2570027 - RNA, 19 nt, Homo sapiens
  misc_RNA (1)...(19): siRNA sense strand
acagauucaugguguggaa

SEQ ID NO: 2570028 - RNA, 19 nt, Homo sapiens
  misc_RNA (1)...(19): siRNA sense strand
ucaagcaaagaguggauaa

SEQ ID NO: 2570029 - RNA, 19 nt, Homo sapiens
  misc_RNA (1)...(19): siRNA sense strand
cagcaacccagguggaaga

SEQ ID NO: 2570030 - RNA, 19 nt, Homo sapiens
  misc_RNA (1)...(19): siRNA sense strand
agaugugguuagaagaaaa

SEQ ID NO: 2570031 - RNA, 19 nt, Homo sapiens
  misc_RNA (1)...(19): siRNA sense strand
ugacaaugcaguugagauc

SEQ ID NO: 2570032 - RNA, 19 nt, Homo sapiens
  misc_RNA (1)...(19): siRNA sense strand
aagaggaagaagaagaaga

SEQ ID NO: 2570033 - RNA, 19 nt, Homo sapiens
  misc_RNA (1)...(19): siRNA sense strand
ugaggaagugaaagaagaa

SEQ ID NO: 2570034 - RNA, 19 nt, Homo sapiens
  misc_RNA (1)...(19): siRNA sense strand
ugaggauauugaagccaua

SEQ ID NO: 2570035 - RNA, 19 nt, Homo sapiens
  misc_RNA (1)...(19): siRNA sense strand
ggaagugaaagaagaaaau

SEQ ID NO: 2570036 - RNA, 19 nt, Homo sapiens
  misc_RNA (1)...(19): siRNA sense strand
ggacaguggagaagcugau

SEQ ID NO: 2570037 - RNA, 19 nt, Homo sapiens
  misc_RNA (1)...(19): siRNA sense strand
gaaacaugagaaagguuau

SEQ ID NO: 2570038 - RNA, 19 nt, Homo sapiens
  misc_RNA (1)...(19): siRNA sense strand
agguggaagaggaagaaga

SEQ ID NO: 2570039 - RNA, 19 nt, Homo sapiens
  misc_RNA (1)...(19): siRNA sense strand
aaacagaaaaccaggaaga

SEQ ID NO: 2570040 - RNA, 19 nt, Homo sapiens
  misc_RNA (1)...(19): siRNA sense strand
ggaggaggaagauggucaa

SEQ ID NO: 2570041 - RNA, 19 nt, Homo sapiens
  misc_RNA (1)...(19): siRNA sense strand
uuccaaagccgaagccuaa

SEQ ID NO: 2570042 - RNA, 19 nt, Homo sapiens
  misc_RNA (1)...(19): siRNA sense strand
gguaucuagcagaguggaa

SEQ ID NO: 2570043 - RNA, 19 nt, Homo sapiens
  misc_RNA (1)...(19): siRNA sense strand
agccauaugucucggucaa

SEQ ID NO: 2570044 - RNA, 19 nt, Homo sapiens
  misc_RNA (1)...(19): siRNA sense strand
caaaagagcaacaggaacu

SEQ ID NO: 2570045 - RNA, 19 nt, Homo sapiens
  misc_RNA (1)...(19): siRNA sense strand
aggaggaggaagaugguca

SEQ ID NO: 2570046 - RNA, 19 nt, Homo sapiens
  misc_RNA (1)...(19): siRNA sense strand
agaaaggacaaauggagga

SEQ ID NO: 2570047 - RNA, 19 nt, Homo sapiens
  misc_RNA (1)...(19): siRNA sense strand
aggaaugaugagcgagaua

SEQ ID NO: 2570048 - RNA, 19 nt, Homo sapiens
  misc_RNA (1)...(19): siRNA sense strand
gcagcauaucacaggguua

SEQ ID NO: 2570049 - RNA, 19 nt, Homo sapiens
  misc_RNA (1)...(19): siRNA sense strand
cugcugaugcugagggcua

SEQ ID NO: 2570050 - RNA, 19 nt, Homo sapiens
  misc_RNA (1)...(19): siRNA sense strand
augaggaaaucgagaggau

SEQ ID NO: 2570051 - RNA, 19 nt, Homo sapiens
  misc_RNA (1)...(19): siRNA sense strand
ccuucaaagaggaggacga

SEQ ID NO: 2570052 - RNA, 19 nt, Homo sapiens
  misc_RNA (1)...(19): siRNA sense strand
uauuggaggaagagagaga

SEQ ID NO: 2570053 - RNA, 19 nt, Homo sapiens
  misc_RNA (1)...(19): siRNA sense strand
uuggaggaagagagagaaa

SEQ ID NO: 2570054 - RNA, 19 nt, Homo sapiens
  misc_RNA (1)...(19): siRNA sense strand
augagaggccuguggacua

SEQ ID NO: 2570055 - RNA, 19 nt, Homo sapiens
  misc_RNA (1)...(19): siRNA sense strand
gaggaggacgagugggaca

SEQ ID NO: 2570056 - RNA, 19 nt, Homo sapiens
  misc_RNA (1)...(19): siRNA sense strand
agaaagagcuggugcaguc

SEQ ID NO: 2570057 - RNA, 19 nt, Homo sapiens
  misc_RNA (1)...(19): siRNA sense strand
ucuuaaacuacaugaguga

SEQ ID NO: 2570058 - RNA, 19 nt, Homo sapiens
  misc_RNA (1)...(19): siRNA sense strand
ggaaccaaguaccaggcaa

SEQ ID NO: 2570059 - RNA, 19 nt, Homo sapiens
  misc_RNA (1)...(19): siRNA sense strand
cuaggaaugaugagcgaga

SEQ ID NO: 2570060 - RNA, 19 nt, Homo sapiens
  misc_RNA (1)...(19): siRNA sense strand
agcaguuauuggaggaaga

SEQ ID NO: 2570061 - RNA, 19 nt, Homo sapiens
  misc_RNA (1)...(19): siRNA sense strand
cguagacagaagaggcuuu

SEQ ID NO: 2570062 - RNA, 19 nt, Homo sapiens
  misc_RNA (1)...(19): siRNA sense strand
cguuaacaaaucagacaga

SEQ ID NO: 2570063 - RNA, 19 nt, Homo sapiens
  misc_RNA (1)...(19): siRNA sense strand
uguuguggcccgaguaaau

SEQ ID NO: 2570064 - RNA, 19 nt, Homo sapiens
  misc_RNA (1)...(19): siRNA sense strand
uggagugggaggacaguau

SEQ ID NO: 2570065 - RNA, 19 nt, Homo sapiens
  misc_RNA (1)...(19): siRNA sense strand
aagauuaagagcugggcca

SEQ ID NO: 2570066 - RNA, 19 nt, Homo sapiens
  misc_RNA (1)...(19): siRNA sense strand
cagagaaagagcuggugca

SEQ ID NO: 2570067 - RNA, 19 nt, Homo sapiens
  misc_RNA (1)...(19): siRNA sense strand
ccaacaaaauggaagccuu

SEQ ID NO: 2570068 - RNA, 19 nt, Homo sapiens
  misc_RNA (1)...(19): siRNA sense strand
guagguaccaccauggcaa

SEQ ID NO: 2570069 - RNA, 19 nt, Homo sapiens
  misc_RNA (1)...(19): siRNA sense strand
aagaggaggacgaguggga

SEQ ID NO: 2570070 - RNA, 19 nt, Homo sapiens
  misc_RNA (1)...(19): siRNA sense strand
gaaugaugagcgagauacu

SEQ ID NO: 2570071 - RNA, 19 nt, Homo sapiens
  misc_RNA (1)...(19): siRNA sense strand
gagagaagaaagaggguca

SEQ ID NO: 2570072 - RNA, 19 nt, Homo sapiens
  misc_RNA (1)...(19): siRNA sense strand
ggaaggaggaggaggcagu

SEQ ID NO: 2570073 - RNA, 19 nt, Homo sapiens
  misc_RNA (1)...(19): siRNA sense strand
cccaaaaggggaagaagaa

SEQ ID NO: 2570074 - RNA, 19 nt, Homo sapiens
  misc_RNA (1)...(19): siRNA sense strand
cuaauaggaaggaggagga

SEQ ID NO: 2570075 - RNA, 19 nt, Homo sapiens
  misc_RNA (1)...(19): siRNA sense strand
gcccaaaaggggaagaaga

SEQ ID NO: 2570076 - RNA, 19 nt, Homo sapiens
  misc_RNA (1)...(19): siRNA sense strand
gcuugcuggaucagacaaa

SEQ ID NO: 2570077 - RNA, 19 nt, Homo sapiens
  misc_RNA (1)...(19): siRNA sense strand
cagucaagcuaauaggaag

SEQ ID NO: 2570078 - RNA, 19 nt, Homo sapiens
  misc_RNA (1)...(19): siRNA sense strand
acaguauugccauggacaa

SEQ ID NO: 2570079 - RNA, 19 nt, Homo sapiens
  misc_RNA (1)...(19): siRNA sense strand
ucgccaagaugaagggcua

SEQ ID NO: 2570080 - RNA, 19 nt, Homo sapiens
  misc_RNA (1)...(19): siRNA sense strand
aggaagaagaagaggagga

SEQ ID NO: 2570081 - RNA, 19 nt, Homo sapiens
  misc_RNA (1)...(19): siRNA sense strand
cggcagaaggaguacaaau

SEQ ID NO: 2570082 - RNA, 19 nt, Homo sapiens
  misc_RNA (1)...(19): siRNA sense strand
cagaaaacccugaaggaga

SEQ ID NO: 2570083 - RNA, 19 nt, Homo sapiens
  misc_RNA (1)...(19): siRNA sense strand
acgaggaauccaaggagaa

SEQ ID NO: 2570084 - RNA, 19 nt, Homo sapiens
  misc_RNA (1)...(19): siRNA sense strand
cccaagaggaagaagaaga

SEQ ID NO: 2570085 - RNA, 19 nt, Homo sapiens
  misc_RNA (1)...(19): siRNA sense strand
aggaggaugaagaggaaga

SEQ ID NO: 2570086 - RNA, 19 nt, Homo sapiens
  misc_RNA (1)...(19): siRNA sense strand
cugcagagggugacgguga

SEQ ID NO: 2570087 - RNA, 19 nt, Homo sapiens
  misc_RNA (1)...(19): siRNA sense strand
cagccaaggagaagaacga

SEQ ID NO: 2570088 - RNA, 19 nt, Homo sapiens
  misc_RNA (1)...(19): siRNA sense strand
cugaaggagaggagaagga

SEQ ID NO: 2570089 - RNA, 19 nt, Homo sapiens
  misc_RNA (1)...(19): siRNA sense strand
uggaagagccugaaccaga

SEQ ID NO: 2570090 - RNA, 19 nt, Homo sapiens
  misc_RNA (1)...(19): siRNA sense strand
ccgaagcugcagaggguga

SEQ ID NO: 2570091 - RNA, 19 nt, Homo sapiens
  misc_RNA (1)...(19): siRNA sense strand
caacaagaggaaaggguuc

SEQ ID NO: 2570092 - RNA, 19 nt, Homo sapiens
  misc_RNA (1)...(19): siRNA sense strand
gcagcgacgaggaagggaa

SEQ ID NO: 2570093 - RNA, 19 nt, Homo sapiens
  misc_RNA (1)...(19): siRNA sense strand
gggacuugcuggaggacuc

SEQ ID NO: 2570094 - RNA, 19 nt, Homo sapiens
  misc_RNA (1)...(19): siRNA sense strand
caucagagaucaugagagc

SEQ ID NO: 2570095 - RNA, 19 nt, Homo sapiens
  misc_RNA (1)...(19): siRNA sense strand
ccaacaagaggaaaggguu

SEQ ID NO: 2570096 - RNA, 19 nt, Homo sapiens
  misc_RNA (1)...(19): siRNA sense strand
cuaccaaggaagaugcuga

SEQ ID NO: 2570097 - RNA, 19 nt, Homo sapiens
  misc_RNA (1)...(19): siRNA sense strand
gccaaggagaagaacgaga

SEQ ID NO: 2570098 - RNA, 19 nt, Homo sapiens
  misc_RNA (1)...(19): siRNA sense strand
ggaugaagaggaagaggcu

SEQ ID NO: 2570099 - RNA, 19 nt, Homo sapiens
  misc_RNA (1)...(19): siRNA sense strand
augaagaggaagaggcuac

SEQ ID NO: 2570100 - RNA, 19 nt, Homo sapiens
  misc_RNA (1)...(19): siRNA sense strand
acccugaaggagaggagaa

SEQ ID NO: 2570101 - RNA, 19 nt, Homo sapiens
  misc_RNA (1)...(19): siRNA sense strand
ccaacaaauaccaagucuu

SEQ ID NO: 2570102 - RNA, 19 nt, Homo sapiens
  misc_RNA (1)...(19): siRNA sense strand
gagaagaacgagaaaggag

SEQ ID NO: 2570103 - RNA, 19 nt, Homo sapiens
  misc_RNA (1)...(19): siRNA sense strand
gcguugaagaggagagcag

SEQ ID NO: 2570104 - RNA, 19 nt, Homo sapiens
  misc_RNA (1)...(19): siRNA sense strand
gaggaagggaagcugguca

SEQ ID NO: 2570105 - RNA, 19 nt, Homo sapiens
  misc_RNA (1)...(19): siRNA sense strand
cugucaaggcuuccggcua

SEQ ID NO: 2570106 - RNA, 19 nt, Homo sapiens
  misc_RNA (1)...(19): siRNA sense strand
agacauaugaugaggaaga

SEQ ID NO: 2570107 - RNA, 19 nt, Homo sapiens
  misc_RNA (1)...(19): siRNA sense strand
ccaucaagaaugaggaaau

SEQ ID NO: 2570108 - RNA, 19 nt, Homo sapiens
  misc_RNA (1)...(19): siRNA sense strand
aggcaaggacuuugagcaa

SEQ ID NO: 2570109 - RNA, 19 nt, Homo sapiens
  misc_RNA (1)...(19): siRNA sense strand
cagaccaagcugugagaua

SEQ ID NO: 2570110 - RNA, 19 nt, Homo sapiens
  misc_RNA (1)...(19): siRNA sense strand
cagcagagggcauggagaa

SEQ ID NO: 2570111 - RNA, 19 nt, Homo sapiens
  misc_RNA (1)...(19): siRNA sense strand
cagcaagagaagaaggaga

SEQ ID NO: 2570112 - RNA, 19 nt, Homo sapiens
  misc_RNA (1)...(19): siRNA sense strand
ccuuacugaucuagagcaa

SEQ ID NO: 2570113 - RNA, 19 nt, Homo sapiens
  misc_RNA (1)...(19): siRNA sense strand
gggagaacuauguguggaa

SEQ ID NO: 2570114 - RNA, 19 nt, Homo sapiens
  misc_RNA (1)...(19): siRNA sense strand
caccagaugaagagacaua

SEQ ID NO: 2570115 - RNA, 19 nt, Homo sapiens
  misc_RNA (1)...(19): siRNA sense strand
gaagaaauccaaagaggga

SEQ ID NO: 2570116 - RNA, 19 nt, Homo sapiens
  misc_RNA (1)...(19): siRNA sense strand
uuggagaguuugugaguga

SEQ ID NO: 2570117 - RNA, 19 nt, Homo sapiens
  misc_RNA (1)...(19): siRNA sense strand
acaagaagaugauuggaga

SEQ ID NO: 2570118 - RNA, 19 nt, Homo sapiens
  misc_RNA (1)...(19): siRNA sense strand
gaugcaagucccaggagaa

SEQ ID NO: 2570119 - RNA, 19 nt, Homo sapiens
  misc_RNA (1)...(19): siRNA sense strand
gagaagaaggagacagcca

SEQ ID NO: 2570120 - RNA, 19 nt, Homo sapiens
  misc_RNA (1)...(19): siRNA sense strand
ggagacaaucauccagaaa

SEQ ID NO: 2570121 - RNA, 19 nt, Homo sapiens
  misc_RNA (1)...(19): siRNA sense strand
gccuggaagcagugagcua

SEQ ID NO: 2570122 - RNA, 19 nt, Homo sapiens
  misc_RNA (1)...(19): siRNA sense strand
cuuaugagaugaaggagau

SEQ ID NO: 2570123 - RNA, 19 nt, Homo sapiens
  misc_RNA (1)...(19): siRNA sense strand
cugaaaaccaagaggccaa

SEQ ID NO: 2570124 - RNA, 19 nt, Homo sapiens
  misc_RNA (1)...(19): siRNA sense strand
gaugaagcccagugugcua

SEQ ID NO: 2570125 - RNA, 19 nt, Homo sapiens
  misc_RNA (1)...(19): siRNA sense strand
uggaagaaacagaagagau

SEQ ID NO: 2570126 - RNA, 19 nt, Homo sapiens
  misc_RNA (1)...(19): siRNA sense strand
agagguugcuggaggcauu

SEQ ID NO: 2570127 - RNA, 19 nt, Homo sapiens
  misc_RNA (1)...(19): siRNA sense strand
gcucaguggcuccgagaga

SEQ ID NO: 2570128 - RNA, 19 nt, Homo sapiens
  misc_RNA (1)...(19): siRNA sense strand
agucaacagugcugagcuu

SEQ ID NO: 2570129 - RNA, 19 nt, Homo sapiens
  misc_RNA (1)...(19): siRNA sense strand
cuuagaguguauaaagcaa

SEQ ID NO: 2570130 - RNA, 19 nt, Homo sapiens
  misc_RNA (1)...(19): siRNA sense strand
ugggaaagcuguaggcaug

SEQ ID NO: 2570131 - RNA, 19 nt, Homo sapiens
  misc_RNA (1)...(19): siRNA sense strand
cagagggcauggagaacau

SEQ ID NO: 2570132 - RNA, 19 nt, Homo sapiens
  misc_RNA (1)...(19): siRNA sense strand
gccagaagauugaagcuga

SEQ ID NO: 2570133 - RNA, 19 nt, Homo sapiens
  misc_RNA (1)...(19): siRNA sense strand
cgaaaugcccgauggagca

SEQ ID NO: 2570134 - RNA, 19 nt, Homo sapiens
  misc_RNA (1)...(19): siRNA sense strand
ucacccagcaagagaagaa

SEQ ID NO: 2570135 - RNA, 19 nt, Homo sapiens
  misc_RNA (1)...(19): siRNA sense strand
ccagaagauugaagcugau

SEQ ID NO: 2570136 - RNA, 19 nt, Homo sapiens
  misc_RNA (1)...(19): siRNA sense strand
augaagagacauaugauga

SEQ ID NO: 2570137 - RNA, 19 nt, Homo sapiens
  misc_RNA (1)...(19): siRNA sense strand
gcagacuguucgagaccau

SEQ ID NO: 2570138 - RNA, 19 nt, Homo sapiens
  misc_RNA (1)...(19): siRNA sense strand
gagccuggaucgaggguac

SEQ ID NO: 2570139 - RNA, 19 nt, Homo sapiens
  misc_RNA (1)...(19): siRNA sense strand
gugaugaugaugaggacga

SEQ ID NO: 2570140 - RNA, 19 nt, Homo sapiens
  misc_RNA (1)...(19): siRNA sense strand
ggaugcaggcacugaccua

SEQ ID NO: 2570141 - RNA, 19 nt, Homo sapiens
  misc_RNA (1)...(19): siRNA sense strand
cagcacagcuacagagccu

SEQ ID NO: 2570142 - RNA, 19 nt, Homo sapiens
  misc_RNA (1)...(19): siRNA sense strand
ggagauuaacauugugguu

SEQ ID NO: 2570143 - RNA, 19 nt, Homo sapiens
  misc_RNA (1)...(19): siRNA sense strand
ucuuggacuucauggacaa

SEQ ID NO: 2570144 - RNA, 19 nt, Homo sapiens
  misc_RNA (1)...(19): siRNA sense strand
ccaccuaaccaaugaaucu

SEQ ID NO: 2570145 - RNA, 19 nt, Homo sapiens
  misc_RNA (1)...(19): siRNA sense strand
aggaaauuguaaugccuga

SEQ ID NO: 2570146 - RNA, 19 nt, Homo sapiens
  misc_RNA (1)...(19): siRNA sense strand
guggcaagagucacaaaua

SEQ ID NO: 2570147 - RNA, 19 nt, Homo sapiens
  misc_RNA (1)...(19): siRNA sense strand
augaaguuguccugaugaa

SEQ ID NO: 2570148 - RNA, 19 nt, Homo sapiens
  misc_RNA (1)...(19): siRNA sense strand
agaucaucacuguggagaa

SEQ ID NO: 2570149 - RNA, 19 nt, Homo sapiens
  misc_RNA (1)...(19): siRNA sense strand
accaagaggccaagagagu

SEQ ID NO: 2570150 - RNA, 19 nt, Homo sapiens
  misc_RNA (1)...(19): siRNA sense strand
gccaccagaacaugggaaa

SEQ ID NO: 2570151 - RNA, 19 nt, Homo sapiens
  misc_RNA (1)...(19): siRNA sense strand
ccaugacccuggaggaguu

SEQ ID NO: 2570152 - RNA, 19 nt, Homo sapiens
  misc_RNA (1)...(19): siRNA sense strand
gguuagugguugggaagga

SEQ ID NO: 2570153 - RNA, 19 nt, Homo sapiens
  misc_RNA (1)...(19): siRNA sense strand
aguuuaaagaagaacccaa

SEQ ID NO: 2570154 - RNA, 19 nt, Homo sapiens
  misc_RNA (1)...(19): siRNA sense strand
ccaacaugaagaagcugaa

SEQ ID NO: 2570155 - RNA, 19 nt, Homo sapiens
  misc_RNA (1)...(19): siRNA sense strand
ccaagaugccuuaugagau

SEQ ID NO: 2570156 - RNA, 19 nt, Homo sapiens
  misc_RNA (1)...(19): siRNA sense strand
ccgagaagcuagcaauacu

SEQ ID NO: 2570157 - RNA, 19 nt, Homo sapiens
  misc_RNA (1)...(19): siRNA sense strand
cggcuggacaagaagauga

SEQ ID NO: 2570158 - RNA, 19 nt, Homo sapiens
  misc_RNA (1)...(19): siRNA sense strand
uuguaaugccugaggagca

SEQ ID NO: 2570159 - RNA, 19 nt, Homo sapiens
  misc_RNA (1)...(19): siRNA sense strand
uaaggauuguguuggagaa

SEQ ID NO: 2570160 - RNA, 19 nt, Homo sapiens
  misc_RNA (1)...(19): siRNA sense strand
gcauuuugcuacugaugaa

SEQ ID NO: 2570161 - RNA, 19 nt, Homo sapiens
  misc_RNA (1)...(19): siRNA sense strand
ggaugcaagucccaggaga

SEQ ID NO: 2570162 - RNA, 19 nt, Homo sapiens
  misc_RNA (1)...(19): siRNA sense strand
gcauaguuucggucaucua

SEQ ID NO: 2570163 - RNA, 19 nt, Homo sapiens
  misc_RNA (1)...(19): siRNA sense strand
augaagaagcugaaaauga

SEQ ID NO: 2570164 - RNA, 19 nt, Homo sapiens
  misc_RNA (1)...(19): siRNA sense strand
uaugauagagguagaagau

SEQ ID NO: 2570165 - RNA, 19 nt, Homo sapiens
  misc_RNA (1)...(19): siRNA sense strand
ccucgaaggaacauggaau

SEQ ID NO: 2570166 - RNA, 19 nt, Homo sapiens
  misc_RNA (1)...(19): siRNA sense strand
ggacaguggugcuggcuuc

SEQ ID NO: 2570167 - RNA, 19 nt, Homo sapiens
  misc_RNA (1)...(19): siRNA sense strand
guagagagguugaacgugu

SEQ ID NO: 2570168 - RNA, 19 nt, Homo sapiens
  misc_RNA (1)...(19): siRNA sense strand
cugccaaaauucacagaaa

SEQ ID NO: 2570169 - RNA, 19 nt, Homo sapiens
  misc_RNA (1)...(19): siRNA sense strand
agauguuguuaaauggcaa

SEQ ID NO: 2570170 - RNA, 19 nt, Homo sapiens
  misc_RNA (1)...(19): siRNA sense strand
cucaaagagauguuguuaa

SEQ ID NO: 2570171 - RNA, 19 nt, Homo sapiens
  misc_RNA (1)...(19): siRNA sense strand
gggcaaugggcuugugauc

SEQ ID NO: 2570172 - RNA, 19 nt, Homo sapiens
  misc_RNA (1)...(19): siRNA sense strand
gguccugggcaaugggcuu

SEQ ID NO: 2570173 - RNA, 19 nt, Homo sapiens
  misc_RNA (1)...(19): siRNA sense strand
cuuaugaacuaauuggcau

SEQ ID NO: 2570174 - RNA, 19 nt, Homo sapiens
  misc_RNA (1)...(19): siRNA sense strand
cugaggagacggaguuaca

SEQ ID NO: 2570175 - RNA, 19 nt, Homo sapiens
  misc_RNA (1)...(19): siRNA sense strand
gcaccaugagucuggccaa

SEQ ID NO: 2570176 - RNA, 19 nt, Homo sapiens
  misc_RNA (1)...(19): siRNA sense strand
cuuccaagaaagacugauu

SEQ ID NO: 2570177 - RNA, 19 nt, Homo sapiens
  misc_RNA (1)...(19): siRNA sense strand
ugaaugaaacugaggaggu

SEQ ID NO: 2570178 - RNA, 19 nt, Homo sapiens
  misc_RNA (1)...(19): siRNA sense strand
agucuggccaagaggguga

SEQ ID NO: 2570179 - RNA, 19 nt, Homo sapiens
  misc_RNA (1)...(19): siRNA sense strand
acauugagguggacggcaa

SEQ ID NO: 2570180 - RNA, 19 nt, Homo sapiens
  misc_RNA (1)...(19): siRNA sense strand
gcaagaagcuggugguggu

SEQ ID NO: 2570181 - RNA, 19 nt, Homo sapiens
  misc_RNA (1)...(19): siRNA sense strand
ccaucauccugguggccaa

SEQ ID NO: 2570182 - RNA, 19 nt, Homo sapiens
  misc_RNA (1)...(19): siRNA sense strand
cuguggaggcugagggaga

SEQ ID NO: 2570183 - RNA, 19 nt, Homo sapiens
  misc_RNA (1)...(19): siRNA sense strand
acaaagagcugcuggggau

SEQ ID NO: 2570184 - RNA, 19 nt, Homo sapiens
  misc_RNA (1)...(19): siRNA sense strand
ggacauagucaucgaggag

SEQ ID NO: 2570185 - RNA, 19 nt, Homo sapiens
  misc_RNA (1)...(19): siRNA sense strand
ccgcuagcucugaggacau

SEQ ID NO: 2570186 - RNA, 19 nt, Homo sapiens
  misc_RNA (1)...(19): siRNA sense strand
gggaauggacaaagagcug

SEQ ID NO: 2570187 - RNA, 19 nt, Homo sapiens
  misc_RNA (1)...(19): siRNA sense strand
ucgaggaguuuacgcggaa

SEQ ID NO: 2570188 - RNA, 19 nt, Homo sapiens
  misc_RNA (1)...(19): siRNA sense strand
ggaaaggcgaggaggagag

SEQ ID NO: 2570189 - RNA, 19 nt, Homo sapiens
  misc_RNA (1)...(19): siRNA sense strand
cggaaaggcgaggaggaga

SEQ ID NO: 2570190 - RNA, 19 nt, Homo sapiens
  misc_RNA (1)...(19): siRNA sense strand
gaaaguacaauuugcacca

SEQ ID NO: 2570191 - RNA, 19 nt, Homo sapiens
  misc_RNA (1)...(19): siRNA sense strand
ccuacaaagucagagucaa

SEQ ID NO: 2570192 - RNA, 19 nt, Homo sapiens
  misc_RNA (1)...(19): siRNA sense strand
gcaagaagaugaugcagga

SEQ ID NO: 2570193 - RNA, 19 nt, Homo sapiens
  misc_RNA (1)...(19): siRNA sense strand
gcaaggguggugugggcaa

SEQ ID NO: 2570194 - RNA, 19 nt, Homo sapiens
  misc_RNA (1)...(19): siRNA sense strand
gucacaagauccaggccaa

SEQ ID NO: 2570195 - RNA, 19 nt, Homo sapiens
  misc_RNA (1)...(19): siRNA sense strand
aguucuucgaggaggacaa

SEQ ID NO: 2570196 - RNA, 19 nt, Homo sapiens
  misc_RNA (1)...(19): siRNA sense strand
agaugaugcaggaggccau

SEQ ID NO: 2570197 - RNA, 19 nt, Homo sapiens
  misc_RNA (1)...(19): siRNA sense strand
uggugaagggcaugaacuu

SEQ ID NO: 2570198 - RNA, 19 nt, Homo sapiens
  misc_RNA (1)...(19): siRNA sense strand
agacagagaggcugaucca

SEQ ID NO: 2570199 - RNA, 19 nt, Homo sapiens
  misc_RNA (1)...(19): siRNA sense strand
uggccaagugcaagauuga

SEQ ID NO: 2570200 - RNA, 19 nt, Homo sapiens
  misc_RNA (1)...(19): siRNA sense strand
acgaguucuucgaggagga

SEQ ID NO: 2570201 - RNA, 19 nt, Homo sapiens
  misc_RNA (1)...(19): siRNA sense strand
ggaagguagucauuggcua

SEQ ID NO: 2570202 - RNA, 19 nt, Homo sapiens
  misc_RNA (1)...(19): siRNA sense strand
guaagauaggaaagaagaa

SEQ ID NO: 2570203 - RNA, 19 nt, Homo sapiens
  misc_RNA (1)...(19): siRNA sense strand
aagaaagaauagaaggagu

SEQ ID NO: 2570204 - RNA, 19 nt, Homo sapiens
  misc_RNA (1)...(19): siRNA sense strand
gaaugaucuucuuggacau

SEQ ID NO: 2570205 - RNA, 19 nt, Homo sapiens
  misc_RNA (1)...(19): siRNA sense strand
uggcaaagcuaaagaaaag

SEQ ID NO: 2570206 - RNA, 19 nt, Homo sapiens
  misc_RNA (1)...(19): siRNA sense strand
ccuaccaccuacaggacua

SEQ ID NO: 2570207 - RNA, 19 nt, Homo sapiens
  misc_RNA (1)...(19): siRNA sense strand
cuguggaagugaaccuaaa

SEQ ID NO: 2570208 - RNA, 19 nt, Homo sapiens
  misc_RNA (1)...(19): siRNA sense strand
uauccagagcucagguaaa

SEQ ID NO: 2570209 - RNA, 19 nt, Homo sapiens
  misc_RNA (1)...(19): siRNA sense strand
gaaauuugguuaauccgaa

SEQ ID NO: 2570210 - RNA, 19 nt, Homo sapiens
  misc_RNA (1)...(19): siRNA sense strand
gcauaaugugacuguccua

SEQ ID NO: 2570211 - RNA, 19 nt, Homo sapiens
  misc_RNA (1)...(19): siRNA sense strand
aagaauucaccaugaucaa

SEQ ID NO: 2570212 - RNA, 19 nt, Homo sapiens
  misc_RNA (1)...(19): siRNA sense strand
aaggaguaauuaaggacuu

SEQ ID NO: 2570213 - RNA, 19 nt, Homo sapiens
  misc_RNA (1)...(19): siRNA sense strand
cugccaaaccuuuaccuaa

SEQ ID NO: 2570214 - RNA, 19 nt, Homo sapiens
  misc_RNA (1)...(19): siRNA sense strand
ggagauucuaucaggagau

SEQ ID NO: 2570215 - RNA, 19 nt, Homo sapiens
  misc_RNA (1)...(19): siRNA sense strand
uggcgauauaguagcuuua

SEQ ID NO: 2570216 - RNA, 19 nt, Homo sapiens
  misc_RNA (1)...(19): siRNA sense strand
aggaaagaaaccagccaca

SEQ ID NO: 2570217 - RNA, 19 nt, Homo sapiens
  misc_RNA (1)...(19): siRNA sense strand
caugaaggccaaaggagca

SEQ ID NO: 2570218 - RNA, 19 nt, Homo sapiens
  misc_RNA (1)...(19): siRNA sense strand
cuaugagguuaucaagaau

SEQ ID NO: 2570219 - RNA, 19 nt, Homo sapiens
  misc_RNA (1)...(19): siRNA sense strand
aggagauggccaaaguaau

SEQ ID NO: 2570220 - RNA, 19 nt, Homo sapiens
  misc_RNA (1)...(19): siRNA sense strand
aagugaaccuaaacacaau

SEQ ID NO: 2570221 - RNA, 19 nt, Homo sapiens
  misc_RNA (1)...(19): siRNA sense strand
aagagaaugcuaugagguu

SEQ ID NO: 2570222 - RNA, 19 nt, Homo sapiens
  misc_RNA (1)...(19): siRNA sense strand
ccuucaaccauuuggagau

SEQ ID NO: 2570223 - RNA, 19 nt, Homo sapiens
  misc_RNA (1)...(19): siRNA sense strand
ggaaaagcacugugggaag

SEQ ID NO: 2570224 - RNA, 19 nt, Homo sapiens
  misc_RNA (1)...(19): siRNA sense strand
uuacagaagaaaaggccaa

SEQ ID NO: 2570225 - RNA, 19 nt, Homo sapiens
  misc_RNA (1)...(19): siRNA sense strand
ugguggaacuaaugggauc

SEQ ID NO: 2570226 - RNA, 19 nt, Homo sapiens
  misc_RNA (1)...(19): siRNA sense strand
cuacguuaugugagacuau

SEQ ID NO: 2570227 - RNA, 19 nt, Homo sapiens
  misc_RNA (1)...(19): siRNA sense strand
agauaagucucauaggaac

SEQ ID NO: 2570228 - RNA, 19 nt, Homo sapiens
  misc_RNA (1)...(19): siRNA sense strand
cuuugagaacagucauuaa

SEQ ID NO: 2570229 - RNA, 19 nt, Homo sapiens
  misc_RNA (1)...(19): siRNA sense strand
gcuaaagaaaagcaaguuu

SEQ ID NO: 2570230 - RNA, 19 nt, Homo sapiens
  misc_RNA (1)...(19): siRNA sense strand
cccacuacguuaugugaga

SEQ ID NO: 2570231 - RNA, 19 nt, Homo sapiens
  misc_RNA (1)...(19): siRNA sense strand
acagaagguuuuauggaga

SEQ ID NO: 2570232 - RNA, 19 nt, Homo sapiens
  misc_RNA (1)...(19): siRNA sense strand
uaacagaaguugcgcggua

SEQ ID NO: 2570233 - RNA, 19 nt, Homo sapiens
  misc_RNA (1)...(19): siRNA sense strand
aaagaaaaggagagggauu

SEQ ID NO: 2570234 - RNA, 19 nt, Homo sapiens
  misc_RNA (1)...(19): siRNA sense strand
ggaucugcaaaguuagaaa

SEQ ID NO: 2570235 - RNA, 19 nt, Homo sapiens
  misc_RNA (1)...(19): siRNA sense strand
agaaagaaaaggagaggga

SEQ ID NO: 2570236 - RNA, 19 nt, Homo sapiens
  misc_RNA (1)...(19): siRNA sense strand
ccuccaugccucagaguca

SEQ ID NO: 2570237 - RNA, 19 nt, Homo sapiens
  misc_RNA (1)...(19): siRNA sense strand
aagaaaaggagagggauua

SEQ ID NO: 2570238 - RNA, 19 nt, Homo sapiens
  misc_RNA (1)...(19): siRNA sense strand
aggagagggauuauagaga

SEQ ID NO: 2570239 - RNA, 19 nt, Homo sapiens
  misc_RNA (1)...(19): siRNA sense strand
gagaaaaggcgucgggauc

SEQ ID NO: 2570240 - RNA, 19 nt, Homo sapiens
  misc_RNA (1)...(19): siRNA sense strand
cagcaguggaacaaacaau

SEQ ID NO: 2570241 - RNA, 19 nt, Homo sapiens
  misc_RNA (1)...(19): siRNA sense strand
ugcaaaugacaguggauca

SEQ ID NO: 2570242 - RNA, 19 nt, Homo sapiens
  misc_RNA (1)...(19): siRNA sense strand
cuucaugagcauaggauuc

SEQ ID NO: 2570243 - RNA, 19 nt, Homo sapiens
  misc_RNA (1)...(19): siRNA sense strand
gggcaaaguacuagcucug

SEQ ID NO: 2570244 - RNA, 19 nt, Homo sapiens
  misc_RNA (1)...(19): siRNA sense strand
guugagaagacuugugcca

SEQ ID NO: 2570245 - RNA, 19 nt, Homo sapiens
  misc_RNA (1)...(19): siRNA sense strand
gcagaccagcaguggaaca

SEQ ID NO: 2570246 - RNA, 19 nt, Homo sapiens
  misc_RNA (1)...(19): siRNA sense strand
ugagaagacuugugccaac

SEQ ID NO: 2570247 - RNA, 19 nt, Homo sapiens
  misc_RNA (1)...(19): siRNA sense strand
gcaugauauaugagggcau

SEQ ID NO: 2570248 - RNA, 19 nt, Homo sapiens
  misc_RNA (1)...(19): siRNA sense strand
aaauggagugagagaacaa

SEQ ID NO: 2570249 - RNA, 19 nt, Homo sapiens
  misc_RNA (1)...(19): siRNA sense strand
cugggauccucgaggcuau

SEQ ID NO: 2570250 - RNA, 19 nt, Homo sapiens
  misc_RNA (1)...(19): siRNA sense strand
cugaaguuuaagaagguuu

SEQ ID NO: 2570251 - RNA, 19 nt, Homo sapiens
  misc_RNA (1)...(19): siRNA sense strand
ggguaugacuacuuugcca

SEQ ID NO: 2570252 - RNA, 19 nt, Homo sapiens
  misc_RNA (1)...(19): siRNA sense strand
uugcagaugaauucaacaa

SEQ ID NO: 2570253 - RNA, 19 nt, Homo sapiens
  misc_RNA (1)...(19): siRNA sense strand
cauuucagcaccucgguaa

SEQ ID NO: 2570254 - RNA, 19 nt, Homo sapiens
  misc_RNA (1)...(19): siRNA sense strand
ggaagaaggaggaggagga

SEQ ID NO: 2570255 - RNA, 19 nt, Homo sapiens
  misc_RNA (1)...(19): siRNA sense strand
gaagacaaacugagggaca

SEQ ID NO: 2570256 - RNA, 19 nt, Homo sapiens
  misc_RNA (1)...(19): siRNA sense strand
gugcagagaaggagaggga

SEQ ID NO: 2570257 - RNA, 19 nt, Homo sapiens
  misc_RNA (1)...(19): siRNA sense strand
gggagaagcugaaacgcca

SEQ ID NO: 2570258 - RNA, 19 nt, Homo sapiens
  misc_RNA (1)...(19): siRNA sense strand
ccagaagggaggaggagga

SEQ ID NO: 2570259 - RNA, 19 nt, Homo sapiens
  misc_RNA (1)...(19): siRNA sense strand
gggaggaggaggaugccaa

SEQ ID NO: 2570260 - RNA, 19 nt, Homo sapiens
  misc_RNA (1)...(19): siRNA sense strand
agcugaaacgccagaaaua

SEQ ID NO: 2570261 - RNA, 19 nt, Homo sapiens
  misc_RNA (1)...(19): siRNA sense strand
gcccagaagcacagcaaga

SEQ ID NO: 2570262 - RNA, 19 nt, Homo sapiens
  misc_RNA (1)...(19): siRNA sense strand
aggaagaggaaguucaaga

SEQ ID NO: 2570263 - RNA, 19 nt, Homo sapiens
  misc_RNA (1)...(19): siRNA sense strand
gaggagaaaccgagaccca

SEQ ID NO: 2570264 - RNA, 19 nt, Homo sapiens
  misc_RNA (1)...(19): siRNA sense strand
uugaacagguggaggagca

SEQ ID NO: 2570265 - RNA, 19 nt, Homo sapiens
  misc_RNA (1)...(19): siRNA sense strand
gccaaggagcucugggaga

SEQ ID NO: 2570266 - RNA, 19 nt, Homo sapiens
  misc_RNA (1)...(19): siRNA sense strand
gggacaaggccaaggagcu

SEQ ID NO: 2570267 - RNA, 19 nt, Homo sapiens
  misc_RNA (1)...(19): siRNA sense strand
aggaagcccaggaggaaga

SEQ ID NO: 2570268 - RNA, 19 nt, Homo sapiens
  misc_RNA (1)...(19): siRNA sense strand
gcgucagaacaaagaccua

SEQ ID NO: 2570269 - RNA, 19 nt, Homo sapiens
  misc_RNA (1)...(19): siRNA sense strand
uggccaaggcugaccagaa

SEQ ID NO: 2570270 - RNA, 19 nt, Homo sapiens
  misc_RNA (1)...(19): siRNA sense strand
acaaagaccuaauggagcu

SEQ ID NO: 2570271 - RNA, 19 nt, Homo sapiens
  misc_RNA (1)...(19): siRNA sense strand
agaacagacuggcggagga

SEQ ID NO: 2570272 - RNA, 19 nt, Homo sapiens
  misc_RNA (1)...(19): siRNA sense strand
gugaagacaaacugaggga

SEQ ID NO: 2570273 - RNA, 19 nt, Homo sapiens
  misc_RNA (1)...(19): siRNA sense strand
acagacuggcggaggaaaa

SEQ ID NO: 2570274 - RNA, 19 nt, Homo sapiens
  misc_RNA (1)...(19): siRNA sense strand
acgaagaagaagaggaagc

SEQ ID NO: 2570275 - RNA, 19 nt, Homo sapiens
  misc_RNA (1)...(19): siRNA sense strand
gcagagaaggagagggagc

SEQ ID NO: 2570276 - RNA, 19 nt, Homo sapiens
  misc_RNA (1)...(19): siRNA sense strand
agaggagggcagaggacga

SEQ ID NO: 2570277 - RNA, 19 nt, Homo sapiens
  misc_RNA (1)...(19): siRNA sense strand
aggaggaagaggaaguuca

SEQ ID NO: 2570278 - RNA, 19 nt, Homo sapiens
  misc_RNA (1)...(19): siRNA sense strand
aagaagaagaggaagccca

SEQ ID NO: 2570279 - RNA, 19 nt, Homo sapiens
  misc_RNA (1)...(19): siRNA sense strand
cagagagagcggagcagca

SEQ ID NO: 2570280 - RNA, 19 nt, Homo sapiens
  misc_RNA (1)...(19): siRNA sense strand
aggacgcggaagaggagaa

SEQ ID NO: 2570281 - RNA, 19 nt, Homo sapiens
  misc_RNA (1)...(19): siRNA sense strand
agaaggaggaggaggagcu

SEQ ID NO: 2570282 - RNA, 19 nt, Homo sapiens
  misc_RNA (1)...(19): siRNA sense strand
aagaggaagcccaggagga

SEQ ID NO: 2570283 - RNA, 19 nt, Homo sapiens
  misc_RNA (1)...(19): siRNA sense strand
gaacaaagaccuaauggag

SEQ ID NO: 2570284 - RNA, 19 nt, Homo sapiens
  misc_RNA (1)...(19): siRNA sense strand
gugcagagagagcggagca

SEQ ID NO: 2570285 - RNA, 19 nt, Homo sapiens
  misc_RNA (1)...(19): siRNA sense strand
agaaggagagggagcgcca

SEQ ID NO: 2570286 - RNA, 19 nt, Homo sapiens
  misc_RNA (1)...(19): siRNA sense strand
ggaagaggagaaaccgaga

SEQ ID NO: 2570287 - RNA, 19 nt, Homo sapiens
  misc_RNA (1)...(19): siRNA sense strand
cugacgaggaaguugaaca

SEQ ID NO: 2570288 - RNA, 19 nt, Homo sapiens
  misc_RNA (1)...(19): siRNA sense strand
cccaggaggaagaggaagu

SEQ ID NO: 2570289 - RNA, 19 nt, Homo sapiens
  misc_RNA (1)...(19): siRNA sense strand
aaguugaacagguggagga

SEQ ID NO: 2570290 - RNA, 19 nt, Homo sapiens
  misc_RNA (1)...(19): siRNA sense strand
agaagagaggcaagaagca

SEQ ID NO: 2570291 - RNA, 19 nt, Homo sapiens
  misc_RNA (1)...(19): siRNA sense strand
aggaaagguccgagguuaa

SEQ ID NO: 2570292 - RNA, 19 nt, Homo sapiens
  misc_RNA (1)...(19): siRNA sense strand
ugacaaagaugaauggcaa

SEQ ID NO: 2570293 - RNA, 19 nt, Homo sapiens
  misc_RNA (1)...(19): siRNA sense strand
aagcaugagcaauggguaa

SEQ ID NO: 2570294 - RNA, 19 nt, Homo sapiens
  misc_RNA (1)...(19): siRNA sense strand
ggguaaaugaagacagaca

SEQ ID NO: 2570295 - RNA, 19 nt, Homo sapiens
  misc_RNA (1)...(19): siRNA sense strand
caguccaauucaagagaaa

SEQ ID NO: 2570296 - RNA, 19 nt, Homo sapiens
  misc_RNA (1)...(19): siRNA sense strand
aauugagagcccagaaaua

SEQ ID NO: 2570297 - RNA, 19 nt, Homo sapiens
  misc_RNA (1)...(19): siRNA sense strand
aagaaaaugugguagcaaa

SEQ ID NO: 2570298 - RNA, 19 nt, Homo sapiens
  misc_RNA (1)...(19): siRNA sense strand
augaaggaggagaguguaa

SEQ ID NO: 2570299 - RNA, 19 nt, Homo sapiens
  misc_RNA (1)...(19): siRNA sense strand
uugaaagcccagacaguaa

SEQ ID NO: 2570300 - RNA, 19 nt, Homo sapiens
  misc_RNA (1)...(19): siRNA sense strand
agaaaaugugguagcaaaa

SEQ ID NO: 2570301 - RNA, 19 nt, Homo sapiens
  misc_RNA (1)...(19): siRNA sense strand
agacauuaaaccagacaau

SEQ ID NO: 2570302 - RNA, 19 nt, Homo sapiens
  misc_RNA (1)...(19): siRNA sense strand
ccucuuggugaaugggaaa

SEQ ID NO: 2570303 - RNA, 19 nt, Homo sapiens
  misc_RNA (1)...(19): siRNA sense strand
caaaagaagcauuagguuu

SEQ ID NO: 2570304 - RNA, 19 nt, Homo sapiens
  misc_RNA (1)...(19): siRNA sense strand
ggguauucgcugcaacaaa

SEQ ID NO: 2570305 - RNA, 19 nt, Homo sapiens
  misc_RNA (1)...(19): siRNA sense strand
aaaugaaggaggagagugu

SEQ ID NO: 2570306 - RNA, 19 nt, Homo sapiens
  misc_RNA (1)...(19): siRNA sense strand
ggugaaugggaaagauaca

SEQ ID NO: 2570307 - RNA, 19 nt, Homo sapiens
  misc_RNA (1)...(19): siRNA sense strand
acggagaaagcaugagcaa

SEQ ID NO: 2570308 - RNA, 19 nt, Homo sapiens
  misc_RNA (1)...(19): siRNA sense strand
guguaagccugaaggucuu

SEQ ID NO: 2570309 - RNA, 19 nt, Homo sapiens
  misc_RNA (1)...(19): siRNA sense strand
gggacccaguugauggaaa

SEQ ID NO: 2570310 - RNA, 19 nt, Homo sapiens
  misc_RNA (1)...(19): siRNA sense strand
ugaaaaggaaagaagcaaa

SEQ ID NO: 2570311 - RNA, 19 nt, Homo sapiens
  misc_RNA (1)...(19): siRNA sense strand
agaucugaaugaugcuaaa

SEQ ID NO: 2570312 - RNA, 19 nt, Homo sapiens
  misc_RNA (1)...(19): siRNA sense strand
gaaauacaaucaacggaga

SEQ ID NO: 2570313 - RNA, 19 nt, Homo sapiens
  misc_RNA (1)...(19): siRNA sense strand
gccucaugcugaagaguuu

SEQ ID NO: 2570314 - RNA, 19 nt, Homo sapiens
  misc_RNA (1)...(19): siRNA sense strand
uggaacaggaugaugaaga

SEQ ID NO: 2570315 - RNA, 19 nt, Homo sapiens
  misc_RNA (1)...(19): siRNA sense strand
agaagaaauaccacaauga

SEQ ID NO: 2570316 - RNA, 19 nt, Homo sapiens
  misc_RNA (1)...(19): siRNA sense strand
gaaaaggaaagaagcaaau

SEQ ID NO: 2570317 - RNA, 19 nt, Homo sapiens
  misc_RNA (1)...(19): siRNA sense strand
caguugauggaaagacuaa

SEQ ID NO: 2570318 - RNA, 19 nt, Homo sapiens
  misc_RNA (1)...(19): siRNA sense strand
gcaguguauuaguaggaga

SEQ ID NO: 2570319 - RNA, 19 nt, Homo sapiens
  misc_RNA (1)...(19): siRNA sense strand
cuucacaucugcugcacaa

SEQ ID NO: 2570320 - RNA, 19 nt, Homo sapiens
  misc_RNA (1)...(19): siRNA sense strand
uuggauauguggaaugaau

SEQ ID NO: 2570321 - RNA, 19 nt, Homo sapiens
  misc_RNA (1)...(19): siRNA sense strand
agaguggagcagagaucaa

SEQ ID NO: 2570322 - RNA, 19 nt, Homo sapiens
  misc_RNA (1)...(19): siRNA sense strand
caaacuucauuguugggaa

SEQ ID NO: 2570323 - RNA, 19 nt, Homo sapiens
  misc_RNA (1)...(19): siRNA sense strand
ugauugagcaagugcauga

SEQ ID NO: 2570324 - RNA, 19 nt, Homo sapiens
  misc_RNA (1)...(19): siRNA sense strand
cagugaacauggaaaagaa

SEQ ID NO: 2570325 - RNA, 19 nt, Homo sapiens
  misc_RNA (1)...(19): siRNA sense strand
gauaagaagaaauaccaca

SEQ ID NO: 2570326 - RNA, 19 nt, Homo sapiens
  misc_RNA (1)...(19): siRNA sense strand
agucaaauauggaacgaag

SEQ ID NO: 2570327 - RNA, 19 nt, Homo sapiens
  misc_RNA (1)...(19): siRNA sense strand
gcgccaugucuuccaguaa

SEQ ID NO: 2570328 - RNA, 19 nt, Homo sapiens
  misc_RNA (1)...(19): siRNA sense strand
aucaaagaagggugugaaa

SEQ ID NO: 2570329 - RNA, 19 nt, Homo sapiens
  misc_RNA (1)...(19): siRNA sense strand
ccaaacacaucacugggaa

SEQ ID NO: 2570330 - RNA, 19 nt, Homo sapiens
  misc_RNA (1)...(19): siRNA sense strand
augcagagcuacaagggca

SEQ ID NO: 2570331 - RNA, 19 nt, Homo sapiens
  misc_RNA (1)...(19): siRNA sense strand
agaauugagagcccagaaa

SEQ ID NO: 2570332 - RNA, 19 nt, Homo sapiens
  misc_RNA (1)...(19): siRNA sense strand
agcaauggguaaaugaaga

SEQ ID NO: 2570333 - RNA, 19 nt, Homo sapiens
  misc_RNA (1)...(19): siRNA sense strand
caaacacaucacugggaau

SEQ ID NO: 2570334 - RNA, 19 nt, Homo sapiens
  misc_RNA (1)...(19): siRNA sense strand
agccaggaccuuuggagaa

SEQ ID NO: 2570335 - RNA, 19 nt, Homo sapiens
  misc_RNA (1)...(19): siRNA sense strand
cagcagacuuccuucaaaa

SEQ ID NO: 2570336 - RNA, 19 nt, Homo sapiens
  misc_RNA (1)...(19): siRNA sense strand
gggucagaguauagauaug

SEQ ID NO: 2570337 - RNA, 19 nt, Homo sapiens
  misc_RNA (1)...(19): siRNA sense strand
gcaaugacccucuugguga

SEQ ID NO: 2570338 - RNA, 19 nt, Homo sapiens
  misc_RNA (1)...(19): siRNA sense strand
guuauguauugcaaggaga

SEQ ID NO: 2570339 - RNA, 19 nt, Homo sapiens
  misc_RNA (1)...(19): siRNA sense strand
ggaugugugaauaagagua

SEQ ID NO: 2570340 - RNA, 19 nt, Homo sapiens
  misc_RNA (1)...(19): siRNA sense strand
cuucaaaaccaaaggagga

SEQ ID NO: 2570341 - RNA, 19 nt, Homo sapiens
  misc_RNA (1)...(19): siRNA sense strand
gaagcuuauucguggggaa

SEQ ID NO: 2570342 - RNA, 19 nt, Homo sapiens
  misc_RNA (1)...(19): siRNA sense strand
augcuggaugugugaauaa

SEQ ID NO: 2570343 - RNA, 19 nt, Homo sapiens
  misc_RNA (1)...(19): siRNA sense strand
gcucuacagcuauggaaca

SEQ ID NO: 2570344 - RNA, 19 nt, Homo sapiens
  misc_RNA (1)...(19): siRNA sense strand
cugcauaauguucagguuu

SEQ ID NO: 2570345 - RNA, 19 nt, Homo sapiens
  misc_RNA (1)...(19): siRNA sense strand
caaucaacggagaaagcau

SEQ ID NO: 2570346 - RNA, 19 nt, Homo sapiens
  misc_RNA (1)...(19): siRNA sense strand
gguaaaugaagacagacau

SEQ ID NO: 2570347 - RNA, 19 nt, Homo sapiens
  misc_RNA (1)...(19): siRNA sense strand
cuucagagaggaauucaaa

SEQ ID NO: 2570348 - RNA, 19 nt, Homo sapiens
  misc_RNA (1)...(19): siRNA sense strand
cacaaugacccaagauuca

SEQ ID NO: 2570349 - RNA, 19 nt, Homo sapiens
  misc_RNA (1)...(19): siRNA sense strand
aaauacaaucaacggagaa

SEQ ID NO: 2570350 - RNA, 19 nt, Homo sapiens
  misc_RNA (1)...(19): siRNA sense strand
aggaugaugaagaugauuu

SEQ ID NO: 2570351 - RNA, 19 nt, Homo sapiens
  misc_RNA (1)...(19): siRNA sense strand
guugaauauuccagauugu

SEQ ID NO: 2570352 - RNA, 19 nt, Homo sapiens
  misc_RNA (1)...(19): siRNA sense strand
acaccagugaacauggaaa

SEQ ID NO: 2570353 - RNA, 19 nt, Homo sapiens
  misc_RNA (1)...(19): siRNA sense strand
aggaggaggagaugggaua

SEQ ID NO: 2570354 - RNA, 19 nt, Homo sapiens
  misc_RNA (1)...(19): siRNA sense strand
gaagaauuucagagagaau

SEQ ID NO: 2570355 - RNA, 19 nt, Homo sapiens
  misc_RNA (1)...(19): siRNA sense strand
gaguuaugccagaggaaau

SEQ ID NO: 2570356 - RNA, 19 nt, Homo sapiens
  misc_RNA (1)...(19): siRNA sense strand
gcuacaagacagaagaaaa

SEQ ID NO: 2570357 - RNA, 19 nt, Homo sapiens
  misc_RNA (1)...(19): siRNA sense strand
gcauuggaaauuagagcaa

SEQ ID NO: 2570358 - RNA, 19 nt, Homo sapiens
  misc_RNA (1)...(19): siRNA sense strand
aucaagagaaacugggaaa

SEQ ID NO: 2570359 - RNA, 19 nt, Homo sapiens
  misc_RNA (1)...(19): siRNA sense strand
aguaaacgaaggagccuaa

SEQ ID NO: 2570360 - RNA, 19 nt, Homo sapiens
  misc_RNA (1)...(19): siRNA sense strand
aggguaauccuguggaaau

SEQ ID NO: 2570361 - RNA, 19 nt, Homo sapiens
  misc_RNA (1)...(19): siRNA sense strand
cugcuauaaacaaaggaaa

SEQ ID NO: 2570362 - RNA, 19 nt, Homo sapiens
  misc_RNA (1)...(19): siRNA sense strand
caguaauaucccugugauu

SEQ ID NO: 2570363 - RNA, 19 nt, Homo sapiens
  misc_RNA (1)...(19): siRNA sense strand
aggacuggguaucaaguaa

SEQ ID NO: 2570364 - RNA, 19 nt, Homo sapiens
  misc_RNA (1)...(19): siRNA sense strand
cuaaaaggggaucgaguua

SEQ ID NO: 2570365 - RNA, 19 nt, Homo sapiens
  misc_RNA (1)...(19): siRNA sense strand
ccuuuaagucggacaugaa

SEQ ID NO: 2570366 - RNA, 19 nt, Homo sapiens
  misc_RNA (1)...(19): siRNA sense strand
aauuguagguucugggcuu

SEQ ID NO: 2570367 - RNA, 19 nt, Homo sapiens
  misc_RNA (1)...(19): siRNA sense strand
aaauuuaaggacuggguau

SEQ ID NO: 2570368 - RNA, 19 nt, Homo sapiens
  misc_RNA (1)...(19): siRNA sense strand
cugugguaauaauaggaaa

SEQ ID NO: 2570369 - RNA, 19 nt, Homo sapiens
  misc_RNA (1)...(19): siRNA sense strand
ccaaucacauguaagggua

SEQ ID NO: 2570370 - RNA, 19 nt, Homo sapiens
  misc_RNA (1)...(19): siRNA sense strand
aggagaugggauagcuuaa

SEQ ID NO: 2570371 - RNA, 19 nt, Homo sapiens
  misc_RNA (1)...(19): siRNA sense strand
ugaugauauucaagacaga

SEQ ID NO: 2570372 - RNA, 19 nt, Homo sapiens
  misc_RNA (1)...(19): siRNA sense strand
auuggaaauuagagcaaca

SEQ ID NO: 2570373 - RNA, 19 nt, Homo sapiens
  misc_RNA (1)...(19): siRNA sense strand
caaucacauguaaggguaa

SEQ ID NO: 2570374 - RNA, 19 nt, Homo sapiens
  misc_RNA (1)...(19): siRNA sense strand
uguugaaagaggaggagga

SEQ ID NO: 2570375 - RNA, 19 nt, Homo sapiens
  misc_RNA (1)...(19): siRNA sense strand
aauuagaagaagcaagaca

SEQ ID NO: 2570376 - RNA, 19 nt, Homo sapiens
  misc_RNA (1)...(19): siRNA sense strand
ucugaaggaucaagggugu

SEQ ID NO: 2570377 - RNA, 19 nt, Homo sapiens
  misc_RNA (1)...(19): siRNA sense strand
cuuauauguuaucaggcua

SEQ ID NO: 2570378 - RNA, 19 nt, Homo sapiens
  misc_RNA (1)...(19): siRNA sense strand
uggagcugcuauaaacaaa

SEQ ID NO: 2570379 - RNA, 19 nt, Homo sapiens
  misc_RNA (1)...(19): siRNA sense strand
auguaaaagucaugggucu

SEQ ID NO: 2570380 - RNA, 19 nt, Homo sapiens
  misc_RNA (1)...(19): siRNA sense strand
aagcauuuacagauagaga

SEQ ID NO: 2570381 - RNA, 19 nt, Homo sapiens
  misc_RNA (1)...(19): siRNA sense strand
ucuggaaauugaaggggaa

SEQ ID NO: 2570382 - RNA, 19 nt, Homo sapiens
  misc_RNA (1)...(19): siRNA sense strand
aggaauaugccuuucuuau

SEQ ID NO: 2570383 - RNA, 19 nt, Homo sapiens
  misc_RNA (1)...(19): siRNA sense strand
aguuaugccagaggaaaua

SEQ ID NO: 2570384 - RNA, 19 nt, Homo sapiens
  misc_RNA (1)...(19): siRNA sense strand
uuggaagauucgucaguga

SEQ ID NO: 2570385 - RNA, 19 nt, Homo sapiens
  misc_RNA (1)...(19): siRNA sense strand
ucaacaaagcauuuacaga

SEQ ID NO: 2570386 - RNA, 19 nt, Homo sapiens
  misc_RNA (1)...(19): siRNA sense strand
gcauuuacagauagagaag

SEQ ID NO: 2570387 - RNA, 19 nt, Homo sapiens
  misc_RNA (1)...(19): siRNA sense strand
uugaucaggacuuagaaua

SEQ ID NO: 2570388 - RNA, 19 nt, Homo sapiens
  misc_RNA (1)...(19): siRNA sense strand
gagaauguagcgcuggcaa

SEQ ID NO: 2570389 - RNA, 19 nt, Homo sapiens
  misc_RNA (1)...(19): siRNA sense strand
guguuucgcagacgaguaa

SEQ ID NO: 2570390 - RNA, 19 nt, Homo sapiens
  misc_RNA (1)...(19): siRNA sense strand
guaaauuagaagaagcaag

SEQ ID NO: 2570391 - RNA, 19 nt, Homo sapiens
  misc_RNA (1)...(19): siRNA sense strand
uuacagauagagaagucaa

SEQ ID NO: 2570392 - RNA, 19 nt, Homo sapiens
  misc_RNA (1)...(19): siRNA sense strand
agagaaagaguguguucaa

SEQ ID NO: 2570393 - RNA, 19 nt, Homo sapiens
  misc_RNA (1)...(19): siRNA sense strand
aggucaaaacugaagaaaa

SEQ ID NO: 2570394 - RNA, 19 nt, Homo sapiens
  misc_RNA (1)...(19): siRNA sense strand
aaaggaaacuauccagcaa

SEQ ID NO: 2570395 - RNA, 19 nt, Homo sapiens
  misc_RNA (1)...(19): siRNA sense strand
gaaacuauccagcaagaga

SEQ ID NO: 2570396 - RNA, 19 nt, Homo sapiens
  misc_RNA (1)...(19): siRNA sense strand
cuauccagcaagagaaaga

SEQ ID NO: 2570397 - RNA, 19 nt, Homo sapiens
  misc_RNA (1)...(19): siRNA sense strand
aggaaacuauccagcaaga

SEQ ID NO: 2570398 - RNA, 19 nt, Homo sapiens
  misc_RNA (1)...(19): siRNA sense strand
aagccaaugccgagagaaa

SEQ ID NO: 2570399 - RNA, 19 nt, Homo sapiens
  misc_RNA (1)...(19): siRNA sense strand
aguuauuggagcuggaauu

SEQ ID NO: 2570400 - RNA, 19 nt, Homo sapiens
  misc_RNA (1)...(19): siRNA sense strand
agauauucaacaaggagua

SEQ ID NO: 2570401 - RNA, 19 nt, Homo sapiens
  misc_RNA (1)...(19): siRNA sense strand
gagaaagagcagaugccau

SEQ ID NO: 2570402 - RNA, 19 nt, Homo sapiens
  misc_RNA (1)...(19): siRNA sense strand
guauggaauuagugccaga

SEQ ID NO: 2570403 - RNA, 19 nt, Homo sapiens
  misc_RNA (1)...(19): siRNA sense strand
uggcaaucuuugaugugaa

SEQ ID NO: 2570404 - RNA, 19 nt, Homo sapiens
  misc_RNA (1)...(19): siRNA sense strand
cuuucugacucgagcauuu

SEQ ID NO: 2570405 - RNA, 19 nt, Homo sapiens
  misc_RNA (1)...(19): siRNA sense strand
aggaguacccugagcgcuu

SEQ ID NO: 2570406 - RNA, 19 nt, Homo sapiens
  misc_RNA (1)...(19): siRNA sense strand
gauacagaccagcaggaau

SEQ ID NO: 2570407 - RNA, 19 nt, Homo sapiens
  misc_RNA (1)...(19): siRNA sense strand
cagcaggaaucuugaccca

SEQ ID NO: 2570408 - RNA, 19 nt, Homo sapiens
  misc_RNA (1)...(19): siRNA sense strand
gugaaaugcauguugcuga

SEQ ID NO: 2570409 - RNA, 19 nt, Homo sapiens
  misc_RNA (1)...(19): siRNA sense strand
gcuuuauggcugaacaaaa

SEQ ID NO: 2570410 - RNA, 19 nt, Homo sapiens
  misc_RNA (1)...(19): siRNA sense strand
ggucacaguuauuggagcu

SEQ ID NO: 2570411 - RNA, 19 nt, Homo sapiens
  misc_RNA (1)...(19): siRNA sense strand
ccuacuacagucuggacaa

SEQ ID NO: 2570412 - RNA, 19 nt, Homo sapiens
  misc_RNA (1)...(19): siRNA sense strand
cagaaaguuggcaugcaaa

SEQ ID NO: 2570413 - RNA, 19 nt, Homo sapiens
  misc_RNA (1)...(19): siRNA sense strand
gcaggaaucuugacccaca

SEQ ID NO: 2570414 - RNA, 19 nt, Homo sapiens
  misc_RNA (1)...(19): siRNA sense strand
auuaauugagagccagaua

SEQ ID NO: 2570415 - RNA, 19 nt, Homo sapiens
  misc_RNA (1)...(19): siRNA sense strand
gugcuuuauggcugaacaa

SEQ ID NO: 2570416 - RNA, 19 nt, Homo sapiens
  misc_RNA (1)...(19): siRNA sense strand
ggacaggccaagggcguau

SEQ ID NO: 2570417 - RNA, 19 nt, Homo sapiens
  misc_RNA (1)...(19): siRNA sense strand
aaugcauguugcugaacua

SEQ ID NO: 2570418 - RNA, 19 nt, Homo sapiens
  misc_RNA (1)...(19): siRNA sense strand
uggaauuagugccagacau

SEQ ID NO: 2570419 - RNA, 19 nt, Homo sapiens
  misc_RNA (1)...(19): siRNA sense strand
ucauaguggccgugaaaug

SEQ ID NO: 2570420 - RNA, 19 nt, Homo sapiens
  misc_RNA (1)...(19): siRNA sense strand
gcuggauauguauggaauu

SEQ ID NO: 2570421 - RNA, 19 nt, Homo sapiens
  misc_RNA (1)...(19): siRNA sense strand
gccgagagaaagagcagau

SEQ ID NO: 2570422 - RNA, 19 nt, Homo sapiens
  misc_RNA (1)...(19): siRNA sense strand
cggugauggugguggucau

SEQ ID NO: 2570423 - RNA, 19 nt, Homo sapiens
  misc_RNA (1)...(19): siRNA sense strand
agauggaacucaaccgaga

SEQ ID NO: 2570424 - RNA, 19 nt, Homo sapiens
  misc_RNA (1)...(19): siRNA sense strand
acagcgaggugaugggcca

SEQ ID NO: 2570425 - RNA, 19 nt, Homo sapiens
  misc_RNA (1)...(19): siRNA sense strand
agaacaaugcagagagcac

SEQ ID NO: 2570426 - RNA, 19 nt, Homo sapiens
  misc_RNA (1)...(19): siRNA sense strand
cugaacagcagauggaacu

SEQ ID NO: 2570427 - RNA, 19 nt, Homo sapiens
  misc_RNA (1)...(19): siRNA sense strand
cggugauggugguggucau

SEQ ID NO: 2570428 - RNA, 19 nt, Homo sapiens
  misc_RNA (1)...(19): siRNA sense strand
agauggaacucaaccgaga

SEQ ID NO: 2570429 - RNA, 19 nt, Homo sapiens
  misc_RNA (1)...(19): siRNA sense strand
acagcgaggugaugggcca

SEQ ID NO: 2570430 - RNA, 19 nt, Homo sapiens
  misc_RNA (1)...(19): siRNA sense strand
agaacaaugcagagagcac

SEQ ID NO: 2570431 - RNA, 19 nt, Homo sapiens
  misc_RNA (1)...(19): siRNA sense strand
cugaacagcagauggaacu

SEQ ID NO: 2570432 - RNA, 19 nt, Homo sapiens
  misc_RNA (1)...(19): siRNA sense strand
cggugauggugguggucau

SEQ ID NO: 2570433 - RNA, 19 nt, Homo sapiens
  misc_RNA (1)...(19): siRNA sense strand
agauggaacucaaccgaga

SEQ ID NO: 2570434 - RNA, 19 nt, Homo sapiens
  misc_RNA (1)...(19): siRNA sense strand
acagcgaggugaugggcca

SEQ ID NO: 2570435 - RNA, 19 nt, Homo sapiens
  misc_RNA (1)...(19): siRNA sense strand
agaacaaugcagagagcac

SEQ ID NO: 2570436 - RNA, 19 nt, Homo sapiens
  misc_RNA (1)...(19): siRNA sense strand
cugaacagcagauggaacu

SEQ ID NO: 2570437 - RNA, 19 nt, Homo sapiens
  misc_RNA (1)...(19): siRNA sense strand
cggugauggugguggucau

SEQ ID NO: 2570438 - RNA, 19 nt, Homo sapiens
  misc_RNA (1)...(19): siRNA sense strand
agauggaacucaaccgaga

SEQ ID NO: 2570439 - RNA, 19 nt, Homo sapiens
  misc_RNA (1)...(19): siRNA sense strand
acagcgaggugaugggcca

SEQ ID NO: 2570440 - RNA, 19 nt, Homo sapiens
  misc_RNA (1)...(19): siRNA sense strand
agaacaaugcagagagcac

SEQ ID NO: 2570441 - RNA, 19 nt, Homo sapiens
  misc_RNA (1)...(19): siRNA sense strand
cugaacagcagauggaacu

SEQ ID NO: 2570442 - RNA, 19 nt, Homo sapiens
  misc_RNA (1)...(19): siRNA sense strand
cuaaagagaagauuggcaa

SEQ ID NO: 2570443 - RNA, 19 nt, Homo sapiens
  misc_RNA (1)...(19): siRNA sense strand
ugugauaaggauaacaaga

SEQ ID NO: 2570444 - RNA, 19 nt, Homo sapiens
  misc_RNA (1)...(19): siRNA sense strand
agaaggacgggcuggugaa

SEQ ID NO: 2570445 - RNA, 19 nt, Homo sapiens
  misc_RNA (1)...(19): siRNA sense strand
agauuggcaaagaguuuaa

SEQ ID NO: 2570446 - RNA, 19 nt, Homo sapiens
  misc_RNA (1)...(19): siRNA sense strand
uggaagaccuggaggccau

SEQ ID NO: 2570447 - RNA, 19 nt, Homo sapiens
  misc_RNA (1)...(19): siRNA sense strand
agcuauagauuuaagggaa

SEQ ID NO: 2570448 - RNA, 19 nt, Homo sapiens
  misc_RNA (1)...(19): siRNA sense strand
agacuuggauuguugggaa

SEQ ID NO: 2570449 - RNA, 19 nt, Homo sapiens
  misc_RNA (1)...(19): siRNA sense strand
uguuggaagacguggauuu

SEQ ID NO: 2570450 - RNA, 19 nt, Homo sapiens
  misc_RNA (1)...(19): siRNA sense strand
gcuauagauuuaagggaag

SEQ ID NO: 2570451 - RNA, 19 nt, Homo sapiens
  misc_RNA (1)...(19): siRNA sense strand
gcuauggauuugagggaag

SEQ ID NO: 2570452 - RNA, 19 nt, Homo sapiens
  misc_RNA (1)...(19): siRNA sense strand
cuggaagacugggagguua

SEQ ID NO: 2570453 - RNA, 19 nt, Homo sapiens
  misc_RNA (1)...(19): siRNA sense strand
acauauauuggcuggaaga

SEQ ID NO: 2570454 - RNA, 19 nt, Homo sapiens
  misc_RNA (1)...(19): siRNA sense strand
agacacugauugacuggaa

SEQ ID NO: 2570455 - RNA, 19 nt, Homo sapiens
  misc_RNA (1)...(19): siRNA sense strand
agacacugauugacuggaa

SEQ ID NO: 2570456 - RNA, 19 nt, Homo sapiens
  misc_RNA (1)...(19): siRNA sense strand
ccuggaggccauuggaaga

SEQ ID NO: 2570457 - RNA, 19 nt, Homo sapiens
  misc_RNA (1)...(19): siRNA sense strand
acguagauuuucaggaaga

SEQ ID NO: 2570458 - RNA, 19 nt, Homo sapiens
  misc_RNA (1)...(19): siRNA sense strand
uguuggaagacguggacuu

SEQ ID NO: 2570459 - RNA, 19 nt, Homo sapiens
  misc_RNA (1)...(19): siRNA sense strand
acguggacuugcuggaaga

SEQ ID NO: 2570460 - RNA, 19 nt, Homo sapiens
  misc_RNA (1)...(19): siRNA sense strand
ggcuggaagaccuggauuu

SEQ ID NO: 2570461 - RNA, 19 nt, Homo sapiens
  misc_RNA (1)...(19): siRNA sense strand
ugguggaagacguagauuu

SEQ ID NO: 2570462 - RNA, 19 nt, Homo sapiens
  misc_RNA (1)...(19): siRNA sense strand
acguggauuugcuggaaga

SEQ ID NO: 2570463 - RNA, 19 nt, Homo sapiens
  misc_RNA (1)...(19): siRNA sense strand
gguggaagacguagauuuu

SEQ ID NO: 2570464 - RNA, 19 nt, Homo sapiens
  misc_RNA (1)...(19): siRNA sense strand
cugggagguuacuggaaga

SEQ ID NO: 2570465 - RNA, 19 nt, Homo sapiens
  misc_RNA (1)...(19): siRNA sense strand
uggauuugagggaagacaa

SEQ ID NO: 2570466 - RNA, 19 nt, Homo sapiens
  misc_RNA (1)...(19): siRNA sense strand
cugauugacuggaagaucu

SEQ ID NO: 2570467 - RNA, 19 nt, Homo sapiens
  misc_RNA (1)...(19): siRNA sense strand
ggaaacacuuuguggguga

SEQ ID NO: 2570468 - RNA, 19 nt, Homo sapiens
  misc_RNA (1)...(19): siRNA sense strand
agacauaugcauucgggaa

SEQ ID NO: 2570469 - RNA, 19 nt, Homo sapiens
  misc_RNA (1)...(19): siRNA sense strand
gaagagaguuucaugggau

SEQ ID NO: 2570470 - RNA, 19 nt, Homo sapiens
  misc_RNA (1)...(19): siRNA sense strand
cuaugaacacauuggauau

SEQ ID NO: 2570471 - RNA, 19 nt, Homo sapiens
  misc_RNA (1)...(19): siRNA sense strand
ucucaagaggaucaagaaa

SEQ ID NO: 2570472 - RNA, 19 nt, Homo sapiens
  misc_RNA (1)...(19): siRNA sense strand
ggaaauugaagcaagagga

SEQ ID NO: 2570473 - RNA, 19 nt, Homo sapiens
  misc_RNA (1)...(19): siRNA sense strand
gguggaaaacagaccaaaa

SEQ ID NO: 2570474 - RNA, 19 nt, Homo sapiens
  misc_RNA (1)...(19): siRNA sense strand
caucaucacuggagcccuu

SEQ ID NO: 2570475 - RNA, 19 nt, Homo sapiens
  misc_RNA (1)...(19): siRNA sense strand
acccauggugguagacaua

SEQ ID NO: 2570476 - RNA, 19 nt, Homo sapiens
  misc_RNA (1)...(19): siRNA sense strand
agagaaagccagcggcaac

SEQ ID NO: 2570477 - RNA, 19 nt, Homo sapiens
  misc_RNA (1)...(19): siRNA sense strand
guggauugaacguacacaa

SEQ ID NO: 2570478 - RNA, 19 nt, Homo sapiens
  misc_RNA (1)...(19): siRNA sense strand
caacacuugugaaggcuca

SEQ ID NO: 2570479 - RNA, 19 nt, Homo sapiens
  misc_RNA (1)...(19): siRNA sense strand
gagaagagguuugagucga

SEQ ID NO: 2570480 - RNA, 19 nt, Homo sapiens
  misc_RNA (1)...(19): siRNA sense strand
aaacuguauuucagagacu

SEQ ID NO: 2570481 - RNA, 19 nt, Homo sapiens
  misc_RNA (1)...(19): siRNA sense strand
ggaagagaguuucauggga

SEQ ID NO: 2570482 - RNA, 19 nt, Homo sapiens
  misc_RNA (1)...(19): siRNA sense strand
gggcagaaucauagggaga

SEQ ID NO: 2570483 - RNA, 19 nt, Homo sapiens
  misc_RNA (1)...(19): siRNA sense strand
gaaacuugauauugggcua

SEQ ID NO: 2570484 - RNA, 19 nt, Homo sapiens
  misc_RNA (1)...(19): siRNA sense strand
cugaagacauagaagaaaa

SEQ ID NO: 2570485 - RNA, 19 nt, Homo sapiens
  misc_RNA (1)...(19): siRNA sense strand
caaagaaucagaagggaca

SEQ ID NO: 2570486 - RNA, 19 nt, Homo sapiens
  misc_RNA (1)...(19): siRNA sense strand
ggauguaggcgaugagcga

SEQ ID NO: 2570487 - RNA, 19 nt, Homo sapiens
  misc_RNA (1)...(19): siRNA sense strand
agguggagcuggagagcca

SEQ ID NO: 2570488 - RNA, 19 nt, Homo sapiens
  misc_RNA (1)...(19): siRNA sense strand
ggcuagaauuaguacacaa

SEQ ID NO: 2570489 - RNA, 19 nt, Homo sapiens
  misc_RNA (1)...(19): siRNA sense strand
ccagacauguugaaggaca

SEQ ID NO: 2570490 - RNA, 19 nt, Homo sapiens
  misc_RNA (1)...(19): siRNA sense strand
uggcugugguagugucaaa

SEQ ID NO: 2570491 - RNA, 19 nt, Homo sapiens
  misc_RNA (1)...(19): siRNA sense strand
acacagaggauguaggcga

SEQ ID NO: 2570492 - RNA, 19 nt, Homo sapiens
  misc_RNA (1)...(19): siRNA sense strand
gcauuugauacuggagaaa

SEQ ID NO: 2570493 - RNA, 19 nt, Homo sapiens
  misc_RNA (1)...(19): siRNA sense strand
gagccagcauuauggaaaa

SEQ ID NO: 2570494 - RNA, 19 nt, Homo sapiens
  misc_RNA (1)...(19): siRNA sense strand
auauuaaacagcugcggaa

SEQ ID NO: 2570495 - RNA, 19 nt, Homo sapiens
  misc_RNA (1)...(19): siRNA sense strand
cguucuaucuguaaggcau

SEQ ID NO: 2570496 - RNA, 19 nt, Homo sapiens
  misc_RNA (1)...(19): siRNA sense strand
ccuuccauuucaagcaaua

SEQ ID NO: 2570497 - RNA, 19 nt, Homo sapiens
  misc_RNA (1)...(19): siRNA sense strand
ugggaagaaacuugauauu

SEQ ID NO: 2570498 - RNA, 19 nt, Homo sapiens
  misc_RNA (1)...(19): siRNA sense strand
gcaccuuggagaaugggaa

SEQ ID NO: 2570499 - RNA, 19 nt, Homo sapiens
  misc_RNA (1)...(19): siRNA sense strand
gugcaaggccaaagcagca

SEQ ID NO: 2570500 - RNA, 19 nt, Homo sapiens
  misc_RNA (1)...(19): siRNA sense strand
auuugauacuggagaaagu

SEQ ID NO: 2570501 - RNA, 19 nt, Homo sapiens
  misc_RNA (1)...(19): siRNA sense strand
uggaugaguuugauagacu

SEQ ID NO: 2570502 - RNA, 19 nt, Homo sapiens
  misc_RNA (1)...(19): siRNA sense strand
cuuuggagauaauggagau

SEQ ID NO: 2570503 - RNA, 19 nt, Homo sapiens
  misc_RNA (1)...(19): siRNA sense strand
guauagggaaagcagagaa

SEQ ID NO: 2570504 - RNA, 19 nt, Homo sapiens
  misc_RNA (1)...(19): siRNA sense strand
gcgacauggcugugguagu

SEQ ID NO: 2570505 - RNA, 19 nt, Homo sapiens
  misc_RNA (1)...(19): siRNA sense strand
uccugaagacauagaagaa

SEQ ID NO: 2570506 - RNA, 19 nt, Homo sapiens
  misc_RNA (1)...(19): siRNA sense strand
cagccaagcauuugauacu

SEQ ID NO: 2570507 - RNA, 19 nt, Homo sapiens
  misc_RNA (1)...(19): siRNA sense strand
agagccagcauuauggaaa

SEQ ID NO: 2570508 - RNA, 19 nt, Homo sapiens
  misc_RNA (1)...(19): siRNA sense strand
ccugaagacauagaagaaa

SEQ ID NO: 2570509 - RNA, 19 nt, Homo sapiens
  misc_RNA (1)...(19): siRNA sense strand
aaucagugugagaagagaa

SEQ ID NO: 2570510 - RNA, 19 nt, Homo sapiens
  misc_RNA (1)...(19): siRNA sense strand
gauacuagcaaugggaaga

SEQ ID NO: 2570511 - RNA, 19 nt, Homo sapiens
  misc_RNA (1)...(19): siRNA sense strand
ccucagggcucucaggagu

SEQ ID NO: 2570512 - RNA, 19 nt, Homo sapiens
  misc_RNA (1)...(19): siRNA sense strand
gaucccagccagugcaaca

SEQ ID NO: 2570513 - RNA, 19 nt, Homo sapiens
  misc_RNA (1)...(19): siRNA sense strand
ugaccagugggaagaggaa

SEQ ID NO: 2570514 - RNA, 19 nt, Homo sapiens
  misc_RNA (1)...(19): siRNA sense strand
ugacauugagauagagaug

SEQ ID NO: 2570515 - RNA, 19 nt, Homo sapiens
  misc_RNA (1)...(19): siRNA sense strand
agcauuugauacuggagaa

SEQ ID NO: 2570516 - RNA, 19 nt, Homo sapiens
  misc_RNA (1)...(19): siRNA sense strand
agucugaagcccaggccau

SEQ ID NO: 2570517 - RNA, 19 nt, Homo sapiens
  misc_RNA (1)...(19): siRNA sense strand
ugacugugcauguaggaga

SEQ ID NO: 2570518 - RNA, 19 nt, Homo sapiens
  misc_RNA (1)...(19): siRNA sense strand
guacacaaaggauacgcaa

SEQ ID NO: 2570519 - RNA, 19 nt, Homo sapiens
  misc_RNA (1)...(19): siRNA sense strand
ugaugauaaccuugaagau

SEQ ID NO: 2570520 - RNA, 19 nt, Homo sapiens
  misc_RNA (1)...(19): siRNA sense strand
acaaagaaucagaagggac

SEQ ID NO: 2570521 - RNA, 19 nt, Homo sapiens
  misc_RNA (1)...(19): siRNA sense strand
gcugacauuuguuggggaa

SEQ ID NO: 2570522 - RNA, 19 nt, Homo sapiens
  misc_RNA (1)...(19): siRNA sense strand
ggggaguggugcugaaaga

SEQ ID NO: 2570523 - RNA, 19 nt, Homo sapiens
  misc_RNA (1)...(19): siRNA sense strand
uggcaggagcggugacaca

SEQ ID NO: 2570524 - RNA, 19 nt, Homo sapiens
  misc_RNA (1)...(19): siRNA sense strand
cagaaagagacgcugguca

SEQ ID NO: 2570525 - RNA, 19 nt, Homo sapiens
  misc_RNA (1)...(19): siRNA sense strand
gaaucaagaaacugcccua

SEQ ID NO: 2570526 - RNA, 19 nt, Homo sapiens
  misc_RNA (1)...(19): siRNA sense strand
caguauuggcagacucauu

SEQ ID NO: 2570527 - RNA, 19 nt, Homo sapiens
  misc_RNA (1)...(19): siRNA sense strand
uggacagcucucacagaaa

SEQ ID NO: 2570528 - RNA, 19 nt, Homo sapiens
  misc_RNA (1)...(19): siRNA sense strand
ugucauugguauugcuagu

SEQ ID NO: 2570529 - RNA, 19 nt, Homo sapiens
  misc_RNA (1)...(19): siRNA sense strand
gggugcguguggaggacau

SEQ ID NO: 2570530 - RNA, 19 nt, Homo sapiens
  misc_RNA (1)...(19): siRNA sense strand
gagcggaccucuuugcaca

SEQ ID NO: 2570531 - RNA, 19 nt, Homo sapiens
  misc_RNA (1)...(19): siRNA sense strand
ugguauugcuaguggcuuc

SEQ ID NO: 2570532 - RNA, 19 nt, Homo sapiens
  misc_RNA (1)...(19): siRNA sense strand
cugaagagauucuggagug

SEQ ID NO: 2570533 - RNA, 19 nt, Homo sapiens
  misc_RNA (1)...(19): siRNA sense strand
ucauaaagcgggagguaga

SEQ ID NO: 2570534 - RNA, 19 nt, Homo sapiens
  misc_RNA (1)...(19): siRNA sense strand
ggucuauaaaugagaaaga

SEQ ID NO: 2570535 - RNA, 19 nt, Homo sapiens
  misc_RNA (1)...(19): siRNA sense strand
gcguauaaucccaaaauaa

SEQ ID NO: 2570536 - RNA, 19 nt, Homo sapiens
  misc_RNA (1)...(19): siRNA sense strand
ugguagaaguggaagaagu

SEQ ID NO: 2570537 - RNA, 19 nt, Homo sapiens
  misc_RNA (1)...(19): siRNA sense strand
aggauugggauuauggaaa

SEQ ID NO: 2570538 - RNA, 19 nt, Homo sapiens
  misc_RNA (1)...(19): siRNA sense strand
ggaaaggauucuuggaccu

SEQ ID NO: 2570539 - RNA, 19 nt, Homo sapiens
  misc_RNA (1)...(19): siRNA sense strand
agacuuugguagugcaaca

SEQ ID NO: 2570540 - RNA, 19 nt, Homo sapiens
  misc_RNA (1)...(19): siRNA sense strand
uagcaaugauggaaaggau

SEQ ID NO: 2570541 - RNA, 19 nt, Homo sapiens
  misc_RNA (1)...(19): siRNA sense strand
cugucagaguggagacgua

SEQ ID NO: 2570542 - RNA, 19 nt, Homo sapiens
  misc_RNA (1)...(19): siRNA sense strand
uguugauacuuuaggugaa

SEQ ID NO: 2570543 - RNA, 19 nt, Homo sapiens
  misc_RNA (1)...(19): siRNA sense strand
acauugaugaguacagaaa

SEQ ID NO: 2570544 - RNA, 19 nt, Homo sapiens
  misc_RNA (1)...(19): siRNA sense strand
aguaaggagcauuuagcaa

SEQ ID NO: 2570545 - RNA, 19 nt, Homo sapiens
  misc_RNA (1)...(19): siRNA sense strand
gaugacaaggauugggauu

SEQ ID NO: 2570546 - RNA, 19 nt, Homo sapiens
  misc_RNA (1)...(19): siRNA sense strand
aggaugaugaggaggguca

SEQ ID NO: 2570547 - RNA, 19 nt, Homo sapiens
  misc_RNA (1)...(19): siRNA sense strand
aguggaagaaguaguuaua

SEQ ID NO: 2570548 - RNA, 19 nt, Homo sapiens
  misc_RNA (1)...(19): siRNA sense strand
agucauaaaagaaggaaga

SEQ ID NO: 2570549 - RNA, 19 nt, Homo sapiens
  misc_RNA (1)...(19): siRNA sense strand
acacagacuuaaagccuga

SEQ ID NO: 2570550 - RNA, 19 nt, Homo sapiens
  misc_RNA (1)...(19): siRNA sense strand
gugaaggagcuuuuggaaa

SEQ ID NO: 2570551 - RNA, 19 nt, Homo sapiens
  misc_RNA (1)...(19): siRNA sense strand
ggaaaauggaggagcagca

SEQ ID NO: 2570552 - RNA, 19 nt, Homo sapiens
  misc_RNA (1)...(19): siRNA sense strand
gaaaaguuguggagugcau

SEQ ID NO: 2570553 - RNA, 19 nt, Homo sapiens
  misc_RNA (1)...(19): siRNA sense strand
cuguaaaccucugaaggaa

SEQ ID NO: 2570554 - RNA, 19 nt, Homo sapiens
  misc_RNA (1)...(19): siRNA sense strand
guguagaggaugaugagga

SEQ ID NO: 2570555 - RNA, 19 nt, Homo sapiens
  misc_RNA (1)...(19): siRNA sense strand
cauaaaagaaggaagagau

SEQ ID NO: 2570556 - RNA, 19 nt, Homo sapiens
  misc_RNA (1)...(19): siRNA sense strand
ggauagauacugugaagcu

SEQ ID NO: 2570557 - RNA, 19 nt, Homo sapiens
  misc_RNA (1)...(19): siRNA sense strand
cagaaaaccaggaaacgua

SEQ ID NO: 2570558 - RNA, 19 nt, Homo sapiens
  misc_RNA (1)...(19): siRNA sense strand
gauuagacugggaugaaca

SEQ ID NO: 2570559 - RNA, 19 nt, Homo sapiens
  misc_RNA (1)...(19): siRNA sense strand
agacguacuaagugcaaga

SEQ ID NO: 2570560 - RNA, 19 nt, Homo sapiens
  misc_RNA (1)...(19): siRNA sense strand
acuaagugcaagauaugaa

SEQ ID NO: 2570561 - RNA, 19 nt, Homo sapiens
  misc_RNA (1)...(19): siRNA sense strand
acuuaaagccugaaaacau

SEQ ID NO: 2570562 - RNA, 19 nt, Homo sapiens
  misc_RNA (1)...(19): siRNA sense strand
cugacuacacagaggcgua

SEQ ID NO: 2570563 - RNA, 19 nt, Homo sapiens
  misc_RNA (1)...(19): siRNA sense strand
aaccaggaguguagaggau

SEQ ID NO: 2570564 - RNA, 19 nt, Homo sapiens
  misc_RNA (1)...(19): siRNA sense strand
gguuugagcaucaugguca

SEQ ID NO: 2570565 - RNA, 19 nt, Homo sapiens
  misc_RNA (1)...(19): siRNA sense strand
augacaaggauugggauua

SEQ ID NO: 2570566 - RNA, 19 nt, Homo sapiens
  misc_RNA (1)...(19): siRNA sense strand
uguaaaccucugaaggaau

SEQ ID NO: 2570567 - RNA, 19 nt, Homo sapiens
  misc_RNA (1)...(19): siRNA sense strand
cgccaaagagaccaugaaa

SEQ ID NO: 2570568 - RNA, 19 nt, Homo sapiens
  misc_RNA (1)...(19): siRNA sense strand
gauccagccaaaagaauua

SEQ ID NO: 2570569 - RNA, 19 nt, Homo sapiens
  misc_RNA (1)...(19): siRNA sense strand
ccuguaaaccucugaagga

SEQ ID NO: 2570570 - RNA, 19 nt, Homo sapiens
  misc_RNA (1)...(19): siRNA sense strand
guucacaugggaagaguca

SEQ ID NO: 2570571 - RNA, 19 nt, Homo sapiens
  misc_RNA (1)...(19): siRNA sense strand
aggagcagcagcagucaua

SEQ ID NO: 2570572 - RNA, 19 nt, Homo sapiens
  misc_RNA (1)...(19): siRNA sense strand
ggaguguagaggaugauga

SEQ ID NO: 2570573 - RNA, 19 nt, Homo sapiens
  misc_RNA (1)...(19): siRNA sense strand
caucacaguacauugguau

SEQ ID NO: 2570574 - RNA, 19 nt, Homo sapiens
  misc_RNA (1)...(19): siRNA sense strand
ggacuuaguacuuacgacu

SEQ ID NO: 2570575 - RNA, 19 nt, Homo sapiens
  misc_RNA (1)...(19): siRNA sense strand
auaucagaaagauggcaua

SEQ ID NO: 2570576 - RNA, 19 nt, Homo sapiens
  misc_RNA (1)...(19): siRNA sense strand
cgugaugaacgcaccuuaa

SEQ ID NO: 2570577 - RNA, 19 nt, Homo sapiens
  misc_RNA (1)...(19): siRNA sense strand
ggagacguacuaagugcaa

SEQ ID NO: 2570578 - RNA, 19 nt, Homo sapiens
  misc_RNA (1)...(19): siRNA sense strand
gugcaagauaugaaauugu

SEQ ID NO: 2570579 - RNA, 19 nt, Homo sapiens
  misc_RNA (1)...(19): siRNA sense strand
agauauguuucaagagccu

SEQ ID NO: 2570580 - RNA, 19 nt, Homo sapiens
  misc_RNA (1)...(19): siRNA sense strand
cagccaaccugcaugggaa

SEQ ID NO: 2570581 - RNA, 19 nt, Homo sapiens
  misc_RNA (1)...(19): siRNA sense strand
ucuaugaaugagagggaga

SEQ ID NO: 2570582 - RNA, 19 nt, Homo sapiens
  misc_RNA (1)...(19): siRNA sense strand
aagaugaagaagacaguga

SEQ ID NO: 2570583 - RNA, 19 nt, Homo sapiens
  misc_RNA (1)...(19): siRNA sense strand
ucaaugaaugagaggacuu

SEQ ID NO: 2570584 - RNA, 19 nt, Homo sapiens
  misc_RNA (1)...(19): siRNA sense strand
caucaaugaaugagaggac

SEQ ID NO: 2570585 - RNA, 19 nt, Homo sapiens
  misc_RNA (1)...(19): siRNA sense strand
cuucuaugaaugagaggga

SEQ ID NO: 2570586 - RNA, 19 nt, Homo sapiens
  misc_RNA (1)...(19): siRNA sense strand
gcaccuggaucgagggacu

SEQ ID NO: 2570587 - RNA, 19 nt, Homo sapiens
  misc_RNA (1)...(19): siRNA sense strand
gcaugaacccuguggaccu

SEQ ID NO: 2570588 - RNA, 19 nt, Homo sapiens
  misc_RNA (1)...(19): siRNA sense strand
cagaagggccugaaggaug

SEQ ID NO: 2570589 - RNA, 19 nt, Homo sapiens
  misc_RNA (1)...(19): siRNA sense strand
ggaacaugacgcaggugca

SEQ ID NO: 2570590 - RNA, 19 nt, Homo sapiens
  misc_RNA (1)...(19): siRNA sense strand
ccaacuucaucaaggccau

SEQ ID NO: 2570591 - RNA, 19 nt, Homo sapiens
  misc_RNA (1)...(19): siRNA sense strand
ggaaccgacaagugugaca

SEQ ID NO: 2570592 - RNA, 19 nt, Homo sapiens
  misc_RNA (1)...(19): siRNA sense strand
gcaccuggaucgagggacu

SEQ ID NO: 2570593 - RNA, 19 nt, Homo sapiens
  misc_RNA (1)...(19): siRNA sense strand
gcaugaacccuguggaccu

SEQ ID NO: 2570594 - RNA, 19 nt, Homo sapiens
  misc_RNA (1)...(19): siRNA sense strand
cagaagggccugaaggaug

SEQ ID NO: 2570595 - RNA, 19 nt, Homo sapiens
  misc_RNA (1)...(19): siRNA sense strand
ggaacaugacgcaggugca

SEQ ID NO: 2570596 - RNA, 19 nt, Homo sapiens
  misc_RNA (1)...(19): siRNA sense strand
ccaacuucaucaaggccau

SEQ ID NO: 2570597 - RNA, 19 nt, Homo sapiens
  misc_RNA (1)...(19): siRNA sense strand
ggaaccgacaagugugaca

SEQ ID NO: 2570598 - RNA, 19 nt, Homo sapiens
  misc_RNA (1)...(19): siRNA sense strand
aagaagaagaggagaggaa

SEQ ID NO: 2570599 - RNA, 19 nt, Homo sapiens
  misc_RNA (1)...(19): siRNA sense strand
aguagaaguuaaagaggaa

SEQ ID NO: 2570600 - RNA, 19 nt, Homo sapiens
  misc_RNA (1)...(19): siRNA sense strand
cauuaaggaacuagaacaa

SEQ ID NO: 2570601 - RNA, 19 nt, Homo sapiens
  misc_RNA (1)...(19): siRNA sense strand
gaagaagaggagaggaaaa

SEQ ID NO: 2570602 - RNA, 19 nt, Homo sapiens
  misc_RNA (1)...(19): siRNA sense strand
acccaauggaggagaauua

SEQ ID NO: 2570603 - RNA, 19 nt, Homo sapiens
  misc_RNA (1)...(19): siRNA sense strand
ucacagagauccagggcga

SEQ ID NO: 2570604 - RNA, 19 nt, Homo sapiens
  misc_RNA (1)...(19): siRNA sense strand
uggaagaccgagugaacaa

SEQ ID NO: 2570605 - RNA, 19 nt, Homo sapiens
  misc_RNA (1)...(19): siRNA sense strand
caauggaaguggaugaaaa

SEQ ID NO: 2570606 - RNA, 19 nt, Homo sapiens
  misc_RNA (1)...(19): siRNA sense strand
ucacuuauuagcagagaaa

SEQ ID NO: 2570607 - RNA, 19 nt, Homo sapiens
  misc_RNA (1)...(19): siRNA sense strand
gugucagagacgagagcaa

SEQ ID NO: 2570608 - RNA, 19 nt, Homo sapiens
  misc_RNA (1)...(19): siRNA sense strand
cgacaauuucaaaggauca

SEQ ID NO: 2570609 - RNA, 19 nt, Homo sapiens
  misc_RNA (1)...(19): siRNA sense strand
acaagacgguggaggucaa

SEQ ID NO: 2570610 - RNA, 19 nt, Homo sapiens
  misc_RNA (1)...(19): siRNA sense strand
agaugauggaggaggauuu

SEQ ID NO: 2570611 - RNA, 19 nt, Homo sapiens
  misc_RNA (1)...(19): siRNA sense strand
ggaauaacugggaacacaa

SEQ ID NO: 2570612 - RNA, 19 nt, Homo sapiens
  misc_RNA (1)...(19): siRNA sense strand
ccucggaauuccagacuau

SEQ ID NO: 2570613 - RNA, 19 nt, Homo sapiens
  misc_RNA (1)...(19): siRNA sense strand
cagacauagcagagcagaa

SEQ ID NO: 2570614 - RNA, 19 nt, Homo sapiens
  misc_RNA (1)...(19): siRNA sense strand
gcgacaacugcuugaagaa

SEQ ID NO: 2570615 - RNA, 19 nt, Homo sapiens
  misc_RNA (1)...(19): siRNA sense strand
ugggaaaccacuuggaaga

SEQ ID NO: 2570616 - RNA, 19 nt, Homo sapiens
  misc_RNA (1)...(19): siRNA sense strand
ggucugagaugauggagga

SEQ ID NO: 2570617 - RNA, 19 nt, Homo sapiens
  misc_RNA (1)...(19): siRNA sense strand
gcauuaaggaacuagaaca

SEQ ID NO: 2570618 - RNA, 19 nt, Homo sapiens
  misc_RNA (1)...(19): siRNA sense strand
agaaguuuguggagggcuu

SEQ ID NO: 2570619 - RNA, 19 nt, Homo sapiens
  misc_RNA (1)...(19): siRNA sense strand
caacccaggaauaggaaau

SEQ ID NO: 2570620 - RNA, 19 nt, Homo sapiens
  misc_RNA (1)...(19): siRNA sense strand
ugugaagaaauuaggguau

SEQ ID NO: 2570621 - RNA, 19 nt, Homo sapiens
  misc_RNA (1)...(19): siRNA sense strand
guguuagaagagagcauua

SEQ ID NO: 2570622 - RNA, 19 nt, Homo sapiens
  misc_RNA (1)...(19): siRNA sense strand
aaucaaacccgcagcuaau

SEQ ID NO: 2570623 - RNA, 19 nt, Homo sapiens
  misc_RNA (1)...(19): siRNA sense strand
uaguaucaacccaggaaua

SEQ ID NO: 2570624 - RNA, 19 nt, Homo sapiens
  misc_RNA (1)...(19): siRNA sense strand
ccaaguuaaagaagaaaca

SEQ ID NO: 2570625 - RNA, 19 nt, Homo sapiens
  misc_RNA (1)...(19): siRNA sense strand
aaguuaaagaggaagaaga

SEQ ID NO: 2570626 - RNA, 19 nt, Homo sapiens
  misc_RNA (1)...(19): siRNA sense strand
ggaaauugacggcguggau

SEQ ID NO: 2570627 - RNA, 19 nt, Homo sapiens
  misc_RNA (1)...(19): siRNA sense strand
augccaagaagaagaacaa

SEQ ID NO: 2570628 - RNA, 19 nt, Homo sapiens
  misc_RNA (1)...(19): siRNA sense strand
ccaccauggagaagcacaa

SEQ ID NO: 2570629 - RNA, 19 nt, Homo sapiens
  misc_RNA (1)...(19): siRNA sense strand
ccuacagauaucaagaaua

SEQ ID NO: 2570630 - RNA, 19 nt, Homo sapiens
  misc_RNA (1)...(19): siRNA sense strand
cuuuaaaccagaggaguua

SEQ ID NO: 2570631 - RNA, 19 nt, Homo sapiens
  misc_RNA (1)...(19): siRNA sense strand
uggcagaccucgaaaagaa

SEQ ID NO: 2570632 - RNA, 19 nt, Homo sapiens
  misc_RNA (1)...(19): siRNA sense strand
agaagagagcauuaaggaa

SEQ ID NO: 2570633 - RNA, 19 nt, Homo sapiens
  misc_RNA (1)...(19): siRNA sense strand
gcuauaacacgaagagcca

SEQ ID NO: 2570634 - RNA, 19 nt, Homo sapiens
  misc_RNA (1)...(19): siRNA sense strand
gcuccauagaucagggaca

SEQ ID NO: 2570635 - RNA, 19 nt, Homo sapiens
  misc_RNA (1)...(19): siRNA sense strand
cugagaugauggaggagga

SEQ ID NO: 2570636 - RNA, 19 nt, Homo sapiens
  misc_RNA (1)...(19): siRNA sense strand
ucuuuaaaccagaggaguu

SEQ ID NO: 2570637 - RNA, 19 nt, Homo sapiens
  misc_RNA (1)...(19): siRNA sense strand
gggaaauaauccaaugaac

SEQ ID NO: 2570638 - RNA, 19 nt, Homo sapiens
  misc_RNA (1)...(19): siRNA sense strand
aaguagaaguuaaagagga

SEQ ID NO: 2570639 - RNA, 19 nt, Homo sapiens
  misc_RNA (1)...(19): siRNA sense strand
cggaagaugcaucagauuu

SEQ ID NO: 2570640 - RNA, 19 nt, Homo sapiens
  misc_RNA (1)...(19): siRNA sense strand
gcucaagggcagccgaaca

SEQ ID NO: 2570641 - RNA, 19 nt, Homo sapiens
  misc_RNA (1)...(19): siRNA sense strand
cuggaaaugaagacggaga

SEQ ID NO: 2570642 - RNA, 19 nt, Homo sapiens
  misc_RNA (1)...(19): siRNA sense strand
gcuaagaggcugcagacca

SEQ ID NO: 2570643 - RNA, 19 nt, Homo sapiens
  misc_RNA (1)...(19): siRNA sense strand
cugcaggagugguacaaaa

SEQ ID NO: 2570644 - RNA, 19 nt, Homo sapiens
  misc_RNA (1)...(19): siRNA sense strand
gaagagagcauuaaggaac

SEQ ID NO: 2570645 - RNA, 19 nt, Homo sapiens
  misc_RNA (1)...(19): siRNA sense strand
gccaagaagaagaacaaca

SEQ ID NO: 2570646 - RNA, 19 nt, Homo sapiens
  misc_RNA (1)...(19): siRNA sense strand
ccaacagcagggaugaaua

SEQ ID NO: 2570647 - RNA, 19 nt, Homo sapiens
  misc_RNA (1)...(19): siRNA sense strand
aaucagaaccaauggaagu

SEQ ID NO: 2570648 - RNA, 19 nt, Homo sapiens
  misc_RNA (1)...(19): siRNA sense strand
gcucuauaaucgcaagaca

SEQ ID NO: 2570649 - RNA, 19 nt, Homo sapiens
  misc_RNA (1)...(19): siRNA sense strand
gcugcaaacgcaagaccaa

SEQ ID NO: 2570650 - RNA, 19 nt, Homo sapiens
  misc_RNA (1)...(19): siRNA sense strand
gcauugucaggcugggaaa

SEQ ID NO: 2570651 - RNA, 19 nt, Homo sapiens
  misc_RNA (1)...(19): siRNA sense strand
uggaaaaccugguagccua

SEQ ID NO: 2570652 - RNA, 19 nt, Homo sapiens
  misc_RNA (1)...(19): siRNA sense strand
gggcgaugagugugggcau

SEQ ID NO: 2570653 - RNA, 19 nt, Homo sapiens
  misc_RNA (1)...(19): siRNA sense strand
gaagcuggacacagggcaa

SEQ ID NO: 2570654 - RNA, 19 nt, Homo sapiens
  misc_RNA (1)...(19): siRNA sense strand
gaacauuccagcaggagga

SEQ ID NO: 2570655 - RNA, 19 nt, Homo sapiens
  misc_RNA (1)...(19): siRNA sense strand
aagaagaagaacaacaaga

SEQ ID NO: 2570656 - RNA, 19 nt, Homo sapiens
  misc_RNA (1)...(19): siRNA sense strand
aagaaugccaagaagaaga

SEQ ID NO: 2570657 - RNA, 19 nt, Homo sapiens
  misc_RNA (1)...(19): siRNA sense strand
aaaucaaacccgcagcuaa

SEQ ID NO: 2570658 - RNA, 19 nt, Homo sapiens
  misc_RNA (1)...(19): siRNA sense strand
ccucugagccagggagauu

SEQ ID NO: 2570659 - RNA, 19 nt, Homo sapiens
  misc_RNA (1)...(19): siRNA sense strand
uagaaguuaaagaggaaga

SEQ ID NO: 2570660 - RNA, 19 nt, Homo sapiens
  misc_RNA (1)...(19): siRNA sense strand
aauccacaguaccgagaaa

SEQ ID NO: 2570661 - RNA, 19 nt, Homo sapiens
  misc_RNA (1)...(19): siRNA sense strand
guuaaagaagaaacagaca

SEQ ID NO: 2570662 - RNA, 19 nt, Homo sapiens
  misc_RNA (1)...(19): siRNA sense strand
gcugauacccaauggagga

SEQ ID NO: 2570663 - RNA, 19 nt, Homo sapiens
  misc_RNA (1)...(19): siRNA sense strand
gcaaguuucucaagggaug

SEQ ID NO: 2570664 - RNA, 19 nt, Homo sapiens
  misc_RNA (1)...(19): siRNA sense strand
gacaacugcuugaagaaaa

SEQ ID NO: 2570665 - RNA, 19 nt, Homo sapiens
  misc_RNA (1)...(19): siRNA sense strand
gcgugaucguggaggagaa

SEQ ID NO: 2570666 - RNA, 19 nt, Homo sapiens
  misc_RNA (1)...(19): siRNA sense strand
ucauuaaaccaaaggucau

SEQ ID NO: 2570667 - RNA, 19 nt, Homo sapiens
  misc_RNA (1)...(19): siRNA sense strand
ccucagacgcagauggacu

SEQ ID NO: 2570668 - RNA, 19 nt, Homo sapiens
  misc_RNA (1)...(19): siRNA sense strand
ugaacaugaaggagcugaa

SEQ ID NO: 2570669 - RNA, 19 nt, Homo sapiens
  misc_RNA (1)...(19): siRNA sense strand
ucacugaguacauggccaa

SEQ ID NO: 2570670 - RNA, 19 nt, Homo sapiens
  misc_RNA (1)...(19): siRNA sense strand
cugaggacaacguggccaa

SEQ ID NO: 2570671 - RNA, 19 nt, Homo sapiens
  misc_RNA (1)...(19): siRNA sense strand
gagacgugaugcugggcga

SEQ ID NO: 2570672 - RNA, 19 nt, Homo sapiens
  misc_RNA (1)...(19): siRNA sense strand
gggcgauuaccgagggaac

SEQ ID NO: 2570673 - RNA, 19 nt, Homo sapiens
  misc_RNA (1)...(19): siRNA sense strand
cggcccaggaugaguucua

SEQ ID NO: 2570674 - RNA, 19 nt, Homo sapiens
  misc_RNA (1)...(19): siRNA sense strand
cccugagagagaagaaauu

SEQ ID NO: 2570675 - RNA, 19 nt, Homo sapiens
  misc_RNA (1)...(19): siRNA sense strand
cggaauccuucucugggaa

SEQ ID NO: 2570676 - RNA, 19 nt, Homo sapiens
  misc_RNA (1)...(19): siRNA sense strand
ccgucaagugcauuaagaa

SEQ ID NO: 2570677 - RNA, 19 nt, Homo sapiens
  misc_RNA (1)...(19): siRNA sense strand
uggagaagggcuacaagau

SEQ ID NO: 2570678 - RNA, 19 nt, Homo sapiens
  misc_RNA (1)...(19): siRNA sense strand
acacauuaaaggagaggua

SEQ ID NO: 2570679 - RNA, 19 nt, Homo sapiens
  misc_RNA (1)...(19): siRNA sense strand
aaacgaaggaaaaggaaaa

SEQ ID NO: 2570680 - RNA, 19 nt, Homo sapiens
  misc_RNA (1)...(19): siRNA sense strand
caauuaaguuggagcccau

SEQ ID NO: 2570681 - RNA, 19 nt, Homo sapiens
  misc_RNA (1)...(19): siRNA sense strand
gagaauuacgauuagggaa

SEQ ID NO: 2570682 - RNA, 19 nt, Homo sapiens
  misc_RNA (1)...(19): siRNA sense strand
cuuaauaggacgaccaaga

SEQ ID NO: 2570683 - RNA, 19 nt, Homo sapiens
  misc_RNA (1)...(19): siRNA sense strand
auauugauccggagacaaa

SEQ ID NO: 2570684 - RNA, 19 nt, Homo sapiens
  misc_RNA (1)...(19): siRNA sense strand
ucagaaaauuggagauaca

SEQ ID NO: 2570685 - RNA, 19 nt, Homo sapiens
  misc_RNA (1)...(19): siRNA sense strand
cugacuuguuugaucgaaa

SEQ ID NO: 2570686 - RNA, 19 nt, Homo sapiens
  misc_RNA (1)...(19): siRNA sense strand
aaaagaaagacaaggacaa

SEQ ID NO: 2570687 - RNA, 19 nt, Homo sapiens
  misc_RNA (1)...(19): siRNA sense strand
aggacgaccaagaaacaaa

SEQ ID NO: 2570688 - RNA, 19 nt, Homo sapiens
  misc_RNA (1)...(19): siRNA sense strand
acaaaguagaagagacgau

SEQ ID NO: 2570689 - RNA, 19 nt, Homo sapiens
  misc_RNA (1)...(19): siRNA sense strand
agaacuugauauacagaga

SEQ ID NO: 2570690 - RNA, 19 nt, Homo sapiens
  misc_RNA (1)...(19): siRNA sense strand
auguaaaaccugagaacuu

SEQ ID NO: 2570691 - RNA, 19 nt, Homo sapiens
  misc_RNA (1)...(19): siRNA sense strand
gaacaaaguagaagagacg

SEQ ID NO: 2570692 - RNA, 19 nt, Homo sapiens
  misc_RNA (1)...(19): siRNA sense strand
agagauaagaugcaacaau

SEQ ID NO: 2570693 - RNA, 19 nt, Homo sapiens
  misc_RNA (1)...(19): siRNA sense strand
caaacgaaggaaaaggaaa

SEQ ID NO: 2570694 - RNA, 19 nt, Homo sapiens
  misc_RNA (1)...(19): siRNA sense strand
aaggagagguaucagaaaa

SEQ ID NO: 2570695 - RNA, 19 nt, Homo sapiens
  misc_RNA (1)...(19): siRNA sense strand
caucaaacagagaagcaca

SEQ ID NO: 2570696 - RNA, 19 nt, Homo sapiens
  misc_RNA (1)...(19): siRNA sense strand
caugaaaucaagagcacca

SEQ ID NO: 2570697 - RNA, 19 nt, Homo sapiens
  misc_RNA (1)...(19): siRNA sense strand
gcugacacauuaaaggaga

SEQ ID NO: 2570698 - RNA, 19 nt, Homo sapiens
  misc_RNA (1)...(19): siRNA sense strand
agaacaaaguagaagagac

SEQ ID NO: 2570699 - RNA, 19 nt, Homo sapiens
  misc_RNA (1)...(19): siRNA sense strand
auuuagaagcuuuagguca

SEQ ID NO: 2570700 - RNA, 19 nt, Homo sapiens
  misc_RNA (1)...(19): siRNA sense strand
acaaauggagaguuaaaca

SEQ ID NO: 2570701 - RNA, 19 nt, Homo sapiens
  misc_RNA (1)...(19): siRNA sense strand
aggcagucuuccuuggcaa

SEQ ID NO: 2570702 - RNA, 19 nt, Homo sapiens
  misc_RNA (1)...(19): siRNA sense strand
uguaagaaggcuagauuuu

SEQ ID NO: 2570703 - RNA, 19 nt, Homo sapiens
  misc_RNA (1)...(19): siRNA sense strand
acaaaugaauauguggcaa

SEQ ID NO: 2570704 - RNA, 19 nt, Homo sapiens
  misc_RNA (1)...(19): siRNA sense strand
cagcuagauauaugagcau

SEQ ID NO: 2570705 - RNA, 19 nt, Homo sapiens
  misc_RNA (1)...(19): siRNA sense strand
ggagauacaaaacgggcua

SEQ ID NO: 2570706 - RNA, 19 nt, Homo sapiens
  misc_RNA (1)...(19): siRNA sense strand
aggaaaagaacaaaguaga

SEQ ID NO: 2570707 - RNA, 19 nt, Homo sapiens
  misc_RNA (1)...(19): siRNA sense strand
ggcaaggcuuaaaggcuga

SEQ ID NO: 2570708 - RNA, 19 nt, Homo sapiens
  misc_RNA (1)...(19): siRNA sense strand
uggagaugguauaccucaa

SEQ ID NO: 2570709 - RNA, 19 nt, Homo sapiens
  misc_RNA (1)...(19): siRNA sense strand
acaaagaaacacauaccau

SEQ ID NO: 2570710 - RNA, 19 nt, Homo sapiens
  misc_RNA (1)...(19): siRNA sense strand
gaauauauugauccggaga

SEQ ID NO: 2570711 - RNA, 19 nt, Homo sapiens
  misc_RNA (1)...(19): siRNA sense strand
ccuuacaggaacagcuaga

SEQ ID NO: 2570712 - RNA, 19 nt, Homo sapiens
  misc_RNA (1)...(19): siRNA sense strand
cugaaguagaagugaugga

SEQ ID NO: 2570713 - RNA, 19 nt, Homo sapiens
  misc_RNA (1)...(19): siRNA sense strand
ucguuauguaagaaggcua

SEQ ID NO: 2570714 - RNA, 19 nt, Homo sapiens
  misc_RNA (1)...(19): siRNA sense strand
acagagaacacaagagccu

SEQ ID NO: 2570715 - RNA, 19 nt, Homo sapiens
  misc_RNA (1)...(19): siRNA sense strand
agacgauuuagaagcuuua

SEQ ID NO: 2570716 - RNA, 19 nt, Homo sapiens
  misc_RNA (1)...(19): siRNA sense strand
acauuaaaggagagguauc

SEQ ID NO: 2570717 - RNA, 19 nt, Homo sapiens
  misc_RNA (1)...(19): siRNA sense strand
cagacaugguggcucggua

SEQ ID NO: 2570718 - RNA, 19 nt, Homo sapiens
  misc_RNA (1)...(19): siRNA sense strand
ccggagacaaagaaacaca

SEQ ID NO: 2570719 - RNA, 19 nt, Homo sapiens
  misc_RNA (1)...(19): siRNA sense strand
aaaggagagguaucagaaa

SEQ ID NO: 2570720 - RNA, 19 nt, Homo sapiens
  misc_RNA (1)...(19): siRNA sense strand
acagagaagcacaucaaca

SEQ ID NO: 2570721 - RNA, 19 nt, Homo sapiens
  misc_RNA (1)...(19): siRNA sense strand
aucaagagcaccacagcua

SEQ ID NO: 2570722 - RNA, 19 nt, Homo sapiens
  misc_RNA (1)...(19): siRNA sense strand
uuguuugacuugugugaca

SEQ ID NO: 2570723 - RNA, 19 nt, Homo sapiens
  misc_RNA (1)...(19): siRNA sense strand
gggagaaggacgaagggaa

SEQ ID NO: 2570724 - RNA, 19 nt, Homo sapiens
  misc_RNA (1)...(19): siRNA sense strand
ccaauagaguugaggcaca

SEQ ID NO: 2570725 - RNA, 19 nt, Homo sapiens
  misc_RNA (1)...(19): siRNA sense strand
cauuaauagcuuugggcau

SEQ ID NO: 2570726 - RNA, 19 nt, Homo sapiens
  misc_RNA (1)...(19): siRNA sense strand
caacagacccucagcccua

SEQ ID NO: 2570727 - RNA, 19 nt, Homo sapiens
  misc_RNA (1)...(19): siRNA sense strand
ugaccaaugagguggauau

SEQ ID NO: 2570728 - RNA, 19 nt, Homo sapiens
  misc_RNA (1)...(19): siRNA sense strand
ggcauaaguuccagggcca

SEQ ID NO: 2570729 - RNA, 19 nt, Homo sapiens
  misc_RNA (1)...(19): siRNA sense strand
acaggaucguggagagaga

SEQ ID NO: 2570730 - RNA, 19 nt, Homo sapiens
  misc_RNA (1)...(19): siRNA sense strand
acccagagccagaggauca

SEQ ID NO: 2570731 - RNA, 19 nt, Homo sapiens
  misc_RNA (1)...(19): siRNA sense strand
uguccuggagcuagagaaa

SEQ ID NO: 2570732 - RNA, 19 nt, Homo sapiens
  misc_RNA (1)...(19): siRNA sense strand
cuguaagguaccagugcaa

SEQ ID NO: 2570733 - RNA, 19 nt, Homo sapiens
  misc_RNA (1)...(19): siRNA sense strand
cgagagaaccagccggaca

SEQ ID NO: 2570734 - RNA, 19 nt, Homo sapiens
  misc_RNA (1)...(19): siRNA sense strand
gcgcagaaaacacaagaaa

SEQ ID NO: 2570735 - RNA, 19 nt, Homo sapiens
  misc_RNA (1)...(19): siRNA sense strand
gcaaagggcuggaugcaag

SEQ ID NO: 2570736 - RNA, 19 nt, Homo sapiens
  misc_RNA (1)...(19): siRNA sense strand
agcaauggcaagugggaca

SEQ ID NO: 2570737 - RNA, 19 nt, Homo sapiens
  misc_RNA (1)...(19): siRNA sense strand
ucacagagauguugggcag

SEQ ID NO: 2570738 - RNA, 19 nt, Homo sapiens
  misc_RNA (1)...(19): siRNA sense strand
cgacaggaucguggagaga

SEQ ID NO: 2570739 - RNA, 19 nt, Homo sapiens
  misc_RNA (1)...(19): siRNA sense strand
gaguugaggcacaugguga

SEQ ID NO: 2570740 - RNA, 19 nt, Homo sapiens
  misc_RNA (1)...(19): siRNA sense strand
ggaacagggcacacaggau

SEQ ID NO: 2570741 - RNA, 19 nt, Homo sapiens
  misc_RNA (1)...(19): siRNA sense strand
ggccaauagaguugaggca

SEQ ID NO: 2570742 - RNA, 19 nt, Homo sapiens
  misc_RNA (1)...(19): siRNA sense strand
agaaagacaccgagggcug

SEQ ID NO: 2570743 - RNA, 19 nt, Homo sapiens
  misc_RNA (1)...(19): siRNA sense strand
ggauaugccuggagcuggu

SEQ ID NO: 2570744 - RNA, 19 nt, Homo sapiens
  misc_RNA (1)...(19): siRNA sense strand
aggaucagguggagaccca

SEQ ID NO: 2570745 - RNA, 19 nt, Homo sapiens
  misc_RNA (1)...(19): siRNA sense strand
ccgcaaggagcgcagaaaa

SEQ ID NO: 2570746 - RNA, 19 nt, Homo sapiens
  misc_RNA (1)...(19): siRNA sense strand
ccacccuggaggaggaaga

SEQ ID NO: 2570747 - RNA, 19 nt, Homo sapiens
  misc_RNA (1)...(19): siRNA sense strand
ccaacggaggacugggaga

SEQ ID NO: 2570748 - RNA, 19 nt, Homo sapiens
  misc_RNA (1)...(19): siRNA sense strand
ccaacugacccuaugccua

SEQ ID NO: 2570749 - RNA, 19 nt, Homo sapiens
  misc_RNA (1)...(19): siRNA sense strand
cggaggacugggagaagga

SEQ ID NO: 2570750 - RNA, 19 nt, Homo sapiens
  misc_RNA (1)...(19): siRNA sense strand
guagagagcuucugggagg

SEQ ID NO: 2570751 - RNA, 19 nt, Homo sapiens
  misc_RNA (1)...(19): siRNA sense strand
agaacuggcgagagaacca

SEQ ID NO: 2570752 - RNA, 19 nt, Homo sapiens
  misc_RNA (1)...(19): siRNA sense strand
aagaagaaacccugauuuu

SEQ ID NO: 2570753 - RNA, 19 nt, Homo sapiens
  misc_RNA (1)...(19): siRNA sense strand
uggugaugguggcgcauga

SEQ ID NO: 2570754 - RNA, 19 nt, Homo sapiens
  misc_RNA (1)...(19): siRNA sense strand
caccaaacccagacguuca

SEQ ID NO: 2570755 - RNA, 19 nt, Homo sapiens
  misc_RNA (1)...(19): siRNA sense strand
ccuucaagccagaggccua

SEQ ID NO: 2570756 - RNA, 19 nt, Homo sapiens
  misc_RNA (1)...(19): siRNA sense strand
cccuagagccgaaaagaaa

SEQ ID NO: 2570757 - RNA, 19 nt, Homo sapiens
  misc_RNA (1)...(19): siRNA sense strand
cagucaaagacauccuaaa

SEQ ID NO: 2570758 - RNA, 19 nt, Homo sapiens
  misc_RNA (1)...(19): siRNA sense strand
agaagacagaggcggacaa

SEQ ID NO: 2570759 - RNA, 19 nt, Homo sapiens
  misc_RNA (1)...(19): siRNA sense strand
uggagaagacagaggcgga

SEQ ID NO: 2570760 - RNA, 19 nt, Homo sapiens
  misc_RNA (1)...(19): siRNA sense strand
ccgggauuccgcagagcaa

SEQ ID NO: 2570761 - RNA, 19 nt, Homo sapiens
  misc_RNA (1)...(19): siRNA sense strand
aggcgguggagcuggagaa

SEQ ID NO: 2570762 - RNA, 19 nt, Homo sapiens
  misc_RNA (1)...(19): siRNA sense strand
gcuacaagugcaagcggca

SEQ ID NO: 2570763 - RNA, 19 nt, Homo sapiens
  misc_RNA (1)...(19): siRNA sense strand
cgaucaugaagcaaauaaa

SEQ ID NO: 2570764 - RNA, 19 nt, Homo sapiens
  misc_RNA (1)...(19): siRNA sense strand
gaguauuucuuuaaaggca

SEQ ID NO: 2570765 - RNA, 19 nt, Homo sapiens
  misc_RNA (1)...(19): siRNA sense strand
ucuuaaagccaaagcuguu

SEQ ID NO: 2570766 - RNA, 19 nt, Homo sapiens
  misc_RNA (1)...(19): siRNA sense strand
aguacuuaaaggagaugua

SEQ ID NO: 2570767 - RNA, 19 nt, Homo sapiens
  misc_RNA (1)...(19): siRNA sense strand
gaacauagacagaagaugc

SEQ ID NO: 2570768 - RNA, 19 nt, Homo sapiens
  misc_RNA (1)...(19): siRNA sense strand
gggcauuggcauguggaau

SEQ ID NO: 2570769 - RNA, 19 nt, Homo sapiens
  misc_RNA (1)...(19): siRNA sense strand
ugggaagucuuaaagccaa

SEQ ID NO: 2570770 - RNA, 19 nt, Homo sapiens
  misc_RNA (1)...(19): siRNA sense strand
cuggagaugcuguagccaa

SEQ ID NO: 2570771 - RNA, 19 nt, Homo sapiens
  misc_RNA (1)...(19): siRNA sense strand
ucuuaugauuggucacaga

SEQ ID NO: 2570772 - RNA, 19 nt, Homo sapiens
  misc_RNA (1)...(19): siRNA sense strand
uccaaagaacauagacaga

SEQ ID NO: 2570773 - RNA, 19 nt, Homo sapiens
  misc_RNA (1)...(19): siRNA sense strand
gaacaaagucagaucuggu

SEQ ID NO: 2570774 - RNA, 19 nt, Homo sapiens
  misc_RNA (1)...(19): siRNA sense strand
uggagaacccagagcacaa

SEQ ID NO: 2570775 - RNA, 19 nt, Homo sapiens
  misc_RNA (1)...(19): siRNA sense strand
agucauaccuggagcagca

SEQ ID NO: 2570776 - RNA, 19 nt, Homo sapiens
  misc_RNA (1)...(19): siRNA sense strand
uguugaaauugaagagcga

SEQ ID NO: 2570777 - RNA, 19 nt, Homo sapiens
  misc_RNA (1)...(19): siRNA sense strand
augcagaaucagaugaaga

SEQ ID NO: 2570778 - RNA, 19 nt, Homo sapiens
  misc_RNA (1)...(19): siRNA sense strand
guguuguggaaguggagaa

SEQ ID NO: 2570779 - RNA, 19 nt, Homo sapiens
  misc_RNA (1)...(19): siRNA sense strand
gccaaaggaaagaagguca

SEQ ID NO: 2570780 - RNA, 19 nt, Homo sapiens
  misc_RNA (1)...(19): siRNA sense strand
gcggcaggaaaguggagaa

SEQ ID NO: 2570781 - RNA, 19 nt, Homo sapiens
  misc_RNA (1)...(19): siRNA sense strand
ggaaaguggagaaugagga

SEQ ID NO: 2570782 - RNA, 19 nt, Homo sapiens
  misc_RNA (1)...(19): siRNA sense strand
ggacaugaauaaagaccag

SEQ ID NO: 2570783 - RNA, 19 nt, Homo sapiens
  misc_RNA (1)...(19): siRNA sense strand
aaguggagaaugaggacau

SEQ ID NO: 2570784 - RNA, 19 nt, Homo sapiens
  misc_RNA (1)...(19): siRNA sense strand
ggucggugaaucaggucua

SEQ ID NO: 2570785 - RNA, 19 nt, Homo sapiens
  misc_RNA (1)...(19): siRNA sense strand
cggcaggaaaguggagaau

SEQ ID NO: 2570786 - RNA, 19 nt, Homo sapiens
  misc_RNA (1)...(19): siRNA sense strand
cuccuauauugaugagcaa

SEQ ID NO: 2570787 - RNA, 19 nt, Homo sapiens
  misc_RNA (1)...(19): siRNA sense strand
uggagaaugaggacaugaa

SEQ ID NO: 2570788 - RNA, 19 nt, Homo sapiens
  misc_RNA (1)...(19): siRNA sense strand
gcaauacacaacaagguga

SEQ ID NO: 2570789 - RNA, 19 nt, Homo sapiens
  misc_RNA (1)...(19): siRNA sense strand
cgggagcggcugaagaaaa

SEQ ID NO: 2570790 - RNA, 19 nt, Homo sapiens
  misc_RNA (1)...(19): siRNA sense strand
gauccaaagaagauagcaa

SEQ ID NO: 2570791 - RNA, 19 nt, Homo sapiens
  misc_RNA (1)...(19): siRNA sense strand
acacaauggaagaagucaa

SEQ ID NO: 2570792 - RNA, 19 nt, Homo sapiens
  misc_RNA (1)...(19): siRNA sense strand
ggagagacagcaaggguga

SEQ ID NO: 2570793 - RNA, 19 nt, Homo sapiens
  misc_RNA (1)...(19): siRNA sense strand
cugaagaauggaaggguca

SEQ ID NO: 2570794 - RNA, 19 nt, Homo sapiens
  misc_RNA (1)...(19): siRNA sense strand
ggagcaucccaguaggaaa

SEQ ID NO: 2570795 - RNA, 19 nt, Homo sapiens
  misc_RNA (1)...(19): siRNA sense strand
auguagaagaccaggaaga

SEQ ID NO: 2570796 - RNA, 19 nt, Homo sapiens
  misc_RNA (1)...(19): siRNA sense strand
gugaugacccagagagcau

SEQ ID NO: 2570797 - RNA, 19 nt, Homo sapiens
  misc_RNA (1)...(19): siRNA sense strand
aguuggacgaugagggaau

SEQ ID NO: 2570798 - RNA, 19 nt, Homo sapiens
  misc_RNA (1)...(19): siRNA sense strand
aagaagacagcaaggagaa

SEQ ID NO: 2570799 - RNA, 19 nt, Homo sapiens
  misc_RNA (1)...(19): siRNA sense strand
aggaaaaggaggagaugau

SEQ ID NO: 2570800 - RNA, 19 nt, Homo sapiens
  misc_RNA (1)...(19): siRNA sense strand
cagcagagagucagagcga

SEQ ID NO: 2570801 - RNA, 19 nt, Homo sapiens
  misc_RNA (1)...(19): siRNA sense strand
uggagaaaacagugagcaa

SEQ ID NO: 2570802 - RNA, 19 nt, Homo sapiens
  misc_RNA (1)...(19): siRNA sense strand
caagaagacagcaaggaga

SEQ ID NO: 2570803 - RNA, 19 nt, Homo sapiens
  misc_RNA (1)...(19): siRNA sense strand
cagacaagaaggaggaaac

SEQ ID NO: 2570804 - RNA, 19 nt, Homo sapiens
  misc_RNA (1)...(19): siRNA sense strand
gagcaagcagacagcgaau

SEQ ID NO: 2570805 - RNA, 19 nt, Homo sapiens
  misc_RNA (1)...(19): siRNA sense strand
acaacaacacaauggaaga

SEQ ID NO: 2570806 - RNA, 19 nt, Homo sapiens
  misc_RNA (1)...(19): siRNA sense strand
aaucaagcagugaggaaga

SEQ ID NO: 2570807 - RNA, 19 nt, Homo sapiens
  misc_RNA (1)...(19): siRNA sense strand
aaaaggaggagaugauaaa

SEQ ID NO: 2570808 - RNA, 19 nt, Homo sapiens
  misc_RNA (1)...(19): siRNA sense strand
agacagacaagaaggagga

SEQ ID NO: 2570809 - RNA, 19 nt, Homo sapiens
  misc_RNA (1)...(19): siRNA sense strand
caaaagaaucuggagaaaa

SEQ ID NO: 2570810 - RNA, 19 nt, Homo sapiens
  misc_RNA (1)...(19): siRNA sense strand
cugaggaagacgacaguga

SEQ ID NO: 2570811 - RNA, 19 nt, Homo sapiens
  misc_RNA (1)...(19): siRNA sense strand
augauaaagaugacgauga

SEQ ID NO: 2570812 - RNA, 19 nt, Homo sapiens
  misc_RNA (1)...(19): siRNA sense strand
ccagagaggagcaagcaga

SEQ ID NO: 2570813 - RNA, 19 nt, Homo sapiens
  misc_RNA (1)...(19): siRNA sense strand
aggaacaggcaaaugaaga

SEQ ID NO: 2570814 - RNA, 19 nt, Homo sapiens
  misc_RNA (1)...(19): siRNA sense strand
ugaagaugacaguggagau

SEQ ID NO: 2570815 - RNA, 19 nt, Homo sapiens
  misc_RNA (1)...(19): siRNA sense strand
aauuaacaguugaugccua

SEQ ID NO: 2570816 - RNA, 19 nt, Homo sapiens
  misc_RNA (1)...(19): siRNA sense strand
aggggaaacuccagaauga

SEQ ID NO: 2570817 - RNA, 19 nt, Homo sapiens
  misc_RNA (1)...(19): siRNA sense strand
agacagcagcagauccaaa

SEQ ID NO: 2570818 - RNA, 19 nt, Homo sapiens
  misc_RNA (1)...(19): siRNA sense strand
aggaagauggccaguugaa

SEQ ID NO: 2570819 - RNA, 19 nt, Homo sapiens
  misc_RNA (1)...(19): siRNA sense strand
augagggaaugcagaguga

SEQ ID NO: 2570820 - RNA, 19 nt, Homo sapiens
  misc_RNA (1)...(19): siRNA sense strand
gcagcucagcagagaguca

SEQ ID NO: 2570821 - RNA, 19 nt, Homo sapiens
  misc_RNA (1)...(19): siRNA sense strand
aggaccggguggacagcaa

SEQ ID NO: 2570822 - RNA, 19 nt, Homo sapiens
  misc_RNA (1)...(19): siRNA sense strand
gagugagagugaagagcac

SEQ ID NO: 2570823 - RNA, 19 nt, Homo sapiens
  misc_RNA (1)...(19): siRNA sense strand
ggcaugaaaucaaaagaau

SEQ ID NO: 2570824 - RNA, 19 nt, Homo sapiens
  misc_RNA (1)...(19): siRNA sense strand
agauagagagccggaaauu

SEQ ID NO: 2570825 - RNA, 19 nt, Homo sapiens
  misc_RNA (1)...(19): siRNA sense strand
cuuggagagcagugaguca

SEQ ID NO: 2570826 - RNA, 19 nt, Homo sapiens
  misc_RNA (1)...(19): siRNA sense strand
aguccagccaagaggccaa

SEQ ID NO: 2570827 - RNA, 19 nt, Homo sapiens
  misc_RNA (1)...(19): siRNA sense strand
gcagugaggaagauggcca

SEQ ID NO: 2570828 - RNA, 19 nt, Homo sapiens
  misc_RNA (1)...(19): siRNA sense strand
aaguuagcucagaggaaca

SEQ ID NO: 2570829 - RNA, 19 nt, Homo sapiens
  misc_RNA (1)...(19): siRNA sense strand
caagagagugagagugaag

SEQ ID NO: 2570830 - RNA, 19 nt, Homo sapiens
  misc_RNA (1)...(19): siRNA sense strand
aaggaggagaugauaaaga

SEQ ID NO: 2570831 - RNA, 19 nt, Homo sapiens
  misc_RNA (1)...(19): siRNA sense strand
acucucaagaagacagcaa

SEQ ID NO: 2570832 - RNA, 19 nt, Homo sapiens
  misc_RNA (1)...(19): siRNA sense strand
agagaacagcagugagucu

SEQ ID NO: 2570833 - RNA, 19 nt, Homo sapiens
  misc_RNA (1)...(19): siRNA sense strand
ucucaagacagcagcagau

SEQ ID NO: 2570834 - RNA, 19 nt, Homo sapiens
  misc_RNA (1)...(19): siRNA sense strand
gcagcagauccaaagaaga

SEQ ID NO: 2570835 - RNA, 19 nt, Homo sapiens
  misc_RNA (1)...(19): siRNA sense strand
cuaguuauguagaagacca

SEQ ID NO: 2570836 - RNA, 19 nt, Homo sapiens
  misc_RNA (1)...(19): siRNA sense strand
ggaacaagcugcagagcca

SEQ ID NO: 2570837 - RNA, 19 nt, Homo sapiens
  misc_RNA (1)...(19): siRNA sense strand
gggaggagauggagcgcau

SEQ ID NO: 2570838 - RNA, 19 nt, Homo sapiens
  misc_RNA (1)...(19): siRNA sense strand
agaaggacauugauggcaa

SEQ ID NO: 2570839 - RNA, 19 nt, Homo sapiens
  misc_RNA (1)...(19): siRNA sense strand
ggaaagaaauucaccgacu

SEQ ID NO: 2570840 - RNA, 19 nt, Homo sapiens
  misc_RNA (1)...(19): siRNA sense strand
cuucauaggcuuugccaau

SEQ ID NO: 2570841 - RNA, 19 nt, Homo sapiens
  misc_RNA (1)...(19): siRNA sense strand
aggaugaugaggagaaaga

SEQ ID NO: 2570842 - RNA, 19 nt, Homo sapiens
  misc_RNA (1)...(19): siRNA sense strand
augaggagaaagagaagaa

SEQ ID NO: 2570843 - RNA, 19 nt, Homo sapiens
  misc_RNA (1)...(19): siRNA sense strand
cuuugagaccauugugaaa

SEQ ID NO: 2570844 - RNA, 19 nt, Homo sapiens
  misc_RNA (1)...(19): siRNA sense strand
acaccaaccaugaggacuu

SEQ ID NO: 2570845 - RNA, 19 nt, Homo sapiens
  misc_RNA (1)...(19): siRNA sense strand
gguacaaggaugaugagga

SEQ ID NO: 2570846 - RNA, 19 nt, Homo sapiens
  misc_RNA (1)...(19): siRNA sense strand
gaugaugaggagaaagaga

SEQ ID NO: 2570847 - RNA, 19 nt, Homo sapiens
  misc_RNA (1)...(19): siRNA sense strand
ucaacaagaccgugaggga

SEQ ID NO: 2570848 - RNA, 19 nt, Homo sapiens
  misc_RNA (1)...(19): siRNA sense strand
gagaagggcuuuaugucga

SEQ ID NO: 2570849 - RNA, 19 nt, Homo sapiens
  misc_RNA (1)...(19): siRNA sense strand
ucucggagcugcuggccaa

SEQ ID NO: 2570850 - RNA, 19 nt, Homo sapiens
  misc_RNA (1)...(19): siRNA sense strand
gagaagaaauacaugcugu

SEQ ID NO: 2570851 - RNA, 19 nt, Homo sapiens
  misc_RNA (1)...(19): siRNA sense strand
cuucagggaaccaggauga

SEQ ID NO: 2570852 - RNA, 19 nt, Homo sapiens
  misc_RNA (1)...(19): siRNA sense strand
gggacguggagaagggcuu

SEQ ID NO: 2570853 - RNA, 19 nt, Homo sapiens
  misc_RNA (1)...(19): siRNA sense strand
agacacaggaggaggugga

SEQ ID NO: 2570854 - RNA, 19 nt, Homo sapiens
  misc_RNA (1)...(19): siRNA sense strand
acugcaagggaaagaaauu

SEQ ID NO: 2570855 - RNA, 19 nt, Homo sapiens
  misc_RNA (1)...(19): siRNA sense strand
gugaagaagauccgagaac

SEQ ID NO: 2570856 - RNA, 19 nt, Homo sapiens
  misc_RNA (1)...(19): siRNA sense strand
agguggaggaauacaagaa

SEQ ID NO: 2570857 - RNA, 19 nt, Homo sapiens
  misc_RNA (1)...(19): siRNA sense strand
guacaaggaugaugaggag

SEQ ID NO: 2570858 - RNA, 19 nt, Homo sapiens
  misc_RNA (1)...(19): siRNA sense strand
aaagagaaagccagcgaga

SEQ ID NO: 2570859 - RNA, 19 nt, Homo sapiens
  misc_RNA (1)...(19): siRNA sense strand
ccauugagaaggaggugga

SEQ ID NO: 2570860 - RNA, 19 nt, Homo sapiens
  misc_RNA (1)...(19): siRNA sense strand
uggaggaauacaagaacuu

SEQ ID NO: 2570861 - RNA, 19 nt, Homo sapiens
  misc_RNA (1)...(19): siRNA sense strand
cagcagaggagcaaccaga

SEQ ID NO: 2570862 - RNA, 19 nt, Homo sapiens
  misc_RNA (1)...(19): siRNA sense strand
ugugcugacugcugagaau

SEQ ID NO: 2570863 - RNA, 19 nt, Homo sapiens
  misc_RNA (1)...(19): siRNA sense strand
gcguguacccugagcgugu

SEQ ID NO: 2570864 - RNA, 19 nt, Homo sapiens
  misc_RNA (1)...(19): siRNA sense strand
augaugaggagaaagagaa

SEQ ID NO: 2570865 - RNA, 19 nt, Homo sapiens
  misc_RNA (1)...(19): siRNA sense strand
uugagaaggagguggagga

SEQ ID NO: 2570866 - RNA, 19 nt, Homo sapiens
  misc_RNA (1)...(19): siRNA sense strand
ucaagaauauccauggcau

SEQ ID NO: 2570867 - RNA, 19 nt, Homo sapiens
  misc_RNA (1)...(19): siRNA sense strand
gcuacauuggaguggugaa

SEQ ID NO: 2570868 - RNA, 19 nt, Homo sapiens
  misc_RNA (1)...(19): siRNA sense strand
guggugaaccggagccaga

SEQ ID NO: 2570869 - RNA, 19 nt, Homo sapiens
  misc_RNA (1)...(19): siRNA sense strand
acaaagagaaagccagcga

SEQ ID NO: 2570870 - RNA, 19 nt, Homo sapiens
  misc_RNA (1)...(19): siRNA sense strand
gagaaggagguggaggaau

SEQ ID NO: 2570871 - RNA, 19 nt, Homo sapiens
  misc_RNA (1)...(19): siRNA sense strand
cuuucgagcuggucaagau

SEQ ID NO: 2570872 - RNA, 19 nt, Homo sapiens
  misc_RNA (1)...(19): siRNA sense strand
augaacaagaagaagacuu

SEQ ID NO: 2570873 - RNA, 19 nt, Homo sapiens
  misc_RNA (1)...(19): siRNA sense strand
cgguugaaguguagggaga

SEQ ID NO: 2570874 - RNA, 19 nt, Homo sapiens
  misc_RNA (1)...(19): siRNA sense strand
caacagaaaggaugagaca

SEQ ID NO: 2570875 - RNA, 19 nt, Homo sapiens
  misc_RNA (1)...(19): siRNA sense strand
cuguaaugaauguggaaau

SEQ ID NO: 2570876 - RNA, 19 nt, Homo sapiens
  misc_RNA (1)...(19): siRNA sense strand
cugaaagagaugcggaaaa

SEQ ID NO: 2570877 - RNA, 19 nt, Homo sapiens
  misc_RNA (1)...(19): siRNA sense strand
gcaauguaagcaacagaaa

SEQ ID NO: 2570878 - RNA, 19 nt, Homo sapiens
  misc_RNA (1)...(19): siRNA sense strand
gaaguuacaucuuuggcaa

SEQ ID NO: 2570879 - RNA, 19 nt, Homo sapiens
  misc_RNA (1)...(19): siRNA sense strand
ccguagugcugaugaacca

SEQ ID NO: 2570880 - RNA, 19 nt, Homo sapiens
  misc_RNA (1)...(19): siRNA sense strand
uggcaaagucucucaucaa

SEQ ID NO: 2570881 - RNA, 19 nt, Homo sapiens
  misc_RNA (1)...(19): siRNA sense strand
agugaugagcugaaagaga

SEQ ID NO: 2570882 - RNA, 19 nt, Homo sapiens
  misc_RNA (1)...(19): siRNA sense strand
gaaaguacuuccagcggca

SEQ ID NO: 2570883 - RNA, 19 nt, Homo sapiens
  misc_RNA (1)...(19): siRNA sense strand
agauggugcagaagaagaa

SEQ ID NO: 2570884 - RNA, 19 nt, Homo sapiens
  misc_RNA (1)...(19): siRNA sense strand
aggaauacagacaugaaau

SEQ ID NO: 2570885 - RNA, 19 nt, Homo sapiens
  misc_RNA (1)...(19): siRNA sense strand
gcugaaagagaugcggaaa

SEQ ID NO: 2570886 - RNA, 19 nt, Homo sapiens
  misc_RNA (1)...(19): siRNA sense strand
cccugaggcaagagaagaa

SEQ ID NO: 2570887 - RNA, 19 nt, Homo sapiens
  misc_RNA (1)...(19): siRNA sense strand
cuuauuugcuagaaugaca

SEQ ID NO: 2570888 - RNA, 19 nt, Homo sapiens
  misc_RNA (1)...(19): siRNA sense strand
uugccaagaagauggacaa

SEQ ID NO: 2570889 - RNA, 19 nt, Homo sapiens
  misc_RNA (1)...(19): siRNA sense strand
gcaaagucucucaucaaau

SEQ ID NO: 2570890 - RNA, 19 nt, Homo sapiens
  misc_RNA (1)...(19): siRNA sense strand
aggcaagagaagaaaguac

SEQ ID NO: 2570891 - RNA, 19 nt, Homo sapiens
  misc_RNA (1)...(19): siRNA sense strand
ggcaaagucucucaucaaa

SEQ ID NO: 2570892 - RNA, 19 nt, Homo sapiens
  misc_RNA (1)...(19): siRNA sense strand
cggcaauguaagcaacaga

SEQ ID NO: 2570893 - RNA, 19 nt, Homo sapiens
  misc_RNA (1)...(19): siRNA sense strand
guacaaacccguagugcug

SEQ ID NO: 2570894 - RNA, 19 nt, Homo sapiens
  misc_RNA (1)...(19): siRNA sense strand
gcagaacagcccugaggca

SEQ ID NO: 2570895 - RNA, 19 nt, Homo sapiens
  misc_RNA (1)...(19): siRNA sense strand
ggggaugacuacauugcaa

SEQ ID NO: 2570896 - RNA, 19 nt, Homo sapiens
  misc_RNA (1)...(19): siRNA sense strand
cagaacagcccugaggcaa

SEQ ID NO: 2570897 - RNA, 19 nt, Homo sapiens
  misc_RNA (1)...(19): siRNA sense strand
caguuaaugcuauucgcaa

SEQ ID NO: 2570898 - RNA, 19 nt, Homo sapiens
  misc_RNA (1)...(19): siRNA sense strand
ugaggaagaauuaggaucu

SEQ ID NO: 2570899 - RNA, 19 nt, Homo sapiens
  misc_RNA (1)...(19): siRNA sense strand
cugacuuauuugcuagaau

SEQ ID NO: 2570900 - RNA, 19 nt, Homo sapiens
  misc_RNA (1)...(19): siRNA sense strand
cgguugaaguguagggaga

SEQ ID NO: 2570901 - RNA, 19 nt, Homo sapiens
  misc_RNA (1)...(19): siRNA sense strand
caacagaaaggaugagaca

SEQ ID NO: 2570902 - RNA, 19 nt, Homo sapiens
  misc_RNA (1)...(19): siRNA sense strand
cuguaaugaauguggaaau

SEQ ID NO: 2570903 - RNA, 19 nt, Homo sapiens
  misc_RNA (1)...(19): siRNA sense strand
cugaaagagaugcggaaaa

SEQ ID NO: 2570904 - RNA, 19 nt, Homo sapiens
  misc_RNA (1)...(19): siRNA sense strand
gcaauguaagcaacagaaa

SEQ ID NO: 2570905 - RNA, 19 nt, Homo sapiens
  misc_RNA (1)...(19): siRNA sense strand
gaaguuacaucuuuggcaa

SEQ ID NO: 2570906 - RNA, 19 nt, Homo sapiens
  misc_RNA (1)...(19): siRNA sense strand
ccguagugcugaugaacca

SEQ ID NO: 2570907 - RNA, 19 nt, Homo sapiens
  misc_RNA (1)...(19): siRNA sense strand
uggcaaagucucucaucaa

SEQ ID NO: 2570908 - RNA, 19 nt, Homo sapiens
  misc_RNA (1)...(19): siRNA sense strand
agugaugagcugaaagaga

SEQ ID NO: 2570909 - RNA, 19 nt, Homo sapiens
  misc_RNA (1)...(19): siRNA sense strand
gaaaguacuuccagcggca

SEQ ID NO: 2570910 - RNA, 19 nt, Homo sapiens
  misc_RNA (1)...(19): siRNA sense strand
agauggugcagaagaagaa

SEQ ID NO: 2570911 - RNA, 19 nt, Homo sapiens
  misc_RNA (1)...(19): siRNA sense strand
aggaauacagacaugaaau

SEQ ID NO: 2570912 - RNA, 19 nt, Homo sapiens
  misc_RNA (1)...(19): siRNA sense strand
gcugaaagagaugcggaaa

SEQ ID NO: 2570913 - RNA, 19 nt, Homo sapiens
  misc_RNA (1)...(19): siRNA sense strand
cccugaggcaagagaagaa

SEQ ID NO: 2570914 - RNA, 19 nt, Homo sapiens
  misc_RNA (1)...(19): siRNA sense strand
cuuauuugcuagaaugaca

SEQ ID NO: 2570915 - RNA, 19 nt, Homo sapiens
  misc_RNA (1)...(19): siRNA sense strand
uugccaagaagauggacaa

SEQ ID NO: 2570916 - RNA, 19 nt, Homo sapiens
  misc_RNA (1)...(19): siRNA sense strand
gcaaagucucucaucaaau

SEQ ID NO: 2570917 - RNA, 19 nt, Homo sapiens
  misc_RNA (1)...(19): siRNA sense strand
aggcaagagaagaaaguac

SEQ ID NO: 2570918 - RNA, 19 nt, Homo sapiens
  misc_RNA (1)...(19): siRNA sense strand
ggcaaagucucucaucaaa

SEQ ID NO: 2570919 - RNA, 19 nt, Homo sapiens
  misc_RNA (1)...(19): siRNA sense strand
cggcaauguaagcaacaga

SEQ ID NO: 2570920 - RNA, 19 nt, Homo sapiens
  misc_RNA (1)...(19): siRNA sense strand
guacaaacccguagugcug

SEQ ID NO: 2570921 - RNA, 19 nt, Homo sapiens
  misc_RNA (1)...(19): siRNA sense strand
gcagaacagcccugaggca

SEQ ID NO: 2570922 - RNA, 19 nt, Homo sapiens
  misc_RNA (1)...(19): siRNA sense strand
ggggaugacuacauugcaa

SEQ ID NO: 2570923 - RNA, 19 nt, Homo sapiens
  misc_RNA (1)...(19): siRNA sense strand
cagaacagcccugaggcaa

SEQ ID NO: 2570924 - RNA, 19 nt, Homo sapiens
  misc_RNA (1)...(19): siRNA sense strand
caguuaaugcuauucgcaa

SEQ ID NO: 2570925 - RNA, 19 nt, Homo sapiens
  misc_RNA (1)...(19): siRNA sense strand
ugaggaagaauuaggaucu

SEQ ID NO: 2570926 - RNA, 19 nt, Homo sapiens
  misc_RNA (1)...(19): siRNA sense strand
cugacuuauuugcuagaau

SEQ ID NO: 2570927 - RNA, 19 nt, Homo sapiens
  misc_RNA (1)...(19): siRNA sense strand
agauaagagaagagaagaa

SEQ ID NO: 2570928 - RNA, 19 nt, Homo sapiens
  misc_RNA (1)...(19): siRNA sense strand
cugaagaggaugaggaaga

SEQ ID NO: 2570929 - RNA, 19 nt, Homo sapiens
  misc_RNA (1)...(19): siRNA sense strand
ucgcaaacgacgagagaca

SEQ ID NO: 2570930 - RNA, 19 nt, Homo sapiens
  misc_RNA (1)...(19): siRNA sense strand
cagugaagcuggaagccaa

SEQ ID NO: 2570931 - RNA, 19 nt, Homo sapiens
  misc_RNA (1)...(19): siRNA sense strand
gccgagaguuagaggaaaa

SEQ ID NO: 2570932 - RNA, 19 nt, Homo sapiens
  misc_RNA (1)...(19): siRNA sense strand
gagaagagaagaaacggaa

SEQ ID NO: 2570933 - RNA, 19 nt, Homo sapiens
  misc_RNA (1)...(19): siRNA sense strand
augaggaagaugaggaaau

SEQ ID NO: 2570934 - RNA, 19 nt, Homo sapiens
  misc_RNA (1)...(19): siRNA sense strand
cggccgagaguuagaggaa

SEQ ID NO: 2570935 - RNA, 19 nt, Homo sapiens
  misc_RNA (1)...(19): siRNA sense strand
gagaagaaacggaaggaag

SEQ ID NO: 2570936 - RNA, 19 nt, Homo sapiens
  misc_RNA (1)...(19): siRNA sense strand
cugauaugcagcagaagaa

SEQ ID NO: 2570937 - RNA, 19 nt, Homo sapiens
  misc_RNA (1)...(19): siRNA sense strand
aaggaagaggagaggaaaa

SEQ ID NO: 2570938 - RNA, 19 nt, Homo sapiens
  misc_RNA (1)...(19): siRNA sense strand
cgugguuggcagugaggaa

SEQ ID NO: 2570939 - RNA, 19 nt, Homo sapiens
  misc_RNA (1)...(19): siRNA sense strand
acagauaagagaagagaag

SEQ ID NO: 2570940 - RNA, 19 nt, Homo sapiens
  misc_RNA (1)...(19): siRNA sense strand
cuaugacguuggagagcuu

SEQ ID NO: 2570941 - RNA, 19 nt, Homo sapiens
  misc_RNA (1)...(19): siRNA sense strand
agacagaggcuuugcugca

SEQ ID NO: 2570942 - RNA, 19 nt, Homo sapiens
  misc_RNA (1)...(19): siRNA sense strand
ggacaaucgcagucaucga

SEQ ID NO: 2570943 - RNA, 19 nt, Homo sapiens
  misc_RNA (1)...(19): siRNA sense strand
gggucuaugacguuggaga

SEQ ID NO: 2570944 - RNA, 19 nt, Homo sapiens
  misc_RNA (1)...(19): siRNA sense strand
uggaagaagacugcauaaa

SEQ ID NO: 2570945 - RNA, 19 nt, Homo sapiens
  misc_RNA (1)...(19): siRNA sense strand
cucagaacuuggaagaaga

SEQ ID NO: 2570946 - RNA, 19 nt, Homo sapiens
  misc_RNA (1)...(19): siRNA sense strand
augaggaaaugguggaauc

SEQ ID NO: 2570947 - RNA, 19 nt, Homo sapiens
  misc_RNA (1)...(19): siRNA sense strand
cgucaauaacuucgugguu

SEQ ID NO: 2570948 - RNA, 19 nt, Homo sapiens
  misc_RNA (1)...(19): siRNA sense strand
ccucagugcuccagcugca

SEQ ID NO: 2570949 - RNA, 19 nt, Homo sapiens
  misc_RNA (1)...(19): siRNA sense strand
gugaggucuuugaagguca

SEQ ID NO: 2570950 - RNA, 19 nt, Homo sapiens
  misc_RNA (1)...(19): siRNA sense strand
ccucgaaaucagugagcac

SEQ ID NO: 2570951 - RNA, 19 nt, Homo sapiens
  misc_RNA (1)...(19): siRNA sense strand
auaaacugggcgugucaaa

SEQ ID NO: 2570952 - RNA, 19 nt, Homo sapiens
  misc_RNA (1)...(19): siRNA sense strand
gguacagucuacacggcuu

SEQ ID NO: 2570953 - RNA, 19 nt, Homo sapiens
  misc_RNA (1)...(19): siRNA sense strand
ggccgagaguuagaggaaa

SEQ ID NO: 2570954 - RNA, 19 nt, Homo sapiens
  misc_RNA (1)...(19): siRNA sense strand
ggucuuugaaggucaccaa

SEQ ID NO: 2570955 - RNA, 19 nt, Homo sapiens
  misc_RNA (1)...(19): siRNA sense strand
gucugaagaggaugaggaa

SEQ ID NO: 2570956 - RNA, 19 nt, Homo sapiens
  misc_RNA (1)...(19): siRNA sense strand
caagagaguugacagagga

SEQ ID NO: 2570957 - RNA, 19 nt, Homo sapiens
  misc_RNA (1)...(19): siRNA sense strand
cuaacagagcugauagcga

SEQ ID NO: 2570958 - RNA, 19 nt, Homo sapiens
  misc_RNA (1)...(19): siRNA sense strand
gagcugauagcgaggagga

SEQ ID NO: 2570959 - RNA, 19 nt, Homo sapiens
  misc_RNA (1)...(19): siRNA sense strand
gggacgaggcagagaggau

SEQ ID NO: 2570960 - RNA, 19 nt, Homo sapiens
  misc_RNA (1)...(19): siRNA sense strand
gagaggaucaugagggacu

SEQ ID NO: 2570961 - RNA, 19 nt, Homo sapiens
  misc_RNA (1)...(19): siRNA sense strand
cagagaggaucaugaggga

SEQ ID NO: 2570962 - RNA, 19 nt, Homo sapiens
  misc_RNA (1)...(19): siRNA sense strand
gccuacagcgugugcgcaa

SEQ ID NO: 2570963 - RNA, 19 nt, Homo sapiens
  misc_RNA (1)...(19): siRNA sense strand
ccugcgacacccagaacaa

SEQ ID NO: 2570964 - RNA, 19 nt, Homo sapiens
  misc_RNA (1)...(19): siRNA sense strand
uccugaggcuggugaaaca

SEQ ID NO: 2570965 - RNA, 19 nt, Homo sapiens
  misc_RNA (1)...(19): siRNA sense strand
ugguagaggccaagagaaa

SEQ ID NO: 2570966 - RNA, 19 nt, Homo sapiens
  misc_RNA (1)...(19): siRNA sense strand
cagaaaaccuggagaaaau

SEQ ID NO: 2570967 - RNA, 19 nt, Homo sapiens
  misc_RNA (1)...(19): siRNA sense strand
ggaagaagucaguggaaga

SEQ ID NO: 2570968 - RNA, 19 nt, Homo sapiens
  misc_RNA (1)...(19): siRNA sense strand
ccagaaaccaauaaagaaa

SEQ ID NO: 2570969 - RNA, 19 nt, Homo sapiens
  misc_RNA (1)...(19): siRNA sense strand
uuacagagagagagggaaa

SEQ ID NO: 2570970 - RNA, 19 nt, Homo sapiens
  misc_RNA (1)...(19): siRNA sense strand
cagcagaggcagugaaaga

SEQ ID NO: 2570971 - RNA, 19 nt, Homo sapiens
  misc_RNA (1)...(19): siRNA sense strand
gaagagaggugcaggcgua

SEQ ID NO: 2570972 - RNA, 19 nt, Homo sapiens
  misc_RNA (1)...(19): siRNA sense strand
aggaagagcuggaaggcau

SEQ ID NO: 2570973 - RNA, 19 nt, Homo sapiens
  misc_RNA (1)...(19): siRNA sense strand
gagacaggaaauugagaaa

SEQ ID NO: 2570974 - RNA, 19 nt, Homo sapiens
  misc_RNA (1)...(19): siRNA sense strand
gaaugaaguauuuggacua

SEQ ID NO: 2570975 - RNA, 19 nt, Homo sapiens
  misc_RNA (1)...(19): siRNA sense strand
guauaaugauccugaaaca

SEQ ID NO: 2570976 - RNA, 19 nt, Homo sapiens
  misc_RNA (1)...(19): siRNA sense strand
gagaauuggaugaguguuu

SEQ ID NO: 2570977 - RNA, 19 nt, Homo sapiens
  misc_RNA (1)...(19): siRNA sense strand
gaaacaagaaagugaccaa

SEQ ID NO: 2570978 - RNA, 19 nt, Homo sapiens
  misc_RNA (1)...(19): siRNA sense strand
gcucagagauguuuggaga

SEQ ID NO: 2570979 - RNA, 19 nt, Homo sapiens
  misc_RNA (1)...(19): siRNA sense strand
cgaacagaggagagcguaa

SEQ ID NO: 2570980 - RNA, 19 nt, Homo sapiens
  misc_RNA (1)...(19): siRNA sense strand
gagaaaagagugagagaga

SEQ ID NO: 2570981 - RNA, 19 nt, Homo sapiens
  misc_RNA (1)...(19): siRNA sense strand
cuacaaacaagaucagaaa

SEQ ID NO: 2570982 - RNA, 19 nt, Homo sapiens
  misc_RNA (1)...(19): siRNA sense strand
ccuuagaauccaugaaauu

SEQ ID NO: 2570983 - RNA, 19 nt, Homo sapiens
  misc_RNA (1)...(19): siRNA sense strand
auugaaaccaacagagaaa

SEQ ID NO: 2570984 - RNA, 19 nt, Homo sapiens
  misc_RNA (1)...(19): siRNA sense strand
ccaucaaggagaaggagua

SEQ ID NO: 2570985 - RNA, 19 nt, Homo sapiens
  misc_RNA (1)...(19): siRNA sense strand
agauagaaucggaaagaga

SEQ ID NO: 2570986 - RNA, 19 nt, Homo sapiens
  misc_RNA (1)...(19): siRNA sense strand
aggaagaaggugacagcaa

SEQ ID NO: 2570987 - RNA, 19 nt, Homo sapiens
  misc_RNA (1)...(19): siRNA sense strand
uggaggagcugaagagaca

SEQ ID NO: 2570988 - RNA, 19 nt, Homo sapiens
  misc_RNA (1)...(19): siRNA sense strand
auaaugaggagaugaguaa

SEQ ID NO: 2570989 - RNA, 19 nt, Homo sapiens
  misc_RNA (1)...(19): siRNA sense strand
agaaagaacgagagaaaau

SEQ ID NO: 2570990 - RNA, 19 nt, Homo sapiens
  misc_RNA (1)...(19): siRNA sense strand
gaaaagagugagagagaga

SEQ ID NO: 2570991 - RNA, 19 nt, Homo sapiens
  misc_RNA (1)...(19): siRNA sense strand
cggaagagagaauaugaaa

SEQ ID NO: 2570992 - RNA, 19 nt, Homo sapiens
  misc_RNA (1)...(19): siRNA sense strand
aaauaaagaggcugaagaa

SEQ ID NO: 2570993 - RNA, 19 nt, Homo sapiens
  misc_RNA (1)...(19): siRNA sense strand
agaacaaauuccuggauca

SEQ ID NO: 2570994 - RNA, 19 nt, Homo sapiens
  misc_RNA (1)...(19): siRNA sense strand
auaaagaggcugaagaaca

SEQ ID NO: 2570995 - RNA, 19 nt, Homo sapiens
  misc_RNA (1)...(19): siRNA sense strand
gcgccuggagugugagaaa

SEQ ID NO: 2570996 - RNA, 19 nt, Homo sapiens
  misc_RNA (1)...(19): siRNA sense strand
gccaagagaaagaaauuaa

SEQ ID NO: 2570997 - RNA, 19 nt, Homo sapiens
  misc_RNA (1)...(19): siRNA sense strand
gcauuaaggaugaggaaac

SEQ ID NO: 2570998 - RNA, 19 nt, Homo sapiens
  misc_RNA (1)...(19): siRNA sense strand
cgugaagccugcucagaaa

SEQ ID NO: 2570999 - RNA, 19 nt, Homo sapiens
  misc_RNA (1)...(19): siRNA sense strand
aggcugagcuggaugggaa

SEQ ID NO: 2571000 - RNA, 19 nt, Homo sapiens
  misc_RNA (1)...(19): siRNA sense strand
ccgacugacuuaugagauu

SEQ ID NO: 2571001 - RNA, 19 nt, Homo sapiens
  misc_RNA (1)...(19): siRNA sense strand
ugacgagguuggugagaga

SEQ ID NO: 2571002 - RNA, 19 nt, Homo sapiens
  misc_RNA (1)...(19): siRNA sense strand
gaagaaaaucuguggaaga

SEQ ID NO: 2571003 - RNA, 19 nt, Homo sapiens
  misc_RNA (1)...(19): siRNA sense strand
ggaacaggaaagugucaaa

SEQ ID NO: 2571004 - RNA, 19 nt, Homo sapiens
  misc_RNA (1)...(19): siRNA sense strand
gcuccaugguagaagauau

SEQ ID NO: 2571005 - RNA, 19 nt, Homo sapiens
  misc_RNA (1)...(19): siRNA sense strand
gcgagaaaucugcgaucua

SEQ ID NO: 2571006 - RNA, 19 nt, Homo sapiens
  misc_RNA (1)...(19): siRNA sense strand
cagaggagagcguaagaua

SEQ ID NO: 2571007 - RNA, 19 nt, Homo sapiens
  misc_RNA (1)...(19): siRNA sense strand
agaaacaaaugaccggaaa

SEQ ID NO: 2571008 - RNA, 19 nt, Homo sapiens
  misc_RNA (1)...(19): siRNA sense strand
accaagaguucaucagaaa

SEQ ID NO: 2571009 - RNA, 19 nt, Homo sapiens
  misc_RNA (1)...(19): siRNA sense strand
ggcaaaggauagauaaaca

SEQ ID NO: 2571010 - RNA, 19 nt, Homo sapiens
  misc_RNA (1)...(19): siRNA sense strand
ggaacaaguaugaaacaga

SEQ ID NO: 2571011 - RNA, 19 nt, Homo sapiens
  misc_RNA (1)...(19): siRNA sense strand
gaggauaagcaccgaagaa

SEQ ID NO: 2571012 - RNA, 19 nt, Homo sapiens
  misc_RNA (1)...(19): siRNA sense strand
cagugaaauaucuggcaaa

SEQ ID NO: 2571013 - RNA, 19 nt, Homo sapiens
  misc_RNA (1)...(19): siRNA sense strand
gagacaaaucagaggaagu

SEQ ID NO: 2571014 - RNA, 19 nt, Homo sapiens
  misc_RNA (1)...(19): siRNA sense strand
cugagauaaugcagaagaa

SEQ ID NO: 2571015 - RNA, 19 nt, Homo sapiens
  misc_RNA (1)...(19): siRNA sense strand
gaagaaauaaagaggcuga

SEQ ID NO: 2571016 - RNA, 19 nt, Homo sapiens
  misc_RNA (1)...(19): siRNA sense strand
gccaaugaccaaauggaaa

SEQ ID NO: 2571017 - RNA, 19 nt, Homo sapiens
  misc_RNA (1)...(19): siRNA sense strand
gaugaaaagagaagaagaa

SEQ ID NO: 2571018 - RNA, 19 nt, Homo sapiens
  misc_RNA (1)...(19): siRNA sense strand
ucaaaguccuggagcaaga

SEQ ID NO: 2571019 - RNA, 19 nt, Homo sapiens
  misc_RNA (1)...(19): siRNA sense strand
gggcugaggaagaagguga

SEQ ID NO: 2571020 - RNA, 19 nt, Homo sapiens
  misc_RNA (1)...(19): siRNA sense strand
gugugaagggaaagaagaa

SEQ ID NO: 2571021 - RNA, 19 nt, Homo sapiens
  misc_RNA (1)...(19): siRNA sense strand
ugauagacuuucaagggaa

SEQ ID NO: 2571022 - RNA, 19 nt, Homo sapiens
  misc_RNA (1)...(19): siRNA sense strand
ccaaugaccaaauggaaau

SEQ ID NO: 2571023 - RNA, 19 nt, Homo sapiens
  misc_RNA (1)...(19): siRNA sense strand
gaaaaugacaagcaagaaa

SEQ ID NO: 2571024 - RNA, 19 nt, Homo sapiens
  misc_RNA (1)...(19): siRNA sense strand
uggaagaucugaagcugaa

SEQ ID NO: 2571025 - RNA, 19 nt, Homo sapiens
  misc_RNA (1)...(19): siRNA sense strand
gaagaaugacuaugaccaa

SEQ ID NO: 2571026 - RNA, 19 nt, Homo sapiens
  misc_RNA (1)...(19): siRNA sense strand
ucgagggugugaagggaaa

SEQ ID NO: 2571027 - RNA, 19 nt, Homo sapiens
  misc_RNA (1)...(19): siRNA sense strand
gcagaggcagugaaagaaa

SEQ ID NO: 2571028 - RNA, 19 nt, Homo sapiens
  misc_RNA (1)...(19): siRNA sense strand
ccuauaaggaugccauaaa

SEQ ID NO: 2571029 - RNA, 19 nt, Homo sapiens
  misc_RNA (1)...(19): siRNA sense strand
gaucaaggagcuggagaaa

SEQ ID NO: 2571030 - RNA, 19 nt, Homo sapiens
  misc_RNA (1)...(19): siRNA sense strand
gagcguaagauauaagcaa

SEQ ID NO: 2571031 - RNA, 19 nt, Homo sapiens
  misc_RNA (1)...(19): siRNA sense strand
agaucaaggagcuggagaa

SEQ ID NO: 2571032 - RNA, 19 nt, Homo sapiens
  misc_RNA (1)...(19): siRNA sense strand
aaacaaugcggcaggaaga

SEQ ID NO: 2571033 - RNA, 19 nt, Homo sapiens
  misc_RNA (1)...(19): siRNA sense strand
ggagaaacaaaucaagcaa

SEQ ID NO: 2571034 - RNA, 19 nt, Homo sapiens
  misc_RNA (1)...(19): siRNA sense strand
ccccaaggaugcagagaaa

SEQ ID NO: 2571035 - RNA, 19 nt, Homo sapiens
  misc_RNA (1)...(19): siRNA sense strand
ggaacacagaagacagcaa

SEQ ID NO: 2571036 - RNA, 19 nt, Homo sapiens
  misc_RNA (1)...(19): siRNA sense strand
cccagaaggaguuggaaca

SEQ ID NO: 2571037 - RNA, 19 nt, Homo sapiens
  misc_RNA (1)...(19): siRNA sense strand
aggcagaagaagcuaucaa

SEQ ID NO: 2571038 - RNA, 19 nt, Homo sapiens
  misc_RNA (1)...(19): siRNA sense strand
agaccaacuuaauagucaa

SEQ ID NO: 2571039 - RNA, 19 nt, Homo sapiens
  misc_RNA (1)...(19): siRNA sense strand
ugacaagcgaauugaggca

SEQ ID NO: 2571040 - RNA, 19 nt, Homo sapiens
  misc_RNA (1)...(19): siRNA sense strand
gggauauggcuuugugaac

SEQ ID NO: 2571041 - RNA, 19 nt, Homo sapiens
  misc_RNA (1)...(19): siRNA sense strand
cugacgcagaugagaguau

SEQ ID NO: 2571042 - RNA, 19 nt, Homo sapiens
  misc_RNA (1)...(19): siRNA sense strand
acaagcgaauugaggcaga

SEQ ID NO: 2571043 - RNA, 19 nt, Homo sapiens
  misc_RNA (1)...(19): siRNA sense strand
aaauaacagggcagagcuu

SEQ ID NO: 2571044 - RNA, 19 nt, Homo sapiens
  misc_RNA (1)...(19): siRNA sense strand
acaaugacccagaaggagu

SEQ ID NO: 2571045 - RNA, 19 nt, Homo sapiens
  misc_RNA (1)...(19): siRNA sense strand
gcuuaaaacacgaggcaaa

SEQ ID NO: 2571046 - RNA, 19 nt, Homo sapiens
  misc_RNA (1)...(19): siRNA sense strand
ccagguuggcagagagaaa

SEQ ID NO: 2571047 - RNA, 19 nt, Homo sapiens
  misc_RNA (1)...(19): siRNA sense strand
agaccaagccagagccaau

SEQ ID NO: 2571048 - RNA, 19 nt, Homo sapiens
  misc_RNA (1)...(19): siRNA sense strand
gagagugaucccaggacaa

SEQ ID NO: 2571049 - RNA, 19 nt, Homo sapiens
  misc_RNA (1)...(19): siRNA sense strand
aggagaagaacaaaggcaa

SEQ ID NO: 2571050 - RNA, 19 nt, Homo sapiens
  misc_RNA (1)...(19): siRNA sense strand
cgaugaaggacuacaccaa

SEQ ID NO: 2571051 - RNA, 19 nt, Homo sapiens
  misc_RNA (1)...(19): siRNA sense strand
gaaccuaugaggagggcuu

SEQ ID NO: 2571052 - RNA, 19 nt, Homo sapiens
  misc_RNA (1)...(19): siRNA sense strand
ccuugaagcauuacgacaa

SEQ ID NO: 2571053 - RNA, 19 nt, Homo sapiens
  misc_RNA (1)...(19): siRNA sense strand
guauggaugaggaggaaga

SEQ ID NO: 2571054 - RNA, 19 nt, Homo sapiens
  misc_RNA (1)...(19): siRNA sense strand
cuuuggaggagaagaacaa

SEQ ID NO: 2571055 - RNA, 19 nt, Homo sapiens
  misc_RNA (1)...(19): siRNA sense strand
uggcuuuggaggagaagaa

SEQ ID NO: 2571056 - RNA, 19 nt, Homo sapiens
  misc_RNA (1)...(19): siRNA sense strand
augccaaauuauacagcaa

SEQ ID NO: 2571057 - RNA, 19 nt, Homo sapiens
  misc_RNA (1)...(19): siRNA sense strand
aucagaaguuggagaguga

SEQ ID NO: 2571058 - RNA, 19 nt, Homo sapiens
  misc_RNA (1)...(19): siRNA sense strand
cagaagauccagaagcuga

SEQ ID NO: 2571059 - RNA, 19 nt, Homo sapiens
  misc_RNA (1)...(19): siRNA sense strand
guaugauggcgcaguacaa

SEQ ID NO: 2571060 - RNA, 19 nt, Homo sapiens
  misc_RNA (1)...(19): siRNA sense strand
cuuaaaccgcuuugaagaa

SEQ ID NO: 2571061 - RNA, 19 nt, Homo sapiens
  misc_RNA (1)...(19): siRNA sense strand
agccagagccaauggaaga

SEQ ID NO: 2571062 - RNA, 19 nt, Homo sapiens
  misc_RNA (1)...(19): siRNA sense strand
gcaacaaggcccugagcgu

SEQ ID NO: 2571063 - RNA, 19 nt, Homo sapiens
  misc_RNA (1)...(19): siRNA sense strand
agaaaggagacuaccagaa

SEQ ID NO: 2571064 - RNA, 19 nt, Homo sapiens
  misc_RNA (1)...(19): siRNA sense strand
gucaaugagcugaaggaga

SEQ ID NO: 2571065 - RNA, 19 nt, Homo sapiens
  misc_RNA (1)...(19): siRNA sense strand
cuugaagcauuacgacaaa

SEQ ID NO: 2571066 - RNA, 19 nt, Homo sapiens
  misc_RNA (1)...(19): siRNA sense strand
gcaguauggaugaggagga

SEQ ID NO: 2571067 - RNA, 19 nt, Homo sapiens
  misc_RNA (1)...(19): siRNA sense strand
acgaaaagcagcagcucua

SEQ ID NO: 2571068 - RNA, 19 nt, Homo sapiens
  misc_RNA (1)...(19): siRNA sense strand
ggagagugaucccaggaca

SEQ ID NO: 2571069 - RNA, 19 nt, Homo sapiens
  misc_RNA (1)...(19): siRNA sense strand
agaagcaggcacugaaaga

SEQ ID NO: 2571070 - RNA, 19 nt, Homo sapiens
  misc_RNA (1)...(19): siRNA sense strand
ccgaaagaugccaaauuau

SEQ ID NO: 2571071 - RNA, 19 nt, Homo sapiens
  misc_RNA (1)...(19): siRNA sense strand
cgacagauugccaaagcau

SEQ ID NO: 2571072 - RNA, 19 nt, Homo sapiens
  misc_RNA (1)...(19): siRNA sense strand
gcuguaaggaggcggcaga

SEQ ID NO: 2571073 - RNA, 19 nt, Homo sapiens
  misc_RNA (1)...(19): siRNA sense strand
aagaucuuccagagaauaa

SEQ ID NO: 2571074 - RNA, 19 nt, Homo sapiens
  misc_RNA (1)...(19): siRNA sense strand
ggagaagaacaaaggcaac

SEQ ID NO: 2571075 - RNA, 19 nt, Homo sapiens
  misc_RNA (1)...(19): siRNA sense strand
acaccaaagccauggaugu

SEQ ID NO: 2571076 - RNA, 19 nt, Homo sapiens
  misc_RNA (1)...(19): siRNA sense strand
gaagaaaaguacaaggaug

SEQ ID NO: 2571077 - RNA, 19 nt, Homo sapiens
  misc_RNA (1)...(19): siRNA sense strand
ccuacaagaagaaagacuu

SEQ ID NO: 2571078 - RNA, 19 nt, Homo sapiens
  misc_RNA (1)...(19): siRNA sense strand
uggaugaggaggaagagau

SEQ ID NO: 2571079 - RNA, 19 nt, Homo sapiens
  misc_RNA (1)...(19): siRNA sense strand
agaauaagaagcaggcacu

SEQ ID NO: 2571080 - RNA, 19 nt, Homo sapiens
  misc_RNA (1)...(19): siRNA sense strand
gaggagaagaacaaaggca

SEQ ID NO: 2571081 - RNA, 19 nt, Homo sapiens
  misc_RNA (1)...(19): siRNA sense strand
ggagacuaccagaaggcuu

SEQ ID NO: 2571082 - RNA, 19 nt, Homo sapiens
  misc_RNA (1)...(19): siRNA sense strand
gggcaagggcuauucacga

SEQ ID NO: 2571083 - RNA, 19 nt, Homo sapiens
  misc_RNA (1)...(19): siRNA sense strand
gagcugaaggagaaaggca

SEQ ID NO: 2571084 - RNA, 19 nt, Homo sapiens
  misc_RNA (1)...(19): siRNA sense strand
uugaagaagccaagcgaac

SEQ ID NO: 2571085 - RNA, 19 nt, Homo sapiens
  misc_RNA (1)...(19): siRNA sense strand
agcugaaggagaaaggcaa

SEQ ID NO: 2571086 - RNA, 19 nt, Homo sapiens
  misc_RNA (1)...(19): siRNA sense strand
ccauugaaguggggagaga

SEQ ID NO: 2571087 - RNA, 19 nt, Homo sapiens
  misc_RNA (1)...(19): siRNA sense strand
auugaaguggggagagaaa

SEQ ID NO: 2571088 - RNA, 19 nt, Homo sapiens
  misc_RNA (1)...(19): siRNA sense strand
ccauccauuucuauaacaa

SEQ ID NO: 2571089 - RNA, 19 nt, Homo sapiens
  misc_RNA (1)...(19): siRNA sense strand
agcaagagcggcuggccua

SEQ ID NO: 2571090 - RNA, 19 nt, Homo sapiens
  misc_RNA (1)...(19): siRNA sense strand
caucaaaaggaacccgaaa

SEQ ID NO: 2571091 - RNA, 19 nt, Homo sapiens
  misc_RNA (1)...(19): siRNA sense strand
gagaauaagaagcaggcac

SEQ ID NO: 2571092 - RNA, 19 nt, Homo sapiens
  misc_RNA (1)...(19): siRNA sense strand
caauaagugccgggagcuu

SEQ ID NO: 2571093 - RNA, 19 nt, Homo sapiens
  misc_RNA (1)...(19): siRNA sense strand
caaagaaagcaguaggaga

SEQ ID NO: 2571094 - RNA, 19 nt, Homo sapiens
  misc_RNA (1)...(19): siRNA sense strand
cugcauugaaagaggaaca

SEQ ID NO: 2571095 - RNA, 19 nt, Homo sapiens
  misc_RNA (1)...(19): siRNA sense strand
ccucauugaaagaagaaga

SEQ ID NO: 2571096 - RNA, 19 nt, Homo sapiens
  misc_RNA (1)...(19): siRNA sense strand
gagaauuggaacacagaca

SEQ ID NO: 2571097 - RNA, 19 nt, Homo sapiens
  misc_RNA (1)...(19): siRNA sense strand
cuaccaaugaaaagagaaa

SEQ ID NO: 2571098 - RNA, 19 nt, Homo sapiens
  misc_RNA (1)...(19): siRNA sense strand
ugggaaagaagaugacaau

SEQ ID NO: 2571099 - RNA, 19 nt, Homo sapiens
  misc_RNA (1)...(19): siRNA sense strand
ccugauaugcgcuggaaca

SEQ ID NO: 2571100 - RNA, 19 nt, Homo sapiens
  misc_RNA (1)...(19): siRNA sense strand
aggacguuauugaggauau

SEQ ID NO: 2571101 - RNA, 19 nt, Homo sapiens
  misc_RNA (1)...(19): siRNA sense strand
auuuagugcugcauugaaa

SEQ ID NO: 2571102 - RNA, 19 nt, Homo sapiens
  misc_RNA (1)...(19): siRNA sense strand
agaagaugacaaugcacaa

SEQ ID NO: 2571103 - RNA, 19 nt, Homo sapiens
  misc_RNA (1)...(19): siRNA sense strand
uguguauagcggugaacaa

SEQ ID NO: 2571104 - RNA, 19 nt, Homo sapiens
  misc_RNA (1)...(19): siRNA sense strand
cugcuaaugcaaagaacau

SEQ ID NO: 2571105 - RNA, 19 nt, Homo sapiens
  misc_RNA (1)...(19): siRNA sense strand
caucaguggaguacaucaa

SEQ ID NO: 2571106 - RNA, 19 nt, Homo sapiens
  misc_RNA (1)...(19): siRNA sense strand
gcaaagaacauuaucugga

SEQ ID NO: 2571107 - RNA, 19 nt, Homo sapiens
  misc_RNA (1)...(19): siRNA sense strand
ucaccaaacagcagagcca

SEQ ID NO: 2571108 - RNA, 19 nt, Homo sapiens
  misc_RNA (1)...(19): siRNA sense strand
ggauucaggaacuagaaau

SEQ ID NO: 2571109 - RNA, 19 nt, Homo sapiens
  misc_RNA (1)...(19): siRNA sense strand
gaacaaagauuggauggca

SEQ ID NO: 2571110 - RNA, 19 nt, Homo sapiens
  misc_RNA (1)...(19): siRNA sense strand
cucagaugauggugaugaa

SEQ ID NO: 2571111 - RNA, 19 nt, Homo sapiens
  misc_RNA (1)...(19): siRNA sense strand
uggaacacagacagaagaa

SEQ ID NO: 2571112 - RNA, 19 nt, Homo sapiens
  misc_RNA (1)...(19): siRNA sense strand
aacaaagauuggauggcau

SEQ ID NO: 2571113 - RNA, 19 nt, Homo sapiens
  misc_RNA (1)...(19): siRNA sense strand
caguaggagaaguagcuuu

SEQ ID NO: 2571114 - RNA, 19 nt, Homo sapiens
  misc_RNA (1)...(19): siRNA sense strand
uugggaaagaagaugacaa

SEQ ID NO: 2571115 - RNA, 19 nt, Homo sapiens
  misc_RNA (1)...(19): siRNA sense strand
ccaauuaacauggggcuua

SEQ ID NO: 2571116 - RNA, 19 nt, Homo sapiens
  misc_RNA (1)...(19): siRNA sense strand
ccuaaagcacagaaggaaa

SEQ ID NO: 2571117 - RNA, 19 nt, Homo sapiens
  misc_RNA (1)...(19): siRNA sense strand
ggacauaguugcaggacgu

SEQ ID NO: 2571118 - RNA, 19 nt, Homo sapiens
  misc_RNA (1)...(19): siRNA sense strand
cgagauugcugaugaguga

SEQ ID NO: 2571119 - RNA, 19 nt, Homo sapiens
  misc_RNA (1)...(19): siRNA sense strand
cggccuagugaaugggaua

SEQ ID NO: 2571120 - RNA, 19 nt, Homo sapiens
  misc_RNA (1)...(19): siRNA sense strand
gauucggccuggagagcaa

SEQ ID NO: 2571121 - RNA, 19 nt, Homo sapiens
  misc_RNA (1)...(19): siRNA sense strand
cuggagagcaagagcagua

SEQ ID NO: 2571122 - RNA, 19 nt, Homo sapiens
  misc_RNA (1)...(19): siRNA sense strand
cagugaaggcugaagugaa

SEQ ID NO: 2571123 - RNA, 19 nt, Homo sapiens
  misc_RNA (1)...(19): siRNA sense strand
aggaaacagugaaggcuga

SEQ ID NO: 2571124 - RNA, 19 nt, Homo sapiens
  misc_RNA (1)...(19): siRNA sense strand
ccuagaugccucugcuaaa

SEQ ID NO: 2571125 - RNA, 19 nt, Homo sapiens
  misc_RNA (1)...(19): siRNA sense strand
auggaaagucuguguagaa

SEQ ID NO: 2571126 - RNA, 19 nt, Homo sapiens
  misc_RNA (1)...(19): siRNA sense strand
agacaagagucaagaggag

SEQ ID NO: 2571127 - RNA, 19 nt, Homo sapiens
  misc_RNA (1)...(19): siRNA sense strand
caaaggacuuggaaggagu

SEQ ID NO: 2571128 - RNA, 19 nt, Homo sapiens
  misc_RNA (1)...(19): siRNA sense strand
ggaaagucuguguagaaca

SEQ ID NO: 2571129 - RNA, 19 nt, Homo sapiens
  misc_RNA (1)...(19): siRNA sense strand
agacgagccaccugagcaa

SEQ ID NO: 2571130 - RNA, 19 nt, Homo sapiens
  misc_RNA (1)...(19): siRNA sense strand
uggaaggaguagauaucau

SEQ ID NO: 2571131 - RNA, 19 nt, Homo sapiens
  misc_RNA (1)...(19): siRNA sense strand
aggauuuagacaagaguca

SEQ ID NO: 2571132 - RNA, 19 nt, Homo sapiens
  misc_RNA (1)...(19): siRNA sense strand
cuuugcaaccuuagcauua

SEQ ID NO: 2571133 - RNA, 19 nt, Homo sapiens
  misc_RNA (1)...(19): siRNA sense strand
aggugggauuucagagaca

SEQ ID NO: 2571134 - RNA, 19 nt, Homo sapiens
  misc_RNA (1)...(19): siRNA sense strand
aagccaucaaggaggcaaa

SEQ ID NO: 2571135 - RNA, 19 nt, Homo sapiens
  misc_RNA (1)...(19): siRNA sense strand
aggucauggaacugcauaa

SEQ ID NO: 2571136 - RNA, 19 nt, Homo sapiens
  misc_RNA (1)...(19): siRNA sense strand
agagucaagaggagaucaa

SEQ ID NO: 2571137 - RNA, 19 nt, Homo sapiens
  misc_RNA (1)...(19): siRNA sense strand
guggauuauguuagugauu

SEQ ID NO: 2571138 - RNA, 19 nt, Homo sapiens
  misc_RNA (1)...(19): siRNA sense strand
ucuuaacaucaaugggcaa

SEQ ID NO: 2571139 - RNA, 19 nt, Homo sapiens
  misc_RNA (1)...(19): siRNA sense strand
cuggauuccgccaaagaaa

SEQ ID NO: 2571140 - RNA, 19 nt, Homo sapiens
  misc_RNA (1)...(19): siRNA sense strand
gaacuugaagagaagguca

SEQ ID NO: 2571141 - RNA, 19 nt, Homo sapiens
  misc_RNA (1)...(19): siRNA sense strand
cgaaucagaccaaggaacu

SEQ ID NO: 2571142 - RNA, 19 nt, Homo sapiens
  misc_RNA (1)...(19): siRNA sense strand
uggaacugcauaagucaua

SEQ ID NO: 2571143 - RNA, 19 nt, Homo sapiens
  misc_RNA (1)...(19): siRNA sense strand
acaagagucaagaggagau

SEQ ID NO: 2571144 - RNA, 19 nt, Homo sapiens
  misc_RNA (1)...(19): siRNA sense strand
agucaagaggagaucaaaa

SEQ ID NO: 2571145 - RNA, 19 nt, Homo sapiens
  misc_RNA (1)...(19): siRNA sense strand
gcaaauccccacaggagaa

SEQ ID NO: 2571146 - RNA, 19 nt, Homo sapiens
  misc_RNA (1)...(19): siRNA sense strand
aagugaaaucccaaccaaa

SEQ ID NO: 2571147 - RNA, 19 nt, Homo sapiens
  misc_RNA (1)...(19): siRNA sense strand
ucaaggaggcaaaggagca

SEQ ID NO: 2571148 - RNA, 19 nt, Homo sapiens
  misc_RNA (1)...(19): siRNA sense strand
gugaaugggauaaacgcuu

SEQ ID NO: 2571149 - RNA, 19 nt, Homo sapiens
  misc_RNA (1)...(19): siRNA sense strand
acacugagaccaagaccau

SEQ ID NO: 2571150 - RNA, 19 nt, Homo sapiens
  misc_RNA (1)...(19): siRNA sense strand
agaccgagauugcugauga

SEQ ID NO: 2571151 - RNA, 19 nt, Homo sapiens
  misc_RNA (1)...(19): siRNA sense strand
cauaagucauacaggucca

SEQ ID NO: 2571152 - RNA, 19 nt, Homo sapiens
  misc_RNA (1)...(19): siRNA sense strand
cgagcguacagcaaguaaa

SEQ ID NO: 2571153 - RNA, 19 nt, Homo sapiens
  misc_RNA (1)...(19): siRNA sense strand
ugaucagguccuuguacaa

SEQ ID NO: 2571154 - RNA, 19 nt, Homo sapiens
  misc_RNA (1)...(19): siRNA sense strand
cguggugucccuuggaauu

SEQ ID NO: 2571155 - RNA, 19 nt, Homo sapiens
  misc_RNA (1)...(19): siRNA sense strand
cuucauaaagcaaaggacu

SEQ ID NO: 2571156 - RNA, 19 nt, Homo sapiens
  misc_RNA (1)...(19): siRNA sense strand
ccuaaagcacagaaggaaa

SEQ ID NO: 2571157 - RNA, 19 nt, Homo sapiens
  misc_RNA (1)...(19): siRNA sense strand
ggacauaguugcaggacgu

SEQ ID NO: 2571158 - RNA, 19 nt, Homo sapiens
  misc_RNA (1)...(19): siRNA sense strand
cgagauugcugaugaguga

SEQ ID NO: 2571159 - RNA, 19 nt, Homo sapiens
  misc_RNA (1)...(19): siRNA sense strand
cggccuagugaaugggaua

SEQ ID NO: 2571160 - RNA, 19 nt, Homo sapiens
  misc_RNA (1)...(19): siRNA sense strand
gauucggccuggagagcaa

SEQ ID NO: 2571161 - RNA, 19 nt, Homo sapiens
  misc_RNA (1)...(19): siRNA sense strand
cuggagagcaagagcagua

SEQ ID NO: 2571162 - RNA, 19 nt, Homo sapiens
  misc_RNA (1)...(19): siRNA sense strand
cagugaaggcugaagugaa

SEQ ID NO: 2571163 - RNA, 19 nt, Homo sapiens
  misc_RNA (1)...(19): siRNA sense strand
aggaaacagugaaggcuga

SEQ ID NO: 2571164 - RNA, 19 nt, Homo sapiens
  misc_RNA (1)...(19): siRNA sense strand
ccuagaugccucugcuaaa

SEQ ID NO: 2571165 - RNA, 19 nt, Homo sapiens
  misc_RNA (1)...(19): siRNA sense strand
auggaaagucuguguagaa

SEQ ID NO: 2571166 - RNA, 19 nt, Homo sapiens
  misc_RNA (1)...(19): siRNA sense strand
agacaagagucaagaggag

SEQ ID NO: 2571167 - RNA, 19 nt, Homo sapiens
  misc_RNA (1)...(19): siRNA sense strand
caaaggacuuggaaggagu

SEQ ID NO: 2571168 - RNA, 19 nt, Homo sapiens
  misc_RNA (1)...(19): siRNA sense strand
ggaaagucuguguagaaca

SEQ ID NO: 2571169 - RNA, 19 nt, Homo sapiens
  misc_RNA (1)...(19): siRNA sense strand
agacgagccaccugagcaa

SEQ ID NO: 2571170 - RNA, 19 nt, Homo sapiens
  misc_RNA (1)...(19): siRNA sense strand
uggaaggaguagauaucau

SEQ ID NO: 2571171 - RNA, 19 nt, Homo sapiens
  misc_RNA (1)...(19): siRNA sense strand
aggauuuagacaagaguca

SEQ ID NO: 2571172 - RNA, 19 nt, Homo sapiens
  misc_RNA (1)...(19): siRNA sense strand
cuuugcaaccuuagcauua

SEQ ID NO: 2571173 - RNA, 19 nt, Homo sapiens
  misc_RNA (1)...(19): siRNA sense strand
aggugggauuucagagaca

SEQ ID NO: 2571174 - RNA, 19 nt, Homo sapiens
  misc_RNA (1)...(19): siRNA sense strand
aagccaucaaggaggcaaa

SEQ ID NO: 2571175 - RNA, 19 nt, Homo sapiens
  misc_RNA (1)...(19): siRNA sense strand
aggucauggaacugcauaa

SEQ ID NO: 2571176 - RNA, 19 nt, Homo sapiens
  misc_RNA (1)...(19): siRNA sense strand
agagucaagaggagaucaa

SEQ ID NO: 2571177 - RNA, 19 nt, Homo sapiens
  misc_RNA (1)...(19): siRNA sense strand
guggauuauguuagugauu

SEQ ID NO: 2571178 - RNA, 19 nt, Homo sapiens
  misc_RNA (1)...(19): siRNA sense strand
ucuuaacaucaaugggcaa

SEQ ID NO: 2571179 - RNA, 19 nt, Homo sapiens
  misc_RNA (1)...(19): siRNA sense strand
cuggauuccgccaaagaaa

SEQ ID NO: 2571180 - RNA, 19 nt, Homo sapiens
  misc_RNA (1)...(19): siRNA sense strand
gaacuugaagagaagguca

SEQ ID NO: 2571181 - RNA, 19 nt, Homo sapiens
  misc_RNA (1)...(19): siRNA sense strand
cgaaucagaccaaggaacu

SEQ ID NO: 2571182 - RNA, 19 nt, Homo sapiens
  misc_RNA (1)...(19): siRNA sense strand
uggaacugcauaagucaua

SEQ ID NO: 2571183 - RNA, 19 nt, Homo sapiens
  misc_RNA (1)...(19): siRNA sense strand
acaagagucaagaggagau

SEQ ID NO: 2571184 - RNA, 19 nt, Homo sapiens
  misc_RNA (1)...(19): siRNA sense strand
agucaagaggagaucaaaa

SEQ ID NO: 2571185 - RNA, 19 nt, Homo sapiens
  misc_RNA (1)...(19): siRNA sense strand
gcaaauccccacaggagaa

SEQ ID NO: 2571186 - RNA, 19 nt, Homo sapiens
  misc_RNA (1)...(19): siRNA sense strand
aagugaaaucccaaccaaa

SEQ ID NO: 2571187 - RNA, 19 nt, Homo sapiens
  misc_RNA (1)...(19): siRNA sense strand
ucaaggaggcaaaggagca

SEQ ID NO: 2571188 - RNA, 19 nt, Homo sapiens
  misc_RNA (1)...(19): siRNA sense strand
gugaaugggauaaacgcuu

SEQ ID NO: 2571189 - RNA, 19 nt, Homo sapiens
  misc_RNA (1)...(19): siRNA sense strand
acacugagaccaagaccau

SEQ ID NO: 2571190 - RNA, 19 nt, Homo sapiens
  misc_RNA (1)...(19): siRNA sense strand
agaccgagauugcugauga

SEQ ID NO: 2571191 - RNA, 19 nt, Homo sapiens
  misc_RNA (1)...(19): siRNA sense strand
cauaagucauacaggucca

SEQ ID NO: 2571192 - RNA, 19 nt, Homo sapiens
  misc_RNA (1)...(19): siRNA sense strand
cgagcguacagcaaguaaa

SEQ ID NO: 2571193 - RNA, 19 nt, Homo sapiens
  misc_RNA (1)...(19): siRNA sense strand
ugaucagguccuuguacaa

SEQ ID NO: 2571194 - RNA, 19 nt, Homo sapiens
  misc_RNA (1)...(19): siRNA sense strand
cguggugucccuuggaauu

SEQ ID NO: 2571195 - RNA, 19 nt, Homo sapiens
  misc_RNA (1)...(19): siRNA sense strand
cuucauaaagcaaaggacu

SEQ ID NO: 2571196 - RNA, 19 nt, Homo sapiens
  misc_RNA (1)...(19): siRNA sense strand
ggaagaaggcaaagaagua

SEQ ID NO: 2571197 - RNA, 19 nt, Homo sapiens
  misc_RNA (1)...(19): siRNA sense strand
gcaaagaaguagagucaga

SEQ ID NO: 2571198 - RNA, 19 nt, Homo sapiens
  misc_RNA (1)...(19): siRNA sense strand
ccuaaagcacagaaggaaa

SEQ ID NO: 2571199 - RNA, 19 nt, Homo sapiens
  misc_RNA (1)...(19): siRNA sense strand
aggcaaagaaguagaguca

SEQ ID NO: 2571200 - RNA, 19 nt, Homo sapiens
  misc_RNA (1)...(19): siRNA sense strand
ggacauaguugcaggacgu

SEQ ID NO: 2571201 - RNA, 19 nt, Homo sapiens
  misc_RNA (1)...(19): siRNA sense strand
cgagauugcugaugaguga

SEQ ID NO: 2571202 - RNA, 19 nt, Homo sapiens
  misc_RNA (1)...(19): siRNA sense strand
ggucagaaagagauagaau

SEQ ID NO: 2571203 - RNA, 19 nt, Homo sapiens
  misc_RNA (1)...(19): siRNA sense strand
ggaagaacucagagaagau

SEQ ID NO: 2571204 - RNA, 19 nt, Homo sapiens
  misc_RNA (1)...(19): siRNA sense strand
aggugaaggaggucagaaa

SEQ ID NO: 2571205 - RNA, 19 nt, Homo sapiens
  misc_RNA (1)...(19): siRNA sense strand
agaaguagagucagauaaa

SEQ ID NO: 2571206 - RNA, 19 nt, Homo sapiens
  misc_RNA (1)...(19): siRNA sense strand
ggagauaauuggugugaac

SEQ ID NO: 2571207 - RNA, 19 nt, Homo sapiens
  misc_RNA (1)...(19): siRNA sense strand
cggccuagugaaugggaua

SEQ ID NO: 2571208 - RNA, 19 nt, Homo sapiens
  misc_RNA (1)...(19): siRNA sense strand
gaaggaagagggugaggaa

SEQ ID NO: 2571209 - RNA, 19 nt, Homo sapiens
  misc_RNA (1)...(19): siRNA sense strand
gcuccaaaauagaaguaaa

SEQ ID NO: 2571210 - RNA, 19 nt, Homo sapiens
  misc_RNA (1)...(19): siRNA sense strand
gaagaaagcccucaaucaa

SEQ ID NO: 2571211 - RNA, 19 nt, Homo sapiens
  misc_RNA (1)...(19): siRNA sense strand
gauucggccuggagagcaa

SEQ ID NO: 2571212 - RNA, 19 nt, Homo sapiens
  misc_RNA (1)...(19): siRNA sense strand
ggaggaaucuugucaaaca

SEQ ID NO: 2571213 - RNA, 19 nt, Homo sapiens
  misc_RNA (1)...(19): siRNA sense strand
ugaaauuaaggaaggagaa

SEQ ID NO: 2571214 - RNA, 19 nt, Homo sapiens
  misc_RNA (1)...(19): siRNA sense strand
cuggagagcaagagcagua

SEQ ID NO: 2571215 - RNA, 19 nt, Homo sapiens
  misc_RNA (1)...(19): siRNA sense strand
caggaggaaucuugucaaa

SEQ ID NO: 2571216 - RNA, 19 nt, Homo sapiens
  misc_RNA (1)...(19): siRNA sense strand
cagugaaggcugaagugaa

SEQ ID NO: 2571217 - RNA, 19 nt, Homo sapiens
  misc_RNA (1)...(19): siRNA sense strand
gugaaggaggucagaaaga

SEQ ID NO: 2571218 - RNA, 19 nt, Homo sapiens
  misc_RNA (1)...(19): siRNA sense strand
aggaaacagugaaggcuga

SEQ ID NO: 2571219 - RNA, 19 nt, Homo sapiens
  misc_RNA (1)...(19): siRNA sense strand
aaguagagucagauaaaga

SEQ ID NO: 2571220 - RNA, 19 nt, Homo sapiens
  misc_RNA (1)...(19): siRNA sense strand
ccuagaugccucugcuaaa

SEQ ID NO: 2571221 - RNA, 19 nt, Homo sapiens
  misc_RNA (1)...(19): siRNA sense strand
agagaagaguuuagugacu

SEQ ID NO: 2571222 - RNA, 19 nt, Homo sapiens
  misc_RNA (1)...(19): siRNA sense strand
auggaaagucuguguagaa

SEQ ID NO: 2571223 - RNA, 19 nt, Homo sapiens
  misc_RNA (1)...(19): siRNA sense strand
cagagaagauccagauuuu

SEQ ID NO: 2571224 - RNA, 19 nt, Homo sapiens
  misc_RNA (1)...(19): siRNA sense strand
gcugaaagcuucuaaugga

SEQ ID NO: 2571225 - RNA, 19 nt, Homo sapiens
  misc_RNA (1)...(19): siRNA sense strand
agacaagagucaagaggag

SEQ ID NO: 2571226 - RNA, 19 nt, Homo sapiens
  misc_RNA (1)...(19): siRNA sense strand
uguccgaggaagaaggcaa

SEQ ID NO: 2571227 - RNA, 19 nt, Homo sapiens
  misc_RNA (1)...(19): siRNA sense strand
guagagucagauaaagaaa

SEQ ID NO: 2571228 - RNA, 19 nt, Homo sapiens
  misc_RNA (1)...(19): siRNA sense strand
caaaggacuuggaaggagu

SEQ ID NO: 2571229 - RNA, 19 nt, Homo sapiens
  misc_RNA (1)...(19): siRNA sense strand
aacagaaggaagaggguga

SEQ ID NO: 2571230 - RNA, 19 nt, Homo sapiens
  misc_RNA (1)...(19): siRNA sense strand
agccauaaacucaggccaa

SEQ ID NO: 2571231 - RNA, 19 nt, Homo sapiens
  misc_RNA (1)...(19): siRNA sense strand
cagaggacuuucacgacua

SEQ ID NO: 2571232 - RNA, 19 nt, Homo sapiens
  misc_RNA (1)...(19): siRNA sense strand
aagaaguagagucagauaa

SEQ ID NO: 2571233 - RNA, 19 nt, Homo sapiens
  misc_RNA (1)...(19): siRNA sense strand
gaaggaggucagaaagaga

SEQ ID NO: 2571234 - RNA, 19 nt, Homo sapiens
  misc_RNA (1)...(19): siRNA sense strand
ggaaggagaaggacuugaa

SEQ ID NO: 2571235 - RNA, 19 nt, Homo sapiens
  misc_RNA (1)...(19): siRNA sense strand
agaagaaagcccucaauca

SEQ ID NO: 2571236 - RNA, 19 nt, Homo sapiens
  misc_RNA (1)...(19): siRNA sense strand
ggaaagucuguguagaaca

SEQ ID NO: 2571237 - RNA, 19 nt, Homo sapiens
  misc_RNA (1)...(19): siRNA sense strand
agacgagccaccugagcaa

SEQ ID NO: 2571238 - RNA, 19 nt, Homo sapiens
  misc_RNA (1)...(19): siRNA sense strand
cgaggaagaaggcaaagaa

SEQ ID NO: 2571239 - RNA, 19 nt, Homo sapiens
  misc_RNA (1)...(19): siRNA sense strand
auuaagcagugcagaaaca

SEQ ID NO: 2571240 - RNA, 19 nt, Homo sapiens
  misc_RNA (1)...(19): siRNA sense strand
aggaagaacucagagaaga

SEQ ID NO: 2571241 - RNA, 19 nt, Homo sapiens
  misc_RNA (1)...(19): siRNA sense strand
uggaaggaguagauaucau

SEQ ID NO: 2571242 - RNA, 19 nt, Homo sapiens
  misc_RNA (1)...(19): siRNA sense strand
aggauuuagacaagaguca

SEQ ID NO: 2571243 - RNA, 19 nt, Homo sapiens
  misc_RNA (1)...(19): siRNA sense strand
aauuaaggaaggagaagga

SEQ ID NO: 2571244 - RNA, 19 nt, Homo sapiens
  misc_RNA (1)...(19): siRNA sense strand
cuuugcaaccuuagcauua

SEQ ID NO: 2571245 - RNA, 19 nt, Homo sapiens
  misc_RNA (1)...(19): siRNA sense strand
agaagaguuuagugacuga

SEQ ID NO: 2571246 - RNA, 19 nt, Homo sapiens
  misc_RNA (1)...(19): siRNA sense strand
aggugggauuucagagaca

SEQ ID NO: 2571247 - RNA, 19 nt, Homo sapiens
  misc_RNA (1)...(19): siRNA sense strand
aggaggucagaaagagaua

SEQ ID NO: 2571248 - RNA, 19 nt, Homo sapiens
  misc_RNA (1)...(19): siRNA sense strand
aagccaucaaggaggcaaa

SEQ ID NO: 2571249 - RNA, 19 nt, Homo sapiens
  misc_RNA (1)...(19): siRNA sense strand
ggugugaacagaagcugaa

SEQ ID NO: 2571250 - RNA, 19 nt, Homo sapiens
  misc_RNA (1)...(19): siRNA sense strand
aaagaaguagagucagaua

SEQ ID NO: 2571251 - RNA, 19 nt, Homo sapiens
  misc_RNA (1)...(19): siRNA sense strand
aggucauggaacugcauaa

SEQ ID NO: 2571252 - RNA, 19 nt, Homo sapiens
  misc_RNA (1)...(19): siRNA sense strand
aggaagaaggcaaagaagu

SEQ ID NO: 2571253 - RNA, 19 nt, Homo sapiens
  misc_RNA (1)...(19): siRNA sense strand
aagaaagcccucaaucaaa

SEQ ID NO: 2571254 - RNA, 19 nt, Homo sapiens
  misc_RNA (1)...(19): siRNA sense strand
agagucaagaggagaucaa

SEQ ID NO: 2571255 - RNA, 19 nt, Homo sapiens
  misc_RNA (1)...(19): siRNA sense strand
aaucaaaagcagaaacaga

SEQ ID NO: 2571256 - RNA, 19 nt, Homo sapiens
  misc_RNA (1)...(19): siRNA sense strand
cuggauuccgccaaagaaa

SEQ ID NO: 2571257 - RNA, 19 nt, Homo sapiens
  misc_RNA (1)...(19): siRNA sense strand
guggauuauguuagugauu

SEQ ID NO: 2571258 - RNA, 19 nt, Homo sapiens
  misc_RNA (1)...(19): siRNA sense strand
ucuuaacaucaaugggcaa

SEQ ID NO: 2571259 - RNA, 19 nt, Homo sapiens
  misc_RNA (1)...(19): siRNA sense strand
uaaggaaggagaaggacuu

SEQ ID NO: 2571260 - RNA, 19 nt, Homo sapiens
  misc_RNA (1)...(19): siRNA sense strand
gaacuugaagagaagguca

SEQ ID NO: 2571261 - RNA, 19 nt, Homo sapiens
  misc_RNA (1)...(19): siRNA sense strand
cacaugaagacuugaccaa

SEQ ID NO: 2571262 - RNA, 19 nt, Homo sapiens
  misc_RNA (1)...(19): siRNA sense strand
ucauuaagcagugcagaaa

SEQ ID NO: 2571263 - RNA, 19 nt, Homo sapiens
  misc_RNA (1)...(19): siRNA sense strand
cgaaucagaccaaggaacu

SEQ ID NO: 2571264 - RNA, 19 nt, Homo sapiens
  misc_RNA (1)...(19): siRNA sense strand
uggaacugcauaagucaua

SEQ ID NO: 2571265 - RNA, 19 nt, Homo sapiens
  misc_RNA (1)...(19): siRNA sense strand
acaagagucaagaggagau

SEQ ID NO: 2571266 - RNA, 19 nt, Homo sapiens
  misc_RNA (1)...(19): siRNA sense strand
agucaagaggagaucaaaa

SEQ ID NO: 2571267 - RNA, 19 nt, Homo sapiens
  misc_RNA (1)...(19): siRNA sense strand
gcaaauccccacaggagaa

SEQ ID NO: 2571268 - RNA, 19 nt, Homo sapiens
  misc_RNA (1)...(19): siRNA sense strand
gcauggagcacuugcgaga

SEQ ID NO: 2571269 - RNA, 19 nt, Homo sapiens
  misc_RNA (1)...(19): siRNA sense strand
gcucacugcuggaggacga

SEQ ID NO: 2571270 - RNA, 19 nt, Homo sapiens
  misc_RNA (1)...(19): siRNA sense strand
gggucuugauccagcggaa

SEQ ID NO: 2571271 - RNA, 19 nt, Homo sapiens
  misc_RNA (1)...(19): siRNA sense strand
ccucugagacugauggcua

SEQ ID NO: 2571272 - RNA, 19 nt, Homo sapiens
  misc_RNA (1)...(19): siRNA sense strand
cccaaagccaacaaagaaa

SEQ ID NO: 2571273 - RNA, 19 nt, Homo sapiens
  misc_RNA (1)...(19): siRNA sense strand
ugacacagcuuaugcccua

SEQ ID NO: 2571274 - RNA, 19 nt, Homo sapiens
  misc_RNA (1)...(19): siRNA sense strand
gcacagucuacaagggcau

SEQ ID NO: 2571275 - RNA, 19 nt, Homo sapiens
  misc_RNA (1)...(19): siRNA sense strand
uccaggaggugcagggcua

SEQ ID NO: 2571276 - RNA, 19 nt, Homo sapiens
  misc_RNA (1)...(19): siRNA sense strand
ugguggaugcugaggagua

SEQ ID NO: 2571277 - RNA, 19 nt, Homo sapiens
  misc_RNA (1)...(19): siRNA sense strand
ccgauguauuugaugguga

SEQ ID NO: 2571278 - RNA, 19 nt, Homo sapiens
  misc_RNA (1)...(19): siRNA sense strand
cggccaagauuccgggagu

SEQ ID NO: 2571279 - RNA, 19 nt, Homo sapiens
  misc_RNA (1)...(19): siRNA sense strand
gggaccagcucuuucggaa

SEQ ID NO: 2571280 - RNA, 19 nt, Homo sapiens
  misc_RNA (1)...(19): siRNA sense strand
auggagacccgcugaacaa

SEQ ID NO: 2571281 - RNA, 19 nt, Homo sapiens
  misc_RNA (1)...(19): siRNA sense strand
agacagaguaccaugcaga

SEQ ID NO: 2571282 - RNA, 19 nt, Homo sapiens
  misc_RNA (1)...(19): siRNA sense strand
gcuccaaguguuugagacu

SEQ ID NO: 2571283 - RNA, 19 nt, Homo sapiens
  misc_RNA (1)...(19): siRNA sense strand
aaaucuuagacgaagcaua

SEQ ID NO: 2571284 - RNA, 19 nt, Homo sapiens
  misc_RNA (1)...(19): siRNA sense strand
uguuugagacucuggaaga

SEQ ID NO: 2571285 - RNA, 19 nt, Homo sapiens
  misc_RNA (1)...(19): siRNA sense strand
cguuugaguccaugcccaa

SEQ ID NO: 2571286 - RNA, 19 nt, Homo sapiens
  misc_RNA (1)...(19): siRNA sense strand
uggaaagggccaagacucu

SEQ ID NO: 2571287 - RNA, 19 nt, Homo sapiens
  misc_RNA (1)...(19): siRNA sense strand
aggagugcguggaggaaug

SEQ ID NO: 2571288 - RNA, 19 nt, Homo sapiens
  misc_RNA (1)...(19): siRNA sense strand
ggugaaggugcuuggaucu

SEQ ID NO: 2571289 - RNA, 19 nt, Homo sapiens
  misc_RNA (1)...(19): siRNA sense strand
ggaagagaucacagguuac

SEQ ID NO: 2571290 - RNA, 19 nt, Homo sapiens
  misc_RNA (1)...(19): siRNA sense strand
ggaugggcgcugugagcaa

SEQ ID NO: 2571291 - RNA, 19 nt, Homo sapiens
  misc_RNA (1)...(19): siRNA sense strand
cagucguggaggagaagaa

SEQ ID NO: 2571292 - RNA, 19 nt, Homo sapiens
  misc_RNA (1)...(19): siRNA sense strand
ccucaguggagaaggucau

SEQ ID NO: 2571293 - RNA, 19 nt, Homo sapiens
  misc_RNA (1)...(19): siRNA sense strand
ggaccuuccagcugggaca

SEQ ID NO: 2571294 - RNA, 19 nt, Homo sapiens
  misc_RNA (1)...(19): siRNA sense strand
cagagcggauggugggcuu

SEQ ID NO: 2571295 - RNA, 19 nt, Homo sapiens
  misc_RNA (1)...(19): siRNA sense strand
ccagauagcggcagcguuc

SEQ ID NO: 2571296 - RNA, 19 nt, Homo sapiens
  misc_RNA (1)...(19): siRNA sense strand
ccaccuacgcagcagacaa

SEQ ID NO: 2571297 - RNA, 19 nt, Homo sapiens
  misc_RNA (1)...(19): siRNA sense strand
gcuggaauauggaggccaa

SEQ ID NO: 2571298 - RNA, 19 nt, Homo sapiens
  misc_RNA (1)...(19): siRNA sense strand
cguaccggauggagaccaa

SEQ ID NO: 2571299 - RNA, 19 nt, Homo sapiens
  misc_RNA (1)...(19): siRNA sense strand
gcuucguaccggauggaga

SEQ ID NO: 2571300 - RNA, 19 nt, Homo sapiens
  misc_RNA (1)...(19): siRNA sense strand
gcugaauauaagaaggaaa

SEQ ID NO: 2571301 - RNA, 19 nt, Homo sapiens
  misc_RNA (1)...(19): siRNA sense strand
uggaagaagaggaggacuu

SEQ ID NO: 2571302 - RNA, 19 nt, Homo sapiens
  misc_RNA (1)...(19): siRNA sense strand
ggaucaaaucucagggcuu

SEQ ID NO: 2571303 - RNA, 19 nt, Homo sapiens
  misc_RNA (1)...(19): siRNA sense strand
gggaaaguggugaagauau

SEQ ID NO: 2571304 - RNA, 19 nt, Homo sapiens
  misc_RNA (1)...(19): siRNA sense strand
gcuuauggaauuagcaaaa

SEQ ID NO: 2571305 - RNA, 19 nt, Homo sapiens
  misc_RNA (1)...(19): siRNA sense strand
ggugaagauaugugacuuu

SEQ ID NO: 2571306 - RNA, 19 nt, Homo sapiens
  misc_RNA (1)...(19): siRNA sense strand
gucaaaaugcugaaagaaa

SEQ ID NO: 2571307 - RNA, 19 nt, Homo sapiens
  misc_RNA (1)...(19): siRNA sense strand
acgggaaaguggugaagau

SEQ ID NO: 2571308 - RNA, 19 nt, Homo sapiens
  misc_RNA (1)...(19): siRNA sense strand
ugggaagccacgagaauau

SEQ ID NO: 2571309 - RNA, 19 nt, Homo sapiens
  misc_RNA (1)...(19): siRNA sense strand
gcaaaagggucuugauaac

SEQ ID NO: 2571310 - RNA, 19 nt, Homo sapiens
  misc_RNA (1)...(19): siRNA sense strand
ggaaaagugaugaacgcaa

SEQ ID NO: 2571311 - RNA, 19 nt, Homo sapiens
  misc_RNA (1)...(19): siRNA sense strand
gggaaagcuguaaagaaga

SEQ ID NO: 2571312 - RNA, 19 nt, Homo sapiens
  misc_RNA (1)...(19): siRNA sense strand
cguugauuucagagaauau

SEQ ID NO: 2571313 - RNA, 19 nt, Homo sapiens
  misc_RNA (1)...(19): siRNA sense strand
ucucagggcuucaugggaa

SEQ ID NO: 2571314 - RNA, 19 nt, Homo sapiens
  misc_RNA (1)...(19): siRNA sense strand
cgggaaaguggugaagaua

SEQ ID NO: 2571315 - RNA, 19 nt, Homo sapiens
  misc_RNA (1)...(19): siRNA sense strand
ggggaaagcuguaaagaag

SEQ ID NO: 2571316 - RNA, 19 nt, Homo sapiens
  misc_RNA (1)...(19): siRNA sense strand
augcagaagaagcgaugua

SEQ ID NO: 2571317 - RNA, 19 nt, Homo sapiens
  misc_RNA (1)...(19): siRNA sense strand
gcugggaagccacgagaau

SEQ ID NO: 2571318 - RNA, 19 nt, Homo sapiens
  misc_RNA (1)...(19): siRNA sense strand
guuuaaagccuacccacaa

SEQ ID NO: 2571319 - RNA, 19 nt, Homo sapiens
  misc_RNA (1)...(19): siRNA sense strand
uagaaaggcuaacagaaaa

SEQ ID NO: 2571320 - RNA, 19 nt, Homo sapiens
  misc_RNA (1)...(19): siRNA sense strand
acagaaaaguguuuggaca

SEQ ID NO: 2571321 - RNA, 19 nt, Homo sapiens
  misc_RNA (1)...(19): siRNA sense strand
aagaagaggaggacuugaa

SEQ ID NO: 2571322 - RNA, 19 nt, Homo sapiens
  misc_RNA (1)...(19): siRNA sense strand
ugggaagguacuaggauca

SEQ ID NO: 2571323 - RNA, 19 nt, Homo sapiens
  misc_RNA (1)...(19): siRNA sense strand
acgcaacagcuuauggaau

SEQ ID NO: 2571324 - RNA, 19 nt, Homo sapiens
  misc_RNA (1)...(19): siRNA sense strand
augaguaccuauucaacaa

SEQ ID NO: 2571325 - RNA, 19 nt, Homo sapiens
  misc_RNA (1)...(19): siRNA sense strand
cguaggaaagggauuuaua

SEQ ID NO: 2571326 - RNA, 19 nt, Homo sapiens
  misc_RNA (1)...(19): siRNA sense strand
agaaaaugaugaugcccaa

SEQ ID NO: 2571327 - RNA, 19 nt, Homo sapiens
  misc_RNA (1)...(19): siRNA sense strand
cagugggugucgagcagua

SEQ ID NO: 2571328 - RNA, 19 nt, Homo sapiens
  misc_RNA (1)...(19): siRNA sense strand
ccgucaaaaugcugaaaga

SEQ ID NO: 2571329 - RNA, 19 nt, Homo sapiens
  misc_RNA (1)...(19): siRNA sense strand
gcuugucacccacgggaaa

SEQ ID NO: 2571330 - RNA, 19 nt, Homo sapiens
  misc_RNA (1)...(19): siRNA sense strand
augcaauccugcugggcuu

SEQ ID NO: 2571331 - RNA, 19 nt, Homo sapiens
  misc_RNA (1)...(19): siRNA sense strand
agucaaucagcuuugguua

SEQ ID NO: 2571332 - RNA, 19 nt, Homo sapiens
  misc_RNA (1)...(19): siRNA sense strand
cgaccuuucagcagagaga

SEQ ID NO: 2571333 - RNA, 19 nt, Homo sapiens
  misc_RNA (1)...(19): siRNA sense strand
aagcacucgaggagggcaa

SEQ ID NO: 2571334 - RNA, 19 nt, Homo sapiens
  misc_RNA (1)...(19): siRNA sense strand
ccaucguaggaaagggauu

SEQ ID NO: 2571335 - RNA, 19 nt, Homo sapiens
  misc_RNA (1)...(19): siRNA sense strand
gagcaaaagggucuugaua

SEQ ID NO: 2571336 - RNA, 19 nt, Homo sapiens
  misc_RNA (1)...(19): siRNA sense strand
gcuuacauuugaagaucuu

SEQ ID NO: 2571337 - RNA, 19 nt, Homo sapiens
  misc_RNA (1)...(19): siRNA sense strand
aaguccagcuguuguuaaa

SEQ ID NO: 2571338 - RNA, 19 nt, Homo sapiens
  misc_RNA (1)...(19): siRNA sense strand
cugaauauaagaaggaaac

SEQ ID NO: 2571339 - RNA, 19 nt, Homo sapiens
  misc_RNA (1)...(19): siRNA sense strand
ggacuuggacagagauuuu

SEQ ID NO: 2571340 - RNA, 19 nt, Homo sapiens
  misc_RNA (1)...(19): siRNA sense strand
gcucagggacaguguacga

SEQ ID NO: 2571341 - RNA, 19 nt, Homo sapiens
  misc_RNA (1)...(19): siRNA sense strand
gcuaccaauuacacaauau

SEQ ID NO: 2571342 - RNA, 19 nt, Homo sapiens
  misc_RNA (1)...(19): siRNA sense strand
gguuuaaagccuacccaca

SEQ ID NO: 2571343 - RNA, 19 nt, Homo sapiens
  misc_RNA (1)...(19): siRNA sense strand
aauagaaaggcuaacagaa

SEQ ID NO: 2571344 - RNA, 19 nt, Homo sapiens
  misc_RNA (1)...(19): siRNA sense strand
uucaagagaaguucagaua

SEQ ID NO: 2571345 - RNA, 19 nt, Homo sapiens
  misc_RNA (1)...(19): siRNA sense strand
agauaugugacuuuggauu

SEQ ID NO: 2571346 - RNA, 19 nt, Homo sapiens
  misc_RNA (1)...(19): siRNA sense strand
cggaauguccucacaccua

SEQ ID NO: 2571347 - RNA, 19 nt, Homo sapiens
  misc_RNA (1)...(19): siRNA sense strand
cuucaaagcaucccaguca

SEQ ID NO: 2571348 - RNA, 19 nt, Homo sapiens
  misc_RNA (1)...(19): siRNA sense strand
ggucaagugcugugcauac

SEQ ID NO: 2571349 - RNA, 19 nt, Homo sapiens
  misc_RNA (1)...(19): siRNA sense strand
gacauaaggugcugugcca

SEQ ID NO: 2571350 - RNA, 19 nt, Homo sapiens
  misc_RNA (1)...(19): siRNA sense strand
gguaugaaagccagcuaca

SEQ ID NO: 2571351 - RNA, 19 nt, Homo sapiens
  misc_RNA (1)...(19): siRNA sense strand
ugucuggucauauggaaua

SEQ ID NO: 2571352 - RNA, 19 nt, Homo sapiens
  misc_RNA (1)...(19): siRNA sense strand
gaucaggugcuuuuggaaa

SEQ ID NO: 2571353 - RNA, 19 nt, Homo sapiens
  misc_RNA (1)...(19): siRNA sense strand
ccacgagaauauugugaac

SEQ ID NO: 2571354 - RNA, 19 nt, Homo sapiens
  misc_RNA (1)...(19): siRNA sense strand
uugccaaaggaauggaauu

SEQ ID NO: 2571355 - RNA, 19 nt, Homo sapiens
  misc_RNA (1)...(19): siRNA sense strand
gaaugggugcuuugcgauu

SEQ ID NO: 2571356 - RNA, 19 nt, Homo sapiens
  misc_RNA (1)...(19): siRNA sense strand
ccugggaauuagaaaacaa

SEQ ID NO: 2571357 - RNA, 19 nt, Homo sapiens
  misc_RNA (1)...(19): siRNA sense strand
gcaagaaacgacaccggau

SEQ ID NO: 2571358 - RNA, 19 nt, Homo sapiens
  misc_RNA (1)...(19): siRNA sense strand
uaaaaggguuccuggucaa

SEQ ID NO: 2571359 - RNA, 19 nt, Homo sapiens
  misc_RNA (1)...(19): siRNA sense strand
auacaauucccuuggcaca

SEQ ID NO: 2571360 - RNA, 19 nt, Homo sapiens
  misc_RNA (1)...(19): siRNA sense strand
cauaaggugcugugccaga

SEQ ID NO: 2571361 - RNA, 19 nt, Homo sapiens
  misc_RNA (1)...(19): siRNA sense strand
gugcugugccagaaaugaa

SEQ ID NO: 2571362 - RNA, 19 nt, Homo sapiens
  misc_RNA (1)...(19): siRNA sense strand
agaagagaucacagaagga

SEQ ID NO: 2571363 - RNA, 19 nt, Homo sapiens
  misc_RNA (1)...(19): siRNA sense strand
cuucaugaucagagagagu

SEQ ID NO: 2571364 - RNA, 19 nt, Homo sapiens
  misc_RNA (1)...(19): siRNA sense strand
gagacaaggccgaggagcu

SEQ ID NO: 2571365 - RNA, 19 nt, Homo sapiens
  misc_RNA (1)...(19): siRNA sense strand
cggagggacuggauagcga

SEQ ID NO: 2571366 - RNA, 19 nt, Homo sapiens
  misc_RNA (1)...(19): siRNA sense strand
cgaaagaagaaaagcaucu

SEQ ID NO: 2571367 - RNA, 19 nt, Homo sapiens
  misc_RNA (1)...(19): siRNA sense strand
agagagagugagaccaaga

SEQ ID NO: 2571368 - RNA, 19 nt, Homo sapiens
  misc_RNA (1)...(19): siRNA sense strand
uguccagacugcaggagga

SEQ ID NO: 2571369 - RNA, 19 nt, Homo sapiens
  misc_RNA (1)...(19): siRNA sense strand
aaucaauugcucugggaaa

SEQ ID NO: 2571370 - RNA, 19 nt, Homo sapiens
  misc_RNA (1)...(19): siRNA sense strand
uggaauugcuucaggcaga

SEQ ID NO: 2571371 - RNA, 19 nt, Homo sapiens
  misc_RNA (1)...(19): siRNA sense strand
aauugaaagcugagaacau

SEQ ID NO: 2571372 - RNA, 19 nt, Homo sapiens
  misc_RNA (1)...(19): siRNA sense strand
cugagugggcagaggagaa

SEQ ID NO: 2571373 - RNA, 19 nt, Homo sapiens
  misc_RNA (1)...(19): siRNA sense strand
acauaugaguugguggaaa

SEQ ID NO: 2571374 - RNA, 19 nt, Homo sapiens
  misc_RNA (1)...(19): siRNA sense strand
ugaagauggaaaugagauu

SEQ ID NO: 2571375 - RNA, 19 nt, Homo sapiens
  misc_RNA (1)...(19): siRNA sense strand
ucucagaggagcaguggaa

SEQ ID NO: 2571376 - RNA, 19 nt, Homo sapiens
  misc_RNA (1)...(19): siRNA sense strand
augaaggcuuugaaggcaa

SEQ ID NO: 2571377 - RNA, 19 nt, Homo sapiens
  misc_RNA (1)...(19): siRNA sense strand
ccuggauucuguugagcua

SEQ ID NO: 2571378 - RNA, 19 nt, Homo sapiens
  misc_RNA (1)...(19): siRNA sense strand
ccacaggaaaugaagacau

SEQ ID NO: 2571379 - RNA, 19 nt, Homo sapiens
  misc_RNA (1)...(19): siRNA sense strand
ucagaggaaauaagguuaa

SEQ ID NO: 2571380 - RNA, 19 nt, Homo sapiens
  misc_RNA (1)...(19): siRNA sense strand
gcugaaaagcccugaugaa

SEQ ID NO: 2571381 - RNA, 19 nt, Homo sapiens
  misc_RNA (1)...(19): siRNA sense strand
acauuuagcaggaacagaa

SEQ ID NO: 2571382 - RNA, 19 nt, Homo sapiens
  misc_RNA (1)...(19): siRNA sense strand
aaggaaugccagagggcga

SEQ ID NO: 2571383 - RNA, 19 nt, Homo sapiens
  misc_RNA (1)...(19): siRNA sense strand
caaugaagugacaagaauu

SEQ ID NO: 2571384 - RNA, 19 nt, Homo sapiens
  misc_RNA (1)...(19): siRNA sense strand
ggcaaaucucuuuaugaaa

SEQ ID NO: 2571385 - RNA, 19 nt, Homo sapiens
  misc_RNA (1)...(19): siRNA sense strand
ucacagugucuaugaaaca

SEQ ID NO: 2571386 - RNA, 19 nt, Homo sapiens
  misc_RNA (1)...(19): siRNA sense strand
uauugauccauuaggguua

SEQ ID NO: 2571387 - RNA, 19 nt, Homo sapiens
  misc_RNA (1)...(19): siRNA sense strand
ggauaagcaaauugggauc

SEQ ID NO: 2571388 - RNA, 19 nt, Homo sapiens
  misc_RNA (1)...(19): siRNA sense strand
gagcuuuggaacacugaaa

SEQ ID NO: 2571389 - RNA, 19 nt, Homo sapiens
  misc_RNA (1)...(19): siRNA sense strand
agggaugguguuugagcua

SEQ ID NO: 2571390 - RNA, 19 nt, Homo sapiens
  misc_RNA (1)...(19): siRNA sense strand
caggaaaugaagacauaca

SEQ ID NO: 2571391 - RNA, 19 nt, Homo sapiens
  misc_RNA (1)...(19): siRNA sense strand
gcuuccaaguucagugaga

SEQ ID NO: 2571392 - RNA, 19 nt, Homo sapiens
  misc_RNA (1)...(19): siRNA sense strand
caaauaagacucaucccaa

SEQ ID NO: 2571393 - RNA, 19 nt, Homo sapiens
  misc_RNA (1)...(19): siRNA sense strand
caaacaaauucagcggcua

SEQ ID NO: 2571394 - RNA, 19 nt, Homo sapiens
  misc_RNA (1)...(19): siRNA sense strand
ugugaggagcuuuggaaca

SEQ ID NO: 2571395 - RNA, 19 nt, Homo sapiens
  misc_RNA (1)...(19): siRNA sense strand
ugacaaaagcaacccaaua

SEQ ID NO: 2571396 - RNA, 19 nt, Homo sapiens
  misc_RNA (1)...(19): siRNA sense strand
aaacauaugaguuggugga

SEQ ID NO: 2571397 - RNA, 19 nt, Homo sapiens
  misc_RNA (1)...(19): siRNA sense strand
uggaaagagcauuuauuga

SEQ ID NO: 2571398 - RNA, 19 nt, Homo sapiens
  misc_RNA (1)...(19): siRNA sense strand
gcuacuaacauuacuccaa

SEQ ID NO: 2571399 - RNA, 19 nt, Homo sapiens
  misc_RNA (1)...(19): siRNA sense strand
gggugaaguccuauccaga

SEQ ID NO: 2571400 - RNA, 19 nt, Homo sapiens
  misc_RNA (1)...(19): siRNA sense strand
cugggaugcagaagaauuu

SEQ ID NO: 2571401 - RNA, 19 nt, Homo sapiens
  misc_RNA (1)...(19): siRNA sense strand
uggaugaauugaaagcuga

SEQ ID NO: 2571402 - RNA, 19 nt, Homo sapiens
  misc_RNA (1)...(19): siRNA sense strand
gcguggaauugcagaggcu

SEQ ID NO: 2571403 - RNA, 19 nt, Homo sapiens
  misc_RNA (1)...(19): siRNA sense strand
aggauaagcaaauugggau

SEQ ID NO: 2571404 - RNA, 19 nt, Homo sapiens
  misc_RNA (1)...(19): siRNA sense strand
augaaacauccacaggaaa

SEQ ID NO: 2571405 - RNA, 19 nt, Homo sapiens
  misc_RNA (1)...(19): siRNA sense strand
cagcuguuguucaugaaau

SEQ ID NO: 2571406 - RNA, 19 nt, Homo sapiens
  misc_RNA (1)...(19): siRNA sense strand
acauuacuccaaagcauaa

SEQ ID NO: 2571407 - RNA, 19 nt, Homo sapiens
  misc_RNA (1)...(19): siRNA sense strand
cggacaucuuugugcccua

SEQ ID NO: 2571408 - RNA, 19 nt, Homo sapiens
  misc_RNA (1)...(19): siRNA sense strand
acuacauuacggagaaauu

SEQ ID NO: 2571409 - RNA, 19 nt, Homo sapiens
  misc_RNA (1)...(19): siRNA sense strand
ccuucgugcauguggauga

SEQ ID NO: 2571410 - RNA, 19 nt, Homo sapiens
  misc_RNA (1)...(19): siRNA sense strand
augcagaguauaagagaua

SEQ ID NO: 2571411 - RNA, 19 nt, Homo sapiens
  misc_RNA (1)...(19): siRNA sense strand
ggacaggagaagagcgaga

SEQ ID NO: 2571412 - RNA, 19 nt, Homo sapiens
  misc_RNA (1)...(19): siRNA sense strand
aggagaagagcgagaagaa

SEQ ID NO: 2571413 - RNA, 19 nt, Homo sapiens
  misc_RNA (1)...(19): siRNA sense strand
agacaauacuggagcagca

SEQ ID NO: 2571414 - RNA, 19 nt, Homo sapiens
  misc_RNA (1)...(19): siRNA sense strand
gugaagaugaagagaacga

SEQ ID NO: 2571415 - RNA, 19 nt, Homo sapiens
  misc_RNA (1)...(19): siRNA sense strand
guauaagcuucauggccua

SEQ ID NO: 2571416 - RNA, 19 nt, Homo sapiens
  misc_RNA (1)...(19): siRNA sense strand
agugggaaccugagggauu

SEQ ID NO: 2571417 - RNA, 19 nt, Homo sapiens
  misc_RNA (1)...(19): siRNA sense strand
caguggaauuugaggaacu

SEQ ID NO: 2571418 - RNA, 19 nt, Homo sapiens
  misc_RNA (1)...(19): siRNA sense strand
ggguuuggacagauugaaa

SEQ ID NO: 2571419 - RNA, 19 nt, Homo sapiens
  misc_RNA (1)...(19): siRNA sense strand
gggccaugcaagauaggua

SEQ ID NO: 2571420 - RNA, 19 nt, Homo sapiens
  misc_RNA (1)...(19): siRNA sense strand
augaaaauguacagcgcaa

SEQ ID NO: 2571421 - RNA, 19 nt, Homo sapiens
  misc_RNA (1)...(19): siRNA sense strand
acugaaaggaacaaagaca

SEQ ID NO: 2571422 - RNA, 19 nt, Homo sapiens
  misc_RNA (1)...(19): siRNA sense strand
agagugaagaugaagagaa

SEQ ID NO: 2571423 - RNA, 19 nt, Homo sapiens
  misc_RNA (1)...(19): siRNA sense strand
agcgagaagaagaggaaga

SEQ ID NO: 2571424 - RNA, 19 nt, Homo sapiens
  misc_RNA (1)...(19): siRNA sense strand
agacauacgaggaucugaa

SEQ ID NO: 2571425 - RNA, 19 nt, Homo sapiens
  misc_RNA (1)...(19): siRNA sense strand
ugaugauaaggauggauua

SEQ ID NO: 2571426 - RNA, 19 nt, Homo sapiens
  misc_RNA (1)...(19): siRNA sense strand
agagcgagaagaagaggaa

SEQ ID NO: 2571427 - RNA, 19 nt, Homo sapiens
  misc_RNA (1)...(19): siRNA sense strand
ugccaaugucaguggaauu

SEQ ID NO: 2571428 - RNA, 19 nt, Homo sapiens
  misc_RNA (1)...(19): siRNA sense strand
aagaagaggaagaagagca

SEQ ID NO: 2571429 - RNA, 19 nt, Homo sapiens
  misc_RNA (1)...(19): siRNA sense strand
gaauccaagugaagaggca

SEQ ID NO: 2571430 - RNA, 19 nt, Homo sapiens
  misc_RNA (1)...(19): siRNA sense strand
gaucagugagagugagagu

SEQ ID NO: 2571431 - RNA, 19 nt, Homo sapiens
  misc_RNA (1)...(19): siRNA sense strand
cugaaauugcagaaggcuu

SEQ ID NO: 2571432 - RNA, 19 nt, Homo sapiens
  misc_RNA (1)...(19): siRNA sense strand
acucaagcaaauaaaggaa

SEQ ID NO: 2571433 - RNA, 19 nt, Homo sapiens
  misc_RNA (1)...(19): siRNA sense strand
ccaaacugaaauugcagaa

SEQ ID NO: 2571434 - RNA, 19 nt, Homo sapiens
  misc_RNA (1)...(19): siRNA sense strand
gauuacacagauagaguga

SEQ ID NO: 2571435 - RNA, 19 nt, Homo sapiens
  misc_RNA (1)...(19): siRNA sense strand
gagacuauucaguaccaaa

SEQ ID NO: 2571436 - RNA, 19 nt, Homo sapiens
  misc_RNA (1)...(19): siRNA sense strand
cugaaaggaacaaagacau

SEQ ID NO: 2571437 - RNA, 19 nt, Homo sapiens
  misc_RNA (1)...(19): siRNA sense strand
agagauaccuagagaugcu

SEQ ID NO: 2571438 - RNA, 19 nt, Homo sapiens
  misc_RNA (1)...(19): siRNA sense strand
uuugagaagaaaugggaga

SEQ ID NO: 2571439 - RNA, 19 nt, Homo sapiens
  misc_RNA (1)...(19): siRNA sense strand
ccuggauggccgaaagaga

SEQ ID NO: 2571440 - RNA, 19 nt, Homo sapiens
  misc_RNA (1)...(19): siRNA sense strand
gaagaugaagagaacgaga

SEQ ID NO: 2571441 - RNA, 19 nt, Homo sapiens
  misc_RNA (1)...(19): siRNA sense strand
gcaugagguguuugggcau

SEQ ID NO: 2571442 - RNA, 19 nt, Homo sapiens
  misc_RNA (1)...(19): siRNA sense strand
cugaggaagaauaugaaga

SEQ ID NO: 2571443 - RNA, 19 nt, Homo sapiens
  misc_RNA (1)...(19): siRNA sense strand
cgagagaauccaagugaag

SEQ ID NO: 2571444 - RNA, 19 nt, Homo sapiens
  misc_RNA (1)...(19): siRNA sense strand
aagaggaagaagagcagau

SEQ ID NO: 2571445 - RNA, 19 nt, Homo sapiens
  misc_RNA (1)...(19): siRNA sense strand
ccuaaagaaaggaagaaug

SEQ ID NO: 2571446 - RNA, 19 nt, Homo sapiens
  misc_RNA (1)...(19): siRNA sense strand
uacgaaaggaggagcucaa

SEQ ID NO: 2571447 - RNA, 19 nt, Homo sapiens
  misc_RNA (1)...(19): siRNA sense strand
ugagaagaaaugggagaau

SEQ ID NO: 2571448 - RNA, 19 nt, Homo sapiens
  misc_RNA (1)...(19): siRNA sense strand
ugaagacucaagugggaau

SEQ ID NO: 2571449 - RNA, 19 nt, Homo sapiens
  misc_RNA (1)...(19): siRNA sense strand
caggacaggagaagagcga

SEQ ID NO: 2571450 - RNA, 19 nt, Homo sapiens
  misc_RNA (1)...(19): siRNA sense strand
ggcgcuaucaugaggagaa

SEQ ID NO: 2571451 - RNA, 19 nt, Homo sapiens
  misc_RNA (1)...(19): siRNA sense strand
aagugggaauguugugaau

SEQ ID NO: 2571452 - RNA, 19 nt, Homo sapiens
  misc_RNA (1)...(19): siRNA sense strand
gcacaaaacuugguggagu

SEQ ID NO: 2571453 - RNA, 19 nt, Homo sapiens
  misc_RNA (1)...(19): siRNA sense strand
cgagacacugaaaggaaca

SEQ ID NO: 2571454 - RNA, 19 nt, Homo sapiens
  misc_RNA (1)...(19): siRNA sense strand
cugugagauuuguggaaac

SEQ ID NO: 2571455 - RNA, 19 nt, Homo sapiens
  misc_RNA (1)...(19): siRNA sense strand
ugacacugaggaagaauau

SEQ ID NO: 2571456 - RNA, 19 nt, Homo sapiens
  misc_RNA (1)...(19): siRNA sense strand
aggaggagcucaaugccau

SEQ ID NO: 2571457 - RNA, 19 nt, Homo sapiens
  misc_RNA (1)...(19): siRNA sense strand
ucgagagaauccaagugaa

SEQ ID NO: 2571458 - RNA, 19 nt, Homo sapiens
  misc_RNA (1)...(19): siRNA sense strand
gugaagaggcacaaaacuu

SEQ ID NO: 2571459 - RNA, 19 nt, Homo sapiens
  misc_RNA (1)...(19): siRNA sense strand
acauuaaccugaaggcauc

SEQ ID NO: 2571460 - RNA, 19 nt, Homo sapiens
  misc_RNA (1)...(19): siRNA sense strand
cugacacugaggaagaaua

SEQ ID NO: 2571461 - RNA, 19 nt, Homo sapiens
  misc_RNA (1)...(19): siRNA sense strand
cagaucagugagagugaga

SEQ ID NO: 2571462 - RNA, 19 nt, Homo sapiens
  misc_RNA (1)...(19): siRNA sense strand
uaugaagacucaaguggga

SEQ ID NO: 2571463 - RNA, 19 nt, Homo sapiens
  misc_RNA (1)...(19): siRNA sense strand
caagauagguauauggagg

SEQ ID NO: 2571464 - RNA, 19 nt, Homo sapiens
  misc_RNA (1)...(19): siRNA sense strand
cauaauacuuugaggaaca

SEQ ID NO: 2571465 - RNA, 19 nt, Homo sapiens
  misc_RNA (1)...(19): siRNA sense strand
cagaaauacgaaaggaaua

SEQ ID NO: 2571466 - RNA, 19 nt, Homo sapiens
  misc_RNA (1)...(19): siRNA sense strand
ggaagaagaacgagaccaa

SEQ ID NO: 2571467 - RNA, 19 nt, Homo sapiens
  misc_RNA (1)...(19): siRNA sense strand
ugguagaacuagagaauga

SEQ ID NO: 2571468 - RNA, 19 nt, Homo sapiens
  misc_RNA (1)...(19): siRNA sense strand
uggacaacuuagugagaaa

SEQ ID NO: 2571469 - RNA, 19 nt, Homo sapiens
  misc_RNA (1)...(19): siRNA sense strand
cagcagaagaagagaaaga

SEQ ID NO: 2571470 - RNA, 19 nt, Homo sapiens
  misc_RNA (1)...(19): siRNA sense strand
gagcaugaugagaggauaa

SEQ ID NO: 2571471 - RNA, 19 nt, Homo sapiens
  misc_RNA (1)...(19): siRNA sense strand
gcaacaaauacaaaggaaa

SEQ ID NO: 2571472 - RNA, 19 nt, Homo sapiens
  misc_RNA (1)...(19): siRNA sense strand
ggagaagaaaguagagcaa

SEQ ID NO: 2571473 - RNA, 19 nt, Homo sapiens
  misc_RNA (1)...(19): siRNA sense strand
gaagaauaugcaagagaaa

SEQ ID NO: 2571474 - RNA, 19 nt, Homo sapiens
  misc_RNA (1)...(19): siRNA sense strand
aauuacagcuccagggaaa

SEQ ID NO: 2571475 - RNA, 19 nt, Homo sapiens
  misc_RNA (1)...(19): siRNA sense strand
gagaaguggaagaagauaa

SEQ ID NO: 2571476 - RNA, 19 nt, Homo sapiens
  misc_RNA (1)...(19): siRNA sense strand
cugaaagagaagaagaaua

SEQ ID NO: 2571477 - RNA, 19 nt, Homo sapiens
  misc_RNA (1)...(19): siRNA sense strand
uugaaguggcagagagaaa

SEQ ID NO: 2571478 - RNA, 19 nt, Homo sapiens
  misc_RNA (1)...(19): siRNA sense strand
caacaaagcaggaugguga

SEQ ID NO: 2571479 - RNA, 19 nt, Homo sapiens
  misc_RNA (1)...(19): siRNA sense strand
agaagagauuggagaagaa

SEQ ID NO: 2571480 - RNA, 19 nt, Homo sapiens
  misc_RNA (1)...(19): siRNA sense strand
ucaagaagaaagagacaaa

SEQ ID NO: 2571481 - RNA, 19 nt, Homo sapiens
  misc_RNA (1)...(19): siRNA sense strand
agacaauaucugagaaaga

SEQ ID NO: 2571482 - RNA, 19 nt, Homo sapiens
  misc_RNA (1)...(19): siRNA sense strand
agcaagaaauggaggaaau

SEQ ID NO: 2571483 - RNA, 19 nt, Homo sapiens
  misc_RNA (1)...(19): siRNA sense strand
gcaggugguccgagagaaa

SEQ ID NO: 2571484 - RNA, 19 nt, Homo sapiens
  misc_RNA (1)...(19): siRNA sense strand
ugaaacagauggaggguga

SEQ ID NO: 2571485 - RNA, 19 nt, Homo sapiens
  misc_RNA (1)...(19): siRNA sense strand
gggaauccauagacggaaa

SEQ ID NO: 2571486 - RNA, 19 nt, Homo sapiens
  misc_RNA (1)...(19): siRNA sense strand
ggaugaagaucuugagcga

SEQ ID NO: 2571487 - RNA, 19 nt, Homo sapiens
  misc_RNA (1)...(19): siRNA sense strand
agguaaagcaacuggaaau

SEQ ID NO: 2571488 - RNA, 19 nt, Homo sapiens
  misc_RNA (1)...(19): siRNA sense strand
aagcagaaauggaagagaa

SEQ ID NO: 2571489 - RNA, 19 nt, Homo sapiens
  misc_RNA (1)...(19): siRNA sense strand
agauggaagcugagcauaa

SEQ ID NO: 2571490 - RNA, 19 nt, Homo sapiens
  misc_RNA (1)...(19): siRNA sense strand
ggaaaugaaccuugcagaa

SEQ ID NO: 2571491 - RNA, 19 nt, Homo sapiens
  misc_RNA (1)...(19): siRNA sense strand
agagacaauuggagagauu

SEQ ID NO: 2571492 - RNA, 19 nt, Homo sapiens
  misc_RNA (1)...(19): siRNA sense strand
cagcugaaguacagaguuu

SEQ ID NO: 2571493 - RNA, 19 nt, Homo sapiens
  misc_RNA (1)...(19): siRNA sense strand
augcagggauaaugagaaa

SEQ ID NO: 2571494 - RNA, 19 nt, Homo sapiens
  misc_RNA (1)...(19): siRNA sense strand
agaugaagcucuacaggaa

SEQ ID NO: 2571495 - RNA, 19 nt, Homo sapiens
  misc_RNA (1)...(19): siRNA sense strand
gggaggagcuaaagcaaca

SEQ ID NO: 2571496 - RNA, 19 nt, Homo sapiens
  misc_RNA (1)...(19): siRNA sense strand
aggaagagauggaaauaga

SEQ ID NO: 2571497 - RNA, 19 nt, Homo sapiens
  misc_RNA (1)...(19): siRNA sense strand
acagaaggaacuugaaaua

SEQ ID NO: 2571498 - RNA, 19 nt, Homo sapiens
  misc_RNA (1)...(19): siRNA sense strand
cuaagaaaugggagaggaa

SEQ ID NO: 2571499 - RNA, 19 nt, Homo sapiens
  misc_RNA (1)...(19): siRNA sense strand
aggaaaacauucagcaaaa

SEQ ID NO: 2571500 - RNA, 19 nt, Homo sapiens
  misc_RNA (1)...(19): siRNA sense strand
gaugagaaagcuaaggaaa

SEQ ID NO: 2571501 - RNA, 19 nt, Homo sapiens
  misc_RNA (1)...(19): siRNA sense strand
gauucaaagcaaagaagaa

SEQ ID NO: 2571502 - RNA, 19 nt, Homo sapiens
  misc_RNA (1)...(19): siRNA sense strand
gcaaaggaagcuugaggaa

SEQ ID NO: 2571503 - RNA, 19 nt, Homo sapiens
  misc_RNA (1)...(19): siRNA sense strand
guuuagaaaucgagagucu

SEQ ID NO: 2571504 - RNA, 19 nt, Homo sapiens
  misc_RNA (1)...(19): siRNA sense strand
aauacaaggugcucagaaa

SEQ ID NO: 2571505 - RNA, 19 nt, Homo sapiens
  misc_RNA (1)...(19): siRNA sense strand
agaaagaaguggaacuaca

SEQ ID NO: 2571506 - RNA, 19 nt, Homo sapiens
  misc_RNA (1)...(19): siRNA sense strand
gaaaggaauauuuggagaa

SEQ ID NO: 2571507 - RNA, 19 nt, Homo sapiens
  misc_RNA (1)...(19): siRNA sense strand
gcaaaauaguagagaucau

SEQ ID NO: 2571508 - RNA, 19 nt, Homo sapiens
  misc_RNA (1)...(19): siRNA sense strand
gaaaaugagcagagaaaga

SEQ ID NO: 2571509 - RNA, 19 nt, Homo sapiens
  misc_RNA (1)...(19): siRNA sense strand
aggaagaagacguuagcua

SEQ ID NO: 2571510 - RNA, 19 nt, Homo sapiens
  misc_RNA (1)...(19): siRNA sense strand
aagaaaaugagcagagaaa

SEQ ID NO: 2571511 - RNA, 19 nt, Homo sapiens
  misc_RNA (1)...(19): siRNA sense strand
ggaaggauuuggaagaaaa

SEQ ID NO: 2571512 - RNA, 19 nt, Homo sapiens
  misc_RNA (1)...(19): siRNA sense strand
aggugagacugaagagcaa

SEQ ID NO: 2571513 - RNA, 19 nt, Homo sapiens
  misc_RNA (1)...(19): siRNA sense strand
agaaagaugauuuggaaga

SEQ ID NO: 2571514 - RNA, 19 nt, Homo sapiens
  misc_RNA (1)...(19): siRNA sense strand
aggaggaagaggagaauau

SEQ ID NO: 2571515 - RNA, 19 nt, Homo sapiens
  misc_RNA (1)...(19): siRNA sense strand
gaagaaaagcugaaggaau

SEQ ID NO: 2571516 - RNA, 19 nt, Homo sapiens
  misc_RNA (1)...(19): siRNA sense strand
caagaagguaggugaaauu

SEQ ID NO: 2571517 - RNA, 19 nt, Homo sapiens
  misc_RNA (1)...(19): siRNA sense strand
gggauaaugagaaaugaaa

SEQ ID NO: 2571518 - RNA, 19 nt, Homo sapiens
  misc_RNA (1)...(19): siRNA sense strand
agaauggaguucacagaaa

SEQ ID NO: 2571519 - RNA, 19 nt, Homo sapiens
  misc_RNA (1)...(19): siRNA sense strand
ggacaagauguucuagaaa

SEQ ID NO: 2571520 - RNA, 19 nt, Homo sapiens
  misc_RNA (1)...(19): siRNA sense strand
ggaaaugaaagaagcucaa

SEQ ID NO: 2571521 - RNA, 19 nt, Homo sapiens
  misc_RNA (1)...(19): siRNA sense strand
gugccaagaaauagaaauu

SEQ ID NO: 2571522 - RNA, 19 nt, Homo sapiens
  misc_RNA (1)...(19): siRNA sense strand
aaauagaggcugagaaagu

SEQ ID NO: 2571523 - RNA, 19 nt, Homo sapiens
  misc_RNA (1)...(19): siRNA sense strand
cugagaaaguagaguuaga

SEQ ID NO: 2571524 - RNA, 19 nt, Homo sapiens
  misc_RNA (1)...(19): siRNA sense strand
agacagagauaauagaaca

SEQ ID NO: 2571525 - RNA, 19 nt, Homo sapiens
  misc_RNA (1)...(19): siRNA sense strand
cgaaaggaauauuuggaga

SEQ ID NO: 2571526 - RNA, 19 nt, Homo sapiens
  misc_RNA (1)...(19): siRNA sense strand
gaacaguaccuuauggcua

SEQ ID NO: 2571527 - RNA, 19 nt, Homo sapiens
  misc_RNA (1)...(19): siRNA sense strand
caaacaagaaggagacaga

SEQ ID NO: 2571528 - RNA, 19 nt, Homo sapiens
  misc_RNA (1)...(19): siRNA sense strand
gauuagaggaggagaagca

SEQ ID NO: 2571529 - RNA, 19 nt, Homo sapiens
  misc_RNA (1)...(19): siRNA sense strand
agacagagguccagcuuca

SEQ ID NO: 2571530 - RNA, 19 nt, Homo sapiens
  misc_RNA (1)...(19): siRNA sense strand
gcagagaauaauaagcuua

SEQ ID NO: 2571531 - RNA, 19 nt, Homo sapiens
  misc_RNA (1)...(19): siRNA sense strand
uugcagaacuggaagaaga

SEQ ID NO: 2571532 - RNA, 19 nt, Homo sapiens
  misc_RNA (1)...(19): siRNA sense strand
gagaaaugaaacugaaaca

SEQ ID NO: 2571533 - RNA, 19 nt, Homo sapiens
  misc_RNA (1)...(19): siRNA sense strand
cagaaagagaggaguccaa

SEQ ID NO: 2571534 - RNA, 19 nt, Homo sapiens
  misc_RNA (1)...(19): siRNA sense strand
agauggagggugagggaau

SEQ ID NO: 2571535 - RNA, 19 nt, Homo sapiens
  misc_RNA (1)...(19): siRNA sense strand
agaaaaugguucagcuuaa

SEQ ID NO: 2571536 - RNA, 19 nt, Homo sapiens
  misc_RNA (1)...(19): siRNA sense strand
gagcaaagcaacaaauaca

SEQ ID NO: 2571537 - RNA, 19 nt, Homo sapiens
  misc_RNA (1)...(19): siRNA sense strand
agaaagaacccggaaauaa

SEQ ID NO: 2571538 - RNA, 19 nt, Homo sapiens
  misc_RNA (1)...(19): siRNA sense strand
augcgaaagaacagggaaa

SEQ ID NO: 2571539 - RNA, 19 nt, Homo sapiens
  misc_RNA (1)...(19): siRNA sense strand
gagaaguauaucagagaau

SEQ ID NO: 2571540 - RNA, 19 nt, Homo sapiens
  misc_RNA (1)...(19): siRNA sense strand
ggauagaagaagaaaacaa

SEQ ID NO: 2571541 - RNA, 19 nt, Homo sapiens
  misc_RNA (1)...(19): siRNA sense strand
caguagaagaugacgguga

SEQ ID NO: 2571542 - RNA, 19 nt, Homo sapiens
  misc_RNA (1)...(19): siRNA sense strand
gaugaaaccagcagggcuu

SEQ ID NO: 2571543 - RNA, 19 nt, Homo sapiens
  misc_RNA (1)...(19): siRNA sense strand
agguguagaaagaacaaua

SEQ ID NO: 2571544 - RNA, 19 nt, Homo sapiens
  misc_RNA (1)...(19): siRNA sense strand
ggccagaaaagcagaguua

SEQ ID NO: 2571545 - RNA, 19 nt, Homo sapiens
  misc_RNA (1)...(19): siRNA sense strand
gcgaaagaacagggaaaga

SEQ ID NO: 2571546 - RNA, 19 nt, Homo sapiens
  misc_RNA (1)...(19): siRNA sense strand
aguaggacgugcuggguga

SEQ ID NO: 2571547 - RNA, 19 nt, Homo sapiens
  misc_RNA (1)...(19): siRNA sense strand
ggacucgcuuggaggaaaa

SEQ ID NO: 2571548 - RNA, 19 nt, Homo sapiens
  misc_RNA (1)...(19): siRNA sense strand
agaaagaacaauagaagac

SEQ ID NO: 2571549 - RNA, 19 nt, Homo sapiens
  misc_RNA (1)...(19): siRNA sense strand
gaacaauagaagaccacga

SEQ ID NO: 2571550 - RNA, 19 nt, Homo sapiens
  misc_RNA (1)...(19): siRNA sense strand
cagcagaccuauuucccaa

SEQ ID NO: 2571551 - RNA, 19 nt, Homo sapiens
  misc_RNA (1)...(19): siRNA sense strand
caauagaagaccacgaacu

SEQ ID NO: 2571552 - RNA, 19 nt, Homo sapiens
  misc_RNA (1)...(19): siRNA sense strand
aaguauacagugaagauga

SEQ ID NO: 2571553 - RNA, 19 nt, Homo sapiens
  misc_RNA (1)...(19): siRNA sense strand
acauuauugugcuaggauu

SEQ ID NO: 2571554 - RNA, 19 nt, Homo sapiens
  misc_RNA (1)...(19): siRNA sense strand
acauagguguagaaagaac

SEQ ID NO: 2571555 - RNA, 19 nt, Homo sapiens
  misc_RNA (1)...(19): siRNA sense strand
gauuauucagcaaggacuu

SEQ ID NO: 2571556 - RNA, 19 nt, Homo sapiens
  misc_RNA (1)...(19): siRNA sense strand
gugaaauguuccacacacu

SEQ ID NO: 2571557 - RNA, 19 nt, Homo sapiens
  misc_RNA (1)...(19): siRNA sense strand
ggggauagaagaagaaaac

SEQ ID NO: 2571558 - RNA, 19 nt, Homo sapiens
  misc_RNA (1)...(19): siRNA sense strand
agugaaagguaaagggaga

SEQ ID NO: 2571559 - RNA, 19 nt, Homo sapiens
  misc_RNA (1)...(19): siRNA sense strand
cugcaaaggaagugacgaa

SEQ ID NO: 2571560 - RNA, 19 nt, Homo sapiens
  misc_RNA (1)...(19): siRNA sense strand
gggcauggagagagaccaa

SEQ ID NO: 2571561 - RNA, 19 nt, Homo sapiens
  misc_RNA (1)...(19): siRNA sense strand
gauggaaagucaugggcuu

SEQ ID NO: 2571562 - RNA, 19 nt, Homo sapiens
  misc_RNA (1)...(19): siRNA sense strand
uagcagauguuguaggaga

SEQ ID NO: 2571563 - RNA, 19 nt, Homo sapiens
  misc_RNA (1)...(19): siRNA sense strand
ccugaagacacgaagagaa

SEQ ID NO: 2571564 - RNA, 19 nt, Homo sapiens
  misc_RNA (1)...(19): siRNA sense strand
aguagaaacaauaggagau

SEQ ID NO: 2571565 - RNA, 19 nt, Homo sapiens
  misc_RNA (1)...(19): siRNA sense strand
augaagaaguggagaggac

SEQ ID NO: 2571566 - RNA, 19 nt, Homo sapiens
  misc_RNA (1)...(19): siRNA sense strand
ggacagggaagaaggagca

SEQ ID NO: 2571567 - RNA, 19 nt, Homo sapiens
  misc_RNA (1)...(19): siRNA sense strand
ucauugaggcuguggccaa

SEQ ID NO: 2571568 - RNA, 19 nt, Homo sapiens
  misc_RNA (1)...(19): siRNA sense strand
cacaggaagaugagaaaga

SEQ ID NO: 2571569 - RNA, 19 nt, Homo sapiens
  misc_RNA (1)...(19): siRNA sense strand
caauuuauccugagagacu

SEQ ID NO: 2571570 - RNA, 19 nt, Homo sapiens
  misc_RNA (1)...(19): siRNA sense strand
ggauguugugagaagcaua

SEQ ID NO: 2571571 - RNA, 19 nt, Homo sapiens
  misc_RNA (1)...(19): siRNA sense strand
ccacauuguauucgaugaa

SEQ ID NO: 2571572 - RNA, 19 nt, Homo sapiens
  misc_RNA (1)...(19): siRNA sense strand
ccucaagaugaaggagaaa

SEQ ID NO: 2571573 - RNA, 19 nt, Homo sapiens
  misc_RNA (1)...(19): siRNA sense strand
agagaggagcagaugggaa

SEQ ID NO: 2571574 - RNA, 19 nt, Homo sapiens
  misc_RNA (1)...(19): siRNA sense strand
cuccauuacuacucggaua

SEQ ID NO: 2571575 - RNA, 19 nt, Homo sapiens
  misc_RNA (1)...(19): siRNA sense strand
cagaaggcucacaggaaga

SEQ ID NO: 2571576 - RNA, 19 nt, Homo sapiens
  misc_RNA (1)...(19): siRNA sense strand
gguaaagggagaaugacca

SEQ ID NO: 2571577 - RNA, 19 nt, Homo sapiens
  misc_RNA (1)...(19): siRNA sense strand
gggucaacacagaaagcau

SEQ ID NO: 2571578 - RNA, 19 nt, Homo sapiens
  misc_RNA (1)...(19): siRNA sense strand
aaguagaaacaauaggaga

SEQ ID NO: 2571579 - RNA, 19 nt, Homo sapiens
  misc_RNA (1)...(19): siRNA sense strand
gagacaagaugccacggua

SEQ ID NO: 2571580 - RNA, 19 nt, Homo sapiens
  misc_RNA (1)...(19): siRNA sense strand
uggaaaggaagaaggagga

SEQ ID NO: 2571581 - RNA, 19 nt, Homo sapiens
  misc_RNA (1)...(19): siRNA sense strand
gaacacagcuucuaggaug

SEQ ID NO: 2571582 - RNA, 19 nt, Homo sapiens
  misc_RNA (1)...(19): siRNA sense strand
cuugaaugccacagaggau

SEQ ID NO: 2571583 - RNA, 19 nt, Homo sapiens
  misc_RNA (1)...(19): siRNA sense strand
gaagagaaaugaugccugu

SEQ ID NO: 2571584 - RNA, 19 nt, Homo sapiens
  misc_RNA (1)...(19): siRNA sense strand
gcuccagggcucaguucaa

SEQ ID NO: 2571585 - RNA, 19 nt, Homo sapiens
  misc_RNA (1)...(19): siRNA sense strand
aaauagugaacgugcugaa

SEQ ID NO: 2571586 - RNA, 19 nt, Homo sapiens
  misc_RNA (1)...(19): siRNA sense strand
gugaaagguaaagggagaa

SEQ ID NO: 2571587 - RNA, 19 nt, Homo sapiens
  misc_RNA (1)...(19): siRNA sense strand
gcauggagagagaccaaga

SEQ ID NO: 2571588 - RNA, 19 nt, Homo sapiens
  misc_RNA (1)...(19): siRNA sense strand
ggaagaacucaauaugcau

SEQ ID NO: 2571589 - RNA, 19 nt, Homo sapiens
  misc_RNA (1)...(19): siRNA sense strand
gaauccuguuacuggagaa

SEQ ID NO: 2571590 - RNA, 19 nt, Homo sapiens
  misc_RNA (1)...(19): siRNA sense strand
ggggugaaauugaagugaa

SEQ ID NO: 2571591 - RNA, 19 nt, Homo sapiens
  misc_RNA (1)...(19): siRNA sense strand
ggaggaaaucucauggagu

SEQ ID NO: 2571592 - RNA, 19 nt, Homo sapiens
  misc_RNA (1)...(19): siRNA sense strand
gugaagcaagccagaguga

SEQ ID NO: 2571593 - RNA, 19 nt, Homo sapiens
  misc_RNA (1)...(19): siRNA sense strand
agaauauucaacuggauga

SEQ ID NO: 2571594 - RNA, 19 nt, Homo sapiens
  misc_RNA (1)...(19): siRNA sense strand
agaagaaaacagagaccuu

SEQ ID NO: 2571595 - RNA, 19 nt, Homo sapiens
  misc_RNA (1)...(19): siRNA sense strand
gucagggcauggagagaga

SEQ ID NO: 2571596 - RNA, 19 nt, Homo sapiens
  misc_RNA (1)...(19): siRNA sense strand
uggacauucuugacaugaa

SEQ ID NO: 2571597 - RNA, 19 nt, Homo sapiens
  misc_RNA (1)...(19): siRNA sense strand
ggauagaaguggucugugc

SEQ ID NO: 2571598 - RNA, 19 nt, Homo sapiens
  misc_RNA (1)...(19): siRNA sense strand
cauugaggcuguggccaaa

SEQ ID NO: 2571599 - RNA, 19 nt, Homo sapiens
  misc_RNA (1)...(19): siRNA sense strand
ugcccaaacacguggccaa

SEQ ID NO: 2571600 - RNA, 19 nt, Homo sapiens
  misc_RNA (1)...(19): siRNA sense strand
gguggcugcaggagaauuu

SEQ ID NO: 2571601 - RNA, 19 nt, Homo sapiens
  misc_RNA (1)...(19): siRNA sense strand
aacaauaggagaugcuuau

SEQ ID NO: 2571602 - RNA, 19 nt, Homo sapiens
  misc_RNA (1)...(19): siRNA sense strand
cucauggaguuuauugaaa

SEQ ID NO: 2571603 - RNA, 19 nt, Homo sapiens
  misc_RNA (1)...(19): siRNA sense strand
ugacaggaugcuacggaca

SEQ ID NO: 2571604 - RNA, 19 nt, Homo sapiens
  misc_RNA (1)...(19): siRNA sense strand
gguacugcuuguuugguga

SEQ ID NO: 2571605 - RNA, 19 nt, Homo sapiens
  misc_RNA (1)...(19): siRNA sense strand
acggacacugggaggaaau

SEQ ID NO: 2571606 - RNA, 19 nt, Homo sapiens
  misc_RNA (1)...(19): siRNA sense strand
gguaauaaccggaggagcc

SEQ ID NO: 2571607 - RNA, 19 nt, Homo sapiens
  misc_RNA (1)...(19): siRNA sense strand
ucccagagaaagugugcaa

SEQ ID NO: 2571608 - RNA, 19 nt, Homo sapiens
  misc_RNA (1)...(19): siRNA sense strand
cugagaaggaugugcaaac

SEQ ID NO: 2571609 - RNA, 19 nt, Homo sapiens
  misc_RNA (1)...(19): siRNA sense strand
gggcaagaacaguacaaaa

SEQ ID NO: 2571610 - RNA, 19 nt, Homo sapiens
  misc_RNA (1)...(19): siRNA sense strand
gggacagagcaacaggaaa

SEQ ID NO: 2571611 - RNA, 19 nt, Homo sapiens
  misc_RNA (1)...(19): siRNA sense strand
agaucgguuuggaggacua

SEQ ID NO: 2571612 - RNA, 19 nt, Homo sapiens
  misc_RNA (1)...(19): siRNA sense strand
guggcaaaugauugagcaa

SEQ ID NO: 2571613 - RNA, 19 nt, Homo sapiens
  misc_RNA (1)...(19): siRNA sense strand
accacaaggcucugggcaa

SEQ ID NO: 2571614 - RNA, 19 nt, Homo sapiens
  misc_RNA (1)...(19): siRNA sense strand
guuuauucuugcagguuca

SEQ ID NO: 2571615 - RNA, 19 nt, Homo sapiens
  misc_RNA (1)...(19): siRNA sense strand
ugacaaucuacuucaggaa

SEQ ID NO: 2571616 - RNA, 19 nt, Homo sapiens
  misc_RNA (1)...(19): siRNA sense strand
ggcaagaacaguacaaaau

SEQ ID NO: 2571617 - RNA, 19 nt, Homo sapiens
  misc_RNA (1)...(19): siRNA sense strand
acaaaaugaacgugacaga

SEQ ID NO: 2571618 - RNA, 19 nt, Homo sapiens
  misc_RNA (1)...(19): siRNA sense strand
ccauuaacacacuggcaca

SEQ ID NO: 2571619 - RNA, 19 nt, Homo sapiens
  misc_RNA (1)...(19): siRNA sense strand
ugacaaggacaaaaggaau

SEQ ID NO: 2571620 - RNA, 19 nt, Homo sapiens
  misc_RNA (1)...(19): siRNA sense strand
guuuggaggacuacaucaa

SEQ ID NO: 2571621 - RNA, 19 nt, Homo sapiens
  misc_RNA (1)...(19): siRNA sense strand
gugaugggugcaaggguuu

SEQ ID NO: 2571622 - RNA, 19 nt, Homo sapiens
  misc_RNA (1)...(19): siRNA sense strand
gcaaaagggcuaagcgauc

SEQ ID NO: 2571623 - RNA, 19 nt, Homo sapiens
  misc_RNA (1)...(19): siRNA sense strand
uggcaaaugauugagcaaa

SEQ ID NO: 2571624 - RNA, 19 nt, Homo sapiens
  misc_RNA (1)...(19): siRNA sense strand
caacacugguucaugcaga

SEQ ID NO: 2571625 - RNA, 19 nt, Homo sapiens
  misc_RNA (1)...(19): siRNA sense strand
gcacauuugauggcagcaa

SEQ ID NO: 2571626 - RNA, 19 nt, Homo sapiens
  misc_RNA (1)...(19): siRNA sense strand
agauuagccguguggccaa

SEQ ID NO: 2571627 - RNA, 19 nt, Homo sapiens
  misc_RNA (1)...(19): siRNA sense strand
aguacaaaauagcugcaaa

SEQ ID NO: 2571628 - RNA, 19 nt, Homo sapiens
  misc_RNA (1)...(19): siRNA sense strand
gguagaaauggaagaacaa

SEQ ID NO: 2571629 - RNA, 19 nt, Homo sapiens
  misc_RNA (1)...(19): siRNA sense strand
ugguaguguuucagauaua

SEQ ID NO: 2571630 - RNA, 19 nt, Homo sapiens
  misc_RNA (1)...(19): siRNA sense strand
ugguagaaauggaagaaca

SEQ ID NO: 2571631 - RNA, 19 nt, Homo sapiens
  misc_RNA (1)...(19): siRNA sense strand
agauugaccuggagagcau

SEQ ID NO: 2571632 - RNA, 19 nt, Homo sapiens
  misc_RNA (1)...(19): siRNA sense strand
agccuuagguagaaauaaa

SEQ ID NO: 2571633 - RNA, 19 nt, Homo sapiens
  misc_RNA (1)...(19): siRNA sense strand
gauagaaaauggagauaca

SEQ ID NO: 2571634 - RNA, 19 nt, Homo sapiens
  misc_RNA (1)...(19): siRNA sense strand
acugaaacucauugacaua

SEQ ID NO: 2571635 - RNA, 19 nt, Homo sapiens
  misc_RNA (1)...(19): siRNA sense strand
agguucaaguggugggauu

SEQ ID NO: 2571636 - RNA, 19 nt, Homo sapiens
  misc_RNA (1)...(19): siRNA sense strand
gggcagacuggaaguggaa

SEQ ID NO: 2571637 - RNA, 19 nt, Homo sapiens
  misc_RNA (1)...(19): siRNA sense strand
gcaaagagauugaccugga

SEQ ID NO: 2571638 - RNA, 19 nt, Homo sapiens
  misc_RNA (1)...(19): siRNA sense strand
guguaugaucagagacuuu

SEQ ID NO: 2571639 - RNA, 19 nt, Homo sapiens
  misc_RNA (1)...(19): siRNA sense strand
gauugaugacuuagagaca

SEQ ID NO: 2571640 - RNA, 19 nt, Homo sapiens
  misc_RNA (1)...(19): siRNA sense strand
cggucaaacaucugcaaau

SEQ ID NO: 2571641 - RNA, 19 nt, Homo sapiens
  misc_RNA (1)...(19): siRNA sense strand
gcuuaugggcagacuggaa

SEQ ID NO: 2571642 - RNA, 19 nt, Homo sapiens
  misc_RNA (1)...(19): siRNA sense strand
aggauauguguguguguaa

SEQ ID NO: 2571643 - RNA, 19 nt, Homo sapiens
  misc_RNA (1)...(19): siRNA sense strand
ucuuagaaggaaaggaaaa

SEQ ID NO: 2571644 - RNA, 19 nt, Homo sapiens
  misc_RNA (1)...(19): siRNA sense strand
aggaaaacuacauggcaaa

SEQ ID NO: 2571645 - RNA, 19 nt, Homo sapiens
  misc_RNA (1)...(19): siRNA sense strand
acuguugaauggauagaaa

SEQ ID NO: 2571646 - RNA, 19 nt, Homo sapiens
  misc_RNA (1)...(19): siRNA sense strand
gugugaaagaaguagaaaa

SEQ ID NO: 2571647 - RNA, 19 nt, Homo sapiens
  misc_RNA (1)...(19): siRNA sense strand
uguaacuguugaauggaua

SEQ ID NO: 2571648 - RNA, 19 nt, Homo sapiens
  misc_RNA (1)...(19): siRNA sense strand
cuauaagaagcuagaacuu

SEQ ID NO: 2571649 - RNA, 19 nt, Homo sapiens
  misc_RNA (1)...(19): siRNA sense strand
uguaaagaaucgacggacu

SEQ ID NO: 2571650 - RNA, 19 nt, Homo sapiens
  misc_RNA (1)...(19): siRNA sense strand
augaaaugguuuacagguu

SEQ ID NO: 2571651 - RNA, 19 nt, Homo sapiens
  misc_RNA (1)...(19): siRNA sense strand
acagaaugguaguguuuca

SEQ ID NO: 2571652 - RNA, 19 nt, Homo sapiens
  misc_RNA (1)...(19): siRNA sense strand
augcaguguuucagauuau

SEQ ID NO: 2571653 - RNA, 19 nt, Homo sapiens
  misc_RNA (1)...(19): siRNA sense strand
agauaugcaaauaggguca

SEQ ID NO: 2571654 - RNA, 19 nt, Homo sapiens
  misc_RNA (1)...(19): siRNA sense strand
ccuuguuccugaugaagaa

SEQ ID NO: 2571655 - RNA, 19 nt, Homo sapiens
  misc_RNA (1)...(19): siRNA sense strand
gcagacuggaaguggaaaa

SEQ ID NO: 2571656 - RNA, 19 nt, Homo sapiens
  misc_RNA (1)...(19): siRNA sense strand
agaauugacuguagaucca

SEQ ID NO: 2571657 - RNA, 19 nt, Homo sapiens
  misc_RNA (1)...(19): siRNA sense strand
aaggaaaacuacauggcaa

SEQ ID NO: 2571658 - RNA, 19 nt, Homo sapiens
  misc_RNA (1)...(19): siRNA sense strand
uggugauguucguccaaua

SEQ ID NO: 2571659 - RNA, 19 nt, Homo sapiens
  misc_RNA (1)...(19): siRNA sense strand
cagccaaaguaaacaaaau

SEQ ID NO: 2571660 - RNA, 19 nt, Homo sapiens
  misc_RNA (1)...(19): siRNA sense strand
gaucagagacuuuagagga

SEQ ID NO: 2571661 - RNA, 19 nt, Homo sapiens
  misc_RNA (1)...(19): siRNA sense strand
ugaagcuauucuugagcaa

SEQ ID NO: 2571662 - RNA, 19 nt, Homo sapiens
  misc_RNA (1)...(19): siRNA sense strand
aagcuauucuugagcaaaa

SEQ ID NO: 2571663 - RNA, 19 nt, Homo sapiens
  misc_RNA (1)...(19): siRNA sense strand
aucagagacuuuagaggaa

SEQ ID NO: 2571664 - RNA, 19 nt, Homo sapiens
  misc_RNA (1)...(19): siRNA sense strand
ugaaagaggagcugauacu

SEQ ID NO: 2571665 - RNA, 19 nt, Homo sapiens
  misc_RNA (1)...(19): siRNA sense strand
gguucaaguggugggauua

SEQ ID NO: 2571666 - RNA, 19 nt, Homo sapiens
  misc_RNA (1)...(19): siRNA sense strand
ucauugauuuggcuggaaa

SEQ ID NO: 2571667 - RNA, 19 nt, Homo sapiens
  misc_RNA (1)...(19): siRNA sense strand
uuaacugaacugcgggaua

SEQ ID NO: 2571668 - RNA, 19 nt, Homo sapiens
  misc_RNA (1)...(19): siRNA sense strand
guacaugaaccaaaacaaa

SEQ ID NO: 2571669 - RNA, 19 nt, Homo sapiens
  misc_RNA (1)...(19): siRNA sense strand
uacaaaaggcaaagagauu

SEQ ID NO: 2571670 - RNA, 19 nt, Homo sapiens
  misc_RNA (1)...(19): siRNA sense strand
gaguucuagaagauggaaa

SEQ ID NO: 2571671 - RNA, 19 nt, Homo sapiens
  misc_RNA (1)...(19): siRNA sense strand
gacugaagaaguagauuau

SEQ ID NO: 2571672 - RNA, 19 nt, Homo sapiens
  misc_RNA (1)...(19): siRNA sense strand
aagagauaauagagugguu

SEQ ID NO: 2571673 - RNA, 19 nt, Homo sapiens
  misc_RNA (1)...(19): siRNA sense strand
acaaaugguagaaauggaa

SEQ ID NO: 2571674 - RNA, 19 nt, Homo sapiens
  misc_RNA (1)...(19): siRNA sense strand
aggaaagaaccaagauugu

SEQ ID NO: 2571675 - RNA, 19 nt, Homo sapiens
  misc_RNA (1)...(19): siRNA sense strand
uugaaggugcugaaauuaa

SEQ ID NO: 2571676 - RNA, 19 nt, Homo sapiens
  misc_RNA (1)...(19): siRNA sense strand
cgggauaaagugaaaucuu

SEQ ID NO: 2571677 - RNA, 19 nt, Homo sapiens
  misc_RNA (1)...(19): siRNA sense strand
ugaccuuguuccugaugaa

SEQ ID NO: 2571678 - RNA, 19 nt, Homo sapiens
  misc_RNA (1)...(19): siRNA sense strand
uugaagauguacugaaacu

SEQ ID NO: 2571679 - RNA, 19 nt, Homo sapiens
  misc_RNA (1)...(19): siRNA sense strand
acugcgggauaaagugaaa

SEQ ID NO: 2571680 - RNA, 19 nt, Homo sapiens
  misc_RNA (1)...(19): siRNA sense strand
aggaggaacaagccagcaa

SEQ ID NO: 2571681 - RNA, 19 nt, Homo sapiens
  misc_RNA (1)...(19): siRNA sense strand
aguucuagaagauggaaaa

SEQ ID NO: 2571682 - RNA, 19 nt, Homo sapiens
  misc_RNA (1)...(19): siRNA sense strand
aaaugaaagaggagcugau

SEQ ID NO: 2571683 - RNA, 19 nt, Homo sapiens
  misc_RNA (1)...(19): siRNA sense strand
ccacaaucucuccaggaau

SEQ ID NO: 2571684 - RNA, 19 nt, Homo sapiens
  misc_RNA (1)...(19): siRNA sense strand
uaauagagugguugguuca

SEQ ID NO: 2571685 - RNA, 19 nt, Homo sapiens
  misc_RNA (1)...(19): siRNA sense strand
uugaugacuuagagacaca

SEQ ID NO: 2571686 - RNA, 19 nt, Homo sapiens
  misc_RNA (1)...(19): siRNA sense strand
uaacaagguaccuagaaaa

SEQ ID NO: 2571687 - RNA, 19 nt, Homo sapiens
  misc_RNA (1)...(19): siRNA sense strand
cacaaaugguagaaaugga

SEQ ID NO: 2571688 - RNA, 19 nt, Homo sapiens
  misc_RNA (1)...(19): siRNA sense strand
uugcagaacauccggucaa

SEQ ID NO: 2571689 - RNA, 19 nt, Homo sapiens
  misc_RNA (1)...(19): siRNA sense strand
gguagaaauaaaccucaua

SEQ ID NO: 2571690 - RNA, 19 nt, Homo sapiens
  misc_RNA (1)...(19): siRNA sense strand
gcaagauagacgagaacaa

SEQ ID NO: 2571691 - RNA, 19 nt, Homo sapiens
  misc_RNA (1)...(19): siRNA sense strand
cuaaagaagaagugaaaga

SEQ ID NO: 2571692 - RNA, 19 nt, Homo sapiens
  misc_RNA (1)...(19): siRNA sense strand
uggaagagacaguggcaaa

SEQ ID NO: 2571693 - RNA, 19 nt, Homo sapiens
  misc_RNA (1)...(19): siRNA sense strand
gcuucgagcacaagagaaa

SEQ ID NO: 2571694 - RNA, 19 nt, Homo sapiens
  misc_RNA (1)...(19): siRNA sense strand
cuucagaaacuuaaggaaa

SEQ ID NO: 2571695 - RNA, 19 nt, Homo sapiens
  misc_RNA (1)...(19): siRNA sense strand
cugaaagaagcuaaagaaa

SEQ ID NO: 2571696 - RNA, 19 nt, Homo sapiens
  misc_RNA (1)...(19): siRNA sense strand
gaacauagcucuaggaguc

SEQ ID NO: 2571697 - RNA, 19 nt, Homo sapiens
  misc_RNA (1)...(19): siRNA sense strand
ggaaaagagcagaaaacua

SEQ ID NO: 2571698 - RNA, 19 nt, Homo sapiens
  misc_RNA (1)...(19): siRNA sense strand
auccagagccauagagaaa

SEQ ID NO: 2571699 - RNA, 19 nt, Homo sapiens
  misc_RNA (1)...(19): siRNA sense strand
gcgagguggaggaggcaaa

SEQ ID NO: 2571700 - RNA, 19 nt, Homo sapiens
  misc_RNA (1)...(19): siRNA sense strand
aagaagaaagugugaagaa

SEQ ID NO: 2571701 - RNA, 19 nt, Homo sapiens
  misc_RNA (1)...(19): siRNA sense strand
uaggaauugcugugggaaa

SEQ ID NO: 2571702 - RNA, 19 nt, Homo sapiens
  misc_RNA (1)...(19): siRNA sense strand
ggguaaacuucaugaucca

SEQ ID NO: 2571703 - RNA, 19 nt, Homo sapiens
  misc_RNA (1)...(19): siRNA sense strand
cucuaaagaagaagugaaa

SEQ ID NO: 2571704 - RNA, 19 nt, Homo sapiens
  misc_RNA (1)...(19): siRNA sense strand
cucaagagcaaguguauaa

SEQ ID NO: 2571705 - RNA, 19 nt, Homo sapiens
  misc_RNA (1)...(19): siRNA sense strand
agauguacuugaaggauau

SEQ ID NO: 2571706 - RNA, 19 nt, Homo sapiens
  misc_RNA (1)...(19): siRNA sense strand
ucgccaaguuucagggaga

SEQ ID NO: 2571707 - RNA, 19 nt, Homo sapiens
  misc_RNA (1)...(19): siRNA sense strand
gugaagaagaaauugcuaa

SEQ ID NO: 2571708 - RNA, 19 nt, Homo sapiens
  misc_RNA (1)...(19): siRNA sense strand
caugagaaguugaaagcca

SEQ ID NO: 2571709 - RNA, 19 nt, Homo sapiens
  misc_RNA (1)...(19): siRNA sense strand
aaacaagagaacacacaaa

SEQ ID NO: 2571710 - RNA, 19 nt, Homo sapiens
  misc_RNA (1)...(19): siRNA sense strand
ccagaugaaguuauggaua

SEQ ID NO: 2571711 - RNA, 19 nt, Homo sapiens
  misc_RNA (1)...(19): siRNA sense strand
aagucaacugguagagaaa

SEQ ID NO: 2571712 - RNA, 19 nt, Homo sapiens
  misc_RNA (1)...(19): siRNA sense strand
ccagaagggaucaagacaa

SEQ ID NO: 2571713 - RNA, 19 nt, Homo sapiens
  misc_RNA (1)...(19): siRNA sense strand
ccucuaaagaagaagugaa

SEQ ID NO: 2571714 - RNA, 19 nt, Homo sapiens
  misc_RNA (1)...(19): siRNA sense strand
acacaaacugagagcaaca

SEQ ID NO: 2571715 - RNA, 19 nt, Homo sapiens
  misc_RNA (1)...(19): siRNA sense strand
auaccauagaugaaggaaa

SEQ ID NO: 2571716 - RNA, 19 nt, Homo sapiens
  misc_RNA (1)...(19): siRNA sense strand
uaccauagaugaaggaaaa

SEQ ID NO: 2571717 - RNA, 19 nt, Homo sapiens
  misc_RNA (1)...(19): siRNA sense strand
uaguaaaacuggagcugaa

SEQ ID NO: 2571718 - RNA, 19 nt, Homo sapiens
  misc_RNA (1)...(19): siRNA sense strand
aggaauugcugugggaaau

SEQ ID NO: 2571719 - RNA, 19 nt, Homo sapiens
  misc_RNA (1)...(19): siRNA sense strand
cacacacaauggaggguaa

SEQ ID NO: 2571720 - RNA, 19 nt, Homo sapiens
  misc_RNA (1)...(19): siRNA sense strand
cggcaacuuuagcgaguau

SEQ ID NO: 2571721 - RNA, 19 nt, Homo sapiens
  misc_RNA (1)...(19): siRNA sense strand
aguagaagcaaaagcaaaa

SEQ ID NO: 2571722 - RNA, 19 nt, Homo sapiens
  misc_RNA (1)...(19): siRNA sense strand
guguauaaugacugugcaa

SEQ ID NO: 2571723 - RNA, 19 nt, Homo sapiens
  misc_RNA (1)...(19): siRNA sense strand
augacaaggaugaagaaau

SEQ ID NO: 2571724 - RNA, 19 nt, Homo sapiens
  misc_RNA (1)...(19): siRNA sense strand
ugaagaaauuaaccagcaa

SEQ ID NO: 2571725 - RNA, 19 nt, Homo sapiens
  misc_RNA (1)...(19): siRNA sense strand
gagaaacugaagacgcaaa

SEQ ID NO: 2571726 - RNA, 19 nt, Homo sapiens
  misc_RNA (1)...(19): siRNA sense strand
cguugcaagcaguuagaaa

SEQ ID NO: 2571727 - RNA, 19 nt, Homo sapiens
  misc_RNA (1)...(19): siRNA sense strand
ucgcaaacgcuaucagcaa

SEQ ID NO: 2571728 - RNA, 19 nt, Homo sapiens
  misc_RNA (1)...(19): siRNA sense strand
ggaucaagacaauaugcaa

SEQ ID NO: 2571729 - RNA, 19 nt, Homo sapiens
  misc_RNA (1)...(19): siRNA sense strand
guauagaugcugagcuuca

SEQ ID NO: 2571730 - RNA, 19 nt, Homo sapiens
  misc_RNA (1)...(19): siRNA sense strand
acaaaagcugaguggaaaa

SEQ ID NO: 2571731 - RNA, 19 nt, Homo sapiens
  misc_RNA (1)...(19): siRNA sense strand
cucaggaaguugaagacaa

SEQ ID NO: 2571732 - RNA, 19 nt, Homo sapiens
  misc_RNA (1)...(19): siRNA sense strand
gcuuagugaugaauugaau

SEQ ID NO: 2571733 - RNA, 19 nt, Homo sapiens
  misc_RNA (1)...(19): siRNA sense strand
gaaagugugaagaagaaau

SEQ ID NO: 2571734 - RNA, 19 nt, Homo sapiens
  misc_RNA (1)...(19): siRNA sense strand
agaugaaguagaagcaaaa

SEQ ID NO: 2571735 - RNA, 19 nt, Homo sapiens
  misc_RNA (1)...(19): siRNA sense strand
ggacaaacauccucuggga

SEQ ID NO: 2571736 - RNA, 19 nt, Homo sapiens
  misc_RNA (1)...(19): siRNA sense strand
aauaagauccugcggaaca

SEQ ID NO: 2571737 - RNA, 19 nt, Homo sapiens
  misc_RNA (1)...(19): siRNA sense strand
ccauagagaaacucaucaa

SEQ ID NO: 2571738 - RNA, 19 nt, Homo sapiens
  misc_RNA (1)...(19): siRNA sense strand
agaagaagugaaagaaguu

SEQ ID NO: 2571739 - RNA, 19 nt, Homo sapiens
  misc_RNA (1)...(19): siRNA sense strand
acuaaaagaccuugcagaa

SEQ ID NO: 2571740 - RNA, 19 nt, Homo sapiens
  misc_RNA (1)...(19): siRNA sense strand
gaacaaaagaaaagacagu

SEQ ID NO: 2571741 - RNA, 19 nt, Homo sapiens
  misc_RNA (1)...(19): siRNA sense strand
acaaacaguugguacguga

SEQ ID NO: 2571742 - RNA, 19 nt, Homo sapiens
  misc_RNA (1)...(19): siRNA sense strand
gagugaaagcuuuggaauc

SEQ ID NO: 2571743 - RNA, 19 nt, Homo sapiens
  misc_RNA (1)...(19): siRNA sense strand
ugaauugcuuagugaugaa

SEQ ID NO: 2571744 - RNA, 19 nt, Homo sapiens
  misc_RNA (1)...(19): siRNA sense strand
cguccaagccuuaugcauu

SEQ ID NO: 2571745 - RNA, 19 nt, Homo sapiens
  misc_RNA (1)...(19): siRNA sense strand
uguauguaguccagaugaa

SEQ ID NO: 2571746 - RNA, 19 nt, Homo sapiens
  misc_RNA (1)...(19): siRNA sense strand
gauuuagcugguagugaaa

SEQ ID NO: 2571747 - RNA, 19 nt, Homo sapiens
  misc_RNA (1)...(19): siRNA sense strand
aagcuuucacaguggauaa

SEQ ID NO: 2571748 - RNA, 19 nt, Homo sapiens
  misc_RNA (1)...(19): siRNA sense strand
agaagaacuugcugucaau

SEQ ID NO: 2571749 - RNA, 19 nt, Homo sapiens
  misc_RNA (1)...(19): siRNA sense strand
aguccagcuucgagcacaa

SEQ ID NO: 2571750 - RNA, 19 nt, Homo sapiens
  misc_RNA (1)...(19): siRNA sense strand
acuugaaggguuuggaaga

SEQ ID NO: 2571751 - RNA, 19 nt, Homo sapiens
  misc_RNA (1)...(19): siRNA sense strand
ggaauuagguacaaaugaa

SEQ ID NO: 2571752 - RNA, 19 nt, Homo sapiens
  misc_RNA (1)...(19): siRNA sense strand
cggagaaggcacugagauu

SEQ ID NO: 2571753 - RNA, 19 nt, Homo sapiens
  misc_RNA (1)...(19): siRNA sense strand
agaugaagucagaggucaa

SEQ ID NO: 2571754 - RNA, 19 nt, Homo sapiens
  misc_RNA (1)...(19): siRNA sense strand
cagccaaggaugaggugaa

SEQ ID NO: 2571755 - RNA, 19 nt, Homo sapiens
  misc_RNA (1)...(19): siRNA sense strand
gagaaaugaagcuggaaaa

SEQ ID NO: 2571756 - RNA, 19 nt, Homo sapiens
  misc_RNA (1)...(19): siRNA sense strand
gugccaaggaccagaagaa

SEQ ID NO: 2571757 - RNA, 19 nt, Homo sapiens
  misc_RNA (1)...(19): siRNA sense strand
aggauaaggagaaggaaca

SEQ ID NO: 2571758 - RNA, 19 nt, Homo sapiens
  misc_RNA (1)...(19): siRNA sense strand
cugaaaagcugaagcaaca

SEQ ID NO: 2571759 - RNA, 19 nt, Homo sapiens
  misc_RNA (1)...(19): siRNA sense strand
agagaaaugaagcuggaaa

SEQ ID NO: 2571760 - RNA, 19 nt, Homo sapiens
  misc_RNA (1)...(19): siRNA sense strand
gagcuaaacagguggagga

SEQ ID NO: 2571761 - RNA, 19 nt, Homo sapiens
  misc_RNA (1)...(19): siRNA sense strand
auguaauagaugaaggcaa

SEQ ID NO: 2571762 - RNA, 19 nt, Homo sapiens
  misc_RNA (1)...(19): siRNA sense strand
ggacagagagcuaagacca

SEQ ID NO: 2571763 - RNA, 19 nt, Homo sapiens
  misc_RNA (1)...(19): siRNA sense strand
gagaaggcacugagauuga

SEQ ID NO: 2571764 - RNA, 19 nt, Homo sapiens
  misc_RNA (1)...(19): siRNA sense strand
augaaagaaugcaugggaa

SEQ ID NO: 2571765 - RNA, 19 nt, Homo sapiens
  misc_RNA (1)...(19): siRNA sense strand
agaaguacgaugaggagau

SEQ ID NO: 2571766 - RNA, 19 nt, Homo sapiens
  misc_RNA (1)...(19): siRNA sense strand
acaagagaauguagagacu

SEQ ID NO: 2571767 - RNA, 19 nt, Homo sapiens
  misc_RNA (1)...(19): siRNA sense strand
cagcagaagaauggaagaa

SEQ ID NO: 2571768 - RNA, 19 nt, Homo sapiens
  misc_RNA (1)...(19): siRNA sense strand
cagacuacaugcagaacau

SEQ ID NO: 2571769 - RNA, 19 nt, Homo sapiens
  misc_RNA (1)...(19): siRNA sense strand
aagucagcuuccaggauaa

SEQ ID NO: 2571770 - RNA, 19 nt, Homo sapiens
  misc_RNA (1)...(19): siRNA sense strand
agaacugacagcagaagaa

SEQ ID NO: 2571771 - RNA, 19 nt, Homo sapiens
  misc_RNA (1)...(19): siRNA sense strand
gcagcuugggagacagaua

SEQ ID NO: 2571772 - RNA, 19 nt, Homo sapiens
  misc_RNA (1)...(19): siRNA sense strand
uagaggaccaagagagaga

SEQ ID NO: 2571773 - RNA, 19 nt, Homo sapiens
  misc_RNA (1)...(19): siRNA sense strand
ggcacgaagccaagaucaa

SEQ ID NO: 2571774 - RNA, 19 nt, Homo sapiens
  misc_RNA (1)...(19): siRNA sense strand
ggugugaacugauggaacu

SEQ ID NO: 2571775 - RNA, 19 nt, Homo sapiens
  misc_RNA (1)...(19): siRNA sense strand
ugacagacuacaugcagaa

SEQ ID NO: 2571776 - RNA, 19 nt, Homo sapiens
  misc_RNA (1)...(19): siRNA sense strand
aggaagucauggauguaau

SEQ ID NO: 2571777 - RNA, 19 nt, Homo sapiens
  misc_RNA (1)...(19): siRNA sense strand
aaauugaggagaagcagaa

SEQ ID NO: 2571778 - RNA, 19 nt, Homo sapiens
  misc_RNA (1)...(19): siRNA sense strand
ggcuguucaugaagauaaa

SEQ ID NO: 2571779 - RNA, 19 nt, Homo sapiens
  misc_RNA (1)...(19): siRNA sense strand
aauagaggaccaagagaga

SEQ ID NO: 2571780 - RNA, 19 nt, Homo sapiens
  misc_RNA (1)...(19): siRNA sense strand
cugaggaagucauggaugu

SEQ ID NO: 2571781 - RNA, 19 nt, Homo sapiens
  misc_RNA (1)...(19): siRNA sense strand
gagacuaugagaagauaca

SEQ ID NO: 2571782 - RNA, 19 nt, Homo sapiens
  misc_RNA (1)...(19): siRNA sense strand
augagaagauacaggagga

SEQ ID NO: 2571783 - RNA, 19 nt, Homo sapiens
  misc_RNA (1)...(19): siRNA sense strand
gaggaccaagagagagaaa

SEQ ID NO: 2571784 - RNA, 19 nt, Homo sapiens
  misc_RNA (1)...(19): siRNA sense strand
aggaugaggugaaagaagu

SEQ ID NO: 2571785 - RNA, 19 nt, Homo sapiens
  misc_RNA (1)...(19): siRNA sense strand
gauuuggcugggagcgaaa

SEQ ID NO: 2571786 - RNA, 19 nt, Homo sapiens
  misc_RNA (1)...(19): siRNA sense strand
aagaagagacuaugagaag

SEQ ID NO: 2571787 - RNA, 19 nt, Homo sapiens
  misc_RNA (1)...(19): siRNA sense strand
gcuuccaggauaaggagaa

SEQ ID NO: 2571788 - RNA, 19 nt, Homo sapiens
  misc_RNA (1)...(19): siRNA sense strand
augcugaagaaaugaagaa

SEQ ID NO: 2571789 - RNA, 19 nt, Homo sapiens
  misc_RNA (1)...(19): siRNA sense strand
ugaagaaggcgcuggagca

SEQ ID NO: 2571790 - RNA, 19 nt, Homo sapiens
  misc_RNA (1)...(19): siRNA sense strand
cuagagaauugcagacacu

SEQ ID NO: 2571791 - RNA, 19 nt, Homo sapiens
  misc_RNA (1)...(19): siRNA sense strand
cgccaggagcaguaaacua

SEQ ID NO: 2571792 - RNA, 19 nt, Homo sapiens
  misc_RNA (1)...(19): siRNA sense strand
gagaagaccucaaagggcu

SEQ ID NO: 2571793 - RNA, 19 nt, Homo sapiens
  misc_RNA (1)...(19): siRNA sense strand
ucaaagggcuggaggagac

SEQ ID NO: 2571794 - RNA, 19 nt, Homo sapiens
  misc_RNA (1)...(19): siRNA sense strand
aagcugugccugaggauga

SEQ ID NO: 2571795 - RNA, 19 nt, Homo sapiens
  misc_RNA (1)...(19): siRNA sense strand
ugacaaccacacagagaga

SEQ ID NO: 2571796 - RNA, 19 nt, Homo sapiens
  misc_RNA (1)...(19): siRNA sense strand
guugcaggaugcugaagaa

SEQ ID NO: 2571797 - RNA, 19 nt, Homo sapiens
  misc_RNA (1)...(19): siRNA sense strand
augagaaccuggaguuuca

SEQ ID NO: 2571798 - RNA, 19 nt, Homo sapiens
  misc_RNA (1)...(19): siRNA sense strand
gauugaagcugguccggga

SEQ ID NO: 2571799 - RNA, 19 nt, Homo sapiens
  misc_RNA (1)...(19): siRNA sense strand
gggagcuguucuugacgaa

SEQ ID NO: 2571800 - RNA, 19 nt, Homo sapiens
  misc_RNA (1)...(19): siRNA sense strand
ccacacugauguucggaca

SEQ ID NO: 2571801 - RNA, 19 nt, Homo sapiens
  misc_RNA (1)...(19): siRNA sense strand
caccagaagaaaagggcaa

SEQ ID NO: 2571802 - RNA, 19 nt, Homo sapiens
  misc_RNA (1)...(19): siRNA sense strand
aggucaagucccuggugaa

SEQ ID NO: 2571803 - RNA, 19 nt, Homo sapiens
  misc_RNA (1)...(19): siRNA sense strand
gaacagaagaggaggcagc

SEQ ID NO: 2571804 - RNA, 19 nt, Homo sapiens
  misc_RNA (1)...(19): siRNA sense strand
agaauaaccuggagcagcu

SEQ ID NO: 2571805 - RNA, 19 nt, Homo sapiens
  misc_RNA (1)...(19): siRNA sense strand
uagaugaaggcaaagcaaa

SEQ ID NO: 2571806 - RNA, 19 nt, Homo sapiens
  misc_RNA (1)...(19): siRNA sense strand
aggagaaagagaaguacga

SEQ ID NO: 2571807 - RNA, 19 nt, Homo sapiens
  misc_RNA (1)...(19): siRNA sense strand
ucacugggagacugggaua

SEQ ID NO: 2571808 - RNA, 19 nt, Homo sapiens
  misc_RNA (1)...(19): siRNA sense strand
ggaugaggugaaagaaguu

SEQ ID NO: 2571809 - RNA, 19 nt, Homo sapiens
  misc_RNA (1)...(19): siRNA sense strand
gaggagaagcagaaaauca

SEQ ID NO: 2571810 - RNA, 19 nt, Homo sapiens
  misc_RNA (1)...(19): siRNA sense strand
agagagaaaugaagcugga

SEQ ID NO: 2571811 - RNA, 19 nt, Homo sapiens
  misc_RNA (1)...(19): siRNA sense strand
gcucaacgauaaaagggaa

SEQ ID NO: 2571812 - RNA, 19 nt, Homo sapiens
  misc_RNA (1)...(19): siRNA sense strand
gggaauuagguacaaauga

SEQ ID NO: 2571813 - RNA, 19 nt, Homo sapiens
  misc_RNA (1)...(19): siRNA sense strand
ccuagaacugacagcagaa

SEQ ID NO: 2571814 - RNA, 19 nt, Homo sapiens
  misc_RNA (1)...(19): siRNA sense strand
ccucggaguuugagcgcuu

SEQ ID NO: 2571815 - RNA, 19 nt, Homo sapiens
  misc_RNA (1)...(19): siRNA sense strand
gagcagagugaguggcuga

SEQ ID NO: 2571816 - RNA, 19 nt, Homo sapiens
  misc_RNA (1)...(19): siRNA sense strand
caucggagcugcaggagga

SEQ ID NO: 2571817 - RNA, 19 nt, Homo sapiens
  misc_RNA (1)...(19): siRNA sense strand
ccaaauauggccaaggcuu

SEQ ID NO: 2571818 - RNA, 19 nt, Homo sapiens
  misc_RNA (1)...(19): siRNA sense strand
agagugauggcgaggagaa

SEQ ID NO: 2571819 - RNA, 19 nt, Homo sapiens
  misc_RNA (1)...(19): siRNA sense strand
ggagaauggaugagccugu

SEQ ID NO: 2571820 - RNA, 19 nt, Homo sapiens
  misc_RNA (1)...(19): siRNA sense strand
cuuuggagccugaagguca

SEQ ID NO: 2571821 - RNA, 19 nt, Homo sapiens
  misc_RNA (1)...(19): siRNA sense strand
cggagcugcaggaggauga

SEQ ID NO: 2571822 - RNA, 19 nt, Homo sapiens
  misc_RNA (1)...(19): siRNA sense strand
gcaacguguuuguggugca

SEQ ID NO: 2571823 - RNA, 19 nt, Homo sapiens
  misc_RNA (1)...(19): siRNA sense strand
ggaacugaaugacgaggca

SEQ ID NO: 2571824 - RNA, 19 nt, Homo sapiens
  misc_RNA (1)...(19): siRNA sense strand
ucgagaugguggaggcacu

SEQ ID NO: 2571825 - RNA, 19 nt, Homo sapiens
  misc_RNA (1)...(19): siRNA sense strand
ugcaggaccaagagggcua

SEQ ID NO: 2571826 - RNA, 19 nt, Homo sapiens
  misc_RNA (1)...(19): siRNA sense strand
uuaacaagacgguggagca

SEQ ID NO: 2571827 - RNA, 19 nt, Homo sapiens
  misc_RNA (1)...(19): siRNA sense strand
agaacaacgcugugacgca

SEQ ID NO: 2571828 - RNA, 19 nt, Homo sapiens
  misc_RNA (1)...(19): siRNA sense strand
ugcaggaggaugagagcuu

SEQ ID NO: 2571829 - RNA, 19 nt, Homo sapiens
  misc_RNA (1)...(19): siRNA sense strand
ggcugcaccaggagaacaa

SEQ ID NO: 2571830 - RNA, 19 nt, Homo sapiens
  misc_RNA (1)...(19): siRNA sense strand
auucagauguggaggagaa

SEQ ID NO: 2571831 - RNA, 19 nt, Homo sapiens
  misc_RNA (1)...(19): siRNA sense strand
gugaaugugacaaggcaua

SEQ ID NO: 2571832 - RNA, 19 nt, Homo sapiens
  misc_RNA (1)...(19): siRNA sense strand
ugaaggagcacaaggaaaa

SEQ ID NO: 2571833 - RNA, 19 nt, Homo sapiens
  misc_RNA (1)...(19): siRNA sense strand
cuaagaaacccaaagaaaa

SEQ ID NO: 2571834 - RNA, 19 nt, Homo sapiens
  misc_RNA (1)...(19): siRNA sense strand
cagauguggaggagaauau

SEQ ID NO: 2571835 - RNA, 19 nt, Homo sapiens
  misc_RNA (1)...(19): siRNA sense strand
augaaggagcacaaggaaa

SEQ ID NO: 2571836 - RNA, 19 nt, Homo sapiens
  misc_RNA (1)...(19): siRNA sense strand
aguagaagaaucuggguau

SEQ ID NO: 2571837 - RNA, 19 nt, Homo sapiens
  misc_RNA (1)...(19): siRNA sense strand
aauuaaugaaggagcacaa

SEQ ID NO: 2571838 - RNA, 19 nt, Homo sapiens
  misc_RNA (1)...(19): siRNA sense strand
agacaucagagaagaagaa

SEQ ID NO: 2571839 - RNA, 19 nt, Homo sapiens
  misc_RNA (1)...(19): siRNA sense strand
acaaauuaaugaaggagca

SEQ ID NO: 2571840 - RNA, 19 nt, Homo sapiens
  misc_RNA (1)...(19): siRNA sense strand
ucuaaagacuccagagaac

SEQ ID NO: 2571841 - RNA, 19 nt, Homo sapiens
  misc_RNA (1)...(19): siRNA sense strand
agccgaagucgcagaguua

SEQ ID NO: 2571842 - RNA, 19 nt, Homo sapiens
  misc_RNA (1)...(19): siRNA sense strand
cgugaaccuuauagaagaa

SEQ ID NO: 2571843 - RNA, 19 nt, Homo sapiens
  misc_RNA (1)...(19): siRNA sense strand
ugaagaacucucagccaaa

SEQ ID NO: 2571844 - RNA, 19 nt, Homo sapiens
  misc_RNA (1)...(19): siRNA sense strand
ucagagaagaagaaaucaa

SEQ ID NO: 2571845 - RNA, 19 nt, Homo sapiens
  misc_RNA (1)...(19): siRNA sense strand
aggcauaccuagaugaacu

SEQ ID NO: 2571846 - RNA, 19 nt, Homo sapiens
  misc_RNA (1)...(19): siRNA sense strand
agccaaaaccagauaguaa

SEQ ID NO: 2571847 - RNA, 19 nt, Homo sapiens
  misc_RNA (1)...(19): siRNA sense strand
caaaauugaaagugagaca

SEQ ID NO: 2571848 - RNA, 19 nt, Homo sapiens
  misc_RNA (1)...(19): siRNA sense strand
gugagacaucagagaagaa

SEQ ID NO: 2571849 - RNA, 19 nt, Homo sapiens
  misc_RNA (1)...(19): siRNA sense strand
ugacauugagagaaagaca

SEQ ID NO: 2571850 - RNA, 19 nt, Homo sapiens
  misc_RNA (1)...(19): siRNA sense strand
cuuacaaaguagaagaauc

SEQ ID NO: 2571851 - RNA, 19 nt, Homo sapiens
  misc_RNA (1)...(19): siRNA sense strand
ccuggaaacaucuggaaca

SEQ ID NO: 2571852 - RNA, 19 nt, Homo sapiens
  misc_RNA (1)...(19): siRNA sense strand
acaucagagaagaagaaau

SEQ ID NO: 2571853 - RNA, 19 nt, Homo sapiens
  misc_RNA (1)...(19): siRNA sense strand
gaaaaguccaauaaagcaa

SEQ ID NO: 2571854 - RNA, 19 nt, Homo sapiens
  misc_RNA (1)...(19): siRNA sense strand
caccaucaccaguggacaa

SEQ ID NO: 2571855 - RNA, 19 nt, Homo sapiens
  misc_RNA (1)...(19): siRNA sense strand
ucaagaugggaaaggucaa

SEQ ID NO: 2571856 - RNA, 19 nt, Homo sapiens
  misc_RNA (1)...(19): siRNA sense strand
ggacaagauaagaaggcuc

SEQ ID NO: 2571857 - RNA, 19 nt, Homo sapiens
  misc_RNA (1)...(19): siRNA sense strand
agaugaacugguagagcuu

SEQ ID NO: 2571858 - RNA, 19 nt, Homo sapiens
  misc_RNA (1)...(19): siRNA sense strand
gaucuuugcucgcuggaca

SEQ ID NO: 2571859 - RNA, 19 nt, Homo sapiens
  misc_RNA (1)...(19): siRNA sense strand
caaagaaccuuccagggau

SEQ ID NO: 2571860 - RNA, 19 nt, Homo sapiens
  misc_RNA (1)...(19): siRNA sense strand
aaucagaugaaguggagga

SEQ ID NO: 2571861 - RNA, 19 nt, Homo sapiens
  misc_RNA (1)...(19): siRNA sense strand
accacugaaagaagagaaa

SEQ ID NO: 2571862 - RNA, 19 nt, Homo sapiens
  misc_RNA (1)...(19): siRNA sense strand
guccaauaaagcaaagcaa

SEQ ID NO: 2571863 - RNA, 19 nt, Homo sapiens
  misc_RNA (1)...(19): siRNA sense strand
uccaauaaagcaaagcaaa

SEQ ID NO: 2571864 - RNA, 19 nt, Homo sapiens
  misc_RNA (1)...(19): siRNA sense strand
aaguagaagaaucugggua

SEQ ID NO: 2571865 - RNA, 19 nt, Homo sapiens
  misc_RNA (1)...(19): siRNA sense strand
cacugaaagaagagaaaau

SEQ ID NO: 2571866 - RNA, 19 nt, Homo sapiens
  misc_RNA (1)...(19): siRNA sense strand
ggagaauauauccucuaaa

SEQ ID NO: 2571867 - RNA, 19 nt, Homo sapiens
  misc_RNA (1)...(19): siRNA sense strand
ucucaugucaagaugggaa

SEQ ID NO: 2571868 - RNA, 19 nt, Homo sapiens
  misc_RNA (1)...(19): siRNA sense strand
aaguggaggauaacgacaa

SEQ ID NO: 2571869 - RNA, 19 nt, Homo sapiens
  misc_RNA (1)...(19): siRNA sense strand
gugacaaggcauaccuaga

SEQ ID NO: 2571870 - RNA, 19 nt, Homo sapiens
  misc_RNA (1)...(19): siRNA sense strand
acauaaaagugccuucaaa

SEQ ID NO: 2571871 - RNA, 19 nt, Homo sapiens
  misc_RNA (1)...(19): siRNA sense strand
ccaguggacaagauaagaa

SEQ ID NO: 2571872 - RNA, 19 nt, Homo sapiens
  misc_RNA (1)...(19): siRNA sense strand
aagaaggcuccuaguaaaa

SEQ ID NO: 2571873 - RNA, 19 nt, Homo sapiens
  misc_RNA (1)...(19): siRNA sense strand
uuaagugauggcagcgaua

SEQ ID NO: 2571874 - RNA, 19 nt, Homo sapiens
  misc_RNA (1)...(19): siRNA sense strand
ggagaaaguugcugaaggc

SEQ ID NO: 2571875 - RNA, 19 nt, Homo sapiens
  misc_RNA (1)...(19): siRNA sense strand
cuucuaaagacuccagaga

SEQ ID NO: 2571876 - RNA, 19 nt, Homo sapiens
  misc_RNA (1)...(19): siRNA sense strand
gguccggagcacaguaaca

SEQ ID NO: 2571877 - RNA, 19 nt, Homo sapiens
  misc_RNA (1)...(19): siRNA sense strand
gagaagaagaaaucaacgu

SEQ ID NO: 2571878 - RNA, 19 nt, Homo sapiens
  misc_RNA (1)...(19): siRNA sense strand
acaguaacauacagcacuu

SEQ ID NO: 2571879 - RNA, 19 nt, Homo sapiens
  misc_RNA (1)...(19): siRNA sense strand
cugaugacaaugaggagga

SEQ ID NO: 2571880 - RNA, 19 nt, Homo sapiens
  misc_RNA (1)...(19): siRNA sense strand
ggugaaugugacaaggcau

SEQ ID NO: 2571881 - RNA, 19 nt, Homo sapiens
  misc_RNA (1)...(19): siRNA sense strand
gaaccuuauagaagaaacu

SEQ ID NO: 2571882 - RNA, 19 nt, Homo sapiens
  misc_RNA (1)...(19): siRNA sense strand
cuggaaacaucuggaacau

SEQ ID NO: 2571883 - RNA, 19 nt, Homo sapiens
  misc_RNA (1)...(19): siRNA sense strand
aggcuaaggucgaggucaa

SEQ ID NO: 2571884 - RNA, 19 nt, Homo sapiens
  misc_RNA (1)...(19): siRNA sense strand
augaagaacaagauggaaa

SEQ ID NO: 2571885 - RNA, 19 nt, Homo sapiens
  misc_RNA (1)...(19): siRNA sense strand
ccaagaugaucgagggcau

SEQ ID NO: 2571886 - RNA, 19 nt, Homo sapiens
  misc_RNA (1)...(19): siRNA sense strand
gcugauuguggaagagaaa

SEQ ID NO: 2571887 - RNA, 19 nt, Homo sapiens
  misc_RNA (1)...(19): siRNA sense strand
acgcaguggucguggccaa

SEQ ID NO: 2571888 - RNA, 19 nt, Homo sapiens
  misc_RNA (1)...(19): siRNA sense strand
gaggagaagaagaagaaaa

SEQ ID NO: 2571889 - RNA, 19 nt, Homo sapiens
  misc_RNA (1)...(19): siRNA sense strand
augagaaagugacgggcaa

SEQ ID NO: 2571890 - RNA, 19 nt, Homo sapiens
  misc_RNA (1)...(19): siRNA sense strand
ugguggaggaggagaagaa

SEQ ID NO: 2571891 - RNA, 19 nt, Homo sapiens
  misc_RNA (1)...(19): siRNA sense strand
ucguagagcggaagaagaa

SEQ ID NO: 2571892 - RNA, 19 nt, Homo sapiens
  misc_RNA (1)...(19): siRNA sense strand
uggaggaggagaagaagaa

SEQ ID NO: 2571893 - RNA, 19 nt, Homo sapiens
  misc_RNA (1)...(19): siRNA sense strand
cuaccuggcugaagggaga

SEQ ID NO: 2571894 - RNA, 19 nt, Homo sapiens
  misc_RNA (1)...(19): siRNA sense strand
uggccaaggugaacgggaa

SEQ ID NO: 2571895 - RNA, 19 nt, Homo sapiens
  misc_RNA (1)...(19): siRNA sense strand
aggaggagaagaagaagaa

SEQ ID NO: 2571896 - RNA, 19 nt, Homo sapiens
  misc_RNA (1)...(19): siRNA sense strand
uggaaaucaagguggagua

SEQ ID NO: 2571897 - RNA, 19 nt, Homo sapiens
  misc_RNA (1)...(19): siRNA sense strand
ggggaagaccucagagaau

SEQ ID NO: 2571898 - RNA, 19 nt, Homo sapiens
  misc_RNA (1)...(19): siRNA sense strand
gcgugcagaucgagaacau

SEQ ID NO: 2571899 - RNA, 19 nt, Homo sapiens
  misc_RNA (1)...(19): siRNA sense strand
cguccagaaagcagacaaa

SEQ ID NO: 2571900 - RNA, 19 nt, Homo sapiens
  misc_RNA (1)...(19): siRNA sense strand
gugacgggcaagugguaua

SEQ ID NO: 2571901 - RNA, 19 nt, Homo sapiens
  misc_RNA (1)...(19): siRNA sense strand
gaguuuacaccgagaacau

SEQ ID NO: 2571902 - RNA, 19 nt, Homo sapiens
  misc_RNA (1)...(19): siRNA sense strand
agugaaaagaagucggaua

SEQ ID NO: 2571903 - RNA, 19 nt, Homo sapiens
  misc_RNA (1)...(19): siRNA sense strand
gggcaagugguauaagaau

SEQ ID NO: 2571904 - RNA, 19 nt, Homo sapiens
  misc_RNA (1)...(19): siRNA sense strand
uggucuggaugaagaacaa

SEQ ID NO: 2571905 - RNA, 19 nt, Homo sapiens
  misc_RNA (1)...(19): siRNA sense strand
gaggaggagaagaagaaga

SEQ ID NO: 2571906 - RNA, 19 nt, Homo sapiens
  misc_RNA (1)...(19): siRNA sense strand
agagggaggugguggagga

SEQ ID NO: 2571907 - RNA, 19 nt, Homo sapiens
  misc_RNA (1)...(19): siRNA sense strand
ccuaugaaguagcugucaa

SEQ ID NO: 2571908 - RNA, 19 nt, Homo sapiens
  misc_RNA (1)...(19): siRNA sense strand
ugaagggagaugagguauu

SEQ ID NO: 2571909 - RNA, 19 nt, Homo sapiens
  misc_RNA (1)...(19): siRNA sense strand
uguuugagaacguugguaa

SEQ ID NO: 2571910 - RNA, 19 nt, Homo sapiens
  misc_RNA (1)...(19): siRNA sense strand
aggcaaaaccagcggccaa

SEQ ID NO: 2571911 - RNA, 19 nt, Homo sapiens
  misc_RNA (1)...(19): siRNA sense strand
aggugguggaggaggagaa

SEQ ID NO: 2571912 - RNA, 19 nt, Homo sapiens
  misc_RNA (1)...(19): siRNA sense strand
agaaacagcuggagguccu

SEQ ID NO: 2571913 - RNA, 19 nt, Homo sapiens
  misc_RNA (1)...(19): siRNA sense strand
aagaagagcgaguacgaga

SEQ ID NO: 2571914 - RNA, 19 nt, Homo sapiens
  misc_RNA (1)...(19): siRNA sense strand
ugauuguggaagagaaaca

SEQ ID NO: 2571915 - RNA, 19 nt, Homo sapiens
  misc_RNA (1)...(19): siRNA sense strand
ccuggaaggcuccgaggaa

SEQ ID NO: 2571916 - RNA, 19 nt, Homo sapiens
  misc_RNA (1)...(19): siRNA sense strand
ugaaagaugguguggaacu

SEQ ID NO: 2571917 - RNA, 19 nt, Homo sapiens
  misc_RNA (1)...(19): siRNA sense strand
ccuucaaaccguucgagua

SEQ ID NO: 2571918 - RNA, 19 nt, Homo sapiens
  misc_RNA (1)...(19): siRNA sense strand
ccgagcugauuguggaaga

SEQ ID NO: 2571919 - RNA, 19 nt, Homo sapiens
  misc_RNA (1)...(19): siRNA sense strand
cggcccagcaagaggauca

SEQ ID NO: 2571920 - RNA, 19 nt, Homo sapiens
  misc_RNA (1)...(19): siRNA sense strand
ccugauaaccaauuaccaa

SEQ ID NO: 2571921 - RNA, 19 nt, Homo sapiens
  misc_RNA (1)...(19): siRNA sense strand
gcgaggugucugaugagaa

SEQ ID NO: 2571922 - RNA, 19 nt, Homo sapiens
  misc_RNA (1)...(19): siRNA sense strand
cguuugugccugacggcua

SEQ ID NO: 2571923 - RNA, 19 nt, Homo sapiens
  misc_RNA (1)...(19): siRNA sense strand
cggugaaggccucagaaca

SEQ ID NO: 2571924 - RNA, 19 nt, Homo sapiens
  misc_RNA (1)...(19): siRNA sense strand
gguaccucguagagcggaa

SEQ ID NO: 2571925 - RNA, 19 nt, Homo sapiens
  misc_RNA (1)...(19): siRNA sense strand
ggucaagaagagugcagca

SEQ ID NO: 2571926 - RNA, 19 nt, Homo sapiens
  misc_RNA (1)...(19): siRNA sense strand
agaacggccaggagaucaa

SEQ ID NO: 2571927 - RNA, 19 nt, Homo sapiens
  misc_RNA (1)...(19): siRNA sense strand
aaaucaagguggaguacgu

SEQ ID NO: 2571928 - RNA, 19 nt, Homo sapiens
  misc_RNA (1)...(19): siRNA sense strand
gcauccgcguuguggaaaa

SEQ ID NO: 2571929 - RNA, 19 nt, Homo sapiens
  misc_RNA (1)...(19): siRNA sense strand
ucaagugguucaaggggaa

SEQ ID NO: 2571930 - RNA, 19 nt, Homo sapiens
  misc_RNA (1)...(19): siRNA sense strand
uggaaauggcaguggaggu

SEQ ID NO: 2571931 - RNA, 19 nt, Homo sapiens
  misc_RNA (1)...(19): siRNA sense strand
cagacgugguccaggagga

SEQ ID NO: 2571932 - RNA, 19 nt, Homo sapiens
  misc_RNA (1)...(19): siRNA sense strand
aggaaugggucccugccaa

SEQ ID NO: 2571933 - RNA, 19 nt, Homo sapiens
  misc_RNA (1)...(19): siRNA sense strand
ccgaccuuaucgugggcaa

SEQ ID NO: 2571934 - RNA, 19 nt, Homo sapiens
  misc_RNA (1)...(19): siRNA sense strand
guggaggaggagaagaaga

SEQ ID NO: 2571935 - RNA, 19 nt, Homo sapiens
  misc_RNA (1)...(19): siRNA sense strand
agaagagcgaguacgagaa

SEQ ID NO: 2571936 - RNA, 19 nt, Homo sapiens
  misc_RNA (1)...(19): siRNA sense strand
cgggcaagugguauaagaa

SEQ ID NO: 2571937 - RNA, 19 nt, Homo sapiens
  misc_RNA (1)...(19): siRNA sense strand
ccucagagaaugcgauugu

SEQ ID NO: 2571938 - RNA, 19 nt, Homo sapiens
  misc_RNA (1)...(19): siRNA sense strand
ccgcauccgcguuguggaa

SEQ ID NO: 2571939 - RNA, 19 nt, Homo sapiens
  misc_RNA (1)...(19): siRNA sense strand
aguauaaggagcaugacuu

SEQ ID NO: 2571940 - RNA, 19 nt, Homo sapiens
  misc_RNA (1)...(19): siRNA sense strand
ccgaagguggucuggauga

SEQ ID NO: 2571941 - RNA, 19 nt, Homo sapiens
  misc_RNA (1)...(19): siRNA sense strand
cugcaggugagcuggauuu

SEQ ID NO: 2571942 - RNA, 19 nt, Homo sapiens
  misc_RNA (1)...(19): siRNA sense strand
uaguggaggaugugacaga

SEQ ID NO: 2571943 - RNA, 19 nt, Homo sapiens
  misc_RNA (1)...(19): siRNA sense strand
ucaagaacggccaggagau

SEQ ID NO: 2571944 - RNA, 19 nt, Homo sapiens
  misc_RNA (1)...(19): siRNA sense strand
cagacaaaccgaccaucaa

SEQ ID NO: 2571945 - RNA, 19 nt, Homo sapiens
  misc_RNA (1)...(19): siRNA sense strand
acaagaagccugaugccaa

SEQ ID NO: 2571946 - RNA, 19 nt, Homo sapiens
  misc_RNA (1)...(19): siRNA sense strand
gaaagggagaucugggaca

SEQ ID NO: 2571947 - RNA, 19 nt, Homo sapiens
  misc_RNA (1)...(19): siRNA sense strand
uggcugaaaucuugcccaa

SEQ ID NO: 2571948 - RNA, 19 nt, Homo sapiens
  misc_RNA (1)...(19): siRNA sense strand
ggacauguuuggagucuuc

SEQ ID NO: 2571949 - RNA, 19 nt, Homo sapiens
  misc_RNA (1)...(19): siRNA sense strand
auuauggcuucgagggaca

SEQ ID NO: 2571950 - RNA, 19 nt, Homo sapiens
  misc_RNA (1)...(19): siRNA sense strand
acaccaaugcacaguucaa

SEQ ID NO: 2571951 - RNA, 19 nt, Homo sapiens
  misc_RNA (1)...(19): siRNA sense strand
ugaagcgggugguggcaga

SEQ ID NO: 2571952 - RNA, 19 nt, Homo sapiens
  misc_RNA (1)...(19): siRNA sense strand
uaacauagaucgaugguug

SEQ ID NO: 2571953 - RNA, 19 nt, Homo sapiens
  misc_RNA (1)...(19): siRNA sense strand
augauuucguagaguguuu

SEQ ID NO: 2571954 - RNA, 19 nt, Homo sapiens
  misc_RNA (1)...(19): siRNA sense strand
aucaggaagcagcgggaua

SEQ ID NO: 2571955 - RNA, 19 nt, Homo sapiens
  misc_RNA (1)...(19): siRNA sense strand
agcugauaaaggaaggaaa

SEQ ID NO: 2571956 - RNA, 19 nt, Homo sapiens
  misc_RNA (1)...(19): siRNA sense strand
gguuauacucgggcagaga

SEQ ID NO: 2571957 - RNA, 19 nt, Homo sapiens
  misc_RNA (1)...(19): siRNA sense strand
uuauacucgggcagagaaa

SEQ ID NO: 2571958 - RNA, 19 nt, Homo sapiens
  misc_RNA (1)...(19): siRNA sense strand
ugauaaagacuacaggaga

SEQ ID NO: 2571959 - RNA, 19 nt, Homo sapiens
  misc_RNA (1)...(19): siRNA sense strand
acuuggacaaagaaacaaa

SEQ ID NO: 2571960 - RNA, 19 nt, Homo sapiens
  misc_RNA (1)...(19): siRNA sense strand
gggagaaggucacgcacac

SEQ ID NO: 2571961 - RNA, 19 nt, Homo sapiens
  misc_RNA (1)...(19): siRNA sense strand
guguauauaaacuuggaca

SEQ ID NO: 2571962 - RNA, 19 nt, Homo sapiens
  misc_RNA (1)...(19): siRNA sense strand
uugaugugguggaaggaaa

SEQ ID NO: 2571963 - RNA, 19 nt, Homo sapiens
  misc_RNA (1)...(19): siRNA sense strand
aucugaaacuagugagaau

SEQ ID NO: 2571964 - RNA, 19 nt, Homo sapiens
  misc_RNA (1)...(19): siRNA sense strand
ugggaaagguagaggucgu

SEQ ID NO: 2571965 - RNA, 19 nt, Homo sapiens
  misc_RNA (1)...(19): siRNA sense strand
cugaaacugugaagagcau

SEQ ID NO: 2571966 - RNA, 19 nt, Homo sapiens
  misc_RNA (1)...(19): siRNA sense strand
cuaagaucgcggagauaga

SEQ ID NO: 2571967 - RNA, 19 nt, Homo sapiens
  misc_RNA (1)...(19): siRNA sense strand
cguuggaggaugaggaugu

SEQ ID NO: 2571968 - RNA, 19 nt, Homo sapiens
  misc_RNA (1)...(19): siRNA sense strand
uggaaaagaucugggacua

SEQ ID NO: 2571969 - RNA, 19 nt, Homo sapiens
  misc_RNA (1)...(19): siRNA sense strand
uugaugaccuauuggaaaa

SEQ ID NO: 2571970 - RNA, 19 nt, Homo sapiens
  misc_RNA (1)...(19): siRNA sense strand
ggcuuuaagaagaaggaca

SEQ ID NO: 2571971 - RNA, 19 nt, Homo sapiens
  misc_RNA (1)...(19): siRNA sense strand
aggaauuggauaucaucua

SEQ ID NO: 2571972 - RNA, 19 nt, Homo sapiens
  misc_RNA (1)...(19): siRNA sense strand
agagugagcuggaugcuga

SEQ ID NO: 2571973 - RNA, 19 nt, Homo sapiens
  misc_RNA (1)...(19): siRNA sense strand
ucgcggagauagaagcaga

SEQ ID NO: 2571974 - RNA, 19 nt, Homo sapiens
  misc_RNA (1)...(19): siRNA sense strand
aaaaugagcuggaaggcuu

SEQ ID NO: 2571975 - RNA, 19 nt, Homo sapiens
  misc_RNA (1)...(19): siRNA sense strand
gccaaggaugggaaaggua

SEQ ID NO: 2571976 - RNA, 19 nt, Homo sapiens
  misc_RNA (1)...(19): siRNA sense strand
gaacaaggccacagcacac

SEQ ID NO: 2571977 - RNA, 19 nt, Homo sapiens
  misc_RNA (1)...(19): siRNA sense strand
uuugaugaccuauuggaaa

SEQ ID NO: 2571978 - RNA, 19 nt, Homo sapiens
  misc_RNA (1)...(19): siRNA sense strand
acaccaaacccaaaggcca

SEQ ID NO: 2571979 - RNA, 19 nt, Homo sapiens
  misc_RNA (1)...(19): siRNA sense strand
ggguaaagaccauacguug

SEQ ID NO: 2571980 - RNA, 19 nt, Homo sapiens
  misc_RNA (1)...(19): siRNA sense strand
uccugaaaccuuugggaca

SEQ ID NO: 2571981 - RNA, 19 nt, Homo sapiens
  misc_RNA (1)...(19): siRNA sense strand
gcugaaacugugaagagca

SEQ ID NO: 2571982 - RNA, 19 nt, Homo sapiens
  misc_RNA (1)...(19): siRNA sense strand
ggaaaagaucugggacuau

SEQ ID NO: 2571983 - RNA, 19 nt, Homo sapiens
  misc_RNA (1)...(19): siRNA sense strand
uggaauugcugcuucggaa

SEQ ID NO: 2571984 - RNA, 19 nt, Homo sapiens
  misc_RNA (1)...(19): siRNA sense strand
ucaacgaaggagugaguca

SEQ ID NO: 2571985 - RNA, 19 nt, Homo sapiens
  misc_RNA (1)...(19): siRNA sense strand
gaggagagccaguacgacu

SEQ ID NO: 2571986 - RNA, 19 nt, Homo sapiens
  misc_RNA (1)...(19): siRNA sense strand
agagccaggcagaggaaca

SEQ ID NO: 2571987 - RNA, 19 nt, Homo sapiens
  misc_RNA (1)...(19): siRNA sense strand
caaaauaaccuuuaccaga

SEQ ID NO: 2571988 - RNA, 19 nt, Homo sapiens
  misc_RNA (1)...(19): siRNA sense strand
ggagaaggaagacgcggau

SEQ ID NO: 2571989 - RNA, 19 nt, Homo sapiens
  misc_RNA (1)...(19): siRNA sense strand
augacaaguguuuggacaa

SEQ ID NO: 2571990 - RNA, 19 nt, Homo sapiens
  misc_RNA (1)...(19): siRNA sense strand
ggacccagcacuagcccaa

SEQ ID NO: 2571991 - RNA, 19 nt, Homo sapiens
  misc_RNA (1)...(19): siRNA sense strand
cgaucagaggugaaaccaa

SEQ ID NO: 2571992 - RNA, 19 nt, Homo sapiens
  misc_RNA (1)...(19): siRNA sense strand
gaucagaggugaaaccaac

SEQ ID NO: 2571993 - RNA, 19 nt, Homo sapiens
  misc_RNA (1)...(19): siRNA sense strand
ucacauaauacacggcuga

SEQ ID NO: 2571994 - RNA, 19 nt, Homo sapiens
  misc_RNA (1)...(19): siRNA sense strand
uuguuugggcagauaguua

SEQ ID NO: 2571995 - RNA, 19 nt, Homo sapiens
  misc_RNA (1)...(19): siRNA sense strand
ccauauaagagaggagcca

SEQ ID NO: 2571996 - RNA, 19 nt, Homo sapiens
  misc_RNA (1)...(19): siRNA sense strand
guguuaaccgacagcgaga

SEQ ID NO: 2571997 - RNA, 19 nt, Homo sapiens
  misc_RNA (1)...(19): siRNA sense strand
ggagagaacaucuggacug

SEQ ID NO: 2571998 - RNA, 19 nt, Homo sapiens
  misc_RNA (1)...(19): siRNA sense strand
ggugaaaccaacagccagu

SEQ ID NO: 2571999 - RNA, 19 nt, Homo sapiens
  misc_RNA (1)...(19): siRNA sense strand
aaugacaaguguuuggaca

SEQ ID NO: 2572000 - RNA, 19 nt, Homo sapiens
  misc_RNA (1)...(19): siRNA sense strand
uguggaacaaggacagaaa

SEQ ID NO: 2572001 - RNA, 19 nt, Homo sapiens
  misc_RNA (1)...(19): siRNA sense strand
gcuuuaacccagaagggau

SEQ ID NO: 2572002 - RNA, 19 nt, Homo sapiens
  misc_RNA (1)...(19): siRNA sense strand
ggugguaaauccagccuca

SEQ ID NO: 2572003 - RNA, 19 nt, Homo sapiens
  misc_RNA (1)...(19): siRNA sense strand
cuuuaacccagaagggauu

SEQ ID NO: 2572004 - RNA, 19 nt, Homo sapiens
  misc_RNA (1)...(19): siRNA sense strand
acgccuucccggaggagua

SEQ ID NO: 2572005 - RNA, 19 nt, Homo sapiens
  misc_RNA (1)...(19): siRNA sense strand
aggacagaaacuagcaaaa

SEQ ID NO: 2572006 - RNA, 19 nt, Homo sapiens
  misc_RNA (1)...(19): siRNA sense strand
cgugccuacucaugagcua

SEQ ID NO: 2572007 - RNA, 19 nt, Homo sapiens
  misc_RNA (1)...(19): siRNA sense strand
aggaggagguggaggagga

SEQ ID NO: 2572008 - RNA, 19 nt, Homo sapiens
  misc_RNA (1)...(19): siRNA sense strand
aggaggaggaggauggaga

SEQ ID NO: 2572009 - RNA, 19 nt, Homo sapiens
  misc_RNA (1)...(19): siRNA sense strand
uuacuaugacagaggauau

SEQ ID NO: 2572010 - RNA, 19 nt, Homo sapiens
  misc_RNA (1)...(19): siRNA sense strand
auacagaggaggaggugga

SEQ ID NO: 2572011 - RNA, 19 nt, Homo sapiens
  misc_RNA (1)...(19): siRNA sense strand
gggcugagcuuguacacca

SEQ ID NO: 2572012 - RNA, 19 nt, Homo sapiens
  misc_RNA (1)...(19): siRNA sense strand
cagaggaggagguggagga

SEQ ID NO: 2572013 - RNA, 19 nt, Homo sapiens
  misc_RNA (1)...(19): siRNA sense strand
cuauagucguggaggauac

SEQ ID NO: 2572014 - RNA, 19 nt, Homo sapiens
  misc_RNA (1)...(19): siRNA sense strand
ggggaaaucugcaaggcau

SEQ ID NO: 2572015 - RNA, 19 nt, Homo sapiens
  misc_RNA (1)...(19): siRNA sense strand
agcuaaagaacgugccaau

SEQ ID NO: 2572016 - RNA, 19 nt, Homo sapiens
  misc_RNA (1)...(19): siRNA sense strand
agguggaggaggaggagga

SEQ ID NO: 2572017 - RNA, 19 nt, Homo sapiens
  misc_RNA (1)...(19): siRNA sense strand
uuacuauagucguggagga

SEQ ID NO: 2572018 - RNA, 19 nt, Homo sapiens
  misc_RNA (1)...(19): siRNA sense strand
ggaggaggauggagagcug

SEQ ID NO: 2572019 - RNA, 19 nt, Homo sapiens
  misc_RNA (1)...(19): siRNA sense strand
cgggacuacuauagcagau

SEQ ID NO: 2572020 - RNA, 19 nt, Homo sapiens
  misc_RNA (1)...(19): siRNA sense strand
gaguauuugggcugagcuu

SEQ ID NO: 2572021 - RNA, 19 nt, Homo sapiens
  misc_RNA (1)...(19): siRNA sense strand
caggcgucauguugggaau

SEQ ID NO: 2572022 - RNA, 19 nt, Homo sapiens
  misc_RNA (1)...(19): siRNA sense strand
uggcacgaguagagagcaa

SEQ ID NO: 2572023 - RNA, 19 nt, Homo sapiens
  misc_RNA (1)...(19): siRNA sense strand
cagcagaacacaaagggaa

SEQ ID NO: 2572024 - RNA, 19 nt, Homo sapiens
  misc_RNA (1)...(19): siRNA sense strand
guagagagcaagacgguga

SEQ ID NO: 2572025 - RNA, 19 nt, Homo sapiens
  misc_RNA (1)...(19): siRNA sense strand
gcaacucccugcugggcaa

SEQ ID NO: 2572026 - RNA, 19 nt, Homo sapiens
  misc_RNA (1)...(19): siRNA sense strand
gcgagugcuuaguggagau

SEQ ID NO: 2572027 - RNA, 19 nt, Homo sapiens
  misc_RNA (1)...(19): siRNA sense strand
gcguguacugggagggcau

SEQ ID NO: 2572028 - RNA, 19 nt, Homo sapiens
  misc_RNA (1)...(19): siRNA sense strand
ggaagaucaucaugcacga

SEQ ID NO: 2572029 - RNA, 19 nt, Homo sapiens
  misc_RNA (1)...(19): siRNA sense strand
uggagagacgugugcacaa

SEQ ID NO: 2572030 - RNA, 19 nt, Homo sapiens
  misc_RNA (1)...(19): siRNA sense strand
ccucagagcuauagacacc

SEQ ID NO: 2572031 - RNA, 19 nt, Homo sapiens
  misc_RNA (1)...(19): siRNA sense strand
caagaagugcuuugcccua

SEQ ID NO: 2572032 - RNA, 19 nt, Homo sapiens
  misc_RNA (1)...(19): siRNA sense strand
ccuaugugguggcaagcau

SEQ ID NO: 2572033 - RNA, 19 nt, Homo sapiens
  misc_RNA (1)...(19): siRNA sense strand
ugguaauggaugugaagaa

SEQ ID NO: 2572034 - RNA, 19 nt, Homo sapiens
  misc_RNA (1)...(19): siRNA sense strand
gcaccaugucaaugagaga

SEQ ID NO: 2572035 - RNA, 19 nt, Homo sapiens
  misc_RNA (1)...(19): siRNA sense strand
acuugagaauggaggugaa

SEQ ID NO: 2572036 - RNA, 19 nt, Homo sapiens
  misc_RNA (1)...(19): siRNA sense strand
ccaauauauccgugcauca

SEQ ID NO: 2572037 - RNA, 19 nt, Homo sapiens
  misc_RNA (1)...(19): siRNA sense strand
gcccagaagacgaggaaag

SEQ ID NO: 2572038 - RNA, 19 nt, Homo sapiens
  misc_RNA (1)...(19): siRNA sense strand
cguggaagacguugggcuu

SEQ ID NO: 2572039 - RNA, 19 nt, Homo sapiens
  misc_RNA (1)...(19): siRNA sense strand
cccaagacggugaggauca

SEQ ID NO: 2572040 - RNA, 19 nt, Homo sapiens
  misc_RNA (1)...(19): siRNA sense strand
cagucaugauaaaggagau

SEQ ID NO: 2572041 - RNA, 19 nt, Homo sapiens
  misc_RNA (1)...(19): siRNA sense strand
cggugaggaucaagcagau

SEQ ID NO: 2572042 - RNA, 19 nt, Homo sapiens
  misc_RNA (1)...(19): siRNA sense strand
aguugagaguggaugccaa

SEQ ID NO: 2572043 - RNA, 19 nt, Homo sapiens
  misc_RNA (1)...(19): siRNA sense strand
aggcaagacuccagggcag

SEQ ID NO: 2572044 - RNA, 19 nt, Homo sapiens
  misc_RNA (1)...(19): siRNA sense strand
gagagacaaagaaggaaaa

SEQ ID NO: 2572045 - RNA, 19 nt, Homo sapiens
  misc_RNA (1)...(19): siRNA sense strand
uggaugugaagaacagaaa

SEQ ID NO: 2572046 - RNA, 19 nt, Homo sapiens
  misc_RNA (1)...(19): siRNA sense strand
gaggcaaaucaaugaacuu

SEQ ID NO: 2572047 - RNA, 19 nt, Homo sapiens
  misc_RNA (1)...(19): siRNA sense strand
gaacuguggaagagggaag

SEQ ID NO: 2572048 - RNA, 19 nt, Homo sapiens
  misc_RNA (1)...(19): siRNA sense strand
cagaaaccccagagcuaua

SEQ ID NO: 2572049 - RNA, 19 nt, Homo sapiens
  misc_RNA (1)...(19): siRNA sense strand
uguggaagagggaaggcaa

SEQ ID NO: 2572050 - RNA, 19 nt, Homo sapiens
  misc_RNA (1)...(19): siRNA sense strand
gagcaagacaguggcaaaa

SEQ ID NO: 2572051 - RNA, 19 nt, Homo sapiens
  misc_RNA (1)...(19): siRNA sense strand
cggaagugaagaaucucaa

SEQ ID NO: 2572052 - RNA, 19 nt, Homo sapiens
  misc_RNA (1)...(19): siRNA sense strand
gacucaaagccgagcagau

SEQ ID NO: 2572053 - RNA, 19 nt, Homo sapiens
  misc_RNA (1)...(19): siRNA sense strand
cggcaacagcugucaggga

SEQ ID NO: 2572054 - RNA, 19 nt, Homo sapiens
  misc_RNA (1)...(19): siRNA sense strand
cagugugacccgagagaag

SEQ ID NO: 2572055 - RNA, 19 nt, Homo sapiens
  misc_RNA (1)...(19): siRNA sense strand
acccacagcaagugaucaa

SEQ ID NO: 2572056 - RNA, 19 nt, Homo sapiens
  misc_RNA (1)...(19): siRNA sense strand
uguuugaggaacuguggaa

SEQ ID NO: 2572057 - RNA, 19 nt, Homo sapiens
  misc_RNA (1)...(19): siRNA sense strand
guaauggaugugaagaaca

SEQ ID NO: 2572058 - RNA, 19 nt, Homo sapiens
  misc_RNA (1)...(19): siRNA sense strand
acauaaacaagaaguccuu

SEQ ID NO: 2572059 - RNA, 19 nt, Homo sapiens
  misc_RNA (1)...(19): siRNA sense strand
ugaccagauucgggagaca

SEQ ID NO: 2572060 - RNA, 19 nt, Homo sapiens
  misc_RNA (1)...(19): siRNA sense strand
auuuaaagcaacagaaccu

SEQ ID NO: 2572061 - RNA, 19 nt, Homo sapiens
  misc_RNA (1)...(19): siRNA sense strand
cggcagaagccauggacga

SEQ ID NO: 2572062 - RNA, 19 nt, Homo sapiens
  misc_RNA (1)...(19): siRNA sense strand
ggauaagagugcagaggag

SEQ ID NO: 2572063 - RNA, 19 nt, Homo sapiens
  misc_RNA (1)...(19): siRNA sense strand
ccaagaagcugacucgcua

SEQ ID NO: 2572064 - RNA, 19 nt, Homo sapiens
  misc_RNA (1)...(19): siRNA sense strand
gcaaguucguggaggagca

SEQ ID NO: 2572065 - RNA, 19 nt, Homo sapiens
  misc_RNA (1)...(19): siRNA sense strand
gugcagaggagaugcccua

SEQ ID NO: 2572066 - RNA, 19 nt, Homo sapiens
  misc_RNA (1)...(19): siRNA sense strand
gcuuggagccagugaucau

SEQ ID NO: 2572067 - RNA, 19 nt, Homo sapiens
  misc_RNA (1)...(19): siRNA sense strand
accaauacuacuagagaga

SEQ ID NO: 2572068 - RNA, 19 nt, Homo sapiens
  misc_RNA (1)...(19): siRNA sense strand
ugagcaaguucguggagga

SEQ ID NO: 2572069 - RNA, 19 nt, Homo sapiens
  misc_RNA (1)...(19): siRNA sense strand
gggacuugucgcugaucaa

SEQ ID NO: 2572070 - RNA, 19 nt, Homo sapiens
  misc_RNA (1)...(19): siRNA sense strand
cggauuacaaagacugcaa

SEQ ID NO: 2572071 - RNA, 19 nt, Homo sapiens
  misc_RNA (1)...(19): siRNA sense strand
aggagaaugugcuggucau

SEQ ID NO: 2572072 - RNA, 19 nt, Homo sapiens
  misc_RNA (1)...(19): siRNA sense strand
ucauggagcuggagcggca

SEQ ID NO: 2572073 - RNA, 19 nt, Homo sapiens
  misc_RNA (1)...(19): siRNA sense strand
caugaaaguccggaagcaa

SEQ ID NO: 2572074 - RNA, 19 nt, Homo sapiens
  misc_RNA (1)...(19): siRNA sense strand
ggacaaaacaugaaaggcu

SEQ ID NO: 2572075 - RNA, 19 nt, Homo sapiens
  misc_RNA (1)...(19): siRNA sense strand
acuagagagaggagacaca

SEQ ID NO: 2572076 - RNA, 19 nt, Homo sapiens
  misc_RNA (1)...(19): siRNA sense strand
gggccaaagcugaccaacu

SEQ ID NO: 2572077 - RNA, 19 nt, Homo sapiens
  misc_RNA (1)...(19): siRNA sense strand
augaaaguccggaagcaau

SEQ ID NO: 2572078 - RNA, 19 nt, Homo sapiens
  misc_RNA (1)...(19): siRNA sense strand
acggcgagaacgagcacaa

SEQ ID NO: 2572079 - RNA, 19 nt, Homo sapiens
  misc_RNA (1)...(19): siRNA sense strand
gagcagaaccugaaggacc

SEQ ID NO: 2572080 - RNA, 19 nt, Homo sapiens
  misc_RNA (1)...(19): siRNA sense strand
ccuuagcugccuugagaga

SEQ ID NO: 2572081 - RNA, 19 nt, Homo sapiens
  misc_RNA (1)...(19): siRNA sense strand
gaaaaugacuuuaaggcgu

SEQ ID NO: 2572082 - RNA, 19 nt, Homo sapiens
  misc_RNA (1)...(19): siRNA sense strand
gacaaaugcgacagggacu

SEQ ID NO: 2572083 - RNA, 19 nt, Homo sapiens
  misc_RNA (1)...(19): siRNA sense strand
ccgacaaaugcgacaggga

SEQ ID NO: 2572084 - RNA, 19 nt, Homo sapiens
  misc_RNA (1)...(19): siRNA sense strand
cugaagagcaccauccaga

SEQ ID NO: 2572085 - RNA, 19 nt, Homo sapiens
  misc_RNA (1)...(19): siRNA sense strand
auaagagugcagaggagau

SEQ ID NO: 2572086 - RNA, 19 nt, Homo sapiens
  misc_RNA (1)...(19): siRNA sense strand
ggacugagcuggaggagga

SEQ ID NO: 2572087 - RNA, 19 nt, Homo sapiens
  misc_RNA (1)...(19): siRNA sense strand
uggaugaagaagagauuaa

SEQ ID NO: 2572088 - RNA, 19 nt, Homo sapiens
  misc_RNA (1)...(19): siRNA sense strand
acaaggagaacgugggcaa

SEQ ID NO: 2572089 - RNA, 19 nt, Homo sapiens
  misc_RNA (1)...(19): siRNA sense strand
caaagagacuggagcggau

SEQ ID NO: 2572090 - RNA, 19 nt, Homo sapiens
  misc_RNA (1)...(19): siRNA sense strand
aggagagguugaagagaga

SEQ ID NO: 2572091 - RNA, 19 nt, Homo sapiens
  misc_RNA (1)...(19): siRNA sense strand
uggaagaggaagaggagga

SEQ ID NO: 2572092 - RNA, 19 nt, Homo sapiens
  misc_RNA (1)...(19): siRNA sense strand
cggugcaguuuguggacua

SEQ ID NO: 2572093 - RNA, 19 nt, Homo sapiens
  misc_RNA (1)...(19): siRNA sense strand
acaccaaagagaugaagaa

SEQ ID NO: 2572094 - RNA, 19 nt, Homo sapiens
  misc_RNA (1)...(19): siRNA sense strand
aggaggaggagguggaaga

SEQ ID NO: 2572095 - RNA, 19 nt, Homo sapiens
  misc_RNA (1)...(19): siRNA sense strand
ucaucaagaacaagaagaa

SEQ ID NO: 2572096 - RNA, 19 nt, Homo sapiens
  misc_RNA (1)...(19): siRNA sense strand
gggccagggaagaggcuau

SEQ ID NO: 2572097 - RNA, 19 nt, Homo sapiens
  misc_RNA (1)...(19): siRNA sense strand
gagagaaacaggcggcaga

SEQ ID NO: 2572098 - RNA, 19 nt, Homo sapiens
  misc_RNA (1)...(19): siRNA sense strand
cguacuggcccuagucaaa

SEQ ID NO: 2572099 - RNA, 19 nt, Homo sapiens
  misc_RNA (1)...(19): siRNA sense strand
aggaggaggagucaggaaa

SEQ ID NO: 2572100 - RNA, 19 nt, Homo sapiens
  misc_RNA (1)...(19): siRNA sense strand
aggaaguagugcaggugau

SEQ ID NO: 2572101 - RNA, 19 nt, Homo sapiens
  misc_RNA (1)...(19): siRNA sense strand
guguggauccuaagggcua

SEQ ID NO: 2572102 - RNA, 19 nt, Homo sapiens
  misc_RNA (1)...(19): siRNA sense strand
ccaagaugcccaagagcca

SEQ ID NO: 2572103 - RNA, 19 nt, Homo sapiens
  misc_RNA (1)...(19): siRNA sense strand
gagaaggagcugcgagagu

SEQ ID NO: 2572104 - RNA, 19 nt, Homo sapiens
  misc_RNA (1)...(19): siRNA sense strand
aaguagugcaggugaucaa

SEQ ID NO: 2572105 - RNA, 19 nt, Homo sapiens
  misc_RNA (1)...(19): siRNA sense strand
gagagguugaagagagaga

SEQ ID NO: 2572106 - RNA, 19 nt, Homo sapiens
  misc_RNA (1)...(19): siRNA sense strand
aggagguggaagaggaaga

SEQ ID NO: 2572107 - RNA, 19 nt, Homo sapiens
  misc_RNA (1)...(19): siRNA sense strand
agcuaaagggcguggugaa

SEQ ID NO: 2572108 - RNA, 19 nt, Homo sapiens
  misc_RNA (1)...(19): siRNA sense strand
cagauacgggagauggaaa

SEQ ID NO: 2572109 - RNA, 19 nt, Homo sapiens
  misc_RNA (1)...(19): siRNA sense strand
aggaggagguggaagagga

SEQ ID NO: 2572110 - RNA, 19 nt, Homo sapiens
  misc_RNA (1)...(19): siRNA sense strand
auguagaaguggagcuguu

SEQ ID NO: 2572111 - RNA, 19 nt, Homo sapiens
  misc_RNA (1)...(19): siRNA sense strand
acgagaaggagcugcgaga

SEQ ID NO: 2572112 - RNA, 19 nt, Homo sapiens
  misc_RNA (1)...(19): siRNA sense strand
cugaaggcccugaaggaga

SEQ ID NO: 2572113 - RNA, 19 nt, Homo sapiens
  misc_RNA (1)...(19): siRNA sense strand
gagguugaagagagagauu

SEQ ID NO: 2572114 - RNA, 19 nt, Homo sapiens
  misc_RNA (1)...(19): siRNA sense strand
aggcagaggugaaggaguc

SEQ ID NO: 2572115 - RNA, 19 nt, Homo sapiens
  misc_RNA (1)...(19): siRNA sense strand
aauugaggcuauugcagaa

SEQ ID NO: 2572116 - RNA, 19 nt, Homo sapiens
  misc_RNA (1)...(19): siRNA sense strand
agaaggaggcgcuggcaga

SEQ ID NO: 2572117 - RNA, 19 nt, Homo sapiens
  misc_RNA (1)...(19): siRNA sense strand
ccaaaagaaccgaaguuau

SEQ ID NO: 2572118 - RNA, 19 nt, Homo sapiens
  misc_RNA (1)...(19): siRNA sense strand
cugugauggaggaaggcaa

SEQ ID NO: 2572119 - RNA, 19 nt, Homo sapiens
  misc_RNA (1)...(19): siRNA sense strand
cugaaggagacgucggaga

SEQ ID NO: 2572120 - RNA, 19 nt, Homo sapiens
  misc_RNA (1)...(19): siRNA sense strand
aggaagaggaggaggaguc

SEQ ID NO: 2572121 - RNA, 19 nt, Homo sapiens
  misc_RNA (1)...(19): siRNA sense strand
caaagaagcaauugaggcu

SEQ ID NO: 2572122 - RNA, 19 nt, Homo sapiens
  misc_RNA (1)...(19): siRNA sense strand
aagaggaagaggaggagga

SEQ ID NO: 2572123 - RNA, 19 nt, Homo sapiens
  misc_RNA (1)...(19): siRNA sense strand
ccuggaugaagaagagauu

SEQ ID NO: 2572124 - RNA, 19 nt, Homo sapiens
  misc_RNA (1)...(19): siRNA sense strand
ggcuaagauggcugaguau

SEQ ID NO: 2572125 - RNA, 19 nt, Homo sapiens
  misc_RNA (1)...(19): siRNA sense strand
caaaguaaggagauggagu

SEQ ID NO: 2572126 - RNA, 19 nt, Homo sapiens
  misc_RNA (1)...(19): siRNA sense strand
gcucaacucugaagggaag

SEQ ID NO: 2572127 - RNA, 19 nt, Homo sapiens
  misc_RNA (1)...(19): siRNA sense strand
gcaccuauguagaagugga

SEQ ID NO: 2572128 - RNA, 19 nt, Homo sapiens
  misc_RNA (1)...(19): siRNA sense strand
gaggaggaggagucaggaa

SEQ ID NO: 2572129 - RNA, 19 nt, Homo sapiens
  misc_RNA (1)...(19): siRNA sense strand
agaagaugcagucggauga

SEQ ID NO: 2572130 - RNA, 19 nt, Homo sapiens
  misc_RNA (1)...(19): siRNA sense strand
cagcagaacauggcaguau

SEQ ID NO: 2572131 - RNA, 19 nt, Homo sapiens
  misc_RNA (1)...(19): siRNA sense strand
accaaagagaugaagaaaa

SEQ ID NO: 2572132 - RNA, 19 nt, Homo sapiens
  misc_RNA (1)...(19): siRNA sense strand
agugugggcuggcgaggaa

SEQ ID NO: 2572133 - RNA, 19 nt, Homo sapiens
  misc_RNA (1)...(19): siRNA sense strand
gugcgggagcugaaagaca

SEQ ID NO: 2572134 - RNA, 19 nt, Homo sapiens
  misc_RNA (1)...(19): siRNA sense strand
gaguauugccggacgaucu

SEQ ID NO: 2572135 - RNA, 19 nt, Homo sapiens
  misc_RNA (1)...(19): siRNA sense strand
ugaagagagagauuaacaa

SEQ ID NO: 2572136 - RNA, 19 nt, Homo sapiens
  misc_RNA (1)...(19): siRNA sense strand
ccaucaauccugucuggaa

SEQ ID NO: 2572137 - RNA, 19 nt, Homo sapiens
  misc_RNA (1)...(19): siRNA sense strand
cugcacagugagagcaaca

SEQ ID NO: 2572138 - RNA, 19 nt, Homo sapiens
  misc_RNA (1)...(19): siRNA sense strand
agauacgggagauggaaaa

SEQ ID NO: 2572139 - RNA, 19 nt, Homo sapiens
  misc_RNA (1)...(19): siRNA sense strand
cggacgaucuuuggggaua

SEQ ID NO: 2572140 - RNA, 19 nt, Homo sapiens
  misc_RNA (1)...(19): siRNA sense strand
caccaaagagaugaagaaa

SEQ ID NO: 2572141 - RNA, 19 nt, Homo sapiens
  misc_RNA (1)...(19): siRNA sense strand
gagauuaagaagaugcagu

SEQ ID NO: 2572142 - RNA, 19 nt, Homo sapiens
  misc_RNA (1)...(19): siRNA sense strand
ggauccagggcaugaccaa

SEQ ID NO: 2572143 - RNA, 19 nt, Homo sapiens
  misc_RNA (1)...(19): siRNA sense strand
ccaaagucaccacagacaa

SEQ ID NO: 2572144 - RNA, 19 nt, Homo sapiens
  misc_RNA (1)...(19): siRNA sense strand
aggacaagcugcugcucca

SEQ ID NO: 2572145 - RNA, 19 nt, Homo sapiens
  misc_RNA (1)...(19): siRNA sense strand
cggcugagauguaccgcca

SEQ ID NO: 2572146 - RNA, 19 nt, Homo sapiens
  misc_RNA (1)...(19): siRNA sense strand
ucaagaacaagaagaacca

SEQ ID NO: 2572147 - RNA, 19 nt, Homo sapiens
  misc_RNA (1)...(19): siRNA sense strand
uggaggaggaggaggugga

SEQ ID NO: 2572148 - RNA, 19 nt, Homo sapiens
  misc_RNA (1)...(19): siRNA sense strand
gaguacgaggccaggauga

SEQ ID NO: 2572149 - RNA, 19 nt, Homo sapiens
  misc_RNA (1)...(19): siRNA sense strand
gcagcaccuuccuggacaa

SEQ ID NO: 2572150 - RNA, 19 nt, Homo sapiens
  misc_RNA (1)...(19): siRNA sense strand
ccacagacaagauggccca

SEQ ID NO: 2572151 - RNA, 19 nt, Homo sapiens
  misc_RNA (1)...(19): siRNA sense strand
aggcagaaacagaaaagaa

SEQ ID NO: 2572152 - RNA, 19 nt, Homo sapiens
  misc_RNA (1)...(19): siRNA sense strand
aggcauucgccgagcgcuu

SEQ ID NO: 2572153 - RNA, 19 nt, Homo sapiens
  misc_RNA (1)...(19): siRNA sense strand
ucgcuuagccagagcacca

SEQ ID NO: 2572154 - RNA, 19 nt, Homo sapiens
  misc_RNA (1)...(19): siRNA sense strand
cagaaacagaaaagaauga

SEQ ID NO: 2572155 - RNA, 19 nt, Homo sapiens
  misc_RNA (1)...(19): siRNA sense strand
gagaagucccaccgcgaga

SEQ ID NO: 2572156 - RNA, 19 nt, Homo sapiens
  misc_RNA (1)...(19): siRNA sense strand
ggcagaaacagaaaagaau

SEQ ID NO: 2572157 - RNA, 19 nt, Homo sapiens
  misc_RNA (1)...(19): siRNA sense strand
cuuuagaauugguggaaaa

SEQ ID NO: 2572158 - RNA, 19 nt, Homo sapiens
  misc_RNA (1)...(19): siRNA sense strand
agcuuguaauggagggaua

SEQ ID NO: 2572159 - RNA, 19 nt, Homo sapiens
  misc_RNA (1)...(19): siRNA sense strand
cagcuuuaguagauggaca

SEQ ID NO: 2572160 - RNA, 19 nt, Homo sapiens
  misc_RNA (1)...(19): siRNA sense strand
guggagaugugcaugguca

SEQ ID NO: 2572161 - RNA, 19 nt, Homo sapiens
  misc_RNA (1)...(19): siRNA sense strand
augaugaaugucugcgaaa

SEQ ID NO: 2572162 - RNA, 19 nt, Homo sapiens
  misc_RNA (1)...(19): siRNA sense strand
ugcgagaaggcaaaggaaa

SEQ ID NO: 2572163 - RNA, 19 nt, Homo sapiens
  misc_RNA (1)...(19): siRNA sense strand
acuacuuauucauggguga

SEQ ID NO: 2572164 - RNA, 19 nt, Homo sapiens
  misc_RNA (1)...(19): siRNA sense strand
gggucgagcagcugaacga

SEQ ID NO: 2572165 - RNA, 19 nt, Homo sapiens
  misc_RNA (1)...(19): siRNA sense strand
ggauauuauucaguggaga

SEQ ID NO: 2572166 - RNA, 19 nt, Homo sapiens
  misc_RNA (1)...(19): siRNA sense strand
acgacaaggcguucaccaa

SEQ ID NO: 2572167 - RNA, 19 nt, Homo sapiens
  misc_RNA (1)...(19): siRNA sense strand
uaguagauggacagauauu

SEQ ID NO: 2572168 - RNA, 19 nt, Homo sapiens
  misc_RNA (1)...(19): siRNA sense strand
uggcuacacauuuggacaa

SEQ ID NO: 2572169 - RNA, 19 nt, Homo sapiens
  misc_RNA (1)...(19): siRNA sense strand
gaaaguaugggaaugccaa

SEQ ID NO: 2572170 - RNA, 19 nt, Homo sapiens
  misc_RNA (1)...(19): siRNA sense strand
acgcauuacaauauugaga

SEQ ID NO: 2572171 - RNA, 19 nt, Homo sapiens
  misc_RNA (1)...(19): siRNA sense strand
ucaccaaggagcuggacca

SEQ ID NO: 2572172 - RNA, 19 nt, Homo sapiens
  misc_RNA (1)...(19): siRNA sense strand
cuguuaucguugugggaac

SEQ ID NO: 2572173 - RNA, 19 nt, Homo sapiens
  misc_RNA (1)...(19): siRNA sense strand
cggaggaggacgaggacuu

SEQ ID NO: 2572174 - RNA, 19 nt, Homo sapiens
  misc_RNA (1)...(19): siRNA sense strand
cugaugaggaagaggaaga

SEQ ID NO: 2572175 - RNA, 19 nt, Homo sapiens
  misc_RNA (1)...(19): siRNA sense strand
aaacaaggauggugggaac

SEQ ID NO: 2572176 - RNA, 19 nt, Homo sapiens
  misc_RNA (1)...(19): siRNA sense strand
ggauguaauaggagagaag

SEQ ID NO: 2572177 - RNA, 19 nt, Homo sapiens
  misc_RNA (1)...(19): siRNA sense strand
gagagaagaucuauaagga

SEQ ID NO: 2572178 - RNA, 19 nt, Homo sapiens
  misc_RNA (1)...(19): siRNA sense strand
aggaagaggaagauacaga

SEQ ID NO: 2572179 - RNA, 19 nt, Homo sapiens
  misc_RNA (1)...(19): siRNA sense strand
gagaagaucuauaaggaug

SEQ ID NO: 2572180 - RNA, 19 nt, Homo sapiens
  misc_RNA (1)...(19): siRNA sense strand
ucgaauucgcaguggagua

SEQ ID NO: 2572181 - RNA, 19 nt, Homo sapiens
  misc_RNA (1)...(19): siRNA sense strand
caucauagagucuggcgaa

SEQ ID NO: 2572182 - RNA, 19 nt, Homo sapiens
  misc_RNA (1)...(19): siRNA sense strand
gugaaaaggcugauagcuu

SEQ ID NO: 2572183 - RNA, 19 nt, Homo sapiens
  misc_RNA (1)...(19): siRNA sense strand
gauacagauccaaggguga

SEQ ID NO: 2572184 - RNA, 19 nt, Homo sapiens
  misc_RNA (1)...(19): siRNA sense strand
aaugcaaagaagaggaaga

SEQ ID NO: 2572185 - RNA, 19 nt, Homo sapiens
  misc_RNA (1)...(19): siRNA sense strand
uggacaucaugaagaggaa

SEQ ID NO: 2572186 - RNA, 19 nt, Homo sapiens
  misc_RNA (1)...(19): siRNA sense strand
uaauaggagagaagaucua

SEQ ID NO: 2572187 - RNA, 19 nt, Homo sapiens
  misc_RNA (1)...(19): siRNA sense strand
uugauuagaagcaggacua

SEQ ID NO: 2572188 - RNA, 19 nt, Homo sapiens
  misc_RNA (1)...(19): siRNA sense strand
ugucagaacgaaugaagau

SEQ ID NO: 2572189 - RNA, 19 nt, Homo sapiens
  misc_RNA (1)...(19): siRNA sense strand
gaucuauaaggauggagaa

SEQ ID NO: 2572190 - RNA, 19 nt, Homo sapiens
  misc_RNA (1)...(19): siRNA sense strand
auguaauaggagagaagau

SEQ ID NO: 2572191 - RNA, 19 nt, Homo sapiens
  misc_RNA (1)...(19): siRNA sense strand
agaggaagauacagaucca

SEQ ID NO: 2572192 - RNA, 19 nt, Homo sapiens
  misc_RNA (1)...(19): siRNA sense strand
cagcuuaugcaguuggaga

SEQ ID NO: 2572193 - RNA, 19 nt, Homo sapiens
  misc_RNA (1)...(19): siRNA sense strand
gcuuaguuauggauguaca

SEQ ID NO: 2572194 - RNA, 19 nt, Homo sapiens
  misc_RNA (1)...(19): siRNA sense strand
cgggugacuuuuagaagaa

SEQ ID NO: 2572195 - RNA, 19 nt, Homo sapiens
  misc_RNA (1)...(19): siRNA sense strand
aggagaugauggagacaac

SEQ ID NO: 2572196 - RNA, 19 nt, Homo sapiens
  misc_RNA (1)...(19): siRNA sense strand
ccuauaacccugaugagga

SEQ ID NO: 2572197 - RNA, 19 nt, Homo sapiens
  misc_RNA (1)...(19): siRNA sense strand
agaagcaggacuaaaucaa

SEQ ID NO: 2572198 - RNA, 19 nt, Homo sapiens
  misc_RNA (1)...(19): siRNA sense strand
caaacaaggauggugggaa

SEQ ID NO: 2572199 - RNA, 19 nt, Homo sapiens
  misc_RNA (1)...(19): siRNA sense strand
ccaaggagaugauggagac

SEQ ID NO: 2572200 - RNA, 19 nt, Homo sapiens
  misc_RNA (1)...(19): siRNA sense strand
aagaggaagauguuugaau

SEQ ID NO: 2572201 - RNA, 19 nt, Homo sapiens
  misc_RNA (1)...(19): siRNA sense strand
ccuuaaaucacuagaggug

SEQ ID NO: 2572202 - RNA, 19 nt, Homo sapiens
  misc_RNA (1)...(19): siRNA sense strand
aguuauggauguacaagca

SEQ ID NO: 2572203 - RNA, 19 nt, Homo sapiens
  misc_RNA (1)...(19): siRNA sense strand
augaggaacagcuggugaa

SEQ ID NO: 2572204 - RNA, 19 nt, Homo sapiens
  misc_RNA (1)...(19): siRNA sense strand
agaucuauaaggauggaga

SEQ ID NO: 2572205 - RNA, 19 nt, Homo sapiens
  misc_RNA (1)...(19): siRNA sense strand
cggaggagcugaaccgcua

SEQ ID NO: 2572206 - RNA, 19 nt, Homo sapiens
  misc_RNA (1)...(19): siRNA sense strand
ccggcagcgguaugggaaa

SEQ ID NO: 2572207 - RNA, 19 nt, Homo sapiens
  misc_RNA (1)...(19): siRNA sense strand
cggcagcgguaugggaaaa

SEQ ID NO: 2572208 - RNA, 19 nt, Homo sapiens
  misc_RNA (1)...(19): siRNA sense strand
gcaagagagccguggaauu

SEQ ID NO: 2572209 - RNA, 19 nt, Homo sapiens
  misc_RNA (1)...(19): siRNA sense strand
ugaaggagcuacagaggca

SEQ ID NO: 2572210 - RNA, 19 nt, Homo sapiens
  misc_RNA (1)...(19): siRNA sense strand
acgaaaucuucauggcaau

SEQ ID NO: 2572211 - RNA, 19 nt, Homo sapiens
  misc_RNA (1)...(19): siRNA sense strand
cugcaaugaacgugaacga

SEQ ID NO: 2572212 - RNA, 19 nt, Homo sapiens
  misc_RNA (1)...(19): siRNA sense strand
cagcuggacaggagcggua

SEQ ID NO: 2572213 - RNA, 19 nt, Homo sapiens
  misc_RNA (1)...(19): siRNA sense strand
cagcaagagagccguggaa

SEQ ID NO: 2572214 - RNA, 19 nt, Homo sapiens
  misc_RNA (1)...(19): siRNA sense strand
ggacacagcuggacaggag

SEQ ID NO: 2572215 - RNA, 19 nt, Homo sapiens
  misc_RNA (1)...(19): siRNA sense strand
aagccuaugcagacgacaa

SEQ ID NO: 2572216 - RNA, 19 nt, Homo sapiens
  misc_RNA (1)...(19): siRNA sense strand
aacgaaaucuucauggcaa

SEQ ID NO: 2572217 - RNA, 19 nt, Homo sapiens
  misc_RNA (1)...(19): siRNA sense strand
gggccaagaacugggugaa

SEQ ID NO: 2572218 - RNA, 19 nt, Homo sapiens
  misc_RNA (1)...(19): siRNA sense strand
ccaucguggucuaugacau

SEQ ID NO: 2572219 - RNA, 19 nt, Homo sapiens
  misc_RNA (1)...(19): siRNA sense strand
gggagucugcgguaggcaa

SEQ ID NO: 2572220 - RNA, 19 nt, Homo sapiens
  misc_RNA (1)...(19): siRNA sense strand
gcacaauuggagcggccuu

SEQ ID NO: 2572221 - RNA, 19 nt, Homo sapiens
  misc_RNA (1)...(19): siRNA sense strand
gcaagagagccguggaauu

SEQ ID NO: 2572222 - RNA, 19 nt, Homo sapiens
  misc_RNA (1)...(19): siRNA sense strand
ugaaggagcuacagaggca

SEQ ID NO: 2572223 - RNA, 19 nt, Homo sapiens
  misc_RNA (1)...(19): siRNA sense strand
acgaaaucuucauggcaau

SEQ ID NO: 2572224 - RNA, 19 nt, Homo sapiens
  misc_RNA (1)...(19): siRNA sense strand
cugcaaugaacgugaacga

SEQ ID NO: 2572225 - RNA, 19 nt, Homo sapiens
  misc_RNA (1)...(19): siRNA sense strand
cagcuggacaggagcggua

SEQ ID NO: 2572226 - RNA, 19 nt, Homo sapiens
  misc_RNA (1)...(19): siRNA sense strand
cagcaagagagccguggaa

SEQ ID NO: 2572227 - RNA, 19 nt, Homo sapiens
  misc_RNA (1)...(19): siRNA sense strand
ggacacagcuggacaggag

SEQ ID NO: 2572228 - RNA, 19 nt, Homo sapiens
  misc_RNA (1)...(19): siRNA sense strand
aagccuaugcagacgacaa

SEQ ID NO: 2572229 - RNA, 19 nt, Homo sapiens
  misc_RNA (1)...(19): siRNA sense strand
aacgaaaucuucauggcaa

SEQ ID NO: 2572230 - RNA, 19 nt, Homo sapiens
  misc_RNA (1)...(19): siRNA sense strand
gggccaagaacugggugaa

SEQ ID NO: 2572231 - RNA, 19 nt, Homo sapiens
  misc_RNA (1)...(19): siRNA sense strand
ccaucguggucuaugacau

SEQ ID NO: 2572232 - RNA, 19 nt, Homo sapiens
  misc_RNA (1)...(19): siRNA sense strand
gggagucugcgguaggcaa

SEQ ID NO: 2572233 - RNA, 19 nt, Homo sapiens
  misc_RNA (1)...(19): siRNA sense strand
gcacaauuggagcggccuu

SEQ ID NO: 2572234 - RNA, 19 nt, Homo sapiens
  misc_RNA (1)...(19): siRNA sense strand
ggacagaaauggauggcuu

SEQ ID NO: 2572235 - RNA, 19 nt, Homo sapiens
  misc_RNA (1)...(19): siRNA sense strand
ccaucgaggaacuggagaa

SEQ ID NO: 2572236 - RNA, 19 nt, Homo sapiens
  misc_RNA (1)...(19): siRNA sense strand
gugacuaaauucauggaga

SEQ ID NO: 2572237 - RNA, 19 nt, Homo sapiens
  misc_RNA (1)...(19): siRNA sense strand
uguacgaagcagugugcaa

SEQ ID NO: 2572238 - RNA, 19 nt, Homo sapiens
  misc_RNA (1)...(19): siRNA sense strand
ccagggaggucaaggccau

SEQ ID NO: 2572239 - RNA, 19 nt, Homo sapiens
  misc_RNA (1)...(19): siRNA sense strand
gcuuagaaggacugaagga

SEQ ID NO: 2572240 - RNA, 19 nt, Homo sapiens
  misc_RNA (1)...(19): siRNA sense strand
ggguuaucgagaaggugaa

SEQ ID NO: 2572241 - RNA, 19 nt, Homo sapiens
  misc_RNA (1)...(19): siRNA sense strand
ugguauaaucauagcggga

SEQ ID NO: 2572242 - RNA, 19 nt, Homo sapiens
  misc_RNA (1)...(19): siRNA sense strand
cgauauccagggaggucaa

SEQ ID NO: 2572243 - RNA, 19 nt, Homo sapiens
  misc_RNA (1)...(19): siRNA sense strand
accaggagcucgucggcaa

SEQ ID NO: 2572244 - RNA, 19 nt, Homo sapiens
  misc_RNA (1)...(19): siRNA sense strand
acaacaacuacuugacuau

SEQ ID NO: 2572245 - RNA, 19 nt, Homo sapiens
  misc_RNA (1)...(19): siRNA sense strand
agugcuugcuggaagagaa

SEQ ID NO: 2572246 - RNA, 19 nt, Homo sapiens
  misc_RNA (1)...(19): siRNA sense strand
gggcagugcuugcuggaag

SEQ ID NO: 2572247 - RNA, 19 nt, Homo sapiens
  misc_RNA (1)...(19): siRNA sense strand
ccacaagccuggacagcag

SEQ ID NO: 2572248 - RNA, 19 nt, Homo sapiens
  misc_RNA (1)...(19): siRNA sense strand
aagaaguggugcuugggau

SEQ ID NO: 2572249 - RNA, 19 nt, Homo sapiens
  misc_RNA (1)...(19): siRNA sense strand
gggcacaagaggagcaggu

SEQ ID NO: 2572250 - RNA, 19 nt, Homo sapiens
  misc_RNA (1)...(19): siRNA sense strand
gggcugagagacaaggcau

SEQ ID NO: 2572251 - RNA, 19 nt, Homo sapiens
  misc_RNA (1)...(19): siRNA sense strand
ucguaaacucgaaggcgau

SEQ ID NO: 2572252 - RNA, 19 nt, Homo sapiens
  misc_RNA (1)...(19): siRNA sense strand
caacauaggaaguggggcu

SEQ ID NO: 2572253 - RNA, 19 nt, Homo sapiens
  misc_RNA (1)...(19): siRNA sense strand
aggagcagcaauaggagau

SEQ ID NO: 2572254 - RNA, 19 nt, Homo sapiens
  misc_RNA (1)...(19): siRNA sense strand
gggugcaaguuggagacaa

SEQ ID NO: 2572255 - RNA, 19 nt, Homo sapiens
  misc_RNA (1)...(19): siRNA sense strand
aggccacaggguugguaua

SEQ ID NO: 2572256 - RNA, 19 nt, Homo sapiens
  misc_RNA (1)...(19): siRNA sense strand
ggguuuacuuugagaaaau

SEQ ID NO: 2572257 - RNA, 19 nt, Homo sapiens
  misc_RNA (1)...(19): siRNA sense strand
aaucaguguggauaagaaa

SEQ ID NO: 2572258 - RNA, 19 nt, Homo sapiens
  misc_RNA (1)...(19): siRNA sense strand
gaguacuacaugaugaaau

SEQ ID NO: 2572259 - RNA, 19 nt, Homo sapiens
  misc_RNA (1)...(19): siRNA sense strand
caaauguagucuaagagca

SEQ ID NO: 2572260 - RNA, 19 nt, Homo sapiens
  misc_RNA (1)...(19): siRNA sense strand
gugucuaugcuuaguaaaa

SEQ ID NO: 2572261 - RNA, 19 nt, Homo sapiens
  misc_RNA (1)...(19): siRNA sense strand
agaacugguaucaaagaau

SEQ ID NO: 2572262 - RNA, 19 nt, Homo sapiens
  misc_RNA (1)...(19): siRNA sense strand
cguuauuccagaacuuuaa

SEQ ID NO: 2572263 - RNA, 19 nt, Homo sapiens
  misc_RNA (1)...(19): siRNA sense strand
agcacugaaucgaguacua

SEQ ID NO: 2572264 - RNA, 19 nt, Homo sapiens
  misc_RNA (1)...(19): siRNA sense strand
gauuaauggguguauacau

SEQ ID NO: 2572265 - RNA, 19 nt, Homo sapiens
  misc_RNA (1)...(19): siRNA sense strand
acgaauagguagcggaaaa

SEQ ID NO: 2572266 - RNA, 19 nt, Homo sapiens
  misc_RNA (1)...(19): siRNA sense strand
ugggagaggaggagauuaa

SEQ ID NO: 2572267 - RNA, 19 nt, Homo sapiens
  misc_RNA (1)...(19): siRNA sense strand
ggaaaagaucgaaaagaaa

SEQ ID NO: 2572268 - RNA, 19 nt, Homo sapiens
  misc_RNA (1)...(19): siRNA sense strand
aggaaaagaucgaaaagaa

SEQ ID NO: 2572269 - RNA, 19 nt, Homo sapiens
  misc_RNA (1)...(19): siRNA sense strand
cagauuaggugcaggacca

SEQ ID NO: 2572270 - RNA, 19 nt, Homo sapiens
  misc_RNA (1)...(19): siRNA sense strand
auaucuugguagagguuaa

SEQ ID NO: 2572271 - RNA, 19 nt, Homo sapiens
  misc_RNA (1)...(19): siRNA sense strand
cggccuaaguaaagagucu

SEQ ID NO: 2572272 - RNA, 19 nt, Homo sapiens
  misc_RNA (1)...(19): siRNA sense strand
acugaaaguucgagaccga

SEQ ID NO: 2572273 - RNA, 19 nt, Homo sapiens
  misc_RNA (1)...(19): siRNA sense strand
ucacagaagaagaugucaa

SEQ ID NO: 2572274 - RNA, 19 nt, Homo sapiens
  misc_RNA (1)...(19): siRNA sense strand
gugaauugcuggauaaaau

SEQ ID NO: 2572275 - RNA, 19 nt, Homo sapiens
  misc_RNA (1)...(19): siRNA sense strand
aguuaaucgucgaggucau

SEQ ID NO: 2572276 - RNA, 19 nt, Homo sapiens
  misc_RNA (1)...(19): siRNA sense strand
gcacgaauagguagcggaa

SEQ ID NO: 2572277 - RNA, 19 nt, Homo sapiens
  misc_RNA (1)...(19): siRNA sense strand
aggaaauauuggcacgaau

SEQ ID NO: 2572278 - RNA, 19 nt, Homo sapiens
  misc_RNA (1)...(19): siRNA sense strand
uggaugaaccuaugggaga

SEQ ID NO: 2572279 - RNA, 19 nt, Homo sapiens
  misc_RNA (1)...(19): siRNA sense strand
guuaacagauuucggccua

SEQ ID NO: 2572280 - RNA, 19 nt, Homo sapiens
  misc_RNA (1)...(19): siRNA sense strand
ugaugauacaccagaggaa

SEQ ID NO: 2572281 - RNA, 19 nt, Homo sapiens
  misc_RNA (1)...(19): siRNA sense strand
acuuaugaaaggaggugaa

SEQ ID NO: 2572282 - RNA, 19 nt, Homo sapiens
  misc_RNA (1)...(19): siRNA sense strand
caacgauagacuggaauaa

SEQ ID NO: 2572283 - RNA, 19 nt, Homo sapiens
  misc_RNA (1)...(19): siRNA sense strand
ccaacuaaacagacaggau

SEQ ID NO: 2572284 - RNA, 19 nt, Homo sapiens
  misc_RNA (1)...(19): siRNA sense strand
ugaaaugcuuacugguaca

SEQ ID NO: 2572285 - RNA, 19 nt, Homo sapiens
  misc_RNA (1)...(19): siRNA sense strand
guauguaguaacagaacuu

SEQ ID NO: 2572286 - RNA, 19 nt, Homo sapiens
  misc_RNA (1)...(19): siRNA sense strand
uguaaaggaaggacaugaa

SEQ ID NO: 2572287 - RNA, 19 nt, Homo sapiens
  misc_RNA (1)...(19): siRNA sense strand
cgaaaagaaacaaugacua

SEQ ID NO: 2572288 - RNA, 19 nt, Homo sapiens
  misc_RNA (1)...(19): siRNA sense strand
ccucagaugaugaaagcca

SEQ ID NO: 2572289 - RNA, 19 nt, Homo sapiens
  misc_RNA (1)...(19): siRNA sense strand
agacccaacagaagaaauu

SEQ ID NO: 2572290 - RNA, 19 nt, Homo sapiens
  misc_RNA (1)...(19): siRNA sense strand
cugauggauaugaaguaaa

SEQ ID NO: 2572291 - RNA, 19 nt, Homo sapiens
  misc_RNA (1)...(19): siRNA sense strand
augauacaccagaggaaau

SEQ ID NO: 2572292 - RNA, 19 nt, Homo sapiens
  misc_RNA (1)...(19): siRNA sense strand
ccacaauaccaacuaaaca

SEQ ID NO: 2572293 - RNA, 19 nt, Homo sapiens
  misc_RNA (1)...(19): siRNA sense strand
cuuuaugccaugaagguau

SEQ ID NO: 2572294 - RNA, 19 nt, Homo sapiens
  misc_RNA (1)...(19): siRNA sense strand
guaaagagucuauugacca

SEQ ID NO: 2572295 - RNA, 19 nt, Homo sapiens
  misc_RNA (1)...(19): siRNA sense strand
cagcaguuacacaggaaca

SEQ ID NO: 2572296 - RNA, 19 nt, Homo sapiens
  misc_RNA (1)...(19): siRNA sense strand
ugaacuugcacuugcuuua

SEQ ID NO: 2572297 - RNA, 19 nt, Homo sapiens
  misc_RNA (1)...(19): siRNA sense strand
ucaacgauagacuggaaua

SEQ ID NO: 2572298 - RNA, 19 nt, Homo sapiens
  misc_RNA (1)...(19): siRNA sense strand
ccaacagaagaaauugaaa

SEQ ID NO: 2572299 - RNA, 19 nt, Homo sapiens
  misc_RNA (1)...(19): siRNA sense strand
ccaaggaaaagaucgaaaa

SEQ ID NO: 2572300 - RNA, 19 nt, Homo sapiens
  misc_RNA (1)...(19): siRNA sense strand
cugagaauggacagcaaau

SEQ ID NO: 2572301 - RNA, 19 nt, Homo sapiens
  misc_RNA (1)...(19): siRNA sense strand
cacagaagaagaugucaaa

SEQ ID NO: 2572302 - RNA, 19 nt, Homo sapiens
  misc_RNA (1)...(19): siRNA sense strand
aggaccagauggaguugaa

SEQ ID NO: 2572303 - RNA, 19 nt, Homo sapiens
  misc_RNA (1)...(19): siRNA sense strand
gagagacccaacagaagaa

SEQ ID NO: 2572304 - RNA, 19 nt, Homo sapiens
  misc_RNA (1)...(19): siRNA sense strand
agauuucggccuaaguaaa

SEQ ID NO: 2572305 - RNA, 19 nt, Homo sapiens
  misc_RNA (1)...(19): siRNA sense strand
augaagaaggucacaucaa

SEQ ID NO: 2572306 - RNA, 19 nt, Homo sapiens
  misc_RNA (1)...(19): siRNA sense strand
gugcaggaccagauggagu

SEQ ID NO: 2572307 - RNA, 19 nt, Homo sapiens
  misc_RNA (1)...(19): siRNA sense strand
ucucaacgauagacuggaa

SEQ ID NO: 2572308 - RNA, 19 nt, Homo sapiens
  misc_RNA (1)...(19): siRNA sense strand
gauaaaagcaagagagacc

SEQ ID NO: 2572309 - RNA, 19 nt, Homo sapiens
  misc_RNA (1)...(19): siRNA sense strand
ccugaagcgcagagucuuu

SEQ ID NO: 2572310 - RNA, 19 nt, Homo sapiens
  misc_RNA (1)...(19): siRNA sense strand
aguggugguuacuggaauu

SEQ ID NO: 2572311 - RNA, 19 nt, Homo sapiens
  misc_RNA (1)...(19): siRNA sense strand
ggcagggaucauuuggaaa

SEQ ID NO: 2572312 - RNA, 19 nt, Homo sapiens
  misc_RNA (1)...(19): siRNA sense strand
cagauuucggccuaaguaa

SEQ ID NO: 2572313 - RNA, 19 nt, Homo sapiens
  misc_RNA (1)...(19): siRNA sense strand
caaagauucaccuggcauu

SEQ ID NO: 2572314 - RNA, 19 nt, Homo sapiens
  misc_RNA (1)...(19): siRNA sense strand
aggaacaguauucaguuua

SEQ ID NO: 2572315 - RNA, 19 nt, Homo sapiens
  misc_RNA (1)...(19): siRNA sense strand
guuuacugauggauaugaa

SEQ ID NO: 2572316 - RNA, 19 nt, Homo sapiens
  misc_RNA (1)...(19): siRNA sense strand
acauggaguuugcagugaa

SEQ ID NO: 2572317 - RNA, 19 nt, Homo sapiens
  misc_RNA (1)...(19): siRNA sense strand
cuaugggagaggaggagau

SEQ ID NO: 2572318 - RNA, 19 nt, Homo sapiens
  misc_RNA (1)...(19): siRNA sense strand
gcaaaggaccuggugucaa

SEQ ID NO: 2572319 - RNA, 19 nt, Homo sapiens
  misc_RNA (1)...(19): siRNA sense strand
ccaucauccucgugggcaa

SEQ ID NO: 2572320 - RNA, 19 nt, Homo sapiens
  misc_RNA (1)...(19): siRNA sense strand
ccauuguaguggacggaga

SEQ ID NO: 2572321 - RNA, 19 nt, Homo sapiens
  misc_RNA (1)...(19): siRNA sense strand
cugcaaguucauugagaca

SEQ ID NO: 2572322 - RNA, 19 nt, Homo sapiens
  misc_RNA (1)...(19): siRNA sense strand
caaagaagccaacgcacga

SEQ ID NO: 2572323 - RNA, 19 nt, Homo sapiens
  misc_RNA (1)...(19): siRNA sense strand
gggacagcaaagaagccaa

SEQ ID NO: 2572324 - RNA, 19 nt, Homo sapiens
  misc_RNA (1)...(19): siRNA sense strand
aaacagaugaugugcccau

SEQ ID NO: 2572325 - RNA, 19 nt, Homo sapiens
  misc_RNA (1)...(19): siRNA sense strand
cauuguaguggacggagaa

SEQ ID NO: 2572326 - RNA, 19 nt, Homo sapiens
  misc_RNA (1)...(19): siRNA sense strand
aaucagaagcagcaagcaa

SEQ ID NO: 2572327 - RNA, 19 nt, Homo sapiens
  misc_RNA (1)...(19): siRNA sense strand
ugaaauauauugugcgucu

SEQ ID NO: 2572328 - RNA, 19 nt, Homo sapiens
  misc_RNA (1)...(19): siRNA sense strand
ccguauucuucauccuaaa

SEQ ID NO: 2572329 - RNA, 19 nt, Homo sapiens
  misc_RNA (1)...(19): siRNA sense strand
ggugaaauauauugugcgu

SEQ ID NO: 2572330 - RNA, 19 nt, Homo sapiens
  misc_RNA (1)...(19): siRNA sense strand
cuaucaucuuucacacaaa

SEQ ID NO: 2572331 - RNA, 19 nt, Homo sapiens
  misc_RNA (1)...(19): siRNA sense strand
augaagaaccacagggaaa

SEQ ID NO: 2572332 - RNA, 19 nt, Homo sapiens
  misc_RNA (1)...(19): siRNA sense strand
cagucaauguuguggguga

SEQ ID NO: 2572333 - RNA, 19 nt, Homo sapiens
  misc_RNA (1)...(19): siRNA sense strand
cgacagucaucuuggcuca

SEQ ID NO: 2572334 - RNA, 19 nt, Homo sapiens
  misc_RNA (1)...(19): siRNA sense strand
ggaugaacgucuuaggucu

SEQ ID NO: 2572335 - RNA, 19 nt, Homo sapiens
  misc_RNA (1)...(19): siRNA sense strand
gugcaugaagauauugaaa

SEQ ID NO: 2572336 - RNA, 19 nt, Homo sapiens
  misc_RNA (1)...(19): siRNA sense strand
gggaagaaucugcugcuca

SEQ ID NO: 2572337 - RNA, 19 nt, Homo sapiens
  misc_RNA (1)...(19): siRNA sense strand
ccauuuaugaugacaugaa

SEQ ID NO: 2572338 - RNA, 19 nt, Homo sapiens
  misc_RNA (1)...(19): siRNA sense strand
aggccaagcugauggugga

SEQ ID NO: 2572339 - RNA, 19 nt, Homo sapiens
  misc_RNA (1)...(19): siRNA sense strand
cuggacaggaugagaacuu

SEQ ID NO: 2572340 - RNA, 19 nt, Homo sapiens
  misc_RNA (1)...(19): siRNA sense strand
ucaucuuggcucagaggaa

SEQ ID NO: 2572341 - RNA, 19 nt, Homo sapiens
  misc_RNA (1)...(19): siRNA sense strand
gaggaagaaccuuggaaac

SEQ ID NO: 2572342 - RNA, 19 nt, Homo sapiens
  misc_RNA (1)...(19): siRNA sense strand
gugacaagcuggggaagaa

SEQ ID NO: 2572343 - RNA, 19 nt, Homo sapiens
  misc_RNA (1)...(19): siRNA sense strand
acugcaguguugaggaaga

SEQ ID NO: 2572344 - RNA, 19 nt, Homo sapiens
  misc_RNA (1)...(19): siRNA sense strand
auucaaacagugacgaaga

SEQ ID NO: 2572345 - RNA, 19 nt, Homo sapiens
  misc_RNA (1)...(19): siRNA sense strand
ccuggauggaggacagauu

SEQ ID NO: 2572346 - RNA, 19 nt, Homo sapiens
  misc_RNA (1)...(19): siRNA sense strand
cugaugugguuauguuaau

SEQ ID NO: 2572347 - RNA, 19 nt, Homo sapiens
  misc_RNA (1)...(19): siRNA sense strand
uugaaaugaccaagacuca

SEQ ID NO: 2572348 - RNA, 19 nt, Homo sapiens
  misc_RNA (1)...(19): siRNA sense strand
gcaucgagugcaugaagau

SEQ ID NO: 2572349 - RNA, 19 nt, Homo sapiens
  misc_RNA (1)...(19): siRNA sense strand
cugcaguguugaggaagaa

SEQ ID NO: 2572350 - RNA, 19 nt, Homo sapiens
  misc_RNA (1)...(19): siRNA sense strand
agauucaaacagugacgaa

SEQ ID NO: 2572351 - RNA, 19 nt, Homo sapiens
  misc_RNA (1)...(19): siRNA sense strand
accuuggaaacgugagaaa

SEQ ID NO: 2572352 - RNA, 19 nt, Homo sapiens
  misc_RNA (1)...(19): siRNA sense strand
cgaagaaaguccugguugc

SEQ ID NO: 2572353 - RNA, 19 nt, Homo sapiens
  misc_RNA (1)...(19): siRNA sense strand
ugacugaggugccggagga

SEQ ID NO: 2572354 - RNA, 19 nt, Homo sapiens
  misc_RNA (1)...(19): siRNA sense strand
ggacaggaugagaacuuca

SEQ ID NO: 2572355 - RNA, 19 nt, Homo sapiens
  misc_RNA (1)...(19): siRNA sense strand
acggaaggugccaacaaua

SEQ ID NO: 2572356 - RNA, 19 nt, Homo sapiens
  misc_RNA (1)...(19): siRNA sense strand
agaugggagaucaggccaa

SEQ ID NO: 2572357 - RNA, 19 nt, Homo sapiens
  misc_RNA (1)...(19): siRNA sense strand
gggauugauaagcguguga

SEQ ID NO: 2572358 - RNA, 19 nt, Homo sapiens
  misc_RNA (1)...(19): siRNA sense strand
ggaugagaacuucagucaa

SEQ ID NO: 2572359 - RNA, 19 nt, Homo sapiens
  misc_RNA (1)...(19): siRNA sense strand
cuacggaaggugccaacaa

SEQ ID NO: 2572360 - RNA, 19 nt, Homo sapiens
  misc_RNA (1)...(19): siRNA sense strand
aggaugagaacuucaguca

SEQ ID NO: 2572361 - RNA, 19 nt, Homo sapiens
  misc_RNA (1)...(19): siRNA sense strand
ucacaggugccguggccaa

SEQ ID NO: 2572362 - RNA, 19 nt, Homo sapiens
  misc_RNA (1)...(19): siRNA sense strand
gcaaggagaaccagcggga

SEQ ID NO: 2572363 - RNA, 19 nt, Homo sapiens
  misc_RNA (1)...(19): siRNA sense strand
aggagacagugcaggcuau

SEQ ID NO: 2572364 - RNA, 19 nt, Homo sapiens
  misc_RNA (1)...(19): siRNA sense strand
cagcaacaguaucgggaag

SEQ ID NO: 2572365 - RNA, 19 nt, Homo sapiens
  misc_RNA (1)...(19): siRNA sense strand
ccucacaacuggagcgcug

SEQ ID NO: 2572366 - RNA, 19 nt, Homo sapiens
  misc_RNA (1)...(19): siRNA sense strand
gaggagacagugcaggcua

SEQ ID NO: 2572367 - RNA, 19 nt, Homo sapiens
  misc_RNA (1)...(19): siRNA sense strand
agaaguacguggaggccaa

SEQ ID NO: 2572368 - RNA, 19 nt, Homo sapiens
  misc_RNA (1)...(19): siRNA sense strand
agacagagaaggaggacga

SEQ ID NO: 2572369 - RNA, 19 nt, Homo sapiens
  misc_RNA (1)...(19): siRNA sense strand
ccaucaagccacuggucaa

SEQ ID NO: 2572370 - RNA, 19 nt, Homo sapiens
  misc_RNA (1)...(19): siRNA sense strand
ggugaagaggagugagcau

SEQ ID NO: 2572371 - RNA, 19 nt, Homo sapiens
  misc_RNA (1)...(19): siRNA sense strand
acaagaaauaccugaguca

SEQ ID NO: 2572372 - RNA, 19 nt, Homo sapiens
  misc_RNA (1)...(19): siRNA sense strand
aggaggaggaggagagcga

SEQ ID NO: 2572373 - RNA, 19 nt, Homo sapiens
  misc_RNA (1)...(19): siRNA sense strand
gucaaauggcugaagguga

SEQ ID NO: 2572374 - RNA, 19 nt, Homo sapiens
  misc_RNA (1)...(19): siRNA sense strand
cugacuaccugaagggagu

SEQ ID NO: 2572375 - RNA, 19 nt, Homo sapiens
  misc_RNA (1)...(19): siRNA sense strand
gaggaggaggagagcgaca

SEQ ID NO: 2572376 - RNA, 19 nt, Homo sapiens
  misc_RNA (1)...(19): siRNA sense strand
cugaggaggaggaggagga

SEQ ID NO: 2572377 - RNA, 19 nt, Homo sapiens
  misc_RNA (1)...(19): siRNA sense strand
ucuaagugggccugggauu

SEQ ID NO: 2572378 - RNA, 19 nt, Homo sapiens
  misc_RNA (1)...(19): siRNA sense strand
ccguggagucugaggagga

SEQ ID NO: 2572379 - RNA, 19 nt, Homo sapiens
  misc_RNA (1)...(19): siRNA sense strand
agucugaggaggaggagga

SEQ ID NO: 2572380 - RNA, 19 nt, Homo sapiens
  misc_RNA (1)...(19): siRNA sense strand
ccaccaagauugugccugu

SEQ ID NO: 2572381 - RNA, 19 nt, Homo sapiens
  misc_RNA (1)...(19): siRNA sense strand
guguacguguccucggaaa

SEQ ID NO: 2572382 - RNA, 19 nt, Homo sapiens
  misc_RNA (1)...(19): siRNA sense strand
gcgacaguucagagacaga

SEQ ID NO: 2572383 - RNA, 19 nt, Homo sapiens
  misc_RNA (1)...(19): siRNA sense strand
ucaccaaccugcugaggga

SEQ ID NO: 2572384 - RNA, 19 nt, Homo sapiens
  misc_RNA (1)...(19): siRNA sense strand
agaaggaugguguggcgaa

SEQ ID NO: 2572385 - RNA, 19 nt, Homo sapiens
  misc_RNA (1)...(19): siRNA sense strand
agaucugggauguguacua

SEQ ID NO: 2572386 - RNA, 19 nt, Homo sapiens
  misc_RNA (1)...(19): siRNA sense strand
agauugugccuguggacau

SEQ ID NO: 2572387 - RNA, 19 nt, Homo sapiens
  misc_RNA (1)...(19): siRNA sense strand
cagucaucgugcagggcuu

SEQ ID NO: 2572388 - RNA, 19 nt, Homo sapiens
  misc_RNA (1)...(19): siRNA sense strand
guacaaagccagcugcagu

SEQ ID NO: 2572389 - RNA, 19 nt, Homo sapiens
  misc_RNA (1)...(19): siRNA sense strand
ccaucagcuuuguggacca

SEQ ID NO: 2572390 - RNA, 19 nt, Homo sapiens
  misc_RNA (1)...(19): siRNA sense strand
aagacuggccgcaggaaga

SEQ ID NO: 2572391 - RNA, 19 nt, Homo sapiens
  misc_RNA (1)...(19): siRNA sense strand
gcaggaagaaggauggugu

SEQ ID NO: 2572392 - RNA, 19 nt, Homo sapiens
  misc_RNA (1)...(19): siRNA sense strand
agcaguuugacaagaaaua

SEQ ID NO: 2572393 - RNA, 19 nt, Homo sapiens
  misc_RNA (1)...(19): siRNA sense strand
gggacaggugggagcaguu

SEQ ID NO: 2572394 - RNA, 19 nt, Homo sapiens
  misc_RNA (1)...(19): siRNA sense strand
uaccacuacuggagggaca

SEQ ID NO: 2572395 - RNA, 19 nt, Homo sapiens
  misc_RNA (1)...(19): siRNA sense strand
aggaggucuuccagcagaa

SEQ ID NO: 2572396 - RNA, 19 nt, Homo sapiens
  misc_RNA (1)...(19): siRNA sense strand
gggcaaggucucaggaagc

SEQ ID NO: 2572397 - RNA, 19 nt, Homo sapiens
  misc_RNA (1)...(19): siRNA sense strand
gagcaguuugacaagaaau

SEQ ID NO: 2572398 - RNA, 19 nt, Homo sapiens
  misc_RNA (1)...(19): siRNA sense strand
gaggagaaccgcagcgaga

SEQ ID NO: 2572399 - RNA, 19 nt, Homo sapiens
  misc_RNA (1)...(19): siRNA sense strand
ugagcgaggacgaggagaa

SEQ ID NO: 2572400 - RNA, 19 nt, Homo sapiens
  misc_RNA (1)...(19): siRNA sense strand
gguuaagaucaaagaugaa

SEQ ID NO: 2572401 - RNA, 19 nt, Homo sapiens
  misc_RNA (1)...(19): siRNA sense strand
gaucaaagaugaagcugga

SEQ ID NO: 2572402 - RNA, 19 nt, Homo sapiens
  misc_RNA (1)...(19): siRNA sense strand
cugaagacggaaagauuau

SEQ ID NO: 2572403 - RNA, 19 nt, Homo sapiens
  misc_RNA (1)...(19): siRNA sense strand
gggaaaugccaauugcaga

SEQ ID NO: 2572404 - RNA, 19 nt, Homo sapiens
  misc_RNA (1)...(19): siRNA sense strand
ccaccaagagcucgggaga

SEQ ID NO: 2572405 - RNA, 19 nt, Homo sapiens
  misc_RNA (1)...(19): siRNA sense strand
cgucauuacagcagcagau

SEQ ID NO: 2572406 - RNA, 19 nt, Homo sapiens
  misc_RNA (1)...(19): siRNA sense strand
agcaacgggcagaaagaaa

SEQ ID NO: 2572407 - RNA, 19 nt, Homo sapiens
  misc_RNA (1)...(19): siRNA sense strand
cgcaagagucagagugcca

SEQ ID NO: 2572408 - RNA, 19 nt, Homo sapiens
  misc_RNA (1)...(19): siRNA sense strand
cuuauuuccugaugggaca

SEQ ID NO: 2572409 - RNA, 19 nt, Homo sapiens
  misc_RNA (1)...(19): siRNA sense strand
auauggaugccuugaggaa

SEQ ID NO: 2572410 - RNA, 19 nt, Homo sapiens
  misc_RNA (1)...(19): siRNA sense strand
ccaaauacgcuggccgcaa

SEQ ID NO: 2572411 - RNA, 19 nt, Homo sapiens
  misc_RNA (1)...(19): siRNA sense strand
cgguucaagaggagggagu

SEQ ID NO: 2572412 - RNA, 19 nt, Homo sapiens
  misc_RNA (1)...(19): siRNA sense strand
ggagaagacaccugcagca

SEQ ID NO: 2572413 - RNA, 19 nt, Homo sapiens
  misc_RNA (1)...(19): siRNA sense strand
cgcagcaucacaugggaaa

SEQ ID NO: 2572414 - RNA, 19 nt, Homo sapiens
  misc_RNA (1)...(19): siRNA sense strand
ccuccaaagccaaugaguu

SEQ ID NO: 2572415 - RNA, 19 nt, Homo sapiens
  misc_RNA (1)...(19): siRNA sense strand
agugcagagcggcaggaaa

SEQ ID NO: 2572416 - RNA, 19 nt, Homo sapiens
  misc_RNA (1)...(19): siRNA sense strand
agccagaggagcugacaga

SEQ ID NO: 2572417 - RNA, 19 nt, Homo sapiens
  misc_RNA (1)...(19): siRNA sense strand
gggcagaaagaaauccaca

SEQ ID NO: 2572418 - RNA, 19 nt, Homo sapiens
  misc_RNA (1)...(19): siRNA sense strand
caccacaggaagauagaga

SEQ ID NO: 2572419 - RNA, 19 nt, Homo sapiens
  misc_RNA (1)...(19): siRNA sense strand
gaacagaaguuaaggccaa

SEQ ID NO: 2572420 - RNA, 19 nt, Homo sapiens
  misc_RNA (1)...(19): siRNA sense strand
acaagaaagcauuggcaaa

SEQ ID NO: 2572421 - RNA, 19 nt, Homo sapiens
  misc_RNA (1)...(19): siRNA sense strand
caguugaagaaaugagaaa

SEQ ID NO: 2572422 - RNA, 19 nt, Homo sapiens
  misc_RNA (1)...(19): siRNA sense strand
ccuugagaguaauggcuaa

SEQ ID NO: 2572423 - RNA, 19 nt, Homo sapiens
  misc_RNA (1)...(19): siRNA sense strand
agaacaauugcgagaacua

SEQ ID NO: 2572424 - RNA, 19 nt, Homo sapiens
  misc_RNA (1)...(19): siRNA sense strand
caauaaagacaaugguacu

SEQ ID NO: 2572425 - RNA, 19 nt, Homo sapiens
  misc_RNA (1)...(19): siRNA sense strand
auuuauagcagcagacaau

SEQ ID NO: 2572426 - RNA, 19 nt, Homo sapiens
  misc_RNA (1)...(19): siRNA sense strand
ggcuuaguauucugggaaa

SEQ ID NO: 2572427 - RNA, 19 nt, Homo sapiens
  misc_RNA (1)...(19): siRNA sense strand
cuguggaaggaaugauaaa

SEQ ID NO: 2572428 - RNA, 19 nt, Homo sapiens
  misc_RNA (1)...(19): siRNA sense strand
ucagagaacaauugcgaga

SEQ ID NO: 2572429 - RNA, 19 nt, Homo sapiens
  misc_RNA (1)...(19): siRNA sense strand
gcuuaguauucugggaaau

SEQ ID NO: 2572430 - RNA, 19 nt, Homo sapiens
  misc_RNA (1)...(19): siRNA sense strand
gguaaagaagaauggaacu

SEQ ID NO: 2572431 - RNA, 19 nt, Homo sapiens
  misc_RNA (1)...(19): siRNA sense strand
uggcuaaaauuaugagaga

SEQ ID NO: 2572432 - RNA, 19 nt, Homo sapiens
  misc_RNA (1)...(19): siRNA sense strand
guaaagaagaauggaacuu

SEQ ID NO: 2572433 - RNA, 19 nt, Homo sapiens
  misc_RNA (1)...(19): siRNA sense strand
cacagagaccacagacaaa

SEQ ID NO: 2572434 - RNA, 19 nt, Homo sapiens
  misc_RNA (1)...(19): siRNA sense strand
agacaaugguacuuggacu

SEQ ID NO: 2572435 - RNA, 19 nt, Homo sapiens
  misc_RNA (1)...(19): siRNA sense strand
ccacagacaaaguuauaca

SEQ ID NO: 2572436 - RNA, 19 nt, Homo sapiens
  misc_RNA (1)...(19): siRNA sense strand
gggcuuaguauucugggaa

SEQ ID NO: 2572437 - RNA, 19 nt, Homo sapiens
  misc_RNA (1)...(19): siRNA sense strand
guuugugaacagaaguuaa

SEQ ID NO: 2572438 - RNA, 19 nt, Homo sapiens
  misc_RNA (1)...(19): siRNA sense strand
gcagcuaggcuuacagcau

SEQ ID NO: 2572439 - RNA, 19 nt, Homo sapiens
  misc_RNA (1)...(19): siRNA sense strand
ugguggaauucaugaagau

SEQ ID NO: 2572440 - RNA, 19 nt, Homo sapiens
  misc_RNA (1)...(19): siRNA sense strand
gcugugaagccuugagagu

SEQ ID NO: 2572441 - RNA, 19 nt, Homo sapiens
  misc_RNA (1)...(19): siRNA sense strand
aggucgauuuggagaaguu

SEQ ID NO: 2572442 - RNA, 19 nt, Homo sapiens
  misc_RNA (1)...(19): siRNA sense strand
gauuuauagcagcagacaa

SEQ ID NO: 2572443 - RNA, 19 nt, Homo sapiens
  misc_RNA (1)...(19): siRNA sense strand
gcagcagacaauaaagaca

SEQ ID NO: 2572444 - RNA, 19 nt, Homo sapiens
  misc_RNA (1)...(19): siRNA sense strand
aagaauggaacuugcugua

SEQ ID NO: 2572445 - RNA, 19 nt, Homo sapiens
  misc_RNA (1)...(19): siRNA sense strand
acccaucaguugaagaaau

SEQ ID NO: 2572446 - RNA, 19 nt, Homo sapiens
  misc_RNA (1)...(19): siRNA sense strand
uugcuguauugcagacuua

SEQ ID NO: 2572447 - RNA, 19 nt, Homo sapiens
  misc_RNA (1)...(19): siRNA sense strand
uggccuugguccuguggaa

SEQ ID NO: 2572448 - RNA, 19 nt, Homo sapiens
  misc_RNA (1)...(19): siRNA sense strand
ggcaguaagacaugauuca

SEQ ID NO: 2572449 - RNA, 19 nt, Homo sapiens
  misc_RNA (1)...(19): siRNA sense strand
caauuuuacuugugugaca

SEQ ID NO: 2572450 - RNA, 19 nt, Homo sapiens
  misc_RNA (1)...(19): siRNA sense strand
ggaccauugcaauaaaaua

SEQ ID NO: 2572451 - RNA, 19 nt, Homo sapiens
  misc_RNA (1)...(19): siRNA sense strand
aagcauuggcaaaggucga

SEQ ID NO: 2572452 - RNA, 19 nt, Homo sapiens
  misc_RNA (1)...(19): siRNA sense strand
uccgugaggcagagauuua

SEQ ID NO: 2572453 - RNA, 19 nt, Homo sapiens
  misc_RNA (1)...(19): siRNA sense strand
gccauugcucauagagauu

SEQ ID NO: 2572454 - RNA, 19 nt, Homo sapiens
  misc_RNA (1)...(19): siRNA sense strand
caugauucagccacagaua

SEQ ID NO: 2572455 - RNA, 19 nt, Homo sapiens
  misc_RNA (1)...(19): siRNA sense strand
ugguaaagaagaauggaac

SEQ ID NO: 2572456 - RNA, 19 nt, Homo sapiens
  misc_RNA (1)...(19): siRNA sense strand
agagaauguugguaugcca

SEQ ID NO: 2572457 - RNA, 19 nt, Homo sapiens
  misc_RNA (1)...(19): siRNA sense strand
cacagauaccauugauauu

SEQ ID NO: 2572458 - RNA, 19 nt, Homo sapiens
  misc_RNA (1)...(19): siRNA sense strand
gugacaagagcgagaugau

SEQ ID NO: 2572459 - RNA, 19 nt, Homo sapiens
  misc_RNA (1)...(19): siRNA sense strand
acaaacuggccgagaagga

SEQ ID NO: 2572460 - RNA, 19 nt, Homo sapiens
  misc_RNA (1)...(19): siRNA sense strand
gcaacgaugaccagggugu

SEQ ID NO: 2572461 - RNA, 19 nt, Homo sapiens
  misc_RNA (1)...(19): siRNA sense strand
gagaaggaggagacaggga

SEQ ID NO: 2572462 - RNA, 19 nt, Homo sapiens
  misc_RNA (1)...(19): siRNA sense strand
aucuggagcuggagaccaa

SEQ ID NO: 2572463 - RNA, 19 nt, Homo sapiens
  misc_RNA (1)...(19): siRNA sense strand
acgaugggucugugcacaa

SEQ ID NO: 2572464 - RNA, 19 nt, Homo sapiens
  misc_RNA (1)...(19): siRNA sense strand
cagaggagagggaggccuu

SEQ ID NO: 2572465 - RNA, 19 nt, Homo sapiens
  misc_RNA (1)...(19): siRNA sense strand
ggaggagggugacuggaca

SEQ ID NO: 2572466 - RNA, 19 nt, Homo sapiens
  misc_RNA (1)...(19): siRNA sense strand
cagggugacaagagcgaga

SEQ ID NO: 2572467 - RNA, 19 nt, Homo sapiens
  misc_RNA (1)...(19): siRNA sense strand
uaagagaugcuguggagga

SEQ ID NO: 2572468 - RNA, 19 nt, Homo sapiens
  misc_RNA (1)...(19): siRNA sense strand
augcuguggaggaggguga

SEQ ID NO: 2572469 - RNA, 19 nt, Homo sapiens
  misc_RNA (1)...(19): siRNA sense strand
gugacaagagcgagaugau

SEQ ID NO: 2572470 - RNA, 19 nt, Homo sapiens
  misc_RNA (1)...(19): siRNA sense strand
acaaacuggccgagaagga

SEQ ID NO: 2572471 - RNA, 19 nt, Homo sapiens
  misc_RNA (1)...(19): siRNA sense strand
gcaacgaugaccagggugu

SEQ ID NO: 2572472 - RNA, 19 nt, Homo sapiens
  misc_RNA (1)...(19): siRNA sense strand
gagaaggaggagacaggga

SEQ ID NO: 2572473 - RNA, 19 nt, Homo sapiens
  misc_RNA (1)...(19): siRNA sense strand
aucuggagcuggagaccaa

SEQ ID NO: 2572474 - RNA, 19 nt, Homo sapiens
  misc_RNA (1)...(19): siRNA sense strand
acgaugggucugugcacaa

SEQ ID NO: 2572475 - RNA, 19 nt, Homo sapiens
  misc_RNA (1)...(19): siRNA sense strand
cagaggagagggaggccuu

SEQ ID NO: 2572476 - RNA, 19 nt, Homo sapiens
  misc_RNA (1)...(19): siRNA sense strand
ggaggagggugacuggaca

SEQ ID NO: 2572477 - RNA, 19 nt, Homo sapiens
  misc_RNA (1)...(19): siRNA sense strand
cagggugacaagagcgaga

SEQ ID NO: 2572478 - RNA, 19 nt, Homo sapiens
  misc_RNA (1)...(19): siRNA sense strand
uaagagaugcuguggagga

SEQ ID NO: 2572479 - RNA, 19 nt, Homo sapiens
  misc_RNA (1)...(19): siRNA sense strand
augcuguggaggaggguga

SEQ ID NO: 2572480 - RNA, 19 nt, Homo sapiens
  misc_RNA (1)...(19): siRNA sense strand
aaggagaagaugagagaau

SEQ ID NO: 2572481 - RNA, 19 nt, Homo sapiens
  misc_RNA (1)...(19): siRNA sense strand
aagacaauaaggagaacaa

SEQ ID NO: 2572482 - RNA, 19 nt, Homo sapiens
  misc_RNA (1)...(19): siRNA sense strand
cggacuuggcuaugaacua

SEQ ID NO: 2572483 - RNA, 19 nt, Homo sapiens
  misc_RNA (1)...(19): siRNA sense strand
uugaagaugcaaaggagaa

SEQ ID NO: 2572484 - RNA, 19 nt, Homo sapiens
  misc_RNA (1)...(19): siRNA sense strand
aggagaagcaugugaaucu

SEQ ID NO: 2572485 - RNA, 19 nt, Homo sapiens
  misc_RNA (1)...(19): siRNA sense strand
cuuugaaggaagaugguau

SEQ ID NO: 2572486 - RNA, 19 nt, Homo sapiens
  misc_RNA (1)...(19): siRNA sense strand
uugaagacaauaaggagaa

SEQ ID NO: 2572487 - RNA, 19 nt, Homo sapiens
  misc_RNA (1)...(19): siRNA sense strand
gagauuaagaccuggggaa

SEQ ID NO: 2572488 - RNA, 19 nt, Homo sapiens
  misc_RNA (1)...(19): siRNA sense strand
ccguauuccaagagcucaa

SEQ ID NO: 2572489 - RNA, 19 nt, Homo sapiens
  misc_RNA (1)...(19): siRNA sense strand
aaggaagaugguauggaaa

SEQ ID NO: 2572490 - RNA, 19 nt, Homo sapiens
  misc_RNA (1)...(19): siRNA sense strand
gccaugaacucuuagguca

SEQ ID NO: 2572491 - RNA, 19 nt, Homo sapiens
  misc_RNA (1)...(19): siRNA sense strand
gagcauaaccagugccaug

SEQ ID NO: 2572492 - RNA, 19 nt, Homo sapiens
  misc_RNA (1)...(19): siRNA sense strand
uuagaaaggggaagagcaa

SEQ ID NO: 2572493 - RNA, 19 nt, Homo sapiens
  misc_RNA (1)...(19): siRNA sense strand
gaugcaaaggagaagauga

SEQ ID NO: 2572494 - RNA, 19 nt, Homo sapiens
  misc_RNA (1)...(19): siRNA sense strand
caggaaugucuuaucacaa

SEQ ID NO: 2572495 - RNA, 19 nt, Homo sapiens
  misc_RNA (1)...(19): siRNA sense strand
cagaggaggcuguucaaaa

SEQ ID NO: 2572496 - RNA, 19 nt, Homo sapiens
  misc_RNA (1)...(19): siRNA sense strand
ccaugcuugcagagaguau

SEQ ID NO: 2572497 - RNA, 19 nt, Homo sapiens
  misc_RNA (1)...(19): siRNA sense strand
uauguaaacaagauggaca

SEQ ID NO: 2572498 - RNA, 19 nt, Homo sapiens
  misc_RNA (1)...(19): siRNA sense strand
aaagaaugaaguuggagga

SEQ ID NO: 2572499 - RNA, 19 nt, Homo sapiens
  misc_RNA (1)...(19): siRNA sense strand
cuggacaugccaaaguaaa

SEQ ID NO: 2572500 - RNA, 19 nt, Homo sapiens
  misc_RNA (1)...(19): siRNA sense strand
cugaaagacaccaagagca

SEQ ID NO: 2572501 - RNA, 19 nt, Homo sapiens
  misc_RNA (1)...(19): siRNA sense strand
ccuauaaagaugagggcaa

SEQ ID NO: 2572502 - RNA, 19 nt, Homo sapiens
  misc_RNA (1)...(19): siRNA sense strand
aagaaaagaaggagaggaa

SEQ ID NO: 2572503 - RNA, 19 nt, Homo sapiens
  misc_RNA (1)...(19): siRNA sense strand
gggagaaggaauuugaaaa

SEQ ID NO: 2572504 - RNA, 19 nt, Homo sapiens
  misc_RNA (1)...(19): siRNA sense strand
aggucuacuuugaggauga

SEQ ID NO: 2572505 - RNA, 19 nt, Homo sapiens
  misc_RNA (1)...(19): siRNA sense strand
caugaggaccagugggaga

SEQ ID NO: 2572506 - RNA, 19 nt, Homo sapiens
  misc_RNA (1)...(19): siRNA sense strand
gcagacaagcugaagcgaa

SEQ ID NO: 2572507 - RNA, 19 nt, Homo sapiens
  misc_RNA (1)...(19): siRNA sense strand
cuucuggaaaugagggcua

SEQ ID NO: 2572508 - RNA, 19 nt, Homo sapiens
  misc_RNA (1)...(19): siRNA sense strand
ccucagaaggucuagguga

SEQ ID NO: 2572509 - RNA, 19 nt, Homo sapiens
  misc_RNA (1)...(19): siRNA sense strand
aggacagggcagaacuaua

SEQ ID NO: 2572510 - RNA, 19 nt, Homo sapiens
  misc_RNA (1)...(19): siRNA sense strand
gggcagaacuauaccgggu

SEQ ID NO: 2572511 - RNA, 19 nt, Homo sapiens
  misc_RNA (1)...(19): siRNA sense strand
cgaauugaacagagggaug

SEQ ID NO: 2572512 - RNA, 19 nt, Homo sapiens
  misc_RNA (1)...(19): siRNA sense strand
gugaugagggacugcaaau

SEQ ID NO: 2572513 - RNA, 19 nt, Homo sapiens
  misc_RNA (1)...(19): siRNA sense strand
aggagaggaaucagaauga

SEQ ID NO: 2572514 - RNA, 19 nt, Homo sapiens
  misc_RNA (1)...(19): siRNA sense strand
gggagaaagguguaccaga

SEQ ID NO: 2572515 - RNA, 19 nt, Homo sapiens
  misc_RNA (1)...(19): siRNA sense strand
acgagagcgccaucagaaa

SEQ ID NO: 2572516 - RNA, 19 nt, Homo sapiens
  misc_RNA (1)...(19): siRNA sense strand
cuccagaagaacaggccaa

SEQ ID NO: 2572517 - RNA, 19 nt, Homo sapiens
  misc_RNA (1)...(19): siRNA sense strand
gaccagugggagaaggaau

SEQ ID NO: 2572518 - RNA, 19 nt, Homo sapiens
  misc_RNA (1)...(19): siRNA sense strand
cuugggaccuagagcaaaa

SEQ ID NO: 2572519 - RNA, 19 nt, Homo sapiens
  misc_RNA (1)...(19): siRNA sense strand
aagccaacuugaaagaaaa

SEQ ID NO: 2572520 - RNA, 19 nt, Homo sapiens
  misc_RNA (1)...(19): siRNA sense strand
ugggagaaggaauuugaaa

SEQ ID NO: 2572521 - RNA, 19 nt, Homo sapiens
  misc_RNA (1)...(19): siRNA sense strand
gcacaguacuaucugggca

SEQ ID NO: 2572522 - RNA, 19 nt, Homo sapiens
  misc_RNA (1)...(19): siRNA sense strand
gaacuggugugaugaggga

SEQ ID NO: 2572523 - RNA, 19 nt, Homo sapiens
  misc_RNA (1)...(19): siRNA sense strand
gggcuaaagcagacaagcu

SEQ ID NO: 2572524 - RNA, 19 nt, Homo sapiens
  misc_RNA (1)...(19): siRNA sense strand
aacagagggaugugaggaa

SEQ ID NO: 2572525 - RNA, 19 nt, Homo sapiens
  misc_RNA (1)...(19): siRNA sense strand
aggcuuuacuccaggccau

SEQ ID NO: 2572526 - RNA, 19 nt, Homo sapiens
  misc_RNA (1)...(19): siRNA sense strand
cuaaagcagacaagcugaa

SEQ ID NO: 2572527 - RNA, 19 nt, Homo sapiens
  misc_RNA (1)...(19): siRNA sense strand
aaagaagaaaugugcagau

SEQ ID NO: 2572528 - RNA, 19 nt, Homo sapiens
  misc_RNA (1)...(19): siRNA sense strand
acugcaaauagaugccaaa

SEQ ID NO: 2572529 - RNA, 19 nt, Homo sapiens
  misc_RNA (1)...(19): siRNA sense strand
uggaagagauccugcugga

SEQ ID NO: 2572530 - RNA, 19 nt, Homo sapiens
  misc_RNA (1)...(19): siRNA sense strand
uugacugguuugagacaca

SEQ ID NO: 2572531 - RNA, 19 nt, Homo sapiens
  misc_RNA (1)...(19): siRNA sense strand
aggagauucuggaagcuga

SEQ ID NO: 2572532 - RNA, 19 nt, Homo sapiens
  misc_RNA (1)...(19): siRNA sense strand
gaacacaagcaguuggaga

SEQ ID NO: 2572533 - RNA, 19 nt, Homo sapiens
  misc_RNA (1)...(19): siRNA sense strand
cggaagaacaacagcugau

SEQ ID NO: 2572534 - RNA, 19 nt, Homo sapiens
  misc_RNA (1)...(19): siRNA sense strand
ugaacaaagaggagaugga

SEQ ID NO: 2572535 - RNA, 19 nt, Homo sapiens
  misc_RNA (1)...(19): siRNA sense strand
agggcaaacucaaggacca

SEQ ID NO: 2572536 - RNA, 19 nt, Homo sapiens
  misc_RNA (1)...(19): siRNA sense strand
gggcaaacucaaggaccaa

SEQ ID NO: 2572537 - RNA, 19 nt, Homo sapiens
  misc_RNA (1)...(19): siRNA sense strand
agacaaaagcuuaaagacu

SEQ ID NO: 2572538 - RNA, 19 nt, Homo sapiens
  misc_RNA (1)...(19): siRNA sense strand
cggacauguacuggaauaa

SEQ ID NO: 2572539 - RNA, 19 nt, Homo sapiens
  misc_RNA (1)...(19): siRNA sense strand
acagcugauguuugagaaa

SEQ ID NO: 2572540 - RNA, 19 nt, Homo sapiens
  misc_RNA (1)...(19): siRNA sense strand
aacacaagcaguuggagaa

SEQ ID NO: 2572541 - RNA, 19 nt, Homo sapiens
  misc_RNA (1)...(19): siRNA sense strand
ccuggaagcuuaaggcugu

SEQ ID NO: 2572542 - RNA, 19 nt, Homo sapiens
  misc_RNA (1)...(19): siRNA sense strand
cugcugaacgagaugaaca

SEQ ID NO: 2572543 - RNA, 19 nt, Homo sapiens
  misc_RNA (1)...(19): siRNA sense strand
gagaugaacaccuugcgua

SEQ ID NO: 2572544 - RNA, 19 nt, Homo sapiens
  misc_RNA (1)...(19): siRNA sense strand
ccgaaaaucaccucaaaga

SEQ ID NO: 2572545 - RNA, 19 nt, Homo sapiens
  misc_RNA (1)...(19): siRNA sense strand
gaaggauagaggauggcaa

SEQ ID NO: 2572546 - RNA, 19 nt, Homo sapiens
  misc_RNA (1)...(19): siRNA sense strand
ggacauugguacugagugc

SEQ ID NO: 2572547 - RNA, 19 nt, Homo sapiens
  misc_RNA (1)...(19): siRNA sense strand
gcgagaacccagacgacga

SEQ ID NO: 2572548 - RNA, 19 nt, Homo sapiens
  misc_RNA (1)...(19): siRNA sense strand
ugaaguugcugcaugccua

SEQ ID NO: 2572549 - RNA, 19 nt, Homo sapiens
  misc_RNA (1)...(19): siRNA sense strand
gagcagggcuuuacgcaac

SEQ ID NO: 2572550 - RNA, 19 nt, Homo sapiens
  misc_RNA (1)...(19): siRNA sense strand
cgagcagggcuuuacgcaa

SEQ ID NO: 2572551 - RNA, 19 nt, Homo sapiens
  misc_RNA (1)...(19): siRNA sense strand
cuucauuggcacagacguu

SEQ ID NO: 2572552 - RNA, 19 nt, Homo sapiens
  misc_RNA (1)...(19): siRNA sense strand
gaacagagccacacgacuc

SEQ ID NO: 2572553 - RNA, 19 nt, Homo sapiens
  misc_RNA (1)...(19): siRNA sense strand
cggugugcguguacagcau

SEQ ID NO: 2572554 - RNA, 19 nt, Homo sapiens
  misc_RNA (1)...(19): siRNA sense strand
ccuucaaagaugaccgaaa

SEQ ID NO: 2572555 - RNA, 19 nt, Homo sapiens
  misc_RNA (1)...(19): siRNA sense strand
cugaagaagaagaaacaca

SEQ ID NO: 2572556 - RNA, 19 nt, Homo sapiens
  misc_RNA (1)...(19): siRNA sense strand
aggaggcggucaagggcua

SEQ ID NO: 2572557 - RNA, 19 nt, Homo sapiens
  misc_RNA (1)...(19): siRNA sense strand
aguagaaaauugugcaaga

SEQ ID NO: 2572558 - RNA, 19 nt, Homo sapiens
  misc_RNA (1)...(19): siRNA sense strand
ucaacaaggcccuggcaga

SEQ ID NO: 2572559 - RNA, 19 nt, Homo sapiens
  misc_RNA (1)...(19): siRNA sense strand
cagaaaaguaugacagcga

SEQ ID NO: 2572560 - RNA, 19 nt, Homo sapiens
  misc_RNA (1)...(19): siRNA sense strand
ggugaaaggacaagggacc

SEQ ID NO: 2572561 - RNA, 19 nt, Homo sapiens
  misc_RNA (1)...(19): siRNA sense strand
agaaaauugugcaagaaga

SEQ ID NO: 2572562 - RNA, 19 nt, Homo sapiens
  misc_RNA (1)...(19): siRNA sense strand
gaccugagcccgaaggaca

SEQ ID NO: 2572563 - RNA, 19 nt, Homo sapiens
  misc_RNA (1)...(19): siRNA sense strand
agaaauacgcagugccugu

SEQ ID NO: 2572564 - RNA, 19 nt, Homo sapiens
  misc_RNA (1)...(19): siRNA sense strand
ggaauaauguacuggugcu

SEQ ID NO: 2572565 - RNA, 19 nt, Homo sapiens
  misc_RNA (1)...(19): siRNA sense strand
cccugaagaagaagaaaca

SEQ ID NO: 2572566 - RNA, 19 nt, Homo sapiens
  misc_RNA (1)...(19): siRNA sense strand
caugaaagacuagggaaaa

SEQ ID NO: 2572567 - RNA, 19 nt, Homo sapiens
  misc_RNA (1)...(19): siRNA sense strand
ugggaagagcagcagacaa

SEQ ID NO: 2572568 - RNA, 19 nt, Homo sapiens
  misc_RNA (1)...(19): siRNA sense strand
gcaaaggucuccucgcuca

SEQ ID NO: 2572569 - RNA, 19 nt, Homo sapiens
  misc_RNA (1)...(19): siRNA sense strand
ccacacuguaagaagguca

SEQ ID NO: 2572570 - RNA, 19 nt, Homo sapiens
  misc_RNA (1)...(19): siRNA sense strand
ccucugaauuugaaaacau

SEQ ID NO: 2572571 - RNA, 19 nt, Homo sapiens
  misc_RNA (1)...(19): siRNA sense strand
ggggacaacuuccgggaga

SEQ ID NO: 2572572 - RNA, 19 nt, Homo sapiens
  misc_RNA (1)...(19): siRNA sense strand
agaaacacaccuuggucau

SEQ ID NO: 2572573 - RNA, 19 nt, Homo sapiens
  misc_RNA (1)...(19): siRNA sense strand
acuacuaccacuaugggaa

SEQ ID NO: 2572574 - RNA, 19 nt, Homo sapiens
  misc_RNA (1)...(19): siRNA sense strand
ccaaagauguuguccaccu

SEQ ID NO: 2572575 - RNA, 19 nt, Homo sapiens
  misc_RNA (1)...(19): siRNA sense strand
agacaagcguguugcaccu

SEQ ID NO: 2572576 - RNA, 19 nt, Homo sapiens
  misc_RNA (1)...(19): siRNA sense strand
agauaaugcaagucagaaa

SEQ ID NO: 2572577 - RNA, 19 nt, Homo sapiens
  misc_RNA (1)...(19): siRNA sense strand
ggucagagggcaaagggaa

SEQ ID NO: 2572578 - RNA, 19 nt, Homo sapiens
  misc_RNA (1)...(19): siRNA sense strand
cuagagggucagagggcaa

SEQ ID NO: 2572579 - RNA, 19 nt, Homo sapiens
  misc_RNA (1)...(19): siRNA sense strand
aaaccgaagauuagaggaa

SEQ ID NO: 2572580 - RNA, 19 nt, Homo sapiens
  misc_RNA (1)...(19): siRNA sense strand
ggaagaaauccaggaacaa

SEQ ID NO: 2572581 - RNA, 19 nt, Homo sapiens
  misc_RNA (1)...(19): siRNA sense strand
cggacugcuuugugaagaa

SEQ ID NO: 2572582 - RNA, 19 nt, Homo sapiens
  misc_RNA (1)...(19): siRNA sense strand
caguaagagcccucauaua

SEQ ID NO: 2572583 - RNA, 19 nt, Homo sapiens
  misc_RNA (1)...(19): siRNA sense strand
uggcauuguaggagcuuua

SEQ ID NO: 2572584 - RNA, 19 nt, Homo sapiens
  misc_RNA (1)...(19): siRNA sense strand
agguaauggugccgauaau

SEQ ID NO: 2572585 - RNA, 19 nt, Homo sapiens
  misc_RNA (1)...(19): siRNA sense strand
acaucaugagaaagagaaa

SEQ ID NO: 2572586 - RNA, 19 nt, Homo sapiens
  misc_RNA (1)...(19): siRNA sense strand
ggagaugauuggaggcugu

SEQ ID NO: 2572587 - RNA, 19 nt, Homo sapiens
  misc_RNA (1)...(19): siRNA sense strand
acaaggaagagaaagcaaa

SEQ ID NO: 2572588 - RNA, 19 nt, Homo sapiens
  misc_RNA (1)...(19): siRNA sense strand
auaaagagaaggacaaaca

SEQ ID NO: 2572589 - RNA, 19 nt, Homo sapiens
  misc_RNA (1)...(19): siRNA sense strand
cauugaagcgcuuggaaga

SEQ ID NO: 2572590 - RNA, 19 nt, Homo sapiens
  misc_RNA (1)...(19): siRNA sense strand
gccuaaaagcuuugaaaau

SEQ ID NO: 2572591 - RNA, 19 nt, Homo sapiens
  misc_RNA (1)...(19): siRNA sense strand
ggaagauacuacugcacga

SEQ ID NO: 2572592 - RNA, 19 nt, Homo sapiens
  misc_RNA (1)...(19): siRNA sense strand
aggauaaacaucaugagaa

SEQ ID NO: 2572593 - RNA, 19 nt, Homo sapiens
  misc_RNA (1)...(19): siRNA sense strand
ggguacuccuagugacauu

SEQ ID NO: 2572594 - RNA, 19 nt, Homo sapiens
  misc_RNA (1)...(19): siRNA sense strand
agagaaggacaaacacaaa

SEQ ID NO: 2572595 - RNA, 19 nt, Homo sapiens
  misc_RNA (1)...(19): siRNA sense strand
uggcauagaagaagaaacu

SEQ ID NO: 2572596 - RNA, 19 nt, Homo sapiens
  misc_RNA (1)...(19): siRNA sense strand
gcauagaagaagaaacugu

SEQ ID NO: 2572597 - RNA, 19 nt, Homo sapiens
  misc_RNA (1)...(19): siRNA sense strand
auguauggcaauagaucaa

SEQ ID NO: 2572598 - RNA, 19 nt, Homo sapiens
  misc_RNA (1)...(19): siRNA sense strand
ggagugaaggacagcaauu

SEQ ID NO: 2572599 - RNA, 19 nt, Homo sapiens
  misc_RNA (1)...(19): siRNA sense strand
ggacaaaguaccagcagcu

SEQ ID NO: 2572600 - RNA, 19 nt, Homo sapiens
  misc_RNA (1)...(19): siRNA sense strand
cagaaauuuccaugcagua

SEQ ID NO: 2572601 - RNA, 19 nt, Homo sapiens
  misc_RNA (1)...(19): siRNA sense strand
agacaauagccgcaaccua

SEQ ID NO: 2572602 - RNA, 19 nt, Homo sapiens
  misc_RNA (1)...(19): siRNA sense strand
aagagaaggacaaacacaa

SEQ ID NO: 2572603 - RNA, 19 nt, Homo sapiens
  misc_RNA (1)...(19): siRNA sense strand
ugaugaacaaggaagagaa

SEQ ID NO: 2572604 - RNA, 19 nt, Homo sapiens
  misc_RNA (1)...(19): siRNA sense strand
uauacaagcacuagcaaca

SEQ ID NO: 2572605 - RNA, 19 nt, Homo sapiens
  misc_RNA (1)...(19): siRNA sense strand
aagaaagccugguggugga

SEQ ID NO: 2572606 - RNA, 19 nt, Homo sapiens
  misc_RNA (1)...(19): siRNA sense strand
aguugaaaaccgaagauua

SEQ ID NO: 2572607 - RNA, 19 nt, Homo sapiens
  misc_RNA (1)...(19): siRNA sense strand
accgaagauuagaggaaca

SEQ ID NO: 2572608 - RNA, 19 nt, Homo sapiens
  misc_RNA (1)...(19): siRNA sense strand
cagagugagaugugaacuu

SEQ ID NO: 2572609 - RNA, 19 nt, Homo sapiens
  misc_RNA (1)...(19): siRNA sense strand
ccucucacucucaggauaa

SEQ ID NO: 2572610 - RNA, 19 nt, Homo sapiens
  misc_RNA (1)...(19): siRNA sense strand
aggacaaacacaaacagaa

SEQ ID NO: 2572611 - RNA, 19 nt, Homo sapiens
  misc_RNA (1)...(19): siRNA sense strand
acaaacacaaacagaaaca

SEQ ID NO: 2572612 - RNA, 19 nt, Homo sapiens
  misc_RNA (1)...(19): siRNA sense strand
guggagugaaggacagcaa

SEQ ID NO: 2572613 - RNA, 19 nt, Homo sapiens
  misc_RNA (1)...(19): siRNA sense strand
ugaccagcaacgacaaaua

SEQ ID NO: 2572614 - RNA, 19 nt, Homo sapiens
  misc_RNA (1)...(19): siRNA sense strand
aagaagaaacuguaaagga

SEQ ID NO: 2572615 - RNA, 19 nt, Homo sapiens
  misc_RNA (1)...(19): siRNA sense strand
cuggcagacccaaaggaaa

SEQ ID NO: 2572616 - RNA, 19 nt, Homo sapiens
  misc_RNA (1)...(19): siRNA sense strand
acaaacagaaacacaagaa

SEQ ID NO: 2572617 - RNA, 19 nt, Homo sapiens
  misc_RNA (1)...(19): siRNA sense strand
uuugugaagaagaagguaa

SEQ ID NO: 2572618 - RNA, 19 nt, Homo sapiens
  misc_RNA (1)...(19): siRNA sense strand
caccuggagauuuggguaa

SEQ ID NO: 2572619 - RNA, 19 nt, Homo sapiens
  misc_RNA (1)...(19): siRNA sense strand
ccauggagauaaugcaagu

SEQ ID NO: 2572620 - RNA, 19 nt, Homo sapiens
  misc_RNA (1)...(19): siRNA sense strand
cauaaaggagagucuggaa

SEQ ID NO: 2572621 - RNA, 19 nt, Homo sapiens
  misc_RNA (1)...(19): siRNA sense strand
gcaacagcaguuuggaaaa

SEQ ID NO: 2572622 - RNA, 19 nt, Homo sapiens
  misc_RNA (1)...(19): siRNA sense strand
gccuggugguggaagaaau

SEQ ID NO: 2572623 - RNA, 19 nt, Homo sapiens
  misc_RNA (1)...(19): siRNA sense strand
uggcagacccaaaggaaac

SEQ ID NO: 2572624 - RNA, 19 nt, Homo sapiens
  misc_RNA (1)...(19): siRNA sense strand
ccgaagauuagaggaacaa

SEQ ID NO: 2572625 - RNA, 19 nt, Homo sapiens
  misc_RNA (1)...(19): siRNA sense strand
cuguauuaaaucaggacuu

SEQ ID NO: 2572626 - RNA, 19 nt, Homo sapiens
  misc_RNA (1)...(19): siRNA sense strand
ccgugucacuggaggacga

SEQ ID NO: 2572627 - RNA, 19 nt, Homo sapiens
  misc_RNA (1)...(19): siRNA sense strand
agauacuacugcacgauuu

SEQ ID NO: 2572628 - RNA, 19 nt, Homo sapiens
  misc_RNA (1)...(19): siRNA sense strand
acagauucgcuaugaucaa

SEQ ID NO: 2572629 - RNA, 19 nt, Homo sapiens
  misc_RNA (1)...(19): siRNA sense strand
uugugaagaagaagguaau

SEQ ID NO: 2572630 - RNA, 19 nt, Homo sapiens
  misc_RNA (1)...(19): siRNA sense strand
gcuacaacucaggcaaaua

SEQ ID NO: 2572631 - RNA, 19 nt, Homo sapiens
  misc_RNA (1)...(19): siRNA sense strand
gagagagcagccagaguga

SEQ ID NO: 2572632 - RNA, 19 nt, Homo sapiens
  misc_RNA (1)...(19): siRNA sense strand
aaacacaaacagaaacaca

SEQ ID NO: 2572633 - RNA, 19 nt, Homo sapiens
  misc_RNA (1)...(19): siRNA sense strand
uccaguugguucagaaauu

SEQ ID NO: 2572634 - RNA, 19 nt, Homo sapiens
  misc_RNA (1)...(19): siRNA sense strand
gcaacaaguaggagcgcuc

SEQ ID NO: 2572635 - RNA, 19 nt, Homo sapiens
  misc_RNA (1)...(19): siRNA sense strand
acuaacaaagcaagaacuu

SEQ ID NO: 2572636 - RNA, 19 nt, Homo sapiens
  misc_RNA (1)...(19): siRNA sense strand
caacagaggcagagccgua

SEQ ID NO: 2572637 - RNA, 19 nt, Homo sapiens
  misc_RNA (1)...(19): siRNA sense strand
gagaagaugaggaggacca

SEQ ID NO: 2572638 - RNA, 19 nt, Homo sapiens
  misc_RNA (1)...(19): siRNA sense strand
acgaauaugaggagagcca

SEQ ID NO: 2572639 - RNA, 19 nt, Homo sapiens
  misc_RNA (1)...(19): siRNA sense strand
acucagagcuccacgguca

SEQ ID NO: 2572640 - RNA, 19 nt, Homo sapiens
  misc_RNA (1)...(19): siRNA sense strand
gaucauggccagcgcguga

SEQ ID NO: 2572641 - RNA, 19 nt, Homo sapiens
  misc_RNA (1)...(19): siRNA sense strand
ggguaaucccuuagccaca

SEQ ID NO: 2572642 - RNA, 19 nt, Homo sapiens
  misc_RNA (1)...(19): siRNA sense strand
aggccaaguucacgugcaa

SEQ ID NO: 2572643 - RNA, 19 nt, Homo sapiens
  misc_RNA (1)...(19): siRNA sense strand
ugggagaagaugaggagga

SEQ ID NO: 2572644 - RNA, 19 nt, Homo sapiens
  misc_RNA (1)...(19): siRNA sense strand
ggcaggaguacguggucaa

SEQ ID NO: 2572645 - RNA, 19 nt, Homo sapiens
  misc_RNA (1)...(19): siRNA sense strand
gcggauucaccaugccaaa

SEQ ID NO: 2572646 - RNA, 19 nt, Homo sapiens
  misc_RNA (1)...(19): siRNA sense strand
ucuacaagauacagggucu

SEQ ID NO: 2572647 - RNA, 19 nt, Homo sapiens
  misc_RNA (1)...(19): siRNA sense strand
agaacaagaacgugacacu

SEQ ID NO: 2572648 - RNA, 19 nt, Homo sapiens
  misc_RNA (1)...(19): siRNA sense strand
cgucggacaaccaggccaa

SEQ ID NO: 2572649 - RNA, 19 nt, Homo sapiens
  misc_RNA (1)...(19): siRNA sense strand
cuggagaaccugaagacca

SEQ ID NO: 2572650 - RNA, 19 nt, Homo sapiens
  misc_RNA (1)...(19): siRNA sense strand
augaugagguagaaagaac

SEQ ID NO: 2572651 - RNA, 19 nt, Homo sapiens
  misc_RNA (1)...(19): siRNA sense strand
acugagaacaagaacguga

SEQ ID NO: 2572652 - RNA, 19 nt, Homo sapiens
  misc_RNA (1)...(19): siRNA sense strand
gaauaugaggagagccagu

SEQ ID NO: 2572653 - RNA, 19 nt, Homo sapiens
  misc_RNA (1)...(19): siRNA sense strand
acuuguaugaugagguaga

SEQ ID NO: 2572654 - RNA, 19 nt, Homo sapiens
  misc_RNA (1)...(19): siRNA sense strand
gaggagagccaguggacag

SEQ ID NO: 2572655 - RNA, 19 nt, Homo sapiens
  misc_RNA (1)...(19): siRNA sense strand
ucuccugaguggacagaca

SEQ ID NO: 2572656 - RNA, 19 nt, Homo sapiens
  misc_RNA (1)...(19): siRNA sense strand
cugaguggacagacaauau

SEQ ID NO: 2572657 - RNA, 19 nt, Homo sapiens
  misc_RNA (1)...(19): siRNA sense strand
ggaacgaauaugaggagag

SEQ ID NO: 2572658 - RNA, 19 nt, Homo sapiens
  misc_RNA (1)...(19): siRNA sense strand
ggucagcacaacagaggca

SEQ ID NO: 2572659 - RNA, 19 nt, Homo sapiens
  misc_RNA (1)...(19): siRNA sense strand
caagaggaaucuaugacca

SEQ ID NO: 2572660 - RNA, 19 nt, Homo sapiens
  misc_RNA (1)...(19): siRNA sense strand
ggguagcugggcaggagua

SEQ ID NO: 2572661 - RNA, 19 nt, Homo sapiens
  misc_RNA (1)...(19): siRNA sense strand
ccauuauuaucuugggauc

SEQ ID NO: 2572662 - RNA, 19 nt, Homo sapiens
  misc_RNA (1)...(19): siRNA sense strand
agaagaagauugagcugaa

SEQ ID NO: 2572663 - RNA, 19 nt, Homo sapiens
  misc_RNA (1)...(19): siRNA sense strand
uggaagacuuggaggauga

SEQ ID NO: 2572664 - RNA, 19 nt, Homo sapiens
  misc_RNA (1)...(19): siRNA sense strand
gggccaaaggaaaggcaua

SEQ ID NO: 2572665 - RNA, 19 nt, Homo sapiens
  misc_RNA (1)...(19): siRNA sense strand
cauuauggacugucagaaa

SEQ ID NO: 2572666 - RNA, 19 nt, Homo sapiens
  misc_RNA (1)...(19): siRNA sense strand
agaacagggccaaaggaaa

SEQ ID NO: 2572667 - RNA, 19 nt, Homo sapiens
  misc_RNA (1)...(19): siRNA sense strand
aggaagaaacggagacuca

SEQ ID NO: 2572668 - RNA, 19 nt, Homo sapiens
  misc_RNA (1)...(19): siRNA sense strand
agauugagcugaaggagga

SEQ ID NO: 2572669 - RNA, 19 nt, Homo sapiens
  misc_RNA (1)...(19): siRNA sense strand
gaacagggccaaaggaaag

SEQ ID NO: 2572670 - RNA, 19 nt, Homo sapiens
  misc_RNA (1)...(19): siRNA sense strand
aguacaagaucgacuguga

SEQ ID NO: 2572671 - RNA, 19 nt, Homo sapiens
  misc_RNA (1)...(19): siRNA sense strand
ugaaggaggaggagaccau

SEQ ID NO: 2572672 - RNA, 19 nt, Homo sapiens
  misc_RNA (1)...(19): siRNA sense strand
aaggaaaggcauauggcau

SEQ ID NO: 2572673 - RNA, 19 nt, Homo sapiens
  misc_RNA (1)...(19): siRNA sense strand
ggaaacacacagccaagaa

SEQ ID NO: 2572674 - RNA, 19 nt, Homo sapiens
  misc_RNA (1)...(19): siRNA sense strand
cgggacagauuuacacgua

SEQ ID NO: 2572675 - RNA, 19 nt, Homo sapiens
  misc_RNA (1)...(19): siRNA sense strand
aagaacagggccaaaggaa

SEQ ID NO: 2572676 - RNA, 19 nt, Homo sapiens
  misc_RNA (1)...(19): siRNA sense strand
aggaggaagaacagggcca

SEQ ID NO: 2572677 - RNA, 19 nt, Homo sapiens
  misc_RNA (1)...(19): siRNA sense strand
cccugaggcacaaaggaaa

SEQ ID NO: 2572678 - RNA, 19 nt, Homo sapiens
  misc_RNA (1)...(19): siRNA sense strand
aggaaaaggcuucugcuua

SEQ ID NO: 2572679 - RNA, 19 nt, Homo sapiens
  misc_RNA (1)...(19): siRNA sense strand
gaggaagaacagggccaaa

SEQ ID NO: 2572680 - RNA, 19 nt, Homo sapiens
  misc_RNA (1)...(19): siRNA sense strand
ggccaaaggaaaggcauau

SEQ ID NO: 2572681 - RNA, 19 nt, Homo sapiens
  misc_RNA (1)...(19): siRNA sense strand
gcccagaacaacugcuaca

SEQ ID NO: 2572682 - RNA, 19 nt, Homo sapiens
  misc_RNA (1)...(19): siRNA sense strand
ggaaaaggcuucugcuuac

SEQ ID NO: 2572683 - RNA, 19 nt, Homo sapiens
  misc_RNA (1)...(19): siRNA sense strand
ccaaaggcuuccagcgcaa

SEQ ID NO: 2572684 - RNA, 19 nt, Homo sapiens
  misc_RNA (1)...(19): siRNA sense strand
ggaccaaccucaaacgaga

SEQ ID NO: 2572685 - RNA, 19 nt, Homo sapiens
  misc_RNA (1)...(19): siRNA sense strand
ggaaaggccuucagccaga

SEQ ID NO: 2572686 - RNA, 19 nt, Homo sapiens
  misc_RNA (1)...(19): siRNA sense strand
gcggaaaggccuucagcca

SEQ ID NO: 2572687 - RNA, 19 nt, Homo sapiens
  misc_RNA (1)...(19): siRNA sense strand
ccaacgagcuggaugccuu

SEQ ID NO: 2572688 - RNA, 19 nt, Homo sapiens
  misc_RNA (1)...(19): siRNA sense strand
uuaagacccucgugggcaa

SEQ ID NO: 2572689 - RNA, 19 nt, Homo sapiens
  misc_RNA (1)...(19): siRNA sense strand
accaagaccacgaggacau

SEQ ID NO: 2572690 - RNA, 19 nt, Homo sapiens
  misc_RNA (1)...(19): siRNA sense strand
cugcccugcugguggaauu

SEQ ID NO: 2572691 - RNA, 19 nt, Homo sapiens
  misc_RNA (1)...(19): siRNA sense strand
cgcucaaguucuuccgcaa

SEQ ID NO: 2572692 - RNA, 19 nt, Homo sapiens
  misc_RNA (1)...(19): siRNA sense strand
gcgagcuggcugaggaguu

SEQ ID NO: 2572693 - RNA, 19 nt, Homo sapiens
  misc_RNA (1)...(19): siRNA sense strand
ggacaugaccuuuggccuc

SEQ ID NO: 2572694 - RNA, 19 nt, Homo sapiens
  misc_RNA (1)...(19): siRNA sense strand
gagugaguguggaaggaga

SEQ ID NO: 2572695 - RNA, 19 nt, Homo sapiens
  misc_RNA (1)...(19): siRNA sense strand
ccccaaaaguucuggaaga

SEQ ID NO: 2572696 - RNA, 19 nt, Homo sapiens
  misc_RNA (1)...(19): siRNA sense strand
cgacauugacaguggucca

SEQ ID NO: 2572697 - RNA, 19 nt, Homo sapiens
  misc_RNA (1)...(19): siRNA sense strand
augagaaagcuguggaacu

SEQ ID NO: 2572698 - RNA, 19 nt, Homo sapiens
  misc_RNA (1)...(19): siRNA sense strand
ccaugagaaagcuguggaa

SEQ ID NO: 2572699 - RNA, 19 nt, Homo sapiens
  misc_RNA (1)...(19): siRNA sense strand
cagcuauucgagaggugua

SEQ ID NO: 2572700 - RNA, 19 nt, Homo sapiens
  misc_RNA (1)...(19): siRNA sense strand
gggcaacagcaaaggcaac

SEQ ID NO: 2572701 - RNA, 19 nt, Homo sapiens
  misc_RNA (1)...(19): siRNA sense strand
agugaguguggaaggagaa

SEQ ID NO: 2572702 - RNA, 19 nt, Homo sapiens
  misc_RNA (1)...(19): siRNA sense strand
acuacaggaaucuggagaa

SEQ ID NO: 2572703 - RNA, 19 nt, Homo sapiens
  misc_RNA (1)...(19): siRNA sense strand
ugggaggaaaggagcaaaa

SEQ ID NO: 2572704 - RNA, 19 nt, Homo sapiens
  misc_RNA (1)...(19): siRNA sense strand
cagugaacggagugagugu

SEQ ID NO: 2572705 - RNA, 19 nt, Homo sapiens
  misc_RNA (1)...(19): siRNA sense strand
caacaaaaccacaugucau

SEQ ID NO: 2572706 - RNA, 19 nt, Homo sapiens
  misc_RNA (1)...(19): siRNA sense strand
ugaugaaggccuugguuuu

SEQ ID NO: 2572707 - RNA, 19 nt, Homo sapiens
  misc_RNA (1)...(19): siRNA sense strand
cagaaugaacugugacaaa

SEQ ID NO: 2572708 - RNA, 19 nt, Homo sapiens
  misc_RNA (1)...(19): siRNA sense strand
ccaaacacauagugggaau

SEQ ID NO: 2572709 - RNA, 19 nt, Homo sapiens
  misc_RNA (1)...(19): siRNA sense strand
gugacaacguugaggaaga

SEQ ID NO: 2572710 - RNA, 19 nt, Homo sapiens
  misc_RNA (1)...(19): siRNA sense strand
cuguagaaauaaugaggaa

SEQ ID NO: 2572711 - RNA, 19 nt, Homo sapiens
  misc_RNA (1)...(19): siRNA sense strand
gggaugaguuaaaguggaa

SEQ ID NO: 2572712 - RNA, 19 nt, Homo sapiens
  misc_RNA (1)...(19): siRNA sense strand
gguacaacgaggagaaaga

SEQ ID NO: 2572713 - RNA, 19 nt, Homo sapiens
  misc_RNA (1)...(19): siRNA sense strand
gggagaggacggauggaua

SEQ ID NO: 2572714 - RNA, 19 nt, Homo sapiens
  misc_RNA (1)...(19): siRNA sense strand
cgaaggugauguuggcaaa

SEQ ID NO: 2572715 - RNA, 19 nt, Homo sapiens
  misc_RNA (1)...(19): siRNA sense strand
ugauagacacagagaggaa

SEQ ID NO: 2572716 - RNA, 19 nt, Homo sapiens
  misc_RNA (1)...(19): siRNA sense strand
gcaaguaauucuaagccaa

SEQ ID NO: 2572717 - RNA, 19 nt, Homo sapiens
  misc_RNA (1)...(19): siRNA sense strand
agaaagaagaucugaauga

SEQ ID NO: 2572718 - RNA, 19 nt, Homo sapiens
  misc_RNA (1)...(19): siRNA sense strand
gagaaaggcaacagcggaa

SEQ ID NO: 2572719 - RNA, 19 nt, Homo sapiens
  misc_RNA (1)...(19): siRNA sense strand
gcgaaggugacgauggaaa

SEQ ID NO: 2572720 - RNA, 19 nt, Homo sapiens
  misc_RNA (1)...(19): siRNA sense strand
gggcccaguuagaggacua

SEQ ID NO: 2572721 - RNA, 19 nt, Homo sapiens
  misc_RNA (1)...(19): siRNA sense strand
gcuggaagcaaguuagaaa

SEQ ID NO: 2572722 - RNA, 19 nt, Homo sapiens
  misc_RNA (1)...(19): siRNA sense strand
gugcagaagaggaagauuu

SEQ ID NO: 2572723 - RNA, 19 nt, Homo sapiens
  misc_RNA (1)...(19): siRNA sense strand
cgacacagcuaaagcccaa

SEQ ID NO: 2572724 - RNA, 19 nt, Homo sapiens
  misc_RNA (1)...(19): siRNA sense strand
gggcagaggugguagugau

SEQ ID NO: 2572725 - RNA, 19 nt, Homo sapiens
  misc_RNA (1)...(19): siRNA sense strand
agaaauugaugaacaggaa

SEQ ID NO: 2572726 - RNA, 19 nt, Homo sapiens
  misc_RNA (1)...(19): siRNA sense strand
gcgacaaugaugagggaca

SEQ ID NO: 2572727 - RNA, 19 nt, Homo sapiens
  misc_RNA (1)...(19): siRNA sense strand
ggauaagaguccaguggga

SEQ ID NO: 2572728 - RNA, 19 nt, Homo sapiens
  misc_RNA (1)...(19): siRNA sense strand
augaagaggaggaggauga

SEQ ID NO: 2572729 - RNA, 19 nt, Homo sapiens
  misc_RNA (1)...(19): siRNA sense strand
ucugaaugacaaagagaaa

SEQ ID NO: 2572730 - RNA, 19 nt, Homo sapiens
  misc_RNA (1)...(19): siRNA sense strand
aggagaaugucaaaguuaa

SEQ ID NO: 2572731 - RNA, 19 nt, Homo sapiens
  misc_RNA (1)...(19): siRNA sense strand
gaacauaaguccaggucgu

SEQ ID NO: 2572732 - RNA, 19 nt, Homo sapiens
  misc_RNA (1)...(19): siRNA sense strand
ggacugugauugacgggaa

SEQ ID NO: 2572733 - RNA, 19 nt, Homo sapiens
  misc_RNA (1)...(19): siRNA sense strand
gaguuaaaguggaaguuca

SEQ ID NO: 2572734 - RNA, 19 nt, Homo sapiens
  misc_RNA (1)...(19): siRNA sense strand
gcaagaaaagagagagauu

SEQ ID NO: 2572735 - RNA, 19 nt, Homo sapiens
  misc_RNA (1)...(19): siRNA sense strand
cgacaaugaugagggacaa

SEQ ID NO: 2572736 - RNA, 19 nt, Homo sapiens
  misc_RNA (1)...(19): siRNA sense strand
ccgaacaaacugaaaggaa

SEQ ID NO: 2572737 - RNA, 19 nt, Homo sapiens
  misc_RNA (1)...(19): siRNA sense strand
ggauaauacgacacagcua

SEQ ID NO: 2572738 - RNA, 19 nt, Homo sapiens
  misc_RNA (1)...(19): siRNA sense strand
cgagauugaaugugccaaa

SEQ ID NO: 2572739 - RNA, 19 nt, Homo sapiens
  misc_RNA (1)...(19): siRNA sense strand
ugaaaggcuccaagauaaa

SEQ ID NO: 2572740 - RNA, 19 nt, Homo sapiens
  misc_RNA (1)...(19): siRNA sense strand
cggcagugcuccacagaga

SEQ ID NO: 2572741 - RNA, 19 nt, Homo sapiens
  misc_RNA (1)...(19): siRNA sense strand
ucaucaagcuggacagaga

SEQ ID NO: 2572742 - RNA, 19 nt, Homo sapiens
  misc_RNA (1)...(19): siRNA sense strand
aagucaaguuuguggguga

SEQ ID NO: 2572743 - RNA, 19 nt, Homo sapiens
  misc_RNA (1)...(19): siRNA sense strand
gcuacgaacuggagacgau

SEQ ID NO: 2572744 - RNA, 19 nt, Homo sapiens
  misc_RNA (1)...(19): siRNA sense strand
ccauagacacagaugacua

SEQ ID NO: 2572745 - RNA, 19 nt, Homo sapiens
  misc_RNA (1)...(19): siRNA sense strand
cuuuaacugucgauggaaa

SEQ ID NO: 2572746 - RNA, 19 nt, Homo sapiens
  misc_RNA (1)...(19): siRNA sense strand
gguuaauaggauggaaaua

SEQ ID NO: 2572747 - RNA, 19 nt, Homo sapiens
  misc_RNA (1)...(19): siRNA sense strand
aaagaagcacagaaggaaa

SEQ ID NO: 2572748 - RNA, 19 nt, Homo sapiens
  misc_RNA (1)...(19): siRNA sense strand
ggaagguguaugauauaaa

SEQ ID NO: 2572749 - RNA, 19 nt, Homo sapiens
  misc_RNA (1)...(19): siRNA sense strand
gggaaucgauauaggggaa

SEQ ID NO: 2572750 - RNA, 19 nt, Homo sapiens
  misc_RNA (1)...(19): siRNA sense strand
uggaguaguuaaaguggaa

SEQ ID NO: 2572751 - RNA, 19 nt, Homo sapiens
  misc_RNA (1)...(19): siRNA sense strand
gagcaacacagucgugaaa

SEQ ID NO: 2572752 - RNA, 19 nt, Homo sapiens
  misc_RNA (1)...(19): siRNA sense strand
cgggaagguguaugauaua

SEQ ID NO: 2572753 - RNA, 19 nt, Homo sapiens
  misc_RNA (1)...(19): siRNA sense strand
cgaacaaacugaaaggaac

SEQ ID NO: 2572754 - RNA, 19 nt, Homo sapiens
  misc_RNA (1)...(19): siRNA sense strand
gguguaugccuguggagaa

SEQ ID NO: 2572755 - RNA, 19 nt, Homo sapiens
  misc_RNA (1)...(19): siRNA sense strand
gaucauugcaagaggucau

SEQ ID NO: 2572756 - RNA, 19 nt, Homo sapiens
  misc_RNA (1)...(19): siRNA sense strand
gcuuagaaggccagaagau

SEQ ID NO: 2572757 - RNA, 19 nt, Homo sapiens
  misc_RNA (1)...(19): siRNA sense strand
cagaggauggugagguuua

SEQ ID NO: 2572758 - RNA, 19 nt, Homo sapiens
  misc_RNA (1)...(19): siRNA sense strand
ugucaaaguuaaguggaaa

SEQ ID NO: 2572759 - RNA, 19 nt, Homo sapiens
  misc_RNA (1)...(19): siRNA sense strand
guuccuugcugaagaagua

SEQ ID NO: 2572760 - RNA, 19 nt, Homo sapiens
  misc_RNA (1)...(19): siRNA sense strand
aggagaaagacgaggacca

SEQ ID NO: 2572761 - RNA, 19 nt, Homo sapiens
  misc_RNA (1)...(19): siRNA sense strand
aaacacaauaccaggcaua

SEQ ID NO: 2572762 - RNA, 19 nt, Homo sapiens
  misc_RNA (1)...(19): siRNA sense strand
ggaagaaagucaucgccau

SEQ ID NO: 2572763 - RNA, 19 nt, Homo sapiens
  misc_RNA (1)...(19): siRNA sense strand
caggagaaugucaaaguua

SEQ ID NO: 2572764 - RNA, 19 nt, Homo sapiens
  misc_RNA (1)...(19): siRNA sense strand
acaacaacauucaggauca

SEQ ID NO: 2572765 - RNA, 19 nt, Homo sapiens
  misc_RNA (1)...(19): siRNA sense strand
agauggugacuaugggaaa

SEQ ID NO: 2572766 - RNA, 19 nt, Homo sapiens
  misc_RNA (1)...(19): siRNA sense strand
ccccaaagcugauugaaaa

SEQ ID NO: 2572767 - RNA, 19 nt, Homo sapiens
  misc_RNA (1)...(19): siRNA sense strand
ccaggauauugaagccaaa

SEQ ID NO: 2572768 - RNA, 19 nt, Homo sapiens
  misc_RNA (1)...(19): siRNA sense strand
uaauaaagauggaggcuuc

SEQ ID NO: 2572769 - RNA, 19 nt, Homo sapiens
  misc_RNA (1)...(19): siRNA sense strand
aagaagagccaguggaugu

SEQ ID NO: 2572770 - RNA, 19 nt, Homo sapiens
  misc_RNA (1)...(19): siRNA sense strand
gcagaaaccaugaccaaaa

SEQ ID NO: 2572771 - RNA, 19 nt, Homo sapiens
  misc_RNA (1)...(19): siRNA sense strand
cuauagacuccaugaauuu

SEQ ID NO: 2572772 - RNA, 19 nt, Homo sapiens
  misc_RNA (1)...(19): siRNA sense strand
guagaaauaaugaggaagu

SEQ ID NO: 2572773 - RNA, 19 nt, Homo sapiens
  misc_RNA (1)...(19): siRNA sense strand
guaaagugccuaugaagau

SEQ ID NO: 2572774 - RNA, 19 nt, Homo sapiens
  misc_RNA (1)...(19): siRNA sense strand
ggaaacgaagagagugauu

SEQ ID NO: 2572775 - RNA, 19 nt, Homo sapiens
  misc_RNA (1)...(19): siRNA sense strand
gagaagagccugaagcaga

SEQ ID NO: 2572776 - RNA, 19 nt, Homo sapiens
  misc_RNA (1)...(19): siRNA sense strand
gggaaaacgacuuggccaa

SEQ ID NO: 2572777 - RNA, 19 nt, Homo sapiens
  misc_RNA (1)...(19): siRNA sense strand
cagacacagaccugggaaa

SEQ ID NO: 2572778 - RNA, 19 nt, Homo sapiens
  misc_RNA (1)...(19): siRNA sense strand
ucuccaaagauaaggauau

SEQ ID NO: 2572779 - RNA, 19 nt, Homo sapiens
  misc_RNA (1)...(19): siRNA sense strand
ccaccaguccauuggcaaa

SEQ ID NO: 2572780 - RNA, 19 nt, Homo sapiens
  misc_RNA (1)...(19): siRNA sense strand
cguuuaacaaagauggcua

SEQ ID NO: 2572781 - RNA, 19 nt, Homo sapiens
  misc_RNA (1)...(19): siRNA sense strand
cggaagggugccugguauu

SEQ ID NO: 2572782 - RNA, 19 nt, Homo sapiens
  misc_RNA (1)...(19): siRNA sense strand
agacagaaguggaugggag

SEQ ID NO: 2572783 - RNA, 19 nt, Homo sapiens
  misc_RNA (1)...(19): siRNA sense strand
gcuccguggaugaagagaa

SEQ ID NO: 2572784 - RNA, 19 nt, Homo sapiens
  misc_RNA (1)...(19): siRNA sense strand
auaaauacugggagugcau

SEQ ID NO: 2572785 - RNA, 19 nt, Homo sapiens
  misc_RNA (1)...(19): siRNA sense strand
uugaaaucacuguggauga

SEQ ID NO: 2572786 - RNA, 19 nt, Homo sapiens
  misc_RNA (1)...(19): siRNA sense strand
auugauaaauacugggagu

SEQ ID NO: 2572787 - RNA, 19 nt, Homo sapiens
  misc_RNA (1)...(19): siRNA sense strand
acaaagauggcuaucggua

SEQ ID NO: 2572788 - RNA, 19 nt, Homo sapiens
  misc_RNA (1)...(19): siRNA sense strand
cugccaucacagugggaau

SEQ ID NO: 2572789 - RNA, 19 nt, Homo sapiens
  misc_RNA (1)...(19): siRNA sense strand
ugguuggagagaagggcua

SEQ ID NO: 2572790 - RNA, 19 nt, Homo sapiens
  misc_RNA (1)...(19): siRNA sense strand
cuccguggaugaagagaau

SEQ ID NO: 2572791 - RNA, 19 nt, Homo sapiens
  misc_RNA (1)...(19): siRNA sense strand
uauucuugguaaaggaaca

SEQ ID NO: 2572792 - RNA, 19 nt, Homo sapiens
  misc_RNA (1)...(19): siRNA sense strand
ggaaauugacugcugggca

SEQ ID NO: 2572793 - RNA, 19 nt, Homo sapiens
  misc_RNA (1)...(19): siRNA sense strand
cagccaagucauugccaga

SEQ ID NO: 2572794 - RNA, 19 nt, Homo sapiens
  misc_RNA (1)...(19): siRNA sense strand
cagacacauacaaagauaa

SEQ ID NO: 2572795 - RNA, 19 nt, Homo sapiens
  misc_RNA (1)...(19): siRNA sense strand
ggaugaagagaauggccga

SEQ ID NO: 2572796 - RNA, 19 nt, Homo sapiens
  misc_RNA (1)...(19): siRNA sense strand
ccgacaguugggugaggua

SEQ ID NO: 2572797 - RNA, 19 nt, Homo sapiens
  misc_RNA (1)...(19): siRNA sense strand
acuagaaggugcuggggau

SEQ ID NO: 2572798 - RNA, 19 nt, Homo sapiens
  misc_RNA (1)...(19): siRNA sense strand
caaugaguaaagaaagaga

SEQ ID NO: 2572799 - RNA, 19 nt, Homo sapiens
  misc_RNA (1)...(19): siRNA sense strand
cgacuuggccaaauaacau

SEQ ID NO: 2572800 - RNA, 19 nt, Homo sapiens
  misc_RNA (1)...(19): siRNA sense strand
gacgaggagccaagcgcaa

SEQ ID NO: 2572801 - RNA, 19 nt, Homo sapiens
  misc_RNA (1)...(19): siRNA sense strand
uggauaaagcagagaagag

SEQ ID NO: 2572802 - RNA, 19 nt, Homo sapiens
  misc_RNA (1)...(19): siRNA sense strand
cagagaagagccugaagca

SEQ ID NO: 2572803 - RNA, 19 nt, Homo sapiens
  misc_RNA (1)...(19): siRNA sense strand
augaacauccgaagacaau

SEQ ID NO: 2572804 - RNA, 19 nt, Homo sapiens
  misc_RNA (1)...(19): siRNA sense strand
gggaauugcagcaggaagc

SEQ ID NO: 2572805 - RNA, 19 nt, Homo sapiens
  misc_RNA (1)...(19): siRNA sense strand
guacaagagcugcacgguu

SEQ ID NO: 2572806 - RNA, 19 nt, Homo sapiens
  misc_RNA (1)...(19): siRNA sense strand
ugguaaaggaacacccaga

SEQ ID NO: 2572807 - RNA, 19 nt, Homo sapiens
  misc_RNA (1)...(19): siRNA sense strand
acggaagggugccugguau

SEQ ID NO: 2572808 - RNA, 19 nt, Homo sapiens
  misc_RNA (1)...(19): siRNA sense strand
cugaagaggaagccagaaa

SEQ ID NO: 2572809 - RNA, 19 nt, Homo sapiens
  misc_RNA (1)...(19): siRNA sense strand
aggcugaacaggacagaaa

SEQ ID NO: 2572810 - RNA, 19 nt, Homo sapiens
  misc_RNA (1)...(19): siRNA sense strand
ggguacaagaacaggaauu

SEQ ID NO: 2572811 - RNA, 19 nt, Homo sapiens
  misc_RNA (1)...(19): siRNA sense strand
cugaaauuggugaaggaaa

SEQ ID NO: 2572812 - RNA, 19 nt, Homo sapiens
  misc_RNA (1)...(19): siRNA sense strand
agauagaagaagucagaga

SEQ ID NO: 2572813 - RNA, 19 nt, Homo sapiens
  misc_RNA (1)...(19): siRNA sense strand
guuuguugguggagguauu

SEQ ID NO: 2572814 - RNA, 19 nt, Homo sapiens
  misc_RNA (1)...(19): siRNA sense strand
ccucauugcucaugcacau

SEQ ID NO: 2572815 - RNA, 19 nt, Homo sapiens
  misc_RNA (1)...(19): siRNA sense strand
ugauaguugaucuggauaa

SEQ ID NO: 2572816 - RNA, 19 nt, Homo sapiens
  misc_RNA (1)...(19): siRNA sense strand
agaaauagcuuguaccagu

SEQ ID NO: 2572817 - RNA, 19 nt, Homo sapiens
  misc_RNA (1)...(19): siRNA sense strand
gggaaaguguagagaaaac

SEQ ID NO: 2572818 - RNA, 19 nt, Homo sapiens
  misc_RNA (1)...(19): siRNA sense strand
cguuagccuuggagaaaca

SEQ ID NO: 2572819 - RNA, 19 nt, Homo sapiens
  misc_RNA (1)...(19): siRNA sense strand
gaagugaaauacaggcuga

SEQ ID NO: 2572820 - RNA, 19 nt, Homo sapiens
  misc_RNA (1)...(19): siRNA sense strand
gggaugacuuuaaacgaga

SEQ ID NO: 2572821 - RNA, 19 nt, Homo sapiens
  misc_RNA (1)...(19): siRNA sense strand
aaacaaaagcuggaagaaa

SEQ ID NO: 2572822 - RNA, 19 nt, Homo sapiens
  misc_RNA (1)...(19): siRNA sense strand
ccaaagaaaucgauucagu

SEQ ID NO: 2572823 - RNA, 19 nt, Homo sapiens
  misc_RNA (1)...(19): siRNA sense strand
gaaagaaucuaaacagucu

SEQ ID NO: 2572824 - RNA, 19 nt, Homo sapiens
  misc_RNA (1)...(19): siRNA sense strand
guggaaauccugacagcau

SEQ ID NO: 2572825 - RNA, 19 nt, Homo sapiens
  misc_RNA (1)...(19): siRNA sense strand
gcgagauguccuuagggua

SEQ ID NO: 2572826 - RNA, 19 nt, Homo sapiens
  misc_RNA (1)...(19): siRNA sense strand
uggguugacuacuggcaaa

SEQ ID NO: 2572827 - RNA, 19 nt, Homo sapiens
  misc_RNA (1)...(19): siRNA sense strand
ucacguuagccuuggagaa

SEQ ID NO: 2572828 - RNA, 19 nt, Homo sapiens
  misc_RNA (1)...(19): siRNA sense strand
gaaauagcuuguaccagua

SEQ ID NO: 2572829 - RNA, 19 nt, Homo sapiens
  misc_RNA (1)...(19): siRNA sense strand
gcucugaggcaaacugcaa

SEQ ID NO: 2572830 - RNA, 19 nt, Homo sapiens
  misc_RNA (1)...(19): siRNA sense strand
gaguuagagaagaugaaaa

SEQ ID NO: 2572831 - RNA, 19 nt, Homo sapiens
  misc_RNA (1)...(19): siRNA sense strand
aggcaaacugcaaguguca

SEQ ID NO: 2572832 - RNA, 19 nt, Homo sapiens
  misc_RNA (1)...(19): siRNA sense strand
ucagagaugccauggaaaa

SEQ ID NO: 2572833 - RNA, 19 nt, Homo sapiens
  misc_RNA (1)...(19): siRNA sense strand
gugaaauacaggcugaaca

SEQ ID NO: 2572834 - RNA, 19 nt, Homo sapiens
  misc_RNA (1)...(19): siRNA sense strand
aagccaaagaagaguuaga

SEQ ID NO: 2572835 - RNA, 19 nt, Homo sapiens
  misc_RNA (1)...(19): siRNA sense strand
ugcaguugcugaagaggaa

SEQ ID NO: 2572836 - RNA, 19 nt, Homo sapiens
  misc_RNA (1)...(19): siRNA sense strand
ugaaagccgccauggacaa

SEQ ID NO: 2572837 - RNA, 19 nt, Homo sapiens
  misc_RNA (1)...(19): siRNA sense strand
gcugaacaggacagaaaga

SEQ ID NO: 2572838 - RNA, 19 nt, Homo sapiens
  misc_RNA (1)...(19): siRNA sense strand
agccaagagcuuagaagau

SEQ ID NO: 2572839 - RNA, 19 nt, Homo sapiens
  misc_RNA (1)...(19): siRNA sense strand
aggguaaacuucacaacau

SEQ ID NO: 2572840 - RNA, 19 nt, Homo sapiens
  misc_RNA (1)...(19): siRNA sense strand
cccugaaauuggugaagga

SEQ ID NO: 2572841 - RNA, 19 nt, Homo sapiens
  misc_RNA (1)...(19): siRNA sense strand
aggcuaagguuguaucuca

SEQ ID NO: 2572842 - RNA, 19 nt, Homo sapiens
  misc_RNA (1)...(19): siRNA sense strand
ccacucaggugcagccaga

SEQ ID NO: 2572843 - RNA, 19 nt, Homo sapiens
  misc_RNA (1)...(19): siRNA sense strand
agacaaacucuucgagaug

SEQ ID NO: 2572844 - RNA, 19 nt, Homo sapiens
  misc_RNA (1)...(19): siRNA sense strand
agcaaaagcauuagaacau

SEQ ID NO: 2572845 - RNA, 19 nt, Homo sapiens
  misc_RNA (1)...(19): siRNA sense strand
ucgucucagucaagagcaa

SEQ ID NO: 2572846 - RNA, 19 nt, Homo sapiens
  misc_RNA (1)...(19): siRNA sense strand
ccgaaggguagcaaugauu

SEQ ID NO: 2572847 - RNA, 19 nt, Homo sapiens
  misc_RNA (1)...(19): siRNA sense strand
agaagaugcucugaggcaa

SEQ ID NO: 2572848 - RNA, 19 nt, Homo sapiens
  misc_RNA (1)...(19): siRNA sense strand
gcauugaaggaacgcagaa

SEQ ID NO: 2572849 - RNA, 19 nt, Homo sapiens
  misc_RNA (1)...(19): siRNA sense strand
aagaguuagagaagaugaa

SEQ ID NO: 2572850 - RNA, 19 nt, Homo sapiens
  misc_RNA (1)...(19): siRNA sense strand
gagaagaugaaaaguguga

SEQ ID NO: 2572851 - RNA, 19 nt, Homo sapiens
  misc_RNA (1)...(19): siRNA sense strand
gaaggaacgcagaaaggca

SEQ ID NO: 2572852 - RNA, 19 nt, Homo sapiens
  misc_RNA (1)...(19): siRNA sense strand
gagccaugcaguugcugaa

SEQ ID NO: 2572853 - RNA, 19 nt, Homo sapiens
  misc_RNA (1)...(19): siRNA sense strand
gccaaagaagaguuagaga

SEQ ID NO: 2572854 - RNA, 19 nt, Homo sapiens
  misc_RNA (1)...(19): siRNA sense strand
gaagaugaaaagugugauu

SEQ ID NO: 2572855 - RNA, 19 nt, Homo sapiens
  misc_RNA (1)...(19): siRNA sense strand
uagcaaaagcauuagaaca

SEQ ID NO: 2572856 - RNA, 19 nt, Homo sapiens
  misc_RNA (1)...(19): siRNA sense strand
acacugaucacuugcgaga

SEQ ID NO: 2572857 - RNA, 19 nt, Homo sapiens
  misc_RNA (1)...(19): siRNA sense strand
cgagauguccuuaggguac

SEQ ID NO: 2572858 - RNA, 19 nt, Homo sapiens
  misc_RNA (1)...(19): siRNA sense strand
aggcauuaaaguacagcau

SEQ ID NO: 2572859 - RNA, 19 nt, Homo sapiens
  misc_RNA (1)...(19): siRNA sense strand
agauugcaggcgagaagaa

SEQ ID NO: 2572860 - RNA, 19 nt, Homo sapiens
  misc_RNA (1)...(19): siRNA sense strand
ggcuuucaguggaggcauu

SEQ ID NO: 2572861 - RNA, 19 nt, Homo sapiens
  misc_RNA (1)...(19): siRNA sense strand
ggcuauugcagcucagaau

SEQ ID NO: 2572862 - RNA, 19 nt, Homo sapiens
  misc_RNA (1)...(19): siRNA sense strand
cauugaaggaacgcagaaa

SEQ ID NO: 2572863 - RNA, 19 nt, Homo sapiens
  misc_RNA (1)...(19): siRNA sense strand
ucucaaagccaaagaagag

SEQ ID NO: 2572864 - RNA, 19 nt, Homo sapiens
  misc_RNA (1)...(19): siRNA sense strand
uagaagaugcucugaggca

SEQ ID NO: 2572865 - RNA, 19 nt, Homo sapiens
  misc_RNA (1)...(19): siRNA sense strand
cgaccaugccgcagauacu

SEQ ID NO: 2572866 - RNA, 19 nt, Homo sapiens
  misc_RNA (1)...(19): siRNA sense strand
cguucaugaagaagacuaa

SEQ ID NO: 2572867 - RNA, 19 nt, Homo sapiens
  misc_RNA (1)...(19): siRNA sense strand
gaacagaggucuugaggcc

SEQ ID NO: 2572868 - RNA, 19 nt, Homo sapiens
  misc_RNA (1)...(19): siRNA sense strand
ccugaagagcauagaauaa

SEQ ID NO: 2572869 - RNA, 19 nt, Homo sapiens
  misc_RNA (1)...(19): siRNA sense strand
cuuuaaagcugcagaacau

SEQ ID NO: 2572870 - RNA, 19 nt, Homo sapiens
  misc_RNA (1)...(19): siRNA sense strand
ggaaacaggaagagaggau

SEQ ID NO: 2572871 - RNA, 19 nt, Homo sapiens
  misc_RNA (1)...(19): siRNA sense strand
agaaagagaaacugaggaa

SEQ ID NO: 2572872 - RNA, 19 nt, Homo sapiens
  misc_RNA (1)...(19): siRNA sense strand
agaaguuaaaccagagaaa

SEQ ID NO: 2572873 - RNA, 19 nt, Homo sapiens
  misc_RNA (1)...(19): siRNA sense strand
cugauaaucggaagagaua

SEQ ID NO: 2572874 - RNA, 19 nt, Homo sapiens
  misc_RNA (1)...(19): siRNA sense strand
ccaagaaagaagauaaaga

SEQ ID NO: 2572875 - RNA, 19 nt, Homo sapiens
  misc_RNA (1)...(19): siRNA sense strand
ggccaagaaagaagauaaa

SEQ ID NO: 2572876 - RNA, 19 nt, Homo sapiens
  misc_RNA (1)...(19): siRNA sense strand
aggccaagaaagaagauaa

SEQ ID NO: 2572877 - RNA, 19 nt, Homo sapiens
  misc_RNA (1)...(19): siRNA sense strand
gugaacaggccaagaaaga

SEQ ID NO: 2572878 - RNA, 19 nt, Homo sapiens
  misc_RNA (1)...(19): siRNA sense strand
gaagagaagaggaagccaa

SEQ ID NO: 2572879 - RNA, 19 nt, Homo sapiens
  misc_RNA (1)...(19): siRNA sense strand
ccaagaaaucuguagaaga

SEQ ID NO: 2572880 - RNA, 19 nt, Homo sapiens
  misc_RNA (1)...(19): siRNA sense strand
gagcaauggugaaaagaau

SEQ ID NO: 2572881 - RNA, 19 nt, Homo sapiens
  misc_RNA (1)...(19): siRNA sense strand
caaaagaagaaauggggaa

SEQ ID NO: 2572882 - RNA, 19 nt, Homo sapiens
  misc_RNA (1)...(19): siRNA sense strand
cagacgauaccgaaagaaa

SEQ ID NO: 2572883 - RNA, 19 nt, Homo sapiens
  misc_RNA (1)...(19): siRNA sense strand
gaaauaaagcucaacgaga

SEQ ID NO: 2572884 - RNA, 19 nt, Homo sapiens
  misc_RNA (1)...(19): siRNA sense strand
cuuuaagacagcagaagaa

SEQ ID NO: 2572885 - RNA, 19 nt, Homo sapiens
  misc_RNA (1)...(19): siRNA sense strand
ccagaugauucuaaagaca

SEQ ID NO: 2572886 - RNA, 19 nt, Homo sapiens
  misc_RNA (1)...(19): siRNA sense strand
agaggaacagaaagagaaa

SEQ ID NO: 2572887 - RNA, 19 nt, Homo sapiens
  misc_RNA (1)...(19): siRNA sense strand
augugagaccaaagagaaa

SEQ ID NO: 2572888 - RNA, 19 nt, Homo sapiens
  misc_RNA (1)...(19): siRNA sense strand
aggaagaacaagaacaaaa

SEQ ID NO: 2572889 - RNA, 19 nt, Homo sapiens
  misc_RNA (1)...(19): siRNA sense strand
ggaaggaagaacaagaaca

SEQ ID NO: 2572890 - RNA, 19 nt, Homo sapiens
  misc_RNA (1)...(19): siRNA sense strand
aagaggaagagaagaggaa

SEQ ID NO: 2572891 - RNA, 19 nt, Homo sapiens
  misc_RNA (1)...(19): siRNA sense strand
agacagaaguuaaaccaga

SEQ ID NO: 2572892 - RNA, 19 nt, Homo sapiens
  misc_RNA (1)...(19): siRNA sense strand
gauaaagaaaccucagcaa

SEQ ID NO: 2572893 - RNA, 19 nt, Homo sapiens
  misc_RNA (1)...(19): siRNA sense strand
aagaggaagccaacaguaa

SEQ ID NO: 2572894 - RNA, 19 nt, Homo sapiens
  misc_RNA (1)...(19): siRNA sense strand
gcaaagaaauaacaggagu

SEQ ID NO: 2572895 - RNA, 19 nt, Homo sapiens
  misc_RNA (1)...(19): siRNA sense strand
cucgaagaaugcaggauua

SEQ ID NO: 2572896 - RNA, 19 nt, Homo sapiens
  misc_RNA (1)...(19): siRNA sense strand
ucuaaagacacauggaaga

SEQ ID NO: 2572897 - RNA, 19 nt, Homo sapiens
  misc_RNA (1)...(19): siRNA sense strand
gaaauggggaagaaagaaa

SEQ ID NO: 2572898 - RNA, 19 nt, Homo sapiens
  misc_RNA (1)...(19): siRNA sense strand
caggauugccuuagauuau

SEQ ID NO: 2572899 - RNA, 19 nt, Homo sapiens
  misc_RNA (1)...(19): siRNA sense strand
ggauacagucagcaagauu

SEQ ID NO: 2572900 - RNA, 19 nt, Homo sapiens
  misc_RNA (1)...(19): siRNA sense strand
agcaagaggaacagaaaga

SEQ ID NO: 2572901 - RNA, 19 nt, Homo sapiens
  misc_RNA (1)...(19): siRNA sense strand
gggcaaagaaauaacagga

SEQ ID NO: 2572902 - RNA, 19 nt, Homo sapiens
  misc_RNA (1)...(19): siRNA sense strand
gcugauaaucggaagagau

SEQ ID NO: 2572903 - RNA, 19 nt, Homo sapiens
  misc_RNA (1)...(19): siRNA sense strand
ggaagagauauaaagaaga

SEQ ID NO: 2572904 - RNA, 19 nt, Homo sapiens
  misc_RNA (1)...(19): siRNA sense strand
uugcagagcucgacgggau

SEQ ID NO: 2572905 - RNA, 19 nt, Homo sapiens
  misc_RNA (1)...(19): siRNA sense strand
gcucgaagaaugcaggauu

SEQ ID NO: 2572906 - RNA, 19 nt, Homo sapiens
  misc_RNA (1)...(19): siRNA sense strand
auaaagaaaccucagcaaa

SEQ ID NO: 2572907 - RNA, 19 nt, Homo sapiens
  misc_RNA (1)...(19): siRNA sense strand
gaugauauuaacaggucaa

SEQ ID NO: 2572908 - RNA, 19 nt, Homo sapiens
  misc_RNA (1)...(19): siRNA sense strand
ucgaagaagcugaaagacu

SEQ ID NO: 2572909 - RNA, 19 nt, Homo sapiens
  misc_RNA (1)...(19): siRNA sense strand
gagaaugggaccacugaau

SEQ ID NO: 2572910 - RNA, 19 nt, Homo sapiens
  misc_RNA (1)...(19): siRNA sense strand
aaguacaaaccaugagcaa

SEQ ID NO: 2572911 - RNA, 19 nt, Homo sapiens
  misc_RNA (1)...(19): siRNA sense strand
cauguuaacagaugaagaa

SEQ ID NO: 2572912 - RNA, 19 nt, Homo sapiens
  misc_RNA (1)...(19): siRNA sense strand
caagaggaacagaaagaga

SEQ ID NO: 2572913 - RNA, 19 nt, Homo sapiens
  misc_RNA (1)...(19): siRNA sense strand
ccaaaagagcaauggugaa

SEQ ID NO: 2572914 - RNA, 19 nt, Homo sapiens
  misc_RNA (1)...(19): siRNA sense strand
gggaaaggcagcaagagga

SEQ ID NO: 2572915 - RNA, 19 nt, Homo sapiens
  misc_RNA (1)...(19): siRNA sense strand
cagccagugccuaguauaa

SEQ ID NO: 2572916 - RNA, 19 nt, Homo sapiens
  misc_RNA (1)...(19): siRNA sense strand
ggucaaauuuguuggggca

SEQ ID NO: 2572917 - RNA, 19 nt, Homo sapiens
  misc_RNA (1)...(19): siRNA sense strand
aggcaagccauuuaagauu

SEQ ID NO: 2572918 - RNA, 19 nt, Homo sapiens
  misc_RNA (1)...(19): siRNA sense strand
gggaagaaagaaagugaac

SEQ ID NO: 2572919 - RNA, 19 nt, Homo sapiens
  misc_RNA (1)...(19): siRNA sense strand
aaagaggggcaaagaaaua

SEQ ID NO: 2572920 - RNA, 19 nt, Homo sapiens
  misc_RNA (1)...(19): siRNA sense strand
gauacagacgauaccgaaa

SEQ ID NO: 2572921 - RNA, 19 nt, Homo sapiens
  misc_RNA (1)...(19): siRNA sense strand
agacgauaccgaaagaaau

SEQ ID NO: 2572922 - RNA, 19 nt, Homo sapiens
  misc_RNA (1)...(19): siRNA sense strand
ugucgaagaagcugaaaga

SEQ ID NO: 2572923 - RNA, 19 nt, Homo sapiens
  misc_RNA (1)...(19): siRNA sense strand
ccucagaguggaaaaguua

SEQ ID NO: 2572924 - RNA, 19 nt, Homo sapiens
  misc_RNA (1)...(19): siRNA sense strand
aacaagaagcugaagaaaa

SEQ ID NO: 2572925 - RNA, 19 nt, Homo sapiens
  misc_RNA (1)...(19): siRNA sense strand
caaaagagcaauggugaaa

SEQ ID NO: 2572926 - RNA, 19 nt, Homo sapiens
  misc_RNA (1)...(19): siRNA sense strand
agaaugaagaggugucuau

SEQ ID NO: 2572927 - RNA, 19 nt, Homo sapiens
  misc_RNA (1)...(19): siRNA sense strand
aggaacagaaagagaaacu

SEQ ID NO: 2572928 - RNA, 19 nt, Homo sapiens
  misc_RNA (1)...(19): siRNA sense strand
cgaagaagcugaaagacuc

SEQ ID NO: 2572929 - RNA, 19 nt, Homo sapiens
  misc_RNA (1)...(19): siRNA sense strand
aagagaggaugguggcaca

SEQ ID NO: 2572930 - RNA, 19 nt, Homo sapiens
  misc_RNA (1)...(19): siRNA sense strand
cagaagaggcagcaggaga

SEQ ID NO: 2572931 - RNA, 19 nt, Homo sapiens
  misc_RNA (1)...(19): siRNA sense strand
uggauuuccuugagggaga

SEQ ID NO: 2572932 - RNA, 19 nt, Homo sapiens
  misc_RNA (1)...(19): siRNA sense strand
ggaagaaggugcaaacgga

SEQ ID NO: 2572933 - RNA, 19 nt, Homo sapiens
  misc_RNA (1)...(19): siRNA sense strand
aaauaagagaccuggaaaa

SEQ ID NO: 2572934 - RNA, 19 nt, Homo sapiens
  misc_RNA (1)...(19): siRNA sense strand
caagacagcucauggcaga

SEQ ID NO: 2572935 - RNA, 19 nt, Homo sapiens
  misc_RNA (1)...(19): siRNA sense strand
uggcagaauucaagcggga

SEQ ID NO: 2572936 - RNA, 19 nt, Homo sapiens
  misc_RNA (1)...(19): siRNA sense strand
agaaauaucagaaaggcuu

SEQ ID NO: 2572937 - RNA, 19 nt, Homo sapiens
  misc_RNA (1)...(19): siRNA sense strand
ccuugagggagaucagaaa

SEQ ID NO: 2572938 - RNA, 19 nt, Homo sapiens
  misc_RNA (1)...(19): siRNA sense strand
agaaaggcucaaaguggaa

SEQ ID NO: 2572939 - RNA, 19 nt, Homo sapiens
  misc_RNA (1)...(19): siRNA sense strand
acaagagagaagaugaaga

SEQ ID NO: 2572940 - RNA, 19 nt, Homo sapiens
  misc_RNA (1)...(19): siRNA sense strand
cugcgagcacuuaggaaau

SEQ ID NO: 2572941 - RNA, 19 nt, Homo sapiens
  misc_RNA (1)...(19): siRNA sense strand
acugcgagcacuuaggaaa

SEQ ID NO: 2572942 - RNA, 19 nt, Homo sapiens
  misc_RNA (1)...(19): siRNA sense strand
aagaaaggcucaaagugga

SEQ ID NO: 2572943 - RNA, 19 nt, Homo sapiens
  misc_RNA (1)...(19): siRNA sense strand
gagccaaaggccagcagau

SEQ ID NO: 2572944 - RNA, 19 nt, Homo sapiens
  misc_RNA (1)...(19): siRNA sense strand
aagcaauguuuggcagaau

SEQ ID NO: 2572945 - RNA, 19 nt, Homo sapiens
  misc_RNA (1)...(19): siRNA sense strand
uggaauggguugaaaggcu

SEQ ID NO: 2572946 - RNA, 19 nt, Homo sapiens
  misc_RNA (1)...(19): siRNA sense strand
aagacgacuuccagcgaga

SEQ ID NO: 2572947 - RNA, 19 nt, Homo sapiens
  misc_RNA (1)...(19): siRNA sense strand
ccauaugaugaaugcuauu

SEQ ID NO: 2572948 - RNA, 19 nt, Homo sapiens
  misc_RNA (1)...(19): siRNA sense strand
uggaaagaagaaaggcuca

SEQ ID NO: 2572949 - RNA, 19 nt, Homo sapiens
  misc_RNA (1)...(19): siRNA sense strand
gcucaaagucccuacgaag

SEQ ID NO: 2572950 - RNA, 19 nt, Homo sapiens
  misc_RNA (1)...(19): siRNA sense strand
gccucaaugucgugcuaga

SEQ ID NO: 2572951 - RNA, 19 nt, Homo sapiens
  misc_RNA (1)...(19): siRNA sense strand
agugcuaaacgacgguaua

SEQ ID NO: 2572952 - RNA, 19 nt, Homo sapiens
  misc_RNA (1)...(19): siRNA sense strand
cgugaauggccugaagcaa

SEQ ID NO: 2572953 - RNA, 19 nt, Homo sapiens
  misc_RNA (1)...(19): siRNA sense strand
agguggagcuggaagccaa

SEQ ID NO: 2572954 - RNA, 19 nt, Homo sapiens
  misc_RNA (1)...(19): siRNA sense strand
ugaacaagguggagcugga

SEQ ID NO: 2572955 - RNA, 19 nt, Homo sapiens
  misc_RNA (1)...(19): siRNA sense strand
guaucaucgccgaggucaa

SEQ ID NO: 2572956 - RNA, 19 nt, Homo sapiens
  misc_RNA (1)...(19): siRNA sense strand
ucuuggagcagcagaacaa

SEQ ID NO: 2572957 - RNA, 19 nt, Homo sapiens
  misc_RNA (1)...(19): siRNA sense strand
cagcauuggagguggaaac

SEQ ID NO: 2572958 - RNA, 19 nt, Homo sapiens
  misc_RNA (1)...(19): siRNA sense strand
aagcacaauacgaggacau

SEQ ID NO: 2572959 - RNA, 19 nt, Homo sapiens
  misc_RNA (1)...(19): siRNA sense strand
cagguugaguggagaggga

SEQ ID NO: 2572960 - RNA, 19 nt, Homo sapiens
  misc_RNA (1)...(19): siRNA sense strand
ccuccagccagaagagcua

SEQ ID NO: 2572961 - RNA, 19 nt, Homo sapiens
  misc_RNA (1)...(19): siRNA sense strand
cagaagagcuacacgcacu

SEQ ID NO: 2572962 - RNA, 19 nt, Homo sapiens
  misc_RNA (1)...(19): siRNA sense strand
agaucaagacccucaacaa

SEQ ID NO: 2572963 - RNA, 19 nt, Homo sapiens
  misc_RNA (1)...(19): siRNA sense strand
ggcagugguucuagcguca

SEQ ID NO: 2572964 - RNA, 19 nt, Homo sapiens
  misc_RNA (1)...(19): siRNA sense strand
agaacaagguccuggagac

SEQ ID NO: 2572965 - RNA, 19 nt, Homo sapiens
  misc_RNA (1)...(19): siRNA sense strand
ggcugagagcugagauuga

SEQ ID NO: 2572966 - RNA, 19 nt, Homo sapiens
  misc_RNA (1)...(19): siRNA sense strand
gcaagcugcuggaaggcga

SEQ ID NO: 2572967 - RNA, 19 nt, Homo sapiens
  misc_RNA (1)...(19): siRNA sense strand
cagcagcauuggaggugga

SEQ ID NO: 2572968 - RNA, 19 nt, Homo sapiens
  misc_RNA (1)...(19): siRNA sense strand
gcuccaggacugugaggca

SEQ ID NO: 2572969 - RNA, 19 nt, Homo sapiens
  misc_RNA (1)...(19): siRNA sense strand
gaggcugagagcugagauu

SEQ ID NO: 2572970 - RNA, 19 nt, Homo sapiens
  misc_RNA (1)...(19): siRNA sense strand
aggugagguucuuggagca

SEQ ID NO: 2572971 - RNA, 19 nt, Homo sapiens
  misc_RNA (1)...(19): siRNA sense strand
agaccaaguacgaggagcu

SEQ ID NO: 2572972 - RNA, 19 nt, Homo sapiens
  misc_RNA (1)...(19): siRNA sense strand
gagcagaucaagacccuca

SEQ ID NO: 2572973 - RNA, 19 nt, Homo sapiens
  misc_RNA (1)...(19): siRNA sense strand
gguugaguggagagggagu

SEQ ID NO: 2572974 - RNA, 19 nt, Homo sapiens
  misc_RNA (1)...(19): siRNA sense strand
aaacaaagguagugagcca

SEQ ID NO: 2572975 - RNA, 19 nt, Homo sapiens
  misc_RNA (1)...(19): siRNA sense strand
gggaagacuuuacaggaca

SEQ ID NO: 2572976 - RNA, 19 nt, Homo sapiens
  misc_RNA (1)...(19): siRNA sense strand
aggaugaugucgugggcau

SEQ ID NO: 2572977 - RNA, 19 nt, Homo sapiens
  misc_RNA (1)...(19): siRNA sense strand
uggaaauggaucuugcaaa

SEQ ID NO: 2572978 - RNA, 19 nt, Homo sapiens
  misc_RNA (1)...(19): siRNA sense strand
gcgcaguauaugcuugaaa

SEQ ID NO: 2572979 - RNA, 19 nt, Homo sapiens
  misc_RNA (1)...(19): siRNA sense strand
uaucagaggaccagcguca

SEQ ID NO: 2572980 - RNA, 19 nt, Homo sapiens
  misc_RNA (1)...(19): siRNA sense strand
ggucuaaugucaugcagca

SEQ ID NO: 2572981 - RNA, 19 nt, Homo sapiens
  misc_RNA (1)...(19): siRNA sense strand
agauuuacauugagcucau

SEQ ID NO: 2572982 - RNA, 19 nt, Homo sapiens
  misc_RNA (1)...(19): siRNA sense strand
gugcaaauggagccgguau

SEQ ID NO: 2572983 - RNA, 19 nt, Homo sapiens
  misc_RNA (1)...(19): siRNA sense strand
uggaacaauaggagggacu

SEQ ID NO: 2572984 - RNA, 19 nt, Homo sapiens
  misc_RNA (1)...(19): siRNA sense strand
ucgccacaguccugagcaa

SEQ ID NO: 2572985 - RNA, 19 nt, Homo sapiens
  misc_RNA (1)...(19): siRNA sense strand
uggcaaaagacguuccaua

SEQ ID NO: 2572986 - RNA, 19 nt, Homo sapiens
  misc_RNA (1)...(19): siRNA sense strand
augacuuaauggacaguuu

SEQ ID NO: 2572987 - RNA, 19 nt, Homo sapiens
  misc_RNA (1)...(19): siRNA sense strand
acagaguucacgugcaaau

SEQ ID NO: 2572988 - RNA, 19 nt, Homo sapiens
  misc_RNA (1)...(19): siRNA sense strand
caucuuuaucagaggacca

SEQ ID NO: 2572989 - RNA, 19 nt, Homo sapiens
  misc_RNA (1)...(19): siRNA sense strand
gaccaaaguaagaucuaca

SEQ ID NO: 2572990 - RNA, 19 nt, Homo sapiens
  misc_RNA (1)...(19): siRNA sense strand
aggacauaccugaagacuu

SEQ ID NO: 2572991 - RNA, 19 nt, Homo sapiens
  misc_RNA (1)...(19): siRNA sense strand
gaacaauaggagggacuca

SEQ ID NO: 2572992 - RNA, 19 nt, Homo sapiens
  misc_RNA (1)...(19): siRNA sense strand
uggaagauucagagaucaa

SEQ ID NO: 2572993 - RNA, 19 nt, Homo sapiens
  misc_RNA (1)...(19): siRNA sense strand
gugaagaagcacaagaaaa

SEQ ID NO: 2572994 - RNA, 19 nt, Homo sapiens
  misc_RNA (1)...(19): siRNA sense strand
cugaugaggacacgagaaa

SEQ ID NO: 2572995 - RNA, 19 nt, Homo sapiens
  misc_RNA (1)...(19): siRNA sense strand
acucaaagcaguauggaga

SEQ ID NO: 2572996 - RNA, 19 nt, Homo sapiens
  misc_RNA (1)...(19): siRNA sense strand
aggaugaagaugaggauga

SEQ ID NO: 2572997 - RNA, 19 nt, Homo sapiens
  misc_RNA (1)...(19): siRNA sense strand
agaaggaacuggaagggau

SEQ ID NO: 2572998 - RNA, 19 nt, Homo sapiens
  misc_RNA (1)...(19): siRNA sense strand
gugaaagggaggaggaaac

SEQ ID NO: 2572999 - RNA, 19 nt, Homo sapiens
  misc_RNA (1)...(19): siRNA sense strand
cauccaggagacagagaaa

SEQ ID NO: 2573000 - RNA, 19 nt, Homo sapiens
  misc_RNA (1)...(19): siRNA sense strand
cgugaaagggaggaggaaa

SEQ ID NO: 2573001 - RNA, 19 nt, Homo sapiens
  misc_RNA (1)...(19): siRNA sense strand
auucagagaucaaagguga

SEQ ID NO: 2573002 - RNA, 19 nt, Homo sapiens
  misc_RNA (1)...(19): siRNA sense strand
gggaaaacccacagcugaa

SEQ ID NO: 2573003 - RNA, 19 nt, Homo sapiens
  misc_RNA (1)...(19): siRNA sense strand
acgagaaaccucaaggaga

SEQ ID NO: 2573004 - RNA, 19 nt, Homo sapiens
  misc_RNA (1)...(19): siRNA sense strand
cccuacagccugaggagua

SEQ ID NO: 2573005 - RNA, 19 nt, Homo sapiens
  misc_RNA (1)...(19): siRNA sense strand
gaagccaaauauaggccaa

SEQ ID NO: 2573006 - RNA, 19 nt, Homo sapiens
  misc_RNA (1)...(19): siRNA sense strand
agauggaagaagaggagga

SEQ ID NO: 2573007 - RNA, 19 nt, Homo sapiens
  misc_RNA (1)...(19): siRNA sense strand
ccugaguuguugagcccaa

SEQ ID NO: 2573008 - RNA, 19 nt, Homo sapiens
  misc_RNA (1)...(19): siRNA sense strand
cuaaguacaaacagcgcua

SEQ ID NO: 2573009 - RNA, 19 nt, Homo sapiens
  misc_RNA (1)...(19): siRNA sense strand
gaagaugcuuaaugagcca

SEQ ID NO: 2573010 - RNA, 19 nt, Homo sapiens
  misc_RNA (1)...(19): siRNA sense strand
agacagagaaagagcugga

SEQ ID NO: 2573011 - RNA, 19 nt, Homo sapiens
  misc_RNA (1)...(19): siRNA sense strand
cuggaggagcugagugaga

SEQ ID NO: 2573012 - RNA, 19 nt, Homo sapiens
  misc_RNA (1)...(19): siRNA sense strand
agcaauaccacauggaaga

SEQ ID NO: 2573013 - RNA, 19 nt, Homo sapiens
  misc_RNA (1)...(19): siRNA sense strand
gaucaaaggugaaguccuc

SEQ ID NO: 2573014 - RNA, 19 nt, Homo sapiens
  misc_RNA (1)...(19): siRNA sense strand
gagaauuugagaaggaacu

SEQ ID NO: 2573015 - RNA, 19 nt, Homo sapiens
  misc_RNA (1)...(19): siRNA sense strand
cggcagaaagagcuggaga

SEQ ID NO: 2573016 - RNA, 19 nt, Homo sapiens
  misc_RNA (1)...(19): siRNA sense strand
ggagcugaaagguggaaca

SEQ ID NO: 2573017 - RNA, 19 nt, Homo sapiens
  misc_RNA (1)...(19): siRNA sense strand
aagaagaggaggaugagga

SEQ ID NO: 2573018 - RNA, 19 nt, Homo sapiens
  misc_RNA (1)...(19): siRNA sense strand
uuaaugagccagaggacca

SEQ ID NO: 2573019 - RNA, 19 nt, Homo sapiens
  misc_RNA (1)...(19): siRNA sense strand
aaauauaggccaagagcag

SEQ ID NO: 2573020 - RNA, 19 nt, Homo sapiens
  misc_RNA (1)...(19): siRNA sense strand
agaaggagucagagcggga

SEQ ID NO: 2573021 - RNA, 19 nt, Homo sapiens
  misc_RNA (1)...(19): siRNA sense strand
caucaaaagacuggaggaa

SEQ ID NO: 2573022 - RNA, 19 nt, Homo sapiens
  misc_RNA (1)...(19): siRNA sense strand
gugaaggagcugcuggaga

SEQ ID NO: 2573023 - RNA, 19 nt, Homo sapiens
  misc_RNA (1)...(19): siRNA sense strand
ggcagagagagauggaaga

SEQ ID NO: 2573024 - RNA, 19 nt, Homo sapiens
  misc_RNA (1)...(19): siRNA sense strand
cugaggaguacauggccua

SEQ ID NO: 2573025 - RNA, 19 nt, Homo sapiens
  misc_RNA (1)...(19): siRNA sense strand
gcgugaaagggaggaggaa

SEQ ID NO: 2573026 - RNA, 19 nt, Homo sapiens
  misc_RNA (1)...(19): siRNA sense strand
cggcagagagagauggaag

SEQ ID NO: 2573027 - RNA, 19 nt, Homo sapiens
  misc_RNA (1)...(19): siRNA sense strand
gagagauggaagaagagga

SEQ ID NO: 2573028 - RNA, 19 nt, Homo sapiens
  misc_RNA (1)...(19): siRNA sense strand
agcgggaacuggagaacau

SEQ ID NO: 2573029 - RNA, 19 nt, Homo sapiens
  misc_RNA (1)...(19): siRNA sense strand
uggugaagaagcacaagaa

SEQ ID NO: 2573030 - RNA, 19 nt, Homo sapiens
  misc_RNA (1)...(19): siRNA sense strand
uccaggagacagagaaaga

SEQ ID NO: 2573031 - RNA, 19 nt, Homo sapiens
  misc_RNA (1)...(19): siRNA sense strand
aggagaucuucuucaauau

SEQ ID NO: 2573032 - RNA, 19 nt, Homo sapiens
  misc_RNA (1)...(19): siRNA sense strand
auccagaacggcagagaga

SEQ ID NO: 2573033 - RNA, 19 nt, Homo sapiens
  misc_RNA (1)...(19): siRNA sense strand
aggagcugcuggagaggga

SEQ ID NO: 2573034 - RNA, 19 nt, Homo sapiens
  misc_RNA (1)...(19): siRNA sense strand
gcaauggguccaagugcga

SEQ ID NO: 2573035 - RNA, 19 nt, Homo sapiens
  misc_RNA (1)...(19): siRNA sense strand
agugaugaagaaagugaua

SEQ ID NO: 2573036 - RNA, 19 nt, Homo sapiens
  misc_RNA (1)...(19): siRNA sense strand
gauuauuucuggauggguu

SEQ ID NO: 2573037 - RNA, 19 nt, Homo sapiens
  misc_RNA (1)...(19): siRNA sense strand
aagaagaguuugaaggcac

SEQ ID NO: 2573038 - RNA, 19 nt, Homo sapiens
  misc_RNA (1)...(19): siRNA sense strand
uggauggguugcugaucaa

SEQ ID NO: 2573039 - RNA, 19 nt, Homo sapiens
  misc_RNA (1)...(19): siRNA sense strand
accuauagcaggcugguua

SEQ ID NO: 2573040 - RNA, 19 nt, Homo sapiens
  misc_RNA (1)...(19): siRNA sense strand
gggauggaugauugugauu

SEQ ID NO: 2573041 - RNA, 19 nt, Homo sapiens
  misc_RNA (1)...(19): siRNA sense strand
gguauuaaagauaaaggca

SEQ ID NO: 2573042 - RNA, 19 nt, Homo sapiens
  misc_RNA (1)...(19): siRNA sense strand
ggcacaugcaacagaaaca

SEQ ID NO: 2573043 - RNA, 19 nt, Homo sapiens
  misc_RNA (1)...(19): siRNA sense strand
gacuguuauuaaagaguga

SEQ ID NO: 2573044 - RNA, 19 nt, Homo sapiens
  misc_RNA (1)...(19): siRNA sense strand
gagucuaccaucaaggaca

SEQ ID NO: 2573045 - RNA, 19 nt, Homo sapiens
  misc_RNA (1)...(19): siRNA sense strand
caacagaaacacacugcca

SEQ ID NO: 2573046 - RNA, 19 nt, Homo sapiens
  misc_RNA (1)...(19): siRNA sense strand
cuacauauuuacuuggucu

SEQ ID NO: 2573047 - RNA, 19 nt, Homo sapiens
  misc_RNA (1)...(19): siRNA sense strand
gguugaucuguguaggaau

SEQ ID NO: 2573048 - RNA, 19 nt, Homo sapiens
  misc_RNA (1)...(19): siRNA sense strand
ccaaagagccacagccuga

SEQ ID NO: 2573049 - RNA, 19 nt, Homo sapiens
  misc_RNA (1)...(19): siRNA sense strand
ccguguucguggugagcua

SEQ ID NO: 2573050 - RNA, 19 nt, Homo sapiens
  misc_RNA (1)...(19): siRNA sense strand
gaagaagcccaaagagcca

SEQ ID NO: 2573051 - RNA, 19 nt, Homo sapiens
  misc_RNA (1)...(19): siRNA sense strand
gggaucggcuacagcgaca

SEQ ID NO: 2573052 - RNA, 19 nt, Homo sapiens
  misc_RNA (1)...(19): siRNA sense strand
gcauuaggaagaagcccaa

SEQ ID NO: 2573053 - RNA, 19 nt, Homo sapiens
  misc_RNA (1)...(19): siRNA sense strand
ucaucaugcugaaccgcua

SEQ ID NO: 2573054 - RNA, 19 nt, Homo sapiens
  misc_RNA (1)...(19): siRNA sense strand
gagcagaaaacgagagcua

SEQ ID NO: 2573055 - RNA, 19 nt, Homo sapiens
  misc_RNA (1)...(19): siRNA sense strand
gcagaaaacgagagcuaaa

SEQ ID NO: 2573056 - RNA, 19 nt, Homo sapiens
  misc_RNA (1)...(19): siRNA sense strand
aguaaagaagcgacgaaua

SEQ ID NO: 2573057 - RNA, 19 nt, Homo sapiens
  misc_RNA (1)...(19): siRNA sense strand
gaaauugaguggugggacu

SEQ ID NO: 2573058 - RNA, 19 nt, Homo sapiens
  misc_RNA (1)...(19): siRNA sense strand
uggagaagcuacaggcaga

SEQ ID NO: 2573059 - RNA, 19 nt, Homo sapiens
  misc_RNA (1)...(19): siRNA sense strand
gacaaaucgaggagaggaa

SEQ ID NO: 2573060 - RNA, 19 nt, Homo sapiens
  misc_RNA (1)...(19): siRNA sense strand
guuaaaagaccaaacgaaa

SEQ ID NO: 2573061 - RNA, 19 nt, Homo sapiens
  misc_RNA (1)...(19): siRNA sense strand
ucacagcagaacagagaaa

SEQ ID NO: 2573062 - RNA, 19 nt, Homo sapiens
  misc_RNA (1)...(19): siRNA sense strand
aagaagagccagaggugau

SEQ ID NO: 2573063 - RNA, 19 nt, Homo sapiens
  misc_RNA (1)...(19): siRNA sense strand
agacaaacaaggagggaag

SEQ ID NO: 2573064 - RNA, 19 nt, Homo sapiens
  misc_RNA (1)...(19): siRNA sense strand
ggaguaaagaagcgacgaa

SEQ ID NO: 2573065 - RNA, 19 nt, Homo sapiens
  misc_RNA (1)...(19): siRNA sense strand
aggaaaaucccaagagaga

SEQ ID NO: 2573066 - RNA, 19 nt, Homo sapiens
  misc_RNA (1)...(19): siRNA sense strand
augaggaagcugugaagaa

SEQ ID NO: 2573067 - RNA, 19 nt, Homo sapiens
  misc_RNA (1)...(19): siRNA sense strand
agggcaaauuugagaagau

SEQ ID NO: 2573068 - RNA, 19 nt, Homo sapiens
  misc_RNA (1)...(19): siRNA sense strand
caucuaacacaaagggaga

SEQ ID NO: 2573069 - RNA, 19 nt, Homo sapiens
  misc_RNA (1)...(19): siRNA sense strand
aagcaacaacuaaaggaaa

SEQ ID NO: 2573070 - RNA, 19 nt, Homo sapiens
  misc_RNA (1)...(19): siRNA sense strand
ccacgaagguagaagccca

SEQ ID NO: 2573071 - RNA, 19 nt, Homo sapiens
  misc_RNA (1)...(19): siRNA sense strand
ggguggugguacugcacaa

SEQ ID NO: 2573072 - RNA, 19 nt, Homo sapiens
  misc_RNA (1)...(19): siRNA sense strand
agaagaaauuuaagcgucu

SEQ ID NO: 2573073 - RNA, 19 nt, Homo sapiens
  misc_RNA (1)...(19): siRNA sense strand
agcaacaacuaaaggaaaa

SEQ ID NO: 2573074 - RNA, 19 nt, Homo sapiens
  misc_RNA (1)...(19): siRNA sense strand
ggacaaaggcucaacugga

SEQ ID NO: 2573075 - RNA, 19 nt, Homo sapiens
  misc_RNA (1)...(19): siRNA sense strand
cagaacagagaaaggucaa

SEQ ID NO: 2573076 - RNA, 19 nt, Homo sapiens
  misc_RNA (1)...(19): siRNA sense strand
ccccgaagguggaguuaaa

SEQ ID NO: 2573077 - RNA, 19 nt, Homo sapiens
  misc_RNA (1)...(19): siRNA sense strand
cagagaaaggucaagaaaa

SEQ ID NO: 2573078 - RNA, 19 nt, Homo sapiens
  misc_RNA (1)...(19): siRNA sense strand
uaaaggagguguuugguga

SEQ ID NO: 2573079 - RNA, 19 nt, Homo sapiens
  misc_RNA (1)...(19): siRNA sense strand
caucagaagacauggaauc

SEQ ID NO: 2573080 - RNA, 19 nt, Homo sapiens
  misc_RNA (1)...(19): siRNA sense strand
ccgaaaacucacagcagaa

SEQ ID NO: 2573081 - RNA, 19 nt, Homo sapiens
  misc_RNA (1)...(19): siRNA sense strand
cuguauauagaguucgaaa

SEQ ID NO: 2573082 - RNA, 19 nt, Homo sapiens
  misc_RNA (1)...(19): siRNA sense strand
cugggaggguacagccaaa

SEQ ID NO: 2573083 - RNA, 19 nt, Homo sapiens
  misc_RNA (1)...(19): siRNA sense strand
cuuugaucuuacagaggaa

SEQ ID NO: 2573084 - RNA, 19 nt, Homo sapiens
  misc_RNA (1)...(19): siRNA sense strand
aaacaguguccuacagaga

SEQ ID NO: 2573085 - RNA, 19 nt, Homo sapiens
  misc_RNA (1)...(19): siRNA sense strand
cauugagaaggcaaggaaa

SEQ ID NO: 2573086 - RNA, 19 nt, Homo sapiens
  misc_RNA (1)...(19): siRNA sense strand
gaugcgaguauuaggaaca

SEQ ID NO: 2573087 - RNA, 19 nt, Homo sapiens
  misc_RNA (1)...(19): siRNA sense strand
gcgaguauuaggaacagaa

SEQ ID NO: 2573088 - RNA, 19 nt, Homo sapiens
  misc_RNA (1)...(19): siRNA sense strand
ccauugagaaggcaaggaa

SEQ ID NO: 2573089 - RNA, 19 nt, Homo sapiens
  misc_RNA (1)...(19): siRNA sense strand
agaagaaggcagccgauca

SEQ ID NO: 2573090 - RNA, 19 nt, Homo sapiens
  misc_RNA (1)...(19): siRNA sense strand
agaagauugcucagcgauu

SEQ ID NO: 2573091 - RNA, 19 nt, Homo sapiens
  misc_RNA (1)...(19): siRNA sense strand
gggaagcacagaaggaacu

SEQ ID NO: 2573092 - RNA, 19 nt, Homo sapiens
  misc_RNA (1)...(19): siRNA sense strand
caagcaacaacuaaaggaa

SEQ ID NO: 2573093 - RNA, 19 nt, Homo sapiens
  misc_RNA (1)...(19): siRNA sense strand
ucuaauuugaugcgaguau

SEQ ID NO: 2573094 - RNA, 19 nt, Homo sapiens
  misc_RNA (1)...(19): siRNA sense strand
ggagcuaaaggaaggagau

SEQ ID NO: 2573095 - RNA, 19 nt, Homo sapiens
  misc_RNA (1)...(19): siRNA sense strand
gagacaaacaaggagggaa

SEQ ID NO: 2573096 - RNA, 19 nt, Homo sapiens
  misc_RNA (1)...(19): siRNA sense strand
gcagaacagagaaagguca

SEQ ID NO: 2573097 - RNA, 19 nt, Homo sapiens
  misc_RNA (1)...(19): siRNA sense strand
guguuagaguccacugauu

SEQ ID NO: 2573098 - RNA, 19 nt, Homo sapiens
  misc_RNA (1)...(19): siRNA sense strand
agggcauggacaagaagaa

SEQ ID NO: 2573099 - RNA, 19 nt, Homo sapiens
  misc_RNA (1)...(19): siRNA sense strand
guuugaggcuguggaggaa

SEQ ID NO: 2573100 - RNA, 19 nt, Homo sapiens
  misc_RNA (1)...(19): siRNA sense strand
uggauagagaagacaguga

SEQ ID NO: 2573101 - RNA, 19 nt, Homo sapiens
  misc_RNA (1)...(19): siRNA sense strand
aggaaaagccaucagaaga

SEQ ID NO: 2573102 - RNA, 19 nt, Homo sapiens
  misc_RNA (1)...(19): siRNA sense strand
aggccaacgcugcccgaaa

SEQ ID NO: 2573103 - RNA, 19 nt, Homo sapiens
  misc_RNA (1)...(19): siRNA sense strand
caaaucgaggagaggaaaa

SEQ ID NO: 2573104 - RNA, 19 nt, Homo sapiens
  misc_RNA (1)...(19): siRNA sense strand
ugucaaagagggagcugga

SEQ ID NO: 2573105 - RNA, 19 nt, Homo sapiens
  misc_RNA (1)...(19): siRNA sense strand
agguggaagaagagccaga

SEQ ID NO: 2573106 - RNA, 19 nt, Homo sapiens
  misc_RNA (1)...(19): siRNA sense strand
acugcaagcucgaauccaa

SEQ ID NO: 2573107 - RNA, 19 nt, Homo sapiens
  misc_RNA (1)...(19): siRNA sense strand
ugcuaaaggcugugggaga

SEQ ID NO: 2573108 - RNA, 19 nt, Homo sapiens
  misc_RNA (1)...(19): siRNA sense strand
caagcaagauggcggagga

SEQ ID NO: 2573109 - RNA, 19 nt, Homo sapiens
  misc_RNA (1)...(19): siRNA sense strand
gaagugggcaguagagcga

SEQ ID NO: 2573110 - RNA, 19 nt, Homo sapiens
  misc_RNA (1)...(19): siRNA sense strand
gagcaucagcacagcaaaa

SEQ ID NO: 2573111 - RNA, 19 nt, Homo sapiens
  misc_RNA (1)...(19): siRNA sense strand
cuuuaagacguaugagcau

SEQ ID NO: 2573112 - RNA, 19 nt, Homo sapiens
  misc_RNA (1)...(19): siRNA sense strand
gcaaaaugguuccagccua

SEQ ID NO: 2573113 - RNA, 19 nt, Homo sapiens
  misc_RNA (1)...(19): siRNA sense strand
gcuuuaagacguaugagca

SEQ ID NO: 2573114 - RNA, 19 nt, Homo sapiens
  misc_RNA (1)...(19): siRNA sense strand
gaauaaggcccgagggaac

SEQ ID NO: 2573115 - RNA, 19 nt, Homo sapiens
  misc_RNA (1)...(19): siRNA sense strand
uggaaagucugcugggcau

SEQ ID NO: 2573116 - RNA, 19 nt, Homo sapiens
  misc_RNA (1)...(19): siRNA sense strand
cgaacgugagugugggcaa

SEQ ID NO: 2573117 - RNA, 19 nt, Homo sapiens
  misc_RNA (1)...(19): siRNA sense strand
ggaaaugaauaaacugcca

SEQ ID NO: 2573118 - RNA, 19 nt, Homo sapiens
  misc_RNA (1)...(19): siRNA sense strand
cucccaaggaaaugaauaa

SEQ ID NO: 2573119 - RNA, 19 nt, Homo sapiens
  misc_RNA (1)...(19): siRNA sense strand
ccaacgugacaaugguuaa

SEQ ID NO: 2573120 - RNA, 19 nt, Homo sapiens
  misc_RNA (1)...(19): siRNA sense strand
gagaauaaggcccgaggga

SEQ ID NO: 2573121 - RNA, 19 nt, Homo sapiens
  misc_RNA (1)...(19): siRNA sense strand
agaccaagggccaggcauu

SEQ ID NO: 2573122 - RNA, 19 nt, Homo sapiens
  misc_RNA (1)...(19): siRNA sense strand
cugugaagauauagagaug

SEQ ID NO: 2573123 - RNA, 19 nt, Homo sapiens
  misc_RNA (1)...(19): siRNA sense strand
caguggaagugaagaguac

SEQ ID NO: 2573124 - RNA, 19 nt, Homo sapiens
  misc_RNA (1)...(19): siRNA sense strand
ugaauaaacugccagccaa

SEQ ID NO: 2573125 - RNA, 19 nt, Homo sapiens
  misc_RNA (1)...(19): siRNA sense strand
cccaauuauguuugugaua

SEQ ID NO: 2573126 - RNA, 19 nt, Homo sapiens
  misc_RNA (1)...(19): siRNA sense strand
cagugaaggauuuggaacu

SEQ ID NO: 2573127 - RNA, 19 nt, Homo sapiens
  misc_RNA (1)...(19): siRNA sense strand
agcaaggggaugagaauaa

SEQ ID NO: 2573128 - RNA, 19 nt, Homo sapiens
  misc_RNA (1)...(19): siRNA sense strand
gggcaaugucuggagguuu

SEQ ID NO: 2573129 - RNA, 19 nt, Homo sapiens
  misc_RNA (1)...(19): siRNA sense strand
ccaaaauacagaucaagaa

SEQ ID NO: 2573130 - RNA, 19 nt, Homo sapiens
  misc_RNA (1)...(19): siRNA sense strand
gaccagugucuguguggaa

SEQ ID NO: 2573131 - RNA, 19 nt, Homo sapiens
  misc_RNA (1)...(19): siRNA sense strand
gaagauuuauugagaggcu

SEQ ID NO: 2573132 - RNA, 19 nt, Homo sapiens
  misc_RNA (1)...(19): siRNA sense strand
ugagaauguggcagaccaa

SEQ ID NO: 2573133 - RNA, 19 nt, Homo sapiens
  misc_RNA (1)...(19): siRNA sense strand
cgagcaaggggaugagaau

SEQ ID NO: 2573134 - RNA, 19 nt, Homo sapiens
  misc_RNA (1)...(19): siRNA sense strand
gcucccaaggaaaugaaua

SEQ ID NO: 2573135 - RNA, 19 nt, Homo sapiens
  misc_RNA (1)...(19): siRNA sense strand
aggcauugcauuugugguu

SEQ ID NO: 2573136 - RNA, 19 nt, Homo sapiens
  misc_RNA (1)...(19): siRNA sense strand
agaucaagaacucgacuuu

SEQ ID NO: 2573137 - RNA, 19 nt, Homo sapiens
  misc_RNA (1)...(19): siRNA sense strand
guuucuucaucauggguuu

SEQ ID NO: 2573138 - RNA, 19 nt, Homo sapiens
  misc_RNA (1)...(19): siRNA sense strand
agaauaaggcccgagggaa

SEQ ID NO: 2573139 - RNA, 19 nt, Homo sapiens
  misc_RNA (1)...(19): siRNA sense strand
gaucacucaggguggaauu

SEQ ID NO: 2573140 - RNA, 19 nt, Homo sapiens
  misc_RNA (1)...(19): siRNA sense strand
guuacaagaacaugaucga

SEQ ID NO: 2573141 - RNA, 19 nt, Homo sapiens
  misc_RNA (1)...(19): siRNA sense strand
cagccaggccaauaagaca

SEQ ID NO: 2573142 - RNA, 19 nt, Homo sapiens
  misc_RNA (1)...(19): siRNA sense strand
guggauugagggagagaaa

SEQ ID NO: 2573143 - RNA, 19 nt, Homo sapiens
  misc_RNA (1)...(19): siRNA sense strand
aggaguggauugagggaga

SEQ ID NO: 2573144 - RNA, 19 nt, Homo sapiens
  misc_RNA (1)...(19): siRNA sense strand
aaguagagccugagggaag

SEQ ID NO: 2573145 - RNA, 19 nt, Homo sapiens
  misc_RNA (1)...(19): siRNA sense strand
ggacugacgcacaaggaca

SEQ ID NO: 2573146 - RNA, 19 nt, Homo sapiens
  misc_RNA (1)...(19): siRNA sense strand
gcaagaggacugacgcaca

SEQ ID NO: 2573147 - RNA, 19 nt, Homo sapiens
  misc_RNA (1)...(19): siRNA sense strand
cguagaugccauaggccuu

SEQ ID NO: 2573148 - RNA, 19 nt, Homo sapiens
  misc_RNA (1)...(19): siRNA sense strand
caauaguaccucaccggaa

SEQ ID NO: 2573149 - RNA, 19 nt, Homo sapiens
  misc_RNA (1)...(19): siRNA sense strand
gguguagaguggacagacu

SEQ ID NO: 2573150 - RNA, 19 nt, Homo sapiens
  misc_RNA (1)...(19): siRNA sense strand
ggaaacaucuuugugggua

SEQ ID NO: 2573151 - RNA, 19 nt, Homo sapiens
  misc_RNA (1)...(19): siRNA sense strand
cuucauagccuuugggguu

SEQ ID NO: 2573152 - RNA, 19 nt, Homo sapiens
  misc_RNA (1)...(19): siRNA sense strand
ugucucaauacaagaacaa

SEQ ID NO: 2573153 - RNA, 19 nt, Homo sapiens
  misc_RNA (1)...(19): siRNA sense strand
agacacagcccaaaggcca

SEQ ID NO: 2573154 - RNA, 19 nt, Homo sapiens
  misc_RNA (1)...(19): siRNA sense strand
agaaguagagccugaggga

SEQ ID NO: 2573155 - RNA, 19 nt, Homo sapiens
  misc_RNA (1)...(19): siRNA sense strand
aggaggagucgguggccuu

SEQ ID NO: 2573156 - RNA, 19 nt, Homo sapiens
  misc_RNA (1)...(19): siRNA sense strand
ccugggaagauaaggaguu

SEQ ID NO: 2573157 - RNA, 19 nt, Homo sapiens
  misc_RNA (1)...(19): siRNA sense strand
agggagagaaacaguggau

SEQ ID NO: 2573158 - RNA, 19 nt, Homo sapiens
  misc_RNA (1)...(19): siRNA sense strand
cagaagagaaacugggaaa

SEQ ID NO: 2573159 - RNA, 19 nt, Homo sapiens
  misc_RNA (1)...(19): siRNA sense strand
acggaaagcaguagauaaa

SEQ ID NO: 2573160 - RNA, 19 nt, Homo sapiens
  misc_RNA (1)...(19): siRNA sense strand
cagaggagagagagagaaa

SEQ ID NO: 2573161 - RNA, 19 nt, Homo sapiens
  misc_RNA (1)...(19): siRNA sense strand
agggauacuacuagggaaa

SEQ ID NO: 2573162 - RNA, 19 nt, Homo sapiens
  misc_RNA (1)...(19): siRNA sense strand
aaagaaugacccagagaaa

SEQ ID NO: 2573163 - RNA, 19 nt, Homo sapiens
  misc_RNA (1)...(19): siRNA sense strand
agagaaacugggaaagaaa

SEQ ID NO: 2573164 - RNA, 19 nt, Homo sapiens
  misc_RNA (1)...(19): siRNA sense strand
gggugaaauuauacagaca

SEQ ID NO: 2573165 - RNA, 19 nt, Homo sapiens
  misc_RNA (1)...(19): siRNA sense strand
ggaugaaacaagaggagga

SEQ ID NO: 2573166 - RNA, 19 nt, Homo sapiens
  misc_RNA (1)...(19): siRNA sense strand
ccagcugggccgugagaaa

SEQ ID NO: 2573167 - RNA, 19 nt, Homo sapiens
  misc_RNA (1)...(19): siRNA sense strand
ccuauaaagaucagaauga

SEQ ID NO: 2573168 - RNA, 19 nt, Homo sapiens
  misc_RNA (1)...(19): siRNA sense strand
cuucacaaccagauggaaa

SEQ ID NO: 2573169 - RNA, 19 nt, Homo sapiens
  misc_RNA (1)...(19): siRNA sense strand
auguagagucagugguuaa

SEQ ID NO: 2573170 - RNA, 19 nt, Homo sapiens
  misc_RNA (1)...(19): siRNA sense strand
gcaagagaaaggaggcaau

SEQ ID NO: 2573171 - RNA, 19 nt, Homo sapiens
  misc_RNA (1)...(19): siRNA sense strand
uguaagaagaggaagaaaa

SEQ ID NO: 2573172 - RNA, 19 nt, Homo sapiens
  misc_RNA (1)...(19): siRNA sense strand
agaaugacccagagaaaca

SEQ ID NO: 2573173 - RNA, 19 nt, Homo sapiens
  misc_RNA (1)...(19): siRNA sense strand
cuuucaaguuuguggaaca

SEQ ID NO: 2573174 - RNA, 19 nt, Homo sapiens
  misc_RNA (1)...(19): siRNA sense strand
cccucaagauguagaacaa

SEQ ID NO: 2573175 - RNA, 19 nt, Homo sapiens
  misc_RNA (1)...(19): siRNA sense strand
aaggauauugcaagagaaa

SEQ ID NO: 2573176 - RNA, 19 nt, Homo sapiens
  misc_RNA (1)...(19): siRNA sense strand
gggaaagaaagcaggaagu

SEQ ID NO: 2573177 - RNA, 19 nt, Homo sapiens
  misc_RNA (1)...(19): siRNA sense strand
ggcaaaugaugguuggaga

SEQ ID NO: 2573178 - RNA, 19 nt, Homo sapiens
  misc_RNA (1)...(19): siRNA sense strand
aguaaguguugcaguggaa

SEQ ID NO: 2573179 - RNA, 19 nt, Homo sapiens
  misc_RNA (1)...(19): siRNA sense strand
agagagagagaaaggagaa

SEQ ID NO: 2573180 - RNA, 19 nt, Homo sapiens
  misc_RNA (1)...(19): siRNA sense strand
agaaaguggucuaggucca

SEQ ID NO: 2573181 - RNA, 19 nt, Homo sapiens
  misc_RNA (1)...(19): siRNA sense strand
gcaacaaaugaaugcacaa

SEQ ID NO: 2573182 - RNA, 19 nt, Homo sapiens
  misc_RNA (1)...(19): siRNA sense strand
ggaaagcaauugcagggua

SEQ ID NO: 2573183 - RNA, 19 nt, Homo sapiens
  misc_RNA (1)...(19): siRNA sense strand
aagcagcacaagagguaaa

SEQ ID NO: 2573184 - RNA, 19 nt, Homo sapiens
  misc_RNA (1)...(19): siRNA sense strand
cagacaagaaauugcaaau

SEQ ID NO: 2573185 - RNA, 19 nt, Homo sapiens
  misc_RNA (1)...(19): siRNA sense strand
ugugcuaguuggugaggaa

SEQ ID NO: 2573186 - RNA, 19 nt, Homo sapiens
  misc_RNA (1)...(19): siRNA sense strand
uuucacaaucagagguaaa

SEQ ID NO: 2573187 - RNA, 19 nt, Homo sapiens
  misc_RNA (1)...(19): siRNA sense strand
cuguaaaugcugaucuuaa

SEQ ID NO: 2573188 - RNA, 19 nt, Homo sapiens
  misc_RNA (1)...(19): siRNA sense strand
ccaaaagauaccauagaua

SEQ ID NO: 2573189 - RNA, 19 nt, Homo sapiens
  misc_RNA (1)...(19): siRNA sense strand
gagauguccacgaggaaau

SEQ ID NO: 2573190 - RNA, 19 nt, Homo sapiens
  misc_RNA (1)...(19): siRNA sense strand
ccagaaaaguugaaagagu

SEQ ID NO: 2573191 - RNA, 19 nt, Homo sapiens
  misc_RNA (1)...(19): siRNA sense strand
cagcaauccuauaagcgaa

SEQ ID NO: 2573192 - RNA, 19 nt, Homo sapiens
  misc_RNA (1)...(19): siRNA sense strand
cccaauuggauaacagaaa

SEQ ID NO: 2573193 - RNA, 19 nt, Homo sapiens
  misc_RNA (1)...(19): siRNA sense strand
cagccaagagugaaagauu

SEQ ID NO: 2573194 - RNA, 19 nt, Homo sapiens
  misc_RNA (1)...(19): siRNA sense strand
gcaaaugaugguuggagau

SEQ ID NO: 2573195 - RNA, 19 nt, Homo sapiens
  misc_RNA (1)...(19): siRNA sense strand
ccaaggaagaauauaaaga

SEQ ID NO: 2573196 - RNA, 19 nt, Homo sapiens
  misc_RNA (1)...(19): siRNA sense strand
cgagaaagugauagagaug

SEQ ID NO: 2573197 - RNA, 19 nt, Homo sapiens
  misc_RNA (1)...(19): siRNA sense strand
uggaagggaagaugggcaa

SEQ ID NO: 2573198 - RNA, 19 nt, Homo sapiens
  misc_RNA (1)...(19): siRNA sense strand
acaaccagauggaaagcaa

SEQ ID NO: 2573199 - RNA, 19 nt, Homo sapiens
  misc_RNA (1)...(19): siRNA sense strand
agaugaagaaacagcagaa

SEQ ID NO: 2573200 - RNA, 19 nt, Homo sapiens
  misc_RNA (1)...(19): siRNA sense strand
gcagauagcucgaagacag

SEQ ID NO: 2573201 - RNA, 19 nt, Homo sapiens
  misc_RNA (1)...(19): siRNA sense strand
guuuaacaucugaaagcaa

SEQ ID NO: 2573202 - RNA, 19 nt, Homo sapiens
  misc_RNA (1)...(19): siRNA sense strand
agucagugguuaaugaaga

SEQ ID NO: 2573203 - RNA, 19 nt, Homo sapiens
  misc_RNA (1)...(19): siRNA sense strand
agagaaaggagaaccagaa

SEQ ID NO: 2573204 - RNA, 19 nt, Homo sapiens
  misc_RNA (1)...(19): siRNA sense strand
cagagaaacagaaugaaaa

SEQ ID NO: 2573205 - RNA, 19 nt, Homo sapiens
  misc_RNA (1)...(19): siRNA sense strand
gaaagagucucauugggaa

SEQ ID NO: 2573206 - RNA, 19 nt, Homo sapiens
  misc_RNA (1)...(19): siRNA sense strand
ucugaaagcccaaaagaua

SEQ ID NO: 2573207 - RNA, 19 nt, Homo sapiens
  misc_RNA (1)...(19): siRNA sense strand
aaugaaaaucgguggcaaa

SEQ ID NO: 2573208 - RNA, 19 nt, Homo sapiens
  misc_RNA (1)...(19): siRNA sense strand
agaacgagaaagugauaga

SEQ ID NO: 2573209 - RNA, 19 nt, Homo sapiens
  misc_RNA (1)...(19): siRNA sense strand
guguuuggaaagugagauu

SEQ ID NO: 2573210 - RNA, 19 nt, Homo sapiens
  misc_RNA (1)...(19): siRNA sense strand
caaugagcaaauagaagaa

SEQ ID NO: 2573211 - RNA, 19 nt, Homo sapiens
  misc_RNA (1)...(19): siRNA sense strand
gagagagagagaaaggaga

SEQ ID NO: 2573212 - RNA, 19 nt, Homo sapiens
  misc_RNA (1)...(19): siRNA sense strand
gagagagaaaggagaacca

SEQ ID NO: 2573213 - RNA, 19 nt, Homo sapiens
  misc_RNA (1)...(19): siRNA sense strand
ugaaacaagaggaggaaac

SEQ ID NO: 2573214 - RNA, 19 nt, Homo sapiens
  misc_RNA (1)...(19): siRNA sense strand
guaagaguggagaaguaaa

SEQ ID NO: 2573215 - RNA, 19 nt, Homo sapiens
  misc_RNA (1)...(19): siRNA sense strand
uguuaagagcccagagguu

SEQ ID NO: 2573216 - RNA, 19 nt, Homo sapiens
  misc_RNA (1)...(19): siRNA sense strand
uccaaauucugcugacaaa

SEQ ID NO: 2573217 - RNA, 19 nt, Homo sapiens
  misc_RNA (1)...(19): siRNA sense strand
cagcagauguacaaaacua

SEQ ID NO: 2573218 - RNA, 19 nt, Homo sapiens
  misc_RNA (1)...(19): siRNA sense strand
acgagaaagugauagagau

SEQ ID NO: 2573219 - RNA, 19 nt, Homo sapiens
  misc_RNA (1)...(19): siRNA sense strand
ucauaguaagaguggagaa

SEQ ID NO: 2573220 - RNA, 19 nt, Homo sapiens
  misc_RNA (1)...(19): siRNA sense strand
ugaagaaacagcagaaucu

SEQ ID NO: 2573221 - RNA, 19 nt, Homo sapiens
  misc_RNA (1)...(19): siRNA sense strand
uagaagaaagugagaagca

SEQ ID NO: 2573222 - RNA, 19 nt, Homo sapiens
  misc_RNA (1)...(19): siRNA sense strand
uaaaauuggcagaaagcaa

SEQ ID NO: 2573223 - RNA, 19 nt, Homo sapiens
  misc_RNA (1)...(19): siRNA sense strand
ugagaagcauacugcaaau

SEQ ID NO: 2573224 - RNA, 19 nt, Homo sapiens
  misc_RNA (1)...(19): siRNA sense strand
ccucguacucgaagaucua

SEQ ID NO: 2573225 - RNA, 19 nt, Homo sapiens
  misc_RNA (1)...(19): siRNA sense strand
agagaacgagaaagugaua

SEQ ID NO: 2573226 - RNA, 19 nt, Homo sapiens
  misc_RNA (1)...(19): siRNA sense strand
gucuguaagaagaggaaga

SEQ ID NO: 2573227 - RNA, 19 nt, Homo sapiens
  misc_RNA (1)...(19): siRNA sense strand
ugucaaagaaugaugguga

SEQ ID NO: 2573228 - RNA, 19 nt, Homo sapiens
  misc_RNA (1)...(19): siRNA sense strand
ccuccuuggaucugaauaa

SEQ ID NO: 2573229 - RNA, 19 nt, Homo sapiens
  misc_RNA (1)...(19): siRNA sense strand
ccauagaagaggccaugaa

SEQ ID NO: 2573230 - RNA, 19 nt, Homo sapiens
  misc_RNA (1)...(19): siRNA sense strand
aggaaauucagaccagaaa

SEQ ID NO: 2573231 - RNA, 19 nt, Homo sapiens
  misc_RNA (1)...(19): siRNA sense strand
ggaggauaacagaagaaca

SEQ ID NO: 2573232 - RNA, 19 nt, Homo sapiens
  misc_RNA (1)...(19): siRNA sense strand
aggauaaacagcaggaaac

SEQ ID NO: 2573233 - RNA, 19 nt, Homo sapiens
  misc_RNA (1)...(19): siRNA sense strand
cagcaaagaaggauguacu

SEQ ID NO: 2573234 - RNA, 19 nt, Homo sapiens
  misc_RNA (1)...(19): siRNA sense strand
ccaaacagaagaaggccau

SEQ ID NO: 2573235 - RNA, 19 nt, Homo sapiens
  misc_RNA (1)...(19): siRNA sense strand
uggaaaaccaauuggaaca

SEQ ID NO: 2573236 - RNA, 19 nt, Homo sapiens
  misc_RNA (1)...(19): siRNA sense strand
uaacagaagaacagcgcga

SEQ ID NO: 2573237 - RNA, 19 nt, Homo sapiens
  misc_RNA (1)...(19): siRNA sense strand
aagaauggacgaugaggau

SEQ ID NO: 2573238 - RNA, 19 nt, Homo sapiens
  misc_RNA (1)...(19): siRNA sense strand
caacagucucaaagcaaga

SEQ ID NO: 2573239 - RNA, 19 nt, Homo sapiens
  misc_RNA (1)...(19): siRNA sense strand
cuggaggauaacagaagaa

SEQ ID NO: 2573240 - RNA, 19 nt, Homo sapiens
  misc_RNA (1)...(19): siRNA sense strand
cuguuaaagacauggcuga

SEQ ID NO: 2573241 - RNA, 19 nt, Homo sapiens
  misc_RNA (1)...(19): siRNA sense strand
ccagcaacucccaaggauu

SEQ ID NO: 2573242 - RNA, 19 nt, Homo sapiens
  misc_RNA (1)...(19): siRNA sense strand
ugagauacgauuugggaac

SEQ ID NO: 2573243 - RNA, 19 nt, Homo sapiens
  misc_RNA (1)...(19): siRNA sense strand
acuugaaucggauggagaa

SEQ ID NO: 2573244 - RNA, 19 nt, Homo sapiens
  misc_RNA (1)...(19): siRNA sense strand
auggagaagacaucuguua

SEQ ID NO: 2573245 - RNA, 19 nt, Homo sapiens
  misc_RNA (1)...(19): siRNA sense strand
gugagauacgauuugggaa

SEQ ID NO: 2573246 - RNA, 19 nt, Homo sapiens
  misc_RNA (1)...(19): siRNA sense strand
aggaagagcaggaggaaga

SEQ ID NO: 2573247 - RNA, 19 nt, Homo sapiens
  misc_RNA (1)...(19): siRNA sense strand
aggaagagcaggaggaaga

SEQ ID NO: 2573248 - RNA, 19 nt, Homo sapiens
  misc_RNA (1)...(19): siRNA sense strand
aagaggaggagaagggaaa

SEQ ID NO: 2573249 - RNA, 19 nt, Homo sapiens
  misc_RNA (1)...(19): siRNA sense strand
agagaaaaguggaggugaa

SEQ ID NO: 2573250 - RNA, 19 nt, Homo sapiens
  misc_RNA (1)...(19): siRNA sense strand
ggggagaaaugaagagcua

SEQ ID NO: 2573251 - RNA, 19 nt, Homo sapiens
  misc_RNA (1)...(19): siRNA sense strand
gguuagugggaaagagcaa

SEQ ID NO: 2573252 - RNA, 19 nt, Homo sapiens
  misc_RNA (1)...(19): siRNA sense strand
aggaggaagaggaggagaa

SEQ ID NO: 2573253 - RNA, 19 nt, Homo sapiens
  misc_RNA (1)...(19): siRNA sense strand
aagaauaauuacagcccaa

SEQ ID NO: 2573254 - RNA, 19 nt, Homo sapiens
  misc_RNA (1)...(19): siRNA sense strand
ggagaaaugaagagcuaca

SEQ ID NO: 2573255 - RNA, 19 nt, Homo sapiens
  misc_RNA (1)...(19): siRNA sense strand
aggccaaagcagaaagcaa

SEQ ID NO: 2573256 - RNA, 19 nt, Homo sapiens
  misc_RNA (1)...(19): siRNA sense strand
aggaagaggaggaggagga

SEQ ID NO: 2573257 - RNA, 19 nt, Homo sapiens
  misc_RNA (1)...(19): siRNA sense strand
aggaagaggaggaggagga

SEQ ID NO: 2573258 - RNA, 19 nt, Homo sapiens
  misc_RNA (1)...(19): siRNA sense strand
uggugaaacaauagggauu

SEQ ID NO: 2573259 - RNA, 19 nt, Homo sapiens
  misc_RNA (1)...(19): siRNA sense strand
aggaggaggaggaggaaga

SEQ ID NO: 2573260 - RNA, 19 nt, Homo sapiens
  misc_RNA (1)...(19): siRNA sense strand
agugaaagacagugacauu

SEQ ID NO: 2573261 - RNA, 19 nt, Homo sapiens
  misc_RNA (1)...(19): siRNA sense strand
agaaggaggaggagagcuu

SEQ ID NO: 2573262 - RNA, 19 nt, Homo sapiens
  misc_RNA (1)...(19): siRNA sense strand
cagaaagaaggaaggaaga

SEQ ID NO: 2573263 - RNA, 19 nt, Homo sapiens
  misc_RNA (1)...(19): siRNA sense strand
gcgaagaggaggaagagga

SEQ ID NO: 2573264 - RNA, 19 nt, Homo sapiens
  misc_RNA (1)...(19): siRNA sense strand
augaagagcuacagcccaa

SEQ ID NO: 2573265 - RNA, 19 nt, Homo sapiens
  misc_RNA (1)...(19): siRNA sense strand
aaaugaagcagaaggaaaa

SEQ ID NO: 2573266 - RNA, 19 nt, Homo sapiens
  misc_RNA (1)...(19): siRNA sense strand
agacaaugaaggugaagau

SEQ ID NO: 2573267 - RNA, 19 nt, Homo sapiens
  misc_RNA (1)...(19): siRNA sense strand
gggaagugauggaggggau

SEQ ID NO: 2573268 - RNA, 19 nt, Homo sapiens
  misc_RNA (1)...(19): siRNA sense strand
aggcaggagucuaggaagu

SEQ ID NO: 2573269 - RNA, 19 nt, Homo sapiens
  misc_RNA (1)...(19): siRNA sense strand
ugaacaagauccugggcuu

SEQ ID NO: 2573270 - RNA, 19 nt, Homo sapiens
  misc_RNA (1)...(19): siRNA sense strand
agagaauaauggaggaaac

SEQ ID NO: 2573271 - RNA, 19 nt, Homo sapiens
  misc_RNA (1)...(19): siRNA sense strand
aggugaaacugaaacacaa

SEQ ID NO: 2573272 - RNA, 19 nt, Homo sapiens
  misc_RNA (1)...(19): siRNA sense strand
ccuuagaagaccucagcaa

SEQ ID NO: 2573273 - RNA, 19 nt, Homo sapiens
  misc_RNA (1)...(19): siRNA sense strand
aaaaugaagcagaaggaaa

SEQ ID NO: 2573274 - RNA, 19 nt, Homo sapiens
  misc_RNA (1)...(19): siRNA sense strand
aggagaagaaugugaagau

SEQ ID NO: 2573275 - RNA, 19 nt, Homo sapiens
  misc_RNA (1)...(19): siRNA sense strand
ccaaggagaaggaggagga

SEQ ID NO: 2573276 - RNA, 19 nt, Homo sapiens
  misc_RNA (1)...(19): siRNA sense strand
gaagaggaggagaagggaa

SEQ ID NO: 2573277 - RNA, 19 nt, Homo sapiens
  misc_RNA (1)...(19): siRNA sense strand
agggagaucagaaggagaa

SEQ ID NO: 2573278 - RNA, 19 nt, Homo sapiens
  misc_RNA (1)...(19): siRNA sense strand
aggugaaacucaaccagaa

SEQ ID NO: 2573279 - RNA, 19 nt, Homo sapiens
  misc_RNA (1)...(19): siRNA sense strand
accagaaggugaaggugaa

SEQ ID NO: 2573280 - RNA, 19 nt, Homo sapiens
  misc_RNA (1)...(19): siRNA sense strand
gagcaugacaguggagaau

SEQ ID NO: 2573281 - RNA, 19 nt, Homo sapiens
  misc_RNA (1)...(19): siRNA sense strand
ggugaaggugaaacugaaa

SEQ ID NO: 2573282 - RNA, 19 nt, Homo sapiens
  misc_RNA (1)...(19): siRNA sense strand
caggauaacaagaagcuga

SEQ ID NO: 2573283 - RNA, 19 nt, Homo sapiens
  misc_RNA (1)...(19): siRNA sense strand
gggugaaauccacgcagaa

SEQ ID NO: 2573284 - RNA, 19 nt, Homo sapiens
  misc_RNA (1)...(19): siRNA sense strand
auggugaaaugaaagguaa

SEQ ID NO: 2573285 - RNA, 19 nt, Homo sapiens
  misc_RNA (1)...(19): siRNA sense strand
agggaaaaggugaaguaua

SEQ ID NO: 2573286 - RNA, 19 nt, Homo sapiens
  misc_RNA (1)...(19): siRNA sense strand
agaugaaaaugaagcagaa

SEQ ID NO: 2573287 - RNA, 19 nt, Homo sapiens
  misc_RNA (1)...(19): siRNA sense strand
cugaagagaucaugggccu

SEQ ID NO: 2573288 - RNA, 19 nt, Homo sapiens
  misc_RNA (1)...(19): siRNA sense strand
gggccauugcgguggauga

SEQ ID NO: 2573289 - RNA, 19 nt, Homo sapiens
  misc_RNA (1)...(19): siRNA sense strand
aggaggaagaggaggagga

SEQ ID NO: 2573290 - RNA, 19 nt, Homo sapiens
  misc_RNA (1)...(19): siRNA sense strand
aggaggaagaggaggagga

SEQ ID NO: 2573291 - RNA, 19 nt, Homo sapiens
  misc_RNA (1)...(19): siRNA sense strand
aggaggaagaggaggagga

SEQ ID NO: 2573292 - RNA, 19 nt, Homo sapiens
  misc_RNA (1)...(19): siRNA sense strand
aggaggaggaggaggagga

SEQ ID NO: 2573293 - RNA, 19 nt, Homo sapiens
  misc_RNA (1)...(19): siRNA sense strand
aggaggaggaagaggagga

SEQ ID NO: 2573294 - RNA, 19 nt, Homo sapiens
  misc_RNA (1)...(19): siRNA sense strand
ggaaacaagccaugcgauc

SEQ ID NO: 2573295 - RNA, 19 nt, Homo sapiens
  misc_RNA (1)...(19): siRNA sense strand
guggaugagcuacaggaua

SEQ ID NO: 2573296 - RNA, 19 nt, Homo sapiens
  misc_RNA (1)...(19): siRNA sense strand
aggugaaggugaaacugaa

SEQ ID NO: 2573297 - RNA, 19 nt, Homo sapiens
  misc_RNA (1)...(19): siRNA sense strand
gggauagcgaagaggagga

SEQ ID NO: 2573298 - RNA, 19 nt, Homo sapiens
  misc_RNA (1)...(19): siRNA sense strand
caaggagcgucauggaaaa

SEQ ID NO: 2573299 - RNA, 19 nt, Homo sapiens
  misc_RNA (1)...(19): siRNA sense strand
acaaggaaaaggagaagaa

SEQ ID NO: 2573300 - RNA, 19 nt, Homo sapiens
  misc_RNA (1)...(19): siRNA sense strand
aaggugaagaugaggguga

SEQ ID NO: 2573301 - RNA, 19 nt, Homo sapiens
  misc_RNA (1)...(19): siRNA sense strand
aggaaaaggagaagaaugu

SEQ ID NO: 2573302 - RNA, 19 nt, Homo sapiens
  misc_RNA (1)...(19): siRNA sense strand
agguaaugaaggugaaacu

SEQ ID NO: 2573303 - RNA, 19 nt, Homo sapiens
  misc_RNA (1)...(19): siRNA sense strand
gcgucauguaaauggagaa

SEQ ID NO: 2573304 - RNA, 19 nt, Homo sapiens
  misc_RNA (1)...(19): siRNA sense strand
uguaaauggagaaugaaca

SEQ ID NO: 2573305 - RNA, 19 nt, Homo sapiens
  misc_RNA (1)...(19): siRNA sense strand
cagaagaaggaaaggaaaa

SEQ ID NO: 2573306 - RNA, 19 nt, Homo sapiens
  misc_RNA (1)...(19): siRNA sense strand
cgguagaggaggucaguca

SEQ ID NO: 2573307 - RNA, 19 nt, Homo sapiens
  misc_RNA (1)...(19): siRNA sense strand
gaagaaauuaauaggacga

SEQ ID NO: 2573308 - RNA, 19 nt, Homo sapiens
  misc_RNA (1)...(19): siRNA sense strand
gaacaugagcuuaucgaga

SEQ ID NO: 2573309 - RNA, 19 nt, Homo sapiens
  misc_RNA (1)...(19): siRNA sense strand
acagaagaaggaaaggaaa

SEQ ID NO: 2573310 - RNA, 19 nt, Homo sapiens
  misc_RNA (1)...(19): siRNA sense strand
gguuguauacuguggaaca

SEQ ID NO: 2573311 - RNA, 19 nt, Homo sapiens
  misc_RNA (1)...(19): siRNA sense strand
uuguaacagaagaaggaaa

SEQ ID NO: 2573312 - RNA, 19 nt, Homo sapiens
  misc_RNA (1)...(19): siRNA sense strand
cgucauuguauuuguguga

SEQ ID NO: 2573313 - RNA, 19 nt, Homo sapiens
  misc_RNA (1)...(19): siRNA sense strand
gaagauacacuaaaggcuu

SEQ ID NO: 2573314 - RNA, 19 nt, Homo sapiens
  misc_RNA (1)...(19): siRNA sense strand
ggaaaggaaaagaaaguca

SEQ ID NO: 2573315 - RNA, 19 nt, Homo sapiens
  misc_RNA (1)...(19): siRNA sense strand
agaucaagaagcucauuaa

SEQ ID NO: 2573316 - RNA, 19 nt, Homo sapiens
  misc_RNA (1)...(19): siRNA sense strand
gagaagaaauuaauaggac

SEQ ID NO: 2573317 - RNA, 19 nt, Homo sapiens
  misc_RNA (1)...(19): siRNA sense strand
aggcacagaagaggagaaa

SEQ ID NO: 2573318 - RNA, 19 nt, Homo sapiens
  misc_RNA (1)...(19): siRNA sense strand
agaaggaaaggaaaagaaa

SEQ ID NO: 2573319 - RNA, 19 nt, Homo sapiens
  misc_RNA (1)...(19): siRNA sense strand
ucggaaaguagcagagacu

SEQ ID NO: 2573320 - RNA, 19 nt, Homo sapiens
  misc_RNA (1)...(19): siRNA sense strand
cagagcaagaaaaggauaa

SEQ ID NO: 2573321 - RNA, 19 nt, Homo sapiens
  misc_RNA (1)...(19): siRNA sense strand
ccgacaggaacguggagau

SEQ ID NO: 2573322 - RNA, 19 nt, Homo sapiens
  misc_RNA (1)...(19): siRNA sense strand
cggacaggaacaugagcuu

SEQ ID NO: 2573323 - RNA, 19 nt, Homo sapiens
  misc_RNA (1)...(19): siRNA sense strand
auaccaaggaggagacgau

SEQ ID NO: 2573324 - RNA, 19 nt, Homo sapiens
  misc_RNA (1)...(19): siRNA sense strand
uggaaaagcgacauaacua

SEQ ID NO: 2573325 - RNA, 19 nt, Homo sapiens
  misc_RNA (1)...(19): siRNA sense strand
ggacaaagugaauguggcu

SEQ ID NO: 2573326 - RNA, 19 nt, Homo sapiens
  misc_RNA (1)...(19): siRNA sense strand
agauuucacgaguggcaaa

SEQ ID NO: 2573327 - RNA, 19 nt, Homo sapiens
  misc_RNA (1)...(19): siRNA sense strand
aacagaagaaggaaaggaa

SEQ ID NO: 2573328 - RNA, 19 nt, Homo sapiens
  misc_RNA (1)...(19): siRNA sense strand
gaaacacgguagaggaggu

SEQ ID NO: 2573329 - RNA, 19 nt, Homo sapiens
  misc_RNA (1)...(19): siRNA sense strand
ugugaaaggauuuggugga

SEQ ID NO: 2573330 - RNA, 19 nt, Homo sapiens
  misc_RNA (1)...(19): siRNA sense strand
ugaaaggauuugguggaau

SEQ ID NO: 2573331 - RNA, 19 nt, Homo sapiens
  misc_RNA (1)...(19): siRNA sense strand
uggaagaucaagaagcuca

SEQ ID NO: 2573332 - RNA, 19 nt, Homo sapiens
  misc_RNA (1)...(19): siRNA sense strand
caacauugacuuugaaccu

SEQ ID NO: 2573333 - RNA, 19 nt, Homo sapiens
  misc_RNA (1)...(19): siRNA sense strand
aggaaaagaaagucaacau

SEQ ID NO: 2573334 - RNA, 19 nt, Homo sapiens
  misc_RNA (1)...(19): siRNA sense strand
ucauuguauuugugugaca

SEQ ID NO: 2573335 - RNA, 19 nt, Homo sapiens
  misc_RNA (1)...(19): siRNA sense strand
acaaauucacuguggaucu

SEQ ID NO: 2573336 - RNA, 19 nt, Homo sapiens
  misc_RNA (1)...(19): siRNA sense strand
aaggaggagacgaugaauu

SEQ ID NO: 2573337 - RNA, 19 nt, Homo sapiens
  misc_RNA (1)...(19): siRNA sense strand
gcguugaagauacacuaaa

SEQ ID NO: 2573338 - RNA, 19 nt, Homo sapiens
  misc_RNA (1)...(19): siRNA sense strand
uuggaaauugucacagaua

SEQ ID NO: 2573339 - RNA, 19 nt, Homo sapiens
  misc_RNA (1)...(19): siRNA sense strand
aggacgauacuuugaugaa

SEQ ID NO: 2573340 - RNA, 19 nt, Homo sapiens
  misc_RNA (1)...(19): siRNA sense strand
aaaugggagcuguagaaau

SEQ ID NO: 2573341 - RNA, 19 nt, Homo sapiens
  misc_RNA (1)...(19): siRNA sense strand
aauagaugguaguggugca

SEQ ID NO: 2573342 - RNA, 19 nt, Homo sapiens
  misc_RNA (1)...(19): siRNA sense strand
cuguggaacaauuguaaca

SEQ ID NO: 2573343 - RNA, 19 nt, Homo sapiens
  misc_RNA (1)...(19): siRNA sense strand
gaugaaaucagccaggaca

SEQ ID NO: 2573344 - RNA, 19 nt, Homo sapiens
  misc_RNA (1)...(19): siRNA sense strand
ugguggaauuggagguauc

SEQ ID NO: 2573345 - RNA, 19 nt, Homo sapiens
  misc_RNA (1)...(19): siRNA sense strand
aauuguaacagaagaagga

SEQ ID NO: 2573346 - RNA, 19 nt, Homo sapiens
  misc_RNA (1)...(19): siRNA sense strand
uguaauagaugguaguggu

SEQ ID NO: 2573347 - RNA, 19 nt, Homo sapiens
  misc_RNA (1)...(19): siRNA sense strand
cggaagaacaauaggagau

SEQ ID NO: 2573348 - RNA, 19 nt, Homo sapiens
  misc_RNA (1)...(19): siRNA sense strand
cuacaauaacagaacgaua

SEQ ID NO: 2573349 - RNA, 19 nt, Homo sapiens
  misc_RNA (1)...(19): siRNA sense strand
gagaagaagugucggagga

SEQ ID NO: 2573350 - RNA, 19 nt, Homo sapiens
  misc_RNA (1)...(19): siRNA sense strand
ugguggaaggagagaguua

SEQ ID NO: 2573351 - RNA, 19 nt, Homo sapiens
  misc_RNA (1)...(19): siRNA sense strand
cagaggugcgagagaauaa

SEQ ID NO: 2573352 - RNA, 19 nt, Homo sapiens
  misc_RNA (1)...(19): siRNA sense strand
gugaaugucgagugguaaa

SEQ ID NO: 2573353 - RNA, 19 nt, Homo sapiens
  misc_RNA (1)...(19): siRNA sense strand
auauaaagucggaagaaca

SEQ ID NO: 2573354 - RNA, 19 nt, Homo sapiens
  misc_RNA (1)...(19): siRNA sense strand
cuucaaagggauuguguau

SEQ ID NO: 2573355 - RNA, 19 nt, Homo sapiens
  misc_RNA (1)...(19): siRNA sense strand
aagugaaugucgaguggua

SEQ ID NO: 2573356 - RNA, 19 nt, Homo sapiens
  misc_RNA (1)...(19): siRNA sense strand
cuggaaagauaaagaagca

SEQ ID NO: 2573357 - RNA, 19 nt, Homo sapiens
  misc_RNA (1)...(19): siRNA sense strand
gauaaggcgcagagauaca

SEQ ID NO: 2573358 - RNA, 19 nt, Homo sapiens
  misc_RNA (1)...(19): siRNA sense strand
aacaauaggagauggaaau

SEQ ID NO: 2573359 - RNA, 19 nt, Homo sapiens
  misc_RNA (1)...(19): siRNA sense strand
ugucaaggaauguguagaa

SEQ ID NO: 2573360 - RNA, 19 nt, Homo sapiens
  misc_RNA (1)...(19): siRNA sense strand
gcucgauggaugagaacga

SEQ ID NO: 2573361 - RNA, 19 nt, Homo sapiens
  misc_RNA (1)...(19): siRNA sense strand
cgagaagaaggccaagaaa

SEQ ID NO: 2573362 - RNA, 19 nt, Homo sapiens
  misc_RNA (1)...(19): siRNA sense strand
ccuucaagaaacuggagua

SEQ ID NO: 2573363 - RNA, 19 nt, Homo sapiens
  misc_RNA (1)...(19): siRNA sense strand
gcuccgagaagaaggccaa

SEQ ID NO: 2573364 - RNA, 19 nt, Homo sapiens
  misc_RNA (1)...(19): siRNA sense strand
gcagagacauggagcugga

SEQ ID NO: 2573365 - RNA, 19 nt, Homo sapiens
  misc_RNA (1)...(19): siRNA sense strand
agaaaucauugcagagacu

SEQ ID NO: 2573366 - RNA, 19 nt, Homo sapiens
  misc_RNA (1)...(19): siRNA sense strand
cgauauaaagucggaagaa

SEQ ID NO: 2573367 - RNA, 19 nt, Homo sapiens
  misc_RNA (1)...(19): siRNA sense strand
caucaagagaucagggucu

SEQ ID NO: 2573368 - RNA, 19 nt, Homo sapiens
  misc_RNA (1)...(19): siRNA sense strand
gugcgagagaauaaggauu

SEQ ID NO: 2573369 - RNA, 19 nt, Homo sapiens
  misc_RNA (1)...(19): siRNA sense strand
ggaaacaggugaugugccu

SEQ ID NO: 2573370 - RNA, 19 nt, Homo sapiens
  misc_RNA (1)...(19): siRNA sense strand
ccgagaagaaggccaagaa

SEQ ID NO: 2573371 - RNA, 19 nt, Homo sapiens
  misc_RNA (1)...(19): siRNA sense strand
gaguaugcucugaaaauua

SEQ ID NO: 2573372 - RNA, 19 nt, Homo sapiens
  misc_RNA (1)...(19): siRNA sense strand
ccaugaugcuguuggucga

SEQ ID NO: 2573373 - RNA, 19 nt, Homo sapiens
  misc_RNA (1)...(19): siRNA sense strand
guacacguuggaugggaaa

SEQ ID NO: 2573374 - RNA, 19 nt, Homo sapiens
  misc_RNA (1)...(19): siRNA sense strand
aggaauguguagaaagauc

SEQ ID NO: 2573375 - RNA, 19 nt, Homo sapiens
  misc_RNA (1)...(19): siRNA sense strand
caacauacguggcuccaga

SEQ ID NO: 2573376 - RNA, 19 nt, Homo sapiens
  misc_RNA (1)...(19): siRNA sense strand
gaucgauacuucaaaggga

SEQ ID NO: 2573377 - RNA, 19 nt, Homo sapiens
  misc_RNA (1)...(19): siRNA sense strand
gcuagaugaaagugaaugu

SEQ ID NO: 2573378 - RNA, 19 nt, Homo sapiens
  misc_RNA (1)...(19): siRNA sense strand
agaugaaagugaaugucga

SEQ ID NO: 2573379 - RNA, 19 nt, Homo sapiens
  misc_RNA (1)...(19): siRNA sense strand
ccuucuccauacugggaua

SEQ ID NO: 2573380 - RNA, 19 nt, Homo sapiens
  misc_RNA (1)...(19): siRNA sense strand
caguagcuggaaagauaaa

SEQ ID NO: 2573381 - RNA, 19 nt, Homo sapiens
  misc_RNA (1)...(19): siRNA sense strand
cuucagaggugcgagagaa

SEQ ID NO: 2573382 - RNA, 19 nt, Homo sapiens
  misc_RNA (1)...(19): siRNA sense strand
ugucggauaacgugaauuu

SEQ ID NO: 2573383 - RNA, 19 nt, Homo sapiens
  misc_RNA (1)...(19): siRNA sense strand
ccaagauggcagcaaauca

SEQ ID NO: 2573384 - RNA, 19 nt, Homo sapiens
  misc_RNA (1)...(19): siRNA sense strand
aggaugauuucuugcuaga

SEQ ID NO: 2573385 - RNA, 19 nt, Homo sapiens
  misc_RNA (1)...(19): siRNA sense strand
agaaagaucgacugcuaga

SEQ ID NO: 2573386 - RNA, 19 nt, Homo sapiens
  misc_RNA (1)...(19): siRNA sense strand
cgugauaucaagccagaga

SEQ ID NO: 2573387 - RNA, 19 nt, Homo sapiens
  misc_RNA (1)...(19): siRNA sense strand
acuaacaaauacaccgaga

SEQ ID NO: 2573388 - RNA, 19 nt, Homo sapiens
  misc_RNA (1)...(19): siRNA sense strand
ccagcaaccaggaauguau

SEQ ID NO: 2573389 - RNA, 19 nt, Homo sapiens
  misc_RNA (1)...(19): siRNA sense strand
cuugagcaucccuggguua

SEQ ID NO: 2573390 - RNA, 19 nt, Homo sapiens
  misc_RNA (1)...(19): siRNA sense strand
ugaugugccuucaggacuu

SEQ ID NO: 2573391 - RNA, 19 nt, Homo sapiens
  misc_RNA (1)...(19): siRNA sense strand
cgggauaaggcgcagagau

SEQ ID NO: 2573392 - RNA, 19 nt, Homo sapiens
  misc_RNA (1)...(19): siRNA sense strand
gaguacaccaagaauguga

SEQ ID NO: 2573393 - RNA, 19 nt, Homo sapiens
  misc_RNA (1)...(19): siRNA sense strand
ugcgagagaauaaggauuu

SEQ ID NO: 2573394 - RNA, 19 nt, Homo sapiens
  misc_RNA (1)...(19): siRNA sense strand
uguacacguuggaugggaa

SEQ ID NO: 2573395 - RNA, 19 nt, Homo sapiens
  misc_RNA (1)...(19): siRNA sense strand
agaagaagugucggaggaa

SEQ ID NO: 2573396 - RNA, 19 nt, Homo sapiens
  misc_RNA (1)...(19): siRNA sense strand
agcacaugauccagaauga

SEQ ID NO: 2573397 - RNA, 19 nt, Homo sapiens
  misc_RNA (1)...(19): siRNA sense strand
ucaaauaccugcauagccu

SEQ ID NO: 2573398 - RNA, 19 nt, Homo sapiens
  misc_RNA (1)...(19): siRNA sense strand
caucugggcagcaggugua

SEQ ID NO: 2573399 - RNA, 19 nt, Homo sapiens
  misc_RNA (1)...(19): siRNA sense strand
ggguuuaccaucaagagau

SEQ ID NO: 2573400 - RNA, 19 nt, Homo sapiens
  misc_RNA (1)...(19): siRNA sense strand
ccuucagaggugcgagaga

SEQ ID NO: 2573401 - RNA, 19 nt, Homo sapiens
  misc_RNA (1)...(19): siRNA sense strand
aggccaagaaaguucguuu

SEQ ID NO: 2573402 - RNA, 19 nt, Homo sapiens
  misc_RNA (1)...(19): siRNA sense strand
aagaacaauaggagaugga

SEQ ID NO: 2573403 - RNA, 19 nt, Homo sapiens
  misc_RNA (1)...(19): siRNA sense strand
caagaauagagcaggagaa

SEQ ID NO: 2573404 - RNA, 19 nt, Homo sapiens
  misc_RNA (1)...(19): siRNA sense strand
ucuacaaaccacagagcaa

SEQ ID NO: 2573405 - RNA, 19 nt, Homo sapiens
  misc_RNA (1)...(19): siRNA sense strand
ccgccaguguacagagcaa

SEQ ID NO: 2573406 - RNA, 19 nt, Homo sapiens
  misc_RNA (1)...(19): siRNA sense strand
augcaauccaggagaaauu

SEQ ID NO: 2573407 - RNA, 19 nt, Homo sapiens
  misc_RNA (1)...(19): siRNA sense strand
ccugauuacaauagcagua

SEQ ID NO: 2573408 - RNA, 19 nt, Homo sapiens
  misc_RNA (1)...(19): siRNA sense strand
ucaugaaauacaaggauca

SEQ ID NO: 2573409 - RNA, 19 nt, Homo sapiens
  misc_RNA (1)...(19): siRNA sense strand
acaaguaagaaguagauca

SEQ ID NO: 2573410 - RNA, 19 nt, Homo sapiens
  misc_RNA (1)...(19): siRNA sense strand
cagugaaacuagaaugcca

SEQ ID NO: 2573411 - RNA, 19 nt, Homo sapiens
  misc_RNA (1)...(19): siRNA sense strand
aagcugaaaugcaaggaca

SEQ ID NO: 2573412 - RNA, 19 nt, Homo sapiens
  misc_RNA (1)...(19): siRNA sense strand
accaagaacuccugaucau

SEQ ID NO: 2573413 - RNA, 19 nt, Homo sapiens
  misc_RNA (1)...(19): siRNA sense strand
gcacaagacucgcagcaac

SEQ ID NO: 2573414 - RNA, 19 nt, Homo sapiens
  misc_RNA (1)...(19): siRNA sense strand
aaagaugcugggugguaua

SEQ ID NO: 2573415 - RNA, 19 nt, Homo sapiens
  misc_RNA (1)...(19): siRNA sense strand
uuuagcacuuaaugggaaa

SEQ ID NO: 2573416 - RNA, 19 nt, Homo sapiens
  misc_RNA (1)...(19): siRNA sense strand
cugcaaaugcuaagcccau

SEQ ID NO: 2573417 - RNA, 19 nt, Homo sapiens
  misc_RNA (1)...(19): siRNA sense strand
ccuucuucauaauggaaau

SEQ ID NO: 2573418 - RNA, 19 nt, Homo sapiens
  misc_RNA (1)...(19): siRNA sense strand
ucaagauaacacuggaaga

SEQ ID NO: 2573419 - RNA, 19 nt, Homo sapiens
  misc_RNA (1)...(19): siRNA sense strand
gcacaaaaugauagugucu

SEQ ID NO: 2573420 - RNA, 19 nt, Homo sapiens
  misc_RNA (1)...(19): siRNA sense strand
acaaaaugauagugucuga

SEQ ID NO: 2573421 - RNA, 19 nt, Homo sapiens
  misc_RNA (1)...(19): siRNA sense strand
caagaaagaugcugggugg

SEQ ID NO: 2573422 - RNA, 19 nt, Homo sapiens
  misc_RNA (1)...(19): siRNA sense strand
agaacaugcgcgacugcaa

SEQ ID NO: 2573423 - RNA, 19 nt, Homo sapiens
  misc_RNA (1)...(19): siRNA sense strand
caaagugaguggacugcca

SEQ ID NO: 2573424 - RNA, 19 nt, Homo sapiens
  misc_RNA (1)...(19): siRNA sense strand
acacaagauuagacguuac

SEQ ID NO: 2573425 - RNA, 19 nt, Homo sapiens
  misc_RNA (1)...(19): siRNA sense strand
ccaagaauagagcaggaga

SEQ ID NO: 2573426 - RNA, 19 nt, Homo sapiens
  misc_RNA (1)...(19): siRNA sense strand
aaaugauagugucugagaa

SEQ ID NO: 2573427 - RNA, 19 nt, Homo sapiens
  misc_RNA (1)...(19): siRNA sense strand
cgucuaacauaugaagaga

SEQ ID NO: 2573428 - RNA, 19 nt, Homo sapiens
  misc_RNA (1)...(19): siRNA sense strand
acucagaacaugcgcgacu

SEQ ID NO: 2573429 - RNA, 19 nt, Homo sapiens
  misc_RNA (1)...(19): siRNA sense strand
ucuaaauggaagaacaguu

SEQ ID NO: 2573430 - RNA, 19 nt, Homo sapiens
  misc_RNA (1)...(19): siRNA sense strand
ugccaagaauagagcagga

SEQ ID NO: 2573431 - RNA, 19 nt, Homo sapiens
  misc_RNA (1)...(19): siRNA sense strand
aggaagaagagcagguaaa

SEQ ID NO: 2573432 - RNA, 19 nt, Homo sapiens
  misc_RNA (1)...(19): siRNA sense strand
cagaaguugaagagaaaua

SEQ ID NO: 2573433 - RNA, 19 nt, Homo sapiens
  misc_RNA (1)...(19): siRNA sense strand
agcagaaguugaagagaaa

SEQ ID NO: 2573434 - RNA, 19 nt, Homo sapiens
  misc_RNA (1)...(19): siRNA sense strand
agggcauaguuuagagaaa

SEQ ID NO: 2573435 - RNA, 19 nt, Homo sapiens
  misc_RNA (1)...(19): siRNA sense strand
gagaaauauaagaaggcua

SEQ ID NO: 2573436 - RNA, 19 nt, Homo sapiens
  misc_RNA (1)...(19): siRNA sense strand
cagcaggaacugagggcaa

SEQ ID NO: 2573437 - RNA, 19 nt, Homo sapiens
  misc_RNA (1)...(19): siRNA sense strand
agaugaagguguugcaaaa

SEQ ID NO: 2573438 - RNA, 19 nt, Homo sapiens
  misc_RNA (1)...(19): siRNA sense strand
cagaagaagacaaagaaca

SEQ ID NO: 2573439 - RNA, 19 nt, Homo sapiens
  misc_RNA (1)...(19): siRNA sense strand
acaacgaagaagaggguga

SEQ ID NO: 2573440 - RNA, 19 nt, Homo sapiens
  misc_RNA (1)...(19): siRNA sense strand
aggaagacagugagcgcua

SEQ ID NO: 2573441 - RNA, 19 nt, Homo sapiens
  misc_RNA (1)...(19): siRNA sense strand
cugcagaaccaaagagcga

SEQ ID NO: 2573442 - RNA, 19 nt, Homo sapiens
  misc_RNA (1)...(19): siRNA sense strand
cagcaauagccuagagaac

SEQ ID NO: 2573443 - RNA, 19 nt, Homo sapiens
  misc_RNA (1)...(19): siRNA sense strand
ccugaagcaaagagaggaa

SEQ ID NO: 2573444 - RNA, 19 nt, Homo sapiens
  misc_RNA (1)...(19): siRNA sense strand
agaggaaaugcucgagaaa

SEQ ID NO: 2573445 - RNA, 19 nt, Homo sapiens
  misc_RNA (1)...(19): siRNA sense strand
gagggaaugagaagggcaa

SEQ ID NO: 2573446 - RNA, 19 nt, Homo sapiens
  misc_RNA (1)...(19): siRNA sense strand
guguggacauagagguauu

SEQ ID NO: 2573447 - RNA, 19 nt, Homo sapiens
  misc_RNA (1)...(19): siRNA sense strand
ucgcagaagaagacaaaga

SEQ ID NO: 2573448 - RNA, 19 nt, Homo sapiens
  misc_RNA (1)...(19): siRNA sense strand
ugacuuagauggugggaac

SEQ ID NO: 2573449 - RNA, 19 nt, Homo sapiens
  misc_RNA (1)...(19): siRNA sense strand
ugaaggagcuggagcggca

SEQ ID NO: 2573450 - RNA, 19 nt, Homo sapiens
  misc_RNA (1)...(19): siRNA sense strand
ccucaauaauguuggauac

SEQ ID NO: 2573451 - RNA, 19 nt, Homo sapiens
  misc_RNA (1)...(19): siRNA sense strand
guaucagaacacagauuua

SEQ ID NO: 2573452 - RNA, 19 nt, Homo sapiens
  misc_RNA (1)...(19): siRNA sense strand
gcagcagaaagcagugaaa

SEQ ID NO: 2573453 - RNA, 19 nt, Homo sapiens
  misc_RNA (1)...(19): siRNA sense strand
gaggcauccaucagggaaa

SEQ ID NO: 2573454 - RNA, 19 nt, Homo sapiens
  misc_RNA (1)...(19): siRNA sense strand
gcggcaguacgaagagaaa

SEQ ID NO: 2573455 - RNA, 19 nt, Homo sapiens
  misc_RNA (1)...(19): siRNA sense strand
gguccuaccaagaugacaa

SEQ ID NO: 2573456 - RNA, 19 nt, Homo sapiens
  misc_RNA (1)...(19): siRNA sense strand
ggcauaguuuagagaaaga

SEQ ID NO: 2573457 - RNA, 19 nt, Homo sapiens
  misc_RNA (1)...(19): siRNA sense strand
agaaggaggaagacaguga

SEQ ID NO: 2573458 - RNA, 19 nt, Homo sapiens
  misc_RNA (1)...(19): siRNA sense strand
gguagaagagagaccagaa

SEQ ID NO: 2573459 - RNA, 19 nt, Homo sapiens
  misc_RNA (1)...(19): siRNA sense strand
cauuagauuuugaggauga

SEQ ID NO: 2573460 - RNA, 19 nt, Homo sapiens
  misc_RNA (1)...(19): siRNA sense strand
uggugaagaauuagaugaa

SEQ ID NO: 2573461 - RNA, 19 nt, Homo sapiens
  misc_RNA (1)...(19): siRNA sense strand
acagaaaauugcagcagaa

SEQ ID NO: 2573462 - RNA, 19 nt, Homo sapiens
  misc_RNA (1)...(19): siRNA sense strand
gugaaauuaaggaagaaga

SEQ ID NO: 2573463 - RNA, 19 nt, Homo sapiens
  misc_RNA (1)...(19): siRNA sense strand
ccggagaauccuaaaauua

SEQ ID NO: 2573464 - RNA, 19 nt, Homo sapiens
  misc_RNA (1)...(19): siRNA sense strand
ggacauuagugaugccugu

SEQ ID NO: 2573465 - RNA, 19 nt, Homo sapiens
  misc_RNA (1)...(19): siRNA sense strand
ccguagaaacccuuaaaga

SEQ ID NO: 2573466 - RNA, 19 nt, Homo sapiens
  misc_RNA (1)...(19): siRNA sense strand
cugaugaagacgagcgcau

SEQ ID NO: 2573467 - RNA, 19 nt, Homo sapiens
  misc_RNA (1)...(19): siRNA sense strand
cguagauccagaagaaaca

SEQ ID NO: 2573468 - RNA, 19 nt, Homo sapiens
  misc_RNA (1)...(19): siRNA sense strand
gugagaauaccgaggacca

SEQ ID NO: 2573469 - RNA, 19 nt, Homo sapiens
  misc_RNA (1)...(19): siRNA sense strand
ccugaggguagaagagaga

SEQ ID NO: 2573470 - RNA, 19 nt, Homo sapiens
  misc_RNA (1)...(19): siRNA sense strand
caucgcagaagaagacaaa

SEQ ID NO: 2573471 - RNA, 19 nt, Homo sapiens
  misc_RNA (1)...(19): siRNA sense strand
ugaagcaaagagaggaaau

SEQ ID NO: 2573472 - RNA, 19 nt, Homo sapiens
  misc_RNA (1)...(19): siRNA sense strand
gaugacaaaagaagaguua

SEQ ID NO: 2573473 - RNA, 19 nt, Homo sapiens
  misc_RNA (1)...(19): siRNA sense strand
ccagaugacaggaccagaa

SEQ ID NO: 2573474 - RNA, 19 nt, Homo sapiens
  misc_RNA (1)...(19): siRNA sense strand
cguggaagccugaggguag

SEQ ID NO: 2573475 - RNA, 19 nt, Homo sapiens
  misc_RNA (1)...(19): siRNA sense strand
caauacugagaaagaacaa

SEQ ID NO: 2573476 - RNA, 19 nt, Homo sapiens
  misc_RNA (1)...(19): siRNA sense strand
cagcagugacucagguuga

SEQ ID NO: 2573477 - RNA, 19 nt, Homo sapiens
  misc_RNA (1)...(19): siRNA sense strand
agauaccagaggagggaau

SEQ ID NO: 2573478 - RNA, 19 nt, Homo sapiens
  misc_RNA (1)...(19): siRNA sense strand
aaaaugaaaucguggcgaa

SEQ ID NO: 2573479 - RNA, 19 nt, Homo sapiens
  misc_RNA (1)...(19): siRNA sense strand
cuguguggacauagaggua

SEQ ID NO: 2573480 - RNA, 19 nt, Homo sapiens
  misc_RNA (1)...(19): siRNA sense strand
cccaagaguuagagacaag

SEQ ID NO: 2573481 - RNA, 19 nt, Homo sapiens
  misc_RNA (1)...(19): siRNA sense strand
gggaaugagaagggcaaaa

SEQ ID NO: 2573482 - RNA, 19 nt, Homo sapiens
  misc_RNA (1)...(19): siRNA sense strand
agagacaagcacagggcau

SEQ ID NO: 2573483 - RNA, 19 nt, Homo sapiens
  misc_RNA (1)...(19): siRNA sense strand
cuugcacaauacugagaaa

SEQ ID NO: 2573484 - RNA, 19 nt, Homo sapiens
  misc_RNA (1)...(19): siRNA sense strand
aggaagcagcugagcccaa

SEQ ID NO: 2573485 - RNA, 19 nt, Homo sapiens
  misc_RNA (1)...(19): siRNA sense strand
ggugaagaaacaggauuaa

SEQ ID NO: 2573486 - RNA, 19 nt, Homo sapiens
  misc_RNA (1)...(19): siRNA sense strand
aagaagacaaagaacaaga

SEQ ID NO: 2573487 - RNA, 19 nt, Homo sapiens
  misc_RNA (1)...(19): siRNA sense strand
cggagaauccuaaaauuaa

SEQ ID NO: 2573488 - RNA, 19 nt, Homo sapiens
  misc_RNA (1)...(19): siRNA sense strand
gguacuagcugauggagac

SEQ ID NO: 2573489 - RNA, 19 nt, Homo sapiens
  misc_RNA (1)...(19): siRNA sense strand
caggaaagcuuuagacagc

SEQ ID NO: 2573490 - RNA, 19 nt, Homo sapiens
  misc_RNA (1)...(19): siRNA sense strand
aagagaagcucaagggcaa

SEQ ID NO: 2573491 - RNA, 19 nt, Homo sapiens
  misc_RNA (1)...(19): siRNA sense strand
ccaaagaagucucugggaa

SEQ ID NO: 2573492 - RNA, 19 nt, Homo sapiens
  misc_RNA (1)...(19): siRNA sense strand
gggucagggaggaggaaau

SEQ ID NO: 2573493 - RNA, 19 nt, Homo sapiens
  misc_RNA (1)...(19): siRNA sense strand
agcgaaaguuacaggcaaa

SEQ ID NO: 2573494 - RNA, 19 nt, Homo sapiens
  misc_RNA (1)...(19): siRNA sense strand
ccaaggucccagagcgaaa

SEQ ID NO: 2573495 - RNA, 19 nt, Homo sapiens
  misc_RNA (1)...(19): siRNA sense strand
gagcgaaaguuacaggcaa

SEQ ID NO: 2573496 - RNA, 19 nt, Homo sapiens
  misc_RNA (1)...(19): siRNA sense strand
ccagugaggaagaggaaga

SEQ ID NO: 2573497 - RNA, 19 nt, Homo sapiens
  misc_RNA (1)...(19): siRNA sense strand
gcgaggaggaggaggaagu

SEQ ID NO: 2573498 - RNA, 19 nt, Homo sapiens
  misc_RNA (1)...(19): siRNA sense strand
gugaggaggaggaagagaa

SEQ ID NO: 2573499 - RNA, 19 nt, Homo sapiens
  misc_RNA (1)...(19): siRNA sense strand
gugaggaagaggaagagaa

SEQ ID NO: 2573500 - RNA, 19 nt, Homo sapiens
  misc_RNA (1)...(19): siRNA sense strand
ccucaggguaguagggaca

SEQ ID NO: 2573501 - RNA, 19 nt, Homo sapiens
  misc_RNA (1)...(19): siRNA sense strand
cuaaaauagccaaugguaa

SEQ ID NO: 2573502 - RNA, 19 nt, Homo sapiens
  misc_RNA (1)...(19): siRNA sense strand
caaagaaaggaaaggcuga

SEQ ID NO: 2573503 - RNA, 19 nt, Homo sapiens
  misc_RNA (1)...(19): siRNA sense strand
gugaggaggaggaagaaga

SEQ ID NO: 2573504 - RNA, 19 nt, Homo sapiens
  misc_RNA (1)...(19): siRNA sense strand
aggagaagacaaagaagau

SEQ ID NO: 2573505 - RNA, 19 nt, Homo sapiens
  misc_RNA (1)...(19): siRNA sense strand
acagugaggaggaggaaga

SEQ ID NO: 2573506 - RNA, 19 nt, Homo sapiens
  misc_RNA (1)...(19): siRNA sense strand
cuauuaaguuugacagcga

SEQ ID NO: 2573507 - RNA, 19 nt, Homo sapiens
  misc_RNA (1)...(19): siRNA sense strand
guucauuaaagaagcggaa

SEQ ID NO: 2573508 - RNA, 19 nt, Homo sapiens
  misc_RNA (1)...(19): siRNA sense strand
acucaagcuccgaggauga

SEQ ID NO: 2573509 - RNA, 19 nt, Homo sapiens
  misc_RNA (1)...(19): siRNA sense strand
gaggaagagaagacaucua

SEQ ID NO: 2573510 - RNA, 19 nt, Homo sapiens
  misc_RNA (1)...(19): siRNA sense strand
uuaaagaagcggaagcaga

SEQ ID NO: 2573511 - RNA, 19 nt, Homo sapiens
  misc_RNA (1)...(19): siRNA sense strand
ggaggaaguucaagggccu

SEQ ID NO: 2573512 - RNA, 19 nt, Homo sapiens
  misc_RNA (1)...(19): siRNA sense strand
acgaggaagaggagcaaaa

SEQ ID NO: 2573513 - RNA, 19 nt, Homo sapiens
  misc_RNA (1)...(19): siRNA sense strand
aggaggaggaagaagaaaa

SEQ ID NO: 2573514 - RNA, 19 nt, Homo sapiens
  misc_RNA (1)...(19): siRNA sense strand
aggaagaggaagagaagcu

SEQ ID NO: 2573515 - RNA, 19 nt, Homo sapiens
  misc_RNA (1)...(19): siRNA sense strand
aggaggaaauugaggugga

SEQ ID NO: 2573516 - RNA, 19 nt, Homo sapiens
  misc_RNA (1)...(19): siRNA sense strand
guucaagggccuccagcaa

SEQ ID NO: 2573517 - RNA, 19 nt, Homo sapiens
  misc_RNA (1)...(19): siRNA sense strand
cggcagugguaguuuccaa

SEQ ID NO: 2573518 - RNA, 19 nt, Homo sapiens
  misc_RNA (1)...(19): siRNA sense strand
caaagaagucucugggaac

SEQ ID NO: 2573519 - RNA, 19 nt, Homo sapiens
  misc_RNA (1)...(19): siRNA sense strand
cagcaaagaaagcagcaga

SEQ ID NO: 2573520 - RNA, 19 nt, Homo sapiens
  misc_RNA (1)...(19): siRNA sense strand
agccaaagcaucagagagu

SEQ ID NO: 2573521 - RNA, 19 nt, Homo sapiens
  misc_RNA (1)...(19): siRNA sense strand
gaggaggagaagacaaaga

SEQ ID NO: 2573522 - RNA, 19 nt, Homo sapiens
  misc_RNA (1)...(19): siRNA sense strand
cggaagaguucuagcagug

SEQ ID NO: 2573523 - RNA, 19 nt, Homo sapiens
  misc_RNA (1)...(19): siRNA sense strand
gaagagaagcucaagggca

SEQ ID NO: 2573524 - RNA, 19 nt, Homo sapiens
  misc_RNA (1)...(19): siRNA sense strand
cuacacagcaggaugccaa

SEQ ID NO: 2573525 - RNA, 19 nt, Homo sapiens
  misc_RNA (1)...(19): siRNA sense strand
gugacgaggaagaggagca

SEQ ID NO: 2573526 - RNA, 19 nt, Homo sapiens
  misc_RNA (1)...(19): siRNA sense strand
caaagaagaugguggccac

SEQ ID NO: 2573527 - RNA, 19 nt, Homo sapiens
  misc_RNA (1)...(19): siRNA sense strand
caaaccagcucgagcagca

SEQ ID NO: 2573528 - RNA, 19 nt, Homo sapiens
  misc_RNA (1)...(19): siRNA sense strand
gcccaaggcgacugccaaa

SEQ ID NO: 2573529 - RNA, 19 nt, Homo sapiens
  misc_RNA (1)...(19): siRNA sense strand
gaagguagcaggaggugca

SEQ ID NO: 2573530 - RNA, 19 nt, Homo sapiens
  misc_RNA (1)...(19): siRNA sense strand
aaggaaaggcugagagcag

SEQ ID NO: 2573531 - RNA, 19 nt, Homo sapiens
  misc_RNA (1)...(19): siRNA sense strand
aagaggaagagaagcucaa

SEQ ID NO: 2573532 - RNA, 19 nt, Homo sapiens
  misc_RNA (1)...(19): siRNA sense strand
auucacgaguugcggacaa

SEQ ID NO: 2573533 - RNA, 19 nt, Homo sapiens
  misc_RNA (1)...(19): siRNA sense strand
guuaagaagaagccacaga

SEQ ID NO: 2573534 - RNA, 19 nt, Homo sapiens
  misc_RNA (1)...(19): siRNA sense strand
cuaagaacagugaggagga

SEQ ID NO: 2573535 - RNA, 19 nt, Homo sapiens
  misc_RNA (1)...(19): siRNA sense strand
cuaagaaggccaagagcuc

SEQ ID NO: 2573536 - RNA, 19 nt, Homo sapiens
  misc_RNA (1)...(19): siRNA sense strand
gaggaagaagaaaagaaaa

SEQ ID NO: 2573537 - RNA, 19 nt, Homo sapiens
  misc_RNA (1)...(19): siRNA sense strand
gugaugacucagaggagga

SEQ ID NO: 2573538 - RNA, 19 nt, Homo sapiens
  misc_RNA (1)...(19): siRNA sense strand
agugaggaggagaagacaa

SEQ ID NO: 2573539 - RNA, 19 nt, Homo sapiens
  misc_RNA (1)...(19): siRNA sense strand
ccaaagcaucagagaguag

SEQ ID NO: 2573540 - RNA, 19 nt, Homo sapiens
  misc_RNA (1)...(19): siRNA sense strand
caguuaagaagaagccaca

SEQ ID NO: 2573541 - RNA, 19 nt, Homo sapiens
  misc_RNA (1)...(19): siRNA sense strand
aggaggaggaggaaguuca

SEQ ID NO: 2573542 - RNA, 19 nt, Homo sapiens
  misc_RNA (1)...(19): siRNA sense strand
cugacagcucugaggauga

SEQ ID NO: 2573543 - RNA, 19 nt, Homo sapiens
  misc_RNA (1)...(19): siRNA sense strand
augagaaaaccaagaagaa

SEQ ID NO: 2573544 - RNA, 19 nt, Homo sapiens
  misc_RNA (1)...(19): siRNA sense strand
gcaaauggaccaguggcua

SEQ ID NO: 2573545 - RNA, 19 nt, Homo sapiens
  misc_RNA (1)...(19): siRNA sense strand
ggccaauaaguucgccaaa

SEQ ID NO: 2573546 - RNA, 19 nt, Homo sapiens
  misc_RNA (1)...(19): siRNA sense strand
uggcuaagaaagcuaagaa

SEQ ID NO: 2573547 - RNA, 19 nt, Homo sapiens
  misc_RNA (1)...(19): siRNA sense strand
ggaaaagcagcuaagaaca

SEQ ID NO: 2573548 - RNA, 19 nt, Homo sapiens
  misc_RNA (1)...(19): siRNA sense strand
aggaggaagaagaaaagaa

SEQ ID NO: 2573549 - RNA, 19 nt, Homo sapiens
  misc_RNA (1)...(19): siRNA sense strand
aggaaauugagguggauuc

SEQ ID NO: 2573550 - RNA, 19 nt, Homo sapiens
  misc_RNA (1)...(19): siRNA sense strand
ccucugcaaagaaaggaaa

SEQ ID NO: 2573551 - RNA, 19 nt, Homo sapiens
  misc_RNA (1)...(19): siRNA sense strand
aggaugagccaccaaagaa

SEQ ID NO: 2573552 - RNA, 19 nt, Homo sapiens
  misc_RNA (1)...(19): siRNA sense strand
aaaagcaaguuguggccaa

SEQ ID NO: 2573553 - RNA, 19 nt, Homo sapiens
  misc_RNA (1)...(19): siRNA sense strand
ugaugacuccagugaggaa

SEQ ID NO: 2573554 - RNA, 19 nt, Homo sapiens
  misc_RNA (1)...(19): siRNA sense strand
aguucaaccuggagagcaa

SEQ ID NO: 2573555 - RNA, 19 nt, Homo sapiens
  misc_RNA (1)...(19): siRNA sense strand
ucacagagaucuaccgcau

SEQ ID NO: 2573556 - RNA, 19 nt, Homo sapiens
  misc_RNA (1)...(19): siRNA sense strand
aggaagcauucaagaacau

SEQ ID NO: 2573557 - RNA, 19 nt, Homo sapiens
  misc_RNA (1)...(19): siRNA sense strand
ccacuaacguagaggaagc

SEQ ID NO: 2573558 - RNA, 19 nt, Homo sapiens
  misc_RNA (1)...(19): siRNA sense strand
gggaccacgcagacagcaa

SEQ ID NO: 2573559 - RNA, 19 nt, Homo sapiens
  misc_RNA (1)...(19): siRNA sense strand
gcaucgugucacagaaaca

SEQ ID NO: 2573560 - RNA, 19 nt, Homo sapiens
  misc_RNA (1)...(19): siRNA sense strand
cuggagagcaagagcacca

SEQ ID NO: 2573561 - RNA, 19 nt, Homo sapiens
  misc_RNA (1)...(19): siRNA sense strand
uauucaaaguggugcucau

SEQ ID NO: 2573562 - RNA, 19 nt, Homo sapiens
  misc_RNA (1)...(19): siRNA sense strand
ccaacaagcugcagugcug

SEQ ID NO: 2573563 - RNA, 19 nt, Homo sapiens
  misc_RNA (1)...(19): siRNA sense strand
gcaccaucggcguggaguu

SEQ ID NO: 2573564 - RNA, 19 nt, Homo sapiens
  misc_RNA (1)...(19): siRNA sense strand
cagaaauacucaagcccaa

SEQ ID NO: 2573565 - RNA, 19 nt, Homo sapiens
  misc_RNA (1)...(19): siRNA sense strand
agaagaaggcacagcguca

SEQ ID NO: 2573566 - RNA, 19 nt, Homo sapiens
  misc_RNA (1)...(19): siRNA sense strand
gagaguggccugacggcua

SEQ ID NO: 2573567 - RNA, 19 nt, Homo sapiens
  misc_RNA (1)...(19): siRNA sense strand
ccaagaaucuauuugccua

SEQ ID NO: 2573568 - RNA, 19 nt, Homo sapiens
  misc_RNA (1)...(19): siRNA sense strand
auccaagaccagagagcaa

SEQ ID NO: 2573569 - RNA, 19 nt, Homo sapiens
  misc_RNA (1)...(19): siRNA sense strand
cagaagaaggcaugcccua

SEQ ID NO: 2573570 - RNA, 19 nt, Homo sapiens
  misc_RNA (1)...(19): siRNA sense strand
gcgaugagaagaaggcaca

SEQ ID NO: 2573571 - RNA, 19 nt, Homo sapiens
  misc_RNA (1)...(19): siRNA sense strand
agagcaaaucagagacaga

SEQ ID NO: 2573572 - RNA, 19 nt, Homo sapiens
  misc_RNA (1)...(19): siRNA sense strand
aauccgaggcagaagaaaa

SEQ ID NO: 2573573 - RNA, 19 nt, Homo sapiens
  misc_RNA (1)...(19): siRNA sense strand
acagcagcgaugagaagaa

SEQ ID NO: 2573574 - RNA, 19 nt, Homo sapiens
  misc_RNA (1)...(19): siRNA sense strand
cgagaggugaagagccuuu

SEQ ID NO: 2573575 - RNA, 19 nt, Homo sapiens
  misc_RNA (1)...(19): siRNA sense strand
ugauauaguuacugaaacc

SEQ ID NO: 2573576 - RNA, 19 nt, Homo sapiens
  misc_RNA (1)...(19): siRNA sense strand
uaugaaaauugcaggagau

SEQ ID NO: 2573577 - RNA, 19 nt, Homo sapiens
  misc_RNA (1)...(19): siRNA sense strand
uauacaaauucaagcccau

SEQ ID NO: 2573578 - RNA, 19 nt, Homo sapiens
  misc_RNA (1)...(19): siRNA sense strand
cuacaaaccgugaucacca

SEQ ID NO: 2573579 - RNA, 19 nt, Homo sapiens
  misc_RNA (1)...(19): siRNA sense strand
cgaaggagauggcaggcaa

SEQ ID NO: 2573580 - RNA, 19 nt, Homo sapiens
  misc_RNA (1)...(19): siRNA sense strand
cuguauuggcuguaagcua

SEQ ID NO: 2573581 - RNA, 19 nt, Homo sapiens
  misc_RNA (1)...(19): siRNA sense strand
ccgauaugcugguggccau

SEQ ID NO: 2573582 - RNA, 19 nt, Homo sapiens
  misc_RNA (1)...(19): siRNA sense strand
cgaagagaauacuggacca

SEQ ID NO: 2573583 - RNA, 19 nt, Homo sapiens
  misc_RNA (1)...(19): siRNA sense strand
gcagugugcuggugcccua

SEQ ID NO: 2573584 - RNA, 19 nt, Homo sapiens
  misc_RNA (1)...(19): siRNA sense strand
ucuucaacaucguggcaau

SEQ ID NO: 2573585 - RNA, 19 nt, Homo sapiens
  misc_RNA (1)...(19): siRNA sense strand
uuguagaccuaaucggcaa

SEQ ID NO: 2573586 - RNA, 19 nt, Homo sapiens
  misc_RNA (1)...(19): siRNA sense strand
uggcugugacgaagaacaa

SEQ ID NO: 2573587 - RNA, 19 nt, Homo sapiens
  misc_RNA (1)...(19): siRNA sense strand
ugagaauuuccgaagagaa

SEQ ID NO: 2573588 - RNA, 19 nt, Homo sapiens
  misc_RNA (1)...(19): siRNA sense strand
cagugauauucgugagaug

SEQ ID NO: 2573589 - RNA, 19 nt, Homo sapiens
  misc_RNA (1)...(19): siRNA sense strand
gccucaacgcugugaucua

SEQ ID NO: 2573590 - RNA, 19 nt, Homo sapiens
  misc_RNA (1)...(19): siRNA sense strand
ggaucuucagugugcgcaa

SEQ ID NO: 2573591 - RNA, 19 nt, Homo sapiens
  misc_RNA (1)...(19): siRNA sense strand
ugaacaagaccgugcccau

SEQ ID NO: 2573592 - RNA, 19 nt, Homo sapiens
  misc_RNA (1)...(19): siRNA sense strand
agaacaagaagcuccggaa

SEQ ID NO: 2573593 - RNA, 19 nt, Homo sapiens
  misc_RNA (1)...(19): siRNA sense strand
cagccuacuucauagccua

SEQ ID NO: 2573594 - RNA, 19 nt, Homo sapiens
  misc_RNA (1)...(19): siRNA sense strand
ggacuuaauuaccaggcaa

SEQ ID NO: 2573595 - RNA, 19 nt, Homo sapiens
  misc_RNA (1)...(19): siRNA sense strand
cuaaauuccaggaggguga

SEQ ID NO: 2573596 - RNA, 19 nt, Homo sapiens
  misc_RNA (1)...(19): siRNA sense strand
acagaaaacaccuggaaau

SEQ ID NO: 2573597 - RNA, 19 nt, Homo sapiens
  misc_RNA (1)...(19): siRNA sense strand
uccuaaaguaccuggcaaa

SEQ ID NO: 2573598 - RNA, 19 nt, Homo sapiens
  misc_RNA (1)...(19): siRNA sense strand
guucagugccagcgauuau

SEQ ID NO: 2573599 - RNA, 19 nt, Homo sapiens
  misc_RNA (1)...(19): siRNA sense strand
guguguaaagguugccaua

SEQ ID NO: 2573600 - RNA, 19 nt, Homo sapiens
  misc_RNA (1)...(19): siRNA sense strand
aagccaaucaggagcagua

SEQ ID NO: 2573601 - RNA, 19 nt, Homo sapiens
  misc_RNA (1)...(19): siRNA sense strand
aagcaggacccgaagccua

SEQ ID NO: 2573602 - RNA, 19 nt, Homo sapiens
  misc_RNA (1)...(19): siRNA sense strand
uaugaagcaaaguguguaa

SEQ ID NO: 2573603 - RNA, 19 nt, Homo sapiens
  misc_RNA (1)...(19): siRNA sense strand
acauuacagugguuggaau

SEQ ID NO: 2573604 - RNA, 19 nt, Homo sapiens
  misc_RNA (1)...(19): siRNA sense strand
gacuuaauuaccaggcaaa

SEQ ID NO: 2573605 - RNA, 19 nt, Homo sapiens
  misc_RNA (1)...(19): siRNA sense strand
gguuaaugaaguuguggca

SEQ ID NO: 2573606 - RNA, 19 nt, Homo sapiens
  misc_RNA (1)...(19): siRNA sense strand
aaauggagaugguggcagu

SEQ ID NO: 2573607 - RNA, 19 nt, Homo sapiens
  misc_RNA (1)...(19): siRNA sense strand
acaagaaaucucguggaaa

SEQ ID NO: 2573608 - RNA, 19 nt, Homo sapiens
  misc_RNA (1)...(19): siRNA sense strand
ucguggaaacacagauaau

SEQ ID NO: 2573609 - RNA, 19 nt, Homo sapiens
  misc_RNA (1)...(19): siRNA sense strand
ucuauaaauuugagagacc

SEQ ID NO: 2573610 - RNA, 19 nt, Homo sapiens
  misc_RNA (1)...(19): siRNA sense strand
gcaacuuuguucagugcca

SEQ ID NO: 2573611 - RNA, 19 nt, Homo sapiens
  misc_RNA (1)...(19): siRNA sense strand
ggacuuaauuaccaggcaa

SEQ ID NO: 2573612 - RNA, 19 nt, Homo sapiens
  misc_RNA (1)...(19): siRNA sense strand
cuaaauuccaggaggguga

SEQ ID NO: 2573613 - RNA, 19 nt, Homo sapiens
  misc_RNA (1)...(19): siRNA sense strand
acagaaaacaccuggaaau

SEQ ID NO: 2573614 - RNA, 19 nt, Homo sapiens
  misc_RNA (1)...(19): siRNA sense strand
uccuaaaguaccuggcaaa

SEQ ID NO: 2573615 - RNA, 19 nt, Homo sapiens
  misc_RNA (1)...(19): siRNA sense strand
guucagugccagcgauuau

SEQ ID NO: 2573616 - RNA, 19 nt, Homo sapiens
  misc_RNA (1)...(19): siRNA sense strand
guguguaaagguugccaua

SEQ ID NO: 2573617 - RNA, 19 nt, Homo sapiens
  misc_RNA (1)...(19): siRNA sense strand
aagccaaucaggagcagua

SEQ ID NO: 2573618 - RNA, 19 nt, Homo sapiens
  misc_RNA (1)...(19): siRNA sense strand
aagcaggacccgaagccua

SEQ ID NO: 2573619 - RNA, 19 nt, Homo sapiens
  misc_RNA (1)...(19): siRNA sense strand
uaugaagcaaaguguguaa

SEQ ID NO: 2573620 - RNA, 19 nt, Homo sapiens
  misc_RNA (1)...(19): siRNA sense strand
acauuacagugguuggaau

SEQ ID NO: 2573621 - RNA, 19 nt, Homo sapiens
  misc_RNA (1)...(19): siRNA sense strand
gacuuaauuaccaggcaaa

SEQ ID NO: 2573622 - RNA, 19 nt, Homo sapiens
  misc_RNA (1)...(19): siRNA sense strand
gguuaaugaaguuguggca

SEQ ID NO: 2573623 - RNA, 19 nt, Homo sapiens
  misc_RNA (1)...(19): siRNA sense strand
aaauggagaugguggcagu

SEQ ID NO: 2573624 - RNA, 19 nt, Homo sapiens
  misc_RNA (1)...(19): siRNA sense strand
acaagaaaucucguggaaa

SEQ ID NO: 2573625 - RNA, 19 nt, Homo sapiens
  misc_RNA (1)...(19): siRNA sense strand
ucguggaaacacagauaau

SEQ ID NO: 2573626 - RNA, 19 nt, Homo sapiens
  misc_RNA (1)...(19): siRNA sense strand
ucuauaaauuugagagacc

SEQ ID NO: 2573627 - RNA, 19 nt, Homo sapiens
  misc_RNA (1)...(19): siRNA sense strand
gcaacuuuguucagugcca

SEQ ID NO: 2573628 - RNA, 19 nt, Homo sapiens
  misc_RNA (1)...(19): siRNA sense strand
ugagagagaaggaggccaa

SEQ ID NO: 2573629 - RNA, 19 nt, Homo sapiens
  misc_RNA (1)...(19): siRNA sense strand
ggguacaccaacugcggaa

SEQ ID NO: 2573630 - RNA, 19 nt, Homo sapiens
  misc_RNA (1)...(19): siRNA sense strand
gagaaggaggccaagauca

SEQ ID NO: 2573631 - RNA, 19 nt, Homo sapiens
  misc_RNA (1)...(19): siRNA sense strand
gcaacucagccuacggcaa

SEQ ID NO: 2573632 - RNA, 19 nt, Homo sapiens
  misc_RNA (1)...(19): siRNA sense strand
agaaaagauccgagggucu

SEQ ID NO: 2573633 - RNA, 19 nt, Homo sapiens
  misc_RNA (1)...(19): siRNA sense strand
gagagaaggaggccaagau

SEQ ID NO: 2573634 - RNA, 19 nt, Homo sapiens
  misc_RNA (1)...(19): siRNA sense strand
caucauggggucaggagaa

SEQ ID NO: 2573635 - RNA, 19 nt, Homo sapiens
  misc_RNA (1)...(19): siRNA sense strand
ggaagcucaucuuuggcaa

SEQ ID NO: 2573636 - RNA, 19 nt, Homo sapiens
  misc_RNA (1)...(19): siRNA sense strand
aggaagaggaagaggagga

SEQ ID NO: 2573637 - RNA, 19 nt, Homo sapiens
  misc_RNA (1)...(19): siRNA sense strand
aggaagaggaggaggagga

SEQ ID NO: 2573638 - RNA, 19 nt, Homo sapiens
  misc_RNA (1)...(19): siRNA sense strand
aggaagaggaagaggagga

SEQ ID NO: 2573639 - RNA, 19 nt, Homo sapiens
  misc_RNA (1)...(19): siRNA sense strand
aggaggaggaggaggaaga

SEQ ID NO: 2573640 - RNA, 19 nt, Homo sapiens
  misc_RNA (1)...(19): siRNA sense strand
aggaggaggaagaggaaga

SEQ ID NO: 2573641 - RNA, 19 nt, Homo sapiens
  misc_RNA (1)...(19): siRNA sense strand
aggacgaggaggaggagaa

SEQ ID NO: 2573642 - RNA, 19 nt, Homo sapiens
  misc_RNA (1)...(19): siRNA sense strand
uagaggagcuggaggcaga

SEQ ID NO: 2573643 - RNA, 19 nt, Homo sapiens
  misc_RNA (1)...(19): siRNA sense strand
agcaagaagcggaagaaau

SEQ ID NO: 2573644 - RNA, 19 nt, Homo sapiens
  misc_RNA (1)...(19): siRNA sense strand
agucagagaacgaggagga

SEQ ID NO: 2573645 - RNA, 19 nt, Homo sapiens
  misc_RNA (1)...(19): siRNA sense strand
gggagaagcaggaggaggu

SEQ ID NO: 2573646 - RNA, 19 nt, Homo sapiens
  misc_RNA (1)...(19): siRNA sense strand
ggaagaaaugcgagagccu

SEQ ID NO: 2573647 - RNA, 19 nt, Homo sapiens
  misc_RNA (1)...(19): siRNA sense strand
gagaaggugcggaggcuga

SEQ ID NO: 2573648 - RNA, 19 nt, Homo sapiens
  misc_RNA (1)...(19): siRNA sense strand
ggcaacagcaucagggaga

SEQ ID NO: 2573649 - RNA, 19 nt, Homo sapiens
  misc_RNA (1)...(19): siRNA sense strand
guuccaagcccaaaggaga

SEQ ID NO: 2573650 - RNA, 19 nt, Homo sapiens
  misc_RNA (1)...(19): siRNA sense strand
gagcagguggagugggaga

SEQ ID NO: 2573651 - RNA, 19 nt, Homo sapiens
  misc_RNA (1)...(19): siRNA sense strand
gggccaaagcaguguggga

SEQ ID NO: 2573652 - RNA, 19 nt, Homo sapiens
  misc_RNA (1)...(19): siRNA sense strand
cagacauccaggaggaaga

SEQ ID NO: 2573653 - RNA, 19 nt, Homo sapiens
  misc_RNA (1)...(19): siRNA sense strand
agacaagcgcagaaugaga

SEQ ID NO: 2573654 - RNA, 19 nt, Homo sapiens
  misc_RNA (1)...(19): siRNA sense strand
acaucuacaucuauggcaa

SEQ ID NO: 2573655 - RNA, 19 nt, Homo sapiens
  misc_RNA (1)...(19): siRNA sense strand
aggaagaggaggacgagga

SEQ ID NO: 2573656 - RNA, 19 nt, Homo sapiens
  misc_RNA (1)...(19): siRNA sense strand
ccaagaaagcugagucgga

SEQ ID NO: 2573657 - RNA, 19 nt, Homo sapiens
  misc_RNA (1)...(19): siRNA sense strand
agagcaagcuggagagccu

SEQ ID NO: 2573658 - RNA, 19 nt, Homo sapiens
  misc_RNA (1)...(19): siRNA sense strand
aggaggaggaggaggagga

SEQ ID NO: 2573659 - RNA, 19 nt, Homo sapiens
  misc_RNA (1)...(19): siRNA sense strand
cagcaagaagcggaagaaa

SEQ ID NO: 2573660 - RNA, 19 nt, Homo sapiens
  misc_RNA (1)...(19): siRNA sense strand
aaccagaugcugaggaaga

SEQ ID NO: 2573661 - RNA, 19 nt, Homo sapiens
  misc_RNA (1)...(19): siRNA sense strand
aagaggaagaggaggacga

SEQ ID NO: 2573662 - RNA, 19 nt, Homo sapiens
  misc_RNA (1)...(19): siRNA sense strand
auauggacguggaggcaga

SEQ ID NO: 2573663 - RNA, 19 nt, Homo sapiens
  misc_RNA (1)...(19): siRNA sense strand
gaacugaggucugaggaga

SEQ ID NO: 2573664 - RNA, 19 nt, Homo sapiens
  misc_RNA (1)...(19): siRNA sense strand
gagaaagagcagagggugc

SEQ ID NO: 2573665 - RNA, 19 nt, Homo sapiens
  misc_RNA (1)...(19): siRNA sense strand
cugcagagcaagcuggaga

SEQ ID NO: 2573666 - RNA, 19 nt, Homo sapiens
  misc_RNA (1)...(19): siRNA sense strand
gcugaagcccagagggaac

SEQ ID NO: 2573667 - RNA, 19 nt, Homo sapiens
  misc_RNA (1)...(19): siRNA sense strand
cuuccagagagauggcaaa

SEQ ID NO: 2573668 - RNA, 19 nt, Homo sapiens
  misc_RNA (1)...(19): siRNA sense strand
uccugaugcuggagaagaa

SEQ ID NO: 2573669 - RNA, 19 nt, Homo sapiens
  misc_RNA (1)...(19): siRNA sense strand
ccacagagaaggagcaggu

SEQ ID NO: 2573670 - RNA, 19 nt, Homo sapiens
  misc_RNA (1)...(19): siRNA sense strand
caucgaugcugcuggcaca

SEQ ID NO: 2573671 - RNA, 19 nt, Homo sapiens
  misc_RNA (1)...(19): siRNA sense strand
aggaagaggagcuggguuc

SEQ ID NO: 2573672 - RNA, 19 nt, Homo sapiens
  misc_RNA (1)...(19): siRNA sense strand
aagaggaggacgaggagga

SEQ ID NO: 2573673 - RNA, 19 nt, Homo sapiens
  misc_RNA (1)...(19): siRNA sense strand
aggcuuuccugaaggccaa

SEQ ID NO: 2573674 - RNA, 19 nt, Homo sapiens
  misc_RNA (1)...(19): siRNA sense strand
gugccaaggaggagaccca

SEQ ID NO: 2573675 - RNA, 19 nt, Homo sapiens
  misc_RNA (1)...(19): siRNA sense strand
aagaggaagaggaggagga

SEQ ID NO: 2573676 - RNA, 19 nt, Homo sapiens
  misc_RNA (1)...(19): siRNA sense strand
aagaggaggaggaggagga

SEQ ID NO: 2573677 - RNA, 19 nt, Homo sapiens
  misc_RNA (1)...(19): siRNA sense strand
cggaggaggaggaagagga

SEQ ID NO: 2573678 - RNA, 19 nt, Homo sapiens
  misc_RNA (1)...(19): siRNA sense strand
cagagaaggagcaggugga

SEQ ID NO: 2573679 - RNA, 19 nt, Homo sapiens
  misc_RNA (1)...(19): siRNA sense strand
ccagugagguagaggagcu

SEQ ID NO: 2573680 - RNA, 19 nt, Homo sapiens
  misc_RNA (1)...(19): siRNA sense strand
cauccaggaggaagaggaa

SEQ ID NO: 2573681 - RNA, 19 nt, Homo sapiens
  misc_RNA (1)...(19): siRNA sense strand
cugaaggccaagcugaaua

SEQ ID NO: 2573682 - RNA, 19 nt, Homo sapiens
  misc_RNA (1)...(19): siRNA sense strand
cugagcaaguggagcuaca

SEQ ID NO: 2573683 - RNA, 19 nt, Homo sapiens
  misc_RNA (1)...(19): siRNA sense strand
caagaaagcugagucggaa

SEQ ID NO: 2573684 - RNA, 19 nt, Homo sapiens
  misc_RNA (1)...(19): siRNA sense strand
cccaggaggaugcggacaa

SEQ ID NO: 2573685 - RNA, 19 nt, Homo sapiens
  misc_RNA (1)...(19): siRNA sense strand
agcuggagguggagcauga

SEQ ID NO: 2573686 - RNA, 19 nt, Homo sapiens
  misc_RNA (1)...(19): siRNA sense strand
ccugcaacaugguggcuga

SEQ ID NO: 2573687 - RNA, 19 nt, Homo sapiens
  misc_RNA (1)...(19): siRNA sense strand
ggacagggaacccaggaca

SEQ ID NO: 2573688 - RNA, 19 nt, Homo sapiens
  misc_RNA (1)...(19): siRNA sense strand
cagagaaagagcagagggu

SEQ ID NO: 2573689 - RNA, 19 nt, Homo sapiens
  misc_RNA (1)...(19): siRNA sense strand
aggcccaaguggaggcuca

SEQ ID NO: 2573690 - RNA, 19 nt, Homo sapiens
  misc_RNA (1)...(19): siRNA sense strand
gggugacacaggagaggga

SEQ ID NO: 2573691 - RNA, 19 nt, Homo sapiens
  misc_RNA (1)...(19): siRNA sense strand
cgagaugugccaaggagga

SEQ ID NO: 2573692 - RNA, 19 nt, Homo sapiens
  misc_RNA (1)...(19): siRNA sense strand
gguuauuuguccccagaua

SEQ ID NO: 2573693 - RNA, 19 nt, Homo sapiens
  misc_RNA (1)...(19): siRNA sense strand
cuuccauaucugugugaau

SEQ ID NO: 2573694 - RNA, 19 nt, Homo sapiens
  misc_RNA (1)...(19): siRNA sense strand
gggcugagaaggaggacac

SEQ ID NO: 2573695 - RNA, 19 nt, Homo sapiens
  misc_RNA (1)...(19): siRNA sense strand
uccaggaggaagaggaaga

SEQ ID NO: 2573696 - RNA, 19 nt, Homo sapiens
  misc_RNA (1)...(19): siRNA sense strand
aggaggacgaggaggagga

SEQ ID NO: 2573697 - RNA, 19 nt, Homo sapiens
  misc_RNA (1)...(19): siRNA sense strand
gaggagaguuccaagccca

SEQ ID NO: 2573698 - RNA, 19 nt, Homo sapiens
  misc_RNA (1)...(19): siRNA sense strand
ugggagagccacagagaag

SEQ ID NO: 2573699 - RNA, 19 nt, Homo sapiens
  misc_RNA (1)...(19): siRNA sense strand
aggagcagguggaguggga

SEQ ID NO: 2573700 - RNA, 19 nt, Homo sapiens
  misc_RNA (1)...(19): siRNA sense strand
aagcggaagaaaugcgaga

SEQ ID NO: 2573701 - RNA, 19 nt, Homo sapiens
  misc_RNA (1)...(19): siRNA sense strand
gagcaggaagcccggaaaa

SEQ ID NO: 2573702 - RNA, 19 nt, Homo sapiens
  misc_RNA (1)...(19): siRNA sense strand
ggacagccaagaaggcaga

SEQ ID NO: 2573703 - RNA, 19 nt, Homo sapiens
  misc_RNA (1)...(19): siRNA sense strand
augaggagaucuuggagca

SEQ ID NO: 2573704 - RNA, 19 nt, Homo sapiens
  misc_RNA (1)...(19): siRNA sense strand
agugaagagcuccgagaaa

SEQ ID NO: 2573705 - RNA, 19 nt, Homo sapiens
  misc_RNA (1)...(19): siRNA sense strand
ccugaaauuaauucggaua

SEQ ID NO: 2573706 - RNA, 19 nt, Homo sapiens
  misc_RNA (1)...(19): siRNA sense strand
acaugaaguuuaugagacu

SEQ ID NO: 2573707 - RNA, 19 nt, Homo sapiens
  misc_RNA (1)...(19): siRNA sense strand
auuugaagccucagaauau

SEQ ID NO: 2573708 - RNA, 19 nt, Homo sapiens
  misc_RNA (1)...(19): siRNA sense strand
aaucagaaaccgaggaauc

SEQ ID NO: 2573709 - RNA, 19 nt, Homo sapiens
  misc_RNA (1)...(19): siRNA sense strand
ggcaaugauaaacaagaaa

SEQ ID NO: 2573710 - RNA, 19 nt, Homo sapiens
  misc_RNA (1)...(19): siRNA sense strand
gagcaguauucaagagccu

SEQ ID NO: 2573711 - RNA, 19 nt, Homo sapiens
  misc_RNA (1)...(19): siRNA sense strand
aggcacuagaagaagcaaa

SEQ ID NO: 2573712 - RNA, 19 nt, Homo sapiens
  misc_RNA (1)...(19): siRNA sense strand
gauuuaaauuugaggaacc

SEQ ID NO: 2573713 - RNA, 19 nt, Homo sapiens
  misc_RNA (1)...(19): siRNA sense strand
ggcacuagaagaagcaaau

SEQ ID NO: 2573714 - RNA, 19 nt, Homo sapiens
  misc_RNA (1)...(19): siRNA sense strand
uucauauacucuaggacaa

SEQ ID NO: 2573715 - RNA, 19 nt, Homo sapiens
  misc_RNA (1)...(19): siRNA sense strand
gcaacagauauguggagca

SEQ ID NO: 2573716 - RNA, 19 nt, Homo sapiens
  misc_RNA (1)...(19): siRNA sense strand
uggaaaaggcacuagaaga

SEQ ID NO: 2573717 - RNA, 19 nt, Homo sapiens
  misc_RNA (1)...(19): siRNA sense strand
uguugcagacagagaagaa

SEQ ID NO: 2573718 - RNA, 19 nt, Homo sapiens
  misc_RNA (1)...(19): siRNA sense strand
gugaaucuccauuggguga

SEQ ID NO: 2573719 - RNA, 19 nt, Homo sapiens
  misc_RNA (1)...(19): siRNA sense strand
aguuaagaaaccugaagau

SEQ ID NO: 2573720 - RNA, 19 nt, Homo sapiens
  misc_RNA (1)...(19): siRNA sense strand
cuucauauacucuaggaca

SEQ ID NO: 2573721 - RNA, 19 nt, Homo sapiens
  misc_RNA (1)...(19): siRNA sense strand
gaagaacagugaagagcuc

SEQ ID NO: 2573722 - RNA, 19 nt, Homo sapiens
  misc_RNA (1)...(19): siRNA sense strand
ggucauucugugccugaaa

SEQ ID NO: 2573723 - RNA, 19 nt, Homo sapiens
  misc_RNA (1)...(19): siRNA sense strand
ugguugacacagagcagua

SEQ ID NO: 2573724 - RNA, 19 nt, Homo sapiens
  misc_RNA (1)...(19): siRNA sense strand
caaaucagaaaccgaggaa

SEQ ID NO: 2573725 - RNA, 19 nt, Homo sapiens
  misc_RNA (1)...(19): siRNA sense strand
auucugugccugaaauuaa

SEQ ID NO: 2573726 - RNA, 19 nt, Homo sapiens
  misc_RNA (1)...(19): siRNA sense strand
ccgacaaaucagaaaccga

SEQ ID NO: 2573727 - RNA, 19 nt, Homo sapiens
  misc_RNA (1)...(19): siRNA sense strand
aagaaaaggccaagauugu

SEQ ID NO: 2573728 - RNA, 19 nt, Homo sapiens
  misc_RNA (1)...(19): siRNA sense strand
uguacuugaacuagcacaa

SEQ ID NO: 2573729 - RNA, 19 nt, Homo sapiens
  misc_RNA (1)...(19): siRNA sense strand
uucaaagacuuaugcgaca

SEQ ID NO: 2573730 - RNA, 19 nt, Homo sapiens
  misc_RNA (1)...(19): siRNA sense strand
gauccuauaagcauggcaa

SEQ ID NO: 2573731 - RNA, 19 nt, Homo sapiens
  misc_RNA (1)...(19): siRNA sense strand
cuccauugggugacauuaa

SEQ ID NO: 2573732 - RNA, 19 nt, Homo sapiens
  misc_RNA (1)...(19): siRNA sense strand
agaucgagccacugcugaa

SEQ ID NO: 2573733 - RNA, 19 nt, Homo sapiens
  misc_RNA (1)...(19): siRNA sense strand
cgccaaaugaagagagaaa

SEQ ID NO: 2573734 - RNA, 19 nt, Homo sapiens
  misc_RNA (1)...(19): siRNA sense strand
gggauaaagaauugaacau

SEQ ID NO: 2573735 - RNA, 19 nt, Homo sapiens
  misc_RNA (1)...(19): siRNA sense strand
acaggaacuugaugggaaa

SEQ ID NO: 2573736 - RNA, 19 nt, Homo sapiens
  misc_RNA (1)...(19): siRNA sense strand
cuguauugcuacugaggaa

SEQ ID NO: 2573737 - RNA, 19 nt, Homo sapiens
  misc_RNA (1)...(19): siRNA sense strand
agucagaacagaaguggaa

SEQ ID NO: 2573738 - RNA, 19 nt, Homo sapiens
  misc_RNA (1)...(19): siRNA sense strand
ggaaagauaauuugggcca

SEQ ID NO: 2573739 - RNA, 19 nt, Homo sapiens
  misc_RNA (1)...(19): siRNA sense strand
augcuaauauggugaacaa

SEQ ID NO: 2573740 - RNA, 19 nt, Homo sapiens
  misc_RNA (1)...(19): siRNA sense strand
augcaauaagagagagcaa

SEQ ID NO: 2573741 - RNA, 19 nt, Homo sapiens
  misc_RNA (1)...(19): siRNA sense strand
augucauggaagagggaaa

SEQ ID NO: 2573742 - RNA, 19 nt, Homo sapiens
  misc_RNA (1)...(19): siRNA sense strand
ggauaugggcaguugugaa

SEQ ID NO: 2573743 - RNA, 19 nt, Homo sapiens
  misc_RNA (1)...(19): siRNA sense strand
uuauguuggaggagaaaua

SEQ ID NO: 2573744 - RNA, 19 nt, Homo sapiens
  misc_RNA (1)...(19): siRNA sense strand
cgauguaucuccuaggcua

SEQ ID NO: 2573745 - RNA, 19 nt, Homo sapiens
  misc_RNA (1)...(19): siRNA sense strand
uuauuauguuggaggagaa

SEQ ID NO: 2573746 - RNA, 19 nt, Homo sapiens
  misc_RNA (1)...(19): siRNA sense strand
ucuucagcuuggagaguua

SEQ ID NO: 2573747 - RNA, 19 nt, Homo sapiens
  misc_RNA (1)...(19): siRNA sense strand
gaguaugcaauaagagaga

SEQ ID NO: 2573748 - RNA, 19 nt, Homo sapiens
  misc_RNA (1)...(19): siRNA sense strand
uuuggaaggacaugagaaa

SEQ ID NO: 2573749 - RNA, 19 nt, Homo sapiens
  misc_RNA (1)...(19): siRNA sense strand
aagaaugggugaaggaaac

SEQ ID NO: 2573750 - RNA, 19 nt, Homo sapiens
  misc_RNA (1)...(19): siRNA sense strand
ugggagaugcugaaauuaa

SEQ ID NO: 2573751 - RNA, 19 nt, Homo sapiens
  misc_RNA (1)...(19): siRNA sense strand
aagcagagucagaacagaa

SEQ ID NO: 2573752 - RNA, 19 nt, Homo sapiens
  misc_RNA (1)...(19): siRNA sense strand
ggaaaugcuaauaugguga

SEQ ID NO: 2573753 - RNA, 19 nt, Homo sapiens
  misc_RNA (1)...(19): siRNA sense strand
ugguuucaguccuggaaua

SEQ ID NO: 2573754 - RNA, 19 nt, Homo sapiens
  misc_RNA (1)...(19): siRNA sense strand
aggaaacacaugagggagu

SEQ ID NO: 2573755 - RNA, 19 nt, Homo sapiens
  misc_RNA (1)...(19): siRNA sense strand
cagcaagcucuuacaguau

SEQ ID NO: 2573756 - RNA, 19 nt, Homo sapiens
  misc_RNA (1)...(19): siRNA sense strand
ccaaaugaagagagaaaug

SEQ ID NO: 2573757 - RNA, 19 nt, Homo sapiens
  misc_RNA (1)...(19): siRNA sense strand
cacaaguguuugaaggaca

SEQ ID NO: 2573758 - RNA, 19 nt, Homo sapiens
  misc_RNA (1)...(19): siRNA sense strand
aaacaagagcuuuggaucu

SEQ ID NO: 2573759 - RNA, 19 nt, Homo sapiens
  misc_RNA (1)...(19): siRNA sense strand
ccaaaagaacagaggacca

SEQ ID NO: 2573760 - RNA, 19 nt, Homo sapiens
  misc_RNA (1)...(19): siRNA sense strand
cagagggugcggagagaga

SEQ ID NO: 2573761 - RNA, 19 nt, Homo sapiens
  misc_RNA (1)...(19): siRNA sense strand
cagaaguccagcaggccaa

SEQ ID NO: 2573762 - RNA, 19 nt, Homo sapiens
  misc_RNA (1)...(19): siRNA sense strand
gcacacugaauuauggaau

SEQ ID NO: 2573763 - RNA, 19 nt, Homo sapiens
  misc_RNA (1)...(19): siRNA sense strand
gcaaggaagaauuggguug

SEQ ID NO: 2573764 - RNA, 19 nt, Homo sapiens
  misc_RNA (1)...(19): siRNA sense strand
ugaagaugccuuugagguu

SEQ ID NO: 2573765 - RNA, 19 nt, Homo sapiens
  misc_RNA (1)...(19): siRNA sense strand
ugaacuugccauuaguaaa

SEQ ID NO: 2573766 - RNA, 19 nt, Homo sapiens
  misc_RNA (1)...(19): siRNA sense strand
auaucaaucuggaugaaga

SEQ ID NO: 2573767 - RNA, 19 nt, Homo sapiens
  misc_RNA (1)...(19): siRNA sense strand
agucuuggcugcacaggaa

SEQ ID NO: 2573768 - RNA, 19 nt, Homo sapiens
  misc_RNA (1)...(19): siRNA sense strand
ugaagauggcauugaagau

SEQ ID NO: 2573769 - RNA, 19 nt, Homo sapiens
  misc_RNA (1)...(19): siRNA sense strand
ccuuugagguucuugguga

SEQ ID NO: 2573770 - RNA, 19 nt, Homo sapiens
  misc_RNA (1)...(19): siRNA sense strand
uuggugagauucaggaaau

SEQ ID NO: 2573771 - RNA, 19 nt, Homo sapiens
  misc_RNA (1)...(19): siRNA sense strand
gugcggagagagauggcaa

SEQ ID NO: 2573772 - RNA, 19 nt, Homo sapiens
  misc_RNA (1)...(19): siRNA sense strand
cagucagguuucaagggua

SEQ ID NO: 2573773 - RNA, 19 nt, Homo sapiens
  misc_RNA (1)...(19): siRNA sense strand
acaaugucgcuuugggcua

SEQ ID NO: 2573774 - RNA, 19 nt, Homo sapiens
  misc_RNA (1)...(19): siRNA sense strand
ugagguucuuggugagauu

SEQ ID NO: 2573775 - RNA, 19 nt, Homo sapiens
  misc_RNA (1)...(19): siRNA sense strand
guggaaacaacuugcugaa

SEQ ID NO: 2573776 - RNA, 19 nt, Homo sapiens
  misc_RNA (1)...(19): siRNA sense strand
aacaggaacuugaugggaa

SEQ ID NO: 2573777 - RNA, 19 nt, Homo sapiens
  misc_RNA (1)...(19): siRNA sense strand
cagccaacaaagaagaaaa

SEQ ID NO: 2573778 - RNA, 19 nt, Homo sapiens
  misc_RNA (1)...(19): siRNA sense strand
aaacacagacacuggugaa

SEQ ID NO: 2573779 - RNA, 19 nt, Homo sapiens
  misc_RNA (1)...(19): siRNA sense strand
ugacaggagcggaugacau

SEQ ID NO: 2573780 - RNA, 19 nt, Homo sapiens
  misc_RNA (1)...(19): siRNA sense strand
gaguuaagaguguggaucu

SEQ ID NO: 2573781 - RNA, 19 nt, Homo sapiens
  misc_RNA (1)...(19): siRNA sense strand
caguggaagcagagucaga

SEQ ID NO: 2573782 - RNA, 19 nt, Homo sapiens
  misc_RNA (1)...(19): siRNA sense strand
ucucaaaagucaaucagaa

SEQ ID NO: 2573783 - RNA, 19 nt, Homo sapiens
  misc_RNA (1)...(19): siRNA sense strand
agaugaccgucuuguuaaa

SEQ ID NO: 2573784 - RNA, 19 nt, Homo sapiens
  misc_RNA (1)...(19): siRNA sense strand
caguaaaggauaugggcag

SEQ ID NO: 2573785 - RNA, 19 nt, Homo sapiens
  misc_RNA (1)...(19): siRNA sense strand
cucaagaucuacagcucaa

SEQ ID NO: 2573786 - RNA, 19 nt, Homo sapiens
  misc_RNA (1)...(19): siRNA sense strand
gcgugaauugcauugauua

SEQ ID NO: 2573787 - RNA, 19 nt, Homo sapiens
  misc_RNA (1)...(19): siRNA sense strand
ucuaagagggucaaacaau

SEQ ID NO: 2573788 - RNA, 19 nt, Homo sapiens
  misc_RNA (1)...(19): siRNA sense strand
cagaguaugcaauaagaga

SEQ ID NO: 2573789 - RNA, 19 nt, Homo sapiens
  misc_RNA (1)...(19): siRNA sense strand
gcuacauuccuaaagacaa

SEQ ID NO: 2573790 - RNA, 19 nt, Homo sapiens
  misc_RNA (1)...(19): siRNA sense strand
gguugugacaggagcggau

SEQ ID NO: 2573791 - RNA, 19 nt, Homo sapiens
  misc_RNA (1)...(19): siRNA sense strand
caaaggaagugaaccgcaa

SEQ ID NO: 2573792 - RNA, 19 nt, Homo sapiens
  misc_RNA (1)...(19): siRNA sense strand
ggacauggagggaaggcuu

SEQ ID NO: 2573793 - RNA, 19 nt, Homo sapiens
  misc_RNA (1)...(19): siRNA sense strand
acaaggacauggagggaag

SEQ ID NO: 2573794 - RNA, 19 nt, Homo sapiens
  misc_RNA (1)...(19): siRNA sense strand
aagugaaccgcaagaagaa

SEQ ID NO: 2573795 - RNA, 19 nt, Homo sapiens
  misc_RNA (1)...(19): siRNA sense strand
cugcagaagcugaaggcua

SEQ ID NO: 2573796 - RNA, 19 nt, Homo sapiens
  misc_RNA (1)...(19): siRNA sense strand
agaaaauccuggugaacaa

SEQ ID NO: 2573797 - RNA, 19 nt, Homo sapiens
  misc_RNA (1)...(19): siRNA sense strand
gauuaauguucuaggagca

SEQ ID NO: 2573798 - RNA, 19 nt, Homo sapiens
  misc_RNA (1)...(19): siRNA sense strand
ugcccugggugaagagaaa

SEQ ID NO: 2573799 - RNA, 19 nt, Homo sapiens
  misc_RNA (1)...(19): siRNA sense strand
ccaacaugggccaggauau

SEQ ID NO: 2573800 - RNA, 19 nt, Homo sapiens
  misc_RNA (1)...(19): siRNA sense strand
acauuaaggguuacaggaa

SEQ ID NO: 2573801 - RNA, 19 nt, Homo sapiens
  misc_RNA (1)...(19): siRNA sense strand
gugccaugaucaacagcaa

SEQ ID NO: 2573802 - RNA, 19 nt, Homo sapiens
  misc_RNA (1)...(19): siRNA sense strand
ggacaaaggcagauccaag

SEQ ID NO: 2573803 - RNA, 19 nt, Homo sapiens
  misc_RNA (1)...(19): siRNA sense strand
auggacaguuugaagacaa

SEQ ID NO: 2573804 - RNA, 19 nt, Homo sapiens
  misc_RNA (1)...(19): siRNA sense strand
uggaaacuggagugagaau

SEQ ID NO: 2573805 - RNA, 19 nt, Homo sapiens
  misc_RNA (1)...(19): siRNA sense strand
agcaacaaguuuaaggaca

SEQ ID NO: 2573806 - RNA, 19 nt, Homo sapiens
  misc_RNA (1)...(19): siRNA sense strand
agggagggaaggagcagaa

SEQ ID NO: 2573807 - RNA, 19 nt, Homo sapiens
  misc_RNA (1)...(19): siRNA sense strand
gccacgauacagauggaaa

SEQ ID NO: 2573808 - RNA, 19 nt, Homo sapiens
  misc_RNA (1)...(19): siRNA sense strand
cagacaagcugauccgcau

SEQ ID NO: 2573809 - RNA, 19 nt, Homo sapiens
  misc_RNA (1)...(19): siRNA sense strand
cugagaaaauccuggugaa

SEQ ID NO: 2573810 - RNA, 19 nt, Homo sapiens
  misc_RNA (1)...(19): siRNA sense strand
ccagaaauaaugugcggca

SEQ ID NO: 2573811 - RNA, 19 nt, Homo sapiens
  misc_RNA (1)...(19): siRNA sense strand
ucacagaccuccagagcuc

SEQ ID NO: 2573812 - RNA, 19 nt, Homo sapiens
  misc_RNA (1)...(19): siRNA sense strand
augacaucacagagaacua

SEQ ID NO: 2573813 - RNA, 19 nt, Homo sapiens
  misc_RNA (1)...(19): siRNA sense strand
gcaucagugcccuggguga

SEQ ID NO: 2573814 - RNA, 19 nt, Homo sapiens
  misc_RNA (1)...(19): siRNA sense strand
caagcuaauaugagaagca

SEQ ID NO: 2573815 - RNA, 19 nt, Homo sapiens
  misc_RNA (1)...(19): siRNA sense strand
ucaaagaaggagaagugga

SEQ ID NO: 2573816 - RNA, 19 nt, Homo sapiens
  misc_RNA (1)...(19): siRNA sense strand
gagccaucaaagaaggaga

SEQ ID NO: 2573817 - RNA, 19 nt, Homo sapiens
  misc_RNA (1)...(19): siRNA sense strand
agaacuacaaguaugaaga

SEQ ID NO: 2573818 - RNA, 19 nt, Homo sapiens
  misc_RNA (1)...(19): siRNA sense strand
ucuccauacaggugauauu

SEQ ID NO: 2573819 - RNA, 19 nt, Homo sapiens
  misc_RNA (1)...(19): siRNA sense strand
ccucaaaccccaacaccaa

SEQ ID NO: 2573820 - RNA, 19 nt, Homo sapiens
  misc_RNA (1)...(19): siRNA sense strand
acaucaucuucgugguuga

SEQ ID NO: 2573821 - RNA, 19 nt, Homo sapiens
  misc_RNA (1)...(19): siRNA sense strand
agacaaaaucauagacauc

SEQ ID NO: 2573822 - RNA, 19 nt, Homo sapiens
  misc_RNA (1)...(19): siRNA sense strand
ggugcaagucucccugaaa

SEQ ID NO: 2573823 - RNA, 19 nt, Homo sapiens
  misc_RNA (1)...(19): siRNA sense strand
cggagcagguugaggacug

SEQ ID NO: 2573824 - RNA, 19 nt, Homo sapiens
  misc_RNA (1)...(19): siRNA sense strand
ccacgauacagauggaaac

SEQ ID NO: 2573825 - RNA, 19 nt, Homo sapiens
  misc_RNA (1)...(19): siRNA sense strand
cuucaagaaacagcagaaa

SEQ ID NO: 2573826 - RNA, 19 nt, Homo sapiens
  misc_RNA (1)...(19): siRNA sense strand
cugcagaagcugaaggcua

SEQ ID NO: 2573827 - RNA, 19 nt, Homo sapiens
  misc_RNA (1)...(19): siRNA sense strand
agaaaauccuggugaacaa

SEQ ID NO: 2573828 - RNA, 19 nt, Homo sapiens
  misc_RNA (1)...(19): siRNA sense strand
gauuaauguucuaggagca

SEQ ID NO: 2573829 - RNA, 19 nt, Homo sapiens
  misc_RNA (1)...(19): siRNA sense strand
ugcccugggugaagagaaa

SEQ ID NO: 2573830 - RNA, 19 nt, Homo sapiens
  misc_RNA (1)...(19): siRNA sense strand
ccaacaugggccaggauau

SEQ ID NO: 2573831 - RNA, 19 nt, Homo sapiens
  misc_RNA (1)...(19): siRNA sense strand
acauuaaggguuacaggaa

SEQ ID NO: 2573832 - RNA, 19 nt, Homo sapiens
  misc_RNA (1)...(19): siRNA sense strand
gugccaugaucaacagcaa

SEQ ID NO: 2573833 - RNA, 19 nt, Homo sapiens
  misc_RNA (1)...(19): siRNA sense strand
ggacaaaggcagauccaag

SEQ ID NO: 2573834 - RNA, 19 nt, Homo sapiens
  misc_RNA (1)...(19): siRNA sense strand
auggacaguuugaagacaa

SEQ ID NO: 2573835 - RNA, 19 nt, Homo sapiens
  misc_RNA (1)...(19): siRNA sense strand
uggaaacuggagugagaau

SEQ ID NO: 2573836 - RNA, 19 nt, Homo sapiens
  misc_RNA (1)...(19): siRNA sense strand
agcaacaaguuuaaggaca

SEQ ID NO: 2573837 - RNA, 19 nt, Homo sapiens
  misc_RNA (1)...(19): siRNA sense strand
agggagggaaggagcagaa

SEQ ID NO: 2573838 - RNA, 19 nt, Homo sapiens
  misc_RNA (1)...(19): siRNA sense strand
gccacgauacagauggaaa

SEQ ID NO: 2573839 - RNA, 19 nt, Homo sapiens
  misc_RNA (1)...(19): siRNA sense strand
cagacaagcugauccgcau

SEQ ID NO: 2573840 - RNA, 19 nt, Homo sapiens
  misc_RNA (1)...(19): siRNA sense strand
cugagaaaauccuggugaa

SEQ ID NO: 2573841 - RNA, 19 nt, Homo sapiens
  misc_RNA (1)...(19): siRNA sense strand
ccagaaauaaugugcggca

SEQ ID NO: 2573842 - RNA, 19 nt, Homo sapiens
  misc_RNA (1)...(19): siRNA sense strand
ucacagaccuccagagcuc

SEQ ID NO: 2573843 - RNA, 19 nt, Homo sapiens
  misc_RNA (1)...(19): siRNA sense strand
augacaucacagagaacua

SEQ ID NO: 2573844 - RNA, 19 nt, Homo sapiens
  misc_RNA (1)...(19): siRNA sense strand
gcaucagugcccuggguga

SEQ ID NO: 2573845 - RNA, 19 nt, Homo sapiens
  misc_RNA (1)...(19): siRNA sense strand
caagcuaauaugagaagca

SEQ ID NO: 2573846 - RNA, 19 nt, Homo sapiens
  misc_RNA (1)...(19): siRNA sense strand
ucaaagaaggagaagugga

SEQ ID NO: 2573847 - RNA, 19 nt, Homo sapiens
  misc_RNA (1)...(19): siRNA sense strand
gagccaucaaagaaggaga

SEQ ID NO: 2573848 - RNA, 19 nt, Homo sapiens
  misc_RNA (1)...(19): siRNA sense strand
agaacuacaaguaugaaga

SEQ ID NO: 2573849 - RNA, 19 nt, Homo sapiens
  misc_RNA (1)...(19): siRNA sense strand
ucuccauacaggugauauu

SEQ ID NO: 2573850 - RNA, 19 nt, Homo sapiens
  misc_RNA (1)...(19): siRNA sense strand
ccucaaaccccaacaccaa

SEQ ID NO: 2573851 - RNA, 19 nt, Homo sapiens
  misc_RNA (1)...(19): siRNA sense strand
acaucaucuucgugguuga

SEQ ID NO: 2573852 - RNA, 19 nt, Homo sapiens
  misc_RNA (1)...(19): siRNA sense strand
agacaaaaucauagacauc

SEQ ID NO: 2573853 - RNA, 19 nt, Homo sapiens
  misc_RNA (1)...(19): siRNA sense strand
ggugcaagucucccugaaa

SEQ ID NO: 2573854 - RNA, 19 nt, Homo sapiens
  misc_RNA (1)...(19): siRNA sense strand
cggagcagguugaggacug

SEQ ID NO: 2573855 - RNA, 19 nt, Homo sapiens
  misc_RNA (1)...(19): siRNA sense strand
ccacgauacagauggaaac

SEQ ID NO: 2573856 - RNA, 19 nt, Homo sapiens
  misc_RNA (1)...(19): siRNA sense strand
cuucaagaaacagcagaaa

SEQ ID NO: 2573857 - RNA, 19 nt, Homo sapiens
  misc_RNA (1)...(19): siRNA sense strand
cuccagagccacagcaaca

SEQ ID NO: 2573858 - RNA, 19 nt, Homo sapiens
  misc_RNA (1)...(19): siRNA sense strand
gcaaguuccugcuggccuu

SEQ ID NO: 2573859 - RNA, 19 nt, Homo sapiens
  misc_RNA (1)...(19): siRNA sense strand
uggccaacccggugcucua

SEQ ID NO: 2573860 - RNA, 19 nt, Homo sapiens
  misc_RNA (1)...(19): siRNA sense strand
augcagaagaguagggaaa

SEQ ID NO: 2573861 - RNA, 19 nt, Homo sapiens
  misc_RNA (1)...(19): siRNA sense strand
ggaaaucaugacugagaaa

SEQ ID NO: 2573862 - RNA, 19 nt, Homo sapiens
  misc_RNA (1)...(19): siRNA sense strand
cugaagagggugaggaaga

SEQ ID NO: 2573863 - RNA, 19 nt, Homo sapiens
  misc_RNA (1)...(19): siRNA sense strand
gggaagaugucaaggagga

SEQ ID NO: 2573864 - RNA, 19 nt, Homo sapiens
  misc_RNA (1)...(19): siRNA sense strand
ggaaggaggaggaggagau

SEQ ID NO: 2573865 - RNA, 19 nt, Homo sapiens
  misc_RNA (1)...(19): siRNA sense strand
augaagaagaggaggaaga

SEQ ID NO: 2573866 - RNA, 19 nt, Homo sapiens
  misc_RNA (1)...(19): siRNA sense strand
agaagaaagcagugagcau

SEQ ID NO: 2573867 - RNA, 19 nt, Homo sapiens
  misc_RNA (1)...(19): siRNA sense strand
caaccaacguggaugggaa

SEQ ID NO: 2573868 - RNA, 19 nt, Homo sapiens
  misc_RNA (1)...(19): siRNA sense strand
aggaagaagaggaggcuga

SEQ ID NO: 2573869 - RNA, 19 nt, Homo sapiens
  misc_RNA (1)...(19): siRNA sense strand
gugccaggaaagagaauua

SEQ ID NO: 2573870 - RNA, 19 nt, Homo sapiens
  misc_RNA (1)...(19): siRNA sense strand
uccuaaagcuggacguaaa

SEQ ID NO: 2573871 - RNA, 19 nt, Homo sapiens
  misc_RNA (1)...(19): siRNA sense strand
ugaagaaacuguugagcca

SEQ ID NO: 2573872 - RNA, 19 nt, Homo sapiens
  misc_RNA (1)...(19): siRNA sense strand
aggaagaguuaaucgaauu

SEQ ID NO: 2573873 - RNA, 19 nt, Homo sapiens
  misc_RNA (1)...(19): siRNA sense strand
caucaucagaagaaggaua

SEQ ID NO: 2573874 - RNA, 19 nt, Homo sapiens
  misc_RNA (1)...(19): siRNA sense strand
cugucgagaucaaggcaaa

SEQ ID NO: 2573875 - RNA, 19 nt, Homo sapiens
  misc_RNA (1)...(19): siRNA sense strand
ccaaaaggcauguggauau

SEQ ID NO: 2573876 - RNA, 19 nt, Homo sapiens
  misc_RNA (1)...(19): siRNA sense strand
cugagaaagauauggaauu

SEQ ID NO: 2573877 - RNA, 19 nt, Homo sapiens
  misc_RNA (1)...(19): siRNA sense strand
ccggaaagcccucggucaa

SEQ ID NO: 2573878 - RNA, 19 nt, Homo sapiens
  misc_RNA (1)...(19): siRNA sense strand
aagaaacuguugagccaaa

SEQ ID NO: 2573879 - RNA, 19 nt, Homo sapiens
  misc_RNA (1)...(19): siRNA sense strand
cuaaagaugaagaagaaga

SEQ ID NO: 2573880 - RNA, 19 nt, Homo sapiens
  misc_RNA (1)...(19): siRNA sense strand
acacuaaggaagaguuaau

SEQ ID NO: 2573881 - RNA, 19 nt, Homo sapiens
  misc_RNA (1)...(19): siRNA sense strand
uggacuacucugagcaaua

SEQ ID NO: 2573882 - RNA, 19 nt, Homo sapiens
  misc_RNA (1)...(19): siRNA sense strand
gcauauuggaaaaguguaa

SEQ ID NO: 2573883 - RNA, 19 nt, Homo sapiens
  misc_RNA (1)...(19): siRNA sense strand
ggauagauggcuuggacuu

SEQ ID NO: 2573884 - RNA, 19 nt, Homo sapiens
  misc_RNA (1)...(19): siRNA sense strand
ccaagauccaggagaguga

SEQ ID NO: 2573885 - RNA, 19 nt, Homo sapiens
  misc_RNA (1)...(19): siRNA sense strand
aggaggagcagcaggaauu

SEQ ID NO: 2573886 - RNA, 19 nt, Homo sapiens
  misc_RNA (1)...(19): siRNA sense strand
agccagaggaggaggaaga

SEQ ID NO: 2573887 - RNA, 19 nt, Homo sapiens
  misc_RNA (1)...(19): siRNA sense strand
ccacacuaaggaagaguua

SEQ ID NO: 2573888 - RNA, 19 nt, Homo sapiens
  misc_RNA (1)...(19): siRNA sense strand
agucuaaagaugaagaaga

SEQ ID NO: 2573889 - RNA, 19 nt, Homo sapiens
  misc_RNA (1)...(19): siRNA sense strand
aauuaaaagaggaggaaga

SEQ ID NO: 2573890 - RNA, 19 nt, Homo sapiens
  misc_RNA (1)...(19): siRNA sense strand
ucucagaggaggaagaaga

SEQ ID NO: 2573891 - RNA, 19 nt, Homo sapiens
  misc_RNA (1)...(19): siRNA sense strand
agaugaagaagaagaugaa

SEQ ID NO: 2573892 - RNA, 19 nt, Homo sapiens
  misc_RNA (1)...(19): siRNA sense strand
gggaaagagaguugugagu

SEQ ID NO: 2573893 - RNA, 19 nt, Homo sapiens
  misc_RNA (1)...(19): siRNA sense strand
aagaggaggaagaggauga

SEQ ID NO: 2573894 - RNA, 19 nt, Homo sapiens
  misc_RNA (1)...(19): siRNA sense strand
aaaaggagcuagaggaaca

SEQ ID NO: 2573895 - RNA, 19 nt, Homo sapiens
  misc_RNA (1)...(19): siRNA sense strand
agggaaaagauaaaggaua

SEQ ID NO: 2573896 - RNA, 19 nt, Homo sapiens
  misc_RNA (1)...(19): siRNA sense strand
ggaccuuacaugagaagau

SEQ ID NO: 2573897 - RNA, 19 nt, Homo sapiens
  misc_RNA (1)...(19): siRNA sense strand
cuaccaggacugugaggaa

SEQ ID NO: 2573898 - RNA, 19 nt, Homo sapiens
  misc_RNA (1)...(19): siRNA sense strand
ccagaucagcccagaacaa

SEQ ID NO: 2573899 - RNA, 19 nt, Homo sapiens
  misc_RNA (1)...(19): siRNA sense strand
ucacaguguaguaugaaua

SEQ ID NO: 2573900 - RNA, 19 nt, Homo sapiens
  misc_RNA (1)...(19): siRNA sense strand
augaagaagaagaugaaga

SEQ ID NO: 2573901 - RNA, 19 nt, Homo sapiens
  misc_RNA (1)...(19): siRNA sense strand
ucuuugagguugaugggaa

SEQ ID NO: 2573902 - RNA, 19 nt, Homo sapiens
  misc_RNA (1)...(19): siRNA sense strand
agauaaaggauaaagagga

SEQ ID NO: 2573903 - RNA, 19 nt, Homo sapiens
  misc_RNA (1)...(19): siRNA sense strand
ccuauaaagauccugauaa

SEQ ID NO: 2573904 - RNA, 19 nt, Homo sapiens
  misc_RNA (1)...(19): siRNA sense strand
caaaauguggauuggaaua

SEQ ID NO: 2573905 - RNA, 19 nt, Homo sapiens
  misc_RNA (1)...(19): siRNA sense strand
cuuugagguugaugggaau

SEQ ID NO: 2573906 - RNA, 19 nt, Homo sapiens
  misc_RNA (1)...(19): siRNA sense strand
ccaaggagccugaggugga

SEQ ID NO: 2573907 - RNA, 19 nt, Homo sapiens
  misc_RNA (1)...(19): siRNA sense strand
gaguuugggaaguaugaaa

SEQ ID NO: 2573908 - RNA, 19 nt, Homo sapiens
  misc_RNA (1)...(19): siRNA sense strand
cagauuaacagaaggaagu

SEQ ID NO: 2573909 - RNA, 19 nt, Homo sapiens
  misc_RNA (1)...(19): siRNA sense strand
ggcugaagagggugaggaa

SEQ ID NO: 2573910 - RNA, 19 nt, Homo sapiens
  misc_RNA (1)...(19): siRNA sense strand
ccagcagacagcagcaaua

SEQ ID NO: 2573911 - RNA, 19 nt, Homo sapiens
  misc_RNA (1)...(19): siRNA sense strand
uggaggaggaagaagagaa

SEQ ID NO: 2573912 - RNA, 19 nt, Homo sapiens
  misc_RNA (1)...(19): siRNA sense strand
cuuuauacugaguggauuu

SEQ ID NO: 2573913 - RNA, 19 nt, Homo sapiens
  misc_RNA (1)...(19): siRNA sense strand
aggaauuagaggagccaga

SEQ ID NO: 2573914 - RNA, 19 nt, Homo sapiens
  misc_RNA (1)...(19): siRNA sense strand
aaaucaugacugagaaaga

SEQ ID NO: 2573915 - RNA, 19 nt, Homo sapiens
  misc_RNA (1)...(19): siRNA sense strand
ggaacguuuuggugauaaa

SEQ ID NO: 2573916 - RNA, 19 nt, Homo sapiens
  misc_RNA (1)...(19): siRNA sense strand
cggucaagcucgccaccaa

SEQ ID NO: 2573917 - RNA, 19 nt, Homo sapiens
  misc_RNA (1)...(19): siRNA sense strand
ggauaagccgguugcugaa

SEQ ID NO: 2573918 - RNA, 19 nt, Homo sapiens
  misc_RNA (1)...(19): siRNA sense strand
gaagaaaugugguugguuc

SEQ ID NO: 2573919 - RNA, 19 nt, Homo sapiens
  misc_RNA (1)...(19): siRNA sense strand
gagcaauaucgaaucagaa

SEQ ID NO: 2573920 - RNA, 19 nt, Homo sapiens
  misc_RNA (1)...(19): siRNA sense strand
ucaugagaacaaagaacaa

SEQ ID NO: 2573921 - RNA, 19 nt, Homo sapiens
  misc_RNA (1)...(19): siRNA sense strand
gauccaggagagugaagaa

SEQ ID NO: 2573922 - RNA, 19 nt, Homo sapiens
  misc_RNA (1)...(19): siRNA sense strand
agucagaggaggagcagca

SEQ ID NO: 2573923 - RNA, 19 nt, Homo sapiens
  misc_RNA (1)...(19): siRNA sense strand
cggcucaacacuaaagcaa

SEQ ID NO: 2573924 - RNA, 19 nt, Homo sapiens
  misc_RNA (1)...(19): siRNA sense strand
cagcagcacaugaagaaau

SEQ ID NO: 2573925 - RNA, 19 nt, Homo sapiens
  misc_RNA (1)...(19): siRNA sense strand
gugaccaauuugugauuau

SEQ ID NO: 2573926 - RNA, 19 nt, Homo sapiens
  misc_RNA (1)...(19): siRNA sense strand
uagagaucagugugggaaa

SEQ ID NO: 2573927 - RNA, 19 nt, Homo sapiens
  misc_RNA (1)...(19): siRNA sense strand
aagaagaggaggaagagga

SEQ ID NO: 2573928 - RNA, 19 nt, Homo sapiens
  misc_RNA (1)...(19): siRNA sense strand
agaggaaggaggaggagga

SEQ ID NO: 2573929 - RNA, 19 nt, Homo sapiens
  misc_RNA (1)...(19): siRNA sense strand
ugauaauccugggcgaaua

SEQ ID NO: 2573930 - RNA, 19 nt, Homo sapiens
  misc_RNA (1)...(19): siRNA sense strand
agaaaagaagccagaggaa

SEQ ID NO: 2573931 - RNA, 19 nt, Homo sapiens
  misc_RNA (1)...(19): siRNA sense strand
agaaggcagcacagauaaa

SEQ ID NO: 2573932 - RNA, 19 nt, Homo sapiens
  misc_RNA (1)...(19): siRNA sense strand
agaacaagcacugcagaaa

SEQ ID NO: 2573933 - RNA, 19 nt, Homo sapiens
  misc_RNA (1)...(19): siRNA sense strand
caggcaagaaggugggaau

SEQ ID NO: 2573934 - RNA, 19 nt, Homo sapiens
  misc_RNA (1)...(19): siRNA sense strand
gcuugcgggugaugggaau

SEQ ID NO: 2573935 - RNA, 19 nt, Homo sapiens
  misc_RNA (1)...(19): siRNA sense strand
aagacgggcuugcggguga

SEQ ID NO: 2573936 - RNA, 19 nt, Homo sapiens
  misc_RNA (1)...(19): siRNA sense strand
ccuccauagcccagaagau

SEQ ID NO: 2573937 - RNA, 19 nt, Homo sapiens
  misc_RNA (1)...(19): siRNA sense strand
guggagaggccccaagaaa

SEQ ID NO: 2573938 - RNA, 19 nt, Homo sapiens
  misc_RNA (1)...(19): siRNA sense strand
uggacuaccugguggugga

SEQ ID NO: 2573939 - RNA, 19 nt, Homo sapiens
  misc_RNA (1)...(19): siRNA sense strand
uggagaggccccaagaaaa

SEQ ID NO: 2573940 - RNA, 19 nt, Homo sapiens
  misc_RNA (1)...(19): siRNA sense strand
acgcaaagaaaaugaagaa

SEQ ID NO: 2573941 - RNA, 19 nt, Homo sapiens
  misc_RNA (1)...(19): siRNA sense strand
gggacauacauggcagaaa

SEQ ID NO: 2573942 - RNA, 19 nt, Homo sapiens
  misc_RNA (1)...(19): siRNA sense strand
cugaggagcucuugccuga

SEQ ID NO: 2573943 - RNA, 19 nt, Homo sapiens
  misc_RNA (1)...(19): siRNA sense strand
gagcuagaagagaugaaaa

SEQ ID NO: 2573944 - RNA, 19 nt, Homo sapiens
  misc_RNA (1)...(19): siRNA sense strand
auuuaagcaaugaggagau

SEQ ID NO: 2573945 - RNA, 19 nt, Homo sapiens
  misc_RNA (1)...(19): siRNA sense strand
aggcagcagaugagcuaga

SEQ ID NO: 2573946 - RNA, 19 nt, Homo sapiens
  misc_RNA (1)...(19): siRNA sense strand
ccuaauaagaagaacaaga

SEQ ID NO: 2573947 - RNA, 19 nt, Homo sapiens
  misc_RNA (1)...(19): siRNA sense strand
ccauaguucaagaggaaga

SEQ ID NO: 2573948 - RNA, 19 nt, Homo sapiens
  misc_RNA (1)...(19): siRNA sense strand
cauuauuaagccagugaaa

SEQ ID NO: 2573949 - RNA, 19 nt, Homo sapiens
  misc_RNA (1)...(19): siRNA sense strand
ugacgaaggaggagcugaa

SEQ ID NO: 2573950 - RNA, 19 nt, Homo sapiens
  misc_RNA (1)...(19): siRNA sense strand
cagaaagcgcuaugaccaa

SEQ ID NO: 2573951 - RNA, 19 nt, Homo sapiens
  misc_RNA (1)...(19): siRNA sense strand
ggcagaggacauagagaau

SEQ ID NO: 2573952 - RNA, 19 nt, Homo sapiens
  misc_RNA (1)...(19): siRNA sense strand
cggaaaucagaaagcgcua

SEQ ID NO: 2573953 - RNA, 19 nt, Homo sapiens
  misc_RNA (1)...(19): siRNA sense strand
uggcagaggacauagagaa

SEQ ID NO: 2573954 - RNA, 19 nt, Homo sapiens
  misc_RNA (1)...(19): siRNA sense strand
gguaccacaucgaggugaa

SEQ ID NO: 2573955 - RNA, 19 nt, Homo sapiens
  misc_RNA (1)...(19): siRNA sense strand
cgacgaugacguaggagau

SEQ ID NO: 2573956 - RNA, 19 nt, Homo sapiens
  misc_RNA (1)...(19): siRNA sense strand
gcaaggucaacaagagcua

SEQ ID NO: 2573957 - RNA, 19 nt, Homo sapiens
  misc_RNA (1)...(19): siRNA sense strand
gaugaauuggguagagaga

SEQ ID NO: 2573958 - RNA, 19 nt, Homo sapiens
  misc_RNA (1)...(19): siRNA sense strand
agagagagguguaggcauc

SEQ ID NO: 2573959 - RNA, 19 nt, Homo sapiens
  misc_RNA (1)...(19): siRNA sense strand
ugacaguggucuugccaga

SEQ ID NO: 2573960 - RNA, 19 nt, Homo sapiens
  misc_RNA (1)...(19): siRNA sense strand
augcaugauuugcggaaga

SEQ ID NO: 2573961 - RNA, 19 nt, Homo sapiens
  misc_RNA (1)...(19): siRNA sense strand
ggauggagguggugcugca

SEQ ID NO: 2573962 - RNA, 19 nt, Homo sapiens
  misc_RNA (1)...(19): siRNA sense strand
gagaguucuuccagaccaa

SEQ ID NO: 2573963 - RNA, 19 nt, Homo sapiens
  misc_RNA (1)...(19): siRNA sense strand
agagaaguuucguggaguu

SEQ ID NO: 2573964 - RNA, 19 nt, Homo sapiens
  misc_RNA (1)...(19): siRNA sense strand
agauguacucagagauaga

SEQ ID NO: 2573965 - RNA, 19 nt, Homo sapiens
  misc_RNA (1)...(19): siRNA sense strand
cgguguaugagauggauuu

SEQ ID NO: 2573966 - RNA, 19 nt, Homo sapiens
  misc_RNA (1)...(19): siRNA sense strand
cagugaaaaccaagaaauu

SEQ ID NO: 2573967 - RNA, 19 nt, Homo sapiens
  misc_RNA (1)...(19): siRNA sense strand
ccaauugugaagacagcaa

SEQ ID NO: 2573968 - RNA, 19 nt, Homo sapiens
  misc_RNA (1)...(19): siRNA sense strand
ugccagacaccaaaggaaa

SEQ ID NO: 2573969 - RNA, 19 nt, Homo sapiens
  misc_RNA (1)...(19): siRNA sense strand
acauuguggaugaggucaa

SEQ ID NO: 2573970 - RNA, 19 nt, Homo sapiens
  misc_RNA (1)...(19): siRNA sense strand
cuucacagagcaagagaga

SEQ ID NO: 2573971 - RNA, 19 nt, Homo sapiens
  misc_RNA (1)...(19): siRNA sense strand
agagcaagagagaggugua

SEQ ID NO: 2573972 - RNA, 19 nt, Homo sapiens
  misc_RNA (1)...(19): siRNA sense strand
acgcgaaaguucaccaaaa

SEQ ID NO: 2573973 - RNA, 19 nt, Homo sapiens
  misc_RNA (1)...(19): siRNA sense strand
ccucaagugcuuugcugaa

SEQ ID NO: 2573974 - RNA, 19 nt, Homo sapiens
  misc_RNA (1)...(19): siRNA sense strand
cgccuaauaagaagaacaa

SEQ ID NO: 2573975 - RNA, 19 nt, Homo sapiens
  misc_RNA (1)...(19): siRNA sense strand
gacaagaaguacuacccaa

SEQ ID NO: 2573976 - RNA, 19 nt, Homo sapiens
  misc_RNA (1)...(19): siRNA sense strand
cccuggaggaugaggaaga

SEQ ID NO: 2573977 - RNA, 19 nt, Homo sapiens
  misc_RNA (1)...(19): siRNA sense strand
cugaugaagaugaugauga

SEQ ID NO: 2573978 - RNA, 19 nt, Homo sapiens
  misc_RNA (1)...(19): siRNA sense strand
acaggaagaagcugggaga

SEQ ID NO: 2573979 - RNA, 19 nt, Homo sapiens
  misc_RNA (1)...(19): siRNA sense strand
ggacucacacccagggaca

SEQ ID NO: 2573980 - RNA, 19 nt, Homo sapiens
  misc_RNA (1)...(19): siRNA sense strand
ccuaagacgcgaaaguuca

SEQ ID NO: 2573981 - RNA, 19 nt, Homo sapiens
  misc_RNA (1)...(19): siRNA sense strand
gguggagaccauaguucaa

SEQ ID NO: 2573982 - RNA, 19 nt, Homo sapiens
  misc_RNA (1)...(19): siRNA sense strand
aggaagaagcugggagagu

SEQ ID NO: 2573983 - RNA, 19 nt, Homo sapiens
  misc_RNA (1)...(19): siRNA sense strand
guccugagguggagaccau

SEQ ID NO: 2573984 - RNA, 19 nt, Homo sapiens
  misc_RNA (1)...(19): siRNA sense strand
gcuugauucugaugaagau

SEQ ID NO: 2573985 - RNA, 19 nt, Homo sapiens
  misc_RNA (1)...(19): siRNA sense strand
uuauauuggaccagagcuu

SEQ ID NO: 2573986 - RNA, 19 nt, Homo sapiens
  misc_RNA (1)...(19): siRNA sense strand
ggacauagagaaugaggug

SEQ ID NO: 2573987 - RNA, 19 nt, Homo sapiens
  misc_RNA (1)...(19): siRNA sense strand
ucagugaagaugugagcau

SEQ ID NO: 2573988 - RNA, 19 nt, Homo sapiens
  misc_RNA (1)...(19): siRNA sense strand
cuccaggacaugugaauuu

SEQ ID NO: 2573989 - RNA, 19 nt, Homo sapiens
  misc_RNA (1)...(19): siRNA sense strand
cagauuacguggaacagga

SEQ ID NO: 2573990 - RNA, 19 nt, Homo sapiens
  misc_RNA (1)...(19): siRNA sense strand
cagcaaauucuucgaugau

SEQ ID NO: 2573991 - RNA, 19 nt, Homo sapiens
  misc_RNA (1)...(19): siRNA sense strand
ugcaugaggacaagaagua

SEQ ID NO: 2573992 - RNA, 19 nt, Homo sapiens
  misc_RNA (1)...(19): siRNA sense strand
acgccuaauaagaagaaca

SEQ ID NO: 2573993 - RNA, 19 nt, Homo sapiens
  misc_RNA (1)...(19): siRNA sense strand
ggaacuugccaaacaggau

SEQ ID NO: 2573994 - RNA, 19 nt, Homo sapiens
  misc_RNA (1)...(19): siRNA sense strand
acuacacccuggaggauga

SEQ ID NO: 2573995 - RNA, 19 nt, Homo sapiens
  misc_RNA (1)...(19): siRNA sense strand
agaccaaagaucuugauga

SEQ ID NO: 2573996 - RNA, 19 nt, Homo sapiens
  misc_RNA (1)...(19): siRNA sense strand
gugagacggugguggaaac

SEQ ID NO: 2573997 - RNA, 19 nt, Homo sapiens
  misc_RNA (1)...(19): siRNA sense strand
ucacagagcaagagagagg

SEQ ID NO: 2573998 - RNA, 19 nt, Homo sapiens
  misc_RNA (1)...(19): siRNA sense strand
ggcugauccuggagcugaa

SEQ ID NO: 2573999 - RNA, 19 nt, Homo sapiens
  misc_RNA (1)...(19): siRNA sense strand
cuaaaagacucugggguga

SEQ ID NO: 2574000 - RNA, 19 nt, Homo sapiens
  misc_RNA (1)...(19): siRNA sense strand
gguucugauugaagguguu

SEQ ID NO: 2574001 - RNA, 19 nt, Homo sapiens
  misc_RNA (1)...(19): siRNA sense strand
cggaaugucaaguuuaaga

SEQ ID NO: 2574002 - RNA, 19 nt, Homo sapiens
  misc_RNA (1)...(19): siRNA sense strand
auaugaugaguuugggaau

SEQ ID NO: 2574003 - RNA, 19 nt, Homo sapiens
  misc_RNA (1)...(19): siRNA sense strand
acaugugugugcagcauau

SEQ ID NO: 2574004 - RNA, 19 nt, Homo sapiens
  misc_RNA (1)...(19): siRNA sense strand
aagaagaacaagaucacca

SEQ ID NO: 2574005 - RNA, 19 nt, Homo sapiens
  misc_RNA (1)...(19): siRNA sense strand
guuuaauugaacagacuca

SEQ ID NO: 2574006 - RNA, 19 nt, Homo sapiens
  misc_RNA (1)...(19): siRNA sense strand
aggaagaggaggaggagga

SEQ ID NO: 2574007 - RNA, 19 nt, Homo sapiens
  misc_RNA (1)...(19): siRNA sense strand
aggaagaggaggaggagga

SEQ ID NO: 2574008 - RNA, 19 nt, Homo sapiens
  misc_RNA (1)...(19): siRNA sense strand
aggaggaggaggaggaaga

SEQ ID NO: 2574009 - RNA, 19 nt, Homo sapiens
  misc_RNA (1)...(19): siRNA sense strand
aggaacagcugaaggagga

SEQ ID NO: 2574010 - RNA, 19 nt, Homo sapiens
  misc_RNA (1)...(19): siRNA sense strand
gggaugugaaggcuggaaa

SEQ ID NO: 2574011 - RNA, 19 nt, Homo sapiens
  misc_RNA (1)...(19): siRNA sense strand
aagaggaggccgagcccua

SEQ ID NO: 2574012 - RNA, 19 nt, Homo sapiens
  misc_RNA (1)...(19): siRNA sense strand
aggaggaggaggaggagga

SEQ ID NO: 2574013 - RNA, 19 nt, Homo sapiens
  misc_RNA (1)...(19): siRNA sense strand
aggaggaggaagaggagga

SEQ ID NO: 2574014 - RNA, 19 nt, Homo sapiens
  misc_RNA (1)...(19): siRNA sense strand
aggaggaagaggaggagga

SEQ ID NO: 2574015 - RNA, 19 nt, Homo sapiens
  misc_RNA (1)...(19): siRNA sense strand
acaacgaggaagaggagga

SEQ ID NO: 2574016 - RNA, 19 nt, Homo sapiens
  misc_RNA (1)...(19): siRNA sense strand
agaaauggcaagacaucau

SEQ ID NO: 2574017 - RNA, 19 nt, Homo sapiens
  misc_RNA (1)...(19): siRNA sense strand
cgucaacagccuagcagau

SEQ ID NO: 2574018 - RNA, 19 nt, Homo sapiens
  misc_RNA (1)...(19): siRNA sense strand
acgaggaagaggaggagga

SEQ ID NO: 2574019 - RNA, 19 nt, Homo sapiens
  misc_RNA (1)...(19): siRNA sense strand
aagaggaggaggaggagga

SEQ ID NO: 2574020 - RNA, 19 nt, Homo sapiens
  misc_RNA (1)...(19): siRNA sense strand
cgggaggaccugaacaaga

SEQ ID NO: 2574021 - RNA, 19 nt, Homo sapiens
  misc_RNA (1)...(19): siRNA sense strand
ggucugaguacuuccggaa

SEQ ID NO: 2574022 - RNA, 19 nt, Homo sapiens
  misc_RNA (1)...(19): siRNA sense strand
aggaggaagaggaggccga

SEQ ID NO: 2574023 - RNA, 19 nt, Homo sapiens
  misc_RNA (1)...(19): siRNA sense strand
aagcagacccagaaggacu

SEQ ID NO: 2574024 - RNA, 19 nt, Homo sapiens
  misc_RNA (1)...(19): siRNA sense strand
cugcaguaccgcaagauga

SEQ ID NO: 2574025 - RNA, 19 nt, Homo sapiens
  misc_RNA (1)...(19): siRNA sense strand
ucaucaaggaggugcgguu

SEQ ID NO: 2574026 - RNA, 19 nt, Homo sapiens
  misc_RNA (1)...(19): siRNA sense strand
auagugaggugguggccau

SEQ ID NO: 2574027 - RNA, 19 nt, Homo sapiens
  misc_RNA (1)...(19): siRNA sense strand
gggagauggccaugaugca

SEQ ID NO: 2574028 - RNA, 19 nt, Homo sapiens
  misc_RNA (1)...(19): siRNA sense strand
aguacaagcgcaagauguu

SEQ ID NO: 2574029 - RNA, 19 nt, Homo sapiens
  misc_RNA (1)...(19): siRNA sense strand
cagacaacgaggaagagga

SEQ ID NO: 2574030 - RNA, 19 nt, Homo sapiens
  misc_RNA (1)...(19): siRNA sense strand
aggaggaggaggaagagga

SEQ ID NO: 2574031 - RNA, 19 nt, Homo sapiens
  misc_RNA (1)...(19): siRNA sense strand
cagaaaaucccucaagaca

SEQ ID NO: 2574032 - RNA, 19 nt, Homo sapiens
  misc_RNA (1)...(19): siRNA sense strand
ggaccuacaaacuucgcaa

SEQ ID NO: 2574033 - RNA, 19 nt, Homo sapiens
  misc_RNA (1)...(19): siRNA sense strand
aggaagaggaggaggagga

SEQ ID NO: 2574034 - RNA, 19 nt, Homo sapiens
  misc_RNA (1)...(19): siRNA sense strand
aggaagaggaggaggagga

SEQ ID NO: 2574035 - RNA, 19 nt, Homo sapiens
  misc_RNA (1)...(19): siRNA sense strand
aggaggaggaggaggaaga

SEQ ID NO: 2574036 - RNA, 19 nt, Homo sapiens
  misc_RNA (1)...(19): siRNA sense strand
aggaacagcugaaggagga

SEQ ID NO: 2574037 - RNA, 19 nt, Homo sapiens
  misc_RNA (1)...(19): siRNA sense strand
gggaugugaaggcuggaaa

SEQ ID NO: 2574038 - RNA, 19 nt, Homo sapiens
  misc_RNA (1)...(19): siRNA sense strand
aagaggaggccgagcccua

SEQ ID NO: 2574039 - RNA, 19 nt, Homo sapiens
  misc_RNA (1)...(19): siRNA sense strand
aggaggaggaggaggagga

SEQ ID NO: 2574040 - RNA, 19 nt, Homo sapiens
  misc_RNA (1)...(19): siRNA sense strand
aggaggaggaagaggagga

SEQ ID NO: 2574041 - RNA, 19 nt, Homo sapiens
  misc_RNA (1)...(19): siRNA sense strand
aggaggaagaggaggagga

SEQ ID NO: 2574042 - RNA, 19 nt, Homo sapiens
  misc_RNA (1)...(19): siRNA sense strand
acaacgaggaagaggagga

SEQ ID NO: 2574043 - RNA, 19 nt, Homo sapiens
  misc_RNA (1)...(19): siRNA sense strand
agaaauggcaagacaucau

SEQ ID NO: 2574044 - RNA, 19 nt, Homo sapiens
  misc_RNA (1)...(19): siRNA sense strand
cgucaacagccuagcagau

SEQ ID NO: 2574045 - RNA, 19 nt, Homo sapiens
  misc_RNA (1)...(19): siRNA sense strand
acgaggaagaggaggagga

SEQ ID NO: 2574046 - RNA, 19 nt, Homo sapiens
  misc_RNA (1)...(19): siRNA sense strand
aagaggaggaggaggagga

SEQ ID NO: 2574047 - RNA, 19 nt, Homo sapiens
  misc_RNA (1)...(19): siRNA sense strand
cgggaggaccugaacaaga

SEQ ID NO: 2574048 - RNA, 19 nt, Homo sapiens
  misc_RNA (1)...(19): siRNA sense strand
ggucugaguacuuccggaa

SEQ ID NO: 2574049 - RNA, 19 nt, Homo sapiens
  misc_RNA (1)...(19): siRNA sense strand
aggaggaagaggaggccga

SEQ ID NO: 2574050 - RNA, 19 nt, Homo sapiens
  misc_RNA (1)...(19): siRNA sense strand
aagcagacccagaaggacu

SEQ ID NO: 2574051 - RNA, 19 nt, Homo sapiens
  misc_RNA (1)...(19): siRNA sense strand
cugcaguaccgcaagauga

SEQ ID NO: 2574052 - RNA, 19 nt, Homo sapiens
  misc_RNA (1)...(19): siRNA sense strand
ucaucaaggaggugcgguu

SEQ ID NO: 2574053 - RNA, 19 nt, Homo sapiens
  misc_RNA (1)...(19): siRNA sense strand
auagugaggugguggccau

SEQ ID NO: 2574054 - RNA, 19 nt, Homo sapiens
  misc_RNA (1)...(19): siRNA sense strand
gggagauggccaugaugca

SEQ ID NO: 2574055 - RNA, 19 nt, Homo sapiens
  misc_RNA (1)...(19): siRNA sense strand
aguacaagcgcaagauguu

SEQ ID NO: 2574056 - RNA, 19 nt, Homo sapiens
  misc_RNA (1)...(19): siRNA sense strand
cagacaacgaggaagagga

SEQ ID NO: 2574057 - RNA, 19 nt, Homo sapiens
  misc_RNA (1)...(19): siRNA sense strand
aggaggaggaggaagagga

SEQ ID NO: 2574058 - RNA, 19 nt, Homo sapiens
  misc_RNA (1)...(19): siRNA sense strand
cagaaaaucccucaagaca

SEQ ID NO: 2574059 - RNA, 19 nt, Homo sapiens
  misc_RNA (1)...(19): siRNA sense strand
ggaccuacaaacuucgcaa

SEQ ID NO: 2574060 - RNA, 19 nt, Homo sapiens
  misc_RNA (1)...(19): siRNA sense strand
gcuaauuauugaugggcaa

SEQ ID NO: 2574061 - RNA, 19 nt, Homo sapiens
  misc_RNA (1)...(19): siRNA sense strand
uggaaagagcaaaggaaga

SEQ ID NO: 2574062 - RNA, 19 nt, Homo sapiens
  misc_RNA (1)...(19): siRNA sense strand
ccacaaaacuagugagaag

SEQ ID NO: 2574063 - RNA, 19 nt, Homo sapiens
  misc_RNA (1)...(19): siRNA sense strand
agacaaaaugaaaggcaaa

SEQ ID NO: 2574064 - RNA, 19 nt, Homo sapiens
  misc_RNA (1)...(19): siRNA sense strand
gguaauaggaccccagaaa

SEQ ID NO: 2574065 - RNA, 19 nt, Homo sapiens
  misc_RNA (1)...(19): siRNA sense strand
guccuaaagagcuggauaa

SEQ ID NO: 2574066 - RNA, 19 nt, Homo sapiens
  misc_RNA (1)...(19): siRNA sense strand
ucaacuaauggaagugaaa

SEQ ID NO: 2574067 - RNA, 19 nt, Homo sapiens
  misc_RNA (1)...(19): siRNA sense strand
aagacaaaccugugggcuu

SEQ ID NO: 2574068 - RNA, 19 nt, Homo sapiens
  misc_RNA (1)...(19): siRNA sense strand
uggaaaucuugcaguaaaa

SEQ ID NO: 2574069 - RNA, 19 nt, Homo sapiens
  misc_RNA (1)...(19): siRNA sense strand
gggaaaagagggaacaaga

SEQ ID NO: 2574070 - RNA, 19 nt, Homo sapiens
  misc_RNA (1)...(19): siRNA sense strand
agaagaguguacagagcuu

SEQ ID NO: 2574071 - RNA, 19 nt, Homo sapiens
  misc_RNA (1)...(19): siRNA sense strand
gguccuaaagagcuggaua

SEQ ID NO: 2574072 - RNA, 19 nt, Homo sapiens
  misc_RNA (1)...(19): siRNA sense strand
gaguauccaaggaggagaa

SEQ ID NO: 2574073 - RNA, 19 nt, Homo sapiens
  misc_RNA (1)...(19): siRNA sense strand
aagaggaagaugaaggaga

SEQ ID NO: 2574074 - RNA, 19 nt, Homo sapiens
  misc_RNA (1)...(19): siRNA sense strand
cuguacauguucagcuuua

SEQ ID NO: 2574075 - RNA, 19 nt, Homo sapiens
  misc_RNA (1)...(19): siRNA sense strand
uauccaaggaggagaacuu

SEQ ID NO: 2574076 - RNA, 19 nt, Homo sapiens
  misc_RNA (1)...(19): siRNA sense strand
ggaaaagagggaacaagaa

SEQ ID NO: 2574077 - RNA, 19 nt, Homo sapiens
  misc_RNA (1)...(19): siRNA sense strand
ggaacaagaaugaacacca

SEQ ID NO: 2574078 - RNA, 19 nt, Homo sapiens
  misc_RNA (1)...(19): siRNA sense strand
aaacaaaaugccuuggaaa

SEQ ID NO: 2574079 - RNA, 19 nt, Homo sapiens
  misc_RNA (1)...(19): siRNA sense strand
uaguauuuguagagagcca

SEQ ID NO: 2574080 - RNA, 19 nt, Homo sapiens
  misc_RNA (1)...(19): siRNA sense strand
uguacagagcuuucaguua

SEQ ID NO: 2574081 - RNA, 19 nt, Homo sapiens
  misc_RNA (1)...(19): siRNA sense strand
ucaccagcacugaagaaua

SEQ ID NO: 2574082 - RNA, 19 nt, Homo sapiens
  misc_RNA (1)...(19): siRNA sense strand
gacaaacgccacagagaca

SEQ ID NO: 2574083 - RNA, 19 nt, Homo sapiens
  misc_RNA (1)...(19): siRNA sense strand
cccagugcuuauagacaaa

SEQ ID NO: 2574084 - RNA, 19 nt, Homo sapiens
  misc_RNA (1)...(19): siRNA sense strand
ucauaaagguuucuggugu

SEQ ID NO: 2574085 - RNA, 19 nt, Homo sapiens
  misc_RNA (1)...(19): siRNA sense strand
gcuacaaacaggaaaauga

SEQ ID NO: 2574086 - RNA, 19 nt, Homo sapiens
  misc_RNA (1)...(19): siRNA sense strand
gcuucaugauggaauucaa

SEQ ID NO: 2574087 - RNA, 19 nt, Homo sapiens
  misc_RNA (1)...(19): siRNA sense strand
caggaacugaagaggaaga

SEQ ID NO: 2574088 - RNA, 19 nt, Homo sapiens
  misc_RNA (1)...(19): siRNA sense strand
uggaagaagguaaaacaaa

SEQ ID NO: 2574089 - RNA, 19 nt, Homo sapiens
  misc_RNA (1)...(19): siRNA sense strand
caggagcugcagaaaguaa

SEQ ID NO: 2574090 - RNA, 19 nt, Homo sapiens
  misc_RNA (1)...(19): siRNA sense strand
cuaauggaagugaaagcaa

SEQ ID NO: 2574091 - RNA, 19 nt, Homo sapiens
  misc_RNA (1)...(19): siRNA sense strand
ccaguaucacauugaaauu

SEQ ID NO: 2574092 - RNA, 19 nt, Homo sapiens
  misc_RNA (1)...(19): siRNA sense strand
auguaaaggcccugcuuga

SEQ ID NO: 2574093 - RNA, 19 nt, Homo sapiens
  misc_RNA (1)...(19): siRNA sense strand
cuuuaugaggccuggaaga

SEQ ID NO: 2574094 - RNA, 19 nt, Homo sapiens
  misc_RNA (1)...(19): siRNA sense strand
gagcaaaggaagaaaauac

SEQ ID NO: 2574095 - RNA, 19 nt, Homo sapiens
  misc_RNA (1)...(19): siRNA sense strand
uagaauauggugugggugu

SEQ ID NO: 2574096 - RNA, 19 nt, Homo sapiens
  misc_RNA (1)...(19): siRNA sense strand
aaguaaagaccccagaaaa

SEQ ID NO: 2574097 - RNA, 19 nt, Homo sapiens
  misc_RNA (1)...(19): siRNA sense strand
cuuggaaagagcaaaggaa

SEQ ID NO: 2574098 - RNA, 19 nt, Homo sapiens
  misc_RNA (1)...(19): siRNA sense strand
uguauuuguuccugguuau

SEQ ID NO: 2574099 - RNA, 19 nt, Homo sapiens
  misc_RNA (1)...(19): siRNA sense strand
cugcuacagugauggauga

SEQ ID NO: 2574100 - RNA, 19 nt, Homo sapiens
  misc_RNA (1)...(19): siRNA sense strand
gaaagagcaaaggaagaaa

SEQ ID NO: 2574101 - RNA, 19 nt, Homo sapiens
  misc_RNA (1)...(19): siRNA sense strand
uagacaaaaugaaaggcaa

SEQ ID NO: 2574102 - RNA, 19 nt, Homo sapiens
  misc_RNA (1)...(19): siRNA sense strand
ugauggaauucaaaggguu

SEQ ID NO: 2574103 - RNA, 19 nt, Homo sapiens
  misc_RNA (1)...(19): siRNA sense strand
uuacauucaaccugggauu

SEQ ID NO: 2574104 - RNA, 19 nt, Homo sapiens
  misc_RNA (1)...(19): siRNA sense strand
gcuagauaccggagggguu

SEQ ID NO: 2574105 - RNA, 19 nt, Homo sapiens
  misc_RNA (1)...(19): siRNA sense strand
gggaaugaccgacugggau

SEQ ID NO: 2574106 - RNA, 19 nt, Homo sapiens
  misc_RNA (1)...(19): siRNA sense strand
gcuacuaucgagaucacaa

SEQ ID NO: 2574107 - RNA, 19 nt, Homo sapiens
  misc_RNA (1)...(19): siRNA sense strand
ccuaucaaccaguaauauu

SEQ ID NO: 2574108 - RNA, 19 nt, Homo sapiens
  misc_RNA (1)...(19): siRNA sense strand
guagagagccaguacucau

SEQ ID NO: 2574109 - RNA, 19 nt, Homo sapiens
  misc_RNA (1)...(19): siRNA sense strand
gcacugaagaauauccaca

SEQ ID NO: 2574110 - RNA, 19 nt, Homo sapiens
  misc_RNA (1)...(19): siRNA sense strand
cagugauggaugaaguaca

SEQ ID NO: 2574111 - RNA, 19 nt, Homo sapiens
  misc_RNA (1)...(19): siRNA sense strand
ggaugaaguacagaaguuu

SEQ ID NO: 2574112 - RNA, 19 nt, Homo sapiens
  misc_RNA (1)...(19): siRNA sense strand
ugagacaggagcugcagaa

SEQ ID NO: 2574113 - RNA, 19 nt, Homo sapiens
  misc_RNA (1)...(19): siRNA sense strand
ggacuuaauuaccaggcaa

SEQ ID NO: 2574114 - RNA, 19 nt, Homo sapiens
  misc_RNA (1)...(19): siRNA sense strand
acagaaaacaccuggaaau

SEQ ID NO: 2574115 - RNA, 19 nt, Homo sapiens
  misc_RNA (1)...(19): siRNA sense strand
auuccauucuugaggacua

SEQ ID NO: 2574116 - RNA, 19 nt, Homo sapiens
  misc_RNA (1)...(19): siRNA sense strand
uccuaaaguaccuggcaaa

SEQ ID NO: 2574117 - RNA, 19 nt, Homo sapiens
  misc_RNA (1)...(19): siRNA sense strand
agaaaagggcccagguaga

SEQ ID NO: 2574118 - RNA, 19 nt, Homo sapiens
  misc_RNA (1)...(19): siRNA sense strand
uggcaguaccagugagacu

SEQ ID NO: 2574119 - RNA, 19 nt, Homo sapiens
  misc_RNA (1)...(19): siRNA sense strand
ucauggaaacacagauaau

SEQ ID NO: 2574120 - RNA, 19 nt, Homo sapiens
  misc_RNA (1)...(19): siRNA sense strand
guuuagugccagcgauuau

SEQ ID NO: 2574121 - RNA, 19 nt, Homo sapiens
  misc_RNA (1)...(19): siRNA sense strand
ccagccuccucgaaagaaa

SEQ ID NO: 2574122 - RNA, 19 nt, Homo sapiens
  misc_RNA (1)...(19): siRNA sense strand
gacuuaauuaccaggcaaa

SEQ ID NO: 2574123 - RNA, 19 nt, Homo sapiens
  misc_RNA (1)...(19): siRNA sense strand
gcaacuuuguuuagugcca

SEQ ID NO: 2574124 - RNA, 19 nt, Homo sapiens
  misc_RNA (1)...(19): siRNA sense strand
aaauggagaugguggcagu

SEQ ID NO: 2574125 - RNA, 19 nt, Homo sapiens
  misc_RNA (1)...(19): siRNA sense strand
aggcaaucgugaaggaaca

SEQ ID NO: 2574126 - RNA, 19 nt, Homo sapiens
  misc_RNA (1)...(19): siRNA sense strand
caucaaagccucugagcag

SEQ ID NO: 2574127 - RNA, 19 nt, Homo sapiens
  misc_RNA (1)...(19): siRNA sense strand
ccugguaccuguauggaga

SEQ ID NO: 2574128 - RNA, 19 nt, Homo sapiens
  misc_RNA (1)...(19): siRNA sense strand
acagaagagaagaacaaaa

SEQ ID NO: 2574129 - RNA, 19 nt, Homo sapiens
  misc_RNA (1)...(19): siRNA sense strand
gaaagggaccucagggcua

SEQ ID NO: 2574130 - RNA, 19 nt, Homo sapiens
  misc_RNA (1)...(19): siRNA sense strand
agagagagagagagagaca

SEQ ID NO: 2574131 - RNA, 19 nt, Homo sapiens
  misc_RNA (1)...(19): siRNA sense strand
uggaacaggaagcgugaaa

SEQ ID NO: 2574132 - RNA, 19 nt, Homo sapiens
  misc_RNA (1)...(19): siRNA sense strand
ggcagaauguggagggacu

SEQ ID NO: 2574133 - RNA, 19 nt, Homo sapiens
  misc_RNA (1)...(19): siRNA sense strand
acagagacagagagagaga

SEQ ID NO: 2574134 - RNA, 19 nt, Homo sapiens
  misc_RNA (1)...(19): siRNA sense strand
agagagagagagagacaca

SEQ ID NO: 2574135 - RNA, 19 nt, Homo sapiens
  misc_RNA (1)...(19): siRNA sense strand
agagacagagagagagaga

SEQ ID NO: 2574136 - RNA, 19 nt, Homo sapiens
  misc_RNA (1)...(19): siRNA sense strand
gagccaugcgagucaacaa

SEQ ID NO: 2574137 - RNA, 19 nt, Homo sapiens
  misc_RNA (1)...(19): siRNA sense strand
agagacagagacagagaga

SEQ ID NO: 2574138 - RNA, 19 nt, Homo sapiens
  misc_RNA (1)...(19): siRNA sense strand
gacccagagaugugagaga

SEQ ID NO: 2574139 - RNA, 19 nt, Homo sapiens
  misc_RNA (1)...(19): siRNA sense strand
cagagaugugagagagagu

SEQ ID NO: 2574140 - RNA, 19 nt, Homo sapiens
  misc_RNA (1)...(19): siRNA sense strand
agagacacagagagagaca

SEQ ID NO: 2574141 - RNA, 19 nt, Homo sapiens
  misc_RNA (1)...(19): siRNA sense strand
cccagagaugugagagaga

SEQ ID NO: 2574142 - RNA, 19 nt, Homo sapiens
  misc_RNA (1)...(19): siRNA sense strand
agagacagagagagagcga

SEQ ID NO: 2574143 - RNA, 19 nt, Homo sapiens
  misc_RNA (1)...(19): siRNA sense strand
ugugagagagagucagaga

SEQ ID NO: 2574144 - RNA, 19 nt, Homo sapiens
  misc_RNA (1)...(19): siRNA sense strand
gggaaauccuagaugucaa

SEQ ID NO: 2574145 - RNA, 19 nt, Homo sapiens
  misc_RNA (1)...(19): siRNA sense strand
uuaaagaacuagagagacu

SEQ ID NO: 2574146 - RNA, 19 nt, Homo sapiens
  misc_RNA (1)...(19): siRNA sense strand
cuuaaaggaaggagaagaa

SEQ ID NO: 2574147 - RNA, 19 nt, Homo sapiens
  misc_RNA (1)...(19): siRNA sense strand
cguagacugucgugggaaa

SEQ ID NO: 2574148 - RNA, 19 nt, Homo sapiens
  misc_RNA (1)...(19): siRNA sense strand
gggugaagucggaauauaa

SEQ ID NO: 2574149 - RNA, 19 nt, Homo sapiens
  misc_RNA (1)...(19): siRNA sense strand
agagaauugucacgggaaa

SEQ ID NO: 2574150 - RNA, 19 nt, Homo sapiens
  misc_RNA (1)...(19): siRNA sense strand
ggggaaaggauaagagauu

SEQ ID NO: 2574151 - RNA, 19 nt, Homo sapiens
  misc_RNA (1)...(19): siRNA sense strand
aguuguaucuggauggaaa

SEQ ID NO: 2574152 - RNA, 19 nt, Homo sapiens
  misc_RNA (1)...(19): siRNA sense strand
uggaaaaugugcagcauaa

SEQ ID NO: 2574153 - RNA, 19 nt, Homo sapiens
  misc_RNA (1)...(19): siRNA sense strand
gagaauaagauuagcacca

SEQ ID NO: 2574154 - RNA, 19 nt, Homo sapiens
  misc_RNA (1)...(19): siRNA sense strand
cagaaauacguuuggaaca

SEQ ID NO: 2574155 - RNA, 19 nt, Homo sapiens
  misc_RNA (1)...(19): siRNA sense strand
uggagaaauggcagauaaa

SEQ ID NO: 2574156 - RNA, 19 nt, Homo sapiens
  misc_RNA (1)...(19): siRNA sense strand
ccacuuaaaggaaggagaa

SEQ ID NO: 2574157 - RNA, 19 nt, Homo sapiens
  misc_RNA (1)...(19): siRNA sense strand
auaagauguucaagggauu

SEQ ID NO: 2574158 - RNA, 19 nt, Homo sapiens
  misc_RNA (1)...(19): siRNA sense strand
ugggagaguggcugagaaa

SEQ ID NO: 2574159 - RNA, 19 nt, Homo sapiens
  misc_RNA (1)...(19): siRNA sense strand
guugagaagcaaucgaaua

SEQ ID NO: 2574160 - RNA, 19 nt, Homo sapiens
  misc_RNA (1)...(19): siRNA sense strand
acaacaagcuucagaccau

SEQ ID NO: 2574161 - RNA, 19 nt, Homo sapiens
  misc_RNA (1)...(19): siRNA sense strand
ccauacuuccugaaagaaa

SEQ ID NO: 2574162 - RNA, 19 nt, Homo sapiens
  misc_RNA (1)...(19): siRNA sense strand
caguguaucgucagaauaa

SEQ ID NO: 2574163 - RNA, 19 nt, Homo sapiens
  misc_RNA (1)...(19): siRNA sense strand
uugagaagcaaucgaauaa

SEQ ID NO: 2574164 - RNA, 19 nt, Homo sapiens
  misc_RNA (1)...(19): siRNA sense strand
guuugaaggucuugccgaa

SEQ ID NO: 2574165 - RNA, 19 nt, Homo sapiens
  misc_RNA (1)...(19): siRNA sense strand
gcauaugccccgaagguua

SEQ ID NO: 2574166 - RNA, 19 nt, Homo sapiens
  misc_RNA (1)...(19): siRNA sense strand
agaauuacgaagacagauu

SEQ ID NO: 2574167 - RNA, 19 nt, Homo sapiens
  misc_RNA (1)...(19): siRNA sense strand
cagcuaaagaacaguauuu

SEQ ID NO: 2574168 - RNA, 19 nt, Homo sapiens
  misc_RNA (1)...(19): siRNA sense strand
cauaagauguucaagggau

SEQ ID NO: 2574169 - RNA, 19 nt, Homo sapiens
  misc_RNA (1)...(19): siRNA sense strand
gagaaauggcagauaaacu

SEQ ID NO: 2574170 - RNA, 19 nt, Homo sapiens
  misc_RNA (1)...(19): siRNA sense strand
cguugaugauugugaagau

SEQ ID NO: 2574171 - RNA, 19 nt, Homo sapiens
  misc_RNA (1)...(19): siRNA sense strand
cagaaggugccgaugcaaa

SEQ ID NO: 2574172 - RNA, 19 nt, Homo sapiens
  misc_RNA (1)...(19): siRNA sense strand
cgucagaauaaaugagcca

SEQ ID NO: 2574173 - RNA, 19 nt, Homo sapiens
  misc_RNA (1)...(19): siRNA sense strand
cucuaaaccucuuggccaa

SEQ ID NO: 2574174 - RNA, 19 nt, Homo sapiens
  misc_RNA (1)...(19): siRNA sense strand
ugauggauuugaaggagaa

SEQ ID NO: 2574175 - RNA, 19 nt, Homo sapiens
  misc_RNA (1)...(19): siRNA sense strand
acagaagauuaucgaucaa

SEQ ID NO: 2574176 - RNA, 19 nt, Homo sapiens
  misc_RNA (1)...(19): siRNA sense strand
aaggagaagaagauggauu

SEQ ID NO: 2574177 - RNA, 19 nt, Homo sapiens
  misc_RNA (1)...(19): siRNA sense strand
aggcuugaucucagugaaa

SEQ ID NO: 2574178 - RNA, 19 nt, Homo sapiens
  misc_RNA (1)...(19): siRNA sense strand
cuacaugugucgauggcau

SEQ ID NO: 2574179 - RNA, 19 nt, Homo sapiens
  misc_RNA (1)...(19): siRNA sense strand
caucaguaacccauguaaa

SEQ ID NO: 2574180 - RNA, 19 nt, Homo sapiens
  misc_RNA (1)...(19): siRNA sense strand
gauuagcaccauugaaaga

SEQ ID NO: 2574181 - RNA, 19 nt, Homo sapiens
  misc_RNA (1)...(19): siRNA sense strand
gagcauuccaggaucuuaa

SEQ ID NO: 2574182 - RNA, 19 nt, Homo sapiens
  misc_RNA (1)...(19): siRNA sense strand
gaauauaaggagccuggaa

SEQ ID NO: 2574183 - RNA, 19 nt, Homo sapiens
  misc_RNA (1)...(19): siRNA sense strand
gugaguugugugaggagaa

SEQ ID NO: 2574184 - RNA, 19 nt, Homo sapiens
  misc_RNA (1)...(19): siRNA sense strand
cuaucaaauccguguaaaa

SEQ ID NO: 2574185 - RNA, 19 nt, Homo sapiens
  misc_RNA (1)...(19): siRNA sense strand
uguauaagggugacaaaga

SEQ ID NO: 2574186 - RNA, 19 nt, Homo sapiens
  misc_RNA (1)...(19): siRNA sense strand
ggaacagaacacaaucaaa

SEQ ID NO: 2574187 - RNA, 19 nt, Homo sapiens
  misc_RNA (1)...(19): siRNA sense strand
ggacagaucaaaagcaaga

SEQ ID NO: 2574188 - RNA, 19 nt, Homo sapiens
  misc_RNA (1)...(19): siRNA sense strand
cgaguaaucguuuggaaaa

SEQ ID NO: 2574189 - RNA, 19 nt, Homo sapiens
  misc_RNA (1)...(19): siRNA sense strand
agaaagaagagaauuguca

SEQ ID NO: 2574190 - RNA, 19 nt, Homo sapiens
  misc_RNA (1)...(19): siRNA sense strand
gugaugaagaggaggaucu

SEQ ID NO: 2574191 - RNA, 19 nt, Homo sapiens
  misc_RNA (1)...(19): siRNA sense strand
caacaauaucguagacugu

SEQ ID NO: 2574192 - RNA, 19 nt, Homo sapiens
  misc_RNA (1)...(19): siRNA sense strand
cugauggauuugaaggaga

SEQ ID NO: 2574193 - RNA, 19 nt, Homo sapiens
  misc_RNA (1)...(19): siRNA sense strand
gggcuaugcugcuugccaa

SEQ ID NO: 2574194 - RNA, 19 nt, Homo sapiens
  misc_RNA (1)...(19): siRNA sense strand
guaagugcuuggagggcca

SEQ ID NO: 2574195 - RNA, 19 nt, Homo sapiens
  misc_RNA (1)...(19): siRNA sense strand
guaucuggauggaaaccaa

SEQ ID NO: 2574196 - RNA, 19 nt, Homo sapiens
  misc_RNA (1)...(19): siRNA sense strand
caagacaacaaguguaaaa

SEQ ID NO: 2574197 - RNA, 19 nt, Homo sapiens
  misc_RNA (1)...(19): siRNA sense strand
uggcugagaaagaagagaa

SEQ ID NO: 2574198 - RNA, 19 nt, Homo sapiens
  misc_RNA (1)...(19): siRNA sense strand
cugagaaagaagagaauug

SEQ ID NO: 2574199 - RNA, 19 nt, Homo sapiens
  misc_RNA (1)...(19): siRNA sense strand
aaccauacuuccugaaaga

SEQ ID NO: 2574200 - RNA, 19 nt, Homo sapiens
  misc_RNA (1)...(19): siRNA sense strand
guggcaaguuucaaccaua

SEQ ID NO: 2574201 - RNA, 19 nt, Homo sapiens
  misc_RNA (1)...(19): siRNA sense strand
caaaagaauuggacagauc

SEQ ID NO: 2574202 - RNA, 19 nt, Homo sapiens
  misc_RNA (1)...(19): siRNA sense strand
auauaaggagccuggaauu

SEQ ID NO: 2574203 - RNA, 19 nt, Homo sapiens
  misc_RNA (1)...(19): siRNA sense strand
ucagauugccacagaugaa

SEQ ID NO: 2574204 - RNA, 19 nt, Homo sapiens
  misc_RNA (1)...(19): siRNA sense strand
ccuguauaagggugacaaa

SEQ ID NO: 2574205 - RNA, 19 nt, Homo sapiens
  misc_RNA (1)...(19): siRNA sense strand
ccugagaggccauaaugua

SEQ ID NO: 2574206 - RNA, 19 nt, Homo sapiens
  misc_RNA (1)...(19): siRNA sense strand
ugaaauacuucuuacgagu

SEQ ID NO: 2574207 - RNA, 19 nt, Homo sapiens
  misc_RNA (1)...(19): siRNA sense strand
aagaggaggaucuguuuaa

SEQ ID NO: 2574208 - RNA, 19 nt, Homo sapiens
  misc_RNA (1)...(19): siRNA sense strand
gcaacuuggcagagagaau

SEQ ID NO: 2574209 - RNA, 19 nt, Homo sapiens
  misc_RNA (1)...(19): siRNA sense strand
gcaggaaauaugugagcaa

SEQ ID NO: 2574210 - RNA, 19 nt, Homo sapiens
  misc_RNA (1)...(19): siRNA sense strand
cgggagagcauuaaggauu

SEQ ID NO: 2574211 - RNA, 19 nt, Homo sapiens
  misc_RNA (1)...(19): siRNA sense strand
ucaaaguacaggaggccaa

SEQ ID NO: 2574212 - RNA, 19 nt, Homo sapiens
  misc_RNA (1)...(19): siRNA sense strand
gcauuaaggauuuggcuga

SEQ ID NO: 2574213 - RNA, 19 nt, Homo sapiens
  misc_RNA (1)...(19): siRNA sense strand
gaucgaggugaaugggaua

SEQ ID NO: 2574214 - RNA, 19 nt, Homo sapiens
  misc_RNA (1)...(19): siRNA sense strand
gggaauaugauuauggcuu

SEQ ID NO: 2574215 - RNA, 19 nt, Homo sapiens
  misc_RNA (1)...(19): siRNA sense strand
ggccaaacacagaacuaaa

SEQ ID NO: 2574216 - RNA, 19 nt, Homo sapiens
  misc_RNA (1)...(19): siRNA sense strand
ccaacaacaggaagaggaa

SEQ ID NO: 2574217 - RNA, 19 nt, Homo sapiens
  misc_RNA (1)...(19): siRNA sense strand
ugaaugaugaagaacgaaa

SEQ ID NO: 2574218 - RNA, 19 nt, Homo sapiens
  misc_RNA (1)...(19): siRNA sense strand
cuggaagcauagaaagaau

SEQ ID NO: 2574219 - RNA, 19 nt, Homo sapiens
  misc_RNA (1)...(19): siRNA sense strand
caagauaaagauucagcaa

SEQ ID NO: 2574220 - RNA, 19 nt, Homo sapiens
  misc_RNA (1)...(19): siRNA sense strand
ugauauuggaugaggaagu

SEQ ID NO: 2574221 - RNA, 19 nt, Homo sapiens
  misc_RNA (1)...(19): siRNA sense strand
guugaaugaugaagaacga

SEQ ID NO: 2574222 - RNA, 19 nt, Homo sapiens
  misc_RNA (1)...(19): siRNA sense strand
ggaucgaggugaaugggau

SEQ ID NO: 2574223 - RNA, 19 nt, Homo sapiens
  misc_RNA (1)...(19): siRNA sense strand
gucaaggacuucagcgaau

SEQ ID NO: 2574224 - RNA, 19 nt, Homo sapiens
  misc_RNA (1)...(19): siRNA sense strand
aauaaauaagccugggaau

SEQ ID NO: 2574225 - RNA, 19 nt, Homo sapiens
  misc_RNA (1)...(19): siRNA sense strand
uugcaugaucagaugguaa

SEQ ID NO: 2574226 - RNA, 19 nt, Homo sapiens
  misc_RNA (1)...(19): siRNA sense strand
caguauuugagcaagauaa

SEQ ID NO: 2574227 - RNA, 19 nt, Homo sapiens
  misc_RNA (1)...(19): siRNA sense strand
ugggaguaauucugaguau

SEQ ID NO: 2574228 - RNA, 19 nt, Homo sapiens
  misc_RNA (1)...(19): siRNA sense strand
ucauugaagccuugauauu

SEQ ID NO: 2574229 - RNA, 19 nt, Homo sapiens
  misc_RNA (1)...(19): siRNA sense strand
ccaaaacauccaugagcaa

SEQ ID NO: 2574230 - RNA, 19 nt, Homo sapiens
  misc_RNA (1)...(19): siRNA sense strand
gcuacagcucuuuggcuua

SEQ ID NO: 2574231 - RNA, 19 nt, Homo sapiens
  misc_RNA (1)...(19): siRNA sense strand
acaugagagguuuggacaa

SEQ ID NO: 2574232 - RNA, 19 nt, Homo sapiens
  misc_RNA (1)...(19): siRNA sense strand
ugucagagagccuggauga

SEQ ID NO: 2574233 - RNA, 19 nt, Homo sapiens
  misc_RNA (1)...(19): siRNA sense strand
gagccaaggaagagauuac

SEQ ID NO: 2574234 - RNA, 19 nt, Homo sapiens
  misc_RNA (1)...(19): siRNA sense strand
gaacauuuccagaagucau

SEQ ID NO: 2574235 - RNA, 19 nt, Homo sapiens
  misc_RNA (1)...(19): siRNA sense strand
ggaugaggaaguuagaaca

SEQ ID NO: 2574236 - RNA, 19 nt, Homo sapiens
  misc_RNA (1)...(19): siRNA sense strand
aguuagaacauuuccagaa

SEQ ID NO: 2574237 - RNA, 19 nt, Homo sapiens
  misc_RNA (1)...(19): siRNA sense strand
ggacccuaccaaugggcaa

SEQ ID NO: 2574238 - RNA, 19 nt, Homo sapiens
  misc_RNA (1)...(19): siRNA sense strand
ccaaacuagcagagguguu

SEQ ID NO: 2574239 - RNA, 19 nt, Homo sapiens
  misc_RNA (1)...(19): siRNA sense strand
ugacuaugccucuaagaau

SEQ ID NO: 2574240 - RNA, 19 nt, Homo sapiens
  misc_RNA (1)...(19): siRNA sense strand
ccaaggaagagauuaccaa

SEQ ID NO: 2574241 - RNA, 19 nt, Homo sapiens
  misc_RNA (1)...(19): siRNA sense strand
cacuggaagcauagaaaga

SEQ ID NO: 2574242 - RNA, 19 nt, Homo sapiens
  misc_RNA (1)...(19): siRNA sense strand
ugauuauggcuuucagcaa

SEQ ID NO: 2574243 - RNA, 19 nt, Homo sapiens
  misc_RNA (1)...(19): siRNA sense strand
agaucuauguugaccaaaa

SEQ ID NO: 2574244 - RNA, 19 nt, Homo sapiens
  misc_RNA (1)...(19): siRNA sense strand
acaccuuguacuugggauu

SEQ ID NO: 2574245 - RNA, 19 nt, Homo sapiens
  misc_RNA (1)...(19): siRNA sense strand
ucaacuggccauaggcaau

SEQ ID NO: 2574246 - RNA, 19 nt, Homo sapiens
  misc_RNA (1)...(19): siRNA sense strand
ugaacuacuuccugcaaca

SEQ ID NO: 2574247 - RNA, 19 nt, Homo sapiens
  misc_RNA (1)...(19): siRNA sense strand
aguacaugaacaagaucua

SEQ ID NO: 2574248 - RNA, 19 nt, Homo sapiens
  misc_RNA (1)...(19): siRNA sense strand
ccgcuuugccgaugacauu

SEQ ID NO: 2574249 - RNA, 19 nt, Homo sapiens
  misc_RNA (1)...(19): siRNA sense strand
cuacuuaaaucuuggggau

SEQ ID NO: 2574250 - RNA, 19 nt, Homo sapiens
  misc_RNA (1)...(19): siRNA sense strand
aggaaauaugugagcaacu

SEQ ID NO: 2574251 - RNA, 19 nt, Homo sapiens
  misc_RNA (1)...(19): siRNA sense strand
aagccuugauauuggauga

SEQ ID NO: 2574252 - RNA, 19 nt, Homo sapiens
  misc_RNA (1)...(19): siRNA sense strand
cuugauauuggaugaggaa

SEQ ID NO: 2574253 - RNA, 19 nt, Homo sapiens
  misc_RNA (1)...(19): siRNA sense strand
gaugaggaaguuagaacau

SEQ ID NO: 2574254 - RNA, 19 nt, Homo sapiens
  misc_RNA (1)...(19): siRNA sense strand
caggcaaccacuuaauuaa

SEQ ID NO: 2574255 - RNA, 19 nt, Homo sapiens
  misc_RNA (1)...(19): siRNA sense strand
cgugaguacaugaacaaga

SEQ ID NO: 2574256 - RNA, 19 nt, Homo sapiens
  misc_RNA (1)...(19): siRNA sense strand
gccaaucagaugccagaaa

SEQ ID NO: 2574257 - RNA, 19 nt, Homo sapiens
  misc_RNA (1)...(19): siRNA sense strand
cagcaaaguucuagcccug

SEQ ID NO: 2574258 - RNA, 19 nt, Homo sapiens
  misc_RNA (1)...(19): siRNA sense strand
ggcaguagagcuagaagau

SEQ ID NO: 2574259 - RNA, 19 nt, Homo sapiens
  misc_RNA (1)...(19): siRNA sense strand
ugguagauuugauguuaga

SEQ ID NO: 2574260 - RNA, 19 nt, Homo sapiens
  misc_RNA (1)...(19): siRNA sense strand
aauaaaagaucuagagcuc

SEQ ID NO: 2574261 - RNA, 19 nt, Homo sapiens
  misc_RNA (1)...(19): siRNA sense strand
ggugaaugggauagucuga

SEQ ID NO: 2574262 - RNA, 19 nt, Homo sapiens
  misc_RNA (1)...(19): siRNA sense strand
cucuauuucacuaggcaaa

SEQ ID NO: 2574263 - RNA, 19 nt, Homo sapiens
  misc_RNA (1)...(19): siRNA sense strand
gaaugaugaagaacgaaaa

SEQ ID NO: 2574264 - RNA, 19 nt, Homo sapiens
  misc_RNA (1)...(19): siRNA sense strand
ggaaacaacaaaaggagca

SEQ ID NO: 2574265 - RNA, 19 nt, Homo sapiens
  misc_RNA (1)...(19): siRNA sense strand
ucuaccagaugcugaagaa

SEQ ID NO: 2574266 - RNA, 19 nt, Homo sapiens
  misc_RNA (1)...(19): siRNA sense strand
cagcaaauugagaaggauc

SEQ ID NO: 2574267 - RNA, 19 nt, Homo sapiens
  misc_RNA (1)...(19): siRNA sense strand
aagccugggaauaugauua

SEQ ID NO: 2574268 - RNA, 19 nt, Homo sapiens
  misc_RNA (1)...(19): siRNA sense strand
cugccaucuuccagaguca

SEQ ID NO: 2574269 - RNA, 19 nt, Homo sapiens
  misc_RNA (1)...(19): siRNA sense strand
ugacaaucuucgugagcag

SEQ ID NO: 2574270 - RNA, 19 nt, Homo sapiens
  misc_RNA (1)...(19): siRNA sense strand
agaaauauguggaggccau

SEQ ID NO: 2574271 - RNA, 19 nt, Homo sapiens
  misc_RNA (1)...(19): siRNA sense strand
ggacaguguaauugcggaa

SEQ ID NO: 2574272 - RNA, 19 nt, Homo sapiens
  misc_RNA (1)...(19): siRNA sense strand
ucucauuuguacagggaau

SEQ ID NO: 2574273 - RNA, 19 nt, Homo sapiens
  misc_RNA (1)...(19): siRNA sense strand
cugcaaggcugguuggcau

SEQ ID NO: 2574274 - RNA, 19 nt, Homo sapiens
  misc_RNA (1)...(19): siRNA sense strand
gugaagaccucgauggugu

SEQ ID NO: 2574275 - RNA, 19 nt, Homo sapiens
  misc_RNA (1)...(19): siRNA sense strand
ccucaaagcuucucgccau

SEQ ID NO: 2574276 - RNA, 19 nt, Homo sapiens
  misc_RNA (1)...(19): siRNA sense strand
gagugugacgauagagaau

SEQ ID NO: 2574277 - RNA, 19 nt, Homo sapiens
  misc_RNA (1)...(19): siRNA sense strand
ugguuggcauggagauaaa

SEQ ID NO: 2574278 - RNA, 19 nt, Homo sapiens
  misc_RNA (1)...(19): siRNA sense strand
ugugaauuccagugcgaua

SEQ ID NO: 2574279 - RNA, 19 nt, Homo sapiens
  misc_RNA (1)...(19): siRNA sense strand
ggauggauggaauggaaau

SEQ ID NO: 2574280 - RNA, 19 nt, Homo sapiens
  misc_RNA (1)...(19): siRNA sense strand
agcaagaaucugugugaau

SEQ ID NO: 2574281 - RNA, 19 nt, Homo sapiens
  misc_RNA (1)...(19): siRNA sense strand
gggauggauggaauggaaa

SEQ ID NO: 2574282 - RNA, 19 nt, Homo sapiens
  misc_RNA (1)...(19): siRNA sense strand
gugaaugugaugagaggga

SEQ ID NO: 2574283 - RNA, 19 nt, Homo sapiens
  misc_RNA (1)...(19): siRNA sense strand
ugacggaagaacaaagcaa

SEQ ID NO: 2574284 - RNA, 19 nt, Homo sapiens
  misc_RNA (1)...(19): siRNA sense strand
uggaaaugcaugugaaauc

SEQ ID NO: 2574285 - RNA, 19 nt, Homo sapiens
  misc_RNA (1)...(19): siRNA sense strand
gugacuugacaaagaagaa

SEQ ID NO: 2574286 - RNA, 19 nt, Homo sapiens
  misc_RNA (1)...(19): siRNA sense strand
ucgcuguguuugugagaga

SEQ ID NO: 2574287 - RNA, 19 nt, Homo sapiens
  misc_RNA (1)...(19): siRNA sense strand
ugggaaagcaagcgaagau

SEQ ID NO: 2574288 - RNA, 19 nt, Homo sapiens
  misc_RNA (1)...(19): siRNA sense strand
guaacaugacggaagaaca

SEQ ID NO: 2574289 - RNA, 19 nt, Homo sapiens
  misc_RNA (1)...(19): siRNA sense strand
uuguacagggaauggaaua

SEQ ID NO: 2574290 - RNA, 19 nt, Homo sapiens
  misc_RNA (1)...(19): siRNA sense strand
cgacaaacaugauggucuc

SEQ ID NO: 2574291 - RNA, 19 nt, Homo sapiens
  misc_RNA (1)...(19): siRNA sense strand
cuaacugugacuugacaaa

SEQ ID NO: 2574292 - RNA, 19 nt, Homo sapiens
  misc_RNA (1)...(19): siRNA sense strand
gcgacaaacaugauggucu

SEQ ID NO: 2574293 - RNA, 19 nt, Homo sapiens
  misc_RNA (1)...(19): siRNA sense strand
cugcaguaacagagggacu

SEQ ID NO: 2574294 - RNA, 19 nt, Homo sapiens
  misc_RNA (1)...(19): siRNA sense strand
ggcagguguaagugugaua

SEQ ID NO: 2574295 - RNA, 19 nt, Homo sapiens
  misc_RNA (1)...(19): siRNA sense strand
agagaggaugguuuggaaa

SEQ ID NO: 2574296 - RNA, 19 nt, Homo sapiens
  misc_RNA (1)...(19): siRNA sense strand
gcggaagaugugacugcaa

SEQ ID NO: 2574297 - RNA, 19 nt, Homo sapiens
  misc_RNA (1)...(19): siRNA sense strand
aauggaaaugcaugugaaa

SEQ ID NO: 2574298 - RNA, 19 nt, Homo sapiens
  misc_RNA (1)...(19): siRNA sense strand
acggaagaacaaagcaaga

SEQ ID NO: 2574299 - RNA, 19 nt, Homo sapiens
  misc_RNA (1)...(19): siRNA sense strand
cggaagaacaaagcaagaa

SEQ ID NO: 2574300 - RNA, 19 nt, Homo sapiens
  misc_RNA (1)...(19): siRNA sense strand
gugaaucagcagauggcau

SEQ ID NO: 2574301 - RNA, 19 nt, Homo sapiens
  misc_RNA (1)...(19): siRNA sense strand
ugguaaauuuugugagugu

SEQ ID NO: 2574302 - RNA, 19 nt, Homo sapiens
  misc_RNA (1)...(19): siRNA sense strand
caugagugggugugcgaga

SEQ ID NO: 2574303 - RNA, 19 nt, Homo sapiens
  misc_RNA (1)...(19): siRNA sense strand
gcugguuggcauggagaua

SEQ ID NO: 2574304 - RNA, 19 nt, Homo sapiens
  misc_RNA (1)...(19): siRNA sense strand
gagcugucuaugaccgaua

SEQ ID NO: 2574305 - RNA, 19 nt, Homo sapiens
  misc_RNA (1)...(19): siRNA sense strand
cauugugggaagugcauuu

SEQ ID NO: 2574306 - RNA, 19 nt, Homo sapiens
  misc_RNA (1)...(19): siRNA sense strand
augcugggauggauggaau

SEQ ID NO: 2574307 - RNA, 19 nt, Homo sapiens
  misc_RNA (1)...(19): siRNA sense strand
gguaaaugugaauguggca

SEQ ID NO: 2574308 - RNA, 19 nt, Homo sapiens
  misc_RNA (1)...(19): siRNA sense strand
uggacuuguguaugguaaa

SEQ ID NO: 2574309 - RNA, 19 nt, Homo sapiens
  misc_RNA (1)...(19): siRNA sense strand
guggaaacugcuacugcaa

SEQ ID NO: 2574310 - RNA, 19 nt, Homo sapiens
  misc_RNA (1)...(19): siRNA sense strand
gaaugugaugagagggacu

SEQ ID NO: 2574311 - RNA, 19 nt, Homo sapiens
  misc_RNA (1)...(19): siRNA sense strand
gcacgucuccagauggcaa

SEQ ID NO: 2574312 - RNA, 19 nt, Homo sapiens
  misc_RNA (1)...(19): siRNA sense strand
ugauaauucagauggaagu

SEQ ID NO: 2574313 - RNA, 19 nt, Homo sapiens
  misc_RNA (1)...(19): siRNA sense strand
gagagggacuguagagcug

SEQ ID NO: 2574314 - RNA, 19 nt, Homo sapiens
  misc_RNA (1)...(19): siRNA sense strand
gcauauugugcucggggaa

SEQ ID NO: 2574315 - RNA, 19 nt, Homo sapiens
  misc_RNA (1)...(19): siRNA sense strand
gaguaagagcaaagagaaa

SEQ ID NO: 2574316 - RNA, 19 nt, Homo sapiens
  misc_RNA (1)...(19): siRNA sense strand
agagagagagaaagggaaa

SEQ ID NO: 2574317 - RNA, 19 nt, Homo sapiens
  misc_RNA (1)...(19): siRNA sense strand
gaguaaagaaagagauuca

SEQ ID NO: 2574318 - RNA, 19 nt, Homo sapiens
  misc_RNA (1)...(19): siRNA sense strand
aagcagaaacaaagacaaa

SEQ ID NO: 2574319 - RNA, 19 nt, Homo sapiens
  misc_RNA (1)...(19): siRNA sense strand
gaaaagaggaugaggucaa

SEQ ID NO: 2574320 - RNA, 19 nt, Homo sapiens
  misc_RNA (1)...(19): siRNA sense strand
aguaaagauaggaggagaa

SEQ ID NO: 2574321 - RNA, 19 nt, Homo sapiens
  misc_RNA (1)...(19): siRNA sense strand
gauacagagaacaggaaua

SEQ ID NO: 2574322 - RNA, 19 nt, Homo sapiens
  misc_RNA (1)...(19): siRNA sense strand
gaagaaaagaaaaggcaua

SEQ ID NO: 2574323 - RNA, 19 nt, Homo sapiens
  misc_RNA (1)...(19): siRNA sense strand
aggaagaucaagaaguaaa

SEQ ID NO: 2574324 - RNA, 19 nt, Homo sapiens
  misc_RNA (1)...(19): siRNA sense strand
cgaaaacacaagaaagaaa

SEQ ID NO: 2574325 - RNA, 19 nt, Homo sapiens
  misc_RNA (1)...(19): siRNA sense strand
cgggaaaucaacucagaaa

SEQ ID NO: 2574326 - RNA, 19 nt, Homo sapiens
  misc_RNA (1)...(19): siRNA sense strand
agacaaauacagaaaccaa

SEQ ID NO: 2574327 - RNA, 19 nt, Homo sapiens
  misc_RNA (1)...(19): siRNA sense strand
aauuaaaggaagaggacca

SEQ ID NO: 2574328 - RNA, 19 nt, Homo sapiens
  misc_RNA (1)...(19): siRNA sense strand
agaagaaagucaaagcaga

SEQ ID NO: 2574329 - RNA, 19 nt, Homo sapiens
  misc_RNA (1)...(19): siRNA sense strand
agaaguuguaagagagauu

SEQ ID NO: 2574330 - RNA, 19 nt, Homo sapiens
  misc_RNA (1)...(19): siRNA sense strand
caggaaaauuaaaggaaga

SEQ ID NO: 2574331 - RNA, 19 nt, Homo sapiens
  misc_RNA (1)...(19): siRNA sense strand
gaugagaaggaaaggaaaa

SEQ ID NO: 2574332 - RNA, 19 nt, Homo sapiens
  misc_RNA (1)...(19): siRNA sense strand
aggagaaggaggagagacu

SEQ ID NO: 2574333 - RNA, 19 nt, Homo sapiens
  misc_RNA (1)...(19): siRNA sense strand
aagucaaagcagaaacaaa

SEQ ID NO: 2574334 - RNA, 19 nt, Homo sapiens
  misc_RNA (1)...(19): siRNA sense strand
uagcagaacaagagaacga

SEQ ID NO: 2574335 - RNA, 19 nt, Homo sapiens
  misc_RNA (1)...(19): siRNA sense strand
agaagaaaguuaaagacca

SEQ ID NO: 2574336 - RNA, 19 nt, Homo sapiens
  misc_RNA (1)...(19): siRNA sense strand
agagaaagggaaagagagu

SEQ ID NO: 2574337 - RNA, 19 nt, Homo sapiens
  misc_RNA (1)...(19): siRNA sense strand
aggaguagagaaugugaua

SEQ ID NO: 2574338 - RNA, 19 nt, Homo sapiens
  misc_RNA (1)...(19): siRNA sense strand
aaacaaagcagucaggaca

SEQ ID NO: 2574339 - RNA, 19 nt, Homo sapiens
  misc_RNA (1)...(19): siRNA sense strand
cagucaggacaaugaauua

SEQ ID NO: 2574340 - RNA, 19 nt, Homo sapiens
  misc_RNA (1)...(19): siRNA sense strand
gagaaggaggagagacuca

SEQ ID NO: 2574341 - RNA, 19 nt, Homo sapiens
  misc_RNA (1)...(19): siRNA sense strand
gccaacagagggaaggaua

SEQ ID NO: 2574342 - RNA, 19 nt, Homo sapiens
  misc_RNA (1)...(19): siRNA sense strand
cgaagcagaaguagggaca

SEQ ID NO: 2574343 - RNA, 19 nt, Homo sapiens
  misc_RNA (1)...(19): siRNA sense strand
aagugcuacugaagagaaa

SEQ ID NO: 2574344 - RNA, 19 nt, Homo sapiens
  misc_RNA (1)...(19): siRNA sense strand
cugaugagaaggaaaggaa

SEQ ID NO: 2574345 - RNA, 19 nt, Homo sapiens
  misc_RNA (1)...(19): siRNA sense strand
agagagaaagggaaagaga

SEQ ID NO: 2574346 - RNA, 19 nt, Homo sapiens
  misc_RNA (1)...(19): siRNA sense strand
agaaagggaaagagagugu

SEQ ID NO: 2574347 - RNA, 19 nt, Homo sapiens
  misc_RNA (1)...(19): siRNA sense strand
aggucaaggaguaaaggaa

SEQ ID NO: 2574348 - RNA, 19 nt, Homo sapiens
  misc_RNA (1)...(19): siRNA sense strand
gagcaugaucacaguaaaa

SEQ ID NO: 2574349 - RNA, 19 nt, Homo sapiens
  misc_RNA (1)...(19): siRNA sense strand
caauccaggaguagagaau

SEQ ID NO: 2574350 - RNA, 19 nt, Homo sapiens
  misc_RNA (1)...(19): siRNA sense strand
ccacauuggaggcaagaga

SEQ ID NO: 2574351 - RNA, 19 nt, Homo sapiens
  misc_RNA (1)...(19): siRNA sense strand
auacagaaaccaagagagu

SEQ ID NO: 2574352 - RNA, 19 nt, Homo sapiens
  misc_RNA (1)...(19): siRNA sense strand
acaaguaaucucuggucaa

SEQ ID NO: 2574353 - RNA, 19 nt, Homo sapiens
  misc_RNA (1)...(19): siRNA sense strand
aggaagggaucaugaaaau

SEQ ID NO: 2574354 - RNA, 19 nt, Homo sapiens
  misc_RNA (1)...(19): siRNA sense strand
ugacagagaucgcagcaga

SEQ ID NO: 2574355 - RNA, 19 nt, Homo sapiens
  misc_RNA (1)...(19): siRNA sense strand
caggagaagaggacgguca

SEQ ID NO: 2574356 - RNA, 19 nt, Homo sapiens
  misc_RNA (1)...(19): siRNA sense strand
guaagagcucacacagaaa

SEQ ID NO: 2574357 - RNA, 19 nt, Homo sapiens
  misc_RNA (1)...(19): siRNA sense strand
gguucaagguggugacuuc

SEQ ID NO: 2574358 - RNA, 19 nt, Homo sapiens
  misc_RNA (1)...(19): siRNA sense strand
cagcaaagagagagacauc

SEQ ID NO: 2574359 - RNA, 19 nt, Homo sapiens
  misc_RNA (1)...(19): siRNA sense strand
aggaguagaaguaaagaga

SEQ ID NO: 2574360 - RNA, 19 nt, Homo sapiens
  misc_RNA (1)...(19): siRNA sense strand
gagcucagagagagaagaa

SEQ ID NO: 2574361 - RNA, 19 nt, Homo sapiens
  misc_RNA (1)...(19): siRNA sense strand
auaaggaggaugagaagau

SEQ ID NO: 2574362 - RNA, 19 nt, Homo sapiens
  misc_RNA (1)...(19): siRNA sense strand
ggaugaggucaaggaguaa

SEQ ID NO: 2574363 - RNA, 19 nt, Homo sapiens
  misc_RNA (1)...(19): siRNA sense strand
cagaagagugcgaucaaga

SEQ ID NO: 2574364 - RNA, 19 nt, Homo sapiens
  misc_RNA (1)...(19): siRNA sense strand
gucacgaagccgagagaga

SEQ ID NO: 2574365 - RNA, 19 nt, Homo sapiens
  misc_RNA (1)...(19): siRNA sense strand
aaagggaaagagaguguaa

SEQ ID NO: 2574366 - RNA, 19 nt, Homo sapiens
  misc_RNA (1)...(19): siRNA sense strand
aggagaagaaaguuaaaga

SEQ ID NO: 2574367 - RNA, 19 nt, Homo sapiens
  misc_RNA (1)...(19): siRNA sense strand
aggaguaagagcaaagaga

SEQ ID NO: 2574368 - RNA, 19 nt, Homo sapiens
  misc_RNA (1)...(19): siRNA sense strand
agucugauucuaaaggaaa

SEQ ID NO: 2574369 - RNA, 19 nt, Homo sapiens
  misc_RNA (1)...(19): siRNA sense strand
aggcauaaaucaucaucau

SEQ ID NO: 2574370 - RNA, 19 nt, Homo sapiens
  misc_RNA (1)...(19): siRNA sense strand
cgaaagaaaagcaagaaga

SEQ ID NO: 2574371 - RNA, 19 nt, Homo sapiens
  misc_RNA (1)...(19): siRNA sense strand
uuucagacguagugagacu

SEQ ID NO: 2574372 - RNA, 19 nt, Homo sapiens
  misc_RNA (1)...(19): siRNA sense strand
aaguaaagauaggaggaga

SEQ ID NO: 2574373 - RNA, 19 nt, Homo sapiens
  misc_RNA (1)...(19): siRNA sense strand
gagagagaagaaagucaaa

SEQ ID NO: 2574374 - RNA, 19 nt, Homo sapiens
  misc_RNA (1)...(19): siRNA sense strand
cugaagagaaaucaaagaa

SEQ ID NO: 2574375 - RNA, 19 nt, Homo sapiens
  misc_RNA (1)...(19): siRNA sense strand
cagagagagagaaagggaa

SEQ ID NO: 2574376 - RNA, 19 nt, Homo sapiens
  misc_RNA (1)...(19): siRNA sense strand
caaacaaacuauaggacug

SEQ ID NO: 2574377 - RNA, 19 nt, Homo sapiens
  misc_RNA (1)...(19): siRNA sense strand
cagaaauagaacagucaca

SEQ ID NO: 2574378 - RNA, 19 nt, Homo sapiens
  misc_RNA (1)...(19): siRNA sense strand
uggugaagaaagugagcga

SEQ ID NO: 2574379 - RNA, 19 nt, Homo sapiens
  misc_RNA (1)...(19): siRNA sense strand
uagaacagucacagcguau

SEQ ID NO: 2574380 - RNA, 19 nt, Homo sapiens
  misc_RNA (1)...(19): siRNA sense strand
gcauaugcgaacaauaaaa

SEQ ID NO: 2574381 - RNA, 19 nt, Homo sapiens
  misc_RNA (1)...(19): siRNA sense strand
auucggaggaggagagcca

SEQ ID NO: 2574382 - RNA, 19 nt, Homo sapiens
  misc_RNA (1)...(19): siRNA sense strand
auauaggagggcagacaau

SEQ ID NO: 2574383 - RNA, 19 nt, Homo sapiens
  misc_RNA (1)...(19): siRNA sense strand
gcguauugucagggcagaa

SEQ ID NO: 2574384 - RNA, 19 nt, Homo sapiens
  misc_RNA (1)...(19): siRNA sense strand
aggcaaaauguuggauaaa

SEQ ID NO: 2574385 - RNA, 19 nt, Homo sapiens
  misc_RNA (1)...(19): siRNA sense strand
cggaagaagaaaaucaaca

SEQ ID NO: 2574386 - RNA, 19 nt, Homo sapiens
  misc_RNA (1)...(19): siRNA sense strand
guguaaggaaggagaagau

SEQ ID NO: 2574387 - RNA, 19 nt, Homo sapiens
  misc_RNA (1)...(19): siRNA sense strand
aggauuacacaguggagaa

SEQ ID NO: 2574388 - RNA, 19 nt, Homo sapiens
  misc_RNA (1)...(19): siRNA sense strand
aggaaggagaagaugaaca

SEQ ID NO: 2574389 - RNA, 19 nt, Homo sapiens
  misc_RNA (1)...(19): siRNA sense strand
ggauacaagagccugggaa

SEQ ID NO: 2574390 - RNA, 19 nt, Homo sapiens
  misc_RNA (1)...(19): siRNA sense strand
ugucaguacuacagccaca

SEQ ID NO: 2574391 - RNA, 19 nt, Homo sapiens
  misc_RNA (1)...(19): siRNA sense strand
guauaaggagggagaacgu

SEQ ID NO: 2574392 - RNA, 19 nt, Homo sapiens
  misc_RNA (1)...(19): siRNA sense strand
ccacaguagccccaggaaa

SEQ ID NO: 2574393 - RNA, 19 nt, Homo sapiens
  misc_RNA (1)...(19): siRNA sense strand
auacaagagccugggaaga

SEQ ID NO: 2574394 - RNA, 19 nt, Homo sapiens
  misc_RNA (1)...(19): siRNA sense strand
cguacaggugcuaugcuua

SEQ ID NO: 2574395 - RNA, 19 nt, Homo sapiens
  misc_RNA (1)...(19): siRNA sense strand
aguccaagcagaagacaau

SEQ ID NO: 2574396 - RNA, 19 nt, Homo sapiens
  misc_RNA (1)...(19): siRNA sense strand
cuguaaagguugguggaga

SEQ ID NO: 2574397 - RNA, 19 nt, Homo sapiens
  misc_RNA (1)...(19): siRNA sense strand
gcagggagcaauaaggaga

SEQ ID NO: 2574398 - RNA, 19 nt, Homo sapiens
  misc_RNA (1)...(19): siRNA sense strand
gagaauagucuuuaugcca

SEQ ID NO: 2574399 - RNA, 19 nt, Homo sapiens
  misc_RNA (1)...(19): siRNA sense strand
ggagcaauaaggagagaac

SEQ ID NO: 2574400 - RNA, 19 nt, Homo sapiens
  misc_RNA (1)...(19): siRNA sense strand
ccguaucauuggagauugu

SEQ ID NO: 2574401 - RNA, 19 nt, Homo sapiens
  misc_RNA (1)...(19): siRNA sense strand
aaagguugguggagaggca

SEQ ID NO: 2574402 - RNA, 19 nt, Homo sapiens
  misc_RNA (1)...(19): siRNA sense strand
uguaaagguugguggagag

SEQ ID NO: 2574403 - RNA, 19 nt, Homo sapiens
  misc_RNA (1)...(19): siRNA sense strand
gggugucaucauugccaaa

SEQ ID NO: 2574404 - RNA, 19 nt, Homo sapiens
  misc_RNA (1)...(19): siRNA sense strand
cggaagaugcccaggaaga

SEQ ID NO: 2574405 - RNA, 19 nt, Homo sapiens
  misc_RNA (1)...(19): siRNA sense strand
agauaaaggccaugcaaaa

SEQ ID NO: 2574406 - RNA, 19 nt, Homo sapiens
  misc_RNA (1)...(19): siRNA sense strand
cagauaaaggccaugcaaa

SEQ ID NO: 2574407 - RNA, 19 nt, Homo sapiens
  misc_RNA (1)...(19): siRNA sense strand
ggaggugagaaguggaaaa

SEQ ID NO: 2574408 - RNA, 19 nt, Homo sapiens
  misc_RNA (1)...(19): siRNA sense strand
aaauauacaguguggugaa

SEQ ID NO: 2574409 - RNA, 19 nt, Homo sapiens
  misc_RNA (1)...(19): siRNA sense strand
gccaagcaucagaaggaaa

SEQ ID NO: 2574410 - RNA, 19 nt, Homo sapiens
  misc_RNA (1)...(19): siRNA sense strand
agauauaaucagauggacu

SEQ ID NO: 2574411 - RNA, 19 nt, Homo sapiens
  misc_RNA (1)...(19): siRNA sense strand
acuuguucauggugauaua

SEQ ID NO: 2574412 - RNA, 19 nt, Homo sapiens
  misc_RNA (1)...(19): siRNA sense strand
ggacauaaguaacaaggcu

SEQ ID NO: 2574413 - RNA, 19 nt, Homo sapiens
  misc_RNA (1)...(19): siRNA sense strand
accuaugugcagaggauua

SEQ ID NO: 2574414 - RNA, 19 nt, Homo sapiens
  misc_RNA (1)...(19): siRNA sense strand
cauuacagauaaaggccau

SEQ ID NO: 2574415 - RNA, 19 nt, Homo sapiens
  misc_RNA (1)...(19): siRNA sense strand
ggaaacuuguucaugguga

SEQ ID NO: 2574416 - RNA, 19 nt, Homo sapiens
  misc_RNA (1)...(19): siRNA sense strand
acguuuaauaagaaggaga

SEQ ID NO: 2574417 - RNA, 19 nt, Homo sapiens
  misc_RNA (1)...(19): siRNA sense strand
gguuauuaccuguucugaa

SEQ ID NO: 2574418 - RNA, 19 nt, Homo sapiens
  misc_RNA (1)...(19): siRNA sense strand
gggaaagaauugaaccuuc

SEQ ID NO: 2574419 - RNA, 19 nt, Homo sapiens
  misc_RNA (1)...(19): siRNA sense strand
aucacuggauuguggauaa

SEQ ID NO: 2574420 - RNA, 19 nt, Homo sapiens
  misc_RNA (1)...(19): siRNA sense strand
gaagauggucagagguucu

SEQ ID NO: 2574421 - RNA, 19 nt, Homo sapiens
  misc_RNA (1)...(19): siRNA sense strand
cggacacugcacaaagaua

SEQ ID NO: 2574422 - RNA, 19 nt, Homo sapiens
  misc_RNA (1)...(19): siRNA sense strand
ugaaaaucuuggucaggua

SEQ ID NO: 2574423 - RNA, 19 nt, Homo sapiens
  misc_RNA (1)...(19): siRNA sense strand
ccauacagagaaagcugaa

SEQ ID NO: 2574424 - RNA, 19 nt, Homo sapiens
  misc_RNA (1)...(19): siRNA sense strand
gauaagaucagaugggcgu

SEQ ID NO: 2574425 - RNA, 19 nt, Homo sapiens
  misc_RNA (1)...(19): siRNA sense strand
aggaagaauuuggcuggaa

SEQ ID NO: 2574426 - RNA, 19 nt, Homo sapiens
  misc_RNA (1)...(19): siRNA sense strand
aauaagaaggagaccugua

SEQ ID NO: 2574427 - RNA, 19 nt, Homo sapiens
  misc_RNA (1)...(19): siRNA sense strand
agugcaaggccgaaauaga

SEQ ID NO: 2574428 - RNA, 19 nt, Homo sapiens
  misc_RNA (1)...(19): siRNA sense strand
gguguuacgauguugaaga

SEQ ID NO: 2574429 - RNA, 19 nt, Homo sapiens
  misc_RNA (1)...(19): siRNA sense strand
cuaucauguuguugaaacu

SEQ ID NO: 2574430 - RNA, 19 nt, Homo sapiens
  misc_RNA (1)...(19): siRNA sense strand
uauuaucaugggagggauu

SEQ ID NO: 2574431 - RNA, 19 nt, Homo sapiens
  misc_RNA (1)...(19): siRNA sense strand
aacauaccauacagagaaa

SEQ ID NO: 2574432 - RNA, 19 nt, Homo sapiens
  misc_RNA (1)...(19): siRNA sense strand
auacagagaaagcugaaga

SEQ ID NO: 2574433 - RNA, 19 nt, Homo sapiens
  misc_RNA (1)...(19): siRNA sense strand
gguccaugggagcaagauu

SEQ ID NO: 2574434 - RNA, 19 nt, Homo sapiens
  misc_RNA (1)...(19): siRNA sense strand
gugagaaguggaaaacaaa

SEQ ID NO: 2574435 - RNA, 19 nt, Homo sapiens
  misc_RNA (1)...(19): siRNA sense strand
acaguguggugaagguuga

SEQ ID NO: 2574436 - RNA, 19 nt, Homo sapiens
  misc_RNA (1)...(19): siRNA sense strand
gauaagagcguuugggucu

SEQ ID NO: 2574437 - RNA, 19 nt, Homo sapiens
  misc_RNA (1)...(19): siRNA sense strand
ggaagaggaugacugggua

SEQ ID NO: 2574438 - RNA, 19 nt, Homo sapiens
  misc_RNA (1)...(19): siRNA sense strand
gggaaguugaugaagagga

SEQ ID NO: 2574439 - RNA, 19 nt, Homo sapiens
  misc_RNA (1)...(19): siRNA sense strand
aaguugaugaagaggauga

SEQ ID NO: 2574440 - RNA, 19 nt, Homo sapiens
  misc_RNA (1)...(19): siRNA sense strand
cagugaagcuguaccggga

SEQ ID NO: 2574441 - RNA, 19 nt, Homo sapiens
  misc_RNA (1)...(19): siRNA sense strand
uugaugaagaggaugagua

SEQ ID NO: 2574442 - RNA, 19 nt, Homo sapiens
  misc_RNA (1)...(19): siRNA sense strand
ucuaccaggcaaugaacaa

SEQ ID NO: 2574443 - RNA, 19 nt, Homo sapiens
  misc_RNA (1)...(19): siRNA sense strand
uggaaauguaucuguacuu

SEQ ID NO: 2574444 - RNA, 19 nt, Homo sapiens
  misc_RNA (1)...(19): siRNA sense strand
gggaagacgaggaggaaga

SEQ ID NO: 2574445 - RNA, 19 nt, Homo sapiens
  misc_RNA (1)...(19): siRNA sense strand
cuuguuugcugaagggaaa

SEQ ID NO: 2574446 - RNA, 19 nt, Homo sapiens
  misc_RNA (1)...(19): siRNA sense strand
ucacuuuaccagagagcaa

SEQ ID NO: 2574447 - RNA, 19 nt, Homo sapiens
  misc_RNA (1)...(19): siRNA sense strand
aggaggaagaugaaggcaa

SEQ ID NO: 2574448 - RNA, 19 nt, Homo sapiens
  misc_RNA (1)...(19): siRNA sense strand
ucucaaaacuccagaugaa

SEQ ID NO: 2574449 - RNA, 19 nt, Homo sapiens
  misc_RNA (1)...(19): siRNA sense strand
ggauggaggaggaagccaa

SEQ ID NO: 2574450 - RNA, 19 nt, Homo sapiens
  misc_RNA (1)...(19): siRNA sense strand
uauggaaguuacagagcaa

SEQ ID NO: 2574451 - RNA, 19 nt, Homo sapiens
  misc_RNA (1)...(19): siRNA sense strand
guuacagagcaaagacuaa

SEQ ID NO: 2574452 - RNA, 19 nt, Homo sapiens
  misc_RNA (1)...(19): siRNA sense strand
aagccaagccacugagauu

SEQ ID NO: 2574453 - RNA, 19 nt, Homo sapiens
  misc_RNA (1)...(19): siRNA sense strand
cuacaaagagagagcaagu

SEQ ID NO: 2574454 - RNA, 19 nt, Homo sapiens
  misc_RNA (1)...(19): siRNA sense strand
ccaugaugccacugaggaa

SEQ ID NO: 2574455 - RNA, 19 nt, Homo sapiens
  misc_RNA (1)...(19): siRNA sense strand
uguuuagagcugaagguua

SEQ ID NO: 2574456 - RNA, 19 nt, Homo sapiens
  misc_RNA (1)...(19): siRNA sense strand
caacacaaggcuggagaaa

SEQ ID NO: 2574457 - RNA, 19 nt, Homo sapiens
  misc_RNA (1)...(19): siRNA sense strand
ugguacuggaacagagaaa

SEQ ID NO: 2574458 - RNA, 19 nt, Homo sapiens
  misc_RNA (1)...(19): siRNA sense strand
ggagggaagacgaggagga

SEQ ID NO: 2574459 - RNA, 19 nt, Homo sapiens
  misc_RNA (1)...(19): siRNA sense strand
acaaauggcacuuggcaca

SEQ ID NO: 2574460 - RNA, 19 nt, Homo sapiens
  misc_RNA (1)...(19): siRNA sense strand
aggacuaacagaauugaaa

SEQ ID NO: 2574461 - RNA, 19 nt, Homo sapiens
  misc_RNA (1)...(19): siRNA sense strand
gauccagccagcagugaaa

SEQ ID NO: 2574462 - RNA, 19 nt, Homo sapiens
  misc_RNA (1)...(19): siRNA sense strand
gugaugugguacuggaaca

SEQ ID NO: 2574463 - RNA, 19 nt, Homo sapiens
  misc_RNA (1)...(19): siRNA sense strand
cuguuuaccugccgacaaa

SEQ ID NO: 2574464 - RNA, 19 nt, Homo sapiens
  misc_RNA (1)...(19): siRNA sense strand
uggcacaagcuuggagaaa

SEQ ID NO: 2574465 - RNA, 19 nt, Homo sapiens
  misc_RNA (1)...(19): siRNA sense strand
accaaacacugaugagaau

SEQ ID NO: 2574466 - RNA, 19 nt, Homo sapiens
  misc_RNA (1)...(19): siRNA sense strand
agaaaacucuggaaguaaa

SEQ ID NO: 2574467 - RNA, 19 nt, Homo sapiens
  misc_RNA (1)...(19): siRNA sense strand
ggaggaagaugaaggcaac

SEQ ID NO: 2574468 - RNA, 19 nt, Homo sapiens
  misc_RNA (1)...(19): siRNA sense strand
gacuacaaagagagagcaa

SEQ ID NO: 2574469 - RNA, 19 nt, Homo sapiens
  misc_RNA (1)...(19): siRNA sense strand
uucaaggagucaagggcaa

SEQ ID NO: 2574470 - RNA, 19 nt, Homo sapiens
  misc_RNA (1)...(19): siRNA sense strand
caccaaacacugaugagaa

SEQ ID NO: 2574471 - RNA, 19 nt, Homo sapiens
  misc_RNA (1)...(19): siRNA sense strand
gagaaguaacaguucagaa

SEQ ID NO: 2574472 - RNA, 19 nt, Homo sapiens
  misc_RNA (1)...(19): siRNA sense strand
ccagugacguacagcucaa

SEQ ID NO: 2574473 - RNA, 19 nt, Homo sapiens
  misc_RNA (1)...(19): siRNA sense strand
caucacagacaguggcaca

SEQ ID NO: 2574474 - RNA, 19 nt, Homo sapiens
  misc_RNA (1)...(19): siRNA sense strand
gcacaagcuuggagaaaag

SEQ ID NO: 2574475 - RNA, 19 nt, Homo sapiens
  misc_RNA (1)...(19): siRNA sense strand
caaagagagagcaagucaa

SEQ ID NO: 2574476 - RNA, 19 nt, Homo sapiens
  misc_RNA (1)...(19): siRNA sense strand
cuguaaggcugguggagcu

SEQ ID NO: 2574477 - RNA, 19 nt, Homo sapiens
  misc_RNA (1)...(19): siRNA sense strand
caaaagaagacgaaagugu

SEQ ID NO: 2574478 - RNA, 19 nt, Homo sapiens
  misc_RNA (1)...(19): siRNA sense strand
gagaaaacucuggaaguaa

SEQ ID NO: 2574479 - RNA, 19 nt, Homo sapiens
  misc_RNA (1)...(19): siRNA sense strand
aggaggaaggugagccauu

SEQ ID NO: 2574480 - RNA, 19 nt, Homo sapiens
  misc_RNA (1)...(19): siRNA sense strand
gaggaagccagcagcaaga

SEQ ID NO: 2574481 - RNA, 19 nt, Homo sapiens
  misc_RNA (1)...(19): siRNA sense strand
gggcaagagcucuccauca

SEQ ID NO: 2574482 - RNA, 19 nt, Homo sapiens
  misc_RNA (1)...(19): siRNA sense strand
gaaguaaauugcuggugca

SEQ ID NO: 2574483 - RNA, 19 nt, Homo sapiens
  misc_RNA (1)...(19): siRNA sense strand
agauggaggaugcaggaau

SEQ ID NO: 2574484 - RNA, 19 nt, Homo sapiens
  misc_RNA (1)...(19): siRNA sense strand
acaaagagagagcaaguca

SEQ ID NO: 2574485 - RNA, 19 nt, Homo sapiens
  misc_RNA (1)...(19): siRNA sense strand
agagcaaagacuaaucuaa

SEQ ID NO: 2574486 - RNA, 19 nt, Homo sapiens
  misc_RNA (1)...(19): siRNA sense strand
gugugaaguagaaguuuau

SEQ ID NO: 2574487 - RNA, 19 nt, Homo sapiens
  misc_RNA (1)...(19): siRNA sense strand
gcccacaggaaguaaggua

SEQ ID NO: 2574488 - RNA, 19 nt, Homo sapiens
  misc_RNA (1)...(19): siRNA sense strand
aagacgaggaggaagauga

SEQ ID NO: 2574489 - RNA, 19 nt, Homo sapiens
  misc_RNA (1)...(19): siRNA sense strand
gcuuguuugcugaagggaa

SEQ ID NO: 2574490 - RNA, 19 nt, Homo sapiens
  misc_RNA (1)...(19): siRNA sense strand
cccaggaaguccagaucau

SEQ ID NO: 2574491 - RNA, 19 nt, Homo sapiens
  misc_RNA (1)...(19): siRNA sense strand
ucgguaaggaggaagguga

SEQ ID NO: 2574492 - RNA, 19 nt, Homo sapiens
  misc_RNA (1)...(19): siRNA sense strand
agacgaggaggaagaugaa

SEQ ID NO: 2574493 - RNA, 19 nt, Homo sapiens
  misc_RNA (1)...(19): siRNA sense strand
gcugcagccuggagagugu

SEQ ID NO: 2574494 - RNA, 19 nt, Homo sapiens
  misc_RNA (1)...(19): siRNA sense strand
uccaacacacggaaagaaa

SEQ ID NO: 2574495 - RNA, 19 nt, Homo sapiens
  misc_RNA (1)...(19): siRNA sense strand
gaaagaggcuggaggugug

SEQ ID NO: 2574496 - RNA, 19 nt, Homo sapiens
  misc_RNA (1)...(19): siRNA sense strand
ccacaaauaggagggaaga

SEQ ID NO: 2574497 - RNA, 19 nt, Homo sapiens
  misc_RNA (1)...(19): siRNA sense strand
ccagaugaaacuuggaugu

SEQ ID NO: 2574498 - RNA, 19 nt, Homo sapiens
  misc_RNA (1)...(19): siRNA sense strand
cuguagcaguugaggaaga

SEQ ID NO: 2574499 - RNA, 19 nt, Homo sapiens
  misc_RNA (1)...(19): siRNA sense strand
ccguacaggcuuuggacau

SEQ ID NO: 2574500 - RNA, 19 nt, Homo sapiens
  misc_RNA (1)...(19): siRNA sense strand
cggaagagcuccugcaggu

SEQ ID NO: 2574501 - RNA, 19 nt, Homo sapiens
  misc_RNA (1)...(19): siRNA sense strand
gggcaugaccaggaagcaa

SEQ ID NO: 2574502 - RNA, 19 nt, Homo sapiens
  misc_RNA (1)...(19): siRNA sense strand
ccucagggcaguuggcaga

SEQ ID NO: 2574503 - RNA, 19 nt, Homo sapiens
  misc_RNA (1)...(19): siRNA sense strand
gcgaggacacagagcggau

SEQ ID NO: 2574504 - RNA, 19 nt, Homo sapiens
  misc_RNA (1)...(19): siRNA sense strand
ccgcugaggagaaggacca

SEQ ID NO: 2574505 - RNA, 19 nt, Homo sapiens
  misc_RNA (1)...(19): siRNA sense strand
gcaccaggcucaaggaccu

SEQ ID NO: 2574506 - RNA, 19 nt, Homo sapiens
  misc_RNA (1)...(19): siRNA sense strand
cuacuuugaggaagaggaa

SEQ ID NO: 2574507 - RNA, 19 nt, Homo sapiens
  misc_RNA (1)...(19): siRNA sense strand
cccugaggccagaggagaa

SEQ ID NO: 2574508 - RNA, 19 nt, Homo sapiens
  misc_RNA (1)...(19): siRNA sense strand
gcacagguccagcaggaga

SEQ ID NO: 2574509 - RNA, 19 nt, Homo sapiens
  misc_RNA (1)...(19): siRNA sense strand
ggcgagaagcggagaugga

SEQ ID NO: 2574510 - RNA, 19 nt, Homo sapiens
  misc_RNA (1)...(19): siRNA sense strand
ccggcaagucccugugcua

SEQ ID NO: 2574511 - RNA, 19 nt, Homo sapiens
  misc_RNA (1)...(19): siRNA sense strand
ucaacaugaagcagaaaca

SEQ ID NO: 2574512 - RNA, 19 nt, Homo sapiens
  misc_RNA (1)...(19): siRNA sense strand
cagaaguggcggaagaaag

SEQ ID NO: 2574513 - RNA, 19 nt, Homo sapiens
  misc_RNA (1)...(19): siRNA sense strand
ccggccagcaagugaggaa

SEQ ID NO: 2574514 - RNA, 19 nt, Homo sapiens
  misc_RNA (1)...(19): siRNA sense strand
ccucacagccacagccaca

SEQ ID NO: 2574515 - RNA, 19 nt, Homo sapiens
  misc_RNA (1)...(19): siRNA sense strand
aaaccacagccgaggccua

SEQ ID NO: 2574516 - RNA, 19 nt, Homo sapiens
  misc_RNA (1)...(19): siRNA sense strand
aagcaggcauggaagcaga

SEQ ID NO: 2574517 - RNA, 19 nt, Homo sapiens
  misc_RNA (1)...(19): siRNA sense strand
ggccagcaagugaggaaga

SEQ ID NO: 2574518 - RNA, 19 nt, Homo sapiens
  misc_RNA (1)...(19): siRNA sense strand
uggucaagcugguggacuc

SEQ ID NO: 2574519 - RNA, 19 nt, Homo sapiens
  misc_RNA (1)...(19): siRNA sense strand
aggagaaggaccagauaug

SEQ ID NO: 2574520 - RNA, 19 nt, Homo sapiens
  misc_RNA (1)...(19): siRNA sense strand
gcagaaccuuccaggccuu

SEQ ID NO: 2574521 - RNA, 19 nt, Homo sapiens
  misc_RNA (1)...(19): siRNA sense strand
ggaccgacgcuucuggaga

SEQ ID NO: 2574522 - RNA, 19 nt, Homo sapiens
  misc_RNA (1)...(19): siRNA sense strand
cagugauggaauugcauua

SEQ ID NO: 2574523 - RNA, 19 nt, Homo sapiens
  misc_RNA (1)...(19): siRNA sense strand
uuaaaaggcuaaagggaca

SEQ ID NO: 2574524 - RNA, 19 nt, Homo sapiens
  misc_RNA (1)...(19): siRNA sense strand
acaguuaagcuuugggaca

SEQ ID NO: 2574525 - RNA, 19 nt, Homo sapiens
  misc_RNA (1)...(19): siRNA sense strand
accacaagcaggagaauau

SEQ ID NO: 2574526 - RNA, 19 nt, Homo sapiens
  misc_RNA (1)...(19): siRNA sense strand
ccaucaaugaaguggcuuu

SEQ ID NO: 2574527 - RNA, 19 nt, Homo sapiens
  misc_RNA (1)...(19): siRNA sense strand
guggaauagacaaugauau

SEQ ID NO: 2574528 - RNA, 19 nt, Homo sapiens
  misc_RNA (1)...(19): siRNA sense strand
caaaauagcagcuggcuca

SEQ ID NO: 2574529 - RNA, 19 nt, Homo sapiens
  misc_RNA (1)...(19): siRNA sense strand
gguuaaaaggcuaaaggga

SEQ ID NO: 2574530 - RNA, 19 nt, Homo sapiens
  misc_RNA (1)...(19): siRNA sense strand
acuguauaugggagagauu

SEQ ID NO: 2574531 - RNA, 19 nt, Homo sapiens
  misc_RNA (1)...(19): siRNA sense strand
gggaccugcgccagaacaa

SEQ ID NO: 2574532 - RNA, 19 nt, Homo sapiens
  misc_RNA (1)...(19): siRNA sense strand
uguauaugggagagauuca

SEQ ID NO: 2574533 - RNA, 19 nt, Homo sapiens
  misc_RNA (1)...(19): siRNA sense strand
uguggaaugucuaugguga

SEQ ID NO: 2574534 - RNA, 19 nt, Homo sapiens
  misc_RNA (1)...(19): siRNA sense strand
augccacacugaagggaca

SEQ ID NO: 2574535 - RNA, 19 nt, Homo sapiens
  misc_RNA (1)...(19): siRNA sense strand
gcaaaaugcguuaggaaaa

SEQ ID NO: 2574536 - RNA, 19 nt, Homo sapiens
  misc_RNA (1)...(19): siRNA sense strand
ugucagagaccaaggcuaa

SEQ ID NO: 2574537 - RNA, 19 nt, Homo sapiens
  misc_RNA (1)...(19): siRNA sense strand
gaacauaguuucauggguu

SEQ ID NO: 2574538 - RNA, 19 nt, Homo sapiens
  misc_RNA (1)...(19): siRNA sense strand
ggccaagaguacagugaau

SEQ ID NO: 2574539 - RNA, 19 nt, Homo sapiens
  misc_RNA (1)...(19): siRNA sense strand
caaacaauguggagaggca

SEQ ID NO: 2574540 - RNA, 19 nt, Homo sapiens
  misc_RNA (1)...(19): siRNA sense strand
ccuuggaacauuuaagaaa

SEQ ID NO: 2574541 - RNA, 19 nt, Homo sapiens
  misc_RNA (1)...(19): siRNA sense strand
gcuaaaacuuggucaaaau

SEQ ID NO: 2574542 - RNA, 19 nt, Homo sapiens
  misc_RNA (1)...(19): siRNA sense strand
agaagaagcaaaugaacuu

SEQ ID NO: 2574543 - RNA, 19 nt, Homo sapiens
  misc_RNA (1)...(19): siRNA sense strand
gccucuacuuggaaggaaa

SEQ ID NO: 2574544 - RNA, 19 nt, Homo sapiens
  misc_RNA (1)...(19): siRNA sense strand
cccacgaaauguagggauu

SEQ ID NO: 2574545 - RNA, 19 nt, Homo sapiens
  misc_RNA (1)...(19): siRNA sense strand
gaugaauaugagaaagcaa

SEQ ID NO: 2574546 - RNA, 19 nt, Homo sapiens
  misc_RNA (1)...(19): siRNA sense strand
acuccaaggaccaagauua

SEQ ID NO: 2574547 - RNA, 19 nt, Homo sapiens
  misc_RNA (1)...(19): siRNA sense strand
uggcagaaauaugggaaau

SEQ ID NO: 2574548 - RNA, 19 nt, Homo sapiens
  misc_RNA (1)...(19): siRNA sense strand
ccaaugugucagagaccaa

SEQ ID NO: 2574549 - RNA, 19 nt, Homo sapiens
  misc_RNA (1)...(19): siRNA sense strand
agucauuauuuguggucau

SEQ ID NO: 2574550 - RNA, 19 nt, Homo sapiens
  misc_RNA (1)...(19): siRNA sense strand
caaacuuccuuaugggaga

SEQ ID NO: 2574551 - RNA, 19 nt, Homo sapiens
  misc_RNA (1)...(19): siRNA sense strand
ugugacaaauguugaagaa

SEQ ID NO: 2574552 - RNA, 19 nt, Homo sapiens
  misc_RNA (1)...(19): siRNA sense strand
ccaacauguaaaugaagaa

SEQ ID NO: 2574553 - RNA, 19 nt, Homo sapiens
  misc_RNA (1)...(19): siRNA sense strand
caugcaacgucaagaugaa

SEQ ID NO: 2574554 - RNA, 19 nt, Homo sapiens
  misc_RNA (1)...(19): siRNA sense strand
aguagaucaugcagaagaa

SEQ ID NO: 2574555 - RNA, 19 nt, Homo sapiens
  misc_RNA (1)...(19): siRNA sense strand
acaucaaggaguuggugaa

SEQ ID NO: 2574556 - RNA, 19 nt, Homo sapiens
  misc_RNA (1)...(19): siRNA sense strand
gugcagaagaggagcaucu

SEQ ID NO: 2574557 - RNA, 19 nt, Homo sapiens
  misc_RNA (1)...(19): siRNA sense strand
cauagguguuguugaucaa

SEQ ID NO: 2574558 - RNA, 19 nt, Homo sapiens
  misc_RNA (1)...(19): siRNA sense strand
cagaaauaugggaaaugua

SEQ ID NO: 2574559 - RNA, 19 nt, Homo sapiens
  misc_RNA (1)...(19): siRNA sense strand
cucuaacagugcagauaua

SEQ ID NO: 2574560 - RNA, 19 nt, Homo sapiens
  misc_RNA (1)...(19): siRNA sense strand
cagaagaaaacaagaugaa

SEQ ID NO: 2574561 - RNA, 19 nt, Homo sapiens
  misc_RNA (1)...(19): siRNA sense strand
cuuuauaagaucauggaca

SEQ ID NO: 2574562 - RNA, 19 nt, Homo sapiens
  misc_RNA (1)...(19): siRNA sense strand
aaucagaacgcaagcaaaa

SEQ ID NO: 2574563 - RNA, 19 nt, Homo sapiens
  misc_RNA (1)...(19): siRNA sense strand
ccacuagaaauauggucaa

SEQ ID NO: 2574564 - RNA, 19 nt, Homo sapiens
  misc_RNA (1)...(19): siRNA sense strand
agaaagagacauugaacgu

SEQ ID NO: 2574565 - RNA, 19 nt, Homo sapiens
  misc_RNA (1)...(19): siRNA sense strand
cagaagaaagagacauuga

SEQ ID NO: 2574566 - RNA, 19 nt, Homo sapiens
  misc_RNA (1)...(19): siRNA sense strand
gaaucagaacgcaagcaaa

SEQ ID NO: 2574567 - RNA, 19 nt, Homo sapiens
  misc_RNA (1)...(19): siRNA sense strand
agauuagaccuguaaguuu

SEQ ID NO: 2574568 - RNA, 19 nt, Homo sapiens
  misc_RNA (1)...(19): siRNA sense strand
cagucaggucagugagaga

SEQ ID NO: 2574569 - RNA, 19 nt, Homo sapiens
  misc_RNA (1)...(19): siRNA sense strand
ccucaacauuggacaacau

SEQ ID NO: 2574570 - RNA, 19 nt, Homo sapiens
  misc_RNA (1)...(19): siRNA sense strand
uggcauuuaccuuuggaaa

SEQ ID NO: 2574571 - RNA, 19 nt, Homo sapiens
  misc_RNA (1)...(19): siRNA sense strand
cuacaucauuugaggaauc

SEQ ID NO: 2574572 - RNA, 19 nt, Homo sapiens
  misc_RNA (1)...(19): siRNA sense strand
cugaaaucugauaggucaa

SEQ ID NO: 2574573 - RNA, 19 nt, Homo sapiens
  misc_RNA (1)...(19): siRNA sense strand
aggcauacuccaaggacca

SEQ ID NO: 2574574 - RNA, 19 nt, Homo sapiens
  misc_RNA (1)...(19): siRNA sense strand
aggacaaacaguaugaaca

SEQ ID NO: 2574575 - RNA, 19 nt, Homo sapiens
  misc_RNA (1)...(19): siRNA sense strand
ggaaucagaacgcaagcaa

SEQ ID NO: 2574576 - RNA, 19 nt, Homo sapiens
  misc_RNA (1)...(19): siRNA sense strand
aggaguuggugaaugauau

SEQ ID NO: 2574577 - RNA, 19 nt, Homo sapiens
  misc_RNA (1)...(19): siRNA sense strand
gugaaugauaucaggaagu

SEQ ID NO: 2574578 - RNA, 19 nt, Homo sapiens
  misc_RNA (1)...(19): siRNA sense strand
cuauugaaacuuuggcauu

SEQ ID NO: 2574579 - RNA, 19 nt, Homo sapiens
  misc_RNA (1)...(19): siRNA sense strand
aauaugugccucagagauu

SEQ ID NO: 2574580 - RNA, 19 nt, Homo sapiens
  misc_RNA (1)...(19): siRNA sense strand
agauguaggcaaugauuca

SEQ ID NO: 2574581 - RNA, 19 nt, Homo sapiens
  misc_RNA (1)...(19): siRNA sense strand
guuccaaauuuaauggcuu

SEQ ID NO: 2574582 - RNA, 19 nt, Homo sapiens
  misc_RNA (1)...(19): siRNA sense strand
uauuuguggucaucagaaa

SEQ ID NO: 2574583 - RNA, 19 nt, Homo sapiens
  misc_RNA (1)...(19): siRNA sense strand
cuuugugucuacagggaau

SEQ ID NO: 2574584 - RNA, 19 nt, Homo sapiens
  misc_RNA (1)...(19): siRNA sense strand
gagaaauggcagaaauaug

SEQ ID NO: 2574585 - RNA, 19 nt, Homo sapiens
  misc_RNA (1)...(19): siRNA sense strand
agaccaagaggcugaauca

SEQ ID NO: 2574586 - RNA, 19 nt, Homo sapiens
  misc_RNA (1)...(19): siRNA sense strand
cagcaaacucuacagaaaa

SEQ ID NO: 2574587 - RNA, 19 nt, Homo sapiens
  misc_RNA (1)...(19): siRNA sense strand
cuuuagaacuagacaacgu

SEQ ID NO: 2574588 - RNA, 19 nt, Homo sapiens
  misc_RNA (1)...(19): siRNA sense strand
aguagaagaagcaaaugaa

SEQ ID NO: 2574589 - RNA, 19 nt, Homo sapiens
  misc_RNA (1)...(19): siRNA sense strand
uguugaaugugaagagugu

SEQ ID NO: 2574590 - RNA, 19 nt, Homo sapiens
  misc_RNA (1)...(19): siRNA sense strand
ucugaaaucugauagguca

SEQ ID NO: 2574591 - RNA, 19 nt, Homo sapiens
  misc_RNA (1)...(19): siRNA sense strand
uaugggagauguaggcaau

SEQ ID NO: 2574592 - RNA, 19 nt, Homo sapiens
  misc_RNA (1)...(19): siRNA sense strand
ucguguguguggaaacaaa

SEQ ID NO: 2574593 - RNA, 19 nt, Homo sapiens
  misc_RNA (1)...(19): siRNA sense strand
agcaaaaugcguuaggaaa

SEQ ID NO: 2574594 - RNA, 19 nt, Homo sapiens
  misc_RNA (1)...(19): siRNA sense strand
ccaguaagccauaugcaga

SEQ ID NO: 2574595 - RNA, 19 nt, Homo sapiens
  misc_RNA (1)...(19): siRNA sense strand
gucuucaaguggcggauua

SEQ ID NO: 2574596 - RNA, 19 nt, Homo sapiens
  misc_RNA (1)...(19): siRNA sense strand
aagaagaaccugaggaaaa

SEQ ID NO: 2574597 - RNA, 19 nt, Homo sapiens
  misc_RNA (1)...(19): siRNA sense strand
agugagaagcugaaggaaa

SEQ ID NO: 2574598 - RNA, 19 nt, Homo sapiens
  misc_RNA (1)...(19): siRNA sense strand
agacaaagguuaaauccaa

SEQ ID NO: 2574599 - RNA, 19 nt, Homo sapiens
  misc_RNA (1)...(19): siRNA sense strand
uuaaauaccgugaggcaaa

SEQ ID NO: 2574600 - RNA, 19 nt, Homo sapiens
  misc_RNA (1)...(19): siRNA sense strand
caacaagagcagagcugaa

SEQ ID NO: 2574601 - RNA, 19 nt, Homo sapiens
  misc_RNA (1)...(19): siRNA sense strand
agaaaagucaagaggaaaa

SEQ ID NO: 2574602 - RNA, 19 nt, Homo sapiens
  misc_RNA (1)...(19): siRNA sense strand
caaaaguucucgaaaguua

SEQ ID NO: 2574603 - RNA, 19 nt, Homo sapiens
  misc_RNA (1)...(19): siRNA sense strand
auagaaaagucaagaggaa

SEQ ID NO: 2574604 - RNA, 19 nt, Homo sapiens
  misc_RNA (1)...(19): siRNA sense strand
gguuaaauaccgugaggca

SEQ ID NO: 2574605 - RNA, 19 nt, Homo sapiens
  misc_RNA (1)...(19): siRNA sense strand
gcaaauuauugaacaggau

SEQ ID NO: 2574606 - RNA, 19 nt, Homo sapiens
  misc_RNA (1)...(19): siRNA sense strand
aaggaaagauggaagggau

SEQ ID NO: 2574607 - RNA, 19 nt, Homo sapiens
  misc_RNA (1)...(19): siRNA sense strand
cggaguggcuacagcgaga

SEQ ID NO: 2574608 - RNA, 19 nt, Homo sapiens
  misc_RNA (1)...(19): siRNA sense strand
ggacuguaacugagaacau

SEQ ID NO: 2574609 - RNA, 19 nt, Homo sapiens
  misc_RNA (1)...(19): siRNA sense strand
acaaauggccaguguucaa

SEQ ID NO: 2574610 - RNA, 19 nt, Homo sapiens
  misc_RNA (1)...(19): siRNA sense strand
acacaggauuucagaggau

SEQ ID NO: 2574611 - RNA, 19 nt, Homo sapiens
  misc_RNA (1)...(19): siRNA sense strand
acagaguggucauggucaa

SEQ ID NO: 2574612 - RNA, 19 nt, Homo sapiens
  misc_RNA (1)...(19): siRNA sense strand
gucaaaaccaugagacaaa

SEQ ID NO: 2574613 - RNA, 19 nt, Homo sapiens
  misc_RNA (1)...(19): siRNA sense strand
caaaaugcccagagagaca

SEQ ID NO: 2574614 - RNA, 19 nt, Homo sapiens
  misc_RNA (1)...(19): siRNA sense strand
agaucuucguaaaggaaau

SEQ ID NO: 2574615 - RNA, 19 nt, Homo sapiens
  misc_RNA (1)...(19): siRNA sense strand
cugaagaugaagcaauaua

SEQ ID NO: 2574616 - RNA, 19 nt, Homo sapiens
  misc_RNA (1)...(19): siRNA sense strand
gaacaugucuuuaacggau

SEQ ID NO: 2574617 - RNA, 19 nt, Homo sapiens
  misc_RNA (1)...(19): siRNA sense strand
ccgguuggcugguggcaau

SEQ ID NO: 2574618 - RNA, 19 nt, Homo sapiens
  misc_RNA (1)...(19): siRNA sense strand
ggucuggggugaagaagaa

SEQ ID NO: 2574619 - RNA, 19 nt, Homo sapiens
  misc_RNA (1)...(19): siRNA sense strand
agcuagugguguugagaga

SEQ ID NO: 2574620 - RNA, 19 nt, Homo sapiens
  misc_RNA (1)...(19): siRNA sense strand
cuacaaaaggauuccaaaa

SEQ ID NO: 2574621 - RNA, 19 nt, Homo sapiens
  misc_RNA (1)...(19): siRNA sense strand
augccgaggaggaggagua

SEQ ID NO: 2574622 - RNA, 19 nt, Homo sapiens
  misc_RNA (1)...(19): siRNA sense strand
ggacgaguuugauggcaga

SEQ ID NO: 2574623 - RNA, 19 nt, Homo sapiens
  misc_RNA (1)...(19): siRNA sense strand
acaggauuucagaggauua

SEQ ID NO: 2574624 - RNA, 19 nt, Homo sapiens
  misc_RNA (1)...(19): siRNA sense strand
cauccuggcuuguggcaga

SEQ ID NO: 2574625 - RNA, 19 nt, Homo sapiens
  misc_RNA (1)...(19): siRNA sense strand
gguuaaauccaacguccaa

SEQ ID NO: 2574626 - RNA, 19 nt, Homo sapiens
  misc_RNA (1)...(19): siRNA sense strand
ggauauuuguugcuggcau

SEQ ID NO: 2574627 - RNA, 19 nt, Homo sapiens
  misc_RNA (1)...(19): siRNA sense strand
gccgauguguauagagaca

SEQ ID NO: 2574628 - RNA, 19 nt, Homo sapiens
  misc_RNA (1)...(19): siRNA sense strand
cugauauagcaauggaaaa

SEQ ID NO: 2574629 - RNA, 19 nt, Homo sapiens
  misc_RNA (1)...(19): siRNA sense strand
aggugaacacacaggauuu

SEQ ID NO: 2574630 - RNA, 19 nt, Homo sapiens
  misc_RNA (1)...(19): siRNA sense strand
ggagcauugaccaggacua

SEQ ID NO: 2574631 - RNA, 19 nt, Homo sapiens
  misc_RNA (1)...(19): siRNA sense strand
cuagugguguugagagaca

SEQ ID NO: 2574632 - RNA, 19 nt, Homo sapiens
  misc_RNA (1)...(19): siRNA sense strand
uuugaaugugagaaggaaa

SEQ ID NO: 2574633 - RNA, 19 nt, Homo sapiens
  misc_RNA (1)...(19): siRNA sense strand
cagaggaaguuauggcagu

SEQ ID NO: 2574634 - RNA, 19 nt, Homo sapiens
  misc_RNA (1)...(19): siRNA sense strand
gcccagaagcauccugaua

SEQ ID NO: 2574635 - RNA, 19 nt, Homo sapiens
  misc_RNA (1)...(19): siRNA sense strand
caagagcagagcugaacaa

SEQ ID NO: 2574636 - RNA, 19 nt, Homo sapiens
  misc_RNA (1)...(19): siRNA sense strand
cuaaauucagccaaugaua

SEQ ID NO: 2574637 - RNA, 19 nt, Homo sapiens
  misc_RNA (1)...(19): siRNA sense strand
auaccgggacacagaauua

SEQ ID NO: 2574638 - RNA, 19 nt, Homo sapiens
  misc_RNA (1)...(19): siRNA sense strand
auuaaaugacagugacuca

SEQ ID NO: 2574639 - RNA, 19 nt, Homo sapiens
  misc_RNA (1)...(19): siRNA sense strand
ccuaaaggugaaaugguga

SEQ ID NO: 2574640 - RNA, 19 nt, Homo sapiens
  misc_RNA (1)...(19): siRNA sense strand
ccgaagaccgcauguccua

SEQ ID NO: 2574641 - RNA, 19 nt, Homo sapiens
  misc_RNA (1)...(19): siRNA sense strand
acagaaagcuccuuccaga

SEQ ID NO: 2574642 - RNA, 19 nt, Homo sapiens
  misc_RNA (1)...(19): siRNA sense strand
gcagugaugccgaggagga

SEQ ID NO: 2574643 - RNA, 19 nt, Homo sapiens
  misc_RNA (1)...(19): siRNA sense strand
ccauggaggaugugcuuca

SEQ ID NO: 2574644 - RNA, 19 nt, Homo sapiens
  misc_RNA (1)...(19): siRNA sense strand
cgaguuggagaaaggcuua

SEQ ID NO: 2574645 - RNA, 19 nt, Homo sapiens
  misc_RNA (1)...(19): siRNA sense strand
accaugagacaaagguuaa

SEQ ID NO: 2574646 - RNA, 19 nt, Homo sapiens
  misc_RNA (1)...(19): siRNA sense strand
uggaagagcugauauggga

SEQ ID NO: 2574647 - RNA, 19 nt, Homo sapiens
  misc_RNA (1)...(19): siRNA sense strand
agauggaagggauggauga

SEQ ID NO: 2574648 - RNA, 19 nt, Homo sapiens
  misc_RNA (1)...(19): siRNA sense strand
ggaagagcugauaugggaa

SEQ ID NO: 2574649 - RNA, 19 nt, Homo sapiens
  misc_RNA (1)...(19): siRNA sense strand
gcuuaaaggacacuauuca

SEQ ID NO: 2574650 - RNA, 19 nt, Homo sapiens
  misc_RNA (1)...(19): siRNA sense strand
caguucagcagcucagaaa

SEQ ID NO: 2574651 - RNA, 19 nt, Homo sapiens
  misc_RNA (1)...(19): siRNA sense strand
acugagaacaugucuuuaa

SEQ ID NO: 2574652 - RNA, 19 nt, Homo sapiens
  misc_RNA (1)...(19): siRNA sense strand
guuaaauaccgugaggcaa

SEQ ID NO: 2574653 - RNA, 19 nt, Homo sapiens
  misc_RNA (1)...(19): siRNA sense strand
uggcagaaguuuccggagu

SEQ ID NO: 2574654 - RNA, 19 nt, Homo sapiens
  misc_RNA (1)...(19): siRNA sense strand
aagcugaaggaaaggccaa

SEQ ID NO: 2574655 - RNA, 19 nt, Homo sapiens
  misc_RNA (1)...(19): siRNA sense strand
uagaaaucccuaaagguga

SEQ ID NO: 2574656 - RNA, 19 nt, Homo sapiens
  misc_RNA (1)...(19): siRNA sense strand
gaugaaaagcagagcgaac

SEQ ID NO: 2574657 - RNA, 19 nt, Homo sapiens
  misc_RNA (1)...(19): siRNA sense strand
guaaaggaaaugacccgaa

SEQ ID NO: 2574658 - RNA, 19 nt, Homo sapiens
  misc_RNA (1)...(19): siRNA sense strand
cugacaaugagcuggauga

SEQ ID NO: 2574659 - RNA, 19 nt, Homo sapiens
  misc_RNA (1)...(19): siRNA sense strand
gaaauagagucaaaccgau

SEQ ID NO: 2574660 - RNA, 19 nt, Homo sapiens
  misc_RNA (1)...(19): siRNA sense strand
caguugucccagagaccaa

SEQ ID NO: 2574661 - RNA, 19 nt, Homo sapiens
  misc_RNA (1)...(19): siRNA sense strand
ccagcuuaugagaggguuu

SEQ ID NO: 2574662 - RNA, 19 nt, Homo sapiens
  misc_RNA (1)...(19): siRNA sense strand
ggagaagcgguuugggucu

SEQ ID NO: 2574663 - RNA, 19 nt, Homo sapiens
  misc_RNA (1)...(19): siRNA sense strand
aagaagaaccugaggaaaa

SEQ ID NO: 2574664 - RNA, 19 nt, Homo sapiens
  misc_RNA (1)...(19): siRNA sense strand
agugagaagcugaaggaaa

SEQ ID NO: 2574665 - RNA, 19 nt, Homo sapiens
  misc_RNA (1)...(19): siRNA sense strand
agacaaagguuaaauccaa

SEQ ID NO: 2574666 - RNA, 19 nt, Homo sapiens
  misc_RNA (1)...(19): siRNA sense strand
uuaaauaccgugaggcaaa

SEQ ID NO: 2574667 - RNA, 19 nt, Homo sapiens
  misc_RNA (1)...(19): siRNA sense strand
caacaagagcagagcugaa

SEQ ID NO: 2574668 - RNA, 19 nt, Homo sapiens
  misc_RNA (1)...(19): siRNA sense strand
agaaaagucaagaggaaaa

SEQ ID NO: 2574669 - RNA, 19 nt, Homo sapiens
  misc_RNA (1)...(19): siRNA sense strand
caaaaguucucgaaaguua

SEQ ID NO: 2574670 - RNA, 19 nt, Homo sapiens
  misc_RNA (1)...(19): siRNA sense strand
auagaaaagucaagaggaa

SEQ ID NO: 2574671 - RNA, 19 nt, Homo sapiens
  misc_RNA (1)...(19): siRNA sense strand
gguuaaauaccgugaggca

SEQ ID NO: 2574672 - RNA, 19 nt, Homo sapiens
  misc_RNA (1)...(19): siRNA sense strand
gcaaauuauugaacaggau

SEQ ID NO: 2574673 - RNA, 19 nt, Homo sapiens
  misc_RNA (1)...(19): siRNA sense strand
aaggaaagauggaagggau

SEQ ID NO: 2574674 - RNA, 19 nt, Homo sapiens
  misc_RNA (1)...(19): siRNA sense strand
cggaguggcuacagcgaga

SEQ ID NO: 2574675 - RNA, 19 nt, Homo sapiens
  misc_RNA (1)...(19): siRNA sense strand
ggacuguaacugagaacau

SEQ ID NO: 2574676 - RNA, 19 nt, Homo sapiens
  misc_RNA (1)...(19): siRNA sense strand
acaaauggccaguguucaa

SEQ ID NO: 2574677 - RNA, 19 nt, Homo sapiens
  misc_RNA (1)...(19): siRNA sense strand
acacaggauuucagaggau

SEQ ID NO: 2574678 - RNA, 19 nt, Homo sapiens
  misc_RNA (1)...(19): siRNA sense strand
acagaguggucauggucaa

SEQ ID NO: 2574679 - RNA, 19 nt, Homo sapiens
  misc_RNA (1)...(19): siRNA sense strand
gucaaaaccaugagacaaa

SEQ ID NO: 2574680 - RNA, 19 nt, Homo sapiens
  misc_RNA (1)...(19): siRNA sense strand
caaaaugcccagagagaca

SEQ ID NO: 2574681 - RNA, 19 nt, Homo sapiens
  misc_RNA (1)...(19): siRNA sense strand
agaucuucguaaaggaaau

SEQ ID NO: 2574682 - RNA, 19 nt, Homo sapiens
  misc_RNA (1)...(19): siRNA sense strand
cugaagaugaagcaauaua

SEQ ID NO: 2574683 - RNA, 19 nt, Homo sapiens
  misc_RNA (1)...(19): siRNA sense strand
gaacaugucuuuaacggau

SEQ ID NO: 2574684 - RNA, 19 nt, Homo sapiens
  misc_RNA (1)...(19): siRNA sense strand
ccgguuggcugguggcaau

SEQ ID NO: 2574685 - RNA, 19 nt, Homo sapiens
  misc_RNA (1)...(19): siRNA sense strand
ggucuggggugaagaagaa

SEQ ID NO: 2574686 - RNA, 19 nt, Homo sapiens
  misc_RNA (1)...(19): siRNA sense strand
agcuagugguguugagaga

SEQ ID NO: 2574687 - RNA, 19 nt, Homo sapiens
  misc_RNA (1)...(19): siRNA sense strand
cuacaaaaggauuccaaaa

SEQ ID NO: 2574688 - RNA, 19 nt, Homo sapiens
  misc_RNA (1)...(19): siRNA sense strand
augccgaggaggaggagua

SEQ ID NO: 2574689 - RNA, 19 nt, Homo sapiens
  misc_RNA (1)...(19): siRNA sense strand
ggacgaguuugauggcaga

SEQ ID NO: 2574690 - RNA, 19 nt, Homo sapiens
  misc_RNA (1)...(19): siRNA sense strand
acaggauuucagaggauua

SEQ ID NO: 2574691 - RNA, 19 nt, Homo sapiens
  misc_RNA (1)...(19): siRNA sense strand
cauccuggcuuguggcaga

SEQ ID NO: 2574692 - RNA, 19 nt, Homo sapiens
  misc_RNA (1)...(19): siRNA sense strand
gguuaaauccaacguccaa

SEQ ID NO: 2574693 - RNA, 19 nt, Homo sapiens
  misc_RNA (1)...(19): siRNA sense strand
ggauauuuguugcuggcau

SEQ ID NO: 2574694 - RNA, 19 nt, Homo sapiens
  misc_RNA (1)...(19): siRNA sense strand
gccgauguguauagagaca

SEQ ID NO: 2574695 - RNA, 19 nt, Homo sapiens
  misc_RNA (1)...(19): siRNA sense strand
cugauauagcaauggaaaa

SEQ ID NO: 2574696 - RNA, 19 nt, Homo sapiens
  misc_RNA (1)...(19): siRNA sense strand
aggugaacacacaggauuu

SEQ ID NO: 2574697 - RNA, 19 nt, Homo sapiens
  misc_RNA (1)...(19): siRNA sense strand
ggagcauugaccaggacua

SEQ ID NO: 2574698 - RNA, 19 nt, Homo sapiens
  misc_RNA (1)...(19): siRNA sense strand
cuagugguguugagagaca

SEQ ID NO: 2574699 - RNA, 19 nt, Homo sapiens
  misc_RNA (1)...(19): siRNA sense strand
uuugaaugugagaaggaaa

SEQ ID NO: 2574700 - RNA, 19 nt, Homo sapiens
  misc_RNA (1)...(19): siRNA sense strand
cagaggaaguuauggcagu

SEQ ID NO: 2574701 - RNA, 19 nt, Homo sapiens
  misc_RNA (1)...(19): siRNA sense strand
gcccagaagcauccugaua

SEQ ID NO: 2574702 - RNA, 19 nt, Homo sapiens
  misc_RNA (1)...(19): siRNA sense strand
caagagcagagcugaacaa

SEQ ID NO: 2574703 - RNA, 19 nt, Homo sapiens
  misc_RNA (1)...(19): siRNA sense strand
cuaaauucagccaaugaua

SEQ ID NO: 2574704 - RNA, 19 nt, Homo sapiens
  misc_RNA (1)...(19): siRNA sense strand
auaccgggacacagaauua

SEQ ID NO: 2574705 - RNA, 19 nt, Homo sapiens
  misc_RNA (1)...(19): siRNA sense strand
auuaaaugacagugacuca

SEQ ID NO: 2574706 - RNA, 19 nt, Homo sapiens
  misc_RNA (1)...(19): siRNA sense strand
ccuaaaggugaaaugguga

SEQ ID NO: 2574707 - RNA, 19 nt, Homo sapiens
  misc_RNA (1)...(19): siRNA sense strand
ccgaagaccgcauguccua

SEQ ID NO: 2574708 - RNA, 19 nt, Homo sapiens
  misc_RNA (1)...(19): siRNA sense strand
acagaaagcuccuuccaga

SEQ ID NO: 2574709 - RNA, 19 nt, Homo sapiens
  misc_RNA (1)...(19): siRNA sense strand
gcagugaugccgaggagga

SEQ ID NO: 2574710 - RNA, 19 nt, Homo sapiens
  misc_RNA (1)...(19): siRNA sense strand
ccauggaggaugugcuuca

SEQ ID NO: 2574711 - RNA, 19 nt, Homo sapiens
  misc_RNA (1)...(19): siRNA sense strand
cgaguuggagaaaggcuua

SEQ ID NO: 2574712 - RNA, 19 nt, Homo sapiens
  misc_RNA (1)...(19): siRNA sense strand
accaugagacaaagguuaa

SEQ ID NO: 2574713 - RNA, 19 nt, Homo sapiens
  misc_RNA (1)...(19): siRNA sense strand
uggaagagcugauauggga

SEQ ID NO: 2574714 - RNA, 19 nt, Homo sapiens
  misc_RNA (1)...(19): siRNA sense strand
agauggaagggauggauga

SEQ ID NO: 2574715 - RNA, 19 nt, Homo sapiens
  misc_RNA (1)...(19): siRNA sense strand
ggaagagcugauaugggaa

SEQ ID NO: 2574716 - RNA, 19 nt, Homo sapiens
  misc_RNA (1)...(19): siRNA sense strand
gcuuaaaggacacuauuca

SEQ ID NO: 2574717 - RNA, 19 nt, Homo sapiens
  misc_RNA (1)...(19): siRNA sense strand
caguucagcagcucagaaa

SEQ ID NO: 2574718 - RNA, 19 nt, Homo sapiens
  misc_RNA (1)...(19): siRNA sense strand
acugagaacaugucuuuaa

SEQ ID NO: 2574719 - RNA, 19 nt, Homo sapiens
  misc_RNA (1)...(19): siRNA sense strand
guuaaauaccgugaggcaa

SEQ ID NO: 2574720 - RNA, 19 nt, Homo sapiens
  misc_RNA (1)...(19): siRNA sense strand
uggcagaaguuuccggagu

SEQ ID NO: 2574721 - RNA, 19 nt, Homo sapiens
  misc_RNA (1)...(19): siRNA sense strand
aagcugaaggaaaggccaa

SEQ ID NO: 2574722 - RNA, 19 nt, Homo sapiens
  misc_RNA (1)...(19): siRNA sense strand
uagaaaucccuaaagguga

SEQ ID NO: 2574723 - RNA, 19 nt, Homo sapiens
  misc_RNA (1)...(19): siRNA sense strand
gaugaaaagcagagcgaac

SEQ ID NO: 2574724 - RNA, 19 nt, Homo sapiens
  misc_RNA (1)...(19): siRNA sense strand
guaaaggaaaugacccgaa

SEQ ID NO: 2574725 - RNA, 19 nt, Homo sapiens
  misc_RNA (1)...(19): siRNA sense strand
cugacaaugagcuggauga

SEQ ID NO: 2574726 - RNA, 19 nt, Homo sapiens
  misc_RNA (1)...(19): siRNA sense strand
gaaauagagucaaaccgau

SEQ ID NO: 2574727 - RNA, 19 nt, Homo sapiens
  misc_RNA (1)...(19): siRNA sense strand
caguugucccagagaccaa

SEQ ID NO: 2574728 - RNA, 19 nt, Homo sapiens
  misc_RNA (1)...(19): siRNA sense strand
ccagcuuaugagaggguuu

SEQ ID NO: 2574729 - RNA, 19 nt, Homo sapiens
  misc_RNA (1)...(19): siRNA sense strand
ggagaagcgguuugggucu

SEQ ID NO: 2574730 - RNA, 19 nt, Homo sapiens
  misc_RNA (1)...(19): siRNA sense strand
aggaagaagcugaggcuaa

SEQ ID NO: 2574731 - RNA, 19 nt, Homo sapiens
  misc_RNA (1)...(19): siRNA sense strand
aagagaaggauaagagcaa

SEQ ID NO: 2574732 - RNA, 19 nt, Homo sapiens
  misc_RNA (1)...(19): siRNA sense strand
ggaauaagaaggaccgaga

SEQ ID NO: 2574733 - RNA, 19 nt, Homo sapiens
  misc_RNA (1)...(19): siRNA sense strand
cugagaagaugcuggccaa

SEQ ID NO: 2574734 - RNA, 19 nt, Homo sapiens
  misc_RNA (1)...(19): siRNA sense strand
ccagagaagaccagggcuu

SEQ ID NO: 2574735 - RNA, 19 nt, Homo sapiens
  misc_RNA (1)...(19): siRNA sense strand
acaaagaacgagaacgaga

SEQ ID NO: 2574736 - RNA, 19 nt, Homo sapiens
  misc_RNA (1)...(19): siRNA sense strand
uggaggagcuucuggccaa

SEQ ID NO: 2574737 - RNA, 19 nt, Homo sapiens
  misc_RNA (1)...(19): siRNA sense strand
uggaaaugaggaugaggaa

SEQ ID NO: 2574738 - RNA, 19 nt, Homo sapiens
  misc_RNA (1)...(19): siRNA sense strand
cgucauuggucucagaaaa

SEQ ID NO: 2574739 - RNA, 19 nt, Homo sapiens
  misc_RNA (1)...(19): siRNA sense strand
agaaggaugaagaggauga

SEQ ID NO: 2574740 - RNA, 19 nt, Homo sapiens
  misc_RNA (1)...(19): siRNA sense strand
uggaagagcggcagaggau

SEQ ID NO: 2574741 - RNA, 19 nt, Homo sapiens
  misc_RNA (1)...(19): siRNA sense strand
aagcagaacgagaggcuga

SEQ ID NO: 2574742 - RNA, 19 nt, Homo sapiens
  misc_RNA (1)...(19): siRNA sense strand
gagucagaaaagaggaaaa

SEQ ID NO: 2574743 - RNA, 19 nt, Homo sapiens
  misc_RNA (1)...(19): siRNA sense strand
auggagaccuaauggagaa

SEQ ID NO: 2574744 - RNA, 19 nt, Homo sapiens
  misc_RNA (1)...(19): siRNA sense strand
ggaucuuccgugaggacua

SEQ ID NO: 2574745 - RNA, 19 nt, Homo sapiens
  misc_RNA (1)...(19): siRNA sense strand
agaagauccuggagcacau

SEQ ID NO: 2574746 - RNA, 19 nt, Homo sapiens
  misc_RNA (1)...(19): siRNA sense strand
ccaacuuugagucgggaaa

SEQ ID NO: 2574747 - RNA, 19 nt, Homo sapiens
  misc_RNA (1)...(19): siRNA sense strand
ccugacagagagcgggaua

SEQ ID NO: 2574748 - RNA, 19 nt, Homo sapiens
  misc_RNA (1)...(19): siRNA sense strand
uggccaaaucccuggagaa

SEQ ID NO: 2574749 - RNA, 19 nt, Homo sapiens
  misc_RNA (1)...(19): siRNA sense strand
cuaagaaggaugaagagga

SEQ ID NO: 2574750 - RNA, 19 nt, Homo sapiens
  misc_RNA (1)...(19): siRNA sense strand
cuugaagaagagaggaaga

SEQ ID NO: 2574751 - RNA, 19 nt, Homo sapiens
  misc_RNA (1)...(19): siRNA sense strand
ggcugaagcucuaaagcga

SEQ ID NO: 2574752 - RNA, 19 nt, Homo sapiens
  misc_RNA (1)...(19): siRNA sense strand
gcaaggaacugcaugccau

SEQ ID NO: 2574753 - RNA, 19 nt, Homo sapiens
  misc_RNA (1)...(19): siRNA sense strand
aggaugaagaggaugaaca

SEQ ID NO: 2574754 - RNA, 19 nt, Homo sapiens
  misc_RNA (1)...(19): siRNA sense strand
cuaauggagaagaggcgaa

SEQ ID NO: 2574755 - RNA, 19 nt, Homo sapiens
  misc_RNA (1)...(19): siRNA sense strand
agauugaggaagagaccau

SEQ ID NO: 2574756 - RNA, 19 nt, Homo sapiens
  misc_RNA (1)...(19): siRNA sense strand
ccguaaacgauccagcuua

SEQ ID NO: 2574757 - RNA, 19 nt, Homo sapiens
  misc_RNA (1)...(19): siRNA sense strand
acucuaagaaggaugaaga

SEQ ID NO: 2574758 - RNA, 19 nt, Homo sapiens
  misc_RNA (1)...(19): siRNA sense strand
cugaggacccugagaagau

SEQ ID NO: 2574759 - RNA, 19 nt, Homo sapiens
  misc_RNA (1)...(19): siRNA sense strand
gcugcgacguguuggccaa

SEQ ID NO: 2574760 - RNA, 19 nt, Homo sapiens
  misc_RNA (1)...(19): siRNA sense strand
ugaagaagagaggaagaaa

SEQ ID NO: 2574761 - RNA, 19 nt, Homo sapiens
  misc_RNA (1)...(19): siRNA sense strand
ggaacgggaacgucgggaa

SEQ ID NO: 2574762 - RNA, 19 nt, Homo sapiens
  misc_RNA (1)...(19): siRNA sense strand
gggagaggauggaacggga

SEQ ID NO: 2574763 - RNA, 19 nt, Homo sapiens
  misc_RNA (1)...(19): siRNA sense strand
cgagauaaggagcgggauc

SEQ ID NO: 2574764 - RNA, 19 nt, Homo sapiens
  misc_RNA (1)...(19): siRNA sense strand
ggauagacgucgaggaggc

SEQ ID NO: 2574765 - RNA, 19 nt, Homo sapiens
  misc_RNA (1)...(19): siRNA sense strand
ugcuugaagaagagaggaa

SEQ ID NO: 2574766 - RNA, 19 nt, Homo sapiens
  misc_RNA (1)...(19): siRNA sense strand
aggcgaacccuggaagaaa

SEQ ID NO: 2574767 - RNA, 19 nt, Homo sapiens
  misc_RNA (1)...(19): siRNA sense strand
agccagauguccagaagau

SEQ ID NO: 2574768 - RNA, 19 nt, Homo sapiens
  misc_RNA (1)...(19): siRNA sense strand
ggagcaaggcuuugaccca

SEQ ID NO: 2574769 - RNA, 19 nt, Homo sapiens
  misc_RNA (1)...(19): siRNA sense strand
gaccaauggaaaugaggau

SEQ ID NO: 2574770 - RNA, 19 nt, Homo sapiens
  misc_RNA (1)...(19): siRNA sense strand
cggcagaagauccgggaag

SEQ ID NO: 2574771 - RNA, 19 nt, Homo sapiens
  misc_RNA (1)...(19): siRNA sense strand
gaagagaaggauaagagca

SEQ ID NO: 2574772 - RNA, 19 nt, Homo sapiens
  misc_RNA (1)...(19): siRNA sense strand
aggauaagagcaaggaacu

SEQ ID NO: 2574773 - RNA, 19 nt, Homo sapiens
  misc_RNA (1)...(19): siRNA sense strand
ggaugauugacaugggcuu

SEQ ID NO: 2574774 - RNA, 19 nt, Homo sapiens
  misc_RNA (1)...(19): siRNA sense strand
agaagauccgggaagagaa

SEQ ID NO: 2574775 - RNA, 19 nt, Homo sapiens
  misc_RNA (1)...(19): siRNA sense strand
aagaaaaggagcaggagga

SEQ ID NO: 2574776 - RNA, 19 nt, Homo sapiens
  misc_RNA (1)...(19): siRNA sense strand
uggaugaggcagauaggau

SEQ ID NO: 2574777 - RNA, 19 nt, Homo sapiens
  misc_RNA (1)...(19): siRNA sense strand
ccaggagcagcgagaguuu

SEQ ID NO: 2574778 - RNA, 19 nt, Homo sapiens
  misc_RNA (1)...(19): siRNA sense strand
gaaaugaggaugaggaagg

SEQ ID NO: 2574779 - RNA, 19 nt, Homo sapiens
  misc_RNA (1)...(19): siRNA sense strand
cccaugagcguguggaaca

SEQ ID NO: 2574780 - RNA, 19 nt, Homo sapiens
  misc_RNA (1)...(19): siRNA sense strand
gcacacugcacgguggaaa

SEQ ID NO: 2574781 - RNA, 19 nt, Homo sapiens
  misc_RNA (1)...(19): siRNA sense strand
ggcagcaggagguggaaga

SEQ ID NO: 2574782 - RNA, 19 nt, Homo sapiens
  misc_RNA (1)...(19): siRNA sense strand
cagcuuaucuccuggucga

SEQ ID NO: 2574783 - RNA, 19 nt, Homo sapiens
  misc_RNA (1)...(19): siRNA sense strand
gggaacgcagggagaggau

SEQ ID NO: 2574784 - RNA, 19 nt, Homo sapiens
  misc_RNA (1)...(19): siRNA sense strand
acgggagaccaauggaaau

SEQ ID NO: 2574785 - RNA, 19 nt, Homo sapiens
  misc_RNA (1)...(19): siRNA sense strand
aggaugaacauggugauaa

SEQ ID NO: 2574786 - RNA, 19 nt, Homo sapiens
  misc_RNA (1)...(19): siRNA sense strand
ucaacuaugauauggccaa

SEQ ID NO: 2574787 - RNA, 19 nt, Homo sapiens
  misc_RNA (1)...(19): siRNA sense strand
guguaaggaaggagaagau

SEQ ID NO: 2574788 - RNA, 19 nt, Homo sapiens
  misc_RNA (1)...(19): siRNA sense strand
aggauuacacaguggagaa

SEQ ID NO: 2574789 - RNA, 19 nt, Homo sapiens
  misc_RNA (1)...(19): siRNA sense strand
aggaaggagaagaugaaca

SEQ ID NO: 2574790 - RNA, 19 nt, Homo sapiens
  misc_RNA (1)...(19): siRNA sense strand
guauaaggagggagaacgu

SEQ ID NO: 2574791 - RNA, 19 nt, Homo sapiens
  misc_RNA (1)...(19): siRNA sense strand
cguacaggugcuaugcuua

SEQ ID NO: 2574792 - RNA, 19 nt, Homo sapiens
  misc_RNA (1)...(19): siRNA sense strand
agacaaacagaauggaaca

SEQ ID NO: 2574793 - RNA, 19 nt, Homo sapiens
  misc_RNA (1)...(19): siRNA sense strand
ugacugagaucuauggaga

SEQ ID NO: 2574794 - RNA, 19 nt, Homo sapiens
  misc_RNA (1)...(19): siRNA sense strand
ggugggaauaugagcacaa

SEQ ID NO: 2574795 - RNA, 19 nt, Homo sapiens
  misc_RNA (1)...(19): siRNA sense strand
ucaaagcagucaaaggcua

SEQ ID NO: 2574796 - RNA, 19 nt, Homo sapiens
  misc_RNA (1)...(19): siRNA sense strand
cuuccaaacagguggugaa

SEQ ID NO: 2574797 - RNA, 19 nt, Homo sapiens
  misc_RNA (1)...(19): siRNA sense strand
acgaugaacagcaggaaga

SEQ ID NO: 2574798 - RNA, 19 nt, Homo sapiens
  misc_RNA (1)...(19): siRNA sense strand
ggaaggagauguagaggag

SEQ ID NO: 2574799 - RNA, 19 nt, Homo sapiens
  misc_RNA (1)...(19): siRNA sense strand
uuacaagaagcuuuggaaa

SEQ ID NO: 2574800 - RNA, 19 nt, Homo sapiens
  misc_RNA (1)...(19): siRNA sense strand
agucuuaggagaaguguau

SEQ ID NO: 2574801 - RNA, 19 nt, Homo sapiens
  misc_RNA (1)...(19): siRNA sense strand
gauuaagagguuacugcaa

SEQ ID NO: 2574802 - RNA, 19 nt, Homo sapiens
  misc_RNA (1)...(19): siRNA sense strand
uacaagaagcuuuggaaaa

SEQ ID NO: 2574803 - RNA, 19 nt, Homo sapiens
  misc_RNA (1)...(19): siRNA sense strand
gguagauuuaauagaccua

SEQ ID NO: 2574804 - RNA, 19 nt, Homo sapiens
  misc_RNA (1)...(19): siRNA sense strand
cagcacugaccauggacaa

SEQ ID NO: 2574805 - RNA, 19 nt, Homo sapiens
  misc_RNA (1)...(19): siRNA sense strand
ggaaaggugaggcagguga

SEQ ID NO: 2574806 - RNA, 19 nt, Homo sapiens
  misc_RNA (1)...(19): siRNA sense strand
aagcaaggccugcaggaga

SEQ ID NO: 2574807 - RNA, 19 nt, Homo sapiens
  misc_RNA (1)...(19): siRNA sense strand
cugagugcaaggagaaauu

SEQ ID NO: 2574808 - RNA, 19 nt, Homo sapiens
  misc_RNA (1)...(19): siRNA sense strand
uugaacaccaguugauuaa

SEQ ID NO: 2574809 - RNA, 19 nt, Homo sapiens
  misc_RNA (1)...(19): siRNA sense strand
cagacuuucauguuggaua

SEQ ID NO: 2574810 - RNA, 19 nt, Homo sapiens
  misc_RNA (1)...(19): siRNA sense strand
ggaaggaaaucucggggau

SEQ ID NO: 2574811 - RNA, 19 nt, Homo sapiens
  misc_RNA (1)...(19): siRNA sense strand
aaaucgaagcuguggagau

SEQ ID NO: 2574812 - RNA, 19 nt, Homo sapiens
  misc_RNA (1)...(19): siRNA sense strand
cauugaaguuugaacacca

SEQ ID NO: 2574813 - RNA, 19 nt, Homo sapiens
  misc_RNA (1)...(19): siRNA sense strand
ucaaagaagaugaacaaac

SEQ ID NO: 2574814 - RNA, 19 nt, Homo sapiens
  misc_RNA (1)...(19): siRNA sense strand
agaugaacaaacagacuuu

SEQ ID NO: 2574815 - RNA, 19 nt, Homo sapiens
  misc_RNA (1)...(19): siRNA sense strand
cugaugaagaguaugauga

SEQ ID NO: 2574816 - RNA, 19 nt, Homo sapiens
  misc_RNA (1)...(19): siRNA sense strand
acacaauugagucaggaau

SEQ ID NO: 2574817 - RNA, 19 nt, Homo sapiens
  misc_RNA (1)...(19): siRNA sense strand
ugagccaauggaagagaaa

SEQ ID NO: 2574818 - RNA, 19 nt, Homo sapiens
  misc_RNA (1)...(19): siRNA sense strand
agccaauggaagagaaacu

SEQ ID NO: 2574819 - RNA, 19 nt, Homo sapiens
  misc_RNA (1)...(19): siRNA sense strand
uguaguuuguguaaagaga

SEQ ID NO: 2574820 - RNA, 19 nt, Homo sapiens
  misc_RNA (1)...(19): siRNA sense strand
augcaacacaauugaguca

SEQ ID NO: 2574821 - RNA, 19 nt, Homo sapiens
  misc_RNA (1)...(19): siRNA sense strand
gggaacacaugaagccagu

SEQ ID NO: 2574822 - RNA, 19 nt, Homo sapiens
  misc_RNA (1)...(19): siRNA sense strand
acagaauggaacagucuau

SEQ ID NO: 2574823 - RNA, 19 nt, Homo sapiens
  misc_RNA (1)...(19): siRNA sense strand
gaauggaguggucgggcau

SEQ ID NO: 2574824 - RNA, 19 nt, Homo sapiens
  misc_RNA (1)...(19): siRNA sense strand
gauugaaagcaguggaguc

SEQ ID NO: 2574825 - RNA, 19 nt, Homo sapiens
  misc_RNA (1)...(19): siRNA sense strand
aagaagaugaacaaacaga

SEQ ID NO: 2574826 - RNA, 19 nt, Homo sapiens
  misc_RNA (1)...(19): siRNA sense strand
caaugagaggauucaagua

SEQ ID NO: 2574827 - RNA, 19 nt, Homo sapiens
  misc_RNA (1)...(19): siRNA sense strand
aggaaggagauguagagga

SEQ ID NO: 2574828 - RNA, 19 nt, Homo sapiens
  misc_RNA (1)...(19): siRNA sense strand
ggagaaguguaucugcaca

SEQ ID NO: 2574829 - RNA, 19 nt, Homo sapiens
  misc_RNA (1)...(19): siRNA sense strand
gggaggacgaugaggacaa

SEQ ID NO: 2574830 - RNA, 19 nt, Homo sapiens
  misc_RNA (1)...(19): siRNA sense strand
agaugaagcuggagcccaa

SEQ ID NO: 2574831 - RNA, 19 nt, Homo sapiens
  misc_RNA (1)...(19): siRNA sense strand
augguaaagucacggguaa

SEQ ID NO: 2574832 - RNA, 19 nt, Homo sapiens
  misc_RNA (1)...(19): siRNA sense strand
ggacaaagacuuggagcca

SEQ ID NO: 2574833 - RNA, 19 nt, Homo sapiens
  misc_RNA (1)...(19): siRNA sense strand
aggagaaaccagaccagaa

SEQ ID NO: 2574834 - RNA, 19 nt, Homo sapiens
  misc_RNA (1)...(19): siRNA sense strand
agaagaaagaggugaucca

SEQ ID NO: 2574835 - RNA, 19 nt, Homo sapiens
  misc_RNA (1)...(19): siRNA sense strand
aggaggagaagguggugaa

SEQ ID NO: 2574836 - RNA, 19 nt, Homo sapiens
  misc_RNA (1)...(19): siRNA sense strand
ugcuaugggaagagggcaa

SEQ ID NO: 2574837 - RNA, 19 nt, Homo sapiens
  misc_RNA (1)...(19): siRNA sense strand
gcauaaagauccuggccag

SEQ ID NO: 2574838 - RNA, 19 nt, Homo sapiens
  misc_RNA (1)...(19): siRNA sense strand
cggaggagacagugaagca

SEQ ID NO: 2574839 - RNA, 19 nt, Homo sapiens
  misc_RNA (1)...(19): siRNA sense strand
uggagaagaaagaggugau

SEQ ID NO: 2574840 - RNA, 19 nt, Homo sapiens
  misc_RNA (1)...(19): siRNA sense strand
aggaggagcccaaggagga

SEQ ID NO: 2574841 - RNA, 19 nt, Homo sapiens
  misc_RNA (1)...(19): siRNA sense strand
gugaagugcgacaugaaau

SEQ ID NO: 2574842 - RNA, 19 nt, Homo sapiens
  misc_RNA (1)...(19): siRNA sense strand
aggaggaacagaagcugaa

SEQ ID NO: 2574843 - RNA, 19 nt, Homo sapiens
  misc_RNA (1)...(19): siRNA sense strand
cugaggugauccaggccua

SEQ ID NO: 2574844 - RNA, 19 nt, Homo sapiens
  misc_RNA (1)...(19): siRNA sense strand
ccaaacagugcaaggagga

SEQ ID NO: 2574845 - RNA, 19 nt, Homo sapiens
  misc_RNA (1)...(19): siRNA sense strand
ccaucguggugaaggaagu

SEQ ID NO: 2574846 - RNA, 19 nt, Homo sapiens
  misc_RNA (1)...(19): siRNA sense strand
agcaggagccagaggccaa

SEQ ID NO: 2574847 - RNA, 19 nt, Homo sapiens
  misc_RNA (1)...(19): siRNA sense strand
guacaacgugcuaugggaa

SEQ ID NO: 2574848 - RNA, 19 nt, Homo sapiens
  misc_RNA (1)...(19): siRNA sense strand
ccgugaagugcgacaugaa

SEQ ID NO: 2574849 - RNA, 19 nt, Homo sapiens
  misc_RNA (1)...(19): siRNA sense strand
guaagaaucugaagcugca

SEQ ID NO: 2574850 - RNA, 19 nt, Homo sapiens
  misc_RNA (1)...(19): siRNA sense strand
agugcaaggaggagcccaa

SEQ ID NO: 2574851 - RNA, 19 nt, Homo sapiens
  misc_RNA (1)...(19): siRNA sense strand
ucaccaagguugugcugga

SEQ ID NO: 2574852 - RNA, 19 nt, Homo sapiens
  misc_RNA (1)...(19): siRNA sense strand
ccaaggugugggagggcuu

SEQ ID NO: 2574853 - RNA, 19 nt, Homo sapiens
  misc_RNA (1)...(19): siRNA sense strand
gguaaagucacggguaauu

SEQ ID NO: 2574854 - RNA, 19 nt, Homo sapiens
  misc_RNA (1)...(19): siRNA sense strand
ucaagaagaugaagcugga

SEQ ID NO: 2574855 - RNA, 19 nt, Homo sapiens
  misc_RNA (1)...(19): siRNA sense strand
gcauguaugagaaggagca

SEQ ID NO: 2574856 - RNA, 19 nt, Homo sapiens
  misc_RNA (1)...(19): siRNA sense strand
cccagcauggugagggaaa

SEQ ID NO: 2574857 - RNA, 19 nt, Homo sapiens
  misc_RNA (1)...(19): siRNA sense strand
ggcucuaccaggaguacaa

SEQ ID NO: 2574858 - RNA, 19 nt, Homo sapiens
  misc_RNA (1)...(19): siRNA sense strand
gcucccaugagaaggacaa

SEQ ID NO: 2574859 - RNA, 19 nt, Homo sapiens
  misc_RNA (1)...(19): siRNA sense strand
cugcacagccucacagaca

SEQ ID NO: 2574860 - RNA, 19 nt, Homo sapiens
  misc_RNA (1)...(19): siRNA sense strand
ccuuaaagcggcagcugga

SEQ ID NO: 2574861 - RNA, 19 nt, Homo sapiens
  misc_RNA (1)...(19): siRNA sense strand
aggugagcagugugcguaa

SEQ ID NO: 2574862 - RNA, 19 nt, Homo sapiens
  misc_RNA (1)...(19): siRNA sense strand
cgccugauaauguggcuaa

SEQ ID NO: 2574863 - RNA, 19 nt, Homo sapiens
  misc_RNA (1)...(19): siRNA sense strand
ggcccuuggaggaggauga

SEQ ID NO: 2574864 - RNA, 19 nt, Homo sapiens
  misc_RNA (1)...(19): siRNA sense strand
uggugaagacagagagcgu

SEQ ID NO: 2574865 - RNA, 19 nt, Homo sapiens
  misc_RNA (1)...(19): siRNA sense strand
uggagaaauuugcccucaa

SEQ ID NO: 2574866 - RNA, 19 nt, Homo sapiens
  misc_RNA (1)...(19): siRNA sense strand
ccaagggagcagagacacu

SEQ ID NO: 2574867 - RNA, 19 nt, Homo sapiens
  misc_RNA (1)...(19): siRNA sense strand
gggaccagguguagagcag

SEQ ID NO: 2574868 - RNA, 19 nt, Homo sapiens
  misc_RNA (1)...(19): siRNA sense strand
ugguaaagucacggguaau

SEQ ID NO: 2574869 - RNA, 19 nt, Homo sapiens
  misc_RNA (1)...(19): siRNA sense strand
aggacgaugaggacaaaga

SEQ ID NO: 2574870 - RNA, 19 nt, Homo sapiens
  misc_RNA (1)...(19): siRNA sense strand
ccacacucaagaagaugaa

SEQ ID NO: 2574871 - RNA, 19 nt, Homo sapiens
  misc_RNA (1)...(19): siRNA sense strand
gggcagacgcuaaccguga

SEQ ID NO: 2574872 - RNA, 19 nt, Homo sapiens
  misc_RNA (1)...(19): siRNA sense strand
accuguagagagagaaaua

SEQ ID NO: 2574873 - RNA, 19 nt, Homo sapiens
  misc_RNA (1)...(19): siRNA sense strand
cuguagagagagaaauauu

SEQ ID NO: 2574874 - RNA, 19 nt, Homo sapiens
  misc_RNA (1)...(19): siRNA sense strand
ucaccuguagagagagaaa

SEQ ID NO: 2574875 - RNA, 19 nt, Homo sapiens
  misc_RNA (1)...(19): siRNA sense strand
agauaagcgaugaugauga

SEQ ID NO: 2574876 - RNA, 19 nt, Homo sapiens
  misc_RNA (1)...(19): siRNA sense strand
agaggaagacucaggacau

SEQ ID NO: 2574877 - RNA, 19 nt, Homo sapiens
  misc_RNA (1)...(19): siRNA sense strand
gagaggaagacucaggaca

SEQ ID NO: 2574878 - RNA, 19 nt, Homo sapiens
  misc_RNA (1)...(19): siRNA sense strand
aggcacaauccaaggcuca

SEQ ID NO: 2574879 - RNA, 19 nt, Homo sapiens
  misc_RNA (1)...(19): siRNA sense strand
guggcagggcagacgcuaa

SEQ ID NO: 2574880 - RNA, 19 nt, Homo sapiens
  misc_RNA (1)...(19): siRNA sense strand
ucucaugucucaaggcuca

SEQ ID NO: 2574881 - RNA, 19 nt, Homo sapiens
  misc_RNA (1)...(19): siRNA sense strand
guggaagaaggaaaggaga

SEQ ID NO: 2574882 - RNA, 19 nt, Homo sapiens
  misc_RNA (1)...(19): siRNA sense strand
agaaauuccaggaggugaa

SEQ ID NO: 2574883 - RNA, 19 nt, Homo sapiens
  misc_RNA (1)...(19): siRNA sense strand
ucgaggagcuggaggcaga

SEQ ID NO: 2574884 - RNA, 19 nt, Homo sapiens
  misc_RNA (1)...(19): siRNA sense strand
cagacauugaggagagcaa

SEQ ID NO: 2574885 - RNA, 19 nt, Homo sapiens
  misc_RNA (1)...(19): siRNA sense strand
agagagaaggagaagaaca

SEQ ID NO: 2574886 - RNA, 19 nt, Homo sapiens
  misc_RNA (1)...(19): siRNA sense strand
agguggaguugaagagcuu

SEQ ID NO: 2574887 - RNA, 19 nt, Homo sapiens
  misc_RNA (1)...(19): siRNA sense strand
gcaaauaccgacagcgcca

SEQ ID NO: 2574888 - RNA, 19 nt, Homo sapiens
  misc_RNA (1)...(19): siRNA sense strand
cugcagacccuucgggaga

SEQ ID NO: 2574889 - RNA, 19 nt, Homo sapiens
  misc_RNA (1)...(19): siRNA sense strand
ucaacagagagaaggagaa

SEQ ID NO: 2574890 - RNA, 19 nt, Homo sapiens
  misc_RNA (1)...(19): siRNA sense strand
agugagaucaacagagaga

SEQ ID NO: 2574891 - RNA, 19 nt, Homo sapiens
  misc_RNA (1)...(19): siRNA sense strand
gagaagaacacgcagcuga

SEQ ID NO: 2574892 - RNA, 19 nt, Homo sapiens
  misc_RNA (1)...(19): siRNA sense strand
uggaggugcuggacgggaa

SEQ ID NO: 2574893 - RNA, 19 nt, Homo sapiens
  misc_RNA (1)...(19): siRNA sense strand
gagcaguggaagaggcagu

SEQ ID NO: 2574894 - RNA, 19 nt, Homo sapiens
  misc_RNA (1)...(19): siRNA sense strand
cagagaaauuccaggaggu

SEQ ID NO: 2574895 - RNA, 19 nt, Homo sapiens
  misc_RNA (1)...(19): siRNA sense strand
gcaacaagauugaugagcu

SEQ ID NO: 2574896 - RNA, 19 nt, Homo sapiens
  misc_RNA (1)...(19): siRNA sense strand
agacagacauugaggagag

SEQ ID NO: 2574897 - RNA, 19 nt, Homo sapiens
  misc_RNA (1)...(19): siRNA sense strand
caacaagauugaugagcug

SEQ ID NO: 2574898 - RNA, 19 nt, Homo sapiens
  misc_RNA (1)...(19): siRNA sense strand
ugaagaagugggagaucga

SEQ ID NO: 2574899 - RNA, 19 nt, Homo sapiens
  misc_RNA (1)...(19): siRNA sense strand
agaacaaugcagugagauc

SEQ ID NO: 2574900 - RNA, 19 nt, Homo sapiens
  misc_RNA (1)...(19): siRNA sense strand
accugaagucugagaauga

SEQ ID NO: 2574901 - RNA, 19 nt, Homo sapiens
  misc_RNA (1)...(19): siRNA sense strand
cugagaaugacaagcugaa

SEQ ID NO: 2574902 - RNA, 19 nt, Homo sapiens
  misc_RNA (1)...(19): siRNA sense strand
agauugaugagcuggaaga

SEQ ID NO: 2574903 - RNA, 19 nt, Homo sapiens
  misc_RNA (1)...(19): siRNA sense strand
aucaaaaccuggaagacaa

SEQ ID NO: 2574904 - RNA, 19 nt, Homo sapiens
  misc_RNA (1)...(19): siRNA sense strand
acacacaccugaagucuga

SEQ ID NO: 2574905 - RNA, 19 nt, Homo sapiens
  misc_RNA (1)...(19): siRNA sense strand
ccgaaaacaaagugaaauc

SEQ ID NO: 2574906 - RNA, 19 nt, Homo sapiens
  misc_RNA (1)...(19): siRNA sense strand
acuggaugccugcgagcaa

SEQ ID NO: 2574907 - RNA, 19 nt, Homo sapiens
  misc_RNA (1)...(19): siRNA sense strand
cagcacaaucacaccgaau

SEQ ID NO: 2574908 - RNA, 19 nt, Homo sapiens
  misc_RNA (1)...(19): siRNA sense strand
gaaagaucuccgaaaacaa

SEQ ID NO: 2574909 - RNA, 19 nt, Homo sapiens
  misc_RNA (1)...(19): siRNA sense strand
gacauugaggagagcaaau

SEQ ID NO: 2574910 - RNA, 19 nt, Homo sapiens
  misc_RNA (1)...(19): siRNA sense strand
acaagacgcaggagaaaau

SEQ ID NO: 2574911 - RNA, 19 nt, Homo sapiens
  misc_RNA (1)...(19): siRNA sense strand
gagaaaaucgagaccucaa

SEQ ID NO: 2574912 - RNA, 19 nt, Homo sapiens
  misc_RNA (1)...(19): siRNA sense strand
ugaugagcuggaagaacaa

SEQ ID NO: 2574913 - RNA, 19 nt, Homo sapiens
  misc_RNA (1)...(19): siRNA sense strand
agaucaacagagagaagga

SEQ ID NO: 2574914 - RNA, 19 nt, Homo sapiens
  misc_RNA (1)...(19): siRNA sense strand
uagaggcggcagagagaga

SEQ ID NO: 2574915 - RNA, 19 nt, Homo sapiens
  misc_RNA (1)...(19): siRNA sense strand
ugacaggauucuacaacaa

SEQ ID NO: 2574916 - RNA, 19 nt, Homo sapiens
  misc_RNA (1)...(19): siRNA sense strand
cugcacagcuugacccuua

SEQ ID NO: 2574917 - RNA, 19 nt, Homo sapiens
  misc_RNA (1)...(19): siRNA sense strand
ggauaaagagggaagccca

SEQ ID NO: 2574918 - RNA, 19 nt, Homo sapiens
  misc_RNA (1)...(19): siRNA sense strand
gaggacaggcagauggaca

SEQ ID NO: 2574919 - RNA, 19 nt, Homo sapiens
  misc_RNA (1)...(19): siRNA sense strand
gagacagagcccaaggaca

SEQ ID NO: 2574920 - RNA, 19 nt, Homo sapiens
  misc_RNA (1)...(19): siRNA sense strand
cugcggagacagagcccaa

SEQ ID NO: 2574921 - RNA, 19 nt, Homo sapiens
  misc_RNA (1)...(19): siRNA sense strand
agacagagcccaaggacag

SEQ ID NO: 2574922 - RNA, 19 nt, Homo sapiens
  misc_RNA (1)...(19): siRNA sense strand
guggcucacagaagggaua

SEQ ID NO: 2574923 - RNA, 19 nt, Homo sapiens
  misc_RNA (1)...(19): siRNA sense strand
ccucccaggaugugaccua

SEQ ID NO: 2574924 - RNA, 19 nt, Homo sapiens
  misc_RNA (1)...(19): siRNA sense strand
agaaauaacccacuggaac

SEQ ID NO: 2574925 - RNA, 19 nt, Homo sapiens
  misc_RNA (1)...(19): siRNA sense strand
aggacaggguggagcugga

SEQ ID NO: 2574926 - RNA, 19 nt, Homo sapiens
  misc_RNA (1)...(19): siRNA sense strand
ucugaugaaggaaggagaa

SEQ ID NO: 2574927 - RNA, 19 nt, Homo sapiens
  misc_RNA (1)...(19): siRNA sense strand
gaugaaggaaggagaacac

SEQ ID NO: 2574928 - RNA, 19 nt, Homo sapiens
  misc_RNA (1)...(19): siRNA sense strand
aguuagaaucagaggauau

SEQ ID NO: 2574929 - RNA, 19 nt, Homo sapiens
  misc_RNA (1)...(19): siRNA sense strand
gguuacagcccgagugcaa

SEQ ID NO: 2574930 - RNA, 19 nt, Homo sapiens
  misc_RNA (1)...(19): siRNA sense strand
cuaaacaugcugaaggaaa

SEQ ID NO: 2574931 - RNA, 19 nt, Homo sapiens
  misc_RNA (1)...(19): siRNA sense strand
cugaugaaccgguuggaaa

SEQ ID NO: 2574932 - RNA, 19 nt, Homo sapiens
  misc_RNA (1)...(19): siRNA sense strand
guagagauauaguuggcaa

SEQ ID NO: 2574933 - RNA, 19 nt, Homo sapiens
  misc_RNA (1)...(19): siRNA sense strand
cagucuaugugcugaagaa

SEQ ID NO: 2574934 - RNA, 19 nt, Homo sapiens
  misc_RNA (1)...(19): siRNA sense strand
ggaagcuggcggaggaaga

SEQ ID NO: 2574935 - RNA, 19 nt, Homo sapiens
  misc_RNA (1)...(19): siRNA sense strand
gauuaaagaaugugcugau

SEQ ID NO: 2574936 - RNA, 19 nt, Homo sapiens
  misc_RNA (1)...(19): siRNA sense strand
acacagagaagaugguaga

SEQ ID NO: 2574937 - RNA, 19 nt, Homo sapiens
  misc_RNA (1)...(19): siRNA sense strand
uggaaugagaccagugaau

SEQ ID NO: 2574938 - RNA, 19 nt, Homo sapiens
  misc_RNA (1)...(19): siRNA sense strand
aggauaagcgggugagguu

SEQ ID NO: 2574939 - RNA, 19 nt, Homo sapiens
  misc_RNA (1)...(19): siRNA sense strand
gcggauaaccagauagacu

SEQ ID NO: 2574940 - RNA, 19 nt, Homo sapiens
  misc_RNA (1)...(19): siRNA sense strand
gugaauugauggaucccaa

SEQ ID NO: 2574941 - RNA, 19 nt, Homo sapiens
  misc_RNA (1)...(19): siRNA sense strand
uugaagaauccaugaguga

SEQ ID NO: 2574942 - RNA, 19 nt, Homo sapiens
  misc_RNA (1)...(19): siRNA sense strand
aagcacaccuggagcaaca

SEQ ID NO: 2574943 - RNA, 19 nt, Homo sapiens
  misc_RNA (1)...(19): siRNA sense strand
cagaaggacaugaacgaga

SEQ ID NO: 2574944 - RNA, 19 nt, Homo sapiens
  misc_RNA (1)...(19): siRNA sense strand
ugaagaagcagcagcccaa

SEQ ID NO: 2574945 - RNA, 19 nt, Homo sapiens
  misc_RNA (1)...(19): siRNA sense strand
ugaaagaagcagaagaaag

SEQ ID NO: 2574946 - RNA, 19 nt, Homo sapiens
  misc_RNA (1)...(19): siRNA sense strand
agaacaaacaccagaagga

SEQ ID NO: 2574947 - RNA, 19 nt, Homo sapiens
  misc_RNA (1)...(19): siRNA sense strand
uauaagaucuggagaccca

SEQ ID NO: 2574948 - RNA, 19 nt, Homo sapiens
  misc_RNA (1)...(19): siRNA sense strand
cagaagaaagagaacccaa

SEQ ID NO: 2574949 - RNA, 19 nt, Homo sapiens
  misc_RNA (1)...(19): siRNA sense strand
aggagugccucaaggucaa

SEQ ID NO: 2574950 - RNA, 19 nt, Homo sapiens
  misc_RNA (1)...(19): siRNA sense strand
caguauucggcuuggagaa

SEQ ID NO: 2574951 - RNA, 19 nt, Homo sapiens
  misc_RNA (1)...(19): siRNA sense strand
cugcaaacauauaagaucu

SEQ ID NO: 2574952 - RNA, 19 nt, Homo sapiens
  misc_RNA (1)...(19): siRNA sense strand
guauuuaagcugcaggaga

SEQ ID NO: 2574953 - RNA, 19 nt, Homo sapiens
  misc_RNA (1)...(19): siRNA sense strand
aggcaacaucacugaguau

SEQ ID NO: 2574954 - RNA, 19 nt, Homo sapiens
  misc_RNA (1)...(19): siRNA sense strand
cgucgugccugauggaaca

SEQ ID NO: 2574955 - RNA, 19 nt, Homo sapiens
  misc_RNA (1)...(19): siRNA sense strand
gguagaagacugugaacac

SEQ ID NO: 2574956 - RNA, 19 nt, Homo sapiens
  misc_RNA (1)...(19): siRNA sense strand
gcacugaagaacagggaag

SEQ ID NO: 2574957 - RNA, 19 nt, Homo sapiens
  misc_RNA (1)...(19): siRNA sense strand
cggauugagauguggaguu

SEQ ID NO: 2574958 - RNA, 19 nt, Homo sapiens
  misc_RNA (1)...(19): siRNA sense strand
ucgaaugucugaaagaaaa

SEQ ID NO: 2574959 - RNA, 19 nt, Homo sapiens
  misc_RNA (1)...(19): siRNA sense strand
ggccagagagguuugcaaa

SEQ ID NO: 2574960 - RNA, 19 nt, Homo sapiens
  misc_RNA (1)...(19): siRNA sense strand
uggagaaaggccuggugaa

SEQ ID NO: 2574961 - RNA, 19 nt, Homo sapiens
  misc_RNA (1)...(19): siRNA sense strand
uggagaugacggaggacau

SEQ ID NO: 2574962 - RNA, 19 nt, Homo sapiens
  misc_RNA (1)...(19): siRNA sense strand
uggugagggcagaguguau

SEQ ID NO: 2574963 - RNA, 19 nt, Homo sapiens
  misc_RNA (1)...(19): siRNA sense strand
ccuaaauucugucacggua

SEQ ID NO: 2574964 - RNA, 19 nt, Homo sapiens
  misc_RNA (1)...(19): siRNA sense strand
ugaugaaccgguuggaaaa

SEQ ID NO: 2574965 - RNA, 19 nt, Homo sapiens
  misc_RNA (1)...(19): siRNA sense strand
gcaacaucacugaguauca

SEQ ID NO: 2574966 - RNA, 19 nt, Homo sapiens
  misc_RNA (1)...(19): siRNA sense strand
ugaaaagugucgagaagca

SEQ ID NO: 2574967 - RNA, 19 nt, Homo sapiens
  misc_RNA (1)...(19): siRNA sense strand
gcccaggauuauaaaguca

SEQ ID NO: 2574968 - RNA, 19 nt, Homo sapiens
  misc_RNA (1)...(19): siRNA sense strand
gugaagaccagauccgaau

SEQ ID NO: 2574969 - RNA, 19 nt, Homo sapiens
  misc_RNA (1)...(19): siRNA sense strand
gggccaacuuuguguccuu

SEQ ID NO: 2574970 - RNA, 19 nt, Homo sapiens
  misc_RNA (1)...(19): siRNA sense strand
gaacagggaaggaggcucu

SEQ ID NO: 2574971 - RNA, 19 nt, Homo sapiens
  misc_RNA (1)...(19): siRNA sense strand
acaaacaccagaaggacau

SEQ ID NO: 2574972 - RNA, 19 nt, Homo sapiens
  misc_RNA (1)...(19): siRNA sense strand
gguaucaugcuuggagaaa

SEQ ID NO: 2574973 - RNA, 19 nt, Homo sapiens
  misc_RNA (1)...(19): siRNA sense strand
cgacaagucagcagugagu

SEQ ID NO: 2574974 - RNA, 19 nt, Homo sapiens
  misc_RNA (1)...(19): siRNA sense strand
aaauagaagccuugcugau

SEQ ID NO: 2574975 - RNA, 19 nt, Homo sapiens
  misc_RNA (1)...(19): siRNA sense strand
uggugcagaugaaggauuu

SEQ ID NO: 2574976 - RNA, 19 nt, Homo sapiens
  misc_RNA (1)...(19): siRNA sense strand
guguugaagcuuugcccaa

SEQ ID NO: 2574977 - RNA, 19 nt, Homo sapiens
  misc_RNA (1)...(19): siRNA sense strand
ggauaagcgggugagguua

SEQ ID NO: 2574978 - RNA, 19 nt, Homo sapiens
  misc_RNA (1)...(19): siRNA sense strand
gugaaagaagcagaagaaa

SEQ ID NO: 2574979 - RNA, 19 nt, Homo sapiens
  misc_RNA (1)...(19): siRNA sense strand
ccauaaauuugaagaaucc

SEQ ID NO: 2574980 - RNA, 19 nt, Homo sapiens
  misc_RNA (1)...(19): siRNA sense strand
aaaauggugcagugagaaa

SEQ ID NO: 2574981 - RNA, 19 nt, Homo sapiens
  misc_RNA (1)...(19): siRNA sense strand
aaucagaggauauccaaau

SEQ ID NO: 2574982 - RNA, 19 nt, Homo sapiens
  misc_RNA (1)...(19): siRNA sense strand
aucgaaugucugaaagaaa

SEQ ID NO: 2574983 - RNA, 19 nt, Homo sapiens
  misc_RNA (1)...(19): siRNA sense strand
aagaagcagaagaaagaga

SEQ ID NO: 2574984 - RNA, 19 nt, Homo sapiens
  misc_RNA (1)...(19): siRNA sense strand
ccaaaugcaaacagaugau

SEQ ID NO: 2574985 - RNA, 19 nt, Homo sapiens
  misc_RNA (1)...(19): siRNA sense strand
cuacagugcucaaagggaa

SEQ ID NO: 2574986 - RNA, 19 nt, Homo sapiens
  misc_RNA (1)...(19): siRNA sense strand
ggagcaaaccugagccuga

SEQ ID NO: 2574987 - RNA, 19 nt, Homo sapiens
  misc_RNA (1)...(19): siRNA sense strand
uggcaaaaggcgaguacaa

SEQ ID NO: 2574988 - RNA, 19 nt, Homo sapiens
  misc_RNA (1)...(19): siRNA sense strand
uggaugaccugcaggccaa

SEQ ID NO: 2574989 - RNA, 19 nt, Homo sapiens
  misc_RNA (1)...(19): siRNA sense strand
ggugaagaaaauuggcaaa

SEQ ID NO: 2574990 - RNA, 19 nt, Homo sapiens
  misc_RNA (1)...(19): siRNA sense strand
agaagaaacucaagagagc

SEQ ID NO: 2574991 - RNA, 19 nt, Homo sapiens
  misc_RNA (1)...(19): siRNA sense strand
aguaagagccaaagcagca

SEQ ID NO: 2574992 - RNA, 19 nt, Homo sapiens
  misc_RNA (1)...(19): siRNA sense strand
cagcuuuaguucaggacca

SEQ ID NO: 2574993 - RNA, 19 nt, Homo sapiens
  misc_RNA (1)...(19): siRNA sense strand
uuggcaaagcuguggaaga

SEQ ID NO: 2574994 - RNA, 19 nt, Homo sapiens
  misc_RNA (1)...(19): siRNA sense strand
agacugaacuugaggaugc

SEQ ID NO: 2574995 - RNA, 19 nt, Homo sapiens
  misc_RNA (1)...(19): siRNA sense strand
aggaggaagaagaggugga

SEQ ID NO: 2574996 - RNA, 19 nt, Homo sapiens
  misc_RNA (1)...(19): siRNA sense strand
gggcagaaggggcagagaa

SEQ ID NO: 2574997 - RNA, 19 nt, Homo sapiens
  misc_RNA (1)...(19): siRNA sense strand
cagcaguagcaguggcagu

SEQ ID NO: 2574998 - RNA, 19 nt, Homo sapiens
  misc_RNA (1)...(19): siRNA sense strand
ggcuggaggaggaagaaga

SEQ ID NO: 2574999 - RNA, 19 nt, Homo sapiens
  misc_RNA (1)...(19): siRNA sense strand
ggcagaaggggcagagaau

SEQ ID NO: 2575000 - RNA, 19 nt, Homo sapiens
  misc_RNA (1)...(19): siRNA sense strand
aaacaagugacaaagccaa

SEQ ID NO: 2575001 - RNA, 19 nt, Homo sapiens
  misc_RNA (1)...(19): siRNA sense strand
ggcagcaguaagagccaaa

SEQ ID NO: 2575002 - RNA, 19 nt, Homo sapiens
  misc_RNA (1)...(19): siRNA sense strand
gauaucaacagacgggaga

SEQ ID NO: 2575003 - RNA, 19 nt, Homo sapiens
  misc_RNA (1)...(19): siRNA sense strand
gagcagaccaagaccagga

SEQ ID NO: 2575004 - RNA, 19 nt, Homo sapiens
  misc_RNA (1)...(19): siRNA sense strand
aggcaaaguacuaugugca

SEQ ID NO: 2575005 - RNA, 19 nt, Homo sapiens
  misc_RNA (1)...(19): siRNA sense strand
aagaaacucaagagagcca

SEQ ID NO: 2575006 - RNA, 19 nt, Homo sapiens
  misc_RNA (1)...(19): siRNA sense strand
augaacuggugaagaaaau

SEQ ID NO: 2575007 - RNA, 19 nt, Homo sapiens
  misc_RNA (1)...(19): siRNA sense strand
gcacacagaaagaugguga

SEQ ID NO: 2575008 - RNA, 19 nt, Homo sapiens
  misc_RNA (1)...(19): siRNA sense strand
cggaacgagacaagaauca

SEQ ID NO: 2575009 - RNA, 19 nt, Homo sapiens
  misc_RNA (1)...(19): siRNA sense strand
agaaaacagcacacagaaa

SEQ ID NO: 2575010 - RNA, 19 nt, Homo sapiens
  misc_RNA (1)...(19): siRNA sense strand
agagcaguagcaagagaaa

SEQ ID NO: 2575011 - RNA, 19 nt, Homo sapiens
  misc_RNA (1)...(19): siRNA sense strand
agagcuaugaacagaauau

SEQ ID NO: 2575012 - RNA, 19 nt, Homo sapiens
  misc_RNA (1)...(19): siRNA sense strand
ugugggaggaugaugcaaa

SEQ ID NO: 2575013 - RNA, 19 nt, Homo sapiens
  misc_RNA (1)...(19): siRNA sense strand
gagaaaggcuguugucccu

SEQ ID NO: 2575014 - RNA, 19 nt, Homo sapiens
  misc_RNA (1)...(19): siRNA sense strand
ggauuauucggcugcggaa

SEQ ID NO: 2575015 - RNA, 19 nt, Homo sapiens
  misc_RNA (1)...(19): siRNA sense strand
ccaugaucagaaugaagaa

SEQ ID NO: 2575016 - RNA, 19 nt, Homo sapiens
  misc_RNA (1)...(19): siRNA sense strand
augaggaggaagagugcaa

SEQ ID NO: 2575017 - RNA, 19 nt, Homo sapiens
  misc_RNA (1)...(19): siRNA sense strand
agugcaaagaggaggcaga

SEQ ID NO: 2575018 - RNA, 19 nt, Homo sapiens
  misc_RNA (1)...(19): siRNA sense strand
caaaggacugugagggcga

SEQ ID NO: 2575019 - RNA, 19 nt, Homo sapiens
  misc_RNA (1)...(19): siRNA sense strand
agggcgagagggaggagaa

SEQ ID NO: 2575020 - RNA, 19 nt, Homo sapiens
  misc_RNA (1)...(19): siRNA sense strand
ggccagaggcuuugcgucu

SEQ ID NO: 2575021 - RNA, 19 nt, Homo sapiens
  misc_RNA (1)...(19): siRNA sense strand
cgucuauggccuagccuca

SEQ ID NO: 2575022 - RNA, 19 nt, Homo sapiens
  misc_RNA (1)...(19): siRNA sense strand
aagaggaggcagagaccca

SEQ ID NO: 2575023 - RNA, 19 nt, Homo sapiens
  misc_RNA (1)...(19): siRNA sense strand
aggaagagugcaaagagga

SEQ ID NO: 2575024 - RNA, 19 nt, Homo sapiens
  misc_RNA (1)...(19): siRNA sense strand
ugagauaacugaaagggaa

SEQ ID NO: 2575025 - RNA, 19 nt, Homo sapiens
  misc_RNA (1)...(19): siRNA sense strand
aguuauuugacguugguaa

SEQ ID NO: 2575026 - RNA, 19 nt, Homo sapiens
  misc_RNA (1)...(19): siRNA sense strand
acaaagaugugcuucgaga

SEQ ID NO: 2575027 - RNA, 19 nt, Homo sapiens
  misc_RNA (1)...(19): siRNA sense strand
guuugaauaugaaggcaca

SEQ ID NO: 2575028 - RNA, 19 nt, Homo sapiens
  misc_RNA (1)...(19): siRNA sense strand
cugcagaagaaaauggauu

SEQ ID NO: 2575029 - RNA, 19 nt, Homo sapiens
  misc_RNA (1)...(19): siRNA sense strand
gcagauggacaguugcaca

SEQ ID NO: 2575030 - RNA, 19 nt, Homo sapiens
  misc_RNA (1)...(19): siRNA sense strand
cugcaguggcugagugaac

SEQ ID NO: 2575031 - RNA, 19 nt, Homo sapiens
  misc_RNA (1)...(19): siRNA sense strand
gguuaugagacaagaagac

SEQ ID NO: 2575032 - RNA, 19 nt, Homo sapiens
  misc_RNA (1)...(19): siRNA sense strand
gagauaacugaaagggaag

SEQ ID NO: 2575033 - RNA, 19 nt, Homo sapiens
  misc_RNA (1)...(19): siRNA sense strand
aagcacuuucagaagguua

SEQ ID NO: 2575034 - RNA, 19 nt, Homo sapiens
  misc_RNA (1)...(19): siRNA sense strand
cauuagugagauaugguuu

SEQ ID NO: 2575035 - RNA, 19 nt, Homo sapiens
  misc_RNA (1)...(19): siRNA sense strand
agaauauaucagacaacga

SEQ ID NO: 2575036 - RNA, 19 nt, Homo sapiens
  misc_RNA (1)...(19): siRNA sense strand
acgcaaagagcaagaacca

SEQ ID NO: 2575037 - RNA, 19 nt, Homo sapiens
  misc_RNA (1)...(19): siRNA sense strand
ccaucuucaaggagaacaa

SEQ ID NO: 2575038 - RNA, 19 nt, Homo sapiens
  misc_RNA (1)...(19): siRNA sense strand
ucgccaucuucaaggagaa

SEQ ID NO: 2575039 - RNA, 19 nt, Homo sapiens
  misc_RNA (1)...(19): siRNA sense strand
aaccaaacaaagacaggaa

SEQ ID NO: 2575040 - RNA, 19 nt, Homo sapiens
  misc_RNA (1)...(19): siRNA sense strand
ccgucaaaggagaugcaga

SEQ ID NO: 2575041 - RNA, 19 nt, Homo sapiens
  misc_RNA (1)...(19): siRNA sense strand
ggguaaacaugguggacag

SEQ ID NO: 2575042 - RNA, 19 nt, Homo sapiens
  misc_RNA (1)...(19): siRNA sense strand
gcaccaaagcuuaccguga

SEQ ID NO: 2575043 - RNA, 19 nt, Homo sapiens
  misc_RNA (1)...(19): siRNA sense strand
ugaugagugaagaggcuaa

SEQ ID NO: 2575044 - RNA, 19 nt, Homo sapiens
  misc_RNA (1)...(19): siRNA sense strand
agaccagaggcuuggguuu

SEQ ID NO: 2575045 - RNA, 19 nt, Homo sapiens
  misc_RNA (1)...(19): siRNA sense strand
acgaaaaggugaaaaggca

SEQ ID NO: 2575046 - RNA, 19 nt, Homo sapiens
  misc_RNA (1)...(19): siRNA sense strand
aaacaaauggggcaggaaa

SEQ ID NO: 2575047 - RNA, 19 nt, Homo sapiens
  misc_RNA (1)...(19): siRNA sense strand
cggcaacagcagcagaaaa

SEQ ID NO: 2575048 - RNA, 19 nt, Homo sapiens
  misc_RNA (1)...(19): siRNA sense strand
uggagaacacagaugaaaa

SEQ ID NO: 2575049 - RNA, 19 nt, Homo sapiens
  misc_RNA (1)...(19): siRNA sense strand
agaacaggaugcaggccuu

SEQ ID NO: 2575050 - RNA, 19 nt, Homo sapiens
  misc_RNA (1)...(19): siRNA sense strand
ggacagaaagucagccucu

SEQ ID NO: 2575051 - RNA, 19 nt, Homo sapiens
  misc_RNA (1)...(19): siRNA sense strand
ccugaugagugaagaggcu

SEQ ID NO: 2575052 - RNA, 19 nt, Homo sapiens
  misc_RNA (1)...(19): siRNA sense strand
ggcaacagcagcagaaaau

SEQ ID NO: 2575053 - RNA, 19 nt, Homo sapiens
  misc_RNA (1)...(19): siRNA sense strand
caaugaaaccaggcgggua

SEQ ID NO: 2575054 - RNA, 19 nt, Homo sapiens
  misc_RNA (1)...(19): siRNA sense strand
acgaaaucaauaugaacga

SEQ ID NO: 2575055 - RNA, 19 nt, Homo sapiens
  misc_RNA (1)...(19): siRNA sense strand
gucaaauugcccaagaaau

SEQ ID NO: 2575056 - RNA, 19 nt, Homo sapiens
  misc_RNA (1)...(19): siRNA sense strand
gugccgaaccagaucuaau

SEQ ID NO: 2575057 - RNA, 19 nt, Homo sapiens
  misc_RNA (1)...(19): siRNA sense strand
aagaagagcuggaagguca

SEQ ID NO: 2575058 - RNA, 19 nt, Homo sapiens
  misc_RNA (1)...(19): siRNA sense strand
ggaugagaucuguaugaaa

SEQ ID NO: 2575059 - RNA, 19 nt, Homo sapiens
  misc_RNA (1)...(19): siRNA sense strand
ccgcaaagcaccagccaga

SEQ ID NO: 2575060 - RNA, 19 nt, Homo sapiens
  misc_RNA (1)...(19): siRNA sense strand
gcagaaguccacugggcua

SEQ ID NO: 2575061 - RNA, 19 nt, Homo sapiens
  misc_RNA (1)...(19): siRNA sense strand
ggcugaaguuugaagaaga

SEQ ID NO: 2575062 - RNA, 19 nt, Homo sapiens
  misc_RNA (1)...(19): siRNA sense strand
ccaaggaggaagaggucau

SEQ ID NO: 2575063 - RNA, 19 nt, Homo sapiens
  misc_RNA (1)...(19): siRNA sense strand
ggucauaguccuugcacca

SEQ ID NO: 2575064 - RNA, 19 nt, Homo sapiens
  misc_RNA (1)...(19): siRNA sense strand
ugcaaauagcauagaagaa

SEQ ID NO: 2575065 - RNA, 19 nt, Homo sapiens
  misc_RNA (1)...(19): siRNA sense strand
ggaacauaagcucaagaaa

SEQ ID NO: 2575066 - RNA, 19 nt, Homo sapiens
  misc_RNA (1)...(19): siRNA sense strand
ggaugaucgcggauggauu

SEQ ID NO: 2575067 - RNA, 19 nt, Homo sapiens
  misc_RNA (1)...(19): siRNA sense strand
caagaaaggcuguggcuac

SEQ ID NO: 2575068 - RNA, 19 nt, Homo sapiens
  misc_RNA (1)...(19): siRNA sense strand
uggagugaauugugaacau

SEQ ID NO: 2575069 - RNA, 19 nt, Homo sapiens
  misc_RNA (1)...(19): siRNA sense strand
gcuuggugcuggacaucaa

SEQ ID NO: 2575070 - RNA, 19 nt, Homo sapiens
  misc_RNA (1)...(19): siRNA sense strand
uaugaaagagggagaagau

SEQ ID NO: 2575071 - RNA, 19 nt, Homo sapiens
  misc_RNA (1)...(19): siRNA sense strand
uugaagaagauguugaaga

SEQ ID NO: 2575072 - RNA, 19 nt, Homo sapiens
  misc_RNA (1)...(19): siRNA sense strand
ccgagaacagagagugaca

SEQ ID NO: 2575073 - RNA, 19 nt, Homo sapiens
  misc_RNA (1)...(19): siRNA sense strand
gagcaagccuuauguggca

SEQ ID NO: 2575074 - RNA, 19 nt, Homo sapiens
  misc_RNA (1)...(19): siRNA sense strand
gccucaaauuacagaacau

SEQ ID NO: 2575075 - RNA, 19 nt, Homo sapiens
  misc_RNA (1)...(19): siRNA sense strand
augaagaagcuguggugga

SEQ ID NO: 2575076 - RNA, 19 nt, Homo sapiens
  misc_RNA (1)...(19): siRNA sense strand
aggaagaugaagagcaugu

SEQ ID NO: 2575077 - RNA, 19 nt, Homo sapiens
  misc_RNA (1)...(19): siRNA sense strand
uggagaagccacugaggga

SEQ ID NO: 2575078 - RNA, 19 nt, Homo sapiens
  misc_RNA (1)...(19): siRNA sense strand
acauagaacaggaaccaca

SEQ ID NO: 2575079 - RNA, 19 nt, Homo sapiens
  misc_RNA (1)...(19): siRNA sense strand
augaagagcaugugccuca

SEQ ID NO: 2575080 - RNA, 19 nt, Homo sapiens
  misc_RNA (1)...(19): siRNA sense strand
cagaaugaaaagaagagaa

SEQ ID NO: 2575081 - RNA, 19 nt, Homo sapiens
  misc_RNA (1)...(19): siRNA sense strand
acguagcauauaaggcaaa

SEQ ID NO: 2575082 - RNA, 19 nt, Homo sapiens
  misc_RNA (1)...(19): siRNA sense strand
cucuauuacugcaggugua

SEQ ID NO: 2575083 - RNA, 19 nt, Homo sapiens
  misc_RNA (1)...(19): siRNA sense strand
cuaucagagaccagaugaa

SEQ ID NO: 2575084 - RNA, 19 nt, Homo sapiens
  misc_RNA (1)...(19): siRNA sense strand
cugccuuauuaauggaaca

SEQ ID NO: 2575085 - RNA, 19 nt, Homo sapiens
  misc_RNA (1)...(19): siRNA sense strand
gccaggagaugcauggaga

SEQ ID NO: 2575086 - RNA, 19 nt, Homo sapiens
  misc_RNA (1)...(19): siRNA sense strand
ggaagaggucauaguccuu

SEQ ID NO: 2575087 - RNA, 19 nt, Homo sapiens
  misc_RNA (1)...(19): siRNA sense strand
ccgaggaagaugaagagca

SEQ ID NO: 2575088 - RNA, 19 nt, Homo sapiens
  misc_RNA (1)...(19): siRNA sense strand
gggagaagaugcugagugg

SEQ ID NO: 2575089 - RNA, 19 nt, Homo sapiens
  misc_RNA (1)...(19): siRNA sense strand
ugguuggagagguggauau

SEQ ID NO: 2575090 - RNA, 19 nt, Homo sapiens
  misc_RNA (1)...(19): siRNA sense strand
ucacagugggccagaacuu

SEQ ID NO: 2575091 - RNA, 19 nt, Homo sapiens
  misc_RNA (1)...(19): siRNA sense strand
gugaaugccaggagaugca

SEQ ID NO: 2575092 - RNA, 19 nt, Homo sapiens
  misc_RNA (1)...(19): siRNA sense strand
caacaucgugacagcagaa

SEQ ID NO: 2575093 - RNA, 19 nt, Homo sapiens
  misc_RNA (1)...(19): siRNA sense strand
uuaacaggaaggaacauaa

SEQ ID NO: 2575094 - RNA, 19 nt, Homo sapiens
  misc_RNA (1)...(19): siRNA sense strand
ugaacauaguccuguggau

SEQ ID NO: 2575095 - RNA, 19 nt, Homo sapiens
  misc_RNA (1)...(19): siRNA sense strand
ccugggaaguacuggacca

SEQ ID NO: 2575096 - RNA, 19 nt, Homo sapiens
  misc_RNA (1)...(19): siRNA sense strand
aaaagaagaaguuggauga

SEQ ID NO: 2575097 - RNA, 19 nt, Homo sapiens
  misc_RNA (1)...(19): siRNA sense strand
guuugaagaagauguugaa

SEQ ID NO: 2575098 - RNA, 19 nt, Homo sapiens
  misc_RNA (1)...(19): siRNA sense strand
ccacauagaacaggaacca

SEQ ID NO: 2575099 - RNA, 19 nt, Homo sapiens
  misc_RNA (1)...(19): siRNA sense strand
gggugggaccaguacaauu

SEQ ID NO: 2575100 - RNA, 19 nt, Homo sapiens
  misc_RNA (1)...(19): siRNA sense strand
gggcauccgagaacagaga

SEQ ID NO: 2575101 - RNA, 19 nt, Homo sapiens
  misc_RNA (1)...(19): siRNA sense strand
ggcaaaagagcgagaugau

SEQ ID NO: 2575102 - RNA, 19 nt, Homo sapiens
  misc_RNA (1)...(19): siRNA sense strand
ggccagaacuucagcgcac

SEQ ID NO: 2575103 - RNA, 19 nt, Homo sapiens
  misc_RNA (1)...(19): siRNA sense strand
ccgagaugcacucagcuua

SEQ ID NO: 2575104 - RNA, 19 nt, Homo sapiens
  misc_RNA (1)...(19): siRNA sense strand
ucuguaugaaagagggaga

SEQ ID NO: 2575105 - RNA, 19 nt, Homo sapiens
  misc_RNA (1)...(19): siRNA sense strand
auggagaguucaugggauc

SEQ ID NO: 2575106 - RNA, 19 nt, Homo sapiens
  misc_RNA (1)...(19): siRNA sense strand
ccgucauuauuaacaggaa

SEQ ID NO: 2575107 - RNA, 19 nt, Homo sapiens
  misc_RNA (1)...(19): siRNA sense strand
gauggauaaacauggucaa

SEQ ID NO: 2575108 - RNA, 19 nt, Homo sapiens
  misc_RNA (1)...(19): siRNA sense strand
ucaaauucugcaaagacua

SEQ ID NO: 2575109 - RNA, 19 nt, Homo sapiens
  misc_RNA (1)...(19): siRNA sense strand
uuucuucacuacagggaau

SEQ ID NO: 2575110 - RNA, 19 nt, Homo sapiens
  misc_RNA (1)...(19): siRNA sense strand
aaagaaggccaaggaggaa

SEQ ID NO: 2575111 - RNA, 19 nt, Homo sapiens
  misc_RNA (1)...(19): siRNA sense strand
ccucaaauuacagaacaua

SEQ ID NO: 2575112 - RNA, 19 nt, Homo sapiens
  misc_RNA (1)...(19): siRNA sense strand
aagcagagauugaacguga

SEQ ID NO: 2575113 - RNA, 19 nt, Homo sapiens
  misc_RNA (1)...(19): siRNA sense strand
ugaagauauugguaggcaa

SEQ ID NO: 2575114 - RNA, 19 nt, Homo sapiens
  misc_RNA (1)...(19): siRNA sense strand
guuccugaaacaagaguaa

SEQ ID NO: 2575115 - RNA, 19 nt, Homo sapiens
  misc_RNA (1)...(19): siRNA sense strand
ugggagaagcagagauuga

SEQ ID NO: 2575116 - RNA, 19 nt, Homo sapiens
  misc_RNA (1)...(19): siRNA sense strand
acgaaaaugagaagaacaa

SEQ ID NO: 2575117 - RNA, 19 nt, Homo sapiens
  misc_RNA (1)...(19): siRNA sense strand
gcacauugggagaagcaga

SEQ ID NO: 2575118 - RNA, 19 nt, Homo sapiens
  misc_RNA (1)...(19): siRNA sense strand
cugugaaugcugagacaau

SEQ ID NO: 2575119 - RNA, 19 nt, Homo sapiens
  misc_RNA (1)...(19): siRNA sense strand
guguuggcuucgugauuaa

SEQ ID NO: 2575120 - RNA, 19 nt, Homo sapiens
  misc_RNA (1)...(19): siRNA sense strand
uguacaagugucacagaaa

SEQ ID NO: 2575121 - RNA, 19 nt, Homo sapiens
  misc_RNA (1)...(19): siRNA sense strand
gcuggaaguagauacgaaa

SEQ ID NO: 2575122 - RNA, 19 nt, Homo sapiens
  misc_RNA (1)...(19): siRNA sense strand
gauacgaaaaugagaagaa

SEQ ID NO: 2575123 - RNA, 19 nt, Homo sapiens
  misc_RNA (1)...(19): siRNA sense strand
cuguauaugguuugugaau

SEQ ID NO: 2575124 - RNA, 19 nt, Homo sapiens
  misc_RNA (1)...(19): siRNA sense strand
ugagaagaacaauggaaca

SEQ ID NO: 2575125 - RNA, 19 nt, Homo sapiens
  misc_RNA (1)...(19): siRNA sense strand
cugcaaauucacaggaagu

SEQ ID NO: 2575126 - RNA, 19 nt, Homo sapiens
  misc_RNA (1)...(19): siRNA sense strand
ucgagaaguauguaccaaa

SEQ ID NO: 2575127 - RNA, 19 nt, Homo sapiens
  misc_RNA (1)...(19): siRNA sense strand
caaacacgcugauuggcaa

SEQ ID NO: 2575128 - RNA, 19 nt, Homo sapiens
  misc_RNA (1)...(19): siRNA sense strand
cacacacaaaggagaaaua

SEQ ID NO: 2575129 - RNA, 19 nt, Homo sapiens
  misc_RNA (1)...(19): siRNA sense strand
gcucacuugucauggcaau

SEQ ID NO: 2575130 - RNA, 19 nt, Homo sapiens
  misc_RNA (1)...(19): siRNA sense strand
ugccaagagcuguagaaau

SEQ ID NO: 2575131 - RNA, 19 nt, Homo sapiens
  misc_RNA (1)...(19): siRNA sense strand
ugcaggaaguugaaaccaa

SEQ ID NO: 2575132 - RNA, 19 nt, Homo sapiens
  misc_RNA (1)...(19): siRNA sense strand
aggacuuaguggauuauau

SEQ ID NO: 2575133 - RNA, 19 nt, Homo sapiens
  misc_RNA (1)...(19): siRNA sense strand
augcacacacaaaggagaa

SEQ ID NO: 2575134 - RNA, 19 nt, Homo sapiens
  misc_RNA (1)...(19): siRNA sense strand
cuggauugaugcuggaagu

SEQ ID NO: 2575135 - RNA, 19 nt, Homo sapiens
  misc_RNA (1)...(19): siRNA sense strand
ggaacuugagauugaaaau

SEQ ID NO: 2575136 - RNA, 19 nt, Homo sapiens
  misc_RNA (1)...(19): siRNA sense strand
ugaacgugagcguggagua

SEQ ID NO: 2575137 - RNA, 19 nt, Homo sapiens
  misc_RNA (1)...(19): siRNA sense strand
gaacaauggaacagcacac

SEQ ID NO: 2575138 - RNA, 19 nt, Homo sapiens
  misc_RNA (1)...(19): siRNA sense strand
aguaauccuuagagagaug

SEQ ID NO: 2575139 - RNA, 19 nt, Homo sapiens
  misc_RNA (1)...(19): siRNA sense strand
aaugagaagaacaauggaa

SEQ ID NO: 2575140 - RNA, 19 nt, Homo sapiens
  misc_RNA (1)...(19): siRNA sense strand
cagcacacuuucuggagca

SEQ ID NO: 2575141 - RNA, 19 nt, Homo sapiens
  misc_RNA (1)...(19): siRNA sense strand
agaagagaucccaguuaga

SEQ ID NO: 2575142 - RNA, 19 nt, Homo sapiens
  misc_RNA (1)...(19): siRNA sense strand
acuccaauuugugaagaua

SEQ ID NO: 2575143 - RNA, 19 nt, Homo sapiens
  misc_RNA (1)...(19): siRNA sense strand
agaaauugcugcuuggagu

SEQ ID NO: 2575144 - RNA, 19 nt, Homo sapiens
  misc_RNA (1)...(19): siRNA sense strand
ucuccaaaccccagaaauu

SEQ ID NO: 2575145 - RNA, 19 nt, Homo sapiens
  misc_RNA (1)...(19): siRNA sense strand
gggaggugcaagugaccau

SEQ ID NO: 2575146 - RNA, 19 nt, Homo sapiens
  misc_RNA (1)...(19): siRNA sense strand
cggcaaacaugcacgcgca

SEQ ID NO: 2575147 - RNA, 19 nt, Homo sapiens
  misc_RNA (1)...(19): siRNA sense strand
gagaguugcggaaacgcua

SEQ ID NO: 2575148 - RNA, 19 nt, Homo sapiens
  misc_RNA (1)...(19): siRNA sense strand
caagagugcugaaggguug

SEQ ID NO: 2575149 - RNA, 19 nt, Homo sapiens
  misc_RNA (1)...(19): siRNA sense strand
gggcauuguggcuggcuca

SEQ ID NO: 2575150 - RNA, 19 nt, Homo sapiens
  misc_RNA (1)...(19): siRNA sense strand
ccaagagugcugaaggguu

SEQ ID NO: 2575151 - RNA, 19 nt, Homo sapiens
  misc_RNA (1)...(19): siRNA sense strand
ugaagaaggcacagagaua

SEQ ID NO: 2575152 - RNA, 19 nt, Homo sapiens
  misc_RNA (1)...(19): siRNA sense strand
gcagagaaaucuuccggaa

SEQ ID NO: 2575153 - RNA, 19 nt, Homo sapiens
  misc_RNA (1)...(19): siRNA sense strand
aguuugacauggugggaau

SEQ ID NO: 2575154 - RNA, 19 nt, Homo sapiens
  misc_RNA (1)...(19): siRNA sense strand
gggcauuggcaaagaucau

SEQ ID NO: 2575155 - RNA, 19 nt, Homo sapiens
  misc_RNA (1)...(19): siRNA sense strand
uaaagaagguugugaggcu

SEQ ID NO: 2575156 - RNA, 19 nt, Homo sapiens
  misc_RNA (1)...(19): siRNA sense strand
cggaaugagaagcuaaaga

SEQ ID NO: 2575157 - RNA, 19 nt, Homo sapiens
  misc_RNA (1)...(19): siRNA sense strand
aagaaggcacagagauaga

SEQ ID NO: 2575158 - RNA, 19 nt, Homo sapiens
  misc_RNA (1)...(19): siRNA sense strand
gugucaagggcauuggcaa

SEQ ID NO: 2575159 - RNA, 19 nt, Homo sapiens
  misc_RNA (1)...(19): siRNA sense strand
agguccugguguacaauaa

SEQ ID NO: 2575160 - RNA, 19 nt, Homo sapiens
  misc_RNA (1)...(19): siRNA sense strand
gaugaagaaggcacagaga

SEQ ID NO: 2575161 - RNA, 19 nt, Homo sapiens
  misc_RNA (1)...(19): siRNA sense strand
gcugaggaguugagcaggu

SEQ ID NO: 2575162 - RNA, 19 nt, Homo sapiens
  misc_RNA (1)...(19): siRNA sense strand
uaguacacauggaugaaaa

SEQ ID NO: 2575163 - RNA, 19 nt, Homo sapiens
  misc_RNA (1)...(19): siRNA sense strand
gaaggcacagagauagaua

SEQ ID NO: 2575164 - RNA, 19 nt, Homo sapiens
  misc_RNA (1)...(19): siRNA sense strand
cucaggcgguggaggaaau

SEQ ID NO: 2575165 - RNA, 19 nt, Homo sapiens
  misc_RNA (1)...(19): siRNA sense strand
aggagaugaagaaggcaca

SEQ ID NO: 2575166 - RNA, 19 nt, Homo sapiens
  misc_RNA (1)...(19): siRNA sense strand
ugaagaaggcacagagaua

SEQ ID NO: 2575167 - RNA, 19 nt, Homo sapiens
  misc_RNA (1)...(19): siRNA sense strand
gcagagaaaucuuccggaa

SEQ ID NO: 2575168 - RNA, 19 nt, Homo sapiens
  misc_RNA (1)...(19): siRNA sense strand
aguuugacauggugggaau

SEQ ID NO: 2575169 - RNA, 19 nt, Homo sapiens
  misc_RNA (1)...(19): siRNA sense strand
gggcauuggcaaagaucau

SEQ ID NO: 2575170 - RNA, 19 nt, Homo sapiens
  misc_RNA (1)...(19): siRNA sense strand
uaaagaagguugugaggcu

SEQ ID NO: 2575171 - RNA, 19 nt, Homo sapiens
  misc_RNA (1)...(19): siRNA sense strand
cggaaugagaagcuaaaga

SEQ ID NO: 2575172 - RNA, 19 nt, Homo sapiens
  misc_RNA (1)...(19): siRNA sense strand
aagaaggcacagagauaga

SEQ ID NO: 2575173 - RNA, 19 nt, Homo sapiens
  misc_RNA (1)...(19): siRNA sense strand
gugucaagggcauuggcaa

SEQ ID NO: 2575174 - RNA, 19 nt, Homo sapiens
  misc_RNA (1)...(19): siRNA sense strand
agguccugguguacaauaa

SEQ ID NO: 2575175 - RNA, 19 nt, Homo sapiens
  misc_RNA (1)...(19): siRNA sense strand
gaugaagaaggcacagaga

SEQ ID NO: 2575176 - RNA, 19 nt, Homo sapiens
  misc_RNA (1)...(19): siRNA sense strand
gcugaggaguugagcaggu

SEQ ID NO: 2575177 - RNA, 19 nt, Homo sapiens
  misc_RNA (1)...(19): siRNA sense strand
uaguacacauggaugaaaa

SEQ ID NO: 2575178 - RNA, 19 nt, Homo sapiens
  misc_RNA (1)...(19): siRNA sense strand
gaaggcacagagauagaua

SEQ ID NO: 2575179 - RNA, 19 nt, Homo sapiens
  misc_RNA (1)...(19): siRNA sense strand
cucaggcgguggaggaaau

SEQ ID NO: 2575180 - RNA, 19 nt, Homo sapiens
  misc_RNA (1)...(19): siRNA sense strand
aggagaugaagaaggcaca

SEQ ID NO: 2575181 - RNA, 19 nt, Homo sapiens
  misc_RNA (1)...(19): siRNA sense strand
aauucauacuggagagcaa

SEQ ID NO: 2575182 - RNA, 19 nt, Homo sapiens
  misc_RNA (1)...(19): siRNA sense strand
aacucauacuggagagaaa

SEQ ID NO: 2575183 - RNA, 19 nt, Homo sapiens
  misc_RNA (1)...(19): siRNA sense strand
augugauguuagagaacua

SEQ ID NO: 2575184 - RNA, 19 nt, Homo sapiens
  misc_RNA (1)...(19): siRNA sense strand
aggugaacaaagaagguua

SEQ ID NO: 2575185 - RNA, 19 nt, Homo sapiens
  misc_RNA (1)...(19): siRNA sense strand
ccuuacuacacaugaaaua

SEQ ID NO: 2575186 - RNA, 19 nt, Homo sapiens
  misc_RNA (1)...(19): siRNA sense strand
augugaagaauguggcaaa

SEQ ID NO: 2575187 - RNA, 19 nt, Homo sapiens
  misc_RNA (1)...(19): siRNA sense strand
augugaagaauguggcaaa

SEQ ID NO: 2575188 - RNA, 19 nt, Homo sapiens
  misc_RNA (1)...(19): siRNA sense strand
ccuuacuaaucauaggaaa

SEQ ID NO: 2575189 - RNA, 19 nt, Homo sapiens
  misc_RNA (1)...(19): siRNA sense strand
guggaugaguauaagguga

SEQ ID NO: 2575190 - RNA, 19 nt, Homo sapiens
  misc_RNA (1)...(19): siRNA sense strand
acauaaaacccaacacaaa

SEQ ID NO: 2575191 - RNA, 19 nt, Homo sapiens
  misc_RNA (1)...(19): siRNA sense strand
cugucuggaacaagggaaa

SEQ ID NO: 2575192 - RNA, 19 nt, Homo sapiens
  misc_RNA (1)...(19): siRNA sense strand
acugagaagauauggaaaa

SEQ ID NO: 2575193 - RNA, 19 nt, Homo sapiens
  misc_RNA (1)...(19): siRNA sense strand
ucacaacugcccagagcaa

SEQ ID NO: 2575194 - RNA, 19 nt, Homo sapiens
  misc_RNA (1)...(19): siRNA sense strand
caacccuacaaaugggaaa

SEQ ID NO: 2575195 - RNA, 19 nt, Homo sapiens
  misc_RNA (1)...(19): siRNA sense strand
uggaugaguauaaggugaa

SEQ ID NO: 2575196 - RNA, 19 nt, Homo sapiens
  misc_RNA (1)...(19): siRNA sense strand
augaguauaaggugaacaa

SEQ ID NO: 2575197 - RNA, 19 nt, Homo sapiens
  misc_RNA (1)...(19): siRNA sense strand
ccuggaauaugaagcgaca

SEQ ID NO: 2575198 - RNA, 19 nt, Homo sapiens
  misc_RNA (1)...(19): siRNA sense strand
ggugaacaaagaagguuau

SEQ ID NO: 2575199 - RNA, 19 nt, Homo sapiens
  misc_RNA (1)...(19): siRNA sense strand
aagaaaaggcuguaaaagu

SEQ ID NO: 2575200 - RNA, 19 nt, Homo sapiens
  misc_RNA (1)...(19): siRNA sense strand
gaagaauguggcaaagcau

SEQ ID NO: 2575201 - RNA, 19 nt, Homo sapiens
  misc_RNA (1)...(19): siRNA sense strand
guuaagaaaaggcuguaaa

SEQ ID NO: 2575202 - RNA, 19 nt, Homo sapiens
  misc_RNA (1)...(19): siRNA sense strand
cauuuaucauagagagaag

SEQ ID NO: 2575203 - RNA, 19 nt, Homo sapiens
  misc_RNA (1)...(19): siRNA sense strand
guauaaggugaacaaagaa

SEQ ID NO: 2575204 - RNA, 19 nt, Homo sapiens
  misc_RNA (1)...(19): siRNA sense strand
cagagcagggcauggaaga

SEQ ID NO: 2575205 - RNA, 19 nt, Homo sapiens
  misc_RNA (1)...(19): siRNA sense strand
aaagcaauacugagaagau

SEQ ID NO: 2575206 - RNA, 19 nt, Homo sapiens
  misc_RNA (1)...(19): siRNA sense strand
agcaauacugagaagauau

SEQ ID NO: 2575207 - RNA, 19 nt, Homo sapiens
  misc_RNA (1)...(19): siRNA sense strand
acucuacaaaugugaagaa

SEQ ID NO: 2575208 - RNA, 19 nt, Homo sapiens
  misc_RNA (1)...(19): siRNA sense strand
ccuuacaaaugugaagaau

SEQ ID NO: 2575209 - RNA, 19 nt, Homo sapiens
  misc_RNA (1)...(19): siRNA sense strand
ugguggugcuggaggaaga

SEQ ID NO: 2575210 - RNA, 19 nt, Homo sapiens
  misc_RNA (1)...(19): siRNA sense strand
uggaguugccggagagaca

SEQ ID NO: 2575211 - RNA, 19 nt, Homo sapiens
  misc_RNA (1)...(19): siRNA sense strand
ccgaaaagagacagacaau

SEQ ID NO: 2575212 - RNA, 19 nt, Homo sapiens
  misc_RNA (1)...(19): siRNA sense strand
agcccagguucgugguuua

SEQ ID NO: 2575213 - RNA, 19 nt, Homo sapiens
  misc_RNA (1)...(19): siRNA sense strand
ugauguaugcagggaguaa

SEQ ID NO: 2575214 - RNA, 19 nt, Homo sapiens
  misc_RNA (1)...(19): siRNA sense strand
gaugauguaugcagggagu

SEQ ID NO: 2575215 - RNA, 19 nt, Homo sapiens
  misc_RNA (1)...(19): siRNA sense strand
aggccuggcuccaagaaaa

SEQ ID NO: 2575216 - RNA, 19 nt, Homo sapiens
  misc_RNA (1)...(19): siRNA sense strand
acaaguacgugcaugacga

SEQ ID NO: 2575217 - RNA, 19 nt, Homo sapiens
  misc_RNA (1)...(19): siRNA sense strand
cucacaaagguguucgaaa

SEQ ID NO: 2575218 - RNA, 19 nt, Homo sapiens
  misc_RNA (1)...(19): siRNA sense strand
gcaaaguggugaaugccau

SEQ ID NO: 2575219 - RNA, 19 nt, Homo sapiens
  misc_RNA (1)...(19): siRNA sense strand
agggaauguuugugagucu

SEQ ID NO: 2575220 - RNA, 19 nt, Homo sapiens
  misc_RNA (1)...(19): siRNA sense strand
ggauauagcugaccuggca

SEQ ID NO: 2575221 - RNA, 19 nt, Homo sapiens
  misc_RNA (1)...(19): siRNA sense strand
agcggaaacaagagaguga

SEQ ID NO: 2575222 - RNA, 19 nt, Homo sapiens
  misc_RNA (1)...(19): siRNA sense strand
cccagaguauagagcggaa

SEQ ID NO: 2575223 - RNA, 19 nt, Homo sapiens
  misc_RNA (1)...(19): siRNA sense strand
cagcgucgaagaagggcaa

SEQ ID NO: 2575224 - RNA, 19 nt, Homo sapiens
  misc_RNA (1)...(19): siRNA sense strand
cugccaaacugaaggcuac

SEQ ID NO: 2575225 - RNA, 19 nt, Homo sapiens
  misc_RNA (1)...(19): siRNA sense strand
cgguggaggagaagagaaa

SEQ ID NO: 2575226 - RNA, 19 nt, Homo sapiens
  misc_RNA (1)...(19): siRNA sense strand
gcaugaacucgguggagga

SEQ ID NO: 2575227 - RNA, 19 nt, Homo sapiens
  misc_RNA (1)...(19): siRNA sense strand
guggaggagaagagaaacu

SEQ ID NO: 2575228 - RNA, 19 nt, Homo sapiens
  misc_RNA (1)...(19): siRNA sense strand
ccaucuaccaugugaucau

SEQ ID NO: 2575229 - RNA, 19 nt, Homo sapiens
  misc_RNA (1)...(19): siRNA sense strand
agaaguaccugcugcccuu

SEQ ID NO: 2575230 - RNA, 19 nt, Homo sapiens
  misc_RNA (1)...(19): siRNA sense strand
cggcaagggagcagccaaa

SEQ ID NO: 2575231 - RNA, 19 nt, Homo sapiens
  misc_RNA (1)...(19): siRNA sense strand
ccucagaugaagagcuaga

SEQ ID NO: 2575232 - RNA, 19 nt, Homo sapiens
  misc_RNA (1)...(19): siRNA sense strand
ccaaugaacaagaucgaga

SEQ ID NO: 2575233 - RNA, 19 nt, Homo sapiens
  misc_RNA (1)...(19): siRNA sense strand
gaggagaagcggaagcuga

SEQ ID NO: 2575234 - RNA, 19 nt, Homo sapiens
  misc_RNA (1)...(19): siRNA sense strand
aggcugaggagaagcggaa

SEQ ID NO: 2575235 - RNA, 19 nt, Homo sapiens
  misc_RNA (1)...(19): siRNA sense strand
ugaagaaacuacaagagca

SEQ ID NO: 2575236 - RNA, 19 nt, Homo sapiens
  misc_RNA (1)...(19): siRNA sense strand
agaaacuacaagagcaaga

SEQ ID NO: 2575237 - RNA, 19 nt, Homo sapiens
  misc_RNA (1)...(19): siRNA sense strand
ugaacaagaucgagaggag

SEQ ID NO: 2575238 - RNA, 19 nt, Homo sapiens
  misc_RNA (1)...(19): siRNA sense strand
aggagaagcggaagcugaa

SEQ ID NO: 2575239 - RNA, 19 nt, Homo sapiens
  misc_RNA (1)...(19): siRNA sense strand
uuaccgucguggagaggaa

SEQ ID NO: 2575240 - RNA, 19 nt, Homo sapiens
  misc_RNA (1)...(19): siRNA sense strand
ccagcgacuacaaggacaa

SEQ ID NO: 2575241 - RNA, 19 nt, Homo sapiens
  misc_RNA (1)...(19): siRNA sense strand
cccacaugcuacaggccaa

SEQ ID NO: 2575242 - RNA, 19 nt, Homo sapiens
  misc_RNA (1)...(19): siRNA sense strand
gcuccauugaagaggcuau

SEQ ID NO: 2575243 - RNA, 19 nt, Homo sapiens
  misc_RNA (1)...(19): siRNA sense strand
augaaugagaucagagcca

SEQ ID NO: 2575244 - RNA, 19 nt, Homo sapiens
  misc_RNA (1)...(19): siRNA sense strand
ccaagaagcgucugcggca

SEQ ID NO: 2575245 - RNA, 19 nt, Homo sapiens
  misc_RNA (1)...(19): siRNA sense strand
gauaaaagaaguaaggcuu

SEQ ID NO: 2575246 - RNA, 19 nt, Homo sapiens
  misc_RNA (1)...(19): siRNA sense strand
ccaaaguuuaccaggagau

SEQ ID NO: 2575247 - RNA, 19 nt, Homo sapiens
  misc_RNA (1)...(19): siRNA sense strand
acaccaaaguuuaccagga

SEQ ID NO: 2575248 - RNA, 19 nt, Homo sapiens
  misc_RNA (1)...(19): siRNA sense strand
agagauacgaagacagaau

SEQ ID NO: 2575249 - RNA, 19 nt, Homo sapiens
  misc_RNA (1)...(19): siRNA sense strand
aagaugaaauccagcaaaa

SEQ ID NO: 2575250 - RNA, 19 nt, Homo sapiens
  misc_RNA (1)...(19): siRNA sense strand
ccuagacauuaaagaugaa

SEQ ID NO: 2575251 - RNA, 19 nt, Homo sapiens
  misc_RNA (1)...(19): siRNA sense strand
ccgaaauaaguaugggcga

SEQ ID NO: 2575252 - RNA, 19 nt, Homo sapiens
  misc_RNA (1)...(19): siRNA sense strand
ccuugcaaguuuacgacaa

SEQ ID NO: 2575253 - RNA, 19 nt, Homo sapiens
  misc_RNA (1)...(19): siRNA sense strand
gcauauugaagaugaugau

SEQ ID NO: 2575254 - RNA, 19 nt, Homo sapiens
  misc_RNA (1)...(19): siRNA sense strand
gcgacuaaccagagacaag

SEQ ID NO: 2575255 - RNA, 19 nt, Homo sapiens
  misc_RNA (1)...(19): siRNA sense strand
agagaaagucagugauuac

SEQ ID NO: 2575256 - RNA, 19 nt, Homo sapiens
  misc_RNA (1)...(19): siRNA sense strand
ggcaaaacacaaagagaca

SEQ ID NO: 2575257 - RNA, 19 nt, Homo sapiens
  misc_RNA (1)...(19): siRNA sense strand
caagaaauuucaaagguac

SEQ ID NO: 2575258 - RNA, 19 nt, Homo sapiens
  misc_RNA (1)...(19): siRNA sense strand
uggacaaaccauauaccua

SEQ ID NO: 2575259 - RNA, 19 nt, Homo sapiens
  misc_RNA (1)...(19): siRNA sense strand
ugaugaggccguuguggaa

SEQ ID NO: 2575260 - RNA, 19 nt, Homo sapiens
  misc_RNA (1)...(19): siRNA sense strand
aauaaguaugggcgacuaa

SEQ ID NO: 2575261 - RNA, 19 nt, Homo sapiens
  misc_RNA (1)...(19): siRNA sense strand
aggccguuguggaaguuaa

SEQ ID NO: 2575262 - RNA, 19 nt, Homo sapiens
  misc_RNA (1)...(19): siRNA sense strand
gcauaauggcaauccacau

SEQ ID NO: 2575263 - RNA, 19 nt, Homo sapiens
  misc_RNA (1)...(19): siRNA sense strand
ccucacagcaggaagaagu

SEQ ID NO: 2575264 - RNA, 19 nt, Homo sapiens
  misc_RNA (1)...(19): siRNA sense strand
guaaaaggacagcgggcau

SEQ ID NO: 2575265 - RNA, 19 nt, Homo sapiens
  misc_RNA (1)...(19): siRNA sense strand
ugaccugugucgagagacu

SEQ ID NO: 2575266 - RNA, 19 nt, Homo sapiens
  misc_RNA (1)...(19): siRNA sense strand
cuguuggauaucaggcaaa

SEQ ID NO: 2575267 - RNA, 19 nt, Homo sapiens
  misc_RNA (1)...(19): siRNA sense strand
ccuuggacgauuugagcau

SEQ ID NO: 2575268 - RNA, 19 nt, Homo sapiens
  misc_RNA (1)...(19): siRNA sense strand
ccuggauguuugagguguu

SEQ ID NO: 2575269 - RNA, 19 nt, Homo sapiens
  misc_RNA (1)...(19): siRNA sense strand
acuaaagcugcaaaggauu

SEQ ID NO: 2575270 - RNA, 19 nt, Homo sapiens
  misc_RNA (1)...(19): siRNA sense strand
accgaaagccaguggucau

SEQ ID NO: 2575271 - RNA, 19 nt, Homo sapiens
  misc_RNA (1)...(19): siRNA sense strand
agauacgaagacagaauau

SEQ ID NO: 2575272 - RNA, 19 nt, Homo sapiens
  misc_RNA (1)...(19): siRNA sense strand
acagugaauucuauggcuu

SEQ ID NO: 2575273 - RNA, 19 nt, Homo sapiens
  misc_RNA (1)...(19): siRNA sense strand
ugucauaauccgaaauaag

SEQ ID NO: 2575274 - RNA, 19 nt, Homo sapiens
  misc_RNA (1)...(19): siRNA sense strand
agcagugggucucgaguau

SEQ ID NO: 2575275 - RNA, 19 nt, Homo sapiens
  misc_RNA (1)...(19): siRNA sense strand
agaaagaggcacagcgcau

SEQ ID NO: 2575276 - RNA, 19 nt, Homo sapiens
  misc_RNA (1)...(19): siRNA sense strand
cgccaaagucagccgcaaa

SEQ ID NO: 2575277 - RNA, 19 nt, Homo sapiens
  misc_RNA (1)...(19): siRNA sense strand
aggaagaagaggagggagc

SEQ ID NO: 2575278 - RNA, 19 nt, Homo sapiens
  misc_RNA (1)...(19): siRNA sense strand
uggaagaaaaggaagaaga

SEQ ID NO: 2575279 - RNA, 19 nt, Homo sapiens
  misc_RNA (1)...(19): siRNA sense strand
agaagaggagggagcguca

SEQ ID NO: 2575280 - RNA, 19 nt, Homo sapiens
  misc_RNA (1)...(19): siRNA sense strand
aagaaaaggaagaagagga

SEQ ID NO: 2575281 - RNA, 19 nt, Homo sapiens
  misc_RNA (1)...(19): siRNA sense strand
ggugaagauguccaggaaa

SEQ ID NO: 2575282 - RNA, 19 nt, Homo sapiens
  misc_RNA (1)...(19): siRNA sense strand
aagacaacucggaagggaa

SEQ ID NO: 2575283 - RNA, 19 nt, Homo sapiens
  misc_RNA (1)...(19): siRNA sense strand
agagaaaagaccaagguuu

SEQ ID NO: 2575284 - RNA, 19 nt, Homo sapiens
  misc_RNA (1)...(19): siRNA sense strand
ggagagaccagguggacug

SEQ ID NO: 2575285 - RNA, 19 nt, Homo sapiens
  misc_RNA (1)...(19): siRNA sense strand
acagaacauuccaggcaga

SEQ ID NO: 2575286 - RNA, 19 nt, Homo sapiens
  misc_RNA (1)...(19): siRNA sense strand
gcagaauauuccaggagag

SEQ ID NO: 2575287 - RNA, 19 nt, Homo sapiens
  misc_RNA (1)...(19): siRNA sense strand
caucgugaucacaggucua

SEQ ID NO: 2575288 - RNA, 19 nt, Homo sapiens
  misc_RNA (1)...(19): siRNA sense strand
gggacagaacagugaauag

SEQ ID NO: 2575289 - RNA, 19 nt, Homo sapiens
  misc_RNA (1)...(19): siRNA sense strand
caacagaacauuccaggca

SEQ ID NO: 2575290 - RNA, 19 nt, Homo sapiens
  misc_RNA (1)...(19): siRNA sense strand
ccucacgccucguuggaca

SEQ ID NO: 2575291 - RNA, 19 nt, Homo sapiens
  misc_RNA (1)...(19): siRNA sense strand
cuuugagaaacaugagaaa

SEQ ID NO: 2575292 - RNA, 19 nt, Homo sapiens
  misc_RNA (1)...(19): siRNA sense strand
uggagugggucuauggcua

SEQ ID NO: 2575293 - RNA, 19 nt, Homo sapiens
  misc_RNA (1)...(19): siRNA sense strand
uggcaaaaccaaagaaguu

SEQ ID NO: 2575294 - RNA, 19 nt, Homo sapiens
  misc_RNA (1)...(19): siRNA sense strand
ccuuacacgugcugggcuu

SEQ ID NO: 2575295 - RNA, 19 nt, Homo sapiens
  misc_RNA (1)...(19): siRNA sense strand
gcggaugcugugaggaaca

SEQ ID NO: 2575296 - RNA, 19 nt, Homo sapiens
  misc_RNA (1)...(19): siRNA sense strand
gcugugaggaacauggaau

SEQ ID NO: 2575297 - RNA, 19 nt, Homo sapiens
  misc_RNA (1)...(19): siRNA sense strand
acagcagccaugugacaaa

SEQ ID NO: 2575298 - RNA, 19 nt, Homo sapiens
  misc_RNA (1)...(19): siRNA sense strand
gcagaucaccagugcggau

SEQ ID NO: 2575299 - RNA, 19 nt, Homo sapiens
  misc_RNA (1)...(19): siRNA sense strand
cagcugaugacuuuggcaa

SEQ ID NO: 2575300 - RNA, 19 nt, Homo sapiens
  misc_RNA (1)...(19): siRNA sense strand
gaacagaucucagugguca

SEQ ID NO: 2575301 - RNA, 19 nt, Homo sapiens
  misc_RNA (1)...(19): siRNA sense strand
aaguaugugcuguguguga

SEQ ID NO: 2575302 - RNA, 19 nt, Homo sapiens
  misc_RNA (1)...(19): siRNA sense strand
gcguggagauccuggccaa

SEQ ID NO: 2575303 - RNA, 19 nt, Homo sapiens
  misc_RNA (1)...(19): siRNA sense strand
guacaaagcagaagaggac

SEQ ID NO: 2575304 - RNA, 19 nt, Homo sapiens
  misc_RNA (1)...(19): siRNA sense strand
ccacuacgccagaaggcaa

SEQ ID NO: 2575305 - RNA, 19 nt, Homo sapiens
  misc_RNA (1)...(19): siRNA sense strand
agcuaaaggcauugaggau

SEQ ID NO: 2575306 - RNA, 19 nt, Homo sapiens
  misc_RNA (1)...(19): siRNA sense strand
agaacagcuccgaggaaga

SEQ ID NO: 2575307 - RNA, 19 nt, Homo sapiens
  misc_RNA (1)...(19): siRNA sense strand
ccguggacuuccugcgcaa

SEQ ID NO: 2575308 - RNA, 19 nt, Homo sapiens
  misc_RNA (1)...(19): siRNA sense strand
caguggaggcagagggaac

SEQ ID NO: 2575309 - RNA, 19 nt, Homo sapiens
  misc_RNA (1)...(19): siRNA sense strand
agggagaaguggcagcgaa

SEQ ID NO: 2575310 - RNA, 19 nt, Homo sapiens
  misc_RNA (1)...(19): siRNA sense strand
aggagaugaccaaguggaa

SEQ ID NO: 2575311 - RNA, 19 nt, Homo sapiens
  misc_RNA (1)...(19): siRNA sense strand
aguacaaagcagaagagga

SEQ ID NO: 2575312 - RNA, 19 nt, Homo sapiens
  misc_RNA (1)...(19): siRNA sense strand
ccugcagguagaagaggaa

SEQ ID NO: 2575313 - RNA, 19 nt, Homo sapiens
  misc_RNA (1)...(19): siRNA sense strand
cuggagagaagguggaugu

SEQ ID NO: 2575314 - RNA, 19 nt, Homo sapiens
  misc_RNA (1)...(19): siRNA sense strand
ccaucgacaucgugcggga

SEQ ID NO: 2575315 - RNA, 19 nt, Homo sapiens
  misc_RNA (1)...(19): siRNA sense strand
cggacagugaggaggucuu

SEQ ID NO: 2575316 - RNA, 19 nt, Homo sapiens
  misc_RNA (1)...(19): siRNA sense strand
gcucaaugucucugggugu

SEQ ID NO: 2575317 - RNA, 19 nt, Homo sapiens
  misc_RNA (1)...(19): siRNA sense strand
ccgaagcacuggaaggcca

SEQ ID NO: 2575318 - RNA, 19 nt, Homo sapiens
  misc_RNA (1)...(19): siRNA sense strand
gcacagcagugucuggaga

SEQ ID NO: 2575319 - RNA, 19 nt, Homo sapiens
  misc_RNA (1)...(19): siRNA sense strand
acggaauaccugaggagca

SEQ ID NO: 2575320 - RNA, 19 nt, Homo sapiens
  misc_RNA (1)...(19): siRNA sense strand
agaaagagcugacgccacu

SEQ ID NO: 2575321 - RNA, 19 nt, Homo sapiens
  misc_RNA (1)...(19): siRNA sense strand
gagauaagcaggugguggu

SEQ ID NO: 2575322 - RNA, 19 nt, Homo sapiens
  misc_RNA (1)...(19): siRNA sense strand
ccggaauaauggagucacu

SEQ ID NO: 2575323 - RNA, 19 nt, Homo sapiens
  misc_RNA (1)...(19): siRNA sense strand
acuggaaggccaagcucaa

SEQ ID NO: 2575324 - RNA, 19 nt, Homo sapiens
  misc_RNA (1)...(19): siRNA sense strand
cgaugaaggaggaaagcuc

SEQ ID NO: 2575325 - RNA, 19 nt, Homo sapiens
  misc_RNA (1)...(19): siRNA sense strand
ccgccauccuggaguacga

SEQ ID NO: 2575326 - RNA, 19 nt, Homo sapiens
  misc_RNA (1)...(19): siRNA sense strand
agguguuacuagaagaagu

SEQ ID NO: 2575327 - RNA, 19 nt, Homo sapiens
  misc_RNA (1)...(19): siRNA sense strand
cacuaaagaagcuggggaa

SEQ ID NO: 2575328 - RNA, 19 nt, Homo sapiens
  misc_RNA (1)...(19): siRNA sense strand
ugagaagaaguauggccaa

SEQ ID NO: 2575329 - RNA, 19 nt, Homo sapiens
  misc_RNA (1)...(19): siRNA sense strand
ugaucgaagcgcugcaaga

SEQ ID NO: 2575330 - RNA, 19 nt, Homo sapiens
  misc_RNA (1)...(19): siRNA sense strand
acgagaaggagcugaucga

SEQ ID NO: 2575331 - RNA, 19 nt, Homo sapiens
  misc_RNA (1)...(19): siRNA sense strand
acaaagagcuggaggccau

SEQ ID NO: 2575332 - RNA, 19 nt, Homo sapiens
  misc_RNA (1)...(19): siRNA sense strand
uguacaaggagcagggcua

SEQ ID NO: 2575333 - RNA, 19 nt, Homo sapiens
  misc_RNA (1)...(19): siRNA sense strand
ugacagaggaggagggcag

SEQ ID NO: 2575334 - RNA, 19 nt, Homo sapiens
  misc_RNA (1)...(19): siRNA sense strand
gagaaauucaagagaagcu

SEQ ID NO: 2575335 - RNA, 19 nt, Homo sapiens
  misc_RNA (1)...(19): siRNA sense strand
gggagagcucaguggggua

SEQ ID NO: 2575336 - RNA, 19 nt, Homo sapiens
  misc_RNA (1)...(19): siRNA sense strand
aaccagaggcagagggaag

SEQ ID NO: 2575337 - RNA, 19 nt, Homo sapiens
  misc_RNA (1)...(19): siRNA sense strand
cagaguggccugagaccca

SEQ ID NO: 2575338 - RNA, 19 nt, Homo sapiens
  misc_RNA (1)...(19): siRNA sense strand
cggcagcacugaugcagga

SEQ ID NO: 2575339 - RNA, 19 nt, Homo sapiens
  misc_RNA (1)...(19): siRNA sense strand
ggacauacccaaagggcua

SEQ ID NO: 2575340 - RNA, 19 nt, Homo sapiens
  misc_RNA (1)...(19): siRNA sense strand
uggaauaaauacuggguga

SEQ ID NO: 2575341 - RNA, 19 nt, Homo sapiens
  misc_RNA (1)...(19): siRNA sense strand
uaggaaagguggaugguga

SEQ ID NO: 2575342 - RNA, 19 nt, Homo sapiens
  misc_RNA (1)...(19): siRNA sense strand
gaacaauauccgcagggaa

SEQ ID NO: 2575343 - RNA, 19 nt, Homo sapiens
  misc_RNA (1)...(19): siRNA sense strand
aggaaagguggauggugaa

SEQ ID NO: 2575344 - RNA, 19 nt, Homo sapiens
  misc_RNA (1)...(19): siRNA sense strand
ucuacaaauacgacaagaa

SEQ ID NO: 2575345 - RNA, 19 nt, Homo sapiens
  misc_RNA (1)...(19): siRNA sense strand
gccaaagcuacaagagaca

SEQ ID NO: 2575346 - RNA, 19 nt, Homo sapiens
  misc_RNA (1)...(19): siRNA sense strand
gauugaugucucagguuau

SEQ ID NO: 2575347 - RNA, 19 nt, Homo sapiens
  misc_RNA (1)...(19): siRNA sense strand
ccgcagggaaagugaaucu

SEQ ID NO: 2575348 - RNA, 19 nt, Homo sapiens
  misc_RNA (1)...(19): siRNA sense strand
ugcaggaagcucagaguau

SEQ ID NO: 2575349 - RNA, 19 nt, Homo sapiens
  misc_RNA (1)...(19): siRNA sense strand
ugauccaacaagaacaaua

SEQ ID NO: 2575350 - RNA, 19 nt, Homo sapiens
  misc_RNA (1)...(19): siRNA sense strand
cgacaagaaacagcagcaa

SEQ ID NO: 2575351 - RNA, 19 nt, Homo sapiens
  misc_RNA (1)...(19): siRNA sense strand
cugcuggcuuucugggauu

SEQ ID NO: 2575352 - RNA, 19 nt, Homo sapiens
  misc_RNA (1)...(19): siRNA sense strand
gggaacuggccaacaacau

SEQ ID NO: 2575353 - RNA, 19 nt, Homo sapiens
  misc_RNA (1)...(19): siRNA sense strand
gcaaacaauauuaugccuu

SEQ ID NO: 2575354 - RNA, 19 nt, Homo sapiens
  misc_RNA (1)...(19): siRNA sense strand
cagaagacaaacuugccaa

SEQ ID NO: 2575355 - RNA, 19 nt, Homo sapiens
  misc_RNA (1)...(19): siRNA sense strand
caaacuugccaaagcuaca

SEQ ID NO: 2575356 - RNA, 19 nt, Homo sapiens
  misc_RNA (1)...(19): siRNA sense strand
acaagagacagcuguaaaa

SEQ ID NO: 2575357 - RNA, 19 nt, Homo sapiens
  misc_RNA (1)...(19): siRNA sense strand
ggcacugaaacccgaguaa

SEQ ID NO: 2575358 - RNA, 19 nt, Homo sapiens
  misc_RNA (1)...(19): siRNA sense strand
ccuuuaggacauacccaaa

SEQ ID NO: 2575359 - RNA, 19 nt, Homo sapiens
  misc_RNA (1)...(19): siRNA sense strand
auaaauacugggugaauac

SEQ ID NO: 2575360 - RNA, 19 nt, Homo sapiens
  misc_RNA (1)...(19): siRNA sense strand
agauaugaacccagcauca

SEQ ID NO: 2575361 - RNA, 19 nt, Homo sapiens
  misc_RNA (1)...(19): siRNA sense strand
ugacuguggucgugcgguu

SEQ ID NO: 2575362 - RNA, 19 nt, Homo sapiens
  misc_RNA (1)...(19): siRNA sense strand
agauaugaacccagcauca

SEQ ID NO: 2575363 - RNA, 19 nt, Homo sapiens
  misc_RNA (1)...(19): siRNA sense strand
ugacuguggucgugcgguu

SEQ ID NO: 2575364 - RNA, 19 nt, Homo sapiens
  misc_RNA (1)...(19): siRNA sense strand
aggcaaaggcccauugaaa

SEQ ID NO: 2575365 - RNA, 19 nt, Homo sapiens
  misc_RNA (1)...(19): siRNA sense strand
cuguagaggaugugcgcaa

SEQ ID NO: 2575366 - RNA, 19 nt, Homo sapiens
  misc_RNA (1)...(19): siRNA sense strand
aggagaggcuggagagcau

SEQ ID NO: 2575367 - RNA, 19 nt, Homo sapiens
  misc_RNA (1)...(19): siRNA sense strand
gcagcaaggugaaggcaga

SEQ ID NO: 2575368 - RNA, 19 nt, Homo sapiens
  misc_RNA (1)...(19): siRNA sense strand
aggcagaagugcagaaucu

SEQ ID NO: 2575369 - RNA, 19 nt, Homo sapiens
  misc_RNA (1)...(19): siRNA sense strand
gaacagaucgcuaaggaga

SEQ ID NO: 2575370 - RNA, 19 nt, Homo sapiens
  misc_RNA (1)...(19): siRNA sense strand
ggaucguggcggagugcaa

SEQ ID NO: 2575371 - RNA, 19 nt, Homo sapiens
  misc_RNA (1)...(19): siRNA sense strand
acuuugagcaggaagauua

SEQ ID NO: 2575372 - RNA, 19 nt, Homo sapiens
  misc_RNA (1)...(19): siRNA sense strand
ccgcaggaggagaaggcaa

SEQ ID NO: 2575373 - RNA, 19 nt, Homo sapiens
  misc_RNA (1)...(19): siRNA sense strand
ccagaaggucuaugggaca

SEQ ID NO: 2575374 - RNA, 19 nt, Homo sapiens
  misc_RNA (1)...(19): siRNA sense strand
ggacaggaguucagagcac

SEQ ID NO: 2575375 - RNA, 19 nt, Homo sapiens
  misc_RNA (1)...(19): siRNA sense strand
augaaaaggaagugaaaga

SEQ ID NO: 2575376 - RNA, 19 nt, Homo sapiens
  misc_RNA (1)...(19): siRNA sense strand
uguaugaucaugauggaaa

SEQ ID NO: 2575377 - RNA, 19 nt, Homo sapiens
  misc_RNA (1)...(19): siRNA sense strand
cgcaggaggagaaggcaaa

SEQ ID NO: 2575378 - RNA, 19 nt, Homo sapiens
  misc_RNA (1)...(19): siRNA sense strand
guaugaucaugauggaaau

SEQ ID NO: 2575379 - RNA, 19 nt, Homo sapiens
  misc_RNA (1)...(19): siRNA sense strand
aacaagagaucuaaggaga

SEQ ID NO: 2575380 - RNA, 19 nt, Homo sapiens
  misc_RNA (1)...(19): siRNA sense strand
ucuuggaggaugugaacaa

SEQ ID NO: 2575381 - RNA, 19 nt, Homo sapiens
  misc_RNA (1)...(19): siRNA sense strand
ugaugugcguagagggaca

SEQ ID NO: 2575382 - RNA, 19 nt, Homo sapiens
  misc_RNA (1)...(19): siRNA sense strand
agacuucacaagaggcaaa

SEQ ID NO: 2575383 - RNA, 19 nt, Homo sapiens
  misc_RNA (1)...(19): siRNA sense strand
aagaaagggaggucaaaga

SEQ ID NO: 2575384 - RNA, 19 nt, Homo sapiens
  misc_RNA (1)...(19): siRNA sense strand
uggcagaugucaugagacu

SEQ ID NO: 2575385 - RNA, 19 nt, Homo sapiens
  misc_RNA (1)...(19): siRNA sense strand
aauacuggaaggaaagaaa

SEQ ID NO: 2575386 - RNA, 19 nt, Homo sapiens
  misc_RNA (1)...(19): siRNA sense strand
gggugaaauuaguucggau

SEQ ID NO: 2575387 - RNA, 19 nt, Homo sapiens
  misc_RNA (1)...(19): siRNA sense strand
gcgauugauaagaugacua

SEQ ID NO: 2575388 - RNA, 19 nt, Homo sapiens
  misc_RNA (1)...(19): siRNA sense strand
gaucaggaccccagaagaa

SEQ ID NO: 2575389 - RNA, 19 nt, Homo sapiens
  misc_RNA (1)...(19): siRNA sense strand
gggaguggaagcagugauu

SEQ ID NO: 2575390 - RNA, 19 nt, Homo sapiens
  misc_RNA (1)...(19): siRNA sense strand
ucagcgaguacaugaauaa

SEQ ID NO: 2575391 - RNA, 19 nt, Homo sapiens
  misc_RNA (1)...(19): siRNA sense strand
gaaaaggaagugaaagaau

SEQ ID NO: 2575392 - RNA, 19 nt, Homo sapiens
  misc_RNA (1)...(19): siRNA sense strand
agugaaagaauaugcccaa

SEQ ID NO: 2575393 - RNA, 19 nt, Homo sapiens
  misc_RNA (1)...(19): siRNA sense strand
ccaacaaacugguagaggu

SEQ ID NO: 2575394 - RNA, 19 nt, Homo sapiens
  misc_RNA (1)...(19): siRNA sense strand
augaagaaggggugaaauu

SEQ ID NO: 2575395 - RNA, 19 nt, Homo sapiens
  misc_RNA (1)...(19): siRNA sense strand
caacaggagcugaaggauc

SEQ ID NO: 2575396 - RNA, 19 nt, Homo sapiens
  misc_RNA (1)...(19): siRNA sense strand
cuauguagcagcaagaaga

SEQ ID NO: 2575397 - RNA, 19 nt, Homo sapiens
  misc_RNA (1)...(19): siRNA sense strand
aaagcaagcuggaugcaga

SEQ ID NO: 2575398 - RNA, 19 nt, Homo sapiens
  misc_RNA (1)...(19): siRNA sense strand
uggccaagcagauguguau

SEQ ID NO: 2575399 - RNA, 19 nt, Homo sapiens
  misc_RNA (1)...(19): siRNA sense strand
gggagaagcagguccgagu

SEQ ID NO: 2575400 - RNA, 19 nt, Homo sapiens
  misc_RNA (1)...(19): siRNA sense strand
cccagaagaacuagaggau

SEQ ID NO: 2575401 - RNA, 19 nt, Homo sapiens
  misc_RNA (1)...(19): siRNA sense strand
agauauuccaucaagagaa

SEQ ID NO: 2575402 - RNA, 19 nt, Homo sapiens
  misc_RNA (1)...(19): siRNA sense strand
ggcaaaggcccauugaaaa

SEQ ID NO: 2575403 - RNA, 19 nt, Homo sapiens
  misc_RNA (1)...(19): siRNA sense strand
uuggaaauccggacgcuaa

SEQ ID NO: 2575404 - RNA, 19 nt, Homo sapiens
  misc_RNA (1)...(19): siRNA sense strand
gagagaaaagccugaagaa

SEQ ID NO: 2575405 - RNA, 19 nt, Homo sapiens
  misc_RNA (1)...(19): siRNA sense strand
uucaaagaccagugggaga

SEQ ID NO: 2575406 - RNA, 19 nt, Homo sapiens
  misc_RNA (1)...(19): siRNA sense strand
agagcaagccacucagaau

SEQ ID NO: 2575407 - RNA, 19 nt, Homo sapiens
  misc_RNA (1)...(19): siRNA sense strand
ggacagugccacaucgcuu

SEQ ID NO: 2575408 - RNA, 19 nt, Homo sapiens
  misc_RNA (1)...(19): siRNA sense strand
agaugaaggcuccagagaa

SEQ ID NO: 2575409 - RNA, 19 nt, Homo sapiens
  misc_RNA (1)...(19): siRNA sense strand
aaggagacagcuucggaaa

SEQ ID NO: 2575410 - RNA, 19 nt, Homo sapiens
  misc_RNA (1)...(19): siRNA sense strand
aggauaacauggacgucuu

SEQ ID NO: 2575411 - RNA, 19 nt, Homo sapiens
  misc_RNA (1)...(19): siRNA sense strand
cugacgaagccaagggcca

SEQ ID NO: 2575412 - RNA, 19 nt, Homo sapiens
  misc_RNA (1)...(19): siRNA sense strand
ugcaaagagcggaaaugaa

SEQ ID NO: 2575413 - RNA, 19 nt, Homo sapiens
  misc_RNA (1)...(19): siRNA sense strand
ucaaagaccagugggagaa

SEQ ID NO: 2575414 - RNA, 19 nt, Homo sapiens
  misc_RNA (1)...(19): siRNA sense strand
ugugaacaagugugugaua

SEQ ID NO: 2575415 - RNA, 19 nt, Homo sapiens
  misc_RNA (1)...(19): siRNA sense strand
uagcugagcagguggagau

SEQ ID NO: 2575416 - RNA, 19 nt, Homo sapiens
  misc_RNA (1)...(19): siRNA sense strand
cuguacaggcuuuaaguga

SEQ ID NO: 2575417 - RNA, 19 nt, Homo sapiens
  misc_RNA (1)...(19): siRNA sense strand
uguagcagcaagaagacaa

SEQ ID NO: 2575418 - RNA, 19 nt, Homo sapiens
  misc_RNA (1)...(19): siRNA sense strand
gaaaugaaaaggaagugaa

SEQ ID NO: 2575419 - RNA, 19 nt, Homo sapiens
  misc_RNA (1)...(19): siRNA sense strand
gcgcaaacaaggugagacg

SEQ ID NO: 2575420 - RNA, 19 nt, Homo sapiens
  misc_RNA (1)...(19): siRNA sense strand
ugucaacacaagcaacaaa

SEQ ID NO: 2575421 - RNA, 19 nt, Homo sapiens
  misc_RNA (1)...(19): siRNA sense strand
cugagaagguguuggaagc

SEQ ID NO: 2575422 - RNA, 19 nt, Homo sapiens
  misc_RNA (1)...(19): siRNA sense strand
cuugagagaaccugggaaa

SEQ ID NO: 2575423 - RNA, 19 nt, Homo sapiens
  misc_RNA (1)...(19): siRNA sense strand
acgaagaggccaaaagaaa

SEQ ID NO: 2575424 - RNA, 19 nt, Homo sapiens
  misc_RNA (1)...(19): siRNA sense strand
uguuaaagccaaaaggaaa

SEQ ID NO: 2575425 - RNA, 19 nt, Homo sapiens
  misc_RNA (1)...(19): siRNA sense strand
ggaagaauauuaagccaca

SEQ ID NO: 2575426 - RNA, 19 nt, Homo sapiens
  misc_RNA (1)...(19): siRNA sense strand
ccagaauccaguagagaca

SEQ ID NO: 2575427 - RNA, 19 nt, Homo sapiens
  misc_RNA (1)...(19): siRNA sense strand
aaguacaggcagugaaaga

SEQ ID NO: 2575428 - RNA, 19 nt, Homo sapiens
  misc_RNA (1)...(19): siRNA sense strand
cgaagaggccaaaagaaaa

SEQ ID NO: 2575429 - RNA, 19 nt, Homo sapiens
  misc_RNA (1)...(19): siRNA sense strand
cagccuuguuaaagccaaa

SEQ ID NO: 2575430 - RNA, 19 nt, Homo sapiens
  misc_RNA (1)...(19): siRNA sense strand
gugaagaaacugaaccaga

SEQ ID NO: 2575431 - RNA, 19 nt, Homo sapiens
  misc_RNA (1)...(19): siRNA sense strand
guuagaggagggugaagaa

SEQ ID NO: 2575432 - RNA, 19 nt, Homo sapiens
  misc_RNA (1)...(19): siRNA sense strand
augauaacgaagaggccaa

SEQ ID NO: 2575433 - RNA, 19 nt, Homo sapiens
  misc_RNA (1)...(19): siRNA sense strand
augagaaggucuuggaucu

SEQ ID NO: 2575434 - RNA, 19 nt, Homo sapiens
  misc_RNA (1)...(19): siRNA sense strand
aggucgaggacgagggcau

SEQ ID NO: 2575435 - RNA, 19 nt, Homo sapiens
  misc_RNA (1)...(19): siRNA sense strand
cgaaaguacaggcagugaa

SEQ ID NO: 2575436 - RNA, 19 nt, Homo sapiens
  misc_RNA (1)...(19): siRNA sense strand
cuuaaagacaguaggccuu

SEQ ID NO: 2575437 - RNA, 19 nt, Homo sapiens
  misc_RNA (1)...(19): siRNA sense strand
gggugaagaaacugaacca

SEQ ID NO: 2575438 - RNA, 19 nt, Homo sapiens
  misc_RNA (1)...(19): siRNA sense strand
gaucagacugucagcaaaa

SEQ ID NO: 2575439 - RNA, 19 nt, Homo sapiens
  misc_RNA (1)...(19): siRNA sense strand
gugcagagucagacgacca

SEQ ID NO: 2575440 - RNA, 19 nt, Homo sapiens
  misc_RNA (1)...(19): siRNA sense strand
agaucagacugucagcaaa

SEQ ID NO: 2575441 - RNA, 19 nt, Homo sapiens
  misc_RNA (1)...(19): siRNA sense strand
aggaagaacccucuaccaa

SEQ ID NO: 2575442 - RNA, 19 nt, Homo sapiens
  misc_RNA (1)...(19): siRNA sense strand
cagugauggucccagcaaa

SEQ ID NO: 2575443 - RNA, 19 nt, Homo sapiens
  misc_RNA (1)...(19): siRNA sense strand
agaggagggugaagaaacu

SEQ ID NO: 2575444 - RNA, 19 nt, Homo sapiens
  misc_RNA (1)...(19): siRNA sense strand
cugaguuaucaaaggaaga

SEQ ID NO: 2575445 - RNA, 19 nt, Homo sapiens
  misc_RNA (1)...(19): siRNA sense strand
auucuguagucaucaguaa

SEQ ID NO: 2575446 - RNA, 19 nt, Homo sapiens
  misc_RNA (1)...(19): siRNA sense strand
cagaucagacugucagcaa

SEQ ID NO: 2575447 - RNA, 19 nt, Homo sapiens
  misc_RNA (1)...(19): siRNA sense strand
ucacuuuggaggccagaaa

SEQ ID NO: 2575448 - RNA, 19 nt, Homo sapiens
  misc_RNA (1)...(19): siRNA sense strand
caaccagaggcaacagcaa

SEQ ID NO: 2575449 - RNA, 19 nt, Homo sapiens
  misc_RNA (1)...(19): siRNA sense strand
acaauaaugagaaggucuu

SEQ ID NO: 2575450 - RNA, 19 nt, Homo sapiens
  misc_RNA (1)...(19): siRNA sense strand
cggagugugcugcggguuu

SEQ ID NO: 2575451 - RNA, 19 nt, Homo sapiens
  misc_RNA (1)...(19): siRNA sense strand
auuagaagagagaggaguu

SEQ ID NO: 2575452 - RNA, 19 nt, Homo sapiens
  misc_RNA (1)...(19): siRNA sense strand
cugcagacaaacuggcuau

SEQ ID NO: 2575453 - RNA, 19 nt, Homo sapiens
  misc_RNA (1)...(19): siRNA sense strand
gcacugacaaccagaggca

SEQ ID NO: 2575454 - RNA, 19 nt, Homo sapiens
  misc_RNA (1)...(19): siRNA sense strand
aaaaggaaagguaguguaa

SEQ ID NO: 2575455 - RNA, 19 nt, Homo sapiens
  misc_RNA (1)...(19): siRNA sense strand
gaaagguaguguaagcguu

SEQ ID NO: 2575456 - RNA, 19 nt, Homo sapiens
  misc_RNA (1)...(19): siRNA sense strand
acacaggagagcaagauca

SEQ ID NO: 2575457 - RNA, 19 nt, Homo sapiens
  misc_RNA (1)...(19): siRNA sense strand
cgacugccucagaguuaaa

SEQ ID NO: 2575458 - RNA, 19 nt, Homo sapiens
  misc_RNA (1)...(19): siRNA sense strand
gaagaggccaaaagaaaau

SEQ ID NO: 2575459 - RNA, 19 nt, Homo sapiens
  misc_RNA (1)...(19): siRNA sense strand
ugaaaauggagccgaggua

SEQ ID NO: 2575460 - RNA, 19 nt, Homo sapiens
  misc_RNA (1)...(19): siRNA sense strand
gcagcuuccgagacgguua

SEQ ID NO: 2575461 - RNA, 19 nt, Homo sapiens
  misc_RNA (1)...(19): siRNA sense strand
gaguuaaauuagaagagag

SEQ ID NO: 2575462 - RNA, 19 nt, Homo sapiens
  misc_RNA (1)...(19): siRNA sense strand
aaauagaagcacugacaac

SEQ ID NO: 2575463 - RNA, 19 nt, Homo sapiens
  misc_RNA (1)...(19): siRNA sense strand
aaagcaaagaagcgggcau

SEQ ID NO: 2575464 - RNA, 19 nt, Homo sapiens
  misc_RNA (1)...(19): siRNA sense strand
aguguaagcguuugcucaa

SEQ ID NO: 2575465 - RNA, 19 nt, Homo sapiens
  misc_RNA (1)...(19): siRNA sense strand
agacaaacuggcuauaaaa

SEQ ID NO: 2575466 - RNA, 19 nt, Homo sapiens
  misc_RNA (1)...(19): siRNA sense strand
aauuugaacuagagcgaga

SEQ ID NO: 2575467 - RNA, 19 nt, Homo sapiens
  misc_RNA (1)...(19): siRNA sense strand
ggaaaaggaagaagagcga

SEQ ID NO: 2575468 - RNA, 19 nt, Homo sapiens
  misc_RNA (1)...(19): siRNA sense strand
gaacagaugcggaggcaag

SEQ ID NO: 2575469 - RNA, 19 nt, Homo sapiens
  misc_RNA (1)...(19): siRNA sense strand
gaggagaaccuguccgaga

SEQ ID NO: 2575470 - RNA, 19 nt, Homo sapiens
  misc_RNA (1)...(19): siRNA sense strand
gcuuugagguggaggcauc

SEQ ID NO: 2575471 - RNA, 19 nt, Homo sapiens
  misc_RNA (1)...(19): siRNA sense strand
gaggugaaccgaagggcau

SEQ ID NO: 2575472 - RNA, 19 nt, Homo sapiens
  misc_RNA (1)...(19): siRNA sense strand
cagaugucgaagaggguuu

SEQ ID NO: 2575473 - RNA, 19 nt, Homo sapiens
  misc_RNA (1)...(19): siRNA sense strand
ccgaggguacagaggagaa

SEQ ID NO: 2575474 - RNA, 19 nt, Homo sapiens
  misc_RNA (1)...(19): siRNA sense strand
agacaaguguagcuggcuu

SEQ ID NO: 2575475 - RNA, 19 nt, Homo sapiens
  misc_RNA (1)...(19): siRNA sense strand
accaaaggugugaggugaa

SEQ ID NO: 2575476 - RNA, 19 nt, Homo sapiens
  misc_RNA (1)...(19): siRNA sense strand
acaaugaacugaaacggga

SEQ ID NO: 2575477 - RNA, 19 nt, Homo sapiens
  misc_RNA (1)...(19): siRNA sense strand
uaaauuugaacuagagcga

SEQ ID NO: 2575478 - RNA, 19 nt, Homo sapiens
  misc_RNA (1)...(19): siRNA sense strand
aaugaugacaagaagccaa

SEQ ID NO: 2575479 - RNA, 19 nt, Homo sapiens
  misc_RNA (1)...(19): siRNA sense strand
ugcaaauggcagugggaua

SEQ ID NO: 2575480 - RNA, 19 nt, Homo sapiens
  misc_RNA (1)...(19): siRNA sense strand
cuguaaggaagaagauaua

SEQ ID NO: 2575481 - RNA, 19 nt, Homo sapiens
  misc_RNA (1)...(19): siRNA sense strand
aaacaguccucuagagaca

SEQ ID NO: 2575482 - RNA, 19 nt, Homo sapiens
  misc_RNA (1)...(19): siRNA sense strand
ggaaagaaauggagcuggu

SEQ ID NO: 2575483 - RNA, 19 nt, Homo sapiens
  misc_RNA (1)...(19): siRNA sense strand
acaugaaaccuguuacaaa

SEQ ID NO: 2575484 - RNA, 19 nt, Homo sapiens
  misc_RNA (1)...(19): siRNA sense strand
cacuaaagaauguggaaaa

SEQ ID NO: 2575485 - RNA, 19 nt, Homo sapiens
  misc_RNA (1)...(19): siRNA sense strand
acaggaaagcccagaagaa

SEQ ID NO: 2575486 - RNA, 19 nt, Homo sapiens
  misc_RNA (1)...(19): siRNA sense strand
agaagaaaggacaguaaau

SEQ ID NO: 2575487 - RNA, 19 nt, Homo sapiens
  misc_RNA (1)...(19): siRNA sense strand
aagaagaugcuuugcaaau

SEQ ID NO: 2575488 - RNA, 19 nt, Homo sapiens
  misc_RNA (1)...(19): siRNA sense strand
agacaaaaucagaguucaa

SEQ ID NO: 2575489 - RNA, 19 nt, Homo sapiens
  misc_RNA (1)...(19): siRNA sense strand
ccaugaacucugugucuaa

SEQ ID NO: 2575490 - RNA, 19 nt, Homo sapiens
  misc_RNA (1)...(19): siRNA sense strand
acuugaaaacuguggaaaa

SEQ ID NO: 2575491 - RNA, 19 nt, Homo sapiens
  misc_RNA (1)...(19): siRNA sense strand
gaucguaaggagcaaauua

SEQ ID NO: 2575492 - RNA, 19 nt, Homo sapiens
  misc_RNA (1)...(19): siRNA sense strand
ccuguaaggaagaagauau

SEQ ID NO: 2575493 - RNA, 19 nt, Homo sapiens
  misc_RNA (1)...(19): siRNA sense strand
aagaaauggagcugguauu

SEQ ID NO: 2575494 - RNA, 19 nt, Homo sapiens
  misc_RNA (1)...(19): siRNA sense strand
ucagagaaucuauggaaga

SEQ ID NO: 2575495 - RNA, 19 nt, Homo sapiens
  misc_RNA (1)...(19): siRNA sense strand
gcuucacagaauaaagaua

SEQ ID NO: 2575496 - RNA, 19 nt, Homo sapiens
  misc_RNA (1)...(19): siRNA sense strand
gugcaugaucccagcaaca

SEQ ID NO: 2575497 - RNA, 19 nt, Homo sapiens
  misc_RNA (1)...(19): siRNA sense strand
cuggaguggcugaauauaa

SEQ ID NO: 2575498 - RNA, 19 nt, Homo sapiens
  misc_RNA (1)...(19): siRNA sense strand
uuaagaacguccaggcaca

SEQ ID NO: 2575499 - RNA, 19 nt, Homo sapiens
  misc_RNA (1)...(19): siRNA sense strand
ggagcugguauuuggacua

SEQ ID NO: 2575500 - RNA, 19 nt, Homo sapiens
  misc_RNA (1)...(19): siRNA sense strand
caaugcgcuuggagagcaa

SEQ ID NO: 2575501 - RNA, 19 nt, Homo sapiens
  misc_RNA (1)...(19): siRNA sense strand
ucagaugggcucagugcua

SEQ ID NO: 2575502 - RNA, 19 nt, Homo sapiens
  misc_RNA (1)...(19): siRNA sense strand
caguuauaccagugcucaa

SEQ ID NO: 2575503 - RNA, 19 nt, Homo sapiens
  misc_RNA (1)...(19): siRNA sense strand
ccauuaaagcuucacagaa

SEQ ID NO: 2575504 - RNA, 19 nt, Homo sapiens
  misc_RNA (1)...(19): siRNA sense strand
acacuaaagaauguggaaa

SEQ ID NO: 2575505 - RNA, 19 nt, Homo sapiens
  misc_RNA (1)...(19): siRNA sense strand
ucugaauagaaguggauca

SEQ ID NO: 2575506 - RNA, 19 nt, Homo sapiens
  misc_RNA (1)...(19): siRNA sense strand
cuacauuaacugugucaga

SEQ ID NO: 2575507 - RNA, 19 nt, Homo sapiens
  misc_RNA (1)...(19): siRNA sense strand
caguuuaaauguaguccau

SEQ ID NO: 2575508 - RNA, 19 nt, Homo sapiens
  misc_RNA (1)...(19): siRNA sense strand
uggaauucucucucaguua

SEQ ID NO: 2575509 - RNA, 19 nt, Homo sapiens
  misc_RNA (1)...(19): siRNA sense strand
ggacaguaaaugugagcuc

SEQ ID NO: 2575510 - RNA, 19 nt, Homo sapiens
  misc_RNA (1)...(19): siRNA sense strand
agugggauauuuugagaaa

SEQ ID NO: 2575511 - RNA, 19 nt, Homo sapiens
  misc_RNA (1)...(19): siRNA sense strand
guauuugguacaaggugaa

SEQ ID NO: 2575512 - RNA, 19 nt, Homo sapiens
  misc_RNA (1)...(19): siRNA sense strand
agugggagauuaugaacau

SEQ ID NO: 2575513 - RNA, 19 nt, Homo sapiens
  misc_RNA (1)...(19): siRNA sense strand
cggauauugaagugcauga

SEQ ID NO: 2575514 - RNA, 19 nt, Homo sapiens
  misc_RNA (1)...(19): siRNA sense strand
agaaggugugugacauaua

SEQ ID NO: 2575515 - RNA, 19 nt, Homo sapiens
  misc_RNA (1)...(19): siRNA sense strand
acaguaaaugugagcucua

SEQ ID NO: 2575516 - RNA, 19 nt, Homo sapiens
  misc_RNA (1)...(19): siRNA sense strand
gaaaauguggcuuggaaga

SEQ ID NO: 2575517 - RNA, 19 nt, Homo sapiens
  misc_RNA (1)...(19): siRNA sense strand
caagcaacucgaagaacau

SEQ ID NO: 2575518 - RNA, 19 nt, Homo sapiens
  misc_RNA (1)...(19): siRNA sense strand
cuugaaaacuguggaaaau

SEQ ID NO: 2575519 - RNA, 19 nt, Homo sapiens
  misc_RNA (1)...(19): siRNA sense strand
uggaagaauggguuagcuu

SEQ ID NO: 2575520 - RNA, 19 nt, Homo sapiens
  misc_RNA (1)...(19): siRNA sense strand
uuugguacaaggugaauaa

SEQ ID NO: 2575521 - RNA, 19 nt, Homo sapiens
  misc_RNA (1)...(19): siRNA sense strand
aaaacaauccagugggaga

SEQ ID NO: 2575522 - RNA, 19 nt, Homo sapiens
  misc_RNA (1)...(19): siRNA sense strand
ggaaaagaauuuaccaacu

SEQ ID NO: 2575523 - RNA, 19 nt, Homo sapiens
  misc_RNA (1)...(19): siRNA sense strand
ggugugugacauauauaua

SEQ ID NO: 2575524 - RNA, 19 nt, Homo sapiens
  misc_RNA (1)...(19): siRNA sense strand
gaucauuuccacuagaaca

SEQ ID NO: 2575525 - RNA, 19 nt, Homo sapiens
  misc_RNA (1)...(19): siRNA sense strand
uaugagaaggugugugaca

SEQ ID NO: 2575526 - RNA, 19 nt, Homo sapiens
  misc_RNA (1)...(19): siRNA sense strand
agcaagacuuaucaagaau

SEQ ID NO: 2575527 - RNA, 19 nt, Homo sapiens
  misc_RNA (1)...(19): siRNA sense strand
cugaaagagcuauugcaga

SEQ ID NO: 2575528 - RNA, 19 nt, Homo sapiens
  misc_RNA (1)...(19): siRNA sense strand
ucuaugagaagguguguga

SEQ ID NO: 2575529 - RNA, 19 nt, Homo sapiens
  misc_RNA (1)...(19): siRNA sense strand
aagaaaggacaguaaaugu

SEQ ID NO: 2575530 - RNA, 19 nt, Homo sapiens
  misc_RNA (1)...(19): siRNA sense strand
aagaaguaguguucaucau

SEQ ID NO: 2575531 - RNA, 19 nt, Homo sapiens
  misc_RNA (1)...(19): siRNA sense strand
guaaggagcaaauuaacuu

SEQ ID NO: 2575532 - RNA, 19 nt, Homo sapiens
  misc_RNA (1)...(19): siRNA sense strand
caguaauaucagaagauuc

SEQ ID NO: 2575533 - RNA, 19 nt, Homo sapiens
  misc_RNA (1)...(19): siRNA sense strand
uaucuuugccuguaaggaa

SEQ ID NO: 2575534 - RNA, 19 nt, Homo sapiens
  misc_RNA (1)...(19): siRNA sense strand
agaugggcucagugcuaaa

SEQ ID NO: 2575535 - RNA, 19 nt, Homo sapiens
  misc_RNA (1)...(19): siRNA sense strand
agaagaauguauuugguac

SEQ ID NO: 2575536 - RNA, 19 nt, Homo sapiens
  misc_RNA (1)...(19): siRNA sense strand
gggcagagugcuucuuaca

SEQ ID NO: 2575537 - RNA, 19 nt, Homo sapiens
  misc_RNA (1)...(19): siRNA sense strand
caugaaaccuguuacaaac

SEQ ID NO: 2575538 - RNA, 19 nt, Homo sapiens
  misc_RNA (1)...(19): siRNA sense strand
aggaaagcccagaagaaag

SEQ ID NO: 2575539 - RNA, 19 nt, Homo sapiens
  misc_RNA (1)...(19): siRNA sense strand
cuuaaagggaagaggaaau

SEQ ID NO: 2575540 - RNA, 19 nt, Homo sapiens
  misc_RNA (1)...(19): siRNA sense strand
ccauggaagugguggacau

SEQ ID NO: 2575541 - RNA, 19 nt, Homo sapiens
  misc_RNA (1)...(19): siRNA sense strand
gaaacauacuuaaagggaa

SEQ ID NO: 2575542 - RNA, 19 nt, Homo sapiens
  misc_RNA (1)...(19): siRNA sense strand
gggaagaggaaaugagacu

SEQ ID NO: 2575543 - RNA, 19 nt, Homo sapiens
  misc_RNA (1)...(19): siRNA sense strand
ucuacaagcugaaggguga

SEQ ID NO: 2575544 - RNA, 19 nt, Homo sapiens
  misc_RNA (1)...(19): siRNA sense strand
ggaaauagugagaggacgu

SEQ ID NO: 2575545 - RNA, 19 nt, Homo sapiens
  misc_RNA (1)...(19): siRNA sense strand
uggaagaugcggugaauga

SEQ ID NO: 2575546 - RNA, 19 nt, Homo sapiens
  misc_RNA (1)...(19): siRNA sense strand
gugguuugccuaagagaaa

SEQ ID NO: 2575547 - RNA, 19 nt, Homo sapiens
  misc_RNA (1)...(19): siRNA sense strand
cugcuggaguugugggaau

SEQ ID NO: 2575548 - RNA, 19 nt, Homo sapiens
  misc_RNA (1)...(19): siRNA sense strand
aagacaggcagcagggaua

SEQ ID NO: 2575549 - RNA, 19 nt, Homo sapiens
  misc_RNA (1)...(19): siRNA sense strand
caagaaugguacagaaacu

SEQ ID NO: 2575550 - RNA, 19 nt, Homo sapiens
  misc_RNA (1)...(19): siRNA sense strand
uggaaacagcagaggaaaa

SEQ ID NO: 2575551 - RNA, 19 nt, Homo sapiens
  misc_RNA (1)...(19): siRNA sense strand
uuaugaacuucgucagaaa

SEQ ID NO: 2575552 - RNA, 19 nt, Homo sapiens
  misc_RNA (1)...(19): siRNA sense strand
ugacaaaagacgagauaca

SEQ ID NO: 2575553 - RNA, 19 nt, Homo sapiens
  misc_RNA (1)...(19): siRNA sense strand
uuccaaggcuagugguaaa

SEQ ID NO: 2575554 - RNA, 19 nt, Homo sapiens
  misc_RNA (1)...(19): siRNA sense strand
uggaauacuugcagcugaa

SEQ ID NO: 2575555 - RNA, 19 nt, Homo sapiens
  misc_RNA (1)...(19): siRNA sense strand
cuguggacaccaagaaaua

SEQ ID NO: 2575556 - RNA, 19 nt, Homo sapiens
  misc_RNA (1)...(19): siRNA sense strand
ggaacaucugguagaggaa

SEQ ID NO: 2575557 - RNA, 19 nt, Homo sapiens
  misc_RNA (1)...(19): siRNA sense strand
ugaagugagaggagaaaca

SEQ ID NO: 2575558 - RNA, 19 nt, Homo sapiens
  misc_RNA (1)...(19): siRNA sense strand
gcuagaaaguugauguacu

SEQ ID NO: 2575559 - RNA, 19 nt, Homo sapiens
  misc_RNA (1)...(19): siRNA sense strand
gagcaguggcugaagacau

SEQ ID NO: 2575560 - RNA, 19 nt, Homo sapiens
  misc_RNA (1)...(19): siRNA sense strand
ccacauuccuccugaaaau

SEQ ID NO: 2575561 - RNA, 19 nt, Homo sapiens
  misc_RNA (1)...(19): siRNA sense strand
aguccauggucgucugaaa

SEQ ID NO: 2575562 - RNA, 19 nt, Homo sapiens
  misc_RNA (1)...(19): siRNA sense strand
aaacauacuuaaagggaag

SEQ ID NO: 2575563 - RNA, 19 nt, Homo sapiens
  misc_RNA (1)...(19): siRNA sense strand
uguacaaggcagagaggga

SEQ ID NO: 2575564 - RNA, 19 nt, Homo sapiens
  misc_RNA (1)...(19): siRNA sense strand
cuuggaaacagcagaggaa

SEQ ID NO: 2575565 - RNA, 19 nt, Homo sapiens
  misc_RNA (1)...(19): siRNA sense strand
ggaaaagcaaugugauuau

SEQ ID NO: 2575566 - RNA, 19 nt, Homo sapiens
  misc_RNA (1)...(19): siRNA sense strand
cagugaaacuugauaccau

SEQ ID NO: 2575567 - RNA, 19 nt, Homo sapiens
  misc_RNA (1)...(19): siRNA sense strand
gagaaauggcaaucggcau

SEQ ID NO: 2575568 - RNA, 19 nt, Homo sapiens
  misc_RNA (1)...(19): siRNA sense strand
uggcaaucggcaugcaaua

SEQ ID NO: 2575569 - RNA, 19 nt, Homo sapiens
  misc_RNA (1)...(19): siRNA sense strand
uuaugaagugagaggagaa

SEQ ID NO: 2575570 - RNA, 19 nt, Homo sapiens
  misc_RNA (1)...(19): siRNA sense strand
ccacaauggcagcuaugaa

SEQ ID NO: 2575571 - RNA, 19 nt, Homo sapiens
  misc_RNA (1)...(19): siRNA sense strand
gugauagaauacugugaga

SEQ ID NO: 2575572 - RNA, 19 nt, Homo sapiens
  misc_RNA (1)...(19): siRNA sense strand
aggaaaggacacagcugua

SEQ ID NO: 2575573 - RNA, 19 nt, Homo sapiens
  misc_RNA (1)...(19): siRNA sense strand
ugguaaagucucugaagga

SEQ ID NO: 2575574 - RNA, 19 nt, Homo sapiens
  misc_RNA (1)...(19): siRNA sense strand
gagacuaccuacuggcuga

SEQ ID NO: 2575575 - RNA, 19 nt, Homo sapiens
  misc_RNA (1)...(19): siRNA sense strand
ugucauuauucuaguggau

SEQ ID NO: 2575576 - RNA, 19 nt, Homo sapiens
  misc_RNA (1)...(19): siRNA sense strand
guucuacggcacagugaaa

SEQ ID NO: 2575577 - RNA, 19 nt, Homo sapiens
  misc_RNA (1)...(19): siRNA sense strand
acaguagaaugguggugaa

SEQ ID NO: 2575578 - RNA, 19 nt, Homo sapiens
  misc_RNA (1)...(19): siRNA sense strand
guacagaaacugaggacug

SEQ ID NO: 2575579 - RNA, 19 nt, Homo sapiens
  misc_RNA (1)...(19): siRNA sense strand
ccuuugagcuggagcaucu

SEQ ID NO: 2575580 - RNA, 19 nt, Homo sapiens
  misc_RNA (1)...(19): siRNA sense strand
acuuauuccuggagcacuu

SEQ ID NO: 2575581 - RNA, 19 nt, Homo sapiens
  misc_RNA (1)...(19): siRNA sense strand
uacaagaaugguacagaaa

SEQ ID NO: 2575582 - RNA, 19 nt, Homo sapiens
  misc_RNA (1)...(19): siRNA sense strand
caggaaaagcaaugugauu

SEQ ID NO: 2575583 - RNA, 19 nt, Homo sapiens
  misc_RNA (1)...(19): siRNA sense strand
cuaaauagcucuuucucca

SEQ ID NO: 2575584 - RNA, 19 nt, Homo sapiens
  misc_RNA (1)...(19): siRNA sense strand
ucuacaagguggaaaccau

SEQ ID NO: 2575585 - RNA, 19 nt, Homo sapiens
  misc_RNA (1)...(19): siRNA sense strand
gccucaagaucgaugauga

SEQ ID NO: 2575586 - RNA, 19 nt, Homo sapiens
  misc_RNA (1)...(19): siRNA sense strand
acuuaaagggaagaggaaa

SEQ ID NO: 2575587 - RNA, 19 nt, Homo sapiens
  misc_RNA (1)...(19): siRNA sense strand
ccacagacaaggagagcac

SEQ ID NO: 2575588 - RNA, 19 nt, Homo sapiens
  misc_RNA (1)...(19): siRNA sense strand
agugagaggacgucugcaa

SEQ ID NO: 2575589 - RNA, 19 nt, Homo sapiens
  misc_RNA (1)...(19): siRNA sense strand
cugugaaggccucgaccua

SEQ ID NO: 2575590 - RNA, 19 nt, Homo sapiens
  misc_RNA (1)...(19): siRNA sense strand
cagcuagaaaguugaugua

SEQ ID NO: 2575591 - RNA, 19 nt, Homo sapiens
  misc_RNA (1)...(19): siRNA sense strand
cgacagugcaaauacgaca

SEQ ID NO: 2575592 - RNA, 19 nt, Homo sapiens
  misc_RNA (1)...(19): siRNA sense strand
ccuaugauacccacguaaa

SEQ ID NO: 2575593 - RNA, 19 nt, Homo sapiens
  misc_RNA (1)...(19): siRNA sense strand
gccuaagagaaauggcaau

SEQ ID NO: 2575594 - RNA, 19 nt, Homo sapiens
  misc_RNA (1)...(19): siRNA sense strand
uggagaaucaacagcguuu

SEQ ID NO: 2575595 - RNA, 19 nt, Homo sapiens
  misc_RNA (1)...(19): siRNA sense strand
cggaacuauaugaggaagu

SEQ ID NO: 2575596 - RNA, 19 nt, Homo sapiens
  misc_RNA (1)...(19): siRNA sense strand
aagacaagauaaggaguuu

SEQ ID NO: 2575597 - RNA, 19 nt, Homo sapiens
  misc_RNA (1)...(19): siRNA sense strand
gaauacugugagagaggau

SEQ ID NO: 2575598 - RNA, 19 nt, Homo sapiens
  misc_RNA (1)...(19): siRNA sense strand
gcacauucauggauuggga

SEQ ID NO: 2575599 - RNA, 19 nt, Homo sapiens
  misc_RNA (1)...(19): siRNA sense strand
aggagaucauucugcggaa

SEQ ID NO: 2575600 - RNA, 19 nt, Homo sapiens
  misc_RNA (1)...(19): siRNA sense strand
cagauuuauucuuggaaac

SEQ ID NO: 2575601 - RNA, 19 nt, Homo sapiens
  misc_RNA (1)...(19): siRNA sense strand
gggacagggcugacagacu

SEQ ID NO: 2575602 - RNA, 19 nt, Homo sapiens
  misc_RNA (1)...(19): siRNA sense strand
gggaugaaggaccagaaau

SEQ ID NO: 2575603 - RNA, 19 nt, Homo sapiens
  misc_RNA (1)...(19): siRNA sense strand
gcucuggaggcuagcguuu

SEQ ID NO: 2575604 - RNA, 19 nt, Homo sapiens
  misc_RNA (1)...(19): siRNA sense strand
auucauggauugggaguuu

SEQ ID NO: 2575605 - RNA, 19 nt, Homo sapiens
  misc_RNA (1)...(19): siRNA sense strand
ggaucaucgcacaggagau

SEQ ID NO: 2575606 - RNA, 19 nt, Homo sapiens
  misc_RNA (1)...(19): siRNA sense strand
acacagagcuccugggcua

SEQ ID NO: 2575607 - RNA, 19 nt, Homo sapiens
  misc_RNA (1)...(19): siRNA sense strand
uggaagaccuggaggccaa

SEQ ID NO: 2575608 - RNA, 19 nt, Homo sapiens
  misc_RNA (1)...(19): siRNA sense strand
ucacagugcuggagcgcua

SEQ ID NO: 2575609 - RNA, 19 nt, Homo sapiens
  misc_RNA (1)...(19): siRNA sense strand
gagaagagcaggugcccaa

SEQ ID NO: 2575610 - RNA, 19 nt, Homo sapiens
  misc_RNA (1)...(19): siRNA sense strand
ggucaaagccucagccgca

SEQ ID NO: 2575611 - RNA, 19 nt, Homo sapiens
  misc_RNA (1)...(19): siRNA sense strand
cauccuggugauugagaaa

SEQ ID NO: 2575612 - RNA, 19 nt, Homo sapiens
  misc_RNA (1)...(19): siRNA sense strand
ggugcagaaggcagacaaa

SEQ ID NO: 2575613 - RNA, 19 nt, Homo sapiens
  misc_RNA (1)...(19): siRNA sense strand
ggaaccuggcucugggaga

SEQ ID NO: 2575614 - RNA, 19 nt, Homo sapiens
  misc_RNA (1)...(19): siRNA sense strand
aggccaaggcagucauuga

SEQ ID NO: 2575615 - RNA, 19 nt, Homo sapiens
  misc_RNA (1)...(19): siRNA sense strand
gggcaaugguucacagugc

SEQ ID NO: 2575616 - RNA, 19 nt, Homo sapiens
  misc_RNA (1)...(19): siRNA sense strand
gcuuagacaguuuggacca

SEQ ID NO: 2575617 - RNA, 19 nt, Homo sapiens
  misc_RNA (1)...(19): siRNA sense strand
cuuugacguuagagggcau

SEQ ID NO: 2575618 - RNA, 19 nt, Homo sapiens
  misc_RNA (1)...(19): siRNA sense strand
uuaugaaagaccugggcuu

SEQ ID NO: 2575619 - RNA, 19 nt, Homo sapiens
  misc_RNA (1)...(19): siRNA sense strand
uggccauggaagacgaauu

SEQ ID NO: 2575620 - RNA, 19 nt, Homo sapiens
  misc_RNA (1)...(19): siRNA sense strand
guauaauaugcguguggaa

SEQ ID NO: 2575621 - RNA, 19 nt, Homo sapiens
  misc_RNA (1)...(19): siRNA sense strand
ccaaagaaccagagcgggu

SEQ ID NO: 2575622 - RNA, 19 nt, Homo sapiens
  misc_RNA (1)...(19): siRNA sense strand
ccaagagagaacaguggaa

SEQ ID NO: 2575623 - RNA, 19 nt, Homo sapiens
  misc_RNA (1)...(19): siRNA sense strand
ggaagaaacugcggaggga

SEQ ID NO: 2575624 - RNA, 19 nt, Homo sapiens
  misc_RNA (1)...(19): siRNA sense strand
gggaaagcugggaacgaga

SEQ ID NO: 2575625 - RNA, 19 nt, Homo sapiens
  misc_RNA (1)...(19): siRNA sense strand
aagagagaacaguggaaga

SEQ ID NO: 2575626 - RNA, 19 nt, Homo sapiens
  misc_RNA (1)...(19): siRNA sense strand
augaaaaggauauggcgaa

SEQ ID NO: 2575627 - RNA, 19 nt, Homo sapiens
  misc_RNA (1)...(19): siRNA sense strand
aagacaagaaugugcccua

SEQ ID NO: 2575628 - RNA, 19 nt, Homo sapiens
  misc_RNA (1)...(19): siRNA sense strand
aaagaaggcucgcagcuga

SEQ ID NO: 2575629 - RNA, 19 nt, Homo sapiens
  misc_RNA (1)...(19): siRNA sense strand
augugaauccaaaggccua

SEQ ID NO: 2575630 - RNA, 19 nt, Homo sapiens
  misc_RNA (1)...(19): siRNA sense strand
caguaaaucauguggacuu

SEQ ID NO: 2575631 - RNA, 19 nt, Homo sapiens
  misc_RNA (1)...(19): siRNA sense strand
ucacaguggaacaggaaau

SEQ ID NO: 2575632 - RNA, 19 nt, Homo sapiens
  misc_RNA (1)...(19): siRNA sense strand
aguccuuccuagagguuaa

SEQ ID NO: 2575633 - RNA, 19 nt, Homo sapiens
  misc_RNA (1)...(19): siRNA sense strand
gguuaaugaagaaggcuca

SEQ ID NO: 2575634 - RNA, 19 nt, Homo sapiens
  misc_RNA (1)...(19): siRNA sense strand
ccugaaacaaugaacacaa

SEQ ID NO: 2575635 - RNA, 19 nt, Homo sapiens
  misc_RNA (1)...(19): siRNA sense strand
cauaugaaggagaugaaau

SEQ ID NO: 2575636 - RNA, 19 nt, Homo sapiens
  misc_RNA (1)...(19): siRNA sense strand
ucuuagagccacuggugaa

SEQ ID NO: 2575637 - RNA, 19 nt, Homo sapiens
  misc_RNA (1)...(19): siRNA sense strand
guaucagcaaggagaauuu

SEQ ID NO: 2575638 - RNA, 19 nt, Homo sapiens
  misc_RNA (1)...(19): siRNA sense strand
ccuagaaauaccauaugaa

SEQ ID NO: 2575639 - RNA, 19 nt, Homo sapiens
  misc_RNA (1)...(19): siRNA sense strand
aaacaggagaacugguaca

SEQ ID NO: 2575640 - RNA, 19 nt, Homo sapiens
  misc_RNA (1)...(19): siRNA sense strand
guggagaauaacacaaaca

SEQ ID NO: 2575641 - RNA, 19 nt, Homo sapiens
  misc_RNA (1)...(19): siRNA sense strand
uggccaacuacaucaauaa

SEQ ID NO: 2575642 - RNA, 19 nt, Homo sapiens
  misc_RNA (1)...(19): siRNA sense strand
ugaagaaggcucagaagcu

SEQ ID NO: 2575643 - RNA, 19 nt, Homo sapiens
  misc_RNA (1)...(19): siRNA sense strand
cuuaucagaaacaggagaa

SEQ ID NO: 2575644 - RNA, 19 nt, Homo sapiens
  misc_RNA (1)...(19): siRNA sense strand
caauaaguggguggagaau

SEQ ID NO: 2575645 - RNA, 19 nt, Homo sapiens
  misc_RNA (1)...(19): siRNA sense strand
ccaaugaagcuggugguau

SEQ ID NO: 2575646 - RNA, 19 nt, Homo sapiens
  misc_RNA (1)...(19): siRNA sense strand
caaugggaaugauggaacu

SEQ ID NO: 2575647 - RNA, 19 nt, Homo sapiens
  misc_RNA (1)...(19): siRNA sense strand
gugcuguauccucaaguua

SEQ ID NO: 2575648 - RNA, 19 nt, Homo sapiens
  misc_RNA (1)...(19): siRNA sense strand
aggaauaccuggagcgcuu

SEQ ID NO: 2575649 - RNA, 19 nt, Homo sapiens
  misc_RNA (1)...(19): siRNA sense strand
gcacuugguacgugggcaa

SEQ ID NO: 2575650 - RNA, 19 nt, Homo sapiens
  misc_RNA (1)...(19): siRNA sense strand
gcgugagggcaacgagaaa

SEQ ID NO: 2575651 - RNA, 19 nt, Homo sapiens
  misc_RNA (1)...(19): siRNA sense strand
ccaaauaccagcaggacca

SEQ ID NO: 2575652 - RNA, 19 nt, Homo sapiens
  misc_RNA (1)...(19): siRNA sense strand
cuagcaagauccagggcga

SEQ ID NO: 2575653 - RNA, 19 nt, Homo sapiens
  misc_RNA (1)...(19): siRNA sense strand
gguacgugggcaagaucaa

SEQ ID NO: 2575654 - RNA, 19 nt, Homo sapiens
  misc_RNA (1)...(19): siRNA sense strand
ucauggaggacgaggacga

SEQ ID NO: 2575655 - RNA, 19 nt, Homo sapiens
  misc_RNA (1)...(19): siRNA sense strand
gugagggcaacgagaaaga

SEQ ID NO: 2575656 - RNA, 19 nt, Homo sapiens
  misc_RNA (1)...(19): siRNA sense strand
ugaaggagcuggugcugca

SEQ ID NO: 2575657 - RNA, 19 nt, Homo sapiens
  misc_RNA (1)...(19): siRNA sense strand
gcaccuuccuaguccgaga

SEQ ID NO: 2575658 - RNA, 19 nt, Homo sapiens
  misc_RNA (1)...(19): siRNA sense strand
cggacaacagagagaucga

SEQ ID NO: 2575659 - RNA, 19 nt, Homo sapiens
  misc_RNA (1)...(19): siRNA sense strand
ccgacuugcccgagcaguu

SEQ ID NO: 2575660 - RNA, 19 nt, Homo sapiens
  misc_RNA (1)...(19): siRNA sense strand
gggaacaauaagcugauca

SEQ ID NO: 2575661 - RNA, 19 nt, Homo sapiens
  misc_RNA (1)...(19): siRNA sense strand
gagagaucgacaagcgcau

SEQ ID NO: 2575662 - RNA, 19 nt, Homo sapiens
  misc_RNA (1)...(19): siRNA sense strand
aggaacacuuggaagagca

SEQ ID NO: 2575663 - RNA, 19 nt, Homo sapiens
  misc_RNA (1)...(19): siRNA sense strand
acaacagagagaucgacaa

SEQ ID NO: 2575664 - RNA, 19 nt, Homo sapiens
  misc_RNA (1)...(19): siRNA sense strand
gcgcaagauccgagaccag

SEQ ID NO: 2575665 - RNA, 19 nt, Homo sapiens
  misc_RNA (1)...(19): siRNA sense strand
aggacagcguggaggcagu

SEQ ID NO: 2575666 - RNA, 19 nt, Homo sapiens
  misc_RNA (1)...(19): siRNA sense strand
gagaagaagaagaagcaca

SEQ ID NO: 2575667 - RNA, 19 nt, Homo sapiens
  misc_RNA (1)...(19): siRNA sense strand
cggacaacgagguggagga

SEQ ID NO: 2575668 - RNA, 19 nt, Homo sapiens
  misc_RNA (1)...(19): siRNA sense strand
ccauguaaccagggccaaa

SEQ ID NO: 2575669 - RNA, 19 nt, Homo sapiens
  misc_RNA (1)...(19): siRNA sense strand
aggagaagaagaagaagca

SEQ ID NO: 2575670 - RNA, 19 nt, Homo sapiens
  misc_RNA (1)...(19): siRNA sense strand
cugucgaggcccaggucaa

SEQ ID NO: 2575671 - RNA, 19 nt, Homo sapiens
  misc_RNA (1)...(19): siRNA sense strand
aggccugugaggagaagaa

SEQ ID NO: 2575672 - RNA, 19 nt, Homo sapiens
  misc_RNA (1)...(19): siRNA sense strand
acaacgagguggaggacug

SEQ ID NO: 2575673 - RNA, 19 nt, Homo sapiens
  misc_RNA (1)...(19): siRNA sense strand
ccgugugggacaauaacaa

SEQ ID NO: 2575674 - RNA, 19 nt, Homo sapiens
  misc_RNA (1)...(19): siRNA sense strand
cuggaagggcucacggaca

SEQ ID NO: 2575675 - RNA, 19 nt, Homo sapiens
  misc_RNA (1)...(19): siRNA sense strand
ugugaggagaagaagaaga

SEQ ID NO: 2575676 - RNA, 19 nt, Homo sapiens
  misc_RNA (1)...(19): siRNA sense strand
caguacucagccuggguaa

SEQ ID NO: 2575677 - RNA, 19 nt, Homo sapiens
  misc_RNA (1)...(19): siRNA sense strand
uagcagagaucaagcggaa

SEQ ID NO: 2575678 - RNA, 19 nt, Homo sapiens
  misc_RNA (1)...(19): siRNA sense strand
uggcaagacgugacagcaa

SEQ ID NO: 2575679 - RNA, 19 nt, Homo sapiens
  misc_RNA (1)...(19): siRNA sense strand
caaagguagaagaagaaau

SEQ ID NO: 2575680 - RNA, 19 nt, Homo sapiens
  misc_RNA (1)...(19): siRNA sense strand
agagcuaagaagagaacuu

SEQ ID NO: 2575681 - RNA, 19 nt, Homo sapiens
  misc_RNA (1)...(19): siRNA sense strand
ugcaaagguagaagaagaa

SEQ ID NO: 2575682 - RNA, 19 nt, Homo sapiens
  misc_RNA (1)...(19): siRNA sense strand
uugaagaaaaggucgaaaa

SEQ ID NO: 2575683 - RNA, 19 nt, Homo sapiens
  misc_RNA (1)...(19): siRNA sense strand
gaacagacccagucccuga

SEQ ID NO: 2575684 - RNA, 19 nt, Homo sapiens
  misc_RNA (1)...(19): siRNA sense strand
agguagaagaagaaaucca

SEQ ID NO: 2575685 - RNA, 19 nt, Homo sapiens
  misc_RNA (1)...(19): siRNA sense strand
agacccagucccugaggaa

SEQ ID NO: 2575686 - RNA, 19 nt, Homo sapiens
  misc_RNA (1)...(19): siRNA sense strand
gagaacuugcaaagguaga

SEQ ID NO: 2575687 - RNA, 19 nt, Homo sapiens
  misc_RNA (1)...(19): siRNA sense strand
cucaaguguuagcagcaaa

SEQ ID NO: 2575688 - RNA, 19 nt, Homo sapiens
  misc_RNA (1)...(19): siRNA sense strand
cagcaaaagagaagcaucu

SEQ ID NO: 2575689 - RNA, 19 nt, Homo sapiens
  misc_RNA (1)...(19): siRNA sense strand
gaggauaauuaaagccaga

SEQ ID NO: 2575690 - RNA, 19 nt, Homo sapiens
  misc_RNA (1)...(19): siRNA sense strand
acucuaaaauguuggcaaa

SEQ ID NO: 2575691 - RNA, 19 nt, Homo sapiens
  misc_RNA (1)...(19): siRNA sense strand
gaaauaggcuucuagcaga

SEQ ID NO: 2575692 - RNA, 19 nt, Homo sapiens
  misc_RNA (1)...(19): siRNA sense strand
aauuaaagccagagagcac

SEQ ID NO: 2575693 - RNA, 19 nt, Homo sapiens
  misc_RNA (1)...(19): siRNA sense strand
ugaaaguucuacagagcca

SEQ ID NO: 2575694 - RNA, 19 nt, Homo sapiens
  misc_RNA (1)...(19): siRNA sense strand
ggaugauugcagugagguu

SEQ ID NO: 2575695 - RNA, 19 nt, Homo sapiens
  misc_RNA (1)...(19): siRNA sense strand
uggcaaaagugaagcaagu

SEQ ID NO: 2575696 - RNA, 19 nt, Homo sapiens
  misc_RNA (1)...(19): siRNA sense strand
ugcaauugagagagcguua

SEQ ID NO: 2575697 - RNA, 19 nt, Homo sapiens
  misc_RNA (1)...(19): siRNA sense strand
gggucaugaauguccauaa

SEQ ID NO: 2575698 - RNA, 19 nt, Homo sapiens
  misc_RNA (1)...(19): siRNA sense strand
aagccagagagcacagaaa

SEQ ID NO: 2575699 - RNA, 19 nt, Homo sapiens
  misc_RNA (1)...(19): siRNA sense strand
ggauaauuaaagccagaga

SEQ ID NO: 2575700 - RNA, 19 nt, Homo sapiens
  misc_RNA (1)...(19): siRNA sense strand
gggcagaaggagcaggacu

SEQ ID NO: 2575701 - RNA, 19 nt, Homo sapiens
  misc_RNA (1)...(19): siRNA sense strand
ccgucagggauguacuaua

SEQ ID NO: 2575702 - RNA, 19 nt, Homo sapiens
  misc_RNA (1)...(19): siRNA sense strand
acucuuaaauacagcacca

SEQ ID NO: 2575703 - RNA, 19 nt, Homo sapiens
  misc_RNA (1)...(19): siRNA sense strand
cuuaaauacagcaccaaaa

SEQ ID NO: 2575704 - RNA, 19 nt, Homo sapiens
  misc_RNA (1)...(19): siRNA sense strand
cgugaaaguucuacagagc

SEQ ID NO: 2575705 - RNA, 19 nt, Homo sapiens
  misc_RNA (1)...(19): siRNA sense strand
aguugaaggaauuaaggau

SEQ ID NO: 2575706 - RNA, 19 nt, Homo sapiens
  misc_RNA (1)...(19): siRNA sense strand
ucuuaaauacagcaccaaa

SEQ ID NO: 2575707 - RNA, 19 nt, Homo sapiens
  misc_RNA (1)...(19): siRNA sense strand
gagccugcuuugagcggaa

SEQ ID NO: 2575708 - RNA, 19 nt, Homo sapiens
  misc_RNA (1)...(19): siRNA sense strand
ccaaagaagagcuggccca

SEQ ID NO: 2575709 - RNA, 19 nt, Homo sapiens
  misc_RNA (1)...(19): siRNA sense strand
uuucagaaucgaagagcca

SEQ ID NO: 2575710 - RNA, 19 nt, Homo sapiens
  misc_RNA (1)...(19): siRNA sense strand
agacgaaagcggacugcca

SEQ ID NO: 2575711 - RNA, 19 nt, Homo sapiens
  misc_RNA (1)...(19): siRNA sense strand
gguuucagaaugagagauc

SEQ ID NO: 2575712 - RNA, 19 nt, Homo sapiens
  misc_RNA (1)...(19): siRNA sense strand
ccagauuugguuucagaau

SEQ ID NO: 2575713 - RNA, 19 nt, Homo sapiens
  misc_RNA (1)...(19): siRNA sense strand
agacuagaggcgauggaaa

SEQ ID NO: 2575714 - RNA, 19 nt, Homo sapiens
  misc_RNA (1)...(19): siRNA sense strand
ccucauuuggauagaacua

SEQ ID NO: 2575715 - RNA, 19 nt, Homo sapiens
  misc_RNA (1)...(19): siRNA sense strand
aaagcaagauaauggguga

SEQ ID NO: 2575716 - RNA, 19 nt, Homo sapiens
  misc_RNA (1)...(19): siRNA sense strand
cuggaaaagaucauggaaa

SEQ ID NO: 2575717 - RNA, 19 nt, Homo sapiens
  misc_RNA (1)...(19): siRNA sense strand
acacauggcuccagcagga

SEQ ID NO: 2575718 - RNA, 19 nt, Homo sapiens
  misc_RNA (1)...(19): siRNA sense strand
caagaaagauugaaggagc

SEQ ID NO: 2575719 - RNA, 19 nt, Homo sapiens
  misc_RNA (1)...(19): siRNA sense strand
ugggugaugcagacagaaa

SEQ ID NO: 2575720 - RNA, 19 nt, Homo sapiens
  misc_RNA (1)...(19): siRNA sense strand
augcagagauugaaccaga

SEQ ID NO: 2575721 - RNA, 19 nt, Homo sapiens
  misc_RNA (1)...(19): siRNA sense strand
agauaaugggugaugcaga

SEQ ID NO: 2575722 - RNA, 19 nt, Homo sapiens
  misc_RNA (1)...(19): siRNA sense strand
aggugauuggcgaggacaa

SEQ ID NO: 2575723 - RNA, 19 nt, Homo sapiens
  misc_RNA (1)...(19): siRNA sense strand
acuagugauauccggaaua

SEQ ID NO: 2575724 - RNA, 19 nt, Homo sapiens
  misc_RNA (1)...(19): siRNA sense strand
aauucuggauauuggaaca

SEQ ID NO: 2575725 - RNA, 19 nt, Homo sapiens
  misc_RNA (1)...(19): siRNA sense strand
gauaaugggugaugcagac

SEQ ID NO: 2575726 - RNA, 19 nt, Homo sapiens
  misc_RNA (1)...(19): siRNA sense strand
aauuuaagccugaucccaa

SEQ ID NO: 2575727 - RNA, 19 nt, Homo sapiens
  misc_RNA (1)...(19): siRNA sense strand
ggaagcagccggauggauc

SEQ ID NO: 2575728 - RNA, 19 nt, Homo sapiens
  misc_RNA (1)...(19): siRNA sense strand
aggacaagaacgaguggaa

SEQ ID NO: 2575729 - RNA, 19 nt, Homo sapiens
  misc_RNA (1)...(19): siRNA sense strand
ccaaagacaacguggacga

SEQ ID NO: 2575730 - RNA, 19 nt, Homo sapiens
  misc_RNA (1)...(19): siRNA sense strand
cggauauaacugacggcaa

SEQ ID NO: 2575731 - RNA, 19 nt, Homo sapiens
  misc_RNA (1)...(19): siRNA sense strand
ggauauaacugacggcaac

SEQ ID NO: 2575732 - RNA, 19 nt, Homo sapiens
  misc_RNA (1)...(19): siRNA sense strand
cuucaaaguccacggcaca

SEQ ID NO: 2575733 - RNA, 19 nt, Homo sapiens
  misc_RNA (1)...(19): siRNA sense strand
gugaacaucucaagcggga

SEQ ID NO: 2575734 - RNA, 19 nt, Homo sapiens
  misc_RNA (1)...(19): siRNA sense strand
ggaccaagaucgagcccag

SEQ ID NO: 2575735 - RNA, 19 nt, Homo sapiens
  misc_RNA (1)...(19): siRNA sense strand
gcauugacaucacgggagu

SEQ ID NO: 2575736 - RNA, 19 nt, Homo sapiens
  misc_RNA (1)...(19): siRNA sense strand
aagauaacuuccacggcuu

SEQ ID NO: 2575737 - RNA, 19 nt, Homo sapiens
  misc_RNA (1)...(19): siRNA sense strand
agaagcggcaggagcggaa

SEQ ID NO: 2575738 - RNA, 19 nt, Homo sapiens
  misc_RNA (1)...(19): siRNA sense strand
gagccugcuuugagcggaa

SEQ ID NO: 2575739 - RNA, 19 nt, Homo sapiens
  misc_RNA (1)...(19): siRNA sense strand
ccaaagaacagcuggccca

SEQ ID NO: 2575740 - RNA, 19 nt, Homo sapiens
  misc_RNA (1)...(19): siRNA sense strand
uuucagaaucgaagagcca

SEQ ID NO: 2575741 - RNA, 19 nt, Homo sapiens
  misc_RNA (1)...(19): siRNA sense strand
agacgaaagcggacugcca

SEQ ID NO: 2575742 - RNA, 19 nt, Homo sapiens
  misc_RNA (1)...(19): siRNA sense strand
gguuucagaaugagagauc

SEQ ID NO: 2575743 - RNA, 19 nt, Homo sapiens
  misc_RNA (1)...(19): siRNA sense strand
ccagauuugguuucagaau

SEQ ID NO: 2575744 - RNA, 19 nt, Homo sapiens
  misc_RNA (1)...(19): siRNA sense strand
cuggagaaugugaagaaua

SEQ ID NO: 2575745 - RNA, 19 nt, Homo sapiens
  misc_RNA (1)...(19): siRNA sense strand
acagagaaacugaggacau

SEQ ID NO: 2575746 - RNA, 19 nt, Homo sapiens
  misc_RNA (1)...(19): siRNA sense strand
agucaaagaaagacacauu

SEQ ID NO: 2575747 - RNA, 19 nt, Homo sapiens
  misc_RNA (1)...(19): siRNA sense strand
ccgcaguggcugaugggaa

SEQ ID NO: 2575748 - RNA, 19 nt, Homo sapiens
  misc_RNA (1)...(19): siRNA sense strand
agcaaaucaugaaagguaa

SEQ ID NO: 2575749 - RNA, 19 nt, Homo sapiens
  misc_RNA (1)...(19): siRNA sense strand
gcguuuaugcagaaggaga

SEQ ID NO: 2575750 - RNA, 19 nt, Homo sapiens
  misc_RNA (1)...(19): siRNA sense strand
uacaaagaucugaggaaau

SEQ ID NO: 2575751 - RNA, 19 nt, Homo sapiens
  misc_RNA (1)...(19): siRNA sense strand
aaguggaguuugagacaca

SEQ ID NO: 2575752 - RNA, 19 nt, Homo sapiens
  misc_RNA (1)...(19): siRNA sense strand
auuacaaagaucugaggaa

SEQ ID NO: 2575753 - RNA, 19 nt, Homo sapiens
  misc_RNA (1)...(19): siRNA sense strand
cagacaaaggcaacgaauu

SEQ ID NO: 2575754 - RNA, 19 nt, Homo sapiens
  misc_RNA (1)...(19): siRNA sense strand
agucagaaacagauacaga

SEQ ID NO: 2575755 - RNA, 19 nt, Homo sapiens
  misc_RNA (1)...(19): siRNA sense strand
aaacagauacagagaccau

SEQ ID NO: 2575756 - RNA, 19 nt, Homo sapiens
  misc_RNA (1)...(19): siRNA sense strand
aggagaagccguugccaca

SEQ ID NO: 2575757 - RNA, 19 nt, Homo sapiens
  misc_RNA (1)...(19): siRNA sense strand
cguuuaugcagaaggagau

SEQ ID NO: 2575758 - RNA, 19 nt, Homo sapiens
  misc_RNA (1)...(19): siRNA sense strand
gggugaauuuugaaaccaa

SEQ ID NO: 2575759 - RNA, 19 nt, Homo sapiens
  misc_RNA (1)...(19): siRNA sense strand
gggaauaaucacgaaguca

SEQ ID NO: 2575760 - RNA, 19 nt, Homo sapiens
  misc_RNA (1)...(19): siRNA sense strand
cggaugaagaggcuggaca

SEQ ID NO: 2575761 - RNA, 19 nt, Homo sapiens
  misc_RNA (1)...(19): siRNA sense strand
aaguuugcguauaagacaa

SEQ ID NO: 2575762 - RNA, 19 nt, Homo sapiens
  misc_RNA (1)...(19): siRNA sense strand
acgaagucaaagaaagaca

SEQ ID NO: 2575763 - RNA, 19 nt, Homo sapiens
  misc_RNA (1)...(19): siRNA sense strand
auacagagaccaucgccaa

SEQ ID NO: 2575764 - RNA, 19 nt, Homo sapiens
  misc_RNA (1)...(19): siRNA sense strand
uggaaggagcccugaaaau

SEQ ID NO: 2575765 - RNA, 19 nt, Homo sapiens
  misc_RNA (1)...(19): siRNA sense strand
ucagaaacagauacagaga

SEQ ID NO: 2575766 - RNA, 19 nt, Homo sapiens
  misc_RNA (1)...(19): siRNA sense strand
cuacaaaacaggaggcaag

SEQ ID NO: 2575767 - RNA, 19 nt, Homo sapiens
  misc_RNA (1)...(19): siRNA sense strand
caacagagaaacugaggac

SEQ ID NO: 2575768 - RNA, 19 nt, Homo sapiens
  misc_RNA (1)...(19): siRNA sense strand
ggaggaacugacugagcuu

SEQ ID NO: 2575769 - RNA, 19 nt, Homo sapiens
  misc_RNA (1)...(19): siRNA sense strand
aagaauaucuguaagacac

SEQ ID NO: 2575770 - RNA, 19 nt, Homo sapiens
  misc_RNA (1)...(19): siRNA sense strand
cagauggaacugcagcaaa

SEQ ID NO: 2575771 - RNA, 19 nt, Homo sapiens
  misc_RNA (1)...(19): siRNA sense strand
gcuugaaggaccacuugaa

SEQ ID NO: 2575772 - RNA, 19 nt, Homo sapiens
  misc_RNA (1)...(19): siRNA sense strand
ugaacuugcuagugauuuu

SEQ ID NO: 2575773 - RNA, 19 nt, Homo sapiens
  misc_RNA (1)...(19): siRNA sense strand
aaucacgaagucaaagaaa

SEQ ID NO: 2575774 - RNA, 19 nt, Homo sapiens
  misc_RNA (1)...(19): siRNA sense strand
uggccagcaccaaggcuua

SEQ ID NO: 2575775 - RNA, 19 nt, Homo sapiens
  misc_RNA (1)...(19): siRNA sense strand
aaacaggaggcaagagauc

SEQ ID NO: 2575776 - RNA, 19 nt, Homo sapiens
  misc_RNA (1)...(19): siRNA sense strand
gaucuuuaccugagcugau

SEQ ID NO: 2575777 - RNA, 19 nt, Homo sapiens
  misc_RNA (1)...(19): siRNA sense strand
gagauaaccuacaugcacu

SEQ ID NO: 2575778 - RNA, 19 nt, Homo sapiens
  misc_RNA (1)...(19): siRNA sense strand
ggaaggaaaagcagagaaa

SEQ ID NO: 2575779 - RNA, 19 nt, Homo sapiens
  misc_RNA (1)...(19): siRNA sense strand
agacaagcugggagcgaaa

SEQ ID NO: 2575780 - RNA, 19 nt, Homo sapiens
  misc_RNA (1)...(19): siRNA sense strand
ugaaagaggagguggcaga

SEQ ID NO: 2575781 - RNA, 19 nt, Homo sapiens
  misc_RNA (1)...(19): siRNA sense strand
cagaggagcuggaggagga

SEQ ID NO: 2575782 - RNA, 19 nt, Homo sapiens
  misc_RNA (1)...(19): siRNA sense strand
ccuacaaagcagaagagua

SEQ ID NO: 2575783 - RNA, 19 nt, Homo sapiens
  misc_RNA (1)...(19): siRNA sense strand
agguaaaucgagagaauca

SEQ ID NO: 2575784 - RNA, 19 nt, Homo sapiens
  misc_RNA (1)...(19): siRNA sense strand
gcuuugugccugagaagaa

SEQ ID NO: 2575785 - RNA, 19 nt, Homo sapiens
  misc_RNA (1)...(19): siRNA sense strand
aagauaaggaacagaaaca

SEQ ID NO: 2575786 - RNA, 19 nt, Homo sapiens
  misc_RNA (1)...(19): siRNA sense strand
aaacauaaggagagagauc

SEQ ID NO: 2575787 - RNA, 19 nt, Homo sapiens
  misc_RNA (1)...(19): siRNA sense strand
ccagagauacacaggagaa

SEQ ID NO: 2575788 - RNA, 19 nt, Homo sapiens
  misc_RNA (1)...(19): siRNA sense strand
gcuaagggaagaaaggaau

SEQ ID NO: 2575789 - RNA, 19 nt, Homo sapiens
  misc_RNA (1)...(19): siRNA sense strand
agaucuuaaacgagguaaa

SEQ ID NO: 2575790 - RNA, 19 nt, Homo sapiens
  misc_RNA (1)...(19): siRNA sense strand
guuucgagccagaggaaga

SEQ ID NO: 2575791 - RNA, 19 nt, Homo sapiens
  misc_RNA (1)...(19): siRNA sense strand
acacaggagaauagacauu

SEQ ID NO: 2575792 - RNA, 19 nt, Homo sapiens
  misc_RNA (1)...(19): siRNA sense strand
aagaagcaucggagagcaa

SEQ ID NO: 2575793 - RNA, 19 nt, Homo sapiens
  misc_RNA (1)...(19): siRNA sense strand
cugaagagacagaggaaag

SEQ ID NO: 2575794 - RNA, 19 nt, Homo sapiens
  misc_RNA (1)...(19): siRNA sense strand
ugauauugaacgucguaaa

SEQ ID NO: 2575795 - RNA, 19 nt, Homo sapiens
  misc_RNA (1)...(19): siRNA sense strand
ggaggagaagucaggcaaa

SEQ ID NO: 2575796 - RNA, 19 nt, Homo sapiens
  misc_RNA (1)...(19): siRNA sense strand
gggaaaggucagcugaaaa

SEQ ID NO: 2575797 - RNA, 19 nt, Homo sapiens
  misc_RNA (1)...(19): siRNA sense strand
aggcuugggugauggaaaa

SEQ ID NO: 2575798 - RNA, 19 nt, Homo sapiens
  misc_RNA (1)...(19): siRNA sense strand
cagagaaccgagaagagaa

SEQ ID NO: 2575799 - RNA, 19 nt, Homo sapiens
  misc_RNA (1)...(19): siRNA sense strand
cuacaaggcugagggaaaa

SEQ ID NO: 2575800 - RNA, 19 nt, Homo sapiens
  misc_RNA (1)...(19): siRNA sense strand
aggaacagaaacaaacaaa

SEQ ID NO: 2575801 - RNA, 19 nt, Homo sapiens
  misc_RNA (1)...(19): siRNA sense strand
cagccuauacaaagaggua

SEQ ID NO: 2575802 - RNA, 19 nt, Homo sapiens
  misc_RNA (1)...(19): siRNA sense strand
agaagacagagaauggaaa

SEQ ID NO: 2575803 - RNA, 19 nt, Homo sapiens
  misc_RNA (1)...(19): siRNA sense strand
aaacagaggagcuggagga

SEQ ID NO: 2575804 - RNA, 19 nt, Homo sapiens
  misc_RNA (1)...(19): siRNA sense strand
acaauaacaacaacagcaa

SEQ ID NO: 2575805 - RNA, 19 nt, Homo sapiens
  misc_RNA (1)...(19): siRNA sense strand
cagaagacagagaauggaa

SEQ ID NO: 2575806 - RNA, 19 nt, Homo sapiens
  misc_RNA (1)...(19): siRNA sense strand
agauggaugaucaagauaa

SEQ ID NO: 2575807 - RNA, 19 nt, Homo sapiens
  misc_RNA (1)...(19): siRNA sense strand
ugaucaagauaaggacaaa

SEQ ID NO: 2575808 - RNA, 19 nt, Homo sapiens
  misc_RNA (1)...(19): siRNA sense strand
agggaaaggucagcugaaa

SEQ ID NO: 2575809 - RNA, 19 nt, Homo sapiens
  misc_RNA (1)...(19): siRNA sense strand
uggcagagcucgaggaacc

SEQ ID NO: 2575810 - RNA, 19 nt, Homo sapiens
  misc_RNA (1)...(19): siRNA sense strand
ggaacagaaacaaacaaau

SEQ ID NO: 2575811 - RNA, 19 nt, Homo sapiens
  misc_RNA (1)...(19): siRNA sense strand
caucggagagcaagagaca

SEQ ID NO: 2575812 - RNA, 19 nt, Homo sapiens
  misc_RNA (1)...(19): siRNA sense strand
ccaagugggcccaugacaa

SEQ ID NO: 2575813 - RNA, 19 nt, Homo sapiens
  misc_RNA (1)...(19): siRNA sense strand
ucaccauguuaaagagcau

SEQ ID NO: 2575814 - RNA, 19 nt, Homo sapiens
  misc_RNA (1)...(19): siRNA sense strand
cuaaauaccuaaagagagg

SEQ ID NO: 2575815 - RNA, 19 nt, Homo sapiens
  misc_RNA (1)...(19): siRNA sense strand
ggaucaaagaaacagaaga

SEQ ID NO: 2575816 - RNA, 19 nt, Homo sapiens
  misc_RNA (1)...(19): siRNA sense strand
aaaagagcccuguggguaa

SEQ ID NO: 2575817 - RNA, 19 nt, Homo sapiens
  misc_RNA (1)...(19): siRNA sense strand
aggaaagagaggagagcac

SEQ ID NO: 2575818 - RNA, 19 nt, Homo sapiens
  misc_RNA (1)...(19): siRNA sense strand
gcaacuacucugggaacaa

SEQ ID NO: 2575819 - RNA, 19 nt, Homo sapiens
  misc_RNA (1)...(19): siRNA sense strand
acauaaggagagagaucuu

SEQ ID NO: 2575820 - RNA, 19 nt, Homo sapiens
  misc_RNA (1)...(19): siRNA sense strand
agaaaccacccaagaguau

SEQ ID NO: 2575821 - RNA, 19 nt, Homo sapiens
  misc_RNA (1)...(19): siRNA sense strand
aggacaaagcuaagggaag

SEQ ID NO: 2575822 - RNA, 19 nt, Homo sapiens
  misc_RNA (1)...(19): siRNA sense strand
agcuaagggaagaaaggaa

SEQ ID NO: 2575823 - RNA, 19 nt, Homo sapiens
  misc_RNA (1)...(19): siRNA sense strand
ccaagaaagaccucugaga

SEQ ID NO: 2575824 - RNA, 19 nt, Homo sapiens
  misc_RNA (1)...(19): siRNA sense strand
agaaaagcccagagauaca

SEQ ID NO: 2575825 - RNA, 19 nt, Homo sapiens
  misc_RNA (1)...(19): siRNA sense strand
gggaaaauacaaagaugau

SEQ ID NO: 2575826 - RNA, 19 nt, Homo sapiens
  misc_RNA (1)...(19): siRNA sense strand
cucauaacagagaaagaaa

SEQ ID NO: 2575827 - RNA, 19 nt, Homo sapiens
  misc_RNA (1)...(19): siRNA sense strand
cagaauuaccggcaagcau

SEQ ID NO: 2575828 - RNA, 19 nt, Homo sapiens
  misc_RNA (1)...(19): siRNA sense strand
gaagacagagaauggaaaa

SEQ ID NO: 2575829 - RNA, 19 nt, Homo sapiens
  misc_RNA (1)...(19): siRNA sense strand
accgagaagagaaggacaa

SEQ ID NO: 2575830 - RNA, 19 nt, Homo sapiens
  misc_RNA (1)...(19): siRNA sense strand
ccucagaacuguuugccca

SEQ ID NO: 2575831 - RNA, 19 nt, Homo sapiens
  misc_RNA (1)...(19): siRNA sense strand
uccagucacucaagggaaa

SEQ ID NO: 2575832 - RNA, 19 nt, Homo sapiens
  misc_RNA (1)...(19): siRNA sense strand
cgagaagagaaggacaaua

SEQ ID NO: 2575833 - RNA, 19 nt, Homo sapiens
  misc_RNA (1)...(19): siRNA sense strand
ccagcucauaacagagaaa

SEQ ID NO: 2575834 - RNA, 19 nt, Homo sapiens
  misc_RNA (1)...(19): siRNA sense strand
cccaagaguauaucagaau

SEQ ID NO: 2575835 - RNA, 19 nt, Homo sapiens
  misc_RNA (1)...(19): siRNA sense strand
ucugagagcucgaagccau

SEQ ID NO: 2575836 - RNA, 19 nt, Homo sapiens
  misc_RNA (1)...(19): siRNA sense strand
cggcacugguucugcauca

SEQ ID NO: 2575837 - RNA, 19 nt, Homo sapiens
  misc_RNA (1)...(19): siRNA sense strand
gguaucuagaagagcagaa

SEQ ID NO: 2575838 - RNA, 19 nt, Homo sapiens
  misc_RNA (1)...(19): siRNA sense strand
gagacaagcugggagcgaa

SEQ ID NO: 2575839 - RNA, 19 nt, Homo sapiens
  misc_RNA (1)...(19): siRNA sense strand
ggacaaacagacagagcua

SEQ ID NO: 2575840 - RNA, 19 nt, Homo sapiens
  misc_RNA (1)...(19): siRNA sense strand
aagaaaugcuggacaacaa

SEQ ID NO: 2575841 - RNA, 19 nt, Homo sapiens
  misc_RNA (1)...(19): siRNA sense strand
gcacagaucuauauggaga

SEQ ID NO: 2575842 - RNA, 19 nt, Homo sapiens
  misc_RNA (1)...(19): siRNA sense strand
cagaagaagaagauggaau

SEQ ID NO: 2575843 - RNA, 19 nt, Homo sapiens
  misc_RNA (1)...(19): siRNA sense strand
caguaaacuuggaagaaga

SEQ ID NO: 2575844 - RNA, 19 nt, Homo sapiens
  misc_RNA (1)...(19): siRNA sense strand
augaauuagugcagcaaua

SEQ ID NO: 2575845 - RNA, 19 nt, Homo sapiens
  misc_RNA (1)...(19): siRNA sense strand
guguagaaugugugguaua

SEQ ID NO: 2575846 - RNA, 19 nt, Homo sapiens
  misc_RNA (1)...(19): siRNA sense strand
agaagagaauuguggauau

SEQ ID NO: 2575847 - RNA, 19 nt, Homo sapiens
  misc_RNA (1)...(19): siRNA sense strand
ugaugaagcacuugugaaa

SEQ ID NO: 2575848 - RNA, 19 nt, Homo sapiens
  misc_RNA (1)...(19): siRNA sense strand
aagcaugaagauagagaaa

SEQ ID NO: 2575849 - RNA, 19 nt, Homo sapiens
  misc_RNA (1)...(19): siRNA sense strand
ccuuagaaguccugauaga

SEQ ID NO: 2575850 - RNA, 19 nt, Homo sapiens
  misc_RNA (1)...(19): siRNA sense strand
aaagaaacgaugugaguau

SEQ ID NO: 2575851 - RNA, 19 nt, Homo sapiens
  misc_RNA (1)...(19): siRNA sense strand
aggagaaacauuuggagaa

SEQ ID NO: 2575852 - RNA, 19 nt, Homo sapiens
  misc_RNA (1)...(19): siRNA sense strand
gggaaaauacccagaaaau

SEQ ID NO: 2575853 - RNA, 19 nt, Homo sapiens
  misc_RNA (1)...(19): siRNA sense strand
aguuaauggugcaauguaa

SEQ ID NO: 2575854 - RNA, 19 nt, Homo sapiens
  misc_RNA (1)...(19): siRNA sense strand
ccuuauugggagagacuua

SEQ ID NO: 2575855 - RNA, 19 nt, Homo sapiens
  misc_RNA (1)...(19): siRNA sense strand
gcacagaacaagaagaagu

SEQ ID NO: 2575856 - RNA, 19 nt, Homo sapiens
  misc_RNA (1)...(19): siRNA sense strand
gucaagaaaugcuggacaa

SEQ ID NO: 2575857 - RNA, 19 nt, Homo sapiens
  misc_RNA (1)...(19): siRNA sense strand
ggacuaaaggaaucugaaa

SEQ ID NO: 2575858 - RNA, 19 nt, Homo sapiens
  misc_RNA (1)...(19): siRNA sense strand
gaagauggaaugugggaga

SEQ ID NO: 2575859 - RNA, 19 nt, Homo sapiens
  misc_RNA (1)...(19): siRNA sense strand
acauguuaauggaggacua

SEQ ID NO: 2575860 - RNA, 19 nt, Homo sapiens
  misc_RNA (1)...(19): siRNA sense strand
cuacaagaucagugcacua

SEQ ID NO: 2575861 - RNA, 19 nt, Homo sapiens
  misc_RNA (1)...(19): siRNA sense strand
ggaaauuaaccaacaucaa

SEQ ID NO: 2575862 - RNA, 19 nt, Homo sapiens
  misc_RNA (1)...(19): siRNA sense strand
gagugaagagccacagaaa

SEQ ID NO: 2575863 - RNA, 19 nt, Homo sapiens
  misc_RNA (1)...(19): siRNA sense strand
gcuuaggacuuguacaaau

SEQ ID NO: 2575864 - RNA, 19 nt, Homo sapiens
  misc_RNA (1)...(19): siRNA sense strand
uggaagaagaugaagccaa

SEQ ID NO: 2575865 - RNA, 19 nt, Homo sapiens
  misc_RNA (1)...(19): siRNA sense strand
gaugacaaauacuggaaau

SEQ ID NO: 2575866 - RNA, 19 nt, Homo sapiens
  misc_RNA (1)...(19): siRNA sense strand
gagcagauggaauggguau

SEQ ID NO: 2575867 - RNA, 19 nt, Homo sapiens
  misc_RNA (1)...(19): siRNA sense strand
uggcuuugguccagguuua

SEQ ID NO: 2575868 - RNA, 19 nt, Homo sapiens
  misc_RNA (1)...(19): siRNA sense strand
aaggauuggucauggagaa

SEQ ID NO: 2575869 - RNA, 19 nt, Homo sapiens
  misc_RNA (1)...(19): siRNA sense strand
gcacaagaccaaugagaag

SEQ ID NO: 2575870 - RNA, 19 nt, Homo sapiens
  misc_RNA (1)...(19): siRNA sense strand
uugaaggagaugaggaauu

SEQ ID NO: 2575871 - RNA, 19 nt, Homo sapiens
  misc_RNA (1)...(19): siRNA sense strand
gaguuggacuguuggaaaa

SEQ ID NO: 2575872 - RNA, 19 nt, Homo sapiens
  misc_RNA (1)...(19): siRNA sense strand
cuacagaaacuuugggagu

SEQ ID NO: 2575873 - RNA, 19 nt, Homo sapiens
  misc_RNA (1)...(19): siRNA sense strand
ugaacagagcacagaacaa

SEQ ID NO: 2575874 - RNA, 19 nt, Homo sapiens
  misc_RNA (1)...(19): siRNA sense strand
cuugaauaguggaguauca

SEQ ID NO: 2575875 - RNA, 19 nt, Homo sapiens
  misc_RNA (1)...(19): siRNA sense strand
gugcuuaggacuuguacaa

SEQ ID NO: 2575876 - RNA, 19 nt, Homo sapiens
  misc_RNA (1)...(19): siRNA sense strand
uguugaaggagaugaggaa

SEQ ID NO: 2575877 - RNA, 19 nt, Homo sapiens
  misc_RNA (1)...(19): siRNA sense strand
agaucaaagaccuggaaga

SEQ ID NO: 2575878 - RNA, 19 nt, Homo sapiens
  misc_RNA (1)...(19): siRNA sense strand
cagcaguaaacuuggaaga

SEQ ID NO: 2575879 - RNA, 19 nt, Homo sapiens
  misc_RNA (1)...(19): siRNA sense strand
ggaaucaaagacaggaaau

SEQ ID NO: 2575880 - RNA, 19 nt, Homo sapiens
  misc_RNA (1)...(19): siRNA sense strand
cagaaaaguugguagcaga

SEQ ID NO: 2575881 - RNA, 19 nt, Homo sapiens
  misc_RNA (1)...(19): siRNA sense strand
agaucuauauggagaacuu

SEQ ID NO: 2575882 - RNA, 19 nt, Homo sapiens
  misc_RNA (1)...(19): siRNA sense strand
cagaacaagaagaaguauu

SEQ ID NO: 2575883 - RNA, 19 nt, Homo sapiens
  misc_RNA (1)...(19): siRNA sense strand
agaaaagagugaagagcca

SEQ ID NO: 2575884 - RNA, 19 nt, Homo sapiens
  misc_RNA (1)...(19): siRNA sense strand
uaacaugucaggaggaaaa

SEQ ID NO: 2575885 - RNA, 19 nt, Homo sapiens
  misc_RNA (1)...(19): siRNA sense strand
cugauagaccagaguguau

SEQ ID NO: 2575886 - RNA, 19 nt, Homo sapiens
  misc_RNA (1)...(19): siRNA sense strand
ccacgugccuucagugcaa

SEQ ID NO: 2575887 - RNA, 19 nt, Homo sapiens
  misc_RNA (1)...(19): siRNA sense strand
aagauaggauagacaguuu

SEQ ID NO: 2575888 - RNA, 19 nt, Homo sapiens
  misc_RNA (1)...(19): siRNA sense strand
cuuguuaaauggagcaaaa

SEQ ID NO: 2575889 - RNA, 19 nt, Homo sapiens
  misc_RNA (1)...(19): siRNA sense strand
acucaagcuuuaugcacaa

SEQ ID NO: 2575890 - RNA, 19 nt, Homo sapiens
  misc_RNA (1)...(19): siRNA sense strand
cauggagaauugaaagauu

SEQ ID NO: 2575891 - RNA, 19 nt, Homo sapiens
  misc_RNA (1)...(19): siRNA sense strand
uuacaaguucccaaagaaa

SEQ ID NO: 2575892 - RNA, 19 nt, Homo sapiens
  misc_RNA (1)...(19): siRNA sense strand
augcagaacaagaaccuaa

SEQ ID NO: 2575893 - RNA, 19 nt, Homo sapiens
  misc_RNA (1)...(19): siRNA sense strand
acuaacaccuggaucuaaa

SEQ ID NO: 2575894 - RNA, 19 nt, Homo sapiens
  misc_RNA (1)...(19): siRNA sense strand
augcagugcucacaggaua

SEQ ID NO: 2575895 - RNA, 19 nt, Homo sapiens
  misc_RNA (1)...(19): siRNA sense strand
ccuuauucaccaugacuua

SEQ ID NO: 2575896 - RNA, 19 nt, Homo sapiens
  misc_RNA (1)...(19): siRNA sense strand
cuguauaccuucucaguga

SEQ ID NO: 2575897 - RNA, 19 nt, Homo sapiens
  misc_RNA (1)...(19): siRNA sense strand
cagacagucaagugagauu

SEQ ID NO: 2575898 - RNA, 19 nt, Homo sapiens
  misc_RNA (1)...(19): siRNA sense strand
gugagagagaagcuggaaa

SEQ ID NO: 2575899 - RNA, 19 nt, Homo sapiens
  misc_RNA (1)...(19): siRNA sense strand
ugagagagaagcuggaaaa

SEQ ID NO: 2575900 - RNA, 19 nt, Homo sapiens
  misc_RNA (1)...(19): siRNA sense strand
gcauaucacccuugcucaa

SEQ ID NO: 2575901 - RNA, 19 nt, Homo sapiens
  misc_RNA (1)...(19): siRNA sense strand
ucauguugcuugaaggaga

SEQ ID NO: 2575902 - RNA, 19 nt, Homo sapiens
  misc_RNA (1)...(19): siRNA sense strand
augcauuuguugaaggaga

SEQ ID NO: 2575903 - RNA, 19 nt, Homo sapiens
  misc_RNA (1)...(19): siRNA sense strand
aguaaaaggcucaaagaca

SEQ ID NO: 2575904 - RNA, 19 nt, Homo sapiens
  misc_RNA (1)...(19): siRNA sense strand
guaaaaggcucaaagacau

SEQ ID NO: 2575905 - RNA, 19 nt, Homo sapiens
  misc_RNA (1)...(19): siRNA sense strand
agaccuggaagaagagaau

SEQ ID NO: 2575906 - RNA, 19 nt, Homo sapiens
  misc_RNA (1)...(19): siRNA sense strand
ccugcuaugucuucgguua

SEQ ID NO: 2575907 - RNA, 19 nt, Homo sapiens
  misc_RNA (1)...(19): siRNA sense strand
caagaaugcaauaugaaca

SEQ ID NO: 2575908 - RNA, 19 nt, Homo sapiens
  misc_RNA (1)...(19): siRNA sense strand
ccaaugagaagcaagaaaa

SEQ ID NO: 2575909 - RNA, 19 nt, Homo sapiens
  misc_RNA (1)...(19): siRNA sense strand
ccauggaacacuacgaaaa

SEQ ID NO: 2575910 - RNA, 19 nt, Homo sapiens
  misc_RNA (1)...(19): siRNA sense strand
agggagcagcuguggaaau

SEQ ID NO: 2575911 - RNA, 19 nt, Homo sapiens
  misc_RNA (1)...(19): siRNA sense strand
uuaaugaggccuacgggua

SEQ ID NO: 2575912 - RNA, 19 nt, Homo sapiens
  misc_RNA (1)...(19): siRNA sense strand
ggagcauuaaugaggccua

SEQ ID NO: 2575913 - RNA, 19 nt, Homo sapiens
  misc_RNA (1)...(19): siRNA sense strand
aggagaacagucagcaaaa

SEQ ID NO: 2575914 - RNA, 19 nt, Homo sapiens
  misc_RNA (1)...(19): siRNA sense strand
cccagagagaugagauuga

SEQ ID NO: 2575915 - RNA, 19 nt, Homo sapiens
  misc_RNA (1)...(19): siRNA sense strand
cauaaaggauagagaggca

SEQ ID NO: 2575916 - RNA, 19 nt, Homo sapiens
  misc_RNA (1)...(19): siRNA sense strand
acaaagucaugcagggaga

SEQ ID NO: 2575917 - RNA, 19 nt, Homo sapiens
  misc_RNA (1)...(19): siRNA sense strand
agaagaauucagugcagaa

SEQ ID NO: 2575918 - RNA, 19 nt, Homo sapiens
  misc_RNA (1)...(19): siRNA sense strand
cgacaagugaccucgacaa

SEQ ID NO: 2575919 - RNA, 19 nt, Homo sapiens
  misc_RNA (1)...(19): siRNA sense strand
uggaagaaagaauucgaaa

SEQ ID NO: 2575920 - RNA, 19 nt, Homo sapiens
  misc_RNA (1)...(19): siRNA sense strand
auagagaggcaguagagaa

SEQ ID NO: 2575921 - RNA, 19 nt, Homo sapiens
  misc_RNA (1)...(19): siRNA sense strand
ggagaguaaacgaccacaa

SEQ ID NO: 2575922 - RNA, 19 nt, Homo sapiens
  misc_RNA (1)...(19): siRNA sense strand
cauauaacaaacagaggau

SEQ ID NO: 2575923 - RNA, 19 nt, Homo sapiens
  misc_RNA (1)...(19): siRNA sense strand
aaugcaaagagaugggaau

SEQ ID NO: 2575924 - RNA, 19 nt, Homo sapiens
  misc_RNA (1)...(19): siRNA sense strand
gcugaaagggucugcgguu

SEQ ID NO: 2575925 - RNA, 19 nt, Homo sapiens
  misc_RNA (1)...(19): siRNA sense strand
aggagaagcauuaccaaaa

SEQ ID NO: 2575926 - RNA, 19 nt, Homo sapiens
  misc_RNA (1)...(19): siRNA sense strand
ccgugaaugaagacaguga

SEQ ID NO: 2575927 - RNA, 19 nt, Homo sapiens
  misc_RNA (1)...(19): siRNA sense strand
cggaaauggcaaccaauca

SEQ ID NO: 2575928 - RNA, 19 nt, Homo sapiens
  misc_RNA (1)...(19): siRNA sense strand
auauaugaacucaggcgua

SEQ ID NO: 2575929 - RNA, 19 nt, Homo sapiens
  misc_RNA (1)...(19): siRNA sense strand
gugucaagagugucgacua

SEQ ID NO: 2575930 - RNA, 19 nt, Homo sapiens
  misc_RNA (1)...(19): siRNA sense strand
gugguaucucugaugaaua

SEQ ID NO: 2575931 - RNA, 19 nt, Homo sapiens
  misc_RNA (1)...(19): siRNA sense strand
ggcaacugugugauggaua

SEQ ID NO: 2575932 - RNA, 19 nt, Homo sapiens
  misc_RNA (1)...(19): siRNA sense strand
agagugucgacuaaggaaa

SEQ ID NO: 2575933 - RNA, 19 nt, Homo sapiens
  misc_RNA (1)...(19): siRNA sense strand
accuauuggaagaaagaau

SEQ ID NO: 2575934 - RNA, 19 nt, Homo sapiens
  misc_RNA (1)...(19): siRNA sense strand
gcguaugccagcugagacu

SEQ ID NO: 2575935 - RNA, 19 nt, Homo sapiens
  misc_RNA (1)...(19): siRNA sense strand
ucgacuaaggaaaugcaaa

SEQ ID NO: 2575936 - RNA, 19 nt, Homo sapiens
  misc_RNA (1)...(19): siRNA sense strand
uguuguuuguggagacaga

SEQ ID NO: 2575937 - RNA, 19 nt, Homo sapiens
  misc_RNA (1)...(19): siRNA sense strand
gaaaaugacucaagaggag

SEQ ID NO: 2575938 - RNA, 19 nt, Homo sapiens
  misc_RNA (1)...(19): siRNA sense strand
aaggaaaugcaaagagaug

SEQ ID NO: 2575939 - RNA, 19 nt, Homo sapiens
  misc_RNA (1)...(19): siRNA sense strand
agaugggaauguuggcuga

SEQ ID NO: 2575940 - RNA, 19 nt, Homo sapiens
  misc_RNA (1)...(19): siRNA sense strand
ugaccuauuggaagaaaga

SEQ ID NO: 2575941 - RNA, 19 nt, Homo sapiens
  misc_RNA (1)...(19): siRNA sense strand
accuggaaguggaaccaua

SEQ ID NO: 2575942 - RNA, 19 nt, Homo sapiens
  misc_RNA (1)...(19): siRNA sense strand
gcugagaugcugaugucau

SEQ ID NO: 2575943 - RNA, 19 nt, Homo sapiens
  misc_RNA (1)...(19): siRNA sense strand
gggccgaaguggagaagga

SEQ ID NO: 2575944 - RNA, 19 nt, Homo sapiens
  misc_RNA (1)...(19): siRNA sense strand
gaaagaaagcccagcguca

SEQ ID NO: 2575945 - RNA, 19 nt, Homo sapiens
  misc_RNA (1)...(19): siRNA sense strand
gcucagacauaaaaggaaa

SEQ ID NO: 2575946 - RNA, 19 nt, Homo sapiens
  misc_RNA (1)...(19): siRNA sense strand
cgucaggagaagaaagcaa

SEQ ID NO: 2575947 - RNA, 19 nt, Homo sapiens
  misc_RNA (1)...(19): siRNA sense strand
cuaaagcagcagcgggaaa

SEQ ID NO: 2575948 - RNA, 19 nt, Homo sapiens
  misc_RNA (1)...(19): siRNA sense strand
gcaggaaaucacucagaaa

SEQ ID NO: 2575949 - RNA, 19 nt, Homo sapiens
  misc_RNA (1)...(19): siRNA sense strand
ucucagaguuggacagaca

SEQ ID NO: 2575950 - RNA, 19 nt, Homo sapiens
  misc_RNA (1)...(19): siRNA sense strand
ggucaaaagugucgagguu

SEQ ID NO: 2575951 - RNA, 19 nt, Homo sapiens
  misc_RNA (1)...(19): siRNA sense strand
ugucggauguagaggagaa

SEQ ID NO: 2575952 - RNA, 19 nt, Homo sapiens
  misc_RNA (1)...(19): siRNA sense strand
cauuuaagacccagagaca

SEQ ID NO: 2575953 - RNA, 19 nt, Homo sapiens
  misc_RNA (1)...(19): siRNA sense strand
ggugcaaaguucaggaguu

SEQ ID NO: 2575954 - RNA, 19 nt, Homo sapiens
  misc_RNA (1)...(19): siRNA sense strand
ucagaaaggaggagacuca

SEQ ID NO: 2575955 - RNA, 19 nt, Homo sapiens
  misc_RNA (1)...(19): siRNA sense strand
cguuacagcgugaggaaca

SEQ ID NO: 2575956 - RNA, 19 nt, Homo sapiens
  misc_RNA (1)...(19): siRNA sense strand
ggugaaaacggcaaaauaa

SEQ ID NO: 2575957 - RNA, 19 nt, Homo sapiens
  misc_RNA (1)...(19): siRNA sense strand
gaacaaggcuggaagcucu

SEQ ID NO: 2575958 - RNA, 19 nt, Homo sapiens
  misc_RNA (1)...(19): siRNA sense strand
uggaagaaugcaucgaaua

SEQ ID NO: 2575959 - RNA, 19 nt, Homo sapiens
  misc_RNA (1)...(19): siRNA sense strand
gggaagagggacagggaug

SEQ ID NO: 2575960 - RNA, 19 nt, Homo sapiens
  misc_RNA (1)...(19): siRNA sense strand
gauccaaggcagucgagua

SEQ ID NO: 2575961 - RNA, 19 nt, Homo sapiens
  misc_RNA (1)...(19): siRNA sense strand
ugucaggauucuagaacuu

SEQ ID NO: 2575962 - RNA, 19 nt, Homo sapiens
  misc_RNA (1)...(19): siRNA sense strand
gauacaagcuccugccaca

SEQ ID NO: 2575963 - RNA, 19 nt, Homo sapiens
  misc_RNA (1)...(19): siRNA sense strand
cggauguagaggagaauca

SEQ ID NO: 2575964 - RNA, 19 nt, Homo sapiens
  misc_RNA (1)...(19): siRNA sense strand
uggugaaggagguggugaa

SEQ ID NO: 2575965 - RNA, 19 nt, Homo sapiens
  misc_RNA (1)...(19): siRNA sense strand
ccaacaaaguaaacagaac

SEQ ID NO: 2575966 - RNA, 19 nt, Homo sapiens
  misc_RNA (1)...(19): siRNA sense strand
cucaaauguucuugugcaa

SEQ ID NO: 2575967 - RNA, 19 nt, Homo sapiens
  misc_RNA (1)...(19): siRNA sense strand
aagacaagaugaaacgcua

SEQ ID NO: 2575968 - RNA, 19 nt, Homo sapiens
  misc_RNA (1)...(19): siRNA sense strand
acggaaagcuccagaccca

SEQ ID NO: 2575969 - RNA, 19 nt, Homo sapiens
  misc_RNA (1)...(19): siRNA sense strand
aguggaaauucgcugauaa

SEQ ID NO: 2575970 - RNA, 19 nt, Homo sapiens
  misc_RNA (1)...(19): siRNA sense strand
caaucaaggaaaacagaaa

SEQ ID NO: 2575971 - RNA, 19 nt, Homo sapiens
  misc_RNA (1)...(19): siRNA sense strand
acgguaaauuugcugauaa

SEQ ID NO: 2575972 - RNA, 19 nt, Homo sapiens
  misc_RNA (1)...(19): siRNA sense strand
agauauugcaucagaaguu

SEQ ID NO: 2575973 - RNA, 19 nt, Homo sapiens
  misc_RNA (1)...(19): siRNA sense strand
ggccagaguuucuacggaa

SEQ ID NO: 2575974 - RNA, 19 nt, Homo sapiens
  misc_RNA (1)...(19): siRNA sense strand
ggagcaaaccagcuggcua

SEQ ID NO: 2575975 - RNA, 19 nt, Homo sapiens
  misc_RNA (1)...(19): siRNA sense strand
gaucugacaucgugcgcau

SEQ ID NO: 2575976 - RNA, 19 nt, Homo sapiens
  misc_RNA (1)...(19): siRNA sense strand
cgguaaauuugcugauaac

SEQ ID NO: 2575977 - RNA, 19 nt, Homo sapiens
  misc_RNA (1)...(19): siRNA sense strand
gaucuuaaacuuagcuaca

SEQ ID NO: 2575978 - RNA, 19 nt, Homo sapiens
  misc_RNA (1)...(19): siRNA sense strand
gggacgacguuuggaagaa

SEQ ID NO: 2575979 - RNA, 19 nt, Homo sapiens
  misc_RNA (1)...(19): siRNA sense strand
caguggagaacuugaucaa

SEQ ID NO: 2575980 - RNA, 19 nt, Homo sapiens
  misc_RNA (1)...(19): siRNA sense strand
gauaagugcaaucaaggaa

SEQ ID NO: 2575981 - RNA, 19 nt, Homo sapiens
  misc_RNA (1)...(19): siRNA sense strand
gauuauaugacaagguguu

SEQ ID NO: 2575982 - RNA, 19 nt, Homo sapiens
  misc_RNA (1)...(19): siRNA sense strand
agaaaggaggagacucaaa

SEQ ID NO: 2575983 - RNA, 19 nt, Homo sapiens
  misc_RNA (1)...(19): siRNA sense strand
gcggcaguguggagcagaa

SEQ ID NO: 2575984 - RNA, 19 nt, Homo sapiens
  misc_RNA (1)...(19): siRNA sense strand
aguguggagcagaaagaaa

SEQ ID NO: 2575985 - RNA, 19 nt, Homo sapiens
  misc_RNA (1)...(19): siRNA sense strand
cgucacaguaagaugaaga

SEQ ID NO: 2575986 - RNA, 19 nt, Homo sapiens
  misc_RNA (1)...(19): siRNA sense strand
caaauuuauaggugggcau

SEQ ID NO: 2575987 - RNA, 19 nt, Homo sapiens
  misc_RNA (1)...(19): siRNA sense strand
gcugaaugacuuuguaaca

SEQ ID NO: 2575988 - RNA, 19 nt, Homo sapiens
  misc_RNA (1)...(19): siRNA sense strand
gaccagugaagcagcguua

SEQ ID NO: 2575989 - RNA, 19 nt, Homo sapiens
  misc_RNA (1)...(19): siRNA sense strand
ugguuuaacaggaagaaaa

SEQ ID NO: 2575990 - RNA, 19 nt, Homo sapiens
  misc_RNA (1)...(19): siRNA sense strand
cagaaagccaugcuguuaa

SEQ ID NO: 2575991 - RNA, 19 nt, Homo sapiens
  misc_RNA (1)...(19): siRNA sense strand
guucacagcacgagggucu

SEQ ID NO: 2575992 - RNA, 19 nt, Homo sapiens
  misc_RNA (1)...(19): siRNA sense strand
cgaagugaugagaaggaga

SEQ ID NO: 2575993 - RNA, 19 nt, Homo sapiens
  misc_RNA (1)...(19): siRNA sense strand
uggcugagauauugcauca

SEQ ID NO: 2575994 - RNA, 19 nt, Homo sapiens
  misc_RNA (1)...(19): siRNA sense strand
acauggaggccuuaaguuu

SEQ ID NO: 2575995 - RNA, 19 nt, Homo sapiens
  misc_RNA (1)...(19): siRNA sense strand
uguugggaguauugaaaga

SEQ ID NO: 2575996 - RNA, 19 nt, Homo sapiens
  misc_RNA (1)...(19): siRNA sense strand
ucuuuugacucaugagaaa

SEQ ID NO: 2575997 - RNA, 19 nt, Homo sapiens
  misc_RNA (1)...(19): siRNA sense strand
aggaaauaccguugugcca

SEQ ID NO: 2575998 - RNA, 19 nt, Homo sapiens
  misc_RNA (1)...(19): siRNA sense strand
ccugcagggaagagggaca

SEQ ID NO: 2575999 - RNA, 19 nt, Homo sapiens
  misc_RNA (1)...(19): siRNA sense strand
gcgaggaagagcugcccua

SEQ ID NO: 2576000 - RNA, 19 nt, Homo sapiens
  misc_RNA (1)...(19): siRNA sense strand
gcaguguggagcagaaaga

SEQ ID NO: 2576001 - RNA, 19 nt, Homo sapiens
  misc_RNA (1)...(19): siRNA sense strand
gaggagaaucaccaagaau

SEQ ID NO: 2576002 - RNA, 19 nt, Homo sapiens
  misc_RNA (1)...(19): siRNA sense strand
aaagauuagcucaguguuu

SEQ ID NO: 2576003 - RNA, 19 nt, Homo sapiens
  misc_RNA (1)...(19): siRNA sense strand
gcuaagaauaucuccucaa

SEQ ID NO: 2576004 - RNA, 19 nt, Homo sapiens
  misc_RNA (1)...(19): siRNA sense strand
gggagauaccccagaguga

SEQ ID NO: 2576005 - RNA, 19 nt, Homo sapiens
  misc_RNA (1)...(19): siRNA sense strand
aggaauucaucgaggcugu

SEQ ID NO: 2576006 - RNA, 19 nt, Homo sapiens
  misc_RNA (1)...(19): siRNA sense strand
caccaaaaccauaagacaa

SEQ ID NO: 2576007 - RNA, 19 nt, Homo sapiens
  misc_RNA (1)...(19): siRNA sense strand
cagccuugcaagagaacuu

SEQ ID NO: 2576008 - RNA, 19 nt, Homo sapiens
  misc_RNA (1)...(19): siRNA sense strand
auuuauaggugggcauuua

SEQ ID NO: 2576009 - RNA, 19 nt, Homo sapiens
  misc_RNA (1)...(19): siRNA sense strand
auccaaggcagucgaguaa

SEQ ID NO: 2576010 - RNA, 19 nt, Homo sapiens
  misc_RNA (1)...(19): siRNA sense strand
ggaaacaaguugcccggaa

SEQ ID NO: 2576011 - RNA, 19 nt, Homo sapiens
  misc_RNA (1)...(19): siRNA sense strand
auggcaaaccagaggaaga

SEQ ID NO: 2576012 - RNA, 19 nt, Homo sapiens
  misc_RNA (1)...(19): siRNA sense strand
cugagcaggaggagggcau

SEQ ID NO: 2576013 - RNA, 19 nt, Homo sapiens
  misc_RNA (1)...(19): siRNA sense strand
ucaccaaagaccaagccaa

SEQ ID NO: 2576014 - RNA, 19 nt, Homo sapiens
  misc_RNA (1)...(19): siRNA sense strand
uuccaagacagcugugaaa

SEQ ID NO: 2576015 - RNA, 19 nt, Homo sapiens
  misc_RNA (1)...(19): siRNA sense strand
acaaagcccaggaaggaga

SEQ ID NO: 2576016 - RNA, 19 nt, Homo sapiens
  misc_RNA (1)...(19): siRNA sense strand
cuucuaugcugcugggaaa

SEQ ID NO: 2576017 - RNA, 19 nt, Homo sapiens
  misc_RNA (1)...(19): siRNA sense strand
cugaaaauauggcggaaaa

SEQ ID NO: 2576018 - RNA, 19 nt, Homo sapiens
  misc_RNA (1)...(19): siRNA sense strand
aggaugaagaugaggaaga

SEQ ID NO: 2576019 - RNA, 19 nt, Homo sapiens
  misc_RNA (1)...(19): siRNA sense strand
augaagaugaggaagauaa

SEQ ID NO: 2576020 - RNA, 19 nt, Homo sapiens
  misc_RNA (1)...(19): siRNA sense strand
caacaagcugggugaacaa

SEQ ID NO: 2576021 - RNA, 19 nt, Homo sapiens
  misc_RNA (1)...(19): siRNA sense strand
ggauguagaagaaggcgaa

SEQ ID NO: 2576022 - RNA, 19 nt, Homo sapiens
  misc_RNA (1)...(19): siRNA sense strand
aggagaacaaauagaggua

SEQ ID NO: 2576023 - RNA, 19 nt, Homo sapiens
  misc_RNA (1)...(19): siRNA sense strand
gaaaacaggaggagaacau

SEQ ID NO: 2576024 - RNA, 19 nt, Homo sapiens
  misc_RNA (1)...(19): siRNA sense strand
gggaaaggacccaccaaaa

SEQ ID NO: 2576025 - RNA, 19 nt, Homo sapiens
  misc_RNA (1)...(19): siRNA sense strand
ggcaagaucaagagggagu

SEQ ID NO: 2576026 - RNA, 19 nt, Homo sapiens
  misc_RNA (1)...(19): siRNA sense strand
aagauagagaagaaggaau

SEQ ID NO: 2576027 - RNA, 19 nt, Homo sapiens
  misc_RNA (1)...(19): siRNA sense strand
gcuacuuggaaaucaaaua

SEQ ID NO: 2576028 - RNA, 19 nt, Homo sapiens
  misc_RNA (1)...(19): siRNA sense strand
auaccaaaccuacgagaau

SEQ ID NO: 2576029 - RNA, 19 nt, Homo sapiens
  misc_RNA (1)...(19): siRNA sense strand
uguuuuaacugaugagcaa

SEQ ID NO: 2576030 - RNA, 19 nt, Homo sapiens
  misc_RNA (1)...(19): siRNA sense strand
acugaauaagucuggauua

SEQ ID NO: 2576031 - RNA, 19 nt, Homo sapiens
  misc_RNA (1)...(19): siRNA sense strand
auugaaaacaggaggagaa

SEQ ID NO: 2576032 - RNA, 19 nt, Homo sapiens
  misc_RNA (1)...(19): siRNA sense strand
aauacaaaugagcaggaaa

SEQ ID NO: 2576033 - RNA, 19 nt, Homo sapiens
  misc_RNA (1)...(19): siRNA sense strand
gcgaaaugggagaugagga

SEQ ID NO: 2576034 - RNA, 19 nt, Homo sapiens
  misc_RNA (1)...(19): siRNA sense strand
agugaaaagcugauggauu

SEQ ID NO: 2576035 - RNA, 19 nt, Homo sapiens
  misc_RNA (1)...(19): siRNA sense strand
agauagagaagaaggaaug

SEQ ID NO: 2576036 - RNA, 19 nt, Homo sapiens
  misc_RNA (1)...(19): siRNA sense strand
uuucaaagaugguagagca

SEQ ID NO: 2576037 - RNA, 19 nt, Homo sapiens
  misc_RNA (1)...(19): siRNA sense strand
agugaagacaugaagauga

SEQ ID NO: 2576038 - RNA, 19 nt, Homo sapiens
  misc_RNA (1)...(19): siRNA sense strand
ugauguucggcgagacaaa

SEQ ID NO: 2576039 - RNA, 19 nt, Homo sapiens
  misc_RNA (1)...(19): siRNA sense strand
gcuccaacaacgugcucua

SEQ ID NO: 2576040 - RNA, 19 nt, Homo sapiens
  misc_RNA (1)...(19): siRNA sense strand
accaaaccuacgagaauaa

SEQ ID NO: 2576041 - RNA, 19 nt, Homo sapiens
  misc_RNA (1)...(19): siRNA sense strand
aacuggaacucguggaaaa

SEQ ID NO: 2576042 - RNA, 19 nt, Homo sapiens
  misc_RNA (1)...(19): siRNA sense strand
guuaacaaggcuuuggaau

SEQ ID NO: 2576043 - RNA, 19 nt, Homo sapiens
  misc_RNA (1)...(19): siRNA sense strand
aagaugaggaagauaauga

SEQ ID NO: 2576044 - RNA, 19 nt, Homo sapiens
  misc_RNA (1)...(19): siRNA sense strand
ccuacuuggaaaugaaaga

SEQ ID NO: 2576045 - RNA, 19 nt, Homo sapiens
  misc_RNA (1)...(19): siRNA sense strand
cuggcaagaucaagaggga

SEQ ID NO: 2576046 - RNA, 19 nt, Homo sapiens
  misc_RNA (1)...(19): siRNA sense strand
aagaaggcgaaaugggaga

SEQ ID NO: 2576047 - RNA, 19 nt, Homo sapiens
  misc_RNA (1)...(19): siRNA sense strand
gugcaaugcuaugagaaga

SEQ ID NO: 2576048 - RNA, 19 nt, Homo sapiens
  misc_RNA (1)...(19): siRNA sense strand
agagggaguucaugcaaca

SEQ ID NO: 2576049 - RNA, 19 nt, Homo sapiens
  misc_RNA (1)...(19): siRNA sense strand
aaggaauggauguagaaga

SEQ ID NO: 2576050 - RNA, 19 nt, Homo sapiens
  misc_RNA (1)...(19): siRNA sense strand
caggaggagaacauguaua

SEQ ID NO: 2576051 - RNA, 19 nt, Homo sapiens
  misc_RNA (1)...(19): siRNA sense strand
aggcagacccugaaaauau

SEQ ID NO: 2576052 - RNA, 19 nt, Homo sapiens
  misc_RNA (1)...(19): siRNA sense strand
gguaauaaagcuagccaag

SEQ ID NO: 2576053 - RNA, 19 nt, Homo sapiens
  misc_RNA (1)...(19): siRNA sense strand
ugaagaugaggaagauaau

SEQ ID NO: 2576054 - RNA, 19 nt, Homo sapiens
  misc_RNA (1)...(19): siRNA sense strand
ugugaaagaaagaacauca

SEQ ID NO: 2576055 - RNA, 19 nt, Homo sapiens
  misc_RNA (1)...(19): siRNA sense strand
caggugaggaugaagauga

SEQ ID NO: 2576056 - RNA, 19 nt, Homo sapiens
  misc_RNA (1)...(19): siRNA sense strand
aggaggagaacauguauau

SEQ ID NO: 2576057 - RNA, 19 nt, Homo sapiens
  misc_RNA (1)...(19): siRNA sense strand
aggcagauugagugugaca

SEQ ID NO: 2576058 - RNA, 19 nt, Homo sapiens
  misc_RNA (1)...(19): siRNA sense strand
auacaaaugagcaggaaag

SEQ ID NO: 2576059 - RNA, 19 nt, Homo sapiens
  misc_RNA (1)...(19): siRNA sense strand
agaagaaggaauggaugua

SEQ ID NO: 2576060 - RNA, 19 nt, Homo sapiens
  misc_RNA (1)...(19): siRNA sense strand
agaaggaauggauguagaa

SEQ ID NO: 2576061 - RNA, 19 nt, Homo sapiens
  misc_RNA (1)...(19): siRNA sense strand
agggaaaggacccaccaaa

SEQ ID NO: 2576062 - RNA, 19 nt, Homo sapiens
  misc_RNA (1)...(19): siRNA sense strand
uugaagaagccauugaaca

SEQ ID NO: 2576063 - RNA, 19 nt, Homo sapiens
  misc_RNA (1)...(19): siRNA sense strand
auuaagugaccuugcagaa

SEQ ID NO: 2576064 - RNA, 19 nt, Homo sapiens
  misc_RNA (1)...(19): siRNA sense strand
guugcuacuuggaaaucaa

SEQ ID NO: 2576065 - RNA, 19 nt, Homo sapiens
  misc_RNA (1)...(19): siRNA sense strand
gucuuaacuugcagaguca

SEQ ID NO: 2576066 - RNA, 19 nt, Homo sapiens
  misc_RNA (1)...(19): siRNA sense strand
gaaacuauuagcacggaga

SEQ ID NO: 2576067 - RNA, 19 nt, Homo sapiens
  misc_RNA (1)...(19): siRNA sense strand
cagaaauuaggcagauuga

SEQ ID NO: 2576068 - RNA, 19 nt, Homo sapiens
  misc_RNA (1)...(19): siRNA sense strand
ugaagauagagaagaagga

SEQ ID NO: 2576069 - RNA, 19 nt, Homo sapiens
  misc_RNA (1)...(19): siRNA sense strand
ccuaagaagauugucuaaa

SEQ ID NO: 2576070 - RNA, 19 nt, Homo sapiens
  misc_RNA (1)...(19): siRNA sense strand
gcccaaguuuugugaaaga

SEQ ID NO: 2576071 - RNA, 19 nt, Homo sapiens
  misc_RNA (1)...(19): siRNA sense strand
aaacaggugaggaugaaga

SEQ ID NO: 2576072 - RNA, 19 nt, Homo sapiens
  misc_RNA (1)...(19): siRNA sense strand
gaugaagaugaggaagaua

SEQ ID NO: 2576073 - RNA, 19 nt, Homo sapiens
  misc_RNA (1)...(19): siRNA sense strand
agauugagugugacaguga

SEQ ID NO: 2576074 - RNA, 19 nt, Homo sapiens
  misc_RNA (1)...(19): siRNA sense strand
uggauuuacaacugaguga

SEQ ID NO: 2576075 - RNA, 19 nt, Homo sapiens
  misc_RNA (1)...(19): siRNA sense strand
acauagagcuugaacagaa

SEQ ID NO: 2576076 - RNA, 19 nt, Homo sapiens
  misc_RNA (1)...(19): siRNA sense strand
uguuaaagcacaaguggaa

SEQ ID NO: 2576077 - RNA, 19 nt, Homo sapiens
  misc_RNA (1)...(19): siRNA sense strand
cgggaagccucuaggugaa

SEQ ID NO: 2576078 - RNA, 19 nt, Homo sapiens
  misc_RNA (1)...(19): siRNA sense strand
aaauaggaccagagaucaa

SEQ ID NO: 2576079 - RNA, 19 nt, Homo sapiens
  misc_RNA (1)...(19): siRNA sense strand
cuggaagaaaugauagaaa

SEQ ID NO: 2576080 - RNA, 19 nt, Homo sapiens
  misc_RNA (1)...(19): siRNA sense strand
aguuauucuuggagaucaa

SEQ ID NO: 2576081 - RNA, 19 nt, Homo sapiens
  misc_RNA (1)...(19): siRNA sense strand
gauucagacuugagcaaca

SEQ ID NO: 2576082 - RNA, 19 nt, Homo sapiens
  misc_RNA (1)...(19): siRNA sense strand
cagagggaccagaggaaga

SEQ ID NO: 2576083 - RNA, 19 nt, Homo sapiens
  misc_RNA (1)...(19): siRNA sense strand
gcuucuucauauugacaaa

SEQ ID NO: 2576084 - RNA, 19 nt, Homo sapiens
  misc_RNA (1)...(19): siRNA sense strand
gcgauucagacuugagcaa

SEQ ID NO: 2576085 - RNA, 19 nt, Homo sapiens
  misc_RNA (1)...(19): siRNA sense strand
caguguaguuggccagcaa

SEQ ID NO: 2576086 - RNA, 19 nt, Homo sapiens
  misc_RNA (1)...(19): siRNA sense strand
agaaaggaacuggaagaaa

SEQ ID NO: 2576087 - RNA, 19 nt, Homo sapiens
  misc_RNA (1)...(19): siRNA sense strand
ccugaugaggaaaggagaa

SEQ ID NO: 2576088 - RNA, 19 nt, Homo sapiens
  misc_RNA (1)...(19): siRNA sense strand
uugcaaagacauuaagaca

SEQ ID NO: 2576089 - RNA, 19 nt, Homo sapiens
  misc_RNA (1)...(19): siRNA sense strand
ccuacaaguuggucagcga

SEQ ID NO: 2576090 - RNA, 19 nt, Homo sapiens
  misc_RNA (1)...(19): siRNA sense strand
ugugagaugugcugcgauu

SEQ ID NO: 2576091 - RNA, 19 nt, Homo sapiens
  misc_RNA (1)...(19): siRNA sense strand
ccuucagaucucaguguua

SEQ ID NO: 2576092 - RNA, 19 nt, Homo sapiens
  misc_RNA (1)...(19): siRNA sense strand
cagaaaggaacuggaagaa

SEQ ID NO: 2576093 - RNA, 19 nt, Homo sapiens
  misc_RNA (1)...(19): siRNA sense strand
gaucagaauaaucagguga

SEQ ID NO: 2576094 - RNA, 19 nt, Homo sapiens
  misc_RNA (1)...(19): siRNA sense strand
aauaaucaggugaggaaaa

SEQ ID NO: 2576095 - RNA, 19 nt, Homo sapiens
  misc_RNA (1)...(19): siRNA sense strand
gguuagauaccuugcagau

SEQ ID NO: 2576096 - RNA, 19 nt, Homo sapiens
  misc_RNA (1)...(19): siRNA sense strand
uaguaauuccagugucaua

SEQ ID NO: 2576097 - RNA, 19 nt, Homo sapiens
  misc_RNA (1)...(19): siRNA sense strand
augaagagaccaucaguau

SEQ ID NO: 2576098 - RNA, 19 nt, Homo sapiens
  misc_RNA (1)...(19): siRNA sense strand
ugaggaaaggagaacuaaa

SEQ ID NO: 2576099 - RNA, 19 nt, Homo sapiens
  misc_RNA (1)...(19): siRNA sense strand
cagcuaguaaugagaauga

SEQ ID NO: 2576100 - RNA, 19 nt, Homo sapiens
  misc_RNA (1)...(19): siRNA sense strand
ugcaaagacauuaagacaa

SEQ ID NO: 2576101 - RNA, 19 nt, Homo sapiens
  misc_RNA (1)...(19): siRNA sense strand
gcgagauggugaagaagcu

SEQ ID NO: 2576102 - RNA, 19 nt, Homo sapiens
  misc_RNA (1)...(19): siRNA sense strand
aggaggaccugcaggagga

SEQ ID NO: 2576103 - RNA, 19 nt, Homo sapiens
  misc_RNA (1)...(19): siRNA sense strand
uggaaaacacgauggaaga

SEQ ID NO: 2576104 - RNA, 19 nt, Homo sapiens
  misc_RNA (1)...(19): siRNA sense strand
ccucgaugaagucaggaua

SEQ ID NO: 2576105 - RNA, 19 nt, Homo sapiens
  misc_RNA (1)...(19): siRNA sense strand
gugacagauaauaguagaa

SEQ ID NO: 2576106 - RNA, 19 nt, Homo sapiens
  misc_RNA (1)...(19): siRNA sense strand
ugugcaacaugucaagaaa

SEQ ID NO: 2576107 - RNA, 19 nt, Homo sapiens
  misc_RNA (1)...(19): siRNA sense strand
cccagagggaccagaggaa

SEQ ID NO: 2576108 - RNA, 19 nt, Homo sapiens
  misc_RNA (1)...(19): siRNA sense strand
gcacaugaagagaccauca

SEQ ID NO: 2576109 - RNA, 19 nt, Homo sapiens
  misc_RNA (1)...(19): siRNA sense strand
agaccaugcugcugaggca

SEQ ID NO: 2576110 - RNA, 19 nt, Homo sapiens
  misc_RNA (1)...(19): siRNA sense strand
gggaagucugcgaugauga

SEQ ID NO: 2576111 - RNA, 19 nt, Homo sapiens
  misc_RNA (1)...(19): siRNA sense strand
cuucaauaccauaugcuuu

SEQ ID NO: 2576112 - RNA, 19 nt, Homo sapiens
  misc_RNA (1)...(19): siRNA sense strand
ccaggaagcagcuaguaau

SEQ ID NO: 2576113 - RNA, 19 nt, Homo sapiens
  misc_RNA (1)...(19): siRNA sense strand
cugaaauagaucuagacau

SEQ ID NO: 2576114 - RNA, 19 nt, Homo sapiens
  misc_RNA (1)...(19): siRNA sense strand
agagaagugauuugcaaga

SEQ ID NO: 2576115 - RNA, 19 nt, Homo sapiens
  misc_RNA (1)...(19): siRNA sense strand
gaauaaucaggugaggaaa

SEQ ID NO: 2576116 - RNA, 19 nt, Homo sapiens
  misc_RNA (1)...(19): siRNA sense strand
cagcaagcuacugaagaaa

SEQ ID NO: 2576117 - RNA, 19 nt, Homo sapiens
  misc_RNA (1)...(19): siRNA sense strand
uuauauagucccagagaug

SEQ ID NO: 2576118 - RNA, 19 nt, Homo sapiens
  misc_RNA (1)...(19): siRNA sense strand
ccgggaagccucuagguga

SEQ ID NO: 2576119 - RNA, 19 nt, Homo sapiens
  misc_RNA (1)...(19): siRNA sense strand
cgaugaugaaagagauugu

SEQ ID NO: 2576120 - RNA, 19 nt, Homo sapiens
  misc_RNA (1)...(19): siRNA sense strand
agaagagaugucaguagaa

SEQ ID NO: 2576121 - RNA, 19 nt, Homo sapiens
  misc_RNA (1)...(19): siRNA sense strand
cacuauauucacagcgauu

SEQ ID NO: 2576122 - RNA, 19 nt, Homo sapiens
  misc_RNA (1)...(19): siRNA sense strand
aggugaaauuaguguucca

SEQ ID NO: 2576123 - RNA, 19 nt, Homo sapiens
  misc_RNA (1)...(19): siRNA sense strand
cauugaugauccagauguu

SEQ ID NO: 2576124 - RNA, 19 nt, Homo sapiens
  misc_RNA (1)...(19): siRNA sense strand
ggaccaguuugcugugcau

SEQ ID NO: 2576125 - RNA, 19 nt, Homo sapiens
  misc_RNA (1)...(19): siRNA sense strand
ucaagaagccccagaggau

SEQ ID NO: 2576126 - RNA, 19 nt, Homo sapiens
  misc_RNA (1)...(19): siRNA sense strand
ucaccauggccaccagaaa

SEQ ID NO: 2576127 - RNA, 19 nt, Homo sapiens
  misc_RNA (1)...(19): siRNA sense strand
aggcguuguuagaucagua

SEQ ID NO: 2576128 - RNA, 19 nt, Homo sapiens
  misc_RNA (1)...(19): siRNA sense strand
cguuguuagaucaguauuu

SEQ ID NO: 2576129 - RNA, 19 nt, Homo sapiens
  misc_RNA (1)...(19): siRNA sense strand
agguagaagugguggagau

SEQ ID NO: 2576130 - RNA, 19 nt, Homo sapiens
  misc_RNA (1)...(19): siRNA sense strand
auaccaaggagcugagaaa

SEQ ID NO: 2576131 - RNA, 19 nt, Homo sapiens
  misc_RNA (1)...(19): siRNA sense strand
gcauugaggcggagguaga

SEQ ID NO: 2576132 - RNA, 19 nt, Homo sapiens
  misc_RNA (1)...(19): siRNA sense strand
aggcacaauuggugaaaga

SEQ ID NO: 2576133 - RNA, 19 nt, Homo sapiens
  misc_RNA (1)...(19): siRNA sense strand
augaagaaggagaugaaua

SEQ ID NO: 2576134 - RNA, 19 nt, Homo sapiens
  misc_RNA (1)...(19): siRNA sense strand
cagcaaagccaauggggaa

SEQ ID NO: 2576135 - RNA, 19 nt, Homo sapiens
  misc_RNA (1)...(19): siRNA sense strand
acagagaaucuuuggagua

SEQ ID NO: 2576136 - RNA, 19 nt, Homo sapiens
  misc_RNA (1)...(19): siRNA sense strand
ggacaaaagacaaguacau

SEQ ID NO: 2576137 - RNA, 19 nt, Homo sapiens
  misc_RNA (1)...(19): siRNA sense strand
acgaagagacagaaaccua

SEQ ID NO: 2576138 - RNA, 19 nt, Homo sapiens
  misc_RNA (1)...(19): siRNA sense strand
ccaauuaugaagaaggaga

SEQ ID NO: 2576139 - RNA, 19 nt, Homo sapiens
  misc_RNA (1)...(19): siRNA sense strand
uggcacaguucgagugaca

SEQ ID NO: 2576140 - RNA, 19 nt, Homo sapiens
  misc_RNA (1)...(19): siRNA sense strand
cggucugcaugcuggguaa

SEQ ID NO: 2576141 - RNA, 19 nt, Homo sapiens
  misc_RNA (1)...(19): siRNA sense strand
cagagaagguaaaaggauu

SEQ ID NO: 2576142 - RNA, 19 nt, Homo sapiens
  misc_RNA (1)...(19): siRNA sense strand
gaugcaugacagugauaua

SEQ ID NO: 2576143 - RNA, 19 nt, Homo sapiens
  misc_RNA (1)...(19): siRNA sense strand
ccuuaugguauuaguggua

SEQ ID NO: 2576144 - RNA, 19 nt, Homo sapiens
  misc_RNA (1)...(19): siRNA sense strand
aagcuauugccaaggauaa

SEQ ID NO: 2576145 - RNA, 19 nt, Homo sapiens
  misc_RNA (1)...(19): siRNA sense strand
gugcacaugacuuggacaa

SEQ ID NO: 2576146 - RNA, 19 nt, Homo sapiens
  misc_RNA (1)...(19): siRNA sense strand
acagaaaccuaucaggaga

SEQ ID NO: 2576147 - RNA, 19 nt, Homo sapiens
  misc_RNA (1)...(19): siRNA sense strand
uuaugaagaaggagaugaa

SEQ ID NO: 2576148 - RNA, 19 nt, Homo sapiens
  misc_RNA (1)...(19): siRNA sense strand
agaccaaggaaauuaacaa

SEQ ID NO: 2576149 - RNA, 19 nt, Homo sapiens
  misc_RNA (1)...(19): siRNA sense strand
gaugcauacagcagugaaa

SEQ ID NO: 2576150 - RNA, 19 nt, Homo sapiens
  misc_RNA (1)...(19): siRNA sense strand
gugaaagaccgaaacucaa

SEQ ID NO: 2576151 - RNA, 19 nt, Homo sapiens
  misc_RNA (1)...(19): siRNA sense strand
caucaaaguuauggggauu

SEQ ID NO: 2576152 - RNA, 19 nt, Homo sapiens
  misc_RNA (1)...(19): siRNA sense strand
uugcacugcugguggcuaa

SEQ ID NO: 2576153 - RNA, 19 nt, Homo sapiens
  misc_RNA (1)...(19): siRNA sense strand
agggagagaucaucgaaaa

SEQ ID NO: 2576154 - RNA, 19 nt, Homo sapiens
  misc_RNA (1)...(19): siRNA sense strand
accaaggagcugagaaaga

SEQ ID NO: 2576155 - RNA, 19 nt, Homo sapiens
  misc_RNA (1)...(19): siRNA sense strand
uguacaauguugacugcua

SEQ ID NO: 2576156 - RNA, 19 nt, Homo sapiens
  misc_RNA (1)...(19): siRNA sense strand
uagaagugguggagaugca

SEQ ID NO: 2576157 - RNA, 19 nt, Homo sapiens
  misc_RNA (1)...(19): siRNA sense strand
cagaaaccuaucaggagaa

SEQ ID NO: 2576158 - RNA, 19 nt, Homo sapiens
  misc_RNA (1)...(19): siRNA sense strand
agacgacggacauaagaaa

SEQ ID NO: 2576159 - RNA, 19 nt, Homo sapiens
  misc_RNA (1)...(19): siRNA sense strand
ccgagggacuagagcgagu

SEQ ID NO: 2576160 - RNA, 19 nt, Homo sapiens
  misc_RNA (1)...(19): siRNA sense strand
cauugcagagcuuggaaua

SEQ ID NO: 2576161 - RNA, 19 nt, Homo sapiens
  misc_RNA (1)...(19): siRNA sense strand
ugaugaggacgaagagaca

SEQ ID NO: 2576162 - RNA, 19 nt, Homo sapiens
  misc_RNA (1)...(19): siRNA sense strand
cuaaauaacaugcgugucu

SEQ ID NO: 2576163 - RNA, 19 nt, Homo sapiens
  misc_RNA (1)...(19): siRNA sense strand
gcucagaagucuauuccga

SEQ ID NO: 2576164 - RNA, 19 nt, Homo sapiens
  misc_RNA (1)...(19): siRNA sense strand
ggauaacaucauaccguuu

SEQ ID NO: 2576165 - RNA, 19 nt, Homo sapiens
  misc_RNA (1)...(19): siRNA sense strand
aggaacaugaagaggcaga

SEQ ID NO: 2576166 - RNA, 19 nt, Homo sapiens
  misc_RNA (1)...(19): siRNA sense strand
gcguacgcuaugugaacaa

SEQ ID NO: 2576167 - RNA, 19 nt, Homo sapiens
  misc_RNA (1)...(19): siRNA sense strand
gcucugaugaggacgaaga

SEQ ID NO: 2576168 - RNA, 19 nt, Homo sapiens
  misc_RNA (1)...(19): siRNA sense strand
gaggacgaagagacagaaa

SEQ ID NO: 2576169 - RNA, 19 nt, Homo sapiens
  misc_RNA (1)...(19): siRNA sense strand
acauaagaaagcucgaaau

SEQ ID NO: 2576170 - RNA, 19 nt, Homo sapiens
  misc_RNA (1)...(19): siRNA sense strand
augaagacuuacaugucaa

SEQ ID NO: 2576171 - RNA, 19 nt, Homo sapiens
  misc_RNA (1)...(19): siRNA sense strand
ggugaugcugugaaaggua

SEQ ID NO: 2576172 - RNA, 19 nt, Homo sapiens
  misc_RNA (1)...(19): siRNA sense strand
caauuaugaagaaggagau

SEQ ID NO: 2576173 - RNA, 19 nt, Homo sapiens
  misc_RNA (1)...(19): siRNA sense strand
ggaaauuaacaacaugaca

SEQ ID NO: 2576174 - RNA, 19 nt, Homo sapiens
  misc_RNA (1)...(19): siRNA sense strand
gcagcuuaaaccaugaaua

SEQ ID NO: 2576175 - RNA, 19 nt, Homo sapiens
  misc_RNA (1)...(19): siRNA sense strand
gcuacaagcuauugccaag

SEQ ID NO: 2576176 - RNA, 19 nt, Homo sapiens
  misc_RNA (1)...(19): siRNA sense strand
gacauaagaaagcucgaaa

SEQ ID NO: 2576177 - RNA, 19 nt, Homo sapiens
  misc_RNA (1)...(19): siRNA sense strand
aaugugaggcggaugcaua

SEQ ID NO: 2576178 - RNA, 19 nt, Homo sapiens
  misc_RNA (1)...(19): siRNA sense strand
cagccaugcuaaauaacau

SEQ ID NO: 2576179 - RNA, 19 nt, Homo sapiens
  misc_RNA (1)...(19): siRNA sense strand
gcaaacauuacuucgaaca

SEQ ID NO: 2576180 - RNA, 19 nt, Homo sapiens
  misc_RNA (1)...(19): siRNA sense strand
aggaaaaggucucacuauu

SEQ ID NO: 2576181 - RNA, 19 nt, Homo sapiens
  misc_RNA (1)...(19): siRNA sense strand
uggcgaaagugcagcauac

SEQ ID NO: 2576182 - RNA, 19 nt, Homo sapiens
  misc_RNA (1)...(19): siRNA sense strand
uggagaugcaugacaguga

SEQ ID NO: 2576183 - RNA, 19 nt, Homo sapiens
  misc_RNA (1)...(19): siRNA sense strand
cucaaggagcaaaggaaca

SEQ ID NO: 2576184 - RNA, 19 nt, Homo sapiens
  misc_RNA (1)...(19): siRNA sense strand
gaugaaaacuacauggagu

SEQ ID NO: 2576185 - RNA, 19 nt, Homo sapiens
  misc_RNA (1)...(19): siRNA sense strand
gacucaaggagcaaaggaa

SEQ ID NO: 2576186 - RNA, 19 nt, Homo sapiens
  misc_RNA (1)...(19): siRNA sense strand
aaaggaacaugaagaggca

SEQ ID NO: 2576187 - RNA, 19 nt, Homo sapiens
  misc_RNA (1)...(19): siRNA sense strand
caagcuauugccaaggaua

SEQ ID NO: 2576188 - RNA, 19 nt, Homo sapiens
  misc_RNA (1)...(19): siRNA sense strand
acuucuaacugcugccauu

SEQ ID NO: 2576189 - RNA, 19 nt, Homo sapiens
  misc_RNA (1)...(19): siRNA sense strand
cugguaugaucuacaagua

SEQ ID NO: 2576190 - RNA, 19 nt, Homo sapiens
  misc_RNA (1)...(19): siRNA sense strand
uacugaaacuagaugaaga

SEQ ID NO: 2576191 - RNA, 19 nt, Homo sapiens
  misc_RNA (1)...(19): siRNA sense strand
uggaggcagagaagguaaa

SEQ ID NO: 2576192 - RNA, 19 nt, Homo sapiens
  misc_RNA (1)...(19): siRNA sense strand
gggaagaggugcaggagca

SEQ ID NO: 2576193 - RNA, 19 nt, Homo sapiens
  misc_RNA (1)...(19): siRNA sense strand
gccuacagaagcuggacaa

SEQ ID NO: 2576194 - RNA, 19 nt, Homo sapiens
  misc_RNA (1)...(19): siRNA sense strand
ugagugagggagaggagau

SEQ ID NO: 2576195 - RNA, 19 nt, Homo sapiens
  misc_RNA (1)...(19): siRNA sense strand
ccugaagcucguagagaaa

SEQ ID NO: 2576196 - RNA, 19 nt, Homo sapiens
  misc_RNA (1)...(19): siRNA sense strand
cguagagaaaugugaguca

SEQ ID NO: 2576197 - RNA, 19 nt, Homo sapiens
  misc_RNA (1)...(19): siRNA sense strand
augaauuggaggcggaaaa

SEQ ID NO: 2576198 - RNA, 19 nt, Homo sapiens
  misc_RNA (1)...(19): siRNA sense strand
aaaugugagucaagcguca

SEQ ID NO: 2576199 - RNA, 19 nt, Homo sapiens
  misc_RNA (1)...(19): siRNA sense strand
ucguaaagcuggagaacgg

SEQ ID NO: 2576200 - RNA, 19 nt, Homo sapiens
  misc_RNA (1)...(19): siRNA sense strand
gaucguggcugcaguggga

SEQ ID NO: 2576201 - RNA, 19 nt, Homo sapiens
  misc_RNA (1)...(19): siRNA sense strand
ggacgcugaucuucggaga

SEQ ID NO: 2576202 - RNA, 19 nt, Homo sapiens
  misc_RNA (1)...(19): siRNA sense strand
agaaggauauugagggcaa

SEQ ID NO: 2576203 - RNA, 19 nt, Homo sapiens
  misc_RNA (1)...(19): siRNA sense strand
aggaugaggaggagaaaga

SEQ ID NO: 2576204 - RNA, 19 nt, Homo sapiens
  misc_RNA (1)...(19): siRNA sense strand
gguacaaggaugaggagga

SEQ ID NO: 2576205 - RNA, 19 nt, Homo sapiens
  misc_RNA (1)...(19): siRNA sense strand
aggaggagaaagagaagaa

SEQ ID NO: 2576206 - RNA, 19 nt, Homo sapiens
  misc_RNA (1)...(19): siRNA sense strand
gagaaagagaagaaguaca

SEQ ID NO: 2576207 - RNA, 19 nt, Homo sapiens
  misc_RNA (1)...(19): siRNA sense strand
ccgagaaggaccaggcaga

SEQ ID NO: 2576208 - RNA, 19 nt, Homo sapiens
  misc_RNA (1)...(19): siRNA sense strand
cugaacaagaagagagcca

SEQ ID NO: 2576209 - RNA, 19 nt, Homo sapiens
  misc_RNA (1)...(19): siRNA sense strand
uggagaaggagguggagga

SEQ ID NO: 2576210 - RNA, 19 nt, Homo sapiens
  misc_RNA (1)...(19): siRNA sense strand
auucgaggccauugugaaa

SEQ ID NO: 2576211 - RNA, 19 nt, Homo sapiens
  misc_RNA (1)...(19): siRNA sense strand
ccaacauggaccuggccaa

SEQ ID NO: 2576212 - RNA, 19 nt, Homo sapiens
  misc_RNA (1)...(19): siRNA sense strand
aggagguggaggaguacaa

SEQ ID NO: 2576213 - RNA, 19 nt, Homo sapiens
  misc_RNA (1)...(19): siRNA sense strand
ggcaggagauugaagcaga

SEQ ID NO: 2576214 - RNA, 19 nt, Homo sapiens
  misc_RNA (1)...(19): siRNA sense strand
agauugaagcagagaccga

SEQ ID NO: 2576215 - RNA, 19 nt, Homo sapiens
  misc_RNA (1)...(19): siRNA sense strand
agaagaggaucgagggcuc

SEQ ID NO: 2576216 - RNA, 19 nt, Homo sapiens
  misc_RNA (1)...(19): siRNA sense strand
gcucaggagaucaggugga

SEQ ID NO: 2576217 - RNA, 19 nt, Homo sapiens
  misc_RNA (1)...(19): siRNA sense strand
gugauguggagaagggcuu

SEQ ID NO: 2576218 - RNA, 19 nt, Homo sapiens
  misc_RNA (1)...(19): siRNA sense strand
gcuacauuggcguggugaa

SEQ ID NO: 2576219 - RNA, 19 nt, Homo sapiens
  misc_RNA (1)...(19): siRNA sense strand
cugaaagagcccugucuga

SEQ ID NO: 2576220 - RNA, 19 nt, Homo sapiens
  misc_RNA (1)...(19): siRNA sense strand
gcgagaggagacagagcga

SEQ ID NO: 2576221 - RNA, 19 nt, Homo sapiens
  misc_RNA (1)...(19): siRNA sense strand
augaggaggagaaagagaa

SEQ ID NO: 2576222 - RNA, 19 nt, Homo sapiens
  misc_RNA (1)...(19): siRNA sense strand
ggaucgagggcucaggaga

SEQ ID NO: 2576223 - RNA, 19 nt, Homo sapiens
  misc_RNA (1)...(19): siRNA sense strand
gaacaagaagagagccauc

SEQ ID NO: 2576224 - RNA, 19 nt, Homo sapiens
  misc_RNA (1)...(19): siRNA sense strand
guguugaacuugacccuca

SEQ ID NO: 2576225 - RNA, 19 nt, Homo sapiens
  misc_RNA (1)...(19): siRNA sense strand
aggaagacguggacagcug

SEQ ID NO: 2576226 - RNA, 19 nt, Homo sapiens
  misc_RNA (1)...(19): siRNA sense strand
gaugaaguccggcaggaga

SEQ ID NO: 2576227 - RNA, 19 nt, Homo sapiens
  misc_RNA (1)...(19): siRNA sense strand
gauuaagauccaugagaaa

SEQ ID NO: 2576228 - RNA, 19 nt, Homo sapiens
  misc_RNA (1)...(19): siRNA sense strand
ucuauguguuugugagaaa

SEQ ID NO: 2576229 - RNA, 19 nt, Homo sapiens
  misc_RNA (1)...(19): siRNA sense strand
ccguagacccagagaauga

SEQ ID NO: 2576230 - RNA, 19 nt, Homo sapiens
  misc_RNA (1)...(19): siRNA sense strand
cgcugaaggcuuuggaaua

SEQ ID NO: 2576231 - RNA, 19 nt, Homo sapiens
  misc_RNA (1)...(19): siRNA sense strand
ugaagaugcugguggguga

SEQ ID NO: 2576232 - RNA, 19 nt, Homo sapiens
  misc_RNA (1)...(19): siRNA sense strand
cugaagacuuacuuggaua

SEQ ID NO: 2576233 - RNA, 19 nt, Homo sapiens
  misc_RNA (1)...(19): siRNA sense strand
cgggagaugaugugaagaa

SEQ ID NO: 2576234 - RNA, 19 nt, Homo sapiens
  misc_RNA (1)...(19): siRNA sense strand
cuacaggagaauuuagaaa

SEQ ID NO: 2576235 - RNA, 19 nt, Homo sapiens
  misc_RNA (1)...(19): siRNA sense strand
gguuugagguggugcacau

SEQ ID NO: 2576236 - RNA, 19 nt, Homo sapiens
  misc_RNA (1)...(19): siRNA sense strand
augagauaguccagagcaa

SEQ ID NO: 2576237 - RNA, 19 nt, Homo sapiens
  misc_RNA (1)...(19): siRNA sense strand
aagaagaggacaaagagaa

SEQ ID NO: 2576238 - RNA, 19 nt, Homo sapiens
  misc_RNA (1)...(19): siRNA sense strand
ucagagaugaagacggaaa

SEQ ID NO: 2576239 - RNA, 19 nt, Homo sapiens
  misc_RNA (1)...(19): siRNA sense strand
ugaggaagcaacugauaaa

SEQ ID NO: 2576240 - RNA, 19 nt, Homo sapiens
  misc_RNA (1)...(19): siRNA sense strand
ggaauaugagcgaagagaa

SEQ ID NO: 2576241 - RNA, 19 nt, Homo sapiens
  misc_RNA (1)...(19): siRNA sense strand
augugaagcugaugaaaga

SEQ ID NO: 2576242 - RNA, 19 nt, Homo sapiens
  misc_RNA (1)...(19): siRNA sense strand
caacaaaauccuugagcuu

SEQ ID NO: 2576243 - RNA, 19 nt, Homo sapiens
  misc_RNA (1)...(19): siRNA sense strand
gaacaguacgagauggaga

SEQ ID NO: 2576244 - RNA, 19 nt, Homo sapiens
  misc_RNA (1)...(19): siRNA sense strand
aagaagaaauacugagaac

SEQ ID NO: 2576245 - RNA, 19 nt, Homo sapiens
  misc_RNA (1)...(19): siRNA sense strand
aggaugagcugaaggaacu

SEQ ID NO: 2576246 - RNA, 19 nt, Homo sapiens
  misc_RNA (1)...(19): siRNA sense strand
gcaagaagauggaggaugc

SEQ ID NO: 2576247 - RNA, 19 nt, Homo sapiens
  misc_RNA (1)...(19): siRNA sense strand
gggaagaggccauaagucu

SEQ ID NO: 2576248 - RNA, 19 nt, Homo sapiens
  misc_RNA (1)...(19): siRNA sense strand
gagucaauccugauggaau

SEQ ID NO: 2576249 - RNA, 19 nt, Homo sapiens
  misc_RNA (1)...(19): siRNA sense strand
gaauaugagcgaagagaag

SEQ ID NO: 2576250 - RNA, 19 nt, Homo sapiens
  misc_RNA (1)...(19): siRNA sense strand
cggucauaagugagaacua

SEQ ID NO: 2576251 - RNA, 19 nt, Homo sapiens
  misc_RNA (1)...(19): siRNA sense strand
cugcaucccuccugugaaa

SEQ ID NO: 2576252 - RNA, 19 nt, Homo sapiens
  misc_RNA (1)...(19): siRNA sense strand
agaauaagccagugccuga

SEQ ID NO: 2576253 - RNA, 19 nt, Homo sapiens
  misc_RNA (1)...(19): siRNA sense strand
gauacuacggccagggauu

SEQ ID NO: 2576254 - RNA, 19 nt, Homo sapiens
  misc_RNA (1)...(19): siRNA sense strand
gaugaaagaagaugggacu

SEQ ID NO: 2576255 - RNA, 19 nt, Homo sapiens
  misc_RNA (1)...(19): siRNA sense strand
cugugaaacuccagaagca

SEQ ID NO: 2576256 - RNA, 19 nt, Homo sapiens
  misc_RNA (1)...(19): siRNA sense strand
acaacagggaggagaugua

SEQ ID NO: 2576257 - RNA, 19 nt, Homo sapiens
  misc_RNA (1)...(19): siRNA sense strand
acaccguucuggaggcuua

SEQ ID NO: 2576258 - RNA, 19 nt, Homo sapiens
  misc_RNA (1)...(19): siRNA sense strand
aagcaagaaugccgggaca

SEQ ID NO: 2576259 - RNA, 19 nt, Homo sapiens
  misc_RNA (1)...(19): siRNA sense strand
ucuuaaaccagauggguga

SEQ ID NO: 2576260 - RNA, 19 nt, Homo sapiens
  misc_RNA (1)...(19): siRNA sense strand
gaccguagacccagagaau

SEQ ID NO: 2576261 - RNA, 19 nt, Homo sapiens
  misc_RNA (1)...(19): siRNA sense strand
ccauguggauugagagaac

SEQ ID NO: 2576262 - RNA, 19 nt, Homo sapiens
  misc_RNA (1)...(19): siRNA sense strand
cuggagaaugccauagaaa

SEQ ID NO: 2576263 - RNA, 19 nt, Homo sapiens
  misc_RNA (1)...(19): siRNA sense strand
ugaaaaugaagguggagaa

SEQ ID NO: 2576264 - RNA, 19 nt, Homo sapiens
  misc_RNA (1)...(19): siRNA sense strand
ugaugacagaugagagcaa

SEQ ID NO: 2576265 - RNA, 19 nt, Homo sapiens
  misc_RNA (1)...(19): siRNA sense strand
guacaaacuccgcgaucuu

SEQ ID NO: 2576266 - RNA, 19 nt, Homo sapiens
  misc_RNA (1)...(19): siRNA sense strand
cugcggagguccaagaaga

SEQ ID NO: 2576267 - RNA, 19 nt, Homo sapiens
  misc_RNA (1)...(19): siRNA sense strand
acaaagaccucaacaggga

SEQ ID NO: 2576268 - RNA, 19 nt, Homo sapiens
  misc_RNA (1)...(19): siRNA sense strand
gcagaaaccaugaaccaga

SEQ ID NO: 2576269 - RNA, 19 nt, Homo sapiens
  misc_RNA (1)...(19): siRNA sense strand
acaaaauguuacagggcau

SEQ ID NO: 2576270 - RNA, 19 nt, Homo sapiens
  misc_RNA (1)...(19): siRNA sense strand
acaacgacacuuugggaau

SEQ ID NO: 2576271 - RNA, 19 nt, Homo sapiens
  misc_RNA (1)...(19): siRNA sense strand
cgguuacagcugagaauga

SEQ ID NO: 2576272 - RNA, 19 nt, Homo sapiens
  misc_RNA (1)...(19): siRNA sense strand
uugaagacaugcagaggau

SEQ ID NO: 2576273 - RNA, 19 nt, Homo sapiens
  misc_RNA (1)...(19): siRNA sense strand
gcacaagaagugacaacga

SEQ ID NO: 2576274 - RNA, 19 nt, Homo sapiens
  misc_RNA (1)...(19): siRNA sense strand
ugucagagaugaagacgga

SEQ ID NO: 2576275 - RNA, 19 nt, Homo sapiens
  misc_RNA (1)...(19): siRNA sense strand
cuaagaacgcugaaggcuu

SEQ ID NO: 2576276 - RNA, 19 nt, Homo sapiens
  misc_RNA (1)...(19): siRNA sense strand
ggaaggaauaugagcgaag

SEQ ID NO: 2576277 - RNA, 19 nt, Homo sapiens
  misc_RNA (1)...(19): siRNA sense strand
ugaagauuguggauggaga

SEQ ID NO: 2576278 - RNA, 19 nt, Homo sapiens
  misc_RNA (1)...(19): siRNA sense strand
uugccaagucgguggagaa

SEQ ID NO: 2576279 - RNA, 19 nt, Homo sapiens
  misc_RNA (1)...(19): siRNA sense strand
ggguggcaguuauggauau

SEQ ID NO: 2576280 - RNA, 19 nt, Homo sapiens
  misc_RNA (1)...(19): siRNA sense strand
aagcagagagugaugaaga

SEQ ID NO: 2576281 - RNA, 19 nt, Homo sapiens
  misc_RNA (1)...(19): siRNA sense strand
gcagagagugaugaagaaa

SEQ ID NO: 2576282 - RNA, 19 nt, Homo sapiens
  misc_RNA (1)...(19): siRNA sense strand
auggagaggaaguggugaa

SEQ ID NO: 2576283 - RNA, 19 nt, Homo sapiens
  misc_RNA (1)...(19): siRNA sense strand
acaagaaauugaugacagu

SEQ ID NO: 2576284 - RNA, 19 nt, Homo sapiens
  misc_RNA (1)...(19): siRNA sense strand
aaggaaagaugugggaaga

SEQ ID NO: 2576285 - RNA, 19 nt, Homo sapiens
  misc_RNA (1)...(19): siRNA sense strand
aggaagugacaguugagaa

SEQ ID NO: 2576286 - RNA, 19 nt, Homo sapiens
  misc_RNA (1)...(19): siRNA sense strand
ccugauaauaccaguguca

SEQ ID NO: 2576287 - RNA, 19 nt, Homo sapiens
  misc_RNA (1)...(19): siRNA sense strand
cggaacaguacgagaugga

SEQ ID NO: 2576288 - RNA, 19 nt, Homo sapiens
  misc_RNA (1)...(19): siRNA sense strand
caguauauccagugcuuca

SEQ ID NO: 2576289 - RNA, 19 nt, Homo sapiens
  misc_RNA (1)...(19): siRNA sense strand
cagaugagagcaaagacaa

SEQ ID NO: 2576290 - RNA, 19 nt, Homo sapiens
  misc_RNA (1)...(19): siRNA sense strand
gcagagaagaugaacacca

SEQ ID NO: 2576291 - RNA, 19 nt, Homo sapiens
  misc_RNA (1)...(19): siRNA sense strand
ugaagguggagaaggagua

SEQ ID NO: 2576292 - RNA, 19 nt, Homo sapiens
  misc_RNA (1)...(19): siRNA sense strand
caagaagaggacaaagaga

SEQ ID NO: 2576293 - RNA, 19 nt, Homo sapiens
  misc_RNA (1)...(19): siRNA sense strand
agcagagagugaugaagaa

SEQ ID NO: 2576294 - RNA, 19 nt, Homo sapiens
  misc_RNA (1)...(19): siRNA sense strand
acagauggaguuugaagaa

SEQ ID NO: 2576295 - RNA, 19 nt, Homo sapiens
  misc_RNA (1)...(19): siRNA sense strand
cggaaagccaccauaccaa

SEQ ID NO: 2576296 - RNA, 19 nt, Homo sapiens
  misc_RNA (1)...(19): siRNA sense strand
gugacgagcaagaggacuu

SEQ ID NO: 2576297 - RNA, 19 nt, Homo sapiens
  misc_RNA (1)...(19): siRNA sense strand
ggcgaggagagaagaggaa

SEQ ID NO: 2576298 - RNA, 19 nt, Homo sapiens
  misc_RNA (1)...(19): siRNA sense strand
aagacauagaggacauuaa

SEQ ID NO: 2576299 - RNA, 19 nt, Homo sapiens
  misc_RNA (1)...(19): siRNA sense strand
cuaaaggagaguaagcaga

SEQ ID NO: 2576300 - RNA, 19 nt, Homo sapiens
  misc_RNA (1)...(19): siRNA sense strand
aaucaugcccuaaaggaga

SEQ ID NO: 2576301 - RNA, 19 nt, Homo sapiens
  misc_RNA (1)...(19): siRNA sense strand
guucaggcgaggagagaag

SEQ ID NO: 2576302 - RNA, 19 nt, Homo sapiens
  misc_RNA (1)...(19): siRNA sense strand
cgaggagagaagaggaaug

SEQ ID NO: 2576303 - RNA, 19 nt, Homo sapiens
  misc_RNA (1)...(19): siRNA sense strand
aagagagcacagacgcaaa

SEQ ID NO: 2576304 - RNA, 19 nt, Homo sapiens
  misc_RNA (1)...(19): siRNA sense strand
ccgaaucaucuuugaagca

SEQ ID NO: 2576305 - RNA, 19 nt, Homo sapiens
  misc_RNA (1)...(19): siRNA sense strand
augaaaugaaugagcugau

SEQ ID NO: 2576306 - RNA, 19 nt, Homo sapiens
  misc_RNA (1)...(19): siRNA sense strand
cagaaagugccuucggcua

SEQ ID NO: 2576307 - RNA, 19 nt, Homo sapiens
  misc_RNA (1)...(19): siRNA sense strand
gcaaagaggaaucuggagu

SEQ ID NO: 2576308 - RNA, 19 nt, Homo sapiens
  misc_RNA (1)...(19): siRNA sense strand
aagagcaggcaaagaggaa

SEQ ID NO: 2576309 - RNA, 19 nt, Homo sapiens
  misc_RNA (1)...(19): siRNA sense strand
cagaauguguccuugguca

SEQ ID NO: 2576310 - RNA, 19 nt, Homo sapiens
  misc_RNA (1)...(19): siRNA sense strand
gcaaaggagaggagccaag

SEQ ID NO: 2576311 - RNA, 19 nt, Homo sapiens
  misc_RNA (1)...(19): siRNA sense strand
uggugaaggugcagcugga

SEQ ID NO: 2576312 - RNA, 19 nt, Homo sapiens
  misc_RNA (1)...(19): siRNA sense strand
ggagaggagccaagagcag

SEQ ID NO: 2576313 - RNA, 19 nt, Homo sapiens
  misc_RNA (1)...(19): siRNA sense strand
ugugauugaugaagggaaa

SEQ ID NO: 2576314 - RNA, 19 nt, Homo sapiens
  misc_RNA (1)...(19): siRNA sense strand
aggagaaggagaagacaaa

SEQ ID NO: 2576315 - RNA, 19 nt, Homo sapiens
  misc_RNA (1)...(19): siRNA sense strand
ccgcuaaggaugaggugaa

SEQ ID NO: 2576316 - RNA, 19 nt, Homo sapiens
  misc_RNA (1)...(19): siRNA sense strand
agaaauacgaggaggagau

SEQ ID NO: 2576317 - RNA, 19 nt, Homo sapiens
  misc_RNA (1)...(19): siRNA sense strand
gagcaguggaagaagaaau

SEQ ID NO: 2576318 - RNA, 19 nt, Homo sapiens
  misc_RNA (1)...(19): siRNA sense strand
acgagaagcugaagagcga

SEQ ID NO: 2576319 - RNA, 19 nt, Homo sapiens
  misc_RNA (1)...(19): siRNA sense strand
ccaacauggacaauggaaa

SEQ ID NO: 2576320 - RNA, 19 nt, Homo sapiens
  misc_RNA (1)...(19): siRNA sense strand
aggcaaagaauaucaacaa

SEQ ID NO: 2576321 - RNA, 19 nt, Homo sapiens
  misc_RNA (1)...(19): siRNA sense strand
gcuaugaggcugaggacca

SEQ ID NO: 2576322 - RNA, 19 nt, Homo sapiens
  misc_RNA (1)...(19): siRNA sense strand
agaagaaauaugagaagga

SEQ ID NO: 2576323 - RNA, 19 nt, Homo sapiens
  misc_RNA (1)...(19): siRNA sense strand
acaucaagcaggagaacau

SEQ ID NO: 2576324 - RNA, 19 nt, Homo sapiens
  misc_RNA (1)...(19): siRNA sense strand
augagaaggagaaggagaa

SEQ ID NO: 2576325 - RNA, 19 nt, Homo sapiens
  misc_RNA (1)...(19): siRNA sense strand
cggaauacaugcagagcgu

SEQ ID NO: 2576326 - RNA, 19 nt, Homo sapiens
  misc_RNA (1)...(19): siRNA sense strand
acagacauccucagggaaa

SEQ ID NO: 2576327 - RNA, 19 nt, Homo sapiens
  misc_RNA (1)...(19): siRNA sense strand
aggaugaggugaaggaagu

SEQ ID NO: 2576328 - RNA, 19 nt, Homo sapiens
  misc_RNA (1)...(19): siRNA sense strand
augcagaugaagugaagaa

SEQ ID NO: 2576329 - RNA, 19 nt, Homo sapiens
  misc_RNA (1)...(19): siRNA sense strand
gugcagaaauggagcccga

SEQ ID NO: 2576330 - RNA, 19 nt, Homo sapiens
  misc_RNA (1)...(19): siRNA sense strand
ggacaauggaaaugccaca

SEQ ID NO: 2576331 - RNA, 19 nt, Homo sapiens
  misc_RNA (1)...(19): siRNA sense strand
acgacaaggaugaugaaau

SEQ ID NO: 2576332 - RNA, 19 nt, Homo sapiens
  misc_RNA (1)...(19): siRNA sense strand
gcuacaagagcucgggcaa

SEQ ID NO: 2576333 - RNA, 19 nt, Homo sapiens
  misc_RNA (1)...(19): siRNA sense strand
uggacgaggcaaagaauau

SEQ ID NO: 2576334 - RNA, 19 nt, Homo sapiens
  misc_RNA (1)...(19): siRNA sense strand
uugcgaagcuggaggcuga

SEQ ID NO: 2576335 - RNA, 19 nt, Homo sapiens
  misc_RNA (1)...(19): siRNA sense strand
aagcaggagaacauggaaa

SEQ ID NO: 2576336 - RNA, 19 nt, Homo sapiens
  misc_RNA (1)...(19): siRNA sense strand
acaaacagcugguacguga

SEQ ID NO: 2576337 - RNA, 19 nt, Homo sapiens
  misc_RNA (1)...(19): siRNA sense strand
ggacagacauccucaggga

SEQ ID NO: 2576338 - RNA, 19 nt, Homo sapiens
  misc_RNA (1)...(19): siRNA sense strand
acauggaaacggagcagaa

SEQ ID NO: 2576339 - RNA, 19 nt, Homo sapiens
  misc_RNA (1)...(19): siRNA sense strand
gcuacggcugagagaguua

SEQ ID NO: 2576340 - RNA, 19 nt, Homo sapiens
  misc_RNA (1)...(19): siRNA sense strand
aaggagaaggagaagacaa

SEQ ID NO: 2576341 - RNA, 19 nt, Homo sapiens
  misc_RNA (1)...(19): siRNA sense strand
acaaaggcccagaaggaga

SEQ ID NO: 2576342 - RNA, 19 nt, Homo sapiens
  misc_RNA (1)...(19): siRNA sense strand
acgagaagguccagcggga

SEQ ID NO: 2576343 - RNA, 19 nt, Homo sapiens
  misc_RNA (1)...(19): siRNA sense strand
aagucaagucuguggucaa

SEQ ID NO: 2576344 - RNA, 19 nt, Homo sapiens
  misc_RNA (1)...(19): siRNA sense strand
aagaaauaugagaaggaga

SEQ ID NO: 2576345 - RNA, 19 nt, Homo sapiens
  misc_RNA (1)...(19): siRNA sense strand
agaaugugccugagacaga

SEQ ID NO: 2576346 - RNA, 19 nt, Homo sapiens
  misc_RNA (1)...(19): siRNA sense strand
uggaugugaccaagacaaa

SEQ ID NO: 2576347 - RNA, 19 nt, Homo sapiens
  misc_RNA (1)...(19): siRNA sense strand
auaaugaugcagagaccaa

SEQ ID NO: 2576348 - RNA, 19 nt, Homo sapiens
  misc_RNA (1)...(19): siRNA sense strand
aggagaagagccagcagaa

SEQ ID NO: 2576349 - RNA, 19 nt, Homo sapiens
  misc_RNA (1)...(19): siRNA sense strand
aggcugaggaccaggccaa

SEQ ID NO: 2576350 - RNA, 19 nt, Homo sapiens
  misc_RNA (1)...(19): siRNA sense strand
gggcuacggcugagagagu

SEQ ID NO: 2576351 - RNA, 19 nt, Homo sapiens
  misc_RNA (1)...(19): siRNA sense strand
cuacaagagcucgggcaaa

SEQ ID NO: 2576352 - RNA, 19 nt, Homo sapiens
  misc_RNA (1)...(19): siRNA sense strand
ggcagaaauacgaggagga

SEQ ID NO: 2576353 - RNA, 19 nt, Homo sapiens
  misc_RNA (1)...(19): siRNA sense strand
agaucaacgagaagcagaa

SEQ ID NO: 2576354 - RNA, 19 nt, Homo sapiens
  misc_RNA (1)...(19): siRNA sense strand
uagagaagcucaagcagca

SEQ ID NO: 2576355 - RNA, 19 nt, Homo sapiens
  misc_RNA (1)...(19): siRNA sense strand
uggaagaagaaauaugaga

SEQ ID NO: 2576356 - RNA, 19 nt, Homo sapiens
  misc_RNA (1)...(19): siRNA sense strand
ugaugaaggaucugagcga

SEQ ID NO: 2576357 - RNA, 19 nt, Homo sapiens
  misc_RNA (1)...(19): siRNA sense strand
acgagaagcagaagaccau

SEQ ID NO: 2576358 - RNA, 19 nt, Homo sapiens
  misc_RNA (1)...(19): siRNA sense strand
gcggagaccaacaacgaau

SEQ ID NO: 2576359 - RNA, 19 nt, Homo sapiens
  misc_RNA (1)...(19): siRNA sense strand
agagaaugugccugagaca

SEQ ID NO: 2576360 - RNA, 19 nt, Homo sapiens
  misc_RNA (1)...(19): siRNA sense strand
cagauauguacuuugcaaa

SEQ ID NO: 2576361 - RNA, 19 nt, Homo sapiens
  misc_RNA (1)...(19): siRNA sense strand
cagcaagacuggagcagag

SEQ ID NO: 2576362 - RNA, 19 nt, Homo sapiens
  misc_RNA (1)...(19): siRNA sense strand
ccgugcuggacgaggcaaa

SEQ ID NO: 2576363 - RNA, 19 nt, Homo sapiens
  misc_RNA (1)...(19): siRNA sense strand
cagcaaaaugacaaggauu

SEQ ID NO: 2576364 - RNA, 19 nt, Homo sapiens
  misc_RNA (1)...(19): siRNA sense strand
agcaguggaagaagaaaua

SEQ ID NO: 2576365 - RNA, 19 nt, Homo sapiens
  misc_RNA (1)...(19): siRNA sense strand
gggccaucgaggaggaguu

SEQ ID NO: 2576366 - RNA, 19 nt, Homo sapiens
  misc_RNA (1)...(19): siRNA sense strand
ugcagagcguggagcuaaa

SEQ ID NO: 2576367 - RNA, 19 nt, Homo sapiens
  misc_RNA (1)...(19): siRNA sense strand
gcuuacaaagguucacaaa

SEQ ID NO: 2576368 - RNA, 19 nt, Homo sapiens
  misc_RNA (1)...(19): siRNA sense strand
agaucugcguugugagcuu

SEQ ID NO: 2576369 - RNA, 19 nt, Homo sapiens
  misc_RNA (1)...(19): siRNA sense strand
agugagaaggucagcaaga

SEQ ID NO: 2576370 - RNA, 19 nt, Homo sapiens
  misc_RNA (1)...(19): siRNA sense strand
ccucaguaaauuuggaguu

SEQ ID NO: 2576371 - RNA, 19 nt, Homo sapiens
  misc_RNA (1)...(19): siRNA sense strand
gugcacugaaggaggccaa

SEQ ID NO: 2576372 - RNA, 19 nt, Homo sapiens
  misc_RNA (1)...(19): siRNA sense strand
uaugagaaggagaaggaga

SEQ ID NO: 2576373 - RNA, 19 nt, Homo sapiens
  misc_RNA (1)...(19): siRNA sense strand
cagagaacgaugccgcuaa

SEQ ID NO: 2576374 - RNA, 19 nt, Homo sapiens
  misc_RNA (1)...(19): siRNA sense strand
ucaaggaggccguucgcua

SEQ ID NO: 2576375 - RNA, 19 nt, Homo sapiens
  misc_RNA (1)...(19): siRNA sense strand
aauaugagaaggagaagga

SEQ ID NO: 2576376 - RNA, 19 nt, Homo sapiens
  misc_RNA (1)...(19): siRNA sense strand
ggacaaggagccugacacu

SEQ ID NO: 2576377 - RNA, 19 nt, Homo sapiens
  misc_RNA (1)...(19): siRNA sense strand
guggcgcaauggagagaau

SEQ ID NO: 2576378 - RNA, 19 nt, Homo sapiens
  misc_RNA (1)...(19): siRNA sense strand
gcagaagcucagugggaag

SEQ ID NO: 2576379 - RNA, 19 nt, Homo sapiens
  misc_RNA (1)...(19): siRNA sense strand
ucaguggacaccagcgaaa

SEQ ID NO: 2576380 - RNA, 19 nt, Homo sapiens
  misc_RNA (1)...(19): siRNA sense strand
ucagugucauugugggcaa

SEQ ID NO: 2576381 - RNA, 19 nt, Homo sapiens
  misc_RNA (1)...(19): siRNA sense strand
ccaaggucucggaggguaa

SEQ ID NO: 2576382 - RNA, 19 nt, Homo sapiens
  misc_RNA (1)...(19): siRNA sense strand
ccucaauauucaagagcca

SEQ ID NO: 2576383 - RNA, 19 nt, Homo sapiens
  misc_RNA (1)...(19): siRNA sense strand
ggaagaucgaaguagguga

SEQ ID NO: 2576384 - RNA, 19 nt, Homo sapiens
  misc_RNA (1)...(19): siRNA sense strand
gugggagagcagaggucaa

SEQ ID NO: 2576385 - RNA, 19 nt, Homo sapiens
  misc_RNA (1)...(19): siRNA sense strand
aagaaaugccagaugcaga

SEQ ID NO: 2576386 - RNA, 19 nt, Homo sapiens
  misc_RNA (1)...(19): siRNA sense strand
ggacuaggaauauggacca

SEQ ID NO: 2576387 - RNA, 19 nt, Homo sapiens
  misc_RNA (1)...(19): siRNA sense strand
ccguagagaaggagcugaa

SEQ ID NO: 2576388 - RNA, 19 nt, Homo sapiens
  misc_RNA (1)...(19): siRNA sense strand
uguacaacgaugaggauga

SEQ ID NO: 2576389 - RNA, 19 nt, Homo sapiens
  misc_RNA (1)...(19): siRNA sense strand
cuccuaaggccguagagaa

SEQ ID NO: 2576390 - RNA, 19 nt, Homo sapiens
  misc_RNA (1)...(19): siRNA sense strand
ugaaaguggugcuggaaaa

SEQ ID NO: 2576391 - RNA, 19 nt, Homo sapiens
  misc_RNA (1)...(19): siRNA sense strand
aagagaugagagagagaaa

SEQ ID NO: 2576392 - RNA, 19 nt, Homo sapiens
  misc_RNA (1)...(19): siRNA sense strand
agagaaaguaugaugggua

SEQ ID NO: 2576393 - RNA, 19 nt, Homo sapiens
  misc_RNA (1)...(19): siRNA sense strand
cguucaaaugagagaagaa

SEQ ID NO: 2576394 - RNA, 19 nt, Homo sapiens
  misc_RNA (1)...(19): siRNA sense strand
cgucauuaucaguggugaa

SEQ ID NO: 2576395 - RNA, 19 nt, Homo sapiens
  misc_RNA (1)...(19): siRNA sense strand
ccucaagcccaguaacaaa

SEQ ID NO: 2576396 - RNA, 19 nt, Homo sapiens
  misc_RNA (1)...(19): siRNA sense strand
ggaauaagauggacaccca

SEQ ID NO: 2576397 - RNA, 19 nt, Homo sapiens
  misc_RNA (1)...(19): siRNA sense strand
guucaaggguguaaagcga

SEQ ID NO: 2576398 - RNA, 19 nt, Homo sapiens
  misc_RNA (1)...(19): siRNA sense strand
agaacggagucaucagaaa

SEQ ID NO: 2576399 - RNA, 19 nt, Homo sapiens
  misc_RNA (1)...(19): siRNA sense strand
gggaaaaggaaauugaaau

SEQ ID NO: 2576400 - RNA, 19 nt, Homo sapiens
  misc_RNA (1)...(19): siRNA sense strand
aagaaggagagaaggagaa

SEQ ID NO: 2576401 - RNA, 19 nt, Homo sapiens
  misc_RNA (1)...(19): siRNA sense strand
aaggagagaaggagaaaca

SEQ ID NO: 2576402 - RNA, 19 nt, Homo sapiens
  misc_RNA (1)...(19): siRNA sense strand
ccaacaacuaugugaccaa

SEQ ID NO: 2576403 - RNA, 19 nt, Homo sapiens
  misc_RNA (1)...(19): siRNA sense strand
agagagaaccagugcguca

SEQ ID NO: 2576404 - RNA, 19 nt, Homo sapiens
  misc_RNA (1)...(19): siRNA sense strand
uuagaagagaugagagaga

SEQ ID NO: 2576405 - RNA, 19 nt, Homo sapiens
  misc_RNA (1)...(19): siRNA sense strand
agacaagggccuggugaaa

SEQ ID NO: 2576406 - RNA, 19 nt, Homo sapiens
  misc_RNA (1)...(19): siRNA sense strand
gaucauugacagagagaac

SEQ ID NO: 2576407 - RNA, 19 nt, Homo sapiens
  misc_RNA (1)...(19): siRNA sense strand
cggaaaaucugcaggcuga

SEQ ID NO: 2576408 - RNA, 19 nt, Homo sapiens
  misc_RNA (1)...(19): siRNA sense strand
guggagaaucugaagaaga

SEQ ID NO: 2576409 - RNA, 19 nt, Homo sapiens
  misc_RNA (1)...(19): siRNA sense strand
agaagagaugagagagaga

SEQ ID NO: 2576410 - RNA, 19 nt, Homo sapiens
  misc_RNA (1)...(19): siRNA sense strand
agagaacauucgagugaga

SEQ ID NO: 2576411 - RNA, 19 nt, Homo sapiens
  misc_RNA (1)...(19): siRNA sense strand
aagaaguccugaagcggaa

SEQ ID NO: 2576412 - RNA, 19 nt, Homo sapiens
  misc_RNA (1)...(19): siRNA sense strand
auacagaaaucauggagga

SEQ ID NO: 2576413 - RNA, 19 nt, Homo sapiens
  misc_RNA (1)...(19): siRNA sense strand
agaauauguucaagaggga

SEQ ID NO: 2576414 - RNA, 19 nt, Homo sapiens
  misc_RNA (1)...(19): siRNA sense strand
ugggaggaaagcaggguaa

SEQ ID NO: 2576415 - RNA, 19 nt, Homo sapiens
  misc_RNA (1)...(19): siRNA sense strand
ggguaaagcaucaagucga

SEQ ID NO: 2576416 - RNA, 19 nt, Homo sapiens
  misc_RNA (1)...(19): siRNA sense strand
gugaaaguggugcuggaaa

SEQ ID NO: 2576417 - RNA, 19 nt, Homo sapiens
  misc_RNA (1)...(19): siRNA sense strand
cauuaaaggcagaacagga

SEQ ID NO: 2576418 - RNA, 19 nt, Homo sapiens
  misc_RNA (1)...(19): siRNA sense strand
gagaugagagagagaaagu

SEQ ID NO: 2576419 - RNA, 19 nt, Homo sapiens
  misc_RNA (1)...(19): siRNA sense strand
cauuaucaguggugaaagu

SEQ ID NO: 2576420 - RNA, 19 nt, Homo sapiens
  misc_RNA (1)...(19): siRNA sense strand
caagaaggagagaaggaga

SEQ ID NO: 2576421 - RNA, 19 nt, Homo sapiens
  misc_RNA (1)...(19): siRNA sense strand
ggggaaaaggaaauugaaa

SEQ ID NO: 2576422 - RNA, 19 nt, Homo sapiens
  misc_RNA (1)...(19): siRNA sense strand
uguggagagugaagaguuu

SEQ ID NO: 2576423 - RNA, 19 nt, Homo sapiens
  misc_RNA (1)...(19): siRNA sense strand
agaaggaacacuacccaaa

SEQ ID NO: 2576424 - RNA, 19 nt, Homo sapiens
  misc_RNA (1)...(19): siRNA sense strand
cagacaagggccuggugaa

SEQ ID NO: 2576425 - RNA, 19 nt, Homo sapiens
  misc_RNA (1)...(19): siRNA sense strand
gagaaagaccaugaagaau

SEQ ID NO: 2576426 - RNA, 19 nt, Homo sapiens
  misc_RNA (1)...(19): siRNA sense strand
ugaacaagaaggagagaag

SEQ ID NO: 2576427 - RNA, 19 nt, Homo sapiens
  misc_RNA (1)...(19): siRNA sense strand
aaacaugaucauugacaga

SEQ ID NO: 2576428 - RNA, 19 nt, Homo sapiens
  misc_RNA (1)...(19): siRNA sense strand
ugguagauuccaucaauaa

SEQ ID NO: 2576429 - RNA, 19 nt, Homo sapiens
  misc_RNA (1)...(19): siRNA sense strand
cuaggguggugaugaggaa

SEQ ID NO: 2576430 - RNA, 19 nt, Homo sapiens
  misc_RNA (1)...(19): siRNA sense strand
aggaagaauauguucaaga

SEQ ID NO: 2576431 - RNA, 19 nt, Homo sapiens
  misc_RNA (1)...(19): siRNA sense strand
acagaaaucauggaggaaa

SEQ ID NO: 2576432 - RNA, 19 nt, Homo sapiens
  misc_RNA (1)...(19): siRNA sense strand
aaguaugacaggagguuca

SEQ ID NO: 2576433 - RNA, 19 nt, Homo sapiens
  misc_RNA (1)...(19): siRNA sense strand
cuuucaagcagaugccaua

SEQ ID NO: 2576434 - RNA, 19 nt, Homo sapiens
  misc_RNA (1)...(19): siRNA sense strand
cugcauaucugcuagggau

SEQ ID NO: 2576435 - RNA, 19 nt, Homo sapiens
  misc_RNA (1)...(19): siRNA sense strand
auuaaaggcagaacaggaa

SEQ ID NO: 2576436 - RNA, 19 nt, Homo sapiens
  misc_RNA (1)...(19): siRNA sense strand
acguagagcaggccuguua

SEQ ID NO: 2576437 - RNA, 19 nt, Homo sapiens
  misc_RNA (1)...(19): siRNA sense strand
ucauagagaacaaagugaa

SEQ ID NO: 2576438 - RNA, 19 nt, Homo sapiens
  misc_RNA (1)...(19): siRNA sense strand
ccaaugaccuugugagcac

SEQ ID NO: 2576439 - RNA, 19 nt, Homo sapiens
  misc_RNA (1)...(19): siRNA sense strand
agcaagaguaugacaguuu

SEQ ID NO: 2576440 - RNA, 19 nt, Homo sapiens
  misc_RNA (1)...(19): siRNA sense strand
aggagaagacccagaagca

SEQ ID NO: 2576441 - RNA, 19 nt, Homo sapiens
  misc_RNA (1)...(19): siRNA sense strand
uggagaaagaccaugaaga

SEQ ID NO: 2576442 - RNA, 19 nt, Homo sapiens
  misc_RNA (1)...(19): siRNA sense strand
ccuaugacauggauggcuu

SEQ ID NO: 2576443 - RNA, 19 nt, Homo sapiens
  misc_RNA (1)...(19): siRNA sense strand
ggaaagcaggguaaagcau

SEQ ID NO: 2576444 - RNA, 19 nt, Homo sapiens
  misc_RNA (1)...(19): siRNA sense strand
cggucaacauggacagcga

SEQ ID NO: 2576445 - RNA, 19 nt, Homo sapiens
  misc_RNA (1)...(19): siRNA sense strand
agaagagauacauggauga

SEQ ID NO: 2576446 - RNA, 19 nt, Homo sapiens
  misc_RNA (1)...(19): siRNA sense strand
agaaggagagaaggagaaa

SEQ ID NO: 2576447 - RNA, 19 nt, Homo sapiens
  misc_RNA (1)...(19): siRNA sense strand
cggaagcaaaauaaagaaa

SEQ ID NO: 2576448 - RNA, 19 nt, Homo sapiens
  misc_RNA (1)...(19): siRNA sense strand
ggagagaaggagaaacagu

SEQ ID NO: 2576449 - RNA, 19 nt, Homo sapiens
  misc_RNA (1)...(19): siRNA sense strand
ggcagaacaggaagaauau

SEQ ID NO: 2576450 - RNA, 19 nt, Homo sapiens
  misc_RNA (1)...(19): siRNA sense strand
auggauggcuuuugugaaa

SEQ ID NO: 2576451 - RNA, 19 nt, Homo sapiens
  misc_RNA (1)...(19): siRNA sense strand
agugagaagagcuggcuau

SEQ ID NO: 2576452 - RNA, 19 nt, Homo sapiens
  misc_RNA (1)...(19): siRNA sense strand
gguagauuccaucaauaaa

SEQ ID NO: 2576453 - RNA, 19 nt, Homo sapiens
  misc_RNA (1)...(19): siRNA sense strand
ggagaagacccagaagcaa

SEQ ID NO: 2576454 - RNA, 19 nt, Homo sapiens
  misc_RNA (1)...(19): siRNA sense strand
aagaagaagaagagagaaa

SEQ ID NO: 2576455 - RNA, 19 nt, Homo sapiens
  misc_RNA (1)...(19): siRNA sense strand
gcagaaaggcugaggcgua

SEQ ID NO: 2576456 - RNA, 19 nt, Homo sapiens
  misc_RNA (1)...(19): siRNA sense strand
agauggaagcaaagagaaa

SEQ ID NO: 2576457 - RNA, 19 nt, Homo sapiens
  misc_RNA (1)...(19): siRNA sense strand
cugcagaagaggacaguaa

SEQ ID NO: 2576458 - RNA, 19 nt, Homo sapiens
  misc_RNA (1)...(19): siRNA sense strand
agaagaagagagaaagaaa

SEQ ID NO: 2576459 - RNA, 19 nt, Homo sapiens
  misc_RNA (1)...(19): siRNA sense strand
gguuguaaucugaagaaua

SEQ ID NO: 2576460 - RNA, 19 nt, Homo sapiens
  misc_RNA (1)...(19): siRNA sense strand
cuaagaacaagaagagaaa

SEQ ID NO: 2576461 - RNA, 19 nt, Homo sapiens
  misc_RNA (1)...(19): siRNA sense strand
ccuagaagccuuuggaaau

SEQ ID NO: 2576462 - RNA, 19 nt, Homo sapiens
  misc_RNA (1)...(19): siRNA sense strand
gguuaaaagcucagaggaa

SEQ ID NO: 2576463 - RNA, 19 nt, Homo sapiens
  misc_RNA (1)...(19): siRNA sense strand
gaagaaaggaagaggagga

SEQ ID NO: 2576464 - RNA, 19 nt, Homo sapiens
  misc_RNA (1)...(19): siRNA sense strand
aagccaaauuagugggaau

SEQ ID NO: 2576465 - RNA, 19 nt, Homo sapiens
  misc_RNA (1)...(19): siRNA sense strand
ccucagugcauuacagaaa

SEQ ID NO: 2576466 - RNA, 19 nt, Homo sapiens
  misc_RNA (1)...(19): siRNA sense strand
aggaacaaauccagaaaga

SEQ ID NO: 2576467 - RNA, 19 nt, Homo sapiens
  misc_RNA (1)...(19): siRNA sense strand
acaagaagaagaagagaga

SEQ ID NO: 2576468 - RNA, 19 nt, Homo sapiens
  misc_RNA (1)...(19): siRNA sense strand
acaaagaaacugacaaaca

SEQ ID NO: 2576469 - RNA, 19 nt, Homo sapiens
  misc_RNA (1)...(19): siRNA sense strand
auaugugaauccagagaua

SEQ ID NO: 2576470 - RNA, 19 nt, Homo sapiens
  misc_RNA (1)...(19): siRNA sense strand
gcauaacaguuuugaacaa

SEQ ID NO: 2576471 - RNA, 19 nt, Homo sapiens
  misc_RNA (1)...(19): siRNA sense strand
ucuaagaacaagaagagaa

SEQ ID NO: 2576472 - RNA, 19 nt, Homo sapiens
  misc_RNA (1)...(19): siRNA sense strand
ugaaaugaaccgacagcaa

SEQ ID NO: 2576473 - RNA, 19 nt, Homo sapiens
  misc_RNA (1)...(19): siRNA sense strand
aggaaaaucucuugggaca

SEQ ID NO: 2576474 - RNA, 19 nt, Homo sapiens
  misc_RNA (1)...(19): siRNA sense strand
aggaacaguuauaaaggua

SEQ ID NO: 2576475 - RNA, 19 nt, Homo sapiens
  misc_RNA (1)...(19): siRNA sense strand
aaggcaaagaggaaagaaa

SEQ ID NO: 2576476 - RNA, 19 nt, Homo sapiens
  misc_RNA (1)...(19): siRNA sense strand
aggcaaagaggaaagaaau

SEQ ID NO: 2576477 - RNA, 19 nt, Homo sapiens
  misc_RNA (1)...(19): siRNA sense strand
caccaaaggaacaguuaua

SEQ ID NO: 2576478 - RNA, 19 nt, Homo sapiens
  misc_RNA (1)...(19): siRNA sense strand
uugaguacuuugagcauaa

SEQ ID NO: 2576479 - RNA, 19 nt, Homo sapiens
  misc_RNA (1)...(19): siRNA sense strand
gagaaaacaagaagaagaa

SEQ ID NO: 2576480 - RNA, 19 nt, Homo sapiens
  misc_RNA (1)...(19): siRNA sense strand
ggcaaagaggaaagaaauu

SEQ ID NO: 2576481 - RNA, 19 nt, Homo sapiens
  misc_RNA (1)...(19): siRNA sense strand
gugcugaauuacuggguuu

SEQ ID NO: 2576482 - RNA, 19 nt, Homo sapiens
  misc_RNA (1)...(19): siRNA sense strand
auggaaauaugcagaacua

SEQ ID NO: 2576483 - RNA, 19 nt, Homo sapiens
  misc_RNA (1)...(19): siRNA sense strand
acagaauuguugaagcuaa

SEQ ID NO: 2576484 - RNA, 19 nt, Homo sapiens
  misc_RNA (1)...(19): siRNA sense strand
caauaauagcagucgauuu

SEQ ID NO: 2576485 - RNA, 19 nt, Homo sapiens
  misc_RNA (1)...(19): siRNA sense strand
uagcagucgauuugggaaa

SEQ ID NO: 2576486 - RNA, 19 nt, Homo sapiens
  misc_RNA (1)...(19): siRNA sense strand
uguucaaggcaaagaggaa

SEQ ID NO: 2576487 - RNA, 19 nt, Homo sapiens
  misc_RNA (1)...(19): siRNA sense strand
aagcugaaguggaggcaca

SEQ ID NO: 2576488 - RNA, 19 nt, Homo sapiens
  misc_RNA (1)...(19): siRNA sense strand
gcuuggaaaucuaagaaca

SEQ ID NO: 2576489 - RNA, 19 nt, Homo sapiens
  misc_RNA (1)...(19): siRNA sense strand
ugaaaguggagcaagcaaa

SEQ ID NO: 2576490 - RNA, 19 nt, Homo sapiens
  misc_RNA (1)...(19): siRNA sense strand
gaagaagagagaaagaaaa

SEQ ID NO: 2576491 - RNA, 19 nt, Homo sapiens
  misc_RNA (1)...(19): siRNA sense strand
gcuucaucagcgugggaaa

SEQ ID NO: 2576492 - RNA, 19 nt, Homo sapiens
  misc_RNA (1)...(19): siRNA sense strand
gaagaaauggaaaaggaaa

SEQ ID NO: 2576493 - RNA, 19 nt, Homo sapiens
  misc_RNA (1)...(19): siRNA sense strand
agaagaauuucauaggaga

SEQ ID NO: 2576494 - RNA, 19 nt, Homo sapiens
  misc_RNA (1)...(19): siRNA sense strand
cuuggaaaucuaagaacaa

SEQ ID NO: 2576495 - RNA, 19 nt, Homo sapiens
  misc_RNA (1)...(19): siRNA sense strand
cugcucagucuuuggaaua

SEQ ID NO: 2576496 - RNA, 19 nt, Homo sapiens
  misc_RNA (1)...(19): siRNA sense strand
agguuuagguguuaaugaa

SEQ ID NO: 2576497 - RNA, 19 nt, Homo sapiens
  misc_RNA (1)...(19): siRNA sense strand
gaauuucauaggagacuaa

SEQ ID NO: 2576498 - RNA, 19 nt, Homo sapiens
  misc_RNA (1)...(19): siRNA sense strand
guauuuaaaugaagccaca

SEQ ID NO: 2576499 - RNA, 19 nt, Homo sapiens
  misc_RNA (1)...(19): siRNA sense strand
ggaucuguguucaaggcaa

SEQ ID NO: 2576500 - RNA, 19 nt, Homo sapiens
  misc_RNA (1)...(19): siRNA sense strand
gcauugauggucugguuaa

SEQ ID NO: 2576501 - RNA, 19 nt, Homo sapiens
  misc_RNA (1)...(19): siRNA sense strand
gaggaaaggcggaugaaac

SEQ ID NO: 2576502 - RNA, 19 nt, Homo sapiens
  misc_RNA (1)...(19): siRNA sense strand
ccgcaaaaguccugaguac

SEQ ID NO: 2576503 - RNA, 19 nt, Homo sapiens
  misc_RNA (1)...(19): siRNA sense strand
guguguugaaagauggaaa

SEQ ID NO: 2576504 - RNA, 19 nt, Homo sapiens
  misc_RNA (1)...(19): siRNA sense strand
gcagaagaggacaguaaaa

SEQ ID NO: 2576505 - RNA, 19 nt, Homo sapiens
  misc_RNA (1)...(19): siRNA sense strand
ucgauauaguaaagacaga

SEQ ID NO: 2576506 - RNA, 19 nt, Homo sapiens
  misc_RNA (1)...(19): siRNA sense strand
cgaauguggcuuugcaaga

SEQ ID NO: 2576507 - RNA, 19 nt, Homo sapiens
  misc_RNA (1)...(19): siRNA sense strand
cgacagaaggaggaggaau

SEQ ID NO: 2576508 - RNA, 19 nt, Homo sapiens
  misc_RNA (1)...(19): siRNA sense strand
gccaaagaaaugucagaau

SEQ ID NO: 2576509 - RNA, 19 nt, Homo sapiens
  misc_RNA (1)...(19): siRNA sense strand
agagaaaacaagaagaaga

SEQ ID NO: 2576510 - RNA, 19 nt, Homo sapiens
  misc_RNA (1)...(19): siRNA sense strand
ugacagaauuguugaagcu

SEQ ID NO: 2576511 - RNA, 19 nt, Homo sapiens
  misc_RNA (1)...(19): siRNA sense strand
gaggcguauucaagaagaa

SEQ ID NO: 2576512 - RNA, 19 nt, Homo sapiens
  misc_RNA (1)...(19): siRNA sense strand
gccaagacaguuugaagaa

SEQ ID NO: 2576513 - RNA, 19 nt, Homo sapiens
  misc_RNA (1)...(19): siRNA sense strand
uccuagaagccuuuggaaa

SEQ ID NO: 2576514 - RNA, 19 nt, Homo sapiens
  misc_RNA (1)...(19): siRNA sense strand
gcacuagauacuuugcuaa

SEQ ID NO: 2576515 - RNA, 19 nt, Homo sapiens
  misc_RNA (1)...(19): siRNA sense strand
gggcaaaggaagauggaau

SEQ ID NO: 2576516 - RNA, 19 nt, Homo sapiens
  misc_RNA (1)...(19): siRNA sense strand
caucaugagcgaagggaaa

SEQ ID NO: 2576517 - RNA, 19 nt, Homo sapiens
  misc_RNA (1)...(19): siRNA sense strand
gugugaagccaaagggaaa

SEQ ID NO: 2576518 - RNA, 19 nt, Homo sapiens
  misc_RNA (1)...(19): siRNA sense strand
ccaauuauuuacugggcaa

SEQ ID NO: 2576519 - RNA, 19 nt, Homo sapiens
  misc_RNA (1)...(19): siRNA sense strand
gaaggaagaugaugggaca

SEQ ID NO: 2576520 - RNA, 19 nt, Homo sapiens
  misc_RNA (1)...(19): siRNA sense strand
gcuaaaucaaguagagaga

SEQ ID NO: 2576521 - RNA, 19 nt, Homo sapiens
  misc_RNA (1)...(19): siRNA sense strand
caucugugguuguggcaaa

SEQ ID NO: 2576522 - RNA, 19 nt, Homo sapiens
  misc_RNA (1)...(19): siRNA sense strand
cggauuuacuauuggaaga

SEQ ID NO: 2576523 - RNA, 19 nt, Homo sapiens
  misc_RNA (1)...(19): siRNA sense strand
aggcaaugcaaguaacaaa

SEQ ID NO: 2576524 - RNA, 19 nt, Homo sapiens
  misc_RNA (1)...(19): siRNA sense strand
ccgaguggucaaugggaaa

SEQ ID NO: 2576525 - RNA, 19 nt, Homo sapiens
  misc_RNA (1)...(19): siRNA sense strand
aagucaaauuacagaggaa

SEQ ID NO: 2576526 - RNA, 19 nt, Homo sapiens
  misc_RNA (1)...(19): siRNA sense strand
ccucuaaugaauauggaua

SEQ ID NO: 2576527 - RNA, 19 nt, Homo sapiens
  misc_RNA (1)...(19): siRNA sense strand
caaguaacaaagaggaauu

SEQ ID NO: 2576528 - RNA, 19 nt, Homo sapiens
  misc_RNA (1)...(19): siRNA sense strand
gugguaagaaagagaaaga

SEQ ID NO: 2576529 - RNA, 19 nt, Homo sapiens
  misc_RNA (1)...(19): siRNA sense strand
ccuuaaaguaucagccaau

SEQ ID NO: 2576530 - RNA, 19 nt, Homo sapiens
  misc_RNA (1)...(19): siRNA sense strand
gcugcuaauuugagugaca

SEQ ID NO: 2576531 - RNA, 19 nt, Homo sapiens
  misc_RNA (1)...(19): siRNA sense strand
ccauuguggaccaaagaaa

SEQ ID NO: 2576532 - RNA, 19 nt, Homo sapiens
  misc_RNA (1)...(19): siRNA sense strand
cuuuaauacuccagaagga

SEQ ID NO: 2576533 - RNA, 19 nt, Homo sapiens
  misc_RNA (1)...(19): siRNA sense strand
aagaaacaagggugguaaa

SEQ ID NO: 2576534 - RNA, 19 nt, Homo sapiens
  misc_RNA (1)...(19): siRNA sense strand
agaggaauuaagaggaaau

SEQ ID NO: 2576535 - RNA, 19 nt, Homo sapiens
  misc_RNA (1)...(19): siRNA sense strand
auggauauuuacuggcaaa

SEQ ID NO: 2576536 - RNA, 19 nt, Homo sapiens
  misc_RNA (1)...(19): siRNA sense strand
aauuagggauggcgaagaa

SEQ ID NO: 2576537 - RNA, 19 nt, Homo sapiens
  misc_RNA (1)...(19): siRNA sense strand
aagggaaagcugagaccua

SEQ ID NO: 2576538 - RNA, 19 nt, Homo sapiens
  misc_RNA (1)...(19): siRNA sense strand
cagcuguagucaugggaca

SEQ ID NO: 2576539 - RNA, 19 nt, Homo sapiens
  misc_RNA (1)...(19): siRNA sense strand
ccuacaaggcuaucggauu

SEQ ID NO: 2576540 - RNA, 19 nt, Homo sapiens
  misc_RNA (1)...(19): siRNA sense strand
cagacgucacauugagaaa

SEQ ID NO: 2576541 - RNA, 19 nt, Homo sapiens
  misc_RNA (1)...(19): siRNA sense strand
cagugguaagaaagagaaa

SEQ ID NO: 2576542 - RNA, 19 nt, Homo sapiens
  misc_RNA (1)...(19): siRNA sense strand
cguuaaacagcccgaauau

SEQ ID NO: 2576543 - RNA, 19 nt, Homo sapiens
  misc_RNA (1)...(19): siRNA sense strand
gaggacaccuacaaggcua

SEQ ID NO: 2576544 - RNA, 19 nt, Homo sapiens
  misc_RNA (1)...(19): siRNA sense strand
cagaaggcaaugcaaguaa

SEQ ID NO: 2576545 - RNA, 19 nt, Homo sapiens
  misc_RNA (1)...(19): siRNA sense strand
aaacgaaagcucagaggca

SEQ ID NO: 2576546 - RNA, 19 nt, Homo sapiens
  misc_RNA (1)...(19): siRNA sense strand
gugcaaugccucuaaugaa

SEQ ID NO: 2576547 - RNA, 19 nt, Homo sapiens
  misc_RNA (1)...(19): siRNA sense strand
gagaauacagugaugcaga

SEQ ID NO: 2576548 - RNA, 19 nt, Homo sapiens
  misc_RNA (1)...(19): siRNA sense strand
guggaugaauugaaugaca

SEQ ID NO: 2576549 - RNA, 19 nt, Homo sapiens
  misc_RNA (1)...(19): siRNA sense strand
cugcagagcuaauggcaac

SEQ ID NO: 2576550 - RNA, 19 nt, Homo sapiens
  misc_RNA (1)...(19): siRNA sense strand
gcaaagugaaacaugauca

SEQ ID NO: 2576551 - RNA, 19 nt, Homo sapiens
  misc_RNA (1)...(19): siRNA sense strand
ucgaauaugaagaugcaau

SEQ ID NO: 2576552 - RNA, 19 nt, Homo sapiens
  misc_RNA (1)...(19): siRNA sense strand
gacgaaagccucagaacca

SEQ ID NO: 2576553 - RNA, 19 nt, Homo sapiens
  misc_RNA (1)...(19): siRNA sense strand
uuucaaagacuuccacaaa

SEQ ID NO: 2576554 - RNA, 19 nt, Homo sapiens
  misc_RNA (1)...(19): siRNA sense strand
caagaaagaucaagugcag

SEQ ID NO: 2576555 - RNA, 19 nt, Homo sapiens
  misc_RNA (1)...(19): siRNA sense strand
uuguaaaugugcuggcuga

SEQ ID NO: 2576556 - RNA, 19 nt, Homo sapiens
  misc_RNA (1)...(19): siRNA sense strand
caguuaaagaaaaggaaga

SEQ ID NO: 2576557 - RNA, 19 nt, Homo sapiens
  misc_RNA (1)...(19): siRNA sense strand
uaauuaacaucaugagcga

SEQ ID NO: 2576558 - RNA, 19 nt, Homo sapiens
  misc_RNA (1)...(19): siRNA sense strand
gagcaguauuugacgaaag

SEQ ID NO: 2576559 - RNA, 19 nt, Homo sapiens
  misc_RNA (1)...(19): siRNA sense strand
uggaagacccagaguucau

SEQ ID NO: 2576560 - RNA, 19 nt, Homo sapiens
  misc_RNA (1)...(19): siRNA sense strand
acuuagaacugacagauca

SEQ ID NO: 2576561 - RNA, 19 nt, Homo sapiens
  misc_RNA (1)...(19): siRNA sense strand
ggguuaauggccaguucaa

SEQ ID NO: 2576562 - RNA, 19 nt, Homo sapiens
  misc_RNA (1)...(19): siRNA sense strand
acaaacaucagcaggauca

SEQ ID NO: 2576563 - RNA, 19 nt, Homo sapiens
  misc_RNA (1)...(19): siRNA sense strand
aauccagugugaagccaaa

SEQ ID NO: 2576564 - RNA, 19 nt, Homo sapiens
  misc_RNA (1)...(19): siRNA sense strand
caaaaggacaguacaggaa

SEQ ID NO: 2576565 - RNA, 19 nt, Homo sapiens
  misc_RNA (1)...(19): siRNA sense strand
guggaugaagcgauggcaa

SEQ ID NO: 2576566 - RNA, 19 nt, Homo sapiens
  misc_RNA (1)...(19): siRNA sense strand
agaagaaacaaggguggua

SEQ ID NO: 2576567 - RNA, 19 nt, Homo sapiens
  misc_RNA (1)...(19): siRNA sense strand
gaacgaacgcggagcugca

SEQ ID NO: 2576568 - RNA, 19 nt, Homo sapiens
  misc_RNA (1)...(19): siRNA sense strand
ugcaaguaacaaagaggaa

SEQ ID NO: 2576569 - RNA, 19 nt, Homo sapiens
  misc_RNA (1)...(19): siRNA sense strand
aguaacaacuguggaugaa

SEQ ID NO: 2576570 - RNA, 19 nt, Homo sapiens
  misc_RNA (1)...(19): siRNA sense strand
ugaugggacauuuggagaa

SEQ ID NO: 2576571 - RNA, 19 nt, Homo sapiens
  misc_RNA (1)...(19): siRNA sense strand
caguggaugaauugaauga

SEQ ID NO: 2576572 - RNA, 19 nt, Homo sapiens
  misc_RNA (1)...(19): siRNA sense strand
gcaaguaacaaagaggaau

SEQ ID NO: 2576573 - RNA, 19 nt, Homo sapiens
  misc_RNA (1)...(19): siRNA sense strand
aagaggaauuaagaggaaa

SEQ ID NO: 2576574 - RNA, 19 nt, Homo sapiens
  misc_RNA (1)...(19): siRNA sense strand
guuaacaaauggaguccca

SEQ ID NO: 2576575 - RNA, 19 nt, Homo sapiens
  misc_RNA (1)...(19): siRNA sense strand
auaaauuagggauggcgaa

SEQ ID NO: 2576576 - RNA, 19 nt, Homo sapiens
  misc_RNA (1)...(19): siRNA sense strand
agaacaagaaggagcagaa

SEQ ID NO: 2576577 - RNA, 19 nt, Homo sapiens
  misc_RNA (1)...(19): siRNA sense strand
gaaauuaaccucagccaca

SEQ ID NO: 2576578 - RNA, 19 nt, Homo sapiens
  misc_RNA (1)...(19): siRNA sense strand
ccaaauauuccgaugcaca

SEQ ID NO: 2576579 - RNA, 19 nt, Homo sapiens
  misc_RNA (1)...(19): siRNA sense strand
ucaugagagcccagaacaa

SEQ ID NO: 2576580 - RNA, 19 nt, Homo sapiens
  misc_RNA (1)...(19): siRNA sense strand
acgaagcacuaauggucaa

SEQ ID NO: 2576581 - RNA, 19 nt, Homo sapiens
  misc_RNA (1)...(19): siRNA sense strand
agucaaaguacauugccaa

SEQ ID NO: 2576582 - RNA, 19 nt, Homo sapiens
  misc_RNA (1)...(19): siRNA sense strand
agugaaugcuucuguccaa

SEQ ID NO: 2576583 - RNA, 19 nt, Homo sapiens
  misc_RNA (1)...(19): siRNA sense strand
uggucaaacaauacaacua

SEQ ID NO: 2576584 - RNA, 19 nt, Homo sapiens
  misc_RNA (1)...(19): siRNA sense strand
cugcaaauucauucaucaa

SEQ ID NO: 2576585 - RNA, 19 nt, Homo sapiens
  misc_RNA (1)...(19): siRNA sense strand
acaacuucaucuagagcau

SEQ ID NO: 2576586 - RNA, 19 nt, Homo sapiens
  misc_RNA (1)...(19): siRNA sense strand
cuucauacucuaagaaugu

SEQ ID NO: 2576587 - RNA, 19 nt, Homo sapiens
  misc_RNA (1)...(19): siRNA sense strand
gggaugaagacuaugacca

SEQ ID NO: 2576588 - RNA, 19 nt, Homo sapiens
  misc_RNA (1)...(19): siRNA sense strand
agaugaugaugaugaaagu

SEQ ID NO: 2576589 - RNA, 19 nt, Homo sapiens
  misc_RNA (1)...(19): siRNA sense strand
acaaauugaagcaagcauu

SEQ ID NO: 2576590 - RNA, 19 nt, Homo sapiens
  misc_RNA (1)...(19): siRNA sense strand
agacuaugaccaagagcca

SEQ ID NO: 2576591 - RNA, 19 nt, Homo sapiens
  misc_RNA (1)...(19): siRNA sense strand
uaagaaugucacacaacaa

SEQ ID NO: 2576592 - RNA, 19 nt, Homo sapiens
  misc_RNA (1)...(19): siRNA sense strand
cugcaguaacagauuagaa

SEQ ID NO: 2576593 - RNA, 19 nt, Homo sapiens
  misc_RNA (1)...(19): siRNA sense strand
ugaugaugaaagugaagau

SEQ ID NO: 2576594 - RNA, 19 nt, Homo sapiens
  misc_RNA (1)...(19): siRNA sense strand
ccagaugaugauuaccaaa

SEQ ID NO: 2576595 - RNA, 19 nt, Homo sapiens
  misc_RNA (1)...(19): siRNA sense strand
gcuauggaugggcuaguaa

SEQ ID NO: 2576596 - RNA, 19 nt, Homo sapiens
  misc_RNA (1)...(19): siRNA sense strand
gaaacuuaucagugggaug

SEQ ID NO: 2576597 - RNA, 19 nt, Homo sapiens
  misc_RNA (1)...(19): siRNA sense strand
gagucaaaguacauugcca

SEQ ID NO: 2576598 - RNA, 19 nt, Homo sapiens
  misc_RNA (1)...(19): siRNA sense strand
aagaaggagcagaagggca

SEQ ID NO: 2576599 - RNA, 19 nt, Homo sapiens
  misc_RNA (1)...(19): siRNA sense strand
gaugauuaccaaacaggau

SEQ ID NO: 2576600 - RNA, 19 nt, Homo sapiens
  misc_RNA (1)...(19): siRNA sense strand
caagaaugucugagggcau

SEQ ID NO: 2576601 - RNA, 19 nt, Homo sapiens
  misc_RNA (1)...(19): siRNA sense strand
uggaagaaugcaagaacau

SEQ ID NO: 2576602 - RNA, 19 nt, Homo sapiens
  misc_RNA (1)...(19): siRNA sense strand
agcucaaugcugugaauaa

SEQ ID NO: 2576603 - RNA, 19 nt, Homo sapiens
  misc_RNA (1)...(19): siRNA sense strand
cugaggaagaugaagaaca

SEQ ID NO: 2576604 - RNA, 19 nt, Homo sapiens
  misc_RNA (1)...(19): siRNA sense strand
guacaugcacuuugggcuu

SEQ ID NO: 2576605 - RNA, 19 nt, Homo sapiens
  misc_RNA (1)...(19): siRNA sense strand
agauaaugcaaacaggauu

SEQ ID NO: 2576606 - RNA, 19 nt, Homo sapiens
  misc_RNA (1)...(19): siRNA sense strand
uggaagaagauccuggaau

SEQ ID NO: 2576607 - RNA, 19 nt, Homo sapiens
  misc_RNA (1)...(19): siRNA sense strand
acacaaugaagaaaguaca

SEQ ID NO: 2576608 - RNA, 19 nt, Homo sapiens
  misc_RNA (1)...(19): siRNA sense strand
uugugaagaugguccgaau

SEQ ID NO: 2576609 - RNA, 19 nt, Homo sapiens
  misc_RNA (1)...(19): siRNA sense strand
augcugauucugaggaaga

SEQ ID NO: 2576610 - RNA, 19 nt, Homo sapiens
  misc_RNA (1)...(19): siRNA sense strand
agacacuggaagaaugcaa

SEQ ID NO: 2576611 - RNA, 19 nt, Homo sapiens
  misc_RNA (1)...(19): siRNA sense strand
gugcauucaaggcggauga

SEQ ID NO: 2576612 - RNA, 19 nt, Homo sapiens
  misc_RNA (1)...(19): siRNA sense strand
augugaaggaaaucagaau

SEQ ID NO: 2576613 - RNA, 19 nt, Homo sapiens
  misc_RNA (1)...(19): siRNA sense strand
uguacaagagauaaugcaa

SEQ ID NO: 2576614 - RNA, 19 nt, Homo sapiens
  misc_RNA (1)...(19): siRNA sense strand
acaacauugcaacaagaaa

SEQ ID NO: 2576615 - RNA, 19 nt, Homo sapiens
  misc_RNA (1)...(19): siRNA sense strand
ugaagaaaguacaugcacu

SEQ ID NO: 2576616 - RNA, 19 nt, Homo sapiens
  misc_RNA (1)...(19): siRNA sense strand
auucugaggaagaugaaga

SEQ ID NO: 2576617 - RNA, 19 nt, Homo sapiens
  misc_RNA (1)...(19): siRNA sense strand
cauuaaaggauguggacaa

SEQ ID NO: 2576618 - RNA, 19 nt, Homo sapiens
  misc_RNA (1)...(19): siRNA sense strand
uugaagaauuugagagcaa

SEQ ID NO: 2576619 - RNA, 19 nt, Homo sapiens
  misc_RNA (1)...(19): siRNA sense strand
ccaaagaggagaaggccaa

SEQ ID NO: 2576620 - RNA, 19 nt, Homo sapiens
  misc_RNA (1)...(19): siRNA sense strand
cggaacagaucgagaaaau

SEQ ID NO: 2576621 - RNA, 19 nt, Homo sapiens
  misc_RNA (1)...(19): siRNA sense strand
agaaggaagcagaggaaaa

SEQ ID NO: 2576622 - RNA, 19 nt, Homo sapiens
  misc_RNA (1)...(19): siRNA sense strand
ccgcagaggagcagcaaaa

SEQ ID NO: 2576623 - RNA, 19 nt, Homo sapiens
  misc_RNA (1)...(19): siRNA sense strand
cggaaguggugcacaucaa

SEQ ID NO: 2576624 - RNA, 19 nt, Homo sapiens
  misc_RNA (1)...(19): siRNA sense strand
gagaauguauagacggaca

SEQ ID NO: 2576625 - RNA, 19 nt, Homo sapiens
  misc_RNA (1)...(19): siRNA sense strand
gaaucaagucaauggaaca

SEQ ID NO: 2576626 - RNA, 19 nt, Homo sapiens
  misc_RNA (1)...(19): siRNA sense strand
agaugauucacaagaguaa

SEQ ID NO: 2576627 - RNA, 19 nt, Homo sapiens
  misc_RNA (1)...(19): siRNA sense strand
cuucagugguagaucuuaa

SEQ ID NO: 2576628 - RNA, 19 nt, Homo sapiens
  misc_RNA (1)...(19): siRNA sense strand
agacagacaagaaggauca

SEQ ID NO: 2576629 - RNA, 19 nt, Homo sapiens
  misc_RNA (1)...(19): siRNA sense strand
gagagaauguauagacgga

SEQ ID NO: 2576630 - RNA, 19 nt, Homo sapiens
  misc_RNA (1)...(19): siRNA sense strand
ugcaagaugacgaggaaau

SEQ ID NO: 2576631 - RNA, 19 nt, Homo sapiens
  misc_RNA (1)...(19): siRNA sense strand
aaggaugacuggagggagu

SEQ ID NO: 2576632 - RNA, 19 nt, Homo sapiens
  misc_RNA (1)...(19): siRNA sense strand
caucaaacaugguuggacu

SEQ ID NO: 2576633 - RNA, 19 nt, Homo sapiens
  misc_RNA (1)...(19): siRNA sense strand
aggagaaggccaagaagga

SEQ ID NO: 2576634 - RNA, 19 nt, Homo sapiens
  misc_RNA (1)...(19): siRNA sense strand
cggacaugaccgagaagau

SEQ ID NO: 2576635 - RNA, 19 nt, Homo sapiens
  misc_RNA (1)...(19): siRNA sense strand
cuggagaaacuaagaauca

SEQ ID NO: 2576636 - RNA, 19 nt, Homo sapiens
  misc_RNA (1)...(19): siRNA sense strand
cucucaaacuggugggaca

SEQ ID NO: 2576637 - RNA, 19 nt, Homo sapiens
  misc_RNA (1)...(19): siRNA sense strand
gaggaugagcucagugaca

SEQ ID NO: 2576638 - RNA, 19 nt, Homo sapiens
  misc_RNA (1)...(19): siRNA sense strand
ggaugagcucagugacauu

SEQ ID NO: 2576639 - RNA, 19 nt, Homo sapiens
  misc_RNA (1)...(19): siRNA sense strand
acaauuagagagaggggaa

SEQ ID NO: 2576640 - RNA, 19 nt, Homo sapiens
  misc_RNA (1)...(19): siRNA sense strand
uggaagugggauacagcaa

SEQ ID NO: 2576641 - RNA, 19 nt, Homo sapiens
  misc_RNA (1)...(19): siRNA sense strand
uggaggaguucuucagaca

SEQ ID NO: 2576642 - RNA, 19 nt, Homo sapiens
  misc_RNA (1)...(19): siRNA sense strand
caucaggagaacagcaaca

SEQ ID NO: 2576643 - RNA, 19 nt, Homo sapiens
  misc_RNA (1)...(19): siRNA sense strand
gggaugaugcucaggagga

SEQ ID NO: 2576644 - RNA, 19 nt, Homo sapiens
  misc_RNA (1)...(19): siRNA sense strand
cagcuguuauugaggcauu

SEQ ID NO: 2576645 - RNA, 19 nt, Homo sapiens
  misc_RNA (1)...(19): siRNA sense strand
ccgagaagucaucaggaga

SEQ ID NO: 2576646 - RNA, 19 nt, Homo sapiens
  misc_RNA (1)...(19): siRNA sense strand
gcuggagaucuuugcuaua

SEQ ID NO: 2576647 - RNA, 19 nt, Homo sapiens
  misc_RNA (1)...(19): siRNA sense strand
agaaaacgucccagagauu

SEQ ID NO: 2576648 - RNA, 19 nt, Homo sapiens
  misc_RNA (1)...(19): siRNA sense strand
aggcccuggaagugggaua

SEQ ID NO: 2576649 - RNA, 19 nt, Homo sapiens
  misc_RNA (1)...(19): siRNA sense strand
gggacaggacagaggcguu

SEQ ID NO: 2576650 - RNA, 19 nt, Homo sapiens
  misc_RNA (1)...(19): siRNA sense strand
ugucaagaccucugguuca

SEQ ID NO: 2576651 - RNA, 19 nt, Homo sapiens
  misc_RNA (1)...(19): siRNA sense strand
aaaggaaauggaagccaaa

SEQ ID NO: 2576652 - RNA, 19 nt, Homo sapiens
  misc_RNA (1)...(19): siRNA sense strand
augacgaggaaaugaauau

SEQ ID NO: 2576653 - RNA, 19 nt, Homo sapiens
  misc_RNA (1)...(19): siRNA sense strand
ccgagaagauugugagucc

SEQ ID NO: 2576654 - RNA, 19 nt, Homo sapiens
  misc_RNA (1)...(19): siRNA sense strand
ggauacagcaagcacaaaa

SEQ ID NO: 2576655 - RNA, 19 nt, Homo sapiens
  misc_RNA (1)...(19): siRNA sense strand
cgucagaugccaagcgauc

SEQ ID NO: 2576656 - RNA, 19 nt, Homo sapiens
  misc_RNA (1)...(19): siRNA sense strand
gugacuucaaagaugguaa

SEQ ID NO: 2576657 - RNA, 19 nt, Homo sapiens
  misc_RNA (1)...(19): siRNA sense strand
gauuacggucuuuggucaa

SEQ ID NO: 2576658 - RNA, 19 nt, Homo sapiens
  misc_RNA (1)...(19): siRNA sense strand
gggaagcuucagugguaga

SEQ ID NO: 2576659 - RNA, 19 nt, Homo sapiens
  misc_RNA (1)...(19): siRNA sense strand
ucugcaagaugacgaggaa

SEQ ID NO: 2576660 - RNA, 19 nt, Homo sapiens
  misc_RNA (1)...(19): siRNA sense strand
cuucagacagggugacaga

SEQ ID NO: 2576661 - RNA, 19 nt, Homo sapiens
  misc_RNA (1)...(19): siRNA sense strand
gagaagauugugaguccau

SEQ ID NO: 2576662 - RNA, 19 nt, Homo sapiens
  misc_RNA (1)...(19): siRNA sense strand
ugggauacagcaagcacaa

SEQ ID NO: 2576663 - RNA, 19 nt, Homo sapiens
  misc_RNA (1)...(19): siRNA sense strand
aggccaagaaggaagcaga

SEQ ID NO: 2576664 - RNA, 19 nt, Homo sapiens
  misc_RNA (1)...(19): siRNA sense strand
ccaagaaggaagcagagga

SEQ ID NO: 2576665 - RNA, 19 nt, Homo sapiens
  misc_RNA (1)...(19): siRNA sense strand
aggagaacagcaacagaau

SEQ ID NO: 2576666 - RNA, 19 nt, Homo sapiens
  misc_RNA (1)...(19): siRNA sense strand
ccaacaaaucaaagcaaug

SEQ ID NO: 2576667 - RNA, 19 nt, Homo sapiens
  misc_RNA (1)...(19): siRNA sense strand
cgaugaaaccucucaaacu

SEQ ID NO: 2576668 - RNA, 19 nt, Homo sapiens
  misc_RNA (1)...(19): siRNA sense strand
aaaaggaaauggaagccaa

SEQ ID NO: 2576669 - RNA, 19 nt, Homo sapiens
  misc_RNA (1)...(19): siRNA sense strand
agaaggcgcaucuggcaaa

SEQ ID NO: 2576670 - RNA, 19 nt, Homo sapiens
  misc_RNA (1)...(19): siRNA sense strand
aggggaagcuucaguggua

SEQ ID NO: 2576671 - RNA, 19 nt, Homo sapiens
  misc_RNA (1)...(19): siRNA sense strand
aagaugacgaggaaaugaa

SEQ ID NO: 2576672 - RNA, 19 nt, Homo sapiens
  misc_RNA (1)...(19): siRNA sense strand
ccguugacuauaagagcuu

SEQ ID NO: 2576673 - RNA, 19 nt, Homo sapiens
  misc_RNA (1)...(19): siRNA sense strand
gugcacaucaaucgggaga

SEQ ID NO: 2576674 - RNA, 19 nt, Homo sapiens
  misc_RNA (1)...(19): siRNA sense strand
ugacuucaaagaugguaaa

SEQ ID NO: 2576675 - RNA, 19 nt, Homo sapiens
  misc_RNA (1)...(19): siRNA sense strand
cagaugauucacaagagua

SEQ ID NO: 2576676 - RNA, 19 nt, Homo sapiens
  misc_RNA (1)...(19): siRNA sense strand
ugaaaagccaaaagccuua

SEQ ID NO: 2576677 - RNA, 19 nt, Homo sapiens
  misc_RNA (1)...(19): siRNA sense strand
gucaauggaacacgggcaa

SEQ ID NO: 2576678 - RNA, 19 nt, Homo sapiens
  misc_RNA (1)...(19): siRNA sense strand
uggaacacgggcaaacaaa

SEQ ID NO: 2576679 - RNA, 19 nt, Homo sapiens
  misc_RNA (1)...(19): siRNA sense strand
ugggauauuuguggagaga

SEQ ID NO: 2576680 - RNA, 19 nt, Homo sapiens
  misc_RNA (1)...(19): siRNA sense strand
aggauaaagagguggugua

SEQ ID NO: 2576681 - RNA, 19 nt, Homo sapiens
  misc_RNA (1)...(19): siRNA sense strand
acuuaagccgaguaaauaa

SEQ ID NO: 2576682 - RNA, 19 nt, Homo sapiens
  misc_RNA (1)...(19): siRNA sense strand
gugaaaaugacaugcgauu

SEQ ID NO: 2576683 - RNA, 19 nt, Homo sapiens
  misc_RNA (1)...(19): siRNA sense strand
agacaagcagguugacaau

SEQ ID NO: 2576684 - RNA, 19 nt, Homo sapiens
  misc_RNA (1)...(19): siRNA sense strand
aucaaaggcuccuggaaca

SEQ ID NO: 2576685 - RNA, 19 nt, Homo sapiens
  misc_RNA (1)...(19): siRNA sense strand
ccacugaggaugagaggcu

SEQ ID NO: 2576686 - RNA, 19 nt, Homo sapiens
  misc_RNA (1)...(19): siRNA sense strand
ccuaauaagccuguagaca

SEQ ID NO: 2576687 - RNA, 19 nt, Homo sapiens
  misc_RNA (1)...(19): siRNA sense strand
gggcuggauauguuggauu

SEQ ID NO: 2576688 - RNA, 19 nt, Homo sapiens
  misc_RNA (1)...(19): siRNA sense strand
ucacuaugucugaugggua

SEQ ID NO: 2576689 - RNA, 19 nt, Homo sapiens
  misc_RNA (1)...(19): siRNA sense strand
gguuaucauggaagaccua

SEQ ID NO: 2576690 - RNA, 19 nt, Homo sapiens
  misc_RNA (1)...(19): siRNA sense strand
gcuuaguuauucuuggaga

SEQ ID NO: 2576691 - RNA, 19 nt, Homo sapiens
  misc_RNA (1)...(19): siRNA sense strand
cuuaagccgaguaaauaaa

SEQ ID NO: 2576692 - RNA, 19 nt, Homo sapiens
  misc_RNA (1)...(19): siRNA sense strand
aggaaaguggaauuuguaa

SEQ ID NO: 2576693 - RNA, 19 nt, Homo sapiens
  misc_RNA (1)...(19): siRNA sense strand
gaauguaagcacacggacu

SEQ ID NO: 2576694 - RNA, 19 nt, Homo sapiens
  misc_RNA (1)...(19): siRNA sense strand
acuugaaucucauggagga

SEQ ID NO: 2576695 - RNA, 19 nt, Homo sapiens
  misc_RNA (1)...(19): siRNA sense strand
guauaaugaggcaacaaaa

SEQ ID NO: 2576696 - RNA, 19 nt, Homo sapiens
  misc_RNA (1)...(19): siRNA sense strand
uggugaacaaagaugauau

SEQ ID NO: 2576697 - RNA, 19 nt, Homo sapiens
  misc_RNA (1)...(19): siRNA sense strand
accuauauuagaaggagua

SEQ ID NO: 2576698 - RNA, 19 nt, Homo sapiens
  misc_RNA (1)...(19): siRNA sense strand
cuaauggaggaaaguggaa

SEQ ID NO: 2576699 - RNA, 19 nt, Homo sapiens
  misc_RNA (1)...(19): siRNA sense strand
gauaguggccacauugcaa

SEQ ID NO: 2576700 - RNA, 19 nt, Homo sapiens
  misc_RNA (1)...(19): siRNA sense strand
aauggaggaaaguggaauu

SEQ ID NO: 2576701 - RNA, 19 nt, Homo sapiens
  misc_RNA (1)...(19): siRNA sense strand
uggcagugggagugagaua

SEQ ID NO: 2576702 - RNA, 19 nt, Homo sapiens
  misc_RNA (1)...(19): siRNA sense strand
gugcaaaacaccacagaaa

SEQ ID NO: 2576703 - RNA, 19 nt, Homo sapiens
  misc_RNA (1)...(19): siRNA sense strand
gaucaaaucagaaaggaca

SEQ ID NO: 2576704 - RNA, 19 nt, Homo sapiens
  misc_RNA (1)...(19): siRNA sense strand
cccuauacuuuaaaggaau

SEQ ID NO: 2576705 - RNA, 19 nt, Homo sapiens
  misc_RNA (1)...(19): siRNA sense strand
cuuuaaaggaaucugggaa

SEQ ID NO: 2576706 - RNA, 19 nt, Homo sapiens
  misc_RNA (1)...(19): siRNA sense strand
ugggagugagauagauaua

SEQ ID NO: 2576707 - RNA, 19 nt, Homo sapiens
  misc_RNA (1)...(19): siRNA sense strand
acaucaauucuuagugcaa

SEQ ID NO: 2576708 - RNA, 19 nt, Homo sapiens
  misc_RNA (1)...(19): siRNA sense strand
aagucaacccugagcagua

SEQ ID NO: 2576709 - RNA, 19 nt, Homo sapiens
  misc_RNA (1)...(19): siRNA sense strand
gcccuggaguugagcaaaa

SEQ ID NO: 2576710 - RNA, 19 nt, Homo sapiens
  misc_RNA (1)...(19): siRNA sense strand
agugggagugagauagaua

SEQ ID NO: 2576711 - RNA, 19 nt, Homo sapiens
  misc_RNA (1)...(19): siRNA sense strand
ggaaaauggaauucaacuu

SEQ ID NO: 2576712 - RNA, 19 nt, Homo sapiens
  misc_RNA (1)...(19): siRNA sense strand
ugagcaacucggaagaaau

SEQ ID NO: 2576713 - RNA, 19 nt, Homo sapiens
  misc_RNA (1)...(19): siRNA sense strand
ccaaugcgauauauggaga

SEQ ID NO: 2576714 - RNA, 19 nt, Homo sapiens
  misc_RNA (1)...(19): siRNA sense strand
cgauauauggagagaaaac

SEQ ID NO: 2576715 - RNA, 19 nt, Homo sapiens
  misc_RNA (1)...(19): siRNA sense strand
aguuaugaucucaagucaa

SEQ ID NO: 2576716 - RNA, 19 nt, Homo sapiens
  misc_RNA (1)...(19): siRNA sense strand
acauuaaugggcuggaaca

SEQ ID NO: 2576717 - RNA, 19 nt, Homo sapiens
  misc_RNA (1)...(19): siRNA sense strand
ccaaguucaagcuggaaga

SEQ ID NO: 2576718 - RNA, 19 nt, Homo sapiens
  misc_RNA (1)...(19): siRNA sense strand
agagaaaacguaugcauuu

SEQ ID NO: 2576719 - RNA, 19 nt, Homo sapiens
  misc_RNA (1)...(19): siRNA sense strand
uggaaaaggccaucaccua

SEQ ID NO: 2576720 - RNA, 19 nt, Homo sapiens
  misc_RNA (1)...(19): siRNA sense strand
gugagauagauauacgaau

SEQ ID NO: 2576721 - RNA, 19 nt, Homo sapiens
  misc_RNA (1)...(19): siRNA sense strand
ucaagcuggaagacaguua

SEQ ID NO: 2576722 - RNA, 19 nt, Homo sapiens
  misc_RNA (1)...(19): siRNA sense strand
aggcuuuuguggaaauaaa

SEQ ID NO: 2576723 - RNA, 19 nt, Homo sapiens
  misc_RNA (1)...(19): siRNA sense strand
gaacauauuuauuggugga

SEQ ID NO: 2576724 - RNA, 19 nt, Homo sapiens
  misc_RNA (1)...(19): siRNA sense strand
gugugaaaguagcagaaau

SEQ ID NO: 2576725 - RNA, 19 nt, Homo sapiens
  misc_RNA (1)...(19): siRNA sense strand
agcagaaauuacagagcua

SEQ ID NO: 2576726 - RNA, 19 nt, Homo sapiens
  misc_RNA (1)...(19): siRNA sense strand
agauagugaagaagaagaa

SEQ ID NO: 2576727 - RNA, 19 nt, Homo sapiens
  misc_RNA (1)...(19): siRNA sense strand
uggaaagaugucuaagaaa

SEQ ID NO: 2576728 - RNA, 19 nt, Homo sapiens
  misc_RNA (1)...(19): siRNA sense strand
uauugaaagcuuuggagaa

SEQ ID NO: 2576729 - RNA, 19 nt, Homo sapiens
  misc_RNA (1)...(19): siRNA sense strand
ccucggauguagaagaaaa

SEQ ID NO: 2576730 - RNA, 19 nt, Homo sapiens
  misc_RNA (1)...(19): siRNA sense strand
gugaagaagaagaaaugau

SEQ ID NO: 2576731 - RNA, 19 nt, Homo sapiens
  misc_RNA (1)...(19): siRNA sense strand
agaagaaaucauugcugaa

SEQ ID NO: 2576732 - RNA, 19 nt, Homo sapiens
  misc_RNA (1)...(19): siRNA sense strand
cagaagaaaucauugcuga

SEQ ID NO: 2576733 - RNA, 19 nt, Homo sapiens
  misc_RNA (1)...(19): siRNA sense strand
cugagaaggaagaugauga

SEQ ID NO: 2576734 - RNA, 19 nt, Homo sapiens
  misc_RNA (1)...(19): siRNA sense strand
aaucaaaggaucacagcau

SEQ ID NO: 2576735 - RNA, 19 nt, Homo sapiens
  misc_RNA (1)...(19): siRNA sense strand
cucagauagugaagaagaa

SEQ ID NO: 2576736 - RNA, 19 nt, Homo sapiens
  misc_RNA (1)...(19): siRNA sense strand
gacaagaauccaaagaaaa

SEQ ID NO: 2576737 - RNA, 19 nt, Homo sapiens
  misc_RNA (1)...(19): siRNA sense strand
ucccaaugaacgagaagaa

SEQ ID NO: 2576738 - RNA, 19 nt, Homo sapiens
  misc_RNA (1)...(19): siRNA sense strand
ugaugaaggcgguggugau

SEQ ID NO: 2576739 - RNA, 19 nt, Homo sapiens
  misc_RNA (1)...(19): siRNA sense strand
aauucgaaguguauagaca

SEQ ID NO: 2576740 - RNA, 19 nt, Homo sapiens
  misc_RNA (1)...(19): siRNA sense strand
aaggaaagaagguggaaag

SEQ ID NO: 2576741 - RNA, 19 nt, Homo sapiens
  misc_RNA (1)...(19): siRNA sense strand
uugaagacucugagaagga

SEQ ID NO: 2576742 - RNA, 19 nt, Homo sapiens
  misc_RNA (1)...(19): siRNA sense strand
cagauagugaagaagaaga

SEQ ID NO: 2576743 - RNA, 19 nt, Homo sapiens
  misc_RNA (1)...(19): siRNA sense strand
guauacaccugaagagcgu

SEQ ID NO: 2576744 - RNA, 19 nt, Homo sapiens
  misc_RNA (1)...(19): siRNA sense strand
acucauggaaagaugucua

SEQ ID NO: 2576745 - RNA, 19 nt, Homo sapiens
  misc_RNA (1)...(19): siRNA sense strand
uugaaucgacucauggaaa

SEQ ID NO: 2576746 - RNA, 19 nt, Homo sapiens
  misc_RNA (1)...(19): siRNA sense strand
acucugagaaggaagauga

SEQ ID NO: 2576747 - RNA, 19 nt, Homo sapiens
  misc_RNA (1)...(19): siRNA sense strand
ggaagaugaugaaggcggu

SEQ ID NO: 2576748 - RNA, 19 nt, Homo sapiens
  misc_RNA (1)...(19): siRNA sense strand
augaacaaacaucgagaga

SEQ ID NO: 2576749 - RNA, 19 nt, Homo sapiens
  misc_RNA (1)...(19): siRNA sense strand
uggugauugccaugaacaa

SEQ ID NO: 2576750 - RNA, 19 nt, Homo sapiens
  misc_RNA (1)...(19): siRNA sense strand
cuguguuguugcuggugaa

SEQ ID NO: 2576751 - RNA, 19 nt, Homo sapiens
  misc_RNA (1)...(19): siRNA sense strand
auagcaaaucaaaggauca

SEQ ID NO: 2576752 - RNA, 19 nt, Homo sapiens
  misc_RNA (1)...(19): siRNA sense strand
aauuggagagggaguagaa

SEQ ID NO: 2576753 - RNA, 19 nt, Homo sapiens
  misc_RNA (1)...(19): siRNA sense strand
agaugaaguaacacuguau

SEQ ID NO: 2576754 - RNA, 19 nt, Homo sapiens
  misc_RNA (1)...(19): siRNA sense strand
aaagaagagagcugccaau

SEQ ID NO: 2576755 - RNA, 19 nt, Homo sapiens
  misc_RNA (1)...(19): siRNA sense strand
uggcaaggauauuggaaaa

SEQ ID NO: 2576756 - RNA, 19 nt, Homo sapiens
  misc_RNA (1)...(19): siRNA sense strand
ggaaaauguggaagugaaa

SEQ ID NO: 2576757 - RNA, 19 nt, Homo sapiens
  misc_RNA (1)...(19): siRNA sense strand
gagaauugaaggaaggaga

SEQ ID NO: 2576758 - RNA, 19 nt, Homo sapiens
  misc_RNA (1)...(19): siRNA sense strand
gaacuagacccaucaaaua

SEQ ID NO: 2576759 - RNA, 19 nt, Homo sapiens
  misc_RNA (1)...(19): siRNA sense strand
gagaaaguauuuaugguga

SEQ ID NO: 2576760 - RNA, 19 nt, Homo sapiens
  misc_RNA (1)...(19): siRNA sense strand
guggcaaggauauuggaaa

SEQ ID NO: 2576761 - RNA, 19 nt, Homo sapiens
  misc_RNA (1)...(19): siRNA sense strand
uggaaaauguggaagugaa

SEQ ID NO: 2576762 - RNA, 19 nt, Homo sapiens
  misc_RNA (1)...(19): siRNA sense strand
ucaaauuggcagggagcaa

SEQ ID NO: 2576763 - RNA, 19 nt, Homo sapiens
  misc_RNA (1)...(19): siRNA sense strand
ggggauagcaccagaagau

SEQ ID NO: 2576764 - RNA, 19 nt, Homo sapiens
  misc_RNA (1)...(19): siRNA sense strand
ccgcagagcucaaggaugg

SEQ ID NO: 2576765 - RNA, 19 nt, Homo sapiens
  misc_RNA (1)...(19): siRNA sense strand
aggcacagaaagauaaaga

SEQ ID NO: 2576766 - RNA, 19 nt, Homo sapiens
  misc_RNA (1)...(19): siRNA sense strand
ccaucaaauaccaaagcau

SEQ ID NO: 2576767 - RNA, 19 nt, Homo sapiens
  misc_RNA (1)...(19): siRNA sense strand
gggaggguuuacugagcau

SEQ ID NO: 2576768 - RNA, 19 nt, Homo sapiens
  misc_RNA (1)...(19): siRNA sense strand
ucuuagaauuguuugcaga

SEQ ID NO: 2576769 - RNA, 19 nt, Homo sapiens
  misc_RNA (1)...(19): siRNA sense strand
uggacacacgacugggaaa

SEQ ID NO: 2576770 - RNA, 19 nt, Homo sapiens
  misc_RNA (1)...(19): siRNA sense strand
auguggaagugaaagguga

SEQ ID NO: 2576771 - RNA, 19 nt, Homo sapiens
  misc_RNA (1)...(19): siRNA sense strand
cagaacugggagauggcua

SEQ ID NO: 2576772 - RNA, 19 nt, Homo sapiens
  misc_RNA (1)...(19): siRNA sense strand
aagauaaagagaaggcagu

SEQ ID NO: 2576773 - RNA, 19 nt, Homo sapiens
  misc_RNA (1)...(19): siRNA sense strand
ugaacuagacccaucaaau

SEQ ID NO: 2576774 - RNA, 19 nt, Homo sapiens
  misc_RNA (1)...(19): siRNA sense strand
agcaauugacaguuguuua

SEQ ID NO: 2576775 - RNA, 19 nt, Homo sapiens
  misc_RNA (1)...(19): siRNA sense strand
aacaaaagauaaaggcaca

SEQ ID NO: 2576776 - RNA, 19 nt, Homo sapiens
  misc_RNA (1)...(19): siRNA sense strand
aauuaaaggaauaggagug

SEQ ID NO: 2576777 - RNA, 19 nt, Homo sapiens
  misc_RNA (1)...(19): siRNA sense strand
agaacugggagauggcuau

SEQ ID NO: 2576778 - RNA, 19 nt, Homo sapiens
  misc_RNA (1)...(19): siRNA sense strand
ugacaguuguuuagaggcu

SEQ ID NO: 2576779 - RNA, 19 nt, Homo sapiens
  misc_RNA (1)...(19): siRNA sense strand
agauaaagagaaggcagua

SEQ ID NO: 2576780 - RNA, 19 nt, Homo sapiens
  misc_RNA (1)...(19): siRNA sense strand
guuuacugagcauggcaaa

SEQ ID NO: 2576781 - RNA, 19 nt, Homo sapiens
  misc_RNA (1)...(19): siRNA sense strand
aggaaauccacaaggacca

SEQ ID NO: 2576782 - RNA, 19 nt, Homo sapiens
  misc_RNA (1)...(19): siRNA sense strand
aggaaagccacaaggacca

SEQ ID NO: 2576783 - RNA, 19 nt, Homo sapiens
  misc_RNA (1)...(19): siRNA sense strand
aggaaagccacaaggacca

SEQ ID NO: 2576784 - RNA, 19 nt, Homo sapiens
  misc_RNA (1)...(19): siRNA sense strand
aggaaagccacaaggacca

SEQ ID NO: 2576785 - RNA, 19 nt, Homo sapiens
  misc_RNA (1)...(19): siRNA sense strand
aggaaagccacaaggacca

SEQ ID NO: 2576786 - RNA, 19 nt, Homo sapiens
  misc_RNA (1)...(19): siRNA sense strand
aggaaagccacaaggacca

SEQ ID NO: 2576787 - RNA, 19 nt, Homo sapiens
  misc_RNA (1)...(19): siRNA sense strand
aggaaagccacaaggacca

SEQ ID NO: 2576788 - RNA, 19 nt, Homo sapiens
  misc_RNA (1)...(19): siRNA sense strand
aggaaagccacaaggacca

SEQ ID NO: 2576789 - RNA, 19 nt, Homo sapiens
  misc_RNA (1)...(19): siRNA sense strand
aggaaagccacaaggacca

SEQ ID NO: 2576790 - RNA, 19 nt, Homo sapiens
  misc_RNA (1)...(19): siRNA sense strand
aggaaagccacaaggacca

SEQ ID NO: 2576791 - RNA, 19 nt, Homo sapiens
  misc_RNA (1)...(19): siRNA sense strand
aggaaagccacaaggacca

SEQ ID NO: 2576792 - RNA, 19 nt, Homo sapiens
  misc_RNA (1)...(19): siRNA sense strand
aggaaagccacaaggacca

SEQ ID NO: 2576793 - RNA, 19 nt, Homo sapiens
  misc_RNA (1)...(19): siRNA sense strand
ggaagaaucucccucccua

SEQ ID NO: 2576794 - RNA, 19 nt, Homo sapiens
  misc_RNA (1)...(19): siRNA sense strand
cccacaaggaggcaacaaa

SEQ ID NO: 2576795 - RNA, 19 nt, Homo sapiens
  misc_RNA (1)...(19): siRNA sense strand
aggaaaaccacaaggacca

SEQ ID NO: 2576796 - RNA, 19 nt, Homo sapiens
  misc_RNA (1)...(19): siRNA sense strand
cccacaaggaggcaacaaa

SEQ ID NO: 2576797 - RNA, 19 nt, Homo sapiens
  misc_RNA (1)...(19): siRNA sense strand
ccucccuaauagcaggaaa

SEQ ID NO: 2576798 - RNA, 19 nt, Homo sapiens
  misc_RNA (1)...(19): siRNA sense strand
aggaaauccacaaggacca

SEQ ID NO: 2576799 - RNA, 19 nt, Homo sapiens
  misc_RNA (1)...(19): siRNA sense strand
aggaaagccacaaggacca

SEQ ID NO: 2576800 - RNA, 19 nt, Homo sapiens
  misc_RNA (1)...(19): siRNA sense strand
aggaaagccacaaggacca

SEQ ID NO: 2576801 - RNA, 19 nt, Homo sapiens
  misc_RNA (1)...(19): siRNA sense strand
aggaaagccacaaggacca

SEQ ID NO: 2576802 - RNA, 19 nt, Homo sapiens
  misc_RNA (1)...(19): siRNA sense strand
aggaaagccacaaggacca

SEQ ID NO: 2576803 - RNA, 19 nt, Homo sapiens
  misc_RNA (1)...(19): siRNA sense strand
aggaaagccacaaggacca

SEQ ID NO: 2576804 - RNA, 19 nt, Homo sapiens
  misc_RNA (1)...(19): siRNA sense strand
ggaagaaucucccucccua

SEQ ID NO: 2576805 - RNA, 19 nt, Homo sapiens
  misc_RNA (1)...(19): siRNA sense strand
cccacaaggaggcaacaaa

SEQ ID NO: 2576806 - RNA, 19 nt, Homo sapiens
  misc_RNA (1)...(19): siRNA sense strand
aggaaaaccacaaggacca

SEQ ID NO: 2576807 - RNA, 19 nt, Homo sapiens
  misc_RNA (1)...(19): siRNA sense strand
cccacaaggaggcaacaaa

SEQ ID NO: 2576808 - RNA, 19 nt, Homo sapiens
  misc_RNA (1)...(19): siRNA sense strand
ccucccuaauagcaggaaa

SEQ ID NO: 2576809 - RNA, 19 nt, Homo sapiens
  misc_RNA (1)...(19): siRNA sense strand
aggaaauccacaaggacca

SEQ ID NO: 2576810 - RNA, 19 nt, Homo sapiens
  misc_RNA (1)...(19): siRNA sense strand
aggaaagccacaaggacca

SEQ ID NO: 2576811 - RNA, 19 nt, Homo sapiens
  misc_RNA (1)...(19): siRNA sense strand
aggaaagccacaaggacca

SEQ ID NO: 2576812 - RNA, 19 nt, Homo sapiens
  misc_RNA (1)...(19): siRNA sense strand
aggaaagccacaaggacca

SEQ ID NO: 2576813 - RNA, 19 nt, Homo sapiens
  misc_RNA (1)...(19): siRNA sense strand
aggaaagccacaaggacca

SEQ ID NO: 2576814 - RNA, 19 nt, Homo sapiens
  misc_RNA (1)...(19): siRNA sense strand
ggaagaaucucccucccua

SEQ ID NO: 2576815 - RNA, 19 nt, Homo sapiens
  misc_RNA (1)...(19): siRNA sense strand
cccacaaggaggcaacaaa

SEQ ID NO: 2576816 - RNA, 19 nt, Homo sapiens
  misc_RNA (1)...(19): siRNA sense strand
aggaaaaccacaaggacca

SEQ ID NO: 2576817 - RNA, 19 nt, Homo sapiens
  misc_RNA (1)...(19): siRNA sense strand
ccucccuaauagcaggaaa

SEQ ID NO: 2576818 - RNA, 19 nt, Homo sapiens
  misc_RNA (1)...(19): siRNA sense strand
cagugaaaauagagaacaa

SEQ ID NO: 2576819 - RNA, 19 nt, Homo sapiens
  misc_RNA (1)...(19): siRNA sense strand
ccuucauccucuugagaau

SEQ ID NO: 2576820 - RNA, 19 nt, Homo sapiens
  misc_RNA (1)...(19): siRNA sense strand
ccuccaucguucugggaau

SEQ ID NO: 2576821 - RNA, 19 nt, Homo sapiens
  misc_RNA (1)...(19): siRNA sense strand
cagcaaagcagguuccaga

SEQ ID NO: 2576822 - RNA, 19 nt, Homo sapiens
  misc_RNA (1)...(19): siRNA sense strand
ccagcagugcagagaguga

SEQ ID NO: 2576823 - RNA, 19 nt, Homo sapiens
  misc_RNA (1)...(19): siRNA sense strand
ucacagaugaggaggucca

SEQ ID NO: 2576824 - RNA, 19 nt, Homo sapiens
  misc_RNA (1)...(19): siRNA sense strand
caguaucacccgaggagca

SEQ ID NO: 2576825 - RNA, 19 nt, Homo sapiens
  misc_RNA (1)...(19): siRNA sense strand
ccgaggagcaacagugagu

SEQ ID NO: 2576826 - RNA, 19 nt, Homo sapiens
  misc_RNA (1)...(19): siRNA sense strand
gagcauggcgaguggggau

SEQ ID NO: 2576827 - RNA, 19 nt, Homo sapiens
  misc_RNA (1)...(19): siRNA sense strand
cugacaaacgggagcagca

SEQ ID NO: 2576828 - RNA, 19 nt, Homo sapiens
  misc_RNA (1)...(19): siRNA sense strand
gaagcuuaccugugggacu

SEQ ID NO: 2576829 - RNA, 19 nt, Homo sapiens
  misc_RNA (1)...(19): siRNA sense strand
aagaauuggaucagagauu

SEQ ID NO: 2576830 - RNA, 19 nt, Homo sapiens
  misc_RNA (1)...(19): siRNA sense strand
cuaucaagguagugugcca

SEQ ID NO: 2576831 - RNA, 19 nt, Homo sapiens
  misc_RNA (1)...(19): siRNA sense strand
guggaguaacuaaggauau

SEQ ID NO: 2576832 - RNA, 19 nt, Homo sapiens
  misc_RNA (1)...(19): siRNA sense strand
gcaacuagcagucugggaa

SEQ ID NO: 2576833 - RNA, 19 nt, Homo sapiens
  misc_RNA (1)...(19): siRNA sense strand
ccauuaacuucucaggaca

SEQ ID NO: 2576834 - RNA, 19 nt, Homo sapiens
  misc_RNA (1)...(19): siRNA sense strand
aggugaaaugccugaauau

SEQ ID NO: 2576835 - RNA, 19 nt, Homo sapiens
  misc_RNA (1)...(19): siRNA sense strand
uacuauguauggaggcaaa

SEQ ID NO: 2576836 - RNA, 19 nt, Homo sapiens
  misc_RNA (1)...(19): siRNA sense strand
accuaguagcugauaaaua

SEQ ID NO: 2576837 - RNA, 19 nt, Homo sapiens
  misc_RNA (1)...(19): siRNA sense strand
cagaaguagucaugcccuu

SEQ ID NO: 2576838 - RNA, 19 nt, Homo sapiens
  misc_RNA (1)...(19): siRNA sense strand
cugauaaauacuggaagaa

SEQ ID NO: 2576839 - RNA, 19 nt, Homo sapiens
  misc_RNA (1)...(19): siRNA sense strand
cauggaacuuaaaggaacu

SEQ ID NO: 2576840 - RNA, 19 nt, Homo sapiens
  misc_RNA (1)...(19): siRNA sense strand
gguugaucauuuuggauuu

SEQ ID NO: 2576841 - RNA, 19 nt, Homo sapiens
  misc_RNA (1)...(19): siRNA sense strand
acauccaacauuugaaaga

SEQ ID NO: 2576842 - RNA, 19 nt, Homo sapiens
  misc_RNA (1)...(19): siRNA sense strand
gcuccuuggaaguuagaca

SEQ ID NO: 2576843 - RNA, 19 nt, Homo sapiens
  misc_RNA (1)...(19): siRNA sense strand
aagaauuggaucagagauu

SEQ ID NO: 2576844 - RNA, 19 nt, Homo sapiens
  misc_RNA (1)...(19): siRNA sense strand
gcugaggaacugaaagcua

SEQ ID NO: 2576845 - RNA, 19 nt, Homo sapiens
  misc_RNA (1)...(19): siRNA sense strand
cuaucaagguagugugcca

SEQ ID NO: 2576846 - RNA, 19 nt, Homo sapiens
  misc_RNA (1)...(19): siRNA sense strand
gggauguggcugaggaacu

SEQ ID NO: 2576847 - RNA, 19 nt, Homo sapiens
  misc_RNA (1)...(19): siRNA sense strand
guggaguaacuaaggauau

SEQ ID NO: 2576848 - RNA, 19 nt, Homo sapiens
  misc_RNA (1)...(19): siRNA sense strand
gcaacuagcagucugggaa

SEQ ID NO: 2576849 - RNA, 19 nt, Homo sapiens
  misc_RNA (1)...(19): siRNA sense strand
cugaggaacugaaagcuau

SEQ ID NO: 2576850 - RNA, 19 nt, Homo sapiens
  misc_RNA (1)...(19): siRNA sense strand
ccauuaacuucucaggaca

SEQ ID NO: 2576851 - RNA, 19 nt, Homo sapiens
  misc_RNA (1)...(19): siRNA sense strand
aggugaaaugccugaauau

SEQ ID NO: 2576852 - RNA, 19 nt, Homo sapiens
  misc_RNA (1)...(19): siRNA sense strand
uacuauguauggaggcaaa

SEQ ID NO: 2576853 - RNA, 19 nt, Homo sapiens
  misc_RNA (1)...(19): siRNA sense strand
cagaaguagucaugcccuu

SEQ ID NO: 2576854 - RNA, 19 nt, Homo sapiens
  misc_RNA (1)...(19): siRNA sense strand
ucuaugacagugcgggaaa

SEQ ID NO: 2576855 - RNA, 19 nt, Homo sapiens
  misc_RNA (1)...(19): siRNA sense strand
cauggaacuuaaaggaacu

SEQ ID NO: 2576856 - RNA, 19 nt, Homo sapiens
  misc_RNA (1)...(19): siRNA sense strand
acauccaacauuugaaaga

SEQ ID NO: 2576857 - RNA, 19 nt, Homo sapiens
  misc_RNA (1)...(19): siRNA sense strand
gcuccuuggaaguuagaca

SEQ ID NO: 2576858 - RNA, 19 nt, Homo sapiens
  misc_RNA (1)...(19): siRNA sense strand
gguaauaucagauggagga

SEQ ID NO: 2576859 - RNA, 19 nt, Homo sapiens
  misc_RNA (1)...(19): siRNA sense strand
gggaaagccacaaggacca

SEQ ID NO: 2576860 - RNA, 19 nt, Homo sapiens
  misc_RNA (1)...(19): siRNA sense strand
agaugaagaugucagccaa

SEQ ID NO: 2576861 - RNA, 19 nt, Homo sapiens
  misc_RNA (1)...(19): siRNA sense strand
ggacuuagaugaagauguc

SEQ ID NO: 2576862 - RNA, 19 nt, Homo sapiens
  misc_RNA (1)...(19): siRNA sense strand
aggaaggccacaaggacca

SEQ ID NO: 2576863 - RNA, 19 nt, Homo sapiens
  misc_RNA (1)...(19): siRNA sense strand
aggaaggccacaaggacca

SEQ ID NO: 2576864 - RNA, 19 nt, Homo sapiens
  misc_RNA (1)...(19): siRNA sense strand
ugggaaaaucggagaaaau

SEQ ID NO: 2576865 - RNA, 19 nt, Homo sapiens
  misc_RNA (1)...(19): siRNA sense strand
augagcaaccaaagauaaa

SEQ ID NO: 2576866 - RNA, 19 nt, Homo sapiens
  misc_RNA (1)...(19): siRNA sense strand
ccuagucacuggaugggaa

SEQ ID NO: 2576867 - RNA, 19 nt, Homo sapiens
  misc_RNA (1)...(19): siRNA sense strand
cuaacugaagugagccaaa

SEQ ID NO: 2576868 - RNA, 19 nt, Homo sapiens
  misc_RNA (1)...(19): siRNA sense strand
agaauucagaagcaggaaa

SEQ ID NO: 2576869 - RNA, 19 nt, Homo sapiens
  misc_RNA (1)...(19): siRNA sense strand
ggaaaauuaugcuggggca

SEQ ID NO: 2576870 - RNA, 19 nt, Homo sapiens
  misc_RNA (1)...(19): siRNA sense strand
ggcaaaguuuagugaucca

SEQ ID NO: 2576871 - RNA, 19 nt, Homo sapiens
  misc_RNA (1)...(19): siRNA sense strand
cccuaauaaugcaggauga

SEQ ID NO: 2576872 - RNA, 19 nt, Homo sapiens
  misc_RNA (1)...(19): siRNA sense strand
acgaggagaccaaggaaga

SEQ ID NO: 2576873 - RNA, 19 nt, Homo sapiens
  misc_RNA (1)...(19): siRNA sense strand
auggagagguucaggcaga

SEQ ID NO: 2576874 - RNA, 19 nt, Homo sapiens
  misc_RNA (1)...(19): siRNA sense strand
aggcaacuucuguggacaa

SEQ ID NO: 2576875 - RNA, 19 nt, Homo sapiens
  misc_RNA (1)...(19): siRNA sense strand
ccaggagggagaagguaau

SEQ ID NO: 2576876 - RNA, 19 nt, Homo sapiens
  misc_RNA (1)...(19): siRNA sense strand
cuauagaggagcagauugu

SEQ ID NO: 2576877 - RNA, 19 nt, Homo sapiens
  misc_RNA (1)...(19): siRNA sense strand
aaggagaaacugaggaugu

SEQ ID NO: 2576878 - RNA, 19 nt, Homo sapiens
  misc_RNA (1)...(19): siRNA sense strand
gaugauauucuaauggaga

SEQ ID NO: 2576879 - RNA, 19 nt, Homo sapiens
  misc_RNA (1)...(19): siRNA sense strand
cugaauacgguuagaguuc

SEQ ID NO: 2576880 - RNA, 19 nt, Homo sapiens
  misc_RNA (1)...(19): siRNA sense strand
gugaagaagauguggaguc

SEQ ID NO: 2576881 - RNA, 19 nt, Homo sapiens
  misc_RNA (1)...(19): siRNA sense strand
cagauaucagcauaggaaa

SEQ ID NO: 2576882 - RNA, 19 nt, Homo sapiens
  misc_RNA (1)...(19): siRNA sense strand
gaguaaaggagcuggaguc

SEQ ID NO: 2576883 - RNA, 19 nt, Homo sapiens
  misc_RNA (1)...(19): siRNA sense strand
ccaaaaucugggagaccaa

SEQ ID NO: 2576884 - RNA, 19 nt, Homo sapiens
  misc_RNA (1)...(19): siRNA sense strand
ccagaggaacaguggggaa

SEQ ID NO: 2576885 - RNA, 19 nt, Homo sapiens
  misc_RNA (1)...(19): siRNA sense strand
ggugcuuaucucuggcaaa

SEQ ID NO: 2576886 - RNA, 19 nt, Homo sapiens
  misc_RNA (1)...(19): siRNA sense strand
gcagacagccugacagcca

SEQ ID NO: 2576887 - RNA, 19 nt, Homo sapiens
  misc_RNA (1)...(19): siRNA sense strand
acuuagugcuggagacauc

SEQ ID NO: 2576888 - RNA, 19 nt, Homo sapiens
  misc_RNA (1)...(19): siRNA sense strand
uccaggagggagaagguaa

SEQ ID NO: 2576889 - RNA, 19 nt, Homo sapiens
  misc_RNA (1)...(19): siRNA sense strand
guuccuuggcuguggcuau

SEQ ID NO: 2576890 - RNA, 19 nt, Homo sapiens
  misc_RNA (1)...(19): siRNA sense strand
cuggcuaugucuggaguaa

SEQ ID NO: 2576891 - RNA, 19 nt, Homo sapiens
  misc_RNA (1)...(19): siRNA sense strand
agauuguccuugugcugaa

SEQ ID NO: 2576892 - RNA, 19 nt, Homo sapiens
  misc_RNA (1)...(19): siRNA sense strand
ccaaauaccuguggggcuu

SEQ ID NO: 2576893 - RNA, 19 nt, Homo sapiens
  misc_RNA (1)...(19): siRNA sense strand
gcugagagcuacaagcauc

SEQ ID NO: 2576894 - RNA, 19 nt, Homo sapiens
  misc_RNA (1)...(19): siRNA sense strand
acauaggaguaaaggagcu

SEQ ID NO: 2576895 - RNA, 19 nt, Homo sapiens
  misc_RNA (1)...(19): siRNA sense strand
gaugcgaggugcugggaac

SEQ ID NO: 2576896 - RNA, 19 nt, Homo sapiens
  misc_RNA (1)...(19): siRNA sense strand
ccuugugcugaaagcgaaa

SEQ ID NO: 2576897 - RNA, 19 nt, Homo sapiens
  misc_RNA (1)...(19): siRNA sense strand
auuuguuggcccagaggaa

SEQ ID NO: 2576898 - RNA, 19 nt, Homo sapiens
  misc_RNA (1)...(19): siRNA sense strand
ucuuucaugcugagagcua

SEQ ID NO: 2576899 - RNA, 19 nt, Homo sapiens
  misc_RNA (1)...(19): siRNA sense strand
cagaggaacaguggggaaa

SEQ ID NO: 2576900 - RNA, 19 nt, Homo sapiens
  misc_RNA (1)...(19): siRNA sense strand
gggcaugacacaaggaagc

SEQ ID NO: 2576901 - RNA, 19 nt, Homo sapiens
  misc_RNA (1)...(19): siRNA sense strand
aggaagcaauacaggaaac

SEQ ID NO: 2576902 - RNA, 19 nt, Homo sapiens
  misc_RNA (1)...(19): siRNA sense strand
cugaaggaugccaaggaga

SEQ ID NO: 2576903 - RNA, 19 nt, Homo sapiens
  misc_RNA (1)...(19): siRNA sense strand
aagaagagaugcuggccua

SEQ ID NO: 2576904 - RNA, 19 nt, Homo sapiens
  misc_RNA (1)...(19): siRNA sense strand
aggaagaggaggaggagga

SEQ ID NO: 2576905 - RNA, 19 nt, Homo sapiens
  misc_RNA (1)...(19): siRNA sense strand
gggaggaggaagaggagga

SEQ ID NO: 2576906 - RNA, 19 nt, Homo sapiens
  misc_RNA (1)...(19): siRNA sense strand
gaagugaggaggaggcaga

SEQ ID NO: 2576907 - RNA, 19 nt, Homo sapiens
  misc_RNA (1)...(19): siRNA sense strand
gcuuggaggaggaggcaga

SEQ ID NO: 2576908 - RNA, 19 nt, Homo sapiens
  misc_RNA (1)...(19): siRNA sense strand
gaggaggagaagacaggaa

SEQ ID NO: 2576909 - RNA, 19 nt, Homo sapiens
  misc_RNA (1)...(19): siRNA sense strand
aggaggaggcagagacuca

SEQ ID NO: 2576910 - RNA, 19 nt, Homo sapiens
  misc_RNA (1)...(19): siRNA sense strand
gggacgacggcaaggucaa

SEQ ID NO: 2576911 - RNA, 19 nt, Homo sapiens
  misc_RNA (1)...(19): siRNA sense strand
uguccaaguucgugugcau

SEQ ID NO: 2576912 - RNA, 19 nt, Homo sapiens
  misc_RNA (1)...(19): siRNA sense strand
aggaggaggaggaggacca

SEQ ID NO: 2576913 - RNA, 19 nt, Homo sapiens
  misc_RNA (1)...(19): siRNA sense strand
ggacaagauuacagccaag

SEQ ID NO: 2576914 - RNA, 19 nt, Homo sapiens
  misc_RNA (1)...(19): siRNA sense strand
aggaggaagaggaggagga

SEQ ID NO: 2576915 - RNA, 19 nt, Homo sapiens
  misc_RNA (1)...(19): siRNA sense strand
gcuuugugguugggagcaa

SEQ ID NO: 2576916 - RNA, 19 nt, Homo sapiens
  misc_RNA (1)...(19): siRNA sense strand
aggaggagaagacaggaaa

SEQ ID NO: 2576917 - RNA, 19 nt, Homo sapiens
  misc_RNA (1)...(19): siRNA sense strand
agagcaaacuggugcagga

SEQ ID NO: 2576918 - RNA, 19 nt, Homo sapiens
  misc_RNA (1)...(19): siRNA sense strand
caggagggcgacagagaga

SEQ ID NO: 2576919 - RNA, 19 nt, Homo sapiens
  misc_RNA (1)...(19): siRNA sense strand
cugaacuguauguggagaa

SEQ ID NO: 2576920 - RNA, 19 nt, Homo sapiens
  misc_RNA (1)...(19): siRNA sense strand
aagaggaggaggaggagga

SEQ ID NO: 2576921 - RNA, 19 nt, Homo sapiens
  misc_RNA (1)...(19): siRNA sense strand
ggaggagaagacaggaaaa

SEQ ID NO: 2576922 - RNA, 19 nt, Homo sapiens
  misc_RNA (1)...(19): siRNA sense strand
agacaggaaaagugaagua

SEQ ID NO: 2576923 - RNA, 19 nt, Homo sapiens
  misc_RNA (1)...(19): siRNA sense strand
gcaucugcuuggaggagga

SEQ ID NO: 2576924 - RNA, 19 nt, Homo sapiens
  misc_RNA (1)...(19): siRNA sense strand
gguacaacgucaagugcgu

SEQ ID NO: 2576925 - RNA, 19 nt, Homo sapiens
  misc_RNA (1)...(19): siRNA sense strand
ccucaagacuggcaggaag

SEQ ID NO: 2576926 - RNA, 19 nt, Homo sapiens
  misc_RNA (1)...(19): siRNA sense strand
gggaagaagcgggaguuca

SEQ ID NO: 2576927 - RNA, 19 nt, Homo sapiens
  misc_RNA (1)...(19): siRNA sense strand
acgccuucguucuggacaa

SEQ ID NO: 2576928 - RNA, 19 nt, Homo sapiens
  misc_RNA (1)...(19): siRNA sense strand
uggacaagauuacagccaa

SEQ ID NO: 2576929 - RNA, 19 nt, Homo sapiens
  misc_RNA (1)...(19): siRNA sense strand
uuugacagcuggaggacca

SEQ ID NO: 2576930 - RNA, 19 nt, Homo sapiens
  misc_RNA (1)...(19): siRNA sense strand
uuaucagucccgugggcaa

SEQ ID NO: 2576931 - RNA, 19 nt, Homo sapiens
  misc_RNA (1)...(19): siRNA sense strand
uggacgccauggaggaauu

SEQ ID NO: 2576932 - RNA, 19 nt, Homo sapiens
  misc_RNA (1)...(19): siRNA sense strand
uuucaaauuugcuggguac

SEQ ID NO: 2576933 - RNA, 19 nt, Homo sapiens
  misc_RNA (1)...(19): siRNA sense strand
agcaauaguuggaugggaa

SEQ ID NO: 2576934 - RNA, 19 nt, Homo sapiens
  misc_RNA (1)...(19): siRNA sense strand
gucacaaagaagagagaau

SEQ ID NO: 2576935 - RNA, 19 nt, Homo sapiens
  misc_RNA (1)...(19): siRNA sense strand
cagaaaagaccaaaggaau

SEQ ID NO: 2576936 - RNA, 19 nt, Homo sapiens
  misc_RNA (1)...(19): siRNA sense strand
aggaagccguggaggaaca

SEQ ID NO: 2576937 - RNA, 19 nt, Homo sapiens
  misc_RNA (1)...(19): siRNA sense strand
uaguaauacacgagauaga

SEQ ID NO: 2576938 - RNA, 19 nt, Homo sapiens
  misc_RNA (1)...(19): siRNA sense strand
gcagaaaagaccaaaggaa

SEQ ID NO: 2576939 - RNA, 19 nt, Homo sapiens
  misc_RNA (1)...(19): siRNA sense strand
ugccaagaaacgagggauu

SEQ ID NO: 2576940 - RNA, 19 nt, Homo sapiens
  misc_RNA (1)...(19): siRNA sense strand
acaauaucuuccuggagaa

SEQ ID NO: 2576941 - RNA, 19 nt, Homo sapiens
  misc_RNA (1)...(19): siRNA sense strand
agauaugaauggaaagucu

SEQ ID NO: 2576942 - RNA, 19 nt, Homo sapiens
  misc_RNA (1)...(19): siRNA sense strand
caucuagaggccauggaua

SEQ ID NO: 2576943 - RNA, 19 nt, Homo sapiens
  misc_RNA (1)...(19): siRNA sense strand
uggcagaaguugggagagu

SEQ ID NO: 2576944 - RNA, 19 nt, Homo sapiens
  misc_RNA (1)...(19): siRNA sense strand
aagaaugcugccaaagaua

SEQ ID NO: 2576945 - RNA, 19 nt, Homo sapiens
  misc_RNA (1)...(19): siRNA sense strand
cggugaggcccuugguaga

SEQ ID NO: 2576946 - RNA, 19 nt, Homo sapiens
  misc_RNA (1)...(19): siRNA sense strand
agaaaugaucgcaugucaa

SEQ ID NO: 2576947 - RNA, 19 nt, Homo sapiens
  misc_RNA (1)...(19): siRNA sense strand
gaagagagaauuauggagu

SEQ ID NO: 2576948 - RNA, 19 nt, Homo sapiens
  misc_RNA (1)...(19): siRNA sense strand
ccgagaaaccagggauuau

SEQ ID NO: 2576949 - RNA, 19 nt, Homo sapiens
  misc_RNA (1)...(19): siRNA sense strand
gccaaagauaugaauggaa

SEQ ID NO: 2576950 - RNA, 19 nt, Homo sapiens
  misc_RNA (1)...(19): siRNA sense strand
aaguagaacaagccaagaa

SEQ ID NO: 2576951 - RNA, 19 nt, Homo sapiens
  misc_RNA (1)...(19): siRNA sense strand
aguagaacaagccaagaaa

SEQ ID NO: 2576952 - RNA, 19 nt, Homo sapiens
  misc_RNA (1)...(19): siRNA sense strand
ugcuaagaaugcugccaaa

SEQ ID NO: 2576953 - RNA, 19 nt, Homo sapiens
  misc_RNA (1)...(19): siRNA sense strand
ggaugaugguggauacacu

SEQ ID NO: 2576954 - RNA, 19 nt, Homo sapiens
  misc_RNA (1)...(19): siRNA sense strand
ccaagaaacgagggauuau

SEQ ID NO: 2576955 - RNA, 19 nt, Homo sapiens
  misc_RNA (1)...(19): siRNA sense strand
ccucaauagagaaaccaau

SEQ ID NO: 2576956 - RNA, 19 nt, Homo sapiens
  misc_RNA (1)...(19): siRNA sense strand
aagaggaagccguggagga

SEQ ID NO: 2576957 - RNA, 19 nt, Homo sapiens
  misc_RNA (1)...(19): siRNA sense strand
augaagggcaccuggauga

SEQ ID NO: 2576958 - RNA, 19 nt, Homo sapiens
  misc_RNA (1)...(19): siRNA sense strand
augcaacuaacgauggaaa

SEQ ID NO: 2576959 - RNA, 19 nt, Homo sapiens
  misc_RNA (1)...(19): siRNA sense strand
ggcccuugguagagaucau

SEQ ID NO: 2576960 - RNA, 19 nt, Homo sapiens
  misc_RNA (1)...(19): siRNA sense strand
ggggagagucgaucugaaa

SEQ ID NO: 2576961 - RNA, 19 nt, Homo sapiens
  misc_RNA (1)...(19): siRNA sense strand
agaggaagccguggaggaa

SEQ ID NO: 2576962 - RNA, 19 nt, Homo sapiens
  misc_RNA (1)...(19): siRNA sense strand
uuaaagcaguauuugggaa

SEQ ID NO: 2576963 - RNA, 19 nt, Homo sapiens
  misc_RNA (1)...(19): siRNA sense strand
aagcaguauuugggaaaca

SEQ ID NO: 2576964 - RNA, 19 nt, Homo sapiens
  misc_RNA (1)...(19): siRNA sense strand
ggaacaagaggguggcuuc

SEQ ID NO: 2576965 - RNA, 19 nt, Homo sapiens
  misc_RNA (1)...(19): siRNA sense strand
gacaauaucuuccuggaga

SEQ ID NO: 2576966 - RNA, 19 nt, Homo sapiens
  misc_RNA (1)...(19): siRNA sense strand
agacaugaugguuaugcaa

SEQ ID NO: 2576967 - RNA, 19 nt, Homo sapiens
  misc_RNA (1)...(19): siRNA sense strand
caauaucuuccuggagaaa

SEQ ID NO: 2576968 - RNA, 19 nt, Homo sapiens
  misc_RNA (1)...(19): siRNA sense strand
uuauugugaucgugagcau

SEQ ID NO: 2576969 - RNA, 19 nt, Homo sapiens
  misc_RNA (1)...(19): siRNA sense strand
gcauggaaaagcaauaaaa

SEQ ID NO: 2576970 - RNA, 19 nt, Homo sapiens
  misc_RNA (1)...(19): siRNA sense strand
accaaugagaagaugcuua

SEQ ID NO: 2576971 - RNA, 19 nt, Homo sapiens
  misc_RNA (1)...(19): siRNA sense strand
uagagaaaccaaugagaag

SEQ ID NO: 2576972 - RNA, 19 nt, Homo sapiens
  misc_RNA (1)...(19): siRNA sense strand
cugagaucugcaagaggaa

SEQ ID NO: 2576973 - RNA, 19 nt, Homo sapiens
  misc_RNA (1)...(19): siRNA sense strand
caucuagaggccaugcaua

SEQ ID NO: 2576974 - RNA, 19 nt, Homo sapiens
  misc_RNA (1)...(19): siRNA sense strand
gauagauauggcagaaguu

SEQ ID NO: 2576975 - RNA, 19 nt, Homo sapiens
  misc_RNA (1)...(19): siRNA sense strand
agaaaagaccaaaggaauc

SEQ ID NO: 2576976 - RNA, 19 nt, Homo sapiens
  misc_RNA (1)...(19): siRNA sense strand
ggagacucgagcagauauu

SEQ ID NO: 2576977 - RNA, 19 nt, Homo sapiens
  misc_RNA (1)...(19): siRNA sense strand
ggucauucuaguugggaug

SEQ ID NO: 2576978 - RNA, 19 nt, Homo sapiens
  misc_RNA (1)...(19): siRNA sense strand
acaucuaaguggaaguucu

SEQ ID NO: 2576979 - RNA, 19 nt, Homo sapiens
  misc_RNA (1)...(19): siRNA sense strand
guggaaguucuuauagaga

SEQ ID NO: 2576980 - RNA, 19 nt, Homo sapiens
  misc_RNA (1)...(19): siRNA sense strand
auccagaggcuuugcauuu

SEQ ID NO: 2576981 - RNA, 19 nt, Homo sapiens
  misc_RNA (1)...(19): siRNA sense strand
gggaaagagacaugcgaau

SEQ ID NO: 2576982 - RNA, 19 nt, Homo sapiens
  misc_RNA (1)...(19): siRNA sense strand
aggauaugguagagggaga

SEQ ID NO: 2576983 - RNA, 19 nt, Homo sapiens
  misc_RNA (1)...(19): siRNA sense strand
uaucaaaaggagagagaaa

SEQ ID NO: 2576984 - RNA, 19 nt, Homo sapiens
  misc_RNA (1)...(19): siRNA sense strand
augcagaaacguaaagaaa

SEQ ID NO: 2576985 - RNA, 19 nt, Homo sapiens
  misc_RNA (1)...(19): siRNA sense strand
ggaagaagccuuuagccaa

SEQ ID NO: 2576986 - RNA, 19 nt, Homo sapiens
  misc_RNA (1)...(19): siRNA sense strand
gaggaaaguuacagccgaa

SEQ ID NO: 2576987 - RNA, 19 nt, Homo sapiens
  misc_RNA (1)...(19): siRNA sense strand
gagcaaugaacaugggaga

SEQ ID NO: 2576988 - RNA, 19 nt, Homo sapiens
  misc_RNA (1)...(19): siRNA sense strand
aggagguggugguggcaua

SEQ ID NO: 2576989 - RNA, 19 nt, Homo sapiens
  misc_RNA (1)...(19): siRNA sense strand
gcaaaagacaaauuggaaa

SEQ ID NO: 2576990 - RNA, 19 nt, Homo sapiens
  misc_RNA (1)...(19): siRNA sense strand
cuacauggauccacgggaa

SEQ ID NO: 2576991 - RNA, 19 nt, Homo sapiens
  misc_RNA (1)...(19): siRNA sense strand
gugaaauggaagaugccua

SEQ ID NO: 2576992 - RNA, 19 nt, Homo sapiens
  misc_RNA (1)...(19): siRNA sense strand
agggaaaggcauuguugaa

SEQ ID NO: 2576993 - RNA, 19 nt, Homo sapiens
  misc_RNA (1)...(19): siRNA sense strand
gacaaauuggaaagugaaa

SEQ ID NO: 2576994 - RNA, 19 nt, Homo sapiens
  misc_RNA (1)...(19): siRNA sense strand
ugaaauugccaaagccgaa

SEQ ID NO: 2576995 - RNA, 19 nt, Homo sapiens
  misc_RNA (1)...(19): siRNA sense strand
aagaaaggcauuugaacga

SEQ ID NO: 2576996 - RNA, 19 nt, Homo sapiens
  misc_RNA (1)...(19): siRNA sense strand
uggagaaccaggagaaguu

SEQ ID NO: 2576997 - RNA, 19 nt, Homo sapiens
  misc_RNA (1)...(19): siRNA sense strand
aguggaugaucguggaaga

SEQ ID NO: 2576998 - RNA, 19 nt, Homo sapiens
  misc_RNA (1)...(19): siRNA sense strand
uggaaagugaaauggaaga

SEQ ID NO: 2576999 - RNA, 19 nt, Homo sapiens
  misc_RNA (1)...(19): siRNA sense strand
acgacguagaagagaggaa

SEQ ID NO: 2577000 - RNA, 19 nt, Homo sapiens
  misc_RNA (1)...(19): siRNA sense strand
ucaacaaaggcaaaggauu

SEQ ID NO: 2577001 - RNA, 19 nt, Homo sapiens
  misc_RNA (1)...(19): siRNA sense strand
aagaaaugcaauugaggca

SEQ ID NO: 2577002 - RNA, 19 nt, Homo sapiens
  misc_RNA (1)...(19): siRNA sense strand
guagaagagaggaagagau

SEQ ID NO: 2577003 - RNA, 19 nt, Homo sapiens
  misc_RNA (1)...(19): siRNA sense strand
aauuaagacgcauggaaga

SEQ ID NO: 2577004 - RNA, 19 nt, Homo sapiens
  misc_RNA (1)...(19): siRNA sense strand
ugcuaaauauggagaacca

SEQ ID NO: 2577005 - RNA, 19 nt, Homo sapiens
  misc_RNA (1)...(19): siRNA sense strand
agacaaauuggaaagugaa

SEQ ID NO: 2577006 - RNA, 19 nt, Homo sapiens
  misc_RNA (1)...(19): siRNA sense strand
gugagauggaagaacaaau

SEQ ID NO: 2577007 - RNA, 19 nt, Homo sapiens
  misc_RNA (1)...(19): siRNA sense strand
gcggaggagcaaugaacau

SEQ ID NO: 2577008 - RNA, 19 nt, Homo sapiens
  misc_RNA (1)...(19): siRNA sense strand
cuguuguaauaguggauga

SEQ ID NO: 2577009 - RNA, 19 nt, Homo sapiens
  misc_RNA (1)...(19): siRNA sense strand
agaaaugcagaaacguaaa

SEQ ID NO: 2577010 - RNA, 19 nt, Homo sapiens
  misc_RNA (1)...(19): siRNA sense strand
auauggagaaccaggagaa

SEQ ID NO: 2577011 - RNA, 19 nt, Homo sapiens
  misc_RNA (1)...(19): siRNA sense strand
cugauaucacggaggauga

SEQ ID NO: 2577012 - RNA, 19 nt, Homo sapiens
  misc_RNA (1)...(19): siRNA sense strand
uggaagaagccuuuagcca

SEQ ID NO: 2577013 - RNA, 19 nt, Homo sapiens
  misc_RNA (1)...(19): siRNA sense strand
cguggaagaucuacaggga

SEQ ID NO: 2577014 - RNA, 19 nt, Homo sapiens
  misc_RNA (1)...(19): siRNA sense strand
agaauuaagacgcauggaa

SEQ ID NO: 2577015 - RNA, 19 nt, Homo sapiens
  misc_RNA (1)...(19): siRNA sense strand
ugaacaacuagaugaugaa

SEQ ID NO: 2577016 - RNA, 19 nt, Homo sapiens
  misc_RNA (1)...(19): siRNA sense strand
uugaaagggcuguuguaau

SEQ ID NO: 2577017 - RNA, 19 nt, Homo sapiens
  misc_RNA (1)...(19): siRNA sense strand
caggaagaauuaagacgca

SEQ ID NO: 2577018 - RNA, 19 nt, Homo sapiens
  misc_RNA (1)...(19): siRNA sense strand
caaucaagaaaugcagaaa

SEQ ID NO: 2577019 - RNA, 19 nt, Homo sapiens
  misc_RNA (1)...(19): siRNA sense strand
cgggaaagagacaugcgaa

SEQ ID NO: 2577020 - RNA, 19 nt, Homo sapiens
  misc_RNA (1)...(19): siRNA sense strand
ugaaagaugcaaaagacaa

SEQ ID NO: 2577021 - RNA, 19 nt, Homo sapiens
  misc_RNA (1)...(19): siRNA sense strand
ucugaugagacgacaggaa

SEQ ID NO: 2577022 - RNA, 19 nt, Homo sapiens
  misc_RNA (1)...(19): siRNA sense strand
cgauggaagucuuuggaug

SEQ ID NO: 2577023 - RNA, 19 nt, Homo sapiens
  misc_RNA (1)...(19): siRNA sense strand
ugaugagacgacaggaaga

SEQ ID NO: 2577024 - RNA, 19 nt, Homo sapiens
  misc_RNA (1)...(19): siRNA sense strand
acgugagauggaagaacaa

SEQ ID NO: 2577025 - RNA, 19 nt, Homo sapiens
  misc_RNA (1)...(19): siRNA sense strand
ggaaagugaaauggaagau

SEQ ID NO: 2577026 - RNA, 19 nt, Homo sapiens
  misc_RNA (1)...(19): siRNA sense strand
ccaaagccgaacuggauga

SEQ ID NO: 2577027 - RNA, 19 nt, Homo sapiens
  misc_RNA (1)...(19): siRNA sense strand
acaaaugaggcgccaaaga

SEQ ID NO: 2577028 - RNA, 19 nt, Homo sapiens
  misc_RNA (1)...(19): siRNA sense strand
ggaugaauucaaaagacua

SEQ ID NO: 2577029 - RNA, 19 nt, Homo sapiens
  misc_RNA (1)...(19): siRNA sense strand
auuggaaagugaaauggaa

SEQ ID NO: 2577030 - RNA, 19 nt, Homo sapiens
  misc_RNA (1)...(19): siRNA sense strand
aucaugaacaucaggcaaa

SEQ ID NO: 2577031 - RNA, 19 nt, Homo sapiens
  misc_RNA (1)...(19): siRNA sense strand
guacgaauauucucagcga

SEQ ID NO: 2577032 - RNA, 19 nt, Homo sapiens
  misc_RNA (1)...(19): siRNA sense strand
acaaucaagaaaugcagaa

SEQ ID NO: 2577033 - RNA, 19 nt, Homo sapiens
  misc_RNA (1)...(19): siRNA sense strand
gaauuaagacgcauggaag

SEQ ID NO: 2577034 - RNA, 19 nt, Homo sapiens
  misc_RNA (1)...(19): siRNA sense strand
agaaagaggaagaaggaga

SEQ ID NO: 2577035 - RNA, 19 nt, Homo sapiens
  misc_RNA (1)...(19): siRNA sense strand
aggaagaagaagaagaaaa

SEQ ID NO: 2577036 - RNA, 19 nt, Homo sapiens
  misc_RNA (1)...(19): siRNA sense strand
aggaggaagaggaggaaga

SEQ ID NO: 2577037 - RNA, 19 nt, Homo sapiens
  misc_RNA (1)...(19): siRNA sense strand
augaggaagaggaggaaga

SEQ ID NO: 2577038 - RNA, 19 nt, Homo sapiens
  misc_RNA (1)...(19): siRNA sense strand
aggaggaagaggaaggaga

SEQ ID NO: 2577039 - RNA, 19 nt, Homo sapiens
  misc_RNA (1)...(19): siRNA sense strand
aggaagaggaggaagagga

SEQ ID NO: 2577040 - RNA, 19 nt, Homo sapiens
  misc_RNA (1)...(19): siRNA sense strand
aggaagaggaggaagagga

SEQ ID NO: 2577041 - RNA, 19 nt, Homo sapiens
  misc_RNA (1)...(19): siRNA sense strand
cuggaguggaugaggaaga

SEQ ID NO: 2577042 - RNA, 19 nt, Homo sapiens
  misc_RNA (1)...(19): siRNA sense strand
aggaggacguggaggagga

SEQ ID NO: 2577043 - RNA, 19 nt, Homo sapiens
  misc_RNA (1)...(19): siRNA sense strand
aggacgaugacuugggcaa

SEQ ID NO: 2577044 - RNA, 19 nt, Homo sapiens
  misc_RNA (1)...(19): siRNA sense strand
ggaaggagaaucugaggca

SEQ ID NO: 2577045 - RNA, 19 nt, Homo sapiens
  misc_RNA (1)...(19): siRNA sense strand
uggaugaggaagaggagga

SEQ ID NO: 2577046 - RNA, 19 nt, Homo sapiens
  misc_RNA (1)...(19): siRNA sense strand
aagaggaggaagaggagga

SEQ ID NO: 2577047 - RNA, 19 nt, Homo sapiens
  misc_RNA (1)...(19): siRNA sense strand
agaccaaagucgagaugac

SEQ ID NO: 2577048 - RNA, 19 nt, Homo sapiens
  misc_RNA (1)...(19): siRNA sense strand
acaccaggagaaagaggaa

SEQ ID NO: 2577049 - RNA, 19 nt, Homo sapiens
  misc_RNA (1)...(19): siRNA sense strand
acguggaggaggaggacga

SEQ ID NO: 2577050 - RNA, 19 nt, Homo sapiens
  misc_RNA (1)...(19): siRNA sense strand
cgcaggaagaagaagaaga

SEQ ID NO: 2577051 - RNA, 19 nt, Homo sapiens
  misc_RNA (1)...(19): siRNA sense strand
ccuaugugaccaaggugaa

SEQ ID NO: 2577052 - RNA, 19 nt, Homo sapiens
  misc_RNA (1)...(19): siRNA sense strand
aggaggaggacgaugacuu

SEQ ID NO: 2577053 - RNA, 19 nt, Homo sapiens
  misc_RNA (1)...(19): siRNA sense strand
agguguucguggagcugaa

SEQ ID NO: 2577054 - RNA, 19 nt, Homo sapiens
  misc_RNA (1)...(19): siRNA sense strand
accaggagaaagaggaaga

SEQ ID NO: 2577055 - RNA, 19 nt, Homo sapiens
  misc_RNA (1)...(19): siRNA sense strand
gagcuggaguggaugagga

SEQ ID NO: 2577056 - RNA, 19 nt, Homo sapiens
  misc_RNA (1)...(19): siRNA sense strand
cgguugugcuuguggguug

SEQ ID NO: 2577057 - RNA, 19 nt, Homo sapiens
  misc_RNA (1)...(19): siRNA sense strand
ggaugaggaagaggaggaa

SEQ ID NO: 2577058 - RNA, 19 nt, Homo sapiens
  misc_RNA (1)...(19): siRNA sense strand
gaggaagaggaaggagaau

SEQ ID NO: 2577059 - RNA, 19 nt, Homo sapiens
  misc_RNA (1)...(19): siRNA sense strand
uuggaagugacgaggauga

SEQ ID NO: 2577060 - RNA, 19 nt, Homo sapiens
  misc_RNA (1)...(19): siRNA sense strand
gucaccgacuggaggacaa

SEQ ID NO: 2577061 - RNA, 19 nt, Homo sapiens
  misc_RNA (1)...(19): siRNA sense strand
ugaucuucauggagacaca

SEQ ID NO: 2577062 - RNA, 19 nt, Homo sapiens
  misc_RNA (1)...(19): siRNA sense strand
cagacguggaggaggagga

SEQ ID NO: 2577063 - RNA, 19 nt, Homo sapiens
  misc_RNA (1)...(19): siRNA sense strand
agaaagaggaagaaggaga

SEQ ID NO: 2577064 - RNA, 19 nt, Homo sapiens
  misc_RNA (1)...(19): siRNA sense strand
aggaagaagaagaagaaaa

SEQ ID NO: 2577065 - RNA, 19 nt, Homo sapiens
  misc_RNA (1)...(19): siRNA sense strand
aggaggaagaggaggaaga

SEQ ID NO: 2577066 - RNA, 19 nt, Homo sapiens
  misc_RNA (1)...(19): siRNA sense strand
augaggaagaggaggaaga

SEQ ID NO: 2577067 - RNA, 19 nt, Homo sapiens
  misc_RNA (1)...(19): siRNA sense strand
aggaggaagaggaaggaga

SEQ ID NO: 2577068 - RNA, 19 nt, Homo sapiens
  misc_RNA (1)...(19): siRNA sense strand
aggaagaggaggaagagga

SEQ ID NO: 2577069 - RNA, 19 nt, Homo sapiens
  misc_RNA (1)...(19): siRNA sense strand
aggaagaggaggaagagga

SEQ ID NO: 2577070 - RNA, 19 nt, Homo sapiens
  misc_RNA (1)...(19): siRNA sense strand
cuggaguggaugaggaaga

SEQ ID NO: 2577071 - RNA, 19 nt, Homo sapiens
  misc_RNA (1)...(19): siRNA sense strand
aggaggacguggaggagga

SEQ ID NO: 2577072 - RNA, 19 nt, Homo sapiens
  misc_RNA (1)...(19): siRNA sense strand
aggacgaugacuugggcaa

SEQ ID NO: 2577073 - RNA, 19 nt, Homo sapiens
  misc_RNA (1)...(19): siRNA sense strand
ggaaggagaaucugaggca

SEQ ID NO: 2577074 - RNA, 19 nt, Homo sapiens
  misc_RNA (1)...(19): siRNA sense strand
uggaugaggaagaggagga

SEQ ID NO: 2577075 - RNA, 19 nt, Homo sapiens
  misc_RNA (1)...(19): siRNA sense strand
aagaggaggaagaggagga

SEQ ID NO: 2577076 - RNA, 19 nt, Homo sapiens
  misc_RNA (1)...(19): siRNA sense strand
agaccaaagucgagaugac

SEQ ID NO: 2577077 - RNA, 19 nt, Homo sapiens
  misc_RNA (1)...(19): siRNA sense strand
acaccaggagaaagaggaa

SEQ ID NO: 2577078 - RNA, 19 nt, Homo sapiens
  misc_RNA (1)...(19): siRNA sense strand
acguggaggaggaggacga

SEQ ID NO: 2577079 - RNA, 19 nt, Homo sapiens
  misc_RNA (1)...(19): siRNA sense strand
cgcaggaagaagaagaaga

SEQ ID NO: 2577080 - RNA, 19 nt, Homo sapiens
  misc_RNA (1)...(19): siRNA sense strand
ccuaugugaccaaggugaa

SEQ ID NO: 2577081 - RNA, 19 nt, Homo sapiens
  misc_RNA (1)...(19): siRNA sense strand
aggaggaggacgaugacuu

SEQ ID NO: 2577082 - RNA, 19 nt, Homo sapiens
  misc_RNA (1)...(19): siRNA sense strand
agguguucguggagcugaa

SEQ ID NO: 2577083 - RNA, 19 nt, Homo sapiens
  misc_RNA (1)...(19): siRNA sense strand
accaggagaaagaggaaga

SEQ ID NO: 2577084 - RNA, 19 nt, Homo sapiens
  misc_RNA (1)...(19): siRNA sense strand
gagcuggaguggaugagga

SEQ ID NO: 2577085 - RNA, 19 nt, Homo sapiens
  misc_RNA (1)...(19): siRNA sense strand
cgguugugcuuguggguug

SEQ ID NO: 2577086 - RNA, 19 nt, Homo sapiens
  misc_RNA (1)...(19): siRNA sense strand
ggaugaggaagaggaggaa

SEQ ID NO: 2577087 - RNA, 19 nt, Homo sapiens
  misc_RNA (1)...(19): siRNA sense strand
gaggaagaggaaggagaau

SEQ ID NO: 2577088 - RNA, 19 nt, Homo sapiens
  misc_RNA (1)...(19): siRNA sense strand
uuggaagugacgaggauga

SEQ ID NO: 2577089 - RNA, 19 nt, Homo sapiens
  misc_RNA (1)...(19): siRNA sense strand
gucaccgacuggaggacaa

SEQ ID NO: 2577090 - RNA, 19 nt, Homo sapiens
  misc_RNA (1)...(19): siRNA sense strand
ugaucuucauggagacaca

SEQ ID NO: 2577091 - RNA, 19 nt, Homo sapiens
  misc_RNA (1)...(19): siRNA sense strand
cagacguggaggaggagga

SEQ ID NO: 2577092 - RNA, 19 nt, Homo sapiens
  misc_RNA (1)...(19): siRNA sense strand
uuaugaggcuggugggcau

SEQ ID NO: 2577093 - RNA, 19 nt, Homo sapiens
  misc_RNA (1)...(19): siRNA sense strand
gcaugaaacacaagggcag

SEQ ID NO: 2577094 - RNA, 19 nt, Homo sapiens
  misc_RNA (1)...(19): siRNA sense strand
ucaaacaguucaagacgca

SEQ ID NO: 2577095 - RNA, 19 nt, Homo sapiens
  misc_RNA (1)...(19): siRNA sense strand
uuaacaacuacgagcucaa

SEQ ID NO: 2577096 - RNA, 19 nt, Homo sapiens
  misc_RNA (1)...(19): siRNA sense strand
aggaauauucucagcguaa

SEQ ID NO: 2577097 - RNA, 19 nt, Homo sapiens
  misc_RNA (1)...(19): siRNA sense strand
uggaaugauaggaggacua

SEQ ID NO: 2577098 - RNA, 19 nt, Homo sapiens
  misc_RNA (1)...(19): siRNA sense strand
ggucaguucaaguagacaa

SEQ ID NO: 2577099 - RNA, 19 nt, Homo sapiens
  misc_RNA (1)...(19): siRNA sense strand
cguuguaugucgagcaguu

SEQ ID NO: 2577100 - RNA, 19 nt, Homo sapiens
  misc_RNA (1)...(19): siRNA sense strand
ccuaauacuugcuggugca

SEQ ID NO: 2577101 - RNA, 19 nt, Homo sapiens
  misc_RNA (1)...(19): siRNA sense strand
gcguaauugcuguccggaa

SEQ ID NO: 2577102 - RNA, 19 nt, Homo sapiens
  misc_RNA (1)...(19): siRNA sense strand
cagcagaaauucaggacug

SEQ ID NO: 2577103 - RNA, 19 nt, Homo sapiens
  misc_RNA (1)...(19): siRNA sense strand
ggugaauagcacagaucca

SEQ ID NO: 2577104 - RNA, 19 nt, Homo sapiens
  misc_RNA (1)...(19): siRNA sense strand
gcaucagugaaaaggaaua

SEQ ID NO: 2577105 - RNA, 19 nt, Homo sapiens
  misc_RNA (1)...(19): siRNA sense strand
caggacugggcuaaagaaa

SEQ ID NO: 2577106 - RNA, 19 nt, Homo sapiens
  misc_RNA (1)...(19): siRNA sense strand
gaaauucaggacugggcua

SEQ ID NO: 2577107 - RNA, 19 nt, Homo sapiens
  misc_RNA (1)...(19): siRNA sense strand
cauuaaugugacuggccua

SEQ ID NO: 2577108 - RNA, 19 nt, Homo sapiens
  misc_RNA (1)...(19): siRNA sense strand
uaugaguacaucaggguuu

SEQ ID NO: 2577109 - RNA, 19 nt, Homo sapiens
  misc_RNA (1)...(19): siRNA sense strand
uggauacuucucuggaaua

SEQ ID NO: 2577110 - RNA, 19 nt, Homo sapiens
  misc_RNA (1)...(19): siRNA sense strand
caaagaaaaugauuggcuu

SEQ ID NO: 2577111 - RNA, 19 nt, Homo sapiens
  misc_RNA (1)...(19): siRNA sense strand
caggaauauucucagcgua

SEQ ID NO: 2577112 - RNA, 19 nt, Homo sapiens
  misc_RNA (1)...(19): siRNA sense strand
ggguggaguguuuauaaau

SEQ ID NO: 2577113 - RNA, 19 nt, Homo sapiens
  misc_RNA (1)...(19): siRNA sense strand
auguauaagcaucagugaa

SEQ ID NO: 2577114 - RNA, 19 nt, Homo sapiens
  misc_RNA (1)...(19): siRNA sense strand
cggugaaggaugagaagaa

SEQ ID NO: 2577115 - RNA, 19 nt, Homo sapiens
  misc_RNA (1)...(19): siRNA sense strand
guucgugagcacugggaaa

SEQ ID NO: 2577116 - RNA, 19 nt, Homo sapiens
  misc_RNA (1)...(19): siRNA sense strand
gcaaacgagaagacggaga

SEQ ID NO: 2577117 - RNA, 19 nt, Homo sapiens
  misc_RNA (1)...(19): siRNA sense strand
gagagagaauccagugcga

SEQ ID NO: 2577118 - RNA, 19 nt, Homo sapiens
  misc_RNA (1)...(19): siRNA sense strand
gcgugaagaucugggacau

SEQ ID NO: 2577119 - RNA, 19 nt, Homo sapiens
  misc_RNA (1)...(19): siRNA sense strand
gccucaaaguggaguacga

SEQ ID NO: 2577120 - RNA, 19 nt, Homo sapiens
  misc_RNA (1)...(19): siRNA sense strand
gcaagugguucgugagcac

SEQ ID NO: 2577121 - RNA, 19 nt, Homo sapiens
  misc_RNA (1)...(19): siRNA sense strand
agacggagaugcagcgcca

SEQ ID NO: 2577122 - RNA, 19 nt, Homo sapiens
  misc_RNA (1)...(19): siRNA sense strand
acgagaagacggagaugca

SEQ ID NO: 2577123 - RNA, 19 nt, Homo sapiens
  misc_RNA (1)...(19): siRNA sense strand
cugaaaaugggcuggacaa

SEQ ID NO: 2577124 - RNA, 19 nt, Homo sapiens
  misc_RNA (1)...(19): siRNA sense strand
acucgaucacagagagaga

SEQ ID NO: 2577125 - RNA, 19 nt, Homo sapiens
  misc_RNA (1)...(19): siRNA sense strand
gugaugaucugguggugga

SEQ ID NO: 2577126 - RNA, 19 nt, Homo sapiens
  misc_RNA (1)...(19): siRNA sense strand
augcacaagcagacagaga

SEQ ID NO: 2577127 - RNA, 19 nt, Homo sapiens
  misc_RNA (1)...(19): siRNA sense strand
aguacgacaagcuggcaaa

SEQ ID NO: 2577128 - RNA, 19 nt, Homo sapiens
  misc_RNA (1)...(19): siRNA sense strand
uggcaaacgagaagacgga

SEQ ID NO: 2577129 - RNA, 19 nt, Homo sapiens
  misc_RNA (1)...(19): siRNA sense strand
cggguaaaccuccgggcau

SEQ ID NO: 2577130 - RNA, 19 nt, Homo sapiens
  misc_RNA (1)...(19): siRNA sense strand
gcgccaagcaggucaccau

SEQ ID NO: 2577131 - RNA, 19 nt, Homo sapiens
  misc_RNA (1)...(19): siRNA sense strand
ggaucaaagacgaauucca

SEQ ID NO: 2577132 - RNA, 19 nt, Homo sapiens
  misc_RNA (1)...(19): siRNA sense strand
ccauuagcccugacgccaa

SEQ ID NO: 2577133 - RNA, 19 nt, Homo sapiens
  misc_RNA (1)...(19): siRNA sense strand
ccagcauaucccagucuaa

SEQ ID NO: 2577134 - RNA, 19 nt, Homo sapiens
  misc_RNA (1)...(19): siRNA sense strand
gugacaggaucaaagacga

SEQ ID NO: 2577135 - RNA, 19 nt, Homo sapiens
  misc_RNA (1)...(19): siRNA sense strand
ucaccaugacggagcugaa

SEQ ID NO: 2577136 - RNA, 19 nt, Homo sapiens
  misc_RNA (1)...(19): siRNA sense strand
gcucaguaucacagccuca

SEQ ID NO: 2577137 - RNA, 19 nt, Homo sapiens
  misc_RNA (1)...(19): siRNA sense strand
guggcugagucuugugaca

SEQ ID NO: 2577138 - RNA, 19 nt, Homo sapiens
  misc_RNA (1)...(19): siRNA sense strand
ccuuggucauaacgacaaa

SEQ ID NO: 2577139 - RNA, 19 nt, Homo sapiens
  misc_RNA (1)...(19): siRNA sense strand
cccaaaaggcuguggauaa

SEQ ID NO: 2577140 - RNA, 19 nt, Homo sapiens
  misc_RNA (1)...(19): siRNA sense strand
gagacaggacaaagaacaa

SEQ ID NO: 2577141 - RNA, 19 nt, Homo sapiens
  misc_RNA (1)...(19): siRNA sense strand
ugguagugauccagggaga

SEQ ID NO: 2577142 - RNA, 19 nt, Homo sapiens
  misc_RNA (1)...(19): siRNA sense strand
ccuucaacccaguggcuua

SEQ ID NO: 2577143 - RNA, 19 nt, Homo sapiens
  misc_RNA (1)...(19): siRNA sense strand
acuccaacaccaaggauua

SEQ ID NO: 2577144 - RNA, 19 nt, Homo sapiens
  misc_RNA (1)...(19): siRNA sense strand
ugacuugagugcugaagaa

SEQ ID NO: 2577145 - RNA, 19 nt, Homo sapiens
  misc_RNA (1)...(19): siRNA sense strand
aagaacaagcagaggcauu

SEQ ID NO: 2577146 - RNA, 19 nt, Homo sapiens
  misc_RNA (1)...(19): siRNA sense strand
ucagaaagaacaagggcuu

SEQ ID NO: 2577147 - RNA, 19 nt, Homo sapiens
  misc_RNA (1)...(19): siRNA sense strand
acucaaggcccuaaggaga

SEQ ID NO: 2577148 - RNA, 19 nt, Homo sapiens
  misc_RNA (1)...(19): siRNA sense strand
cuuugaagguauugggacu

SEQ ID NO: 2577149 - RNA, 19 nt, Homo sapiens
  misc_RNA (1)...(19): siRNA sense strand
aaagaagagaagagugaca

SEQ ID NO: 2577150 - RNA, 19 nt, Homo sapiens
  misc_RNA (1)...(19): siRNA sense strand
caaaccagggugugggcaa

SEQ ID NO: 2577151 - RNA, 19 nt, Homo sapiens
  misc_RNA (1)...(19): siRNA sense strand
auguagagaaagaagagaa

SEQ ID NO: 2577152 - RNA, 19 nt, Homo sapiens
  misc_RNA (1)...(19): siRNA sense strand
ggacacagaaagugggaag

SEQ ID NO: 2577153 - RNA, 19 nt, Homo sapiens
  misc_RNA (1)...(19): siRNA sense strand
acgcaaggcccauggcuau

SEQ ID NO: 2577154 - RNA, 19 nt, Homo sapiens
  misc_RNA (1)...(19): siRNA sense strand
acuacaaggccaagcaaaa

SEQ ID NO: 2577155 - RNA, 19 nt, Homo sapiens
  misc_RNA (1)...(19): siRNA sense strand
cagcugaagaggagaaugu

SEQ ID NO: 2577156 - RNA, 19 nt, Homo sapiens
  misc_RNA (1)...(19): siRNA sense strand
cagggaacauggagaucau

SEQ ID NO: 2577157 - RNA, 19 nt, Homo sapiens
  misc_RNA (1)...(19): siRNA sense strand
agacagcugaagaggagaa

SEQ ID NO: 2577158 - RNA, 19 nt, Homo sapiens
  misc_RNA (1)...(19): siRNA sense strand
cagaagaucaccuggcaca

SEQ ID NO: 2577159 - RNA, 19 nt, Homo sapiens
  misc_RNA (1)...(19): siRNA sense strand
cugaagaggagaauguaga

SEQ ID NO: 2577160 - RNA, 19 nt, Homo sapiens
  misc_RNA (1)...(19): siRNA sense strand
ggacaaagaacaagcagag

SEQ ID NO: 2577161 - RNA, 19 nt, Homo sapiens
  misc_RNA (1)...(19): siRNA sense strand
ggaccagggaacauggaga

SEQ ID NO: 2577162 - RNA, 19 nt, Homo sapiens
  misc_RNA (1)...(19): siRNA sense strand
ggauaaaggccaaggggcu

SEQ ID NO: 2577163 - RNA, 19 nt, Homo sapiens
  misc_RNA (1)...(19): siRNA sense strand
ggacucaucugguggagca

SEQ ID NO: 2577164 - RNA, 19 nt, Homo sapiens
  misc_RNA (1)...(19): siRNA sense strand
agaugagugaggaggucaa

SEQ ID NO: 2577165 - RNA, 19 nt, Homo sapiens
  misc_RNA (1)...(19): siRNA sense strand
ccuaaggagacaggacaaa

SEQ ID NO: 2577166 - RNA, 19 nt, Homo sapiens
  misc_RNA (1)...(19): siRNA sense strand
caaagaacaagcagaggca

SEQ ID NO: 2577167 - RNA, 19 nt, Homo sapiens
  misc_RNA (1)...(19): siRNA sense strand
agaagaaacagaagagccu

SEQ ID NO: 2577168 - RNA, 19 nt, Homo sapiens
  misc_RNA (1)...(19): siRNA sense strand
aagaggagaauguagagaa

SEQ ID NO: 2577169 - RNA, 19 nt, Homo sapiens
  misc_RNA (1)...(19): siRNA sense strand
ccagcaugcaugaagauau

SEQ ID NO: 2577170 - RNA, 19 nt, Homo sapiens
  misc_RNA (1)...(19): siRNA sense strand
ccauggaggcccaccacaa

SEQ ID NO: 2577171 - RNA, 19 nt, Homo sapiens
  misc_RNA (1)...(19): siRNA sense strand
cuugagugcugaagaaaau

SEQ ID NO: 2577172 - RNA, 19 nt, Homo sapiens
  misc_RNA (1)...(19): siRNA sense strand
ggagacagcugaagaggag

SEQ ID NO: 2577173 - RNA, 19 nt, Homo sapiens
  misc_RNA (1)...(19): siRNA sense strand
auauguguccagaguguaa

SEQ ID NO: 2577174 - RNA, 19 nt, Homo sapiens
  misc_RNA (1)...(19): siRNA sense strand
cccuaaggagacaggacaa

SEQ ID NO: 2577175 - RNA, 19 nt, Homo sapiens
  misc_RNA (1)...(19): siRNA sense strand
cugaagagggaccagggaa

SEQ ID NO: 2577176 - RNA, 19 nt, Homo sapiens
  misc_RNA (1)...(19): siRNA sense strand
gcaagcacagugaggccaa

SEQ ID NO: 2577177 - RNA, 19 nt, Homo sapiens
  misc_RNA (1)...(19): siRNA sense strand
ggcuguggauaaaggccaa

SEQ ID NO: 2577178 - RNA, 19 nt, Homo sapiens
  misc_RNA (1)...(19): siRNA sense strand
uggaaaagccagugucuga

SEQ ID NO: 2577179 - RNA, 19 nt, Homo sapiens
  misc_RNA (1)...(19): siRNA sense strand
gguagaggccacagcaacu

SEQ ID NO: 2577180 - RNA, 19 nt, Homo sapiens
  misc_RNA (1)...(19): siRNA sense strand
agaauguagagaaagaaga

SEQ ID NO: 2577181 - RNA, 19 nt, Homo sapiens
  misc_RNA (1)...(19): siRNA sense strand
ggucaacacuggaagacag

SEQ ID NO: 2577182 - RNA, 19 nt, Homo sapiens
  misc_RNA (1)...(19): siRNA sense strand
aggacaaagaacaagcaga

SEQ ID NO: 2577183 - RNA, 19 nt, Homo sapiens
  misc_RNA (1)...(19): siRNA sense strand
agggcaaguuucacugcaa

SEQ ID NO: 2577184 - RNA, 19 nt, Homo sapiens
  misc_RNA (1)...(19): siRNA sense strand
gcucuuugccacagccgaa

SEQ ID NO: 2577185 - RNA, 19 nt, Homo sapiens
  misc_RNA (1)...(19): siRNA sense strand
gcuaugucaccaaguggaa

SEQ ID NO: 2577186 - RNA, 19 nt, Homo sapiens
  misc_RNA (1)...(19): siRNA sense strand
gcgaaaacaugcaggggac

SEQ ID NO: 2577187 - RNA, 19 nt, Homo sapiens
  misc_RNA (1)...(19): siRNA sense strand
gguaccgguuagaggcuca

SEQ ID NO: 2577188 - RNA, 19 nt, Homo sapiens
  misc_RNA (1)...(19): siRNA sense strand
agacagcacuuaagcagca

SEQ ID NO: 2577189 - RNA, 19 nt, Homo sapiens
  misc_RNA (1)...(19): siRNA sense strand
cacaagaagcagagcuacu

SEQ ID NO: 2577190 - RNA, 19 nt, Homo sapiens
  misc_RNA (1)...(19): siRNA sense strand
aagaaugggaguacagagu

SEQ ID NO: 2577191 - RNA, 19 nt, Homo sapiens
  misc_RNA (1)...(19): siRNA sense strand
ugaagagggaccagggaac

SEQ ID NO: 2577192 - RNA, 19 nt, Homo sapiens
  misc_RNA (1)...(19): siRNA sense strand
auuaagcaccugaaggaga

SEQ ID NO: 2577193 - RNA, 19 nt, Homo sapiens
  misc_RNA (1)...(19): siRNA sense strand
gugcacugaauguggcuau

SEQ ID NO: 2577194 - RNA, 19 nt, Homo sapiens
  misc_RNA (1)...(19): siRNA sense strand
uggaagggccagauggacu

SEQ ID NO: 2577195 - RNA, 19 nt, Homo sapiens
  misc_RNA (1)...(19): siRNA sense strand
aucacaagaagcagagcua

SEQ ID NO: 2577196 - RNA, 19 nt, Homo sapiens
  misc_RNA (1)...(19): siRNA sense strand
cugaaauaccacaugacca

SEQ ID NO: 2577197 - RNA, 19 nt, Homo sapiens
  misc_RNA (1)...(19): siRNA sense strand
uggaagagcuggagcgaga

SEQ ID NO: 2577198 - RNA, 19 nt, Homo sapiens
  misc_RNA (1)...(19): siRNA sense strand
cagaacaggacaagugcaa

SEQ ID NO: 2577199 - RNA, 19 nt, Homo sapiens
  misc_RNA (1)...(19): siRNA sense strand
acuugaacuucgaggccua

SEQ ID NO: 2577200 - RNA, 19 nt, Homo sapiens
  misc_RNA (1)...(19): siRNA sense strand
uggagaggcugaagggcau

SEQ ID NO: 2577201 - RNA, 19 nt, Homo sapiens
  misc_RNA (1)...(19): siRNA sense strand
gggaacaggagcagaagga

SEQ ID NO: 2577202 - RNA, 19 nt, Homo sapiens
  misc_RNA (1)...(19): siRNA sense strand
gcguggaggaggagaagga

SEQ ID NO: 2577203 - RNA, 19 nt, Homo sapiens
  misc_RNA (1)...(19): siRNA sense strand
gcaaggagguucagagcuc

SEQ ID NO: 2577204 - RNA, 19 nt, Homo sapiens
  misc_RNA (1)...(19): siRNA sense strand
gagagaaggaagcggagga

SEQ ID NO: 2577205 - RNA, 19 nt, Homo sapiens
  misc_RNA (1)...(19): siRNA sense strand
agaacaagagccuggucaa

SEQ ID NO: 2577206 - RNA, 19 nt, Homo sapiens
  misc_RNA (1)...(19): siRNA sense strand
gagcagaagcagagggacc

SEQ ID NO: 2577207 - RNA, 19 nt, Homo sapiens
  misc_RNA (1)...(19): siRNA sense strand
aggagcagaaggaggagaa

SEQ ID NO: 2577208 - RNA, 19 nt, Homo sapiens
  misc_RNA (1)...(19): siRNA sense strand
cggccgaguucaagaucga

SEQ ID NO: 2577209 - RNA, 19 nt, Homo sapiens
  misc_RNA (1)...(19): siRNA sense strand
uggagaagcugcaggcgga

SEQ ID NO: 2577210 - RNA, 19 nt, Homo sapiens
  misc_RNA (1)...(19): siRNA sense strand
agcagaaugucuccagaaa

SEQ ID NO: 2577211 - RNA, 19 nt, Homo sapiens
  misc_RNA (1)...(19): siRNA sense strand
gggaggugauggagaggcu

SEQ ID NO: 2577212 - RNA, 19 nt, Homo sapiens
  misc_RNA (1)...(19): siRNA sense strand
ggaaaagagaagagaagcu

SEQ ID NO: 2577213 - RNA, 19 nt, Homo sapiens
  misc_RNA (1)...(19): siRNA sense strand
aggagaagaucaagcugga

SEQ ID NO: 2577214 - RNA, 19 nt, Homo sapiens
  misc_RNA (1)...(19): siRNA sense strand
aaucagaagaagcuggaga

SEQ ID NO: 2577215 - RNA, 19 nt, Homo sapiens
  misc_RNA (1)...(19): siRNA sense strand
gagcagaaugucuccagaa

SEQ ID NO: 2577216 - RNA, 19 nt, Homo sapiens
  misc_RNA (1)...(19): siRNA sense strand
acaagaagcacgccuacaa

SEQ ID NO: 2577217 - RNA, 19 nt, Homo sapiens
  misc_RNA (1)...(19): siRNA sense strand
acgccaaggacaugaacga

SEQ ID NO: 2577218 - RNA, 19 nt, Homo sapiens
  misc_RNA (1)...(19): siRNA sense strand
gcagagagaaggaagcgga

SEQ ID NO: 2577219 - RNA, 19 nt, Homo sapiens
  misc_RNA (1)...(19): siRNA sense strand
agcuggagcgagagaggaa

SEQ ID NO: 2577220 - RNA, 19 nt, Homo sapiens
  misc_RNA (1)...(19): siRNA sense strand
acaacaaccaacagcccaa

SEQ ID NO: 2577221 - RNA, 19 nt, Homo sapiens
  misc_RNA (1)...(19): siRNA sense strand
gccaaggacaugaacgaga

SEQ ID NO: 2577222 - RNA, 19 nt, Homo sapiens
  misc_RNA (1)...(19): siRNA sense strand
aggaagcggaggagaggca

SEQ ID NO: 2577223 - RNA, 19 nt, Homo sapiens
  misc_RNA (1)...(19): siRNA sense strand
gaggaaaagagaagagaag

SEQ ID NO: 2577224 - RNA, 19 nt, Homo sapiens
  misc_RNA (1)...(19): siRNA sense strand
cagaaggaggagaagcuga

SEQ ID NO: 2577225 - RNA, 19 nt, Homo sapiens
  misc_RNA (1)...(19): siRNA sense strand
gcaagaagccggacgacag

SEQ ID NO: 2577226 - RNA, 19 nt, Homo sapiens
  misc_RNA (1)...(19): siRNA sense strand
cugugaagcuacgggaaca

SEQ ID NO: 2577227 - RNA, 19 nt, Homo sapiens
  misc_RNA (1)...(19): siRNA sense strand
agcaaagagaagaacaaaa

SEQ ID NO: 2577228 - RNA, 19 nt, Homo sapiens
  misc_RNA (1)...(19): siRNA sense strand
gggagcagaagcagaggga

SEQ ID NO: 2577229 - RNA, 19 nt, Homo sapiens
  misc_RNA (1)...(19): siRNA sense strand
ggucagaacaggacaagug

SEQ ID NO: 2577230 - RNA, 19 nt, Homo sapiens
  misc_RNA (1)...(19): siRNA sense strand
cgagagaggaaaagagaag

SEQ ID NO: 2577231 - RNA, 19 nt, Homo sapiens
  misc_RNA (1)...(19): siRNA sense strand
aggcggaggagcagaagca

SEQ ID NO: 2577232 - RNA, 19 nt, Homo sapiens
  misc_RNA (1)...(19): siRNA sense strand
cagaagcagcugcaggaga

SEQ ID NO: 2577233 - RNA, 19 nt, Homo sapiens
  misc_RNA (1)...(19): siRNA sense strand
ccuccgaagcccugggaaa

SEQ ID NO: 2577234 - RNA, 19 nt, Homo sapiens
  misc_RNA (1)...(19): siRNA sense strand
augaagaggccauggagaa

SEQ ID NO: 2577235 - RNA, 19 nt, Homo sapiens
  misc_RNA (1)...(19): siRNA sense strand
gccaggaggacguggacaa

SEQ ID NO: 2577236 - RNA, 19 nt, Homo sapiens
  misc_RNA (1)...(19): siRNA sense strand
gugcagaggagcaggccuu

SEQ ID NO: 2577237 - RNA, 19 nt, Homo sapiens
  misc_RNA (1)...(19): siRNA sense strand
gggucaggaaccaggccaa

SEQ ID NO: 2577238 - RNA, 19 nt, Homo sapiens
  misc_RNA (1)...(19): siRNA sense strand
cggagcgaguuacgagaau

SEQ ID NO: 2577239 - RNA, 19 nt, Homo sapiens
  misc_RNA (1)...(19): siRNA sense strand
gaugaagaggccauggaga

SEQ ID NO: 2577240 - RNA, 19 nt, Homo sapiens
  misc_RNA (1)...(19): siRNA sense strand
ccaagaacaagcugggugu

SEQ ID NO: 2577241 - RNA, 19 nt, Homo sapiens
  misc_RNA (1)...(19): siRNA sense strand
gagaccugcaggaggauga

SEQ ID NO: 2577242 - RNA, 19 nt, Homo sapiens
  misc_RNA (1)...(19): siRNA sense strand
cccaggugaccaagaacaa

SEQ ID NO: 2577243 - RNA, 19 nt, Homo sapiens
  misc_RNA (1)...(19): siRNA sense strand
gcaucagcuucaugggcaa

SEQ ID NO: 2577244 - RNA, 19 nt, Homo sapiens
  misc_RNA (1)...(19): siRNA sense strand
gguccaacuaugugcucaa

SEQ ID NO: 2577245 - RNA, 19 nt, Homo sapiens
  misc_RNA (1)...(19): siRNA sense strand
gcucaaaggacaccgggau

SEQ ID NO: 2577246 - RNA, 19 nt, Homo sapiens
  misc_RNA (1)...(19): siRNA sense strand
acuaugugcucaaaggaca

SEQ ID NO: 2577247 - RNA, 19 nt, Homo sapiens
  misc_RNA (1)...(19): siRNA sense strand
gaaacaaacuuuagggauu

SEQ ID NO: 2577248 - RNA, 19 nt, Homo sapiens
  misc_RNA (1)...(19): siRNA sense strand
gaauaauuuaggagggaaa

SEQ ID NO: 2577249 - RNA, 19 nt, Homo sapiens
  misc_RNA (1)...(19): siRNA sense strand
ugacaaugcucaagaguau

SEQ ID NO: 2577250 - RNA, 19 nt, Homo sapiens
  misc_RNA (1)...(19): siRNA sense strand
cagaagaugaagagaagaa

SEQ ID NO: 2577251 - RNA, 19 nt, Homo sapiens
  misc_RNA (1)...(19): siRNA sense strand
aagaagaaccuuuggauga

SEQ ID NO: 2577252 - RNA, 19 nt, Homo sapiens
  misc_RNA (1)...(19): siRNA sense strand
agauaaagucacagagagu

SEQ ID NO: 2577253 - RNA, 19 nt, Homo sapiens
  misc_RNA (1)...(19): siRNA sense strand
agucaaaugcugugcaaga

SEQ ID NO: 2577254 - RNA, 19 nt, Homo sapiens
  misc_RNA (1)...(19): siRNA sense strand
gcuuggaaguagagagaag

SEQ ID NO: 2577255 - RNA, 19 nt, Homo sapiens
  misc_RNA (1)...(19): siRNA sense strand
ggaugaugaguaugacaaa

SEQ ID NO: 2577256 - RNA, 19 nt, Homo sapiens
  misc_RNA (1)...(19): siRNA sense strand
cuuguaagcgacaggguaa

SEQ ID NO: 2577257 - RNA, 19 nt, Homo sapiens
  misc_RNA (1)...(19): siRNA sense strand
aguuauagccaauguagua

SEQ ID NO: 2577258 - RNA, 19 nt, Homo sapiens
  misc_RNA (1)...(19): siRNA sense strand
ggguaaaugcuuggaagaa

SEQ ID NO: 2577259 - RNA, 19 nt, Homo sapiens
  misc_RNA (1)...(19): siRNA sense strand
gggaggaagagcugaauca

SEQ ID NO: 2577260 - RNA, 19 nt, Homo sapiens
  misc_RNA (1)...(19): siRNA sense strand
cugaagauauagaccacaa

SEQ ID NO: 2577261 - RNA, 19 nt, Homo sapiens
  misc_RNA (1)...(19): siRNA sense strand
ccauaaagauuuggauuca

SEQ ID NO: 2577262 - RNA, 19 nt, Homo sapiens
  misc_RNA (1)...(19): siRNA sense strand
gcagggacuacuagacaaa

SEQ ID NO: 2577263 - RNA, 19 nt, Homo sapiens
  misc_RNA (1)...(19): siRNA sense strand
uuaauaaaggacagggaau

SEQ ID NO: 2577264 - RNA, 19 nt, Homo sapiens
  misc_RNA (1)...(19): siRNA sense strand
acaugaagaacuugccaaa

SEQ ID NO: 2577265 - RNA, 19 nt, Homo sapiens
  misc_RNA (1)...(19): siRNA sense strand
gagaagagucacacagcau

SEQ ID NO: 2577266 - RNA, 19 nt, Homo sapiens
  misc_RNA (1)...(19): siRNA sense strand
gaaaauuagugcuguguuu

SEQ ID NO: 2577267 - RNA, 19 nt, Homo sapiens
  misc_RNA (1)...(19): siRNA sense strand
uugcagaagaugaagagaa

SEQ ID NO: 2577268 - RNA, 19 nt, Homo sapiens
  misc_RNA (1)...(19): siRNA sense strand
aggaaguacucaagaccau

SEQ ID NO: 2577269 - RNA, 19 nt, Homo sapiens
  misc_RNA (1)...(19): siRNA sense strand
auaaagucacagagaguau

SEQ ID NO: 2577270 - RNA, 19 nt, Homo sapiens
  misc_RNA (1)...(19): siRNA sense strand
agagaguauugaagacauu

SEQ ID NO: 2577271 - RNA, 19 nt, Homo sapiens
  misc_RNA (1)...(19): siRNA sense strand
ucugaaagugugaagcaaa

SEQ ID NO: 2577272 - RNA, 19 nt, Homo sapiens
  misc_RNA (1)...(19): siRNA sense strand
agucguugguagugacaau

SEQ ID NO: 2577273 - RNA, 19 nt, Homo sapiens
  misc_RNA (1)...(19): siRNA sense strand
ugcacgaaguguugugaaa

SEQ ID NO: 2577274 - RNA, 19 nt, Homo sapiens
  misc_RNA (1)...(19): siRNA sense strand
acaaagaaugccagacaga

SEQ ID NO: 2577275 - RNA, 19 nt, Homo sapiens
  misc_RNA (1)...(19): siRNA sense strand
gaggaaacgaaaugaagau

SEQ ID NO: 2577276 - RNA, 19 nt, Homo sapiens
  misc_RNA (1)...(19): siRNA sense strand
agauauagaccacaacuua

SEQ ID NO: 2577277 - RNA, 19 nt, Homo sapiens
  misc_RNA (1)...(19): siRNA sense strand
ccgggaugacacugaaaua

SEQ ID NO: 2577278 - RNA, 19 nt, Homo sapiens
  misc_RNA (1)...(19): siRNA sense strand
ucuaaaauguggagggguu

SEQ ID NO: 2577279 - RNA, 19 nt, Homo sapiens
  misc_RNA (1)...(19): siRNA sense strand
auaaacaugacuuggcaaa

SEQ ID NO: 2577280 - RNA, 19 nt, Homo sapiens
  misc_RNA (1)...(19): siRNA sense strand
gaaguagagagaagaguca

SEQ ID NO: 2577281 - RNA, 19 nt, Homo sapiens
  misc_RNA (1)...(19): siRNA sense strand
gcaaauauuuccaugguuc

SEQ ID NO: 2577282 - RNA, 19 nt, Homo sapiens
  misc_RNA (1)...(19): siRNA sense strand
caagaggugcggagaccaa

SEQ ID NO: 2577283 - RNA, 19 nt, Homo sapiens
  misc_RNA (1)...(19): siRNA sense strand
agaacuugccaaagccaaa

SEQ ID NO: 2577284 - RNA, 19 nt, Homo sapiens
  misc_RNA (1)...(19): siRNA sense strand
agaguauagucauggccaa

SEQ ID NO: 2577285 - RNA, 19 nt, Homo sapiens
  misc_RNA (1)...(19): siRNA sense strand
cggcauacaagcagaaauc

SEQ ID NO: 2577286 - RNA, 19 nt, Homo sapiens
  misc_RNA (1)...(19): siRNA sense strand
cagaauaauuuaggaggga

SEQ ID NO: 2577287 - RNA, 19 nt, Homo sapiens
  misc_RNA (1)...(19): siRNA sense strand
gaaucaaacaggaucugaa

SEQ ID NO: 2577288 - RNA, 19 nt, Homo sapiens
  misc_RNA (1)...(19): siRNA sense strand
aggaagagcauuuguggga

SEQ ID NO: 2577289 - RNA, 19 nt, Homo sapiens
  misc_RNA (1)...(19): siRNA sense strand
gauauagaccacaacuuaa

SEQ ID NO: 2577290 - RNA, 19 nt, Homo sapiens
  misc_RNA (1)...(19): siRNA sense strand
ccauaaacuuugcagugau

SEQ ID NO: 2577291 - RNA, 19 nt, Homo sapiens
  misc_RNA (1)...(19): siRNA sense strand
agucagaaccagauaaacu

SEQ ID NO: 2577292 - RNA, 19 nt, Homo sapiens
  misc_RNA (1)...(19): siRNA sense strand
caguguaacaguuguaaaa

SEQ ID NO: 2577293 - RNA, 19 nt, Homo sapiens
  misc_RNA (1)...(19): siRNA sense strand
gugaagaaugcauguccaa

SEQ ID NO: 2577294 - RNA, 19 nt, Homo sapiens
  misc_RNA (1)...(19): siRNA sense strand
cgaacaagacgacgacaca

SEQ ID NO: 2577295 - RNA, 19 nt, Homo sapiens
  misc_RNA (1)...(19): siRNA sense strand
gggaugacacugaaauaca

SEQ ID NO: 2577296 - RNA, 19 nt, Homo sapiens
  misc_RNA (1)...(19): siRNA sense strand
gaagagcauuugugggagu

SEQ ID NO: 2577297 - RNA, 19 nt, Homo sapiens
  misc_RNA (1)...(19): siRNA sense strand
gcucaagaguauagucaug

SEQ ID NO: 2577298 - RNA, 19 nt, Homo sapiens
  misc_RNA (1)...(19): siRNA sense strand
gccaaguaauuguaagcau

SEQ ID NO: 2577299 - RNA, 19 nt, Homo sapiens
  misc_RNA (1)...(19): siRNA sense strand
gcugggaggaagagcugaa

SEQ ID NO: 2577300 - RNA, 19 nt, Homo sapiens
  misc_RNA (1)...(19): siRNA sense strand
gguuacuucugcaggugua

SEQ ID NO: 2577301 - RNA, 19 nt, Homo sapiens
  misc_RNA (1)...(19): siRNA sense strand
uggcaaaacgcuggggaaa

SEQ ID NO: 2577302 - RNA, 19 nt, Homo sapiens
  misc_RNA (1)...(19): siRNA sense strand
uggcagaaaugauugcaga

SEQ ID NO: 2577303 - RNA, 19 nt, Homo sapiens
  misc_RNA (1)...(19): siRNA sense strand
uggcaagaggaaacgaaau

SEQ ID NO: 2577304 - RNA, 19 nt, Homo sapiens
  misc_RNA (1)...(19): siRNA sense strand
gguggagauggcagagaau

SEQ ID NO: 2577305 - RNA, 19 nt, Homo sapiens
  misc_RNA (1)...(19): siRNA sense strand
guagugacaaugaggauga

SEQ ID NO: 2577306 - RNA, 19 nt, Homo sapiens
  misc_RNA (1)...(19): siRNA sense strand
gccacaugcuucagauaga

SEQ ID NO: 2577307 - RNA, 19 nt, Homo sapiens
  misc_RNA (1)...(19): siRNA sense strand
aaucaaacaggaucugaaa

SEQ ID NO: 2577308 - RNA, 19 nt, Homo sapiens
  misc_RNA (1)...(19): siRNA sense strand
cgaagaggacggaagaagu

SEQ ID NO: 2577309 - RNA, 19 nt, Homo sapiens
  misc_RNA (1)...(19): siRNA sense strand
caagaggaaacgaaaugaa

SEQ ID NO: 2577310 - RNA, 19 nt, Homo sapiens
  misc_RNA (1)...(19): siRNA sense strand
ggcagagaauacugacaau

SEQ ID NO: 2577311 - RNA, 19 nt, Homo sapiens
  misc_RNA (1)...(19): siRNA sense strand
gugacaaugaggaugaaca

SEQ ID NO: 2577312 - RNA, 19 nt, Homo sapiens
  misc_RNA (1)...(19): siRNA sense strand
agaaaacagcaaagagaca

SEQ ID NO: 2577313 - RNA, 19 nt, Homo sapiens
  misc_RNA (1)...(19): siRNA sense strand
gaaacaaacuuuagggauu

SEQ ID NO: 2577314 - RNA, 19 nt, Homo sapiens
  misc_RNA (1)...(19): siRNA sense strand
gaauaauuuaggagggaaa

SEQ ID NO: 2577315 - RNA, 19 nt, Homo sapiens
  misc_RNA (1)...(19): siRNA sense strand
ugacaaugcucaagaguau

SEQ ID NO: 2577316 - RNA, 19 nt, Homo sapiens
  misc_RNA (1)...(19): siRNA sense strand
cagaagaugaagagaagaa

SEQ ID NO: 2577317 - RNA, 19 nt, Homo sapiens
  misc_RNA (1)...(19): siRNA sense strand
ccaacauggcggagagaga

SEQ ID NO: 2577318 - RNA, 19 nt, Homo sapiens
  misc_RNA (1)...(19): siRNA sense strand
aagaagaaccuuuggauga

SEQ ID NO: 2577319 - RNA, 19 nt, Homo sapiens
  misc_RNA (1)...(19): siRNA sense strand
agauaaagucacagagagu

SEQ ID NO: 2577320 - RNA, 19 nt, Homo sapiens
  misc_RNA (1)...(19): siRNA sense strand
gcuuggaaguagagagaag

SEQ ID NO: 2577321 - RNA, 19 nt, Homo sapiens
  misc_RNA (1)...(19): siRNA sense strand
ggaugaugaguaugacaaa

SEQ ID NO: 2577322 - RNA, 19 nt, Homo sapiens
  misc_RNA (1)...(19): siRNA sense strand
cuuguaagcgacaggguaa

SEQ ID NO: 2577323 - RNA, 19 nt, Homo sapiens
  misc_RNA (1)...(19): siRNA sense strand
aguuauagccaauguagua

SEQ ID NO: 2577324 - RNA, 19 nt, Homo sapiens
  misc_RNA (1)...(19): siRNA sense strand
ggguaaaugcuuggaagaa

SEQ ID NO: 2577325 - RNA, 19 nt, Homo sapiens
  misc_RNA (1)...(19): siRNA sense strand
gggaggaagagcugaauca

SEQ ID NO: 2577326 - RNA, 19 nt, Homo sapiens
  misc_RNA (1)...(19): siRNA sense strand
cugaagauauagaccacaa

SEQ ID NO: 2577327 - RNA, 19 nt, Homo sapiens
  misc_RNA (1)...(19): siRNA sense strand
ccauaaagauuuggauuca

SEQ ID NO: 2577328 - RNA, 19 nt, Homo sapiens
  misc_RNA (1)...(19): siRNA sense strand
gcagggacuacuagacaaa

SEQ ID NO: 2577329 - RNA, 19 nt, Homo sapiens
  misc_RNA (1)...(19): siRNA sense strand
uuaauaaaggacagggaau

SEQ ID NO: 2577330 - RNA, 19 nt, Homo sapiens
  misc_RNA (1)...(19): siRNA sense strand
acaugaagaacuugccaaa

SEQ ID NO: 2577331 - RNA, 19 nt, Homo sapiens
  misc_RNA (1)...(19): siRNA sense strand
gagaagagucacacagcau

SEQ ID NO: 2577332 - RNA, 19 nt, Homo sapiens
  misc_RNA (1)...(19): siRNA sense strand
gaaaauuagugcuguguuu

SEQ ID NO: 2577333 - RNA, 19 nt, Homo sapiens
  misc_RNA (1)...(19): siRNA sense strand
uugcagaagaugaagagaa

SEQ ID NO: 2577334 - RNA, 19 nt, Homo sapiens
  misc_RNA (1)...(19): siRNA sense strand
aggaaguacucaagaccau

SEQ ID NO: 2577335 - RNA, 19 nt, Homo sapiens
  misc_RNA (1)...(19): siRNA sense strand
auaaagucacagagaguau

SEQ ID NO: 2577336 - RNA, 19 nt, Homo sapiens
  misc_RNA (1)...(19): siRNA sense strand
agagaguauugaagacauu

SEQ ID NO: 2577337 - RNA, 19 nt, Homo sapiens
  misc_RNA (1)...(19): siRNA sense strand
ucugaaagugugaagcaaa

SEQ ID NO: 2577338 - RNA, 19 nt, Homo sapiens
  misc_RNA (1)...(19): siRNA sense strand
agucguugguagugacaau

SEQ ID NO: 2577339 - RNA, 19 nt, Homo sapiens
  misc_RNA (1)...(19): siRNA sense strand
ugcacgaaguguugugaaa

SEQ ID NO: 2577340 - RNA, 19 nt, Homo sapiens
  misc_RNA (1)...(19): siRNA sense strand
acaaagaaugccagacaga

SEQ ID NO: 2577341 - RNA, 19 nt, Homo sapiens
  misc_RNA (1)...(19): siRNA sense strand
gaggaaacgaaaugaagau

SEQ ID NO: 2577342 - RNA, 19 nt, Homo sapiens
  misc_RNA (1)...(19): siRNA sense strand
agauauagaccacaacuua

SEQ ID NO: 2577343 - RNA, 19 nt, Homo sapiens
  misc_RNA (1)...(19): siRNA sense strand
ccgggaugacacugaaaua

SEQ ID NO: 2577344 - RNA, 19 nt, Homo sapiens
  misc_RNA (1)...(19): siRNA sense strand
ucuaaaauguggagggguu

SEQ ID NO: 2577345 - RNA, 19 nt, Homo sapiens
  misc_RNA (1)...(19): siRNA sense strand
auaaacaugacuuggcaaa

SEQ ID NO: 2577346 - RNA, 19 nt, Homo sapiens
  misc_RNA (1)...(19): siRNA sense strand
gaaguagagagaagaguca

SEQ ID NO: 2577347 - RNA, 19 nt, Homo sapiens
  misc_RNA (1)...(19): siRNA sense strand
gcaaauauuuccaugguuc

SEQ ID NO: 2577348 - RNA, 19 nt, Homo sapiens
  misc_RNA (1)...(19): siRNA sense strand
caagaggugcggagaccaa

SEQ ID NO: 2577349 - RNA, 19 nt, Homo sapiens
  misc_RNA (1)...(19): siRNA sense strand
agaacuugccaaagccaaa

SEQ ID NO: 2577350 - RNA, 19 nt, Homo sapiens
  misc_RNA (1)...(19): siRNA sense strand
agaguauagucauggccaa

SEQ ID NO: 2577351 - RNA, 19 nt, Homo sapiens
  misc_RNA (1)...(19): siRNA sense strand
gaaucaaacaggaucugaa

SEQ ID NO: 2577352 - RNA, 19 nt, Homo sapiens
  misc_RNA (1)...(19): siRNA sense strand
cggcauacaagcagaaauc

SEQ ID NO: 2577353 - RNA, 19 nt, Homo sapiens
  misc_RNA (1)...(19): siRNA sense strand
cagaauaauuuaggaggga

SEQ ID NO: 2577354 - RNA, 19 nt, Homo sapiens
  misc_RNA (1)...(19): siRNA sense strand
aggaagagcauuuguggga

SEQ ID NO: 2577355 - RNA, 19 nt, Homo sapiens
  misc_RNA (1)...(19): siRNA sense strand
gauauagaccacaacuuaa

SEQ ID NO: 2577356 - RNA, 19 nt, Homo sapiens
  misc_RNA (1)...(19): siRNA sense strand
ccauaaacuuugcagugau

SEQ ID NO: 2577357 - RNA, 19 nt, Homo sapiens
  misc_RNA (1)...(19): siRNA sense strand
agucagaaccagauaaacu

SEQ ID NO: 2577358 - RNA, 19 nt, Homo sapiens
  misc_RNA (1)...(19): siRNA sense strand
caguguaacaguuguaaaa

SEQ ID NO: 2577359 - RNA, 19 nt, Homo sapiens
  misc_RNA (1)...(19): siRNA sense strand
gugaagaaugcauguccaa

SEQ ID NO: 2577360 - RNA, 19 nt, Homo sapiens
  misc_RNA (1)...(19): siRNA sense strand
cgaacaagacgacgacaca

SEQ ID NO: 2577361 - RNA, 19 nt, Homo sapiens
  misc_RNA (1)...(19): siRNA sense strand
gggaugacacugaaauaca

SEQ ID NO: 2577362 - RNA, 19 nt, Homo sapiens
  misc_RNA (1)...(19): siRNA sense strand
gaagagcauuugugggagu

SEQ ID NO: 2577363 - RNA, 19 nt, Homo sapiens
  misc_RNA (1)...(19): siRNA sense strand
gcucaagaguauagucaug

SEQ ID NO: 2577364 - RNA, 19 nt, Homo sapiens
  misc_RNA (1)...(19): siRNA sense strand
gccaaguaauuguaagcau

SEQ ID NO: 2577365 - RNA, 19 nt, Homo sapiens
  misc_RNA (1)...(19): siRNA sense strand
gcugggaggaagagcugaa

SEQ ID NO: 2577366 - RNA, 19 nt, Homo sapiens
  misc_RNA (1)...(19): siRNA sense strand
gguuacuucugcaggugua

SEQ ID NO: 2577367 - RNA, 19 nt, Homo sapiens
  misc_RNA (1)...(19): siRNA sense strand
uggcaaaacgcuggggaaa

SEQ ID NO: 2577368 - RNA, 19 nt, Homo sapiens
  misc_RNA (1)...(19): siRNA sense strand
uggcagaaaugauugcaga

SEQ ID NO: 2577369 - RNA, 19 nt, Homo sapiens
  misc_RNA (1)...(19): siRNA sense strand
uggcaagaggaaacgaaau

SEQ ID NO: 2577370 - RNA, 19 nt, Homo sapiens
  misc_RNA (1)...(19): siRNA sense strand
gguggagauggcagagaau

SEQ ID NO: 2577371 - RNA, 19 nt, Homo sapiens
  misc_RNA (1)...(19): siRNA sense strand
guagugacaaugaggauga

SEQ ID NO: 2577372 - RNA, 19 nt, Homo sapiens
  misc_RNA (1)...(19): siRNA sense strand
gccacaugcuucagauaga

SEQ ID NO: 2577373 - RNA, 19 nt, Homo sapiens
  misc_RNA (1)...(19): siRNA sense strand
aaucaaacaggaucugaaa

SEQ ID NO: 2577374 - RNA, 19 nt, Homo sapiens
  misc_RNA (1)...(19): siRNA sense strand
cgaagaggacggaagaagu

SEQ ID NO: 2577375 - RNA, 19 nt, Homo sapiens
  misc_RNA (1)...(19): siRNA sense strand
caagaggaaacgaaaugaa

SEQ ID NO: 2577376 - RNA, 19 nt, Homo sapiens
  misc_RNA (1)...(19): siRNA sense strand
ggcagagaauacugacaau

SEQ ID NO: 2577377 - RNA, 19 nt, Homo sapiens
  misc_RNA (1)...(19): siRNA sense strand
gugacaaugaggaugaaca

SEQ ID NO: 2577378 - RNA, 19 nt, Homo sapiens
  misc_RNA (1)...(19): siRNA sense strand
agaaaacagcaaagagaca

SEQ ID NO: 2577379 - RNA, 19 nt, Homo sapiens
  misc_RNA (1)...(19): siRNA sense strand
ccugcaagguggagaugaa

SEQ ID NO: 2577380 - RNA, 19 nt, Homo sapiens
  misc_RNA (1)...(19): siRNA sense strand
gaaaauaaccggaugguga

SEQ ID NO: 2577381 - RNA, 19 nt, Homo sapiens
  misc_RNA (1)...(19): siRNA sense strand
ccaaaguggagaacagcaa

SEQ ID NO: 2577382 - RNA, 19 nt, Homo sapiens
  misc_RNA (1)...(19): siRNA sense strand
gcagcauguuggagagcau

SEQ ID NO: 2577383 - RNA, 19 nt, Homo sapiens
  misc_RNA (1)...(19): siRNA sense strand
cagcaauggcagcguggua

SEQ ID NO: 2577384 - RNA, 19 nt, Homo sapiens
  misc_RNA (1)...(19): siRNA sense strand
gcccaguuugugagagaaa

SEQ ID NO: 2577385 - RNA, 19 nt, Homo sapiens
  misc_RNA (1)...(19): siRNA sense strand
uugcagaggcugaggaguu

SEQ ID NO: 2577386 - RNA, 19 nt, Homo sapiens
  misc_RNA (1)...(19): siRNA sense strand
cugucaaguucuaugaauu

SEQ ID NO: 2577387 - RNA, 19 nt, Homo sapiens
  misc_RNA (1)...(19): siRNA sense strand
agacacggguccuggaaaa

SEQ ID NO: 2577388 - RNA, 19 nt, Homo sapiens
  misc_RNA (1)...(19): siRNA sense strand
cauggaauuuggagaggau

SEQ ID NO: 2577389 - RNA, 19 nt, Homo sapiens
  misc_RNA (1)...(19): siRNA sense strand
caaccagagugcagaggga

SEQ ID NO: 2577390 - RNA, 19 nt, Homo sapiens
  misc_RNA (1)...(19): siRNA sense strand
gcgcguuaggagagcagaa

SEQ ID NO: 2577391 - RNA, 19 nt, Homo sapiens
  misc_RNA (1)...(19): siRNA sense strand
gugaggacuguaagagcaa

SEQ ID NO: 2577392 - RNA, 19 nt, Homo sapiens
  misc_RNA (1)...(19): siRNA sense strand
guccaaaggaagucaaaca

SEQ ID NO: 2577393 - RNA, 19 nt, Homo sapiens
  misc_RNA (1)...(19): siRNA sense strand
aguacuugcuggaaaauaa

SEQ ID NO: 2577394 - RNA, 19 nt, Homo sapiens
  misc_RNA (1)...(19): siRNA sense strand
acggaagagagaagaugaa

SEQ ID NO: 2577395 - RNA, 19 nt, Homo sapiens
  misc_RNA (1)...(19): siRNA sense strand
aagaaggagaucuggaaca

SEQ ID NO: 2577396 - RNA, 19 nt, Homo sapiens
  misc_RNA (1)...(19): siRNA sense strand
aaaccaaaguggagaacag

SEQ ID NO: 2577397 - RNA, 19 nt, Homo sapiens
  misc_RNA (1)...(19): siRNA sense strand
aggcugaggaguuagacaa

SEQ ID NO: 2577398 - RNA, 19 nt, Homo sapiens
  misc_RNA (1)...(19): siRNA sense strand
uggcugugcgcgagauuua

SEQ ID NO: 2577399 - RNA, 19 nt, Homo sapiens
  misc_RNA (1)...(19): siRNA sense strand
uggcccaguuugugagaga

SEQ ID NO: 2577400 - RNA, 19 nt, Homo sapiens
  misc_RNA (1)...(19): siRNA sense strand
agaaaugauugcagaggcu

SEQ ID NO: 2577401 - RNA, 19 nt, Homo sapiens
  misc_RNA (1)...(19): siRNA sense strand
ccuaagaauccucuggaca

SEQ ID NO: 2577402 - RNA, 19 nt, Homo sapiens
  misc_RNA (1)...(19): siRNA sense strand
cuaagaauccucuggacau

SEQ ID NO: 2577403 - RNA, 19 nt, Homo sapiens
  misc_RNA (1)...(19): siRNA sense strand
aaauaugccaauggagaaa

SEQ ID NO: 2577404 - RNA, 19 nt, Homo sapiens
  misc_RNA (1)...(19): siRNA sense strand
ggaccaaguuccagcgcac

SEQ ID NO: 2577405 - RNA, 19 nt, Homo sapiens
  misc_RNA (1)...(19): siRNA sense strand
uggcagaaaugauugcaga

SEQ ID NO: 2577406 - RNA, 19 nt, Homo sapiens
  misc_RNA (1)...(19): siRNA sense strand
uuugugaucuugugagcaa

SEQ ID NO: 2577407 - RNA, 19 nt, Homo sapiens
  misc_RNA (1)...(19): siRNA sense strand
gagaugauguccuggccau

SEQ ID NO: 2577408 - RNA, 19 nt, Homo sapiens
  misc_RNA (1)...(19): siRNA sense strand
gaaccaugaggaaggguca

SEQ ID NO: 2577409 - RNA, 19 nt, Homo sapiens
  misc_RNA (1)...(19): siRNA sense strand
guggcaagccugaggucuu

SEQ ID NO: 2577410 - RNA, 19 nt, Homo sapiens
  misc_RNA (1)...(19): siRNA sense strand
caaaauaugccaauggaga

SEQ ID NO: 2577411 - RNA, 19 nt, Homo sapiens
  misc_RNA (1)...(19): siRNA sense strand
cuggagagguccugcacga

SEQ ID NO: 2577412 - RNA, 19 nt, Homo sapiens
  misc_RNA (1)...(19): siRNA sense strand
gagaaaccagcaaggguga

SEQ ID NO: 2577413 - RNA, 19 nt, Homo sapiens
  misc_RNA (1)...(19): siRNA sense strand
cagaggaaagggcgagaca

SEQ ID NO: 2577414 - RNA, 19 nt, Homo sapiens
  misc_RNA (1)...(19): siRNA sense strand
cuggaaaacggaagagaga

SEQ ID NO: 2577415 - RNA, 19 nt, Homo sapiens
  misc_RNA (1)...(19): siRNA sense strand
ugguagggccugaggaugu

SEQ ID NO: 2577416 - RNA, 19 nt, Homo sapiens
  misc_RNA (1)...(19): siRNA sense strand
ggcccaauggugaacgaua

SEQ ID NO: 2577417 - RNA, 19 nt, Homo sapiens
  misc_RNA (1)...(19): siRNA sense strand
guguaagaacuuugagaug

SEQ ID NO: 2577418 - RNA, 19 nt, Homo sapiens
  misc_RNA (1)...(19): siRNA sense strand
ggaaaacggaagagagaag

SEQ ID NO: 2577419 - RNA, 19 nt, Homo sapiens
  misc_RNA (1)...(19): siRNA sense strand
ccgccugaacggaagagaa

SEQ ID NO: 2577420 - RNA, 19 nt, Homo sapiens
  misc_RNA (1)...(19): siRNA sense strand
gucaaacagaagaguggaa

SEQ ID NO: 2577421 - RNA, 19 nt, Homo sapiens
  misc_RNA (1)...(19): siRNA sense strand
ggagauggccugacugcga

SEQ ID NO: 2577422 - RNA, 19 nt, Homo sapiens
  misc_RNA (1)...(19): siRNA sense strand
gauucagcggaguggagaa

SEQ ID NO: 2577423 - RNA, 19 nt, Homo sapiens
  misc_RNA (1)...(19): siRNA sense strand
gaugaaguccaaaggaagu

SEQ ID NO: 2577424 - RNA, 19 nt, Homo sapiens
  misc_RNA (1)...(19): siRNA sense strand
gggcaagaucccugugaag

SEQ ID NO: 2577425 - RNA, 19 nt, Homo sapiens
  misc_RNA (1)...(19): siRNA sense strand
agugcugggugcagucaaa

SEQ ID NO: 2577426 - RNA, 19 nt, Homo sapiens
  misc_RNA (1)...(19): siRNA sense strand
ggccaacaagggacugaaa

SEQ ID NO: 2577427 - RNA, 19 nt, Homo sapiens
  misc_RNA (1)...(19): siRNA sense strand
cguguaagcgccaggggaa

SEQ ID NO: 2577428 - RNA, 19 nt, Homo sapiens
  misc_RNA (1)...(19): siRNA sense strand
ggagaggaucuacuggaau

SEQ ID NO: 2577429 - RNA, 19 nt, Homo sapiens
  misc_RNA (1)...(19): siRNA sense strand
gcgagauuuaugaggaacu

SEQ ID NO: 2577430 - RNA, 19 nt, Homo sapiens
  misc_RNA (1)...(19): siRNA sense strand
cggcagucccgcaagugua

SEQ ID NO: 2577431 - RNA, 19 nt, Homo sapiens
  misc_RNA (1)...(19): siRNA sense strand
aggccgacauccuggcuau

SEQ ID NO: 2577432 - RNA, 19 nt, Homo sapiens
  misc_RNA (1)...(19): siRNA sense strand
agaaacucuugcaugagaa

SEQ ID NO: 2577433 - RNA, 19 nt, Homo sapiens
  misc_RNA (1)...(19): siRNA sense strand
ggcuauggcagaaaugauu

SEQ ID NO: 2577434 - RNA, 19 nt, Homo sapiens
  misc_RNA (1)...(19): siRNA sense strand
ggaauuuggagaggaucua

SEQ ID NO: 2577435 - RNA, 19 nt, Homo sapiens
  misc_RNA (1)...(19): siRNA sense strand
aaaauaugccaauggagaa

SEQ ID NO: 2577436 - RNA, 19 nt, Homo sapiens
  misc_RNA (1)...(19): siRNA sense strand
ccugcaagguggagaugaa

SEQ ID NO: 2577437 - RNA, 19 nt, Homo sapiens
  misc_RNA (1)...(19): siRNA sense strand
gaaaauaaccggaugguga

SEQ ID NO: 2577438 - RNA, 19 nt, Homo sapiens
  misc_RNA (1)...(19): siRNA sense strand
ccaaaguggagaacagcaa

SEQ ID NO: 2577439 - RNA, 19 nt, Homo sapiens
  misc_RNA (1)...(19): siRNA sense strand
gcagcauguuggagagcau

SEQ ID NO: 2577440 - RNA, 19 nt, Homo sapiens
  misc_RNA (1)...(19): siRNA sense strand
cagcaauggcagcguggua

SEQ ID NO: 2577441 - RNA, 19 nt, Homo sapiens
  misc_RNA (1)...(19): siRNA sense strand
gcccaguuugugagagaaa

SEQ ID NO: 2577442 - RNA, 19 nt, Homo sapiens
  misc_RNA (1)...(19): siRNA sense strand
uugcagaggcugaggaguu

SEQ ID NO: 2577443 - RNA, 19 nt, Homo sapiens
  misc_RNA (1)...(19): siRNA sense strand
cugucaaguucuaugaauu

SEQ ID NO: 2577444 - RNA, 19 nt, Homo sapiens
  misc_RNA (1)...(19): siRNA sense strand
agacacggguccuggaaaa

SEQ ID NO: 2577445 - RNA, 19 nt, Homo sapiens
  misc_RNA (1)...(19): siRNA sense strand
cauggaauuuggagaggau

SEQ ID NO: 2577446 - RNA, 19 nt, Homo sapiens
  misc_RNA (1)...(19): siRNA sense strand
caaccagagugcagaggga

SEQ ID NO: 2577447 - RNA, 19 nt, Homo sapiens
  misc_RNA (1)...(19): siRNA sense strand
gcgcguuaggagagcagaa

SEQ ID NO: 2577448 - RNA, 19 nt, Homo sapiens
  misc_RNA (1)...(19): siRNA sense strand
gugaggacuguaagagcaa

SEQ ID NO: 2577449 - RNA, 19 nt, Homo sapiens
  misc_RNA (1)...(19): siRNA sense strand
guccaaaggaagucaaaca

SEQ ID NO: 2577450 - RNA, 19 nt, Homo sapiens
  misc_RNA (1)...(19): siRNA sense strand
aguacuugcuggaaaauaa

SEQ ID NO: 2577451 - RNA, 19 nt, Homo sapiens
  misc_RNA (1)...(19): siRNA sense strand
acggaagagagaagaugaa

SEQ ID NO: 2577452 - RNA, 19 nt, Homo sapiens
  misc_RNA (1)...(19): siRNA sense strand
aagaaggagaucuggaaca

SEQ ID NO: 2577453 - RNA, 19 nt, Homo sapiens
  misc_RNA (1)...(19): siRNA sense strand
aaaccaaaguggagaacag

SEQ ID NO: 2577454 - RNA, 19 nt, Homo sapiens
  misc_RNA (1)...(19): siRNA sense strand
aggcugaggaguuagacaa

SEQ ID NO: 2577455 - RNA, 19 nt, Homo sapiens
  misc_RNA (1)...(19): siRNA sense strand
uggcugugcgcgagauuua

SEQ ID NO: 2577456 - RNA, 19 nt, Homo sapiens
  misc_RNA (1)...(19): siRNA sense strand
uggcccaguuugugagaga

SEQ ID NO: 2577457 - RNA, 19 nt, Homo sapiens
  misc_RNA (1)...(19): siRNA sense strand
agaaaugauugcagaggcu

SEQ ID NO: 2577458 - RNA, 19 nt, Homo sapiens
  misc_RNA (1)...(19): siRNA sense strand
ccuaagaauccucuggaca

SEQ ID NO: 2577459 - RNA, 19 nt, Homo sapiens
  misc_RNA (1)...(19): siRNA sense strand
cuaagaauccucuggacau

SEQ ID NO: 2577460 - RNA, 19 nt, Homo sapiens
  misc_RNA (1)...(19): siRNA sense strand
aaauaugccaauggagaaa

SEQ ID NO: 2577461 - RNA, 19 nt, Homo sapiens
  misc_RNA (1)...(19): siRNA sense strand
ggaccaaguuccagcgcac

SEQ ID NO: 2577462 - RNA, 19 nt, Homo sapiens
  misc_RNA (1)...(19): siRNA sense strand
uggcagaaaugauugcaga

SEQ ID NO: 2577463 - RNA, 19 nt, Homo sapiens
  misc_RNA (1)...(19): siRNA sense strand
uuugugaucuugugagcaa

SEQ ID NO: 2577464 - RNA, 19 nt, Homo sapiens
  misc_RNA (1)...(19): siRNA sense strand
gagaugauguccuggccau

SEQ ID NO: 2577465 - RNA, 19 nt, Homo sapiens
  misc_RNA (1)...(19): siRNA sense strand
gaaccaugaggaaggguca

SEQ ID NO: 2577466 - RNA, 19 nt, Homo sapiens
  misc_RNA (1)...(19): siRNA sense strand
guggcaagccugaggucuu

SEQ ID NO: 2577467 - RNA, 19 nt, Homo sapiens
  misc_RNA (1)...(19): siRNA sense strand
caaaauaugccaauggaga

SEQ ID NO: 2577468 - RNA, 19 nt, Homo sapiens
  misc_RNA (1)...(19): siRNA sense strand
cuggagagguccugcacga

SEQ ID NO: 2577469 - RNA, 19 nt, Homo sapiens
  misc_RNA (1)...(19): siRNA sense strand
gagaaaccagcaaggguga

SEQ ID NO: 2577470 - RNA, 19 nt, Homo sapiens
  misc_RNA (1)...(19): siRNA sense strand
cagaggaaagggcgagaca

SEQ ID NO: 2577471 - RNA, 19 nt, Homo sapiens
  misc_RNA (1)...(19): siRNA sense strand
cuggaaaacggaagagaga

SEQ ID NO: 2577472 - RNA, 19 nt, Homo sapiens
  misc_RNA (1)...(19): siRNA sense strand
ugguagggccugaggaugu

SEQ ID NO: 2577473 - RNA, 19 nt, Homo sapiens
  misc_RNA (1)...(19): siRNA sense strand
ggcccaauggugaacgaua

SEQ ID NO: 2577474 - RNA, 19 nt, Homo sapiens
  misc_RNA (1)...(19): siRNA sense strand
guguaagaacuuugagaug

SEQ ID NO: 2577475 - RNA, 19 nt, Homo sapiens
  misc_RNA (1)...(19): siRNA sense strand
ggaaaacggaagagagaag

SEQ ID NO: 2577476 - RNA, 19 nt, Homo sapiens
  misc_RNA (1)...(19): siRNA sense strand
ccgccugaacggaagagaa

SEQ ID NO: 2577477 - RNA, 19 nt, Homo sapiens
  misc_RNA (1)...(19): siRNA sense strand
gucaaacagaagaguggaa

SEQ ID NO: 2577478 - RNA, 19 nt, Homo sapiens
  misc_RNA (1)...(19): siRNA sense strand
ggagauggccugacugcga

SEQ ID NO: 2577479 - RNA, 19 nt, Homo sapiens
  misc_RNA (1)...(19): siRNA sense strand
gauucagcggaguggagaa

SEQ ID NO: 2577480 - RNA, 19 nt, Homo sapiens
  misc_RNA (1)...(19): siRNA sense strand
gaugaaguccaaaggaagu

SEQ ID NO: 2577481 - RNA, 19 nt, Homo sapiens
  misc_RNA (1)...(19): siRNA sense strand
gggcaagaucccugugaag

SEQ ID NO: 2577482 - RNA, 19 nt, Homo sapiens
  misc_RNA (1)...(19): siRNA sense strand
agugcugggugcagucaaa

SEQ ID NO: 2577483 - RNA, 19 nt, Homo sapiens
  misc_RNA (1)...(19): siRNA sense strand
ggccaacaagggacugaaa

SEQ ID NO: 2577484 - RNA, 19 nt, Homo sapiens
  misc_RNA (1)...(19): siRNA sense strand
cguguaagcgccaggggaa

SEQ ID NO: 2577485 - RNA, 19 nt, Homo sapiens
  misc_RNA (1)...(19): siRNA sense strand
ggagaggaucuacuggaau

SEQ ID NO: 2577486 - RNA, 19 nt, Homo sapiens
  misc_RNA (1)...(19): siRNA sense strand
gcgagauuuaugaggaacu

SEQ ID NO: 2577487 - RNA, 19 nt, Homo sapiens
  misc_RNA (1)...(19): siRNA sense strand
cggcagucccgcaagugua

SEQ ID NO: 2577488 - RNA, 19 nt, Homo sapiens
  misc_RNA (1)...(19): siRNA sense strand
aggccgacauccuggcuau

SEQ ID NO: 2577489 - RNA, 19 nt, Homo sapiens
  misc_RNA (1)...(19): siRNA sense strand
agaaacucuugcaugagaa

SEQ ID NO: 2577490 - RNA, 19 nt, Homo sapiens
  misc_RNA (1)...(19): siRNA sense strand
ggcuauggcagaaaugauu

SEQ ID NO: 2577491 - RNA, 19 nt, Homo sapiens
  misc_RNA (1)...(19): siRNA sense strand
ggaauuuggagaggaucua

SEQ ID NO: 2577492 - RNA, 19 nt, Homo sapiens
  misc_RNA (1)...(19): siRNA sense strand
aaaauaugccaauggagaa

SEQ ID NO: 2577493 - RNA, 19 nt, Homo sapiens
  misc_RNA (1)...(19): siRNA sense strand
gcaaugaguucgugggccu

SEQ ID NO: 2577494 - RNA, 19 nt, Homo sapiens
  misc_RNA (1)...(19): siRNA sense strand
ucgcauggcacuaggcaau

SEQ ID NO: 2577495 - RNA, 19 nt, Homo sapiens
  misc_RNA (1)...(19): siRNA sense strand
ugaaagacccgcuguucua

SEQ ID NO: 2577496 - RNA, 19 nt, Homo sapiens
  misc_RNA (1)...(19): siRNA sense strand
ugacccggcuauugugaaa

SEQ ID NO: 2577497 - RNA, 19 nt, Homo sapiens
  misc_RNA (1)...(19): siRNA sense strand
ugauggacgagcugggcua

SEQ ID NO: 2577498 - RNA, 19 nt, Homo sapiens
  misc_RNA (1)...(19): siRNA sense strand
guuccagaagacagagcua

SEQ ID NO: 2577499 - RNA, 19 nt, Homo sapiens
  misc_RNA (1)...(19): siRNA sense strand
gcaacuguagccugggcaa

SEQ ID NO: 2577500 - RNA, 19 nt, Homo sapiens
  misc_RNA (1)...(19): siRNA sense strand
gcuggaaaggugagaacgu

SEQ ID NO: 2577501 - RNA, 19 nt, Homo sapiens
  misc_RNA (1)...(19): siRNA sense strand
acaacaagaagauugccaa

SEQ ID NO: 2577502 - RNA, 19 nt, Homo sapiens
  misc_RNA (1)...(19): siRNA sense strand
acugugaccuggagcgcuu

SEQ ID NO: 2577503 - RNA, 19 nt, Homo sapiens
  misc_RNA (1)...(19): siRNA sense strand
cgcagaaagaagaaagaau

SEQ ID NO: 2577504 - RNA, 19 nt, Homo sapiens
  misc_RNA (1)...(19): siRNA sense strand
cagaaaaggagacggagaa

SEQ ID NO: 2577505 - RNA, 19 nt, Homo sapiens
  misc_RNA (1)...(19): siRNA sense strand
gcagaaaaggagacggaga

SEQ ID NO: 2577506 - RNA, 19 nt, Homo sapiens
  misc_RNA (1)...(19): siRNA sense strand
ccacaagaguaccacguca

SEQ ID NO: 2577507 - RNA, 19 nt, Homo sapiens
  misc_RNA (1)...(19): siRNA sense strand
cagauggaguacagggacu

SEQ ID NO: 2577508 - RNA, 19 nt, Homo sapiens
  misc_RNA (1)...(19): siRNA sense strand
ccccaauugaaaagagaaa

SEQ ID NO: 2577509 - RNA, 19 nt, Homo sapiens
  misc_RNA (1)...(19): siRNA sense strand
gggcagaaaaggagacgga

SEQ ID NO: 2577510 - RNA, 19 nt, Homo sapiens
  misc_RNA (1)...(19): siRNA sense strand
acagaaagcccacgggauc

SEQ ID NO: 2577511 - RNA, 19 nt, Homo sapiens
  misc_RNA (1)...(19): siRNA sense strand
cguacaaacugcaucagga

SEQ ID NO: 2577512 - RNA, 19 nt, Homo sapiens
  misc_RNA (1)...(19): siRNA sense strand
agagaagcugcucgagaau

SEQ ID NO: 2577513 - RNA, 19 nt, Homo sapiens
  misc_RNA (1)...(19): siRNA sense strand
acaaacugcaucaggagau

SEQ ID NO: 2577514 - RNA, 19 nt, Homo sapiens
  misc_RNA (1)...(19): siRNA sense strand
cuugaauagcccagugaau

SEQ ID NO: 2577515 - RNA, 19 nt, Homo sapiens
  misc_RNA (1)...(19): siRNA sense strand
gcagcuugaucauuggcua

SEQ ID NO: 2577516 - RNA, 19 nt, Homo sapiens
  misc_RNA (1)...(19): siRNA sense strand
cagcuugaucauuggcuau

SEQ ID NO: 2577517 - RNA, 19 nt, Homo sapiens
  misc_RNA (1)...(19): siRNA sense strand
aaacaaaggaggcacggaa

SEQ ID NO: 2577518 - RNA, 19 nt, Homo sapiens
  misc_RNA (1)...(19): siRNA sense strand
acuuagaagauguguauga

SEQ ID NO: 2577519 - RNA, 19 nt, Homo sapiens
  misc_RNA (1)...(19): siRNA sense strand
ucauaugggaugucagcaa

SEQ ID NO: 2577520 - RNA, 19 nt, Homo sapiens
  misc_RNA (1)...(19): siRNA sense strand
gaauaggggcugaaggaga

SEQ ID NO: 2577521 - RNA, 19 nt, Homo sapiens
  misc_RNA (1)...(19): siRNA sense strand
gugaaauagccuggcacaa

SEQ ID NO: 2577522 - RNA, 19 nt, Homo sapiens
  misc_RNA (1)...(19): siRNA sense strand
uggaaaagccaucguggaa

SEQ ID NO: 2577523 - RNA, 19 nt, Homo sapiens
  misc_RNA (1)...(19): siRNA sense strand
ggcccagacucgaugaaaa

SEQ ID NO: 2577524 - RNA, 19 nt, Homo sapiens
  misc_RNA (1)...(19): siRNA sense strand
aaguuauguccaaggagua

SEQ ID NO: 2577525 - RNA, 19 nt, Homo sapiens
  misc_RNA (1)...(19): siRNA sense strand
cugggcaacugaugggaau

SEQ ID NO: 2577526 - RNA, 19 nt, Homo sapiens
  misc_RNA (1)...(19): siRNA sense strand
ggaucuggaagguagaaaa

SEQ ID NO: 2577527 - RNA, 19 nt, Homo sapiens
  misc_RNA (1)...(19): siRNA sense strand
aggacgaggcccagcugaa

SEQ ID NO: 2577528 - RNA, 19 nt, Homo sapiens
  misc_RNA (1)...(19): siRNA sense strand
aggaugaggacgaggccca

SEQ ID NO: 2577529 - RNA, 19 nt, Homo sapiens
  misc_RNA (1)...(19): siRNA sense strand
aaaagggaccagauggaaa

SEQ ID NO: 2577530 - RNA, 19 nt, Homo sapiens
  misc_RNA (1)...(19): siRNA sense strand
aacaaaggaggcacggaaa

SEQ ID NO: 2577531 - RNA, 19 nt, Homo sapiens
  misc_RNA (1)...(19): siRNA sense strand
cugucauccuauuguggaa

SEQ ID NO: 2577532 - RNA, 19 nt, Homo sapiens
  misc_RNA (1)...(19): siRNA sense strand
uugugacauuugagaaaga

SEQ ID NO: 2577533 - RNA, 19 nt, Homo sapiens
  misc_RNA (1)...(19): siRNA sense strand
uuguggaaggugaaugaua

SEQ ID NO: 2577534 - RNA, 19 nt, Homo sapiens
  misc_RNA (1)...(19): siRNA sense strand
aguuauguccaaggaguaa

SEQ ID NO: 2577535 - RNA, 19 nt, Homo sapiens
  misc_RNA (1)...(19): siRNA sense strand
gggcugaaggagaggcaag

SEQ ID NO: 2577536 - RNA, 19 nt, Homo sapiens
  misc_RNA (1)...(19): siRNA sense strand
aaggagaacuggacgguug

SEQ ID NO: 2577537 - RNA, 19 nt, Homo sapiens
  misc_RNA (1)...(19): siRNA sense strand
gaugggaauuuaauggcuu

SEQ ID NO: 2577538 - RNA, 19 nt, Homo sapiens
  misc_RNA (1)...(19): siRNA sense strand
gugacagggugcugcgagu

SEQ ID NO: 2577539 - RNA, 19 nt, Homo sapiens
  misc_RNA (1)...(19): siRNA sense strand
ccugauacagcaaagaaaa

SEQ ID NO: 2577540 - RNA, 19 nt, Homo sapiens
  misc_RNA (1)...(19): siRNA sense strand
aagaaaaccaagagucaga

SEQ ID NO: 2577541 - RNA, 19 nt, Homo sapiens
  misc_RNA (1)...(19): siRNA sense strand
cuuucaauguuucgaagau

SEQ ID NO: 2577542 - RNA, 19 nt, Homo sapiens
  misc_RNA (1)...(19): siRNA sense strand
acaacaccccggagaauaa

SEQ ID NO: 2577543 - RNA, 19 nt, Homo sapiens
  misc_RNA (1)...(19): siRNA sense strand
agucagagacgccuggaga

SEQ ID NO: 2577544 - RNA, 19 nt, Homo sapiens
  misc_RNA (1)...(19): siRNA sense strand
aggcuaaacuugaggaaaa

SEQ ID NO: 2577545 - RNA, 19 nt, Homo sapiens
  misc_RNA (1)...(19): siRNA sense strand
ccgcagaauaacuaagaaa

SEQ ID NO: 2577546 - RNA, 19 nt, Homo sapiens
  misc_RNA (1)...(19): siRNA sense strand
gguuaagagaagaagagaa

SEQ ID NO: 2577547 - RNA, 19 nt, Homo sapiens
  misc_RNA (1)...(19): siRNA sense strand
aggaagaggaggagggcga

SEQ ID NO: 2577548 - RNA, 19 nt, Homo sapiens
  misc_RNA (1)...(19): siRNA sense strand
gagaagaagagaagcgcau

SEQ ID NO: 2577549 - RNA, 19 nt, Homo sapiens
  misc_RNA (1)...(19): siRNA sense strand
gccagaaacugaaggccaa

SEQ ID NO: 2577550 - RNA, 19 nt, Homo sapiens
  misc_RNA (1)...(19): siRNA sense strand
aggaggaggccaagaagaa

SEQ ID NO: 2577551 - RNA, 19 nt, Homo sapiens
  misc_RNA (1)...(19): siRNA sense strand
aaacagaggaggagggugu

SEQ ID NO: 2577552 - RNA, 19 nt, Homo sapiens
  misc_RNA (1)...(19): siRNA sense strand
gcgcaaggagagacaggaa

SEQ ID NO: 2577553 - RNA, 19 nt, Homo sapiens
  misc_RNA (1)...(19): siRNA sense strand
caauaaauggccagcgaga

SEQ ID NO: 2577554 - RNA, 19 nt, Homo sapiens
  misc_RNA (1)...(19): siRNA sense strand
aggagaaggcggagaagca

SEQ ID NO: 2577555 - RNA, 19 nt, Homo sapiens
  misc_RNA (1)...(19): siRNA sense strand
gugcagaaagggaagaaaa

SEQ ID NO: 2577556 - RNA, 19 nt, Homo sapiens
  misc_RNA (1)...(19): siRNA sense strand
gcucaaguuacgugcagaa

SEQ ID NO: 2577557 - RNA, 19 nt, Homo sapiens
  misc_RNA (1)...(19): siRNA sense strand
ccaagaagaagaaggagga

SEQ ID NO: 2577558 - RNA, 19 nt, Homo sapiens
  misc_RNA (1)...(19): siRNA sense strand
agaaggaggaagagaagga

SEQ ID NO: 2577559 - RNA, 19 nt, Homo sapiens
  misc_RNA (1)...(19): siRNA sense strand
agaaggaugagaaggagaa

SEQ ID NO: 2577560 - RNA, 19 nt, Homo sapiens
  misc_RNA (1)...(19): siRNA sense strand
cugaagacauggacggcuu

SEQ ID NO: 2577561 - RNA, 19 nt, Homo sapiens
  misc_RNA (1)...(19): siRNA sense strand
gagaaggaugagaaggaga

SEQ ID NO: 2577562 - RNA, 19 nt, Homo sapiens
  misc_RNA (1)...(19): siRNA sense strand
aggaugaagaugaggacga

SEQ ID NO: 2577563 - RNA, 19 nt, Homo sapiens
  misc_RNA (1)...(19): siRNA sense strand
aggagaagcugaaagagga

SEQ ID NO: 2577564 - RNA, 19 nt, Homo sapiens
  misc_RNA (1)...(19): siRNA sense strand
cggccagauuggugcugaa

SEQ ID NO: 2577565 - RNA, 19 nt, Homo sapiens
  misc_RNA (1)...(19): siRNA sense strand
cgaaacuugucaacgggaa

SEQ ID NO: 2577566 - RNA, 19 nt, Homo sapiens
  misc_RNA (1)...(19): siRNA sense strand
aggcagacacggaggagga

SEQ ID NO: 2577567 - RNA, 19 nt, Homo sapiens
  misc_RNA (1)...(19): siRNA sense strand
aggaggaggaagaggagga

SEQ ID NO: 2577568 - RNA, 19 nt, Homo sapiens
  misc_RNA (1)...(19): siRNA sense strand
ccgagaacucaguguauga

SEQ ID NO: 2577569 - RNA, 19 nt, Homo sapiens
  misc_RNA (1)...(19): siRNA sense strand
gaaaaggagaggcgggaga

SEQ ID NO: 2577570 - RNA, 19 nt, Homo sapiens
  misc_RNA (1)...(19): siRNA sense strand
ggcaauaaauggccagcga

SEQ ID NO: 2577571 - RNA, 19 nt, Homo sapiens
  misc_RNA (1)...(19): siRNA sense strand
aagaaaaggagaagcugaa

SEQ ID NO: 2577572 - RNA, 19 nt, Homo sapiens
  misc_RNA (1)...(19): siRNA sense strand
gcgcauuaaagcagagaag

SEQ ID NO: 2577573 - RNA, 19 nt, Homo sapiens
  misc_RNA (1)...(19): siRNA sense strand
gcaaagagaucaggagcgu

SEQ ID NO: 2577574 - RNA, 19 nt, Homo sapiens
  misc_RNA (1)...(19): siRNA sense strand
gggaugaugaugacgacau

SEQ ID NO: 2577575 - RNA, 19 nt, Homo sapiens
  misc_RNA (1)...(19): siRNA sense strand
cggaggaggaggaagagga

SEQ ID NO: 2577576 - RNA, 19 nt, Homo sapiens
  misc_RNA (1)...(19): siRNA sense strand
agcugaaagaggaggccaa

SEQ ID NO: 2577577 - RNA, 19 nt, Homo sapiens
  misc_RNA (1)...(19): siRNA sense strand
agagaaggagcuuaaggaa

SEQ ID NO: 2577578 - RNA, 19 nt, Homo sapiens
  misc_RNA (1)...(19): siRNA sense strand
aagcagagaaggccgaaau

SEQ ID NO: 2577579 - RNA, 19 nt, Homo sapiens
  misc_RNA (1)...(19): siRNA sense strand
acgacaugggagaggauga

SEQ ID NO: 2577580 - RNA, 19 nt, Homo sapiens
  misc_RNA (1)...(19): siRNA sense strand
ccagaaaggagcaggacag

SEQ ID NO: 2577581 - RNA, 19 nt, Homo sapiens
  misc_RNA (1)...(19): siRNA sense strand
aggaagaagagaaacgguu

SEQ ID NO: 2577582 - RNA, 19 nt, Homo sapiens
  misc_RNA (1)...(19): siRNA sense strand
gcaaugugaacgggagcaa

SEQ ID NO: 2577583 - RNA, 19 nt, Homo sapiens
  misc_RNA (1)...(19): siRNA sense strand
aggacgaaggugugacaga

SEQ ID NO: 2577584 - RNA, 19 nt, Homo sapiens
  misc_RNA (1)...(19): siRNA sense strand
cgacaugggagaggaugaa

SEQ ID NO: 2577585 - RNA, 19 nt, Homo sapiens
  misc_RNA (1)...(19): siRNA sense strand
ggaggaggguguuggcugu

SEQ ID NO: 2577586 - RNA, 19 nt, Homo sapiens
  misc_RNA (1)...(19): siRNA sense strand
aggccaagaagaagaagga

SEQ ID NO: 2577587 - RNA, 19 nt, Homo sapiens
  misc_RNA (1)...(19): siRNA sense strand
gugccgacccugagaacca

SEQ ID NO: 2577588 - RNA, 19 nt, Homo sapiens
  misc_RNA (1)...(19): siRNA sense strand
cgccagaaacugaaggcca

SEQ ID NO: 2577589 - RNA, 19 nt, Homo sapiens
  misc_RNA (1)...(19): siRNA sense strand
gggaagaaaaggagaagcu

SEQ ID NO: 2577590 - RNA, 19 nt, Homo sapiens
  misc_RNA (1)...(19): siRNA sense strand
ggaauaagaagacggcacu

SEQ ID NO: 2577591 - RNA, 19 nt, Homo sapiens
  misc_RNA (1)...(19): siRNA sense strand
gaagaaaaggagaagcuga

SEQ ID NO: 2577592 - RNA, 19 nt, Homo sapiens
  misc_RNA (1)...(19): siRNA sense strand
gacauagacuuuagaccga

SEQ ID NO: 2577593 - RNA, 19 nt, Homo sapiens
  misc_RNA (1)...(19): siRNA sense strand
agaacgacaaguuggcauu

SEQ ID NO: 2577594 - RNA, 19 nt, Homo sapiens
  misc_RNA (1)...(19): siRNA sense strand
acgaguggcccgagaaugu

SEQ ID NO: 2577595 - RNA, 19 nt, Homo sapiens
  misc_RNA (1)...(19): siRNA sense strand
cgcagaauaacuaagaaau

SEQ ID NO: 2577596 - RNA, 19 nt, Homo sapiens
  misc_RNA (1)...(19): siRNA sense strand
cguuuaagcgccugaaucu

SEQ ID NO: 2577597 - RNA, 19 nt, Homo sapiens
  misc_RNA (1)...(19): siRNA sense strand
gcgagaagacacuggggau

SEQ ID NO: 2577598 - RNA, 19 nt, Homo sapiens
  misc_RNA (1)...(19): siRNA sense strand
cgcaggugcuacagagcuu

SEQ ID NO: 2577599 - RNA, 19 nt, Homo sapiens
  misc_RNA (1)...(19): siRNA sense strand
gcucagacugcaaagagau

SEQ ID NO: 2577600 - RNA, 19 nt, Homo sapiens
  misc_RNA (1)...(19): siRNA sense strand
augaugacgacaugggaga

SEQ ID NO: 2577601 - RNA, 19 nt, Homo sapiens
  misc_RNA (1)...(19): siRNA sense strand
aggaggagggcgacuguau

SEQ ID NO: 2577602 - RNA, 19 nt, Homo sapiens
  misc_RNA (1)...(19): siRNA sense strand
ucgaaugagcagccagaca

SEQ ID NO: 2577603 - RNA, 19 nt, Homo sapiens
  misc_RNA (1)...(19): siRNA sense strand
ccagaaagaugaaggacac

SEQ ID NO: 2577604 - RNA, 19 nt, Homo sapiens
  misc_RNA (1)...(19): siRNA sense strand
gccagaaagaugaaggaca

SEQ ID NO: 2577605 - RNA, 19 nt, Homo sapiens
  misc_RNA (1)...(19): siRNA sense strand
ucaaugagguggaugcaga

SEQ ID NO: 2577606 - RNA, 19 nt, Homo sapiens
  misc_RNA (1)...(19): siRNA sense strand
aggcugacaucgauggaga

SEQ ID NO: 2577607 - RNA, 19 nt, Homo sapiens
  misc_RNA (1)...(19): siRNA sense strand
acacagacagugaggagga

SEQ ID NO: 2577608 - RNA, 19 nt, Homo sapiens
  misc_RNA (1)...(19): siRNA sense strand
ggacacagacagugaggag

SEQ ID NO: 2577609 - RNA, 19 nt, Homo sapiens
  misc_RNA (1)...(19): siRNA sense strand
cagacagugaggaggagau

SEQ ID NO: 2577610 - RNA, 19 nt, Homo sapiens
  misc_RNA (1)...(19): siRNA sense strand
cgagaagacuggagcgugu

SEQ ID NO: 2577611 - RNA, 19 nt, Homo sapiens
  misc_RNA (1)...(19): siRNA sense strand
ggagaaagaagcaggcaug

SEQ ID NO: 2577612 - RNA, 19 nt, Homo sapiens
  misc_RNA (1)...(19): siRNA sense strand
auaucaccauccagagaaa

SEQ ID NO: 2577613 - RNA, 19 nt, Homo sapiens
  misc_RNA (1)...(19): siRNA sense strand
ccgagagacaggugaaaau

SEQ ID NO: 2577614 - RNA, 19 nt, Homo sapiens
  misc_RNA (1)...(19): siRNA sense strand
aaagauuggagcuggaaaa

SEQ ID NO: 2577615 - RNA, 19 nt, Homo sapiens
  misc_RNA (1)...(19): siRNA sense strand
aggagagaaagaugaucaa

SEQ ID NO: 2577616 - RNA, 19 nt, Homo sapiens
  misc_RNA (1)...(19): siRNA sense strand
caaagauuggagcuggaaa

SEQ ID NO: 2577617 - RNA, 19 nt, Homo sapiens
  misc_RNA (1)...(19): siRNA sense strand
ggggaaaaccaggacaaaa

SEQ ID NO: 2577618 - RNA, 19 nt, Homo sapiens
  misc_RNA (1)...(19): siRNA sense strand
uuucagaaucgcagagcca

SEQ ID NO: 2577619 - RNA, 19 nt, Homo sapiens
  misc_RNA (1)...(19): siRNA sense strand
aaggagagaaagaugauca

SEQ ID NO: 2577620 - RNA, 19 nt, Homo sapiens
  misc_RNA (1)...(19): siRNA sense strand
uggagaaagaagcaggcau

SEQ ID NO: 2577621 - RNA, 19 nt, Homo sapiens
  misc_RNA (1)...(19): siRNA sense strand
ccaaagaccugcuggacca

SEQ ID NO: 2577622 - RNA, 19 nt, Homo sapiens
  misc_RNA (1)...(19): siRNA sense strand
ccaagggaggaaugggaaa

SEQ ID NO: 2577623 - RNA, 19 nt, Homo sapiens
  misc_RNA (1)...(19): siRNA sense strand
ucagauggagaaagggaaa

SEQ ID NO: 2577624 - RNA, 19 nt, Homo sapiens
  misc_RNA (1)...(19): siRNA sense strand
acgagaaccuggagaucau

SEQ ID NO: 2577625 - RNA, 19 nt, Homo sapiens
  misc_RNA (1)...(19): siRNA sense strand
agaaagaguuuguugcuca

SEQ ID NO: 2577626 - RNA, 19 nt, Homo sapiens
  misc_RNA (1)...(19): siRNA sense strand
gugaagagcuugacccuca

SEQ ID NO: 2577627 - RNA, 19 nt, Homo sapiens
  misc_RNA (1)...(19): siRNA sense strand
cgauaauaaugauggcagu

SEQ ID NO: 2577628 - RNA, 19 nt, Homo sapiens
  misc_RNA (1)...(19): siRNA sense strand
gggccaaauccaagagugu

SEQ ID NO: 2577629 - RNA, 19 nt, Homo sapiens
  misc_RNA (1)...(19): siRNA sense strand
ugcuugaccucuugggaaa

SEQ ID NO: 2577630 - RNA, 19 nt, Homo sapiens
  misc_RNA (1)...(19): siRNA sense strand
gagcuaucgaugagccuaa

SEQ ID NO: 2577631 - RNA, 19 nt, Homo sapiens
  misc_RNA (1)...(19): siRNA sense strand
ggggugagauuaaggaaau

SEQ ID NO: 2577632 - RNA, 19 nt, Homo sapiens
  misc_RNA (1)...(19): siRNA sense strand
gugacuugcucaugcacaa

SEQ ID NO: 2577633 - RNA, 19 nt, Homo sapiens
  misc_RNA (1)...(19): siRNA sense strand
cccugaagauuguggccua

SEQ ID NO: 2577634 - RNA, 19 nt, Homo sapiens
  misc_RNA (1)...(19): siRNA sense strand
acacaauuucugauggaau

SEQ ID NO: 2577635 - RNA, 19 nt, Homo sapiens
  misc_RNA (1)...(19): siRNA sense strand
aguucaaggccgaguauga

SEQ ID NO: 2577636 - RNA, 19 nt, Homo sapiens
  misc_RNA (1)...(19): siRNA sense strand
ugugaaagccagacacgaa

SEQ ID NO: 2577637 - RNA, 19 nt, Homo sapiens
  misc_RNA (1)...(19): siRNA sense strand
uauuaugaaaccagagcua

SEQ ID NO: 2577638 - RNA, 19 nt, Homo sapiens
  misc_RNA (1)...(19): siRNA sense strand
ccaaguugaagguggcaau

SEQ ID NO: 2577639 - RNA, 19 nt, Homo sapiens
  misc_RNA (1)...(19): siRNA sense strand
ugguagugcugcugaacau

SEQ ID NO: 2577640 - RNA, 19 nt, Homo sapiens
  misc_RNA (1)...(19): siRNA sense strand
guucagagguagacagccu

SEQ ID NO: 2577641 - RNA, 19 nt, Homo sapiens
  misc_RNA (1)...(19): siRNA sense strand
agaaugaguucaaggccga

SEQ ID NO: 2577642 - RNA, 19 nt, Homo sapiens
  misc_RNA (1)...(19): siRNA sense strand
uggcaggacaucagauauu

SEQ ID NO: 2577643 - RNA, 19 nt, Homo sapiens
  misc_RNA (1)...(19): siRNA sense strand
cugcagaggagaaggccuu

SEQ ID NO: 2577644 - RNA, 19 nt, Homo sapiens
  misc_RNA (1)...(19): siRNA sense strand
gcugcuaugauaagaaauu

SEQ ID NO: 2577645 - RNA, 19 nt, Homo sapiens
  misc_RNA (1)...(19): siRNA sense strand
ugguggaaccugauggauu

SEQ ID NO: 2577646 - RNA, 19 nt, Homo sapiens
  misc_RNA (1)...(19): siRNA sense strand
ggggauccgaugugagaaa

SEQ ID NO: 2577647 - RNA, 19 nt, Homo sapiens
  misc_RNA (1)...(19): siRNA sense strand
augcugauaucgaguggaa

SEQ ID NO: 2577648 - RNA, 19 nt, Homo sapiens
  misc_RNA (1)...(19): siRNA sense strand
aggacgaagcucuggauga

SEQ ID NO: 2577649 - RNA, 19 nt, Homo sapiens
  misc_RNA (1)...(19): siRNA sense strand
caggaaguuaucaggaauu

SEQ ID NO: 2577650 - RNA, 19 nt, Homo sapiens
  misc_RNA (1)...(19): siRNA sense strand
ggaaacacuggguagucaa

SEQ ID NO: 2577651 - RNA, 19 nt, Homo sapiens
  misc_RNA (1)...(19): siRNA sense strand
caucaaauugcuuguccaa

SEQ ID NO: 2577652 - RNA, 19 nt, Homo sapiens
  misc_RNA (1)...(19): siRNA sense strand
ugagguagaauuaggugaa

SEQ ID NO: 2577653 - RNA, 19 nt, Homo sapiens
  misc_RNA (1)...(19): siRNA sense strand
gcugauaucgaguggaagu

SEQ ID NO: 2577654 - RNA, 19 nt, Homo sapiens
  misc_RNA (1)...(19): siRNA sense strand
agguggagaaugaguucaa

SEQ ID NO: 2577655 - RNA, 19 nt, Homo sapiens
  misc_RNA (1)...(19): siRNA sense strand
gggacuuacagaagaaaau

SEQ ID NO: 2577656 - RNA, 19 nt, Homo sapiens
  misc_RNA (1)...(19): siRNA sense strand
ucaggaaguuaucaggaau

SEQ ID NO: 2577657 - RNA, 19 nt, Homo sapiens
  misc_RNA (1)...(19): siRNA sense strand
cggagaaggcgcaacuuga

SEQ ID NO: 2577658 - RNA, 19 nt, Homo sapiens
  misc_RNA (1)...(19): siRNA sense strand
acaccaacaacuacgaaau

SEQ ID NO: 2577659 - RNA, 19 nt, Homo sapiens
  misc_RNA (1)...(19): siRNA sense strand
ugaccacagugaagagcuu

SEQ ID NO: 2577660 - RNA, 19 nt, Homo sapiens
  misc_RNA (1)...(19): siRNA sense strand
ugauggacaggaagaacaa

SEQ ID NO: 2577661 - RNA, 19 nt, Homo sapiens
  misc_RNA (1)...(19): siRNA sense strand
cucagagagacgauaauaa

SEQ ID NO: 2577662 - RNA, 19 nt, Homo sapiens
  misc_RNA (1)...(19): siRNA sense strand
aauuuaggcugcaagaaaa

SEQ ID NO: 2577663 - RNA, 19 nt, Homo sapiens
  misc_RNA (1)...(19): siRNA sense strand
ucuccaaauuuaaugguca

SEQ ID NO: 2577664 - RNA, 19 nt, Homo sapiens
  misc_RNA (1)...(19): siRNA sense strand
gugauggacaggaagaaca

SEQ ID NO: 2577665 - RNA, 19 nt, Homo sapiens
  misc_RNA (1)...(19): siRNA sense strand
ccaacaacuacgaaaucau

SEQ ID NO: 2577666 - RNA, 19 nt, Homo sapiens
  misc_RNA (1)...(19): siRNA sense strand
ccaguggugcccaaggaaa

SEQ ID NO: 2577667 - RNA, 19 nt, Homo sapiens
  misc_RNA (1)...(19): siRNA sense strand
ccaaaacacaugagggacu

SEQ ID NO: 2577668 - RNA, 19 nt, Homo sapiens
  misc_RNA (1)...(19): siRNA sense strand
ccauugagaacgagaaccu

SEQ ID NO: 2577669 - RNA, 19 nt, Homo sapiens
  misc_RNA (1)...(19): siRNA sense strand
agaacgagaaccuggagau

SEQ ID NO: 2577670 - RNA, 19 nt, Homo sapiens
  misc_RNA (1)...(19): siRNA sense strand
caaucaaauaccaccagaa

SEQ ID NO: 2577671 - RNA, 19 nt, Homo sapiens
  misc_RNA (1)...(19): siRNA sense strand
guauaaugguucucgucca

SEQ ID NO: 2577672 - RNA, 19 nt, Homo sapiens
  misc_RNA (1)...(19): siRNA sense strand
aggaauuaaagcaagacau

SEQ ID NO: 2577673 - RNA, 19 nt, Homo sapiens
  misc_RNA (1)...(19): siRNA sense strand
cugcaugaccauuggguuc

SEQ ID NO: 2577674 - RNA, 19 nt, Homo sapiens
  misc_RNA (1)...(19): siRNA sense strand
agauuaaggaaauguggga

SEQ ID NO: 2577675 - RNA, 19 nt, Homo sapiens
  misc_RNA (1)...(19): siRNA sense strand
acacgaauucaccgaguuu

SEQ ID NO: 2577676 - RNA, 19 nt, Homo sapiens
  misc_RNA (1)...(19): siRNA sense strand
gaugaguuacuuugaugaa

SEQ ID NO: 2577677 - RNA, 19 nt, Homo sapiens
  misc_RNA (1)...(19): siRNA sense strand
ccucaaugcuguggagaag

SEQ ID NO: 2577678 - RNA, 19 nt, Homo sapiens
  misc_RNA (1)...(19): siRNA sense strand
gcacaaauggggugaugga

SEQ ID NO: 2577679 - RNA, 19 nt, Homo sapiens
  misc_RNA (1)...(19): siRNA sense strand
cggaaacacuggguaguca

SEQ ID NO: 2577680 - RNA, 19 nt, Homo sapiens
  misc_RNA (1)...(19): siRNA sense strand
ggaaaugugggauggugga

SEQ ID NO: 2577681 - RNA, 19 nt, Homo sapiens
  misc_RNA (1)...(19): siRNA sense strand
cugaacaugcugauugcua

SEQ ID NO: 2577682 - RNA, 19 nt, Homo sapiens
  misc_RNA (1)...(19): siRNA sense strand
ggaaguuaucaggaauuua

SEQ ID NO: 2577683 - RNA, 19 nt, Homo sapiens
  misc_RNA (1)...(19): siRNA sense strand
cuccaaauuuaauggucau

SEQ ID NO: 2577684 - RNA, 19 nt, Homo sapiens
  misc_RNA (1)...(19): siRNA sense strand
ggagaaagggaaagcagag

SEQ ID NO: 2577685 - RNA, 19 nt, Homo sapiens
  misc_RNA (1)...(19): siRNA sense strand
ccaacguagaccagcuaua

SEQ ID NO: 2577686 - RNA, 19 nt, Homo sapiens
  misc_RNA (1)...(19): siRNA sense strand
gagaaugaugaaagaccau

SEQ ID NO: 2577687 - RNA, 19 nt, Homo sapiens
  misc_RNA (1)...(19): siRNA sense strand
ccaaauuccucagcggcaa

SEQ ID NO: 2577688 - RNA, 19 nt, Homo sapiens
  misc_RNA (1)...(19): siRNA sense strand
ugagaaugaugaaagacca

SEQ ID NO: 2577689 - RNA, 19 nt, Homo sapiens
  misc_RNA (1)...(19): siRNA sense strand
aagaaacggaggaggacaa

SEQ ID NO: 2577690 - RNA, 19 nt, Homo sapiens
  misc_RNA (1)...(19): siRNA sense strand
uggaagaaacggaggagga

SEQ ID NO: 2577691 - RNA, 19 nt, Homo sapiens
  misc_RNA (1)...(19): siRNA sense strand
cggaggaggacaacgaaga

SEQ ID NO: 2577692 - RNA, 19 nt, Homo sapiens
  misc_RNA (1)...(19): siRNA sense strand
uugcuuaacauuugggaga

SEQ ID NO: 2577693 - RNA, 19 nt, Homo sapiens
  misc_RNA (1)...(19): siRNA sense strand
cugucaaaccagaucaaau

SEQ ID NO: 2577694 - RNA, 19 nt, Homo sapiens
  misc_RNA (1)...(19): siRNA sense strand
ccaacacagcccaggaaca

SEQ ID NO: 2577695 - RNA, 19 nt, Homo sapiens
  misc_RNA (1)...(19): siRNA sense strand
cagcugaccuggaggcucu

SEQ ID NO: 2577696 - RNA, 19 nt, Homo sapiens
  misc_RNA (1)...(19): siRNA sense strand
acggugaagcagacaagaa

SEQ ID NO: 2577697 - RNA, 19 nt, Homo sapiens
  misc_RNA (1)...(19): siRNA sense strand
ccguguuugagguggguuu

SEQ ID NO: 2577698 - RNA, 19 nt, Homo sapiens
  misc_RNA (1)...(19): siRNA sense strand
ggagggaacuugaggaucc

SEQ ID NO: 2577699 - RNA, 19 nt, Homo sapiens
  misc_RNA (1)...(19): siRNA sense strand
cugugauguaccugggcua

SEQ ID NO: 2577700 - RNA, 19 nt, Homo sapiens
  misc_RNA (1)...(19): siRNA sense strand
ccaaaauggagcacgguga

SEQ ID NO: 2577701 - RNA, 19 nt, Homo sapiens
  misc_RNA (1)...(19): siRNA sense strand
gguccaaagcuggguccaa

SEQ ID NO: 2577702 - RNA, 19 nt, Homo sapiens
  misc_RNA (1)...(19): siRNA sense strand
gcaaaucaggggaugggaa

SEQ ID NO: 2577703 - RNA, 19 nt, Homo sapiens
  misc_RNA (1)...(19): siRNA sense strand
aaucaaagaagaagagcca

SEQ ID NO: 2577704 - RNA, 19 nt, Homo sapiens
  misc_RNA (1)...(19): siRNA sense strand
guggaauggugguggguac

SEQ ID NO: 2577705 - RNA, 19 nt, Homo sapiens
  misc_RNA (1)...(19): siRNA sense strand
cugcagaugaggaugagaa

SEQ ID NO: 2577706 - RNA, 19 nt, Homo sapiens
  misc_RNA (1)...(19): siRNA sense strand
ccaccauccaacaggcaaa

SEQ ID NO: 2577707 - RNA, 19 nt, Homo sapiens
  misc_RNA (1)...(19): siRNA sense strand
agucacugcacuacagaaa

SEQ ID NO: 2577708 - RNA, 19 nt, Homo sapiens
  misc_RNA (1)...(19): siRNA sense strand
aagcgaaagcugugggugu

SEQ ID NO: 2577709 - RNA, 19 nt, Homo sapiens
  misc_RNA (1)...(19): siRNA sense strand
ucaaagaagaagagccagu

SEQ ID NO: 2577710 - RNA, 19 nt, Homo sapiens
  misc_RNA (1)...(19): siRNA sense strand
aagaagagccaguggaggu

SEQ ID NO: 2577711 - RNA, 19 nt, Homo sapiens
  misc_RNA (1)...(19): siRNA sense strand
gcaugagaugacauugaaa

SEQ ID NO: 2577712 - RNA, 19 nt, Homo sapiens
  misc_RNA (1)...(19): siRNA sense strand
cugaaggagaaggagguua

SEQ ID NO: 2577713 - RNA, 19 nt, Homo sapiens
  misc_RNA (1)...(19): siRNA sense strand
agccaagaugagacugaaa

SEQ ID NO: 2577714 - RNA, 19 nt, Homo sapiens
  misc_RNA (1)...(19): siRNA sense strand
ugcagaugaggaugagaaa

SEQ ID NO: 2577715 - RNA, 19 nt, Homo sapiens
  misc_RNA (1)...(19): siRNA sense strand
aagaugagacugaaagcca

SEQ ID NO: 2577716 - RNA, 19 nt, Homo sapiens
  misc_RNA (1)...(19): siRNA sense strand
aaucaauggugguugugga

SEQ ID NO: 2577717 - RNA, 19 nt, Homo sapiens
  misc_RNA (1)...(19): siRNA sense strand
cgccacagcaagaggaaca

SEQ ID NO: 2577718 - RNA, 19 nt, Homo sapiens
  misc_RNA (1)...(19): siRNA sense strand
ggaacagagaucaggucuu

SEQ ID NO: 2577719 - RNA, 19 nt, Homo sapiens
  misc_RNA (1)...(19): siRNA sense strand
cuucaauggcacaguccaa

SEQ ID NO: 2577720 - RNA, 19 nt, Homo sapiens
  misc_RNA (1)...(19): siRNA sense strand
cuguagaccaggagcuuca

SEQ ID NO: 2577721 - RNA, 19 nt, Homo sapiens
  misc_RNA (1)...(19): siRNA sense strand
agaucaggucuuauggcaa

SEQ ID NO: 2577722 - RNA, 19 nt, Homo sapiens
  misc_RNA (1)...(19): siRNA sense strand
cagcagcagcagcaagcaa

SEQ ID NO: 2577723 - RNA, 19 nt, Homo sapiens
  misc_RNA (1)...(19): siRNA sense strand
caguaagcagauaguguca

SEQ ID NO: 2577724 - RNA, 19 nt, Homo sapiens
  misc_RNA (1)...(19): siRNA sense strand
ccaguaaucuucuaagcca

SEQ ID NO: 2577725 - RNA, 19 nt, Homo sapiens
  misc_RNA (1)...(19): siRNA sense strand
agcaagaggaacagagauc

SEQ ID NO: 2577726 - RNA, 19 nt, Homo sapiens
  misc_RNA (1)...(19): siRNA sense strand
ccaccaucgccuagagaua

SEQ ID NO: 2577727 - RNA, 19 nt, Homo sapiens
  misc_RNA (1)...(19): siRNA sense strand
uugcagaaggagaaagaaa

SEQ ID NO: 2577728 - RNA, 19 nt, Homo sapiens
  misc_RNA (1)...(19): siRNA sense strand
gcuuagaaauggacgacga

SEQ ID NO: 2577729 - RNA, 19 nt, Homo sapiens
  misc_RNA (1)...(19): siRNA sense strand
acuugaggcuccagaggaa

SEQ ID NO: 2577730 - RNA, 19 nt, Homo sapiens
  misc_RNA (1)...(19): siRNA sense strand
agaggaagcugcagaggga

SEQ ID NO: 2577731 - RNA, 19 nt, Homo sapiens
  misc_RNA (1)...(19): siRNA sense strand
cugcagagggagauggaga

SEQ ID NO: 2577732 - RNA, 19 nt, Homo sapiens
  misc_RNA (1)...(19): siRNA sense strand
aggcacugcaggaggagaa

SEQ ID NO: 2577733 - RNA, 19 nt, Homo sapiens
  misc_RNA (1)...(19): siRNA sense strand
aggcuuugcagaaggagaa

SEQ ID NO: 2577734 - RNA, 19 nt, Homo sapiens
  misc_RNA (1)...(19): siRNA sense strand
gagaagagaacuugaggcu

SEQ ID NO: 2577735 - RNA, 19 nt, Homo sapiens
  misc_RNA (1)...(19): siRNA sense strand
uugaacaagagcaggaauu

SEQ ID NO: 2577736 - RNA, 19 nt, Homo sapiens
  misc_RNA (1)...(19): siRNA sense strand
guuaaucgccucuggaaaa

SEQ ID NO: 2577737 - RNA, 19 nt, Homo sapiens
  misc_RNA (1)...(19): siRNA sense strand
cagaaaauaugaugcguca

SEQ ID NO: 2577738 - RNA, 19 nt, Homo sapiens
  misc_RNA (1)...(19): siRNA sense strand
gagcaggaauuucagguca

SEQ ID NO: 2577739 - RNA, 19 nt, Homo sapiens
  misc_RNA (1)...(19): siRNA sense strand
aggaauuucaggucaacaa

SEQ ID NO: 2577740 - RNA, 19 nt, Homo sapiens
  misc_RNA (1)...(19): siRNA sense strand
aguuaaucgccucuggaaa

SEQ ID NO: 2577741 - RNA, 19 nt, Homo sapiens
  misc_RNA (1)...(19): siRNA sense strand
acaugagagaagagaacuu

SEQ ID NO: 2577742 - RNA, 19 nt, Homo sapiens
  misc_RNA (1)...(19): siRNA sense strand
aggaagcugcagagggaga

SEQ ID NO: 2577743 - RNA, 19 nt, Homo sapiens
  misc_RNA (1)...(19): siRNA sense strand
gcacaaggauuaagaccuc

SEQ ID NO: 2577744 - RNA, 19 nt, Homo sapiens
  misc_RNA (1)...(19): siRNA sense strand
gaacaguugagacgggaga

SEQ ID NO: 2577745 - RNA, 19 nt, Homo sapiens
  misc_RNA (1)...(19): siRNA sense strand
agcaggaauuucaggucaa

SEQ ID NO: 2577746 - RNA, 19 nt, Homo sapiens
  misc_RNA (1)...(19): siRNA sense strand
aaauggacgacgaaaggua

SEQ ID NO: 2577747 - RNA, 19 nt, Homo sapiens
  misc_RNA (1)...(19): siRNA sense strand
ucacaugagagaagagaac

SEQ ID NO: 2577748 - RNA, 19 nt, Homo sapiens
  misc_RNA (1)...(19): siRNA sense strand
aacaagaagcacuaguuaa

SEQ ID NO: 2577749 - RNA, 19 nt, Homo sapiens
  misc_RNA (1)...(19): siRNA sense strand
gccuauaucaccuggucua

SEQ ID NO: 2577750 - RNA, 19 nt, Homo sapiens
  misc_RNA (1)...(19): siRNA sense strand
gaagagaacuugaggcucc

SEQ ID NO: 2577751 - RNA, 19 nt, Homo sapiens
  misc_RNA (1)...(19): siRNA sense strand
gcaaggcacugcaggagga

SEQ ID NO: 2577752 - RNA, 19 nt, Homo sapiens
  misc_RNA (1)...(19): siRNA sense strand
cgcugcagcaagagaacaa

SEQ ID NO: 2577753 - RNA, 19 nt, Homo sapiens
  misc_RNA (1)...(19): siRNA sense strand
cauuggaacaagaacaaga

SEQ ID NO: 2577754 - RNA, 19 nt, Homo sapiens
  misc_RNA (1)...(19): siRNA sense strand
cacaguaucuggaggagga

SEQ ID NO: 2577755 - RNA, 19 nt, Homo sapiens
  misc_RNA (1)...(19): siRNA sense strand
cugagcaggaagaagaauu

SEQ ID NO: 2577756 - RNA, 19 nt, Homo sapiens
  misc_RNA (1)...(19): siRNA sense strand
auacauuggaacaagaaca

SEQ ID NO: 2577757 - RNA, 19 nt, Homo sapiens
  misc_RNA (1)...(19): siRNA sense strand
ugucagaaaugcagccagu

SEQ ID NO: 2577758 - RNA, 19 nt, Homo sapiens
  misc_RNA (1)...(19): siRNA sense strand
aaguggaacggcugaagaa

SEQ ID NO: 2577759 - RNA, 19 nt, Homo sapiens
  misc_RNA (1)...(19): siRNA sense strand
aagagaacaaggugcugaa

SEQ ID NO: 2577760 - RNA, 19 nt, Homo sapiens
  misc_RNA (1)...(19): siRNA sense strand
cagccaguguugugggucu

SEQ ID NO: 2577761 - RNA, 19 nt, Homo sapiens
  misc_RNA (1)...(19): siRNA sense strand
gcuucauucuccuggcuuu

SEQ ID NO: 2577762 - RNA, 19 nt, Homo sapiens
  misc_RNA (1)...(19): siRNA sense strand
aguugagacgggagaagau

SEQ ID NO: 2577763 - RNA, 19 nt, Homo sapiens
  misc_RNA (1)...(19): siRNA sense strand
aaauucaggcuuugcagaa

SEQ ID NO: 2577764 - RNA, 19 nt, Homo sapiens
  misc_RNA (1)...(19): siRNA sense strand
agaaaggcgaacuagaaca

SEQ ID NO: 2577765 - RNA, 19 nt, Homo sapiens
  misc_RNA (1)...(19): siRNA sense strand
agugaguccagcuuagaaa

SEQ ID NO: 2577766 - RNA, 19 nt, Homo sapiens
  misc_RNA (1)...(19): siRNA sense strand
augaagaaauggagaugaa

SEQ ID NO: 2577767 - RNA, 19 nt, Homo sapiens
  misc_RNA (1)...(19): siRNA sense strand
ccacaaaccaacagaggau

SEQ ID NO: 2577768 - RNA, 19 nt, Homo sapiens
  misc_RNA (1)...(19): siRNA sense strand
cugcagaagcgaaagggaa

SEQ ID NO: 2577769 - RNA, 19 nt, Homo sapiens
  misc_RNA (1)...(19): siRNA sense strand
gcgaaagggaacauucaaa

SEQ ID NO: 2577770 - RNA, 19 nt, Homo sapiens
  misc_RNA (1)...(19): siRNA sense strand
agaacagaauauagagguu

SEQ ID NO: 2577771 - RNA, 19 nt, Homo sapiens
  misc_RNA (1)...(19): siRNA sense strand
gaagaaauggagaugaaaa

SEQ ID NO: 2577772 - RNA, 19 nt, Homo sapiens
  misc_RNA (1)...(19): siRNA sense strand
ccaauugaugacuggauua

SEQ ID NO: 2577773 - RNA, 19 nt, Homo sapiens
  misc_RNA (1)...(19): siRNA sense strand
ucucuaaguuacacagcaa

SEQ ID NO: 2577774 - RNA, 19 nt, Homo sapiens
  misc_RNA (1)...(19): siRNA sense strand
caggaaaagaacagaauau

SEQ ID NO: 2577775 - RNA, 19 nt, Homo sapiens
  misc_RNA (1)...(19): siRNA sense strand
ggagaaaggaagucaguac

SEQ ID NO: 2577776 - RNA, 19 nt, Homo sapiens
  misc_RNA (1)...(19): siRNA sense strand
ugggaauggaugaaaggaa

SEQ ID NO: 2577777 - RNA, 19 nt, Homo sapiens
  misc_RNA (1)...(19): siRNA sense strand
gggaauggaugaaaggaag

SEQ ID NO: 2577778 - RNA, 19 nt, Homo sapiens
  misc_RNA (1)...(19): siRNA sense strand
auauagagguugauggacu

SEQ ID NO: 2577779 - RNA, 19 nt, Homo sapiens
  misc_RNA (1)...(19): siRNA sense strand
cgauauuauuccauugaga

SEQ ID NO: 2577780 - RNA, 19 nt, Homo sapiens
  misc_RNA (1)...(19): siRNA sense strand
aggucaagacacugaggaa

SEQ ID NO: 2577781 - RNA, 19 nt, Homo sapiens
  misc_RNA (1)...(19): siRNA sense strand
ggaugaucugagugaacaa

SEQ ID NO: 2577782 - RNA, 19 nt, Homo sapiens
  misc_RNA (1)...(19): siRNA sense strand
aggaagcaacuuacggaua

SEQ ID NO: 2577783 - RNA, 19 nt, Homo sapiens
  misc_RNA (1)...(19): siRNA sense strand
gaacaggaaaugaagcaga

SEQ ID NO: 2577784 - RNA, 19 nt, Homo sapiens
  misc_RNA (1)...(19): siRNA sense strand
caacagaggauucagccaa

SEQ ID NO: 2577785 - RNA, 19 nt, Homo sapiens
  misc_RNA (1)...(19): siRNA sense strand
cuauaaaauucgacacaga

SEQ ID NO: 2577786 - RNA, 19 nt, Homo sapiens
  misc_RNA (1)...(19): siRNA sense strand
cuucagcccagcagagaaa

SEQ ID NO: 2577787 - RNA, 19 nt, Homo sapiens
  misc_RNA (1)...(19): siRNA sense strand
cagccaauguguaugaaca

SEQ ID NO: 2577788 - RNA, 19 nt, Homo sapiens
  misc_RNA (1)...(19): siRNA sense strand
uaguagccauugaaggaaa

SEQ ID NO: 2577789 - RNA, 19 nt, Homo sapiens
  misc_RNA (1)...(19): siRNA sense strand
ugggaaaccugaagccaga

SEQ ID NO: 2577790 - RNA, 19 nt, Homo sapiens
  misc_RNA (1)...(19): siRNA sense strand
ccuaugaaagcauggauau

SEQ ID NO: 2577791 - RNA, 19 nt, Homo sapiens
  misc_RNA (1)...(19): siRNA sense strand
ugcagagacuccagagaau

SEQ ID NO: 2577792 - RNA, 19 nt, Homo sapiens
  misc_RNA (1)...(19): siRNA sense strand
ugaucaaguggaagaaaga

SEQ ID NO: 2577793 - RNA, 19 nt, Homo sapiens
  misc_RNA (1)...(19): siRNA sense strand
ggauauugaguuugaaugu

SEQ ID NO: 2577794 - RNA, 19 nt, Homo sapiens
  misc_RNA (1)...(19): siRNA sense strand
uggaaggacucaugaagca

SEQ ID NO: 2577795 - RNA, 19 nt, Homo sapiens
  misc_RNA (1)...(19): siRNA sense strand
gaggaguuccagugaucaa

SEQ ID NO: 2577796 - RNA, 19 nt, Homo sapiens
  misc_RNA (1)...(19): siRNA sense strand
auuauuagucggacagcaa

SEQ ID NO: 2577797 - RNA, 19 nt, Homo sapiens
  misc_RNA (1)...(19): siRNA sense strand
ucuuagauguguuugggua

SEQ ID NO: 2577798 - RNA, 19 nt, Homo sapiens
  misc_RNA (1)...(19): siRNA sense strand
ccacaagccagaugaggga

SEQ ID NO: 2577799 - RNA, 19 nt, Homo sapiens
  misc_RNA (1)...(19): siRNA sense strand
cagcucaagaacaggaaau

SEQ ID NO: 2577800 - RNA, 19 nt, Homo sapiens
  misc_RNA (1)...(19): siRNA sense strand
ccuuucgaguuguggcuua

SEQ ID NO: 2577801 - RNA, 19 nt, Homo sapiens
  misc_RNA (1)...(19): siRNA sense strand
gaugacuggauuauggaaa

SEQ ID NO: 2577802 - RNA, 19 nt, Homo sapiens
  misc_RNA (1)...(19): siRNA sense strand
agccacagccagucagaaa

SEQ ID NO: 2577803 - RNA, 19 nt, Homo sapiens
  misc_RNA (1)...(19): siRNA sense strand
ccagugaucaaguggaaga

SEQ ID NO: 2577804 - RNA, 19 nt, Homo sapiens
  misc_RNA (1)...(19): siRNA sense strand
ccaacaauccacuggcaga

SEQ ID NO: 2577805 - RNA, 19 nt, Homo sapiens
  misc_RNA (1)...(19): siRNA sense strand
cugaaaaugaggcuggaaa

SEQ ID NO: 2577806 - RNA, 19 nt, Homo sapiens
  misc_RNA (1)...(19): siRNA sense strand
gccuaugaaagcauggaua

SEQ ID NO: 2577807 - RNA, 19 nt, Homo sapiens
  misc_RNA (1)...(19): siRNA sense strand
uccuaagacccaugugaaa

SEQ ID NO: 2577808 - RNA, 19 nt, Homo sapiens
  misc_RNA (1)...(19): siRNA sense strand
cucaagaacaggaaaugaa

SEQ ID NO: 2577809 - RNA, 19 nt, Homo sapiens
  misc_RNA (1)...(19): siRNA sense strand
ccaucaagguggccacaca

SEQ ID NO: 2577810 - RNA, 19 nt, Homo sapiens
  misc_RNA (1)...(19): siRNA sense strand
cuuauaaacuggaaggccu

SEQ ID NO: 2577811 - RNA, 19 nt, Homo sapiens
  misc_RNA (1)...(19): siRNA sense strand
ccaccuuccaacugguaua

SEQ ID NO: 2577812 - RNA, 19 nt, Homo sapiens
  misc_RNA (1)...(19): siRNA sense strand
guugcaaguuccagggcca

SEQ ID NO: 2577813 - RNA, 19 nt, Homo sapiens
  misc_RNA (1)...(19): siRNA sense strand
cauugagagguuagaguca

SEQ ID NO: 2577814 - RNA, 19 nt, Homo sapiens
  misc_RNA (1)...(19): siRNA sense strand
ccaaacacaauguaugaau

SEQ ID NO: 2577815 - RNA, 19 nt, Homo sapiens
  misc_RNA (1)...(19): siRNA sense strand
aguggaacacccugacaaa

SEQ ID NO: 2577816 - RNA, 19 nt, Homo sapiens
  misc_RNA (1)...(19): siRNA sense strand
guggaagaaagauggcauu

SEQ ID NO: 2577817 - RNA, 19 nt, Homo sapiens
  misc_RNA (1)...(19): siRNA sense strand
cugcauagacagcuguauu

SEQ ID NO: 2577818 - RNA, 19 nt, Homo sapiens
  misc_RNA (1)...(19): siRNA sense strand
uguaguagccauugaagga

SEQ ID NO: 2577819 - RNA, 19 nt, Homo sapiens
  misc_RNA (1)...(19): siRNA sense strand
ccaaggucgucauggagau

SEQ ID NO: 2577820 - RNA, 19 nt, Homo sapiens
  misc_RNA (1)...(19): siRNA sense strand
gcaaccugcuugugaucau

SEQ ID NO: 2577821 - RNA, 19 nt, Homo sapiens
  misc_RNA (1)...(19): siRNA sense strand
ggauccaucaugaagaaau

SEQ ID NO: 2577822 - RNA, 19 nt, Homo sapiens
  misc_RNA (1)...(19): siRNA sense strand
cuuccaaccuguaugccua

SEQ ID NO: 2577823 - RNA, 19 nt, Homo sapiens
  misc_RNA (1)...(19): siRNA sense strand
auucacaggacuggagaaa

SEQ ID NO: 2577824 - RNA, 19 nt, Homo sapiens
  misc_RNA (1)...(19): siRNA sense strand
cugcagagacuccagagaa

SEQ ID NO: 2577825 - RNA, 19 nt, Homo sapiens
  misc_RNA (1)...(19): siRNA sense strand
ggacucugaaaguggaaca

SEQ ID NO: 2577826 - RNA, 19 nt, Homo sapiens
  misc_RNA (1)...(19): siRNA sense strand
ccgaggaguuccagugauc

SEQ ID NO: 2577827 - RNA, 19 nt, Homo sapiens
  misc_RNA (1)...(19): siRNA sense strand
aaaugaagcagaagucaga

SEQ ID NO: 2577828 - RNA, 19 nt, Homo sapiens
  misc_RNA (1)...(19): siRNA sense strand
ccaaugugacagaugauga

SEQ ID NO: 2577829 - RNA, 19 nt, Homo sapiens
  misc_RNA (1)...(19): siRNA sense strand
acugugaauuggaugaaga

SEQ ID NO: 2577830 - RNA, 19 nt, Homo sapiens
  misc_RNA (1)...(19): siRNA sense strand
uggacagcaagcagcgaua

SEQ ID NO: 2577831 - RNA, 19 nt, Homo sapiens
  misc_RNA (1)...(19): siRNA sense strand
cagagaaagaaacgggcca

SEQ ID NO: 2577832 - RNA, 19 nt, Homo sapiens
  misc_RNA (1)...(19): siRNA sense strand
uggcaaguuuggaaggacu

SEQ ID NO: 2577833 - RNA, 19 nt, Homo sapiens
  misc_RNA (1)...(19): siRNA sense strand
ccguaaugucuuagugaaa

SEQ ID NO: 2577834 - RNA, 19 nt, Homo sapiens
  misc_RNA (1)...(19): siRNA sense strand
agccauagacccagagaaa

SEQ ID NO: 2577835 - RNA, 19 nt, Homo sapiens
  misc_RNA (1)...(19): siRNA sense strand
gcacaaucaaccagagaau

SEQ ID NO: 2577836 - RNA, 19 nt, Homo sapiens
  misc_RNA (1)...(19): siRNA sense strand
acgcauuauucgugggaca

SEQ ID NO: 2577837 - RNA, 19 nt, Homo sapiens
  misc_RNA (1)...(19): siRNA sense strand
cugaaggaauggugugcaa

SEQ ID NO: 2577838 - RNA, 19 nt, Homo sapiens
  misc_RNA (1)...(19): siRNA sense strand
ccaagaaagcguuugacaa

SEQ ID NO: 2577839 - RNA, 19 nt, Homo sapiens
  misc_RNA (1)...(19): siRNA sense strand
guaccaagaucaaugggaa

SEQ ID NO: 2577840 - RNA, 19 nt, Homo sapiens
  misc_RNA (1)...(19): siRNA sense strand
guacaaugcugauggagga

SEQ ID NO: 2577841 - RNA, 19 nt, Homo sapiens
  misc_RNA (1)...(19): siRNA sense strand
agauggaaguagaagaaaa

SEQ ID NO: 2577842 - RNA, 19 nt, Homo sapiens
  misc_RNA (1)...(19): siRNA sense strand
ucggacagucagagagaua

SEQ ID NO: 2577843 - RNA, 19 nt, Homo sapiens
  misc_RNA (1)...(19): siRNA sense strand
ccauagacccagagaaacu

SEQ ID NO: 2577844 - RNA, 19 nt, Homo sapiens
  misc_RNA (1)...(19): siRNA sense strand
aggcaaauguggaguucau

SEQ ID NO: 2577845 - RNA, 19 nt, Homo sapiens
  misc_RNA (1)...(19): siRNA sense strand
augaagaggauuuggaaga

SEQ ID NO: 2577846 - RNA, 19 nt, Homo sapiens
  misc_RNA (1)...(19): siRNA sense strand
cugcaggaguacagcacaa

SEQ ID NO: 2577847 - RNA, 19 nt, Homo sapiens
  misc_RNA (1)...(19): siRNA sense strand
ggacaaaacuuuaugagga

SEQ ID NO: 2577848 - RNA, 19 nt, Homo sapiens
  misc_RNA (1)...(19): siRNA sense strand
guuagaaggaagagcauca

SEQ ID NO: 2577849 - RNA, 19 nt, Homo sapiens
  misc_RNA (1)...(19): siRNA sense strand
ccuuucaacuggagcacaa

SEQ ID NO: 2577850 - RNA, 19 nt, Homo sapiens
  misc_RNA (1)...(19): siRNA sense strand
gaggagagcuggaugagga

SEQ ID NO: 2577851 - RNA, 19 nt, Homo sapiens
  misc_RNA (1)...(19): siRNA sense strand
caacagaaaagcugaaaau

SEQ ID NO: 2577852 - RNA, 19 nt, Homo sapiens
  misc_RNA (1)...(19): siRNA sense strand
aggaugaguaugugaauga

SEQ ID NO: 2577853 - RNA, 19 nt, Homo sapiens
  misc_RNA (1)...(19): siRNA sense strand
ccuuacagacaccggaaua

SEQ ID NO: 2577854 - RNA, 19 nt, Homo sapiens
  misc_RNA (1)...(19): siRNA sense strand
gguaaaaguccuuggcuca

SEQ ID NO: 2577855 - RNA, 19 nt, Homo sapiens
  misc_RNA (1)...(19): siRNA sense strand
ugauggaugcugaggagua

SEQ ID NO: 2577856 - RNA, 19 nt, Homo sapiens
  misc_RNA (1)...(19): siRNA sense strand
ccggaauacugugguguaa

SEQ ID NO: 2577857 - RNA, 19 nt, Homo sapiens
  misc_RNA (1)...(19): siRNA sense strand
ccaagauggaaguagaaga

SEQ ID NO: 2577858 - RNA, 19 nt, Homo sapiens
  misc_RNA (1)...(19): siRNA sense strand
gaauaguaauccgggacaa

SEQ ID NO: 2577859 - RNA, 19 nt, Homo sapiens
  misc_RNA (1)...(19): siRNA sense strand
gcccaaacuguguggaaaa

SEQ ID NO: 2577860 - RNA, 19 nt, Homo sapiens
  misc_RNA (1)...(19): siRNA sense strand
gugagguugucaugggcaa

SEQ ID NO: 2577861 - RNA, 19 nt, Homo sapiens
  misc_RNA (1)...(19): siRNA sense strand
uggcauuggcacaggauca

SEQ ID NO: 2577862 - RNA, 19 nt, Homo sapiens
  misc_RNA (1)...(19): siRNA sense strand
cacccaaggccgaggauga

SEQ ID NO: 2577863 - RNA, 19 nt, Homo sapiens
  misc_RNA (1)...(19): siRNA sense strand
aggaaaucagcgcaggaaa

SEQ ID NO: 2577864 - RNA, 19 nt, Homo sapiens
  misc_RNA (1)...(19): siRNA sense strand
ggaaaucagcgcaggaaac

SEQ ID NO: 2577865 - RNA, 19 nt, Homo sapiens
  misc_RNA (1)...(19): siRNA sense strand
gcugaguaccugaagaaca

SEQ ID NO: 2577866 - RNA, 19 nt, Homo sapiens
  misc_RNA (1)...(19): siRNA sense strand
ggcaagauauuguucggaa

SEQ ID NO: 2577867 - RNA, 19 nt, Homo sapiens
  misc_RNA (1)...(19): siRNA sense strand
aucuauacuuccagagcaa

SEQ ID NO: 2577868 - RNA, 19 nt, Homo sapiens
  misc_RNA (1)...(19): siRNA sense strand
ccugauugcagcuggagua

SEQ ID NO: 2577869 - RNA, 19 nt, Homo sapiens
  misc_RNA (1)...(19): siRNA sense strand
ggacuuugggucuggguga

SEQ ID NO: 2577870 - RNA, 19 nt, Homo sapiens
  misc_RNA (1)...(19): siRNA sense strand
gaaugauguaccuggaaga

SEQ ID NO: 2577871 - RNA, 19 nt, Homo sapiens
  misc_RNA (1)...(19): siRNA sense strand
uggaguuacuauaugggaa

SEQ ID NO: 2577872 - RNA, 19 nt, Homo sapiens
  misc_RNA (1)...(19): siRNA sense strand
uaaccagcauugagcacaa

SEQ ID NO: 2577873 - RNA, 19 nt, Homo sapiens
  misc_RNA (1)...(19): siRNA sense strand
aaggagaaacugugaagau

SEQ ID NO: 2577874 - RNA, 19 nt, Homo sapiens
  misc_RNA (1)...(19): siRNA sense strand
gggugcuacugcugagauu

SEQ ID NO: 2577875 - RNA, 19 nt, Homo sapiens
  misc_RNA (1)...(19): siRNA sense strand
aggagaaacugugaagauu

SEQ ID NO: 2577876 - RNA, 19 nt, Homo sapiens
  misc_RNA (1)...(19): siRNA sense strand
gggauuuggcagcccguaa

SEQ ID NO: 2577877 - RNA, 19 nt, Homo sapiens
  misc_RNA (1)...(19): siRNA sense strand
gaccuaaauuuaaggaacu

SEQ ID NO: 2577878 - RNA, 19 nt, Homo sapiens
  misc_RNA (1)...(19): siRNA sense strand
gagcuauggaguuacuaua

SEQ ID NO: 2577879 - RNA, 19 nt, Homo sapiens
  misc_RNA (1)...(19): siRNA sense strand
ccaucuguguggaguguga

SEQ ID NO: 2577880 - RNA, 19 nt, Homo sapiens
  misc_RNA (1)...(19): siRNA sense strand
aggaaagaugccaauuaaa

SEQ ID NO: 2577881 - RNA, 19 nt, Homo sapiens
  misc_RNA (1)...(19): siRNA sense strand
agaacaacauacugucaau

SEQ ID NO: 2577882 - RNA, 19 nt, Homo sapiens
  misc_RNA (1)...(19): siRNA sense strand
ggcccaaacuguguggaaa

SEQ ID NO: 2577883 - RNA, 19 nt, Homo sapiens
  misc_RNA (1)...(19): siRNA sense strand
uccacgagcacaaggauaa

SEQ ID NO: 2577884 - RNA, 19 nt, Homo sapiens
  misc_RNA (1)...(19): siRNA sense strand
aagcugaguaccugaagaa

SEQ ID NO: 2577885 - RNA, 19 nt, Homo sapiens
  misc_RNA (1)...(19): siRNA sense strand
agauggaaacuuuggacuu

SEQ ID NO: 2577886 - RNA, 19 nt, Homo sapiens
  misc_RNA (1)...(19): siRNA sense strand
agaacaaugugacggcaga

SEQ ID NO: 2577887 - RNA, 19 nt, Homo sapiens
  misc_RNA (1)...(19): siRNA sense strand
guuuauguuagaaggaaga

SEQ ID NO: 2577888 - RNA, 19 nt, Homo sapiens
  misc_RNA (1)...(19): siRNA sense strand
agaccuaaauuuaaggaac

SEQ ID NO: 2577889 - RNA, 19 nt, Homo sapiens
  misc_RNA (1)...(19): siRNA sense strand
gccuauuguggcagagaau

SEQ ID NO: 2577890 - RNA, 19 nt, Homo sapiens
  misc_RNA (1)...(19): siRNA sense strand
aaacagaguugguggaacc

SEQ ID NO: 2577891 - RNA, 19 nt, Homo sapiens
  misc_RNA (1)...(19): siRNA sense strand
acugagcugaagaggguaa

SEQ ID NO: 2577892 - RNA, 19 nt, Homo sapiens
  misc_RNA (1)...(19): siRNA sense strand
ugguugaagcacagggcaa

SEQ ID NO: 2577893 - RNA, 19 nt, Homo sapiens
  misc_RNA (1)...(19): siRNA sense strand
ugagauugucacaggagaa

SEQ ID NO: 2577894 - RNA, 19 nt, Homo sapiens
  misc_RNA (1)...(19): siRNA sense strand
aggagaaguuggcagacau

SEQ ID NO: 2577895 - RNA, 19 nt, Homo sapiens
  misc_RNA (1)...(19): siRNA sense strand
uggagcaagaagaggguga

SEQ ID NO: 2577896 - RNA, 19 nt, Homo sapiens
  misc_RNA (1)...(19): siRNA sense strand
gagcaagaagagggugaau

SEQ ID NO: 2577897 - RNA, 19 nt, Homo sapiens
  misc_RNA (1)...(19): siRNA sense strand
acgaggagaaguuggcaga

SEQ ID NO: 2577898 - RNA, 19 nt, Homo sapiens
  misc_RNA (1)...(19): siRNA sense strand
aggacauucaggagaacuu

SEQ ID NO: 2577899 - RNA, 19 nt, Homo sapiens
  misc_RNA (1)...(19): siRNA sense strand
agaauuuuguggagcaaga

SEQ ID NO: 2577900 - RNA, 19 nt, Homo sapiens
  misc_RNA (1)...(19): siRNA sense strand
aggauaucgucgagaaaua

SEQ ID NO: 2577901 - RNA, 19 nt, Homo sapiens
  misc_RNA (1)...(19): siRNA sense strand
aagagaaggcagagaugaa

SEQ ID NO: 2577902 - RNA, 19 nt, Homo sapiens
  misc_RNA (1)...(19): siRNA sense strand
cugaagaacuggaagagga

SEQ ID NO: 2577903 - RNA, 19 nt, Homo sapiens
  misc_RNA (1)...(19): siRNA sense strand
ggaaauuaaagaaggggaa

SEQ ID NO: 2577904 - RNA, 19 nt, Homo sapiens
  misc_RNA (1)...(19): siRNA sense strand
acagaaugguacacagcaa

SEQ ID NO: 2577905 - RNA, 19 nt, Homo sapiens
  misc_RNA (1)...(19): siRNA sense strand
gaaggauaucgucgagaaa

SEQ ID NO: 2577906 - RNA, 19 nt, Homo sapiens
  misc_RNA (1)...(19): siRNA sense strand
uaaaagaaauugaggcaga

SEQ ID NO: 2577907 - RNA, 19 nt, Homo sapiens
  misc_RNA (1)...(19): siRNA sense strand
cagaaaauaaggagaguga

SEQ ID NO: 2577908 - RNA, 19 nt, Homo sapiens
  misc_RNA (1)...(19): siRNA sense strand
gagaugucgaggaaggaua

SEQ ID NO: 2577909 - RNA, 19 nt, Homo sapiens
  misc_RNA (1)...(19): siRNA sense strand
guggaaagagugaugagaa

SEQ ID NO: 2577910 - RNA, 19 nt, Homo sapiens
  misc_RNA (1)...(19): siRNA sense strand
ugaagaaagagaaggcaga

SEQ ID NO: 2577911 - RNA, 19 nt, Homo sapiens
  misc_RNA (1)...(19): siRNA sense strand
cggccgaggaggaguauuu

SEQ ID NO: 2577912 - RNA, 19 nt, Homo sapiens
  misc_RNA (1)...(19): siRNA sense strand
cugaagaagucuggaugaa

SEQ ID NO: 2577913 - RNA, 19 nt, Homo sapiens
  misc_RNA (1)...(19): siRNA sense strand
guucaaagagaauuaggaa

SEQ ID NO: 2577914 - RNA, 19 nt, Homo sapiens
  misc_RNA (1)...(19): siRNA sense strand
aaagcauaguuguggauau

SEQ ID NO: 2577915 - RNA, 19 nt, Homo sapiens
  misc_RNA (1)...(19): siRNA sense strand
ugaagaacuggaagaggaa

SEQ ID NO: 2577916 - RNA, 19 nt, Homo sapiens
  misc_RNA (1)...(19): siRNA sense strand
agauagaaggaguugaaca

SEQ ID NO: 2577917 - RNA, 19 nt, Homo sapiens
  misc_RNA (1)...(19): siRNA sense strand
cgcuugaaguggaagauuu

SEQ ID NO: 2577918 - RNA, 19 nt, Homo sapiens
  misc_RNA (1)...(19): siRNA sense strand
agaaauaagcaguagccca

SEQ ID NO: 2577919 - RNA, 19 nt, Homo sapiens
  misc_RNA (1)...(19): siRNA sense strand
cuugaaauuuacagggcga

SEQ ID NO: 2577920 - RNA, 19 nt, Homo sapiens
  misc_RNA (1)...(19): siRNA sense strand
agaccuaguaagaggcaca

SEQ ID NO: 2577921 - RNA, 19 nt, Homo sapiens
  misc_RNA (1)...(19): siRNA sense strand
ggcgaguaggccugggaaa

SEQ ID NO: 2577922 - RNA, 19 nt, Homo sapiens
  misc_RNA (1)...(19): siRNA sense strand
ggaaagagugaugagaaau

SEQ ID NO: 2577923 - RNA, 19 nt, Homo sapiens
  misc_RNA (1)...(19): siRNA sense strand
caacugaggaacaacgcua

SEQ ID NO: 2577924 - RNA, 19 nt, Homo sapiens
  misc_RNA (1)...(19): siRNA sense strand
gcucgacacugacgggcua

SEQ ID NO: 2577925 - RNA, 19 nt, Homo sapiens
  misc_RNA (1)...(19): siRNA sense strand
ccacagaauaaucgagucu

SEQ ID NO: 2577926 - RNA, 19 nt, Homo sapiens
  misc_RNA (1)...(19): siRNA sense strand
gacaguucaaagagaauua

SEQ ID NO: 2577927 - RNA, 19 nt, Homo sapiens
  misc_RNA (1)...(19): siRNA sense strand
gcugaagauagaaggaguu

SEQ ID NO: 2577928 - RNA, 19 nt, Homo sapiens
  misc_RNA (1)...(19): siRNA sense strand
ugaaauuuaggaaggaaga

SEQ ID NO: 2577929 - RNA, 19 nt, Homo sapiens
  misc_RNA (1)...(19): siRNA sense strand
cgucgagaaauaagcagua

SEQ ID NO: 2577930 - RNA, 19 nt, Homo sapiens
  misc_RNA (1)...(19): siRNA sense strand
ucuuauauacggagguuca

SEQ ID NO: 2577931 - RNA, 19 nt, Homo sapiens
  misc_RNA (1)...(19): siRNA sense strand
cagaaugguacacagcaaa

SEQ ID NO: 2577932 - RNA, 19 nt, Homo sapiens
  misc_RNA (1)...(19): siRNA sense strand
ccgagucagagaaguauaa

SEQ ID NO: 2577933 - RNA, 19 nt, Homo sapiens
  misc_RNA (1)...(19): siRNA sense strand
agaaagagaaggcagagau

SEQ ID NO: 2577934 - RNA, 19 nt, Homo sapiens
  misc_RNA (1)...(19): siRNA sense strand
agaaauugaggcagaaaau

SEQ ID NO: 2577935 - RNA, 19 nt, Homo sapiens
  misc_RNA (1)...(19): siRNA sense strand
gcugaagaagucuggauga

SEQ ID NO: 2577936 - RNA, 19 nt, Homo sapiens
  misc_RNA (1)...(19): siRNA sense strand
aaugaaaucacaagcaaca

SEQ ID NO: 2577937 - RNA, 19 nt, Homo sapiens
  misc_RNA (1)...(19): siRNA sense strand
gaaaauaaggagagugaag

SEQ ID NO: 2577938 - RNA, 19 nt, Homo sapiens
  misc_RNA (1)...(19): siRNA sense strand
gagugaagcucuugguggu

SEQ ID NO: 2577939 - RNA, 19 nt, Homo sapiens
  misc_RNA (1)...(19): siRNA sense strand
gguaggaaaaccugaagaa

SEQ ID NO: 2577940 - RNA, 19 nt, Homo sapiens
  misc_RNA (1)...(19): siRNA sense strand
cagagaugaaacaaacuua

SEQ ID NO: 2577941 - RNA, 19 nt, Homo sapiens
  misc_RNA (1)...(19): siRNA sense strand
cuaugaaguuuacacacaa

SEQ ID NO: 2577942 - RNA, 19 nt, Homo sapiens
  misc_RNA (1)...(19): siRNA sense strand
aaccugaaguuguagaaau

SEQ ID NO: 2577943 - RNA, 19 nt, Homo sapiens
  misc_RNA (1)...(19): siRNA sense strand
ugaagaagucuggaugaaa

SEQ ID NO: 2577944 - RNA, 19 nt, Homo sapiens
  misc_RNA (1)...(19): siRNA sense strand
ucuuuaugacgcagagcua

SEQ ID NO: 2577945 - RNA, 19 nt, Homo sapiens
  misc_RNA (1)...(19): siRNA sense strand
ccauguagcaguaaacuca

SEQ ID NO: 2577946 - RNA, 19 nt, Homo sapiens
  misc_RNA (1)...(19): siRNA sense strand
gauagaaggaguugaacac

SEQ ID NO: 2577947 - RNA, 19 nt, Homo sapiens
  misc_RNA (1)...(19): siRNA sense strand
uguauagagcccacagaau

SEQ ID NO: 2577948 - RNA, 19 nt, Homo sapiens
  misc_RNA (1)...(19): siRNA sense strand
aagaaggggaagaaacaaa

SEQ ID NO: 2577949 - RNA, 19 nt, Homo sapiens
  misc_RNA (1)...(19): siRNA sense strand
gaaggauagcaaagcugaa

SEQ ID NO: 2577950 - RNA, 19 nt, Homo sapiens
  misc_RNA (1)...(19): siRNA sense strand
aggcagagaugaaacaaac

SEQ ID NO: 2577951 - RNA, 19 nt, Homo sapiens
  misc_RNA (1)...(19): siRNA sense strand
aaacaaacuuagaccuagu

SEQ ID NO: 2577952 - RNA, 19 nt, Homo sapiens
  misc_RNA (1)...(19): siRNA sense strand
auuaaagcuuucacagaca

SEQ ID NO: 2577953 - RNA, 19 nt, Homo sapiens
  misc_RNA (1)...(19): siRNA sense strand
cggagguucaacugaggaa

SEQ ID NO: 2577954 - RNA, 19 nt, Homo sapiens
  misc_RNA (1)...(19): siRNA sense strand
gugccuuguuucaggagau

SEQ ID NO: 2577955 - RNA, 19 nt, Homo sapiens
  misc_RNA (1)...(19): siRNA sense strand
cggaguuguuugaggagcu

SEQ ID NO: 2577956 - RNA, 19 nt, Homo sapiens
  misc_RNA (1)...(19): siRNA sense strand
ccuugaugcaccacguuaa

SEQ ID NO: 2577957 - RNA, 19 nt, Homo sapiens
  misc_RNA (1)...(19): siRNA sense strand
ucuuggugguccaggucaa

SEQ ID NO: 2577958 - RNA, 19 nt, Homo sapiens
  misc_RNA (1)...(19): siRNA sense strand
aagacaguucaaagagaau

SEQ ID NO: 2577959 - RNA, 19 nt, Homo sapiens
  misc_RNA (1)...(19): siRNA sense strand
ccagaaagcugcccggaag

SEQ ID NO: 2577960 - RNA, 19 nt, Homo sapiens
  misc_RNA (1)...(19): siRNA sense strand
aggcaugaauaaacgggaa

SEQ ID NO: 2577961 - RNA, 19 nt, Homo sapiens
  misc_RNA (1)...(19): siRNA sense strand
gaaaggaugcagagaggca

SEQ ID NO: 2577962 - RNA, 19 nt, Homo sapiens
  misc_RNA (1)...(19): siRNA sense strand
ucaagaacccagagggcca

SEQ ID NO: 2577963 - RNA, 19 nt, Homo sapiens
  misc_RNA (1)...(19): siRNA sense strand
gaacaauacugaaggugac

SEQ ID NO: 2577964 - RNA, 19 nt, Homo sapiens
  misc_RNA (1)...(19): siRNA sense strand
ggaucagaccagaggcgau

SEQ ID NO: 2577965 - RNA, 19 nt, Homo sapiens
  misc_RNA (1)...(19): siRNA sense strand
gcaagaaauuggagccggu

SEQ ID NO: 2577966 - RNA, 19 nt, Homo sapiens
  misc_RNA (1)...(19): siRNA sense strand
gagaaaggaugcagagagg

SEQ ID NO: 2577967 - RNA, 19 nt, Homo sapiens
  misc_RNA (1)...(19): siRNA sense strand
ugaacaauacugaagguga

SEQ ID NO: 2577968 - RNA, 19 nt, Homo sapiens
  misc_RNA (1)...(19): siRNA sense strand
uguacgaggccauggaaca

SEQ ID NO: 2577969 - RNA, 19 nt, Homo sapiens
  misc_RNA (1)...(19): siRNA sense strand
aagagugguacuuuggaaa

SEQ ID NO: 2577970 - RNA, 19 nt, Homo sapiens
  misc_RNA (1)...(19): siRNA sense strand
ccaucuacaucgugaccga

SEQ ID NO: 2577971 - RNA, 19 nt, Homo sapiens
  misc_RNA (1)...(19): siRNA sense strand
agcacuacauggaggugaa

SEQ ID NO: 2577972 - RNA, 19 nt, Homo sapiens
  misc_RNA (1)...(19): siRNA sense strand
ucaugaagcugcugcggca

SEQ ID NO: 2577973 - RNA, 19 nt, Homo sapiens
  misc_RNA (1)...(19): siRNA sense strand
cgggaaagcgagaccacca

SEQ ID NO: 2577974 - RNA, 19 nt, Homo sapiens
  misc_RNA (1)...(19): siRNA sense strand
uggaggaggcgcaggucau

SEQ ID NO: 2577975 - RNA, 19 nt, Homo sapiens
  misc_RNA (1)...(19): siRNA sense strand
acguggaacggcagcacua

SEQ ID NO: 2577976 - RNA, 19 nt, Homo sapiens
  misc_RNA (1)...(19): siRNA sense strand
gagaagacgcacuggcuga

SEQ ID NO: 2577977 - RNA, 19 nt, Homo sapiens
  misc_RNA (1)...(19): siRNA sense strand
cggcaaguucgcacagcaa

SEQ ID NO: 2577978 - RNA, 19 nt, Homo sapiens
  misc_RNA (1)...(19): siRNA sense strand
ugaucaucguggugcagaa

SEQ ID NO: 2577979 - RNA, 19 nt, Homo sapiens
  misc_RNA (1)...(19): siRNA sense strand
aggcucacguggaggagga

SEQ ID NO: 2577980 - RNA, 19 nt, Homo sapiens
  misc_RNA (1)...(19): siRNA sense strand
gcgucaagguggagucgga

SEQ ID NO: 2577981 - RNA, 19 nt, Homo sapiens
  misc_RNA (1)...(19): siRNA sense strand
cuguaagaucugugggaag

SEQ ID NO: 2577982 - RNA, 19 nt, Homo sapiens
  misc_RNA (1)...(19): siRNA sense strand
ccgcaaacacacaggcuuc

SEQ ID NO: 2577983 - RNA, 19 nt, Homo sapiens
  misc_RNA (1)...(19): siRNA sense strand
cgaccuaccgagaagaaaa

SEQ ID NO: 2577984 - RNA, 19 nt, Homo sapiens
  misc_RNA (1)...(19): siRNA sense strand
ggauccagacccaggcaau

SEQ ID NO: 2577985 - RNA, 19 nt, Homo sapiens
  misc_RNA (1)...(19): siRNA sense strand
ggagguggauccagaccca

SEQ ID NO: 2577986 - RNA, 19 nt, Homo sapiens
  misc_RNA (1)...(19): siRNA sense strand
cggcaauuucuuugaguaa

SEQ ID NO: 2577987 - RNA, 19 nt, Homo sapiens
  misc_RNA (1)...(19): siRNA sense strand
agucaagaacgaugguaaa

SEQ ID NO: 2577988 - RNA, 19 nt, Homo sapiens
  misc_RNA (1)...(19): siRNA sense strand
ggguguaacaugugcggaa

SEQ ID NO: 2577989 - RNA, 19 nt, Homo sapiens
  misc_RNA (1)...(19): siRNA sense strand
aaaugaugauggaggaaaa

SEQ ID NO: 2577990 - RNA, 19 nt, Homo sapiens
  misc_RNA (1)...(19): siRNA sense strand
ccacaugagaacacacaaa

SEQ ID NO: 2577991 - RNA, 19 nt, Homo sapiens
  misc_RNA (1)...(19): siRNA sense strand
gguaucacuuggagagaca

SEQ ID NO: 2577992 - RNA, 19 nt, Homo sapiens
  misc_RNA (1)...(19): siRNA sense strand
cgagaaggagcuuggagaa

SEQ ID NO: 2577993 - RNA, 19 nt, Homo sapiens
  misc_RNA (1)...(19): siRNA sense strand
ugaauuuagcugugaggua

SEQ ID NO: 2577994 - RNA, 19 nt, Homo sapiens
  misc_RNA (1)...(19): siRNA sense strand
ggguauaugcccuuggauu

SEQ ID NO: 2577995 - RNA, 19 nt, Homo sapiens
  misc_RNA (1)...(19): siRNA sense strand
aagagaaagagaagugcaa

SEQ ID NO: 2577996 - RNA, 19 nt, Homo sapiens
  misc_RNA (1)...(19): siRNA sense strand
aagucaagaacgaugguaa

SEQ ID NO: 2577997 - RNA, 19 nt, Homo sapiens
  misc_RNA (1)...(19): siRNA sense strand
cugcugaagucaagaacga

SEQ ID NO: 2577998 - RNA, 19 nt, Homo sapiens
  misc_RNA (1)...(19): siRNA sense strand
gagaaagagaagugcaaac

SEQ ID NO: 2577999 - RNA, 19 nt, Homo sapiens
  misc_RNA (1)...(19): siRNA sense strand
gagagacaucacaaggaaa

SEQ ID NO: 2578000 - RNA, 19 nt, Homo sapiens
  misc_RNA (1)...(19): siRNA sense strand
ugauaaaagucaagugcga

SEQ ID NO: 2578001 - RNA, 19 nt, Homo sapiens
  misc_RNA (1)...(19): siRNA sense strand
ccgagaaggagcuuggaga

SEQ ID NO: 2578002 - RNA, 19 nt, Homo sapiens
  misc_RNA (1)...(19): siRNA sense strand
aaagagaagcaaacggaga

SEQ ID NO: 2578003 - RNA, 19 nt, Homo sapiens
  misc_RNA (1)...(19): siRNA sense strand
ggagaaacaaauaagggca

SEQ ID NO: 2578004 - RNA, 19 nt, Homo sapiens
  misc_RNA (1)...(19): siRNA sense strand
aaucggagugccagcaaua

SEQ ID NO: 2578005 - RNA, 19 nt, Homo sapiens
  misc_RNA (1)...(19): siRNA sense strand
ggguugaagcagaguaucu

SEQ ID NO: 2578006 - RNA, 19 nt, Homo sapiens
  misc_RNA (1)...(19): siRNA sense strand
ucucaguccgcuugauaaa

SEQ ID NO: 2578007 - RNA, 19 nt, Homo sapiens
  misc_RNA (1)...(19): siRNA sense strand
caaucgaaagugacaggaa

SEQ ID NO: 2578008 - RNA, 19 nt, Homo sapiens
  misc_RNA (1)...(19): siRNA sense strand
gggcagacauuuagagucg

SEQ ID NO: 2578009 - RNA, 19 nt, Homo sapiens
  misc_RNA (1)...(19): siRNA sense strand
ggaagaagauucaaggagc

SEQ ID NO: 2578010 - RNA, 19 nt, Homo sapiens
  misc_RNA (1)...(19): siRNA sense strand
caaagauguuacaggcagu

SEQ ID NO: 2578011 - RNA, 19 nt, Homo sapiens
  misc_RNA (1)...(19): siRNA sense strand
cagaacgcauacaggugaa

SEQ ID NO: 2578012 - RNA, 19 nt, Homo sapiens
  misc_RNA (1)...(19): siRNA sense strand
caauuacagaagaggcuau

SEQ ID NO: 2578013 - RNA, 19 nt, Homo sapiens
  misc_RNA (1)...(19): siRNA sense strand
ccauauggucagaggcauc

SEQ ID NO: 2578014 - RNA, 19 nt, Homo sapiens
  misc_RNA (1)...(19): siRNA sense strand
acuccaggguccacaagaa

SEQ ID NO: 2578015 - RNA, 19 nt, Homo sapiens
  misc_RNA (1)...(19): siRNA sense strand
gcauggcacaaaagagaaa

SEQ ID NO: 2578016 - RNA, 19 nt, Homo sapiens
  misc_RNA (1)...(19): siRNA sense strand
agaagacaucucugaggua

SEQ ID NO: 2578017 - RNA, 19 nt, Homo sapiens
  misc_RNA (1)...(19): siRNA sense strand
agagacaucacaaggaaaa

SEQ ID NO: 2578018 - RNA, 19 nt, Homo sapiens
  misc_RNA (1)...(19): siRNA sense strand
ccaaagagaagcaaacgga

SEQ ID NO: 2578019 - RNA, 19 nt, Homo sapiens
  misc_RNA (1)...(19): siRNA sense strand
cgauggagauggaggaugc

SEQ ID NO: 2578020 - RNA, 19 nt, Homo sapiens
  misc_RNA (1)...(19): siRNA sense strand
acagaaccucccaaggaaa

SEQ ID NO: 2578021 - RNA, 19 nt, Homo sapiens
  misc_RNA (1)...(19): siRNA sense strand
guugaaacucaggcaaaua

SEQ ID NO: 2578022 - RNA, 19 nt, Homo sapiens
  misc_RNA (1)...(19): siRNA sense strand
auuccgagcuacacaagaa

SEQ ID NO: 2578023 - RNA, 19 nt, Homo sapiens
  misc_RNA (1)...(19): siRNA sense strand
ucaccagcacacaaagaua

SEQ ID NO: 2578024 - RNA, 19 nt, Homo sapiens
  misc_RNA (1)...(19): siRNA sense strand
agagacuggagcauaaaua

SEQ ID NO: 2578025 - RNA, 19 nt, Homo sapiens
  misc_RNA (1)...(19): siRNA sense strand
gcaaacugcagcaaggcuu

SEQ ID NO: 2578026 - RNA, 19 nt, Homo sapiens
  misc_RNA (1)...(19): siRNA sense strand
cugcaccggauaagacaaa

SEQ ID NO: 2578027 - RNA, 19 nt, Homo sapiens
  misc_RNA (1)...(19): siRNA sense strand
augagaacacacaaagauu

SEQ ID NO: 2578028 - RNA, 19 nt, Homo sapiens
  misc_RNA (1)...(19): siRNA sense strand
caagaagggagcaccgaca

SEQ ID NO: 2578029 - RNA, 19 nt, Homo sapiens
  misc_RNA (1)...(19): siRNA sense strand
cggcaaagcuuucagaacc

SEQ ID NO: 2578030 - RNA, 19 nt, Homo sapiens
  misc_RNA (1)...(19): siRNA sense strand
cuucaagagaguguaguua

SEQ ID NO: 2578031 - RNA, 19 nt, Homo sapiens
  misc_RNA (1)...(19): siRNA sense strand
guguaguuauuguggaaag

SEQ ID NO: 2578032 - RNA, 19 nt, Homo sapiens
  misc_RNA (1)...(19): siRNA sense strand
ccggcaauuucuuugagua

SEQ ID NO: 2578033 - RNA, 19 nt, Homo sapiens
  misc_RNA (1)...(19): siRNA sense strand
cugcaugguuuguggcuuc

SEQ ID NO: 2578034 - RNA, 19 nt, Homo sapiens
  misc_RNA (1)...(19): siRNA sense strand
ccucaauauucaucucaga

SEQ ID NO: 2578035 - RNA, 19 nt, Homo sapiens
  misc_RNA (1)...(19): siRNA sense strand
ugccaagaagugaaggaau

SEQ ID NO: 2578036 - RNA, 19 nt, Homo sapiens
  misc_RNA (1)...(19): siRNA sense strand
cagcauggcacaaaagaga

SEQ ID NO: 2578037 - RNA, 19 nt, Homo sapiens
  misc_RNA (1)...(19): siRNA sense strand
uuaucgaccaaaugacaaa

SEQ ID NO: 2578038 - RNA, 19 nt, Homo sapiens
  misc_RNA (1)...(19): siRNA sense strand
ucuguaaacccaagcccaa

SEQ ID NO: 2578039 - RNA, 19 nt, Homo sapiens
  misc_RNA (1)...(19): siRNA sense strand
ccguagagccagagccuga

SEQ ID NO: 2578040 - RNA, 19 nt, Homo sapiens
  misc_RNA (1)...(19): siRNA sense strand
ucagaaaccaagagaucca

SEQ ID NO: 2578041 - RNA, 19 nt, Homo sapiens
  misc_RNA (1)...(19): siRNA sense strand
guaagauugugaugaggca

SEQ ID NO: 2578042 - RNA, 19 nt, Homo sapiens
  misc_RNA (1)...(19): siRNA sense strand
caggaaauucagaaggaca

SEQ ID NO: 2578043 - RNA, 19 nt, Homo sapiens
  misc_RNA (1)...(19): siRNA sense strand
gcaugaguguugaccgcua

SEQ ID NO: 2578044 - RNA, 19 nt, Homo sapiens
  misc_RNA (1)...(19): siRNA sense strand
acuauaucuucgacagcua

SEQ ID NO: 2578045 - RNA, 19 nt, Homo sapiens
  misc_RNA (1)...(19): siRNA sense strand
ugggaguagcacugagaca

SEQ ID NO: 2578046 - RNA, 19 nt, Homo sapiens
  misc_RNA (1)...(19): siRNA sense strand
gcugauugaugauaagcca

SEQ ID NO: 2578047 - RNA, 19 nt, Homo sapiens
  misc_RNA (1)...(19): siRNA sense strand
cuuucaaguuccuggccau

SEQ ID NO: 2578048 - RNA, 19 nt, Homo sapiens
  misc_RNA (1)...(19): siRNA sense strand
aaucaggaaagcacaacaa

SEQ ID NO: 2578049 - RNA, 19 nt, Homo sapiens
  misc_RNA (1)...(19): siRNA sense strand
aaacuaugacuuugggagu

SEQ ID NO: 2578050 - RNA, 19 nt, Homo sapiens
  misc_RNA (1)...(19): siRNA sense strand
gcaucugcguggaccgcua

SEQ ID NO: 2578051 - RNA, 19 nt, Homo sapiens
  misc_RNA (1)...(19): siRNA sense strand
ggauaucagcgaaaggcaa

SEQ ID NO: 2578052 - RNA, 19 nt, Homo sapiens
  misc_RNA (1)...(19): siRNA sense strand
acacaaaggauaucagcga

SEQ ID NO: 2578053 - RNA, 19 nt, Homo sapiens
  misc_RNA (1)...(19): siRNA sense strand
auguguacuucuugugcaa

SEQ ID NO: 2578054 - RNA, 19 nt, Homo sapiens
  misc_RNA (1)...(19): siRNA sense strand
gggcagaagaagaaagcaa

SEQ ID NO: 2578055 - RNA, 19 nt, Homo sapiens
  misc_RNA (1)...(19): siRNA sense strand
acaaagcaguggugggaga

SEQ ID NO: 2578056 - RNA, 19 nt, Homo sapiens
  misc_RNA (1)...(19): siRNA sense strand
ccgugaacgacgagaaaga

SEQ ID NO: 2578057 - RNA, 19 nt, Homo sapiens
  misc_RNA (1)...(19): siRNA sense strand
aguggaaauaccugggaaa

SEQ ID NO: 2578058 - RNA, 19 nt, Homo sapiens
  misc_RNA (1)...(19): siRNA sense strand
uguaauaauuuguguggga

SEQ ID NO: 2578059 - RNA, 19 nt, Homo sapiens
  misc_RNA (1)...(19): siRNA sense strand
uagaaauuguguugggacu

SEQ ID NO: 2578060 - RNA, 19 nt, Homo sapiens
  misc_RNA (1)...(19): siRNA sense strand
ugcuuucacuggagaguaa

SEQ ID NO: 2578061 - RNA, 19 nt, Homo sapiens
  misc_RNA (1)...(19): siRNA sense strand
gagaaagacaaaagagagu

SEQ ID NO: 2578062 - RNA, 19 nt, Homo sapiens
  misc_RNA (1)...(19): siRNA sense strand
ucaacagggcagaagaaga

SEQ ID NO: 2578063 - RNA, 19 nt, Homo sapiens
  misc_RNA (1)...(19): siRNA sense strand
ccacacaacaugaggcuac

SEQ ID NO: 2578064 - RNA, 19 nt, Homo sapiens
  misc_RNA (1)...(19): siRNA sense strand
ccaaaauacuucaggcucu

SEQ ID NO: 2578065 - RNA, 19 nt, Homo sapiens
  misc_RNA (1)...(19): siRNA sense strand
ugaacgacgagaaagacaa

SEQ ID NO: 2578066 - RNA, 19 nt, Homo sapiens
  misc_RNA (1)...(19): siRNA sense strand
gaaauguagucuuuggugu

SEQ ID NO: 2578067 - RNA, 19 nt, Homo sapiens
  misc_RNA (1)...(19): siRNA sense strand
gugaacgacgagaaagaca

SEQ ID NO: 2578068 - RNA, 19 nt, Homo sapiens
  misc_RNA (1)...(19): siRNA sense strand
cugaacugggaauguauua

SEQ ID NO: 2578069 - RNA, 19 nt, Homo sapiens
  misc_RNA (1)...(19): siRNA sense strand
cagaagaagaaagcaagaa

SEQ ID NO: 2578070 - RNA, 19 nt, Homo sapiens
  misc_RNA (1)...(19): siRNA sense strand
aagcaguggugggagaaau

SEQ ID NO: 2578071 - RNA, 19 nt, Homo sapiens
  misc_RNA (1)...(19): siRNA sense strand
cagucuucaaaguggaaau

SEQ ID NO: 2578072 - RNA, 19 nt, Homo sapiens
  misc_RNA (1)...(19): siRNA sense strand
agaagaaagcaagaaagaa

SEQ ID NO: 2578073 - RNA, 19 nt, Homo sapiens
  misc_RNA (1)...(19): siRNA sense strand
acuucaggcucuuaauauu

SEQ ID NO: 2578074 - RNA, 19 nt, Homo sapiens
  misc_RNA (1)...(19): siRNA sense strand
ggaggaacucgcugcgcau

SEQ ID NO: 2578075 - RNA, 19 nt, Homo sapiens
  misc_RNA (1)...(19): siRNA sense strand
gcaaagggcaggcagcaga

SEQ ID NO: 2578076 - RNA, 19 nt, Homo sapiens
  misc_RNA (1)...(19): siRNA sense strand
ucgucaaccccgugguaua

SEQ ID NO: 2578077 - RNA, 19 nt, Homo sapiens
  misc_RNA (1)...(19): siRNA sense strand
aggagaaggccaagaucaa

SEQ ID NO: 2578078 - RNA, 19 nt, Homo sapiens
  misc_RNA (1)...(19): siRNA sense strand
gcgacaagccccaggagau

SEQ ID NO: 2578079 - RNA, 19 nt, Homo sapiens
  misc_RNA (1)...(19): siRNA sense strand
ccugcaagcucuuuggguu

SEQ ID NO: 2578080 - RNA, 19 nt, Homo sapiens
  misc_RNA (1)...(19): siRNA sense strand
gguucaucuucuacaccaa

SEQ ID NO: 2578081 - RNA, 19 nt, Homo sapiens
  misc_RNA (1)...(19): siRNA sense strand
ggaaagaacugauuggaca

SEQ ID NO: 2578082 - RNA, 19 nt, Homo sapiens
  misc_RNA (1)...(19): siRNA sense strand
augaaaggccugugugaaa

SEQ ID NO: 2578083 - RNA, 19 nt, Homo sapiens
  misc_RNA (1)...(19): siRNA sense strand
agaaagucauacaggaaau

SEQ ID NO: 2578084 - RNA, 19 nt, Homo sapiens
  misc_RNA (1)...(19): siRNA sense strand
gcauugaauugguuggaga

SEQ ID NO: 2578085 - RNA, 19 nt, Homo sapiens
  misc_RNA (1)...(19): siRNA sense strand
ggguaucagaccugguaaa

SEQ ID NO: 2578086 - RNA, 19 nt, Homo sapiens
  misc_RNA (1)...(19): siRNA sense strand
ucagaaagucauacaggaa

SEQ ID NO: 2578087 - RNA, 19 nt, Homo sapiens
  misc_RNA (1)...(19): siRNA sense strand
agccaaugaucaugaagaa

SEQ ID NO: 2578088 - RNA, 19 nt, Homo sapiens
  misc_RNA (1)...(19): siRNA sense strand
agcaggaacagaugagaaa

SEQ ID NO: 2578089 - RNA, 19 nt, Homo sapiens
  misc_RNA (1)...(19): siRNA sense strand
cuuacgaauuggagcuaau

SEQ ID NO: 2578090 - RNA, 19 nt, Homo sapiens
  misc_RNA (1)...(19): siRNA sense strand
agacuuugaauuacggaaa

SEQ ID NO: 2578091 - RNA, 19 nt, Homo sapiens
  misc_RNA (1)...(19): siRNA sense strand
cuggaagggaugugugcaa

SEQ ID NO: 2578092 - RNA, 19 nt, Homo sapiens
  misc_RNA (1)...(19): siRNA sense strand
gugcaaacacugguggaaa

SEQ ID NO: 2578093 - RNA, 19 nt, Homo sapiens
  misc_RNA (1)...(19): siRNA sense strand
cccgauuaccuuuggauaa

SEQ ID NO: 2578094 - RNA, 19 nt, Homo sapiens
  misc_RNA (1)...(19): siRNA sense strand
cggcuagccaccagguuua

SEQ ID NO: 2578095 - RNA, 19 nt, Homo sapiens
  misc_RNA (1)...(19): siRNA sense strand
gacaguaacuucauggcua

SEQ ID NO: 2578096 - RNA, 19 nt, Homo sapiens
  misc_RNA (1)...(19): siRNA sense strand
agucacuagugcugaggaa

SEQ ID NO: 2578097 - RNA, 19 nt, Homo sapiens
  misc_RNA (1)...(19): siRNA sense strand
gggagaucaugcagguuga

SEQ ID NO: 2578098 - RNA, 19 nt, Homo sapiens
  misc_RNA (1)...(19): siRNA sense strand
gaguuucgcaugaggguau

SEQ ID NO: 2578099 - RNA, 19 nt, Homo sapiens
  misc_RNA (1)...(19): siRNA sense strand
gcugaagugcucugggaga

SEQ ID NO: 2578100 - RNA, 19 nt, Homo sapiens
  misc_RNA (1)...(19): siRNA sense strand
ugcaaacacugguggaaaa

SEQ ID NO: 2578101 - RNA, 19 nt, Homo sapiens
  misc_RNA (1)...(19): siRNA sense strand
augaauauggcauggaaga

SEQ ID NO: 2578102 - RNA, 19 nt, Homo sapiens
  misc_RNA (1)...(19): siRNA sense strand
aggcagugcaggcgcuuua

SEQ ID NO: 2578103 - RNA, 19 nt, Homo sapiens
  misc_RNA (1)...(19): siRNA sense strand
ugguaaaggacuugauuuu

SEQ ID NO: 2578104 - RNA, 19 nt, Homo sapiens
  misc_RNA (1)...(19): siRNA sense strand
aggcaaaggaucugcagca

SEQ ID NO: 2578105 - RNA, 19 nt, Homo sapiens
  misc_RNA (1)...(19): siRNA sense strand
aagcaggaacagaugagaa

SEQ ID NO: 2578106 - RNA, 19 nt, Homo sapiens
  misc_RNA (1)...(19): siRNA sense strand
ccucauucauacaggggua

SEQ ID NO: 2578107 - RNA, 19 nt, Homo sapiens
  misc_RNA (1)...(19): siRNA sense strand
gagugaagucguugaucga

SEQ ID NO: 2578108 - RNA, 19 nt, Homo sapiens
  misc_RNA (1)...(19): siRNA sense strand
gcuaaaagggacagcacuu

SEQ ID NO: 2578109 - RNA, 19 nt, Homo sapiens
  misc_RNA (1)...(19): siRNA sense strand
aguacauagucguuccuua

SEQ ID NO: 2578110 - RNA, 19 nt, Homo sapiens
  misc_RNA (1)...(19): siRNA sense strand
acuucauggcuaacaauaa

SEQ ID NO: 2578111 - RNA, 19 nt, Homo sapiens
  misc_RNA (1)...(19): siRNA sense strand
caggaacagaugagaaaau

SEQ ID NO: 2578112 - RNA, 19 nt, Homo sapiens
  misc_RNA (1)...(19): siRNA sense strand
guucugaauuacugccgua

SEQ ID NO: 2578113 - RNA, 19 nt, Homo sapiens
  misc_RNA (1)...(19): siRNA sense strand
uguuuguacuccaggccaa

SEQ ID NO: 2578114 - RNA, 19 nt, Homo sapiens
  misc_RNA (1)...(19): siRNA sense strand
ggaagaaggcugucggcag

SEQ ID NO: 2578115 - RNA, 19 nt, Homo sapiens
  misc_RNA (1)...(19): siRNA sense strand
ugauuggacaggugaugaa

SEQ ID NO: 2578116 - RNA, 19 nt, Homo sapiens
  misc_RNA (1)...(19): siRNA sense strand
uuauagaagauuuggccuu

SEQ ID NO: 2578117 - RNA, 19 nt, Homo sapiens
  misc_RNA (1)...(19): siRNA sense strand
ucaauaugagguaguagaa

SEQ ID NO: 2578118 - RNA, 19 nt, Homo sapiens
  misc_RNA (1)...(19): siRNA sense strand
caauaugagguaguagaaa

SEQ ID NO: 2578119 - RNA, 19 nt, Homo sapiens
  misc_RNA (1)...(19): siRNA sense strand
cuguucagguuauggcauu

SEQ ID NO: 2578120 - RNA, 19 nt, Homo sapiens
  misc_RNA (1)...(19): siRNA sense strand
auccagaacuugaaagacu

SEQ ID NO: 2578121 - RNA, 19 nt, Homo sapiens
  misc_RNA (1)...(19): siRNA sense strand
auugaugaccuguguagaa

SEQ ID NO: 2578122 - RNA, 19 nt, Homo sapiens
  misc_RNA (1)...(19): siRNA sense strand
ugaugaaaggccuguguga

SEQ ID NO: 2578123 - RNA, 19 nt, Homo sapiens
  misc_RNA (1)...(19): siRNA sense strand
uuggauaagauuaccgaau

SEQ ID NO: 2578124 - RNA, 19 nt, Homo sapiens
  misc_RNA (1)...(19): siRNA sense strand
agguuuugcaacaggauaa

SEQ ID NO: 2578125 - RNA, 19 nt, Homo sapiens
  misc_RNA (1)...(19): siRNA sense strand
cugaggagacugaugacuu

SEQ ID NO: 2578126 - RNA, 19 nt, Homo sapiens
  misc_RNA (1)...(19): siRNA sense strand
cgauacaccagcauugaau

SEQ ID NO: 2578127 - RNA, 19 nt, Homo sapiens
  misc_RNA (1)...(19): siRNA sense strand
cuguguaggcaaaggaucu

SEQ ID NO: 2578128 - RNA, 19 nt, Homo sapiens
  misc_RNA (1)...(19): siRNA sense strand
ugaauauggcauggaagaa

SEQ ID NO: 2578129 - RNA, 19 nt, Homo sapiens
  misc_RNA (1)...(19): siRNA sense strand
uguuugggaaguugguuua

SEQ ID NO: 2578130 - RNA, 19 nt, Homo sapiens
  misc_RNA (1)...(19): siRNA sense strand
gcuuaucugugcaggccau

SEQ ID NO: 2578131 - RNA, 19 nt, Homo sapiens
  misc_RNA (1)...(19): siRNA sense strand
cugcugugggcuugcuaaa

SEQ ID NO: 2578132 - RNA, 19 nt, Homo sapiens
  misc_RNA (1)...(19): siRNA sense strand
cugaagugcucugggagau

SEQ ID NO: 2578133 - RNA, 19 nt, Homo sapiens
  misc_RNA (1)...(19): siRNA sense strand
ggggcaagucccagaagua

SEQ ID NO: 2578134 - RNA, 19 nt, Homo sapiens
  misc_RNA (1)...(19): siRNA sense strand
gcaucaacacaccggucaa

SEQ ID NO: 2578135 - RNA, 19 nt, Homo sapiens
  misc_RNA (1)...(19): siRNA sense strand
gggcuauaucugcggugaa

SEQ ID NO: 2578136 - RNA, 19 nt, Homo sapiens
  misc_RNA (1)...(19): siRNA sense strand
ugguggucuucgugggcaa

SEQ ID NO: 2578137 - RNA, 19 nt, Homo sapiens
  misc_RNA (1)...(19): siRNA sense strand
cgaccagcugaaagaaaga

SEQ ID NO: 2578138 - RNA, 19 nt, Homo sapiens
  misc_RNA (1)...(19): siRNA sense strand
aagaaagaccagugaacac

SEQ ID NO: 2578139 - RNA, 19 nt, Homo sapiens
  misc_RNA (1)...(19): siRNA sense strand
gcgcagggcauuugggaga

SEQ ID NO: 2578140 - RNA, 19 nt, Homo sapiens
  misc_RNA (1)...(19): siRNA sense strand
gcaucagcaucgagcgcua

SEQ ID NO: 2578141 - RNA, 19 nt, Homo sapiens
  misc_RNA (1)...(19): siRNA sense strand
acgcagaggcaaagacaca

SEQ ID NO: 2578142 - RNA, 19 nt, Homo sapiens
  misc_RNA (1)...(19): siRNA sense strand
gaaauuaccugcuacgaga

SEQ ID NO: 2578143 - RNA, 19 nt, Homo sapiens
  misc_RNA (1)...(19): siRNA sense strand
guugggacgcagaggcaaa

SEQ ID NO: 2578144 - RNA, 19 nt, Homo sapiens
  misc_RNA (1)...(19): siRNA sense strand
gggucaaggagaagggaug

SEQ ID NO: 2578145 - RNA, 19 nt, Homo sapiens
  misc_RNA (1)...(19): siRNA sense strand
ggguuauguccuuugguca

SEQ ID NO: 2578146 - RNA, 19 nt, Homo sapiens
  misc_RNA (1)...(19): siRNA sense strand
aagauauagaagagggaaa

SEQ ID NO: 2578147 - RNA, 19 nt, Homo sapiens
  misc_RNA (1)...(19): siRNA sense strand
acaaauucaccgagggauu

SEQ ID NO: 2578148 - RNA, 19 nt, Homo sapiens
  misc_RNA (1)...(19): siRNA sense strand
ccuaauuaaccaaggaaaa

SEQ ID NO: 2578149 - RNA, 19 nt, Homo sapiens
  misc_RNA (1)...(19): siRNA sense strand
aaggagaaacugaggaaaa

SEQ ID NO: 2578150 - RNA, 19 nt, Homo sapiens
  misc_RNA (1)...(19): siRNA sense strand
gagaaauauuaaugaccca

SEQ ID NO: 2578151 - RNA, 19 nt, Homo sapiens
  misc_RNA (1)...(19): siRNA sense strand
acaaggagaaacugaggaa

SEQ ID NO: 2578152 - RNA, 19 nt, Homo sapiens
  misc_RNA (1)...(19): siRNA sense strand
ccuugaagacccugaaaca

SEQ ID NO: 2578153 - RNA, 19 nt, Homo sapiens
  misc_RNA (1)...(19): siRNA sense strand
aggaguauguccagagagu

SEQ ID NO: 2578154 - RNA, 19 nt, Homo sapiens
  misc_RNA (1)...(19): siRNA sense strand
gugauucuuuguuggauua

SEQ ID NO: 2578155 - RNA, 19 nt, Homo sapiens
  misc_RNA (1)...(19): siRNA sense strand
augcagaggcugggagcaa

SEQ ID NO: 2578156 - RNA, 19 nt, Homo sapiens
  misc_RNA (1)...(19): siRNA sense strand
agauauagaagagggaaau

SEQ ID NO: 2578157 - RNA, 19 nt, Homo sapiens
  misc_RNA (1)...(19): siRNA sense strand
cuaagaacaaggagaaacu

SEQ ID NO: 2578158 - RNA, 19 nt, Homo sapiens
  misc_RNA (1)...(19): siRNA sense strand
ccgagggauuucagaacau

SEQ ID NO: 2578159 - RNA, 19 nt, Homo sapiens
  misc_RNA (1)...(19): siRNA sense strand
uagaaaugcaggagcaguu

SEQ ID NO: 2578160 - RNA, 19 nt, Homo sapiens
  misc_RNA (1)...(19): siRNA sense strand
aaggaaaaguggaagcauu

SEQ ID NO: 2578161 - RNA, 19 nt, Homo sapiens
  misc_RNA (1)...(19): siRNA sense strand
gaggcaagugcuauguaaa

SEQ ID NO: 2578162 - RNA, 19 nt, Homo sapiens
  misc_RNA (1)...(19): siRNA sense strand
gugugauccaggugaagaa

SEQ ID NO: 2578163 - RNA, 19 nt, Homo sapiens
  misc_RNA (1)...(19): siRNA sense strand
gugugaagagcuagagcga

SEQ ID NO: 2578164 - RNA, 19 nt, Homo sapiens
  misc_RNA (1)...(19): siRNA sense strand
gccuaauuaaccaaggaaa

SEQ ID NO: 2578165 - RNA, 19 nt, Homo sapiens
  misc_RNA (1)...(19): siRNA sense strand
caacaaauucaccgaggga

SEQ ID NO: 2578166 - RNA, 19 nt, Homo sapiens
  misc_RNA (1)...(19): siRNA sense strand
aggaaaaguggaagcauuu

SEQ ID NO: 2578167 - RNA, 19 nt, Homo sapiens
  misc_RNA (1)...(19): siRNA sense strand
gaagauggugcuuuggaau

SEQ ID NO: 2578168 - RNA, 19 nt, Homo sapiens
  misc_RNA (1)...(19): siRNA sense strand
ccaagauauagaagaggga

SEQ ID NO: 2578169 - RNA, 19 nt, Homo sapiens
  misc_RNA (1)...(19): siRNA sense strand
agauuggccacaagguuaa

SEQ ID NO: 2578170 - RNA, 19 nt, Homo sapiens
  misc_RNA (1)...(19): siRNA sense strand
caguaaaacaaguggccuu

SEQ ID NO: 2578171 - RNA, 19 nt, Homo sapiens
  misc_RNA (1)...(19): siRNA sense strand
cugaaacagguucuagaaa

SEQ ID NO: 2578172 - RNA, 19 nt, Homo sapiens
  misc_RNA (1)...(19): siRNA sense strand
agugauucuuuguuggauu

SEQ ID NO: 2578173 - RNA, 19 nt, Homo sapiens
  misc_RNA (1)...(19): siRNA sense strand
agagaagucacuaagaaca

SEQ ID NO: 2578174 - RNA, 19 nt, Homo sapiens
  misc_RNA (1)...(19): siRNA sense strand
gcgagaaaggccuggucca

SEQ ID NO: 2578175 - RNA, 19 nt, Homo sapiens
  misc_RNA (1)...(19): siRNA sense strand
gcagaggcugggagcaaaa

SEQ ID NO: 2578176 - RNA, 19 nt, Homo sapiens
  misc_RNA (1)...(19): siRNA sense strand
uggaggagggcucgagaga

SEQ ID NO: 2578177 - RNA, 19 nt, Homo sapiens
  misc_RNA (1)...(19): siRNA sense strand
cacuaagaacaaggagaaa

SEQ ID NO: 2578178 - RNA, 19 nt, Homo sapiens
  misc_RNA (1)...(19): siRNA sense strand
gggauuugugucuggccua

SEQ ID NO: 2578179 - RNA, 19 nt, Homo sapiens
  misc_RNA (1)...(19): siRNA sense strand
ugaagaaaaugaaggccau

SEQ ID NO: 2578180 - RNA, 19 nt, Homo sapiens
  misc_RNA (1)...(19): siRNA sense strand
agauagugaggaagaaguu

SEQ ID NO: 2578181 - RNA, 19 nt, Homo sapiens
  misc_RNA (1)...(19): siRNA sense strand
gagagaagucacuaagaac

SEQ ID NO: 2578182 - RNA, 19 nt, Homo sapiens
  misc_RNA (1)...(19): siRNA sense strand
aaacaggggaagucauaaa

SEQ ID NO: 2578183 - RNA, 19 nt, Homo sapiens
  misc_RNA (1)...(19): siRNA sense strand
gguggaacgugucggccau

SEQ ID NO: 2578184 - RNA, 19 nt, Homo sapiens
  misc_RNA (1)...(19): siRNA sense strand
gagaaauggcgugugaaga

SEQ ID NO: 2578185 - RNA, 19 nt, Homo sapiens
  misc_RNA (1)...(19): siRNA sense strand
ggagagucugcaaagggua

SEQ ID NO: 2578186 - RNA, 19 nt, Homo sapiens
  misc_RNA (1)...(19): siRNA sense strand
cuauuugaggcaagugcua

SEQ ID NO: 2578187 - RNA, 19 nt, Homo sapiens
  misc_RNA (1)...(19): siRNA sense strand
cccucuuguugguguuaaa

SEQ ID NO: 2578188 - RNA, 19 nt, Homo sapiens
  misc_RNA (1)...(19): siRNA sense strand
cuguccucuucuugggaaa

SEQ ID NO: 2578189 - RNA, 19 nt, Homo sapiens
  misc_RNA (1)...(19): siRNA sense strand
ggccacaagguuaagaaga

SEQ ID NO: 2578190 - RNA, 19 nt, Homo sapiens
  misc_RNA (1)...(19): siRNA sense strand
gguacaggaaauuaauaga

SEQ ID NO: 2578191 - RNA, 19 nt, Homo sapiens
  misc_RNA (1)...(19): siRNA sense strand
agaccuuugugaaacgcaa

SEQ ID NO: 2578192 - RNA, 19 nt, Homo sapiens
  misc_RNA (1)...(19): siRNA sense strand
ugauccaggugaagaaaau

SEQ ID NO: 2578193 - RNA, 19 nt, Homo sapiens
  misc_RNA (1)...(19): siRNA sense strand
uggcgugugaagaguuuaa

SEQ ID NO: 2578194 - RNA, 19 nt, Homo sapiens
  misc_RNA (1)...(19): siRNA sense strand
aggaaagcgcaaagggaaa

SEQ ID NO: 2578195 - RNA, 19 nt, Homo sapiens
  misc_RNA (1)...(19): siRNA sense strand
gaggaaagcgcaaagggaa

SEQ ID NO: 2578196 - RNA, 19 nt, Homo sapiens
  misc_RNA (1)...(19): siRNA sense strand
uggaaaacaucguggccaa

SEQ ID NO: 2578197 - RNA, 19 nt, Homo sapiens
  misc_RNA (1)...(19): siRNA sense strand
aggagaaggugaagcggga

SEQ ID NO: 2578198 - RNA, 19 nt, Homo sapiens
  misc_RNA (1)...(19): siRNA sense strand
ggaagugguuggaaaggca

SEQ ID NO: 2578199 - RNA, 19 nt, Homo sapiens
  misc_RNA (1)...(19): siRNA sense strand
uuggagaagaagaggauca

SEQ ID NO: 2578200 - RNA, 19 nt, Homo sapiens
  misc_RNA (1)...(19): siRNA sense strand
guaucgagugcuaggaaaa

SEQ ID NO: 2578201 - RNA, 19 nt, Homo sapiens
  misc_RNA (1)...(19): siRNA sense strand
caaaacgagaugauagaaa

SEQ ID NO: 2578202 - RNA, 19 nt, Homo sapiens
  misc_RNA (1)...(19): siRNA sense strand
ggaaaagcaagaaguggaa

SEQ ID NO: 2578203 - RNA, 19 nt, Homo sapiens
  misc_RNA (1)...(19): siRNA sense strand
gcuuggagaagaagaggau

SEQ ID NO: 2578204 - RNA, 19 nt, Homo sapiens
  misc_RNA (1)...(19): siRNA sense strand
gggaaaagcaagaagugga

SEQ ID NO: 2578205 - RNA, 19 nt, Homo sapiens
  misc_RNA (1)...(19): siRNA sense strand
augagaugaucgagggcca

SEQ ID NO: 2578206 - RNA, 19 nt, Homo sapiens
  misc_RNA (1)...(19): siRNA sense strand
ugauagaaacagaaugcuu

SEQ ID NO: 2578207 - RNA, 19 nt, Homo sapiens
  misc_RNA (1)...(19): siRNA sense strand
ggaggaaagcgcaaaggga

SEQ ID NO: 2578208 - RNA, 19 nt, Homo sapiens
  misc_RNA (1)...(19): siRNA sense strand
aguaucgagugcuaggaaa

SEQ ID NO: 2578209 - RNA, 19 nt, Homo sapiens
  misc_RNA (1)...(19): siRNA sense strand
acaucuacaacaugggcaa

SEQ ID NO: 2578210 - RNA, 19 nt, Homo sapiens
  misc_RNA (1)...(19): siRNA sense strand
acgagaugauagaaacaga

SEQ ID NO: 2578211 - RNA, 19 nt, Homo sapiens
  misc_RNA (1)...(19): siRNA sense strand
acagucaguuuguggucaa

SEQ ID NO: 2578212 - RNA, 19 nt, Homo sapiens
  misc_RNA (1)...(19): siRNA sense strand
uagaagaccuccaccguga

SEQ ID NO: 2578213 - RNA, 19 nt, Homo sapiens
  misc_RNA (1)...(19): siRNA sense strand
aaacgagaugauagaaaca

SEQ ID NO: 2578214 - RNA, 19 nt, Homo sapiens
  misc_RNA (1)...(19): siRNA sense strand
gggaaggaaauuaugacca

SEQ ID NO: 2578215 - RNA, 19 nt, Homo sapiens
  misc_RNA (1)...(19): siRNA sense strand
gccguaaggagaaggugaa

SEQ ID NO: 2578216 - RNA, 19 nt, Homo sapiens
  misc_RNA (1)...(19): siRNA sense strand
acgaaagaugcgaagcaga

SEQ ID NO: 2578217 - RNA, 19 nt, Homo sapiens
  misc_RNA (1)...(19): siRNA sense strand
cggcagcaucagaacaauu

SEQ ID NO: 2578218 - RNA, 19 nt, Homo sapiens
  misc_RNA (1)...(19): siRNA sense strand
ggccguaaggagaagguga

SEQ ID NO: 2578219 - RNA, 19 nt, Homo sapiens
  misc_RNA (1)...(19): siRNA sense strand
uggagacggaggaggugua

SEQ ID NO: 2578220 - RNA, 19 nt, Homo sapiens
  misc_RNA (1)...(19): siRNA sense strand
ucacgaaagaugcgaagca

SEQ ID NO: 2578221 - RNA, 19 nt, Homo sapiens
  misc_RNA (1)...(19): siRNA sense strand
gcuuuaaggagcugaacgu

SEQ ID NO: 2578222 - RNA, 19 nt, Homo sapiens
  misc_RNA (1)...(19): siRNA sense strand
ccgaggaggccaaguccau

SEQ ID NO: 2578223 - RNA, 19 nt, Homo sapiens
  misc_RNA (1)...(19): siRNA sense strand
ggcaaaacgagaugauaga

SEQ ID NO: 2578224 - RNA, 19 nt, Homo sapiens
  misc_RNA (1)...(19): siRNA sense strand
cagaaugcuuuaaggagcu

SEQ ID NO: 2578225 - RNA, 19 nt, Homo sapiens
  misc_RNA (1)...(19): siRNA sense strand
ggaaagcgcaaagggaaaa

SEQ ID NO: 2578226 - RNA, 19 nt, Homo sapiens
  misc_RNA (1)...(19): siRNA sense strand
gcgcagugcagguggauua

SEQ ID NO: 2578227 - RNA, 19 nt, Homo sapiens
  misc_RNA (1)...(19): siRNA sense strand
aggcauggacugagggcga

SEQ ID NO: 2578228 - RNA, 19 nt, Homo sapiens
  misc_RNA (1)...(19): siRNA sense strand
ccuuggagcuggagcagga

SEQ ID NO: 2578229 - RNA, 19 nt, Homo sapiens
  misc_RNA (1)...(19): siRNA sense strand
gcuauguggagguggugaa

SEQ ID NO: 2578230 - RNA, 19 nt, Homo sapiens
  misc_RNA (1)...(19): siRNA sense strand
agaaaagggcggagcgcau

SEQ ID NO: 2578231 - RNA, 19 nt, Homo sapiens
  misc_RNA (1)...(19): siRNA sense strand
agaaggugcucauggagau

SEQ ID NO: 2578232 - RNA, 19 nt, Homo sapiens
  misc_RNA (1)...(19): siRNA sense strand
ccgagcaggucuucaauga

SEQ ID NO: 2578233 - RNA, 19 nt, Homo sapiens
  misc_RNA (1)...(19): siRNA sense strand
cagugcagguggauuacua

SEQ ID NO: 2578234 - RNA, 19 nt, Homo sapiens
  misc_RNA (1)...(19): siRNA sense strand
acgagguguaccaggacaa

SEQ ID NO: 2578235 - RNA, 19 nt, Homo sapiens
  misc_RNA (1)...(19): siRNA sense strand
cggacgagguguaccagga

SEQ ID NO: 2578236 - RNA, 19 nt, Homo sapiens
  misc_RNA (1)...(19): siRNA sense strand
aagcaggaucugaggaaga

SEQ ID NO: 2578237 - RNA, 19 nt, Homo sapiens
  misc_RNA (1)...(19): siRNA sense strand
aggccaaggugguggugga

SEQ ID NO: 2578238 - RNA, 19 nt, Homo sapiens
  misc_RNA (1)...(19): siRNA sense strand
ggaagggcucugaaggaga

SEQ ID NO: 2578239 - RNA, 19 nt, Homo sapiens
  misc_RNA (1)...(19): siRNA sense strand
gcugcaggaacuugaacaa

SEQ ID NO: 2578240 - RNA, 19 nt, Homo sapiens
  misc_RNA (1)...(19): siRNA sense strand
ggaagauuuuggaggcaca

SEQ ID NO: 2578241 - RNA, 19 nt, Homo sapiens
  misc_RNA (1)...(19): siRNA sense strand
gcaacaaagacuagcacuc

SEQ ID NO: 2578242 - RNA, 19 nt, Homo sapiens
  misc_RNA (1)...(19): siRNA sense strand
ccaagguggugguggagcu

SEQ ID NO: 2578243 - RNA, 19 nt, Homo sapiens
  misc_RNA (1)...(19): siRNA sense strand
aggagaacccaguugacuu

SEQ ID NO: 2578244 - RNA, 19 nt, Homo sapiens
  misc_RNA (1)...(19): siRNA sense strand
ugaacaagaguauggggaa

SEQ ID NO: 2578245 - RNA, 19 nt, Homo sapiens
  misc_RNA (1)...(19): siRNA sense strand
cagucaaguccaugcgaaa

SEQ ID NO: 2578246 - RNA, 19 nt, Homo sapiens
  misc_RNA (1)...(19): siRNA sense strand
ugauaggccucauuggcaa

SEQ ID NO: 2578247 - RNA, 19 nt, Homo sapiens
  misc_RNA (1)...(19): siRNA sense strand
ccuaauaacgugugcucca

SEQ ID NO: 2578248 - RNA, 19 nt, Homo sapiens
  misc_RNA (1)...(19): siRNA sense strand
gaggaaagcaccaaccaga

SEQ ID NO: 2578249 - RNA, 19 nt, Homo sapiens
  misc_RNA (1)...(19): siRNA sense strand
gcagacagauacaaagcca

SEQ ID NO: 2578250 - RNA, 19 nt, Homo sapiens
  misc_RNA (1)...(19): siRNA sense strand
ucacagcacuggaaggagu

SEQ ID NO: 2578251 - RNA, 19 nt, Homo sapiens
  misc_RNA (1)...(19): siRNA sense strand
gaguaaucuguaaugggaa

SEQ ID NO: 2578252 - RNA, 19 nt, Homo sapiens
  misc_RNA (1)...(19): siRNA sense strand
gcaaaucuauagcugguga

SEQ ID NO: 2578253 - RNA, 19 nt, Homo sapiens
  misc_RNA (1)...(19): siRNA sense strand
ccugcaaacacuacaugaa

SEQ ID NO: 2578254 - RNA, 19 nt, Homo sapiens
  misc_RNA (1)...(19): siRNA sense strand
uauaaacaaugauggggaa

SEQ ID NO: 2578255 - RNA, 19 nt, Homo sapiens
  misc_RNA (1)...(19): siRNA sense strand
uuaucaauggcauggcaaa

SEQ ID NO: 2578256 - RNA, 19 nt, Homo sapiens
  misc_RNA (1)...(19): siRNA sense strand
guuccauaagaucgauaua

SEQ ID NO: 2578257 - RNA, 19 nt, Homo sapiens
  misc_RNA (1)...(19): siRNA sense strand
ggggaauggcaaaucuaua

SEQ ID NO: 2578258 - RNA, 19 nt, Homo sapiens
  misc_RNA (1)...(19): siRNA sense strand
uggcaaaucuauagcuggu

SEQ ID NO: 2578259 - RNA, 19 nt, Homo sapiens
  misc_RNA (1)...(19): siRNA sense strand
ugguagaagaguuuagaaa

SEQ ID NO: 2578260 - RNA, 19 nt, Homo sapiens
  misc_RNA (1)...(19): siRNA sense strand
ggccaaagcuggaucggau

SEQ ID NO: 2578261 - RNA, 19 nt, Homo sapiens
  misc_RNA (1)...(19): siRNA sense strand
gcucuaagaaucaagaaaa

SEQ ID NO: 2578262 - RNA, 19 nt, Homo sapiens
  misc_RNA (1)...(19): siRNA sense strand
ggcuauauucggaggcauu

SEQ ID NO: 2578263 - RNA, 19 nt, Homo sapiens
  misc_RNA (1)...(19): siRNA sense strand
agacuguggugaaggcgaa

SEQ ID NO: 2578264 - RNA, 19 nt, Homo sapiens
  misc_RNA (1)...(19): siRNA sense strand
agaagaguuuagaaagaca

SEQ ID NO: 2578265 - RNA, 19 nt, Homo sapiens
  misc_RNA (1)...(19): siRNA sense strand
gugaugauuuugugguuaa

SEQ ID NO: 2578266 - RNA, 19 nt, Homo sapiens
  misc_RNA (1)...(19): siRNA sense strand
acgaggagacuguggugaa

SEQ ID NO: 2578267 - RNA, 19 nt, Homo sapiens
  misc_RNA (1)...(19): siRNA sense strand
uugcauaaauggagcaucu

SEQ ID NO: 2578268 - RNA, 19 nt, Homo sapiens
  misc_RNA (1)...(19): siRNA sense strand
ccaugaauucaaugcgcua

SEQ ID NO: 2578269 - RNA, 19 nt, Homo sapiens
  misc_RNA (1)...(19): siRNA sense strand
gcugacaggcauaagaaaa

SEQ ID NO: 2578270 - RNA, 19 nt, Homo sapiens
  misc_RNA (1)...(19): siRNA sense strand
acuugaugagacagaguua

SEQ ID NO: 2578271 - RNA, 19 nt, Homo sapiens
  misc_RNA (1)...(19): siRNA sense strand
cagaaaagcaagauaaagu

SEQ ID NO: 2578272 - RNA, 19 nt, Homo sapiens
  misc_RNA (1)...(19): siRNA sense strand
acagaaagucagagaacac

SEQ ID NO: 2578273 - RNA, 19 nt, Homo sapiens
  misc_RNA (1)...(19): siRNA sense strand
acucugugcuuuauggcaa

SEQ ID NO: 2578274 - RNA, 19 nt, Homo sapiens
  misc_RNA (1)...(19): siRNA sense strand
acuuacagaacuuggaaaa

SEQ ID NO: 2578275 - RNA, 19 nt, Homo sapiens
  misc_RNA (1)...(19): siRNA sense strand
gaguuaaggaaugggaaaa

SEQ ID NO: 2578276 - RNA, 19 nt, Homo sapiens
  misc_RNA (1)...(19): siRNA sense strand
acguggaacaccaggccaa

SEQ ID NO: 2578277 - RNA, 19 nt, Homo sapiens
  misc_RNA (1)...(19): siRNA sense strand
gcugggacugguacagaaa

SEQ ID NO: 2578278 - RNA, 19 nt, Homo sapiens
  misc_RNA (1)...(19): siRNA sense strand
aaguaagcgcucuaagaau

SEQ ID NO: 2578279 - RNA, 19 nt, Homo sapiens
  misc_RNA (1)...(19): siRNA sense strand
ugugaauggccaugcaaaa

SEQ ID NO: 2578280 - RNA, 19 nt, Homo sapiens
  misc_RNA (1)...(19): siRNA sense strand
cgcucuaagaaucaagaaa

SEQ ID NO: 2578281 - RNA, 19 nt, Homo sapiens
  misc_RNA (1)...(19): siRNA sense strand
acauuaugaagaugcacaa

SEQ ID NO: 2578282 - RNA, 19 nt, Homo sapiens
  misc_RNA (1)...(19): siRNA sense strand
gccaaagcuggaucggaua

SEQ ID NO: 2578283 - RNA, 19 nt, Homo sapiens
  misc_RNA (1)...(19): siRNA sense strand
aggcauaagaaaagaaaac

SEQ ID NO: 2578284 - RNA, 19 nt, Homo sapiens
  misc_RNA (1)...(19): siRNA sense strand
acuuagaagaacuugauga

SEQ ID NO: 2578285 - RNA, 19 nt, Homo sapiens
  misc_RNA (1)...(19): siRNA sense strand
uagaagaacuugaugagac

SEQ ID NO: 2578286 - RNA, 19 nt, Homo sapiens
  misc_RNA (1)...(19): siRNA sense strand
cuguggaagguaugugaau

SEQ ID NO: 2578287 - RNA, 19 nt, Homo sapiens
  misc_RNA (1)...(19): siRNA sense strand
ugguacagaaagucagaga

SEQ ID NO: 2578288 - RNA, 19 nt, Homo sapiens
  misc_RNA (1)...(19): siRNA sense strand
gguacagaaagucagagaa

SEQ ID NO: 2578289 - RNA, 19 nt, Homo sapiens
  misc_RNA (1)...(19): siRNA sense strand
acaaugugucuuugguaga

SEQ ID NO: 2578290 - RNA, 19 nt, Homo sapiens
  misc_RNA (1)...(19): siRNA sense strand
gcacagacuugguggugga

SEQ ID NO: 2578291 - RNA, 19 nt, Homo sapiens
  misc_RNA (1)...(19): siRNA sense strand
cggcaagaagacuggagaa

SEQ ID NO: 2578292 - RNA, 19 nt, Homo sapiens
  misc_RNA (1)...(19): siRNA sense strand
gagaagacccugagcacca

SEQ ID NO: 2578293 - RNA, 19 nt, Homo sapiens
  misc_RNA (1)...(19): siRNA sense strand
uaaauaagcugguagcaga

SEQ ID NO: 2578294 - RNA, 19 nt, Homo sapiens
  misc_RNA (1)...(19): siRNA sense strand
guggauggguggcaugaaa

SEQ ID NO: 2578295 - RNA, 19 nt, Homo sapiens
  misc_RNA (1)...(19): siRNA sense strand
ugaaauggaugcagagaac

SEQ ID NO: 2578296 - RNA, 19 nt, Homo sapiens
  misc_RNA (1)...(19): siRNA sense strand
guggagaaucugaagguga

SEQ ID NO: 2578297 - RNA, 19 nt, Homo sapiens
  misc_RNA (1)...(19): siRNA sense strand
uuagcaaagcccuaggaaa

SEQ ID NO: 2578298 - RNA, 19 nt, Homo sapiens
  misc_RNA (1)...(19): siRNA sense strand
gccuuaggaaaguggcaaa

SEQ ID NO: 2578299 - RNA, 19 nt, Homo sapiens
  misc_RNA (1)...(19): siRNA sense strand
ucaugaaacuuguggaggu

SEQ ID NO: 2578300 - RNA, 19 nt, Homo sapiens
  misc_RNA (1)...(19): siRNA sense strand
cauuugaaucuuugguaga

SEQ ID NO: 2578301 - RNA, 19 nt, Homo sapiens
  misc_RNA (1)...(19): siRNA sense strand
ccaccagacaagaccgauu

SEQ ID NO: 2578302 - RNA, 19 nt, Homo sapiens
  misc_RNA (1)...(19): siRNA sense strand
augaaauggaugcagagaa

SEQ ID NO: 2578303 - RNA, 19 nt, Homo sapiens
  misc_RNA (1)...(19): siRNA sense strand
ugaaacuuguggaggucau

SEQ ID NO: 2578304 - RNA, 19 nt, Homo sapiens
  misc_RNA (1)...(19): siRNA sense strand
aggaaaguggcaaagaaga

SEQ ID NO: 2578305 - RNA, 19 nt, Homo sapiens
  misc_RNA (1)...(19): siRNA sense strand
gccaagaagauaaucguca

SEQ ID NO: 2578306 - RNA, 19 nt, Homo sapiens
  misc_RNA (1)...(19): siRNA sense strand
agauaaucgucaagcacgu

SEQ ID NO: 2578307 - RNA, 19 nt, Homo sapiens
  misc_RNA (1)...(19): siRNA sense strand
uggagaaggauuuuacaaa

SEQ ID NO: 2578308 - RNA, 19 nt, Homo sapiens
  misc_RNA (1)...(19): siRNA sense strand
agcugguagcagagaacaa

SEQ ID NO: 2578309 - RNA, 19 nt, Homo sapiens
  misc_RNA (1)...(19): siRNA sense strand
ugaaagaaacagagggcaa

SEQ ID NO: 2578310 - RNA, 19 nt, Homo sapiens
  misc_RNA (1)...(19): siRNA sense strand
gaucagaagauuuggacaa

SEQ ID NO: 2578311 - RNA, 19 nt, Homo sapiens
  misc_RNA (1)...(19): siRNA sense strand
gcgagagacuaguggagaa

SEQ ID NO: 2578312 - RNA, 19 nt, Homo sapiens
  misc_RNA (1)...(19): siRNA sense strand
cagauuaagcagaggacua

SEQ ID NO: 2578313 - RNA, 19 nt, Homo sapiens
  misc_RNA (1)...(19): siRNA sense strand
caacagugugaaagagaaa

SEQ ID NO: 2578314 - RNA, 19 nt, Homo sapiens
  misc_RNA (1)...(19): siRNA sense strand
gcaggaugcaagagauaaa

SEQ ID NO: 2578315 - RNA, 19 nt, Homo sapiens
  misc_RNA (1)...(19): siRNA sense strand
cuuaaugagcugagagaga

SEQ ID NO: 2578316 - RNA, 19 nt, Homo sapiens
  misc_RNA (1)...(19): siRNA sense strand
agaagaaagaagaguguau

SEQ ID NO: 2578317 - RNA, 19 nt, Homo sapiens
  misc_RNA (1)...(19): siRNA sense strand
cagcaggaugcaagagaua

SEQ ID NO: 2578318 - RNA, 19 nt, Homo sapiens
  misc_RNA (1)...(19): siRNA sense strand
gcuuagugcugaaagacaa

SEQ ID NO: 2578319 - RNA, 19 nt, Homo sapiens
  misc_RNA (1)...(19): siRNA sense strand
cgucaagaagaguuagaua

SEQ ID NO: 2578320 - RNA, 19 nt, Homo sapiens
  misc_RNA (1)...(19): siRNA sense strand
caaggugaaaugagagaaa

SEQ ID NO: 2578321 - RNA, 19 nt, Homo sapiens
  misc_RNA (1)...(19): siRNA sense strand
caauagugaacaaaggaaa

SEQ ID NO: 2578322 - RNA, 19 nt, Homo sapiens
  misc_RNA (1)...(19): siRNA sense strand
agaagaagaacuaggugaa

SEQ ID NO: 2578323 - RNA, 19 nt, Homo sapiens
  misc_RNA (1)...(19): siRNA sense strand
cagaaaugaagaugcuaaa

SEQ ID NO: 2578324 - RNA, 19 nt, Homo sapiens
  misc_RNA (1)...(19): siRNA sense strand
uggaagacacugaagcaaa

SEQ ID NO: 2578325 - RNA, 19 nt, Homo sapiens
  misc_RNA (1)...(19): siRNA sense strand
ggaucuuaaugaagucaaa

SEQ ID NO: 2578326 - RNA, 19 nt, Homo sapiens
  misc_RNA (1)...(19): siRNA sense strand
gcauaaacaaagugcuaga

SEQ ID NO: 2578327 - RNA, 19 nt, Homo sapiens
  misc_RNA (1)...(19): siRNA sense strand
caucagaacuugaagccau

SEQ ID NO: 2578328 - RNA, 19 nt, Homo sapiens
  misc_RNA (1)...(19): siRNA sense strand
ggaccaaguagaacaggaa

SEQ ID NO: 2578329 - RNA, 19 nt, Homo sapiens
  misc_RNA (1)...(19): siRNA sense strand
gaguguaugacgaacgaaa

SEQ ID NO: 2578330 - RNA, 19 nt, Homo sapiens
  misc_RNA (1)...(19): siRNA sense strand
guuaauaaagcgucaagaa

SEQ ID NO: 2578331 - RNA, 19 nt, Homo sapiens
  misc_RNA (1)...(19): siRNA sense strand
auuacauacucuagaggaa

SEQ ID NO: 2578332 - RNA, 19 nt, Homo sapiens
  misc_RNA (1)...(19): siRNA sense strand
ggaagaaaaggaagaacua

SEQ ID NO: 2578333 - RNA, 19 nt, Homo sapiens
  misc_RNA (1)...(19): siRNA sense strand
uagaaaagcagaagaagaa

SEQ ID NO: 2578334 - RNA, 19 nt, Homo sapiens
  misc_RNA (1)...(19): siRNA sense strand
aagaagaguguaugaagaa

SEQ ID NO: 2578335 - RNA, 19 nt, Homo sapiens
  misc_RNA (1)...(19): siRNA sense strand
ugugaaagagaaagaagaa

SEQ ID NO: 2578336 - RNA, 19 nt, Homo sapiens
  misc_RNA (1)...(19): siRNA sense strand
gaguagaugcacugaauga

SEQ ID NO: 2578337 - RNA, 19 nt, Homo sapiens
  misc_RNA (1)...(19): siRNA sense strand
gugaaguauuccagaaguu

SEQ ID NO: 2578338 - RNA, 19 nt, Homo sapiens
  misc_RNA (1)...(19): siRNA sense strand
agggauaaguggauuaaaa

SEQ ID NO: 2578339 - RNA, 19 nt, Homo sapiens
  misc_RNA (1)...(19): siRNA sense strand
gagaaagaagaacgaggaa

SEQ ID NO: 2578340 - RNA, 19 nt, Homo sapiens
  misc_RNA (1)...(19): siRNA sense strand
cuacaaagugaaagaaacu

SEQ ID NO: 2578341 - RNA, 19 nt, Homo sapiens
  misc_RNA (1)...(19): siRNA sense strand
cagaagaagaacuagguga

SEQ ID NO: 2578342 - RNA, 19 nt, Homo sapiens
  misc_RNA (1)...(19): siRNA sense strand
cgauaaagaggaaguuuca

SEQ ID NO: 2578343 - RNA, 19 nt, Homo sapiens
  misc_RNA (1)...(19): siRNA sense strand
ucaaaagaagaaagggaua

SEQ ID NO: 2578344 - RNA, 19 nt, Homo sapiens
  misc_RNA (1)...(19): siRNA sense strand
cuaaagaacuggaaaagau

SEQ ID NO: 2578345 - RNA, 19 nt, Homo sapiens
  misc_RNA (1)...(19): siRNA sense strand
cgagagacuaguggagaaa

SEQ ID NO: 2578346 - RNA, 19 nt, Homo sapiens
  misc_RNA (1)...(19): siRNA sense strand
ggcuauuaaugacaagaaa

SEQ ID NO: 2578347 - RNA, 19 nt, Homo sapiens
  misc_RNA (1)...(19): siRNA sense strand
aagaugaacuagcaggcaa

SEQ ID NO: 2578348 - RNA, 19 nt, Homo sapiens
  misc_RNA (1)...(19): siRNA sense strand
cagaaagaacuggcagaaa

SEQ ID NO: 2578349 - RNA, 19 nt, Homo sapiens
  misc_RNA (1)...(19): siRNA sense strand
gagcagugcaacacagaau

SEQ ID NO: 2578350 - RNA, 19 nt, Homo sapiens
  misc_RNA (1)...(19): siRNA sense strand
cugaaagacaagagcagau

SEQ ID NO: 2578351 - RNA, 19 nt, Homo sapiens
  misc_RNA (1)...(19): siRNA sense strand
aaagacaagagcagauuaa

SEQ ID NO: 2578352 - RNA, 19 nt, Homo sapiens
  misc_RNA (1)...(19): siRNA sense strand
gagagaagagaaugcagaa

SEQ ID NO: 2578353 - RNA, 19 nt, Homo sapiens
  misc_RNA (1)...(19): siRNA sense strand
acagagggcaaacgggaaa

SEQ ID NO: 2578354 - RNA, 19 nt, Homo sapiens
  misc_RNA (1)...(19): siRNA sense strand
gaaucuuccuggagagguu

SEQ ID NO: 2578355 - RNA, 19 nt, Homo sapiens
  misc_RNA (1)...(19): siRNA sense strand
ucagaaaugaagaugcuaa

SEQ ID NO: 2578356 - RNA, 19 nt, Homo sapiens
  misc_RNA (1)...(19): siRNA sense strand
gaguauggagcgcuggaaa

SEQ ID NO: 2578357 - RNA, 19 nt, Homo sapiens
  misc_RNA (1)...(19): siRNA sense strand
agagaaugcagaacagcaa

SEQ ID NO: 2578358 - RNA, 19 nt, Homo sapiens
  misc_RNA (1)...(19): siRNA sense strand
agaagggaguggugagagu

SEQ ID NO: 2578359 - RNA, 19 nt, Homo sapiens
  misc_RNA (1)...(19): siRNA sense strand
agaaaggcugugucagaua

SEQ ID NO: 2578360 - RNA, 19 nt, Homo sapiens
  misc_RNA (1)...(19): siRNA sense strand
agacaguugcuaaaugaaa

SEQ ID NO: 2578361 - RNA, 19 nt, Homo sapiens
  misc_RNA (1)...(19): siRNA sense strand
agaugaaggagaagggagu

SEQ ID NO: 2578362 - RNA, 19 nt, Homo sapiens
  misc_RNA (1)...(19): siRNA sense strand
ggacagaaauccuugguag

SEQ ID NO: 2578363 - RNA, 19 nt, Homo sapiens
  misc_RNA (1)...(19): siRNA sense strand
ggaagaacuagcucaguau

SEQ ID NO: 2578364 - RNA, 19 nt, Homo sapiens
  misc_RNA (1)...(19): siRNA sense strand
ccaaguuagagaauugaaa

SEQ ID NO: 2578365 - RNA, 19 nt, Homo sapiens
  misc_RNA (1)...(19): siRNA sense strand
ggagagaagagaaugcaga

SEQ ID NO: 2578366 - RNA, 19 nt, Homo sapiens
  misc_RNA (1)...(19): siRNA sense strand
agaagaacuaggugaacuu

SEQ ID NO: 2578367 - RNA, 19 nt, Homo sapiens
  misc_RNA (1)...(19): siRNA sense strand
gagaaaaccuucaugccua

SEQ ID NO: 2578368 - RNA, 19 nt, Homo sapiens
  misc_RNA (1)...(19): siRNA sense strand
gaucaguauuucuuagaca

SEQ ID NO: 2578369 - RNA, 19 nt, Homo sapiens
  misc_RNA (1)...(19): siRNA sense strand
gcucaagcuacccaggaaa

SEQ ID NO: 2578370 - RNA, 19 nt, Homo sapiens
  misc_RNA (1)...(19): siRNA sense strand
gaagaguguaugaagaaaa

SEQ ID NO: 2578371 - RNA, 19 nt, Homo sapiens
  misc_RNA (1)...(19): siRNA sense strand
ugaaaugagagaaaugcaa

SEQ ID NO: 2578372 - RNA, 19 nt, Homo sapiens
  misc_RNA (1)...(19): siRNA sense strand
aguggaaggaugaggauau

SEQ ID NO: 2578373 - RNA, 19 nt, Homo sapiens
  misc_RNA (1)...(19): siRNA sense strand
gagcaggcuuggaaggaga

SEQ ID NO: 2578374 - RNA, 19 nt, Homo sapiens
  misc_RNA (1)...(19): siRNA sense strand
cauaaaccguugcgggaca

SEQ ID NO: 2578375 - RNA, 19 nt, Homo sapiens
  misc_RNA (1)...(19): siRNA sense strand
agggaaagcaaaagaguau

SEQ ID NO: 2578376 - RNA, 19 nt, Homo sapiens
  misc_RNA (1)...(19): siRNA sense strand
cggcaguaugggacagaau

SEQ ID NO: 2578377 - RNA, 19 nt, Homo sapiens
  misc_RNA (1)...(19): siRNA sense strand
ggguggaaguggaaggaug

SEQ ID NO: 2578378 - RNA, 19 nt, Homo sapiens
  misc_RNA (1)...(19): siRNA sense strand
aagaaaggguggaagugga

SEQ ID NO: 2578379 - RNA, 19 nt, Homo sapiens
  misc_RNA (1)...(19): siRNA sense strand
cagaauaacgagcaggcuu

SEQ ID NO: 2578380 - RNA, 19 nt, Homo sapiens
  misc_RNA (1)...(19): siRNA sense strand
gcaugaagggaaaaugaaa

SEQ ID NO: 2578381 - RNA, 19 nt, Homo sapiens
  misc_RNA (1)...(19): siRNA sense strand
aguaugggacagaaugaaa

SEQ ID NO: 2578382 - RNA, 19 nt, Homo sapiens
  misc_RNA (1)...(19): siRNA sense strand
cgguuuggagggaaagcaa

SEQ ID NO: 2578383 - RNA, 19 nt, Homo sapiens
  misc_RNA (1)...(19): siRNA sense strand
ccuucaugcugcagagugu

SEQ ID NO: 2578384 - RNA, 19 nt, Homo sapiens
  misc_RNA (1)...(19): siRNA sense strand
uguuaaagaaaggguggaa

SEQ ID NO: 2578385 - RNA, 19 nt, Homo sapiens
  misc_RNA (1)...(19): siRNA sense strand
gcccgaugcaugaagggaa

SEQ ID NO: 2578386 - RNA, 19 nt, Homo sapiens
  misc_RNA (1)...(19): siRNA sense strand
ggaaguggaaggaugagga

SEQ ID NO: 2578387 - RNA, 19 nt, Homo sapiens
  misc_RNA (1)...(19): siRNA sense strand
gcccaaccugugagaagaa

SEQ ID NO: 2578388 - RNA, 19 nt, Homo sapiens
  misc_RNA (1)...(19): siRNA sense strand
aggaugaggauaucaguca

SEQ ID NO: 2578389 - RNA, 19 nt, Homo sapiens
  misc_RNA (1)...(19): siRNA sense strand
agggagagguggagagcac

SEQ ID NO: 2578390 - RNA, 19 nt, Homo sapiens
  misc_RNA (1)...(19): siRNA sense strand
uggcaacagccgacagcua

SEQ ID NO: 2578391 - RNA, 19 nt, Homo sapiens
  misc_RNA (1)...(19): siRNA sense strand
cggcaagauuaucgaguac

SEQ ID NO: 2578392 - RNA, 19 nt, Homo sapiens
  misc_RNA (1)...(19): siRNA sense strand
cggcaaccaccaucggaaa

SEQ ID NO: 2578393 - RNA, 19 nt, Homo sapiens
  misc_RNA (1)...(19): siRNA sense strand
ucucaagccaggugaucaa

SEQ ID NO: 2578394 - RNA, 19 nt, Homo sapiens
  misc_RNA (1)...(19): siRNA sense strand
uggaauaagcccagucuca

SEQ ID NO: 2578395 - RNA, 19 nt, Homo sapiens
  misc_RNA (1)...(19): siRNA sense strand
gugagguggcugcaggaaa

SEQ ID NO: 2578396 - RNA, 19 nt, Homo sapiens
  misc_RNA (1)...(19): siRNA sense strand
caaagaaaucuaaggccga

SEQ ID NO: 2578397 - RNA, 19 nt, Homo sapiens
  misc_RNA (1)...(19): siRNA sense strand
aaucuaaggccgaugguca

SEQ ID NO: 2578398 - RNA, 19 nt, Homo sapiens
  misc_RNA (1)...(19): siRNA sense strand
gcuucucccuugugggcaa

SEQ ID NO: 2578399 - RNA, 19 nt, Homo sapiens
  misc_RNA (1)...(19): siRNA sense strand
cccaagagcuaauggccga

SEQ ID NO: 2578400 - RNA, 19 nt, Homo sapiens
  misc_RNA (1)...(19): siRNA sense strand
ccaccaucgugaagaccau

SEQ ID NO: 2578401 - RNA, 19 nt, Homo sapiens
  misc_RNA (1)...(19): siRNA sense strand
cgacugugggccagcagaa

SEQ ID NO: 2578402 - RNA, 19 nt, Homo sapiens
  misc_RNA (1)...(19): siRNA sense strand
gaacaacauuccaagguac

SEQ ID NO: 2578403 - RNA, 19 nt, Homo sapiens
  misc_RNA (1)...(19): siRNA sense strand
gcuccagaaauaugacauu

SEQ ID NO: 2578404 - RNA, 19 nt, Homo sapiens
  misc_RNA (1)...(19): siRNA sense strand
gcgaaaucucagccuuuaa

SEQ ID NO: 2578405 - RNA, 19 nt, Homo sapiens
  misc_RNA (1)...(19): siRNA sense strand
ggaaauaaaauguacgugu

SEQ ID NO: 2578406 - RNA, 19 nt, Homo sapiens
  misc_RNA (1)...(19): siRNA sense strand
acccagccauugagagcaa

SEQ ID NO: 2578407 - RNA, 19 nt, Homo sapiens
  misc_RNA (1)...(19): siRNA sense strand
gccauuaaaaucagcaaaa

SEQ ID NO: 2578408 - RNA, 19 nt, Homo sapiens
  misc_RNA (1)...(19): siRNA sense strand
ccuguggacccuagauauu

SEQ ID NO: 2578409 - RNA, 19 nt, Homo sapiens
  misc_RNA (1)...(19): siRNA sense strand
acacagagugcccagggaa

SEQ ID NO: 2578410 - RNA, 19 nt, Homo sapiens
  misc_RNA (1)...(19): siRNA sense strand
ucauggugagcgugagcaa

SEQ ID NO: 2578411 - RNA, 19 nt, Homo sapiens
  misc_RNA (1)...(19): siRNA sense strand
gcaucgagucccugggugu

SEQ ID NO: 2578412 - RNA, 19 nt, Homo sapiens
  misc_RNA (1)...(19): siRNA sense strand
cacacgagaaggaguggaa

SEQ ID NO: 2578413 - RNA, 19 nt, Homo sapiens
  misc_RNA (1)...(19): siRNA sense strand
ccucaggcuacaacaggaa

SEQ ID NO: 2578414 - RNA, 19 nt, Homo sapiens
  misc_RNA (1)...(19): siRNA sense strand
gaacaauccugaagcuggu

SEQ ID NO: 2578415 - RNA, 19 nt, Homo sapiens
  misc_RNA (1)...(19): siRNA sense strand
aaaugaaaucugcuccaaa

SEQ ID NO: 2578416 - RNA, 19 nt, Homo sapiens
  misc_RNA (1)...(19): siRNA sense strand
ggaugaagaaguucggcaa

SEQ ID NO: 2578417 - RNA, 19 nt, Homo sapiens
  misc_RNA (1)...(19): siRNA sense strand
ugaacgaaguuauggcaga

SEQ ID NO: 2578418 - RNA, 19 nt, Homo sapiens
  misc_RNA (1)...(19): siRNA sense strand
gccuauacugagaggagaa

SEQ ID NO: 2578419 - RNA, 19 nt, Homo sapiens
  misc_RNA (1)...(19): siRNA sense strand
gcuugaagaaauugacuca

SEQ ID NO: 2578420 - RNA, 19 nt, Homo sapiens
  misc_RNA (1)...(19): siRNA sense strand
auauauuggaggaugaaga

SEQ ID NO: 2578421 - RNA, 19 nt, Homo sapiens
  misc_RNA (1)...(19): siRNA sense strand
cggcaaggauuaaaagcuu

SEQ ID NO: 2578422 - RNA, 19 nt, Homo sapiens
  misc_RNA (1)...(19): siRNA sense strand
ugaagagguucgacaggga

SEQ ID NO: 2578423 - RNA, 19 nt, Homo sapiens
  misc_RNA (1)...(19): siRNA sense strand
uugugaaggaacugaaaga

SEQ ID NO: 2578424 - RNA, 19 nt, Homo sapiens
  misc_RNA (1)...(19): siRNA sense strand
cagaugaagagguucgaca

SEQ ID NO: 2578425 - RNA, 19 nt, Homo sapiens
  misc_RNA (1)...(19): siRNA sense strand
ccaaauuagaggaaaggcu

SEQ ID NO: 2578426 - RNA, 19 nt, Homo sapiens
  misc_RNA (1)...(19): siRNA sense strand
cgacaugcaucuaguggcu

SEQ ID NO: 2578427 - RNA, 19 nt, Homo sapiens
  misc_RNA (1)...(19): siRNA sense strand
cugugaugcucuuuaugaa

SEQ ID NO: 2578428 - RNA, 19 nt, Homo sapiens
  misc_RNA (1)...(19): siRNA sense strand
uugugaaguuggaagcuga

SEQ ID NO: 2578429 - RNA, 19 nt, Homo sapiens
  misc_RNA (1)...(19): siRNA sense strand
cugcaugcuguuuaugaaa

SEQ ID NO: 2578430 - RNA, 19 nt, Homo sapiens
  misc_RNA (1)...(19): siRNA sense strand
uggauauugugaaggaacu

SEQ ID NO: 2578431 - RNA, 19 nt, Homo sapiens
  misc_RNA (1)...(19): siRNA sense strand
gagccugcuuugagcggaa

SEQ ID NO: 2578432 - RNA, 19 nt, Homo sapiens
  misc_RNA (1)...(19): siRNA sense strand
ccaaagaagagcuggccca

SEQ ID NO: 2578433 - RNA, 19 nt, Homo sapiens
  misc_RNA (1)...(19): siRNA sense strand
uuucagaaucgaagagcca

SEQ ID NO: 2578434 - RNA, 19 nt, Homo sapiens
  misc_RNA (1)...(19): siRNA sense strand
agacgaaagcggacugcca

SEQ ID NO: 2578435 - RNA, 19 nt, Homo sapiens
  misc_RNA (1)...(19): siRNA sense strand
gguuucagaaugagagauc

SEQ ID NO: 2578436 - RNA, 19 nt, Homo sapiens
  misc_RNA (1)...(19): siRNA sense strand
ccagauuugguuucagaau

SEQ ID NO: 2578437 - RNA, 19 nt, Homo sapiens
  misc_RNA (1)...(19): siRNA sense strand
ggaucauggacgaggaaga

SEQ ID NO: 2578438 - RNA, 19 nt, Homo sapiens
  misc_RNA (1)...(19): siRNA sense strand
gcacagggaucguggugga

SEQ ID NO: 2578439 - RNA, 19 nt, Homo sapiens
  misc_RNA (1)...(19): siRNA sense strand
gcaucgacucggaggucua

SEQ ID NO: 2578440 - RNA, 19 nt, Homo sapiens
  misc_RNA (1)...(19): siRNA sense strand
gcaagauguucgacgagga

SEQ ID NO: 2578441 - RNA, 19 nt, Homo sapiens
  misc_RNA (1)...(19): siRNA sense strand
gggaaggcaccauuggcaa

SEQ ID NO: 2578442 - RNA, 19 nt, Homo sapiens
  misc_RNA (1)...(19): siRNA sense strand
ucaaugaggugcuggagga

SEQ ID NO: 2578443 - RNA, 19 nt, Homo sapiens
  misc_RNA (1)...(19): siRNA sense strand
aguacaagcagguggagca

SEQ ID NO: 2578444 - RNA, 19 nt, Homo sapiens
  misc_RNA (1)...(19): siRNA sense strand
aggacaacacagagaucau

SEQ ID NO: 2578445 - RNA, 19 nt, Homo sapiens
  misc_RNA (1)...(19): siRNA sense strand
agaaagccguggagcgcga

SEQ ID NO: 2578446 - RNA, 19 nt, Homo sapiens
  misc_RNA (1)...(19): siRNA sense strand
cuaucaaaguggagggagg

SEQ ID NO: 2578447 - RNA, 19 nt, Homo sapiens
  misc_RNA (1)...(19): siRNA sense strand
agggcaacaaggagaccaa

SEQ ID NO: 2578448 - RNA, 19 nt, Homo sapiens
  misc_RNA (1)...(19): siRNA sense strand
aagaggacgccgaggagga

SEQ ID NO: 2578449 - RNA, 19 nt, Homo sapiens
  misc_RNA (1)...(19): siRNA sense strand
gcgaacaggagagggucaa

SEQ ID NO: 2578450 - RNA, 19 nt, Homo sapiens
  misc_RNA (1)...(19): siRNA sense strand
ucuucaacuaccaggagaa

SEQ ID NO: 2578451 - RNA, 19 nt, Homo sapiens
  misc_RNA (1)...(19): siRNA sense strand
uguucgacgaggagagcau

SEQ ID NO: 2578452 - RNA, 19 nt, Homo sapiens
  misc_RNA (1)...(19): siRNA sense strand
aggcguggaucauggacga

SEQ ID NO: 2578453 - RNA, 19 nt, Homo sapiens
  misc_RNA (1)...(19): siRNA sense strand
ccgugaaauucgugacaaa

SEQ ID NO: 2578454 - RNA, 19 nt, Homo sapiens
  misc_RNA (1)...(19): siRNA sense strand
caagaauaucauugggaaa

SEQ ID NO: 2578455 - RNA, 19 nt, Homo sapiens
  misc_RNA (1)...(19): siRNA sense strand
ggaucuaaucauugagcaa

SEQ ID NO: 2578456 - RNA, 19 nt, Homo sapiens
  misc_RNA (1)...(19): siRNA sense strand
uggcagaucugguggaaaa

SEQ ID NO: 2578457 - RNA, 19 nt, Homo sapiens
  misc_RNA (1)...(19): siRNA sense strand
gcagaaaggaagugggauc

SEQ ID NO: 2578458 - RNA, 19 nt, Homo sapiens
  misc_RNA (1)...(19): siRNA sense strand
uggaugaguuugaggugaa

SEQ ID NO: 2578459 - RNA, 19 nt, Homo sapiens
  misc_RNA (1)...(19): siRNA sense strand
ucacagagggcgaagacaa

SEQ ID NO: 2578460 - RNA, 19 nt, Homo sapiens
  misc_RNA (1)...(19): siRNA sense strand
gaaucaaagaccaguacaa

SEQ ID NO: 2578461 - RNA, 19 nt, Homo sapiens
  misc_RNA (1)...(19): siRNA sense strand
uggacuauguggagaucaa

SEQ ID NO: 2578462 - RNA, 19 nt, Homo sapiens
  misc_RNA (1)...(19): siRNA sense strand
agauuuaugaggagaagaa

SEQ ID NO: 2578463 - RNA, 19 nt, Homo sapiens
  misc_RNA (1)...(19): siRNA sense strand
cugauaaggacgaugggaa

SEQ ID NO: 2578464 - RNA, 19 nt, Homo sapiens
  misc_RNA (1)...(19): siRNA sense strand
agauagaaggcauggucaa

SEQ ID NO: 2578465 - RNA, 19 nt, Homo sapiens
  misc_RNA (1)...(19): siRNA sense strand
ccaagauuaucgggagaaa

SEQ ID NO: 2578466 - RNA, 19 nt, Homo sapiens
  misc_RNA (1)...(19): siRNA sense strand
cuaagaaugagguggaaaa

SEQ ID NO: 2578467 - RNA, 19 nt, Homo sapiens
  misc_RNA (1)...(19): siRNA sense strand
ccaacauagccgagguaga

SEQ ID NO: 2578468 - RNA, 19 nt, Homo sapiens
  misc_RNA (1)...(19): siRNA sense strand
gcacaaaauacaugcagaa

SEQ ID NO: 2578469 - RNA, 19 nt, Homo sapiens
  misc_RNA (1)...(19): siRNA sense strand
guuuggagaaggugaacaa

SEQ ID NO: 2578470 - RNA, 19 nt, Homo sapiens
  misc_RNA (1)...(19): siRNA sense strand
aggaacagauagaaggcau

SEQ ID NO: 2578471 - RNA, 19 nt, Homo sapiens
  misc_RNA (1)...(19): siRNA sense strand
acaaauuccucaucggcaa

SEQ ID NO: 2578472 - RNA, 19 nt, Homo sapiens
  misc_RNA (1)...(19): siRNA sense strand
gggagagaggcuaaagauu

SEQ ID NO: 2578473 - RNA, 19 nt, Homo sapiens
  misc_RNA (1)...(19): siRNA sense strand
gagaauugugggugaacuu

SEQ ID NO: 2578474 - RNA, 19 nt, Homo sapiens
  misc_RNA (1)...(19): siRNA sense strand
auucagaagaggagagcga

SEQ ID NO: 2578475 - RNA, 19 nt, Homo sapiens
  misc_RNA (1)...(19): siRNA sense strand
gugccaacauaaacagaau

SEQ ID NO: 2578476 - RNA, 19 nt, Homo sapiens
  misc_RNA (1)...(19): siRNA sense strand
gcaaagauuucaucgcaca

SEQ ID NO: 2578477 - RNA, 19 nt, Homo sapiens
  misc_RNA (1)...(19): siRNA sense strand
gggagauugcugaagagua

SEQ ID NO: 2578478 - RNA, 19 nt, Homo sapiens
  misc_RNA (1)...(19): siRNA sense strand
ucaaucuggaggaggaaua

SEQ ID NO: 2578479 - RNA, 19 nt, Homo sapiens
  misc_RNA (1)...(19): siRNA sense strand
agaagauuuaugaggagaa

SEQ ID NO: 2578480 - RNA, 19 nt, Homo sapiens
  misc_RNA (1)...(19): siRNA sense strand
cagcagauuacucgggauu

SEQ ID NO: 2578481 - RNA, 19 nt, Homo sapiens
  misc_RNA (1)...(19): siRNA sense strand
guuauugggcagaaaggaa

SEQ ID NO: 2578482 - RNA, 19 nt, Homo sapiens
  misc_RNA (1)...(19): siRNA sense strand
cagcacacgaagaggccaa

SEQ ID NO: 2578483 - RNA, 19 nt, Homo sapiens
  misc_RNA (1)...(19): siRNA sense strand
gagaaggugaacaagcaaa

SEQ ID NO: 2578484 - RNA, 19 nt, Homo sapiens
  misc_RNA (1)...(19): siRNA sense strand
aggcgaaccugaaaaguua

SEQ ID NO: 2578485 - RNA, 19 nt, Homo sapiens
  misc_RNA (1)...(19): siRNA sense strand
agaucaacaucgaccacaa

SEQ ID NO: 2578486 - RNA, 19 nt, Homo sapiens
  misc_RNA (1)...(19): siRNA sense strand
acaagaauaucauugggaa

SEQ ID NO: 2578487 - RNA, 19 nt, Homo sapiens
  misc_RNA (1)...(19): siRNA sense strand
uugcaguggaagugaagaa

SEQ ID NO: 2578488 - RNA, 19 nt, Homo sapiens
  misc_RNA (1)...(19): siRNA sense strand
cgaccuuccagcagagaau

SEQ ID NO: 2578489 - RNA, 19 nt, Homo sapiens
  misc_RNA (1)...(19): siRNA sense strand
aggaagcucuggaggcauu

SEQ ID NO: 2578490 - RNA, 19 nt, Homo sapiens
  misc_RNA (1)...(19): siRNA sense strand
caggaaagcuggaugcugu

SEQ ID NO: 2578491 - RNA, 19 nt, Homo sapiens
  misc_RNA (1)...(19): siRNA sense strand
ccaaagaacaccaucgcuu

SEQ ID NO: 2578492 - RNA, 19 nt, Homo sapiens
  misc_RNA (1)...(19): siRNA sense strand
caguggaagugaagaaauc

SEQ ID NO: 2578493 - RNA, 19 nt, Homo sapiens
  misc_RNA (1)...(19): siRNA sense strand
acaaauucccagaggucau

SEQ ID NO: 2578494 - RNA, 19 nt, Homo sapiens
  misc_RNA (1)...(19): siRNA sense strand
gguuggagcaugacgugaa

SEQ ID NO: 2578495 - RNA, 19 nt, Homo sapiens
  misc_RNA (1)...(19): siRNA sense strand
uggagaggcuagaaguaga

SEQ ID NO: 2578496 - RNA, 19 nt, Homo sapiens
  misc_RNA (1)...(19): siRNA sense strand
ugaagaaaucccaacacaa

SEQ ID NO: 2578497 - RNA, 19 nt, Homo sapiens
  misc_RNA (1)...(19): siRNA sense strand
ccuaagaaugagguggaaa

SEQ ID NO: 2578498 - RNA, 19 nt, Homo sapiens
  misc_RNA (1)...(19): siRNA sense strand
ggacaaacgugcuguggag

SEQ ID NO: 2578499 - RNA, 19 nt, Homo sapiens
  misc_RNA (1)...(19): siRNA sense strand
gcagaagggugaacggauc

SEQ ID NO: 2578500 - RNA, 19 nt, Homo sapiens
  misc_RNA (1)...(19): siRNA sense strand
uggagaaggccaagaagca

SEQ ID NO: 2578501 - RNA, 19 nt, Homo sapiens
  misc_RNA (1)...(19): siRNA sense strand
cggcugaggacaaggacca

SEQ ID NO: 2578502 - RNA, 19 nt, Homo sapiens
  misc_RNA (1)...(19): siRNA sense strand
gggcagaaaggaaguggga

SEQ ID NO: 2578503 - RNA, 19 nt, Homo sapiens
  misc_RNA (1)...(19): siRNA sense strand
ugauuaaccggauggacua

SEQ ID NO: 2578504 - RNA, 19 nt, Homo sapiens
  misc_RNA (1)...(19): siRNA sense strand
ggauggacuauguggagau

SEQ ID NO: 2578505 - RNA, 19 nt, Homo sapiens
  misc_RNA (1)...(19): siRNA sense strand
gugaagaaagcaacaccaa

SEQ ID NO: 2578506 - RNA, 19 nt, Homo sapiens
  misc_RNA (1)...(19): siRNA sense strand
cggauguggagaaggccaa

SEQ ID NO: 2578507 - RNA, 19 nt, Homo sapiens
  misc_RNA (1)...(19): siRNA sense strand
ggaccgggcuuuaaggagu

SEQ ID NO: 2578508 - RNA, 19 nt, Homo sapiens
  misc_RNA (1)...(19): siRNA sense strand
ugaaggagcuacaggccga

SEQ ID NO: 2578509 - RNA, 19 nt, Homo sapiens
  misc_RNA (1)...(19): siRNA sense strand
ucaagaagauuuaugagga

SEQ ID NO: 2578510 - RNA, 19 nt, Homo sapiens
  misc_RNA (1)...(19): siRNA sense strand
ggaaaggaggcgcaaacau

SEQ ID NO: 2578511 - RNA, 19 nt, Homo sapiens
  misc_RNA (1)...(19): siRNA sense strand
agaaggaacaguuggcuca

SEQ ID NO: 2578512 - RNA, 19 nt, Homo sapiens
  misc_RNA (1)...(19): siRNA sense strand
ugcagaagaugguggcaga

SEQ ID NO: 2578513 - RNA, 19 nt, Homo sapiens
  misc_RNA (1)...(19): siRNA sense strand
gcaagaaagggcagaaccu

SEQ ID NO: 2578514 - RNA, 19 nt, Homo sapiens
  misc_RNA (1)...(19): siRNA sense strand
cugacagugagaagagcaa

SEQ ID NO: 2578515 - RNA, 19 nt, Homo sapiens
  misc_RNA (1)...(19): siRNA sense strand
gggaugcuauacugagaau

SEQ ID NO: 2578516 - RNA, 19 nt, Homo sapiens
  misc_RNA (1)...(19): siRNA sense strand
ggagaaggugaacaagcaa

SEQ ID NO: 2578517 - RNA, 19 nt, Homo sapiens
  misc_RNA (1)...(19): siRNA sense strand
ggagagaaacugcaagacu

SEQ ID NO: 2578518 - RNA, 19 nt, Homo sapiens
  misc_RNA (1)...(19): siRNA sense strand
ggagaggcuagaaguagaa

SEQ ID NO: 2578519 - RNA, 19 nt, Homo sapiens
  misc_RNA (1)...(19): siRNA sense strand
ccagcagagaauagcaauu

SEQ ID NO: 2578520 - RNA, 19 nt, Homo sapiens
  misc_RNA (1)...(19): siRNA sense strand
cggaggagaagcaaaccaa

SEQ ID NO: 2578521 - RNA, 19 nt, Homo sapiens
  misc_RNA (1)...(19): siRNA sense strand
gcgacaaagucacccucaa

SEQ ID NO: 2578522 - RNA, 19 nt, Homo sapiens
  misc_RNA (1)...(19): siRNA sense strand
guacagagccaguugucca

SEQ ID NO: 2578523 - RNA, 19 nt, Homo sapiens
  misc_RNA (1)...(19): siRNA sense strand
ugggugaacuugagcagau

SEQ ID NO: 2578524 - RNA, 19 nt, Homo sapiens
  misc_RNA (1)...(19): siRNA sense strand
ccgugaaauucgugacaaa

SEQ ID NO: 2578525 - RNA, 19 nt, Homo sapiens
  misc_RNA (1)...(19): siRNA sense strand
caagaauaucauugggaaa

SEQ ID NO: 2578526 - RNA, 19 nt, Homo sapiens
  misc_RNA (1)...(19): siRNA sense strand
ggaucuaaucauugagcaa

SEQ ID NO: 2578527 - RNA, 19 nt, Homo sapiens
  misc_RNA (1)...(19): siRNA sense strand
uggcagaucugguggaaaa

SEQ ID NO: 2578528 - RNA, 19 nt, Homo sapiens
  misc_RNA (1)...(19): siRNA sense strand
gcagaaaggaagugggauc

SEQ ID NO: 2578529 - RNA, 19 nt, Homo sapiens
  misc_RNA (1)...(19): siRNA sense strand
uggaugaguuugaggugaa

SEQ ID NO: 2578530 - RNA, 19 nt, Homo sapiens
  misc_RNA (1)...(19): siRNA sense strand
ucacagagggcgaagacaa

SEQ ID NO: 2578531 - RNA, 19 nt, Homo sapiens
  misc_RNA (1)...(19): siRNA sense strand
gaaucaaagaccaguacaa

SEQ ID NO: 2578532 - RNA, 19 nt, Homo sapiens
  misc_RNA (1)...(19): siRNA sense strand
uggacuauguggagaucaa

SEQ ID NO: 2578533 - RNA, 19 nt, Homo sapiens
  misc_RNA (1)...(19): siRNA sense strand
agauuuaugaggagaagaa

SEQ ID NO: 2578534 - RNA, 19 nt, Homo sapiens
  misc_RNA (1)...(19): siRNA sense strand
cugauaaggacgaugggaa

SEQ ID NO: 2578535 - RNA, 19 nt, Homo sapiens
  misc_RNA (1)...(19): siRNA sense strand
agauagaaggcauggucaa

SEQ ID NO: 2578536 - RNA, 19 nt, Homo sapiens
  misc_RNA (1)...(19): siRNA sense strand
ccaagauuaucgggagaaa

SEQ ID NO: 2578537 - RNA, 19 nt, Homo sapiens
  misc_RNA (1)...(19): siRNA sense strand
cuaagaaugagguggaaaa

SEQ ID NO: 2578538 - RNA, 19 nt, Homo sapiens
  misc_RNA (1)...(19): siRNA sense strand
ccaacauagccgagguaga

SEQ ID NO: 2578539 - RNA, 19 nt, Homo sapiens
  misc_RNA (1)...(19): siRNA sense strand
gcacaaaauacaugcagaa

SEQ ID NO: 2578540 - RNA, 19 nt, Homo sapiens
  misc_RNA (1)...(19): siRNA sense strand
guuuggagaaggugaacaa

SEQ ID NO: 2578541 - RNA, 19 nt, Homo sapiens
  misc_RNA (1)...(19): siRNA sense strand
aggaacagauagaaggcau

SEQ ID NO: 2578542 - RNA, 19 nt, Homo sapiens
  misc_RNA (1)...(19): siRNA sense strand
acaaauuccucaucggcaa

SEQ ID NO: 2578543 - RNA, 19 nt, Homo sapiens
  misc_RNA (1)...(19): siRNA sense strand
gggagagaggcuaaagauu

SEQ ID NO: 2578544 - RNA, 19 nt, Homo sapiens
  misc_RNA (1)...(19): siRNA sense strand
gagaauugugggugaacuu

SEQ ID NO: 2578545 - RNA, 19 nt, Homo sapiens
  misc_RNA (1)...(19): siRNA sense strand
auucagaagaggagagcga

SEQ ID NO: 2578546 - RNA, 19 nt, Homo sapiens
  misc_RNA (1)...(19): siRNA sense strand
gugccaacauaaacagaau

SEQ ID NO: 2578547 - RNA, 19 nt, Homo sapiens
  misc_RNA (1)...(19): siRNA sense strand
gcaaagauuucaucgcaca

SEQ ID NO: 2578548 - RNA, 19 nt, Homo sapiens
  misc_RNA (1)...(19): siRNA sense strand
gggagauugcugaagagua

SEQ ID NO: 2578549 - RNA, 19 nt, Homo sapiens
  misc_RNA (1)...(19): siRNA sense strand
ucaaucuggaggaggaaua

SEQ ID NO: 2578550 - RNA, 19 nt, Homo sapiens
  misc_RNA (1)...(19): siRNA sense strand
agaagauuuaugaggagaa

SEQ ID NO: 2578551 - RNA, 19 nt, Homo sapiens
  misc_RNA (1)...(19): siRNA sense strand
cagcagauuacucgggauu

SEQ ID NO: 2578552 - RNA, 19 nt, Homo sapiens
  misc_RNA (1)...(19): siRNA sense strand
guuauugggcagaaaggaa

SEQ ID NO: 2578553 - RNA, 19 nt, Homo sapiens
  misc_RNA (1)...(19): siRNA sense strand
cagcacacgaagaggccaa

SEQ ID NO: 2578554 - RNA, 19 nt, Homo sapiens
  misc_RNA (1)...(19): siRNA sense strand
gagaaggugaacaagcaaa

SEQ ID NO: 2578555 - RNA, 19 nt, Homo sapiens
  misc_RNA (1)...(19): siRNA sense strand
aggcgaaccugaaaaguua

SEQ ID NO: 2578556 - RNA, 19 nt, Homo sapiens
  misc_RNA (1)...(19): siRNA sense strand
agaucaacaucgaccacaa

SEQ ID NO: 2578557 - RNA, 19 nt, Homo sapiens
  misc_RNA (1)...(19): siRNA sense strand
acaagaauaucauugggaa

SEQ ID NO: 2578558 - RNA, 19 nt, Homo sapiens
  misc_RNA (1)...(19): siRNA sense strand
uugcaguggaagugaagaa

SEQ ID NO: 2578559 - RNA, 19 nt, Homo sapiens
  misc_RNA (1)...(19): siRNA sense strand
cgaccuuccagcagagaau

SEQ ID NO: 2578560 - RNA, 19 nt, Homo sapiens
  misc_RNA (1)...(19): siRNA sense strand
aggaagcucuggaggcauu

SEQ ID NO: 2578561 - RNA, 19 nt, Homo sapiens
  misc_RNA (1)...(19): siRNA sense strand
caggaaagcuggaugcugu

SEQ ID NO: 2578562 - RNA, 19 nt, Homo sapiens
  misc_RNA (1)...(19): siRNA sense strand
ccaaagaacaccaucgcuu

SEQ ID NO: 2578563 - RNA, 19 nt, Homo sapiens
  misc_RNA (1)...(19): siRNA sense strand
caguggaagugaagaaauc

SEQ ID NO: 2578564 - RNA, 19 nt, Homo sapiens
  misc_RNA (1)...(19): siRNA sense strand
acaaauucccagaggucau

SEQ ID NO: 2578565 - RNA, 19 nt, Homo sapiens
  misc_RNA (1)...(19): siRNA sense strand
gguuggagcaugacgugaa

SEQ ID NO: 2578566 - RNA, 19 nt, Homo sapiens
  misc_RNA (1)...(19): siRNA sense strand
uggagaggcuagaaguaga

SEQ ID NO: 2578567 - RNA, 19 nt, Homo sapiens
  misc_RNA (1)...(19): siRNA sense strand
ugaagaaaucccaacacaa

SEQ ID NO: 2578568 - RNA, 19 nt, Homo sapiens
  misc_RNA (1)...(19): siRNA sense strand
ccuaagaaugagguggaaa

SEQ ID NO: 2578569 - RNA, 19 nt, Homo sapiens
  misc_RNA (1)...(19): siRNA sense strand
ggacaaacgugcuguggag

SEQ ID NO: 2578570 - RNA, 19 nt, Homo sapiens
  misc_RNA (1)...(19): siRNA sense strand
gcagaagggugaacggauc

SEQ ID NO: 2578571 - RNA, 19 nt, Homo sapiens
  misc_RNA (1)...(19): siRNA sense strand
uggagaaggccaagaagca

SEQ ID NO: 2578572 - RNA, 19 nt, Homo sapiens
  misc_RNA (1)...(19): siRNA sense strand
cggcugaggacaaggacca

SEQ ID NO: 2578573 - RNA, 19 nt, Homo sapiens
  misc_RNA (1)...(19): siRNA sense strand
gggcagaaaggaaguggga

SEQ ID NO: 2578574 - RNA, 19 nt, Homo sapiens
  misc_RNA (1)...(19): siRNA sense strand
ugauuaaccggauggacua

SEQ ID NO: 2578575 - RNA, 19 nt, Homo sapiens
  misc_RNA (1)...(19): siRNA sense strand
ggauggacuauguggagau

SEQ ID NO: 2578576 - RNA, 19 nt, Homo sapiens
  misc_RNA (1)...(19): siRNA sense strand
gugaagaaagcaacaccaa

SEQ ID NO: 2578577 - RNA, 19 nt, Homo sapiens
  misc_RNA (1)...(19): siRNA sense strand
cggauguggagaaggccaa

SEQ ID NO: 2578578 - RNA, 19 nt, Homo sapiens
  misc_RNA (1)...(19): siRNA sense strand
ggaccgggcuuuaaggagu

SEQ ID NO: 2578579 - RNA, 19 nt, Homo sapiens
  misc_RNA (1)...(19): siRNA sense strand
ugaaggagcuacaggccga

SEQ ID NO: 2578580 - RNA, 19 nt, Homo sapiens
  misc_RNA (1)...(19): siRNA sense strand
ucaagaagauuuaugagga

SEQ ID NO: 2578581 - RNA, 19 nt, Homo sapiens
  misc_RNA (1)...(19): siRNA sense strand
ggaaaggaggcgcaaacau

SEQ ID NO: 2578582 - RNA, 19 nt, Homo sapiens
  misc_RNA (1)...(19): siRNA sense strand
agaaggaacaguuggcuca

SEQ ID NO: 2578583 - RNA, 19 nt, Homo sapiens
  misc_RNA (1)...(19): siRNA sense strand
ugcagaagaugguggcaga

SEQ ID NO: 2578584 - RNA, 19 nt, Homo sapiens
  misc_RNA (1)...(19): siRNA sense strand
gcaagaaagggcagaaccu

SEQ ID NO: 2578585 - RNA, 19 nt, Homo sapiens
  misc_RNA (1)...(19): siRNA sense strand
cugacagugagaagagcaa

SEQ ID NO: 2578586 - RNA, 19 nt, Homo sapiens
  misc_RNA (1)...(19): siRNA sense strand
gggaugcuauacugagaau

SEQ ID NO: 2578587 - RNA, 19 nt, Homo sapiens
  misc_RNA (1)...(19): siRNA sense strand
ggagaaggugaacaagcaa

SEQ ID NO: 2578588 - RNA, 19 nt, Homo sapiens
  misc_RNA (1)...(19): siRNA sense strand
ggagagaaacugcaagacu

SEQ ID NO: 2578589 - RNA, 19 nt, Homo sapiens
  misc_RNA (1)...(19): siRNA sense strand
ggagaggcuagaaguagaa

SEQ ID NO: 2578590 - RNA, 19 nt, Homo sapiens
  misc_RNA (1)...(19): siRNA sense strand
ccagcagagaauagcaauu

SEQ ID NO: 2578591 - RNA, 19 nt, Homo sapiens
  misc_RNA (1)...(19): siRNA sense strand
cggaggagaagcaaaccaa

SEQ ID NO: 2578592 - RNA, 19 nt, Homo sapiens
  misc_RNA (1)...(19): siRNA sense strand
gcgacaaagucacccucaa

SEQ ID NO: 2578593 - RNA, 19 nt, Homo sapiens
  misc_RNA (1)...(19): siRNA sense strand
guacagagccaguugucca

SEQ ID NO: 2578594 - RNA, 19 nt, Homo sapiens
  misc_RNA (1)...(19): siRNA sense strand
ugggugaacuugagcagau

SEQ ID NO: 2578595 - RNA, 19 nt, Homo sapiens
  misc_RNA (1)...(19): siRNA sense strand
gggaaaagccuauaaauau

SEQ ID NO: 2578596 - RNA, 19 nt, Homo sapiens
  misc_RNA (1)...(19): siRNA sense strand
cugcaagcauaguggaaca

SEQ ID NO: 2578597 - RNA, 19 nt, Homo sapiens
  misc_RNA (1)...(19): siRNA sense strand
ugggaaaagccuauaaaua

SEQ ID NO: 2578598 - RNA, 19 nt, Homo sapiens
  misc_RNA (1)...(19): siRNA sense strand
caauauugucaaagagugu

SEQ ID NO: 2578599 - RNA, 19 nt, Homo sapiens
  misc_RNA (1)...(19): siRNA sense strand
cggaaagaucaacugaaau

SEQ ID NO: 2578600 - RNA, 19 nt, Homo sapiens
  misc_RNA (1)...(19): siRNA sense strand
ucauagugcuggagggcgu

SEQ ID NO: 2578601 - RNA, 19 nt, Homo sapiens
  misc_RNA (1)...(19): siRNA sense strand
cguuuggccaugagcgcua

SEQ ID NO: 2578602 - RNA, 19 nt, Homo sapiens
  misc_RNA (1)...(19): siRNA sense strand
gcaucgaagcuguccauga

SEQ ID NO: 2578603 - RNA, 19 nt, Homo sapiens
  misc_RNA (1)...(19): siRNA sense strand
gugccguuaauuaaggaaa

SEQ ID NO: 2578604 - RNA, 19 nt, Homo sapiens
  misc_RNA (1)...(19): siRNA sense strand
gaucaacugaaaucggcaa

SEQ ID NO: 2578605 - RNA, 19 nt, Homo sapiens
  misc_RNA (1)...(19): siRNA sense strand
cccucgucguggacagaua

SEQ ID NO: 2578606 - RNA, 19 nt, Homo sapiens
  misc_RNA (1)...(19): siRNA sense strand
ccaagaaaccaaagggcaa

SEQ ID NO: 2578607 - RNA, 19 nt, Homo sapiens
  misc_RNA (1)...(19): siRNA sense strand
aggaagaagaggaggagga

SEQ ID NO: 2578608 - RNA, 19 nt, Homo sapiens
  misc_RNA (1)...(19): siRNA sense strand
aagaagaggaggaggagga

SEQ ID NO: 2578609 - RNA, 19 nt, Homo sapiens
  misc_RNA (1)...(19): siRNA sense strand
aggaggaggaggaggauga

SEQ ID NO: 2578610 - RNA, 19 nt, Homo sapiens
  misc_RNA (1)...(19): siRNA sense strand
gcggcaaagcugaaggaga

SEQ ID NO: 2578611 - RNA, 19 nt, Homo sapiens
  misc_RNA (1)...(19): siRNA sense strand
aggcagauaaagugcgcua

SEQ ID NO: 2578612 - RNA, 19 nt, Homo sapiens
  misc_RNA (1)...(19): siRNA sense strand
augaagaacaggaggagga

SEQ ID NO: 2578613 - RNA, 19 nt, Homo sapiens
  misc_RNA (1)...(19): siRNA sense strand
aggagaaguaugagaagga

SEQ ID NO: 2578614 - RNA, 19 nt, Homo sapiens
  misc_RNA (1)...(19): siRNA sense strand
cuauuggagacguggcaaa

SEQ ID NO: 2578615 - RNA, 19 nt, Homo sapiens
  misc_RNA (1)...(19): siRNA sense strand
cugggugagauguggaaua

SEQ ID NO: 2578616 - RNA, 19 nt, Homo sapiens
  misc_RNA (1)...(19): siRNA sense strand
augaaauggcaaaggcaga

SEQ ID NO: 2578617 - RNA, 19 nt, Homo sapiens
  misc_RNA (1)...(19): siRNA sense strand
aggaggaagaagaggagga

SEQ ID NO: 2578618 - RNA, 19 nt, Homo sapiens
  misc_RNA (1)...(19): siRNA sense strand
aggaggaggaggaggagga

SEQ ID NO: 2578619 - RNA, 19 nt, Homo sapiens
  misc_RNA (1)...(19): siRNA sense strand
aggaggaggaggaggagga

SEQ ID NO: 2578620 - RNA, 19 nt, Homo sapiens
  misc_RNA (1)...(19): siRNA sense strand
cugcuaaaguugcccggaa

SEQ ID NO: 2578621 - RNA, 19 nt, Homo sapiens
  misc_RNA (1)...(19): siRNA sense strand
ggaagacgguguccgggaa

SEQ ID NO: 2578622 - RNA, 19 nt, Homo sapiens
  misc_RNA (1)...(19): siRNA sense strand
aagaggaagaugaagaaca

SEQ ID NO: 2578623 - RNA, 19 nt, Homo sapiens
  misc_RNA (1)...(19): siRNA sense strand
ggcaagaagaagaaggauc

SEQ ID NO: 2578624 - RNA, 19 nt, Homo sapiens
  misc_RNA (1)...(19): siRNA sense strand
aagaggaggaggaggagga

SEQ ID NO: 2578625 - RNA, 19 nt, Homo sapiens
  misc_RNA (1)...(19): siRNA sense strand
agguggaagaggaagauga

SEQ ID NO: 2578626 - RNA, 19 nt, Homo sapiens
  misc_RNA (1)...(19): siRNA sense strand
caugcagagaagaacauaa

SEQ ID NO: 2578627 - RNA, 19 nt, Homo sapiens
  misc_RNA (1)...(19): siRNA sense strand
aaugaaggauuauggacca

SEQ ID NO: 2578628 - RNA, 19 nt, Homo sapiens
  misc_RNA (1)...(19): siRNA sense strand
cugaaggagaaguaugaga

SEQ ID NO: 2578629 - RNA, 19 nt, Homo sapiens
  misc_RNA (1)...(19): siRNA sense strand
agacaugcagagaagaaca

SEQ ID NO: 2578630 - RNA, 19 nt, Homo sapiens
  misc_RNA (1)...(19): siRNA sense strand
agggaggcaagaagaagaa

SEQ ID NO: 2578631 - RNA, 19 nt, Homo sapiens
  misc_RNA (1)...(19): siRNA sense strand
gcuaaaguugcccggaaaa

SEQ ID NO: 2578632 - RNA, 19 nt, Homo sapiens
  misc_RNA (1)...(19): siRNA sense strand
aagaugaagaacaggagga

SEQ ID NO: 2578633 - RNA, 19 nt, Homo sapiens
  misc_RNA (1)...(19): siRNA sense strand
aggaggaggaagaagagga

SEQ ID NO: 2578634 - RNA, 19 nt, Homo sapiens
  misc_RNA (1)...(19): siRNA sense strand
aggaaaguuugauggugca

SEQ ID NO: 2578635 - RNA, 19 nt, Homo sapiens
  misc_RNA (1)...(19): siRNA sense strand
cggccaaggugaagcgcaa

SEQ ID NO: 2578636 - RNA, 19 nt, Homo sapiens
  misc_RNA (1)...(19): siRNA sense strand
gcagugagccugagggaga

SEQ ID NO: 2578637 - RNA, 19 nt, Homo sapiens
  misc_RNA (1)...(19): siRNA sense strand
gaaugaagacucaggggaa

SEQ ID NO: 2578638 - RNA, 19 nt, Homo sapiens
  misc_RNA (1)...(19): siRNA sense strand
gagggaagcuggaggcacu

SEQ ID NO: 2578639 - RNA, 19 nt, Homo sapiens
  misc_RNA (1)...(19): siRNA sense strand
uggaggaggagcuggagaa

SEQ ID NO: 2578640 - RNA, 19 nt, Homo sapiens
  misc_RNA (1)...(19): siRNA sense strand
cugaaugggcugagggaug

SEQ ID NO: 2578641 - RNA, 19 nt, Homo sapiens
  misc_RNA (1)...(19): siRNA sense strand
gggccguggaugaagaaga

SEQ ID NO: 2578642 - RNA, 19 nt, Homo sapiens
  misc_RNA (1)...(19): siRNA sense strand
ugaagaagacacagccaga

SEQ ID NO: 2578643 - RNA, 19 nt, Homo sapiens
  misc_RNA (1)...(19): siRNA sense strand
aggacagagaugagaggga

SEQ ID NO: 2578644 - RNA, 19 nt, Homo sapiens
  misc_RNA (1)...(19): siRNA sense strand
gcaugagcugccaggaauu

SEQ ID NO: 2578645 - RNA, 19 nt, Homo sapiens
  misc_RNA (1)...(19): siRNA sense strand
ucgagugggccguggauga

SEQ ID NO: 2578646 - RNA, 19 nt, Homo sapiens
  misc_RNA (1)...(19): siRNA sense strand
ccaccuacaagcagggcau

SEQ ID NO: 2578647 - RNA, 19 nt, Homo sapiens
  misc_RNA (1)...(19): siRNA sense strand
agagcauguucuucagcaa

SEQ ID NO: 2578648 - RNA, 19 nt, Homo sapiens
  misc_RNA (1)...(19): siRNA sense strand
ggggagagugagggagaua

SEQ ID NO: 2578649 - RNA, 19 nt, Homo sapiens
  misc_RNA (1)...(19): siRNA sense strand
aaguaaagagugaaggaac

SEQ ID NO: 2578650 - RNA, 19 nt, Homo sapiens
  misc_RNA (1)...(19): siRNA sense strand
acacggaccugcauggaca

SEQ ID NO: 2578651 - RNA, 19 nt, Homo sapiens
  misc_RNA (1)...(19): siRNA sense strand
ccugaaccuaccagacaaa

SEQ ID NO: 2578652 - RNA, 19 nt, Homo sapiens
  misc_RNA (1)...(19): siRNA sense strand
gaacagugcuucuggagag

SEQ ID NO: 2578653 - RNA, 19 nt, Homo sapiens
  misc_RNA (1)...(19): siRNA sense strand
aagcagaaccggagcacgu

SEQ ID NO: 2578654 - RNA, 19 nt, Homo sapiens
  misc_RNA (1)...(19): siRNA sense strand
gaagcauugaccugggaau

SEQ ID NO: 2578655 - RNA, 19 nt, Homo sapiens
  misc_RNA (1)...(19): siRNA sense strand
gggcauccuggcucggaaa

SEQ ID NO: 2578656 - RNA, 19 nt, Homo sapiens
  misc_RNA (1)...(19): siRNA sense strand
gagaaaacccgcuacgaga

SEQ ID NO: 2578657 - RNA, 19 nt, Homo sapiens
  misc_RNA (1)...(19): siRNA sense strand
cccaaaaccaggcgaggaa

SEQ ID NO: 2578658 - RNA, 19 nt, Homo sapiens
  misc_RNA (1)...(19): siRNA sense strand
agucugaaguggcugccua

SEQ ID NO: 2578659 - RNA, 19 nt, Homo sapiens
  misc_RNA (1)...(19): siRNA sense strand
agaucaucccuaagcggaa

SEQ ID NO: 2578660 - RNA, 19 nt, Homo sapiens
  misc_RNA (1)...(19): siRNA sense strand
cagagggagcacaggcaga

SEQ ID NO: 2578661 - RNA, 19 nt, Homo sapiens
  misc_RNA (1)...(19): siRNA sense strand
caugagaaucugaggacac

SEQ ID NO: 2578662 - RNA, 19 nt, Homo sapiens
  misc_RNA (1)...(19): siRNA sense strand
ccuaccugcagaagaacaa

SEQ ID NO: 2578663 - RNA, 19 nt, Homo sapiens
  misc_RNA (1)...(19): siRNA sense strand
cucaggaacgggagcgaau

SEQ ID NO: 2578664 - RNA, 19 nt, Homo sapiens
  misc_RNA (1)...(19): siRNA sense strand
cagcuggcaagaugagcaa

SEQ ID NO: 2578665 - RNA, 19 nt, Homo sapiens
  misc_RNA (1)...(19): siRNA sense strand
ugcuggaucuacagaggaa

SEQ ID NO: 2578666 - RNA, 19 nt, Homo sapiens
  misc_RNA (1)...(19): siRNA sense strand
ggagaagacggaagggcuc

SEQ ID NO: 2578667 - RNA, 19 nt, Homo sapiens
  misc_RNA (1)...(19): siRNA sense strand
ggaagacagcagugagccu

SEQ ID NO: 2578668 - RNA, 19 nt, Homo sapiens
  misc_RNA (1)...(19): siRNA sense strand
aucaagaugcagacggcaa

SEQ ID NO: 2578669 - RNA, 19 nt, Homo sapiens
  misc_RNA (1)...(19): siRNA sense strand
cggaaggaguaccuggagu

SEQ ID NO: 2578670 - RNA, 19 nt, Homo sapiens
  misc_RNA (1)...(19): siRNA sense strand
cggaagauaaagagaacua

SEQ ID NO: 2578671 - RNA, 19 nt, Homo sapiens
  misc_RNA (1)...(19): siRNA sense strand
agaaagagucggaagacaa

SEQ ID NO: 2578672 - RNA, 19 nt, Homo sapiens
  misc_RNA (1)...(19): siRNA sense strand
caugaaagcucaagcccua

SEQ ID NO: 2578673 - RNA, 19 nt, Homo sapiens
  misc_RNA (1)...(19): siRNA sense strand
aggcagaggcugauaagaa

SEQ ID NO: 2578674 - RNA, 19 nt, Homo sapiens
  misc_RNA (1)...(19): siRNA sense strand
gcucaagcccuaagagaca

SEQ ID NO: 2578675 - RNA, 19 nt, Homo sapiens
  misc_RNA (1)...(19): siRNA sense strand
gaacgaagaauaaaggaga

SEQ ID NO: 2578676 - RNA, 19 nt, Homo sapiens
  misc_RNA (1)...(19): siRNA sense strand
auugagaccuuaaggcaaa

SEQ ID NO: 2578677 - RNA, 19 nt, Homo sapiens
  misc_RNA (1)...(19): siRNA sense strand
agaggaugaagaagagaaa

SEQ ID NO: 2578678 - RNA, 19 nt, Homo sapiens
  misc_RNA (1)...(19): siRNA sense strand
gcauggaagaaguagacua

SEQ ID NO: 2578679 - RNA, 19 nt, Homo sapiens
  misc_RNA (1)...(19): siRNA sense strand
ugaaggaauuugaggggaa

SEQ ID NO: 2578680 - RNA, 19 nt, Homo sapiens
  misc_RNA (1)...(19): siRNA sense strand
aaagaagcaggaagagaaa

SEQ ID NO: 2578681 - RNA, 19 nt, Homo sapiens
  misc_RNA (1)...(19): siRNA sense strand
uuauuugguugcugagaaa

SEQ ID NO: 2578682 - RNA, 19 nt, Homo sapiens
  misc_RNA (1)...(19): siRNA sense strand
agaagaagaagaagaagau

SEQ ID NO: 2578683 - RNA, 19 nt, Homo sapiens
  misc_RNA (1)...(19): siRNA sense strand
aggaggagguugagacguu

SEQ ID NO: 2578684 - RNA, 19 nt, Homo sapiens
  misc_RNA (1)...(19): siRNA sense strand
ggagauaaacccugaccau

SEQ ID NO: 2578685 - RNA, 19 nt, Homo sapiens
  misc_RNA (1)...(19): siRNA sense strand
cugaacuggcggaagauaa

SEQ ID NO: 2578686 - RNA, 19 nt, Homo sapiens
  misc_RNA (1)...(19): siRNA sense strand
aggaagacaaagaagaaga

SEQ ID NO: 2578687 - RNA, 19 nt, Homo sapiens
  misc_RNA (1)...(19): siRNA sense strand
uguggaacgucuucggaaa

SEQ ID NO: 2578688 - RNA, 19 nt, Homo sapiens
  misc_RNA (1)...(19): siRNA sense strand
ccaaagaaggccuggaacu

SEQ ID NO: 2578689 - RNA, 19 nt, Homo sapiens
  misc_RNA (1)...(19): siRNA sense strand
ccagaaugaaggagaacca

SEQ ID NO: 2578690 - RNA, 19 nt, Homo sapiens
  misc_RNA (1)...(19): siRNA sense strand
gcaaagaaacaccuggaga

SEQ ID NO: 2578691 - RNA, 19 nt, Homo sapiens
  misc_RNA (1)...(19): siRNA sense strand
aggagauugugaagaaaca

SEQ ID NO: 2578692 - RNA, 19 nt, Homo sapiens
  misc_RNA (1)...(19): siRNA sense strand
ugaaggagaaccagaaaca

SEQ ID NO: 2578693 - RNA, 19 nt, Homo sapiens
  misc_RNA (1)...(19): siRNA sense strand
ggugacaagaagaagaaga

SEQ ID NO: 2578694 - RNA, 19 nt, Homo sapiens
  misc_RNA (1)...(19): siRNA sense strand
gagaauucuauaagagcuu

SEQ ID NO: 2578695 - RNA, 19 nt, Homo sapiens
  misc_RNA (1)...(19): siRNA sense strand
ugaacuggcggaagauaaa

SEQ ID NO: 2578696 - RNA, 19 nt, Homo sapiens
  misc_RNA (1)...(19): siRNA sense strand
ggcaaaaggcagaggcuga

SEQ ID NO: 2578697 - RNA, 19 nt, Homo sapiens
  misc_RNA (1)...(19): siRNA sense strand
guggagaaggaacgugaua

SEQ ID NO: 2578698 - RNA, 19 nt, Homo sapiens
  misc_RNA (1)...(19): siRNA sense strand
aagaaaaggaagacaaaga

SEQ ID NO: 2578699 - RNA, 19 nt, Homo sapiens
  misc_RNA (1)...(19): siRNA sense strand
ggggaagacuuuaguguca

SEQ ID NO: 2578700 - RNA, 19 nt, Homo sapiens
  misc_RNA (1)...(19): siRNA sense strand
accuaugggucguggaaca

SEQ ID NO: 2578701 - RNA, 19 nt, Homo sapiens
  misc_RNA (1)...(19): siRNA sense strand
cuaaugaggaguacggaga

SEQ ID NO: 2578702 - RNA, 19 nt, Homo sapiens
  misc_RNA (1)...(19): siRNA sense strand
gggaagaucacuuggcagu

SEQ ID NO: 2578703 - RNA, 19 nt, Homo sapiens
  misc_RNA (1)...(19): siRNA sense strand
gugauaaagaaguaagcga

SEQ ID NO: 2578704 - RNA, 19 nt, Homo sapiens
  misc_RNA (1)...(19): siRNA sense strand
aagagaaagagucggaaga

SEQ ID NO: 2578705 - RNA, 19 nt, Homo sapiens
  misc_RNA (1)...(19): siRNA sense strand
uggaggaggaggagguuga

SEQ ID NO: 2578706 - RNA, 19 nt, Homo sapiens
  misc_RNA (1)...(19): siRNA sense strand
guaaauuagacucugggaa

SEQ ID NO: 2578707 - RNA, 19 nt, Homo sapiens
  misc_RNA (1)...(19): siRNA sense strand
cugaagaaaaggaagacaa

SEQ ID NO: 2578708 - RNA, 19 nt, Homo sapiens
  misc_RNA (1)...(19): siRNA sense strand
cagaggaugaagaagagaa

SEQ ID NO: 2578709 - RNA, 19 nt, Homo sapiens
  misc_RNA (1)...(19): siRNA sense strand
uuggaggaacgaagaauaa

SEQ ID NO: 2578710 - RNA, 19 nt, Homo sapiens
  misc_RNA (1)...(19): siRNA sense strand
gaagaauaaaggagauugu

SEQ ID NO: 2578711 - RNA, 19 nt, Homo sapiens
  misc_RNA (1)...(19): siRNA sense strand
gauaaagagaacuacaaga

SEQ ID NO: 2578712 - RNA, 19 nt, Homo sapiens
  misc_RNA (1)...(19): siRNA sense strand
ugaagaaaaggaagacaaa

SEQ ID NO: 2578713 - RNA, 19 nt, Homo sapiens
  misc_RNA (1)...(19): siRNA sense strand
guugaaggacaguuggaau

SEQ ID NO: 2578714 - RNA, 19 nt, Homo sapiens
  misc_RNA (1)...(19): siRNA sense strand
cgaugaugaggcugaagaa

SEQ ID NO: 2578715 - RNA, 19 nt, Homo sapiens
  misc_RNA (1)...(19): siRNA sense strand
gaucaauaaccuugguacu

SEQ ID NO: 2578716 - RNA, 19 nt, Homo sapiens
  misc_RNA (1)...(19): siRNA sense strand
gagcaguacgcuugggagu

SEQ ID NO: 2578717 - RNA, 19 nt, Homo sapiens
  misc_RNA (1)...(19): siRNA sense strand
gaggacagacacaggugaa

SEQ ID NO: 2578718 - RNA, 19 nt, Homo sapiens
  misc_RNA (1)...(19): siRNA sense strand
augaugaggcugaagaaaa

SEQ ID NO: 2578719 - RNA, 19 nt, Homo sapiens
  misc_RNA (1)...(19): siRNA sense strand
aaaagaagcaggaagagaa

SEQ ID NO: 2578720 - RNA, 19 nt, Homo sapiens
  misc_RNA (1)...(19): siRNA sense strand
aggaaaauccagcgcaaaa

SEQ ID NO: 2578721 - RNA, 19 nt, Homo sapiens
  misc_RNA (1)...(19): siRNA sense strand
ugugagacucugugggcua

SEQ ID NO: 2578722 - RNA, 19 nt, Homo sapiens
  misc_RNA (1)...(19): siRNA sense strand
gcuagaauacauacggaca

SEQ ID NO: 2578723 - RNA, 19 nt, Homo sapiens
  misc_RNA (1)...(19): siRNA sense strand
ugaggaaaauccagcgcaa

SEQ ID NO: 2578724 - RNA, 19 nt, Homo sapiens
  misc_RNA (1)...(19): siRNA sense strand
acugaagagcuuuggaagu

SEQ ID NO: 2578725 - RNA, 19 nt, Homo sapiens
  misc_RNA (1)...(19): siRNA sense strand
gguggaugccucaggggaa

SEQ ID NO: 2578726 - RNA, 19 nt, Homo sapiens
  misc_RNA (1)...(19): siRNA sense strand
ccucagagauagugggauc

SEQ ID NO: 2578727 - RNA, 19 nt, Homo sapiens
  misc_RNA (1)...(19): siRNA sense strand
ccggauuguacaaggcaua

SEQ ID NO: 2578728 - RNA, 19 nt, Homo sapiens
  misc_RNA (1)...(19): siRNA sense strand
ccacugacucccagggcua

SEQ ID NO: 2578729 - RNA, 19 nt, Homo sapiens
  misc_RNA (1)...(19): siRNA sense strand
acacauagcuggagccauc

SEQ ID NO: 2578730 - RNA, 19 nt, Homo sapiens
  misc_RNA (1)...(19): siRNA sense strand
uggcuauguggcuggaaua

SEQ ID NO: 2578731 - RNA, 19 nt, Homo sapiens
  misc_RNA (1)...(19): siRNA sense strand
gcaauuuaaacguggcuca

SEQ ID NO: 2578732 - RNA, 19 nt, Homo sapiens
  misc_RNA (1)...(19): siRNA sense strand
ggauauugcuccucgguac

SEQ ID NO: 2578733 - RNA, 19 nt, Homo sapiens
  misc_RNA (1)...(19): siRNA sense strand
ggaccagaugucaaggcua

SEQ ID NO: 2578734 - RNA, 19 nt, Homo sapiens
  misc_RNA (1)...(19): siRNA sense strand
caguauucaauuuggguca

SEQ ID NO: 2578735 - RNA, 19 nt, Homo sapiens
  misc_RNA (1)...(19): siRNA sense strand
gagcagaugugcaggacug

SEQ ID NO: 2578736 - RNA, 19 nt, Homo sapiens
  misc_RNA (1)...(19): siRNA sense strand
gcucgguacuucaagccaa

SEQ ID NO: 2578737 - RNA, 19 nt, Homo sapiens
  misc_RNA (1)...(19): siRNA sense strand
acucaucaccaucaggaaa

SEQ ID NO: 2578738 - RNA, 19 nt, Homo sapiens
  misc_RNA (1)...(19): siRNA sense strand
gcuggugagaagagauaca

SEQ ID NO: 2578739 - RNA, 19 nt, Homo sapiens
  misc_RNA (1)...(19): siRNA sense strand
uuaugaugauccugugaau

SEQ ID NO: 2578740 - RNA, 19 nt, Homo sapiens
  misc_RNA (1)...(19): siRNA sense strand
guucauuggcucagcagga

SEQ ID NO: 2578741 - RNA, 19 nt, Homo sapiens
  misc_RNA (1)...(19): siRNA sense strand
caacaaaugaacuugagca

SEQ ID NO: 2578742 - RNA, 19 nt, Homo sapiens
  misc_RNA (1)...(19): siRNA sense strand
auuuaaacguggcucaaga

SEQ ID NO: 2578743 - RNA, 19 nt, Homo sapiens
  misc_RNA (1)...(19): siRNA sense strand
aacaaaugaacuugagcau

SEQ ID NO: 2578744 - RNA, 19 nt, Homo sapiens
  misc_RNA (1)...(19): siRNA sense strand
aggaauuggcugugcuugu

SEQ ID NO: 2578745 - RNA, 19 nt, Homo sapiens
  misc_RNA (1)...(19): siRNA sense strand
gcauauucccucagcccua

SEQ ID NO: 2578746 - RNA, 19 nt, Homo sapiens
  misc_RNA (1)...(19): siRNA sense strand
cccaagaguucaaggccca

SEQ ID NO: 2578747 - RNA, 19 nt, Homo sapiens
  misc_RNA (1)...(19): siRNA sense strand
gggacucggacuacgaaau

SEQ ID NO: 2578748 - RNA, 19 nt, Homo sapiens
  misc_RNA (1)...(19): siRNA sense strand
gggccauagacaaucagua

SEQ ID NO: 2578749 - RNA, 19 nt, Homo sapiens
  misc_RNA (1)...(19): siRNA sense strand
ccaaauuugugcagcuaaa

SEQ ID NO: 2578750 - RNA, 19 nt, Homo sapiens
  misc_RNA (1)...(19): siRNA sense strand
agauaaagucagaccuaaa

SEQ ID NO: 2578751 - RNA, 19 nt, Homo sapiens
  misc_RNA (1)...(19): siRNA sense strand
agucagaccuaaagccaaa

SEQ ID NO: 2578752 - RNA, 19 nt, Homo sapiens
  misc_RNA (1)...(19): siRNA sense strand
aaacaaagaaagaggcaga

SEQ ID NO: 2578753 - RNA, 19 nt, Homo sapiens
  misc_RNA (1)...(19): siRNA sense strand
cuguaaaaccugaggagaa

SEQ ID NO: 2578754 - RNA, 19 nt, Homo sapiens
  misc_RNA (1)...(19): siRNA sense strand
cagcuaaagccuggagaaa

SEQ ID NO: 2578755 - RNA, 19 nt, Homo sapiens
  misc_RNA (1)...(19): siRNA sense strand
ccacaaagaauguacaaca

SEQ ID NO: 2578756 - RNA, 19 nt, Homo sapiens
  misc_RNA (1)...(19): siRNA sense strand
caacagacagugagugcua

SEQ ID NO: 2578757 - RNA, 19 nt, Homo sapiens
  misc_RNA (1)...(19): siRNA sense strand
ucaugaagagcaagauaaa

SEQ ID NO: 2578758 - RNA, 19 nt, Homo sapiens
  misc_RNA (1)...(19): siRNA sense strand
agaaagaggcagaaccuau

SEQ ID NO: 2578759 - RNA, 19 nt, Homo sapiens
  misc_RNA (1)...(19): siRNA sense strand
gaucaugaagagcaagaua

SEQ ID NO: 2578760 - RNA, 19 nt, Homo sapiens
  misc_RNA (1)...(19): siRNA sense strand
caagauaaagucagaccua

SEQ ID NO: 2578761 - RNA, 19 nt, Homo sapiens
  misc_RNA (1)...(19): siRNA sense strand
gagaaggagaccacaaaga

SEQ ID NO: 2578762 - RNA, 19 nt, Homo sapiens
  misc_RNA (1)...(19): siRNA sense strand
gaggagaaggagaccacaa

SEQ ID NO: 2578763 - RNA, 19 nt, Homo sapiens
  misc_RNA (1)...(19): siRNA sense strand
gguggauauccgagacaau

SEQ ID NO: 2578764 - RNA, 19 nt, Homo sapiens
  misc_RNA (1)...(19): siRNA sense strand
gaaagaggcagaaccuaua

SEQ ID NO: 2578765 - RNA, 19 nt, Homo sapiens
  misc_RNA (1)...(19): siRNA sense strand
gucaaaaugcagaggcuaa

SEQ ID NO: 2578766 - RNA, 19 nt, Homo sapiens
  misc_RNA (1)...(19): siRNA sense strand
gaaggagaccacaaagaau

SEQ ID NO: 2578767 - RNA, 19 nt, Homo sapiens
  misc_RNA (1)...(19): siRNA sense strand
gcuaaagccuggagaaaag

SEQ ID NO: 2578768 - RNA, 19 nt, Homo sapiens
  misc_RNA (1)...(19): siRNA sense strand
gcagcuaaagccuggagaa

SEQ ID NO: 2578769 - RNA, 19 nt, Homo sapiens
  misc_RNA (1)...(19): siRNA sense strand
ggcagaaccuauaccagaa

SEQ ID NO: 2578770 - RNA, 19 nt, Homo sapiens
  misc_RNA (1)...(19): siRNA sense strand
accuaaagccaaaaggaaa

SEQ ID NO: 2578771 - RNA, 19 nt, Homo sapiens
  misc_RNA (1)...(19): siRNA sense strand
aggagaaggagaccacaaa

SEQ ID NO: 2578772 - RNA, 19 nt, Homo sapiens
  misc_RNA (1)...(19): siRNA sense strand
agagcaagauaaagucaga

SEQ ID NO: 2578773 - RNA, 19 nt, Homo sapiens
  misc_RNA (1)...(19): siRNA sense strand
aaagaagaaccaagcucua

SEQ ID NO: 2578774 - RNA, 19 nt, Homo sapiens
  misc_RNA (1)...(19): siRNA sense strand
augaagagcaagauaaagu

SEQ ID NO: 2578775 - RNA, 19 nt, Homo sapiens
  misc_RNA (1)...(19): siRNA sense strand
acagacagugagugcuaaa

SEQ ID NO: 2578776 - RNA, 19 nt, Homo sapiens
  misc_RNA (1)...(19): siRNA sense strand
ucaaagaucaugaagagca

SEQ ID NO: 2578777 - RNA, 19 nt, Homo sapiens
  misc_RNA (1)...(19): siRNA sense strand
uggaucaaacaaagaaaga

SEQ ID NO: 2578778 - RNA, 19 nt, Homo sapiens
  misc_RNA (1)...(19): siRNA sense strand
agccaaaaggaaagaagaa

SEQ ID NO: 2578779 - RNA, 19 nt, Homo sapiens
  misc_RNA (1)...(19): siRNA sense strand
agaaggagaccacaaagaa

SEQ ID NO: 2578780 - RNA, 19 nt, Homo sapiens
  misc_RNA (1)...(19): siRNA sense strand
cgagacaaucugcugggaa

SEQ ID NO: 2578781 - RNA, 19 nt, Homo sapiens
  misc_RNA (1)...(19): siRNA sense strand
aggcagaaccuauaccaga

SEQ ID NO: 2578782 - RNA, 19 nt, Homo sapiens
  misc_RNA (1)...(19): siRNA sense strand
aaagaauguacaacagaca

SEQ ID NO: 2578783 - RNA, 19 nt, Homo sapiens
  misc_RNA (1)...(19): siRNA sense strand
ggacaguuaaguuugggaa

SEQ ID NO: 2578784 - RNA, 19 nt, Homo sapiens
  misc_RNA (1)...(19): siRNA sense strand
gacaguuaaguuugggaaa

SEQ ID NO: 2578785 - RNA, 19 nt, Homo sapiens
  misc_RNA (1)...(19): siRNA sense strand
ccucagagcuaccugcgaa

SEQ ID NO: 2578786 - RNA, 19 nt, Homo sapiens
  misc_RNA (1)...(19): siRNA sense strand
guuucugggcugagcucaa

SEQ ID NO: 2578787 - RNA, 19 nt, Homo sapiens
  misc_RNA (1)...(19): siRNA sense strand
gagcaggaugucuguaaaa

SEQ ID NO: 2578788 - RNA, 19 nt, Homo sapiens
  misc_RNA (1)...(19): siRNA sense strand
gguuuggcucgguguacaa

SEQ ID NO: 2578789 - RNA, 19 nt, Homo sapiens
  misc_RNA (1)...(19): siRNA sense strand
agaacaaacuuuaagccaa

SEQ ID NO: 2578790 - RNA, 19 nt, Homo sapiens
  misc_RNA (1)...(19): siRNA sense strand
cacaaauguaguagaacaa

SEQ ID NO: 2578791 - RNA, 19 nt, Homo sapiens
  misc_RNA (1)...(19): siRNA sense strand
gaacaaacuuuaagccaac

SEQ ID NO: 2578792 - RNA, 19 nt, Homo sapiens
  misc_RNA (1)...(19): siRNA sense strand
gcagaagaauggagcugga

SEQ ID NO: 2578793 - RNA, 19 nt, Homo sapiens
  misc_RNA (1)...(19): siRNA sense strand
ccauuuaaauacaucguga

SEQ ID NO: 2578794 - RNA, 19 nt, Homo sapiens
  misc_RNA (1)...(19): siRNA sense strand
caucgugaccuguguaauu

SEQ ID NO: 2578795 - RNA, 19 nt, Homo sapiens
  misc_RNA (1)...(19): siRNA sense strand
uuguugaugaagugagcaa

SEQ ID NO: 2578796 - RNA, 19 nt, Homo sapiens
  misc_RNA (1)...(19): siRNA sense strand
acgcuuaucaacacagcaa

SEQ ID NO: 2578797 - RNA, 19 nt, Homo sapiens
  misc_RNA (1)...(19): siRNA sense strand
aaagugaaccaguggacca

SEQ ID NO: 2578798 - RNA, 19 nt, Homo sapiens
  misc_RNA (1)...(19): siRNA sense strand
agaagaauggagcuggauu

SEQ ID NO: 2578799 - RNA, 19 nt, Homo sapiens
  misc_RNA (1)...(19): siRNA sense strand
cagaagaggaagacagaau

SEQ ID NO: 2578800 - RNA, 19 nt, Homo sapiens
  misc_RNA (1)...(19): siRNA sense strand
guggaaagauggaggagca

SEQ ID NO: 2578801 - RNA, 19 nt, Homo sapiens
  misc_RNA (1)...(19): siRNA sense strand
ggaaaacaauguagggaga

SEQ ID NO: 2578802 - RNA, 19 nt, Homo sapiens
  misc_RNA (1)...(19): siRNA sense strand
ggaccaaagaagaagauca

SEQ ID NO: 2578803 - RNA, 19 nt, Homo sapiens
  misc_RNA (1)...(19): siRNA sense strand
uggaauuguugcugaguuu

SEQ ID NO: 2578804 - RNA, 19 nt, Homo sapiens
  misc_RNA (1)...(19): siRNA sense strand
ggggagaauuggaaaacaa

SEQ ID NO: 2578805 - RNA, 19 nt, Homo sapiens
  misc_RNA (1)...(19): siRNA sense strand
gugaaaacucaaaaggaaa

SEQ ID NO: 2578806 - RNA, 19 nt, Homo sapiens
  misc_RNA (1)...(19): siRNA sense strand
gaacagaugugcagugcca

SEQ ID NO: 2578807 - RNA, 19 nt, Homo sapiens
  misc_RNA (1)...(19): siRNA sense strand
aggucgaacaggaagguua

SEQ ID NO: 2578808 - RNA, 19 nt, Homo sapiens
  misc_RNA (1)...(19): siRNA sense strand
cuuagaauuugcagaaaca

SEQ ID NO: 2578809 - RNA, 19 nt, Homo sapiens
  misc_RNA (1)...(19): siRNA sense strand
aagaagaagaucagagagu

SEQ ID NO: 2578810 - RNA, 19 nt, Homo sapiens
  misc_RNA (1)...(19): siRNA sense strand
ggaaaagcgaauaaaggaa

SEQ ID NO: 2578811 - RNA, 19 nt, Homo sapiens
  misc_RNA (1)...(19): siRNA sense strand
gagaaggaaaagcgaauaa

SEQ ID NO: 2578812 - RNA, 19 nt, Homo sapiens
  misc_RNA (1)...(19): siRNA sense strand
ccucuuagaauuugcagaa

SEQ ID NO: 2578813 - RNA, 19 nt, Homo sapiens
  misc_RNA (1)...(19): siRNA sense strand
ugugaaaacucaaaaggaa

SEQ ID NO: 2578814 - RNA, 19 nt, Homo sapiens
  misc_RNA (1)...(19): siRNA sense strand
ggcagaaaucgcaaagcua

SEQ ID NO: 2578815 - RNA, 19 nt, Homo sapiens
  misc_RNA (1)...(19): siRNA sense strand
augaagacccugagaagga

SEQ ID NO: 2578816 - RNA, 19 nt, Homo sapiens
  misc_RNA (1)...(19): siRNA sense strand
ggacagaagaggaagacag

SEQ ID NO: 2578817 - RNA, 19 nt, Homo sapiens
  misc_RNA (1)...(19): siRNA sense strand
uguagggagagguggcaua

SEQ ID NO: 2578818 - RNA, 19 nt, Homo sapiens
  misc_RNA (1)...(19): siRNA sense strand
ggucgaacaggaagguuau

SEQ ID NO: 2578819 - RNA, 19 nt, Homo sapiens
  misc_RNA (1)...(19): siRNA sense strand
ucuuaaacacuuccaguaa

SEQ ID NO: 2578820 - RNA, 19 nt, Homo sapiens
  misc_RNA (1)...(19): siRNA sense strand
ccgcagccauucagagaca

SEQ ID NO: 2578821 - RNA, 19 nt, Homo sapiens
  misc_RNA (1)...(19): siRNA sense strand
ccuaaugucaaccgagaau

SEQ ID NO: 2578822 - RNA, 19 nt, Homo sapiens
  misc_RNA (1)...(19): siRNA sense strand
ggaugugaucaaacaggaa

SEQ ID NO: 2578823 - RNA, 19 nt, Homo sapiens
  misc_RNA (1)...(19): siRNA sense strand
ucagagagugauagagcuu

SEQ ID NO: 2578824 - RNA, 19 nt, Homo sapiens
  misc_RNA (1)...(19): siRNA sense strand
aucaagaaccacuggaauu

SEQ ID NO: 2578825 - RNA, 19 nt, Homo sapiens
  misc_RNA (1)...(19): siRNA sense strand
agaaugagcuaaaaggaca

SEQ ID NO: 2578826 - RNA, 19 nt, Homo sapiens
  misc_RNA (1)...(19): siRNA sense strand
ggaaucuccaacugauaaa

SEQ ID NO: 2578827 - RNA, 19 nt, Homo sapiens
  misc_RNA (1)...(19): siRNA sense strand
uggcagaugcaccgaauau

SEQ ID NO: 2578828 - RNA, 19 nt, Homo sapiens
  misc_RNA (1)...(19): siRNA sense strand
ggacccgggaagaggauga

SEQ ID NO: 2578829 - RNA, 19 nt, Homo sapiens
  misc_RNA (1)...(19): siRNA sense strand
aucagaagaugaagacaau

SEQ ID NO: 2578830 - RNA, 19 nt, Homo sapiens
  misc_RNA (1)...(19): siRNA sense strand
cagaagaugaagacaaugu

SEQ ID NO: 2578831 - RNA, 19 nt, Homo sapiens
  misc_RNA (1)...(19): siRNA sense strand
cugagaaggaaaagcgaau

SEQ ID NO: 2578832 - RNA, 19 nt, Homo sapiens
  misc_RNA (1)...(19): siRNA sense strand
acgaggaugaugaggacuu

SEQ ID NO: 2578833 - RNA, 19 nt, Homo sapiens
  misc_RNA (1)...(19): siRNA sense strand
ggaacagaugggcagaaau

SEQ ID NO: 2578834 - RNA, 19 nt, Homo sapiens
  misc_RNA (1)...(19): siRNA sense strand
aaaucaaacaagaggugga

SEQ ID NO: 2578835 - RNA, 19 nt, Homo sapiens
  misc_RNA (1)...(19): siRNA sense strand
ggucaaucuuagaaagcuc

SEQ ID NO: 2578836 - RNA, 19 nt, Homo sapiens
  misc_RNA (1)...(19): siRNA sense strand
ucaaacaagagguggaauc

SEQ ID NO: 2578837 - RNA, 19 nt, Homo sapiens
  misc_RNA (1)...(19): siRNA sense strand
agaaaguacuaaacccuga

SEQ ID NO: 2578838 - RNA, 19 nt, Homo sapiens
  misc_RNA (1)...(19): siRNA sense strand
uggauaauguuaagaaccu

SEQ ID NO: 2578839 - RNA, 19 nt, Homo sapiens
  misc_RNA (1)...(19): siRNA sense strand
gguggaacagaauggaaca

SEQ ID NO: 2578840 - RNA, 19 nt, Homo sapiens
  misc_RNA (1)...(19): siRNA sense strand
agaagcugguggaacagaa

SEQ ID NO: 2578841 - RNA, 19 nt, Homo sapiens
  misc_RNA (1)...(19): siRNA sense strand
acuggaaaguuauugccaa

SEQ ID NO: 2578842 - RNA, 19 nt, Homo sapiens
  misc_RNA (1)...(19): siRNA sense strand
ccuggacagaagaggaaga

SEQ ID NO: 2578843 - RNA, 19 nt, Homo sapiens
  misc_RNA (1)...(19): siRNA sense strand
cuauaaugaugaagacccu

SEQ ID NO: 2578844 - RNA, 19 nt, Homo sapiens
  misc_RNA (1)...(19): siRNA sense strand
ucggaaggucgaacaggaa

SEQ ID NO: 2578845 - RNA, 19 nt, Homo sapiens
  misc_RNA (1)...(19): siRNA sense strand
cauagagaccagacuguga

SEQ ID NO: 2578846 - RNA, 19 nt, Homo sapiens
  misc_RNA (1)...(19): siRNA sense strand
ugaugaagacccugagaag

SEQ ID NO: 2578847 - RNA, 19 nt, Homo sapiens
  misc_RNA (1)...(19): siRNA sense strand
acagcuaccuggagcgcaa

SEQ ID NO: 2578848 - RNA, 19 nt, Homo sapiens
  misc_RNA (1)...(19): siRNA sense strand
uggagagagcggugaguga

SEQ ID NO: 2578849 - RNA, 19 nt, Homo sapiens
  misc_RNA (1)...(19): siRNA sense strand
cggaauacuuacaugaacu

SEQ ID NO: 2578850 - RNA, 19 nt, Homo sapiens
  misc_RNA (1)...(19): siRNA sense strand
augaagagauugugagccu

SEQ ID NO: 2578851 - RNA, 19 nt, Homo sapiens
  misc_RNA (1)...(19): siRNA sense strand
augauaaggaagaugaaga

SEQ ID NO: 2578852 - RNA, 19 nt, Homo sapiens
  misc_RNA (1)...(19): siRNA sense strand
aaguaaugauccuagucaa

SEQ ID NO: 2578853 - RNA, 19 nt, Homo sapiens
  misc_RNA (1)...(19): siRNA sense strand
gagaaaaggcagcucgaau

SEQ ID NO: 2578854 - RNA, 19 nt, Homo sapiens
  misc_RNA (1)...(19): siRNA sense strand
aggaagaugaagagauugu

SEQ ID NO: 2578855 - RNA, 19 nt, Homo sapiens
  misc_RNA (1)...(19): siRNA sense strand
cggaagccgaggagaggau

SEQ ID NO: 2578856 - RNA, 19 nt, Homo sapiens
  misc_RNA (1)...(19): siRNA sense strand
cggcaauugcagaaaagaa

SEQ ID NO: 2578857 - RNA, 19 nt, Homo sapiens
  misc_RNA (1)...(19): siRNA sense strand
caagcgacuccgaggguga

SEQ ID NO: 2578858 - RNA, 19 nt, Homo sapiens
  misc_RNA (1)...(19): siRNA sense strand
gcagaaaagaauugaguac

SEQ ID NO: 2578859 - RNA, 19 nt, Homo sapiens
  misc_RNA (1)...(19): siRNA sense strand
acuccgagggugaagaaau

SEQ ID NO: 2578860 - RNA, 19 nt, Homo sapiens
  misc_RNA (1)...(19): siRNA sense strand
ugacaguaaagaagaggca

SEQ ID NO: 2578861 - RNA, 19 nt, Homo sapiens
  misc_RNA (1)...(19): siRNA sense strand
ggggaaaggaugauaagga

SEQ ID NO: 2578862 - RNA, 19 nt, Homo sapiens
  misc_RNA (1)...(19): siRNA sense strand
acaguaaagaagaggcagu

SEQ ID NO: 2578863 - RNA, 19 nt, Homo sapiens
  misc_RNA (1)...(19): siRNA sense strand
ggaaaggaugauaaggaag

SEQ ID NO: 2578864 - RNA, 19 nt, Homo sapiens
  misc_RNA (1)...(19): siRNA sense strand
gagaggauggcuacggaga

SEQ ID NO: 2578865 - RNA, 19 nt, Homo sapiens
  misc_RNA (1)...(19): siRNA sense strand
auaaggaagaugaagagau

SEQ ID NO: 2578866 - RNA, 19 nt, Homo sapiens
  misc_RNA (1)...(19): siRNA sense strand
gugaagaaaucgacgugac

SEQ ID NO: 2578867 - RNA, 19 nt, Homo sapiens
  misc_RNA (1)...(19): siRNA sense strand
aagaaaucgacgugacagu

SEQ ID NO: 2578868 - RNA, 19 nt, Homo sapiens
  misc_RNA (1)...(19): siRNA sense strand
ggacacaaauguagagcga

SEQ ID NO: 2578869 - RNA, 19 nt, Homo sapiens
  misc_RNA (1)...(19): siRNA sense strand
ccgaauggaaagagauaga

SEQ ID NO: 2578870 - RNA, 19 nt, Homo sapiens
  misc_RNA (1)...(19): siRNA sense strand
acacaaauguagagcgaag

SEQ ID NO: 2578871 - RNA, 19 nt, Homo sapiens
  misc_RNA (1)...(19): siRNA sense strand
cugaaauacauccaggaaa

SEQ ID NO: 2578872 - RNA, 19 nt, Homo sapiens
  misc_RNA (1)...(19): siRNA sense strand
auguacagcauuagugaaa

SEQ ID NO: 2578873 - RNA, 19 nt, Homo sapiens
  misc_RNA (1)...(19): siRNA sense strand
cugccaagcaccaggauau

SEQ ID NO: 2578874 - RNA, 19 nt, Homo sapiens
  misc_RNA (1)...(19): siRNA sense strand
gggcugagcuucacgacca

SEQ ID NO: 2578875 - RNA, 19 nt, Homo sapiens
  misc_RNA (1)...(19): siRNA sense strand
ccaggaaagacauggagau

SEQ ID NO: 2578876 - RNA, 19 nt, Homo sapiens
  misc_RNA (1)...(19): siRNA sense strand
gcgaagagcccuuggagag

SEQ ID NO: 2578877 - RNA, 19 nt, Homo sapiens
  misc_RNA (1)...(19): siRNA sense strand
ggaaagagauagaaggcgc

SEQ ID NO: 2578878 - RNA, 19 nt, Homo sapiens
  misc_RNA (1)...(19): siRNA sense strand
aaccgaauggaaagagaua

SEQ ID NO: 2578879 - RNA, 19 nt, Homo sapiens
  misc_RNA (1)...(19): siRNA sense strand
agaugacggagguggagua

SEQ ID NO: 2578880 - RNA, 19 nt, Homo sapiens
  misc_RNA (1)...(19): siRNA sense strand
acguuagguaguagaaaca

SEQ ID NO: 2578881 - RNA, 19 nt, Homo sapiens
  misc_RNA (1)...(19): siRNA sense strand
gcaagaaauugaauccacu

SEQ ID NO: 2578882 - RNA, 19 nt, Homo sapiens
  misc_RNA (1)...(19): siRNA sense strand
agggagaggcauaaccgaa

SEQ ID NO: 2578883 - RNA, 19 nt, Homo sapiens
  misc_RNA (1)...(19): siRNA sense strand
cggaguccucacaggcaaa

SEQ ID NO: 2578884 - RNA, 19 nt, Homo sapiens
  misc_RNA (1)...(19): siRNA sense strand
aaacaagcacugaagagga

SEQ ID NO: 2578885 - RNA, 19 nt, Homo sapiens
  misc_RNA (1)...(19): siRNA sense strand
ggacaaauuuaaugaggca

SEQ ID NO: 2578886 - RNA, 19 nt, Homo sapiens
  misc_RNA (1)...(19): siRNA sense strand
uggaagaguugaaggccaa

SEQ ID NO: 2578887 - RNA, 19 nt, Homo sapiens
  misc_RNA (1)...(19): siRNA sense strand
aggaaagacccaaguggaa

SEQ ID NO: 2578888 - RNA, 19 nt, Homo sapiens
  misc_RNA (1)...(19): siRNA sense strand
ggaagaagcugaagaggag

SEQ ID NO: 2578889 - RNA, 19 nt, Homo sapiens
  misc_RNA (1)...(19): siRNA sense strand
ugcaaaaggagguggaaaa

SEQ ID NO: 2578890 - RNA, 19 nt, Homo sapiens
  misc_RNA (1)...(19): siRNA sense strand
cuuacaagaccguggaaga

SEQ ID NO: 2578891 - RNA, 19 nt, Homo sapiens
  misc_RNA (1)...(19): siRNA sense strand
agaccaaggcugaggagca

SEQ ID NO: 2578892 - RNA, 19 nt, Homo sapiens
  misc_RNA (1)...(19): siRNA sense strand
aggaagaagcugaagagga

SEQ ID NO: 2578893 - RNA, 19 nt, Homo sapiens
  misc_RNA (1)...(19): siRNA sense strand
guggaagaguugaaggcca

SEQ ID NO: 2578894 - RNA, 19 nt, Homo sapiens
  misc_RNA (1)...(19): siRNA sense strand
cugcagagccugaucgaca

SEQ ID NO: 2578895 - RNA, 19 nt, Homo sapiens
  misc_RNA (1)...(19): siRNA sense strand
gagcugagccaguggagga

SEQ ID NO: 2578896 - RNA, 19 nt, Homo sapiens
  misc_RNA (1)...(19): siRNA sense strand
gcccaaauuaugaggagau

SEQ ID NO: 2578897 - RNA, 19 nt, Homo sapiens
  misc_RNA (1)...(19): siRNA sense strand
gggagaacuuugagaucac

SEQ ID NO: 2578898 - RNA, 19 nt, Homo sapiens
  misc_RNA (1)...(19): siRNA sense strand
ccagaaagguuuugcagga

SEQ ID NO: 2578899 - RNA, 19 nt, Homo sapiens
  misc_RNA (1)...(19): siRNA sense strand
ggaagcgacacgaagggaa

SEQ ID NO: 2578900 - RNA, 19 nt, Homo sapiens
  misc_RNA (1)...(19): siRNA sense strand
ugcccgagcuggagcacaa

SEQ ID NO: 2578901 - RNA, 19 nt, Homo sapiens
  misc_RNA (1)...(19): siRNA sense strand
gaagcaagaagaagcccaa

SEQ ID NO: 2578902 - RNA, 19 nt, Homo sapiens
  misc_RNA (1)...(19): siRNA sense strand
gaugaugacgagcgggaga

SEQ ID NO: 2578903 - RNA, 19 nt, Homo sapiens
  misc_RNA (1)...(19): siRNA sense strand
ugguugacucagaggaaga

SEQ ID NO: 2578904 - RNA, 19 nt, Homo sapiens
  misc_RNA (1)...(19): siRNA sense strand
aggauuagcaagaagcuca

SEQ ID NO: 2578905 - RNA, 19 nt, Homo sapiens
  misc_RNA (1)...(19): siRNA sense strand
aagucaaggucauagacau

SEQ ID NO: 2578906 - RNA, 19 nt, Homo sapiens
  misc_RNA (1)...(19): siRNA sense strand
gaugcauucuauuggguga

SEQ ID NO: 2578907 - RNA, 19 nt, Homo sapiens
  misc_RNA (1)...(19): siRNA sense strand
acgaagagaaaccuguuaa

SEQ ID NO: 2578908 - RNA, 19 nt, Homo sapiens
  misc_RNA (1)...(19): siRNA sense strand
cuguuaagcaggacgacuu

SEQ ID NO: 2578909 - RNA, 19 nt, Homo sapiens
  misc_RNA (1)...(19): siRNA sense strand
gaaaagccuccuagagaau

SEQ ID NO: 2578910 - RNA, 19 nt, Homo sapiens
  misc_RNA (1)...(19): siRNA sense strand
ggcgggaggcugagaacau

SEQ ID NO: 2578911 - RNA, 19 nt, Homo sapiens
  misc_RNA (1)...(19): siRNA sense strand
cggaggaggcagaguugga

SEQ ID NO: 2578912 - RNA, 19 nt, Homo sapiens
  misc_RNA (1)...(19): siRNA sense strand
uugaagccaagcagagaaa

SEQ ID NO: 2578913 - RNA, 19 nt, Homo sapiens
  misc_RNA (1)...(19): siRNA sense strand
cagaaggagcugagccagu

SEQ ID NO: 2578914 - RNA, 19 nt, Homo sapiens
  misc_RNA (1)...(19): siRNA sense strand
cuacaguaugagcgggaca

SEQ ID NO: 2578915 - RNA, 19 nt, Homo sapiens
  misc_RNA (1)...(19): siRNA sense strand
gugcugugcucuuggcuca

SEQ ID NO: 2578916 - RNA, 19 nt, Homo sapiens
  misc_RNA (1)...(19): siRNA sense strand
gguuggaagucgauguucu

SEQ ID NO: 2578917 - RNA, 19 nt, Homo sapiens
  misc_RNA (1)...(19): siRNA sense strand
ccaugaacuuuaaggaccu

SEQ ID NO: 2578918 - RNA, 19 nt, Homo sapiens
  misc_RNA (1)...(19): siRNA sense strand
gaggaaagacccaagugga

SEQ ID NO: 2578919 - RNA, 19 nt, Homo sapiens
  misc_RNA (1)...(19): siRNA sense strand
uagauaacauacuggacca

SEQ ID NO: 2578920 - RNA, 19 nt, Homo sapiens
  misc_RNA (1)...(19): siRNA sense strand
caguaacagcccaaauuau

SEQ ID NO: 2578921 - RNA, 19 nt, Homo sapiens
  misc_RNA (1)...(19): siRNA sense strand
augacgagcgggagaacuu

SEQ ID NO: 2578922 - RNA, 19 nt, Homo sapiens
  misc_RNA (1)...(19): siRNA sense strand
cagaggaagaagcugaaga

SEQ ID NO: 2578923 - RNA, 19 nt, Homo sapiens
  misc_RNA (1)...(19): siRNA sense strand
agaucagccacaagcacaa

SEQ ID NO: 2578924 - RNA, 19 nt, Homo sapiens
  misc_RNA (1)...(19): siRNA sense strand
uggaagauucugaugacga

SEQ ID NO: 2578925 - RNA, 19 nt, Homo sapiens
  misc_RNA (1)...(19): siRNA sense strand
aagaagaagcccaaauacu

SEQ ID NO: 2578926 - RNA, 19 nt, Homo sapiens
  misc_RNA (1)...(19): siRNA sense strand
ucauugagaccaaggcuga

SEQ ID NO: 2578927 - RNA, 19 nt, Homo sapiens
  misc_RNA (1)...(19): siRNA sense strand
gcucaguaacagcccaaau

SEQ ID NO: 2578928 - RNA, 19 nt, Homo sapiens
  misc_RNA (1)...(19): siRNA sense strand
uggagaaguuugaggcaga

SEQ ID NO: 2578929 - RNA, 19 nt, Homo sapiens
  misc_RNA (1)...(19): siRNA sense strand
cgggagaaccucagagaac

SEQ ID NO: 2578930 - RNA, 19 nt, Homo sapiens
  misc_RNA (1)...(19): siRNA sense strand
gcuacgugcuguaugggaa

SEQ ID NO: 2578931 - RNA, 19 nt, Homo sapiens
  misc_RNA (1)...(19): siRNA sense strand
ccuuugacuauguggacaa

SEQ ID NO: 2578932 - RNA, 19 nt, Homo sapiens
  misc_RNA (1)...(19): siRNA sense strand
cuuccaacguccugggcau

SEQ ID NO: 2578933 - RNA, 19 nt, Homo sapiens
  misc_RNA (1)...(19): siRNA sense strand
cggaauucacagaagaguu

SEQ ID NO: 2578934 - RNA, 19 nt, Homo sapiens
  misc_RNA (1)...(19): siRNA sense strand
ggacgaagguguuggggcu

SEQ ID NO: 2578935 - RNA, 19 nt, Homo sapiens
  misc_RNA (1)...(19): siRNA sense strand
gggccaacgcauaucaaca

SEQ ID NO: 2578936 - RNA, 19 nt, Homo sapiens
  misc_RNA (1)...(19): siRNA sense strand
cuguggagccugaucgcua

SEQ ID NO: 2578937 - RNA, 19 nt, Homo sapiens
  misc_RNA (1)...(19): siRNA sense strand
agcccaacgucguggacau

SEQ ID NO: 2578938 - RNA, 19 nt, Homo sapiens
  misc_RNA (1)...(19): siRNA sense strand
gggaugaggaccuggugca

SEQ ID NO: 2578939 - RNA, 19 nt, Homo sapiens
  misc_RNA (1)...(19): siRNA sense strand
gaagaagacuuuaaggagc

SEQ ID NO: 2578940 - RNA, 19 nt, Homo sapiens
  misc_RNA (1)...(19): siRNA sense strand
aagaagacuuuaaggagcu

SEQ ID NO: 2578941 - RNA, 19 nt, Homo sapiens
  misc_RNA (1)...(19): siRNA sense strand
gcucauuggcuccacggaa

SEQ ID NO: 2578942 - RNA, 19 nt, Homo sapiens
  misc_RNA (1)...(19): siRNA sense strand
accuaugaccggagcaaga

SEQ ID NO: 2578943 - RNA, 19 nt, Homo sapiens
  misc_RNA (1)...(19): siRNA sense strand
ccaugaaggaagagaagaa

SEQ ID NO: 2578944 - RNA, 19 nt, Homo sapiens
  misc_RNA (1)...(19): siRNA sense strand
aggaagaagaggaggaaga

SEQ ID NO: 2578945 - RNA, 19 nt, Homo sapiens
  misc_RNA (1)...(19): siRNA sense strand
agaaagaggaagaagaaaa

SEQ ID NO: 2578946 - RNA, 19 nt, Homo sapiens
  misc_RNA (1)...(19): siRNA sense strand
agguagagcaggagaccaa

SEQ ID NO: 2578947 - RNA, 19 nt, Homo sapiens
  misc_RNA (1)...(19): siRNA sense strand
gggaaaaggaggaagaaga

SEQ ID NO: 2578948 - RNA, 19 nt, Homo sapiens
  misc_RNA (1)...(19): siRNA sense strand
aggagaaagagaaggagaa

SEQ ID NO: 2578949 - RNA, 19 nt, Homo sapiens
  misc_RNA (1)...(19): siRNA sense strand
gaggaugagaagucagaaa

SEQ ID NO: 2578950 - RNA, 19 nt, Homo sapiens
  misc_RNA (1)...(19): siRNA sense strand
gugaacagaaagaggaaga

SEQ ID NO: 2578951 - RNA, 19 nt, Homo sapiens
  misc_RNA (1)...(19): siRNA sense strand
acauagagaaggugcacua

SEQ ID NO: 2578952 - RNA, 19 nt, Homo sapiens
  misc_RNA (1)...(19): siRNA sense strand
ccaaaguggaggaugagaa

SEQ ID NO: 2578953 - RNA, 19 nt, Homo sapiens
  misc_RNA (1)...(19): siRNA sense strand
ugauaaaagugaggagaaa

SEQ ID NO: 2578954 - RNA, 19 nt, Homo sapiens
  misc_RNA (1)...(19): siRNA sense strand
aggaagagaagguagagaa

SEQ ID NO: 2578955 - RNA, 19 nt, Homo sapiens
  misc_RNA (1)...(19): siRNA sense strand
gcuuaagguccaacacaaa

SEQ ID NO: 2578956 - RNA, 19 nt, Homo sapiens
  misc_RNA (1)...(19): siRNA sense strand
aagaagaaggccaggaaga

SEQ ID NO: 2578957 - RNA, 19 nt, Homo sapiens
  misc_RNA (1)...(19): siRNA sense strand
aggaggagcugguggcaga

SEQ ID NO: 2578958 - RNA, 19 nt, Homo sapiens
  misc_RNA (1)...(19): siRNA sense strand
agaagaaguagcugccaaa

SEQ ID NO: 2578959 - RNA, 19 nt, Homo sapiens
  misc_RNA (1)...(19): siRNA sense strand
ccaaggaagagaagguaga

SEQ ID NO: 2578960 - RNA, 19 nt, Homo sapiens
  misc_RNA (1)...(19): siRNA sense strand
cggaccaccuggaggaaga

SEQ ID NO: 2578961 - RNA, 19 nt, Homo sapiens
  misc_RNA (1)...(19): siRNA sense strand
cgaggagaucauagaggaa

SEQ ID NO: 2578962 - RNA, 19 nt, Homo sapiens
  misc_RNA (1)...(19): siRNA sense strand
aggaugugccagagaagaa

SEQ ID NO: 2578963 - RNA, 19 nt, Homo sapiens
  misc_RNA (1)...(19): siRNA sense strand
caccaguggaagaggcaaa

SEQ ID NO: 2578964 - RNA, 19 nt, Homo sapiens
  misc_RNA (1)...(19): siRNA sense strand
agaccaaagaagaggggaa

SEQ ID NO: 2578965 - RNA, 19 nt, Homo sapiens
  misc_RNA (1)...(19): siRNA sense strand
cagcagaagaaaaggaaga

SEQ ID NO: 2578966 - RNA, 19 nt, Homo sapiens
  misc_RNA (1)...(19): siRNA sense strand
aagaagaaguagcugccaa

SEQ ID NO: 2578967 - RNA, 19 nt, Homo sapiens
  misc_RNA (1)...(19): siRNA sense strand
aggaagaaggagaaacaga

SEQ ID NO: 2578968 - RNA, 19 nt, Homo sapiens
  misc_RNA (1)...(19): siRNA sense strand
agaccaagccgaagaggga

SEQ ID NO: 2578969 - RNA, 19 nt, Homo sapiens
  misc_RNA (1)...(19): siRNA sense strand
gggaggagagggaggaagu

SEQ ID NO: 2578970 - RNA, 19 nt, Homo sapiens
  misc_RNA (1)...(19): siRNA sense strand
aggagaaacagaagcugaa

SEQ ID NO: 2578971 - RNA, 19 nt, Homo sapiens
  misc_RNA (1)...(19): siRNA sense strand
aggaggaagcuguggcaga

SEQ ID NO: 2578972 - RNA, 19 nt, Homo sapiens
  misc_RNA (1)...(19): siRNA sense strand
gugggagggaagaggagaa

SEQ ID NO: 2578973 - RNA, 19 nt, Homo sapiens
  misc_RNA (1)...(19): siRNA sense strand
acaucacgguggagcgcaa

SEQ ID NO: 2578974 - RNA, 19 nt, Homo sapiens
  misc_RNA (1)...(19): siRNA sense strand
ugaaguuaaagaagaggaa

SEQ ID NO: 2578975 - RNA, 19 nt, Homo sapiens
  misc_RNA (1)...(19): siRNA sense strand
caggagaaagagaaggaga

SEQ ID NO: 2578976 - RNA, 19 nt, Homo sapiens
  misc_RNA (1)...(19): siRNA sense strand
ggagaaagcgggaggagag

SEQ ID NO: 2578977 - RNA, 19 nt, Homo sapiens
  misc_RNA (1)...(19): siRNA sense strand
gugauaaaagugaggagaa

SEQ ID NO: 2578978 - RNA, 19 nt, Homo sapiens
  misc_RNA (1)...(19): siRNA sense strand
caguggaagagaaaggcaa

SEQ ID NO: 2578979 - RNA, 19 nt, Homo sapiens
  misc_RNA (1)...(19): siRNA sense strand
caguggaagagaaaggcaa

SEQ ID NO: 2578980 - RNA, 19 nt, Homo sapiens
  misc_RNA (1)...(19): siRNA sense strand
caguggaagagaaaggcaa

SEQ ID NO: 2578981 - RNA, 19 nt, Homo sapiens
  misc_RNA (1)...(19): siRNA sense strand
caguggaagagaaaggcaa

SEQ ID NO: 2578982 - RNA, 19 nt, Homo sapiens
  misc_RNA (1)...(19): siRNA sense strand
ggagcaaccacgaggagga

SEQ ID NO: 2578983 - RNA, 19 nt, Homo sapiens
  misc_RNA (1)...(19): siRNA sense strand
ggaggaaaagagugaggaa

SEQ ID NO: 2578984 - RNA, 19 nt, Homo sapiens
  misc_RNA (1)...(19): siRNA sense strand
ugauaaaggugccaaggga

SEQ ID NO: 2578985 - RNA, 19 nt, Homo sapiens
  misc_RNA (1)...(19): siRNA sense strand
aagaggagguagagcagga

SEQ ID NO: 2578986 - RNA, 19 nt, Homo sapiens
  misc_RNA (1)...(19): siRNA sense strand
ugaccaaaacgguagaaaa

SEQ ID NO: 2578987 - RNA, 19 nt, Homo sapiens
  misc_RNA (1)...(19): siRNA sense strand
ggaggaagaagaugaggga

SEQ ID NO: 2578988 - RNA, 19 nt, Homo sapiens
  misc_RNA (1)...(19): siRNA sense strand
ccaaaucgguaaaggugca

SEQ ID NO: 2578989 - RNA, 19 nt, Homo sapiens
  misc_RNA (1)...(19): siRNA sense strand
gggaagaggagaaaggcgu

SEQ ID NO: 2578990 - RNA, 19 nt, Homo sapiens
  misc_RNA (1)...(19): siRNA sense strand
cagccauuacagaggaauu

SEQ ID NO: 2578991 - RNA, 19 nt, Homo sapiens
  misc_RNA (1)...(19): siRNA sense strand
gagcaggaagaaggagaaa

SEQ ID NO: 2578992 - RNA, 19 nt, Homo sapiens
  misc_RNA (1)...(19): siRNA sense strand
agaagaaaaggaagaggaa

SEQ ID NO: 2578993 - RNA, 19 nt, Homo sapiens
  misc_RNA (1)...(19): siRNA sense strand
aagaagaggaaggggaaaa

SEQ ID NO: 2578994 - RNA, 19 nt, Homo sapiens
  misc_RNA (1)...(19): siRNA sense strand
aggaaggugagcaggaaga

SEQ ID NO: 2578995 - RNA, 19 nt, Homo sapiens
  misc_RNA (1)...(19): siRNA sense strand
agagaaaggccuugggaaa

SEQ ID NO: 2578996 - RNA, 19 nt, Homo sapiens
  misc_RNA (1)...(19): siRNA sense strand
aaacauaagaggaggccaa

SEQ ID NO: 2578997 - RNA, 19 nt, Homo sapiens
  misc_RNA (1)...(19): siRNA sense strand
acuuagauccagugggaaa

SEQ ID NO: 2578998 - RNA, 19 nt, Homo sapiens
  misc_RNA (1)...(19): siRNA sense strand
gugagaaaguauagcgaga

SEQ ID NO: 2578999 - RNA, 19 nt, Homo sapiens
  misc_RNA (1)...(19): siRNA sense strand
uggaaaagguggagaauca

SEQ ID NO: 2579000 - RNA, 19 nt, Homo sapiens
  misc_RNA (1)...(19): siRNA sense strand
ugauaauggugcuuggaaa

SEQ ID NO: 2579001 - RNA, 19 nt, Homo sapiens
  misc_RNA (1)...(19): siRNA sense strand
ucagaagagccaaggaaua

SEQ ID NO: 2579002 - RNA, 19 nt, Homo sapiens
  misc_RNA (1)...(19): siRNA sense strand
agagaaauugaaagggaaa

SEQ ID NO: 2579003 - RNA, 19 nt, Homo sapiens
  misc_RNA (1)...(19): siRNA sense strand
ggaagaaggagguggcuga

SEQ ID NO: 2579004 - RNA, 19 nt, Homo sapiens
  misc_RNA (1)...(19): siRNA sense strand
cagugaagguaauggaaaa

SEQ ID NO: 2579005 - RNA, 19 nt, Homo sapiens
  misc_RNA (1)...(19): siRNA sense strand
augaaauccucuugugaua

SEQ ID NO: 2579006 - RNA, 19 nt, Homo sapiens
  misc_RNA (1)...(19): siRNA sense strand
gugaagaggaggaggagga

SEQ ID NO: 2579007 - RNA, 19 nt, Homo sapiens
  misc_RNA (1)...(19): siRNA sense strand
gaaucagagguuagugaaa

SEQ ID NO: 2579008 - RNA, 19 nt, Homo sapiens
  misc_RNA (1)...(19): siRNA sense strand
gauaauggugcuuggaaau

SEQ ID NO: 2579009 - RNA, 19 nt, Homo sapiens
  misc_RNA (1)...(19): siRNA sense strand
aaaguaaaguguuggguga

SEQ ID NO: 2579010 - RNA, 19 nt, Homo sapiens
  misc_RNA (1)...(19): siRNA sense strand
caaacaaagaagagaagga

SEQ ID NO: 2579011 - RNA, 19 nt, Homo sapiens
  misc_RNA (1)...(19): siRNA sense strand
aggaggagauugaugacaa

SEQ ID NO: 2579012 - RNA, 19 nt, Homo sapiens
  misc_RNA (1)...(19): siRNA sense strand
agugauagaaguucagaaa

SEQ ID NO: 2579013 - RNA, 19 nt, Homo sapiens
  misc_RNA (1)...(19): siRNA sense strand
aagagaaauugaaagggaa

SEQ ID NO: 2579014 - RNA, 19 nt, Homo sapiens
  misc_RNA (1)...(19): siRNA sense strand
auggaagccuggacagaaa

SEQ ID NO: 2579015 - RNA, 19 nt, Homo sapiens
  misc_RNA (1)...(19): siRNA sense strand
aauggcaaaucgagggaaa

SEQ ID NO: 2579016 - RNA, 19 nt, Homo sapiens
  misc_RNA (1)...(19): siRNA sense strand
gcagcauguccgaaaguaa

SEQ ID NO: 2579017 - RNA, 19 nt, Homo sapiens
  misc_RNA (1)...(19): siRNA sense strand
aaaucaagacacagaacaa

SEQ ID NO: 2579018 - RNA, 19 nt, Homo sapiens
  misc_RNA (1)...(19): siRNA sense strand
gcagagauuaagagcauau

SEQ ID NO: 2579019 - RNA, 19 nt, Homo sapiens
  misc_RNA (1)...(19): siRNA sense strand
cagucuuauucuagaggaa

SEQ ID NO: 2579020 - RNA, 19 nt, Homo sapiens
  misc_RNA (1)...(19): siRNA sense strand
aguuauugacuguggagua

SEQ ID NO: 2579021 - RNA, 19 nt, Homo sapiens
  misc_RNA (1)...(19): siRNA sense strand
aagcagggccaaauggaaa

SEQ ID NO: 2579022 - RNA, 19 nt, Homo sapiens
  misc_RNA (1)...(19): siRNA sense strand
gagagaagcagaaggagga

SEQ ID NO: 2579023 - RNA, 19 nt, Homo sapiens
  misc_RNA (1)...(19): siRNA sense strand
ggucuucaugugugagaaa

SEQ ID NO: 2579024 - RNA, 19 nt, Homo sapiens
  misc_RNA (1)...(19): siRNA sense strand
gcuucucaguuaagugaaa

SEQ ID NO: 2579025 - RNA, 19 nt, Homo sapiens
  misc_RNA (1)...(19): siRNA sense strand
ggcuagugcuggagaaagu

SEQ ID NO: 2579026 - RNA, 19 nt, Homo sapiens
  misc_RNA (1)...(19): siRNA sense strand
cagcauguccgaaaguaaa

SEQ ID NO: 2579027 - RNA, 19 nt, Homo sapiens
  misc_RNA (1)...(19): siRNA sense strand
aggaggaggaggagauuga

SEQ ID NO: 2579028 - RNA, 19 nt, Homo sapiens
  misc_RNA (1)...(19): siRNA sense strand
ucaccaaggucaaggagca

SEQ ID NO: 2579029 - RNA, 19 nt, Homo sapiens
  misc_RNA (1)...(19): siRNA sense strand
guaaauaugucaaagguag

SEQ ID NO: 2579030 - RNA, 19 nt, Homo sapiens
  misc_RNA (1)...(19): siRNA sense strand
cugacaaggaagaagguga

SEQ ID NO: 2579031 - RNA, 19 nt, Homo sapiens
  misc_RNA (1)...(19): siRNA sense strand
ggucaaaggaaaaucuuaa

SEQ ID NO: 2579032 - RNA, 19 nt, Homo sapiens
  misc_RNA (1)...(19): siRNA sense strand
aaagagaaauugaaaggga

SEQ ID NO: 2579033 - RNA, 19 nt, Homo sapiens
  misc_RNA (1)...(19): siRNA sense strand
aggcuugagaauagaaauu

SEQ ID NO: 2579034 - RNA, 19 nt, Homo sapiens
  misc_RNA (1)...(19): siRNA sense strand
acagaaccuuuaagagcaa

SEQ ID NO: 2579035 - RNA, 19 nt, Homo sapiens
  misc_RNA (1)...(19): siRNA sense strand
gagaaaggccuugggaaaa

SEQ ID NO: 2579036 - RNA, 19 nt, Homo sapiens
  misc_RNA (1)...(19): siRNA sense strand
gaugauggaaggcgagcua

SEQ ID NO: 2579037 - RNA, 19 nt, Homo sapiens
  misc_RNA (1)...(19): siRNA sense strand
ugaugaaguaagaaagaca

SEQ ID NO: 2579038 - RNA, 19 nt, Homo sapiens
  misc_RNA (1)...(19): siRNA sense strand
cagcagaggccgaaccaga

SEQ ID NO: 2579039 - RNA, 19 nt, Homo sapiens
  misc_RNA (1)...(19): siRNA sense strand
acaaagaagagaaggauuc

SEQ ID NO: 2579040 - RNA, 19 nt, Homo sapiens
  misc_RNA (1)...(19): siRNA sense strand
agucaaauucagaacgaga

SEQ ID NO: 2579041 - RNA, 19 nt, Homo sapiens
  misc_RNA (1)...(19): siRNA sense strand
cgcuuaaaccguagaccaa

SEQ ID NO: 2579042 - RNA, 19 nt, Homo sapiens
  misc_RNA (1)...(19): siRNA sense strand
caucaaaaucaccaagaaa

SEQ ID NO: 2579043 - RNA, 19 nt, Homo sapiens
  misc_RNA (1)...(19): siRNA sense strand
ggagaaaguaccgggaaga

SEQ ID NO: 2579044 - RNA, 19 nt, Homo sapiens
  misc_RNA (1)...(19): siRNA sense strand
cugagaagagccagaucaa

SEQ ID NO: 2579045 - RNA, 19 nt, Homo sapiens
  misc_RNA (1)...(19): siRNA sense strand
ccaccgaggcagaaguuau

SEQ ID NO: 2579046 - RNA, 19 nt, Homo sapiens
  misc_RNA (1)...(19): siRNA sense strand
agcagaaggaggaaacaua

SEQ ID NO: 2579047 - RNA, 19 nt, Homo sapiens
  misc_RNA (1)...(19): siRNA sense strand
ucuuauaccgucugacaua

SEQ ID NO: 2579048 - RNA, 19 nt, Homo sapiens
  misc_RNA (1)...(19): siRNA sense strand
gagcagaucuucuaggagu

SEQ ID NO: 2579049 - RNA, 19 nt, Homo sapiens
  misc_RNA (1)...(19): siRNA sense strand
gagagaaaggccuugggaa

SEQ ID NO: 2579050 - RNA, 19 nt, Homo sapiens
  misc_RNA (1)...(19): siRNA sense strand
cucaagaagucgaucgaga

SEQ ID NO: 2579051 - RNA, 19 nt, Homo sapiens
  misc_RNA (1)...(19): siRNA sense strand
cugcagaaccugaaccgaa

SEQ ID NO: 2579052 - RNA, 19 nt, Homo sapiens
  misc_RNA (1)...(19): siRNA sense strand
ucggaaaacaauaggggaa

SEQ ID NO: 2579053 - RNA, 19 nt, Homo sapiens
  misc_RNA (1)...(19): siRNA sense strand
aagaaagacagcacgcuua

SEQ ID NO: 2579054 - RNA, 19 nt, Homo sapiens
  misc_RNA (1)...(19): siRNA sense strand
cagaagacacaaacaaaca

SEQ ID NO: 2579055 - RNA, 19 nt, Homo sapiens
  misc_RNA (1)...(19): siRNA sense strand
ggucuaaaucugauaagga

SEQ ID NO: 2579056 - RNA, 19 nt, Homo sapiens
  misc_RNA (1)...(19): siRNA sense strand
aaguauagcgagagcagau

SEQ ID NO: 2579057 - RNA, 19 nt, Homo sapiens
  misc_RNA (1)...(19): siRNA sense strand
aagaggaggaggaggagau

SEQ ID NO: 2579058 - RNA, 19 nt, Homo sapiens
  misc_RNA (1)...(19): siRNA sense strand
aagcagagguaguaaaaca

SEQ ID NO: 2579059 - RNA, 19 nt, Homo sapiens
  misc_RNA (1)...(19): siRNA sense strand
aggaugaggaggaagagaa

SEQ ID NO: 2579060 - RNA, 19 nt, Homo sapiens
  misc_RNA (1)...(19): siRNA sense strand
gggcaaggaaguggagcaa

SEQ ID NO: 2579061 - RNA, 19 nt, Homo sapiens
  misc_RNA (1)...(19): siRNA sense strand
ccgaggaggaugaggagga

SEQ ID NO: 2579062 - RNA, 19 nt, Homo sapiens
  misc_RNA (1)...(19): siRNA sense strand
aggaggaugaggaggaaga

SEQ ID NO: 2579063 - RNA, 19 nt, Homo sapiens
  misc_RNA (1)...(19): siRNA sense strand
ccuuugagcaggagcugaa

SEQ ID NO: 2579064 - RNA, 19 nt, Homo sapiens
  misc_RNA (1)...(19): siRNA sense strand
gagaagaccuugcuggcca

SEQ ID NO: 2579065 - RNA, 19 nt, Homo sapiens
  misc_RNA (1)...(19): siRNA sense strand
ggaacauccccgagccaaa

SEQ ID NO: 2579066 - RNA, 19 nt, Homo sapiens
  misc_RNA (1)...(19): siRNA sense strand
uggaacugcuggagaggca

SEQ ID NO: 2579067 - RNA, 19 nt, Homo sapiens
  misc_RNA (1)...(19): siRNA sense strand
ucaacuggaggaugagcaa

SEQ ID NO: 2579068 - RNA, 19 nt, Homo sapiens
  misc_RNA (1)...(19): siRNA sense strand
gggcaacaugggagucuca

SEQ ID NO: 2579069 - RNA, 19 nt, Homo sapiens
  misc_RNA (1)...(19): siRNA sense strand
ccuacuggagggcgaggaa

SEQ ID NO: 2579070 - RNA, 19 nt, Homo sapiens
  misc_RNA (1)...(19): siRNA sense strand
aggcaaaucagaagagaau

SEQ ID NO: 2579071 - RNA, 19 nt, Homo sapiens
  misc_RNA (1)...(19): siRNA sense strand
cagaagaugaagaggauau

SEQ ID NO: 2579072 - RNA, 19 nt, Homo sapiens
  misc_RNA (1)...(19): siRNA sense strand
ggacaguggaggagaacau

SEQ ID NO: 2579073 - RNA, 19 nt, Homo sapiens
  misc_RNA (1)...(19): siRNA sense strand
cagaugaagaggaggaaga

SEQ ID NO: 2579074 - RNA, 19 nt, Homo sapiens
  misc_RNA (1)...(19): siRNA sense strand
gggaugaagagcagaguga

SEQ ID NO: 2579075 - RNA, 19 nt, Homo sapiens
  misc_RNA (1)...(19): siRNA sense strand
cccaagaggaugaggaaga

SEQ ID NO: 2579076 - RNA, 19 nt, Homo sapiens
  misc_RNA (1)...(19): siRNA sense strand
cagucaagaugaaggucaa

SEQ ID NO: 2579077 - RNA, 19 nt, Homo sapiens
  misc_RNA (1)...(19): siRNA sense strand
caaacaggcagaagagcaa

SEQ ID NO: 2579078 - RNA, 19 nt, Homo sapiens
  misc_RNA (1)...(19): siRNA sense strand
ggacauggccauugaggga

SEQ ID NO: 2579079 - RNA, 19 nt, Homo sapiens
  misc_RNA (1)...(19): siRNA sense strand
gggcugaggaugaggagau

SEQ ID NO: 2579080 - RNA, 19 nt, Homo sapiens
  misc_RNA (1)...(19): siRNA sense strand
caguggugguggugaacaa

SEQ ID NO: 2579081 - RNA, 19 nt, Homo sapiens
  misc_RNA (1)...(19): siRNA sense strand
gggcagaagaugaagagga

SEQ ID NO: 2579082 - RNA, 19 nt, Homo sapiens
  misc_RNA (1)...(19): siRNA sense strand
aggaugaggaagaggauga

SEQ ID NO: 2579083 - RNA, 19 nt, Homo sapiens
  misc_RNA (1)...(19): siRNA sense strand
agaagaagcuuaauggcau

SEQ ID NO: 2579084 - RNA, 19 nt, Homo sapiens
  misc_RNA (1)...(19): siRNA sense strand
ugaagauuguagugagaca

SEQ ID NO: 2579085 - RNA, 19 nt, Homo sapiens
  misc_RNA (1)...(19): siRNA sense strand
aagaggaagcggaggauga

SEQ ID NO: 2579086 - RNA, 19 nt, Homo sapiens
  misc_RNA (1)...(19): siRNA sense strand
uaacugugguagaggaaaa

SEQ ID NO: 2579087 - RNA, 19 nt, Homo sapiens
  misc_RNA (1)...(19): siRNA sense strand
agaaagagaggaagcucaa

SEQ ID NO: 2579088 - RNA, 19 nt, Homo sapiens
  misc_RNA (1)...(19): siRNA sense strand
aagaacaacaggaaggcaa

SEQ ID NO: 2579089 - RNA, 19 nt, Homo sapiens
  misc_RNA (1)...(19): siRNA sense strand
ggauaguagcagucaguca

SEQ ID NO: 2579090 - RNA, 19 nt, Homo sapiens
  misc_RNA (1)...(19): siRNA sense strand
gugaagaugaggaugaaga

SEQ ID NO: 2579091 - RNA, 19 nt, Homo sapiens
  misc_RNA (1)...(19): siRNA sense strand
gaaaagaaggcgaggacga

SEQ ID NO: 2579092 - RNA, 19 nt, Homo sapiens
  misc_RNA (1)...(19): siRNA sense strand
augaagaggaggaagauga

SEQ ID NO: 2579093 - RNA, 19 nt, Homo sapiens
  misc_RNA (1)...(19): siRNA sense strand
aggaugaagaugagguuga

SEQ ID NO: 2579094 - RNA, 19 nt, Homo sapiens
  misc_RNA (1)...(19): siRNA sense strand
gaggaagaaacaaguggaa

SEQ ID NO: 2579095 - RNA, 19 nt, Homo sapiens
  misc_RNA (1)...(19): siRNA sense strand
agaugaaggucaacaggau

SEQ ID NO: 2579096 - RNA, 19 nt, Homo sapiens
  misc_RNA (1)...(19): siRNA sense strand
gguaacugugguagaggaa

SEQ ID NO: 2579097 - RNA, 19 nt, Homo sapiens
  misc_RNA (1)...(19): siRNA sense strand
cagaugaagaugaugaaga

SEQ ID NO: 2579098 - RNA, 19 nt, Homo sapiens
  misc_RNA (1)...(19): siRNA sense strand
cugaaagucuccagcccaa

SEQ ID NO: 2579099 - RNA, 19 nt, Homo sapiens
  misc_RNA (1)...(19): siRNA sense strand
gagcccagaaagagaggaa

SEQ ID NO: 2579100 - RNA, 19 nt, Homo sapiens
  misc_RNA (1)...(19): siRNA sense strand
cagagaagccacaggaacu

SEQ ID NO: 2579101 - RNA, 19 nt, Homo sapiens
  misc_RNA (1)...(19): siRNA sense strand
ccgcaaagaccuggaccaa

SEQ ID NO: 2579102 - RNA, 19 nt, Homo sapiens
  misc_RNA (1)...(19): siRNA sense strand
cuauagcagcugaggaaca

SEQ ID NO: 2579103 - RNA, 19 nt, Homo sapiens
  misc_RNA (1)...(19): siRNA sense strand
cagaaagagaggaagcuca

SEQ ID NO: 2579104 - RNA, 19 nt, Homo sapiens
  misc_RNA (1)...(19): siRNA sense strand
ccuuccaaauccagggcaa

SEQ ID NO: 2579105 - RNA, 19 nt, Homo sapiens
  misc_RNA (1)...(19): siRNA sense strand
cucagguguuggagauaaa

SEQ ID NO: 2579106 - RNA, 19 nt, Homo sapiens
  misc_RNA (1)...(19): siRNA sense strand
agaguauaaugaaggucua

SEQ ID NO: 2579107 - RNA, 19 nt, Homo sapiens
  misc_RNA (1)...(19): siRNA sense strand
gcgcagaacaucaagaacu

SEQ ID NO: 2579108 - RNA, 19 nt, Homo sapiens
  misc_RNA (1)...(19): siRNA sense strand
aggaagaggaugaugagga

SEQ ID NO: 2579109 - RNA, 19 nt, Homo sapiens
  misc_RNA (1)...(19): siRNA sense strand
aggaggaagaugaugauuu

SEQ ID NO: 2579110 - RNA, 19 nt, Homo sapiens
  misc_RNA (1)...(19): siRNA sense strand
gagaagaagcuuaauggca

SEQ ID NO: 2579111 - RNA, 19 nt, Homo sapiens
  misc_RNA (1)...(19): siRNA sense strand
gcuuaucagugaacggaca

SEQ ID NO: 2579112 - RNA, 19 nt, Homo sapiens
  misc_RNA (1)...(19): siRNA sense strand
ccgagaugggccugaagaa

SEQ ID NO: 2579113 - RNA, 19 nt, Homo sapiens
  misc_RNA (1)...(19): siRNA sense strand
uguaugagaagaagcuuaa

SEQ ID NO: 2579114 - RNA, 19 nt, Homo sapiens
  misc_RNA (1)...(19): siRNA sense strand
auacaggcguggugaagau

SEQ ID NO: 2579115 - RNA, 19 nt, Homo sapiens
  misc_RNA (1)...(19): siRNA sense strand
cagaauuuaaugagaacga

SEQ ID NO: 2579116 - RNA, 19 nt, Homo sapiens
  misc_RNA (1)...(19): siRNA sense strand
gagcagugaagaugaggau

SEQ ID NO: 2579117 - RNA, 19 nt, Homo sapiens
  misc_RNA (1)...(19): siRNA sense strand
ggaugaggaagaugaacau

SEQ ID NO: 2579118 - RNA, 19 nt, Homo sapiens
  misc_RNA (1)...(19): siRNA sense strand
uggaugaggcgcagaacau

SEQ ID NO: 2579119 - RNA, 19 nt, Homo sapiens
  misc_RNA (1)...(19): siRNA sense strand
cacuagagacugagaaguu

SEQ ID NO: 2579120 - RNA, 19 nt, Homo sapiens
  misc_RNA (1)...(19): siRNA sense strand
aggaugaggaagaugaaca

SEQ ID NO: 2579121 - RNA, 19 nt, Homo sapiens
  misc_RNA (1)...(19): siRNA sense strand
uacucuagguccaaagaaa

SEQ ID NO: 2579122 - RNA, 19 nt, Homo sapiens
  misc_RNA (1)...(19): siRNA sense strand
cgcagaacaucaagaacuu

SEQ ID NO: 2579123 - RNA, 19 nt, Homo sapiens
  misc_RNA (1)...(19): siRNA sense strand
aagaugaggaugaagauga

SEQ ID NO: 2579124 - RNA, 19 nt, Homo sapiens
  misc_RNA (1)...(19): siRNA sense strand
aagcagaugaagaggagga

SEQ ID NO: 2579125 - RNA, 19 nt, Homo sapiens
  misc_RNA (1)...(19): siRNA sense strand
auguaugagaagaagcuua

SEQ ID NO: 2579126 - RNA, 19 nt, Homo sapiens
  misc_RNA (1)...(19): siRNA sense strand
acgaagaggaagcggagga

SEQ ID NO: 2579127 - RNA, 19 nt, Homo sapiens
  misc_RNA (1)...(19): siRNA sense strand
guaccagcacauugggcua

SEQ ID NO: 2579128 - RNA, 19 nt, Homo sapiens
  misc_RNA (1)...(19): siRNA sense strand
agaggaagcucaagcggca

SEQ ID NO: 2579129 - RNA, 19 nt, Homo sapiens
  misc_RNA (1)...(19): siRNA sense strand
gcaaugaugcagaggccca

SEQ ID NO: 2579130 - RNA, 19 nt, Homo sapiens
  misc_RNA (1)...(19): siRNA sense strand
gagaaaaguuugcaaucau

SEQ ID NO: 2579131 - RNA, 19 nt, Homo sapiens
  misc_RNA (1)...(19): siRNA sense strand
gaugagaguuccuguggga

SEQ ID NO: 2579132 - RNA, 19 nt, Homo sapiens
  misc_RNA (1)...(19): siRNA sense strand
uacuauagcagcugaggaa

SEQ ID NO: 2579133 - RNA, 19 nt, Homo sapiens
  misc_RNA (1)...(19): siRNA sense strand
aaguggaaguucagcauca

SEQ ID NO: 2579134 - RNA, 19 nt, Homo sapiens
  misc_RNA (1)...(19): siRNA sense strand
gguccaaagaaagaaauua

SEQ ID NO: 2579135 - RNA, 19 nt, Homo sapiens
  misc_RNA (1)...(19): siRNA sense strand
uuaccauguaugagaagaa

SEQ ID NO: 2579136 - RNA, 19 nt, Homo sapiens
  misc_RNA (1)...(19): siRNA sense strand
ugcaaauagcuaugggcaa

SEQ ID NO: 2579137 - RNA, 19 nt, Homo sapiens
  misc_RNA (1)...(19): siRNA sense strand
gcaaauagcuaugggcaac

SEQ ID NO: 2579138 - RNA, 19 nt, Homo sapiens
  misc_RNA (1)...(19): siRNA sense strand
aagcagagugacaggucua

SEQ ID NO: 2579139 - RNA, 19 nt, Homo sapiens
  misc_RNA (1)...(19): siRNA sense strand
cucagaaagccauggacaa

SEQ ID NO: 2579140 - RNA, 19 nt, Homo sapiens
  misc_RNA (1)...(19): siRNA sense strand
ggacacaccugguugcuca

SEQ ID NO: 2579141 - RNA, 19 nt, Homo sapiens
  misc_RNA (1)...(19): siRNA sense strand
ccugaacaaagaugggcaa

SEQ ID NO: 2579142 - RNA, 19 nt, Homo sapiens
  misc_RNA (1)...(19): siRNA sense strand
agccauggacaaagagaga

SEQ ID NO: 2579143 - RNA, 19 nt, Homo sapiens
  misc_RNA (1)...(19): siRNA sense strand
aagcaacaagcaugggcaa

SEQ ID NO: 2579144 - RNA, 19 nt, Homo sapiens
  misc_RNA (1)...(19): siRNA sense strand
aggagugucaggaggauca

SEQ ID NO: 2579145 - RNA, 19 nt, Homo sapiens
  misc_RNA (1)...(19): siRNA sense strand
gauuaugcucacagaaaau

SEQ ID NO: 2579146 - RNA, 19 nt, Homo sapiens
  misc_RNA (1)...(19): siRNA sense strand
gcaacuggcuaaugaggcu

SEQ ID NO: 2579147 - RNA, 19 nt, Homo sapiens
  misc_RNA (1)...(19): siRNA sense strand
ccagaaaauagaagcacau

SEQ ID NO: 2579148 - RNA, 19 nt, Homo sapiens
  misc_RNA (1)...(19): siRNA sense strand
cuggaaggaaagacaauca

SEQ ID NO: 2579149 - RNA, 19 nt, Homo sapiens
  misc_RNA (1)...(19): siRNA sense strand
cuagggaggaaguuggaga

SEQ ID NO: 2579150 - RNA, 19 nt, Homo sapiens
  misc_RNA (1)...(19): siRNA sense strand
acaaggaauuggaggagga

SEQ ID NO: 2579151 - RNA, 19 nt, Homo sapiens
  misc_RNA (1)...(19): siRNA sense strand
gagaagaagcucaagccuu

SEQ ID NO: 2579152 - RNA, 19 nt, Homo sapiens
  misc_RNA (1)...(19): siRNA sense strand
uguuugagcaggagagcuu

SEQ ID NO: 2579153 - RNA, 19 nt, Homo sapiens
  misc_RNA (1)...(19): siRNA sense strand
acaccaaugcugaagucaa

SEQ ID NO: 2579154 - RNA, 19 nt, Homo sapiens
  misc_RNA (1)...(19): siRNA sense strand
agaccuugguacaacgcaa

SEQ ID NO: 2579155 - RNA, 19 nt, Homo sapiens
  misc_RNA (1)...(19): siRNA sense strand
ggcuaaaggaacugucaga

SEQ ID NO: 2579156 - RNA, 19 nt, Homo sapiens
  misc_RNA (1)...(19): siRNA sense strand
aauuggaggaggagcucaa

SEQ ID NO: 2579157 - RNA, 19 nt, Homo sapiens
  misc_RNA (1)...(19): siRNA sense strand
aggaauuggaggaggagcu

SEQ ID NO: 2579158 - RNA, 19 nt, Homo sapiens
  misc_RNA (1)...(19): siRNA sense strand
gcaccuucccacugcgcua

SEQ ID NO: 2579159 - RNA, 19 nt, Homo sapiens
  misc_RNA (1)...(19): siRNA sense strand
cgccuagaccugcuggaaa

SEQ ID NO: 2579160 - RNA, 19 nt, Homo sapiens
  misc_RNA (1)...(19): siRNA sense strand
acucaucgccagagaaacu

SEQ ID NO: 2579161 - RNA, 19 nt, Homo sapiens
  misc_RNA (1)...(19): siRNA sense strand
ccauccuguacgagaagaa

SEQ ID NO: 2579162 - RNA, 19 nt, Homo sapiens
  misc_RNA (1)...(19): siRNA sense strand
ccaaggagaugcagacccu

SEQ ID NO: 2579163 - RNA, 19 nt, Homo sapiens
  misc_RNA (1)...(19): siRNA sense strand
ggauacugggcguuaccaa

SEQ ID NO: 2579164 - RNA, 19 nt, Homo sapiens
  misc_RNA (1)...(19): siRNA sense strand
acaaggaauuggaggagga

SEQ ID NO: 2579165 - RNA, 19 nt, Homo sapiens
  misc_RNA (1)...(19): siRNA sense strand
gagaagaagcucaagccuu

SEQ ID NO: 2579166 - RNA, 19 nt, Homo sapiens
  misc_RNA (1)...(19): siRNA sense strand
uguuugagcaggagagcuu

SEQ ID NO: 2579167 - RNA, 19 nt, Homo sapiens
  misc_RNA (1)...(19): siRNA sense strand
acaccaaugcugaagucaa

SEQ ID NO: 2579168 - RNA, 19 nt, Homo sapiens
  misc_RNA (1)...(19): siRNA sense strand
agaccuugguacaacgcaa

SEQ ID NO: 2579169 - RNA, 19 nt, Homo sapiens
  misc_RNA (1)...(19): siRNA sense strand
ggcuaaaggaacugucaga

SEQ ID NO: 2579170 - RNA, 19 nt, Homo sapiens
  misc_RNA (1)...(19): siRNA sense strand
aauuggaggaggagcucaa

SEQ ID NO: 2579171 - RNA, 19 nt, Homo sapiens
  misc_RNA (1)...(19): siRNA sense strand
aggaauuggaggaggagcu

SEQ ID NO: 2579172 - RNA, 19 nt, Homo sapiens
  misc_RNA (1)...(19): siRNA sense strand
gcaccuucccacugcgcua

SEQ ID NO: 2579173 - RNA, 19 nt, Homo sapiens
  misc_RNA (1)...(19): siRNA sense strand
cgccuagaccugcuggaaa

SEQ ID NO: 2579174 - RNA, 19 nt, Homo sapiens
  misc_RNA (1)...(19): siRNA sense strand
acucaucgccagagaaacu

SEQ ID NO: 2579175 - RNA, 19 nt, Homo sapiens
  misc_RNA (1)...(19): siRNA sense strand
ccauccuguacgagaagaa

SEQ ID NO: 2579176 - RNA, 19 nt, Homo sapiens
  misc_RNA (1)...(19): siRNA sense strand
ccaaggagaugcagacccu

SEQ ID NO: 2579177 - RNA, 19 nt, Homo sapiens
  misc_RNA (1)...(19): siRNA sense strand
ggauacugggcguuaccaa

SEQ ID NO: 2579178 - RNA, 19 nt, Homo sapiens
  misc_RNA (1)...(19): siRNA sense strand
uggaaaagucauaggaauu

SEQ ID NO: 2579179 - RNA, 19 nt, Homo sapiens
  misc_RNA (1)...(19): siRNA sense strand
gguuggauguacuggaaaa

SEQ ID NO: 2579180 - RNA, 19 nt, Homo sapiens
  misc_RNA (1)...(19): siRNA sense strand
cgcuaauagaucaguuaaa

SEQ ID NO: 2579181 - RNA, 19 nt, Homo sapiens
  misc_RNA (1)...(19): siRNA sense strand
cuggaaaagucauaggaau

SEQ ID NO: 2579182 - RNA, 19 nt, Homo sapiens
  misc_RNA (1)...(19): siRNA sense strand
ugaucacauuaaagagcua

SEQ ID NO: 2579183 - RNA, 19 nt, Homo sapiens
  misc_RNA (1)...(19): siRNA sense strand
ggauggaagaaugggauau

SEQ ID NO: 2579184 - RNA, 19 nt, Homo sapiens
  misc_RNA (1)...(19): siRNA sense strand
guugcaugaaggagcuaaa

SEQ ID NO: 2579185 - RNA, 19 nt, Homo sapiens
  misc_RNA (1)...(19): siRNA sense strand
caguuaaagcccggaggaa

SEQ ID NO: 2579186 - RNA, 19 nt, Homo sapiens
  misc_RNA (1)...(19): siRNA sense strand
uguuggagcaguaugacaa

SEQ ID NO: 2579187 - RNA, 19 nt, Homo sapiens
  misc_RNA (1)...(19): siRNA sense strand
gggugauauacgugccuuu

SEQ ID NO: 2579188 - RNA, 19 nt, Homo sapiens
  misc_RNA (1)...(19): siRNA sense strand
ugauguaggaucuggaagu

SEQ ID NO: 2579189 - RNA, 19 nt, Homo sapiens
  misc_RNA (1)...(19): siRNA sense strand
ccggaggaagauugauauu

SEQ ID NO: 2579190 - RNA, 19 nt, Homo sapiens
  misc_RNA (1)...(19): siRNA sense strand
auggaaucaucaagacaga

SEQ ID NO: 2579191 - RNA, 19 nt, Homo sapiens
  misc_RNA (1)...(19): siRNA sense strand
acauuaaagagcuaguaga

SEQ ID NO: 2579192 - RNA, 19 nt, Homo sapiens
  misc_RNA (1)...(19): siRNA sense strand
gaagaaugggauaugcuga

SEQ ID NO: 2579193 - RNA, 19 nt, Homo sapiens
  misc_RNA (1)...(19): siRNA sense strand
acuucugucuucagggaga

SEQ ID NO: 2579194 - RNA, 19 nt, Homo sapiens
  misc_RNA (1)...(19): siRNA sense strand
gaagauugauauugccugu

SEQ ID NO: 2579195 - RNA, 19 nt, Homo sapiens
  misc_RNA (1)...(19): siRNA sense strand
aggaaguggagcagggaga

SEQ ID NO: 2579196 - RNA, 19 nt, Homo sapiens
  misc_RNA (1)...(19): siRNA sense strand
augugauguuggagaacua

SEQ ID NO: 2579197 - RNA, 19 nt, Homo sapiens
  misc_RNA (1)...(19): siRNA sense strand
guggauaauggaaggugaa

SEQ ID NO: 2579198 - RNA, 19 nt, Homo sapiens
  misc_RNA (1)...(19): siRNA sense strand
cguggauaauggaagguga

SEQ ID NO: 2579199 - RNA, 19 nt, Homo sapiens
  misc_RNA (1)...(19): siRNA sense strand
ggguagaagaagaaaacuu

SEQ ID NO: 2579200 - RNA, 19 nt, Homo sapiens
  misc_RNA (1)...(19): siRNA sense strand
ggauaauggaaggugaauu

SEQ ID NO: 2579201 - RNA, 19 nt, Homo sapiens
  misc_RNA (1)...(19): siRNA sense strand
aagaaaacuuugaaggcuu

SEQ ID NO: 2579202 - RNA, 19 nt, Homo sapiens
  misc_RNA (1)...(19): siRNA sense strand
aggugaaggaaguggagca

SEQ ID NO: 2579203 - RNA, 19 nt, Homo sapiens
  misc_RNA (1)...(19): siRNA sense strand
ccugaugagaagauagcau

SEQ ID NO: 2579204 - RNA, 19 nt, Homo sapiens
  misc_RNA (1)...(19): siRNA sense strand
aggugaauuuccaugucaa

SEQ ID NO: 2579205 - RNA, 19 nt, Homo sapiens
  misc_RNA (1)...(19): siRNA sense strand
gugaugguccuuagcgcaa

SEQ ID NO: 2579206 - RNA, 19 nt, Homo sapiens
  misc_RNA (1)...(19): siRNA sense strand
gggccuuauggucaagaaa

SEQ ID NO: 2579207 - RNA, 19 nt, Homo sapiens
  misc_RNA (1)...(19): siRNA sense strand
guaucauggcagcaggauu

SEQ ID NO: 2579208 - RNA, 19 nt, Homo sapiens
  misc_RNA (1)...(19): siRNA sense strand
uaauauuucuugugaccca

SEQ ID NO: 2579209 - RNA, 19 nt, Homo sapiens
  misc_RNA (1)...(19): siRNA sense strand
uggcagaacucaagggcaa

SEQ ID NO: 2579210 - RNA, 19 nt, Homo sapiens
  misc_RNA (1)...(19): siRNA sense strand
ucaucaagguguugggcaa

SEQ ID NO: 2579211 - RNA, 19 nt, Homo sapiens
  misc_RNA (1)...(19): siRNA sense strand
ucauaggaaagcagggaua

SEQ ID NO: 2579212 - RNA, 19 nt, Homo sapiens
  misc_RNA (1)...(19): siRNA sense strand
agaucaaccaggaggaauu

SEQ ID NO: 2579213 - RNA, 19 nt, Homo sapiens
  misc_RNA (1)...(19): siRNA sense strand
acucaagggcaaagaugaa

SEQ ID NO: 2579214 - RNA, 19 nt, Homo sapiens
  misc_RNA (1)...(19): siRNA sense strand
gggauuugaaacuggacaa

SEQ ID NO: 2579215 - RNA, 19 nt, Homo sapiens
  misc_RNA (1)...(19): siRNA sense strand
ggguuaaagaagcaggaga

SEQ ID NO: 2579216 - RNA, 19 nt, Homo sapiens
  misc_RNA (1)...(19): siRNA sense strand
agggcaaagaugaaguaua

SEQ ID NO: 2579217 - RNA, 19 nt, Homo sapiens
  misc_RNA (1)...(19): siRNA sense strand
gguuaaagaagcaggagac

SEQ ID NO: 2579218 - RNA, 19 nt, Homo sapiens
  misc_RNA (1)...(19): siRNA sense strand
gggcguuaccccagacaaa

SEQ ID NO: 2579219 - RNA, 19 nt, Homo sapiens
  misc_RNA (1)...(19): siRNA sense strand
augacagagaagaggauuu

SEQ ID NO: 2579220 - RNA, 19 nt, Homo sapiens
  misc_RNA (1)...(19): siRNA sense strand
auuugaaacuggacaacau

SEQ ID NO: 2579221 - RNA, 19 nt, Homo sapiens
  misc_RNA (1)...(19): siRNA sense strand
gcaaggucauguuggcaga

SEQ ID NO: 2579222 - RNA, 19 nt, Homo sapiens
  misc_RNA (1)...(19): siRNA sense strand
gcauuaaaaccaaaagaga

SEQ ID NO: 2579223 - RNA, 19 nt, Homo sapiens
  misc_RNA (1)...(19): siRNA sense strand
aagcaauuguaaagcagau

SEQ ID NO: 2579224 - RNA, 19 nt, Homo sapiens
  misc_RNA (1)...(19): siRNA sense strand
ggaguggaugccagaggaa

SEQ ID NO: 2579225 - RNA, 19 nt, Homo sapiens
  misc_RNA (1)...(19): siRNA sense strand
uggacgaagcaauuguaaa

SEQ ID NO: 2579226 - RNA, 19 nt, Homo sapiens
  misc_RNA (1)...(19): siRNA sense strand
uguaaaugguggagaccuc

SEQ ID NO: 2579227 - RNA, 19 nt, Homo sapiens
  misc_RNA (1)...(19): siRNA sense strand
caauuguaaagcagaucaa

SEQ ID NO: 2579228 - RNA, 19 nt, Homo sapiens
  misc_RNA (1)...(19): siRNA sense strand
cuugugaccaggaaauaaa

SEQ ID NO: 2579229 - RNA, 19 nt, Homo sapiens
  misc_RNA (1)...(19): siRNA sense strand
caucaagguguugggcaaa

SEQ ID NO: 2579230 - RNA, 19 nt, Homo sapiens
  misc_RNA (1)...(19): siRNA sense strand
ggaauauguaaauggugga

SEQ ID NO: 2579231 - RNA, 19 nt, Homo sapiens
  misc_RNA (1)...(19): siRNA sense strand
ccuuguggacgaagcaauu

SEQ ID NO: 2579232 - RNA, 19 nt, Homo sapiens
  misc_RNA (1)...(19): siRNA sense strand
ugccagaggaaucgccaaa

SEQ ID NO: 2579233 - RNA, 19 nt, Homo sapiens
  misc_RNA (1)...(19): siRNA sense strand
cuaaguaagaagcgagaau

SEQ ID NO: 2579234 - RNA, 19 nt, Homo sapiens
  misc_RNA (1)...(19): siRNA sense strand
uugccaugaucuuggguaa

SEQ ID NO: 2579235 - RNA, 19 nt, Homo sapiens
  misc_RNA (1)...(19): siRNA sense strand
aaguaagaagcgagaaucu

SEQ ID NO: 2579236 - RNA, 19 nt, Homo sapiens
  misc_RNA (1)...(19): siRNA sense strand
cauucauccuccagaagau

SEQ ID NO: 2579237 - RNA, 19 nt, Homo sapiens
  misc_RNA (1)...(19): siRNA sense strand
uggugaagaaccugcaaga

SEQ ID NO: 2579238 - RNA, 19 nt, Homo sapiens
  misc_RNA (1)...(19): siRNA sense strand
acugcaauguguagcauca

SEQ ID NO: 2579239 - RNA, 19 nt, Homo sapiens
  misc_RNA (1)...(19): siRNA sense strand
cugcaaaagaagagaauau

SEQ ID NO: 2579240 - RNA, 19 nt, Homo sapiens
  misc_RNA (1)...(19): siRNA sense strand
agaaugaagaagaaggaga

SEQ ID NO: 2579241 - RNA, 19 nt, Homo sapiens
  misc_RNA (1)...(19): siRNA sense strand
guggagaaacugaggcaca

SEQ ID NO: 2579242 - RNA, 19 nt, Homo sapiens
  misc_RNA (1)...(19): siRNA sense strand
ggaauuagauauugcugga

SEQ ID NO: 2579243 - RNA, 19 nt, Homo sapiens
  misc_RNA (1)...(19): siRNA sense strand
ggcugaagaagguggagaa

SEQ ID NO: 2579244 - RNA, 19 nt, Homo sapiens
  misc_RNA (1)...(19): siRNA sense strand
aggagguggaugagagaga

SEQ ID NO: 2579245 - RNA, 19 nt, Homo sapiens
  misc_RNA (1)...(19): siRNA sense strand
aagccgaggaggaggaaga

SEQ ID NO: 2579246 - RNA, 19 nt, Homo sapiens
  misc_RNA (1)...(19): siRNA sense strand
gcugaagaagguggagaaa

SEQ ID NO: 2579247 - RNA, 19 nt, Homo sapiens
  misc_RNA (1)...(19): siRNA sense strand
acucaaagggaucagagaa

SEQ ID NO: 2579248 - RNA, 19 nt, Homo sapiens
  misc_RNA (1)...(19): siRNA sense strand
gagagaauguuccuggaga

SEQ ID NO: 2579249 - RNA, 19 nt, Homo sapiens
  misc_RNA (1)...(19): siRNA sense strand
acagaagagacggaagaaa

SEQ ID NO: 2579250 - RNA, 19 nt, Homo sapiens
  misc_RNA (1)...(19): siRNA sense strand
gagguggaugagagagaau

SEQ ID NO: 2579251 - RNA, 19 nt, Homo sapiens
  misc_RNA (1)...(19): siRNA sense strand
gguccauagcgauuaggaa

SEQ ID NO: 2579252 - RNA, 19 nt, Homo sapiens
  misc_RNA (1)...(19): siRNA sense strand
gauuaggaagaaacagcaa

SEQ ID NO: 2579253 - RNA, 19 nt, Homo sapiens
  misc_RNA (1)...(19): siRNA sense strand
gaagacaacaggaggugga

SEQ ID NO: 2579254 - RNA, 19 nt, Homo sapiens
  misc_RNA (1)...(19): siRNA sense strand
cugucgaaaugguuaucaa

SEQ ID NO: 2579255 - RNA, 19 nt, Homo sapiens
  misc_RNA (1)...(19): siRNA sense strand
ccuccagacucaaagggau

SEQ ID NO: 2579256 - RNA, 19 nt, Homo sapiens
  misc_RNA (1)...(19): siRNA sense strand
aauuagauauugcuggaga

SEQ ID NO: 2579257 - RNA, 19 nt, Homo sapiens
  misc_RNA (1)...(19): siRNA sense strand
ucuucaaugaggagcagua

SEQ ID NO: 2579258 - RNA, 19 nt, Homo sapiens
  misc_RNA (1)...(19): siRNA sense strand
ccgaggaggaggaagaaac

SEQ ID NO: 2579259 - RNA, 19 nt, Homo sapiens
  misc_RNA (1)...(19): siRNA sense strand
gaagaaggagagacagcca

SEQ ID NO: 2579260 - RNA, 19 nt, Homo sapiens
  misc_RNA (1)...(19): siRNA sense strand
ccaaggagucucacggcaa

SEQ ID NO: 2579261 - RNA, 19 nt, Homo sapiens
  misc_RNA (1)...(19): siRNA sense strand
acaaguaccgcgugcgcaa

SEQ ID NO: 2579262 - RNA, 19 nt, Homo sapiens
  misc_RNA (1)...(19): siRNA sense strand
agaacaggcuccagcacca

SEQ ID NO: 2579263 - RNA, 19 nt, Homo sapiens
  misc_RNA (1)...(19): siRNA sense strand
acggcaagcugcaggccau

SEQ ID NO: 2579264 - RNA, 19 nt, Homo sapiens
  misc_RNA (1)...(19): siRNA sense strand
cgugcgaggccaucaacaa

SEQ ID NO: 2579265 - RNA, 19 nt, Homo sapiens
  misc_RNA (1)...(19): siRNA sense strand
acauaaacaaagugggaau

SEQ ID NO: 2579266 - RNA, 19 nt, Homo sapiens
  misc_RNA (1)...(19): siRNA sense strand
gugaggaugauaagggaaa

SEQ ID NO: 2579267 - RNA, 19 nt, Homo sapiens
  misc_RNA (1)...(19): siRNA sense strand
ucuuaaagguacugggcau

SEQ ID NO: 2579268 - RNA, 19 nt, Homo sapiens
  misc_RNA (1)...(19): siRNA sense strand
agucagagacauaaacaaa

SEQ ID NO: 2579269 - RNA, 19 nt, Homo sapiens
  misc_RNA (1)...(19): siRNA sense strand
ccuuugaaguugagcauga

SEQ ID NO: 2579270 - RNA, 19 nt, Homo sapiens
  misc_RNA (1)...(19): siRNA sense strand
uggaagaaguaaugagaac

SEQ ID NO: 2579271 - RNA, 19 nt, Homo sapiens
  misc_RNA (1)...(19): siRNA sense strand
ugagaaguggaaagagaaa

SEQ ID NO: 2579272 - RNA, 19 nt, Homo sapiens
  misc_RNA (1)...(19): siRNA sense strand
uuauaaagcaggaagguga

SEQ ID NO: 2579273 - RNA, 19 nt, Homo sapiens
  misc_RNA (1)...(19): siRNA sense strand
caagaaagcaugucgccua

SEQ ID NO: 2579274 - RNA, 19 nt, Homo sapiens
  misc_RNA (1)...(19): siRNA sense strand
gcucaaagaauggaagaau

SEQ ID NO: 2579275 - RNA, 19 nt, Homo sapiens
  misc_RNA (1)...(19): siRNA sense strand
aagaaaugaaggagaaguu

SEQ ID NO: 2579276 - RNA, 19 nt, Homo sapiens
  misc_RNA (1)...(19): siRNA sense strand
acagcagaauuuacagaaa

SEQ ID NO: 2579277 - RNA, 19 nt, Homo sapiens
  misc_RNA (1)...(19): siRNA sense strand
cucaaagaauggaagaauu

SEQ ID NO: 2579278 - RNA, 19 nt, Homo sapiens
  misc_RNA (1)...(19): siRNA sense strand
uggagaagcaccaguggaa

SEQ ID NO: 2579279 - RNA, 19 nt, Homo sapiens
  misc_RNA (1)...(19): siRNA sense strand
gggcuuugaaucagcuaaa

SEQ ID NO: 2579280 - RNA, 19 nt, Homo sapiens
  misc_RNA (1)...(19): siRNA sense strand
aggaacacuuggaugacua

SEQ ID NO: 2579281 - RNA, 19 nt, Homo sapiens
  misc_RNA (1)...(19): siRNA sense strand
agacauaaacaaaguggga

SEQ ID NO: 2579282 - RNA, 19 nt, Homo sapiens
  misc_RNA (1)...(19): siRNA sense strand
cuuaggaacaccugaagaa

SEQ ID NO: 2579283 - RNA, 19 nt, Homo sapiens
  misc_RNA (1)...(19): siRNA sense strand
aagacaaagaggcugaaua

SEQ ID NO: 2579284 - RNA, 19 nt, Homo sapiens
  misc_RNA (1)...(19): siRNA sense strand
ucaaagacugcuaaagaau

SEQ ID NO: 2579285 - RNA, 19 nt, Homo sapiens
  misc_RNA (1)...(19): siRNA sense strand
ucacaaagacagaggcaag

SEQ ID NO: 2579286 - RNA, 19 nt, Homo sapiens
  misc_RNA (1)...(19): siRNA sense strand
ggcucacaguagugguaaa

SEQ ID NO: 2579287 - RNA, 19 nt, Homo sapiens
  misc_RNA (1)...(19): siRNA sense strand
gcagaaugaacaugcucaa

SEQ ID NO: 2579288 - RNA, 19 nt, Homo sapiens
  misc_RNA (1)...(19): siRNA sense strand
agaugaacucagacaggaa

SEQ ID NO: 2579289 - RNA, 19 nt, Homo sapiens
  misc_RNA (1)...(19): siRNA sense strand
agucuaaagagcucacaaa

SEQ ID NO: 2579290 - RNA, 19 nt, Homo sapiens
  misc_RNA (1)...(19): siRNA sense strand
caacaguuaagaaggaaca

SEQ ID NO: 2579291 - RNA, 19 nt, Homo sapiens
  misc_RNA (1)...(19): siRNA sense strand
ucuaaagagcucacaaaga

SEQ ID NO: 2579292 - RNA, 19 nt, Homo sapiens
  misc_RNA (1)...(19): siRNA sense strand
ucacugaagaacagcagaa

SEQ ID NO: 2579293 - RNA, 19 nt, Homo sapiens
  misc_RNA (1)...(19): siRNA sense strand
gguucagggcucaacuaaa

SEQ ID NO: 2579294 - RNA, 19 nt, Homo sapiens
  misc_RNA (1)...(19): siRNA sense strand
aggaauggaauuacaguca

SEQ ID NO: 2579295 - RNA, 19 nt, Homo sapiens
  misc_RNA (1)...(19): siRNA sense strand
cugcaaauucugaaaucau

SEQ ID NO: 2579296 - RNA, 19 nt, Homo sapiens
  misc_RNA (1)...(19): siRNA sense strand
ggguggaccagcagcauuu

SEQ ID NO: 2579297 - RNA, 19 nt, Homo sapiens
  misc_RNA (1)...(19): siRNA sense strand
gcuucauaucuuaaaggua

SEQ ID NO: 2579298 - RNA, 19 nt, Homo sapiens
  misc_RNA (1)...(19): siRNA sense strand
agcagaauuuacagaaaga

SEQ ID NO: 2579299 - RNA, 19 nt, Homo sapiens
  misc_RNA (1)...(19): siRNA sense strand
gaauuuacagaaagagcuu

SEQ ID NO: 2579300 - RNA, 19 nt, Homo sapiens
  misc_RNA (1)...(19): siRNA sense strand
cagaaagacuuagagaaaa

SEQ ID NO: 2579301 - RNA, 19 nt, Homo sapiens
  misc_RNA (1)...(19): siRNA sense strand
aaauacagugugugaugaa

SEQ ID NO: 2579302 - RNA, 19 nt, Homo sapiens
  misc_RNA (1)...(19): siRNA sense strand
cagaacugaggcagagauu

SEQ ID NO: 2579303 - RNA, 19 nt, Homo sapiens
  misc_RNA (1)...(19): siRNA sense strand
ugucuggaguguuguggaa

SEQ ID NO: 2579304 - RNA, 19 nt, Homo sapiens
  misc_RNA (1)...(19): siRNA sense strand
caguagugguaaacuucaa

SEQ ID NO: 2579305 - RNA, 19 nt, Homo sapiens
  misc_RNA (1)...(19): siRNA sense strand
aagcaagacagaaguuaga

SEQ ID NO: 2579306 - RNA, 19 nt, Homo sapiens
  misc_RNA (1)...(19): siRNA sense strand
gcaagacagaaguuagaga

SEQ ID NO: 2579307 - RNA, 19 nt, Homo sapiens
  misc_RNA (1)...(19): siRNA sense strand
cuuaaagguacugggcaua

SEQ ID NO: 2579308 - RNA, 19 nt, Homo sapiens
  misc_RNA (1)...(19): siRNA sense strand
acagaaagagcuugaaucu

SEQ ID NO: 2579309 - RNA, 19 nt, Homo sapiens
  misc_RNA (1)...(19): siRNA sense strand
gagaagcaccaguggaaac

SEQ ID NO: 2579310 - RNA, 19 nt, Homo sapiens
  misc_RNA (1)...(19): siRNA sense strand
cuucauaucuuaaagguac

SEQ ID NO: 2579311 - RNA, 19 nt, Homo sapiens
  misc_RNA (1)...(19): siRNA sense strand
uuuucaaguuggaggagaa

SEQ ID NO: 2579312 - RNA, 19 nt, Homo sapiens
  misc_RNA (1)...(19): siRNA sense strand
cagcaaauaaauacagugu

SEQ ID NO: 2579313 - RNA, 19 nt, Homo sapiens
  misc_RNA (1)...(19): siRNA sense strand
cgauaaacaaggugccaac

SEQ ID NO: 2579314 - RNA, 19 nt, Homo sapiens
  misc_RNA (1)...(19): siRNA sense strand
uuagaagaaaugaaggaga

SEQ ID NO: 2579315 - RNA, 19 nt, Homo sapiens
  misc_RNA (1)...(19): siRNA sense strand
gaugaugauaaaagagcua

SEQ ID NO: 2579316 - RNA, 19 nt, Homo sapiens
  misc_RNA (1)...(19): siRNA sense strand
gaacaggagaaaauggauu

SEQ ID NO: 2579317 - RNA, 19 nt, Homo sapiens
  misc_RNA (1)...(19): siRNA sense strand
auaucaagacagucagaga

SEQ ID NO: 2579318 - RNA, 19 nt, Homo sapiens
  misc_RNA (1)...(19): siRNA sense strand
cacuugaggaacaggagaa

SEQ ID NO: 2579319 - RNA, 19 nt, Homo sapiens
  misc_RNA (1)...(19): siRNA sense strand
cagcagaagaccaagcaga

SEQ ID NO: 2579320 - RNA, 19 nt, Homo sapiens
  misc_RNA (1)...(19): siRNA sense strand
cacaaagauuccagagcca

SEQ ID NO: 2579321 - RNA, 19 nt, Homo sapiens
  misc_RNA (1)...(19): siRNA sense strand
caucaaguuuccugagcca

SEQ ID NO: 2579322 - RNA, 19 nt, Homo sapiens
  misc_RNA (1)...(19): siRNA sense strand
caccaaaguuccugugcca

SEQ ID NO: 2579323 - RNA, 19 nt, Homo sapiens
  misc_RNA (1)...(19): siRNA sense strand
agcagaagaccaagcagaa

SEQ ID NO: 2579324 - RNA, 19 nt, Homo sapiens
  misc_RNA (1)...(19): siRNA sense strand
gcgagaaagugaaggacga

SEQ ID NO: 2579325 - RNA, 19 nt, Homo sapiens
  misc_RNA (1)...(19): siRNA sense strand
aagugaaggacgaggagau

SEQ ID NO: 2579326 - RNA, 19 nt, Homo sapiens
  misc_RNA (1)...(19): siRNA sense strand
cccgagaagaagugggaca

SEQ ID NO: 2579327 - RNA, 19 nt, Homo sapiens
  misc_RNA (1)...(19): siRNA sense strand
ccuaugaccccgagaagaa

SEQ ID NO: 2579328 - RNA, 19 nt, Homo sapiens
  misc_RNA (1)...(19): siRNA sense strand
ccgagaagaagugggacaa

SEQ ID NO: 2579329 - RNA, 19 nt, Homo sapiens
  misc_RNA (1)...(19): siRNA sense strand
acgagaagaacaagcacau

SEQ ID NO: 2579330 - RNA, 19 nt, Homo sapiens
  misc_RNA (1)...(19): siRNA sense strand
ccaccauggagaaggacga

SEQ ID NO: 2579331 - RNA, 19 nt, Homo sapiens
  misc_RNA (1)...(19): siRNA sense strand
cguaagaucuccugccugu

SEQ ID NO: 2579332 - RNA, 19 nt, Homo sapiens
  misc_RNA (1)...(19): siRNA sense strand
ucaagaagcgcgaaaggca

SEQ ID NO: 2579333 - RNA, 19 nt, Homo sapiens
  misc_RNA (1)...(19): siRNA sense strand
agaaagugaaggacgagga

SEQ ID NO: 2579334 - RNA, 19 nt, Homo sapiens
  misc_RNA (1)...(19): siRNA sense strand
aaauaaaugcauuggccaa

SEQ ID NO: 2579335 - RNA, 19 nt, Homo sapiens
  misc_RNA (1)...(19): siRNA sense strand
uggaaguaguggaggaagu

SEQ ID NO: 2579336 - RNA, 19 nt, Homo sapiens
  misc_RNA (1)...(19): siRNA sense strand
aggcuacagacaagagaaa

SEQ ID NO: 2579337 - RNA, 19 nt, Homo sapiens
  misc_RNA (1)...(19): siRNA sense strand
acgaagagagauugguauu

SEQ ID NO: 2579338 - RNA, 19 nt, Homo sapiens
  misc_RNA (1)...(19): siRNA sense strand
caguggaaguaguggagga

SEQ ID NO: 2579339 - RNA, 19 nt, Homo sapiens
  misc_RNA (1)...(19): siRNA sense strand
ucuuuaaaucagagaccaa

SEQ ID NO: 2579340 - RNA, 19 nt, Homo sapiens
  misc_RNA (1)...(19): siRNA sense strand
gagaaaagcuuuagaggag

SEQ ID NO: 2579341 - RNA, 19 nt, Homo sapiens
  misc_RNA (1)...(19): siRNA sense strand
ccuaaugacuauaugacca

SEQ ID NO: 2579342 - RNA, 19 nt, Homo sapiens
  misc_RNA (1)...(19): siRNA sense strand
uggccagggugcaggaaaa

SEQ ID NO: 2579343 - RNA, 19 nt, Homo sapiens
  misc_RNA (1)...(19): siRNA sense strand
auacaaaagacaaggauga

SEQ ID NO: 2579344 - RNA, 19 nt, Homo sapiens
  misc_RNA (1)...(19): siRNA sense strand
agauguuacuagaggagga

SEQ ID NO: 2579345 - RNA, 19 nt, Homo sapiens
  misc_RNA (1)...(19): siRNA sense strand
cggaauacuccuuauaaaa

SEQ ID NO: 2579346 - RNA, 19 nt, Homo sapiens
  misc_RNA (1)...(19): siRNA sense strand
gggaacacugggacggaau

SEQ ID NO: 2579347 - RNA, 19 nt, Homo sapiens
  misc_RNA (1)...(19): siRNA sense strand
aggaaguggaagucgagaa

SEQ ID NO: 2579348 - RNA, 19 nt, Homo sapiens
  misc_RNA (1)...(19): siRNA sense strand
agacaagagaaaagcuuua

SEQ ID NO: 2579349 - RNA, 19 nt, Homo sapiens
  misc_RNA (1)...(19): siRNA sense strand
ggcacacugucgagaacaa

SEQ ID NO: 2579350 - RNA, 19 nt, Homo sapiens
  misc_RNA (1)...(19): siRNA sense strand
uugagaaaguuguugcaau

SEQ ID NO: 2579351 - RNA, 19 nt, Homo sapiens
  misc_RNA (1)...(19): siRNA sense strand
gguaugaaggagucugcaa

SEQ ID NO: 2579352 - RNA, 19 nt, Homo sapiens
  misc_RNA (1)...(19): siRNA sense strand
guggauauucauaaggaga

SEQ ID NO: 2579353 - RNA, 19 nt, Homo sapiens
  misc_RNA (1)...(19): siRNA sense strand
aagcuuuagaggagaccaa

SEQ ID NO: 2579354 - RNA, 19 nt, Homo sapiens
  misc_RNA (1)...(19): siRNA sense strand
uggauauucauaaggagaa

SEQ ID NO: 2579355 - RNA, 19 nt, Homo sapiens
  misc_RNA (1)...(19): siRNA sense strand
agacaaggaugaugagcug

SEQ ID NO: 2579356 - RNA, 19 nt, Homo sapiens
  misc_RNA (1)...(19): siRNA sense strand
uggaggaaguggaagucga

SEQ ID NO: 2579357 - RNA, 19 nt, Homo sapiens
  misc_RNA (1)...(19): siRNA sense strand
acauacaggcuacagacaa

SEQ ID NO: 2579358 - RNA, 19 nt, Homo sapiens
  misc_RNA (1)...(19): siRNA sense strand
caucaagaacucacaaaau

SEQ ID NO: 2579359 - RNA, 19 nt, Homo sapiens
  misc_RNA (1)...(19): siRNA sense strand
aaacauugcugauagucca

SEQ ID NO: 2579360 - RNA, 19 nt, Homo sapiens
  misc_RNA (1)...(19): siRNA sense strand
auaucaacuucuuggucaa

SEQ ID NO: 2579361 - RNA, 19 nt, Homo sapiens
  misc_RNA (1)...(19): siRNA sense strand
uggcaaugagguauaucaa

SEQ ID NO: 2579362 - RNA, 19 nt, Homo sapiens
  misc_RNA (1)...(19): siRNA sense strand
gcaacaaacgggaguggcu

SEQ ID NO: 2579363 - RNA, 19 nt, Homo sapiens
  misc_RNA (1)...(19): siRNA sense strand
cgccuggcaaugagguaua

SEQ ID NO: 2579364 - RNA, 19 nt, Homo sapiens
  misc_RNA (1)...(19): siRNA sense strand
ccauagaguuuguggcuga

SEQ ID NO: 2579365 - RNA, 19 nt, Homo sapiens
  misc_RNA (1)...(19): siRNA sense strand
gaaccaagauccaaggaga

SEQ ID NO: 2579366 - RNA, 19 nt, Homo sapiens
  misc_RNA (1)...(19): siRNA sense strand
ggagaguuguauaagguca

SEQ ID NO: 2579367 - RNA, 19 nt, Homo sapiens
  misc_RNA (1)...(19): siRNA sense strand
aguacugguucgaggaagu

SEQ ID NO: 2579368 - RNA, 19 nt, Homo sapiens
  misc_RNA (1)...(19): siRNA sense strand
cggcaagccacgaaggauc

SEQ ID NO: 2579369 - RNA, 19 nt, Homo sapiens
  misc_RNA (1)...(19): siRNA sense strand
ggagcuaagaagggagaca

SEQ ID NO: 2579370 - RNA, 19 nt, Homo sapiens
  misc_RNA (1)...(19): siRNA sense strand
uugaaguaccagagcccua

SEQ ID NO: 2579371 - RNA, 19 nt, Homo sapiens
  misc_RNA (1)...(19): siRNA sense strand
gagcucaggccuagcccua

SEQ ID NO: 2579372 - RNA, 19 nt, Homo sapiens
  misc_RNA (1)...(19): siRNA sense strand
ccguggaccaggagaacca

SEQ ID NO: 2579373 - RNA, 19 nt, Homo sapiens
  misc_RNA (1)...(19): siRNA sense strand
gcaccaacccuguggcuac

SEQ ID NO: 2579374 - RNA, 19 nt, Homo sapiens
  misc_RNA (1)...(19): siRNA sense strand
uuggaagagcucaggccua

SEQ ID NO: 2579375 - RNA, 19 nt, Homo sapiens
  misc_RNA (1)...(19): siRNA sense strand
cacaaagauugguggggau

SEQ ID NO: 2579376 - RNA, 19 nt, Homo sapiens
  misc_RNA (1)...(19): siRNA sense strand
ccgaagaaacuguggcuac

SEQ ID NO: 2579377 - RNA, 19 nt, Homo sapiens
  misc_RNA (1)...(19): siRNA sense strand
ucccgaagucuguggaaga

SEQ ID NO: 2579378 - RNA, 19 nt, Homo sapiens
  misc_RNA (1)...(19): siRNA sense strand
gugaaagcuuugaagaaaa

SEQ ID NO: 2579379 - RNA, 19 nt, Homo sapiens
  misc_RNA (1)...(19): siRNA sense strand
ccaugaagacauagagcuu

SEQ ID NO: 2579380 - RNA, 19 nt, Homo sapiens
  misc_RNA (1)...(19): siRNA sense strand
gggagaugcaggagaggau

SEQ ID NO: 2579381 - RNA, 19 nt, Homo sapiens
  misc_RNA (1)...(19): siRNA sense strand
gcgaagucaaagaaguaua

SEQ ID NO: 2579382 - RNA, 19 nt, Homo sapiens
  misc_RNA (1)...(19): siRNA sense strand
gugaauuggauauggugaa

SEQ ID NO: 2579383 - RNA, 19 nt, Homo sapiens
  misc_RNA (1)...(19): siRNA sense strand
augaagaaauugaugcuca

SEQ ID NO: 2579384 - RNA, 19 nt, Homo sapiens
  misc_RNA (1)...(19): siRNA sense strand
cuacugaaucccagauaca

SEQ ID NO: 2579385 - RNA, 19 nt, Homo sapiens
  misc_RNA (1)...(19): siRNA sense strand
aauaagaaccagaaggaag

SEQ ID NO: 2579386 - RNA, 19 nt, Homo sapiens
  misc_RNA (1)...(19): siRNA sense strand
acuacgagguaauggaguu

SEQ ID NO: 2579387 - RNA, 19 nt, Homo sapiens
  misc_RNA (1)...(19): siRNA sense strand
ucccagaacagauuggaaa

SEQ ID NO: 2579388 - RNA, 19 nt, Homo sapiens
  misc_RNA (1)...(19): siRNA sense strand
ucaaagaaguauaccucga

SEQ ID NO: 2579389 - RNA, 19 nt, Homo sapiens
  misc_RNA (1)...(19): siRNA sense strand
agucucugauugugaagaa

SEQ ID NO: 2579390 - RNA, 19 nt, Homo sapiens
  misc_RNA (1)...(19): siRNA sense strand
cugcacagugaauuggaua

SEQ ID NO: 2579391 - RNA, 19 nt, Homo sapiens
  misc_RNA (1)...(19): siRNA sense strand
augagagguuuacuagaaa

SEQ ID NO: 2579392 - RNA, 19 nt, Homo sapiens
  misc_RNA (1)...(19): siRNA sense strand
cuagaaaccaacaaaggau

SEQ ID NO: 2579393 - RNA, 19 nt, Homo sapiens
  misc_RNA (1)...(19): siRNA sense strand
ugauugugaagaaggaauu

SEQ ID NO: 2579394 - RNA, 19 nt, Homo sapiens
  misc_RNA (1)...(19): siRNA sense strand
cugaaaaccaugaagacau

SEQ ID NO: 2579395 - RNA, 19 nt, Homo sapiens
  misc_RNA (1)...(19): siRNA sense strand
auguaacuguugagcuaau

SEQ ID NO: 2579396 - RNA, 19 nt, Homo sapiens
  misc_RNA (1)...(19): siRNA sense strand
gagcaaaauaagaaccaga

SEQ ID NO: 2579397 - RNA, 19 nt, Homo sapiens
  misc_RNA (1)...(19): siRNA sense strand
ccuuccaaguucugaugua

SEQ ID NO: 2579398 - RNA, 19 nt, Homo sapiens
  misc_RNA (1)...(19): siRNA sense strand
cuuggauaugagagguuua

SEQ ID NO: 2579399 - RNA, 19 nt, Homo sapiens
  misc_RNA (1)...(19): siRNA sense strand
cugauugugaagaaggaau

SEQ ID NO: 2579400 - RNA, 19 nt, Homo sapiens
  misc_RNA (1)...(19): siRNA sense strand
agacuuggucacagggcuu

SEQ ID NO: 2579401 - RNA, 19 nt, Homo sapiens
  misc_RNA (1)...(19): siRNA sense strand
cugcagaaacucuauaaaa

SEQ ID NO: 2579402 - RNA, 19 nt, Homo sapiens
  misc_RNA (1)...(19): siRNA sense strand
gagaugcaggagaggauca

SEQ ID NO: 2579403 - RNA, 19 nt, Homo sapiens
  misc_RNA (1)...(19): siRNA sense strand
ugcuuguggugguggagaa

SEQ ID NO: 2579404 - RNA, 19 nt, Homo sapiens
  misc_RNA (1)...(19): siRNA sense strand
gaggauuugaauaaugcua

SEQ ID NO: 2579405 - RNA, 19 nt, Homo sapiens
  misc_RNA (1)...(19): siRNA sense strand
aacucaacaccaugaauaa

SEQ ID NO: 2579406 - RNA, 19 nt, Homo sapiens
  misc_RNA (1)...(19): siRNA sense strand
uggcaagagucaccgggau

SEQ ID NO: 2579407 - RNA, 19 nt, Homo sapiens
  misc_RNA (1)...(19): siRNA sense strand
gcagaaacucuauaaaaca

SEQ ID NO: 2579408 - RNA, 19 nt, Homo sapiens
  misc_RNA (1)...(19): siRNA sense strand
acgagguaauggaguuuga

SEQ ID NO: 2579409 - RNA, 19 nt, Homo sapiens
  misc_RNA (1)...(19): siRNA sense strand
gagacuaagcaaugggaaa

SEQ ID NO: 2579410 - RNA, 19 nt, Homo sapiens
  misc_RNA (1)...(19): siRNA sense strand
cagauaagugcgaggaaau

SEQ ID NO: 2579411 - RNA, 19 nt, Homo sapiens
  misc_RNA (1)...(19): siRNA sense strand
gggaagacgaagaugaaau

SEQ ID NO: 2579412 - RNA, 19 nt, Homo sapiens
  misc_RNA (1)...(19): siRNA sense strand
aagaaauagcugagaauca

SEQ ID NO: 2579413 - RNA, 19 nt, Homo sapiens
  misc_RNA (1)...(19): siRNA sense strand
aggaaauggaggaaggcua

SEQ ID NO: 2579414 - RNA, 19 nt, Homo sapiens
  misc_RNA (1)...(19): siRNA sense strand
gagaagacucggugagcau

SEQ ID NO: 2579415 - RNA, 19 nt, Homo sapiens
  misc_RNA (1)...(19): siRNA sense strand
ccagaauaacccagaagaa

SEQ ID NO: 2579416 - RNA, 19 nt, Homo sapiens
  misc_RNA (1)...(19): siRNA sense strand
gggagaaagagaagaaagu

SEQ ID NO: 2579417 - RNA, 19 nt, Homo sapiens
  misc_RNA (1)...(19): siRNA sense strand
uuaaugauaaggagggaua

SEQ ID NO: 2579418 - RNA, 19 nt, Homo sapiens
  misc_RNA (1)...(19): siRNA sense strand
cagaaagcccaguagaaau

SEQ ID NO: 2579419 - RNA, 19 nt, Homo sapiens
  misc_RNA (1)...(19): siRNA sense strand
ggagaaacuuaaaaggcua

SEQ ID NO: 2579420 - RNA, 19 nt, Homo sapiens
  misc_RNA (1)...(19): siRNA sense strand
cgaaagaauuccucggcca

SEQ ID NO: 2579421 - RNA, 19 nt, Homo sapiens
  misc_RNA (1)...(19): siRNA sense strand
guggaacagaagagacuaa

SEQ ID NO: 2579422 - RNA, 19 nt, Homo sapiens
  misc_RNA (1)...(19): siRNA sense strand
auguguaccuggaggagua

SEQ ID NO: 2579423 - RNA, 19 nt, Homo sapiens
  misc_RNA (1)...(19): siRNA sense strand
aggacaaacuugcguaaaa

SEQ ID NO: 2579424 - RNA, 19 nt, Homo sapiens
  misc_RNA (1)...(19): siRNA sense strand
caacuaaggaacagcgcuu

SEQ ID NO: 2579425 - RNA, 19 nt, Homo sapiens
  misc_RNA (1)...(19): siRNA sense strand
gaaccagagcagugaagau

SEQ ID NO: 2579426 - RNA, 19 nt, Homo sapiens
  misc_RNA (1)...(19): siRNA sense strand
acuuaaaggccacguggaa

SEQ ID NO: 2579427 - RNA, 19 nt, Homo sapiens
  misc_RNA (1)...(19): siRNA sense strand
ugagggagaaagagaagaa

SEQ ID NO: 2579428 - RNA, 19 nt, Homo sapiens
  misc_RNA (1)...(19): siRNA sense strand
aggaaauugaacagaugaa

SEQ ID NO: 2579429 - RNA, 19 nt, Homo sapiens
  misc_RNA (1)...(19): siRNA sense strand
aguugaugauggagagguu

SEQ ID NO: 2579430 - RNA, 19 nt, Homo sapiens
  misc_RNA (1)...(19): siRNA sense strand
ccgcugagggagaaagaga

SEQ ID NO: 2579431 - RNA, 19 nt, Homo sapiens
  misc_RNA (1)...(19): siRNA sense strand
cagggaagacgaagaugaa

SEQ ID NO: 2579432 - RNA, 19 nt, Homo sapiens
  misc_RNA (1)...(19): siRNA sense strand
gguccuaaugggccaaaua

SEQ ID NO: 2579433 - RNA, 19 nt, Homo sapiens
  misc_RNA (1)...(19): siRNA sense strand
caggagaagaugggcauaa

SEQ ID NO: 2579434 - RNA, 19 nt, Homo sapiens
  misc_RNA (1)...(19): siRNA sense strand
cguccaaguguguaaguuu

SEQ ID NO: 2579435 - RNA, 19 nt, Homo sapiens
  misc_RNA (1)...(19): siRNA sense strand
gcauaaugaauaaaggagu

SEQ ID NO: 2579436 - RNA, 19 nt, Homo sapiens
  misc_RNA (1)...(19): siRNA sense strand
cuacaacaacagagggagu

SEQ ID NO: 2579437 - RNA, 19 nt, Homo sapiens
  misc_RNA (1)...(19): siRNA sense strand
cuucagacauuaagccaga

SEQ ID NO: 2579438 - RNA, 19 nt, Homo sapiens
  misc_RNA (1)...(19): siRNA sense strand
agauugaagcccagcaaca

SEQ ID NO: 2579439 - RNA, 19 nt, Homo sapiens
  misc_RNA (1)...(19): siRNA sense strand
ugucaaaaguagaagaacu

SEQ ID NO: 2579440 - RNA, 19 nt, Homo sapiens
  misc_RNA (1)...(19): siRNA sense strand
accuagaagccuuacgaaa

SEQ ID NO: 2579441 - RNA, 19 nt, Homo sapiens
  misc_RNA (1)...(19): siRNA sense strand
ucguuaaguuccugguaca

SEQ ID NO: 2579442 - RNA, 19 nt, Homo sapiens
  misc_RNA (1)...(19): siRNA sense strand
ggauuaugaaccucagaau

SEQ ID NO: 2579443 - RNA, 19 nt, Homo sapiens
  misc_RNA (1)...(19): siRNA sense strand
ggccugaauugcuggugaa

SEQ ID NO: 2579444 - RNA, 19 nt, Homo sapiens
  misc_RNA (1)...(19): siRNA sense strand
aaguggcagucauggauaa

SEQ ID NO: 2579445 - RNA, 19 nt, Homo sapiens
  misc_RNA (1)...(19): siRNA sense strand
auuaugaaccucagaauga

SEQ ID NO: 2579446 - RNA, 19 nt, Homo sapiens
  misc_RNA (1)...(19): siRNA sense strand
ugggaaacuuguggaggaa

SEQ ID NO: 2579447 - RNA, 19 nt, Homo sapiens
  misc_RNA (1)...(19): siRNA sense strand
uuuauggaguucaggagaa

SEQ ID NO: 2579448 - RNA, 19 nt, Homo sapiens
  misc_RNA (1)...(19): siRNA sense strand
gggcauaaugaauaaagga

SEQ ID NO: 2579449 - RNA, 19 nt, Homo sapiens
  misc_RNA (1)...(19): siRNA sense strand
cugcaguggcugagcuuga

SEQ ID NO: 2579450 - RNA, 19 nt, Homo sapiens
  misc_RNA (1)...(19): siRNA sense strand
guauaugguaagccuguaa

SEQ ID NO: 2579451 - RNA, 19 nt, Homo sapiens
  misc_RNA (1)...(19): siRNA sense strand
auuaugagccugagggagu

SEQ ID NO: 2579452 - RNA, 19 nt, Homo sapiens
  misc_RNA (1)...(19): siRNA sense strand
cagaagaaccaaauccaga

SEQ ID NO: 2579453 - RNA, 19 nt, Homo sapiens
  misc_RNA (1)...(19): siRNA sense strand
ugaaagaaggagacugcau

SEQ ID NO: 2579454 - RNA, 19 nt, Homo sapiens
  misc_RNA (1)...(19): siRNA sense strand
uuaaaggccacguggaaca

SEQ ID NO: 2579455 - RNA, 19 nt, Homo sapiens
  misc_RNA (1)...(19): siRNA sense strand
acagaagagacuaagcaau

SEQ ID NO: 2579456 - RNA, 19 nt, Homo sapiens
  misc_RNA (1)...(19): siRNA sense strand
auuuaugcgcuuugggauu

SEQ ID NO: 2579457 - RNA, 19 nt, Homo sapiens
  misc_RNA (1)...(19): siRNA sense strand
cccaagaauuaaaccaaga

SEQ ID NO: 2579458 - RNA, 19 nt, Homo sapiens
  misc_RNA (1)...(19): siRNA sense strand
augggaaacuuguggagga

SEQ ID NO: 2579459 - RNA, 19 nt, Homo sapiens
  misc_RNA (1)...(19): siRNA sense strand
auggaaugagggugaaauu

SEQ ID NO: 2579460 - RNA, 19 nt, Homo sapiens
  misc_RNA (1)...(19): siRNA sense strand
acaacguccaaguguguaa

SEQ ID NO: 2579461 - RNA, 19 nt, Homo sapiens
  misc_RNA (1)...(19): siRNA sense strand
gcgaggaaauggaggaagg

SEQ ID NO: 2579462 - RNA, 19 nt, Homo sapiens
  misc_RNA (1)...(19): siRNA sense strand
ugauagugauggauggacu

SEQ ID NO: 2579463 - RNA, 19 nt, Homo sapiens
  misc_RNA (1)...(19): siRNA sense strand
gcguugaccaagacucaua

SEQ ID NO: 2579464 - RNA, 19 nt, Homo sapiens
  misc_RNA (1)...(19): siRNA sense strand
agcuagagaugcucaagaa

SEQ ID NO: 2579465 - RNA, 19 nt, Homo sapiens
  misc_RNA (1)...(19): siRNA sense strand
gaauaacccagaagaacca

SEQ ID NO: 2579466 - RNA, 19 nt, Homo sapiens
  misc_RNA (1)...(19): siRNA sense strand
uggaggaaauugaacagau

SEQ ID NO: 2579467 - RNA, 19 nt, Homo sapiens
  misc_RNA (1)...(19): siRNA sense strand
ccaugaaaacgaaagaauu

SEQ ID NO: 2579468 - RNA, 19 nt, Homo sapiens
  misc_RNA (1)...(19): siRNA sense strand
gagaaaugguccaagagca

SEQ ID NO: 2579469 - RNA, 19 nt, Homo sapiens
  misc_RNA (1)...(19): siRNA sense strand
ggaugauggacuuggccua

SEQ ID NO: 2579470 - RNA, 19 nt, Homo sapiens
  misc_RNA (1)...(19): siRNA sense strand
aggaauuugugcuggacau

SEQ ID NO: 2579471 - RNA, 19 nt, Homo sapiens
  misc_RNA (1)...(19): siRNA sense strand
gagaagugccguaucgaca

SEQ ID NO: 2579472 - RNA, 19 nt, Homo sapiens
  misc_RNA (1)...(19): siRNA sense strand
ggcuacgacuggugggaca

SEQ ID NO: 2579473 - RNA, 19 nt, Homo sapiens
  misc_RNA (1)...(19): siRNA sense strand
ccaccgaccucaaccgcaa

SEQ ID NO: 2579474 - RNA, 19 nt, Homo sapiens
  misc_RNA (1)...(19): siRNA sense strand
guacagagccugguggaga

SEQ ID NO: 2579475 - RNA, 19 nt, Homo sapiens
  misc_RNA (1)...(19): siRNA sense strand
cggaggaauuugugcugga

SEQ ID NO: 2579476 - RNA, 19 nt, Homo sapiens
  misc_RNA (1)...(19): siRNA sense strand
gggcagaucaagugcugga

SEQ ID NO: 2579477 - RNA, 19 nt, Homo sapiens
  misc_RNA (1)...(19): siRNA sense strand
uggagaagcugcacgagga

SEQ ID NO: 2579478 - RNA, 19 nt, Homo sapiens
  misc_RNA (1)...(19): siRNA sense strand
cgucugugagugggagaaa

SEQ ID NO: 2579479 - RNA, 19 nt, Homo sapiens
  misc_RNA (1)...(19): siRNA sense strand
ggauugacagccacgggaa

SEQ ID NO: 2579480 - RNA, 19 nt, Homo sapiens
  misc_RNA (1)...(19): siRNA sense strand
agaaaugguccaagagcac

SEQ ID NO: 2579481 - RNA, 19 nt, Homo sapiens
  misc_RNA (1)...(19): siRNA sense strand
cuggaguacugcaugguga

SEQ ID NO: 2579482 - RNA, 19 nt, Homo sapiens
  misc_RNA (1)...(19): siRNA sense strand
ugaucaaccucaagacgga

SEQ ID NO: 2579483 - RNA, 19 nt, Homo sapiens
  misc_RNA (1)...(19): siRNA sense strand
gugcugacguccaccgaga

SEQ ID NO: 2579484 - RNA, 19 nt, Homo sapiens
  misc_RNA (1)...(19): siRNA sense strand
agaugaagcccaagauaau

SEQ ID NO: 2579485 - RNA, 19 nt, Homo sapiens
  misc_RNA (1)...(19): siRNA sense strand
aagaggaggaggaggaaau

SEQ ID NO: 2579486 - RNA, 19 nt, Homo sapiens
  misc_RNA (1)...(19): siRNA sense strand
gagcagagaucuuugcaga

SEQ ID NO: 2579487 - RNA, 19 nt, Homo sapiens
  misc_RNA (1)...(19): siRNA sense strand
ccaaugaagaggaggagga

SEQ ID NO: 2579488 - RNA, 19 nt, Homo sapiens
  misc_RNA (1)...(19): siRNA sense strand
ccgaagauuaugaaaugaa

SEQ ID NO: 2579489 - RNA, 19 nt, Homo sapiens
  misc_RNA (1)...(19): siRNA sense strand
cuacugaaauugaaggcuu

SEQ ID NO: 2579490 - RNA, 19 nt, Homo sapiens
  misc_RNA (1)...(19): siRNA sense strand
augaagaggaggaggagga

SEQ ID NO: 2579491 - RNA, 19 nt, Homo sapiens
  misc_RNA (1)...(19): siRNA sense strand
gagccaaacacaaggaagu

SEQ ID NO: 2579492 - RNA, 19 nt, Homo sapiens
  misc_RNA (1)...(19): siRNA sense strand
guaauaacacaguggcaca

SEQ ID NO: 2579493 - RNA, 19 nt, Homo sapiens
  misc_RNA (1)...(19): siRNA sense strand
cagacuugagaaugaaaua

SEQ ID NO: 2579494 - RNA, 19 nt, Homo sapiens
  misc_RNA (1)...(19): siRNA sense strand
ggaggaaauaauagaugau

SEQ ID NO: 2579495 - RNA, 19 nt, Homo sapiens
  misc_RNA (1)...(19): siRNA sense strand
aggaggaggaggaaauaau

SEQ ID NO: 2579496 - RNA, 19 nt, Homo sapiens
  misc_RNA (1)...(19): siRNA sense strand
gagugaaauuuauagcaga

SEQ ID NO: 2579497 - RNA, 19 nt, Homo sapiens
  misc_RNA (1)...(19): siRNA sense strand
cuuuauaagagcagagauc

SEQ ID NO: 2579498 - RNA, 19 nt, Homo sapiens
  misc_RNA (1)...(19): siRNA sense strand
gaaauuuauagcagagcuu

SEQ ID NO: 2579499 - RNA, 19 nt, Homo sapiens
  misc_RNA (1)...(19): siRNA sense strand
ggcaaacaaacguaugaaa

SEQ ID NO: 2579500 - RNA, 19 nt, Homo sapiens
  misc_RNA (1)...(19): siRNA sense strand
guuaaaagcaucucaggua

SEQ ID NO: 2579501 - RNA, 19 nt, Homo sapiens
  misc_RNA (1)...(19): siRNA sense strand
ccaaacacaaggaagugaa

SEQ ID NO: 2579502 - RNA, 19 nt, Homo sapiens
  misc_RNA (1)...(19): siRNA sense strand
uaacaggaaacaaggccaa

SEQ ID NO: 2579503 - RNA, 19 nt, Homo sapiens
  misc_RNA (1)...(19): siRNA sense strand
aguuaauaguagauggaag

SEQ ID NO: 2579504 - RNA, 19 nt, Homo sapiens
  misc_RNA (1)...(19): siRNA sense strand
cagaaucagcagacaccaa

SEQ ID NO: 2579505 - RNA, 19 nt, Homo sapiens
  misc_RNA (1)...(19): siRNA sense strand
cugccgaagauuaugaaau

SEQ ID NO: 2579506 - RNA, 19 nt, Homo sapiens
  misc_RNA (1)...(19): siRNA sense strand
cagagaucuuugcagaaau

SEQ ID NO: 2579507 - RNA, 19 nt, Homo sapiens
  misc_RNA (1)...(19): siRNA sense strand
guuguugaacugagcuuua

SEQ ID NO: 2579508 - RNA, 19 nt, Homo sapiens
  misc_RNA (1)...(19): siRNA sense strand
gaguaauaacacaguggca

SEQ ID NO: 2579509 - RNA, 19 nt, Homo sapiens
  misc_RNA (1)...(19): siRNA sense strand
cauuaauacagaagaugca

SEQ ID NO: 2579510 - RNA, 19 nt, Homo sapiens
  misc_RNA (1)...(19): siRNA sense strand
cgacugguugcaagguuua

SEQ ID NO: 2579511 - RNA, 19 nt, Homo sapiens
  misc_RNA (1)...(19): siRNA sense strand
ucgcacaaagcaugaaauu

SEQ ID NO: 2579512 - RNA, 19 nt, Homo sapiens
  misc_RNA (1)...(19): siRNA sense strand
aauuaaaucagggcaguua

SEQ ID NO: 2579513 - RNA, 19 nt, Homo sapiens
  misc_RNA (1)...(19): siRNA sense strand
aggccaaugaagaggagga

SEQ ID NO: 2579514 - RNA, 19 nt, Homo sapiens
  misc_RNA (1)...(19): siRNA sense strand
gguauuggguauaagguug

SEQ ID NO: 2579515 - RNA, 19 nt, Homo sapiens
  misc_RNA (1)...(19): siRNA sense strand
acucagaacaagccaauga

SEQ ID NO: 2579516 - RNA, 19 nt, Homo sapiens
  misc_RNA (1)...(19): siRNA sense strand
agauggcaguacugaguuu

SEQ ID NO: 2579517 - RNA, 19 nt, Homo sapiens
  misc_RNA (1)...(19): siRNA sense strand
ucccauugucacagguuaa

SEQ ID NO: 2579518 - RNA, 19 nt, Homo sapiens
  misc_RNA (1)...(19): siRNA sense strand
aggagacuuugccgaguaa

SEQ ID NO: 2579519 - RNA, 19 nt, Homo sapiens
  misc_RNA (1)...(19): siRNA sense strand
cagcgagauggcaaacaaa

SEQ ID NO: 2579520 - RNA, 19 nt, Homo sapiens
  misc_RNA (1)...(19): siRNA sense strand
gaugaugguauuggguaua

SEQ ID NO: 2579521 - RNA, 19 nt, Homo sapiens
  misc_RNA (1)...(19): siRNA sense strand
gguugacacuggaaaagaa

SEQ ID NO: 2579522 - RNA, 19 nt, Homo sapiens
  misc_RNA (1)...(19): siRNA sense strand
ugcaaauaucggugaagau

SEQ ID NO: 2579523 - RNA, 19 nt, Homo sapiens
  misc_RNA (1)...(19): siRNA sense strand
cggugaagauacuuaugau

SEQ ID NO: 2579524 - RNA, 19 nt, Homo sapiens
  misc_RNA (1)...(19): siRNA sense strand
uacuaaugauccaggcgua

SEQ ID NO: 2579525 - RNA, 19 nt, Homo sapiens
  misc_RNA (1)...(19): siRNA sense strand
uuagauacagcuacugaaa

SEQ ID NO: 2579526 - RNA, 19 nt, Homo sapiens
  misc_RNA (1)...(19): siRNA sense strand
ugacaagcuugcggagaca

SEQ ID NO: 2579527 - RNA, 19 nt, Homo sapiens
  misc_RNA (1)...(19): siRNA sense strand
acacaguggcacaggucca

SEQ ID NO: 2579528 - RNA, 19 nt, Homo sapiens
  misc_RNA (1)...(19): siRNA sense strand
gcaauaaucucucgcagua

SEQ ID NO: 2579529 - RNA, 19 nt, Homo sapiens
  misc_RNA (1)...(19): siRNA sense strand
cugaugaagcugaaagaga

SEQ ID NO: 2579530 - RNA, 19 nt, Homo sapiens
  misc_RNA (1)...(19): siRNA sense strand
caaacugcaucgaguauuu

SEQ ID NO: 2579531 - RNA, 19 nt, Homo sapiens
  misc_RNA (1)...(19): siRNA sense strand
gcauuuaccaccugcagaa

SEQ ID NO: 2579532 - RNA, 19 nt, Homo sapiens
  misc_RNA (1)...(19): siRNA sense strand
gggagaacuuugagauccu

SEQ ID NO: 2579533 - RNA, 19 nt, Homo sapiens
  misc_RNA (1)...(19): siRNA sense strand
acuuugagauccugaugaa

SEQ ID NO: 2579534 - RNA, 19 nt, Homo sapiens
  misc_RNA (1)...(19): siRNA sense strand
cccaaggguuacagagcau

SEQ ID NO: 2579535 - RNA, 19 nt, Homo sapiens
  misc_RNA (1)...(19): siRNA sense strand
ugaagaaacucuacugcca

SEQ ID NO: 2579536 - RNA, 19 nt, Homo sapiens
  misc_RNA (1)...(19): siRNA sense strand
ccgaaaagcugaugaggac

SEQ ID NO: 2579537 - RNA, 19 nt, Homo sapiens
  misc_RNA (1)...(19): siRNA sense strand
gagaugagcagcagccaca

SEQ ID NO: 2579538 - RNA, 19 nt, Homo sapiens
  misc_RNA (1)...(19): siRNA sense strand
gggccaugccuguuuacaa

SEQ ID NO: 2579539 - RNA, 19 nt, Homo sapiens
  misc_RNA (1)...(19): siRNA sense strand
gagacgaggacacguacua

SEQ ID NO: 2579540 - RNA, 19 nt, Homo sapiens
  misc_RNA (1)...(19): siRNA sense strand
acaagaaagcggagcacgu

SEQ ID NO: 2579541 - RNA, 19 nt, Homo sapiens
  misc_RNA (1)...(19): siRNA sense strand
ucacggaggccgagaucca

SEQ ID NO: 2579542 - RNA, 19 nt, Homo sapiens
  misc_RNA (1)...(19): siRNA sense strand
ccgcacaguucggcagcua

SEQ ID NO: 2579543 - RNA, 19 nt, Homo sapiens
  misc_RNA (1)...(19): siRNA sense strand
ccaccauccuguacaacuu

SEQ ID NO: 2579544 - RNA, 19 nt, Homo sapiens
  misc_RNA (1)...(19): siRNA sense strand
gccuggagcugauggaguu

SEQ ID NO: 2579545 - RNA, 19 nt, Homo sapiens
  misc_RNA (1)...(19): siRNA sense strand
ucauggaggccgugcacuu

SEQ ID NO: 2579546 - RNA, 19 nt, Homo sapiens
  misc_RNA (1)...(19): siRNA sense strand
gcaagaaggugcugaggga

SEQ ID NO: 2579547 - RNA, 19 nt, Homo sapiens
  misc_RNA (1)...(19): siRNA sense strand
ccuacaagugucagagcaa

SEQ ID NO: 2579548 - RNA, 19 nt, Homo sapiens
  misc_RNA (1)...(19): siRNA sense strand
gagaaggaggagaaggaga

SEQ ID NO: 2579549 - RNA, 19 nt, Homo sapiens
  misc_RNA (1)...(19): siRNA sense strand
aggcaggagcuaagggaca

SEQ ID NO: 2579550 - RNA, 19 nt, Homo sapiens
  misc_RNA (1)...(19): siRNA sense strand
agacagagacgucgggcau

SEQ ID NO: 2579551 - RNA, 19 nt, Homo sapiens
  misc_RNA (1)...(19): siRNA sense strand
cgacaggcggagggagaaa

SEQ ID NO: 2579552 - RNA, 19 nt, Homo sapiens
  misc_RNA (1)...(19): siRNA sense strand
cggagacugucaagcgcua

SEQ ID NO: 2579553 - RNA, 19 nt, Homo sapiens
  misc_RNA (1)...(19): siRNA sense strand
agggaaaacuggagcagga

SEQ ID NO: 2579554 - RNA, 19 nt, Homo sapiens
  misc_RNA (1)...(19): siRNA sense strand
uugagaaggaggagaagga

SEQ ID NO: 2579555 - RNA, 19 nt, Homo sapiens
  misc_RNA (1)...(19): siRNA sense strand
ccgugggcaugcugcguaa

SEQ ID NO: 2579556 - RNA, 19 nt, Homo sapiens
  misc_RNA (1)...(19): siRNA sense strand
cggcaaggaggcagagaag

SEQ ID NO: 2579557 - RNA, 19 nt, Homo sapiens
  misc_RNA (1)...(19): siRNA sense strand
gcggcaaggaggcagagaa

SEQ ID NO: 2579558 - RNA, 19 nt, Homo sapiens
  misc_RNA (1)...(19): siRNA sense strand
gacgauagcuucagccuca

SEQ ID NO: 2579559 - RNA, 19 nt, Homo sapiens
  misc_RNA (1)...(19): siRNA sense strand
aggccuugcuggcggugaa

SEQ ID NO: 2579560 - RNA, 19 nt, Homo sapiens
  misc_RNA (1)...(19): siRNA sense strand
uggccuugcacgagcacua

SEQ ID NO: 2579561 - RNA, 19 nt, Homo sapiens
  misc_RNA (1)...(19): siRNA sense strand
acgagcagcuggugaggca

SEQ ID NO: 2579562 - RNA, 19 nt, Homo sapiens
  misc_RNA (1)...(19): siRNA sense strand
cggagaacuacgugcagga

SEQ ID NO: 2579563 - RNA, 19 nt, Homo sapiens
  misc_RNA (1)...(19): siRNA sense strand
gaucacaacugucugcaga

SEQ ID NO: 2579564 - RNA, 19 nt, Homo sapiens
  misc_RNA (1)...(19): siRNA sense strand
acuccaagcacaagaugau

SEQ ID NO: 2579565 - RNA, 19 nt, Homo sapiens
  misc_RNA (1)...(19): siRNA sense strand
cgcuggagcaccuggagaa

SEQ ID NO: 2579566 - RNA, 19 nt, Homo sapiens
  misc_RNA (1)...(19): siRNA sense strand
acgcaguucucgaugcaga

SEQ ID NO: 2579567 - RNA, 19 nt, Homo sapiens
  misc_RNA (1)...(19): siRNA sense strand
cacacagcacagagaacaa

SEQ ID NO: 2579568 - RNA, 19 nt, Homo sapiens
  misc_RNA (1)...(19): siRNA sense strand
agagcuacgugaagcgcuu

SEQ ID NO: 2579569 - RNA, 19 nt, Homo sapiens
  misc_RNA (1)...(19): siRNA sense strand
gccugaccaucgugagcaa

SEQ ID NO: 2579570 - RNA, 19 nt, Homo sapiens
  misc_RNA (1)...(19): siRNA sense strand
uggaggaacuggaccggga

SEQ ID NO: 2579571 - RNA, 19 nt, Homo sapiens
  misc_RNA (1)...(19): siRNA sense strand
ccuggagggccgacaucaa

SEQ ID NO: 2579572 - RNA, 19 nt, Homo sapiens
  misc_RNA (1)...(19): siRNA sense strand
aaagaugaguggaggggaa

SEQ ID NO: 2579573 - RNA, 19 nt, Homo sapiens
  misc_RNA (1)...(19): siRNA sense strand
augaugaagaagaggacau

SEQ ID NO: 2579574 - RNA, 19 nt, Homo sapiens
  misc_RNA (1)...(19): siRNA sense strand
caggagaaguuguggacag

SEQ ID NO: 2579575 - RNA, 19 nt, Homo sapiens
  misc_RNA (1)...(19): siRNA sense strand
cagaaagggaaccaggaga

SEQ ID NO: 2579576 - RNA, 19 nt, Homo sapiens
  misc_RNA (1)...(19): siRNA sense strand
uggcaaagcaguggaacau

SEQ ID NO: 2579577 - RNA, 19 nt, Homo sapiens
  misc_RNA (1)...(19): siRNA sense strand
aggcaaacaaguggaauau

SEQ ID NO: 2579578 - RNA, 19 nt, Homo sapiens
  misc_RNA (1)...(19): siRNA sense strand
gggaauggucuuagcacgu

SEQ ID NO: 2579579 - RNA, 19 nt, Homo sapiens
  misc_RNA (1)...(19): siRNA sense strand
uguuuauggacuagaacuu

SEQ ID NO: 2579580 - RNA, 19 nt, Homo sapiens
  misc_RNA (1)...(19): siRNA sense strand
uuggcaaagcaguggaaca

SEQ ID NO: 2579581 - RNA, 19 nt, Homo sapiens
  misc_RNA (1)...(19): siRNA sense strand
uggcauggucauucaucaa

SEQ ID NO: 2579582 - RNA, 19 nt, Homo sapiens
  misc_RNA (1)...(19): siRNA sense strand
ggucuuagcacgugcaccu

SEQ ID NO: 2579583 - RNA, 19 nt, Homo sapiens
  misc_RNA (1)...(19): siRNA sense strand
gagaaguuguggacagccu

SEQ ID NO: 2579584 - RNA, 19 nt, Homo sapiens
  misc_RNA (1)...(19): siRNA sense strand
cagcauggguggaaagagg

SEQ ID NO: 2579585 - RNA, 19 nt, Homo sapiens
  misc_RNA (1)...(19): siRNA sense strand
gggauaaagagaagcuaau

SEQ ID NO: 2579586 - RNA, 19 nt, Homo sapiens
  misc_RNA (1)...(19): siRNA sense strand
augcagugcuggagugaau

SEQ ID NO: 2579587 - RNA, 19 nt, Homo sapiens
  misc_RNA (1)...(19): siRNA sense strand
uggaagaaggcauggguca

SEQ ID NO: 2579588 - RNA, 19 nt, Homo sapiens
  misc_RNA (1)...(19): siRNA sense strand
augagcaggaggaggauua

SEQ ID NO: 2579589 - RNA, 19 nt, Homo sapiens
  misc_RNA (1)...(19): siRNA sense strand
gugauaucuuaguggauga

SEQ ID NO: 2579590 - RNA, 19 nt, Homo sapiens
  misc_RNA (1)...(19): siRNA sense strand
auaaugaggaugaugcaaa

SEQ ID NO: 2579591 - RNA, 19 nt, Homo sapiens
  misc_RNA (1)...(19): siRNA sense strand
augcaaaggcagcaagaga

SEQ ID NO: 2579592 - RNA, 19 nt, Homo sapiens
  misc_RNA (1)...(19): siRNA sense strand
aaauaauggaagaaggcau

SEQ ID NO: 2579593 - RNA, 19 nt, Homo sapiens
  misc_RNA (1)...(19): siRNA sense strand
agcagaaaguacaagacaa

SEQ ID NO: 2579594 - RNA, 19 nt, Homo sapiens
  misc_RNA (1)...(19): siRNA sense strand
ugggauaaagagaagcuaa

SEQ ID NO: 2579595 - RNA, 19 nt, Homo sapiens
  misc_RNA (1)...(19): siRNA sense strand
ccagaugaauacaagguca

SEQ ID NO: 2579596 - RNA, 19 nt, Homo sapiens
  misc_RNA (1)...(19): siRNA sense strand
cggacgagggcuacaacua

SEQ ID NO: 2579597 - RNA, 19 nt, Homo sapiens
  misc_RNA (1)...(19): siRNA sense strand
guccauuaucuuugagaau

SEQ ID NO: 2579598 - RNA, 19 nt, Homo sapiens
  misc_RNA (1)...(19): siRNA sense strand
aggaggaggaggacgaaga

SEQ ID NO: 2579599 - RNA, 19 nt, Homo sapiens
  misc_RNA (1)...(19): siRNA sense strand
cuaccaaaauaauggaaga

SEQ ID NO: 2579600 - RNA, 19 nt, Homo sapiens
  misc_RNA (1)...(19): siRNA sense strand
aggagaugcagcagcacaa

SEQ ID NO: 2579601 - RNA, 19 nt, Homo sapiens
  misc_RNA (1)...(19): siRNA sense strand
gggaguacauugaggacug

SEQ ID NO: 2579602 - RNA, 19 nt, Homo sapiens
  misc_RNA (1)...(19): siRNA sense strand
uggagaagcucuuugcuga

SEQ ID NO: 2579603 - RNA, 19 nt, Homo sapiens
  misc_RNA (1)...(19): siRNA sense strand
ccauguuguuaaaguccaa

SEQ ID NO: 2579604 - RNA, 19 nt, Homo sapiens
  misc_RNA (1)...(19): siRNA sense strand
cgggcuaccuugaacgaga

SEQ ID NO: 2579605 - RNA, 19 nt, Homo sapiens
  misc_RNA (1)...(19): siRNA sense strand
cuaccuugaacgagauauu

SEQ ID NO: 2579606 - RNA, 19 nt, Homo sapiens
  misc_RNA (1)...(19): siRNA sense strand
ggcaugagcaggaggagga

SEQ ID NO: 2579607 - RNA, 19 nt, Homo sapiens
  misc_RNA (1)...(19): siRNA sense strand
auaucuuaguggaugacaa

SEQ ID NO: 2579608 - RNA, 19 nt, Homo sapiens
  misc_RNA (1)...(19): siRNA sense strand
ugcuuuaacuguggagaaa

SEQ ID NO: 2579609 - RNA, 19 nt, Homo sapiens
  misc_RNA (1)...(19): siRNA sense strand
ugugaugaugacagugaaa

SEQ ID NO: 2579610 - RNA, 19 nt, Homo sapiens
  misc_RNA (1)...(19): siRNA sense strand
acuauaugcucaggugaaa

SEQ ID NO: 2579611 - RNA, 19 nt, Homo sapiens
  misc_RNA (1)...(19): siRNA sense strand
aggugcaguuccugaagaa

SEQ ID NO: 2579612 - RNA, 19 nt, Homo sapiens
  misc_RNA (1)...(19): siRNA sense strand
caagaauacuccuuagcca

SEQ ID NO: 2579613 - RNA, 19 nt, Homo sapiens
  misc_RNA (1)...(19): siRNA sense strand
cuuuaacuguggagaaaau

SEQ ID NO: 2579614 - RNA, 19 nt, Homo sapiens
  misc_RNA (1)...(19): siRNA sense strand
aggaggaggauuaccgcua

SEQ ID NO: 2579615 - RNA, 19 nt, Homo sapiens
  misc_RNA (1)...(19): siRNA sense strand
acgacgagccggacgauga

SEQ ID NO: 2579616 - RNA, 19 nt, Homo sapiens
  misc_RNA (1)...(19): siRNA sense strand
auggaaaccuggagaagcu

SEQ ID NO: 2579617 - RNA, 19 nt, Homo sapiens
  misc_RNA (1)...(19): siRNA sense strand
aggaggaggacgaagacga

SEQ ID NO: 2579618 - RNA, 19 nt, Homo sapiens
  misc_RNA (1)...(19): siRNA sense strand
cacaaaggaaugucccaaa

SEQ ID NO: 2579619 - RNA, 19 nt, Homo sapiens
  misc_RNA (1)...(19): siRNA sense strand
uugcuuuaacuguggagaa

SEQ ID NO: 2579620 - RNA, 19 nt, Homo sapiens
  misc_RNA (1)...(19): siRNA sense strand
agaaaauggaggagaugca

SEQ ID NO: 2579621 - RNA, 19 nt, Homo sapiens
  misc_RNA (1)...(19): siRNA sense strand
ugagaauaaccaagcagau

SEQ ID NO: 2579622 - RNA, 19 nt, Homo sapiens
  misc_RNA (1)...(19): siRNA sense strand
gcagccaacacaaaggaau

SEQ ID NO: 2579623 - RNA, 19 nt, Homo sapiens
  misc_RNA (1)...(19): siRNA sense strand
caacgaggucauccagaau

SEQ ID NO: 2579624 - RNA, 19 nt, Homo sapiens
  misc_RNA (1)...(19): siRNA sense strand
cugagugucauguaauuaa

SEQ ID NO: 2579625 - RNA, 19 nt, Homo sapiens
  misc_RNA (1)...(19): siRNA sense strand
gcaugauccuguuaaaugu

SEQ ID NO: 2579626 - RNA, 19 nt, Homo sapiens
  misc_RNA (1)...(19): siRNA sense strand
cgugagagccggaagcaca

SEQ ID NO: 2579627 - RNA, 19 nt, Homo sapiens
  misc_RNA (1)...(19): siRNA sense strand
augaaaagcucguccgcua

SEQ ID NO: 2579628 - RNA, 19 nt, Homo sapiens
  misc_RNA (1)...(19): siRNA sense strand
aagaaugccaugagagcca

SEQ ID NO: 2579629 - RNA, 19 nt, Homo sapiens
  misc_RNA (1)...(19): siRNA sense strand
ccggaagcacauagaggau

SEQ ID NO: 2579630 - RNA, 19 nt, Homo sapiens
  misc_RNA (1)...(19): siRNA sense strand
agaccgugguggaggaauc

SEQ ID NO: 2579631 - RNA, 19 nt, Homo sapiens
  misc_RNA (1)...(19): siRNA sense strand
cgaucaaggaccaggcgga

SEQ ID NO: 2579632 - RNA, 19 nt, Homo sapiens
  misc_RNA (1)...(19): siRNA sense strand
uggcgcugcaugaggacaa

SEQ ID NO: 2579633 - RNA, 19 nt, Homo sapiens
  misc_RNA (1)...(19): siRNA sense strand
acgaggaggaugaggauaa

SEQ ID NO: 2579634 - RNA, 19 nt, Homo sapiens
  misc_RNA (1)...(19): siRNA sense strand
ugaugaagauggaggaaca

SEQ ID NO: 2579635 - RNA, 19 nt, Homo sapiens
  misc_RNA (1)...(19): siRNA sense strand
guauagaagacguggauga

SEQ ID NO: 2579636 - RNA, 19 nt, Homo sapiens
  misc_RNA (1)...(19): siRNA sense strand
ccgaaaguaaagaaagaua

SEQ ID NO: 2579637 - RNA, 19 nt, Homo sapiens
  misc_RNA (1)...(19): siRNA sense strand
agaccauccuucagggaaa

SEQ ID NO: 2579638 - RNA, 19 nt, Homo sapiens
  misc_RNA (1)...(19): siRNA sense strand
gcagaaagucaaaggacau

SEQ ID NO: 2579639 - RNA, 19 nt, Homo sapiens
  misc_RNA (1)...(19): siRNA sense strand
agaaacagagauagugaaa

SEQ ID NO: 2579640 - RNA, 19 nt, Homo sapiens
  misc_RNA (1)...(19): siRNA sense strand
caaaaggagcuaaggauaa

SEQ ID NO: 2579641 - RNA, 19 nt, Homo sapiens
  misc_RNA (1)...(19): siRNA sense strand
aguaagacgaauagucaaa

SEQ ID NO: 2579642 - RNA, 19 nt, Homo sapiens
  misc_RNA (1)...(19): siRNA sense strand
gagaaaagguacagaugau

SEQ ID NO: 2579643 - RNA, 19 nt, Homo sapiens
  misc_RNA (1)...(19): siRNA sense strand
cuaagaaaagcaagagaaa

SEQ ID NO: 2579644 - RNA, 19 nt, Homo sapiens
  misc_RNA (1)...(19): siRNA sense strand
acaaagaaacagagauagu

SEQ ID NO: 2579645 - RNA, 19 nt, Homo sapiens
  misc_RNA (1)...(19): siRNA sense strand
gccaaauaccaguggauga

SEQ ID NO: 2579646 - RNA, 19 nt, Homo sapiens
  misc_RNA (1)...(19): siRNA sense strand
agaaugaggaagugauaga

SEQ ID NO: 2579647 - RNA, 19 nt, Homo sapiens
  misc_RNA (1)...(19): siRNA sense strand
uaauuugaaaggugggaaa

SEQ ID NO: 2579648 - RNA, 19 nt, Homo sapiens
  misc_RNA (1)...(19): siRNA sense strand
ggaaaggaugauauggauu

SEQ ID NO: 2579649 - RNA, 19 nt, Homo sapiens
  misc_RNA (1)...(19): siRNA sense strand
gaagaaagugaauuggcua

SEQ ID NO: 2579650 - RNA, 19 nt, Homo sapiens
  misc_RNA (1)...(19): siRNA sense strand
aagaaagugaauuggcuaa

SEQ ID NO: 2579651 - RNA, 19 nt, Homo sapiens
  misc_RNA (1)...(19): siRNA sense strand
ugagaaugaggaagugaua

SEQ ID NO: 2579652 - RNA, 19 nt, Homo sapiens
  misc_RNA (1)...(19): siRNA sense strand
aaauacaagucuuugggaa

SEQ ID NO: 2579653 - RNA, 19 nt, Homo sapiens
  misc_RNA (1)...(19): siRNA sense strand
cuacuuuggaugagaauga

SEQ ID NO: 2579654 - RNA, 19 nt, Homo sapiens
  misc_RNA (1)...(19): siRNA sense strand
ccgaggaggcaguagaaga

SEQ ID NO: 2579655 - RNA, 19 nt, Homo sapiens
  misc_RNA (1)...(19): siRNA sense strand
agaagguagugaugaugaa

SEQ ID NO: 2579656 - RNA, 19 nt, Homo sapiens
  misc_RNA (1)...(19): siRNA sense strand
ugguaaauaaacugggaga

SEQ ID NO: 2579657 - RNA, 19 nt, Homo sapiens
  misc_RNA (1)...(19): siRNA sense strand
gcaaaagaagaaagccaaa

SEQ ID NO: 2579658 - RNA, 19 nt, Homo sapiens
  misc_RNA (1)...(19): siRNA sense strand
agauaaugcaagucucaaa

SEQ ID NO: 2579659 - RNA, 19 nt, Homo sapiens
  misc_RNA (1)...(19): siRNA sense strand
aguugcuguuaaagagaaa

SEQ ID NO: 2579660 - RNA, 19 nt, Homo sapiens
  misc_RNA (1)...(19): siRNA sense strand
acaaaaggagcuaaggaua

SEQ ID NO: 2579661 - RNA, 19 nt, Homo sapiens
  misc_RNA (1)...(19): siRNA sense strand
cugagauccuuaaagcaaa

SEQ ID NO: 2579662 - RNA, 19 nt, Homo sapiens
  misc_RNA (1)...(19): siRNA sense strand
ccauaaaggcaaagaaaac

SEQ ID NO: 2579663 - RNA, 19 nt, Homo sapiens
  misc_RNA (1)...(19): siRNA sense strand
ugaagaaaguauagaagac

SEQ ID NO: 2579664 - RNA, 19 nt, Homo sapiens
  misc_RNA (1)...(19): siRNA sense strand
augcaaaugaugaugaaga

SEQ ID NO: 2579665 - RNA, 19 nt, Homo sapiens
  misc_RNA (1)...(19): siRNA sense strand
gaugaugaagacauggaaa

SEQ ID NO: 2579666 - RNA, 19 nt, Homo sapiens
  misc_RNA (1)...(19): siRNA sense strand
agguagugaugaugaacuu

SEQ ID NO: 2579667 - RNA, 19 nt, Homo sapiens
  misc_RNA (1)...(19): siRNA sense strand
cuuaauuuggcgaaguaua

SEQ ID NO: 2579668 - RNA, 19 nt, Homo sapiens
  misc_RNA (1)...(19): siRNA sense strand
augcagaugaagaaaguau

SEQ ID NO: 2579669 - RNA, 19 nt, Homo sapiens
  misc_RNA (1)...(19): siRNA sense strand
uggcaguaccacaccgaaa

SEQ ID NO: 2579670 - RNA, 19 nt, Homo sapiens
  misc_RNA (1)...(19): siRNA sense strand
agcagaaagucaaaggaca

SEQ ID NO: 2579671 - RNA, 19 nt, Homo sapiens
  misc_RNA (1)...(19): siRNA sense strand
aagagauagaagacugaua

SEQ ID NO: 2579672 - RNA, 19 nt, Homo sapiens
  misc_RNA (1)...(19): siRNA sense strand
aguugugucuggugaagua

SEQ ID NO: 2579673 - RNA, 19 nt, Homo sapiens
  misc_RNA (1)...(19): siRNA sense strand
guauggaugaugaagaauu

SEQ ID NO: 2579674 - RNA, 19 nt, Homo sapiens
  misc_RNA (1)...(19): siRNA sense strand
cuaccuggaugaaggcaau

SEQ ID NO: 2579675 - RNA, 19 nt, Homo sapiens
  misc_RNA (1)...(19): siRNA sense strand
acacagcauuauacaggaa

SEQ ID NO: 2579676 - RNA, 19 nt, Homo sapiens
  misc_RNA (1)...(19): siRNA sense strand
auucacugaugcagacaaa

SEQ ID NO: 2579677 - RNA, 19 nt, Homo sapiens
  misc_RNA (1)...(19): siRNA sense strand
uguuagaugaugaaaguga

SEQ ID NO: 2579678 - RNA, 19 nt, Homo sapiens
  misc_RNA (1)...(19): siRNA sense strand
gaugaaggcaauuguguca

SEQ ID NO: 2579679 - RNA, 19 nt, Homo sapiens
  misc_RNA (1)...(19): siRNA sense strand
uugcugaaguugaugaaga

SEQ ID NO: 2579680 - RNA, 19 nt, Homo sapiens
  misc_RNA (1)...(19): siRNA sense strand
uguagaaacucuugugaac

SEQ ID NO: 2579681 - RNA, 19 nt, Homo sapiens
  misc_RNA (1)...(19): siRNA sense strand
aaguaagggagcagauuga

SEQ ID NO: 2579682 - RNA, 19 nt, Homo sapiens
  misc_RNA (1)...(19): siRNA sense strand
uggugaaguagaaaggcua

SEQ ID NO: 2579683 - RNA, 19 nt, Homo sapiens
  misc_RNA (1)...(19): siRNA sense strand
cgaggaggcaguagaagau

SEQ ID NO: 2579684 - RNA, 19 nt, Homo sapiens
  misc_RNA (1)...(19): siRNA sense strand
aagaaaagcaagagaaaag

SEQ ID NO: 2579685 - RNA, 19 nt, Homo sapiens
  misc_RNA (1)...(19): siRNA sense strand
uuaaaugauuccagccuau

SEQ ID NO: 2579686 - RNA, 19 nt, Homo sapiens
  misc_RNA (1)...(19): siRNA sense strand
gcuaacaaagauaaugcaa

SEQ ID NO: 2579687 - RNA, 19 nt, Homo sapiens
  misc_RNA (1)...(19): siRNA sense strand
uggaugagaaugaggaagu

SEQ ID NO: 2579688 - RNA, 19 nt, Homo sapiens
  misc_RNA (1)...(19): siRNA sense strand
gaacaguuguccaguggca

SEQ ID NO: 2579689 - RNA, 19 nt, Homo sapiens
  misc_RNA (1)...(19): siRNA sense strand
cugaauuugugcaggucuu

SEQ ID NO: 2579690 - RNA, 19 nt, Homo sapiens
  misc_RNA (1)...(19): siRNA sense strand
guaaauaaacugggagauc

SEQ ID NO: 2579691 - RNA, 19 nt, Homo sapiens
  misc_RNA (1)...(19): siRNA sense strand
caaaugaugaugaagacau

SEQ ID NO: 2579692 - RNA, 19 nt, Homo sapiens
  misc_RNA (1)...(19): siRNA sense strand
gugaugaugaacuugguaa

SEQ ID NO: 2579693 - RNA, 19 nt, Homo sapiens
  misc_RNA (1)...(19): siRNA sense strand
ucaaaggacaucaguuaau

SEQ ID NO: 2579694 - RNA, 19 nt, Homo sapiens
  misc_RNA (1)...(19): siRNA sense strand
uugugcaagugguaaauaa

SEQ ID NO: 2579695 - RNA, 19 nt, Homo sapiens
  misc_RNA (1)...(19): siRNA sense strand
ucugagauccuuaaagcaa

SEQ ID NO: 2579696 - RNA, 19 nt, Homo sapiens
  misc_RNA (1)...(19): siRNA sense strand
ggacgaggaggaugaggau

SEQ ID NO: 2579697 - RNA, 19 nt, Homo sapiens
  misc_RNA (1)...(19): siRNA sense strand
ggacagaagucaaugccuu

SEQ ID NO: 2579698 - RNA, 19 nt, Homo sapiens
  misc_RNA (1)...(19): siRNA sense strand
cccaaucagcucagggcaa

SEQ ID NO: 2579699 - RNA, 19 nt, Homo sapiens
  misc_RNA (1)...(19): siRNA sense strand
ugagagacaaggauggaga

SEQ ID NO: 2579700 - RNA, 19 nt, Homo sapiens
  misc_RNA (1)...(19): siRNA sense strand
cgauaaaguaccugagaac

SEQ ID NO: 2579701 - RNA, 19 nt, Homo sapiens
  misc_RNA (1)...(19): siRNA sense strand
gggugaacacuuuggaaca

SEQ ID NO: 2579702 - RNA, 19 nt, Homo sapiens
  misc_RNA (1)...(19): siRNA sense strand
cugcacaugaugaagauaa

SEQ ID NO: 2579703 - RNA, 19 nt, Homo sapiens
  misc_RNA (1)...(19): siRNA sense strand
acuaaagacaugacuggaa

SEQ ID NO: 2579704 - RNA, 19 nt, Homo sapiens
  misc_RNA (1)...(19): siRNA sense strand
cuguaucaccuuagaaaga

SEQ ID NO: 2579705 - RNA, 19 nt, Homo sapiens
  misc_RNA (1)...(19): siRNA sense strand
cagaaaguacugaagccua

SEQ ID NO: 2579706 - RNA, 19 nt, Homo sapiens
  misc_RNA (1)...(19): siRNA sense strand
ucucugaggaugugauaau

SEQ ID NO: 2579707 - RNA, 19 nt, Homo sapiens
  misc_RNA (1)...(19): siRNA sense strand
cuggaaaagaagauguaua

SEQ ID NO: 2579708 - RNA, 19 nt, Homo sapiens
  misc_RNA (1)...(19): siRNA sense strand
ccaugugagagguccgaua

SEQ ID NO: 2579709 - RNA, 19 nt, Homo sapiens
  misc_RNA (1)...(19): siRNA sense strand
augaguaugugcuggaaga

SEQ ID NO: 2579710 - RNA, 19 nt, Homo sapiens
  misc_RNA (1)...(19): siRNA sense strand
ugggaagaggugggagaua

SEQ ID NO: 2579711 - RNA, 19 nt, Homo sapiens
  misc_RNA (1)...(19): siRNA sense strand
cuugggaagaggugggaga

SEQ ID NO: 2579712 - RNA, 19 nt, Homo sapiens
  misc_RNA (1)...(19): siRNA sense strand
gugguuaagcgcuggauca

SEQ ID NO: 2579713 - RNA, 19 nt, Homo sapiens
  misc_RNA (1)...(19): siRNA sense strand
guaucaccuuagaaagaau

SEQ ID NO: 2579714 - RNA, 19 nt, Homo sapiens
  misc_RNA (1)...(19): siRNA sense strand
guuuccaagauguugaaua

SEQ ID NO: 2579715 - RNA, 19 nt, Homo sapiens
  misc_RNA (1)...(19): siRNA sense strand
acaagaaggacgaggaguc

SEQ ID NO: 2579716 - RNA, 19 nt, Homo sapiens
  misc_RNA (1)...(19): siRNA sense strand
acuaaaagaaacugaggau

SEQ ID NO: 2579717 - RNA, 19 nt, Homo sapiens
  misc_RNA (1)...(19): siRNA sense strand
guaccugagaacaagaauu

SEQ ID NO: 2579718 - RNA, 19 nt, Homo sapiens
  misc_RNA (1)...(19): siRNA sense strand
ggcuaugauuuauugguga

SEQ ID NO: 2579719 - RNA, 19 nt, Homo sapiens
  misc_RNA (1)...(19): siRNA sense strand
caggaucaccgauggaaca

SEQ ID NO: 2579720 - RNA, 19 nt, Homo sapiens
  misc_RNA (1)...(19): siRNA sense strand
ccauugaaagauacaugaa

SEQ ID NO: 2579721 - RNA, 19 nt, Homo sapiens
  misc_RNA (1)...(19): siRNA sense strand
ccuuagaaagaaugaucga

SEQ ID NO: 2579722 - RNA, 19 nt, Homo sapiens
  misc_RNA (1)...(19): siRNA sense strand
cgauaaaguaccugagaac

SEQ ID NO: 2579723 - RNA, 19 nt, Homo sapiens
  misc_RNA (1)...(19): siRNA sense strand
gggugaacacuuuggaaca

SEQ ID NO: 2579724 - RNA, 19 nt, Homo sapiens
  misc_RNA (1)...(19): siRNA sense strand
cugcacaugaugaagauaa

SEQ ID NO: 2579725 - RNA, 19 nt, Homo sapiens
  misc_RNA (1)...(19): siRNA sense strand
acuaaagacaugacuggaa

SEQ ID NO: 2579726 - RNA, 19 nt, Homo sapiens
  misc_RNA (1)...(19): siRNA sense strand
cuguaucaccuuagaaaga

SEQ ID NO: 2579727 - RNA, 19 nt, Homo sapiens
  misc_RNA (1)...(19): siRNA sense strand
cagaaaguacugaagccua

SEQ ID NO: 2579728 - RNA, 19 nt, Homo sapiens
  misc_RNA (1)...(19): siRNA sense strand
ucucugaggaugugauaau

SEQ ID NO: 2579729 - RNA, 19 nt, Homo sapiens
  misc_RNA (1)...(19): siRNA sense strand
cuggaaaagaagauguaua

SEQ ID NO: 2579730 - RNA, 19 nt, Homo sapiens
  misc_RNA (1)...(19): siRNA sense strand
ccaugugagagguccgaua

SEQ ID NO: 2579731 - RNA, 19 nt, Homo sapiens
  misc_RNA (1)...(19): siRNA sense strand
augaguaugugcuggaaga

SEQ ID NO: 2579732 - RNA, 19 nt, Homo sapiens
  misc_RNA (1)...(19): siRNA sense strand
ugggaagaggugggagaua

SEQ ID NO: 2579733 - RNA, 19 nt, Homo sapiens
  misc_RNA (1)...(19): siRNA sense strand
cuugggaagaggugggaga

SEQ ID NO: 2579734 - RNA, 19 nt, Homo sapiens
  misc_RNA (1)...(19): siRNA sense strand
gugguuaagcgcuggauca

SEQ ID NO: 2579735 - RNA, 19 nt, Homo sapiens
  misc_RNA (1)...(19): siRNA sense strand
guaucaccuuagaaagaau

SEQ ID NO: 2579736 - RNA, 19 nt, Homo sapiens
  misc_RNA (1)...(19): siRNA sense strand
guuuccaagauguugaaua

SEQ ID NO: 2579737 - RNA, 19 nt, Homo sapiens
  misc_RNA (1)...(19): siRNA sense strand
acaagaaggacgaggaguc

SEQ ID NO: 2579738 - RNA, 19 nt, Homo sapiens
  misc_RNA (1)...(19): siRNA sense strand
acuaaaagaaacugaggau

SEQ ID NO: 2579739 - RNA, 19 nt, Homo sapiens
  misc_RNA (1)...(19): siRNA sense strand
guaccugagaacaagaauu

SEQ ID NO: 2579740 - RNA, 19 nt, Homo sapiens
  misc_RNA (1)...(19): siRNA sense strand
ggcuaugauuuauugguga

SEQ ID NO: 2579741 - RNA, 19 nt, Homo sapiens
  misc_RNA (1)...(19): siRNA sense strand
caggaucaccgauggaaca

SEQ ID NO: 2579742 - RNA, 19 nt, Homo sapiens
  misc_RNA (1)...(19): siRNA sense strand
ccauugaaagauacaugaa

SEQ ID NO: 2579743 - RNA, 19 nt, Homo sapiens
  misc_RNA (1)...(19): siRNA sense strand
ccuuagaaagaaugaucga

SEQ ID NO: 2579744 - RNA, 19 nt, Homo sapiens
  misc_RNA (1)...(19): siRNA sense strand
gcauauugucagaaggaag

SEQ ID NO: 2579745 - RNA, 19 nt, Homo sapiens
  misc_RNA (1)...(19): siRNA sense strand
uagcauuugaugagcugaa

SEQ ID NO: 2579746 - RNA, 19 nt, Homo sapiens
  misc_RNA (1)...(19): siRNA sense strand
aggagaaggagcagaccaa

SEQ ID NO: 2579747 - RNA, 19 nt, Homo sapiens
  misc_RNA (1)...(19): siRNA sense strand
ugaaggaagaagaagaaaa

SEQ ID NO: 2579748 - RNA, 19 nt, Homo sapiens
  misc_RNA (1)...(19): siRNA sense strand
aggaagaagaagaaaagaa

SEQ ID NO: 2579749 - RNA, 19 nt, Homo sapiens
  misc_RNA (1)...(19): siRNA sense strand
gcacaaggagagaaggcca

SEQ ID NO: 2579750 - RNA, 19 nt, Homo sapiens
  misc_RNA (1)...(19): siRNA sense strand
gguacaagucagacaucuu

SEQ ID NO: 2579751 - RNA, 19 nt, Homo sapiens
  misc_RNA (1)...(19): siRNA sense strand
gagaagcagcaaagagcca

SEQ ID NO: 2579752 - RNA, 19 nt, Homo sapiens
  misc_RNA (1)...(19): siRNA sense strand
gaaauuaagcaguggucac

SEQ ID NO: 2579753 - RNA, 19 nt, Homo sapiens
  misc_RNA (1)...(19): siRNA sense strand
aacaagaagcacaaggaga

SEQ ID NO: 2579754 - RNA, 19 nt, Homo sapiens
  misc_RNA (1)...(19): siRNA sense strand
gagaaggagcagaccaacu

SEQ ID NO: 2579755 - RNA, 19 nt, Homo sapiens
  misc_RNA (1)...(19): siRNA sense strand
cgggugaagccuggaaauu

SEQ ID NO: 2579756 - RNA, 19 nt, Homo sapiens
  misc_RNA (1)...(19): siRNA sense strand
cagcagaagaaguaguuac

SEQ ID NO: 2579757 - RNA, 19 nt, Homo sapiens
  misc_RNA (1)...(19): siRNA sense strand
acagaaagaagcaagggua

SEQ ID NO: 2579758 - RNA, 19 nt, Homo sapiens
  misc_RNA (1)...(19): siRNA sense strand
cugccucaguggagaguau

SEQ ID NO: 2579759 - RNA, 19 nt, Homo sapiens
  misc_RNA (1)...(19): siRNA sense strand
aagcauaccuucugggaac

SEQ ID NO: 2579760 - RNA, 19 nt, Homo sapiens
  misc_RNA (1)...(19): siRNA sense strand
aagcgaagaaauacgacaa

SEQ ID NO: 2579761 - RNA, 19 nt, Homo sapiens
  misc_RNA (1)...(19): siRNA sense strand
cagaaagaagcaaggguac

SEQ ID NO: 2579762 - RNA, 19 nt, Homo sapiens
  misc_RNA (1)...(19): siRNA sense strand
agaaagaagcaaggguaca

SEQ ID NO: 2579763 - RNA, 19 nt, Homo sapiens
  misc_RNA (1)...(19): siRNA sense strand
cauccacauaggucagaaa

SEQ ID NO: 2579764 - RNA, 19 nt, Homo sapiens
  misc_RNA (1)...(19): siRNA sense strand
guacagauauccagugccu

SEQ ID NO: 2579765 - RNA, 19 nt, Homo sapiens
  misc_RNA (1)...(19): siRNA sense strand
ccacaacccuucugccuca

SEQ ID NO: 2579766 - RNA, 19 nt, Homo sapiens
  misc_RNA (1)...(19): siRNA sense strand
gaaacaaggcagauggagu

SEQ ID NO: 2579767 - RNA, 19 nt, Homo sapiens
  misc_RNA (1)...(19): siRNA sense strand
gggaacagauggaagguac

SEQ ID NO: 2579768 - RNA, 19 nt, Homo sapiens
  misc_RNA (1)...(19): siRNA sense strand
agaaugugcccgaggagga

SEQ ID NO: 2579769 - RNA, 19 nt, Homo sapiens
  misc_RNA (1)...(19): siRNA sense strand
augagaaugccuaugagaa

SEQ ID NO: 2579770 - RNA, 19 nt, Homo sapiens
  misc_RNA (1)...(19): siRNA sense strand
ggaagaaagaugaggcuga

SEQ ID NO: 2579771 - RNA, 19 nt, Homo sapiens
  misc_RNA (1)...(19): siRNA sense strand
gggagaaacagaagggaag

SEQ ID NO: 2579772 - RNA, 19 nt, Homo sapiens
  misc_RNA (1)...(19): siRNA sense strand
cggacaugccagaggagau

SEQ ID NO: 2579773 - RNA, 19 nt, Homo sapiens
  misc_RNA (1)...(19): siRNA sense strand
agaugaucaaagagacaau

SEQ ID NO: 2579774 - RNA, 19 nt, Homo sapiens
  misc_RNA (1)...(19): siRNA sense strand
gauuauaagcgacugcaga

SEQ ID NO: 2579775 - RNA, 19 nt, Homo sapiens
  misc_RNA (1)...(19): siRNA sense strand
ccucuaagaaagaaagaaa

SEQ ID NO: 2579776 - RNA, 19 nt, Homo sapiens
  misc_RNA (1)...(19): siRNA sense strand
gugccggaagcgagagcua

SEQ ID NO: 2579777 - RNA, 19 nt, Homo sapiens
  misc_RNA (1)...(19): siRNA sense strand
gguaccuagaaguggacua

SEQ ID NO: 2579778 - RNA, 19 nt, Homo sapiens
  misc_RNA (1)...(19): siRNA sense strand
aacuauaccauaagagaca

SEQ ID NO: 2579779 - RNA, 19 nt, Homo sapiens
  misc_RNA (1)...(19): siRNA sense strand
aagaagagugcucggcgua

SEQ ID NO: 2579780 - RNA, 19 nt, Homo sapiens
  misc_RNA (1)...(19): siRNA sense strand
gcaaaagugaggcagacaa

SEQ ID NO: 2579781 - RNA, 19 nt, Homo sapiens
  misc_RNA (1)...(19): siRNA sense strand
acuggugguaagagaaauu

SEQ ID NO: 2579782 - RNA, 19 nt, Homo sapiens
  misc_RNA (1)...(19): siRNA sense strand
acuucaaaugacagugcaa

SEQ ID NO: 2579783 - RNA, 19 nt, Homo sapiens
  misc_RNA (1)...(19): siRNA sense strand
uguggaaacaaaucagcaa

SEQ ID NO: 2579784 - RNA, 19 nt, Homo sapiens
  misc_RNA (1)...(19): siRNA sense strand
gguaaugugcagagugaaa

SEQ ID NO: 2579785 - RNA, 19 nt, Homo sapiens
  misc_RNA (1)...(19): siRNA sense strand
agggauaaccugagaaaga

SEQ ID NO: 2579786 - RNA, 19 nt, Homo sapiens
  misc_RNA (1)...(19): siRNA sense strand
gggaaagaucacaaagauu

SEQ ID NO: 2579787 - RNA, 19 nt, Homo sapiens
  misc_RNA (1)...(19): siRNA sense strand
augugaaggcuguggauua

SEQ ID NO: 2579788 - RNA, 19 nt, Homo sapiens
  misc_RNA (1)...(19): siRNA sense strand
ccauaaacgcugugcauca

SEQ ID NO: 2579789 - RNA, 19 nt, Homo sapiens
  misc_RNA (1)...(19): siRNA sense strand
cauuacaccagcagggaua

SEQ ID NO: 2579790 - RNA, 19 nt, Homo sapiens
  misc_RNA (1)...(19): siRNA sense strand
cgcccaaucuggauggaaa

SEQ ID NO: 2579791 - RNA, 19 nt, Homo sapiens
  misc_RNA (1)...(19): siRNA sense strand
ccacaaaacaagaaaguca

SEQ ID NO: 2579792 - RNA, 19 nt, Homo sapiens
  misc_RNA (1)...(19): siRNA sense strand
gcuaaugaggguuguacaa

SEQ ID NO: 2579793 - RNA, 19 nt, Homo sapiens
  misc_RNA (1)...(19): siRNA sense strand
gaugaugcucgcugggaaa

SEQ ID NO: 2579794 - RNA, 19 nt, Homo sapiens
  misc_RNA (1)...(19): siRNA sense strand
ccaaauaacuguaguggag

SEQ ID NO: 2579795 - RNA, 19 nt, Homo sapiens
  misc_RNA (1)...(19): siRNA sense strand
acaaagaggaagagcagca

SEQ ID NO: 2579796 - RNA, 19 nt, Homo sapiens
  misc_RNA (1)...(19): siRNA sense strand
augaaauacaugaaggaga

SEQ ID NO: 2579797 - RNA, 19 nt, Homo sapiens
  misc_RNA (1)...(19): siRNA sense strand
uggaaaagcugcauggaga

SEQ ID NO: 2579798 - RNA, 19 nt, Homo sapiens
  misc_RNA (1)...(19): siRNA sense strand
uggcuugaccuuagagaau

SEQ ID NO: 2579799 - RNA, 19 nt, Homo sapiens
  misc_RNA (1)...(19): siRNA sense strand
cgauguggaaagagaugaa

SEQ ID NO: 2579800 - RNA, 19 nt, Homo sapiens
  misc_RNA (1)...(19): siRNA sense strand
ugguauacuucguugguga

SEQ ID NO: 2579801 - RNA, 19 nt, Homo sapiens
  misc_RNA (1)...(19): siRNA sense strand
ggaggaaaacauagaaaga

SEQ ID NO: 2579802 - RNA, 19 nt, Homo sapiens
  misc_RNA (1)...(19): siRNA sense strand
auggagauauguuggaaau

SEQ ID NO: 2579803 - RNA, 19 nt, Homo sapiens
  misc_RNA (1)...(19): siRNA sense strand
acguuacaguguugacaaa

SEQ ID NO: 2579804 - RNA, 19 nt, Homo sapiens
  misc_RNA (1)...(19): siRNA sense strand
gcacaauggugaaggaagg

SEQ ID NO: 2579805 - RNA, 19 nt, Homo sapiens
  misc_RNA (1)...(19): siRNA sense strand
caucguuuauggaggaaaa

SEQ ID NO: 2579806 - RNA, 19 nt, Homo sapiens
  misc_RNA (1)...(19): siRNA sense strand
ccuuagagaauuugaaacu

SEQ ID NO: 2579807 - RNA, 19 nt, Homo sapiens
  misc_RNA (1)...(19): siRNA sense strand
gagaugaagaagccguuaa

SEQ ID NO: 2579808 - RNA, 19 nt, Homo sapiens
  misc_RNA (1)...(19): siRNA sense strand
gcuugaccuuagagaauuu

SEQ ID NO: 2579809 - RNA, 19 nt, Homo sapiens
  misc_RNA (1)...(19): siRNA sense strand
aaggagaccuaguggaagu

SEQ ID NO: 2579810 - RNA, 19 nt, Homo sapiens
  misc_RNA (1)...(19): siRNA sense strand
auucauggucacacagaua

SEQ ID NO: 2579811 - RNA, 19 nt, Homo sapiens
  misc_RNA (1)...(19): siRNA sense strand
caucaaaaguaccaagaga

SEQ ID NO: 2579812 - RNA, 19 nt, Homo sapiens
  misc_RNA (1)...(19): siRNA sense strand
aagaggaagagcagcacaa

SEQ ID NO: 2579813 - RNA, 19 nt, Homo sapiens
  misc_RNA (1)...(19): siRNA sense strand
agugaaaguuccacacaca

SEQ ID NO: 2579814 - RNA, 19 nt, Homo sapiens
  misc_RNA (1)...(19): siRNA sense strand
uguggaaagagaugaagaa

SEQ ID NO: 2579815 - RNA, 19 nt, Homo sapiens
  misc_RNA (1)...(19): siRNA sense strand
ccauugaagcccaggaacu

SEQ ID NO: 2579816 - RNA, 19 nt, Homo sapiens
  misc_RNA (1)...(19): siRNA sense strand
agaaagagacgucugucaa

SEQ ID NO: 2579817 - RNA, 19 nt, Homo sapiens
  misc_RNA (1)...(19): siRNA sense strand
ccaucaacaagcaauaaua

SEQ ID NO: 2579818 - RNA, 19 nt, Homo sapiens
  misc_RNA (1)...(19): siRNA sense strand
ccaggaaccaaguaagaga

SEQ ID NO: 2579819 - RNA, 19 nt, Homo sapiens
  misc_RNA (1)...(19): siRNA sense strand
cugcaagcgguuacugaaa

SEQ ID NO: 2579820 - RNA, 19 nt, Homo sapiens
  misc_RNA (1)...(19): siRNA sense strand
ggaaagagaugaagaagcc

SEQ ID NO: 2579821 - RNA, 19 nt, Homo sapiens
  misc_RNA (1)...(19): siRNA sense strand
cuggaauguauguuugaaa

SEQ ID NO: 2579822 - RNA, 19 nt, Homo sapiens
  misc_RNA (1)...(19): siRNA sense strand
aagcacacaaagaggaaga

SEQ ID NO: 2579823 - RNA, 19 nt, Homo sapiens
  misc_RNA (1)...(19): siRNA sense strand
gcuccauaguuuaucaaaa

SEQ ID NO: 2579824 - RNA, 19 nt, Homo sapiens
  misc_RNA (1)...(19): siRNA sense strand
ugaaauacaugaaggagac

SEQ ID NO: 2579825 - RNA, 19 nt, Homo sapiens
  misc_RNA (1)...(19): siRNA sense strand
cgauaugucaguacugcaa

SEQ ID NO: 2579826 - RNA, 19 nt, Homo sapiens
  misc_RNA (1)...(19): siRNA sense strand
agaugaagaagccguuaaa

SEQ ID NO: 2579827 - RNA, 19 nt, Homo sapiens
  misc_RNA (1)...(19): siRNA sense strand
agaaagacugggagggaug

SEQ ID NO: 2579828 - RNA, 19 nt, Homo sapiens
  misc_RNA (1)...(19): siRNA sense strand
ggaaaugauucuauccagu

SEQ ID NO: 2579829 - RNA, 19 nt, Homo sapiens
  misc_RNA (1)...(19): siRNA sense strand
caguguaaagauugcaaau

SEQ ID NO: 2579830 - RNA, 19 nt, Homo sapiens
  misc_RNA (1)...(19): siRNA sense strand
guagcacagagcugggaaa

SEQ ID NO: 2579831 - RNA, 19 nt, Homo sapiens
  misc_RNA (1)...(19): siRNA sense strand
aggaaaacauagaaagacu

SEQ ID NO: 2579832 - RNA, 19 nt, Homo sapiens
  misc_RNA (1)...(19): siRNA sense strand
cauggagauauguuggaaa

SEQ ID NO: 2579833 - RNA, 19 nt, Homo sapiens
  misc_RNA (1)...(19): siRNA sense strand
gcacugugauuuaaagcca

SEQ ID NO: 2579834 - RNA, 19 nt, Homo sapiens
  misc_RNA (1)...(19): siRNA sense strand
augguaaugugcagaguga

SEQ ID NO: 2579835 - RNA, 19 nt, Homo sapiens
  misc_RNA (1)...(19): siRNA sense strand
ccgcauaucuucaccacga

SEQ ID NO: 2579836 - RNA, 19 nt, Homo sapiens
  misc_RNA (1)...(19): siRNA sense strand
cuaaauucauggucacaca

SEQ ID NO: 2579837 - RNA, 19 nt, Homo sapiens
  misc_RNA (1)...(19): siRNA sense strand
ugaugaugcucgcugggaa

SEQ ID NO: 2579838 - RNA, 19 nt, Homo sapiens
  misc_RNA (1)...(19): siRNA sense strand
agaugaaauacaugaagga

SEQ ID NO: 2579839 - RNA, 19 nt, Homo sapiens
  misc_RNA (1)...(19): siRNA sense strand
aauacaugaaggagaccua

SEQ ID NO: 2579840 - RNA, 19 nt, Homo sapiens
  misc_RNA (1)...(19): siRNA sense strand
caucauuggugaaaaguca

SEQ ID NO: 2579841 - RNA, 19 nt, Homo sapiens
  misc_RNA (1)...(19): siRNA sense strand
gaaaagucauucaggagau

SEQ ID NO: 2579842 - RNA, 19 nt, Homo sapiens
  misc_RNA (1)...(19): siRNA sense strand
ugaaacucgcauuggagaa

SEQ ID NO: 2579843 - RNA, 19 nt, Homo sapiens
  misc_RNA (1)...(19): siRNA sense strand
aggcauuauuggagacuug

SEQ ID NO: 2579844 - RNA, 19 nt, Homo sapiens
  misc_RNA (1)...(19): siRNA sense strand
auuggagacuugacagcaa

SEQ ID NO: 2579845 - RNA, 19 nt, Homo sapiens
  misc_RNA (1)...(19): siRNA sense strand
aguccaucaacaagcaaua

SEQ ID NO: 2579846 - RNA, 19 nt, Homo sapiens
  misc_RNA (1)...(19): siRNA sense strand
gguacgucaaggacugaaa

SEQ ID NO: 2579847 - RNA, 19 nt, Homo sapiens
  misc_RNA (1)...(19): siRNA sense strand
aagaaagucaacuccguaa

SEQ ID NO: 2579848 - RNA, 19 nt, Homo sapiens
  misc_RNA (1)...(19): siRNA sense strand
aauucuaaucucacggaua

SEQ ID NO: 2579849 - RNA, 19 nt, Homo sapiens
  misc_RNA (1)...(19): siRNA sense strand
cgcagaagaaggaugguca

SEQ ID NO: 2579850 - RNA, 19 nt, Homo sapiens
  misc_RNA (1)...(19): siRNA sense strand
gguuauacauagugggaca

SEQ ID NO: 2579851 - RNA, 19 nt, Homo sapiens
  misc_RNA (1)...(19): siRNA sense strand
aaugaagaauagugggaaa

SEQ ID NO: 2579852 - RNA, 19 nt, Homo sapiens
  misc_RNA (1)...(19): siRNA sense strand
cagcagaacuggacggaga

SEQ ID NO: 2579853 - RNA, 19 nt, Homo sapiens
  misc_RNA (1)...(19): siRNA sense strand
gggacgaagcucuggauaa

SEQ ID NO: 2579854 - RNA, 19 nt, Homo sapiens
  misc_RNA (1)...(19): siRNA sense strand
ggugcuuacuggagacaaa

SEQ ID NO: 2579855 - RNA, 19 nt, Homo sapiens
  misc_RNA (1)...(19): siRNA sense strand
gggaagcacaggugggcaa

SEQ ID NO: 2579856 - RNA, 19 nt, Homo sapiens
  misc_RNA (1)...(19): siRNA sense strand
gguucuugguugaaugaaa

SEQ ID NO: 2579857 - RNA, 19 nt, Homo sapiens
  misc_RNA (1)...(19): siRNA sense strand
cuacaaggaaauugaagaa

SEQ ID NO: 2579858 - RNA, 19 nt, Homo sapiens
  misc_RNA (1)...(19): siRNA sense strand
ccacuaucuuauugagcaa

SEQ ID NO: 2579859 - RNA, 19 nt, Homo sapiens
  misc_RNA (1)...(19): siRNA sense strand
auggaaaaccagaggaaua

SEQ ID NO: 2579860 - RNA, 19 nt, Homo sapiens
  misc_RNA (1)...(19): siRNA sense strand
ucaaagaccugguggacga

SEQ ID NO: 2579861 - RNA, 19 nt, Homo sapiens
  misc_RNA (1)...(19): siRNA sense strand
ggcuagaagcuaagaaaga

SEQ ID NO: 2579862 - RNA, 19 nt, Homo sapiens
  misc_RNA (1)...(19): siRNA sense strand
cccaagaacagaagaagaa

SEQ ID NO: 2579863 - RNA, 19 nt, Homo sapiens
  misc_RNA (1)...(19): siRNA sense strand
cuuucauagugcuggaaua

SEQ ID NO: 2579864 - RNA, 19 nt, Homo sapiens
  misc_RNA (1)...(19): siRNA sense strand
cuucaaacgcucugagaca

SEQ ID NO: 2579865 - RNA, 19 nt, Homo sapiens
  misc_RNA (1)...(19): siRNA sense strand
gguugaaggcggaggagca

SEQ ID NO: 2579866 - RNA, 19 nt, Homo sapiens
  misc_RNA (1)...(19): siRNA sense strand
agauaaguuuacaggaaca

SEQ ID NO: 2579867 - RNA, 19 nt, Homo sapiens
  misc_RNA (1)...(19): siRNA sense strand
guauaugaggagauugaaa

SEQ ID NO: 2579868 - RNA, 19 nt, Homo sapiens
  misc_RNA (1)...(19): siRNA sense strand
cguuggaauaaguggacaa

SEQ ID NO: 2579869 - RNA, 19 nt, Homo sapiens
  misc_RNA (1)...(19): siRNA sense strand
agggaaagagccagaagua

SEQ ID NO: 2579870 - RNA, 19 nt, Homo sapiens
  misc_RNA (1)...(19): siRNA sense strand
acagaaagagacucagaaa

SEQ ID NO: 2579871 - RNA, 19 nt, Homo sapiens
  misc_RNA (1)...(19): siRNA sense strand
ugaugaaacagaagaugaa

SEQ ID NO: 2579872 - RNA, 19 nt, Homo sapiens
  misc_RNA (1)...(19): siRNA sense strand
acagggaagcagaggagaa

SEQ ID NO: 2579873 - RNA, 19 nt, Homo sapiens
  misc_RNA (1)...(19): siRNA sense strand
auacauaugcugaugggaa

SEQ ID NO: 2579874 - RNA, 19 nt, Homo sapiens
  misc_RNA (1)...(19): siRNA sense strand
gggccaaugacgugaacau

SEQ ID NO: 2579875 - RNA, 19 nt, Homo sapiens
  misc_RNA (1)...(19): siRNA sense strand
aggauuugcuugugaacuu

SEQ ID NO: 2579876 - RNA, 19 nt, Homo sapiens
  misc_RNA (1)...(19): siRNA sense strand
cagccauacauuugguuaa

SEQ ID NO: 2579877 - RNA, 19 nt, Homo sapiens
  misc_RNA (1)...(19): siRNA sense strand
cuguaaaggugcugacacu

SEQ ID NO: 2579878 - RNA, 19 nt, Homo sapiens
  misc_RNA (1)...(19): siRNA sense strand
cuucaugcaaggauggaaa

SEQ ID NO: 2579879 - RNA, 19 nt, Homo sapiens
  misc_RNA (1)...(19): siRNA sense strand
ggugaagagguacaagaaa

SEQ ID NO: 2579880 - RNA, 19 nt, Homo sapiens
  misc_RNA (1)...(19): siRNA sense strand
ggagaguaaauaugcgaau

SEQ ID NO: 2579881 - RNA, 19 nt, Homo sapiens
  misc_RNA (1)...(19): siRNA sense strand
aaguauaugaggagauuga

SEQ ID NO: 2579882 - RNA, 19 nt, Homo sapiens
  misc_RNA (1)...(19): siRNA sense strand
ccuccaaagagaagauaca

SEQ ID NO: 2579883 - RNA, 19 nt, Homo sapiens
  misc_RNA (1)...(19): siRNA sense strand
gagcaaauccagucaggga

SEQ ID NO: 2579884 - RNA, 19 nt, Homo sapiens
  misc_RNA (1)...(19): siRNA sense strand
aagaacagaagaagaaaga

SEQ ID NO: 2579885 - RNA, 19 nt, Homo sapiens
  misc_RNA (1)...(19): siRNA sense strand
gaggcuagaagcuaagaaa

SEQ ID NO: 2579886 - RNA, 19 nt, Homo sapiens
  misc_RNA (1)...(19): siRNA sense strand
auacauagugggacaaaga

SEQ ID NO: 2579887 - RNA, 19 nt, Homo sapiens
  misc_RNA (1)...(19): siRNA sense strand
cggccaugcuuauugggaa

SEQ ID NO: 2579888 - RNA, 19 nt, Homo sapiens
  misc_RNA (1)...(19): siRNA sense strand
cuacuaagcaagaaacaca

SEQ ID NO: 2579889 - RNA, 19 nt, Homo sapiens
  misc_RNA (1)...(19): siRNA sense strand
ggauaaaguauaugaggag

SEQ ID NO: 2579890 - RNA, 19 nt, Homo sapiens
  misc_RNA (1)...(19): siRNA sense strand
ccguagggcaggauggaga

SEQ ID NO: 2579891 - RNA, 19 nt, Homo sapiens
  misc_RNA (1)...(19): siRNA sense strand
uggauaaggaaaucaacaa

SEQ ID NO: 2579892 - RNA, 19 nt, Homo sapiens
  misc_RNA (1)...(19): siRNA sense strand
ugaugaacuacaugguuua

SEQ ID NO: 2579893 - RNA, 19 nt, Homo sapiens
  misc_RNA (1)...(19): siRNA sense strand
ccacaacaaaauagagcaa

SEQ ID NO: 2579894 - RNA, 19 nt, Homo sapiens
  misc_RNA (1)...(19): siRNA sense strand
ccaggaugugagugacaaa

SEQ ID NO: 2579895 - RNA, 19 nt, Homo sapiens
  misc_RNA (1)...(19): siRNA sense strand
ccuccgauucccuggguua

SEQ ID NO: 2579896 - RNA, 19 nt, Homo sapiens
  misc_RNA (1)...(19): siRNA sense strand
gcuacaaggaaauugaaga

SEQ ID NO: 2579897 - RNA, 19 nt, Homo sapiens
  misc_RNA (1)...(19): siRNA sense strand
ggauggaaaaccagaggaa

SEQ ID NO: 2579898 - RNA, 19 nt, Homo sapiens
  misc_RNA (1)...(19): siRNA sense strand
uugcaaaagcugacauuaa

SEQ ID NO: 2579899 - RNA, 19 nt, Homo sapiens
  misc_RNA (1)...(19): siRNA sense strand
ggauaaggaaaucaacaau

SEQ ID NO: 2579900 - RNA, 19 nt, Homo sapiens
  misc_RNA (1)...(19): siRNA sense strand
ugguaaacgcugccaggaa

SEQ ID NO: 2579901 - RNA, 19 nt, Homo sapiens
  misc_RNA (1)...(19): siRNA sense strand
uggauaaaguauaugagga

SEQ ID NO: 2579902 - RNA, 19 nt, Homo sapiens
  misc_RNA (1)...(19): siRNA sense strand
guuuaagagagcagccaau

SEQ ID NO: 2579903 - RNA, 19 nt, Homo sapiens
  misc_RNA (1)...(19): siRNA sense strand
aagaaagagcagcggcaga

SEQ ID NO: 2579904 - RNA, 19 nt, Homo sapiens
  misc_RNA (1)...(19): siRNA sense strand
uggacaagaaggaaugcaa

SEQ ID NO: 2579905 - RNA, 19 nt, Homo sapiens
  misc_RNA (1)...(19): siRNA sense strand
cgacauuugacgaggauuc

SEQ ID NO: 2579906 - RNA, 19 nt, Homo sapiens
  misc_RNA (1)...(19): siRNA sense strand
aaaggaaacugcugaaaau

SEQ ID NO: 2579907 - RNA, 19 nt, Homo sapiens
  misc_RNA (1)...(19): siRNA sense strand
uguguauuaaggagaguaa

SEQ ID NO: 2579908 - RNA, 19 nt, Homo sapiens
  misc_RNA (1)...(19): siRNA sense strand
augaaggugcccugguaaa

SEQ ID NO: 2579909 - RNA, 19 nt, Homo sapiens
  misc_RNA (1)...(19): siRNA sense strand
gaagaaagacggaugcgga

SEQ ID NO: 2579910 - RNA, 19 nt, Homo sapiens
  misc_RNA (1)...(19): siRNA sense strand
ugugcaaguuccuacgaua

SEQ ID NO: 2579911 - RNA, 19 nt, Homo sapiens
  misc_RNA (1)...(19): siRNA sense strand
ucaaaguugcuaaguggaa

SEQ ID NO: 2579912 - RNA, 19 nt, Homo sapiens
  misc_RNA (1)...(19): siRNA sense strand
gaccaagagaaauaagauu

SEQ ID NO: 2579913 - RNA, 19 nt, Homo sapiens
  misc_RNA (1)...(19): siRNA sense strand
aagaugaacuugaugacca

SEQ ID NO: 2579914 - RNA, 19 nt, Homo sapiens
  misc_RNA (1)...(19): siRNA sense strand
ugaaacagaagaugaacuu

SEQ ID NO: 2579915 - RNA, 19 nt, Homo sapiens
  misc_RNA (1)...(19): siRNA sense strand
cggagaaaccaauuuaaaa

SEQ ID NO: 2579916 - RNA, 19 nt, Homo sapiens
  misc_RNA (1)...(19): siRNA sense strand
caacacaaccacaacaaaa

SEQ ID NO: 2579917 - RNA, 19 nt, Homo sapiens
  misc_RNA (1)...(19): siRNA sense strand
aaugaauccuacuaagcaa

SEQ ID NO: 2579918 - RNA, 19 nt, Homo sapiens
  misc_RNA (1)...(19): siRNA sense strand
ggggcaaagugcugggaaa

SEQ ID NO: 2579919 - RNA, 19 nt, Homo sapiens
  misc_RNA (1)...(19): siRNA sense strand
cuaaagaagaugaagacau

SEQ ID NO: 2579920 - RNA, 19 nt, Homo sapiens
  misc_RNA (1)...(19): siRNA sense strand
ggacagaugaggagcucca

SEQ ID NO: 2579921 - RNA, 19 nt, Homo sapiens
  misc_RNA (1)...(19): siRNA sense strand
uggaauaugcccugaacau

SEQ ID NO: 2579922 - RNA, 19 nt, Homo sapiens
  misc_RNA (1)...(19): siRNA sense strand
cucauuacauggaggagaa

SEQ ID NO: 2579923 - RNA, 19 nt, Homo sapiens
  misc_RNA (1)...(19): siRNA sense strand
ugucuaaagaagaugaaga

SEQ ID NO: 2579924 - RNA, 19 nt, Homo sapiens
  misc_RNA (1)...(19): siRNA sense strand
aggacauggcugugaauca

SEQ ID NO: 2579925 - RNA, 19 nt, Homo sapiens
  misc_RNA (1)...(19): siRNA sense strand
accacuacuucgaggacaa

SEQ ID NO: 2579926 - RNA, 19 nt, Homo sapiens
  misc_RNA (1)...(19): siRNA sense strand
ucacagcagaguagcuaaa

SEQ ID NO: 2579927 - RNA, 19 nt, Homo sapiens
  misc_RNA (1)...(19): siRNA sense strand
ccaaagagcagcugagcac

SEQ ID NO: 2579928 - RNA, 19 nt, Homo sapiens
  misc_RNA (1)...(19): siRNA sense strand
aaaccucaucaaagggaaa

SEQ ID NO: 2579929 - RNA, 19 nt, Homo sapiens
  misc_RNA (1)...(19): siRNA sense strand
aaagaaacuuauaggugca

SEQ ID NO: 2579930 - RNA, 19 nt, Homo sapiens
  misc_RNA (1)...(19): siRNA sense strand
aggagaacgauauguggua

SEQ ID NO: 2579931 - RNA, 19 nt, Homo sapiens
  misc_RNA (1)...(19): siRNA sense strand
ccucaacaaacaaggacau

SEQ ID NO: 2579932 - RNA, 19 nt, Homo sapiens
  misc_RNA (1)...(19): siRNA sense strand
cuggaacacagaaggagaa

SEQ ID NO: 2579933 - RNA, 19 nt, Homo sapiens
  misc_RNA (1)...(19): siRNA sense strand
gccuaguguuacugauauu

SEQ ID NO: 2579934 - RNA, 19 nt, Homo sapiens
  misc_RNA (1)...(19): siRNA sense strand
cgauacuaccucaggcaga

SEQ ID NO: 2579935 - RNA, 19 nt, Homo sapiens
  misc_RNA (1)...(19): siRNA sense strand
gaagacaguaccaugggaa

SEQ ID NO: 2579936 - RNA, 19 nt, Homo sapiens
  misc_RNA (1)...(19): siRNA sense strand
ccuggaacacagaaggaga

SEQ ID NO: 2579937 - RNA, 19 nt, Homo sapiens
  misc_RNA (1)...(19): siRNA sense strand
agcaagauauauugacaca

SEQ ID NO: 2579938 - RNA, 19 nt, Homo sapiens
  misc_RNA (1)...(19): siRNA sense strand
guagaaggucaauggcuca

SEQ ID NO: 2579939 - RNA, 19 nt, Homo sapiens
  misc_RNA (1)...(19): siRNA sense strand
aggcuagaacccuggaaca

SEQ ID NO: 2579940 - RNA, 19 nt, Homo sapiens
  misc_RNA (1)...(19): siRNA sense strand
caaacaaggacauggcugu

SEQ ID NO: 2579941 - RNA, 19 nt, Homo sapiens
  misc_RNA (1)...(19): siRNA sense strand
auaagggaagcaagguaua

SEQ ID NO: 2579942 - RNA, 19 nt, Homo sapiens
  misc_RNA (1)...(19): siRNA sense strand
cugccuaguguuacugaua

SEQ ID NO: 2579943 - RNA, 19 nt, Homo sapiens
  misc_RNA (1)...(19): siRNA sense strand
cacagaaggagaacgauau

SEQ ID NO: 2579944 - RNA, 19 nt, Homo sapiens
  misc_RNA (1)...(19): siRNA sense strand
ggaggggacucgaagaaga

SEQ ID NO: 2579945 - RNA, 19 nt, Homo sapiens
  misc_RNA (1)...(19): siRNA sense strand
gguugauuacucuaacaaa

SEQ ID NO: 2579946 - RNA, 19 nt, Homo sapiens
  misc_RNA (1)...(19): siRNA sense strand
cugaacaugcucuuacaaa

SEQ ID NO: 2579947 - RNA, 19 nt, Homo sapiens
  misc_RNA (1)...(19): siRNA sense strand
ggucaauggcucauauuuu

SEQ ID NO: 2579948 - RNA, 19 nt, Homo sapiens
  misc_RNA (1)...(19): siRNA sense strand
augaagccauggaacuaaa

SEQ ID NO: 2579949 - RNA, 19 nt, Homo sapiens
  misc_RNA (1)...(19): siRNA sense strand
cuguaaugguacugugauu

SEQ ID NO: 2579950 - RNA, 19 nt, Homo sapiens
  misc_RNA (1)...(19): siRNA sense strand
cugaauacggagagguuau

SEQ ID NO: 2579951 - RNA, 19 nt, Homo sapiens
  misc_RNA (1)...(19): siRNA sense strand
gcauuguaaaggaggaaca

SEQ ID NO: 2579952 - RNA, 19 nt, Homo sapiens
  misc_RNA (1)...(19): siRNA sense strand
ucauauaagaauccagcaa

SEQ ID NO: 2579953 - RNA, 19 nt, Homo sapiens
  misc_RNA (1)...(19): siRNA sense strand
uugcagaugauuaugacaa

SEQ ID NO: 2579954 - RNA, 19 nt, Homo sapiens
  misc_RNA (1)...(19): siRNA sense strand
acggaacggcagaaagaca

SEQ ID NO: 2579955 - RNA, 19 nt, Homo sapiens
  misc_RNA (1)...(19): siRNA sense strand
gcaaggagguggagguguu

SEQ ID NO: 2579956 - RNA, 19 nt, Homo sapiens
  misc_RNA (1)...(19): siRNA sense strand
acaaaguggacauggacaa

SEQ ID NO: 2579957 - RNA, 19 nt, Homo sapiens
  misc_RNA (1)...(19): siRNA sense strand
ccaugguggagcugggaaa

SEQ ID NO: 2579958 - RNA, 19 nt, Homo sapiens
  misc_RNA (1)...(19): siRNA sense strand
gcgacaugaucgaggccau

SEQ ID NO: 2579959 - RNA, 19 nt, Homo sapiens
  misc_RNA (1)...(19): siRNA sense strand
cuggagaguuacaugggua

SEQ ID NO: 2579960 - RNA, 19 nt, Homo sapiens
  misc_RNA (1)...(19): siRNA sense strand
agaucgggcuggaggacuu

SEQ ID NO: 2579961 - RNA, 19 nt, Homo sapiens
  misc_RNA (1)...(19): siRNA sense strand
ugggaaaggacaaaaggaa

SEQ ID NO: 2579962 - RNA, 19 nt, Homo sapiens
  misc_RNA (1)...(19): siRNA sense strand
uggacgaacggcuggguga

SEQ ID NO: 2579963 - RNA, 19 nt, Homo sapiens
  misc_RNA (1)...(19): siRNA sense strand
gcaaggagguggagguguu

SEQ ID NO: 2579964 - RNA, 19 nt, Homo sapiens
  misc_RNA (1)...(19): siRNA sense strand
acaaaguggacauggacaa

SEQ ID NO: 2579965 - RNA, 19 nt, Homo sapiens
  misc_RNA (1)...(19): siRNA sense strand
ccaugguggagcugggaaa

SEQ ID NO: 2579966 - RNA, 19 nt, Homo sapiens
  misc_RNA (1)...(19): siRNA sense strand
gcgacaugaucgaggccau

SEQ ID NO: 2579967 - RNA, 19 nt, Homo sapiens
  misc_RNA (1)...(19): siRNA sense strand
cuggagaguuacaugggua

SEQ ID NO: 2579968 - RNA, 19 nt, Homo sapiens
  misc_RNA (1)...(19): siRNA sense strand
agaucgggcuggaggacuu

SEQ ID NO: 2579969 - RNA, 19 nt, Homo sapiens
  misc_RNA (1)...(19): siRNA sense strand
ugggaaaggacaaaaggaa

SEQ ID NO: 2579970 - RNA, 19 nt, Homo sapiens
  misc_RNA (1)...(19): siRNA sense strand
uggacgaacggcuggguga

SEQ ID NO: 2579971 - RNA, 19 nt, Homo sapiens
  misc_RNA (1)...(19): siRNA sense strand
gcaaggagguggagguguu

SEQ ID NO: 2579972 - RNA, 19 nt, Homo sapiens
  misc_RNA (1)...(19): siRNA sense strand
acaaaguggacauggacaa

SEQ ID NO: 2579973 - RNA, 19 nt, Homo sapiens
  misc_RNA (1)...(19): siRNA sense strand
ccaugguggagcugggaaa

SEQ ID NO: 2579974 - RNA, 19 nt, Homo sapiens
  misc_RNA (1)...(19): siRNA sense strand
gcgacaugaucgaggccau

SEQ ID NO: 2579975 - RNA, 19 nt, Homo sapiens
  misc_RNA (1)...(19): siRNA sense strand
cuggagaguuacaugggua

SEQ ID NO: 2579976 - RNA, 19 nt, Homo sapiens
  misc_RNA (1)...(19): siRNA sense strand
agaucgggcuggaggacuu

SEQ ID NO: 2579977 - RNA, 19 nt, Homo sapiens
  misc_RNA (1)...(19): siRNA sense strand
ugggaaaggacaaaaggaa

SEQ ID NO: 2579978 - RNA, 19 nt, Homo sapiens
  misc_RNA (1)...(19): siRNA sense strand
uggacgaacggcuggguga

SEQ ID NO: 2579979 - RNA, 19 nt, Homo sapiens
  misc_RNA (1)...(19): siRNA sense strand
gcaaggagguggagguguu

SEQ ID NO: 2579980 - RNA, 19 nt, Homo sapiens
  misc_RNA (1)...(19): siRNA sense strand
acaaaguggacauggacaa

SEQ ID NO: 2579981 - RNA, 19 nt, Homo sapiens
  misc_RNA (1)...(19): siRNA sense strand
ccaugguggagcugggaaa

SEQ ID NO: 2579982 - RNA, 19 nt, Homo sapiens
  misc_RNA (1)...(19): siRNA sense strand
gcgacaugaucgaggccau

SEQ ID NO: 2579983 - RNA, 19 nt, Homo sapiens
  misc_RNA (1)...(19): siRNA sense strand
cuggagaguuacaugggua

SEQ ID NO: 2579984 - RNA, 19 nt, Homo sapiens
  misc_RNA (1)...(19): siRNA sense strand
agaucgggcuggaggacuu

SEQ ID NO: 2579985 - RNA, 19 nt, Homo sapiens
  misc_RNA (1)...(19): siRNA sense strand
ugggaaaggacaaaaggaa

SEQ ID NO: 2579986 - RNA, 19 nt, Homo sapiens
  misc_RNA (1)...(19): siRNA sense strand
uggacgaacggcuggguga

SEQ ID NO: 2579987 - RNA, 19 nt, Homo sapiens
  misc_RNA (1)...(19): siRNA sense strand
gcaaggagguggagguguu

SEQ ID NO: 2579988 - RNA, 19 nt, Homo sapiens
  misc_RNA (1)...(19): siRNA sense strand
acaaaguggacauggacaa

SEQ ID NO: 2579989 - RNA, 19 nt, Homo sapiens
  misc_RNA (1)...(19): siRNA sense strand
ccaugguggagcugggaaa

SEQ ID NO: 2579990 - RNA, 19 nt, Homo sapiens
  misc_RNA (1)...(19): siRNA sense strand
gcgacaugaucgaggccau

SEQ ID NO: 2579991 - RNA, 19 nt, Homo sapiens
  misc_RNA (1)...(19): siRNA sense strand
cuggagaguuacaugggua

SEQ ID NO: 2579992 - RNA, 19 nt, Homo sapiens
  misc_RNA (1)...(19): siRNA sense strand
agaucgggcuggaggacuu

SEQ ID NO: 2579993 - RNA, 19 nt, Homo sapiens
  misc_RNA (1)...(19): siRNA sense strand
ugggaaaggacaaaaggaa

SEQ ID NO: 2579994 - RNA, 19 nt, Homo sapiens
  misc_RNA (1)...(19): siRNA sense strand
uggacgaacggcuggguga

SEQ ID NO: 2579995 - RNA, 19 nt, Homo sapiens
  misc_RNA (1)...(19): siRNA sense strand
gcaaggagguggagguguu

SEQ ID NO: 2579996 - RNA, 19 nt, Homo sapiens
  misc_RNA (1)...(19): siRNA sense strand
acaaaguggacauggacaa

SEQ ID NO: 2579997 - RNA, 19 nt, Homo sapiens
  misc_RNA (1)...(19): siRNA sense strand
ccaugguggagcugggaaa

SEQ ID NO: 2579998 - RNA, 19 nt, Homo sapiens
  misc_RNA (1)...(19): siRNA sense strand
gcgacaugaucgaggccau

SEQ ID NO: 2579999 - RNA, 19 nt, Homo sapiens
  misc_RNA (1)...(19): siRNA sense strand
cuggagaguuacaugggua

SEQ ID NO: 2580000 - RNA, 19 nt, Homo sapiens
  misc_RNA (1)...(19): siRNA sense strand
agaucgggcuggaggacuu

SEQ ID NO: 2580001 - RNA, 19 nt, Homo sapiens
  misc_RNA (1)...(19): siRNA sense strand
ugggaaaggacaaaaggaa

SEQ ID NO: 2580002 - RNA, 19 nt, Homo sapiens
  misc_RNA (1)...(19): siRNA sense strand
uggacgaacggcuggguga

SEQ ID NO: 2580003 - RNA, 19 nt, Homo sapiens
  misc_RNA (1)...(19): siRNA sense strand
cggcagaugaugcgggaga

SEQ ID NO: 2580004 - RNA, 19 nt, Homo sapiens
  misc_RNA (1)...(19): siRNA sense strand
agacauggguccaccgcua

SEQ ID NO: 2580005 - RNA, 19 nt, Homo sapiens
  misc_RNA (1)...(19): siRNA sense strand
caaauuucauugugggcau

SEQ ID NO: 2580006 - RNA, 19 nt, Homo sapiens
  misc_RNA (1)...(19): siRNA sense strand
ccacaggcuucgugcccau

SEQ ID NO: 2580007 - RNA, 19 nt, Homo sapiens
  misc_RNA (1)...(19): siRNA sense strand
cggcggaauucaaugcuga

SEQ ID NO: 2580008 - RNA, 19 nt, Homo sapiens
  misc_RNA (1)...(19): siRNA sense strand
gugccauacucaugaccau

SEQ ID NO: 2580009 - RNA, 19 nt, Homo sapiens
  misc_RNA (1)...(19): siRNA sense strand
ugaugaaccugcuggccuu

SEQ ID NO: 2580010 - RNA, 19 nt, Homo sapiens
  misc_RNA (1)...(19): siRNA sense strand
gaaccgaugcagugggcaa

SEQ ID NO: 2580011 - RNA, 19 nt, Homo sapiens
  misc_RNA (1)...(19): siRNA sense strand
gaaggagcuaugugaauua

SEQ ID NO: 2580012 - RNA, 19 nt, Homo sapiens
  misc_RNA (1)...(19): siRNA sense strand
cagucaaaccugaagucaa

SEQ ID NO: 2580013 - RNA, 19 nt, Homo sapiens
  misc_RNA (1)...(19): siRNA sense strand
gggcuguacaaaagggaaa

SEQ ID NO: 2580014 - RNA, 19 nt, Homo sapiens
  misc_RNA (1)...(19): siRNA sense strand
auguaagaauggagggugu

SEQ ID NO: 2580015 - RNA, 19 nt, Homo sapiens
  misc_RNA (1)...(19): siRNA sense strand
agaacuuagccgaguagaa

SEQ ID NO: 2580016 - RNA, 19 nt, Homo sapiens
  misc_RNA (1)...(19): siRNA sense strand
gcuucgauccugagaccaa

SEQ ID NO: 2580017 - RNA, 19 nt, Homo sapiens
  misc_RNA (1)...(19): siRNA sense strand
aagaaggagcuaugugaau

SEQ ID NO: 2580018 - RNA, 19 nt, Homo sapiens
  misc_RNA (1)...(19): siRNA sense strand
caucagggaaugaagaaaa

SEQ ID NO: 2580019 - RNA, 19 nt, Homo sapiens
  misc_RNA (1)...(19): siRNA sense strand
augaaauacuggagcuguu

SEQ ID NO: 2580020 - RNA, 19 nt, Homo sapiens
  misc_RNA (1)...(19): siRNA sense strand
uugaaggagagaaggaauu

SEQ ID NO: 2580021 - RNA, 19 nt, Homo sapiens
  misc_RNA (1)...(19): siRNA sense strand
ggucuuucacgaugcauua

SEQ ID NO: 2580022 - RNA, 19 nt, Homo sapiens
  misc_RNA (1)...(19): siRNA sense strand
auaccagggucuagagagu

SEQ ID NO: 2580023 - RNA, 19 nt, Homo sapiens
  misc_RNA (1)...(19): siRNA sense strand
gaagaaggagcuaugugaa

SEQ ID NO: 2580024 - RNA, 19 nt, Homo sapiens
  misc_RNA (1)...(19): siRNA sense strand
aacccaaauuucaggaaca

SEQ ID NO: 2580025 - RNA, 19 nt, Homo sapiens
  misc_RNA (1)...(19): siRNA sense strand
gggaugaaauacuggagcu

SEQ ID NO: 2580026 - RNA, 19 nt, Homo sapiens
  misc_RNA (1)...(19): siRNA sense strand
uggagcuguuguagaagaa

SEQ ID NO: 2580027 - RNA, 19 nt, Homo sapiens
  misc_RNA (1)...(19): siRNA sense strand
ugcuguaagagaagaacaa

SEQ ID NO: 2580028 - RNA, 19 nt, Homo sapiens
  misc_RNA (1)...(19): siRNA sense strand
gguagacauaauagugaga

SEQ ID NO: 2580029 - RNA, 19 nt, Homo sapiens
  misc_RNA (1)...(19): siRNA sense strand
agaagaaggagcuauguga

SEQ ID NO: 2580030 - RNA, 19 nt, Homo sapiens
  misc_RNA (1)...(19): siRNA sense strand
aagaauggaggguguucaa

SEQ ID NO: 2580031 - RNA, 19 nt, Homo sapiens
  misc_RNA (1)...(19): siRNA sense strand
uguacaaaagguagacaua

SEQ ID NO: 2580032 - RNA, 19 nt, Homo sapiens
  misc_RNA (1)...(19): siRNA sense strand
agcaaauagcacauuguua

SEQ ID NO: 2580033 - RNA, 19 nt, Homo sapiens
  misc_RNA (1)...(19): siRNA sense strand
ggagcuaugugaauuaaaa

SEQ ID NO: 2580034 - RNA, 19 nt, Homo sapiens
  misc_RNA (1)...(19): siRNA sense strand
cagggaaugaagaaaauaa

SEQ ID NO: 2580035 - RNA, 19 nt, Homo sapiens
  misc_RNA (1)...(19): siRNA sense strand
gagaaaagcugaaccgaug

SEQ ID NO: 2580036 - RNA, 19 nt, Homo sapiens
  misc_RNA (1)...(19): siRNA sense strand
agaaggagcuaugugaauu

SEQ ID NO: 2580037 - RNA, 19 nt, Homo sapiens
  misc_RNA (1)...(19): siRNA sense strand
ugauguaaagcgaaguuau

SEQ ID NO: 2580038 - RNA, 19 nt, Homo sapiens
  misc_RNA (1)...(19): siRNA sense strand
guagaagcaaauagcacau

SEQ ID NO: 2580039 - RNA, 19 nt, Homo sapiens
  misc_RNA (1)...(19): siRNA sense strand
ggggugugauugauguaaa

SEQ ID NO: 2580040 - RNA, 19 nt, Homo sapiens
  misc_RNA (1)...(19): siRNA sense strand
uguaaagcgaaguuaugua

SEQ ID NO: 2580041 - RNA, 19 nt, Homo sapiens
  misc_RNA (1)...(19): siRNA sense strand
ugugauugauguaaagcga

SEQ ID NO: 2580042 - RNA, 19 nt, Homo sapiens
  misc_RNA (1)...(19): siRNA sense strand
uagccgaguagaagcaaau

SEQ ID NO: 2580043 - RNA, 19 nt, Homo sapiens
  misc_RNA (1)...(19): siRNA sense strand
aguagaagcaaauagcaca

SEQ ID NO: 2580044 - RNA, 19 nt, Homo sapiens
  misc_RNA (1)...(19): siRNA sense strand
ccgaagacuguuugagaca

SEQ ID NO: 2580045 - RNA, 19 nt, Homo sapiens
  misc_RNA (1)...(19): siRNA sense strand
ucugauuauugcugggaau

SEQ ID NO: 2580046 - RNA, 19 nt, Homo sapiens
  misc_RNA (1)...(19): siRNA sense strand
cuagaaagcucccgggucu

SEQ ID NO: 2580047 - RNA, 19 nt, Homo sapiens
  misc_RNA (1)...(19): siRNA sense strand
cauuauacuaccagcuauu

SEQ ID NO: 2580048 - RNA, 19 nt, Homo sapiens
  misc_RNA (1)...(19): siRNA sense strand
aaaccuaggaaacgggcua

SEQ ID NO: 2580049 - RNA, 19 nt, Homo sapiens
  misc_RNA (1)...(19): siRNA sense strand
ggaguuagcugcuugguuc

SEQ ID NO: 2580050 - RNA, 19 nt, Homo sapiens
  misc_RNA (1)...(19): siRNA sense strand
cagcugaaggagagaucaa

SEQ ID NO: 2580051 - RNA, 19 nt, Homo sapiens
  misc_RNA (1)...(19): siRNA sense strand
gagcaugugucaauggcau

SEQ ID NO: 2580052 - RNA, 19 nt, Homo sapiens
  misc_RNA (1)...(19): siRNA sense strand
gcuucguggaggaguacaa

SEQ ID NO: 2580053 - RNA, 19 nt, Homo sapiens
  misc_RNA (1)...(19): siRNA sense strand
guuuagaugaggagaguuc

SEQ ID NO: 2580054 - RNA, 19 nt, Homo sapiens
  misc_RNA (1)...(19): siRNA sense strand
cugaaggagagaucaacaa

SEQ ID NO: 2580055 - RNA, 19 nt, Homo sapiens
  misc_RNA (1)...(19): siRNA sense strand
ccacauucauccugccaca

SEQ ID NO: 2580056 - RNA, 19 nt, Homo sapiens
  misc_RNA (1)...(19): siRNA sense strand
uggaggaguacaacaacaa

SEQ ID NO: 2580057 - RNA, 19 nt, Homo sapiens
  misc_RNA (1)...(19): siRNA sense strand
gcagaaacaccuuugacca

SEQ ID NO: 2580058 - RNA, 19 nt, Homo sapiens
  misc_RNA (1)...(19): siRNA sense strand
ucguggaggaguacaacaa

SEQ ID NO: 2580059 - RNA, 19 nt, Homo sapiens
  misc_RNA (1)...(19): siRNA sense strand
gcgaugaacuggagugugc

SEQ ID NO: 2580060 - RNA, 19 nt, Homo sapiens
  misc_RNA (1)...(19): siRNA sense strand
ccuacacagcugaaggaga

SEQ ID NO: 2580061 - RNA, 19 nt, Homo sapiens
  misc_RNA (1)...(19): siRNA sense strand
ggcuggaguguuugcuaaa

SEQ ID NO: 2580062 - RNA, 19 nt, Homo sapiens
  misc_RNA (1)...(19): siRNA sense strand
uuaaacaaccaucgagcau

SEQ ID NO: 2580063 - RNA, 19 nt, Homo sapiens
  misc_RNA (1)...(19): siRNA sense strand
aguacaacaacaagguuca

SEQ ID NO: 2580064 - RNA, 19 nt, Homo sapiens
  misc_RNA (1)...(19): siRNA sense strand
cccaugacaaagaggucua

SEQ ID NO: 2580065 - RNA, 19 nt, Homo sapiens
  misc_RNA (1)...(19): siRNA sense strand
cuacacagcugaaggagag

SEQ ID NO: 2580066 - RNA, 19 nt, Homo sapiens
  misc_RNA (1)...(19): siRNA sense strand
gggcagaaaugguggcaga

SEQ ID NO: 2580067 - RNA, 19 nt, Homo sapiens
  misc_RNA (1)...(19): siRNA sense strand
gcgucaaaccccagagaaa

SEQ ID NO: 2580068 - RNA, 19 nt, Homo sapiens
  misc_RNA (1)...(19): siRNA sense strand
gcuuggauccuaugggaaa

SEQ ID NO: 2580069 - RNA, 19 nt, Homo sapiens
  misc_RNA (1)...(19): siRNA sense strand
gggauauuucugugugaua

SEQ ID NO: 2580070 - RNA, 19 nt, Homo sapiens
  misc_RNA (1)...(19): siRNA sense strand
cugcaaacccuaagugaga

SEQ ID NO: 2580071 - RNA, 19 nt, Homo sapiens
  misc_RNA (1)...(19): siRNA sense strand
auauauugguugugggcuu

SEQ ID NO: 2580072 - RNA, 19 nt, Homo sapiens
  misc_RNA (1)...(19): siRNA sense strand
ccuucaaacgaaacagaaa

SEQ ID NO: 2580073 - RNA, 19 nt, Homo sapiens
  misc_RNA (1)...(19): siRNA sense strand
ugaaaguaguggaugacau

SEQ ID NO: 2580074 - RNA, 19 nt, Homo sapiens
  misc_RNA (1)...(19): siRNA sense strand
auucaagaccucaggagua

SEQ ID NO: 2580075 - RNA, 19 nt, Homo sapiens
  misc_RNA (1)...(19): siRNA sense strand
ccaaagaaaaugucaggaa

SEQ ID NO: 2580076 - RNA, 19 nt, Homo sapiens
  misc_RNA (1)...(19): siRNA sense strand
acgcaagcgggaauggaaa

SEQ ID NO: 2580077 - RNA, 19 nt, Homo sapiens
  misc_RNA (1)...(19): siRNA sense strand
ugcugaaaguaguggauga

SEQ ID NO: 2580078 - RNA, 19 nt, Homo sapiens
  misc_RNA (1)...(19): siRNA sense strand
cagaaaugguggcagagga

SEQ ID NO: 2580079 - RNA, 19 nt, Homo sapiens
  misc_RNA (1)...(19): siRNA sense strand
cagcaguauuucugaucuu

SEQ ID NO: 2580080 - RNA, 19 nt, Homo sapiens
  misc_RNA (1)...(19): siRNA sense strand
cagcacauguuuaacgaga

SEQ ID NO: 2580081 - RNA, 19 nt, Homo sapiens
  misc_RNA (1)...(19): siRNA sense strand
uguuuaacgagaaggaaga

SEQ ID NO: 2580082 - RNA, 19 nt, Homo sapiens
  misc_RNA (1)...(19): siRNA sense strand
guuuaaagaagcagacugu

SEQ ID NO: 2580083 - RNA, 19 nt, Homo sapiens
  misc_RNA (1)...(19): siRNA sense strand
agaguaaagauucgaccaa

SEQ ID NO: 2580084 - RNA, 19 nt, Homo sapiens
  misc_RNA (1)...(19): siRNA sense strand
ucgcaggagaaaugaucaa

SEQ ID NO: 2580085 - RNA, 19 nt, Homo sapiens
  misc_RNA (1)...(19): siRNA sense strand
cgguaucuuuguuguggaa

SEQ ID NO: 2580086 - RNA, 19 nt, Homo sapiens
  misc_RNA (1)...(19): siRNA sense strand
ugagaacaguauuggcaca

SEQ ID NO: 2580087 - RNA, 19 nt, Homo sapiens
  misc_RNA (1)...(19): siRNA sense strand
ugacaagaaacgugacagu

SEQ ID NO: 2580088 - RNA, 19 nt, Homo sapiens
  misc_RNA (1)...(19): siRNA sense strand
ggagauugaaugaaaccau

SEQ ID NO: 2580089 - RNA, 19 nt, Homo sapiens
  misc_RNA (1)...(19): siRNA sense strand
cuuuauaaugugugcuaca

SEQ ID NO: 2580090 - RNA, 19 nt, Homo sapiens
  misc_RNA (1)...(19): siRNA sense strand
aauucugacuggaguaaaa

SEQ ID NO: 2580091 - RNA, 19 nt, Homo sapiens
  misc_RNA (1)...(19): siRNA sense strand
ggcccaagacccugcaaau

SEQ ID NO: 2580092 - RNA, 19 nt, Homo sapiens
  misc_RNA (1)...(19): siRNA sense strand
cuuccaggguucaguucaa

SEQ ID NO: 2580093 - RNA, 19 nt, Homo sapiens
  misc_RNA (1)...(19): siRNA sense strand
agauauuccuugucaucau

SEQ ID NO: 2580094 - RNA, 19 nt, Homo sapiens
  misc_RNA (1)...(19): siRNA sense strand
cuggaagaagauacugaua

SEQ ID NO: 2580095 - RNA, 19 nt, Homo sapiens
  misc_RNA (1)...(19): siRNA sense strand
ugggcagccuggagccuaa

SEQ ID NO: 2580096 - RNA, 19 nt, Homo sapiens
  misc_RNA (1)...(19): siRNA sense strand
gucaaaccccagagaaaua

SEQ ID NO: 2580097 - RNA, 19 nt, Homo sapiens
  misc_RNA (1)...(19): siRNA sense strand
uggcagaggaggcugguca

SEQ ID NO: 2580098 - RNA, 19 nt, Homo sapiens
  misc_RNA (1)...(19): siRNA sense strand
gcuacuaaugguuuaaaga

SEQ ID NO: 2580099 - RNA, 19 nt, Homo sapiens
  misc_RNA (1)...(19): siRNA sense strand
cuucaaacgaaacagaaaa

SEQ ID NO: 2580100 - RNA, 19 nt, Homo sapiens
  misc_RNA (1)...(19): siRNA sense strand
caacauauaacgaauggca

SEQ ID NO: 2580101 - RNA, 19 nt, Homo sapiens
  misc_RNA (1)...(19): siRNA sense strand
gggaaaggccguauggcuc

SEQ ID NO: 2580102 - RNA, 19 nt, Homo sapiens
  misc_RNA (1)...(19): siRNA sense strand
ugguaacaucccuggaaga

SEQ ID NO: 2580103 - RNA, 19 nt, Homo sapiens
  misc_RNA (1)...(19): siRNA sense strand
ggaugaguuaacagugaga

SEQ ID NO: 2580104 - RNA, 19 nt, Homo sapiens
  misc_RNA (1)...(19): siRNA sense strand
cuuacacuuuauugagcaa

SEQ ID NO: 2580105 - RNA, 19 nt, Homo sapiens
  misc_RNA (1)...(19): siRNA sense strand
gcagaggcccaaagcacau

SEQ ID NO: 2580106 - RNA, 19 nt, Homo sapiens
  misc_RNA (1)...(19): siRNA sense strand
cugcuguucugucaggaua

SEQ ID NO: 2580107 - RNA, 19 nt, Homo sapiens
  misc_RNA (1)...(19): siRNA sense strand
cgucaacaccagcaguauu

SEQ ID NO: 2580108 - RNA, 19 nt, Homo sapiens
  misc_RNA (1)...(19): siRNA sense strand
agaaccaaguguugcagau

SEQ ID NO: 2580109 - RNA, 19 nt, Homo sapiens
  misc_RNA (1)...(19): siRNA sense strand
cucaaagauugcugaaagu

SEQ ID NO: 2580110 - RNA, 19 nt, Homo sapiens
  misc_RNA (1)...(19): siRNA sense strand
gguugugggcuuucaucaa

SEQ ID NO: 2580111 - RNA, 19 nt, Homo sapiens
  misc_RNA (1)...(19): siRNA sense strand
gaaaaugucaggaagcaau

SEQ ID NO: 2580112 - RNA, 19 nt, Homo sapiens
  misc_RNA (1)...(19): siRNA sense strand
aguaaagauucgaccaaug

SEQ ID NO: 2580113 - RNA, 19 nt, Homo sapiens
  misc_RNA (1)...(19): siRNA sense strand
ggcugugaucagagugaau

SEQ ID NO: 2580114 - RNA, 19 nt, Homo sapiens
  misc_RNA (1)...(19): siRNA sense strand
ggagcuagcuuccaggguu

SEQ ID NO: 2580115 - RNA, 19 nt, Homo sapiens
  misc_RNA (1)...(19): siRNA sense strand
ucacauuaaagcacaucaa

SEQ ID NO: 2580116 - RNA, 19 nt, Homo sapiens
  misc_RNA (1)...(19): siRNA sense strand
cguggauugcucuguauaa

SEQ ID NO: 2580117 - RNA, 19 nt, Homo sapiens
  misc_RNA (1)...(19): siRNA sense strand
gccuagaagcauuccauau

SEQ ID NO: 2580118 - RNA, 19 nt, Homo sapiens
  misc_RNA (1)...(19): siRNA sense strand
aaguguugcagauggagaa

SEQ ID NO: 2580119 - RNA, 19 nt, Homo sapiens
  misc_RNA (1)...(19): siRNA sense strand
ccauguuggcagaacugaa

SEQ ID NO: 2580120 - RNA, 19 nt, Homo sapiens
  misc_RNA (1)...(19): siRNA sense strand
gagaacaguauuggcacaa

SEQ ID NO: 2580121 - RNA, 19 nt, Homo sapiens
  misc_RNA (1)...(19): siRNA sense strand
gaauaauuuaccagcucau

SEQ ID NO: 2580122 - RNA, 19 nt, Homo sapiens
  misc_RNA (1)...(19): siRNA sense strand
guuaacagugagaugugua

SEQ ID NO: 2580123 - RNA, 19 nt, Homo sapiens
  misc_RNA (1)...(19): siRNA sense strand
cugaacaagaacagagaaa

SEQ ID NO: 2580124 - RNA, 19 nt, Homo sapiens
  misc_RNA (1)...(19): siRNA sense strand
ccaugaauuugcugggcua

SEQ ID NO: 2580125 - RNA, 19 nt, Homo sapiens
  misc_RNA (1)...(19): siRNA sense strand
ucagaaagccuguggcgau

SEQ ID NO: 2580126 - RNA, 19 nt, Homo sapiens
  misc_RNA (1)...(19): siRNA sense strand
gcuaccugcuugugcgcua

SEQ ID NO: 2580127 - RNA, 19 nt, Homo sapiens
  misc_RNA (1)...(19): siRNA sense strand
gaggcaagggcauggguga

SEQ ID NO: 2580128 - RNA, 19 nt, Homo sapiens
  misc_RNA (1)...(19): siRNA sense strand
agagaaaccuguugcugga

SEQ ID NO: 2580129 - RNA, 19 nt, Homo sapiens
  misc_RNA (1)...(19): siRNA sense strand
gagaacgcacaaagggaga

SEQ ID NO: 2580130 - RNA, 19 nt, Homo sapiens
  misc_RNA (1)...(19): siRNA sense strand
ugccaaagccagcuggaga

SEQ ID NO: 2580131 - RNA, 19 nt, Homo sapiens
  misc_RNA (1)...(19): siRNA sense strand
ccacacaaaugccagggau

SEQ ID NO: 2580132 - RNA, 19 nt, Homo sapiens
  misc_RNA (1)...(19): siRNA sense strand
ccgagaacgcacaaaggga

SEQ ID NO: 2580133 - RNA, 19 nt, Homo sapiens
  misc_RNA (1)...(19): siRNA sense strand
uggaugaccuucaagcaga

SEQ ID NO: 2580134 - RNA, 19 nt, Homo sapiens
  misc_RNA (1)...(19): siRNA sense strand
ggagggucucucugggaaa

SEQ ID NO: 2580135 - RNA, 19 nt, Homo sapiens
  misc_RNA (1)...(19): siRNA sense strand
aaacauagcaaaugccuga

SEQ ID NO: 2580136 - RNA, 19 nt, Homo sapiens
  misc_RNA (1)...(19): siRNA sense strand
ccaucaaguuucaaggugu

SEQ ID NO: 2580137 - RNA, 19 nt, Homo sapiens
  misc_RNA (1)...(19): siRNA sense strand
ucagaccaucagugagaaa

SEQ ID NO: 2580138 - RNA, 19 nt, Homo sapiens
  misc_RNA (1)...(19): siRNA sense strand
gguugacagcugacagaca

SEQ ID NO: 2580139 - RNA, 19 nt, Homo sapiens
  misc_RNA (1)...(19): siRNA sense strand
cuucagaaacagaggagac

SEQ ID NO: 2580140 - RNA, 19 nt, Homo sapiens
  misc_RNA (1)...(19): siRNA sense strand
gggcuggagguggaagaaa

SEQ ID NO: 2580141 - RNA, 19 nt, Homo sapiens
  misc_RNA (1)...(19): siRNA sense strand
gccagaacucagugguuga

SEQ ID NO: 2580142 - RNA, 19 nt, Homo sapiens
  misc_RNA (1)...(19): siRNA sense strand
ggccaaaggacgugggcau

SEQ ID NO: 2580143 - RNA, 19 nt, Homo sapiens
  misc_RNA (1)...(19): siRNA sense strand
gaaaguauacagugggcuu

SEQ ID NO: 2580144 - RNA, 19 nt, Homo sapiens
  misc_RNA (1)...(19): siRNA sense strand
aggacauguucgacaagaa

SEQ ID NO: 2580145 - RNA, 19 nt, Homo sapiens
  misc_RNA (1)...(19): siRNA sense strand
auacugauauugagggcau

SEQ ID NO: 2580146 - RNA, 19 nt, Homo sapiens
  misc_RNA (1)...(19): siRNA sense strand
cgucuaucccagugguaau

SEQ ID NO: 2580147 - RNA, 19 nt, Homo sapiens
  misc_RNA (1)...(19): siRNA sense strand
ugacaagagcggugcagga

SEQ ID NO: 2580148 - RNA, 19 nt, Homo sapiens
  misc_RNA (1)...(19): siRNA sense strand
acaauguggaagcaggaaa

SEQ ID NO: 2580149 - RNA, 19 nt, Homo sapiens
  misc_RNA (1)...(19): siRNA sense strand
ggcuaaagcuggaagacac

SEQ ID NO: 2580150 - RNA, 19 nt, Homo sapiens
  misc_RNA (1)...(19): siRNA sense strand
gggcuaaagcuggaagaca

SEQ ID NO: 2580151 - RNA, 19 nt, Homo sapiens
  misc_RNA (1)...(19): siRNA sense strand
uggauaaagcacuucuaaa

SEQ ID NO: 2580152 - RNA, 19 nt, Homo sapiens
  misc_RNA (1)...(19): siRNA sense strand
cuuccaggauucaggcaau

SEQ ID NO: 2580153 - RNA, 19 nt, Homo sapiens
  misc_RNA (1)...(19): siRNA sense strand
cuaaaggccucucaggaca

SEQ ID NO: 2580154 - RNA, 19 nt, Homo sapiens
  misc_RNA (1)...(19): siRNA sense strand
acaagagcggugcaggaaa

SEQ ID NO: 2580155 - RNA, 19 nt, Homo sapiens
  misc_RNA (1)...(19): siRNA sense strand
aaugaaccaaagagagcaa

SEQ ID NO: 2580156 - RNA, 19 nt, Homo sapiens
  misc_RNA (1)...(19): siRNA sense strand
ugguaaugcucgucccaca

SEQ ID NO: 2580157 - RNA, 19 nt, Homo sapiens
  misc_RNA (1)...(19): siRNA sense strand
ggaaguaggcacugagacc

SEQ ID NO: 2580158 - RNA, 19 nt, Homo sapiens
  misc_RNA (1)...(19): siRNA sense strand
cgaaagaagaagacgcgca

SEQ ID NO: 2580159 - RNA, 19 nt, Homo sapiens
  misc_RNA (1)...(19): siRNA sense strand
aggacgaggaggaggacga

SEQ ID NO: 2580160 - RNA, 19 nt, Homo sapiens
  misc_RNA (1)...(19): siRNA sense strand
gcaacaaguggaagcggca

SEQ ID NO: 2580161 - RNA, 19 nt, Homo sapiens
  misc_RNA (1)...(19): siRNA sense strand
aggaggaggacgacgacga

SEQ ID NO: 2580162 - RNA, 19 nt, Homo sapiens
  misc_RNA (1)...(19): siRNA sense strand
ccauaauaacugugggaaa

SEQ ID NO: 2580163 - RNA, 19 nt, Homo sapiens
  misc_RNA (1)...(19): siRNA sense strand
gggaagggauuuagccaga

SEQ ID NO: 2580164 - RNA, 19 nt, Homo sapiens
  misc_RNA (1)...(19): siRNA sense strand
gggaaggguuucagccaga

SEQ ID NO: 2580165 - RNA, 19 nt, Homo sapiens
  misc_RNA (1)...(19): siRNA sense strand
gaagguagucaguguggua

SEQ ID NO: 2580166 - RNA, 19 nt, Homo sapiens
  misc_RNA (1)...(19): siRNA sense strand
ccucaggaucaucaggaaa

SEQ ID NO: 2580167 - RNA, 19 nt, Homo sapiens
  misc_RNA (1)...(19): siRNA sense strand
gcaaagacauucauggaug

SEQ ID NO: 2580168 - RNA, 19 nt, Homo sapiens
  misc_RNA (1)...(19): siRNA sense strand
auacgaagguagucagugu

SEQ ID NO: 2580169 - RNA, 19 nt, Homo sapiens
  misc_RNA (1)...(19): siRNA sense strand
ugugaaucaucgaggggaa

SEQ ID NO: 2580170 - RNA, 19 nt, Homo sapiens
  misc_RNA (1)...(19): siRNA sense strand
gaaacaauacgaagguagu

SEQ ID NO: 2580171 - RNA, 19 nt, Homo sapiens
  misc_RNA (1)...(19): siRNA sense strand
cugagagaaaagugauaaa

SEQ ID NO: 2580172 - RNA, 19 nt, Homo sapiens
  misc_RNA (1)...(19): siRNA sense strand
gcuccaaccuucacagcca

SEQ ID NO: 2580173 - RNA, 19 nt, Homo sapiens
  misc_RNA (1)...(19): siRNA sense strand
gagugugaggaguguggua

SEQ ID NO: 2580174 - RNA, 19 nt, Homo sapiens
  misc_RNA (1)...(19): siRNA sense strand
gaggucauacagaggagaa

SEQ ID NO: 2580175 - RNA, 19 nt, Homo sapiens
  misc_RNA (1)...(19): siRNA sense strand
gcaagugugggaagggcuu

SEQ ID NO: 2580176 - RNA, 19 nt, Homo sapiens
  misc_RNA (1)...(19): siRNA sense strand
ccuuauaagugugagaagu

SEQ ID NO: 2580177 - RNA, 19 nt, Homo sapiens
  misc_RNA (1)...(19): siRNA sense strand
agucagagcucgaaccuuc

SEQ ID NO: 2580178 - RNA, 19 nt, Homo sapiens
  misc_RNA (1)...(19): siRNA sense strand
ucaggauuguauugugaau

SEQ ID NO: 2580179 - RNA, 19 nt, Homo sapiens
  misc_RNA (1)...(19): siRNA sense strand
cugcaaagacauucaugga

SEQ ID NO: 2580180 - RNA, 19 nt, Homo sapiens
  misc_RNA (1)...(19): siRNA sense strand
aggucauacagaggagaaa

SEQ ID NO: 2580181 - RNA, 19 nt, Homo sapiens
  misc_RNA (1)...(19): siRNA sense strand
gagaaacaauacgaaggua

SEQ ID NO: 2580182 - RNA, 19 nt, Homo sapiens
  misc_RNA (1)...(19): siRNA sense strand
ggaggagaauggugggcuu

SEQ ID NO: 2580183 - RNA, 19 nt, Homo sapiens
  misc_RNA (1)...(19): siRNA sense strand
ggaaagaaaugugugguca

SEQ ID NO: 2580184 - RNA, 19 nt, Homo sapiens
  misc_RNA (1)...(19): siRNA sense strand
ggaacuacgugaaggaccu

SEQ ID NO: 2580185 - RNA, 19 nt, Homo sapiens
  misc_RNA (1)...(19): siRNA sense strand
gguugaaaucgauggaacu

SEQ ID NO: 2580186 - RNA, 19 nt, Homo sapiens
  misc_RNA (1)...(19): siRNA sense strand
cgguugaaaucgauggaac

SEQ ID NO: 2580187 - RNA, 19 nt, Homo sapiens
  misc_RNA (1)...(19): siRNA sense strand
augcagacccuguggcuga

SEQ ID NO: 2580188 - RNA, 19 nt, Homo sapiens
  misc_RNA (1)...(19): siRNA sense strand
aggacgacguguacagcau

SEQ ID NO: 2580189 - RNA, 19 nt, Homo sapiens
  misc_RNA (1)...(19): siRNA sense strand
agaaagccucccagugcaa

SEQ ID NO: 2580190 - RNA, 19 nt, Homo sapiens
  misc_RNA (1)...(19): siRNA sense strand
auguguggucauugauuua

SEQ ID NO: 2580191 - RNA, 19 nt, Homo sapiens
  misc_RNA (1)...(19): siRNA sense strand
cuaucaagaaagaggaaga

SEQ ID NO: 2580192 - RNA, 19 nt, Homo sapiens
  misc_RNA (1)...(19): siRNA sense strand
cugugaggaaggagauaaa

SEQ ID NO: 2580193 - RNA, 19 nt, Homo sapiens
  misc_RNA (1)...(19): siRNA sense strand
gagaagaguaugacaaaau

SEQ ID NO: 2580194 - RNA, 19 nt, Homo sapiens
  misc_RNA (1)...(19): siRNA sense strand
ugagagaagaguaugacaa

SEQ ID NO: 2580195 - RNA, 19 nt, Homo sapiens
  misc_RNA (1)...(19): siRNA sense strand
agaaagaggaagaaggaag

SEQ ID NO: 2580196 - RNA, 19 nt, Homo sapiens
  misc_RNA (1)...(19): siRNA sense strand
guaagguguccgaggaaca

SEQ ID NO: 2580197 - RNA, 19 nt, Homo sapiens
  misc_RNA (1)...(19): siRNA sense strand
ucaggaugauagaggaaaa

SEQ ID NO: 2580198 - RNA, 19 nt, Homo sapiens
  misc_RNA (1)...(19): siRNA sense strand
aaaacaaacccgagaaaca

SEQ ID NO: 2580199 - RNA, 19 nt, Homo sapiens
  misc_RNA (1)...(19): siRNA sense strand
ccuagaggucaaugaagaa

SEQ ID NO: 2580200 - RNA, 19 nt, Homo sapiens
  misc_RNA (1)...(19): siRNA sense strand
cccaaagagcagaagaaaa

SEQ ID NO: 2580201 - RNA, 19 nt, Homo sapiens
  misc_RNA (1)...(19): siRNA sense strand
auuagaagugccagcguaa

SEQ ID NO: 2580202 - RNA, 19 nt, Homo sapiens
  misc_RNA (1)...(19): siRNA sense strand
gauuagaagugccagcgua

SEQ ID NO: 2580203 - RNA, 19 nt, Homo sapiens
  misc_RNA (1)...(19): siRNA sense strand
ugucaaaacugaaggagca

SEQ ID NO: 2580204 - RNA, 19 nt, Homo sapiens
  misc_RNA (1)...(19): siRNA sense strand
gaguaagguguccgaggaa

SEQ ID NO: 2580205 - RNA, 19 nt, Homo sapiens
  misc_RNA (1)...(19): siRNA sense strand
gguaacucccagaagaaau

SEQ ID NO: 2580206 - RNA, 19 nt, Homo sapiens
  misc_RNA (1)...(19): siRNA sense strand
acaccagcuugaaggagaa

SEQ ID NO: 2580207 - RNA, 19 nt, Homo sapiens
  misc_RNA (1)...(19): siRNA sense strand
cagguaacucccagaagaa

SEQ ID NO: 2580208 - RNA, 19 nt, Homo sapiens
  misc_RNA (1)...(19): siRNA sense strand
ccagcuugaaggagaaauu

SEQ ID NO: 2580209 - RNA, 19 nt, Homo sapiens
  misc_RNA (1)...(19): siRNA sense strand
guuugagguacauaagaaa

SEQ ID NO: 2580210 - RNA, 19 nt, Homo sapiens
  misc_RNA (1)...(19): siRNA sense strand
ccugauucaaguauggaaa

SEQ ID NO: 2580211 - RNA, 19 nt, Homo sapiens
  misc_RNA (1)...(19): siRNA sense strand
guaaaucagaagaccacaa

SEQ ID NO: 2580212 - RNA, 19 nt, Homo sapiens
  misc_RNA (1)...(19): siRNA sense strand
caucaacagagcaaaggaa

SEQ ID NO: 2580213 - RNA, 19 nt, Homo sapiens
  misc_RNA (1)...(19): siRNA sense strand
cgaaauucaggaugauaga

SEQ ID NO: 2580214 - RNA, 19 nt, Homo sapiens
  misc_RNA (1)...(19): siRNA sense strand
agauggaagugguggugca

SEQ ID NO: 2580215 - RNA, 19 nt, Homo sapiens
  misc_RNA (1)...(19): siRNA sense strand
cugacuugauggaagaaaa

SEQ ID NO: 2580216 - RNA, 19 nt, Homo sapiens
  misc_RNA (1)...(19): siRNA sense strand
caaagaagaucauugccau

SEQ ID NO: 2580217 - RNA, 19 nt, Homo sapiens
  misc_RNA (1)...(19): siRNA sense strand
aguaaaaggaccagcccua

SEQ ID NO: 2580218 - RNA, 19 nt, Homo sapiens
  misc_RNA (1)...(19): siRNA sense strand
ccacaaucuacgaaauuca

SEQ ID NO: 2580219 - RNA, 19 nt, Homo sapiens
  misc_RNA (1)...(19): siRNA sense strand
augugaaugcugaccgaaa

SEQ ID NO: 2580220 - RNA, 19 nt, Homo sapiens
  misc_RNA (1)...(19): siRNA sense strand
gugcugaacgcaacagaau

SEQ ID NO: 2580221 - RNA, 19 nt, Homo sapiens
  misc_RNA (1)...(19): siRNA sense strand
guuaaaaguaaaaggacca

SEQ ID NO: 2580222 - RNA, 19 nt, Homo sapiens
  misc_RNA (1)...(19): siRNA sense strand
auucaggaugauagaggaa

SEQ ID NO: 2580223 - RNA, 19 nt, Homo sapiens
  misc_RNA (1)...(19): siRNA sense strand
agcccaaagagcagaagaa

SEQ ID NO: 2580224 - RNA, 19 nt, Homo sapiens
  misc_RNA (1)...(19): siRNA sense strand
ccaaagaagaucauugcca

SEQ ID NO: 2580225 - RNA, 19 nt, Homo sapiens
  misc_RNA (1)...(19): siRNA sense strand
gagaaauucaauggaaaga

SEQ ID NO: 2580226 - RNA, 19 nt, Homo sapiens
  misc_RNA (1)...(19): siRNA sense strand
acuuguggcugaugugaau

SEQ ID NO: 2580227 - RNA, 19 nt, Homo sapiens
  misc_RNA (1)...(19): siRNA sense strand
ggaguaagguguccgagga

SEQ ID NO: 2580228 - RNA, 19 nt, Homo sapiens
  misc_RNA (1)...(19): siRNA sense strand
gaauaugagaccccagaaa

SEQ ID NO: 2580229 - RNA, 19 nt, Homo sapiens
  misc_RNA (1)...(19): siRNA sense strand
ucaaagaagugauggugcu

SEQ ID NO: 2580230 - RNA, 19 nt, Homo sapiens
  misc_RNA (1)...(19): siRNA sense strand
aaaugagagaagaguauga

SEQ ID NO: 2580231 - RNA, 19 nt, Homo sapiens
  misc_RNA (1)...(19): siRNA sense strand
cucacaaacuaaaggaagu

SEQ ID NO: 2580232 - RNA, 19 nt, Homo sapiens
  misc_RNA (1)...(19): siRNA sense strand
ggguguuugagguacauaa

SEQ ID NO: 2580233 - RNA, 19 nt, Homo sapiens
  misc_RNA (1)...(19): siRNA sense strand
acaagauaauacagggaag

SEQ ID NO: 2580234 - RNA, 19 nt, Homo sapiens
  misc_RNA (1)...(19): siRNA sense strand
acaagaaagacauacucaa

SEQ ID NO: 2580235 - RNA, 19 nt, Homo sapiens
  misc_RNA (1)...(19): siRNA sense strand
caagauaauacagggaaga

SEQ ID NO: 2580236 - RNA, 19 nt, Homo sapiens
  misc_RNA (1)...(19): siRNA sense strand
cagugauagugaagguacu

SEQ ID NO: 2580237 - RNA, 19 nt, Homo sapiens
  misc_RNA (1)...(19): siRNA sense strand
cugaaggaagggagucauu

SEQ ID NO: 2580238 - RNA, 19 nt, Homo sapiens
  misc_RNA (1)...(19): siRNA sense strand
cugaaggagcagaggcaac

SEQ ID NO: 2580239 - RNA, 19 nt, Homo sapiens
  misc_RNA (1)...(19): siRNA sense strand
caaccuucccugagagcca

SEQ ID NO: 2580240 - RNA, 19 nt, Homo sapiens
  misc_RNA (1)...(19): siRNA sense strand
uaaaaggauuagaggucau

SEQ ID NO: 2580241 - RNA, 19 nt, Homo sapiens
  misc_RNA (1)...(19): siRNA sense strand
uugcugacuugauggaaga

SEQ ID NO: 2580242 - RNA, 19 nt, Homo sapiens
  misc_RNA (1)...(19): siRNA sense strand
aguugugauuggaggaguu

SEQ ID NO: 2580243 - RNA, 19 nt, Homo sapiens
  misc_RNA (1)...(19): siRNA sense strand
ccauagcagccaagaugau

SEQ ID NO: 2580244 - RNA, 19 nt, Homo sapiens
  misc_RNA (1)...(19): siRNA sense strand
auagaaaggucgcuggcaa

SEQ ID NO: 2580245 - RNA, 19 nt, Homo sapiens
  misc_RNA (1)...(19): siRNA sense strand
ggcacaaggcacugggcua

SEQ ID NO: 2580246 - RNA, 19 nt, Homo sapiens
  misc_RNA (1)...(19): siRNA sense strand
gugcaaauggucaagaaaa

SEQ ID NO: 2580247 - RNA, 19 nt, Homo sapiens
  misc_RNA (1)...(19): siRNA sense strand
gcaaagagaucuacucgga

SEQ ID NO: 2580248 - RNA, 19 nt, Homo sapiens
  misc_RNA (1)...(19): siRNA sense strand
agugaugcgaugaaagaau

SEQ ID NO: 2580249 - RNA, 19 nt, Homo sapiens
  misc_RNA (1)...(19): siRNA sense strand
agguuaugcuccaguuaga

SEQ ID NO: 2580250 - RNA, 19 nt, Homo sapiens
  misc_RNA (1)...(19): siRNA sense strand
cgcccaugcuggagaagga

SEQ ID NO: 2580251 - RNA, 19 nt, Homo sapiens
  misc_RNA (1)...(19): siRNA sense strand
aagaacuggcuucgggaau

SEQ ID NO: 2580252 - RNA, 19 nt, Homo sapiens
  misc_RNA (1)...(19): siRNA sense strand
gaaacaagcccuuccgugu

SEQ ID NO: 2580253 - RNA, 19 nt, Homo sapiens
  misc_RNA (1)...(19): siRNA sense strand
acuacaaaucccaggagca

SEQ ID NO: 2580254 - RNA, 19 nt, Homo sapiens
  misc_RNA (1)...(19): siRNA sense strand
ccaugcuggagaaggagaa

SEQ ID NO: 2580255 - RNA, 19 nt, Homo sapiens
  misc_RNA (1)...(19): siRNA sense strand
agugcaaauggucaagaaa

SEQ ID NO: 2580256 - RNA, 19 nt, Homo sapiens
  misc_RNA (1)...(19): siRNA sense strand
gcaaggagcucuauggaga

SEQ ID NO: 2580257 - RNA, 19 nt, Homo sapiens
  misc_RNA (1)...(19): siRNA sense strand
ggacaagagccaagggaag

SEQ ID NO: 2580258 - RNA, 19 nt, Homo sapiens
  misc_RNA (1)...(19): siRNA sense strand
cgacguugagucugggaaa

SEQ ID NO: 2580259 - RNA, 19 nt, Homo sapiens
  misc_RNA (1)...(19): siRNA sense strand
gcccaaugaagaugauaaa

SEQ ID NO: 2580260 - RNA, 19 nt, Homo sapiens
  misc_RNA (1)...(19): siRNA sense strand
gagaaggaguggcuggaga

SEQ ID NO: 2580261 - RNA, 19 nt, Homo sapiens
  misc_RNA (1)...(19): siRNA sense strand
gaaaagaaacucaggcgaa

SEQ ID NO: 2580262 - RNA, 19 nt, Homo sapiens
  misc_RNA (1)...(19): siRNA sense strand
agaccaagucccagaccaa

SEQ ID NO: 2580263 - RNA, 19 nt, Homo sapiens
  misc_RNA (1)...(19): siRNA sense strand
gggacaagagccaagggaa

SEQ ID NO: 2580264 - RNA, 19 nt, Homo sapiens
  misc_RNA (1)...(19): siRNA sense strand
uggaaacagagaaggagaa

SEQ ID NO: 2580265 - RNA, 19 nt, Homo sapiens
  misc_RNA (1)...(19): siRNA sense strand
gcagaaagcgacagggaug

SEQ ID NO: 2580266 - RNA, 19 nt, Homo sapiens
  misc_RNA (1)...(19): siRNA sense strand
ggugaaguuuggugagacu

SEQ ID NO: 2580267 - RNA, 19 nt, Homo sapiens
  misc_RNA (1)...(19): siRNA sense strand
cgguuagaggccacagaaa

SEQ ID NO: 2580268 - RNA, 19 nt, Homo sapiens
  misc_RNA (1)...(19): siRNA sense strand
gggacgacucugcggacua

SEQ ID NO: 2580269 - RNA, 19 nt, Homo sapiens
  misc_RNA (1)...(19): siRNA sense strand
gcguuuacacuuacagaau

SEQ ID NO: 2580270 - RNA, 19 nt, Homo sapiens
  misc_RNA (1)...(19): siRNA sense strand
gcaucguggugcuggccaa

SEQ ID NO: 2580271 - RNA, 19 nt, Homo sapiens
  misc_RNA (1)...(19): siRNA sense strand
agacauuguuccagcgacu

SEQ ID NO: 2580272 - RNA, 19 nt, Homo sapiens
  misc_RNA (1)...(19): siRNA sense strand
guggaaacagagaaggaga

SEQ ID NO: 2580273 - RNA, 19 nt, Homo sapiens
  misc_RNA (1)...(19): siRNA sense strand
ccugaggaggacacagaaa

SEQ ID NO: 2580274 - RNA, 19 nt, Homo sapiens
  misc_RNA (1)...(19): siRNA sense strand
cagagaggagggagcagaa

SEQ ID NO: 2580275 - RNA, 19 nt, Homo sapiens
  misc_RNA (1)...(19): siRNA sense strand
gaguuuuacaagaaggaaa

SEQ ID NO: 2580276 - RNA, 19 nt, Homo sapiens
  misc_RNA (1)...(19): siRNA sense strand
aggacaaguucuacagcca

SEQ ID NO: 2580277 - RNA, 19 nt, Homo sapiens
  misc_RNA (1)...(19): siRNA sense strand
acacaggagucaaggccca

SEQ ID NO: 2580278 - RNA, 19 nt, Homo sapiens
  misc_RNA (1)...(19): siRNA sense strand
aggaugguucugaggacaa

SEQ ID NO: 2580279 - RNA, 19 nt, Homo sapiens
  misc_RNA (1)...(19): siRNA sense strand
ucuccaaggggcagggaaa

SEQ ID NO: 2580280 - RNA, 19 nt, Homo sapiens
  misc_RNA (1)...(19): siRNA sense strand
uggccaagccugagcacga

SEQ ID NO: 2580281 - RNA, 19 nt, Homo sapiens
  misc_RNA (1)...(19): siRNA sense strand
gcgacagggaugaaguaca

SEQ ID NO: 2580282 - RNA, 19 nt, Homo sapiens
  misc_RNA (1)...(19): siRNA sense strand
cagggcaagacgagggaga

SEQ ID NO: 2580283 - RNA, 19 nt, Homo sapiens
  misc_RNA (1)...(19): siRNA sense strand
ccaaauucuaccuggaguu

SEQ ID NO: 2580284 - RNA, 19 nt, Homo sapiens
  misc_RNA (1)...(19): siRNA sense strand
agacgagggagaagcucua

SEQ ID NO: 2580285 - RNA, 19 nt, Homo sapiens
  misc_RNA (1)...(19): siRNA sense strand
ugaugaauccagugggcca

SEQ ID NO: 2580286 - RNA, 19 nt, Homo sapiens
  misc_RNA (1)...(19): siRNA sense strand
auuaagaaguccaaggaug

SEQ ID NO: 2580287 - RNA, 19 nt, Homo sapiens
  misc_RNA (1)...(19): siRNA sense strand
gagucaggaaggagaaaau

SEQ ID NO: 2580288 - RNA, 19 nt, Homo sapiens
  misc_RNA (1)...(19): siRNA sense strand
uugugaagacggagcguga

SEQ ID NO: 2580289 - RNA, 19 nt, Homo sapiens
  misc_RNA (1)...(19): siRNA sense strand
ccaggaaggaccaggaauc

SEQ ID NO: 2580290 - RNA, 19 nt, Homo sapiens
  misc_RNA (1)...(19): siRNA sense strand
aggagaaaaugaagaagga

SEQ ID NO: 2580291 - RNA, 19 nt, Homo sapiens
  misc_RNA (1)...(19): siRNA sense strand
caagagucaggaaggagaa

SEQ ID NO: 2580292 - RNA, 19 nt, Homo sapiens
  misc_RNA (1)...(19): siRNA sense strand
ugaucuugguggaaacaga

SEQ ID NO: 2580293 - RNA, 19 nt, Homo sapiens
  misc_RNA (1)...(19): siRNA sense strand
gggccaaagacccugaaga

SEQ ID NO: 2580294 - RNA, 19 nt, Homo sapiens
  misc_RNA (1)...(19): siRNA sense strand
ugguggaaacagagaagga

SEQ ID NO: 2580295 - RNA, 19 nt, Homo sapiens
  misc_RNA (1)...(19): siRNA sense strand
gugaagacaggcauugcaa

SEQ ID NO: 2580296 - RNA, 19 nt, Homo sapiens
  misc_RNA (1)...(19): siRNA sense strand
ucaagagucaggaaggaga

SEQ ID NO: 2580297 - RNA, 19 nt, Homo sapiens
  misc_RNA (1)...(19): siRNA sense strand
gcgacgaauccuauggcga

SEQ ID NO: 2580298 - RNA, 19 nt, Homo sapiens
  misc_RNA (1)...(19): siRNA sense strand
ccucaaacacucccugcaa

SEQ ID NO: 2580299 - RNA, 19 nt, Homo sapiens
  misc_RNA (1)...(19): siRNA sense strand
gagaaaaugaagaaggaag

SEQ ID NO: 2580300 - RNA, 19 nt, Homo sapiens
  misc_RNA (1)...(19): siRNA sense strand
agaaaaugaagaaggaagu

SEQ ID NO: 2580301 - RNA, 19 nt, Homo sapiens
  misc_RNA (1)...(19): siRNA sense strand
gguuagaggccacagaaac

SEQ ID NO: 2580302 - RNA, 19 nt, Homo sapiens
  misc_RNA (1)...(19): siRNA sense strand
aggaagaggacacaggcga

SEQ ID NO: 2580303 - RNA, 19 nt, Homo sapiens
  misc_RNA (1)...(19): siRNA sense strand
caaggagcucuauggagaa

SEQ ID NO: 2580304 - RNA, 19 nt, Homo sapiens
  misc_RNA (1)...(19): siRNA sense strand
acgccuacaccaagcagaa

SEQ ID NO: 2580305 - RNA, 19 nt, Homo sapiens
  misc_RNA (1)...(19): siRNA sense strand
aagcagaaagcgacaggga

SEQ ID NO: 2580306 - RNA, 19 nt, Homo sapiens
  misc_RNA (1)...(19): siRNA sense strand
cggaauugcguuuacacuu

SEQ ID NO: 2580307 - RNA, 19 nt, Homo sapiens
  misc_RNA (1)...(19): siRNA sense strand
cuguaucggaauugcguuu

SEQ ID NO: 2580308 - RNA, 19 nt, Homo sapiens
  misc_RNA (1)...(19): siRNA sense strand
ggcugguggccgacaguaa

SEQ ID NO: 2580309 - RNA, 19 nt, Homo sapiens
  misc_RNA (1)...(19): siRNA sense strand
ccaccaacccugcacgcua

SEQ ID NO: 2580310 - RNA, 19 nt, Homo sapiens
  misc_RNA (1)...(19): siRNA sense strand
ccucaguggcuguacccaa

SEQ ID NO: 2580311 - RNA, 19 nt, Homo sapiens
  misc_RNA (1)...(19): siRNA sense strand
gagaagaaguggcggcaca

SEQ ID NO: 2580312 - RNA, 19 nt, Homo sapiens
  misc_RNA (1)...(19): siRNA sense strand
acuacgagaacgagaagaa

SEQ ID NO: 2580313 - RNA, 19 nt, Homo sapiens
  misc_RNA (1)...(19): siRNA sense strand
uauggaaagcuguggacaa

SEQ ID NO: 2580314 - RNA, 19 nt, Homo sapiens
  misc_RNA (1)...(19): siRNA sense strand
caauauugaauuugggagu

SEQ ID NO: 2580315 - RNA, 19 nt, Homo sapiens
  misc_RNA (1)...(19): siRNA sense strand
ccaagauccuuuaagcaca

SEQ ID NO: 2580316 - RNA, 19 nt, Homo sapiens
  misc_RNA (1)...(19): siRNA sense strand
agaacaugcacgagaccau

SEQ ID NO: 2580317 - RNA, 19 nt, Homo sapiens
  misc_RNA (1)...(19): siRNA sense strand
cugcagaggaggugagccu

SEQ ID NO: 2580318 - RNA, 19 nt, Homo sapiens
  misc_RNA (1)...(19): siRNA sense strand
acagcgaggccgagcaaga

SEQ ID NO: 2580319 - RNA, 19 nt, Homo sapiens
  misc_RNA (1)...(19): siRNA sense strand
agaccauccuggaggccau

SEQ ID NO: 2580320 - RNA, 19 nt, Homo sapiens
  misc_RNA (1)...(19): siRNA sense strand
ccgaaagggcaguggagac

SEQ ID NO: 2580321 - RNA, 19 nt, Homo sapiens
  misc_RNA (1)...(19): siRNA sense strand
cgucagagcuacguggaca

SEQ ID NO: 2580322 - RNA, 19 nt, Homo sapiens
  misc_RNA (1)...(19): siRNA sense strand
gaucacgcacugagagcau

SEQ ID NO: 2580323 - RNA, 19 nt, Homo sapiens
  misc_RNA (1)...(19): siRNA sense strand
gcuagcauuugcaggccua

SEQ ID NO: 2580324 - RNA, 19 nt, Homo sapiens
  misc_RNA (1)...(19): siRNA sense strand
ccgcaaccagagugccaaa

SEQ ID NO: 2580325 - RNA, 19 nt, Homo sapiens
  misc_RNA (1)...(19): siRNA sense strand
aggaguacacagagaugau

SEQ ID NO: 2580326 - RNA, 19 nt, Homo sapiens
  misc_RNA (1)...(19): siRNA sense strand
acuacauagaccuggauuu

SEQ ID NO: 2580327 - RNA, 19 nt, Homo sapiens
  misc_RNA (1)...(19): siRNA sense strand
auucaaagaggucuggcaa

SEQ ID NO: 2580328 - RNA, 19 nt, Homo sapiens
  misc_RNA (1)...(19): siRNA sense strand
acugaggaguacaugaaga

SEQ ID NO: 2580329 - RNA, 19 nt, Homo sapiens
  misc_RNA (1)...(19): siRNA sense strand
cugaggaguacaugaagau

SEQ ID NO: 2580330 - RNA, 19 nt, Homo sapiens
  misc_RNA (1)...(19): siRNA sense strand
aggcauugcugcagaggag

SEQ ID NO: 2580331 - RNA, 19 nt, Homo sapiens
  misc_RNA (1)...(19): siRNA sense strand
ucgaguacuacgagaacga

SEQ ID NO: 2580332 - RNA, 19 nt, Homo sapiens
  misc_RNA (1)...(19): siRNA sense strand
cgggcugacuccaagaaca

SEQ ID NO: 2580333 - RNA, 19 nt, Homo sapiens
  misc_RNA (1)...(19): siRNA sense strand
ggaacaggcuugggcacga

SEQ ID NO: 2580334 - RNA, 19 nt, Homo sapiens
  misc_RNA (1)...(19): siRNA sense strand
gaacaggcauugcugcaga

SEQ ID NO: 2580335 - RNA, 19 nt, Homo sapiens
  misc_RNA (1)...(19): siRNA sense strand
uggucaaggacuucaaaca

SEQ ID NO: 2580336 - RNA, 19 nt, Homo sapiens
  misc_RNA (1)...(19): siRNA sense strand
gcuucucggacgugcgcaa

SEQ ID NO: 2580337 - RNA, 19 nt, Homo sapiens
  misc_RNA (1)...(19): siRNA sense strand
aggaagaggaggagaacau

SEQ ID NO: 2580338 - RNA, 19 nt, Homo sapiens
  misc_RNA (1)...(19): siRNA sense strand
acgaggaagaggaggagaa

SEQ ID NO: 2580339 - RNA, 19 nt, Homo sapiens
  misc_RNA (1)...(19): siRNA sense strand
aagcaggagcugagcagaa

SEQ ID NO: 2580340 - RNA, 19 nt, Homo sapiens
  misc_RNA (1)...(19): siRNA sense strand
agaagaacgacgaggacga

SEQ ID NO: 2580341 - RNA, 19 nt, Homo sapiens
  misc_RNA (1)...(19): siRNA sense strand
gcguacagcaccagcguca

SEQ ID NO: 2580342 - RNA, 19 nt, Homo sapiens
  misc_RNA (1)...(19): siRNA sense strand
ggauuaaaccagaccgugu

SEQ ID NO: 2580343 - RNA, 19 nt, Homo sapiens
  misc_RNA (1)...(19): siRNA sense strand
aggacgaggaagaggagga

SEQ ID NO: 2580344 - RNA, 19 nt, Homo sapiens
  misc_RNA (1)...(19): siRNA sense strand
agaacauugaccuggagaa

SEQ ID NO: 2580345 - RNA, 19 nt, Homo sapiens
  misc_RNA (1)...(19): siRNA sense strand
ggaagaacgccacaaggga

SEQ ID NO: 2580346 - RNA, 19 nt, Homo sapiens
  misc_RNA (1)...(19): siRNA sense strand
gcgaggacgaggaagagga

SEQ ID NO: 2580347 - RNA, 19 nt, Homo sapiens
  misc_RNA (1)...(19): siRNA sense strand
ccucaagaaagagaauaaa

SEQ ID NO: 2580348 - RNA, 19 nt, Homo sapiens
  misc_RNA (1)...(19): siRNA sense strand
gcgccucaagaaagagaau

SEQ ID NO: 2580349 - RNA, 19 nt, Homo sapiens
  misc_RNA (1)...(19): siRNA sense strand
ccucaauccaccagaacca

SEQ ID NO: 2580350 - RNA, 19 nt, Homo sapiens
  misc_RNA (1)...(19): siRNA sense strand
gggucauccugcugccaau

SEQ ID NO: 2580351 - RNA, 19 nt, Homo sapiens
  misc_RNA (1)...(19): siRNA sense strand
caguuugcaauuugggaaa

SEQ ID NO: 2580352 - RNA, 19 nt, Homo sapiens
  misc_RNA (1)...(19): siRNA sense strand
aggaaagguccaaguuuau

SEQ ID NO: 2580353 - RNA, 19 nt, Homo sapiens
  misc_RNA (1)...(19): siRNA sense strand
aggcauggugggaggcuau

SEQ ID NO: 2580354 - RNA, 19 nt, Homo sapiens
  misc_RNA (1)...(19): siRNA sense strand
cugcaauuucacaacgaua

SEQ ID NO: 2580355 - RNA, 19 nt, Homo sapiens
  misc_RNA (1)...(19): siRNA sense strand
uguuaacaucagagacaau

SEQ ID NO: 2580356 - RNA, 19 nt, Homo sapiens
  misc_RNA (1)...(19): siRNA sense strand
ggauaagcaccucagaaaa

SEQ ID NO: 2580357 - RNA, 19 nt, Homo sapiens
  misc_RNA (1)...(19): siRNA sense strand
caggaauguuacugggaug

SEQ ID NO: 2580358 - RNA, 19 nt, Homo sapiens
  misc_RNA (1)...(19): siRNA sense strand
ugacucauuugguggccua

SEQ ID NO: 2580359 - RNA, 19 nt, Homo sapiens
  misc_RNA (1)...(19): siRNA sense strand
guccauauguuuaggcugu

SEQ ID NO: 2580360 - RNA, 19 nt, Homo sapiens
  misc_RNA (1)...(19): siRNA sense strand
ggucauaggcaugguggga

SEQ ID NO: 2580361 - RNA, 19 nt, Homo sapiens
  misc_RNA (1)...(19): siRNA sense strand
uuucacaacgauagcacaa

SEQ ID NO: 2580362 - RNA, 19 nt, Homo sapiens
  misc_RNA (1)...(19): siRNA sense strand
cagcagaacuuccaggaca

SEQ ID NO: 2580363 - RNA, 19 nt, Homo sapiens
  misc_RNA (1)...(19): siRNA sense strand
agcagaacuuccaggacaa

SEQ ID NO: 2580364 - RNA, 19 nt, Homo sapiens
  misc_RNA (1)...(19): siRNA sense strand
cggaacuaaaggagaacuu

SEQ ID NO: 2580365 - RNA, 19 nt, Homo sapiens
  misc_RNA (1)...(19): siRNA sense strand
gcgaguucacgcugggcaa

SEQ ID NO: 2580366 - RNA, 19 nt, Homo sapiens
  misc_RNA (1)...(19): siRNA sense strand
aaagaagacaagagcuaca

SEQ ID NO: 2580367 - RNA, 19 nt, Homo sapiens
  misc_RNA (1)...(19): siRNA sense strand
aagugugacuacuggauca

SEQ ID NO: 2580368 - RNA, 19 nt, Homo sapiens
  misc_RNA (1)...(19): siRNA sense strand
ccaccaucuaugagcugaa

SEQ ID NO: 2580369 - RNA, 19 nt, Homo sapiens
  misc_RNA (1)...(19): siRNA sense strand
acaaauaucaaaugggaga

SEQ ID NO: 2580370 - RNA, 19 nt, Homo sapiens
  misc_RNA (1)...(19): siRNA sense strand
agacaaauaucaaauggga

SEQ ID NO: 2580371 - RNA, 19 nt, Homo sapiens
  misc_RNA (1)...(19): siRNA sense strand
ggagauuguugcaaggaag

SEQ ID NO: 2580372 - RNA, 19 nt, Homo sapiens
  misc_RNA (1)...(19): siRNA sense strand
agaacagaaccuucaggaa

SEQ ID NO: 2580373 - RNA, 19 nt, Homo sapiens
  misc_RNA (1)...(19): siRNA sense strand
accagaaaggaaugaagaa

SEQ ID NO: 2580374 - RNA, 19 nt, Homo sapiens
  misc_RNA (1)...(19): siRNA sense strand
ugaaguauguggaggagga

SEQ ID NO: 2580375 - RNA, 19 nt, Homo sapiens
  misc_RNA (1)...(19): siRNA sense strand
gaaacaaguaccagccaca

SEQ ID NO: 2580376 - RNA, 19 nt, Homo sapiens
  misc_RNA (1)...(19): siRNA sense strand
uagaggaggaaaaggaaaa

SEQ ID NO: 2580377 - RNA, 19 nt, Homo sapiens
  misc_RNA (1)...(19): siRNA sense strand
gcaucugggccuucggaau

SEQ ID NO: 2580378 - RNA, 19 nt, Homo sapiens
  misc_RNA (1)...(19): siRNA sense strand
ugaugaaguauguggagga

SEQ ID NO: 2580379 - RNA, 19 nt, Homo sapiens
  misc_RNA (1)...(19): siRNA sense strand
gggacuaccauguggccuu

SEQ ID NO: 2580380 - RNA, 19 nt, Homo sapiens
  misc_RNA (1)...(19): siRNA sense strand
aggcgagcgaggaagcaaa

SEQ ID NO: 2580381 - RNA, 19 nt, Homo sapiens
  misc_RNA (1)...(19): siRNA sense strand
ccuauguacaccugaugaa

SEQ ID NO: 2580382 - RNA, 19 nt, Homo sapiens
  misc_RNA (1)...(19): siRNA sense strand
aguauguggaggaggaguu

SEQ ID NO: 2580383 - RNA, 19 nt, Homo sapiens
  misc_RNA (1)...(19): siRNA sense strand
ccaugcugcuagaggagga

SEQ ID NO: 2580384 - RNA, 19 nt, Homo sapiens
  misc_RNA (1)...(19): siRNA sense strand
gggaagaguggcuggagga

SEQ ID NO: 2580385 - RNA, 19 nt, Homo sapiens
  misc_RNA (1)...(19): siRNA sense strand
uggugaugguggaggaaug

SEQ ID NO: 2580386 - RNA, 19 nt, Homo sapiens
  misc_RNA (1)...(19): siRNA sense strand
agaugauggugauggugga

SEQ ID NO: 2580387 - RNA, 19 nt, Homo sapiens
  misc_RNA (1)...(19): siRNA sense strand
ugauggugaugguggagga

SEQ ID NO: 2580388 - RNA, 19 nt, Homo sapiens
  misc_RNA (1)...(19): siRNA sense strand
gaauggaggaucugcacca

SEQ ID NO: 2580389 - RNA, 19 nt, Homo sapiens
  misc_RNA (1)...(19): siRNA sense strand
guucaaaguuggagcaaaa

SEQ ID NO: 2580390 - RNA, 19 nt, Homo sapiens
  misc_RNA (1)...(19): siRNA sense strand
gcucagaggaugugcggaa

SEQ ID NO: 2580391 - RNA, 19 nt, Homo sapiens
  misc_RNA (1)...(19): siRNA sense strand
cuucaauggcggauagaaa

SEQ ID NO: 2580392 - RNA, 19 nt, Homo sapiens
  misc_RNA (1)...(19): siRNA sense strand
agugaugaucugugggaua

SEQ ID NO: 2580393 - RNA, 19 nt, Homo sapiens
  misc_RNA (1)...(19): siRNA sense strand
aggaggaugaagaggauua

SEQ ID NO: 2580394 - RNA, 19 nt, Homo sapiens
  misc_RNA (1)...(19): siRNA sense strand
agauagaguacucggcaaa

SEQ ID NO: 2580395 - RNA, 19 nt, Homo sapiens
  misc_RNA (1)...(19): siRNA sense strand
uggaaugaccuauggcuaa

SEQ ID NO: 2580396 - RNA, 19 nt, Homo sapiens
  misc_RNA (1)...(19): siRNA sense strand
cacuagauguaaagagaau

SEQ ID NO: 2580397 - RNA, 19 nt, Homo sapiens
  misc_RNA (1)...(19): siRNA sense strand
gucaaagagaacuggaaua

SEQ ID NO: 2580398 - RNA, 19 nt, Homo sapiens
  misc_RNA (1)...(19): siRNA sense strand
gaauagaagcucaggccuu

SEQ ID NO: 2580399 - RNA, 19 nt, Homo sapiens
  misc_RNA (1)...(19): siRNA sense strand
ggucauuccuuuugggcaa

SEQ ID NO: 2580400 - RNA, 19 nt, Homo sapiens
  misc_RNA (1)...(19): siRNA sense strand
gaagaagugcuguggguca

SEQ ID NO: 2580401 - RNA, 19 nt, Homo sapiens
  misc_RNA (1)...(19): siRNA sense strand
cuucaggucacauggaaua

SEQ ID NO: 2580402 - RNA, 19 nt, Homo sapiens
  misc_RNA (1)...(19): siRNA sense strand
caauggaacucaaagccua

SEQ ID NO: 2580403 - RNA, 19 nt, Homo sapiens
  misc_RNA (1)...(19): siRNA sense strand
gaacaaaauacuagaagca

SEQ ID NO: 2580404 - RNA, 19 nt, Homo sapiens
  misc_RNA (1)...(19): siRNA sense strand
aaauauuguugcuggauca

SEQ ID NO: 2580405 - RNA, 19 nt, Homo sapiens
  misc_RNA (1)...(19): siRNA sense strand
gcaacugguuacaggcaga

SEQ ID NO: 2580406 - RNA, 19 nt, Homo sapiens
  misc_RNA (1)...(19): siRNA sense strand
cggaagcuuuacugguuaa

SEQ ID NO: 2580407 - RNA, 19 nt, Homo sapiens
  misc_RNA (1)...(19): siRNA sense strand
acagcauguuugaggaaga

SEQ ID NO: 2580408 - RNA, 19 nt, Homo sapiens
  misc_RNA (1)...(19): siRNA sense strand
ccuacacagaugaaaguaa

SEQ ID NO: 2580409 - RNA, 19 nt, Homo sapiens
  misc_RNA (1)...(19): siRNA sense strand
cguucuagaugauggacuu

SEQ ID NO: 2580410 - RNA, 19 nt, Homo sapiens
  misc_RNA (1)...(19): siRNA sense strand
ccacuuaagaaauuggauu

SEQ ID NO: 2580411 - RNA, 19 nt, Homo sapiens
  misc_RNA (1)...(19): siRNA sense strand
agaugaagaaccugaguca

SEQ ID NO: 2580412 - RNA, 19 nt, Homo sapiens
  misc_RNA (1)...(19): siRNA sense strand
ugugaagcuucuugaguuu

SEQ ID NO: 2580413 - RNA, 19 nt, Homo sapiens
  misc_RNA (1)...(19): siRNA sense strand
cugaagcagagaagaacaa

SEQ ID NO: 2580414 - RNA, 19 nt, Homo sapiens
  misc_RNA (1)...(19): siRNA sense strand
gggccuuugauuugauuaa

SEQ ID NO: 2580415 - RNA, 19 nt, Homo sapiens
  misc_RNA (1)...(19): siRNA sense strand
ggauuuagccaaagagccu

SEQ ID NO: 2580416 - RNA, 19 nt, Homo sapiens
  misc_RNA (1)...(19): siRNA sense strand
guucauuaugccuuggaaa

SEQ ID NO: 2580417 - RNA, 19 nt, Homo sapiens
  misc_RNA (1)...(19): siRNA sense strand
guggaaugaccuauggcua

SEQ ID NO: 2580418 - RNA, 19 nt, Homo sapiens
  misc_RNA (1)...(19): siRNA sense strand
accaaacacuagauguaaa

SEQ ID NO: 2580419 - RNA, 19 nt, Homo sapiens
  misc_RNA (1)...(19): siRNA sense strand
aagcaggagcaauggaaaa

SEQ ID NO: 2580420 - RNA, 19 nt, Homo sapiens
  misc_RNA (1)...(19): siRNA sense strand
ugacaaagaccgagccaac

SEQ ID NO: 2580421 - RNA, 19 nt, Homo sapiens
  misc_RNA (1)...(19): siRNA sense strand
agauggaggaggaugaaga

SEQ ID NO: 2580422 - RNA, 19 nt, Homo sapiens
  misc_RNA (1)...(19): siRNA sense strand
cuuugaacuugcaggccua

SEQ ID NO: 2580423 - RNA, 19 nt, Homo sapiens
  misc_RNA (1)...(19): siRNA sense strand
aagauagaguacucggcaa

SEQ ID NO: 2580424 - RNA, 19 nt, Homo sapiens
  misc_RNA (1)...(19): siRNA sense strand
caucaagaucauaagggau

SEQ ID NO: 2580425 - RNA, 19 nt, Homo sapiens
  misc_RNA (1)...(19): siRNA sense strand
agccugaugagguggaaua

SEQ ID NO: 2580426 - RNA, 19 nt, Homo sapiens
  misc_RNA (1)...(19): siRNA sense strand
augagauggaggaggauga

SEQ ID NO: 2580427 - RNA, 19 nt, Homo sapiens
  misc_RNA (1)...(19): siRNA sense strand
cagaagaagugcugugggu

SEQ ID NO: 2580428 - RNA, 19 nt, Homo sapiens
  misc_RNA (1)...(19): siRNA sense strand
cuaugucacugaaggaaga

SEQ ID NO: 2580429 - RNA, 19 nt, Homo sapiens
  misc_RNA (1)...(19): siRNA sense strand
ccuuauguucugagugaca

SEQ ID NO: 2580430 - RNA, 19 nt, Homo sapiens
  misc_RNA (1)...(19): siRNA sense strand
gaagcaggagcaauggaaa

SEQ ID NO: 2580431 - RNA, 19 nt, Homo sapiens
  misc_RNA (1)...(19): siRNA sense strand
cuagauguaaagagaauga

SEQ ID NO: 2580432 - RNA, 19 nt, Homo sapiens
  misc_RNA (1)...(19): siRNA sense strand
ucaaaagaaaggaaaggaa

SEQ ID NO: 2580433 - RNA, 19 nt, Homo sapiens
  misc_RNA (1)...(19): siRNA sense strand
gcggauagaaagcugguga

SEQ ID NO: 2580434 - RNA, 19 nt, Homo sapiens
  misc_RNA (1)...(19): siRNA sense strand
acaagcuaccuguggcaua

SEQ ID NO: 2580435 - RNA, 19 nt, Homo sapiens
  misc_RNA (1)...(19): siRNA sense strand
agacuggugacuaggguau

SEQ ID NO: 2580436 - RNA, 19 nt, Homo sapiens
  misc_RNA (1)...(19): siRNA sense strand
ugugguggauuuagccaaa

SEQ ID NO: 2580437 - RNA, 19 nt, Homo sapiens
  misc_RNA (1)...(19): siRNA sense strand
gauagaaagcuggugacua

SEQ ID NO: 2580438 - RNA, 19 nt, Homo sapiens
  misc_RNA (1)...(19): siRNA sense strand
cccaggaauaugauugaaa

SEQ ID NO: 2580439 - RNA, 19 nt, Homo sapiens
  misc_RNA (1)...(19): siRNA sense strand
aagaagugcugugggucaa

SEQ ID NO: 2580440 - RNA, 19 nt, Homo sapiens
  misc_RNA (1)...(19): siRNA sense strand
agcaugagauggaggagga

SEQ ID NO: 2580441 - RNA, 19 nt, Homo sapiens
  misc_RNA (1)...(19): siRNA sense strand
cagaugaaaguaaugagaa

SEQ ID NO: 2580442 - RNA, 19 nt, Homo sapiens
  misc_RNA (1)...(19): siRNA sense strand
ggagagaugaagaaccuga

SEQ ID NO: 2580443 - RNA, 19 nt, Homo sapiens
  misc_RNA (1)...(19): siRNA sense strand
ccuuagugaagauguguuu

SEQ ID NO: 2580444 - RNA, 19 nt, Homo sapiens
  misc_RNA (1)...(19): siRNA sense strand
ucuauaaccuccuugaaaa

SEQ ID NO: 2580445 - RNA, 19 nt, Homo sapiens
  misc_RNA (1)...(19): siRNA sense strand
uguucaaaguuggagcaaa

SEQ ID NO: 2580446 - RNA, 19 nt, Homo sapiens
  misc_RNA (1)...(19): siRNA sense strand
ccaggaauaugauugaaaa

SEQ ID NO: 2580447 - RNA, 19 nt, Homo sapiens
  misc_RNA (1)...(19): siRNA sense strand
cuucauagcacaggucaua

SEQ ID NO: 2580448 - RNA, 19 nt, Homo sapiens
  misc_RNA (1)...(19): siRNA sense strand
cguugaagauagaguacuc

SEQ ID NO: 2580449 - RNA, 19 nt, Homo sapiens
  misc_RNA (1)...(19): siRNA sense strand
ugucaaagagaacuggaau

SEQ ID NO: 2580450 - RNA, 19 nt, Homo sapiens
  misc_RNA (1)...(19): siRNA sense strand
gaaccagcauuuaaagcca

SEQ ID NO: 2580451 - RNA, 19 nt, Homo sapiens
  misc_RNA (1)...(19): siRNA sense strand
ugggagagaugaagaaccu

SEQ ID NO: 2580452 - RNA, 19 nt, Homo sapiens
  misc_RNA (1)...(19): siRNA sense strand
cuauauaugcuguaccaga

SEQ ID NO: 2580453 - RNA, 19 nt, Homo sapiens
  misc_RNA (1)...(19): siRNA sense strand
cauuaugccuuggaaacaa

SEQ ID NO: 2580454 - RNA, 19 nt, Homo sapiens
  misc_RNA (1)...(19): siRNA sense strand
gcugagaaguacaggagca

SEQ ID NO: 2580455 - RNA, 19 nt, Homo sapiens
  misc_RNA (1)...(19): siRNA sense strand
cagagaagaccaagggcuu

SEQ ID NO: 2580456 - RNA, 19 nt, Homo sapiens
  misc_RNA (1)...(19): siRNA sense strand
agaacgagcaggagcgaga

SEQ ID NO: 2580457 - RNA, 19 nt, Homo sapiens
  misc_RNA (1)...(19): siRNA sense strand
gggagaagcugaucgcuga

SEQ ID NO: 2580458 - RNA, 19 nt, Homo sapiens
  misc_RNA (1)...(19): siRNA sense strand
agguggaggugguggagau

SEQ ID NO: 2580459 - RNA, 19 nt, Homo sapiens
  misc_RNA (1)...(19): siRNA sense strand
gcgucaaguaugucaacaa

SEQ ID NO: 2580460 - RNA, 19 nt, Homo sapiens
  misc_RNA (1)...(19): siRNA sense strand
agguggaacaagagagcuu

SEQ ID NO: 2580461 - RNA, 19 nt, Homo sapiens
  misc_RNA (1)...(19): siRNA sense strand
ggcagggagacgagaacua

SEQ ID NO: 2580462 - RNA, 19 nt, Homo sapiens
  misc_RNA (1)...(19): siRNA sense strand
ucaccgaaauccagggcau

SEQ ID NO: 2580463 - RNA, 19 nt, Homo sapiens
  misc_RNA (1)...(19): siRNA sense strand
gcgucaaggccuacggcau

SEQ ID NO: 2580464 - RNA, 19 nt, Homo sapiens
  misc_RNA (1)...(19): siRNA sense strand
aguacuucauccagaacaa

SEQ ID NO: 2580465 - RNA, 19 nt, Homo sapiens
  misc_RNA (1)...(19): siRNA sense strand
ccuaaugagcacagagaag

SEQ ID NO: 2580466 - RNA, 19 nt, Homo sapiens
  misc_RNA (1)...(19): siRNA sense strand
ucaacaaugucgaggugga

SEQ ID NO: 2580467 - RNA, 19 nt, Homo sapiens
  misc_RNA (1)...(19): siRNA sense strand
aaguacaggagcagagaca

SEQ ID NO: 2580468 - RNA, 19 nt, Homo sapiens
  misc_RNA (1)...(19): siRNA sense strand
gcauugaaggcguggucuu

SEQ ID NO: 2580469 - RNA, 19 nt, Homo sapiens
  misc_RNA (1)...(19): siRNA sense strand
ggacacuaaugauggagca

SEQ ID NO: 2580470 - RNA, 19 nt, Homo sapiens
  misc_RNA (1)...(19): siRNA sense strand
aggaagugccggaugcgua

SEQ ID NO: 2580471 - RNA, 19 nt, Homo sapiens
  misc_RNA (1)...(19): siRNA sense strand
uggcccagguggacgacaa

SEQ ID NO: 2580472 - RNA, 19 nt, Homo sapiens
  misc_RNA (1)...(19): siRNA sense strand
ugguggagaugguugaaaa

SEQ ID NO: 2580473 - RNA, 19 nt, Homo sapiens
  misc_RNA (1)...(19): siRNA sense strand
ggaagaacuuuguagacac

SEQ ID NO: 2580474 - RNA, 19 nt, Homo sapiens
  misc_RNA (1)...(19): siRNA sense strand
gagcagagacaccagccua

SEQ ID NO: 2580475 - RNA, 19 nt, Homo sapiens
  misc_RNA (1)...(19): siRNA sense strand
gugcagaugaccuggacca

SEQ ID NO: 2580476 - RNA, 19 nt, Homo sapiens
  misc_RNA (1)...(19): siRNA sense strand
ugguggagcacgaggagga

SEQ ID NO: 2580477 - RNA, 19 nt, Homo sapiens
  misc_RNA (1)...(19): siRNA sense strand
ccgccaugcugcacaacau

SEQ ID NO: 2580478 - RNA, 19 nt, Homo sapiens
  misc_RNA (1)...(19): siRNA sense strand
aggcucugcugguggccaa

SEQ ID NO: 2580479 - RNA, 19 nt, Homo sapiens
  misc_RNA (1)...(19): siRNA sense strand
acaaugucgagguggaaca

SEQ ID NO: 2580480 - RNA, 19 nt, Homo sapiens
  misc_RNA (1)...(19): siRNA sense strand
augucgagguggaacaaga

SEQ ID NO: 2580481 - RNA, 19 nt, Homo sapiens
  misc_RNA (1)...(19): siRNA sense strand
guacaaugcugaccgccau

SEQ ID NO: 2580482 - RNA, 19 nt, Homo sapiens
  misc_RNA (1)...(19): siRNA sense strand
acaagcacauggaggcuca

SEQ ID NO: 2580483 - RNA, 19 nt, Homo sapiens
  misc_RNA (1)...(19): siRNA sense strand
ggaccagggagaagcugau

SEQ ID NO: 2580484 - RNA, 19 nt, Homo sapiens
  misc_RNA (1)...(19): siRNA sense strand
ggaagaagcgcgugcggaa

SEQ ID NO: 2580485 - RNA, 19 nt, Homo sapiens
  misc_RNA (1)...(19): siRNA sense strand
aggagaaggaggagagaga

SEQ ID NO: 2580486 - RNA, 19 nt, Homo sapiens
  misc_RNA (1)...(19): siRNA sense strand
ggguauaggaagagagguc

SEQ ID NO: 2580487 - RNA, 19 nt, Homo sapiens
  misc_RNA (1)...(19): siRNA sense strand
cccacaaggccaagggcaa

SEQ ID NO: 2580488 - RNA, 19 nt, Homo sapiens
  misc_RNA (1)...(19): siRNA sense strand
aggccaagggcaaggagaa

SEQ ID NO: 2580489 - RNA, 19 nt, Homo sapiens
  misc_RNA (1)...(19): siRNA sense strand
uaggaagagagguccgaaa

SEQ ID NO: 2580490 - RNA, 19 nt, Homo sapiens
  misc_RNA (1)...(19): siRNA sense strand
gcaucgggguauaggaaga

SEQ ID NO: 2580491 - RNA, 19 nt, Homo sapiens
  misc_RNA (1)...(19): siRNA sense strand
cuggugaaguggaaaggau

SEQ ID NO: 2580492 - RNA, 19 nt, Homo sapiens
  misc_RNA (1)...(19): siRNA sense strand
ccuacgaggagaaggagga

SEQ ID NO: 2580493 - RNA, 19 nt, Homo sapiens
  misc_RNA (1)...(19): siRNA sense strand
aguaucuggugaaguggaa

SEQ ID NO: 2580494 - RNA, 19 nt, Homo sapiens
  misc_RNA (1)...(19): siRNA sense strand
cagcugauccagugggaga

SEQ ID NO: 2580495 - RNA, 19 nt, Homo sapiens
  misc_RNA (1)...(19): siRNA sense strand
agaacaacgggcaggugua

SEQ ID NO: 2580496 - RNA, 19 nt, Homo sapiens
  misc_RNA (1)...(19): siRNA sense strand
ucggcaaccucaagcgcua

SEQ ID NO: 2580497 - RNA, 19 nt, Homo sapiens
  misc_RNA (1)...(19): siRNA sense strand
acgugaacccaaaguauau

SEQ ID NO: 2580498 - RNA, 19 nt, Homo sapiens
  misc_RNA (1)...(19): siRNA sense strand
gaggagaagugucuggcca

SEQ ID NO: 2580499 - RNA, 19 nt, Homo sapiens
  misc_RNA (1)...(19): siRNA sense strand
ugauccagugggagaacaa

SEQ ID NO: 2580500 - RNA, 19 nt, Homo sapiens
  misc_RNA (1)...(19): siRNA sense strand
gcaccugugacuucggcaa

SEQ ID NO: 2580501 - RNA, 19 nt, Homo sapiens
  misc_RNA (1)...(19): siRNA sense strand
ggacagaguuaucgaggca

SEQ ID NO: 2580502 - RNA, 19 nt, Homo sapiens
  misc_RNA (1)...(19): siRNA sense strand
ggacagaguuaucgaggca

SEQ ID NO: 2580503 - RNA, 19 nt, Homo sapiens
  misc_RNA (1)...(19): siRNA sense strand
ggacagaguuaucgaggca

SEQ ID NO: 2580504 - RNA, 19 nt, Homo sapiens
  misc_RNA (1)...(19): siRNA sense strand
ggacagaguuaucgaggca

SEQ ID NO: 2580505 - RNA, 19 nt, Homo sapiens
  misc_RNA (1)...(19): siRNA sense strand
ggacagaguuaucgaggca

SEQ ID NO: 2580506 - RNA, 19 nt, Homo sapiens
  misc_RNA (1)...(19): siRNA sense strand
ggacagaguuaucgaggca

SEQ ID NO: 2580507 - RNA, 19 nt, Homo sapiens
  misc_RNA (1)...(19): siRNA sense strand
ggacagaguuaucgaggca

SEQ ID NO: 2580508 - RNA, 19 nt, Homo sapiens
  misc_RNA (1)...(19): siRNA sense strand
ggacagaguuaucgaggca

SEQ ID NO: 2580509 - RNA, 19 nt, Homo sapiens
  misc_RNA (1)...(19): siRNA sense strand
ggacagaguuaucgaggca

SEQ ID NO: 2580510 - RNA, 19 nt, Homo sapiens
  misc_RNA (1)...(19): siRNA sense strand
ggacagaguuaucgaggca

SEQ ID NO: 2580511 - RNA, 19 nt, Homo sapiens
  misc_RNA (1)...(19): siRNA sense strand
ggacagaguuaucgaggca

SEQ ID NO: 2580512 - RNA, 19 nt, Homo sapiens
  misc_RNA (1)...(19): siRNA sense strand
ggacagaguuaucgaggca

SEQ ID NO: 2580513 - RNA, 19 nt, Homo sapiens
  misc_RNA (1)...(19): siRNA sense strand
ggacagaguuaucgaggca

SEQ ID NO: 2580514 - RNA, 19 nt, Homo sapiens
  misc_RNA (1)...(19): siRNA sense strand
ggacagaguuaucgaggca

SEQ ID NO: 2580515 - RNA, 19 nt, Homo sapiens
  misc_RNA (1)...(19): siRNA sense strand
ggacagaguuaucgaggca

SEQ ID NO: 2580516 - RNA, 19 nt, Homo sapiens
  misc_RNA (1)...(19): siRNA sense strand
ggacagaguuaucgaggca

SEQ ID NO: 2580517 - RNA, 19 nt, Homo sapiens
  misc_RNA (1)...(19): siRNA sense strand
ggacagaguuaucgaggca

SEQ ID NO: 2580518 - RNA, 19 nt, Homo sapiens
  misc_RNA (1)...(19): siRNA sense strand
ggacagaguuaucgaggca

SEQ ID NO: 2580519 - RNA, 19 nt, Homo sapiens
  misc_RNA (1)...(19): siRNA sense strand
ggacagaguuaucgaggca

SEQ ID NO: 2580520 - RNA, 19 nt, Homo sapiens
  misc_RNA (1)...(19): siRNA sense strand
ggacagaguuaucgaggca

SEQ ID NO: 2580521 - RNA, 19 nt, Homo sapiens
  misc_RNA (1)...(19): siRNA sense strand
ggacagaguuaucgaggca

SEQ ID NO: 2580522 - RNA, 19 nt, Homo sapiens
  misc_RNA (1)...(19): siRNA sense strand
ggacagaguuaucgaggca

SEQ ID NO: 2580523 - RNA, 19 nt, Homo sapiens
  misc_RNA (1)...(19): siRNA sense strand
ggacagaguuaucgaggca

SEQ ID NO: 2580524 - RNA, 19 nt, Homo sapiens
  misc_RNA (1)...(19): siRNA sense strand
ggacagaguuaucgaggca

SEQ ID NO: 2580525 - RNA, 19 nt, Homo sapiens
  misc_RNA (1)...(19): siRNA sense strand
ggacagaguuaucgaggca

SEQ ID NO: 2580526 - RNA, 19 nt, Homo sapiens
  misc_RNA (1)...(19): siRNA sense strand
ggacagaguuaucgaggca

SEQ ID NO: 2580527 - RNA, 19 nt, Homo sapiens
  misc_RNA (1)...(19): siRNA sense strand
ggacagaguuaucgaggca

SEQ ID NO: 2580528 - RNA, 19 nt, Homo sapiens
  misc_RNA (1)...(19): siRNA sense strand
ggacagaguuaucgaggca

SEQ ID NO: 2580529 - RNA, 19 nt, Homo sapiens
  misc_RNA (1)...(19): siRNA sense strand
ggacagaguuaucgaggca

SEQ ID NO: 2580530 - RNA, 19 nt, Homo sapiens
  misc_RNA (1)...(19): siRNA sense strand
ggacagaguuaucgaggca

SEQ ID NO: 2580531 - RNA, 19 nt, Homo sapiens
  misc_RNA (1)...(19): siRNA sense strand
ggacagaguuaucgaggca

SEQ ID NO: 2580532 - RNA, 19 nt, Homo sapiens
  misc_RNA (1)...(19): siRNA sense strand
caucagaggacaacagaau

SEQ ID NO: 2580533 - RNA, 19 nt, Homo sapiens
  misc_RNA (1)...(19): siRNA sense strand
acggaaauggacagaguua

SEQ ID NO: 2580534 - RNA, 19 nt, Homo sapiens
  misc_RNA (1)...(19): siRNA sense strand
ggacagaguuaccgaggca

SEQ ID NO: 2580535 - RNA, 19 nt, Homo sapiens
  misc_RNA (1)...(19): siRNA sense strand
ccacagaauacuacccaaa

SEQ ID NO: 2580536 - RNA, 19 nt, Homo sapiens
  misc_RNA (1)...(19): siRNA sense strand
gcuccuuguuauugagaau

SEQ ID NO: 2580537 - RNA, 19 nt, Homo sapiens
  misc_RNA (1)...(19): siRNA sense strand
uuacuuggauugagggaau

SEQ ID NO: 2580538 - RNA, 19 nt, Homo sapiens
  misc_RNA (1)...(19): siRNA sense strand
caucagagaaccacagaau

SEQ ID NO: 2580539 - RNA, 19 nt, Homo sapiens
  misc_RNA (1)...(19): siRNA sense strand
gggaaugaugagaaauaau

SEQ ID NO: 2580540 - RNA, 19 nt, Homo sapiens
  misc_RNA (1)...(19): siRNA sense strand
ggacagaguuaucaaggca

SEQ ID NO: 2580541 - RNA, 19 nt, Homo sapiens
  misc_RNA (1)...(19): siRNA sense strand
acggaguuaucgaggcaua

SEQ ID NO: 2580542 - RNA, 19 nt, Homo sapiens
  misc_RNA (1)...(19): siRNA sense strand
acacaaugaauccaagaaa

SEQ ID NO: 2580543 - RNA, 19 nt, Homo sapiens
  misc_RNA (1)...(19): siRNA sense strand
uugagggaaugaugagaaa

SEQ ID NO: 2580544 - RNA, 19 nt, Homo sapiens
  misc_RNA (1)...(19): siRNA sense strand
ggacagaguuaucgaggcu

SEQ ID NO: 2580545 - RNA, 19 nt, Homo sapiens
  misc_RNA (1)...(19): siRNA sense strand
ggacagaguuaucgaggcu

SEQ ID NO: 2580546 - RNA, 19 nt, Homo sapiens
  misc_RNA (1)...(19): siRNA sense strand
ccacggaaauggacagagu

SEQ ID NO: 2580547 - RNA, 19 nt, Homo sapiens
  misc_RNA (1)...(19): siRNA sense strand
ggacggaguuaucgaggca

SEQ ID NO: 2580548 - RNA, 19 nt, Homo sapiens
  misc_RNA (1)...(19): siRNA sense strand
gaggugauggacagaguua

SEQ ID NO: 2580549 - RNA, 19 nt, Homo sapiens
  misc_RNA (1)...(19): siRNA sense strand
acaagcaccaccugagaaa

SEQ ID NO: 2580550 - RNA, 19 nt, Homo sapiens
  misc_RNA (1)...(19): siRNA sense strand
ccagaguuaucgaggcaca

SEQ ID NO: 2580551 - RNA, 19 nt, Homo sapiens
  misc_RNA (1)...(19): siRNA sense strand
cagauauugccuugcuaaa

SEQ ID NO: 2580552 - RNA, 19 nt, Homo sapiens
  misc_RNA (1)...(19): siRNA sense strand
ccgccaggacugaauguua

SEQ ID NO: 2580553 - RNA, 19 nt, Homo sapiens
  misc_RNA (1)...(19): siRNA sense strand
acgguaauggacagaguua

SEQ ID NO: 2580554 - RNA, 19 nt, Homo sapiens
  misc_RNA (1)...(19): siRNA sense strand
acgguaauggacagaguua

SEQ ID NO: 2580555 - RNA, 19 nt, Homo sapiens
  misc_RNA (1)...(19): siRNA sense strand
acgguaauggacagaguua

SEQ ID NO: 2580556 - RNA, 19 nt, Homo sapiens
  misc_RNA (1)...(19): siRNA sense strand
acgguaauggacagaguua

SEQ ID NO: 2580557 - RNA, 19 nt, Homo sapiens
  misc_RNA (1)...(19): siRNA sense strand
acgguaauggacagaguua

SEQ ID NO: 2580558 - RNA, 19 nt, Homo sapiens
  misc_RNA (1)...(19): siRNA sense strand
ggaaauggacagaguuauc

SEQ ID NO: 2580559 - RNA, 19 nt, Homo sapiens
  misc_RNA (1)...(19): siRNA sense strand
gagauuaguccuugguguu

SEQ ID NO: 2580560 - RNA, 19 nt, Homo sapiens
  misc_RNA (1)...(19): siRNA sense strand
cacaaugccuggugacaga

SEQ ID NO: 2580561 - RNA, 19 nt, Homo sapiens
  misc_RNA (1)...(19): siRNA sense strand
ucagaggacaacagaauau

SEQ ID NO: 2580562 - RNA, 19 nt, Homo sapiens
  misc_RNA (1)...(19): siRNA sense strand
gguaauggccagaguuauc

SEQ ID NO: 2580563 - RNA, 19 nt, Homo sapiens
  misc_RNA (1)...(19): siRNA sense strand
ggccagaguuaucgaggca

SEQ ID NO: 2580564 - RNA, 19 nt, Homo sapiens
  misc_RNA (1)...(19): siRNA sense strand
gcucacugcuugaagaagu

SEQ ID NO: 2580565 - RNA, 19 nt, Homo sapiens
  misc_RNA (1)...(19): siRNA sense strand
gugcaaucacuauaaguau

SEQ ID NO: 2580566 - RNA, 19 nt, Homo sapiens
  misc_RNA (1)...(19): siRNA sense strand
ggacacaagagaaugguca

SEQ ID NO: 2580567 - RNA, 19 nt, Homo sapiens
  misc_RNA (1)...(19): siRNA sense strand
aggacaaauuuauggcuca

SEQ ID NO: 2580568 - RNA, 19 nt, Homo sapiens
  misc_RNA (1)...(19): siRNA sense strand
cauucuaugcuguggaaaa

SEQ ID NO: 2580569 - RNA, 19 nt, Homo sapiens
  misc_RNA (1)...(19): siRNA sense strand
gagaaaacguaguugggga

SEQ ID NO: 2580570 - RNA, 19 nt, Homo sapiens
  misc_RNA (1)...(19): siRNA sense strand
ggguggccauucagggcaa

SEQ ID NO: 2580571 - RNA, 19 nt, Homo sapiens
  misc_RNA (1)...(19): siRNA sense strand
aggaugagcuugagcaccu

SEQ ID NO: 2580572 - RNA, 19 nt, Homo sapiens
  misc_RNA (1)...(19): siRNA sense strand
aguacaacccauacaaaca

SEQ ID NO: 2580573 - RNA, 19 nt, Homo sapiens
  misc_RNA (1)...(19): siRNA sense strand
aggacuuccacaagaaauu

SEQ ID NO: 2580574 - RNA, 19 nt, Homo sapiens
  misc_RNA (1)...(19): siRNA sense strand
agaaaacguaguuggggaa

SEQ ID NO: 2580575 - RNA, 19 nt, Homo sapiens
  misc_RNA (1)...(19): siRNA sense strand
agagaauggucaucccgaa

SEQ ID NO: 2580576 - RNA, 19 nt, Homo sapiens
  misc_RNA (1)...(19): siRNA sense strand
cuccaaaaccuaaguacaa

SEQ ID NO: 2580577 - RNA, 19 nt, Homo sapiens
  misc_RNA (1)...(19): siRNA sense strand
cuacuaugcagcagggcca

SEQ ID NO: 2580578 - RNA, 19 nt, Homo sapiens
  misc_RNA (1)...(19): siRNA sense strand
ggaaacgggaaccagggua

SEQ ID NO: 2580579 - RNA, 19 nt, Homo sapiens
  misc_RNA (1)...(19): siRNA sense strand
caacaagcuccgagggcag

SEQ ID NO: 2580580 - RNA, 19 nt, Homo sapiens
  misc_RNA (1)...(19): siRNA sense strand
aggaggagacuguccguau

SEQ ID NO: 2580581 - RNA, 19 nt, Homo sapiens
  misc_RNA (1)...(19): siRNA sense strand
ugaagaaacugaagcggca

SEQ ID NO: 2580582 - RNA, 19 nt, Homo sapiens
  misc_RNA (1)...(19): siRNA sense strand
ggaacaggcucaugccaca

SEQ ID NO: 2580583 - RNA, 19 nt, Homo sapiens
  misc_RNA (1)...(19): siRNA sense strand
uaaugaaacuggugagccu

SEQ ID NO: 2580584 - RNA, 19 nt, Homo sapiens
  misc_RNA (1)...(19): siRNA sense strand
cugcccagcaacaguguaa

SEQ ID NO: 2580585 - RNA, 19 nt, Homo sapiens
  misc_RNA (1)...(19): siRNA sense strand
gcgagggcugcaagggauu

SEQ ID NO: 2580586 - RNA, 19 nt, Homo sapiens
  misc_RNA (1)...(19): siRNA sense strand
ccaaaaugcuggggaacga

SEQ ID NO: 2580587 - RNA, 19 nt, Homo sapiens
  misc_RNA (1)...(19): siRNA sense strand
ucaucaagggagcgcacua

SEQ ID NO: 2580588 - RNA, 19 nt, Homo sapiens
  misc_RNA (1)...(19): siRNA sense strand
agauaguugacuuugcuaa

SEQ ID NO: 2580589 - RNA, 19 nt, Homo sapiens
  misc_RNA (1)...(19): siRNA sense strand
ggugaugcuucuggagaca

SEQ ID NO: 2580590 - RNA, 19 nt, Homo sapiens
  misc_RNA (1)...(19): siRNA sense strand
aagaggaggaacaggcuca

SEQ ID NO: 2580591 - RNA, 19 nt, Homo sapiens
  misc_RNA (1)...(19): siRNA sense strand
caacugggcaugaucgaga

SEQ ID NO: 2580592 - RNA, 19 nt, Homo sapiens
  misc_RNA (1)...(19): siRNA sense strand
ucguaaagcagcagaaaca

SEQ ID NO: 2580593 - RNA, 19 nt, Homo sapiens
  misc_RNA (1)...(19): siRNA sense strand
ccaaagauauugugccaga

SEQ ID NO: 2580594 - RNA, 19 nt, Homo sapiens
  misc_RNA (1)...(19): siRNA sense strand
aggaaaucgaugagaugaa

SEQ ID NO: 2580595 - RNA, 19 nt, Homo sapiens
  misc_RNA (1)...(19): siRNA sense strand
guuuauaaugggcagguaa

SEQ ID NO: 2580596 - RNA, 19 nt, Homo sapiens
  misc_RNA (1)...(19): siRNA sense strand
cauuauagccaucagggaa

SEQ ID NO: 2580597 - RNA, 19 nt, Homo sapiens
  misc_RNA (1)...(19): siRNA sense strand
agauauugugccagaagaa

SEQ ID NO: 2580598 - RNA, 19 nt, Homo sapiens
  misc_RNA (1)...(19): siRNA sense strand
gcaaaggagaugagagccu

SEQ ID NO: 2580599 - RNA, 19 nt, Homo sapiens
  misc_RNA (1)...(19): siRNA sense strand
gagcaaucaucgaagcuga

SEQ ID NO: 2580600 - RNA, 19 nt, Homo sapiens
  misc_RNA (1)...(19): siRNA sense strand
ccuuacaacuacacgagaa

SEQ ID NO: 2580601 - RNA, 19 nt, Homo sapiens
  misc_RNA (1)...(19): siRNA sense strand
gagaaguaugcucaggaaa

SEQ ID NO: 2580602 - RNA, 19 nt, Homo sapiens
  misc_RNA (1)...(19): siRNA sense strand
ccauuacaucugagaagua

SEQ ID NO: 2580603 - RNA, 19 nt, Homo sapiens
  misc_RNA (1)...(19): siRNA sense strand
aguugaaugaauugggcua

SEQ ID NO: 2580604 - RNA, 19 nt, Homo sapiens
  misc_RNA (1)...(19): siRNA sense strand
acuuauuucucguuggcaa

SEQ ID NO: 2580605 - RNA, 19 nt, Homo sapiens
  misc_RNA (1)...(19): siRNA sense strand
aggaaauauuggaagauuc

SEQ ID NO: 2580606 - RNA, 19 nt, Homo sapiens
  misc_RNA (1)...(19): siRNA sense strand
guucaaaaugggucguaaa

SEQ ID NO: 2580607 - RNA, 19 nt, Homo sapiens
  misc_RNA (1)...(19): siRNA sense strand
caacaaugcauuuggccca

SEQ ID NO: 2580608 - RNA, 19 nt, Homo sapiens
  misc_RNA (1)...(19): siRNA sense strand
aacucaugccuuagagaua

SEQ ID NO: 2580609 - RNA, 19 nt, Homo sapiens
  misc_RNA (1)...(19): siRNA sense strand
cuuggaauuuauaccgaaa

SEQ ID NO: 2580610 - RNA, 19 nt, Homo sapiens
  misc_RNA (1)...(19): siRNA sense strand
gcgauugacccuugagacu

SEQ ID NO: 2580611 - RNA, 19 nt, Homo sapiens
  misc_RNA (1)...(19): siRNA sense strand
agccaaagauauugugcca

SEQ ID NO: 2580612 - RNA, 19 nt, Homo sapiens
  misc_RNA (1)...(19): siRNA sense strand
ucaugggaaacuaaggaaa

SEQ ID NO: 2580613 - RNA, 19 nt, Homo sapiens
  misc_RNA (1)...(19): siRNA sense strand
gcagaaacagaguggucca

SEQ ID NO: 2580614 - RNA, 19 nt, Homo sapiens
  misc_RNA (1)...(19): siRNA sense strand
agaugagagccuugaagau

SEQ ID NO: 2580615 - RNA, 19 nt, Homo sapiens
  misc_RNA (1)...(19): siRNA sense strand
gauugugacgugugaugaa

SEQ ID NO: 2580616 - RNA, 19 nt, Homo sapiens
  misc_RNA (1)...(19): siRNA sense strand
agaagaagcuccaaagcac

SEQ ID NO: 2580617 - RNA, 19 nt, Homo sapiens
  misc_RNA (1)...(19): siRNA sense strand
cuccaaagcacuucccaaa

SEQ ID NO: 2580618 - RNA, 19 nt, Homo sapiens
  misc_RNA (1)...(19): siRNA sense strand
ccaucagggaacauguuua

SEQ ID NO: 2580619 - RNA, 19 nt, Homo sapiens
  misc_RNA (1)...(19): siRNA sense strand
cuuauuucucguuggcaaa

SEQ ID NO: 2580620 - RNA, 19 nt, Homo sapiens
  misc_RNA (1)...(19): siRNA sense strand
cagcagaaacaacucgcaa

SEQ ID NO: 2580621 - RNA, 19 nt, Homo sapiens
  misc_RNA (1)...(19): siRNA sense strand
ccagcaggaugcagaaaau

SEQ ID NO: 2580622 - RNA, 19 nt, Homo sapiens
  misc_RNA (1)...(19): siRNA sense strand
aggaaaguaugcagagccu

SEQ ID NO: 2580623 - RNA, 19 nt, Homo sapiens
  misc_RNA (1)...(19): siRNA sense strand
ggaucaagaagaagcucca

SEQ ID NO: 2580624 - RNA, 19 nt, Homo sapiens
  misc_RNA (1)...(19): siRNA sense strand
ucuuuaagcaucucaacaa

SEQ ID NO: 2580625 - RNA, 19 nt, Homo sapiens
  misc_RNA (1)...(19): siRNA sense strand
ccaauuacauuauagccau

SEQ ID NO: 2580626 - RNA, 19 nt, Homo sapiens
  misc_RNA (1)...(19): siRNA sense strand
gaaaguaugcagagccugu

SEQ ID NO: 2580627 - RNA, 19 nt, Homo sapiens
  misc_RNA (1)...(19): siRNA sense strand
aguuuaaggagaagccuga

SEQ ID NO: 2580628 - RNA, 19 nt, Homo sapiens
  misc_RNA (1)...(19): siRNA sense strand
ggucguaaagcagcagaaa

SEQ ID NO: 2580629 - RNA, 19 nt, Homo sapiens
  misc_RNA (1)...(19): siRNA sense strand
gcaaauugaaaaggugaaa

SEQ ID NO: 2580630 - RNA, 19 nt, Homo sapiens
  misc_RNA (1)...(19): siRNA sense strand
ucgaugagaugaaccaaaa

SEQ ID NO: 2580631 - RNA, 19 nt, Homo sapiens
  misc_RNA (1)...(19): siRNA sense strand
caaauaaccuuucccggau

SEQ ID NO: 2580632 - RNA, 19 nt, Homo sapiens
  misc_RNA (1)...(19): siRNA sense strand
aagguuugucugugaauau

SEQ ID NO: 2580633 - RNA, 19 nt, Homo sapiens
  misc_RNA (1)...(19): siRNA sense strand
aaacaaaauccgacuccaa

SEQ ID NO: 2580634 - RNA, 19 nt, Homo sapiens
  misc_RNA (1)...(19): siRNA sense strand
ucgaacaucaguuguggaa

SEQ ID NO: 2580635 - RNA, 19 nt, Homo sapiens
  misc_RNA (1)...(19): siRNA sense strand
gggucguaaagcagcagaa

SEQ ID NO: 2580636 - RNA, 19 nt, Homo sapiens
  misc_RNA (1)...(19): siRNA sense strand
gguacuacuuugagggcau

SEQ ID NO: 2580637 - RNA, 19 nt, Homo sapiens
  misc_RNA (1)...(19): siRNA sense strand
acacaaaucucguggccuu

SEQ ID NO: 2580638 - RNA, 19 nt, Homo sapiens
  misc_RNA (1)...(19): siRNA sense strand
ugaguaagcuugauggaga

SEQ ID NO: 2580639 - RNA, 19 nt, Homo sapiens
  misc_RNA (1)...(19): siRNA sense strand
aggugacggaagugaguaa

SEQ ID NO: 2580640 - RNA, 19 nt, Homo sapiens
  misc_RNA (1)...(19): siRNA sense strand
ugaucuggucccugagaaa

SEQ ID NO: 2580641 - RNA, 19 nt, Homo sapiens
  misc_RNA (1)...(19): siRNA sense strand
aaucuuggccagagggaca

SEQ ID NO: 2580642 - RNA, 19 nt, Homo sapiens
  misc_RNA (1)...(19): siRNA sense strand
ccaauuugucugaugaaaa

SEQ ID NO: 2580643 - RNA, 19 nt, Homo sapiens
  misc_RNA (1)...(19): siRNA sense strand
augaagaaggcaaguguga

SEQ ID NO: 2580644 - RNA, 19 nt, Homo sapiens
  misc_RNA (1)...(19): siRNA sense strand
ggcacuggacggagagaga

SEQ ID NO: 2580645 - RNA, 19 nt, Homo sapiens
  misc_RNA (1)...(19): siRNA sense strand
cauggaaggucgaggcauc

SEQ ID NO: 2580646 - RNA, 19 nt, Homo sapiens
  misc_RNA (1)...(19): siRNA sense strand
gcguggaugaaguggagau

SEQ ID NO: 2580647 - RNA, 19 nt, Homo sapiens
  misc_RNA (1)...(19): siRNA sense strand
ccaaguggggugagggaga

SEQ ID NO: 2580648 - RNA, 19 nt, Homo sapiens
  misc_RNA (1)...(19): siRNA sense strand
cgucaaacuaaacuggaca

SEQ ID NO: 2580649 - RNA, 19 nt, Homo sapiens
  misc_RNA (1)...(19): siRNA sense strand
gggcaugaucuuaccuaca

SEQ ID NO: 2580650 - RNA, 19 nt, Homo sapiens
  misc_RNA (1)...(19): siRNA sense strand
cggaagugaguaagcuuga

SEQ ID NO: 2580651 - RNA, 19 nt, Homo sapiens
  misc_RNA (1)...(19): siRNA sense strand
uuaaacagaccuuuggcua

SEQ ID NO: 2580652 - RNA, 19 nt, Homo sapiens
  misc_RNA (1)...(19): siRNA sense strand
aggaagaaggggugaaacu

SEQ ID NO: 2580653 - RNA, 19 nt, Homo sapiens
  misc_RNA (1)...(19): siRNA sense strand
acugaggagcgcaaggcua

SEQ ID NO: 2580654 - RNA, 19 nt, Homo sapiens
  misc_RNA (1)...(19): siRNA sense strand
uagugugagccuugccaaa

SEQ ID NO: 2580655 - RNA, 19 nt, Homo sapiens
  misc_RNA (1)...(19): siRNA sense strand
uccacaugguagauggcaa

SEQ ID NO: 2580656 - RNA, 19 nt, Homo sapiens
  misc_RNA (1)...(19): siRNA sense strand
cggagagagaugcuucaaa

SEQ ID NO: 2580657 - RNA, 19 nt, Homo sapiens
  misc_RNA (1)...(19): siRNA sense strand
uguuaaagguauugagcuu

SEQ ID NO: 2580658 - RNA, 19 nt, Homo sapiens
  misc_RNA (1)...(19): siRNA sense strand
ucagaugugcauugagaaa

SEQ ID NO: 2580659 - RNA, 19 nt, Homo sapiens
  misc_RNA (1)...(19): siRNA sense strand
gcuuggagaaacuaggaaa

SEQ ID NO: 2580660 - RNA, 19 nt, Homo sapiens
  misc_RNA (1)...(19): siRNA sense strand
cuaccaaacacaacagaau

SEQ ID NO: 2580661 - RNA, 19 nt, Homo sapiens
  misc_RNA (1)...(19): siRNA sense strand
gcauugagaaagaagccaa

SEQ ID NO: 2580662 - RNA, 19 nt, Homo sapiens
  misc_RNA (1)...(19): siRNA sense strand
ccuucagacacuugauuua

SEQ ID NO: 2580663 - RNA, 19 nt, Homo sapiens
  misc_RNA (1)...(19): siRNA sense strand
ggacuaucacgaagaccaa

SEQ ID NO: 2580664 - RNA, 19 nt, Homo sapiens
  misc_RNA (1)...(19): siRNA sense strand
uggcagaaacaucgcuuaa

SEQ ID NO: 2580665 - RNA, 19 nt, Homo sapiens
  misc_RNA (1)...(19): siRNA sense strand
gaauuggaucugacagcaa

SEQ ID NO: 2580666 - RNA, 19 nt, Homo sapiens
  misc_RNA (1)...(19): siRNA sense strand
aauuuaggucucagugaaa

SEQ ID NO: 2580667 - RNA, 19 nt, Homo sapiens
  misc_RNA (1)...(19): siRNA sense strand
cagccaugcucaagggacu

SEQ ID NO: 2580668 - RNA, 19 nt, Homo sapiens
  misc_RNA (1)...(19): siRNA sense strand
ugggaacauuugaggacau

SEQ ID NO: 2580669 - RNA, 19 nt, Homo sapiens
  misc_RNA (1)...(19): siRNA sense strand
uggaaaacuuggaaagcuu

SEQ ID NO: 2580670 - RNA, 19 nt, Homo sapiens
  misc_RNA (1)...(19): siRNA sense strand
gccucaaccugcaggaaca

SEQ ID NO: 2580671 - RNA, 19 nt, Homo sapiens
  misc_RNA (1)...(19): siRNA sense strand
caauagaaccuucagcaga

SEQ ID NO: 2580672 - RNA, 19 nt, Homo sapiens
  misc_RNA (1)...(19): siRNA sense strand
gagaaagaagccaacaaaa

SEQ ID NO: 2580673 - RNA, 19 nt, Homo sapiens
  misc_RNA (1)...(19): siRNA sense strand
ccauaaugacauagaggcu

SEQ ID NO: 2580674 - RNA, 19 nt, Homo sapiens
  misc_RNA (1)...(19): siRNA sense strand
acaaagaaaaccugcacaa

SEQ ID NO: 2580675 - RNA, 19 nt, Homo sapiens
  misc_RNA (1)...(19): siRNA sense strand
cucaagggacucugugaaa

SEQ ID NO: 2580676 - RNA, 19 nt, Homo sapiens
  misc_RNA (1)...(19): siRNA sense strand
gcucaagggacucugugaa

SEQ ID NO: 2580677 - RNA, 19 nt, Homo sapiens
  misc_RNA (1)...(19): siRNA sense strand
cuauagaccagcaagcauu

SEQ ID NO: 2580678 - RNA, 19 nt, Homo sapiens
  misc_RNA (1)...(19): siRNA sense strand
gggacuaucacgaagacca

SEQ ID NO: 2580679 - RNA, 19 nt, Homo sapiens
  misc_RNA (1)...(19): siRNA sense strand
ucagaggcaacgugaagaa

SEQ ID NO: 2580680 - RNA, 19 nt, Homo sapiens
  misc_RNA (1)...(19): siRNA sense strand
caagcuuuccugugggauu

SEQ ID NO: 2580681 - RNA, 19 nt, Homo sapiens
  misc_RNA (1)...(19): siRNA sense strand
aucugaaaguacuggauuu

SEQ ID NO: 2580682 - RNA, 19 nt, Homo sapiens
  misc_RNA (1)...(19): siRNA sense strand
gguguuggcugcuuggaga

SEQ ID NO: 2580683 - RNA, 19 nt, Homo sapiens
  misc_RNA (1)...(19): siRNA sense strand
gauuuaacuaggugccaga

SEQ ID NO: 2580684 - RNA, 19 nt, Homo sapiens
  misc_RNA (1)...(19): siRNA sense strand
cuggauacaugaagacacu

SEQ ID NO: 2580685 - RNA, 19 nt, Homo sapiens
  misc_RNA (1)...(19): siRNA sense strand
aguuuauuccagugcacaa

SEQ ID NO: 2580686 - RNA, 19 nt, Homo sapiens
  misc_RNA (1)...(19): siRNA sense strand
ucuuaauccaaacgggaau

SEQ ID NO: 2580687 - RNA, 19 nt, Homo sapiens
  misc_RNA (1)...(19): siRNA sense strand
gcacaaacuugaaggcucg

SEQ ID NO: 2580688 - RNA, 19 nt, Homo sapiens
  misc_RNA (1)...(19): siRNA sense strand
uugagaaagaagccaacaa

SEQ ID NO: 2580689 - RNA, 19 nt, Homo sapiens
  misc_RNA (1)...(19): siRNA sense strand
ccucugggaugaagggucu

SEQ ID NO: 2580690 - RNA, 19 nt, Homo sapiens
  misc_RNA (1)...(19): siRNA sense strand
ccuuaaaccugagccacaa

SEQ ID NO: 2580691 - RNA, 19 nt, Homo sapiens
  misc_RNA (1)...(19): siRNA sense strand
cauguagacuuaagccaca

SEQ ID NO: 2580692 - RNA, 19 nt, Homo sapiens
  misc_RNA (1)...(19): siRNA sense strand
uggaaugaacaguaggaaa

SEQ ID NO: 2580693 - RNA, 19 nt, Homo sapiens
  misc_RNA (1)...(19): siRNA sense strand
ugcaaauagcuuaggcaaa

SEQ ID NO: 2580694 - RNA, 19 nt, Homo sapiens
  misc_RNA (1)...(19): siRNA sense strand
aggaagaggaauuggaguu

SEQ ID NO: 2580695 - RNA, 19 nt, Homo sapiens
  misc_RNA (1)...(19): siRNA sense strand
gugcaaauagcuuaggcaa

SEQ ID NO: 2580696 - RNA, 19 nt, Homo sapiens
  misc_RNA (1)...(19): siRNA sense strand
cuguaaagcgaaugaggau

SEQ ID NO: 2580697 - RNA, 19 nt, Homo sapiens
  misc_RNA (1)...(19): siRNA sense strand
gaacacagagggugcgaca

SEQ ID NO: 2580698 - RNA, 19 nt, Homo sapiens
  misc_RNA (1)...(19): siRNA sense strand
gauuaaugaagaaagccua

SEQ ID NO: 2580699 - RNA, 19 nt, Homo sapiens
  misc_RNA (1)...(19): siRNA sense strand
cauaauggaugaaaggaac

SEQ ID NO: 2580700 - RNA, 19 nt, Homo sapiens
  misc_RNA (1)...(19): siRNA sense strand
ccucaugaaagcagaacca

SEQ ID NO: 2580701 - RNA, 19 nt, Homo sapiens
  misc_RNA (1)...(19): siRNA sense strand
uugauaauaugaugcggaa

SEQ ID NO: 2580702 - RNA, 19 nt, Homo sapiens
  misc_RNA (1)...(19): siRNA sense strand
aauacaaaucacacgcaua

SEQ ID NO: 2580703 - RNA, 19 nt, Homo sapiens
  misc_RNA (1)...(19): siRNA sense strand
uggcaaugcaggugggaug

SEQ ID NO: 2580704 - RNA, 19 nt, Homo sapiens
  misc_RNA (1)...(19): siRNA sense strand
gaaaggaaccgacagguca

SEQ ID NO: 2580705 - RNA, 19 nt, Homo sapiens
  misc_RNA (1)...(19): siRNA sense strand
cggauauuguugaggcucu

SEQ ID NO: 2580706 - RNA, 19 nt, Homo sapiens
  misc_RNA (1)...(19): siRNA sense strand
gcucugaacaagaaggaac

SEQ ID NO: 2580707 - RNA, 19 nt, Homo sapiens
  misc_RNA (1)...(19): siRNA sense strand
gggcggaagaaaauacaaa

SEQ ID NO: 2580708 - RNA, 19 nt, Homo sapiens
  misc_RNA (1)...(19): siRNA sense strand
uggacaaaguucuucucaa

SEQ ID NO: 2580709 - RNA, 19 nt, Homo sapiens
  misc_RNA (1)...(19): siRNA sense strand
aggauggacgcguggguga

SEQ ID NO: 2580710 - RNA, 19 nt, Homo sapiens
  misc_RNA (1)...(19): siRNA sense strand
gauuggagcuacuggugca

SEQ ID NO: 2580711 - RNA, 19 nt, Homo sapiens
  misc_RNA (1)...(19): siRNA sense strand
cagaauauaaugaaccuca

SEQ ID NO: 2580712 - RNA, 19 nt, Homo sapiens
  misc_RNA (1)...(19): siRNA sense strand
uggagcuacuggugcaaau

SEQ ID NO: 2580713 - RNA, 19 nt, Homo sapiens
  misc_RNA (1)...(19): siRNA sense strand
ggauuaaugaagaaagccu

SEQ ID NO: 2580714 - RNA, 19 nt, Homo sapiens
  misc_RNA (1)...(19): siRNA sense strand
aaauggagcuggaagcagu

SEQ ID NO: 2580715 - RNA, 19 nt, Homo sapiens
  misc_RNA (1)...(19): siRNA sense strand
caguaggaaaccagaucuu

SEQ ID NO: 2580716 - RNA, 19 nt, Homo sapiens
  misc_RNA (1)...(19): siRNA sense strand
gugaaauagcacucaucau

SEQ ID NO: 2580717 - RNA, 19 nt, Homo sapiens
  misc_RNA (1)...(19): siRNA sense strand
gcagcaccaccuaggacaa

SEQ ID NO: 2580718 - RNA, 19 nt, Homo sapiens
  misc_RNA (1)...(19): siRNA sense strand
acucaagagcuucuccaaa

SEQ ID NO: 2580719 - RNA, 19 nt, Homo sapiens
  misc_RNA (1)...(19): siRNA sense strand
aacacugaggacagagaaa

SEQ ID NO: 2580720 - RNA, 19 nt, Homo sapiens
  misc_RNA (1)...(19): siRNA sense strand
gaggagaaguuuauggcaa

SEQ ID NO: 2580721 - RNA, 19 nt, Homo sapiens
  misc_RNA (1)...(19): siRNA sense strand
ccuuugaagccuugauaaa

SEQ ID NO: 2580722 - RNA, 19 nt, Homo sapiens
  misc_RNA (1)...(19): siRNA sense strand
caagaauguccuaggagaa

SEQ ID NO: 2580723 - RNA, 19 nt, Homo sapiens
  misc_RNA (1)...(19): siRNA sense strand
acaaagaaagccagagaga

SEQ ID NO: 2580724 - RNA, 19 nt, Homo sapiens
  misc_RNA (1)...(19): siRNA sense strand
cagcagacccugaggacuu

SEQ ID NO: 2580725 - RNA, 19 nt, Homo sapiens
  misc_RNA (1)...(19): siRNA sense strand
aagcaaaggagaagaaguu

SEQ ID NO: 2580726 - RNA, 19 nt, Homo sapiens
  misc_RNA (1)...(19): siRNA sense strand
cauuuauggugcugaacaa

SEQ ID NO: 2580727 - RNA, 19 nt, Homo sapiens
  misc_RNA (1)...(19): siRNA sense strand
cagaguucuuagagcauua

SEQ ID NO: 2580728 - RNA, 19 nt, Homo sapiens
  misc_RNA (1)...(19): siRNA sense strand
gcuccaaggcugagaacca

SEQ ID NO: 2580729 - RNA, 19 nt, Homo sapiens
  misc_RNA (1)...(19): siRNA sense strand
ccaagaauguccuaggaga

SEQ ID NO: 2580730 - RNA, 19 nt, Homo sapiens
  misc_RNA (1)...(19): siRNA sense strand
aaagaaagccagagagaag

SEQ ID NO: 2580731 - RNA, 19 nt, Homo sapiens
  misc_RNA (1)...(19): siRNA sense strand
agaauaaagccaagagugu

SEQ ID NO: 2580732 - RNA, 19 nt, Homo sapiens
  misc_RNA (1)...(19): siRNA sense strand
gggagaaguuugacccaga

SEQ ID NO: 2580733 - RNA, 19 nt, Homo sapiens
  misc_RNA (1)...(19): siRNA sense strand
aaauugaagcaaaggagaa

SEQ ID NO: 2580734 - RNA, 19 nt, Homo sapiens
  misc_RNA (1)...(19): siRNA sense strand
caaauauggaggagaaguu

SEQ ID NO: 2580735 - RNA, 19 nt, Homo sapiens
  misc_RNA (1)...(19): siRNA sense strand
agacgaaaauucugggcaa

SEQ ID NO: 2580736 - RNA, 19 nt, Homo sapiens
  misc_RNA (1)...(19): siRNA sense strand
gggucaaugugaaagucaa

SEQ ID NO: 2580737 - RNA, 19 nt, Homo sapiens
  misc_RNA (1)...(19): siRNA sense strand
uuuaaaggcuggauggaca

SEQ ID NO: 2580738 - RNA, 19 nt, Homo sapiens
  misc_RNA (1)...(19): siRNA sense strand
agucacugguggagauaga

SEQ ID NO: 2580739 - RNA, 19 nt, Homo sapiens
  misc_RNA (1)...(19): siRNA sense strand
aggcauagaauaaagccaa

SEQ ID NO: 2580740 - RNA, 19 nt, Homo sapiens
  misc_RNA (1)...(19): siRNA sense strand
cagcagaauacuuagauga

SEQ ID NO: 2580741 - RNA, 19 nt, Homo sapiens
  misc_RNA (1)...(19): siRNA sense strand
ccaugugggugaagcucaa

SEQ ID NO: 2580742 - RNA, 19 nt, Homo sapiens
  misc_RNA (1)...(19): siRNA sense strand
cggugauggugcuagggaa

SEQ ID NO: 2580743 - RNA, 19 nt, Homo sapiens
  misc_RNA (1)...(19): siRNA sense strand
ggaggaugaugguggggaa

SEQ ID NO: 2580744 - RNA, 19 nt, Homo sapiens
  misc_RNA (1)...(19): siRNA sense strand
caagcagggaacaaagaaa

SEQ ID NO: 2580745 - RNA, 19 nt, Homo sapiens
  misc_RNA (1)...(19): siRNA sense strand
agaaggaccaagaagagaa

SEQ ID NO: 2580746 - RNA, 19 nt, Homo sapiens
  misc_RNA (1)...(19): siRNA sense strand
acagaggagcagaagaaau

SEQ ID NO: 2580747 - RNA, 19 nt, Homo sapiens
  misc_RNA (1)...(19): siRNA sense strand
cgaaauauacugauccaga

SEQ ID NO: 2580748 - RNA, 19 nt, Homo sapiens
  misc_RNA (1)...(19): siRNA sense strand
uggcagaugaccuggaaga

SEQ ID NO: 2580749 - RNA, 19 nt, Homo sapiens
  misc_RNA (1)...(19): siRNA sense strand
ccaaaggacagcaggagca

SEQ ID NO: 2580750 - RNA, 19 nt, Homo sapiens
  misc_RNA (1)...(19): siRNA sense strand
acuacaaugccaugaagaa

SEQ ID NO: 2580751 - RNA, 19 nt, Homo sapiens
  misc_RNA (1)...(19): siRNA sense strand
ugauaaagauacuggcaag

SEQ ID NO: 2580752 - RNA, 19 nt, Homo sapiens
  misc_RNA (1)...(19): siRNA sense strand
ccuuggaacuggcuggauu

SEQ ID NO: 2580753 - RNA, 19 nt, Homo sapiens
  misc_RNA (1)...(19): siRNA sense strand
cguaugaggagcagaacca

SEQ ID NO: 2580754 - RNA, 19 nt, Homo sapiens
  misc_RNA (1)...(19): siRNA sense strand
aggacaacguguacaugua

SEQ ID NO: 2580755 - RNA, 19 nt, Homo sapiens
  misc_RNA (1)...(19): siRNA sense strand
cugcauggaaguuggccaa

SEQ ID NO: 2580756 - RNA, 19 nt, Homo sapiens
  misc_RNA (1)...(19): siRNA sense strand
uugaugacuuggaggauga

SEQ ID NO: 2580757 - RNA, 19 nt, Homo sapiens
  misc_RNA (1)...(19): siRNA sense strand
ugguggagauagagaagca

SEQ ID NO: 2580758 - RNA, 19 nt, Homo sapiens
  misc_RNA (1)...(19): siRNA sense strand
agccugagcugguggugaa

SEQ ID NO: 2580759 - RNA, 19 nt, Homo sapiens
  misc_RNA (1)...(19): siRNA sense strand
cggagucacugguggagau

SEQ ID NO: 2580760 - RNA, 19 nt, Homo sapiens
  misc_RNA (1)...(19): siRNA sense strand
aauaaagccaagaguguca

SEQ ID NO: 2580761 - RNA, 19 nt, Homo sapiens
  misc_RNA (1)...(19): siRNA sense strand
gauggaagcaagaagacau

SEQ ID NO: 2580762 - RNA, 19 nt, Homo sapiens
  misc_RNA (1)...(19): siRNA sense strand
guggagauagagaagcaaa

SEQ ID NO: 2580763 - RNA, 19 nt, Homo sapiens
  misc_RNA (1)...(19): siRNA sense strand
guuaauugugugugcauga

SEQ ID NO: 2580764 - RNA, 19 nt, Homo sapiens
  misc_RNA (1)...(19): siRNA sense strand
auauguuggcacagcaaua

SEQ ID NO: 2580765 - RNA, 19 nt, Homo sapiens
  misc_RNA (1)...(19): siRNA sense strand
gggaaaaucuauaugaucu

SEQ ID NO: 2580766 - RNA, 19 nt, Homo sapiens
  misc_RNA (1)...(19): siRNA sense strand
uggcguaugaggagcagaa

SEQ ID NO: 2580767 - RNA, 19 nt, Homo sapiens
  misc_RNA (1)...(19): siRNA sense strand
ggaauaucuuugacugcau

SEQ ID NO: 2580768 - RNA, 19 nt, Homo sapiens
  misc_RNA (1)...(19): siRNA sense strand
ggggaaaacuaccguaaca

SEQ ID NO: 2580769 - RNA, 19 nt, Homo sapiens
  misc_RNA (1)...(19): siRNA sense strand
gccagugagagaaggcaua

SEQ ID NO: 2580770 - RNA, 19 nt, Homo sapiens
  misc_RNA (1)...(19): siRNA sense strand
ccuuaaacacacucaucaa

SEQ ID NO: 2580771 - RNA, 19 nt, Homo sapiens
  misc_RNA (1)...(19): siRNA sense strand
uguucgagaugcugcuuaa

SEQ ID NO: 2580772 - RNA, 19 nt, Homo sapiens
  misc_RNA (1)...(19): siRNA sense strand
uggagauagagaagcaaau

SEQ ID NO: 2580773 - RNA, 19 nt, Homo sapiens
  misc_RNA (1)...(19): siRNA sense strand
cuucacaaauggcuggaau

SEQ ID NO: 2580774 - RNA, 19 nt, Homo sapiens
  misc_RNA (1)...(19): siRNA sense strand
gagcagaagaaauacuaca

SEQ ID NO: 2580775 - RNA, 19 nt, Homo sapiens
  misc_RNA (1)...(19): siRNA sense strand
gugaagaaaagacgaaaau

SEQ ID NO: 2580776 - RNA, 19 nt, Homo sapiens
  misc_RNA (1)...(19): siRNA sense strand
ccaaaacccaaucgaaaua

SEQ ID NO: 2580777 - RNA, 19 nt, Homo sapiens
  misc_RNA (1)...(19): siRNA sense strand
uggauucucugaaggcaaa

SEQ ID NO: 2580778 - RNA, 19 nt, Homo sapiens
  misc_RNA (1)...(19): siRNA sense strand
ccuugugcaucguggugaa

SEQ ID NO: 2580779 - RNA, 19 nt, Homo sapiens
  misc_RNA (1)...(19): siRNA sense strand
gaccagaagcccacgguga

SEQ ID NO: 2580780 - RNA, 19 nt, Homo sapiens
  misc_RNA (1)...(19): siRNA sense strand
ggccuuagugauagaguca

SEQ ID NO: 2580781 - RNA, 19 nt, Homo sapiens
  misc_RNA (1)...(19): siRNA sense strand
acagaaaaccagauaucua

SEQ ID NO: 2580782 - RNA, 19 nt, Homo sapiens
  misc_RNA (1)...(19): siRNA sense strand
cauaaauaagcgaggcacu

SEQ ID NO: 2580783 - RNA, 19 nt, Homo sapiens
  misc_RNA (1)...(19): siRNA sense strand
gaaauugaagcaaaggaga

SEQ ID NO: 2580784 - RNA, 19 nt, Homo sapiens
  misc_RNA (1)...(19): siRNA sense strand
gcguauucaagcuggccaa

SEQ ID NO: 2580785 - RNA, 19 nt, Homo sapiens
  misc_RNA (1)...(19): siRNA sense strand
gggaacaaagaaagccaga

SEQ ID NO: 2580786 - RNA, 19 nt, Homo sapiens
  misc_RNA (1)...(19): siRNA sense strand
auaauguugcaauggguua

SEQ ID NO: 2580787 - RNA, 19 nt, Homo sapiens
  misc_RNA (1)...(19): siRNA sense strand
ucuacaauucggagggaua

SEQ ID NO: 2580788 - RNA, 19 nt, Homo sapiens
  misc_RNA (1)...(19): siRNA sense strand
gaacauuuccauuggccaa

SEQ ID NO: 2580789 - RNA, 19 nt, Homo sapiens
  misc_RNA (1)...(19): siRNA sense strand
gcaaguuggugaaggugca

SEQ ID NO: 2580790 - RNA, 19 nt, Homo sapiens
  misc_RNA (1)...(19): siRNA sense strand
ggaugacagcacaggcaau

SEQ ID NO: 2580791 - RNA, 19 nt, Homo sapiens
  misc_RNA (1)...(19): siRNA sense strand
gugaccaacaugugggaca

SEQ ID NO: 2580792 - RNA, 19 nt, Homo sapiens
  misc_RNA (1)...(19): siRNA sense strand
aggcaaacaucuguggaau

SEQ ID NO: 2580793 - RNA, 19 nt, Homo sapiens
  misc_RNA (1)...(19): siRNA sense strand
gcacaggcaauguucgcaa

SEQ ID NO: 2580794 - RNA, 19 nt, Homo sapiens
  misc_RNA (1)...(19): siRNA sense strand
ucaucauauuuguggacuu

SEQ ID NO: 2580795 - RNA, 19 nt, Homo sapiens
  misc_RNA (1)...(19): siRNA sense strand
ucccaaaggccaaggaagu

SEQ ID NO: 2580796 - RNA, 19 nt, Homo sapiens
  misc_RNA (1)...(19): siRNA sense strand
agaaauggccugagagacc

SEQ ID NO: 2580797 - RNA, 19 nt, Homo sapiens
  misc_RNA (1)...(19): siRNA sense strand
uggccaaggaugugccuau

SEQ ID NO: 2580798 - RNA, 19 nt, Homo sapiens
  misc_RNA (1)...(19): siRNA sense strand
ccaaauucuuucagguuac

SEQ ID NO: 2580799 - RNA, 19 nt, Homo sapiens
  misc_RNA (1)...(19): siRNA sense strand
agccaagaucccugaguuu

SEQ ID NO: 2580800 - RNA, 19 nt, Homo sapiens
  misc_RNA (1)...(19): siRNA sense strand
ccacaguacuucagagacc

SEQ ID NO: 2580801 - RNA, 19 nt, Homo sapiens
  misc_RNA (1)...(19): siRNA sense strand
caauuuagcugcaggcuug

SEQ ID NO: 2580802 - RNA, 19 nt, Homo sapiens
  misc_RNA (1)...(19): siRNA sense strand
gcuuaaucacagaccucaa

SEQ ID NO: 2580803 - RNA, 19 nt, Homo sapiens
  misc_RNA (1)...(19): siRNA sense strand
ccaaagaggaagcagcagu

SEQ ID NO: 2580804 - RNA, 19 nt, Homo sapiens
  misc_RNA (1)...(19): siRNA sense strand
ucauagaacacgagauccu

SEQ ID NO: 2580805 - RNA, 19 nt, Homo sapiens
  misc_RNA (1)...(19): siRNA sense strand
ccauugauuuagagaggcu

SEQ ID NO: 2580806 - RNA, 19 nt, Homo sapiens
  misc_RNA (1)...(19): siRNA sense strand
aggcuggagaaguggauca

SEQ ID NO: 2580807 - RNA, 19 nt, Homo sapiens
  misc_RNA (1)...(19): siRNA sense strand
guguggauuucaagcccua

SEQ ID NO: 2580808 - RNA, 19 nt, Homo sapiens
  misc_RNA (1)...(19): siRNA sense strand
agaagcggucgguggagaa

SEQ ID NO: 2580809 - RNA, 19 nt, Homo sapiens
  misc_RNA (1)...(19): siRNA sense strand
gugugaacgugaaggggau

SEQ ID NO: 2580810 - RNA, 19 nt, Homo sapiens
  misc_RNA (1)...(19): siRNA sense strand
cuuacaucuuggcugauaa

SEQ ID NO: 2580811 - RNA, 19 nt, Homo sapiens
  misc_RNA (1)...(19): siRNA sense strand
gggacaagcuucagagccc

SEQ ID NO: 2580812 - RNA, 19 nt, Homo sapiens
  misc_RNA (1)...(19): siRNA sense strand
acaucuuggcugauaauuu

SEQ ID NO: 2580813 - RNA, 19 nt, Homo sapiens
  misc_RNA (1)...(19): siRNA sense strand
uggaguggccgguagaaaa

SEQ ID NO: 2580814 - RNA, 19 nt, Homo sapiens
  misc_RNA (1)...(19): siRNA sense strand
aaggagaugaugaccacaa

SEQ ID NO: 2580815 - RNA, 19 nt, Homo sapiens
  misc_RNA (1)...(19): siRNA sense strand
aggaacagaaguuucgcua

SEQ ID NO: 2580816 - RNA, 19 nt, Homo sapiens
  misc_RNA (1)...(19): siRNA sense strand
gcacaaaaggcgacccuca

SEQ ID NO: 2580817 - RNA, 19 nt, Homo sapiens
  misc_RNA (1)...(19): siRNA sense strand
uuguggacuuugaagauau

SEQ ID NO: 2580818 - RNA, 19 nt, Homo sapiens
  misc_RNA (1)...(19): siRNA sense strand
gcgugaucuucuugaccuu

SEQ ID NO: 2580819 - RNA, 19 nt, Homo sapiens
  misc_RNA (1)...(19): siRNA sense strand
guguaaggaaggagaagau

SEQ ID NO: 2580820 - RNA, 19 nt, Homo sapiens
  misc_RNA (1)...(19): siRNA sense strand
ccgucuauauagggagaaa

SEQ ID NO: 2580821 - RNA, 19 nt, Homo sapiens
  misc_RNA (1)...(19): siRNA sense strand
aggaaggagaagaugaaca

SEQ ID NO: 2580822 - RNA, 19 nt, Homo sapiens
  misc_RNA (1)...(19): siRNA sense strand
acggauacgaccagagcuu

SEQ ID NO: 2580823 - RNA, 19 nt, Homo sapiens
  misc_RNA (1)...(19): siRNA sense strand
gaaagagagaccaugccaa

SEQ ID NO: 2580824 - RNA, 19 nt, Homo sapiens
  misc_RNA (1)...(19): siRNA sense strand
cuagaagauaugagaccuu

SEQ ID NO: 2580825 - RNA, 19 nt, Homo sapiens
  misc_RNA (1)...(19): siRNA sense strand
gguggggacaauugggaaa

SEQ ID NO: 2580826 - RNA, 19 nt, Homo sapiens
  misc_RNA (1)...(19): siRNA sense strand
aaucauuagugaagagcac

SEQ ID NO: 2580827 - RNA, 19 nt, Homo sapiens
  misc_RNA (1)...(19): siRNA sense strand
gcuugaugugucagaugaa

SEQ ID NO: 2580828 - RNA, 19 nt, Homo sapiens
  misc_RNA (1)...(19): siRNA sense strand
ucagaugaagagauggcua

SEQ ID NO: 2580829 - RNA, 19 nt, Homo sapiens
  misc_RNA (1)...(19): siRNA sense strand
gguacuuggauuugccaga

SEQ ID NO: 2580830 - RNA, 19 nt, Homo sapiens
  misc_RNA (1)...(19): siRNA sense strand
aguaaaccacagaaagaua

SEQ ID NO: 2580831 - RNA, 19 nt, Homo sapiens
  misc_RNA (1)...(19): siRNA sense strand
agaaagauaacaaaggcua

SEQ ID NO: 2580832 - RNA, 19 nt, Homo sapiens
  misc_RNA (1)...(19): siRNA sense strand
agaacaugguggugaaaau

SEQ ID NO: 2580833 - RNA, 19 nt, Homo sapiens
  misc_RNA (1)...(19): siRNA sense strand
ugucuuggauaaagggaga

SEQ ID NO: 2580834 - RNA, 19 nt, Homo sapiens
  misc_RNA (1)...(19): siRNA sense strand
ccaaaguggugaagcugga

SEQ ID NO: 2580835 - RNA, 19 nt, Homo sapiens
  misc_RNA (1)...(19): siRNA sense strand
cagcauagcagaauggagu

SEQ ID NO: 2580836 - RNA, 19 nt, Homo sapiens
  misc_RNA (1)...(19): siRNA sense strand
aagaagaagccucggcaga

SEQ ID NO: 2580837 - RNA, 19 nt, Homo sapiens
  misc_RNA (1)...(19): siRNA sense strand
gcauagcagaauggaguaa

SEQ ID NO: 2580838 - RNA, 19 nt, Homo sapiens
  misc_RNA (1)...(19): siRNA sense strand
guuuguucaccgagauuua

SEQ ID NO: 2580839 - RNA, 19 nt, Homo sapiens
  misc_RNA (1)...(19): siRNA sense strand
gugagagggcagagggaac

SEQ ID NO: 2580840 - RNA, 19 nt, Homo sapiens
  misc_RNA (1)...(19): siRNA sense strand
cgguacagcauccgggaga

SEQ ID NO: 2580841 - RNA, 19 nt, Homo sapiens
  misc_RNA (1)...(19): siRNA sense strand
caacaauggugugggagga

SEQ ID NO: 2580842 - RNA, 19 nt, Homo sapiens
  misc_RNA (1)...(19): siRNA sense strand
gggaacugugagugucuaa

SEQ ID NO: 2580843 - RNA, 19 nt, Homo sapiens
  misc_RNA (1)...(19): siRNA sense strand
aaagaugcucaaagaagaa

SEQ ID NO: 2580844 - RNA, 19 nt, Homo sapiens
  misc_RNA (1)...(19): siRNA sense strand
caucagugucuuggauaaa

SEQ ID NO: 2580845 - RNA, 19 nt, Homo sapiens
  misc_RNA (1)...(19): siRNA sense strand
agcaagggcaccaggcuua

SEQ ID NO: 2580846 - RNA, 19 nt, Homo sapiens
  misc_RNA (1)...(19): siRNA sense strand
cccaagagcuacuggucca

SEQ ID NO: 2580847 - RNA, 19 nt, Homo sapiens
  misc_RNA (1)...(19): siRNA sense strand
caaaagaauggcugguaau

SEQ ID NO: 2580848 - RNA, 19 nt, Homo sapiens
  misc_RNA (1)...(19): siRNA sense strand
auugaauaugugagagaca

SEQ ID NO: 2580849 - RNA, 19 nt, Homo sapiens
  misc_RNA (1)...(19): siRNA sense strand
cuaacauugugaagcuauu

SEQ ID NO: 2580850 - RNA, 19 nt, Homo sapiens
  misc_RNA (1)...(19): siRNA sense strand
cagacuacuacaaagcuaa

SEQ ID NO: 2580851 - RNA, 19 nt, Homo sapiens
  misc_RNA (1)...(19): siRNA sense strand
uuucaugugugcaguggaa

SEQ ID NO: 2580852 - RNA, 19 nt, Homo sapiens
  misc_RNA (1)...(19): siRNA sense strand
gagaagacccacagaggac

SEQ ID NO: 2580853 - RNA, 19 nt, Homo sapiens
  misc_RNA (1)...(19): siRNA sense strand
ccaaggaauaacauugaau

SEQ ID NO: 2580854 - RNA, 19 nt, Homo sapiens
  misc_RNA (1)...(19): siRNA sense strand
cagauaugcaagcggacuu

SEQ ID NO: 2580855 - RNA, 19 nt, Homo sapiens
  misc_RNA (1)...(19): siRNA sense strand
ccaauaagcauggggagaa

SEQ ID NO: 2580856 - RNA, 19 nt, Homo sapiens
  misc_RNA (1)...(19): siRNA sense strand
ggcugguaauggaagagaa

SEQ ID NO: 2580857 - RNA, 19 nt, Homo sapiens
  misc_RNA (1)...(19): siRNA sense strand
gagagacaucggagaggga

SEQ ID NO: 2580858 - RNA, 19 nt, Homo sapiens
  misc_RNA (1)...(19): siRNA sense strand
gguccauucaagagagugu

SEQ ID NO: 2580859 - RNA, 19 nt, Homo sapiens
  misc_RNA (1)...(19): siRNA sense strand
acagaggggagguguguaa

SEQ ID NO: 2580860 - RNA, 19 nt, Homo sapiens
  misc_RNA (1)...(19): siRNA sense strand
cagaauuugacaacccuaa

SEQ ID NO: 2580861 - RNA, 19 nt, Homo sapiens
  misc_RNA (1)...(19): siRNA sense strand
ggguaaucccaaaccauca

SEQ ID NO: 2580862 - RNA, 19 nt, Homo sapiens
  misc_RNA (1)...(19): siRNA sense strand
cucuauugcugccgaagaa

SEQ ID NO: 2580863 - RNA, 19 nt, Homo sapiens
  misc_RNA (1)...(19): siRNA sense strand
aguaaagaugcucaaagaa

SEQ ID NO: 2580864 - RNA, 19 nt, Homo sapiens
  misc_RNA (1)...(19): siRNA sense strand
auggaguaaaccacagaaa

SEQ ID NO: 2580865 - RNA, 19 nt, Homo sapiens
  misc_RNA (1)...(19): siRNA sense strand
ucauuuacuacgugcgaga

SEQ ID NO: 2580866 - RNA, 19 nt, Homo sapiens
  misc_RNA (1)...(19): siRNA sense strand
ccgaauugcaguucuugaa

SEQ ID NO: 2580867 - RNA, 19 nt, Homo sapiens
  misc_RNA (1)...(19): siRNA sense strand
cggcagauaugcaagcgga

SEQ ID NO: 2580868 - RNA, 19 nt, Homo sapiens
  misc_RNA (1)...(19): siRNA sense strand
ccgcuacacuacagagucu

SEQ ID NO: 2580869 - RNA, 19 nt, Homo sapiens
  misc_RNA (1)...(19): siRNA sense strand
guacagcauccgggagaau

SEQ ID NO: 2580870 - RNA, 19 nt, Homo sapiens
  misc_RNA (1)...(19): siRNA sense strand
gaaaagagaaucagcagca

SEQ ID NO: 2580871 - RNA, 19 nt, Homo sapiens
  misc_RNA (1)...(19): siRNA sense strand
ccaccaaugacguccucaa

SEQ ID NO: 2580872 - RNA, 19 nt, Homo sapiens
  misc_RNA (1)...(19): siRNA sense strand
cuacauacuccaugacugu

SEQ ID NO: 2580873 - RNA, 19 nt, Homo sapiens
  misc_RNA (1)...(19): siRNA sense strand
ccuauggccugcagcccua

SEQ ID NO: 2580874 - RNA, 19 nt, Homo sapiens
  misc_RNA (1)...(19): siRNA sense strand
cuggaacgcaugugugaga

SEQ ID NO: 2580875 - RNA, 19 nt, Homo sapiens
  misc_RNA (1)...(19): siRNA sense strand
ccaacauaguggaccggau

SEQ ID NO: 2580876 - RNA, 19 nt, Homo sapiens
  misc_RNA (1)...(19): siRNA sense strand
auguauaugccacagauaa

SEQ ID NO: 2580877 - RNA, 19 nt, Homo sapiens
  misc_RNA (1)...(19): siRNA sense strand
cggucaagauggagccaga

SEQ ID NO: 2580878 - RNA, 19 nt, Homo sapiens
  misc_RNA (1)...(19): siRNA sense strand
gagacaaagccaaggagga

SEQ ID NO: 2580879 - RNA, 19 nt, Homo sapiens
  misc_RNA (1)...(19): siRNA sense strand
agaucucuguauugggaaa

SEQ ID NO: 2580880 - RNA, 19 nt, Homo sapiens
  misc_RNA (1)...(19): siRNA sense strand
aggaggaagagcugcgcaa

SEQ ID NO: 2580881 - RNA, 19 nt, Homo sapiens
  misc_RNA (1)...(19): siRNA sense strand
agaacaugaaacugaaaga

SEQ ID NO: 2580882 - RNA, 19 nt, Homo sapiens
  misc_RNA (1)...(19): siRNA sense strand
acgaaggcuacgaaggcua

SEQ ID NO: 2580883 - RNA, 19 nt, Homo sapiens
  misc_RNA (1)...(19): siRNA sense strand
aggaagagacuggugcaaa

SEQ ID NO: 2580884 - RNA, 19 nt, Homo sapiens
  misc_RNA (1)...(19): siRNA sense strand
caugaaacugaaagagcga

SEQ ID NO: 2580885 - RNA, 19 nt, Homo sapiens
  misc_RNA (1)...(19): siRNA sense strand
aguucaauuuuguggggaa

SEQ ID NO: 2580886 - RNA, 19 nt, Homo sapiens
  misc_RNA (1)...(19): siRNA sense strand
aaaaggaugaugaggagaa

SEQ ID NO: 2580887 - RNA, 19 nt, Homo sapiens
  misc_RNA (1)...(19): siRNA sense strand
caaugagagacaaagccaa

SEQ ID NO: 2580888 - RNA, 19 nt, Homo sapiens
  misc_RNA (1)...(19): siRNA sense strand
gauucagaaaggagacuca

SEQ ID NO: 2580889 - RNA, 19 nt, Homo sapiens
  misc_RNA (1)...(19): siRNA sense strand
agaagauucagaaaggaga

SEQ ID NO: 2580890 - RNA, 19 nt, Homo sapiens
  misc_RNA (1)...(19): siRNA sense strand
ggagcaauuucuagagcug

SEQ ID NO: 2580891 - RNA, 19 nt, Homo sapiens
  misc_RNA (1)...(19): siRNA sense strand
cccauauggacguuauuaa

SEQ ID NO: 2580892 - RNA, 19 nt, Homo sapiens
  misc_RNA (1)...(19): siRNA sense strand
acgaaagagaucaagauau

SEQ ID NO: 2580893 - RNA, 19 nt, Homo sapiens
  misc_RNA (1)...(19): siRNA sense strand
aaggguaagauuaggagaa

SEQ ID NO: 2580894 - RNA, 19 nt, Homo sapiens
  misc_RNA (1)...(19): siRNA sense strand
cuucaauguaucagaacuu

SEQ ID NO: 2580895 - RNA, 19 nt, Homo sapiens
  misc_RNA (1)...(19): siRNA sense strand
uggaaaguaccgauggaga

SEQ ID NO: 2580896 - RNA, 19 nt, Homo sapiens
  misc_RNA (1)...(19): siRNA sense strand
cauacuacgugcaggagca

SEQ ID NO: 2580897 - RNA, 19 nt, Homo sapiens
  misc_RNA (1)...(19): siRNA sense strand
augagaagcgaaugucaaa

SEQ ID NO: 2580898 - RNA, 19 nt, Homo sapiens
  misc_RNA (1)...(19): siRNA sense strand
aggaguaucgagaggacuu

SEQ ID NO: 2580899 - RNA, 19 nt, Homo sapiens
  misc_RNA (1)...(19): siRNA sense strand
uggagaaaucccaagccaa

SEQ ID NO: 2580900 - RNA, 19 nt, Homo sapiens
  misc_RNA (1)...(19): siRNA sense strand
ggagaaaucccaagccaac

SEQ ID NO: 2580901 - RNA, 19 nt, Homo sapiens
  misc_RNA (1)...(19): siRNA sense strand
acuaugaagaagccugaaa

SEQ ID NO: 2580902 - RNA, 19 nt, Homo sapiens
  misc_RNA (1)...(19): siRNA sense strand
ggaaaguaccgauggagag

SEQ ID NO: 2580903 - RNA, 19 nt, Homo sapiens
  misc_RNA (1)...(19): siRNA sense strand
ccacaaugauccugccaag

SEQ ID NO: 2580904 - RNA, 19 nt, Homo sapiens
  misc_RNA (1)...(19): siRNA sense strand
gggucaaucuucagagguc

SEQ ID NO: 2580905 - RNA, 19 nt, Homo sapiens
  misc_RNA (1)...(19): siRNA sense strand
ggaugaagaaagagcaguc

SEQ ID NO: 2580906 - RNA, 19 nt, Homo sapiens
  misc_RNA (1)...(19): siRNA sense strand
caggauacucugaagaacu

SEQ ID NO: 2580907 - RNA, 19 nt, Homo sapiens
  misc_RNA (1)...(19): siRNA sense strand
uggcauacuacgugcagga

SEQ ID NO: 2580908 - RNA, 19 nt, Homo sapiens
  misc_RNA (1)...(19): siRNA sense strand
gcgcaaagauauucgccag

SEQ ID NO: 2580909 - RNA, 19 nt, Homo sapiens
  misc_RNA (1)...(19): siRNA sense strand
ugaauaacauaaaggccaa

SEQ ID NO: 2580910 - RNA, 19 nt, Homo sapiens
  misc_RNA (1)...(19): siRNA sense strand
acgaguaccaggagacaau

SEQ ID NO: 2580911 - RNA, 19 nt, Homo sapiens
  misc_RNA (1)...(19): siRNA sense strand
cugaauaacauaaaggcca

SEQ ID NO: 2580912 - RNA, 19 nt, Homo sapiens
  misc_RNA (1)...(19): siRNA sense strand
ggguauugugggacugaau

SEQ ID NO: 2580913 - RNA, 19 nt, Homo sapiens
  misc_RNA (1)...(19): siRNA sense strand
ucuacaaggacgagaagga

SEQ ID NO: 2580914 - RNA, 19 nt, Homo sapiens
  misc_RNA (1)...(19): siRNA sense strand
uggcuaaguucaauggcau

SEQ ID NO: 2580915 - RNA, 19 nt, Homo sapiens
  misc_RNA (1)...(19): siRNA sense strand
caaacaaggagauggcguu

SEQ ID NO: 2580916 - RNA, 19 nt, Homo sapiens
  misc_RNA (1)...(19): siRNA sense strand
aggagauggcguugacuuu

SEQ ID NO: 2580917 - RNA, 19 nt, Homo sapiens
  misc_RNA (1)...(19): siRNA sense strand
aauguggaucugagagaau

SEQ ID NO: 2580918 - RNA, 19 nt, Homo sapiens
  misc_RNA (1)...(19): siRNA sense strand
ucuuguugguccagcguuu

SEQ ID NO: 2580919 - RNA, 19 nt, Homo sapiens
  misc_RNA (1)...(19): siRNA sense strand
cggaagaagaagaagaaaa

SEQ ID NO: 2580920 - RNA, 19 nt, Homo sapiens
  misc_RNA (1)...(19): siRNA sense strand
cagaaauggaugugcggaa

SEQ ID NO: 2580921 - RNA, 19 nt, Homo sapiens
  misc_RNA (1)...(19): siRNA sense strand
cggaagggauggagccaga

SEQ ID NO: 2580922 - RNA, 19 nt, Homo sapiens
  misc_RNA (1)...(19): siRNA sense strand
ccuacgaagaagaggaaaa

SEQ ID NO: 2580923 - RNA, 19 nt, Homo sapiens
  misc_RNA (1)...(19): siRNA sense strand
gcugaaagaaccagaggca

SEQ ID NO: 2580924 - RNA, 19 nt, Homo sapiens
  misc_RNA (1)...(19): siRNA sense strand
aagaagaggaagaagcaga

SEQ ID NO: 2580925 - RNA, 19 nt, Homo sapiens
  misc_RNA (1)...(19): siRNA sense strand
agacagugaagcaggaaca

SEQ ID NO: 2580926 - RNA, 19 nt, Homo sapiens
  misc_RNA (1)...(19): siRNA sense strand
gugcggaagaagaagaaga

SEQ ID NO: 2580927 - RNA, 19 nt, Homo sapiens
  misc_RNA (1)...(19): siRNA sense strand
gaaaagggacagauggcaa

SEQ ID NO: 2580928 - RNA, 19 nt, Homo sapiens
  misc_RNA (1)...(19): siRNA sense strand
cccagaucgucaagggcaa

SEQ ID NO: 2580929 - RNA, 19 nt, Homo sapiens
  misc_RNA (1)...(19): siRNA sense strand
aggaagaagcccaaaggga

SEQ ID NO: 2580930 - RNA, 19 nt, Homo sapiens
  misc_RNA (1)...(19): siRNA sense strand
accaagaagaagaagaaga

SEQ ID NO: 2580931 - RNA, 19 nt, Homo sapiens
  misc_RNA (1)...(19): siRNA sense strand
agggcaaauuggcaggcaa

SEQ ID NO: 2580932 - RNA, 19 nt, Homo sapiens
  misc_RNA (1)...(19): siRNA sense strand
aggagaugcaggugacaga

SEQ ID NO: 2580933 - RNA, 19 nt, Homo sapiens
  misc_RNA (1)...(19): siRNA sense strand
aagaagaagaagaagaaag

SEQ ID NO: 2580934 - RNA, 19 nt, Homo sapiens
  misc_RNA (1)...(19): siRNA sense strand
aagacaagacagugaagca

SEQ ID NO: 2580935 - RNA, 19 nt, Homo sapiens
  misc_RNA (1)...(19): siRNA sense strand
gaagaaagagagaggucac

SEQ ID NO: 2580936 - RNA, 19 nt, Homo sapiens
  misc_RNA (1)...(19): siRNA sense strand
uggaugugcggaagaagaa

SEQ ID NO: 2580937 - RNA, 19 nt, Homo sapiens
  misc_RNA (1)...(19): siRNA sense strand
agaagaggaagaagcccaa

SEQ ID NO: 2580938 - RNA, 19 nt, Homo sapiens
  misc_RNA (1)...(19): siRNA sense strand
aagaagcagagucaggaaa

SEQ ID NO: 2580939 - RNA, 19 nt, Homo sapiens
  misc_RNA (1)...(19): siRNA sense strand
aagaagaggaagaagccca

SEQ ID NO: 2580940 - RNA, 19 nt, Homo sapiens
  misc_RNA (1)...(19): siRNA sense strand
gcuuuggggucgccagaaa

SEQ ID NO: 2580941 - RNA, 19 nt, Homo sapiens
  misc_RNA (1)...(19): siRNA sense strand
gggcaaauuggcaggcaag

SEQ ID NO: 2580942 - RNA, 19 nt, Homo sapiens
  misc_RNA (1)...(19): siRNA sense strand
ugaaagaaccagaggcagc

SEQ ID NO: 2580943 - RNA, 19 nt, Homo sapiens
  misc_RNA (1)...(19): siRNA sense strand
agaagaagaaagagagagg

SEQ ID NO: 2580944 - RNA, 19 nt, Homo sapiens
  misc_RNA (1)...(19): siRNA sense strand
gcggaagaagaagaagaaa

SEQ ID NO: 2580945 - RNA, 19 nt, Homo sapiens
  misc_RNA (1)...(19): siRNA sense strand
ccaccaccaagaagaggaa

SEQ ID NO: 2580946 - RNA, 19 nt, Homo sapiens
  misc_RNA (1)...(19): siRNA sense strand
acaagaagcggaagcagca

SEQ ID NO: 2580947 - RNA, 19 nt, Homo sapiens
  misc_RNA (1)...(19): siRNA sense strand
caccaugagaagagagcaa

SEQ ID NO: 2580948 - RNA, 19 nt, Homo sapiens
  misc_RNA (1)...(19): siRNA sense strand
gugcugagcugguucgaga

SEQ ID NO: 2580949 - RNA, 19 nt, Homo sapiens
  misc_RNA (1)...(19): siRNA sense strand
cuaucgaaacccagugcua

SEQ ID NO: 2580950 - RNA, 19 nt, Homo sapiens
  misc_RNA (1)...(19): siRNA sense strand
gggagcagacucagaaaau

SEQ ID NO: 2580951 - RNA, 19 nt, Homo sapiens
  misc_RNA (1)...(19): siRNA sense strand
ggccuaugugugaaagcaa

SEQ ID NO: 2580952 - RNA, 19 nt, Homo sapiens
  misc_RNA (1)...(19): siRNA sense strand
gugcauaaguguuagggaa

SEQ ID NO: 2580953 - RNA, 19 nt, Homo sapiens
  misc_RNA (1)...(19): siRNA sense strand
ugcauaaguguuagggaaa

SEQ ID NO: 2580954 - RNA, 19 nt, Homo sapiens
  misc_RNA (1)...(19): siRNA sense strand
gauugaucacugugcgaaa

SEQ ID NO: 2580955 - RNA, 19 nt, Homo sapiens
  misc_RNA (1)...(19): siRNA sense strand
caguuuacuauuugggcaa

SEQ ID NO: 2580956 - RNA, 19 nt, Homo sapiens
  misc_RNA (1)...(19): siRNA sense strand
uggauauuuagcagggaua

SEQ ID NO: 2580957 - RNA, 19 nt, Homo sapiens
  misc_RNA (1)...(19): siRNA sense strand
guggauauuuagcagggau

SEQ ID NO: 2580958 - RNA, 19 nt, Homo sapiens
  misc_RNA (1)...(19): siRNA sense strand
aagaaaggcaacagaauca

SEQ ID NO: 2580959 - RNA, 19 nt, Homo sapiens
  misc_RNA (1)...(19): siRNA sense strand
aggccugaaaccagagaaa

SEQ ID NO: 2580960 - RNA, 19 nt, Homo sapiens
  misc_RNA (1)...(19): siRNA sense strand
agaaauaacuguugcaggu

SEQ ID NO: 2580961 - RNA, 19 nt, Homo sapiens
  misc_RNA (1)...(19): siRNA sense strand
ccacagauauugaccgcau

SEQ ID NO: 2580962 - RNA, 19 nt, Homo sapiens
  misc_RNA (1)...(19): siRNA sense strand
ugaagaaaggcaacagaau

SEQ ID NO: 2580963 - RNA, 19 nt, Homo sapiens
  misc_RNA (1)...(19): siRNA sense strand
cuucaggagucuaggugau

SEQ ID NO: 2580964 - RNA, 19 nt, Homo sapiens
  misc_RNA (1)...(19): siRNA sense strand
gugaaggcuuugaaggcuu

SEQ ID NO: 2580965 - RNA, 19 nt, Homo sapiens
  misc_RNA (1)...(19): siRNA sense strand
acagauguuucuaggugaa

SEQ ID NO: 2580966 - RNA, 19 nt, Homo sapiens
  misc_RNA (1)...(19): siRNA sense strand
caaauaaagaauauggcca

SEQ ID NO: 2580967 - RNA, 19 nt, Homo sapiens
  misc_RNA (1)...(19): siRNA sense strand
acgaagaaccagggaauga

SEQ ID NO: 2580968 - RNA, 19 nt, Homo sapiens
  misc_RNA (1)...(19): siRNA sense strand
ccuccaagugcgaagaaaa

SEQ ID NO: 2580969 - RNA, 19 nt, Homo sapiens
  misc_RNA (1)...(19): siRNA sense strand
guaucaguggagacagaaa

SEQ ID NO: 2580970 - RNA, 19 nt, Homo sapiens
  misc_RNA (1)...(19): siRNA sense strand
gguuaaagacuuaggucag

SEQ ID NO: 2580971 - RNA, 19 nt, Homo sapiens
  misc_RNA (1)...(19): siRNA sense strand
cagcuaugccuaugcagaa

SEQ ID NO: 2580972 - RNA, 19 nt, Homo sapiens
  misc_RNA (1)...(19): siRNA sense strand
cuucacaugaccaagaaua

SEQ ID NO: 2580973 - RNA, 19 nt, Homo sapiens
  misc_RNA (1)...(19): siRNA sense strand
gccugaaaccagagaaaau

SEQ ID NO: 2580974 - RNA, 19 nt, Homo sapiens
  misc_RNA (1)...(19): siRNA sense strand
cugcucaaauucagaaaca

SEQ ID NO: 2580975 - RNA, 19 nt, Homo sapiens
  misc_RNA (1)...(19): siRNA sense strand
cuugauggaaguagaaaca

SEQ ID NO: 2580976 - RNA, 19 nt, Homo sapiens
  misc_RNA (1)...(19): siRNA sense strand
aauaacuguugcagguaau

SEQ ID NO: 2580977 - RNA, 19 nt, Homo sapiens
  misc_RNA (1)...(19): siRNA sense strand
cacuguaaccucagcuaaa

SEQ ID NO: 2580978 - RNA, 19 nt, Homo sapiens
  misc_RNA (1)...(19): siRNA sense strand
caguaaaccagcuucagaa

SEQ ID NO: 2580979 - RNA, 19 nt, Homo sapiens
  misc_RNA (1)...(19): siRNA sense strand
guguagaaauuucacccaa

SEQ ID NO: 2580980 - RNA, 19 nt, Homo sapiens
  misc_RNA (1)...(19): siRNA sense strand
cugaagaaaggcaacagaa

SEQ ID NO: 2580981 - RNA, 19 nt, Homo sapiens
  misc_RNA (1)...(19): siRNA sense strand
aaaccauagcugagggcca

SEQ ID NO: 2580982 - RNA, 19 nt, Homo sapiens
  misc_RNA (1)...(19): siRNA sense strand
ccugaugcuucgaggccau

SEQ ID NO: 2580983 - RNA, 19 nt, Homo sapiens
  misc_RNA (1)...(19): siRNA sense strand
ccuggaacaaauaaagaau

SEQ ID NO: 2580984 - RNA, 19 nt, Homo sapiens
  misc_RNA (1)...(19): siRNA sense strand
ugguuaaagacuuagguca

SEQ ID NO: 2580985 - RNA, 19 nt, Homo sapiens
  misc_RNA (1)...(19): siRNA sense strand
caacagaaucaacacaaaa

SEQ ID NO: 2580986 - RNA, 19 nt, Homo sapiens
  misc_RNA (1)...(19): siRNA sense strand
aguaaaccagcuucagaaa

SEQ ID NO: 2580987 - RNA, 19 nt, Homo sapiens
  misc_RNA (1)...(19): siRNA sense strand
agaauucauccgaagaaau

SEQ ID NO: 2580988 - RNA, 19 nt, Homo sapiens
  misc_RNA (1)...(19): siRNA sense strand
agacaggaagcuaguuuau

SEQ ID NO: 2580989 - RNA, 19 nt, Homo sapiens
  misc_RNA (1)...(19): siRNA sense strand
gaugaaaggaaaugggcuc

SEQ ID NO: 2580990 - RNA, 19 nt, Homo sapiens
  misc_RNA (1)...(19): siRNA sense strand
guugaaauaccuggaacaa

SEQ ID NO: 2580991 - RNA, 19 nt, Homo sapiens
  misc_RNA (1)...(19): siRNA sense strand
aggucagggcauacagaau

SEQ ID NO: 2580992 - RNA, 19 nt, Homo sapiens
  misc_RNA (1)...(19): siRNA sense strand
uaucaagcccagugacuca

SEQ ID NO: 2580993 - RNA, 19 nt, Homo sapiens
  misc_RNA (1)...(19): siRNA sense strand
cuggagaaaucugcugaaa

SEQ ID NO: 2580994 - RNA, 19 nt, Homo sapiens
  misc_RNA (1)...(19): siRNA sense strand
cauacaagacaggaagcua

SEQ ID NO: 2580995 - RNA, 19 nt, Homo sapiens
  misc_RNA (1)...(19): siRNA sense strand
ggcauacagaauucaguaa

SEQ ID NO: 2580996 - RNA, 19 nt, Homo sapiens
  misc_RNA (1)...(19): siRNA sense strand
uggaggaccaggaggaaaa

SEQ ID NO: 2580997 - RNA, 19 nt, Homo sapiens
  misc_RNA (1)...(19): siRNA sense strand
cggcugaggacuacgccaa

SEQ ID NO: 2580998 - RNA, 19 nt, Homo sapiens
  misc_RNA (1)...(19): siRNA sense strand
acgccaagaagcugagaca

SEQ ID NO: 2580999 - RNA, 19 nt, Homo sapiens
  misc_RNA (1)...(19): siRNA sense strand
aggaggcggcugaggacua

SEQ ID NO: 2581000 - RNA, 19 nt, Homo sapiens
  misc_RNA (1)...(19): siRNA sense strand
uggcaacuggagaaggcaa

SEQ ID NO: 2581001 - RNA, 19 nt, Homo sapiens
  misc_RNA (1)...(19): siRNA sense strand
agaugaaagugcagagcau

SEQ ID NO: 2581002 - RNA, 19 nt, Homo sapiens
  misc_RNA (1)...(19): siRNA sense strand
gccgaauacagaagagaaa

SEQ ID NO: 2581003 - RNA, 19 nt, Homo sapiens
  misc_RNA (1)...(19): siRNA sense strand
aggaagaagaagaggaagu

SEQ ID NO: 2581004 - RNA, 19 nt, Homo sapiens
  misc_RNA (1)...(19): siRNA sense strand
aguaugaagcuuugaggaa

SEQ ID NO: 2581005 - RNA, 19 nt, Homo sapiens
  misc_RNA (1)...(19): siRNA sense strand
guaaagaaauugaaaccca

SEQ ID NO: 2581006 - RNA, 19 nt, Homo sapiens
  misc_RNA (1)...(19): siRNA sense strand
aguagaaaaugcagcaaaa

SEQ ID NO: 2581007 - RNA, 19 nt, Homo sapiens
  misc_RNA (1)...(19): siRNA sense strand
cagcaaaacaagcagaaaa

SEQ ID NO: 2581008 - RNA, 19 nt, Homo sapiens
  misc_RNA (1)...(19): siRNA sense strand
uguuaaaucagcuggagaa

SEQ ID NO: 2581009 - RNA, 19 nt, Homo sapiens
  misc_RNA (1)...(19): siRNA sense strand
aagagaaaccagaggagga

SEQ ID NO: 2581010 - RNA, 19 nt, Homo sapiens
  misc_RNA (1)...(19): siRNA sense strand
aaccagaggaggaaguaaa

SEQ ID NO: 2581011 - RNA, 19 nt, Homo sapiens
  misc_RNA (1)...(19): siRNA sense strand
cagaaaagaagcaagacaa

SEQ ID NO: 2581012 - RNA, 19 nt, Homo sapiens
  misc_RNA (1)...(19): siRNA sense strand
aaagaagugaagaggaaga

SEQ ID NO: 2581013 - RNA, 19 nt, Homo sapiens
  misc_RNA (1)...(19): siRNA sense strand
caacagucaaagaagggaa

SEQ ID NO: 2581014 - RNA, 19 nt, Homo sapiens
  misc_RNA (1)...(19): siRNA sense strand
aguugaugauggagaagau

SEQ ID NO: 2581015 - RNA, 19 nt, Homo sapiens
  misc_RNA (1)...(19): siRNA sense strand
cagaaguagaagaugauga

SEQ ID NO: 2581016 - RNA, 19 nt, Homo sapiens
  misc_RNA (1)...(19): siRNA sense strand
aaagcugaugagagagaaa

SEQ ID NO: 2581017 - RNA, 19 nt, Homo sapiens
  misc_RNA (1)...(19): siRNA sense strand
agucagagcaugaagggca

SEQ ID NO: 2581018 - RNA, 19 nt, Homo sapiens
  misc_RNA (1)...(19): siRNA sense strand
aagaaccugaugagagaaa

SEQ ID NO: 2581019 - RNA, 19 nt, Homo sapiens
  misc_RNA (1)...(19): siRNA sense strand
acagaagagaaaagcaaaa

SEQ ID NO: 2581020 - RNA, 19 nt, Homo sapiens
  misc_RNA (1)...(19): siRNA sense strand
gggucgagcagaugaacuu

SEQ ID NO: 2581021 - RNA, 19 nt, Homo sapiens
  misc_RNA (1)...(19): siRNA sense strand
agaaaaugcagcaaaacaa

SEQ ID NO: 2581022 - RNA, 19 nt, Homo sapiens
  misc_RNA (1)...(19): siRNA sense strand
aagcugaggaagaagaaga

SEQ ID NO: 2581023 - RNA, 19 nt, Homo sapiens
  misc_RNA (1)...(19): siRNA sense strand
gcaugaagggcaaaagcaa

SEQ ID NO: 2581024 - RNA, 19 nt, Homo sapiens
  misc_RNA (1)...(19): siRNA sense strand
ccugaugagagaaagaauu

SEQ ID NO: 2581025 - RNA, 19 nt, Homo sapiens
  misc_RNA (1)...(19): siRNA sense strand
gcucagaaaagaagcaaga

SEQ ID NO: 2581026 - RNA, 19 nt, Homo sapiens
  misc_RNA (1)...(19): siRNA sense strand
gggaacucuuagcagcaaa

SEQ ID NO: 2581027 - RNA, 19 nt, Homo sapiens
  misc_RNA (1)...(19): siRNA sense strand
augaaagugcagagcauga

SEQ ID NO: 2581028 - RNA, 19 nt, Homo sapiens
  misc_RNA (1)...(19): siRNA sense strand
acuuucauuuggagaggaa

SEQ ID NO: 2581029 - RNA, 19 nt, Homo sapiens
  misc_RNA (1)...(19): siRNA sense strand
augacuugcuuaaggauga

SEQ ID NO: 2581030 - RNA, 19 nt, Homo sapiens
  misc_RNA (1)...(19): siRNA sense strand
ugaugauggagaagaugaa

SEQ ID NO: 2581031 - RNA, 19 nt, Homo sapiens
  misc_RNA (1)...(19): siRNA sense strand
cugaaacagaaguagaaga

SEQ ID NO: 2581032 - RNA, 19 nt, Homo sapiens
  misc_RNA (1)...(19): siRNA sense strand
uggagaggaagcugaggaa

SEQ ID NO: 2581033 - RNA, 19 nt, Homo sapiens
  misc_RNA (1)...(19): siRNA sense strand
gucagagcaugaagggcaa

SEQ ID NO: 2581034 - RNA, 19 nt, Homo sapiens
  misc_RNA (1)...(19): siRNA sense strand
cucggaauccagugaauaa

SEQ ID NO: 2581035 - RNA, 19 nt, Homo sapiens
  misc_RNA (1)...(19): siRNA sense strand
uggaaagguuacaggggau

SEQ ID NO: 2581036 - RNA, 19 nt, Homo sapiens
  misc_RNA (1)...(19): siRNA sense strand
auacagaagagaaaagcaa

SEQ ID NO: 2581037 - RNA, 19 nt, Homo sapiens
  misc_RNA (1)...(19): siRNA sense strand
agagaaaccagaggaggaa

SEQ ID NO: 2581038 - RNA, 19 nt, Homo sapiens
  misc_RNA (1)...(19): siRNA sense strand
gaauaaaagaaggagggaa

SEQ ID NO: 2581039 - RNA, 19 nt, Homo sapiens
  misc_RNA (1)...(19): siRNA sense strand
augaagggcaaaagcaaaa

SEQ ID NO: 2581040 - RNA, 19 nt, Homo sapiens
  misc_RNA (1)...(19): siRNA sense strand
uuuaguugaugauggagaa

SEQ ID NO: 2581041 - RNA, 19 nt, Homo sapiens
  misc_RNA (1)...(19): siRNA sense strand
cagaaguagacauugauga

SEQ ID NO: 2581042 - RNA, 19 nt, Homo sapiens
  misc_RNA (1)...(19): siRNA sense strand
agaaaagaagcaagacaau

SEQ ID NO: 2581043 - RNA, 19 nt, Homo sapiens
  misc_RNA (1)...(19): siRNA sense strand
aauaaaagaaggagggaag

SEQ ID NO: 2581044 - RNA, 19 nt, Homo sapiens
  misc_RNA (1)...(19): siRNA sense strand
aaguaaaucgaguuaguca

SEQ ID NO: 2581045 - RNA, 19 nt, Homo sapiens
  misc_RNA (1)...(19): siRNA sense strand
gggcaaaagcaaaaguagu

SEQ ID NO: 2581046 - RNA, 19 nt, Homo sapiens
  misc_RNA (1)...(19): siRNA sense strand
guggagaagaaaucaguca

SEQ ID NO: 2581047 - RNA, 19 nt, Homo sapiens
  misc_RNA (1)...(19): siRNA sense strand
caugcaagacucagauaca

SEQ ID NO: 2581048 - RNA, 19 nt, Homo sapiens
  misc_RNA (1)...(19): siRNA sense strand
agauggugcuguugccgaa

SEQ ID NO: 2581049 - RNA, 19 nt, Homo sapiens
  misc_RNA (1)...(19): siRNA sense strand
aaucuaugauccucggaau

SEQ ID NO: 2581050 - RNA, 19 nt, Homo sapiens
  misc_RNA (1)...(19): siRNA sense strand
gcaaggacaucgaggagca

SEQ ID NO: 2581051 - RNA, 19 nt, Homo sapiens
  misc_RNA (1)...(19): siRNA sense strand
guggaugagaagaggaaga

SEQ ID NO: 2581052 - RNA, 19 nt, Homo sapiens
  misc_RNA (1)...(19): siRNA sense strand
gugagagggagcuggaaga

SEQ ID NO: 2581053 - RNA, 19 nt, Homo sapiens
  misc_RNA (1)...(19): siRNA sense strand
gcauugaggccaagcacga

SEQ ID NO: 2581054 - RNA, 19 nt, Homo sapiens
  misc_RNA (1)...(19): siRNA sense strand
agcgaaaccacgaggguga

SEQ ID NO: 2581055 - RNA, 19 nt, Homo sapiens
  misc_RNA (1)...(19): siRNA sense strand
agguggaugagaagaggaa

SEQ ID NO: 2581056 - RNA, 19 nt, Homo sapiens
  misc_RNA (1)...(19): siRNA sense strand
agaagaggaagaagcgaga

SEQ ID NO: 2581057 - RNA, 19 nt, Homo sapiens
  misc_RNA (1)...(19): siRNA sense strand
aagaggaagaagcgagaca

SEQ ID NO: 2581058 - RNA, 19 nt, Homo sapiens
  misc_RNA (1)...(19): siRNA sense strand
gcuuugagcugaugcggga

SEQ ID NO: 2581059 - RNA, 19 nt, Homo sapiens
  misc_RNA (1)...(19): siRNA sense strand
auggcuggguggaggacua

SEQ ID NO: 2581060 - RNA, 19 nt, Homo sapiens
  misc_RNA (1)...(19): siRNA sense strand
uggcuaugaaggagguuau

SEQ ID NO: 2581061 - RNA, 19 nt, Homo sapiens
  misc_RNA (1)...(19): siRNA sense strand
agggcaaggaggagaagga

SEQ ID NO: 2581062 - RNA, 19 nt, Homo sapiens
  misc_RNA (1)...(19): siRNA sense strand
gugaugaggacgacagcca

SEQ ID NO: 2581063 - RNA, 19 nt, Homo sapiens
  misc_RNA (1)...(19): siRNA sense strand
gagcuuacagccuggccaa

SEQ ID NO: 2581064 - RNA, 19 nt, Homo sapiens
  misc_RNA (1)...(19): siRNA sense strand
cgcugguggccguguauua

SEQ ID NO: 2581065 - RNA, 19 nt, Homo sapiens
  misc_RNA (1)...(19): siRNA sense strand
gcauccaccaggagagcga

SEQ ID NO: 2581066 - RNA, 19 nt, Homo sapiens
  misc_RNA (1)...(19): siRNA sense strand
ccacgagggugaugaggac

SEQ ID NO: 2581067 - RNA, 19 nt, Homo sapiens
  misc_RNA (1)...(19): siRNA sense strand
ugugagaagccgagugaau

SEQ ID NO: 2581068 - RNA, 19 nt, Homo sapiens
  misc_RNA (1)...(19): siRNA sense strand
cugaagaaauuaaaccuca

SEQ ID NO: 2581069 - RNA, 19 nt, Homo sapiens
  misc_RNA (1)...(19): siRNA sense strand
ggucaaacgcuacgcacca

SEQ ID NO: 2581070 - RNA, 19 nt, Homo sapiens
  misc_RNA (1)...(19): siRNA sense strand
cagcagaaugagaucucua

SEQ ID NO: 2581071 - RNA, 19 nt, Homo sapiens
  misc_RNA (1)...(19): siRNA sense strand
aggaacaauuggacccgaa

SEQ ID NO: 2581072 - RNA, 19 nt, Homo sapiens
  misc_RNA (1)...(19): siRNA sense strand
uguacuugugagauagaaa

SEQ ID NO: 2581073 - RNA, 19 nt, Homo sapiens
  misc_RNA (1)...(19): siRNA sense strand
augaagaagaaaaggaaca

SEQ ID NO: 2581074 - RNA, 19 nt, Homo sapiens
  misc_RNA (1)...(19): siRNA sense strand
ucaucaagccugaggugga

SEQ ID NO: 2581075 - RNA, 19 nt, Homo sapiens
  misc_RNA (1)...(19): siRNA sense strand
aaauuaaaccucagcagca

SEQ ID NO: 2581076 - RNA, 19 nt, Homo sapiens
  misc_RNA (1)...(19): siRNA sense strand
cagaaugagaucucuaaaa

SEQ ID NO: 2581077 - RNA, 19 nt, Homo sapiens
  misc_RNA (1)...(19): siRNA sense strand
gcuugaugacuuagggaaa

SEQ ID NO: 2581078 - RNA, 19 nt, Homo sapiens
  misc_RNA (1)...(19): siRNA sense strand
cuaccaucguugagagaga

SEQ ID NO: 2581079 - RNA, 19 nt, Homo sapiens
  misc_RNA (1)...(19): siRNA sense strand
cgauacgggauuagaggau

SEQ ID NO: 2581080 - RNA, 19 nt, Homo sapiens
  misc_RNA (1)...(19): siRNA sense strand
aggauacaguucuggaaaa

SEQ ID NO: 2581081 - RNA, 19 nt, Homo sapiens
  misc_RNA (1)...(19): siRNA sense strand
aaguaaaagagcagacgaa

SEQ ID NO: 2581082 - RNA, 19 nt, Homo sapiens
  misc_RNA (1)...(19): siRNA sense strand
ugaugaugugaucgaauua

SEQ ID NO: 2581083 - RNA, 19 nt, Homo sapiens
  misc_RNA (1)...(19): siRNA sense strand
acgacagcuuugauaagaa

SEQ ID NO: 2581084 - RNA, 19 nt, Homo sapiens
  misc_RNA (1)...(19): siRNA sense strand
ggcagaagugauaguucaa

SEQ ID NO: 2581085 - RNA, 19 nt, Homo sapiens
  misc_RNA (1)...(19): siRNA sense strand
aaguaagaaggaugugauu

SEQ ID NO: 2581086 - RNA, 19 nt, Homo sapiens
  misc_RNA (1)...(19): siRNA sense strand
agauuaucaacgaggacau

SEQ ID NO: 2581087 - RNA, 19 nt, Homo sapiens
  misc_RNA (1)...(19): siRNA sense strand
gagcaaggcaucaacgagu

SEQ ID NO: 2581088 - RNA, 19 nt, Homo sapiens
  misc_RNA (1)...(19): siRNA sense strand
agugauaguuuguggcuug

SEQ ID NO: 2581089 - RNA, 19 nt, Homo sapiens
  misc_RNA (1)...(19): siRNA sense strand
ccguggaggaugacauuga

SEQ ID NO: 2581090 - RNA, 19 nt, Homo sapiens
  misc_RNA (1)...(19): siRNA sense strand
auacaguucuggaaaacaa

SEQ ID NO: 2581091 - RNA, 19 nt, Homo sapiens
  misc_RNA (1)...(19): siRNA sense strand
auguggagcuugaugacuu

SEQ ID NO: 2581092 - RNA, 19 nt, Homo sapiens
  misc_RNA (1)...(19): siRNA sense strand
uggugaagccauuguagau

SEQ ID NO: 2581093 - RNA, 19 nt, Homo sapiens
  misc_RNA (1)...(19): siRNA sense strand
ggauuggaggguuugggua

SEQ ID NO: 2581094 - RNA, 19 nt, Homo sapiens
  misc_RNA (1)...(19): siRNA sense strand
ccucagugauguggagcuu

SEQ ID NO: 2581095 - RNA, 19 nt, Homo sapiens
  misc_RNA (1)...(19): siRNA sense strand
ccuugauacuggagcugca

SEQ ID NO: 2581096 - RNA, 19 nt, Homo sapiens
  misc_RNA (1)...(19): siRNA sense strand
aggaagaaccaguacguca

SEQ ID NO: 2581097 - RNA, 19 nt, Homo sapiens
  misc_RNA (1)...(19): siRNA sense strand
aagaagaggcugagugcgu

SEQ ID NO: 2581098 - RNA, 19 nt, Homo sapiens
  misc_RNA (1)...(19): siRNA sense strand
gcaucaccuucacgggcaa

SEQ ID NO: 2581099 - RNA, 19 nt, Homo sapiens
  misc_RNA (1)...(19): siRNA sense strand
cggcaaaggagaaaagaaa

SEQ ID NO: 2581100 - RNA, 19 nt, Homo sapiens
  misc_RNA (1)...(19): siRNA sense strand
gggaaaacaaggagaagaa

SEQ ID NO: 2581101 - RNA, 19 nt, Homo sapiens
  misc_RNA (1)...(19): siRNA sense strand
ggaaauaugaggaaggcuu

SEQ ID NO: 2581102 - RNA, 19 nt, Homo sapiens
  misc_RNA (1)...(19): siRNA sense strand
cagaggaaaaugagagaua

SEQ ID NO: 2581103 - RNA, 19 nt, Homo sapiens
  misc_RNA (1)...(19): siRNA sense strand
gagagauaccggaaggaga

SEQ ID NO: 2581104 - RNA, 19 nt, Homo sapiens
  misc_RNA (1)...(19): siRNA sense strand
gcaucaagaaggagggauc

SEQ ID NO: 2581105 - RNA, 19 nt, Homo sapiens
  misc_RNA (1)...(19): siRNA sense strand
caucaaaggcggucaggca

SEQ ID NO: 2581106 - RNA, 19 nt, Homo sapiens
  misc_RNA (1)...(19): siRNA sense strand
uuguagaggaggaagagaa

SEQ ID NO: 2581107 - RNA, 19 nt, Homo sapiens
  misc_RNA (1)...(19): siRNA sense strand
gcucaaaggaacagcuacu

SEQ ID NO: 2581108 - RNA, 19 nt, Homo sapiens
  misc_RNA (1)...(19): siRNA sense strand
agauuguagaggaggaaga

SEQ ID NO: 2581109 - RNA, 19 nt, Homo sapiens
  misc_RNA (1)...(19): siRNA sense strand
cuuuaucagccaugugaaa

SEQ ID NO: 2581110 - RNA, 19 nt, Homo sapiens
  misc_RNA (1)...(19): siRNA sense strand
caggagauggagcggcaaa

SEQ ID NO: 2581111 - RNA, 19 nt, Homo sapiens
  misc_RNA (1)...(19): siRNA sense strand
ccucauucgaaccaagaaa

SEQ ID NO: 2581112 - RNA, 19 nt, Homo sapiens
  misc_RNA (1)...(19): siRNA sense strand
ccaggaagcugaaggaggu

SEQ ID NO: 2581113 - RNA, 19 nt, Homo sapiens
  misc_RNA (1)...(19): siRNA sense strand
agaaggcagcagaggaaaa

SEQ ID NO: 2581114 - RNA, 19 nt, Homo sapiens
  misc_RNA (1)...(19): siRNA sense strand
ggaacagauuguagaggag

SEQ ID NO: 2581115 - RNA, 19 nt, Homo sapiens
  misc_RNA (1)...(19): siRNA sense strand
gagaaguuuaagaagcaau

SEQ ID NO: 2581116 - RNA, 19 nt, Homo sapiens
  misc_RNA (1)...(19): siRNA sense strand
guuuaagaagcaaugggaa

SEQ ID NO: 2581117 - RNA, 19 nt, Homo sapiens
  misc_RNA (1)...(19): siRNA sense strand
gaagagaaguuuaagaagc

SEQ ID NO: 2581118 - RNA, 19 nt, Homo sapiens
  misc_RNA (1)...(19): siRNA sense strand
uggaacagauuguagagga

SEQ ID NO: 2581119 - RNA, 19 nt, Homo sapiens
  misc_RNA (1)...(19): siRNA sense strand
ugaaaaugaugcagagaag

SEQ ID NO: 2581120 - RNA, 19 nt, Homo sapiens
  misc_RNA (1)...(19): siRNA sense strand
cguccggaucaauggauau

SEQ ID NO: 2581121 - RNA, 19 nt, Homo sapiens
  misc_RNA (1)...(19): siRNA sense strand
accugaagcuggucaucaa

SEQ ID NO: 2581122 - RNA, 19 nt, Homo sapiens
  misc_RNA (1)...(19): siRNA sense strand
gaucaguuugugucggaau

SEQ ID NO: 2581123 - RNA, 19 nt, Homo sapiens
  misc_RNA (1)...(19): siRNA sense strand
uuuaagaagcaaugggaag

SEQ ID NO: 2581124 - RNA, 19 nt, Homo sapiens
  misc_RNA (1)...(19): siRNA sense strand
cagagcagaucauggggaa

SEQ ID NO: 2581125 - RNA, 19 nt, Homo sapiens
  misc_RNA (1)...(19): siRNA sense strand
cgaaaaguggcccgagaau

SEQ ID NO: 2581126 - RNA, 19 nt, Homo sapiens
  misc_RNA (1)...(19): siRNA sense strand
cugcagaaggccuggaauc

SEQ ID NO: 2581127 - RNA, 19 nt, Homo sapiens
  misc_RNA (1)...(19): siRNA sense strand
ugaaaggggacgagaucau

SEQ ID NO: 2581128 - RNA, 19 nt, Homo sapiens
  misc_RNA (1)...(19): siRNA sense strand
cggcaaaggagaaaagaaa

SEQ ID NO: 2581129 - RNA, 19 nt, Homo sapiens
  misc_RNA (1)...(19): siRNA sense strand
gggaaaacaaggagaagaa

SEQ ID NO: 2581130 - RNA, 19 nt, Homo sapiens
  misc_RNA (1)...(19): siRNA sense strand
ggaaauaugaggaaggcuu

SEQ ID NO: 2581131 - RNA, 19 nt, Homo sapiens
  misc_RNA (1)...(19): siRNA sense strand
cagaggaaaaugagagaua

SEQ ID NO: 2581132 - RNA, 19 nt, Homo sapiens
  misc_RNA (1)...(19): siRNA sense strand
gagagauaccggaaggaga

SEQ ID NO: 2581133 - RNA, 19 nt, Homo sapiens
  misc_RNA (1)...(19): siRNA sense strand
gcaucaagaaggagggauc

SEQ ID NO: 2581134 - RNA, 19 nt, Homo sapiens
  misc_RNA (1)...(19): siRNA sense strand
caucaaaggcggucaggca

SEQ ID NO: 2581135 - RNA, 19 nt, Homo sapiens
  misc_RNA (1)...(19): siRNA sense strand
uuguagaggaggaagagaa

SEQ ID NO: 2581136 - RNA, 19 nt, Homo sapiens
  misc_RNA (1)...(19): siRNA sense strand
gcucaaaggaacagcuacu

SEQ ID NO: 2581137 - RNA, 19 nt, Homo sapiens
  misc_RNA (1)...(19): siRNA sense strand
agauuguagaggaggaaga

SEQ ID NO: 2581138 - RNA, 19 nt, Homo sapiens
  misc_RNA (1)...(19): siRNA sense strand
cuuuaucagccaugugaaa

SEQ ID NO: 2581139 - RNA, 19 nt, Homo sapiens
  misc_RNA (1)...(19): siRNA sense strand
caggagauggagcggcaaa

SEQ ID NO: 2581140 - RNA, 19 nt, Homo sapiens
  misc_RNA (1)...(19): siRNA sense strand
ccucauucgaaccaagaaa

SEQ ID NO: 2581141 - RNA, 19 nt, Homo sapiens
  misc_RNA (1)...(19): siRNA sense strand
ccaggaagcugaaggaggu

SEQ ID NO: 2581142 - RNA, 19 nt, Homo sapiens
  misc_RNA (1)...(19): siRNA sense strand
agaaggcagcagaggaaaa

SEQ ID NO: 2581143 - RNA, 19 nt, Homo sapiens
  misc_RNA (1)...(19): siRNA sense strand
ggaacagauuguagaggag

SEQ ID NO: 2581144 - RNA, 19 nt, Homo sapiens
  misc_RNA (1)...(19): siRNA sense strand
gagaaguuuaagaagcaau

SEQ ID NO: 2581145 - RNA, 19 nt, Homo sapiens
  misc_RNA (1)...(19): siRNA sense strand
guuuaagaagcaaugggaa

SEQ ID NO: 2581146 - RNA, 19 nt, Homo sapiens
  misc_RNA (1)...(19): siRNA sense strand
gaagagaaguuuaagaagc

SEQ ID NO: 2581147 - RNA, 19 nt, Homo sapiens
  misc_RNA (1)...(19): siRNA sense strand
uggaacagauuguagagga

SEQ ID NO: 2581148 - RNA, 19 nt, Homo sapiens
  misc_RNA (1)...(19): siRNA sense strand
ugaaaaugaugcagagaag

SEQ ID NO: 2581149 - RNA, 19 nt, Homo sapiens
  misc_RNA (1)...(19): siRNA sense strand
cguccggaucaauggauau

SEQ ID NO: 2581150 - RNA, 19 nt, Homo sapiens
  misc_RNA (1)...(19): siRNA sense strand
accugaagcuggucaucaa

SEQ ID NO: 2581151 - RNA, 19 nt, Homo sapiens
  misc_RNA (1)...(19): siRNA sense strand
gaucaguuugugucggaau

SEQ ID NO: 2581152 - RNA, 19 nt, Homo sapiens
  misc_RNA (1)...(19): siRNA sense strand
uuuaagaagcaaugggaag

SEQ ID NO: 2581153 - RNA, 19 nt, Homo sapiens
  misc_RNA (1)...(19): siRNA sense strand
cagagcagaucauggggaa

SEQ ID NO: 2581154 - RNA, 19 nt, Homo sapiens
  misc_RNA (1)...(19): siRNA sense strand
cgaaaaguggcccgagaau

SEQ ID NO: 2581155 - RNA, 19 nt, Homo sapiens
  misc_RNA (1)...(19): siRNA sense strand
cugcagaaggccuggaauc

SEQ ID NO: 2581156 - RNA, 19 nt, Homo sapiens
  misc_RNA (1)...(19): siRNA sense strand
ugaaaggggacgagaucau

SEQ ID NO: 2581157 - RNA, 19 nt, Homo sapiens
  misc_RNA (1)...(19): siRNA sense strand
acauaauaguucugggcau

SEQ ID NO: 2581158 - RNA, 19 nt, Homo sapiens
  misc_RNA (1)...(19): siRNA sense strand
accauaaacuggaggaaaa

SEQ ID NO: 2581159 - RNA, 19 nt, Homo sapiens
  misc_RNA (1)...(19): siRNA sense strand
cuguauggaaguuggaaau

SEQ ID NO: 2581160 - RNA, 19 nt, Homo sapiens
  misc_RNA (1)...(19): siRNA sense strand
guacaaggaacuucggaca

SEQ ID NO: 2581161 - RNA, 19 nt, Homo sapiens
  misc_RNA (1)...(19): siRNA sense strand
ccucagaucuguauggaag

SEQ ID NO: 2581162 - RNA, 19 nt, Homo sapiens
  misc_RNA (1)...(19): siRNA sense strand
gggagaagaaugaccacca

SEQ ID NO: 2581163 - RNA, 19 nt, Homo sapiens
  misc_RNA (1)...(19): siRNA sense strand
ucauuaaguacaaggaacu

SEQ ID NO: 2581164 - RNA, 19 nt, Homo sapiens
  misc_RNA (1)...(19): siRNA sense strand
ucuguauggaaguuggaaa

SEQ ID NO: 2581165 - RNA, 19 nt, Homo sapiens
  misc_RNA (1)...(19): siRNA sense strand
acgcaggcugucagguuua

SEQ ID NO: 2581166 - RNA, 19 nt, Homo sapiens
  misc_RNA (1)...(19): siRNA sense strand
cuguagaagaagaagauaa

SEQ ID NO: 2581167 - RNA, 19 nt, Homo sapiens
  misc_RNA (1)...(19): siRNA sense strand
caauaaagaauguuggcaa

SEQ ID NO: 2581168 - RNA, 19 nt, Homo sapiens
  misc_RNA (1)...(19): siRNA sense strand
uaaaggagauguuggaauu

SEQ ID NO: 2581169 - RNA, 19 nt, Homo sapiens
  misc_RNA (1)...(19): siRNA sense strand
guaaaggagauguuggaau

SEQ ID NO: 2581170 - RNA, 19 nt, Homo sapiens
  misc_RNA (1)...(19): siRNA sense strand
aaucagugguaaaggagau

SEQ ID NO: 2581171 - RNA, 19 nt, Homo sapiens
  misc_RNA (1)...(19): siRNA sense strand
aagaagaguuggauggaag

SEQ ID NO: 2581172 - RNA, 19 nt, Homo sapiens
  misc_RNA (1)...(19): siRNA sense strand
ggguuugaugcuuggagaa

SEQ ID NO: 2581173 - RNA, 19 nt, Homo sapiens
  misc_RNA (1)...(19): siRNA sense strand
acaugaaccaagacaaaca

SEQ ID NO: 2581174 - RNA, 19 nt, Homo sapiens
  misc_RNA (1)...(19): siRNA sense strand
auguugaagcagacaggaa

SEQ ID NO: 2581175 - RNA, 19 nt, Homo sapiens
  misc_RNA (1)...(19): siRNA sense strand
auaugauggucuuaggaca

SEQ ID NO: 2581176 - RNA, 19 nt, Homo sapiens
  misc_RNA (1)...(19): siRNA sense strand
cggagagagcuguggcagu

SEQ ID NO: 2581177 - RNA, 19 nt, Homo sapiens
  misc_RNA (1)...(19): siRNA sense strand
uuggauauguugaagcaga

SEQ ID NO: 2581178 - RNA, 19 nt, Homo sapiens
  misc_RNA (1)...(19): siRNA sense strand
uggacuaaacagacauuau

SEQ ID NO: 2581179 - RNA, 19 nt, Homo sapiens
  misc_RNA (1)...(19): siRNA sense strand
aauaaagaauguuggcaag

SEQ ID NO: 2581180 - RNA, 19 nt, Homo sapiens
  misc_RNA (1)...(19): siRNA sense strand
gguuugaugcuuggagaau

SEQ ID NO: 2581181 - RNA, 19 nt, Homo sapiens
  misc_RNA (1)...(19): siRNA sense strand
aggcauuaauucauggacu

SEQ ID NO: 2581182 - RNA, 19 nt, Homo sapiens
  misc_RNA (1)...(19): siRNA sense strand
aggacaugaaccaagacaa

SEQ ID NO: 2581183 - RNA, 19 nt, Homo sapiens
  misc_RNA (1)...(19): siRNA sense strand
ggauggaagguuugacacu

SEQ ID NO: 2581184 - RNA, 19 nt, Homo sapiens
  misc_RNA (1)...(19): siRNA sense strand
caagcuaaaauguuggaua

SEQ ID NO: 2581185 - RNA, 19 nt, Homo sapiens
  misc_RNA (1)...(19): siRNA sense strand
aggcuguagaagaagaaga

SEQ ID NO: 2581186 - RNA, 19 nt, Homo sapiens
  misc_RNA (1)...(19): siRNA sense strand
ucuuagacuuggaggaggu

SEQ ID NO: 2581187 - RNA, 19 nt, Homo sapiens
  misc_RNA (1)...(19): siRNA sense strand
cggagaugguuguugguug

SEQ ID NO: 2581188 - RNA, 19 nt, Homo sapiens
  misc_RNA (1)...(19): siRNA sense strand
ggcuguagaagaagaagau

SEQ ID NO: 2581189 - RNA, 19 nt, Homo sapiens
  misc_RNA (1)...(19): siRNA sense strand
guugaugauuauaccguca

SEQ ID NO: 2581190 - RNA, 19 nt, Homo sapiens
  misc_RNA (1)...(19): siRNA sense strand
uaugauggucuuaggacau

SEQ ID NO: 2581191 - RNA, 19 nt, Homo sapiens
  misc_RNA (1)...(19): siRNA sense strand
agacaagaucgcagcgcaa

SEQ ID NO: 2581192 - RNA, 19 nt, Homo sapiens
  misc_RNA (1)...(19): siRNA sense strand
gcuucaagaacaugugcaa

SEQ ID NO: 2581193 - RNA, 19 nt, Homo sapiens
  misc_RNA (1)...(19): siRNA sense strand
cagaaagagaaaaggauga

SEQ ID NO: 2581194 - RNA, 19 nt, Homo sapiens
  misc_RNA (1)...(19): siRNA sense strand
uuguaacaggagacagaaa

SEQ ID NO: 2581195 - RNA, 19 nt, Homo sapiens
  misc_RNA (1)...(19): siRNA sense strand
aaggagguggugagaguuu

SEQ ID NO: 2581196 - RNA, 19 nt, Homo sapiens
  misc_RNA (1)...(19): siRNA sense strand
ugaacaagugguuggagga

SEQ ID NO: 2581197 - RNA, 19 nt, Homo sapiens
  misc_RNA (1)...(19): siRNA sense strand
ccaaagugaagcaggaaaa

SEQ ID NO: 2581198 - RNA, 19 nt, Homo sapiens
  misc_RNA (1)...(19): siRNA sense strand
uggcagaagaggcgggaga

SEQ ID NO: 2581199 - RNA, 19 nt, Homo sapiens
  misc_RNA (1)...(19): siRNA sense strand
gguuuaaagucuucgcaga

SEQ ID NO: 2581200 - RNA, 19 nt, Homo sapiens
  misc_RNA (1)...(19): siRNA sense strand
uggaggaaauugaggagga

SEQ ID NO: 2581201 - RNA, 19 nt, Homo sapiens
  misc_RNA (1)...(19): siRNA sense strand
gcaucaagagggagcccaa

SEQ ID NO: 2581202 - RNA, 19 nt, Homo sapiens
  misc_RNA (1)...(19): siRNA sense strand
aggcuguguuggaccgaaa

SEQ ID NO: 2581203 - RNA, 19 nt, Homo sapiens
  misc_RNA (1)...(19): siRNA sense strand
cgggauucgcuaugaguuu

SEQ ID NO: 2581204 - RNA, 19 nt, Homo sapiens
  misc_RNA (1)...(19): siRNA sense strand
cugccuaccuagagaggga

SEQ ID NO: 2581205 - RNA, 19 nt, Homo sapiens
  misc_RNA (1)...(19): siRNA sense strand
gccaaagugaagcaggaaa

SEQ ID NO: 2581206 - RNA, 19 nt, Homo sapiens
  misc_RNA (1)...(19): siRNA sense strand
ucgcagauuaugaagacua

SEQ ID NO: 2581207 - RNA, 19 nt, Homo sapiens
  misc_RNA (1)...(19): siRNA sense strand
agaauaagaccaacggcau

SEQ ID NO: 2581208 - RNA, 19 nt, Homo sapiens
  misc_RNA (1)...(19): siRNA sense strand
acuucaaccucaaggacuu

SEQ ID NO: 2581209 - RNA, 19 nt, Homo sapiens
  misc_RNA (1)...(19): siRNA sense strand
gggaauacaaaguccacau

SEQ ID NO: 2581210 - RNA, 19 nt, Homo sapiens
  misc_RNA (1)...(19): siRNA sense strand
uggcagaggucauugcuga

SEQ ID NO: 2581211 - RNA, 19 nt, Homo sapiens
  misc_RNA (1)...(19): siRNA sense strand
uggccaaagugaagcagga

SEQ ID NO: 2581212 - RNA, 19 nt, Homo sapiens
  misc_RNA (1)...(19): siRNA sense strand
guuuaaagucuucgcagau

SEQ ID NO: 2581213 - RNA, 19 nt, Homo sapiens
  misc_RNA (1)...(19): siRNA sense strand
auaauuucuucgaagggaa

SEQ ID NO: 2581214 - RNA, 19 nt, Homo sapiens
  misc_RNA (1)...(19): siRNA sense strand
gaacggauggacugggaca

SEQ ID NO: 2581215 - RNA, 19 nt, Homo sapiens
  misc_RNA (1)...(19): siRNA sense strand
gcaugucgcugguggagga

SEQ ID NO: 2581216 - RNA, 19 nt, Homo sapiens
  misc_RNA (1)...(19): siRNA sense strand
cagaauaagaccaacggca

SEQ ID NO: 2581217 - RNA, 19 nt, Homo sapiens
  misc_RNA (1)...(19): siRNA sense strand
gggauguggccaaagugaa

SEQ ID NO: 2581218 - RNA, 19 nt, Homo sapiens
  misc_RNA (1)...(19): siRNA sense strand
ccuagagagggaauacaaa

SEQ ID NO: 2581219 - RNA, 19 nt, Homo sapiens
  misc_RNA (1)...(19): siRNA sense strand
caagagaaaagaaagcaaa

SEQ ID NO: 2581220 - RNA, 19 nt, Homo sapiens
  misc_RNA (1)...(19): siRNA sense strand
gaaaccuggcggagaacau

SEQ ID NO: 2581221 - RNA, 19 nt, Homo sapiens
  misc_RNA (1)...(19): siRNA sense strand
ugugaugauuggagggaag

SEQ ID NO: 2581222 - RNA, 19 nt, Homo sapiens
  misc_RNA (1)...(19): siRNA sense strand
gugucaucuuccuggagaa

SEQ ID NO: 2581223 - RNA, 19 nt, Homo sapiens
  misc_RNA (1)...(19): siRNA sense strand
ccaagagaaaagaaagcaa

SEQ ID NO: 2581224 - RNA, 19 nt, Homo sapiens
  misc_RNA (1)...(19): siRNA sense strand
gaguggacgcggaugguga

SEQ ID NO: 2581225 - RNA, 19 nt, Homo sapiens
  misc_RNA (1)...(19): siRNA sense strand
ccaagagaguggacgcgga

SEQ ID NO: 2581226 - RNA, 19 nt, Homo sapiens
  misc_RNA (1)...(19): siRNA sense strand
ccaauguggagauggcaga

SEQ ID NO: 2581227 - RNA, 19 nt, Homo sapiens
  misc_RNA (1)...(19): siRNA sense strand
aagugaagcaggaaaacaa

SEQ ID NO: 2581228 - RNA, 19 nt, Homo sapiens
  misc_RNA (1)...(19): siRNA sense strand
ucgcuaugaguuugggauu

SEQ ID NO: 2581229 - RNA, 19 nt, Homo sapiens
  misc_RNA (1)...(19): siRNA sense strand
agaacgugacugagcugaa

SEQ ID NO: 2581230 - RNA, 19 nt, Homo sapiens
  misc_RNA (1)...(19): siRNA sense strand
aguugaaguuugcugccua

SEQ ID NO: 2581231 - RNA, 19 nt, Homo sapiens
  misc_RNA (1)...(19): siRNA sense strand
cuggagaacuaccgagucu

SEQ ID NO: 2581232 - RNA, 19 nt, Homo sapiens
  misc_RNA (1)...(19): siRNA sense strand
aggaaaacaaguugaaguu

SEQ ID NO: 2581233 - RNA, 19 nt, Homo sapiens
  misc_RNA (1)...(19): siRNA sense strand
ucaauaugcucaugcacca

SEQ ID NO: 2581234 - RNA, 19 nt, Homo sapiens
  misc_RNA (1)...(19): siRNA sense strand
cgcuaugaguuugggauuu

SEQ ID NO: 2581235 - RNA, 19 nt, Homo sapiens
  misc_RNA (1)...(19): siRNA sense strand
gguugaaggaagcaggaaa

SEQ ID NO: 2581236 - RNA, 19 nt, Homo sapiens
  misc_RNA (1)...(19): siRNA sense strand
aggaacuauuggaggaaau

SEQ ID NO: 2581237 - RNA, 19 nt, Homo sapiens
  misc_RNA (1)...(19): siRNA sense strand
ugaaaagauugaagagcua

SEQ ID NO: 2581238 - RNA, 19 nt, Homo sapiens
  misc_RNA (1)...(19): siRNA sense strand
cugugaaggagaugguaaa

SEQ ID NO: 2581239 - RNA, 19 nt, Homo sapiens
  misc_RNA (1)...(19): siRNA sense strand
cuaaauuacagcagugcaa

SEQ ID NO: 2581240 - RNA, 19 nt, Homo sapiens
  misc_RNA (1)...(19): siRNA sense strand
cuucagaguuggaacgaca

SEQ ID NO: 2581241 - RNA, 19 nt, Homo sapiens
  misc_RNA (1)...(19): siRNA sense strand
uggcaaucccuaugugaaa

SEQ ID NO: 2581242 - RNA, 19 nt, Homo sapiens
  misc_RNA (1)...(19): siRNA sense strand
agugcaaagcagagcuaaa

SEQ ID NO: 2581243 - RNA, 19 nt, Homo sapiens
  misc_RNA (1)...(19): siRNA sense strand
agucacuaacucagggaaa

SEQ ID NO: 2581244 - RNA, 19 nt, Homo sapiens
  misc_RNA (1)...(19): siRNA sense strand
ugguaaaggauguacucaa

SEQ ID NO: 2581245 - RNA, 19 nt, Homo sapiens
  misc_RNA (1)...(19): siRNA sense strand
aggcagacuuugcggcuau

SEQ ID NO: 2581246 - RNA, 19 nt, Homo sapiens
  misc_RNA (1)...(19): siRNA sense strand
ugaaggaacgacaggaaaa

SEQ ID NO: 2581247 - RNA, 19 nt, Homo sapiens
  misc_RNA (1)...(19): siRNA sense strand
caacagcgcaagaggcaga

SEQ ID NO: 2581248 - RNA, 19 nt, Homo sapiens
  misc_RNA (1)...(19): siRNA sense strand
uaaucuggcuagacagcaa

SEQ ID NO: 2581249 - RNA, 19 nt, Homo sapiens
  misc_RNA (1)...(19): siRNA sense strand
ugguagaacagaugcaaca

SEQ ID NO: 2581250 - RNA, 19 nt, Homo sapiens
  misc_RNA (1)...(19): siRNA sense strand
aggagaugguaaaggaugu

SEQ ID NO: 2581251 - RNA, 19 nt, Homo sapiens
  misc_RNA (1)...(19): siRNA sense strand
cgacaggaggaaaugaaga

SEQ ID NO: 2581252 - RNA, 19 nt, Homo sapiens
  misc_RNA (1)...(19): siRNA sense strand
aggccagguuucugccaaa

SEQ ID NO: 2581253 - RNA, 19 nt, Homo sapiens
  misc_RNA (1)...(19): siRNA sense strand
auacauauggagucacuaa

SEQ ID NO: 2581254 - RNA, 19 nt, Homo sapiens
  misc_RNA (1)...(19): siRNA sense strand
cuucaggagguuaaagcua

SEQ ID NO: 2581255 - RNA, 19 nt, Homo sapiens
  misc_RNA (1)...(19): siRNA sense strand
agaaguuagaagagggcca

SEQ ID NO: 2581256 - RNA, 19 nt, Homo sapiens
  misc_RNA (1)...(19): siRNA sense strand
cagaagaauauaaggcugu

SEQ ID NO: 2581257 - RNA, 19 nt, Homo sapiens
  misc_RNA (1)...(19): siRNA sense strand
guauggagaaggugaaagu

SEQ ID NO: 2581258 - RNA, 19 nt, Homo sapiens
  misc_RNA (1)...(19): siRNA sense strand
auggagaaggugaaaguau

SEQ ID NO: 2581259 - RNA, 19 nt, Homo sapiens
  misc_RNA (1)...(19): siRNA sense strand
agacacaggccuugaugau

SEQ ID NO: 2581260 - RNA, 19 nt, Homo sapiens
  misc_RNA (1)...(19): siRNA sense strand
aggagugucuacaucgaaa

SEQ ID NO: 2581261 - RNA, 19 nt, Homo sapiens
  misc_RNA (1)...(19): siRNA sense strand
acugugaaggagaugguaa

SEQ ID NO: 2581262 - RNA, 19 nt, Homo sapiens
  misc_RNA (1)...(19): siRNA sense strand
ggugaacgguugaaggaag

SEQ ID NO: 2581263 - RNA, 19 nt, Homo sapiens
  misc_RNA (1)...(19): siRNA sense strand
agucaguguaccagcagua

SEQ ID NO: 2581264 - RNA, 19 nt, Homo sapiens
  misc_RNA (1)...(19): siRNA sense strand
aggccuugaugaugauauu

SEQ ID NO: 2581265 - RNA, 19 nt, Homo sapiens
  misc_RNA (1)...(19): siRNA sense strand
ucaccauugauguggacaa

SEQ ID NO: 2581266 - RNA, 19 nt, Homo sapiens
  misc_RNA (1)...(19): siRNA sense strand
aguuggaacgacaggaaga

SEQ ID NO: 2581267 - RNA, 19 nt, Homo sapiens
  misc_RNA (1)...(19): siRNA sense strand
uggacaagaaguuagaaga

SEQ ID NO: 2581268 - RNA, 19 nt, Homo sapiens
  misc_RNA (1)...(19): siRNA sense strand
ccaacaaccaccagggaag

SEQ ID NO: 2581269 - RNA, 19 nt, Homo sapiens
  misc_RNA (1)...(19): siRNA sense strand
uguugaaacuccaaggcca

SEQ ID NO: 2581270 - RNA, 19 nt, Homo sapiens
  misc_RNA (1)...(19): siRNA sense strand
acaacauggugcuagugaa

SEQ ID NO: 2581271 - RNA, 19 nt, Homo sapiens
  misc_RNA (1)...(19): siRNA sense strand
acauggugcuagugaaacu

SEQ ID NO: 2581272 - RNA, 19 nt, Homo sapiens
  misc_RNA (1)...(19): siRNA sense strand
agaacaacauggugcuagu

SEQ ID NO: 2581273 - RNA, 19 nt, Homo sapiens
  misc_RNA (1)...(19): siRNA sense strand
uugaaggaacgacaggaaa

SEQ ID NO: 2581274 - RNA, 19 nt, Homo sapiens
  misc_RNA (1)...(19): siRNA sense strand
acaguauggagaaggugaa

SEQ ID NO: 2581275 - RNA, 19 nt, Homo sapiens
  misc_RNA (1)...(19): siRNA sense strand
agauccgacaggaggaaau

SEQ ID NO: 2581276 - RNA, 19 nt, Homo sapiens
  misc_RNA (1)...(19): siRNA sense strand
agaaaggggcuaaggcaga

SEQ ID NO: 2581277 - RNA, 19 nt, Homo sapiens
  misc_RNA (1)...(19): siRNA sense strand
gagagagcuuguugccaca

SEQ ID NO: 2581278 - RNA, 19 nt, Homo sapiens
  misc_RNA (1)...(19): siRNA sense strand
cagcacuggggcaggaaaa

SEQ ID NO: 2581279 - RNA, 19 nt, Homo sapiens
  misc_RNA (1)...(19): siRNA sense strand
ucuacaacgaacugcuuua

SEQ ID NO: 2581280 - RNA, 19 nt, Homo sapiens
  misc_RNA (1)...(19): siRNA sense strand
gcaaagaucagaagagugg

SEQ ID NO: 2581281 - RNA, 19 nt, Homo sapiens
  misc_RNA (1)...(19): siRNA sense strand
aggaggaaaugaagaagcu

SEQ ID NO: 2581282 - RNA, 19 nt, Homo sapiens
  misc_RNA (1)...(19): siRNA sense strand
agaucagaagaguggugaa

SEQ ID NO: 2581283 - RNA, 19 nt, Homo sapiens
  misc_RNA (1)...(19): siRNA sense strand
cugaggacaguauggagaa

SEQ ID NO: 2581284 - RNA, 19 nt, Homo sapiens
  misc_RNA (1)...(19): siRNA sense strand
cagaacuggcucaucuaua

SEQ ID NO: 2581285 - RNA, 19 nt, Homo sapiens
  misc_RNA (1)...(19): siRNA sense strand
ucgaaaaggaggagaacau

SEQ ID NO: 2581286 - RNA, 19 nt, Homo sapiens
  misc_RNA (1)...(19): siRNA sense strand
ccugcuaccaaaugggaaa

SEQ ID NO: 2581287 - RNA, 19 nt, Homo sapiens
  misc_RNA (1)...(19): siRNA sense strand
aaacuggacuucaggguca

SEQ ID NO: 2581288 - RNA, 19 nt, Homo sapiens
  misc_RNA (1)...(19): siRNA sense strand
gaaguuagcuccauggguu

SEQ ID NO: 2581289 - RNA, 19 nt, Homo sapiens
  misc_RNA (1)...(19): siRNA sense strand
aaguuagcuccauggguua

SEQ ID NO: 2581290 - RNA, 19 nt, Homo sapiens
  misc_RNA (1)...(19): siRNA sense strand
agaaaagaagccauugaaa

SEQ ID NO: 2581291 - RNA, 19 nt, Homo sapiens
  misc_RNA (1)...(19): siRNA sense strand
cugagcacguugagagauc

SEQ ID NO: 2581292 - RNA, 19 nt, Homo sapiens
  misc_RNA (1)...(19): siRNA sense strand
aggaagaggaggaggagga

SEQ ID NO: 2581293 - RNA, 19 nt, Homo sapiens
  misc_RNA (1)...(19): siRNA sense strand
augaggaggaggaggaaga

SEQ ID NO: 2581294 - RNA, 19 nt, Homo sapiens
  misc_RNA (1)...(19): siRNA sense strand
uggaggaggagcugaggaa

SEQ ID NO: 2581295 - RNA, 19 nt, Homo sapiens
  misc_RNA (1)...(19): siRNA sense strand
gcgacuugaauguggaaga

SEQ ID NO: 2581296 - RNA, 19 nt, Homo sapiens
  misc_RNA (1)...(19): siRNA sense strand
aagaggaggaggaggacuu

SEQ ID NO: 2581297 - RNA, 19 nt, Homo sapiens
  misc_RNA (1)...(19): siRNA sense strand
aggaugaggaggaggagga

SEQ ID NO: 2581298 - RNA, 19 nt, Homo sapiens
  misc_RNA (1)...(19): siRNA sense strand
aggaggaggaagaggagga

SEQ ID NO: 2581299 - RNA, 19 nt, Homo sapiens
  misc_RNA (1)...(19): siRNA sense strand
aggaggaagaggaggagga

SEQ ID NO: 2581300 - RNA, 19 nt, Homo sapiens
  misc_RNA (1)...(19): siRNA sense strand
aggaugaggaggugcccaa

SEQ ID NO: 2581301 - RNA, 19 nt, Homo sapiens
  misc_RNA (1)...(19): siRNA sense strand
gcauggugugcguggagua

SEQ ID NO: 2581302 - RNA, 19 nt, Homo sapiens
  misc_RNA (1)...(19): siRNA sense strand
acgaggaggaugaggagga

SEQ ID NO: 2581303 - RNA, 19 nt, Homo sapiens
  misc_RNA (1)...(19): siRNA sense strand
gaaaugcugucaaggccaa

SEQ ID NO: 2581304 - RNA, 19 nt, Homo sapiens
  misc_RNA (1)...(19): siRNA sense strand
ccagcaaguacaagcucaa

SEQ ID NO: 2581305 - RNA, 19 nt, Homo sapiens
  misc_RNA (1)...(19): siRNA sense strand
aguacaagcucaaggacuc

SEQ ID NO: 2581306 - RNA, 19 nt, Homo sapiens
  misc_RNA (1)...(19): siRNA sense strand
gacucugggcggugaggaa

SEQ ID NO: 2581307 - RNA, 19 nt, Homo sapiens
  misc_RNA (1)...(19): siRNA sense strand
agaagaucauucaccgcaa

SEQ ID NO: 2581308 - RNA, 19 nt, Homo sapiens
  misc_RNA (1)...(19): siRNA sense strand
aggaggaugaggaggagga

SEQ ID NO: 2581309 - RNA, 19 nt, Homo sapiens
  misc_RNA (1)...(19): siRNA sense strand
ggaagguggaggaggagcu

SEQ ID NO: 2581310 - RNA, 19 nt, Homo sapiens
  misc_RNA (1)...(19): siRNA sense strand
aggaggaggaggaagagga

SEQ ID NO: 2581311 - RNA, 19 nt, Homo sapiens
  misc_RNA (1)...(19): siRNA sense strand
aggaggaggaggacuucaa

SEQ ID NO: 2581312 - RNA, 19 nt, Homo sapiens
  misc_RNA (1)...(19): siRNA sense strand
gaggaggacuucaagccau

SEQ ID NO: 2581313 - RNA, 19 nt, Homo sapiens
  misc_RNA (1)...(19): siRNA sense strand
accggaagguggaggagga

SEQ ID NO: 2581314 - RNA, 19 nt, Homo sapiens
  misc_RNA (1)...(19): siRNA sense strand
gggaaagagaagaaggaga

SEQ ID NO: 2581315 - RNA, 19 nt, Homo sapiens
  misc_RNA (1)...(19): siRNA sense strand
aggagaaacccaagagcaa

SEQ ID NO: 2581316 - RNA, 19 nt, Homo sapiens
  misc_RNA (1)...(19): siRNA sense strand
ucccagaauuggugcgaaa

SEQ ID NO: 2581317 - RNA, 19 nt, Homo sapiens
  misc_RNA (1)...(19): siRNA sense strand
gcuaaagggagcuggccua

SEQ ID NO: 2581318 - RNA, 19 nt, Homo sapiens
  misc_RNA (1)...(19): siRNA sense strand
gugacgagagggagagcaa

SEQ ID NO: 2581319 - RNA, 19 nt, Homo sapiens
  misc_RNA (1)...(19): siRNA sense strand
cgguucagucuguggauua

SEQ ID NO: 2581320 - RNA, 19 nt, Homo sapiens
  misc_RNA (1)...(19): siRNA sense strand
gggaagaagaaaggagaga

SEQ ID NO: 2581321 - RNA, 19 nt, Homo sapiens
  misc_RNA (1)...(19): siRNA sense strand
cgucuuuagcugucaauaa

SEQ ID NO: 2581322 - RNA, 19 nt, Homo sapiens
  misc_RNA (1)...(19): siRNA sense strand
uggcaaaacuauugggguu

SEQ ID NO: 2581323 - RNA, 19 nt, Homo sapiens
  misc_RNA (1)...(19): siRNA sense strand
gcaaaagaggggaaagaga

SEQ ID NO: 2581324 - RNA, 19 nt, Homo sapiens
  misc_RNA (1)...(19): siRNA sense strand
agaagaaaggagagaaucu

SEQ ID NO: 2581325 - RNA, 19 nt, Homo sapiens
  misc_RNA (1)...(19): siRNA sense strand
ggacgaaagugucaaggca

SEQ ID NO: 2581326 - RNA, 19 nt, Homo sapiens
  misc_RNA (1)...(19): siRNA sense strand
agaacagagcguaguggaa

SEQ ID NO: 2581327 - RNA, 19 nt, Homo sapiens
  misc_RNA (1)...(19): siRNA sense strand
gagaaacccaagagcaaaa

SEQ ID NO: 2581328 - RNA, 19 nt, Homo sapiens
  misc_RNA (1)...(19): siRNA sense strand
aguuggugauucaaggaaa

SEQ ID NO: 2581329 - RNA, 19 nt, Homo sapiens
  misc_RNA (1)...(19): siRNA sense strand
cuaugacaguccagagaga

SEQ ID NO: 2581330 - RNA, 19 nt, Homo sapiens
  misc_RNA (1)...(19): siRNA sense strand
aggcugaugaagaggaaaa

SEQ ID NO: 2581331 - RNA, 19 nt, Homo sapiens
  misc_RNA (1)...(19): siRNA sense strand
gagacuugagagugaggaa

SEQ ID NO: 2581332 - RNA, 19 nt, Homo sapiens
  misc_RNA (1)...(19): siRNA sense strand
cuccagagcccaagcgcaa

SEQ ID NO: 2581333 - RNA, 19 nt, Homo sapiens
  misc_RNA (1)...(19): siRNA sense strand
acaaagaugcuguccggaa

SEQ ID NO: 2581334 - RNA, 19 nt, Homo sapiens
  misc_RNA (1)...(19): siRNA sense strand
gaugaaauaccgagaccga

SEQ ID NO: 2581335 - RNA, 19 nt, Homo sapiens
  misc_RNA (1)...(19): siRNA sense strand
gugauagauaugaugacua

SEQ ID NO: 2581336 - RNA, 19 nt, Homo sapiens
  misc_RNA (1)...(19): siRNA sense strand
ccaaauaugcaguaccuga

SEQ ID NO: 2581337 - RNA, 19 nt, Homo sapiens
  misc_RNA (1)...(19): siRNA sense strand
gagaagaaggagaaaccca

SEQ ID NO: 2581338 - RNA, 19 nt, Homo sapiens
  misc_RNA (1)...(19): siRNA sense strand
agggagagagagaugaaau

SEQ ID NO: 2581339 - RNA, 19 nt, Homo sapiens
  misc_RNA (1)...(19): siRNA sense strand
gagcgugaaagaaggaaca

SEQ ID NO: 2581340 - RNA, 19 nt, Homo sapiens
  misc_RNA (1)...(19): siRNA sense strand
gagggaagaagaaaggaga

SEQ ID NO: 2581341 - RNA, 19 nt, Homo sapiens
  misc_RNA (1)...(19): siRNA sense strand
acaagaugcugcaggccau

SEQ ID NO: 2581342 - RNA, 19 nt, Homo sapiens
  misc_RNA (1)...(19): siRNA sense strand
agaagaaggagaaacccaa

SEQ ID NO: 2581343 - RNA, 19 nt, Homo sapiens
  misc_RNA (1)...(19): siRNA sense strand
guuugaauaagcagaaaga

SEQ ID NO: 2581344 - RNA, 19 nt, Homo sapiens
  misc_RNA (1)...(19): siRNA sense strand
cuuugaaaauugauggcaa

SEQ ID NO: 2581345 - RNA, 19 nt, Homo sapiens
  misc_RNA (1)...(19): siRNA sense strand
gcuaagggagagagagaug

SEQ ID NO: 2581346 - RNA, 19 nt, Homo sapiens
  misc_RNA (1)...(19): siRNA sense strand
gugaaagaaggaacaguga

SEQ ID NO: 2581347 - RNA, 19 nt, Homo sapiens
  misc_RNA (1)...(19): siRNA sense strand
gaacagugaccgauccgaa

SEQ ID NO: 2581348 - RNA, 19 nt, Homo sapiens
  misc_RNA (1)...(19): siRNA sense strand
gacaaaagagugaguagaa

SEQ ID NO: 2581349 - RNA, 19 nt, Homo sapiens
  misc_RNA (1)...(19): siRNA sense strand
gacgagagggagagcaaga

SEQ ID NO: 2581350 - RNA, 19 nt, Homo sapiens
  misc_RNA (1)...(19): siRNA sense strand
gagagcgauauucgagaaa

SEQ ID NO: 2581351 - RNA, 19 nt, Homo sapiens
  misc_RNA (1)...(19): siRNA sense strand
caaggaaagcacauugcaa

SEQ ID NO: 2581352 - RNA, 19 nt, Homo sapiens
  misc_RNA (1)...(19): siRNA sense strand
gucucaaaguggugaagga

SEQ ID NO: 2581353 - RNA, 19 nt, Homo sapiens
  misc_RNA (1)...(19): siRNA sense strand
gggccugccuccugcaaaa

SEQ ID NO: 2581354 - RNA, 19 nt, Homo sapiens
  misc_RNA (1)...(19): siRNA sense strand
ugggcuaagaguuugaaua

SEQ ID NO: 2581355 - RNA, 19 nt, Homo sapiens
  misc_RNA (1)...(19): siRNA sense strand
guccagagagagagcguga

SEQ ID NO: 2581356 - RNA, 19 nt, Homo sapiens
  misc_RNA (1)...(19): siRNA sense strand
caaaagagugaguagaaca

SEQ ID NO: 2581357 - RNA, 19 nt, Homo sapiens
  misc_RNA (1)...(19): siRNA sense strand
ccagcuggauggaagccaa

SEQ ID NO: 2581358 - RNA, 19 nt, Homo sapiens
  misc_RNA (1)...(19): siRNA sense strand
cagcagauugccaaagaca

SEQ ID NO: 2581359 - RNA, 19 nt, Homo sapiens
  misc_RNA (1)...(19): siRNA sense strand
gacuugagagugaggaaga

SEQ ID NO: 2581360 - RNA, 19 nt, Homo sapiens
  misc_RNA (1)...(19): siRNA sense strand
augacaguccagagagaga

SEQ ID NO: 2581361 - RNA, 19 nt, Homo sapiens
  misc_RNA (1)...(19): siRNA sense strand
aaggaaagcacauugcaau

SEQ ID NO: 2581362 - RNA, 19 nt, Homo sapiens
  misc_RNA (1)...(19): siRNA sense strand
cucaguauucacaggauua

SEQ ID NO: 2581363 - RNA, 19 nt, Homo sapiens
  misc_RNA (1)...(19): siRNA sense strand
cugaaaggcagcagcucau

SEQ ID NO: 2581364 - RNA, 19 nt, Homo sapiens
  misc_RNA (1)...(19): siRNA sense strand
gcgaaauggagaugaggag

SEQ ID NO: 2581365 - RNA, 19 nt, Homo sapiens
  misc_RNA (1)...(19): siRNA sense strand
agggagagcaagaccauca

SEQ ID NO: 2581366 - RNA, 19 nt, Homo sapiens
  misc_RNA (1)...(19): siRNA sense strand
caucacagagagcgauauu

SEQ ID NO: 2581367 - RNA, 19 nt, Homo sapiens
  misc_RNA (1)...(19): siRNA sense strand
caguggugacagugacaau

SEQ ID NO: 2581368 - RNA, 19 nt, Homo sapiens
  misc_RNA (1)...(19): siRNA sense strand
gguggagagacuugagagu

SEQ ID NO: 2581369 - RNA, 19 nt, Homo sapiens
  misc_RNA (1)...(19): siRNA sense strand
guuuaaaggaagaggaaau

SEQ ID NO: 2581370 - RNA, 19 nt, Homo sapiens
  misc_RNA (1)...(19): siRNA sense strand
auuaaguacuccagggaaa

SEQ ID NO: 2581371 - RNA, 19 nt, Homo sapiens
  misc_RNA (1)...(19): siRNA sense strand
aggaagaagaggaggaaca

SEQ ID NO: 2581372 - RNA, 19 nt, Homo sapiens
  misc_RNA (1)...(19): siRNA sense strand
gagcaaaccaagaaggaga

SEQ ID NO: 2581373 - RNA, 19 nt, Homo sapiens
  misc_RNA (1)...(19): siRNA sense strand
gaucuagacuuuagggaca

SEQ ID NO: 2581374 - RNA, 19 nt, Homo sapiens
  misc_RNA (1)...(19): siRNA sense strand
gagaagugacagaggccaa

SEQ ID NO: 2581375 - RNA, 19 nt, Homo sapiens
  misc_RNA (1)...(19): siRNA sense strand
gagucaugcucaagagaga

SEQ ID NO: 2581376 - RNA, 19 nt, Homo sapiens
  misc_RNA (1)...(19): siRNA sense strand
agaaacaagagaaggagaa

SEQ ID NO: 2581377 - RNA, 19 nt, Homo sapiens
  misc_RNA (1)...(19): siRNA sense strand
agagagaagcagaaaggua

SEQ ID NO: 2581378 - RNA, 19 nt, Homo sapiens
  misc_RNA (1)...(19): siRNA sense strand
gaauuuaaagauagggaga

SEQ ID NO: 2581379 - RNA, 19 nt, Homo sapiens
  misc_RNA (1)...(19): siRNA sense strand
ccuuaagagucaugcucaa

SEQ ID NO: 2581380 - RNA, 19 nt, Homo sapiens
  misc_RNA (1)...(19): siRNA sense strand
cagccaaaguccaguucaa

SEQ ID NO: 2581381 - RNA, 19 nt, Homo sapiens
  misc_RNA (1)...(19): siRNA sense strand
aggaaaugaucgcagggaa

SEQ ID NO: 2581382 - RNA, 19 nt, Homo sapiens
  misc_RNA (1)...(19): siRNA sense strand
uggaagugcuggagcccua

SEQ ID NO: 2581383 - RNA, 19 nt, Homo sapiens
  misc_RNA (1)...(19): siRNA sense strand
cuuuagaggccgagguuca

SEQ ID NO: 2581384 - RNA, 19 nt, Homo sapiens
  misc_RNA (1)...(19): siRNA sense strand
ggaaagucaaguagcaaga

SEQ ID NO: 2581385 - RNA, 19 nt, Homo sapiens
  misc_RNA (1)...(19): siRNA sense strand
gcaaacgauguaaggcaaa

SEQ ID NO: 2581386 - RNA, 19 nt, Homo sapiens
  misc_RNA (1)...(19): siRNA sense strand
cuggauuaccugaggaaga

SEQ ID NO: 2581387 - RNA, 19 nt, Homo sapiens
  misc_RNA (1)...(19): siRNA sense strand
uugcaaauguagaggagca

SEQ ID NO: 2581388 - RNA, 19 nt, Homo sapiens
  misc_RNA (1)...(19): siRNA sense strand
gacuuuagggacagggaua

SEQ ID NO: 2581389 - RNA, 19 nt, Homo sapiens
  misc_RNA (1)...(19): siRNA sense strand
ggacauacauucuggggau

SEQ ID NO: 2581390 - RNA, 19 nt, Homo sapiens
  misc_RNA (1)...(19): siRNA sense strand
cauucagauuucagaggua

SEQ ID NO: 2581391 - RNA, 19 nt, Homo sapiens
  misc_RNA (1)...(19): siRNA sense strand
gugacuaugaggaggaaga

SEQ ID NO: 2581392 - RNA, 19 nt, Homo sapiens
  misc_RNA (1)...(19): siRNA sense strand
aggagaaugaagaagacaa

SEQ ID NO: 2581393 - RNA, 19 nt, Homo sapiens
  misc_RNA (1)...(19): siRNA sense strand
cucuaaugauccaggacaa

SEQ ID NO: 2581394 - RNA, 19 nt, Homo sapiens
  misc_RNA (1)...(19): siRNA sense strand
cguucugauuuuaggaaua

SEQ ID NO: 2581395 - RNA, 19 nt, Homo sapiens
  misc_RNA (1)...(19): siRNA sense strand
agaaggagaaugaagaaga

SEQ ID NO: 2581396 - RNA, 19 nt, Homo sapiens
  misc_RNA (1)...(19): siRNA sense strand
aacaagagaaggagaaaca

SEQ ID NO: 2581397 - RNA, 19 nt, Homo sapiens
  misc_RNA (1)...(19): siRNA sense strand
cuaucaugcuaaagcguau

SEQ ID NO: 2581398 - RNA, 19 nt, Homo sapiens
  misc_RNA (1)...(19): siRNA sense strand
gaagagaccgagagaggga

SEQ ID NO: 2581399 - RNA, 19 nt, Homo sapiens
  misc_RNA (1)...(19): siRNA sense strand
ggagaaacccagcaggcuu

SEQ ID NO: 2581400 - RNA, 19 nt, Homo sapiens
  misc_RNA (1)...(19): siRNA sense strand
gaagagggaagaaggccaa

SEQ ID NO: 2581401 - RNA, 19 nt, Homo sapiens
  misc_RNA (1)...(19): siRNA sense strand
ccuucaggaucaagauuau

SEQ ID NO: 2581402 - RNA, 19 nt, Homo sapiens
  misc_RNA (1)...(19): siRNA sense strand
cugcaagaacccaagagaa

SEQ ID NO: 2581403 - RNA, 19 nt, Homo sapiens
  misc_RNA (1)...(19): siRNA sense strand
ggaagagggaagaaggcca

SEQ ID NO: 2581404 - RNA, 19 nt, Homo sapiens
  misc_RNA (1)...(19): siRNA sense strand
cuauggagcuagagacgga

SEQ ID NO: 2581405 - RNA, 19 nt, Homo sapiens
  misc_RNA (1)...(19): siRNA sense strand
agguguagccuuugaacau

SEQ ID NO: 2581406 - RNA, 19 nt, Homo sapiens
  misc_RNA (1)...(19): siRNA sense strand
cggcccaagugaggagaaa

SEQ ID NO: 2581407 - RNA, 19 nt, Homo sapiens
  misc_RNA (1)...(19): siRNA sense strand
agucaaggaaagucaagua

SEQ ID NO: 2581408 - RNA, 19 nt, Homo sapiens
  misc_RNA (1)...(19): siRNA sense strand
aaagagauggcaaggagaa

SEQ ID NO: 2581409 - RNA, 19 nt, Homo sapiens
  misc_RNA (1)...(19): siRNA sense strand
acuaugaggaggaagaaga

SEQ ID NO: 2581410 - RNA, 19 nt, Homo sapiens
  misc_RNA (1)...(19): siRNA sense strand
aggaggaagaagaggagga

SEQ ID NO: 2581411 - RNA, 19 nt, Homo sapiens
  misc_RNA (1)...(19): siRNA sense strand
aaguuuaaaggaagaggaa

SEQ ID NO: 2581412 - RNA, 19 nt, Homo sapiens
  misc_RNA (1)...(19): siRNA sense strand
caagagaaggagaaacaca

SEQ ID NO: 2581413 - RNA, 19 nt, Homo sapiens
  misc_RNA (1)...(19): siRNA sense strand
uggugaagaucuuacagaa

SEQ ID NO: 2581414 - RNA, 19 nt, Homo sapiens
  misc_RNA (1)...(19): siRNA sense strand
agaacgagagggaaaguuu

SEQ ID NO: 2581415 - RNA, 19 nt, Homo sapiens
  misc_RNA (1)...(19): siRNA sense strand
aagagaaggagaaacacaa

SEQ ID NO: 2581416 - RNA, 19 nt, Homo sapiens
  misc_RNA (1)...(19): siRNA sense strand
gccaggauggagagagcaa

SEQ ID NO: 2581417 - RNA, 19 nt, Homo sapiens
  misc_RNA (1)...(19): siRNA sense strand
uggaggagacagugacuau

SEQ ID NO: 2581418 - RNA, 19 nt, Homo sapiens
  misc_RNA (1)...(19): siRNA sense strand
aaggagagaacgagaggga

SEQ ID NO: 2581419 - RNA, 19 nt, Homo sapiens
  misc_RNA (1)...(19): siRNA sense strand
uguuggagccucaggaaga

SEQ ID NO: 2581420 - RNA, 19 nt, Homo sapiens
  misc_RNA (1)...(19): siRNA sense strand
gagucauguuugcucgaua

SEQ ID NO: 2581421 - RNA, 19 nt, Homo sapiens
  misc_RNA (1)...(19): siRNA sense strand
uacacaagauagagaacau

SEQ ID NO: 2581422 - RNA, 19 nt, Homo sapiens
  misc_RNA (1)...(19): siRNA sense strand
cagaaacaagagaaggaga

SEQ ID NO: 2581423 - RNA, 19 nt, Homo sapiens
  misc_RNA (1)...(19): siRNA sense strand
ucggaugcauggaggccaa

SEQ ID NO: 2581424 - RNA, 19 nt, Homo sapiens
  misc_RNA (1)...(19): siRNA sense strand
ccgaagagaccgagagagg

SEQ ID NO: 2581425 - RNA, 19 nt, Homo sapiens
  misc_RNA (1)...(19): siRNA sense strand
cauuuagcauugaugggaa

SEQ ID NO: 2581426 - RNA, 19 nt, Homo sapiens
  misc_RNA (1)...(19): siRNA sense strand
ggaauaaacuggcuugucu

SEQ ID NO: 2581427 - RNA, 19 nt, Homo sapiens
  misc_RNA (1)...(19): siRNA sense strand
agggaaaguuuaaaggaag

SEQ ID NO: 2581428 - RNA, 19 nt, Homo sapiens
  misc_RNA (1)...(19): siRNA sense strand
cagaaaggaaacggauuaa

SEQ ID NO: 2581429 - RNA, 19 nt, Homo sapiens
  misc_RNA (1)...(19): siRNA sense strand
agauacaaaucgacaagga

SEQ ID NO: 2581430 - RNA, 19 nt, Homo sapiens
  misc_RNA (1)...(19): siRNA sense strand
caguucaagaccaagauaa

SEQ ID NO: 2581431 - RNA, 19 nt, Homo sapiens
  misc_RNA (1)...(19): siRNA sense strand
ucaaggaacuggagcccaa

SEQ ID NO: 2581432 - RNA, 19 nt, Homo sapiens
  misc_RNA (1)...(19): siRNA sense strand
cagaaugggaccugggagu

SEQ ID NO: 2581433 - RNA, 19 nt, Homo sapiens
  misc_RNA (1)...(19): siRNA sense strand
gaacaagcacagaauggga

SEQ ID NO: 2581434 - RNA, 19 nt, Homo sapiens
  misc_RNA (1)...(19): siRNA sense strand
gggaagauccagcugacca

SEQ ID NO: 2581435 - RNA, 19 nt, Homo sapiens
  misc_RNA (1)...(19): siRNA sense strand
acugugaguuugagggaug

SEQ ID NO: 2581436 - RNA, 19 nt, Homo sapiens
  misc_RNA (1)...(19): siRNA sense strand
ggacgugggaacaagcaca

SEQ ID NO: 2581437 - RNA, 19 nt, Homo sapiens
  misc_RNA (1)...(19): siRNA sense strand
ggacugugaguuugaggga

SEQ ID NO: 2581438 - RNA, 19 nt, Homo sapiens
  misc_RNA (1)...(19): siRNA sense strand
aauaugaagccgagagaaa

SEQ ID NO: 2581439 - RNA, 19 nt, Homo sapiens
  misc_RNA (1)...(19): siRNA sense strand
uguuaauacuccagugaaa

SEQ ID NO: 2581440 - RNA, 19 nt, Homo sapiens
  misc_RNA (1)...(19): siRNA sense strand
cagaagaagcauuagcaaa

SEQ ID NO: 2581441 - RNA, 19 nt, Homo sapiens
  misc_RNA (1)...(19): siRNA sense strand
ucagaaaggacaagaguau

SEQ ID NO: 2581442 - RNA, 19 nt, Homo sapiens
  misc_RNA (1)...(19): siRNA sense strand
augcagaaaucaucagaaa

SEQ ID NO: 2581443 - RNA, 19 nt, Homo sapiens
  misc_RNA (1)...(19): siRNA sense strand
gaguagaagaugagagucu

SEQ ID NO: 2581444 - RNA, 19 nt, Homo sapiens
  misc_RNA (1)...(19): siRNA sense strand
augaagaagaugaagcuaa

SEQ ID NO: 2581445 - RNA, 19 nt, Homo sapiens
  misc_RNA (1)...(19): siRNA sense strand
cuggauaacacauggcuaa

SEQ ID NO: 2581446 - RNA, 19 nt, Homo sapiens
  misc_RNA (1)...(19): siRNA sense strand
cgcaaagagcugcaagaaa

SEQ ID NO: 2581447 - RNA, 19 nt, Homo sapiens
  misc_RNA (1)...(19): siRNA sense strand
gauuaagacacgagaagca

SEQ ID NO: 2581448 - RNA, 19 nt, Homo sapiens
  misc_RNA (1)...(19): siRNA sense strand
ccagaacagaguugacaua

SEQ ID NO: 2581449 - RNA, 19 nt, Homo sapiens
  misc_RNA (1)...(19): siRNA sense strand
aagaaaucggcgagagaga

SEQ ID NO: 2581450 - RNA, 19 nt, Homo sapiens
  misc_RNA (1)...(19): siRNA sense strand
uuaaggaaacacugaguaa

SEQ ID NO: 2581451 - RNA, 19 nt, Homo sapiens
  misc_RNA (1)...(19): siRNA sense strand
ggaguuacuacuucagaaa

SEQ ID NO: 2581452 - RNA, 19 nt, Homo sapiens
  misc_RNA (1)...(19): siRNA sense strand
gggaagaaacagcccgaau

SEQ ID NO: 2581453 - RNA, 19 nt, Homo sapiens
  misc_RNA (1)...(19): siRNA sense strand
gagcauggagggugaugaa

SEQ ID NO: 2581454 - RNA, 19 nt, Homo sapiens
  misc_RNA (1)...(19): siRNA sense strand
uaugaagccgagagaaaua

SEQ ID NO: 2581455 - RNA, 19 nt, Homo sapiens
  misc_RNA (1)...(19): siRNA sense strand
cggaaggacagaacaggaa

SEQ ID NO: 2581456 - RNA, 19 nt, Homo sapiens
  misc_RNA (1)...(19): siRNA sense strand
caaugaagacugugaaaau

SEQ ID NO: 2581457 - RNA, 19 nt, Homo sapiens
  misc_RNA (1)...(19): siRNA sense strand
cugaagaauuugaugagga

SEQ ID NO: 2581458 - RNA, 19 nt, Homo sapiens
  misc_RNA (1)...(19): siRNA sense strand
cagugucaguauagcauaa

SEQ ID NO: 2581459 - RNA, 19 nt, Homo sapiens
  misc_RNA (1)...(19): siRNA sense strand
caaggauggcauagaguuu

SEQ ID NO: 2581460 - RNA, 19 nt, Homo sapiens
  misc_RNA (1)...(19): siRNA sense strand
ucaagaaaucggcgagaga

SEQ ID NO: 2581461 - RNA, 19 nt, Homo sapiens
  misc_RNA (1)...(19): siRNA sense strand
ggucagagcuuuuaggcau

SEQ ID NO: 2581462 - RNA, 19 nt, Homo sapiens
  misc_RNA (1)...(19): siRNA sense strand
augcagagaagguagcaaa

SEQ ID NO: 2581463 - RNA, 19 nt, Homo sapiens
  misc_RNA (1)...(19): siRNA sense strand
gagcagaauugaagcugga

SEQ ID NO: 2581464 - RNA, 19 nt, Homo sapiens
  misc_RNA (1)...(19): siRNA sense strand
caaugaaagguuggaguua

SEQ ID NO: 2581465 - RNA, 19 nt, Homo sapiens
  misc_RNA (1)...(19): siRNA sense strand
ccuacuugguggacaguuu

SEQ ID NO: 2581466 - RNA, 19 nt, Homo sapiens
  misc_RNA (1)...(19): siRNA sense strand
gugcuaacugccaaagaaa

SEQ ID NO: 2581467 - RNA, 19 nt, Homo sapiens
  misc_RNA (1)...(19): siRNA sense strand
gcuacaaaucccacaguau

SEQ ID NO: 2581468 - RNA, 19 nt, Homo sapiens
  misc_RNA (1)...(19): siRNA sense strand
guggacaguuuaugggaga

SEQ ID NO: 2581469 - RNA, 19 nt, Homo sapiens
  misc_RNA (1)...(19): siRNA sense strand
aagaugagagucuggauaa

SEQ ID NO: 2581470 - RNA, 19 nt, Homo sapiens
  misc_RNA (1)...(19): siRNA sense strand
aggauaauacccagagaca

SEQ ID NO: 2581471 - RNA, 19 nt, Homo sapiens
  misc_RNA (1)...(19): siRNA sense strand
ggaugaaaauguauaguga

SEQ ID NO: 2581472 - RNA, 19 nt, Homo sapiens
  misc_RNA (1)...(19): siRNA sense strand
cagaauuaccaguguuaca

SEQ ID NO: 2581473 - RNA, 19 nt, Homo sapiens
  misc_RNA (1)...(19): siRNA sense strand
ccucaucaguaaggaauaa

SEQ ID NO: 2581474 - RNA, 19 nt, Homo sapiens
  misc_RNA (1)...(19): siRNA sense strand
ccuaaaugacaguuaccua

SEQ ID NO: 2581475 - RNA, 19 nt, Homo sapiens
  misc_RNA (1)...(19): siRNA sense strand
ucuagaagccugcaguaaa

SEQ ID NO: 2581476 - RNA, 19 nt, Homo sapiens
  misc_RNA (1)...(19): siRNA sense strand
gcauggagggugaugaaga

SEQ ID NO: 2581477 - RNA, 19 nt, Homo sapiens
  misc_RNA (1)...(19): siRNA sense strand
cagcgagcuugaagaaaca

SEQ ID NO: 2581478 - RNA, 19 nt, Homo sapiens
  misc_RNA (1)...(19): siRNA sense strand
gcaaagaggaggggaagaa

SEQ ID NO: 2581479 - RNA, 19 nt, Homo sapiens
  misc_RNA (1)...(19): siRNA sense strand
gagcuaaugguuuguacaa

SEQ ID NO: 2581480 - RNA, 19 nt, Homo sapiens
  misc_RNA (1)...(19): siRNA sense strand
gggugaugaagaagaugaa

SEQ ID NO: 2581481 - RNA, 19 nt, Homo sapiens
  misc_RNA (1)...(19): siRNA sense strand
cugcagacaucuucaaaca

SEQ ID NO: 2581482 - RNA, 19 nt, Homo sapiens
  misc_RNA (1)...(19): siRNA sense strand
aaggaaacacugaguaaaa

SEQ ID NO: 2581483 - RNA, 19 nt, Homo sapiens
  misc_RNA (1)...(19): siRNA sense strand
gggagaagaagcugaugau

SEQ ID NO: 2581484 - RNA, 19 nt, Homo sapiens
  misc_RNA (1)...(19): siRNA sense strand
cuagaagccugcaguaaaa

SEQ ID NO: 2581485 - RNA, 19 nt, Homo sapiens
  misc_RNA (1)...(19): siRNA sense strand
ucauucauaccuagagaaa

SEQ ID NO: 2581486 - RNA, 19 nt, Homo sapiens
  misc_RNA (1)...(19): siRNA sense strand
gaaacagaggucaaaggaa

SEQ ID NO: 2581487 - RNA, 19 nt, Homo sapiens
  misc_RNA (1)...(19): siRNA sense strand
gcagaagaagcauuagcaa

SEQ ID NO: 2581488 - RNA, 19 nt, Homo sapiens
  misc_RNA (1)...(19): siRNA sense strand
uuaaguuuguuguggagaa

SEQ ID NO: 2581489 - RNA, 19 nt, Homo sapiens
  misc_RNA (1)...(19): siRNA sense strand
augaagaauuugaggacac

SEQ ID NO: 2581490 - RNA, 19 nt, Homo sapiens
  misc_RNA (1)...(19): siRNA sense strand
aggagcaggccguggaaga

SEQ ID NO: 2581491 - RNA, 19 nt, Homo sapiens
  misc_RNA (1)...(19): siRNA sense strand
cauuauuugagguggugaa

SEQ ID NO: 2581492 - RNA, 19 nt, Homo sapiens
  misc_RNA (1)...(19): siRNA sense strand
cauauaaacaagacaggga

SEQ ID NO: 2581493 - RNA, 19 nt, Homo sapiens
  misc_RNA (1)...(19): siRNA sense strand
ggauaauacccagagacaa

SEQ ID NO: 2581494 - RNA, 19 nt, Homo sapiens
  misc_RNA (1)...(19): siRNA sense strand
agccauuuguauugaagaa

SEQ ID NO: 2581495 - RNA, 19 nt, Homo sapiens
  misc_RNA (1)...(19): siRNA sense strand
ccagcugauugaugaguuu

SEQ ID NO: 2581496 - RNA, 19 nt, Homo sapiens
  misc_RNA (1)...(19): siRNA sense strand
auuuguugguauugaggaa

SEQ ID NO: 2581497 - RNA, 19 nt, Homo sapiens
  misc_RNA (1)...(19): siRNA sense strand
cuaauaaaauugaggccuu

SEQ ID NO: 2581498 - RNA, 19 nt, Homo sapiens
  misc_RNA (1)...(19): siRNA sense strand
uggaagagcuaauggacac

SEQ ID NO: 2581499 - RNA, 19 nt, Homo sapiens
  misc_RNA (1)...(19): siRNA sense strand
aaagaggauuuguugguau

SEQ ID NO: 2581500 - RNA, 19 nt, Homo sapiens
  misc_RNA (1)...(19): siRNA sense strand
uggaaguagcagcagcaaa

SEQ ID NO: 2581501 - RNA, 19 nt, Homo sapiens
  misc_RNA (1)...(19): siRNA sense strand
agcaaaaccucaucaguaa

SEQ ID NO: 2581502 - RNA, 19 nt, Homo sapiens
  misc_RNA (1)...(19): siRNA sense strand
ccaggugagaagagcagaa

SEQ ID NO: 2581503 - RNA, 19 nt, Homo sapiens
  misc_RNA (1)...(19): siRNA sense strand
ggugcuaaucuguggaaau

SEQ ID NO: 2581504 - RNA, 19 nt, Homo sapiens
  misc_RNA (1)...(19): siRNA sense strand
caguggaacaaguggauau

SEQ ID NO: 2581505 - RNA, 19 nt, Homo sapiens
  misc_RNA (1)...(19): siRNA sense strand
acaaagaggagaucgggua

SEQ ID NO: 2581506 - RNA, 19 nt, Homo sapiens
  misc_RNA (1)...(19): siRNA sense strand
guggaaauuuuaagggaau

SEQ ID NO: 2581507 - RNA, 19 nt, Homo sapiens
  misc_RNA (1)...(19): siRNA sense strand
caauggacugauaaggaaa

SEQ ID NO: 2581508 - RNA, 19 nt, Homo sapiens
  misc_RNA (1)...(19): siRNA sense strand
cagaaauggagaagagaug

SEQ ID NO: 2581509 - RNA, 19 nt, Homo sapiens
  misc_RNA (1)...(19): siRNA sense strand
gcgauggaguuuugaggaa

SEQ ID NO: 2581510 - RNA, 19 nt, Homo sapiens
  misc_RNA (1)...(19): siRNA sense strand
ucagauacgggcugggcaa

SEQ ID NO: 2581511 - RNA, 19 nt, Homo sapiens
  misc_RNA (1)...(19): siRNA sense strand
cugugagggcacugcauaa

SEQ ID NO: 2581512 - RNA, 19 nt, Homo sapiens
  misc_RNA (1)...(19): siRNA sense strand
acuaugaauccaugaaaca

SEQ ID NO: 2581513 - RNA, 19 nt, Homo sapiens
  misc_RNA (1)...(19): siRNA sense strand
cuacaaucuucaaaagcaa

SEQ ID NO: 2581514 - RNA, 19 nt, Homo sapiens
  misc_RNA (1)...(19): siRNA sense strand
aaaccuggcucaaugggaa

SEQ ID NO: 2581515 - RNA, 19 nt, Homo sapiens
  misc_RNA (1)...(19): siRNA sense strand
ggaucaacagaaauggaga

SEQ ID NO: 2581516 - RNA, 19 nt, Homo sapiens
  misc_RNA (1)...(19): siRNA sense strand
ccaggaagaugcuacguca

SEQ ID NO: 2581517 - RNA, 19 nt, Homo sapiens
  misc_RNA (1)...(19): siRNA sense strand
gcucgugucaccaggaaga

SEQ ID NO: 2581518 - RNA, 19 nt, Homo sapiens
  misc_RNA (1)...(19): siRNA sense strand
acagaaauggagaagagau

SEQ ID NO: 2581519 - RNA, 19 nt, Homo sapiens
  misc_RNA (1)...(19): siRNA sense strand
agacaaaacacaaugagau

SEQ ID NO: 2581520 - RNA, 19 nt, Homo sapiens
  misc_RNA (1)...(19): siRNA sense strand
agacgggccuggauaucua

SEQ ID NO: 2581521 - RNA, 19 nt, Homo sapiens
  misc_RNA (1)...(19): siRNA sense strand
ggcacugcauaaagauaau

SEQ ID NO: 2581522 - RNA, 19 nt, Homo sapiens
  misc_RNA (1)...(19): siRNA sense strand
auucuuuaccaguggaaca

SEQ ID NO: 2581523 - RNA, 19 nt, Homo sapiens
  misc_RNA (1)...(19): siRNA sense strand
aggaaaaggcuggaaagaa

SEQ ID NO: 2581524 - RNA, 19 nt, Homo sapiens
  misc_RNA (1)...(19): siRNA sense strand
uggaaagaaaccuucaaau

SEQ ID NO: 2581525 - RNA, 19 nt, Homo sapiens
  misc_RNA (1)...(19): siRNA sense strand
cugcgaacagggacaguuu

SEQ ID NO: 2581526 - RNA, 19 nt, Homo sapiens
  misc_RNA (1)...(19): siRNA sense strand
auguggaauaccucagaua

SEQ ID NO: 2581527 - RNA, 19 nt, Homo sapiens
  misc_RNA (1)...(19): siRNA sense strand
ggugcuaaucuguggaaau

SEQ ID NO: 2581528 - RNA, 19 nt, Homo sapiens
  misc_RNA (1)...(19): siRNA sense strand
caguggaacaaguggauau

SEQ ID NO: 2581529 - RNA, 19 nt, Homo sapiens
  misc_RNA (1)...(19): siRNA sense strand
acaaagaggagaucgggua

SEQ ID NO: 2581530 - RNA, 19 nt, Homo sapiens
  misc_RNA (1)...(19): siRNA sense strand
guggaaauuuuaagggaau

SEQ ID NO: 2581531 - RNA, 19 nt, Homo sapiens
  misc_RNA (1)...(19): siRNA sense strand
caauggacugauaaggaaa

SEQ ID NO: 2581532 - RNA, 19 nt, Homo sapiens
  misc_RNA (1)...(19): siRNA sense strand
cagaaauggagaagagaug

SEQ ID NO: 2581533 - RNA, 19 nt, Homo sapiens
  misc_RNA (1)...(19): siRNA sense strand
gcgauggaguuuugaggaa

SEQ ID NO: 2581534 - RNA, 19 nt, Homo sapiens
  misc_RNA (1)...(19): siRNA sense strand
ucagauacgggcugggcaa

SEQ ID NO: 2581535 - RNA, 19 nt, Homo sapiens
  misc_RNA (1)...(19): siRNA sense strand
cugugagggcacugcauaa

SEQ ID NO: 2581536 - RNA, 19 nt, Homo sapiens
  misc_RNA (1)...(19): siRNA sense strand
acuaugaauccaugaaaca

SEQ ID NO: 2581537 - RNA, 19 nt, Homo sapiens
  misc_RNA (1)...(19): siRNA sense strand
cuacaaucuucaaaagcaa

SEQ ID NO: 2581538 - RNA, 19 nt, Homo sapiens
  misc_RNA (1)...(19): siRNA sense strand
aaaccuggcucaaugggaa

SEQ ID NO: 2581539 - RNA, 19 nt, Homo sapiens
  misc_RNA (1)...(19): siRNA sense strand
ggaucaacagaaauggaga

SEQ ID NO: 2581540 - RNA, 19 nt, Homo sapiens
  misc_RNA (1)...(19): siRNA sense strand
ccaggaagaugcuacguca

SEQ ID NO: 2581541 - RNA, 19 nt, Homo sapiens
  misc_RNA (1)...(19): siRNA sense strand
gcucgugucaccaggaaga

SEQ ID NO: 2581542 - RNA, 19 nt, Homo sapiens
  misc_RNA (1)...(19): siRNA sense strand
acagaaauggagaagagau

SEQ ID NO: 2581543 - RNA, 19 nt, Homo sapiens
  misc_RNA (1)...(19): siRNA sense strand
agacaaaacacaaugagau

SEQ ID NO: 2581544 - RNA, 19 nt, Homo sapiens
  misc_RNA (1)...(19): siRNA sense strand
agacgggccuggauaucua

SEQ ID NO: 2581545 - RNA, 19 nt, Homo sapiens
  misc_RNA (1)...(19): siRNA sense strand
ggcacugcauaaagauaau

SEQ ID NO: 2581546 - RNA, 19 nt, Homo sapiens
  misc_RNA (1)...(19): siRNA sense strand
auucuuuaccaguggaaca

SEQ ID NO: 2581547 - RNA, 19 nt, Homo sapiens
  misc_RNA (1)...(19): siRNA sense strand
aggaaaaggcuggaaagaa

SEQ ID NO: 2581548 - RNA, 19 nt, Homo sapiens
  misc_RNA (1)...(19): siRNA sense strand
uggaaagaaaccuucaaau

SEQ ID NO: 2581549 - RNA, 19 nt, Homo sapiens
  misc_RNA (1)...(19): siRNA sense strand
cugcgaacagggacaguuu

SEQ ID NO: 2581550 - RNA, 19 nt, Homo sapiens
  misc_RNA (1)...(19): siRNA sense strand
auguggaauaccucagaua

SEQ ID NO: 2581551 - RNA, 19 nt, Homo sapiens
  misc_RNA (1)...(19): siRNA sense strand
acaaaguaauucaggcuca

SEQ ID NO: 2581552 - RNA, 19 nt, Homo sapiens
  misc_RNA (1)...(19): siRNA sense strand
aggauggagcucugauaaa

SEQ ID NO: 2581553 - RNA, 19 nt, Homo sapiens
  misc_RNA (1)...(19): siRNA sense strand
cucucaaauugcagacaua

SEQ ID NO: 2581554 - RNA, 19 nt, Homo sapiens
  misc_RNA (1)...(19): siRNA sense strand
gagcagaaauuaagcaagg

SEQ ID NO: 2581555 - RNA, 19 nt, Homo sapiens
  misc_RNA (1)...(19): siRNA sense strand
gcugaguuuaaaugaagaa

SEQ ID NO: 2581556 - RNA, 19 nt, Homo sapiens
  misc_RNA (1)...(19): siRNA sense strand
gaacauauuauuaagcgga

SEQ ID NO: 2581557 - RNA, 19 nt, Homo sapiens
  misc_RNA (1)...(19): siRNA sense strand
gcucugauaaagcgcacaa

SEQ ID NO: 2581558 - RNA, 19 nt, Homo sapiens
  misc_RNA (1)...(19): siRNA sense strand
cggacgauuaccaugcaua

SEQ ID NO: 2581559 - RNA, 19 nt, Homo sapiens
  misc_RNA (1)...(19): siRNA sense strand
gcagaaauuaagcaaggga

SEQ ID NO: 2581560 - RNA, 19 nt, Homo sapiens
  misc_RNA (1)...(19): siRNA sense strand
ucaaggaacuggagcccaa

SEQ ID NO: 2581561 - RNA, 19 nt, Homo sapiens
  misc_RNA (1)...(19): siRNA sense strand
cagaaugggaccugggagu

SEQ ID NO: 2581562 - RNA, 19 nt, Homo sapiens
  misc_RNA (1)...(19): siRNA sense strand
gagaaucuguucaccgcaa

SEQ ID NO: 2581563 - RNA, 19 nt, Homo sapiens
  misc_RNA (1)...(19): siRNA sense strand
caucagacagaaucggcaa

SEQ ID NO: 2581564 - RNA, 19 nt, Homo sapiens
  misc_RNA (1)...(19): siRNA sense strand
gaacaagcacagaauggga

SEQ ID NO: 2581565 - RNA, 19 nt, Homo sapiens
  misc_RNA (1)...(19): siRNA sense strand
acugugaguuugagggaug

SEQ ID NO: 2581566 - RNA, 19 nt, Homo sapiens
  misc_RNA (1)...(19): siRNA sense strand
ggacgugggaacaagcaca

SEQ ID NO: 2581567 - RNA, 19 nt, Homo sapiens
  misc_RNA (1)...(19): siRNA sense strand
ggacugugaguuugaggga

SEQ ID NO: 2581568 - RNA, 19 nt, Homo sapiens
  misc_RNA (1)...(19): siRNA sense strand
ggauaaugguaauggaaaa

SEQ ID NO: 2581569 - RNA, 19 nt, Homo sapiens
  misc_RNA (1)...(19): siRNA sense strand
aggaagaagaggaggagga

SEQ ID NO: 2581570 - RNA, 19 nt, Homo sapiens
  misc_RNA (1)...(19): siRNA sense strand
aggaggaggaggaggaaga

SEQ ID NO: 2581571 - RNA, 19 nt, Homo sapiens
  misc_RNA (1)...(19): siRNA sense strand
auuaaaguaucgagagaca

SEQ ID NO: 2581572 - RNA, 19 nt, Homo sapiens
  misc_RNA (1)...(19): siRNA sense strand
ugucaaugaaggagaaaca

SEQ ID NO: 2581573 - RNA, 19 nt, Homo sapiens
  misc_RNA (1)...(19): siRNA sense strand
cagcaaauugugaugcaaa

SEQ ID NO: 2581574 - RNA, 19 nt, Homo sapiens
  misc_RNA (1)...(19): siRNA sense strand
ggcggagagaagagagaaa

SEQ ID NO: 2581575 - RNA, 19 nt, Homo sapiens
  misc_RNA (1)...(19): siRNA sense strand
aagaagaggaggaggagga

SEQ ID NO: 2581576 - RNA, 19 nt, Homo sapiens
  misc_RNA (1)...(19): siRNA sense strand
agacuuacgaagagauauu

SEQ ID NO: 2581577 - RNA, 19 nt, Homo sapiens
  misc_RNA (1)...(19): siRNA sense strand
cuaacaaacaguaugacaa

SEQ ID NO: 2581578 - RNA, 19 nt, Homo sapiens
  misc_RNA (1)...(19): siRNA sense strand
ggguuagacuggcagaaau

SEQ ID NO: 2581579 - RNA, 19 nt, Homo sapiens
  misc_RNA (1)...(19): siRNA sense strand
cuaucagagcagugggaau

SEQ ID NO: 2581580 - RNA, 19 nt, Homo sapiens
  misc_RNA (1)...(19): siRNA sense strand
cggaauggcucaaacgcuu

SEQ ID NO: 2581581 - RNA, 19 nt, Homo sapiens
  misc_RNA (1)...(19): siRNA sense strand
aggauaaugguaauggaaa

SEQ ID NO: 2581582 - RNA, 19 nt, Homo sapiens
  misc_RNA (1)...(19): siRNA sense strand
acgcaaagaacuagaauac

SEQ ID NO: 2581583 - RNA, 19 nt, Homo sapiens
  misc_RNA (1)...(19): siRNA sense strand
augaggaggaagaggaaga

SEQ ID NO: 2581584 - RNA, 19 nt, Homo sapiens
  misc_RNA (1)...(19): siRNA sense strand
aggaagaggaagaagagga

SEQ ID NO: 2581585 - RNA, 19 nt, Homo sapiens
  misc_RNA (1)...(19): siRNA sense strand
auauugaugugcauggaaa

SEQ ID NO: 2581586 - RNA, 19 nt, Homo sapiens
  misc_RNA (1)...(19): siRNA sense strand
cuaccaaaucccaagacaa

SEQ ID NO: 2581587 - RNA, 19 nt, Homo sapiens
  misc_RNA (1)...(19): siRNA sense strand
aggaggaagaggaagaaga

SEQ ID NO: 2581588 - RNA, 19 nt, Homo sapiens
  misc_RNA (1)...(19): siRNA sense strand
aagaugaugaggaggaaga

SEQ ID NO: 2581589 - RNA, 19 nt, Homo sapiens
  misc_RNA (1)...(19): siRNA sense strand
uggcuagagauauggcaaa

SEQ ID NO: 2581590 - RNA, 19 nt, Homo sapiens
  misc_RNA (1)...(19): siRNA sense strand
gguuauaggcguauuuuaa

SEQ ID NO: 2581591 - RNA, 19 nt, Homo sapiens
  misc_RNA (1)...(19): siRNA sense strand
ucgacuacuuggaagggaa

SEQ ID NO: 2581592 - RNA, 19 nt, Homo sapiens
  misc_RNA (1)...(19): siRNA sense strand
cauggaaaucauaagacaa

SEQ ID NO: 2581593 - RNA, 19 nt, Homo sapiens
  misc_RNA (1)...(19): siRNA sense strand
cgacuacuuggaagggaaa

SEQ ID NO: 2581594 - RNA, 19 nt, Homo sapiens
  misc_RNA (1)...(19): siRNA sense strand
cauuuaaaucccagugaca

SEQ ID NO: 2581595 - RNA, 19 nt, Homo sapiens
  misc_RNA (1)...(19): siRNA sense strand
agcaaugaaucgagcccaa

SEQ ID NO: 2581596 - RNA, 19 nt, Homo sapiens
  misc_RNA (1)...(19): siRNA sense strand
aggaggaggaggaggagga

SEQ ID NO: 2581597 - RNA, 19 nt, Homo sapiens
  misc_RNA (1)...(19): siRNA sense strand
aggaggaggaggaggagga

SEQ ID NO: 2581598 - RNA, 19 nt, Homo sapiens
  misc_RNA (1)...(19): siRNA sense strand
cuggaauugugcuggaaaa

SEQ ID NO: 2581599 - RNA, 19 nt, Homo sapiens
  misc_RNA (1)...(19): siRNA sense strand
agaacagaauccugaagau

SEQ ID NO: 2581600 - RNA, 19 nt, Homo sapiens
  misc_RNA (1)...(19): siRNA sense strand
acaaaauaucagacagcaa

SEQ ID NO: 2581601 - RNA, 19 nt, Homo sapiens
  misc_RNA (1)...(19): siRNA sense strand
cacuugugguagaggguau

SEQ ID NO: 2581602 - RNA, 19 nt, Homo sapiens
  misc_RNA (1)...(19): siRNA sense strand
gaccaaggugacauggaaa

SEQ ID NO: 2581603 - RNA, 19 nt, Homo sapiens
  misc_RNA (1)...(19): siRNA sense strand
gagaauguuaccugcacua

SEQ ID NO: 2581604 - RNA, 19 nt, Homo sapiens
  misc_RNA (1)...(19): siRNA sense strand
agaugucaaugaaggagaa

SEQ ID NO: 2581605 - RNA, 19 nt, Homo sapiens
  misc_RNA (1)...(19): siRNA sense strand
ggaggaggaggaagaaaca

SEQ ID NO: 2581606 - RNA, 19 nt, Homo sapiens
  misc_RNA (1)...(19): siRNA sense strand
ugaagauaugggagaccua

SEQ ID NO: 2581607 - RNA, 19 nt, Homo sapiens
  misc_RNA (1)...(19): siRNA sense strand
cagaauguuuaaaggccuu

SEQ ID NO: 2581608 - RNA, 19 nt, Homo sapiens
  misc_RNA (1)...(19): siRNA sense strand
agcccaaguuuguuugaua

SEQ ID NO: 2581609 - RNA, 19 nt, Homo sapiens
  misc_RNA (1)...(19): siRNA sense strand
augaagaugaugaggagga

SEQ ID NO: 2581610 - RNA, 19 nt, Homo sapiens
  misc_RNA (1)...(19): siRNA sense strand
guuaucagcugaagaaaau

SEQ ID NO: 2581611 - RNA, 19 nt, Homo sapiens
  misc_RNA (1)...(19): siRNA sense strand
agaauaaagcuccugagaa

SEQ ID NO: 2581612 - RNA, 19 nt, Homo sapiens
  misc_RNA (1)...(19): siRNA sense strand
ucuggauguuggugaauau

SEQ ID NO: 2581613 - RNA, 19 nt, Homo sapiens
  misc_RNA (1)...(19): siRNA sense strand
cuguauaggccuaaccuuu

SEQ ID NO: 2581614 - RNA, 19 nt, Homo sapiens
  misc_RNA (1)...(19): siRNA sense strand
aagaggaagaagaggagga

SEQ ID NO: 2581615 - RNA, 19 nt, Homo sapiens
  misc_RNA (1)...(19): siRNA sense strand
aagaggaggaggaggagga

SEQ ID NO: 2581616 - RNA, 19 nt, Homo sapiens
  misc_RNA (1)...(19): siRNA sense strand
auaccuagauguugcugaa

SEQ ID NO: 2581617 - RNA, 19 nt, Homo sapiens
  misc_RNA (1)...(19): siRNA sense strand
aggaauuaacucuaccaaa

SEQ ID NO: 2581618 - RNA, 19 nt, Homo sapiens
  misc_RNA (1)...(19): siRNA sense strand
gaaugaagaugaugaggag

SEQ ID NO: 2581619 - RNA, 19 nt, Homo sapiens
  misc_RNA (1)...(19): siRNA sense strand
ugaugaggaggaagaggaa

SEQ ID NO: 2581620 - RNA, 19 nt, Homo sapiens
  misc_RNA (1)...(19): siRNA sense strand
agaaaaggccucggaguaa

SEQ ID NO: 2581621 - RNA, 19 nt, Homo sapiens
  misc_RNA (1)...(19): siRNA sense strand
ccaugauauaugaggacca

SEQ ID NO: 2581622 - RNA, 19 nt, Homo sapiens
  misc_RNA (1)...(19): siRNA sense strand
auggaugguuauaggcgua

SEQ ID NO: 2581623 - RNA, 19 nt, Homo sapiens
  misc_RNA (1)...(19): siRNA sense strand
gcauacaacuauaucagga

SEQ ID NO: 2581624 - RNA, 19 nt, Homo sapiens
  misc_RNA (1)...(19): siRNA sense strand
caggauaaugguaauggaa

SEQ ID NO: 2581625 - RNA, 19 nt, Homo sapiens
  misc_RNA (1)...(19): siRNA sense strand
caaugaaggagaaacauca

SEQ ID NO: 2581626 - RNA, 19 nt, Homo sapiens
  misc_RNA (1)...(19): siRNA sense strand
aaggaugacugguggaauc

SEQ ID NO: 2581627 - RNA, 19 nt, Homo sapiens
  misc_RNA (1)...(19): siRNA sense strand
augcagcuggcuagagaua

SEQ ID NO: 2581628 - RNA, 19 nt, Homo sapiens
  misc_RNA (1)...(19): siRNA sense strand
cuaugaagccaaugauguu

SEQ ID NO: 2581629 - RNA, 19 nt, Homo sapiens
  misc_RNA (1)...(19): siRNA sense strand
ucucaaagcaccagggccu

SEQ ID NO: 2581630 - RNA, 19 nt, Homo sapiens
  misc_RNA (1)...(19): siRNA sense strand
gcgucuugacaaaggauga

SEQ ID NO: 2581631 - RNA, 19 nt, Homo sapiens
  misc_RNA (1)...(19): siRNA sense strand
cgucaugcagaauguuuaa

SEQ ID NO: 2581632 - RNA, 19 nt, Homo sapiens
  misc_RNA (1)...(19): siRNA sense strand
ccaccuaugaagagaggaa

SEQ ID NO: 2581633 - RNA, 19 nt, Homo sapiens
  misc_RNA (1)...(19): siRNA sense strand
accuaugaagagaggaaua

SEQ ID NO: 2581634 - RNA, 19 nt, Homo sapiens
  misc_RNA (1)...(19): siRNA sense strand
cguacggagucgagaagca

SEQ ID NO: 2581635 - RNA, 19 nt, Homo sapiens
  misc_RNA (1)...(19): siRNA sense strand
agugcguggaggagaauaa

SEQ ID NO: 2581636 - RNA, 19 nt, Homo sapiens
  misc_RNA (1)...(19): siRNA sense strand
cuggcaagaucguggagau

SEQ ID NO: 2581637 - RNA, 19 nt, Homo sapiens
  misc_RNA (1)...(19): siRNA sense strand
guuccuggaucuugcgaga

SEQ ID NO: 2581638 - RNA, 19 nt, Homo sapiens
  misc_RNA (1)...(19): siRNA sense strand
cuggaucuugcgagaaaua

SEQ ID NO: 2581639 - RNA, 19 nt, Homo sapiens
  misc_RNA (1)...(19): siRNA sense strand
cgagaagcacagagccuga

SEQ ID NO: 2581640 - RNA, 19 nt, Homo sapiens
  misc_RNA (1)...(19): siRNA sense strand
gagaggaauaucaccggaa

SEQ ID NO: 2581641 - RNA, 19 nt, Homo sapiens
  misc_RNA (1)...(19): siRNA sense strand
ugaugaagugcguggagga

SEQ ID NO: 2581642 - RNA, 19 nt, Homo sapiens
  misc_RNA (1)...(19): siRNA sense strand
ccgcaguguucauugcaca

SEQ ID NO: 2581643 - RNA, 19 nt, Homo sapiens
  misc_RNA (1)...(19): siRNA sense strand
cugaguugauacaagugaa

SEQ ID NO: 2581644 - RNA, 19 nt, Homo sapiens
  misc_RNA (1)...(19): siRNA sense strand
gcuacaaggcgcugggcau

SEQ ID NO: 2581645 - RNA, 19 nt, Homo sapiens
  misc_RNA (1)...(19): siRNA sense strand
gugaagaagaacaaggagu

SEQ ID NO: 2581646 - RNA, 19 nt, Homo sapiens
  misc_RNA (1)...(19): siRNA sense strand
aggaguacaacgugcagaa

SEQ ID NO: 2581647 - RNA, 19 nt, Homo sapiens
  misc_RNA (1)...(19): siRNA sense strand
gcuugaaugagaucagcaa

SEQ ID NO: 2581648 - RNA, 19 nt, Homo sapiens
  misc_RNA (1)...(19): siRNA sense strand
aagcaaggaaguuggagga

SEQ ID NO: 2581649 - RNA, 19 nt, Homo sapiens
  misc_RNA (1)...(19): siRNA sense strand
agacaauggaaucgaguac

SEQ ID NO: 2581650 - RNA, 19 nt, Homo sapiens
  misc_RNA (1)...(19): siRNA sense strand
ugcagaucuuuguggacua

SEQ ID NO: 2581651 - RNA, 19 nt, Homo sapiens
  misc_RNA (1)...(19): siRNA sense strand
cagaaggagaccagcagca

SEQ ID NO: 2581652 - RNA, 19 nt, Homo sapiens
  misc_RNA (1)...(19): siRNA sense strand
ucaucaucuuugucagcua

SEQ ID NO: 2581653 - RNA, 19 nt, Homo sapiens
  misc_RNA (1)...(19): siRNA sense strand
gggagaacaucguggccuu

SEQ ID NO: 2581654 - RNA, 19 nt, Homo sapiens
  misc_RNA (1)...(19): siRNA sense strand
ugucccagcuagagggcaa

SEQ ID NO: 2581655 - RNA, 19 nt, Homo sapiens
  misc_RNA (1)...(19): siRNA sense strand
aggacaaggacgaggagga

SEQ ID NO: 2581656 - RNA, 19 nt, Homo sapiens
  misc_RNA (1)...(19): siRNA sense strand
gcuccaaacugcacggcuu

SEQ ID NO: 2581657 - RNA, 19 nt, Homo sapiens
  misc_RNA (1)...(19): siRNA sense strand
ucaucguggugguggagaa

SEQ ID NO: 2581658 - RNA, 19 nt, Homo sapiens
  misc_RNA (1)...(19): siRNA sense strand
ucgagaaggcgcuggccaa

SEQ ID NO: 2581659 - RNA, 19 nt, Homo sapiens
  misc_RNA (1)...(19): siRNA sense strand
aggagaaggaggagcagga

SEQ ID NO: 2581660 - RNA, 19 nt, Homo sapiens
  misc_RNA (1)...(19): siRNA sense strand
aggaggagcaggaggagga

SEQ ID NO: 2581661 - RNA, 19 nt, Homo sapiens
  misc_RNA (1)...(19): siRNA sense strand
gcaacaugaagguggacga

SEQ ID NO: 2581662 - RNA, 19 nt, Homo sapiens
  misc_RNA (1)...(19): siRNA sense strand
aggacgaggaggagaagga

SEQ ID NO: 2581663 - RNA, 19 nt, Homo sapiens
  misc_RNA (1)...(19): siRNA sense strand
agaaggaggagcaggagga

SEQ ID NO: 2581664 - RNA, 19 nt, Homo sapiens
  misc_RNA (1)...(19): siRNA sense strand
ucucacaggcgcagcggaa

SEQ ID NO: 2581665 - RNA, 19 nt, Homo sapiens
  misc_RNA (1)...(19): siRNA sense strand
aggaggagaaggaggagca

SEQ ID NO: 2581666 - RNA, 19 nt, Homo sapiens
  misc_RNA (1)...(19): siRNA sense strand
gccaaaaugcugaguucua

SEQ ID NO: 2581667 - RNA, 19 nt, Homo sapiens
  misc_RNA (1)...(19): siRNA sense strand
acgaggaggagaaggagga

SEQ ID NO: 2581668 - RNA, 19 nt, Homo sapiens
  misc_RNA (1)...(19): siRNA sense strand
augugagcuucguggauga

SEQ ID NO: 2581669 - RNA, 19 nt, Homo sapiens
  misc_RNA (1)...(19): siRNA sense strand
ccaucaagucagaggagaa

SEQ ID NO: 2581670 - RNA, 19 nt, Homo sapiens
  misc_RNA (1)...(19): siRNA sense strand
ccugcaucguggagggcaa

SEQ ID NO: 2581671 - RNA, 19 nt, Homo sapiens
  misc_RNA (1)...(19): siRNA sense strand
ggaaggaacucuauggaag

SEQ ID NO: 2581672 - RNA, 19 nt, Homo sapiens
  misc_RNA (1)...(19): siRNA sense strand
cagcaggagcagauugcaa

SEQ ID NO: 2581673 - RNA, 19 nt, Homo sapiens
  misc_RNA (1)...(19): siRNA sense strand
cugcaaaccaguggaguau

SEQ ID NO: 2581674 - RNA, 19 nt, Homo sapiens
  misc_RNA (1)...(19): siRNA sense strand
acucggagcagaagaacau

SEQ ID NO: 2581675 - RNA, 19 nt, Homo sapiens
  misc_RNA (1)...(19): siRNA sense strand
ccaaagaugucaaagggac

SEQ ID NO: 2581676 - RNA, 19 nt, Homo sapiens
  misc_RNA (1)...(19): siRNA sense strand
gugacuggaaggagagguu

SEQ ID NO: 2581677 - RNA, 19 nt, Homo sapiens
  misc_RNA (1)...(19): siRNA sense strand
ggaagauccugcaagccuu

SEQ ID NO: 2581678 - RNA, 19 nt, Homo sapiens
  misc_RNA (1)...(19): siRNA sense strand
ggaacucuauggaagccaa

SEQ ID NO: 2581679 - RNA, 19 nt, Homo sapiens
  misc_RNA (1)...(19): siRNA sense strand
uugcaaagcagcagcagca

SEQ ID NO: 2581680 - RNA, 19 nt, Homo sapiens
  misc_RNA (1)...(19): siRNA sense strand
ccgaagugcagcauggcaa

SEQ ID NO: 2581681 - RNA, 19 nt, Homo sapiens
  misc_RNA (1)...(19): siRNA sense strand
ccaaagaggagcuggugga

SEQ ID NO: 2581682 - RNA, 19 nt, Homo sapiens
  misc_RNA (1)...(19): siRNA sense strand
auguaaagucccugguuau

SEQ ID NO: 2581683 - RNA, 19 nt, Homo sapiens
  misc_RNA (1)...(19): siRNA sense strand
agucccugguuauggguaa

SEQ ID NO: 2581684 - RNA, 19 nt, Homo sapiens
  misc_RNA (1)...(19): siRNA sense strand
ggaagaaagccaaacgaag

SEQ ID NO: 2581685 - RNA, 19 nt, Homo sapiens
  misc_RNA (1)...(19): siRNA sense strand
caaacgaaguuaaaggaag

SEQ ID NO: 2581686 - RNA, 19 nt, Homo sapiens
  misc_RNA (1)...(19): siRNA sense strand
aggcauuagaggcggcaca

SEQ ID NO: 2581687 - RNA, 19 nt, Homo sapiens
  misc_RNA (1)...(19): siRNA sense strand
aagaaauacagcugggaug

SEQ ID NO: 2581688 - RNA, 19 nt, Homo sapiens
  misc_RNA (1)...(19): siRNA sense strand
ccgaagaaggagacugaaa

SEQ ID NO: 2581689 - RNA, 19 nt, Homo sapiens
  misc_RNA (1)...(19): siRNA sense strand
ccacauuagcacaggaaga

SEQ ID NO: 2581690 - RNA, 19 nt, Homo sapiens
  misc_RNA (1)...(19): siRNA sense strand
agaagauaaagguggcaaa

SEQ ID NO: 2581691 - RNA, 19 nt, Homo sapiens
  misc_RNA (1)...(19): siRNA sense strand
cgugguagacggaggagaa

SEQ ID NO: 2581692 - RNA, 19 nt, Homo sapiens
  misc_RNA (1)...(19): siRNA sense strand
acaaagacagauugaacaa

SEQ ID NO: 2581693 - RNA, 19 nt, Homo sapiens
  misc_RNA (1)...(19): siRNA sense strand
aagaaaaggagaaggagaa

SEQ ID NO: 2581694 - RNA, 19 nt, Homo sapiens
  misc_RNA (1)...(19): siRNA sense strand
cugaaucggaagaagauaa

SEQ ID NO: 2581695 - RNA, 19 nt, Homo sapiens
  misc_RNA (1)...(19): siRNA sense strand
aaagugaagcugaagauaa

SEQ ID NO: 2581696 - RNA, 19 nt, Homo sapiens
  misc_RNA (1)...(19): siRNA sense strand
cugucaggagagagagaaa

SEQ ID NO: 2581697 - RNA, 19 nt, Homo sapiens
  misc_RNA (1)...(19): siRNA sense strand
ccaccaaggcauagaagga

SEQ ID NO: 2581698 - RNA, 19 nt, Homo sapiens
  misc_RNA (1)...(19): siRNA sense strand
aagaaaacaucgcgggaau

SEQ ID NO: 2581699 - RNA, 19 nt, Homo sapiens
  misc_RNA (1)...(19): siRNA sense strand
aggcauagaaggaguagau

SEQ ID NO: 2581700 - RNA, 19 nt, Homo sapiens
  misc_RNA (1)...(19): siRNA sense strand
cggaaaacucguagguuau

SEQ ID NO: 2581701 - RNA, 19 nt, Homo sapiens
  misc_RNA (1)...(19): siRNA sense strand
ccaaagagaagaacggcuu

SEQ ID NO: 2581702 - RNA, 19 nt, Homo sapiens
  misc_RNA (1)...(19): siRNA sense strand
ccgcggaacaagugcagaa

SEQ ID NO: 2581703 - RNA, 19 nt, Homo sapiens
  misc_RNA (1)...(19): siRNA sense strand
agaaggagacugaaaguga

SEQ ID NO: 2581704 - RNA, 19 nt, Homo sapiens
  misc_RNA (1)...(19): siRNA sense strand
gccuagaaaaguagaguua

SEQ ID NO: 2581705 - RNA, 19 nt, Homo sapiens
  misc_RNA (1)...(19): siRNA sense strand
cagucaaaccguacaagaa

SEQ ID NO: 2581706 - RNA, 19 nt, Homo sapiens
  misc_RNA (1)...(19): siRNA sense strand
gaaaaggcccugagaucaa

SEQ ID NO: 2581707 - RNA, 19 nt, Homo sapiens
  misc_RNA (1)...(19): siRNA sense strand
ccuccaaggcgaaggcaca

SEQ ID NO: 2581708 - RNA, 19 nt, Homo sapiens
  misc_RNA (1)...(19): siRNA sense strand
cuucagguaaagugacaaa

SEQ ID NO: 2581709 - RNA, 19 nt, Homo sapiens
  misc_RNA (1)...(19): siRNA sense strand
ccuccuaaacgaagagcau

SEQ ID NO: 2581710 - RNA, 19 nt, Homo sapiens
  misc_RNA (1)...(19): siRNA sense strand
aggauaagaagcacaagaa

SEQ ID NO: 2581711 - RNA, 19 nt, Homo sapiens
  misc_RNA (1)...(19): siRNA sense strand
gacugaaagugaagcugaa

SEQ ID NO: 2581712 - RNA, 19 nt, Homo sapiens
  misc_RNA (1)...(19): siRNA sense strand
agacagauugaacaagaaa

SEQ ID NO: 2581713 - RNA, 19 nt, Homo sapiens
  misc_RNA (1)...(19): siRNA sense strand
cgccaauacagacgacaaa

SEQ ID NO: 2581714 - RNA, 19 nt, Homo sapiens
  misc_RNA (1)...(19): siRNA sense strand
gaaggagacugaaagugaa

SEQ ID NO: 2581715 - RNA, 19 nt, Homo sapiens
  misc_RNA (1)...(19): siRNA sense strand
gcauagaaggaguagaucu

SEQ ID NO: 2581716 - RNA, 19 nt, Homo sapiens
  misc_RNA (1)...(19): siRNA sense strand
aaaagaaggacaagaaaca

SEQ ID NO: 2581717 - RNA, 19 nt, Homo sapiens
  misc_RNA (1)...(19): siRNA sense strand
cgccagagccgaagaagga

SEQ ID NO: 2581718 - RNA, 19 nt, Homo sapiens
  misc_RNA (1)...(19): siRNA sense strand
cugcuaagugcacaagaaa

SEQ ID NO: 2581719 - RNA, 19 nt, Homo sapiens
  misc_RNA (1)...(19): siRNA sense strand
gguaaagugacaaaacaua

SEQ ID NO: 2581720 - RNA, 19 nt, Homo sapiens
  misc_RNA (1)...(19): siRNA sense strand
gaaaagcaccugcgugaaa

SEQ ID NO: 2581721 - RNA, 19 nt, Homo sapiens
  misc_RNA (1)...(19): siRNA sense strand
cucgagaauuuaugggaga

SEQ ID NO: 2581722 - RNA, 19 nt, Homo sapiens
  misc_RNA (1)...(19): siRNA sense strand
cggaacaagugcagaacag

SEQ ID NO: 2581723 - RNA, 19 nt, Homo sapiens
  misc_RNA (1)...(19): siRNA sense strand
gcuccagaaaagaaggaaa

SEQ ID NO: 2581724 - RNA, 19 nt, Homo sapiens
  misc_RNA (1)...(19): siRNA sense strand
cuccagaaaagaaggaaaa

SEQ ID NO: 2581725 - RNA, 19 nt, Homo sapiens
  misc_RNA (1)...(19): siRNA sense strand
ggagaagacccgaccacga

SEQ ID NO: 2581726 - RNA, 19 nt, Homo sapiens
  misc_RNA (1)...(19): siRNA sense strand
auaagaagcacaagaagca

SEQ ID NO: 2581727 - RNA, 19 nt, Homo sapiens
  misc_RNA (1)...(19): siRNA sense strand
agaacugaagaaagaagaa

SEQ ID NO: 2581728 - RNA, 19 nt, Homo sapiens
  misc_RNA (1)...(19): siRNA sense strand
aggcgaaggcacaggccau

SEQ ID NO: 2581729 - RNA, 19 nt, Homo sapiens
  misc_RNA (1)...(19): siRNA sense strand
aagugaagcugaagauaac

SEQ ID NO: 2581730 - RNA, 19 nt, Homo sapiens
  misc_RNA (1)...(19): siRNA sense strand
gugaaaaggcccugagauc

SEQ ID NO: 2581731 - RNA, 19 nt, Homo sapiens
  misc_RNA (1)...(19): siRNA sense strand
cgaagaagaacuccgccaa

SEQ ID NO: 2581732 - RNA, 19 nt, Homo sapiens
  misc_RNA (1)...(19): siRNA sense strand
gguacugagaaaagagaau

SEQ ID NO: 2581733 - RNA, 19 nt, Homo sapiens
  misc_RNA (1)...(19): siRNA sense strand
guggacaugagcaaaguaa

SEQ ID NO: 2581734 - RNA, 19 nt, Homo sapiens
  misc_RNA (1)...(19): siRNA sense strand
aagacagauugaacaagaa

SEQ ID NO: 2581735 - RNA, 19 nt, Homo sapiens
  misc_RNA (1)...(19): siRNA sense strand
aggauaaucgguucagcaa

SEQ ID NO: 2581736 - RNA, 19 nt, Homo sapiens
  misc_RNA (1)...(19): siRNA sense strand
cuacugaagcagcugaaau

SEQ ID NO: 2581737 - RNA, 19 nt, Homo sapiens
  misc_RNA (1)...(19): siRNA sense strand
ugaaagugaagcugaagau

SEQ ID NO: 2581738 - RNA, 19 nt, Homo sapiens
  misc_RNA (1)...(19): siRNA sense strand
gaacaagugcagaacagga

SEQ ID NO: 2581739 - RNA, 19 nt, Homo sapiens
  misc_RNA (1)...(19): siRNA sense strand
aaagaaaaggagaaggaga

SEQ ID NO: 2581740 - RNA, 19 nt, Homo sapiens
  misc_RNA (1)...(19): siRNA sense strand
gaaauuugcagaaugccua

SEQ ID NO: 2581741 - RNA, 19 nt, Homo sapiens
  misc_RNA (1)...(19): siRNA sense strand
agaagaacuccgccaagaa

SEQ ID NO: 2581742 - RNA, 19 nt, Homo sapiens
  misc_RNA (1)...(19): siRNA sense strand
acgccaauacagacgacaa

SEQ ID NO: 2581743 - RNA, 19 nt, Homo sapiens
  misc_RNA (1)...(19): siRNA sense strand
aagaaggacaagaaacaca

SEQ ID NO: 2581744 - RNA, 19 nt, Homo sapiens
  misc_RNA (1)...(19): siRNA sense strand
gaagaaggagacugaaagu

SEQ ID NO: 2581745 - RNA, 19 nt, Homo sapiens
  misc_RNA (1)...(19): siRNA sense strand
gugacaaaacauaaaggua

SEQ ID NO: 2581746 - RNA, 19 nt, Homo sapiens
  misc_RNA (1)...(19): siRNA sense strand
uaucugaaucggaagaaga

SEQ ID NO: 2581747 - RNA, 19 nt, Homo sapiens
  misc_RNA (1)...(19): siRNA sense strand
aagaaauucagaucaggaa

SEQ ID NO: 2581748 - RNA, 19 nt, Homo sapiens
  misc_RNA (1)...(19): siRNA sense strand
ccaucaccgccaagaaauu

SEQ ID NO: 2581749 - RNA, 19 nt, Homo sapiens
  misc_RNA (1)...(19): siRNA sense strand
gaagauaaccuugaugauu

SEQ ID NO: 2581750 - RNA, 19 nt, Homo sapiens
  misc_RNA (1)...(19): siRNA sense strand
uagaaaagcaccugcguga

SEQ ID NO: 2581751 - RNA, 19 nt, Homo sapiens
  misc_RNA (1)...(19): siRNA sense strand
agggacaaccaaugggaaa

SEQ ID NO: 2581752 - RNA, 19 nt, Homo sapiens
  misc_RNA (1)...(19): siRNA sense strand
auacagucaugguggacaa

SEQ ID NO: 2581753 - RNA, 19 nt, Homo sapiens
  misc_RNA (1)...(19): siRNA sense strand
agauguuggaugacaauaa

SEQ ID NO: 2581754 - RNA, 19 nt, Homo sapiens
  misc_RNA (1)...(19): siRNA sense strand
aggaaagaccucagagugu

SEQ ID NO: 2581755 - RNA, 19 nt, Homo sapiens
  misc_RNA (1)...(19): siRNA sense strand
caggacagcagcagggcua

SEQ ID NO: 2581756 - RNA, 19 nt, Homo sapiens
  misc_RNA (1)...(19): siRNA sense strand
cuaacuacccacagggaca

SEQ ID NO: 2581757 - RNA, 19 nt, Homo sapiens
  misc_RNA (1)...(19): siRNA sense strand
gggccuaaccauaugccua

SEQ ID NO: 2581758 - RNA, 19 nt, Homo sapiens
  misc_RNA (1)...(19): siRNA sense strand
acucaggccaggaagacua

SEQ ID NO: 2581759 - RNA, 19 nt, Homo sapiens
  misc_RNA (1)...(19): siRNA sense strand
auggauaugaccagggaca

SEQ ID NO: 2581760 - RNA, 19 nt, Homo sapiens
  misc_RNA (1)...(19): siRNA sense strand
acucucagaauaaaggaaa

SEQ ID NO: 2581761 - RNA, 19 nt, Homo sapiens
  misc_RNA (1)...(19): siRNA sense strand
cuaugggaaugauggguca

SEQ ID NO: 2581762 - RNA, 19 nt, Homo sapiens
  misc_RNA (1)...(19): siRNA sense strand
ucaaguuaaccaaggcaau

SEQ ID NO: 2581763 - RNA, 19 nt, Homo sapiens
  misc_RNA (1)...(19): siRNA sense strand
guauaauggacucucagaa

SEQ ID NO: 2581764 - RNA, 19 nt, Homo sapiens
  misc_RNA (1)...(19): siRNA sense strand
auaugaguaugcagccaaa

SEQ ID NO: 2581765 - RNA, 19 nt, Homo sapiens
  misc_RNA (1)...(19): siRNA sense strand
acaguauggccaacagcaa

SEQ ID NO: 2581766 - RNA, 19 nt, Homo sapiens
  misc_RNA (1)...(19): siRNA sense strand
acccagggcagcaagguua

SEQ ID NO: 2581767 - RNA, 19 nt, Homo sapiens
  misc_RNA (1)...(19): siRNA sense strand
ccaauacagucauggugga

SEQ ID NO: 2581768 - RNA, 19 nt, Homo sapiens
  misc_RNA (1)...(19): siRNA sense strand
agggaggcggacagcauua

SEQ ID NO: 2581769 - RNA, 19 nt, Homo sapiens
  misc_RNA (1)...(19): siRNA sense strand
ucauaugaugggucagaga

SEQ ID NO: 2581770 - RNA, 19 nt, Homo sapiens
  misc_RNA (1)...(19): siRNA sense strand
aaggcaugaaccagcaaua

SEQ ID NO: 2581771 - RNA, 19 nt, Homo sapiens
  misc_RNA (1)...(19): siRNA sense strand
ggagaaaagaaauggaaau

SEQ ID NO: 2581772 - RNA, 19 nt, Homo sapiens
  misc_RNA (1)...(19): siRNA sense strand
uccacauggcauagaaaua

SEQ ID NO: 2581773 - RNA, 19 nt, Homo sapiens
  misc_RNA (1)...(19): siRNA sense strand
aaauggaaauaauggcaga

SEQ ID NO: 2581774 - RNA, 19 nt, Homo sapiens
  misc_RNA (1)...(19): siRNA sense strand
aaaauuuggaggauggaua

SEQ ID NO: 2581775 - RNA, 19 nt, Homo sapiens
  misc_RNA (1)...(19): siRNA sense strand
acucuaaaaugaaggcaga

SEQ ID NO: 2581776 - RNA, 19 nt, Homo sapiens
  misc_RNA (1)...(19): siRNA sense strand
uggagaaaagaaauggaaa

SEQ ID NO: 2581777 - RNA, 19 nt, Homo sapiens
  misc_RNA (1)...(19): siRNA sense strand
ccaucgaauauucaaggaa

SEQ ID NO: 2581778 - RNA, 19 nt, Homo sapiens
  misc_RNA (1)...(19): siRNA sense strand
ggagaaaagaaauggaaau

SEQ ID NO: 2581779 - RNA, 19 nt, Homo sapiens
  misc_RNA (1)...(19): siRNA sense strand
uccacauggcauagaaaua

SEQ ID NO: 2581780 - RNA, 19 nt, Homo sapiens
  misc_RNA (1)...(19): siRNA sense strand
aaauggaaauaauggcaga

SEQ ID NO: 2581781 - RNA, 19 nt, Homo sapiens
  misc_RNA (1)...(19): siRNA sense strand
aaaauuuggaggauggaua

SEQ ID NO: 2581782 - RNA, 19 nt, Homo sapiens
  misc_RNA (1)...(19): siRNA sense strand
acucuaaaaugaaggcaga

SEQ ID NO: 2581783 - RNA, 19 nt, Homo sapiens
  misc_RNA (1)...(19): siRNA sense strand
uggagaaaagaaauggaaa

SEQ ID NO: 2581784 - RNA, 19 nt, Homo sapiens
  misc_RNA (1)...(19): siRNA sense strand
ccaucgaauauucaaggaa

SEQ ID NO: 2581785 - RNA, 19 nt, Homo sapiens
  misc_RNA (1)...(19): siRNA sense strand
ggucagacaugcuggccaa

SEQ ID NO: 2581786 - RNA, 19 nt, Homo sapiens
  misc_RNA (1)...(19): siRNA sense strand
ccugauaagaagaagaaau

SEQ ID NO: 2581787 - RNA, 19 nt, Homo sapiens
  misc_RNA (1)...(19): siRNA sense strand
agaagaagggaaaggaaaa

SEQ ID NO: 2581788 - RNA, 19 nt, Homo sapiens
  misc_RNA (1)...(19): siRNA sense strand
aagaggagaaacugggaaa

SEQ ID NO: 2581789 - RNA, 19 nt, Homo sapiens
  misc_RNA (1)...(19): siRNA sense strand
cugagaaggaagagcaaga

SEQ ID NO: 2581790 - RNA, 19 nt, Homo sapiens
  misc_RNA (1)...(19): siRNA sense strand
aaaacaagaagaagggaaa

SEQ ID NO: 2581791 - RNA, 19 nt, Homo sapiens
  misc_RNA (1)...(19): siRNA sense strand
cagaaugguaagaggcuga

SEQ ID NO: 2581792 - RNA, 19 nt, Homo sapiens
  misc_RNA (1)...(19): siRNA sense strand
cuggagaaggaaaggaaga

SEQ ID NO: 2581793 - RNA, 19 nt, Homo sapiens
  misc_RNA (1)...(19): siRNA sense strand
agguagaggaggaaguuga

SEQ ID NO: 2581794 - RNA, 19 nt, Homo sapiens
  misc_RNA (1)...(19): siRNA sense strand
ugacagauggagaagaaaa

SEQ ID NO: 2581795 - RNA, 19 nt, Homo sapiens
  misc_RNA (1)...(19): siRNA sense strand
aaggaaaggaagaugcauu

SEQ ID NO: 2581796 - RNA, 19 nt, Homo sapiens
  misc_RNA (1)...(19): siRNA sense strand
aagcaaugccacagagcca

SEQ ID NO: 2581797 - RNA, 19 nt, Homo sapiens
  misc_RNA (1)...(19): siRNA sense strand
agcaagagaaauuggguga

SEQ ID NO: 2581798 - RNA, 19 nt, Homo sapiens
  misc_RNA (1)...(19): siRNA sense strand
uugucauucuggaggcaaa

SEQ ID NO: 2581799 - RNA, 19 nt, Homo sapiens
  misc_RNA (1)...(19): siRNA sense strand
aacccaaagaagaggagaa

SEQ ID NO: 2581800 - RNA, 19 nt, Homo sapiens
  misc_RNA (1)...(19): siRNA sense strand
acccaaagaagaggagaaa

SEQ ID NO: 2581801 - RNA, 19 nt, Homo sapiens
  misc_RNA (1)...(19): siRNA sense strand
uggauugacagauggagaa

SEQ ID NO: 2581802 - RNA, 19 nt, Homo sapiens
  misc_RNA (1)...(19): siRNA sense strand
aggaggaaguugaugccau

SEQ ID NO: 2581803 - RNA, 19 nt, Homo sapiens
  misc_RNA (1)...(19): siRNA sense strand
gaacaaauccagaaagugc

SEQ ID NO: 2581804 - RNA, 19 nt, Homo sapiens
  misc_RNA (1)...(19): siRNA sense strand
ccugcaaagugcugagaag

SEQ ID NO: 2581805 - RNA, 19 nt, Homo sapiens
  misc_RNA (1)...(19): siRNA sense strand
uguaaaagacuuagggaag

SEQ ID NO: 2581806 - RNA, 19 nt, Homo sapiens
  misc_RNA (1)...(19): siRNA sense strand
cuggauugacagauggaga

SEQ ID NO: 2581807 - RNA, 19 nt, Homo sapiens
  misc_RNA (1)...(19): siRNA sense strand
gcauaaaauuccauugcca

SEQ ID NO: 2581808 - RNA, 19 nt, Homo sapiens
  misc_RNA (1)...(19): siRNA sense strand
auguaaaagacuuagggaa

SEQ ID NO: 2581809 - RNA, 19 nt, Homo sapiens
  misc_RNA (1)...(19): siRNA sense strand
uggccauguaacugaggaa

SEQ ID NO: 2581810 - RNA, 19 nt, Homo sapiens
  misc_RNA (1)...(19): siRNA sense strand
ggauaauggaacucaggaa

SEQ ID NO: 2581811 - RNA, 19 nt, Homo sapiens
  misc_RNA (1)...(19): siRNA sense strand
caggaaauaaaguguggaa

SEQ ID NO: 2581812 - RNA, 19 nt, Homo sapiens
  misc_RNA (1)...(19): siRNA sense strand
guggaagguacgaguguau

SEQ ID NO: 2581813 - RNA, 19 nt, Homo sapiens
  misc_RNA (1)...(19): siRNA sense strand
auucaagagcccaacgaaa

SEQ ID NO: 2581814 - RNA, 19 nt, Homo sapiens
  misc_RNA (1)...(19): siRNA sense strand
gucaagggaguuugggaaa

SEQ ID NO: 2581815 - RNA, 19 nt, Homo sapiens
  misc_RNA (1)...(19): siRNA sense strand
augcaaugguccaagguca

SEQ ID NO: 2581816 - RNA, 19 nt, Homo sapiens
  misc_RNA (1)...(19): siRNA sense strand
ugggagacccugugaguca

SEQ ID NO: 2581817 - RNA, 19 nt, Homo sapiens
  misc_RNA (1)...(19): siRNA sense strand
gagaaaaggcaaagaugga

SEQ ID NO: 2581818 - RNA, 19 nt, Homo sapiens
  misc_RNA (1)...(19): siRNA sense strand
cggaaguucucuugccaca

SEQ ID NO: 2581819 - RNA, 19 nt, Homo sapiens
  misc_RNA (1)...(19): siRNA sense strand
ugucaagggaguuugggaa

SEQ ID NO: 2581820 - RNA, 19 nt, Homo sapiens
  misc_RNA (1)...(19): siRNA sense strand
acuuaaagauagagucaag

SEQ ID NO: 2581821 - RNA, 19 nt, Homo sapiens
  misc_RNA (1)...(19): siRNA sense strand
gaaaauaacuccacggaug

SEQ ID NO: 2581822 - RNA, 19 nt, Homo sapiens
  misc_RNA (1)...(19): siRNA sense strand
cagaugaauggaacagcaa

SEQ ID NO: 2581823 - RNA, 19 nt, Homo sapiens
  misc_RNA (1)...(19): siRNA sense strand
cagucaacacagaagaaaa

SEQ ID NO: 2581824 - RNA, 19 nt, Homo sapiens
  misc_RNA (1)...(19): siRNA sense strand
cuacugugccuaugggaga

SEQ ID NO: 2581825 - RNA, 19 nt, Homo sapiens
  misc_RNA (1)...(19): siRNA sense strand
acgaaagugaucugccuua

SEQ ID NO: 2581826 - RNA, 19 nt, Homo sapiens
  misc_RNA (1)...(19): siRNA sense strand
gcagaugaauggaacagca

SEQ ID NO: 2581827 - RNA, 19 nt, Homo sapiens
  misc_RNA (1)...(19): siRNA sense strand
ugaagagagaaaaggcaaa

SEQ ID NO: 2581828 - RNA, 19 nt, Homo sapiens
  misc_RNA (1)...(19): siRNA sense strand
gguacauaguaauaaacca

SEQ ID NO: 2581829 - RNA, 19 nt, Homo sapiens
  misc_RNA (1)...(19): siRNA sense strand
caauaagcccaaagaugga

SEQ ID NO: 2581830 - RNA, 19 nt, Homo sapiens
  misc_RNA (1)...(19): siRNA sense strand
ccugcaagauauccagcua

SEQ ID NO: 2581831 - RNA, 19 nt, Homo sapiens
  misc_RNA (1)...(19): siRNA sense strand
ggucuuggagugagaaaau

SEQ ID NO: 2581832 - RNA, 19 nt, Homo sapiens
  misc_RNA (1)...(19): siRNA sense strand
acacguuacagcagaugaa

SEQ ID NO: 2581833 - RNA, 19 nt, Homo sapiens
  misc_RNA (1)...(19): siRNA sense strand
agugauuguagcagcuuua

SEQ ID NO: 2581834 - RNA, 19 nt, Homo sapiens
  misc_RNA (1)...(19): siRNA sense strand
cugugauuguggaaaauaa

SEQ ID NO: 2581835 - RNA, 19 nt, Homo sapiens
  misc_RNA (1)...(19): siRNA sense strand
cguccauaucacugguauu

SEQ ID NO: 2581836 - RNA, 19 nt, Homo sapiens
  misc_RNA (1)...(19): siRNA sense strand
aaacacagacaguaggcuu

SEQ ID NO: 2581837 - RNA, 19 nt, Homo sapiens
  misc_RNA (1)...(19): siRNA sense strand
agucaacacagaagaaaau

SEQ ID NO: 2581838 - RNA, 19 nt, Homo sapiens
  misc_RNA (1)...(19): siRNA sense strand
gaaaaggcaaagauggauu

SEQ ID NO: 2581839 - RNA, 19 nt, Homo sapiens
  misc_RNA (1)...(19): siRNA sense strand
ugccaauggaucuacgaaa

SEQ ID NO: 2581840 - RNA, 19 nt, Homo sapiens
  misc_RNA (1)...(19): siRNA sense strand
auguauuucccaaagcaaa

SEQ ID NO: 2581841 - RNA, 19 nt, Homo sapiens
  misc_RNA (1)...(19): siRNA sense strand
uaguaauaaaccagcccaa

SEQ ID NO: 2581842 - RNA, 19 nt, Homo sapiens
  misc_RNA (1)...(19): siRNA sense strand
guuuggucuuggagugaga

SEQ ID NO: 2581843 - RNA, 19 nt, Homo sapiens
  misc_RNA (1)...(19): siRNA sense strand
guguaugcuuguucuguau

SEQ ID NO: 2581844 - RNA, 19 nt, Homo sapiens
  misc_RNA (1)...(19): siRNA sense strand
ggaaacacuuaucucccaa

SEQ ID NO: 2581845 - RNA, 19 nt, Homo sapiens
  misc_RNA (1)...(19): siRNA sense strand
ggauaauggaacucaggaa

SEQ ID NO: 2581846 - RNA, 19 nt, Homo sapiens
  misc_RNA (1)...(19): siRNA sense strand
caggaaauaaaguguggaa

SEQ ID NO: 2581847 - RNA, 19 nt, Homo sapiens
  misc_RNA (1)...(19): siRNA sense strand
guggaagguacgaguguau

SEQ ID NO: 2581848 - RNA, 19 nt, Homo sapiens
  misc_RNA (1)...(19): siRNA sense strand
auucaagagcccaacgaaa

SEQ ID NO: 2581849 - RNA, 19 nt, Homo sapiens
  misc_RNA (1)...(19): siRNA sense strand
gucaagggaguuugggaaa

SEQ ID NO: 2581850 - RNA, 19 nt, Homo sapiens
  misc_RNA (1)...(19): siRNA sense strand
augcaaugguccaagguca

SEQ ID NO: 2581851 - RNA, 19 nt, Homo sapiens
  misc_RNA (1)...(19): siRNA sense strand
ugggagacccugugaguca

SEQ ID NO: 2581852 - RNA, 19 nt, Homo sapiens
  misc_RNA (1)...(19): siRNA sense strand
gagaaaaggcaaagaugga

SEQ ID NO: 2581853 - RNA, 19 nt, Homo sapiens
  misc_RNA (1)...(19): siRNA sense strand
cggaaguucucuugccaca

SEQ ID NO: 2581854 - RNA, 19 nt, Homo sapiens
  misc_RNA (1)...(19): siRNA sense strand
ugucaagggaguuugggaa

SEQ ID NO: 2581855 - RNA, 19 nt, Homo sapiens
  misc_RNA (1)...(19): siRNA sense strand
acuuaaagauagagucaag

SEQ ID NO: 2581856 - RNA, 19 nt, Homo sapiens
  misc_RNA (1)...(19): siRNA sense strand
gaaaauaacuccacggaug

SEQ ID NO: 2581857 - RNA, 19 nt, Homo sapiens
  misc_RNA (1)...(19): siRNA sense strand
cagaugaauggaacagcaa

SEQ ID NO: 2581858 - RNA, 19 nt, Homo sapiens
  misc_RNA (1)...(19): siRNA sense strand
cagucaacacagaagaaaa

SEQ ID NO: 2581859 - RNA, 19 nt, Homo sapiens
  misc_RNA (1)...(19): siRNA sense strand
cuacugugccuaugggaga

SEQ ID NO: 2581860 - RNA, 19 nt, Homo sapiens
  misc_RNA (1)...(19): siRNA sense strand
acgaaagugaucugccuua

SEQ ID NO: 2581861 - RNA, 19 nt, Homo sapiens
  misc_RNA (1)...(19): siRNA sense strand
gcagaugaauggaacagca

SEQ ID NO: 2581862 - RNA, 19 nt, Homo sapiens
  misc_RNA (1)...(19): siRNA sense strand
ugaagagagaaaaggcaaa

SEQ ID NO: 2581863 - RNA, 19 nt, Homo sapiens
  misc_RNA (1)...(19): siRNA sense strand
gguacauaguaauaaacca

SEQ ID NO: 2581864 - RNA, 19 nt, Homo sapiens
  misc_RNA (1)...(19): siRNA sense strand
caauaagcccaaagaugga

SEQ ID NO: 2581865 - RNA, 19 nt, Homo sapiens
  misc_RNA (1)...(19): siRNA sense strand
ccugcaagauauccagcua

SEQ ID NO: 2581866 - RNA, 19 nt, Homo sapiens
  misc_RNA (1)...(19): siRNA sense strand
ggucuuggagugagaaaau

SEQ ID NO: 2581867 - RNA, 19 nt, Homo sapiens
  misc_RNA (1)...(19): siRNA sense strand
acacguuacagcagaugaa

SEQ ID NO: 2581868 - RNA, 19 nt, Homo sapiens
  misc_RNA (1)...(19): siRNA sense strand
agugauuguagcagcuuua

SEQ ID NO: 2581869 - RNA, 19 nt, Homo sapiens
  misc_RNA (1)...(19): siRNA sense strand
cugugauuguggaaaauaa

SEQ ID NO: 2581870 - RNA, 19 nt, Homo sapiens
  misc_RNA (1)...(19): siRNA sense strand
cguccauaucacugguauu

SEQ ID NO: 2581871 - RNA, 19 nt, Homo sapiens
  misc_RNA (1)...(19): siRNA sense strand
aaacacagacaguaggcuu

SEQ ID NO: 2581872 - RNA, 19 nt, Homo sapiens
  misc_RNA (1)...(19): siRNA sense strand
agucaacacagaagaaaau

SEQ ID NO: 2581873 - RNA, 19 nt, Homo sapiens
  misc_RNA (1)...(19): siRNA sense strand
gaaaaggcaaagauggauu

SEQ ID NO: 2581874 - RNA, 19 nt, Homo sapiens
  misc_RNA (1)...(19): siRNA sense strand
ugccaauggaucuacgaaa

SEQ ID NO: 2581875 - RNA, 19 nt, Homo sapiens
  misc_RNA (1)...(19): siRNA sense strand
auguauuucccaaagcaaa

SEQ ID NO: 2581876 - RNA, 19 nt, Homo sapiens
  misc_RNA (1)...(19): siRNA sense strand
uaguaauaaaccagcccaa

SEQ ID NO: 2581877 - RNA, 19 nt, Homo sapiens
  misc_RNA (1)...(19): siRNA sense strand
guuuggucuuggagugaga

SEQ ID NO: 2581878 - RNA, 19 nt, Homo sapiens
  misc_RNA (1)...(19): siRNA sense strand
guguaugcuuguucuguau

SEQ ID NO: 2581879 - RNA, 19 nt, Homo sapiens
  misc_RNA (1)...(19): siRNA sense strand
ggaaacacuuaucucccaa

SEQ ID NO: 2581880 - RNA, 19 nt, Homo sapiens
  misc_RNA (1)...(19): siRNA sense strand
gcgaagaaguucaaagcga

SEQ ID NO: 2581881 - RNA, 19 nt, Homo sapiens
  misc_RNA (1)...(19): siRNA sense strand
cgaagaaguucaaagcgaa

SEQ ID NO: 2581882 - RNA, 19 nt, Homo sapiens
  misc_RNA (1)...(19): siRNA sense strand
gagaagaagaagaaagcca

SEQ ID NO: 2581883 - RNA, 19 nt, Homo sapiens
  misc_RNA (1)...(19): siRNA sense strand
agaagaagaagaaagccaa

SEQ ID NO: 2581884 - RNA, 19 nt, Homo sapiens
  misc_RNA (1)...(19): siRNA sense strand
aggaccagcugcagcgcaa

SEQ ID NO: 2581885 - RNA, 19 nt, Homo sapiens
  misc_RNA (1)...(19): siRNA sense strand
ggcuauuauuucagugaca

SEQ ID NO: 2581886 - RNA, 19 nt, Homo sapiens
  misc_RNA (1)...(19): siRNA sense strand
augcauugucucagaaaga

SEQ ID NO: 2581887 - RNA, 19 nt, Homo sapiens
  misc_RNA (1)...(19): siRNA sense strand
acauuaaaccagagcagca

SEQ ID NO: 2581888 - RNA, 19 nt, Homo sapiens
  misc_RNA (1)...(19): siRNA sense strand
cgcaaggagaagaagaaga

SEQ ID NO: 2581889 - RNA, 19 nt, Homo sapiens
  misc_RNA (1)...(19): siRNA sense strand
ccagagcagcagagauaca

SEQ ID NO: 2581890 - RNA, 19 nt, Homo sapiens
  misc_RNA (1)...(19): siRNA sense strand
gaagaaagccaaaggccuc

SEQ ID NO: 2581891 - RNA, 19 nt, Homo sapiens
  misc_RNA (1)...(19): siRNA sense strand
cacagaugauucaggccaa

SEQ ID NO: 2581892 - RNA, 19 nt, Homo sapiens
  misc_RNA (1)...(19): siRNA sense strand
ucuuaaaggcagaucuuca

SEQ ID NO: 2581893 - RNA, 19 nt, Homo sapiens
  misc_RNA (1)...(19): siRNA sense strand
ggaaacaguacaucaggga

SEQ ID NO: 2581894 - RNA, 19 nt, Homo sapiens
  misc_RNA (1)...(19): siRNA sense strand
cagaaagaggcgaaugacu

SEQ ID NO: 2581895 - RNA, 19 nt, Homo sapiens
  misc_RNA (1)...(19): siRNA sense strand
cggugguccuggaguacuu

SEQ ID NO: 2581896 - RNA, 19 nt, Homo sapiens
  misc_RNA (1)...(19): siRNA sense strand
agcgcaaggagaagaagaa

SEQ ID NO: 2581897 - RNA, 19 nt, Homo sapiens
  misc_RNA (1)...(19): siRNA sense strand
cucagaaagaggcgaauga

SEQ ID NO: 2581898 - RNA, 19 nt, Homo sapiens
  misc_RNA (1)...(19): siRNA sense strand
uguggaaaccgauggcuuu

SEQ ID NO: 2581899 - RNA, 19 nt, Homo sapiens
  misc_RNA (1)...(19): siRNA sense strand
cguagaaggcagcgaagaa

SEQ ID NO: 2581900 - RNA, 19 nt, Homo sapiens
  misc_RNA (1)...(19): siRNA sense strand
ccuuauaacagaagacauu

SEQ ID NO: 2581901 - RNA, 19 nt, Homo sapiens
  misc_RNA (1)...(19): siRNA sense strand
ggauuuaacuucuggggaa

SEQ ID NO: 2581902 - RNA, 19 nt, Homo sapiens
  misc_RNA (1)...(19): siRNA sense strand
aagaagagucugaagaaaa

SEQ ID NO: 2581903 - RNA, 19 nt, Homo sapiens
  misc_RNA (1)...(19): siRNA sense strand
gugauaacuucaaaggaga

SEQ ID NO: 2581904 - RNA, 19 nt, Homo sapiens
  misc_RNA (1)...(19): siRNA sense strand
guuuagagccacauggauu

SEQ ID NO: 2581905 - RNA, 19 nt, Homo sapiens
  misc_RNA (1)...(19): siRNA sense strand
augaccaaauggagauaua

SEQ ID NO: 2581906 - RNA, 19 nt, Homo sapiens
  misc_RNA (1)...(19): siRNA sense strand
aggaaacaacuuuggauau

SEQ ID NO: 2581907 - RNA, 19 nt, Homo sapiens
  misc_RNA (1)...(19): siRNA sense strand
aggcauggcuggaaagaac

SEQ ID NO: 2581908 - RNA, 19 nt, Homo sapiens
  misc_RNA (1)...(19): siRNA sense strand
aggcagcgaagaagacaaa

SEQ ID NO: 2581909 - RNA, 19 nt, Homo sapiens
  misc_RNA (1)...(19): siRNA sense strand
augaaaggaacaugcuuaa

SEQ ID NO: 2581910 - RNA, 19 nt, Homo sapiens
  misc_RNA (1)...(19): siRNA sense strand
aagcaaauccucugggagu

SEQ ID NO: 2581911 - RNA, 19 nt, Homo sapiens
  misc_RNA (1)...(19): siRNA sense strand
uggaauuaguggaggcaug

SEQ ID NO: 2581912 - RNA, 19 nt, Homo sapiens
  misc_RNA (1)...(19): siRNA sense strand
gugauagguacaagguauu

SEQ ID NO: 2581913 - RNA, 19 nt, Homo sapiens
  misc_RNA (1)...(19): siRNA sense strand
aggcuaaagaagagucuga

SEQ ID NO: 2581914 - RNA, 19 nt, Homo sapiens
  misc_RNA (1)...(19): siRNA sense strand
ugucagagaugaaaggaac

SEQ ID NO: 2581915 - RNA, 19 nt, Homo sapiens
  misc_RNA (1)...(19): siRNA sense strand
cuuaaaucugagcaggaaa

SEQ ID NO: 2581916 - RNA, 19 nt, Homo sapiens
  misc_RNA (1)...(19): siRNA sense strand
ggaaaagacacuucuggaa

SEQ ID NO: 2581917 - RNA, 19 nt, Homo sapiens
  misc_RNA (1)...(19): siRNA sense strand
uggccaugucagagaugaa

SEQ ID NO: 2581918 - RNA, 19 nt, Homo sapiens
  misc_RNA (1)...(19): siRNA sense strand
gauuuaacuucuggggaaa

SEQ ID NO: 2581919 - RNA, 19 nt, Homo sapiens
  misc_RNA (1)...(19): siRNA sense strand
ugauaacuucaaaggagaa

SEQ ID NO: 2581920 - RNA, 19 nt, Homo sapiens
  misc_RNA (1)...(19): siRNA sense strand
aagaggaacagguggcuga

SEQ ID NO: 2581921 - RNA, 19 nt, Homo sapiens
  misc_RNA (1)...(19): siRNA sense strand
ggauucuguucgagagauc

SEQ ID NO: 2581922 - RNA, 19 nt, Homo sapiens
  misc_RNA (1)...(19): siRNA sense strand
agaggaauucauaaggauu

SEQ ID NO: 2581923 - RNA, 19 nt, Homo sapiens
  misc_RNA (1)...(19): siRNA sense strand
agaagaaaaugaacugcua

SEQ ID NO: 2581924 - RNA, 19 nt, Homo sapiens
  misc_RNA (1)...(19): siRNA sense strand
uguccuuauuugaugagaa

SEQ ID NO: 2581925 - RNA, 19 nt, Homo sapiens
  misc_RNA (1)...(19): siRNA sense strand
gugaauagagccagcaaag

SEQ ID NO: 2581926 - RNA, 19 nt, Homo sapiens
  misc_RNA (1)...(19): siRNA sense strand
cgaugacagccuuggacuu

SEQ ID NO: 2581927 - RNA, 19 nt, Homo sapiens
  misc_RNA (1)...(19): siRNA sense strand
ggugaaagacggcugucau

SEQ ID NO: 2581928 - RNA, 19 nt, Homo sapiens
  misc_RNA (1)...(19): siRNA sense strand
aagaggaauucauaaggau

SEQ ID NO: 2581929 - RNA, 19 nt, Homo sapiens
  misc_RNA (1)...(19): siRNA sense strand
ugaacaucuccuuaguaaa

SEQ ID NO: 2581930 - RNA, 19 nt, Homo sapiens
  misc_RNA (1)...(19): siRNA sense strand
ccaaauggagauauaacca

SEQ ID NO: 2581931 - RNA, 19 nt, Homo sapiens
  misc_RNA (1)...(19): siRNA sense strand
cgugauaacuucaaaggag

SEQ ID NO: 2581932 - RNA, 19 nt, Homo sapiens
  misc_RNA (1)...(19): siRNA sense strand
auacagagcacuucaggga

SEQ ID NO: 2581933 - RNA, 19 nt, Homo sapiens
  misc_RNA (1)...(19): siRNA sense strand
acuuaaaucugagcaggaa

SEQ ID NO: 2581934 - RNA, 19 nt, Homo sapiens
  misc_RNA (1)...(19): siRNA sense strand
gugccaaugcugugaggau

SEQ ID NO: 2581935 - RNA, 19 nt, Homo sapiens
  misc_RNA (1)...(19): siRNA sense strand
ccaucaaggguuuccgcaa

SEQ ID NO: 2581936 - RNA, 19 nt, Homo sapiens
  misc_RNA (1)...(19): siRNA sense strand
gcggagucuuccaggccau

SEQ ID NO: 2581937 - RNA, 19 nt, Homo sapiens
  misc_RNA (1)...(19): siRNA sense strand
agaucaagaacuagagaua

SEQ ID NO: 2581938 - RNA, 19 nt, Homo sapiens
  misc_RNA (1)...(19): siRNA sense strand
ugaaaagccuggagggaaa

SEQ ID NO: 2581939 - RNA, 19 nt, Homo sapiens
  misc_RNA (1)...(19): siRNA sense strand
ccauauaaccauagacaca

SEQ ID NO: 2581940 - RNA, 19 nt, Homo sapiens
  misc_RNA (1)...(19): siRNA sense strand
uagcagaccuagagggaga

SEQ ID NO: 2581941 - RNA, 19 nt, Homo sapiens
  misc_RNA (1)...(19): siRNA sense strand
gcggaaaauucaagaacaa

SEQ ID NO: 2581942 - RNA, 19 nt, Homo sapiens
  misc_RNA (1)...(19): siRNA sense strand
caucagacagagagacaaa

SEQ ID NO: 2581943 - RNA, 19 nt, Homo sapiens
  misc_RNA (1)...(19): siRNA sense strand
aggaagacccggagccuaa

SEQ ID NO: 2581944 - RNA, 19 nt, Homo sapiens
  misc_RNA (1)...(19): siRNA sense strand
aaucaaagaaggaagagaa

SEQ ID NO: 2581945 - RNA, 19 nt, Homo sapiens
  misc_RNA (1)...(19): siRNA sense strand
acgaaaugcuucuguguau

SEQ ID NO: 2581946 - RNA, 19 nt, Homo sapiens
  misc_RNA (1)...(19): siRNA sense strand
gggaagaaaagaaugaaaa

SEQ ID NO: 2581947 - RNA, 19 nt, Homo sapiens
  misc_RNA (1)...(19): siRNA sense strand
agugaugauucuucagaua

SEQ ID NO: 2581948 - RNA, 19 nt, Homo sapiens
  misc_RNA (1)...(19): siRNA sense strand
cgauccagaagcagggaaa

SEQ ID NO: 2581949 - RNA, 19 nt, Homo sapiens
  misc_RNA (1)...(19): siRNA sense strand
agaacaaaugcuaggaaaa

SEQ ID NO: 2581950 - RNA, 19 nt, Homo sapiens
  misc_RNA (1)...(19): siRNA sense strand
aggaaaagcuacugauaca

SEQ ID NO: 2581951 - RNA, 19 nt, Homo sapiens
  misc_RNA (1)...(19): siRNA sense strand
uaugaaaggcacagaucaa

SEQ ID NO: 2581952 - RNA, 19 nt, Homo sapiens
  misc_RNA (1)...(19): siRNA sense strand
accuagagauguugaaauu

SEQ ID NO: 2581953 - RNA, 19 nt, Homo sapiens
  misc_RNA (1)...(19): siRNA sense strand
ugaugaaacuccaggacca

SEQ ID NO: 2581954 - RNA, 19 nt, Homo sapiens
  misc_RNA (1)...(19): siRNA sense strand
gggaagaucaagaaguuca

SEQ ID NO: 2581955 - RNA, 19 nt, Homo sapiens
  misc_RNA (1)...(19): siRNA sense strand
agggaaaguagcagaccua

SEQ ID NO: 2581956 - RNA, 19 nt, Homo sapiens
  misc_RNA (1)...(19): siRNA sense strand
gcucauuauucuagacagu

SEQ ID NO: 2581957 - RNA, 19 nt, Homo sapiens
  misc_RNA (1)...(19): siRNA sense strand
ccaacaaaacuguagauaa

SEQ ID NO: 2581958 - RNA, 19 nt, Homo sapiens
  misc_RNA (1)...(19): siRNA sense strand
guaaaggaggauacagaau

SEQ ID NO: 2581959 - RNA, 19 nt, Homo sapiens
  misc_RNA (1)...(19): siRNA sense strand
aagaugacuucaaggagua

SEQ ID NO: 2581960 - RNA, 19 nt, Homo sapiens
  misc_RNA (1)...(19): siRNA sense strand
aguacuguuugaaggguua

SEQ ID NO: 2581961 - RNA, 19 nt, Homo sapiens
  misc_RNA (1)...(19): siRNA sense strand
ugacaauagugguccucaa

SEQ ID NO: 2581962 - RNA, 19 nt, Homo sapiens
  misc_RNA (1)...(19): siRNA sense strand
ccuagagggagaagagaca

SEQ ID NO: 2581963 - RNA, 19 nt, Homo sapiens
  misc_RNA (1)...(19): siRNA sense strand
ggaaaguagcagaccuaga

SEQ ID NO: 2581964 - RNA, 19 nt, Homo sapiens
  misc_RNA (1)...(19): siRNA sense strand
aaguaaaggaggauacaga

SEQ ID NO: 2581965 - RNA, 19 nt, Homo sapiens
  misc_RNA (1)...(19): siRNA sense strand
ggauauuaauguagccacu

SEQ ID NO: 2581966 - RNA, 19 nt, Homo sapiens
  misc_RNA (1)...(19): siRNA sense strand
ucagauacaaggaguacaa

SEQ ID NO: 2581967 - RNA, 19 nt, Homo sapiens
  misc_RNA (1)...(19): siRNA sense strand
gaaucaaaucaaagaagga

SEQ ID NO: 2581968 - RNA, 19 nt, Homo sapiens
  misc_RNA (1)...(19): siRNA sense strand
uagagggagaagagacaaa

SEQ ID NO: 2581969 - RNA, 19 nt, Homo sapiens
  misc_RNA (1)...(19): siRNA sense strand
guuugaaggguuaggcauu

SEQ ID NO: 2581970 - RNA, 19 nt, Homo sapiens
  misc_RNA (1)...(19): siRNA sense strand
guaagaggagacagaguau

SEQ ID NO: 2581971 - RNA, 19 nt, Homo sapiens
  misc_RNA (1)...(19): siRNA sense strand
agaaagaggggaagaucaa

SEQ ID NO: 2581972 - RNA, 19 nt, Homo sapiens
  misc_RNA (1)...(19): siRNA sense strand
agaucacggagcagaaaua

SEQ ID NO: 2581973 - RNA, 19 nt, Homo sapiens
  misc_RNA (1)...(19): siRNA sense strand
aaacaaagcugaaugccca

SEQ ID NO: 2581974 - RNA, 19 nt, Homo sapiens
  misc_RNA (1)...(19): siRNA sense strand
aucaaagaaggaagagaaa

SEQ ID NO: 2581975 - RNA, 19 nt, Homo sapiens
  misc_RNA (1)...(19): siRNA sense strand
auagaaagcaucaugggaa

SEQ ID NO: 2581976 - RNA, 19 nt, Homo sapiens
  misc_RNA (1)...(19): siRNA sense strand
ggauaguggaguacuguuu

SEQ ID NO: 2581977 - RNA, 19 nt, Homo sapiens
  misc_RNA (1)...(19): siRNA sense strand
cuaaguagugaaagcacaa

SEQ ID NO: 2581978 - RNA, 19 nt, Homo sapiens
  misc_RNA (1)...(19): siRNA sense strand
ggguuaggcauuucaacaa

SEQ ID NO: 2581979 - RNA, 19 nt, Homo sapiens
  misc_RNA (1)...(19): siRNA sense strand
aagaggagacagaguauau

SEQ ID NO: 2581980 - RNA, 19 nt, Homo sapiens
  misc_RNA (1)...(19): siRNA sense strand
cggcauccuccgagauaau

SEQ ID NO: 2581981 - RNA, 19 nt, Homo sapiens
  misc_RNA (1)...(19): siRNA sense strand
gugaacagaagaacaacaa

SEQ ID NO: 2581982 - RNA, 19 nt, Homo sapiens
  misc_RNA (1)...(19): siRNA sense strand
cgaccuaaauaaugacagu

SEQ ID NO: 2581983 - RNA, 19 nt, Homo sapiens
  misc_RNA (1)...(19): siRNA sense strand
aaccauagacacagaaaga

SEQ ID NO: 2581984 - RNA, 19 nt, Homo sapiens
  misc_RNA (1)...(19): siRNA sense strand
agacacagaaagaggggaa

SEQ ID NO: 2581985 - RNA, 19 nt, Homo sapiens
  misc_RNA (1)...(19): siRNA sense strand
agugaaagcacaagcagau

SEQ ID NO: 2581986 - RNA, 19 nt, Homo sapiens
  misc_RNA (1)...(19): siRNA sense strand
guacuaacgaaguggcuca

SEQ ID NO: 2581987 - RNA, 19 nt, Homo sapiens
  misc_RNA (1)...(19): siRNA sense strand
uuggaaaggaugaacaaau

SEQ ID NO: 2581988 - RNA, 19 nt, Homo sapiens
  misc_RNA (1)...(19): siRNA sense strand
aagaaacaccauggagaua

SEQ ID NO: 2581989 - RNA, 19 nt, Homo sapiens
  misc_RNA (1)...(19): siRNA sense strand
cagaugaggcugagaccca

SEQ ID NO: 2581990 - RNA, 19 nt, Homo sapiens
  misc_RNA (1)...(19): siRNA sense strand
agaagaucacggagcagaa

SEQ ID NO: 2581991 - RNA, 19 nt, Homo sapiens
  misc_RNA (1)...(19): siRNA sense strand
agaucaagaaguucagauu

SEQ ID NO: 2581992 - RNA, 19 nt, Homo sapiens
  misc_RNA (1)...(19): siRNA sense strand
uuauggaagcagauacaaa

SEQ ID NO: 2581993 - RNA, 19 nt, Homo sapiens
  misc_RNA (1)...(19): siRNA sense strand
cauaagaagaagcauaaga

SEQ ID NO: 2581994 - RNA, 19 nt, Homo sapiens
  misc_RNA (1)...(19): siRNA sense strand
gaacagaagaacaacaacu

SEQ ID NO: 2581995 - RNA, 19 nt, Homo sapiens
  misc_RNA (1)...(19): siRNA sense strand
cagugaagacacaagaaca

SEQ ID NO: 2581996 - RNA, 19 nt, Homo sapiens
  misc_RNA (1)...(19): siRNA sense strand
ucaaaucaaagaaggaaga

SEQ ID NO: 2581997 - RNA, 19 nt, Homo sapiens
  misc_RNA (1)...(19): siRNA sense strand
gggcaugaucagaagaauc

SEQ ID NO: 2581998 - RNA, 19 nt, Homo sapiens
  misc_RNA (1)...(19): siRNA sense strand
aguaaacgauccagaagca

SEQ ID NO: 2581999 - RNA, 19 nt, Homo sapiens
  misc_RNA (1)...(19): siRNA sense strand
cagaaauagagaucguuau

SEQ ID NO: 2582000 - RNA, 19 nt, Homo sapiens
  misc_RNA (1)...(19): siRNA sense strand
uguccuauaugcuuggaua

SEQ ID NO: 2582001 - RNA, 19 nt, Homo sapiens
  misc_RNA (1)...(19): siRNA sense strand
uguugaaauuccucaguuu

SEQ ID NO: 2582002 - RNA, 19 nt, Homo sapiens
  misc_RNA (1)...(19): siRNA sense strand
gagaaaauggagacaguga

SEQ ID NO: 2582003 - RNA, 19 nt, Homo sapiens
  misc_RNA (1)...(19): siRNA sense strand
aucaagaaguucagauuca

SEQ ID NO: 2582004 - RNA, 19 nt, Homo sapiens
  misc_RNA (1)...(19): siRNA sense strand
agagauagcaguuggucca

SEQ ID NO: 2582005 - RNA, 19 nt, Homo sapiens
  misc_RNA (1)...(19): siRNA sense strand
agcaguugguccagaagaa

SEQ ID NO: 2582006 - RNA, 19 nt, Homo sapiens
  misc_RNA (1)...(19): siRNA sense strand
auaagaaacaccauggaga

SEQ ID NO: 2582007 - RNA, 19 nt, Homo sapiens
  misc_RNA (1)...(19): siRNA sense strand
aaaccaaugacgaccuaaa

SEQ ID NO: 2582008 - RNA, 19 nt, Homo sapiens
  misc_RNA (1)...(19): siRNA sense strand
aagcagagggugaggguga

SEQ ID NO: 2582009 - RNA, 19 nt, Homo sapiens
  misc_RNA (1)...(19): siRNA sense strand
cuguuaagcccaagaccaa

SEQ ID NO: 2582010 - RNA, 19 nt, Homo sapiens
  misc_RNA (1)...(19): siRNA sense strand
cccagaaagacaaggagaa

SEQ ID NO: 2582011 - RNA, 19 nt, Homo sapiens
  misc_RNA (1)...(19): siRNA sense strand
gcccugagguggaggagau

SEQ ID NO: 2582012 - RNA, 19 nt, Homo sapiens
  misc_RNA (1)...(19): siRNA sense strand
gagacaugggugugggaca

SEQ ID NO: 2582013 - RNA, 19 nt, Homo sapiens
  misc_RNA (1)...(19): siRNA sense strand
aagguuaagcagaggguga

SEQ ID NO: 2582014 - RNA, 19 nt, Homo sapiens
  misc_RNA (1)...(19): siRNA sense strand
gcaaagaugugguaaggac

SEQ ID NO: 2582015 - RNA, 19 nt, Homo sapiens
  misc_RNA (1)...(19): siRNA sense strand
gggugagggugaagacagu

SEQ ID NO: 2582016 - RNA, 19 nt, Homo sapiens
  misc_RNA (1)...(19): siRNA sense strand
agcccaagaccaagguuaa

SEQ ID NO: 2582017 - RNA, 19 nt, Homo sapiens
  misc_RNA (1)...(19): siRNA sense strand
gagcugugcaggagagcca

SEQ ID NO: 2582018 - RNA, 19 nt, Homo sapiens
  misc_RNA (1)...(19): siRNA sense strand
ccgaauccagguuggcaaa

SEQ ID NO: 2582019 - RNA, 19 nt, Homo sapiens
  misc_RNA (1)...(19): siRNA sense strand
aggagagccagaugaggaa

SEQ ID NO: 2582020 - RNA, 19 nt, Homo sapiens
  misc_RNA (1)...(19): siRNA sense strand
ugaaguacuuagagcagca

SEQ ID NO: 2582021 - RNA, 19 nt, Homo sapiens
  misc_RNA (1)...(19): siRNA sense strand
caggagagccagaugagga

SEQ ID NO: 2582022 - RNA, 19 nt, Homo sapiens
  misc_RNA (1)...(19): siRNA sense strand
ccaaacaagcacaagagga

SEQ ID NO: 2582023 - RNA, 19 nt, Homo sapiens
  misc_RNA (1)...(19): siRNA sense strand
agaugaagaccauggagca

SEQ ID NO: 2582024 - RNA, 19 nt, Homo sapiens
  misc_RNA (1)...(19): siRNA sense strand
caaagaugugguaaggaca

SEQ ID NO: 2582025 - RNA, 19 nt, Homo sapiens
  misc_RNA (1)...(19): siRNA sense strand
aaggaaaucaugagccuga

SEQ ID NO: 2582026 - RNA, 19 nt, Homo sapiens
  misc_RNA (1)...(19): siRNA sense strand
aagacaaggagaaacgaga

SEQ ID NO: 2582027 - RNA, 19 nt, Homo sapiens
  misc_RNA (1)...(19): siRNA sense strand
aggagaaacgagacagcca

SEQ ID NO: 2582028 - RNA, 19 nt, Homo sapiens
  misc_RNA (1)...(19): siRNA sense strand
agaccauggagcagauuga

SEQ ID NO: 2582029 - RNA, 19 nt, Homo sapiens
  misc_RNA (1)...(19): siRNA sense strand
caaacaagcacaagaggag

SEQ ID NO: 2582030 - RNA, 19 nt, Homo sapiens
  misc_RNA (1)...(19): siRNA sense strand
uggcugacaagcugaggaa

SEQ ID NO: 2582031 - RNA, 19 nt, Homo sapiens
  misc_RNA (1)...(19): siRNA sense strand
cagagugcugacaaggaaa

SEQ ID NO: 2582032 - RNA, 19 nt, Homo sapiens
  misc_RNA (1)...(19): siRNA sense strand
acaaggaaaucaugagccu

SEQ ID NO: 2582033 - RNA, 19 nt, Homo sapiens
  misc_RNA (1)...(19): siRNA sense strand
gcagcaaagaugugguaag

SEQ ID NO: 2582034 - RNA, 19 nt, Homo sapiens
  misc_RNA (1)...(19): siRNA sense strand
acuuagagcagcagcagga

SEQ ID NO: 2582035 - RNA, 19 nt, Homo sapiens
  misc_RNA (1)...(19): siRNA sense strand
gacaaggagaaacgagaca

SEQ ID NO: 2582036 - RNA, 19 nt, Homo sapiens
  misc_RNA (1)...(19): siRNA sense strand
uggaggagaugauccgaga

SEQ ID NO: 2582037 - RNA, 19 nt, Homo sapiens
  misc_RNA (1)...(19): siRNA sense strand
ggacaggcuucgaugggcu

SEQ ID NO: 2582038 - RNA, 19 nt, Homo sapiens
  misc_RNA (1)...(19): siRNA sense strand
gugucuacuuugagaagau

SEQ ID NO: 2582039 - RNA, 19 nt, Homo sapiens
  misc_RNA (1)...(19): siRNA sense strand
cggaagugcucaaaggucu

SEQ ID NO: 2582040 - RNA, 19 nt, Homo sapiens
  misc_RNA (1)...(19): siRNA sense strand
acaauauccucaagggcuu

SEQ ID NO: 2582041 - RNA, 19 nt, Homo sapiens
  misc_RNA (1)...(19): siRNA sense strand
gagaagauccucaaaggca

SEQ ID NO: 2582042 - RNA, 19 nt, Homo sapiens
  misc_RNA (1)...(19): siRNA sense strand
aggugcagccaaagccaua

SEQ ID NO: 2582043 - RNA, 19 nt, Homo sapiens
  misc_RNA (1)...(19): siRNA sense strand
gugccaaacaagagagaaa

SEQ ID NO: 2582044 - RNA, 19 nt, Homo sapiens
  misc_RNA (1)...(19): siRNA sense strand
ccaauaagaaauacagcaa

SEQ ID NO: 2582045 - RNA, 19 nt, Homo sapiens
  misc_RNA (1)...(19): siRNA sense strand
ggugaugggagccgagaaa

SEQ ID NO: 2582046 - RNA, 19 nt, Homo sapiens
  misc_RNA (1)...(19): siRNA sense strand
caucaggaaacaauggaaa

SEQ ID NO: 2582047 - RNA, 19 nt, Homo sapiens
  misc_RNA (1)...(19): siRNA sense strand
caugcaaguuauagcaauu

SEQ ID NO: 2582048 - RNA, 19 nt, Homo sapiens
  misc_RNA (1)...(19): siRNA sense strand
agucagaggaauagaaacu

SEQ ID NO: 2582049 - RNA, 19 nt, Homo sapiens
  misc_RNA (1)...(19): siRNA sense strand
ggaauagaaacuuuggaau

SEQ ID NO: 2582050 - RNA, 19 nt, Homo sapiens
  misc_RNA (1)...(19): siRNA sense strand
ugagaagagccuugaccaa

SEQ ID NO: 2582051 - RNA, 19 nt, Homo sapiens
  misc_RNA (1)...(19): siRNA sense strand
aaacaagagagaaaccaaa

SEQ ID NO: 2582052 - RNA, 19 nt, Homo sapiens
  misc_RNA (1)...(19): siRNA sense strand
caaacaagagagaaaccaa

SEQ ID NO: 2582053 - RNA, 19 nt, Homo sapiens
  misc_RNA (1)...(19): siRNA sense strand
cuacaauaucacaagagua

SEQ ID NO: 2582054 - RNA, 19 nt, Homo sapiens
  misc_RNA (1)...(19): siRNA sense strand
gacuuaagaagguggagaa

SEQ ID NO: 2582055 - RNA, 19 nt, Homo sapiens
  misc_RNA (1)...(19): siRNA sense strand
gguugugaaguuaagaaua

SEQ ID NO: 2582056 - RNA, 19 nt, Homo sapiens
  misc_RNA (1)...(19): siRNA sense strand
uggaaaucgaagaagaaga

SEQ ID NO: 2582057 - RNA, 19 nt, Homo sapiens
  misc_RNA (1)...(19): siRNA sense strand
gucugaaaccaauaagaaa

SEQ ID NO: 2582058 - RNA, 19 nt, Homo sapiens
  misc_RNA (1)...(19): siRNA sense strand
gggaaaagucaaucgaaca

SEQ ID NO: 2582059 - RNA, 19 nt, Homo sapiens
  misc_RNA (1)...(19): siRNA sense strand
uaacaaagggacugaaacu

SEQ ID NO: 2582060 - RNA, 19 nt, Homo sapiens
  misc_RNA (1)...(19): siRNA sense strand
cuugauugacguugacuua

SEQ ID NO: 2582061 - RNA, 19 nt, Homo sapiens
  misc_RNA (1)...(19): siRNA sense strand
aauggaaaucgaagaagaa

SEQ ID NO: 2582062 - RNA, 19 nt, Homo sapiens
  misc_RNA (1)...(19): siRNA sense strand
cuuaagaagguggagaaua

SEQ ID NO: 2582063 - RNA, 19 nt, Homo sapiens
  misc_RNA (1)...(19): siRNA sense strand
ccugaaauuccauggacau

SEQ ID NO: 2582064 - RNA, 19 nt, Homo sapiens
  misc_RNA (1)...(19): siRNA sense strand
acucggagacugaggacau

SEQ ID NO: 2582065 - RNA, 19 nt, Homo sapiens
  misc_RNA (1)...(19): siRNA sense strand
gccaggaaagcuaggaaau

SEQ ID NO: 2582066 - RNA, 19 nt, Homo sapiens
  misc_RNA (1)...(19): siRNA sense strand
cgaccagagauuagaaugu

SEQ ID NO: 2582067 - RNA, 19 nt, Homo sapiens
  misc_RNA (1)...(19): siRNA sense strand
ugucauauugugcgggauu

SEQ ID NO: 2582068 - RNA, 19 nt, Homo sapiens
  misc_RNA (1)...(19): siRNA sense strand
cuucagaauucaaguccuu

SEQ ID NO: 2582069 - RNA, 19 nt, Homo sapiens
  misc_RNA (1)...(19): siRNA sense strand
aaacaauggaaaucgaaga

SEQ ID NO: 2582070 - RNA, 19 nt, Homo sapiens
  misc_RNA (1)...(19): siRNA sense strand
aggaauagaaacuuuggaa

SEQ ID NO: 2582071 - RNA, 19 nt, Homo sapiens
  misc_RNA (1)...(19): siRNA sense strand
aagugaucuucuaggauuu

SEQ ID NO: 2582072 - RNA, 19 nt, Homo sapiens
  misc_RNA (1)...(19): siRNA sense strand
ucagcaaggaguagguuau

SEQ ID NO: 2582073 - RNA, 19 nt, Homo sapiens
  misc_RNA (1)...(19): siRNA sense strand
caacaggauuaaaagagua

SEQ ID NO: 2582074 - RNA, 19 nt, Homo sapiens
  misc_RNA (1)...(19): siRNA sense strand
aaaugagagagaugcuaua

SEQ ID NO: 2582075 - RNA, 19 nt, Homo sapiens
  misc_RNA (1)...(19): siRNA sense strand
caagugaagaagaugguga

SEQ ID NO: 2582076 - RNA, 19 nt, Homo sapiens
  misc_RNA (1)...(19): siRNA sense strand
caauaaucugggaggggaa

SEQ ID NO: 2582077 - RNA, 19 nt, Homo sapiens
  misc_RNA (1)...(19): siRNA sense strand
ggaaauaugaaauaccuca

SEQ ID NO: 2582078 - RNA, 19 nt, Homo sapiens
  misc_RNA (1)...(19): siRNA sense strand
acauaaagccagacuugau

SEQ ID NO: 2582079 - RNA, 19 nt, Homo sapiens
  misc_RNA (1)...(19): siRNA sense strand
ucuaacaaagggacugaaa

SEQ ID NO: 2582080 - RNA, 19 nt, Homo sapiens
  misc_RNA (1)...(19): siRNA sense strand
cagauuaaggguuugaaaa

SEQ ID NO: 2582081 - RNA, 19 nt, Homo sapiens
  misc_RNA (1)...(19): siRNA sense strand
acaaugucgaccagagauu

SEQ ID NO: 2582082 - RNA, 19 nt, Homo sapiens
  misc_RNA (1)...(19): siRNA sense strand
aagugaagaagauggugaa

SEQ ID NO: 2582083 - RNA, 19 nt, Homo sapiens
  misc_RNA (1)...(19): siRNA sense strand
auaacaagaccaucaggaa

SEQ ID NO: 2582084 - RNA, 19 nt, Homo sapiens
  misc_RNA (1)...(19): siRNA sense strand
agaagguggagaauauuaa

SEQ ID NO: 2582085 - RNA, 19 nt, Homo sapiens
  misc_RNA (1)...(19): siRNA sense strand
gugucuacucagauaacaa

SEQ ID NO: 2582086 - RNA, 19 nt, Homo sapiens
  misc_RNA (1)...(19): siRNA sense strand
gggagacuaucuuuggcaa

SEQ ID NO: 2582087 - RNA, 19 nt, Homo sapiens
  misc_RNA (1)...(19): siRNA sense strand
ucagauaacaagaccauca

SEQ ID NO: 2582088 - RNA, 19 nt, Homo sapiens
  misc_RNA (1)...(19): siRNA sense strand
aggaaacaauggaaaucga

SEQ ID NO: 2582089 - RNA, 19 nt, Homo sapiens
  misc_RNA (1)...(19): siRNA sense strand
gauuagaaugugccaaaca

SEQ ID NO: 2582090 - RNA, 19 nt, Homo sapiens
  misc_RNA (1)...(19): siRNA sense strand
gagcagggucaaugccuau

SEQ ID NO: 2582091 - RNA, 19 nt, Homo sapiens
  misc_RNA (1)...(19): siRNA sense strand
ggcagagagaacauauaaa

SEQ ID NO: 2582092 - RNA, 19 nt, Homo sapiens
  misc_RNA (1)...(19): siRNA sense strand
cagagagaacauauaaaca

SEQ ID NO: 2582093 - RNA, 19 nt, Homo sapiens
  misc_RNA (1)...(19): siRNA sense strand
gggugugagugguggcucu

SEQ ID NO: 2582094 - RNA, 19 nt, Homo sapiens
  misc_RNA (1)...(19): siRNA sense strand
gauaugucuguguuggaaa

SEQ ID NO: 2582095 - RNA, 19 nt, Homo sapiens
  misc_RNA (1)...(19): siRNA sense strand
caauaucacaagaguaguu

SEQ ID NO: 2582096 - RNA, 19 nt, Homo sapiens
  misc_RNA (1)...(19): siRNA sense strand
ugugaacauaagugaagua

SEQ ID NO: 2582097 - RNA, 19 nt, Homo sapiens
  misc_RNA (1)...(19): siRNA sense strand
cacuauuggauuagcauuu

SEQ ID NO: 2582098 - RNA, 19 nt, Homo sapiens
  misc_RNA (1)...(19): siRNA sense strand
ccauuucagcugaggagau

SEQ ID NO: 2582099 - RNA, 19 nt, Homo sapiens
  misc_RNA (1)...(19): siRNA sense strand
aagaagguggagaauauua

SEQ ID NO: 2582100 - RNA, 19 nt, Homo sapiens
  misc_RNA (1)...(19): siRNA sense strand
cagacuugauugacguuga

SEQ ID NO: 2582101 - RNA, 19 nt, Homo sapiens
  misc_RNA (1)...(19): siRNA sense strand
gaacggagccugaaagcca

SEQ ID NO: 2582102 - RNA, 19 nt, Homo sapiens
  misc_RNA (1)...(19): siRNA sense strand
gagauuauguacaacgaga

SEQ ID NO: 2582103 - RNA, 19 nt, Homo sapiens
  misc_RNA (1)...(19): siRNA sense strand
gaagauugauaaugugcga

SEQ ID NO: 2582104 - RNA, 19 nt, Homo sapiens
  misc_RNA (1)...(19): siRNA sense strand
agauugauaaugugcgauu

SEQ ID NO: 2582105 - RNA, 19 nt, Homo sapiens
  misc_RNA (1)...(19): siRNA sense strand
aaccagaggaugacggaga

SEQ ID NO: 2582106 - RNA, 19 nt, Homo sapiens
  misc_RNA (1)...(19): siRNA sense strand
cugaugagcaggacggcga

SEQ ID NO: 2582107 - RNA, 19 nt, Homo sapiens
  misc_RNA (1)...(19): siRNA sense strand
cccuagugcgggugaucaa

SEQ ID NO: 2582108 - RNA, 19 nt, Homo sapiens
  misc_RNA (1)...(19): siRNA sense strand
agauuauguacaacgagaa

SEQ ID NO: 2582109 - RNA, 19 nt, Homo sapiens
  misc_RNA (1)...(19): siRNA sense strand
gguaaauccugcaagccaa

SEQ ID NO: 2582110 - RNA, 19 nt, Homo sapiens
  misc_RNA (1)...(19): siRNA sense strand
agaaguacccguuggccaa

SEQ ID NO: 2582111 - RNA, 19 nt, Homo sapiens
  misc_RNA (1)...(19): siRNA sense strand
gggaaggagccaagcagga

SEQ ID NO: 2582112 - RNA, 19 nt, Homo sapiens
  misc_RNA (1)...(19): siRNA sense strand
aguuguugggauagaagaa

SEQ ID NO: 2582113 - RNA, 19 nt, Homo sapiens
  misc_RNA (1)...(19): siRNA sense strand
cuuuaugacgguuguguau

SEQ ID NO: 2582114 - RNA, 19 nt, Homo sapiens
  misc_RNA (1)...(19): siRNA sense strand
aagaacacacagucggcua

SEQ ID NO: 2582115 - RNA, 19 nt, Homo sapiens
  misc_RNA (1)...(19): siRNA sense strand
caaacaggcuccaaccaca

SEQ ID NO: 2582116 - RNA, 19 nt, Homo sapiens
  misc_RNA (1)...(19): siRNA sense strand
ucugaaagcugcaggcugu

SEQ ID NO: 2582117 - RNA, 19 nt, Homo sapiens
  misc_RNA (1)...(19): siRNA sense strand
ccauuuacauuucaggaca

SEQ ID NO: 2582118 - RNA, 19 nt, Homo sapiens
  misc_RNA (1)...(19): siRNA sense strand
acccaaaggcagccgaauu

SEQ ID NO: 2582119 - RNA, 19 nt, Homo sapiens
  misc_RNA (1)...(19): siRNA sense strand
aaauauaaguacugccgaa

SEQ ID NO: 2582120 - RNA, 19 nt, Homo sapiens
  misc_RNA (1)...(19): siRNA sense strand
cugagaaucuugucggaga

SEQ ID NO: 2582121 - RNA, 19 nt, Homo sapiens
  misc_RNA (1)...(19): siRNA sense strand
cuacaaagacccagagcac

SEQ ID NO: 2582122 - RNA, 19 nt, Homo sapiens
  misc_RNA (1)...(19): siRNA sense strand
acgaugaagaacaggauga

SEQ ID NO: 2582123 - RNA, 19 nt, Homo sapiens
  misc_RNA (1)...(19): siRNA sense strand
aagaacaggaugaugaaaa

SEQ ID NO: 2582124 - RNA, 19 nt, Homo sapiens
  misc_RNA (1)...(19): siRNA sense strand
ccacuuacuuggaugacca

SEQ ID NO: 2582125 - RNA, 19 nt, Homo sapiens
  misc_RNA (1)...(19): siRNA sense strand
ggaugagauacgaguacga

SEQ ID NO: 2582126 - RNA, 19 nt, Homo sapiens
  misc_RNA (1)...(19): siRNA sense strand
agagcaaagcugaacguga

SEQ ID NO: 2582127 - RNA, 19 nt, Homo sapiens
  misc_RNA (1)...(19): siRNA sense strand
gaaucuugucggagaagca

SEQ ID NO: 2582128 - RNA, 19 nt, Homo sapiens
  misc_RNA (1)...(19): siRNA sense strand
uggauaucaaugaguguau

SEQ ID NO: 2582129 - RNA, 19 nt, Homo sapiens
  misc_RNA (1)...(19): siRNA sense strand
uguacaacaggguaggcaa

SEQ ID NO: 2582130 - RNA, 19 nt, Homo sapiens
  misc_RNA (1)...(19): siRNA sense strand
uggaaaccgaggagccaau

SEQ ID NO: 2582131 - RNA, 19 nt, Homo sapiens
  misc_RNA (1)...(19): siRNA sense strand
ugaggcaggaggagcgcua

SEQ ID NO: 2582132 - RNA, 19 nt, Homo sapiens
  misc_RNA (1)...(19): siRNA sense strand
augaaaaguggcuggaaga

SEQ ID NO: 2582133 - RNA, 19 nt, Homo sapiens
  misc_RNA (1)...(19): siRNA sense strand
gggaaagaggugaggagaa

SEQ ID NO: 2582134 - RNA, 19 nt, Homo sapiens
  misc_RNA (1)...(19): siRNA sense strand
ccaucaagccggaaagaaa

SEQ ID NO: 2582135 - RNA, 19 nt, Homo sapiens
  misc_RNA (1)...(19): siRNA sense strand
ccuacaaagaagaaguaaa

SEQ ID NO: 2582136 - RNA, 19 nt, Homo sapiens
  misc_RNA (1)...(19): siRNA sense strand
uggaagaagcucagaaaca

SEQ ID NO: 2582137 - RNA, 19 nt, Homo sapiens
  misc_RNA (1)...(19): siRNA sense strand
cgucguacauauuuggaaa

SEQ ID NO: 2582138 - RNA, 19 nt, Homo sapiens
  misc_RNA (1)...(19): siRNA sense strand
ugggaaaccuggagcucua

SEQ ID NO: 2582139 - RNA, 19 nt, Homo sapiens
  misc_RNA (1)...(19): siRNA sense strand
auucgaagcaguaaagaaa

SEQ ID NO: 2582140 - RNA, 19 nt, Homo sapiens
  misc_RNA (1)...(19): siRNA sense strand
gugauaaggaugugauaca

SEQ ID NO: 2582141 - RNA, 19 nt, Homo sapiens
  misc_RNA (1)...(19): siRNA sense strand
ggaaagagacaucgaggga

SEQ ID NO: 2582142 - RNA, 19 nt, Homo sapiens
  misc_RNA (1)...(19): siRNA sense strand
ggaauuuaucagacagauu

SEQ ID NO: 2582143 - RNA, 19 nt, Homo sapiens
  misc_RNA (1)...(19): siRNA sense strand
uuaucuaacagcugggaaa

SEQ ID NO: 2582144 - RNA, 19 nt, Homo sapiens
  misc_RNA (1)...(19): siRNA sense strand
aaaugaaggauguguguau

SEQ ID NO: 2582145 - RNA, 19 nt, Homo sapiens
  misc_RNA (1)...(19): siRNA sense strand
uccaagaugugcaaggaaa

SEQ ID NO: 2582146 - RNA, 19 nt, Homo sapiens
  misc_RNA (1)...(19): siRNA sense strand
ggaggaagacccaaggaga

SEQ ID NO: 2582147 - RNA, 19 nt, Homo sapiens
  misc_RNA (1)...(19): siRNA sense strand
ggauguaaucacuugcaaa

SEQ ID NO: 2582148 - RNA, 19 nt, Homo sapiens
  misc_RNA (1)...(19): siRNA sense strand
gcacaaguucaaaguaaaa

SEQ ID NO: 2582149 - RNA, 19 nt, Homo sapiens
  misc_RNA (1)...(19): siRNA sense strand
gcuggaagaagcucagaaa

SEQ ID NO: 2582150 - RNA, 19 nt, Homo sapiens
  misc_RNA (1)...(19): siRNA sense strand
acucaaagugcauggugaa

SEQ ID NO: 2582151 - RNA, 19 nt, Homo sapiens
  misc_RNA (1)...(19): siRNA sense strand
uagaauugcuggaaagcga

SEQ ID NO: 2582152 - RNA, 19 nt, Homo sapiens
  misc_RNA (1)...(19): siRNA sense strand
gauaauucgaagcaguaaa

SEQ ID NO: 2582153 - RNA, 19 nt, Homo sapiens
  misc_RNA (1)...(19): siRNA sense strand
aguaucgacauuagggaaa

SEQ ID NO: 2582154 - RNA, 19 nt, Homo sapiens
  misc_RNA (1)...(19): siRNA sense strand
agcacaaguucaaaguaaa

SEQ ID NO: 2582155 - RNA, 19 nt, Homo sapiens
  misc_RNA (1)...(19): siRNA sense strand
cagauaauucgaagcagua

SEQ ID NO: 2582156 - RNA, 19 nt, Homo sapiens
  misc_RNA (1)...(19): siRNA sense strand
cgagaagacaucaggagga

SEQ ID NO: 2582157 - RNA, 19 nt, Homo sapiens
  misc_RNA (1)...(19): siRNA sense strand
auaaauuggaugugguuga

SEQ ID NO: 2582158 - RNA, 19 nt, Homo sapiens
  misc_RNA (1)...(19): siRNA sense strand
gaucagugguggucaaaau

SEQ ID NO: 2582159 - RNA, 19 nt, Homo sapiens
  misc_RNA (1)...(19): siRNA sense strand
uuagaaaacuggcuggaua

SEQ ID NO: 2582160 - RNA, 19 nt, Homo sapiens
  misc_RNA (1)...(19): siRNA sense strand
ccauugagccacagaaagu

SEQ ID NO: 2582161 - RNA, 19 nt, Homo sapiens
  misc_RNA (1)...(19): siRNA sense strand
cuggaucagugguggucaa

SEQ ID NO: 2582162 - RNA, 19 nt, Homo sapiens
  misc_RNA (1)...(19): siRNA sense strand
cuaagaaaguucgggucaa

SEQ ID NO: 2582163 - RNA, 19 nt, Homo sapiens
  misc_RNA (1)...(19): siRNA sense strand
aaagagacaucgagggaag

SEQ ID NO: 2582164 - RNA, 19 nt, Homo sapiens
  misc_RNA (1)...(19): siRNA sense strand
aagaaaugcaaguggaugu

SEQ ID NO: 2582165 - RNA, 19 nt, Homo sapiens
  misc_RNA (1)...(19): siRNA sense strand
ccaaggagaacaaggggaa

SEQ ID NO: 2582166 - RNA, 19 nt, Homo sapiens
  misc_RNA (1)...(19): siRNA sense strand
agaaagagaacgagggcug

SEQ ID NO: 2582167 - RNA, 19 nt, Homo sapiens
  misc_RNA (1)...(19): siRNA sense strand
gagaauucguguugcaaac

SEQ ID NO: 2582168 - RNA, 19 nt, Homo sapiens
  misc_RNA (1)...(19): siRNA sense strand
ggauaaauuggaugugguu

SEQ ID NO: 2582169 - RNA, 19 nt, Homo sapiens
  misc_RNA (1)...(19): siRNA sense strand
gcuuaaugaaauuggucuu

SEQ ID NO: 2582170 - RNA, 19 nt, Homo sapiens
  misc_RNA (1)...(19): siRNA sense strand
aagaaguggccuugacaga

SEQ ID NO: 2582171 - RNA, 19 nt, Homo sapiens
  misc_RNA (1)...(19): siRNA sense strand
cggaaagaaaugaaggaug

SEQ ID NO: 2582172 - RNA, 19 nt, Homo sapiens
  misc_RNA (1)...(19): siRNA sense strand
ucgcaaacagagucaacaa

SEQ ID NO: 2582173 - RNA, 19 nt, Homo sapiens
  misc_RNA (1)...(19): siRNA sense strand
uaaacuagaaagagaacga

SEQ ID NO: 2582174 - RNA, 19 nt, Homo sapiens
  misc_RNA (1)...(19): siRNA sense strand
ccagggacuugauggaaca

SEQ ID NO: 2582175 - RNA, 19 nt, Homo sapiens
  misc_RNA (1)...(19): siRNA sense strand
ggccaguuacuuaagguua

SEQ ID NO: 2582176 - RNA, 19 nt, Homo sapiens
  misc_RNA (1)...(19): siRNA sense strand
gccaguuacuuaagguuau

SEQ ID NO: 2582177 - RNA, 19 nt, Homo sapiens
  misc_RNA (1)...(19): siRNA sense strand
caucaagccggaaagaaau

SEQ ID NO: 2582178 - RNA, 19 nt, Homo sapiens
  misc_RNA (1)...(19): siRNA sense strand
gggaaaaugggcaauuaaa

SEQ ID NO: 2582179 - RNA, 19 nt, Homo sapiens
  misc_RNA (1)...(19): siRNA sense strand
acagagacgccaacgacaa

SEQ ID NO: 2582180 - RNA, 19 nt, Homo sapiens
  misc_RNA (1)...(19): siRNA sense strand
gaggagaauucguguugca

SEQ ID NO: 2582181 - RNA, 19 nt, Homo sapiens
  misc_RNA (1)...(19): siRNA sense strand
cauaaauccuguucggagu

SEQ ID NO: 2582182 - RNA, 19 nt, Homo sapiens
  misc_RNA (1)...(19): siRNA sense strand
ggguggaauccgaggugga

SEQ ID NO: 2582183 - RNA, 19 nt, Homo sapiens
  misc_RNA (1)...(19): siRNA sense strand
acgccaacgacaagaauga

SEQ ID NO: 2582184 - RNA, 19 nt, Homo sapiens
  misc_RNA (1)...(19): siRNA sense strand
cauucagagaacuuagaaa

SEQ ID NO: 2582185 - RNA, 19 nt, Homo sapiens
  misc_RNA (1)...(19): siRNA sense strand
cgacauuagggaaaagcaa

SEQ ID NO: 2582186 - RNA, 19 nt, Homo sapiens
  misc_RNA (1)...(19): siRNA sense strand
gcugagcugcagauggaua

SEQ ID NO: 2582187 - RNA, 19 nt, Homo sapiens
  misc_RNA (1)...(19): siRNA sense strand
guaguaacaugcagccgaa

SEQ ID NO: 2582188 - RNA, 19 nt, Homo sapiens
  misc_RNA (1)...(19): siRNA sense strand
gauauuucgucuggagcaa

SEQ ID NO: 2582189 - RNA, 19 nt, Homo sapiens
  misc_RNA (1)...(19): siRNA sense strand
ucagauaauucgaagcagu

SEQ ID NO: 2582190 - RNA, 19 nt, Homo sapiens
  misc_RNA (1)...(19): siRNA sense strand
cauuaaguccauugagcca

SEQ ID NO: 2582191 - RNA, 19 nt, Homo sapiens
  misc_RNA (1)...(19): siRNA sense strand
ccacagaaaguaucgacau

SEQ ID NO: 2582192 - RNA, 19 nt, Homo sapiens
  misc_RNA (1)...(19): siRNA sense strand
gauaguaacgggagcaaac

SEQ ID NO: 2582193 - RNA, 19 nt, Homo sapiens
  misc_RNA (1)...(19): siRNA sense strand
cuucagaaugagugagauc

SEQ ID NO: 2582194 - RNA, 19 nt, Homo sapiens
  misc_RNA (1)...(19): siRNA sense strand
guguacauucagagaacuu

SEQ ID NO: 2582195 - RNA, 19 nt, Homo sapiens
  misc_RNA (1)...(19): siRNA sense strand
cacagaacuggaagugaaa

SEQ ID NO: 2582196 - RNA, 19 nt, Homo sapiens
  misc_RNA (1)...(19): siRNA sense strand
gccaacgacaagaaugaaa

SEQ ID NO: 2582197 - RNA, 19 nt, Homo sapiens
  misc_RNA (1)...(19): siRNA sense strand
ucacagaccuugagcgcaa

SEQ ID NO: 2582198 - RNA, 19 nt, Homo sapiens
  misc_RNA (1)...(19): siRNA sense strand
ccacaaaagccgauggauu

SEQ ID NO: 2582199 - RNA, 19 nt, Homo sapiens
  misc_RNA (1)...(19): siRNA sense strand
gaaaggaauugcuggccaa

SEQ ID NO: 2582200 - RNA, 19 nt, Homo sapiens
  misc_RNA (1)...(19): siRNA sense strand
augcagaggccuugccaaa

SEQ ID NO: 2582201 - RNA, 19 nt, Homo sapiens
  misc_RNA (1)...(19): siRNA sense strand
gagaaauggcugaagagga

SEQ ID NO: 2582202 - RNA, 19 nt, Homo sapiens
  misc_RNA (1)...(19): siRNA sense strand
gggcugagggugaugaaau

SEQ ID NO: 2582203 - RNA, 19 nt, Homo sapiens
  misc_RNA (1)...(19): siRNA sense strand
ggugaugaaaugaagaaau

SEQ ID NO: 2582204 - RNA, 19 nt, Homo sapiens
  misc_RNA (1)...(19): siRNA sense strand
ccauaagaacaaggaguua

SEQ ID NO: 2582205 - RNA, 19 nt, Homo sapiens
  misc_RNA (1)...(19): siRNA sense strand
gagaggaaaaggaaggaaa

SEQ ID NO: 2582206 - RNA, 19 nt, Homo sapiens
  misc_RNA (1)...(19): siRNA sense strand
cagccgaggcagcgugaua

SEQ ID NO: 2582207 - RNA, 19 nt, Homo sapiens
  misc_RNA (1)...(19): siRNA sense strand
cugaagaggaagaacaaca

SEQ ID NO: 2582208 - RNA, 19 nt, Homo sapiens
  misc_RNA (1)...(19): siRNA sense strand
gaaaugaagaaauugggaa

SEQ ID NO: 2582209 - RNA, 19 nt, Homo sapiens
  misc_RNA (1)...(19): siRNA sense strand
aggauagaagagaggaaau

SEQ ID NO: 2582210 - RNA, 19 nt, Homo sapiens
  misc_RNA (1)...(19): siRNA sense strand
ugcagagacaguagagaaa

SEQ ID NO: 2582211 - RNA, 19 nt, Homo sapiens
  misc_RNA (1)...(19): siRNA sense strand
agaccaaagagauaagauu

SEQ ID NO: 2582212 - RNA, 19 nt, Homo sapiens
  misc_RNA (1)...(19): siRNA sense strand
augccauacuucagaacaa

SEQ ID NO: 2582213 - RNA, 19 nt, Homo sapiens
  misc_RNA (1)...(19): siRNA sense strand
acaacaaaucagaagauga

SEQ ID NO: 2582214 - RNA, 19 nt, Homo sapiens
  misc_RNA (1)...(19): siRNA sense strand
ggacacaggaggagacaac

SEQ ID NO: 2582215 - RNA, 19 nt, Homo sapiens
  misc_RNA (1)...(19): siRNA sense strand
acaggaagcaguuggaaga

SEQ ID NO: 2582216 - RNA, 19 nt, Homo sapiens
  misc_RNA (1)...(19): siRNA sense strand
uuacaaaauugacggcaaa

SEQ ID NO: 2582217 - RNA, 19 nt, Homo sapiens
  misc_RNA (1)...(19): siRNA sense strand
guuacaaaauugacggcaa

SEQ ID NO: 2582218 - RNA, 19 nt, Homo sapiens
  misc_RNA (1)...(19): siRNA sense strand
ggcugaagaggaagaacaa

SEQ ID NO: 2582219 - RNA, 19 nt, Homo sapiens
  misc_RNA (1)...(19): siRNA sense strand
ugggauaaaggaaggaaaa

SEQ ID NO: 2582220 - RNA, 19 nt, Homo sapiens
  misc_RNA (1)...(19): siRNA sense strand
acgcuuuaacagagaagua

SEQ ID NO: 2582221 - RNA, 19 nt, Homo sapiens
  misc_RNA (1)...(19): siRNA sense strand
agguggaccauaagaacaa

SEQ ID NO: 2582222 - RNA, 19 nt, Homo sapiens
  misc_RNA (1)...(19): siRNA sense strand
aaguguuagugcagagaca

SEQ ID NO: 2582223 - RNA, 19 nt, Homo sapiens
  misc_RNA (1)...(19): siRNA sense strand
cugggauaaaggaaggaaa

SEQ ID NO: 2582224 - RNA, 19 nt, Homo sapiens
  misc_RNA (1)...(19): siRNA sense strand
agaggaaaaggaaggaaaa

SEQ ID NO: 2582225 - RNA, 19 nt, Homo sapiens
  misc_RNA (1)...(19): siRNA sense strand
uagaagacauccuuggaga

SEQ ID NO: 2582226 - RNA, 19 nt, Homo sapiens
  misc_RNA (1)...(19): siRNA sense strand
uggcugaagaggaagaaca

SEQ ID NO: 2582227 - RNA, 19 nt, Homo sapiens
  misc_RNA (1)...(19): siRNA sense strand
caucauugccacagaccuu

SEQ ID NO: 2582228 - RNA, 19 nt, Homo sapiens
  misc_RNA (1)...(19): siRNA sense strand
caacaaaaucaguggcagu

SEQ ID NO: 2582229 - RNA, 19 nt, Homo sapiens
  misc_RNA (1)...(19): siRNA sense strand
caauaauagccuguguaua

SEQ ID NO: 2582230 - RNA, 19 nt, Homo sapiens
  misc_RNA (1)...(19): siRNA sense strand
gcuuuauacuuuggaaaca

SEQ ID NO: 2582231 - RNA, 19 nt, Homo sapiens
  misc_RNA (1)...(19): siRNA sense strand
agucagugggagaagguga

SEQ ID NO: 2582232 - RNA, 19 nt, Homo sapiens
  misc_RNA (1)...(19): siRNA sense strand
auacgaauaugcagggagu

SEQ ID NO: 2582233 - RNA, 19 nt, Homo sapiens
  misc_RNA (1)...(19): siRNA sense strand
ugauagguguggugcagau

SEQ ID NO: 2582234 - RNA, 19 nt, Homo sapiens
  misc_RNA (1)...(19): siRNA sense strand
ugaagaggaagaacaacaa

SEQ ID NO: 2582235 - RNA, 19 nt, Homo sapiens
  misc_RNA (1)...(19): siRNA sense strand
gcagguaugcagaggccuu

SEQ ID NO: 2582236 - RNA, 19 nt, Homo sapiens
  misc_RNA (1)...(19): siRNA sense strand
aauucugggcugaggguga

SEQ ID NO: 2582237 - RNA, 19 nt, Homo sapiens
  misc_RNA (1)...(19): siRNA sense strand
guggccaaguccaggaaaa

SEQ ID NO: 2582238 - RNA, 19 nt, Homo sapiens
  misc_RNA (1)...(19): siRNA sense strand
gguaccaagauacgaauau

SEQ ID NO: 2582239 - RNA, 19 nt, Homo sapiens
  misc_RNA (1)...(19): siRNA sense strand
guggcaaggucucaugcaa

SEQ ID NO: 2582240 - RNA, 19 nt, Homo sapiens
  misc_RNA (1)...(19): siRNA sense strand
aagagguacuggacuggaa

SEQ ID NO: 2582241 - RNA, 19 nt, Homo sapiens
  misc_RNA (1)...(19): siRNA sense strand
ugucugugaagaagaacua

SEQ ID NO: 2582242 - RNA, 19 nt, Homo sapiens
  misc_RNA (1)...(19): siRNA sense strand
gggugaugaaaugaagaaa

SEQ ID NO: 2582243 - RNA, 19 nt, Homo sapiens
  misc_RNA (1)...(19): siRNA sense strand
gaccauaagaacaaggagu

SEQ ID NO: 2582244 - RNA, 19 nt, Homo sapiens
  misc_RNA (1)...(19): siRNA sense strand
ggauagaagagaggaaauc

SEQ ID NO: 2582245 - RNA, 19 nt, Homo sapiens
  misc_RNA (1)...(19): siRNA sense strand
agaaaggaauugcuggcca

SEQ ID NO: 2582246 - RNA, 19 nt, Homo sapiens
  misc_RNA (1)...(19): siRNA sense strand
gcuuuaacagagaaguaga

SEQ ID NO: 2582247 - RNA, 19 nt, Homo sapiens
  misc_RNA (1)...(19): siRNA sense strand
gcacggaauaucagaauaa

SEQ ID NO: 2582248 - RNA, 19 nt, Homo sapiens
  misc_RNA (1)...(19): siRNA sense strand
uggaacaauuacaggacuu

SEQ ID NO: 2582249 - RNA, 19 nt, Homo sapiens
  misc_RNA (1)...(19): siRNA sense strand
cggacgaggccguguuaga

SEQ ID NO: 2582250 - RNA, 19 nt, Homo sapiens
  misc_RNA (1)...(19): siRNA sense strand
acugggaaguauaggcaga

SEQ ID NO: 2582251 - RNA, 19 nt, Homo sapiens
  misc_RNA (1)...(19): siRNA sense strand
acauacuagaggcaggaaa

SEQ ID NO: 2582252 - RNA, 19 nt, Homo sapiens
  misc_RNA (1)...(19): siRNA sense strand
uaaauuugacagagagcga

SEQ ID NO: 2582253 - RNA, 19 nt, Homo sapiens
  misc_RNA (1)...(19): siRNA sense strand
uagaaauccuacugggaag

SEQ ID NO: 2582254 - RNA, 19 nt, Homo sapiens
  misc_RNA (1)...(19): siRNA sense strand
cuagaaauccuacugggaa

SEQ ID NO: 2582255 - RNA, 19 nt, Homo sapiens
  misc_RNA (1)...(19): siRNA sense strand
cuuaaagaugcuucgaaaa

SEQ ID NO: 2582256 - RNA, 19 nt, Homo sapiens
  misc_RNA (1)...(19): siRNA sense strand
gcacuuaucuagaagacug

SEQ ID NO: 2582257 - RNA, 19 nt, Homo sapiens
  misc_RNA (1)...(19): siRNA sense strand
aggaagaagaggacccaaa

SEQ ID NO: 2582258 - RNA, 19 nt, Homo sapiens
  misc_RNA (1)...(19): siRNA sense strand
aacccaauucagagggaaa

SEQ ID NO: 2582259 - RNA, 19 nt, Homo sapiens
  misc_RNA (1)...(19): siRNA sense strand
acauagaggaagaagagga

SEQ ID NO: 2582260 - RNA, 19 nt, Homo sapiens
  misc_RNA (1)...(19): siRNA sense strand
gugacauagaggaagaaga

SEQ ID NO: 2582261 - RNA, 19 nt, Homo sapiens
  misc_RNA (1)...(19): siRNA sense strand
ccguauaaacuucagcaau

SEQ ID NO: 2582262 - RNA, 19 nt, Homo sapiens
  misc_RNA (1)...(19): siRNA sense strand
gagagaaguaugagcucca

SEQ ID NO: 2582263 - RNA, 19 nt, Homo sapiens
  misc_RNA (1)...(19): siRNA sense strand
aggauagagcuucaugaaa

SEQ ID NO: 2582264 - RNA, 19 nt, Homo sapiens
  misc_RNA (1)...(19): siRNA sense strand
aucaggagguuaaggaaaa

SEQ ID NO: 2582265 - RNA, 19 nt, Homo sapiens
  misc_RNA (1)...(19): siRNA sense strand
ugguggaugucgaggucuu

SEQ ID NO: 2582266 - RNA, 19 nt, Homo sapiens
  misc_RNA (1)...(19): siRNA sense strand
agacagauggagacaaacu

SEQ ID NO: 2582267 - RNA, 19 nt, Homo sapiens
  misc_RNA (1)...(19): siRNA sense strand
ggguggaggaggaggaaga

SEQ ID NO: 2582268 - RNA, 19 nt, Homo sapiens
  misc_RNA (1)...(19): siRNA sense strand
ucuuugaagccgagagaga

SEQ ID NO: 2582269 - RNA, 19 nt, Homo sapiens
  misc_RNA (1)...(19): siRNA sense strand
aggaagagaagcagaaacu

SEQ ID NO: 2582270 - RNA, 19 nt, Homo sapiens
  misc_RNA (1)...(19): siRNA sense strand
aggaggaagagaagcagaa

SEQ ID NO: 2582271 - RNA, 19 nt, Homo sapiens
  misc_RNA (1)...(19): siRNA sense strand
aggaggaggaagagaagca

SEQ ID NO: 2582272 - RNA, 19 nt, Homo sapiens
  misc_RNA (1)...(19): siRNA sense strand
agcaauacaaggaggcaau

SEQ ID NO: 2582273 - RNA, 19 nt, Homo sapiens
  misc_RNA (1)...(19): siRNA sense strand
ggacaagguguguggcauc

SEQ ID NO: 2582274 - RNA, 19 nt, Homo sapiens
  misc_RNA (1)...(19): siRNA sense strand
acgagaaagauauggaacu

SEQ ID NO: 2582275 - RNA, 19 nt, Homo sapiens
  misc_RNA (1)...(19): siRNA sense strand
cagcaauacaaggaggcaa

SEQ ID NO: 2582276 - RNA, 19 nt, Homo sapiens
  misc_RNA (1)...(19): siRNA sense strand
ugcgaaugggagagggcaa

SEQ ID NO: 2582277 - RNA, 19 nt, Homo sapiens
  misc_RNA (1)...(19): siRNA sense strand
aguucuggguggaggagga

SEQ ID NO: 2582278 - RNA, 19 nt, Homo sapiens
  misc_RNA (1)...(19): siRNA sense strand
uuguggagccugugcgaau

SEQ ID NO: 2582279 - RNA, 19 nt, Homo sapiens
  misc_RNA (1)...(19): siRNA sense strand
gagacugagaggaagcaga

SEQ ID NO: 2582280 - RNA, 19 nt, Homo sapiens
  misc_RNA (1)...(19): siRNA sense strand
cauuaugagcuggaagaau

SEQ ID NO: 2582281 - RNA, 19 nt, Homo sapiens
  misc_RNA (1)...(19): siRNA sense strand
gggccugcauugaagcaca

SEQ ID NO: 2582282 - RNA, 19 nt, Homo sapiens
  misc_RNA (1)...(19): siRNA sense strand
agaugagccuccugggcca

SEQ ID NO: 2582283 - RNA, 19 nt, Homo sapiens
  misc_RNA (1)...(19): siRNA sense strand
acaaacaagugcuggggua

SEQ ID NO: 2582284 - RNA, 19 nt, Homo sapiens
  misc_RNA (1)...(19): siRNA sense strand
agggacaggcaaagggaga

SEQ ID NO: 2582285 - RNA, 19 nt, Homo sapiens
  misc_RNA (1)...(19): siRNA sense strand
cuacauugccuucagguga

SEQ ID NO: 2582286 - RNA, 19 nt, Homo sapiens
  misc_RNA (1)...(19): siRNA sense strand
gagauuaaguccauggcaa

SEQ ID NO: 2582287 - RNA, 19 nt, Homo sapiens
  misc_RNA (1)...(19): siRNA sense strand
gggaauggauuguuggaga

SEQ ID NO: 2582288 - RNA, 19 nt, Homo sapiens
  misc_RNA (1)...(19): siRNA sense strand
gaucaaaaggagucggaaa

SEQ ID NO: 2582289 - RNA, 19 nt, Homo sapiens
  misc_RNA (1)...(19): siRNA sense strand
gagaaaugcaccagcgaca

SEQ ID NO: 2582290 - RNA, 19 nt, Homo sapiens
  misc_RNA (1)...(19): siRNA sense strand
uuggaaagucugaagguaa

SEQ ID NO: 2582291 - RNA, 19 nt, Homo sapiens
  misc_RNA (1)...(19): siRNA sense strand
ggauuguuggagagaguaa

SEQ ID NO: 2582292 - RNA, 19 nt, Homo sapiens
  misc_RNA (1)...(19): siRNA sense strand
ggaaacuggcagauagcaa

SEQ ID NO: 2582293 - RNA, 19 nt, Homo sapiens
  misc_RNA (1)...(19): siRNA sense strand
uggaauagacagaaugaau

SEQ ID NO: 2582294 - RNA, 19 nt, Homo sapiens
  misc_RNA (1)...(19): siRNA sense strand
gauuaugacaagccagaaa

SEQ ID NO: 2582295 - RNA, 19 nt, Homo sapiens
  misc_RNA (1)...(19): siRNA sense strand
ccaggaaauuugaggaacu

SEQ ID NO: 2582296 - RNA, 19 nt, Homo sapiens
  misc_RNA (1)...(19): siRNA sense strand
ccaacaaaguacacagcuu

SEQ ID NO: 2582297 - RNA, 19 nt, Homo sapiens
  misc_RNA (1)...(19): siRNA sense strand
gcuccuaaggcuuggaauu

SEQ ID NO: 2582298 - RNA, 19 nt, Homo sapiens
  misc_RNA (1)...(19): siRNA sense strand
acuaagaaguaugggagaa

SEQ ID NO: 2582299 - RNA, 19 nt, Homo sapiens
  misc_RNA (1)...(19): siRNA sense strand
aagaaguaugggagaacaa

SEQ ID NO: 2582300 - RNA, 19 nt, Homo sapiens
  misc_RNA (1)...(19): siRNA sense strand
cuacauuggaagaguauga

SEQ ID NO: 2582301 - RNA, 19 nt, Homo sapiens
  misc_RNA (1)...(19): siRNA sense strand
cuaaaugaagacugggaau

SEQ ID NO: 2582302 - RNA, 19 nt, Homo sapiens
  misc_RNA (1)...(19): siRNA sense strand
cgguaaaacuggcuaagua

SEQ ID NO: 2582303 - RNA, 19 nt, Homo sapiens
  misc_RNA (1)...(19): siRNA sense strand
cgaugauguugaaacuaua

SEQ ID NO: 2582304 - RNA, 19 nt, Homo sapiens
  misc_RNA (1)...(19): siRNA sense strand
caacaaauuaugagaccca

SEQ ID NO: 2582305 - RNA, 19 nt, Homo sapiens
  misc_RNA (1)...(19): siRNA sense strand
aaguaugggagaacaauaa

SEQ ID NO: 2582306 - RNA, 19 nt, Homo sapiens
  misc_RNA (1)...(19): siRNA sense strand
ucuuugaacuagugcauau

SEQ ID NO: 2582307 - RNA, 19 nt, Homo sapiens
  misc_RNA (1)...(19): siRNA sense strand
aguccuuccuauagaacaa

SEQ ID NO: 2582308 - RNA, 19 nt, Homo sapiens
  misc_RNA (1)...(19): siRNA sense strand
caguaucaauucagugcua

SEQ ID NO: 2582309 - RNA, 19 nt, Homo sapiens
  misc_RNA (1)...(19): siRNA sense strand
ugagcauacuggaagcaua

SEQ ID NO: 2582310 - RNA, 19 nt, Homo sapiens
  misc_RNA (1)...(19): siRNA sense strand
auaccaaagcgucaagaua

SEQ ID NO: 2582311 - RNA, 19 nt, Homo sapiens
  misc_RNA (1)...(19): siRNA sense strand
cuacuaugaagcagggauu

SEQ ID NO: 2582312 - RNA, 19 nt, Homo sapiens
  misc_RNA (1)...(19): siRNA sense strand
agaaaguggcaucgugcaa

SEQ ID NO: 2582313 - RNA, 19 nt, Homo sapiens
  misc_RNA (1)...(19): siRNA sense strand
uggcauucucuuugaacua

SEQ ID NO: 2582314 - RNA, 19 nt, Homo sapiens
  misc_RNA (1)...(19): siRNA sense strand
aagcauaagcagugaauug

SEQ ID NO: 2582315 - RNA, 19 nt, Homo sapiens
  misc_RNA (1)...(19): siRNA sense strand
auauauuggcccaguacaa

SEQ ID NO: 2582316 - RNA, 19 nt, Homo sapiens
  misc_RNA (1)...(19): siRNA sense strand
ggacagauuuggauggccu

SEQ ID NO: 2582317 - RNA, 19 nt, Homo sapiens
  misc_RNA (1)...(19): siRNA sense strand
caugguuggaguuggauua

SEQ ID NO: 2582318 - RNA, 19 nt, Homo sapiens
  misc_RNA (1)...(19): siRNA sense strand
acuucaacgcacagggaau

SEQ ID NO: 2582319 - RNA, 19 nt, Homo sapiens
  misc_RNA (1)...(19): siRNA sense strand
guaagaacccggaucaaaa

SEQ ID NO: 2582320 - RNA, 19 nt, Homo sapiens
  misc_RNA (1)...(19): siRNA sense strand
cuccagagcaaaucaaaua

SEQ ID NO: 2582321 - RNA, 19 nt, Homo sapiens
  misc_RNA (1)...(19): siRNA sense strand
ugacagaguacaacgccaa

SEQ ID NO: 2582322 - RNA, 19 nt, Homo sapiens
  misc_RNA (1)...(19): siRNA sense strand
ccagaagauacuuugagaa

SEQ ID NO: 2582323 - RNA, 19 nt, Homo sapiens
  misc_RNA (1)...(19): siRNA sense strand
cagucugaccagcgugaaa

SEQ ID NO: 2582324 - RNA, 19 nt, Homo sapiens
  misc_RNA (1)...(19): siRNA sense strand
aguuacauccacagaaauu

SEQ ID NO: 2582325 - RNA, 19 nt, Homo sapiens
  misc_RNA (1)...(19): siRNA sense strand
uugaacaaguuuacaguga

SEQ ID NO: 2582326 - RNA, 19 nt, Homo sapiens
  misc_RNA (1)...(19): siRNA sense strand
ccucaugguuggaguugga

SEQ ID NO: 2582327 - RNA, 19 nt, Homo sapiens
  misc_RNA (1)...(19): siRNA sense strand
uugaggaaacuaagaagua

SEQ ID NO: 2582328 - RNA, 19 nt, Homo sapiens
  misc_RNA (1)...(19): siRNA sense strand
ccugaaaagagaugcacaa

SEQ ID NO: 2582329 - RNA, 19 nt, Homo sapiens
  misc_RNA (1)...(19): siRNA sense strand
caagauacuucaacgcaca

SEQ ID NO: 2582330 - RNA, 19 nt, Homo sapiens
  misc_RNA (1)...(19): siRNA sense strand
auggauuguuggagagagu

SEQ ID NO: 2582331 - RNA, 19 nt, Homo sapiens
  misc_RNA (1)...(19): siRNA sense strand
ccuacuuacuaaaugaaga

SEQ ID NO: 2582332 - RNA, 19 nt, Homo sapiens
  misc_RNA (1)...(19): siRNA sense strand
gggugcagcaggaagaaaa

SEQ ID NO: 2582333 - RNA, 19 nt, Homo sapiens
  misc_RNA (1)...(19): siRNA sense strand
caccagcgacagaaggaaa

SEQ ID NO: 2582334 - RNA, 19 nt, Homo sapiens
  misc_RNA (1)...(19): siRNA sense strand
uaauaacguucuuaggaca

SEQ ID NO: 2582335 - RNA, 19 nt, Homo sapiens
  misc_RNA (1)...(19): siRNA sense strand
aauaauaagcauuggcauc

SEQ ID NO: 2582336 - RNA, 19 nt, Homo sapiens
  misc_RNA (1)...(19): siRNA sense strand
ugucguagcagguaucaaa

SEQ ID NO: 2582337 - RNA, 19 nt, Homo sapiens
  misc_RNA (1)...(19): siRNA sense strand
gggagaacaauaauaggau

SEQ ID NO: 2582338 - RNA, 19 nt, Homo sapiens
  misc_RNA (1)...(19): siRNA sense strand
augaaacuccagagcaaau

SEQ ID NO: 2582339 - RNA, 19 nt, Homo sapiens
  misc_RNA (1)...(19): siRNA sense strand
ugucguugcuguaacaaau

SEQ ID NO: 2582340 - RNA, 19 nt, Homo sapiens
  misc_RNA (1)...(19): siRNA sense strand
cuaccaaggacaaggcguu

SEQ ID NO: 2582341 - RNA, 19 nt, Homo sapiens
  misc_RNA (1)...(19): siRNA sense strand
ggaagcauaagcagugaau

SEQ ID NO: 2582342 - RNA, 19 nt, Homo sapiens
  misc_RNA (1)...(19): siRNA sense strand
aggaggaggcaaagggaga

SEQ ID NO: 2582343 - RNA, 19 nt, Homo sapiens
  misc_RNA (1)...(19): siRNA sense strand
cagaggauguagaagguca

SEQ ID NO: 2582344 - RNA, 19 nt, Homo sapiens
  misc_RNA (1)...(19): siRNA sense strand
gagaaaggggccugggcaa

SEQ ID NO: 2582345 - RNA, 19 nt, Homo sapiens
  misc_RNA (1)...(19): siRNA sense strand
guggaugugaugugggaau

SEQ ID NO: 2582346 - RNA, 19 nt, Homo sapiens
  misc_RNA (1)...(19): siRNA sense strand
augaggaggaugaggauga

SEQ ID NO: 2582347 - RNA, 19 nt, Homo sapiens
  misc_RNA (1)...(19): siRNA sense strand
ugggaauauaagugggaga

SEQ ID NO: 2582348 - RNA, 19 nt, Homo sapiens
  misc_RNA (1)...(19): siRNA sense strand
ugggagaugaggaggauga

SEQ ID NO: 2582349 - RNA, 19 nt, Homo sapiens
  misc_RNA (1)...(19): siRNA sense strand
ccuuuaaccugcaggagga

SEQ ID NO: 2582350 - RNA, 19 nt, Homo sapiens
  misc_RNA (1)...(19): siRNA sense strand
cggaggaggaggacagcuu

SEQ ID NO: 2582351 - RNA, 19 nt, Homo sapiens
  misc_RNA (1)...(19): siRNA sense strand
aggaggaugaggaugaaau

SEQ ID NO: 2582352 - RNA, 19 nt, Homo sapiens
  misc_RNA (1)...(19): siRNA sense strand
gagaugaggaggaugagga

SEQ ID NO: 2582353 - RNA, 19 nt, Homo sapiens
  misc_RNA (1)...(19): siRNA sense strand
gaggaggcaaagggagaaa

SEQ ID NO: 2582354 - RNA, 19 nt, Homo sapiens
  misc_RNA (1)...(19): siRNA sense strand
ccaagaagaagcuggugga

SEQ ID NO: 2582355 - RNA, 19 nt, Homo sapiens
  misc_RNA (1)...(19): siRNA sense strand
aggaguuggcggaggagga

SEQ ID NO: 2582356 - RNA, 19 nt, Homo sapiens
  misc_RNA (1)...(19): siRNA sense strand
guaccaggaaacaagggaa

SEQ ID NO: 2582357 - RNA, 19 nt, Homo sapiens
  misc_RNA (1)...(19): siRNA sense strand
cugaggaguuggcggagga

SEQ ID NO: 2582358 - RNA, 19 nt, Homo sapiens
  misc_RNA (1)...(19): siRNA sense strand
gcgugggagaugaggagga

SEQ ID NO: 2582359 - RNA, 19 nt, Homo sapiens
  misc_RNA (1)...(19): siRNA sense strand
acaagggaacgguuggcua

SEQ ID NO: 2582360 - RNA, 19 nt, Homo sapiens
  misc_RNA (1)...(19): siRNA sense strand
ggauaauguucguugcuca

SEQ ID NO: 2582361 - RNA, 19 nt, Homo sapiens
  misc_RNA (1)...(19): siRNA sense strand
gcguggaagugaagcacca

SEQ ID NO: 2582362 - RNA, 19 nt, Homo sapiens
  misc_RNA (1)...(19): siRNA sense strand
cagaagauacauuggcuca

SEQ ID NO: 2582363 - RNA, 19 nt, Homo sapiens
  misc_RNA (1)...(19): siRNA sense strand
gcaacugggcugugggaag

SEQ ID NO: 2582364 - RNA, 19 nt, Homo sapiens
  misc_RNA (1)...(19): siRNA sense strand
agucaguugcacaggaaca

SEQ ID NO: 2582365 - RNA, 19 nt, Homo sapiens
  misc_RNA (1)...(19): siRNA sense strand
ggggagaaaaggaggacca

SEQ ID NO: 2582366 - RNA, 19 nt, Homo sapiens
  misc_RNA (1)...(19): siRNA sense strand
cagaaaggccaguggggca

SEQ ID NO: 2582367 - RNA, 19 nt, Homo sapiens
  misc_RNA (1)...(19): siRNA sense strand
aagugaagcaccagaacca

SEQ ID NO: 2582368 - RNA, 19 nt, Homo sapiens
  misc_RNA (1)...(19): siRNA sense strand
uugcaagggacgcguggaa

SEQ ID NO: 2582369 - RNA, 19 nt, Homo sapiens
  misc_RNA (1)...(19): siRNA sense strand
acauuaaggacguggcugu

SEQ ID NO: 2582370 - RNA, 19 nt, Homo sapiens
  misc_RNA (1)...(19): siRNA sense strand
gugagaacccagagagcuc

SEQ ID NO: 2582371 - RNA, 19 nt, Homo sapiens
  misc_RNA (1)...(19): siRNA sense strand
ugguauaccgugugccaga

SEQ ID NO: 2582372 - RNA, 19 nt, Homo sapiens
  misc_RNA (1)...(19): siRNA sense strand
aggaagauguggcugucau

SEQ ID NO: 2582373 - RNA, 19 nt, Homo sapiens
  misc_RNA (1)...(19): siRNA sense strand
acuaguaggaggagacaac

SEQ ID NO: 2582374 - RNA, 19 nt, Homo sapiens
  misc_RNA (1)...(19): siRNA sense strand
ccugcaaccaugaugaaga

SEQ ID NO: 2582375 - RNA, 19 nt, Homo sapiens
  misc_RNA (1)...(19): siRNA sense strand
ccucagaaugugaaggauu

SEQ ID NO: 2582376 - RNA, 19 nt, Homo sapiens
  misc_RNA (1)...(19): siRNA sense strand
cgauauauacagagacagu

SEQ ID NO: 2582377 - RNA, 19 nt, Homo sapiens
  misc_RNA (1)...(19): siRNA sense strand
gaaaucagcaggaggacga

SEQ ID NO: 2582378 - RNA, 19 nt, Homo sapiens
  misc_RNA (1)...(19): siRNA sense strand
augaugaagcagaagaaau

SEQ ID NO: 2582379 - RNA, 19 nt, Homo sapiens
  misc_RNA (1)...(19): siRNA sense strand
ugaugaugaagcagaagaa

SEQ ID NO: 2582380 - RNA, 19 nt, Homo sapiens
  misc_RNA (1)...(19): siRNA sense strand
ccacuaaaguccaggaacc

SEQ ID NO: 2582381 - RNA, 19 nt, Homo sapiens
  misc_RNA (1)...(19): siRNA sense strand
agagaaaucagcaggagga

SEQ ID NO: 2582382 - RNA, 19 nt, Homo sapiens
  misc_RNA (1)...(19): siRNA sense strand
cuuuaauccauuuggugaa

SEQ ID NO: 2582383 - RNA, 19 nt, Homo sapiens
  misc_RNA (1)...(19): siRNA sense strand
gaugcguauuggauagcaa

SEQ ID NO: 2582384 - RNA, 19 nt, Homo sapiens
  misc_RNA (1)...(19): siRNA sense strand
cagaagaaauacagugguc

SEQ ID NO: 2582385 - RNA, 19 nt, Homo sapiens
  misc_RNA (1)...(19): siRNA sense strand
uguaaaacccucagcgaca

SEQ ID NO: 2582386 - RNA, 19 nt, Homo sapiens
  misc_RNA (1)...(19): siRNA sense strand
agaacaacuuaaacggcga

SEQ ID NO: 2582387 - RNA, 19 nt, Homo sapiens
  misc_RNA (1)...(19): siRNA sense strand
acacacaauacuaugauca

SEQ ID NO: 2582388 - RNA, 19 nt, Homo sapiens
  misc_RNA (1)...(19): siRNA sense strand
aacugauaucugagaacaa

SEQ ID NO: 2582389 - RNA, 19 nt, Homo sapiens
  misc_RNA (1)...(19): siRNA sense strand
guauagaauaugagcucgu

SEQ ID NO: 2582390 - RNA, 19 nt, Homo sapiens
  misc_RNA (1)...(19): siRNA sense strand
augaagacuuuguguucga

SEQ ID NO: 2582391 - RNA, 19 nt, Homo sapiens
  misc_RNA (1)...(19): siRNA sense strand
gggucugggcucuuggaaa

SEQ ID NO: 2582392 - RNA, 19 nt, Homo sapiens
  misc_RNA (1)...(19): siRNA sense strand
ugggaaauuaccuggaaau

SEQ ID NO: 2582393 - RNA, 19 nt, Homo sapiens
  misc_RNA (1)...(19): siRNA sense strand
caccaaugcugcugaggau

SEQ ID NO: 2582394 - RNA, 19 nt, Homo sapiens
  misc_RNA (1)...(19): siRNA sense strand
ccuggaaaugcgacugaaa

SEQ ID NO: 2582395 - RNA, 19 nt, Homo sapiens
  misc_RNA (1)...(19): siRNA sense strand
ccugagagaaguagggccu

SEQ ID NO: 2582396 - RNA, 19 nt, Homo sapiens
  misc_RNA (1)...(19): siRNA sense strand
uugggaaauuaccuggaaa

SEQ ID NO: 2582397 - RNA, 19 nt, Homo sapiens
  misc_RNA (1)...(19): siRNA sense strand
cggacaaccuggugcgagu

SEQ ID NO: 2582398 - RNA, 19 nt, Homo sapiens
  misc_RNA (1)...(19): siRNA sense strand
ugaccagggaugagaccaa

SEQ ID NO: 2582399 - RNA, 19 nt, Homo sapiens
  misc_RNA (1)...(19): siRNA sense strand
agauaaaaccaucaagcua

SEQ ID NO: 2582400 - RNA, 19 nt, Homo sapiens
  misc_RNA (1)...(19): siRNA sense strand
gggacaagcuggucaaggu

SEQ ID NO: 2582401 - RNA, 19 nt, Homo sapiens
  misc_RNA (1)...(19): siRNA sense strand
gcaaauacacuguccagga

SEQ ID NO: 2582402 - RNA, 19 nt, Homo sapiens
  misc_RNA (1)...(19): siRNA sense strand
ggacaagcuggucaaggua

SEQ ID NO: 2582403 - RNA, 19 nt, Homo sapiens
  misc_RNA (1)...(19): siRNA sense strand
gcaggugaccauuggcaca

SEQ ID NO: 2582404 - RNA, 19 nt, Homo sapiens
  misc_RNA (1)...(19): siRNA sense strand
auuuagagggaaagaucau

SEQ ID NO: 2582405 - RNA, 19 nt, Homo sapiens
  misc_RNA (1)...(19): siRNA sense strand
gaguguggcaggugaccau

SEQ ID NO: 2582406 - RNA, 19 nt, Homo sapiens
  misc_RNA (1)...(19): siRNA sense strand
cuuuaaagaccuuggguau

SEQ ID NO: 2582407 - RNA, 19 nt, Homo sapiens
  misc_RNA (1)...(19): siRNA sense strand
aagcagaggaagaggauga

SEQ ID NO: 2582408 - RNA, 19 nt, Homo sapiens
  misc_RNA (1)...(19): siRNA sense strand
gucuagagucguugagaaa

SEQ ID NO: 2582409 - RNA, 19 nt, Homo sapiens
  misc_RNA (1)...(19): siRNA sense strand
cccucaaaccaaagagaaa

SEQ ID NO: 2582410 - RNA, 19 nt, Homo sapiens
  misc_RNA (1)...(19): siRNA sense strand
uccuaaaggugcugagaau

SEQ ID NO: 2582411 - RNA, 19 nt, Homo sapiens
  misc_RNA (1)...(19): siRNA sense strand
uugcagacauugagcgaau

SEQ ID NO: 2582412 - RNA, 19 nt, Homo sapiens
  misc_RNA (1)...(19): siRNA sense strand
agaacuagaaugugaaaca

SEQ ID NO: 2582413 - RNA, 19 nt, Homo sapiens
  misc_RNA (1)...(19): siRNA sense strand
uggaaucauuagaagcaaa

SEQ ID NO: 2582414 - RNA, 19 nt, Homo sapiens
  misc_RNA (1)...(19): siRNA sense strand
cgucuagagucguugagaa

SEQ ID NO: 2582415 - RNA, 19 nt, Homo sapiens
  misc_RNA (1)...(19): siRNA sense strand
uguugggucuguagagaaa

SEQ ID NO: 2582416 - RNA, 19 nt, Homo sapiens
  misc_RNA (1)...(19): siRNA sense strand
gggagaagaaacugaagau

SEQ ID NO: 2582417 - RNA, 19 nt, Homo sapiens
  misc_RNA (1)...(19): siRNA sense strand
uuaaggaagcagaggaaga

SEQ ID NO: 2582418 - RNA, 19 nt, Homo sapiens
  misc_RNA (1)...(19): siRNA sense strand
caaugauaacagaaagcaa

SEQ ID NO: 2582419 - RNA, 19 nt, Homo sapiens
  misc_RNA (1)...(19): siRNA sense strand
aauuaaggaagcagaggaa

SEQ ID NO: 2582420 - RNA, 19 nt, Homo sapiens
  misc_RNA (1)...(19): siRNA sense strand
agaaacaucuugaggagca

SEQ ID NO: 2582421 - RNA, 19 nt, Homo sapiens
  misc_RNA (1)...(19): siRNA sense strand
gauuggaacaagaaagaga

SEQ ID NO: 2582422 - RNA, 19 nt, Homo sapiens
  misc_RNA (1)...(19): siRNA sense strand
aaguaugagaagaaagcua

SEQ ID NO: 2582423 - RNA, 19 nt, Homo sapiens
  misc_RNA (1)...(19): siRNA sense strand
cauacugccaugaaagaaa

SEQ ID NO: 2582424 - RNA, 19 nt, Homo sapiens
  misc_RNA (1)...(19): siRNA sense strand
ggaccuggaagcugaacaa

SEQ ID NO: 2582425 - RNA, 19 nt, Homo sapiens
  misc_RNA (1)...(19): siRNA sense strand
ggcaaagaagcgauugaaa

SEQ ID NO: 2582426 - RNA, 19 nt, Homo sapiens
  misc_RNA (1)...(19): siRNA sense strand
cugagaauuccaaagguua

SEQ ID NO: 2582427 - RNA, 19 nt, Homo sapiens
  misc_RNA (1)...(19): siRNA sense strand
aagcaagagaagugugaga

SEQ ID NO: 2582428 - RNA, 19 nt, Homo sapiens
  misc_RNA (1)...(19): siRNA sense strand
gagaauaugaagaaugcau

SEQ ID NO: 2582429 - RNA, 19 nt, Homo sapiens
  misc_RNA (1)...(19): siRNA sense strand
gaguauaaacaaaccgaca

SEQ ID NO: 2582430 - RNA, 19 nt, Homo sapiens
  misc_RNA (1)...(19): siRNA sense strand
ccaaggaccuggaagcuga

SEQ ID NO: 2582431 - RNA, 19 nt, Homo sapiens
  misc_RNA (1)...(19): siRNA sense strand
ccugaaugaaacugaagaa

SEQ ID NO: 2582432 - RNA, 19 nt, Homo sapiens
  misc_RNA (1)...(19): siRNA sense strand
cagaggaagaggaugaaaa

SEQ ID NO: 2582433 - RNA, 19 nt, Homo sapiens
  misc_RNA (1)...(19): siRNA sense strand
ucagaagaucucucggaaa

SEQ ID NO: 2582434 - RNA, 19 nt, Homo sapiens
  misc_RNA (1)...(19): siRNA sense strand
agaaaugaauugcagcaga

SEQ ID NO: 2582435 - RNA, 19 nt, Homo sapiens
  misc_RNA (1)...(19): siRNA sense strand
uugcaagauuggaacaaga

SEQ ID NO: 2582436 - RNA, 19 nt, Homo sapiens
  misc_RNA (1)...(19): siRNA sense strand
agacauugagcgaauaaau

SEQ ID NO: 2582437 - RNA, 19 nt, Homo sapiens
  misc_RNA (1)...(19): siRNA sense strand
agaaaaugguuaugcacau

SEQ ID NO: 2582438 - RNA, 19 nt, Homo sapiens
  misc_RNA (1)...(19): siRNA sense strand
gagcuugaguccuuggaga

SEQ ID NO: 2582439 - RNA, 19 nt, Homo sapiens
  misc_RNA (1)...(19): siRNA sense strand
agaaacugaagauggaauu

SEQ ID NO: 2582440 - RNA, 19 nt, Homo sapiens
  misc_RNA (1)...(19): siRNA sense strand
uguggaaugaggaguuaaa

SEQ ID NO: 2582441 - RNA, 19 nt, Homo sapiens
  misc_RNA (1)...(19): siRNA sense strand
cggaauagucaacuuggua

SEQ ID NO: 2582442 - RNA, 19 nt, Homo sapiens
  misc_RNA (1)...(19): siRNA sense strand
agagauaaguaugagaaga

SEQ ID NO: 2582443 - RNA, 19 nt, Homo sapiens
  misc_RNA (1)...(19): siRNA sense strand
gaaugaacagauugcaaga

SEQ ID NO: 2582444 - RNA, 19 nt, Homo sapiens
  misc_RNA (1)...(19): siRNA sense strand
gcaagauuggaacaagaaa

SEQ ID NO: 2582445 - RNA, 19 nt, Homo sapiens
  misc_RNA (1)...(19): siRNA sense strand
augaauugcagcagacuau

SEQ ID NO: 2582446 - RNA, 19 nt, Homo sapiens
  misc_RNA (1)...(19): siRNA sense strand
ggaaauaacuugcaacguc

SEQ ID NO: 2582447 - RNA, 19 nt, Homo sapiens
  misc_RNA (1)...(19): siRNA sense strand
gcaagagaagugugagaac

SEQ ID NO: 2582448 - RNA, 19 nt, Homo sapiens
  misc_RNA (1)...(19): siRNA sense strand
gcuagaaaguacuguuaac

SEQ ID NO: 2582449 - RNA, 19 nt, Homo sapiens
  misc_RNA (1)...(19): siRNA sense strand
guucaaaaguaucaggcau

SEQ ID NO: 2582450 - RNA, 19 nt, Homo sapiens
  misc_RNA (1)...(19): siRNA sense strand
cacaauuagcagaguauca

SEQ ID NO: 2582451 - RNA, 19 nt, Homo sapiens
  misc_RNA (1)...(19): siRNA sense strand
aagauuggaacaagaaaga

SEQ ID NO: 2582452 - RNA, 19 nt, Homo sapiens
  misc_RNA (1)...(19): siRNA sense strand
cuuacaaggagauguucaa

SEQ ID NO: 2582453 - RNA, 19 nt, Homo sapiens
  misc_RNA (1)...(19): siRNA sense strand
caggcauacaugagcaauu

SEQ ID NO: 2582454 - RNA, 19 nt, Homo sapiens
  misc_RNA (1)...(19): siRNA sense strand
ugagaauuccaaagguuau

SEQ ID NO: 2582455 - RNA, 19 nt, Homo sapiens
  misc_RNA (1)...(19): siRNA sense strand
ucacauuucuuuauggcuu

SEQ ID NO: 2582456 - RNA, 19 nt, Homo sapiens
  misc_RNA (1)...(19): siRNA sense strand
gugugagaacucugaaaga

SEQ ID NO: 2582457 - RNA, 19 nt, Homo sapiens
  misc_RNA (1)...(19): siRNA sense strand
gcuugaguccuuggagaaa

SEQ ID NO: 2582458 - RNA, 19 nt, Homo sapiens
  misc_RNA (1)...(19): siRNA sense strand
uuggaacaagaaagagaaa

SEQ ID NO: 2582459 - RNA, 19 nt, Homo sapiens
  misc_RNA (1)...(19): siRNA sense strand
cuacagaauaucauugaca

SEQ ID NO: 2582460 - RNA, 19 nt, Homo sapiens
  misc_RNA (1)...(19): siRNA sense strand
acagaaagcaagagaagug

SEQ ID NO: 2582461 - RNA, 19 nt, Homo sapiens
  misc_RNA (1)...(19): siRNA sense strand
gagaaauugaugagagaaa

SEQ ID NO: 2582462 - RNA, 19 nt, Homo sapiens
  misc_RNA (1)...(19): siRNA sense strand
ggauguaaugcgagaacaa

SEQ ID NO: 2582463 - RNA, 19 nt, Homo sapiens
  misc_RNA (1)...(19): siRNA sense strand
ccggaaagucagagaugua

SEQ ID NO: 2582464 - RNA, 19 nt, Homo sapiens
  misc_RNA (1)...(19): siRNA sense strand
aagagaaauugaugagaga

SEQ ID NO: 2582465 - RNA, 19 nt, Homo sapiens
  misc_RNA (1)...(19): siRNA sense strand
cuugaaggcuauuggguau

SEQ ID NO: 2582466 - RNA, 19 nt, Homo sapiens
  misc_RNA (1)...(19): siRNA sense strand
gauggagacaauugagaaa

SEQ ID NO: 2582467 - RNA, 19 nt, Homo sapiens
  misc_RNA (1)...(19): siRNA sense strand
gagagauacuccugggcau

SEQ ID NO: 2582468 - RNA, 19 nt, Homo sapiens
  misc_RNA (1)...(19): siRNA sense strand
aagaaauuaccgacaguua

SEQ ID NO: 2582469 - RNA, 19 nt, Homo sapiens
  misc_RNA (1)...(19): siRNA sense strand
acuaaagaagaacgagaaa

SEQ ID NO: 2582470 - RNA, 19 nt, Homo sapiens
  misc_RNA (1)...(19): siRNA sense strand
ucuuauggaugcagaauau

SEQ ID NO: 2582471 - RNA, 19 nt, Homo sapiens
  misc_RNA (1)...(19): siRNA sense strand
agagaguggaugaggauuu

SEQ ID NO: 2582472 - RNA, 19 nt, Homo sapiens
  misc_RNA (1)...(19): siRNA sense strand
caggcuuggcggugggaaa

SEQ ID NO: 2582473 - RNA, 19 nt, Homo sapiens
  misc_RNA (1)...(19): siRNA sense strand
ggaaagucagagauguaua

SEQ ID NO: 2582474 - RNA, 19 nt, Homo sapiens
  misc_RNA (1)...(19): siRNA sense strand
guacacagacagacggcua

SEQ ID NO: 2582475 - RNA, 19 nt, Homo sapiens
  misc_RNA (1)...(19): siRNA sense strand
gggcauacuccuuccuuaa

SEQ ID NO: 2582476 - RNA, 19 nt, Homo sapiens
  misc_RNA (1)...(19): siRNA sense strand
guuauuaugaccaggaaau

SEQ ID NO: 2582477 - RNA, 19 nt, Homo sapiens
  misc_RNA (1)...(19): siRNA sense strand
cccaaaacagagagagaua

SEQ ID NO: 2582478 - RNA, 19 nt, Homo sapiens
  misc_RNA (1)...(19): siRNA sense strand
gggaaagagaaauugauga

SEQ ID NO: 2582479 - RNA, 19 nt, Homo sapiens
  misc_RNA (1)...(19): siRNA sense strand
uuacuaugcuagaguggaa

SEQ ID NO: 2582480 - RNA, 19 nt, Homo sapiens
  misc_RNA (1)...(19): siRNA sense strand
aagccgaacaguacagaaa

SEQ ID NO: 2582481 - RNA, 19 nt, Homo sapiens
  misc_RNA (1)...(19): siRNA sense strand
agaaauuaggcaacagcua

SEQ ID NO: 2582482 - RNA, 19 nt, Homo sapiens
  misc_RNA (1)...(19): siRNA sense strand
cagaugguguagaagcaaa

SEQ ID NO: 2582483 - RNA, 19 nt, Homo sapiens
  misc_RNA (1)...(19): siRNA sense strand
gcaagagaguggaugagga

SEQ ID NO: 2582484 - RNA, 19 nt, Homo sapiens
  misc_RNA (1)...(19): siRNA sense strand
ucugaaagaugaagccgaa

SEQ ID NO: 2582485 - RNA, 19 nt, Homo sapiens
  misc_RNA (1)...(19): siRNA sense strand
uguucaaaauggaguguua

SEQ ID NO: 2582486 - RNA, 19 nt, Homo sapiens
  misc_RNA (1)...(19): siRNA sense strand
ugacuaaagaagaacgaga

SEQ ID NO: 2582487 - RNA, 19 nt, Homo sapiens
  misc_RNA (1)...(19): siRNA sense strand
uguacaaacuugaugacuu

SEQ ID NO: 2582488 - RNA, 19 nt, Homo sapiens
  misc_RNA (1)...(19): siRNA sense strand
uggaaggccuagagaucau

SEQ ID NO: 2582489 - RNA, 19 nt, Homo sapiens
  misc_RNA (1)...(19): siRNA sense strand
acgaagauauugaagcaca

SEQ ID NO: 2582490 - RNA, 19 nt, Homo sapiens
  misc_RNA (1)...(19): siRNA sense strand
uggcggugggaaagagaaa

SEQ ID NO: 2582491 - RNA, 19 nt, Homo sapiens
  misc_RNA (1)...(19): siRNA sense strand
ccucaaaguucaagaaagg

SEQ ID NO: 2582492 - RNA, 19 nt, Homo sapiens
  misc_RNA (1)...(19): siRNA sense strand
uggauuugguugugaagau

SEQ ID NO: 2582493 - RNA, 19 nt, Homo sapiens
  misc_RNA (1)...(19): siRNA sense strand
gagaguugcuauuggacca

SEQ ID NO: 2582494 - RNA, 19 nt, Homo sapiens
  misc_RNA (1)...(19): siRNA sense strand
aagcauaggcggaccauga

SEQ ID NO: 2582495 - RNA, 19 nt, Homo sapiens
  misc_RNA (1)...(19): siRNA sense strand
cuauguucccagaaggaua

SEQ ID NO: 2582496 - RNA, 19 nt, Homo sapiens
  misc_RNA (1)...(19): siRNA sense strand
cuacuguggaguuggcaaa

SEQ ID NO: 2582497 - RNA, 19 nt, Homo sapiens
  misc_RNA (1)...(19): siRNA sense strand
aaacaaaguaggugcagca

SEQ ID NO: 2582498 - RNA, 19 nt, Homo sapiens
  misc_RNA (1)...(19): siRNA sense strand
cagagauguauauuggaaa

SEQ ID NO: 2582499 - RNA, 19 nt, Homo sapiens
  misc_RNA (1)...(19): siRNA sense strand
agcacagauucgagaaauu

SEQ ID NO: 2582500 - RNA, 19 nt, Homo sapiens
  misc_RNA (1)...(19): siRNA sense strand
gcuauugauugaugaagau

SEQ ID NO: 2582501 - RNA, 19 nt, Homo sapiens
  misc_RNA (1)...(19): siRNA sense strand
ucuuaaaagcugugugcaa

SEQ ID NO: 2582502 - RNA, 19 nt, Homo sapiens
  misc_RNA (1)...(19): siRNA sense strand
aaauggugauggagacaau

SEQ ID NO: 2582503 - RNA, 19 nt, Homo sapiens
  misc_RNA (1)...(19): siRNA sense strand
caguaauguugaacggcuu

SEQ ID NO: 2582504 - RNA, 19 nt, Homo sapiens
  misc_RNA (1)...(19): siRNA sense strand
cuuaaagaacagacaugaa

SEQ ID NO: 2582505 - RNA, 19 nt, Homo sapiens
  misc_RNA (1)...(19): siRNA sense strand
acacacugguauuaagauu

SEQ ID NO: 2582506 - RNA, 19 nt, Homo sapiens
  misc_RNA (1)...(19): siRNA sense strand
gguuauuaugaccaggaaa

SEQ ID NO: 2582507 - RNA, 19 nt, Homo sapiens
  misc_RNA (1)...(19): siRNA sense strand
ggucagaagaagccaggau

SEQ ID NO: 2582508 - RNA, 19 nt, Homo sapiens
  misc_RNA (1)...(19): siRNA sense strand
gacuaaagaagaacgagaa

SEQ ID NO: 2582509 - RNA, 19 nt, Homo sapiens
  misc_RNA (1)...(19): siRNA sense strand
cuuaagaugggaugagaca

SEQ ID NO: 2582510 - RNA, 19 nt, Homo sapiens
  misc_RNA (1)...(19): siRNA sense strand
cugccuuaaugaaugaaua

SEQ ID NO: 2582511 - RNA, 19 nt, Homo sapiens
  misc_RNA (1)...(19): siRNA sense strand
agaacgagaaauuaggcaa

SEQ ID NO: 2582512 - RNA, 19 nt, Homo sapiens
  misc_RNA (1)...(19): siRNA sense strand
gcggugggaaagagaaauu

SEQ ID NO: 2582513 - RNA, 19 nt, Homo sapiens
  misc_RNA (1)...(19): siRNA sense strand
gaacagaguuuguaccacu

SEQ ID NO: 2582514 - RNA, 19 nt, Homo sapiens
  misc_RNA (1)...(19): siRNA sense strand
acuuaguccagaagagcaa

SEQ ID NO: 2582515 - RNA, 19 nt, Homo sapiens
  misc_RNA (1)...(19): siRNA sense strand
cgcuauugauugaugaaga

SEQ ID NO: 2582516 - RNA, 19 nt, Homo sapiens
  misc_RNA (1)...(19): siRNA sense strand
uggcuacacuucugaacaa

SEQ ID NO: 2582517 - RNA, 19 nt, Homo sapiens
  misc_RNA (1)...(19): siRNA sense strand
agaucgagguggagauucu

SEQ ID NO: 2582518 - RNA, 19 nt, Homo sapiens
  misc_RNA (1)...(19): siRNA sense strand
agauauugaagcacagauu

SEQ ID NO: 2582519 - RNA, 19 nt, Homo sapiens
  misc_RNA (1)...(19): siRNA sense strand
ugggacagaugguguagaa

SEQ ID NO: 2582520 - RNA, 19 nt, Homo sapiens
  misc_RNA (1)...(19): siRNA sense strand
cuacagaggacucaguaau

SEQ ID NO: 2582521 - RNA, 19 nt, Homo sapiens
  misc_RNA (1)...(19): siRNA sense strand
cagucaacacauuugguua

SEQ ID NO: 2582522 - RNA, 19 nt, Homo sapiens
  misc_RNA (1)...(19): siRNA sense strand
gcuuuggauagaagaaauu

SEQ ID NO: 2582523 - RNA, 19 nt, Homo sapiens
  misc_RNA (1)...(19): siRNA sense strand
uuuaauggauagagaccuu

SEQ ID NO: 2582524 - RNA, 19 nt, Homo sapiens
  misc_RNA (1)...(19): siRNA sense strand
gaagcacagauucgagaaa

SEQ ID NO: 2582525 - RNA, 19 nt, Homo sapiens
  misc_RNA (1)...(19): siRNA sense strand
cgaacuaugaaaaguguua

SEQ ID NO: 2582526 - RNA, 19 nt, Homo sapiens
  misc_RNA (1)...(19): siRNA sense strand
gcgucauuuacuugugaaa

SEQ ID NO: 2582527 - RNA, 19 nt, Homo sapiens
  misc_RNA (1)...(19): siRNA sense strand
uggaugaguauguccguaa

SEQ ID NO: 2582528 - RNA, 19 nt, Homo sapiens
  misc_RNA (1)...(19): siRNA sense strand
gaguauguccguaacacaa

SEQ ID NO: 2582529 - RNA, 19 nt, Homo sapiens
  misc_RNA (1)...(19): siRNA sense strand
ggcuuuggauagaagaaau

SEQ ID NO: 2582530 - RNA, 19 nt, Homo sapiens
  misc_RNA (1)...(19): siRNA sense strand
uguaugaguauuuggguga

SEQ ID NO: 2582531 - RNA, 19 nt, Homo sapiens
  misc_RNA (1)...(19): siRNA sense strand
gggcagcauucuuggagca

SEQ ID NO: 2582532 - RNA, 19 nt, Homo sapiens
  misc_RNA (1)...(19): siRNA sense strand
uggaaauagacaagaagaa

SEQ ID NO: 2582533 - RNA, 19 nt, Homo sapiens
  misc_RNA (1)...(19): siRNA sense strand
gggcaucacuguuggccua

SEQ ID NO: 2582534 - RNA, 19 nt, Homo sapiens
  misc_RNA (1)...(19): siRNA sense strand
gauaauaaccgcagcacga

SEQ ID NO: 2582535 - RNA, 19 nt, Homo sapiens
  misc_RNA (1)...(19): siRNA sense strand
gccaagaucaagagagcca

SEQ ID NO: 2582536 - RNA, 19 nt, Homo sapiens
  misc_RNA (1)...(19): siRNA sense strand
ucuuugggcuucugggcaa

SEQ ID NO: 2582537 - RNA, 19 nt, Homo sapiens
  misc_RNA (1)...(19): siRNA sense strand
cugaagaagaaguugcuga

SEQ ID NO: 2582538 - RNA, 19 nt, Homo sapiens
  misc_RNA (1)...(19): siRNA sense strand
ggaguuuaucuuugggcuu

SEQ ID NO: 2582539 - RNA, 19 nt, Homo sapiens
  misc_RNA (1)...(19): siRNA sense strand
cggcaugccaagaucaaga

SEQ ID NO: 2582540 - RNA, 19 nt, Homo sapiens
  misc_RNA (1)...(19): siRNA sense strand
cguucgugauggacuacua

SEQ ID NO: 2582541 - RNA, 19 nt, Homo sapiens
  misc_RNA (1)...(19): siRNA sense strand
ccagcgugguugugcggau

SEQ ID NO: 2582542 - RNA, 19 nt, Homo sapiens
  misc_RNA (1)...(19): siRNA sense strand
caacaaaaccagaggcgcu

SEQ ID NO: 2582543 - RNA, 19 nt, Homo sapiens
  misc_RNA (1)...(19): siRNA sense strand
aggaagaaggagaggaaua

SEQ ID NO: 2582544 - RNA, 19 nt, Homo sapiens
  misc_RNA (1)...(19): siRNA sense strand
ugaggaagaaggagaggaa

SEQ ID NO: 2582545 - RNA, 19 nt, Homo sapiens
  misc_RNA (1)...(19): siRNA sense strand
aaggagagggugaggaaga

SEQ ID NO: 2582546 - RNA, 19 nt, Homo sapiens
  misc_RNA (1)...(19): siRNA sense strand
cagcuguaguugagcccua

SEQ ID NO: 2582547 - RNA, 19 nt, Homo sapiens
  misc_RNA (1)...(19): siRNA sense strand
cuguugaaggagaggguga

SEQ ID NO: 2582548 - RNA, 19 nt, Homo sapiens
  misc_RNA (1)...(19): siRNA sense strand
cuucagggcuucuugguuu

SEQ ID NO: 2582549 - RNA, 19 nt, Homo sapiens
  misc_RNA (1)...(19): siRNA sense strand
gagcaacaccacagccauu

SEQ ID NO: 2582550 - RNA, 19 nt, Homo sapiens
  misc_RNA (1)...(19): siRNA sense strand
aagaaggagaggaauacua

SEQ ID NO: 2582551 - RNA, 19 nt, Homo sapiens
  misc_RNA (1)...(19): siRNA sense strand
aguugauuauggcaagaaa

SEQ ID NO: 2582552 - RNA, 19 nt, Homo sapiens
  misc_RNA (1)...(19): siRNA sense strand
gcaaggaagaugcugccaa

SEQ ID NO: 2582553 - RNA, 19 nt, Homo sapiens
  misc_RNA (1)...(19): siRNA sense strand
agaaggagaggaauacuaa

SEQ ID NO: 2582554 - RNA, 19 nt, Homo sapiens
  misc_RNA (1)...(19): siRNA sense strand
cugagaaagccuaccauga

SEQ ID NO: 2582555 - RNA, 19 nt, Homo sapiens
  misc_RNA (1)...(19): siRNA sense strand
agggugaggaagaaggaga

SEQ ID NO: 2582556 - RNA, 19 nt, Homo sapiens
  misc_RNA (1)...(19): siRNA sense strand
ugguagacaaugaggccau

SEQ ID NO: 2582557 - RNA, 19 nt, Homo sapiens
  misc_RNA (1)...(19): siRNA sense strand
aggagagggugaggaagaa

SEQ ID NO: 2582558 - RNA, 19 nt, Homo sapiens
  misc_RNA (1)...(19): siRNA sense strand
gugccuucaugguagacaa

SEQ ID NO: 2582559 - RNA, 19 nt, Homo sapiens
  misc_RNA (1)...(19): siRNA sense strand
gcuucaagguuggcaucaa

SEQ ID NO: 2582560 - RNA, 19 nt, Homo sapiens
  misc_RNA (1)...(19): siRNA sense strand
ugagaaagccuaccaugaa

SEQ ID NO: 2582561 - RNA, 19 nt, Homo sapiens
  misc_RNA (1)...(19): siRNA sense strand
ugucaguugauuauggcaa

SEQ ID NO: 2582562 - RNA, 19 nt, Homo sapiens
  misc_RNA (1)...(19): siRNA sense strand
ccgccuuauuagccagauu

SEQ ID NO: 2582563 - RNA, 19 nt, Homo sapiens
  misc_RNA (1)...(19): siRNA sense strand
auuugaaacugcagaugaa

SEQ ID NO: 2582564 - RNA, 19 nt, Homo sapiens
  misc_RNA (1)...(19): siRNA sense strand
cgguauugcuauaaggugu

SEQ ID NO: 2582565 - RNA, 19 nt, Homo sapiens
  misc_RNA (1)...(19): siRNA sense strand
aaucagaacccgagaucca

SEQ ID NO: 2582566 - RNA, 19 nt, Homo sapiens
  misc_RNA (1)...(19): siRNA sense strand
ucaacaagaucuucgguga

SEQ ID NO: 2582567 - RNA, 19 nt, Homo sapiens
  misc_RNA (1)...(19): siRNA sense strand
gcuacgaggaggagcacuu

SEQ ID NO: 2582568 - RNA, 19 nt, Homo sapiens
  misc_RNA (1)...(19): siRNA sense strand
gggccaaugugaaggugga

SEQ ID NO: 2582569 - RNA, 19 nt, Homo sapiens
  misc_RNA (1)...(19): siRNA sense strand
ggucagaguuggcgcugga

SEQ ID NO: 2582570 - RNA, 19 nt, Homo sapiens
  misc_RNA (1)...(19): siRNA sense strand
augugaagguggagugcga

SEQ ID NO: 2582571 - RNA, 19 nt, Homo sapiens
  misc_RNA (1)...(19): siRNA sense strand
ucuacaccauccagggaaa

SEQ ID NO: 2582572 - RNA, 19 nt, Homo sapiens
  misc_RNA (1)...(19): siRNA sense strand
cagacauggaaaugaauga

SEQ ID NO: 2582573 - RNA, 19 nt, Homo sapiens
  misc_RNA (1)...(19): siRNA sense strand
agaucaagcaagaggugga

SEQ ID NO: 2582574 - RNA, 19 nt, Homo sapiens
  misc_RNA (1)...(19): siRNA sense strand
agcaagagguggaggagcu

SEQ ID NO: 2582575 - RNA, 19 nt, Homo sapiens
  misc_RNA (1)...(19): siRNA sense strand
gugaacagcaagaggccca

SEQ ID NO: 2582576 - RNA, 19 nt, Homo sapiens
  misc_RNA (1)...(19): siRNA sense strand
ccuaugugugcaagaagaa

SEQ ID NO: 2582577 - RNA, 19 nt, Homo sapiens
  misc_RNA (1)...(19): siRNA sense strand
ggcugugggaggugaagaa

SEQ ID NO: 2582578 - RNA, 19 nt, Homo sapiens
  misc_RNA (1)...(19): siRNA sense strand
acaagaagugcguguacau

SEQ ID NO: 2582579 - RNA, 19 nt, Homo sapiens
  misc_RNA (1)...(19): siRNA sense strand
ccacccaggacuacggcaa

SEQ ID NO: 2582580 - RNA, 19 nt, Homo sapiens
  misc_RNA (1)...(19): siRNA sense strand
cccaacaacuuccgggaca

SEQ ID NO: 2582581 - RNA, 19 nt, Homo sapiens
  misc_RNA (1)...(19): siRNA sense strand
ugaaguggucagaggcaca

SEQ ID NO: 2582582 - RNA, 19 nt, Homo sapiens
  misc_RNA (1)...(19): siRNA sense strand
gcuauaagguguucagcuc

SEQ ID NO: 2582583 - RNA, 19 nt, Homo sapiens
  misc_RNA (1)...(19): siRNA sense strand
aggagcacuuuguggccaa

SEQ ID NO: 2582584 - RNA, 19 nt, Homo sapiens
  misc_RNA (1)...(19): siRNA sense strand
uccaggaggccgaguacaa

SEQ ID NO: 2582585 - RNA, 19 nt, Homo sapiens
  misc_RNA (1)...(19): siRNA sense strand
cggaggagacccauggcuu

SEQ ID NO: 2582586 - RNA, 19 nt, Homo sapiens
  misc_RNA (1)...(19): siRNA sense strand
aagaguaacgacugcgaga

SEQ ID NO: 2582587 - RNA, 19 nt, Homo sapiens
  misc_RNA (1)...(19): siRNA sense strand
ccgaggccacugagaagaa

SEQ ID NO: 2582588 - RNA, 19 nt, Homo sapiens
  misc_RNA (1)...(19): siRNA sense strand
ugcgagaccuucugggaca

SEQ ID NO: 2582589 - RNA, 19 nt, Homo sapiens
  misc_RNA (1)...(19): siRNA sense strand
aagaagaagcccaacgcca

SEQ ID NO: 2582590 - RNA, 19 nt, Homo sapiens
  misc_RNA (1)...(19): siRNA sense strand
acgggagccuugugagcuu

SEQ ID NO: 2582591 - RNA, 19 nt, Homo sapiens
  misc_RNA (1)...(19): siRNA sense strand
aguacaaguucuuugagca

SEQ ID NO: 2582592 - RNA, 19 nt, Homo sapiens
  misc_RNA (1)...(19): siRNA sense strand
cgacauuacuggaagagga

SEQ ID NO: 2582593 - RNA, 19 nt, Homo sapiens
  misc_RNA (1)...(19): siRNA sense strand
aagugaaggacaagggcua

SEQ ID NO: 2582594 - RNA, 19 nt, Homo sapiens
  misc_RNA (1)...(19): siRNA sense strand
cggccaaggacuacuacaa

SEQ ID NO: 2582595 - RNA, 19 nt, Homo sapiens
  misc_RNA (1)...(19): siRNA sense strand
ggaaggagccuguggcaac

SEQ ID NO: 2582596 - RNA, 19 nt, Homo sapiens
  misc_RNA (1)...(19): siRNA sense strand
uaugacagcuacugggaga

SEQ ID NO: 2582597 - RNA, 19 nt, Homo sapiens
  misc_RNA (1)...(19): siRNA sense strand
cauuacuggaagaggacau

SEQ ID NO: 2582598 - RNA, 19 nt, Homo sapiens
  misc_RNA (1)...(19): siRNA sense strand
ucagagagcucguggagac

SEQ ID NO: 2582599 - RNA, 19 nt, Homo sapiens
  misc_RNA (1)...(19): siRNA sense strand
gauacuaaauucaaggaug

SEQ ID NO: 2582600 - RNA, 19 nt, Homo sapiens
  misc_RNA (1)...(19): siRNA sense strand
cugcauacaagcucagaga

SEQ ID NO: 2582601 - RNA, 19 nt, Homo sapiens
  misc_RNA (1)...(19): siRNA sense strand
ccaugagagcaaaguggau

SEQ ID NO: 2582602 - RNA, 19 nt, Homo sapiens
  misc_RNA (1)...(19): siRNA sense strand
uggaagaaggaauucagaa

SEQ ID NO: 2582603 - RNA, 19 nt, Homo sapiens
  misc_RNA (1)...(19): siRNA sense strand
acauugugagcgagcgcaa

SEQ ID NO: 2582604 - RNA, 19 nt, Homo sapiens
  misc_RNA (1)...(19): siRNA sense strand
aggaugacuuauuucggaa

SEQ ID NO: 2582605 - RNA, 19 nt, Homo sapiens
  misc_RNA (1)...(19): siRNA sense strand
agucgacauuacuggaaga

SEQ ID NO: 2582606 - RNA, 19 nt, Homo sapiens
  misc_RNA (1)...(19): siRNA sense strand
cuaaauucaaggaugacuu

SEQ ID NO: 2582607 - RNA, 19 nt, Homo sapiens
  misc_RNA (1)...(19): siRNA sense strand
cggaaggagccuguggcaa

SEQ ID NO: 2582608 - RNA, 19 nt, Homo sapiens
  misc_RNA (1)...(19): siRNA sense strand
cagcugaacuacaagucca

SEQ ID NO: 2582609 - RNA, 19 nt, Homo sapiens
  misc_RNA (1)...(19): siRNA sense strand
ugucauaccuuggaggcaa

SEQ ID NO: 2582610 - RNA, 19 nt, Homo sapiens
  misc_RNA (1)...(19): siRNA sense strand
aguucuaagaucaaaggua

SEQ ID NO: 2582611 - RNA, 19 nt, Homo sapiens
  misc_RNA (1)...(19): siRNA sense strand
guucuaagaucaaagguag

SEQ ID NO: 2582612 - RNA, 19 nt, Homo sapiens
  misc_RNA (1)...(19): siRNA sense strand
ucucagacauuguucccaa

SEQ ID NO: 2582613 - RNA, 19 nt, Homo sapiens
  misc_RNA (1)...(19): siRNA sense strand
aguacaaguaugaggacaa

SEQ ID NO: 2582614 - RNA, 19 nt, Homo sapiens
  misc_RNA (1)...(19): siRNA sense strand
auaccugggcagagaugua

SEQ ID NO: 2582615 - RNA, 19 nt, Homo sapiens
  misc_RNA (1)...(19): siRNA sense strand
gggaaguggccgagaucug

SEQ ID NO: 2582616 - RNA, 19 nt, Homo sapiens
  misc_RNA (1)...(19): siRNA sense strand
ccacuguguaccagggcau

SEQ ID NO: 2582617 - RNA, 19 nt, Homo sapiens
  misc_RNA (1)...(19): siRNA sense strand
ccggcaaguacaaguauga

SEQ ID NO: 2582618 - RNA, 19 nt, Homo sapiens
  misc_RNA (1)...(19): siRNA sense strand
aaugauagaaugaagacca

SEQ ID NO: 2582619 - RNA, 19 nt, Homo sapiens
  misc_RNA (1)...(19): siRNA sense strand
gaggagaaauggugcgaga

SEQ ID NO: 2582620 - RNA, 19 nt, Homo sapiens
  misc_RNA (1)...(19): siRNA sense strand
gcggaguacaggagacaga

SEQ ID NO: 2582621 - RNA, 19 nt, Homo sapiens
  misc_RNA (1)...(19): siRNA sense strand
gcaucgagccccagagcaa

SEQ ID NO: 2582622 - RNA, 19 nt, Homo sapiens
  misc_RNA (1)...(19): siRNA sense strand
cggucaagagccuggucaa

SEQ ID NO: 2582623 - RNA, 19 nt, Homo sapiens
  misc_RNA (1)...(19): siRNA sense strand
ccugagugaagauggagaa

SEQ ID NO: 2582624 - RNA, 19 nt, Homo sapiens
  misc_RNA (1)...(19): siRNA sense strand
gagcaauauuccagagacc

SEQ ID NO: 2582625 - RNA, 19 nt, Homo sapiens
  misc_RNA (1)...(19): siRNA sense strand
gggccauggagcuguguga

SEQ ID NO: 2582626 - RNA, 19 nt, Homo sapiens
  misc_RNA (1)...(19): siRNA sense strand
ggugcgagaaggcggucaa

SEQ ID NO: 2582627 - RNA, 19 nt, Homo sapiens
  misc_RNA (1)...(19): siRNA sense strand
ccucagugacagcgcuauu

SEQ ID NO: 2582628 - RNA, 19 nt, Homo sapiens
  misc_RNA (1)...(19): siRNA sense strand
ccaacuguaaccagcgcua

SEQ ID NO: 2582629 - RNA, 19 nt, Homo sapiens
  misc_RNA (1)...(19): siRNA sense strand
uggcauacugggaggagaa

SEQ ID NO: 2582630 - RNA, 19 nt, Homo sapiens
  misc_RNA (1)...(19): siRNA sense strand
cagaaggugcggagcaaaa

SEQ ID NO: 2582631 - RNA, 19 nt, Homo sapiens
  misc_RNA (1)...(19): siRNA sense strand
gcugugaaucuuacgggaa

SEQ ID NO: 2582632 - RNA, 19 nt, Homo sapiens
  misc_RNA (1)...(19): siRNA sense strand
gugcagaaggugcggagca

SEQ ID NO: 2582633 - RNA, 19 nt, Homo sapiens
  misc_RNA (1)...(19): siRNA sense strand
cgugcuggcuagaggucau

SEQ ID NO: 2582634 - RNA, 19 nt, Homo sapiens
  misc_RNA (1)...(19): siRNA sense strand
aggcuguguugcugugaau

SEQ ID NO: 2582635 - RNA, 19 nt, Homo sapiens
  misc_RNA (1)...(19): siRNA sense strand
gaggagaagacgagagugg

SEQ ID NO: 2582636 - RNA, 19 nt, Homo sapiens
  misc_RNA (1)...(19): siRNA sense strand
cagagggagaggaggucaa

SEQ ID NO: 2582637 - RNA, 19 nt, Homo sapiens
  misc_RNA (1)...(19): siRNA sense strand
ugauucaggcagagggaga

SEQ ID NO: 2582638 - RNA, 19 nt, Homo sapiens
  misc_RNA (1)...(19): siRNA sense strand
caaaggagguuauuggcga

SEQ ID NO: 2582639 - RNA, 19 nt, Homo sapiens
  misc_RNA (1)...(19): siRNA sense strand
gagaggaggucaaggcuuc

SEQ ID NO: 2582640 - RNA, 19 nt, Homo sapiens
  misc_RNA (1)...(19): siRNA sense strand
aggcagagggagaggaggu

SEQ ID NO: 2582641 - RNA, 19 nt, Homo sapiens
  misc_RNA (1)...(19): siRNA sense strand
guucaaaggagcaggagag

SEQ ID NO: 2582642 - RNA, 19 nt, Homo sapiens
  misc_RNA (1)...(19): siRNA sense strand
aggaggugauucaggcaga

SEQ ID NO: 2582643 - RNA, 19 nt, Homo sapiens
  misc_RNA (1)...(19): siRNA sense strand
ggucuggauuggaggcaac

SEQ ID NO: 2582644 - RNA, 19 nt, Homo sapiens
  misc_RNA (1)...(19): siRNA sense strand
ucuggagagccuagagaca

SEQ ID NO: 2582645 - RNA, 19 nt, Homo sapiens
  misc_RNA (1)...(19): siRNA sense strand
ggagaggaggucaaggcuu

SEQ ID NO: 2582646 - RNA, 19 nt, Homo sapiens
  misc_RNA (1)...(19): siRNA sense strand
gcaaccugggaaugggcaa

SEQ ID NO: 2582647 - RNA, 19 nt, Homo sapiens
  misc_RNA (1)...(19): siRNA sense strand
gcgacaagcaacugcccuu

SEQ ID NO: 2582648 - RNA, 19 nt, Homo sapiens
  misc_RNA (1)...(19): siRNA sense strand
cgacgagcucaaugcgaca

SEQ ID NO: 2582649 - RNA, 19 nt, Homo sapiens
  misc_RNA (1)...(19): siRNA sense strand
agucaagaacugaggaaaa

SEQ ID NO: 2582650 - RNA, 19 nt, Homo sapiens
  misc_RNA (1)...(19): siRNA sense strand
guacagauacggaugcaca

SEQ ID NO: 2582651 - RNA, 19 nt, Homo sapiens
  misc_RNA (1)...(19): siRNA sense strand
gagucaagaacugaggaaa

SEQ ID NO: 2582652 - RNA, 19 nt, Homo sapiens
  misc_RNA (1)...(19): siRNA sense strand
ucaucagcuuguuggagaa

SEQ ID NO: 2582653 - RNA, 19 nt, Homo sapiens
  misc_RNA (1)...(19): siRNA sense strand
cugauaugcuggugagcgu

SEQ ID NO: 2582654 - RNA, 19 nt, Homo sapiens
  misc_RNA (1)...(19): siRNA sense strand
cagugagucccuuggaaaa

SEQ ID NO: 2582655 - RNA, 19 nt, Homo sapiens
  misc_RNA (1)...(19): siRNA sense strand
ccauauugugugugcuuca

SEQ ID NO: 2582656 - RNA, 19 nt, Homo sapiens
  misc_RNA (1)...(19): siRNA sense strand
caguuaagcggguugggau

SEQ ID NO: 2582657 - RNA, 19 nt, Homo sapiens
  misc_RNA (1)...(19): siRNA sense strand
ccuauuaaacaguacagau

SEQ ID NO: 2582658 - RNA, 19 nt, Homo sapiens
  misc_RNA (1)...(19): siRNA sense strand
ggacucacgucaagcggau

SEQ ID NO: 2582659 - RNA, 19 nt, Homo sapiens
  misc_RNA (1)...(19): siRNA sense strand
agccaagagaugcggaaga

SEQ ID NO: 2582660 - RNA, 19 nt, Homo sapiens
  misc_RNA (1)...(19): siRNA sense strand
gggaagaaauacaagguga

SEQ ID NO: 2582661 - RNA, 19 nt, Homo sapiens
  misc_RNA (1)...(19): siRNA sense strand
ccaaauacaaagaugggaa

SEQ ID NO: 2582662 - RNA, 19 nt, Homo sapiens
  misc_RNA (1)...(19): siRNA sense strand
gaguuagagacauggguaa

SEQ ID NO: 2582663 - RNA, 19 nt, Homo sapiens
  misc_RNA (1)...(19): siRNA sense strand
aggcagugguugaggaacu

SEQ ID NO: 2582664 - RNA, 19 nt, Homo sapiens
  misc_RNA (1)...(19): siRNA sense strand
cauccagggcagugacuaa

SEQ ID NO: 2582665 - RNA, 19 nt, Homo sapiens
  misc_RNA (1)...(19): siRNA sense strand
augaggaacuggagaagau

SEQ ID NO: 2582666 - RNA, 19 nt, Homo sapiens
  misc_RNA (1)...(19): siRNA sense strand
aagaaggauaugagaguga

SEQ ID NO: 2582667 - RNA, 19 nt, Homo sapiens
  misc_RNA (1)...(19): siRNA sense strand
gggaggacauagaagacau

SEQ ID NO: 2582668 - RNA, 19 nt, Homo sapiens
  misc_RNA (1)...(19): siRNA sense strand
gaagauggcaacagcggua

SEQ ID NO: 2582669 - RNA, 19 nt, Homo sapiens
  misc_RNA (1)...(19): siRNA sense strand
gugacuucauagaggagua

SEQ ID NO: 2582670 - RNA, 19 nt, Homo sapiens
  misc_RNA (1)...(19): siRNA sense strand
gguauaugaguguaacaaa

SEQ ID NO: 2582671 - RNA, 19 nt, Homo sapiens
  misc_RNA (1)...(19): siRNA sense strand
gagucagaccuaugaggaa

SEQ ID NO: 2582672 - RNA, 19 nt, Homo sapiens
  misc_RNA (1)...(19): siRNA sense strand
ggacaucacuuaugggaag

SEQ ID NO: 2582673 - RNA, 19 nt, Homo sapiens
  misc_RNA (1)...(19): siRNA sense strand
guguagacuugaaggacca

SEQ ID NO: 2582674 - RNA, 19 nt, Homo sapiens
  misc_RNA (1)...(19): siRNA sense strand
acuugaaggaccaggaaga

SEQ ID NO: 2582675 - RNA, 19 nt, Homo sapiens
  misc_RNA (1)...(19): siRNA sense strand
uggaaaugggugaugagua

SEQ ID NO: 2582676 - RNA, 19 nt, Homo sapiens
  misc_RNA (1)...(19): siRNA sense strand
acuuugaggacaagaagaa

SEQ ID NO: 2582677 - RNA, 19 nt, Homo sapiens
  misc_RNA (1)...(19): siRNA sense strand
acaaggagggucuggaaau

SEQ ID NO: 2582678 - RNA, 19 nt, Homo sapiens
  misc_RNA (1)...(19): siRNA sense strand
gguaauacagaaagaaucu

SEQ ID NO: 2582679 - RNA, 19 nt, Homo sapiens
  misc_RNA (1)...(19): siRNA sense strand
cguaagaacacacgccaau

SEQ ID NO: 2582680 - RNA, 19 nt, Homo sapiens
  misc_RNA (1)...(19): siRNA sense strand
gcaagaagcagcuagcaga

SEQ ID NO: 2582681 - RNA, 19 nt, Homo sapiens
  misc_RNA (1)...(19): siRNA sense strand
caguauugauucaggugau

SEQ ID NO: 2582682 - RNA, 19 nt, Homo sapiens
  misc_RNA (1)...(19): siRNA sense strand
uauucaagacacagaacaa

SEQ ID NO: 2582683 - RNA, 19 nt, Homo sapiens
  misc_RNA (1)...(19): siRNA sense strand
cugaagaguccaaugauga

SEQ ID NO: 2582684 - RNA, 19 nt, Homo sapiens
  misc_RNA (1)...(19): siRNA sense strand
agaacuaagacuuggcaca

SEQ ID NO: 2582685 - RNA, 19 nt, Homo sapiens
  misc_RNA (1)...(19): siRNA sense strand
gacccaaacaugugcacaa

SEQ ID NO: 2582686 - RNA, 19 nt, Homo sapiens
  misc_RNA (1)...(19): siRNA sense strand
uuguauuuaugcaggcaaa

SEQ ID NO: 2582687 - RNA, 19 nt, Homo sapiens
  misc_RNA (1)...(19): siRNA sense strand
ggugaugaguacuuugcaa

SEQ ID NO: 2582688 - RNA, 19 nt, Homo sapiens
  misc_RNA (1)...(19): siRNA sense strand
ucgaugaggaacuggagaa

SEQ ID NO: 2582689 - RNA, 19 nt, Homo sapiens
  misc_RNA (1)...(19): siRNA sense strand
cuuaagaaagucagcucaa

SEQ ID NO: 2582690 - RNA, 19 nt, Homo sapiens
  misc_RNA (1)...(19): siRNA sense strand
aagaagagaacuaagacuu

SEQ ID NO: 2582691 - RNA, 19 nt, Homo sapiens
  misc_RNA (1)...(19): siRNA sense strand
gugaugaguacuuugcaaa

SEQ ID NO: 2582692 - RNA, 19 nt, Homo sapiens
  misc_RNA (1)...(19): siRNA sense strand
ucgagagcguggagaacuu

SEQ ID NO: 2582693 - RNA, 19 nt, Homo sapiens
  misc_RNA (1)...(19): siRNA sense strand
gcaugcgaauucugggcaa

SEQ ID NO: 2582694 - RNA, 19 nt, Homo sapiens
  misc_RNA (1)...(19): siRNA sense strand
caaauacaaagaugggaau

SEQ ID NO: 2582695 - RNA, 19 nt, Homo sapiens
  misc_RNA (1)...(19): siRNA sense strand
ccgaagagacacccaagaa

SEQ ID NO: 2582696 - RNA, 19 nt, Homo sapiens
  misc_RNA (1)...(19): siRNA sense strand
cugcaauagugucagugaa

SEQ ID NO: 2582697 - RNA, 19 nt, Homo sapiens
  misc_RNA (1)...(19): siRNA sense strand
ggacuacaauaccgggaca

SEQ ID NO: 2582698 - RNA, 19 nt, Homo sapiens
  misc_RNA (1)...(19): siRNA sense strand
guucagaaguucauggaug

SEQ ID NO: 2582699 - RNA, 19 nt, Homo sapiens
  misc_RNA (1)...(19): siRNA sense strand
uggcauuguagcugagaca

SEQ ID NO: 2582700 - RNA, 19 nt, Homo sapiens
  misc_RNA (1)...(19): siRNA sense strand
cuaugaggaaugagcagua

SEQ ID NO: 2582701 - RNA, 19 nt, Homo sapiens
  misc_RNA (1)...(19): siRNA sense strand
aguggagucugaagagauu

SEQ ID NO: 2582702 - RNA, 19 nt, Homo sapiens
  misc_RNA (1)...(19): siRNA sense strand
ggacagaacuuacuuggga

SEQ ID NO: 2582703 - RNA, 19 nt, Homo sapiens
  misc_RNA (1)...(19): siRNA sense strand
cgaggugggcaguguggaa

SEQ ID NO: 2582704 - RNA, 19 nt, Homo sapiens
  misc_RNA (1)...(19): siRNA sense strand
ugguugaggaacuggguau

SEQ ID NO: 2582705 - RNA, 19 nt, Homo sapiens
  misc_RNA (1)...(19): siRNA sense strand
gcuagcagaguuagagaca

SEQ ID NO: 2582706 - RNA, 19 nt, Homo sapiens
  misc_RNA (1)...(19): siRNA sense strand
aagagacacccaagaacaa

SEQ ID NO: 2582707 - RNA, 19 nt, Homo sapiens
  misc_RNA (1)...(19): siRNA sense strand
ugugaagccugaaggacuu

SEQ ID NO: 2582708 - RNA, 19 nt, Homo sapiens
  misc_RNA (1)...(19): siRNA sense strand
gauggauuguguacagcaa

SEQ ID NO: 2582709 - RNA, 19 nt, Homo sapiens
  misc_RNA (1)...(19): siRNA sense strand
gggccagggaagaaauaca

SEQ ID NO: 2582710 - RNA, 19 nt, Homo sapiens
  misc_RNA (1)...(19): siRNA sense strand
ggugacagugacuuggaaa

SEQ ID NO: 2582711 - RNA, 19 nt, Homo sapiens
  misc_RNA (1)...(19): siRNA sense strand
ucuguaaggaugaggacuu

SEQ ID NO: 2582712 - RNA, 19 nt, Homo sapiens
  misc_RNA (1)...(19): siRNA sense strand
uggagaagaagcaaggaca

SEQ ID NO: 2582713 - RNA, 19 nt, Homo sapiens
  misc_RNA (1)...(19): siRNA sense strand
gaaagugggaccagccgaa

SEQ ID NO: 2582714 - RNA, 19 nt, Homo sapiens
  misc_RNA (1)...(19): siRNA sense strand
ggguaauacagaaagaauc

SEQ ID NO: 2582715 - RNA, 19 nt, Homo sapiens
  misc_RNA (1)...(19): siRNA sense strand
guauaugaguguaacaaac

SEQ ID NO: 2582716 - RNA, 19 nt, Homo sapiens
  misc_RNA (1)...(19): siRNA sense strand
auucauccuucaagacuaa

SEQ ID NO: 2582717 - RNA, 19 nt, Homo sapiens
  misc_RNA (1)...(19): siRNA sense strand
ccaugggauugcaauuaaa

SEQ ID NO: 2582718 - RNA, 19 nt, Homo sapiens
  misc_RNA (1)...(19): siRNA sense strand
acacaggaucugaccggua

SEQ ID NO: 2582719 - RNA, 19 nt, Homo sapiens
  misc_RNA (1)...(19): siRNA sense strand
uguaacaaacgcugcaaau

SEQ ID NO: 2582720 - RNA, 19 nt, Homo sapiens
  misc_RNA (1)...(19): siRNA sense strand
gagacaacuuccaaggacu

SEQ ID NO: 2582721 - RNA, 19 nt, Homo sapiens
  misc_RNA (1)...(19): siRNA sense strand
gcgucaaguggcaguaaaa

SEQ ID NO: 2582722 - RNA, 19 nt, Homo sapiens
  misc_RNA (1)...(19): siRNA sense strand
aagcaaagauggugaccug

SEQ ID NO: 2582723 - RNA, 19 nt, Homo sapiens
  misc_RNA (1)...(19): siRNA sense strand
ggcaagaagagaacuaaga

SEQ ID NO: 2582724 - RNA, 19 nt, Homo sapiens
  misc_RNA (1)...(19): siRNA sense strand
agucagaccuaugaggaau

SEQ ID NO: 2582725 - RNA, 19 nt, Homo sapiens
  misc_RNA (1)...(19): siRNA sense strand
gggaggacucgcuggaaca

SEQ ID NO: 2582726 - RNA, 19 nt, Homo sapiens
  misc_RNA (1)...(19): siRNA sense strand
ucaucgagacccugaggaa

SEQ ID NO: 2582727 - RNA, 19 nt, Homo sapiens
  misc_RNA (1)...(19): siRNA sense strand
cggaguacaaugagccaca

SEQ ID NO: 2582728 - RNA, 19 nt, Homo sapiens
  misc_RNA (1)...(19): siRNA sense strand
gaaucaccgacgagcggaa

SEQ ID NO: 2582729 - RNA, 19 nt, Homo sapiens
  misc_RNA (1)...(19): siRNA sense strand
gauccuaugagacgggaga

SEQ ID NO: 2582730 - RNA, 19 nt, Homo sapiens
  misc_RNA (1)...(19): siRNA sense strand
gagcggaaccgacagguga

SEQ ID NO: 2582731 - RNA, 19 nt, Homo sapiens
  misc_RNA (1)...(19): siRNA sense strand
caguaaugcacuacaguaa

SEQ ID NO: 2582732 - RNA, 19 nt, Homo sapiens
  misc_RNA (1)...(19): siRNA sense strand
cgugaaaggaugagcucaa

SEQ ID NO: 2582733 - RNA, 19 nt, Homo sapiens
  misc_RNA (1)...(19): siRNA sense strand
ggauaaugugggacagaau

SEQ ID NO: 2582734 - RNA, 19 nt, Homo sapiens
  misc_RNA (1)...(19): siRNA sense strand
ccgaauagcaacaguucaa

SEQ ID NO: 2582735 - RNA, 19 nt, Homo sapiens
  misc_RNA (1)...(19): siRNA sense strand
cagacaauguggauggcaa

SEQ ID NO: 2582736 - RNA, 19 nt, Homo sapiens
  misc_RNA (1)...(19): siRNA sense strand
gaguauaacuacagaccca

SEQ ID NO: 2582737 - RNA, 19 nt, Homo sapiens
  misc_RNA (1)...(19): siRNA sense strand
ccaaaguucaggagauaau

SEQ ID NO: 2582738 - RNA, 19 nt, Homo sapiens
  misc_RNA (1)...(19): siRNA sense strand
gggcaaacugugaccgaau

SEQ ID NO: 2582739 - RNA, 19 nt, Homo sapiens
  misc_RNA (1)...(19): siRNA sense strand
ggaaaugaaugcuaaggga

SEQ ID NO: 2582740 - RNA, 19 nt, Homo sapiens
  misc_RNA (1)...(19): siRNA sense strand
agauaaugcugacuggcaa

SEQ ID NO: 2582741 - RNA, 19 nt, Homo sapiens
  misc_RNA (1)...(19): siRNA sense strand
gcggaauggaccaggacau

SEQ ID NO: 2582742 - RNA, 19 nt, Homo sapiens
  misc_RNA (1)...(19): siRNA sense strand
uaacauugaaagugaccaa

SEQ ID NO: 2582743 - RNA, 19 nt, Homo sapiens
  misc_RNA (1)...(19): siRNA sense strand
ugugacuaaugcagggaua

SEQ ID NO: 2582744 - RNA, 19 nt, Homo sapiens
  misc_RNA (1)...(19): siRNA sense strand
ggggaagacuggugguaca

SEQ ID NO: 2582745 - RNA, 19 nt, Homo sapiens
  misc_RNA (1)...(19): siRNA sense strand
gaaauaggcggguugggaa

SEQ ID NO: 2582746 - RNA, 19 nt, Homo sapiens
  misc_RNA (1)...(19): siRNA sense strand
cuagaagauagcuuggaaa

SEQ ID NO: 2582747 - RNA, 19 nt, Homo sapiens
  misc_RNA (1)...(19): siRNA sense strand
guucaagaccucugcucaa

SEQ ID NO: 2582748 - RNA, 19 nt, Homo sapiens
  misc_RNA (1)...(19): siRNA sense strand
auccaaaguucaggagaua

SEQ ID NO: 2582749 - RNA, 19 nt, Homo sapiens
  misc_RNA (1)...(19): siRNA sense strand
uggcagugaaagugaucaa

SEQ ID NO: 2582750 - RNA, 19 nt, Homo sapiens
  misc_RNA (1)...(19): siRNA sense strand
uagaagauagcuuggaaau

SEQ ID NO: 2582751 - RNA, 19 nt, Homo sapiens
  misc_RNA (1)...(19): siRNA sense strand
cagaaaacuuugauguaga

SEQ ID NO: 2582752 - RNA, 19 nt, Homo sapiens
  misc_RNA (1)...(19): siRNA sense strand
cggaauggaccaggacaua

SEQ ID NO: 2582753 - RNA, 19 nt, Homo sapiens
  misc_RNA (1)...(19): siRNA sense strand
agacaauguggauggcaau

SEQ ID NO: 2582754 - RNA, 19 nt, Homo sapiens
  misc_RNA (1)...(19): siRNA sense strand
gccuugggcuggagaaaca

SEQ ID NO: 2582755 - RNA, 19 nt, Homo sapiens
  misc_RNA (1)...(19): siRNA sense strand
ccauuuaugaccaccgaua

SEQ ID NO: 2582756 - RNA, 19 nt, Homo sapiens
  misc_RNA (1)...(19): siRNA sense strand
uauaacaguggcagugaaa

SEQ ID NO: 2582757 - RNA, 19 nt, Homo sapiens
  misc_RNA (1)...(19): siRNA sense strand
ccucaucauaucuggcaua

SEQ ID NO: 2582758 - RNA, 19 nt, Homo sapiens
  misc_RNA (1)...(19): siRNA sense strand
gggaguauucugcagacaa

SEQ ID NO: 2582759 - RNA, 19 nt, Homo sapiens
  misc_RNA (1)...(19): siRNA sense strand
uaacaguggcagugaaagu

SEQ ID NO: 2582760 - RNA, 19 nt, Homo sapiens
  misc_RNA (1)...(19): siRNA sense strand
ugacuaaugcagggauaua

SEQ ID NO: 2582761 - RNA, 19 nt, Homo sapiens
  misc_RNA (1)...(19): siRNA sense strand
cgauagcagcucuguaaau

SEQ ID NO: 2582762 - RNA, 19 nt, Homo sapiens
  misc_RNA (1)...(19): siRNA sense strand
auuuaacccuuguggaaga

SEQ ID NO: 2582763 - RNA, 19 nt, Homo sapiens
  misc_RNA (1)...(19): siRNA sense strand
acgcaaaggcucuggugca

SEQ ID NO: 2582764 - RNA, 19 nt, Homo sapiens
  misc_RNA (1)...(19): siRNA sense strand
gaucaauuacaguggccau

SEQ ID NO: 2582765 - RNA, 19 nt, Homo sapiens
  misc_RNA (1)...(19): siRNA sense strand
uccaaucagcggaguauaa

SEQ ID NO: 2582766 - RNA, 19 nt, Homo sapiens
  misc_RNA (1)...(19): siRNA sense strand
aagauagcuuggaaaugaa

SEQ ID NO: 2582767 - RNA, 19 nt, Homo sapiens
  misc_RNA (1)...(19): siRNA sense strand
aaaugaaugcuaagggagu

SEQ ID NO: 2582768 - RNA, 19 nt, Homo sapiens
  misc_RNA (1)...(19): siRNA sense strand
cgaauggauuucagugacu

SEQ ID NO: 2582769 - RNA, 19 nt, Homo sapiens
  misc_RNA (1)...(19): siRNA sense strand
aguuuagagugguguuuga

SEQ ID NO: 2582770 - RNA, 19 nt, Homo sapiens
  misc_RNA (1)...(19): siRNA sense strand
cuauggaaccagugccuuu

SEQ ID NO: 2582771 - RNA, 19 nt, Homo sapiens
  misc_RNA (1)...(19): siRNA sense strand
guacaugggagaaaggugu

SEQ ID NO: 2582772 - RNA, 19 nt, Homo sapiens
  misc_RNA (1)...(19): siRNA sense strand
gucuauugcaccaggaaga

SEQ ID NO: 2582773 - RNA, 19 nt, Homo sapiens
  misc_RNA (1)...(19): siRNA sense strand
agguuaugccuuucagauu

SEQ ID NO: 2582774 - RNA, 19 nt, Homo sapiens
  misc_RNA (1)...(19): siRNA sense strand
agaaaggugugaaaagaga

SEQ ID NO: 2582775 - RNA, 19 nt, Homo sapiens
  misc_RNA (1)...(19): siRNA sense strand
gcacuguucgagauggcaa

SEQ ID NO: 2582776 - RNA, 19 nt, Homo sapiens
  misc_RNA (1)...(19): siRNA sense strand
augggagaaaggugugaaa

SEQ ID NO: 2582777 - RNA, 19 nt, Homo sapiens
  misc_RNA (1)...(19): siRNA sense strand
gaaauaucgugaaaggaug

SEQ ID NO: 2582778 - RNA, 19 nt, Homo sapiens
  misc_RNA (1)...(19): siRNA sense strand
guucugaccgggaugacua

SEQ ID NO: 2582779 - RNA, 19 nt, Homo sapiens
  misc_RNA (1)...(19): siRNA sense strand
ugucaggcagagagcacaa

SEQ ID NO: 2582780 - RNA, 19 nt, Homo sapiens
  misc_RNA (1)...(19): siRNA sense strand
gcauauaaggaauuucaca

SEQ ID NO: 2582781 - RNA, 19 nt, Homo sapiens
  misc_RNA (1)...(19): siRNA sense strand
uuacuuaaaucuagcccau

SEQ ID NO: 2582782 - RNA, 19 nt, Homo sapiens
  misc_RNA (1)...(19): siRNA sense strand
ucaaugaagguuugggacu

SEQ ID NO: 2582783 - RNA, 19 nt, Homo sapiens
  misc_RNA (1)...(19): siRNA sense strand
caucauuggagaaaaguau

SEQ ID NO: 2582784 - RNA, 19 nt, Homo sapiens
  misc_RNA (1)...(19): siRNA sense strand
aguaaugcacuacaguaaa

SEQ ID NO: 2582785 - RNA, 19 nt, Homo sapiens
  misc_RNA (1)...(19): siRNA sense strand
guguguggcaugauccaaa

SEQ ID NO: 2582786 - RNA, 19 nt, Homo sapiens
  misc_RNA (1)...(19): siRNA sense strand
aggcugaaaagcagagauu

SEQ ID NO: 2582787 - RNA, 19 nt, Homo sapiens
  misc_RNA (1)...(19): siRNA sense strand
gggagaaaggugugaaaag

SEQ ID NO: 2582788 - RNA, 19 nt, Homo sapiens
  misc_RNA (1)...(19): siRNA sense strand
augaaugcuaagggaguua

SEQ ID NO: 2582789 - RNA, 19 nt, Homo sapiens
  misc_RNA (1)...(19): siRNA sense strand
ggaaauaggcggguuggga

SEQ ID NO: 2582790 - RNA, 19 nt, Homo sapiens
  misc_RNA (1)...(19): siRNA sense strand
acucagaaguagaaggaga

SEQ ID NO: 2582791 - RNA, 19 nt, Homo sapiens
  misc_RNA (1)...(19): siRNA sense strand
ccagauugucggagaggaa

SEQ ID NO: 2582792 - RNA, 19 nt, Homo sapiens
  misc_RNA (1)...(19): siRNA sense strand
ccaaagaacaagaagcaga

SEQ ID NO: 2582793 - RNA, 19 nt, Homo sapiens
  misc_RNA (1)...(19): siRNA sense strand
gugaagaagaggaggagga

SEQ ID NO: 2582794 - RNA, 19 nt, Homo sapiens
  misc_RNA (1)...(19): siRNA sense strand
acaaagcuguuaagggcaa

SEQ ID NO: 2582795 - RNA, 19 nt, Homo sapiens
  misc_RNA (1)...(19): siRNA sense strand
agaaggagcuggagcagga

SEQ ID NO: 2582796 - RNA, 19 nt, Homo sapiens
  misc_RNA (1)...(19): siRNA sense strand
ggaagagaggagagcugaa

SEQ ID NO: 2582797 - RNA, 19 nt, Homo sapiens
  misc_RNA (1)...(19): siRNA sense strand
aagcagaaauugaacgcau

SEQ ID NO: 2582798 - RNA, 19 nt, Homo sapiens
  misc_RNA (1)...(19): siRNA sense strand
aagauguggaagagagauu

SEQ ID NO: 2582799 - RNA, 19 nt, Homo sapiens
  misc_RNA (1)...(19): siRNA sense strand
aaaaugaugaggaggaaua

SEQ ID NO: 2582800 - RNA, 19 nt, Homo sapiens
  misc_RNA (1)...(19): siRNA sense strand
aagaaguauacaagagaga

SEQ ID NO: 2582801 - RNA, 19 nt, Homo sapiens
  misc_RNA (1)...(19): siRNA sense strand
agaagacagcagugaagaa

SEQ ID NO: 2582802 - RNA, 19 nt, Homo sapiens
  misc_RNA (1)...(19): siRNA sense strand
aggagaaagcagaaauuga

SEQ ID NO: 2582803 - RNA, 19 nt, Homo sapiens
  misc_RNA (1)...(19): siRNA sense strand
ucaagaacgugaagccgaa

SEQ ID NO: 2582804 - RNA, 19 nt, Homo sapiens
  misc_RNA (1)...(19): siRNA sense strand
guucauuaagaaagccaaa

SEQ ID NO: 2582805 - RNA, 19 nt, Homo sapiens
  misc_RNA (1)...(19): siRNA sense strand
agauggaagucauggaagu

SEQ ID NO: 2582806 - RNA, 19 nt, Homo sapiens
  misc_RNA (1)...(19): siRNA sense strand
gcagugaagaagaggagga

SEQ ID NO: 2582807 - RNA, 19 nt, Homo sapiens
  misc_RNA (1)...(19): siRNA sense strand
gaagaagaggaggaggaaa

SEQ ID NO: 2582808 - RNA, 19 nt, Homo sapiens
  misc_RNA (1)...(19): siRNA sense strand
gggcaaacggcaaagucau

SEQ ID NO: 2582809 - RNA, 19 nt, Homo sapiens
  misc_RNA (1)...(19): siRNA sense strand
gccaagaagcggaaaacua

SEQ ID NO: 2582810 - RNA, 19 nt, Homo sapiens
  misc_RNA (1)...(19): siRNA sense strand
augaggaggaugaagaauu

SEQ ID NO: 2582811 - RNA, 19 nt, Homo sapiens
  misc_RNA (1)...(19): siRNA sense strand
agucugaguaugaagagua

SEQ ID NO: 2582812 - RNA, 19 nt, Homo sapiens
  misc_RNA (1)...(19): siRNA sense strand
acaaaaggcagcuggggua

SEQ ID NO: 2582813 - RNA, 19 nt, Homo sapiens
  misc_RNA (1)...(19): siRNA sense strand
cugaggaacaggaggagga

SEQ ID NO: 2582814 - RNA, 19 nt, Homo sapiens
  misc_RNA (1)...(19): siRNA sense strand
aagccgaagcauugaaaca

SEQ ID NO: 2582815 - RNA, 19 nt, Homo sapiens
  misc_RNA (1)...(19): siRNA sense strand
ugaagauguggaagagaga

SEQ ID NO: 2582816 - RNA, 19 nt, Homo sapiens
  misc_RNA (1)...(19): siRNA sense strand
gggacagagaagaucgaga

SEQ ID NO: 2582817 - RNA, 19 nt, Homo sapiens
  misc_RNA (1)...(19): siRNA sense strand
gagaaggagaaagcagaaa

SEQ ID NO: 2582818 - RNA, 19 nt, Homo sapiens
  misc_RNA (1)...(19): siRNA sense strand
aggaugaagaaguauacaa

SEQ ID NO: 2582819 - RNA, 19 nt, Homo sapiens
  misc_RNA (1)...(19): siRNA sense strand
agcgagcacaggagagaaa

SEQ ID NO: 2582820 - RNA, 19 nt, Homo sapiens
  misc_RNA (1)...(19): siRNA sense strand
gcgaaaccugacugaggaa

SEQ ID NO: 2582821 - RNA, 19 nt, Homo sapiens
  misc_RNA (1)...(19): siRNA sense strand
ggaccgagugacaguucaa

SEQ ID NO: 2582822 - RNA, 19 nt, Homo sapiens
  misc_RNA (1)...(19): siRNA sense strand
agaaggagaaagcagaaau

SEQ ID NO: 2582823 - RNA, 19 nt, Homo sapiens
  misc_RNA (1)...(19): siRNA sense strand
cccaguucgcaaugagaaa

SEQ ID NO: 2582824 - RNA, 19 nt, Homo sapiens
  misc_RNA (1)...(19): siRNA sense strand
aggaacaggaggaggauuc

SEQ ID NO: 2582825 - RNA, 19 nt, Homo sapiens
  misc_RNA (1)...(19): siRNA sense strand
aaaagaaucaagagggaca

SEQ ID NO: 2582826 - RNA, 19 nt, Homo sapiens
  misc_RNA (1)...(19): siRNA sense strand
uaugaagaguacacagaca

SEQ ID NO: 2582827 - RNA, 19 nt, Homo sapiens
  misc_RNA (1)...(19): siRNA sense strand
aggaauaugaggcauggaa

SEQ ID NO: 2582828 - RNA, 19 nt, Homo sapiens
  misc_RNA (1)...(19): siRNA sense strand
ugagaaggagaaagcagaa

SEQ ID NO: 2582829 - RNA, 19 nt, Homo sapiens
  misc_RNA (1)...(19): siRNA sense strand
augaggaugaagaaguaua

SEQ ID NO: 2582830 - RNA, 19 nt, Homo sapiens
  misc_RNA (1)...(19): siRNA sense strand
agaugaggaggaugaagaa

SEQ ID NO: 2582831 - RNA, 19 nt, Homo sapiens
  misc_RNA (1)...(19): siRNA sense strand
aagucauggaaguggaaga

SEQ ID NO: 2582832 - RNA, 19 nt, Homo sapiens
  misc_RNA (1)...(19): siRNA sense strand
agccaaagaacaagaagca

SEQ ID NO: 2582833 - RNA, 19 nt, Homo sapiens
  misc_RNA (1)...(19): siRNA sense strand
uuagugaagauguggaaga

SEQ ID NO: 2582834 - RNA, 19 nt, Homo sapiens
  misc_RNA (1)...(19): siRNA sense strand
ugaagugguaggagagagu

SEQ ID NO: 2582835 - RNA, 19 nt, Homo sapiens
  misc_RNA (1)...(19): siRNA sense strand
gcgcauggaacgagaagac

SEQ ID NO: 2582836 - RNA, 19 nt, Homo sapiens
  misc_RNA (1)...(19): siRNA sense strand
uggaagagaacaagcgauc

SEQ ID NO: 2582837 - RNA, 19 nt, Homo sapiens
  misc_RNA (1)...(19): siRNA sense strand
ccgagugacaguucaagaa

SEQ ID NO: 2582838 - RNA, 19 nt, Homo sapiens
  misc_RNA (1)...(19): siRNA sense strand
aagagcuggaagagaacaa

SEQ ID NO: 2582839 - RNA, 19 nt, Homo sapiens
  misc_RNA (1)...(19): siRNA sense strand
ccccaaaagagcuggaaga

SEQ ID NO: 2582840 - RNA, 19 nt, Homo sapiens
  misc_RNA (1)...(19): siRNA sense strand
aacaagaagcagagccuga

SEQ ID NO: 2582841 - RNA, 19 nt, Homo sapiens
  misc_RNA (1)...(19): siRNA sense strand
agaagcagagccugaggaa

SEQ ID NO: 2582842 - RNA, 19 nt, Homo sapiens
  misc_RNA (1)...(19): siRNA sense strand
aaccugaagugguaggaga

SEQ ID NO: 2582843 - RNA, 19 nt, Homo sapiens
  misc_RNA (1)...(19): siRNA sense strand
gguuagagaaagaagagaa

SEQ ID NO: 2582844 - RNA, 19 nt, Homo sapiens
  misc_RNA (1)...(19): siRNA sense strand
caaugaaagaggagaauca

SEQ ID NO: 2582845 - RNA, 19 nt, Homo sapiens
  misc_RNA (1)...(19): siRNA sense strand
guuagagaaagaagagaaa

SEQ ID NO: 2582846 - RNA, 19 nt, Homo sapiens
  misc_RNA (1)...(19): siRNA sense strand
aagaagaauuggagagaac

SEQ ID NO: 2582847 - RNA, 19 nt, Homo sapiens
  misc_RNA (1)...(19): siRNA sense strand
cuauagaaagcgagccaaa

SEQ ID NO: 2582848 - RNA, 19 nt, Homo sapiens
  misc_RNA (1)...(19): siRNA sense strand
gggucaaugccuucagaaa

SEQ ID NO: 2582849 - RNA, 19 nt, Homo sapiens
  misc_RNA (1)...(19): siRNA sense strand
uuaugugggacgagagaaa

SEQ ID NO: 2582850 - RNA, 19 nt, Homo sapiens
  misc_RNA (1)...(19): siRNA sense strand
ggaagagcuuacagagcau

SEQ ID NO: 2582851 - RNA, 19 nt, Homo sapiens
  misc_RNA (1)...(19): siRNA sense strand
ucaaaugaaugaagaacga

SEQ ID NO: 2582852 - RNA, 19 nt, Homo sapiens
  misc_RNA (1)...(19): siRNA sense strand
acauaacggaugaugauaa

SEQ ID NO: 2582853 - RNA, 19 nt, Homo sapiens
  misc_RNA (1)...(19): siRNA sense strand
augaauugauggcggauau

SEQ ID NO: 2582854 - RNA, 19 nt, Homo sapiens
  misc_RNA (1)...(19): siRNA sense strand
ggauaaaauggauggguca

SEQ ID NO: 2582855 - RNA, 19 nt, Homo sapiens
  misc_RNA (1)...(19): siRNA sense strand
ggaaauuaacaguagagga

SEQ ID NO: 2582856 - RNA, 19 nt, Homo sapiens
  misc_RNA (1)...(19): siRNA sense strand
cucuagaagaugagucaaa

SEQ ID NO: 2582857 - RNA, 19 nt, Homo sapiens
  misc_RNA (1)...(19): siRNA sense strand
ugaaguauggaaagaacaa

SEQ ID NO: 2582858 - RNA, 19 nt, Homo sapiens
  misc_RNA (1)...(19): siRNA sense strand
ucuaaugcuuucuggacua

SEQ ID NO: 2582859 - RNA, 19 nt, Homo sapiens
  misc_RNA (1)...(19): siRNA sense strand
aaucagagguccauuguuu

SEQ ID NO: 2582860 - RNA, 19 nt, Homo sapiens
  misc_RNA (1)...(19): siRNA sense strand
caaaaugaccuucaagaua

SEQ ID NO: 2582861 - RNA, 19 nt, Homo sapiens
  misc_RNA (1)...(19): siRNA sense strand
gcaucuuugcagucagaaa

SEQ ID NO: 2582862 - RNA, 19 nt, Homo sapiens
  misc_RNA (1)...(19): siRNA sense strand
auccaaacauucugaacaa

SEQ ID NO: 2582863 - RNA, 19 nt, Homo sapiens
  misc_RNA (1)...(19): siRNA sense strand
agacauaacggaugaugau

SEQ ID NO: 2582864 - RNA, 19 nt, Homo sapiens
  misc_RNA (1)...(19): siRNA sense strand
cacaaaggcaagacagauu

SEQ ID NO: 2582865 - RNA, 19 nt, Homo sapiens
  misc_RNA (1)...(19): siRNA sense strand
uagagaaagaagagaaacu

SEQ ID NO: 2582866 - RNA, 19 nt, Homo sapiens
  misc_RNA (1)...(19): siRNA sense strand
ugaacuugaggaugaaaua

SEQ ID NO: 2582867 - RNA, 19 nt, Homo sapiens
  misc_RNA (1)...(19): siRNA sense strand
agaaggagaaagaaaccaa

SEQ ID NO: 2582868 - RNA, 19 nt, Homo sapiens
  misc_RNA (1)...(19): siRNA sense strand
aaacaaaggaagagcuuac

SEQ ID NO: 2582869 - RNA, 19 nt, Homo sapiens
  misc_RNA (1)...(19): siRNA sense strand
ccaaaguacaugcagaaca

SEQ ID NO: 2582870 - RNA, 19 nt, Homo sapiens
  misc_RNA (1)...(19): siRNA sense strand
ucagauuaccaaugaaaga

SEQ ID NO: 2582871 - RNA, 19 nt, Homo sapiens
  misc_RNA (1)...(19): siRNA sense strand
aggcuaugaaguagaguca

SEQ ID NO: 2582872 - RNA, 19 nt, Homo sapiens
  misc_RNA (1)...(19): siRNA sense strand
aaugaaacuccacaggaaa

SEQ ID NO: 2582873 - RNA, 19 nt, Homo sapiens
  misc_RNA (1)...(19): siRNA sense strand
uaccaaugaaagaggagaa

SEQ ID NO: 2582874 - RNA, 19 nt, Homo sapiens
  misc_RNA (1)...(19): siRNA sense strand
ggaggcaacagaagcacaa

SEQ ID NO: 2582875 - RNA, 19 nt, Homo sapiens
  misc_RNA (1)...(19): siRNA sense strand
cuccaaaguacaugcagaa

SEQ ID NO: 2582876 - RNA, 19 nt, Homo sapiens
  misc_RNA (1)...(19): siRNA sense strand
gaaaauuaucgguuagaga

SEQ ID NO: 2582877 - RNA, 19 nt, Homo sapiens
  misc_RNA (1)...(19): siRNA sense strand
acgacugaagauagcaaua

SEQ ID NO: 2582878 - RNA, 19 nt, Homo sapiens
  misc_RNA (1)...(19): siRNA sense strand
agaggaaaauuaucgguua

SEQ ID NO: 2582879 - RNA, 19 nt, Homo sapiens
  misc_RNA (1)...(19): siRNA sense strand
cuuuaaaggaugccagcuu

SEQ ID NO: 2582880 - RNA, 19 nt, Homo sapiens
  misc_RNA (1)...(19): siRNA sense strand
ccagaaccacagcaagaaa

SEQ ID NO: 2582881 - RNA, 19 nt, Homo sapiens
  misc_RNA (1)...(19): siRNA sense strand
ggaugaaauacucugucua

SEQ ID NO: 2582882 - RNA, 19 nt, Homo sapiens
  misc_RNA (1)...(19): siRNA sense strand
aggaagagcuuacagagca

SEQ ID NO: 2582883 - RNA, 19 nt, Homo sapiens
  misc_RNA (1)...(19): siRNA sense strand
augaagaacgacugaagau

SEQ ID NO: 2582884 - RNA, 19 nt, Homo sapiens
  misc_RNA (1)...(19): siRNA sense strand
ugaagaacgacugaagaua

SEQ ID NO: 2582885 - RNA, 19 nt, Homo sapiens
  misc_RNA (1)...(19): siRNA sense strand
gcuuguuaaagaugaaaga

SEQ ID NO: 2582886 - RNA, 19 nt, Homo sapiens
  misc_RNA (1)...(19): siRNA sense strand
ggaaagaaaaugcucacaa

SEQ ID NO: 2582887 - RNA, 19 nt, Homo sapiens
  misc_RNA (1)...(19): siRNA sense strand
aaagaaagucacaucaaga

SEQ ID NO: 2582888 - RNA, 19 nt, Homo sapiens
  misc_RNA (1)...(19): siRNA sense strand
ugaagaagaauuggagaga

SEQ ID NO: 2582889 - RNA, 19 nt, Homo sapiens
  misc_RNA (1)...(19): siRNA sense strand
cucggaaugcugaaagaaa

SEQ ID NO: 2582890 - RNA, 19 nt, Homo sapiens
  misc_RNA (1)...(19): siRNA sense strand
augaaacuccacaggaaau

SEQ ID NO: 2582891 - RNA, 19 nt, Homo sapiens
  misc_RNA (1)...(19): siRNA sense strand
agcuggagaccuauagaaa

SEQ ID NO: 2582892 - RNA, 19 nt, Homo sapiens
  misc_RNA (1)...(19): siRNA sense strand
cucacgaggcccagggaau

SEQ ID NO: 2582893 - RNA, 19 nt, Homo sapiens
  misc_RNA (1)...(19): siRNA sense strand
aagcugaaguauggaaaga

SEQ ID NO: 2582894 - RNA, 19 nt, Homo sapiens
  misc_RNA (1)...(19): siRNA sense strand
aggagaaagaaaccaaauu

SEQ ID NO: 2582895 - RNA, 19 nt, Homo sapiens
  misc_RNA (1)...(19): siRNA sense strand
gaacgacugaagauagcaa

SEQ ID NO: 2582896 - RNA, 19 nt, Homo sapiens
  misc_RNA (1)...(19): siRNA sense strand
acuccaaaguacaugcaga

SEQ ID NO: 2582897 - RNA, 19 nt, Homo sapiens
  misc_RNA (1)...(19): siRNA sense strand
cacaaguagcugaagccaa

SEQ ID NO: 2582898 - RNA, 19 nt, Homo sapiens
  misc_RNA (1)...(19): siRNA sense strand
augaacagugaaucggaaa

SEQ ID NO: 2582899 - RNA, 19 nt, Homo sapiens
  misc_RNA (1)...(19): siRNA sense strand
cugaaagaaaccucaauga

SEQ ID NO: 2582900 - RNA, 19 nt, Homo sapiens
  misc_RNA (1)...(19): siRNA sense strand
agaagcugaaguauggaaa

SEQ ID NO: 2582901 - RNA, 19 nt, Homo sapiens
  misc_RNA (1)...(19): siRNA sense strand
gguuagagaaagaagagaa

SEQ ID NO: 2582902 - RNA, 19 nt, Homo sapiens
  misc_RNA (1)...(19): siRNA sense strand
caaugaaagaggagaauca

SEQ ID NO: 2582903 - RNA, 19 nt, Homo sapiens
  misc_RNA (1)...(19): siRNA sense strand
guuagagaaagaagagaaa

SEQ ID NO: 2582904 - RNA, 19 nt, Homo sapiens
  misc_RNA (1)...(19): siRNA sense strand
aagaagaauuggagagaac

SEQ ID NO: 2582905 - RNA, 19 nt, Homo sapiens
  misc_RNA (1)...(19): siRNA sense strand
cuauagaaagcgagccaaa

SEQ ID NO: 2582906 - RNA, 19 nt, Homo sapiens
  misc_RNA (1)...(19): siRNA sense strand
gggucaaugccuucagaaa

SEQ ID NO: 2582907 - RNA, 19 nt, Homo sapiens
  misc_RNA (1)...(19): siRNA sense strand
uuaugugggacgagagaaa

SEQ ID NO: 2582908 - RNA, 19 nt, Homo sapiens
  misc_RNA (1)...(19): siRNA sense strand
ggaagagcuuacagagcau

SEQ ID NO: 2582909 - RNA, 19 nt, Homo sapiens
  misc_RNA (1)...(19): siRNA sense strand
ucaaaugaaugaagaacga

SEQ ID NO: 2582910 - RNA, 19 nt, Homo sapiens
  misc_RNA (1)...(19): siRNA sense strand
acauaacggaugaugauaa

SEQ ID NO: 2582911 - RNA, 19 nt, Homo sapiens
  misc_RNA (1)...(19): siRNA sense strand
augaauugauggcggauau

SEQ ID NO: 2582912 - RNA, 19 nt, Homo sapiens
  misc_RNA (1)...(19): siRNA sense strand
ggauaaaauggauggguca

SEQ ID NO: 2582913 - RNA, 19 nt, Homo sapiens
  misc_RNA (1)...(19): siRNA sense strand
ggaaauuaacaguagagga

SEQ ID NO: 2582914 - RNA, 19 nt, Homo sapiens
  misc_RNA (1)...(19): siRNA sense strand
cucuagaagaugagucaaa

SEQ ID NO: 2582915 - RNA, 19 nt, Homo sapiens
  misc_RNA (1)...(19): siRNA sense strand
ugaaguauggaaagaacaa

SEQ ID NO: 2582916 - RNA, 19 nt, Homo sapiens
  misc_RNA (1)...(19): siRNA sense strand
ucuaaugcuuucuggacua

SEQ ID NO: 2582917 - RNA, 19 nt, Homo sapiens
  misc_RNA (1)...(19): siRNA sense strand
aaucagagguccauuguuu

SEQ ID NO: 2582918 - RNA, 19 nt, Homo sapiens
  misc_RNA (1)...(19): siRNA sense strand
caaaaugaccuucaagaua

SEQ ID NO: 2582919 - RNA, 19 nt, Homo sapiens
  misc_RNA (1)...(19): siRNA sense strand
gcaucuuugcagucagaaa

SEQ ID NO: 2582920 - RNA, 19 nt, Homo sapiens
  misc_RNA (1)...(19): siRNA sense strand
auccaaacauucugaacaa

SEQ ID NO: 2582921 - RNA, 19 nt, Homo sapiens
  misc_RNA (1)...(19): siRNA sense strand
agacauaacggaugaugau

SEQ ID NO: 2582922 - RNA, 19 nt, Homo sapiens
  misc_RNA (1)...(19): siRNA sense strand
cacaaaggcaagacagauu

SEQ ID NO: 2582923 - RNA, 19 nt, Homo sapiens
  misc_RNA (1)...(19): siRNA sense strand
uagagaaagaagagaaacu

SEQ ID NO: 2582924 - RNA, 19 nt, Homo sapiens
  misc_RNA (1)...(19): siRNA sense strand
ugaacuugaggaugaaaua

SEQ ID NO: 2582925 - RNA, 19 nt, Homo sapiens
  misc_RNA (1)...(19): siRNA sense strand
agaaggagaaagaaaccaa

SEQ ID NO: 2582926 - RNA, 19 nt, Homo sapiens
  misc_RNA (1)...(19): siRNA sense strand
aaacaaaggaagagcuuac

SEQ ID NO: 2582927 - RNA, 19 nt, Homo sapiens
  misc_RNA (1)...(19): siRNA sense strand
ccaaaguacaugcagaaca

SEQ ID NO: 2582928 - RNA, 19 nt, Homo sapiens
  misc_RNA (1)...(19): siRNA sense strand
ucagauuaccaaugaaaga

SEQ ID NO: 2582929 - RNA, 19 nt, Homo sapiens
  misc_RNA (1)...(19): siRNA sense strand
aggcuaugaaguagaguca

SEQ ID NO: 2582930 - RNA, 19 nt, Homo sapiens
  misc_RNA (1)...(19): siRNA sense strand
aaugaaacuccacaggaaa

SEQ ID NO: 2582931 - RNA, 19 nt, Homo sapiens
  misc_RNA (1)...(19): siRNA sense strand
uaccaaugaaagaggagaa

SEQ ID NO: 2582932 - RNA, 19 nt, Homo sapiens
  misc_RNA (1)...(19): siRNA sense strand
ggaggcaacagaagcacaa

SEQ ID NO: 2582933 - RNA, 19 nt, Homo sapiens
  misc_RNA (1)...(19): siRNA sense strand
cuccaaaguacaugcagaa

SEQ ID NO: 2582934 - RNA, 19 nt, Homo sapiens
  misc_RNA (1)...(19): siRNA sense strand
gaaaauuaucgguuagaga

SEQ ID NO: 2582935 - RNA, 19 nt, Homo sapiens
  misc_RNA (1)...(19): siRNA sense strand
acgacugaagauagcaaua

SEQ ID NO: 2582936 - RNA, 19 nt, Homo sapiens
  misc_RNA (1)...(19): siRNA sense strand
agaggaaaauuaucgguua

SEQ ID NO: 2582937 - RNA, 19 nt, Homo sapiens
  misc_RNA (1)...(19): siRNA sense strand
cuuuaaaggaugccagcuu

SEQ ID NO: 2582938 - RNA, 19 nt, Homo sapiens
  misc_RNA (1)...(19): siRNA sense strand
ccagaaccacagcaagaaa

SEQ ID NO: 2582939 - RNA, 19 nt, Homo sapiens
  misc_RNA (1)...(19): siRNA sense strand
ggaugaaauacucugucua

SEQ ID NO: 2582940 - RNA, 19 nt, Homo sapiens
  misc_RNA (1)...(19): siRNA sense strand
aggaagagcuuacagagca

SEQ ID NO: 2582941 - RNA, 19 nt, Homo sapiens
  misc_RNA (1)...(19): siRNA sense strand
augaagaacgacugaagau

SEQ ID NO: 2582942 - RNA, 19 nt, Homo sapiens
  misc_RNA (1)...(19): siRNA sense strand
ugaagaacgacugaagaua

SEQ ID NO: 2582943 - RNA, 19 nt, Homo sapiens
  misc_RNA (1)...(19): siRNA sense strand
gcuuguuaaagaugaaaga

SEQ ID NO: 2582944 - RNA, 19 nt, Homo sapiens
  misc_RNA (1)...(19): siRNA sense strand
ggaaagaaaaugcucacaa

SEQ ID NO: 2582945 - RNA, 19 nt, Homo sapiens
  misc_RNA (1)...(19): siRNA sense strand
aaagaaagucacaucaaga

SEQ ID NO: 2582946 - RNA, 19 nt, Homo sapiens
  misc_RNA (1)...(19): siRNA sense strand
ugaagaagaauuggagaga

SEQ ID NO: 2582947 - RNA, 19 nt, Homo sapiens
  misc_RNA (1)...(19): siRNA sense strand
cucggaaugcugaaagaaa

SEQ ID NO: 2582948 - RNA, 19 nt, Homo sapiens
  misc_RNA (1)...(19): siRNA sense strand
augaaacuccacaggaaau

SEQ ID NO: 2582949 - RNA, 19 nt, Homo sapiens
  misc_RNA (1)...(19): siRNA sense strand
agcuggagaccuauagaaa

SEQ ID NO: 2582950 - RNA, 19 nt, Homo sapiens
  misc_RNA (1)...(19): siRNA sense strand
cucacgaggcccagggaau

SEQ ID NO: 2582951 - RNA, 19 nt, Homo sapiens
  misc_RNA (1)...(19): siRNA sense strand
aagcugaaguauggaaaga

SEQ ID NO: 2582952 - RNA, 19 nt, Homo sapiens
  misc_RNA (1)...(19): siRNA sense strand
aggagaaagaaaccaaauu

SEQ ID NO: 2582953 - RNA, 19 nt, Homo sapiens
  misc_RNA (1)...(19): siRNA sense strand
gaacgacugaagauagcaa

SEQ ID NO: 2582954 - RNA, 19 nt, Homo sapiens
  misc_RNA (1)...(19): siRNA sense strand
acuccaaaguacaugcaga

SEQ ID NO: 2582955 - RNA, 19 nt, Homo sapiens
  misc_RNA (1)...(19): siRNA sense strand
cacaaguagcugaagccaa

SEQ ID NO: 2582956 - RNA, 19 nt, Homo sapiens
  misc_RNA (1)...(19): siRNA sense strand
augaacagugaaucggaaa

SEQ ID NO: 2582957 - RNA, 19 nt, Homo sapiens
  misc_RNA (1)...(19): siRNA sense strand
cugaaagaaaccucaauga

SEQ ID NO: 2582958 - RNA, 19 nt, Homo sapiens
  misc_RNA (1)...(19): siRNA sense strand
agaagcugaaguauggaaa

SEQ ID NO: 2582959 - RNA, 19 nt, Homo sapiens
  misc_RNA (1)...(19): siRNA sense strand
gguuagagaaagaagagaa

SEQ ID NO: 2582960 - RNA, 19 nt, Homo sapiens
  misc_RNA (1)...(19): siRNA sense strand
caaugaaagaggagaauca

SEQ ID NO: 2582961 - RNA, 19 nt, Homo sapiens
  misc_RNA (1)...(19): siRNA sense strand
guuagagaaagaagagaaa

SEQ ID NO: 2582962 - RNA, 19 nt, Homo sapiens
  misc_RNA (1)...(19): siRNA sense strand
aagaagaauuggagagaac

SEQ ID NO: 2582963 - RNA, 19 nt, Homo sapiens
  misc_RNA (1)...(19): siRNA sense strand
cuauagaaagcgagccaaa

SEQ ID NO: 2582964 - RNA, 19 nt, Homo sapiens
  misc_RNA (1)...(19): siRNA sense strand
gggucaaugccuucagaaa

SEQ ID NO: 2582965 - RNA, 19 nt, Homo sapiens
  misc_RNA (1)...(19): siRNA sense strand
uuaugugggacgagagaaa

SEQ ID NO: 2582966 - RNA, 19 nt, Homo sapiens
  misc_RNA (1)...(19): siRNA sense strand
ggaagagcuuacagagcau

SEQ ID NO: 2582967 - RNA, 19 nt, Homo sapiens
  misc_RNA (1)...(19): siRNA sense strand
ucaaaugaaugaagaacga

SEQ ID NO: 2582968 - RNA, 19 nt, Homo sapiens
  misc_RNA (1)...(19): siRNA sense strand
acauaacggaugaugauaa

SEQ ID NO: 2582969 - RNA, 19 nt, Homo sapiens
  misc_RNA (1)...(19): siRNA sense strand
augaauugauggcggauau

SEQ ID NO: 2582970 - RNA, 19 nt, Homo sapiens
  misc_RNA (1)...(19): siRNA sense strand
ggauaaaauggauggguca

SEQ ID NO: 2582971 - RNA, 19 nt, Homo sapiens
  misc_RNA (1)...(19): siRNA sense strand
ggaaauuaacaguagagga

SEQ ID NO: 2582972 - RNA, 19 nt, Homo sapiens
  misc_RNA (1)...(19): siRNA sense strand
cucuagaagaugagucaaa

SEQ ID NO: 2582973 - RNA, 19 nt, Homo sapiens
  misc_RNA (1)...(19): siRNA sense strand
ugaaguauggaaagaacaa

SEQ ID NO: 2582974 - RNA, 19 nt, Homo sapiens
  misc_RNA (1)...(19): siRNA sense strand
ucuaaugcuuucuggacua

SEQ ID NO: 2582975 - RNA, 19 nt, Homo sapiens
  misc_RNA (1)...(19): siRNA sense strand
aaucagagguccauuguuu

SEQ ID NO: 2582976 - RNA, 19 nt, Homo sapiens
  misc_RNA (1)...(19): siRNA sense strand
caaaaugaccuucaagaua

SEQ ID NO: 2582977 - RNA, 19 nt, Homo sapiens
  misc_RNA (1)...(19): siRNA sense strand
gcaucuuugcagucagaaa

SEQ ID NO: 2582978 - RNA, 19 nt, Homo sapiens
  misc_RNA (1)...(19): siRNA sense strand
auccaaacauucugaacaa

SEQ ID NO: 2582979 - RNA, 19 nt, Homo sapiens
  misc_RNA (1)...(19): siRNA sense strand
agacauaacggaugaugau

SEQ ID NO: 2582980 - RNA, 19 nt, Homo sapiens
  misc_RNA (1)...(19): siRNA sense strand
cacaaaggcaagacagauu

SEQ ID NO: 2582981 - RNA, 19 nt, Homo sapiens
  misc_RNA (1)...(19): siRNA sense strand
uagagaaagaagagaaacu

SEQ ID NO: 2582982 - RNA, 19 nt, Homo sapiens
  misc_RNA (1)...(19): siRNA sense strand
ugaacuugaggaugaaaua

SEQ ID NO: 2582983 - RNA, 19 nt, Homo sapiens
  misc_RNA (1)...(19): siRNA sense strand
agaaggagaaagaaaccaa

SEQ ID NO: 2582984 - RNA, 19 nt, Homo sapiens
  misc_RNA (1)...(19): siRNA sense strand
aaacaaaggaagagcuuac

SEQ ID NO: 2582985 - RNA, 19 nt, Homo sapiens
  misc_RNA (1)...(19): siRNA sense strand
ccaaaguacaugcagaaca

SEQ ID NO: 2582986 - RNA, 19 nt, Homo sapiens
  misc_RNA (1)...(19): siRNA sense strand
ucagauuaccaaugaaaga

SEQ ID NO: 2582987 - RNA, 19 nt, Homo sapiens
  misc_RNA (1)...(19): siRNA sense strand
aggcuaugaaguagaguca

SEQ ID NO: 2582988 - RNA, 19 nt, Homo sapiens
  misc_RNA (1)...(19): siRNA sense strand
aaugaaacuccacaggaaa

SEQ ID NO: 2582989 - RNA, 19 nt, Homo sapiens
  misc_RNA (1)...(19): siRNA sense strand
uaccaaugaaagaggagaa

SEQ ID NO: 2582990 - RNA, 19 nt, Homo sapiens
  misc_RNA (1)...(19): siRNA sense strand
ggaggcaacagaagcacaa

SEQ ID NO: 2582991 - RNA, 19 nt, Homo sapiens
  misc_RNA (1)...(19): siRNA sense strand
cuccaaaguacaugcagaa

SEQ ID NO: 2582992 - RNA, 19 nt, Homo sapiens
  misc_RNA (1)...(19): siRNA sense strand
gaaaauuaucgguuagaga

SEQ ID NO: 2582993 - RNA, 19 nt, Homo sapiens
  misc_RNA (1)...(19): siRNA sense strand
acgacugaagauagcaaua

SEQ ID NO: 2582994 - RNA, 19 nt, Homo sapiens
  misc_RNA (1)...(19): siRNA sense strand
agaggaaaauuaucgguua

SEQ ID NO: 2582995 - RNA, 19 nt, Homo sapiens
  misc_RNA (1)...(19): siRNA sense strand
cuuuaaaggaugccagcuu

SEQ ID NO: 2582996 - RNA, 19 nt, Homo sapiens
  misc_RNA (1)...(19): siRNA sense strand
ccagaaccacagcaagaaa

SEQ ID NO: 2582997 - RNA, 19 nt, Homo sapiens
  misc_RNA (1)...(19): siRNA sense strand
ggaugaaauacucugucua

SEQ ID NO: 2582998 - RNA, 19 nt, Homo sapiens
  misc_RNA (1)...(19): siRNA sense strand
aggaagagcuuacagagca

SEQ ID NO: 2582999 - RNA, 19 nt, Homo sapiens
  misc_RNA (1)...(19): siRNA sense strand
augaagaacgacugaagau

SEQ ID NO: 2583000 - RNA, 19 nt, Homo sapiens
  misc_RNA (1)...(19): siRNA sense strand
ugaagaacgacugaagaua

SEQ ID NO: 2583001 - RNA, 19 nt, Homo sapiens
  misc_RNA (1)...(19): siRNA sense strand
gcuuguuaaagaugaaaga

SEQ ID NO: 2583002 - RNA, 19 nt, Homo sapiens
  misc_RNA (1)...(19): siRNA sense strand
ggaaagaaaaugcucacaa

SEQ ID NO: 2583003 - RNA, 19 nt, Homo sapiens
  misc_RNA (1)...(19): siRNA sense strand
aaagaaagucacaucaaga

SEQ ID NO: 2583004 - RNA, 19 nt, Homo sapiens
  misc_RNA (1)...(19): siRNA sense strand
ugaagaagaauuggagaga

SEQ ID NO: 2583005 - RNA, 19 nt, Homo sapiens
  misc_RNA (1)...(19): siRNA sense strand
cucggaaugcugaaagaaa

SEQ ID NO: 2583006 - RNA, 19 nt, Homo sapiens
  misc_RNA (1)...(19): siRNA sense strand
augaaacuccacaggaaau

SEQ ID NO: 2583007 - RNA, 19 nt, Homo sapiens
  misc_RNA (1)...(19): siRNA sense strand
agcuggagaccuauagaaa

SEQ ID NO: 2583008 - RNA, 19 nt, Homo sapiens
  misc_RNA (1)...(19): siRNA sense strand
cucacgaggcccagggaau

SEQ ID NO: 2583009 - RNA, 19 nt, Homo sapiens
  misc_RNA (1)...(19): siRNA sense strand
aagcugaaguauggaaaga

SEQ ID NO: 2583010 - RNA, 19 nt, Homo sapiens
  misc_RNA (1)...(19): siRNA sense strand
aggagaaagaaaccaaauu

SEQ ID NO: 2583011 - RNA, 19 nt, Homo sapiens
  misc_RNA (1)...(19): siRNA sense strand
gaacgacugaagauagcaa

SEQ ID NO: 2583012 - RNA, 19 nt, Homo sapiens
  misc_RNA (1)...(19): siRNA sense strand
acuccaaaguacaugcaga

SEQ ID NO: 2583013 - RNA, 19 nt, Homo sapiens
  misc_RNA (1)...(19): siRNA sense strand
cacaaguagcugaagccaa

SEQ ID NO: 2583014 - RNA, 19 nt, Homo sapiens
  misc_RNA (1)...(19): siRNA sense strand
augaacagugaaucggaaa

SEQ ID NO: 2583015 - RNA, 19 nt, Homo sapiens
  misc_RNA (1)...(19): siRNA sense strand
cugaaagaaaccucaauga

SEQ ID NO: 2583016 - RNA, 19 nt, Homo sapiens
  misc_RNA (1)...(19): siRNA sense strand
agaagcugaaguauggaaa

SEQ ID NO: 2583017 - RNA, 19 nt, Homo sapiens
  misc_RNA (1)...(19): siRNA sense strand
gguuagagaaagaagagaa

SEQ ID NO: 2583018 - RNA, 19 nt, Homo sapiens
  misc_RNA (1)...(19): siRNA sense strand
caaugaaagaggagaauca

SEQ ID NO: 2583019 - RNA, 19 nt, Homo sapiens
  misc_RNA (1)...(19): siRNA sense strand
guuagagaaagaagagaaa

SEQ ID NO: 2583020 - RNA, 19 nt, Homo sapiens
  misc_RNA (1)...(19): siRNA sense strand
aagaagaauuggagagaac

SEQ ID NO: 2583021 - RNA, 19 nt, Homo sapiens
  misc_RNA (1)...(19): siRNA sense strand
cuauagaaagcgagccaaa

SEQ ID NO: 2583022 - RNA, 19 nt, Homo sapiens
  misc_RNA (1)...(19): siRNA sense strand
gggucaaugccuucagaaa

SEQ ID NO: 2583023 - RNA, 19 nt, Homo sapiens
  misc_RNA (1)...(19): siRNA sense strand
uuaugugggacgagagaaa

SEQ ID NO: 2583024 - RNA, 19 nt, Homo sapiens
  misc_RNA (1)...(19): siRNA sense strand
ggaagagcuuacagagcau

SEQ ID NO: 2583025 - RNA, 19 nt, Homo sapiens
  misc_RNA (1)...(19): siRNA sense strand
ucaaaugaaugaagaacga

SEQ ID NO: 2583026 - RNA, 19 nt, Homo sapiens
  misc_RNA (1)...(19): siRNA sense strand
acauaacggaugaugauaa

SEQ ID NO: 2583027 - RNA, 19 nt, Homo sapiens
  misc_RNA (1)...(19): siRNA sense strand
augaauugauggcggauau

SEQ ID NO: 2583028 - RNA, 19 nt, Homo sapiens
  misc_RNA (1)...(19): siRNA sense strand
ggauaaaauggauggguca

SEQ ID NO: 2583029 - RNA, 19 nt, Homo sapiens
  misc_RNA (1)...(19): siRNA sense strand
ggaaauuaacaguagagga

SEQ ID NO: 2583030 - RNA, 19 nt, Homo sapiens
  misc_RNA (1)...(19): siRNA sense strand
cucuagaagaugagucaaa

SEQ ID NO: 2583031 - RNA, 19 nt, Homo sapiens
  misc_RNA (1)...(19): siRNA sense strand
ugaaguauggaaagaacaa

SEQ ID NO: 2583032 - RNA, 19 nt, Homo sapiens
  misc_RNA (1)...(19): siRNA sense strand
ucuaaugcuuucuggacua

SEQ ID NO: 2583033 - RNA, 19 nt, Homo sapiens
  misc_RNA (1)...(19): siRNA sense strand
aaucagagguccauuguuu

SEQ ID NO: 2583034 - RNA, 19 nt, Homo sapiens
  misc_RNA (1)...(19): siRNA sense strand
caaaaugaccuucaagaua

SEQ ID NO: 2583035 - RNA, 19 nt, Homo sapiens
  misc_RNA (1)...(19): siRNA sense strand
gcaucuuugcagucagaaa

SEQ ID NO: 2583036 - RNA, 19 nt, Homo sapiens
  misc_RNA (1)...(19): siRNA sense strand
auccaaacauucugaacaa

SEQ ID NO: 2583037 - RNA, 19 nt, Homo sapiens
  misc_RNA (1)...(19): siRNA sense strand
agacauaacggaugaugau

SEQ ID NO: 2583038 - RNA, 19 nt, Homo sapiens
  misc_RNA (1)...(19): siRNA sense strand
cacaaaggcaagacagauu

SEQ ID NO: 2583039 - RNA, 19 nt, Homo sapiens
  misc_RNA (1)...(19): siRNA sense strand
uagagaaagaagagaaacu

SEQ ID NO: 2583040 - RNA, 19 nt, Homo sapiens
  misc_RNA (1)...(19): siRNA sense strand
ugaacuugaggaugaaaua

SEQ ID NO: 2583041 - RNA, 19 nt, Homo sapiens
  misc_RNA (1)...(19): siRNA sense strand
agaaggagaaagaaaccaa

SEQ ID NO: 2583042 - RNA, 19 nt, Homo sapiens
  misc_RNA (1)...(19): siRNA sense strand
aaacaaaggaagagcuuac

SEQ ID NO: 2583043 - RNA, 19 nt, Homo sapiens
  misc_RNA (1)...(19): siRNA sense strand
ccaaaguacaugcagaaca

SEQ ID NO: 2583044 - RNA, 19 nt, Homo sapiens
  misc_RNA (1)...(19): siRNA sense strand
ucagauuaccaaugaaaga

SEQ ID NO: 2583045 - RNA, 19 nt, Homo sapiens
  misc_RNA (1)...(19): siRNA sense strand
aggcuaugaaguagaguca

SEQ ID NO: 2583046 - RNA, 19 nt, Homo sapiens
  misc_RNA (1)...(19): siRNA sense strand
aaugaaacuccacaggaaa

SEQ ID NO: 2583047 - RNA, 19 nt, Homo sapiens
  misc_RNA (1)...(19): siRNA sense strand
uaccaaugaaagaggagaa

SEQ ID NO: 2583048 - RNA, 19 nt, Homo sapiens
  misc_RNA (1)...(19): siRNA sense strand
ggaggcaacagaagcacaa

SEQ ID NO: 2583049 - RNA, 19 nt, Homo sapiens
  misc_RNA (1)...(19): siRNA sense strand
cuccaaaguacaugcagaa

SEQ ID NO: 2583050 - RNA, 19 nt, Homo sapiens
  misc_RNA (1)...(19): siRNA sense strand
gaaaauuaucgguuagaga

SEQ ID NO: 2583051 - RNA, 19 nt, Homo sapiens
  misc_RNA (1)...(19): siRNA sense strand
acgacugaagauagcaaua

SEQ ID NO: 2583052 - RNA, 19 nt, Homo sapiens
  misc_RNA (1)...(19): siRNA sense strand
agaggaaaauuaucgguua

SEQ ID NO: 2583053 - RNA, 19 nt, Homo sapiens
  misc_RNA (1)...(19): siRNA sense strand
cuuuaaaggaugccagcuu

SEQ ID NO: 2583054 - RNA, 19 nt, Homo sapiens
  misc_RNA (1)...(19): siRNA sense strand
ccagaaccacagcaagaaa

SEQ ID NO: 2583055 - RNA, 19 nt, Homo sapiens
  misc_RNA (1)...(19): siRNA sense strand
ggaugaaauacucugucua

SEQ ID NO: 2583056 - RNA, 19 nt, Homo sapiens
  misc_RNA (1)...(19): siRNA sense strand
aggaagagcuuacagagca

SEQ ID NO: 2583057 - RNA, 19 nt, Homo sapiens
  misc_RNA (1)...(19): siRNA sense strand
augaagaacgacugaagau

SEQ ID NO: 2583058 - RNA, 19 nt, Homo sapiens
  misc_RNA (1)...(19): siRNA sense strand
ugaagaacgacugaagaua

SEQ ID NO: 2583059 - RNA, 19 nt, Homo sapiens
  misc_RNA (1)...(19): siRNA sense strand
gcuuguuaaagaugaaaga

SEQ ID NO: 2583060 - RNA, 19 nt, Homo sapiens
  misc_RNA (1)...(19): siRNA sense strand
ggaaagaaaaugcucacaa

SEQ ID NO: 2583061 - RNA, 19 nt, Homo sapiens
  misc_RNA (1)...(19): siRNA sense strand
aaagaaagucacaucaaga

SEQ ID NO: 2583062 - RNA, 19 nt, Homo sapiens
  misc_RNA (1)...(19): siRNA sense strand
ugaagaagaauuggagaga

SEQ ID NO: 2583063 - RNA, 19 nt, Homo sapiens
  misc_RNA (1)...(19): siRNA sense strand
cucggaaugcugaaagaaa

SEQ ID NO: 2583064 - RNA, 19 nt, Homo sapiens
  misc_RNA (1)...(19): siRNA sense strand
augaaacuccacaggaaau

SEQ ID NO: 2583065 - RNA, 19 nt, Homo sapiens
  misc_RNA (1)...(19): siRNA sense strand
agcuggagaccuauagaaa

SEQ ID NO: 2583066 - RNA, 19 nt, Homo sapiens
  misc_RNA (1)...(19): siRNA sense strand
cucacgaggcccagggaau

SEQ ID NO: 2583067 - RNA, 19 nt, Homo sapiens
  misc_RNA (1)...(19): siRNA sense strand
aagcugaaguauggaaaga

SEQ ID NO: 2583068 - RNA, 19 nt, Homo sapiens
  misc_RNA (1)...(19): siRNA sense strand
aggagaaagaaaccaaauu

SEQ ID NO: 2583069 - RNA, 19 nt, Homo sapiens
  misc_RNA (1)...(19): siRNA sense strand
gaacgacugaagauagcaa

SEQ ID NO: 2583070 - RNA, 19 nt, Homo sapiens
  misc_RNA (1)...(19): siRNA sense strand
acuccaaaguacaugcaga

SEQ ID NO: 2583071 - RNA, 19 nt, Homo sapiens
  misc_RNA (1)...(19): siRNA sense strand
cacaaguagcugaagccaa

SEQ ID NO: 2583072 - RNA, 19 nt, Homo sapiens
  misc_RNA (1)...(19): siRNA sense strand
augaacagugaaucggaaa

SEQ ID NO: 2583073 - RNA, 19 nt, Homo sapiens
  misc_RNA (1)...(19): siRNA sense strand
cugaaagaaaccucaauga

SEQ ID NO: 2583074 - RNA, 19 nt, Homo sapiens
  misc_RNA (1)...(19): siRNA sense strand
agaagcugaaguauggaaa

SEQ ID NO: 2583075 - RNA, 19 nt, Homo sapiens
  misc_RNA (1)...(19): siRNA sense strand
gguuagagaaagaagagaa

SEQ ID NO: 2583076 - RNA, 19 nt, Homo sapiens
  misc_RNA (1)...(19): siRNA sense strand
caaugaaagaggagaauca

SEQ ID NO: 2583077 - RNA, 19 nt, Homo sapiens
  misc_RNA (1)...(19): siRNA sense strand
guuagagaaagaagagaaa

SEQ ID NO: 2583078 - RNA, 19 nt, Homo sapiens
  misc_RNA (1)...(19): siRNA sense strand
aagaagaauuggagagaac

SEQ ID NO: 2583079 - RNA, 19 nt, Homo sapiens
  misc_RNA (1)...(19): siRNA sense strand
cuauagaaagcgagccaaa

SEQ ID NO: 2583080 - RNA, 19 nt, Homo sapiens
  misc_RNA (1)...(19): siRNA sense strand
gggucaaugccuucagaaa

SEQ ID NO: 2583081 - RNA, 19 nt, Homo sapiens
  misc_RNA (1)...(19): siRNA sense strand
ggaagagcuuacagagcau

SEQ ID NO: 2583082 - RNA, 19 nt, Homo sapiens
  misc_RNA (1)...(19): siRNA sense strand
ucaaaugaaugaagaacga

SEQ ID NO: 2583083 - RNA, 19 nt, Homo sapiens
  misc_RNA (1)...(19): siRNA sense strand
acauaacggaugaugauaa

SEQ ID NO: 2583084 - RNA, 19 nt, Homo sapiens
  misc_RNA (1)...(19): siRNA sense strand
augaauugauggcggauau

SEQ ID NO: 2583085 - RNA, 19 nt, Homo sapiens
  misc_RNA (1)...(19): siRNA sense strand
ggauaaaauggauggguca

SEQ ID NO: 2583086 - RNA, 19 nt, Homo sapiens
  misc_RNA (1)...(19): siRNA sense strand
ggaaauuaacaguagagga

SEQ ID NO: 2583087 - RNA, 19 nt, Homo sapiens
  misc_RNA (1)...(19): siRNA sense strand
cucuagaagaugagucaaa

SEQ ID NO: 2583088 - RNA, 19 nt, Homo sapiens
  misc_RNA (1)...(19): siRNA sense strand
ugaaguauggaaagaacaa

SEQ ID NO: 2583089 - RNA, 19 nt, Homo sapiens
  misc_RNA (1)...(19): siRNA sense strand
aaucagagguccauuguuu

SEQ ID NO: 2583090 - RNA, 19 nt, Homo sapiens
  misc_RNA (1)...(19): siRNA sense strand
caaaaugaccuucaagaua

SEQ ID NO: 2583091 - RNA, 19 nt, Homo sapiens
  misc_RNA (1)...(19): siRNA sense strand
gcaucuuugcagucagaaa

SEQ ID NO: 2583092 - RNA, 19 nt, Homo sapiens
  misc_RNA (1)...(19): siRNA sense strand
auccaaacauucugaacaa

SEQ ID NO: 2583093 - RNA, 19 nt, Homo sapiens
  misc_RNA (1)...(19): siRNA sense strand
agacauaacggaugaugau

SEQ ID NO: 2583094 - RNA, 19 nt, Homo sapiens
  misc_RNA (1)...(19): siRNA sense strand
cacaaaggcaagacagauu

SEQ ID NO: 2583095 - RNA, 19 nt, Homo sapiens
  misc_RNA (1)...(19): siRNA sense strand
uagagaaagaagagaaacu

SEQ ID NO: 2583096 - RNA, 19 nt, Homo sapiens
  misc_RNA (1)...(19): siRNA sense strand
ugaacuugaggaugaaaua

SEQ ID NO: 2583097 - RNA, 19 nt, Homo sapiens
  misc_RNA (1)...(19): siRNA sense strand
agaaggagaaagaaaccaa

SEQ ID NO: 2583098 - RNA, 19 nt, Homo sapiens
  misc_RNA (1)...(19): siRNA sense strand
aaacaaaggaagagcuuac

SEQ ID NO: 2583099 - RNA, 19 nt, Homo sapiens
  misc_RNA (1)...(19): siRNA sense strand
ccaaaguacaugcagaaca

SEQ ID NO: 2583100 - RNA, 19 nt, Homo sapiens
  misc_RNA (1)...(19): siRNA sense strand
ucagauuaccaaugaaaga

SEQ ID NO: 2583101 - RNA, 19 nt, Homo sapiens
  misc_RNA (1)...(19): siRNA sense strand
aggcuaugaaguagaguca

SEQ ID NO: 2583102 - RNA, 19 nt, Homo sapiens
  misc_RNA (1)...(19): siRNA sense strand
aaugaaacuccacaggaaa

SEQ ID NO: 2583103 - RNA, 19 nt, Homo sapiens
  misc_RNA (1)...(19): siRNA sense strand
uaccaaugaaagaggagaa

SEQ ID NO: 2583104 - RNA, 19 nt, Homo sapiens
  misc_RNA (1)...(19): siRNA sense strand
ggaggcaacagaagcacaa

SEQ ID NO: 2583105 - RNA, 19 nt, Homo sapiens
  misc_RNA (1)...(19): siRNA sense strand
cuccaaaguacaugcagaa

SEQ ID NO: 2583106 - RNA, 19 nt, Homo sapiens
  misc_RNA (1)...(19): siRNA sense strand
gaaaauuaucgguuagaga

SEQ ID NO: 2583107 - RNA, 19 nt, Homo sapiens
  misc_RNA (1)...(19): siRNA sense strand
acgacugaagauagcaaua

SEQ ID NO: 2583108 - RNA, 19 nt, Homo sapiens
  misc_RNA (1)...(19): siRNA sense strand
cuuuaaaggaugccagcuu

SEQ ID NO: 2583109 - RNA, 19 nt, Homo sapiens
  misc_RNA (1)...(19): siRNA sense strand
agaggaaaauuaucgguua

SEQ ID NO: 2583110 - RNA, 19 nt, Homo sapiens
  misc_RNA (1)...(19): siRNA sense strand
ccagaaccacagcaagaaa

SEQ ID NO: 2583111 - RNA, 19 nt, Homo sapiens
  misc_RNA (1)...(19): siRNA sense strand
ggaugaaauacucugucua

SEQ ID NO: 2583112 - RNA, 19 nt, Homo sapiens
  misc_RNA (1)...(19): siRNA sense strand
aggaagagcuuacagagca

SEQ ID NO: 2583113 - RNA, 19 nt, Homo sapiens
  misc_RNA (1)...(19): siRNA sense strand
augaagaacgacugaagau

SEQ ID NO: 2583114 - RNA, 19 nt, Homo sapiens
  misc_RNA (1)...(19): siRNA sense strand
ugaagaacgacugaagaua

SEQ ID NO: 2583115 - RNA, 19 nt, Homo sapiens
  misc_RNA (1)...(19): siRNA sense strand
gcuuguuaaagaugaaaga

SEQ ID NO: 2583116 - RNA, 19 nt, Homo sapiens
  misc_RNA (1)...(19): siRNA sense strand
ggaaagaaaaugcucacaa

SEQ ID NO: 2583117 - RNA, 19 nt, Homo sapiens
  misc_RNA (1)...(19): siRNA sense strand
aaagaaagucacaucaaga

SEQ ID NO: 2583118 - RNA, 19 nt, Homo sapiens
  misc_RNA (1)...(19): siRNA sense strand
ugaagaagaauuggagaga

SEQ ID NO: 2583119 - RNA, 19 nt, Homo sapiens
  misc_RNA (1)...(19): siRNA sense strand
cucggaaugcugaaagaaa

SEQ ID NO: 2583120 - RNA, 19 nt, Homo sapiens
  misc_RNA (1)...(19): siRNA sense strand
augaaacuccacaggaaau

SEQ ID NO: 2583121 - RNA, 19 nt, Homo sapiens
  misc_RNA (1)...(19): siRNA sense strand
agcuggagaccuauagaaa

SEQ ID NO: 2583122 - RNA, 19 nt, Homo sapiens
  misc_RNA (1)...(19): siRNA sense strand
cucacgaggcccagggaau

SEQ ID NO: 2583123 - RNA, 19 nt, Homo sapiens
  misc_RNA (1)...(19): siRNA sense strand
aagcugaaguauggaaaga

SEQ ID NO: 2583124 - RNA, 19 nt, Homo sapiens
  misc_RNA (1)...(19): siRNA sense strand
aggagaaagaaaccaaauu

SEQ ID NO: 2583125 - RNA, 19 nt, Homo sapiens
  misc_RNA (1)...(19): siRNA sense strand
gaacgacugaagauagcaa

SEQ ID NO: 2583126 - RNA, 19 nt, Homo sapiens
  misc_RNA (1)...(19): siRNA sense strand
acuccaaaguacaugcaga

SEQ ID NO: 2583127 - RNA, 19 nt, Homo sapiens
  misc_RNA (1)...(19): siRNA sense strand
cacaaguagcugaagccaa

SEQ ID NO: 2583128 - RNA, 19 nt, Homo sapiens
  misc_RNA (1)...(19): siRNA sense strand
augaacagugaaucggaaa

SEQ ID NO: 2583129 - RNA, 19 nt, Homo sapiens
  misc_RNA (1)...(19): siRNA sense strand
cugaaagaaaccucaauga

SEQ ID NO: 2583130 - RNA, 19 nt, Homo sapiens
  misc_RNA (1)...(19): siRNA sense strand
agaagcugaaguauggaaa

SEQ ID NO: 2583131 - RNA, 19 nt, Homo sapiens
  misc_RNA (1)...(19): siRNA sense strand
acaucaagacucugacuga

SEQ ID NO: 2583132 - RNA, 19 nt, Homo sapiens
  misc_RNA (1)...(19): siRNA sense strand
gaacaagcaucuuugcagu

SEQ ID NO: 2583133 - RNA, 19 nt, Homo sapiens
  misc_RNA (1)...(19): siRNA sense strand
gaacaaaagcggaaggaaa

SEQ ID NO: 2583134 - RNA, 19 nt, Homo sapiens
  misc_RNA (1)...(19): siRNA sense strand
uggaagaagaggaaaguaa

SEQ ID NO: 2583135 - RNA, 19 nt, Homo sapiens
  misc_RNA (1)...(19): siRNA sense strand
uuauagaggaugaggauua

SEQ ID NO: 2583136 - RNA, 19 nt, Homo sapiens
  misc_RNA (1)...(19): siRNA sense strand
acugaaagagggagaaaua

SEQ ID NO: 2583137 - RNA, 19 nt, Homo sapiens
  misc_RNA (1)...(19): siRNA sense strand
ggugacaacuggugaggaa

SEQ ID NO: 2583138 - RNA, 19 nt, Homo sapiens
  misc_RNA (1)...(19): siRNA sense strand
ugaaagagggagaaauaaa

SEQ ID NO: 2583139 - RNA, 19 nt, Homo sapiens
  misc_RNA (1)...(19): siRNA sense strand
aaagaaagggagaggaaau

SEQ ID NO: 2583140 - RNA, 19 nt, Homo sapiens
  misc_RNA (1)...(19): siRNA sense strand
gcaagauugagaagaguaa

SEQ ID NO: 2583141 - RNA, 19 nt, Homo sapiens
  misc_RNA (1)...(19): siRNA sense strand
cagaguuaccaaagggaaa

SEQ ID NO: 2583142 - RNA, 19 nt, Homo sapiens
  misc_RNA (1)...(19): siRNA sense strand
gcggagaggaugagcaauu

SEQ ID NO: 2583143 - RNA, 19 nt, Homo sapiens
  misc_RNA (1)...(19): siRNA sense strand
auaaagaaagggagaggaa

SEQ ID NO: 2583144 - RNA, 19 nt, Homo sapiens
  misc_RNA (1)...(19): siRNA sense strand
ccacaaagaagaagaaagu

SEQ ID NO: 2583145 - RNA, 19 nt, Homo sapiens
  misc_RNA (1)...(19): siRNA sense strand
uagaaggagucaagaggaa

SEQ ID NO: 2583146 - RNA, 19 nt, Homo sapiens
  misc_RNA (1)...(19): siRNA sense strand
cgaagugguuccugagaau

SEQ ID NO: 2583147 - RNA, 19 nt, Homo sapiens
  misc_RNA (1)...(19): siRNA sense strand
ccugaggagcggagcgaua

SEQ ID NO: 2583148 - RNA, 19 nt, Homo sapiens
  misc_RNA (1)...(19): siRNA sense strand
gaagauggaccaagggaau

SEQ ID NO: 2583149 - RNA, 19 nt, Homo sapiens
  misc_RNA (1)...(19): siRNA sense strand
ggagauaagaucaagaaga

SEQ ID NO: 2583150 - RNA, 19 nt, Homo sapiens
  misc_RNA (1)...(19): siRNA sense strand
cggaaguguuugaagauga

SEQ ID NO: 2583151 - RNA, 19 nt, Homo sapiens
  misc_RNA (1)...(19): siRNA sense strand
uguaauaagugccgaaaca

SEQ ID NO: 2583152 - RNA, 19 nt, Homo sapiens
  misc_RNA (1)...(19): siRNA sense strand
caauagacagugugcguua

SEQ ID NO: 2583153 - RNA, 19 nt, Homo sapiens
  misc_RNA (1)...(19): siRNA sense strand
aggaaagagaaaaggaaaa

SEQ ID NO: 2583154 - RNA, 19 nt, Homo sapiens
  misc_RNA (1)...(19): siRNA sense strand
acccaaagguccuggagaa

SEQ ID NO: 2583155 - RNA, 19 nt, Homo sapiens
  misc_RNA (1)...(19): siRNA sense strand
gcauagaagacaauagaca

SEQ ID NO: 2583156 - RNA, 19 nt, Homo sapiens
  misc_RNA (1)...(19): siRNA sense strand
ccagugugauggagacaaa

SEQ ID NO: 2583157 - RNA, 19 nt, Homo sapiens
  misc_RNA (1)...(19): siRNA sense strand
gcaugggacuggagcagaa

SEQ ID NO: 2583158 - RNA, 19 nt, Homo sapiens
  misc_RNA (1)...(19): siRNA sense strand
aagaagaggaggagguaca

SEQ ID NO: 2583159 - RNA, 19 nt, Homo sapiens
  misc_RNA (1)...(19): siRNA sense strand
agagagaaaaggagaauaa

SEQ ID NO: 2583160 - RNA, 19 nt, Homo sapiens
  misc_RNA (1)...(19): siRNA sense strand
gagaguaaugauaggagaa

SEQ ID NO: 2583161 - RNA, 19 nt, Homo sapiens
  misc_RNA (1)...(19): siRNA sense strand
uggcaauaguucuaagcaa

SEQ ID NO: 2583162 - RNA, 19 nt, Homo sapiens
  misc_RNA (1)...(19): siRNA sense strand
ccagaaggagugugggcaa

SEQ ID NO: 2583163 - RNA, 19 nt, Homo sapiens
  misc_RNA (1)...(19): siRNA sense strand
aaggaaugaucgagaccaa

SEQ ID NO: 2583164 - RNA, 19 nt, Homo sapiens
  misc_RNA (1)...(19): siRNA sense strand
ucgaaaaccucgugggaga

SEQ ID NO: 2583165 - RNA, 19 nt, Homo sapiens
  misc_RNA (1)...(19): siRNA sense strand
gacaagaaguggaaggcuu

SEQ ID NO: 2583166 - RNA, 19 nt, Homo sapiens
  misc_RNA (1)...(19): siRNA sense strand
ggagucaaggaaagagaaa

SEQ ID NO: 2583167 - RNA, 19 nt, Homo sapiens
  misc_RNA (1)...(19): siRNA sense strand
ccaucaacagaaaggauaa

SEQ ID NO: 2583168 - RNA, 19 nt, Homo sapiens
  misc_RNA (1)...(19): siRNA sense strand
agagaagguuguuggugaa

SEQ ID NO: 2583169 - RNA, 19 nt, Homo sapiens
  misc_RNA (1)...(19): siRNA sense strand
ggauacaacagcugucaaa

SEQ ID NO: 2583170 - RNA, 19 nt, Homo sapiens
  misc_RNA (1)...(19): siRNA sense strand
ggaucagaguggacuuuaa

SEQ ID NO: 2583171 - RNA, 19 nt, Homo sapiens
  misc_RNA (1)...(19): siRNA sense strand
cagagauaggagacagaaa

SEQ ID NO: 2583172 - RNA, 19 nt, Homo sapiens
  misc_RNA (1)...(19): siRNA sense strand
aggagaagcagaagguauu

SEQ ID NO: 2583173 - RNA, 19 nt, Homo sapiens
  misc_RNA (1)...(19): siRNA sense strand
acuuaaaucccgagacaga

SEQ ID NO: 2583174 - RNA, 19 nt, Homo sapiens
  misc_RNA (1)...(19): siRNA sense strand
acaagaaguggaaggcuua

SEQ ID NO: 2583175 - RNA, 19 nt, Homo sapiens
  misc_RNA (1)...(19): siRNA sense strand
gugaaaagaaagacagcaa

SEQ ID NO: 2583176 - RNA, 19 nt, Homo sapiens
  misc_RNA (1)...(19): siRNA sense strand
augaugacuaugagaguaa

SEQ ID NO: 2583177 - RNA, 19 nt, Homo sapiens
  misc_RNA (1)...(19): siRNA sense strand
ggaagauggaccaagggaa

SEQ ID NO: 2583178 - RNA, 19 nt, Homo sapiens
  misc_RNA (1)...(19): siRNA sense strand
ggaucuucaucuucagaaa

SEQ ID NO: 2583179 - RNA, 19 nt, Homo sapiens
  misc_RNA (1)...(19): siRNA sense strand
agacaaagcccucgaagga

SEQ ID NO: 2583180 - RNA, 19 nt, Homo sapiens
  misc_RNA (1)...(19): siRNA sense strand
agagagaccgggagagaga

SEQ ID NO: 2583181 - RNA, 19 nt, Homo sapiens
  misc_RNA (1)...(19): siRNA sense strand
aagagaagguuguugguga

SEQ ID NO: 2583182 - RNA, 19 nt, Homo sapiens
  misc_RNA (1)...(19): siRNA sense strand
cagacugacaagcgggaaa

SEQ ID NO: 2583183 - RNA, 19 nt, Homo sapiens
  misc_RNA (1)...(19): siRNA sense strand
cagaaaguccggaaagaca

SEQ ID NO: 2583184 - RNA, 19 nt, Homo sapiens
  misc_RNA (1)...(19): siRNA sense strand
ggauuaagccaguuaggau

SEQ ID NO: 2583185 - RNA, 19 nt, Homo sapiens
  misc_RNA (1)...(19): siRNA sense strand
aaguacuaguuuagggcaa

SEQ ID NO: 2583186 - RNA, 19 nt, Homo sapiens
  misc_RNA (1)...(19): siRNA sense strand
ccccagaaaaugagaguaa

SEQ ID NO: 2583187 - RNA, 19 nt, Homo sapiens
  misc_RNA (1)...(19): siRNA sense strand
cagagaacuuaaagauuga

SEQ ID NO: 2583188 - RNA, 19 nt, Homo sapiens
  misc_RNA (1)...(19): siRNA sense strand
gggaauggcaagaagcaca

SEQ ID NO: 2583189 - RNA, 19 nt, Homo sapiens
  misc_RNA (1)...(19): siRNA sense strand
ggcaagaagcacaaaguuu

SEQ ID NO: 2583190 - RNA, 19 nt, Homo sapiens
  misc_RNA (1)...(19): siRNA sense strand
ggaagaagaggaaaguaau

SEQ ID NO: 2583191 - RNA, 19 nt, Homo sapiens
  misc_RNA (1)...(19): siRNA sense strand
acuuauaaagaaagggaga

SEQ ID NO: 2583192 - RNA, 19 nt, Homo sapiens
  misc_RNA (1)...(19): siRNA sense strand
uaucaguguuccaggguau

SEQ ID NO: 2583193 - RNA, 19 nt, Homo sapiens
  misc_RNA (1)...(19): siRNA sense strand
guucauaacacaacaucua

SEQ ID NO: 2583194 - RNA, 19 nt, Homo sapiens
  misc_RNA (1)...(19): siRNA sense strand
auagaaaagaagagaggaa

SEQ ID NO: 2583195 - RNA, 19 nt, Homo sapiens
  misc_RNA (1)...(19): siRNA sense strand
gcagaaaaugugugggaga

SEQ ID NO: 2583196 - RNA, 19 nt, Homo sapiens
  misc_RNA (1)...(19): siRNA sense strand
agacuuaaaucccgagaca

SEQ ID NO: 2583197 - RNA, 19 nt, Homo sapiens
  misc_RNA (1)...(19): siRNA sense strand
gcucuuuccuauuggauau

SEQ ID NO: 2583198 - RNA, 19 nt, Homo sapiens
  misc_RNA (1)...(19): siRNA sense strand
ugaacaagaaagugcagaa

SEQ ID NO: 2583199 - RNA, 19 nt, Homo sapiens
  misc_RNA (1)...(19): siRNA sense strand
ggaucuagaacgacgaaaa

SEQ ID NO: 2583200 - RNA, 19 nt, Homo sapiens
  misc_RNA (1)...(19): siRNA sense strand
cugacaagagcguggagaa

SEQ ID NO: 2583201 - RNA, 19 nt, Homo sapiens
  misc_RNA (1)...(19): siRNA sense strand
ccaaugagaacugggaaua

SEQ ID NO: 2583202 - RNA, 19 nt, Homo sapiens
  misc_RNA (1)...(19): siRNA sense strand
gaagccagccacugagaaa

SEQ ID NO: 2583203 - RNA, 19 nt, Homo sapiens
  misc_RNA (1)...(19): siRNA sense strand
ggaaagacaaggaaggaac

SEQ ID NO: 2583204 - RNA, 19 nt, Homo sapiens
  misc_RNA (1)...(19): siRNA sense strand
cagcaaaguaugccaaaga

SEQ ID NO: 2583205 - RNA, 19 nt, Homo sapiens
  misc_RNA (1)...(19): siRNA sense strand
gagaguaagaugaugcaau

SEQ ID NO: 2583206 - RNA, 19 nt, Homo sapiens
  misc_RNA (1)...(19): siRNA sense strand
gugccaaaguaguugauca

SEQ ID NO: 2583207 - RNA, 19 nt, Homo sapiens
  misc_RNA (1)...(19): siRNA sense strand
gggugagagcccagaguca

SEQ ID NO: 2583208 - RNA, 19 nt, Homo sapiens
  misc_RNA (1)...(19): siRNA sense strand
ccucucaagucuaaguuua

SEQ ID NO: 2583209 - RNA, 19 nt, Homo sapiens
  misc_RNA (1)...(19): siRNA sense strand
caaaguaaauggagggaga

SEQ ID NO: 2583210 - RNA, 19 nt, Homo sapiens
  misc_RNA (1)...(19): siRNA sense strand
acagaaaggacgugagaca

SEQ ID NO: 2583211 - RNA, 19 nt, Homo sapiens
  misc_RNA (1)...(19): siRNA sense strand
ggucagucuaugaaggaaa

SEQ ID NO: 2583212 - RNA, 19 nt, Homo sapiens
  misc_RNA (1)...(19): siRNA sense strand
ccuuggagguaguggaaga

SEQ ID NO: 2583213 - RNA, 19 nt, Homo sapiens
  misc_RNA (1)...(19): siRNA sense strand
acagauagaaagaggaaaa

SEQ ID NO: 2583214 - RNA, 19 nt, Homo sapiens
  misc_RNA (1)...(19): siRNA sense strand
agguaguggaagaggagaa

SEQ ID NO: 2583215 - RNA, 19 nt, Homo sapiens
  misc_RNA (1)...(19): siRNA sense strand
caagaaaagaggaggugaa

SEQ ID NO: 2583216 - RNA, 19 nt, Homo sapiens
  misc_RNA (1)...(19): siRNA sense strand
aaugcauaaugaagggaaa

SEQ ID NO: 2583217 - RNA, 19 nt, Homo sapiens
  misc_RNA (1)...(19): siRNA sense strand
ccugaaacaaauagcagua

SEQ ID NO: 2583218 - RNA, 19 nt, Homo sapiens
  misc_RNA (1)...(19): siRNA sense strand
uggauaagacugaagaaca

SEQ ID NO: 2583219 - RNA, 19 nt, Homo sapiens
  misc_RNA (1)...(19): siRNA sense strand
auacaugauuccugacaau

SEQ ID NO: 2583220 - RNA, 19 nt, Homo sapiens
  misc_RNA (1)...(19): siRNA sense strand
aaguaaauggagggagaua

SEQ ID NO: 2583221 - RNA, 19 nt, Homo sapiens
  misc_RNA (1)...(19): siRNA sense strand
agcaguagaucgaguggaa

SEQ ID NO: 2583222 - RNA, 19 nt, Homo sapiens
  misc_RNA (1)...(19): siRNA sense strand
cagaugacagagugguuaa

SEQ ID NO: 2583223 - RNA, 19 nt, Homo sapiens
  misc_RNA (1)...(19): siRNA sense strand
ccuauuauuucuauggaga

SEQ ID NO: 2583224 - RNA, 19 nt, Homo sapiens
  misc_RNA (1)...(19): siRNA sense strand
guggaagaauacugcgaga

SEQ ID NO: 2583225 - RNA, 19 nt, Homo sapiens
  misc_RNA (1)...(19): siRNA sense strand
ccauaaaaccugcccauaa

SEQ ID NO: 2583226 - RNA, 19 nt, Homo sapiens
  misc_RNA (1)...(19): siRNA sense strand
ggugaagacagaugacaga

SEQ ID NO: 2583227 - RNA, 19 nt, Homo sapiens
  misc_RNA (1)...(19): siRNA sense strand
aaaccaugguacaaggaau

SEQ ID NO: 2583228 - RNA, 19 nt, Homo sapiens
  misc_RNA (1)...(19): siRNA sense strand
aagaauacugcgagaaagu

SEQ ID NO: 2583229 - RNA, 19 nt, Homo sapiens
  misc_RNA (1)...(19): siRNA sense strand
gggaaaagaugcgggugaa

SEQ ID NO: 2583230 - RNA, 19 nt, Homo sapiens
  misc_RNA (1)...(19): siRNA sense strand
cgucuuguuuauugggaca

SEQ ID NO: 2583231 - RNA, 19 nt, Homo sapiens
  misc_RNA (1)...(19): siRNA sense strand
gguaguggaagaggagaaa

SEQ ID NO: 2583232 - RNA, 19 nt, Homo sapiens
  misc_RNA (1)...(19): siRNA sense strand
agagaugacaacaaaguau

SEQ ID NO: 2583233 - RNA, 19 nt, Homo sapiens
  misc_RNA (1)...(19): siRNA sense strand
gggcagagaauacugguga

SEQ ID NO: 2583234 - RNA, 19 nt, Homo sapiens
  misc_RNA (1)...(19): siRNA sense strand
aggcagggaccuuguauau

SEQ ID NO: 2583235 - RNA, 19 nt, Homo sapiens
  misc_RNA (1)...(19): siRNA sense strand
agaaggcacuggaggcaga

SEQ ID NO: 2583236 - RNA, 19 nt, Homo sapiens
  misc_RNA (1)...(19): siRNA sense strand
cuucaucagaguuggauau

SEQ ID NO: 2583237 - RNA, 19 nt, Homo sapiens
  misc_RNA (1)...(19): siRNA sense strand
aaauggaaucaauggaaga

SEQ ID NO: 2583238 - RNA, 19 nt, Homo sapiens
  misc_RNA (1)...(19): siRNA sense strand
cugacaaugaagacagaga

SEQ ID NO: 2583239 - RNA, 19 nt, Homo sapiens
  misc_RNA (1)...(19): siRNA sense strand
aagacagagaugacaacaa

SEQ ID NO: 2583240 - RNA, 19 nt, Homo sapiens
  misc_RNA (1)...(19): siRNA sense strand
auguaggagggcagagaau

SEQ ID NO: 2583241 - RNA, 19 nt, Homo sapiens
  misc_RNA (1)...(19): siRNA sense strand
ggcagagaauacuggugaa

SEQ ID NO: 2583242 - RNA, 19 nt, Homo sapiens
  misc_RNA (1)...(19): siRNA sense strand
cccucagcuuggagagaau

SEQ ID NO: 2583243 - RNA, 19 nt, Homo sapiens
  misc_RNA (1)...(19): siRNA sense strand
cuuccuaagguuacacaaa

SEQ ID NO: 2583244 - RNA, 19 nt, Homo sapiens
  misc_RNA (1)...(19): siRNA sense strand
augaagacagagaugacaa

SEQ ID NO: 2583245 - RNA, 19 nt, Homo sapiens
  misc_RNA (1)...(19): siRNA sense strand
gcagagaauacuggugaau

SEQ ID NO: 2583246 - RNA, 19 nt, Homo sapiens
  misc_RNA (1)...(19): siRNA sense strand
ggagacaagauguucgaca

SEQ ID NO: 2583247 - RNA, 19 nt, Homo sapiens
  misc_RNA (1)...(19): siRNA sense strand
acaaggacgaugaggagga

SEQ ID NO: 2583248 - RNA, 19 nt, Homo sapiens
  misc_RNA (1)...(19): siRNA sense strand
accaagaaauggaaucaau

SEQ ID NO: 2583249 - RNA, 19 nt, Homo sapiens
  misc_RNA (1)...(19): siRNA sense strand
gguuauagcaacuuccaga

SEQ ID NO: 2583250 - RNA, 19 nt, Homo sapiens
  misc_RNA (1)...(19): siRNA sense strand
uggaagaaugcauaaugaa

SEQ ID NO: 2583251 - RNA, 19 nt, Homo sapiens
  misc_RNA (1)...(19): siRNA sense strand
cgguuacgccugucacaua

SEQ ID NO: 2583252 - RNA, 19 nt, Homo sapiens
  misc_RNA (1)...(19): siRNA sense strand
agggaaaagaugcggguga

SEQ ID NO: 2583253 - RNA, 19 nt, Homo sapiens
  misc_RNA (1)...(19): siRNA sense strand
guaccaggaaugaauggaa

SEQ ID NO: 2583254 - RNA, 19 nt, Homo sapiens
  misc_RNA (1)...(19): siRNA sense strand
acagagugguuaagaugga

SEQ ID NO: 2583255 - RNA, 19 nt, Homo sapiens
  misc_RNA (1)...(19): siRNA sense strand
gagcaaaaccaugguacaa

SEQ ID NO: 2583256 - RNA, 19 nt, Homo sapiens
  misc_RNA (1)...(19): siRNA sense strand
augccaacccucaggaaaa

SEQ ID NO: 2583257 - RNA, 19 nt, Homo sapiens
  misc_RNA (1)...(19): siRNA sense strand
ggaugaauaucaagagagg

SEQ ID NO: 2583258 - RNA, 19 nt, Homo sapiens
  misc_RNA (1)...(19): siRNA sense strand
agagaaucagugacggcua

SEQ ID NO: 2583259 - RNA, 19 nt, Homo sapiens
  misc_RNA (1)...(19): siRNA sense strand
cgggugaaugugcaaauua

SEQ ID NO: 2583260 - RNA, 19 nt, Homo sapiens
  misc_RNA (1)...(19): siRNA sense strand
auaauggaauugugcugaa

SEQ ID NO: 2583261 - RNA, 19 nt, Homo sapiens
  misc_RNA (1)...(19): siRNA sense strand
ccagagaguggaagaauac

SEQ ID NO: 2583262 - RNA, 19 nt, Homo sapiens
  misc_RNA (1)...(19): siRNA sense strand
acauaaggaaggaccugaa

SEQ ID NO: 2583263 - RNA, 19 nt, Homo sapiens
  misc_RNA (1)...(19): siRNA sense strand
uggaaucaauggaagaagu

SEQ ID NO: 2583264 - RNA, 19 nt, Homo sapiens
  misc_RNA (1)...(19): siRNA sense strand
caaaguaaauggagggaga

SEQ ID NO: 2583265 - RNA, 19 nt, Homo sapiens
  misc_RNA (1)...(19): siRNA sense strand
acagaaaggacgugagaca

SEQ ID NO: 2583266 - RNA, 19 nt, Homo sapiens
  misc_RNA (1)...(19): siRNA sense strand
ggucagucuaugaaggaaa

SEQ ID NO: 2583267 - RNA, 19 nt, Homo sapiens
  misc_RNA (1)...(19): siRNA sense strand
ccuuggagguaguggaaga

SEQ ID NO: 2583268 - RNA, 19 nt, Homo sapiens
  misc_RNA (1)...(19): siRNA sense strand
acagauagaaagaggaaaa

SEQ ID NO: 2583269 - RNA, 19 nt, Homo sapiens
  misc_RNA (1)...(19): siRNA sense strand
agguaguggaagaggagaa

SEQ ID NO: 2583270 - RNA, 19 nt, Homo sapiens
  misc_RNA (1)...(19): siRNA sense strand
caagaaaagaggaggugaa

SEQ ID NO: 2583271 - RNA, 19 nt, Homo sapiens
  misc_RNA (1)...(19): siRNA sense strand
aaugcauaaugaagggaaa

SEQ ID NO: 2583272 - RNA, 19 nt, Homo sapiens
  misc_RNA (1)...(19): siRNA sense strand
ccugaaacaaauagcagua

SEQ ID NO: 2583273 - RNA, 19 nt, Homo sapiens
  misc_RNA (1)...(19): siRNA sense strand
uggauaagacugaagaaca

SEQ ID NO: 2583274 - RNA, 19 nt, Homo sapiens
  misc_RNA (1)...(19): siRNA sense strand
auacaugauuccugacaau

SEQ ID NO: 2583275 - RNA, 19 nt, Homo sapiens
  misc_RNA (1)...(19): siRNA sense strand
aaguaaauggagggagaua

SEQ ID NO: 2583276 - RNA, 19 nt, Homo sapiens
  misc_RNA (1)...(19): siRNA sense strand
agcaguagaucgaguggaa

SEQ ID NO: 2583277 - RNA, 19 nt, Homo sapiens
  misc_RNA (1)...(19): siRNA sense strand
cagaugacagagugguuaa

SEQ ID NO: 2583278 - RNA, 19 nt, Homo sapiens
  misc_RNA (1)...(19): siRNA sense strand
ccuauuauuucuauggaga

SEQ ID NO: 2583279 - RNA, 19 nt, Homo sapiens
  misc_RNA (1)...(19): siRNA sense strand
guggaagaauacugcgaga

SEQ ID NO: 2583280 - RNA, 19 nt, Homo sapiens
  misc_RNA (1)...(19): siRNA sense strand
ccauaaaaccugcccauaa

SEQ ID NO: 2583281 - RNA, 19 nt, Homo sapiens
  misc_RNA (1)...(19): siRNA sense strand
ggugaagacagaugacaga

SEQ ID NO: 2583282 - RNA, 19 nt, Homo sapiens
  misc_RNA (1)...(19): siRNA sense strand
aaaccaugguacaaggaau

SEQ ID NO: 2583283 - RNA, 19 nt, Homo sapiens
  misc_RNA (1)...(19): siRNA sense strand
aagaauacugcgagaaagu

SEQ ID NO: 2583284 - RNA, 19 nt, Homo sapiens
  misc_RNA (1)...(19): siRNA sense strand
gggaaaagaugcgggugaa

SEQ ID NO: 2583285 - RNA, 19 nt, Homo sapiens
  misc_RNA (1)...(19): siRNA sense strand
cgucuuguuuauugggaca

SEQ ID NO: 2583286 - RNA, 19 nt, Homo sapiens
  misc_RNA (1)...(19): siRNA sense strand
gguaguggaagaggagaaa

SEQ ID NO: 2583287 - RNA, 19 nt, Homo sapiens
  misc_RNA (1)...(19): siRNA sense strand
agagaugacaacaaaguau

SEQ ID NO: 2583288 - RNA, 19 nt, Homo sapiens
  misc_RNA (1)...(19): siRNA sense strand
gggcagagaauacugguga

SEQ ID NO: 2583289 - RNA, 19 nt, Homo sapiens
  misc_RNA (1)...(19): siRNA sense strand
aggcagggaccuuguauau

SEQ ID NO: 2583290 - RNA, 19 nt, Homo sapiens
  misc_RNA (1)...(19): siRNA sense strand
agaaggcacuggaggcaga

SEQ ID NO: 2583291 - RNA, 19 nt, Homo sapiens
  misc_RNA (1)...(19): siRNA sense strand
cuucaucagaguuggauau

SEQ ID NO: 2583292 - RNA, 19 nt, Homo sapiens
  misc_RNA (1)...(19): siRNA sense strand
aaauggaaucaauggaaga

SEQ ID NO: 2583293 - RNA, 19 nt, Homo sapiens
  misc_RNA (1)...(19): siRNA sense strand
cugacaaugaagacagaga

SEQ ID NO: 2583294 - RNA, 19 nt, Homo sapiens
  misc_RNA (1)...(19): siRNA sense strand
aagacagagaugacaacaa

SEQ ID NO: 2583295 - RNA, 19 nt, Homo sapiens
  misc_RNA (1)...(19): siRNA sense strand
auguaggagggcagagaau

SEQ ID NO: 2583296 - RNA, 19 nt, Homo sapiens
  misc_RNA (1)...(19): siRNA sense strand
ggcagagaauacuggugaa

SEQ ID NO: 2583297 - RNA, 19 nt, Homo sapiens
  misc_RNA (1)...(19): siRNA sense strand
cccucagcuuggagagaau

SEQ ID NO: 2583298 - RNA, 19 nt, Homo sapiens
  misc_RNA (1)...(19): siRNA sense strand
cuuccuaagguuacacaaa

SEQ ID NO: 2583299 - RNA, 19 nt, Homo sapiens
  misc_RNA (1)...(19): siRNA sense strand
augaagacagagaugacaa

SEQ ID NO: 2583300 - RNA, 19 nt, Homo sapiens
  misc_RNA (1)...(19): siRNA sense strand
gcagagaauacuggugaau

SEQ ID NO: 2583301 - RNA, 19 nt, Homo sapiens
  misc_RNA (1)...(19): siRNA sense strand
ggagacaagauguucgaca

SEQ ID NO: 2583302 - RNA, 19 nt, Homo sapiens
  misc_RNA (1)...(19): siRNA sense strand
acaaggacgaugaggagga

SEQ ID NO: 2583303 - RNA, 19 nt, Homo sapiens
  misc_RNA (1)...(19): siRNA sense strand
accaagaaauggaaucaau

SEQ ID NO: 2583304 - RNA, 19 nt, Homo sapiens
  misc_RNA (1)...(19): siRNA sense strand
gguuauagcaacuuccaga

SEQ ID NO: 2583305 - RNA, 19 nt, Homo sapiens
  misc_RNA (1)...(19): siRNA sense strand
uggaagaaugcauaaugaa

SEQ ID NO: 2583306 - RNA, 19 nt, Homo sapiens
  misc_RNA (1)...(19): siRNA sense strand
cgguuacgccugucacaua

SEQ ID NO: 2583307 - RNA, 19 nt, Homo sapiens
  misc_RNA (1)...(19): siRNA sense strand
agggaaaagaugcggguga

SEQ ID NO: 2583308 - RNA, 19 nt, Homo sapiens
  misc_RNA (1)...(19): siRNA sense strand
guaccaggaaugaauggaa

SEQ ID NO: 2583309 - RNA, 19 nt, Homo sapiens
  misc_RNA (1)...(19): siRNA sense strand
acagagugguuaagaugga

SEQ ID NO: 2583310 - RNA, 19 nt, Homo sapiens
  misc_RNA (1)...(19): siRNA sense strand
gagcaaaaccaugguacaa

SEQ ID NO: 2583311 - RNA, 19 nt, Homo sapiens
  misc_RNA (1)...(19): siRNA sense strand
augccaacccucaggaaaa

SEQ ID NO: 2583312 - RNA, 19 nt, Homo sapiens
  misc_RNA (1)...(19): siRNA sense strand
ggaugaauaucaagagagg

SEQ ID NO: 2583313 - RNA, 19 nt, Homo sapiens
  misc_RNA (1)...(19): siRNA sense strand
agagaaucagugacggcua

SEQ ID NO: 2583314 - RNA, 19 nt, Homo sapiens
  misc_RNA (1)...(19): siRNA sense strand
cgggugaaugugcaaauua

SEQ ID NO: 2583315 - RNA, 19 nt, Homo sapiens
  misc_RNA (1)...(19): siRNA sense strand
auaauggaauugugcugaa

SEQ ID NO: 2583316 - RNA, 19 nt, Homo sapiens
  misc_RNA (1)...(19): siRNA sense strand
ccagagaguggaagaauac

SEQ ID NO: 2583317 - RNA, 19 nt, Homo sapiens
  misc_RNA (1)...(19): siRNA sense strand
acauaaggaaggaccugaa

SEQ ID NO: 2583318 - RNA, 19 nt, Homo sapiens
  misc_RNA (1)...(19): siRNA sense strand
uggaaucaauggaagaagu

SEQ ID NO: 2583319 - RNA, 19 nt, Homo sapiens
  misc_RNA (1)...(19): siRNA sense strand
ccacaaagcuugaugguga

SEQ ID NO: 2583320 - RNA, 19 nt, Homo sapiens
  misc_RNA (1)...(19): siRNA sense strand
agugaaaguccaugauaaa

SEQ ID NO: 2583321 - RNA, 19 nt, Homo sapiens
  misc_RNA (1)...(19): siRNA sense strand
agaggaaagcagaagauaa

SEQ ID NO: 2583322 - RNA, 19 nt, Homo sapiens
  misc_RNA (1)...(19): siRNA sense strand
agagaagaguagaggggaa

SEQ ID NO: 2583323 - RNA, 19 nt, Homo sapiens
  misc_RNA (1)...(19): siRNA sense strand
acaaauggcagcuggacaa

SEQ ID NO: 2583324 - RNA, 19 nt, Homo sapiens
  misc_RNA (1)...(19): siRNA sense strand
ccauuguguugaagagauu

SEQ ID NO: 2583325 - RNA, 19 nt, Homo sapiens
  misc_RNA (1)...(19): siRNA sense strand
gugagaagaagaagcacaa

SEQ ID NO: 2583326 - RNA, 19 nt, Homo sapiens
  misc_RNA (1)...(19): siRNA sense strand
uguacaaugacgacagaaa

SEQ ID NO: 2583327 - RNA, 19 nt, Homo sapiens
  misc_RNA (1)...(19): siRNA sense strand
cugaaaauagguugggaaa

SEQ ID NO: 2583328 - RNA, 19 nt, Homo sapiens
  misc_RNA (1)...(19): siRNA sense strand
ccucagacucagagagcga

SEQ ID NO: 2583329 - RNA, 19 nt, Homo sapiens
  misc_RNA (1)...(19): siRNA sense strand
auacagaacauguugggaa

SEQ ID NO: 2583330 - RNA, 19 nt, Homo sapiens
  misc_RNA (1)...(19): siRNA sense strand
gcaauaacaguaaaggcua

SEQ ID NO: 2583331 - RNA, 19 nt, Homo sapiens
  misc_RNA (1)...(19): siRNA sense strand
aagacaagcccaaggugaa

SEQ ID NO: 2583332 - RNA, 19 nt, Homo sapiens
  misc_RNA (1)...(19): siRNA sense strand
aagagauucugaaggaaau

SEQ ID NO: 2583333 - RNA, 19 nt, Homo sapiens
  misc_RNA (1)...(19): siRNA sense strand
agaaagagacugugauaac

SEQ ID NO: 2583334 - RNA, 19 nt, Homo sapiens
  misc_RNA (1)...(19): siRNA sense strand
ggucaaggcgggaagcaga

SEQ ID NO: 2583335 - RNA, 19 nt, Homo sapiens
  misc_RNA (1)...(19): siRNA sense strand
cggaauugccacagagucu

SEQ ID NO: 2583336 - RNA, 19 nt, Homo sapiens
  misc_RNA (1)...(19): siRNA sense strand
gcucaagcaaguuggccaa

SEQ ID NO: 2583337 - RNA, 19 nt, Homo sapiens
  misc_RNA (1)...(19): siRNA sense strand
agagaaagggugaagcaga

SEQ ID NO: 2583338 - RNA, 19 nt, Homo sapiens
  misc_RNA (1)...(19): siRNA sense strand
gaaacuacgaagaagugaa

SEQ ID NO: 2583339 - RNA, 19 nt, Homo sapiens
  misc_RNA (1)...(19): siRNA sense strand
acgaggaagaauaaagaau

SEQ ID NO: 2583340 - RNA, 19 nt, Homo sapiens
  misc_RNA (1)...(19): siRNA sense strand
ugguggaccuggugcacua

SEQ ID NO: 2583341 - RNA, 19 nt, Homo sapiens
  misc_RNA (1)...(19): siRNA sense strand
aaaucagacuggagaagga

SEQ ID NO: 2583342 - RNA, 19 nt, Homo sapiens
  misc_RNA (1)...(19): siRNA sense strand
cuugaaagugccugccaaa

SEQ ID NO: 2583343 - RNA, 19 nt, Homo sapiens
  misc_RNA (1)...(19): siRNA sense strand
ggacaggguuggaaaggcu

SEQ ID NO: 2583344 - RNA, 19 nt, Homo sapiens
  misc_RNA (1)...(19): siRNA sense strand
ugacaaagggagcagcauu

SEQ ID NO: 2583345 - RNA, 19 nt, Homo sapiens
  misc_RNA (1)...(19): siRNA sense strand
ccuaaaagcuccagcaaag

SEQ ID NO: 2583346 - RNA, 19 nt, Homo sapiens
  misc_RNA (1)...(19): siRNA sense strand
agcccaaggugaagacgaa

SEQ ID NO: 2583347 - RNA, 19 nt, Homo sapiens
  misc_RNA (1)...(19): siRNA sense strand
aguaagggcagcagcgaca

SEQ ID NO: 2583348 - RNA, 19 nt, Homo sapiens
  misc_RNA (1)...(19): siRNA sense strand
cagaaagagacugugauaa

SEQ ID NO: 2583349 - RNA, 19 nt, Homo sapiens
  misc_RNA (1)...(19): siRNA sense strand
gguugggaaagccgaaaua

SEQ ID NO: 2583350 - RNA, 19 nt, Homo sapiens
  misc_RNA (1)...(19): siRNA sense strand
agggugaagcagaaagaga

SEQ ID NO: 2583351 - RNA, 19 nt, Homo sapiens
  misc_RNA (1)...(19): siRNA sense strand
aagcagaguuaaugacgga

SEQ ID NO: 2583352 - RNA, 19 nt, Homo sapiens
  misc_RNA (1)...(19): siRNA sense strand
cgaaggacaauguggagga

SEQ ID NO: 2583353 - RNA, 19 nt, Homo sapiens
  misc_RNA (1)...(19): siRNA sense strand
gcucagacagcucaagcaa

SEQ ID NO: 2583354 - RNA, 19 nt, Homo sapiens
  misc_RNA (1)...(19): siRNA sense strand
uccuuuaauuccugacaaa

SEQ ID NO: 2583355 - RNA, 19 nt, Homo sapiens
  misc_RNA (1)...(19): siRNA sense strand
cauccaugcucgaagacga

SEQ ID NO: 2583356 - RNA, 19 nt, Homo sapiens
  misc_RNA (1)...(19): siRNA sense strand
ccauugccuuugagagaca

SEQ ID NO: 2583357 - RNA, 19 nt, Homo sapiens
  misc_RNA (1)...(19): siRNA sense strand
cacaaagcuugauggugaa

SEQ ID NO: 2583358 - RNA, 19 nt, Homo sapiens
  misc_RNA (1)...(19): siRNA sense strand
agcagaaagcagaguuaau

SEQ ID NO: 2583359 - RNA, 19 nt, Homo sapiens
  misc_RNA (1)...(19): siRNA sense strand
ugacggacaggguuggaaa

SEQ ID NO: 2583360 - RNA, 19 nt, Homo sapiens
  misc_RNA (1)...(19): siRNA sense strand
cuucauugagugcggaauu

SEQ ID NO: 2583361 - RNA, 19 nt, Homo sapiens
  misc_RNA (1)...(19): siRNA sense strand
cuuccaaagacaagcccaa

SEQ ID NO: 2583362 - RNA, 19 nt, Homo sapiens
  misc_RNA (1)...(19): siRNA sense strand
agaaagcaccagugacuca

SEQ ID NO: 2583363 - RNA, 19 nt, Homo sapiens
  misc_RNA (1)...(19): siRNA sense strand
ccuccagugagaagaagaa

SEQ ID NO: 2583364 - RNA, 19 nt, Homo sapiens
  misc_RNA (1)...(19): siRNA sense strand
agaugaagcagaaagcaga

SEQ ID NO: 2583365 - RNA, 19 nt, Homo sapiens
  misc_RNA (1)...(19): siRNA sense strand
cuuaauaaacacuucgaga

SEQ ID NO: 2583366 - RNA, 19 nt, Homo sapiens
  misc_RNA (1)...(19): siRNA sense strand
ccgaagagcugacggagac

SEQ ID NO: 2583367 - RNA, 19 nt, Homo sapiens
  misc_RNA (1)...(19): siRNA sense strand
ucagaaagcaccagugacu

SEQ ID NO: 2583368 - RNA, 19 nt, Homo sapiens
  misc_RNA (1)...(19): siRNA sense strand
ggcggcacccagagaguaa

SEQ ID NO: 2583369 - RNA, 19 nt, Homo sapiens
  misc_RNA (1)...(19): siRNA sense strand
ccacaaaggcaaaccguug

SEQ ID NO: 2583370 - RNA, 19 nt, Homo sapiens
  misc_RNA (1)...(19): siRNA sense strand
agugagaagaagaagcaca

SEQ ID NO: 2583371 - RNA, 19 nt, Homo sapiens
  misc_RNA (1)...(19): siRNA sense strand
ccagcaguaccaagagcaa

SEQ ID NO: 2583372 - RNA, 19 nt, Homo sapiens
  misc_RNA (1)...(19): siRNA sense strand
agaagaagcacaagagcuc

SEQ ID NO: 2583373 - RNA, 19 nt, Homo sapiens
  misc_RNA (1)...(19): siRNA sense strand
ccagaggaaagcagaagau

SEQ ID NO: 2583374 - RNA, 19 nt, Homo sapiens
  misc_RNA (1)...(19): siRNA sense strand
aaagagacugugauaacaa

SEQ ID NO: 2583375 - RNA, 19 nt, Homo sapiens
  misc_RNA (1)...(19): siRNA sense strand
ggcgauguuucguuguaaa

SEQ ID NO: 2583376 - RNA, 19 nt, Homo sapiens
  misc_RNA (1)...(19): siRNA sense strand
auaaacacuucgagaguuc

SEQ ID NO: 2583377 - RNA, 19 nt, Homo sapiens
  misc_RNA (1)...(19): siRNA sense strand
cagggaagccucaagugaa

SEQ ID NO: 2583378 - RNA, 19 nt, Homo sapiens
  misc_RNA (1)...(19): siRNA sense strand
gaacaaagaugaucgggaa

SEQ ID NO: 2583379 - RNA, 19 nt, Homo sapiens
  misc_RNA (1)...(19): siRNA sense strand
ccucagaaccaguggccaa

SEQ ID NO: 2583380 - RNA, 19 nt, Homo sapiens
  misc_RNA (1)...(19): siRNA sense strand
cagaaaaguuggaugacaa

SEQ ID NO: 2583381 - RNA, 19 nt, Homo sapiens
  misc_RNA (1)...(19): siRNA sense strand
ccgcagugauggaagggaa

SEQ ID NO: 2583382 - RNA, 19 nt, Homo sapiens
  misc_RNA (1)...(19): siRNA sense strand
gagaaagagagaagaacau

SEQ ID NO: 2583383 - RNA, 19 nt, Homo sapiens
  misc_RNA (1)...(19): siRNA sense strand
aggagaagcuggagaagca

SEQ ID NO: 2583384 - RNA, 19 nt, Homo sapiens
  misc_RNA (1)...(19): siRNA sense strand
gauagugauauguggauaa

SEQ ID NO: 2583385 - RNA, 19 nt, Homo sapiens
  misc_RNA (1)...(19): siRNA sense strand
gagaaagaagauuggauau

SEQ ID NO: 2583386 - RNA, 19 nt, Homo sapiens
  misc_RNA (1)...(19): siRNA sense strand
ucaacaagauggugagcau

SEQ ID NO: 2583387 - RNA, 19 nt, Homo sapiens
  misc_RNA (1)...(19): siRNA sense strand
aagaaaacccuaaggauua

SEQ ID NO: 2583388 - RNA, 19 nt, Homo sapiens
  misc_RNA (1)...(19): siRNA sense strand
agaaacacuuggaaggcaa

SEQ ID NO: 2583389 - RNA, 19 nt, Homo sapiens
  misc_RNA (1)...(19): siRNA sense strand
cgaaagucugauagugaua

SEQ ID NO: 2583390 - RNA, 19 nt, Homo sapiens
  misc_RNA (1)...(19): siRNA sense strand
agauauucauagugggaca

SEQ ID NO: 2583391 - RNA, 19 nt, Homo sapiens
  misc_RNA (1)...(19): siRNA sense strand
ggccaaauuaugaggaaaa

SEQ ID NO: 2583392 - RNA, 19 nt, Homo sapiens
  misc_RNA (1)...(19): siRNA sense strand
gcgacaggcaucugauaaa

SEQ ID NO: 2583393 - RNA, 19 nt, Homo sapiens
  misc_RNA (1)...(19): siRNA sense strand
aggaggagcgggagaggaa

SEQ ID NO: 2583394 - RNA, 19 nt, Homo sapiens
  misc_RNA (1)...(19): siRNA sense strand
ggaucaugcucuugcaaaa

SEQ ID NO: 2583395 - RNA, 19 nt, Homo sapiens
  misc_RNA (1)...(19): siRNA sense strand
aagauaaagcugcuggaaa

SEQ ID NO: 2583396 - RNA, 19 nt, Homo sapiens
  misc_RNA (1)...(19): siRNA sense strand
gggugcuggucaagauaaa

SEQ ID NO: 2583397 - RNA, 19 nt, Homo sapiens
  misc_RNA (1)...(19): siRNA sense strand
uccuaguccuggagggaaa

SEQ ID NO: 2583398 - RNA, 19 nt, Homo sapiens
  misc_RNA (1)...(19): siRNA sense strand
ggacagaaaaguuggauga

SEQ ID NO: 2583399 - RNA, 19 nt, Homo sapiens
  misc_RNA (1)...(19): siRNA sense strand
ccaaggagaagcuggagaa

SEQ ID NO: 2583400 - RNA, 19 nt, Homo sapiens
  misc_RNA (1)...(19): siRNA sense strand
acggagaaagagagaagaa

SEQ ID NO: 2583401 - RNA, 19 nt, Homo sapiens
  misc_RNA (1)...(19): siRNA sense strand
ggagagagcugacgggucu

SEQ ID NO: 2583402 - RNA, 19 nt, Homo sapiens
  misc_RNA (1)...(19): siRNA sense strand
agcauugaauucagggaaa

SEQ ID NO: 2583403 - RNA, 19 nt, Homo sapiens
  misc_RNA (1)...(19): siRNA sense strand
gugaaggcuuugagcucua

SEQ ID NO: 2583404 - RNA, 19 nt, Homo sapiens
  misc_RNA (1)...(19): siRNA sense strand
gaaaagggugcuaaagaaa

SEQ ID NO: 2583405 - RNA, 19 nt, Homo sapiens
  misc_RNA (1)...(19): siRNA sense strand
ccaacggaucuuauagaaa

SEQ ID NO: 2583406 - RNA, 19 nt, Homo sapiens
  misc_RNA (1)...(19): siRNA sense strand
cagaauauagugaaccaaa

SEQ ID NO: 2583407 - RNA, 19 nt, Homo sapiens
  misc_RNA (1)...(19): siRNA sense strand
gaguagaacagcagccaga

SEQ ID NO: 2583408 - RNA, 19 nt, Homo sapiens
  misc_RNA (1)...(19): siRNA sense strand
gggaagugcaguuggagga

SEQ ID NO: 2583409 - RNA, 19 nt, Homo sapiens
  misc_RNA (1)...(19): siRNA sense strand
gguuaagggcccaagacau

SEQ ID NO: 2583410 - RNA, 19 nt, Homo sapiens
  misc_RNA (1)...(19): siRNA sense strand
cagggaaaguucugaagau

SEQ ID NO: 2583411 - RNA, 19 nt, Homo sapiens
  misc_RNA (1)...(19): siRNA sense strand
gcaugucagcggagaaaga

SEQ ID NO: 2583412 - RNA, 19 nt, Homo sapiens
  misc_RNA (1)...(19): siRNA sense strand
cugaagcuuuagagaagua

SEQ ID NO: 2583413 - RNA, 19 nt, Homo sapiens
  misc_RNA (1)...(19): siRNA sense strand
gccaagugacaaagggauu

SEQ ID NO: 2583414 - RNA, 19 nt, Homo sapiens
  misc_RNA (1)...(19): siRNA sense strand
cuugugauguugucagaaa

SEQ ID NO: 2583415 - RNA, 19 nt, Homo sapiens
  misc_RNA (1)...(19): siRNA sense strand
caaagaaaaccaagaaaca

SEQ ID NO: 2583416 - RNA, 19 nt, Homo sapiens
  misc_RNA (1)...(19): siRNA sense strand
auccagaaacagaagaaua

SEQ ID NO: 2583417 - RNA, 19 nt, Homo sapiens
  misc_RNA (1)...(19): siRNA sense strand
guacauuacagucagcaaa

SEQ ID NO: 2583418 - RNA, 19 nt, Homo sapiens
  misc_RNA (1)...(19): siRNA sense strand
ggcugaagcuuuagagaag

SEQ ID NO: 2583419 - RNA, 19 nt, Homo sapiens
  misc_RNA (1)...(19): siRNA sense strand
guuaaguguuacugaaguu

SEQ ID NO: 2583420 - RNA, 19 nt, Homo sapiens
  misc_RNA (1)...(19): siRNA sense strand
cagcagaugaagcccgaaa

SEQ ID NO: 2583421 - RNA, 19 nt, Homo sapiens
  misc_RNA (1)...(19): siRNA sense strand
acgaagaugacgaggagga

SEQ ID NO: 2583422 - RNA, 19 nt, Homo sapiens
  misc_RNA (1)...(19): siRNA sense strand
gaaaagagaaugcaggaau

SEQ ID NO: 2583423 - RNA, 19 nt, Homo sapiens
  misc_RNA (1)...(19): siRNA sense strand
cgaccgaggauuuggaguu

SEQ ID NO: 2583424 - RNA, 19 nt, Homo sapiens
  misc_RNA (1)...(19): siRNA sense strand
gugcagauuaugaaaguca

SEQ ID NO: 2583425 - RNA, 19 nt, Homo sapiens
  misc_RNA (1)...(19): siRNA sense strand
cuccuaaggcucaaaguaa

SEQ ID NO: 2583426 - RNA, 19 nt, Homo sapiens
  misc_RNA (1)...(19): siRNA sense strand
gagaaguauggucuggaaa

SEQ ID NO: 2583427 - RNA, 19 nt, Homo sapiens
  misc_RNA (1)...(19): siRNA sense strand
ucauagugggacagcauua

SEQ ID NO: 2583428 - RNA, 19 nt, Homo sapiens
  misc_RNA (1)...(19): siRNA sense strand
ccgacaagcaagagcacca

SEQ ID NO: 2583429 - RNA, 19 nt, Homo sapiens
  misc_RNA (1)...(19): siRNA sense strand
gauaaagaugauagaccuu

SEQ ID NO: 2583430 - RNA, 19 nt, Homo sapiens
  misc_RNA (1)...(19): siRNA sense strand
aaagaaaacccuaaggauu

SEQ ID NO: 2583431 - RNA, 19 nt, Homo sapiens
  misc_RNA (1)...(19): siRNA sense strand
ggaacaaagaugaucggga

SEQ ID NO: 2583432 - RNA, 19 nt, Homo sapiens
  misc_RNA (1)...(19): siRNA sense strand
ugauuugggaggagauauu

SEQ ID NO: 2583433 - RNA, 19 nt, Homo sapiens
  misc_RNA (1)...(19): siRNA sense strand
aagccuuauuacagaacua

SEQ ID NO: 2583434 - RNA, 19 nt, Homo sapiens
  misc_RNA (1)...(19): siRNA sense strand
uccaaaugguuuacaagaa

SEQ ID NO: 2583435 - RNA, 19 nt, Homo sapiens
  misc_RNA (1)...(19): siRNA sense strand
ggcaaaugcaucugaacuu

SEQ ID NO: 2583436 - RNA, 19 nt, Homo sapiens
  misc_RNA (1)...(19): siRNA sense strand
caaagaaauugccugguga

SEQ ID NO: 2583437 - RNA, 19 nt, Homo sapiens
  misc_RNA (1)...(19): siRNA sense strand
gagaagaagcacaaagcca

SEQ ID NO: 2583438 - RNA, 19 nt, Homo sapiens
  misc_RNA (1)...(19): siRNA sense strand
gagacaggccugaaggaga

SEQ ID NO: 2583439 - RNA, 19 nt, Homo sapiens
  misc_RNA (1)...(19): siRNA sense strand
gagcagauccugagccuga

SEQ ID NO: 2583440 - RNA, 19 nt, Homo sapiens
  misc_RNA (1)...(19): siRNA sense strand
aagaagagucgaaaggaca

SEQ ID NO: 2583441 - RNA, 19 nt, Homo sapiens
  misc_RNA (1)...(19): siRNA sense strand
aagaagugcuggaggugga

SEQ ID NO: 2583442 - RNA, 19 nt, Homo sapiens
  misc_RNA (1)...(19): siRNA sense strand
aggaagaagugcuggaggu

SEQ ID NO: 2583443 - RNA, 19 nt, Homo sapiens
  misc_RNA (1)...(19): siRNA sense strand
aggagggaccgcugacaaa

SEQ ID NO: 2583444 - RNA, 19 nt, Homo sapiens
  misc_RNA (1)...(19): siRNA sense strand
gaagaagagucgaaaggac

SEQ ID NO: 2583445 - RNA, 19 nt, Homo sapiens
  misc_RNA (1)...(19): siRNA sense strand
agaagagucgaaaggacaa

SEQ ID NO: 2583446 - RNA, 19 nt, Homo sapiens
  misc_RNA (1)...(19): siRNA sense strand
cgacuaacauggagcagcu

SEQ ID NO: 2583447 - RNA, 19 nt, Homo sapiens
  misc_RNA (1)...(19): siRNA sense strand
ccgccauggaugucgacaa

SEQ ID NO: 2583448 - RNA, 19 nt, Homo sapiens
  misc_RNA (1)...(19): siRNA sense strand
gcagggagucaaaggggaa

SEQ ID NO: 2583449 - RNA, 19 nt, Homo sapiens
  misc_RNA (1)...(19): siRNA sense strand
cugaaggagaagaagcaca

SEQ ID NO: 2583450 - RNA, 19 nt, Homo sapiens
  misc_RNA (1)...(19): siRNA sense strand
agucauaaagggaagaaac

SEQ ID NO: 2583451 - RNA, 19 nt, Homo sapiens
  misc_RNA (1)...(19): siRNA sense strand
gguaggaggcugcugcgua

SEQ ID NO: 2583452 - RNA, 19 nt, Homo sapiens
  misc_RNA (1)...(19): siRNA sense strand
ucugagagcagcagggagu

SEQ ID NO: 2583453 - RNA, 19 nt, Homo sapiens
  misc_RNA (1)...(19): siRNA sense strand
gcacaaagccagcaagagg

SEQ ID NO: 2583454 - RNA, 19 nt, Homo sapiens
  misc_RNA (1)...(19): siRNA sense strand
cgacaagcuuuccacguca

SEQ ID NO: 2583455 - RNA, 19 nt, Homo sapiens
  misc_RNA (1)...(19): siRNA sense strand
acaaaggagccucagccaa

SEQ ID NO: 2583456 - RNA, 19 nt, Homo sapiens
  misc_RNA (1)...(19): siRNA sense strand
gagucauaaagggaagaaa

SEQ ID NO: 2583457 - RNA, 19 nt, Homo sapiens
  misc_RNA (1)...(19): siRNA sense strand
aggacaagggugacagcaa

SEQ ID NO: 2583458 - RNA, 19 nt, Homo sapiens
  misc_RNA (1)...(19): siRNA sense strand
caaugaaggucuagagcug

SEQ ID NO: 2583459 - RNA, 19 nt, Homo sapiens
  misc_RNA (1)...(19): siRNA sense strand
cugcaagccaagacagaau

SEQ ID NO: 2583460 - RNA, 19 nt, Homo sapiens
  misc_RNA (1)...(19): siRNA sense strand
acuucaaggacaaggguga

SEQ ID NO: 2583461 - RNA, 19 nt, Homo sapiens
  misc_RNA (1)...(19): siRNA sense strand
gggaaaagguacacacgga

SEQ ID NO: 2583462 - RNA, 19 nt, Homo sapiens
  misc_RNA (1)...(19): siRNA sense strand
ggcaaaagcucuuggugga

SEQ ID NO: 2583463 - RNA, 19 nt, Homo sapiens
  misc_RNA (1)...(19): siRNA sense strand
uggaugagggcgagggacu

SEQ ID NO: 2583464 - RNA, 19 nt, Homo sapiens
  misc_RNA (1)...(19): siRNA sense strand
ggacaagggugacagcaac

SEQ ID NO: 2583465 - RNA, 19 nt, Homo sapiens
  misc_RNA (1)...(19): siRNA sense strand
aggugcuggcggaggaaau

SEQ ID NO: 2583466 - RNA, 19 nt, Homo sapiens
  misc_RNA (1)...(19): siRNA sense strand
augcagaauucaucagcca

SEQ ID NO: 2583467 - RNA, 19 nt, Homo sapiens
  misc_RNA (1)...(19): siRNA sense strand
cggagaagcgacugacacu

SEQ ID NO: 2583468 - RNA, 19 nt, Homo sapiens
  misc_RNA (1)...(19): siRNA sense strand
agacagaaugccucaggau

SEQ ID NO: 2583469 - RNA, 19 nt, Homo sapiens
  misc_RNA (1)...(19): siRNA sense strand
cuggagugugacauggaua

SEQ ID NO: 2583470 - RNA, 19 nt, Homo sapiens
  misc_RNA (1)...(19): siRNA sense strand
caguaauggcugugagaaa

SEQ ID NO: 2583471 - RNA, 19 nt, Homo sapiens
  misc_RNA (1)...(19): siRNA sense strand
guaaagaaguaaagcggua

SEQ ID NO: 2583472 - RNA, 19 nt, Homo sapiens
  misc_RNA (1)...(19): siRNA sense strand
aagcaaugucccaggguua

SEQ ID NO: 2583473 - RNA, 19 nt, Homo sapiens
  misc_RNA (1)...(19): siRNA sense strand
acacaauggaucagaggau

SEQ ID NO: 2583474 - RNA, 19 nt, Homo sapiens
  misc_RNA (1)...(19): siRNA sense strand
acuuugaggcagaggaaga

SEQ ID NO: 2583475 - RNA, 19 nt, Homo sapiens
  misc_RNA (1)...(19): siRNA sense strand
ccaagaacaaauucagcaa

SEQ ID NO: 2583476 - RNA, 19 nt, Homo sapiens
  misc_RNA (1)...(19): siRNA sense strand
caucaaacaagaagaggca

SEQ ID NO: 2583477 - RNA, 19 nt, Homo sapiens
  misc_RNA (1)...(19): siRNA sense strand
ucacgauggcuguggaaaa

SEQ ID NO: 2583478 - RNA, 19 nt, Homo sapiens
  misc_RNA (1)...(19): siRNA sense strand
ucaggagggcuguggcaaa

SEQ ID NO: 2583479 - RNA, 19 nt, Homo sapiens
  misc_RNA (1)...(19): siRNA sense strand
ugcucagguuuguggauaa

SEQ ID NO: 2583480 - RNA, 19 nt, Homo sapiens
  misc_RNA (1)...(19): siRNA sense strand
ggccaggaccucagcacaa

SEQ ID NO: 2583481 - RNA, 19 nt, Homo sapiens
  misc_RNA (1)...(19): siRNA sense strand
acagaaacauuaagugcca

SEQ ID NO: 2583482 - RNA, 19 nt, Homo sapiens
  misc_RNA (1)...(19): siRNA sense strand
aagaaauauugaaggugca

SEQ ID NO: 2583483 - RNA, 19 nt, Homo sapiens
  misc_RNA (1)...(19): siRNA sense strand
ucaucuacuuugaggcaga

SEQ ID NO: 2583484 - RNA, 19 nt, Homo sapiens
  misc_RNA (1)...(19): siRNA sense strand
ggaugaagaugacgacgga

SEQ ID NO: 2583485 - RNA, 19 nt, Homo sapiens
  misc_RNA (1)...(19): siRNA sense strand
gaggcuucacacagggaaa

SEQ ID NO: 2583486 - RNA, 19 nt, Homo sapiens
  misc_RNA (1)...(19): siRNA sense strand
cgagaaaauuccaguacga

SEQ ID NO: 2583487 - RNA, 19 nt, Homo sapiens
  misc_RNA (1)...(19): siRNA sense strand
augaagaugacgacggaca

SEQ ID NO: 2583488 - RNA, 19 nt, Homo sapiens
  misc_RNA (1)...(19): siRNA sense strand
ugcuaaucaucaagaguuu

SEQ ID NO: 2583489 - RNA, 19 nt, Homo sapiens
  misc_RNA (1)...(19): siRNA sense strand
cgacggacagugcggagaa

SEQ ID NO: 2583490 - RNA, 19 nt, Homo sapiens
  misc_RNA (1)...(19): siRNA sense strand
augcagagucagucaguga

SEQ ID NO: 2583491 - RNA, 19 nt, Homo sapiens
  misc_RNA (1)...(19): siRNA sense strand
cuacuuugaggcagaggaa

SEQ ID NO: 2583492 - RNA, 19 nt, Homo sapiens
  misc_RNA (1)...(19): siRNA sense strand
auacaaugcacuuccacaa

SEQ ID NO: 2583493 - RNA, 19 nt, Homo sapiens
  misc_RNA (1)...(19): siRNA sense strand
cuuuggaggaugaagauga

SEQ ID NO: 2583494 - RNA, 19 nt, Homo sapiens
  misc_RNA (1)...(19): siRNA sense strand
uacacauacuggugaaaga

SEQ ID NO: 2583495 - RNA, 19 nt, Homo sapiens
  misc_RNA (1)...(19): siRNA sense strand
ccacaaaaccaagaacaaa

SEQ ID NO: 2583496 - RNA, 19 nt, Homo sapiens
  misc_RNA (1)...(19): siRNA sense strand
aggaaauucagcaucuuua

SEQ ID NO: 2583497 - RNA, 19 nt, Homo sapiens
  misc_RNA (1)...(19): siRNA sense strand
gagugcacacgaaggagaa

SEQ ID NO: 2583498 - RNA, 19 nt, Homo sapiens
  misc_RNA (1)...(19): siRNA sense strand
aguaauggcugugagaaaa

SEQ ID NO: 2583499 - RNA, 19 nt, Homo sapiens
  misc_RNA (1)...(19): siRNA sense strand
guuccagaauucagaugau

SEQ ID NO: 2583500 - RNA, 19 nt, Homo sapiens
  misc_RNA (1)...(19): siRNA sense strand
gcccauuguaccaggacuu

SEQ ID NO: 2583501 - RNA, 19 nt, Homo sapiens
  misc_RNA (1)...(19): siRNA sense strand
ucguacacauacuggugaa

SEQ ID NO: 2583502 - RNA, 19 nt, Homo sapiens
  misc_RNA (1)...(19): siRNA sense strand
ugucagugucagugugcau

SEQ ID NO: 2583503 - RNA, 19 nt, Homo sapiens
  misc_RNA (1)...(19): siRNA sense strand
cgggcauccagcaggagaa

SEQ ID NO: 2583504 - RNA, 19 nt, Homo sapiens
  misc_RNA (1)...(19): siRNA sense strand
cauuaagugccauggaugu

SEQ ID NO: 2583505 - RNA, 19 nt, Homo sapiens
  misc_RNA (1)...(19): siRNA sense strand
agacacagaaguugggcaa

SEQ ID NO: 2583506 - RNA, 19 nt, Homo sapiens
  misc_RNA (1)...(19): siRNA sense strand
aggauuacagccugaacaa

SEQ ID NO: 2583507 - RNA, 19 nt, Homo sapiens
  misc_RNA (1)...(19): siRNA sense strand
acggaauggaagaagguca

SEQ ID NO: 2583508 - RNA, 19 nt, Homo sapiens
  misc_RNA (1)...(19): siRNA sense strand
auucagaguggacgaagaa

SEQ ID NO: 2583509 - RNA, 19 nt, Homo sapiens
  misc_RNA (1)...(19): siRNA sense strand
aguuguggaaugagauaga

SEQ ID NO: 2583510 - RNA, 19 nt, Homo sapiens
  misc_RNA (1)...(19): siRNA sense strand
auucgaagacacagaaguu

SEQ ID NO: 2583511 - RNA, 19 nt, Homo sapiens
  misc_RNA (1)...(19): siRNA sense strand
gaagaaggucagcaggguu

SEQ ID NO: 2583512 - RNA, 19 nt, Homo sapiens
  misc_RNA (1)...(19): siRNA sense strand
acccagaaugcgagagaaa

SEQ ID NO: 2583513 - RNA, 19 nt, Homo sapiens
  misc_RNA (1)...(19): siRNA sense strand
uggucaaccugguggacaa

SEQ ID NO: 2583514 - RNA, 19 nt, Homo sapiens
  misc_RNA (1)...(19): siRNA sense strand
cugaagcacuugaaggaga

SEQ ID NO: 2583515 - RNA, 19 nt, Homo sapiens
  misc_RNA (1)...(19): siRNA sense strand
cgggagaaccaaaccggaa

SEQ ID NO: 2583516 - RNA, 19 nt, Homo sapiens
  misc_RNA (1)...(19): siRNA sense strand
cuccaaagauaguucgaga

SEQ ID NO: 2583517 - RNA, 19 nt, Homo sapiens
  misc_RNA (1)...(19): siRNA sense strand
ggggaaagcuguaugagga

SEQ ID NO: 2583518 - RNA, 19 nt, Homo sapiens
  misc_RNA (1)...(19): siRNA sense strand
uugucaaugugaaggguga

SEQ ID NO: 2583519 - RNA, 19 nt, Homo sapiens
  misc_RNA (1)...(19): siRNA sense strand
acgcaguggaccuggugaa

SEQ ID NO: 2583520 - RNA, 19 nt, Homo sapiens
  misc_RNA (1)...(19): siRNA sense strand
gugaacgaagccagaggaa

SEQ ID NO: 2583521 - RNA, 19 nt, Homo sapiens
  misc_RNA (1)...(19): siRNA sense strand
ccaucaacucacagcccaa

SEQ ID NO: 2583522 - RNA, 19 nt, Homo sapiens
  misc_RNA (1)...(19): siRNA sense strand
ugaacgaagccagaggaaa

SEQ ID NO: 2583523 - RNA, 19 nt, Homo sapiens
  misc_RNA (1)...(19): siRNA sense strand
cugcaagugcugaagaagu

SEQ ID NO: 2583524 - RNA, 19 nt, Homo sapiens
  misc_RNA (1)...(19): siRNA sense strand
aaguacgagcuccggguua

SEQ ID NO: 2583525 - RNA, 19 nt, Homo sapiens
  misc_RNA (1)...(19): siRNA sense strand
cagggagcuuugaggcuga

SEQ ID NO: 2583526 - RNA, 19 nt, Homo sapiens
  misc_RNA (1)...(19): siRNA sense strand
aguacauccacgacaacua

SEQ ID NO: 2583527 - RNA, 19 nt, Homo sapiens
  misc_RNA (1)...(19): siRNA sense strand
gugaaggcaugcaccgaca

SEQ ID NO: 2583528 - RNA, 19 nt, Homo sapiens
  misc_RNA (1)...(19): siRNA sense strand
gcgugaaaguggaggcuga

SEQ ID NO: 2583529 - RNA, 19 nt, Homo sapiens
  misc_RNA (1)...(19): siRNA sense strand
gagcaugagcaaugggcau

SEQ ID NO: 2583530 - RNA, 19 nt, Homo sapiens
  misc_RNA (1)...(19): siRNA sense strand
gggagagucuggauggaca

SEQ ID NO: 2583531 - RNA, 19 nt, Homo sapiens
  misc_RNA (1)...(19): siRNA sense strand
ucgcaggagcagcgugaaa

SEQ ID NO: 2583532 - RNA, 19 nt, Homo sapiens
  misc_RNA (1)...(19): siRNA sense strand
gccagaaggaagaggagau

SEQ ID NO: 2583533 - RNA, 19 nt, Homo sapiens
  misc_RNA (1)...(19): siRNA sense strand
aggaagaggagauccgcaa

SEQ ID NO: 2583534 - RNA, 19 nt, Homo sapiens
  misc_RNA (1)...(19): siRNA sense strand
ccuugaacuuggagagaag

SEQ ID NO: 2583535 - RNA, 19 nt, Homo sapiens
  misc_RNA (1)...(19): siRNA sense strand
ugaaacaagagguuggaga

SEQ ID NO: 2583536 - RNA, 19 nt, Homo sapiens
  misc_RNA (1)...(19): siRNA sense strand
ccaaguagcccgagagagc

SEQ ID NO: 2583537 - RNA, 19 nt, Homo sapiens
  misc_RNA (1)...(19): siRNA sense strand
gaggaggaguuucuggaga

SEQ ID NO: 2583538 - RNA, 19 nt, Homo sapiens
  misc_RNA (1)...(19): siRNA sense strand
aggaguuucuggagaucau

SEQ ID NO: 2583539 - RNA, 19 nt, Homo sapiens
  misc_RNA (1)...(19): siRNA sense strand
gggcaggaggagaagagga

SEQ ID NO: 2583540 - RNA, 19 nt, Homo sapiens
  misc_RNA (1)...(19): siRNA sense strand
ugcagaaggcacugagaga

SEQ ID NO: 2583541 - RNA, 19 nt, Homo sapiens
  misc_RNA (1)...(19): siRNA sense strand
gaggaagggcugcuggaca

SEQ ID NO: 2583542 - RNA, 19 nt, Homo sapiens
  misc_RNA (1)...(19): siRNA sense strand
cggaaagggagcaugagca

SEQ ID NO: 2583543 - RNA, 19 nt, Homo sapiens
  misc_RNA (1)...(19): siRNA sense strand
gaugauaaugacagccaga

SEQ ID NO: 2583544 - RNA, 19 nt, Homo sapiens
  misc_RNA (1)...(19): siRNA sense strand
ucgcagaguucgaggaagg

SEQ ID NO: 2583545 - RNA, 19 nt, Homo sapiens
  misc_RNA (1)...(19): siRNA sense strand
cugaagaagcugaaacaag

SEQ ID NO: 2583546 - RNA, 19 nt, Homo sapiens
  misc_RNA (1)...(19): siRNA sense strand
gggucauguccaaggcuga

SEQ ID NO: 2583547 - RNA, 19 nt, Homo sapiens
  misc_RNA (1)...(19): siRNA sense strand
agccagagaugguacgcau

SEQ ID NO: 2583548 - RNA, 19 nt, Homo sapiens
  misc_RNA (1)...(19): siRNA sense strand
caguucugcaugagggaca

SEQ ID NO: 2583549 - RNA, 19 nt, Homo sapiens
  misc_RNA (1)...(19): siRNA sense strand
uggaggagaaagagggaau

SEQ ID NO: 2583550 - RNA, 19 nt, Homo sapiens
  misc_RNA (1)...(19): siRNA sense strand
gugaagacgcugaccggaa

SEQ ID NO: 2583551 - RNA, 19 nt, Homo sapiens
  misc_RNA (1)...(19): siRNA sense strand
ccacaacagcagaggcuca

SEQ ID NO: 2583552 - RNA, 19 nt, Homo sapiens
  misc_RNA (1)...(19): siRNA sense strand
ccggaaaggagauugagau

SEQ ID NO: 2583553 - RNA, 19 nt, Homo sapiens
  misc_RNA (1)...(19): siRNA sense strand
aggagcguguggaggagaa

SEQ ID NO: 2583554 - RNA, 19 nt, Homo sapiens
  misc_RNA (1)...(19): siRNA sense strand
ucaaggagcguguggagga

SEQ ID NO: 2583555 - RNA, 19 nt, Homo sapiens
  misc_RNA (1)...(19): siRNA sense strand
aggugaagaaggagaggaa

SEQ ID NO: 2583556 - RNA, 19 nt, Homo sapiens
  misc_RNA (1)...(19): siRNA sense strand
aggagaaggacaaggaaga

SEQ ID NO: 2583557 - RNA, 19 nt, Homo sapiens
  misc_RNA (1)...(19): siRNA sense strand
ccaaagaagcugaagagga

SEQ ID NO: 2583558 - RNA, 19 nt, Homo sapiens
  misc_RNA (1)...(19): siRNA sense strand
aggaggaggagaaggacaa

SEQ ID NO: 2583559 - RNA, 19 nt, Homo sapiens
  misc_RNA (1)...(19): siRNA sense strand
gaaaaugaauugaggacca

SEQ ID NO: 2583560 - RNA, 19 nt, Homo sapiens
  misc_RNA (1)...(19): siRNA sense strand
gugaagaaggagaggaaac

SEQ ID NO: 2583561 - RNA, 19 nt, Homo sapiens
  misc_RNA (1)...(19): siRNA sense strand
aagccgaggaggaggagaa

SEQ ID NO: 2583562 - RNA, 19 nt, Homo sapiens
  misc_RNA (1)...(19): siRNA sense strand
aggccaagacccuggaaau

SEQ ID NO: 2583563 - RNA, 19 nt, Homo sapiens
  misc_RNA (1)...(19): siRNA sense strand
gcgaagaagggcuggagga

SEQ ID NO: 2583564 - RNA, 19 nt, Homo sapiens
  misc_RNA (1)...(19): siRNA sense strand
caaagaagcugaagaggag

SEQ ID NO: 2583565 - RNA, 19 nt, Homo sapiens
  misc_RNA (1)...(19): siRNA sense strand
ccgccaagaacaugcagaa

SEQ ID NO: 2583566 - RNA, 19 nt, Homo sapiens
  misc_RNA (1)...(19): siRNA sense strand
aaggagaagccgaggagga

SEQ ID NO: 2583567 - RNA, 19 nt, Homo sapiens
  misc_RNA (1)...(19): siRNA sense strand
aagcaaaagaagaagaaga

SEQ ID NO: 2583568 - RNA, 19 nt, Homo sapiens
  misc_RNA (1)...(19): siRNA sense strand
uggagauggacgugaccaa

SEQ ID NO: 2583569 - RNA, 19 nt, Homo sapiens
  misc_RNA (1)...(19): siRNA sense strand
gugaaggugaagaaggaga

SEQ ID NO: 2583570 - RNA, 19 nt, Homo sapiens
  misc_RNA (1)...(19): siRNA sense strand
aagaaggagaggaaaccaa

SEQ ID NO: 2583571 - RNA, 19 nt, Homo sapiens
  misc_RNA (1)...(19): siRNA sense strand
aggaggugaaggugaagaa

SEQ ID NO: 2583572 - RNA, 19 nt, Homo sapiens
  misc_RNA (1)...(19): siRNA sense strand
ggaaacucuuggaaggcga

SEQ ID NO: 2583573 - RNA, 19 nt, Homo sapiens
  misc_RNA (1)...(19): siRNA sense strand
aggacaaggaagaggccga

SEQ ID NO: 2583574 - RNA, 19 nt, Homo sapiens
  misc_RNA (1)...(19): siRNA sense strand
agaaagugcacgaagagga

SEQ ID NO: 2583575 - RNA, 19 nt, Homo sapiens
  misc_RNA (1)...(19): siRNA sense strand
uggaggagacccugcgcaa

SEQ ID NO: 2583576 - RNA, 19 nt, Homo sapiens
  misc_RNA (1)...(19): siRNA sense strand
agcaaaagaagaagaagaa

SEQ ID NO: 2583577 - RNA, 19 nt, Homo sapiens
  misc_RNA (1)...(19): siRNA sense strand
aggaccacaaagagugaaa

SEQ ID NO: 2583578 - RNA, 19 nt, Homo sapiens
  misc_RNA (1)...(19): siRNA sense strand
gaggaggaggagaaggaca

SEQ ID NO: 2583579 - RNA, 19 nt, Homo sapiens
  misc_RNA (1)...(19): siRNA sense strand
aagaaggaggugaagguga

SEQ ID NO: 2583580 - RNA, 19 nt, Homo sapiens
  misc_RNA (1)...(19): siRNA sense strand
aagcauaaccaguggcuac

SEQ ID NO: 2583581 - RNA, 19 nt, Homo sapiens
  misc_RNA (1)...(19): siRNA sense strand
cgucuaaggcugaggaagc

SEQ ID NO: 2583582 - RNA, 19 nt, Homo sapiens
  misc_RNA (1)...(19): siRNA sense strand
aagaagggcuggaggagac

SEQ ID NO: 2583583 - RNA, 19 nt, Homo sapiens
  misc_RNA (1)...(19): siRNA sense strand
cugaagaagcaaaagaaga

SEQ ID NO: 2583584 - RNA, 19 nt, Homo sapiens
  misc_RNA (1)...(19): siRNA sense strand
aggaacaagcagcuaagaa

SEQ ID NO: 2583585 - RNA, 19 nt, Homo sapiens
  misc_RNA (1)...(19): siRNA sense strand
aggcagcugaagaggaaga

SEQ ID NO: 2583586 - RNA, 19 nt, Homo sapiens
  misc_RNA (1)...(19): siRNA sense strand
cugccaaggaagagucuga

SEQ ID NO: 2583587 - RNA, 19 nt, Homo sapiens
  misc_RNA (1)...(19): siRNA sense strand
aggaagaggaggcagcuga

SEQ ID NO: 2583588 - RNA, 19 nt, Homo sapiens
  misc_RNA (1)...(19): siRNA sense strand
gaagaagggcuggaggaga

SEQ ID NO: 2583589 - RNA, 19 nt, Homo sapiens
  misc_RNA (1)...(19): siRNA sense strand
gggcaugaaugaagcgcug

SEQ ID NO: 2583590 - RNA, 19 nt, Homo sapiens
  misc_RNA (1)...(19): siRNA sense strand
gagaagccgaggaggagga

SEQ ID NO: 2583591 - RNA, 19 nt, Homo sapiens
  misc_RNA (1)...(19): siRNA sense strand
agaacaagguccuggaagc

SEQ ID NO: 2583592 - RNA, 19 nt, Homo sapiens
  misc_RNA (1)...(19): siRNA sense strand
agaagaagaagaaggaggu

SEQ ID NO: 2583593 - RNA, 19 nt, Homo sapiens
  misc_RNA (1)...(19): siRNA sense strand
ggugaagaaggagaggaaa

SEQ ID NO: 2583594 - RNA, 19 nt, Homo sapiens
  misc_RNA (1)...(19): siRNA sense strand
caugcagaacgcugaggaa

SEQ ID NO: 2583595 - RNA, 19 nt, Homo sapiens
  misc_RNA (1)...(19): siRNA sense strand
ccaacgaucgcgagcgcaa

SEQ ID NO: 2583596 - RNA, 19 nt, Homo sapiens
  misc_RNA (1)...(19): siRNA sense strand
cgaggaagacugugccaga

SEQ ID NO: 2583597 - RNA, 19 nt, Homo sapiens
  misc_RNA (1)...(19): siRNA sense strand
agaacgaggaagaggacga

SEQ ID NO: 2583598 - RNA, 19 nt, Homo sapiens
  misc_RNA (1)...(19): siRNA sense strand
acagcauggccgagaugaa

SEQ ID NO: 2583599 - RNA, 19 nt, Homo sapiens
  misc_RNA (1)...(19): siRNA sense strand
cggagaacgaggaagagga

SEQ ID NO: 2583600 - RNA, 19 nt, Homo sapiens
  misc_RNA (1)...(19): siRNA sense strand
cggccaagaagaagcagga

SEQ ID NO: 2583601 - RNA, 19 nt, Homo sapiens
  misc_RNA (1)...(19): siRNA sense strand
agacuuucgaacaaacaaa

SEQ ID NO: 2583602 - RNA, 19 nt, Homo sapiens
  misc_RNA (1)...(19): siRNA sense strand
ggaagaagcacgcugccga

SEQ ID NO: 2583603 - RNA, 19 nt, Homo sapiens
  misc_RNA (1)...(19): siRNA sense strand
ccaagaagaagcaggacuc

SEQ ID NO: 2583604 - RNA, 19 nt, Homo sapiens
  misc_RNA (1)...(19): siRNA sense strand
ggguaaaggugcuaagcga

SEQ ID NO: 2583605 - RNA, 19 nt, Homo sapiens
  misc_RNA (1)...(19): siRNA sense strand
agagcaaagucguggucaa

SEQ ID NO: 2583606 - RNA, 19 nt, Homo sapiens
  misc_RNA (1)...(19): siRNA sense strand
augaaguggcagagaguuu

SEQ ID NO: 2583607 - RNA, 19 nt, Homo sapiens
  misc_RNA (1)...(19): siRNA sense strand
gguaaaggugcuaagcgaa

SEQ ID NO: 2583608 - RNA, 19 nt, Homo sapiens
  misc_RNA (1)...(19): siRNA sense strand
ggccacagugagauggaaa

SEQ ID NO: 2583609 - RNA, 19 nt, Homo sapiens
  misc_RNA (1)...(19): siRNA sense strand
cuagaaauacuguggcuga

SEQ ID NO: 2583610 - RNA, 19 nt, Homo sapiens
  misc_RNA (1)...(19): siRNA sense strand
cgaugaaguggcagagagu

SEQ ID NO: 2583611 - RNA, 19 nt, Homo sapiens
  misc_RNA (1)...(19): siRNA sense strand
uggcagagaguuuggcaga

SEQ ID NO: 2583612 - RNA, 19 nt, Homo sapiens
  misc_RNA (1)...(19): siRNA sense strand
ugagccagcuggaggccaa

SEQ ID NO: 2583613 - RNA, 19 nt, Homo sapiens
  misc_RNA (1)...(19): siRNA sense strand
gggcugcaggagagagaca

SEQ ID NO: 2583614 - RNA, 19 nt, Homo sapiens
  misc_RNA (1)...(19): siRNA sense strand
gagacaugcagcugggcuu

SEQ ID NO: 2583615 - RNA, 19 nt, Homo sapiens
  misc_RNA (1)...(19): siRNA sense strand
gagcaaaagccuucgcaga

SEQ ID NO: 2583616 - RNA, 19 nt, Homo sapiens
  misc_RNA (1)...(19): siRNA sense strand
uggaccugguacagagcaa

SEQ ID NO: 2583617 - RNA, 19 nt, Homo sapiens
  misc_RNA (1)...(19): siRNA sense strand
ucauggagcugguuggcuu

SEQ ID NO: 2583618 - RNA, 19 nt, Homo sapiens
  misc_RNA (1)...(19): siRNA sense strand
ggagaaagcgcaaggcccu

SEQ ID NO: 2583619 - RNA, 19 nt, Homo sapiens
  misc_RNA (1)...(19): siRNA sense strand
ccaucuucauccuggguga

SEQ ID NO: 2583620 - RNA, 19 nt, Homo sapiens
  misc_RNA (1)...(19): siRNA sense strand
uguccaaagccaaacagaa

SEQ ID NO: 2583621 - RNA, 19 nt, Homo sapiens
  misc_RNA (1)...(19): siRNA sense strand
auaacagagauuugccuaa

SEQ ID NO: 2583622 - RNA, 19 nt, Homo sapiens
  misc_RNA (1)...(19): siRNA sense strand
caaccagacguuaaagcau

SEQ ID NO: 2583623 - RNA, 19 nt, Homo sapiens
  misc_RNA (1)...(19): siRNA sense strand
augaagaugagaagcggau

SEQ ID NO: 2583624 - RNA, 19 nt, Homo sapiens
  misc_RNA (1)...(19): siRNA sense strand
ucaagaguguugugggcaa

SEQ ID NO: 2583625 - RNA, 19 nt, Homo sapiens
  misc_RNA (1)...(19): siRNA sense strand
acgaggaggaagagaaaga

SEQ ID NO: 2583626 - RNA, 19 nt, Homo sapiens
  misc_RNA (1)...(19): siRNA sense strand
ucacaguagaagagaauga

SEQ ID NO: 2583627 - RNA, 19 nt, Homo sapiens
  misc_RNA (1)...(19): siRNA sense strand
ccgaggacgaggaggaaga

SEQ ID NO: 2583628 - RNA, 19 nt, Homo sapiens
  misc_RNA (1)...(19): siRNA sense strand
ccagcaaagaggaagaaau

SEQ ID NO: 2583629 - RNA, 19 nt, Homo sapiens
  misc_RNA (1)...(19): siRNA sense strand
aggaagacucugaagaaga

SEQ ID NO: 2583630 - RNA, 19 nt, Homo sapiens
  misc_RNA (1)...(19): siRNA sense strand
ggacgaugcugauacggua

SEQ ID NO: 2583631 - RNA, 19 nt, Homo sapiens
  misc_RNA (1)...(19): siRNA sense strand
gugaugaggaagaggagga

SEQ ID NO: 2583632 - RNA, 19 nt, Homo sapiens
  misc_RNA (1)...(19): siRNA sense strand
aggacgaggaggaagagaa

SEQ ID NO: 2583633 - RNA, 19 nt, Homo sapiens
  misc_RNA (1)...(19): siRNA sense strand
aggaugaggaggaagguga

SEQ ID NO: 2583634 - RNA, 19 nt, Homo sapiens
  misc_RNA (1)...(19): siRNA sense strand
ggaggaaggugaagcguug

SEQ ID NO: 2583635 - RNA, 19 nt, Homo sapiens
  misc_RNA (1)...(19): siRNA sense strand
ggaggaaagaccagcuaca

SEQ ID NO: 2583636 - RNA, 19 nt, Homo sapiens
  misc_RNA (1)...(19): siRNA sense strand
uaucacaguagaagagaau

SEQ ID NO: 2583637 - RNA, 19 nt, Homo sapiens
  misc_RNA (1)...(19): siRNA sense strand
ccucagucccagacaggaa

SEQ ID NO: 2583638 - RNA, 19 nt, Homo sapiens
  misc_RNA (1)...(19): siRNA sense strand
ggaugaggaggaaggugaa

SEQ ID NO: 2583639 - RNA, 19 nt, Homo sapiens
  misc_RNA (1)...(19): siRNA sense strand
caaagguggaagaggcaga

SEQ ID NO: 2583640 - RNA, 19 nt, Homo sapiens
  misc_RNA (1)...(19): siRNA sense strand
ccaccagcaaagaggaaga

SEQ ID NO: 2583641 - RNA, 19 nt, Homo sapiens
  misc_RNA (1)...(19): siRNA sense strand
ggagugaagaggagaccga

SEQ ID NO: 2583642 - RNA, 19 nt, Homo sapiens
  misc_RNA (1)...(19): siRNA sense strand
agaccgaggacgaggagga

SEQ ID NO: 2583643 - RNA, 19 nt, Homo sapiens
  misc_RNA (1)...(19): siRNA sense strand
agaaugagugggugguaga

SEQ ID NO: 2583644 - RNA, 19 nt, Homo sapiens
  misc_RNA (1)...(19): siRNA sense strand
acuccaacucugaggauga

SEQ ID NO: 2583645 - RNA, 19 nt, Homo sapiens
  misc_RNA (1)...(19): siRNA sense strand
agccaaaggugacugggaa

SEQ ID NO: 2583646 - RNA, 19 nt, Homo sapiens
  misc_RNA (1)...(19): siRNA sense strand
aagaggagaccgaggacga

SEQ ID NO: 2583647 - RNA, 19 nt, Homo sapiens
  misc_RNA (1)...(19): siRNA sense strand
augagugggugguagacua

SEQ ID NO: 2583648 - RNA, 19 nt, Homo sapiens
  misc_RNA (1)...(19): siRNA sense strand
agagcagccuuuugagaaa

SEQ ID NO: 2583649 - RNA, 19 nt, Homo sapiens
  misc_RNA (1)...(19): siRNA sense strand
acucugaagaagaugguau

SEQ ID NO: 2583650 - RNA, 19 nt, Homo sapiens
  misc_RNA (1)...(19): siRNA sense strand
cuaucacaguagaagagaa

SEQ ID NO: 2583651 - RNA, 19 nt, Homo sapiens
  misc_RNA (1)...(19): siRNA sense strand
aagaagaugguauggugaa

SEQ ID NO: 2583652 - RNA, 19 nt, Homo sapiens
  misc_RNA (1)...(19): siRNA sense strand
gaagaagaugguaugguga

SEQ ID NO: 2583653 - RNA, 19 nt, Homo sapiens
  misc_RNA (1)...(19): siRNA sense strand
cuuagaugguugaaaacua

SEQ ID NO: 2583654 - RNA, 19 nt, Homo sapiens
  misc_RNA (1)...(19): siRNA sense strand
acucugaggaugaggagga

SEQ ID NO: 2583655 - RNA, 19 nt, Homo sapiens
  misc_RNA (1)...(19): siRNA sense strand
uggaaaagccgaagggauc

SEQ ID NO: 2583656 - RNA, 19 nt, Homo sapiens
  misc_RNA (1)...(19): siRNA sense strand
gagacuuccugcuuggcaa

SEQ ID NO: 2583657 - RNA, 19 nt, Homo sapiens
  misc_RNA (1)...(19): siRNA sense strand
uuccagaaacagaaugaua

SEQ ID NO: 2583658 - RNA, 19 nt, Homo sapiens
  misc_RNA (1)...(19): siRNA sense strand
uccaggauauugugggaau

SEQ ID NO: 2583659 - RNA, 19 nt, Homo sapiens
  misc_RNA (1)...(19): siRNA sense strand
acaaggaugagaaggacau

SEQ ID NO: 2583660 - RNA, 19 nt, Homo sapiens
  misc_RNA (1)...(19): siRNA sense strand
agaucaauguggaugagga

SEQ ID NO: 2583661 - RNA, 19 nt, Homo sapiens
  misc_RNA (1)...(19): siRNA sense strand
ucaagaaggaucuggccau

SEQ ID NO: 2583662 - RNA, 19 nt, Homo sapiens
  misc_RNA (1)...(19): siRNA sense strand
augaggaagaggaggagga

SEQ ID NO: 2583663 - RNA, 19 nt, Homo sapiens
  misc_RNA (1)...(19): siRNA sense strand
agaagggugccgagacaga

SEQ ID NO: 2583664 - RNA, 19 nt, Homo sapiens
  misc_RNA (1)...(19): siRNA sense strand
ggguugagaagcagcaguu

SEQ ID NO: 2583665 - RNA, 19 nt, Homo sapiens
  misc_RNA (1)...(19): siRNA sense strand
ccacaauauggauggguuc

SEQ ID NO: 2583666 - RNA, 19 nt, Homo sapiens
  misc_RNA (1)...(19): siRNA sense strand
gcugaauggcaucuccaaa

SEQ ID NO: 2583667 - RNA, 19 nt, Homo sapiens
  misc_RNA (1)...(19): siRNA sense strand
gcuccgaggacgaugcuga

SEQ ID NO: 2583668 - RNA, 19 nt, Homo sapiens
  misc_RNA (1)...(19): siRNA sense strand
gggugugauccuugccaau

SEQ ID NO: 2583669 - RNA, 19 nt, Homo sapiens
  misc_RNA (1)...(19): siRNA sense strand
aggaagaaaucucagucca

SEQ ID NO: 2583670 - RNA, 19 nt, Homo sapiens
  misc_RNA (1)...(19): siRNA sense strand
gguuggaacucuugccucu

SEQ ID NO: 2583671 - RNA, 19 nt, Homo sapiens
  misc_RNA (1)...(19): siRNA sense strand
cugcaguaagugacgaaaa

SEQ ID NO: 2583672 - RNA, 19 nt, Homo sapiens
  misc_RNA (1)...(19): siRNA sense strand
cuggaaaagccgaagggau

SEQ ID NO: 2583673 - RNA, 19 nt, Homo sapiens
  misc_RNA (1)...(19): siRNA sense strand
ccaggauauugugggaauu

SEQ ID NO: 2583674 - RNA, 19 nt, Homo sapiens
  misc_RNA (1)...(19): siRNA sense strand
gauuagugccauugagaaa

SEQ ID NO: 2583675 - RNA, 19 nt, Homo sapiens
  misc_RNA (1)...(19): siRNA sense strand
ccauugagaaacagaaauu

SEQ ID NO: 2583676 - RNA, 19 nt, Homo sapiens
  misc_RNA (1)...(19): siRNA sense strand
cguuaugauuagugccauu

SEQ ID NO: 2583677 - RNA, 19 nt, Homo sapiens
  misc_RNA (1)...(19): siRNA sense strand
gggcagacaaguuuggcaa

SEQ ID NO: 2583678 - RNA, 19 nt, Homo sapiens
  misc_RNA (1)...(19): siRNA sense strand
gugucuaugaccugggaaa

SEQ ID NO: 2583679 - RNA, 19 nt, Homo sapiens
  misc_RNA (1)...(19): siRNA sense strand
uggagaugaugaugaagaa

SEQ ID NO: 2583680 - RNA, 19 nt, Homo sapiens
  misc_RNA (1)...(19): siRNA sense strand
acacauugaagaugaguuu

SEQ ID NO: 2583681 - RNA, 19 nt, Homo sapiens
  misc_RNA (1)...(19): siRNA sense strand
cuguagaagaagugacuga

SEQ ID NO: 2583682 - RNA, 19 nt, Homo sapiens
  misc_RNA (1)...(19): siRNA sense strand
acacagaacggaaggagau

SEQ ID NO: 2583683 - RNA, 19 nt, Homo sapiens
  misc_RNA (1)...(19): siRNA sense strand
ugaugaagaaccugaguuu

SEQ ID NO: 2583684 - RNA, 19 nt, Homo sapiens
  misc_RNA (1)...(19): siRNA sense strand
caaacugagcagggagaua

SEQ ID NO: 2583685 - RNA, 19 nt, Homo sapiens
  misc_RNA (1)...(19): siRNA sense strand
agaaacagaaauuggugua

SEQ ID NO: 2583686 - RNA, 19 nt, Homo sapiens
  misc_RNA (1)...(19): siRNA sense strand
cgagcagacaagagaguca

SEQ ID NO: 2583687 - RNA, 19 nt, Homo sapiens
  misc_RNA (1)...(19): siRNA sense strand
agaaugugauugauggaga

SEQ ID NO: 2583688 - RNA, 19 nt, Homo sapiens
  misc_RNA (1)...(19): siRNA sense strand
ccuuguguaucguggaaau

SEQ ID NO: 2583689 - RNA, 19 nt, Homo sapiens
  misc_RNA (1)...(19): siRNA sense strand
ucauccacccugagaguaa

SEQ ID NO: 2583690 - RNA, 19 nt, Homo sapiens
  misc_RNA (1)...(19): siRNA sense strand
uggaagaaggagacacauu

SEQ ID NO: 2583691 - RNA, 19 nt, Homo sapiens
  misc_RNA (1)...(19): siRNA sense strand
cugaagaacuggaccgaac

SEQ ID NO: 2583692 - RNA, 19 nt, Homo sapiens
  misc_RNA (1)...(19): siRNA sense strand
ggaaggagaugucagcaga

SEQ ID NO: 2583693 - RNA, 19 nt, Homo sapiens
  misc_RNA (1)...(19): siRNA sense strand
auaccugaauauugggcua

SEQ ID NO: 2583694 - RNA, 19 nt, Homo sapiens
  misc_RNA (1)...(19): siRNA sense strand
caguacacacccaggaaau

SEQ ID NO: 2583695 - RNA, 19 nt, Homo sapiens
  misc_RNA (1)...(19): siRNA sense strand
gcucagaaucacuugucua

SEQ ID NO: 2583696 - RNA, 19 nt, Homo sapiens
  misc_RNA (1)...(19): siRNA sense strand
ucauguaguuggaguagau

SEQ ID NO: 2583697 - RNA, 19 nt, Homo sapiens
  misc_RNA (1)...(19): siRNA sense strand
aagaugaguuugaugccua

SEQ ID NO: 2583698 - RNA, 19 nt, Homo sapiens
  misc_RNA (1)...(19): siRNA sense strand
cagugaaccuuuggaggaa

SEQ ID NO: 2583699 - RNA, 19 nt, Homo sapiens
  misc_RNA (1)...(19): siRNA sense strand
gcuacaagcguaaugaaaa

SEQ ID NO: 2583700 - RNA, 19 nt, Homo sapiens
  misc_RNA (1)...(19): siRNA sense strand
agauaugguuacugagauc

SEQ ID NO: 2583701 - RNA, 19 nt, Homo sapiens
  misc_RNA (1)...(19): siRNA sense strand
agcagauggcagaggaaau

SEQ ID NO: 2583702 - RNA, 19 nt, Homo sapiens
  misc_RNA (1)...(19): siRNA sense strand
gaaacaaagcccuguggga

SEQ ID NO: 2583703 - RNA, 19 nt, Homo sapiens
  misc_RNA (1)...(19): siRNA sense strand
ccgaaguguccaagaaacu

SEQ ID NO: 2583704 - RNA, 19 nt, Homo sapiens
  misc_RNA (1)...(19): siRNA sense strand
cugugaagaaugugauuga

SEQ ID NO: 2583705 - RNA, 19 nt, Homo sapiens
  misc_RNA (1)...(19): siRNA sense strand
ccauggaacccaacaaaca

SEQ ID NO: 2583706 - RNA, 19 nt, Homo sapiens
  misc_RNA (1)...(19): siRNA sense strand
guaucauguaguuggagua

SEQ ID NO: 2583707 - RNA, 19 nt, Homo sapiens
  misc_RNA (1)...(19): siRNA sense strand
acagaugaagauaugguua

SEQ ID NO: 2583708 - RNA, 19 nt, Homo sapiens
  misc_RNA (1)...(19): siRNA sense strand
cuuacgagacacuggaauu

SEQ ID NO: 2583709 - RNA, 19 nt, Homo sapiens
  misc_RNA (1)...(19): siRNA sense strand
cagccaugccucuggaaga

SEQ ID NO: 2583710 - RNA, 19 nt, Homo sapiens
  misc_RNA (1)...(19): siRNA sense strand
ccaaugaugaaguagauga

SEQ ID NO: 2583711 - RNA, 19 nt, Homo sapiens
  misc_RNA (1)...(19): siRNA sense strand
ucuuggagaugaugaugaa

SEQ ID NO: 2583712 - RNA, 19 nt, Homo sapiens
  misc_RNA (1)...(19): siRNA sense strand
gugcagugaaccagcgaca

SEQ ID NO: 2583713 - RNA, 19 nt, Homo sapiens
  misc_RNA (1)...(19): siRNA sense strand
ggaaaugguggaagcagca

SEQ ID NO: 2583714 - RNA, 19 nt, Homo sapiens
  misc_RNA (1)...(19): siRNA sense strand
ugaugaaguagaugaggau

SEQ ID NO: 2583715 - RNA, 19 nt, Homo sapiens
  misc_RNA (1)...(19): siRNA sense strand
uagcaucagaauuuggaaa

SEQ ID NO: 2583716 - RNA, 19 nt, Homo sapiens
  misc_RNA (1)...(19): siRNA sense strand
gcucagagaaagcagcaga

SEQ ID NO: 2583717 - RNA, 19 nt, Homo sapiens
  misc_RNA (1)...(19): siRNA sense strand
gcagcagauggcagaggaa

SEQ ID NO: 2583718 - RNA, 19 nt, Homo sapiens
  misc_RNA (1)...(19): siRNA sense strand
cccagaaggcagaggugau

SEQ ID NO: 2583719 - RNA, 19 nt, Homo sapiens
  misc_RNA (1)...(19): siRNA sense strand
uggaauuugcaucggguuu

SEQ ID NO: 2583720 - RNA, 19 nt, Homo sapiens
  misc_RNA (1)...(19): siRNA sense strand
cagaauuuggaaaccauua

SEQ ID NO: 2583721 - RNA, 19 nt, Homo sapiens
  misc_RNA (1)...(19): siRNA sense strand
acauugaagaugaguuuga

SEQ ID NO: 2583722 - RNA, 19 nt, Homo sapiens
  misc_RNA (1)...(19): siRNA sense strand
cagacaagagagucaauga

SEQ ID NO: 2583723 - RNA, 19 nt, Homo sapiens
  misc_RNA (1)...(19): siRNA sense strand
agagagucaaugaguggaa

SEQ ID NO: 2583724 - RNA, 19 nt, Homo sapiens
  misc_RNA (1)...(19): siRNA sense strand
cugaaugaguacacagaac

SEQ ID NO: 2583725 - RNA, 19 nt, Homo sapiens
  misc_RNA (1)...(19): siRNA sense strand
gaaagcagcagauggcaga

SEQ ID NO: 2583726 - RNA, 19 nt, Homo sapiens
  misc_RNA (1)...(19): siRNA sense strand
gcugaucccuggaggcuca

SEQ ID NO: 2583727 - RNA, 19 nt, Homo sapiens
  misc_RNA (1)...(19): siRNA sense strand
cuggaagcccacaaagcaa

SEQ ID NO: 2583728 - RNA, 19 nt, Homo sapiens
  misc_RNA (1)...(19): siRNA sense strand
uggcaaaguacauacccua

SEQ ID NO: 2583729 - RNA, 19 nt, Homo sapiens
  misc_RNA (1)...(19): siRNA sense strand
ggucuauccagauggcauu

SEQ ID NO: 2583730 - RNA, 19 nt, Homo sapiens
  misc_RNA (1)...(19): siRNA sense strand
caggaggagagcuggucua

SEQ ID NO: 2583731 - RNA, 19 nt, Homo sapiens
  misc_RNA (1)...(19): siRNA sense strand
ccugagaguaacaaccuua

SEQ ID NO: 2583732 - RNA, 19 nt, Homo sapiens
  misc_RNA (1)...(19): siRNA sense strand
caccaaugaugaaguagau

SEQ ID NO: 2583733 - RNA, 19 nt, Homo sapiens
  misc_RNA (1)...(19): siRNA sense strand
gugaaccuuuggaggaaca

SEQ ID NO: 2583734 - RNA, 19 nt, Homo sapiens
  misc_RNA (1)...(19): siRNA sense strand
augccuuggugcaggucua

SEQ ID NO: 2583735 - RNA, 19 nt, Homo sapiens
  misc_RNA (1)...(19): siRNA sense strand
uggcagaggaaauggugga

SEQ ID NO: 2583736 - RNA, 19 nt, Homo sapiens
  misc_RNA (1)...(19): siRNA sense strand
aggaaaagagagagagaaa

SEQ ID NO: 2583737 - RNA, 19 nt, Homo sapiens
  misc_RNA (1)...(19): siRNA sense strand
cuauuacaguagugggaau

SEQ ID NO: 2583738 - RNA, 19 nt, Homo sapiens
  misc_RNA (1)...(19): siRNA sense strand
gaauagaacagcaaugaga

SEQ ID NO: 2583739 - RNA, 19 nt, Homo sapiens
  misc_RNA (1)...(19): siRNA sense strand
gggagaggcaugugcucaa

SEQ ID NO: 2583740 - RNA, 19 nt, Homo sapiens
  misc_RNA (1)...(19): siRNA sense strand
cugguggaguagaggagaa

SEQ ID NO: 2583741 - RNA, 19 nt, Homo sapiens
  misc_RNA (1)...(19): siRNA sense strand
ggcugaaggcauuugcaaa

SEQ ID NO: 2583742 - RNA, 19 nt, Homo sapiens
  misc_RNA (1)...(19): siRNA sense strand
guuaacagcgggagaggca

SEQ ID NO: 2583743 - RNA, 19 nt, Homo sapiens
  misc_RNA (1)...(19): siRNA sense strand
caaugaaucaagugaaacu

SEQ ID NO: 2583744 - RNA, 19 nt, Homo sapiens
  misc_RNA (1)...(19): siRNA sense strand
agaaguuaacagcgggaga

SEQ ID NO: 2583745 - RNA, 19 nt, Homo sapiens
  misc_RNA (1)...(19): siRNA sense strand
ccccaaaugccuugagaau

SEQ ID NO: 2583746 - RNA, 19 nt, Homo sapiens
  misc_RNA (1)...(19): siRNA sense strand
aguagaggagaaagcuaaa

SEQ ID NO: 2583747 - RNA, 19 nt, Homo sapiens
  misc_RNA (1)...(19): siRNA sense strand
gcuaaaacucuacgcgcua

SEQ ID NO: 2583748 - RNA, 19 nt, Homo sapiens
  misc_RNA (1)...(19): siRNA sense strand
gcaaugagagccagucaga

SEQ ID NO: 2583749 - RNA, 19 nt, Homo sapiens
  misc_RNA (1)...(19): siRNA sense strand
ugaaauuaugcgugcacuu

SEQ ID NO: 2583750 - RNA, 19 nt, Homo sapiens
  misc_RNA (1)...(19): siRNA sense strand
ggaaagaaguuaacagcgg

SEQ ID NO: 2583751 - RNA, 19 nt, Homo sapiens
  misc_RNA (1)...(19): siRNA sense strand
cgcuguuaaugcugaagaa

SEQ ID NO: 2583752 - RNA, 19 nt, Homo sapiens
  misc_RNA (1)...(19): siRNA sense strand
aaucaggaaaagagagaga

SEQ ID NO: 2583753 - RNA, 19 nt, Homo sapiens
  misc_RNA (1)...(19): siRNA sense strand
caggaaacgaagugaagcu

SEQ ID NO: 2583754 - RNA, 19 nt, Homo sapiens
  misc_RNA (1)...(19): siRNA sense strand
ugguggaguagaggagaaa

SEQ ID NO: 2583755 - RNA, 19 nt, Homo sapiens
  misc_RNA (1)...(19): siRNA sense strand
agaacagcaaugagagcca

SEQ ID NO: 2583756 - RNA, 19 nt, Homo sapiens
  misc_RNA (1)...(19): siRNA sense strand
aggaaaagagagagagaaa

SEQ ID NO: 2583757 - RNA, 19 nt, Homo sapiens
  misc_RNA (1)...(19): siRNA sense strand
cuauuacaguagugggaau

SEQ ID NO: 2583758 - RNA, 19 nt, Homo sapiens
  misc_RNA (1)...(19): siRNA sense strand
gggagaggcaugugcucaa

SEQ ID NO: 2583759 - RNA, 19 nt, Homo sapiens
  misc_RNA (1)...(19): siRNA sense strand
cugguggaguagaggagaa

SEQ ID NO: 2583760 - RNA, 19 nt, Homo sapiens
  misc_RNA (1)...(19): siRNA sense strand
ggcugaaggcauuugcaaa

SEQ ID NO: 2583761 - RNA, 19 nt, Homo sapiens
  misc_RNA (1)...(19): siRNA sense strand
guuaacagcgggagaggca

SEQ ID NO: 2583762 - RNA, 19 nt, Homo sapiens
  misc_RNA (1)...(19): siRNA sense strand
agaaguuaacagcgggaga

SEQ ID NO: 2583763 - RNA, 19 nt, Homo sapiens
  misc_RNA (1)...(19): siRNA sense strand
ccccaaaugccuugagaau

SEQ ID NO: 2583764 - RNA, 19 nt, Homo sapiens
  misc_RNA (1)...(19): siRNA sense strand
aguagaggagaaagcuaaa

SEQ ID NO: 2583765 - RNA, 19 nt, Homo sapiens
  misc_RNA (1)...(19): siRNA sense strand
ugaaauuaugcgugcacuu

SEQ ID NO: 2583766 - RNA, 19 nt, Homo sapiens
  misc_RNA (1)...(19): siRNA sense strand
ggaaagaaguuaacagcgg

SEQ ID NO: 2583767 - RNA, 19 nt, Homo sapiens
  misc_RNA (1)...(19): siRNA sense strand
cgcuguuaaugcugaagaa

SEQ ID NO: 2583768 - RNA, 19 nt, Homo sapiens
  misc_RNA (1)...(19): siRNA sense strand
aaucaggaaaagagagaga

SEQ ID NO: 2583769 - RNA, 19 nt, Homo sapiens
  misc_RNA (1)...(19): siRNA sense strand
ugguggaguagaggagaaa

SEQ ID NO: 2583770 - RNA, 19 nt, Homo sapiens
  misc_RNA (1)...(19): siRNA sense strand
gugaagaaacagaaaguaa

SEQ ID NO: 2583771 - RNA, 19 nt, Homo sapiens
  misc_RNA (1)...(19): siRNA sense strand
agacaaagcaagaaccaaa

SEQ ID NO: 2583772 - RNA, 19 nt, Homo sapiens
  misc_RNA (1)...(19): siRNA sense strand
ggguaaagaagauaaacaa

SEQ ID NO: 2583773 - RNA, 19 nt, Homo sapiens
  misc_RNA (1)...(19): siRNA sense strand
gugacuaugaugaggguaa

SEQ ID NO: 2583774 - RNA, 19 nt, Homo sapiens
  misc_RNA (1)...(19): siRNA sense strand
caguaguaacucugagaaa

SEQ ID NO: 2583775 - RNA, 19 nt, Homo sapiens
  misc_RNA (1)...(19): siRNA sense strand
cagggaauguuguggcaaa

SEQ ID NO: 2583776 - RNA, 19 nt, Homo sapiens
  misc_RNA (1)...(19): siRNA sense strand
gcauaauauugaaggggaa

SEQ ID NO: 2583777 - RNA, 19 nt, Homo sapiens
  misc_RNA (1)...(19): siRNA sense strand
aaauagaagcugugaauca

SEQ ID NO: 2583778 - RNA, 19 nt, Homo sapiens
  misc_RNA (1)...(19): siRNA sense strand
gcagcauaguucagggcaa

SEQ ID NO: 2583779 - RNA, 19 nt, Homo sapiens
  misc_RNA (1)...(19): siRNA sense strand
caagugaagaugaggaaau

SEQ ID NO: 2583780 - RNA, 19 nt, Homo sapiens
  misc_RNA (1)...(19): siRNA sense strand
gcauauggaagauggaauu

SEQ ID NO: 2583781 - RNA, 19 nt, Homo sapiens
  misc_RNA (1)...(19): siRNA sense strand
ggaagagagggcagaggua

SEQ ID NO: 2583782 - RNA, 19 nt, Homo sapiens
  misc_RNA (1)...(19): siRNA sense strand
aggaaagugaagagaaaga

SEQ ID NO: 2583783 - RNA, 19 nt, Homo sapiens
  misc_RNA (1)...(19): siRNA sense strand
gugcagaaucuaaagaaau

SEQ ID NO: 2583784 - RNA, 19 nt, Homo sapiens
  misc_RNA (1)...(19): siRNA sense strand
uauacaaacugaagcacaa

SEQ ID NO: 2583785 - RNA, 19 nt, Homo sapiens
  misc_RNA (1)...(19): siRNA sense strand
caguagaaacggaggaagu

SEQ ID NO: 2583786 - RNA, 19 nt, Homo sapiens
  misc_RNA (1)...(19): siRNA sense strand
gcacaacacuuuagggaug

SEQ ID NO: 2583787 - RNA, 19 nt, Homo sapiens
  misc_RNA (1)...(19): siRNA sense strand
aguuauguuuggagaaaga

SEQ ID NO: 2583788 - RNA, 19 nt, Homo sapiens
  misc_RNA (1)...(19): siRNA sense strand
gggaauaauaaccuacaaa

SEQ ID NO: 2583789 - RNA, 19 nt, Homo sapiens
  misc_RNA (1)...(19): siRNA sense strand
ucuuaaagcugaacaccaa

SEQ ID NO: 2583790 - RNA, 19 nt, Homo sapiens
  misc_RNA (1)...(19): siRNA sense strand
ccauagagaagaacaagaa

SEQ ID NO: 2583791 - RNA, 19 nt, Homo sapiens
  misc_RNA (1)...(19): siRNA sense strand
cuuacaaaccuaugggauu

SEQ ID NO: 2583792 - RNA, 19 nt, Homo sapiens
  misc_RNA (1)...(19): siRNA sense strand
gcaagaaaacacuguaaaa

SEQ ID NO: 2583793 - RNA, 19 nt, Homo sapiens
  misc_RNA (1)...(19): siRNA sense strand
gcguuacaaaugugaauua

SEQ ID NO: 2583794 - RNA, 19 nt, Homo sapiens
  misc_RNA (1)...(19): siRNA sense strand
caggcgaacuguugcuaaa

SEQ ID NO: 2583795 - RNA, 19 nt, Homo sapiens
  misc_RNA (1)...(19): siRNA sense strand
ccaccaacuuuuaggacaa

SEQ ID NO: 2583796 - RNA, 19 nt, Homo sapiens
  misc_RNA (1)...(19): siRNA sense strand
gugaagaugaggaaaugaa

SEQ ID NO: 2583797 - RNA, 19 nt, Homo sapiens
  misc_RNA (1)...(19): siRNA sense strand
ucaaauuggcagugacaga

SEQ ID NO: 2583798 - RNA, 19 nt, Homo sapiens
  misc_RNA (1)...(19): siRNA sense strand
gagaagaacaagaaggaag

SEQ ID NO: 2583799 - RNA, 19 nt, Homo sapiens
  misc_RNA (1)...(19): siRNA sense strand
agaagaacaagaaggaaga

SEQ ID NO: 2583800 - RNA, 19 nt, Homo sapiens
  misc_RNA (1)...(19): siRNA sense strand
gaaaauagaagcugugaau

SEQ ID NO: 2583801 - RNA, 19 nt, Homo sapiens
  misc_RNA (1)...(19): siRNA sense strand
acgagaacaucaagguuau

SEQ ID NO: 2583802 - RNA, 19 nt, Homo sapiens
  misc_RNA (1)...(19): siRNA sense strand
caagaaugcaucagaacau

SEQ ID NO: 2583803 - RNA, 19 nt, Homo sapiens
  misc_RNA (1)...(19): siRNA sense strand
cagccauagagaagaacaa

SEQ ID NO: 2583804 - RNA, 19 nt, Homo sapiens
  misc_RNA (1)...(19): siRNA sense strand
aggcagccauagagaagaa

SEQ ID NO: 2583805 - RNA, 19 nt, Homo sapiens
  misc_RNA (1)...(19): siRNA sense strand
gaacuguugcuaaaggaaa

SEQ ID NO: 2583806 - RNA, 19 nt, Homo sapiens
  misc_RNA (1)...(19): siRNA sense strand
caaugaaugaagagcuaau

SEQ ID NO: 2583807 - RNA, 19 nt, Homo sapiens
  misc_RNA (1)...(19): siRNA sense strand
ggaacuugucaaauguaaa

SEQ ID NO: 2583808 - RNA, 19 nt, Homo sapiens
  misc_RNA (1)...(19): siRNA sense strand
gcucaguauuugaugcaga

SEQ ID NO: 2583809 - RNA, 19 nt, Homo sapiens
  misc_RNA (1)...(19): siRNA sense strand
caugagaaccugacugcaa

SEQ ID NO: 2583810 - RNA, 19 nt, Homo sapiens
  misc_RNA (1)...(19): siRNA sense strand
ugugcagaaucuaaagaaa

SEQ ID NO: 2583811 - RNA, 19 nt, Homo sapiens
  misc_RNA (1)...(19): siRNA sense strand
gaguaaacugcaaagaaga

SEQ ID NO: 2583812 - RNA, 19 nt, Homo sapiens
  misc_RNA (1)...(19): siRNA sense strand
cugcaaucccagagcaaaa

SEQ ID NO: 2583813 - RNA, 19 nt, Homo sapiens
  misc_RNA (1)...(19): siRNA sense strand
ggaugaauguaguucugaa

SEQ ID NO: 2583814 - RNA, 19 nt, Homo sapiens
  misc_RNA (1)...(19): siRNA sense strand
gcuauuaaggagauugcaa

SEQ ID NO: 2583815 - RNA, 19 nt, Homo sapiens
  misc_RNA (1)...(19): siRNA sense strand
ugaauguaguucugaaaca

SEQ ID NO: 2583816 - RNA, 19 nt, Homo sapiens
  misc_RNA (1)...(19): siRNA sense strand
cuauuaaggagauugcaaa

SEQ ID NO: 2583817 - RNA, 19 nt, Homo sapiens
  misc_RNA (1)...(19): siRNA sense strand
ccuagaacaguguaauaua

SEQ ID NO: 2583818 - RNA, 19 nt, Homo sapiens
  misc_RNA (1)...(19): siRNA sense strand
uggcaaauaauauggugaa

SEQ ID NO: 2583819 - RNA, 19 nt, Homo sapiens
  misc_RNA (1)...(19): siRNA sense strand
ugaugaggguaaagaagau

SEQ ID NO: 2583820 - RNA, 19 nt, Homo sapiens
  misc_RNA (1)...(19): siRNA sense strand
cagaucagcauaaggagaa

SEQ ID NO: 2583821 - RNA, 19 nt, Homo sapiens
  misc_RNA (1)...(19): siRNA sense strand
gcagaaacauuuacggaag

SEQ ID NO: 2583822 - RNA, 19 nt, Homo sapiens
  misc_RNA (1)...(19): siRNA sense strand
gcuugcaaauauaaggaau

SEQ ID NO: 2583823 - RNA, 19 nt, Homo sapiens
  misc_RNA (1)...(19): siRNA sense strand
caucagaccaccaggagau

SEQ ID NO: 2583824 - RNA, 19 nt, Homo sapiens
  misc_RNA (1)...(19): siRNA sense strand
gugccuauuuagagcaaca

SEQ ID NO: 2583825 - RNA, 19 nt, Homo sapiens
  misc_RNA (1)...(19): siRNA sense strand
cuaagaugcauauggaaga

SEQ ID NO: 2583826 - RNA, 19 nt, Homo sapiens
  misc_RNA (1)...(19): siRNA sense strand
gaugaauguaguucugaaa

SEQ ID NO: 2583827 - RNA, 19 nt, Homo sapiens
  misc_RNA (1)...(19): siRNA sense strand
aguaaacugcaaagaagaa

SEQ ID NO: 2583828 - RNA, 19 nt, Homo sapiens
  misc_RNA (1)...(19): siRNA sense strand
acaguuauguuuggagaaa

SEQ ID NO: 2583829 - RNA, 19 nt, Homo sapiens
  misc_RNA (1)...(19): siRNA sense strand
aggaaguacuagacaucau

SEQ ID NO: 2583830 - RNA, 19 nt, Homo sapiens
  misc_RNA (1)...(19): siRNA sense strand
ccaaacugcaaguguauau

SEQ ID NO: 2583831 - RNA, 19 nt, Homo sapiens
  misc_RNA (1)...(19): siRNA sense strand
gauuuaaguggcuaugaaa

SEQ ID NO: 2583832 - RNA, 19 nt, Homo sapiens
  misc_RNA (1)...(19): siRNA sense strand
gugaaaagcaagauuguau

SEQ ID NO: 2583833 - RNA, 19 nt, Homo sapiens
  misc_RNA (1)...(19): siRNA sense strand
aagaaaacagugacaguaa

SEQ ID NO: 2583834 - RNA, 19 nt, Homo sapiens
  misc_RNA (1)...(19): siRNA sense strand
cugaaaaguuggaugcaga

SEQ ID NO: 2583835 - RNA, 19 nt, Homo sapiens
  misc_RNA (1)...(19): siRNA sense strand
acugaguuguuucgaauua

SEQ ID NO: 2583836 - RNA, 19 nt, Homo sapiens
  misc_RNA (1)...(19): siRNA sense strand
cagugaaacuugaggaguc

SEQ ID NO: 2583837 - RNA, 19 nt, Homo sapiens
  misc_RNA (1)...(19): siRNA sense strand
gcucagauacaaacaguga

SEQ ID NO: 2583838 - RNA, 19 nt, Homo sapiens
  misc_RNA (1)...(19): siRNA sense strand
uggccaaaccaaugagaau

SEQ ID NO: 2583839 - RNA, 19 nt, Homo sapiens
  misc_RNA (1)...(19): siRNA sense strand
cagacuggcuggauggcaa

SEQ ID NO: 2583840 - RNA, 19 nt, Homo sapiens
  misc_RNA (1)...(19): siRNA sense strand
uggcagaggaaguggacga

SEQ ID NO: 2583841 - RNA, 19 nt, Homo sapiens
  misc_RNA (1)...(19): siRNA sense strand
aagagaauaaagaggaaga

SEQ ID NO: 2583842 - RNA, 19 nt, Homo sapiens
  misc_RNA (1)...(19): siRNA sense strand
agaaaagcaccgaggauuu

SEQ ID NO: 2583843 - RNA, 19 nt, Homo sapiens
  misc_RNA (1)...(19): siRNA sense strand
ggaagaagggucagagccu

SEQ ID NO: 2583844 - RNA, 19 nt, Homo sapiens
  misc_RNA (1)...(19): siRNA sense strand
acguacaauucgugucaau

SEQ ID NO: 2583845 - RNA, 19 nt, Homo sapiens
  misc_RNA (1)...(19): siRNA sense strand
ggcuuuggcuuuaagggaa

SEQ ID NO: 2583846 - RNA, 19 nt, Homo sapiens
  misc_RNA (1)...(19): siRNA sense strand
agguguacauggacaucaa

SEQ ID NO: 2583847 - RNA, 19 nt, Homo sapiens
  misc_RNA (1)...(19): siRNA sense strand
agacgcuugaagagaauaa

SEQ ID NO: 2583848 - RNA, 19 nt, Homo sapiens
  misc_RNA (1)...(19): siRNA sense strand
cuggauuaugaaacagaaa

SEQ ID NO: 2583849 - RNA, 19 nt, Homo sapiens
  misc_RNA (1)...(19): siRNA sense strand
ccucagguguacauggaca

SEQ ID NO: 2583850 - RNA, 19 nt, Homo sapiens
  misc_RNA (1)...(19): siRNA sense strand
cagagacccaggagggaga

SEQ ID NO: 2583851 - RNA, 19 nt, Homo sapiens
  misc_RNA (1)...(19): siRNA sense strand
uaaagaggaagaaggguca

SEQ ID NO: 2583852 - RNA, 19 nt, Homo sapiens
  misc_RNA (1)...(19): siRNA sense strand
caugaaugaaucugagcuu

SEQ ID NO: 2583853 - RNA, 19 nt, Homo sapiens
  misc_RNA (1)...(19): siRNA sense strand
aggaaguggacgacaaagu

SEQ ID NO: 2583854 - RNA, 19 nt, Homo sapiens
  misc_RNA (1)...(19): siRNA sense strand
ggacaucaagauugggaac

SEQ ID NO: 2583855 - RNA, 19 nt, Homo sapiens
  misc_RNA (1)...(19): siRNA sense strand
ccaaugagaauuaaggaag

SEQ ID NO: 2583856 - RNA, 19 nt, Homo sapiens
  misc_RNA (1)...(19): siRNA sense strand
guucugaugucgugcccau

SEQ ID NO: 2583857 - RNA, 19 nt, Homo sapiens
  misc_RNA (1)...(19): siRNA sense strand
gccuagaugucuugcggca

SEQ ID NO: 2583858 - RNA, 19 nt, Homo sapiens
  misc_RNA (1)...(19): siRNA sense strand
uggccaaaccaaugagaau

SEQ ID NO: 2583859 - RNA, 19 nt, Homo sapiens
  misc_RNA (1)...(19): siRNA sense strand
cagacuggcuggauggcaa

SEQ ID NO: 2583860 - RNA, 19 nt, Homo sapiens
  misc_RNA (1)...(19): siRNA sense strand
uggcagaggaaguggacga

SEQ ID NO: 2583861 - RNA, 19 nt, Homo sapiens
  misc_RNA (1)...(19): siRNA sense strand
aagagaauaaagaggaaga

SEQ ID NO: 2583862 - RNA, 19 nt, Homo sapiens
  misc_RNA (1)...(19): siRNA sense strand
agaaaagcaccgaggauuu

SEQ ID NO: 2583863 - RNA, 19 nt, Homo sapiens
  misc_RNA (1)...(19): siRNA sense strand
ggaagaagggucagagccu

SEQ ID NO: 2583864 - RNA, 19 nt, Homo sapiens
  misc_RNA (1)...(19): siRNA sense strand
acguacaauucgugucaau

SEQ ID NO: 2583865 - RNA, 19 nt, Homo sapiens
  misc_RNA (1)...(19): siRNA sense strand
ggcuuuggcuuuaagggaa

SEQ ID NO: 2583866 - RNA, 19 nt, Homo sapiens
  misc_RNA (1)...(19): siRNA sense strand
agguguacauggacaucaa

SEQ ID NO: 2583867 - RNA, 19 nt, Homo sapiens
  misc_RNA (1)...(19): siRNA sense strand
agacgcuugaagagaauaa

SEQ ID NO: 2583868 - RNA, 19 nt, Homo sapiens
  misc_RNA (1)...(19): siRNA sense strand
cuggauuaugaaacagaaa

SEQ ID NO: 2583869 - RNA, 19 nt, Homo sapiens
  misc_RNA (1)...(19): siRNA sense strand
ccucagguguacauggaca

SEQ ID NO: 2583870 - RNA, 19 nt, Homo sapiens
  misc_RNA (1)...(19): siRNA sense strand
cagagacccaggagggaga

SEQ ID NO: 2583871 - RNA, 19 nt, Homo sapiens
  misc_RNA (1)...(19): siRNA sense strand
uaaagaggaagaaggguca

SEQ ID NO: 2583872 - RNA, 19 nt, Homo sapiens
  misc_RNA (1)...(19): siRNA sense strand
caugaaugaaucugagcuu

SEQ ID NO: 2583873 - RNA, 19 nt, Homo sapiens
  misc_RNA (1)...(19): siRNA sense strand
aggaaguggacgacaaagu

SEQ ID NO: 2583874 - RNA, 19 nt, Homo sapiens
  misc_RNA (1)...(19): siRNA sense strand
ggacaucaagauugggaac

SEQ ID NO: 2583875 - RNA, 19 nt, Homo sapiens
  misc_RNA (1)...(19): siRNA sense strand
ccaaugagaauuaaggaag

SEQ ID NO: 2583876 - RNA, 19 nt, Homo sapiens
  misc_RNA (1)...(19): siRNA sense strand
guucugaugucgugcccau

SEQ ID NO: 2583877 - RNA, 19 nt, Homo sapiens
  misc_RNA (1)...(19): siRNA sense strand
gccuagaugucuugcggca

SEQ ID NO: 2583878 - RNA, 19 nt, Homo sapiens
  misc_RNA (1)...(19): siRNA sense strand
uggccaaaccaaugagaau

SEQ ID NO: 2583879 - RNA, 19 nt, Homo sapiens
  misc_RNA (1)...(19): siRNA sense strand
cagacuggcuggauggcaa

SEQ ID NO: 2583880 - RNA, 19 nt, Homo sapiens
  misc_RNA (1)...(19): siRNA sense strand
aagagaauaaagaggaaga

SEQ ID NO: 2583881 - RNA, 19 nt, Homo sapiens
  misc_RNA (1)...(19): siRNA sense strand
ggaagaagggucagagccu

SEQ ID NO: 2583882 - RNA, 19 nt, Homo sapiens
  misc_RNA (1)...(19): siRNA sense strand
acguacaauucgugucaau

SEQ ID NO: 2583883 - RNA, 19 nt, Homo sapiens
  misc_RNA (1)...(19): siRNA sense strand
ggcuuuggcuuuaagggaa

SEQ ID NO: 2583884 - RNA, 19 nt, Homo sapiens
  misc_RNA (1)...(19): siRNA sense strand
agguguacauggacaucaa

SEQ ID NO: 2583885 - RNA, 19 nt, Homo sapiens
  misc_RNA (1)...(19): siRNA sense strand
agacgcuugaagagaauaa

SEQ ID NO: 2583886 - RNA, 19 nt, Homo sapiens
  misc_RNA (1)...(19): siRNA sense strand
ccucagguguacauggaca

SEQ ID NO: 2583887 - RNA, 19 nt, Homo sapiens
  misc_RNA (1)...(19): siRNA sense strand
cagagacccaggagggaga

SEQ ID NO: 2583888 - RNA, 19 nt, Homo sapiens
  misc_RNA (1)...(19): siRNA sense strand
uaaagaggaagaaggguca

SEQ ID NO: 2583889 - RNA, 19 nt, Homo sapiens
  misc_RNA (1)...(19): siRNA sense strand
ggacaucaagauugggaac

SEQ ID NO: 2583890 - RNA, 19 nt, Homo sapiens
  misc_RNA (1)...(19): siRNA sense strand
ccaaugagaauuaaggaag

SEQ ID NO: 2583891 - RNA, 19 nt, Homo sapiens
  misc_RNA (1)...(19): siRNA sense strand
guucugaugucgugcccau

SEQ ID NO: 2583892 - RNA, 19 nt, Homo sapiens
  misc_RNA (1)...(19): siRNA sense strand
gccuagaugucuugcggca

SEQ ID NO: 2583893 - RNA, 19 nt, Homo sapiens
  misc_RNA (1)...(19): siRNA sense strand
cugugaggcagaaggagaa

SEQ ID NO: 2583894 - RNA, 19 nt, Homo sapiens
  misc_RNA (1)...(19): siRNA sense strand
aggcagaaggagaaagcca

SEQ ID NO: 2583895 - RNA, 19 nt, Homo sapiens
  misc_RNA (1)...(19): siRNA sense strand
ggcagaaggagaaagccaa

SEQ ID NO: 2583896 - RNA, 19 nt, Homo sapiens
  misc_RNA (1)...(19): siRNA sense strand
aggugaaaacagaagcaaa

SEQ ID NO: 2583897 - RNA, 19 nt, Homo sapiens
  misc_RNA (1)...(19): siRNA sense strand
acugugaggcagaaggaga

SEQ ID NO: 2583898 - RNA, 19 nt, Homo sapiens
  misc_RNA (1)...(19): siRNA sense strand
agaaagccaacgugaccaa

SEQ ID NO: 2583899 - RNA, 19 nt, Homo sapiens
  misc_RNA (1)...(19): siRNA sense strand
uggugauggugguggccuu

SEQ ID NO: 2583900 - RNA, 19 nt, Homo sapiens
  misc_RNA (1)...(19): siRNA sense strand
ccguggacgugauggucuu

SEQ ID NO: 2583901 - RNA, 19 nt, Homo sapiens
  misc_RNA (1)...(19): siRNA sense strand
gaaagaagacucuggacca

SEQ ID NO: 2583902 - RNA, 19 nt, Homo sapiens
  misc_RNA (1)...(19): siRNA sense strand
aaaguaguuuguagggcaa

SEQ ID NO: 2583903 - RNA, 19 nt, Homo sapiens
  misc_RNA (1)...(19): siRNA sense strand
uuuugaagaucgugguaaa

SEQ ID NO: 2583904 - RNA, 19 nt, Homo sapiens
  misc_RNA (1)...(19): siRNA sense strand
augaaagcuuacauggaau

SEQ ID NO: 2583905 - RNA, 19 nt, Homo sapiens
  misc_RNA (1)...(19): siRNA sense strand
gaugaaagcuauuggaugg

SEQ ID NO: 2583906 - RNA, 19 nt, Homo sapiens
  misc_RNA (1)...(19): siRNA sense strand
aagucaaacguaagaugaa

SEQ ID NO: 2583907 - RNA, 19 nt, Homo sapiens
  misc_RNA (1)...(19): siRNA sense strand
cuuuuauucaugugggaaa

SEQ ID NO: 2583908 - RNA, 19 nt, Homo sapiens
  misc_RNA (1)...(19): siRNA sense strand
cuacugaacuugacgcacu

SEQ ID NO: 2583909 - RNA, 19 nt, Homo sapiens
  misc_RNA (1)...(19): siRNA sense strand
uuguuaaagccaagggcca

SEQ ID NO: 2583910 - RNA, 19 nt, Homo sapiens
  misc_RNA (1)...(19): siRNA sense strand
acguaagaugaaagcuauu

SEQ ID NO: 2583911 - RNA, 19 nt, Homo sapiens
  misc_RNA (1)...(19): siRNA sense strand
ucuuagaggauguagacca

SEQ ID NO: 2583912 - RNA, 19 nt, Homo sapiens
  misc_RNA (1)...(19): siRNA sense strand
ccuucuaauucuugcugaa

SEQ ID NO: 2583913 - RNA, 19 nt, Homo sapiens
  misc_RNA (1)...(19): siRNA sense strand
cgauugucuaugagaagua

SEQ ID NO: 2583914 - RNA, 19 nt, Homo sapiens
  misc_RNA (1)...(19): siRNA sense strand
ugguagaagaucugguuga

SEQ ID NO: 2583915 - RNA, 19 nt, Homo sapiens
  misc_RNA (1)...(19): siRNA sense strand
ucuggagagaugugaagaa

SEQ ID NO: 2583916 - RNA, 19 nt, Homo sapiens
  misc_RNA (1)...(19): siRNA sense strand
cugccauggugcacaucaa

SEQ ID NO: 2583917 - RNA, 19 nt, Homo sapiens
  misc_RNA (1)...(19): siRNA sense strand
uguacagaagucagaagaa

SEQ ID NO: 2583918 - RNA, 19 nt, Homo sapiens
  misc_RNA (1)...(19): siRNA sense strand
ugugaagaagacuggguuu

SEQ ID NO: 2583919 - RNA, 19 nt, Homo sapiens
  misc_RNA (1)...(19): siRNA sense strand
ccuucuaauucuugcugaa

SEQ ID NO: 2583920 - RNA, 19 nt, Homo sapiens
  misc_RNA (1)...(19): siRNA sense strand
cgauugucuaugagaagua

SEQ ID NO: 2583921 - RNA, 19 nt, Homo sapiens
  misc_RNA (1)...(19): siRNA sense strand
ugguagaagaucugguuga

SEQ ID NO: 2583922 - RNA, 19 nt, Homo sapiens
  misc_RNA (1)...(19): siRNA sense strand
ucuggagagaugugaagaa

SEQ ID NO: 2583923 - RNA, 19 nt, Homo sapiens
  misc_RNA (1)...(19): siRNA sense strand
cugccauggugcacaucaa

SEQ ID NO: 2583924 - RNA, 19 nt, Homo sapiens
  misc_RNA (1)...(19): siRNA sense strand
uguacagaagucagaagaa

SEQ ID NO: 2583925 - RNA, 19 nt, Homo sapiens
  misc_RNA (1)...(19): siRNA sense strand
ugugaagaagacuggguuu

SEQ ID NO: 2583926 - RNA, 19 nt, Homo sapiens
  misc_RNA (1)...(19): siRNA sense strand
ccuucuaauucuugcugaa

SEQ ID NO: 2583927 - RNA, 19 nt, Homo sapiens
  misc_RNA (1)...(19): siRNA sense strand
cgauugucuaugagaagua

SEQ ID NO: 2583928 - RNA, 19 nt, Homo sapiens
  misc_RNA (1)...(19): siRNA sense strand
ugguagaagaucugguuga

SEQ ID NO: 2583929 - RNA, 19 nt, Homo sapiens
  misc_RNA (1)...(19): siRNA sense strand
ucuggagagaugugaagaa

SEQ ID NO: 2583930 - RNA, 19 nt, Homo sapiens
  misc_RNA (1)...(19): siRNA sense strand
cugccauggugcacaucaa

SEQ ID NO: 2583931 - RNA, 19 nt, Homo sapiens
  misc_RNA (1)...(19): siRNA sense strand
uguacagaagucagaagaa

SEQ ID NO: 2583932 - RNA, 19 nt, Homo sapiens
  misc_RNA (1)...(19): siRNA sense strand
ugugaagaagacuggguuu

SEQ ID NO: 2583933 - RNA, 19 nt, Homo sapiens
  misc_RNA (1)...(19): siRNA sense strand
cagaauaaguacauggaaa

SEQ ID NO: 2583934 - RNA, 19 nt, Homo sapiens
  misc_RNA (1)...(19): siRNA sense strand
ccuucuaauucuugcugaa

SEQ ID NO: 2583935 - RNA, 19 nt, Homo sapiens
  misc_RNA (1)...(19): siRNA sense strand
cgauugucuaugagaagua

SEQ ID NO: 2583936 - RNA, 19 nt, Homo sapiens
  misc_RNA (1)...(19): siRNA sense strand
ugguagaagaucugguuga

SEQ ID NO: 2583937 - RNA, 19 nt, Homo sapiens
  misc_RNA (1)...(19): siRNA sense strand
agaauaaguacauggaaac

SEQ ID NO: 2583938 - RNA, 19 nt, Homo sapiens
  misc_RNA (1)...(19): siRNA sense strand
guacauggaaaccagaaau

SEQ ID NO: 2583939 - RNA, 19 nt, Homo sapiens
  misc_RNA (1)...(19): siRNA sense strand
ucuggagagaugugaagaa

SEQ ID NO: 2583940 - RNA, 19 nt, Homo sapiens
  misc_RNA (1)...(19): siRNA sense strand
cugccauggugcacaucaa

SEQ ID NO: 2583941 - RNA, 19 nt, Homo sapiens
  misc_RNA (1)...(19): siRNA sense strand
aguacauggaaaccagaaa

SEQ ID NO: 2583942 - RNA, 19 nt, Homo sapiens
  misc_RNA (1)...(19): siRNA sense strand
uguacagaagucagaagaa

SEQ ID NO: 2583943 - RNA, 19 nt, Homo sapiens
  misc_RNA (1)...(19): siRNA sense strand
gaaaugcaacaguuacuaa

SEQ ID NO: 2583944 - RNA, 19 nt, Homo sapiens
  misc_RNA (1)...(19): siRNA sense strand
cagaaaugcaacaguuacu

SEQ ID NO: 2583945 - RNA, 19 nt, Homo sapiens
  misc_RNA (1)...(19): siRNA sense strand
ugugaagaagacuggguuu

SEQ ID NO: 2583946 - RNA, 19 nt, Homo sapiens
  misc_RNA (1)...(19): siRNA sense strand
auggaaaccagaaaugcaa

SEQ ID NO: 2583947 - RNA, 19 nt, Homo sapiens
  misc_RNA (1)...(19): siRNA sense strand
ggaaaccagaaaugcaaca

SEQ ID NO: 2583948 - RNA, 19 nt, Homo sapiens
  misc_RNA (1)...(19): siRNA sense strand
accagaaaugcaacaguua

SEQ ID NO: 2583949 - RNA, 19 nt, Homo sapiens
  misc_RNA (1)...(19): siRNA sense strand
ccuaaaagcaggugacaaa

SEQ ID NO: 2583950 - RNA, 19 nt, Homo sapiens
  misc_RNA (1)...(19): siRNA sense strand
aggaaagacagaugacaaa

SEQ ID NO: 2583951 - RNA, 19 nt, Homo sapiens
  misc_RNA (1)...(19): siRNA sense strand
gcgggaacuugcagaggaa

SEQ ID NO: 2583952 - RNA, 19 nt, Homo sapiens
  misc_RNA (1)...(19): siRNA sense strand
cggaaaugugcaagauauu

SEQ ID NO: 2583953 - RNA, 19 nt, Homo sapiens
  misc_RNA (1)...(19): siRNA sense strand
ggaucaaccucuacaguca

SEQ ID NO: 2583954 - RNA, 19 nt, Homo sapiens
  misc_RNA (1)...(19): siRNA sense strand
cugaaauugaugaggcgaa

SEQ ID NO: 2583955 - RNA, 19 nt, Homo sapiens
  misc_RNA (1)...(19): siRNA sense strand
gacuauauguggaugaaga

SEQ ID NO: 2583956 - RNA, 19 nt, Homo sapiens
  misc_RNA (1)...(19): siRNA sense strand
gugcgaacagacaaggaaa

SEQ ID NO: 2583957 - RNA, 19 nt, Homo sapiens
  misc_RNA (1)...(19): siRNA sense strand
gcuuaugaccccacggaaa

SEQ ID NO: 2583958 - RNA, 19 nt, Homo sapiens
  misc_RNA (1)...(19): siRNA sense strand
gauauauugucuaggagga

SEQ ID NO: 2583959 - RNA, 19 nt, Homo sapiens
  misc_RNA (1)...(19): siRNA sense strand
uggugauguuggugaugaa

SEQ ID NO: 2583960 - RNA, 19 nt, Homo sapiens
  misc_RNA (1)...(19): siRNA sense strand
cugggauguugaaggaaau

SEQ ID NO: 2583961 - RNA, 19 nt, Homo sapiens
  misc_RNA (1)...(19): siRNA sense strand
cagcauuguuacccagcaa

SEQ ID NO: 2583962 - RNA, 19 nt, Homo sapiens
  misc_RNA (1)...(19): siRNA sense strand
cuaucaaagucuauggcca

SEQ ID NO: 2583963 - RNA, 19 nt, Homo sapiens
  misc_RNA (1)...(19): siRNA sense strand
aaauaaggaucaaccucua

SEQ ID NO: 2583964 - RNA, 19 nt, Homo sapiens
  misc_RNA (1)...(19): siRNA sense strand
uguugaaggaaauacguua

SEQ ID NO: 2583965 - RNA, 19 nt, Homo sapiens
  misc_RNA (1)...(19): siRNA sense strand
uauuugaggcagugaugaa

SEQ ID NO: 2583966 - RNA, 19 nt, Homo sapiens
  misc_RNA (1)...(19): siRNA sense strand
uaucaaagucuauggccau

SEQ ID NO: 2583967 - RNA, 19 nt, Homo sapiens
  misc_RNA (1)...(19): siRNA sense strand
aagcaguauuugaggcagu

SEQ ID NO: 2583968 - RNA, 19 nt, Homo sapiens
  misc_RNA (1)...(19): siRNA sense strand
aggagguagugcuagacaa

SEQ ID NO: 2583969 - RNA, 19 nt, Homo sapiens
  misc_RNA (1)...(19): siRNA sense strand
gcauggaauguuuguaaaa

SEQ ID NO: 2583970 - RNA, 19 nt, Homo sapiens
  misc_RNA (1)...(19): siRNA sense strand
auaugugguaggaggacua

SEQ ID NO: 2583971 - RNA, 19 nt, Homo sapiens
  misc_RNA (1)...(19): siRNA sense strand
gguuaaugacacagcagca

SEQ ID NO: 2583972 - RNA, 19 nt, Homo sapiens
  misc_RNA (1)...(19): siRNA sense strand
agguagugcuagacaaugu

SEQ ID NO: 2583973 - RNA, 19 nt, Homo sapiens
  misc_RNA (1)...(19): siRNA sense strand
ugauguuggugaugaagau

SEQ ID NO: 2583974 - RNA, 19 nt, Homo sapiens
  misc_RNA (1)...(19): siRNA sense strand
cguuaugcuucaggagcua

SEQ ID NO: 2583975 - RNA, 19 nt, Homo sapiens
  misc_RNA (1)...(19): siRNA sense strand
ccucuugguuaaugacaca

SEQ ID NO: 2583976 - RNA, 19 nt, Homo sapiens
  misc_RNA (1)...(19): siRNA sense strand
cagaggaacugcggcuuua

SEQ ID NO: 2583977 - RNA, 19 nt, Homo sapiens
  misc_RNA (1)...(19): siRNA sense strand
gggaacuugcagaggaacu

SEQ ID NO: 2583978 - RNA, 19 nt, Homo sapiens
  misc_RNA (1)...(19): siRNA sense strand
gacaaggaaaacaggguua

SEQ ID NO: 2583979 - RNA, 19 nt, Homo sapiens
  misc_RNA (1)...(19): siRNA sense strand
cuggugaggugaaugguga

SEQ ID NO: 2583980 - RNA, 19 nt, Homo sapiens
  misc_RNA (1)...(19): siRNA sense strand
gcaaaauggaacgaaguaa

SEQ ID NO: 2583981 - RNA, 19 nt, Homo sapiens
  misc_RNA (1)...(19): siRNA sense strand
aaaaggagguagugcuaga

SEQ ID NO: 2583982 - RNA, 19 nt, Homo sapiens
  misc_RNA (1)...(19): siRNA sense strand
aggcaaacucccagaaccu

SEQ ID NO: 2583983 - RNA, 19 nt, Homo sapiens
  misc_RNA (1)...(19): siRNA sense strand
acuauauguggaugaagaa

SEQ ID NO: 2583984 - RNA, 19 nt, Homo sapiens
  misc_RNA (1)...(19): siRNA sense strand
uuuguaaggaagaggacuu

SEQ ID NO: 2583985 - RNA, 19 nt, Homo sapiens
  misc_RNA (1)...(19): siRNA sense strand
gauauaugugguaggagga

SEQ ID NO: 2583986 - RNA, 19 nt, Homo sapiens
  misc_RNA (1)...(19): siRNA sense strand
gaggacuauauguggauga

SEQ ID NO: 2583987 - RNA, 19 nt, Homo sapiens
  misc_RNA (1)...(19): siRNA sense strand
uagcaguccauaaaggcaa

SEQ ID NO: 2583988 - RNA, 19 nt, Homo sapiens
  misc_RNA (1)...(19): siRNA sense strand
caaugacggaaaugugcaa

SEQ ID NO: 2583989 - RNA, 19 nt, Homo sapiens
  misc_RNA (1)...(19): siRNA sense strand
agauaaucguggaggagaa

SEQ ID NO: 2583990 - RNA, 19 nt, Homo sapiens
  misc_RNA (1)...(19): siRNA sense strand
cagcaggucaggagaucaa

SEQ ID NO: 2583991 - RNA, 19 nt, Homo sapiens
  misc_RNA (1)...(19): siRNA sense strand
agauguaacagaaaggcaa

SEQ ID NO: 2583992 - RNA, 19 nt, Homo sapiens
  misc_RNA (1)...(19): siRNA sense strand
aaauaucacaccaaggaaa

SEQ ID NO: 2583993 - RNA, 19 nt, Homo sapiens
  misc_RNA (1)...(19): siRNA sense strand
ucguggaggagaagugaua

SEQ ID NO: 2583994 - RNA, 19 nt, Homo sapiens
  misc_RNA (1)...(19): siRNA sense strand
acacuaaaugggucugaaa

SEQ ID NO: 2583995 - RNA, 19 nt, Homo sapiens
  misc_RNA (1)...(19): siRNA sense strand
gauguaacagaaaggcaaa

SEQ ID NO: 2583996 - RNA, 19 nt, Homo sapiens
  misc_RNA (1)...(19): siRNA sense strand
acagaaaggcaaagcacca

SEQ ID NO: 2583997 - RNA, 19 nt, Homo sapiens
  misc_RNA (1)...(19): siRNA sense strand
gcauuaaagcuguguuacu

SEQ ID NO: 2583998 - RNA, 19 nt, Homo sapiens
  misc_RNA (1)...(19): siRNA sense strand
augucaagaaggagaauca

SEQ ID NO: 2583999 - RNA, 19 nt, Homo sapiens
  misc_RNA (1)...(19): siRNA sense strand
aggcaaagcaccaaacgau

SEQ ID NO: 2584000 - RNA, 19 nt, Homo sapiens
  misc_RNA (1)...(19): siRNA sense strand
acaugaaauugaugggaag

SEQ ID NO: 2584001 - RNA, 19 nt, Homo sapiens
  misc_RNA (1)...(19): siRNA sense strand
ccuguugggacaugugaaa

SEQ ID NO: 2584002 - RNA, 19 nt, Homo sapiens
  misc_RNA (1)...(19): siRNA sense strand
caaaagaagauguaacaga

SEQ ID NO: 2584003 - RNA, 19 nt, Homo sapiens
  misc_RNA (1)...(19): siRNA sense strand
cuguguuacuacauugaaa

SEQ ID NO: 2584004 - RNA, 19 nt, Homo sapiens
  misc_RNA (1)...(19): siRNA sense strand
cuaggguaccagaugaaua

SEQ ID NO: 2584005 - RNA, 19 nt, Homo sapiens
  misc_RNA (1)...(19): siRNA sense strand
cagucugugucuauguaaa

SEQ ID NO: 2584006 - RNA, 19 nt, Homo sapiens
  misc_RNA (1)...(19): siRNA sense strand
gggaugaaacuggaagcua

SEQ ID NO: 2584007 - RNA, 19 nt, Homo sapiens
  misc_RNA (1)...(19): siRNA sense strand
ggauugugcccuugaaacu

SEQ ID NO: 2584008 - RNA, 19 nt, Homo sapiens
  misc_RNA (1)...(19): siRNA sense strand
agagaaaacuccucaguca

SEQ ID NO: 2584009 - RNA, 19 nt, Homo sapiens
  misc_RNA (1)...(19): siRNA sense strand
aggagaucaagucgaauua

SEQ ID NO: 2584010 - RNA, 19 nt, Homo sapiens
  misc_RNA (1)...(19): siRNA sense strand
agugaagcuccaaguuaua

SEQ ID NO: 2584011 - RNA, 19 nt, Homo sapiens
  misc_RNA (1)...(19): siRNA sense strand
aacaugaaauugaugggaa

SEQ ID NO: 2584012 - RNA, 19 nt, Homo sapiens
  misc_RNA (1)...(19): siRNA sense strand
cgaccauuggagauguuaa

SEQ ID NO: 2584013 - RNA, 19 nt, Homo sapiens
  misc_RNA (1)...(19): siRNA sense strand
gugucuauguaaacaaaca

SEQ ID NO: 2584014 - RNA, 19 nt, Homo sapiens
  misc_RNA (1)...(19): siRNA sense strand
cuucagucucccaggauuu

SEQ ID NO: 2584015 - RNA, 19 nt, Homo sapiens
  misc_RNA (1)...(19): siRNA sense strand
ccacagaaaacuacucuaa

SEQ ID NO: 2584016 - RNA, 19 nt, Homo sapiens
  misc_RNA (1)...(19): siRNA sense strand
gccagauaaucguggagga

SEQ ID NO: 2584017 - RNA, 19 nt, Homo sapiens
  misc_RNA (1)...(19): siRNA sense strand
gaggaaaagugaagcucca

SEQ ID NO: 2584018 - RNA, 19 nt, Homo sapiens
  misc_RNA (1)...(19): siRNA sense strand
caucacuaaauucaggaaa

SEQ ID NO: 2584019 - RNA, 19 nt, Homo sapiens
  misc_RNA (1)...(19): siRNA sense strand
aaugcagucuccacagaaa

SEQ ID NO: 2584020 - RNA, 19 nt, Homo sapiens
  misc_RNA (1)...(19): siRNA sense strand
cgacuggaugguagugaca

SEQ ID NO: 2584021 - RNA, 19 nt, Homo sapiens
  misc_RNA (1)...(19): siRNA sense strand
acaaacagugaaugaagau

SEQ ID NO: 2584022 - RNA, 19 nt, Homo sapiens
  misc_RNA (1)...(19): siRNA sense strand
uuggauaccugaagccaga

SEQ ID NO: 2584023 - RNA, 19 nt, Homo sapiens
  misc_RNA (1)...(19): siRNA sense strand
cgucugaaggagaaccauu

SEQ ID NO: 2584024 - RNA, 19 nt, Homo sapiens
  misc_RNA (1)...(19): siRNA sense strand
gguagugacaacagaaaug

SEQ ID NO: 2584025 - RNA, 19 nt, Homo sapiens
  misc_RNA (1)...(19): siRNA sense strand
guggcauguuauauaaaga

SEQ ID NO: 2584026 - RNA, 19 nt, Homo sapiens
  misc_RNA (1)...(19): siRNA sense strand
ugaaaagcuuaaagaagga

SEQ ID NO: 2584027 - RNA, 19 nt, Homo sapiens
  misc_RNA (1)...(19): siRNA sense strand
gcuuaaagaaggaaaauac

SEQ ID NO: 2584028 - RNA, 19 nt, Homo sapiens
  misc_RNA (1)...(19): siRNA sense strand
ggcgaaaugaagagcgaaa

SEQ ID NO: 2584029 - RNA, 19 nt, Homo sapiens
  misc_RNA (1)...(19): siRNA sense strand
ccugaaagaaugugcuaau

SEQ ID NO: 2584030 - RNA, 19 nt, Homo sapiens
  misc_RNA (1)...(19): siRNA sense strand
cugaagaugacaaaguaua

SEQ ID NO: 2584031 - RNA, 19 nt, Homo sapiens
  misc_RNA (1)...(19): siRNA sense strand
cgcuagaauaggucagaua

SEQ ID NO: 2584032 - RNA, 19 nt, Homo sapiens
  misc_RNA (1)...(19): siRNA sense strand
uguuauaaccuuugcaaga

SEQ ID NO: 2584033 - RNA, 19 nt, Homo sapiens
  misc_RNA (1)...(19): siRNA sense strand
ccagaagagaugaaugcaa

SEQ ID NO: 2584034 - RNA, 19 nt, Homo sapiens
  misc_RNA (1)...(19): siRNA sense strand
ggagauggcucuaagacca

SEQ ID NO: 2584035 - RNA, 19 nt, Homo sapiens
  misc_RNA (1)...(19): siRNA sense strand
uauaagaaauggagaccca

SEQ ID NO: 2584036 - RNA, 19 nt, Homo sapiens
  misc_RNA (1)...(19): siRNA sense strand
gugccaaggcugaaauuau

SEQ ID NO: 2584037 - RNA, 19 nt, Homo sapiens
  misc_RNA (1)...(19): siRNA sense strand
ggcucuaagaccaaagaaa

SEQ ID NO: 2584038 - RNA, 19 nt, Homo sapiens
  misc_RNA (1)...(19): siRNA sense strand
uggcaauuccagaggcgaa

SEQ ID NO: 2584039 - RNA, 19 nt, Homo sapiens
  misc_RNA (1)...(19): siRNA sense strand
aguuguauauggaguguuu

SEQ ID NO: 2584040 - RNA, 19 nt, Homo sapiens
  misc_RNA (1)...(19): siRNA sense strand
guguguauguauagcauga

SEQ ID NO: 2584041 - RNA, 19 nt, Homo sapiens
  misc_RNA (1)...(19): siRNA sense strand
auaaagaugaugauggaga

SEQ ID NO: 2584042 - RNA, 19 nt, Homo sapiens
  misc_RNA (1)...(19): siRNA sense strand
cuacauugaaauuggacau

SEQ ID NO: 2584043 - RNA, 19 nt, Homo sapiens
  misc_RNA (1)...(19): siRNA sense strand
guagagaauaguagcacau

SEQ ID NO: 2584044 - RNA, 19 nt, Homo sapiens
  misc_RNA (1)...(19): siRNA sense strand
ccgaguggaugcagaagau

SEQ ID NO: 2584045 - RNA, 19 nt, Homo sapiens
  misc_RNA (1)...(19): siRNA sense strand
ggaacuugucccagcaaaa

SEQ ID NO: 2584046 - RNA, 19 nt, Homo sapiens
  misc_RNA (1)...(19): siRNA sense strand
cauugaaauuggacaucau

SEQ ID NO: 2584047 - RNA, 19 nt, Homo sapiens
  misc_RNA (1)...(19): siRNA sense strand
agacuuacaccaugauaau

SEQ ID NO: 2584048 - RNA, 19 nt, Homo sapiens
  misc_RNA (1)...(19): siRNA sense strand
gaggcgaaaugaagagcga

SEQ ID NO: 2584049 - RNA, 19 nt, Homo sapiens
  misc_RNA (1)...(19): siRNA sense strand
cugugaacaaguuuggaaa

SEQ ID NO: 2584050 - RNA, 19 nt, Homo sapiens
  misc_RNA (1)...(19): siRNA sense strand
cagacuuacaccaugauaa

SEQ ID NO: 2584051 - RNA, 19 nt, Homo sapiens
  misc_RNA (1)...(19): siRNA sense strand
caaacuaucagaaugggaa

SEQ ID NO: 2584052 - RNA, 19 nt, Homo sapiens
  misc_RNA (1)...(19): siRNA sense strand
agaccaaagaaauguccaa

SEQ ID NO: 2584053 - RNA, 19 nt, Homo sapiens
  misc_RNA (1)...(19): siRNA sense strand
ggaagcacuuacaagaaaa

SEQ ID NO: 2584054 - RNA, 19 nt, Homo sapiens
  misc_RNA (1)...(19): siRNA sense strand
uggagaacacucuggaaaa

SEQ ID NO: 2584055 - RNA, 19 nt, Homo sapiens
  misc_RNA (1)...(19): siRNA sense strand
cuggaagaaaugacaguuu

SEQ ID NO: 2584056 - RNA, 19 nt, Homo sapiens
  misc_RNA (1)...(19): siRNA sense strand
uaucagaaugggaagaaca

SEQ ID NO: 2584057 - RNA, 19 nt, Homo sapiens
  misc_RNA (1)...(19): siRNA sense strand
aggcauauaaucagacuca

SEQ ID NO: 2584058 - RNA, 19 nt, Homo sapiens
  misc_RNA (1)...(19): siRNA sense strand
auggagaacacucuggaaa

SEQ ID NO: 2584059 - RNA, 19 nt, Homo sapiens
  misc_RNA (1)...(19): siRNA sense strand
cgaaaacaacgucggcaaa

SEQ ID NO: 2584060 - RNA, 19 nt, Homo sapiens
  misc_RNA (1)...(19): siRNA sense strand
gauguuauguuuaucggaa

SEQ ID NO: 2584061 - RNA, 19 nt, Homo sapiens
  misc_RNA (1)...(19): siRNA sense strand
cgcacaagacgacaagaua

SEQ ID NO: 2584062 - RNA, 19 nt, Homo sapiens
  misc_RNA (1)...(19): siRNA sense strand
agaucaaggccuucugcua

SEQ ID NO: 2584063 - RNA, 19 nt, Homo sapiens
  misc_RNA (1)...(19): siRNA sense strand
agaagagaucagaguggau

SEQ ID NO: 2584064 - RNA, 19 nt, Homo sapiens
  misc_RNA (1)...(19): siRNA sense strand
ugcaauagauggagaacac

SEQ ID NO: 2584065 - RNA, 19 nt, Homo sapiens
  misc_RNA (1)...(19): siRNA sense strand
gacgacaagauauaagaaa

SEQ ID NO: 2584066 - RNA, 19 nt, Homo sapiens
  misc_RNA (1)...(19): siRNA sense strand
ccagggaacaguaacaaau

SEQ ID NO: 2584067 - RNA, 19 nt, Homo sapiens
  misc_RNA (1)...(19): siRNA sense strand
guaacaaauggaagcacuu

SEQ ID NO: 2584068 - RNA, 19 nt, Homo sapiens
  misc_RNA (1)...(19): siRNA sense strand
uuacuuacagcaagagcaa

SEQ ID NO: 2584069 - RNA, 19 nt, Homo sapiens
  misc_RNA (1)...(19): siRNA sense strand
caacagaaggauucaggca

SEQ ID NO: 2584070 - RNA, 19 nt, Homo sapiens
  misc_RNA (1)...(19): siRNA sense strand
aagaaauguccaauagcau

SEQ ID NO: 2584071 - RNA, 19 nt, Homo sapiens
  misc_RNA (1)...(19): siRNA sense strand
uggaaaagacauccugaaa

SEQ ID NO: 2584072 - RNA, 19 nt, Homo sapiens
  misc_RNA (1)...(19): siRNA sense strand
gggaagaacaaugugccaa

SEQ ID NO: 2584073 - RNA, 19 nt, Homo sapiens
  misc_RNA (1)...(19): siRNA sense strand
cuggugaauaaauggacaa

SEQ ID NO: 2584074 - RNA, 19 nt, Homo sapiens
  misc_RNA (1)...(19): siRNA sense strand
ugucguagaccgaguggau

SEQ ID NO: 2584075 - RNA, 19 nt, Homo sapiens
  misc_RNA (1)...(19): siRNA sense strand
cagcaagagcaaacuauca

SEQ ID NO: 2584076 - RNA, 19 nt, Homo sapiens
  misc_RNA (1)...(19): siRNA sense strand
caggacagaucaaggccuu

SEQ ID NO: 2584077 - RNA, 19 nt, Homo sapiens
  misc_RNA (1)...(19): siRNA sense strand
uccaauagcaugacaccua

SEQ ID NO: 2584078 - RNA, 19 nt, Homo sapiens
  misc_RNA (1)...(19): siRNA sense strand
cagaagagaugaaugcaag

SEQ ID NO: 2584079 - RNA, 19 nt, Homo sapiens
  misc_RNA (1)...(19): siRNA sense strand
uugaugaacugcaggaugu

SEQ ID NO: 2584080 - RNA, 19 nt, Homo sapiens
  misc_RNA (1)...(19): siRNA sense strand
ugaucaaaacggauguaaa

SEQ ID NO: 2584081 - RNA, 19 nt, Homo sapiens
  misc_RNA (1)...(19): siRNA sense strand
cugaagagagaaucaucua

SEQ ID NO: 2584082 - RNA, 19 nt, Homo sapiens
  misc_RNA (1)...(19): siRNA sense strand
cagaaggauucaggcaauu

SEQ ID NO: 2584083 - RNA, 19 nt, Homo sapiens
  misc_RNA (1)...(19): siRNA sense strand
ucauugacacagagcauuu

SEQ ID NO: 2584084 - RNA, 19 nt, Homo sapiens
  misc_RNA (1)...(19): siRNA sense strand
accaaagaaauguccaaua

SEQ ID NO: 2584085 - RNA, 19 nt, Homo sapiens
  misc_RNA (1)...(19): siRNA sense strand
uuucauucgaccugguuaa

SEQ ID NO: 2584086 - RNA, 19 nt, Homo sapiens
  misc_RNA (1)...(19): siRNA sense strand
gcauauaaucagacucacu

SEQ ID NO: 2584087 - RNA, 19 nt, Homo sapiens
  misc_RNA (1)...(19): siRNA sense strand
ccugaagaugacaaaguau

SEQ ID NO: 2584088 - RNA, 19 nt, Homo sapiens
  misc_RNA (1)...(19): siRNA sense strand
auguauagcaugagugaug

SEQ ID NO: 2584089 - RNA, 19 nt, Homo sapiens
  misc_RNA (1)...(19): siRNA sense strand
acaaacucuucuuaaggua

SEQ ID NO: 2584090 - RNA, 19 nt, Homo sapiens
  misc_RNA (1)...(19): siRNA sense strand
acacaagugcaaagggaga

SEQ ID NO: 2584091 - RNA, 19 nt, Homo sapiens
  misc_RNA (1)...(19): siRNA sense strand
ccucguuggauguggaaau

SEQ ID NO: 2584092 - RNA, 19 nt, Homo sapiens
  misc_RNA (1)...(19): siRNA sense strand
gaacaaagaggcugcagca

SEQ ID NO: 2584093 - RNA, 19 nt, Homo sapiens
  misc_RNA (1)...(19): siRNA sense strand
ugacuuugguguagggcca

SEQ ID NO: 2584094 - RNA, 19 nt, Homo sapiens
  misc_RNA (1)...(19): siRNA sense strand
cugaagauggaauggaaca

SEQ ID NO: 2584095 - RNA, 19 nt, Homo sapiens
  misc_RNA (1)...(19): siRNA sense strand
uguaaaaguuugaagcuca

SEQ ID NO: 2584096 - RNA, 19 nt, Homo sapiens
  misc_RNA (1)...(19): siRNA sense strand
ugggcaaaccagugcaauu

SEQ ID NO: 2584097 - RNA, 19 nt, Homo sapiens
  misc_RNA (1)...(19): siRNA sense strand
aaacacaagugcaaaggga

SEQ ID NO: 2584098 - RNA, 19 nt, Homo sapiens
  misc_RNA (1)...(19): siRNA sense strand
ggaaaugccuacuguccca

SEQ ID NO: 2584099 - RNA, 19 nt, Homo sapiens
  misc_RNA (1)...(19): siRNA sense strand
cacccaaacacaagugcaa

SEQ ID NO: 2584100 - RNA, 19 nt, Homo sapiens
  misc_RNA (1)...(19): siRNA sense strand
gcaaaugaagauaaggauc

SEQ ID NO: 2584101 - RNA, 19 nt, Homo sapiens
  misc_RNA (1)...(19): siRNA sense strand
cuucauaccucguuggaug

SEQ ID NO: 2584102 - RNA, 19 nt, Homo sapiens
  misc_RNA (1)...(19): siRNA sense strand
caucaguuggucagggaca

SEQ ID NO: 2584103 - RNA, 19 nt, Homo sapiens
  misc_RNA (1)...(19): siRNA sense strand
gcacaaugaacugaggaga

SEQ ID NO: 2584104 - RNA, 19 nt, Homo sapiens
  misc_RNA (1)...(19): siRNA sense strand
ggaucgaaugacaagucua

SEQ ID NO: 2584105 - RNA, 19 nt, Homo sapiens
  misc_RNA (1)...(19): siRNA sense strand
cagugcaauuacagacaca

SEQ ID NO: 2584106 - RNA, 19 nt, Homo sapiens
  misc_RNA (1)...(19): siRNA sense strand
ugaagauggaauggaacaa

SEQ ID NO: 2584107 - RNA, 19 nt, Homo sapiens
  misc_RNA (1)...(19): siRNA sense strand
acacaguaacccaaaggau

SEQ ID NO: 2584108 - RNA, 19 nt, Homo sapiens
  misc_RNA (1)...(19): siRNA sense strand
gcugguuugaugaguacaa

SEQ ID NO: 2584109 - RNA, 19 nt, Homo sapiens
  misc_RNA (1)...(19): siRNA sense strand
acaagauccuggagagcca

SEQ ID NO: 2584110 - RNA, 19 nt, Homo sapiens
  misc_RNA (1)...(19): siRNA sense strand
gggagaacaccgaaaacaa

SEQ ID NO: 2584111 - RNA, 19 nt, Homo sapiens
  misc_RNA (1)...(19): siRNA sense strand
gggagugguacgcgcacaa

SEQ ID NO: 2584112 - RNA, 19 nt, Homo sapiens
  misc_RNA (1)...(19): siRNA sense strand
agagcguacucaaggccaa

SEQ ID NO: 2584113 - RNA, 19 nt, Homo sapiens
  misc_RNA (1)...(19): siRNA sense strand
cgcauuacguggaggccga

SEQ ID NO: 2584114 - RNA, 19 nt, Homo sapiens
  misc_RNA (1)...(19): siRNA sense strand
ccagcucagaagaggaauu

SEQ ID NO: 2584115 - RNA, 19 nt, Homo sapiens
  misc_RNA (1)...(19): siRNA sense strand
gagcaaguggcgugcgugu

SEQ ID NO: 2584116 - RNA, 19 nt, Homo sapiens
  misc_RNA (1)...(19): siRNA sense strand
guuuaagaaccggaggcaa

SEQ ID NO: 2584117 - RNA, 19 nt, Homo sapiens
  misc_RNA (1)...(19): siRNA sense strand
aggaggaggaagaggaaga

SEQ ID NO: 2584118 - RNA, 19 nt, Homo sapiens
  misc_RNA (1)...(19): siRNA sense strand
acgaagaggaggaggagga

SEQ ID NO: 2584119 - RNA, 19 nt, Homo sapiens
  misc_RNA (1)...(19): siRNA sense strand
aggaggaagaggaagaaga

SEQ ID NO: 2584120 - RNA, 19 nt, Homo sapiens
  misc_RNA (1)...(19): siRNA sense strand
aggaagaggaagaagaauc

SEQ ID NO: 2584121 - RNA, 19 nt, Homo sapiens
  misc_RNA (1)...(19): siRNA sense strand
gugacgaagaggaggagga

SEQ ID NO: 2584122 - RNA, 19 nt, Homo sapiens
  misc_RNA (1)...(19): siRNA sense strand
cugaacagucacaugauau

SEQ ID NO: 2584123 - RNA, 19 nt, Homo sapiens
  misc_RNA (1)...(19): siRNA sense strand
gcaaggaggaggagacgcu

SEQ ID NO: 2584124 - RNA, 19 nt, Homo sapiens
  misc_RNA (1)...(19): siRNA sense strand
aggaggaggaggaagagga

SEQ ID NO: 2584125 - RNA, 19 nt, Homo sapiens
  misc_RNA (1)...(19): siRNA sense strand
cagcagaagaccaagcaga

SEQ ID NO: 2584126 - RNA, 19 nt, Homo sapiens
  misc_RNA (1)...(19): siRNA sense strand
agcagaagaccaagcagaa

SEQ ID NO: 2584127 - RNA, 19 nt, Homo sapiens
  misc_RNA (1)...(19): siRNA sense strand
cagcccagcagaagaccaa

SEQ ID NO: 2584128 - RNA, 19 nt, Homo sapiens
  misc_RNA (1)...(19): siRNA sense strand
gccaaagugcccagagcca

SEQ ID NO: 2584129 - RNA, 19 nt, Homo sapiens
  misc_RNA (1)...(19): siRNA sense strand
gcaagaaggcucuggaaga

SEQ ID NO: 2584130 - RNA, 19 nt, Homo sapiens
  misc_RNA (1)...(19): siRNA sense strand
agaagaaggaugaggagau

SEQ ID NO: 2584131 - RNA, 19 nt, Homo sapiens
  misc_RNA (1)...(19): siRNA sense strand
aggaugaggagaugagauu

SEQ ID NO: 2584132 - RNA, 19 nt, Homo sapiens
  misc_RNA (1)...(19): siRNA sense strand
ugaugaagaaagaggugaa

SEQ ID NO: 2584133 - RNA, 19 nt, Homo sapiens
  misc_RNA (1)...(19): siRNA sense strand
gggagcagaugcagcgcua

SEQ ID NO: 2584134 - RNA, 19 nt, Homo sapiens
  misc_RNA (1)...(19): siRNA sense strand
aggccgaggugauggaaga

SEQ ID NO: 2584135 - RNA, 19 nt, Homo sapiens
  misc_RNA (1)...(19): siRNA sense strand
cugaaggaauggcgggaca

SEQ ID NO: 2584136 - RNA, 19 nt, Homo sapiens
  misc_RNA (1)...(19): siRNA sense strand
agaaagaagagcaucggaa

SEQ ID NO: 2584137 - RNA, 19 nt, Homo sapiens
  misc_RNA (1)...(19): siRNA sense strand
uagagaaccuggagcguca

SEQ ID NO: 2584138 - RNA, 19 nt, Homo sapiens
  misc_RNA (1)...(19): siRNA sense strand
cugcacagcaagaggauca

SEQ ID NO: 2584139 - RNA, 19 nt, Homo sapiens
  misc_RNA (1)...(19): siRNA sense strand
aaaucaacgccaagaagaa

SEQ ID NO: 2584140 - RNA, 19 nt, Homo sapiens
  misc_RNA (1)...(19): siRNA sense strand
guuuacaaggccaagaaua

SEQ ID NO: 2584141 - RNA, 19 nt, Homo sapiens
  misc_RNA (1)...(19): siRNA sense strand
aaccagaaccugaaggaau

SEQ ID NO: 2584142 - RNA, 19 nt, Homo sapiens
  misc_RNA (1)...(19): siRNA sense strand
ucagcgaagaugagaagaa

SEQ ID NO: 2584143 - RNA, 19 nt, Homo sapiens
  misc_RNA (1)...(19): siRNA sense strand
ccaggaacuccgagagcuu

SEQ ID NO: 2584144 - RNA, 19 nt, Homo sapiens
  misc_RNA (1)...(19): siRNA sense strand
gcgcagugugagagcaaca

SEQ ID NO: 2584145 - RNA, 19 nt, Homo sapiens
  misc_RNA (1)...(19): siRNA sense strand
agcucaaacugaugaagaa

SEQ ID NO: 2584146 - RNA, 19 nt, Homo sapiens
  misc_RNA (1)...(19): siRNA sense strand
gcucaaacugaugaagaaa

SEQ ID NO: 2584147 - RNA, 19 nt, Homo sapiens
  misc_RNA (1)...(19): siRNA sense strand
aggacuacaucguggagau

SEQ ID NO: 2584148 - RNA, 19 nt, Homo sapiens
  misc_RNA (1)...(19): siRNA sense strand
aaggaaagcaugaagcaga

SEQ ID NO: 2584149 - RNA, 19 nt, Homo sapiens
  misc_RNA (1)...(19): siRNA sense strand
uggaagaggaucugaacca

SEQ ID NO: 2584150 - RNA, 19 nt, Homo sapiens
  misc_RNA (1)...(19): siRNA sense strand
gggagauggaagagcacca

SEQ ID NO: 2584151 - RNA, 19 nt, Homo sapiens
  misc_RNA (1)...(19): siRNA sense strand
agaagaagcgggagcagga

SEQ ID NO: 2584152 - RNA, 19 nt, Homo sapiens
  misc_RNA (1)...(19): siRNA sense strand
ccuacuaucacgacgggaa

SEQ ID NO: 2584153 - RNA, 19 nt, Homo sapiens
  misc_RNA (1)...(19): siRNA sense strand
caggaggagaagaggcaga

SEQ ID NO: 2584154 - RNA, 19 nt, Homo sapiens
  misc_RNA (1)...(19): siRNA sense strand
gaagcagcccugugggaga

SEQ ID NO: 2584155 - RNA, 19 nt, Homo sapiens
  misc_RNA (1)...(19): siRNA sense strand
agcagaagauggaggagca

SEQ ID NO: 2584156 - RNA, 19 nt, Homo sapiens
  misc_RNA (1)...(19): siRNA sense strand
acuacaucguggagauuga

SEQ ID NO: 2584157 - RNA, 19 nt, Homo sapiens
  misc_RNA (1)...(19): siRNA sense strand
ugucaauggaugccagaau

SEQ ID NO: 2584158 - RNA, 19 nt, Homo sapiens
  misc_RNA (1)...(19): siRNA sense strand
gcaugauagagcagcugaa

SEQ ID NO: 2584159 - RNA, 19 nt, Homo sapiens
  misc_RNA (1)...(19): siRNA sense strand
ccucaagcggacacgcaaa

SEQ ID NO: 2584160 - RNA, 19 nt, Homo sapiens
  misc_RNA (1)...(19): siRNA sense strand
guaacaagcaugagcugca

SEQ ID NO: 2584161 - RNA, 19 nt, Homo sapiens
  misc_RNA (1)...(19): siRNA sense strand
acacggaauuagagaaccu

SEQ ID NO: 2584162 - RNA, 19 nt, Homo sapiens
  misc_RNA (1)...(19): siRNA sense strand
uggugaagcagcagcucaa

SEQ ID NO: 2584163 - RNA, 19 nt, Homo sapiens
  misc_RNA (1)...(19): siRNA sense strand
gagcagaugcagcgcuaca

SEQ ID NO: 2584164 - RNA, 19 nt, Homo sapiens
  misc_RNA (1)...(19): siRNA sense strand
guaacaaggcucugcggga

SEQ ID NO: 2584165 - RNA, 19 nt, Homo sapiens
  misc_RNA (1)...(19): siRNA sense strand
aaaccaagagugaggagga

SEQ ID NO: 2584166 - RNA, 19 nt, Homo sapiens
  misc_RNA (1)...(19): siRNA sense strand
cggccaaagucauugaaac

SEQ ID NO: 2584167 - RNA, 19 nt, Homo sapiens
  misc_RNA (1)...(19): siRNA sense strand
ccgaggugauggaagagau

SEQ ID NO: 2584168 - RNA, 19 nt, Homo sapiens
  misc_RNA (1)...(19): siRNA sense strand
uggcgcagugugagagcaa

SEQ ID NO: 2584169 - RNA, 19 nt, Homo sapiens
  misc_RNA (1)...(19): siRNA sense strand
gaugagagccauaaccaga

SEQ ID NO: 2584170 - RNA, 19 nt, Homo sapiens
  misc_RNA (1)...(19): siRNA sense strand
ccuccaagaucaucagcga

SEQ ID NO: 2584171 - RNA, 19 nt, Homo sapiens
  misc_RNA (1)...(19): siRNA sense strand
agcagaaacacgagaacca

SEQ ID NO: 2584172 - RNA, 19 nt, Homo sapiens
  misc_RNA (1)...(19): siRNA sense strand
ccaucaugcuggagcugga

SEQ ID NO: 2584173 - RNA, 19 nt, Homo sapiens
  misc_RNA (1)...(19): siRNA sense strand
gcaaauuugugguggaugg

SEQ ID NO: 2584174 - RNA, 19 nt, Homo sapiens
  misc_RNA (1)...(19): siRNA sense strand
ugugggagaucgugggcga

SEQ ID NO: 2584175 - RNA, 19 nt, Homo sapiens
  misc_RNA (1)...(19): siRNA sense strand
gagaagaaggaugaggaga

SEQ ID NO: 2584176 - RNA, 19 nt, Homo sapiens
  misc_RNA (1)...(19): siRNA sense strand
aggugaagaacgaggugga

SEQ ID NO: 2584177 - RNA, 19 nt, Homo sapiens
  misc_RNA (1)...(19): siRNA sense strand
cagcggaaggaaagcauga

SEQ ID NO: 2584178 - RNA, 19 nt, Homo sapiens
  misc_RNA (1)...(19): siRNA sense strand
gcaagguuuacaaggccaa

SEQ ID NO: 2584179 - RNA, 19 nt, Homo sapiens
  misc_RNA (1)...(19): siRNA sense strand
ggauaagaacccagaaacc

SEQ ID NO: 2584180 - RNA, 19 nt, Homo sapiens
  misc_RNA (1)...(19): siRNA sense strand
gaagaugagaagaaggaug

SEQ ID NO: 2584181 - RNA, 19 nt, Homo sapiens
  misc_RNA (1)...(19): siRNA sense strand
cagcuggagcaaaugcaua

SEQ ID NO: 2584182 - RNA, 19 nt, Homo sapiens
  misc_RNA (1)...(19): siRNA sense strand
cugaagauagcccuggaua

SEQ ID NO: 2584183 - RNA, 19 nt, Homo sapiens
  misc_RNA (1)...(19): siRNA sense strand
gugaggaggagcuggagga

SEQ ID NO: 2584184 - RNA, 19 nt, Homo sapiens
  misc_RNA (1)...(19): siRNA sense strand
gggccuuccaagagggacu

SEQ ID NO: 2584185 - RNA, 19 nt, Homo sapiens
  misc_RNA (1)...(19): siRNA sense strand
aggaaaucaacgccaagaa

SEQ ID NO: 2584186 - RNA, 19 nt, Homo sapiens
  misc_RNA (1)...(19): siRNA sense strand
uagccaagcagaaggagga

SEQ ID NO: 2584187 - RNA, 19 nt, Homo sapiens
  misc_RNA (1)...(19): siRNA sense strand
ugguagagcacgaaaccca

SEQ ID NO: 2584188 - RNA, 19 nt, Homo sapiens
  misc_RNA (1)...(19): siRNA sense strand
ccaucaaggacccgaaacu

SEQ ID NO: 2584189 - RNA, 19 nt, Homo sapiens
  misc_RNA (1)...(19): siRNA sense strand
agcuggagcaaaugcauaa

SEQ ID NO: 2584190 - RNA, 19 nt, Homo sapiens
  misc_RNA (1)...(19): siRNA sense strand
agcagcaaguggagaagau

SEQ ID NO: 2584191 - RNA, 19 nt, Homo sapiens
  misc_RNA (1)...(19): siRNA sense strand
guucauaagaagcggaagu

SEQ ID NO: 2584192 - RNA, 19 nt, Homo sapiens
  misc_RNA (1)...(19): siRNA sense strand
aggaggaagaugaguucua

SEQ ID NO: 2584193 - RNA, 19 nt, Homo sapiens
  misc_RNA (1)...(19): siRNA sense strand
agucagacacagaggacga

SEQ ID NO: 2584194 - RNA, 19 nt, Homo sapiens
  misc_RNA (1)...(19): siRNA sense strand
uggagaagcagaagagcca

SEQ ID NO: 2584195 - RNA, 19 nt, Homo sapiens
  misc_RNA (1)...(19): siRNA sense strand
aggaagagaacguugacau

SEQ ID NO: 2584196 - RNA, 19 nt, Homo sapiens
  misc_RNA (1)...(19): siRNA sense strand
gaguagucaccaaggccua

SEQ ID NO: 2584197 - RNA, 19 nt, Homo sapiens
  misc_RNA (1)...(19): siRNA sense strand
acacagaggacgaagugga

SEQ ID NO: 2584198 - RNA, 19 nt, Homo sapiens
  misc_RNA (1)...(19): siRNA sense strand
cagugauggagaagcagaa

SEQ ID NO: 2584199 - RNA, 19 nt, Homo sapiens
  misc_RNA (1)...(19): siRNA sense strand
agaucauucgugaggcuua

SEQ ID NO: 2584200 - RNA, 19 nt, Homo sapiens
  misc_RNA (1)...(19): siRNA sense strand
ucacagaggaauccggaga

SEQ ID NO: 2584201 - RNA, 19 nt, Homo sapiens
  misc_RNA (1)...(19): siRNA sense strand
ugacauugaugaaggggau

SEQ ID NO: 2584202 - RNA, 19 nt, Homo sapiens
  misc_RNA (1)...(19): siRNA sense strand
agaucacagaagagcuuaa

SEQ ID NO: 2584203 - RNA, 19 nt, Homo sapiens
  misc_RNA (1)...(19): siRNA sense strand
gaagaugaguucuaccaga

SEQ ID NO: 2584204 - RNA, 19 nt, Homo sapiens
  misc_RNA (1)...(19): siRNA sense strand
acuacugccauuagaacua

SEQ ID NO: 2584205 - RNA, 19 nt, Homo sapiens
  misc_RNA (1)...(19): siRNA sense strand
ccuucaagaucauucguga

SEQ ID NO: 2584206 - RNA, 19 nt, Homo sapiens
  misc_RNA (1)...(19): siRNA sense strand
gaaccggcuuucugggcuu

SEQ ID NO: 2584207 - RNA, 19 nt, Homo sapiens
  misc_RNA (1)...(19): siRNA sense strand
uggaaagaaggaagagaaa

SEQ ID NO: 2584208 - RNA, 19 nt, Homo sapiens
  misc_RNA (1)...(19): siRNA sense strand
aaacaaagacaguggcgaa

SEQ ID NO: 2584209 - RNA, 19 nt, Homo sapiens
  misc_RNA (1)...(19): siRNA sense strand
ccaaagaaaaggaggacaa

SEQ ID NO: 2584210 - RNA, 19 nt, Homo sapiens
  misc_RNA (1)...(19): siRNA sense strand
cagaaaagagugaagaaaa

SEQ ID NO: 2584211 - RNA, 19 nt, Homo sapiens
  misc_RNA (1)...(19): siRNA sense strand
ggaaagaagaaaacugaaa

SEQ ID NO: 2584212 - RNA, 19 nt, Homo sapiens
  misc_RNA (1)...(19): siRNA sense strand
aagaaaagugagaaggaaa

SEQ ID NO: 2584213 - RNA, 19 nt, Homo sapiens
  misc_RNA (1)...(19): siRNA sense strand
ggaagugaaagguggaaaa

SEQ ID NO: 2584214 - RNA, 19 nt, Homo sapiens
  misc_RNA (1)...(19): siRNA sense strand
uggcgaaagaacagaagaa

SEQ ID NO: 2584215 - RNA, 19 nt, Homo sapiens
  misc_RNA (1)...(19): siRNA sense strand
cuggaaagaaggaagagaa

SEQ ID NO: 2584216 - RNA, 19 nt, Homo sapiens
  misc_RNA (1)...(19): siRNA sense strand
aaaggaggacaaagagaaa

SEQ ID NO: 2584217 - RNA, 19 nt, Homo sapiens
  misc_RNA (1)...(19): siRNA sense strand
agaaccuauuaaagggaaa

SEQ ID NO: 2584218 - RNA, 19 nt, Homo sapiens
  misc_RNA (1)...(19): siRNA sense strand
caggagaaagugaagcaaa

SEQ ID NO: 2584219 - RNA, 19 nt, Homo sapiens
  misc_RNA (1)...(19): siRNA sense strand
agaugaugauggugacgaa

SEQ ID NO: 2584220 - RNA, 19 nt, Homo sapiens
  misc_RNA (1)...(19): siRNA sense strand
agauacugauaaaggagaa

SEQ ID NO: 2584221 - RNA, 19 nt, Homo sapiens
  misc_RNA (1)...(19): siRNA sense strand
gggaaaagaagaaggcuga

SEQ ID NO: 2584222 - RNA, 19 nt, Homo sapiens
  misc_RNA (1)...(19): siRNA sense strand
caaagacaguggcgaaaga

SEQ ID NO: 2584223 - RNA, 19 nt, Homo sapiens
  misc_RNA (1)...(19): siRNA sense strand
ggauuuaaaaccaggacaa

SEQ ID NO: 2584224 - RNA, 19 nt, Homo sapiens
  misc_RNA (1)...(19): siRNA sense strand
cuccacaacuacaaggaaa

SEQ ID NO: 2584225 - RNA, 19 nt, Homo sapiens
  misc_RNA (1)...(19): siRNA sense strand
cagcuaagaaggaugaaaa

SEQ ID NO: 2584226 - RNA, 19 nt, Homo sapiens
  misc_RNA (1)...(19): siRNA sense strand
cagaaucaggaaagaagaa

SEQ ID NO: 2584227 - RNA, 19 nt, Homo sapiens
  misc_RNA (1)...(19): siRNA sense strand
cugaagaugaagaagauga

SEQ ID NO: 2584228 - RNA, 19 nt, Homo sapiens
  misc_RNA (1)...(19): siRNA sense strand
ccaucaaaacccaaagaaa

SEQ ID NO: 2584229 - RNA, 19 nt, Homo sapiens
  misc_RNA (1)...(19): siRNA sense strand
agacaguggagcaagaaau

SEQ ID NO: 2584230 - RNA, 19 nt, Homo sapiens
  misc_RNA (1)...(19): siRNA sense strand
gaacaagcuuccagaccca

SEQ ID NO: 2584231 - RNA, 19 nt, Homo sapiens
  misc_RNA (1)...(19): siRNA sense strand
aggagaaagugaagcaaac

SEQ ID NO: 2584232 - RNA, 19 nt, Homo sapiens
  misc_RNA (1)...(19): siRNA sense strand
cacaaagauaagacugaaa

SEQ ID NO: 2584233 - RNA, 19 nt, Homo sapiens
  misc_RNA (1)...(19): siRNA sense strand
aagaaaaggaggacaaaga

SEQ ID NO: 2584234 - RNA, 19 nt, Homo sapiens
  misc_RNA (1)...(19): siRNA sense strand
caaccaagacaguggagca

SEQ ID NO: 2584235 - RNA, 19 nt, Homo sapiens
  misc_RNA (1)...(19): siRNA sense strand
ggacagucacagaagacau

SEQ ID NO: 2584236 - RNA, 19 nt, Homo sapiens
  misc_RNA (1)...(19): siRNA sense strand
agcugaacaucgagaaaga

SEQ ID NO: 2584237 - RNA, 19 nt, Homo sapiens
  misc_RNA (1)...(19): siRNA sense strand
gguacaauggcuauggauu

SEQ ID NO: 2584238 - RNA, 19 nt, Homo sapiens
  misc_RNA (1)...(19): siRNA sense strand
agacaguggcgaaagaaca

SEQ ID NO: 2584239 - RNA, 19 nt, Homo sapiens
  misc_RNA (1)...(19): siRNA sense strand
gcgaaagaacagaagaaag

SEQ ID NO: 2584240 - RNA, 19 nt, Homo sapiens
  misc_RNA (1)...(19): siRNA sense strand
cuaagaaggaugaaaagaa

SEQ ID NO: 2584241 - RNA, 19 nt, Homo sapiens
  misc_RNA (1)...(19): siRNA sense strand
gaaagaaggaagagaaaac

SEQ ID NO: 2584242 - RNA, 19 nt, Homo sapiens
  misc_RNA (1)...(19): siRNA sense strand
aagaagaugaugaugguga

SEQ ID NO: 2584243 - RNA, 19 nt, Homo sapiens
  misc_RNA (1)...(19): siRNA sense strand
ggagcaagaaauuagaaaa

SEQ ID NO: 2584244 - RNA, 19 nt, Homo sapiens
  misc_RNA (1)...(19): siRNA sense strand
cuucaaagaaagcuaaaga

SEQ ID NO: 2584245 - RNA, 19 nt, Homo sapiens
  misc_RNA (1)...(19): siRNA sense strand
caaacaagggacuguaaaa

SEQ ID NO: 2584246 - RNA, 19 nt, Homo sapiens
  misc_RNA (1)...(19): siRNA sense strand
gugucuacuuggaugggua

SEQ ID NO: 2584247 - RNA, 19 nt, Homo sapiens
  misc_RNA (1)...(19): siRNA sense strand
cugauaaaggagaaauaga

SEQ ID NO: 2584248 - RNA, 19 nt, Homo sapiens
  misc_RNA (1)...(19): siRNA sense strand
gcagaaaagagugaagaaa

SEQ ID NO: 2584249 - RNA, 19 nt, Homo sapiens
  misc_RNA (1)...(19): siRNA sense strand
aggacaaagcccagccauu

SEQ ID NO: 2584250 - RNA, 19 nt, Homo sapiens
  misc_RNA (1)...(19): siRNA sense strand
agcaaagucaccaaagaaa

SEQ ID NO: 2584251 - RNA, 19 nt, Homo sapiens
  misc_RNA (1)...(19): siRNA sense strand
agacauagugaaaccagaa

SEQ ID NO: 2584252 - RNA, 19 nt, Homo sapiens
  misc_RNA (1)...(19): siRNA sense strand
agaaaagagugaagaaaag

SEQ ID NO: 2584253 - RNA, 19 nt, Homo sapiens
  misc_RNA (1)...(19): siRNA sense strand
gaagcaaacagcugcaaaa

SEQ ID NO: 2584254 - RNA, 19 nt, Homo sapiens
  misc_RNA (1)...(19): siRNA sense strand
cagcacaagcagcagcuaa

SEQ ID NO: 2584255 - RNA, 19 nt, Homo sapiens
  misc_RNA (1)...(19): siRNA sense strand
gaaucaggaaagaagaaaa

SEQ ID NO: 2584256 - RNA, 19 nt, Homo sapiens
  misc_RNA (1)...(19): siRNA sense strand
cuuuaaaacugguacguga

SEQ ID NO: 2584257 - RNA, 19 nt, Homo sapiens
  misc_RNA (1)...(19): siRNA sense strand
ccugaaaggaaaauacaaa

SEQ ID NO: 2584258 - RNA, 19 nt, Homo sapiens
  misc_RNA (1)...(19): siRNA sense strand
aaagaacagaagaaagcua

SEQ ID NO: 2584259 - RNA, 19 nt, Homo sapiens
  misc_RNA (1)...(19): siRNA sense strand
guggaaaacaggagaaagu

SEQ ID NO: 2584260 - RNA, 19 nt, Homo sapiens
  misc_RNA (1)...(19): siRNA sense strand
ggacaaagagaaagcagcu

SEQ ID NO: 2584261 - RNA, 19 nt, Homo sapiens
  misc_RNA (1)...(19): siRNA sense strand
gugcugaagaggacaguca

SEQ ID NO: 2584262 - RNA, 19 nt, Homo sapiens
  misc_RNA (1)...(19): siRNA sense strand
cuauuaaagggaaagaaga

SEQ ID NO: 2584263 - RNA, 19 nt, Homo sapiens
  misc_RNA (1)...(19): siRNA sense strand
uuaaagggaaagaagagaa

SEQ ID NO: 2584264 - RNA, 19 nt, Homo sapiens
  misc_RNA (1)...(19): siRNA sense strand
aaacaagagaaaccugaaa

SEQ ID NO: 2584265 - RNA, 19 nt, Homo sapiens
  misc_RNA (1)...(19): siRNA sense strand
aagcaggaaaagaaagaaa

SEQ ID NO: 2584266 - RNA, 19 nt, Homo sapiens
  misc_RNA (1)...(19): siRNA sense strand
gggaaagaagagaaaguuc

SEQ ID NO: 2584267 - RNA, 19 nt, Homo sapiens
  misc_RNA (1)...(19): siRNA sense strand
aaagcaacucacaaggaaa

SEQ ID NO: 2584268 - RNA, 19 nt, Homo sapiens
  misc_RNA (1)...(19): siRNA sense strand
cugcaaaaguaaaagaagu

SEQ ID NO: 2584269 - RNA, 19 nt, Homo sapiens
  misc_RNA (1)...(19): siRNA sense strand
acagaaaacaccaucaaaa

SEQ ID NO: 2584270 - RNA, 19 nt, Homo sapiens
  misc_RNA (1)...(19): siRNA sense strand
gugcggaaggagugugaaa

SEQ ID NO: 2584271 - RNA, 19 nt, Homo sapiens
  misc_RNA (1)...(19): siRNA sense strand
ccaugaaggagguggacga

SEQ ID NO: 2584272 - RNA, 19 nt, Homo sapiens
  misc_RNA (1)...(19): siRNA sense strand
acgaagacgacgaggagga

SEQ ID NO: 2584273 - RNA, 19 nt, Homo sapiens
  misc_RNA (1)...(19): siRNA sense strand
ugaaggagguggacgagca

SEQ ID NO: 2584274 - RNA, 19 nt, Homo sapiens
  misc_RNA (1)...(19): siRNA sense strand
acaacugggccaaggguca

SEQ ID NO: 2584275 - RNA, 19 nt, Homo sapiens
  misc_RNA (1)...(19): siRNA sense strand
gcuacuucguggaguggau

SEQ ID NO: 2584276 - RNA, 19 nt, Homo sapiens
  misc_RNA (1)...(19): siRNA sense strand
gcgagauguacgaagacga

SEQ ID NO: 2584277 - RNA, 19 nt, Homo sapiens
  misc_RNA (1)...(19): siRNA sense strand
acacggugguggaacccua

SEQ ID NO: 2584278 - RNA, 19 nt, Homo sapiens
  misc_RNA (1)...(19): siRNA sense strand
cggaugaaaccuacugcau

SEQ ID NO: 2584279 - RNA, 19 nt, Homo sapiens
  misc_RNA (1)...(19): siRNA sense strand
ccgucaacauggugcccuu

SEQ ID NO: 2584280 - RNA, 19 nt, Homo sapiens
  misc_RNA (1)...(19): siRNA sense strand
uuucaaauggagaggcaaa

SEQ ID NO: 2584281 - RNA, 19 nt, Homo sapiens
  misc_RNA (1)...(19): siRNA sense strand
agaaggaaauugagcagga

SEQ ID NO: 2584282 - RNA, 19 nt, Homo sapiens
  misc_RNA (1)...(19): siRNA sense strand
ccgauauuccagaaggcaa

SEQ ID NO: 2584283 - RNA, 19 nt, Homo sapiens
  misc_RNA (1)...(19): siRNA sense strand
ucuagaucgaguaaagaaa

SEQ ID NO: 2584284 - RNA, 19 nt, Homo sapiens
  misc_RNA (1)...(19): siRNA sense strand
gcuuucaaauggagaggca

SEQ ID NO: 2584285 - RNA, 19 nt, Homo sapiens
  misc_RNA (1)...(19): siRNA sense strand
uggcgaaaaucgaaaucaa

SEQ ID NO: 2584286 - RNA, 19 nt, Homo sapiens
  misc_RNA (1)...(19): siRNA sense strand
cuguguacccauugcaaau

SEQ ID NO: 2584287 - RNA, 19 nt, Homo sapiens
  misc_RNA (1)...(19): siRNA sense strand
agagaaagcagcgaggcua

SEQ ID NO: 2584288 - RNA, 19 nt, Homo sapiens
  misc_RNA (1)...(19): siRNA sense strand
ccugauagguguuugcacu

SEQ ID NO: 2584289 - RNA, 19 nt, Homo sapiens
  misc_RNA (1)...(19): siRNA sense strand
cuauuugguaacuggagua

SEQ ID NO: 2584290 - RNA, 19 nt, Homo sapiens
  misc_RNA (1)...(19): siRNA sense strand
ccuugaaguuuuagauagu

SEQ ID NO: 2584291 - RNA, 19 nt, Homo sapiens
  misc_RNA (1)...(19): siRNA sense strand
aggaagaggaagaggagga

SEQ ID NO: 2584292 - RNA, 19 nt, Homo sapiens
  misc_RNA (1)...(19): siRNA sense strand
aggaggaggaagaggaaga

SEQ ID NO: 2584293 - RNA, 19 nt, Homo sapiens
  misc_RNA (1)...(19): siRNA sense strand
aagaggaagaggaggaauu

SEQ ID NO: 2584294 - RNA, 19 nt, Homo sapiens
  misc_RNA (1)...(19): siRNA sense strand
cccacaaacucuuuaacaa

SEQ ID NO: 2584295 - RNA, 19 nt, Homo sapiens
  misc_RNA (1)...(19): siRNA sense strand
caguuggagaaauguguaa

SEQ ID NO: 2584296 - RNA, 19 nt, Homo sapiens
  misc_RNA (1)...(19): siRNA sense strand
aacaacagugagagagcaa

SEQ ID NO: 2584297 - RNA, 19 nt, Homo sapiens
  misc_RNA (1)...(19): siRNA sense strand
gggacuggaggacgagcaa

SEQ ID NO: 2584298 - RNA, 19 nt, Homo sapiens
  misc_RNA (1)...(19): siRNA sense strand
gacuggaggacgagcaaaa

SEQ ID NO: 2584299 - RNA, 19 nt, Homo sapiens
  misc_RNA (1)...(19): siRNA sense strand
cccuaacaacagugagaga

SEQ ID NO: 2584300 - RNA, 19 nt, Homo sapiens
  misc_RNA (1)...(19): siRNA sense strand
aggaagaggaggaauuagu

SEQ ID NO: 2584301 - RNA, 19 nt, Homo sapiens
  misc_RNA (1)...(19): siRNA sense strand
aaugcgagcaguuggagaa

SEQ ID NO: 2584302 - RNA, 19 nt, Homo sapiens
  misc_RNA (1)...(19): siRNA sense strand
ugaggaggaggaagaggaa

SEQ ID NO: 2584303 - RNA, 19 nt, Homo sapiens
  misc_RNA (1)...(19): siRNA sense strand
aggaggaagaggaagagga

SEQ ID NO: 2584304 - RNA, 19 nt, Homo sapiens
  misc_RNA (1)...(19): siRNA sense strand
ccacaaacucuuuaacaac

SEQ ID NO: 2584305 - RNA, 19 nt, Homo sapiens
  misc_RNA (1)...(19): siRNA sense strand
uauggaaauccuaggacaa

SEQ ID NO: 2584306 - RNA, 19 nt, Homo sapiens
  misc_RNA (1)...(19): siRNA sense strand
acucagcaaaugacagaaa

SEQ ID NO: 2584307 - RNA, 19 nt, Homo sapiens
  misc_RNA (1)...(19): siRNA sense strand
gcagaaagaaaguuggucu

SEQ ID NO: 2584308 - RNA, 19 nt, Homo sapiens
  misc_RNA (1)...(19): siRNA sense strand
gcauuucaagagaggacaa

SEQ ID NO: 2584309 - RNA, 19 nt, Homo sapiens
  misc_RNA (1)...(19): siRNA sense strand
gcagcaaaauaguggcaga

SEQ ID NO: 2584310 - RNA, 19 nt, Homo sapiens
  misc_RNA (1)...(19): siRNA sense strand
agagcagacacuagcuuaa

SEQ ID NO: 2584311 - RNA, 19 nt, Homo sapiens
  misc_RNA (1)...(19): siRNA sense strand
gcucaggagacuaaccaga

SEQ ID NO: 2584312 - RNA, 19 nt, Homo sapiens
  misc_RNA (1)...(19): siRNA sense strand
guaugauuacaaagcagaa

SEQ ID NO: 2584313 - RNA, 19 nt, Homo sapiens
  misc_RNA (1)...(19): siRNA sense strand
aguuggucuuacaggguuu

SEQ ID NO: 2584314 - RNA, 19 nt, Homo sapiens
  misc_RNA (1)...(19): siRNA sense strand
ugaugagauuagagagauc

SEQ ID NO: 2584315 - RNA, 19 nt, Homo sapiens
  misc_RNA (1)...(19): siRNA sense strand
aguccaucguguuggucaa

SEQ ID NO: 2584316 - RNA, 19 nt, Homo sapiens
  misc_RNA (1)...(19): siRNA sense strand
uuugaugagauuagagaga

SEQ ID NO: 2584317 - RNA, 19 nt, Homo sapiens
  misc_RNA (1)...(19): siRNA sense strand
guuuguggacauugaaaga

SEQ ID NO: 2584318 - RNA, 19 nt, Homo sapiens
  misc_RNA (1)...(19): siRNA sense strand
cagaccaacaggaggcaga

SEQ ID NO: 2584319 - RNA, 19 nt, Homo sapiens
  misc_RNA (1)...(19): siRNA sense strand
guccagaauugcagccuga

SEQ ID NO: 2584320 - RNA, 19 nt, Homo sapiens
  misc_RNA (1)...(19): siRNA sense strand
uggucuaugucgugagucu

SEQ ID NO: 2584321 - RNA, 19 nt, Homo sapiens
  misc_RNA (1)...(19): siRNA sense strand
aauucuagccacagauaca

SEQ ID NO: 2584322 - RNA, 19 nt, Homo sapiens
  misc_RNA (1)...(19): siRNA sense strand
gaggauuugcacagauuca

SEQ ID NO: 2584323 - RNA, 19 nt, Homo sapiens
  misc_RNA (1)...(19): siRNA sense strand
auguggaugcagagaauca

SEQ ID NO: 2584324 - RNA, 19 nt, Homo sapiens
  misc_RNA (1)...(19): siRNA sense strand
ccagcauguuugaugagau

SEQ ID NO: 2584325 - RNA, 19 nt, Homo sapiens
  misc_RNA (1)...(19): siRNA sense strand
auacaguggaagacguaga

SEQ ID NO: 2584326 - RNA, 19 nt, Homo sapiens
  misc_RNA (1)...(19): siRNA sense strand
aggagaaauacgagaaguu

SEQ ID NO: 2584327 - RNA, 19 nt, Homo sapiens
  misc_RNA (1)...(19): siRNA sense strand
cagaacuggcaaugagcaa

SEQ ID NO: 2584328 - RNA, 19 nt, Homo sapiens
  misc_RNA (1)...(19): siRNA sense strand
cagaagaggcggacccuga

SEQ ID NO: 2584329 - RNA, 19 nt, Homo sapiens
  misc_RNA (1)...(19): siRNA sense strand
gggacgcguacaaggagaa

SEQ ID NO: 2584330 - RNA, 19 nt, Homo sapiens
  misc_RNA (1)...(19): siRNA sense strand
uggccauggaauauguuaa

SEQ ID NO: 2584331 - RNA, 19 nt, Homo sapiens
  misc_RNA (1)...(19): siRNA sense strand
ucagcaaggaggaggugau

SEQ ID NO: 2584332 - RNA, 19 nt, Homo sapiens
  misc_RNA (1)...(19): siRNA sense strand
uccuggagucggagaagaa

SEQ ID NO: 2584333 - RNA, 19 nt, Homo sapiens
  misc_RNA (1)...(19): siRNA sense strand
ccuaaaaggccaaaauaaa

SEQ ID NO: 2584334 - RNA, 19 nt, Homo sapiens
  misc_RNA (1)...(19): siRNA sense strand
agggaaugucuguaagaaa

SEQ ID NO: 2584335 - RNA, 19 nt, Homo sapiens
  misc_RNA (1)...(19): siRNA sense strand
aagaaauaauccagcaaga

SEQ ID NO: 2584336 - RNA, 19 nt, Homo sapiens
  misc_RNA (1)...(19): siRNA sense strand
agaagauacaauugggcaa

SEQ ID NO: 2584337 - RNA, 19 nt, Homo sapiens
  misc_RNA (1)...(19): siRNA sense strand
acaacagaccuaaaggaaa

SEQ ID NO: 2584338 - RNA, 19 nt, Homo sapiens
  misc_RNA (1)...(19): siRNA sense strand
uggaacaagcagaagaaau

SEQ ID NO: 2584339 - RNA, 19 nt, Homo sapiens
  misc_RNA (1)...(19): siRNA sense strand
uuuacaagcuggaaggaga

SEQ ID NO: 2584340 - RNA, 19 nt, Homo sapiens
  misc_RNA (1)...(19): siRNA sense strand
ugagacugacugugagaaa

SEQ ID NO: 2584341 - RNA, 19 nt, Homo sapiens
  misc_RNA (1)...(19): siRNA sense strand
agaccuaaaggaaaggaua

SEQ ID NO: 2584342 - RNA, 19 nt, Homo sapiens
  misc_RNA (1)...(19): siRNA sense strand
cuuaaaggucaaagacaga

SEQ ID NO: 2584343 - RNA, 19 nt, Homo sapiens
  misc_RNA (1)...(19): siRNA sense strand
uuuaagugcccuaggguuu

SEQ ID NO: 2584344 - RNA, 19 nt, Homo sapiens
  misc_RNA (1)...(19): siRNA sense strand
gggaaaaguauauugaaga

SEQ ID NO: 2584345 - RNA, 19 nt, Homo sapiens
  misc_RNA (1)...(19): siRNA sense strand
agauagggaaugucuguaa

SEQ ID NO: 2584346 - RNA, 19 nt, Homo sapiens
  misc_RNA (1)...(19): siRNA sense strand
cuugaaauuuggaggaaag

SEQ ID NO: 2584347 - RNA, 19 nt, Homo sapiens
  misc_RNA (1)...(19): siRNA sense strand
uuuauaaccuauuggccua

SEQ ID NO: 2584348 - RNA, 19 nt, Homo sapiens
  misc_RNA (1)...(19): siRNA sense strand
uugaagaaauccuggacca

SEQ ID NO: 2584349 - RNA, 19 nt, Homo sapiens
  misc_RNA (1)...(19): siRNA sense strand
ucuugaaauuuggaggaaa

SEQ ID NO: 2584350 - RNA, 19 nt, Homo sapiens
  misc_RNA (1)...(19): siRNA sense strand
agaagaaauaauccagcaa

SEQ ID NO: 2584351 - RNA, 19 nt, Homo sapiens
  misc_RNA (1)...(19): siRNA sense strand
ugagaaggcacaaaagaua

SEQ ID NO: 2584352 - RNA, 19 nt, Homo sapiens
  misc_RNA (1)...(19): siRNA sense strand
cagcaagaacacucagaca

SEQ ID NO: 2584353 - RNA, 19 nt, Homo sapiens
  misc_RNA (1)...(19): siRNA sense strand
acacucagacaaagaagaa

SEQ ID NO: 2584354 - RNA, 19 nt, Homo sapiens
  misc_RNA (1)...(19): siRNA sense strand
cugacaauccagaauuuaa

SEQ ID NO: 2584355 - RNA, 19 nt, Homo sapiens
  misc_RNA (1)...(19): siRNA sense strand
agugaaauucguaaggaca

SEQ ID NO: 2584356 - RNA, 19 nt, Homo sapiens
  misc_RNA (1)...(19): siRNA sense strand
ggaacaaagcucucgaacu

SEQ ID NO: 2584357 - RNA, 19 nt, Homo sapiens
  misc_RNA (1)...(19): siRNA sense strand
ggacuuugcuacagggcac

SEQ ID NO: 2584358 - RNA, 19 nt, Homo sapiens
  misc_RNA (1)...(19): siRNA sense strand
cugaagaaauugucuacca

SEQ ID NO: 2584359 - RNA, 19 nt, Homo sapiens
  misc_RNA (1)...(19): siRNA sense strand
ugcagaagcugaaggggaa

SEQ ID NO: 2584360 - RNA, 19 nt, Homo sapiens
  misc_RNA (1)...(19): siRNA sense strand
agaaauaauccagcaagaa

SEQ ID NO: 2584361 - RNA, 19 nt, Homo sapiens
  misc_RNA (1)...(19): siRNA sense strand
cacaacagaccuaaaggaa

SEQ ID NO: 2584362 - RNA, 19 nt, Homo sapiens
  misc_RNA (1)...(19): siRNA sense strand
uuacaagcuggaaggagaa

SEQ ID NO: 2584363 - RNA, 19 nt, Homo sapiens
  misc_RNA (1)...(19): siRNA sense strand
cagaagaaauaauccagca

SEQ ID NO: 2584364 - RNA, 19 nt, Homo sapiens
  misc_RNA (1)...(19): siRNA sense strand
cugcugaguacuaugagaa

SEQ ID NO: 2584365 - RNA, 19 nt, Homo sapiens
  misc_RNA (1)...(19): siRNA sense strand
cagaauuuaacaucggcua

SEQ ID NO: 2584366 - RNA, 19 nt, Homo sapiens
  misc_RNA (1)...(19): siRNA sense strand
gcucugaagaaauugucua

SEQ ID NO: 2584367 - RNA, 19 nt, Homo sapiens
  misc_RNA (1)...(19): siRNA sense strand
uuagaugugcagaguuuaa

SEQ ID NO: 2584368 - RNA, 19 nt, Homo sapiens
  misc_RNA (1)...(19): siRNA sense strand
aaauaauccagcaagaaca

SEQ ID NO: 2584369 - RNA, 19 nt, Homo sapiens
  misc_RNA (1)...(19): siRNA sense strand
agaacauaaccgaugauca

SEQ ID NO: 2584370 - RNA, 19 nt, Homo sapiens
  misc_RNA (1)...(19): siRNA sense strand
acaagugcucugaagaaau

SEQ ID NO: 2584371 - RNA, 19 nt, Homo sapiens
  misc_RNA (1)...(19): siRNA sense strand
agcaagaacacucagacaa

SEQ ID NO: 2584372 - RNA, 19 nt, Homo sapiens
  misc_RNA (1)...(19): siRNA sense strand
acaaagaagaaguacgaag

SEQ ID NO: 2584373 - RNA, 19 nt, Homo sapiens
  misc_RNA (1)...(19): siRNA sense strand
aaauaucaucccagccuua

SEQ ID NO: 2584374 - RNA, 19 nt, Homo sapiens
  misc_RNA (1)...(19): siRNA sense strand
accuaaaggaaaggauaaa

SEQ ID NO: 2584375 - RNA, 19 nt, Homo sapiens
  misc_RNA (1)...(19): siRNA sense strand
gagugaaauucguaaggac

SEQ ID NO: 2584376 - RNA, 19 nt, Homo sapiens
  misc_RNA (1)...(19): siRNA sense strand
uguuggaguuagaauguca

SEQ ID NO: 2584377 - RNA, 19 nt, Homo sapiens
  misc_RNA (1)...(19): siRNA sense strand
uggaugauucugauagaga

SEQ ID NO: 2584378 - RNA, 19 nt, Homo sapiens
  misc_RNA (1)...(19): siRNA sense strand
gcuucaagauguacaugca

SEQ ID NO: 2584379 - RNA, 19 nt, Homo sapiens
  misc_RNA (1)...(19): siRNA sense strand
ucaagauguacaugcagaa

SEQ ID NO: 2584380 - RNA, 19 nt, Homo sapiens
  misc_RNA (1)...(19): siRNA sense strand
ugaagaaauccuggaccaa

SEQ ID NO: 2584381 - RNA, 19 nt, Homo sapiens
  misc_RNA (1)...(19): siRNA sense strand
caaaagauagauccagaaa

SEQ ID NO: 2584382 - RNA, 19 nt, Homo sapiens
  misc_RNA (1)...(19): siRNA sense strand
aagaacacucagacaaaga

SEQ ID NO: 2584383 - RNA, 19 nt, Homo sapiens
  misc_RNA (1)...(19): siRNA sense strand
aagaaauuguccaguccuu

SEQ ID NO: 2584384 - RNA, 19 nt, Homo sapiens
  misc_RNA (1)...(19): siRNA sense strand
cuaaaggaaaggauaaacu

SEQ ID NO: 2584385 - RNA, 19 nt, Homo sapiens
  misc_RNA (1)...(19): siRNA sense strand
gcugaaggggaaaaguaua

SEQ ID NO: 2584386 - RNA, 19 nt, Homo sapiens
  misc_RNA (1)...(19): siRNA sense strand
acgagaugcucaaggagga

SEQ ID NO: 2584387 - RNA, 19 nt, Homo sapiens
  misc_RNA (1)...(19): siRNA sense strand
ccaacuacgagaugcucaa

SEQ ID NO: 2584388 - RNA, 19 nt, Homo sapiens
  misc_RNA (1)...(19): siRNA sense strand
ccgccaagugccugaacau

SEQ ID NO: 2584389 - RNA, 19 nt, Homo sapiens
  misc_RNA (1)...(19): siRNA sense strand
aagucuagggacaggaaga

SEQ ID NO: 2584390 - RNA, 19 nt, Homo sapiens
  misc_RNA (1)...(19): siRNA sense strand
acaggaagaugguuggcga

SEQ ID NO: 2584391 - RNA, 19 nt, Homo sapiens
  misc_RNA (1)...(19): siRNA sense strand
ucguccaggcccagcgaua

SEQ ID NO: 2584392 - RNA, 19 nt, Homo sapiens
  misc_RNA (1)...(19): siRNA sense strand
aggagcaggaaguggcuau

SEQ ID NO: 2584393 - RNA, 19 nt, Homo sapiens
  misc_RNA (1)...(19): siRNA sense strand
uccgugaagucuagggaca

SEQ ID NO: 2584394 - RNA, 19 nt, Homo sapiens
  misc_RNA (1)...(19): siRNA sense strand
aggaagaagaagaagaaga

SEQ ID NO: 2584395 - RNA, 19 nt, Homo sapiens
  misc_RNA (1)...(19): siRNA sense strand
aggaagaagcuguuugaau

SEQ ID NO: 2584396 - RNA, 19 nt, Homo sapiens
  misc_RNA (1)...(19): siRNA sense strand
agcuagaggcacagacaua

SEQ ID NO: 2584397 - RNA, 19 nt, Homo sapiens
  misc_RNA (1)...(19): siRNA sense strand
ggacauggaucgacuggca

SEQ ID NO: 2584398 - RNA, 19 nt, Homo sapiens
  misc_RNA (1)...(19): siRNA sense strand
acagcaaugaagaggacua

SEQ ID NO: 2584399 - RNA, 19 nt, Homo sapiens
  misc_RNA (1)...(19): siRNA sense strand
gcuugcagcuagaggcaca

SEQ ID NO: 2584400 - RNA, 19 nt, Homo sapiens
  misc_RNA (1)...(19): siRNA sense strand
aagaagaagaagaagacga

SEQ ID NO: 2584401 - RNA, 19 nt, Homo sapiens
  misc_RNA (1)...(19): siRNA sense strand
uuggagaaccagaugcaua

SEQ ID NO: 2584402 - RNA, 19 nt, Homo sapiens
  misc_RNA (1)...(19): siRNA sense strand
cggaaauggcucacgaagu

SEQ ID NO: 2584403 - RNA, 19 nt, Homo sapiens
  misc_RNA (1)...(19): siRNA sense strand
caguuugugcgaaaggaaa

SEQ ID NO: 2584404 - RNA, 19 nt, Homo sapiens
  misc_RNA (1)...(19): siRNA sense strand
ggcaaguuucagagauauu

SEQ ID NO: 2584405 - RNA, 19 nt, Homo sapiens
  misc_RNA (1)...(19): siRNA sense strand
cuggaugugucuaggagau

SEQ ID NO: 2584406 - RNA, 19 nt, Homo sapiens
  misc_RNA (1)...(19): siRNA sense strand
ugggaaaaccacaauaaaa

SEQ ID NO: 2584407 - RNA, 19 nt, Homo sapiens
  misc_RNA (1)...(19): siRNA sense strand
gcaguuugugcgaaaggaa

SEQ ID NO: 2584408 - RNA, 19 nt, Homo sapiens
  misc_RNA (1)...(19): siRNA sense strand
cgaaaaccucucauggaaa

SEQ ID NO: 2584409 - RNA, 19 nt, Homo sapiens
  misc_RNA (1)...(19): siRNA sense strand
uacuuugagaggugggaaa

SEQ ID NO: 2584410 - RNA, 19 nt, Homo sapiens
  misc_RNA (1)...(19): siRNA sense strand
gagagaaauacaggcgcua

SEQ ID NO: 2584411 - RNA, 19 nt, Homo sapiens
  misc_RNA (1)...(19): siRNA sense strand
uugaauaccagcaggcuca

SEQ ID NO: 2584412 - RNA, 19 nt, Homo sapiens
  misc_RNA (1)...(19): siRNA sense strand
cauuagaagaagaggaaga

SEQ ID NO: 2584413 - RNA, 19 nt, Homo sapiens
  misc_RNA (1)...(19): siRNA sense strand
acagaaaacccaagggaaa

SEQ ID NO: 2584414 - RNA, 19 nt, Homo sapiens
  misc_RNA (1)...(19): siRNA sense strand
agcagaagagcuagagaaa

SEQ ID NO: 2584415 - RNA, 19 nt, Homo sapiens
  misc_RNA (1)...(19): siRNA sense strand
aagaagaggaagaggagga

SEQ ID NO: 2584416 - RNA, 19 nt, Homo sapiens
  misc_RNA (1)...(19): siRNA sense strand
aguuugaaauugagcgaga

SEQ ID NO: 2584417 - RNA, 19 nt, Homo sapiens
  misc_RNA (1)...(19): siRNA sense strand
aggaagaggaggaugccaa

SEQ ID NO: 2584418 - RNA, 19 nt, Homo sapiens
  misc_RNA (1)...(19): siRNA sense strand
cuucaagcagaaugagaaa

SEQ ID NO: 2584419 - RNA, 19 nt, Homo sapiens
  misc_RNA (1)...(19): siRNA sense strand
aagaugaaguggaugguga

SEQ ID NO: 2584420 - RNA, 19 nt, Homo sapiens
  misc_RNA (1)...(19): siRNA sense strand
aggcauuggaucagaggau

SEQ ID NO: 2584421 - RNA, 19 nt, Homo sapiens
  misc_RNA (1)...(19): siRNA sense strand
cagaaaacccaagggaaaa

SEQ ID NO: 2584422 - RNA, 19 nt, Homo sapiens
  misc_RNA (1)...(19): siRNA sense strand
gggagagcuucaaggagga

SEQ ID NO: 2584423 - RNA, 19 nt, Homo sapiens
  misc_RNA (1)...(19): siRNA sense strand
uggugaagaaguaagggua

SEQ ID NO: 2584424 - RNA, 19 nt, Homo sapiens
  misc_RNA (1)...(19): siRNA sense strand
uagaagaagaggaagagga

SEQ ID NO: 2584425 - RNA, 19 nt, Homo sapiens
  misc_RNA (1)...(19): siRNA sense strand
agaugaaguggauggugaa

SEQ ID NO: 2584426 - RNA, 19 nt, Homo sapiens
  misc_RNA (1)...(19): siRNA sense strand
cucauuagaagaagaggaa

SEQ ID NO: 2584427 - RNA, 19 nt, Homo sapiens
  misc_RNA (1)...(19): siRNA sense strand
aagcaguagugaggaggaa

SEQ ID NO: 2584428 - RNA, 19 nt, Homo sapiens
  misc_RNA (1)...(19): siRNA sense strand
gugccaagaagcagaaaau

SEQ ID NO: 2584429 - RNA, 19 nt, Homo sapiens
  misc_RNA (1)...(19): siRNA sense strand
gggaagcaguagugaggag

SEQ ID NO: 2584430 - RNA, 19 nt, Homo sapiens
  misc_RNA (1)...(19): siRNA sense strand
aguaaggguaacuaaggaa

SEQ ID NO: 2584431 - RNA, 19 nt, Homo sapiens
  misc_RNA (1)...(19): siRNA sense strand
gccaagaagcagaaaauga

SEQ ID NO: 2584432 - RNA, 19 nt, Homo sapiens
  misc_RNA (1)...(19): siRNA sense strand
cuacaucuaaagaggccaa

SEQ ID NO: 2584433 - RNA, 19 nt, Homo sapiens
  misc_RNA (1)...(19): siRNA sense strand
ggaagaggggauuggugaa

SEQ ID NO: 2584434 - RNA, 19 nt, Homo sapiens
  misc_RNA (1)...(19): siRNA sense strand
ccucaaugaugugggacca

SEQ ID NO: 2584435 - RNA, 19 nt, Homo sapiens
  misc_RNA (1)...(19): siRNA sense strand
aauuagugaaggaagauga

SEQ ID NO: 2584436 - RNA, 19 nt, Homo sapiens
  misc_RNA (1)...(19): siRNA sense strand
ucuucaagcagaaugagaa

SEQ ID NO: 2584437 - RNA, 19 nt, Homo sapiens
  misc_RNA (1)...(19): siRNA sense strand
uggaagaagaacaagucaa

SEQ ID NO: 2584438 - RNA, 19 nt, Homo sapiens
  misc_RNA (1)...(19): siRNA sense strand
auacaaagaaugauggaag

SEQ ID NO: 2584439 - RNA, 19 nt, Homo sapiens
  misc_RNA (1)...(19): siRNA sense strand
ucauagucuggaagaagaa

SEQ ID NO: 2584440 - RNA, 19 nt, Homo sapiens
  misc_RNA (1)...(19): siRNA sense strand
aaaucauagucuggaagaa

SEQ ID NO: 2584441 - RNA, 19 nt, Homo sapiens
  misc_RNA (1)...(19): siRNA sense strand
aggaagaacaggugcucga

SEQ ID NO: 2584442 - RNA, 19 nt, Homo sapiens
  misc_RNA (1)...(19): siRNA sense strand
gacuggagugagagaagaa

SEQ ID NO: 2584443 - RNA, 19 nt, Homo sapiens
  misc_RNA (1)...(19): siRNA sense strand
aggugagaggugauagcua

SEQ ID NO: 2584444 - RNA, 19 nt, Homo sapiens
  misc_RNA (1)...(19): siRNA sense strand
caaauuuggaagaaccgaa

SEQ ID NO: 2584445 - RNA, 19 nt, Homo sapiens
  misc_RNA (1)...(19): siRNA sense strand
agccagaacaguugaacca

SEQ ID NO: 2584446 - RNA, 19 nt, Homo sapiens
  misc_RNA (1)...(19): siRNA sense strand
cuacaaauuuggaagaacc

SEQ ID NO: 2584447 - RNA, 19 nt, Homo sapiens
  misc_RNA (1)...(19): siRNA sense strand
cuggagugagagaagaaau

SEQ ID NO: 2584448 - RNA, 19 nt, Homo sapiens
  misc_RNA (1)...(19): siRNA sense strand
agaacaggugcucgaguuu

SEQ ID NO: 2584449 - RNA, 19 nt, Homo sapiens
  misc_RNA (1)...(19): siRNA sense strand
cuuaaaugguagugggaaa

SEQ ID NO: 2584450 - RNA, 19 nt, Homo sapiens
  misc_RNA (1)...(19): siRNA sense strand
gguuauuggugguagaaau

SEQ ID NO: 2584451 - RNA, 19 nt, Homo sapiens
  misc_RNA (1)...(19): siRNA sense strand
ggauuaaugcagagagaca

SEQ ID NO: 2584452 - RNA, 19 nt, Homo sapiens
  misc_RNA (1)...(19): siRNA sense strand
ggagaaacuaggaagaaau

SEQ ID NO: 2584453 - RNA, 19 nt, Homo sapiens
  misc_RNA (1)...(19): siRNA sense strand
gaggcuaagcugaaagaaa

SEQ ID NO: 2584454 - RNA, 19 nt, Homo sapiens
  misc_RNA (1)...(19): siRNA sense strand
agcaagaagaugaaagaaa

SEQ ID NO: 2584455 - RNA, 19 nt, Homo sapiens
  misc_RNA (1)...(19): siRNA sense strand
caauuauucuagagggauu

SEQ ID NO: 2584456 - RNA, 19 nt, Homo sapiens
  misc_RNA (1)...(19): siRNA sense strand
gcacagaaaacuauagaaa

SEQ ID NO: 2584457 - RNA, 19 nt, Homo sapiens
  misc_RNA (1)...(19): siRNA sense strand
aggagaaacuaggaagaaa

SEQ ID NO: 2584458 - RNA, 19 nt, Homo sapiens
  misc_RNA (1)...(19): siRNA sense strand
ggaagaauugucugagaau

SEQ ID NO: 2584459 - RNA, 19 nt, Homo sapiens
  misc_RNA (1)...(19): siRNA sense strand
ugcaagaaaugaaggagaa

SEQ ID NO: 2584460 - RNA, 19 nt, Homo sapiens
  misc_RNA (1)...(19): siRNA sense strand
agacgauacuugaagaaga

SEQ ID NO: 2584461 - RNA, 19 nt, Homo sapiens
  misc_RNA (1)...(19): siRNA sense strand
aagaauugucugagaauga

SEQ ID NO: 2584462 - RNA, 19 nt, Homo sapiens
  misc_RNA (1)...(19): siRNA sense strand
acaaggauccagagaagaa

SEQ ID NO: 2584463 - RNA, 19 nt, Homo sapiens
  misc_RNA (1)...(19): siRNA sense strand
ccaaagaaaagcagaagaa

SEQ ID NO: 2584464 - RNA, 19 nt, Homo sapiens
  misc_RNA (1)...(19): siRNA sense strand
gcaagaaaugaaggagaaa

SEQ ID NO: 2584465 - RNA, 19 nt, Homo sapiens
  misc_RNA (1)...(19): siRNA sense strand
gcucauaucacaagcaaca

SEQ ID NO: 2584466 - RNA, 19 nt, Homo sapiens
  misc_RNA (1)...(19): siRNA sense strand
aagcaaaauccaaggcaaa

SEQ ID NO: 2584467 - RNA, 19 nt, Homo sapiens
  misc_RNA (1)...(19): siRNA sense strand
acugagaaucaaagagaau

SEQ ID NO: 2584468 - RNA, 19 nt, Homo sapiens
  misc_RNA (1)...(19): siRNA sense strand
augcagaagcugaaagaga

SEQ ID NO: 2584469 - RNA, 19 nt, Homo sapiens
  misc_RNA (1)...(19): siRNA sense strand
gcagaggcucagcgaguua

SEQ ID NO: 2584470 - RNA, 19 nt, Homo sapiens
  misc_RNA (1)...(19): siRNA sense strand
acucaaagauguucaggau

SEQ ID NO: 2584471 - RNA, 19 nt, Homo sapiens
  misc_RNA (1)...(19): siRNA sense strand
cuggauuaaugcagagaga

SEQ ID NO: 2584472 - RNA, 19 nt, Homo sapiens
  misc_RNA (1)...(19): siRNA sense strand
gacagaagcugaagagcga

SEQ ID NO: 2584473 - RNA, 19 nt, Homo sapiens
  misc_RNA (1)...(19): siRNA sense strand
gaacaaggacuuugggucu

SEQ ID NO: 2584474 - RNA, 19 nt, Homo sapiens
  misc_RNA (1)...(19): siRNA sense strand
aggaagaauugucugagaa

SEQ ID NO: 2584475 - RNA, 19 nt, Homo sapiens
  misc_RNA (1)...(19): siRNA sense strand
agaagaacuggaauagaaa

SEQ ID NO: 2584476 - RNA, 19 nt, Homo sapiens
  misc_RNA (1)...(19): siRNA sense strand
uggaauagaaauuguguga

SEQ ID NO: 2584477 - RNA, 19 nt, Homo sapiens
  misc_RNA (1)...(19): siRNA sense strand
uaugaaaccaccagagauu

SEQ ID NO: 2584478 - RNA, 19 nt, Homo sapiens
  misc_RNA (1)...(19): siRNA sense strand
caggaugaacugagaauca

SEQ ID NO: 2584479 - RNA, 19 nt, Homo sapiens
  misc_RNA (1)...(19): siRNA sense strand
ccacaucagcaaacauaaa

SEQ ID NO: 2584480 - RNA, 19 nt, Homo sapiens
  misc_RNA (1)...(19): siRNA sense strand
aagcugaaguuaagaagau

SEQ ID NO: 2584481 - RNA, 19 nt, Homo sapiens
  misc_RNA (1)...(19): siRNA sense strand
ucacaagcaacaagaagaa

SEQ ID NO: 2584482 - RNA, 19 nt, Homo sapiens
  misc_RNA (1)...(19): siRNA sense strand
cuaugaauguauugacaga

SEQ ID NO: 2584483 - RNA, 19 nt, Homo sapiens
  misc_RNA (1)...(19): siRNA sense strand
gcugaggaauuaaaagaaa

SEQ ID NO: 2584484 - RNA, 19 nt, Homo sapiens
  misc_RNA (1)...(19): siRNA sense strand
gaugaaaacugaagaggca

SEQ ID NO: 2584485 - RNA, 19 nt, Homo sapiens
  misc_RNA (1)...(19): siRNA sense strand
cuuuaggauuugagguuca

SEQ ID NO: 2584486 - RNA, 19 nt, Homo sapiens
  misc_RNA (1)...(19): siRNA sense strand
gauacuugaagaagagauu

SEQ ID NO: 2584487 - RNA, 19 nt, Homo sapiens
  misc_RNA (1)...(19): siRNA sense strand
agaauuaguggcuggagaa

SEQ ID NO: 2584488 - RNA, 19 nt, Homo sapiens
  misc_RNA (1)...(19): siRNA sense strand
caauaaaauuucagccaga

SEQ ID NO: 2584489 - RNA, 19 nt, Homo sapiens
  misc_RNA (1)...(19): siRNA sense strand
caaaacacaaggagcaaaa

SEQ ID NO: 2584490 - RNA, 19 nt, Homo sapiens
  misc_RNA (1)...(19): siRNA sense strand
aagaaaugaaggagaaacu

SEQ ID NO: 2584491 - RNA, 19 nt, Homo sapiens
  misc_RNA (1)...(19): siRNA sense strand
cucaagaagaggugaccaa

SEQ ID NO: 2584492 - RNA, 19 nt, Homo sapiens
  misc_RNA (1)...(19): siRNA sense strand
gaaggagaaacuaggaaga

SEQ ID NO: 2584493 - RNA, 19 nt, Homo sapiens
  misc_RNA (1)...(19): siRNA sense strand
gugaaagacacuucugcaa

SEQ ID NO: 2584494 - RNA, 19 nt, Homo sapiens
  misc_RNA (1)...(19): siRNA sense strand
gccuuugauaagaggauaa

SEQ ID NO: 2584495 - RNA, 19 nt, Homo sapiens
  misc_RNA (1)...(19): siRNA sense strand
ggaugaacugagaaucaaa

SEQ ID NO: 2584496 - RNA, 19 nt, Homo sapiens
  misc_RNA (1)...(19): siRNA sense strand
cugaagaggcagauuuauu

SEQ ID NO: 2584497 - RNA, 19 nt, Homo sapiens
  misc_RNA (1)...(19): siRNA sense strand
uggcaugugaggaaagcaa

SEQ ID NO: 2584498 - RNA, 19 nt, Homo sapiens
  misc_RNA (1)...(19): siRNA sense strand
aguuauaaagcuucaggaa

SEQ ID NO: 2584499 - RNA, 19 nt, Homo sapiens
  misc_RNA (1)...(19): siRNA sense strand
auacaaggauccagagaag

SEQ ID NO: 2584500 - RNA, 19 nt, Homo sapiens
  misc_RNA (1)...(19): siRNA sense strand
ugaggaaagcaaacgcaaa

SEQ ID NO: 2584501 - RNA, 19 nt, Homo sapiens
  misc_RNA (1)...(19): siRNA sense strand
ugagaaucaaagagaauga

SEQ ID NO: 2584502 - RNA, 19 nt, Homo sapiens
  misc_RNA (1)...(19): siRNA sense strand
cccaagacacuguaauuaa

SEQ ID NO: 2584503 - RNA, 19 nt, Homo sapiens
  misc_RNA (1)...(19): siRNA sense strand
cugcaaagguauccaaaau

SEQ ID NO: 2584504 - RNA, 19 nt, Homo sapiens
  misc_RNA (1)...(19): siRNA sense strand
ggugguuauuggugguaga

SEQ ID NO: 2584505 - RNA, 19 nt, Homo sapiens
  misc_RNA (1)...(19): siRNA sense strand
aaaucuggcaugugaggaa

SEQ ID NO: 2584506 - RNA, 19 nt, Homo sapiens
  misc_RNA (1)...(19): siRNA sense strand
cagauuuacucaaugucaa

SEQ ID NO: 2584507 - RNA, 19 nt, Homo sapiens
  misc_RNA (1)...(19): siRNA sense strand
ggaguuugucuuuggaaca

SEQ ID NO: 2584508 - RNA, 19 nt, Homo sapiens
  misc_RNA (1)...(19): siRNA sense strand
caggaagaauugucugaga

SEQ ID NO: 2584509 - RNA, 19 nt, Homo sapiens
  misc_RNA (1)...(19): siRNA sense strand
uagaauuaguggcuggaga

SEQ ID NO: 2584510 - RNA, 19 nt, Homo sapiens
  misc_RNA (1)...(19): siRNA sense strand
gucaauuauucuagaggga

SEQ ID NO: 2584511 - RNA, 19 nt, Homo sapiens
  misc_RNA (1)...(19): siRNA sense strand
cugauuagugugaaagaca

SEQ ID NO: 2584512 - RNA, 19 nt, Homo sapiens
  misc_RNA (1)...(19): siRNA sense strand
guuugauccucaugggaca

SEQ ID NO: 2584513 - RNA, 19 nt, Homo sapiens
  misc_RNA (1)...(19): siRNA sense strand
agaaauagaacaugcggaa

SEQ ID NO: 2584514 - RNA, 19 nt, Homo sapiens
  misc_RNA (1)...(19): siRNA sense strand
caugauuggagaagacaaa

SEQ ID NO: 2584515 - RNA, 19 nt, Homo sapiens
  misc_RNA (1)...(19): siRNA sense strand
aaauagaacaugcggaaaa

SEQ ID NO: 2584516 - RNA, 19 nt, Homo sapiens
  misc_RNA (1)...(19): siRNA sense strand
ccauuggagacuugguaaa

SEQ ID NO: 2584517 - RNA, 19 nt, Homo sapiens
  misc_RNA (1)...(19): siRNA sense strand
caucauagcggguuggaga

SEQ ID NO: 2584518 - RNA, 19 nt, Homo sapiens
  misc_RNA (1)...(19): siRNA sense strand
ccacgaaggcugcaagaga

SEQ ID NO: 2584519 - RNA, 19 nt, Homo sapiens
  misc_RNA (1)...(19): siRNA sense strand
cguuuuagcagcagaauua

SEQ ID NO: 2584520 - RNA, 19 nt, Homo sapiens
  misc_RNA (1)...(19): siRNA sense strand
cagcagaauuauuaaggga

SEQ ID NO: 2584521 - RNA, 19 nt, Homo sapiens
  misc_RNA (1)...(19): siRNA sense strand
cuggcaaccuggaggcaau

SEQ ID NO: 2584522 - RNA, 19 nt, Homo sapiens
  misc_RNA (1)...(19): siRNA sense strand
ugaagagagagcagagaca

SEQ ID NO: 2584523 - RNA, 19 nt, Homo sapiens
  misc_RNA (1)...(19): siRNA sense strand
gcagaauuauuaagggaag

SEQ ID NO: 2584524 - RNA, 19 nt, Homo sapiens
  misc_RNA (1)...(19): siRNA sense strand
gcacugagaauguugccaa

SEQ ID NO: 2584525 - RNA, 19 nt, Homo sapiens
  misc_RNA (1)...(19): siRNA sense strand
gaacaugcggaaaaggaaa

SEQ ID NO: 2584526 - RNA, 19 nt, Homo sapiens
  misc_RNA (1)...(19): siRNA sense strand
auauuugguucccggguaa

SEQ ID NO: 2584527 - RNA, 19 nt, Homo sapiens
  misc_RNA (1)...(19): siRNA sense strand
gacccaaaggcauggacaa

SEQ ID NO: 2584528 - RNA, 19 nt, Homo sapiens
  misc_RNA (1)...(19): siRNA sense strand
caagaagcuaggaggaagu

SEQ ID NO: 2584529 - RNA, 19 nt, Homo sapiens
  misc_RNA (1)...(19): siRNA sense strand
ggaagucaugauuggagaa

SEQ ID NO: 2584530 - RNA, 19 nt, Homo sapiens
  misc_RNA (1)...(19): siRNA sense strand
acccaaaggcauggacaaa

SEQ ID NO: 2584531 - RNA, 19 nt, Homo sapiens
  misc_RNA (1)...(19): siRNA sense strand
uggaguaaaucaaccaaaa

SEQ ID NO: 2584532 - RNA, 19 nt, Homo sapiens
  misc_RNA (1)...(19): siRNA sense strand
gcgcaaacuguaaaggacu

SEQ ID NO: 2584533 - RNA, 19 nt, Homo sapiens
  misc_RNA (1)...(19): siRNA sense strand
gggaaggcaccauuggaga

SEQ ID NO: 2584534 - RNA, 19 nt, Homo sapiens
  misc_RNA (1)...(19): siRNA sense strand
agucaugauuggagaagac

SEQ ID NO: 2584535 - RNA, 19 nt, Homo sapiens
  misc_RNA (1)...(19): siRNA sense strand
uguaaaggacucuagaaca

SEQ ID NO: 2584536 - RNA, 19 nt, Homo sapiens
  misc_RNA (1)...(19): siRNA sense strand
gguugcagaaauagaacau

SEQ ID NO: 2584537 - RNA, 19 nt, Homo sapiens
  misc_RNA (1)...(19): siRNA sense strand
aggaagucaugauuggaga

SEQ ID NO: 2584538 - RNA, 19 nt, Homo sapiens
  misc_RNA (1)...(19): siRNA sense strand
uagaacaguuuauggagga

SEQ ID NO: 2584539 - RNA, 19 nt, Homo sapiens
  misc_RNA (1)...(19): siRNA sense strand
auuauuaagggaagcagaa

SEQ ID NO: 2584540 - RNA, 19 nt, Homo sapiens
  misc_RNA (1)...(19): siRNA sense strand
aguuaaauuccgucaagau

SEQ ID NO: 2584541 - RNA, 19 nt, Homo sapiens
  misc_RNA (1)...(19): siRNA sense strand
ccuauuuagaugaaggcuu

SEQ ID NO: 2584542 - RNA, 19 nt, Homo sapiens
  misc_RNA (1)...(19): siRNA sense strand
gauauuugguucccgggua

SEQ ID NO: 2584543 - RNA, 19 nt, Homo sapiens
  misc_RNA (1)...(19): siRNA sense strand
gaagcuuggaaguugcaaa

SEQ ID NO: 2584544 - RNA, 19 nt, Homo sapiens
  misc_RNA (1)...(19): siRNA sense strand
gcagaaagaucauugcaug

SEQ ID NO: 2584545 - RNA, 19 nt, Homo sapiens
  misc_RNA (1)...(19): siRNA sense strand
ggauuggauaugagggaag

SEQ ID NO: 2584546 - RNA, 19 nt, Homo sapiens
  misc_RNA (1)...(19): siRNA sense strand
ccaauagaacaccaggcaa

SEQ ID NO: 2584547 - RNA, 19 nt, Homo sapiens
  misc_RNA (1)...(19): siRNA sense strand
ucuuuguguucuugcgcaa

SEQ ID NO: 2584548 - RNA, 19 nt, Homo sapiens
  misc_RNA (1)...(19): siRNA sense strand
gagacuugguaaagagcac

SEQ ID NO: 2584549 - RNA, 19 nt, Homo sapiens
  misc_RNA (1)...(19): siRNA sense strand
acuucuuacucaucacaaa

SEQ ID NO: 2584550 - RNA, 19 nt, Homo sapiens
  misc_RNA (1)...(19): siRNA sense strand
caaccaucauagcugacaa

SEQ ID NO: 2584551 - RNA, 19 nt, Homo sapiens
  misc_RNA (1)...(19): siRNA sense strand
cugaagcagcagaggugau

SEQ ID NO: 2584552 - RNA, 19 nt, Homo sapiens
  misc_RNA (1)...(19): siRNA sense strand
ucuucuaagcaguggacga

SEQ ID NO: 2584553 - RNA, 19 nt, Homo sapiens
  misc_RNA (1)...(19): siRNA sense strand
ccacacaaguuucugccaa

SEQ ID NO: 2584554 - RNA, 19 nt, Homo sapiens
  misc_RNA (1)...(19): siRNA sense strand
gggucaacgucucagccaa

SEQ ID NO: 2584555 - RNA, 19 nt, Homo sapiens
  misc_RNA (1)...(19): siRNA sense strand
acgugugcaugaagaagaa

SEQ ID NO: 2584556 - RNA, 19 nt, Homo sapiens
  misc_RNA (1)...(19): siRNA sense strand
gcuucggcuucaaggucaa

SEQ ID NO: 2584557 - RNA, 19 nt, Homo sapiens
  misc_RNA (1)...(19): siRNA sense strand
gcuacgugugcaugaagaa

SEQ ID NO: 2584558 - RNA, 19 nt, Homo sapiens
  misc_RNA (1)...(19): siRNA sense strand
gcaugaagaagaaugggca

SEQ ID NO: 2584559 - RNA, 19 nt, Homo sapiens
  misc_RNA (1)...(19): siRNA sense strand
gagacaaagaagugcaccu

SEQ ID NO: 2584560 - RNA, 19 nt, Homo sapiens
  misc_RNA (1)...(19): siRNA sense strand
accaagaucuauauggcua

SEQ ID NO: 2584561 - RNA, 19 nt, Homo sapiens
  misc_RNA (1)...(19): siRNA sense strand
ggcuauagcaccagcucuu

SEQ ID NO: 2584562 - RNA, 19 nt, Homo sapiens
  misc_RNA (1)...(19): siRNA sense strand
ccaagaucuauauggcuau

SEQ ID NO: 2584563 - RNA, 19 nt, Homo sapiens
  misc_RNA (1)...(19): siRNA sense strand
cugccuuaguuguggaaaa

SEQ ID NO: 2584564 - RNA, 19 nt, Homo sapiens
  misc_RNA (1)...(19): siRNA sense strand
cggugaguguccuggagaa

SEQ ID NO: 2584565 - RNA, 19 nt, Homo sapiens
  misc_RNA (1)...(19): siRNA sense strand
caucagugaaagaagagaa

SEQ ID NO: 2584566 - RNA, 19 nt, Homo sapiens
  misc_RNA (1)...(19): siRNA sense strand
acaaagaguuggcagcaga

SEQ ID NO: 2584567 - RNA, 19 nt, Homo sapiens
  misc_RNA (1)...(19): siRNA sense strand
uagaaugacucgaaagcca

SEQ ID NO: 2584568 - RNA, 19 nt, Homo sapiens
  misc_RNA (1)...(19): siRNA sense strand
gggacaaugaaaagaaaau

SEQ ID NO: 2584569 - RNA, 19 nt, Homo sapiens
  misc_RNA (1)...(19): siRNA sense strand
ugagggagcuggaacggaa

SEQ ID NO: 2584570 - RNA, 19 nt, Homo sapiens
  misc_RNA (1)...(19): siRNA sense strand
cggaaguuugugaaagauu

SEQ ID NO: 2584571 - RNA, 19 nt, Homo sapiens
  misc_RNA (1)...(19): siRNA sense strand
ugagaaagcugguccacga

SEQ ID NO: 2584572 - RNA, 19 nt, Homo sapiens
  misc_RNA (1)...(19): siRNA sense strand
acuacaaggagcugagcau

SEQ ID NO: 2584573 - RNA, 19 nt, Homo sapiens
  misc_RNA (1)...(19): siRNA sense strand
aaggaagaggccuagaaua

SEQ ID NO: 2584574 - RNA, 19 nt, Homo sapiens
  misc_RNA (1)...(19): siRNA sense strand
aaauaaugcagcaagugaa

SEQ ID NO: 2584575 - RNA, 19 nt, Homo sapiens
  misc_RNA (1)...(19): siRNA sense strand
cagcagaagaugagcaggu

SEQ ID NO: 2584576 - RNA, 19 nt, Homo sapiens
  misc_RNA (1)...(19): siRNA sense strand
acgugagcacauugauaaa

SEQ ID NO: 2584577 - RNA, 19 nt, Homo sapiens
  misc_RNA (1)...(19): siRNA sense strand
gugaggaggaggaaggcca

SEQ ID NO: 2584578 - RNA, 19 nt, Homo sapiens
  misc_RNA (1)...(19): siRNA sense strand
agccaagaagucaggacaa

SEQ ID NO: 2584579 - RNA, 19 nt, Homo sapiens
  misc_RNA (1)...(19): siRNA sense strand
ccucaggcuccgaugaaga

SEQ ID NO: 2584580 - RNA, 19 nt, Homo sapiens
  misc_RNA (1)...(19): siRNA sense strand
ugauggaaucucugcagaa

SEQ ID NO: 2584581 - RNA, 19 nt, Homo sapiens
  misc_RNA (1)...(19): siRNA sense strand
ccuaaugaagcaacaguca

SEQ ID NO: 2584582 - RNA, 19 nt, Homo sapiens
  misc_RNA (1)...(19): siRNA sense strand
auuacagggaugagcauuu

SEQ ID NO: 2584583 - RNA, 19 nt, Homo sapiens
  misc_RNA (1)...(19): siRNA sense strand
gucaaauguucaggaagaa

SEQ ID NO: 2584584 - RNA, 19 nt, Homo sapiens
  misc_RNA (1)...(19): siRNA sense strand
ugaugaggaccgagaugau

SEQ ID NO: 2584585 - RNA, 19 nt, Homo sapiens
  misc_RNA (1)...(19): siRNA sense strand
aucagugaaagaagagaaa

SEQ ID NO: 2584586 - RNA, 19 nt, Homo sapiens
  misc_RNA (1)...(19): siRNA sense strand
gagcacgauuacagggaug

SEQ ID NO: 2584587 - RNA, 19 nt, Homo sapiens
  misc_RNA (1)...(19): siRNA sense strand
gggucauacuggagagaga

SEQ ID NO: 2584588 - RNA, 19 nt, Homo sapiens
  misc_RNA (1)...(19): siRNA sense strand
aguccacacuagagagaaa

SEQ ID NO: 2584589 - RNA, 19 nt, Homo sapiens
  misc_RNA (1)...(19): siRNA sense strand
guuacacacaggagagaaa

SEQ ID NO: 2584590 - RNA, 19 nt, Homo sapiens
  misc_RNA (1)...(19): siRNA sense strand
guaaagaccaacaaggaga

SEQ ID NO: 2584591 - RNA, 19 nt, Homo sapiens
  misc_RNA (1)...(19): siRNA sense strand
acgugaugcuugagaacuu

SEQ ID NO: 2584592 - RNA, 19 nt, Homo sapiens
  misc_RNA (1)...(19): siRNA sense strand
caacccaaagagaaggaaa

SEQ ID NO: 2584593 - RNA, 19 nt, Homo sapiens
  misc_RNA (1)...(19): siRNA sense strand
aauucauacaggacagaaa

SEQ ID NO: 2584594 - RNA, 19 nt, Homo sapiens
  misc_RNA (1)...(19): siRNA sense strand
ggucaagucuuaauaggca

SEQ ID NO: 2584595 - RNA, 19 nt, Homo sapiens
  misc_RNA (1)...(19): siRNA sense strand
augcaaugaguguggaaaa

SEQ ID NO: 2584596 - RNA, 19 nt, Homo sapiens
  misc_RNA (1)...(19): siRNA sense strand
gcuucagaaacaucagaua

SEQ ID NO: 2584597 - RNA, 19 nt, Homo sapiens
  misc_RNA (1)...(19): siRNA sense strand
augugagcaaugugggaaa

SEQ ID NO: 2584598 - RNA, 19 nt, Homo sapiens
  misc_RNA (1)...(19): siRNA sense strand
gagaaaugugggagggccu

SEQ ID NO: 2584599 - RNA, 19 nt, Homo sapiens
  misc_RNA (1)...(19): siRNA sense strand
agagaguucacuugagaga

SEQ ID NO: 2584600 - RNA, 19 nt, Homo sapiens
  misc_RNA (1)...(19): siRNA sense strand
ugcauaagcaucagauaau

SEQ ID NO: 2584601 - RNA, 19 nt, Homo sapiens
  misc_RNA (1)...(19): siRNA sense strand
uuguaaagaaugugggaag

SEQ ID NO: 2584602 - RNA, 19 nt, Homo sapiens
  misc_RNA (1)...(19): siRNA sense strand
cuguaaagaccaacaagga

SEQ ID NO: 2584603 - RNA, 19 nt, Homo sapiens
  misc_RNA (1)...(19): siRNA sense strand
aacccaaagagaaggaaau

SEQ ID NO: 2584604 - RNA, 19 nt, Homo sapiens
  misc_RNA (1)...(19): siRNA sense strand
cagaaugggaaguguaaac

SEQ ID NO: 2584605 - RNA, 19 nt, Homo sapiens
  misc_RNA (1)...(19): siRNA sense strand
aggaaugugggaagagcuu

SEQ ID NO: 2584606 - RNA, 19 nt, Homo sapiens
  misc_RNA (1)...(19): siRNA sense strand
ccacauucaaggaggcagu

SEQ ID NO: 2584607 - RNA, 19 nt, Homo sapiens
  misc_RNA (1)...(19): siRNA sense strand
uggaugauggagacagcaa

SEQ ID NO: 2584608 - RNA, 19 nt, Homo sapiens
  misc_RNA (1)...(19): siRNA sense strand
uguaaggaaugugggaaga

SEQ ID NO: 2584609 - RNA, 19 nt, Homo sapiens
  misc_RNA (1)...(19): siRNA sense strand
ugaaauaugugguaagagc

SEQ ID NO: 2584610 - RNA, 19 nt, Homo sapiens
  misc_RNA (1)...(19): siRNA sense strand
aauucacacaggacagaaa

SEQ ID NO: 2584611 - RNA, 19 nt, Homo sapiens
  misc_RNA (1)...(19): siRNA sense strand
ccucauaucuuuugaucca

SEQ ID NO: 2584612 - RNA, 19 nt, Homo sapiens
  misc_RNA (1)...(19): siRNA sense strand
ggaacaaacugcaagugac

SEQ ID NO: 2584613 - RNA, 19 nt, Homo sapiens
  misc_RNA (1)...(19): siRNA sense strand
ccaacaaggagaccacaau

SEQ ID NO: 2584614 - RNA, 19 nt, Homo sapiens
  misc_RNA (1)...(19): siRNA sense strand
aagcaggaccacaugaaga

SEQ ID NO: 2584615 - RNA, 19 nt, Homo sapiens
  misc_RNA (1)...(19): siRNA sense strand
ccagguugaggcaggacua

SEQ ID NO: 2584616 - RNA, 19 nt, Homo sapiens
  misc_RNA (1)...(19): siRNA sense strand
aguucacuugagagagaaa

SEQ ID NO: 2584617 - RNA, 19 nt, Homo sapiens
  misc_RNA (1)...(19): siRNA sense strand
gugguaaggaauucaguca

SEQ ID NO: 2584618 - RNA, 19 nt, Homo sapiens
  misc_RNA (1)...(19): siRNA sense strand
gcaaguuacacacaggaga

SEQ ID NO: 2584619 - RNA, 19 nt, Homo sapiens
  misc_RNA (1)...(19): siRNA sense strand
aaauaugugguaagagcuu

SEQ ID NO: 2584620 - RNA, 19 nt, Homo sapiens
  misc_RNA (1)...(19): siRNA sense strand
aagaaugugggaagagcuu

SEQ ID NO: 2584621 - RNA, 19 nt, Homo sapiens
  misc_RNA (1)...(19): siRNA sense strand
aggagugugggaagggcua

SEQ ID NO: 2584622 - RNA, 19 nt, Homo sapiens
  misc_RNA (1)...(19): siRNA sense strand
acagagaagccaaggaaaa

SEQ ID NO: 2584623 - RNA, 19 nt, Homo sapiens
  misc_RNA (1)...(19): siRNA sense strand
cggagagggaugaaagaga

SEQ ID NO: 2584624 - RNA, 19 nt, Homo sapiens
  misc_RNA (1)...(19): siRNA sense strand
cgaacggugaggaggacaa

SEQ ID NO: 2584625 - RNA, 19 nt, Homo sapiens
  misc_RNA (1)...(19): siRNA sense strand
acagaauggauaacagcaa

SEQ ID NO: 2584626 - RNA, 19 nt, Homo sapiens
  misc_RNA (1)...(19): siRNA sense strand
agccaauaccugauggaau

SEQ ID NO: 2584627 - RNA, 19 nt, Homo sapiens
  misc_RNA (1)...(19): siRNA sense strand
gagcacaguuggaugagca

SEQ ID NO: 2584628 - RNA, 19 nt, Homo sapiens
  misc_RNA (1)...(19): siRNA sense strand
ccucugagcuucaaggugu

SEQ ID NO: 2584629 - RNA, 19 nt, Homo sapiens
  misc_RNA (1)...(19): siRNA sense strand
cggacaaaagugaaaacua

SEQ ID NO: 2584630 - RNA, 19 nt, Homo sapiens
  misc_RNA (1)...(19): siRNA sense strand
ggaagguggacgcugggua

SEQ ID NO: 2584631 - RNA, 19 nt, Homo sapiens
  misc_RNA (1)...(19): siRNA sense strand
uggaauuaagugaggagca

SEQ ID NO: 2584632 - RNA, 19 nt, Homo sapiens
  misc_RNA (1)...(19): siRNA sense strand
gccuauacuaucacaacaa

SEQ ID NO: 2584633 - RNA, 19 nt, Homo sapiens
  misc_RNA (1)...(19): siRNA sense strand
uuaccaaagacucgaucua

SEQ ID NO: 2584634 - RNA, 19 nt, Homo sapiens
  misc_RNA (1)...(19): siRNA sense strand
acagauggccgaacgguga

SEQ ID NO: 2584635 - RNA, 19 nt, Homo sapiens
  misc_RNA (1)...(19): siRNA sense strand
ggaauuaagugaggagcac

SEQ ID NO: 2584636 - RNA, 19 nt, Homo sapiens
  misc_RNA (1)...(19): siRNA sense strand
cuggauggccuuugaggaa

SEQ ID NO: 2584637 - RNA, 19 nt, Homo sapiens
  misc_RNA (1)...(19): siRNA sense strand
cagaagaagcugaacgagu

SEQ ID NO: 2584638 - RNA, 19 nt, Homo sapiens
  misc_RNA (1)...(19): siRNA sense strand
uuccaaaguucuugaucaa

SEQ ID NO: 2584639 - RNA, 19 nt, Homo sapiens
  misc_RNA (1)...(19): siRNA sense strand
cuacuuuagacuuggacaa

SEQ ID NO: 2584640 - RNA, 19 nt, Homo sapiens
  misc_RNA (1)...(19): siRNA sense strand
ucaaguaugaugagaacau

SEQ ID NO: 2584641 - RNA, 19 nt, Homo sapiens
  misc_RNA (1)...(19): siRNA sense strand
gcuaggacguugauggguu

SEQ ID NO: 2584642 - RNA, 19 nt, Homo sapiens
  misc_RNA (1)...(19): siRNA sense strand
cuuucaagacugcagauaa

SEQ ID NO: 2584643 - RNA, 19 nt, Homo sapiens
  misc_RNA (1)...(19): siRNA sense strand
ugacauuugcagaucuaaa

SEQ ID NO: 2584644 - RNA, 19 nt, Homo sapiens
  misc_RNA (1)...(19): siRNA sense strand
gcaucaucuucgaagugaa

SEQ ID NO: 2584645 - RNA, 19 nt, Homo sapiens
  misc_RNA (1)...(19): siRNA sense strand
aauaugaacgagaaggauu

SEQ ID NO: 2584646 - RNA, 19 nt, Homo sapiens
  misc_RNA (1)...(19): siRNA sense strand
auaugaacgagaaggauuu

SEQ ID NO: 2584647 - RNA, 19 nt, Homo sapiens
  misc_RNA (1)...(19): siRNA sense strand
uaaagcaguuggaugggaa

SEQ ID NO: 2584648 - RNA, 19 nt, Homo sapiens
  misc_RNA (1)...(19): siRNA sense strand
gauuuaacuuccuagccaa

SEQ ID NO: 2584649 - RNA, 19 nt, Homo sapiens
  misc_RNA (1)...(19): siRNA sense strand
cugcccagcuauuggaaca

SEQ ID NO: 2584650 - RNA, 19 nt, Homo sapiens
  misc_RNA (1)...(19): siRNA sense strand
uggcaugaguugacccaga

SEQ ID NO: 2584651 - RNA, 19 nt, Homo sapiens
  misc_RNA (1)...(19): siRNA sense strand
ugaagaaaccaaagcagca

SEQ ID NO: 2584652 - RNA, 19 nt, Homo sapiens
  misc_RNA (1)...(19): siRNA sense strand
ggauuuaacuuccuagcca

SEQ ID NO: 2584653 - RNA, 19 nt, Homo sapiens
  misc_RNA (1)...(19): siRNA sense strand
cuuccaaaguucuugauca

SEQ ID NO: 2584654 - RNA, 19 nt, Homo sapiens
  misc_RNA (1)...(19): siRNA sense strand
ucaauaugaacgagaagga

SEQ ID NO: 2584655 - RNA, 19 nt, Homo sapiens
  misc_RNA (1)...(19): siRNA sense strand
gcaagagaaagcuggucau

SEQ ID NO: 2584656 - RNA, 19 nt, Homo sapiens
  misc_RNA (1)...(19): siRNA sense strand
gagcccuggccguggaauu

SEQ ID NO: 2584657 - RNA, 19 nt, Homo sapiens
  misc_RNA (1)...(19): siRNA sense strand
gggacaugagcgaugauga

SEQ ID NO: 2584658 - RNA, 19 nt, Homo sapiens
  misc_RNA (1)...(19): siRNA sense strand
cuauuggaacacuguauaa

SEQ ID NO: 2584659 - RNA, 19 nt, Homo sapiens
  misc_RNA (1)...(19): siRNA sense strand
augaguugacccagaagaa

SEQ ID NO: 2584660 - RNA, 19 nt, Homo sapiens
  misc_RNA (1)...(19): siRNA sense strand
ggccaguggguuuggauca

SEQ ID NO: 2584661 - RNA, 19 nt, Homo sapiens
  misc_RNA (1)...(19): siRNA sense strand
ucaaacagaaggagucaca

SEQ ID NO: 2584662 - RNA, 19 nt, Homo sapiens
  misc_RNA (1)...(19): siRNA sense strand
guguauaugaucccuguaa

SEQ ID NO: 2584663 - RNA, 19 nt, Homo sapiens
  misc_RNA (1)...(19): siRNA sense strand
gaugaagcucccaaggaca

SEQ ID NO: 2584664 - RNA, 19 nt, Homo sapiens
  misc_RNA (1)...(19): siRNA sense strand
cuugacauuugcagaucua

SEQ ID NO: 2584665 - RNA, 19 nt, Homo sapiens
  misc_RNA (1)...(19): siRNA sense strand
ggugugaaugccagaggau

SEQ ID NO: 2584666 - RNA, 19 nt, Homo sapiens
  misc_RNA (1)...(19): siRNA sense strand
gaggauucaacaugagcau

SEQ ID NO: 2584667 - RNA, 19 nt, Homo sapiens
  misc_RNA (1)...(19): siRNA sense strand
uggaacaagcagcaaauga

SEQ ID NO: 2584668 - RNA, 19 nt, Homo sapiens
  misc_RNA (1)...(19): siRNA sense strand
gcuuaaacauggagaaaau

SEQ ID NO: 2584669 - RNA, 19 nt, Homo sapiens
  misc_RNA (1)...(19): siRNA sense strand
cagaaauagaauacagaga

SEQ ID NO: 2584670 - RNA, 19 nt, Homo sapiens
  misc_RNA (1)...(19): siRNA sense strand
agugaaaacuccugaagaa

SEQ ID NO: 2584671 - RNA, 19 nt, Homo sapiens
  misc_RNA (1)...(19): siRNA sense strand
aaaugaacuucguaggaau

SEQ ID NO: 2584672 - RNA, 19 nt, Homo sapiens
  misc_RNA (1)...(19): siRNA sense strand
agaucugggauuagguaaa

SEQ ID NO: 2584673 - RNA, 19 nt, Homo sapiens
  misc_RNA (1)...(19): siRNA sense strand
gauuuaaggcagaaguaga

SEQ ID NO: 2584674 - RNA, 19 nt, Homo sapiens
  misc_RNA (1)...(19): siRNA sense strand
aaguaagauuuaaggcaga

SEQ ID NO: 2584675 - RNA, 19 nt, Homo sapiens
  misc_RNA (1)...(19): siRNA sense strand
aauuagugguguugguauu

SEQ ID NO: 2584676 - RNA, 19 nt, Homo sapiens
  misc_RNA (1)...(19): siRNA sense strand
ucuccaaguaagaguuaaa

SEQ ID NO: 2584677 - RNA, 19 nt, Homo sapiens
  misc_RNA (1)...(19): siRNA sense strand
ugauauuauuggaggauac

SEQ ID NO: 2584678 - RNA, 19 nt, Homo sapiens
  misc_RNA (1)...(19): siRNA sense strand
agaaagaaggacagggauc

SEQ ID NO: 2584679 - RNA, 19 nt, Homo sapiens
  misc_RNA (1)...(19): siRNA sense strand
cacuggagucagagcgaua

SEQ ID NO: 2584680 - RNA, 19 nt, Homo sapiens
  misc_RNA (1)...(19): siRNA sense strand
auccagugaucuagaacaa

SEQ ID NO: 2584681 - RNA, 19 nt, Homo sapiens
  misc_RNA (1)...(19): siRNA sense strand
aggaagcagaaauagaaua

SEQ ID NO: 2584682 - RNA, 19 nt, Homo sapiens
  misc_RNA (1)...(19): siRNA sense strand
cgcuauauuucuucgcuaa

SEQ ID NO: 2584683 - RNA, 19 nt, Homo sapiens
  misc_RNA (1)...(19): siRNA sense strand
cguaggaaugcucgggcua

SEQ ID NO: 2584684 - RNA, 19 nt, Homo sapiens
  misc_RNA (1)...(19): siRNA sense strand
uagcauugggcaucaguaa

SEQ ID NO: 2584685 - RNA, 19 nt, Homo sapiens
  misc_RNA (1)...(19): siRNA sense strand
uugaaacagcagaagguau

SEQ ID NO: 2584686 - RNA, 19 nt, Homo sapiens
  misc_RNA (1)...(19): siRNA sense strand
gcgcuauauuucuucgcua

SEQ ID NO: 2584687 - RNA, 19 nt, Homo sapiens
  misc_RNA (1)...(19): siRNA sense strand
ugaccaaauguuacaagaa

SEQ ID NO: 2584688 - RNA, 19 nt, Homo sapiens
  misc_RNA (1)...(19): siRNA sense strand
augcuuaaacauggagaaa

SEQ ID NO: 2584689 - RNA, 19 nt, Homo sapiens
  misc_RNA (1)...(19): siRNA sense strand
uaggaaugcucgggcuaaa

SEQ ID NO: 2584690 - RNA, 19 nt, Homo sapiens
  misc_RNA (1)...(19): siRNA sense strand
ucagaaagaaggacaggga

SEQ ID NO: 2584691 - RNA, 19 nt, Homo sapiens
  misc_RNA (1)...(19): siRNA sense strand
cuuuaggagcugaaguaga

SEQ ID NO: 2584692 - RNA, 19 nt, Homo sapiens
  misc_RNA (1)...(19): siRNA sense strand
guggcagaauuuagugaca

SEQ ID NO: 2584693 - RNA, 19 nt, Homo sapiens
  misc_RNA (1)...(19): siRNA sense strand
auguagauuuggagauacu

SEQ ID NO: 2584694 - RNA, 19 nt, Homo sapiens
  misc_RNA (1)...(19): siRNA sense strand
agguauaggcgcagaacuc

SEQ ID NO: 2584695 - RNA, 19 nt, Homo sapiens
  misc_RNA (1)...(19): siRNA sense strand
agaauacagagaaaggcua

SEQ ID NO: 2584696 - RNA, 19 nt, Homo sapiens
  misc_RNA (1)...(19): siRNA sense strand
gcuaauuagugguguuggu

SEQ ID NO: 2584697 - RNA, 19 nt, Homo sapiens
  misc_RNA (1)...(19): siRNA sense strand
agucgugauccuaguacaa

SEQ ID NO: 2584698 - RNA, 19 nt, Homo sapiens
  misc_RNA (1)...(19): siRNA sense strand
guauaggcgcagaacucaa

SEQ ID NO: 2584699 - RNA, 19 nt, Homo sapiens
  misc_RNA (1)...(19): siRNA sense strand
cccugaagcucuugccaga

SEQ ID NO: 2584700 - RNA, 19 nt, Homo sapiens
  misc_RNA (1)...(19): siRNA sense strand
agauagacuugagaaggaa

SEQ ID NO: 2584701 - RNA, 19 nt, Homo sapiens
  misc_RNA (1)...(19): siRNA sense strand
cgacauguagauuuggaga

SEQ ID NO: 2584702 - RNA, 19 nt, Homo sapiens
  misc_RNA (1)...(19): siRNA sense strand
aguaagaguuaaagcaguc

SEQ ID NO: 2584703 - RNA, 19 nt, Homo sapiens
  misc_RNA (1)...(19): siRNA sense strand
cuugagaucagauguggaa

SEQ ID NO: 2584704 - RNA, 19 nt, Homo sapiens
  misc_RNA (1)...(19): siRNA sense strand
auuuauaccgguucagcaa

SEQ ID NO: 2584705 - RNA, 19 nt, Homo sapiens
  misc_RNA (1)...(19): siRNA sense strand
aaguaagaguuaaagcagu

SEQ ID NO: 2584706 - RNA, 19 nt, Homo sapiens
  misc_RNA (1)...(19): siRNA sense strand
caguaagggcaauucauga

SEQ ID NO: 2584707 - RNA, 19 nt, Homo sapiens
  misc_RNA (1)...(19): siRNA sense strand
aguaagauuuaaggcagaa

SEQ ID NO: 2584708 - RNA, 19 nt, Homo sapiens
  misc_RNA (1)...(19): siRNA sense strand
aagauuuaaggcagaagua

SEQ ID NO: 2584709 - RNA, 19 nt, Homo sapiens
  misc_RNA (1)...(19): siRNA sense strand
agcagaagguauaggcgca

SEQ ID NO: 2584710 - RNA, 19 nt, Homo sapiens
  misc_RNA (1)...(19): siRNA sense strand
gaacaaguacaacggcuca

SEQ ID NO: 2584711 - RNA, 19 nt, Homo sapiens
  misc_RNA (1)...(19): siRNA sense strand
gauaauacaaagaaggcaa

SEQ ID NO: 2584712 - RNA, 19 nt, Homo sapiens
  misc_RNA (1)...(19): siRNA sense strand
ccacaaacaacauggccua

SEQ ID NO: 2584713 - RNA, 19 nt, Homo sapiens
  misc_RNA (1)...(19): siRNA sense strand
cagaauaagauuaaggguu

SEQ ID NO: 2584714 - RNA, 19 nt, Homo sapiens
  misc_RNA (1)...(19): siRNA sense strand
ggucgaugccaaaggaaga

SEQ ID NO: 2584715 - RNA, 19 nt, Homo sapiens
  misc_RNA (1)...(19): siRNA sense strand
gugaaaguuuggaagguca

SEQ ID NO: 2584716 - RNA, 19 nt, Homo sapiens
  misc_RNA (1)...(19): siRNA sense strand
agaauaagauuaaggguug

SEQ ID NO: 2584717 - RNA, 19 nt, Homo sapiens
  misc_RNA (1)...(19): siRNA sense strand
gaaagaaucugaagccgau

SEQ ID NO: 2584718 - RNA, 19 nt, Homo sapiens
  misc_RNA (1)...(19): siRNA sense strand
gggugacaguaaacagcaa

SEQ ID NO: 2584719 - RNA, 19 nt, Homo sapiens
  misc_RNA (1)...(19): siRNA sense strand
uuggauuuguagaggagaa

SEQ ID NO: 2584720 - RNA, 19 nt, Homo sapiens
  misc_RNA (1)...(19): siRNA sense strand
guggaaagcccauucggaa

SEQ ID NO: 2584721 - RNA, 19 nt, Homo sapiens
  misc_RNA (1)...(19): siRNA sense strand
ugaauguggucgaugccaa

SEQ ID NO: 2584722 - RNA, 19 nt, Homo sapiens
  misc_RNA (1)...(19): siRNA sense strand
cagcaagaagagacugauu

SEQ ID NO: 2584723 - RNA, 19 nt, Homo sapiens
  misc_RNA (1)...(19): siRNA sense strand
gcaaauaacucucaggagc

SEQ ID NO: 2584724 - RNA, 19 nt, Homo sapiens
  misc_RNA (1)...(19): siRNA sense strand
aggacaagccccuguguaa

SEQ ID NO: 2584725 - RNA, 19 nt, Homo sapiens
  misc_RNA (1)...(19): siRNA sense strand
cugcagggcgguaaggauu

SEQ ID NO: 2584726 - RNA, 19 nt, Homo sapiens
  misc_RNA (1)...(19): siRNA sense strand
ugaaagaaucugaagccga

SEQ ID NO: 2584727 - RNA, 19 nt, Homo sapiens
  misc_RNA (1)...(19): siRNA sense strand
aucuugaagcccagaauaa

SEQ ID NO: 2584728 - RNA, 19 nt, Homo sapiens
  misc_RNA (1)...(19): siRNA sense strand
ugagcugugcuaugagaaa

SEQ ID NO: 2584729 - RNA, 19 nt, Homo sapiens
  misc_RNA (1)...(19): siRNA sense strand
guguguagccuguggaaag

SEQ ID NO: 2584730 - RNA, 19 nt, Homo sapiens
  misc_RNA (1)...(19): siRNA sense strand
ugauggaauaaaugcacaa

SEQ ID NO: 2584731 - RNA, 19 nt, Homo sapiens
  misc_RNA (1)...(19): siRNA sense strand
aauaaaugcacaaggaaug

SEQ ID NO: 2584732 - RNA, 19 nt, Homo sapiens
  misc_RNA (1)...(19): siRNA sense strand
acugaagacuggcguccaa

SEQ ID NO: 2584733 - RNA, 19 nt, Homo sapiens
  misc_RNA (1)...(19): siRNA sense strand
augccauggaugugaauuu

SEQ ID NO: 2584734 - RNA, 19 nt, Homo sapiens
  misc_RNA (1)...(19): siRNA sense strand
gcgaugugguucucagcau

SEQ ID NO: 2584735 - RNA, 19 nt, Homo sapiens
  misc_RNA (1)...(19): siRNA sense strand
ugcaaagagcugagcacau

SEQ ID NO: 2584736 - RNA, 19 nt, Homo sapiens
  misc_RNA (1)...(19): siRNA sense strand
gcgguaaggauuucaacau

SEQ ID NO: 2584737 - RNA, 19 nt, Homo sapiens
  misc_RNA (1)...(19): siRNA sense strand
gcaaaauggcccaccaaga

SEQ ID NO: 2584738 - RNA, 19 nt, Homo sapiens
  misc_RNA (1)...(19): siRNA sense strand
ucaacaugccucugacaau

SEQ ID NO: 2584739 - RNA, 19 nt, Homo sapiens
  misc_RNA (1)...(19): siRNA sense strand
aaauguaagaauaggcgau

SEQ ID NO: 2584740 - RNA, 19 nt, Homo sapiens
  misc_RNA (1)...(19): siRNA sense strand
aagcccagaauaagauuaa

SEQ ID NO: 2584741 - RNA, 19 nt, Homo sapiens
  misc_RNA (1)...(19): siRNA sense strand
agggagaaccuaaagaagu

SEQ ID NO: 2584742 - RNA, 19 nt, Homo sapiens
  misc_RNA (1)...(19): siRNA sense strand
aggagcuagcagagggaca

SEQ ID NO: 2584743 - RNA, 19 nt, Homo sapiens
  misc_RNA (1)...(19): siRNA sense strand
cgaugugcgcccauuguaa

SEQ ID NO: 2584744 - RNA, 19 nt, Homo sapiens
  misc_RNA (1)...(19): siRNA sense strand
uagcagagggacagagaag

SEQ ID NO: 2584745 - RNA, 19 nt, Homo sapiens
  misc_RNA (1)...(19): siRNA sense strand
uugaauaugacucugcaaa

SEQ ID NO: 2584746 - RNA, 19 nt, Homo sapiens
  misc_RNA (1)...(19): siRNA sense strand
uggagaagaugaaggccaa

SEQ ID NO: 2584747 - RNA, 19 nt, Homo sapiens
  misc_RNA (1)...(19): siRNA sense strand
aguuagacaaugagaagaa

SEQ ID NO: 2584748 - RNA, 19 nt, Homo sapiens
  misc_RNA (1)...(19): siRNA sense strand
uugaagagcaggaggaaca

SEQ ID NO: 2584749 - RNA, 19 nt, Homo sapiens
  misc_RNA (1)...(19): siRNA sense strand
ugagagaacuggaacgaca

SEQ ID NO: 2584750 - RNA, 19 nt, Homo sapiens
  misc_RNA (1)...(19): siRNA sense strand
gccauuagauguaaggcua

SEQ ID NO: 2584751 - RNA, 19 nt, Homo sapiens
  misc_RNA (1)...(19): siRNA sense strand
agagaugccaauagacaaa

SEQ ID NO: 2584752 - RNA, 19 nt, Homo sapiens
  misc_RNA (1)...(19): siRNA sense strand
ugucugaaguggaagaaaa

SEQ ID NO: 2584753 - RNA, 19 nt, Homo sapiens
  misc_RNA (1)...(19): siRNA sense strand
gcauaagauggaagaacuu

SEQ ID NO: 2584754 - RNA, 19 nt, Homo sapiens
  misc_RNA (1)...(19): siRNA sense strand
ggcaaagagaugagcuuau

SEQ ID NO: 2584755 - RNA, 19 nt, Homo sapiens
  misc_RNA (1)...(19): siRNA sense strand
caaaggaguuagaaaggca

SEQ ID NO: 2584756 - RNA, 19 nt, Homo sapiens
  misc_RNA (1)...(19): siRNA sense strand
cgggcagaagcaagagaua

SEQ ID NO: 2584757 - RNA, 19 nt, Homo sapiens
  misc_RNA (1)...(19): siRNA sense strand
cugcagaagaugaagcuuu

SEQ ID NO: 2584758 - RNA, 19 nt, Homo sapiens
  misc_RNA (1)...(19): siRNA sense strand
aguuagaaaggcagaaaca

SEQ ID NO: 2584759 - RNA, 19 nt, Homo sapiens
  misc_RNA (1)...(19): siRNA sense strand
agaggaggaacgacagaaa

SEQ ID NO: 2584760 - RNA, 19 nt, Homo sapiens
  misc_RNA (1)...(19): siRNA sense strand
aguuagaggaggaacgaca

SEQ ID NO: 2584761 - RNA, 19 nt, Homo sapiens
  misc_RNA (1)...(19): siRNA sense strand
uagacaaugagaagaacaa

SEQ ID NO: 2584762 - RNA, 19 nt, Homo sapiens
  misc_RNA (1)...(19): siRNA sense strand
gcaaaguauuagccggcuu

SEQ ID NO: 2584763 - RNA, 19 nt, Homo sapiens
  misc_RNA (1)...(19): siRNA sense strand
cugagaaugcugagaaagu

SEQ ID NO: 2584764 - RNA, 19 nt, Homo sapiens
  misc_RNA (1)...(19): siRNA sense strand
aggcagaaacauaugugua

SEQ ID NO: 2584765 - RNA, 19 nt, Homo sapiens
  misc_RNA (1)...(19): siRNA sense strand
ugcugagaaugcugagaaa

SEQ ID NO: 2584766 - RNA, 19 nt, Homo sapiens
  misc_RNA (1)...(19): siRNA sense strand
ccagagaggcagaggcaag

SEQ ID NO: 2584767 - RNA, 19 nt, Homo sapiens
  misc_RNA (1)...(19): siRNA sense strand
gcggcaaagagaugagcuu

SEQ ID NO: 2584768 - RNA, 19 nt, Homo sapiens
  misc_RNA (1)...(19): siRNA sense strand
gaugaaggccaauaggaca

SEQ ID NO: 2584769 - RNA, 19 nt, Homo sapiens
  misc_RNA (1)...(19): siRNA sense strand
uggcagaauuuuauagaga

SEQ ID NO: 2584770 - RNA, 19 nt, Homo sapiens
  misc_RNA (1)...(19): siRNA sense strand
uggccaagcggcuggagaa

SEQ ID NO: 2584771 - RNA, 19 nt, Homo sapiens
  misc_RNA (1)...(19): siRNA sense strand
cgacagaaaugcuccagga

SEQ ID NO: 2584772 - RNA, 19 nt, Homo sapiens
  misc_RNA (1)...(19): siRNA sense strand
gagagaacuggaacgacaa

SEQ ID NO: 2584773 - RNA, 19 nt, Homo sapiens
  misc_RNA (1)...(19): siRNA sense strand
agaacuggaacgacaacaa

SEQ ID NO: 2584774 - RNA, 19 nt, Homo sapiens
  misc_RNA (1)...(19): siRNA sense strand
uggagagaaggaagaacua

SEQ ID NO: 2584775 - RNA, 19 nt, Homo sapiens
  misc_RNA (1)...(19): siRNA sense strand
cgaaauucugccucagcaa

SEQ ID NO: 2584776 - RNA, 19 nt, Homo sapiens
  misc_RNA (1)...(19): siRNA sense strand
aggagauggagaugaccaa

SEQ ID NO: 2584777 - RNA, 19 nt, Homo sapiens
  misc_RNA (1)...(19): siRNA sense strand
caauagacaaauuagcgaa

SEQ ID NO: 2584778 - RNA, 19 nt, Homo sapiens
  misc_RNA (1)...(19): siRNA sense strand
ggacagcacuucuggccca

SEQ ID NO: 2584779 - RNA, 19 nt, Homo sapiens
  misc_RNA (1)...(19): siRNA sense strand
agagagaugccaauagaca

SEQ ID NO: 2584780 - RNA, 19 nt, Homo sapiens
  misc_RNA (1)...(19): siRNA sense strand
agauugaggagauggagau

SEQ ID NO: 2584781 - RNA, 19 nt, Homo sapiens
  misc_RNA (1)...(19): siRNA sense strand
aggaggaacagauggcaga

SEQ ID NO: 2584782 - RNA, 19 nt, Homo sapiens
  misc_RNA (1)...(19): siRNA sense strand
agauguaaggcuacgaaaa

SEQ ID NO: 2584783 - RNA, 19 nt, Homo sapiens
  misc_RNA (1)...(19): siRNA sense strand
acagaaaugcuccaggaau

SEQ ID NO: 2584784 - RNA, 19 nt, Homo sapiens
  misc_RNA (1)...(19): siRNA sense strand
aagaugaauugaaagcaga

SEQ ID NO: 2584785 - RNA, 19 nt, Homo sapiens
  misc_RNA (1)...(19): siRNA sense strand
cuggagaagaugaaggcca

SEQ ID NO: 2584786 - RNA, 19 nt, Homo sapiens
  misc_RNA (1)...(19): siRNA sense strand
agaugaauugaaagcagaa

SEQ ID NO: 2584787 - RNA, 19 nt, Homo sapiens
  misc_RNA (1)...(19): siRNA sense strand
gaagaugaauugaaagcag

SEQ ID NO: 2584788 - RNA, 19 nt, Homo sapiens
  misc_RNA (1)...(19): siRNA sense strand
agcauaagauggaagaacu

SEQ ID NO: 2584789 - RNA, 19 nt, Homo sapiens
  misc_RNA (1)...(19): siRNA sense strand
gagagaaggaagaacuacu

SEQ ID NO: 2584790 - RNA, 19 nt, Homo sapiens
  misc_RNA (1)...(19): siRNA sense strand
caaaagcagaacaggauau

SEQ ID NO: 2584791 - RNA, 19 nt, Homo sapiens
  misc_RNA (1)...(19): siRNA sense strand
cagcacuggacaagauuga

SEQ ID NO: 2584792 - RNA, 19 nt, Homo sapiens
  misc_RNA (1)...(19): siRNA sense strand
ggauguuauugaagagcag

SEQ ID NO: 2584793 - RNA, 19 nt, Homo sapiens
  misc_RNA (1)...(19): siRNA sense strand
acgcaugagagaacuggaa

SEQ ID NO: 2584794 - RNA, 19 nt, Homo sapiens
  misc_RNA (1)...(19): siRNA sense strand
agauggaagaacuuaaaga

SEQ ID NO: 2584795 - RNA, 19 nt, Homo sapiens
  misc_RNA (1)...(19): siRNA sense strand
uggagaagaugaaggccaa

SEQ ID NO: 2584796 - RNA, 19 nt, Homo sapiens
  misc_RNA (1)...(19): siRNA sense strand
aguuagacaaugagaagaa

SEQ ID NO: 2584797 - RNA, 19 nt, Homo sapiens
  misc_RNA (1)...(19): siRNA sense strand
uugaagagcaggaggaaca

SEQ ID NO: 2584798 - RNA, 19 nt, Homo sapiens
  misc_RNA (1)...(19): siRNA sense strand
ugagagaacuggaacgaca

SEQ ID NO: 2584799 - RNA, 19 nt, Homo sapiens
  misc_RNA (1)...(19): siRNA sense strand
gccauuagauguaaggcua

SEQ ID NO: 2584800 - RNA, 19 nt, Homo sapiens
  misc_RNA (1)...(19): siRNA sense strand
agagaugccaauagacaaa

SEQ ID NO: 2584801 - RNA, 19 nt, Homo sapiens
  misc_RNA (1)...(19): siRNA sense strand
ugucugaaguggaagaaaa

SEQ ID NO: 2584802 - RNA, 19 nt, Homo sapiens
  misc_RNA (1)...(19): siRNA sense strand
gcauaagauggaagaacuu

SEQ ID NO: 2584803 - RNA, 19 nt, Homo sapiens
  misc_RNA (1)...(19): siRNA sense strand
ggcaaagagaugagcuuau

SEQ ID NO: 2584804 - RNA, 19 nt, Homo sapiens
  misc_RNA (1)...(19): siRNA sense strand
caaaggaguuagaaaggca

SEQ ID NO: 2584805 - RNA, 19 nt, Homo sapiens
  misc_RNA (1)...(19): siRNA sense strand
cgggcagaagcaagagaua

SEQ ID NO: 2584806 - RNA, 19 nt, Homo sapiens
  misc_RNA (1)...(19): siRNA sense strand
cugcagaagaugaagcuuu

SEQ ID NO: 2584807 - RNA, 19 nt, Homo sapiens
  misc_RNA (1)...(19): siRNA sense strand
aguuagaaaggcagaaaca

SEQ ID NO: 2584808 - RNA, 19 nt, Homo sapiens
  misc_RNA (1)...(19): siRNA sense strand
agaggaggaacgacagaaa

SEQ ID NO: 2584809 - RNA, 19 nt, Homo sapiens
  misc_RNA (1)...(19): siRNA sense strand
aguuagaggaggaacgaca

SEQ ID NO: 2584810 - RNA, 19 nt, Homo sapiens
  misc_RNA (1)...(19): siRNA sense strand
uagacaaugagaagaacaa

SEQ ID NO: 2584811 - RNA, 19 nt, Homo sapiens
  misc_RNA (1)...(19): siRNA sense strand
gcaaaguauuagccggcuu

SEQ ID NO: 2584812 - RNA, 19 nt, Homo sapiens
  misc_RNA (1)...(19): siRNA sense strand
cugagaaugcugagaaagu

SEQ ID NO: 2584813 - RNA, 19 nt, Homo sapiens
  misc_RNA (1)...(19): siRNA sense strand
aggcagaaacauaugugua

SEQ ID NO: 2584814 - RNA, 19 nt, Homo sapiens
  misc_RNA (1)...(19): siRNA sense strand
ugcugagaaugcugagaaa

SEQ ID NO: 2584815 - RNA, 19 nt, Homo sapiens
  misc_RNA (1)...(19): siRNA sense strand
ccagagaggcagaggcaag

SEQ ID NO: 2584816 - RNA, 19 nt, Homo sapiens
  misc_RNA (1)...(19): siRNA sense strand
gcggcaaagagaugagcuu

SEQ ID NO: 2584817 - RNA, 19 nt, Homo sapiens
  misc_RNA (1)...(19): siRNA sense strand
gaugaaggccaauaggaca

SEQ ID NO: 2584818 - RNA, 19 nt, Homo sapiens
  misc_RNA (1)...(19): siRNA sense strand
uggcagaauuuuauagaga

SEQ ID NO: 2584819 - RNA, 19 nt, Homo sapiens
  misc_RNA (1)...(19): siRNA sense strand
uggccaagcggcuggagaa

SEQ ID NO: 2584820 - RNA, 19 nt, Homo sapiens
  misc_RNA (1)...(19): siRNA sense strand
cgacagaaaugcuccagga

SEQ ID NO: 2584821 - RNA, 19 nt, Homo sapiens
  misc_RNA (1)...(19): siRNA sense strand
gagagaacuggaacgacaa

SEQ ID NO: 2584822 - RNA, 19 nt, Homo sapiens
  misc_RNA (1)...(19): siRNA sense strand
agaacuggaacgacaacaa

SEQ ID NO: 2584823 - RNA, 19 nt, Homo sapiens
  misc_RNA (1)...(19): siRNA sense strand
uggagagaaggaagaacua

SEQ ID NO: 2584824 - RNA, 19 nt, Homo sapiens
  misc_RNA (1)...(19): siRNA sense strand
cgaaauucugccucagcaa

SEQ ID NO: 2584825 - RNA, 19 nt, Homo sapiens
  misc_RNA (1)...(19): siRNA sense strand
aggagauggagaugaccaa

SEQ ID NO: 2584826 - RNA, 19 nt, Homo sapiens
  misc_RNA (1)...(19): siRNA sense strand
caauagacaaauuagcgaa

SEQ ID NO: 2584827 - RNA, 19 nt, Homo sapiens
  misc_RNA (1)...(19): siRNA sense strand
ggacagcacuucuggccca

SEQ ID NO: 2584828 - RNA, 19 nt, Homo sapiens
  misc_RNA (1)...(19): siRNA sense strand
agagagaugccaauagaca

SEQ ID NO: 2584829 - RNA, 19 nt, Homo sapiens
  misc_RNA (1)...(19): siRNA sense strand
agauugaggagauggagau

SEQ ID NO: 2584830 - RNA, 19 nt, Homo sapiens
  misc_RNA (1)...(19): siRNA sense strand
aggaggaacagauggcaga

SEQ ID NO: 2584831 - RNA, 19 nt, Homo sapiens
  misc_RNA (1)...(19): siRNA sense strand
agauguaaggcuacgaaaa

SEQ ID NO: 2584832 - RNA, 19 nt, Homo sapiens
  misc_RNA (1)...(19): siRNA sense strand
acagaaaugcuccaggaau

SEQ ID NO: 2584833 - RNA, 19 nt, Homo sapiens
  misc_RNA (1)...(19): siRNA sense strand
aagaugaauugaaagcaga

SEQ ID NO: 2584834 - RNA, 19 nt, Homo sapiens
  misc_RNA (1)...(19): siRNA sense strand
cuggagaagaugaaggcca

SEQ ID NO: 2584835 - RNA, 19 nt, Homo sapiens
  misc_RNA (1)...(19): siRNA sense strand
agaugaauugaaagcagaa

SEQ ID NO: 2584836 - RNA, 19 nt, Homo sapiens
  misc_RNA (1)...(19): siRNA sense strand
gaagaugaauugaaagcag

SEQ ID NO: 2584837 - RNA, 19 nt, Homo sapiens
  misc_RNA (1)...(19): siRNA sense strand
agcauaagauggaagaacu

SEQ ID NO: 2584838 - RNA, 19 nt, Homo sapiens
  misc_RNA (1)...(19): siRNA sense strand
gagagaaggaagaacuacu

SEQ ID NO: 2584839 - RNA, 19 nt, Homo sapiens
  misc_RNA (1)...(19): siRNA sense strand
caaaagcagaacaggauau

SEQ ID NO: 2584840 - RNA, 19 nt, Homo sapiens
  misc_RNA (1)...(19): siRNA sense strand
cagcacuggacaagauuga

SEQ ID NO: 2584841 - RNA, 19 nt, Homo sapiens
  misc_RNA (1)...(19): siRNA sense strand
ggauguuauugaagagcag

SEQ ID NO: 2584842 - RNA, 19 nt, Homo sapiens
  misc_RNA (1)...(19): siRNA sense strand
acgcaugagagaacuggaa

SEQ ID NO: 2584843 - RNA, 19 nt, Homo sapiens
  misc_RNA (1)...(19): siRNA sense strand
agauggaagaacuuaaaga

SEQ ID NO: 2584844 - RNA, 19 nt, Homo sapiens
  misc_RNA (1)...(19): siRNA sense strand
auggagaacuggugggcua

SEQ ID NO: 2584845 - RNA, 19 nt, Homo sapiens
  misc_RNA (1)...(19): siRNA sense strand
uggaaagaugggaaggaau

SEQ ID NO: 2584846 - RNA, 19 nt, Homo sapiens
  misc_RNA (1)...(19): siRNA sense strand
aggcaagggaagaagccaa

SEQ ID NO: 2584847 - RNA, 19 nt, Homo sapiens
  misc_RNA (1)...(19): siRNA sense strand
aaagaguccaggagacaaa

SEQ ID NO: 2584848 - RNA, 19 nt, Homo sapiens
  misc_RNA (1)...(19): siRNA sense strand
guggcagagugcagggauu

SEQ ID NO: 2584849 - RNA, 19 nt, Homo sapiens
  misc_RNA (1)...(19): siRNA sense strand
ggcgugaccaugugggaaa

SEQ ID NO: 2584850 - RNA, 19 nt, Homo sapiens
  misc_RNA (1)...(19): siRNA sense strand
cagaaguucaugacagcaa

SEQ ID NO: 2584851 - RNA, 19 nt, Homo sapiens
  misc_RNA (1)...(19): siRNA sense strand
guggugaauuauauagcaa

SEQ ID NO: 2584852 - RNA, 19 nt, Homo sapiens
  misc_RNA (1)...(19): siRNA sense strand
agaccaugaaguuggacaa

SEQ ID NO: 2584853 - RNA, 19 nt, Homo sapiens
  misc_RNA (1)...(19): siRNA sense strand
cuaagcagccugagagcau

SEQ ID NO: 2584854 - RNA, 19 nt, Homo sapiens
  misc_RNA (1)...(19): siRNA sense strand
ccuaauauauaccaggaca

SEQ ID NO: 2584855 - RNA, 19 nt, Homo sapiens
  misc_RNA (1)...(19): siRNA sense strand
ucccaaagcccaugguaau

SEQ ID NO: 2584856 - RNA, 19 nt, Homo sapiens
  misc_RNA (1)...(19): siRNA sense strand
gaaacugcauguugcgaga

SEQ ID NO: 2584857 - RNA, 19 nt, Homo sapiens
  misc_RNA (1)...(19): siRNA sense strand
ccgaagacugccuggauga

SEQ ID NO: 2584858 - RNA, 19 nt, Homo sapiens
  misc_RNA (1)...(19): siRNA sense strand
cuggaugaacuguaugaaa

SEQ ID NO: 2584859 - RNA, 19 nt, Homo sapiens
  misc_RNA (1)...(19): siRNA sense strand
ugaacauaaaggugucaaa

SEQ ID NO: 2584860 - RNA, 19 nt, Homo sapiens
  misc_RNA (1)...(19): siRNA sense strand
gcucaaucaauguaccuaa

SEQ ID NO: 2584861 - RNA, 19 nt, Homo sapiens
  misc_RNA (1)...(19): siRNA sense strand
ccaucuacaucgaaguaca

SEQ ID NO: 2584862 - RNA, 19 nt, Homo sapiens
  misc_RNA (1)...(19): siRNA sense strand
gagauuuagcugcucgaaa

SEQ ID NO: 2584863 - RNA, 19 nt, Homo sapiens
  misc_RNA (1)...(19): siRNA sense strand
gggcagugaggaaugggaa

SEQ ID NO: 2584864 - RNA, 19 nt, Homo sapiens
  misc_RNA (1)...(19): siRNA sense strand
cagugaagaccaugaaguu

SEQ ID NO: 2584865 - RNA, 19 nt, Homo sapiens
  misc_RNA (1)...(19): siRNA sense strand
cuugggagucagugaggaa

SEQ ID NO: 2584866 - RNA, 19 nt, Homo sapiens
  misc_RNA (1)...(19): siRNA sense strand
ccugagagcaugaauguca

SEQ ID NO: 2584867 - RNA, 19 nt, Homo sapiens
  misc_RNA (1)...(19): siRNA sense strand
ggagacaggaccaaagcau

SEQ ID NO: 2584868 - RNA, 19 nt, Homo sapiens
  misc_RNA (1)...(19): siRNA sense strand
gaugaugaaguuacagcaa

SEQ ID NO: 2584869 - RNA, 19 nt, Homo sapiens
  misc_RNA (1)...(19): siRNA sense strand
ggaaccaagcagacguuau

SEQ ID NO: 2584870 - RNA, 19 nt, Homo sapiens
  misc_RNA (1)...(19): siRNA sense strand
aaggaaaucuuaagcagga

SEQ ID NO: 2584871 - RNA, 19 nt, Homo sapiens
  misc_RNA (1)...(19): siRNA sense strand
gaaccaagcagacguuauu

SEQ ID NO: 2584872 - RNA, 19 nt, Homo sapiens
  misc_RNA (1)...(19): siRNA sense strand
gggcauuuggcgugaccau

SEQ ID NO: 2584873 - RNA, 19 nt, Homo sapiens
  misc_RNA (1)...(19): siRNA sense strand
guuccaggccugacggaga

SEQ ID NO: 2584874 - RNA, 19 nt, Homo sapiens
  misc_RNA (1)...(19): siRNA sense strand
uggauauugcccugggaau

SEQ ID NO: 2584875 - RNA, 19 nt, Homo sapiens
  misc_RNA (1)...(19): siRNA sense strand
augaaugucaccagaaaca

SEQ ID NO: 2584876 - RNA, 19 nt, Homo sapiens
  misc_RNA (1)...(19): siRNA sense strand
ggucacagcagaaguucau

SEQ ID NO: 2584877 - RNA, 19 nt, Homo sapiens
  misc_RNA (1)...(19): siRNA sense strand
ucaucgaauuacacaguuu

SEQ ID NO: 2584878 - RNA, 19 nt, Homo sapiens
  misc_RNA (1)...(19): siRNA sense strand
cagcauaaccagugugcag

SEQ ID NO: 2584879 - RNA, 19 nt, Homo sapiens
  misc_RNA (1)...(19): siRNA sense strand
cccagggagugcagaucaa

SEQ ID NO: 2584880 - RNA, 19 nt, Homo sapiens
  misc_RNA (1)...(19): siRNA sense strand
ggaaggaaaucuuaagcag

SEQ ID NO: 2584881 - RNA, 19 nt, Homo sapiens
  misc_RNA (1)...(19): siRNA sense strand
ccacaaugacaaagggcug

SEQ ID NO: 2584882 - RNA, 19 nt, Homo sapiens
  misc_RNA (1)...(19): siRNA sense strand
ggugaauuauauagcaaag

SEQ ID NO: 2584883 - RNA, 19 nt, Homo sapiens
  misc_RNA (1)...(19): siRNA sense strand
gguugaagcagcccgaaga

SEQ ID NO: 2584884 - RNA, 19 nt, Homo sapiens
  misc_RNA (1)...(19): siRNA sense strand
gggacaucaucgaauuaca

SEQ ID NO: 2584885 - RNA, 19 nt, Homo sapiens
  misc_RNA (1)...(19): siRNA sense strand
ggagaguuugggucuguaa

SEQ ID NO: 2584886 - RNA, 19 nt, Homo sapiens
  misc_RNA (1)...(19): siRNA sense strand
ucuccuuggccaucagaaa

SEQ ID NO: 2584887 - RNA, 19 nt, Homo sapiens
  misc_RNA (1)...(19): siRNA sense strand
auguugugauugacaggaa

SEQ ID NO: 2584888 - RNA, 19 nt, Homo sapiens
  misc_RNA (1)...(19): siRNA sense strand
gcauauuccucugcagaca

SEQ ID NO: 2584889 - RNA, 19 nt, Homo sapiens
  misc_RNA (1)...(19): siRNA sense strand
cagcagaaguucaugacag

SEQ ID NO: 2584890 - RNA, 19 nt, Homo sapiens
  misc_RNA (1)...(19): siRNA sense strand
gagcaugaaugucaccaga

SEQ ID NO: 2584891 - RNA, 19 nt, Homo sapiens
  misc_RNA (1)...(19): siRNA sense strand
ccauagaaagucuugcaga

SEQ ID NO: 2584892 - RNA, 19 nt, Homo sapiens
  misc_RNA (1)...(19): siRNA sense strand
guacugagccagaagguga

SEQ ID NO: 2584893 - RNA, 19 nt, Homo sapiens
  misc_RNA (1)...(19): siRNA sense strand
gaagagaucaucaaggaca

SEQ ID NO: 2584894 - RNA, 19 nt, Homo sapiens
  misc_RNA (1)...(19): siRNA sense strand
agguagaugaaguccuuua

SEQ ID NO: 2584895 - RNA, 19 nt, Homo sapiens
  misc_RNA (1)...(19): siRNA sense strand
ccuccaggucccagugaau

SEQ ID NO: 2584896 - RNA, 19 nt, Homo sapiens
  misc_RNA (1)...(19): siRNA sense strand
aagagaucaucaaggacau

SEQ ID NO: 2584897 - RNA, 19 nt, Homo sapiens
  misc_RNA (1)...(19): siRNA sense strand
ugacaaacauggcaaccga

SEQ ID NO: 2584898 - RNA, 19 nt, Homo sapiens
  misc_RNA (1)...(19): siRNA sense strand
gcagagaggcucaggguga

SEQ ID NO: 2584899 - RNA, 19 nt, Homo sapiens
  misc_RNA (1)...(19): siRNA sense strand
ccagcugguuggaggaaaa

SEQ ID NO: 2584900 - RNA, 19 nt, Homo sapiens
  misc_RNA (1)...(19): siRNA sense strand
ucaaguggucagagagaga

SEQ ID NO: 2584901 - RNA, 19 nt, Homo sapiens
  misc_RNA (1)...(19): siRNA sense strand
uaacauaaccauuagcaga

SEQ ID NO: 2584902 - RNA, 19 nt, Homo sapiens
  misc_RNA (1)...(19): siRNA sense strand
agagagacaccaaagggaa

SEQ ID NO: 2584903 - RNA, 19 nt, Homo sapiens
  misc_RNA (1)...(19): siRNA sense strand
cagaagagcuuuugcagga

SEQ ID NO: 2584904 - RNA, 19 nt, Homo sapiens
  misc_RNA (1)...(19): siRNA sense strand
ugaccuacaaggagaacau

SEQ ID NO: 2584905 - RNA, 19 nt, Homo sapiens
  misc_RNA (1)...(19): siRNA sense strand
uugcaaugaacgaugaaaa

SEQ ID NO: 2584906 - RNA, 19 nt, Homo sapiens
  misc_RNA (1)...(19): siRNA sense strand
ccagcauaucuuugugaau

SEQ ID NO: 2584907 - RNA, 19 nt, Homo sapiens
  misc_RNA (1)...(19): siRNA sense strand
cguccaucguugucagcau

SEQ ID NO: 2584908 - RNA, 19 nt, Homo sapiens
  misc_RNA (1)...(19): siRNA sense strand
cgucaaucaccaacacuau

SEQ ID NO: 2584909 - RNA, 19 nt, Homo sapiens
  misc_RNA (1)...(19): siRNA sense strand
cgcucaugcaggugggaga

SEQ ID NO: 2584910 - RNA, 19 nt, Homo sapiens
  misc_RNA (1)...(19): siRNA sense strand
agagauagcgagugagaaa

SEQ ID NO: 2584911 - RNA, 19 nt, Homo sapiens
  misc_RNA (1)...(19): siRNA sense strand
gacugaaauuaaagggaaa

SEQ ID NO: 2584912 - RNA, 19 nt, Homo sapiens
  misc_RNA (1)...(19): siRNA sense strand
gugaagaagaaucaagaaa

SEQ ID NO: 2584913 - RNA, 19 nt, Homo sapiens
  misc_RNA (1)...(19): siRNA sense strand
ugacagagagagugaggaa

SEQ ID NO: 2584914 - RNA, 19 nt, Homo sapiens
  misc_RNA (1)...(19): siRNA sense strand
gcuugaauuuguugagaca

SEQ ID NO: 2584915 - RNA, 19 nt, Homo sapiens
  misc_RNA (1)...(19): siRNA sense strand
caaaagaugcaaagugaaa

SEQ ID NO: 2584916 - RNA, 19 nt, Homo sapiens
  misc_RNA (1)...(19): siRNA sense strand
agacugaaauuaaagggaa

SEQ ID NO: 2584917 - RNA, 19 nt, Homo sapiens
  misc_RNA (1)...(19): siRNA sense strand
ggaaagacgugcaggacac

SEQ ID NO: 2584918 - RNA, 19 nt, Homo sapiens
  misc_RNA (1)...(19): siRNA sense strand
cgguaaaauauaagggaga

SEQ ID NO: 2584919 - RNA, 19 nt, Homo sapiens
  misc_RNA (1)...(19): siRNA sense strand
cuugauauccaaagagcaa

SEQ ID NO: 2584920 - RNA, 19 nt, Homo sapiens
  misc_RNA (1)...(19): siRNA sense strand
gugagaaagaauacaagaa

SEQ ID NO: 2584921 - RNA, 19 nt, Homo sapiens
  misc_RNA (1)...(19): siRNA sense strand
acagagagagugaggaaga

SEQ ID NO: 2584922 - RNA, 19 nt, Homo sapiens
  misc_RNA (1)...(19): siRNA sense strand
ggaagaagaaaaugaagaa

SEQ ID NO: 2584923 - RNA, 19 nt, Homo sapiens
  misc_RNA (1)...(19): siRNA sense strand
gggaaagggaugcagguga

SEQ ID NO: 2584924 - RNA, 19 nt, Homo sapiens
  misc_RNA (1)...(19): siRNA sense strand
cauaaacagaugaaaggua

SEQ ID NO: 2584925 - RNA, 19 nt, Homo sapiens
  misc_RNA (1)...(19): siRNA sense strand
gugaaguacaagaaagaca

SEQ ID NO: 2584926 - RNA, 19 nt, Homo sapiens
  misc_RNA (1)...(19): siRNA sense strand
ccuccaaagucaggugaaa

SEQ ID NO: 2584927 - RNA, 19 nt, Homo sapiens
  misc_RNA (1)...(19): siRNA sense strand
uggcaagugagaaagaaua

SEQ ID NO: 2584928 - RNA, 19 nt, Homo sapiens
  misc_RNA (1)...(19): siRNA sense strand
cugaagagggcaaaagaaa

SEQ ID NO: 2584929 - RNA, 19 nt, Homo sapiens
  misc_RNA (1)...(19): siRNA sense strand
cagaauacaagaaaggaca

SEQ ID NO: 2584930 - RNA, 19 nt, Homo sapiens
  misc_RNA (1)...(19): siRNA sense strand
ggagauuaaaggaagguca

SEQ ID NO: 2584931 - RNA, 19 nt, Homo sapiens
  misc_RNA (1)...(19): siRNA sense strand
ccugaaauggaaagaguga

SEQ ID NO: 2584932 - RNA, 19 nt, Homo sapiens
  misc_RNA (1)...(19): siRNA sense strand
acaagaaaggacaaggaau

SEQ ID NO: 2584933 - RNA, 19 nt, Homo sapiens
  misc_RNA (1)...(19): siRNA sense strand
uccaaagucaggugaaaua

SEQ ID NO: 2584934 - RNA, 19 nt, Homo sapiens
  misc_RNA (1)...(19): siRNA sense strand
acaagaaggacuuagaaaa

SEQ ID NO: 2584935 - RNA, 19 nt, Homo sapiens
  misc_RNA (1)...(19): siRNA sense strand
aagaugaagcagagaagau

SEQ ID NO: 2584936 - RNA, 19 nt, Homo sapiens
  misc_RNA (1)...(19): siRNA sense strand
agaucgaacgagugaagaa

SEQ ID NO: 2584937 - RNA, 19 nt, Homo sapiens
  misc_RNA (1)...(19): siRNA sense strand
agauaggggaagaagaaaa

SEQ ID NO: 2584938 - RNA, 19 nt, Homo sapiens
  misc_RNA (1)...(19): siRNA sense strand
augcagaugcuguggaaca

SEQ ID NO: 2584939 - RNA, 19 nt, Homo sapiens
  misc_RNA (1)...(19): siRNA sense strand
cuugauguccagagagcua

SEQ ID NO: 2584940 - RNA, 19 nt, Homo sapiens
  misc_RNA (1)...(19): siRNA sense strand
caagaaggacuuagaaaau

SEQ ID NO: 2584941 - RNA, 19 nt, Homo sapiens
  misc_RNA (1)...(19): siRNA sense strand
aaaucuauagccagagaaa

SEQ ID NO: 2584942 - RNA, 19 nt, Homo sapiens
  misc_RNA (1)...(19): siRNA sense strand
gagcaaaacuacaaggcca

SEQ ID NO: 2584943 - RNA, 19 nt, Homo sapiens
  misc_RNA (1)...(19): siRNA sense strand
cagaugaaagguagaccaa

SEQ ID NO: 2584944 - RNA, 19 nt, Homo sapiens
  misc_RNA (1)...(19): siRNA sense strand
cuccagaacuaaagagagu

SEQ ID NO: 2584945 - RNA, 19 nt, Homo sapiens
  misc_RNA (1)...(19): siRNA sense strand
gcacggaacucauuagcga

SEQ ID NO: 2584946 - RNA, 19 nt, Homo sapiens
  misc_RNA (1)...(19): siRNA sense strand
ccguuauaaagaagaguuu

SEQ ID NO: 2584947 - RNA, 19 nt, Homo sapiens
  misc_RNA (1)...(19): siRNA sense strand
aguauaaagaugaagcaga

SEQ ID NO: 2584948 - RNA, 19 nt, Homo sapiens
  misc_RNA (1)...(19): siRNA sense strand
ccggagauagagagaguga

SEQ ID NO: 2584949 - RNA, 19 nt, Homo sapiens
  misc_RNA (1)...(19): siRNA sense strand
gaaaauauuagcucgguaa

SEQ ID NO: 2584950 - RNA, 19 nt, Homo sapiens
  misc_RNA (1)...(19): siRNA sense strand
aagaaaggacaaggaauaa

SEQ ID NO: 2584951 - RNA, 19 nt, Homo sapiens
  misc_RNA (1)...(19): siRNA sense strand
aggacaaggaauaaugaau

SEQ ID NO: 2584952 - RNA, 19 nt, Homo sapiens
  misc_RNA (1)...(19): siRNA sense strand
agauaaaagggaaaggaau

SEQ ID NO: 2584953 - RNA, 19 nt, Homo sapiens
  misc_RNA (1)...(19): siRNA sense strand
gggaagaagaaaaugaaga

SEQ ID NO: 2584954 - RNA, 19 nt, Homo sapiens
  misc_RNA (1)...(19): siRNA sense strand
gggcaaaagaaaaccagaa

SEQ ID NO: 2584955 - RNA, 19 nt, Homo sapiens
  misc_RNA (1)...(19): siRNA sense strand
gcaccagaccaguguguca

SEQ ID NO: 2584956 - RNA, 19 nt, Homo sapiens
  misc_RNA (1)...(19): siRNA sense strand
aaauggaaagagugaagaa

SEQ ID NO: 2584957 - RNA, 19 nt, Homo sapiens
  misc_RNA (1)...(19): siRNA sense strand
agaagaaaagauaggggaa

SEQ ID NO: 2584958 - RNA, 19 nt, Homo sapiens
  misc_RNA (1)...(19): siRNA sense strand
gaaagauagcccagagauc

SEQ ID NO: 2584959 - RNA, 19 nt, Homo sapiens
  misc_RNA (1)...(19): siRNA sense strand
gcaaaagaaaaccagaaaa

SEQ ID NO: 2584960 - RNA, 19 nt, Homo sapiens
  misc_RNA (1)...(19): siRNA sense strand
gagacauguuaaagaagca

SEQ ID NO: 2584961 - RNA, 19 nt, Homo sapiens
  misc_RNA (1)...(19): siRNA sense strand
auacaaaggcaccauuaaa

SEQ ID NO: 2584962 - RNA, 19 nt, Homo sapiens
  misc_RNA (1)...(19): siRNA sense strand
gaaauuaaagggaaaggga

SEQ ID NO: 2584963 - RNA, 19 nt, Homo sapiens
  misc_RNA (1)...(19): siRNA sense strand
gccagaaacaauacaagaa

SEQ ID NO: 2584964 - RNA, 19 nt, Homo sapiens
  misc_RNA (1)...(19): siRNA sense strand
cagaauauuaguucaguga

SEQ ID NO: 2584965 - RNA, 19 nt, Homo sapiens
  misc_RNA (1)...(19): siRNA sense strand
aagaugaaacugaagaaga

SEQ ID NO: 2584966 - RNA, 19 nt, Homo sapiens
  misc_RNA (1)...(19): siRNA sense strand
aggaaugcucccagcgaau

SEQ ID NO: 2584967 - RNA, 19 nt, Homo sapiens
  misc_RNA (1)...(19): siRNA sense strand
ccaagaaggcugcagagau

SEQ ID NO: 2584968 - RNA, 19 nt, Homo sapiens
  misc_RNA (1)...(19): siRNA sense strand
guauaaagaugaagcagag

SEQ ID NO: 2584969 - RNA, 19 nt, Homo sapiens
  misc_RNA (1)...(19): siRNA sense strand
aguugaaagcugagaaaga

SEQ ID NO: 2584970 - RNA, 19 nt, Homo sapiens
  misc_RNA (1)...(19): siRNA sense strand
uguagauggcagaggcaaa

SEQ ID NO: 2584971 - RNA, 19 nt, Homo sapiens
  misc_RNA (1)...(19): siRNA sense strand
cgugaagaaggcagauaaa

SEQ ID NO: 2584972 - RNA, 19 nt, Homo sapiens
  misc_RNA (1)...(19): siRNA sense strand
ccaucauucuggagccaaa

SEQ ID NO: 2584973 - RNA, 19 nt, Homo sapiens
  misc_RNA (1)...(19): siRNA sense strand
auaaaguggagcagaggaa

SEQ ID NO: 2584974 - RNA, 19 nt, Homo sapiens
  misc_RNA (1)...(19): siRNA sense strand
augacaaguuagagaagau

SEQ ID NO: 2584975 - RNA, 19 nt, Homo sapiens
  misc_RNA (1)...(19): siRNA sense strand
uggcagaggcaaagcaaca

SEQ ID NO: 2584976 - RNA, 19 nt, Homo sapiens
  misc_RNA (1)...(19): siRNA sense strand
ccgugaagaaggcagauaa

SEQ ID NO: 2584977 - RNA, 19 nt, Homo sapiens
  misc_RNA (1)...(19): siRNA sense strand
agauuggaggcgagaggua

SEQ ID NO: 2584978 - RNA, 19 nt, Homo sapiens
  misc_RNA (1)...(19): siRNA sense strand
gaggaucugaagaggacaa

SEQ ID NO: 2584979 - RNA, 19 nt, Homo sapiens
  misc_RNA (1)...(19): siRNA sense strand
ggguacaugguauggagua

SEQ ID NO: 2584980 - RNA, 19 nt, Homo sapiens
  misc_RNA (1)...(19): siRNA sense strand
gcuuauuguagauggcaga

SEQ ID NO: 2584981 - RNA, 19 nt, Homo sapiens
  misc_RNA (1)...(19): siRNA sense strand
cagauaaaguggagcagag

SEQ ID NO: 2584982 - RNA, 19 nt, Homo sapiens
  misc_RNA (1)...(19): siRNA sense strand
aggcaauuguugaugcuga

SEQ ID NO: 2584983 - RNA, 19 nt, Homo sapiens
  misc_RNA (1)...(19): siRNA sense strand
ccuauguggaggaagguuu

SEQ ID NO: 2584984 - RNA, 19 nt, Homo sapiens
  misc_RNA (1)...(19): siRNA sense strand
acaucaacaacgaggacau

SEQ ID NO: 2584985 - RNA, 19 nt, Homo sapiens
  misc_RNA (1)...(19): siRNA sense strand
aguuuauggaggagacaga

SEQ ID NO: 2584986 - RNA, 19 nt, Homo sapiens
  misc_RNA (1)...(19): siRNA sense strand
gcugaggcuguaagaacua

SEQ ID NO: 2584987 - RNA, 19 nt, Homo sapiens
  misc_RNA (1)...(19): siRNA sense strand
aauccagaccagugugaau

SEQ ID NO: 2584988 - RNA, 19 nt, Homo sapiens
  misc_RNA (1)...(19): siRNA sense strand
aggcagauaaaguggagca

SEQ ID NO: 2584989 - RNA, 19 nt, Homo sapiens
  misc_RNA (1)...(19): siRNA sense strand
guugaggauuaucaggcaa

SEQ ID NO: 2584990 - RNA, 19 nt, Homo sapiens
  misc_RNA (1)...(19): siRNA sense strand
agacauugccaaaucccaa

SEQ ID NO: 2584991 - RNA, 19 nt, Homo sapiens
  misc_RNA (1)...(19): siRNA sense strand
uggcaguuaacaagaucaa

SEQ ID NO: 2584992 - RNA, 19 nt, Homo sapiens
  misc_RNA (1)...(19): siRNA sense strand
ccgagcaguuuauggagga

SEQ ID NO: 2584993 - RNA, 19 nt, Homo sapiens
  misc_RNA (1)...(19): siRNA sense strand
cagcuauggugcggaucaa

SEQ ID NO: 2584994 - RNA, 19 nt, Homo sapiens
  misc_RNA (1)...(19): siRNA sense strand
cgaugugaagacagacaaa

SEQ ID NO: 2584995 - RNA, 19 nt, Homo sapiens
  misc_RNA (1)...(19): siRNA sense strand
gaggcagcguucagggaga

SEQ ID NO: 2584996 - RNA, 19 nt, Homo sapiens
  misc_RNA (1)...(19): siRNA sense strand
cuggcaaagucgaugugaa

SEQ ID NO: 2584997 - RNA, 19 nt, Homo sapiens
  misc_RNA (1)...(19): siRNA sense strand
aagacagacaaaugggauu

SEQ ID NO: 2584998 - RNA, 19 nt, Homo sapiens
  misc_RNA (1)...(19): siRNA sense strand
gggagauuacuauggagau

SEQ ID NO: 2584999 - RNA, 19 nt, Homo sapiens
  misc_RNA (1)...(19): siRNA sense strand
aagucgaugugaagacaga

SEQ ID NO: 2585000 - RNA, 19 nt, Homo sapiens
  misc_RNA (1)...(19): siRNA sense strand
gugcaauggacaugccuca

SEQ ID NO: 2585001 - RNA, 19 nt, Homo sapiens
  misc_RNA (1)...(19): siRNA sense strand
ggcaagaccugcaaccaga

SEQ ID NO: 2585002 - RNA, 19 nt, Homo sapiens
  misc_RNA (1)...(19): siRNA sense strand
gggcaaggcuuuugagcug

SEQ ID NO: 2585003 - RNA, 19 nt, Homo sapiens
  misc_RNA (1)...(19): siRNA sense strand
gggagggcuucuaucgaga

SEQ ID NO: 2585004 - RNA, 19 nt, Homo sapiens
  misc_RNA (1)...(19): siRNA sense strand
acgaaauccuucagggaaa

SEQ ID NO: 2585005 - RNA, 19 nt, Homo sapiens
  misc_RNA (1)...(19): siRNA sense strand
aggcagagcagaugggcaa

SEQ ID NO: 2585006 - RNA, 19 nt, Homo sapiens
  misc_RNA (1)...(19): siRNA sense strand
gagccaagggcaaggcaaa

SEQ ID NO: 2585007 - RNA, 19 nt, Homo sapiens
  misc_RNA (1)...(19): siRNA sense strand
agguggaagaacugaguaa

SEQ ID NO: 2585008 - RNA, 19 nt, Homo sapiens
  misc_RNA (1)...(19): siRNA sense strand
cugaagagggacagcaaau

SEQ ID NO: 2585009 - RNA, 19 nt, Homo sapiens
  misc_RNA (1)...(19): siRNA sense strand
cgggagggaggcugagaaa

SEQ ID NO: 2585010 - RNA, 19 nt, Homo sapiens
  misc_RNA (1)...(19): siRNA sense strand
ccaagaagcagcagaacca

SEQ ID NO: 2585011 - RNA, 19 nt, Homo sapiens
  misc_RNA (1)...(19): siRNA sense strand
gagcagcugcagaaggaaa

SEQ ID NO: 2585012 - RNA, 19 nt, Homo sapiens
  misc_RNA (1)...(19): siRNA sense strand
cuugaagagaagaacgaaa

SEQ ID NO: 2585013 - RNA, 19 nt, Homo sapiens
  misc_RNA (1)...(19): siRNA sense strand
gcaccaagguacaagacca

SEQ ID NO: 2585014 - RNA, 19 nt, Homo sapiens
  misc_RNA (1)...(19): siRNA sense strand
aggcugaagaugaguggaa

SEQ ID NO: 2585015 - RNA, 19 nt, Homo sapiens
  misc_RNA (1)...(19): siRNA sense strand
gagaagagccagauggauc

SEQ ID NO: 2585016 - RNA, 19 nt, Homo sapiens
  misc_RNA (1)...(19): siRNA sense strand
ccaagaagcuagaugugga

SEQ ID NO: 2585017 - RNA, 19 nt, Homo sapiens
  misc_RNA (1)...(19): siRNA sense strand
gagcgugggcagcaggaaa

SEQ ID NO: 2585018 - RNA, 19 nt, Homo sapiens
  misc_RNA (1)...(19): siRNA sense strand
cugcagaugcccuggaaga

SEQ ID NO: 2585019 - RNA, 19 nt, Homo sapiens
  misc_RNA (1)...(19): siRNA sense strand
guggaagaacugaguaaga

SEQ ID NO: 2585020 - RNA, 19 nt, Homo sapiens
  misc_RNA (1)...(19): siRNA sense strand
ggcccagguugcagagcua

SEQ ID NO: 2585021 - RNA, 19 nt, Homo sapiens
  misc_RNA (1)...(19): siRNA sense strand
aggcagagacagccagcaa

SEQ ID NO: 2585022 - RNA, 19 nt, Homo sapiens
  misc_RNA (1)...(19): siRNA sense strand
gggcgcaaacagagcacua

SEQ ID NO: 2585023 - RNA, 19 nt, Homo sapiens
  misc_RNA (1)...(19): siRNA sense strand
aggagaagguggcaggcau

SEQ ID NO: 2585024 - RNA, 19 nt, Homo sapiens
  misc_RNA (1)...(19): siRNA sense strand
gagagaaguaauagggaug

SEQ ID NO: 2585025 - RNA, 19 nt, Homo sapiens
  misc_RNA (1)...(19): siRNA sense strand
ccaaagagaagcaggccca

SEQ ID NO: 2585026 - RNA, 19 nt, Homo sapiens
  misc_RNA (1)...(19): siRNA sense strand
cggagaagcaggaggcaac

SEQ ID NO: 2585027 - RNA, 19 nt, Homo sapiens
  misc_RNA (1)...(19): siRNA sense strand
cugccaagcuggagauucu

SEQ ID NO: 2585028 - RNA, 19 nt, Homo sapiens
  misc_RNA (1)...(19): siRNA sense strand
gcauagaaucccacagcga

SEQ ID NO: 2585029 - RNA, 19 nt, Homo sapiens
  misc_RNA (1)...(19): siRNA sense strand
aggaguggcuagagaagca

SEQ ID NO: 2585030 - RNA, 19 nt, Homo sapiens
  misc_RNA (1)...(19): siRNA sense strand
gcaggugagcagcaggaaa

SEQ ID NO: 2585031 - RNA, 19 nt, Homo sapiens
  misc_RNA (1)...(19): siRNA sense strand
aggcugggcugaagaccaa

SEQ ID NO: 2585032 - RNA, 19 nt, Homo sapiens
  misc_RNA (1)...(19): siRNA sense strand
agaaggugcuagagggauc

SEQ ID NO: 2585033 - RNA, 19 nt, Homo sapiens
  misc_RNA (1)...(19): siRNA sense strand
augaggaccuagagaacuu

SEQ ID NO: 2585034 - RNA, 19 nt, Homo sapiens
  misc_RNA (1)...(19): siRNA sense strand
ugagagaaguaauagggau

SEQ ID NO: 2585035 - RNA, 19 nt, Homo sapiens
  misc_RNA (1)...(19): siRNA sense strand
agcauaagcgggaacgaaa

SEQ ID NO: 2585036 - RNA, 19 nt, Homo sapiens
  misc_RNA (1)...(19): siRNA sense strand
ggaacagcuggcuaagaaa

SEQ ID NO: 2585037 - RNA, 19 nt, Homo sapiens
  misc_RNA (1)...(19): siRNA sense strand
gggaaaaguauguccaaga

SEQ ID NO: 2585038 - RNA, 19 nt, Homo sapiens
  misc_RNA (1)...(19): siRNA sense strand
ggguagagaugcuggagac

SEQ ID NO: 2585039 - RNA, 19 nt, Homo sapiens
  misc_RNA (1)...(19): siRNA sense strand
cagcuggcuaagaaagaaa

SEQ ID NO: 2585040 - RNA, 19 nt, Homo sapiens
  misc_RNA (1)...(19): siRNA sense strand
uggcagagcaggagcgaac

SEQ ID NO: 2585041 - RNA, 19 nt, Homo sapiens
  misc_RNA (1)...(19): siRNA sense strand
gccggaagguggaggaacu

SEQ ID NO: 2585042 - RNA, 19 nt, Homo sapiens
  misc_RNA (1)...(19): siRNA sense strand
aaagcaacugagaaagaaa

SEQ ID NO: 2585043 - RNA, 19 nt, Homo sapiens
  misc_RNA (1)...(19): siRNA sense strand
guaugaggauagccagcaa

SEQ ID NO: 2585044 - RNA, 19 nt, Homo sapiens
  misc_RNA (1)...(19): siRNA sense strand
aggaagagaggcagaaacu

SEQ ID NO: 2585045 - RNA, 19 nt, Homo sapiens
  misc_RNA (1)...(19): siRNA sense strand
agggcaaggcaaagcacua

SEQ ID NO: 2585046 - RNA, 19 nt, Homo sapiens
  misc_RNA (1)...(19): siRNA sense strand
ugacggaggagcacagcaa

SEQ ID NO: 2585047 - RNA, 19 nt, Homo sapiens
  misc_RNA (1)...(19): siRNA sense strand
uugaagagaagaacgaaau

SEQ ID NO: 2585048 - RNA, 19 nt, Homo sapiens
  misc_RNA (1)...(19): siRNA sense strand
agaaagaaaggguggccca

SEQ ID NO: 2585049 - RNA, 19 nt, Homo sapiens
  misc_RNA (1)...(19): siRNA sense strand
gcggagaagcaggaggcaa

SEQ ID NO: 2585050 - RNA, 19 nt, Homo sapiens
  misc_RNA (1)...(19): siRNA sense strand
aggcacuggagaaggagaa

SEQ ID NO: 2585051 - RNA, 19 nt, Homo sapiens
  misc_RNA (1)...(19): siRNA sense strand
agauaagccggcagcagaa

SEQ ID NO: 2585052 - RNA, 19 nt, Homo sapiens
  misc_RNA (1)...(19): siRNA sense strand
cuauggagcgggaggcaga

SEQ ID NO: 2585053 - RNA, 19 nt, Homo sapiens
  misc_RNA (1)...(19): siRNA sense strand
agggccaguuagaggagaa

SEQ ID NO: 2585054 - RNA, 19 nt, Homo sapiens
  misc_RNA (1)...(19): siRNA sense strand
accaagagcugcaggagca

SEQ ID NO: 2585055 - RNA, 19 nt, Homo sapiens
  misc_RNA (1)...(19): siRNA sense strand
agagaacuuccuacagaaa

SEQ ID NO: 2585056 - RNA, 19 nt, Homo sapiens
  misc_RNA (1)...(19): siRNA sense strand
aggagcugcaggaggcaaa

SEQ ID NO: 2585057 - RNA, 19 nt, Homo sapiens
  misc_RNA (1)...(19): siRNA sense strand
agguacaagaccacagcaa

SEQ ID NO: 2585058 - RNA, 19 nt, Homo sapiens
  misc_RNA (1)...(19): siRNA sense strand
ggaccaugaggacgggcua

SEQ ID NO: 2585059 - RNA, 19 nt, Homo sapiens
  misc_RNA (1)...(19): siRNA sense strand
gaacgaaauccuucaggga

SEQ ID NO: 2585060 - RNA, 19 nt, Homo sapiens
  misc_RNA (1)...(19): siRNA sense strand
gggagagcaaggaguugaa

SEQ ID NO: 2585061 - RNA, 19 nt, Homo sapiens
  misc_RNA (1)...(19): siRNA sense strand
gcagagacagccagcaaca

SEQ ID NO: 2585062 - RNA, 19 nt, Homo sapiens
  misc_RNA (1)...(19): siRNA sense strand
ccagcaaggugcagcagca

SEQ ID NO: 2585063 - RNA, 19 nt, Homo sapiens
  misc_RNA (1)...(19): siRNA sense strand
ggcuaaaccuuaaugagga

SEQ ID NO: 2585064 - RNA, 19 nt, Homo sapiens
  misc_RNA (1)...(19): siRNA sense strand
agaugagacggcugaagaa

SEQ ID NO: 2585065 - RNA, 19 nt, Homo sapiens
  misc_RNA (1)...(19): siRNA sense strand
ccgugaagcaacugaagga

SEQ ID NO: 2585066 - RNA, 19 nt, Homo sapiens
  misc_RNA (1)...(19): siRNA sense strand
ggaaaccaucggaggcaaa

SEQ ID NO: 2585067 - RNA, 19 nt, Homo sapiens
  misc_RNA (1)...(19): siRNA sense strand
gcauggagaaagggaguaa

SEQ ID NO: 2585068 - RNA, 19 nt, Homo sapiens
  misc_RNA (1)...(19): siRNA sense strand
agggagaaacggugcgauu

SEQ ID NO: 2585069 - RNA, 19 nt, Homo sapiens
  misc_RNA (1)...(19): siRNA sense strand
gagacacacccgugaggaa

SEQ ID NO: 2585070 - RNA, 19 nt, Homo sapiens
  misc_RNA (1)...(19): siRNA sense strand
aguaaugaggcuugggaca

SEQ ID NO: 2585071 - RNA, 19 nt, Homo sapiens
  misc_RNA (1)...(19): siRNA sense strand
acuuguaagaacugguaua

SEQ ID NO: 2585072 - RNA, 19 nt, Homo sapiens
  misc_RNA (1)...(19): siRNA sense strand
ggcaaauacuggaaaccau

SEQ ID NO: 2585073 - RNA, 19 nt, Homo sapiens
  misc_RNA (1)...(19): siRNA sense strand
uagaagacgauuaagggaa

SEQ ID NO: 2585074 - RNA, 19 nt, Homo sapiens
  misc_RNA (1)...(19): siRNA sense strand
cuauaaacgccaacaauca

SEQ ID NO: 2585075 - RNA, 19 nt, Homo sapiens
  misc_RNA (1)...(19): siRNA sense strand
gguucuagaagacgauuaa

SEQ ID NO: 2585076 - RNA, 19 nt, Homo sapiens
  misc_RNA (1)...(19): siRNA sense strand
auaugagaauggaaggaau

SEQ ID NO: 2585077 - RNA, 19 nt, Homo sapiens
  misc_RNA (1)...(19): siRNA sense strand
ggacauuauuugugccaac

SEQ ID NO: 2585078 - RNA, 19 nt, Homo sapiens
  misc_RNA (1)...(19): siRNA sense strand
auaagagaauguugaccaa

SEQ ID NO: 2585079 - RNA, 19 nt, Homo sapiens
  misc_RNA (1)...(19): siRNA sense strand
aaacaagauaagcgcuuua

SEQ ID NO: 2585080 - RNA, 19 nt, Homo sapiens
  misc_RNA (1)...(19): siRNA sense strand
cugaagugauccauggaga

SEQ ID NO: 2585081 - RNA, 19 nt, Homo sapiens
  misc_RNA (1)...(19): siRNA sense strand
aguucaagguucuagaaga

SEQ ID NO: 2585082 - RNA, 19 nt, Homo sapiens
  misc_RNA (1)...(19): siRNA sense strand
gggaguaagcaagggagaa

SEQ ID NO: 2585083 - RNA, 19 nt, Homo sapiens
  misc_RNA (1)...(19): siRNA sense strand
cagacacaccuguuggaaa

SEQ ID NO: 2585084 - RNA, 19 nt, Homo sapiens
  misc_RNA (1)...(19): siRNA sense strand
agguggagaaacagaagaa

SEQ ID NO: 2585085 - RNA, 19 nt, Homo sapiens
  misc_RNA (1)...(19): siRNA sense strand
uggagaaacagaagaaacu

SEQ ID NO: 2585086 - RNA, 19 nt, Homo sapiens
  misc_RNA (1)...(19): siRNA sense strand
auggagugccuguggaaau

SEQ ID NO: 2585087 - RNA, 19 nt, Homo sapiens
  misc_RNA (1)...(19): siRNA sense strand
aaagacugcuucagggaga

SEQ ID NO: 2585088 - RNA, 19 nt, Homo sapiens
  misc_RNA (1)...(19): siRNA sense strand
caaacaaguuauugagcug

SEQ ID NO: 2585089 - RNA, 19 nt, Homo sapiens
  misc_RNA (1)...(19): siRNA sense strand
augaucaacugcuggaaau

SEQ ID NO: 2585090 - RNA, 19 nt, Homo sapiens
  misc_RNA (1)...(19): siRNA sense strand
aaaagagacacgagaagaa

SEQ ID NO: 2585091 - RNA, 19 nt, Homo sapiens
  misc_RNA (1)...(19): siRNA sense strand
guucaagguucuagaagac

SEQ ID NO: 2585092 - RNA, 19 nt, Homo sapiens
  misc_RNA (1)...(19): siRNA sense strand
uacuggagguggagaaaca

SEQ ID NO: 2585093 - RNA, 19 nt, Homo sapiens
  misc_RNA (1)...(19): siRNA sense strand
gaauguugaccaaggacuu

SEQ ID NO: 2585094 - RNA, 19 nt, Homo sapiens
  misc_RNA (1)...(19): siRNA sense strand
caguauaacaguaaaugga

SEQ ID NO: 2585095 - RNA, 19 nt, Homo sapiens
  misc_RNA (1)...(19): siRNA sense strand
ugaggaaguugcaagccaa

SEQ ID NO: 2585096 - RNA, 19 nt, Homo sapiens
  misc_RNA (1)...(19): siRNA sense strand
gguccuaauuccugauucu

SEQ ID NO: 2585097 - RNA, 19 nt, Homo sapiens
  misc_RNA (1)...(19): siRNA sense strand
ucugauauccguagagguu

SEQ ID NO: 2585098 - RNA, 19 nt, Homo sapiens
  misc_RNA (1)...(19): siRNA sense strand
cauugaagguggugauggu

SEQ ID NO: 2585099 - RNA, 19 nt, Homo sapiens
  misc_RNA (1)...(19): siRNA sense strand
caaauaauggugugaucca

SEQ ID NO: 2585100 - RNA, 19 nt, Homo sapiens
  misc_RNA (1)...(19): siRNA sense strand
gaaaauucaugcauggaga

SEQ ID NO: 2585101 - RNA, 19 nt, Homo sapiens
  misc_RNA (1)...(19): siRNA sense strand
auggagagccaauuauuaa

SEQ ID NO: 2585102 - RNA, 19 nt, Homo sapiens
  misc_RNA (1)...(19): siRNA sense strand
agguggugauggucauuua

SEQ ID NO: 2585103 - RNA, 19 nt, Homo sapiens
  misc_RNA (1)...(19): siRNA sense strand
gugaggaaguugcaagcca

SEQ ID NO: 2585104 - RNA, 19 nt, Homo sapiens
  misc_RNA (1)...(19): siRNA sense strand
ucaucaagccagcagagaa

SEQ ID NO: 2585105 - RNA, 19 nt, Homo sapiens
  misc_RNA (1)...(19): siRNA sense strand
gaaucugacaucaugacaa

SEQ ID NO: 2585106 - RNA, 19 nt, Homo sapiens
  misc_RNA (1)...(19): siRNA sense strand
ugguguaauucauguugua

SEQ ID NO: 2585107 - RNA, 19 nt, Homo sapiens
  misc_RNA (1)...(19): siRNA sense strand
agacacgagaagaacgaau

SEQ ID NO: 2585108 - RNA, 19 nt, Homo sapiens
  misc_RNA (1)...(19): siRNA sense strand
guuaauugugcucgaauca

SEQ ID NO: 2585109 - RNA, 19 nt, Homo sapiens
  misc_RNA (1)...(19): siRNA sense strand
gcuggaaggaaauacaauu

SEQ ID NO: 2585110 - RNA, 19 nt, Homo sapiens
  misc_RNA (1)...(19): siRNA sense strand
cggugacaguauaacagua

SEQ ID NO: 2585111 - RNA, 19 nt, Homo sapiens
  misc_RNA (1)...(19): siRNA sense strand
agauaggaugugacgguga

SEQ ID NO: 2585112 - RNA, 19 nt, Homo sapiens
  misc_RNA (1)...(19): siRNA sense strand
agggaguaagcaagggaga

SEQ ID NO: 2585113 - RNA, 19 nt, Homo sapiens
  misc_RNA (1)...(19): siRNA sense strand
cugcagaaucacauauuga

SEQ ID NO: 2585114 - RNA, 19 nt, Homo sapiens
  misc_RNA (1)...(19): siRNA sense strand
acauauuccgcgagaucau

SEQ ID NO: 2585115 - RNA, 19 nt, Homo sapiens
  misc_RNA (1)...(19): siRNA sense strand
caaaagaaucugacaucau

SEQ ID NO: 2585116 - RNA, 19 nt, Homo sapiens
  misc_RNA (1)...(19): siRNA sense strand
caugacaacaaauggugua

SEQ ID NO: 2585117 - RNA, 19 nt, Homo sapiens
  misc_RNA (1)...(19): siRNA sense strand
acugaaggacccacacuaa

SEQ ID NO: 2585118 - RNA, 19 nt, Homo sapiens
  misc_RNA (1)...(19): siRNA sense strand
aggugaaacaauaacugaa

SEQ ID NO: 2585119 - RNA, 19 nt, Homo sapiens
  misc_RNA (1)...(19): siRNA sense strand
acgagaagaacgaaucauu

SEQ ID NO: 2585120 - RNA, 19 nt, Homo sapiens
  misc_RNA (1)...(19): siRNA sense strand
guggagaaacagaagaaac

SEQ ID NO: 2585121 - RNA, 19 nt, Homo sapiens
  misc_RNA (1)...(19): siRNA sense strand
caagacaaacagcggaaaa

SEQ ID NO: 2585122 - RNA, 19 nt, Homo sapiens
  misc_RNA (1)...(19): siRNA sense strand
ucgacucagacguggauaa

SEQ ID NO: 2585123 - RNA, 19 nt, Homo sapiens
  misc_RNA (1)...(19): siRNA sense strand
aggaaggugacuugguaaa

SEQ ID NO: 2585124 - RNA, 19 nt, Homo sapiens
  misc_RNA (1)...(19): siRNA sense strand
uauggaagaaacagggaaa

SEQ ID NO: 2585125 - RNA, 19 nt, Homo sapiens
  misc_RNA (1)...(19): siRNA sense strand
aagcugaauuugagguaca

SEQ ID NO: 2585126 - RNA, 19 nt, Homo sapiens
  misc_RNA (1)...(19): siRNA sense strand
aggaaaugaagaaagguau

SEQ ID NO: 2585127 - RNA, 19 nt, Homo sapiens
  misc_RNA (1)...(19): siRNA sense strand
ccguuuacuuuaagagcau

SEQ ID NO: 2585128 - RNA, 19 nt, Homo sapiens
  misc_RNA (1)...(19): siRNA sense strand
caggagagggcaaggccaa

SEQ ID NO: 2585129 - RNA, 19 nt, Homo sapiens
  misc_RNA (1)...(19): siRNA sense strand
agaagaaggaccaugaaaa

SEQ ID NO: 2585130 - RNA, 19 nt, Homo sapiens
  misc_RNA (1)...(19): siRNA sense strand
ucuaugagaaggaggguga

SEQ ID NO: 2585131 - RNA, 19 nt, Homo sapiens
  misc_RNA (1)...(19): siRNA sense strand
ucauuuaacugcacgccaa

SEQ ID NO: 2585132 - RNA, 19 nt, Homo sapiens
  misc_RNA (1)...(19): siRNA sense strand
aaguauaugcuguggaugu

SEQ ID NO: 2585133 - RNA, 19 nt, Homo sapiens
  misc_RNA (1)...(19): siRNA sense strand
cuuuaagagcauuugaaga

SEQ ID NO: 2585134 - RNA, 19 nt, Homo sapiens
  misc_RNA (1)...(19): siRNA sense strand
caugauuauggaagaaaca

SEQ ID NO: 2585135 - RNA, 19 nt, Homo sapiens
  misc_RNA (1)...(19): siRNA sense strand
ccucuaaacaguauggacu

SEQ ID NO: 2585136 - RNA, 19 nt, Homo sapiens
  misc_RNA (1)...(19): siRNA sense strand
cgacaucgccaacagggua

SEQ ID NO: 2585137 - RNA, 19 nt, Homo sapiens
  misc_RNA (1)...(19): siRNA sense strand
aggccaaggaugcaggaca

SEQ ID NO: 2585138 - RNA, 19 nt, Homo sapiens
  misc_RNA (1)...(19): siRNA sense strand
ugagaaaggugaugccaug

SEQ ID NO: 2585139 - RNA, 19 nt, Homo sapiens
  misc_RNA (1)...(19): siRNA sense strand
ucuacaagucugagaugga

SEQ ID NO: 2585140 - RNA, 19 nt, Homo sapiens
  misc_RNA (1)...(19): siRNA sense strand
gugagaaaggugaugccau

SEQ ID NO: 2585141 - RNA, 19 nt, Homo sapiens
  misc_RNA (1)...(19): siRNA sense strand
uugagguacaugaaguaua

SEQ ID NO: 2585142 - RNA, 19 nt, Homo sapiens
  misc_RNA (1)...(19): siRNA sense strand
aaggaaggugacuugguaa

SEQ ID NO: 2585143 - RNA, 19 nt, Homo sapiens
  misc_RNA (1)...(19): siRNA sense strand
agugaaugggcuagagaaa

SEQ ID NO: 2585144 - RNA, 19 nt, Homo sapiens
  misc_RNA (1)...(19): siRNA sense strand
agacguauggcgaggugaa

SEQ ID NO: 2585145 - RNA, 19 nt, Homo sapiens
  misc_RNA (1)...(19): siRNA sense strand
cggcacacucggucagcaa

SEQ ID NO: 2585146 - RNA, 19 nt, Homo sapiens
  misc_RNA (1)...(19): siRNA sense strand
gggacuacaagcaaggaga

SEQ ID NO: 2585147 - RNA, 19 nt, Homo sapiens
  misc_RNA (1)...(19): siRNA sense strand
ucagcaacauccugggcau

SEQ ID NO: 2585148 - RNA, 19 nt, Homo sapiens
  misc_RNA (1)...(19): siRNA sense strand
gcuaccagcugcagggaga

SEQ ID NO: 2585149 - RNA, 19 nt, Homo sapiens
  misc_RNA (1)...(19): siRNA sense strand
gcauugagauccaggugca

SEQ ID NO: 2585150 - RNA, 19 nt, Homo sapiens
  misc_RNA (1)...(19): siRNA sense strand
aggaggagauauugccaga

SEQ ID NO: 2585151 - RNA, 19 nt, Homo sapiens
  misc_RNA (1)...(19): siRNA sense strand
cuaugagggcuuugagcuu

SEQ ID NO: 2585152 - RNA, 19 nt, Homo sapiens
  misc_RNA (1)...(19): siRNA sense strand
cccugaaggaggaggagau

SEQ ID NO: 2585153 - RNA, 19 nt, Homo sapiens
  misc_RNA (1)...(19): siRNA sense strand
gcuuugagcuuaucggcga

SEQ ID NO: 2585154 - RNA, 19 nt, Homo sapiens
  misc_RNA (1)...(19): siRNA sense strand
caugcuuggagaaggacaa

SEQ ID NO: 2585155 - RNA, 19 nt, Homo sapiens
  misc_RNA (1)...(19): siRNA sense strand
agauauugaaugugcggga

SEQ ID NO: 2585156 - RNA, 19 nt, Homo sapiens
  misc_RNA (1)...(19): siRNA sense strand
ggagaggaggagacgacga

SEQ ID NO: 2585157 - RNA, 19 nt, Homo sapiens
  misc_RNA (1)...(19): siRNA sense strand
ucuccgagggcgaagggua

SEQ ID NO: 2585158 - RNA, 19 nt, Homo sapiens
  misc_RNA (1)...(19): siRNA sense strand
ucguauugcacuucaaaga

SEQ ID NO: 2585159 - RNA, 19 nt, Homo sapiens
  misc_RNA (1)...(19): siRNA sense strand
gcuaccagcugcagggaga

SEQ ID NO: 2585160 - RNA, 19 nt, Homo sapiens
  misc_RNA (1)...(19): siRNA sense strand
gcauugagauccaggugca

SEQ ID NO: 2585161 - RNA, 19 nt, Homo sapiens
  misc_RNA (1)...(19): siRNA sense strand
aggaggagauauugccaga

SEQ ID NO: 2585162 - RNA, 19 nt, Homo sapiens
  misc_RNA (1)...(19): siRNA sense strand
cuaugagggcuuugagcuu

SEQ ID NO: 2585163 - RNA, 19 nt, Homo sapiens
  misc_RNA (1)...(19): siRNA sense strand
cccugaaggaggaggagau

SEQ ID NO: 2585164 - RNA, 19 nt, Homo sapiens
  misc_RNA (1)...(19): siRNA sense strand
gcuuugagcuuaucggcga

SEQ ID NO: 2585165 - RNA, 19 nt, Homo sapiens
  misc_RNA (1)...(19): siRNA sense strand
caugcuuggagaaggacaa

SEQ ID NO: 2585166 - RNA, 19 nt, Homo sapiens
  misc_RNA (1)...(19): siRNA sense strand
agauauugaaugugcggga

SEQ ID NO: 2585167 - RNA, 19 nt, Homo sapiens
  misc_RNA (1)...(19): siRNA sense strand
ggagaggaggagacgacga

SEQ ID NO: 2585168 - RNA, 19 nt, Homo sapiens
  misc_RNA (1)...(19): siRNA sense strand
ucuccgagggcgaagggua

SEQ ID NO: 2585169 - RNA, 19 nt, Homo sapiens
  misc_RNA (1)...(19): siRNA sense strand
ucguauugcacuucaaaga

SEQ ID NO: 2585170 - RNA, 19 nt, Homo sapiens
  misc_RNA (1)...(19): siRNA sense strand
ccaaagaggagcuggccaa

SEQ ID NO: 2585171 - RNA, 19 nt, Homo sapiens
  misc_RNA (1)...(19): siRNA sense strand
gugugagaucaaagagaaa

SEQ ID NO: 2585172 - RNA, 19 nt, Homo sapiens
  misc_RNA (1)...(19): siRNA sense strand
ccuugaugccagacggaaa

SEQ ID NO: 2585173 - RNA, 19 nt, Homo sapiens
  misc_RNA (1)...(19): siRNA sense strand
uugaaagaauggugggcau

SEQ ID NO: 2585174 - RNA, 19 nt, Homo sapiens
  misc_RNA (1)...(19): siRNA sense strand
ggagaaauaugaacaggca

SEQ ID NO: 2585175 - RNA, 19 nt, Homo sapiens
  misc_RNA (1)...(19): siRNA sense strand
aguaaacaggccacagaaa

SEQ ID NO: 2585176 - RNA, 19 nt, Homo sapiens
  misc_RNA (1)...(19): siRNA sense strand
gugaagaagccaaagagga

SEQ ID NO: 2585177 - RNA, 19 nt, Homo sapiens
  misc_RNA (1)...(19): siRNA sense strand
acaagaagaacauuggcaa

SEQ ID NO: 2585178 - RNA, 19 nt, Homo sapiens
  misc_RNA (1)...(19): siRNA sense strand
aggaagaagccaaccucua

SEQ ID NO: 2585179 - RNA, 19 nt, Homo sapiens
  misc_RNA (1)...(19): siRNA sense strand
uggacgaggcgcaagcaaa

SEQ ID NO: 2585180 - RNA, 19 nt, Homo sapiens
  misc_RNA (1)...(19): siRNA sense strand
agucggagccaaugugcaa

SEQ ID NO: 2585181 - RNA, 19 nt, Homo sapiens
  misc_RNA (1)...(19): siRNA sense strand
uuggcaaguuucaggaaga

SEQ ID NO: 2585182 - RNA, 19 nt, Homo sapiens
  misc_RNA (1)...(19): siRNA sense strand
gcuaaugagacuggacaau

SEQ ID NO: 2585183 - RNA, 19 nt, Homo sapiens
  misc_RNA (1)...(19): siRNA sense strand
cggaaaaggcguaacuuca

SEQ ID NO: 2585184 - RNA, 19 nt, Homo sapiens
  misc_RNA (1)...(19): siRNA sense strand
aggcgcaagcaaagaaaca

SEQ ID NO: 2585185 - RNA, 19 nt, Homo sapiens
  misc_RNA (1)...(19): siRNA sense strand
ccgagaacagaguagaaca

SEQ ID NO: 2585186 - RNA, 19 nt, Homo sapiens
  misc_RNA (1)...(19): siRNA sense strand
gugcaaucacagguggaua

SEQ ID NO: 2585187 - RNA, 19 nt, Homo sapiens
  misc_RNA (1)...(19): siRNA sense strand
acaauaugcuuuuggcaga

SEQ ID NO: 2585188 - RNA, 19 nt, Homo sapiens
  misc_RNA (1)...(19): siRNA sense strand
agaaauaugaacaggcaug

SEQ ID NO: 2585189 - RNA, 19 nt, Homo sapiens
  misc_RNA (1)...(19): siRNA sense strand
gggcaucauccaucgaaaa

SEQ ID NO: 2585190 - RNA, 19 nt, Homo sapiens
  misc_RNA (1)...(19): siRNA sense strand
ugaagaagccaaagaggag

SEQ ID NO: 2585191 - RNA, 19 nt, Homo sapiens
  misc_RNA (1)...(19): siRNA sense strand
cauggaugcaccagagaca

SEQ ID NO: 2585192 - RNA, 19 nt, Homo sapiens
  misc_RNA (1)...(19): siRNA sense strand
agaaaauuccagaagaaga

SEQ ID NO: 2585193 - RNA, 19 nt, Homo sapiens
  misc_RNA (1)...(19): siRNA sense strand
cgacaaggugcugggccaa

SEQ ID NO: 2585194 - RNA, 19 nt, Homo sapiens
  misc_RNA (1)...(19): siRNA sense strand
ggguggaaauggaugggaa

SEQ ID NO: 2585195 - RNA, 19 nt, Homo sapiens
  misc_RNA (1)...(19): siRNA sense strand
gcguggaggaggugcugaa

SEQ ID NO: 2585196 - RNA, 19 nt, Homo sapiens
  misc_RNA (1)...(19): siRNA sense strand
gccugaagcgccugagcaa

SEQ ID NO: 2585197 - RNA, 19 nt, Homo sapiens
  misc_RNA (1)...(19): siRNA sense strand
guuuaaccaaagaggguga

SEQ ID NO: 2585198 - RNA, 19 nt, Homo sapiens
  misc_RNA (1)...(19): siRNA sense strand
cugcaggaguuugggaaga

SEQ ID NO: 2585199 - RNA, 19 nt, Homo sapiens
  misc_RNA (1)...(19): siRNA sense strand
gcuccgugacucuggacaa

SEQ ID NO: 2585200 - RNA, 19 nt, Homo sapiens
  misc_RNA (1)...(19): siRNA sense strand
ucguagugcaagagacuga

SEQ ID NO: 2585201 - RNA, 19 nt, Homo sapiens
  misc_RNA (1)...(19): siRNA sense strand
cugcaaguauggcgcguca

SEQ ID NO: 2585202 - RNA, 19 nt, Homo sapiens
  misc_RNA (1)...(19): siRNA sense strand
uacaauaccucuugggacu

SEQ ID NO: 2585203 - RNA, 19 nt, Homo sapiens
  misc_RNA (1)...(19): siRNA sense strand
cgggaagggaagcaugauu

SEQ ID NO: 2585204 - RNA, 19 nt, Homo sapiens
  misc_RNA (1)...(19): siRNA sense strand
gagaagauauuccagcuga

SEQ ID NO: 2585205 - RNA, 19 nt, Homo sapiens
  misc_RNA (1)...(19): siRNA sense strand
cuguguucguagugcaaga

SEQ ID NO: 2585206 - RNA, 19 nt, Homo sapiens
  misc_RNA (1)...(19): siRNA sense strand
guucguagugcaagagacu

SEQ ID NO: 2585207 - RNA, 19 nt, Homo sapiens
  misc_RNA (1)...(19): siRNA sense strand
gcugggaaagugauggaga

SEQ ID NO: 2585208 - RNA, 19 nt, Homo sapiens
  misc_RNA (1)...(19): siRNA sense strand
ccacccaugcccagaucaa

SEQ ID NO: 2585209 - RNA, 19 nt, Homo sapiens
  misc_RNA (1)...(19): siRNA sense strand
cagaggaagccaugugcca

SEQ ID NO: 2585210 - RNA, 19 nt, Homo sapiens
  misc_RNA (1)...(19): siRNA sense strand
gagugaagcuggacccaac

SEQ ID NO: 2585211 - RNA, 19 nt, Homo sapiens
  misc_RNA (1)...(19): siRNA sense strand
ugugaaaggauuuggagau

SEQ ID NO: 2585212 - RNA, 19 nt, Homo sapiens
  misc_RNA (1)...(19): siRNA sense strand
uccaaagaaaggugugaaa

SEQ ID NO: 2585213 - RNA, 19 nt, Homo sapiens
  misc_RNA (1)...(19): siRNA sense strand
aagaaaggugugaaaggau

SEQ ID NO: 2585214 - RNA, 19 nt, Homo sapiens
  misc_RNA (1)...(19): siRNA sense strand
gugugaaaggauuuggaga

SEQ ID NO: 2585215 - RNA, 19 nt, Homo sapiens
  misc_RNA (1)...(19): siRNA sense strand
aggauuuggagaugacauu

SEQ ID NO: 2585216 - RNA, 19 nt, Homo sapiens
  misc_RNA (1)...(19): siRNA sense strand
agaaaauggaugagcuuua

SEQ ID NO: 2585217 - RNA, 19 nt, Homo sapiens
  misc_RNA (1)...(19): siRNA sense strand
augaggaagaagugagcaa

SEQ ID NO: 2585218 - RNA, 19 nt, Homo sapiens
  misc_RNA (1)...(19): siRNA sense strand
agccagaagaagaggccaa

SEQ ID NO: 2585219 - RNA, 19 nt, Homo sapiens
  misc_RNA (1)...(19): siRNA sense strand
ccaggauggcagugauaau

SEQ ID NO: 2585220 - RNA, 19 nt, Homo sapiens
  misc_RNA (1)...(19): siRNA sense strand
cuaaaagagcuucuggaaa

SEQ ID NO: 2585221 - RNA, 19 nt, Homo sapiens
  misc_RNA (1)...(19): siRNA sense strand
ccagagugguggauggacu

SEQ ID NO: 2585222 - RNA, 19 nt, Homo sapiens
  misc_RNA (1)...(19): siRNA sense strand
agaaggaugcagaggagga

SEQ ID NO: 2585223 - RNA, 19 nt, Homo sapiens
  misc_RNA (1)...(19): siRNA sense strand
ggccaauggaagugagauc

SEQ ID NO: 2585224 - RNA, 19 nt, Homo sapiens
  misc_RNA (1)...(19): siRNA sense strand
ucucugaaaauuugggaaa

SEQ ID NO: 2585225 - RNA, 19 nt, Homo sapiens
  misc_RNA (1)...(19): siRNA sense strand
aagccaaagagcugcagaa

SEQ ID NO: 2585226 - RNA, 19 nt, Homo sapiens
  misc_RNA (1)...(19): siRNA sense strand
ccucagagaaaauagcaaa

SEQ ID NO: 2585227 - RNA, 19 nt, Homo sapiens
  misc_RNA (1)...(19): siRNA sense strand
gaagugagauccucgccaa

SEQ ID NO: 2585228 - RNA, 19 nt, Homo sapiens
  misc_RNA (1)...(19): siRNA sense strand
gaagaaggaugcagaggag

SEQ ID NO: 2585229 - RNA, 19 nt, Homo sapiens
  misc_RNA (1)...(19): siRNA sense strand
gagaagaguaggucgccca

SEQ ID NO: 2585230 - RNA, 19 nt, Homo sapiens
  misc_RNA (1)...(19): siRNA sense strand
ccaaagagcugcagaagcg

SEQ ID NO: 2585231 - RNA, 19 nt, Homo sapiens
  misc_RNA (1)...(19): siRNA sense strand
aagaagaggccaauggaag

SEQ ID NO: 2585232 - RNA, 19 nt, Homo sapiens
  misc_RNA (1)...(19): siRNA sense strand
agaaaauagcaaaccggaa

SEQ ID NO: 2585233 - RNA, 19 nt, Homo sapiens
  misc_RNA (1)...(19): siRNA sense strand
ucaugaagaaggaugcaga

SEQ ID NO: 2585234 - RNA, 19 nt, Homo sapiens
  misc_RNA (1)...(19): siRNA sense strand
gggacaaccgagagcguag

SEQ ID NO: 2585235 - RNA, 19 nt, Homo sapiens
  misc_RNA (1)...(19): siRNA sense strand
aagagcugcagaagcgaua

SEQ ID NO: 2585236 - RNA, 19 nt, Homo sapiens
  misc_RNA (1)...(19): siRNA sense strand
aggaggaggaggaggaaga

SEQ ID NO: 2585237 - RNA, 19 nt, Homo sapiens
  misc_RNA (1)...(19): siRNA sense strand
augacaucgaagaggauaa

SEQ ID NO: 2585238 - RNA, 19 nt, Homo sapiens
  misc_RNA (1)...(19): siRNA sense strand
caggucaaucaaagggaaa

SEQ ID NO: 2585239 - RNA, 19 nt, Homo sapiens
  misc_RNA (1)...(19): siRNA sense strand
aggugaaggagauggauga

SEQ ID NO: 2585240 - RNA, 19 nt, Homo sapiens
  misc_RNA (1)...(19): siRNA sense strand
acaacaagcugcaggcgga

SEQ ID NO: 2585241 - RNA, 19 nt, Homo sapiens
  misc_RNA (1)...(19): siRNA sense strand
aggaggaggaggaggagga

SEQ ID NO: 2585242 - RNA, 19 nt, Homo sapiens
  misc_RNA (1)...(19): siRNA sense strand
agguggagguggcgaagau

SEQ ID NO: 2585243 - RNA, 19 nt, Homo sapiens
  misc_RNA (1)...(19): siRNA sense strand
cggcauucggcuucugaaa

SEQ ID NO: 2585244 - RNA, 19 nt, Homo sapiens
  misc_RNA (1)...(19): siRNA sense strand
ugaaggagauggaugacga

SEQ ID NO: 2585245 - RNA, 19 nt, Homo sapiens
  misc_RNA (1)...(19): siRNA sense strand
cugcugggcccuuggacaa

SEQ ID NO: 2585246 - RNA, 19 nt, Homo sapiens
  misc_RNA (1)...(19): siRNA sense strand
cgaagaugauucaggaggu

SEQ ID NO: 2585247 - RNA, 19 nt, Homo sapiens
  misc_RNA (1)...(19): siRNA sense strand
cuaagguggagguggcgaa

SEQ ID NO: 2585248 - RNA, 19 nt, Homo sapiens
  misc_RNA (1)...(19): siRNA sense strand
ucaagaggcuagaggagcu

SEQ ID NO: 2585249 - RNA, 19 nt, Homo sapiens
  misc_RNA (1)...(19): siRNA sense strand
gcaggucaaucaaagggaa

SEQ ID NO: 2585250 - RNA, 19 nt, Homo sapiens
  misc_RNA (1)...(19): siRNA sense strand
ggacaaggguggaagcugg

SEQ ID NO: 2585251 - RNA, 19 nt, Homo sapiens
  misc_RNA (1)...(19): siRNA sense strand
acauuguguugaagaaagu

SEQ ID NO: 2585252 - RNA, 19 nt, Homo sapiens
  misc_RNA (1)...(19): siRNA sense strand
ccugaaaggaacagagaga

SEQ ID NO: 2585253 - RNA, 19 nt, Homo sapiens
  misc_RNA (1)...(19): siRNA sense strand
aggacuacauccagagcaa

SEQ ID NO: 2585254 - RNA, 19 nt, Homo sapiens
  misc_RNA (1)...(19): siRNA sense strand
ccaagaaacuaacacgcua

SEQ ID NO: 2585255 - RNA, 19 nt, Homo sapiens
  misc_RNA (1)...(19): siRNA sense strand
gagagaacgugauggagga

SEQ ID NO: 2585256 - RNA, 19 nt, Homo sapiens
  misc_RNA (1)...(19): siRNA sense strand
agaacgugauggaggacuu

SEQ ID NO: 2585257 - RNA, 19 nt, Homo sapiens
  misc_RNA (1)...(19): siRNA sense strand
augagaaggaacagcuuua

SEQ ID NO: 2585258 - RNA, 19 nt, Homo sapiens
  misc_RNA (1)...(19): siRNA sense strand
ugaaaggaacagagagaac

SEQ ID NO: 2585259 - RNA, 19 nt, Homo sapiens
  misc_RNA (1)...(19): siRNA sense strand
cuaugcagagauugagaaa

SEQ ID NO: 2585260 - RNA, 19 nt, Homo sapiens
  misc_RNA (1)...(19): siRNA sense strand
ccuguaaggaugagaagga

SEQ ID NO: 2585261 - RNA, 19 nt, Homo sapiens
  misc_RNA (1)...(19): siRNA sense strand
gcccaagcucuaaggaaau

SEQ ID NO: 2585262 - RNA, 19 nt, Homo sapiens
  misc_RNA (1)...(19): siRNA sense strand
cccuaugagcaguggaaga

SEQ ID NO: 2585263 - RNA, 19 nt, Homo sapiens
  misc_RNA (1)...(19): siRNA sense strand
gggaaagcaguuugcccaa

SEQ ID NO: 2585264 - RNA, 19 nt, Homo sapiens
  misc_RNA (1)...(19): siRNA sense strand
aggaaauaacagaccucaa

SEQ ID NO: 2585265 - RNA, 19 nt, Homo sapiens
  misc_RNA (1)...(19): siRNA sense strand
ucauggagcuggaacguca

SEQ ID NO: 2585266 - RNA, 19 nt, Homo sapiens
  misc_RNA (1)...(19): siRNA sense strand
ugaccuaugcagagauuga

SEQ ID NO: 2585267 - RNA, 19 nt, Homo sapiens
  misc_RNA (1)...(19): siRNA sense strand
guuugcacuucgagaucaa

SEQ ID NO: 2585268 - RNA, 19 nt, Homo sapiens
  misc_RNA (1)...(19): siRNA sense strand
aaggaaauuucuggaggaa

SEQ ID NO: 2585269 - RNA, 19 nt, Homo sapiens
  misc_RNA (1)...(19): siRNA sense strand
gggacaugauuuugaacuu

SEQ ID NO: 2585270 - RNA, 19 nt, Homo sapiens
  misc_RNA (1)...(19): siRNA sense strand
aguucaaucucuuggggaa

SEQ ID NO: 2585271 - RNA, 19 nt, Homo sapiens
  misc_RNA (1)...(19): siRNA sense strand
aagaaauguucaugggccu

SEQ ID NO: 2585272 - RNA, 19 nt, Homo sapiens
  misc_RNA (1)...(19): siRNA sense strand
uggauaaggacgcagauga

SEQ ID NO: 2585273 - RNA, 19 nt, Homo sapiens
  misc_RNA (1)...(19): siRNA sense strand
cgaaugucagagaagaaau

SEQ ID NO: 2585274 - RNA, 19 nt, Homo sapiens
  misc_RNA (1)...(19): siRNA sense strand
acagagagaacgugaugga

SEQ ID NO: 2585275 - RNA, 19 nt, Homo sapiens
  misc_RNA (1)...(19): siRNA sense strand
cggcauggagaaagcgagu

SEQ ID NO: 2585276 - RNA, 19 nt, Homo sapiens
  misc_RNA (1)...(19): siRNA sense strand
uaaggaaauuucuggagga

SEQ ID NO: 2585277 - RNA, 19 nt, Homo sapiens
  misc_RNA (1)...(19): siRNA sense strand
auggagaaagcgaguucaa

SEQ ID NO: 2585278 - RNA, 19 nt, Homo sapiens
  misc_RNA (1)...(19): siRNA sense strand
augcagagauugagaaacg

SEQ ID NO: 2585279 - RNA, 19 nt, Homo sapiens
  misc_RNA (1)...(19): siRNA sense strand
acgcagaugagcuaccaua

SEQ ID NO: 2585280 - RNA, 19 nt, Homo sapiens
  misc_RNA (1)...(19): siRNA sense strand
cguuaugauugguuugcca

SEQ ID NO: 2585281 - RNA, 19 nt, Homo sapiens
  misc_RNA (1)...(19): siRNA sense strand
cccaaaucuucgaauguca

SEQ ID NO: 2585282 - RNA, 19 nt, Homo sapiens
  misc_RNA (1)...(19): siRNA sense strand
augaggaggccaugaagau

SEQ ID NO: 2585283 - RNA, 19 nt, Homo sapiens
  misc_RNA (1)...(19): siRNA sense strand
ccucuguccaguucgaaua

SEQ ID NO: 2585284 - RNA, 19 nt, Homo sapiens
  misc_RNA (1)...(19): siRNA sense strand
cuacaaaguuaccuaccga

SEQ ID NO: 2585285 - RNA, 19 nt, Homo sapiens
  misc_RNA (1)...(19): siRNA sense strand
cagaagagcgagagggcaa

SEQ ID NO: 2585286 - RNA, 19 nt, Homo sapiens
  misc_RNA (1)...(19): siRNA sense strand
uugaagaauuggaggagaa

SEQ ID NO: 2585287 - RNA, 19 nt, Homo sapiens
  misc_RNA (1)...(19): siRNA sense strand
augauaaagucaagaguga

SEQ ID NO: 2585288 - RNA, 19 nt, Homo sapiens
  misc_RNA (1)...(19): siRNA sense strand
ucuaaaucaucgugaggaa

SEQ ID NO: 2585289 - RNA, 19 nt, Homo sapiens
  misc_RNA (1)...(19): siRNA sense strand
gggaaauguaugaacgaga

SEQ ID NO: 2585290 - RNA, 19 nt, Homo sapiens
  misc_RNA (1)...(19): siRNA sense strand
cauaugaggaagaucgaaa

SEQ ID NO: 2585291 - RNA, 19 nt, Homo sapiens
  misc_RNA (1)...(19): siRNA sense strand
gaaacaacuagaagagaca

SEQ ID NO: 2585292 - RNA, 19 nt, Homo sapiens
  misc_RNA (1)...(19): siRNA sense strand
cgucaagagaacuaugaua

SEQ ID NO: 2585293 - RNA, 19 nt, Homo sapiens
  misc_RNA (1)...(19): siRNA sense strand
agagaagagauguaugaaa

SEQ ID NO: 2585294 - RNA, 19 nt, Homo sapiens
  misc_RNA (1)...(19): siRNA sense strand
caaccaagaaauugaucaa

SEQ ID NO: 2585295 - RNA, 19 nt, Homo sapiens
  misc_RNA (1)...(19): siRNA sense strand
agacagguacagagaacua

SEQ ID NO: 2585296 - RNA, 19 nt, Homo sapiens
  misc_RNA (1)...(19): siRNA sense strand
acguuuggccuuagaauua

SEQ ID NO: 2585297 - RNA, 19 nt, Homo sapiens
  misc_RNA (1)...(19): siRNA sense strand
aaaggaaaucugugaacua

SEQ ID NO: 2585298 - RNA, 19 nt, Homo sapiens
  misc_RNA (1)...(19): siRNA sense strand
gguagucaccuuagagcaa

SEQ ID NO: 2585299 - RNA, 19 nt, Homo sapiens
  misc_RNA (1)...(19): siRNA sense strand
gggauaaugcuguggcuga

SEQ ID NO: 2585300 - RNA, 19 nt, Homo sapiens
  misc_RNA (1)...(19): siRNA sense strand
uagaauuagcagacacaaa

SEQ ID NO: 2585301 - RNA, 19 nt, Homo sapiens
  misc_RNA (1)...(19): siRNA sense strand
cuacagacgaagaaucaaa

SEQ ID NO: 2585302 - RNA, 19 nt, Homo sapiens
  misc_RNA (1)...(19): siRNA sense strand
cagaaagaugccagcaaau

SEQ ID NO: 2585303 - RNA, 19 nt, Homo sapiens
  misc_RNA (1)...(19): siRNA sense strand
cugugaacuacaagugaaa

SEQ ID NO: 2585304 - RNA, 19 nt, Homo sapiens
  misc_RNA (1)...(19): siRNA sense strand
acaugaugaacuagaacaa

SEQ ID NO: 2585305 - RNA, 19 nt, Homo sapiens
  misc_RNA (1)...(19): siRNA sense strand
gaaauguaugaacgagaaa

SEQ ID NO: 2585306 - RNA, 19 nt, Homo sapiens
  misc_RNA (1)...(19): siRNA sense strand
caaaagacgacuaaagcaa

SEQ ID NO: 2585307 - RNA, 19 nt, Homo sapiens
  misc_RNA (1)...(19): siRNA sense strand
cagcuuuacuacagacgaa

SEQ ID NO: 2585308 - RNA, 19 nt, Homo sapiens
  misc_RNA (1)...(19): siRNA sense strand
cguuaagaugcauaguaaa

SEQ ID NO: 2585309 - RNA, 19 nt, Homo sapiens
  misc_RNA (1)...(19): siRNA sense strand
aagaggaaacagcaagaaa

SEQ ID NO: 2585310 - RNA, 19 nt, Homo sapiens
  misc_RNA (1)...(19): siRNA sense strand
aagaauuggaggagaaacu

SEQ ID NO: 2585311 - RNA, 19 nt, Homo sapiens
  misc_RNA (1)...(19): siRNA sense strand
aaagaauauccuagcagaa

SEQ ID NO: 2585312 - RNA, 19 nt, Homo sapiens
  misc_RNA (1)...(19): siRNA sense strand
aggcuagagaagagaugua

SEQ ID NO: 2585313 - RNA, 19 nt, Homo sapiens
  misc_RNA (1)...(19): siRNA sense strand
gcaagaggaaacagcaaga

SEQ ID NO: 2585314 - RNA, 19 nt, Homo sapiens
  misc_RNA (1)...(19): siRNA sense strand
cugcagaaauugaaaauga

SEQ ID NO: 2585315 - RNA, 19 nt, Homo sapiens
  misc_RNA (1)...(19): siRNA sense strand
gcagcuaauugaacgaaaa

SEQ ID NO: 2585316 - RNA, 19 nt, Homo sapiens
  misc_RNA (1)...(19): siRNA sense strand
ccucaucagaagagcgaga

SEQ ID NO: 2585317 - RNA, 19 nt, Homo sapiens
  misc_RNA (1)...(19): siRNA sense strand
cugcaaaaggauaaagaau

SEQ ID NO: 2585318 - RNA, 19 nt, Homo sapiens
  misc_RNA (1)...(19): siRNA sense strand
ucgaaaugccucuagggaa

SEQ ID NO: 2585319 - RNA, 19 nt, Homo sapiens
  misc_RNA (1)...(19): siRNA sense strand
gagcagugauggcugaaaa

SEQ ID NO: 2585320 - RNA, 19 nt, Homo sapiens
  misc_RNA (1)...(19): siRNA sense strand
cuacaacuuaguacagaaa

SEQ ID NO: 2585321 - RNA, 19 nt, Homo sapiens
  misc_RNA (1)...(19): siRNA sense strand
cugcaagaggaaacagcaa

SEQ ID NO: 2585322 - RNA, 19 nt, Homo sapiens
  misc_RNA (1)...(19): siRNA sense strand
ugucaauuggaaugugaaa

SEQ ID NO: 2585323 - RNA, 19 nt, Homo sapiens
  misc_RNA (1)...(19): siRNA sense strand
agaggaaacagcaagaaau

SEQ ID NO: 2585324 - RNA, 19 nt, Homo sapiens
  misc_RNA (1)...(19): siRNA sense strand
ggagcuugacagaggccaa

SEQ ID NO: 2585325 - RNA, 19 nt, Homo sapiens
  misc_RNA (1)...(19): siRNA sense strand
ccaaaacaugugacagaaa

SEQ ID NO: 2585326 - RNA, 19 nt, Homo sapiens
  misc_RNA (1)...(19): siRNA sense strand
gcuaauugaacgaaaagaa

SEQ ID NO: 2585327 - RNA, 19 nt, Homo sapiens
  misc_RNA (1)...(19): siRNA sense strand
aguugacagaagagcaaua

SEQ ID NO: 2585328 - RNA, 19 nt, Homo sapiens
  misc_RNA (1)...(19): siRNA sense strand
caucgaaaggaccaaguaa

SEQ ID NO: 2585329 - RNA, 19 nt, Homo sapiens
  misc_RNA (1)...(19): siRNA sense strand
ucgaaaggaccaaguaaca

SEQ ID NO: 2585330 - RNA, 19 nt, Homo sapiens
  misc_RNA (1)...(19): siRNA sense strand
uugagaaagaugucagcaa

SEQ ID NO: 2585331 - RNA, 19 nt, Homo sapiens
  misc_RNA (1)...(19): siRNA sense strand
gaauauccuagcagaagaa

SEQ ID NO: 2585332 - RNA, 19 nt, Homo sapiens
  misc_RNA (1)...(19): siRNA sense strand
aguacagaaagcaaaguaa

SEQ ID NO: 2585333 - RNA, 19 nt, Homo sapiens
  misc_RNA (1)...(19): siRNA sense strand
ggaccaaguaacacagcuu

SEQ ID NO: 2585334 - RNA, 19 nt, Homo sapiens
  misc_RNA (1)...(19): siRNA sense strand
ccgagaagcaagggauaau

SEQ ID NO: 2585335 - RNA, 19 nt, Homo sapiens
  misc_RNA (1)...(19): siRNA sense strand
cgacuaaagcaaaguguuc

SEQ ID NO: 2585336 - RNA, 19 nt, Homo sapiens
  misc_RNA (1)...(19): siRNA sense strand
cagagacauaugaggaaga

SEQ ID NO: 2585337 - RNA, 19 nt, Homo sapiens
  misc_RNA (1)...(19): siRNA sense strand
aaucagugcgucagagaga

SEQ ID NO: 2585338 - RNA, 19 nt, Homo sapiens
  misc_RNA (1)...(19): siRNA sense strand
agacuuugaaugugccuaa

SEQ ID NO: 2585339 - RNA, 19 nt, Homo sapiens
  misc_RNA (1)...(19): siRNA sense strand
ugaguugacagaagagcaa

SEQ ID NO: 2585340 - RNA, 19 nt, Homo sapiens
  misc_RNA (1)...(19): siRNA sense strand
acuuaguacagaaagcaaa

SEQ ID NO: 2585341 - RNA, 19 nt, Homo sapiens
  misc_RNA (1)...(19): siRNA sense strand
ccagcaaauaucaagaauu

SEQ ID NO: 2585342 - RNA, 19 nt, Homo sapiens
  misc_RNA (1)...(19): siRNA sense strand
gauaaagucaagagugaac

SEQ ID NO: 2585343 - RNA, 19 nt, Homo sapiens
  misc_RNA (1)...(19): siRNA sense strand
acaaaagaacgaagugaau

SEQ ID NO: 2585344 - RNA, 19 nt, Homo sapiens
  misc_RNA (1)...(19): siRNA sense strand
acgaagaaucaaauggcau

SEQ ID NO: 2585345 - RNA, 19 nt, Homo sapiens
  misc_RNA (1)...(19): siRNA sense strand
ggugaaagacgauggacaa

SEQ ID NO: 2585346 - RNA, 19 nt, Homo sapiens
  misc_RNA (1)...(19): siRNA sense strand
uuauugagguggugcgaaa

SEQ ID NO: 2585347 - RNA, 19 nt, Homo sapiens
  misc_RNA (1)...(19): siRNA sense strand
agacaagaacaaaggagaa

SEQ ID NO: 2585348 - RNA, 19 nt, Homo sapiens
  misc_RNA (1)...(19): siRNA sense strand
ccaagaagcagaaagggaa

SEQ ID NO: 2585349 - RNA, 19 nt, Homo sapiens
  misc_RNA (1)...(19): siRNA sense strand
guaaagaagcuguggaucu

SEQ ID NO: 2585350 - RNA, 19 nt, Homo sapiens
  misc_RNA (1)...(19): siRNA sense strand
gcuuaaagagugucgaauu

SEQ ID NO: 2585351 - RNA, 19 nt, Homo sapiens
  misc_RNA (1)...(19): siRNA sense strand
agacaaugaauuaagggaa

SEQ ID NO: 2585352 - RNA, 19 nt, Homo sapiens
  misc_RNA (1)...(19): siRNA sense strand
cacaaagacaagagaauuu

SEQ ID NO: 2585353 - RNA, 19 nt, Homo sapiens
  misc_RNA (1)...(19): siRNA sense strand
ucgaaagacccuagccuua

SEQ ID NO: 2585354 - RNA, 19 nt, Homo sapiens
  misc_RNA (1)...(19): siRNA sense strand
auaacuugcuugugagauu

SEQ ID NO: 2585355 - RNA, 19 nt, Homo sapiens
  misc_RNA (1)...(19): siRNA sense strand
ggguaauaguuucuccaaa

SEQ ID NO: 2585356 - RNA, 19 nt, Homo sapiens
  misc_RNA (1)...(19): siRNA sense strand
guaacaucauggugaaaga

SEQ ID NO: 2585357 - RNA, 19 nt, Homo sapiens
  misc_RNA (1)...(19): siRNA sense strand
caagaaugcacaaagacaa

SEQ ID NO: 2585358 - RNA, 19 nt, Homo sapiens
  misc_RNA (1)...(19): siRNA sense strand
auuugaagaugauggcuaa

SEQ ID NO: 2585359 - RNA, 19 nt, Homo sapiens
  misc_RNA (1)...(19): siRNA sense strand
agcuagagacaaugaauua

SEQ ID NO: 2585360 - RNA, 19 nt, Homo sapiens
  misc_RNA (1)...(19): siRNA sense strand
ggcucaaagacaagaacaa

SEQ ID NO: 2585361 - RNA, 19 nt, Homo sapiens
  misc_RNA (1)...(19): siRNA sense strand
agcaagaggcuuuggagua

SEQ ID NO: 2585362 - RNA, 19 nt, Homo sapiens
  misc_RNA (1)...(19): siRNA sense strand
gacaagaacaaaggagaaa

SEQ ID NO: 2585363 - RNA, 19 nt, Homo sapiens
  misc_RNA (1)...(19): siRNA sense strand
aagcagaaagggaagaauu

SEQ ID NO: 2585364 - RNA, 19 nt, Homo sapiens
  misc_RNA (1)...(19): siRNA sense strand
cacaaaagguacagaugaa

SEQ ID NO: 2585365 - RNA, 19 nt, Homo sapiens
  misc_RNA (1)...(19): siRNA sense strand
ugguaaaguucccagauau

SEQ ID NO: 2585366 - RNA, 19 nt, Homo sapiens
  misc_RNA (1)...(19): siRNA sense strand
guauaaugcuugggaggau

SEQ ID NO: 2585367 - RNA, 19 nt, Homo sapiens
  misc_RNA (1)...(19): siRNA sense strand
gcucaaagacaagaacaaa

SEQ ID NO: 2585368 - RNA, 19 nt, Homo sapiens
  misc_RNA (1)...(19): siRNA sense strand
ccaagaaugcacaaagaca

SEQ ID NO: 2585369 - RNA, 19 nt, Homo sapiens
  misc_RNA (1)...(19): siRNA sense strand
acaaaugaaugaugcacau

SEQ ID NO: 2585370 - RNA, 19 nt, Homo sapiens
  misc_RNA (1)...(19): siRNA sense strand
ccacacaauuaaacagcau

SEQ ID NO: 2585371 - RNA, 19 nt, Homo sapiens
  misc_RNA (1)...(19): siRNA sense strand
cugccaaagcacauauaua

SEQ ID NO: 2585372 - RNA, 19 nt, Homo sapiens
  misc_RNA (1)...(19): siRNA sense strand
gccaaauaauaguggugau

SEQ ID NO: 2585373 - RNA, 19 nt, Homo sapiens
  misc_RNA (1)...(19): siRNA sense strand
ccaaauaauaguggugauu

SEQ ID NO: 2585374 - RNA, 19 nt, Homo sapiens
  misc_RNA (1)...(19): siRNA sense strand
ccaaauaaugacaagcaga

SEQ ID NO: 2585375 - RNA, 19 nt, Homo sapiens
  misc_RNA (1)...(19): siRNA sense strand
aagaugauggcuaaagaaa

SEQ ID NO: 2585376 - RNA, 19 nt, Homo sapiens
  misc_RNA (1)...(19): siRNA sense strand
auggaauucuagagaugaa

SEQ ID NO: 2585377 - RNA, 19 nt, Homo sapiens
  misc_RNA (1)...(19): siRNA sense strand
cagauguauugcuugguaa

SEQ ID NO: 2585378 - RNA, 19 nt, Homo sapiens
  misc_RNA (1)...(19): siRNA sense strand
caucaugguggcuggacaa

SEQ ID NO: 2585379 - RNA, 19 nt, Homo sapiens
  misc_RNA (1)...(19): siRNA sense strand
gggaaaaugacaaagaaca

SEQ ID NO: 2585380 - RNA, 19 nt, Homo sapiens
  misc_RNA (1)...(19): siRNA sense strand
gcucaaagcaauuucuaca

SEQ ID NO: 2585381 - RNA, 19 nt, Homo sapiens
  misc_RNA (1)...(19): siRNA sense strand
ggaugaaacacaaaaggua

SEQ ID NO: 2585382 - RNA, 19 nt, Homo sapiens
  misc_RNA (1)...(19): siRNA sense strand
gauuaguaaaggagcccaa

SEQ ID NO: 2585383 - RNA, 19 nt, Homo sapiens
  misc_RNA (1)...(19): siRNA sense strand
uaauugaaccaguaggcaa

SEQ ID NO: 2585384 - RNA, 19 nt, Homo sapiens
  misc_RNA (1)...(19): siRNA sense strand
aaagggugcuaaagaggaa

SEQ ID NO: 2585385 - RNA, 19 nt, Homo sapiens
  misc_RNA (1)...(19): siRNA sense strand
gguuucaggagauguguua

SEQ ID NO: 2585386 - RNA, 19 nt, Homo sapiens
  misc_RNA (1)...(19): siRNA sense strand
uggaaugaauggcugaauu

SEQ ID NO: 2585387 - RNA, 19 nt, Homo sapiens
  misc_RNA (1)...(19): siRNA sense strand
agauguauugcuugguaaa

SEQ ID NO: 2585388 - RNA, 19 nt, Homo sapiens
  misc_RNA (1)...(19): siRNA sense strand
gguucagcagugugguaaa

SEQ ID NO: 2585389 - RNA, 19 nt, Homo sapiens
  misc_RNA (1)...(19): siRNA sense strand
ggagaggaaggaugaaaca

SEQ ID NO: 2585390 - RNA, 19 nt, Homo sapiens
  misc_RNA (1)...(19): siRNA sense strand
ugcacaaagacaagagaau

SEQ ID NO: 2585391 - RNA, 19 nt, Homo sapiens
  misc_RNA (1)...(19): siRNA sense strand
agaacaaguaauugcugaa

SEQ ID NO: 2585392 - RNA, 19 nt, Homo sapiens
  misc_RNA (1)...(19): siRNA sense strand
auggaaugauagugacuuu

SEQ ID NO: 2585393 - RNA, 19 nt, Homo sapiens
  misc_RNA (1)...(19): siRNA sense strand
caucaguggcucaaagaca

SEQ ID NO: 2585394 - RNA, 19 nt, Homo sapiens
  misc_RNA (1)...(19): siRNA sense strand
acuaccaaauggaaugaua

SEQ ID NO: 2585395 - RNA, 19 nt, Homo sapiens
  misc_RNA (1)...(19): siRNA sense strand
aaugacaagcagaaguaua

SEQ ID NO: 2585396 - RNA, 19 nt, Homo sapiens
  misc_RNA (1)...(19): siRNA sense strand
gggagaacccagacaucau

SEQ ID NO: 2585397 - RNA, 19 nt, Homo sapiens
  misc_RNA (1)...(19): siRNA sense strand
uggugaaagacgauggaca

SEQ ID NO: 2585398 - RNA, 19 nt, Homo sapiens
  misc_RNA (1)...(19): siRNA sense strand
augccaaucucuucauaaa

SEQ ID NO: 2585399 - RNA, 19 nt, Homo sapiens
  misc_RNA (1)...(19): siRNA sense strand
cagauaugucagugauuga

SEQ ID NO: 2585400 - RNA, 19 nt, Homo sapiens
  misc_RNA (1)...(19): siRNA sense strand
cugaagaaagcauugacua

SEQ ID NO: 2585401 - RNA, 19 nt, Homo sapiens
  misc_RNA (1)...(19): siRNA sense strand
ggaaaagcucauuaacuua

SEQ ID NO: 2585402 - RNA, 19 nt, Homo sapiens
  misc_RNA (1)...(19): siRNA sense strand
gugcgaaauucucacacua

SEQ ID NO: 2585403 - RNA, 19 nt, Homo sapiens
  misc_RNA (1)...(19): siRNA sense strand
aggccgaaagggugcuaaa

SEQ ID NO: 2585404 - RNA, 19 nt, Homo sapiens
  misc_RNA (1)...(19): siRNA sense strand
gaguaacagacuagcuaga

SEQ ID NO: 2585405 - RNA, 19 nt, Homo sapiens
  misc_RNA (1)...(19): siRNA sense strand
augaaguagcccagaugua

SEQ ID NO: 2585406 - RNA, 19 nt, Homo sapiens
  misc_RNA (1)...(19): siRNA sense strand
caauuaaacagcaugcauu

SEQ ID NO: 2585407 - RNA, 19 nt, Homo sapiens
  misc_RNA (1)...(19): siRNA sense strand
gcgcaaauucagcgaggaa

SEQ ID NO: 2585408 - RNA, 19 nt, Homo sapiens
  misc_RNA (1)...(19): siRNA sense strand
agggaagagugaagaagaa

SEQ ID NO: 2585409 - RNA, 19 nt, Homo sapiens
  misc_RNA (1)...(19): siRNA sense strand
gcucagagguaucagggaa

SEQ ID NO: 2585410 - RNA, 19 nt, Homo sapiens
  misc_RNA (1)...(19): siRNA sense strand
gcaaauucagcgaggaaaa

SEQ ID NO: 2585411 - RNA, 19 nt, Homo sapiens
  misc_RNA (1)...(19): siRNA sense strand
ccuuauggcuguuuagcaa

SEQ ID NO: 2585412 - RNA, 19 nt, Homo sapiens
  misc_RNA (1)...(19): siRNA sense strand
cugucaaucaaguggaaua

SEQ ID NO: 2585413 - RNA, 19 nt, Homo sapiens
  misc_RNA (1)...(19): siRNA sense strand
acgaagaaaucaacgaaaa

SEQ ID NO: 2585414 - RNA, 19 nt, Homo sapiens
  misc_RNA (1)...(19): siRNA sense strand
ccacauugacuuuggacau

SEQ ID NO: 2585415 - RNA, 19 nt, Homo sapiens
  misc_RNA (1)...(19): siRNA sense strand
uugucuugguuaagggaaa

SEQ ID NO: 2585416 - RNA, 19 nt, Homo sapiens
  misc_RNA (1)...(19): siRNA sense strand
uggacauauucuuggaaau

SEQ ID NO: 2585417 - RNA, 19 nt, Homo sapiens
  misc_RNA (1)...(19): siRNA sense strand
uagaaagagcacuugguaa

SEQ ID NO: 2585418 - RNA, 19 nt, Homo sapiens
  misc_RNA (1)...(19): siRNA sense strand
gggauuggugacagacaua

SEQ ID NO: 2585419 - RNA, 19 nt, Homo sapiens
  misc_RNA (1)...(19): siRNA sense strand
gggaaggaggccaugcaua

SEQ ID NO: 2585420 - RNA, 19 nt, Homo sapiens
  misc_RNA (1)...(19): siRNA sense strand
acaagaaaugauugccaua

SEQ ID NO: 2585421 - RNA, 19 nt, Homo sapiens
  misc_RNA (1)...(19): siRNA sense strand
ccaaagggaaggaggccau

SEQ ID NO: 2585422 - RNA, 19 nt, Homo sapiens
  misc_RNA (1)...(19): siRNA sense strand
gcugcaagaucaagaaaau

SEQ ID NO: 2585423 - RNA, 19 nt, Homo sapiens
  misc_RNA (1)...(19): siRNA sense strand
cuuccuguauugaaagaaa

SEQ ID NO: 2585424 - RNA, 19 nt, Homo sapiens
  misc_RNA (1)...(19): siRNA sense strand
aaacagagccaaagggaag

SEQ ID NO: 2585425 - RNA, 19 nt, Homo sapiens
  misc_RNA (1)...(19): siRNA sense strand
gggaaauaaacuuaacaca

SEQ ID NO: 2585426 - RNA, 19 nt, Homo sapiens
  misc_RNA (1)...(19): siRNA sense strand
gugucauccuugaagcaua

SEQ ID NO: 2585427 - RNA, 19 nt, Homo sapiens
  misc_RNA (1)...(19): siRNA sense strand
auaacaagguauuugguga

SEQ ID NO: 2585428 - RNA, 19 nt, Homo sapiens
  misc_RNA (1)...(19): siRNA sense strand
ccuauuagaaagagcacuu

SEQ ID NO: 2585429 - RNA, 19 nt, Homo sapiens
  misc_RNA (1)...(19): siRNA sense strand
cagcgggagaguagaauau

SEQ ID NO: 2585430 - RNA, 19 nt, Homo sapiens
  misc_RNA (1)...(19): siRNA sense strand
ugaaaaggcagcugagauu

SEQ ID NO: 2585431 - RNA, 19 nt, Homo sapiens
  misc_RNA (1)...(19): siRNA sense strand
ugauagugcuaauguguca

SEQ ID NO: 2585432 - RNA, 19 nt, Homo sapiens
  misc_RNA (1)...(19): siRNA sense strand
cugaaugccgugaaguuaa

SEQ ID NO: 2585433 - RNA, 19 nt, Homo sapiens
  misc_RNA (1)...(19): siRNA sense strand
gguuaagggaaauaaacuu

SEQ ID NO: 2585434 - RNA, 19 nt, Homo sapiens
  misc_RNA (1)...(19): siRNA sense strand
cuuuaaaggacaauugaga

SEQ ID NO: 2585435 - RNA, 19 nt, Homo sapiens
  misc_RNA (1)...(19): siRNA sense strand
aagaagaagcacucaaaca

SEQ ID NO: 2585436 - RNA, 19 nt, Homo sapiens
  misc_RNA (1)...(19): siRNA sense strand
caucaggaaagcuggaaaa

SEQ ID NO: 2585437 - RNA, 19 nt, Homo sapiens
  misc_RNA (1)...(19): siRNA sense strand
ggugacagacauagugaca

SEQ ID NO: 2585438 - RNA, 19 nt, Homo sapiens
  misc_RNA (1)...(19): siRNA sense strand
ccgccaguguugugaggau

SEQ ID NO: 2585439 - RNA, 19 nt, Homo sapiens
  misc_RNA (1)...(19): siRNA sense strand
acaagacugccgagagauu

SEQ ID NO: 2585440 - RNA, 19 nt, Homo sapiens
  misc_RNA (1)...(19): siRNA sense strand
ugacagacauagugacaac

SEQ ID NO: 2585441 - RNA, 19 nt, Homo sapiens
  misc_RNA (1)...(19): siRNA sense strand
cuguauaugaggagcuuga

SEQ ID NO: 2585442 - RNA, 19 nt, Homo sapiens
  misc_RNA (1)...(19): siRNA sense strand
ccugaaaacuuagaagaua

SEQ ID NO: 2585443 - RNA, 19 nt, Homo sapiens
  misc_RNA (1)...(19): siRNA sense strand
ugccauaaaucgaaauuca

SEQ ID NO: 2585444 - RNA, 19 nt, Homo sapiens
  misc_RNA (1)...(19): siRNA sense strand
cucagagguaucagggaaa

SEQ ID NO: 2585445 - RNA, 19 nt, Homo sapiens
  misc_RNA (1)...(19): siRNA sense strand
gauguugacugcagggcuu

SEQ ID NO: 2585446 - RNA, 19 nt, Homo sapiens
  misc_RNA (1)...(19): siRNA sense strand
gugaagaagaagcacucaa

SEQ ID NO: 2585447 - RNA, 19 nt, Homo sapiens
  misc_RNA (1)...(19): siRNA sense strand
ccaucaggaaagcuggaaa

SEQ ID NO: 2585448 - RNA, 19 nt, Homo sapiens
  misc_RNA (1)...(19): siRNA sense strand
guggaauaaacuugaggau

SEQ ID NO: 2585449 - RNA, 19 nt, Homo sapiens
  misc_RNA (1)...(19): siRNA sense strand
cugaacuggcuuaaagaau

SEQ ID NO: 2585450 - RNA, 19 nt, Homo sapiens
  misc_RNA (1)...(19): siRNA sense strand
ggguaaauacgaugguuuu

SEQ ID NO: 2585451 - RNA, 19 nt, Homo sapiens
  misc_RNA (1)...(19): siRNA sense strand
caaaauuacugcugucaau

SEQ ID NO: 2585452 - RNA, 19 nt, Homo sapiens
  misc_RNA (1)...(19): siRNA sense strand
uaaacuuaacacagaggaa

SEQ ID NO: 2585453 - RNA, 19 nt, Homo sapiens
  misc_RNA (1)...(19): siRNA sense strand
ccucuaaauaucagaccau

SEQ ID NO: 2585454 - RNA, 19 nt, Homo sapiens
  misc_RNA (1)...(19): siRNA sense strand
gaacaagaaaugauugcca

SEQ ID NO: 2585455 - RNA, 19 nt, Homo sapiens
  misc_RNA (1)...(19): siRNA sense strand
ccaagaauggcucgauuau

SEQ ID NO: 2585456 - RNA, 19 nt, Homo sapiens
  misc_RNA (1)...(19): siRNA sense strand
ggaaauaaacuuaacacag

SEQ ID NO: 2585457 - RNA, 19 nt, Homo sapiens
  misc_RNA (1)...(19): siRNA sense strand
ccuugggauuggugacaga

SEQ ID NO: 2585458 - RNA, 19 nt, Homo sapiens
  misc_RNA (1)...(19): siRNA sense strand
ugucauucaacaaggaaaa

SEQ ID NO: 2585459 - RNA, 19 nt, Homo sapiens
  misc_RNA (1)...(19): siRNA sense strand
gggaaggaagaugaaguua

SEQ ID NO: 2585460 - RNA, 19 nt, Homo sapiens
  misc_RNA (1)...(19): siRNA sense strand
acaacuggugcaaguguua

SEQ ID NO: 2585461 - RNA, 19 nt, Homo sapiens
  misc_RNA (1)...(19): siRNA sense strand
uaaacagagccaaagggaa

SEQ ID NO: 2585462 - RNA, 19 nt, Homo sapiens
  misc_RNA (1)...(19): siRNA sense strand
ggaaaaggucugcaugaau

SEQ ID NO: 2585463 - RNA, 19 nt, Homo sapiens
  misc_RNA (1)...(19): siRNA sense strand
guugcaagucagcgggaga

SEQ ID NO: 2585464 - RNA, 19 nt, Homo sapiens
  misc_RNA (1)...(19): siRNA sense strand
guugaaaagugcaaauaca

SEQ ID NO: 2585465 - RNA, 19 nt, Homo sapiens
  misc_RNA (1)...(19): siRNA sense strand
agacauagugacaacauca

SEQ ID NO: 2585466 - RNA, 19 nt, Homo sapiens
  misc_RNA (1)...(19): siRNA sense strand
acaauuacccaauguucaa

SEQ ID NO: 2585467 - RNA, 19 nt, Homo sapiens
  misc_RNA (1)...(19): siRNA sense strand
uggaaugcugcaagaucaa

SEQ ID NO: 2585468 - RNA, 19 nt, Homo sapiens
  misc_RNA (1)...(19): siRNA sense strand
ggucagaugcagaagccau

SEQ ID NO: 2585469 - RNA, 19 nt, Homo sapiens
  misc_RNA (1)...(19): siRNA sense strand
gcuacauccagaagaucaa

SEQ ID NO: 2585470 - RNA, 19 nt, Homo sapiens
  misc_RNA (1)...(19): siRNA sense strand
gagaagaucacccggacca

SEQ ID NO: 2585471 - RNA, 19 nt, Homo sapiens
  misc_RNA (1)...(19): siRNA sense strand
aggcaggagagaaggacuu

SEQ ID NO: 2585472 - RNA, 19 nt, Homo sapiens
  misc_RNA (1)...(19): siRNA sense strand
gcuacauccagaagaucaa

SEQ ID NO: 2585473 - RNA, 19 nt, Homo sapiens
  misc_RNA (1)...(19): siRNA sense strand
agaaauucagacagagaaa

SEQ ID NO: 2585474 - RNA, 19 nt, Homo sapiens
  misc_RNA (1)...(19): siRNA sense strand
ugggauaacuauaggacau

SEQ ID NO: 2585475 - RNA, 19 nt, Homo sapiens
  misc_RNA (1)...(19): siRNA sense strand
aagaaagucaagagaggaa

SEQ ID NO: 2585476 - RNA, 19 nt, Homo sapiens
  misc_RNA (1)...(19): siRNA sense strand
agauuaaagcagugcaauu

SEQ ID NO: 2585477 - RNA, 19 nt, Homo sapiens
  misc_RNA (1)...(19): siRNA sense strand
ccgaguuaaugguggguuu

SEQ ID NO: 2585478 - RNA, 19 nt, Homo sapiens
  misc_RNA (1)...(19): siRNA sense strand
gaacauagacacagggaag

SEQ ID NO: 2585479 - RNA, 19 nt, Homo sapiens
  misc_RNA (1)...(19): siRNA sense strand
gguuaugcacauucggaaa

SEQ ID NO: 2585480 - RNA, 19 nt, Homo sapiens
  misc_RNA (1)...(19): siRNA sense strand
uggaagaagcaaaagaaaa

SEQ ID NO: 2585481 - RNA, 19 nt, Homo sapiens
  misc_RNA (1)...(19): siRNA sense strand
aagaaugggcacuuggaaa

SEQ ID NO: 2585482 - RNA, 19 nt, Homo sapiens
  misc_RNA (1)...(19): siRNA sense strand
augagaaggccuuggaaga

SEQ ID NO: 2585483 - RNA, 19 nt, Homo sapiens
  misc_RNA (1)...(19): siRNA sense strand
guccaagaaaugaagauaa

SEQ ID NO: 2585484 - RNA, 19 nt, Homo sapiens
  misc_RNA (1)...(19): siRNA sense strand
gggaagaggaagaacgucu

SEQ ID NO: 2585485 - RNA, 19 nt, Homo sapiens
  misc_RNA (1)...(19): siRNA sense strand
augaaacaugcuugggaua

SEQ ID NO: 2585486 - RNA, 19 nt, Homo sapiens
  misc_RNA (1)...(19): siRNA sense strand
ucggaaacuacuucagaaa

SEQ ID NO: 2585487 - RNA, 19 nt, Homo sapiens
  misc_RNA (1)...(19): siRNA sense strand
ucgauuuauuggaggccua

SEQ ID NO: 2585488 - RNA, 19 nt, Homo sapiens
  misc_RNA (1)...(19): siRNA sense strand
caagauuaaagcagugcaa

SEQ ID NO: 2585489 - RNA, 19 nt, Homo sapiens
  misc_RNA (1)...(19): siRNA sense strand
aggaauacgugguggagac

SEQ ID NO: 2585490 - RNA, 19 nt, Homo sapiens
  misc_RNA (1)...(19): siRNA sense strand
gcaugguugaugucagaua

SEQ ID NO: 2585491 - RNA, 19 nt, Homo sapiens
  misc_RNA (1)...(19): siRNA sense strand
uggucauuauuuagagcua

SEQ ID NO: 2585492 - RNA, 19 nt, Homo sapiens
  misc_RNA (1)...(19): siRNA sense strand
gauccaagauacaggcagu

SEQ ID NO: 2585493 - RNA, 19 nt, Homo sapiens
  misc_RNA (1)...(19): siRNA sense strand
agaaugggcacuuggaaaa

SEQ ID NO: 2585494 - RNA, 19 nt, Homo sapiens
  misc_RNA (1)...(19): siRNA sense strand
cagaacugcauuaaagcua

SEQ ID NO: 2585495 - RNA, 19 nt, Homo sapiens
  misc_RNA (1)...(19): siRNA sense strand
auaagagagaaaagggaaa

SEQ ID NO: 2585496 - RNA, 19 nt, Homo sapiens
  misc_RNA (1)...(19): siRNA sense strand
cauauuaccuaucaggaga

SEQ ID NO: 2585497 - RNA, 19 nt, Homo sapiens
  misc_RNA (1)...(19): siRNA sense strand
gacacagggaagaggaaga

SEQ ID NO: 2585498 - RNA, 19 nt, Homo sapiens
  misc_RNA (1)...(19): siRNA sense strand
gggauaacuauaggacaua

SEQ ID NO: 2585499 - RNA, 19 nt, Homo sapiens
  misc_RNA (1)...(19): siRNA sense strand
aggccuacuugcagcauau

SEQ ID NO: 2585500 - RNA, 19 nt, Homo sapiens
  misc_RNA (1)...(19): siRNA sense strand
gaaaaguggaguagggcga

SEQ ID NO: 2585501 - RNA, 19 nt, Homo sapiens
  misc_RNA (1)...(19): siRNA sense strand
aggccuuggaagaagcaaa

SEQ ID NO: 2585502 - RNA, 19 nt, Homo sapiens
  misc_RNA (1)...(19): siRNA sense strand
gaugaaacaugcuugggau

SEQ ID NO: 2585503 - RNA, 19 nt, Homo sapiens
  misc_RNA (1)...(19): siRNA sense strand
cagaccuauugcaaggaaa

SEQ ID NO: 2585504 - RNA, 19 nt, Homo sapiens
  misc_RNA (1)...(19): siRNA sense strand
auaagguaguccaagaaau

SEQ ID NO: 2585505 - RNA, 19 nt, Homo sapiens
  misc_RNA (1)...(19): siRNA sense strand
gggcagaaauugcacguac

SEQ ID NO: 2585506 - RNA, 19 nt, Homo sapiens
  misc_RNA (1)...(19): siRNA sense strand
aggcaagaaagauguauga

SEQ ID NO: 2585507 - RNA, 19 nt, Homo sapiens
  misc_RNA (1)...(19): siRNA sense strand
agugcaauuggcugagaaa

SEQ ID NO: 2585508 - RNA, 19 nt, Homo sapiens
  misc_RNA (1)...(19): siRNA sense strand
ccucucuggacguaggaua

SEQ ID NO: 2585509 - RNA, 19 nt, Homo sapiens
  misc_RNA (1)...(19): siRNA sense strand
gcagaugguuccagagcag

SEQ ID NO: 2585510 - RNA, 19 nt, Homo sapiens
  misc_RNA (1)...(19): siRNA sense strand
cauaagagagaaaagggaa

SEQ ID NO: 2585511 - RNA, 19 nt, Homo sapiens
  misc_RNA (1)...(19): siRNA sense strand
ggcugaauuugguacacua

SEQ ID NO: 2585512 - RNA, 19 nt, Homo sapiens
  misc_RNA (1)...(19): siRNA sense strand
aaacagaccaugaggcaag

SEQ ID NO: 2585513 - RNA, 19 nt, Homo sapiens
  misc_RNA (1)...(19): siRNA sense strand
cagaaauucagacagagaa

SEQ ID NO: 2585514 - RNA, 19 nt, Homo sapiens
  misc_RNA (1)...(19): siRNA sense strand
aggaaauucgagcagaaau

SEQ ID NO: 2585515 - RNA, 19 nt, Homo sapiens
  misc_RNA (1)...(19): siRNA sense strand
aagcagugcaauuggcuga

SEQ ID NO: 2585516 - RNA, 19 nt, Homo sapiens
  misc_RNA (1)...(19): siRNA sense strand
ugcaauuggcugagaaacu

SEQ ID NO: 2585517 - RNA, 19 nt, Homo sapiens
  misc_RNA (1)...(19): siRNA sense strand
ggcaauggugaauuugaaa

SEQ ID NO: 2585518 - RNA, 19 nt, Homo sapiens
  misc_RNA (1)...(19): siRNA sense strand
gaauuugaaaaguggagua

SEQ ID NO: 2585519 - RNA, 19 nt, Homo sapiens
  misc_RNA (1)...(19): siRNA sense strand
cguccagaaguaauugaaa

SEQ ID NO: 2585520 - RNA, 19 nt, Homo sapiens
  misc_RNA (1)...(19): siRNA sense strand
agguaguccaagaaaugaa

SEQ ID NO: 2585521 - RNA, 19 nt, Homo sapiens
  misc_RNA (1)...(19): siRNA sense strand
aguccaagaaaugaagaua

SEQ ID NO: 2585522 - RNA, 19 nt, Homo sapiens
  misc_RNA (1)...(19): siRNA sense strand
gagcagauaaagcugguca

SEQ ID NO: 2585523 - RNA, 19 nt, Homo sapiens
  misc_RNA (1)...(19): siRNA sense strand
gggaagcagcacuggccau

SEQ ID NO: 2585524 - RNA, 19 nt, Homo sapiens
  misc_RNA (1)...(19): siRNA sense strand
caccacacuuucagguaau

SEQ ID NO: 2585525 - RNA, 19 nt, Homo sapiens
  misc_RNA (1)...(19): siRNA sense strand
aaauaagguaguccaagaa

SEQ ID NO: 2585526 - RNA, 19 nt, Homo sapiens
  misc_RNA (1)...(19): siRNA sense strand
gugaaauacgggaccgaua

SEQ ID NO: 2585527 - RNA, 19 nt, Homo sapiens
  misc_RNA (1)...(19): siRNA sense strand
ccggucaguccgaggguaa

SEQ ID NO: 2585528 - RNA, 19 nt, Homo sapiens
  misc_RNA (1)...(19): siRNA sense strand
caucauaaagcgaggcgau

SEQ ID NO: 2585529 - RNA, 19 nt, Homo sapiens
  misc_RNA (1)...(19): siRNA sense strand
acccuaugaaugugaaaua

SEQ ID NO: 2585530 - RNA, 19 nt, Homo sapiens
  misc_RNA (1)...(19): siRNA sense strand
guaaagcgacccauugaaa

SEQ ID NO: 2585531 - RNA, 19 nt, Homo sapiens
  misc_RNA (1)...(19): siRNA sense strand
aguaauaauugaagccaag

SEQ ID NO: 2585532 - RNA, 19 nt, Homo sapiens
  misc_RNA (1)...(19): siRNA sense strand
uggaggaguaacuggauau

SEQ ID NO: 2585533 - RNA, 19 nt, Homo sapiens
  misc_RNA (1)...(19): siRNA sense strand
ggacccuaucaaugugaaa

SEQ ID NO: 2585534 - RNA, 19 nt, Homo sapiens
  misc_RNA (1)...(19): siRNA sense strand
gccuacaguggacgagaaa

SEQ ID NO: 2585535 - RNA, 19 nt, Homo sapiens
  misc_RNA (1)...(19): siRNA sense strand
guauauugcaggacccuau

SEQ ID NO: 2585536 - RNA, 19 nt, Homo sapiens
  misc_RNA (1)...(19): siRNA sense strand
ggaccgauaugguggcauc

SEQ ID NO: 2585537 - RNA, 19 nt, Homo sapiens
  misc_RNA (1)...(19): siRNA sense strand
caucugguacaaagggcaa

SEQ ID NO: 2585538 - RNA, 19 nt, Homo sapiens
  misc_RNA (1)...(19): siRNA sense strand
caccacugcccaaguaaua

SEQ ID NO: 2585539 - RNA, 19 nt, Homo sapiens
  misc_RNA (1)...(19): siRNA sense strand
accuacauuugguggcuaa

SEQ ID NO: 2585540 - RNA, 19 nt, Homo sapiens
  misc_RNA (1)...(19): siRNA sense strand
acccuaucaaugugaaaua

SEQ ID NO: 2585541 - RNA, 19 nt, Homo sapiens
  misc_RNA (1)...(19): siRNA sense strand
uggacgagaaacaguauau

SEQ ID NO: 2585542 - RNA, 19 nt, Homo sapiens
  misc_RNA (1)...(19): siRNA sense strand
acaccuuacacaucauaaa

SEQ ID NO: 2585543 - RNA, 19 nt, Homo sapiens
  misc_RNA (1)...(19): siRNA sense strand
ggacccuaugaaugugaaa

SEQ ID NO: 2585544 - RNA, 19 nt, Homo sapiens
  misc_RNA (1)...(19): siRNA sense strand
cgaagcugcccaugccuua

SEQ ID NO: 2585545 - RNA, 19 nt, Homo sapiens
  misc_RNA (1)...(19): siRNA sense strand
ugaaauacgggaccgauau

SEQ ID NO: 2585546 - RNA, 19 nt, Homo sapiens
  misc_RNA (1)...(19): siRNA sense strand
cuguaagugggauggauaa

SEQ ID NO: 2585547 - RNA, 19 nt, Homo sapiens
  misc_RNA (1)...(19): siRNA sense strand
aguaaaggucagacacauu

SEQ ID NO: 2585548 - RNA, 19 nt, Homo sapiens
  misc_RNA (1)...(19): siRNA sense strand
uauuauggucgaaggaaga

SEQ ID NO: 2585549 - RNA, 19 nt, Homo sapiens
  misc_RNA (1)...(19): siRNA sense strand
gaagauaaagccaggcaag

SEQ ID NO: 2585550 - RNA, 19 nt, Homo sapiens
  misc_RNA (1)...(19): siRNA sense strand
ggacaggccuucuacgaga

SEQ ID NO: 2585551 - RNA, 19 nt, Homo sapiens
  misc_RNA (1)...(19): siRNA sense strand
gcuucaaggagcugcagaa

SEQ ID NO: 2585552 - RNA, 19 nt, Homo sapiens
  misc_RNA (1)...(19): siRNA sense strand
acgaggagauugaggccuu

SEQ ID NO: 2585553 - RNA, 19 nt, Homo sapiens
  misc_RNA (1)...(19): siRNA sense strand
ucuucaaggaccagcgcaa

SEQ ID NO: 2585554 - RNA, 19 nt, Homo sapiens
  misc_RNA (1)...(19): siRNA sense strand
ucuacaaguugcaggagga

SEQ ID NO: 2585555 - RNA, 19 nt, Homo sapiens
  misc_RNA (1)...(19): siRNA sense strand
gcuccaagaaucaggaaac

SEQ ID NO: 2585556 - RNA, 19 nt, Homo sapiens
  misc_RNA (1)...(19): siRNA sense strand
cggcucaacaucaggguca

SEQ ID NO: 2585557 - RNA, 19 nt, Homo sapiens
  misc_RNA (1)...(19): siRNA sense strand
uggaggacgaggagauuga

SEQ ID NO: 2585558 - RNA, 19 nt, Homo sapiens
  misc_RNA (1)...(19): siRNA sense strand
agauggaggaugaggcagu

SEQ ID NO: 2585559 - RNA, 19 nt, Homo sapiens
  misc_RNA (1)...(19): siRNA sense strand
gcuccauggaccagcguca

SEQ ID NO: 2585560 - RNA, 19 nt, Homo sapiens
  misc_RNA (1)...(19): siRNA sense strand
cugagcaacugaaggggaa

SEQ ID NO: 2585561 - RNA, 19 nt, Homo sapiens
  misc_RNA (1)...(19): siRNA sense strand
aggacaacaagaugagcuu

SEQ ID NO: 2585562 - RNA, 19 nt, Homo sapiens
  misc_RNA (1)...(19): siRNA sense strand
acaccuaccugcuggagga

SEQ ID NO: 2585563 - RNA, 19 nt, Homo sapiens
  misc_RNA (1)...(19): siRNA sense strand
uggagaaguucgcccguga

SEQ ID NO: 2585564 - RNA, 19 nt, Homo sapiens
  misc_RNA (1)...(19): siRNA sense strand
agaucguggcccugaauuu

SEQ ID NO: 2585565 - RNA, 19 nt, Homo sapiens
  misc_RNA (1)...(19): siRNA sense strand
gcgcaauacacuagaccuc

SEQ ID NO: 2585566 - RNA, 19 nt, Homo sapiens
  misc_RNA (1)...(19): siRNA sense strand
ccaaaguaguaaaggagga

SEQ ID NO: 2585567 - RNA, 19 nt, Homo sapiens
  misc_RNA (1)...(19): siRNA sense strand
aagaaucagcagaaggaaa

SEQ ID NO: 2585568 - RNA, 19 nt, Homo sapiens
  misc_RNA (1)...(19): siRNA sense strand
aaguaguaaaggaggagaa

SEQ ID NO: 2585569 - RNA, 19 nt, Homo sapiens
  misc_RNA (1)...(19): siRNA sense strand
uaaaggaggagaaggccaa

SEQ ID NO: 2585570 - RNA, 19 nt, Homo sapiens
  misc_RNA (1)...(19): siRNA sense strand
guaaaggaggagaaggcca

SEQ ID NO: 2585571 - RNA, 19 nt, Homo sapiens
  misc_RNA (1)...(19): siRNA sense strand
ucgaaaccaaaguaguaaa

SEQ ID NO: 2585572 - RNA, 19 nt, Homo sapiens
  misc_RNA (1)...(19): siRNA sense strand
agaaauuaucaccaccaaa

SEQ ID NO: 2585573 - RNA, 19 nt, Homo sapiens
  misc_RNA (1)...(19): siRNA sense strand
uccaagaguccaagcaaaa

SEQ ID NO: 2585574 - RNA, 19 nt, Homo sapiens
  misc_RNA (1)...(19): siRNA sense strand
aguugaaacagccuugaaa

SEQ ID NO: 2585575 - RNA, 19 nt, Homo sapiens
  misc_RNA (1)...(19): siRNA sense strand
ucaucugauacuuggacua

SEQ ID NO: 2585576 - RNA, 19 nt, Homo sapiens
  misc_RNA (1)...(19): siRNA sense strand
ccuguaggcugcugggacu

SEQ ID NO: 2585577 - RNA, 19 nt, Homo sapiens
  misc_RNA (1)...(19): siRNA sense strand
cagaagaguccaagagucc

SEQ ID NO: 2585578 - RNA, 19 nt, Homo sapiens
  misc_RNA (1)...(19): siRNA sense strand
cagcagauguugaugggaa

SEQ ID NO: 2585579 - RNA, 19 nt, Homo sapiens
  misc_RNA (1)...(19): siRNA sense strand
ggaugaguuuauagggcaa

SEQ ID NO: 2585580 - RNA, 19 nt, Homo sapiens
  misc_RNA (1)...(19): siRNA sense strand
gggaagaaaguucgggaau

SEQ ID NO: 2585581 - RNA, 19 nt, Homo sapiens
  misc_RNA (1)...(19): siRNA sense strand
aaagaaggcuugaagggaa

SEQ ID NO: 2585582 - RNA, 19 nt, Homo sapiens
  misc_RNA (1)...(19): siRNA sense strand
gcgcaaauacaaagggcau

SEQ ID NO: 2585583 - RNA, 19 nt, Homo sapiens
  misc_RNA (1)...(19): siRNA sense strand
aagaaauccagaagagcaa

SEQ ID NO: 2585584 - RNA, 19 nt, Homo sapiens
  misc_RNA (1)...(19): siRNA sense strand
cgauguaagugaugguuca

SEQ ID NO: 2585585 - RNA, 19 nt, Homo sapiens
  misc_RNA (1)...(19): siRNA sense strand
gaaaauuagcagugcaaau

SEQ ID NO: 2585586 - RNA, 19 nt, Homo sapiens
  misc_RNA (1)...(19): siRNA sense strand
aggaaaguagugaggagaa

SEQ ID NO: 2585587 - RNA, 19 nt, Homo sapiens
  misc_RNA (1)...(19): siRNA sense strand
ucgaagugucauagaggua

SEQ ID NO: 2585588 - RNA, 19 nt, Homo sapiens
  misc_RNA (1)...(19): siRNA sense strand
gagaaguaacagaugaaga

SEQ ID NO: 2585589 - RNA, 19 nt, Homo sapiens
  misc_RNA (1)...(19): siRNA sense strand
ccgcgugaccgaagaggaa

SEQ ID NO: 2585590 - RNA, 19 nt, Homo sapiens
  misc_RNA (1)...(19): siRNA sense strand
caucauaaggagauacgaa

SEQ ID NO: 2585591 - RNA, 19 nt, Homo sapiens
  misc_RNA (1)...(19): siRNA sense strand
guacauuagagcuuugaaa

SEQ ID NO: 2585592 - RNA, 19 nt, Homo sapiens
  misc_RNA (1)...(19): siRNA sense strand
ccauagaggagaaggaaag

SEQ ID NO: 2585593 - RNA, 19 nt, Homo sapiens
  misc_RNA (1)...(19): siRNA sense strand
ugaucauugugaaaggaaa

SEQ ID NO: 2585594 - RNA, 19 nt, Homo sapiens
  misc_RNA (1)...(19): siRNA sense strand
aggagaaguaacagaugaa

SEQ ID NO: 2585595 - RNA, 19 nt, Homo sapiens
  misc_RNA (1)...(19): siRNA sense strand
gcuugauauuucugccaua

SEQ ID NO: 2585596 - RNA, 19 nt, Homo sapiens
  misc_RNA (1)...(19): siRNA sense strand
gcgcagucuuucagugaga

SEQ ID NO: 2585597 - RNA, 19 nt, Homo sapiens
  misc_RNA (1)...(19): siRNA sense strand
uggaagccauagaggagaa

SEQ ID NO: 2585598 - RNA, 19 nt, Homo sapiens
  misc_RNA (1)...(19): siRNA sense strand
cagauguguuagaaggaga

SEQ ID NO: 2585599 - RNA, 19 nt, Homo sapiens
  misc_RNA (1)...(19): siRNA sense strand
gccauagaggagaaggaaa

SEQ ID NO: 2585600 - RNA, 19 nt, Homo sapiens
  misc_RNA (1)...(19): siRNA sense strand
acggaaacauuuacaaaca

SEQ ID NO: 2585601 - RNA, 19 nt, Homo sapiens
  misc_RNA (1)...(19): siRNA sense strand
aagugaugguucagauaau

SEQ ID NO: 2585602 - RNA, 19 nt, Homo sapiens
  misc_RNA (1)...(19): siRNA sense strand
agaaguaacagaugaagau

SEQ ID NO: 2585603 - RNA, 19 nt, Homo sapiens
  misc_RNA (1)...(19): siRNA sense strand
gauuguacagugucagaaa

SEQ ID NO: 2585604 - RNA, 19 nt, Homo sapiens
  misc_RNA (1)...(19): siRNA sense strand
augaguacccagaggauuu

SEQ ID NO: 2585605 - RNA, 19 nt, Homo sapiens
  misc_RNA (1)...(19): siRNA sense strand
gcuuggaacauuacaguau

SEQ ID NO: 2585606 - RNA, 19 nt, Homo sapiens
  misc_RNA (1)...(19): siRNA sense strand
uguguuagaaggagaagua

SEQ ID NO: 2585607 - RNA, 19 nt, Homo sapiens
  misc_RNA (1)...(19): siRNA sense strand
cuaaaacuguacagcaaaa

SEQ ID NO: 2585608 - RNA, 19 nt, Homo sapiens
  misc_RNA (1)...(19): siRNA sense strand
uaaucgaaguggaggagga

SEQ ID NO: 2585609 - RNA, 19 nt, Homo sapiens
  misc_RNA (1)...(19): siRNA sense strand
gucuauaaugcgagaugaa

SEQ ID NO: 2585610 - RNA, 19 nt, Homo sapiens
  misc_RNA (1)...(19): siRNA sense strand
guuucuuacuucagcgcaa

SEQ ID NO: 2585611 - RNA, 19 nt, Homo sapiens
  misc_RNA (1)...(19): siRNA sense strand
gggaagaaaacucaacaaa

SEQ ID NO: 2585612 - RNA, 19 nt, Homo sapiens
  misc_RNA (1)...(19): siRNA sense strand
auccagaagagcaaggaaa

SEQ ID NO: 2585613 - RNA, 19 nt, Homo sapiens
  misc_RNA (1)...(19): siRNA sense strand
gugucauagagguaauaaa

SEQ ID NO: 2585614 - RNA, 19 nt, Homo sapiens
  misc_RNA (1)...(19): siRNA sense strand
gggcaauauacgauaccau

SEQ ID NO: 2585615 - RNA, 19 nt, Homo sapiens
  misc_RNA (1)...(19): siRNA sense strand
ggaaaagauuguacagugu

SEQ ID NO: 2585616 - RNA, 19 nt, Homo sapiens
  misc_RNA (1)...(19): siRNA sense strand
gaaggaaaguagugaggag

SEQ ID NO: 2585617 - RNA, 19 nt, Homo sapiens
  misc_RNA (1)...(19): siRNA sense strand
cagcugacaucaaugggua

SEQ ID NO: 2585618 - RNA, 19 nt, Homo sapiens
  misc_RNA (1)...(19): siRNA sense strand
gggaugaguuuauagggca

SEQ ID NO: 2585619 - RNA, 19 nt, Homo sapiens
  misc_RNA (1)...(19): siRNA sense strand
acacggaaacauuuacaaa

SEQ ID NO: 2585620 - RNA, 19 nt, Homo sapiens
  misc_RNA (1)...(19): siRNA sense strand
gaagccaagaucagguuaa

SEQ ID NO: 2585621 - RNA, 19 nt, Homo sapiens
  misc_RNA (1)...(19): siRNA sense strand
cgaacuuucugaagaggga

SEQ ID NO: 2585622 - RNA, 19 nt, Homo sapiens
  misc_RNA (1)...(19): siRNA sense strand
caacaaagcaacugagagc

SEQ ID NO: 2585623 - RNA, 19 nt, Homo sapiens
  misc_RNA (1)...(19): siRNA sense strand
gggauuauguuggaagaca

SEQ ID NO: 2585624 - RNA, 19 nt, Homo sapiens
  misc_RNA (1)...(19): siRNA sense strand
acacggaauuccagcggau

SEQ ID NO: 2585625 - RNA, 19 nt, Homo sapiens
  misc_RNA (1)...(19): siRNA sense strand
auucagcagauguggcaaa

SEQ ID NO: 2585626 - RNA, 19 nt, Homo sapiens
  misc_RNA (1)...(19): siRNA sense strand
gcgugaccgaagaggaauu

SEQ ID NO: 2585627 - RNA, 19 nt, Homo sapiens
  misc_RNA (1)...(19): siRNA sense strand
gcucaggaauaucggucuu

SEQ ID NO: 2585628 - RNA, 19 nt, Homo sapiens
  misc_RNA (1)...(19): siRNA sense strand
caggaauaucggucuuaaa

SEQ ID NO: 2585629 - RNA, 19 nt, Homo sapiens
  misc_RNA (1)...(19): siRNA sense strand
agcagauguugaugggaau

SEQ ID NO: 2585630 - RNA, 19 nt, Homo sapiens
  misc_RNA (1)...(19): siRNA sense strand
agaugaagaugaagaagcu

SEQ ID NO: 2585631 - RNA, 19 nt, Homo sapiens
  misc_RNA (1)...(19): siRNA sense strand
caucugggugucuggguua

SEQ ID NO: 2585632 - RNA, 19 nt, Homo sapiens
  misc_RNA (1)...(19): siRNA sense strand
gcuccuugccgcagcagaa

SEQ ID NO: 2585633 - RNA, 19 nt, Homo sapiens
  misc_RNA (1)...(19): siRNA sense strand
cgguagauuacaaugguga

SEQ ID NO: 2585634 - RNA, 19 nt, Homo sapiens
  misc_RNA (1)...(19): siRNA sense strand
aacuaaaacuguacagcaa

SEQ ID NO: 2585635 - RNA, 19 nt, Homo sapiens
  misc_RNA (1)...(19): siRNA sense strand
uuacaguauugaagggcca

SEQ ID NO: 2585636 - RNA, 19 nt, Homo sapiens
  misc_RNA (1)...(19): siRNA sense strand
guagugaggagaaugggaa

SEQ ID NO: 2585637 - RNA, 19 nt, Homo sapiens
  misc_RNA (1)...(19): siRNA sense strand
ccuaaaaccaggagaagaa

SEQ ID NO: 2585638 - RNA, 19 nt, Homo sapiens
  misc_RNA (1)...(19): siRNA sense strand
cagaugaagaagauaccaa

SEQ ID NO: 2585639 - RNA, 19 nt, Homo sapiens
  misc_RNA (1)...(19): siRNA sense strand
gcucgcggucaaugggaaa

SEQ ID NO: 2585640 - RNA, 19 nt, Homo sapiens
  misc_RNA (1)...(19): siRNA sense strand
agaugcacuuagagaugaa

SEQ ID NO: 2585641 - RNA, 19 nt, Homo sapiens
  misc_RNA (1)...(19): siRNA sense strand
gcauccugcucgcggucaa

SEQ ID NO: 2585642 - RNA, 19 nt, Homo sapiens
  misc_RNA (1)...(19): siRNA sense strand
aauauuugcugguagggau

SEQ ID NO: 2585643 - RNA, 19 nt, Homo sapiens
  misc_RNA (1)...(19): siRNA sense strand
auggagaguguucgagaau

SEQ ID NO: 2585644 - RNA, 19 nt, Homo sapiens
  misc_RNA (1)...(19): siRNA sense strand
ggagaugagagcuggguga

SEQ ID NO: 2585645 - RNA, 19 nt, Homo sapiens
  misc_RNA (1)...(19): siRNA sense strand
gggagcagccaaaggaaaa

SEQ ID NO: 2585646 - RNA, 19 nt, Homo sapiens
  misc_RNA (1)...(19): siRNA sense strand
ggacaagugaagagcagca

SEQ ID NO: 2585647 - RNA, 19 nt, Homo sapiens
  misc_RNA (1)...(19): siRNA sense strand
uguuuggaaauaagggaaa

SEQ ID NO: 2585648 - RNA, 19 nt, Homo sapiens
  misc_RNA (1)...(19): siRNA sense strand
gcgaagacacagugcggga

SEQ ID NO: 2585649 - RNA, 19 nt, Homo sapiens
  misc_RNA (1)...(19): siRNA sense strand
ccaauggaggagagagcau

SEQ ID NO: 2585650 - RNA, 19 nt, Homo sapiens
  misc_RNA (1)...(19): siRNA sense strand
gagcaggauuacaggguug

SEQ ID NO: 2585651 - RNA, 19 nt, Homo sapiens
  misc_RNA (1)...(19): siRNA sense strand
gcaagaaacuguucgaggu

SEQ ID NO: 2585652 - RNA, 19 nt, Homo sapiens
  misc_RNA (1)...(19): siRNA sense strand
gugacagacaugugcaaga

SEQ ID NO: 2585653 - RNA, 19 nt, Homo sapiens
  misc_RNA (1)...(19): siRNA sense strand
ggagagagcaugccgggau

SEQ ID NO: 2585654 - RNA, 19 nt, Homo sapiens
  misc_RNA (1)...(19): siRNA sense strand
agacaaaggagaugagagc

SEQ ID NO: 2585655 - RNA, 19 nt, Homo sapiens
  misc_RNA (1)...(19): siRNA sense strand
ccaagaucacugugcaaaa

SEQ ID NO: 2585656 - RNA, 19 nt, Homo sapiens
  misc_RNA (1)...(19): siRNA sense strand
cgaaccaacagauggguca

SEQ ID NO: 2585657 - RNA, 19 nt, Homo sapiens
  misc_RNA (1)...(19): siRNA sense strand
agaaacuguucgaggugga

SEQ ID NO: 2585658 - RNA, 19 nt, Homo sapiens
  misc_RNA (1)...(19): siRNA sense strand
acacaggagaggcuagcaa

SEQ ID NO: 2585659 - RNA, 19 nt, Homo sapiens
  misc_RNA (1)...(19): siRNA sense strand
ugggagcagccaaaggaaa

SEQ ID NO: 2585660 - RNA, 19 nt, Homo sapiens
  misc_RNA (1)...(19): siRNA sense strand
agugaagagcagcagaaau

SEQ ID NO: 2585661 - RNA, 19 nt, Homo sapiens
  misc_RNA (1)...(19): siRNA sense strand
gcuucauagacaaaggaga

SEQ ID NO: 2585662 - RNA, 19 nt, Homo sapiens
  misc_RNA (1)...(19): siRNA sense strand
gggugacagacaugugcaa

SEQ ID NO: 2585663 - RNA, 19 nt, Homo sapiens
  misc_RNA (1)...(19): siRNA sense strand
ucgagguggaggaggugaa

SEQ ID NO: 2585664 - RNA, 19 nt, Homo sapiens
  misc_RNA (1)...(19): siRNA sense strand
uaaauuugcuggcaggaca

SEQ ID NO: 2585665 - RNA, 19 nt, Homo sapiens
  misc_RNA (1)...(19): siRNA sense strand
caccaagaucacugugcaa

SEQ ID NO: 2585666 - RNA, 19 nt, Homo sapiens
  misc_RNA (1)...(19): siRNA sense strand
agggagaagagaagacagu

SEQ ID NO: 2585667 - RNA, 19 nt, Homo sapiens
  misc_RNA (1)...(19): siRNA sense strand
acaaaggagaugagagcug

SEQ ID NO: 2585668 - RNA, 19 nt, Homo sapiens
  misc_RNA (1)...(19): siRNA sense strand
ggaaauaagggaaacacuc

SEQ ID NO: 2585669 - RNA, 19 nt, Homo sapiens
  misc_RNA (1)...(19): siRNA sense strand
cuggagaggcaggaagcaa

SEQ ID NO: 2585670 - RNA, 19 nt, Homo sapiens
  misc_RNA (1)...(19): siRNA sense strand
ggaaguuucugguggagga

SEQ ID NO: 2585671 - RNA, 19 nt, Homo sapiens
  misc_RNA (1)...(19): siRNA sense strand
guggagugggagugaagaa

SEQ ID NO: 2585672 - RNA, 19 nt, Homo sapiens
  misc_RNA (1)...(19): siRNA sense strand
guaaauacauacacccaga

SEQ ID NO: 2585673 - RNA, 19 nt, Homo sapiens
  misc_RNA (1)...(19): siRNA sense strand
aguuucugguggaggacua

SEQ ID NO: 2585674 - RNA, 19 nt, Homo sapiens
  misc_RNA (1)...(19): siRNA sense strand
ggguuauccucgcuggcaa

SEQ ID NO: 2585675 - RNA, 19 nt, Homo sapiens
  misc_RNA (1)...(19): siRNA sense strand
gggcagaggacgaugaccu

SEQ ID NO: 2585676 - RNA, 19 nt, Homo sapiens
  misc_RNA (1)...(19): siRNA sense strand
aggucagcgaggagcacaa

SEQ ID NO: 2585677 - RNA, 19 nt, Homo sapiens
  misc_RNA (1)...(19): siRNA sense strand
gaguaaauacauacaccca

SEQ ID NO: 2585678 - RNA, 19 nt, Homo sapiens
  misc_RNA (1)...(19): siRNA sense strand
ccaagaaguuucagggcaa

SEQ ID NO: 2585679 - RNA, 19 nt, Homo sapiens
  misc_RNA (1)...(19): siRNA sense strand
cagaaaggguugugagcga
